United States Patent Application Publication US 2015/0232836 A1 - sequence listing, part 29

SEQ ID NO: 1089471 - DNA, 15 bp, Homo sapiens
cttaaagtttgtgcc

SEQ ID NO: 1089472 - DNA, 15 bp, Homo sapiens
ccttaaagtttgtgc

SEQ ID NO: 1089473 - DNA, 15 bp, Homo sapiens
cccttaaagtttgtg

SEQ ID NO: 1089474 - DNA, 15 bp, Homo sapiens
ccccttaaagtttgt

SEQ ID NO: 1089475 - DNA, 15 bp, Homo sapiens
accccttaaagtttg

SEQ ID NO: 1089476 - DNA, 15 bp, Homo sapiens
gaccccttaaagttt

SEQ ID NO: 1089477 - DNA, 15 bp, Homo sapiens
tgaccccttaaagtt

SEQ ID NO: 1089478 - DNA, 15 bp, Homo sapiens
gtgaccccttaaagt

SEQ ID NO: 1089479 - DNA, 15 bp, Homo sapiens
ggtgaccccttaaag

SEQ ID NO: 1089480 - DNA, 15 bp, Homo sapiens
tggtgaccccttaaa

SEQ ID NO: 1089481 - DNA, 15 bp, Homo sapiens
ctggtgaccccttaa

SEQ ID NO: 1089482 - DNA, 15 bp, Homo sapiens
tctggtgacccctta

SEQ ID NO: 1089483 - DNA, 15 bp, Homo sapiens
ttctggtgacccctt

SEQ ID NO: 1089484 - DNA, 15 bp, Homo sapiens
tttctggtgacccct

SEQ ID NO: 1089485 - DNA, 15 bp, Homo sapiens
gtttctggtgacccc

SEQ ID NO: 1089486 - DNA, 15 bp, Homo sapiens
tgtttctggtgaccc

SEQ ID NO: 1089487 - DNA, 15 bp, Homo sapiens
atgtttctggtgacc

SEQ ID NO: 1089488 - DNA, 15 bp, Homo sapiens
gatgtttctggtgac

SEQ ID NO: 1089489 - DNA, 15 bp, Homo sapiens
tgatgtttctggtga

SEQ ID NO: 1089490 - DNA, 15 bp, Homo sapiens
ttgatgtttctggtg

SEQ ID NO: 1089491 - DNA, 15 bp, Homo sapiens
attgatgtttctggt

SEQ ID NO: 1089492 - DNA, 15 bp, Homo sapiens
gattgatgtttctgg

SEQ ID NO: 1089493 - DNA, 15 bp, Homo sapiens
tgattgatgtttctg

SEQ ID NO: 1089494 - DNA, 15 bp, Homo sapiens
atgattgatgtttct

SEQ ID NO: 1089495 - DNA, 15 bp, Homo sapiens
gatgattgatgtttc

SEQ ID NO: 1089496 - DNA, 15 bp, Homo sapiens
tgatgattgatgttt

SEQ ID NO: 1089497 - DNA, 15 bp, Homo sapiens
ttgatgattgatgtt

SEQ ID NO: 1089498 - DNA, 15 bp, Homo sapiens
cttgatgattgatgt

SEQ ID NO: 1089499 - DNA, 15 bp, Homo sapiens
tcttgatgattgatg

SEQ ID NO: 1089500 - DNA, 15 bp, Homo sapiens
atcttgatgattgat

SEQ ID NO: 1089501 - DNA, 15 bp, Homo sapiens
tatcttgatgattga

SEQ ID NO: 1089502 - DNA, 15 bp, Homo sapiens
atatcttgatgattg

SEQ ID NO: 1089503 - DNA, 15 bp, Homo sapiens
tatatcttgatgatt

SEQ ID NO: 1089504 - DNA, 15 bp, Homo sapiens
atatatcttgatgat

SEQ ID NO: 1089505 - DNA, 15 bp, Homo sapiens
catatatcttgatga

SEQ ID NO: 1089506 - DNA, 15 bp, Homo sapiens
gcatatatcttgatg

SEQ ID NO: 1089507 - DNA, 15 bp, Homo sapiens
agcatatatcttgat

SEQ ID NO: 1089508 - DNA, 15 bp, Homo sapiens
tagcatatatcttga

SEQ ID NO: 1089509 - DNA, 15 bp, Homo sapiens
atagcatatatcttg

SEQ ID NO: 1089510 - DNA, 15 bp, Homo sapiens
aatagcatatatctt

SEQ ID NO: 1089511 - DNA, 15 bp, Homo sapiens
aaatagcatatatct

SEQ ID NO: 1089512 - DNA, 15 bp, Homo sapiens
aaaatagcatatatc

SEQ ID NO: 1089513 - DNA, 15 bp, Homo sapiens
taaaatagcatatat

SEQ ID NO: 1089514 - DNA, 15 bp, Homo sapiens
ttaaaatagcatata

SEQ ID NO: 1089515 - DNA, 15 bp, Homo sapiens
tttaaaatagcatat

SEQ ID NO: 1089516 - DNA, 15 bp, Homo sapiens
atttaaaatagcata

SEQ ID NO: 1089517 - DNA, 15 bp, Homo sapiens
tatttaaaatagcat

SEQ ID NO: 1089518 - DNA, 15 bp, Homo sapiens
ttatttaaaatagca

SEQ ID NO: 1089519 - DNA, 15 bp, Homo sapiens
attatttaaaatagc

SEQ ID NO: 1089520 - DNA, 15 bp, Homo sapiens
gattatttaaaatag

SEQ ID NO: 1089521 - DNA, 15 bp, Homo sapiens
tgattatttaaaata

SEQ ID NO: 1089522 - DNA, 15 bp, Homo sapiens
ttgattatttaaaat

SEQ ID NO: 1089523 - DNA, 15 bp, Homo sapiens
tttgattatttaaaa

SEQ ID NO: 1089524 - DNA, 15 bp, Homo sapiens
ttttgattatttaaa

SEQ ID NO: 1089525 - DNA, 15 bp, Homo sapiens
attttgattatttaa

SEQ ID NO: 1089526 - DNA, 15 bp, Homo sapiens
cattttgattattta

SEQ ID NO: 1089527 - DNA, 15 bp, Homo sapiens
tcattttgattattt

SEQ ID NO: 1089528 - DNA, 15 bp, Homo sapiens
ttcattttgattatt

SEQ ID NO: 1089529 - DNA, 15 bp, Homo sapiens
attcattttgattat

SEQ ID NO: 1089530 - DNA, 15 bp, Homo sapiens
cattcattttgatta

SEQ ID NO: 1089531 - DNA, 15 bp, Homo sapiens
gcattcattttgatt

SEQ ID NO: 1089532 - DNA, 15 bp, Homo sapiens
tgcattcattttgat

SEQ ID NO: 1089533 - DNA, 15 bp, Homo sapiens
ttgcattcattttga

SEQ ID NO: 1089534 - DNA, 15 bp, Homo sapiens
tttgcattcattttg

SEQ ID NO: 1089535 - DNA, 15 bp, Homo sapiens
ttttgcattcatttt

SEQ ID NO: 1089536 - DNA, 15 bp, Homo sapiens
tttttgcattcattt

SEQ ID NO: 1089537 - DNA, 15 bp, Homo sapiens
ttttttgcattcatt

SEQ ID NO: 1089538 - DNA, 15 bp, Homo sapiens
tttttttgcattcat

SEQ ID NO: 1089539 - DNA, 15 bp, Homo sapiens
ttttttttgcattca

SEQ ID NO: 1089540 - DNA, 15 bp, Homo sapiens
attttttttgcattc

SEQ ID NO: 1089541 - DNA, 15 bp, Homo sapiens
aattttttttgcatt

SEQ ID NO: 1089542 - DNA, 15 bp, Homo sapiens
aaattttttttgcat

SEQ ID NO: 1089543 - DNA, 15 bp, Homo sapiens
taaattttttttgca

SEQ ID NO: 1089544 - DNA, 15 bp, Homo sapiens
ataaattttttttgc

SEQ ID NO: 1089545 - DNA, 15 bp, Homo sapiens
cataaattttttttg

SEQ ID NO: 1089546 - DNA, 15 bp, Homo sapiens
tcataaatttttttt

SEQ ID NO: 1089547 - DNA, 15 bp, Homo sapiens
atcataaattttttt

SEQ ID NO: 1089548 - DNA, 15 bp, Homo sapiens
catcataaatttttt

SEQ ID NO: 1089549 - DNA, 15 bp, Homo sapiens
ccatcataaattttt

SEQ ID NO: 1089550 - DNA, 15 bp, Homo sapiens
tccatcataaatttt

SEQ ID NO: 1089551 - DNA, 15 bp, Homo sapiens
gtccatcataaattt

SEQ ID NO: 1089552 - DNA, 15 bp, Homo sapiens
tgtccatcataaatt

SEQ ID NO: 1089553 - DNA, 15 bp, Homo sapiens
ttgtccatcataaat

SEQ ID NO: 1089554 - DNA, 15 bp, Homo sapiens
gttgtccatcataaa

SEQ ID NO: 1089555 - DNA, 15 bp, Homo sapiens
tgttgtccatcataa

SEQ ID NO: 1089556 - DNA, 15 bp, Homo sapiens
atgttgtccatcata

SEQ ID NO: 1089557 - DNA, 15 bp, Homo sapiens
tatgttgtccatcat

SEQ ID NO: 1089558 - DNA, 15 bp, Homo sapiens
gtatgttgtccatca

SEQ ID NO: 1089559 - DNA, 15 bp, Homo sapiens
ggtatgttgtccatc

SEQ ID NO: 1089560 - DNA, 15 bp, Homo sapiens
tggtatgttgtccat

SEQ ID NO: 1089561 - DNA, 15 bp, Homo sapiens
ttggtatgttgtcca

SEQ ID NO: 1089562 - DNA, 15 bp, Homo sapiens
tttggtatgttgtcc

SEQ ID NO: 1089563 - DNA, 15 bp, Homo sapiens
atttggtatgttgtc

SEQ ID NO: 1089564 - DNA, 15 bp, Homo sapiens
aatttggtatgttgt

SEQ ID NO: 1089565 - DNA, 15 bp, Homo sapiens
gaatttggtatgttg

SEQ ID NO: 1089566 - DNA, 15 bp, Homo sapiens
agaatttggtatgtt

SEQ ID NO: 1089567 - DNA, 15 bp, Homo sapiens
tagaatttggtatgt

SEQ ID NO: 1089568 - DNA, 15 bp, Homo sapiens
ttagaatttggtatg

SEQ ID NO: 1089569 - DNA, 15 bp, Homo sapiens
tttagaatttggtat

SEQ ID NO: 1089570 - DNA, 15 bp, Homo sapiens
gtttagaatttggta

SEQ ID NO: 1089571 - DNA, 15 bp, Homo sapiens
tgtttagaatttggt

SEQ ID NO: 1089572 - DNA, 15 bp, Homo sapiens
ttgtttagaatttgg

SEQ ID NO: 1089573 - DNA, 15 bp, Homo sapiens
tttgtttagaatttg

SEQ ID NO: 1089574 - DNA, 15 bp, Homo sapiens
ctttgtttagaattt

SEQ ID NO: 1089575 - DNA, 15 bp, Homo sapiens
cctttgtttagaatt

SEQ ID NO: 1089576 - DNA, 15 bp, Homo sapiens
gcctttgtttagaat

SEQ ID NO: 1089577 - DNA, 15 bp, Homo sapiens
tgcctttgtttagaa

SEQ ID NO: 1089578 - DNA, 15 bp, Homo sapiens
ctgcctttgtttaga

SEQ ID NO: 1089579 - DNA, 15 bp, Homo sapiens
cctgcctttgtttag

SEQ ID NO: 1089580 - DNA, 15 bp, Homo sapiens
tcctgcctttgttta

SEQ ID NO: 1089581 - DNA, 15 bp, Homo sapiens
atcctgcctttgttt

SEQ ID NO: 1089582 - DNA, 15 bp, Homo sapiens
catcctgcctttgtt

SEQ ID NO: 1089583 - DNA, 15 bp, Homo sapiens
tcatcctgcctttgt

SEQ ID NO: 1089584 - DNA, 15 bp, Homo sapiens
ctcatcctgcctttg

SEQ ID NO: 1089585 - DNA, 15 bp, Homo sapiens
actcatcctgccttt

SEQ ID NO: 1089586 - DNA, 15 bp, Homo sapiens
tactcatcctgcctt

SEQ ID NO: 1089587 - DNA, 15 bp, Homo sapiens
atactcatcctgcct

SEQ ID NO: 1089588 - DNA, 15 bp, Homo sapiens
gatactcatcctgcc

SEQ ID NO: 1089589 - DNA, 15 bp, Homo sapiens
tgatactcatcctgc

SEQ ID NO: 1089590 - DNA, 15 bp, Homo sapiens
gtgatactcatcctg

SEQ ID NO: 1089591 - DNA, 15 bp, Homo sapiens
agtgatactcatcct

SEQ ID NO: 1089592 - DNA, 15 bp, Homo sapiens
cagtgatactcatcc

SEQ ID NO: 1089593 - DNA, 15 bp, Homo sapiens
ccagtgatactcatc

SEQ ID NO: 1089594 - DNA, 15 bp, Homo sapiens
gccagtgatactcat

SEQ ID NO: 1089595 - DNA, 15 bp, Homo sapiens
agccagtgatactca

SEQ ID NO: 1089596 - DNA, 15 bp, Homo sapiens
aagccagtgatactc

SEQ ID NO: 1089597 - DNA, 15 bp, Homo sapiens
gaagccagtgatact

SEQ ID NO: 1089598 - DNA, 15 bp, Homo sapiens
agaagccagtgatac

SEQ ID NO: 1089599 - DNA, 15 bp, Homo sapiens
cagaagccagtgata

SEQ ID NO: 1089600 - DNA, 15 bp, Homo sapiens
gcagaagccagtgat

SEQ ID NO: 1089601 - DNA, 15 bp, Homo sapiens
tgcagaagccagtga

SEQ ID NO: 1089602 - DNA, 15 bp, Homo sapiens
gtgcagaagccagtg

SEQ ID NO: 1089603 - DNA, 15 bp, Homo sapiens
agtgcagaagccagt

SEQ ID NO: 1089604 - DNA, 15 bp, Homo sapiens
aagtgcagaagccag

SEQ ID NO: 1089605 - DNA, 15 bp, Homo sapiens
aaagtgcagaagcca

SEQ ID NO: 1089606 - DNA, 15 bp, Homo sapiens
aaaagtgcagaagcc

SEQ ID NO: 1089607 - DNA, 15 bp, Homo sapiens
gaaaagtgcagaagc

SEQ ID NO: 1089608 - DNA, 15 bp, Homo sapiens
agaaaagtgcagaag

SEQ ID NO: 1089609 - DNA, 15 bp, Homo sapiens
gagaaaagtgcagaa

SEQ ID NO: 1089610 - DNA, 15 bp, Homo sapiens
ggagaaaagtgcaga

SEQ ID NO: 1089611 - DNA, 15 bp, Homo sapiens
tggagaaaagtgcag

SEQ ID NO: 1089612 - DNA, 15 bp, Homo sapiens
gtggagaaaagtgca

SEQ ID NO: 1089613 - DNA, 15 bp, Homo sapiens
ggtggagaaaagtgc

SEQ ID NO: 1089614 - DNA, 15 bp, Homo sapiens
gggtggagaaaagtg

SEQ ID NO: 1089615 - DNA, 15 bp, Homo sapiens
tgggtggagaaaagt

SEQ ID NO: 1089616 - DNA, 15 bp, Homo sapiens
ctgggtggagaaaag

SEQ ID NO: 1089617 - DNA, 15 bp, Homo sapiens
actgggtggagaaaa

SEQ ID NO: 1089618 - DNA, 15 bp, Homo sapiens
gactgggtggagaaa

SEQ ID NO: 1089619 - DNA, 15 bp, Homo sapiens
agactgggtggagaa

SEQ ID NO: 1089620 - DNA, 15 bp, Homo sapiens
tagactgggtggaga

SEQ ID NO: 1089621 - DNA, 15 bp, Homo sapiens
gtagactgggtggag

SEQ ID NO: 1089622 - DNA, 15 bp, Homo sapiens
ggtagactgggtgga

SEQ ID NO: 1089623 - DNA, 15 bp, Homo sapiens
gggtagactgggtgg

SEQ ID NO: 1089624 - DNA, 15 bp, Homo sapiens
ggggtagactgggtg

SEQ ID NO: 1089625 - DNA, 15 bp, Homo sapiens
aggggtagactgggt

SEQ ID NO: 1089626 - DNA, 15 bp, Homo sapiens
gaggggtagactggg

SEQ ID NO: 1089627 - DNA, 15 bp, Homo sapiens
agaggggtagactgg

SEQ ID NO: 1089628 - DNA, 15 bp, Homo sapiens
aagaggggtagactg

SEQ ID NO: 1089629 - DNA, 15 bp, Homo sapiens
gaagaggggtagact

SEQ ID NO: 1089630 - DNA, 15 bp, Homo sapiens
agaagaggggtagac

SEQ ID NO: 1089631 - DNA, 15 bp, Homo sapiens
tagaagaggggtaga

SEQ ID NO: 1089632 - DNA, 15 bp, Homo sapiens
ctagaagaggggtag

SEQ ID NO: 1089633 - DNA, 15 bp, Homo sapiens
actagaagaggggta

SEQ ID NO: 1089634 - DNA, 15 bp, Homo sapiens
cactagaagaggggt

SEQ ID NO: 1089635 - DNA, 15 bp, Homo sapiens
gcactagaagagggg

SEQ ID NO: 1089636 - DNA, 15 bp, Homo sapiens
ggcactagaagaggg

SEQ ID NO: 1089637 - DNA, 15 bp, Homo sapiens
aggcactagaagagg

SEQ ID NO: 1089638 - DNA, 15 bp, Homo sapiens
caggcactagaagag

SEQ ID NO: 1089639 - DNA, 15 bp, Homo sapiens
ccaggcactagaaga

SEQ ID NO: 1089640 - DNA, 15 bp, Homo sapiens
tccaggcactagaag

SEQ ID NO: 1089641 - DNA, 15 bp, Homo sapiens
atccaggcactagaa

SEQ ID NO: 1089642 - DNA, 15 bp, Homo sapiens
gatccaggcactaga

SEQ ID NO: 1089643 - DNA, 15 bp, Homo sapiens
cgatccaggcactag

SEQ ID NO: 1089644 - DNA, 15 bp, Homo sapiens
gcgatccaggcacta

SEQ ID NO: 1089645 - DNA, 15 bp, Homo sapiens
tgcgatccaggcact

SEQ ID NO: 1089646 - DNA, 15 bp, Homo sapiens
ctgcgatccaggcac

SEQ ID NO: 1089647 - DNA, 15 bp, Homo sapiens
cctgcgatccaggca

SEQ ID NO: 1089648 - DNA, 15 bp, Homo sapiens
ccctgcgatccaggc

SEQ ID NO: 1089649 - DNA, 15 bp, Homo sapiens
accctgcgatccagg

SEQ ID NO: 1089650 - DNA, 15 bp, Homo sapiens
caccctgcgatccag

SEQ ID NO: 1089651 - DNA, 15 bp, Homo sapiens
gcaccctgcgatcca

SEQ ID NO: 1089652 - DNA, 15 bp, Homo sapiens
ggcaccctgcgatcc

SEQ ID NO: 1089653 - DNA, 15 bp, Homo sapiens
tggcaccctgcgatc

SEQ ID NO: 1089654 - DNA, 15 bp, Homo sapiens
ttggcaccctgcgat

SEQ ID NO: 1089655 - DNA, 15 bp, Homo sapiens
cttggcaccctgcga

SEQ ID NO: 1089656 - DNA, 15 bp, Homo sapiens
ccttggcaccctgcg

SEQ ID NO: 1089657 - DNA, 15 bp, Homo sapiens
gccttggcaccctgc

SEQ ID NO: 1089658 - DNA, 15 bp, Homo sapiens
ggccttggcaccctg

SEQ ID NO: 1089659 - DNA, 15 bp, Homo sapiens
aggccttggcaccct

SEQ ID NO: 1089660 - DNA, 15 bp, Homo sapiens
caggccttggcaccc

SEQ ID NO: 1089661 - DNA, 15 bp, Homo sapiens
ccaggccttggcacc

SEQ ID NO: 1089662 - DNA, 15 bp, Homo sapiens
tccaggccttggcac

SEQ ID NO: 1089663 - DNA, 15 bp, Homo sapiens
atccaggccttggca

SEQ ID NO: 1089664 - DNA, 15 bp, Homo sapiens
catccaggccttggc

SEQ ID NO: 1089665 - DNA, 15 bp, Homo sapiens
tcatccaggccttgg

SEQ ID NO: 1089666 - DNA, 15 bp, Homo sapiens
ctcatccaggccttg

SEQ ID NO: 1089667 - DNA, 15 bp, Homo sapiens
cctcatccaggcctt

SEQ ID NO: 1089668 - DNA, 15 bp, Homo sapiens
ccctcatccaggcct

SEQ ID NO: 1089669 - DNA, 15 bp, Homo sapiens
tccctcatccaggcc

SEQ ID NO: 1089670 - DNA, 15 bp, Homo sapiens
ttccctcatccaggc

SEQ ID NO: 1089671 - DNA, 15 bp, Homo sapiens
cttccctcatccagg

SEQ ID NO: 1089672 - DNA, 15 bp, Homo sapiens
gcttccctcatccag

SEQ ID NO: 1089673 - DNA, 15 bp, Homo sapiens
cgcttccctcatcca

SEQ ID NO: 1089674 - DNA, 15 bp, Homo sapiens
acgcttccctcatcc

SEQ ID NO: 1089675 - DNA, 15 bp, Homo sapiens
cacgcttccctcatc

SEQ ID NO: 1089676 - DNA, 15 bp, Homo sapiens
ccacgcttccctcat

SEQ ID NO: 1089677 - DNA, 15 bp, Homo sapiens
tccacgcttccctca

SEQ ID NO: 1089678 - DNA, 15 bp, Homo sapiens
ctccacgcttccctc

SEQ ID NO: 1089679 - DNA, 15 bp, Homo sapiens
gctccacgcttccct

SEQ ID NO: 1089680 - DNA, 15 bp, Homo sapiens
agctccacgcttccc

SEQ ID NO: 1089681 - DNA, 15 bp, Homo sapiens
cagctccacgcttcc

SEQ ID NO: 1089682 - DNA, 15 bp, Homo sapiens
gcagctccacgcttc

SEQ ID NO: 1089683 - DNA, 15 bp, Homo sapiens
tgcagctccacgctt

SEQ ID NO: 1089684 - DNA, 15 bp, Homo sapiens
ttgcagctccacgct

SEQ ID NO: 1089685 - DNA, 15 bp, Homo sapiens
attgcagctccacgc

SEQ ID NO: 1089686 - DNA, 15 bp, Homo sapiens
cattgcagctccacg

SEQ ID NO: 1089687 - DNA, 15 bp, Homo sapiens
ccattgcagctccac

SEQ ID NO: 1089688 - DNA, 15 bp, Homo sapiens
gccattgcagctcca

SEQ ID NO: 1089689 - DNA, 15 bp, Homo sapiens
ggccattgcagctcc

SEQ ID NO: 1089690 - DNA, 15 bp, Homo sapiens
tggccattgcagctc

SEQ ID NO: 1089691 - DNA, 15 bp, Homo sapiens
gtggccattgcagct

SEQ ID NO: 1089692 - DNA, 15 bp, Homo sapiens
agtggccattgcagc

SEQ ID NO: 1089693 - DNA, 15 bp, Homo sapiens
gagtggccattgcag

SEQ ID NO: 1089694 - DNA, 15 bp, Homo sapiens
ggagtggccattgca

SEQ ID NO: 1089695 - DNA, 15 bp, Homo sapiens
aggagtggccattgc

SEQ ID NO: 1089696 - DNA, 15 bp, Homo sapiens
caggagtggccattg

SEQ ID NO: 1089697 - DNA, 15 bp, Homo sapiens
acaggagtggccatt

SEQ ID NO: 1089698 - DNA, 15 bp, Homo sapiens
gacaggagtggccat

SEQ ID NO: 1089699 - DNA, 15 bp, Homo sapiens
agacaggagtggcca

SEQ ID NO: 1089700 - DNA, 15 bp, Homo sapiens
cagacaggagtggcc

SEQ ID NO: 1089701 - DNA, 15 bp, Homo sapiens
gcagacaggagtggc

SEQ ID NO: 1089702 - DNA, 15 bp, Homo sapiens
ggcagacaggagtgg

SEQ ID NO: 1089703 - DNA, 15 bp, Homo sapiens
aggcagacaggagtg

SEQ ID NO: 1089704 - DNA, 15 bp, Homo sapiens
caggcagacaggagt

SEQ ID NO: 1089705 - DNA, 15 bp, Homo sapiens
acaggcagacaggag

SEQ ID NO: 1089706 - DNA, 15 bp, Homo sapiens
aacaggcagacagga

SEQ ID NO: 1089707 - DNA, 15 bp, Homo sapiens
gaacaggcagacagg

SEQ ID NO: 1089708 - DNA, 15 bp, Homo sapiens
agaacaggcagacag

SEQ ID NO: 1089709 - DNA, 15 bp, Homo sapiens
cagaacaggcagaca

SEQ ID NO: 1089710 - DNA, 15 bp, Homo sapiens
ccagaacaggcagac

SEQ ID NO: 1089711 - DNA, 15 bp, Homo sapiens
gccagaacaggcaga

SEQ ID NO: 1089712 - DNA, 15 bp, Homo sapiens
agccagaacaggcag

SEQ ID NO: 1089713 - DNA, 15 bp, Homo sapiens
cagccagaacaggca

SEQ ID NO: 1089714 - DNA, 15 bp, Homo sapiens
gcagccagaacaggc

SEQ ID NO: 1089715 - DNA, 15 bp, Homo sapiens
tgcagccagaacagg

SEQ ID NO: 1089716 - DNA, 15 bp, Homo sapiens
gtgcagccagaacag

SEQ ID NO: 1089717 - DNA, 15 bp, Homo sapiens
tgtgcagccagaaca

SEQ ID NO: 1089718 - DNA, 15 bp, Homo sapiens
ctgtgcagccagaac

SEQ ID NO: 1089719 - DNA, 15 bp, Homo sapiens
tctgtgcagccagaa

SEQ ID NO: 1089720 - DNA, 15 bp, Homo sapiens
ctctgtgcagccaga

SEQ ID NO: 1089721 - DNA, 15 bp, Homo sapiens
cctctgtgcagccag

SEQ ID NO: 1089722 - DNA, 15 bp, Homo sapiens
tcctctgtgcagcca

SEQ ID NO: 1089723 - DNA, 15 bp, Homo sapiens
gtcctctgtgcagcc

SEQ ID NO: 1089724 - DNA, 15 bp, Homo sapiens
agtcctctgtgcagc

SEQ ID NO: 1089725 - DNA, 15 bp, Homo sapiens
gagtcctctgtgcag

SEQ ID NO: 1089726 - DNA, 15 bp, Homo sapiens
tgagtcctctgtgca

SEQ ID NO: 1089727 - DNA, 15 bp, Homo sapiens
ctgagtcctctgtgc

SEQ ID NO: 1089728 - DNA, 15 bp, Homo sapiens
actgagtcctctgtg

SEQ ID NO: 1089729 - DNA, 15 bp, Homo sapiens
gactgagtcctctgt

SEQ ID NO: 1089730 - DNA, 15 bp, Homo sapiens
ggactgagtcctctg

SEQ ID NO: 1089731 - DNA, 15 bp, Homo sapiens
aggactgagtcctct

SEQ ID NO: 1089732 - DNA, 15 bp, Homo sapiens
aaggactgagtcctc

SEQ ID NO: 1089733 - DNA, 15 bp, Homo sapiens
caaggactgagtcct

SEQ ID NO: 1089734 - DNA, 15 bp, Homo sapiens
acaaggactgagtcc

SEQ ID NO: 1089735 - DNA, 15 bp, Homo sapiens
gacaaggactgagtc

SEQ ID NO: 1089736 - DNA, 15 bp, Homo sapiens
agacaaggactgagt

SEQ ID NO: 1089737 - DNA, 15 bp, Homo sapiens
aagacaaggactgag

SEQ ID NO: 1089738 - DNA, 15 bp, Homo sapiens
caagacaaggactga

SEQ ID NO: 1089739 - DNA, 15 bp, Homo sapiens
ccaagacaaggactg

SEQ ID NO: 1089740 - DNA, 15 bp, Homo sapiens
cccaagacaaggact

SEQ ID NO: 1089741 - DNA, 15 bp, Homo sapiens
ccccaagacaaggac

SEQ ID NO: 1089742 - DNA, 15 bp, Homo sapiens
cccccaagacaagga

SEQ ID NO: 1089743 - DNA, 15 bp, Homo sapiens
tcccccaagacaagg

SEQ ID NO: 1089744 - DNA, 15 bp, Homo sapiens
ttcccccaagacaag

SEQ ID NO: 1089745 - DNA, 15 bp, Homo sapiens
gttcccccaagacaa

SEQ ID NO: 1089746 - DNA, 15 bp, Homo sapiens
ggttcccccaagaca

SEQ ID NO: 1089747 - DNA, 15 bp, Homo sapiens
aggttcccccaagac

SEQ ID NO: 1089748 - DNA, 15 bp, Homo sapiens
taggttcccccaaga

SEQ ID NO: 1089749 - DNA, 15 bp, Homo sapiens
ataggttcccccaag

SEQ ID NO: 1089750 - DNA, 15 bp, Homo sapiens
gataggttcccccaa

SEQ ID NO: 1089751 - DNA, 15 bp, Homo sapiens
agataggttccccca

SEQ ID NO: 1089752 - DNA, 15 bp, Homo sapiens
aagataggttccccc

SEQ ID NO: 1089753 - DNA, 15 bp, Homo sapiens
caagataggttcccc

SEQ ID NO: 1089754 - DNA, 15 bp, Homo sapiens
ccaagataggttccc

SEQ ID NO: 1089755 - DNA, 15 bp, Homo sapiens
accaagataggttcc

SEQ ID NO: 1089756 - DNA, 15 bp, Homo sapiens
aaccaagataggttc

SEQ ID NO: 1089757 - DNA, 15 bp, Homo sapiens
aaaccaagataggtt

SEQ ID NO: 1089758 - DNA, 15 bp, Homo sapiens
aaaaccaagataggt

SEQ ID NO: 1089759 - DNA, 15 bp, Homo sapiens
taaaaccaagatagg

SEQ ID NO: 1089760 - DNA, 15 bp, Homo sapiens
ctaaaaccaagatag

SEQ ID NO: 1089761 - DNA, 15 bp, Homo sapiens
cctaaaaccaagata

SEQ ID NO: 1089762 - DNA, 15 bp, Homo sapiens
ccctaaaaccaagat

SEQ ID NO: 1089763 - DNA, 15 bp, Homo sapiens
accctaaaaccaaga

SEQ ID NO: 1089764 - DNA, 15 bp, Homo sapiens
gaccctaaaaccaag

SEQ ID NO: 1089765 - DNA, 15 bp, Homo sapiens
tgaccctaaaaccaa

SEQ ID NO: 1089766 - DNA, 15 bp, Homo sapiens
atgaccctaaaacca

SEQ ID NO: 1089767 - DNA, 15 bp, Homo sapiens
gatgaccctaaaacc

SEQ ID NO: 1089768 - DNA, 15 bp, Homo sapiens
ggatgaccctaaaac

SEQ ID NO: 1089769 - DNA, 15 bp, Homo sapiens
aggatgaccctaaaa

SEQ ID NO: 1089770 - DNA, 15 bp, Homo sapiens
taggatgaccctaaa

SEQ ID NO: 1089771 - DNA, 15 bp, Homo sapiens
ttaggatgaccctaa

SEQ ID NO: 1089772 - DNA, 15 bp, Homo sapiens
cttaggatgacccta

SEQ ID NO: 1089773 - DNA, 15 bp, Homo sapiens
ccttaggatgaccct

SEQ ID NO: 1089774 - DNA, 15 bp, Homo sapiens
tccttaggatgaccc

SEQ ID NO: 1089775 - DNA, 15 bp, Homo sapiens
atccttaggatgacc

SEQ ID NO: 1089776 - DNA, 15 bp, Homo sapiens
gatccttaggatgac

SEQ ID NO: 1089777 - DNA, 15 bp, Homo sapiens
agatccttaggatga

SEQ ID NO: 1089778 - DNA, 15 bp, Homo sapiens
cagatccttaggatg

SEQ ID NO: 1089779 - DNA, 15 bp, Homo sapiens
tcagatccttaggat

SEQ ID NO: 1089780 - DNA, 15 bp, Homo sapiens
atcagatccttagga

SEQ ID NO: 1089781 - DNA, 15 bp, Homo sapiens
catcagatccttagg

SEQ ID NO: 1089782 - DNA, 15 bp, Homo sapiens
acatcagatccttag

SEQ ID NO: 1089783 - DNA, 15 bp, Homo sapiens
aacatcagatcctta

SEQ ID NO: 1089784 - DNA, 15 bp, Homo sapiens
aaacatcagatcctt

SEQ ID NO: 1089785 - DNA, 15 bp, Homo sapiens
aaaacatcagatcct

SEQ ID NO: 1089786 - DNA, 15 bp, Homo sapiens
gaaaacatcagatcc

SEQ ID NO: 1089787 - DNA, 15 bp, Homo sapiens
ggaaaacatcagatc

SEQ ID NO: 1089788 - DNA, 15 bp, Homo sapiens
tggaaaacatcagat

SEQ ID NO: 1089789 - DNA, 15 bp, Homo sapiens
ttggaaaacatcaga

SEQ ID NO: 1089790 - DNA, 15 bp, Homo sapiens
cttggaaaacatcag

SEQ ID NO: 1089791 - DNA, 15 bp, Homo sapiens
acttggaaaacatca

SEQ ID NO: 1089792 - DNA, 15 bp, Homo sapiens
cacttggaaaacatc

SEQ ID NO: 1089793 - DNA, 15 bp, Homo sapiens
tcacttggaaaacat

SEQ ID NO: 1089794 - DNA, 15 bp, Homo sapiens
ctcacttggaaaaca

SEQ ID NO: 1089795 - DNA, 15 bp, Homo sapiens
gctcacttggaaaac

SEQ ID NO: 1089796 - DNA, 15 bp, Homo sapiens
agctcacttggaaaa

SEQ ID NO: 1089797 - DNA, 15 bp, Homo sapiens
cagctcacttggaaa

SEQ ID NO: 1089798 - DNA, 15 bp, Homo sapiens
ccagctcacttggaa

SEQ ID NO: 1089799 - DNA, 15 bp, Homo sapiens
gccagctcacttgga

SEQ ID NO: 1089800 - DNA, 15 bp, Homo sapiens
agccagctcacttgg

SEQ ID NO: 1089801 - DNA, 15 bp, Homo sapiens
cagccagctcacttg

SEQ ID NO: 1089802 - DNA, 15 bp, Homo sapiens
acagccagctcactt

SEQ ID NO: 1089803 - DNA, 15 bp, Homo sapiens
gacagccagctcact

SEQ ID NO: 1089804 - DNA, 15 bp, Homo sapiens
ggacagccagctcac

SEQ ID NO: 1089805 - DNA, 15 bp, Homo sapiens
tggacagccagctca

SEQ ID NO: 1089806 - DNA, 15 bp, Homo sapiens
ctggacagccagctc

SEQ ID NO: 1089807 - DNA, 15 bp, Homo sapiens
cctggacagccagct

SEQ ID NO: 1089808 - DNA, 15 bp, Homo sapiens
gcctggacagccagc

SEQ ID NO: 1089809 - DNA, 15 bp, Homo sapiens
ggcctggacagccag

SEQ ID NO: 1089810 - DNA, 15 bp, Homo sapiens
gggcctggacagcca

SEQ ID NO: 1089811 - DNA, 15 bp, Homo sapiens
tgggcctggacagcc

SEQ ID NO: 1089812 - DNA, 15 bp, Homo sapiens
gtgggcctggacagc

SEQ ID NO: 1089813 - DNA, 15 bp, Homo sapiens
ggtgggcctggacag

SEQ ID NO: 1089814 - DNA, 15 bp, Homo sapiens
gggtgggcctggaca

SEQ ID NO: 1089815 - DNA, 15 bp, Homo sapiens
tgggtgggcctggac

SEQ ID NO: 1089816 - DNA, 15 bp, Homo sapiens
ctgggtgggcctgga

SEQ ID NO: 1089817 - DNA, 15 bp, Homo sapiens
cctgggtgggcctgg

SEQ ID NO: 1089818 - DNA, 15 bp, Homo sapiens
acctgggtgggcctg

SEQ ID NO: 1089819 - DNA, 15 bp, Homo sapiens
aacctgggtgggcct

SEQ ID NO: 1089820 - DNA, 15 bp, Homo sapiens
gaacctgggtgggcc

SEQ ID NO: 1089821 - DNA, 15 bp, Homo sapiens
tgaacctgggtgggc

SEQ ID NO: 1089822 - DNA, 15 bp, Homo sapiens
ctgaacctgggtggg

SEQ ID NO: 1089823 - DNA, 15 bp, Homo sapiens
actgaacctgggtgg

SEQ ID NO: 1089824 - DNA, 15 bp, Homo sapiens
gactgaacctgggtg

SEQ ID NO: 1089825 - DNA, 15 bp, Homo sapiens
ggactgaacctgggt

SEQ ID NO: 1089826 - DNA, 15 bp, Homo sapiens
tggactgaacctggg

SEQ ID NO: 1089827 - DNA, 15 bp, Homo sapiens
ctggactgaacctgg

SEQ ID NO: 1089828 - DNA, 15 bp, Homo sapiens
actggactgaacctg

SEQ ID NO: 1089829 - DNA, 15 bp, Homo sapiens
gactggactgaacct

SEQ ID NO: 1089830 - DNA, 15 bp, Homo sapiens
ggactggactgaacc

SEQ ID NO: 1089831 - DNA, 15 bp, Homo sapiens
aggactggactgaac

SEQ ID NO: 1089832 - DNA, 15 bp, Homo sapiens
caggactggactgaa

SEQ ID NO: 1089833 - DNA, 15 bp, Homo sapiens
acaggactggactga

SEQ ID NO: 1089834 - DNA, 15 bp, Homo sapiens
cacaggactggactg

SEQ ID NO: 1089835 - DNA, 15 bp, Homo sapiens
acacaggactggact

SEQ ID NO: 1089836 - DNA, 15 bp, Homo sapiens
gacacaggactggac

SEQ ID NO: 1089837 - DNA, 15 bp, Homo sapiens
agacacaggactgga

SEQ ID NO: 1089838 - DNA, 15 bp, Homo sapiens
gagacacaggactgg

SEQ ID NO: 1089839 - DNA, 15 bp, Homo sapiens
agagacacaggactg

SEQ ID NO: 1089840 - DNA, 15 bp, Homo sapiens
cagagacacaggact

SEQ ID NO: 1089841 - DNA, 15 bp, Homo sapiens
ccagagacacaggac

SEQ ID NO: 1089842 - DNA, 15 bp, Homo sapiens
cccagagacacagga

SEQ ID NO: 1089843 - DNA, 15 bp, Homo sapiens
tcccagagacacagg

SEQ ID NO: 1089844 - DNA, 15 bp, Homo sapiens
ttcccagagacacag

SEQ ID NO: 1089845 - DNA, 15 bp, Homo sapiens
cttcccagagacaca

SEQ ID NO: 1089846 - DNA, 15 bp, Homo sapiens
acttcccagagacac

SEQ ID NO: 1089847 - DNA, 15 bp, Homo sapiens
cacttcccagagaca

SEQ ID NO: 1089848 - DNA, 15 bp, Homo sapiens
gcacttcccagagac

SEQ ID NO: 1089849 - DNA, 15 bp, Homo sapiens
agcacttcccagaga

SEQ ID NO: 1089850 - DNA, 15 bp, Homo sapiens
cagcacttcccagag

SEQ ID NO: 1089851 - DNA, 15 bp, Homo sapiens
gcagcacttcccaga

SEQ ID NO: 1089852 - DNA, 15 bp, Homo sapiens
ggcagcacttcccag

SEQ ID NO: 1089853 - DNA, 15 bp, Homo sapiens
gggcagcacttccca

SEQ ID NO: 1089854 - DNA, 15 bp, Homo sapiens
ggggcagcacttccc

SEQ ID NO: 1089855 - DNA, 15 bp, Homo sapiens
aggggcagcacttcc

SEQ ID NO: 1089856 - DNA, 15 bp, Homo sapiens
taggggcagcacttc

SEQ ID NO: 1089857 - DNA, 15 bp, Homo sapiens
gtaggggcagcactt

SEQ ID NO: 1089858 - DNA, 15 bp, Homo sapiens
ggtaggggcagcact

SEQ ID NO: 1089859 - DNA, 15 bp, Homo sapiens
gggtaggggcagcac

SEQ ID NO: 1089860 - DNA, 15 bp, Homo sapiens
ggggtaggggcagca

SEQ ID NO: 1089861 - DNA, 15 bp, Homo sapiens
tggggtaggggcagc

SEQ ID NO: 1089862 - DNA, 15 bp, Homo sapiens
ttggggtaggggcag

SEQ ID NO: 1089863 - DNA, 15 bp, Homo sapiens
cttggggtaggggca

SEQ ID NO: 1089864 - DNA, 15 bp, Homo sapiens
gcttggggtaggggc

SEQ ID NO: 1089865 - DNA, 15 bp, Homo sapiens
ggcttggggtagggg

SEQ ID NO: 1089866 - DNA, 15 bp, Homo sapiens
tggcttggggtaggg

SEQ ID NO: 1089867 - DNA, 15 bp, Homo sapiens
ctggcttggggtagg

SEQ ID NO: 1089868 - DNA, 15 bp, Homo sapiens
actggcttggggtag

SEQ ID NO: 1089869 - DNA, 15 bp, Homo sapiens
cactggcttggggta

SEQ ID NO: 1089870 - DNA, 15 bp, Homo sapiens
acactggcttggggt

SEQ ID NO: 1089871 - DNA, 15 bp, Homo sapiens
aacactggcttgggg

SEQ ID NO: 1089872 - DNA, 15 bp, Homo sapiens
aaacactggcttggg

SEQ ID NO: 1089873 - DNA, 15 bp, Homo sapiens
caaacactggcttgg

SEQ ID NO: 1089874 - DNA, 15 bp, Homo sapiens
tcaaacactggcttg

SEQ ID NO: 1089875 - DNA, 15 bp, Homo sapiens
gtcaaacactggctt

SEQ ID NO: 1089876 - DNA, 15 bp, Homo sapiens
ggtcaaacactggct

SEQ ID NO: 1089877 - DNA, 15 bp, Homo sapiens
aggtcaaacactggc

SEQ ID NO: 1089878 - DNA, 15 bp, Homo sapiens
aaggtcaaacactgg

SEQ ID NO: 1089879 - DNA, 15 bp, Homo sapiens
caaggtcaaacactg

SEQ ID NO: 1089880 - DNA, 15 bp, Homo sapiens
ccaaggtcaaacact

SEQ ID NO: 1089881 - DNA, 15 bp, Homo sapiens
tccaaggtcaaacac

SEQ ID NO: 1089882 - DNA, 15 bp, Homo sapiens
ctccaaggtcaaaca

SEQ ID NO: 1089883 - DNA, 15 bp, Homo sapiens
gctccaaggtcaaac

SEQ ID NO: 1089884 - DNA, 15 bp, Homo sapiens
tgctccaaggtcaaa

SEQ ID NO: 1089885 - DNA, 15 bp, Homo sapiens
ttgctccaaggtcaa

SEQ ID NO: 1089886 - DNA, 15 bp, Homo sapiens
attgctccaaggtca

SEQ ID NO: 1089887 - DNA, 15 bp, Homo sapiens
cattgctccaaggtc

SEQ ID NO: 1089888 - DNA, 15 bp, Homo sapiens
tcattgctccaaggt

SEQ ID NO: 1089889 - DNA, 15 bp, Homo sapiens
ctcattgctccaagg

SEQ ID NO: 1089890 - DNA, 15 bp, Homo sapiens
gctcattgctccaag

SEQ ID NO: 1089891 - DNA, 15 bp, Homo sapiens
tgctcattgctccaa

SEQ ID NO: 1089892 - DNA, 15 bp, Homo sapiens
ttgctcattgctcca

SEQ ID NO: 1089893 - DNA, 15 bp, Homo sapiens
attgctcattgctcc

SEQ ID NO: 1089894 - DNA, 15 bp, Homo sapiens
cattgctcattgctc

SEQ ID NO: 1089895 - DNA, 15 bp, Homo sapiens
gcattgctcattgct

SEQ ID NO: 1089896 - DNA, 15 bp, Homo sapiens
ggcattgctcattgc

SEQ ID NO: 1089897 - DNA, 15 bp, Homo sapiens
gggcattgctcattg

SEQ ID NO: 1089898 - DNA, 15 bp, Homo sapiens
agggcattgctcatt

SEQ ID NO: 1089899 - DNA, 15 bp, Homo sapiens
gagggcattgctcat

SEQ ID NO: 1089900 - DNA, 15 bp, Homo sapiens
ggagggcattgctca

SEQ ID NO: 1089901 - DNA, 15 bp, Homo sapiens
aggagggcattgctc

SEQ ID NO: 1089902 - DNA, 15 bp, Homo sapiens
aaggagggcattgct

SEQ ID NO: 1089903 - DNA, 15 bp, Homo sapiens
gaaggagggcattgc

SEQ ID NO: 1089904 - DNA, 15 bp, Homo sapiens
ggaaggagggcattg

SEQ ID NO: 1089905 - DNA, 15 bp, Homo sapiens
tggaaggagggcatt

SEQ ID NO: 1089906 - DNA, 15 bp, Homo sapiens
gtggaaggagggcat

SEQ ID NO: 1089907 - DNA, 15 bp, Homo sapiens
agtggaaggagggca

SEQ ID NO: 1089908 - DNA, 15 bp, Homo sapiens
aagtggaaggagggc

SEQ ID NO: 1089909 - DNA, 15 bp, Homo sapiens
aaagtggaaggaggg

SEQ ID NO: 1089910 - DNA, 15 bp, Homo sapiens
gaaagtggaaggagg

SEQ ID NO: 1089911 - DNA, 15 bp, Homo sapiens
tgaaagtggaaggag

SEQ ID NO: 1089912 - DNA, 15 bp, Homo sapiens
ttgaaagtggaagga

SEQ ID NO: 1089913 - DNA, 15 bp, Homo sapiens
tttgaaagtggaagg

SEQ ID NO: 1089914 - DNA, 15 bp, Homo sapiens
ctttgaaagtggaag

SEQ ID NO: 1089915 - DNA, 15 bp, Homo sapiens
actttgaaagtggaa

SEQ ID NO: 1089916 - DNA, 15 bp, Homo sapiens
aactttgaaagtgga

SEQ ID NO: 1089917 - DNA, 15 bp, Homo sapiens
caactttgaaagtgg

SEQ ID NO: 1089918 - DNA, 15 bp, Homo sapiens
acaactttgaaagtg

SEQ ID NO: 1089919 - DNA, 15 bp, Homo sapiens
gacaactttgaaagt

SEQ ID NO: 1089920 - DNA, 15 bp, Homo sapiens
ggacaactttgaaag

SEQ ID NO: 1089921 - DNA, 15 bp, Homo sapiens
gggacaactttgaaa

SEQ ID NO: 1089922 - DNA, 15 bp, Homo sapiens
ggggacaactttgaa

SEQ ID NO: 1089923 - DNA, 15 bp, Homo sapiens
tggggacaactttga

SEQ ID NO: 1089924 - DNA, 15 bp, Homo sapiens
ttggggacaactttg

SEQ ID NO: 1089925 - DNA, 15 bp, Homo sapiens
cttggggacaacttt

SEQ ID NO: 1089926 - DNA, 15 bp, Homo sapiens
tcttggggacaactt

SEQ ID NO: 1089927 - DNA, 15 bp, Homo sapiens
gtcttggggacaact

SEQ ID NO: 1089928 - DNA, 15 bp, Homo sapiens
cgtcttggggacaac

SEQ ID NO: 1089929 - DNA, 15 bp, Homo sapiens
acgtcttggggacaa

SEQ ID NO: 1089930 - DNA, 15 bp, Homo sapiens
gacgtcttggggaca

SEQ ID NO: 1089931 - DNA, 15 bp, Homo sapiens
tgacgtcttggggac

SEQ ID NO: 1089932 - DNA, 15 bp, Homo sapiens
ctgacgtcttgggga

SEQ ID NO: 1089933 - DNA, 15 bp, Homo sapiens
gctgacgtcttgggg

SEQ ID NO: 1089934 - DNA, 15 bp, Homo sapiens
agctgacgtcttggg

SEQ ID NO: 1089935 - DNA, 15 bp, Homo sapiens
cagctgacgtcttgg

SEQ ID NO: 1089936 - DNA, 15 bp, Homo sapiens
acagctgacgtcttg

SEQ ID NO: 1089937 - DNA, 15 bp, Homo sapiens
cacagctgacgtctt

SEQ ID NO: 1089938 - DNA, 15 bp, Homo sapiens
ccacagctgacgtct

SEQ ID NO: 1089939 - DNA, 15 bp, Homo sapiens
accacagctgacgtc

SEQ ID NO: 1089940 - DNA, 15 bp, Homo sapiens
aaccacagctgacgt

SEQ ID NO: 1089941 - DNA, 15 bp, Homo sapiens
caaccacagctgacg

SEQ ID NO: 1089942 - DNA, 15 bp, Homo sapiens
acaaccacagctgac

SEQ ID NO: 1089943 - DNA, 15 bp, Homo sapiens
gacaaccacagctga

SEQ ID NO: 1089944 - DNA, 15 bp, Homo sapiens
agacaaccacagctg

SEQ ID NO: 1089945 - DNA, 15 bp, Homo sapiens
gagacaaccacagct

SEQ ID NO: 1089946 - DNA, 15 bp, Homo sapiens
agagacaaccacagc

SEQ ID NO: 1089947 - DNA, 15 bp, Homo sapiens
cagagacaaccacag

SEQ ID NO: 1089948 - DNA, 15 bp, Homo sapiens
acagagacaaccaca

SEQ ID NO: 1089949 - DNA, 15 bp, Homo sapiens
cacagagacaaccac

SEQ ID NO: 1089950 - DNA, 15 bp, Homo sapiens
gcacagagacaacca

SEQ ID NO: 1089951 - DNA, 15 bp, Homo sapiens
tgcacagagacaacc

SEQ ID NO: 1089952 - DNA, 15 bp, Homo sapiens
ctgcacagagacaac

SEQ ID NO: 1089953 - DNA, 15 bp, Homo sapiens
tctgcacagagacaa

SEQ ID NO: 1089954 - DNA, 15 bp, Homo sapiens
gtctgcacagagaca

SEQ ID NO: 1089955 - DNA, 15 bp, Homo sapiens
tgtctgcacagagac

SEQ ID NO: 1089956 - DNA, 15 bp, Homo sapiens
gtgtctgcacagaga

SEQ ID NO: 1089957 - DNA, 15 bp, Homo sapiens
ggtgtctgcacagag

SEQ ID NO: 1089958 - DNA, 15 bp, Homo sapiens
cggtgtctgcacaga

SEQ ID NO: 1089959 - DNA, 15 bp, Homo sapiens
tcggtgtctgcacag

SEQ ID NO: 1089960 - DNA, 15 bp, Homo sapiens
ctcggtgtctgcaca

SEQ ID NO: 1089961 - DNA, 15 bp, Homo sapiens
cctcggtgtctgcac

SEQ ID NO: 1089962 - DNA, 15 bp, Homo sapiens
tcctcggtgtctgca

SEQ ID NO: 1089963 - DNA, 15 bp, Homo sapiens
ctcctcggtgtctgc

SEQ ID NO: 1089964 - DNA, 15 bp, Homo sapiens
cctcctcggtgtctg

SEQ ID NO: 1089965 - DNA, 15 bp, Homo sapiens
tcctcctcggtgtct

SEQ ID NO: 1089966 - DNA, 15 bp, Homo sapiens
ttcctcctcggtgtc

SEQ ID NO: 1089967 - DNA, 15 bp, Homo sapiens
gttcctcctcggtgt

SEQ ID NO: 1089968 - DNA, 15 bp, Homo sapiens
agttcctcctcggtg

SEQ ID NO: 1089969 - DNA, 15 bp, Homo sapiens
cagttcctcctcggt

SEQ ID NO: 1089970 - DNA, 15 bp, Homo sapiens
acagttcctcctcgg

SEQ ID NO: 1089971 - DNA, 15 bp, Homo sapiens
gacagttcctcctcg

SEQ ID NO: 1089972 - DNA, 15 bp, Homo sapiens
agacagttcctcctc

SEQ ID NO: 1089973 - DNA, 15 bp, Homo sapiens
aagacagttcctcct

SEQ ID NO: 1089974 - DNA, 15 bp, Homo sapiens
gaagacagttcctcc

SEQ ID NO: 1089975 - DNA, 15 bp, Homo sapiens
agaagacagttcctc

SEQ ID NO: 1089976 - DNA, 15 bp, Homo sapiens
aagaagacagttcct

SEQ ID NO: 1089977 - DNA, 15 bp, Homo sapiens
aaagaagacagttcc

SEQ ID NO: 1089978 - DNA, 15 bp, Homo sapiens
gaaagaagacagttc

SEQ ID NO: 1089979 - DNA, 15 bp, Homo sapiens
agaaagaagacagtt

SEQ ID NO: 1089980 - DNA, 15 bp, Homo sapiens
gagaaagaagacagt

SEQ ID NO: 1089981 - DNA, 15 bp, Homo sapiens
ggagaaagaagacag

SEQ ID NO: 1089982 - DNA, 15 bp, Homo sapiens
aggagaaagaagaca

SEQ ID NO: 1089983 - DNA, 15 bp, Homo sapiens
aaggagaaagaagac

SEQ ID NO: 1089984 - DNA, 15 bp, Homo sapiens
aaaggagaaagaaga

SEQ ID NO: 1089985 - DNA, 15 bp, Homo sapiens
aaaaggagaaagaag

SEQ ID NO: 1089986 - DNA, 15 bp, Homo sapiens
caaaaggagaaagaa

SEQ ID NO: 1089987 - DNA, 15 bp, Homo sapiens
ccaaaaggagaaaga

SEQ ID NO: 1089988 - DNA, 15 bp, Homo sapiens
accaaaaggagaaag

SEQ ID NO: 1089989 - DNA, 15 bp, Homo sapiens
aaccaaaaggagaaa

SEQ ID NO: 1089990 - DNA, 15 bp, Homo sapiens
caaccaaaaggagaa

SEQ ID NO: 1089991 - DNA, 15 bp, Homo sapiens
gcaaccaaaaggaga

SEQ ID NO: 1089992 - DNA, 15 bp, Homo sapiens
agcaaccaaaaggag

SEQ ID NO: 1089993 - DNA, 15 bp, Homo sapiens
aagcaaccaaaagga

SEQ ID NO: 1089994 - DNA, 15 bp, Homo sapiens
aaagcaaccaaaagg

SEQ ID NO: 1089995 - DNA, 15 bp, Homo sapiens
caaagcaaccaaaag

SEQ ID NO: 1089996 - DNA, 15 bp, Homo sapiens
ccaaagcaaccaaaa

SEQ ID NO: 1089997 - DNA, 15 bp, Homo sapiens
tccaaagcaaccaaa

SEQ ID NO: 1089998 - DNA, 15 bp, Homo sapiens
ctccaaagcaaccaa

SEQ ID NO: 1089999 - DNA, 15 bp, Homo sapiens
cctccaaagcaacca

SEQ ID NO: 1090000 - DNA, 15 bp, Homo sapiens
tcctccaaagcaacc

SEQ ID NO: 1090001 - DNA, 15 bp, Homo sapiens
ttcctccaaagcaac

SEQ ID NO: 1090002 - DNA, 15 bp, Homo sapiens
tttcctccaaagcaa

SEQ ID NO: 1090003 - DNA, 15 bp, Homo sapiens
ctttcctccaaagca

SEQ ID NO: 1090004 - DNA, 15 bp, Homo sapiens
actttcctccaaagc

SEQ ID NO: 1090005 - DNA, 15 bp, Homo sapiens
tactttcctccaaag

SEQ ID NO: 1090006 - DNA, 15 bp, Homo sapiens
ttactttcctccaaa

SEQ ID NO: 1090007 - DNA, 15 bp, Homo sapiens
tttactttcctccaa

SEQ ID NO: 1090008 - DNA, 15 bp, Homo sapiens
ctttactttcctcca

SEQ ID NO: 1090009 - DNA, 15 bp, Homo sapiens
actttactttcctcc

SEQ ID NO: 1090010 - DNA, 15 bp, Homo sapiens
cactttactttcctc

SEQ ID NO: 1090011 - DNA, 15 bp, Homo sapiens
acactttactttcct

SEQ ID NO: 1090012 - DNA, 15 bp, Homo sapiens
aacactttactttcc

SEQ ID NO: 1090013 - DNA, 15 bp, Homo sapiens
caacactttactttc

SEQ ID NO: 1090014 - DNA, 15 bp, Homo sapiens
gcaacactttacttt

SEQ ID NO: 1090015 - DNA, 15 bp, Homo sapiens
agcaacactttactt

SEQ ID NO: 1090016 - DNA, 15 bp, Homo sapiens
cagcaacactttact

SEQ ID NO: 1090017 - DNA, 15 bp, Homo sapiens
ccagcaacactttac

SEQ ID NO: 1090018 - DNA, 15 bp, Homo sapiens
accagcaacacttta

SEQ ID NO: 1090019 - DNA, 15 bp, Homo sapiens
aaccagcaacacttt

SEQ ID NO: 1090020 - DNA, 15 bp, Homo sapiens
aaaccagcaacactt

SEQ ID NO: 1090021 - DNA, 15 bp, Homo sapiens
gaaaccagcaacact

SEQ ID NO: 1090022 - DNA, 15 bp, Homo sapiens
ggaaaccagcaacac

SEQ ID NO: 1090023 - DNA, 15 bp, Homo sapiens
gggaaaccagcaaca

SEQ ID NO: 1090024 - DNA, 15 bp, Homo sapiens
agggaaaccagcaac

SEQ ID NO: 1090025 - DNA, 15 bp, Homo sapiens
gagggaaaccagcaa

SEQ ID NO: 1090026 - DNA, 15 bp, Homo sapiens
agagggaaaccagca

SEQ ID NO: 1090027 - DNA, 15 bp, Homo sapiens
aagagggaaaccagc

SEQ ID NO: 1090028 - DNA, 15 bp, Homo sapiens
aaagagggaaaccag

SEQ ID NO: 1090029 - DNA, 15 bp, Homo sapiens
gaaagagggaaacca

SEQ ID NO: 1090030 - DNA, 15 bp, Homo sapiens
agaaagagggaaacc

SEQ ID NO: 1090031 - DNA, 15 bp, Homo sapiens
tagaaagagggaaac

SEQ ID NO: 1090032 - DNA, 15 bp, Homo sapiens
gtagaaagagggaaa

SEQ ID NO: 1090033 - DNA, 15 bp, Homo sapiens
agtagaaagagggaa

SEQ ID NO: 1090034 - DNA, 15 bp, Homo sapiens
aagtagaaagaggga

SEQ ID NO: 1090035 - DNA, 15 bp, Homo sapiens
gaagtagaaagaggg

SEQ ID NO: 1090036 - DNA, 15 bp, Homo sapiens
agaagtagaaagagg

SEQ ID NO: 1090037 - DNA, 15 bp, Homo sapiens
aagaagtagaaagag

SEQ ID NO: 1090038 - DNA, 15 bp, Homo sapiens
aaagaagtagaaaga

SEQ ID NO: 1090039 - DNA, 15 bp, Homo sapiens
caaagaagtagaaag

SEQ ID NO: 1090040 - DNA, 15 bp, Homo sapiens
tcaaagaagtagaaa

SEQ ID NO: 1090041 - DNA, 15 bp, Homo sapiens
atcaaagaagtagaa

SEQ ID NO: 1090042 - DNA, 15 bp, Homo sapiens
aatcaaagaagtaga

SEQ ID NO: 1090043 - DNA, 15 bp, Homo sapiens
caatcaaagaagtag

SEQ ID NO: 1090044 - DNA, 15 bp, Homo sapiens
tcaatcaaagaagta

SEQ ID NO: 1090045 - DNA, 15 bp, Homo sapiens
ctcaatcaaagaagt

SEQ ID NO: 1090046 - DNA, 15 bp, Homo sapiens
tctcaatcaaagaag

SEQ ID NO: 1090047 - DNA, 15 bp, Homo sapiens
ctctcaatcaaagaa

SEQ ID NO: 1090048 - DNA, 15 bp, Homo sapiens
gctctcaatcaaaga

SEQ ID NO: 1090049 - DNA, 15 bp, Homo sapiens
tgctctcaatcaaag

SEQ ID NO: 1090050 - DNA, 15 bp, Homo sapiens
ctgctctcaatcaaa

SEQ ID NO: 1090051 - DNA, 15 bp, Homo sapiens
gctgctctcaatcaa

SEQ ID NO: 1090052 - DNA, 15 bp, Homo sapiens
ggctgctctcaatca

SEQ ID NO: 1090053 - DNA, 15 bp, Homo sapiens
cggctgctctcaatc

SEQ ID NO: 1090054 - DNA, 15 bp, Homo sapiens
acggctgctctcaat

SEQ ID NO: 1090055 - DNA, 15 bp, Homo sapiens
gacggctgctctcaa

SEQ ID NO: 1090056 - DNA, 15 bp, Homo sapiens
agacggctgctctca

SEQ ID NO: 1090057 - DNA, 15 bp, Homo sapiens
aagacggctgctctc

SEQ ID NO: 1090058 - DNA, 15 bp, Homo sapiens
caagacggctgctct

SEQ ID NO: 1090059 - DNA, 15 bp, Homo sapiens
gcaagacggctgctc

SEQ ID NO: 1090060 - DNA, 15 bp, Homo sapiens
ggcaagacggctgct

SEQ ID NO: 1090061 - DNA, 15 bp, Homo sapiens
cggcaagacggctgc

SEQ ID NO: 1090062 - DNA, 15 bp, Homo sapiens
ccggcaagacggctg

SEQ ID NO: 1090063 - DNA, 15 bp, Homo sapiens
accggcaagacggct

SEQ ID NO: 1090064 - DNA, 15 bp, Homo sapiens
taccggcaagacggc

SEQ ID NO: 1090065 - DNA, 15 bp, Homo sapiens
gtaccggcaagacgg

SEQ ID NO: 1090066 - DNA, 15 bp, Homo sapiens
ggtaccggcaagacg

SEQ ID NO: 1090067 - DNA, 15 bp, Homo sapiens
tggtaccggcaagac

SEQ ID NO: 1090068 - DNA, 15 bp, Homo sapiens
ttggtaccggcaaga

SEQ ID NO: 1090069 - DNA, 15 bp, Homo sapiens
gttggtaccggcaag

SEQ ID NO: 1090070 - DNA, 15 bp, Homo sapiens
ggttggtaccggcaa

SEQ ID NO: 1090071 - DNA, 15 bp, Homo sapiens
aggttggtaccggca

SEQ ID NO: 1090072 - DNA, 15 bp, Homo sapiens
aaggttggtaccggc

SEQ ID NO: 1090073 - DNA, 15 bp, Homo sapiens
gaaggttggtaccgg

SEQ ID NO: 1090074 - DNA, 15 bp, Homo sapiens
ggaaggttggtaccg

SEQ ID NO: 1090075 - DNA, 15 bp, Homo sapiens
tggaaggttggtacc

SEQ ID NO: 1090076 - DNA, 15 bp, Homo sapiens
ctggaaggttggtac

SEQ ID NO: 1090077 - DNA, 15 bp, Homo sapiens
tctggaaggttggta

SEQ ID NO: 1090078 - DNA, 15 bp, Homo sapiens
atctggaaggttggt

SEQ ID NO: 1090079 - DNA, 15 bp, Homo sapiens
gatctggaaggttgg

SEQ ID NO: 1090080 - DNA, 15 bp, Homo sapiens
agatctggaaggttg

SEQ ID NO: 1090081 - DNA, 15 bp, Homo sapiens
aagatctggaaggtt

SEQ ID NO: 1090082 - DNA, 15 bp, Homo sapiens
taagatctggaaggt

SEQ ID NO: 1090083 - DNA, 15 bp, Homo sapiens
gtaagatctggaagg

SEQ ID NO: 1090084 - DNA, 15 bp, Homo sapiens
ggtaagatctggaag

SEQ ID NO: 1090085 - DNA, 15 bp, Homo sapiens
aggtaagatctggaa

SEQ ID NO: 1090086 - DNA, 15 bp, Homo sapiens
caggtaagatctgga

SEQ ID NO: 1090087 - DNA, 15 bp, Homo sapiens
acaggtaagatctgg

SEQ ID NO: 1090088 - DNA, 15 bp, Homo sapiens
cacaggtaagatctg

SEQ ID NO: 1090089 - DNA, 15 bp, Homo sapiens
ccacaggtaagatct

SEQ ID NO: 1090090 - DNA, 15 bp, Homo sapiens
accacaggtaagatc

SEQ ID NO: 1090091 - DNA, 15 bp, Homo sapiens
aaccacaggtaagat

SEQ ID NO: 1090092 - DNA, 15 bp, Homo sapiens
caaccacaggtaaga

SEQ ID NO: 1090093 - DNA, 15 bp, Homo sapiens
gcaaccacaggtaag

SEQ ID NO: 1090094 - DNA, 15 bp, Homo sapiens
tgcaaccacaggtaa

SEQ ID NO: 1090095 - DNA, 15 bp, Homo sapiens
ctgcaaccacaggta

SEQ ID NO: 1090096 - DNA, 15 bp, Homo sapiens
cctgcaaccacaggt

SEQ ID NO: 1090097 - DNA, 15 bp, Homo sapiens
tcctgcaaccacagg

SEQ ID NO: 1090098 - DNA, 15 bp, Homo sapiens
ctcctgcaaccacag

SEQ ID NO: 1090099 - DNA, 15 bp, Homo sapiens
gctcctgcaaccaca

SEQ ID NO: 1090100 - DNA, 15 bp, Homo sapiens
ggctcctgcaaccac

SEQ ID NO: 1090101 - DNA, 15 bp, Homo sapiens
aggctcctgcaacca

SEQ ID NO: 1090102 - DNA, 15 bp, Homo sapiens
caggctcctgcaacc

SEQ ID NO: 1090103 - DNA, 15 bp, Homo sapiens
acaggctcctgcaac

SEQ ID NO: 1090104 - DNA, 15 bp, Homo sapiens
cacaggctcctgcaa

SEQ ID NO: 1090105 - DNA, 15 bp, Homo sapiens
ccacaggctcctgca

SEQ ID NO: 1090106 - DNA, 15 bp, Homo sapiens
gccacaggctcctgc

SEQ ID NO: 1090107 - DNA, 15 bp, Homo sapiens
ggccacaggctcctg

SEQ ID NO: 1090108 - DNA, 15 bp, Homo sapiens
aggccacaggctcct

SEQ ID NO: 1090109 - DNA, 15 bp, Homo sapiens
gaggccacaggctcc

SEQ ID NO: 1090110 - DNA, 15 bp, Homo sapiens
tgaggccacaggctc

SEQ ID NO: 1090111 - DNA, 15 bp, Homo sapiens
ctgaggccacaggct

SEQ ID NO: 1090112 - DNA, 15 bp, Homo sapiens
actgaggccacaggc

SEQ ID NO: 1090113 - DNA, 15 bp, Homo sapiens
gactgaggccacagg

SEQ ID NO: 1090114 - DNA, 15 bp, Homo sapiens
ggactgaggccacag

SEQ ID NO: 1090115 - DNA, 15 bp, Homo sapiens
aggactgaggccaca

SEQ ID NO: 1090116 - DNA, 15 bp, Homo sapiens
caggactgaggccac

SEQ ID NO: 1090117 - DNA, 15 bp, Homo sapiens
acaggactgaggcca

SEQ ID NO: 1090118 - DNA, 15 bp, Homo sapiens
cacaggactgaggcc

SEQ ID NO: 1090119 - DNA, 15 bp, Homo sapiens
gcacaggactgaggc

SEQ ID NO: 1090120 - DNA, 15 bp, Homo sapiens
ggcacaggactgagg

SEQ ID NO: 1090121 - DNA, 15 bp, Homo sapiens
gggcacaggactgag

SEQ ID NO: 1090122 - DNA, 15 bp, Homo sapiens
tgggcacaggactga

SEQ ID NO: 1090123 - DNA, 15 bp, Homo sapiens
ctgggcacaggactg

SEQ ID NO: 1090124 - DNA, 15 bp, Homo sapiens
actgggcacaggact

SEQ ID NO: 1090125 - DNA, 15 bp, Homo sapiens
cactgggcacaggac

SEQ ID NO: 1090126 - DNA, 15 bp, Homo sapiens
tcactgggcacagga

SEQ ID NO: 1090127 - DNA, 15 bp, Homo sapiens
gtcactgggcacagg

SEQ ID NO: 1090128 - DNA, 15 bp, Homo sapiens
agtcactgggcacag

SEQ ID NO: 1090129 - DNA, 15 bp, Homo sapiens
aagtcactgggcaca

SEQ ID NO: 1090130 - DNA, 15 bp, Homo sapiens
gaagtcactgggcac

SEQ ID NO: 1090131 - DNA, 15 bp, Homo sapiens
agaagtcactgggca

SEQ ID NO: 1090132 - DNA, 15 bp, Homo sapiens
aaaagacactaagta

SEQ ID NO: 1090133 - DNA, 15 bp, Homo sapiens
gaaaagacactaagt

SEQ ID NO: 1090134 - DNA, 15 bp, Homo sapiens
tgaaaagacactaag

SEQ ID NO: 1090135 - DNA, 15 bp, Homo sapiens
atgaaaagacactaa

SEQ ID NO: 1090136 - DNA, 15 bp, Homo sapiens
aatgaaaagacacta

SEQ ID NO: 1090137 - DNA, 15 bp, Homo sapiens
aaatgaaaagacact

SEQ ID NO: 1090138 - DNA, 15 bp, Homo sapiens
aaaatgaaaagacac

SEQ ID NO: 1090139 - DNA, 15 bp, Homo sapiens
taaaatgaaaagaca

SEQ ID NO: 1090140 - DNA, 15 bp, Homo sapiens
ctaaaatgaaaagac

SEQ ID NO: 1090141 - DNA, 15 bp, Homo sapiens
gctaaaatgaaaaga

SEQ ID NO: 1090142 - DNA, 15 bp, Homo sapiens
ggctaaaatgaaaag

SEQ ID NO: 1090143 - DNA, 15 bp, Homo sapiens
aggctaaaatgaaaa

SEQ ID NO: 1090144 - DNA, 15 bp, Homo sapiens
gaggctaaaatgaaa

SEQ ID NO: 1090145 - DNA, 15 bp, Homo sapiens
tgaggctaaaatgaa

SEQ ID NO: 1090146 - DNA, 15 bp, Homo sapiens
ttgaggctaaaatga

SEQ ID NO: 1090147 - DNA, 15 bp, Homo sapiens
attgaggctaaaatg

SEQ ID NO: 1090148 - DNA, 15 bp, Homo sapiens
cattgaggctaaaat

SEQ ID NO: 1090149 - DNA, 15 bp, Homo sapiens
acattgaggctaaaa

SEQ ID NO: 1090150 - DNA, 15 bp, Homo sapiens
aacattgaggctaaa

SEQ ID NO: 1090151 - DNA, 15 bp, Homo sapiens
aaacattgaggctaa

SEQ ID NO: 1090152 - DNA, 15 bp, Homo sapiens
gaaacattgaggcta

SEQ ID NO: 1090153 - DNA, 15 bp, Homo sapiens
ggaaacattgaggct

SEQ ID NO: 1090154 - DNA, 15 bp, Homo sapiens
gggaaacattgaggc

SEQ ID NO: 1090155 - DNA, 15 bp, Homo sapiens
agggaaacattgagg

SEQ ID NO: 1090156 - DNA, 15 bp, Homo sapiens
aagggaaacattgag

SEQ ID NO: 1090157 - DNA, 15 bp, Homo sapiens
aaagggaaacattga

SEQ ID NO: 1090158 - DNA, 15 bp, Homo sapiens
taaagggaaacattg

SEQ ID NO: 1090159 - DNA, 15 bp, Homo sapiens
ctaaagggaaacatt

SEQ ID NO: 1090160 - DNA, 15 bp, Homo sapiens
gctaaagggaaacat

SEQ ID NO: 1090161 - DNA, 15 bp, Homo sapiens
tgctaaagggaaaca

SEQ ID NO: 1090162 - DNA, 15 bp, Homo sapiens
atgctaaagggaaac

SEQ ID NO: 1090163 - DNA, 15 bp, Homo sapiens
aatgctaaagggaaa

SEQ ID NO: 1090164 - DNA, 15 bp, Homo sapiens
aaatgctaaagggaa

SEQ ID NO: 1090165 - DNA, 15 bp, Homo sapiens
gaaatgctaaaggga

SEQ ID NO: 1090166 - DNA, 15 bp, Homo sapiens
ggaaatgctaaaggg

SEQ ID NO: 1090167 - DNA, 15 bp, Homo sapiens
aggaaatgctaaagg

SEQ ID NO: 1090168 - DNA, 15 bp, Homo sapiens
taggaaatgctaaag

SEQ ID NO: 1090169 - DNA, 15 bp, Homo sapiens
ataggaaatgctaaa

SEQ ID NO: 1090170 - DNA, 15 bp, Homo sapiens
tataggaaatgctaa

SEQ ID NO: 1090171 - DNA, 15 bp, Homo sapiens
ctataggaaatgcta

SEQ ID NO: 1090172 - DNA, 15 bp, Homo sapiens
cctataggaaatgct

SEQ ID NO: 1090173 - DNA, 15 bp, Homo sapiens
ccctataggaaatgc

SEQ ID NO: 1090174 - DNA, 15 bp, Homo sapiens
gccctataggaaatg

SEQ ID NO: 1090175 - DNA, 15 bp, Homo sapiens
tgccctataggaaat

SEQ ID NO: 1090176 - DNA, 15 bp, Homo sapiens
ctgccctataggaaa

SEQ ID NO: 1090177 - DNA, 15 bp, Homo sapiens
cctgccctataggaa

SEQ ID NO: 1090178 - DNA, 15 bp, Homo sapiens
gcctgccctatagga

SEQ ID NO: 1090179 - DNA, 15 bp, Homo sapiens
ggcctgccctatagg

SEQ ID NO: 1090180 - DNA, 15 bp, Homo sapiens
aggcctgccctatag

SEQ ID NO: 1090181 - DNA, 15 bp, Homo sapiens
caggcctgccctata

SEQ ID NO: 1090182 - DNA, 15 bp, Homo sapiens
gcaggcctgccctat

SEQ ID NO: 1090183 - DNA, 15 bp, Homo sapiens
ggcaggcctgcccta

SEQ ID NO: 1090184 - DNA, 15 bp, Homo sapiens
cggcaggcctgccct

SEQ ID NO: 1090185 - DNA, 15 bp, Homo sapiens
ccggcaggcctgccc

SEQ ID NO: 1090186 - DNA, 15 bp, Homo sapiens
accggcaggcctgcc

SEQ ID NO: 1090187 - DNA, 15 bp, Homo sapiens
taccggcaggcctgc

SEQ ID NO: 1090188 - DNA, 15 bp, Homo sapiens
ttaccggcaggcctg

SEQ ID NO: 1090189 - DNA, 15 bp, Homo sapiens
attaccggcaggcct

SEQ ID NO: 1090190 - DNA, 15 bp, Homo sapiens
aattaccggcaggcc

SEQ ID NO: 1090191 - DNA, 15 bp, Homo sapiens
taattaccggcaggc

SEQ ID NO: 1090192 - DNA, 15 bp, Homo sapiens
ttaattaccggcagg

SEQ ID NO: 1090193 - DNA, 15 bp, Homo sapiens
attaattaccggcag

SEQ ID NO: 1090194 - DNA, 15 bp, Homo sapiens
aattaattaccggca

SEQ ID NO: 1090195 - DNA, 15 bp, Homo sapiens
gaattaattaccggc

SEQ ID NO: 1090196 - DNA, 15 bp, Homo sapiens
ggaattaattaccgg

SEQ ID NO: 1090197 - DNA, 15 bp, Homo sapiens
gggaattaattaccg

SEQ ID NO: 1090198 - DNA, 15 bp, Homo sapiens
agggaattaattacc

SEQ ID NO: 1090199 - DNA, 15 bp, Homo sapiens
aagggaattaattac

SEQ ID NO: 1090200 - DNA, 15 bp, Homo sapiens
aaagggaattaatta

SEQ ID NO: 1090201 - DNA, 15 bp, Homo sapiens
caaagggaattaatt

SEQ ID NO: 1090202 - DNA, 15 bp, Homo sapiens
ccaaagggaattaat

SEQ ID NO: 1090203 - DNA, 15 bp, Homo sapiens
accaaagggaattaa

SEQ ID NO: 1090204 - DNA, 15 bp, Homo sapiens
aaccaaagggaatta

SEQ ID NO: 1090205 - DNA, 15 bp, Homo sapiens
aaaccaaagggaatt

SEQ ID NO: 1090206 - DNA, 15 bp, Homo sapiens
aaaaccaaagggaat

SEQ ID NO: 1090207 - DNA, 15 bp, Homo sapiens
gaaaaccaaagggaa

SEQ ID NO: 1090208 - DNA, 15 bp, Homo sapiens
agaaaaccaaaggga

SEQ ID NO: 1090209 - DNA, 15 bp, Homo sapiens
aagaaaaccaaaggg

SEQ ID NO: 1090210 - DNA, 15 bp, Homo sapiens
aaagaaaaccaaagg

SEQ ID NO: 1090211 - DNA, 15 bp, Homo sapiens
taaagaaaaccaaag

SEQ ID NO: 1090212 - DNA, 15 bp, Homo sapiens
ataaagaaaaccaaa

SEQ ID NO: 1090213 - DNA, 15 bp, Homo sapiens
gataaagaaaaccaa

SEQ ID NO: 1090214 - DNA, 15 bp, Homo sapiens
agataaagaaaacca

SEQ ID NO: 1090215 - DNA, 15 bp, Homo sapiens
cagataaagaaaacc

SEQ ID NO: 1090216 - DNA, 15 bp, Homo sapiens
tcagataaagaaaac

SEQ ID NO: 1090217 - DNA, 15 bp, Homo sapiens
ttcagataaagaaaa

SEQ ID NO: 1090218 - DNA, 15 bp, Homo sapiens
tttcagataaagaaa

SEQ ID NO: 1090219 - DNA, 15 bp, Homo sapiens
atttcagataaagaa

SEQ ID NO: 1090220 - DNA, 15 bp, Homo sapiens
catttcagataaaga

SEQ ID NO: 1090221 - DNA, 15 bp, Homo sapiens
acatttcagataaag

SEQ ID NO: 1090222 - DNA, 15 bp, Homo sapiens
gacatttcagataaa

SEQ ID NO: 1090223 - DNA, 15 bp, Homo sapiens
agacatttcagataa

SEQ ID NO: 1090224 - DNA, 15 bp, Homo sapiens
tagacatttcagata

SEQ ID NO: 1090225 - DNA, 15 bp, Homo sapiens
ttagacatttcagat

SEQ ID NO: 1090226 - DNA, 15 bp, Homo sapiens
attagacatttcaga

SEQ ID NO: 1090227 - DNA, 15 bp, Homo sapiens
aattagacatttcag

SEQ ID NO: 1090228 - DNA, 15 bp, Homo sapiens
aaattagacatttca

SEQ ID NO: 1090229 - DNA, 15 bp, Homo sapiens
gaaattagacatttc

SEQ ID NO: 1090230 - DNA, 15 bp, Homo sapiens
agaaattagacattt

SEQ ID NO: 1090231 - DNA, 15 bp, Homo sapiens
aagaaattagacatt

SEQ ID NO: 1090232 - DNA, 15 bp, Homo sapiens
aaagaaattagacat

SEQ ID NO: 1090233 - DNA, 15 bp, Homo sapiens
aaaagaaattagaca

SEQ ID NO: 1090234 - DNA, 15 bp, Homo sapiens
aaaaagaaattagac

SEQ ID NO: 1090235 - DNA, 15 bp, Homo sapiens
aaaaaagaaattaga

SEQ ID NO: 1090236 - DNA, 15 bp, Homo sapiens
taaaaaagaaattag

SEQ ID NO: 1090237 - DNA, 15 bp, Homo sapiens
ataaaaaagaaatta

SEQ ID NO: 1090238 - DNA, 15 bp, Homo sapiens
aataaaaaagaaatt

SEQ ID NO: 1090239 - DNA, 15 bp, Homo sapiens
gaataaaaaagaaat

SEQ ID NO: 1090240 - DNA, 15 bp, Homo sapiens
agaataaaaaagaaa

SEQ ID NO: 1090241 - DNA, 15 bp, Homo sapiens
aagaataaaaaagaa

SEQ ID NO: 1090242 - DNA, 15 bp, Homo sapiens
caagaataaaaaaga

SEQ ID NO: 1090243 - DNA, 15 bp, Homo sapiens
tcaagaataaaaaag

SEQ ID NO: 1090244 - DNA, 15 bp, Homo sapiens
ttcaagaataaaaaa

SEQ ID NO: 1090245 - DNA, 15 bp, Homo sapiens
cttcaagaataaaaa

SEQ ID NO: 1090246 - DNA, 15 bp, Homo sapiens
tcttcaagaataaaa

SEQ ID NO: 1090247 - DNA, 15 bp, Homo sapiens
ttcttcaagaataaa

SEQ ID NO: 1090248 - DNA, 15 bp, Homo sapiens
attcttcaagaataa

SEQ ID NO: 1090249 - DNA, 15 bp, Homo sapiens
tattcttcaagaata

SEQ ID NO: 1090250 - DNA, 15 bp, Homo sapiens
ctattcttcaagaat

SEQ ID NO: 1090251 - DNA, 15 bp, Homo sapiens
actattcttcaagaa

SEQ ID NO: 1090252 - DNA, 15 bp, Homo sapiens
aactattcttcaaga

SEQ ID NO: 1090253 - DNA, 15 bp, Homo sapiens
aaactattcttcaag

SEQ ID NO: 1090254 - DNA, 15 bp, Homo sapiens
aaaactattcttcaa

SEQ ID NO: 1090255 - DNA, 15 bp, Homo sapiens
caaaactattcttca

SEQ ID NO: 1090256 - DNA, 15 bp, Homo sapiens
gcaaaactattcttc

SEQ ID NO: 1090257 - DNA, 15 bp, Homo sapiens
agcaaaactattctt

SEQ ID NO: 1090258 - DNA, 15 bp, Homo sapiens
cagcaaaactattct

SEQ ID NO: 1090259 - DNA, 15 bp, Homo sapiens
ccagcaaaactattc

SEQ ID NO: 1090260 - DNA, 15 bp, Homo sapiens
gccagcaaaactatt

SEQ ID NO: 1090261 - DNA, 15 bp, Homo sapiens
agccagcaaaactat

SEQ ID NO: 1090262 - DNA, 15 bp, Homo sapiens
tagccagcaaaacta

SEQ ID NO: 1090263 - DNA, 15 bp, Homo sapiens
atagccagcaaaact

SEQ ID NO: 1090264 - DNA, 15 bp, Homo sapiens
tatagccagcaaaac

SEQ ID NO: 1090265 - DNA, 15 bp, Homo sapiens
ttatagccagcaaaa

SEQ ID NO: 1090266 - DNA, 15 bp, Homo sapiens
cttatagccagcaaa

SEQ ID NO: 1090267 - DNA, 15 bp, Homo sapiens
tcttatagccagcaa

SEQ ID NO: 1090268 - DNA, 15 bp, Homo sapiens
atcttatagccagca

SEQ ID NO: 1090269 - DNA, 15 bp, Homo sapiens
aatcttatagccagc

SEQ ID NO: 1090270 - DNA, 15 bp, Homo sapiens
gaatcttatagccag

SEQ ID NO: 1090271 - DNA, 15 bp, Homo sapiens
agaatcttatagcca

SEQ ID NO: 1090272 - DNA, 15 bp, Homo sapiens
aagaatcttatagcc

SEQ ID NO: 1090273 - DNA, 15 bp, Homo sapiens
taagaatcttatagc

SEQ ID NO: 1090274 - DNA, 15 bp, Homo sapiens
ctaagaatcttatag

SEQ ID NO: 1090275 - DNA, 15 bp, Homo sapiens
actaagaatcttata

SEQ ID NO: 1090276 - DNA, 15 bp, Homo sapiens
aactaagaatcttat

SEQ ID NO: 1090277 - DNA, 15 bp, Homo sapiens
taactaagaatctta

SEQ ID NO: 1090278 - DNA, 15 bp, Homo sapiens
ttaactaagaatctt

SEQ ID NO: 1090279 - DNA, 15 bp, Homo sapiens
attaactaagaatct

SEQ ID NO: 1090280 - DNA, 15 bp, Homo sapiens
tattaactaagaatc

SEQ ID NO: 1090281 - DNA, 15 bp, Homo sapiens
ctattaactaagaat

SEQ ID NO: 1090282 - DNA, 15 bp, Homo sapiens
actattaactaagaa

SEQ ID NO: 1090283 - DNA, 15 bp, Homo sapiens
aactattaactaaga

SEQ ID NO: 1090284 - DNA, 15 bp, Homo sapiens
aaactattaactaag

SEQ ID NO: 1090285 - DNA, 15 bp, Homo sapiens
aaaactattaactaa

SEQ ID NO: 1090286 - DNA, 15 bp, Homo sapiens
aaaaactattaacta

SEQ ID NO: 1090287 - DNA, 15 bp, Homo sapiens
aaaaaactattaact

SEQ ID NO: 1090288 - DNA, 15 bp, Homo sapiens
aaaaaaactattaac

SEQ ID NO: 1090289 - DNA, 15 bp, Homo sapiens
gaaaaaaactattaa

SEQ ID NO: 1090290 - DNA, 15 bp, Homo sapiens
ggaaaaaaactatta

SEQ ID NO: 1090291 - DNA, 15 bp, Homo sapiens
gggaaaaaaactatt

SEQ ID NO: 1090292 - DNA, 15 bp, Homo sapiens
tgggaaaaaaactat

SEQ ID NO: 1090293 - DNA, 15 bp, Homo sapiens
ctgggaaaaaaacta

SEQ ID NO: 1090294 - DNA, 15 bp, Homo sapiens
gctgggaaaaaaact

SEQ ID NO: 1090295 - DNA, 15 bp, Homo sapiens
tgctgggaaaaaaac

SEQ ID NO: 1090296 - DNA, 15 bp, Homo sapiens
gtgctgggaaaaaaa

SEQ ID NO: 1090297 - DNA, 15 bp, Homo sapiens
agtgctgggaaaaaa

SEQ ID NO: 1090298 - DNA, 15 bp, Homo sapiens
aagtgctgggaaaaa

SEQ ID NO: 1090299 - DNA, 15 bp, Homo sapiens
gaagtgctgggaaaa

SEQ ID NO: 1090300 - DNA, 15 bp, Homo sapiens
tgaagtgctgggaaa

SEQ ID NO: 1090301 - DNA, 15 bp, Homo sapiens
ttgaagtgctgggaa

SEQ ID NO: 1090302 - DNA, 15 bp, Homo sapiens
attgaagtgctggga

SEQ ID NO: 1090303 - DNA, 15 bp, Homo sapiens
aattgaagtgctggg

SEQ ID NO: 1090304 - DNA, 15 bp, Homo sapiens
taattgaagtgctgg

SEQ ID NO: 1090305 - DNA, 15 bp, Homo sapiens
ataattgaagtgctg

SEQ ID NO: 1090306 - DNA, 15 bp, Homo sapiens
aataattgaagtgct

SEQ ID NO: 1090307 - DNA, 15 bp, Homo sapiens
taataattgaagtgc

SEQ ID NO: 1090308 - DNA, 15 bp, Homo sapiens
ataataattgaagtg

SEQ ID NO: 1090309 - DNA, 15 bp, Homo sapiens
aataataattgaagt

SEQ ID NO: 1090310 - DNA, 15 bp, Homo sapiens
taataataattgaag

SEQ ID NO: 1090311 - DNA, 15 bp, Homo sapiens
ttaataataattgaa

SEQ ID NO: 1090312 - DNA, 15 bp, Homo sapiens
tttaataataattga

SEQ ID NO: 1090313 - DNA, 15 bp, Homo sapiens
ctttaataataattg

SEQ ID NO: 1090314 - DNA, 15 bp, Homo sapiens
actttaataataatt

SEQ ID NO: 1090315 - DNA, 15 bp, Homo sapiens
cactttaataataat

SEQ ID NO: 1090316 - DNA, 15 bp, Homo sapiens
acactttaataataa

SEQ ID NO: 1090317 - DNA, 15 bp, Homo sapiens
aacactttaataata

SEQ ID NO: 1090318 - DNA, 15 bp, Homo sapiens
taacactttaataat

SEQ ID NO: 1090319 - DNA, 15 bp, Homo sapiens
ataacactttaataa

SEQ ID NO: 1090320 - DNA, 15 bp, Homo sapiens
aataacactttaata

SEQ ID NO: 1090321 - DNA, 15 bp, Homo sapiens
taataacactttaat

SEQ ID NO: 1090322 - DNA, 15 bp, Homo sapiens
ataataacactttaa

SEQ ID NO: 1090323 - DNA, 15 bp, Homo sapiens
aataataacacttta

SEQ ID NO: 1090324 - DNA, 15 bp, Homo sapiens
taataataacacttt

SEQ ID NO: 1090325 - DNA, 15 bp, Homo sapiens
ataataataacactt

SEQ ID NO: 1090326 - DNA, 15 bp, Homo sapiens
aataataataacact

SEQ ID NO: 1090327 - DNA, 15 bp, Homo sapiens
taataataataacac

SEQ ID NO: 1090328 - DNA, 15 bp, Homo sapiens
ataataataataaca

SEQ ID NO: 1090329 - DNA, 15 bp, Homo sapiens
tctcaaaataataat

SEQ ID NO: 1090330 - DNA, 15 bp, Homo sapiens
atctcaaaataataa

SEQ ID NO: 1090331 - DNA, 15 bp, Homo sapiens
catctcaaaataata

SEQ ID NO: 1090332 - DNA, 15 bp, Homo sapiens
ccatctcaaaataat

SEQ ID NO: 1090333 - DNA, 15 bp, Homo sapiens
ggagactccatctca

SEQ ID NO: 1090334 - DNA, 15 bp, Homo sapiens
gggagactccatctc

SEQ ID NO: 1090335 - DNA, 15 bp, Homo sapiens
agggagactccatct

SEQ ID NO: 1090336 - DNA, 15 bp, Homo sapiens
gagggagactccatc

SEQ ID NO: 1090337 - DNA, 15 bp, Homo sapiens
agagggagactccat

SEQ ID NO: 1090338 - DNA, 15 bp, Homo sapiens
cagagggagactcca

SEQ ID NO: 1090339 - DNA, 15 bp, Homo sapiens
acagagggagactcc

SEQ ID NO: 1090340 - DNA, 15 bp, Homo sapiens
agtgacagagggaga

SEQ ID NO: 1090341 - DNA, 15 bp, Homo sapiens
gagtgacagagggag

SEQ ID NO: 1090342 - DNA, 15 bp, Homo sapiens
tgagtgacagaggga

SEQ ID NO: 1090343 - DNA, 15 bp, Homo sapiens
ctgagtgacagaggg

SEQ ID NO: 1090344 - DNA, 15 bp, Homo sapiens
cctgagtgacagagg

SEQ ID NO: 1090345 - DNA, 15 bp, Homo sapiens
agagattgcgccact

SEQ ID NO: 1090346 - DNA, 15 bp, Homo sapiens
cagagattgcgccac

SEQ ID NO: 1090347 - DNA, 15 bp, Homo sapiens
gcagagattgcgcca

SEQ ID NO: 1090348 - DNA, 15 bp, Homo sapiens
agcagagattgcgcc

SEQ ID NO: 1090349 - DNA, 15 bp, Homo sapiens
gagcagagattgcgc

SEQ ID NO: 1090350 - DNA, 15 bp, Homo sapiens
tgagcagagattgcg

SEQ ID NO: 1090351 - DNA, 15 bp, Homo sapiens
gtgagcagagattgc

SEQ ID NO: 1090352 - DNA, 15 bp, Homo sapiens
aactcgggaggctga

SEQ ID NO: 1090353 - DNA, 15 bp, Homo sapiens
taactcgggaggctg

SEQ ID NO: 1090354 - DNA, 15 bp, Homo sapiens
ctaactcgggaggct

SEQ ID NO: 1090355 - DNA, 15 bp, Homo sapiens
gctaactcgggaggc

SEQ ID NO: 1090356 - DNA, 15 bp, Homo sapiens
agctaactcgggagg

SEQ ID NO: 1090357 - DNA, 15 bp, Homo sapiens
cagctaactcgggag

SEQ ID NO: 1090358 - DNA, 15 bp, Homo sapiens
ccagctaactcggga

SEQ ID NO: 1090359 - DNA, 15 bp, Homo sapiens
cccagctaactcggg

SEQ ID NO: 1090360 - DNA, 15 bp, Homo sapiens
tcccagctaactcgg

SEQ ID NO: 1090361 - DNA, 15 bp, Homo sapiens
atcccagctaactcg

SEQ ID NO: 1090362 - DNA, 15 bp, Homo sapiens
aatcccagctaactc

SEQ ID NO: 1090363 - DNA, 15 bp, Homo sapiens
taatcccagctaact

SEQ ID NO: 1090364 - DNA, 15 bp, Homo sapiens
gtaatcccagctaac

SEQ ID NO: 1090365 - DNA, 15 bp, Homo sapiens
tgtaatcccagctaa

SEQ ID NO: 1090366 - DNA, 15 bp, Homo sapiens
gcacctgtaatccca

SEQ ID NO: 1090367 - DNA, 15 bp, Homo sapiens
ggcacctgtaatccc

SEQ ID NO: 1090368 - DNA, 15 bp, Homo sapiens
gcgggcacctgtaat

SEQ ID NO: 1090369 - DNA, 15 bp, Homo sapiens
ggcgggcacctgtaa

SEQ ID NO: 1090370 - DNA, 15 bp, Homo sapiens
atggtggcgggcacc

SEQ ID NO: 1090371 - DNA, 15 bp, Homo sapiens
catggtggcgggcac

SEQ ID NO: 1090372 - DNA, 15 bp, Homo sapiens
gcatggtggcgggca

SEQ ID NO: 1090373 - DNA, 15 bp, Homo sapiens
ggcatggtggcgggc

SEQ ID NO: 1090374 - DNA, 15 bp, Homo sapiens
gggcatggtggcggg

SEQ ID NO: 1090375 - DNA, 15 bp, Homo sapiens
tgggcatggtggcgg

SEQ ID NO: 1090376 - DNA, 15 bp, Homo sapiens
ctgggcatggtggcg

SEQ ID NO: 1090377 - DNA, 15 bp, Homo sapiens
tcagcctgaccaaca

SEQ ID NO: 1090378 - DNA, 15 bp, Homo sapiens
atcagcctgaccaac

SEQ ID NO: 1090379 - DNA, 15 bp, Homo sapiens
gatcagcctgaccaa

SEQ ID NO: 1090380 - DNA, 15 bp, Homo sapiens
agatcagcctgacca

SEQ ID NO: 1090381 - DNA, 15 bp, Homo sapiens
aagatcagcctgacc

SEQ ID NO: 1090382 - DNA, 15 bp, Homo sapiens
caagatcagcctgac

SEQ ID NO: 1090383 - DNA, 15 bp, Homo sapiens
tcaagatcagcctga

SEQ ID NO: 1090384 - DNA, 15 bp, Homo sapiens
ttcaagatcagcctg

SEQ ID NO: 1090385 - DNA, 15 bp, Homo sapiens
gttcaagatcagcct

SEQ ID NO: 1090386 - DNA, 15 bp, Homo sapiens
agttcaagatcagcc

SEQ ID NO: 1090387 - DNA, 15 bp, Homo sapiens
gagttcaagatcagc

SEQ ID NO: 1090388 - DNA, 15 bp, Homo sapiens
ggagttcaagatcag

SEQ ID NO: 1090389 - DNA, 15 bp, Homo sapiens
aggagttcaagatca

SEQ ID NO: 1090390 - DNA, 15 bp, Homo sapiens
caggagttcaagatc

SEQ ID NO: 1090391 - DNA, 15 bp, Homo sapiens
tcaggagttcaagat

SEQ ID NO: 1090392 - DNA, 15 bp, Homo sapiens
tatcacttgaggtca

SEQ ID NO: 1090393 - DNA, 15 bp, Homo sapiens
gtatcacttgaggtc

SEQ ID NO: 1090394 - DNA, 15 bp, Homo sapiens
tgtatcacttgaggt

SEQ ID NO: 1090395 - DNA, 15 bp, Homo sapiens
gtgtatcacttgagg

SEQ ID NO: 1090396 - DNA, 15 bp, Homo sapiens
ggtgtatcacttgag

SEQ ID NO: 1090397 - DNA, 15 bp, Homo sapiens
gggtgtatcacttga

SEQ ID NO: 1090398 - DNA, 15 bp, Homo sapiens
tgggtgtatcacttg

SEQ ID NO: 1090399 - DNA, 15 bp, Homo sapiens
gtgggtgtatcactt

SEQ ID NO: 1090400 - DNA, 15 bp, Homo sapiens
ggtgggtgtatcact

SEQ ID NO: 1090401 - DNA, 15 bp, Homo sapiens
aggtgggtgtatcac

SEQ ID NO: 1090402 - DNA, 15 bp, Homo sapiens
aaggtgggtgtatca

SEQ ID NO: 1090403 - DNA, 15 bp, Homo sapiens
caaggtgggtgtatc

SEQ ID NO: 1090404 - DNA, 15 bp, Homo sapiens
ccaaggtgggtgtat

SEQ ID NO: 1090405 - DNA, 15 bp, Homo sapiens
gccaaggtgggtgta

SEQ ID NO: 1090406 - DNA, 15 bp, Homo sapiens
ggccaaggtgggtgt

SEQ ID NO: 1090407 - DNA, 15 bp, Homo sapiens
aggccaaggtgggtg

SEQ ID NO: 1090408 - DNA, 15 bp, Homo sapiens
gcctctaatcccagc

SEQ ID NO: 1090409 - DNA, 15 bp, Homo sapiens
tgcctctaatcccag

SEQ ID NO: 1090410 - DNA, 15 bp, Homo sapiens
tcatgcctctaatcc

SEQ ID NO: 1090411 - DNA, 15 bp, Homo sapiens
ctcatgcctctaatc

SEQ ID NO: 1090412 - DNA, 15 bp, Homo sapiens
gctcatgcctctaat

SEQ ID NO: 1090413 - DNA, 15 bp, Homo sapiens
ggctcatgcctctaa

SEQ ID NO: 1090414 - DNA, 15 bp, Homo sapiens
tggctcatgcctcta

SEQ ID NO: 1090415 - DNA, 15 bp, Homo sapiens
gtggctcatgcctct

SEQ ID NO: 1090416 - DNA, 15 bp, Homo sapiens
ggtggctcatgcctc

SEQ ID NO: 1090417 - DNA, 15 bp, Homo sapiens
gaccaggcatggtgg

SEQ ID NO: 1090418 - DNA, 15 bp, Homo sapiens
agaccaggcatggtg

SEQ ID NO: 1090419 - DNA, 15 bp, Homo sapiens
tagaccaggcatggt

SEQ ID NO: 1090420 - DNA, 15 bp, Homo sapiens
ttagaccaggcatgg

SEQ ID NO: 1090421 - DNA, 15 bp, Homo sapiens
tttagaccaggcatg

SEQ ID NO: 1090422 - DNA, 15 bp, Homo sapiens
ctttagaccaggcat

SEQ ID NO: 1090423 - DNA, 15 bp, Homo sapiens
actttagaccaggca

SEQ ID NO: 1090424 - DNA, 15 bp, Homo sapiens
cactttagaccaggc

SEQ ID NO: 1090425 - DNA, 15 bp, Homo sapiens
acactttagaccagg

SEQ ID NO: 1090426 - DNA, 15 bp, Homo sapiens
tacactttagaccag

SEQ ID NO: 1090427 - DNA, 15 bp, Homo sapiens
ttacactttagacca

SEQ ID NO: 1090428 - DNA, 15 bp, Homo sapiens
attacactttagacc

SEQ ID NO: 1090429 - DNA, 15 bp, Homo sapiens
aattacactttagac

SEQ ID NO: 1090430 - DNA, 15 bp, Homo sapiens
taattacactttaga

SEQ ID NO: 1090431 - DNA, 15 bp, Homo sapiens
ataattacactttag

SEQ ID NO: 1090432 - DNA, 15 bp, Homo sapiens
aataattacacttta

SEQ ID NO: 1090433 - DNA, 15 bp, Homo sapiens
taataattacacttt

SEQ ID NO: 1090434 - DNA, 15 bp, Homo sapiens
ataataattacactt

SEQ ID NO: 1090435 - DNA, 15 bp, Homo sapiens
aataataattacact

SEQ ID NO: 1090436 - DNA, 15 bp, Homo sapiens
taataataattacac

SEQ ID NO: 1090437 - DNA, 15 bp, Homo sapiens
gtaataataattaca

SEQ ID NO: 1090438 - DNA, 15 bp, Homo sapiens
tgtaataataattac

SEQ ID NO: 1090439 - DNA, 15 bp, Homo sapiens
ctgtaataataatta

SEQ ID NO: 1090440 - DNA, 15 bp, Homo sapiens
gctgtaataataatt

SEQ ID NO: 1090441 - DNA, 15 bp, Homo sapiens
agctgtaataataat

SEQ ID NO: 1090442 - DNA, 15 bp, Homo sapiens
cagctgtaataataa

SEQ ID NO: 1090443 - DNA, 15 bp, Homo sapiens
gcagctgtaataata

SEQ ID NO: 1090444 - DNA, 15 bp, Homo sapiens
ggcagctgtaataat

SEQ ID NO: 1090445 - DNA, 15 bp, Homo sapiens
tggcagctgtaataa

SEQ ID NO: 1090446 - DNA, 15 bp, Homo sapiens
atggcagctgtaata

SEQ ID NO: 1090447 - DNA, 15 bp, Homo sapiens
aatggcagctgtaat

SEQ ID NO: 1090448 - DNA, 15 bp, Homo sapiens
aaatggcagctgtaa

SEQ ID NO: 1090449 - DNA, 15 bp, Homo sapiens
caaatggcagctgta

SEQ ID NO: 1090450 - DNA, 15 bp, Homo sapiens
ccaaatggcagctgt

SEQ ID NO: 1090451 - DNA, 15 bp, Homo sapiens
gccaaatggcagctg

SEQ ID NO: 1090452 - DNA, 15 bp, Homo sapiens
ggccaaatggcagct

SEQ ID NO: 1090453 - DNA, 15 bp, Homo sapiens
aggccaaatggcagc

SEQ ID NO: 1090454 - DNA, 15 bp, Homo sapiens
gaggccaaatggcag

SEQ ID NO: 1090455 - DNA, 15 bp, Homo sapiens
ggaggccaaatggca

SEQ ID NO: 1090456 - DNA, 15 bp, Homo sapiens
aggaggccaaatggc

SEQ ID NO: 1090457 - DNA, 15 bp, Homo sapiens
aaggaggccaaatgg

SEQ ID NO: 1090458 - DNA, 15 bp, Homo sapiens
caaggaggccaaatg

SEQ ID NO: 1090459 - DNA, 15 bp, Homo sapiens
ccaaggaggccaaat

SEQ ID NO: 1090460 - DNA, 15 bp, Homo sapiens
accaaggaggccaaa

SEQ ID NO: 1090461 - DNA, 15 bp, Homo sapiens
aaccaaggaggccaa

SEQ ID NO: 1090462 - DNA, 15 bp, Homo sapiens
aaaccaaggaggcca

SEQ ID NO: 1090463 - DNA, 15 bp, Homo sapiens
gaaaccaaggaggcc

SEQ ID NO: 1090464 - DNA, 15 bp, Homo sapiens
agaaaccaaggaggc

SEQ ID NO: 1090465 - DNA, 15 bp, Homo sapiens
tagaaaccaaggagg

SEQ ID NO: 1090466 - DNA, 15 bp, Homo sapiens
ttagaaaccaaggag

SEQ ID NO: 1090467 - DNA, 15 bp, Homo sapiens
attagaaaccaagga

SEQ ID NO: 1090468 - DNA, 15 bp, Homo sapiens
cattagaaaccaagg

SEQ ID NO: 1090469 - DNA, 15 bp, Homo sapiens
tcattagaaaccaag

SEQ ID NO: 1090470 - DNA, 15 bp, Homo sapiens
ctcattagaaaccaa

SEQ ID NO: 1090471 - DNA, 15 bp, Homo sapiens
tctcattagaaacca

SEQ ID NO: 1090472 - DNA, 15 bp, Homo sapiens
ttctcattagaaacc

SEQ ID NO: 1090473 - DNA, 15 bp, Homo sapiens
tttctcattagaaac

SEQ ID NO: 1090474 - DNA, 15 bp, Homo sapiens
atttctcattagaaa

SEQ ID NO: 1090475 - DNA, 15 bp, Homo sapiens
gatttctcattagaa

SEQ ID NO: 1090476 - DNA, 15 bp, Homo sapiens
tgatttctcattaga

SEQ ID NO: 1090477 - DNA, 15 bp, Homo sapiens
atgatttctcattag

SEQ ID NO: 1090478 - DNA, 15 bp, Homo sapiens
gatgatttctcatta

SEQ ID NO: 1090479 - DNA, 15 bp, Homo sapiens
agatgatttctcatt

SEQ ID NO: 1090480 - DNA, 15 bp, Homo sapiens
cagatgatttctcat

SEQ ID NO: 1090481 - DNA, 15 bp, Homo sapiens
acagatgatttctca

SEQ ID NO: 1090482 - DNA, 15 bp, Homo sapiens
aacagatgatttctc

SEQ ID NO: 1090483 - DNA, 15 bp, Homo sapiens
taacagatgatttct

SEQ ID NO: 1090484 - DNA, 15 bp, Homo sapiens
ttaacagatgatttc

SEQ ID NO: 1090485 - DNA, 15 bp, Homo sapiens
tttaacagatgattt

SEQ ID NO: 1090486 - DNA, 15 bp, Homo sapiens
gtttaacagatgatt

SEQ ID NO: 1090487 - DNA, 15 bp, Homo sapiens
agtttaacagatgat

SEQ ID NO: 1090488 - DNA, 15 bp, Homo sapiens
aagtttaacagatga

SEQ ID NO: 1090489 - DNA, 15 bp, Homo sapiens
taagtttaacagatg

SEQ ID NO: 1090490 - DNA, 15 bp, Homo sapiens
ataagtttaacagat

SEQ ID NO: 1090491 - DNA, 15 bp, Homo sapiens
aataagtttaacaga

SEQ ID NO: 1090492 - DNA, 15 bp, Homo sapiens
caataagtttaacag

SEQ ID NO: 1090493 - DNA, 15 bp, Homo sapiens
gcaataagtttaaca

SEQ ID NO: 1090494 - DNA, 15 bp, Homo sapiens
tgcaataagtttaac

SEQ ID NO: 1090495 - DNA, 15 bp, Homo sapiens
ttgcaataagtttaa

SEQ ID NO: 1090496 - DNA, 15 bp, Homo sapiens
tttgcaataagttta

SEQ ID NO: 1090497 - DNA, 15 bp, Homo sapiens
atttgcaataagttt

SEQ ID NO: 1090498 - DNA, 15 bp, Homo sapiens
gatttgcaataagtt

SEQ ID NO: 1090499 - DNA, 15 bp, Homo sapiens
ggatttgcaataagt

SEQ ID NO: 1090500 - DNA, 15 bp, Homo sapiens
aggatttgcaataag

SEQ ID NO: 1090501 - DNA, 15 bp, Homo sapiens
aaggatttgcaataa

SEQ ID NO: 1090502 - DNA, 15 bp, Homo sapiens
caaggatttgcaata

SEQ ID NO: 1090503 - DNA, 15 bp, Homo sapiens
ccaaggatttgcaat

SEQ ID NO: 1090504 - DNA, 15 bp, Homo sapiens
accaaggatttgcaa

SEQ ID NO: 1090505 - DNA, 15 bp, Homo sapiens
taccaaggatttgca

SEQ ID NO: 1090506 - DNA, 15 bp, Homo sapiens
ataccaaggatttgc

SEQ ID NO: 1090507 - DNA, 15 bp, Homo sapiens
cataccaaggatttg

SEQ ID NO: 1090508 - DNA, 15 bp, Homo sapiens
acataccaaggattt

SEQ ID NO: 1090509 - DNA, 15 bp, Homo sapiens
tacataccaaggatt

SEQ ID NO: 1090510 - DNA, 15 bp, Homo sapiens
atacataccaaggat

SEQ ID NO: 1090511 - DNA, 15 bp, Homo sapiens
catacataccaagga

SEQ ID NO: 1090512 - DNA, 15 bp, Homo sapiens
gcatacataccaagg

SEQ ID NO: 1090513 - DNA, 15 bp, Homo sapiens
agcatacataccaag

SEQ ID NO: 1090514 - DNA, 15 bp, Homo sapiens
tagcatacataccaa

SEQ ID NO: 1090515 - DNA, 15 bp, Homo sapiens
atagcatacatacca

SEQ ID NO: 1090516 - DNA, 15 bp, Homo sapiens
catagcatacatacc

SEQ ID NO: 1090517 - DNA, 15 bp, Homo sapiens
acatagcatacatac

SEQ ID NO: 1090518 - DNA, 15 bp, Homo sapiens
cacatagcatacata

SEQ ID NO: 1090519 - DNA, 15 bp, Homo sapiens
acacatagcatacat

SEQ ID NO: 1090520 - DNA, 15 bp, Homo sapiens
gacacatagcataca

SEQ ID NO: 1090521 - DNA, 15 bp, Homo sapiens
tgacacatagcatac

SEQ ID NO: 1090522 - DNA, 15 bp, Homo sapiens
atgacacatagcata

SEQ ID NO: 1090523 - DNA, 15 bp, Homo sapiens
aatgacacatagcat

SEQ ID NO: 1090524 - DNA, 15 bp, Homo sapiens
aaatgacacatagca

SEQ ID NO: 1090525 - DNA, 15 bp, Homo sapiens
gaaatgacacatagc

SEQ ID NO: 1090526 - DNA, 15 bp, Homo sapiens
agaaatgacacatag

SEQ ID NO: 1090527 - DNA, 15 bp, Homo sapiens
gagaaatgacacata

SEQ ID NO: 1090528 - DNA, 15 bp, Homo sapiens
agagaaatgacacat

SEQ ID NO: 1090529 - DNA, 15 bp, Homo sapiens
gagagaaatgacaca

SEQ ID NO: 1090530 - DNA, 15 bp, Homo sapiens
agagagaaatgacac

SEQ ID NO: 1090531 - DNA, 15 bp, Homo sapiens
aagagagaaatgaca

SEQ ID NO: 1090532 - DNA, 15 bp, Homo sapiens
caagagagaaatgac

SEQ ID NO: 1090533 - DNA, 15 bp, Homo sapiens
gcaagagagaaatga

SEQ ID NO: 1090534 - DNA, 15 bp, Homo sapiens
agcaagagagaaatg

SEQ ID NO: 1090535 - DNA, 15 bp, Homo sapiens
cagcaagagagaaat

SEQ ID NO: 1090536 - DNA, 15 bp, Homo sapiens
gcagcaagagagaaa

SEQ ID NO: 1090537 - DNA, 15 bp, Homo sapiens
agcagcaagagagaa

SEQ ID NO: 1090538 - DNA, 15 bp, Homo sapiens
aagcagcaagagaga

SEQ ID NO: 1090539 - DNA, 15 bp, Homo sapiens
gaagcagcaagagag

SEQ ID NO: 1090540 - DNA, 15 bp, Homo sapiens
ggaagcagcaagaga

SEQ ID NO: 1090541 - DNA, 15 bp, Homo sapiens
tggaagcagcaagag

SEQ ID NO: 1090542 - DNA, 15 bp, Homo sapiens
ttggaagcagcaaga

SEQ ID NO: 1090543 - DNA, 15 bp, Homo sapiens
cttggaagcagcaag

SEQ ID NO: 1090544 - DNA, 15 bp, Homo sapiens
tcttggaagcagcaa

SEQ ID NO: 1090545 - DNA, 15 bp, Homo sapiens
atcttggaagcagca

SEQ ID NO: 1090546 - DNA, 15 bp, Homo sapiens
aatcttggaagcagc

SEQ ID NO: 1090547 - DNA, 15 bp, Homo sapiens
gaatcttggaagcag

SEQ ID NO: 1090548 - DNA, 15 bp, Homo sapiens
agaatcttggaagca

SEQ ID NO: 1090549 - DNA, 15 bp, Homo sapiens
gagaatcttggaagc

SEQ ID NO: 1090550 - DNA, 15 bp, Homo sapiens
agagaatcttggaag

SEQ ID NO: 1090551 - DNA, 15 bp, Homo sapiens
gagagaatcttggaa

SEQ ID NO: 1090552 - DNA, 15 bp, Homo sapiens
agagagaatcttgga

SEQ ID NO: 1090553 - DNA, 15 bp, Homo sapiens
gagagagaatcttgg

SEQ ID NO: 1090554 - DNA, 15 bp, Homo sapiens
agagagagaatcttg

SEQ ID NO: 1090555 - DNA, 15 bp, Homo sapiens
cagagagagaatctt

SEQ ID NO: 1090556 - DNA, 15 bp, Homo sapiens
acagagagagaatct

SEQ ID NO: 1090557 - DNA, 15 bp, Homo sapiens
gacagagagagaatc

SEQ ID NO: 1090558 - DNA, 15 bp, Homo sapiens
aagacagagagagaa

SEQ ID NO: 1090559 - DNA, 15 bp, Homo sapiens
aaagacagagagaga

SEQ ID NO: 1090560 - DNA, 15 bp, Homo sapiens
caaagacagagagag

SEQ ID NO: 1090561 - DNA, 15 bp, Homo sapiens
acaaagacagagaga

SEQ ID NO: 1090562 - DNA, 15 bp, Homo sapiens
gacaaagacagagag

SEQ ID NO: 1090563 - DNA, 15 bp, Homo sapiens
agacaaagacagaga

SEQ ID NO: 1090564 - DNA, 15 bp, Homo sapiens
caaaagacaaagaca

SEQ ID NO: 1090565 - DNA, 15 bp, Homo sapiens
tcaaaagacaaagac

SEQ ID NO: 1090566 - DNA, 15 bp, Homo sapiens
gtcaaaagacaaaga

SEQ ID NO: 1090567 - DNA, 15 bp, Homo sapiens
tgtcaaaagacaaag

SEQ ID NO: 1090568 - DNA, 15 bp, Homo sapiens
ttgtcaaaagacaaa

SEQ ID NO: 1090569 - DNA, 15 bp, Homo sapiens
attgtcaaaagacaa

SEQ ID NO: 1090570 - DNA, 15 bp, Homo sapiens
aattgtcaaaagaca

SEQ ID NO: 1090571 - DNA, 15 bp, Homo sapiens
aaattgtcaaaagac

SEQ ID NO: 1090572 - DNA, 15 bp, Homo sapiens
caaattgtcaaaaga

SEQ ID NO: 1090573 - DNA, 15 bp, Homo sapiens
tcaaattgtcaaaag

SEQ ID NO: 1090574 - DNA, 15 bp, Homo sapiens
gtcaaattgtcaaaa

SEQ ID NO: 1090575 - DNA, 15 bp, Homo sapiens
agtcaaattgtcaaa

SEQ ID NO: 1090576 - DNA, 15 bp, Homo sapiens
tagtcaaattgtcaa

SEQ ID NO: 1090577 - DNA, 15 bp, Homo sapiens
atagtcaaattgtca

SEQ ID NO: 1090578 - DNA, 15 bp, Homo sapiens
tatagtcaaattgtc

SEQ ID NO: 1090579 - DNA, 15 bp, Homo sapiens
ttatagtcaaattgt

SEQ ID NO: 1090580 - DNA, 15 bp, Homo sapiens
attatagtcaaattg

SEQ ID NO: 1090581 - DNA, 15 bp, Homo sapiens
cattatagtcaaatt

SEQ ID NO: 1090582 - DNA, 15 bp, Homo sapiens
acattatagtcaaat

SEQ ID NO: 1090583 - DNA, 15 bp, Homo sapiens
cacattatagtcaaa

SEQ ID NO: 1090584 - DNA, 15 bp, Homo sapiens
acacattatagtcaa

SEQ ID NO: 1090585 - DNA, 15 bp, Homo sapiens
aacacattatagtca

SEQ ID NO: 1090586 - DNA, 15 bp, Homo sapiens
aaacacattatagtc

SEQ ID NO: 1090587 - DNA, 15 bp, Homo sapiens
gaaacacattatagt

SEQ ID NO: 1090588 - DNA, 15 bp, Homo sapiens
tgaaacacattatag

SEQ ID NO: 1090589 - DNA, 15 bp, Homo sapiens
ctgaaacacattata

SEQ ID NO: 1090590 - DNA, 15 bp, Homo sapiens
actgaaacacattat

SEQ ID NO: 1090591 - DNA, 15 bp, Homo sapiens
cactgaaacacatta

SEQ ID NO: 1090592 - DNA, 15 bp, Homo sapiens
acactgaaacacatt

SEQ ID NO: 1090593 - DNA, 15 bp, Homo sapiens
cacactgaaacacat

SEQ ID NO: 1090594 - DNA, 15 bp, Homo sapiens
tcacactgaaacaca

SEQ ID NO: 1090595 - DNA, 15 bp, Homo sapiens
ttcacactgaaacac

SEQ ID NO: 1090596 - DNA, 15 bp, Homo sapiens
attcacactgaaaca

SEQ ID NO: 1090597 - DNA, 15 bp, Homo sapiens
aattcacactgaaac

SEQ ID NO: 1090598 - DNA, 15 bp, Homo sapiens
aaattcacactgaaa

SEQ ID NO: 1090599 - DNA, 15 bp, Homo sapiens
gaaattcacactgaa

SEQ ID NO: 1090600 - DNA, 15 bp, Homo sapiens
agaaattcacactga

SEQ ID NO: 1090601 - DNA, 15 bp, Homo sapiens
aagaaattcacactg

SEQ ID NO: 1090602 - DNA, 15 bp, Homo sapiens
taagaaattcacact

SEQ ID NO: 1090603 - DNA, 15 bp, Homo sapiens
ctaagaaattcacac

SEQ ID NO: 1090604 - DNA, 15 bp, Homo sapiens
tctaagaaattcaca

SEQ ID NO: 1090605 - DNA, 15 bp, Homo sapiens
ctctaagaaattcac

SEQ ID NO: 1090606 - DNA, 15 bp, Homo sapiens
actctaagaaattca

SEQ ID NO: 1090607 - DNA, 15 bp, Homo sapiens
aactctaagaaattc

SEQ ID NO: 1090608 - DNA, 15 bp, Homo sapiens
aaactctaagaaatt

SEQ ID NO: 1090609 - DNA, 15 bp, Homo sapiens
taaactctaagaaat

SEQ ID NO: 1090610 - DNA, 15 bp, Homo sapiens
ataaactctaagaaa

SEQ ID NO: 1090611 - DNA, 15 bp, Homo sapiens
gataaactctaagaa

SEQ ID NO: 1090612 - DNA, 15 bp, Homo sapiens
ggataaactctaaga

SEQ ID NO: 1090613 - DNA, 15 bp, Homo sapiens
gggataaactctaag

SEQ ID NO: 1090614 - DNA, 15 bp, Homo sapiens
tgggataaactctaa

SEQ ID NO: 1090615 - DNA, 15 bp, Homo sapiens
gtgggataaactcta

SEQ ID NO: 1090616 - DNA, 15 bp, Homo sapiens
agtgggataaactct

SEQ ID NO: 1090617 - DNA, 15 bp, Homo sapiens
aagtgggataaactc

SEQ ID NO: 1090618 - DNA, 15 bp, Homo sapiens
caagtgggataaact

SEQ ID NO: 1090619 - DNA, 15 bp, Homo sapiens
ccaagtgggataaac

SEQ ID NO: 1090620 - DNA, 15 bp, Homo sapiens
tccaagtgggataaa

SEQ ID NO: 1090621 - DNA, 15 bp, Homo sapiens
atccaagtgggataa

SEQ ID NO: 1090622 - DNA, 15 bp, Homo sapiens
aatccaagtgggata

SEQ ID NO: 1090623 - DNA, 15 bp, Homo sapiens
aaatccaagtgggat

SEQ ID NO: 1090624 - DNA, 15 bp, Homo sapiens
gaaatccaagtggga

SEQ ID NO: 1090625 - DNA, 15 bp, Homo sapiens
tgaaatccaagtggg

SEQ ID NO: 1090626 - DNA, 15 bp, Homo sapiens
atgaaatccaagtgg

SEQ ID NO: 1090627 - DNA, 15 bp, Homo sapiens
aatgaaatccaagtg

SEQ ID NO: 1090628 - DNA, 15 bp, Homo sapiens
caatgaaatccaagt

SEQ ID NO: 1090629 - DNA, 15 bp, Homo sapiens
tcaatgaaatccaag

SEQ ID NO: 1090630 - DNA, 15 bp, Homo sapiens
ctcaatgaaatccaa

SEQ ID NO: 1090631 - DNA, 15 bp, Homo sapiens
gctcaatgaaatcca

SEQ ID NO: 1090632 - DNA, 15 bp, Homo sapiens
agctcaatgaaatcc

SEQ ID NO: 1090633 - DNA, 15 bp, Homo sapiens
aagctcaatgaaatc

SEQ ID NO: 1090634 - DNA, 15 bp, Homo sapiens
gaagctcaatgaaat

SEQ ID NO: 1090635 - DNA, 15 bp, Homo sapiens
agaagctcaatgaaa

SEQ ID NO: 1090636 - DNA, 15 bp, Homo sapiens
aagaagctcaatgaa

SEQ ID NO: 1090637 - DNA, 15 bp, Homo sapiens
caagaagctcaatga

SEQ ID NO: 1090638 - DNA, 15 bp, Homo sapiens
ccaagaagctcaatg

SEQ ID NO: 1090639 - DNA, 15 bp, Homo sapiens
tccaagaagctcaat

SEQ ID NO: 1090640 - DNA, 15 bp, Homo sapiens
atccaagaagctcaa

SEQ ID NO: 1090641 - DNA, 15 bp, Homo sapiens
catccaagaagctca

SEQ ID NO: 1090642 - DNA, 15 bp, Homo sapiens
acatccaagaagctc

SEQ ID NO: 1090643 - DNA, 15 bp, Homo sapiens
cacatccaagaagct

SEQ ID NO: 1090644 - DNA, 15 bp, Homo sapiens
acacatccaagaagc

SEQ ID NO: 1090645 - DNA, 15 bp, Homo sapiens
tacacatccaagaag

SEQ ID NO: 1090646 - DNA, 15 bp, Homo sapiens
gtacacatccaagaa

SEQ ID NO: 1090647 - DNA, 15 bp, Homo sapiens
cgtacacatccaaga

SEQ ID NO: 1090648 - DNA, 15 bp, Homo sapiens
acgtacacatccaag

SEQ ID NO: 1090649 - DNA, 15 bp, Homo sapiens
aacgtacacatccaa

SEQ ID NO: 1090650 - DNA, 15 bp, Homo sapiens
aaacgtacacatcca

SEQ ID NO: 1090651 - DNA, 15 bp, Homo sapiens
caaacgtacacatcc

SEQ ID NO: 1090652 - DNA, 15 bp, Homo sapiens
acaaacgtacacatc

SEQ ID NO: 1090653 - DNA, 15 bp, Homo sapiens
gacaaacgtacacat

SEQ ID NO: 1090654 - DNA, 15 bp, Homo sapiens
agacaaacgtacaca

SEQ ID NO: 1090655 - DNA, 15 bp, Homo sapiens
aagacaaacgtacac

SEQ ID NO: 1090656 - DNA, 15 bp, Homo sapiens
aaagacaaacgtaca

SEQ ID NO: 1090657 - DNA, 15 bp, Homo sapiens
gaaagacaaacgtac

SEQ ID NO: 1090658 - DNA, 15 bp, Homo sapiens
tgaaagacaaacgta

SEQ ID NO: 1090659 - DNA, 15 bp, Homo sapiens
gtgaaagacaaacgt

SEQ ID NO: 1090660 - DNA, 15 bp, Homo sapiens
ggtgaaagacaaacg

SEQ ID NO: 1090661 - DNA, 15 bp, Homo sapiens
tggtgaaagacaaac

SEQ ID NO: 1090662 - DNA, 15 bp, Homo sapiens
ttggtgaaagacaaa

SEQ ID NO: 1090663 - DNA, 15 bp, Homo sapiens
tttggtgaaagacaa

SEQ ID NO: 1090664 - DNA, 15 bp, Homo sapiens
atttggtgaaagaca

SEQ ID NO: 1090665 - DNA, 15 bp, Homo sapiens
gatttggtgaaagac

SEQ ID NO: 1090666 - DNA, 15 bp, Homo sapiens
agatttggtgaaaga

SEQ ID NO: 1090667 - DNA, 15 bp, Homo sapiens
cagatttggtgaaag

SEQ ID NO: 1090668 - DNA, 15 bp, Homo sapiens
ccagatttggtgaaa

SEQ ID NO: 1090669 - DNA, 15 bp, Homo sapiens
cccagatttggtgaa

SEQ ID NO: 1090670 - DNA, 15 bp, Homo sapiens
tcccagatttggtga

SEQ ID NO: 1090671 - DNA, 15 bp, Homo sapiens
ttcccagatttggtg

SEQ ID NO: 1090672 - DNA, 15 bp, Homo sapiens
tttcccagatttggt

SEQ ID NO: 1090673 - DNA, 15 bp, Homo sapiens
atttcccagatttgg

SEQ ID NO: 1090674 - DNA, 15 bp, Homo sapiens
aatttcccagatttg

SEQ ID NO: 1090675 - DNA, 15 bp, Homo sapiens
taatttcccagattt

SEQ ID NO: 1090676 - DNA, 15 bp, Homo sapiens
ataatttcccagatt

SEQ ID NO: 1090677 - DNA, 15 bp, Homo sapiens
aataatttcccagat

SEQ ID NO: 1090678 - DNA, 15 bp, Homo sapiens
aaataatttcccaga

SEQ ID NO: 1090679 - DNA, 15 bp, Homo sapiens
gaaataatttcccag

SEQ ID NO: 1090680 - DNA, 15 bp, Homo sapiens
tgaaataatttccca

SEQ ID NO: 1090681 - DNA, 15 bp, Homo sapiens
gtgaaataatttccc

SEQ ID NO: 1090682 - DNA, 15 bp, Homo sapiens
ggtgaaataatttcc

SEQ ID NO: 1090683 - DNA, 15 bp, Homo sapiens
tggtgaaataatttc

SEQ ID NO: 1090684 - DNA, 15 bp, Homo sapiens
atggtgaaataattt

SEQ ID NO: 1090685 - DNA, 15 bp, Homo sapiens
aatggtgaaataatt

SEQ ID NO: 1090686 - DNA, 15 bp, Homo sapiens
aaatggtgaaataat

SEQ ID NO: 1090687 - DNA, 15 bp, Homo sapiens
gaaatggtgaaataa

SEQ ID NO: 1090688 - DNA, 15 bp, Homo sapiens
agaaatggtgaaata

SEQ ID NO: 1090689 - DNA, 15 bp, Homo sapiens
gagaaatggtgaaat

SEQ ID NO: 1090690 - DNA, 15 bp, Homo sapiens
tgagaaatggtgaaa

SEQ ID NO: 1090691 - DNA, 15 bp, Homo sapiens
ttgagaaatggtgaa

SEQ ID NO: 1090692 - DNA, 15 bp, Homo sapiens
tttgagaaatggtga

SEQ ID NO: 1090693 - DNA, 15 bp, Homo sapiens
atttgagaaatggtg

SEQ ID NO: 1090694 - DNA, 15 bp, Homo sapiens
tatttgagaaatggt

SEQ ID NO: 1090695 - DNA, 15 bp, Homo sapiens
atatttgagaaatgg

SEQ ID NO: 1090696 - DNA, 15 bp, Homo sapiens
gatatttgagaaatg

SEQ ID NO: 1090697 - DNA, 15 bp, Homo sapiens
agatatttgagaaat

SEQ ID NO: 1090698 - DNA, 15 bp, Homo sapiens
aagatatttgagaaa

SEQ ID NO: 1090699 - DNA, 15 bp, Homo sapiens
aaagatatttgagaa

SEQ ID NO: 1090700 - DNA, 15 bp, Homo sapiens
aaaagatatttgaga

SEQ ID NO: 1090701 - DNA, 15 bp, Homo sapiens
aaaaagatatttgag

SEQ ID NO: 1090702 - DNA, 15 bp, Homo sapiens
gaaaaagatatttga

SEQ ID NO: 1090703 - DNA, 15 bp, Homo sapiens
agaaaaagatatttg

SEQ ID NO: 1090704 - DNA, 15 bp, Homo sapiens
aagaaaaagatattt

SEQ ID NO: 1090705 - DNA, 15 bp, Homo sapiens
gaagaaaaagatatt

SEQ ID NO: 1090706 - DNA, 15 bp, Homo sapiens
ggaagaaaaagatat

SEQ ID NO: 1090707 - DNA, 15 bp, Homo sapiens
gggaagaaaaagata

SEQ ID NO: 1090708 - DNA, 15 bp, Homo sapiens
ggggaagaaaaagat

SEQ ID NO: 1090709 - DNA, 15 bp, Homo sapiens
aggggaagaaaaaga

SEQ ID NO: 1090710 - DNA, 15 bp, Homo sapiens
aaggggaagaaaaag

SEQ ID NO: 1090711 - DNA, 15 bp, Homo sapiens
aaaggggaagaaaaa

SEQ ID NO: 1090712 - DNA, 15 bp, Homo sapiens
gaaaggggaagaaaa

SEQ ID NO: 1090713 - DNA, 15 bp, Homo sapiens
ggaaaggggaagaaa

SEQ ID NO: 1090714 - DNA, 15 bp, Homo sapiens
tggaaaggggaagaa

SEQ ID NO: 1090715 - DNA, 15 bp, Homo sapiens
atggaaaggggaaga

SEQ ID NO: 1090716 - DNA, 15 bp, Homo sapiens
gatggaaaggggaag

SEQ ID NO: 1090717 - DNA, 15 bp, Homo sapiens
agatggaaaggggaa

SEQ ID NO: 1090718 - DNA, 15 bp, Homo sapiens
gagatggaaagggga

SEQ ID NO: 1090719 - DNA, 15 bp, Homo sapiens
agagatggaaagggg

SEQ ID NO: 1090720 - DNA, 15 bp, Homo sapiens
gagagatggaaaggg

SEQ ID NO: 1090721 - DNA, 15 bp, Homo sapiens
agagagatggaaagg

SEQ ID NO: 1090722 - DNA, 15 bp, Homo sapiens
aagagagatggaaag

SEQ ID NO: 1090723 - DNA, 15 bp, Homo sapiens
gaagagagatggaaa

SEQ ID NO: 1090724 - DNA, 15 bp, Homo sapiens
agaagagagatggaa

SEQ ID NO: 1090725 - DNA, 15 bp, Homo sapiens
aagaagagagatgga

SEQ ID NO: 1090726 - DNA, 15 bp, Homo sapiens
gaagaagagagatgg

SEQ ID NO: 1090727 - DNA, 15 bp, Homo sapiens
agaagaagagagatg

SEQ ID NO: 1090728 - DNA, 15 bp, Homo sapiens
cagaagaagagagat

SEQ ID NO: 1090729 - DNA, 15 bp, Homo sapiens
ccagaagaagagaga

SEQ ID NO: 1090730 - DNA, 15 bp, Homo sapiens
tccagaagaagagag

SEQ ID NO: 1090731 - DNA, 15 bp, Homo sapiens
ctccagaagaagaga

SEQ ID NO: 1090732 - DNA, 15 bp, Homo sapiens
gctccagaagaagag

SEQ ID NO: 1090733 - DNA, 15 bp, Homo sapiens
agctccagaagaaga

SEQ ID NO: 1090734 - DNA, 15 bp, Homo sapiens
gagctccagaagaag

SEQ ID NO: 1090735 - DNA, 15 bp, Homo sapiens
ggagctccagaagaa

SEQ ID NO: 1090736 - DNA, 15 bp, Homo sapiens
gggagctccagaaga

SEQ ID NO: 1090737 - DNA, 15 bp, Homo sapiens
cgggagctccagaag

SEQ ID NO: 1090738 - DNA, 15 bp, Homo sapiens
acgggagctccagaa

SEQ ID NO: 1090739 - DNA, 15 bp, Homo sapiens
tacgggagctccaga

SEQ ID NO: 1090740 - DNA, 15 bp, Homo sapiens
atacgggagctccag

SEQ ID NO: 1090741 - DNA, 15 bp, Homo sapiens
tatacgggagctcca

SEQ ID NO: 1090742 - DNA, 15 bp, Homo sapiens
gtatacgggagctcc

SEQ ID NO: 1090743 - DNA, 15 bp, Homo sapiens
agtatacgggagctc

SEQ ID NO: 1090744 - DNA, 15 bp, Homo sapiens
aagtatacgggagct

SEQ ID NO: 1090745 - DNA, 15 bp, Homo sapiens
taagtatacgggagc

SEQ ID NO: 1090746 - DNA, 15 bp, Homo sapiens
ctaagtatacgggag

SEQ ID NO: 1090747 - DNA, 15 bp, Homo sapiens
actaagtatacggga

SEQ ID NO: 1090748 - DNA, 15 bp, Homo sapiens
aactaagtatacggg

SEQ ID NO: 1090749 - DNA, 15 bp, Homo sapiens
caactaagtatacgg

SEQ ID NO: 1090750 - DNA, 15 bp, Homo sapiens
ccaactaagtatacg

SEQ ID NO: 1090751 - DNA, 15 bp, Homo sapiens
gccaactaagtatac

SEQ ID NO: 1090752 - DNA, 15 bp, Homo sapiens
tgccaactaagtata

SEQ ID NO: 1090753 - DNA, 15 bp, Homo sapiens
atgccaactaagtat

SEQ ID NO: 1090754 - DNA, 15 bp, Homo sapiens
catgccaactaagta

SEQ ID NO: 1090755 - DNA, 15 bp, Homo sapiens
tcatgccaactaagt

SEQ ID NO: 1090756 - DNA, 15 bp, Homo sapiens
gtcatgccaactaag

SEQ ID NO: 1090757 - DNA, 15 bp, Homo sapiens
agtcatgccaactaa

SEQ ID NO: 1090758 - DNA, 15 bp, Homo sapiens
cagtcatgccaacta

SEQ ID NO: 1090759 - DNA, 15 bp, Homo sapiens
tcagtcatgccaact

SEQ ID NO: 1090760 - DNA, 15 bp, Homo sapiens
atcagtcatgccaac

SEQ ID NO: 1090761 - DNA, 15 bp, Homo sapiens
catcagtcatgccaa

SEQ ID NO: 1090762 - DNA, 15 bp, Homo sapiens
ccatcagtcatgcca

SEQ ID NO: 1090763 - DNA, 15 bp, Homo sapiens
accatcagtcatgcc

SEQ ID NO: 1090764 - DNA, 15 bp, Homo sapiens
taccatcagtcatgc

SEQ ID NO: 1090765 - DNA, 15 bp, Homo sapiens
ataccatcagtcatg

SEQ ID NO: 1090766 - DNA, 15 bp, Homo sapiens
gataccatcagtcat

SEQ ID NO: 1090767 - DNA, 15 bp, Homo sapiens
ggataccatcagtca

SEQ ID NO: 1090768 - DNA, 15 bp, Homo sapiens
aggataccatcagtc

SEQ ID NO: 1090769 - DNA, 15 bp, Homo sapiens
taggataccatcagt

SEQ ID NO: 1090770 - DNA, 15 bp, Homo sapiens
gtaggataccatcag

SEQ ID NO: 1090771 - DNA, 15 bp, Homo sapiens
agtaggataccatca

SEQ ID NO: 1090772 - DNA, 15 bp, Homo sapiens
cagtaggataccatc

SEQ ID NO: 1090773 - DNA, 15 bp, Homo sapiens
ccagtaggataccat

SEQ ID NO: 1090774 - DNA, 15 bp, Homo sapiens
accagtaggatacca

SEQ ID NO: 1090775 - DNA, 15 bp, Homo sapiens
gaccagtaggatacc

SEQ ID NO: 1090776 - DNA, 15 bp, Homo sapiens
ggaccagtaggatac

SEQ ID NO: 1090777 - DNA, 15 bp, Homo sapiens
gggaccagtaggata

SEQ ID NO: 1090778 - DNA, 15 bp, Homo sapiens
agggaccagtaggat

SEQ ID NO: 1090779 - DNA, 15 bp, Homo sapiens
gagggaccagtagga

SEQ ID NO: 1090780 - DNA, 15 bp, Homo sapiens
tgagggaccagtagg

SEQ ID NO: 1090781 - DNA, 15 bp, Homo sapiens
ctgagggaccagtag

SEQ ID NO: 1090782 - DNA, 15 bp, Homo sapiens
cctgagggaccagta

SEQ ID NO: 1090783 - DNA, 15 bp, Homo sapiens
acctgagggaccagt

SEQ ID NO: 1090784 - DNA, 15 bp, Homo sapiens
aacctgagggaccag

SEQ ID NO: 1090785 - DNA, 15 bp, Homo sapiens
gaacctgagggacca

SEQ ID NO: 1090786 - DNA, 15 bp, Homo sapiens
agaacctgagggacc

SEQ ID NO: 1090787 - DNA, 15 bp, Homo sapiens
cagaacctgagggac

SEQ ID NO: 1090788 - DNA, 15 bp, Homo sapiens
aacagaacctgaggg

SEQ ID NO: 1090789 - DNA, 15 bp, Homo sapiens
gaacagaacctgagg

SEQ ID NO: 1090790 - DNA, 15 bp, Homo sapiens
tgaacagaacctgag

SEQ ID NO: 1090791 - DNA, 15 bp, Homo sapiens
atgaacagaacctga

SEQ ID NO: 1090792 - DNA, 15 bp, Homo sapiens
aatgaacagaacctg

SEQ ID NO: 1090793 - DNA, 15 bp, Homo sapiens
aaatgaacagaacct

SEQ ID NO: 1090794 - DNA, 15 bp, Homo sapiens
aaaatgaacagaacc

SEQ ID NO: 1090795 - DNA, 15 bp, Homo sapiens
aaaaatgaacagaac

SEQ ID NO: 1090796 - DNA, 15 bp, Homo sapiens
gaaaaatgaacagaa

SEQ ID NO: 1090797 - DNA, 15 bp, Homo sapiens
agaaaaatgaacaga

SEQ ID NO: 1090798 - DNA, 15 bp, Homo sapiens
aagaaaaatgaacag

SEQ ID NO: 1090799 - DNA, 15 bp, Homo sapiens
gaagaaaaatgaaca

SEQ ID NO: 1090800 - DNA, 15 bp, Homo sapiens
aagaaagaagaaaaa

SEQ ID NO: 1090801 - DNA, 15 bp, Homo sapiens
aaagaaagaagaaaa

SEQ ID NO: 1090802 - DNA, 15 bp, Homo sapiens
aaaagaaagaagaaa

SEQ ID NO: 1090803 - DNA, 15 bp, Homo sapiens
aaaaagaaagaagaa

SEQ ID NO: 1090804 - DNA, 15 bp, Homo sapiens
aaaaaagaaagaaga

SEQ ID NO: 1090805 - DNA, 15 bp, Homo sapiens
aaaaaaagaaagaag

SEQ ID NO: 1090806 - DNA, 15 bp, Homo sapiens
gaaaaaaagaaagaa

SEQ ID NO: 1090807 - DNA, 15 bp, Homo sapiens
agaaaaaaagaaaga

SEQ ID NO: 1090808 - DNA, 15 bp, Homo sapiens
cagaaaaaaagaaag

SEQ ID NO: 1090809 - DNA, 15 bp, Homo sapiens
gcagaaaaaaagaaa

SEQ ID NO: 1090810 - DNA, 15 bp, Homo sapiens
agcagaaaaaaagaa

SEQ ID NO: 1090811 - DNA, 15 bp, Homo sapiens
gagcagaaaaaaaga

SEQ ID NO: 1090812 - DNA, 15 bp, Homo sapiens
agagcagaaaaaaag

SEQ ID NO: 1090813 - DNA, 15 bp, Homo sapiens
cagagcagaaaaaaa

SEQ ID NO: 1090814 - DNA, 15 bp, Homo sapiens
gcagagcagaaaaaa

SEQ ID NO: 1090815 - DNA, 15 bp, Homo sapiens
tgcagagcagaaaaa

SEQ ID NO: 1090816 - DNA, 15 bp, Homo sapiens
ctgcagagcagaaaa

SEQ ID NO: 1090817 - DNA, 15 bp, Homo sapiens
tctgcagagcagaaa

SEQ ID NO: 1090818 - DNA, 15 bp, Homo sapiens
gtctgcagagcagaa

SEQ ID NO: 1090819 - DNA, 15 bp, Homo sapiens
agtctgcagagcaga

SEQ ID NO: 1090820 - DNA, 15 bp, Homo sapiens
cagtctgcagagcag

SEQ ID NO: 1090821 - DNA, 15 bp, Homo sapiens
ccagtctgcagagca

SEQ ID NO: 1090822 - DNA, 15 bp, Homo sapiens
tccagtctgcagagc

SEQ ID NO: 1090823 - DNA, 15 bp, Homo sapiens
atccagtctgcagag

SEQ ID NO: 1090824 - DNA, 15 bp, Homo sapiens
tatccagtctgcaga

SEQ ID NO: 1090825 - DNA, 15 bp, Homo sapiens
ttatccagtctgcag

SEQ ID NO: 1090826 - DNA, 15 bp, Homo sapiens
gttatccagtctgca

SEQ ID NO: 1090827 - DNA, 15 bp, Homo sapiens
agttatccagtctgc

SEQ ID NO: 1090828 - DNA, 15 bp, Homo sapiens
aagttatccagtctg

SEQ ID NO: 1090829 - DNA, 15 bp, Homo sapiens
gaagttatccagtct

SEQ ID NO: 1090830 - DNA, 15 bp, Homo sapiens
tgaagttatccagtc

SEQ ID NO: 1090831 - DNA, 15 bp, Homo sapiens
ttgaagttatccagt

SEQ ID NO: 1090832 - DNA, 15 bp, Homo sapiens
attgaagttatccag

SEQ ID NO: 1090833 - DNA, 15 bp, Homo sapiens
gattgaagttatcca

SEQ ID NO: 1090834 - DNA, 15 bp, Homo sapiens
cgattgaagttatcc

SEQ ID NO: 1090835 - DNA, 15 bp, Homo sapiens
gcgattgaagttatc

SEQ ID NO: 1090836 - DNA, 15 bp, Homo sapiens
ggcgattgaagttat

SEQ ID NO: 1090837 - DNA, 15 bp, Homo sapiens
aggcgattgaagtta

SEQ ID NO: 1090838 - DNA, 15 bp, Homo sapiens
aaggcgattgaagtt

SEQ ID NO: 1090839 - DNA, 15 bp, Homo sapiens
aaaggcgattgaagt

SEQ ID NO: 1090840 - DNA, 15 bp, Homo sapiens
aaaaggcgattgaag

SEQ ID NO: 1090841 - DNA, 15 bp, Homo sapiens
gaaaaggcgattgaa

SEQ ID NO: 1090842 - DNA, 15 bp, Homo sapiens
agaaaaggcgattga

SEQ ID NO: 1090843 - DNA, 15 bp, Homo sapiens
aagaaaaggcgattg

SEQ ID NO: 1090844 - DNA, 15 bp, Homo sapiens
gaagaaaaggcgatt

SEQ ID NO: 1090845 - DNA, 15 bp, Homo sapiens
tgaagaaaaggcgat

SEQ ID NO: 1090846 - DNA, 15 bp, Homo sapiens
ttgaagaaaaggcga

SEQ ID NO: 1090847 - DNA, 15 bp, Homo sapiens
cttgaagaaaaggcg

SEQ ID NO: 1090848 - DNA, 15 bp, Homo sapiens
acttgaagaaaaggc

SEQ ID NO: 1090849 - DNA, 15 bp, Homo sapiens
aacttgaagaaaagg

SEQ ID NO: 1090850 - DNA, 15 bp, Homo sapiens
gaacttgaagaaaag

SEQ ID NO: 1090851 - DNA, 15 bp, Homo sapiens
tgaacttgaagaaaa

SEQ ID NO: 1090852 - DNA, 15 bp, Homo sapiens
ttgaacttgaagaaa

SEQ ID NO: 1090853 - DNA, 15 bp, Homo sapiens
attgaacttgaagaa

SEQ ID NO: 1090854 - DNA, 15 bp, Homo sapiens
cattgaacttgaaga

SEQ ID NO: 1090855 - DNA, 15 bp, Homo sapiens
tcattgaacttgaag

SEQ ID NO: 1090856 - DNA, 15 bp, Homo sapiens
atcattgaacttgaa

SEQ ID NO: 1090857 - DNA, 15 bp, Homo sapiens
aatcattgaacttga

SEQ ID NO: 1090858 - DNA, 15 bp, Homo sapiens
taatcattgaacttg

SEQ ID NO: 1090859 - DNA, 15 bp, Homo sapiens
ataatcattgaactt

SEQ ID NO: 1090860 - DNA, 15 bp, Homo sapiens
aataatcattgaact

SEQ ID NO: 1090861 - DNA, 15 bp, Homo sapiens
aaataatcattgaac

SEQ ID NO: 1090862 - DNA, 15 bp, Homo sapiens
gaaataatcattgaa

SEQ ID NO: 1090863 - DNA, 15 bp, Homo sapiens
agaaataatcattga

SEQ ID NO: 1090864 - DNA, 15 bp, Homo sapiens
aagaaataatcattg

SEQ ID NO: 1090865 - DNA, 15 bp, Homo sapiens
gaagaaataatcatt

SEQ ID NO: 1090866 - DNA, 15 bp, Homo sapiens
agaagaaataatcat

SEQ ID NO: 1090867 - DNA, 15 bp, Homo sapiens
cagaagaaataatca

SEQ ID NO: 1090868 - DNA, 15 bp, Homo sapiens
gcagaagaaataatc

SEQ ID NO: 1090869 - DNA, 15 bp, Homo sapiens
ggcagaagaaataat

SEQ ID NO: 1090870 - DNA, 15 bp, Homo sapiens
aggcagaagaaataa

SEQ ID NO: 1090871 - DNA, 15 bp, Homo sapiens
caggcagaagaaata

SEQ ID NO: 1090872 - DNA, 15 bp, Homo sapiens
gcaggcagaagaaat

SEQ ID NO: 1090873 - DNA, 15 bp, Homo sapiens
agcaggcagaagaaa

SEQ ID NO: 1090874 - DNA, 15 bp, Homo sapiens
gagcaggcagaagaa

SEQ ID NO: 1090875 - DNA, 15 bp, Homo sapiens
tgagcaggcagaaga

SEQ ID NO: 1090876 - DNA, 15 bp, Homo sapiens
ttgagcaggcagaag

SEQ ID NO: 1090877 - DNA, 15 bp, Homo sapiens
tttgagcaggcagaa

SEQ ID NO: 1090878 - DNA, 15 bp, Homo sapiens
atttgagcaggcaga

SEQ ID NO: 1090879 - DNA, 15 bp, Homo sapiens
aatttgagcaggcag

SEQ ID NO: 1090880 - DNA, 15 bp, Homo sapiens
caatttgagcaggca

SEQ ID NO: 1090881 - DNA, 15 bp, Homo sapiens
ccaatttgagcaggc

SEQ ID NO: 1090882 - DNA, 15 bp, Homo sapiens
gccaatttgagcagg

SEQ ID NO: 1090883 - DNA, 15 bp, Homo sapiens
ggccaatttgagcag

SEQ ID NO: 1090884 - DNA, 15 bp, Homo sapiens
tggccaatttgagca

SEQ ID NO: 1090885 - DNA, 15 bp, Homo sapiens
atggccaatttgagc

SEQ ID NO: 1090886 - DNA, 15 bp, Homo sapiens
aatggccaatttgag

SEQ ID NO: 1090887 - DNA, 15 bp, Homo sapiens
aaatggccaatttga

SEQ ID NO: 1090888 - DNA, 15 bp, Homo sapiens
taaatggccaatttg

SEQ ID NO: 1090889 - DNA, 15 bp, Homo sapiens
ttaaatggccaattt

SEQ ID NO: 1090890 - DNA, 15 bp, Homo sapiens
gttaaatggccaatt

SEQ ID NO: 1090891 - DNA, 15 bp, Homo sapiens
ggttaaatggccaat

SEQ ID NO: 1090892 - DNA, 15 bp, Homo sapiens
gggttaaatggccaa

SEQ ID NO: 1090893 - DNA, 15 bp, Homo sapiens
ggggttaaatggcca

SEQ ID NO: 1090894 - DNA, 15 bp, Homo sapiens
aggggttaaatggcc

SEQ ID NO: 1090895 - DNA, 15 bp, Homo sapiens
gaggggttaaatggc

SEQ ID NO: 1090896 - DNA, 15 bp, Homo sapiens
ggaggggttaaatgg

SEQ ID NO: 1090897 - DNA, 15 bp, Homo sapiens
tggaggggttaaatg

SEQ ID NO: 1090898 - DNA, 15 bp, Homo sapiens
ctggaggggttaaat

SEQ ID NO: 1090899 - DNA, 15 bp, Homo sapiens
actggaggggttaaa

SEQ ID NO: 1090900 - DNA, 15 bp, Homo sapiens
cactggaggggttaa

SEQ ID NO: 1090901 - DNA, 15 bp, Homo sapiens
tcactggaggggtta

SEQ ID NO: 1090902 - DNA, 15 bp, Homo sapiens
gtcactggaggggtt

SEQ ID NO: 1090903 - DNA, 15 bp, Homo sapiens
agtcactggaggggt

SEQ ID NO: 1090904 - DNA, 15 bp, Homo sapiens
aagtcactggagggg

SEQ ID NO: 1090905 - DNA, 15 bp, Homo sapiens
aaagtcactggaggg

SEQ ID NO: 1090906 - DNA, 15 bp, Homo sapiens
aaaagtcactggagg

SEQ ID NO: 1090907 - DNA, 15 bp, Homo sapiens
aaaaagtcactggag

SEQ ID NO: 1090908 - DNA, 15 bp, Homo sapiens
gaaaaagtcactgga

SEQ ID NO: 1090909 - DNA, 15 bp, Homo sapiens
tgaaaaagtcactgg

SEQ ID NO: 1090910 - DNA, 15 bp, Homo sapiens
atgaaaaagtcactg

SEQ ID NO: 1090911 - DNA, 15 bp, Homo sapiens
aatgaaaaagtcact

SEQ ID NO: 1090912 - DNA, 15 bp, Homo sapiens
aaatgaaaaagtcac

SEQ ID NO: 1090913 - DNA, 15 bp, Homo sapiens
gaaatgaaaaagtca

SEQ ID NO: 1090914 - DNA, 15 bp, Homo sapiens
tgaaatgaaaaagtc

SEQ ID NO: 1090915 - DNA, 15 bp, Homo sapiens
ctgaaatgaaaaagt

SEQ ID NO: 1090916 - DNA, 15 bp, Homo sapiens
actgaaatgaaaaag

SEQ ID NO: 1090917 - DNA, 15 bp, Homo sapiens
tactgaaatgaaaaa

SEQ ID NO: 1090918 - DNA, 15 bp, Homo sapiens
atactgaaatgaaaa

SEQ ID NO: 1090919 - DNA, 15 bp, Homo sapiens
aatactgaaatgaaa

SEQ ID NO: 1090920 - DNA, 15 bp, Homo sapiens
caatactgaaatgaa

SEQ ID NO: 1090921 - DNA, 15 bp, Homo sapiens
acaatactgaaatga

SEQ ID NO: 1090922 - DNA, 15 bp, Homo sapiens
tacaatactgaaatg

SEQ ID NO: 1090923 - DNA, 15 bp, Homo sapiens
gtacaatactgaaat

SEQ ID NO: 1090924 - DNA, 15 bp, Homo sapiens
agtacaatactgaaa

SEQ ID NO: 1090925 - DNA, 15 bp, Homo sapiens
aaagtacaatactga

SEQ ID NO: 1090926 - DNA, 15 bp, Homo sapiens
aaaagtacaatactg

SEQ ID NO: 1090927 - DNA, 15 bp, Homo sapiens
gaaaagtacaatact

SEQ ID NO: 1090928 - DNA, 15 bp, Homo sapiens
tgaaaagtacaatac

SEQ ID NO: 1090929 - DNA, 15 bp, Homo sapiens
ctgaaaagtacaata

SEQ ID NO: 1090930 - DNA, 15 bp, Homo sapiens
tctgaaaagtacaat

SEQ ID NO: 1090931 - DNA, 15 bp, Homo sapiens
atctgaaaagtacaa

SEQ ID NO: 1090932 - DNA, 15 bp, Homo sapiens
gatctgaaaagtaca

SEQ ID NO: 1090933 - DNA, 15 bp, Homo sapiens
ggatctgaaaagtac

SEQ ID NO: 1090934 - DNA, 15 bp, Homo sapiens
tggatctgaaaagta

SEQ ID NO: 1090935 - DNA, 15 bp, Homo sapiens
ctggatctgaaaagt

SEQ ID NO: 1090936 - DNA, 15 bp, Homo sapiens
tctggatctgaaaag

SEQ ID NO: 1090937 - DNA, 15 bp, Homo sapiens
ttctggatctgaaaa

SEQ ID NO: 1090938 - DNA, 15 bp, Homo sapiens
attctggatctgaaa

SEQ ID NO: 1090939 - DNA, 15 bp, Homo sapiens
aattctggatctgaa

SEQ ID NO: 1090940 - DNA, 15 bp, Homo sapiens
aaattctggatctga

SEQ ID NO: 1090941 - DNA, 15 bp, Homo sapiens
gaaattctggatctg

SEQ ID NO: 1090942 - DNA, 15 bp, Homo sapiens
agaaattctggatct

SEQ ID NO: 1090943 - DNA, 15 bp, Homo sapiens
tagaaattctggatc

SEQ ID NO: 1090944 - DNA, 15 bp, Homo sapiens
atagaaattctggat

SEQ ID NO: 1090945 - DNA, 15 bp, Homo sapiens
aatagaaattctgga

SEQ ID NO: 1090946 - DNA, 15 bp, Homo sapiens
aaatagaaattctgg

SEQ ID NO: 1090947 - DNA, 15 bp, Homo sapiens
caaatagaaattctg

SEQ ID NO: 1090948 - DNA, 15 bp, Homo sapiens
ccaaatagaaattct

SEQ ID NO: 1090949 - DNA, 15 bp, Homo sapiens
accaaatagaaattc

SEQ ID NO: 1090950 - DNA, 15 bp, Homo sapiens
aaccaaatagaaatt

SEQ ID NO: 1090951 - DNA, 15 bp, Homo sapiens
gaaccaaatagaaat

SEQ ID NO: 1090952 - DNA, 15 bp, Homo sapiens
ggaaccaaatagaaa

SEQ ID NO: 1090953 - DNA, 15 bp, Homo sapiens
aggaaccaaatagaa

SEQ ID NO: 1090954 - DNA, 15 bp, Homo sapiens
gaggaaccaaataga

SEQ ID NO: 1090955 - DNA, 15 bp, Homo sapiens
agaggaaccaaatag

SEQ ID NO: 1090956 - DNA, 15 bp, Homo sapiens
aagaggaaccaaata

SEQ ID NO: 1090957 - DNA, 15 bp, Homo sapiens
aaagaggaaccaaat

SEQ ID NO: 1090958 - DNA, 15 bp, Homo sapiens
taaagaggaaccaaa

SEQ ID NO: 1090959 - DNA, 15 bp, Homo sapiens
ttaaagaggaaccaa

SEQ ID NO: 1090960 - DNA, 15 bp, Homo sapiens
attaaagaggaacca

SEQ ID NO: 1090961 - DNA, 15 bp, Homo sapiens
tattaaagaggaacc

SEQ ID NO: 1090962 - DNA, 15 bp, Homo sapiens
ttattaaagaggaac

SEQ ID NO: 1090963 - DNA, 15 bp, Homo sapiens
tttattaaagaggaa

SEQ ID NO: 1090964 - DNA, 15 bp, Homo sapiens
atttattaaagagga

SEQ ID NO: 1090965 - DNA, 15 bp, Homo sapiens
aatttattaaagagg

SEQ ID NO: 1090966 - DNA, 15 bp, Homo sapiens
gaatttattaaagag

SEQ ID NO: 1090967 - DNA, 15 bp, Homo sapiens
agaatttattaaaga

SEQ ID NO: 1090968 - DNA, 15 bp, Homo sapiens
aagaatttattaaag

SEQ ID NO: 1090969 - DNA, 15 bp, Homo sapiens
aaagaatttattaaa

SEQ ID NO: 1090970 - DNA, 15 bp, Homo sapiens
aaaagaatttattaa

SEQ ID NO: 1090971 - DNA, 15 bp, Homo sapiens
aaaaagaatttatta

SEQ ID NO: 1090972 - DNA, 15 bp, Homo sapiens
taaaaagaatttatt

SEQ ID NO: 1090973 - DNA, 15 bp, Homo sapiens
ataaaaagaatttat

SEQ ID NO: 1090974 - DNA, 15 bp, Homo sapiens
aataaaaagaattta

SEQ ID NO: 1090975 - DNA, 15 bp, Homo sapiens
caataaaaagaattt

SEQ ID NO: 1090976 - DNA, 15 bp, Homo sapiens
acaataaaaagaatt

SEQ ID NO: 1090977 - DNA, 15 bp, Homo sapiens
gacaataaaaagaat

SEQ ID NO: 1090978 - DNA, 15 bp, Homo sapiens
tgacaataaaaagaa

SEQ ID NO: 1090979 - DNA, 15 bp, Homo sapiens
atgacaataaaaaga

SEQ ID NO: 1090980 - DNA, 15 bp, Homo sapiens
aatgacaataaaaag

SEQ ID NO: 1090981 - DNA, 15 bp, Homo sapiens
gaatgacaataaaaa

SEQ ID NO: 1090982 - DNA, 15 bp, Homo sapiens
ggaatgacaataaaa

SEQ ID NO: 1090983 - DNA, 15 bp, Homo sapiens
gggaatgacaataaa

SEQ ID NO: 1090984 - DNA, 15 bp, Homo sapiens
ggggaatgacaataa

SEQ ID NO: 1090985 - DNA, 15 bp, Homo sapiens
tggggaatgacaata

SEQ ID NO: 1090986 - DNA, 15 bp, Homo sapiens
atggggaatgacaat

SEQ ID NO: 1090987 - DNA, 15 bp, Homo sapiens
gatggggaatgacaa

SEQ ID NO: 1090988 - DNA, 15 bp, Homo sapiens
agatggggaatgaca

SEQ ID NO: 1090989 - DNA, 15 bp, Homo sapiens
cagatggggaatgac

SEQ ID NO: 1090990 - DNA, 15 bp, Homo sapiens
acagatggggaatga

SEQ ID NO: 1090991 - DNA, 15 bp, Homo sapiens
aacagatggggaatg

SEQ ID NO: 1090992 - DNA, 15 bp, Homo sapiens
gaacagatggggaat

SEQ ID NO: 1090993 - DNA, 15 bp, Homo sapiens
tgaacagatggggaa

SEQ ID NO: 1090994 - DNA, 15 bp, Homo sapiens
atgaacagatgggga

SEQ ID NO: 1090995 - DNA, 15 bp, Homo sapiens
tatgaacagatgggg

SEQ ID NO: 1090996 - DNA, 15 bp, Homo sapiens
gtatgaacagatggg

SEQ ID NO: 1090997 - DNA, 15 bp, Homo sapiens
tgtatgaacagatgg

SEQ ID NO: 1090998 - DNA, 15 bp, Homo sapiens
atgtatgaacagatg

SEQ ID NO: 1090999 - DNA, 15 bp, Homo sapiens
aatgtatgaacagat

SEQ ID NO: 1091000 - DNA, 15 bp, Homo sapiens
caatgtatgaacaga

SEQ ID NO: 1091001 - DNA, 15 bp, Homo sapiens
gcaatgtatgaacag

SEQ ID NO: 1091002 - DNA, 15 bp, Homo sapiens
agcaatgtatgaaca

SEQ ID NO: 1091003 - DNA, 15 bp, Homo sapiens
gagcaatgtatgaac

SEQ ID NO: 1091004 - DNA, 15 bp, Homo sapiens
agagcaatgtatgaa

SEQ ID NO: 1091005 - DNA, 15 bp, Homo sapiens
gagagcaatgtatga

SEQ ID NO: 1091006 - DNA, 15 bp, Homo sapiens
ggagagcaatgtatg

SEQ ID NO: 1091007 - DNA, 15 bp, Homo sapiens
gggagagcaatgtat

SEQ ID NO: 1091008 - DNA, 15 bp, Homo sapiens
tgggagagcaatgta

SEQ ID NO: 1091009 - DNA, 15 bp, Homo sapiens
ttgggagagcaatgt

SEQ ID NO: 1091010 - DNA, 15 bp, Homo sapiens
attgggagagcaatg

SEQ ID NO: 1091011 - DNA, 15 bp, Homo sapiens
aattgggagagcaat

SEQ ID NO: 1091012 - DNA, 15 bp, Homo sapiens
aaattgggagagcaa

SEQ ID NO: 1091013 - DNA, 15 bp, Homo sapiens
gaaattgggagagca

SEQ ID NO: 1091014 - DNA, 15 bp, Homo sapiens
ggaaattgggagagc

SEQ ID NO: 1091015 - DNA, 15 bp, Homo sapiens
aggaaattgggagag

SEQ ID NO: 1091016 - DNA, 15 bp, Homo sapiens
caggaaattgggaga

SEQ ID NO: 1091017 - DNA, 15 bp, Homo sapiens
acaggaaattgggag

SEQ ID NO: 1091018 - DNA, 15 bp, Homo sapiens
tacaggaaattggga

SEQ ID NO: 1091019 - DNA, 15 bp, Homo sapiens
ctacaggaaattggg

SEQ ID NO: 1091020 - DNA, 15 bp, Homo sapiens
actacaggaaattgg

SEQ ID NO: 1091021 - DNA, 15 bp, Homo sapiens
aactacaggaaattg

SEQ ID NO: 1091022 - DNA, 15 bp, Homo sapiens
gaactacaggaaatt

SEQ ID NO: 1091023 - DNA, 15 bp, Homo sapiens
agaactacaggaaat

SEQ ID NO: 1091024 - DNA, 15 bp, Homo sapiens
aagaactacaggaaa

SEQ ID NO: 1091025 - DNA, 15 bp, Homo sapiens
aaagaactacaggaa

SEQ ID NO: 1091026 - DNA, 15 bp, Homo sapiens
caaagaactacagga

SEQ ID NO: 1091027 - DNA, 15 bp, Homo sapiens
acaaagaactacagg

SEQ ID NO: 1091028 - DNA, 15 bp, Homo sapiens
gacaaagaactacag

SEQ ID NO: 1091029 - DNA, 15 bp, Homo sapiens
ggacaaagaactaca

SEQ ID NO: 1091030 - DNA, 15 bp, Homo sapiens
tggacaaagaactac

SEQ ID NO: 1091031 - DNA, 15 bp, Homo sapiens
atggacaaagaacta

SEQ ID NO: 1091032 - DNA, 15 bp, Homo sapiens
catggacaaagaact

SEQ ID NO: 1091033 - DNA, 15 bp, Homo sapiens
ccatggacaaagaac

SEQ ID NO: 1091034 - DNA, 15 bp, Homo sapiens
accatggacaaagaa

SEQ ID NO: 1091035 - DNA, 15 bp, Homo sapiens
aaccatggacaaaga

SEQ ID NO: 1091036 - DNA, 15 bp, Homo sapiens
aaaccatggacaaag

SEQ ID NO: 1091037 - DNA, 15 bp, Homo sapiens
aaaaccatggacaaa

SEQ ID NO: 1091038 - DNA, 15 bp, Homo sapiens
gaaaaccatggacaa

SEQ ID NO: 1091039 - DNA, 15 bp, Homo sapiens
agaaaaccatggaca

SEQ ID NO: 1091040 - DNA, 15 bp, Homo sapiens
aagaaaaccatggac

SEQ ID NO: 1091041 - DNA, 15 bp, Homo sapiens
aaagaaaaccatgga

SEQ ID NO: 1091042 - DNA, 15 bp, Homo sapiens
taaagaaaaccatgg

SEQ ID NO: 1091043 - DNA, 15 bp, Homo sapiens
ctaaagaaaaccatg

SEQ ID NO: 1091044 - DNA, 15 bp, Homo sapiens
actaaagaaaaccat

SEQ ID NO: 1091045 - DNA, 15 bp, Homo sapiens
aactaaagaaaacca

SEQ ID NO: 1091046 - DNA, 15 bp, Homo sapiens
taactaaagaaaacc

SEQ ID NO: 1091047 - DNA, 15 bp, Homo sapiens
ttaactaaagaaaac

SEQ ID NO: 1091048 - DNA, 15 bp, Homo sapiens
attaactaaagaaaa

SEQ ID NO: 1091049 - DNA, 15 bp, Homo sapiens
aattaactaaagaaa

SEQ ID NO: 1091050 - DNA, 15 bp, Homo sapiens
taattaactaaagaa

SEQ ID NO: 1091051 - DNA, 15 bp, Homo sapiens
ttaattaactaaaga

SEQ ID NO: 1091052 - DNA, 15 bp, Homo sapiens
cttaattaactaaag

SEQ ID NO: 1091053 - DNA, 15 bp, Homo sapiens
gcttaattaactaaa

SEQ ID NO: 1091054 - DNA, 15 bp, Homo sapiens
tgcttaattaactaa

SEQ ID NO: 1091055 - DNA, 15 bp, Homo sapiens
atgcttaattaacta

SEQ ID NO: 1091056 - DNA, 15 bp, Homo sapiens
tatgcttaattaact

SEQ ID NO: 1091057 - DNA, 15 bp, Homo sapiens
atatgcttaattaac

SEQ ID NO: 1091058 - DNA, 15 bp, Homo sapiens
aatatgcttaattaa

SEQ ID NO: 1091059 - DNA, 15 bp, Homo sapiens
aaatatgcttaatta

SEQ ID NO: 1091060 - DNA, 15 bp, Homo sapiens
taaatatgcttaatt

SEQ ID NO: 1091061 - DNA, 15 bp, Homo sapiens
ttaaatatgcttaat

SEQ ID NO: 1091062 - DNA, 15 bp, Homo sapiens
cttaaatatgcttaa

SEQ ID NO: 1091063 - DNA, 15 bp, Homo sapiens
tcttaaatatgctta

SEQ ID NO: 1091064 - DNA, 15 bp, Homo sapiens
gtcttaaatatgctt

SEQ ID NO: 1091065 - DNA, 15 bp, Homo sapiens
tgtcttaaatatgct

SEQ ID NO: 1091066 - DNA, 15 bp, Homo sapiens
ctgtcttaaatatgc

SEQ ID NO: 1091067 - DNA, 15 bp, Homo sapiens
actgtcttaaatatg

SEQ ID NO: 1091068 - DNA, 15 bp, Homo sapiens
aactgtcttaaatat

SEQ ID NO: 1091069 - DNA, 15 bp, Homo sapiens
caactgtcttaaata

SEQ ID NO: 1091070 - DNA, 15 bp, Homo sapiens
tcaactgtcttaaat

SEQ ID NO: 1091071 - DNA, 15 bp, Homo sapiens
gtcaactgtcttaaa

SEQ ID NO: 1091072 - DNA, 15 bp, Homo sapiens
agtcaactgtcttaa

SEQ ID NO: 1091073 - DNA, 15 bp, Homo sapiens
aagtcaactgtctta

SEQ ID NO: 1091074 - DNA, 15 bp, Homo sapiens
taagtcaactgtctt

SEQ ID NO: 1091075 - DNA, 15 bp, Homo sapiens
ttaagtcaactgtct

SEQ ID NO: 1091076 - DNA, 15 bp, Homo sapiens
attaagtcaactgtc

SEQ ID NO: 1091077 - DNA, 15 bp, Homo sapiens
cattaagtcaactgt

SEQ ID NO: 1091078 - DNA, 15 bp, Homo sapiens
acattaagtcaactg

SEQ ID NO: 1091079 - DNA, 15 bp, Homo sapiens
gacattaagtcaact

SEQ ID NO: 1091080 - DNA, 15 bp, Homo sapiens
agacattaagtcaac

SEQ ID NO: 1091081 - DNA, 15 bp, Homo sapiens
aagacattaagtcaa

SEQ ID NO: 1091082 - DNA, 15 bp, Homo sapiens
aaagacattaagtca

SEQ ID NO: 1091083 - DNA, 15 bp, Homo sapiens
caaagacattaagtc

SEQ ID NO: 1091084 - DNA, 15 bp, Homo sapiens
tcaaagacattaagt

SEQ ID NO: 1091085 - DNA, 15 bp, Homo sapiens
gtcaaagacattaag

SEQ ID NO: 1091086 - DNA, 15 bp, Homo sapiens
agtcaaagacattaa

SEQ ID NO: 1091087 - DNA, 15 bp, Homo sapiens
tagtcaaagacatta

SEQ ID NO: 1091088 - DNA, 15 bp, Homo sapiens
ctagtcaaagacatt

SEQ ID NO: 1091089 - DNA, 15 bp, Homo sapiens
actagtcaaagacat

SEQ ID NO: 1091090 - DNA, 15 bp, Homo sapiens
tactagtcaaagaca

SEQ ID NO: 1091091 - DNA, 15 bp, Homo sapiens
ttactagtcaaagac

SEQ ID NO: 1091092 - DNA, 15 bp, Homo sapiens
attactagtcaaaga

SEQ ID NO: 1091093 - DNA, 15 bp, Homo sapiens
aattactagtcaaag

SEQ ID NO: 1091094 - DNA, 15 bp, Homo sapiens
gaattactagtcaaa

SEQ ID NO: 1091095 - DNA, 15 bp, Homo sapiens
ggaattactagtcaa

SEQ ID NO: 1091096 - DNA, 15 bp, Homo sapiens
tggaattactagtca

SEQ ID NO: 1091097 - DNA, 15 bp, Homo sapiens
ttggaattactagtc

SEQ ID NO: 1091098 - DNA, 15 bp, Homo sapiens
attggaattactagt

SEQ ID NO: 1091099 - DNA, 15 bp, Homo sapiens
cattggaattactag

SEQ ID NO: 1091100 - DNA, 15 bp, Homo sapiens
acattggaattacta

SEQ ID NO: 1091101 - DNA, 15 bp, Homo sapiens
gacattggaattact

SEQ ID NO: 1091102 - DNA, 15 bp, Homo sapiens
agacattggaattac

SEQ ID NO: 1091103 - DNA, 15 bp, Homo sapiens
tagacattggaatta

SEQ ID NO: 1091104 - DNA, 15 bp, Homo sapiens
ttagacattggaatt

SEQ ID NO: 1091105 - DNA, 15 bp, Homo sapiens
tttagacattggaat

SEQ ID NO: 1091106 - DNA, 15 bp, Homo sapiens
ttttagacattggaa

SEQ ID NO: 1091107 - DNA, 15 bp, Homo sapiens
attttagacattgga

SEQ ID NO: 1091108 - DNA, 15 bp, Homo sapiens
aattttagacattgg

SEQ ID NO: 1091109 - DNA, 15 bp, Homo sapiens
gaattttagacattg

SEQ ID NO: 1091110 - DNA, 15 bp, Homo sapiens
ggaattttagacatt

SEQ ID NO: 1091111 - DNA, 15 bp, Homo sapiens
aggaattttagacat

SEQ ID NO: 1091112 - DNA, 15 bp, Homo sapiens
aaggaattttagaca

SEQ ID NO: 1091113 - DNA, 15 bp, Homo sapiens
taaggaattttagac

SEQ ID NO: 1091114 - DNA, 15 bp, Homo sapiens
ataaggaattttaga

SEQ ID NO: 1091115 - DNA, 15 bp, Homo sapiens
cataaggaattttag

SEQ ID NO: 1091116 - DNA, 15 bp, Homo sapiens
ccataaggaatttta

SEQ ID NO: 1091117 - DNA, 15 bp, Homo sapiens
tccataaggaatttt

SEQ ID NO: 1091118 - DNA, 15 bp, Homo sapiens
atccataaggaattt

SEQ ID NO: 1091119 - DNA, 15 bp, Homo sapiens
tatccataaggaatt

SEQ ID NO: 1091120 - DNA, 15 bp, Homo sapiens
ctatccataaggaat

SEQ ID NO: 1091121 - DNA, 15 bp, Homo sapiens
gctatccataaggaa

SEQ ID NO: 1091122 - DNA, 15 bp, Homo sapiens
agctatccataagga

SEQ ID NO: 1091123 - DNA, 15 bp, Homo sapiens
aagctatccataagg

SEQ ID NO: 1091124 - DNA, 15 bp, Homo sapiens
gaagctatccataag

SEQ ID NO: 1091125 - DNA, 15 bp, Homo sapiens
agaagctatccataa

SEQ ID NO: 1091126 - DNA, 15 bp, Homo sapiens
aagaagctatccata

SEQ ID NO: 1091127 - DNA, 15 bp, Homo sapiens
aaagaagctatccat

SEQ ID NO: 1091128 - DNA, 15 bp, Homo sapiens
aaaagaagctatcca

SEQ ID NO: 1091129 - DNA, 15 bp, Homo sapiens
taaaagaagctatcc

SEQ ID NO: 1091130 - DNA, 15 bp, Homo sapiens
ttaaaagaagctatc

SEQ ID NO: 1091131 - DNA, 15 bp, Homo sapiens
tttaaaagaagctat

SEQ ID NO: 1091132 - DNA, 15 bp, Homo sapiens
atttaaaagaagcta

SEQ ID NO: 1091133 - DNA, 15 bp, Homo sapiens
aatttaaaagaagct

SEQ ID NO: 1091134 - DNA, 15 bp, Homo sapiens
taatttaaaagaagc

SEQ ID NO: 1091135 - DNA, 15 bp, Homo sapiens
ataatttaaaagaag

SEQ ID NO: 1091136 - DNA, 15 bp, Homo sapiens
aataatttaaaagaa

SEQ ID NO: 1091137 - DNA, 15 bp, Homo sapiens
aaataatttaaaaga

SEQ ID NO: 1091138 - DNA, 15 bp, Homo sapiens
aaaataatttaaaag

SEQ ID NO: 1091139 - DNA, 15 bp, Homo sapiens
caaaaataatttaaa

SEQ ID NO: 1091140 - DNA, 15 bp, Homo sapiens
acaaaaataatttaa

SEQ ID NO: 1091141 - DNA, 15 bp, Homo sapiens
gacaaaaataattta

SEQ ID NO: 1091142 - DNA, 15 bp, Homo sapiens
ggacaaaaataattt

SEQ ID NO: 1091143 - DNA, 15 bp, Homo sapiens
aggacaaaaataatt

SEQ ID NO: 1091144 - DNA, 15 bp, Homo sapiens
caggacaaaaataat

SEQ ID NO: 1091145 - DNA, 15 bp, Homo sapiens
acaggacaaaaataa

SEQ ID NO: 1091146 - DNA, 15 bp, Homo sapiens
aacaggacaaaaata

SEQ ID NO: 1091147 - DNA, 15 bp, Homo sapiens
taacaggacaaaaat

SEQ ID NO: 1091148 - DNA, 15 bp, Homo sapiens
ctaacaggacaaaaa

SEQ ID NO: 1091149 - DNA, 15 bp, Homo sapiens
tctaacaggacaaaa

SEQ ID NO: 1091150 - DNA, 15 bp, Homo sapiens
ctctaacaggacaaa

SEQ ID NO: 1091151 - DNA, 15 bp, Homo sapiens
tctctaacaggacaa

SEQ ID NO: 1091152 - DNA, 15 bp, Homo sapiens
ctctctaacaggaca

SEQ ID NO: 1091153 - DNA, 15 bp, Homo sapiens
actctctaacaggac

SEQ ID NO: 1091154 - DNA, 15 bp, Homo sapiens
gactctctaacagga

SEQ ID NO: 1091155 - DNA, 15 bp, Homo sapiens
tgactctctaacagg

SEQ ID NO: 1091156 - DNA, 15 bp, Homo sapiens
atgactctctaacag

SEQ ID NO: 1091157 - DNA, 15 bp, Homo sapiens
tatgactctctaaca

SEQ ID NO: 1091158 - DNA, 15 bp, Homo sapiens
atatgactctctaac

SEQ ID NO: 1091159 - DNA, 15 bp, Homo sapiens
gatatgactctctaa

SEQ ID NO: 1091160 - DNA, 15 bp, Homo sapiens
agatatgactctcta

SEQ ID NO: 1091161 - DNA, 15 bp, Homo sapiens
aagatatgactctct

SEQ ID NO: 1091162 - DNA, 15 bp, Homo sapiens
gaagatatgactctc

SEQ ID NO: 1091163 - DNA, 15 bp, Homo sapiens
ggaagatatgactct

SEQ ID NO: 1091164 - DNA, 15 bp, Homo sapiens
aggaagatatgactc

SEQ ID NO: 1091165 - DNA, 15 bp, Homo sapiens
gaggaagatatgact

SEQ ID NO: 1091166 - DNA, 15 bp, Homo sapiens
agaggaagatatgac

SEQ ID NO: 1091167 - DNA, 15 bp, Homo sapiens
aagaggaagatatga

SEQ ID NO: 1091168 - DNA, 15 bp, Homo sapiens
aaagaggaagatatg

SEQ ID NO: 1091169 - DNA, 15 bp, Homo sapiens
taaagaggaagatat

SEQ ID NO: 1091170 - DNA, 15 bp, Homo sapiens
ataaagaggaagata

SEQ ID NO: 1091171 - DNA, 15 bp, Homo sapiens
aataaagaggaagat

SEQ ID NO: 1091172 - DNA, 15 bp, Homo sapiens
aaataaagaggaaga

SEQ ID NO: 1091173 - DNA, 15 bp, Homo sapiens
caaataaagaggaag

SEQ ID NO: 1091174 - DNA, 15 bp, Homo sapiens
gcaaataaagaggaa

SEQ ID NO: 1091175 - DNA, 15 bp, Homo sapiens
agcaaataaagagga

SEQ ID NO: 1091176 - DNA, 15 bp, Homo sapiens
aagcaaataaagagg

SEQ ID NO: 1091177 - DNA, 15 bp, Homo sapiens
aaagcaaataaagag

SEQ ID NO: 1091178 - DNA, 15 bp, Homo sapiens
caaagcaaataaaga

SEQ ID NO: 1091179 - DNA, 15 bp, Homo sapiens
acaaagcaaataaag

SEQ ID NO: 1091180 - DNA, 15 bp, Homo sapiens
tacaaagcaaataaa

SEQ ID NO: 1091181 - DNA, 15 bp, Homo sapiens
ttacaaagcaaataa

SEQ ID NO: 1091182 - DNA, 15 bp, Homo sapiens
attacaaagcaaata

SEQ ID NO: 1091183 - DNA, 15 bp, Homo sapiens
tattacaaagcaaat

SEQ ID NO: 1091184 - DNA, 15 bp, Homo sapiens
gtattacaaagcaaa

SEQ ID NO: 1091185 - DNA, 15 bp, Homo sapiens
agtattacaaagcaa

SEQ ID NO: 1091186 - DNA, 15 bp, Homo sapiens
aagtattacaaagca

SEQ ID NO: 1091187 - DNA, 15 bp, Homo sapiens
aaagtattacaaagc

SEQ ID NO: 1091188 - DNA, 15 bp, Homo sapiens
caaagtattacaaag

SEQ ID NO: 1091189 - DNA, 15 bp, Homo sapiens
acaaagtattacaaa

SEQ ID NO: 1091190 - DNA, 15 bp, Homo sapiens
aacaaagtattacaa

SEQ ID NO: 1091191 - DNA, 15 bp, Homo sapiens
caacaaagtattaca

SEQ ID NO: 1091192 - DNA, 15 bp, Homo sapiens
tcaacaaagtattac

SEQ ID NO: 1091193 - DNA, 15 bp, Homo sapiens
ttcaacaaagtatta

SEQ ID NO: 1091194 - DNA, 15 bp, Homo sapiens
tttcaacaaagtatt

SEQ ID NO: 1091195 - DNA, 15 bp, Homo sapiens
ttttcaacaaagtat

SEQ ID NO: 1091196 - DNA, 15 bp, Homo sapiens
gttttcaacaaagta

SEQ ID NO: 1091197 - DNA, 15 bp, Homo sapiens
agttttcaacaaagt

SEQ ID NO: 1091198 - DNA, 15 bp, Homo sapiens
aagttttcaacaaag

SEQ ID NO: 1091199 - DNA, 15 bp, Homo sapiens
taagttttcaacaaa

SEQ ID NO: 1091200 - DNA, 15 bp, Homo sapiens
ttaagttttcaacaa

SEQ ID NO: 1091201 - DNA, 15 bp, Homo sapiens
gttaagttttcaaca

SEQ ID NO: 1091202 - DNA, 15 bp, Homo sapiens
tgttaagttttcaac

SEQ ID NO: 1091203 - DNA, 15 bp, Homo sapiens
atgttaagttttcaa

SEQ ID NO: 1091204 - DNA, 15 bp, Homo sapiens
aatgttaagttttca

SEQ ID NO: 1091205 - DNA, 15 bp, Homo sapiens
aaatgttaagttttc

SEQ ID NO: 1091206 - DNA, 15 bp, Homo sapiens
aaaatgttaagtttt

SEQ ID NO: 1091207 - DNA, 15 bp, Homo sapiens
caaaatgttaagttt

SEQ ID NO: 1091208 - DNA, 15 bp, Homo sapiens
tcaaaatgttaagtt

SEQ ID NO: 1091209 - DNA, 15 bp, Homo sapiens
ctcaaaatgttaagt

SEQ ID NO: 1091210 - DNA, 15 bp, Homo sapiens
actcaaaatgttaag

SEQ ID NO: 1091211 - DNA, 15 bp, Homo sapiens
tactcaaaatgttaa

SEQ ID NO: 1091212 - DNA, 15 bp, Homo sapiens
ctactcaaaatgtta

SEQ ID NO: 1091213 - DNA, 15 bp, Homo sapiens
actactcaaaatgtt

SEQ ID NO: 1091214 - DNA, 15 bp, Homo sapiens
tactactcaaaatgt

SEQ ID NO: 1091215 - DNA, 15 bp, Homo sapiens
ttactactcaaaatg

SEQ ID NO: 1091216 - DNA, 15 bp, Homo sapiens
tttactactcaaaat

SEQ ID NO: 1091217 - DNA, 15 bp, Homo sapiens
ttttactactcaaaa

SEQ ID NO: 1091218 - DNA, 15 bp, Homo sapiens
attttactactcaaa

SEQ ID NO: 1091219 - DNA, 15 bp, Homo sapiens
cattttactactcaa

SEQ ID NO: 1091220 - DNA, 15 bp, Homo sapiens
acattttactactca

SEQ ID NO: 1091221 - DNA, 15 bp, Homo sapiens
cacattttactactc

SEQ ID NO: 1091222 - DNA, 15 bp, Homo sapiens
ccacattttactact

SEQ ID NO: 1091223 - DNA, 15 bp, Homo sapiens
accacattttactac

SEQ ID NO: 1091224 - DNA, 15 bp, Homo sapiens
taccacattttacta

SEQ ID NO: 1091225 - DNA, 15 bp, Homo sapiens
ttaccacattttact

SEQ ID NO: 1091226 - DNA, 15 bp, Homo sapiens
attaccacattttac

SEQ ID NO: 1091227 - DNA, 15 bp, Homo sapiens
aattaccacatttta

SEQ ID NO: 1091228 - DNA, 15 bp, Homo sapiens
gaattaccacatttt

SEQ ID NO: 1091229 - DNA, 15 bp, Homo sapiens
agaattaccacattt

SEQ ID NO: 1091230 - DNA, 15 bp, Homo sapiens
cagaattaccacatt

SEQ ID NO: 1091231 - DNA, 15 bp, Homo sapiens
tcagaattaccacat

SEQ ID NO: 1091232 - DNA, 15 bp, Homo sapiens
ttcagaattaccaca

SEQ ID NO: 1091233 - DNA, 15 bp, Homo sapiens
cttcagaattaccac

SEQ ID NO: 1091234 - DNA, 15 bp, Homo sapiens
gcttcagaattacca

SEQ ID NO: 1091235 - DNA, 15 bp, Homo sapiens
ggcttcagaattacc

SEQ ID NO: 1091236 - DNA, 15 bp, Homo sapiens
tggcttcagaattac

SEQ ID NO: 1091237 - DNA, 15 bp, Homo sapiens
ctggcttcagaatta

SEQ ID NO: 1091238 - DNA, 15 bp, Homo sapiens
tctggcttcagaatt

SEQ ID NO: 1091239 - DNA, 15 bp, Homo sapiens
atctggcttcagaat

SEQ ID NO: 1091240 - DNA, 15 bp, Homo sapiens
aatctggcttcagaa

SEQ ID NO: 1091241 - DNA, 15 bp, Homo sapiens
gaatctggcttcaga

SEQ ID NO: 1091242 - DNA, 15 bp, Homo sapiens
agaatctggcttcag

SEQ ID NO: 1091243 - DNA, 15 bp, Homo sapiens
gagaatctggcttca

SEQ ID NO: 1091244 - DNA, 15 bp, Homo sapiens
ggagaatctggcttc

SEQ ID NO: 1091245 - DNA, 15 bp, Homo sapiens
gggagaatctggctt

SEQ ID NO: 1091246 - DNA, 15 bp, Homo sapiens
ggggagaatctggct

SEQ ID NO: 1091247 - DNA, 15 bp, Homo sapiens
gggggagaatctggc

SEQ ID NO: 1091248 - DNA, 15 bp, Homo sapiens
agggggagaatctgg

SEQ ID NO: 1091249 - DNA, 15 bp, Homo sapiens
gagggggagaatctg

SEQ ID NO: 1091250 - DNA, 15 bp, Homo sapiens
ggagggggagaatct

SEQ ID NO: 1091251 - DNA, 15 bp, Homo sapiens
aggagggggagaatc

SEQ ID NO: 1091252 - DNA, 15 bp, Homo sapiens
aaggagggggagaat

SEQ ID NO: 1091253 - DNA, 15 bp, Homo sapiens
aaaggagggggagaa

SEQ ID NO: 1091254 - DNA, 15 bp, Homo sapiens
caaaggagggggaga

SEQ ID NO: 1091255 - DNA, 15 bp, Homo sapiens
tcaaaggagggggag

SEQ ID NO: 1091256 - DNA, 15 bp, Homo sapiens
ctcaaaggaggggga

SEQ ID NO: 1091257 - DNA, 15 bp, Homo sapiens
tctcaaaggaggggg

SEQ ID NO: 1091258 - DNA, 15 bp, Homo sapiens
atctcaaaggagggg

SEQ ID NO: 1091259 - DNA, 15 bp, Homo sapiens
aatctcaaaggaggg

SEQ ID NO: 1091260 - DNA, 15 bp, Homo sapiens
caatctcaaaggagg

SEQ ID NO: 1091261 - DNA, 15 bp, Homo sapiens
ccaatctcaaaggag

SEQ ID NO: 1091262 - DNA, 15 bp, Homo sapiens
accaatctcaaagga

SEQ ID NO: 1091263 - DNA, 15 bp, Homo sapiens
aaccaatctcaaagg

SEQ ID NO: 1091264 - DNA, 15 bp, Homo sapiens
aaaccaatctcaaag

SEQ ID NO: 1091265 - DNA, 15 bp, Homo sapiens
aaaaccaatctcaaa

SEQ ID NO: 1091266 - DNA, 15 bp, Homo sapiens
caaaaccaatctcaa

SEQ ID NO: 1091267 - DNA, 15 bp, Homo sapiens
acaaaaccaatctca

SEQ ID NO: 1091268 - DNA, 15 bp, Homo sapiens
aacaaaaccaatctc

SEQ ID NO: 1091269 - DNA, 15 bp, Homo sapiens
caacaaaaccaatct

SEQ ID NO: 1091270 - DNA, 15 bp, Homo sapiens
acaacaaaaccaatc

SEQ ID NO: 1091271 - DNA, 15 bp, Homo sapiens
aacaacaaaaccaat

SEQ ID NO: 1091272 - DNA, 15 bp, Homo sapiens
aaacaacaaaaccaa

SEQ ID NO: 1091273 - DNA, 15 bp, Homo sapiens
caaacaacaaaacca

SEQ ID NO: 1091274 - DNA, 15 bp, Homo sapiens
acaaacaacaaaacc

SEQ ID NO: 1091275 - DNA, 15 bp, Homo sapiens
aacaaacaacaaaac

SEQ ID NO: 1091276 - DNA, 15 bp, Homo sapiens
tcaacaaacaacaaa

SEQ ID NO: 1091277 - DNA, 15 bp, Homo sapiens
ctcaacaaacaacaa

SEQ ID NO: 1091278 - DNA, 15 bp, Homo sapiens
cctcaacaaacaaca

SEQ ID NO: 1091279 - DNA, 15 bp, Homo sapiens
ccctcaacaaacaac

SEQ ID NO: 1091280 - DNA, 15 bp, Homo sapiens
gccctcaacaaacaa

SEQ ID NO: 1091281 - DNA, 15 bp, Homo sapiens
agccctcaacaaaca

SEQ ID NO: 1091282 - DNA, 15 bp, Homo sapiens
cagccctcaacaaac

SEQ ID NO: 1091283 - DNA, 15 bp, Homo sapiens
gcagccctcaacaaa

SEQ ID NO: 1091284 - DNA, 15 bp, Homo sapiens
tgcagccctcaacaa

SEQ ID NO: 1091285 - DNA, 15 bp, Homo sapiens
ctgcagccctcaaca

SEQ ID NO: 1091286 - DNA, 15 bp, Homo sapiens
actgcagccctcaac

SEQ ID NO: 1091287 - DNA, 15 bp, Homo sapiens
aactgcagccctcaa

SEQ ID NO: 1091288 - DNA, 15 bp, Homo sapiens
caactgcagccctca

SEQ ID NO: 1091289 - DNA, 15 bp, Homo sapiens
acaactgcagccctc

SEQ ID NO: 1091290 - DNA, 15 bp, Homo sapiens
gacaactgcagccct

SEQ ID NO: 1091291 - DNA, 15 bp, Homo sapiens
ggacaactgcagccc

SEQ ID NO: 1091292 - DNA, 15 bp, Homo sapiens
tggacaactgcagcc

SEQ ID NO: 1091293 - DNA, 15 bp, Homo sapiens
atggacaactgcagc

SEQ ID NO: 1091294 - DNA, 15 bp, Homo sapiens
aatggacaactgcag

SEQ ID NO: 1091295 - DNA, 15 bp, Homo sapiens
aaatggacaactgca

SEQ ID NO: 1091296 - DNA, 15 bp, Homo sapiens
caaatggacaactgc

SEQ ID NO: 1091297 - DNA, 15 bp, Homo sapiens
acaaatggacaactg

SEQ ID NO: 1091298 - DNA, 15 bp, Homo sapiens
tacaaatggacaact

SEQ ID NO: 1091299 - DNA, 15 bp, Homo sapiens
atacaaatggacaac

SEQ ID NO: 1091300 - DNA, 15 bp, Homo sapiens
tatacaaatggacaa

SEQ ID NO: 1091301 - DNA, 15 bp, Homo sapiens
ctatacaaatggaca

SEQ ID NO: 1091302 - DNA, 15 bp, Homo sapiens
actatacaaatggac

SEQ ID NO: 1091303 - DNA, 15 bp, Homo sapiens
cactatacaaatgga

SEQ ID NO: 1091304 - DNA, 15 bp, Homo sapiens
tcactatacaaatgg

SEQ ID NO: 1091305 - DNA, 15 bp, Homo sapiens
gtcactatacaaatg

SEQ ID NO: 1091306 - DNA, 15 bp, Homo sapiens
agtcactatacaaat

SEQ ID NO: 1091307 - DNA, 15 bp, Homo sapiens
aagtcactatacaaa

SEQ ID NO: 1091308 - DNA, 15 bp, Homo sapiens
aaagtcactatacaa

SEQ ID NO: 1091309 - DNA, 15 bp, Homo sapiens
aaaagtcactataca

SEQ ID NO: 1091310 - DNA, 15 bp, Homo sapiens
gaaaagtcactatac

SEQ ID NO: 1091311 - DNA, 15 bp, Homo sapiens
ggaaaagtcactata

SEQ ID NO: 1091312 - DNA, 15 bp, Homo sapiens
tggaaaagtcactat

SEQ ID NO: 1091313 - DNA, 15 bp, Homo sapiens
ttggaaaagtcacta

SEQ ID NO: 1091314 - DNA, 15 bp, Homo sapiens
tttggaaaagtcact

SEQ ID NO: 1091315 - DNA, 15 bp, Homo sapiens
gtttggaaaagtcac

SEQ ID NO: 1091316 - DNA, 15 bp, Homo sapiens
cgtttggaaaagtca

SEQ ID NO: 1091317 - DNA, 15 bp, Homo sapiens
tcgtttggaaaagtc

SEQ ID NO: 1091318 - DNA, 15 bp, Homo sapiens
atcgtttggaaaagt

SEQ ID NO: 1091319 - DNA, 15 bp, Homo sapiens
aatcgtttggaaaag

SEQ ID NO: 1091320 - DNA, 15 bp, Homo sapiens
aaatcgtttggaaaa

SEQ ID NO: 1091321 - DNA, 15 bp, Homo sapiens
aaaatcgtttggaaa

SEQ ID NO: 1091322 - DNA, 15 bp, Homo sapiens
aaaaatcgtttggaa

SEQ ID NO: 1091323 - DNA, 15 bp, Homo sapiens
caaaaatcgtttgga

SEQ ID NO: 1091324 - DNA, 15 bp, Homo sapiens
gcaaaaatcgtttgg

SEQ ID NO: 1091325 - DNA, 15 bp, Homo sapiens
tgcaaaaatcgtttg

SEQ ID NO: 1091326 - DNA, 15 bp, Homo sapiens
ttgcaaaaatcgttt

SEQ ID NO: 1091327 - DNA, 15 bp, Homo sapiens
tttgcaaaaatcgtt

SEQ ID NO: 1091328 - DNA, 15 bp, Homo sapiens
ctttgcaaaaatcgt

SEQ ID NO: 1091329 - DNA, 15 bp, Homo sapiens
actttgcaaaaatcg

SEQ ID NO: 1091330 - DNA, 15 bp, Homo sapiens
tactttgcaaaaatc

SEQ ID NO: 1091331 - DNA, 15 bp, Homo sapiens
atactttgcaaaaat

SEQ ID NO: 1091332 - DNA, 15 bp, Homo sapiens
catactttgcaaaaa

SEQ ID NO: 1091333 - DNA, 15 bp, Homo sapiens
acatactttgcaaaa

SEQ ID NO: 1091334 - DNA, 15 bp, Homo sapiens
tacatactttgcaaa

SEQ ID NO: 1091335 - DNA, 15 bp, Homo sapiens
atacatactttgcaa

SEQ ID NO: 1091336 - DNA, 15 bp, Homo sapiens
aatacatactttgca

SEQ ID NO: 1091337 - DNA, 15 bp, Homo sapiens
gaatacatactttgc

SEQ ID NO: 1091338 - DNA, 15 bp, Homo sapiens
agaatacatactttg

SEQ ID NO: 1091339 - DNA, 15 bp, Homo sapiens
gagaatacatacttt

SEQ ID NO: 1091340 - DNA, 15 bp, Homo sapiens
agagaatacatactt

SEQ ID NO: 1091341 - DNA, 15 bp, Homo sapiens
gagagaatacatact

SEQ ID NO: 1091342 - DNA, 15 bp, Homo sapiens
agagagaatacatac

SEQ ID NO: 1091343 - DNA, 15 bp, Homo sapiens
aagagagaatacata

SEQ ID NO: 1091344 - DNA, 15 bp, Homo sapiens
caagagagaatacat

SEQ ID NO: 1091345 - DNA, 15 bp, Homo sapiens
acaagagagaataca

SEQ ID NO: 1091346 - DNA, 15 bp, Homo sapiens
cacaagagagaatac

SEQ ID NO: 1091347 - DNA, 15 bp, Homo sapiens
acacaagagagaata

SEQ ID NO: 1091348 - DNA, 15 bp, Homo sapiens
gacacaagagagaat

SEQ ID NO: 1091349 - DNA, 15 bp, Homo sapiens
agacacaagagagaa

SEQ ID NO: 1091350 - DNA, 15 bp, Homo sapiens
cagacacaagagaga

SEQ ID NO: 1091351 - DNA, 15 bp, Homo sapiens
accagacacaagaga

SEQ ID NO: 1091352 - DNA, 15 bp, Homo sapiens
gaccagacacaagag

SEQ ID NO: 1091353 - DNA, 15 bp, Homo sapiens
tgaccagacacaaga

SEQ ID NO: 1091354 - DNA, 15 bp, Homo sapiens
gtgaccagacacaag

SEQ ID NO: 1091355 - DNA, 15 bp, Homo sapiens
agtgaccagacacaa

SEQ ID NO: 1091356 - DNA, 15 bp, Homo sapiens
cagtgaccagacaca

SEQ ID NO: 1091357 - DNA, 15 bp, Homo sapiens
tcagtgaccagacac

SEQ ID NO: 1091358 - DNA, 15 bp, Homo sapiens
gtcagtgaccagaca

SEQ ID NO: 1091359 - DNA, 15 bp, Homo sapiens
cgtcagtgaccagac

SEQ ID NO: 1091360 - DNA, 15 bp, Homo sapiens
acgtcagtgaccaga

SEQ ID NO: 1091361 - DNA, 15 bp, Homo sapiens
aacgtcagtgaccag

SEQ ID NO: 1091362 - DNA, 15 bp, Homo sapiens
aaacgtcagtgacca

SEQ ID NO: 1091363 - DNA, 15 bp, Homo sapiens
gaaacgtcagtgacc

SEQ ID NO: 1091364 - DNA, 15 bp, Homo sapiens
agaaacgtcagtgac

SEQ ID NO: 1091365 - DNA, 15 bp, Homo sapiens
cagaaacgtcagtga

SEQ ID NO: 1091366 - DNA, 15 bp, Homo sapiens
acagaaacgtcagtg

SEQ ID NO: 1091367 - DNA, 15 bp, Homo sapiens
aacagaaacgtcagt

SEQ ID NO: 1091368 - DNA, 15 bp, Homo sapiens
gaacagaaacgtcag

SEQ ID NO: 1091369 - DNA, 15 bp, Homo sapiens
agaacagaaacgtca

SEQ ID NO: 1091370 - DNA, 15 bp, Homo sapiens
cagaacagaaacgtc

SEQ ID NO: 1091371 - DNA, 15 bp, Homo sapiens
ccagaacagaaacgt

SEQ ID NO: 1091372 - DNA, 15 bp, Homo sapiens
accagaacagaaacg

SEQ ID NO: 1091373 - DNA, 15 bp, Homo sapiens
caccagaacagaaac

SEQ ID NO: 1091374 - DNA, 15 bp, Homo sapiens
gcaccagaacagaaa

SEQ ID NO: 1091375 - DNA, 15 bp, Homo sapiens
ggcaccagaacagaa

SEQ ID NO: 1091376 - DNA, 15 bp, Homo sapiens
aggcaccagaacaga

SEQ ID NO: 1091377 - DNA, 15 bp, Homo sapiens
gaggcaccagaacag

SEQ ID NO: 1091378 - DNA, 15 bp, Homo sapiens
agaggcaccagaaca

SEQ ID NO: 1091379 - DNA, 15 bp, Homo sapiens
cagaggcaccagaac

SEQ ID NO: 1091380 - DNA, 15 bp, Homo sapiens
gcagaggcaccagaa

SEQ ID NO: 1091381 - DNA, 15 bp, Homo sapiens
tgcagaggcaccaga

SEQ ID NO: 1091382 - DNA, 15 bp, Homo sapiens
ctgcagaggcaccag

SEQ ID NO: 1091383 - DNA, 15 bp, Homo sapiens
actgcagaggcacca

SEQ ID NO: 1091384 - DNA, 15 bp, Homo sapiens
gactgcagaggcacc

SEQ ID NO: 1091385 - DNA, 15 bp, Homo sapiens
tgactgcagaggcac

SEQ ID NO: 1091386 - DNA, 15 bp, Homo sapiens
ctgactgcagaggca

SEQ ID NO: 1091387 - DNA, 15 bp, Homo sapiens
gctgactgcagaggc

SEQ ID NO: 1091388 - DNA, 15 bp, Homo sapiens
ggctgactgcagagg

SEQ ID NO: 1091389 - DNA, 15 bp, Homo sapiens
aggctgactgcagag

SEQ ID NO: 1091390 - DNA, 15 bp, Homo sapiens
taggctgactgcaga

SEQ ID NO: 1091391 - DNA, 15 bp, Homo sapiens
ataggctgactgcag

SEQ ID NO: 1091392 - DNA, 15 bp, Homo sapiens
cataggctgactgca

SEQ ID NO: 1091393 - DNA, 15 bp, Homo sapiens
tcataggctgactgc

SEQ ID NO: 1091394 - DNA, 15 bp, Homo sapiens
gtcataggctgactg

SEQ ID NO: 1091395 - DNA, 15 bp, Homo sapiens
ggtcataggctgact

SEQ ID NO: 1091396 - DNA, 15 bp, Homo sapiens
aggtcataggctgac

SEQ ID NO: 1091397 - DNA, 15 bp, Homo sapiens
caggtcataggctga

SEQ ID NO: 1091398 - DNA, 15 bp, Homo sapiens
ccaggtcataggctg

SEQ ID NO: 1091399 - DNA, 15 bp, Homo sapiens
tccaggtcataggct

SEQ ID NO: 1091400 - DNA, 15 bp, Homo sapiens
ttccaggtcataggc

SEQ ID NO: 1091401 - DNA, 15 bp, Homo sapiens
cttccaggtcatagg

SEQ ID NO: 1091402 - DNA, 15 bp, Homo sapiens
tcttccaggtcatag

SEQ ID NO: 1091403 - DNA, 15 bp, Homo sapiens
ctcttccaggtcata

SEQ ID NO: 1091404 - DNA, 15 bp, Homo sapiens
gctcttccaggtcat

SEQ ID NO: 1091405 - DNA, 15 bp, Homo sapiens
tgctcttccaggtca

SEQ ID NO: 1091406 - DNA, 15 bp, Homo sapiens
atgctcttccaggtc

SEQ ID NO: 1091407 - DNA, 15 bp, Homo sapiens
aatgctcttccaggt

SEQ ID NO: 1091408 - DNA, 15 bp, Homo sapiens
gaatgctcttccagg

SEQ ID NO: 1091409 - DNA, 15 bp, Homo sapiens
ggaatgctcttccag

SEQ ID NO: 1091410 - DNA, 15 bp, Homo sapiens
aggaatgctcttcca

SEQ ID NO: 1091411 - DNA, 15 bp, Homo sapiens
aaggaatgctcttcc

SEQ ID NO: 1091412 - DNA, 15 bp, Homo sapiens
taaggaatgctcttc

SEQ ID NO: 1091413 - DNA, 15 bp, Homo sapiens
ttaaggaatgctctt

SEQ ID NO: 1091414 - DNA, 15 bp, Homo sapiens
tttaaggaatgctct

SEQ ID NO: 1091415 - DNA, 15 bp, Homo sapiens
atttaaggaatgctc

SEQ ID NO: 1091416 - DNA, 15 bp, Homo sapiens
catttaaggaatgct

SEQ ID NO: 1091417 - DNA, 15 bp, Homo sapiens
gcatttaaggaatgc

SEQ ID NO: 1091418 - DNA, 15 bp, Homo sapiens
tgcatttaaggaatg

SEQ ID NO: 1091419 - DNA, 15 bp, Homo sapiens
atgcatttaaggaat

SEQ ID NO: 1091420 - DNA, 15 bp, Homo sapiens
tatgcatttaaggaa

SEQ ID NO: 1091421 - DNA, 15 bp, Homo sapiens
ctatgcatttaagga

SEQ ID NO: 1091422 - DNA, 15 bp, Homo sapiens
tctatgcatttaagg

SEQ ID NO: 1091423 - DNA, 15 bp, Homo sapiens
atctatgcatttaag

SEQ ID NO: 1091424 - DNA, 15 bp, Homo sapiens
aatctatgcatttaa

SEQ ID NO: 1091425 - DNA, 15 bp, Homo sapiens
aaatctatgcattta

SEQ ID NO: 1091426 - DNA, 15 bp, Homo sapiens
aaaatctatgcattt

SEQ ID NO: 1091427 - DNA, 15 bp, Homo sapiens
aaaaatctatgcatt

SEQ ID NO: 1091428 - DNA, 15 bp, Homo sapiens
aaaaaatctatgcat

SEQ ID NO: 1091429 - DNA, 15 bp, Homo sapiens
aaaaaaatctatgca

SEQ ID NO: 1091430 - DNA, 15 bp, Homo sapiens
taaaaaaatctatgc

SEQ ID NO: 1091431 - DNA, 15 bp, Homo sapiens
ttaaaaaaatctatg

SEQ ID NO: 1091432 - DNA, 15 bp, Homo sapiens
tttaaaaaaatctat

SEQ ID NO: 1091433 - DNA, 15 bp, Homo sapiens
ttttaaaaaaatcta

SEQ ID NO: 1091434 - DNA, 15 bp, Homo sapiens
gttttaaaaaaatct

SEQ ID NO: 1091435 - DNA, 15 bp, Homo sapiens
ggttttaaaaaaatc

SEQ ID NO: 1091436 - DNA, 15 bp, Homo sapiens
gggttttaaaaaaat

SEQ ID NO: 1091437 - DNA, 15 bp, Homo sapiens
tgggttttaaaaaaa

SEQ ID NO: 1091438 - DNA, 15 bp, Homo sapiens
ttgggttttaaaaaa

SEQ ID NO: 1091439 - DNA, 15 bp, Homo sapiens
cttgggttttaaaaa

SEQ ID NO: 1091440 - DNA, 15 bp, Homo sapiens
tcttgggttttaaaa

SEQ ID NO: 1091441 - DNA, 15 bp, Homo sapiens
ttcttgggttttaaa

SEQ ID NO: 1091442 - DNA, 15 bp, Homo sapiens
tttcttgggttttaa

SEQ ID NO: 1091443 - DNA, 15 bp, Homo sapiens
gtttcttgggtttta

SEQ ID NO: 1091444 - DNA, 15 bp, Homo sapiens
tgtttcttgggtttt

SEQ ID NO: 1091445 - DNA, 15 bp, Homo sapiens
ttgtttcttgggttt

SEQ ID NO: 1091446 - DNA, 15 bp, Homo sapiens
tttgtttcttgggtt

SEQ ID NO: 1091447 - DNA, 15 bp, Homo sapiens
ttttgtttcttgggt

SEQ ID NO: 1091448 - DNA, 15 bp, Homo sapiens
tttttgtttcttggg

SEQ ID NO: 1091449 - DNA, 15 bp, Homo sapiens
ttttttgtttcttgg

SEQ ID NO: 1091450 - DNA, 15 bp, Homo sapiens
gttttttgtttcttg

SEQ ID NO: 1091451 - DNA, 15 bp, Homo sapiens
ggttttttgtttctt

SEQ ID NO: 1091452 - DNA, 15 bp, Homo sapiens
aggttttttgtttct

SEQ ID NO: 1091453 - DNA, 15 bp, Homo sapiens
taggttttttgtttc

SEQ ID NO: 1091454 - DNA, 15 bp, Homo sapiens
ctaggttttttgttt

SEQ ID NO: 1091455 - DNA, 15 bp, Homo sapiens
gctaggttttttgtt

SEQ ID NO: 1091456 - DNA, 15 bp, Homo sapiens
tgctaggttttttgt

SEQ ID NO: 1091457 - DNA, 15 bp, Homo sapiens
atgctaggttttttg

SEQ ID NO: 1091458 - DNA, 15 bp, Homo sapiens
catgctaggtttttt

SEQ ID NO: 1091459 - DNA, 15 bp, Homo sapiens
acatgctaggttttt

SEQ ID NO: 1091460 - DNA, 15 bp, Homo sapiens
tacatgctaggtttt

SEQ ID NO: 1091461 - DNA, 15 bp, Homo sapiens
atacatgctaggttt

SEQ ID NO: 1091462 - DNA, 15 bp, Homo sapiens
catacatgctaggtt

SEQ ID NO: 1091463 - DNA, 15 bp, Homo sapiens
acatacatgctaggt

SEQ ID NO: 1091464 - DNA, 15 bp, Homo sapiens
tacatacatgctagg

SEQ ID NO: 1091465 - DNA, 15 bp, Homo sapiens
gtacatacatgctag

SEQ ID NO: 1091466 - DNA, 15 bp, Homo sapiens
ggtacatacatgcta

SEQ ID NO: 1091467 - DNA, 15 bp, Homo sapiens
aggtacatacatgct

SEQ ID NO: 1091468 - DNA, 15 bp, Homo sapiens
aaggtacatacatgc

SEQ ID NO: 1091469 - DNA, 15 bp, Homo sapiens
aaaggtacatacatg

SEQ ID NO: 1091470 - DNA, 15 bp, Homo sapiens
aaaaggtacatacat

SEQ ID NO: 1091471 - DNA, 15 bp, Homo sapiens
aaaaaggtacataca

SEQ ID NO: 1091472 - DNA, 15 bp, Homo sapiens
taaaaaggtacatac

SEQ ID NO: 1091473 - DNA, 15 bp, Homo sapiens
ttaaaaaggtacata

SEQ ID NO: 1091474 - DNA, 15 bp, Homo sapiens
tttaaaaaggtacat

SEQ ID NO: 1091475 - DNA, 15 bp, Homo sapiens
ttttaaaaaggtaca

SEQ ID NO: 1091476 - DNA, 15 bp, Homo sapiens
tttttaaaaaggtac

SEQ ID NO: 1091477 - DNA, 15 bp, Homo sapiens
atttttaaaaaggta

SEQ ID NO: 1091478 - DNA, 15 bp, Homo sapiens
gatttttaaaaaggt

SEQ ID NO: 1091479 - DNA, 15 bp, Homo sapiens
agatttttaaaaagg

SEQ ID NO: 1091480 - DNA, 15 bp, Homo sapiens
aagatttttaaaaag

SEQ ID NO: 1091481 - DNA, 15 bp, Homo sapiens
gaagatttttaaaaa

SEQ ID NO: 1091482 - DNA, 15 bp, Homo sapiens
agaagatttttaaaa

SEQ ID NO: 1091483 - DNA, 15 bp, Homo sapiens
cagaagatttttaaa

SEQ ID NO: 1091484 - DNA, 15 bp, Homo sapiens
tcagaagatttttaa

SEQ ID NO: 1091485 - DNA, 15 bp, Homo sapiens
atcagaagattttta

SEQ ID NO: 1091486 - DNA, 15 bp, Homo sapiens
tatcagaagattttt

SEQ ID NO: 1091487 - DNA, 15 bp, Homo sapiens
ctatcagaagatttt

SEQ ID NO: 1091488 - DNA, 15 bp, Homo sapiens
tctatcagaagattt

SEQ ID NO: 1091489 - DNA, 15 bp, Homo sapiens
atctatcagaagatt

SEQ ID NO: 1091490 - DNA, 15 bp, Homo sapiens
catctatcagaagat

SEQ ID NO: 1091491 - DNA, 15 bp, Homo sapiens
gcatctatcagaaga

SEQ ID NO: 1091492 - DNA, 15 bp, Homo sapiens
ggcatctatcagaag

SEQ ID NO: 1091493 - DNA, 15 bp, Homo sapiens
tggcatctatcagaa

SEQ ID NO: 1091494 - DNA, 15 bp, Homo sapiens
gtggcatctatcaga

SEQ ID NO: 1091495 - DNA, 15 bp, Homo sapiens
ggtggcatctatcag

SEQ ID NO: 1091496 - DNA, 15 bp, Homo sapiens
aggtggcatctatca

SEQ ID NO: 1091497 - DNA, 15 bp, Homo sapiens
caggtggcatctatc

SEQ ID NO: 1091498 - DNA, 15 bp, Homo sapiens
ccaggtggcatctat

SEQ ID NO: 1091499 - DNA, 15 bp, Homo sapiens
tccaggtggcatcta

SEQ ID NO: 1091500 - DNA, 15 bp, Homo sapiens
ttccaggtggcatct

SEQ ID NO: 1091501 - DNA, 15 bp, Homo sapiens
cttccaggtggcatc

SEQ ID NO: 1091502 - DNA, 15 bp, Homo sapiens
ccttccaggtggcat

SEQ ID NO: 1091503 - DNA, 15 bp, Homo sapiens
gccttccaggtggca

SEQ ID NO: 1091504 - DNA, 15 bp, Homo sapiens
agccttccaggtggc

SEQ ID NO: 1091505 - DNA, 15 bp, Homo sapiens
cagccttccaggtgg

SEQ ID NO: 1091506 - DNA, 15 bp, Homo sapiens
gcagccttccaggtg

SEQ ID NO: 1091507 - DNA, 15 bp, Homo sapiens
agcagccttccaggt

SEQ ID NO: 1091508 - DNA, 15 bp, Homo sapiens
cagcagccttccagg

SEQ ID NO: 1091509 - DNA, 15 bp, Homo sapiens
gcagcagccttccag

SEQ ID NO: 1091510 - DNA, 15 bp, Homo sapiens
agcagcagccttcca

SEQ ID NO: 1091511 - DNA, 15 bp, Homo sapiens
cagcagcagccttcc

SEQ ID NO: 1091512 - DNA, 15 bp, Homo sapiens
gcagcagcagccttc

SEQ ID NO: 1091513 - DNA, 15 bp, Homo sapiens
ggcagcagcagcctt

SEQ ID NO: 1091514 - DNA, 15 bp, Homo sapiens
aggcagcagcagcct

SEQ ID NO: 1091515 - DNA, 15 bp, Homo sapiens
caggcagcagcagcc

SEQ ID NO: 1091516 - DNA, 15 bp, Homo sapiens
tcaggcagcagcagc

SEQ ID NO: 1091517 - DNA, 15 bp, Homo sapiens
ttcaggcagcagcag

SEQ ID NO: 1091518 - DNA, 15 bp, Homo sapiens
cttcaggcagcagca

SEQ ID NO: 1091519 - DNA, 15 bp, Homo sapiens
ccttcaggcagcagc

SEQ ID NO: 1091520 - DNA, 15 bp, Homo sapiens
cccttcaggcagcag

SEQ ID NO: 1091521 - DNA, 15 bp, Homo sapiens
ccccttcaggcagca

SEQ ID NO: 1091522 - DNA, 15 bp, Homo sapiens
gccccttcaggcagc

SEQ ID NO: 1091523 - DNA, 15 bp, Homo sapiens
tgccccttcaggcag

SEQ ID NO: 1091524 - DNA, 15 bp, Homo sapiens
ctgccccttcaggca

SEQ ID NO: 1091525 - DNA, 15 bp, Homo sapiens
tctgccccttcaggc

SEQ ID NO: 1091526 - DNA, 15 bp, Homo sapiens
ttctgccccttcagg

SEQ ID NO: 1091527 - DNA, 15 bp, Homo sapiens
tttctgccccttcag

SEQ ID NO: 1091528 - DNA, 15 bp, Homo sapiens
gtttctgccccttca

SEQ ID NO: 1091529 - DNA, 15 bp, Homo sapiens
tgtttctgccccttc

SEQ ID NO: 1091530 - DNA, 15 bp, Homo sapiens
ttgtttctgcccctt

SEQ ID NO: 1091531 - DNA, 15 bp, Homo sapiens
tttgtttctgcccct

SEQ ID NO: 1091532 - DNA, 15 bp, Homo sapiens
ctttgtttctgcccc

SEQ ID NO: 1091533 - DNA, 15 bp, Homo sapiens
cctttgtttctgccc

SEQ ID NO: 1091534 - DNA, 15 bp, Homo sapiens
gcctttgtttctgcc

SEQ ID NO: 1091535 - DNA, 15 bp, Homo sapiens
tgcctttgtttctgc

SEQ ID NO: 1091536 - DNA, 15 bp, Homo sapiens
ttgcctttgtttctg

SEQ ID NO: 1091537 - DNA, 15 bp, Homo sapiens
cttgcctttgtttct

SEQ ID NO: 1091538 - DNA, 15 bp, Homo sapiens
gcttgcctttgtttc

SEQ ID NO: 1091539 - DNA, 15 bp, Homo sapiens
agcttgcctttgttt

SEQ ID NO: 1091540 - DNA, 15 bp, Homo sapiens
gagcttgcctttgtt

SEQ ID NO: 1091541 - DNA, 15 bp, Homo sapiens
agagcttgcctttgt

SEQ ID NO: 1091542 - DNA, 15 bp, Homo sapiens
tagagcttgcctttg

SEQ ID NO: 1091543 - DNA, 15 bp, Homo sapiens
gtagagcttgccttt

SEQ ID NO: 1091544 - DNA, 15 bp, Homo sapiens
agtagagcttgcctt

SEQ ID NO: 1091545 - DNA, 15 bp, Homo sapiens
gagtagagcttgcct

SEQ ID NO: 1091546 - DNA, 15 bp, Homo sapiens
agagtagagcttgcc

SEQ ID NO: 1091547 - DNA, 15 bp, Homo sapiens
cagagtagagcttgc

SEQ ID NO: 1091548 - DNA, 15 bp, Homo sapiens
tcagagtagagcttg

SEQ ID NO: 1091549 - DNA, 15 bp, Homo sapiens
ctcagagtagagctt

SEQ ID NO: 1091550 - DNA, 15 bp, Homo sapiens
gctcagagtagagct

SEQ ID NO: 1091551 - DNA, 15 bp, Homo sapiens
ggctcagagtagagc

SEQ ID NO: 1091552 - DNA, 15 bp, Homo sapiens
gggctcagagtagag

SEQ ID NO: 1091553 - DNA, 15 bp, Homo sapiens
agggctcagagtaga

SEQ ID NO: 1091554 - DNA, 15 bp, Homo sapiens
gagggctcagagtag

SEQ ID NO: 1091555 - DNA, 15 bp, Homo sapiens
tgagggctcagagta

SEQ ID NO: 1091556 - DNA, 15 bp, Homo sapiens
ctgagggctcagagt

SEQ ID NO: 1091557 - DNA, 15 bp, Homo sapiens
cctgagggctcagag

SEQ ID NO: 1091558 - DNA, 15 bp, Homo sapiens
ccctgagggctcaga

SEQ ID NO: 1091559 - DNA, 15 bp, Homo sapiens
tccctgagggctcag

SEQ ID NO: 1091560 - DNA, 15 bp, Homo sapiens
ttccctgagggctca

SEQ ID NO: 1091561 - DNA, 15 bp, Homo sapiens
gttccctgagggctc

SEQ ID NO: 1091562 - DNA, 15 bp, Homo sapiens
ggttccctgagggct

SEQ ID NO: 1091563 - DNA, 15 bp, Homo sapiens
tggttccctgagggc

SEQ ID NO: 1091564 - DNA, 15 bp, Homo sapiens
gtggttccctgaggg

SEQ ID NO: 1091565 - DNA, 15 bp, Homo sapiens
ggtggttccctgagg

SEQ ID NO: 1091566 - DNA, 15 bp, Homo sapiens
tggtggttccctgag

SEQ ID NO: 1091567 - DNA, 15 bp, Homo sapiens
ctggtggttccctga

SEQ ID NO: 1091568 - DNA, 15 bp, Homo sapiens
tctggtggttccctg

SEQ ID NO: 1091569 - DNA, 15 bp, Homo sapiens
atctggtggttccct

SEQ ID NO: 1091570 - DNA, 15 bp, Homo sapiens
tatctggtggttccc

SEQ ID NO: 1091571 - DNA, 15 bp, Homo sapiens
ttatctggtggttcc

SEQ ID NO: 1091572 - DNA, 15 bp, Homo sapiens
tttatctggtggttc

SEQ ID NO: 1091573 - DNA, 15 bp, Homo sapiens
gtttatctggtggtt

SEQ ID NO: 1091574 - DNA, 15 bp, Homo sapiens
tgtttatctggtggt

SEQ ID NO: 1091575 - DNA, 15 bp, Homo sapiens
ttgtttatctggtgg

SEQ ID NO: 1091576 - DNA, 15 bp, Homo sapiens
tttgtttatctggtg

SEQ ID NO: 1091577 - DNA, 15 bp, Homo sapiens
ttttgtttatctggt

SEQ ID NO: 1091578 - DNA, 15 bp, Homo sapiens
cttttgtttatctgg

SEQ ID NO: 1091579 - DNA, 15 bp, Homo sapiens
ttcttttgtttatct

SEQ ID NO: 1091580 - DNA, 15 bp, Homo sapiens
tttcttttgtttatc

SEQ ID NO: 1091581 - DNA, 15 bp, Homo sapiens
atttcttttgtttat

SEQ ID NO: 1091582 - DNA, 15 bp, Homo sapiens
aatttcttttgttta

SEQ ID NO: 1091583 - DNA, 15 bp, Homo sapiens
aaatttcttttgttt

SEQ ID NO: 1091584 - DNA, 15 bp, Homo sapiens
caaatttcttttgtt

SEQ ID NO: 1091585 - DNA, 15 bp, Homo sapiens
tcaaatttcttttgt

SEQ ID NO: 1091586 - DNA, 15 bp, Homo sapiens
atcaaatttcttttg

SEQ ID NO: 1091587 - DNA, 15 bp, Homo sapiens
aatcaaatttctttt

SEQ ID NO: 1091588 - DNA, 15 bp, Homo sapiens
gaatcaaatttcttt

SEQ ID NO: 1091589 - DNA, 15 bp, Homo sapiens
agaatcaaatttctt

SEQ ID NO: 1091590 - DNA, 15 bp, Homo sapiens
gagaatcaaatttct

SEQ ID NO: 1091591 - DNA, 15 bp, Homo sapiens
ggagaatcaaatttc

SEQ ID NO: 1091592 - DNA, 15 bp, Homo sapiens
tggagaatcaaattt

SEQ ID NO: 1091593 - DNA, 15 bp, Homo sapiens
ttggagaatcaaatt

SEQ ID NO: 1091594 - DNA, 15 bp, Homo sapiens
tttggagaatcaaat

SEQ ID NO: 1091595 - DNA, 15 bp, Homo sapiens
atttggagaatcaaa

SEQ ID NO: 1091596 - DNA, 15 bp, Homo sapiens
aatttggagaatcaa

SEQ ID NO: 1091597 - DNA, 15 bp, Homo sapiens
aaatttggagaatca

SEQ ID NO: 1091598 - DNA, 15 bp, Homo sapiens
gaaatttggagaatc

SEQ ID NO: 1091599 - DNA, 15 bp, Homo sapiens
agaaatttggagaat

SEQ ID NO: 1091600 - DNA, 15 bp, Homo sapiens
cagaaatttggagaa

SEQ ID NO: 1091601 - DNA, 15 bp, Homo sapiens
ccagaaatttggaga

SEQ ID NO: 1091602 - DNA, 15 bp, Homo sapiens
tccagaaatttggag

SEQ ID NO: 1091603 - DNA, 15 bp, Homo sapiens
ttccagaaatttgga

SEQ ID NO: 1091604 - DNA, 15 bp, Homo sapiens
cttccagaaatttgg

SEQ ID NO: 1091605 - DNA, 15 bp, Homo sapiens
tcttccagaaatttg

SEQ ID NO: 1091606 - DNA, 15 bp, Homo sapiens
gtcttccagaaattt

SEQ ID NO: 1091607 - DNA, 15 bp, Homo sapiens
tgtcttccagaaatt

SEQ ID NO: 1091608 - DNA, 15 bp, Homo sapiens
ttgtcttccagaaat

SEQ ID NO: 1091609 - DNA, 15 bp, Homo sapiens
cttgtcttccagaaa

SEQ ID NO: 1091610 - DNA, 15 bp, Homo sapiens
ccttgtcttccagaa

SEQ ID NO: 1091611 - DNA, 15 bp, Homo sapiens
accttgtcttccaga

SEQ ID NO: 1091612 - DNA, 15 bp, Homo sapiens
gaccttgtcttccag

SEQ ID NO: 1091613 - DNA, 15 bp, Homo sapiens
ggaccttgtcttcca

SEQ ID NO: 1091614 - DNA, 15 bp, Homo sapiens
aggaccttgtcttcc

SEQ ID NO: 1091615 - DNA, 15 bp, Homo sapiens
aaggaccttgtcttc

SEQ ID NO: 1091616 - DNA, 15 bp, Homo sapiens
aaaggaccttgtctt

SEQ ID NO: 1091617 - DNA, 15 bp, Homo sapiens
gaaaggaccttgtct

SEQ ID NO: 1091618 - DNA, 15 bp, Homo sapiens
agaaaggaccttgtc

SEQ ID NO: 1091619 - DNA, 15 bp, Homo sapiens
cagaaaggaccttgt

SEQ ID NO: 1091620 - DNA, 15 bp, Homo sapiens
gcagaaaggaccttg

SEQ ID NO: 1091621 - DNA, 15 bp, Homo sapiens
ggcagaaaggacctt

SEQ ID NO: 1091622 - DNA, 15 bp, Homo sapiens
gggcagaaaggacct

SEQ ID NO: 1091623 - DNA, 15 bp, Homo sapiens
tgggcagaaaggacc

SEQ ID NO: 1091624 - DNA, 15 bp, Homo sapiens
gtgggcagaaaggac

SEQ ID NO: 1091625 - DNA, 15 bp, Homo sapiens
agtgggcagaaagga

SEQ ID NO: 1091626 - DNA, 15 bp, Homo sapiens
gagtgggcagaaagg

SEQ ID NO: 1091627 - DNA, 15 bp, Homo sapiens
ggagtgggcagaaag

SEQ ID NO: 1091628 - DNA, 15 bp, Homo sapiens
aggagtgggcagaaa

SEQ ID NO: 1091629 - DNA, 15 bp, Homo sapiens
caggagtgggcagaa

SEQ ID NO: 1091630 - DNA, 15 bp, Homo sapiens
gcaggagtgggcaga

SEQ ID NO: 1091631 - DNA, 15 bp, Homo sapiens
agcaggagtgggcag

SEQ ID NO: 1091632 - DNA, 15 bp, Homo sapiens
gagcaggagtgggca

SEQ ID NO: 1091633 - DNA, 15 bp, Homo sapiens
ggagcaggagtgggc

SEQ ID NO: 1091634 - DNA, 15 bp, Homo sapiens
tggagcaggagtggg

SEQ ID NO: 1091635 - DNA, 15 bp, Homo sapiens
ctggagcaggagtgg

SEQ ID NO: 1091636 - DNA, 15 bp, Homo sapiens
gctggagcaggagtg

SEQ ID NO: 1091637 - DNA, 15 bp, Homo sapiens
ggctggagcaggagt

SEQ ID NO: 1091638 - DNA, 15 bp, Homo sapiens
tggctggagcaggag

SEQ ID NO: 1091639 - DNA, 15 bp, Homo sapiens
ctggctggagcagga

SEQ ID NO: 1091640 - DNA, 15 bp, Homo sapiens
gctggctggagcagg

SEQ ID NO: 1091641 - DNA, 15 bp, Homo sapiens
agctggctggagcag

SEQ ID NO: 1091642 - DNA, 15 bp, Homo sapiens
cagctggctggagca

SEQ ID NO: 1091643 - DNA, 15 bp, Homo sapiens
gcagctggctggagc

SEQ ID NO: 1091644 - DNA, 15 bp, Homo sapiens
agcagctggctggag

SEQ ID NO: 1091645 - DNA, 15 bp, Homo sapiens
gagcagctggctgga

SEQ ID NO: 1091646 - DNA, 15 bp, Homo sapiens
agagcagctggctgg

SEQ ID NO: 1091647 - DNA, 15 bp, Homo sapiens
tagagcagctggctg

SEQ ID NO: 1091648 - DNA, 15 bp, Homo sapiens
ctagagcagctggct

SEQ ID NO: 1091649 - DNA, 15 bp, Homo sapiens
cctagagcagctggc

SEQ ID NO: 1091650 - DNA, 15 bp, Homo sapiens
tcctagagcagctgg

SEQ ID NO: 1091651 - DNA, 15 bp, Homo sapiens
ttcctagagcagctg

SEQ ID NO: 1091652 - DNA, 15 bp, Homo sapiens
gttcctagagcagct

SEQ ID NO: 1091653 - DNA, 15 bp, Homo sapiens
tgttcctagagcagc

SEQ ID NO: 1091654 - DNA, 15 bp, Homo sapiens
gtgttcctagagcag

SEQ ID NO: 1091655 - DNA, 15 bp, Homo sapiens
tgtgttcctagagca

SEQ ID NO: 1091656 - DNA, 15 bp, Homo sapiens
ttgtgttcctagagc

SEQ ID NO: 1091657 - DNA, 15 bp, Homo sapiens
attgtgttcctagag

SEQ ID NO: 1091658 - DNA, 15 bp, Homo sapiens
aattgtgttcctaga

SEQ ID NO: 1091659 - DNA, 15 bp, Homo sapiens
taattgtgttcctag

SEQ ID NO: 1091660 - DNA, 15 bp, Homo sapiens
gtaattgtgttccta

SEQ ID NO: 1091661 - DNA, 15 bp, Homo sapiens
agtaattgtgttcct

SEQ ID NO: 1091662 - DNA, 15 bp, Homo sapiens
cagtaattgtgttcc

SEQ ID NO: 1091663 - DNA, 15 bp, Homo sapiens
acagtaattgtgttc

SEQ ID NO: 1091664 - DNA, 15 bp, Homo sapiens
gacagtaattgtgtt

SEQ ID NO: 1091665 - DNA, 15 bp, Homo sapiens
ggacagtaattgtgt

SEQ ID NO: 1091666 - DNA, 15 bp, Homo sapiens
tggacagtaattgtg

SEQ ID NO: 1091667 - DNA, 15 bp, Homo sapiens
gtggacagtaattgt

SEQ ID NO: 1091668 - DNA, 15 bp, Homo sapiens
tgtggacagtaattg

SEQ ID NO: 1091669 - DNA, 15 bp, Homo sapiens
atgtggacagtaatt

SEQ ID NO: 1091670 - DNA, 15 bp, Homo sapiens
catgtggacagtaat

SEQ ID NO: 1091671 - DNA, 15 bp, Homo sapiens
ccatgtggacagtaa

SEQ ID NO: 1091672 - DNA, 15 bp, Homo sapiens
gccatgtggacagta

SEQ ID NO: 1091673 - DNA, 15 bp, Homo sapiens
ggccatgtggacagt

SEQ ID NO: 1091674 - DNA, 15 bp, Homo sapiens
tggccatgtggacag

SEQ ID NO: 1091675 - DNA, 15 bp, Homo sapiens
gtggccatgtggaca

SEQ ID NO: 1091676 - DNA, 15 bp, Homo sapiens
tgtggccatgtggac

SEQ ID NO: 1091677 - DNA, 15 bp, Homo sapiens
ctgtggccatgtgga

SEQ ID NO: 1091678 - DNA, 15 bp, Homo sapiens
cctgtggccatgtgg

SEQ ID NO: 1091679 - DNA, 15 bp, Homo sapiens
tcctgtggccatgtg

SEQ ID NO: 1091680 - DNA, 15 bp, Homo sapiens
ttcctgtggccatgt

SEQ ID NO: 1091681 - DNA, 15 bp, Homo sapiens
attcctgtggccatg

SEQ ID NO: 1091682 - DNA, 15 bp, Homo sapiens
cattcctgtggccat

SEQ ID NO: 1091683 - DNA, 15 bp, Homo sapiens
acattcctgtggcca

SEQ ID NO: 1091684 - DNA, 15 bp, Homo sapiens
aacattcctgtggcc

SEQ ID NO: 1091685 - DNA, 15 bp, Homo sapiens
caacattcctgtggc

SEQ ID NO: 1091686 - DNA, 15 bp, Homo sapiens
tcaacattcctgtgg

SEQ ID NO: 1091687 - DNA, 15 bp, Homo sapiens
ttcaacattcctgtg

SEQ ID NO: 1091688 - DNA, 15 bp, Homo sapiens
cttcaacattcctgt

SEQ ID NO: 1091689 - DNA, 15 bp, Homo sapiens
tcttcaacattcctg

SEQ ID NO: 1091690 - DNA, 15 bp, Homo sapiens
ttcttcaacattcct

SEQ ID NO: 1091691 - DNA, 15 bp, Homo sapiens
attcttcaacattcc

SEQ ID NO: 1091692 - DNA, 15 bp, Homo sapiens
cattcttcaacattc

SEQ ID NO: 1091693 - DNA, 15 bp, Homo sapiens
gcattcttcaacatt

SEQ ID NO: 1091694 - DNA, 15 bp, Homo sapiens
tgcattcttcaacat

SEQ ID NO: 1091695 - DNA, 15 bp, Homo sapiens
ctgcattcttcaaca

SEQ ID NO: 1091696 - DNA, 15 bp, Homo sapiens
cctgcattcttcaac

SEQ ID NO: 1091697 - DNA, 15 bp, Homo sapiens
tcctgcattcttcaa

SEQ ID NO: 1091698 - DNA, 15 bp, Homo sapiens
atcctgcattcttca

SEQ ID NO: 1091699 - DNA, 15 bp, Homo sapiens
catcctgcattcttc

SEQ ID NO: 1091700 - DNA, 15 bp, Homo sapiens
ccatcctgcattctt

SEQ ID NO: 1091701 - DNA, 15 bp, Homo sapiens
accatcctgcattct

SEQ ID NO: 1091702 - DNA, 15 bp, Homo sapiens
taccatcctgcattc

SEQ ID NO: 1091703 - DNA, 15 bp, Homo sapiens
ctaccatcctgcatt

SEQ ID NO: 1091704 - DNA, 15 bp, Homo sapiens
gctaccatcctgcat

SEQ ID NO: 1091705 - DNA, 15 bp, Homo sapiens
agctaccatcctgca

SEQ ID NO: 1091706 - DNA, 15 bp, Homo sapiens
cagctaccatcctgc

SEQ ID NO: 1091707 - DNA, 15 bp, Homo sapiens
ccagctaccatcctg

SEQ ID NO: 1091708 - DNA, 15 bp, Homo sapiens
accagctaccatcct

SEQ ID NO: 1091709 - DNA, 15 bp, Homo sapiens
aaccagctaccatcc

SEQ ID NO: 1091710 - DNA, 15 bp, Homo sapiens
aaaccagctaccatc

SEQ ID NO: 1091711 - DNA, 15 bp, Homo sapiens
caaaccagctaccat

SEQ ID NO: 1091712 - DNA, 15 bp, Homo sapiens
gcaaaccagctacca

SEQ ID NO: 1091713 - DNA, 15 bp, Homo sapiens
ggcaaaccagctacc

SEQ ID NO: 1091714 - DNA, 15 bp, Homo sapiens
gggcaaaccagctac

SEQ ID NO: 1091715 - DNA, 15 bp, Homo sapiens
tgggcaaaccagcta

SEQ ID NO: 1091716 - DNA, 15 bp, Homo sapiens
gtgggcaaaccagct

SEQ ID NO: 1091717 - DNA, 15 bp, Homo sapiens
tgtgggcaaaccagc

SEQ ID NO: 1091718 - DNA, 15 bp, Homo sapiens
gtgtgggcaaaccag

SEQ ID NO: 1091719 - DNA, 15 bp, Homo sapiens
ggtgtgggcaaacca

SEQ ID NO: 1091720 - DNA, 15 bp, Homo sapiens
tggtgtgggcaaacc

SEQ ID NO: 1091721 - DNA, 15 bp, Homo sapiens
gtggtgtgggcaaac

SEQ ID NO: 1091722 - DNA, 15 bp, Homo sapiens
agtggtgtgggcaaa

SEQ ID NO: 1091723 - DNA, 15 bp, Homo sapiens
gagtggtgtgggcaa

SEQ ID NO: 1091724 - DNA, 15 bp, Homo sapiens
tgagtggtgtgggca

SEQ ID NO: 1091725 - DNA, 15 bp, Homo sapiens
gtgagtggtgtgggc

SEQ ID NO: 1091726 - DNA, 15 bp, Homo sapiens
agtgagtggtgtggg

SEQ ID NO: 1091727 - DNA, 15 bp, Homo sapiens
aagtgagtggtgtgg

SEQ ID NO: 1091728 - DNA, 15 bp, Homo sapiens
taagtgagtggtgtg

SEQ ID NO: 1091729 - DNA, 15 bp, Homo sapiens
ataagtgagtggtgt

SEQ ID NO: 1091730 - DNA, 15 bp, Homo sapiens
cataagtgagtggtg

SEQ ID NO: 1091731 - DNA, 15 bp, Homo sapiens
tcataagtgagtggt

SEQ ID NO: 1091732 - DNA, 15 bp, Homo sapiens
ctcataagtgagtgg

SEQ ID NO: 1091733 - DNA, 15 bp, Homo sapiens
gctcataagtgagtg

SEQ ID NO: 1091734 - DNA, 15 bp, Homo sapiens
ggctcataagtgagt

SEQ ID NO: 1091735 - DNA, 15 bp, Homo sapiens
tggctcataagtgag

SEQ ID NO: 1091736 - DNA, 15 bp, Homo sapiens
atggctcataagtga

SEQ ID NO: 1091737 - DNA, 15 bp, Homo sapiens
gatggctcataagtg

SEQ ID NO: 1091738 - DNA, 15 bp, Homo sapiens
tgatggctcataagt

SEQ ID NO: 1091739 - DNA, 15 bp, Homo sapiens
ctgatggctcataag

SEQ ID NO: 1091740 - DNA, 15 bp, Homo sapiens
gctgatggctcataa

SEQ ID NO: 1091741 - DNA, 15 bp, Homo sapiens
tgctgatggctcata

SEQ ID NO: 1091742 - DNA, 15 bp, Homo sapiens
atgctgatggctcat

SEQ ID NO: 1091743 - DNA, 15 bp, Homo sapiens
catgctgatggctca

SEQ ID NO: 1091744 - DNA, 15 bp, Homo sapiens
gcatgctgatggctc

SEQ ID NO: 1091745 - DNA, 15 bp, Homo sapiens
ggcatgctgatggct

SEQ ID NO: 1091746 - DNA, 15 bp, Homo sapiens
aggcatgctgatggc

SEQ ID NO: 1091747 - DNA, 15 bp, Homo sapiens
gaggcatgctgatgg

SEQ ID NO: 1091748 - DNA, 15 bp, Homo sapiens
agaggcatgctgatg

SEQ ID NO: 1091749 - DNA, 15 bp, Homo sapiens
gagaggcatgctgat

SEQ ID NO: 1091750 - DNA, 15 bp, Homo sapiens
ggagaggcatgctga

SEQ ID NO: 1091751 - DNA, 15 bp, Homo sapiens
gggagaggcatgctg

SEQ ID NO: 1091752 - DNA, 15 bp, Homo sapiens
agggagaggcatgct

SEQ ID NO: 1091753 - DNA, 15 bp, Homo sapiens
aagggagaggcatgc

SEQ ID NO: 1091754 - DNA, 15 bp, Homo sapiens
gaagggagaggcatg

SEQ ID NO: 1091755 - DNA, 15 bp, Homo sapiens
tgaagggagaggcat

SEQ ID NO: 1091756 - DNA, 15 bp, Homo sapiens
atgaagggagaggca

SEQ ID NO: 1091757 - DNA, 15 bp, Homo sapiens
gatgaagggagaggc

SEQ ID NO: 1091758 - DNA, 15 bp, Homo sapiens
cgatgaagggagagg

SEQ ID NO: 1091759 - DNA, 15 bp, Homo sapiens
tcgatgaagggagag

SEQ ID NO: 1091760 - DNA, 15 bp, Homo sapiens
ctcgatgaagggaga

SEQ ID NO: 1091761 - DNA, 15 bp, Homo sapiens
gctcgatgaagggag

SEQ ID NO: 1091762 - DNA, 15 bp, Homo sapiens
tgctcgatgaaggga

SEQ ID NO: 1091763 - DNA, 15 bp, Homo sapiens
gtgctcgatgaaggg

SEQ ID NO: 1091764 - DNA, 15 bp, Homo sapiens
agtgctcgatgaagg

SEQ ID NO: 1091765 - DNA, 15 bp, Homo sapiens
gagtgctcgatgaag

SEQ ID NO: 1091766 - DNA, 15 bp, Homo sapiens
ggagtgctcgatgaa

SEQ ID NO: 1091767 - DNA, 15 bp, Homo sapiens
gggagtgctcgatga

SEQ ID NO: 1091768 - DNA, 15 bp, Homo sapiens
tgggagtgctcgatg

SEQ ID NO: 1091769 - DNA, 15 bp, Homo sapiens
atgggagtgctcgat

SEQ ID NO: 1091770 - DNA, 15 bp, Homo sapiens
catgggagtgctcga

SEQ ID NO: 1091771 - DNA, 15 bp, Homo sapiens
ccatgggagtgctcg

SEQ ID NO: 1091772 - DNA, 15 bp, Homo sapiens
accatgggagtgctc

SEQ ID NO: 1091773 - DNA, 15 bp, Homo sapiens
aaccatgggagtgct

SEQ ID NO: 1091774 - DNA, 15 bp, Homo sapiens
caaccatgggagtgc

SEQ ID NO: 1091775 - DNA, 15 bp, Homo sapiens
gcaaccatgggagtg

SEQ ID NO: 1091776 - DNA, 15 bp, Homo sapiens
agcaaccatgggagt

SEQ ID NO: 1091777 - DNA, 15 bp, Homo sapiens
cagcaaccatgggag

SEQ ID NO: 1091778 - DNA, 15 bp, Homo sapiens
acagcaaccatggga

SEQ ID NO: 1091779 - DNA, 15 bp, Homo sapiens
tacagcaaccatggg

SEQ ID NO: 1091780 - DNA, 15 bp, Homo sapiens
ttacagcaaccatgg

SEQ ID NO: 1091781 - DNA, 15 bp, Homo sapiens
cttacagcaaccatg

SEQ ID NO: 1091782 - DNA, 15 bp, Homo sapiens
acttacagcaaccat

SEQ ID NO: 1091783 - DNA, 15 bp, Homo sapiens
cacttacagcaacca

SEQ ID NO: 1091784 - DNA, 15 bp, Homo sapiens
acacttacagcaacc

SEQ ID NO: 1091785 - DNA, 15 bp, Homo sapiens
gacacttacagcaac

SEQ ID NO: 1091786 - DNA, 15 bp, Homo sapiens
ggacacttacagcaa

SEQ ID NO: 1091787 - DNA, 15 bp, Homo sapiens
tggacacttacagca

SEQ ID NO: 1091788 - DNA, 15 bp, Homo sapiens
ttggacacttacagc

SEQ ID NO: 1091789 - DNA, 15 bp, Homo sapiens
attggacacttacag

SEQ ID NO: 1091790 - DNA, 15 bp, Homo sapiens
gattggacacttaca

SEQ ID NO: 1091791 - DNA, 15 bp, Homo sapiens
tgattggacacttac

SEQ ID NO: 1091792 - DNA, 15 bp, Homo sapiens
ctgattggacactta

SEQ ID NO: 1091793 - DNA, 15 bp, Homo sapiens
cctgattggacactt

SEQ ID NO: 1091794 - DNA, 15 bp, Homo sapiens
acctgattggacact

SEQ ID NO: 1091795 - DNA, 15 bp, Homo sapiens
aacctgattggacac

SEQ ID NO: 1091796 - DNA, 15 bp, Homo sapiens
gaacctgattggaca

SEQ ID NO: 1091797 - DNA, 15 bp, Homo sapiens
ggaacctgattggac

SEQ ID NO: 1091798 - DNA, 15 bp, Homo sapiens
tggaacctgattgga

SEQ ID NO: 1091799 - DNA, 15 bp, Homo sapiens
ctggaacctgattgg

SEQ ID NO: 1091800 - DNA, 15 bp, Homo sapiens
tctggaacctgattg

SEQ ID NO: 1091801 - DNA, 15 bp, Homo sapiens
ttctggaacctgatt

SEQ ID NO: 1091802 - DNA, 15 bp, Homo sapiens
attctggaacctgat

SEQ ID NO: 1091803 - DNA, 15 bp, Homo sapiens
aattctggaacctga

SEQ ID NO: 1091804 - DNA, 15 bp, Homo sapiens
gaattctggaacctg

SEQ ID NO: 1091805 - DNA, 15 bp, Homo sapiens
agaattctggaacct

SEQ ID NO: 1091806 - DNA, 15 bp, Homo sapiens
cagaattctggaacc

SEQ ID NO: 1091807 - DNA, 15 bp, Homo sapiens
tcagaattctggaac

SEQ ID NO: 1091808 - DNA, 15 bp, Homo sapiens
ttcagaattctggaa

SEQ ID NO: 1091809 - DNA, 15 bp, Homo sapiens
tttcagaattctgga

SEQ ID NO: 1091810 - DNA, 15 bp, Homo sapiens
ctttcagaattctgg

SEQ ID NO: 1091811 - DNA, 15 bp, Homo sapiens
tctttcagaattctg

SEQ ID NO: 1091812 - DNA, 15 bp, Homo sapiens
ctctttcagaattct

SEQ ID NO: 1091813 - DNA, 15 bp, Homo sapiens
actctttcagaattc

SEQ ID NO: 1091814 - DNA, 15 bp, Homo sapiens
aactctttcagaatt

SEQ ID NO: 1091815 - DNA, 15 bp, Homo sapiens
caactctttcagaat

SEQ ID NO: 1091816 - DNA, 15 bp, Homo sapiens
tcaactctttcagaa

SEQ ID NO: 1091817 - DNA, 15 bp, Homo sapiens
gtcaactctttcaga

SEQ ID NO: 1091818 - DNA, 15 bp, Homo sapiens
agtcaactctttcag

SEQ ID NO: 1091819 - DNA, 15 bp, Homo sapiens
gagtcaactctttca

SEQ ID NO: 1091820 - DNA, 15 bp, Homo sapiens
agagtcaactctttc

SEQ ID NO: 1091821 - DNA, 15 bp, Homo sapiens
aagagtcaactcttt

SEQ ID NO: 1091822 - DNA, 15 bp, Homo sapiens
taagagtcaactctt

SEQ ID NO: 1091823 - DNA, 15 bp, Homo sapiens
gtaagagtcaactct

SEQ ID NO: 1091824 - DNA, 15 bp, Homo sapiens
tgtaagagtcaactc

SEQ ID NO: 1091825 - DNA, 15 bp, Homo sapiens
ctgtaagagtcaact

SEQ ID NO: 1091826 - DNA, 15 bp, Homo sapiens
cctgtaagagtcaac

SEQ ID NO: 1091827 - DNA, 15 bp, Homo sapiens
tcctgtaagagtcaa

SEQ ID NO: 1091828 - DNA, 15 bp, Homo sapiens
atcctgtaagagtca

SEQ ID NO: 1091829 - DNA, 15 bp, Homo sapiens
aatcctgtaagagtc

SEQ ID NO: 1091830 - DNA, 15 bp, Homo sapiens
aaatcctgtaagagt

SEQ ID NO: 1091831 - DNA, 15 bp, Homo sapiens
aaaatcctgtaagag

SEQ ID NO: 1091832 - DNA, 15 bp, Homo sapiens
aaaaatcctgtaaga

SEQ ID NO: 1091833 - DNA, 15 bp, Homo sapiens
aaaaaatcctgtaag

SEQ ID NO: 1091834 - DNA, 15 bp, Homo sapiens
aaaaaaatcctgtaa

SEQ ID NO: 1091835 - DNA, 15 bp, Homo sapiens
gaaaaaaatcctgta

SEQ ID NO: 1091836 - DNA, 15 bp, Homo sapiens
agaaaaaaatcctgt

SEQ ID NO: 1091837 - DNA, 15 bp, Homo sapiens
aagaaaaaaatcctg

SEQ ID NO: 1091838 - DNA, 15 bp, Homo sapiens
aaagaaaaaaatcct

SEQ ID NO: 1091839 - DNA, 15 bp, Homo sapiens
aaaagaaaaaaatcc

SEQ ID NO: 1091840 - DNA, 15 bp, Homo sapiens
gaaaagaaaaaaatc

SEQ ID NO: 1091841 - DNA, 15 bp, Homo sapiens
tagaaaagaaaaaaa

SEQ ID NO: 1091842 - DNA, 15 bp, Homo sapiens
ttagaaaagaaaaaa

SEQ ID NO: 1091843 - DNA, 15 bp, Homo sapiens
gttagaaaagaaaaa

SEQ ID NO: 1091844 - DNA, 15 bp, Homo sapiens
agttagaaaagaaaa

SEQ ID NO: 1091845 - DNA, 15 bp, Homo sapiens
aagttagaaaagaaa

SEQ ID NO: 1091846 - DNA, 15 bp, Homo sapiens
caagttagaaaagaa

SEQ ID NO: 1091847 - DNA, 15 bp, Homo sapiens
gcaagttagaaaaga

SEQ ID NO: 1091848 - DNA, 15 bp, Homo sapiens
agcaagttagaaaag

SEQ ID NO: 1091849 - DNA, 15 bp, Homo sapiens
cagcaagttagaaaa

SEQ ID NO: 1091850 - DNA, 15 bp, Homo sapiens
ccagcaagttagaaa

SEQ ID NO: 1091851 - DNA, 15 bp, Homo sapiens
accagcaagttagaa

SEQ ID NO: 1091852 - DNA, 15 bp, Homo sapiens
aaccagcaagttaga

SEQ ID NO: 1091853 - DNA, 15 bp, Homo sapiens
caaccagcaagttag

SEQ ID NO: 1091854 - DNA, 15 bp, Homo sapiens
acaaccagcaagtta

SEQ ID NO: 1091855 - DNA, 15 bp, Homo sapiens
aacaaccagcaagtt

SEQ ID NO: 1091856 - DNA, 15 bp, Homo sapiens
aaacaaccagcaagt

SEQ ID NO: 1091857 - DNA, 15 bp, Homo sapiens
taaacaaccagcaag

SEQ ID NO: 1091858 - DNA, 15 bp, Homo sapiens
ctaaacaaccagcaa

SEQ ID NO: 1091859 - DNA, 15 bp, Homo sapiens
tctaaacaaccagca

SEQ ID NO: 1091860 - DNA, 15 bp, Homo sapiens
atctaaacaaccagc

SEQ ID NO: 1091861 - DNA, 15 bp, Homo sapiens
tatctaaacaaccag

SEQ ID NO: 1091862 - DNA, 15 bp, Homo sapiens
ctatctaaacaacca

SEQ ID NO: 1091863 - DNA, 15 bp, Homo sapiens
tctatctaaacaacc

SEQ ID NO: 1091864 - DNA, 15 bp, Homo sapiens
ctctatctaaacaac

SEQ ID NO: 1091865 - DNA, 15 bp, Homo sapiens
cctctatctaaacaa

SEQ ID NO: 1091866 - DNA, 15 bp, Homo sapiens
tcctctatctaaaca

SEQ ID NO: 1091867 - DNA, 15 bp, Homo sapiens
ttcctctatctaaac

SEQ ID NO: 1091868 - DNA, 15 bp, Homo sapiens
gttcctctatctaaa

SEQ ID NO: 1091869 - DNA, 15 bp, Homo sapiens
ggttcctctatctaa

SEQ ID NO: 1091870 - DNA, 15 bp, Homo sapiens
tggttcctctatcta

SEQ ID NO: 1091871 - DNA, 15 bp, Homo sapiens
ttggttcctctatct

SEQ ID NO: 1091872 - DNA, 15 bp, Homo sapiens
attggttcctctatc

SEQ ID NO: 1091873 - DNA, 15 bp, Homo sapiens
aattggttcctctat

SEQ ID NO: 1091874 - DNA, 15 bp, Homo sapiens
gaattggttcctcta

SEQ ID NO: 1091875 - DNA, 15 bp, Homo sapiens
ggaattggttcctct

SEQ ID NO: 1091876 - DNA, 15 bp, Homo sapiens
aggaattggttcctc

SEQ ID NO: 1091877 - DNA, 15 bp, Homo sapiens
caggaattggttcct

SEQ ID NO: 1091878 - DNA, 15 bp, Homo sapiens
tcaggaattggttcc

SEQ ID NO: 1091879 - DNA, 15 bp, Homo sapiens
ttcaggaattggttc

SEQ ID NO: 1091880 - DNA, 15 bp, Homo sapiens
cttcaggaattggtt

SEQ ID NO: 1091881 - DNA, 15 bp, Homo sapiens
acttcaggaattggt

SEQ ID NO: 1091882 - DNA, 15 bp, Homo sapiens
aacttcaggaattgg

SEQ ID NO: 1091883 - DNA, 15 bp, Homo sapiens
aaacttcaggaattg

SEQ ID NO: 1091884 - DNA, 15 bp, Homo sapiens
gaaacttcaggaatt

SEQ ID NO: 1091885 - DNA, 15 bp, Homo sapiens
ggaaacttcaggaat

SEQ ID NO: 1091886 - DNA, 15 bp, Homo sapiens
aggaaacttcaggaa

SEQ ID NO: 1091887 - DNA, 15 bp, Homo sapiens
taggaaacttcagga

SEQ ID NO: 1091888 - DNA, 15 bp, Homo sapiens
gtaggaaacttcagg

SEQ ID NO: 1091889 - DNA, 15 bp, Homo sapiens
cgtaggaaacttcag

SEQ ID NO: 1091890 - DNA, 15 bp, Homo sapiens
acgtaggaaacttca

SEQ ID NO: 1091891 - DNA, 15 bp, Homo sapiens
aacgtaggaaacttc

SEQ ID NO: 1091892 - DNA, 15 bp, Homo sapiens
caacgtaggaaactt

SEQ ID NO: 1091893 - DNA, 15 bp, Homo sapiens
gcaacgtaggaaact

SEQ ID NO: 1091894 - DNA, 15 bp, Homo sapiens
ggcaacgtaggaaac

SEQ ID NO: 1091895 - DNA, 15 bp, Homo sapiens
tggcaacgtaggaaa

SEQ ID NO: 1091896 - DNA, 15 bp, Homo sapiens
ctggcaacgtaggaa

SEQ ID NO: 1091897 - DNA, 15 bp, Homo sapiens
gctggcaacgtagga

SEQ ID NO: 1091898 - DNA, 15 bp, Homo sapiens
agctggcaacgtagg

SEQ ID NO: 1091899 - DNA, 15 bp, Homo sapiens
aagctggcaacgtag

SEQ ID NO: 1091900 - DNA, 15 bp, Homo sapiens
gaagctggcaacgta

SEQ ID NO: 1091901 - DNA, 15 bp, Homo sapiens
tgaagctggcaacgt

SEQ ID NO: 1091902 - DNA, 15 bp, Homo sapiens
atgaagctggcaacg

SEQ ID NO: 1091903 - DNA, 15 bp, Homo sapiens
catgaagctggcaac

SEQ ID NO: 1091904 - DNA, 15 bp, Homo sapiens
tcatgaagctggcaa

SEQ ID NO: 1091905 - DNA, 15 bp, Homo sapiens
ctcatgaagctggca

SEQ ID NO: 1091906 - DNA, 15 bp, Homo sapiens
cctcatgaagctggc

SEQ ID NO: 1091907 - DNA, 15 bp, Homo sapiens
tcctcatgaagctgg

SEQ ID NO: 1091908 - DNA, 15 bp, Homo sapiens
atcctcatgaagctg

SEQ ID NO: 1091909 - DNA, 15 bp, Homo sapiens
gatcctcatgaagct

SEQ ID NO: 1091910 - DNA, 15 bp, Homo sapiens
tgatcctcatgaagc

SEQ ID NO: 1091911 - DNA, 15 bp, Homo sapiens
atgatcctcatgaag

SEQ ID NO: 1091912 - DNA, 15 bp, Homo sapiens
aatgatcctcatgaa

SEQ ID NO: 1091913 - DNA, 15 bp, Homo sapiens
gaatgatcctcatga

SEQ ID NO: 1091914 - DNA, 15 bp, Homo sapiens
ggaatgatcctcatg

SEQ ID NO: 1091915 - DNA, 15 bp, Homo sapiens
gggaatgatcctcat

SEQ ID NO: 1091916 - DNA, 15 bp, Homo sapiens
agggaatgatcctca

SEQ ID NO: 1091917 - DNA, 15 bp, Homo sapiens
tagggaatgatcctc

SEQ ID NO: 1091918 - DNA, 15 bp, Homo sapiens
ctagggaatgatcct

SEQ ID NO: 1091919 - DNA, 15 bp, Homo sapiens
actagggaatgatcc

SEQ ID NO: 1091920 - DNA, 15 bp, Homo sapiens
tactagggaatgatc

SEQ ID NO: 1091921 - DNA, 15 bp, Homo sapiens
ttactagggaatgat

SEQ ID NO: 1091922 - DNA, 15 bp, Homo sapiens
gttactagggaatga

SEQ ID NO: 1091923 - DNA, 15 bp, Homo sapiens
agttactagggaatg

SEQ ID NO: 1091924 - DNA, 15 bp, Homo sapiens
gagttactagggaat

SEQ ID NO: 1091925 - DNA, 15 bp, Homo sapiens
agagttactagggaa

SEQ ID NO: 1091926 - DNA, 15 bp, Homo sapiens
aagagttactaggga

SEQ ID NO: 1091927 - DNA, 15 bp, Homo sapiens
aaagagttactaggg

SEQ ID NO: 1091928 - DNA, 15 bp, Homo sapiens
aaaagagttactagg

SEQ ID NO: 1091929 - DNA, 15 bp, Homo sapiens
gaaaagagttactag

SEQ ID NO: 1091930 - DNA, 15 bp, Homo sapiens
tgaaaagagttacta

SEQ ID NO: 1091931 - DNA, 15 bp, Homo sapiens
ctgaaaagagttact

SEQ ID NO: 1091932 - DNA, 15 bp, Homo sapiens
tctgaaaagagttac

SEQ ID NO: 1091933 - DNA, 15 bp, Homo sapiens
gtctgaaaagagtta

SEQ ID NO: 1091934 - DNA, 15 bp, Homo sapiens
tgtctgaaaagagtt

SEQ ID NO: 1091935 - DNA, 15 bp, Homo sapiens
ttgtctgaaaagagt

SEQ ID NO: 1091936 - DNA, 15 bp, Homo sapiens
tttgtctgaaaagag

SEQ ID NO: 1091937 - DNA, 15 bp, Homo sapiens
ttttgtctgaaaaga

SEQ ID NO: 1091938 - DNA, 15 bp, Homo sapiens
tttttgtctgaaaag

SEQ ID NO: 1091939 - DNA, 15 bp, Homo sapiens
ctttttgtctgaaaa

SEQ ID NO: 1091940 - DNA, 15 bp, Homo sapiens
gctttttgtctgaaa

SEQ ID NO: 1091941 - DNA, 15 bp, Homo sapiens
agctttttgtctgaa

SEQ ID NO: 1091942 - DNA, 15 bp, Homo sapiens
aagctttttgtctga

SEQ ID NO: 1091943 - DNA, 15 bp, Homo sapiens
gaagctttttgtctg

SEQ ID NO: 1091944 - DNA, 15 bp, Homo sapiens
tgaagctttttgtct

SEQ ID NO: 1091945 - DNA, 15 bp, Homo sapiens
atgaagctttttgtc

SEQ ID NO: 1091946 - DNA, 15 bp, Homo sapiens
aatgaagctttttgt

SEQ ID NO: 1091947 - DNA, 15 bp, Homo sapiens
caatgaagctttttg

SEQ ID NO: 1091948 - DNA, 15 bp, Homo sapiens
tcaatgaagcttttt

SEQ ID NO: 1091949 - DNA, 15 bp, Homo sapiens
atcaatgaagctttt

SEQ ID NO: 1091950 - DNA, 15 bp, Homo sapiens
aatcaatgaagcttt

SEQ ID NO: 1091951 - DNA, 15 bp, Homo sapiens
aaatcaatgaagctt

SEQ ID NO: 1091952 - DNA, 15 bp, Homo sapiens
taaatcaatgaagct

SEQ ID NO: 1091953 - DNA, 15 bp, Homo sapiens
gtaaatcaatgaagc

SEQ ID NO: 1091954 - DNA, 15 bp, Homo sapiens
agtaaatcaatgaag

SEQ ID NO: 1091955 - DNA, 15 bp, Homo sapiens
cagtaaatcaatgaa

SEQ ID NO: 1091956 - DNA, 15 bp, Homo sapiens
acagtaaatcaatga

SEQ ID NO: 1091957 - DNA, 15 bp, Homo sapiens
tacagtaaatcaatg

SEQ ID NO: 1091958 - DNA, 15 bp, Homo sapiens
ctacagtaaatcaat

SEQ ID NO: 1091959 - DNA, 15 bp, Homo sapiens
cctacagtaaatcaa

SEQ ID NO: 1091960 - DNA, 15 bp, Homo sapiens
tcctacagtaaatca

SEQ ID NO: 1091961 - DNA, 15 bp, Homo sapiens
gtcctacagtaaatc

SEQ ID NO: 1091962 - DNA, 15 bp, Homo sapiens
agtcctacagtaaat

SEQ ID NO: 1091963 - DNA, 15 bp, Homo sapiens
tagtcctacagtaaa

SEQ ID NO: 1091964 - DNA, 15 bp, Homo sapiens
ctagtcctacagtaa

SEQ ID NO: 1091965 - DNA, 15 bp, Homo sapiens
gctagtcctacagta

SEQ ID NO: 1091966 - DNA, 15 bp, Homo sapiens
tgctagtcctacagt

SEQ ID NO: 1091967 - DNA, 15 bp, Homo sapiens
atgctagtcctacag

SEQ ID NO: 1091968 - DNA, 15 bp, Homo sapiens
gatgctagtcctaca

SEQ ID NO: 1091969 - DNA, 15 bp, Homo sapiens
tgatgctagtcctac

SEQ ID NO: 1091970 - DNA, 15 bp, Homo sapiens
ttgatgctagtccta

SEQ ID NO: 1091971 - DNA, 15 bp, Homo sapiens
tttgatgctagtcct

SEQ ID NO: 1091972 - DNA, 15 bp, Homo sapiens
ctttgatgctagtcc

SEQ ID NO: 1091973 - DNA, 15 bp, Homo sapiens
tctttgatgctagtc

SEQ ID NO: 1091974 - DNA, 15 bp, Homo sapiens
ctctttgatgctagt

SEQ ID NO: 1091975 - DNA, 15 bp, Homo sapiens
actctttgatgctag

SEQ ID NO: 1091976 - DNA, 15 bp, Homo sapiens
gactctttgatgcta

SEQ ID NO: 1091977 - DNA, 15 bp, Homo sapiens
agactctttgatgct

SEQ ID NO: 1091978 - DNA, 15 bp, Homo sapiens
tagactctttgatgc

SEQ ID NO: 1091979 - DNA, 15 bp, Homo sapiens
atagactctttgatg

SEQ ID NO: 1091980 - DNA, 15 bp, Homo sapiens
catagactctttgat

SEQ ID NO: 1091981 - DNA, 15 bp, Homo sapiens
gcatagactctttga

SEQ ID NO: 1091982 - DNA, 15 bp, Homo sapiens
ggcatagactctttg

SEQ ID NO: 1091983 - DNA, 15 bp, Homo sapiens
tggcatagactcttt

SEQ ID NO: 1091984 - DNA, 15 bp, Homo sapiens
gtggcatagactctt

SEQ ID NO: 1091985 - DNA, 15 bp, Homo sapiens
ggtggcatagactct

SEQ ID NO: 1091986 - DNA, 15 bp, Homo sapiens
aggtggcatagactc

SEQ ID NO: 1091987 - DNA, 15 bp, Homo sapiens
taggtggcatagact

SEQ ID NO: 1091988 - DNA, 15 bp, Homo sapiens
ctaggtggcatagac

SEQ ID NO: 1091989 - DNA, 15 bp, Homo sapiens
actaggtggcataga

SEQ ID NO: 1091990 - DNA, 15 bp, Homo sapiens
gactaggtggcatag

SEQ ID NO: 1091991 - DNA, 15 bp, Homo sapiens
agactaggtggcata

SEQ ID NO: 1091992 - DNA, 15 bp, Homo sapiens
cagactaggtggcat

SEQ ID NO: 1091993 - DNA, 15 bp, Homo sapiens
acagactaggtggca

SEQ ID NO: 1091994 - DNA, 15 bp, Homo sapiens
gacagactaggtggc

SEQ ID NO: 1091995 - DNA, 15 bp, Homo sapiens
agacagactaggtgg

SEQ ID NO: 1091996 - DNA, 15 bp, Homo sapiens
gagacagactaggtg

SEQ ID NO: 1091997 - DNA, 15 bp, Homo sapiens
ggagacagactaggt

SEQ ID NO: 1091998 - DNA, 15 bp, Homo sapiens
aggagacagactagg

SEQ ID NO: 1091999 - DNA, 15 bp, Homo sapiens
aaggagacagactag

SEQ ID NO: 1092000 - DNA, 15 bp, Homo sapiens
taaggagacagacta

SEQ ID NO: 1092001 - DNA, 15 bp, Homo sapiens
ttaaggagacagact

SEQ ID NO: 1092002 - DNA, 15 bp, Homo sapiens
tttaaggagacagac

SEQ ID NO: 1092003 - DNA, 15 bp, Homo sapiens
ttttaaggagacaga

SEQ ID NO: 1092004 - DNA, 15 bp, Homo sapiens
gttttaaggagacag

SEQ ID NO: 1092005 - DNA, 15 bp, Homo sapiens
tgttttaaggagaca

SEQ ID NO: 1092006 - DNA, 15 bp, Homo sapiens
gtgttttaaggagac

SEQ ID NO: 1092007 - DNA, 15 bp, Homo sapiens
tgtgttttaaggaga

SEQ ID NO: 1092008 - DNA, 15 bp, Homo sapiens
ctgtgttttaaggag

SEQ ID NO: 1092009 - DNA, 15 bp, Homo sapiens
tctgtgttttaagga

SEQ ID NO: 1092010 - DNA, 15 bp, Homo sapiens
ttctgtgttttaagg

SEQ ID NO: 1092011 - DNA, 15 bp, Homo sapiens
tttctgtgttttaag

SEQ ID NO: 1092012 - DNA, 15 bp, Homo sapiens
atttctgtgttttaa

SEQ ID NO: 1092013 - DNA, 15 bp, Homo sapiens
tatttctgtgtttta

SEQ ID NO: 1092014 - DNA, 15 bp, Homo sapiens
ttatttctgtgtttt

SEQ ID NO: 1092015 - DNA, 15 bp, Homo sapiens
attatttctgtgttt

SEQ ID NO: 1092016 - DNA, 15 bp, Homo sapiens
gattatttctgtgtt

SEQ ID NO: 1092017 - DNA, 15 bp, Homo sapiens
tgattatttctgtgt

SEQ ID NO: 1092018 - DNA, 15 bp, Homo sapiens
ctgattatttctgtg

SEQ ID NO: 1092019 - DNA, 15 bp, Homo sapiens
actgattatttctgt

SEQ ID NO: 1092020 - DNA, 15 bp, Homo sapiens
tactgattatttctg

SEQ ID NO: 1092021 - DNA, 15 bp, Homo sapiens
atactgattatttct

SEQ ID NO: 1092022 - DNA, 15 bp, Homo sapiens
catactgattatttc

SEQ ID NO: 1092023 - DNA, 15 bp, Homo sapiens
gcatactgattattt

SEQ ID NO: 1092024 - DNA, 15 bp, Homo sapiens
tgcatactgattatt

SEQ ID NO: 1092025 - DNA, 15 bp, Homo sapiens
atgcatactgattat

SEQ ID NO: 1092026 - DNA, 15 bp, Homo sapiens
aatgcatactgatta

SEQ ID NO: 1092027 - DNA, 15 bp, Homo sapiens
caatgcatactgatt

SEQ ID NO: 1092028 - DNA, 15 bp, Homo sapiens
ccaatgcatactgat

SEQ ID NO: 1092029 - DNA, 15 bp, Homo sapiens
cccaatgcatactga

SEQ ID NO: 1092030 - DNA, 15 bp, Homo sapiens
ccccaatgcatactg

SEQ ID NO: 1092031 - DNA, 15 bp, Homo sapiens
accccaatgcatact

SEQ ID NO: 1092032 - DNA, 15 bp, Homo sapiens
taccccaatgcatac

SEQ ID NO: 1092033 - DNA, 15 bp, Homo sapiens
ctaccccaatgcata

SEQ ID NO: 1092034 - DNA, 15 bp, Homo sapiens
cctaccccaatgcat

SEQ ID NO: 1092035 - DNA, 15 bp, Homo sapiens
tcctaccccaatgca

SEQ ID NO: 1092036 - DNA, 15 bp, Homo sapiens
ctcctaccccaatgc

SEQ ID NO: 1092037 - DNA, 15 bp, Homo sapiens
actcctaccccaatg

SEQ ID NO: 1092038 - DNA, 15 bp, Homo sapiens
aactcctaccccaat

SEQ ID NO: 1092039 - DNA, 15 bp, Homo sapiens
aaactcctaccccaa

SEQ ID NO: 1092040 - DNA, 15 bp, Homo sapiens
caaactcctacccca

SEQ ID NO: 1092041 - DNA, 15 bp, Homo sapiens
ccaaactcctacccc

SEQ ID NO: 1092042 - DNA, 15 bp, Homo sapiens
gccaaactcctaccc

SEQ ID NO: 1092043 - DNA, 15 bp, Homo sapiens
tgccaaactcctacc

SEQ ID NO: 1092044 - DNA, 15 bp, Homo sapiens
atgccaaactcctac

SEQ ID NO: 1092045 - DNA, 15 bp, Homo sapiens
aatgccaaactccta

SEQ ID NO: 1092046 - DNA, 15 bp, Homo sapiens
taatgccaaactcct

SEQ ID NO: 1092047 - DNA, 15 bp, Homo sapiens
ctaatgccaaactcc

SEQ ID NO: 1092048 - DNA, 15 bp, Homo sapiens
tctaatgccaaactc

SEQ ID NO: 1092049 - DNA, 15 bp, Homo sapiens
atctaatgccaaact

SEQ ID NO: 1092050 - DNA, 15 bp, Homo sapiens
gatctaatgccaaac

SEQ ID NO: 1092051 - DNA, 15 bp, Homo sapiens
agatctaatgccaaa

SEQ ID NO: 1092052 - DNA, 15 bp, Homo sapiens
cagatctaatgccaa

SEQ ID NO: 1092053 - DNA, 15 bp, Homo sapiens
gcagatctaatgcca

SEQ ID NO: 1092054 - DNA, 15 bp, Homo sapiens
ggcagatctaatgcc

SEQ ID NO: 1092055 - DNA, 15 bp, Homo sapiens
cggcagatctaatgc

SEQ ID NO: 1092056 - DNA, 15 bp, Homo sapiens
acggcagatctaatg

SEQ ID NO: 1092057 - DNA, 15 bp, Homo sapiens
tacggcagatctaat

SEQ ID NO: 1092058 - DNA, 15 bp, Homo sapiens
ttacggcagatctaa

SEQ ID NO: 1092059 - DNA, 15 bp, Homo sapiens
tttacggcagatcta

SEQ ID NO: 1092060 - DNA, 15 bp, Homo sapiens
atttacggcagatct

SEQ ID NO: 1092061 - DNA, 15 bp, Homo sapiens
gatttacggcagatc

SEQ ID NO: 1092062 - DNA, 15 bp, Homo sapiens
tgatttacggcagat

SEQ ID NO: 1092063 - DNA, 15 bp, Homo sapiens
ttgatttacggcaga

SEQ ID NO: 1092064 - DNA, 15 bp, Homo sapiens
cttgatttacggcag

SEQ ID NO: 1092065 - DNA, 15 bp, Homo sapiens
tcttgatttacggca

SEQ ID NO: 1092066 - DNA, 15 bp, Homo sapiens
ctcttgatttacggc

SEQ ID NO: 1092067 - DNA, 15 bp, Homo sapiens
gctcttgatttacgg

SEQ ID NO: 1092068 - DNA, 15 bp, Homo sapiens
agctcttgatttacg

SEQ ID NO: 1092069 - DNA, 15 bp, Homo sapiens
cagctcttgatttac

SEQ ID NO: 1092070 - DNA, 15 bp, Homo sapiens
ccagctcttgattta

SEQ ID NO: 1092071 - DNA, 15 bp, Homo sapiens
cccagctcttgattt

SEQ ID NO: 1092072 - DNA, 15 bp, Homo sapiens
ccccagctcttgatt

SEQ ID NO: 1092073 - DNA, 15 bp, Homo sapiens
tccccagctcttgat

SEQ ID NO: 1092074 - DNA, 15 bp, Homo sapiens
gtccccagctcttga

SEQ ID NO: 1092075 - DNA, 15 bp, Homo sapiens
tgtccccagctcttg

SEQ ID NO: 1092076 - DNA, 15 bp, Homo sapiens
ctgtccccagctctt

SEQ ID NO: 1092077 - DNA, 15 bp, Homo sapiens
gctgtccccagctct

SEQ ID NO: 1092078 - DNA, 15 bp, Homo sapiens
ggctgtccccagctc

SEQ ID NO: 1092079 - DNA, 15 bp, Homo sapiens
gggctgtccccagct

SEQ ID NO: 1092080 - DNA, 15 bp, Homo sapiens
tgggctgtccccagc

SEQ ID NO: 1092081 - DNA, 15 bp, Homo sapiens
atgggctgtccccag

SEQ ID NO: 1092082 - DNA, 15 bp, Homo sapiens
catgggctgtcccca

SEQ ID NO: 1092083 - DNA, 15 bp, Homo sapiens
acatgggctgtcccc

SEQ ID NO: 1092084 - DNA, 15 bp, Homo sapiens
gacatgggctgtccc

SEQ ID NO: 1092085 - DNA, 15 bp, Homo sapiens
agacatgggctgtcc

SEQ ID NO: 1092086 - DNA, 15 bp, Homo sapiens
aagacatgggctgtc

SEQ ID NO: 1092087 - DNA, 15 bp, Homo sapiens
taagacatgggctgt

SEQ ID NO: 1092088 - DNA, 15 bp, Homo sapiens
ttaagacatgggctg

SEQ ID NO: 1092089 - DNA, 15 bp, Homo sapiens
tttaagacatgggct

SEQ ID NO: 1092090 - DNA, 15 bp, Homo sapiens
gtttaagacatgggc

SEQ ID NO: 1092091 - DNA, 15 bp, Homo sapiens
agtttaagacatggg

SEQ ID NO: 1092092 - DNA, 15 bp, Homo sapiens
gagtttaagacatgg

SEQ ID NO: 1092093 - DNA, 15 bp, Homo sapiens
agagtttaagacatg

SEQ ID NO: 1092094 - DNA, 15 bp, Homo sapiens
cagagtttaagacat

SEQ ID NO: 1092095 - DNA, 15 bp, Homo sapiens
tcagagtttaagaca

SEQ ID NO: 1092096 - DNA, 15 bp, Homo sapiens
gtcagagtttaagac

SEQ ID NO: 1092097 - DNA, 15 bp, Homo sapiens
ggtcagagtttaaga

SEQ ID NO: 1092098 - DNA, 15 bp, Homo sapiens
gggtcagagtttaag

SEQ ID NO: 1092099 - DNA, 15 bp, Homo sapiens
tgggtcagagtttaa

SEQ ID NO: 1092100 - DNA, 15 bp, Homo sapiens
ttgggtcagagttta

SEQ ID NO: 1092101 - DNA, 15 bp, Homo sapiens
cttgggtcagagttt

SEQ ID NO: 1092102 - DNA, 15 bp, Homo sapiens
ccttgggtcagagtt

SEQ ID NO: 1092103 - DNA, 15 bp, Homo sapiens
cccttgggtcagagt

SEQ ID NO: 1092104 - DNA, 15 bp, Homo sapiens
gcccttgggtcagag

SEQ ID NO: 1092105 - DNA, 15 bp, Homo sapiens
agcccttgggtcaga

SEQ ID NO: 1092106 - DNA, 15 bp, Homo sapiens
tagcccttgggtcag

SEQ ID NO: 1092107 - DNA, 15 bp, Homo sapiens
ttagcccttgggtca

SEQ ID NO: 1092108 - DNA, 15 bp, Homo sapiens
tttagcccttgggtc

SEQ ID NO: 1092109 - DNA, 15 bp, Homo sapiens
ttttagcccttgggt

SEQ ID NO: 1092110 - DNA, 15 bp, Homo sapiens
attttagcccttggg

SEQ ID NO: 1092111 - DNA, 15 bp, Homo sapiens
tattttagcccttgg

SEQ ID NO: 1092112 - DNA, 15 bp, Homo sapiens
atattttagcccttg

SEQ ID NO: 1092113 - DNA, 15 bp, Homo sapiens
gatattttagccctt

SEQ ID NO: 1092114 - DNA, 15 bp, Homo sapiens
ggatattttagccct

SEQ ID NO: 1092115 - DNA, 15 bp, Homo sapiens
aggatattttagccc

SEQ ID NO: 1092116 - DNA, 15 bp, Homo sapiens
aaggatattttagcc

SEQ ID NO: 1092117 - DNA, 15 bp, Homo sapiens
aaaggatattttagc

SEQ ID NO: 1092118 - DNA, 15 bp, Homo sapiens
caaaggatattttag

SEQ ID NO: 1092119 - DNA, 15 bp, Homo sapiens
ccaaaggatatttta

SEQ ID NO: 1092120 - DNA, 15 bp, Homo sapiens
accaaaggatatttt

SEQ ID NO: 1092121 - DNA, 15 bp, Homo sapiens
taccaaaggatattt

SEQ ID NO: 1092122 - DNA, 15 bp, Homo sapiens
ctaccaaaggatatt

SEQ ID NO: 1092123 - DNA, 15 bp, Homo sapiens
gctaccaaaggatat

SEQ ID NO: 1092124 - DNA, 15 bp, Homo sapiens
tgctaccaaaggata

SEQ ID NO: 1092125 - DNA, 15 bp, Homo sapiens
ttgctaccaaaggat

SEQ ID NO: 1092126 - DNA, 15 bp, Homo sapiens
gttgctaccaaagga

SEQ ID NO: 1092127 - DNA, 15 bp, Homo sapiens
tgttgctaccaaagg

SEQ ID NO: 1092128 - DNA, 15 bp, Homo sapiens
ttgttgctaccaaag

SEQ ID NO: 1092129 - DNA, 15 bp, Homo sapiens
gttgttgctaccaaa

SEQ ID NO: 1092130 - DNA, 15 bp, Homo sapiens
tgttgttgctaccaa

SEQ ID NO: 1092131 - DNA, 15 bp, Homo sapiens
ctgttgttgctacca

SEQ ID NO: 1092132 - DNA, 15 bp, Homo sapiens
gctgttgttgctacc

SEQ ID NO: 1092133 - DNA, 15 bp, Homo sapiens
agctgttgttgctac

SEQ ID NO: 1092134 - DNA, 15 bp, Homo sapiens
tagctgttgttgcta

SEQ ID NO: 1092135 - DNA, 15 bp, Homo sapiens
gtagctgttgttgct

SEQ ID NO: 1092136 - DNA, 15 bp, Homo sapiens
tgtagctgttgttgc

SEQ ID NO: 1092137 - DNA, 15 bp, Homo sapiens
ttgtagctgttgttg

SEQ ID NO: 1092138 - DNA, 15 bp, Homo sapiens
tttgtagctgttgtt

SEQ ID NO: 1092139 - DNA, 15 bp, Homo sapiens
gtttgtagctgttgt

SEQ ID NO: 1092140 - DNA, 15 bp, Homo sapiens
agtttgtagctgttg

SEQ ID NO: 1092141 - DNA, 15 bp, Homo sapiens
tagtttgtagctgtt

SEQ ID NO: 1092142 - DNA, 15 bp, Homo sapiens
atagtttgtagctgt

SEQ ID NO: 1092143 - DNA, 15 bp, Homo sapiens
aatagtttgtagctg

SEQ ID NO: 1092144 - DNA, 15 bp, Homo sapiens
caatagtttgtagct

SEQ ID NO: 1092145 - DNA, 15 bp, Homo sapiens
tcaatagtttgtagc

SEQ ID NO: 1092146 - DNA, 15 bp, Homo sapiens
ttcaatagtttgtag

SEQ ID NO: 1092147 - DNA, 15 bp, Homo sapiens
gttcaatagtttgta

SEQ ID NO: 1092148 - DNA, 15 bp, Homo sapiens
tgttcaatagtttgt

SEQ ID NO: 1092149 - DNA, 15 bp, Homo sapiens
ttgttcaatagtttg

SEQ ID NO: 1092150 - DNA, 15 bp, Homo sapiens
gttgttcaatagttt

SEQ ID NO: 1092151 - DNA, 15 bp, Homo sapiens
agttgttcaatagtt

SEQ ID NO: 1092152 - DNA, 15 bp, Homo sapiens
aagttgttcaatagt

SEQ ID NO: 1092153 - DNA, 15 bp, Homo sapiens
caagttgttcaatag

SEQ ID NO: 1092154 - DNA, 15 bp, Homo sapiens
acaagttgttcaata

SEQ ID NO: 1092155 - DNA, 15 bp, Homo sapiens
tacaagttgttcaat

SEQ ID NO: 1092156 - DNA, 15 bp, Homo sapiens
atacaagttgttcaa

SEQ ID NO: 1092157 - DNA, 15 bp, Homo sapiens
catacaagttgttca

SEQ ID NO: 1092158 - DNA, 15 bp, Homo sapiens
acatacaagttgttc

SEQ ID NO: 1092159 - DNA, 15 bp, Homo sapiens
cacatacaagttgtt

SEQ ID NO: 1092160 - DNA, 15 bp, Homo sapiens
gcacatacaagttgt

SEQ ID NO: 1092161 - DNA, 15 bp, Homo sapiens
ggcacatacaagttg

SEQ ID NO: 1092162 - DNA, 15 bp, Homo sapiens
tggcacatacaagtt

SEQ ID NO: 1092163 - DNA, 15 bp, Homo sapiens
ttggcacatacaagt

SEQ ID NO: 1092164 - DNA, 15 bp, Homo sapiens
cttggcacatacaag

SEQ ID NO: 1092165 - DNA, 15 bp, Homo sapiens
tcttggcacatacaa

SEQ ID NO: 1092166 - DNA, 15 bp, Homo sapiens
ctcttggcacataca

SEQ ID NO: 1092167 - DNA, 15 bp, Homo sapiens
gctcttggcacatac

SEQ ID NO: 1092168 - DNA, 15 bp, Homo sapiens
ggctcttggcacata

SEQ ID NO: 1092169 - DNA, 15 bp, Homo sapiens
aggctcttggcacat

SEQ ID NO: 1092170 - DNA, 15 bp, Homo sapiens
aaggctcttggcaca

SEQ ID NO: 1092171 - DNA, 15 bp, Homo sapiens
taaggctcttggcac

SEQ ID NO: 1092172 - DNA, 15 bp, Homo sapiens
gtaaggctcttggca

SEQ ID NO: 1092173 - DNA, 15 bp, Homo sapiens
ggtaaggctcttggc

SEQ ID NO: 1092174 - DNA, 15 bp, Homo sapiens
aggtaaggctcttgg

SEQ ID NO: 1092175 - DNA, 15 bp, Homo sapiens
caggtaaggctcttg

SEQ ID NO: 1092176 - DNA, 15 bp, Homo sapiens
gcaggtaaggctctt

SEQ ID NO: 1092177 - DNA, 15 bp, Homo sapiens
tgcaggtaaggctct

SEQ ID NO: 1092178 - DNA, 15 bp, Homo sapiens
atgcaggtaaggctc

SEQ ID NO: 1092179 - DNA, 15 bp, Homo sapiens
aatgcaggtaaggct

SEQ ID NO: 1092180 - DNA, 15 bp, Homo sapiens
taatgcaggtaaggc

SEQ ID NO: 1092181 - DNA, 15 bp, Homo sapiens
ataatgcaggtaagg

SEQ ID NO: 1092182 - DNA, 15 bp, Homo sapiens
gataatgcaggtaag

SEQ ID NO: 1092183 - DNA, 15 bp, Homo sapiens
ggataatgcaggtaa

SEQ ID NO: 1092184 - DNA, 15 bp, Homo sapiens
gggataatgcaggta

SEQ ID NO: 1092185 - DNA, 15 bp, Homo sapiens
tgggataatgcaggt

SEQ ID NO: 1092186 - DNA, 15 bp, Homo sapiens
atgggataatgcagg

SEQ ID NO: 1092187 - DNA, 15 bp, Homo sapiens
aatgggataatgcag

SEQ ID NO: 1092188 - DNA, 15 bp, Homo sapiens
caatgggataatgca

SEQ ID NO: 1092189 - DNA, 15 bp, Homo sapiens
tcaatgggataatgc

SEQ ID NO: 1092190 - DNA, 15 bp, Homo sapiens
ttcaatgggataatg

SEQ ID NO: 1092191 - DNA, 15 bp, Homo sapiens
attcaatgggataat

SEQ ID NO: 1092192 - DNA, 15 bp, Homo sapiens
gattcaatgggataa

SEQ ID NO: 1092193 - DNA, 15 bp, Homo sapiens
ggattcaatgggata

SEQ ID NO: 1092194 - DNA, 15 bp, Homo sapiens
aggattcaatgggat

SEQ ID NO: 1092195 - DNA, 15 bp, Homo sapiens
gaggattcaatggga

SEQ ID NO: 1092196 - DNA, 15 bp, Homo sapiens
agaggattcaatggg

SEQ ID NO: 1092197 - DNA, 15 bp, Homo sapiens
gagaggattcaatgg

SEQ ID NO: 1092198 - DNA, 15 bp, Homo sapiens
tgagaggattcaatg

SEQ ID NO: 1092199 - DNA, 15 bp, Homo sapiens
ttgagaggattcaat

SEQ ID NO: 1092200 - DNA, 15 bp, Homo sapiens
gttgagaggattcaa

SEQ ID NO: 1092201 - DNA, 15 bp, Homo sapiens
tgttgagaggattca

SEQ ID NO: 1092202 - DNA, 15 bp, Homo sapiens
ctgttgagaggattc

SEQ ID NO: 1092203 - DNA, 15 bp, Homo sapiens
gctgttgagaggatt

SEQ ID NO: 1092204 - DNA, 15 bp, Homo sapiens
ggctgttgagaggat

SEQ ID NO: 1092205 - DNA, 15 bp, Homo sapiens
gggctgttgagagga

SEQ ID NO: 1092206 - DNA, 15 bp, Homo sapiens
agggctgttgagagg

SEQ ID NO: 1092207 - DNA, 15 bp, Homo sapiens
cagggctgttgagag

SEQ ID NO: 1092208 - DNA, 15 bp, Homo sapiens
acagggctgttgaga

SEQ ID NO: 1092209 - DNA, 15 bp, Homo sapiens
cacagggctgttgag

SEQ ID NO: 1092210 - DNA, 15 bp, Homo sapiens
tcacagggctgttga

SEQ ID NO: 1092211 - DNA, 15 bp, Homo sapiens
ctcacagggctgttg

SEQ ID NO: 1092212 - DNA, 15 bp, Homo sapiens
cctcacagggctgtt

SEQ ID NO: 1092213 - DNA, 15 bp, Homo sapiens
acctcacagggctgt

SEQ ID NO: 1092214 - DNA, 15 bp, Homo sapiens
tacctcacagggctg

SEQ ID NO: 1092215 - DNA, 15 bp, Homo sapiens
ctacctcacagggct

SEQ ID NO: 1092216 - DNA, 15 bp, Homo sapiens
actacctcacagggc

SEQ ID NO: 1092217 - DNA, 15 bp, Homo sapiens
tactacctcacaggg

SEQ ID NO: 1092218 - DNA, 15 bp, Homo sapiens
ctactacctcacagg

SEQ ID NO: 1092219 - DNA, 15 bp, Homo sapiens
tctactacctcacag

SEQ ID NO: 1092220 - DNA, 15 bp, Homo sapiens
ttctactacctcaca

SEQ ID NO: 1092221 - DNA, 15 bp, Homo sapiens
attctactacctcac

SEQ ID NO: 1092222 - DNA, 15 bp, Homo sapiens
aattctactacctca

SEQ ID NO: 1092223 - DNA, 15 bp, Homo sapiens
caattctactacctc

SEQ ID NO: 1092224 - DNA, 15 bp, Homo sapiens
acaattctactacct

SEQ ID NO: 1092225 - DNA, 15 bp, Homo sapiens
aacaattctactacc

SEQ ID NO: 1092226 - DNA, 15 bp, Homo sapiens
caacaattctactac

SEQ ID NO: 1092227 - DNA, 15 bp, Homo sapiens
gcaacaattctacta

SEQ ID NO: 1092228 - DNA, 15 bp, Homo sapiens
ggcaacaattctact

SEQ ID NO: 1092229 - DNA, 15 bp, Homo sapiens
aggcaacaattctac

SEQ ID NO: 1092230 - DNA, 15 bp, Homo sapiens
caggcaacaattcta

SEQ ID NO: 1092231 - DNA, 15 bp, Homo sapiens
gcaggcaacaattct

SEQ ID NO: 1092232 - DNA, 15 bp, Homo sapiens
ggcaggcaacaattc

SEQ ID NO: 1092233 - DNA, 15 bp, Homo sapiens
gggcaggcaacaatt

SEQ ID NO: 1092234 - DNA, 15 bp, Homo sapiens
ggggcaggcaacaat

SEQ ID NO: 1092235 - DNA, 15 bp, Homo sapiens
aggggcaggcaacaa

SEQ ID NO: 1092236 - DNA, 15 bp, Homo sapiens
aaggggcaggcaaca

SEQ ID NO: 1092237 - DNA, 15 bp, Homo sapiens
taaggggcaggcaac

SEQ ID NO: 1092238 - DNA, 15 bp, Homo sapiens
gtaaggggcaggcaa

SEQ ID NO: 1092239 - DNA, 15 bp, Homo sapiens
agtaaggggcaggca

SEQ ID NO: 1092240 - DNA, 15 bp, Homo sapiens
cagtaaggggcaggc

SEQ ID NO: 1092241 - DNA, 15 bp, Homo sapiens
tcagtaaggggcagg

SEQ ID NO: 1092242 - DNA, 15 bp, Homo sapiens
ctcagtaaggggcag

SEQ ID NO: 1092243 - DNA, 15 bp, Homo sapiens
cctcagtaaggggca

SEQ ID NO: 1092244 - DNA, 15 bp, Homo sapiens
gcctcagtaaggggc

SEQ ID NO: 1092245 - DNA, 15 bp, Homo sapiens
ggcctcagtaagggg

SEQ ID NO: 1092246 - DNA, 15 bp, Homo sapiens
aggcctcagtaaggg

SEQ ID NO: 1092247 - DNA, 15 bp, Homo sapiens
taggcctcagtaagg

SEQ ID NO: 1092248 - DNA, 15 bp, Homo sapiens
ctaggcctcagtaag

SEQ ID NO: 1092249 - DNA, 15 bp, Homo sapiens
tctaggcctcagtaa

SEQ ID NO: 1092250 - DNA, 15 bp, Homo sapiens
ttctaggcctcagta

SEQ ID NO: 1092251 - DNA, 15 bp, Homo sapiens
tttctaggcctcagt

SEQ ID NO: 1092252 - DNA, 15 bp, Homo sapiens
gtttctaggcctcag

SEQ ID NO: 1092253 - DNA, 15 bp, Homo sapiens
tgtttctaggcctca

SEQ ID NO: 1092254 - DNA, 15 bp, Homo sapiens
atgtttctaggcctc

SEQ ID NO: 1092255 - DNA, 15 bp, Homo sapiens
aatgtttctaggcct

SEQ ID NO: 1092256 - DNA, 15 bp, Homo sapiens
taatgtttctaggcc

SEQ ID NO: 1092257 - DNA, 15 bp, Homo sapiens
ttaatgtttctaggc

SEQ ID NO: 1092258 - DNA, 15 bp, Homo sapiens
cttaatgtttctagg

SEQ ID NO: 1092259 - DNA, 15 bp, Homo sapiens
ccttaatgtttctag

SEQ ID NO: 1092260 - DNA, 15 bp, Homo sapiens
tccttaatgtttcta

SEQ ID NO: 1092261 - DNA, 15 bp, Homo sapiens
ttccttaatgtttct

SEQ ID NO: 1092262 - DNA, 15 bp, Homo sapiens
attccttaatgtttc

SEQ ID NO: 1092263 - DNA, 15 bp, Homo sapiens
aattccttaatgttt

SEQ ID NO: 1092264 - DNA, 15 bp, Homo sapiens
aaattccttaatgtt

SEQ ID NO: 1092265 - DNA, 15 bp, Homo sapiens
caaattccttaatgt

SEQ ID NO: 1092266 - DNA, 15 bp, Homo sapiens
gcaaattccttaatg

SEQ ID NO: 1092267 - DNA, 15 bp, Homo sapiens
ggcaaattccttaat

SEQ ID NO: 1092268 - DNA, 15 bp, Homo sapiens
gggcaaattccttaa

SEQ ID NO: 1092269 - DNA, 15 bp, Homo sapiens
cgggcaaattcctta

SEQ ID NO: 1092270 - DNA, 15 bp, Homo sapiens
tcgggcaaattcctt

SEQ ID NO: 1092271 - DNA, 15 bp, Homo sapiens
ctcgggcaaattcct

SEQ ID NO: 1092272 - DNA, 15 bp, Homo sapiens
cctcgggcaaattcc

SEQ ID NO: 1092273 - DNA, 15 bp, Homo sapiens
gcctcgggcaaattc

SEQ ID NO: 1092274 - DNA, 15 bp, Homo sapiens
ggcctcgggcaaatt

SEQ ID NO: 1092275 - DNA, 15 bp, Homo sapiens
gggcctcgggcaaat

SEQ ID NO: 1092276 - DNA, 15 bp, Homo sapiens
agggcctcgggcaaa

SEQ ID NO: 1092277 - DNA, 15 bp, Homo sapiens
tagggcctcgggcaa

SEQ ID NO: 1092278 - DNA, 15 bp, Homo sapiens
ctagggcctcgggca

SEQ ID NO: 1092279 - DNA, 15 bp, Homo sapiens
tctagggcctcgggc

SEQ ID NO: 1092280 - DNA, 15 bp, Homo sapiens
ctctagggcctcggg

SEQ ID NO: 1092281 - DNA, 15 bp, Homo sapiens
gctctagggcctcgg

SEQ ID NO: 1092282 - DNA, 15 bp, Homo sapiens
ggctctagggcctcg

SEQ ID NO: 1092283 - DNA, 15 bp, Homo sapiens
tggctctagggcctc

SEQ ID NO: 1092284 - DNA, 15 bp, Homo sapiens
ctggctctagggcct

SEQ ID NO: 1092285 - DNA, 15 bp, Homo sapiens
actggctctagggcc

SEQ ID NO: 1092286 - DNA, 15 bp, Homo sapiens
cactggctctagggc

SEQ ID NO: 1092287 - DNA, 15 bp, Homo sapiens
tcactggctctaggg

SEQ ID NO: 1092288 - DNA, 15 bp, Homo sapiens
ctcactggctctagg

SEQ ID NO: 1092289 - DNA, 15 bp, Homo sapiens
actcactggctctag

SEQ ID NO: 1092290 - DNA, 15 bp, Homo sapiens
cactcactggctcta

SEQ ID NO: 1092291 - DNA, 15 bp, Homo sapiens
ccactcactggctct

SEQ ID NO: 1092292 - DNA, 15 bp, Homo sapiens
gccactcactggctc

SEQ ID NO: 1092293 - DNA, 15 bp, Homo sapiens
tgccactcactggct

SEQ ID NO: 1092294 - DNA, 15 bp, Homo sapiens
ttgccactcactggc

SEQ ID NO: 1092295 - DNA, 15 bp, Homo sapiens
tttgccactcactgg

SEQ ID NO: 1092296 - DNA, 15 bp, Homo sapiens
ctttgccactcactg

SEQ ID NO: 1092297 - DNA, 15 bp, Homo sapiens
gctttgccactcact

SEQ ID NO: 1092298 - DNA, 15 bp, Homo sapiens
ggctttgccactcac

SEQ ID NO: 1092299 - DNA, 15 bp, Homo sapiens
tggctttgccactca

SEQ ID NO: 1092300 - DNA, 15 bp, Homo sapiens
ctggctttgccactc

SEQ ID NO: 1092301 - DNA, 15 bp, Homo sapiens
actggctttgccact

SEQ ID NO: 1092302 - DNA, 15 bp, Homo sapiens
gactggctttgccac

SEQ ID NO: 1092303 - DNA, 15 bp, Homo sapiens
agactggctttgcca

SEQ ID NO: 1092304 - DNA, 15 bp, Homo sapiens
gagactggctttgcc

SEQ ID NO: 1092305 - DNA, 15 bp, Homo sapiens
ggagactggctttgc

SEQ ID NO: 1092306 - DNA, 15 bp, Homo sapiens
tggagactggctttg

SEQ ID NO: 1092307 - DNA, 15 bp, Homo sapiens
ctggagactggcttt

SEQ ID NO: 1092308 - DNA, 15 bp, Homo sapiens
tctggagactggctt

SEQ ID NO: 1092309 - DNA, 15 bp, Homo sapiens
gtctggagactggct

SEQ ID NO: 1092310 - DNA, 15 bp, Homo sapiens
agtctggagactggc

SEQ ID NO: 1092311 - DNA, 15 bp, Homo sapiens
gagtctggagactgg

SEQ ID NO: 1092312 - DNA, 15 bp, Homo sapiens
tgagtctggagactg

SEQ ID NO: 1092313 - DNA, 15 bp, Homo sapiens
ctgagtctggagact

SEQ ID NO: 1092314 - DNA, 15 bp, Homo sapiens
cctgagtctggagac

SEQ ID NO: 1092315 - DNA, 15 bp, Homo sapiens
gcctgagtctggaga

SEQ ID NO: 1092316 - DNA, 15 bp, Homo sapiens
agcctgagtctggag

SEQ ID NO: 1092317 - DNA, 15 bp, Homo sapiens
cagcctgagtctgga

SEQ ID NO: 1092318 - DNA, 15 bp, Homo sapiens
ccagcctgagtctgg

SEQ ID NO: 1092319 - DNA, 15 bp, Homo sapiens
tccagcctgagtctg

SEQ ID NO: 1092320 - DNA, 15 bp, Homo sapiens
ctccagcctgagtct

SEQ ID NO: 1092321 - DNA, 15 bp, Homo sapiens
tctccagcctgagtc

SEQ ID NO: 1092322 - DNA, 15 bp, Homo sapiens
atctccagcctgagt

SEQ ID NO: 1092323 - DNA, 15 bp, Homo sapiens
gatctccagcctgag

SEQ ID NO: 1092324 - DNA, 15 bp, Homo sapiens
ggatctccagcctga

SEQ ID NO: 1092325 - DNA, 15 bp, Homo sapiens
aggatctccagcctg

SEQ ID NO: 1092326 - DNA, 15 bp, Homo sapiens
taggatctccagcct

SEQ ID NO: 1092327 - DNA, 15 bp, Homo sapiens
gtaggatctccagcc

SEQ ID NO: 1092328 - DNA, 15 bp, Homo sapiens
tgtaggatctccagc

SEQ ID NO: 1092329 - DNA, 15 bp, Homo sapiens
ctgtaggatctccag

SEQ ID NO: 1092330 - DNA, 15 bp, Homo sapiens
actgtaggatctcca

SEQ ID NO: 1092331 - DNA, 15 bp, Homo sapiens
aactgtaggatctcc

SEQ ID NO: 1092332 - DNA, 15 bp, Homo sapiens
gaactgtaggatctc

SEQ ID NO: 1092333 - DNA, 15 bp, Homo sapiens
agaactgtaggatct

SEQ ID NO: 1092334 - DNA, 15 bp, Homo sapiens
cagaactgtaggatc

SEQ ID NO: 1092335 - DNA, 15 bp, Homo sapiens
acagaactgtaggat

SEQ ID NO: 1092336 - DNA, 15 bp, Homo sapiens
cacagaactgtagga

SEQ ID NO: 1092337 - DNA, 15 bp, Homo sapiens
acacagaactgtagg

SEQ ID NO: 1092338 - DNA, 15 bp, Homo sapiens
aacacagaactgtag

SEQ ID NO: 1092339 - DNA, 15 bp, Homo sapiens
taacacagaactgta

SEQ ID NO: 1092340 - DNA, 15 bp, Homo sapiens
gtaacacagaactgt

SEQ ID NO: 1092341 - DNA, 15 bp, Homo sapiens
ggtaacacagaactg

SEQ ID NO: 1092342 - DNA, 15 bp, Homo sapiens
gggtaacacagaact

SEQ ID NO: 1092343 - DNA, 15 bp, Homo sapiens
ggggtaacacagaac

SEQ ID NO: 1092344 - DNA, 15 bp, Homo sapiens
tggggtaacacagaa

SEQ ID NO: 1092345 - DNA, 15 bp, Homo sapiens
ctggggtaacacaga

SEQ ID NO: 1092346 - DNA, 15 bp, Homo sapiens
actggggtaacacag

SEQ ID NO: 1092347 - DNA, 15 bp, Homo sapiens
cactggggtaacaca

SEQ ID NO: 1092348 - DNA, 15 bp, Homo sapiens
acactggggtaacac

SEQ ID NO: 1092349 - DNA, 15 bp, Homo sapiens
aacactggggtaaca

SEQ ID NO: 1092350 - DNA, 15 bp, Homo sapiens
taacactggggtaac

SEQ ID NO: 1092351 - DNA, 15 bp, Homo sapiens
ataacactggggtaa

SEQ ID NO: 1092352 - DNA, 15 bp, Homo sapiens
gataacactggggta

SEQ ID NO: 1092353 - DNA, 15 bp, Homo sapiens
ggataacactggggt

SEQ ID NO: 1092354 - DNA, 15 bp, Homo sapiens
aggataacactgggg

SEQ ID NO: 1092355 - DNA, 15 bp, Homo sapiens
caggataacactggg

SEQ ID NO: 1092356 - DNA, 15 bp, Homo sapiens
gcaggataacactgg

SEQ ID NO: 1092357 - DNA, 15 bp, Homo sapiens
ggcaggataacactg

SEQ ID NO: 1092358 - DNA, 15 bp, Homo sapiens
aggcaggataacact

SEQ ID NO: 1092359 - DNA, 15 bp, Homo sapiens
gaggcaggataacac

SEQ ID NO: 1092360 - DNA, 15 bp, Homo sapiens
agaggcaggataaca

SEQ ID NO: 1092361 - DNA, 15 bp, Homo sapiens
gagaggcaggataac

SEQ ID NO: 1092362 - DNA, 15 bp, Homo sapiens
tgagaggcaggataa

SEQ ID NO: 1092363 - DNA, 15 bp, Homo sapiens
ctgagaggcaggata

SEQ ID NO: 1092364 - DNA, 15 bp, Homo sapiens
gctgagaggcaggat

SEQ ID NO: 1092365 - DNA, 15 bp, Homo sapiens
tgctgagaggcagga

SEQ ID NO: 1092366 - DNA, 15 bp, Homo sapiens
gtgctgagaggcagg

SEQ ID NO: 1092367 - DNA, 15 bp, Homo sapiens
tgtgctgagaggcag

SEQ ID NO: 1092368 - DNA, 15 bp, Homo sapiens
ctgtgctgagaggca

SEQ ID NO: 1092369 - DNA, 15 bp, Homo sapiens
tctgtgctgagaggc

SEQ ID NO: 1092370 - DNA, 15 bp, Homo sapiens
ctctgtgctgagagg

SEQ ID NO: 1092371 - DNA, 15 bp, Homo sapiens
actctgtgctgagag

SEQ ID NO: 1092372 - DNA, 15 bp, Homo sapiens
gactctgtgctgaga

SEQ ID NO: 1092373 - DNA, 15 bp, Homo sapiens
agactctgtgctgag

SEQ ID NO: 1092374 - DNA, 15 bp, Homo sapiens
aagactctgtgctga

SEQ ID NO: 1092375 - DNA, 15 bp, Homo sapiens
caagactctgtgctg

SEQ ID NO: 1092376 - DNA, 15 bp, Homo sapiens
ccaagactctgtgct

SEQ ID NO: 1092377 - DNA, 15 bp, Homo sapiens
tccaagactctgtgc

SEQ ID NO: 1092378 - DNA, 15 bp, Homo sapiens
atccaagactctgtg

SEQ ID NO: 1092379 - DNA, 15 bp, Homo sapiens
catccaagactctgt

SEQ ID NO: 1092380 - DNA, 15 bp, Homo sapiens
tcatccaagactctg

SEQ ID NO: 1092381 - DNA, 15 bp, Homo sapiens
atcatccaagactct

SEQ ID NO: 1092382 - DNA, 15 bp, Homo sapiens
aatcatccaagactc

SEQ ID NO: 1092383 - DNA, 15 bp, Homo sapiens
gaatcatccaagact

SEQ ID NO: 1092384 - DNA, 15 bp, Homo sapiens
agaatcatccaagac

SEQ ID NO: 1092385 - DNA, 15 bp, Homo sapiens
gagaatcatccaaga

SEQ ID NO: 1092386 - DNA, 15 bp, Homo sapiens
ggagaatcatccaag

SEQ ID NO: 1092387 - DNA, 15 bp, Homo sapiens
aggagaatcatccaa

SEQ ID NO: 1092388 - DNA, 15 bp, Homo sapiens
taggagaatcatcca

SEQ ID NO: 1092389 - DNA, 15 bp, Homo sapiens
ttaggagaatcatcc

SEQ ID NO: 1092390 - DNA, 15 bp, Homo sapiens
gttaggagaatcatc

SEQ ID NO: 1092391 - DNA, 15 bp, Homo sapiens
ggttaggagaatcat

SEQ ID NO: 1092392 - DNA, 15 bp, Homo sapiens
gggttaggagaatca

SEQ ID NO: 1092393 - DNA, 15 bp, Homo sapiens
ggggttaggagaatc

SEQ ID NO: 1092394 - DNA, 15 bp, Homo sapiens
aggggttaggagaat

SEQ ID NO: 1092395 - DNA, 15 bp, Homo sapiens
gaggggttaggagaa

SEQ ID NO: 1092396 - DNA, 15 bp, Homo sapiens
ggaggggttaggaga

SEQ ID NO: 1092397 - DNA, 15 bp, Homo sapiens
gggaggggttaggag

SEQ ID NO: 1092398 - DNA, 15 bp, Homo sapiens
agggaggggttagga

SEQ ID NO: 1092399 - DNA, 15 bp, Homo sapiens
tagggaggggttagg

SEQ ID NO: 1092400 - DNA, 15 bp, Homo sapiens
ctagggaggggttag

SEQ ID NO: 1092401 - DNA, 15 bp, Homo sapiens
cctagggaggggtta

SEQ ID NO: 1092402 - DNA, 15 bp, Homo sapiens
gcctagggaggggtt

SEQ ID NO: 1092403 - DNA, 15 bp, Homo sapiens
tgcctagggaggggt

SEQ ID NO: 1092404 - DNA, 15 bp, Homo sapiens
ttgcctagggagggg

SEQ ID NO: 1092405 - DNA, 15 bp, Homo sapiens
attgcctagggaggg

SEQ ID NO: 1092406 - DNA, 15 bp, Homo sapiens
cattgcctagggagg

SEQ ID NO: 1092407 - DNA, 15 bp, Homo sapiens
gcattgcctagggag

SEQ ID NO: 1092408 - DNA, 15 bp, Homo sapiens
tgcattgcctaggga

SEQ ID NO: 1092409 - DNA, 15 bp, Homo sapiens
gtgcattgcctaggg

SEQ ID NO: 1092410 - DNA, 15 bp, Homo sapiens
tgtgcattgcctagg

SEQ ID NO: 1092411 - DNA, 15 bp, Homo sapiens
ctgtgcattgcctag

SEQ ID NO: 1092412 - DNA, 15 bp, Homo sapiens
cctgtgcattgccta

SEQ ID NO: 1092413 - DNA, 15 bp, Homo sapiens
gccctgtgcattgcc

SEQ ID NO: 1092414 - DNA, 15 bp, Homo sapiens
agccctgtgcattgc

SEQ ID NO: 1092415 - DNA, 15 bp, Homo sapiens
cagccctgtgcattg

SEQ ID NO: 1092416 - DNA, 15 bp, Homo sapiens
gcagccctgtgcatt

SEQ ID NO: 1092417 - DNA, 15 bp, Homo sapiens
agcagccctgtgcat

SEQ ID NO: 1092418 - DNA, 15 bp, Homo sapiens
gagcagccctgtgca

SEQ ID NO: 1092419 - DNA, 15 bp, Homo sapiens
ggagcagccctgtgc

SEQ ID NO: 1092420 - DNA, 15 bp, Homo sapiens
gggagcagccctgtg

SEQ ID NO: 1092421 - DNA, 15 bp, Homo sapiens
agggagcagccctgt

SEQ ID NO: 1092422 - DNA, 15 bp, Homo sapiens
cagggagcagccctg

SEQ ID NO: 1092423 - DNA, 15 bp, Homo sapiens
gcagggagcagccct

SEQ ID NO: 1092424 - DNA, 15 bp, Homo sapiens
tgcagggagcagccc

SEQ ID NO: 1092425 - DNA, 15 bp, Homo sapiens
gtgcagggagcagcc

SEQ ID NO: 1092426 - DNA, 15 bp, Homo sapiens
ggtgcagggagcagc

SEQ ID NO: 1092427 - DNA, 15 bp, Homo sapiens
gggtgcagggagcag

SEQ ID NO: 1092428 - DNA, 15 bp, Homo sapiens
agggtgcagggagca

SEQ ID NO: 1092429 - DNA, 15 bp, Homo sapiens
aagggtgcagggagc

SEQ ID NO: 1092430 - DNA, 15 bp, Homo sapiens
taagggtgcagggag

SEQ ID NO: 1092431 - DNA, 15 bp, Homo sapiens
gtaagggtgcaggga

SEQ ID NO: 1092432 - DNA, 15 bp, Homo sapiens
agtaagggtgcaggg

SEQ ID NO: 1092433 - DNA, 15 bp, Homo sapiens
gagtaagggtgcagg

SEQ ID NO: 1092434 - DNA, 15 bp, Homo sapiens
tgagtaagggtgcag

SEQ ID NO: 1092435 - DNA, 15 bp, Homo sapiens
atgagtaagggtgca

SEQ ID NO: 1092436 - DNA, 15 bp, Homo sapiens
catgagtaagggtgc

SEQ ID NO: 1092437 - DNA, 15 bp, Homo sapiens
gcatgagtaagggtg

SEQ ID NO: 1092438 - DNA, 15 bp, Homo sapiens
agcatgagtaagggt

SEQ ID NO: 1092439 - DNA, 15 bp, Homo sapiens
gagcatgagtaaggg

SEQ ID NO: 1092440 - DNA, 15 bp, Homo sapiens
agagcatgagtaagg

SEQ ID NO: 1092441 - DNA, 15 bp, Homo sapiens
cagagcatgagtaag

SEQ ID NO: 1092442 - DNA, 15 bp, Homo sapiens
gcagagcatgagtaa

SEQ ID NO: 1092443 - DNA, 15 bp, Homo sapiens
agcagagcatgagta

SEQ ID NO: 1092444 - DNA, 15 bp, Homo sapiens
gagcagagcatgagt

SEQ ID NO: 1092445 - DNA, 15 bp, Homo sapiens
agagcagagcatgag

SEQ ID NO: 1092446 - DNA, 15 bp, Homo sapiens
aagagcagagcatga

SEQ ID NO: 1092447 - DNA, 15 bp, Homo sapiens
gaagagcagagcatg

SEQ ID NO: 1092448 - DNA, 15 bp, Homo sapiens
tgaagagcagagcat

SEQ ID NO: 1092449 - DNA, 15 bp, Homo sapiens
ttgaagagcagagca

SEQ ID NO: 1092450 - DNA, 15 bp, Homo sapiens
gttgaagagcagagc

SEQ ID NO: 1092451 - DNA, 15 bp, Homo sapiens
ggttgaagagcagag

SEQ ID NO: 1092452 - DNA, 15 bp, Homo sapiens
gggttgaagagcaga

SEQ ID NO: 1092453 - DNA, 15 bp, Homo sapiens
ggggttgaagagcag

SEQ ID NO: 1092454 - DNA, 15 bp, Homo sapiens
tggggttgaagagca

SEQ ID NO: 1092455 - DNA, 15 bp, Homo sapiens
ttggggttgaagagc

SEQ ID NO: 1092456 - DNA, 15 bp, Homo sapiens
gttggggttgaagag

SEQ ID NO: 1092457 - DNA, 15 bp, Homo sapiens
tgttggggttgaaga

SEQ ID NO: 1092458 - DNA, 15 bp, Homo sapiens
ctgttggggttgaag

SEQ ID NO: 1092459 - DNA, 15 bp, Homo sapiens
actgttggggttgaa

SEQ ID NO: 1092460 - DNA, 15 bp, Homo sapiens
cactgttggggttga

SEQ ID NO: 1092461 - DNA, 15 bp, Homo sapiens
gcactgttggggttg

SEQ ID NO: 1092462 - DNA, 15 bp, Homo sapiens
agcactgttggggtt

SEQ ID NO: 1092463 - DNA, 15 bp, Homo sapiens
cagcactgttggggt

SEQ ID NO: 1092464 - DNA, 15 bp, Homo sapiens
ccagcactgttgggg

SEQ ID NO: 1092465 - DNA, 15 bp, Homo sapiens
gccagcactgttggg

SEQ ID NO: 1092466 - DNA, 15 bp, Homo sapiens
ggccagcactgttgg

SEQ ID NO: 1092467 - DNA, 15 bp, Homo sapiens
aggccagcactgttg

SEQ ID NO: 1092468 - DNA, 15 bp, Homo sapiens
aaggccagcactgtt

SEQ ID NO: 1092469 - DNA, 15 bp, Homo sapiens
taaggccagcactgt

SEQ ID NO: 1092470 - DNA, 15 bp, Homo sapiens
ctaaggccagcactg

SEQ ID NO: 1092471 - DNA, 15 bp, Homo sapiens
cctaaggccagcact

SEQ ID NO: 1092472 - DNA, 15 bp, Homo sapiens
gcctaaggccagcac

SEQ ID NO: 1092473 - DNA, 15 bp, Homo sapiens
agcctaaggccagca

SEQ ID NO: 1092474 - DNA, 15 bp, Homo sapiens
aagcctaaggccagc

SEQ ID NO: 1092475 - DNA, 15 bp, Homo sapiens
aaagcctaaggccag

SEQ ID NO: 1092476 - DNA, 15 bp, Homo sapiens
taaagcctaaggcca

SEQ ID NO: 1092477 - DNA, 15 bp, Homo sapiens
ataaagcctaaggcc

SEQ ID NO: 1092478 - DNA, 15 bp, Homo sapiens
gataaagcctaaggc

SEQ ID NO: 1092479 - DNA, 15 bp, Homo sapiens
ggataaagcctaagg

SEQ ID NO: 1092480 - DNA, 15 bp, Homo sapiens
gggataaagcctaag

SEQ ID NO: 1092481 - DNA, 15 bp, Homo sapiens
agggataaagcctaa

SEQ ID NO: 1092482 - DNA, 15 bp, Homo sapiens
cagggataaagccta

SEQ ID NO: 1092483 - DNA, 15 bp, Homo sapiens
tcagggataaagcct

SEQ ID NO: 1092484 - DNA, 15 bp, Homo sapiens
gtcagggataaagcc

SEQ ID NO: 1092485 - DNA, 15 bp, Homo sapiens
tgtcagggataaagc

SEQ ID NO: 1092486 - DNA, 15 bp, Homo sapiens
gtgtcagggataaag

SEQ ID NO: 1092487 - DNA, 15 bp, Homo sapiens
ggtgtcagggataaa

SEQ ID NO: 1092488 - DNA, 15 bp, Homo sapiens
gggtgtcagggataa

SEQ ID NO: 1092489 - DNA, 15 bp, Homo sapiens
tgggtgtcagggata

SEQ ID NO: 1092490 - DNA, 15 bp, Homo sapiens
ctgggtgtcagggat

SEQ ID NO: 1092491 - DNA, 15 bp, Homo sapiens
gctgggtgtcaggga

SEQ ID NO: 1092492 - DNA, 15 bp, Homo sapiens
ggctgggtgtcaggg

SEQ ID NO: 1092493 - DNA, 15 bp, Homo sapiens
gggctgggtgtcagg

SEQ ID NO: 1092494 - DNA, 15 bp, Homo sapiens
ggggctgggtgtcag

SEQ ID NO: 1092495 - DNA, 15 bp, Homo sapiens
tggggctgggtgtca

SEQ ID NO: 1092496 - DNA, 15 bp, Homo sapiens
ctggggctgggtgtc

SEQ ID NO: 1092497 - DNA, 15 bp, Homo sapiens
cctggggctgggtgt

SEQ ID NO: 1092498 - DNA, 15 bp, Homo sapiens
gcctggggctgggtg

SEQ ID NO: 1092499 - DNA, 15 bp, Homo sapiens
agcctggggctgggt

SEQ ID NO: 1092500 - DNA, 15 bp, Homo sapiens
gagcctggggctggg

SEQ ID NO: 1092501 - DNA, 15 bp, Homo sapiens
ggagcctggggctgg

SEQ ID NO: 1092502 - DNA, 15 bp, Homo sapiens
tggagcctggggctg

SEQ ID NO: 1092503 - DNA, 15 bp, Homo sapiens
atggagcctggggct

SEQ ID NO: 1092504 - DNA, 15 bp, Homo sapiens
aatggagcctggggc

SEQ ID NO: 1092505 - DNA, 15 bp, Homo sapiens
gaatggagcctgggg

SEQ ID NO: 1092506 - DNA, 15 bp, Homo sapiens
ggaatggagcctggg

SEQ ID NO: 1092507 - DNA, 15 bp, Homo sapiens
tggaatggagcctgg

SEQ ID NO: 1092508 - DNA, 15 bp, Homo sapiens
atggaatggagcctg

SEQ ID NO: 1092509 - DNA, 15 bp, Homo sapiens
gatggaatggagcct

SEQ ID NO: 1092510 - DNA, 15 bp, Homo sapiens
agatggaatggagcc

SEQ ID NO: 1092511 - DNA, 15 bp, Homo sapiens
cagatggaatggagc

SEQ ID NO: 1092512 - DNA, 15 bp, Homo sapiens
acagatggaatggag

SEQ ID NO: 1092513 - DNA, 15 bp, Homo sapiens
aacagatggaatgga

SEQ ID NO: 1092514 - DNA, 15 bp, Homo sapiens
caacagatggaatgg

SEQ ID NO: 1092515 - DNA, 15 bp, Homo sapiens
tcaacagatggaatg

SEQ ID NO: 1092516 - DNA, 15 bp, Homo sapiens
gtcaacagatggaat

SEQ ID NO: 1092517 - DNA, 15 bp, Homo sapiens
tgtcaacagatggaa

SEQ ID NO: 1092518 - DNA, 15 bp, Homo sapiens
ctgtcaacagatgga

SEQ ID NO: 1092519 - DNA, 15 bp, Homo sapiens
tctgtcaacagatgg

SEQ ID NO: 1092520 - DNA, 15 bp, Homo sapiens
ctctgtcaacagatg

SEQ ID NO: 1092521 - DNA, 15 bp, Homo sapiens
cctctgtcaacagat

SEQ ID NO: 1092522 - DNA, 15 bp, Homo sapiens
gcctctgtcaacaga

SEQ ID NO: 1092523 - DNA, 15 bp, Homo sapiens
tgcctctgtcaacag

SEQ ID NO: 1092524 - DNA, 15 bp, Homo sapiens
ttgcctctgtcaaca

SEQ ID NO: 1092525 - DNA, 15 bp, Homo sapiens
tttgcctctgtcaac

SEQ ID NO: 1092526 - DNA, 15 bp, Homo sapiens
gtttgcctctgtcaa

SEQ ID NO: 1092527 - DNA, 15 bp, Homo sapiens
tgtttgcctctgtca

SEQ ID NO: 1092528 - DNA, 15 bp, Homo sapiens
gtgtttgcctctgtc

SEQ ID NO: 1092529 - DNA, 15 bp, Homo sapiens
agtgtttgcctctgt

SEQ ID NO: 1092530 - DNA, 15 bp, Homo sapiens
cagtgtttgcctctg

SEQ ID NO: 1092531 - DNA, 15 bp, Homo sapiens
ccagtgtttgcctct

SEQ ID NO: 1092532 - DNA, 15 bp, Homo sapiens
cccagtgtttgcctc

SEQ ID NO: 1092533 - DNA, 15 bp, Homo sapiens
ccccagtgtttgcct

SEQ ID NO: 1092534 - DNA, 15 bp, Homo sapiens
gccccagtgtttgcc

SEQ ID NO: 1092535 - DNA, 15 bp, Homo sapiens
tgccccagtgtttgc

SEQ ID NO: 1092536 - DNA, 15 bp, Homo sapiens
ttgccccagtgtttg

SEQ ID NO: 1092537 - DNA, 15 bp, Homo sapiens
tttgccccagtgttt

SEQ ID NO: 1092538 - DNA, 15 bp, Homo sapiens
ttttgccccagtgtt

SEQ ID NO: 1092539 - DNA, 15 bp, Homo sapiens
gttttgccccagtgt

SEQ ID NO: 1092540 - DNA, 15 bp, Homo sapiens
agttttgccccagtg

SEQ ID NO: 1092541 - DNA, 15 bp, Homo sapiens
cagttttgccccagt

SEQ ID NO: 1092542 - DNA, 15 bp, Homo sapiens
tcagttttgccccag

SEQ ID NO: 1092543 - DNA, 15 bp, Homo sapiens
gtcagttttgcccca

SEQ ID NO: 1092544 - DNA, 15 bp, Homo sapiens
ggtcagttttgcccc

SEQ ID NO: 1092545 - DNA, 15 bp, Homo sapiens
aggtcagttttgccc

SEQ ID NO: 1092546 - DNA, 15 bp, Homo sapiens
gaggtcagttttgcc

SEQ ID NO: 1092547 - DNA, 15 bp, Homo sapiens
agaggtcagttttgc

SEQ ID NO: 1092548 - DNA, 15 bp, Homo sapiens
cagaggtcagttttg

SEQ ID NO: 1092549 - DNA, 15 bp, Homo sapiens
acagaggtcagtttt

SEQ ID NO: 1092550 - DNA, 15 bp, Homo sapiens
cacagaggtcagttt

SEQ ID NO: 1092551 - DNA, 15 bp, Homo sapiens
ccacagaggtcagtt

SEQ ID NO: 1092552 - DNA, 15 bp, Homo sapiens
tccacagaggtcagt

SEQ ID NO: 1092553 - DNA, 15 bp, Homo sapiens
atccacagaggtcag

SEQ ID NO: 1092554 - DNA, 15 bp, Homo sapiens
tatccacagaggtca

SEQ ID NO: 1092555 - DNA, 15 bp, Homo sapiens
gtatccacagaggtc

SEQ ID NO: 1092556 - DNA, 15 bp, Homo sapiens
ggtatccacagaggt

SEQ ID NO: 1092557 - DNA, 15 bp, Homo sapiens
tggtatccacagagg

SEQ ID NO: 1092558 - DNA, 15 bp, Homo sapiens
gtggtatccacagag

SEQ ID NO: 1092559 - DNA, 15 bp, Homo sapiens
agtggtatccacaga

SEQ ID NO: 1092560 - DNA, 15 bp, Homo sapiens
cagtggtatccacag

SEQ ID NO: 1092561 - DNA, 15 bp, Homo sapiens
acagtggtatccaca

SEQ ID NO: 1092562 - DNA, 15 bp, Homo sapiens
cacagtggtatccac

SEQ ID NO: 1092563 - DNA, 15 bp, Homo sapiens
acacagtggtatcca

SEQ ID NO: 1092564 - DNA, 15 bp, Homo sapiens
gacacagtggtatcc

SEQ ID NO: 1092565 - DNA, 15 bp, Homo sapiens
ggacacagtggtatc

SEQ ID NO: 1092566 - DNA, 15 bp, Homo sapiens
tggacacagtggtat

SEQ ID NO: 1092567 - DNA, 15 bp, Homo sapiens
gtggacacagtggta

SEQ ID NO: 1092568 - DNA, 15 bp, Homo sapiens
ggtggacacagtggt

SEQ ID NO: 1092569 - DNA, 15 bp, Homo sapiens
aggtggacacagtgg

SEQ ID NO: 1092570 - DNA, 15 bp, Homo sapiens
gaggtggacacagtg

SEQ ID NO: 1092571 - DNA, 15 bp, Homo sapiens
ggaggtggacacagt

SEQ ID NO: 1092572 - DNA, 15 bp, Homo sapiens
tggaggtggacacag

SEQ ID NO: 1092573 - DNA, 15 bp, Homo sapiens
gtggaggtggacaca

SEQ ID NO: 1092574 - DNA, 15 bp, Homo sapiens
ggtggaggtggacac

SEQ ID NO: 1092575 - DNA, 15 bp, Homo sapiens
tggtggaggtggaca

SEQ ID NO: 1092576 - DNA, 15 bp, Homo sapiens
ctggtggaggtggac

SEQ ID NO: 1092577 - DNA, 15 bp, Homo sapiens
gctggtggaggtgga

SEQ ID NO: 1092578 - DNA, 15 bp, Homo sapiens
agctggtggaggtgg

SEQ ID NO: 1092579 - DNA, 15 bp, Homo sapiens
aagctggtggaggtg

SEQ ID NO: 1092580 - DNA, 15 bp, Homo sapiens
gaagctggtggaggt

SEQ ID NO: 1092581 - DNA, 15 bp, Homo sapiens
tgaagctggtggagg

SEQ ID NO: 1092582 - DNA, 15 bp, Homo sapiens
ctgaagctggtggag

SEQ ID NO: 1092583 - DNA, 15 bp, Homo sapiens
gctgaagctggtgga

SEQ ID NO: 1092584 - DNA, 15 bp, Homo sapiens
agctgaagctggtgg

SEQ ID NO: 1092585 - DNA, 15 bp, Homo sapiens
cagctgaagctggtg

SEQ ID NO: 1092586 - DNA, 15 bp, Homo sapiens
tcagctgaagctggt

SEQ ID NO: 1092587 - DNA, 15 bp, Homo sapiens
ttcagctgaagctgg

SEQ ID NO: 1092588 - DNA, 15 bp, Homo sapiens
cttcagctgaagctg

SEQ ID NO: 1092589 - DNA, 15 bp, Homo sapiens
gcttcagctgaagct

SEQ ID NO: 1092590 - DNA, 15 bp, Homo sapiens
ggcttcagctgaagc

SEQ ID NO: 1092591 - DNA, 15 bp, Homo sapiens
aggcttcagctgaag

SEQ ID NO: 1092592 - DNA, 15 bp, Homo sapiens
gaggcttcagctgaa

SEQ ID NO: 1092593 - DNA, 15 bp, Homo sapiens
agaggcttcagctga

SEQ ID NO: 1092594 - DNA, 15 bp, Homo sapiens
cagaggcttcagctg

SEQ ID NO: 1092595 - DNA, 15 bp, Homo sapiens
tcagaggcttcagct

SEQ ID NO: 1092596 - DNA, 15 bp, Homo sapiens
ttcagaggcttcagc

SEQ ID NO: 1092597 - DNA, 15 bp, Homo sapiens
gttcagaggcttcag

SEQ ID NO: 1092598 - DNA, 15 bp, Homo sapiens
tgttcagaggcttca

SEQ ID NO: 1092599 - DNA, 15 bp, Homo sapiens
atgttcagaggcttc

SEQ ID NO: 1092600 - DNA, 15 bp, Homo sapiens
gatgttcagaggctt

SEQ ID NO: 1092601 - DNA, 15 bp, Homo sapiens
gagatgttcagaggc

SEQ ID NO: 1092602 - DNA, 15 bp, Homo sapiens
ggagatgttcagagg

SEQ ID NO: 1092603 - DNA, 15 bp, Homo sapiens
tggagatgttcagag

SEQ ID NO: 1092604 - DNA, 15 bp, Homo sapiens
ctggagatgttcaga

SEQ ID NO: 1092605 - DNA, 15 bp, Homo sapiens
gctggagatgttcag

SEQ ID NO: 1092606 - DNA, 15 bp, Homo sapiens
tgctggagatgttca

SEQ ID NO: 1092607 - DNA, 15 bp, Homo sapiens
atgctggagatgttc

SEQ ID NO: 1092608 - DNA, 15 bp, Homo sapiens
catgctggagatgtt

SEQ ID NO: 1092609 - DNA, 15 bp, Homo sapiens
ccatgctggagatgt

SEQ ID NO: 1092610 - DNA, 15 bp, Homo sapiens
tccatgctggagatg

SEQ ID NO: 1092611 - DNA, 15 bp, Homo sapiens
ttccatgctggagat

SEQ ID NO: 1092612 - DNA, 15 bp, Homo sapiens
cttccatgctggaga

SEQ ID NO: 1092613 - DNA, 15 bp, Homo sapiens
tcttccatgctggag

SEQ ID NO: 1092614 - DNA, 15 bp, Homo sapiens
ttcttccatgctgga

SEQ ID NO: 1092615 - DNA, 15 bp, Homo sapiens
cttcttccatgctgg

SEQ ID NO: 1092616 - DNA, 15 bp, Homo sapiens
gcttcttccatgctg

SEQ ID NO: 1092617 - DNA, 15 bp, Homo sapiens
ggcttcttccatgct

SEQ ID NO: 1092618 - DNA, 15 bp, Homo sapiens
gggcttcttccatgc

SEQ ID NO: 1092619 - DNA, 15 bp, Homo sapiens
ggggcttcttccatg

SEQ ID NO: 1092620 - DNA, 15 bp, Homo sapiens
tggggcttcttccat

SEQ ID NO: 1092621 - DNA, 15 bp, Homo sapiens
ttggggcttcttcca

SEQ ID NO: 1092622 - DNA, 15 bp, Homo sapiens
tttggggcttcttcc

SEQ ID NO: 1092623 - DNA, 15 bp, Homo sapiens
ctttggggcttcttc

SEQ ID NO: 1092624 - DNA, 15 bp, Homo sapiens
cctttggggcttctt

SEQ ID NO: 1092625 - DNA, 15 bp, Homo sapiens
tcctttggggcttct

SEQ ID NO: 1092626 - DNA, 15 bp, Homo sapiens
atcctttggggcttc

SEQ ID NO: 1092627 - DNA, 15 bp, Homo sapiens
tatcctttggggctt

SEQ ID NO: 1092628 - DNA, 15 bp, Homo sapiens
atatcctttggggct

SEQ ID NO: 1092629 - DNA, 15 bp, Homo sapiens
aatatcctttggggc

SEQ ID NO: 1092630 - DNA, 15 bp, Homo sapiens
aaatatcctttgggg

SEQ ID NO: 1092631 - DNA, 15 bp, Homo sapiens
gaaatatcctttggg

SEQ ID NO: 1092632 - DNA, 15 bp, Homo sapiens
ggaaatatcctttgg

SEQ ID NO: 1092633 - DNA, 15 bp, Homo sapiens
aggaaatatcctttg

SEQ ID NO: 1092634 - DNA, 15 bp, Homo sapiens
caggaaatatccttt

SEQ ID NO: 1092635 - DNA, 15 bp, Homo sapiens
acaggaaatatcctt

SEQ ID NO: 1092636 - DNA, 15 bp, Homo sapiens
gacaggaaatatcct

SEQ ID NO: 1092637 - DNA, 15 bp, Homo sapiens
ggacaggaaatatcc

SEQ ID NO: 1092638 - DNA, 15 bp, Homo sapiens
gggacaggaaatatc

SEQ ID NO: 1092639 - DNA, 15 bp, Homo sapiens
ggggacaggaaatat

SEQ ID NO: 1092640 - DNA, 15 bp, Homo sapiens
gggggacaggaaata

SEQ ID NO: 1092641 - DNA, 15 bp, Homo sapiens
tgggggacaggaaat

SEQ ID NO: 1092642 - DNA, 15 bp, Homo sapiens
ctgggggacaggaaa

SEQ ID NO: 1092643 - DNA, 15 bp, Homo sapiens
gctgggggacaggaa

SEQ ID NO: 1092644 - DNA, 15 bp, Homo sapiens
tgctgggggacagga

SEQ ID NO: 1092645 - DNA, 15 bp, Homo sapiens
atgctgggggacagg

SEQ ID NO: 1092646 - DNA, 15 bp, Homo sapiens
tatgctgggggacag

SEQ ID NO: 1092647 - DNA, 15 bp, Homo sapiens
atatgctgggggaca

SEQ ID NO: 1092648 - DNA, 15 bp, Homo sapiens
catatgctgggggac

SEQ ID NO: 1092649 - DNA, 15 bp, Homo sapiens
gcatatgctggggga

SEQ ID NO: 1092650 - DNA, 15 bp, Homo sapiens
agcatatgctggggg

SEQ ID NO: 1092651 - DNA, 15 bp, Homo sapiens
aagcatatgctgggg

SEQ ID NO: 1092652 - DNA, 15 bp, Homo sapiens
caagcatatgctggg

SEQ ID NO: 1092653 - DNA, 15 bp, Homo sapiens
tcaagcatatgctgg

SEQ ID NO: 1092654 - DNA, 15 bp, Homo sapiens
gtcaagcatatgctg

SEQ ID NO: 1092655 - DNA, 15 bp, Homo sapiens
ggtcaagcatatgct

SEQ ID NO: 1092656 - DNA, 15 bp, Homo sapiens
gggtcaagcatatgc

SEQ ID NO: 1092657 - DNA, 15 bp, Homo sapiens
agggtcaagcatatg

SEQ ID NO: 1092658 - DNA, 15 bp, Homo sapiens
cagggtcaagcatat

SEQ ID NO: 1092659 - DNA, 15 bp, Homo sapiens
tcagggtcaagcata

SEQ ID NO: 1092660 - DNA, 15 bp, Homo sapiens
ttcagggtcaagcat

SEQ ID NO: 1092661 - DNA, 15 bp, Homo sapiens
cttcagggtcaagca

SEQ ID NO: 1092662 - DNA, 15 bp, Homo sapiens
gcttcagggtcaagc

SEQ ID NO: 1092663 - DNA, 15 bp, Homo sapiens
ggcttcagggtcaag

SEQ ID NO: 1092664 - DNA, 15 bp, Homo sapiens
gggcttcagggtcaa

SEQ ID NO: 1092665 - DNA, 15 bp, Homo sapiens
agggcttcagggtca

SEQ ID NO: 1092666 - DNA, 15 bp, Homo sapiens
gagggcttcagggtc

SEQ ID NO: 1092667 - DNA, 15 bp, Homo sapiens
ggagggcttcagggt

SEQ ID NO: 1092668 - DNA, 15 bp, Homo sapiens
gggagggcttcaggg

SEQ ID NO: 1092669 - DNA, 15 bp, Homo sapiens
ggggagggcttcagg

SEQ ID NO: 1092670 - DNA, 15 bp, Homo sapiens
tggggagggcttcag

SEQ ID NO: 1092671 - DNA, 15 bp, Homo sapiens
atggggagggcttca

SEQ ID NO: 1092672 - DNA, 15 bp, Homo sapiens
gatggggagggcttc

SEQ ID NO: 1092673 - DNA, 15 bp, Homo sapiens
agatggggagggctt

SEQ ID NO: 1092674 - DNA, 15 bp, Homo sapiens
tagatggggagggct

SEQ ID NO: 1092675 - DNA, 15 bp, Homo sapiens
ctagatggggagggc

SEQ ID NO: 1092676 - DNA, 15 bp, Homo sapiens
actagatggggaggg

SEQ ID NO: 1092677 - DNA, 15 bp, Homo sapiens
gactagatggggagg

SEQ ID NO: 1092678 - DNA, 15 bp, Homo sapiens
tgactagatggggag

SEQ ID NO: 1092679 - DNA, 15 bp, Homo sapiens
ttgactagatgggga

SEQ ID NO: 1092680 - DNA, 15 bp, Homo sapiens
cttgactagatgggg

SEQ ID NO: 1092681 - DNA, 15 bp, Homo sapiens
tcttgactagatggg

SEQ ID NO: 1092682 - DNA, 15 bp, Homo sapiens
ttcttgactagatgg

SEQ ID NO: 1092683 - DNA, 15 bp, Homo sapiens
cttcttgactagatg

SEQ ID NO: 1092684 - DNA, 15 bp, Homo sapiens
tcttcttgactagat

SEQ ID NO: 1092685 - DNA, 15 bp, Homo sapiens
gtcttcttgactaga

SEQ ID NO: 1092686 - DNA, 15 bp, Homo sapiens
ggtcttcttgactag

SEQ ID NO: 1092687 - DNA, 15 bp, Homo sapiens
tggtcttcttgacta

SEQ ID NO: 1092688 - DNA, 15 bp, Homo sapiens
ttggtcttcttgact

SEQ ID NO: 1092689 - DNA, 15 bp, Homo sapiens
tttggtcttcttgac

SEQ ID NO: 1092690 - DNA, 15 bp, Homo sapiens
gtttggtcttcttga

SEQ ID NO: 1092691 - DNA, 15 bp, Homo sapiens
agtttggtcttcttg

SEQ ID NO: 1092692 - DNA, 15 bp, Homo sapiens
cagtttggtcttctt

SEQ ID NO: 1092693 - DNA, 15 bp, Homo sapiens
acagtttggtcttct

SEQ ID NO: 1092694 - DNA, 15 bp, Homo sapiens
aacagtttggtcttc

SEQ ID NO: 1092695 - DNA, 15 bp, Homo sapiens
taacagtttggtctt

SEQ ID NO: 1092696 - DNA, 15 bp, Homo sapiens
ttaacagtttggtct

SEQ ID NO: 1092697 - DNA, 15 bp, Homo sapiens
gttaacagtttggtc

SEQ ID NO: 1092698 - DNA, 15 bp, Homo sapiens
tgttaacagtttggt

SEQ ID NO: 1092699 - DNA, 15 bp, Homo sapiens
ttgttaacagtttgg

SEQ ID NO: 1092700 - DNA, 15 bp, Homo sapiens
attgttaacagtttg

SEQ ID NO: 1092701 - DNA, 15 bp, Homo sapiens
gattgttaacagttt

SEQ ID NO: 1092702 - DNA, 15 bp, Homo sapiens
ggattgttaacagtt

SEQ ID NO: 1092703 - DNA, 15 bp, Homo sapiens
aggattgttaacagt

SEQ ID NO: 1092704 - DNA, 15 bp, Homo sapiens
caggattgttaacag

SEQ ID NO: 1092705 - DNA, 15 bp, Homo sapiens
ccaggattgttaaca

SEQ ID NO: 1092706 - DNA, 15 bp, Homo sapiens
tccaggattgttaac

SEQ ID NO: 1092707 - DNA, 15 bp, Homo sapiens
ctccaggattgttaa

SEQ ID NO: 1092708 - DNA, 15 bp, Homo sapiens
actccaggattgtta

SEQ ID NO: 1092709 - DNA, 15 bp, Homo sapiens
gactccaggattgtt

SEQ ID NO: 1092710 - DNA, 15 bp, Homo sapiens
tgactccaggattgt

SEQ ID NO: 1092711 - DNA, 15 bp, Homo sapiens
ctgactccaggattg

SEQ ID NO: 1092712 - DNA, 15 bp, Homo sapiens
tctgactccaggatt

SEQ ID NO: 1092713 - DNA, 15 bp, Homo sapiens
ctctgactccaggat

SEQ ID NO: 1092714 - DNA, 15 bp, Homo sapiens
actctgactccagga

SEQ ID NO: 1092715 - DNA, 15 bp, Homo sapiens
cactctgactccagg

SEQ ID NO: 1092716 - DNA, 15 bp, Homo sapiens
tcactctgactccag

SEQ ID NO: 1092717 - DNA, 15 bp, Homo sapiens
gtcactctgactcca

SEQ ID NO: 1092718 - DNA, 15 bp, Homo sapiens
ggtcactctgactcc

SEQ ID NO: 1092719 - DNA, 15 bp, Homo sapiens
gggtcactctgactc

SEQ ID NO: 1092720 - DNA, 15 bp, Homo sapiens
tgggtcactctgact

SEQ ID NO: 1092721 - DNA, 15 bp, Homo sapiens
atgggtcactctgac

SEQ ID NO: 1092722 - DNA, 15 bp, Homo sapiens
catgggtcactctga

SEQ ID NO: 1092723 - DNA, 15 bp, Homo sapiens
ccatgggtcactctg

SEQ ID NO: 1092724 - DNA, 15 bp, Homo sapiens
cccatgggtcactct

SEQ ID NO: 1092725 - DNA, 15 bp, Homo sapiens
acccatgggtcactc

SEQ ID NO: 1092726 - DNA, 15 bp, Homo sapiens
cacccatgggtcact

SEQ ID NO: 1092727 - DNA, 15 bp, Homo sapiens
tcacccatgggtcac

SEQ ID NO: 1092728 - DNA, 15 bp, Homo sapiens
ttcacccatgggtca

SEQ ID NO: 1092729 - DNA, 15 bp, Homo sapiens
attcacccatgggtc

SEQ ID NO: 1092730 - DNA, 15 bp, Homo sapiens
gattcacccatgggt

SEQ ID NO: 1092731 - DNA, 15 bp, Homo sapiens
agattcacccatggg

SEQ ID NO: 1092732 - DNA, 15 bp, Homo sapiens
aagattcacccatgg

SEQ ID NO: 1092733 - DNA, 15 bp, Homo sapiens
taagattcacccatg

SEQ ID NO: 1092734 - DNA, 15 bp, Homo sapiens
ctaagattcacccat

SEQ ID NO: 1092735 - DNA, 15 bp, Homo sapiens
gctaagattcaccca

SEQ ID NO: 1092736 - DNA, 15 bp, Homo sapiens
ggctaagattcaccc

SEQ ID NO: 1092737 - DNA, 15 bp, Homo sapiens
tggctaagattcacc

SEQ ID NO: 1092738 - DNA, 15 bp, Homo sapiens
ttggctaagattcac

SEQ ID NO: 1092739 - DNA, 15 bp, Homo sapiens
cttggctaagattca

SEQ ID NO: 1092740 - DNA, 15 bp, Homo sapiens
acttggctaagattc

SEQ ID NO: 1092741 - DNA, 15 bp, Homo sapiens
gacttggctaagatt

SEQ ID NO: 1092742 - DNA, 15 bp, Homo sapiens
tgacttggctaagat

SEQ ID NO: 1092743 - DNA, 15 bp, Homo sapiens
gtgacttggctaaga

SEQ ID NO: 1092744 - DNA, 15 bp, Homo sapiens
agtgacttggctaag

SEQ ID NO: 1092745 - DNA, 15 bp, Homo sapiens
gagtgacttggctaa

SEQ ID NO: 1092746 - DNA, 15 bp, Homo sapiens
tgagtgacttggcta

SEQ ID NO: 1092747 - DNA, 15 bp, Homo sapiens
atgagtgacttggct

SEQ ID NO: 1092748 - DNA, 15 bp, Homo sapiens
tatgagtgacttggc

SEQ ID NO: 1092749 - DNA, 15 bp, Homo sapiens
ctatgagtgacttgg

SEQ ID NO: 1092750 - DNA, 15 bp, Homo sapiens
gctatgagtgacttg

SEQ ID NO: 1092751 - DNA, 15 bp, Homo sapiens
agctatgagtgactt

SEQ ID NO: 1092752 - DNA, 15 bp, Homo sapiens
cagctatgagtgact

SEQ ID NO: 1092753 - DNA, 15 bp, Homo sapiens
acagctatgagtgac

SEQ ID NO: 1092754 - DNA, 15 bp, Homo sapiens
aacagctatgagtga

SEQ ID NO: 1092755 - DNA, 15 bp, Homo sapiens
caacagctatgagtg

SEQ ID NO: 1092756 - DNA, 15 bp, Homo sapiens
gcaacagctatgagt

SEQ ID NO: 1092757 - DNA, 15 bp, Homo sapiens
tgcaacagctatgag

SEQ ID NO: 1092758 - DNA, 15 bp, Homo sapiens
atgcaacagctatga

SEQ ID NO: 1092759 - DNA, 15 bp, Homo sapiens
gatgcaacagctatg

SEQ ID NO: 1092760 - DNA, 15 bp, Homo sapiens
ggatgcaacagctat

SEQ ID NO: 1092761 - DNA, 15 bp, Homo sapiens
aggatgcaacagcta

SEQ ID NO: 1092762 - DNA, 15 bp, Homo sapiens
taggatgcaacagct

SEQ ID NO: 1092763 - DNA, 15 bp, Homo sapiens
ctaggatgcaacagc

SEQ ID NO: 1092764 - DNA, 15 bp, Homo sapiens
actaggatgcaacag

SEQ ID NO: 1092765 - DNA, 15 bp, Homo sapiens
tactaggatgcaaca

SEQ ID NO: 1092766 - DNA, 15 bp, Homo sapiens
ttactaggatgcaac

SEQ ID NO: 1092767 - DNA, 15 bp, Homo sapiens
tttactaggatgcaa

SEQ ID NO: 1092768 - DNA, 15 bp, Homo sapiens
atttactaggatgca

SEQ ID NO: 1092769 - DNA, 15 bp, Homo sapiens
gatttactaggatgc

SEQ ID NO: 1092770 - DNA, 15 bp, Homo sapiens
ggatttactaggatg

SEQ ID NO: 1092771 - DNA, 15 bp, Homo sapiens
gggatttactaggat

SEQ ID NO: 1092772 - DNA, 15 bp, Homo sapiens
agggatttactagga

SEQ ID NO: 1092773 - DNA, 15 bp, Homo sapiens
aagggatttactagg

SEQ ID NO: 1092774 - DNA, 15 bp, Homo sapiens
taagggatttactag

SEQ ID NO: 1092775 - DNA, 15 bp, Homo sapiens
ttaagggatttacta

SEQ ID NO: 1092776 - DNA, 15 bp, Homo sapiens
gttaagggatttact

SEQ ID NO: 1092777 - DNA, 15 bp, Homo sapiens
agttaagggatttac

SEQ ID NO: 1092778 - DNA, 15 bp, Homo sapiens
gagttaagggattta

SEQ ID NO: 1092779 - DNA, 15 bp, Homo sapiens
ggagttaagggattt

SEQ ID NO: 1092780 - DNA, 15 bp, Homo sapiens
gggagttaagggatt

SEQ ID NO: 1092781 - DNA, 15 bp, Homo sapiens
tgggagttaagggat

SEQ ID NO: 1092782 - DNA, 15 bp, Homo sapiens
atgggagttaaggga

SEQ ID NO: 1092783 - DNA, 15 bp, Homo sapiens
tatgggagttaaggg

SEQ ID NO: 1092784 - DNA, 15 bp, Homo sapiens
ctatgggagttaagg

SEQ ID NO: 1092785 - DNA, 15 bp, Homo sapiens
cctatgggagttaag

SEQ ID NO: 1092786 - DNA, 15 bp, Homo sapiens
gcctatgggagttaa

SEQ ID NO: 1092787 - DNA, 15 bp, Homo sapiens
agcctatgggagtta

SEQ ID NO: 1092788 - DNA, 15 bp, Homo sapiens
aagcctatgggagtt

SEQ ID NO: 1092789 - DNA, 15 bp, Homo sapiens
gaagcctatgggagt

SEQ ID NO: 1092790 - DNA, 15 bp, Homo sapiens
tgaagcctatgggag

SEQ ID NO: 1092791 - DNA, 15 bp, Homo sapiens
ctgaagcctatggga

SEQ ID NO: 1092792 - DNA, 15 bp, Homo sapiens
actgaagcctatggg

SEQ ID NO: 1092793 - DNA, 15 bp, Homo sapiens
aactgaagcctatgg

SEQ ID NO: 1092794 - DNA, 15 bp, Homo sapiens
aaactgaagcctatg

SEQ ID NO: 1092795 - DNA, 15 bp, Homo sapiens
gaaactgaagcctat

SEQ ID NO: 1092796 - DNA, 15 bp, Homo sapiens
ggaaactgaagccta

SEQ ID NO: 1092797 - DNA, 15 bp, Homo sapiens
gggaaactgaagcct

SEQ ID NO: 1092798 - DNA, 15 bp, Homo sapiens
agggaaactgaagcc

SEQ ID NO: 1092799 - DNA, 15 bp, Homo sapiens
cagggaaactgaagc

SEQ ID NO: 1092800 - DNA, 15 bp, Homo sapiens
gcagggaaactgaag

SEQ ID NO: 1092801 - DNA, 15 bp, Homo sapiens
tgcagggaaactgaa

SEQ ID NO: 1092802 - DNA, 15 bp, Homo sapiens
atgcagggaaactga

SEQ ID NO: 1092803 - DNA, 15 bp, Homo sapiens
tatgcagggaaactg

SEQ ID NO: 1092804 - DNA, 15 bp, Homo sapiens
atatgcagggaaact

SEQ ID NO: 1092805 - DNA, 15 bp, Homo sapiens
tatatgcagggaaac

SEQ ID NO: 1092806 - DNA, 15 bp, Homo sapiens
ttatatgcagggaaa

SEQ ID NO: 1092807 - DNA, 15 bp, Homo sapiens
tttatatgcagggaa

SEQ ID NO: 1092808 - DNA, 15 bp, Homo sapiens
ttttatatgcaggga

SEQ ID NO: 1092809 - DNA, 15 bp, Homo sapiens
attttatatgcaggg

SEQ ID NO: 1092810 - DNA, 15 bp, Homo sapiens
cattttatatgcagg

SEQ ID NO: 1092811 - DNA, 15 bp, Homo sapiens
tcattttatatgcag

SEQ ID NO: 1092812 - DNA, 15 bp, Homo sapiens
gtcattttatatgca

SEQ ID NO: 1092813 - DNA, 15 bp, Homo sapiens
tgtcattttatatgc

SEQ ID NO: 1092814 - DNA, 15 bp, Homo sapiens
ctgtcattttatatg

SEQ ID NO: 1092815 - DNA, 15 bp, Homo sapiens
gctgtcattttatat

SEQ ID NO: 1092816 - DNA, 15 bp, Homo sapiens
ggctgtcattttata

SEQ ID NO: 1092817 - DNA, 15 bp, Homo sapiens
aggctgtcattttat

SEQ ID NO: 1092818 - DNA, 15 bp, Homo sapiens
aaggctgtcatttta

SEQ ID NO: 1092819 - DNA, 15 bp, Homo sapiens
gaaggctgtcatttt

SEQ ID NO: 1092820 - DNA, 15 bp, Homo sapiens
tgaaggctgtcattt

SEQ ID NO: 1092821 - DNA, 15 bp, Homo sapiens
ctgaaggctgtcatt

SEQ ID NO: 1092822 - DNA, 15 bp, Homo sapiens
gctgaaggctgtcat

SEQ ID NO: 1092823 - DNA, 15 bp, Homo sapiens
agctgaaggctgtca

SEQ ID NO: 1092824 - DNA, 15 bp, Homo sapiens
gagctgaaggctgtc

SEQ ID NO: 1092825 - DNA, 15 bp, Homo sapiens
tgagctgaaggctgt

SEQ ID NO: 1092826 - DNA, 15 bp, Homo sapiens
atgagctgaaggctg

SEQ ID NO: 1092827 - DNA, 15 bp, Homo sapiens
gatgagctgaaggct

SEQ ID NO: 1092828 - DNA, 15 bp, Homo sapiens
cgatgagctgaaggc

SEQ ID NO: 1092829 - DNA, 15 bp, Homo sapiens
ccgatgagctgaagg

SEQ ID NO: 1092830 - DNA, 15 bp, Homo sapiens
gccgatgagctgaag

SEQ ID NO: 1092831 - DNA, 15 bp, Homo sapiens
ggccgatgagctgaa

SEQ ID NO: 1092832 - DNA, 15 bp, Homo sapiens
tggccgatgagctga

SEQ ID NO: 1092833 - DNA, 15 bp, Homo sapiens
ctggccgatgagctg

SEQ ID NO: 1092834 - DNA, 15 bp, Homo sapiens
actggccgatgagct

SEQ ID NO: 1092835 - DNA, 15 bp, Homo sapiens
aactggccgatgagc

SEQ ID NO: 1092836 - DNA, 15 bp, Homo sapiens
aaactggccgatgag

SEQ ID NO: 1092837 - DNA, 15 bp, Homo sapiens
gaaactggccgatga

SEQ ID NO: 1092838 - DNA, 15 bp, Homo sapiens
tgaaactggccgatg

SEQ ID NO: 1092839 - DNA, 15 bp, Homo sapiens
ttgaaactggccgat

SEQ ID NO: 1092840 - DNA, 15 bp, Homo sapiens
attgaaactggccga

SEQ ID NO: 1092841 - DNA, 15 bp, Homo sapiens
gattgaaactggccg

SEQ ID NO: 1092842 - DNA, 15 bp, Homo sapiens
ggattgaaactggcc

SEQ ID NO: 1092843 - DNA, 15 bp, Homo sapiens
tggattgaaactggc

SEQ ID NO: 1092844 - DNA, 15 bp, Homo sapiens
atggattgaaactgg

SEQ ID NO: 1092845 - DNA, 15 bp, Homo sapiens
gatggattgaaactg

SEQ ID NO: 1092846 - DNA, 15 bp, Homo sapiens
agatggattgaaact

SEQ ID NO: 1092847 - DNA, 15 bp, Homo sapiens
tagatggattgaaac

SEQ ID NO: 1092848 - DNA, 15 bp, Homo sapiens
ttagatggattgaaa

SEQ ID NO: 1092849 - DNA, 15 bp, Homo sapiens
tttagatggattgaa

SEQ ID NO: 1092850 - DNA, 15 bp, Homo sapiens
ctttagatggattga

SEQ ID NO: 1092851 - DNA, 15 bp, Homo sapiens
cctttagatggattg

SEQ ID NO: 1092852 - DNA, 15 bp, Homo sapiens
ccctttagatggatt

SEQ ID NO: 1092853 - DNA, 15 bp, Homo sapiens
accctttagatggat

SEQ ID NO: 1092854 - DNA, 15 bp, Homo sapiens
gaccctttagatgga

SEQ ID NO: 1092855 - DNA, 15 bp, Homo sapiens
agaccctttagatgg

SEQ ID NO: 1092856 - DNA, 15 bp, Homo sapiens
tagaccctttagatg

SEQ ID NO: 1092857 - DNA, 15 bp, Homo sapiens
ctagaccctttagat

SEQ ID NO: 1092858 - DNA, 15 bp, Homo sapiens
gctagaccctttaga

SEQ ID NO: 1092859 - DNA, 15 bp, Homo sapiens
tgctagaccctttag

SEQ ID NO: 1092860 - DNA, 15 bp, Homo sapiens
gtgctagacccttta

SEQ ID NO: 1092861 - DNA, 15 bp, Homo sapiens
tgtgctagacccttt

SEQ ID NO: 1092862 - DNA, 15 bp, Homo sapiens
atgtgctagaccctt

SEQ ID NO: 1092863 - DNA, 15 bp, Homo sapiens
gatgtgctagaccct

SEQ ID NO: 1092864 - DNA, 15 bp, Homo sapiens
ggatgtgctagaccc

SEQ ID NO: 1092865 - DNA, 15 bp, Homo sapiens
gggatgtgctagacc

SEQ ID NO: 1092866 - DNA, 15 bp, Homo sapiens
ggggatgtgctagac

SEQ ID NO: 1092867 - DNA, 15 bp, Homo sapiens
aggggatgtgctaga

SEQ ID NO: 1092868 - DNA, 15 bp, Homo sapiens
caggggatgtgctag

SEQ ID NO: 1092869 - DNA, 15 bp, Homo sapiens
ccaggggatgtgcta

SEQ ID NO: 1092870 - DNA, 15 bp, Homo sapiens
gccaggggatgtgct

SEQ ID NO: 1092871 - DNA, 15 bp, Homo sapiens
tgccaggggatgtgc

SEQ ID NO: 1092872 - DNA, 15 bp, Homo sapiens
atgccaggggatgtg

SEQ ID NO: 1092873 - DNA, 15 bp, Homo sapiens
catgccaggggatgt

SEQ ID NO: 1092874 - DNA, 15 bp, Homo sapiens
acatgccaggggatg

SEQ ID NO: 1092875 - DNA, 15 bp, Homo sapiens
cacatgccaggggat

SEQ ID NO: 1092876 - DNA, 15 bp, Homo sapiens
ccacatgccagggga

SEQ ID NO: 1092877 - DNA, 15 bp, Homo sapiens
tccacatgccagggg

SEQ ID NO: 1092878 - DNA, 15 bp, Homo sapiens
ttccacatgccaggg

SEQ ID NO: 1092879 - DNA, 15 bp, Homo sapiens
cttccacatgccagg

SEQ ID NO: 1092880 - DNA, 15 bp, Homo sapiens
gcttccacatgccag

SEQ ID NO: 1092881 - DNA, 15 bp, Homo sapiens
ggcttccacatgcca

SEQ ID NO: 1092882 - DNA, 15 bp, Homo sapiens
tggcttccacatgcc

SEQ ID NO: 1092883 - DNA, 15 bp, Homo sapiens
gtggcttccacatgc

SEQ ID NO: 1092884 - DNA, 15 bp, Homo sapiens
tgtggcttccacatg

SEQ ID NO: 1092885 - DNA, 15 bp, Homo sapiens
ctgtggcttccacat

SEQ ID NO: 1092886 - DNA, 15 bp, Homo sapiens
cctgtggcttccaca

SEQ ID NO: 1092887 - DNA, 15 bp, Homo sapiens
ccctgtggcttccac

SEQ ID NO: 1092888 - DNA, 15 bp, Homo sapiens
gccctgtggcttcca

SEQ ID NO: 1092889 - DNA, 15 bp, Homo sapiens
tgccctgtggcttcc

SEQ ID NO: 1092890 - DNA, 15 bp, Homo sapiens
gtgccctgtggcttc

SEQ ID NO: 1092891 - DNA, 15 bp, Homo sapiens
tgtgccctgtggctt

SEQ ID NO: 1092892 - DNA, 15 bp, Homo sapiens
gtgtgccctgtggct

SEQ ID NO: 1092893 - DNA, 15 bp, Homo sapiens
tgtgtgccctgtggc

SEQ ID NO: 1092894 - DNA, 15 bp, Homo sapiens
gtgtgtgccctgtgg

SEQ ID NO: 1092895 - DNA, 15 bp, Homo sapiens
agtgtgtgccctgtg

SEQ ID NO: 1092896 - DNA, 15 bp, Homo sapiens
tagtgtgtgccctgt

SEQ ID NO: 1092897 - DNA, 15 bp, Homo sapiens
ctagtgtgtgccctg

SEQ ID NO: 1092898 - DNA, 15 bp, Homo sapiens
actagtgtgtgccct

SEQ ID NO: 1092899 - DNA, 15 bp, Homo sapiens
aactagtgtgtgccc

SEQ ID NO: 1092900 - DNA, 15 bp, Homo sapiens
caactagtgtgtgcc

SEQ ID NO: 1092901 - DNA, 15 bp, Homo sapiens
acaactagtgtgtgc

SEQ ID NO: 1092902 - DNA, 15 bp, Homo sapiens
cacaactagtgtgtg

SEQ ID NO: 1092903 - DNA, 15 bp, Homo sapiens
ccacaactagtgtgt

SEQ ID NO: 1092904 - DNA, 15 bp, Homo sapiens
accacaactagtgtg

SEQ ID NO: 1092905 - DNA, 15 bp, Homo sapiens
gaccacaactagtgt

SEQ ID NO: 1092906 - DNA, 15 bp, Homo sapiens
tgaccacaactagtg

SEQ ID NO: 1092907 - DNA, 15 bp, Homo sapiens
atgaccacaactagt

SEQ ID NO: 1092908 - DNA, 15 bp, Homo sapiens
aatgaccacaactag

SEQ ID NO: 1092909 - DNA, 15 bp, Homo sapiens
aaatgaccacaacta

SEQ ID NO: 1092910 - DNA, 15 bp, Homo sapiens
caaatgaccacaact

SEQ ID NO: 1092911 - DNA, 15 bp, Homo sapiens
tcaaatgaccacaac

SEQ ID NO: 1092912 - DNA, 15 bp, Homo sapiens
atcaaatgaccacaa

SEQ ID NO: 1092913 - DNA, 15 bp, Homo sapiens
gatcaaatgaccaca

SEQ ID NO: 1092914 - DNA, 15 bp, Homo sapiens
ggatcaaatgaccac

SEQ ID NO: 1092915 - DNA, 15 bp, Homo sapiens
aggatcaaatgacca

SEQ ID NO: 1092916 - DNA, 15 bp, Homo sapiens
caggatcaaatgacc

SEQ ID NO: 1092917 - DNA, 15 bp, Homo sapiens
ccaggatcaaatgac

SEQ ID NO: 1092918 - DNA, 15 bp, Homo sapiens
gccaggatcaaatga

SEQ ID NO: 1092919 - DNA, 15 bp, Homo sapiens
tgccaggatcaaatg

SEQ ID NO: 1092920 - DNA, 15 bp, Homo sapiens
atgccaggatcaaat

SEQ ID NO: 1092921 - DNA, 15 bp, Homo sapiens
catgccaggatcaaa

SEQ ID NO: 1092922 - DNA, 15 bp, Homo sapiens
gcatgccaggatcaa

SEQ ID NO: 1092923 - DNA, 15 bp, Homo sapiens
agcatgccaggatca

SEQ ID NO: 1092924 - DNA, 15 bp, Homo sapiens
gagcatgccaggatc

SEQ ID NO: 1092925 - DNA, 15 bp, Homo sapiens
agagcatgccaggat

SEQ ID NO: 1092926 - DNA, 15 bp, Homo sapiens
cagagcatgccagga

SEQ ID NO: 1092927 - DNA, 15 bp, Homo sapiens
gcagagcatgccagg

SEQ ID NO: 1092928 - DNA, 15 bp, Homo sapiens
agcagagcatgccag

SEQ ID NO: 1092929 - DNA, 15 bp, Homo sapiens
cagcagagcatgcca

SEQ ID NO: 1092930 - DNA, 15 bp, Homo sapiens
acagcagagcatgcc

SEQ ID NO: 1092931 - DNA, 15 bp, Homo sapiens
gacagcagagcatgc

SEQ ID NO: 1092932 - DNA, 15 bp, Homo sapiens
agacagcagagcatg

SEQ ID NO: 1092933 - DNA, 15 bp, Homo sapiens
gagacagcagagcat

SEQ ID NO: 1092934 - DNA, 15 bp, Homo sapiens
agagacagcagagca

SEQ ID NO: 1092935 - DNA, 15 bp, Homo sapiens
gagagacagcagagc

SEQ ID NO: 1092936 - DNA, 15 bp, Homo sapiens
cgagagacagcagag

SEQ ID NO: 1092937 - DNA, 15 bp, Homo sapiens
ccgagagacagcaga

SEQ ID NO: 1092938 - DNA, 15 bp, Homo sapiens
gccgagagacagcag

SEQ ID NO: 1092939 - DNA, 15 bp, Homo sapiens
agccgagagacagca

SEQ ID NO: 1092940 - DNA, 15 bp, Homo sapiens
gagccgagagacagc

SEQ ID NO: 1092941 - DNA, 15 bp, Homo sapiens
agagccgagagacag

SEQ ID NO: 1092942 - DNA, 15 bp, Homo sapiens
gagagccgagagaca

SEQ ID NO: 1092943 - DNA, 15 bp, Homo sapiens
ggagagccgagagac

SEQ ID NO: 1092944 - DNA, 15 bp, Homo sapiens
gggagagccgagaga

SEQ ID NO: 1092945 - DNA, 15 bp, Homo sapiens
ggggagagccgagag

SEQ ID NO: 1092946 - DNA, 15 bp, Homo sapiens
aggggagagccgaga

SEQ ID NO: 1092947 - DNA, 15 bp, Homo sapiens
aaggggagagccgag

SEQ ID NO: 1092948 - DNA, 15 bp, Homo sapiens
caaggggagagccga

SEQ ID NO: 1092949 - DNA, 15 bp, Homo sapiens
gcaaggggagagccg

SEQ ID NO: 1092950 - DNA, 15 bp, Homo sapiens
ggcaaggggagagcc

SEQ ID NO: 1092951 - DNA, 15 bp, Homo sapiens
aggcaaggggagagc

SEQ ID NO: 1092952 - DNA, 15 bp, Homo sapiens
gaggcaaggggagag

SEQ ID NO: 1092953 - DNA, 15 bp, Homo sapiens
agaggcaaggggaga

SEQ ID NO: 1092954 - DNA, 15 bp, Homo sapiens
aagaggcaaggggag

SEQ ID NO: 1092955 - DNA, 15 bp, Homo sapiens
aaagaggcaagggga

SEQ ID NO: 1092956 - DNA, 15 bp, Homo sapiens
gaaagaggcaagggg

SEQ ID NO: 1092957 - DNA, 15 bp, Homo sapiens
ggaaagaggcaaggg

SEQ ID NO: 1092958 - DNA, 15 bp, Homo sapiens
gggaaagaggcaagg

SEQ ID NO: 1092959 - DNA, 15 bp, Homo sapiens
agggaaagaggcaag

SEQ ID NO: 1092960 - DNA, 15 bp, Homo sapiens
cagggaaagaggcaa

SEQ ID NO: 1092961 - DNA, 15 bp, Homo sapiens
tcagggaaagaggca

SEQ ID NO: 1092962 - DNA, 15 bp, Homo sapiens
atcagggaaagaggc

SEQ ID NO: 1092963 - DNA, 15 bp, Homo sapiens
catcagggaaagagg

SEQ ID NO: 1092964 - DNA, 15 bp, Homo sapiens
acatcagggaaagag

SEQ ID NO: 1092965 - DNA, 15 bp, Homo sapiens
gacatcagggaaaga

SEQ ID NO: 1092966 - DNA, 15 bp, Homo sapiens
ggacatcagggaaag

SEQ ID NO: 1092967 - DNA, 15 bp, Homo sapiens
aggacatcagggaaa

SEQ ID NO: 1092968 - DNA, 15 bp, Homo sapiens
caggacatcagggaa

SEQ ID NO: 1092969 - DNA, 15 bp, Homo sapiens
ccaggacatcaggga

SEQ ID NO: 1092970 - DNA, 15 bp, Homo sapiens
gccaggacatcaggg

SEQ ID NO: 1092971 - DNA, 15 bp, Homo sapiens
ggccaggacatcagg

SEQ ID NO: 1092972 - DNA, 15 bp, Homo sapiens
tggccaggacatcag

SEQ ID NO: 1092973 - DNA, 15 bp, Homo sapiens
atggccaggacatca

SEQ ID NO: 1092974 - DNA, 15 bp, Homo sapiens
gatggccaggacatc

SEQ ID NO: 1092975 - DNA, 15 bp, Homo sapiens
tgatggccaggacat

SEQ ID NO: 1092976 - DNA, 15 bp, Homo sapiens
ctgatggccaggaca

SEQ ID NO: 1092977 - DNA, 15 bp, Homo sapiens
gctgatggccaggac

SEQ ID NO: 1092978 - DNA, 15 bp, Homo sapiens
ggctgatggccagga

SEQ ID NO: 1092979 - DNA, 15 bp, Homo sapiens
tggctgatggccagg

SEQ ID NO: 1092980 - DNA, 15 bp, Homo sapiens
gtggctgatggccag

SEQ ID NO: 1092981 - DNA, 15 bp, Homo sapiens
agtggctgatggcca

SEQ ID NO: 1092982 - DNA, 15 bp, Homo sapiens
cagtggctgatggcc

SEQ ID NO: 1092983 - DNA, 15 bp, Homo sapiens
gcagtggctgatggc

SEQ ID NO: 1092984 - DNA, 15 bp, Homo sapiens
ggcagtggctgatgg

SEQ ID NO: 1092985 - DNA, 15 bp, Homo sapiens
aggcagtggctgatg

SEQ ID NO: 1092986 - DNA, 15 bp, Homo sapiens
taggcagtggctgat

SEQ ID NO: 1092987 - DNA, 15 bp, Homo sapiens
ttaggcagtggctga

SEQ ID NO: 1092988 - DNA, 15 bp, Homo sapiens
gttaggcagtggctg

SEQ ID NO: 1092989 - DNA, 15 bp, Homo sapiens
tgttaggcagtggct

SEQ ID NO: 1092990 - DNA, 15 bp, Homo sapiens
gtgttaggcagtggc

SEQ ID NO: 1092991 - DNA, 15 bp, Homo sapiens
ggtgttaggcagtgg

SEQ ID NO: 1092992 - DNA, 15 bp, Homo sapiens
gggtgttaggcagtg

SEQ ID NO: 1092993 - DNA, 15 bp, Homo sapiens
agggtgttaggcagt

SEQ ID NO: 1092994 - DNA, 15 bp, Homo sapiens
gagggtgttaggcag

SEQ ID NO: 1092995 - DNA, 15 bp, Homo sapiens
ggagggtgttaggca

SEQ ID NO: 1092996 - DNA, 15 bp, Homo sapiens
gggagggtgttaggc

SEQ ID NO: 1092997 - DNA, 15 bp, Homo sapiens
tgggagggtgttagg

SEQ ID NO: 1092998 - DNA, 15 bp, Homo sapiens
gtgggagggtgttag

SEQ ID NO: 1092999 - DNA, 15 bp, Homo sapiens
agtgggagggtgtta

SEQ ID NO: 1093000 - DNA, 15 bp, Homo sapiens
gagtgggagggtgtt

SEQ ID NO: 1093001 - DNA, 15 bp, Homo sapiens
tgagtgggagggtgt

SEQ ID NO: 1093002 - DNA, 15 bp, Homo sapiens
gtgagtgggagggtg

SEQ ID NO: 1093003 - DNA, 15 bp, Homo sapiens
ggtgagtgggagggt

SEQ ID NO: 1093004 - DNA, 15 bp, Homo sapiens
tggtgagtgggaggg

SEQ ID NO: 1093005 - DNA, 15 bp, Homo sapiens
ctggtgagtgggagg

SEQ ID NO: 1093006 - DNA, 15 bp, Homo sapiens
cctggtgagtgggag

SEQ ID NO: 1093007 - DNA, 15 bp, Homo sapiens
gcctggtgagtggga

SEQ ID NO: 1093008 - DNA, 15 bp, Homo sapiens
ggcctggtgagtggg

SEQ ID NO: 1093009 - DNA, 15 bp, Homo sapiens
gggcctggtgagtgg

SEQ ID NO: 1093010 - DNA, 15 bp, Homo sapiens
agggcctggtgagtg

SEQ ID NO: 1093011 - DNA, 15 bp, Homo sapiens
aagggcctggtgagt

SEQ ID NO: 1093012 - DNA, 15 bp, Homo sapiens
taagggcctggtgag

SEQ ID NO: 1093013 - DNA, 15 bp, Homo sapiens
ctaagggcctggtga

SEQ ID NO: 1093014 - DNA, 15 bp, Homo sapiens
gctaagggcctggtg

SEQ ID NO: 1093015 - DNA, 15 bp, Homo sapiens
ggctaagggcctggt

SEQ ID NO: 1093016 - DNA, 15 bp, Homo sapiens
aggctaagggcctgg

SEQ ID NO: 1093017 - DNA, 15 bp, Homo sapiens
caggctaagggcctg

SEQ ID NO: 1093018 - DNA, 15 bp, Homo sapiens
gcaggctaagggcct

SEQ ID NO: 1093019 - DNA, 15 bp, Homo sapiens
ggcaggctaagggcc

SEQ ID NO: 1093020 - DNA, 15 bp, Homo sapiens
gggcaggctaagggc

SEQ ID NO: 1093021 - DNA, 15 bp, Homo sapiens
ggggcaggctaaggg

SEQ ID NO: 1093022 - DNA, 15 bp, Homo sapiens
aggggcaggctaagg

SEQ ID NO: 1093023 - DNA, 15 bp, Homo sapiens
aaggggcaggctaag

SEQ ID NO: 1093024 - DNA, 15 bp, Homo sapiens
taaggggcaggctaa

SEQ ID NO: 1093025 - DNA, 15 bp, Homo sapiens
ctaaggggcaggcta

SEQ ID NO: 1093026 - DNA, 15 bp, Homo sapiens
gctaaggggcaggct

SEQ ID NO: 1093027 - DNA, 15 bp, Homo sapiens
tgctaaggggcaggc

SEQ ID NO: 1093028 - DNA, 15 bp, Homo sapiens
gtgctaaggggcagg

SEQ ID NO: 1093029 - DNA, 15 bp, Homo sapiens
tgtgctaaggggcag

SEQ ID NO: 1093030 - DNA, 15 bp, Homo sapiens
ttgtgctaaggggca

SEQ ID NO: 1093031 - DNA, 15 bp, Homo sapiens
cttgtgctaaggggc

SEQ ID NO: 1093032 - DNA, 15 bp, Homo sapiens
tcttgtgctaagggg

SEQ ID NO: 1093033 - DNA, 15 bp, Homo sapiens
ctcttgtgctaaggg

SEQ ID NO: 1093034 - DNA, 15 bp, Homo sapiens
gctcttgtgctaagg

SEQ ID NO: 1093035 - DNA, 15 bp, Homo sapiens
tgctcttgtgctaag

SEQ ID NO: 1093036 - DNA, 15 bp, Homo sapiens
gtgctcttgtgctaa

SEQ ID NO: 1093037 - DNA, 15 bp, Homo sapiens
tgtgctcttgtgcta

SEQ ID NO: 1093038 - DNA, 15 bp, Homo sapiens
ctgtgctcttgtgct

SEQ ID NO: 1093039 - DNA, 15 bp, Homo sapiens
gctgtgctcttgtgc

SEQ ID NO: 1093040 - DNA, 15 bp, Homo sapiens
ggctgtgctcttgtg

SEQ ID NO: 1093041 - DNA, 15 bp, Homo sapiens
cggctgtgctcttgt

SEQ ID NO: 1093042 - DNA, 15 bp, Homo sapiens
ccggctgtgctcttg

SEQ ID NO: 1093043 - DNA, 15 bp, Homo sapiens
accggctgtgctctt

SEQ ID NO: 1093044 - DNA, 15 bp, Homo sapiens
gaccggctgtgctct

SEQ ID NO: 1093045 - DNA, 15 bp, Homo sapiens
agaccggctgtgctc

SEQ ID NO: 1093046 - DNA, 15 bp, Homo sapiens
gagaccggctgtgct

SEQ ID NO: 1093047 - DNA, 15 bp, Homo sapiens
tgagaccggctgtgc

SEQ ID NO: 1093048 - DNA, 15 bp, Homo sapiens
ttgagaccggctgtg

SEQ ID NO: 1093049 - DNA, 15 bp, Homo sapiens
cttgagaccggctgt

SEQ ID NO: 1093050 - DNA, 15 bp, Homo sapiens
acttgagaccggctg

SEQ ID NO: 1093051 - DNA, 15 bp, Homo sapiens
gacttgagaccggct

SEQ ID NO: 1093052 - DNA, 15 bp, Homo sapiens
agacttgagaccggc

SEQ ID NO: 1093053 - DNA, 15 bp, Homo sapiens
tagacttgagaccgg

SEQ ID NO: 1093054 - DNA, 15 bp, Homo sapiens
gtagacttgagaccg

SEQ ID NO: 1093055 - DNA, 15 bp, Homo sapiens
ggtagacttgagacc

SEQ ID NO: 1093056 - DNA, 15 bp, Homo sapiens
gggtagacttgagac

SEQ ID NO: 1093057 - DNA, 15 bp, Homo sapiens
agggtagacttgaga

SEQ ID NO: 1093058 - DNA, 15 bp, Homo sapiens
cagggtagacttgag

SEQ ID NO: 1093059 - DNA, 15 bp, Homo sapiens
gcagggtagacttga

SEQ ID NO: 1093060 - DNA, 15 bp, Homo sapiens
agcagggtagacttg

SEQ ID NO: 1093061 - DNA, 15 bp, Homo sapiens
cagcagggtagactt

SEQ ID NO: 1093062 - DNA, 15 bp, Homo sapiens
acagcagggtagact

SEQ ID NO: 1093063 - DNA, 15 bp, Homo sapiens
tacagcagggtagac

SEQ ID NO: 1093064 - DNA, 15 bp, Homo sapiens
ttacagcagggtaga

SEQ ID NO: 1093065 - DNA, 15 bp, Homo sapiens
cttacagcagggtag

SEQ ID NO: 1093066 - DNA, 15 bp, Homo sapiens
gcttacagcagggta

SEQ ID NO: 1093067 - DNA, 15 bp, Homo sapiens
tgcttacagcagggt

SEQ ID NO: 1093068 - DNA, 15 bp, Homo sapiens
ttgcttacagcaggg

SEQ ID NO: 1093069 - DNA, 15 bp, Homo sapiens
tttgcttacagcagg

SEQ ID NO: 1093070 - DNA, 15 bp, Homo sapiens
gtttgcttacagcag

SEQ ID NO: 1093071 - DNA, 15 bp, Homo sapiens
tgtttgcttacagca

SEQ ID NO: 1093072 - DNA, 15 bp, Homo sapiens
gtgtttgcttacagc

SEQ ID NO: 1093073 - DNA, 15 bp, Homo sapiens
agtgtttgcttacag

SEQ ID NO: 1093074 - DNA, 15 bp, Homo sapiens
aagtgtttgcttaca

SEQ ID NO: 1093075 - DNA, 15 bp, Homo sapiens
caagtgtttgcttac

SEQ ID NO: 1093076 - DNA, 15 bp, Homo sapiens
gcaagtgtttgctta

SEQ ID NO: 1093077 - DNA, 15 bp, Homo sapiens
tgcaagtgtttgctt

SEQ ID NO: 1093078 - DNA, 15 bp, Homo sapiens
ttgcaagtgtttgct

SEQ ID NO: 1093079 - DNA, 15 bp, Homo sapiens
gttgcaagtgtttgc

SEQ ID NO: 1093080 - DNA, 15 bp, Homo sapiens
tgttgcaagtgtttg

SEQ ID NO: 1093081 - DNA, 15 bp, Homo sapiens
atgttgcaagtgttt

SEQ ID NO: 1093082 - DNA, 15 bp, Homo sapiens
gatgttgcaagtgtt

SEQ ID NO: 1093083 - DNA, 15 bp, Homo sapiens
tgatgttgcaagtgt

SEQ ID NO: 1093084 - DNA, 15 bp, Homo sapiens
atgatgttgcaagtg

SEQ ID NO: 1093085 - DNA, 15 bp, Homo sapiens
catgatgttgcaagt

SEQ ID NO: 1093086 - DNA, 15 bp, Homo sapiens
gcatgatgttgcaag

SEQ ID NO: 1093087 - DNA, 15 bp, Homo sapiens
agcatgatgttgcaa

SEQ ID NO: 1093088 - DNA, 15 bp, Homo sapiens
cagcatgatgttgca

SEQ ID NO: 1093089 - DNA, 15 bp, Homo sapiens
tcagcatgatgttgc

SEQ ID NO: 1093090 - DNA, 15 bp, Homo sapiens
gtcagcatgatgttg

SEQ ID NO: 1093091 - DNA, 15 bp, Homo sapiens
ggtcagcatgatgtt

SEQ ID NO: 1093092 - DNA, 15 bp, Homo sapiens
aggtcagcatgatgt

SEQ ID NO: 1093093 - DNA, 15 bp, Homo sapiens
gaggtcagcatgatg

SEQ ID NO: 1093094 - DNA, 15 bp, Homo sapiens
ggaggtcagcatgat

SEQ ID NO: 1093095 - DNA, 15 bp, Homo sapiens
tggaggtcagcatga

SEQ ID NO: 1093096 - DNA, 15 bp, Homo sapiens
ctggaggtcagcatg

SEQ ID NO: 1093097 - DNA, 15 bp, Homo sapiens
cctggaggtcagcat

SEQ ID NO: 1093098 - DNA, 15 bp, Homo sapiens
gcctggaggtcagca

SEQ ID NO: 1093099 - DNA, 15 bp, Homo sapiens
ggcctggaggtcagc

SEQ ID NO: 1093100 - DNA, 15 bp, Homo sapiens
gggcctggaggtcag

SEQ ID NO: 1093101 - DNA, 15 bp, Homo sapiens
agggcctggaggtca

SEQ ID NO: 1093102 - DNA, 15 bp, Homo sapiens
cagggcctggaggtc

SEQ ID NO: 1093103 - DNA, 15 bp, Homo sapiens
acagggcctggaggt

SEQ ID NO: 1093104 - DNA, 15 bp, Homo sapiens
aacagggcctggagg

SEQ ID NO: 1093105 - DNA, 15 bp, Homo sapiens
caacagggcctggag

SEQ ID NO: 1093106 - DNA, 15 bp, Homo sapiens
gcaacagggcctgga

SEQ ID NO: 1093107 - DNA, 15 bp, Homo sapiens
tgcaacagggcctgg

SEQ ID NO: 1093108 - DNA, 15 bp, Homo sapiens
atgcaacagggcctg

SEQ ID NO: 1093109 - DNA, 15 bp, Homo sapiens
gatgcaacagggcct

SEQ ID NO: 1093110 - DNA, 15 bp, Homo sapiens
tgatgcaacagggcc

SEQ ID NO: 1093111 - DNA, 15 bp, Homo sapiens
ctgatgcaacagggc

SEQ ID NO: 1093112 - DNA, 15 bp, Homo sapiens
gctgatgcaacaggg

SEQ ID NO: 1093113 - DNA, 15 bp, Homo sapiens
cgctgatgcaacagg

SEQ ID NO: 1093114 - DNA, 15 bp, Homo sapiens
acgctgatgcaacag

SEQ ID NO: 1093115 - DNA, 15 bp, Homo sapiens
cacgctgatgcaaca

SEQ ID NO: 1093116 - DNA, 15 bp, Homo sapiens
gcacgctgatgcaac

SEQ ID NO: 1093117 - DNA, 15 bp, Homo sapiens
ggcacgctgatgcaa

SEQ ID NO: 1093118 - DNA, 15 bp, Homo sapiens
gggcacgctgatgca

SEQ ID NO: 1093119 - DNA, 15 bp, Homo sapiens
tgggcacgctgatgc

SEQ ID NO: 1093120 - DNA, 15 bp, Homo sapiens
gtgggcacgctgatg

SEQ ID NO: 1093121 - DNA, 15 bp, Homo sapiens
tgtgggcacgctgat

SEQ ID NO: 1093122 - DNA, 15 bp, Homo sapiens
gtgtgggcacgctga

SEQ ID NO: 1093123 - DNA, 15 bp, Homo sapiens
agtgtgggcacgctg

SEQ ID NO: 1093124 - DNA, 15 bp, Homo sapiens
aagtgtgggcacgct

SEQ ID NO: 1093125 - DNA, 15 bp, Homo sapiens
caagtgtgggcacgc

SEQ ID NO: 1093126 - DNA, 15 bp, Homo sapiens
ccaagtgtgggcacg

SEQ ID NO: 1093127 - DNA, 15 bp, Homo sapiens
accaagtgtgggcac

SEQ ID NO: 1093128 - DNA, 15 bp, Homo sapiens
caccaagtgtgggca

SEQ ID NO: 1093129 - DNA, 15 bp, Homo sapiens
gcaccaagtgtgggc

SEQ ID NO: 1093130 - DNA, 15 bp, Homo sapiens
ggcaccaagtgtggg

SEQ ID NO: 1093131 - DNA, 15 bp, Homo sapiens
gggcaccaagtgtgg

SEQ ID NO: 1093132 - DNA, 15 bp, Homo sapiens
tgggcaccaagtgtg

SEQ ID NO: 1093133 - DNA, 15 bp, Homo sapiens
ctgggcaccaagtgt

SEQ ID NO: 1093134 - DNA, 15 bp, Homo sapiens
gctgggcaccaagtg

SEQ ID NO: 1093135 - DNA, 15 bp, Homo sapiens
agctgggcaccaagt

SEQ ID NO: 1093136 - DNA, 15 bp, Homo sapiens
cagctgggcaccaag

SEQ ID NO: 1093137 - DNA, 15 bp, Homo sapiens
ccagctgggcaccaa

SEQ ID NO: 1093138 - DNA, 15 bp, Homo sapiens
accagctgggcacca

SEQ ID NO: 1093139 - DNA, 15 bp, Homo sapiens
taccagctgggcacc

SEQ ID NO: 1093140 - DNA, 15 bp, Homo sapiens
gtaccagctgggcac

SEQ ID NO: 1093141 - DNA, 15 bp, Homo sapiens
agtaccagctgggca

SEQ ID NO: 1093142 - DNA, 15 bp, Homo sapiens
cagtaccagctgggc

SEQ ID NO: 1093143 - DNA, 15 bp, Homo sapiens
tcagtaccagctggg

SEQ ID NO: 1093144 - DNA, 15 bp, Homo sapiens
ctcagtaccagctgg

SEQ ID NO: 1093145 - DNA, 15 bp, Homo sapiens
cctcagtaccagctg

SEQ ID NO: 1093146 - DNA, 15 bp, Homo sapiens
ccctcagtaccagct

SEQ ID NO: 1093147 - DNA, 15 bp, Homo sapiens
accctcagtaccagc

SEQ ID NO: 1093148 - DNA, 15 bp, Homo sapiens
taccctcagtaccag

SEQ ID NO: 1093149 - DNA, 15 bp, Homo sapiens
ataccctcagtacca

SEQ ID NO: 1093150 - DNA, 15 bp, Homo sapiens
gataccctcagtacc

SEQ ID NO: 1093151 - DNA, 15 bp, Homo sapiens
tgataccctcagtac

SEQ ID NO: 1093152 - DNA, 15 bp, Homo sapiens
ctgataccctcagta

SEQ ID NO: 1093153 - DNA, 15 bp, Homo sapiens
cctgataccctcagt

SEQ ID NO: 1093154 - DNA, 15 bp, Homo sapiens
ccctgataccctcag

SEQ ID NO: 1093155 - DNA, 15 bp, Homo sapiens
tccctgataccctca

SEQ ID NO: 1093156 - DNA, 15 bp, Homo sapiens
ttccctgataccctc

SEQ ID NO: 1093157 - DNA, 15 bp, Homo sapiens
gttccctgataccct

SEQ ID NO: 1093158 - DNA, 15 bp, Homo sapiens
tgttccctgataccc

SEQ ID NO: 1093159 - DNA, 15 bp, Homo sapiens
ctgttccctgatacc

SEQ ID NO: 1093160 - DNA, 15 bp, Homo sapiens
cctgttccctgatac

SEQ ID NO: 1093161 - DNA, 15 bp, Homo sapiens
gcctgttccctgata

SEQ ID NO: 1093162 - DNA, 15 bp, Homo sapiens
ggcctgttccctgat

SEQ ID NO: 1093163 - DNA, 15 bp, Homo sapiens
tggcctgttccctga

SEQ ID NO: 1093164 - DNA, 15 bp, Homo sapiens
ctggcctgttccctg

SEQ ID NO: 1093165 - DNA, 15 bp, Homo sapiens
actggcctgttccct

SEQ ID NO: 1093166 - DNA, 15 bp, Homo sapiens
cactggcctgttccc

SEQ ID NO: 1093167 - DNA, 15 bp, Homo sapiens
ccactggcctgttcc

SEQ ID NO: 1093168 - DNA, 15 bp, Homo sapiens
accactggcctgttc

SEQ ID NO: 1093169 - DNA, 15 bp, Homo sapiens
caccactggcctgtt

SEQ ID NO: 1093170 - DNA, 15 bp, Homo sapiens
ccaccactggcctgt

SEQ ID NO: 1093171 - DNA, 15 bp, Homo sapiens
tccaccactggcctg

SEQ ID NO: 1093172 - DNA, 15 bp, Homo sapiens
ttccaccactggcct

SEQ ID NO: 1093173 - DNA, 15 bp, Homo sapiens
cttccaccactggcc

SEQ ID NO: 1093174 - DNA, 15 bp, Homo sapiens
ccttccaccactggc

SEQ ID NO: 1093175 - DNA, 15 bp, Homo sapiens
cccttccaccactgg

SEQ ID NO: 1093176 - DNA, 15 bp, Homo sapiens
gcccttccaccactg

SEQ ID NO: 1093177 - DNA, 15 bp, Homo sapiens
cgcccttccaccact

SEQ ID NO: 1093178 - DNA, 15 bp, Homo sapiens
ccgcccttccaccac

SEQ ID NO: 1093179 - DNA, 15 bp, Homo sapiens
tccgcccttccacca

SEQ ID NO: 1093180 - DNA, 15 bp, Homo sapiens
gtccgcccttccacc

SEQ ID NO: 1093181 - DNA, 15 bp, Homo sapiens
tgtccgcccttccac

SEQ ID NO: 1093182 - DNA, 15 bp, Homo sapiens
gtgtccgcccttcca

SEQ ID NO: 1093183 - DNA, 15 bp, Homo sapiens
agtgtccgcccttcc

SEQ ID NO: 1093184 - DNA, 15 bp, Homo sapiens
aagtgtccgcccttc

SEQ ID NO: 1093185 - DNA, 15 bp, Homo sapiens
aaagtgtccgccctt

SEQ ID NO: 1093186 - DNA, 15 bp, Homo sapiens
caaagtgtccgccct

SEQ ID NO: 1093187 - DNA, 15 bp, Homo sapiens
ccaaagtgtccgccc

SEQ ID NO: 1093188 - DNA, 15 bp, Homo sapiens
cccaaagtgtccgcc

SEQ ID NO: 1093189 - DNA, 15 bp, Homo sapiens
acccaaagtgtccgc

SEQ ID NO: 1093190 - DNA, 15 bp, Homo sapiens
aacccaaagtgtccg

SEQ ID NO: 1093191 - DNA, 15 bp, Homo sapiens
gaacccaaagtgtcc

SEQ ID NO: 1093192 - DNA, 15 bp, Homo sapiens
ggaacccaaagtgtc

SEQ ID NO: 1093193 - DNA, 15 bp, Homo sapiens
gggaacccaaagtgt

SEQ ID NO: 1093194 - DNA, 15 bp, Homo sapiens
agggaacccaaagtg

SEQ ID NO: 1093195 - DNA, 15 bp, Homo sapiens
cagggaacccaaagt

SEQ ID NO: 1093196 - DNA, 15 bp, Homo sapiens
ccagggaacccaaag

SEQ ID NO: 1093197 - DNA, 15 bp, Homo sapiens
accagggaacccaaa

SEQ ID NO: 1093198 - DNA, 15 bp, Homo sapiens
aaccagggaacccaa

SEQ ID NO: 1093199 - DNA, 15 bp, Homo sapiens
aaaccagggaaccca

SEQ ID NO: 1093200 - DNA, 15 bp, Homo sapiens
gaaaccagggaaccc

SEQ ID NO: 1093201 - DNA, 15 bp, Homo sapiens
ggaaaccagggaacc

SEQ ID NO: 1093202 - DNA, 15 bp, Homo sapiens
aggaaaccagggaac

SEQ ID NO: 1093203 - DNA, 15 bp, Homo sapiens
caggaaaccagggaa

SEQ ID NO: 1093204 - DNA, 15 bp, Homo sapiens
ccaggaaaccaggga

SEQ ID NO: 1093205 - DNA, 15 bp, Homo sapiens
gccaggaaaccaggg

SEQ ID NO: 1093206 - DNA, 15 bp, Homo sapiens
agccaggaaaccagg

SEQ ID NO: 1093207 - DNA, 15 bp, Homo sapiens
gagccaggaaaccag

SEQ ID NO: 1093208 - DNA, 15 bp, Homo sapiens
ggagccaggaaacca

SEQ ID NO: 1093209 - DNA, 15 bp, Homo sapiens
gggagccaggaaacc

SEQ ID NO: 1093210 - DNA, 15 bp, Homo sapiens
tgggagccaggaaac

SEQ ID NO: 1093211 - DNA, 15 bp, Homo sapiens
ttgggagccaggaaa

SEQ ID NO: 1093212 - DNA, 15 bp, Homo sapiens
attgggagccaggaa

SEQ ID NO: 1093213 - DNA, 15 bp, Homo sapiens
tattgggagccagga

SEQ ID NO: 1093214 - DNA, 15 bp, Homo sapiens
atattgggagccagg

SEQ ID NO: 1093215 - DNA, 15 bp, Homo sapiens
gatattgggagccag

SEQ ID NO: 1093216 - DNA, 15 bp, Homo sapiens
agatattgggagcca

SEQ ID NO: 1093217 - DNA, 15 bp, Homo sapiens
aagatattgggagcc

SEQ ID NO: 1093218 - DNA, 15 bp, Homo sapiens
aaagatattgggagc

SEQ ID NO: 1093219 - DNA, 15 bp, Homo sapiens
gaaagatattgggag

SEQ ID NO: 1093220 - DNA, 15 bp, Homo sapiens
ggaaagatattggga

SEQ ID NO: 1093221 - DNA, 15 bp, Homo sapiens
gggaaagatattggg

SEQ ID NO: 1093222 - DNA, 15 bp, Homo sapiens
tgggaaagatattgg

SEQ ID NO: 1093223 - DNA, 15 bp, Homo sapiens
ttgggaaagatattg

SEQ ID NO: 1093224 - DNA, 15 bp, Homo sapiens
attgggaaagatatt

SEQ ID NO: 1093225 - DNA, 15 bp, Homo sapiens
cattgggaaagatat

SEQ ID NO: 1093226 - DNA, 15 bp, Homo sapiens
ccattgggaaagata

SEQ ID NO: 1093227 - DNA, 15 bp, Homo sapiens
gccattgggaaagat

SEQ ID NO: 1093228 - DNA, 15 bp, Homo sapiens
tgccattgggaaaga

SEQ ID NO: 1093229 - DNA, 15 bp, Homo sapiens
atgccattgggaaag

SEQ ID NO: 1093230 - DNA, 15 bp, Homo sapiens
tatgccattgggaaa

SEQ ID NO: 1093231 - DNA, 15 bp, Homo sapiens
atatgccattgggaa

SEQ ID NO: 1093232 - DNA, 15 bp, Homo sapiens
catatgccattggga

SEQ ID NO: 1093233 - DNA, 15 bp, Homo sapiens
ccatatgccattggg

SEQ ID NO: 1093234 - DNA, 15 bp, Homo sapiens
cccatatgccattgg

SEQ ID NO: 1093235 - DNA, 15 bp, Homo sapiens
ccccatatgccattg

SEQ ID NO: 1093236 - DNA, 15 bp, Homo sapiens
accccatatgccatt

SEQ ID NO: 1093237 - DNA, 15 bp, Homo sapiens
gaccccatatgccat

SEQ ID NO: 1093238 - DNA, 15 bp, Homo sapiens
agaccccatatgcca

SEQ ID NO: 1093239 - DNA, 15 bp, Homo sapiens
tagaccccatatgcc

SEQ ID NO: 1093240 - DNA, 15 bp, Homo sapiens
ctagaccccatatgc

SEQ ID NO: 1093241 - DNA, 15 bp, Homo sapiens
gctagaccccatatg

SEQ ID NO: 1093242 - DNA, 15 bp, Homo sapiens
tgctagaccccatat

SEQ ID NO: 1093243 - DNA, 15 bp, Homo sapiens
ctgctagaccccata

SEQ ID NO: 1093244 - DNA, 15 bp, Homo sapiens
gctgctagaccccat

SEQ ID NO: 1093245 - DNA, 15 bp, Homo sapiens
agctgctagacccca

SEQ ID NO: 1093246 - DNA, 15 bp, Homo sapiens
aagctgctagacccc

SEQ ID NO: 1093247 - DNA, 15 bp, Homo sapiens
caagctgctagaccc

SEQ ID NO: 1093248 - DNA, 15 bp, Homo sapiens
ccaagctgctagacc

SEQ ID NO: 1093249 - DNA, 15 bp, Homo sapiens
gccaagctgctagac

SEQ ID NO: 1093250 - DNA, 15 bp, Homo sapiens
agccaagctgctaga

SEQ ID NO: 1093251 - DNA, 15 bp, Homo sapiens
gagccaagctgctag

SEQ ID NO: 1093252 - DNA, 15 bp, Homo sapiens
tgagccaagctgcta

SEQ ID NO: 1093253 - DNA, 15 bp, Homo sapiens
atgagccaagctgct

SEQ ID NO: 1093254 - DNA, 15 bp, Homo sapiens
aatgagccaagctgc

SEQ ID NO: 1093255 - DNA, 15 bp, Homo sapiens
aaatgagccaagctg

SEQ ID NO: 1093256 - DNA, 15 bp, Homo sapiens
taaatgagccaagct

SEQ ID NO: 1093257 - DNA, 15 bp, Homo sapiens
ttaaatgagccaagc

SEQ ID NO: 1093258 - DNA, 15 bp, Homo sapiens
gttaaatgagccaag

SEQ ID NO: 1093259 - DNA, 15 bp, Homo sapiens
agttaaatgagccaa

SEQ ID NO: 1093260 - DNA, 15 bp, Homo sapiens
cagttaaatgagcca

SEQ ID NO: 1093261 - DNA, 15 bp, Homo sapiens
acagttaaatgagcc

SEQ ID NO: 1093262 - DNA, 15 bp, Homo sapiens
cacagttaaatgagc

SEQ ID NO: 1093263 - DNA, 15 bp, Homo sapiens
tcacagttaaatgag

SEQ ID NO: 1093264 - DNA, 15 bp, Homo sapiens
ttcacagttaaatga

SEQ ID NO: 1093265 - DNA, 15 bp, Homo sapiens
gttcacagttaaatg

SEQ ID NO: 1093266 - DNA, 15 bp, Homo sapiens
ggttcacagttaaat

SEQ ID NO: 1093267 - DNA, 15 bp, Homo sapiens
aggttcacagttaaa

SEQ ID NO: 1093268 - DNA, 15 bp, Homo sapiens
gaggttcacagttaa

SEQ ID NO: 1093269 - DNA, 15 bp, Homo sapiens
agaggttcacagtta

SEQ ID NO: 1093270 - DNA, 15 bp, Homo sapiens
tagaggttcacagtt

SEQ ID NO: 1093271 - DNA, 15 bp, Homo sapiens
gtagaggttcacagt

SEQ ID NO: 1093272 - DNA, 15 bp, Homo sapiens
ggtagaggttcacag

SEQ ID NO: 1093273 - DNA, 15 bp, Homo sapiens
gggtagaggttcaca

SEQ ID NO: 1093274 - DNA, 15 bp, Homo sapiens
agggtagaggttcac

SEQ ID NO: 1093275 - DNA, 15 bp, Homo sapiens
aagggtagaggttca

SEQ ID NO: 1093276 - DNA, 15 bp, Homo sapiens
aaagggtagaggttc

SEQ ID NO: 1093277 - DNA, 15 bp, Homo sapiens
taaagggtagaggtt

SEQ ID NO: 1093278 - DNA, 15 bp, Homo sapiens
ctaaagggtagaggt

SEQ ID NO: 1093279 - DNA, 15 bp, Homo sapiens
tctaaagggtagagg

SEQ ID NO: 1093280 - DNA, 15 bp, Homo sapiens
attctaaagggtaga

SEQ ID NO: 1093281 - DNA, 15 bp, Homo sapiens
gattctaaagggtag

SEQ ID NO: 1093282 - DNA, 15 bp, Homo sapiens
agattctaaagggta

SEQ ID NO: 1093283 - DNA, 15 bp, Homo sapiens
cagattctaaagggt

SEQ ID NO: 1093284 - DNA, 15 bp, Homo sapiens
ccagattctaaaggg

SEQ ID NO: 1093285 - DNA, 15 bp, Homo sapiens
cccagattctaaagg

SEQ ID NO: 1093286 - DNA, 15 bp, Homo sapiens
gcccagattctaaag

SEQ ID NO: 1093287 - DNA, 15 bp, Homo sapiens
ggcccagattctaaa

SEQ ID NO: 1093288 - DNA, 15 bp, Homo sapiens
aggcccagattctaa

SEQ ID NO: 1093289 - DNA, 15 bp, Homo sapiens
gaggcccagattcta

SEQ ID NO: 1093290 - DNA, 15 bp, Homo sapiens
ggaggcccagattct

SEQ ID NO: 1093291 - DNA, 15 bp, Homo sapiens
tggaggcccagattc

SEQ ID NO: 1093292 - DNA, 15 bp, Homo sapiens
ctggaggcccagatt

SEQ ID NO: 1093293 - DNA, 15 bp, Homo sapiens
cctggaggcccagat

SEQ ID NO: 1093294 - DNA, 15 bp, Homo sapiens
gcctggaggcccaga

SEQ ID NO: 1093295 - DNA, 15 bp, Homo sapiens
agcctggaggcccag

SEQ ID NO: 1093296 - DNA, 15 bp, Homo sapiens
aagcctggaggccca

SEQ ID NO: 1093297 - DNA, 15 bp, Homo sapiens
caagcctggaggccc

SEQ ID NO: 1093298 - DNA, 15 bp, Homo sapiens
gcaagcctggaggcc

SEQ ID NO: 1093299 - DNA, 15 bp, Homo sapiens
agcaagcctggaggc

SEQ ID NO: 1093300 - DNA, 15 bp, Homo sapiens
aagcaagcctggagg

SEQ ID NO: 1093301 - DNA, 15 bp, Homo sapiens
gaagcaagcctggag

SEQ ID NO: 1093302 - DNA, 15 bp, Homo sapiens
agaagcaagcctgga

SEQ ID NO: 1093303 - DNA, 15 bp, Homo sapiens
cagaagcaagcctgg

SEQ ID NO: 1093304 - DNA, 15 bp, Homo sapiens
acagaagcaagcctg

SEQ ID NO: 1093305 - DNA, 15 bp, Homo sapiens
cacagaagcaagcct

SEQ ID NO: 1093306 - DNA, 15 bp, Homo sapiens
gcacagaagcaagcc

SEQ ID NO: 1093307 - DNA, 15 bp, Homo sapiens
tgcacagaagcaagc

SEQ ID NO: 1093308 - DNA, 15 bp, Homo sapiens
ttgcacagaagcaag

SEQ ID NO: 1093309 - DNA, 15 bp, Homo sapiens
tttgcacagaagcaa

SEQ ID NO: 1093310 - DNA, 15 bp, Homo sapiens
ttttgcacagaagca

SEQ ID NO: 1093311 - DNA, 15 bp, Homo sapiens
attttgcacagaagc

SEQ ID NO: 1093312 - DNA, 15 bp, Homo sapiens
cattttgcacagaag

SEQ ID NO: 1093313 - DNA, 15 bp, Homo sapiens
ccattttgcacagaa

SEQ ID NO: 1093314 - DNA, 15 bp, Homo sapiens
gccattttgcacaga

SEQ ID NO: 1093315 - DNA, 15 bp, Homo sapiens
tgccattttgcacag

SEQ ID NO: 1093316 - DNA, 15 bp, Homo sapiens
ctgccattttgcaca

SEQ ID NO: 1093317 - DNA, 15 bp, Homo sapiens
tctgccattttgcac

SEQ ID NO: 1093318 - DNA, 15 bp, Homo sapiens
atctgccattttgca

SEQ ID NO: 1093319 - DNA, 15 bp, Homo sapiens
tatctgccattttgc

SEQ ID NO: 1093320 - DNA, 15 bp, Homo sapiens
ttatctgccattttg

SEQ ID NO: 1093321 - DNA, 15 bp, Homo sapiens
cttatctgccatttt

SEQ ID NO: 1093322 - DNA, 15 bp, Homo sapiens
ccttatctgccattt

SEQ ID NO: 1093323 - DNA, 15 bp, Homo sapiens
gccttatctgccatt

SEQ ID NO: 1093324 - DNA, 15 bp, Homo sapiens
agccttatctgccat

SEQ ID NO: 1093325 - DNA, 15 bp, Homo sapiens
gagccttatctgcca

SEQ ID NO: 1093326 - DNA, 15 bp, Homo sapiens
tgagccttatctgcc

SEQ ID NO: 1093327 - DNA, 15 bp, Homo sapiens
ttgagccttatctgc

SEQ ID NO: 1093328 - DNA, 15 bp, Homo sapiens
gttgagccttatctg

SEQ ID NO: 1093329 - DNA, 15 bp, Homo sapiens
ggttgagccttatct

SEQ ID NO: 1093330 - DNA, 15 bp, Homo sapiens
aggttgagccttatc

SEQ ID NO: 1093331 - DNA, 15 bp, Homo sapiens
aaggttgagccttat

SEQ ID NO: 1093332 - DNA, 15 bp, Homo sapiens
aaaggttgagcctta

SEQ ID NO: 1093333 - DNA, 15 bp, Homo sapiens
gaaaggttgagcctt

SEQ ID NO: 1093334 - DNA, 15 bp, Homo sapiens
agaaaggttgagcct

SEQ ID NO: 1093335 - DNA, 15 bp, Homo sapiens
aagaaaggttgagcc

SEQ ID NO: 1093336 - DNA, 15 bp, Homo sapiens
aaagaaaggttgagc

SEQ ID NO: 1093337 - DNA, 15 bp, Homo sapiens
aaaagaaaggttgag

SEQ ID NO: 1093338 - DNA, 15 bp, Homo sapiens
aaaaagaaaggttga

SEQ ID NO: 1093339 - DNA, 15 bp, Homo sapiens
aaaaaagaaaggttg

SEQ ID NO: 1093340 - DNA, 15 bp, Homo sapiens
aaaaaaagaaaggtt

SEQ ID NO: 1093341 - DNA, 15 bp, Homo sapiens
taaaaaaagaaaggt

SEQ ID NO: 1093342 - DNA, 15 bp, Homo sapiens
ttaaaaaaagaaagg

SEQ ID NO: 1093343 - DNA, 15 bp, Homo sapiens
gttaaaaaaagaaag

SEQ ID NO: 1093344 - DNA, 15 bp, Homo sapiens
agttaaaaaaagaaa

SEQ ID NO: 1093345 - DNA, 15 bp, Homo sapiens
aagttaaaaaaagaa

SEQ ID NO: 1093346 - DNA, 15 bp, Homo sapiens
gaagttaaaaaaaga

SEQ ID NO: 1093347 - DNA, 15 bp, Homo sapiens
tgaagttaaaaaaag

SEQ ID NO: 1093348 - DNA, 15 bp, Homo sapiens
atgaagttaaaaaaa

SEQ ID NO: 1093349 - DNA, 15 bp, Homo sapiens
aatgaagttaaaaaa

SEQ ID NO: 1093350 - DNA, 15 bp, Homo sapiens
caatgaagttaaaaa

SEQ ID NO: 1093351 - DNA, 15 bp, Homo sapiens
acaatgaagttaaaa

SEQ ID NO: 1093352 - DNA, 15 bp, Homo sapiens
aacaatgaagttaaa

SEQ ID NO: 1093353 - DNA, 15 bp, Homo sapiens
taacaatgaagttaa

SEQ ID NO: 1093354 - DNA, 15 bp, Homo sapiens
ttaacaatgaagtta

SEQ ID NO: 1093355 - DNA, 15 bp, Homo sapiens
tttaacaatgaagtt

SEQ ID NO: 1093356 - DNA, 15 bp, Homo sapiens
atttaacaatgaagt

SEQ ID NO: 1093357 - DNA, 15 bp, Homo sapiens
tatttaacaatgaag

SEQ ID NO: 1093358 - DNA, 15 bp, Homo sapiens
atatttaacaatgaa

SEQ ID NO: 1093359 - DNA, 15 bp, Homo sapiens
aatatttaacaatga

SEQ ID NO: 1093360 - DNA, 15 bp, Homo sapiens
taatatttaacaatg

SEQ ID NO: 1093361 - DNA, 15 bp, Homo sapiens
gtaatatttaacaat

SEQ ID NO: 1093362 - DNA, 15 bp, Homo sapiens
agtaatatttaacaa

SEQ ID NO: 1093363 - DNA, 15 bp, Homo sapiens
gagtaatatttaaca

SEQ ID NO: 1093364 - DNA, 15 bp, Homo sapiens
ggagtaatatttaac

SEQ ID NO: 1093365 - DNA, 15 bp, Homo sapiens
tggagtaatatttaa

SEQ ID NO: 1093366 - DNA, 15 bp, Homo sapiens
atggagtaatattta

SEQ ID NO: 1093367 - DNA, 15 bp, Homo sapiens
aatggagtaatattt

SEQ ID NO: 1093368 - DNA, 15 bp, Homo sapiens
taatggagtaatatt

SEQ ID NO: 1093369 - DNA, 15 bp, Homo sapiens
ttaatggagtaatat

SEQ ID NO: 1093370 - DNA, 15 bp, Homo sapiens
attaatggagtaata

SEQ ID NO: 1093371 - DNA, 15 bp, Homo sapiens
tattaatggagtaat

SEQ ID NO: 1093372 - DNA, 15 bp, Homo sapiens
gtattaatggagtaa

SEQ ID NO: 1093373 - DNA, 15 bp, Homo sapiens
ggtattaatggagta

SEQ ID NO: 1093374 - DNA, 15 bp, Homo sapiens
gggtattaatggagt

SEQ ID NO: 1093375 - DNA, 15 bp, Homo sapiens
tgggtattaatggag

SEQ ID NO: 1093376 - DNA, 15 bp, Homo sapiens
atgggtattaatgga

SEQ ID NO: 1093377 - DNA, 15 bp, Homo sapiens
aatgggtattaatgg

SEQ ID NO: 1093378 - DNA, 15 bp, Homo sapiens
aaatgggtattaatg

SEQ ID NO: 1093379 - DNA, 15 bp, Homo sapiens
taaatgggtattaat

SEQ ID NO: 1093380 - DNA, 15 bp, Homo sapiens
gtaaatgggtattaa

SEQ ID NO: 1093381 - DNA, 15 bp, Homo sapiens
agtaaatgggtatta

SEQ ID NO: 1093382 - DNA, 15 bp, Homo sapiens
cagtaaatgggtatt

SEQ ID NO: 1093383 - DNA, 15 bp, Homo sapiens
gcagtaaatgggtat

SEQ ID NO: 1093384 - DNA, 15 bp, Homo sapiens
tgcagtaaatgggta

SEQ ID NO: 1093385 - DNA, 15 bp, Homo sapiens
ctgcagtaaatgggt

SEQ ID NO: 1093386 - DNA, 15 bp, Homo sapiens
tctgcagtaaatggg

SEQ ID NO: 1093387 - DNA, 15 bp, Homo sapiens
ttctgcagtaaatgg

SEQ ID NO: 1093388 - DNA, 15 bp, Homo sapiens
tttctgcagtaaatg

SEQ ID NO: 1093389 - DNA, 15 bp, Homo sapiens
ttttctgcagtaaat

SEQ ID NO: 1093390 - DNA, 15 bp, Homo sapiens
cttttctgcagtaaa

SEQ ID NO: 1093391 - DNA, 15 bp, Homo sapiens
ccttttctgcagtaa

SEQ ID NO: 1093392 - DNA, 15 bp, Homo sapiens
accttttctgcagta

SEQ ID NO: 1093393 - DNA, 15 bp, Homo sapiens
taccttttctgcagt

SEQ ID NO: 1093394 - DNA, 15 bp, Homo sapiens
ctaccttttctgcag

SEQ ID NO: 1093395 - DNA, 15 bp, Homo sapiens
cctaccttttctgca

SEQ ID NO: 1093396 - DNA, 15 bp, Homo sapiens
tcctaccttttctgc

SEQ ID NO: 1093397 - DNA, 15 bp, Homo sapiens
ttcctaccttttctg

SEQ ID NO: 1093398 - DNA, 15 bp, Homo sapiens
tttcctaccttttct

SEQ ID NO: 1093399 - DNA, 15 bp, Homo sapiens
atttcctaccttttc

SEQ ID NO: 1093400 - DNA, 15 bp, Homo sapiens
tatttcctacctttt

SEQ ID NO: 1093401 - DNA, 15 bp, Homo sapiens
gtatttcctaccttt

SEQ ID NO: 1093402 - DNA, 15 bp, Homo sapiens
tgtatttcctacctt

SEQ ID NO: 1093403 - DNA, 15 bp, Homo sapiens
ctgtatttcctacct

SEQ ID NO: 1093404 - DNA, 15 bp, Homo sapiens
tctgtatttcctacc

SEQ ID NO: 1093405 - DNA, 15 bp, Homo sapiens
atctgtatttcctac

SEQ ID NO: 1093406 - DNA, 15 bp, Homo sapiens
tatctgtatttccta

SEQ ID NO: 1093407 - DNA, 15 bp, Homo sapiens
ttatctgtatttcct

SEQ ID NO: 1093408 - DNA, 15 bp, Homo sapiens
cttatctgtatttcc

SEQ ID NO: 1093409 - DNA, 15 bp, Homo sapiens
gcttatctgtatttc

SEQ ID NO: 1093410 - DNA, 15 bp, Homo sapiens
tgcttatctgtattt

SEQ ID NO: 1093411 - DNA, 15 bp, Homo sapiens
ttgcttatctgtatt

SEQ ID NO: 1093412 - DNA, 15 bp, Homo sapiens
tttgcttatctgtat

SEQ ID NO: 1093413 - DNA, 15 bp, Homo sapiens
ttttgcttatctgta

SEQ ID NO: 1093414 - DNA, 15 bp, Homo sapiens
tttttgcttatctgt

SEQ ID NO: 1093415 - DNA, 15 bp, Homo sapiens
ctttttgcttatctg

SEQ ID NO: 1093416 - DNA, 15 bp, Homo sapiens
cctttttgcttatct

SEQ ID NO: 1093417 - DNA, 15 bp, Homo sapiens
tcctttttgcttatc

SEQ ID NO: 1093418 - DNA, 15 bp, Homo sapiens
ttcctttttgcttat

SEQ ID NO: 1093419 - DNA, 15 bp, Homo sapiens
tttcctttttgctta

SEQ ID NO: 1093420 - DNA, 15 bp, Homo sapiens
ttttcctttttgctt

SEQ ID NO: 1093421 - DNA, 15 bp, Homo sapiens
attttcctttttgct

SEQ ID NO: 1093422 - DNA, 15 bp, Homo sapiens
tattttcctttttgc

SEQ ID NO: 1093423 - DNA, 15 bp, Homo sapiens
ttattttcctttttg

SEQ ID NO: 1093424 - DNA, 15 bp, Homo sapiens
tttattttccttttt

SEQ ID NO: 1093425 - DNA, 15 bp, Homo sapiens
atttattttcctttt

SEQ ID NO: 1093426 - DNA, 15 bp, Homo sapiens
aatttattttccttt

SEQ ID NO: 1093427 - DNA, 15 bp, Homo sapiens
taatttattttcctt

SEQ ID NO: 1093428 - DNA, 15 bp, Homo sapiens
ttaatttattttcct

SEQ ID NO: 1093429 - DNA, 15 bp, Homo sapiens
tttaatttattttcc

SEQ ID NO: 1093430 - DNA, 15 bp, Homo sapiens
ttttaatttattttc

SEQ ID NO: 1093431 - DNA, 15 bp, Homo sapiens
attttaatttatttt

SEQ ID NO: 1093432 - DNA, 15 bp, Homo sapiens
gattttaatttattt

SEQ ID NO: 1093433 - DNA, 15 bp, Homo sapiens
ggattttaatttatt

SEQ ID NO: 1093434 - DNA, 15 bp, Homo sapiens
aggattttaatttat

SEQ ID NO: 1093435 - DNA, 15 bp, Homo sapiens
gaggattttaattta

SEQ ID NO: 1093436 - DNA, 15 bp, Homo sapiens
tgaggattttaattt

SEQ ID NO: 1093437 - DNA, 15 bp, Homo sapiens
atgaggattttaatt

SEQ ID NO: 1093438 - DNA, 15 bp, Homo sapiens
tatgaggattttaat

SEQ ID NO: 1093439 - DNA, 15 bp, Homo sapiens
gtatgaggattttaa

SEQ ID NO: 1093440 - DNA, 15 bp, Homo sapiens
ggtatgaggatttta

SEQ ID NO: 1093441 - DNA, 15 bp, Homo sapiens
tggtatgaggatttt

SEQ ID NO: 1093442 - DNA, 15 bp, Homo sapiens
gtggtatgaggattt

SEQ ID NO: 1093443 - DNA, 15 bp, Homo sapiens
ggtggtatgaggatt

SEQ ID NO: 1093444 - DNA, 15 bp, Homo sapiens
tggtggtatgaggat

SEQ ID NO: 1093445 - DNA, 15 bp, Homo sapiens
atggtggtatgagga

SEQ ID NO: 1093446 - DNA, 15 bp, Homo sapiens
gatggtggtatgagg

SEQ ID NO: 1093447 - DNA, 15 bp, Homo sapiens
tgatggtggtatgag

SEQ ID NO: 1093448 - DNA, 15 bp, Homo sapiens
atgatggtggtatga

SEQ ID NO: 1093449 - DNA, 15 bp, Homo sapiens
gatgatggtggtatg

SEQ ID NO: 1093450 - DNA, 15 bp, Homo sapiens
tgatgatggtggtat

SEQ ID NO: 1093451 - DNA, 15 bp, Homo sapiens
ttgatgatggtggta

SEQ ID NO: 1093452 - DNA, 15 bp, Homo sapiens
cttgatgatggtggt

SEQ ID NO: 1093453 - DNA, 15 bp, Homo sapiens
tcttgatgatggtgg

SEQ ID NO: 1093454 - DNA, 15 bp, Homo sapiens
atcttgatgatggtg

SEQ ID NO: 1093455 - DNA, 15 bp, Homo sapiens
tatcttgatgatggt

SEQ ID NO: 1093456 - DNA, 15 bp, Homo sapiens
ttatcttgatgatgg

SEQ ID NO: 1093457 - DNA, 15 bp, Homo sapiens
attatcttgatgatg

SEQ ID NO: 1093458 - DNA, 15 bp, Homo sapiens
aattatcttgatgat

SEQ ID NO: 1093459 - DNA, 15 bp, Homo sapiens
taattatcttgatga

SEQ ID NO: 1093460 - DNA, 15 bp, Homo sapiens
gtaattatcttgatg

SEQ ID NO: 1093461 - DNA, 15 bp, Homo sapiens
agtaattatcttgat

SEQ ID NO: 1093462 - DNA, 15 bp, Homo sapiens
cagtaattatcttga

SEQ ID NO: 1093463 - DNA, 15 bp, Homo sapiens
acagtaattatcttg

SEQ ID NO: 1093464 - DNA, 15 bp, Homo sapiens
gacagtaattatctt

SEQ ID NO: 1093465 - DNA, 15 bp, Homo sapiens
tgacagtaattatct

SEQ ID NO: 1093466 - DNA, 15 bp, Homo sapiens
gtgacagtaattatc

SEQ ID NO: 1093467 - DNA, 15 bp, Homo sapiens
ggtgacagtaattat

SEQ ID NO: 1093468 - DNA, 15 bp, Homo sapiens
tggtgacagtaatta

SEQ ID NO: 1093469 - DNA, 15 bp, Homo sapiens
atggtgacagtaatt

SEQ ID NO: 1093470 - DNA, 15 bp, Homo sapiens
aatggtgacagtaat

SEQ ID NO: 1093471 - DNA, 15 bp, Homo sapiens
aaatggtgacagtaa

SEQ ID NO: 1093472 - DNA, 15 bp, Homo sapiens
aaaatggtgacagta

SEQ ID NO: 1093473 - DNA, 15 bp, Homo sapiens
caaaatggtgacagt

SEQ ID NO: 1093474 - DNA, 15 bp, Homo sapiens
ccaaaatggtgacag

SEQ ID NO: 1093475 - DNA, 15 bp, Homo sapiens
accaaaatggtgaca

SEQ ID NO: 1093476 - DNA, 15 bp, Homo sapiens
taccaaaatggtgac

SEQ ID NO: 1093477 - DNA, 15 bp, Homo sapiens
ataccaaaatggtga

SEQ ID NO: 1093478 - DNA, 15 bp, Homo sapiens
tataccaaaatggtg

SEQ ID NO: 1093479 - DNA, 15 bp, Homo sapiens
atataccaaaatggt

SEQ ID NO: 1093480 - DNA, 15 bp, Homo sapiens
aatataccaaaatgg

SEQ ID NO: 1093481 - DNA, 15 bp, Homo sapiens
aaatataccaaaatg

SEQ ID NO: 1093482 - DNA, 15 bp, Homo sapiens
gaaatataccaaaat

SEQ ID NO: 1093483 - DNA, 15 bp, Homo sapiens
ggaaatataccaaaa

SEQ ID NO: 1093484 - DNA, 15 bp, Homo sapiens
aggaaatataccaaa

SEQ ID NO: 1093485 - DNA, 15 bp, Homo sapiens
gaggaaatataccaa

SEQ ID NO: 1093486 - DNA, 15 bp, Homo sapiens
ggaggaaatatacca

SEQ ID NO: 1093487 - DNA, 15 bp, Homo sapiens
gggaggaaatatacc

SEQ ID NO: 1093488 - DNA, 15 bp, Homo sapiens
tgggaggaaatatac

SEQ ID NO: 1093489 - DNA, 15 bp, Homo sapiens
ttgggaggaaatata

SEQ ID NO: 1093490 - DNA, 15 bp, Homo sapiens
attgggaggaaatat

SEQ ID NO: 1093491 - DNA, 15 bp, Homo sapiens
tattgggaggaaata

SEQ ID NO: 1093492 - DNA, 15 bp, Homo sapiens
gtattgggaggaaat

SEQ ID NO: 1093493 - DNA, 15 bp, Homo sapiens
atgtattgggaggaa

SEQ ID NO: 1093494 - DNA, 15 bp, Homo sapiens
tatgtattgggagga

SEQ ID NO: 1093495 - DNA, 15 bp, Homo sapiens
atatgtattgggagg

SEQ ID NO: 1093496 - DNA, 15 bp, Homo sapiens
tatatgtattgggag

SEQ ID NO: 1093497 - DNA, 15 bp, Homo sapiens
atatatgtattggga

SEQ ID NO: 1093498 - DNA, 15 bp, Homo sapiens
aatatatgtattggg

SEQ ID NO: 1093499 - DNA, 15 bp, Homo sapiens
taatatatgtattgg

SEQ ID NO: 1093500 - DNA, 15 bp, Homo sapiens
ataatatatgtattg

SEQ ID NO: 1093501 - DNA, 15 bp, Homo sapiens
gataatatatgtatt

SEQ ID NO: 1093502 - DNA, 15 bp, Homo sapiens
agataatatatgtat

SEQ ID NO: 1093503 - DNA, 15 bp, Homo sapiens
tagataatatatgta

SEQ ID NO: 1093504 - DNA, 15 bp, Homo sapiens
atagataatatatgt

SEQ ID NO: 1093505 - DNA, 15 bp, Homo sapiens
tatagataatatatg

SEQ ID NO: 1093506 - DNA, 15 bp, Homo sapiens
atatagataatatat

SEQ ID NO: 1093507 - DNA, 15 bp, Homo sapiens
gatatagataatata

SEQ ID NO: 1093508 - DNA, 15 bp, Homo sapiens
cgatatagataatat

SEQ ID NO: 1093509 - DNA, 15 bp, Homo sapiens
acgatatagataata

SEQ ID NO: 1093510 - DNA, 15 bp, Homo sapiens
tacgatatagataat

SEQ ID NO: 1093511 - DNA, 15 bp, Homo sapiens
atacgatatagataa

SEQ ID NO: 1093512 - DNA, 15 bp, Homo sapiens
tatacgatatagata

SEQ ID NO: 1093513 - DNA, 15 bp, Homo sapiens
atatacgatatagat

SEQ ID NO: 1093514 - DNA, 15 bp, Homo sapiens
tatatacgatataga

SEQ ID NO: 1093515 - DNA, 15 bp, Homo sapiens
gtatatacgatatag

SEQ ID NO: 1093516 - DNA, 15 bp, Homo sapiens
cgtatatacgatata

SEQ ID NO: 1093517 - DNA, 15 bp, Homo sapiens
tcgtatatacgatat

SEQ ID NO: 1093518 - DNA, 15 bp, Homo sapiens
gtcgtatatacgata

SEQ ID NO: 1093519 - DNA, 15 bp, Homo sapiens
tgtcgtatatacgat

SEQ ID NO: 1093520 - DNA, 15 bp, Homo sapiens
ttgtcgtatatacga

SEQ ID NO: 1093521 - DNA, 15 bp, Homo sapiens
tttgtcgtatatacg

SEQ ID NO: 1093522 - DNA, 15 bp, Homo sapiens
ttttgtcgtatatac

SEQ ID NO: 1093523 - DNA, 15 bp, Homo sapiens
tttttgtcgtatata

SEQ ID NO: 1093524 - DNA, 15 bp, Homo sapiens
atttttgtcgtatat

SEQ ID NO: 1093525 - DNA, 15 bp, Homo sapiens
catttttgtcgtata

SEQ ID NO: 1093526 - DNA, 15 bp, Homo sapiens
ccatttttgtcgtat

SEQ ID NO: 1093527 - DNA, 15 bp, Homo sapiens
tccatttttgtcgta

SEQ ID NO: 1093528 - DNA, 15 bp, Homo sapiens
atccatttttgtcgt

SEQ ID NO: 1093529 - DNA, 15 bp, Homo sapiens
gatccatttttgtcg

SEQ ID NO: 1093530 - DNA, 15 bp, Homo sapiens
tgatccatttttgtc

SEQ ID NO: 1093531 - DNA, 15 bp, Homo sapiens
atgatccatttttgt

SEQ ID NO: 1093532 - DNA, 15 bp, Homo sapiens
tatgatccatttttg

SEQ ID NO: 1093533 - DNA, 15 bp, Homo sapiens
gtatgatccattttt

SEQ ID NO: 1093534 - DNA, 15 bp, Homo sapiens
agtatgatccatttt

SEQ ID NO: 1093535 - DNA, 15 bp, Homo sapiens
tagtatgatccattt

SEQ ID NO: 1093536 - DNA, 15 bp, Homo sapiens
atagtatgatccatt

SEQ ID NO: 1093537 - DNA, 15 bp, Homo sapiens
catagtatgatccat

SEQ ID NO: 1093538 - DNA, 15 bp, Homo sapiens
acatagtatgatcca

SEQ ID NO: 1093539 - DNA, 15 bp, Homo sapiens
aacatagtatgatcc

SEQ ID NO: 1093540 - DNA, 15 bp, Homo sapiens
aaacatagtatgatc

SEQ ID NO: 1093541 - DNA, 15 bp, Homo sapiens
gaaacatagtatgat

SEQ ID NO: 1093542 - DNA, 15 bp, Homo sapiens
ggaaacatagtatga

SEQ ID NO: 1093543 - DNA, 15 bp, Homo sapiens
aggaaacatagtatg

SEQ ID NO: 1093544 - DNA, 15 bp, Homo sapiens
caggaaacatagtat

SEQ ID NO: 1093545 - DNA, 15 bp, Homo sapiens
acaggaaacatagta

SEQ ID NO: 1093546 - DNA, 15 bp, Homo sapiens
aacaggaaacatagt

SEQ ID NO: 1093547 - DNA, 15 bp, Homo sapiens
gaacaggaaacatag

SEQ ID NO: 1093548 - DNA, 15 bp, Homo sapiens
agaacaggaaacata

SEQ ID NO: 1093549 - DNA, 15 bp, Homo sapiens
aagaacaggaaacat

SEQ ID NO: 1093550 - DNA, 15 bp, Homo sapiens
gaagaacaggaaaca

SEQ ID NO: 1093551 - DNA, 15 bp, Homo sapiens
ggaagaacaggaaac

SEQ ID NO: 1093552 - DNA, 15 bp, Homo sapiens
gggaagaacaggaaa

SEQ ID NO: 1093553 - DNA, 15 bp, Homo sapiens
ggggaagaacaggaa

SEQ ID NO: 1093554 - DNA, 15 bp, Homo sapiens
aggggaagaacagga

SEQ ID NO: 1093555 - DNA, 15 bp, Homo sapiens
caggggaagaacagg

SEQ ID NO: 1093556 - DNA, 15 bp, Homo sapiens
acaggggaagaacag

SEQ ID NO: 1093557 - DNA, 15 bp, Homo sapiens
cacaggggaagaaca

SEQ ID NO: 1093558 - DNA, 15 bp, Homo sapiens
acacaggggaagaac

SEQ ID NO: 1093559 - DNA, 15 bp, Homo sapiens
aacacaggggaagaa

SEQ ID NO: 1093560 - DNA, 15 bp, Homo sapiens
taacacaggggaaga

SEQ ID NO: 1093561 - DNA, 15 bp, Homo sapiens
ctaacacaggggaag

SEQ ID NO: 1093562 - DNA, 15 bp, Homo sapiens
actaacacaggggaa

SEQ ID NO: 1093563 - DNA, 15 bp, Homo sapiens
gactaacacagggga

SEQ ID NO: 1093564 - DNA, 15 bp, Homo sapiens
tgactaacacagggg

SEQ ID NO: 1093565 - DNA, 15 bp, Homo sapiens
atgactaacacaggg

SEQ ID NO: 1093566 - DNA, 15 bp, Homo sapiens
gatgactaacacagg

SEQ ID NO: 1093567 - DNA, 15 bp, Homo sapiens
agatgactaacacag

SEQ ID NO: 1093568 - DNA, 15 bp, Homo sapiens
tagatgactaacaca

SEQ ID NO: 1093569 - DNA, 15 bp, Homo sapiens
atagatgactaacac

SEQ ID NO: 1093570 - DNA, 15 bp, Homo sapiens
aatagatgactaaca

SEQ ID NO: 1093571 - DNA, 15 bp, Homo sapiens
caatagatgactaac

SEQ ID NO: 1093572 - DNA, 15 bp, Homo sapiens
gcaatagatgactaa

SEQ ID NO: 1093573 - DNA, 15 bp, Homo sapiens
agcaatagatgacta

SEQ ID NO: 1093574 - DNA, 15 bp, Homo sapiens
cagcaatagatgact

SEQ ID NO: 1093575 - DNA, 15 bp, Homo sapiens
acagcaatagatgac

SEQ ID NO: 1093576 - DNA, 15 bp, Homo sapiens
tacagcaatagatga

SEQ ID NO: 1093577 - DNA, 15 bp, Homo sapiens
atacagcaatagatg

SEQ ID NO: 1093578 - DNA, 15 bp, Homo sapiens
tatacagcaatagat

SEQ ID NO: 1093579 - DNA, 15 bp, Homo sapiens
ttatacagcaataga

SEQ ID NO: 1093580 - DNA, 15 bp, Homo sapiens
gttatacagcaatag

SEQ ID NO: 1093581 - DNA, 15 bp, Homo sapiens
tgttatacagcaata

SEQ ID NO: 1093582 - DNA, 15 bp, Homo sapiens
ttgttatacagcaat

SEQ ID NO: 1093583 - DNA, 15 bp, Homo sapiens
tttgttatacagcaa

SEQ ID NO: 1093584 - DNA, 15 bp, Homo sapiens
gtttgttatacagca

SEQ ID NO: 1093585 - DNA, 15 bp, Homo sapiens
agtttgttatacagc

SEQ ID NO: 1093586 - DNA, 15 bp, Homo sapiens
cagtttgttatacag

SEQ ID NO: 1093587 - DNA, 15 bp, Homo sapiens
gcagtttgttataca

SEQ ID NO: 1093588 - DNA, 15 bp, Homo sapiens
ggcagtttgttatac

SEQ ID NO: 1093589 - DNA, 15 bp, Homo sapiens
aggcagtttgttata

SEQ ID NO: 1093590 - DNA, 15 bp, Homo sapiens
gaggcagtttgttat

SEQ ID NO: 1093591 - DNA, 15 bp, Homo sapiens
tgaggcagtttgtta

SEQ ID NO: 1093592 - DNA, 15 bp, Homo sapiens
ttgaggcagtttgtt

SEQ ID NO: 1093593 - DNA, 15 bp, Homo sapiens
tttgaggcagtttgt

SEQ ID NO: 1093594 - DNA, 15 bp, Homo sapiens
ttttgaggcagtttg

SEQ ID NO: 1093595 - DNA, 15 bp, Homo sapiens
gttttgaggcagttt

SEQ ID NO: 1093596 - DNA, 15 bp, Homo sapiens
agttttgaggcagtt

SEQ ID NO: 1093597 - DNA, 15 bp, Homo sapiens
aagttttgaggcagt

SEQ ID NO: 1093598 - DNA, 15 bp, Homo sapiens
taagttttgaggcag

SEQ ID NO: 1093599 - DNA, 15 bp, Homo sapiens
ctaagttttgaggca

SEQ ID NO: 1093600 - DNA, 15 bp, Homo sapiens
actaagttttgaggc

SEQ ID NO: 1093601 - DNA, 15 bp, Homo sapiens
cactaagttttgagg

SEQ ID NO: 1093602 - DNA, 15 bp, Homo sapiens
ccactaagttttgag

SEQ ID NO: 1093603 - DNA, 15 bp, Homo sapiens
gccactaagttttga

SEQ ID NO: 1093604 - DNA, 15 bp, Homo sapiens
agccactaagttttg

SEQ ID NO: 1093605 - DNA, 15 bp, Homo sapiens
aagccactaagtttt

SEQ ID NO: 1093606 - DNA, 15 bp, Homo sapiens
gaagccactaagttt

SEQ ID NO: 1093607 - DNA, 15 bp, Homo sapiens
tgaagccactaagtt

SEQ ID NO: 1093608 - DNA, 15 bp, Homo sapiens
gtgaagccactaagt

SEQ ID NO: 1093609 - DNA, 15 bp, Homo sapiens
ggtgaagccactaag

SEQ ID NO: 1093610 - DNA, 15 bp, Homo sapiens
aggtgaagccactaa

SEQ ID NO: 1093611 - DNA, 15 bp, Homo sapiens
aaggtgaagccacta

SEQ ID NO: 1093612 - DNA, 15 bp, Homo sapiens
aaaggtgaagccact

SEQ ID NO: 1093613 - DNA, 15 bp, Homo sapiens
gaaaggtgaagccac

SEQ ID NO: 1093614 - DNA, 15 bp, Homo sapiens
ggaaaggtgaagcca

SEQ ID NO: 1093615 - DNA, 15 bp, Homo sapiens
cggaaaggtgaagcc

SEQ ID NO: 1093616 - DNA, 15 bp, Homo sapiens
acggaaaggtgaagc

SEQ ID NO: 1093617 - DNA, 15 bp, Homo sapiens
cacggaaaggtgaag

SEQ ID NO: 1093618 - DNA, 15 bp, Homo sapiens
acacggaaaggtgaa

SEQ ID NO: 1093619 - DNA, 15 bp, Homo sapiens
tacacggaaaggtga

SEQ ID NO: 1093620 - DNA, 15 bp, Homo sapiens
atacacggaaaggtg

SEQ ID NO: 1093621 - DNA, 15 bp, Homo sapiens
aatacacggaaaggt

SEQ ID NO: 1093622 - DNA, 15 bp, Homo sapiens
taatacacggaaagg

SEQ ID NO: 1093623 - DNA, 15 bp, Homo sapiens
ataatacacggaaag

SEQ ID NO: 1093624 - DNA, 15 bp, Homo sapiens
cataatacacggaaa

SEQ ID NO: 1093625 - DNA, 15 bp, Homo sapiens
tcataatacacggaa

SEQ ID NO: 1093626 - DNA, 15 bp, Homo sapiens
atcataatacacgga

SEQ ID NO: 1093627 - DNA, 15 bp, Homo sapiens
catcataatacacgg

SEQ ID NO: 1093628 - DNA, 15 bp, Homo sapiens
tcatcataatacacg

SEQ ID NO: 1093629 - DNA, 15 bp, Homo sapiens
gtcatcataatacac

SEQ ID NO: 1093630 - DNA, 15 bp, Homo sapiens
tgtcatcataataca

SEQ ID NO: 1093631 - DNA, 15 bp, Homo sapiens
ttgtcatcataatac

SEQ ID NO: 1093632 - DNA, 15 bp, Homo sapiens
cttgtcatcataata

SEQ ID NO: 1093633 - DNA, 15 bp, Homo sapiens
tcttgtcatcataat

SEQ ID NO: 1093634 - DNA, 15 bp, Homo sapiens
ttcttgtcatcataa

SEQ ID NO: 1093635 - DNA, 15 bp, Homo sapiens
attcttgtcatcata

SEQ ID NO: 1093636 - DNA, 15 bp, Homo sapiens
cattcttgtcatcat

SEQ ID NO: 1093637 - DNA, 15 bp, Homo sapiens
acattcttgtcatca

SEQ ID NO: 1093638 - DNA, 15 bp, Homo sapiens
cacattcttgtcatc

SEQ ID NO: 1093639 - DNA, 15 bp, Homo sapiens
ccacattcttgtcat

SEQ ID NO: 1093640 - DNA, 15 bp, Homo sapiens
accacattcttgtca

SEQ ID NO: 1093641 - DNA, 15 bp, Homo sapiens
taccacattcttgtc

SEQ ID NO: 1093642 - DNA, 15 bp, Homo sapiens
ataccacattcttgt

SEQ ID NO: 1093643 - DNA, 15 bp, Homo sapiens
cataccacattcttg

SEQ ID NO: 1093644 - DNA, 15 bp, Homo sapiens
tcataccacattctt

SEQ ID NO: 1093645 - DNA, 15 bp, Homo sapiens
gtcataccacattct

SEQ ID NO: 1093646 - DNA, 15 bp, Homo sapiens
tgtcataccacattc

SEQ ID NO: 1093647 - DNA, 15 bp, Homo sapiens
gtgtcataccacatt

SEQ ID NO: 1093648 - DNA, 15 bp, Homo sapiens
agtgtcataccacat

SEQ ID NO: 1093649 - DNA, 15 bp, Homo sapiens
cagtgtcataccaca

SEQ ID NO: 1093650 - DNA, 15 bp, Homo sapiens
acagtgtcataccac

SEQ ID NO: 1093651 - DNA, 15 bp, Homo sapiens
gacagtgtcatacca

SEQ ID NO: 1093652 - DNA, 15 bp, Homo sapiens
agacagtgtcatacc

SEQ ID NO: 1093653 - DNA, 15 bp, Homo sapiens
aagacagtgtcatac

SEQ ID NO: 1093654 - DNA, 15 bp, Homo sapiens
taagacagtgtcata

SEQ ID NO: 1093655 - DNA, 15 bp, Homo sapiens
ataagacagtgtcat

SEQ ID NO: 1093656 - DNA, 15 bp, Homo sapiens
tataagacagtgtca

SEQ ID NO: 1093657 - DNA, 15 bp, Homo sapiens
atataagacagtgtc

SEQ ID NO: 1093658 - DNA, 15 bp, Homo sapiens
gatataagacagtgt

SEQ ID NO: 1093659 - DNA, 15 bp, Homo sapiens
agatataagacagtg

SEQ ID NO: 1093660 - DNA, 15 bp, Homo sapiens
cagatataagacagt

SEQ ID NO: 1093661 - DNA, 15 bp, Homo sapiens
ccagatataagacag

SEQ ID NO: 1093662 - DNA, 15 bp, Homo sapiens
tccagatataagaca

SEQ ID NO: 1093663 - DNA, 15 bp, Homo sapiens
atccagatataagac

SEQ ID NO: 1093664 - DNA, 15 bp, Homo sapiens
gatccagatataaga

SEQ ID NO: 1093665 - DNA, 15 bp, Homo sapiens
tgatccagatataag

SEQ ID NO: 1093666 - DNA, 15 bp, Homo sapiens
atgatccagatataa

SEQ ID NO: 1093667 - DNA, 15 bp, Homo sapiens
tatgatccagatata

SEQ ID NO: 1093668 - DNA, 15 bp, Homo sapiens
atatgatccagatat

SEQ ID NO: 1093669 - DNA, 15 bp, Homo sapiens
catatgatccagata

SEQ ID NO: 1093670 - DNA, 15 bp, Homo sapiens
gcatatgatccagat

SEQ ID NO: 1093671 - DNA, 15 bp, Homo sapiens
agcatatgatccaga

SEQ ID NO: 1093672 - DNA, 15 bp, Homo sapiens
tagcatatgatccag

SEQ ID NO: 1093673 - DNA, 15 bp, Homo sapiens
ttagcatatgatcca

SEQ ID NO: 1093674 - DNA, 15 bp, Homo sapiens
tttagcatatgatcc

SEQ ID NO: 1093675 - DNA, 15 bp, Homo sapiens
ttttagcatatgatc

SEQ ID NO: 1093676 - DNA, 15 bp, Homo sapiens
cttttagcatatgat

SEQ ID NO: 1093677 - DNA, 15 bp, Homo sapiens
tcttttagcatatga

SEQ ID NO: 1093678 - DNA, 15 bp, Homo sapiens
atcttttagcatatg

SEQ ID NO: 1093679 - DNA, 15 bp, Homo sapiens
tatcttttagcatat

SEQ ID NO: 1093680 - DNA, 15 bp, Homo sapiens
ctatcttttagcata

SEQ ID NO: 1093681 - DNA, 15 bp, Homo sapiens
tctatcttttagcat

SEQ ID NO: 1093682 - DNA, 15 bp, Homo sapiens
ttctatcttttagca

SEQ ID NO: 1093683 - DNA, 15 bp, Homo sapiens
tttctatcttttagc

SEQ ID NO: 1093684 - DNA, 15 bp, Homo sapiens
ttttctatcttttag

SEQ ID NO: 1093685 - DNA, 15 bp, Homo sapiens
attttctatctttta

SEQ ID NO: 1093686 - DNA, 15 bp, Homo sapiens
cattttctatctttt

SEQ ID NO: 1093687 - DNA, 15 bp, Homo sapiens
ccattttctatcttt

SEQ ID NO: 1093688 - DNA, 15 bp, Homo sapiens
accattttctatctt

SEQ ID NO: 1093689 - DNA, 15 bp, Homo sapiens
aaccattttctatct

SEQ ID NO: 1093690 - DNA, 15 bp, Homo sapiens
aaaccattttctatc

SEQ ID NO: 1093691 - DNA, 15 bp, Homo sapiens
gaaaccattttctat

SEQ ID NO: 1093692 - DNA, 15 bp, Homo sapiens
agaaaccattttcta

SEQ ID NO: 1093693 - DNA, 15 bp, Homo sapiens
tagaaaccattttct

SEQ ID NO: 1093694 - DNA, 15 bp, Homo sapiens
ttagaaaccattttc

SEQ ID NO: 1093695 - DNA, 15 bp, Homo sapiens
tttagaaaccatttt

SEQ ID NO: 1093696 - DNA, 15 bp, Homo sapiens
gtttagaaaccattt

SEQ ID NO: 1093697 - DNA, 15 bp, Homo sapiens
agtttagaaaccatt

SEQ ID NO: 1093698 - DNA, 15 bp, Homo sapiens
aagtttagaaaccat

SEQ ID NO: 1093699 - DNA, 15 bp, Homo sapiens
taagtttagaaacca

SEQ ID NO: 1093700 - DNA, 15 bp, Homo sapiens
ataagtttagaaacc

SEQ ID NO: 1093701 - DNA, 15 bp, Homo sapiens
aataagtttagaaac

SEQ ID NO: 1093702 - DNA, 15 bp, Homo sapiens
aaataagtttagaaa

SEQ ID NO: 1093703 - DNA, 15 bp, Homo sapiens
caaataagtttagaa

SEQ ID NO: 1093704 - DNA, 15 bp, Homo sapiens
acaaataagtttaga

SEQ ID NO: 1093705 - DNA, 15 bp, Homo sapiens
aacaaataagtttag

SEQ ID NO: 1093706 - DNA, 15 bp, Homo sapiens
gaacaaataagttta

SEQ ID NO: 1093707 - DNA, 15 bp, Homo sapiens
agaacaaataagttt

SEQ ID NO: 1093708 - DNA, 15 bp, Homo sapiens
cagaacaaataagtt

SEQ ID NO: 1093709 - DNA, 15 bp, Homo sapiens
acagaacaaataagt

SEQ ID NO: 1093710 - DNA, 15 bp, Homo sapiens
tacagaacaaataag

SEQ ID NO: 1093711 - DNA, 15 bp, Homo sapiens
ttacagaacaaataa

SEQ ID NO: 1093712 - DNA, 15 bp, Homo sapiens
attacagaacaaata

SEQ ID NO: 1093713 - DNA, 15 bp, Homo sapiens
tattacagaacaaat

SEQ ID NO: 1093714 - DNA, 15 bp, Homo sapiens
ttattacagaacaaa

SEQ ID NO: 1093715 - DNA, 15 bp, Homo sapiens
gttattacagaacaa

SEQ ID NO: 1093716 - DNA, 15 bp, Homo sapiens
tgttattacagaaca

SEQ ID NO: 1093717 - DNA, 15 bp, Homo sapiens
ttgttattacagaac

SEQ ID NO: 1093718 - DNA, 15 bp, Homo sapiens
tttgttattacagaa

SEQ ID NO: 1093719 - DNA, 15 bp, Homo sapiens
ttttgttattacaga

SEQ ID NO: 1093720 - DNA, 15 bp, Homo sapiens
attttgttattacag

SEQ ID NO: 1093721 - DNA, 15 bp, Homo sapiens
aattttgttattaca

SEQ ID NO: 1093722 - DNA, 15 bp, Homo sapiens
aaattttgttattac

SEQ ID NO: 1093723 - DNA, 15 bp, Homo sapiens
aaaattttgttatta

SEQ ID NO: 1093724 - DNA, 15 bp, Homo sapiens
taaaattttgttatt

SEQ ID NO: 1093725 - DNA, 15 bp, Homo sapiens
ataaaattttgttat

SEQ ID NO: 1093726 - DNA, 15 bp, Homo sapiens
aataaaattttgtta

SEQ ID NO: 1093727 - DNA, 15 bp, Homo sapiens
gaaataaaattttgt

SEQ ID NO: 1093728 - DNA, 15 bp, Homo sapiens
tgaaataaaattttg

SEQ ID NO: 1093729 - DNA, 15 bp, Homo sapiens
tatgaaataaaattt

SEQ ID NO: 1093730 - DNA, 15 bp, Homo sapiens
ttatgaaataaaatt

SEQ ID NO: 1093731 - DNA, 15 bp, Homo sapiens
tttatgaaataaaat

SEQ ID NO: 1093732 - DNA, 15 bp, Homo sapiens
ctttatgaaataaaa

SEQ ID NO: 1093733 - DNA, 15 bp, Homo sapiens
actttatgaaataaa

SEQ ID NO: 1093734 - DNA, 15 bp, Homo sapiens
cactttatgaaataa

SEQ ID NO: 1093735 - DNA, 15 bp, Homo sapiens
acactttatgaaata

SEQ ID NO: 1093736 - DNA, 15 bp, Homo sapiens
aacactttatgaaat

SEQ ID NO: 1093737 - DNA, 15 bp, Homo sapiens
aaacactttatgaaa

SEQ ID NO: 1093738 - DNA, 15 bp, Homo sapiens
aaaacactttatgaa

SEQ ID NO: 1093739 - DNA, 15 bp, Homo sapiens
aaaaacactttatga

SEQ ID NO: 1093740 - DNA, 15 bp, Homo sapiens
taaaaacactttatg

SEQ ID NO: 1093741 - DNA, 15 bp, Homo sapiens
ttaaaaacactttat

SEQ ID NO: 1093742 - DNA, 15 bp, Homo sapiens
tttaaaaacacttta

SEQ ID NO: 1093743 - DNA, 15 bp, Homo sapiens
ttttaaaaacacttt

SEQ ID NO: 1093744 - DNA, 15 bp, Homo sapiens
tttttaaaaacactt

SEQ ID NO: 1093745 - DNA, 15 bp, Homo sapiens
ttttttaaaaacact

SEQ ID NO: 1093746 - DNA, 15 bp, Homo sapiens
tttttttaaaaacac

SEQ ID NO: 1093747 - DNA, 15 bp, Homo sapiens
ttttttttaaaaaca

SEQ ID NO: 1093748 - DNA, 15 bp, Homo sapiens
gttttttttaaaaac

SEQ ID NO: 1093749 - DNA, 15 bp, Homo sapiens
ggttttttttaaaaa

SEQ ID NO: 1093750 - DNA, 15 bp, Homo sapiens
tggttttttttaaaa

SEQ ID NO: 1093751 - DNA, 15 bp, Homo sapiens
atggttttttttaaa

SEQ ID NO: 1093752 - DNA, 15 bp, Homo sapiens
tatggttttttttaa

SEQ ID NO: 1093753 - DNA, 15 bp, Homo sapiens
ctatggtttttttta

SEQ ID NO: 1093754 - DNA, 15 bp, Homo sapiens
actatggtttttttt

SEQ ID NO: 1093755 - DNA, 15 bp, Homo sapiens
tactatggttttttt

SEQ ID NO: 1093756 - DNA, 15 bp, Homo sapiens
ctactatggtttttt

SEQ ID NO: 1093757 - DNA, 15 bp, Homo sapiens
gctactatggttttt

SEQ ID NO: 1093758 - DNA, 15 bp, Homo sapiens
agctactatggtttt

SEQ ID NO: 1093759 - DNA, 15 bp, Homo sapiens
aagctactatggttt

SEQ ID NO: 1093760 - DNA, 15 bp, Homo sapiens
caagctactatggtt

SEQ ID NO: 1093761 - DNA, 15 bp, Homo sapiens
tcaagctactatggt

SEQ ID NO: 1093762 - DNA, 15 bp, Homo sapiens
ttcaagctactatgg

SEQ ID NO: 1093763 - DNA, 15 bp, Homo sapiens
tttcaagctactatg

SEQ ID NO: 1093764 - DNA, 15 bp, Homo sapiens
gtttcaagctactat

SEQ ID NO: 1093765 - DNA, 15 bp, Homo sapiens
tgtttcaagctacta

SEQ ID NO: 1093766 - DNA, 15 bp, Homo sapiens
ttgtttcaagctact

SEQ ID NO: 1093767 - DNA, 15 bp, Homo sapiens
gttgtttcaagctac

SEQ ID NO: 1093768 - DNA, 15 bp, Homo sapiens
tgttgtttcaagcta

SEQ ID NO: 1093769 - DNA, 15 bp, Homo sapiens
ttgttgtttcaagct

SEQ ID NO: 1093770 - DNA, 15 bp, Homo sapiens
tttgttgtttcaagc

SEQ ID NO: 1093771 - DNA, 15 bp, Homo sapiens
gtttgttgtttcaag

SEQ ID NO: 1093772 - DNA, 15 bp, Homo sapiens
ggtttgttgtttcaa

SEQ ID NO: 1093773 - DNA, 15 bp, Homo sapiens
aggtttgttgtttca

SEQ ID NO: 1093774 - DNA, 15 bp, Homo sapiens
aaggtttgttgtttc

SEQ ID NO: 1093775 - DNA, 15 bp, Homo sapiens
aaaggtttgttgttt

SEQ ID NO: 1093776 - DNA, 15 bp, Homo sapiens
caaaggtttgttgtt

SEQ ID NO: 1093777 - DNA, 15 bp, Homo sapiens
acaaaggtttgttgt

SEQ ID NO: 1093778 - DNA, 15 bp, Homo sapiens
aacaaaggtttgttg

SEQ ID NO: 1093779 - DNA, 15 bp, Homo sapiens
taacaaaggtttgtt

SEQ ID NO: 1093780 - DNA, 15 bp, Homo sapiens
ataacaaaggtttgt

SEQ ID NO: 1093781 - DNA, 15 bp, Homo sapiens
gataacaaaggtttg

SEQ ID NO: 1093782 - DNA, 15 bp, Homo sapiens
agataacaaaggttt

SEQ ID NO: 1093783 - DNA, 15 bp, Homo sapiens
gagataacaaaggtt

SEQ ID NO: 1093784 - DNA, 15 bp, Homo sapiens
tgagataacaaaggt

SEQ ID NO: 1093785 - DNA, 15 bp, Homo sapiens
gtgagataacaaagg

SEQ ID NO: 1093786 - DNA, 15 bp, Homo sapiens
tgtgagataacaaag

SEQ ID NO: 1093787 - DNA, 15 bp, Homo sapiens
gtgtgagataacaaa

SEQ ID NO: 1093788 - DNA, 15 bp, Homo sapiens
tgtgtgagataacaa

SEQ ID NO: 1093789 - DNA, 15 bp, Homo sapiens
ctgtgtgagataaca

SEQ ID NO: 1093790 - DNA, 15 bp, Homo sapiens
actgtgtgagataac

SEQ ID NO: 1093791 - DNA, 15 bp, Homo sapiens
aactgtgtgagataa

SEQ ID NO: 1093792 - DNA, 15 bp, Homo sapiens
aaactgtgtgagata

SEQ ID NO: 1093793 - DNA, 15 bp, Homo sapiens
gaaactgtgtgagat

SEQ ID NO: 1093794 - DNA, 15 bp, Homo sapiens
agaaactgtgtgaga

SEQ ID NO: 1093795 - DNA, 15 bp, Homo sapiens
cagaaactgtgtgag

SEQ ID NO: 1093796 - DNA, 15 bp, Homo sapiens
acagaaactgtgtga

SEQ ID NO: 1093797 - DNA, 15 bp, Homo sapiens
tacagaaactgtgtg

SEQ ID NO: 1093798 - DNA, 15 bp, Homo sapiens
ctacagaaactgtgt

SEQ ID NO: 1093799 - DNA, 15 bp, Homo sapiens
cctacagaaactgtg

SEQ ID NO: 1093800 - DNA, 15 bp, Homo sapiens
acctacagaaactgt

SEQ ID NO: 1093801 - DNA, 15 bp, Homo sapiens
gacctacagaaactg

SEQ ID NO: 1093802 - DNA, 15 bp, Homo sapiens
tgacctacagaaact

SEQ ID NO: 1093803 - DNA, 15 bp, Homo sapiens
ttgacctacagaaac

SEQ ID NO: 1093804 - DNA, 15 bp, Homo sapiens
cttgacctacagaaa

SEQ ID NO: 1093805 - DNA, 15 bp, Homo sapiens
tcttgacctacagaa

SEQ ID NO: 1093806 - DNA, 15 bp, Homo sapiens
ttcttgacctacaga

SEQ ID NO: 1093807 - DNA, 15 bp, Homo sapiens
attcttgacctacag

SEQ ID NO: 1093808 - DNA, 15 bp, Homo sapiens
aattcttgacctaca

SEQ ID NO: 1093809 - DNA, 15 bp, Homo sapiens
gaattcttgacctac

SEQ ID NO: 1093810 - DNA, 15 bp, Homo sapiens
tgaattcttgaccta

SEQ ID NO: 1093811 - DNA, 15 bp, Homo sapiens
ctgaattcttgacct

SEQ ID NO: 1093812 - DNA, 15 bp, Homo sapiens
tctgaattcttgacc

SEQ ID NO: 1093813 - DNA, 15 bp, Homo sapiens
ttctgaattcttgac

SEQ ID NO: 1093814 - DNA, 15 bp, Homo sapiens
cttctgaattcttga

SEQ ID NO: 1093815 - DNA, 15 bp, Homo sapiens
gcttctgaattcttg

SEQ ID NO: 1093816 - DNA, 15 bp, Homo sapiens
tgcttctgaattctt

SEQ ID NO: 1093817 - DNA, 15 bp, Homo sapiens
ctgcttctgaattct

SEQ ID NO: 1093818 - DNA, 15 bp, Homo sapiens
gctgcttctgaattc

SEQ ID NO: 1093819 - DNA, 15 bp, Homo sapiens
agctgcttctgaatt

SEQ ID NO: 1093820 - DNA, 15 bp, Homo sapiens
aagctgcttctgaat

SEQ ID NO: 1093821 - DNA, 15 bp, Homo sapiens
taagctgcttctgaa

SEQ ID NO: 1093822 - DNA, 15 bp, Homo sapiens
ctaagctgcttctga

SEQ ID NO: 1093823 - DNA, 15 bp, Homo sapiens
gctaagctgcttctg

SEQ ID NO: 1093824 - DNA, 15 bp, Homo sapiens
agctaagctgcttct

SEQ ID NO: 1093825 - DNA, 15 bp, Homo sapiens
cagctaagctgcttc

SEQ ID NO: 1093826 - DNA, 15 bp, Homo sapiens
ccagctaagctgctt

SEQ ID NO: 1093827 - DNA, 15 bp, Homo sapiens
cccagctaagctgct

SEQ ID NO: 1093828 - DNA, 15 bp, Homo sapiens
acccagctaagctgc

SEQ ID NO: 1093829 - DNA, 15 bp, Homo sapiens
cacccagctaagctg

SEQ ID NO: 1093830 - DNA, 15 bp, Homo sapiens
ccacccagctaagct

SEQ ID NO: 1093831 - DNA, 15 bp, Homo sapiens
accacccagctaagc

SEQ ID NO: 1093832 - DNA, 15 bp, Homo sapiens
gaccacccagctaag

SEQ ID NO: 1093833 - DNA, 15 bp, Homo sapiens
agaccacccagctaa

SEQ ID NO: 1093834 - DNA, 15 bp, Homo sapiens
cagaccacccagcta

SEQ ID NO: 1093835 - DNA, 15 bp, Homo sapiens
ccagaccacccagct

SEQ ID NO: 1093836 - DNA, 15 bp, Homo sapiens
gccagaccacccagc

SEQ ID NO: 1093837 - DNA, 15 bp, Homo sapiens
agccagaccacccag

SEQ ID NO: 1093838 - DNA, 15 bp, Homo sapiens
aagccagaccaccca

SEQ ID NO: 1093839 - DNA, 15 bp, Homo sapiens
caagccagaccaccc

SEQ ID NO: 1093840 - DNA, 15 bp, Homo sapiens
ccaagccagaccacc

SEQ ID NO: 1093841 - DNA, 15 bp, Homo sapiens
accaagccagaccac

SEQ ID NO: 1093842 - DNA, 15 bp, Homo sapiens
caccaagccagacca

SEQ ID NO: 1093843 - DNA, 15 bp, Homo sapiens
acaccaagccagacc

SEQ ID NO: 1093844 - DNA, 15 bp, Homo sapiens
gacaccaagccagac

SEQ ID NO: 1093845 - DNA, 15 bp, Homo sapiens
agacaccaagccaga

SEQ ID NO: 1093846 - DNA, 15 bp, Homo sapiens
gagacaccaagccag

SEQ ID NO: 1093847 - DNA, 15 bp, Homo sapiens
agagacaccaagcca

SEQ ID NO: 1093848 - DNA, 15 bp, Homo sapiens
gagagacaccaagcc

SEQ ID NO: 1093849 - DNA, 15 bp, Homo sapiens
ggagagacaccaagc

SEQ ID NO: 1093850 - DNA, 15 bp, Homo sapiens
aggagagacaccaag

SEQ ID NO: 1093851 - DNA, 15 bp, Homo sapiens
caggagagacaccaa

SEQ ID NO: 1093852 - DNA, 15 bp, Homo sapiens
tcaggagagacacca

SEQ ID NO: 1093853 - DNA, 15 bp, Homo sapiens
ctcaggagagacacc

SEQ ID NO: 1093854 - DNA, 15 bp, Homo sapiens
cctcaggagagacac

SEQ ID NO: 1093855 - DNA, 15 bp, Homo sapiens
acctcaggagagaca

SEQ ID NO: 1093856 - DNA, 15 bp, Homo sapiens
gacctcaggagagac

SEQ ID NO: 1093857 - DNA, 15 bp, Homo sapiens
tgacctcaggagaga

SEQ ID NO: 1093858 - DNA, 15 bp, Homo sapiens
ctgacctcaggagag

SEQ ID NO: 1093859 - DNA, 15 bp, Homo sapiens
cctgacctcaggaga

SEQ ID NO: 1093860 - DNA, 15 bp, Homo sapiens
ccctgacctcaggag

SEQ ID NO: 1093861 - DNA, 15 bp, Homo sapiens
accctgacctcagga

SEQ ID NO: 1093862 - DNA, 15 bp, Homo sapiens
aaccctgacctcagg

SEQ ID NO: 1093863 - DNA, 15 bp, Homo sapiens
aaaccctgacctcag

SEQ ID NO: 1093864 - DNA, 15 bp, Homo sapiens
aaaaccctgacctca

SEQ ID NO: 1093865 - DNA, 15 bp, Homo sapiens
caaaaccctgacctc

SEQ ID NO: 1093866 - DNA, 15 bp, Homo sapiens
ccaaaaccctgacct

SEQ ID NO: 1093867 - DNA, 15 bp, Homo sapiens
gccaaaaccctgacc

SEQ ID NO: 1093868 - DNA, 15 bp, Homo sapiens
agccaaaaccctgac

SEQ ID NO: 1093869 - DNA, 15 bp, Homo sapiens
cagccaaaaccctga

SEQ ID NO: 1093870 - DNA, 15 bp, Homo sapiens
ccagccaaaaccctg

SEQ ID NO: 1093871 - DNA, 15 bp, Homo sapiens
cccagccaaaaccct

SEQ ID NO: 1093872 - DNA, 15 bp, Homo sapiens
ccccagccaaaaccc

SEQ ID NO: 1093873 - DNA, 15 bp, Homo sapiens
gccccagccaaaacc

SEQ ID NO: 1093874 - DNA, 15 bp, Homo sapiens
agccccagccaaaac

SEQ ID NO: 1093875 - DNA, 15 bp, Homo sapiens
cagccccagccaaaa

SEQ ID NO: 1093876 - DNA, 15 bp, Homo sapiens
gcagccccagccaaa

SEQ ID NO: 1093877 - DNA, 15 bp, Homo sapiens
tgcagccccagccaa

SEQ ID NO: 1093878 - DNA, 15 bp, Homo sapiens
atgcagccccagcca

SEQ ID NO: 1093879 - DNA, 15 bp, Homo sapiens
tgatgcagccccagc

SEQ ID NO: 1093880 - DNA, 15 bp, Homo sapiens
gtgatgcagccccag

SEQ ID NO: 1093881 - DNA, 15 bp, Homo sapiens
ggtgatgcagcccca

SEQ ID NO: 1093882 - DNA, 15 bp, Homo sapiens
aggtgatgcagcccc

SEQ ID NO: 1093883 - DNA, 15 bp, Homo sapiens
caggtgatgcagccc

SEQ ID NO: 1093884 - DNA, 15 bp, Homo sapiens
tcaggtgatgcagcc

SEQ ID NO: 1093885 - DNA, 15 bp, Homo sapiens
ttcaggtgatgcagc

SEQ ID NO: 1093886 - DNA, 15 bp, Homo sapiens
cttcaggtgatgcag

SEQ ID NO: 1093887 - DNA, 15 bp, Homo sapiens
ccttcaggtgatgca

SEQ ID NO: 1093888 - DNA, 15 bp, Homo sapiens
gccttcaggtgatgc

SEQ ID NO: 1093889 - DNA, 15 bp, Homo sapiens
agccttcaggtgatg

SEQ ID NO: 1093890 - DNA, 15 bp, Homo sapiens
aagccttcaggtgat

SEQ ID NO: 1093891 - DNA, 15 bp, Homo sapiens
caagccttcaggtga

SEQ ID NO: 1093892 - DNA, 15 bp, Homo sapiens
tcaagccttcaggtg

SEQ ID NO: 1093893 - DNA, 15 bp, Homo sapiens
gtcaagccttcaggt

SEQ ID NO: 1093894 - DNA, 15 bp, Homo sapiens
agtcaagccttcagg

SEQ ID NO: 1093895 - DNA, 15 bp, Homo sapiens
cagtcaagccttcag

SEQ ID NO: 1093896 - DNA, 15 bp, Homo sapiens
ccagtcaagccttca

SEQ ID NO: 1093897 - DNA, 15 bp, Homo sapiens
cccagtcaagccttc

SEQ ID NO: 1093898 - DNA, 15 bp, Homo sapiens
ccccagtcaagcctt

SEQ ID NO: 1093899 - DNA, 15 bp, Homo sapiens
gccccagtcaagcct

SEQ ID NO: 1093900 - DNA, 15 bp, Homo sapiens
ggccccagtcaagcc

SEQ ID NO: 1093901 - DNA, 15 bp, Homo sapiens
tggccccagtcaagc

SEQ ID NO: 1093902 - DNA, 15 bp, Homo sapiens
ctggccccagtcaag

SEQ ID NO: 1093903 - DNA, 15 bp, Homo sapiens
tctggccccagtcaa

SEQ ID NO: 1093904 - DNA, 15 bp, Homo sapiens
ctctggccccagtca

SEQ ID NO: 1093905 - DNA, 15 bp, Homo sapiens
cctctggccccagtc

SEQ ID NO: 1093906 - DNA, 15 bp, Homo sapiens
tcctctggccccagt

SEQ ID NO: 1093907 - DNA, 15 bp, Homo sapiens
ctcctctggccccag

SEQ ID NO: 1093908 - DNA, 15 bp, Homo sapiens
gctcctctggcccca

SEQ ID NO: 1093909 - DNA, 15 bp, Homo sapiens
agctcctctggcccc

SEQ ID NO: 1093910 - DNA, 15 bp, Homo sapiens
cagctcctctggccc

SEQ ID NO: 1093911 - DNA, 15 bp, Homo sapiens
gcagctcctctggcc

SEQ ID NO: 1093912 - DNA, 15 bp, Homo sapiens
agcagctcctctggc

SEQ ID NO: 1093913 - DNA, 15 bp, Homo sapiens
aagcagctcctctgg

SEQ ID NO: 1093914 - DNA, 15 bp, Homo sapiens
gaagcagctcctctg

SEQ ID NO: 1093915 - DNA, 15 bp, Homo sapiens
ggaagcagctcctct

SEQ ID NO: 1093916 - DNA, 15 bp, Homo sapiens
tggaagcagctcctc

SEQ ID NO: 1093917 - DNA, 15 bp, Homo sapiens
ttggaagcagctcct

SEQ ID NO: 1093918 - DNA, 15 bp, Homo sapiens
tttggaagcagctcc

SEQ ID NO: 1093919 - DNA, 15 bp, Homo sapiens
ctttggaagcagctc

SEQ ID NO: 1093920 - DNA, 15 bp, Homo sapiens
actttggaagcagct

SEQ ID NO: 1093921 - DNA, 15 bp, Homo sapiens
cactttggaagcagc

SEQ ID NO: 1093922 - DNA, 15 bp, Homo sapiens
ccactttggaagcag

SEQ ID NO: 1093923 - DNA, 15 bp, Homo sapiens
accactttggaagca

SEQ ID NO: 1093924 - DNA, 15 bp, Homo sapiens
gaccactttggaagc

SEQ ID NO: 1093925 - DNA, 15 bp, Homo sapiens
ggaccactttggaag

SEQ ID NO: 1093926 - DNA, 15 bp, Homo sapiens
tggaccactttggaa

SEQ ID NO: 1093927 - DNA, 15 bp, Homo sapiens
gtggaccactttgga

SEQ ID NO: 1093928 - DNA, 15 bp, Homo sapiens
agtggaccactttgg

SEQ ID NO: 1093929 - DNA, 15 bp, Homo sapiens
gagtggaccactttg

SEQ ID NO: 1093930 - DNA, 15 bp, Homo sapiens
tgagtggaccacttt

SEQ ID NO: 1093931 - DNA, 15 bp, Homo sapiens
gtgagtggaccactt

SEQ ID NO: 1093932 - DNA, 15 bp, Homo sapiens
tgtgagtggaccact

SEQ ID NO: 1093933 - DNA, 15 bp, Homo sapiens
atgtgagtggaccac

SEQ ID NO: 1093934 - DNA, 15 bp, Homo sapiens
catgtgagtggacca

SEQ ID NO: 1093935 - DNA, 15 bp, Homo sapiens
ccatgtgagtggacc

SEQ ID NO: 1093936 - DNA, 15 bp, Homo sapiens
gccatgtgagtggac

SEQ ID NO: 1093937 - DNA, 15 bp, Homo sapiens
agccatgtgagtgga

SEQ ID NO: 1093938 - DNA, 15 bp, Homo sapiens
cagccatgtgagtgg

SEQ ID NO: 1093939 - DNA, 15 bp, Homo sapiens
ccagccatgtgagtg

SEQ ID NO: 1093940 - DNA, 15 bp, Homo sapiens
gccagccatgtgagt

SEQ ID NO: 1093941 - DNA, 15 bp, Homo sapiens
tgccagccatgtgag

SEQ ID NO: 1093942 - DNA, 15 bp, Homo sapiens
ttgccagccatgtga

SEQ ID NO: 1093943 - DNA, 15 bp, Homo sapiens
cttgccagccatgtg

SEQ ID NO: 1093944 - DNA, 15 bp, Homo sapiens
acttgccagccatgt

SEQ ID NO: 1093945 - DNA, 15 bp, Homo sapiens
aacttgccagccatg

SEQ ID NO: 1093946 - DNA, 15 bp, Homo sapiens
caacttgccagccat

SEQ ID NO: 1093947 - DNA, 15 bp, Homo sapiens
ccaacttgccagcca

SEQ ID NO: 1093948 - DNA, 15 bp, Homo sapiens
tccaacttgccagcc

SEQ ID NO: 1093949 - DNA, 15 bp, Homo sapiens
ctccaacttgccagc

SEQ ID NO: 1093950 - DNA, 15 bp, Homo sapiens
actccaacttgccag

SEQ ID NO: 1093951 - DNA, 15 bp, Homo sapiens
aactccaacttgcca

SEQ ID NO: 1093952 - DNA, 15 bp, Homo sapiens
caactccaacttgcc

SEQ ID NO: 1093953 - DNA, 15 bp, Homo sapiens
gcaactccaacttgc

SEQ ID NO: 1093954 - DNA, 15 bp, Homo sapiens
cgcaactccaacttg

SEQ ID NO: 1093955 - DNA, 15 bp, Homo sapiens
acgcaactccaactt

SEQ ID NO: 1093956 - DNA, 15 bp, Homo sapiens
tacgcaactccaact

SEQ ID NO: 1093957 - DNA, 15 bp, Homo sapiens
atacgcaactccaac

SEQ ID NO: 1093958 - DNA, 15 bp, Homo sapiens
aatacgcaactccaa

SEQ ID NO: 1093959 - DNA, 15 bp, Homo sapiens
caatacgcaactcca

SEQ ID NO: 1093960 - DNA, 15 bp, Homo sapiens
ccaatacgcaactcc

SEQ ID NO: 1093961 - DNA, 15 bp, Homo sapiens
gccaatacgcaactc

SEQ ID NO: 1093962 - DNA, 15 bp, Homo sapiens
tgccaatacgcaact

SEQ ID NO: 1093963 - DNA, 15 bp, Homo sapiens
ttgccaatacgcaac

SEQ ID NO: 1093964 - DNA, 15 bp, Homo sapiens
cttgccaatacgcaa

SEQ ID NO: 1093965 - DNA, 15 bp, Homo sapiens
tcttgccaatacgca

SEQ ID NO: 1093966 - DNA, 15 bp, Homo sapiens
ctcttgccaatacgc

SEQ ID NO: 1093967 - DNA, 15 bp, Homo sapiens
tctcttgccaatacg

SEQ ID NO: 1093968 - DNA, 15 bp, Homo sapiens
gtctcttgccaatac

SEQ ID NO: 1093969 - DNA, 15 bp, Homo sapiens
agtctcttgccaata

SEQ ID NO: 1093970 - DNA, 15 bp, Homo sapiens
aagtctcttgccaat

SEQ ID NO: 1093971 - DNA, 15 bp, Homo sapiens
gaagtctcttgccaa

SEQ ID NO: 1093972 - DNA, 15 bp, Homo sapiens
cgaagtctcttgcca

SEQ ID NO: 1093973 - DNA, 15 bp, Homo sapiens
gcgaagtctcttgcc

SEQ ID NO: 1093974 - DNA, 15 bp, Homo sapiens
agcgaagtctcttgc

SEQ ID NO: 1093975 - DNA, 15 bp, Homo sapiens
aagcgaagtctcttg

SEQ ID NO: 1093976 - DNA, 15 bp, Homo sapiens
gaagcgaagtctctt

SEQ ID NO: 1093977 - DNA, 15 bp, Homo sapiens
agaagcgaagtctct

SEQ ID NO: 1093978 - DNA, 15 bp, Homo sapiens
aagaagcgaagtctc

SEQ ID NO: 1093979 - DNA, 15 bp, Homo sapiens
gaagaagcgaagtct

SEQ ID NO: 1093980 - DNA, 15 bp, Homo sapiens
agaagaagcgaagtc

SEQ ID NO: 1093981 - DNA, 15 bp, Homo sapiens
gagaagaagcgaagt

SEQ ID NO: 1093982 - DNA, 15 bp, Homo sapiens
tgagaagaagcgaag

SEQ ID NO: 1093983 - DNA, 15 bp, Homo sapiens
ttgagaagaagcgaa

SEQ ID NO: 1093984 - DNA, 15 bp, Homo sapiens
attgagaagaagcga

SEQ ID NO: 1093985 - DNA, 15 bp, Homo sapiens
cattgagaagaagcg

SEQ ID NO: 1093986 - DNA, 15 bp, Homo sapiens
ccattgagaagaagc

SEQ ID NO: 1093987 - DNA, 15 bp, Homo sapiens
tccattgagaagaag

SEQ ID NO: 1093988 - DNA, 15 bp, Homo sapiens
atccattgagaagaa

SEQ ID NO: 1093989 - DNA, 15 bp, Homo sapiens
gatccattgagaaga

SEQ ID NO: 1093990 - DNA, 15 bp, Homo sapiens
agatccattgagaag

SEQ ID NO: 1093991 - DNA, 15 bp, Homo sapiens
aagatccattgagaa

SEQ ID NO: 1093992 - DNA, 15 bp, Homo sapiens
gaagatccattgaga

SEQ ID NO: 1093993 - DNA, 15 bp, Homo sapiens
ggaagatccattgag

SEQ ID NO: 1093994 - DNA, 15 bp, Homo sapiens
gggaagatccattga

SEQ ID NO: 1093995 - DNA, 15 bp, Homo sapiens
tgggaagatccattg

SEQ ID NO: 1093996 - DNA, 15 bp, Homo sapiens
ctgggaagatccatt

SEQ ID NO: 1093997 - DNA, 15 bp, Homo sapiens
tctgggaagatccat

SEQ ID NO: 1093998 - DNA, 15 bp, Homo sapiens
ctctgggaagatcca

SEQ ID NO: 1093999 - DNA, 15 bp, Homo sapiens
actctgggaagatcc

SEQ ID NO: 1094000 - DNA, 15 bp, Homo sapiens
aactctgggaagatc

SEQ ID NO: 1094001 - DNA, 15 bp, Homo sapiens
gaactctgggaagat

SEQ ID NO: 1094002 - DNA, 15 bp, Homo sapiens
agaactctgggaaga

SEQ ID NO: 1094003 - DNA, 15 bp, Homo sapiens
aagaactctgggaag

SEQ ID NO: 1094004 - DNA, 15 bp, Homo sapiens
caagaactctgggaa

SEQ ID NO: 1094005 - DNA, 15 bp, Homo sapiens
acaagaactctggga

SEQ ID NO: 1094006 - DNA, 15 bp, Homo sapiens
tacaagaactctggg

SEQ ID NO: 1094007 - DNA, 15 bp, Homo sapiens
ctacaagaactctgg

SEQ ID NO: 1094008 - DNA, 15 bp, Homo sapiens
cctacaagaactctg

SEQ ID NO: 1094009 - DNA, 15 bp, Homo sapiens
gcctacaagaactct

SEQ ID NO: 1094010 - DNA, 15 bp, Homo sapiens
tgcctacaagaactc

SEQ ID NO: 1094011 - DNA, 15 bp, Homo sapiens
ttgcctacaagaact

SEQ ID NO: 1094012 - DNA, 15 bp, Homo sapiens
gttgcctacaagaac

SEQ ID NO: 1094013 - DNA, 15 bp, Homo sapiens
ggttgcctacaagaa

SEQ ID NO: 1094014 - DNA, 15 bp, Homo sapiens
aggttgcctacaaga

SEQ ID NO: 1094015 - DNA, 15 bp, Homo sapiens
gaggttgcctacaag

SEQ ID NO: 1094016 - DNA, 15 bp, Homo sapiens
tgaggttgcctacaa

SEQ ID NO: 1094017 - DNA, 15 bp, Homo sapiens
atgaggttgcctaca

SEQ ID NO: 1094018 - DNA, 15 bp, Homo sapiens
tatgaggttgcctac

SEQ ID NO: 1094019 - DNA, 15 bp, Homo sapiens
ctatgaggttgccta

SEQ ID NO: 1094020 - DNA, 15 bp, Homo sapiens
gctatgaggttgcct

SEQ ID NO: 1094021 - DNA, 15 bp, Homo sapiens
tgctatgaggttgcc

SEQ ID NO: 1094022 - DNA, 15 bp, Homo sapiens
atgctatgaggttgc

SEQ ID NO: 1094023 - DNA, 15 bp, Homo sapiens
tatgctatgaggttg

SEQ ID NO: 1094024 - DNA, 15 bp, Homo sapiens
ctatgctatgaggtt

SEQ ID NO: 1094025 - DNA, 15 bp, Homo sapiens
gctatgctatgaggt

SEQ ID NO: 1094026 - DNA, 15 bp, Homo sapiens
tgctatgctatgagg

SEQ ID NO: 1094027 - DNA, 15 bp, Homo sapiens
ctgctatgctatgag

SEQ ID NO: 1094028 - DNA, 15 bp, Homo sapiens
actgctatgctatga

SEQ ID NO: 1094029 - DNA, 15 bp, Homo sapiens
aactgctatgctatg

SEQ ID NO: 1094030 - DNA, 15 bp, Homo sapiens
caactgctatgctat

SEQ ID NO: 1094031 - DNA, 15 bp, Homo sapiens
ccaactgctatgcta

SEQ ID NO: 1094032 - DNA, 15 bp, Homo sapiens
gccaactgctatgct

SEQ ID NO: 1094033 - DNA, 15 bp, Homo sapiens
agccaactgctatgc

SEQ ID NO: 1094034 - DNA, 15 bp, Homo sapiens
aagccaactgctatg

SEQ ID NO: 1094035 - DNA, 15 bp, Homo sapiens
gaagccaactgctat

SEQ ID NO: 1094036 - DNA, 15 bp, Homo sapiens
ggaagccaactgcta

SEQ ID NO: 1094037 - DNA, 15 bp, Homo sapiens
gggaagccaactgct

SEQ ID NO: 1094038 - DNA, 15 bp, Homo sapiens
ggggaagccaactgc

SEQ ID NO: 1094039 - DNA, 15 bp, Homo sapiens
gggggaagccaactg

SEQ ID NO: 1094040 - DNA, 15 bp, Homo sapiens
tgggggaagccaact

SEQ ID NO: 1094041 - DNA, 15 bp, Homo sapiens
ctgggggaagccaac

SEQ ID NO: 1094042 - DNA, 15 bp, Homo sapiens
tctgggggaagccaa

SEQ ID NO: 1094043 - DNA, 15 bp, Homo sapiens
ctctgggggaagcca

SEQ ID NO: 1094044 - DNA, 15 bp, Homo sapiens
cctctgggggaagcc

SEQ ID NO: 1094045 - DNA, 15 bp, Homo sapiens
ccctctgggggaagc

SEQ ID NO: 1094046 - DNA, 15 bp, Homo sapiens
tccctctgggggaag

SEQ ID NO: 1094047 - DNA, 15 bp, Homo sapiens
ttccctctgggggaa

SEQ ID NO: 1094048 - DNA, 15 bp, Homo sapiens
gttccctctggggga

SEQ ID NO: 1094049 - DNA, 15 bp, Homo sapiens
tgttccctctggggg

SEQ ID NO: 1094050 - DNA, 15 bp, Homo sapiens
ctgttccctctgggg

SEQ ID NO: 1094051 - DNA, 15 bp, Homo sapiens
actgttccctctggg

SEQ ID NO: 1094052 - DNA, 15 bp, Homo sapiens
gactgttccctctgg

SEQ ID NO: 1094053 - DNA, 15 bp, Homo sapiens
ggactgttccctctg

SEQ ID NO: 1094054 - DNA, 15 bp, Homo sapiens
tggactgttccctct

SEQ ID NO: 1094055 - DNA, 15 bp, Homo sapiens
ctggactgttccctc

SEQ ID NO: 1094056 - DNA, 15 bp, Homo sapiens
cctggactgttccct

SEQ ID NO: 1094057 - DNA, 15 bp, Homo sapiens
tcctggactgttccc

SEQ ID NO: 1094058 - DNA, 15 bp, Homo sapiens
ctcctggactgttcc

SEQ ID NO: 1094059 - DNA, 15 bp, Homo sapiens
tctcctggactgttc

SEQ ID NO: 1094060 - DNA, 15 bp, Homo sapiens
ctctcctggactgtt

SEQ ID NO: 1094061 - DNA, 15 bp, Homo sapiens
tctctcctggactgt

SEQ ID NO: 1094062 - DNA, 15 bp, Homo sapiens
ttctctcctggactg

SEQ ID NO: 1094063 - DNA, 15 bp, Homo sapiens
gttctctcctggact

SEQ ID NO: 1094064 - DNA, 15 bp, Homo sapiens
tgttctctcctggac

SEQ ID NO: 1094065 - DNA, 15 bp, Homo sapiens
ttgttctctcctgga

SEQ ID NO: 1094066 - DNA, 15 bp, Homo sapiens
cttgttctctcctgg

SEQ ID NO: 1094067 - DNA, 15 bp, Homo sapiens
ccttgttctctcctg

SEQ ID NO: 1094068 - DNA, 15 bp, Homo sapiens
gccttgttctctcct

SEQ ID NO: 1094069 - DNA, 15 bp, Homo sapiens
tgccttgttctctcc

SEQ ID NO: 1094070 - DNA, 15 bp, Homo sapiens
ctgccttgttctctc

SEQ ID NO: 1094071 - DNA, 15 bp, Homo sapiens
tctgccttgttctct

SEQ ID NO: 1094072 - DNA, 15 bp, Homo sapiens
ttctgccttgttctc

SEQ ID NO: 1094073 - DNA, 15 bp, Homo sapiens
tttctgccttgttct

SEQ ID NO: 1094074 - DNA, 15 bp, Homo sapiens
gtttctgccttgttc

SEQ ID NO: 1094075 - DNA, 15 bp, Homo sapiens
ggtttctgccttgtt

SEQ ID NO: 1094076 - DNA, 15 bp, Homo sapiens
tggtttctgccttgt

SEQ ID NO: 1094077 - DNA, 15 bp, Homo sapiens
gtggtttctgccttg

SEQ ID NO: 1094078 - DNA, 15 bp, Homo sapiens
tgtggtttctgcctt

SEQ ID NO: 1094079 - DNA, 15 bp, Homo sapiens
ctgtggtttctgcct

SEQ ID NO: 1094080 - DNA, 15 bp, Homo sapiens
cctgtggtttctgcc

SEQ ID NO: 1094081 - DNA, 15 bp, Homo sapiens
ccctgtggtttctgc

SEQ ID NO: 1094082 - DNA, 15 bp, Homo sapiens
accctgtggtttctg

SEQ ID NO: 1094083 - DNA, 15 bp, Homo sapiens
gaccctgtggtttct

SEQ ID NO: 1094084 - DNA, 15 bp, Homo sapiens
agaccctgtggtttc

SEQ ID NO: 1094085 - DNA, 15 bp, Homo sapiens
aagaccctgtggttt

SEQ ID NO: 1094086 - DNA, 15 bp, Homo sapiens
aaagaccctgtggtt

SEQ ID NO: 1094087 - DNA, 15 bp, Homo sapiens
aaaagaccctgtggt

SEQ ID NO: 1094088 - DNA, 15 bp, Homo sapiens
gaaaagaccctgtgg

SEQ ID NO: 1094089 - DNA, 15 bp, Homo sapiens
agaaaagaccctgtg

SEQ ID NO: 1094090 - DNA, 15 bp, Homo sapiens
cagaaaagaccctgt

SEQ ID NO: 1094091 - DNA, 15 bp, Homo sapiens
ccagaaaagaccctg

SEQ ID NO: 1094092 - DNA, 15 bp, Homo sapiens
gccagaaaagaccct

SEQ ID NO: 1094093 - DNA, 15 bp, Homo sapiens
agccagaaaagaccc

SEQ ID NO: 1094094 - DNA, 15 bp, Homo sapiens
aagccagaaaagacc

SEQ ID NO: 1094095 - DNA, 15 bp, Homo sapiens
taagccagaaaagac

SEQ ID NO: 1094096 - DNA, 15 bp, Homo sapiens
ctaagccagaaaaga

SEQ ID NO: 1094097 - DNA, 15 bp, Homo sapiens
cctaagccagaaaag

SEQ ID NO: 1094098 - DNA, 15 bp, Homo sapiens
gcctaagccagaaaa

SEQ ID NO: 1094099 - DNA, 15 bp, Homo sapiens
agcctaagccagaaa

SEQ ID NO: 1094100 - DNA, 15 bp, Homo sapiens
gagcctaagccagaa

SEQ ID NO: 1094101 - DNA, 15 bp, Homo sapiens
ggagcctaagccaga

SEQ ID NO: 1094102 - DNA, 15 bp, Homo sapiens
tggagcctaagccag

SEQ ID NO: 1094103 - DNA, 15 bp, Homo sapiens
ttggagcctaagcca

SEQ ID NO: 1094104 - DNA, 15 bp, Homo sapiens
tttggagcctaagcc

SEQ ID NO: 1094105 - DNA, 15 bp, Homo sapiens
ctttggagcctaagc

SEQ ID NO: 1094106 - DNA, 15 bp, Homo sapiens
actttggagcctaag

SEQ ID NO: 1094107 - DNA, 15 bp, Homo sapiens
gactttggagcctaa

SEQ ID NO: 1094108 - DNA, 15 bp, Homo sapiens
tgactttggagccta

SEQ ID NO: 1094109 - DNA, 15 bp, Homo sapiens
atgactttggagcct

SEQ ID NO: 1094110 - DNA, 15 bp, Homo sapiens
tatgactttggagcc

SEQ ID NO: 1094111 - DNA, 15 bp, Homo sapiens
gtatgactttggagc

SEQ ID NO: 1094112 - DNA, 15 bp, Homo sapiens
agtatgactttggag

SEQ ID NO: 1094113 - DNA, 15 bp, Homo sapiens
gagtatgactttgga

SEQ ID NO: 1094114 - DNA, 15 bp, Homo sapiens
ggagtatgactttgg

SEQ ID NO: 1094115 - DNA, 15 bp, Homo sapiens
tggagtatgactttg

SEQ ID NO: 1094116 - DNA, 15 bp, Homo sapiens
gtggagtatgacttt

SEQ ID NO: 1094117 - DNA, 15 bp, Homo sapiens
ggtggagtatgactt

SEQ ID NO: 1094118 - DNA, 15 bp, Homo sapiens
tggtggagtatgact

SEQ ID NO: 1094119 - DNA, 15 bp, Homo sapiens
atggtggagtatgac

SEQ ID NO: 1094120 - DNA, 15 bp, Homo sapiens
aatggtggagtatga

SEQ ID NO: 1094121 - DNA, 15 bp, Homo sapiens
aaatggtggagtatg

SEQ ID NO: 1094122 - DNA, 15 bp, Homo sapiens
gaaatggtggagtat

SEQ ID NO: 1094123 - DNA, 15 bp, Homo sapiens
agaaatggtggagta

SEQ ID NO: 1094124 - DNA, 15 bp, Homo sapiens
cagaaatggtggagt

SEQ ID NO: 1094125 - DNA, 15 bp, Homo sapiens
gcagaaatggtggag

SEQ ID NO: 1094126 - DNA, 15 bp, Homo sapiens
tgcagaaatggtgga

SEQ ID NO: 1094127 - DNA, 15 bp, Homo sapiens
atgcagaaatggtgg

SEQ ID NO: 1094128 - DNA, 15 bp, Homo sapiens
aatgcagaaatggtg

SEQ ID NO: 1094129 - DNA, 15 bp, Homo sapiens
taatgcagaaatggt

SEQ ID NO: 1094130 - DNA, 15 bp, Homo sapiens
ataatgcagaaatgg

SEQ ID NO: 1094131 - DNA, 15 bp, Homo sapiens
gataatgcagaaatg

SEQ ID NO: 1094132 - DNA, 15 bp, Homo sapiens
tgataatgcagaaat

SEQ ID NO: 1094133 - DNA, 15 bp, Homo sapiens
atgataatgcagaaa

SEQ ID NO: 1094134 - DNA, 15 bp, Homo sapiens
tatgataatgcagaa

SEQ ID NO: 1094135 - DNA, 15 bp, Homo sapiens
atatgataatgcaga

SEQ ID NO: 1094136 - DNA, 15 bp, Homo sapiens
aatatgataatgcag

SEQ ID NO: 1094137 - DNA, 15 bp, Homo sapiens
taatatgataatgca

SEQ ID NO: 1094138 - DNA, 15 bp, Homo sapiens
ctaatatgataatgc

SEQ ID NO: 1094139 - DNA, 15 bp, Homo sapiens
actaatatgataatg

SEQ ID NO: 1094140 - DNA, 15 bp, Homo sapiens
aactaatatgataat

SEQ ID NO: 1094141 - DNA, 15 bp, Homo sapiens
taactaatatgataa

SEQ ID NO: 1094142 - DNA, 15 bp, Homo sapiens
gtaactaatatgata

SEQ ID NO: 1094143 - DNA, 15 bp, Homo sapiens
tgtaactaatatgat

SEQ ID NO: 1094144 - DNA, 15 bp, Homo sapiens
gtgtaactaatatga

SEQ ID NO: 1094145 - DNA, 15 bp, Homo sapiens
tgtgtaactaatatg

SEQ ID NO: 1094146 - DNA, 15 bp, Homo sapiens
ctgtgtaactaatat

SEQ ID NO: 1094147 - DNA, 15 bp, Homo sapiens
cctgtgtaactaata

SEQ ID NO: 1094148 - DNA, 15 bp, Homo sapiens
gcctgtgtaactaat

SEQ ID NO: 1094149 - DNA, 15 bp, Homo sapiens
agcctgtgtaactaa

SEQ ID NO: 1094150 - DNA, 15 bp, Homo sapiens
tagcctgtgtaacta

SEQ ID NO: 1094151 - DNA, 15 bp, Homo sapiens
ctagcctgtgtaact

SEQ ID NO: 1094152 - DNA, 15 bp, Homo sapiens
tctagcctgtgtaac

SEQ ID NO: 1094153 - DNA, 15 bp, Homo sapiens
gtctagcctgtgtaa

SEQ ID NO: 1094154 - DNA, 15 bp, Homo sapiens
ggtctagcctgtgta

SEQ ID NO: 1094155 - DNA, 15 bp, Homo sapiens
aggtctagcctgtgt

SEQ ID NO: 1094156 - DNA, 15 bp, Homo sapiens
taggtctagcctgtg

SEQ ID NO: 1094157 - DNA, 15 bp, Homo sapiens
ataggtctagcctgt

SEQ ID NO: 1094158 - DNA, 15 bp, Homo sapiens
aataggtctagcctg

SEQ ID NO: 1094159 - DNA, 15 bp, Homo sapiens
gaataggtctagcct

SEQ ID NO: 1094160 - DNA, 15 bp, Homo sapiens
agaataggtctagcc

SEQ ID NO: 1094161 - DNA, 15 bp, Homo sapiens
cagaataggtctagc

SEQ ID NO: 1094162 - DNA, 15 bp, Homo sapiens
gcagaataggtctag

SEQ ID NO: 1094163 - DNA, 15 bp, Homo sapiens
tgcagaataggtcta

SEQ ID NO: 1094164 - DNA, 15 bp, Homo sapiens
atgcagaataggtct

SEQ ID NO: 1094165 - DNA, 15 bp, Homo sapiens
catgcagaataggtc

SEQ ID NO: 1094166 - DNA, 15 bp, Homo sapiens
ccatgcagaataggt

SEQ ID NO: 1094167 - DNA, 15 bp, Homo sapiens
tccatgcagaatagg

SEQ ID NO: 1094168 - DNA, 15 bp, Homo sapiens
ttccatgcagaatag

SEQ ID NO: 1094169 - DNA, 15 bp, Homo sapiens
cttccatgcagaata

SEQ ID NO: 1094170 - DNA, 15 bp, Homo sapiens
tcttccatgcagaat

SEQ ID NO: 1094171 - DNA, 15 bp, Homo sapiens
ctcttccatgcagaa

SEQ ID NO: 1094172 - DNA, 15 bp, Homo sapiens
tctcttccatgcaga

SEQ ID NO: 1094173 - DNA, 15 bp, Homo sapiens
gtctcttccatgcag

SEQ ID NO: 1094174 - DNA, 15 bp, Homo sapiens
agtctcttccatgca

SEQ ID NO: 1094175 - DNA, 15 bp, Homo sapiens
tagtctcttccatgc

SEQ ID NO: 1094176 - DNA, 15 bp, Homo sapiens
atagtctcttccatg

SEQ ID NO: 1094177 - DNA, 15 bp, Homo sapiens
tatagtctcttccat

SEQ ID NO: 1094178 - DNA, 15 bp, Homo sapiens
gtatagtctcttcca

SEQ ID NO: 1094179 - DNA, 15 bp, Homo sapiens
ggtatagtctcttcc

SEQ ID NO: 1094180 - DNA, 15 bp, Homo sapiens
tggtatagtctcttc

SEQ ID NO: 1094181 - DNA, 15 bp, Homo sapiens
atggtatagtctctt

SEQ ID NO: 1094182 - DNA, 15 bp, Homo sapiens
catggtatagtctct

SEQ ID NO: 1094183 - DNA, 15 bp, Homo sapiens
ccatggtatagtctc

SEQ ID NO: 1094184 - DNA, 15 bp, Homo sapiens
cccatggtatagtct

SEQ ID NO: 1094185 - DNA, 15 bp, Homo sapiens
ccccatggtatagtc

SEQ ID NO: 1094186 - DNA, 15 bp, Homo sapiens
accccatggtatagt

SEQ ID NO: 1094187 - DNA, 15 bp, Homo sapiens
caccccatggtatag

SEQ ID NO: 1094188 - DNA, 15 bp, Homo sapiens
tcaccccatggtata

SEQ ID NO: 1094189 - DNA, 15 bp, Homo sapiens
ttcaccccatggtat

SEQ ID NO: 1094190 - DNA, 15 bp, Homo sapiens
attcaccccatggta

SEQ ID NO: 1094191 - DNA, 15 bp, Homo sapiens
tattcaccccatggt

SEQ ID NO: 1094192 - DNA, 15 bp, Homo sapiens
gtattcaccccatgg

SEQ ID NO: 1094193 - DNA, 15 bp, Homo sapiens
ggtattcaccccatg

SEQ ID NO: 1094194 - DNA, 15 bp, Homo sapiens
tggtattcaccccat

SEQ ID NO: 1094195 - DNA, 15 bp, Homo sapiens
ctggtattcacccca

SEQ ID NO: 1094196 - DNA, 15 bp, Homo sapiens
tctggtattcacccc

SEQ ID NO: 1094197 - DNA, 15 bp, Homo sapiens
ttctggtattcaccc

SEQ ID NO: 1094198 - DNA, 15 bp, Homo sapiens
cttctggtattcacc

SEQ ID NO: 1094199 - DNA, 15 bp, Homo sapiens
gcttctggtattcac

SEQ ID NO: 1094200 - DNA, 15 bp, Homo sapiens
tgcttctggtattca

SEQ ID NO: 1094201 - DNA, 15 bp, Homo sapiens
ctgcttctggtattc

SEQ ID NO: 1094202 - DNA, 15 bp, Homo sapiens
cctgcttctggtatt

SEQ ID NO: 1094203 - DNA, 15 bp, Homo sapiens
ccctgcttctggtat

SEQ ID NO: 1094204 - DNA, 15 bp, Homo sapiens
gccctgcttctggta

SEQ ID NO: 1094205 - DNA, 15 bp, Homo sapiens
agccctgcttctggt

SEQ ID NO: 1094206 - DNA, 15 bp, Homo sapiens
tagccctgcttctgg

SEQ ID NO: 1094207 - DNA, 15 bp, Homo sapiens
ttagccctgcttctg

SEQ ID NO: 1094208 - DNA, 15 bp, Homo sapiens
attagccctgcttct

SEQ ID NO: 1094209 - DNA, 15 bp, Homo sapiens
aattagccctgcttc

SEQ ID NO: 1094210 - DNA, 15 bp, Homo sapiens
caattagccctgctt

SEQ ID NO: 1094211 - DNA, 15 bp, Homo sapiens
tcaattagccctgct

SEQ ID NO: 1094212 - DNA, 15 bp, Homo sapiens
ttcaattagccctgc

SEQ ID NO: 1094213 - DNA, 15 bp, Homo sapiens
cttcaattagccctg

SEQ ID NO: 1094214 - DNA, 15 bp, Homo sapiens
ccttcaattagccct

SEQ ID NO: 1094215 - DNA, 15 bp, Homo sapiens
gccttcaattagccc

SEQ ID NO: 1094216 - DNA, 15 bp, Homo sapiens
ggccttcaattagcc

SEQ ID NO: 1094217 - DNA, 15 bp, Homo sapiens
tggccttcaattagc

SEQ ID NO: 1094218 - DNA, 15 bp, Homo sapiens
ctggccttcaattag

SEQ ID NO: 1094219 - DNA, 15 bp, Homo sapiens
gctggccttcaatta

SEQ ID NO: 1094220 - DNA, 15 bp, Homo sapiens
agctggccttcaatt

SEQ ID NO: 1094221 - DNA, 15 bp, Homo sapiens
aagctggccttcaat

SEQ ID NO: 1094222 - DNA, 15 bp, Homo sapiens
gaagctggccttcaa

SEQ ID NO: 1094223 - DNA, 15 bp, Homo sapiens
tgaagctggccttca

SEQ ID NO: 1094224 - DNA, 15 bp, Homo sapiens
ttgaagctggccttc

SEQ ID NO: 1094225 - DNA, 15 bp, Homo sapiens
cttgaagctggcctt

SEQ ID NO: 1094226 - DNA, 15 bp, Homo sapiens
ccttgaagctggcct

SEQ ID NO: 1094227 - DNA, 15 bp, Homo sapiens
cccttgaagctggcc

SEQ ID NO: 1094228 - DNA, 15 bp, Homo sapiens
gcccttgaagctggc

SEQ ID NO: 1094229 - DNA, 15 bp, Homo sapiens
cgcccttgaagctgg

SEQ ID NO: 1094230 - DNA, 15 bp, Homo sapiens
ccgcccttgaagctg

SEQ ID NO: 1094231 - DNA, 15 bp, Homo sapiens
gccgcccttgaagct

SEQ ID NO: 1094232 - DNA, 15 bp, Homo sapiens
agccgcccttgaagc

SEQ ID NO: 1094233 - DNA, 15 bp, Homo sapiens
tagccgcccttgaag

SEQ ID NO: 1094234 - DNA, 15 bp, Homo sapiens
gtagccgcccttgaa

SEQ ID NO: 1094235 - DNA, 15 bp, Homo sapiens
tgtagccgcccttga

SEQ ID NO: 1094236 - DNA, 15 bp, Homo sapiens
gtgtagccgcccttg

SEQ ID NO: 1094237 - DNA, 15 bp, Homo sapiens
tgtgtagccgccctt

SEQ ID NO: 1094238 - DNA, 15 bp, Homo sapiens
atgtgtagccgccct

SEQ ID NO: 1094239 - DNA, 15 bp, Homo sapiens
aatgtgtagccgccc

SEQ ID NO: 1094240 - DNA, 15 bp, Homo sapiens
gaatgtgtagccgcc

SEQ ID NO: 1094241 - DNA, 15 bp, Homo sapiens
ggaatgtgtagccgc

SEQ ID NO: 1094242 - DNA, 15 bp, Homo sapiens
gggaatgtgtagccg

SEQ ID NO: 1094243 - DNA, 15 bp, Homo sapiens
agggaatgtgtagcc

SEQ ID NO: 1094244 - DNA, 15 bp, Homo sapiens
aagggaatgtgtagc

SEQ ID NO: 1094245 - DNA, 15 bp, Homo sapiens
aaagggaatgtgtag

SEQ ID NO: 1094246 - DNA, 15 bp, Homo sapiens
gaaagggaatgtgta

SEQ ID NO: 1094247 - DNA, 15 bp, Homo sapiens
tgaaagggaatgtgt

SEQ ID NO: 1094248 - DNA, 15 bp, Homo sapiens
ttgaaagggaatgtg

SEQ ID NO: 1094249 - DNA, 15 bp, Homo sapiens
gttgaaagggaatgt

SEQ ID NO: 1094250 - DNA, 15 bp, Homo sapiens
tgttgaaagggaatg

SEQ ID NO: 1094251 - DNA, 15 bp, Homo sapiens
ctgttgaaagggaat

SEQ ID NO: 1094252 - DNA, 15 bp, Homo sapiens
actgttgaaagggaa

SEQ ID NO: 1094253 - DNA, 15 bp, Homo sapiens
tactgttgaaaggga

SEQ ID NO: 1094254 - DNA, 15 bp, Homo sapiens
atactgttgaaaggg

SEQ ID NO: 1094255 - DNA, 15 bp, Homo sapiens
catactgttgaaagg

SEQ ID NO: 1094256 - DNA, 15 bp, Homo sapiens
acatactgttgaaag

SEQ ID NO: 1094257 - DNA, 15 bp, Homo sapiens
gacatactgttgaaa

SEQ ID NO: 1094258 - DNA, 15 bp, Homo sapiens
tgacatactgttgaa

SEQ ID NO: 1094259 - DNA, 15 bp, Homo sapiens
atgacatactgttga

SEQ ID NO: 1094260 - DNA, 15 bp, Homo sapiens
catgacatactgttg

SEQ ID NO: 1094261 - DNA, 15 bp, Homo sapiens
tcatgacatactgtt

SEQ ID NO: 1094262 - DNA, 15 bp, Homo sapiens
ttcatgacatactgt

SEQ ID NO: 1094263 - DNA, 15 bp, Homo sapiens
gttcatgacatactg

SEQ ID NO: 1094264 - DNA, 15 bp, Homo sapiens
tgttcatgacatact

SEQ ID NO: 1094265 - DNA, 15 bp, Homo sapiens
atgttcatgacatac

SEQ ID NO: 1094266 - DNA, 15 bp, Homo sapiens
gatgttcatgacata

SEQ ID NO: 1094267 - DNA, 15 bp, Homo sapiens
agatgttcatgacat

SEQ ID NO: 1094268 - DNA, 15 bp, Homo sapiens
aagatgttcatgaca

SEQ ID NO: 1094269 - DNA, 15 bp, Homo sapiens
aaagatgttcatgac

SEQ ID NO: 1094270 - DNA, 15 bp, Homo sapiens
gaaagatgttcatga

SEQ ID NO: 1094271 - DNA, 15 bp, Homo sapiens
ggaaagatgttcatg

SEQ ID NO: 1094272 - DNA, 15 bp, Homo sapiens
tggaaagatgttcat

SEQ ID NO: 1094273 - DNA, 15 bp, Homo sapiens
atggaaagatgttca

SEQ ID NO: 1094274 - DNA, 15 bp, Homo sapiens
catggaaagatgttc

SEQ ID NO: 1094275 - DNA, 15 bp, Homo sapiens
gcatggaaagatgtt

SEQ ID NO: 1094276 - DNA, 15 bp, Homo sapiens
ggcatggaaagatgt

SEQ ID NO: 1094277 - DNA, 15 bp, Homo sapiens
tggcatggaaagatg

SEQ ID NO: 1094278 - DNA, 15 bp, Homo sapiens
ttggcatggaaagat

SEQ ID NO: 1094279 - DNA, 15 bp, Homo sapiens
attggcatggaaaga

SEQ ID NO: 1094280 - DNA, 15 bp, Homo sapiens
tattggcatggaaag

SEQ ID NO: 1094281 - DNA, 15 bp, Homo sapiens
ctattggcatggaaa

SEQ ID NO: 1094282 - DNA, 15 bp, Homo sapiens
tctattggcatggaa

SEQ ID NO: 1094283 - DNA, 15 bp, Homo sapiens
ctctattggcatgga

SEQ ID NO: 1094284 - DNA, 15 bp, Homo sapiens
gctctattggcatgg

SEQ ID NO: 1094285 - DNA, 15 bp, Homo sapiens
tgctctattggcatg

SEQ ID NO: 1094286 - DNA, 15 bp, Homo sapiens
ctgctctattggcat

SEQ ID NO: 1094287 - DNA, 15 bp, Homo sapiens
tctgctctattggca

SEQ ID NO: 1094288 - DNA, 15 bp, Homo sapiens
atctgctctattggc

SEQ ID NO: 1094289 - DNA, 15 bp, Homo sapiens
catctgctctattgg

SEQ ID NO: 1094290 - DNA, 15 bp, Homo sapiens
tcatctgctctattg

SEQ ID NO: 1094291 - DNA, 15 bp, Homo sapiens
ttcatctgctctatt

SEQ ID NO: 1094292 - DNA, 15 bp, Homo sapiens
attcatctgctctat

SEQ ID NO: 1094293 - DNA, 15 bp, Homo sapiens
gattcatctgctcta

SEQ ID NO: 1094294 - DNA, 15 bp, Homo sapiens
agattcatctgctct

SEQ ID NO: 1094295 - DNA, 15 bp, Homo sapiens
aagattcatctgctc

SEQ ID NO: 1094296 - DNA, 15 bp, Homo sapiens
taagattcatctgct

SEQ ID NO: 1094297 - DNA, 15 bp, Homo sapiens
gtaagattcatctgc

SEQ ID NO: 1094298 - DNA, 15 bp, Homo sapiens
ggtaagattcatctg

SEQ ID NO: 1094299 - DNA, 15 bp, Homo sapiens
tggtaagattcatct

SEQ ID NO: 1094300 - DNA, 15 bp, Homo sapiens
atggtaagattcatc

SEQ ID NO: 1094301 - DNA, 15 bp, Homo sapiens
aatggtaagattcat

SEQ ID NO: 1094302 - DNA, 15 bp, Homo sapiens
aaatggtaagattca

SEQ ID NO: 1094303 - DNA, 15 bp, Homo sapiens
attaaaaatggtaag

SEQ ID NO: 1094304 - DNA, 15 bp, Homo sapiens
cattaaaaatggtaa

SEQ ID NO: 1094305 - DNA, 15 bp, Homo sapiens
tcattaaaaatggta

SEQ ID NO: 1094306 - DNA, 15 bp, Homo sapiens
gtcattaaaaatggt

SEQ ID NO: 1094307 - DNA, 15 bp, Homo sapiens
agtcattaaaaatgg

SEQ ID NO: 1094308 - DNA, 15 bp, Homo sapiens
tagtcattaaaaatg

SEQ ID NO: 1094309 - DNA, 15 bp, Homo sapiens
gtagtcattaaaaat

SEQ ID NO: 1094310 - DNA, 15 bp, Homo sapiens
tgtagtcattaaaaa

SEQ ID NO: 1094311 - DNA, 15 bp, Homo sapiens
atgtagtcattaaaa

SEQ ID NO: 1094312 - DNA, 15 bp, Homo sapiens
catgtagtcattaaa

SEQ ID NO: 1094313 - DNA, 15 bp, Homo sapiens
acatgtagtcattaa

SEQ ID NO: 1094314 - DNA, 15 bp, Homo sapiens
tacatgtagtcatta

SEQ ID NO: 1094315 - DNA, 15 bp, Homo sapiens
ttacatgtagtcatt

SEQ ID NO: 1094316 - DNA, 15 bp, Homo sapiens
cttacatgtagtcat

SEQ ID NO: 1094317 - DNA, 15 bp, Homo sapiens
acttacatgtagtca

SEQ ID NO: 1094318 - DNA, 15 bp, Homo sapiens
cacttacatgtagtc

SEQ ID NO: 1094319 - DNA, 15 bp, Homo sapiens
acacttacatgtagt

SEQ ID NO: 1094320 - DNA, 15 bp, Homo sapiens
tacacttacatgtag

SEQ ID NO: 1094321 - DNA, 15 bp, Homo sapiens
ctacacttacatgta

SEQ ID NO: 1094322 - DNA, 15 bp, Homo sapiens
gctacacttacatgt

SEQ ID NO: 1094323 - DNA, 15 bp, Homo sapiens
tgctacacttacatg

SEQ ID NO: 1094324 - DNA, 15 bp, Homo sapiens
atgctacacttacat

SEQ ID NO: 1094325 - DNA, 15 bp, Homo sapiens
tatgctacacttaca

SEQ ID NO: 1094326 - DNA, 15 bp, Homo sapiens
ttatgctacacttac

SEQ ID NO: 1094327 - DNA, 15 bp, Homo sapiens
attatgctacactta

SEQ ID NO: 1094328 - DNA, 15 bp, Homo sapiens
aattatgctacactt

SEQ ID NO: 1094329 - DNA, 15 bp, Homo sapiens
aaattatgctacact

SEQ ID NO: 1094330 - DNA, 15 bp, Homo sapiens
taaattatgctacac

SEQ ID NO: 1094331 - DNA, 15 bp, Homo sapiens
ataaattatgctaca

SEQ ID NO: 1094332 - DNA, 15 bp, Homo sapiens
aataaattatgctac

SEQ ID NO: 1094333 - DNA, 15 bp, Homo sapiens
aaataaattatgcta

SEQ ID NO: 1094334 - DNA, 15 bp, Homo sapiens
taaataaattatgct

SEQ ID NO: 1094335 - DNA, 15 bp, Homo sapiens
ttaaataaattatgc

SEQ ID NO: 1094336 - DNA, 15 bp, Homo sapiens
gttaaataaattatg

SEQ ID NO: 1094337 - DNA, 15 bp, Homo sapiens
ggttaaataaattat

SEQ ID NO: 1094338 - DNA, 15 bp, Homo sapiens
tggttaaataaatta

SEQ ID NO: 1094339 - DNA, 15 bp, Homo sapiens
ttggttaaataaatt

SEQ ID NO: 1094340 - DNA, 15 bp, Homo sapiens
gttggttaaataaat

SEQ ID NO: 1094341 - DNA, 15 bp, Homo sapiens
ggttggttaaataaa

SEQ ID NO: 1094342 - DNA, 15 bp, Homo sapiens
aggttggttaaataa

SEQ ID NO: 1094343 - DNA, 15 bp, Homo sapiens
gaggttggttaaata

SEQ ID NO: 1094344 - DNA, 15 bp, Homo sapiens
ggaggttggttaaat

SEQ ID NO: 1094345 - DNA, 15 bp, Homo sapiens
aggaggttggttaaa

SEQ ID NO: 1094346 - DNA, 15 bp, Homo sapiens
caggaggttggttaa

SEQ ID NO: 1094347 - DNA, 15 bp, Homo sapiens
acaggaggttggtta

SEQ ID NO: 1094348 - DNA, 15 bp, Homo sapiens
tacaggaggttggtt

SEQ ID NO: 1094349 - DNA, 15 bp, Homo sapiens
ctacaggaggttggt

SEQ ID NO: 1094350 - DNA, 15 bp, Homo sapiens
actacaggaggttgg

SEQ ID NO: 1094351 - DNA, 15 bp, Homo sapiens
aactacaggaggttg

SEQ ID NO: 1094352 - DNA, 15 bp, Homo sapiens
caactacaggaggtt

SEQ ID NO: 1094353 - DNA, 15 bp, Homo sapiens
ccaactacaggaggt

SEQ ID NO: 1094354 - DNA, 15 bp, Homo sapiens
cccaactacaggagg

SEQ ID NO: 1094355 - DNA, 15 bp, Homo sapiens
acccaactacaggag

SEQ ID NO: 1094356 - DNA, 15 bp, Homo sapiens
tacccaactacagga

SEQ ID NO: 1094357 - DNA, 15 bp, Homo sapiens
atacccaactacagg

SEQ ID NO: 1094358 - DNA, 15 bp, Homo sapiens
catacccaactacag

SEQ ID NO: 1094359 - DNA, 15 bp, Homo sapiens
acatacccaactaca

SEQ ID NO: 1094360 - DNA, 15 bp, Homo sapiens
cacatacccaactac

SEQ ID NO: 1094361 - DNA, 15 bp, Homo sapiens
ccacatacccaacta

SEQ ID NO: 1094362 - DNA, 15 bp, Homo sapiens
cccacatacccaact

SEQ ID NO: 1094363 - DNA, 15 bp, Homo sapiens
acccacatacccaac

SEQ ID NO: 1094364 - DNA, 15 bp, Homo sapiens
aacccacatacccaa

SEQ ID NO: 1094365 - DNA, 15 bp, Homo sapiens
caacccacataccca

SEQ ID NO: 1094366 - DNA, 15 bp, Homo sapiens
acaacccacataccc

SEQ ID NO: 1094367 - DNA, 15 bp, Homo sapiens
cacaacccacatacc

SEQ ID NO: 1094368 - DNA, 15 bp, Homo sapiens
acacaacccacatac

SEQ ID NO: 1094369 - DNA, 15 bp, Homo sapiens
gacacaacccacata

SEQ ID NO: 1094370 - DNA, 15 bp, Homo sapiens
agacacaacccacat

SEQ ID NO: 1094371 - DNA, 15 bp, Homo sapiens
gagacacaacccaca

SEQ ID NO: 1094372 - DNA, 15 bp, Homo sapiens
cgagacacaacccac

SEQ ID NO: 1094373 - DNA, 15 bp, Homo sapiens
acgagacacaaccca

SEQ ID NO: 1094374 - DNA, 15 bp, Homo sapiens
aacgagacacaaccc

SEQ ID NO: 1094375 - DNA, 15 bp, Homo sapiens
aaacgagacacaacc

SEQ ID NO: 1094376 - DNA, 15 bp, Homo sapiens
aaaacgagacacaac

SEQ ID NO: 1094377 - DNA, 15 bp, Homo sapiens
aaaaacgagacacaa

SEQ ID NO: 1094378 - DNA, 15 bp, Homo sapiens
aaaaaacgagacaca

SEQ ID NO: 1094379 - DNA, 15 bp, Homo sapiens
caaaaaacgagacac

SEQ ID NO: 1094380 - DNA, 15 bp, Homo sapiens
tcaaaaaacgagaca

SEQ ID NO: 1094381 - DNA, 15 bp, Homo sapiens
atcaaaaaacgagac

SEQ ID NO: 1094382 - DNA, 15 bp, Homo sapiens
tatcaaaaaacgaga

SEQ ID NO: 1094383 - DNA, 15 bp, Homo sapiens
ctatcaaaaaacgag

SEQ ID NO: 1094384 - DNA, 15 bp, Homo sapiens
actatcaaaaaacga

SEQ ID NO: 1094385 - DNA, 15 bp, Homo sapiens
tactatcaaaaaacg

SEQ ID NO: 1094386 - DNA, 15 bp, Homo sapiens
ctactatcaaaaaac

SEQ ID NO: 1094387 - DNA, 15 bp, Homo sapiens
tctactatcaaaaaa

SEQ ID NO: 1094388 - DNA, 15 bp, Homo sapiens
ttctactatcaaaaa

SEQ ID NO: 1094389 - DNA, 15 bp, Homo sapiens
attctactatcaaaa

SEQ ID NO: 1094390 - DNA, 15 bp, Homo sapiens
aattctactatcaaa

SEQ ID NO: 1094391 - DNA, 15 bp, Homo sapiens
taattctactatcaa

SEQ ID NO: 1094392 - DNA, 15 bp, Homo sapiens
ttaattctactatca

SEQ ID NO: 1094393 - DNA, 15 bp, Homo sapiens
attaattctactatc

SEQ ID NO: 1094394 - DNA, 15 bp, Homo sapiens
gattaattctactat

SEQ ID NO: 1094395 - DNA, 15 bp, Homo sapiens
tgattaattctacta

SEQ ID NO: 1094396 - DNA, 15 bp, Homo sapiens
atgattaattctact

SEQ ID NO: 1094397 - DNA, 15 bp, Homo sapiens
gatgattaattctac

SEQ ID NO: 1094398 - DNA, 15 bp, Homo sapiens
agatgattaattcta

SEQ ID NO: 1094399 - DNA, 15 bp, Homo sapiens
aagatgattaattct

SEQ ID NO: 1094400 - DNA, 15 bp, Homo sapiens
caagatgattaattc

SEQ ID NO: 1094401 - DNA, 15 bp, Homo sapiens
tcaagatgattaatt

SEQ ID NO: 1094402 - DNA, 15 bp, Homo sapiens
ttcaagatgattaat

SEQ ID NO: 1094403 - DNA, 15 bp, Homo sapiens
attcaagatgattaa

SEQ ID NO: 1094404 - DNA, 15 bp, Homo sapiens
tattcaagatgatta

SEQ ID NO: 1094405 - DNA, 15 bp, Homo sapiens
atattcaagatgatt

SEQ ID NO: 1094406 - DNA, 15 bp, Homo sapiens
gatattcaagatgat

SEQ ID NO: 1094407 - DNA, 15 bp, Homo sapiens
ggatattcaagatga

SEQ ID NO: 1094408 - DNA, 15 bp, Homo sapiens
tggatattcaagatg

SEQ ID NO: 1094409 - DNA, 15 bp, Homo sapiens
atggatattcaagat

SEQ ID NO: 1094410 - DNA, 15 bp, Homo sapiens
gatggatattcaaga

SEQ ID NO: 1094411 - DNA, 15 bp, Homo sapiens
tgatggatattcaag

SEQ ID NO: 1094412 - DNA, 15 bp, Homo sapiens
gtgatggatattcaa

SEQ ID NO: 1094413 - DNA, 15 bp, Homo sapiens
ggtgatggatattca

SEQ ID NO: 1094414 - DNA, 15 bp, Homo sapiens
tggtgatggatattc

SEQ ID NO: 1094415 - DNA, 15 bp, Homo sapiens
ttggtgatggatatt

SEQ ID NO: 1094416 - DNA, 15 bp, Homo sapiens
tttggtgatggatat

SEQ ID NO: 1094417 - DNA, 15 bp, Homo sapiens
gtttggtgatggata

SEQ ID NO: 1094418 - DNA, 15 bp, Homo sapiens
agtttggtgatggat

SEQ ID NO: 1094419 - DNA, 15 bp, Homo sapiens
aagtttggtgatgga

SEQ ID NO: 1094420 - DNA, 15 bp, Homo sapiens
caagtttggtgatgg

SEQ ID NO: 1094421 - DNA, 15 bp, Homo sapiens
acaagtttggtgatg

SEQ ID NO: 1094422 - DNA, 15 bp, Homo sapiens
gacaagtttggtgat

SEQ ID NO: 1094423 - DNA, 15 bp, Homo sapiens
tgacaagtttggtga

SEQ ID NO: 1094424 - DNA, 15 bp, Homo sapiens
atgacaagtttggtg

SEQ ID NO: 1094425 - DNA, 15 bp, Homo sapiens
tatgacaagtttggt

SEQ ID NO: 1094426 - DNA, 15 bp, Homo sapiens
atatgacaagtttgg

SEQ ID NO: 1094427 - DNA, 15 bp, Homo sapiens
aatatgacaagtttg

SEQ ID NO: 1094428 - DNA, 15 bp, Homo sapiens
taatatgacaagttt

SEQ ID NO: 1094429 - DNA, 15 bp, Homo sapiens
ataatatgacaagtt

SEQ ID NO: 1094430 - DNA, 15 bp, Homo sapiens
aataatatgacaagt

SEQ ID NO: 1094431 - DNA, 15 bp, Homo sapiens
aaataatatgacaag

SEQ ID NO: 1094432 - DNA, 15 bp, Homo sapiens
aaaataatatgacaa

SEQ ID NO: 1094433 - DNA, 15 bp, Homo sapiens
gaaaataatatgaca

SEQ ID NO: 1094434 - DNA, 15 bp, Homo sapiens
agaaaataatatgac

SEQ ID NO: 1094435 - DNA, 15 bp, Homo sapiens
aagaaaataatatga

SEQ ID NO: 1094436 - DNA, 15 bp, Homo sapiens
aaagaaaataatatg

SEQ ID NO: 1094437 - DNA, 15 bp, Homo sapiens
aaaagaaaataatat

SEQ ID NO: 1094438 - DNA, 15 bp, Homo sapiens
caaaagaaaataata

SEQ ID NO: 1094439 - DNA, 15 bp, Homo sapiens
tcaaaagaaaataat

SEQ ID NO: 1094440 - DNA, 15 bp, Homo sapiens
atcaaaagaaaataa

SEQ ID NO: 1094441 - DNA, 15 bp, Homo sapiens
catcaaaagaaaata

SEQ ID NO: 1094442 - DNA, 15 bp, Homo sapiens
tcatcaaaagaaaat

SEQ ID NO: 1094443 - DNA, 15 bp, Homo sapiens
ttcatcaaaagaaaa

SEQ ID NO: 1094444 - DNA, 15 bp, Homo sapiens
attcatcaaaagaaa

SEQ ID NO: 1094445 - DNA, 15 bp, Homo sapiens
cattcatcaaaagaa

SEQ ID NO: 1094446 - DNA, 15 bp, Homo sapiens
tcattcatcaaaaga

SEQ ID NO: 1094447 - DNA, 15 bp, Homo sapiens
ttcattcatcaaaag

SEQ ID NO: 1094448 - DNA, 15 bp, Homo sapiens
tttcattcatcaaaa

SEQ ID NO: 1094449 - DNA, 15 bp, Homo sapiens
ttttcattcatcaaa

SEQ ID NO: 1094450 - DNA, 15 bp, Homo sapiens
tttttcattcatcaa

SEQ ID NO: 1094451 - DNA, 15 bp, Homo sapiens
ctttttcattcatca

SEQ ID NO: 1094452 - DNA, 15 bp, Homo sapiens
tctttttcattcatc

SEQ ID NO: 1094453 - DNA, 15 bp, Homo sapiens
ttctttttcattcat

SEQ ID NO: 1094454 - DNA, 15 bp, Homo sapiens
tttctttttcattca

SEQ ID NO: 1094455 - DNA, 15 bp, Homo sapiens
ttttctttttcattc

SEQ ID NO: 1094456 - DNA, 15 bp, Homo sapiens
attttctttttcatt

SEQ ID NO: 1094457 - DNA, 15 bp, Homo sapiens
gattttctttttcat

SEQ ID NO: 1094458 - DNA, 15 bp, Homo sapiens
tgattttctttttca

SEQ ID NO: 1094459 - DNA, 15 bp, Homo sapiens
ttgattttctttttc

SEQ ID NO: 1094460 - DNA, 15 bp, Homo sapiens
cttgattttcttttt

SEQ ID NO: 1094461 - DNA, 15 bp, Homo sapiens
acttgattttctttt

SEQ ID NO: 1094462 - DNA, 15 bp, Homo sapiens
gacttgattttcttt

SEQ ID NO: 1094463 - DNA, 15 bp, Homo sapiens
tgacttgattttctt

SEQ ID NO: 1094464 - DNA, 15 bp, Homo sapiens
atgacttgattttct

SEQ ID NO: 1094465 - DNA, 15 bp, Homo sapiens
catgacttgattttc

SEQ ID NO: 1094466 - DNA, 15 bp, Homo sapiens
acatgacttgatttt

SEQ ID NO: 1094467 - DNA, 15 bp, Homo sapiens
gacatgacttgattt

SEQ ID NO: 1094468 - DNA, 15 bp, Homo sapiens
agacatgacttgatt

SEQ ID NO: 1094469 - DNA, 15 bp, Homo sapiens
cagacatgacttgat

SEQ ID NO: 1094470 - DNA, 15 bp, Homo sapiens
acagacatgacttga

SEQ ID NO: 1094471 - DNA, 15 bp, Homo sapiens
gacagacatgacttg

SEQ ID NO: 1094472 - DNA, 15 bp, Homo sapiens
tgacagacatgactt

SEQ ID NO: 1094473 - DNA, 15 bp, Homo sapiens
ttgacagacatgact

SEQ ID NO: 1094474 - DNA, 15 bp, Homo sapiens
attgacagacatgac

SEQ ID NO: 1094475 - DNA, 15 bp, Homo sapiens
gattgacagacatga

SEQ ID NO: 1094476 - DNA, 15 bp, Homo sapiens
tgattgacagacatg

SEQ ID NO: 1094477 - DNA, 15 bp, Homo sapiens
ctgattgacagacat

SEQ ID NO: 1094478 - DNA, 15 bp, Homo sapiens
tctgattgacagaca

SEQ ID NO: 1094479 - DNA, 15 bp, Homo sapiens
ttctgattgacagac

SEQ ID NO: 1094480 - DNA, 15 bp, Homo sapiens
gttctgattgacaga

SEQ ID NO: 1094481 - DNA, 15 bp, Homo sapiens
ggttctgattgacag

SEQ ID NO: 1094482 - DNA, 15 bp, Homo sapiens
gggttctgattgaca

SEQ ID NO: 1094483 - DNA, 15 bp, Homo sapiens
agggttctgattgac

SEQ ID NO: 1094484 - DNA, 15 bp, Homo sapiens
cagggttctgattga

SEQ ID NO: 1094485 - DNA, 15 bp, Homo sapiens
tcagggttctgattg

SEQ ID NO: 1094486 - DNA, 15 bp, Homo sapiens
ctcagggttctgatt

SEQ ID NO: 1094487 - DNA, 15 bp, Homo sapiens
gctcagggttctgat

SEQ ID NO: 1094488 - DNA, 15 bp, Homo sapiens
tgctcagggttctga

SEQ ID NO: 1094489 - DNA, 15 bp, Homo sapiens
ttgctcagggttctg

SEQ ID NO: 1094490 - DNA, 15 bp, Homo sapiens
gttgctcagggttct

SEQ ID NO: 1094491 - DNA, 15 bp, Homo sapiens
agttgctcagggttc

SEQ ID NO: 1094492 - DNA, 15 bp, Homo sapiens
tagttgctcagggtt

SEQ ID NO: 1094493 - DNA, 15 bp, Homo sapiens
ttagttgctcagggt

SEQ ID NO: 1094494 - DNA, 15 bp, Homo sapiens
cttagttgctcaggg

SEQ ID NO: 1094495 - DNA, 15 bp, Homo sapiens
tcttagttgctcagg

SEQ ID NO: 1094496 - DNA, 15 bp, Homo sapiens
ttcttagttgctcag

SEQ ID NO: 1094497 - DNA, 15 bp, Homo sapiens
tttcttagttgctca

SEQ ID NO: 1094498 - DNA, 15 bp, Homo sapiens
atttcttagttgctc

SEQ ID NO: 1094499 - DNA, 15 bp, Homo sapiens
catttcttagttgct

SEQ ID NO: 1094500 - DNA, 15 bp, Homo sapiens
ccatttcttagttgc

SEQ ID NO: 1094501 - DNA, 15 bp, Homo sapiens
cccatttcttagttg

SEQ ID NO: 1094502 - DNA, 15 bp, Homo sapiens
ccccatttcttagtt

SEQ ID NO: 1094503 - DNA, 15 bp, Homo sapiens
cccccatttcttagt

SEQ ID NO: 1094504 - DNA, 15 bp, Homo sapiens
acccccatttcttag

SEQ ID NO: 1094505 - DNA, 15 bp, Homo sapiens
tacccccatttctta

SEQ ID NO: 1094506 - DNA, 15 bp, Homo sapiens
gtacccccatttctt

SEQ ID NO: 1094507 - DNA, 15 bp, Homo sapiens
ggtacccccatttct

SEQ ID NO: 1094508 - DNA, 15 bp, Homo sapiens
tggtacccccatttc

SEQ ID NO: 1094509 - DNA, 15 bp, Homo sapiens
gtggtacccccattt

SEQ ID NO: 1094510 - DNA, 15 bp, Homo sapiens
agtggtacccccatt

SEQ ID NO: 1094511 - DNA, 15 bp, Homo sapiens
cagtggtacccccat

SEQ ID NO: 1094512 - DNA, 15 bp, Homo sapiens
ccagtggtaccccca

SEQ ID NO: 1094513 - DNA, 15 bp, Homo sapiens
cccagtggtaccccc

SEQ ID NO: 1094514 - DNA, 15 bp, Homo sapiens
tcccagtggtacccc

SEQ ID NO: 1094515 - DNA, 15 bp, Homo sapiens
gtcccagtggtaccc

SEQ ID NO: 1094516 - DNA, 15 bp, Homo sapiens
tgtcccagtggtacc

SEQ ID NO: 1094517 - DNA, 15 bp, Homo sapiens
atgtcccagtggtac

SEQ ID NO: 1094518 - DNA, 15 bp, Homo sapiens
tatgtcccagtggta

SEQ ID NO: 1094519 - DNA, 15 bp, Homo sapiens
ctatgtcccagtggt

SEQ ID NO: 1094520 - DNA, 15 bp, Homo sapiens
tctatgtcccagtgg

SEQ ID NO: 1094521 - DNA, 15 bp, Homo sapiens
ctctatgtcccagtg

SEQ ID NO: 1094522 - DNA, 15 bp, Homo sapiens
gctctatgtcccagt

SEQ ID NO: 1094523 - DNA, 15 bp, Homo sapiens
tgctctatgtcccag

SEQ ID NO: 1094524 - DNA, 15 bp, Homo sapiens
ttgctctatgtccca

SEQ ID NO: 1094525 - DNA, 15 bp, Homo sapiens
cttgctctatgtccc

SEQ ID NO: 1094526 - DNA, 15 bp, Homo sapiens
ccttgctctatgtcc

SEQ ID NO: 1094527 - DNA, 15 bp, Homo sapiens
accttgctctatgtc

SEQ ID NO: 1094528 - DNA, 15 bp, Homo sapiens
gaccttgctctatgt

SEQ ID NO: 1094529 - DNA, 15 bp, Homo sapiens
ggaccttgctctatg

SEQ ID NO: 1094530 - DNA, 15 bp, Homo sapiens
gggaccttgctctat

SEQ ID NO: 1094531 - DNA, 15 bp, Homo sapiens
agggaccttgctcta

SEQ ID NO: 1094532 - DNA, 15 bp, Homo sapiens
aagggaccttgctct

SEQ ID NO: 1094533 - DNA, 15 bp, Homo sapiens
gaagggaccttgctc

SEQ ID NO: 1094534 - DNA, 15 bp, Homo sapiens
agaagggaccttgct

SEQ ID NO: 1094535 - DNA, 15 bp, Homo sapiens
cagaagggaccttgc

SEQ ID NO: 1094536 - DNA, 15 bp, Homo sapiens
tcagaagggaccttg

SEQ ID NO: 1094537 - DNA, 15 bp, Homo sapiens
atcagaagggacctt

SEQ ID NO: 1094538 - DNA, 15 bp, Homo sapiens
aatcagaagggacct

SEQ ID NO: 1094539 - DNA, 15 bp, Homo sapiens
gaatcagaagggacc

SEQ ID NO: 1094540 - DNA, 15 bp, Homo sapiens
agaatcagaagggac

SEQ ID NO: 1094541 - DNA, 15 bp, Homo sapiens
cagaatcagaaggga

SEQ ID NO: 1094542 - DNA, 15 bp, Homo sapiens
gcagaatcagaaggg

SEQ ID NO: 1094543 - DNA, 15 bp, Homo sapiens
agcagaatcagaagg

SEQ ID NO: 1094544 - DNA, 15 bp, Homo sapiens
gagcagaatcagaag

SEQ ID NO: 1094545 - DNA, 15 bp, Homo sapiens
agagcagaatcagaa

SEQ ID NO: 1094546 - DNA, 15 bp, Homo sapiens
aagagcagaatcaga

SEQ ID NO: 1094547 - DNA, 15 bp, Homo sapiens
caagagcagaatcag

SEQ ID NO: 1094548 - DNA, 15 bp, Homo sapiens
acaagagcagaatca

SEQ ID NO: 1094549 - DNA, 15 bp, Homo sapiens
gacaagagcagaatc

SEQ ID NO: 1094550 - DNA, 15 bp, Homo sapiens
agacaagagcagaat

SEQ ID NO: 1094551 - DNA, 15 bp, Homo sapiens
aagacaagagcagaa

SEQ ID NO: 1094552 - DNA, 15 bp, Homo sapiens
aaagacaagagcaga

SEQ ID NO: 1094553 - DNA, 15 bp, Homo sapiens
gaaagacaagagcag

SEQ ID NO: 1094554 - DNA, 15 bp, Homo sapiens
agaaagacaagagca

SEQ ID NO: 1094555 - DNA, 15 bp, Homo sapiens
gagaaagacaagagc

SEQ ID NO: 1094556 - DNA, 15 bp, Homo sapiens
agagaaagacaagag

SEQ ID NO: 1094557 - DNA, 15 bp, Homo sapiens
gagagaaagacaaga

SEQ ID NO: 1094558 - DNA, 15 bp, Homo sapiens
ggagagaaagacaag

SEQ ID NO: 1094559 - DNA, 15 bp, Homo sapiens
gggagagaaagacaa

SEQ ID NO: 1094560 - DNA, 15 bp, Homo sapiens
ggggagagaaagaca

SEQ ID NO: 1094561 - DNA, 15 bp, Homo sapiens
tggggagagaaagac

SEQ ID NO: 1094562 - DNA, 15 bp, Homo sapiens
atggggagagaaaga

SEQ ID NO: 1094563 - DNA, 15 bp, Homo sapiens
catggggagagaaag

SEQ ID NO: 1094564 - DNA, 15 bp, Homo sapiens
tcatggggagagaaa

SEQ ID NO: 1094565 - DNA, 15 bp, Homo sapiens
ttcatggggagagaa

SEQ ID NO: 1094566 - DNA, 15 bp, Homo sapiens
tttcatggggagaga

SEQ ID NO: 1094567 - DNA, 15 bp, Homo sapiens
atttcatggggagag

SEQ ID NO: 1094568 - DNA, 15 bp, Homo sapiens
catttcatggggaga

SEQ ID NO: 1094569 - DNA, 15 bp, Homo sapiens
ccatttcatggggag

SEQ ID NO: 1094570 - DNA, 15 bp, Homo sapiens
cccatttcatgggga

SEQ ID NO: 1094571 - DNA, 15 bp, Homo sapiens
ccccatttcatgggg

SEQ ID NO: 1094572 - DNA, 15 bp, Homo sapiens
tccccatttcatggg

SEQ ID NO: 1094573 - DNA, 15 bp, Homo sapiens
ctccccatttcatgg

SEQ ID NO: 1094574 - DNA, 15 bp, Homo sapiens
actccccatttcatg

SEQ ID NO: 1094575 - DNA, 15 bp, Homo sapiens
aactccccatttcat

SEQ ID NO: 1094576 - DNA, 15 bp, Homo sapiens
gaactccccatttca

SEQ ID NO: 1094577 - DNA, 15 bp, Homo sapiens
tgaactccccatttc

SEQ ID NO: 1094578 - DNA, 15 bp, Homo sapiens
gtgaactccccattt

SEQ ID NO: 1094579 - DNA, 15 bp, Homo sapiens
agtgaactccccatt

SEQ ID NO: 1094580 - DNA, 15 bp, Homo sapiens
tagtgaactccccat

SEQ ID NO: 1094581 - DNA, 15 bp, Homo sapiens
atagtgaactcccca

SEQ ID NO: 1094582 - DNA, 15 bp, Homo sapiens
gatagtgaactcccc

SEQ ID NO: 1094583 - DNA, 15 bp, Homo sapiens
agatagtgaactccc

SEQ ID NO: 1094584 - DNA, 15 bp, Homo sapiens
tagatagtgaactcc

SEQ ID NO: 1094585 - DNA, 15 bp, Homo sapiens
gtagatagtgaactc

SEQ ID NO: 1094586 - DNA, 15 bp, Homo sapiens
agtagatagtgaact

SEQ ID NO: 1094587 - DNA, 15 bp, Homo sapiens
cagtagatagtgaac

SEQ ID NO: 1094588 - DNA, 15 bp, Homo sapiens
tcagtagatagtgaa

SEQ ID NO: 1094589 - DNA, 15 bp, Homo sapiens
ctcagtagatagtga

SEQ ID NO: 1094590 - DNA, 15 bp, Homo sapiens
tctcagtagatagtg

SEQ ID NO: 1094591 - DNA, 15 bp, Homo sapiens
gtctcagtagatagt

SEQ ID NO: 1094592 - DNA, 15 bp, Homo sapiens
tgtctcagtagatag

SEQ ID NO: 1094593 - DNA, 15 bp, Homo sapiens
atgtctcagtagata

SEQ ID NO: 1094594 - DNA, 15 bp, Homo sapiens
gatgtctcagtagat

SEQ ID NO: 1094595 - DNA, 15 bp, Homo sapiens
ggatgtctcagtaga

SEQ ID NO: 1094596 - DNA, 15 bp, Homo sapiens
aggatgtctcagtag

SEQ ID NO: 1094597 - DNA, 15 bp, Homo sapiens
taggatgtctcagta

SEQ ID NO: 1094598 - DNA, 15 bp, Homo sapiens
ctaggatgtctcagt

SEQ ID NO: 1094599 - DNA, 15 bp, Homo sapiens
gctaggatgtctcag

SEQ ID NO: 1094600 - DNA, 15 bp, Homo sapiens
ggctaggatgtctca

SEQ ID NO: 1094601 - DNA, 15 bp, Homo sapiens
gggctaggatgtctc

SEQ ID NO: 1094602 - DNA, 15 bp, Homo sapiens
tgggctaggatgtct

SEQ ID NO: 1094603 - DNA, 15 bp, Homo sapiens
gtgggctaggatgtc

SEQ ID NO: 1094604 - DNA, 15 bp, Homo sapiens
tgtgggctaggatgt

SEQ ID NO: 1094605 - DNA, 15 bp, Homo sapiens
ctgtgggctaggatg

SEQ ID NO: 1094606 - DNA, 15 bp, Homo sapiens
gctgtgggctaggat

SEQ ID NO: 1094607 - DNA, 15 bp, Homo sapiens
agctgtgggctagga

SEQ ID NO: 1094608 - DNA, 15 bp, Homo sapiens
cagctgtgggctagg

SEQ ID NO: 1094609 - DNA, 15 bp, Homo sapiens
gcagctgtgggctag

SEQ ID NO: 1094610 - DNA, 15 bp, Homo sapiens
tgcagctgtgggcta

SEQ ID NO: 1094611 - DNA, 15 bp, Homo sapiens
gtgcagctgtgggct

SEQ ID NO: 1094612 - DNA, 15 bp, Homo sapiens
tgtgcagctgtgggc

SEQ ID NO: 1094613 - DNA, 15 bp, Homo sapiens
ctgtgcagctgtggg

SEQ ID NO: 1094614 - DNA, 15 bp, Homo sapiens
actgtgcagctgtgg

SEQ ID NO: 1094615 - DNA, 15 bp, Homo sapiens
aactgtgcagctgtg

SEQ ID NO: 1094616 - DNA, 15 bp, Homo sapiens
gaactgtgcagctgt

SEQ ID NO: 1094617 - DNA, 15 bp, Homo sapiens
agaactgtgcagctg

SEQ ID NO: 1094618 - DNA, 15 bp, Homo sapiens
cagaactgtgcagct

SEQ ID NO: 1094619 - DNA, 15 bp, Homo sapiens
acagaactgtgcagc

SEQ ID NO: 1094620 - DNA, 15 bp, Homo sapiens
gacagaactgtgcag

SEQ ID NO: 1094621 - DNA, 15 bp, Homo sapiens
agacagaactgtgca

SEQ ID NO: 1094622 - DNA, 15 bp, Homo sapiens
aagacagaactgtgc

SEQ ID NO: 1094623 - DNA, 15 bp, Homo sapiens
aaagacagaactgtg

SEQ ID NO: 1094624 - DNA, 15 bp, Homo sapiens
aaaagacagaactgt

SEQ ID NO: 1094625 - DNA, 15 bp, Homo sapiens
aaaaagacagaactg

SEQ ID NO: 1094626 - DNA, 15 bp, Homo sapiens
taaaaagacagaact

SEQ ID NO: 1094627 - DNA, 15 bp, Homo sapiens
ctaaaaagacagaac

SEQ ID NO: 1094628 - DNA, 15 bp, Homo sapiens
tctaaaaagacagaa

SEQ ID NO: 1094629 - DNA, 15 bp, Homo sapiens
ttctaaaaagacaga

SEQ ID NO: 1094630 - DNA, 15 bp, Homo sapiens
tttctaaaaagacag

SEQ ID NO: 1094631 - DNA, 15 bp, Homo sapiens
ctttctaaaaagaca

SEQ ID NO: 1094632 - DNA, 15 bp, Homo sapiens
gctttctaaaaagac

SEQ ID NO: 1094633 - DNA, 15 bp, Homo sapiens
agctttctaaaaaga

SEQ ID NO: 1094634 - DNA, 15 bp, Homo sapiens
gagctttctaaaaag

SEQ ID NO: 1094635 - DNA, 15 bp, Homo sapiens
agagctttctaaaaa

SEQ ID NO: 1094636 - DNA, 15 bp, Homo sapiens
tagagctttctaaaa

SEQ ID NO: 1094637 - DNA, 15 bp, Homo sapiens
ttagagctttctaaa

SEQ ID NO: 1094638 - DNA, 15 bp, Homo sapiens
cttagagctttctaa

SEQ ID NO: 1094639 - DNA, 15 bp, Homo sapiens
gcttagagctttcta

SEQ ID NO: 1094640 - DNA, 15 bp, Homo sapiens
tgcttagagctttct

SEQ ID NO: 1094641 - DNA, 15 bp, Homo sapiens
ctgcttagagctttc

SEQ ID NO: 1094642 - DNA, 15 bp, Homo sapiens
tctgcttagagcttt

SEQ ID NO: 1094643 - DNA, 15 bp, Homo sapiens
ttctgcttagagctt

SEQ ID NO: 1094644 - DNA, 15 bp, Homo sapiens
gtttctgcttagagc

SEQ ID NO: 1094645 - DNA, 15 bp, Homo sapiens
tgtttctgcttagag

SEQ ID NO: 1094646 - DNA, 15 bp, Homo sapiens
ttgtttctgcttaga

SEQ ID NO: 1094647 - DNA, 15 bp, Homo sapiens
attgtttctgcttag

SEQ ID NO: 1094648 - DNA, 15 bp, Homo sapiens
cattgtttctgctta

SEQ ID NO: 1094649 - DNA, 15 bp, Homo sapiens
acattgtttctgctt

SEQ ID NO: 1094650 - DNA, 15 bp, Homo sapiens
aacattgtttctgct

SEQ ID NO: 1094651 - DNA, 15 bp, Homo sapiens
gaacattgtttctgc

SEQ ID NO: 1094652 - DNA, 15 bp, Homo sapiens
tgaacattgtttctg

SEQ ID NO: 1094653 - DNA, 15 bp, Homo sapiens
atgaacattgtttct

SEQ ID NO: 1094654 - DNA, 15 bp, Homo sapiens
gatgaacattgtttc

SEQ ID NO: 1094655 - DNA, 15 bp, Homo sapiens
ggatgaacattgttt

SEQ ID NO: 1094656 - DNA, 15 bp, Homo sapiens
tggatgaacattgtt

SEQ ID NO: 1094657 - DNA, 15 bp, Homo sapiens
atggatgaacattgt

SEQ ID NO: 1094658 - DNA, 15 bp, Homo sapiens
gatggatgaacattg

SEQ ID NO: 1094659 - DNA, 15 bp, Homo sapiens
ggatggatgaacatt

SEQ ID NO: 1094660 - DNA, 15 bp, Homo sapiens
aggatggatgaacat

SEQ ID NO: 1094661 - DNA, 15 bp, Homo sapiens
gaggatggatgaaca

SEQ ID NO: 1094662 - DNA, 15 bp, Homo sapiens
ggaggatggatgaac

SEQ ID NO: 1094663 - DNA, 15 bp, Homo sapiens
aggaggatggatgaa

SEQ ID NO: 1094664 - DNA, 15 bp, Homo sapiens
gaggaggatggatga

SEQ ID NO: 1094665 - DNA, 15 bp, Homo sapiens
cgaggaggatggatg

SEQ ID NO: 1094666 - DNA, 15 bp, Homo sapiens
ccgaggaggatggat

SEQ ID NO: 1094667 - DNA, 15 bp, Homo sapiens
cccgaggaggatgga

SEQ ID NO: 1094668 - DNA, 15 bp, Homo sapiens
tcccgaggaggatgg

SEQ ID NO: 1094669 - DNA, 15 bp, Homo sapiens
gtcccgaggaggatg

SEQ ID NO: 1094670 - DNA, 15 bp, Homo sapiens
tgtcccgaggaggat

SEQ ID NO: 1094671 - DNA, 15 bp, Homo sapiens
ctgtcccgaggagga

SEQ ID NO: 1094672 - DNA, 15 bp, Homo sapiens
gctgtcccgaggagg

SEQ ID NO: 1094673 - DNA, 15 bp, Homo sapiens
ggctgtcccgaggag

SEQ ID NO: 1094674 - DNA, 15 bp, Homo sapiens
gggctgtcccgagga

SEQ ID NO: 1094675 - DNA, 15 bp, Homo sapiens
agggctgtcccgagg

SEQ ID NO: 1094676 - DNA, 15 bp, Homo sapiens
aagggctgtcccgag

SEQ ID NO: 1094677 - DNA, 15 bp, Homo sapiens
caagggctgtcccga

SEQ ID NO: 1094678 - DNA, 15 bp, Homo sapiens
tcaagggctgtcccg

SEQ ID NO: 1094679 - DNA, 15 bp, Homo sapiens
ctcaagggctgtccc

SEQ ID NO: 1094680 - DNA, 15 bp, Homo sapiens
gctcaagggctgtcc

SEQ ID NO: 1094681 - DNA, 15 bp, Homo sapiens
agctcaagggctgtc

SEQ ID NO: 1094682 - DNA, 15 bp, Homo sapiens
tagctcaagggctgt

SEQ ID NO: 1094683 - DNA, 15 bp, Homo sapiens
gtagctcaagggctg

SEQ ID NO: 1094684 - DNA, 15 bp, Homo sapiens
agtagctcaagggct

SEQ ID NO: 1094685 - DNA, 15 bp, Homo sapiens
cagtagctcaagggc

SEQ ID NO: 1094686 - DNA, 15 bp, Homo sapiens
tcagtagctcaaggg

SEQ ID NO: 1094687 - DNA, 15 bp, Homo sapiens
ttcagtagctcaagg

SEQ ID NO: 1094688 - DNA, 15 bp, Homo sapiens
cttcagtagctcaag

SEQ ID NO: 1094689 - DNA, 15 bp, Homo sapiens
tcttcagtagctcaa

SEQ ID NO: 1094690 - DNA, 15 bp, Homo sapiens
gtcttcagtagctca

SEQ ID NO: 1094691 - DNA, 15 bp, Homo sapiens
agtcttcagtagctc

SEQ ID NO: 1094692 - DNA, 15 bp, Homo sapiens
gagtcttcagtagct

SEQ ID NO: 1094693 - DNA, 15 bp, Homo sapiens
agagtcttcagtagc

SEQ ID NO: 1094694 - DNA, 15 bp, Homo sapiens
tagagtcttcagtag

SEQ ID NO: 1094695 - DNA, 15 bp, Homo sapiens
ttagagtcttcagta

SEQ ID NO: 1094696 - DNA, 15 bp, Homo sapiens
cttagagtcttcagt

SEQ ID NO: 1094697 - DNA, 15 bp, Homo sapiens
gcttagagtcttcag

SEQ ID NO: 1094698 - DNA, 15 bp, Homo sapiens
tgcttagagtcttca

SEQ ID NO: 1094699 - DNA, 15 bp, Homo sapiens
atgcttagagtcttc

SEQ ID NO: 1094700 - DNA, 15 bp, Homo sapiens
catgcttagagtctt

SEQ ID NO: 1094701 - DNA, 15 bp, Homo sapiens
acatgcttagagtct

SEQ ID NO: 1094702 - DNA, 15 bp, Homo sapiens
gacatgcttagagtc

SEQ ID NO: 1094703 - DNA, 15 bp, Homo sapiens
ggacatgcttagagt

SEQ ID NO: 1094704 - DNA, 15 bp, Homo sapiens
aggacatgcttagag

SEQ ID NO: 1094705 - DNA, 15 bp, Homo sapiens
caggacatgcttaga

SEQ ID NO: 1094706 - DNA, 15 bp, Homo sapiens
ccaggacatgcttag

SEQ ID NO: 1094707 - DNA, 15 bp, Homo sapiens
accaggacatgctta

SEQ ID NO: 1094708 - DNA, 15 bp, Homo sapiens
gaccaggacatgctt

SEQ ID NO: 1094709 - DNA, 15 bp, Homo sapiens
tgaccaggacatgct

SEQ ID NO: 1094710 - DNA, 15 bp, Homo sapiens
atgaccaggacatgc

SEQ ID NO: 1094711 - DNA, 15 bp, Homo sapiens
gatgaccaggacatg

SEQ ID NO: 1094712 - DNA, 15 bp, Homo sapiens
ggatgaccaggacat

SEQ ID NO: 1094713 - DNA, 15 bp, Homo sapiens
aggatgaccaggaca

SEQ ID NO: 1094714 - DNA, 15 bp, Homo sapiens
gaggatgaccaggac

SEQ ID NO: 1094715 - DNA, 15 bp, Homo sapiens
ggaggatgaccagga

SEQ ID NO: 1094716 - DNA, 15 bp, Homo sapiens
tggaggatgaccagg

SEQ ID NO: 1094717 - DNA, 15 bp, Homo sapiens
atggaggatgaccag

SEQ ID NO: 1094718 - DNA, 15 bp, Homo sapiens
catggaggatgacca

SEQ ID NO: 1094719 - DNA, 15 bp, Homo sapiens
tcatggaggatgacc

SEQ ID NO: 1094720 - DNA, 15 bp, Homo sapiens
ctcatggaggatgac

SEQ ID NO: 1094721 - DNA, 15 bp, Homo sapiens
gctcatggaggatga

SEQ ID NO: 1094722 - DNA, 15 bp, Homo sapiens
ggctcatggaggatg

SEQ ID NO: 1094723 - DNA, 15 bp, Homo sapiens
tggctcatggaggat

SEQ ID NO: 1094724 - DNA, 15 bp, Homo sapiens
atggctcatggagga

SEQ ID NO: 1094725 - DNA, 15 bp, Homo sapiens
gatggctcatggagg

SEQ ID NO: 1094726 - DNA, 15 bp, Homo sapiens
tgatggctcatggag

SEQ ID NO: 1094727 - DNA, 15 bp, Homo sapiens
atgatggctcatgga

SEQ ID NO: 1094728 - DNA, 15 bp, Homo sapiens
gatgatggctcatgg

SEQ ID NO: 1094729 - DNA, 15 bp, Homo sapiens
agatgatggctcatg

SEQ ID NO: 1094730 - DNA, 15 bp, Homo sapiens
gagatgatggctcat

SEQ ID NO: 1094731 - DNA, 15 bp, Homo sapiens
agagatgatggctca

SEQ ID NO: 1094732 - DNA, 15 bp, Homo sapiens
cagagatgatggctc

SEQ ID NO: 1094733 - DNA, 15 bp, Homo sapiens
tcagagatgatggct

SEQ ID NO: 1094734 - DNA, 15 bp, Homo sapiens
ctcagagatgatggc

SEQ ID NO: 1094735 - DNA, 15 bp, Homo sapiens
cctcagagatgatgg

SEQ ID NO: 1094736 - DNA, 15 bp, Homo sapiens
gcctcagagatgatg

SEQ ID NO: 1094737 - DNA, 15 bp, Homo sapiens
ggcctcagagatgat

SEQ ID NO: 1094738 - DNA, 15 bp, Homo sapiens
gggcctcagagatga

SEQ ID NO: 1094739 - DNA, 15 bp, Homo sapiens
agggcctcagagatg

SEQ ID NO: 1094740 - DNA, 15 bp, Homo sapiens
gagggcctcagagat

SEQ ID NO: 1094741 - DNA, 15 bp, Homo sapiens
ggagggcctcagaga

SEQ ID NO: 1094742 - DNA, 15 bp, Homo sapiens
gggagggcctcagag

SEQ ID NO: 1094743 - DNA, 15 bp, Homo sapiens
ggggagggcctcaga

SEQ ID NO: 1094744 - DNA, 15 bp, Homo sapiens
aggggagggcctcag

SEQ ID NO: 1094745 - DNA, 15 bp, Homo sapiens
aaggggagggcctca

SEQ ID NO: 1094746 - DNA, 15 bp, Homo sapiens
gaaggggagggcctc

SEQ ID NO: 1094747 - DNA, 15 bp, Homo sapiens
agaaggggagggcct

SEQ ID NO: 1094748 - DNA, 15 bp, Homo sapiens
aagaaggggagggcc

SEQ ID NO: 1094749 - DNA, 15 bp, Homo sapiens
caagaaggggagggc

SEQ ID NO: 1094750 - DNA, 15 bp, Homo sapiens
ccaagaaggggaggg

SEQ ID NO: 1094751 - DNA, 15 bp, Homo sapiens
gccaagaaggggagg

SEQ ID NO: 1094752 - DNA, 15 bp, Homo sapiens
ggccaagaaggggag

SEQ ID NO: 1094753 - DNA, 15 bp, Homo sapiens
gggccaagaagggga

SEQ ID NO: 1094754 - DNA, 15 bp, Homo sapiens
ggggccaagaagggg

SEQ ID NO: 1094755 - DNA, 15 bp, Homo sapiens
aggggccaagaaggg

SEQ ID NO: 1094756 - DNA, 15 bp, Homo sapiens
gaggggccaagaagg

SEQ ID NO: 1094757 - DNA, 15 bp, Homo sapiens
agaggggccaagaag

SEQ ID NO: 1094758 - DNA, 15 bp, Homo sapiens
aagaggggccaagaa

SEQ ID NO: 1094759 - DNA, 15 bp, Homo sapiens
gaagaggggccaaga

SEQ ID NO: 1094760 - DNA, 15 bp, Homo sapiens
agaagaggggccaag

SEQ ID NO: 1094761 - DNA, 15 bp, Homo sapiens
gagaagaggggccaa

SEQ ID NO: 1094762 - DNA, 15 bp, Homo sapiens
agagaagaggggcca

SEQ ID NO: 1094763 - DNA, 15 bp, Homo sapiens
cagagaagaggggcc

SEQ ID NO: 1094764 - DNA, 15 bp, Homo sapiens
ccagagaagaggggc

SEQ ID NO: 1094765 - DNA, 15 bp, Homo sapiens
tccagagaagagggg

SEQ ID NO: 1094766 - DNA, 15 bp, Homo sapiens
gtccagagaagaggg

SEQ ID NO: 1094767 - DNA, 15 bp, Homo sapiens
tgtccagagaagagg

SEQ ID NO: 1094768 - DNA, 15 bp, Homo sapiens
ctgtccagagaagag

SEQ ID NO: 1094769 - DNA, 15 bp, Homo sapiens
cctgtccagagaaga

SEQ ID NO: 1094770 - DNA, 15 bp, Homo sapiens
acctgtccagagaag

SEQ ID NO: 1094771 - DNA, 15 bp, Homo sapiens
aacctgtccagagaa

SEQ ID NO: 1094772 - DNA, 15 bp, Homo sapiens
gaacctgtccagaga

SEQ ID NO: 1094773 - DNA, 15 bp, Homo sapiens
agaacctgtccagag

SEQ ID NO: 1094774 - DNA, 15 bp, Homo sapiens
cagaacctgtccaga

SEQ ID NO: 1094775 - DNA, 15 bp, Homo sapiens
ccagaacctgtccag

SEQ ID NO: 1094776 - DNA, 15 bp, Homo sapiens
tccagaacctgtcca

SEQ ID NO: 1094777 - DNA, 15 bp, Homo sapiens
gtccagaacctgtcc

SEQ ID NO: 1094778 - DNA, 15 bp, Homo sapiens
tgtccagaacctgtc

SEQ ID NO: 1094779 - DNA, 15 bp, Homo sapiens
ctgtccagaacctgt

SEQ ID NO: 1094780 - DNA, 15 bp, Homo sapiens
actgtccagaacctg

SEQ ID NO: 1094781 - DNA, 15 bp, Homo sapiens
gactgtccagaacct

SEQ ID NO: 1094782 - DNA, 15 bp, Homo sapiens
agactgtccagaacc

SEQ ID NO: 1094783 - DNA, 15 bp, Homo sapiens
aagactgtccagaac

SEQ ID NO: 1094784 - DNA, 15 bp, Homo sapiens
caagactgtccagaa

SEQ ID NO: 1094785 - DNA, 15 bp, Homo sapiens
gcaagactgtccaga

SEQ ID NO: 1094786 - DNA, 15 bp, Homo sapiens
ggcaagactgtccag

SEQ ID NO: 1094787 - DNA, 15 bp, Homo sapiens
gggcaagactgtcca

SEQ ID NO: 1094788 - DNA, 15 bp, Homo sapiens
agggcaagactgtcc

SEQ ID NO: 1094789 - DNA, 15 bp, Homo sapiens
aagggcaagactgtc

SEQ ID NO: 1094790 - DNA, 15 bp, Homo sapiens
gaagggcaagactgt

SEQ ID NO: 1094791 - DNA, 15 bp, Homo sapiens
gccatgcagagcccc

SEQ ID NO: 1094792 - DNA, 15 bp, Homo sapiens
tgccatgcagagccc

SEQ ID NO: 1094793 - DNA, 15 bp, Homo sapiens
atgccatgcagagcc

SEQ ID NO: 1094794 - DNA, 15 bp, Homo sapiens
aatgccatgcagagc

SEQ ID NO: 1094795 - DNA, 15 bp, Homo sapiens
aaatgccatgcagag

SEQ ID NO: 1094796 - DNA, 15 bp, Homo sapiens
gaaatgccatgcaga

SEQ ID NO: 1094797 - DNA, 15 bp, Homo sapiens
ggaaatgccatgcag

SEQ ID NO: 1094798 - DNA, 15 bp, Homo sapiens
tggaaatgccatgca

SEQ ID NO: 1094799 - DNA, 15 bp, Homo sapiens
ctggaaatgccatgc

SEQ ID NO: 1094800 - DNA, 15 bp, Homo sapiens
cctggaaatgccatg

SEQ ID NO: 1094801 - DNA, 15 bp, Homo sapiens
ccctggaaatgccat

SEQ ID NO: 1094802 - DNA, 15 bp, Homo sapiens
cccctggaaatgcca

SEQ ID NO: 1094803 - DNA, 15 bp, Homo sapiens
acccctggaaatgcc

SEQ ID NO: 1094804 - DNA, 15 bp, Homo sapiens
aacccctggaaatgc

SEQ ID NO: 1094805 - DNA, 15 bp, Homo sapiens
caacccctggaaatg

SEQ ID NO: 1094806 - DNA, 15 bp, Homo sapiens
ccaacccctggaaat

SEQ ID NO: 1094807 - DNA, 15 bp, Homo sapiens
accaacccctggaaa

SEQ ID NO: 1094808 - DNA, 15 bp, Homo sapiens
caccaacccctggaa

SEQ ID NO: 1094809 - DNA, 15 bp, Homo sapiens
ccaccaacccctgga

SEQ ID NO: 1094810 - DNA, 15 bp, Homo sapiens
tccaccaacccctgg

SEQ ID NO: 1094811 - DNA, 15 bp, Homo sapiens
atccaccaacccctg

SEQ ID NO: 1094812 - DNA, 15 bp, Homo sapiens
gatccaccaacccct

SEQ ID NO: 1094813 - DNA, 15 bp, Homo sapiens
tgatccaccaacccc

SEQ ID NO: 1094814 - DNA, 15 bp, Homo sapiens
ctgatccaccaaccc

SEQ ID NO: 1094815 - DNA, 15 bp, Homo sapiens
cctgatccaccaacc

SEQ ID NO: 1094816 - DNA, 15 bp, Homo sapiens
ccctgatccaccaac

SEQ ID NO: 1094817 - DNA, 15 bp, Homo sapiens
tccctgatccaccaa

SEQ ID NO: 1094818 - DNA, 15 bp, Homo sapiens
atccctgatccacca

SEQ ID NO: 1094819 - DNA, 15 bp, Homo sapiens
aatccctgatccacc

SEQ ID NO: 1094820 - DNA, 15 bp, Homo sapiens
gaatccctgatccac

SEQ ID NO: 1094821 - DNA, 15 bp, Homo sapiens
agaatccctgatcca

SEQ ID NO: 1094822 - DNA, 15 bp, Homo sapiens
cagaatccctgatcc

SEQ ID NO: 1094823 - DNA, 15 bp, Homo sapiens
acagaatccctgatc

SEQ ID NO: 1094824 - DNA, 15 bp, Homo sapiens
gacagaatccctgat

SEQ ID NO: 1094825 - DNA, 15 bp, Homo sapiens
ggacagaatccctga

SEQ ID NO: 1094826 - DNA, 15 bp, Homo sapiens
gggacagaatccctg

SEQ ID NO: 1094827 - DNA, 15 bp, Homo sapiens
agggacagaatccct

SEQ ID NO: 1094828 - DNA, 15 bp, Homo sapiens
gagggacagaatccc

SEQ ID NO: 1094829 - DNA, 15 bp, Homo sapiens
tgagggacagaatcc

SEQ ID NO: 1094830 - DNA, 15 bp, Homo sapiens
ctgagggacagaatc

SEQ ID NO: 1094831 - DNA, 15 bp, Homo sapiens
cctgagggacagaat

SEQ ID NO: 1094832 - DNA, 15 bp, Homo sapiens
tcctgagggacagaa

SEQ ID NO: 1094833 - DNA, 15 bp, Homo sapiens
ctcctgagggacaga

SEQ ID NO: 1094834 - DNA, 15 bp, Homo sapiens
tctcctgagggacag

SEQ ID NO: 1094835 - DNA, 15 bp, Homo sapiens
ttctcctgagggaca

SEQ ID NO: 1094836 - DNA, 15 bp, Homo sapiens
attctcctgagggac

SEQ ID NO: 1094837 - DNA, 15 bp, Homo sapiens
cattctcctgaggga

SEQ ID NO: 1094838 - DNA, 15 bp, Homo sapiens
acattctcctgaggg

SEQ ID NO: 1094839 - DNA, 15 bp, Homo sapiens
cacattctcctgagg

SEQ ID NO: 1094840 - DNA, 15 bp, Homo sapiens
ccacattctcctgag

SEQ ID NO: 1094841 - DNA, 15 bp, Homo sapiens
cccacattctcctga

SEQ ID NO: 1094842 - DNA, 15 bp, Homo sapiens
gcccacattctcctg

SEQ ID NO: 1094843 - DNA, 15 bp, Homo sapiens
tgcccacattctcct

SEQ ID NO: 1094844 - DNA, 15 bp, Homo sapiens
gtgcccacattctcc

SEQ ID NO: 1094845 - DNA, 15 bp, Homo sapiens
agtgcccacattctc

SEQ ID NO: 1094846 - DNA, 15 bp, Homo sapiens
tagtgcccacattct

SEQ ID NO: 1094847 - DNA, 15 bp, Homo sapiens
ctagtgcccacattc

SEQ ID NO: 1094848 - DNA, 15 bp, Homo sapiens
gctagtgcccacatt

SEQ ID NO: 1094849 - DNA, 15 bp, Homo sapiens
ggctagtgcccacat

SEQ ID NO: 1094850 - DNA, 15 bp, Homo sapiens
gggctagtgcccaca

SEQ ID NO: 1094851 - DNA, 15 bp, Homo sapiens
tgggctagtgcccac

SEQ ID NO: 1094852 - DNA, 15 bp, Homo sapiens
ttgggctagtgccca

SEQ ID NO: 1094853 - DNA, 15 bp, Homo sapiens
cttgggctagtgccc

SEQ ID NO: 1094854 - DNA, 15 bp, Homo sapiens
ccttgggctagtgcc

SEQ ID NO: 1094855 - DNA, 15 bp, Homo sapiens
gccttgggctagtgc

SEQ ID NO: 1094856 - DNA, 15 bp, Homo sapiens
ggccttgggctagtg

SEQ ID NO: 1094857 - DNA, 15 bp, Homo sapiens
tggccttgggctagt

SEQ ID NO: 1094858 - DNA, 15 bp, Homo sapiens
gtggccttgggctag

SEQ ID NO: 1094859 - DNA, 15 bp, Homo sapiens
agtggccttgggcta

SEQ ID NO: 1094860 - DNA, 15 bp, Homo sapiens
gagtggccttgggct

SEQ ID NO: 1094861 - DNA, 15 bp, Homo sapiens
tgagtggccttgggc

SEQ ID NO: 1094862 - DNA, 15 bp, Homo sapiens
gtgagtggccttggg

SEQ ID NO: 1094863 - DNA, 15 bp, Homo sapiens
agtgagtggccttgg

SEQ ID NO: 1094864 - DNA, 15 bp, Homo sapiens
aagtgagtggccttg

SEQ ID NO: 1094865 - DNA, 15 bp, Homo sapiens
gaagtgagtggcctt

SEQ ID NO: 1094866 - DNA, 15 bp, Homo sapiens
agaagtgagtggcct

SEQ ID NO: 1094867 - DNA, 15 bp, Homo sapiens
cagaagtgagtggcc

SEQ ID NO: 1094868 - DNA, 15 bp, Homo sapiens
acagaagtgagtggc

SEQ ID NO: 1094869 - DNA, 15 bp, Homo sapiens
cacagaagtgagtgg

SEQ ID NO: 1094870 - DNA, 15 bp, Homo sapiens
acacagaagtgagtg

SEQ ID NO: 1094871 - DNA, 15 bp, Homo sapiens
tacacagaagtgagt

SEQ ID NO: 1094872 - DNA, 15 bp, Homo sapiens
gtacacagaagtgag

SEQ ID NO: 1094873 - DNA, 15 bp, Homo sapiens
tgtacacagaagtga

SEQ ID NO: 1094874 - DNA, 15 bp, Homo sapiens
atgtacacagaagtg

SEQ ID NO: 1094875 - DNA, 15 bp, Homo sapiens
tatgtacacagaagt

SEQ ID NO: 1094876 - DNA, 15 bp, Homo sapiens
ctatgtacacagaag

SEQ ID NO: 1094877 - DNA, 15 bp, Homo sapiens
gctatgtacacagaa

SEQ ID NO: 1094878 - DNA, 15 bp, Homo sapiens
ggctatgtacacaga

SEQ ID NO: 1094879 - DNA, 15 bp, Homo sapiens
tggctatgtacacag

SEQ ID NO: 1094880 - DNA, 15 bp, Homo sapiens
gtggctatgtacaca

SEQ ID NO: 1094881 - DNA, 15 bp, Homo sapiens
ggtggctatgtacac

SEQ ID NO: 1094882 - DNA, 15 bp, Homo sapiens
aggtggctatgtaca

SEQ ID NO: 1094883 - DNA, 15 bp, Homo sapiens
caggtggctatgtac

SEQ ID NO: 1094884 - DNA, 15 bp, Homo sapiens
tcaggtggctatgta

SEQ ID NO: 1094885 - DNA, 15 bp, Homo sapiens
ctcaggtggctatgt

SEQ ID NO: 1094886 - DNA, 15 bp, Homo sapiens
cctcaggtggctatg

SEQ ID NO: 1094887 - DNA, 15 bp, Homo sapiens
ccctcaggtggctat

SEQ ID NO: 1094888 - DNA, 15 bp, Homo sapiens
gccctcaggtggcta

SEQ ID NO: 1094889 - DNA, 15 bp, Homo sapiens
ggccctcaggtggct

SEQ ID NO: 1094890 - DNA, 15 bp, Homo sapiens
gggccctcaggtggc

SEQ ID NO: 1094891 - DNA, 15 bp, Homo sapiens
tgggccctcaggtgg

SEQ ID NO: 1094892 - DNA, 15 bp, Homo sapiens
ctgggccctcaggtg

SEQ ID NO: 1094893 - DNA, 15 bp, Homo sapiens
cctgggccctcaggt

SEQ ID NO: 1094894 - DNA, 15 bp, Homo sapiens
attcctgggccctca

SEQ ID NO: 1094895 - DNA, 15 bp, Homo sapiens
cattcctgggccctc

SEQ ID NO: 1094896 - DNA, 15 bp, Homo sapiens
ccattcctgggccct

SEQ ID NO: 1094897 - DNA, 15 bp, Homo sapiens
tccattcctgggccc

SEQ ID NO: 1094898 - DNA, 15 bp, Homo sapiens
ctccattcctgggcc

SEQ ID NO: 1094899 - DNA, 15 bp, Homo sapiens
cctccattcctgggc

SEQ ID NO: 1094900 - DNA, 15 bp, Homo sapiens
ccctccattcctggg

SEQ ID NO: 1094901 - DNA, 15 bp, Homo sapiens
cccctccattcctgg

SEQ ID NO: 1094902 - DNA, 15 bp, Homo sapiens
ccccctccattcctg

SEQ ID NO: 1094903 - DNA, 15 bp, Homo sapiens
gccccctccattcct

SEQ ID NO: 1094904 - DNA, 15 bp, Homo sapiens
ggccccctccattcc

SEQ ID NO: 1094905 - DNA, 15 bp, Homo sapiens
tggccccctccattc

SEQ ID NO: 1094906 - DNA, 15 bp, Homo sapiens
ctggccccctccatt

SEQ ID NO: 1094907 - DNA, 15 bp, Homo sapiens
cctggccccctccat

SEQ ID NO: 1094908 - DNA, 15 bp, Homo sapiens
gcctggccccctcca

SEQ ID NO: 1094909 - DNA, 15 bp, Homo sapiens
agcctggccccctcc

SEQ ID NO: 1094910 - DNA, 15 bp, Homo sapiens
tagcctggccccctc

SEQ ID NO: 1094911 - DNA, 15 bp, Homo sapiens
gtagcctggccccct

SEQ ID NO: 1094912 - DNA, 15 bp, Homo sapiens
tgtagcctggccccc

SEQ ID NO: 1094913 - DNA, 15 bp, Homo sapiens
ctgtagcctggcccc

SEQ ID NO: 1094914 - DNA, 15 bp, Homo sapiens
gctgtagcctggccc

SEQ ID NO: 1094915 - DNA, 15 bp, Homo sapiens
agctgtagcctggcc

SEQ ID NO: 1094916 - DNA, 15 bp, Homo sapiens
cagctgtagcctggc

SEQ ID NO: 1094917 - DNA, 15 bp, Homo sapiens
ccagctgtagcctgg

SEQ ID NO: 1094918 - DNA, 15 bp, Homo sapiens
tccagctgtagcctg

SEQ ID NO: 1094919 - DNA, 15 bp, Homo sapiens
gtccagctgtagcct

SEQ ID NO: 1094920 - DNA, 15 bp, Homo sapiens
tgtccagctgtagcc

SEQ ID NO: 1094921 - DNA, 15 bp, Homo sapiens
atgtccagctgtagc

SEQ ID NO: 1094922 - DNA, 15 bp, Homo sapiens
gatgtccagctgtag

SEQ ID NO: 1094923 - DNA, 15 bp, Homo sapiens
agatgtccagctgta

SEQ ID NO: 1094924 - DNA, 15 bp, Homo sapiens
cagatgtccagctgt

SEQ ID NO: 1094925 - DNA, 15 bp, Homo sapiens
ccagatgtccagctg

SEQ ID NO: 1094926 - DNA, 15 bp, Homo sapiens
gccagatgtccagct

SEQ ID NO: 1094927 - DNA, 15 bp, Homo sapiens
tgccagatgtccagc

SEQ ID NO: 1094928 - DNA, 15 bp, Homo sapiens
gtgccagatgtccag

SEQ ID NO: 1094929 - DNA, 15 bp, Homo sapiens
agtgccagatgtcca

SEQ ID NO: 1094930 - DNA, 15 bp, Homo sapiens
gagtgccagatgtcc

SEQ ID NO: 1094931 - DNA, 15 bp, Homo sapiens
cgagtgccagatgtc

SEQ ID NO: 1094932 - DNA, 15 bp, Homo sapiens
ccgagtgccagatgt

SEQ ID NO: 1094933 - DNA, 15 bp, Homo sapiens
tccgagtgccagatg

SEQ ID NO: 1094934 - DNA, 15 bp, Homo sapiens
atccgagtgccagat

SEQ ID NO: 1094935 - DNA, 15 bp, Homo sapiens
catccgagtgccaga

SEQ ID NO: 1094936 - DNA, 15 bp, Homo sapiens
ccatccgagtgccag

SEQ ID NO: 1094937 - DNA, 15 bp, Homo sapiens
cccatccgagtgcca

SEQ ID NO: 1094938 - DNA, 15 bp, Homo sapiens
gcccatccgagtgcc

SEQ ID NO: 1094939 - DNA, 15 bp, Homo sapiens
agcccatccgagtgc

SEQ ID NO: 1094940 - DNA, 15 bp, Homo sapiens
gagcccatccgagtg

SEQ ID NO: 1094941 - DNA, 15 bp, Homo sapiens
agagcccatccgagt

SEQ ID NO: 1094942 - DNA, 15 bp, Homo sapiens
cagagcccatccgag

SEQ ID NO: 1094943 - DNA, 15 bp, Homo sapiens
ccagagcccatccga

SEQ ID NO: 1094944 - DNA, 15 bp, Homo sapiens
tccagagcccatccg

SEQ ID NO: 1094945 - DNA, 15 bp, Homo sapiens
ctccagagcccatcc

SEQ ID NO: 1094946 - DNA, 15 bp, Homo sapiens
gctccagagcccatc

SEQ ID NO: 1094947 - DNA, 15 bp, Homo sapiens
ggctccagagcccat

SEQ ID NO: 1094948 - DNA, 15 bp, Homo sapiens
gggctccagagccca

SEQ ID NO: 1094949 - DNA, 15 bp, Homo sapiens
ggggctccagagccc

SEQ ID NO: 1094950 - DNA, 15 bp, Homo sapiens
gggggctccagagcc

SEQ ID NO: 1094951 - DNA, 15 bp, Homo sapiens
tgggggctccagagc

SEQ ID NO: 1094952 - DNA, 15 bp, Homo sapiens
ctgggggctccagag

SEQ ID NO: 1094953 - DNA, 15 bp, Homo sapiens
cctgggggctccaga

SEQ ID NO: 1094954 - DNA, 15 bp, Homo sapiens
gcctgggggctccag

SEQ ID NO: 1094955 - DNA, 15 bp, Homo sapiens
ggcctgggggctcca

SEQ ID NO: 1094956 - DNA, 15 bp, Homo sapiens
aggcctgggggctcc

SEQ ID NO: 1094957 - DNA, 15 bp, Homo sapiens
caggcctgggggctc

SEQ ID NO: 1094958 - DNA, 15 bp, Homo sapiens
gcaggcctgggggct

SEQ ID NO: 1094959 - DNA, 15 bp, Homo sapiens
tgcaggcctgggggc

SEQ ID NO: 1094960 - DNA, 15 bp, Homo sapiens
ctgcaggcctggggg

SEQ ID NO: 1094961 - DNA, 15 bp, Homo sapiens
gctgcaggcctgggg

SEQ ID NO: 1094962 - DNA, 15 bp, Homo sapiens
tgctgcaggcctggg

SEQ ID NO: 1094963 - DNA, 15 bp, Homo sapiens
atgctgcaggcctgg

SEQ ID NO: 1094964 - DNA, 15 bp, Homo sapiens
gatgctgcaggcctg

SEQ ID NO: 1094965 - DNA, 15 bp, Homo sapiens
agatgctgcaggcct

SEQ ID NO: 1094966 - DNA, 15 bp, Homo sapiens
cagatgctgcaggcc

SEQ ID NO: 1094967 - DNA, 15 bp, Homo sapiens
gcagatgctgcaggc

SEQ ID NO: 1094968 - DNA, 15 bp, Homo sapiens
ggcagatgctgcagg

SEQ ID NO: 1094969 - DNA, 15 bp, Homo sapiens
gggcagatgctgcag

SEQ ID NO: 1094970 - DNA, 15 bp, Homo sapiens
tgggcagatgctgca

SEQ ID NO: 1094971 - DNA, 15 bp, Homo sapiens
ctgggcagatgctgc

SEQ ID NO: 1094972 - DNA, 15 bp, Homo sapiens
cctgggcagatgctg

SEQ ID NO: 1094973 - DNA, 15 bp, Homo sapiens
ccctgggcagatgct

SEQ ID NO: 1094974 - DNA, 15 bp, Homo sapiens
tccctgggcagatgc

SEQ ID NO: 1094975 - DNA, 15 bp, Homo sapiens
gtccctgggcagatg

SEQ ID NO: 1094976 - DNA, 15 bp, Homo sapiens
agtccctgggcagat

SEQ ID NO: 1094977 - DNA, 15 bp, Homo sapiens
cagtccctgggcaga

SEQ ID NO: 1094978 - DNA, 15 bp, Homo sapiens
gcagtccctgggcag

SEQ ID NO: 1094979 - DNA, 15 bp, Homo sapiens
ggcagtccctgggca

SEQ ID NO: 1094980 - DNA, 15 bp, Homo sapiens
gggcagtccctgggc

SEQ ID NO: 1094981 - DNA, 15 bp, Homo sapiens
agggcagtccctggg

SEQ ID NO: 1094982 - DNA, 15 bp, Homo sapiens
cagggcagtccctgg

SEQ ID NO: 1094983 - DNA, 15 bp, Homo sapiens
ccagggcagtccctg

SEQ ID NO: 1094984 - DNA, 15 bp, Homo sapiens
gccagggcagtccct

SEQ ID NO: 1094985 - DNA, 15 bp, Homo sapiens
ggccagggcagtccc

SEQ ID NO: 1094986 - DNA, 15 bp, Homo sapiens
gggccagggcagtcc

SEQ ID NO: 1094987 - DNA, 15 bp, Homo sapiens
agggccagggcagtc

SEQ ID NO: 1094988 - DNA, 15 bp, Homo sapiens
aagggccagggcagt

SEQ ID NO: 1094989 - DNA, 15 bp, Homo sapiens
caagggccagggcag

SEQ ID NO: 1094990 - DNA, 15 bp, Homo sapiens
ccaagggccagggca

SEQ ID NO: 1094991 - DNA, 15 bp, Homo sapiens
gccaagggccagggc

SEQ ID NO: 1094992 - DNA, 15 bp, Homo sapiens
ggccaagggccaggg

SEQ ID NO: 1094993 - DNA, 15 bp, Homo sapiens
tggccaagggccagg

SEQ ID NO: 1094994 - DNA, 15 bp, Homo sapiens
atggccaagggccag

SEQ ID NO: 1094995 - DNA, 15 bp, Homo sapiens
aatggccaagggcca

SEQ ID NO: 1094996 - DNA, 15 bp, Homo sapiens
aaatggccaagggcc

SEQ ID NO: 1094997 - DNA, 15 bp, Homo sapiens
gaaatggccaagggc

SEQ ID NO: 1094998 - DNA, 15 bp, Homo sapiens
ggaaatggccaaggg

SEQ ID NO: 1094999 - DNA, 15 bp, Homo sapiens
aggaaatggccaagg

SEQ ID NO: 1095000 - DNA, 15 bp, Homo sapiens
gaggaaatggccaag

SEQ ID NO: 1095001 - DNA, 15 bp, Homo sapiens
tgaggaaatggccaa

SEQ ID NO: 1095002 - DNA, 15 bp, Homo sapiens
ctgaggaaatggcca

SEQ ID NO: 1095003 - DNA, 15 bp, Homo sapiens
cctgaggaaatggcc

SEQ ID NO: 1095004 - DNA, 15 bp, Homo sapiens
ccctgaggaaatggc

SEQ ID NO: 1095005 - DNA, 15 bp, Homo sapiens
tccctgaggaaatgg

SEQ ID NO: 1095006 - DNA, 15 bp, Homo sapiens
gtccctgaggaaatg

SEQ ID NO: 1095007 - DNA, 15 bp, Homo sapiens
ggtccctgaggaaat

SEQ ID NO: 1095008 - DNA, 15 bp, Homo sapiens
gggtccctgaggaaa

SEQ ID NO: 1095009 - DNA, 15 bp, Homo sapiens
tgggtccctgaggaa

SEQ ID NO: 1095010 - DNA, 15 bp, Homo sapiens
gtgggtccctgagga

SEQ ID NO: 1095011 - DNA, 15 bp, Homo sapiens
tgtgggtccctgagg

SEQ ID NO: 1095012 - DNA, 15 bp, Homo sapiens
ctgtgggtccctgag

SEQ ID NO: 1095013 - DNA, 15 bp, Homo sapiens
gctgtgggtccctga

SEQ ID NO: 1095014 - DNA, 15 bp, Homo sapiens
agctgtgggtccctg

SEQ ID NO: 1095015 - DNA, 15 bp, Homo sapiens
gagctgtgggtccct

SEQ ID NO: 1095016 - DNA, 15 bp, Homo sapiens
ggagctgtgggtccc

SEQ ID NO: 1095017 - DNA, 15 bp, Homo sapiens
tggagctgtgggtcc

SEQ ID NO: 1095018 - DNA, 15 bp, Homo sapiens
gtggagctgtgggtc

SEQ ID NO: 1095019 - DNA, 15 bp, Homo sapiens
ggtggagctgtgggt

SEQ ID NO: 1095020 - DNA, 15 bp, Homo sapiens
tggtggagctgtggg

SEQ ID NO: 1095021 - DNA, 15 bp, Homo sapiens
ctggtggagctgtgg

SEQ ID NO: 1095022 - DNA, 15 bp, Homo sapiens
gctggtggagctgtg

SEQ ID NO: 1095023 - DNA, 15 bp, Homo sapiens
ggctggtggagctgt

SEQ ID NO: 1095024 - DNA, 15 bp, Homo sapiens
cggctggtggagctg

SEQ ID NO: 1095025 - DNA, 15 bp, Homo sapiens
ccggctggtggagct

SEQ ID NO: 1095026 - DNA, 15 bp, Homo sapiens
gccggctggtggagc

SEQ ID NO: 1095027 - DNA, 15 bp, Homo sapiens
ggccggctggtggag

SEQ ID NO: 1095028 - DNA, 15 bp, Homo sapiens
gggccggctggtgga

SEQ ID NO: 1095029 - DNA, 15 bp, Homo sapiens
ggggccggctggtgg

SEQ ID NO: 1095030 - DNA, 15 bp, Homo sapiens
aggggccggctggtg

SEQ ID NO: 1095031 - DNA, 15 bp, Homo sapiens
gaggggccggctggt

SEQ ID NO: 1095032 - DNA, 15 bp, Homo sapiens
ggaggggccggctgg

SEQ ID NO: 1095033 - DNA, 15 bp, Homo sapiens
gggaggggccggctg

SEQ ID NO: 1095034 - DNA, 15 bp, Homo sapiens
tgggaggggccggct

SEQ ID NO: 1095035 - DNA, 15 bp, Homo sapiens
ctgggaggggccggc

SEQ ID NO: 1095036 - DNA, 15 bp, Homo sapiens
actgggaggggccgg

SEQ ID NO: 1095037 - DNA, 15 bp, Homo sapiens
cactgggaggggccg

SEQ ID NO: 1095038 - DNA, 15 bp, Homo sapiens
gcactgggaggggcc

SEQ ID NO: 1095039 - DNA, 15 bp, Homo sapiens
agcactgggaggggc

SEQ ID NO: 1095040 - DNA, 15 bp, Homo sapiens
cagcactgggagggg

SEQ ID NO: 1095041 - DNA, 15 bp, Homo sapiens
ccagcactgggaggg

SEQ ID NO: 1095042 - DNA, 15 bp, Homo sapiens
tccagcactgggagg

SEQ ID NO: 1095043 - DNA, 15 bp, Homo sapiens
ttccagcactgggag

SEQ ID NO: 1095044 - DNA, 15 bp, Homo sapiens
attccagcactggga

SEQ ID NO: 1095045 - DNA, 15 bp, Homo sapiens
tattccagcactggg

SEQ ID NO: 1095046 - DNA, 15 bp, Homo sapiens
ctattccagcactgg

SEQ ID NO: 1095047 - DNA, 15 bp, Homo sapiens
tctattccagcactg

SEQ ID NO: 1095048 - DNA, 15 bp, Homo sapiens
gtctattccagcact

SEQ ID NO: 1095049 - DNA, 15 bp, Homo sapiens
tgtctattccagcac

SEQ ID NO: 1095050 - DNA, 15 bp, Homo sapiens
ctgtctattccagca

SEQ ID NO: 1095051 - DNA, 15 bp, Homo sapiens
actgtctattccagc

SEQ ID NO: 1095052 - DNA, 15 bp, Homo sapiens
aactgtctattccag

SEQ ID NO: 1095053 - DNA, 15 bp, Homo sapiens
gaactgtctattcca

SEQ ID NO: 1095054 - DNA, 15 bp, Homo sapiens
ggaactgtctattcc

SEQ ID NO: 1095055 - DNA, 15 bp, Homo sapiens
aggaactgtctattc

SEQ ID NO: 1095056 - DNA, 15 bp, Homo sapiens
gaggaactgtctatt

SEQ ID NO: 1095057 - DNA, 15 bp, Homo sapiens
tgaggaactgtctat

SEQ ID NO: 1095058 - DNA, 15 bp, Homo sapiens
ctgaggaactgtcta

SEQ ID NO: 1095059 - DNA, 15 bp, Homo sapiens
actgaggaactgtct

SEQ ID NO: 1095060 - DNA, 15 bp, Homo sapiens
gactgaggaactgtc

SEQ ID NO: 1095061 - DNA, 15 bp, Homo sapiens
ggactgaggaactgt

SEQ ID NO: 1095062 - DNA, 15 bp, Homo sapiens
tggactgaggaactg

SEQ ID NO: 1095063 - DNA, 15 bp, Homo sapiens
gtggactgaggaact

SEQ ID NO: 1095064 - DNA, 15 bp, Homo sapiens
tgtggactgaggaac

SEQ ID NO: 1095065 - DNA, 15 bp, Homo sapiens
atgtggactgaggaa

SEQ ID NO: 1095066 - DNA, 15 bp, Homo sapiens
gatgtggactgagga

SEQ ID NO: 1095067 - DNA, 15 bp, Homo sapiens
agatgtggactgagg

SEQ ID NO: 1095068 - DNA, 15 bp, Homo sapiens
cagatgtggactgag

SEQ ID NO: 1095069 - DNA, 15 bp, Homo sapiens
gcagatgtggactga

SEQ ID NO: 1095070 - DNA, 15 bp, Homo sapiens
ggcagatgtggactg

SEQ ID NO: 1095071 - DNA, 15 bp, Homo sapiens
tggcagatgtggact

SEQ ID NO: 1095072 - DNA, 15 bp, Homo sapiens
ttggcagatgtggac

SEQ ID NO: 1095073 - DNA, 15 bp, Homo sapiens
tttggcagatgtgga

SEQ ID NO: 1095074 - DNA, 15 bp, Homo sapiens
ctttggcagatgtgg

SEQ ID NO: 1095075 - DNA, 15 bp, Homo sapiens
cctttggcagatgtg

SEQ ID NO: 1095076 - DNA, 15 bp, Homo sapiens
gcctttggcagatgt

SEQ ID NO: 1095077 - DNA, 15 bp, Homo sapiens
cgcctttggcagatg

SEQ ID NO: 1095078 - DNA, 15 bp, Homo sapiens
ccgcctttggcagat

SEQ ID NO: 1095079 - DNA, 15 bp, Homo sapiens
gccgcctttggcaga

SEQ ID NO: 1095080 - DNA, 15 bp, Homo sapiens
tgccgcctttggcag

SEQ ID NO: 1095081 - DNA, 15 bp, Homo sapiens
gtgccgcctttggca

SEQ ID NO: 1095082 - DNA, 15 bp, Homo sapiens
agtgccgcctttggc

SEQ ID NO: 1095083 - DNA, 15 bp, Homo sapiens
tagtgccgcctttgg

SEQ ID NO: 1095084 - DNA, 15 bp, Homo sapiens
ctagtgccgcctttg

SEQ ID NO: 1095085 - DNA, 15 bp, Homo sapiens
tctagtgccgccttt

SEQ ID NO: 1095086 - DNA, 15 bp, Homo sapiens
ttctagtgccgcctt

SEQ ID NO: 1095087 - DNA, 15 bp, Homo sapiens
cttctagtgccgcct

SEQ ID NO: 1095088 - DNA, 15 bp, Homo sapiens
ccttctagtgccgcc

SEQ ID NO: 1095089 - DNA, 15 bp, Homo sapiens
gccttctagtgccgc

SEQ ID NO: 1095090 - DNA, 15 bp, Homo sapiens
tgccttctagtgccg

SEQ ID NO: 1095091 - DNA, 15 bp, Homo sapiens
atgccttctagtgcc

SEQ ID NO: 1095092 - DNA, 15 bp, Homo sapiens
gatgccttctagtgc

SEQ ID NO: 1095093 - DNA, 15 bp, Homo sapiens
ggatgccttctagtg

SEQ ID NO: 1095094 - DNA, 15 bp, Homo sapiens
aggatgccttctagt

SEQ ID NO: 1095095 - DNA, 15 bp, Homo sapiens
caggatgccttctag

SEQ ID NO: 1095096 - DNA, 15 bp, Homo sapiens
gcaggatgccttcta

SEQ ID NO: 1095097 - DNA, 15 bp, Homo sapiens
ggcaggatgccttct

SEQ ID NO: 1095098 - DNA, 15 bp, Homo sapiens
aggcaggatgccttc

SEQ ID NO: 1095099 - DNA, 15 bp, Homo sapiens
aaggcaggatgcctt

SEQ ID NO: 1095100 - DNA, 15 bp, Homo sapiens
aaaggcaggatgcct

SEQ ID NO: 1095101 - DNA, 15 bp, Homo sapiens
aaaaggcaggatgcc

SEQ ID NO: 1095102 - DNA, 15 bp, Homo sapiens
aaaaaggcaggatgc

SEQ ID NO: 1095103 - DNA, 15 bp, Homo sapiens
aaaaaaggcaggatg

SEQ ID NO: 1095104 - DNA, 15 bp, Homo sapiens
taaaaaaggcaggat

SEQ ID NO: 1095105 - DNA, 15 bp, Homo sapiens
gtaaaaaaggcagga

SEQ ID NO: 1095106 - DNA, 15 bp, Homo sapiens
agtaaaaaaggcagg

SEQ ID NO: 1095107 - DNA, 15 bp, Homo sapiens
cagtaaaaaaggcag

SEQ ID NO: 1095108 - DNA, 15 bp, Homo sapiens
gcagtaaaaaaggca

SEQ ID NO: 1095109 - DNA, 15 bp, Homo sapiens
cgcagtaaaaaaggc

SEQ ID NO: 1095110 - DNA, 15 bp, Homo sapiens
acgcagtaaaaaagg

SEQ ID NO: 1095111 - DNA, 15 bp, Homo sapiens
aacgcagtaaaaaag

SEQ ID NO: 1095112 - DNA, 15 bp, Homo sapiens
gaacgcagtaaaaaa

SEQ ID NO: 1095113 - DNA, 15 bp, Homo sapiens
agaacgcagtaaaaa

SEQ ID NO: 1095114 - DNA, 15 bp, Homo sapiens
cagaacgcagtaaaa

SEQ ID NO: 1095115 - DNA, 15 bp, Homo sapiens
ccagaacgcagtaaa

SEQ ID NO: 1095116 - DNA, 15 bp, Homo sapiens
tccagaacgcagtaa

SEQ ID NO: 1095117 - DNA, 15 bp, Homo sapiens
ctccagaacgcagta

SEQ ID NO: 1095118 - DNA, 15 bp, Homo sapiens
cctccagaacgcagt

SEQ ID NO: 1095119 - DNA, 15 bp, Homo sapiens
acctccagaacgcag

SEQ ID NO: 1095120 - DNA, 15 bp, Homo sapiens
cacctccagaacgca

SEQ ID NO: 1095121 - DNA, 15 bp, Homo sapiens
ccacctccagaacgc

SEQ ID NO: 1095122 - DNA, 15 bp, Homo sapiens
cccacctccagaacg

SEQ ID NO: 1095123 - DNA, 15 bp, Homo sapiens
ccccacctccagaac

SEQ ID NO: 1095124 - DNA, 15 bp, Homo sapiens
accccacctccagaa

SEQ ID NO: 1095125 - DNA, 15 bp, Homo sapiens
gaccccacctccaga

SEQ ID NO: 1095126 - DNA, 15 bp, Homo sapiens
tgaccccacctccag

SEQ ID NO: 1095127 - DNA, 15 bp, Homo sapiens
gtgaccccacctcca

SEQ ID NO: 1095128 - DNA, 15 bp, Homo sapiens
tgtgaccccacctcc

SEQ ID NO: 1095129 - DNA, 15 bp, Homo sapiens
ttgtgaccccacctc

SEQ ID NO: 1095130 - DNA, 15 bp, Homo sapiens
tttgtgaccccacct

SEQ ID NO: 1095131 - DNA, 15 bp, Homo sapiens
ctttgtgaccccacc

SEQ ID NO: 1095132 - DNA, 15 bp, Homo sapiens
gctttgtgaccccac

SEQ ID NO: 1095133 - DNA, 15 bp, Homo sapiens
tgctttgtgacccca

SEQ ID NO: 1095134 - DNA, 15 bp, Homo sapiens
gtgctttgtgacccc

SEQ ID NO: 1095135 - DNA, 15 bp, Homo sapiens
agtgctttgtgaccc

SEQ ID NO: 1095136 - DNA, 15 bp, Homo sapiens
cagtgctttgtgacc

SEQ ID NO: 1095137 - DNA, 15 bp, Homo sapiens
gcagtgctttgtgac

SEQ ID NO: 1095138 - DNA, 15 bp, Homo sapiens
agcagtgctttgtga

SEQ ID NO: 1095139 - DNA, 15 bp, Homo sapiens
gagcagtgctttgtg

SEQ ID NO: 1095140 - DNA, 15 bp, Homo sapiens
tgagcagtgctttgt

SEQ ID NO: 1095141 - DNA, 15 bp, Homo sapiens
gtgagcagtgctttg

SEQ ID NO: 1095142 - DNA, 15 bp, Homo sapiens
agtgagcagtgcttt

SEQ ID NO: 1095143 - DNA, 15 bp, Homo sapiens
cagtgagcagtgctt

SEQ ID NO: 1095144 - DNA, 15 bp, Homo sapiens
gcagtgagcagtgct

SEQ ID NO: 1095145 - DNA, 15 bp, Homo sapiens
tgcagtgagcagtgc

SEQ ID NO: 1095146 - DNA, 15 bp, Homo sapiens
atgcagtgagcagtg

SEQ ID NO: 1095147 - DNA, 15 bp, Homo sapiens
tatgcagtgagcagt

SEQ ID NO: 1095148 - DNA, 15 bp, Homo sapiens
ttatgcagtgagcag

SEQ ID NO: 1095149 - DNA, 15 bp, Homo sapiens
tttatgcagtgagca

SEQ ID NO: 1095150 - DNA, 15 bp, Homo sapiens
ttttatgcagtgagc

SEQ ID NO: 1095151 - DNA, 15 bp, Homo sapiens
cttttatgcagtgag

SEQ ID NO: 1095152 - DNA, 15 bp, Homo sapiens
ccttttatgcagtga

SEQ ID NO: 1095153 - DNA, 15 bp, Homo sapiens
cccttttatgcagtg

SEQ ID NO: 1095154 - DNA, 15 bp, Homo sapiens
tcccttttatgcagt

SEQ ID NO: 1095155 - DNA, 15 bp, Homo sapiens
gtcccttttatgcag

SEQ ID NO: 1095156 - DNA, 15 bp, Homo sapiens
tgtcccttttatgca

SEQ ID NO: 1095157 - DNA, 15 bp, Homo sapiens
ctgtcccttttatgc

SEQ ID NO: 1095158 - DNA, 15 bp, Homo sapiens
gctgtcccttttatg

SEQ ID NO: 1095159 - DNA, 15 bp, Homo sapiens
tgctgtcccttttat

SEQ ID NO: 1095160 - DNA, 15 bp, Homo sapiens
atgctgtccctttta

SEQ ID NO: 1095161 - DNA, 15 bp, Homo sapiens
gatgctgtccctttt

SEQ ID NO: 1095162 - DNA, 15 bp, Homo sapiens
ggatgctgtcccttt

SEQ ID NO: 1095163 - DNA, 15 bp, Homo sapiens
aggatgctgtccctt

SEQ ID NO: 1095164 - DNA, 15 bp, Homo sapiens
caggatgctgtccct

SEQ ID NO: 1095165 - DNA, 15 bp, Homo sapiens
gcaggatgctgtccc

SEQ ID NO: 1095166 - DNA, 15 bp, Homo sapiens
ggcaggatgctgtcc

SEQ ID NO: 1095167 - DNA, 15 bp, Homo sapiens
gggcaggatgctgtc

SEQ ID NO: 1095168 - DNA, 15 bp, Homo sapiens
ggggcaggatgctgt

SEQ ID NO: 1095169 - DNA, 15 bp, Homo sapiens
aggggcaggatgctg

SEQ ID NO: 1095170 - DNA, 15 bp, Homo sapiens
caggggcaggatgct

SEQ ID NO: 1095171 - DNA, 15 bp, Homo sapiens
ccaggggcaggatgc

SEQ ID NO: 1095172 - DNA, 15 bp, Homo sapiens
gccaggggcaggatg

SEQ ID NO: 1095173 - DNA, 15 bp, Homo sapiens
tgccaggggcaggat

SEQ ID NO: 1095174 - DNA, 15 bp, Homo sapiens
ctgccaggggcagga

SEQ ID NO: 1095175 - DNA, 15 bp, Homo sapiens
gctgccaggggcagg

SEQ ID NO: 1095176 - DNA, 15 bp, Homo sapiens
ggctgccaggggcag

SEQ ID NO: 1095177 - DNA, 15 bp, Homo sapiens
gggctgccaggggca

SEQ ID NO: 1095178 - DNA, 15 bp, Homo sapiens
agggctgccaggggc

SEQ ID NO: 1095179 - DNA, 15 bp, Homo sapiens
cagggctgccagggg

SEQ ID NO: 1095180 - DNA, 15 bp, Homo sapiens
gcagggctgccaggg

SEQ ID NO: 1095181 - DNA, 15 bp, Homo sapiens
ggcagggctgccagg

SEQ ID NO: 1095182 - DNA, 15 bp, Homo sapiens
aggcagggctgccag

SEQ ID NO: 1095183 - DNA, 15 bp, Homo sapiens
caggcagggctgcca

SEQ ID NO: 1095184 - DNA, 15 bp, Homo sapiens
tcaggcagggctgcc

SEQ ID NO: 1095185 - DNA, 15 bp, Homo sapiens
gtcaggcagggctgc

SEQ ID NO: 1095186 - DNA, 15 bp, Homo sapiens
ggtcaggcagggctg

SEQ ID NO: 1095187 - DNA, 15 bp, Homo sapiens
tggtcaggcagggct

SEQ ID NO: 1095188 - DNA, 15 bp, Homo sapiens
ctggtcaggcagggc

SEQ ID NO: 1095189 - DNA, 15 bp, Homo sapiens
gctggtcaggcaggg

SEQ ID NO: 1095190 - DNA, 15 bp, Homo sapiens
agctggtcaggcagg

SEQ ID NO: 1095191 - DNA, 15 bp, Homo sapiens
gagctggtcaggcag

SEQ ID NO: 1095192 - DNA, 15 bp, Homo sapiens
ggagctggtcaggca

SEQ ID NO: 1095193 - DNA, 15 bp, Homo sapiens
cggagctggtcaggc

SEQ ID NO: 1095194 - DNA, 15 bp, Homo sapiens
gcggagctggtcagg

SEQ ID NO: 1095195 - DNA, 15 bp, Homo sapiens
ggcggagctggtcag

SEQ ID NO: 1095196 - DNA, 15 bp, Homo sapiens
aggcggagctggtca

SEQ ID NO: 1095197 - DNA, 15 bp, Homo sapiens
gaggcggagctggtc

SEQ ID NO: 1095198 - DNA, 15 bp, Homo sapiens
agaggcggagctggt

SEQ ID NO: 1095199 - DNA, 15 bp, Homo sapiens
gagaggcggagctgg

SEQ ID NO: 1095200 - DNA, 15 bp, Homo sapiens
ggagaggcggagctg

SEQ ID NO: 1095201 - DNA, 15 bp, Homo sapiens
gggagaggcggagct

SEQ ID NO: 1095202 - DNA, 15 bp, Homo sapiens
tgggagaggcggagc

SEQ ID NO: 1095203 - DNA, 15 bp, Homo sapiens
gtgggagaggcggag

SEQ ID NO: 1095204 - DNA, 15 bp, Homo sapiens
agtgggagaggcgga

SEQ ID NO: 1095205 - DNA, 15 bp, Homo sapiens
cagtgggagaggcgg

SEQ ID NO: 1095206 - DNA, 15 bp, Homo sapiens
gcagtgggagaggcg

SEQ ID NO: 1095207 - DNA, 15 bp, Homo sapiens
agcagtgggagaggc

SEQ ID NO: 1095208 - DNA, 15 bp, Homo sapiens
tagcagtgggagagg

SEQ ID NO: 1095209 - DNA, 15 bp, Homo sapiens
atagcagtgggagag

SEQ ID NO: 1095210 - DNA, 15 bp, Homo sapiens
gatagcagtgggaga

SEQ ID NO: 1095211 - DNA, 15 bp, Homo sapiens
ggatagcagtgggag

SEQ ID NO: 1095212 - DNA, 15 bp, Homo sapiens
tggatagcagtggga

SEQ ID NO: 1095213 - DNA, 15 bp, Homo sapiens
ttggatagcagtggg

SEQ ID NO: 1095214 - DNA, 15 bp, Homo sapiens
gttggatagcagtgg

SEQ ID NO: 1095215 - DNA, 15 bp, Homo sapiens
ggttggatagcagtg

SEQ ID NO: 1095216 - DNA, 15 bp, Homo sapiens
aggttggatagcagt

SEQ ID NO: 1095217 - DNA, 15 bp, Homo sapiens
caggttggatagcag

SEQ ID NO: 1095218 - DNA, 15 bp, Homo sapiens
acaggttggatagca

SEQ ID NO: 1095219 - DNA, 15 bp, Homo sapiens
tacaggttggatagc

SEQ ID NO: 1095220 - DNA, 15 bp, Homo sapiens
gtacaggttggatag

SEQ ID NO: 1095221 - DNA, 15 bp, Homo sapiens
tgtacaggttggata

SEQ ID NO: 1095222 - DNA, 15 bp, Homo sapiens
gtgtacaggttggat

SEQ ID NO: 1095223 - DNA, 15 bp, Homo sapiens
ggtgtacaggttgga

SEQ ID NO: 1095224 - DNA, 15 bp, Homo sapiens
gggtgtacaggttgg

SEQ ID NO: 1095225 - DNA, 15 bp, Homo sapiens
agggtgtacaggttg

SEQ ID NO: 1095226 - DNA, 15 bp, Homo sapiens
cagggtgtacaggtt

SEQ ID NO: 1095227 - DNA, 15 bp, Homo sapiens
ccagggtgtacaggt

SEQ ID NO: 1095228 - DNA, 15 bp, Homo sapiens
accagggtgtacagg

SEQ ID NO: 1095229 - DNA, 15 bp, Homo sapiens
caccagggtgtacag

SEQ ID NO: 1095230 - DNA, 15 bp, Homo sapiens
tcaccagggtgtaca

SEQ ID NO: 1095231 - DNA, 15 bp, Homo sapiens
gtcaccagggtgtac

SEQ ID NO: 1095232 - DNA, 15 bp, Homo sapiens
ggtcaccagggtgta

SEQ ID NO: 1095233 - DNA, 15 bp, Homo sapiens
tggtcaccagggtgt

SEQ ID NO: 1095234 - DNA, 15 bp, Homo sapiens
atggtcaccagggtg

SEQ ID NO: 1095235 - DNA, 15 bp, Homo sapiens
catggtcaccagggt

SEQ ID NO: 1095236 - DNA, 15 bp, Homo sapiens
acatggtcaccaggg

SEQ ID NO: 1095237 - DNA, 15 bp, Homo sapiens
gacatggtcaccagg

SEQ ID NO: 1095238 - DNA, 15 bp, Homo sapiens
ggacatggtcaccag

SEQ ID NO: 1095239 - DNA, 15 bp, Homo sapiens
tggacatggtcacca

SEQ ID NO: 1095240 - DNA, 15 bp, Homo sapiens
ctggacatggtcacc

SEQ ID NO: 1095241 - DNA, 15 bp, Homo sapiens
cctggacatggtcac

SEQ ID NO: 1095242 - DNA, 15 bp, Homo sapiens
gcctggacatggtca

SEQ ID NO: 1095243 - DNA, 15 bp, Homo sapiens
ggcctggacatggtc

SEQ ID NO: 1095244 - DNA, 15 bp, Homo sapiens
tggcctggacatggt

SEQ ID NO: 1095245 - DNA, 15 bp, Homo sapiens
ctggcctggacatgg

SEQ ID NO: 1095246 - DNA, 15 bp, Homo sapiens
actggcctggacatg

SEQ ID NO: 1095247 - DNA, 15 bp, Homo sapiens
cactggcctggacat

SEQ ID NO: 1095248 - DNA, 15 bp, Homo sapiens
ccactggcctggaca

SEQ ID NO: 1095249 - DNA, 15 bp, Homo sapiens
gccactggcctggac

SEQ ID NO: 1095250 - DNA, 15 bp, Homo sapiens
ggccactggcctgga

SEQ ID NO: 1095251 - DNA, 15 bp, Homo sapiens
aggccactggcctgg

SEQ ID NO: 1095252 - DNA, 15 bp, Homo sapiens
aaggccactggcctg

SEQ ID NO: 1095253 - DNA, 15 bp, Homo sapiens
taaggccactggcct

SEQ ID NO: 1095254 - DNA, 15 bp, Homo sapiens
ttaaggccactggcc

SEQ ID NO: 1095255 - DNA, 15 bp, Homo sapiens
cttaaggccactggc

SEQ ID NO: 1095256 - DNA, 15 bp, Homo sapiens
ccttaaggccactgg

SEQ ID NO: 1095257 - DNA, 15 bp, Homo sapiens
tccttaaggccactg

SEQ ID NO: 1095258 - DNA, 15 bp, Homo sapiens
gtccttaaggccact

SEQ ID NO: 1095259 - DNA, 15 bp, Homo sapiens
agtccttaaggccac

SEQ ID NO: 1095260 - DNA, 15 bp, Homo sapiens
cagtccttaaggcca

SEQ ID NO: 1095261 - DNA, 15 bp, Homo sapiens
acagtccttaaggcc

SEQ ID NO: 1095262 - DNA, 15 bp, Homo sapiens
gacagtccttaaggc

SEQ ID NO: 1095263 - DNA, 15 bp, Homo sapiens
agacagtccttaagg

SEQ ID NO: 1095264 - DNA, 15 bp, Homo sapiens
gagacagtccttaag

SEQ ID NO: 1095265 - DNA, 15 bp, Homo sapiens
agagacagtccttaa

SEQ ID NO: 1095266 - DNA, 15 bp, Homo sapiens
cagagacagtcctta

SEQ ID NO: 1095267 - DNA, 15 bp, Homo sapiens
acagagacagtcctt

SEQ ID NO: 1095268 - DNA, 15 bp, Homo sapiens
tacagagacagtcct

SEQ ID NO: 1095269 - DNA, 15 bp, Homo sapiens
gtacagagacagtcc

SEQ ID NO: 1095270 - DNA, 15 bp, Homo sapiens
agtacagagacagtc

SEQ ID NO: 1095271 - DNA, 15 bp, Homo sapiens
cagtacagagacagt

SEQ ID NO: 1095272 - DNA, 15 bp, Homo sapiens
tcagtacagagacag

SEQ ID NO: 1095273 - DNA, 15 bp, Homo sapiens
atcagtacagagaca

SEQ ID NO: 1095274 - DNA, 15 bp, Homo sapiens
catcagtacagagac

SEQ ID NO: 1095275 - DNA, 15 bp, Homo sapiens
ccatcagtacagaga

SEQ ID NO: 1095276 - DNA, 15 bp, Homo sapiens
gccatcagtacagag

SEQ ID NO: 1095277 - DNA, 15 bp, Homo sapiens
agccatcagtacaga

SEQ ID NO: 1095278 - DNA, 15 bp, Homo sapiens
gagccatcagtacag

SEQ ID NO: 1095279 - DNA, 15 bp, Homo sapiens
ggagccatcagtaca

SEQ ID NO: 1095280 - DNA, 15 bp, Homo sapiens
tggagccatcagtac

SEQ ID NO: 1095281 - DNA, 15 bp, Homo sapiens
gtggagccatcagta

SEQ ID NO: 1095282 - DNA, 15 bp, Homo sapiens
tgtggagccatcagt

SEQ ID NO: 1095283 - DNA, 15 bp, Homo sapiens
atgtggagccatcag

SEQ ID NO: 1095284 - DNA, 15 bp, Homo sapiens
gatgtggagccatca

SEQ ID NO: 1095285 - DNA, 15 bp, Homo sapiens
agatgtggagccatc

SEQ ID NO: 1095286 - DNA, 15 bp, Homo sapiens
tagatgtggagccat

SEQ ID NO: 1095287 - DNA, 15 bp, Homo sapiens
gtagatgtggagcca

SEQ ID NO: 1095288 - DNA, 15 bp, Homo sapiens
ggtagatgtggagcc

SEQ ID NO: 1095289 - DNA, 15 bp, Homo sapiens
aggtagatgtggagc

SEQ ID NO: 1095290 - DNA, 15 bp, Homo sapiens
gaggtagatgtggag

SEQ ID NO: 1095291 - DNA, 15 bp, Homo sapiens
agaggtagatgtgga

SEQ ID NO: 1095292 - DNA, 15 bp, Homo sapiens
gagaggtagatgtgg

SEQ ID NO: 1095293 - DNA, 15 bp, Homo sapiens
ggagaggtagatgtg

SEQ ID NO: 1095294 - DNA, 15 bp, Homo sapiens
tggagaggtagatgt

SEQ ID NO: 1095295 - DNA, 15 bp, Homo sapiens
ctggagaggtagatg

SEQ ID NO: 1095296 - DNA, 15 bp, Homo sapiens
gctggagaggtagat

SEQ ID NO: 1095297 - DNA, 15 bp, Homo sapiens
ggctggagaggtaga

SEQ ID NO: 1095298 - DNA, 15 bp, Homo sapiens
tggctggagaggtag

SEQ ID NO: 1095299 - DNA, 15 bp, Homo sapiens
ctggctggagaggta

SEQ ID NO: 1095300 - DNA, 15 bp, Homo sapiens
tctggctggagaggt

SEQ ID NO: 1095301 - DNA, 15 bp, Homo sapiens
gtctggctggagagg

SEQ ID NO: 1095302 - DNA, 15 bp, Homo sapiens
agtctggctggagag

SEQ ID NO: 1095303 - DNA, 15 bp, Homo sapiens
gagtctggctggaga

SEQ ID NO: 1095304 - DNA, 15 bp, Homo sapiens
agagtctggctggag

SEQ ID NO: 1095305 - DNA, 15 bp, Homo sapiens
gagagtctggctgga

SEQ ID NO: 1095306 - DNA, 15 bp, Homo sapiens
ggagagtctggctgg

SEQ ID NO: 1095307 - DNA, 15 bp, Homo sapiens
aggagagtctggctg

SEQ ID NO: 1095308 - DNA, 15 bp, Homo sapiens
gaggagagtctggct

SEQ ID NO: 1095309 - DNA, 15 bp, Homo sapiens
agaggagagtctggc

SEQ ID NO: 1095310 - DNA, 15 bp, Homo sapiens
cagaggagagtctgg

SEQ ID NO: 1095311 - DNA, 15 bp, Homo sapiens
tcagtgaaggctggt

SEQ ID NO: 1095312 - DNA, 15 bp, Homo sapiens
ctcagtgaaggctgg

SEQ ID NO: 1095313 - DNA, 15 bp, Homo sapiens
cctcagtgaaggctg

SEQ ID NO: 1095314 - DNA, 15 bp, Homo sapiens
tcctcagtgaaggct

SEQ ID NO: 1095315 - DNA, 15 bp, Homo sapiens
ctcctcagtgaaggc

SEQ ID NO: 1095316 - DNA, 15 bp, Homo sapiens
gctcctcagtgaagg

SEQ ID NO: 1095317 - DNA, 15 bp, Homo sapiens
tgctcctcagtgaag

SEQ ID NO: 1095318 - DNA, 15 bp, Homo sapiens
ttgctcctcagtgaa

SEQ ID NO: 1095319 - DNA, 15 bp, Homo sapiens
attgctcctcagtga

SEQ ID NO: 1095320 - DNA, 15 bp, Homo sapiens
gattgctcctcagtg

SEQ ID NO: 1095321 - DNA, 15 bp, Homo sapiens
ggattgctcctcagt

SEQ ID NO: 1095322 - DNA, 15 bp, Homo sapiens
tggattgctcctcag

SEQ ID NO: 1095323 - DNA, 15 bp, Homo sapiens
ttggattgctcctca

SEQ ID NO: 1095324 - DNA, 15 bp, Homo sapiens
attggattgctcctc

SEQ ID NO: 1095325 - DNA, 15 bp, Homo sapiens
gattggattgctcct

SEQ ID NO: 1095326 - DNA, 15 bp, Homo sapiens
tgattggattgctcc

SEQ ID NO: 1095327 - DNA, 15 bp, Homo sapiens
ctgattggattgctc

SEQ ID NO: 1095328 - DNA, 15 bp, Homo sapiens
tctgattggattgct

SEQ ID NO: 1095329 - DNA, 15 bp, Homo sapiens
atctgattggattgc

SEQ ID NO: 1095330 - DNA, 15 bp, Homo sapiens
gatctgattggattg

SEQ ID NO: 1095331 - DNA, 15 bp, Homo sapiens
tgatctgattggatt

SEQ ID NO: 1095332 - DNA, 15 bp, Homo sapiens
ctgatctgattggat

SEQ ID NO: 1095333 - DNA, 15 bp, Homo sapiens
actgatctgattgga

SEQ ID NO: 1095334 - DNA, 15 bp, Homo sapiens
aactgatctgattgg

SEQ ID NO: 1095335 - DNA, 15 bp, Homo sapiens
taactgatctgattg

SEQ ID NO: 1095336 - DNA, 15 bp, Homo sapiens
ataactgatctgatt

SEQ ID NO: 1095337 - DNA, 15 bp, Homo sapiens
gataactgatctgat

SEQ ID NO: 1095338 - DNA, 15 bp, Homo sapiens
agataactgatctga

SEQ ID NO: 1095339 - DNA, 15 bp, Homo sapiens
cagataactgatctg

SEQ ID NO: 1095340 - DNA, 15 bp, Homo sapiens
gcagataactgatct

SEQ ID NO: 1095341 - DNA, 15 bp, Homo sapiens
agcagataactgatc

SEQ ID NO: 1095342 - DNA, 15 bp, Homo sapiens
cagcagataactgat

SEQ ID NO: 1095343 - DNA, 15 bp, Homo sapiens
acagcagataactga

SEQ ID NO: 1095344 - DNA, 15 bp, Homo sapiens
cacagcagataactg

SEQ ID NO: 1095345 - DNA, 15 bp, Homo sapiens
gcacagcagataact

SEQ ID NO: 1095346 - DNA, 15 bp, Homo sapiens
cgcacagcagataac

SEQ ID NO: 1095347 - DNA, 15 bp, Homo sapiens
gcgcacagcagataa

SEQ ID NO: 1095348 - DNA, 15 bp, Homo sapiens
tgcgcacagcagata

SEQ ID NO: 1095349 - DNA, 15 bp, Homo sapiens
gtgcgcacagcagat

SEQ ID NO: 1095350 - DNA, 15 bp, Homo sapiens
tgtgcgcacagcaga

SEQ ID NO: 1095351 - DNA, 15 bp, Homo sapiens
ctgtgcgcacagcag

SEQ ID NO: 1095352 - DNA, 15 bp, Homo sapiens
gctgtgcgcacagca

SEQ ID NO: 1095353 - DNA, 15 bp, Homo sapiens
ggctgtgcgcacagc

SEQ ID NO: 1095354 - DNA, 15 bp, Homo sapiens
cggctgtgcgcacag

SEQ ID NO: 1095355 - DNA, 15 bp, Homo sapiens
acggctgtgcgcaca

SEQ ID NO: 1095356 - DNA, 15 bp, Homo sapiens
cacggctgtgcgcac

SEQ ID NO: 1095357 - DNA, 15 bp, Homo sapiens
acacggctgtgcgca

SEQ ID NO: 1095358 - DNA, 15 bp, Homo sapiens
cacacggctgtgcgc

SEQ ID NO: 1095359 - DNA, 15 bp, Homo sapiens
ccacacggctgtgcg

SEQ ID NO: 1095360 - DNA, 15 bp, Homo sapiens
accacacggctgtgc

SEQ ID NO: 1095361 - DNA, 15 bp, Homo sapiens
aaccacacggctgtg

SEQ ID NO: 1095362 - DNA, 15 bp, Homo sapiens
gaaccacacggctgt

SEQ ID NO: 1095363 - DNA, 15 bp, Homo sapiens
agaaccacacggctg

SEQ ID NO: 1095364 - DNA, 15 bp, Homo sapiens
tagaaccacacggct

SEQ ID NO: 1095365 - DNA, 15 bp, Homo sapiens
atagaaccacacggc

SEQ ID NO: 1095366 - DNA, 15 bp, Homo sapiens
tatagaaccacacgg

SEQ ID NO: 1095367 - DNA, 15 bp, Homo sapiens
gtatagaaccacacg

SEQ ID NO: 1095368 - DNA, 15 bp, Homo sapiens
agtatagaaccacac

SEQ ID NO: 1095369 - DNA, 15 bp, Homo sapiens
aagtatagaaccaca

SEQ ID NO: 1095370 - DNA, 15 bp, Homo sapiens
gaagtatagaaccac

SEQ ID NO: 1095371 - DNA, 15 bp, Homo sapiens
agaagtatagaacca

SEQ ID NO: 1095372 - DNA, 15 bp, Homo sapiens
gagaagtatagaacc

SEQ ID NO: 1095373 - DNA, 15 bp, Homo sapiens
agagaagtatagaac

SEQ ID NO: 1095374 - DNA, 15 bp, Homo sapiens
aagagaagtatagaa

SEQ ID NO: 1095375 - DNA, 15 bp, Homo sapiens
taagagaagtataga

SEQ ID NO: 1095376 - DNA, 15 bp, Homo sapiens
gtaagagaagtatag

SEQ ID NO: 1095377 - DNA, 15 bp, Homo sapiens
agtaagagaagtata

SEQ ID NO: 1095378 - DNA, 15 bp, Homo sapiens
aagtaagagaagtat

SEQ ID NO: 1095379 - DNA, 15 bp, Homo sapiens
gaagtaagagaagta

SEQ ID NO: 1095380 - DNA, 15 bp, Homo sapiens
ggaagtaagagaagt

SEQ ID NO: 1095381 - DNA, 15 bp, Homo sapiens
tggaagtaagagaag

SEQ ID NO: 1095382 - DNA, 15 bp, Homo sapiens
atggaagtaagagaa

SEQ ID NO: 1095383 - DNA, 15 bp, Homo sapiens
aatggaagtaagaga

SEQ ID NO: 1095384 - DNA, 15 bp, Homo sapiens
aaatggaagtaagag

SEQ ID NO: 1095385 - DNA, 15 bp, Homo sapiens
aaaatggaagtaaga

SEQ ID NO: 1095386 - DNA, 15 bp, Homo sapiens
gaaaatggaagtaag

SEQ ID NO: 1095387 - DNA, 15 bp, Homo sapiens
tgaaaatggaagtaa

SEQ ID NO: 1095388 - DNA, 15 bp, Homo sapiens
gtgaaaatggaagta

SEQ ID NO: 1095389 - DNA, 15 bp, Homo sapiens
ggtgaaaatggaagt

SEQ ID NO: 1095390 - DNA, 15 bp, Homo sapiens
aggtgaaaatggaag

SEQ ID NO: 1095391 - DNA, 15 bp, Homo sapiens
aaggtgaaaatggaa

SEQ ID NO: 1095392 - DNA, 15 bp, Homo sapiens
aaaggtgaaaatgga

SEQ ID NO: 1095393 - DNA, 15 bp, Homo sapiens
gaaaggtgaaaatgg

SEQ ID NO: 1095394 - DNA, 15 bp, Homo sapiens
tgaaaggtgaaaatg

SEQ ID NO: 1095395 - DNA, 15 bp, Homo sapiens
ctgaaaggtgaaaat

SEQ ID NO: 1095396 - DNA, 15 bp, Homo sapiens
tctgaaaggtgaaaa

SEQ ID NO: 1095397 - DNA, 15 bp, Homo sapiens
ttctgaaaggtgaaa

SEQ ID NO: 1095398 - DNA, 15 bp, Homo sapiens
cttctgaaaggtgaa

SEQ ID NO: 1095399 - DNA, 15 bp, Homo sapiens
ccttctgaaaggtga

SEQ ID NO: 1095400 - DNA, 15 bp, Homo sapiens
tccttctgaaaggtg

SEQ ID NO: 1095401 - DNA, 15 bp, Homo sapiens
ttccttctgaaaggt

SEQ ID NO: 1095402 - DNA, 15 bp, Homo sapiens
gttccttctgaaagg

SEQ ID NO: 1095403 - DNA, 15 bp, Homo sapiens
cgttccttctgaaag

SEQ ID NO: 1095404 - DNA, 15 bp, Homo sapiens
acgttccttctgaaa

SEQ ID NO: 1095405 - DNA, 15 bp, Homo sapiens
aacgttccttctgaa

SEQ ID NO: 1095406 - DNA, 15 bp, Homo sapiens
caacgttccttctga

SEQ ID NO: 1095407 - DNA, 15 bp, Homo sapiens
acaacgttccttctg

SEQ ID NO: 1095408 - DNA, 15 bp, Homo sapiens
gacaacgttccttct

SEQ ID NO: 1095409 - DNA, 15 bp, Homo sapiens
agacaacgttccttc

SEQ ID NO: 1095410 - DNA, 15 bp, Homo sapiens
aagacaacgttcctt

SEQ ID NO: 1095411 - DNA, 15 bp, Homo sapiens
aaagacaacgttcct

SEQ ID NO: 1095412 - DNA, 15 bp, Homo sapiens
taaagacaacgttcc

SEQ ID NO: 1095413 - DNA, 15 bp, Homo sapiens
ttaaagacaacgttc

SEQ ID NO: 1095414 - DNA, 15 bp, Homo sapiens
tttaaagacaacgtt

SEQ ID NO: 1095415 - DNA, 15 bp, Homo sapiens
atttaaagacaacgt

SEQ ID NO: 1095416 - DNA, 15 bp, Homo sapiens
gatttaaagacaacg

SEQ ID NO: 1095417 - DNA, 15 bp, Homo sapiens
ggatttaaagacaac

SEQ ID NO: 1095418 - DNA, 15 bp, Homo sapiens
tggatttaaagacaa

SEQ ID NO: 1095419 - DNA, 15 bp, Homo sapiens
ctggatttaaagaca

SEQ ID NO: 1095420 - DNA, 15 bp, Homo sapiens
gctggatttaaagac

SEQ ID NO: 1095421 - DNA, 15 bp, Homo sapiens
tgctggatttaaaga

SEQ ID NO: 1095422 - DNA, 15 bp, Homo sapiens
atgctggatttaaag

SEQ ID NO: 1095423 - DNA, 15 bp, Homo sapiens
gatgctggatttaaa

SEQ ID NO: 1095424 - DNA, 15 bp, Homo sapiens
agatgctggatttaa

SEQ ID NO: 1095425 - DNA, 15 bp, Homo sapiens
tagatgctggattta

SEQ ID NO: 1095426 - DNA, 15 bp, Homo sapiens
ttagatgctggattt

SEQ ID NO: 1095427 - DNA, 15 bp, Homo sapiens
tttagatgctggatt

SEQ ID NO: 1095428 - DNA, 15 bp, Homo sapiens
gtttagatgctggat

SEQ ID NO: 1095429 - DNA, 15 bp, Homo sapiens
cgtttagatgctgga

SEQ ID NO: 1095430 - DNA, 15 bp, Homo sapiens
acgtttagatgctgg

SEQ ID NO: 1095431 - DNA, 15 bp, Homo sapiens
cacgtttagatgctg

SEQ ID NO: 1095432 - DNA, 15 bp, Homo sapiens
tcacgtttagatgct

SEQ ID NO: 1095433 - DNA, 15 bp, Homo sapiens
ctcacgtttagatgc

SEQ ID NO: 1095434 - DNA, 15 bp, Homo sapiens
gctcacgtttagatg

SEQ ID NO: 1095435 - DNA, 15 bp, Homo sapiens
ggctcacgtttagat

SEQ ID NO: 1095436 - DNA, 15 bp, Homo sapiens
gggctcacgtttaga

SEQ ID NO: 1095437 - DNA, 15 bp, Homo sapiens
ggggctcacgtttag

SEQ ID NO: 1095438 - DNA, 15 bp, Homo sapiens
tggggctcacgttta

SEQ ID NO: 1095439 - DNA, 15 bp, Homo sapiens
ctggggctcacgttt

SEQ ID NO: 1095440 - DNA, 15 bp, Homo sapiens
gctggggctcacgtt

SEQ ID NO: 1095441 - DNA, 15 bp, Homo sapiens
ggctggggctcacgt

SEQ ID NO: 1095442 - DNA, 15 bp, Homo sapiens
tggctggggctcacg

SEQ ID NO: 1095443 - DNA, 15 bp, Homo sapiens
atggctggggctcac

SEQ ID NO: 1095444 - DNA, 15 bp, Homo sapiens
gatggctggggctca

SEQ ID NO: 1095445 - DNA, 15 bp, Homo sapiens
ggatggctggggctc

SEQ ID NO: 1095446 - DNA, 15 bp, Homo sapiens
gggatggctggggct

SEQ ID NO: 1095447 - DNA, 15 bp, Homo sapiens
agggatggctggggc

SEQ ID NO: 1095448 - DNA, 15 bp, Homo sapiens
cagggatggctgggg

SEQ ID NO: 1095449 - DNA, 15 bp, Homo sapiens
ccagggatggctggg

SEQ ID NO: 1095450 - DNA, 15 bp, Homo sapiens
gccagggatggctgg

SEQ ID NO: 1095451 - DNA, 15 bp, Homo sapiens
agccagggatggctg

SEQ ID NO: 1095452 - DNA, 15 bp, Homo sapiens
cagccagggatggct

SEQ ID NO: 1095453 - DNA, 15 bp, Homo sapiens
acagccagggatggc

SEQ ID NO: 1095454 - DNA, 15 bp, Homo sapiens
cacagccagggatgg

SEQ ID NO: 1095455 - DNA, 15 bp, Homo sapiens
tcacagccagggatg

SEQ ID NO: 1095456 - DNA, 15 bp, Homo sapiens
gatcacagccaggga

SEQ ID NO: 1095457 - DNA, 15 bp, Homo sapiens
ggatcacagccaggg

SEQ ID NO: 1095458 - DNA, 15 bp, Homo sapiens
gggatcacagccagg

SEQ ID NO: 1095459 - DNA, 15 bp, Homo sapiens
ggggatcacagccag

SEQ ID NO: 1095460 - DNA, 15 bp, Homo sapiens
gggggatcacagcca

SEQ ID NO: 1095461 - DNA, 15 bp, Homo sapiens
ggggggatcacagcc

SEQ ID NO: 1095462 - DNA, 15 bp, Homo sapiens
tggggggatcacagc

SEQ ID NO: 1095463 - DNA, 15 bp, Homo sapiens
ctggggggatcacag

SEQ ID NO: 1095464 - DNA, 15 bp, Homo sapiens
gctggggggatcaca

SEQ ID NO: 1095465 - DNA, 15 bp, Homo sapiens
ggctggggggatcac

SEQ ID NO: 1095466 - DNA, 15 bp, Homo sapiens
gggctggggggatca

SEQ ID NO: 1095467 - DNA, 15 bp, Homo sapiens
agggctggggggatc

SEQ ID NO: 1095468 - DNA, 15 bp, Homo sapiens
aagggctggggggat

SEQ ID NO: 1095469 - DNA, 15 bp, Homo sapiens
aaagggctgggggga

SEQ ID NO: 1095470 - DNA, 15 bp, Homo sapiens
gaaagggctgggggg

SEQ ID NO: 1095471 - DNA, 15 bp, Homo sapiens
ggaaagggctggggg

SEQ ID NO: 1095472 - DNA, 15 bp, Homo sapiens
tggaaagggctgggg

SEQ ID NO: 1095473 - DNA, 15 bp, Homo sapiens
gtggaaagggctggg

SEQ ID NO: 1095474 - DNA, 15 bp, Homo sapiens
ggtggaaagggctgg

SEQ ID NO: 1095475 - DNA, 15 bp, Homo sapiens
gggtggaaagggctg

SEQ ID NO: 1095476 - DNA, 15 bp, Homo sapiens
agggtggaaagggct

SEQ ID NO: 1095477 - DNA, 15 bp, Homo sapiens
tagggtggaaagggc

SEQ ID NO: 1095478 - DNA, 15 bp, Homo sapiens
atagggtggaaaggg

SEQ ID NO: 1095479 - DNA, 15 bp, Homo sapiens
gatagggtggaaagg

SEQ ID NO: 1095480 - DNA, 15 bp, Homo sapiens
ggatagggtggaaag

SEQ ID NO: 1095481 - DNA, 15 bp, Homo sapiens
aggatagggtggaaa

SEQ ID NO: 1095482 - DNA, 15 bp, Homo sapiens
gaggatagggtggaa

SEQ ID NO: 1095483 - DNA, 15 bp, Homo sapiens
agaggatagggtgga

SEQ ID NO: 1095484 - DNA, 15 bp, Homo sapiens
cagaggatagggtgg

SEQ ID NO: 1095485 - DNA, 15 bp, Homo sapiens
ccagaggatagggtg

SEQ ID NO: 1095486 - DNA, 15 bp, Homo sapiens
tccagaggatagggt

SEQ ID NO: 1095487 - DNA, 15 bp, Homo sapiens
ttccagaggataggg

SEQ ID NO: 1095488 - DNA, 15 bp, Homo sapiens
gttccagaggatagg

SEQ ID NO: 1095489 - DNA, 15 bp, Homo sapiens
agttccagaggatag

SEQ ID NO: 1095490 - DNA, 15 bp, Homo sapiens
cagttccagaggata

SEQ ID NO: 1095491 - DNA, 15 bp, Homo sapiens
gcagttccagaggat

SEQ ID NO: 1095492 - DNA, 15 bp, Homo sapiens
ggcagttccagagga

SEQ ID NO: 1095493 - DNA, 15 bp, Homo sapiens
aggcagttccagagg

SEQ ID NO: 1095494 - DNA, 15 bp, Homo sapiens
caggcagttccagag

SEQ ID NO: 1095495 - DNA, 15 bp, Homo sapiens
ccaggcagttccaga

SEQ ID NO: 1095496 - DNA, 15 bp, Homo sapiens
cccaggcagttccag

SEQ ID NO: 1095497 - DNA, 15 bp, Homo sapiens
ccccaggcagttcca

SEQ ID NO: 1095498 - DNA, 15 bp, Homo sapiens
gccccaggcagttcc

SEQ ID NO: 1095499 - DNA, 15 bp, Homo sapiens
agccccaggcagttc

SEQ ID NO: 1095500 - DNA, 15 bp, Homo sapiens
gagccccaggcagtt

SEQ ID NO: 1095501 - DNA, 15 bp, Homo sapiens
ggagccccaggcagt

SEQ ID NO: 1095502 - DNA, 15 bp, Homo sapiens
gggagccccaggcag

SEQ ID NO: 1095503 - DNA, 15 bp, Homo sapiens
ggggagccccaggca

SEQ ID NO: 1095504 - DNA, 15 bp, Homo sapiens
tggggagccccaggc

SEQ ID NO: 1095505 - DNA, 15 bp, Homo sapiens
ttggggagccccagg

SEQ ID NO: 1095506 - DNA, 15 bp, Homo sapiens
cttggggagccccag

SEQ ID NO: 1095507 - DNA, 15 bp, Homo sapiens
tcttggggagcccca

SEQ ID NO: 1095508 - DNA, 15 bp, Homo sapiens
gtcttggggagcccc

SEQ ID NO: 1095509 - DNA, 15 bp, Homo sapiens
tgtcttggggagccc

SEQ ID NO: 1095510 - DNA, 15 bp, Homo sapiens
gtgtcttggggagcc

SEQ ID NO: 1095511 - DNA, 15 bp, Homo sapiens
agtgtcttggggagc

SEQ ID NO: 1095512 - DNA, 15 bp, Homo sapiens
aagtgtcttggggag

SEQ ID NO: 1095513 - DNA, 15 bp, Homo sapiens
gaagtgtcttgggga

SEQ ID NO: 1095514 - DNA, 15 bp, Homo sapiens
ggaagtgtcttgggg

SEQ ID NO: 1095515 - DNA, 15 bp, Homo sapiens
tggaagtgtcttggg

SEQ ID NO: 1095516 - DNA, 15 bp, Homo sapiens
gtggaagtgtcttgg

SEQ ID NO: 1095517 - DNA, 15 bp, Homo sapiens
tgtggaagtgtcttg

SEQ ID NO: 1095518 - DNA, 15 bp, Homo sapiens
atgtggaagtgtctt

SEQ ID NO: 1095519 - DNA, 15 bp, Homo sapiens
catgtggaagtgtct

SEQ ID NO: 1095520 - DNA, 15 bp, Homo sapiens
tcatgtggaagtgtc

SEQ ID NO: 1095521 - DNA, 15 bp, Homo sapiens
ttcatgtggaagtgt

SEQ ID NO: 1095522 - DNA, 15 bp, Homo sapiens
attcatgtggaagtg

SEQ ID NO: 1095523 - DNA, 15 bp, Homo sapiens
aattcatgtggaagt

SEQ ID NO: 1095524 - DNA, 15 bp, Homo sapiens
gaattcatgtggaag

SEQ ID NO: 1095525 - DNA, 15 bp, Homo sapiens
ggaattcatgtggaa

SEQ ID NO: 1095526 - DNA, 15 bp, Homo sapiens
gggaattcatgtgga

SEQ ID NO: 1095527 - DNA, 15 bp, Homo sapiens
tgggaattcatgtgg

SEQ ID NO: 1095528 - DNA, 15 bp, Homo sapiens
gtgggaattcatgtg

SEQ ID NO: 1095529 - DNA, 15 bp, Homo sapiens
ggtgggaattcatgt

SEQ ID NO: 1095530 - DNA, 15 bp, Homo sapiens
tggtgggaattcatg

SEQ ID NO: 1095531 - DNA, 15 bp, Homo sapiens
ttggtgggaattcat

SEQ ID NO: 1095532 - DNA, 15 bp, Homo sapiens
cttggtgggaattca

SEQ ID NO: 1095533 - DNA, 15 bp, Homo sapiens
gcttggtgggaattc

SEQ ID NO: 1095534 - DNA, 15 bp, Homo sapiens
ggcttggtgggaatt

SEQ ID NO: 1095535 - DNA, 15 bp, Homo sapiens
tggcttggtgggaat

SEQ ID NO: 1095536 - DNA, 15 bp, Homo sapiens
ttggcttggtgggaa

SEQ ID NO: 1095537 - DNA, 15 bp, Homo sapiens
cttggcttggtggga

SEQ ID NO: 1095538 - DNA, 15 bp, Homo sapiens
gcttggcttggtggg

SEQ ID NO: 1095539 - DNA, 15 bp, Homo sapiens
agcttggcttggtgg

SEQ ID NO: 1095540 - DNA, 15 bp, Homo sapiens
cagcttggcttggtg

SEQ ID NO: 1095541 - DNA, 15 bp, Homo sapiens
gcagcttggcttggt

SEQ ID NO: 1095542 - DNA, 15 bp, Homo sapiens
tgcagcttggcttgg

SEQ ID NO: 1095543 - DNA, 15 bp, Homo sapiens
ctgcagcttggcttg

SEQ ID NO: 1095544 - DNA, 15 bp, Homo sapiens
gctgcagcttggctt

SEQ ID NO: 1095545 - DNA, 15 bp, Homo sapiens
agctgcagcttggct

SEQ ID NO: 1095546 - DNA, 15 bp, Homo sapiens
cagctgcagcttggc

SEQ ID NO: 1095547 - DNA, 15 bp, Homo sapiens
gcagctgcagcttgg

SEQ ID NO: 1095548 - DNA, 15 bp, Homo sapiens
agcagctgcagcttg

SEQ ID NO: 1095549 - DNA, 15 bp, Homo sapiens
cagcagctgcagctt

SEQ ID NO: 1095550 - DNA, 15 bp, Homo sapiens
ccagcagctgcagct

SEQ ID NO: 1095551 - DNA, 15 bp, Homo sapiens
cccagcagctgcagc

SEQ ID NO: 1095552 - DNA, 15 bp, Homo sapiens
gcccagcagctgcag

SEQ ID NO: 1095553 - DNA, 15 bp, Homo sapiens
ggcccagcagctgca

SEQ ID NO: 1095554 - DNA, 15 bp, Homo sapiens
gggcccagcagctgc

SEQ ID NO: 1095555 - DNA, 15 bp, Homo sapiens
tgggcccagcagctg

SEQ ID NO: 1095556 - DNA, 15 bp, Homo sapiens
ctgggcccagcagct

SEQ ID NO: 1095557 - DNA, 15 bp, Homo sapiens
cctgggcccagcagc

SEQ ID NO: 1095558 - DNA, 15 bp, Homo sapiens
gcctgggcccagcag

SEQ ID NO: 1095559 - DNA, 15 bp, Homo sapiens
tgcctgggcccagca

SEQ ID NO: 1095560 - DNA, 15 bp, Homo sapiens
atgcctgggcccagc

SEQ ID NO: 1095561 - DNA, 15 bp, Homo sapiens
tatgcctgggcccag

SEQ ID NO: 1095562 - DNA, 15 bp, Homo sapiens
ttatgcctgggccca

SEQ ID NO: 1095563 - DNA, 15 bp, Homo sapiens
gttatgcctgggccc

SEQ ID NO: 1095564 - DNA, 15 bp, Homo sapiens
ggttatgcctgggcc

SEQ ID NO: 1095565 - DNA, 15 bp, Homo sapiens
gggttatgcctgggc

SEQ ID NO: 1095566 - DNA, 15 bp, Homo sapiens
ggggttatgcctggg

SEQ ID NO: 1095567 - DNA, 15 bp, Homo sapiens
aggggttatgcctgg

SEQ ID NO: 1095568 - DNA, 15 bp, Homo sapiens
gaggggttatgcctg

SEQ ID NO: 1095569 - DNA, 15 bp, Homo sapiens
ggaggggttatgcct

SEQ ID NO: 1095570 - DNA, 15 bp, Homo sapiens
aggaggggttatgcc

SEQ ID NO: 1095571 - DNA, 15 bp, Homo sapiens
caggaggggttatgc

SEQ ID NO: 1095572 - DNA, 15 bp, Homo sapiens
ccaggaggggttatg

SEQ ID NO: 1095573 - DNA, 15 bp, Homo sapiens
cccaggaggggttat

SEQ ID NO: 1095574 - DNA, 15 bp, Homo sapiens
ccccaggaggggtta

SEQ ID NO: 1095575 - DNA, 15 bp, Homo sapiens
gccccaggaggggtt

SEQ ID NO: 1095576 - DNA, 15 bp, Homo sapiens
tgccccaggaggggt

SEQ ID NO: 1095577 - DNA, 15 bp, Homo sapiens
ctgccccaggagggg

SEQ ID NO: 1095578 - DNA, 15 bp, Homo sapiens
tctgccccaggaggg

SEQ ID NO: 1095579 - DNA, 15 bp, Homo sapiens
ctctgccccaggagg

SEQ ID NO: 1095580 - DNA, 15 bp, Homo sapiens
cctctgccccaggag

SEQ ID NO: 1095581 - DNA, 15 bp, Homo sapiens
acctctgccccagga

SEQ ID NO: 1095582 - DNA, 15 bp, Homo sapiens
cacctctgccccagg

SEQ ID NO: 1095583 - DNA, 15 bp, Homo sapiens
ccacctctgccccag

SEQ ID NO: 1095584 - DNA, 15 bp, Homo sapiens
gccacctctgcccca

SEQ ID NO: 1095585 - DNA, 15 bp, Homo sapiens
tgccacctctgcccc

SEQ ID NO: 1095586 - DNA, 15 bp, Homo sapiens
ttgccacctctgccc

SEQ ID NO: 1095587 - DNA, 15 bp, Homo sapiens
cttgccacctctgcc

SEQ ID NO: 1095588 - DNA, 15 bp, Homo sapiens
ccttgccacctctgc

SEQ ID NO: 1095589 - DNA, 15 bp, Homo sapiens
tccttgccacctctg

SEQ ID NO: 1095590 - DNA, 15 bp, Homo sapiens
ctccttgccacctct

SEQ ID NO: 1095591 - DNA, 15 bp, Homo sapiens
actccttgccacctc

SEQ ID NO: 1095592 - DNA, 15 bp, Homo sapiens
cactccttgccacct

SEQ ID NO: 1095593 - DNA, 15 bp, Homo sapiens
tcactccttgccacc

SEQ ID NO: 1095594 - DNA, 15 bp, Homo sapiens
gtcactccttgccac

SEQ ID NO: 1095595 - DNA, 15 bp, Homo sapiens
ggtcactccttgcca

SEQ ID NO: 1095596 - DNA, 15 bp, Homo sapiens
gggtcactccttgcc

SEQ ID NO: 1095597 - DNA, 15 bp, Homo sapiens
tgggtcactccttgc

SEQ ID NO: 1095598 - DNA, 15 bp, Homo sapiens
gtgggtcactccttg

SEQ ID NO: 1095599 - DNA, 15 bp, Homo sapiens
ggtgggtcactcctt

SEQ ID NO: 1095600 - DNA, 15 bp, Homo sapiens
tggtgggtcactcct

SEQ ID NO: 1095601 - DNA, 15 bp, Homo sapiens
gtggtgggtcactcc

SEQ ID NO: 1095602 - DNA, 15 bp, Homo sapiens
agtggtgggtcactc

SEQ ID NO: 1095603 - DNA, 15 bp, Homo sapiens
gagtggtgggtcact

SEQ ID NO: 1095604 - DNA, 15 bp, Homo sapiens
tgagtggtgggtcac

SEQ ID NO: 1095605 - DNA, 15 bp, Homo sapiens
gtgagtggtgggtca

SEQ ID NO: 1095606 - DNA, 15 bp, Homo sapiens
tgtgagtggtgggtc

SEQ ID NO: 1095607 - DNA, 15 bp, Homo sapiens
atgtgagtggtgggt

SEQ ID NO: 1095608 - DNA, 15 bp, Homo sapiens
gatgtgagtggtggg

SEQ ID NO: 1095609 - DNA, 15 bp, Homo sapiens
agatgtgagtggtgg

SEQ ID NO: 1095610 - DNA, 15 bp, Homo sapiens
cagatgtgagtggtg

SEQ ID NO: 1095611 - DNA, 15 bp, Homo sapiens
gcagatgtgagtggt

SEQ ID NO: 1095612 - DNA, 15 bp, Homo sapiens
ggcagatgtgagtgg

SEQ ID NO: 1095613 - DNA, 15 bp, Homo sapiens
gggcagatgtgagtg

SEQ ID NO: 1095614 - DNA, 15 bp, Homo sapiens
ggggcagatgtgagt

SEQ ID NO: 1095615 - DNA, 15 bp, Homo sapiens
tggggcagatgtgag

SEQ ID NO: 1095616 - DNA, 15 bp, Homo sapiens
gtggggcagatgtga

SEQ ID NO: 1095617 - DNA, 15 bp, Homo sapiens
tgtggggcagatgtg

SEQ ID NO: 1095618 - DNA, 15 bp, Homo sapiens
atgtggggcagatgt

SEQ ID NO: 1095619 - DNA, 15 bp, Homo sapiens
gatgtggggcagatg

SEQ ID NO: 1095620 - DNA, 15 bp, Homo sapiens
ggatgtggggcagat

SEQ ID NO: 1095621 - DNA, 15 bp, Homo sapiens
tggatgtggggcaga

SEQ ID NO: 1095622 - DNA, 15 bp, Homo sapiens
gtggatgtggggcag

SEQ ID NO: 1095623 - DNA, 15 bp, Homo sapiens
agtggatgtggggca

SEQ ID NO: 1095624 - DNA, 15 bp, Homo sapiens
gagtggatgtggggc

SEQ ID NO: 1095625 - DNA, 15 bp, Homo sapiens
agagtggatgtgggg

SEQ ID NO: 1095626 - DNA, 15 bp, Homo sapiens
aagagtggatgtggg

SEQ ID NO: 1095627 - DNA, 15 bp, Homo sapiens
caagagtggatgtgg

SEQ ID NO: 1095628 - DNA, 15 bp, Homo sapiens
tcaagagtggatgtg

SEQ ID NO: 1095629 - DNA, 15 bp, Homo sapiens
gtcaagagtggatgt

SEQ ID NO: 1095630 - DNA, 15 bp, Homo sapiens
agtcaagagtggatg

SEQ ID NO: 1095631 - DNA, 15 bp, Homo sapiens
gagtcaagagtggat

SEQ ID NO: 1095632 - DNA, 15 bp, Homo sapiens
agagtcaagagtgga

SEQ ID NO: 1095633 - DNA, 15 bp, Homo sapiens
cagagtcaagagtgg

SEQ ID NO: 1095634 - DNA, 15 bp, Homo sapiens
gcagagtcaagagtg

SEQ ID NO: 1095635 - DNA, 15 bp, Homo sapiens
agcagagtcaagagt

SEQ ID NO: 1095636 - DNA, 15 bp, Homo sapiens
gagcagagtcaagag

SEQ ID NO: 1095637 - DNA, 15 bp, Homo sapiens
tgagcagagtcaaga

SEQ ID NO: 1095638 - DNA, 15 bp, Homo sapiens
ctgagcagagtcaag

SEQ ID NO: 1095639 - DNA, 15 bp, Homo sapiens
actgagcagagtcaa

SEQ ID NO: 1095640 - DNA, 15 bp, Homo sapiens
cactgagcagagtca

SEQ ID NO: 1095641 - DNA, 15 bp, Homo sapiens
acactgagcagagtc

SEQ ID NO: 1095642 - DNA, 15 bp, Homo sapiens
aacactgagcagagt

SEQ ID NO: 1095643 - DNA, 15 bp, Homo sapiens
aaacactgagcagag

SEQ ID NO: 1095644 - DNA, 15 bp, Homo sapiens
taaacactgagcaga

SEQ ID NO: 1095645 - DNA, 15 bp, Homo sapiens
ttaaacactgagcag

SEQ ID NO: 1095646 - DNA, 15 bp, Homo sapiens
tttaaacactgagca

SEQ ID NO: 1095647 - DNA, 15 bp, Homo sapiens
ttttaaacactgagc

SEQ ID NO: 1095648 - DNA, 15 bp, Homo sapiens
tttttaaacactgag

SEQ ID NO: 1095649 - DNA, 15 bp, Homo sapiens
gtttttaaacactga

SEQ ID NO: 1095650 - DNA, 15 bp, Homo sapiens
tgtttttaaacactg

SEQ ID NO: 1095651 - DNA, 15 bp, Homo sapiens
atgtttttaaacact

SEQ ID NO: 1095652 - DNA, 15 bp, Homo sapiens
catgtttttaaacac

SEQ ID NO: 1095653 - DNA, 15 bp, Homo sapiens
acatgtttttaaaca

SEQ ID NO: 1095654 - DNA, 15 bp, Homo sapiens
aacatgtttttaaac

SEQ ID NO: 1095655 - DNA, 15 bp, Homo sapiens
aaacatgtttttaaa

SEQ ID NO: 1095656 - DNA, 15 bp, Homo sapiens
taaacatgtttttaa

SEQ ID NO: 1095657 - DNA, 15 bp, Homo sapiens
ataaacatgttttta

SEQ ID NO: 1095658 - DNA, 15 bp, Homo sapiens
tataaacatgttttt

SEQ ID NO: 1095659 - DNA, 15 bp, Homo sapiens
ttataaacatgtttt

SEQ ID NO: 1095660 - DNA, 15 bp, Homo sapiens
tgttataaacatgtt

SEQ ID NO: 1095661 - DNA, 15 bp, Homo sapiens
ttgttataaacatgt

SEQ ID NO: 1095662 - DNA, 15 bp, Homo sapiens
attgttataaacatg

SEQ ID NO: 1095663 - DNA, 15 bp, Homo sapiens
aattgttataaacat

SEQ ID NO: 1095664 - DNA, 15 bp, Homo sapiens
taattgttataaaca

SEQ ID NO: 1095665 - DNA, 15 bp, Homo sapiens
gtaattgttataaac

SEQ ID NO: 1095666 - DNA, 15 bp, Homo sapiens
ggtaattgttataaa

SEQ ID NO: 1095667 - DNA, 15 bp, Homo sapiens
tggtaattgttataa

SEQ ID NO: 1095668 - DNA, 15 bp, Homo sapiens
ttggtaattgttata

SEQ ID NO: 1095669 - DNA, 15 bp, Homo sapiens
cttggtaattgttat

SEQ ID NO: 1095670 - DNA, 15 bp, Homo sapiens
tcttggtaattgtta

SEQ ID NO: 1095671 - DNA, 15 bp, Homo sapiens
atcttggtaattgtt

SEQ ID NO: 1095672 - DNA, 15 bp, Homo sapiens
gatcttggtaattgt

SEQ ID NO: 1095673 - DNA, 15 bp, Homo sapiens
agatcttggtaattg

SEQ ID NO: 1095674 - DNA, 15 bp, Homo sapiens
cagatcttggtaatt

SEQ ID NO: 1095675 - DNA, 15 bp, Homo sapiens
tcagatcttggtaat

SEQ ID NO: 1095676 - DNA, 15 bp, Homo sapiens
ttcagatcttggtaa

SEQ ID NO: 1095677 - DNA, 15 bp, Homo sapiens
tttcagatcttggta

SEQ ID NO: 1095678 - DNA, 15 bp, Homo sapiens
ttttcagatcttggt

SEQ ID NO: 1095679 - DNA, 15 bp, Homo sapiens
attttcagatcttgg

SEQ ID NO: 1095680 - DNA, 15 bp, Homo sapiens
aattttcagatcttg

SEQ ID NO: 1095681 - DNA, 15 bp, Homo sapiens
taattttcagatctt

SEQ ID NO: 1095682 - DNA, 15 bp, Homo sapiens
ctaattttcagatct

SEQ ID NO: 1095683 - DNA, 15 bp, Homo sapiens
cctaattttcagatc

SEQ ID NO: 1095684 - DNA, 15 bp, Homo sapiens
tcctaattttcagat

SEQ ID NO: 1095685 - DNA, 15 bp, Homo sapiens
ctcctaattttcaga

SEQ ID NO: 1095686 - DNA, 15 bp, Homo sapiens
tctcctaattttcag

SEQ ID NO: 1095687 - DNA, 15 bp, Homo sapiens
ttctcctaattttca

SEQ ID NO: 1095688 - DNA, 15 bp, Homo sapiens
attctcctaattttc

SEQ ID NO: 1095689 - DNA, 15 bp, Homo sapiens
aattctcctaatttt

SEQ ID NO: 1095690 - DNA, 15 bp, Homo sapiens
gaattctcctaattt

SEQ ID NO: 1095691 - DNA, 15 bp, Homo sapiens
tgaattctcctaatt

SEQ ID NO: 1095692 - DNA, 15 bp, Homo sapiens
gtgaattctcctaat

SEQ ID NO: 1095693 - DNA, 15 bp, Homo sapiens
tgtgaattctcctaa

SEQ ID NO: 1095694 - DNA, 15 bp, Homo sapiens
atgtgaattctccta

SEQ ID NO: 1095695 - DNA, 15 bp, Homo sapiens
gatgtgaattctcct

SEQ ID NO: 1095696 - DNA, 15 bp, Homo sapiens
tgatgtgaattctcc

SEQ ID NO: 1095697 - DNA, 15 bp, Homo sapiens
ttgatgtgaattctc

SEQ ID NO: 1095698 - DNA, 15 bp, Homo sapiens
tttgatgtgaattct

SEQ ID NO: 1095699 - DNA, 15 bp, Homo sapiens
ctttgatgtgaattc

SEQ ID NO: 1095700 - DNA, 15 bp, Homo sapiens
actttgatgtgaatt

SEQ ID NO: 1095701 - DNA, 15 bp, Homo sapiens
gactttgatgtgaat

SEQ ID NO: 1095702 - DNA, 15 bp, Homo sapiens
agactttgatgtgaa

SEQ ID NO: 1095703 - DNA, 15 bp, Homo sapiens
cagactttgatgtga

SEQ ID NO: 1095704 - DNA, 15 bp, Homo sapiens
ccagactttgatgtg

SEQ ID NO: 1095705 - DNA, 15 bp, Homo sapiens
tccagactttgatgt

SEQ ID NO: 1095706 - DNA, 15 bp, Homo sapiens
atccagactttgatg

SEQ ID NO: 1095707 - DNA, 15 bp, Homo sapiens
aatccagactttgat

SEQ ID NO: 1095708 - DNA, 15 bp, Homo sapiens
aaatccagactttga

SEQ ID NO: 1095709 - DNA, 15 bp, Homo sapiens
gaaatccagactttg

SEQ ID NO: 1095710 - DNA, 15 bp, Homo sapiens
agaaatccagacttt

SEQ ID NO: 1095711 - DNA, 15 bp, Homo sapiens
cagaaatccagactt

SEQ ID NO: 1095712 - DNA, 15 bp, Homo sapiens
acagaaatccagact

SEQ ID NO: 1095713 - DNA, 15 bp, Homo sapiens
aacagaaatccagac

SEQ ID NO: 1095714 - DNA, 15 bp, Homo sapiens
aaacagaaatccaga

SEQ ID NO: 1095715 - DNA, 15 bp, Homo sapiens
caaacagaaatccag

SEQ ID NO: 1095716 - DNA, 15 bp, Homo sapiens
acaaacagaaatcca

SEQ ID NO: 1095717 - DNA, 15 bp, Homo sapiens
aacaaacagaaatcc

SEQ ID NO: 1095718 - DNA, 15 bp, Homo sapiens
gaacaaacagaaatc

SEQ ID NO: 1095719 - DNA, 15 bp, Homo sapiens
tgaacaaacagaaat

SEQ ID NO: 1095720 - DNA, 15 bp, Homo sapiens
atgaacaaacagaaa

SEQ ID NO: 1095721 - DNA, 15 bp, Homo sapiens
tatgaacaaacagaa

SEQ ID NO: 1095722 - DNA, 15 bp, Homo sapiens
ttatgaacaaacaga

SEQ ID NO: 1095723 - DNA, 15 bp, Homo sapiens
tttatgaacaaacag

SEQ ID NO: 1095724 - DNA, 15 bp, Homo sapiens
ttttatgaacaaaca

SEQ ID NO: 1095725 - DNA, 15 bp, Homo sapiens
tttttatgaacaaac

SEQ ID NO: 1095726 - DNA, 15 bp, Homo sapiens
ttttttatgaacaaa

SEQ ID NO: 1095727 - DNA, 15 bp, Homo sapiens
gttttttatgaacaa

SEQ ID NO: 1095728 - DNA, 15 bp, Homo sapiens
agttttttatgaaca

SEQ ID NO: 1095729 - DNA, 15 bp, Homo sapiens
tagttttttatgaac

SEQ ID NO: 1095730 - DNA, 15 bp, Homo sapiens
ctagttttttatgaa

SEQ ID NO: 1095731 - DNA, 15 bp, Homo sapiens
tctagttttttatga

SEQ ID NO: 1095732 - DNA, 15 bp, Homo sapiens
ttctagttttttatg

SEQ ID NO: 1095733 - DNA, 15 bp, Homo sapiens
cttctagttttttat

SEQ ID NO: 1095734 - DNA, 15 bp, Homo sapiens
ccttctagtttttta

SEQ ID NO: 1095735 - DNA, 15 bp, Homo sapiens
gccttctagtttttt

SEQ ID NO: 1095736 - DNA, 15 bp, Homo sapiens
tgccttctagttttt

SEQ ID NO: 1095737 - DNA, 15 bp, Homo sapiens
ctgccttctagtttt

SEQ ID NO: 1095738 - DNA, 15 bp, Homo sapiens
gctgccttctagttt

SEQ ID NO: 1095739 - DNA, 15 bp, Homo sapiens
ggctgccttctagtt

SEQ ID NO: 1095740 - DNA, 15 bp, Homo sapiens
tggctgccttctagt

SEQ ID NO: 1095741 - DNA, 15 bp, Homo sapiens
ctggctgccttctag

SEQ ID NO: 1095742 - DNA, 15 bp, Homo sapiens
cctggctgccttcta

SEQ ID NO: 1095743 - DNA, 15 bp, Homo sapiens
gcctggctgccttct

SEQ ID NO: 1095744 - DNA, 15 bp, Homo sapiens
tgcctggctgccttc

SEQ ID NO: 1095745 - DNA, 15 bp, Homo sapiens
ttgcctggctgcctt

SEQ ID NO: 1095746 - DNA, 15 bp, Homo sapiens
cttgcctggctgcct

SEQ ID NO: 1095747 - DNA, 15 bp, Homo sapiens
ccttgcctggctgcc

SEQ ID NO: 1095748 - DNA, 15 bp, Homo sapiens
accttgcctggctgc

SEQ ID NO: 1095749 - DNA, 15 bp, Homo sapiens
caccttgcctggctg

SEQ ID NO: 1095750 - DNA, 15 bp, Homo sapiens
ccaccttgcctggct

SEQ ID NO: 1095751 - DNA, 15 bp, Homo sapiens
gccaccttgcctggc

SEQ ID NO: 1095752 - DNA, 15 bp, Homo sapiens
agccaccttgcctgg

SEQ ID NO: 1095753 - DNA, 15 bp, Homo sapiens
gagccaccttgcctg

SEQ ID NO: 1095754 - DNA, 15 bp, Homo sapiens
tgagccaccttgcct

SEQ ID NO: 1095755 - DNA, 15 bp, Homo sapiens
gtgagccaccttgcc

SEQ ID NO: 1095756 - DNA, 15 bp, Homo sapiens
cgtgagccaccttgc

SEQ ID NO: 1095757 - DNA, 15 bp, Homo sapiens
gcgtgagccaccttg

SEQ ID NO: 1095758 - DNA, 15 bp, Homo sapiens
ggcgtgagccacctt

SEQ ID NO: 1095759 - DNA, 15 bp, Homo sapiens
tggcgtgagccacct

SEQ ID NO: 1095760 - DNA, 15 bp, Homo sapiens
ctggcgtgagccacc

SEQ ID NO: 1095761 - DNA, 15 bp, Homo sapiens
actggcgtgagccac

SEQ ID NO: 1095762 - DNA, 15 bp, Homo sapiens
tactggcgtgagcca

SEQ ID NO: 1095763 - DNA, 15 bp, Homo sapiens
ttactggcgtgagcc

SEQ ID NO: 1095764 - DNA, 15 bp, Homo sapiens
attactggcgtgagc

SEQ ID NO: 1095765 - DNA, 15 bp, Homo sapiens
gattactggcgtgag

SEQ ID NO: 1095766 - DNA, 15 bp, Homo sapiens
ggattactggcgtga

SEQ ID NO: 1095767 - DNA, 15 bp, Homo sapiens
gggattactggcgtg

SEQ ID NO: 1095768 - DNA, 15 bp, Homo sapiens
tgggattactggcgt

SEQ ID NO: 1095769 - DNA, 15 bp, Homo sapiens
ttgggattactggcg

SEQ ID NO: 1095770 - DNA, 15 bp, Homo sapiens
gttgggattactggc

SEQ ID NO: 1095771 - DNA, 15 bp, Homo sapiens
tgttgggattactgg

SEQ ID NO: 1095772 - DNA, 15 bp, Homo sapiens
gtgttgggattactg

SEQ ID NO: 1095773 - DNA, 15 bp, Homo sapiens
agtgttgggattact

SEQ ID NO: 1095774 - DNA, 15 bp, Homo sapiens
gcctgccttagcctc

SEQ ID NO: 1095775 - DNA, 15 bp, Homo sapiens
cgcctgccttagcct

SEQ ID NO: 1095776 - DNA, 15 bp, Homo sapiens
ccgcctgccttagcc

SEQ ID NO: 1095777 - DNA, 15 bp, Homo sapiens
cccgcctgccttagc

SEQ ID NO: 1095778 - DNA, 15 bp, Homo sapiens
acccgcctgccttag

SEQ ID NO: 1095779 - DNA, 15 bp, Homo sapiens
gacccgcctgcctta

SEQ ID NO: 1095780 - DNA, 15 bp, Homo sapiens
tgacccgcctgcctt

SEQ ID NO: 1095781 - DNA, 15 bp, Homo sapiens
gtgacccgcctgcct

SEQ ID NO: 1095782 - DNA, 15 bp, Homo sapiens
agtgacccgcctgcc

SEQ ID NO: 1095783 - DNA, 15 bp, Homo sapiens
aagtgacccgcctgc

SEQ ID NO: 1095784 - DNA, 15 bp, Homo sapiens
caagtgacccgcctg

SEQ ID NO: 1095785 - DNA, 15 bp, Homo sapiens
tcaagtgacccgcct

SEQ ID NO: 1095786 - DNA, 15 bp, Homo sapiens
ctcaagtgacccgcc

SEQ ID NO: 1095787 - DNA, 15 bp, Homo sapiens
cctcaagtgacccgc

SEQ ID NO: 1095788 - DNA, 15 bp, Homo sapiens
acctcaagtgacccg

SEQ ID NO: 1095789 - DNA, 15 bp, Homo sapiens
gacctcaagtgaccc

SEQ ID NO: 1095790 - DNA, 15 bp, Homo sapiens
tgacctcaagtgacc

SEQ ID NO: 1095791 - DNA, 15 bp, Homo sapiens
ctgacctcaagtgac

SEQ ID NO: 1095792 - DNA, 15 bp, Homo sapiens
atcctgacctcaagt

SEQ ID NO: 1095793 - DNA, 15 bp, Homo sapiens
aatcctgacctcaag

SEQ ID NO: 1095794 - DNA, 15 bp, Homo sapiens
aaatcctgacctcaa

SEQ ID NO: 1095795 - DNA, 15 bp, Homo sapiens
caaatcctgacctca

SEQ ID NO: 1095796 - DNA, 15 bp, Homo sapiens
tcaaatcctgacctc

SEQ ID NO: 1095797 - DNA, 15 bp, Homo sapiens
ttcaaatcctgacct

SEQ ID NO: 1095798 - DNA, 15 bp, Homo sapiens
cttcaaatcctgacc

SEQ ID NO: 1095799 - DNA, 15 bp, Homo sapiens
tcttcaaatcctgac

SEQ ID NO: 1095800 - DNA, 15 bp, Homo sapiens
gtcttcaaatcctga

SEQ ID NO: 1095801 - DNA, 15 bp, Homo sapiens
agtcttcaaatcctg

SEQ ID NO: 1095802 - DNA, 15 bp, Homo sapiens
tagtcttcaaatcct

SEQ ID NO: 1095803 - DNA, 15 bp, Homo sapiens
ctagtcttcaaatcc

SEQ ID NO: 1095804 - DNA, 15 bp, Homo sapiens
gctagtcttcaaatc

SEQ ID NO: 1095805 - DNA, 15 bp, Homo sapiens
agctagtcttcaaat

SEQ ID NO: 1095806 - DNA, 15 bp, Homo sapiens
cagctagtcttcaaa

SEQ ID NO: 1095807 - DNA, 15 bp, Homo sapiens
ccagctagtcttcaa

SEQ ID NO: 1095808 - DNA, 15 bp, Homo sapiens
gccagctagtcttca

SEQ ID NO: 1095809 - DNA, 15 bp, Homo sapiens
ggccagctagtcttc

SEQ ID NO: 1095810 - DNA, 15 bp, Homo sapiens
tggccagctagtctt

SEQ ID NO: 1095811 - DNA, 15 bp, Homo sapiens
ttggccagctagtct

SEQ ID NO: 1095812 - DNA, 15 bp, Homo sapiens
gttggccagctagtc

SEQ ID NO: 1095813 - DNA, 15 bp, Homo sapiens
tgttggccagctagt

SEQ ID NO: 1095814 - DNA, 15 bp, Homo sapiens
ttgttggccagctag

SEQ ID NO: 1095815 - DNA, 15 bp, Homo sapiens
cttgttggccagcta

SEQ ID NO: 1095816 - DNA, 15 bp, Homo sapiens
ccttgttggccagct

SEQ ID NO: 1095817 - DNA, 15 bp, Homo sapiens
accttgttggccagc

SEQ ID NO: 1095818 - DNA, 15 bp, Homo sapiens
caccttgttggccag

SEQ ID NO: 1095819 - DNA, 15 bp, Homo sapiens
acaccttgttggcca

SEQ ID NO: 1095820 - DNA, 15 bp, Homo sapiens
tacaccttgttggcc

SEQ ID NO: 1095821 - DNA, 15 bp, Homo sapiens
ttacaccttgttggc

SEQ ID NO: 1095822 - DNA, 15 bp, Homo sapiens
gttacaccttgttgg

SEQ ID NO: 1095823 - DNA, 15 bp, Homo sapiens
ggttacaccttgttg

SEQ ID NO: 1095824 - DNA, 15 bp, Homo sapiens
aggttacaccttgtt

SEQ ID NO: 1095825 - DNA, 15 bp, Homo sapiens
gaggttacaccttgt

SEQ ID NO: 1095826 - DNA, 15 bp, Homo sapiens
cgaggttacaccttg

SEQ ID NO: 1095827 - DNA, 15 bp, Homo sapiens
acgaggttacacctt

SEQ ID NO: 1095828 - DNA, 15 bp, Homo sapiens
gacgaggttacacct

SEQ ID NO: 1095829 - DNA, 15 bp, Homo sapiens
agacgaggttacacc

SEQ ID NO: 1095830 - DNA, 15 bp, Homo sapiens
gagacgaggttacac

SEQ ID NO: 1095831 - DNA, 15 bp, Homo sapiens
agagacgaggttaca

SEQ ID NO: 1095832 - DNA, 15 bp, Homo sapiens
tagagacgaggttac

SEQ ID NO: 1095833 - DNA, 15 bp, Homo sapiens
gtagagacgaggtta

SEQ ID NO: 1095834 - DNA, 15 bp, Homo sapiens
tgcgccatcacaccc

SEQ ID NO: 1095835 - DNA, 15 bp, Homo sapiens
atgcgccatcacacc

SEQ ID NO: 1095836 - DNA, 15 bp, Homo sapiens
catgcgccatcacac

SEQ ID NO: 1095837 - DNA, 15 bp, Homo sapiens
gcatgcgccatcaca

SEQ ID NO: 1095838 - DNA, 15 bp, Homo sapiens
ggcatgcgccatcac

SEQ ID NO: 1095839 - DNA, 15 bp, Homo sapiens
aggcatgcgccatca

SEQ ID NO: 1095840 - DNA, 15 bp, Homo sapiens
caggcatgcgccatc

SEQ ID NO: 1095841 - DNA, 15 bp, Homo sapiens
acaggcatgcgccat

SEQ ID NO: 1095842 - DNA, 15 bp, Homo sapiens
acctgggattacagg

SEQ ID NO: 1095843 - DNA, 15 bp, Homo sapiens
tacctgggattacag

SEQ ID NO: 1095844 - DNA, 15 bp, Homo sapiens
gtacctgggattaca

SEQ ID NO: 1095845 - DNA, 15 bp, Homo sapiens
agtacctgggattac

SEQ ID NO: 1095846 - DNA, 15 bp, Homo sapiens
gagtacctgggatta

SEQ ID NO: 1095847 - DNA, 15 bp, Homo sapiens
tgagtacctgggatt

SEQ ID NO: 1095848 - DNA, 15 bp, Homo sapiens
ctgagtacctgggat

SEQ ID NO: 1095849 - DNA, 15 bp, Homo sapiens
cctgagtacctggga

SEQ ID NO: 1095850 - DNA, 15 bp, Homo sapiens
tcctgagtacctggg

SEQ ID NO: 1095851 - DNA, 15 bp, Homo sapiens
ctcctgagtacctgg

SEQ ID NO: 1095852 - DNA, 15 bp, Homo sapiens
tctcctgagtacctg

SEQ ID NO: 1095853 - DNA, 15 bp, Homo sapiens
gtctcctgagtacct

SEQ ID NO: 1095854 - DNA, 15 bp, Homo sapiens
agtctcctgagtacc

SEQ ID NO: 1095855 - DNA, 15 bp, Homo sapiens
cagtctcctgagtac

SEQ ID NO: 1095856 - DNA, 15 bp, Homo sapiens
taagcaattctcctg

SEQ ID NO: 1095857 - DNA, 15 bp, Homo sapiens
ttaagcaattctcct

SEQ ID NO: 1095858 - DNA, 15 bp, Homo sapiens
tttaagcaattctcc

SEQ ID NO: 1095859 - DNA, 15 bp, Homo sapiens
gtttaagcaattctc

SEQ ID NO: 1095860 - DNA, 15 bp, Homo sapiens
ggtttaagcaattct

SEQ ID NO: 1095861 - DNA, 15 bp, Homo sapiens
gggtttaagcaattc

SEQ ID NO: 1095862 - DNA, 15 bp, Homo sapiens
agggtttaagcaatt

SEQ ID NO: 1095863 - DNA, 15 bp, Homo sapiens
cagggtttaagcaat

SEQ ID NO: 1095864 - DNA, 15 bp, Homo sapiens
ccagggtttaagcaa

SEQ ID NO: 1095865 - DNA, 15 bp, Homo sapiens
tccagggtttaagca

SEQ ID NO: 1095866 - DNA, 15 bp, Homo sapiens
ctccagggtttaagc

SEQ ID NO: 1095867 - DNA, 15 bp, Homo sapiens
cctccagggtttaag

SEQ ID NO: 1095868 - DNA, 15 bp, Homo sapiens
gcctccagggtttaa

SEQ ID NO: 1095869 - DNA, 15 bp, Homo sapiens
tgcctccagggttta

SEQ ID NO: 1095870 - DNA, 15 bp, Homo sapiens
ctgcctccagggttt

SEQ ID NO: 1095871 - DNA, 15 bp, Homo sapiens
catcacccaggctgg

SEQ ID NO: 1095872 - DNA, 15 bp, Homo sapiens
ccatcacccaggctg

SEQ ID NO: 1095873 - DNA, 15 bp, Homo sapiens
tccatcacccaggct

SEQ ID NO: 1095874 - DNA, 15 bp, Homo sapiens
ctccatcacccaggc

SEQ ID NO: 1095875 - DNA, 15 bp, Homo sapiens
actccatcacccagg

SEQ ID NO: 1095876 - DNA, 15 bp, Homo sapiens
cactccatcacccag

SEQ ID NO: 1095877 - DNA, 15 bp, Homo sapiens
actcactccatcacc

SEQ ID NO: 1095878 - DNA, 15 bp, Homo sapiens
cactcactccatcac

SEQ ID NO: 1095879 - DNA, 15 bp, Homo sapiens
tcactcactccatca

SEQ ID NO: 1095880 - DNA, 15 bp, Homo sapiens
ctcactcactccatc

SEQ ID NO: 1095881 - DNA, 15 bp, Homo sapiens
tctcactcactccat

SEQ ID NO: 1095882 - DNA, 15 bp, Homo sapiens
gtctcactcactcca

SEQ ID NO: 1095883 - DNA, 15 bp, Homo sapiens
agtctcactcactcc

SEQ ID NO: 1095884 - DNA, 15 bp, Homo sapiens
gagtctcactcactc

SEQ ID NO: 1095885 - DNA, 15 bp, Homo sapiens
agagtctcactcact

SEQ ID NO: 1095886 - DNA, 15 bp, Homo sapiens
cagagtctcactcac

SEQ ID NO: 1095887 - DNA, 15 bp, Homo sapiens
acagagtctcactca

SEQ ID NO: 1095888 - DNA, 15 bp, Homo sapiens
ttggagacagagtct

SEQ ID NO: 1095889 - DNA, 15 bp, Homo sapiens
tttggagacagagtc

SEQ ID NO: 1095890 - DNA, 15 bp, Homo sapiens
atttggagacagagt

SEQ ID NO: 1095891 - DNA, 15 bp, Homo sapiens
tatttggagacagag

SEQ ID NO: 1095892 - DNA, 15 bp, Homo sapiens
ttatttggagacaga

SEQ ID NO: 1095893 - DNA, 15 bp, Homo sapiens
tttatttggagacag

SEQ ID NO: 1095894 - DNA, 15 bp, Homo sapiens
atttatttggagaca

SEQ ID NO: 1095895 - DNA, 15 bp, Homo sapiens
tatttatttggagac

SEQ ID NO: 1095896 - DNA, 15 bp, Homo sapiens
ttatttatttggaga

SEQ ID NO: 1095897 - DNA, 15 bp, Homo sapiens
tttatttatttggag

SEQ ID NO: 1095898 - DNA, 15 bp, Homo sapiens
atttatttatttgga

SEQ ID NO: 1095899 - DNA, 15 bp, Homo sapiens
tatttatttatttgg

SEQ ID NO: 1095900 - DNA, 15 bp, Homo sapiens
ttatttatttatttg

SEQ ID NO: 1095901 - DNA, 15 bp, Homo sapiens
gtttttatttattta

SEQ ID NO: 1095902 - DNA, 15 bp, Homo sapiens
agtttttatttattt

SEQ ID NO: 1095903 - DNA, 15 bp, Homo sapiens
cagtttttatttatt

SEQ ID NO: 1095904 - DNA, 15 bp, Homo sapiens
ccagtttttatttat

SEQ ID NO: 1095905 - DNA, 15 bp, Homo sapiens
tccagtttttattta

SEQ ID NO: 1095906 - DNA, 15 bp, Homo sapiens
ttccagtttttattt

SEQ ID NO: 1095907 - DNA, 15 bp, Homo sapiens
cttccagtttttatt

SEQ ID NO: 1095908 - DNA, 15 bp, Homo sapiens
acttccagtttttat

SEQ ID NO: 1095909 - DNA, 15 bp, Homo sapiens
gacttccagttttta

SEQ ID NO: 1095910 - DNA, 15 bp, Homo sapiens
agacttccagttttt

SEQ ID NO: 1095911 - DNA, 15 bp, Homo sapiens
tagacttccagtttt

SEQ ID NO: 1095912 - DNA, 15 bp, Homo sapiens
ttagacttccagttt

SEQ ID NO: 1095913 - DNA, 15 bp, Homo sapiens
cttagacttccagtt

SEQ ID NO: 1095914 - DNA, 15 bp, Homo sapiens
gcttagacttccagt

SEQ ID NO: 1095915 - DNA, 15 bp, Homo sapiens
tgcttagacttccag

SEQ ID NO: 1095916 - DNA, 15 bp, Homo sapiens
atgcttagacttcca

SEQ ID NO: 1095917 - DNA, 15 bp, Homo sapiens
gatgcttagacttcc

SEQ ID NO: 1095918 - DNA, 15 bp, Homo sapiens
tgatgcttagacttc

SEQ ID NO: 1095919 - DNA, 15 bp, Homo sapiens
gtgatgcttagactt

SEQ ID NO: 1095920 - DNA, 15 bp, Homo sapiens
agtgatgcttagact

SEQ ID NO: 1095921 - DNA, 15 bp, Homo sapiens
cagtgatgcttagac

SEQ ID NO: 1095922 - DNA, 15 bp, Homo sapiens
tcagtgatgcttaga

SEQ ID NO: 1095923 - DNA, 15 bp, Homo sapiens
ctcagtgatgcttag

SEQ ID NO: 1095924 - DNA, 15 bp, Homo sapiens
gctcagtgatgctta

SEQ ID NO: 1095925 - DNA, 15 bp, Homo sapiens
ggctcagtgatgctt

SEQ ID NO: 1095926 - DNA, 15 bp, Homo sapiens
gggctcagtgatgct

SEQ ID NO: 1095927 - DNA, 15 bp, Homo sapiens
agggctcagtgatgc

SEQ ID NO: 1095928 - DNA, 15 bp, Homo sapiens
cagggctcagtgatg

SEQ ID NO: 1095929 - DNA, 15 bp, Homo sapiens
tcagggctcagtgat

SEQ ID NO: 1095930 - DNA, 15 bp, Homo sapiens
atcagggctcagtga

SEQ ID NO: 1095931 - DNA, 15 bp, Homo sapiens
aatcagggctcagtg

SEQ ID NO: 1095932 - DNA, 15 bp, Homo sapiens
gaatcagggctcagt

SEQ ID NO: 1095933 - DNA, 15 bp, Homo sapiens
ggaatcagggctcag

SEQ ID NO: 1095934 - DNA, 15 bp, Homo sapiens
aggaatcagggctca

SEQ ID NO: 1095935 - DNA, 15 bp, Homo sapiens
taggaatcagggctc

SEQ ID NO: 1095936 - DNA, 15 bp, Homo sapiens
ataggaatcagggct

SEQ ID NO: 1095937 - DNA, 15 bp, Homo sapiens
cataggaatcagggc

SEQ ID NO: 1095938 - DNA, 15 bp, Homo sapiens
acataggaatcaggg

SEQ ID NO: 1095939 - DNA, 15 bp, Homo sapiens
cacataggaatcagg

SEQ ID NO: 1095940 - DNA, 15 bp, Homo sapiens
ccacataggaatcag

SEQ ID NO: 1095941 - DNA, 15 bp, Homo sapiens
gccacataggaatca

SEQ ID NO: 1095942 - DNA, 15 bp, Homo sapiens
tgccacataggaatc

SEQ ID NO: 1095943 - DNA, 15 bp, Homo sapiens
ctgccacataggaat

SEQ ID NO: 1095944 - DNA, 15 bp, Homo sapiens
gctgccacataggaa

SEQ ID NO: 1095945 - DNA, 15 bp, Homo sapiens
agctgccacatagga

SEQ ID NO: 1095946 - DNA, 15 bp, Homo sapiens
gagctgccacatagg

SEQ ID NO: 1095947 - DNA, 15 bp, Homo sapiens
cgagctgccacatag

SEQ ID NO: 1095948 - DNA, 15 bp, Homo sapiens
tcgagctgccacata

SEQ ID NO: 1095949 - DNA, 15 bp, Homo sapiens
gtcgagctgccacat

SEQ ID NO: 1095950 - DNA, 15 bp, Homo sapiens
agtcgagctgccaca

SEQ ID NO: 1095951 - DNA, 15 bp, Homo sapiens
cagtcgagctgccac

SEQ ID NO: 1095952 - DNA, 15 bp, Homo sapiens
tcagtcgagctgcca

SEQ ID NO: 1095953 - DNA, 15 bp, Homo sapiens
gtcagtcgagctgcc

SEQ ID NO: 1095954 - DNA, 15 bp, Homo sapiens
ggtcagtcgagctgc

SEQ ID NO: 1095955 - DNA, 15 bp, Homo sapiens
tggtcagtcgagctg

SEQ ID NO: 1095956 - DNA, 15 bp, Homo sapiens
ctggtcagtcgagct

SEQ ID NO: 1095957 - DNA, 15 bp, Homo sapiens
gctggtcagtcgagc

SEQ ID NO: 1095958 - DNA, 15 bp, Homo sapiens
tgctggtcagtcgag

SEQ ID NO: 1095959 - DNA, 15 bp, Homo sapiens
atgctggtcagtcga

SEQ ID NO: 1095960 - DNA, 15 bp, Homo sapiens
aatgctggtcagtcg

SEQ ID NO: 1095961 - DNA, 15 bp, Homo sapiens
aaatgctggtcagtc

SEQ ID NO: 1095962 - DNA, 15 bp, Homo sapiens
caaatgctggtcagt

SEQ ID NO: 1095963 - DNA, 15 bp, Homo sapiens
tcaaatgctggtcag

SEQ ID NO: 1095964 - DNA, 15 bp, Homo sapiens
ctcaaatgctggtca

SEQ ID NO: 1095965 - DNA, 15 bp, Homo sapiens
actcaaatgctggtc

SEQ ID NO: 1095966 - DNA, 15 bp, Homo sapiens
aactcaaatgctggt

SEQ ID NO: 1095967 - DNA, 15 bp, Homo sapiens
caactcaaatgctgg

SEQ ID NO: 1095968 - DNA, 15 bp, Homo sapiens
gcaactcaaatgctg

SEQ ID NO: 1095969 - DNA, 15 bp, Homo sapiens
agcaactcaaatgct

SEQ ID NO: 1095970 - DNA, 15 bp, Homo sapiens
cagcaactcaaatgc

SEQ ID NO: 1095971 - DNA, 15 bp, Homo sapiens
acagcaactcaaatg

SEQ ID NO: 1095972 - DNA, 15 bp, Homo sapiens
gacagcaactcaaat

SEQ ID NO: 1095973 - DNA, 15 bp, Homo sapiens
ggacagcaactcaaa

SEQ ID NO: 1095974 - DNA, 15 bp, Homo sapiens
gggacagcaactcaa

SEQ ID NO: 1095975 - DNA, 15 bp, Homo sapiens
agggacagcaactca

SEQ ID NO: 1095976 - DNA, 15 bp, Homo sapiens
cagggacagcaactc

SEQ ID NO: 1095977 - DNA, 15 bp, Homo sapiens
tcagggacagcaact

SEQ ID NO: 1095978 - DNA, 15 bp, Homo sapiens
gtcagggacagcaac

SEQ ID NO: 1095979 - DNA, 15 bp, Homo sapiens
tgtcagggacagcaa

SEQ ID NO: 1095980 - DNA, 15 bp, Homo sapiens
ctgtcagggacagca

SEQ ID NO: 1095981 - DNA, 15 bp, Homo sapiens
gctgtcagggacagc

SEQ ID NO: 1095982 - DNA, 15 bp, Homo sapiens
agctgtcagggacag

SEQ ID NO: 1095983 - DNA, 15 bp, Homo sapiens
aagctgtcagggaca

SEQ ID NO: 1095984 - DNA, 15 bp, Homo sapiens
aaagctgtcagggac

SEQ ID NO: 1095985 - DNA, 15 bp, Homo sapiens
caaagctgtcaggga

SEQ ID NO: 1095986 - DNA, 15 bp, Homo sapiens
ccaaagctgtcaggg

SEQ ID NO: 1095987 - DNA, 15 bp, Homo sapiens
cccaaagctgtcagg

SEQ ID NO: 1095988 - DNA, 15 bp, Homo sapiens
ccccaaagctgtcag

SEQ ID NO: 1095989 - DNA, 15 bp, Homo sapiens
cccccaaagctgtca

SEQ ID NO: 1095990 - DNA, 15 bp, Homo sapiens
acccccaaagctgtc

SEQ ID NO: 1095991 - DNA, 15 bp, Homo sapiens
cacccccaaagctgt

SEQ ID NO: 1095992 - DNA, 15 bp, Homo sapiens
acacccccaaagctg

SEQ ID NO: 1095993 - DNA, 15 bp, Homo sapiens
cacacccccaaagct

SEQ ID NO: 1095994 - DNA, 15 bp, Homo sapiens
gcacacccccaaagc

SEQ ID NO: 1095995 - DNA, 15 bp, Homo sapiens
tgcacacccccaaag

SEQ ID NO: 1095996 - DNA, 15 bp, Homo sapiens
ctgcacacccccaaa

SEQ ID NO: 1095997 - DNA, 15 bp, Homo sapiens
gctgcacacccccaa

SEQ ID NO: 1095998 - DNA, 15 bp, Homo sapiens
ggctgcacaccccca

SEQ ID NO: 1095999 - DNA, 15 bp, Homo sapiens
gggctgcacaccccc

SEQ ID NO: 1096000 - DNA, 15 bp, Homo sapiens
tgggctgcacacccc

SEQ ID NO: 1096001 - DNA, 15 bp, Homo sapiens
gtgggctgcacaccc

SEQ ID NO: 1096002 - DNA, 15 bp, Homo sapiens
catgccgcgccttgg

SEQ ID NO: 1096003 - DNA, 15 bp, Homo sapiens
ccatgccgcgccttg

SEQ ID NO: 1096004 - DNA, 15 bp, Homo sapiens
accatgccgcgcctt

SEQ ID NO: 1096005 - DNA, 15 bp, Homo sapiens
aaccatgccgcgcct

SEQ ID NO: 1096006 - DNA, 15 bp, Homo sapiens
caaccatgccgcgcc

SEQ ID NO: 1096007 - DNA, 15 bp, Homo sapiens
tcaaccatgccgcgc

SEQ ID NO: 1096008 - DNA, 15 bp, Homo sapiens
gtcaaccatgccgcg

SEQ ID NO: 1096009 - DNA, 15 bp, Homo sapiens
tgtcaaccatgccgc

SEQ ID NO: 1096010 - DNA, 15 bp, Homo sapiens
gtgtcaaccatgccg

SEQ ID NO: 1096011 - DNA, 15 bp, Homo sapiens
ggtgtcaaccatgcc

SEQ ID NO: 1096012 - DNA, 15 bp, Homo sapiens
gggtgtcaaccatgc

SEQ ID NO: 1096013 - DNA, 15 bp, Homo sapiens
ggggtgtcaaccatg

SEQ ID NO: 1096014 - DNA, 15 bp, Homo sapiens
gtgggggtgtcaacc

SEQ ID NO: 1096015 - DNA, 15 bp, Homo sapiens
cgtgggggtgtcaac

SEQ ID NO: 1096016 - DNA, 15 bp, Homo sapiens
acgtgggggtgtcaa

SEQ ID NO: 1096017 - DNA, 15 bp, Homo sapiens
aacgtgggggtgtca

SEQ ID NO: 1096018 - DNA, 15 bp, Homo sapiens
taacgtgggggtgtc

SEQ ID NO: 1096019 - DNA, 15 bp, Homo sapiens
ctaacgtgggggtgt

SEQ ID NO: 1096020 - DNA, 15 bp, Homo sapiens
cctaacgtgggggtg

SEQ ID NO: 1096021 - DNA, 15 bp, Homo sapiens
tcctaacgtgggggt

SEQ ID NO: 1096022 - DNA, 15 bp, Homo sapiens
gtcctaacgtggggg

SEQ ID NO: 1096023 - DNA, 15 bp, Homo sapiens
cgtcctaacgtgggg

SEQ ID NO: 1096024 - DNA, 15 bp, Homo sapiens
ccgtcctaacgtggg

SEQ ID NO: 1096025 - DNA, 15 bp, Homo sapiens
tccgtcctaacgtgg

SEQ ID NO: 1096026 - DNA, 15 bp, Homo sapiens
ctccgtcctaacgtg

SEQ ID NO: 1096027 - DNA, 15 bp, Homo sapiens
tctccgtcctaacgt

SEQ ID NO: 1096028 - DNA, 15 bp, Homo sapiens
gtctccgtcctaacg

SEQ ID NO: 1096029 - DNA, 15 bp, Homo sapiens
ggtctccgtcctaac

SEQ ID NO: 1096030 - DNA, 15 bp, Homo sapiens
gggtctccgtcctaa

SEQ ID NO: 1096031 - DNA, 15 bp, Homo sapiens
agggtctccgtccta

SEQ ID NO: 1096032 - DNA, 15 bp, Homo sapiens
cagggtctccgtcct

SEQ ID NO: 1096033 - DNA, 15 bp, Homo sapiens
ccagggtctccgtcc

SEQ ID NO: 1096034 - DNA, 15 bp, Homo sapiens
cccagggtctccgtc

SEQ ID NO: 1096035 - DNA, 15 bp, Homo sapiens
gcccagggtctccgt

SEQ ID NO: 1096036 - DNA, 15 bp, Homo sapiens
agcccagggtctccg

SEQ ID NO: 1096037 - DNA, 15 bp, Homo sapiens
aagcccagggtctcc

SEQ ID NO: 1096038 - DNA, 15 bp, Homo sapiens
taagcccagggtctc

SEQ ID NO: 1096039 - DNA, 15 bp, Homo sapiens
ctaagcccagggtct

SEQ ID NO: 1096040 - DNA, 15 bp, Homo sapiens
actaagcccagggtc

SEQ ID NO: 1096041 - DNA, 15 bp, Homo sapiens
aactaagcccagggt

SEQ ID NO: 1096042 - DNA, 15 bp, Homo sapiens
taactaagcccaggg

SEQ ID NO: 1096043 - DNA, 15 bp, Homo sapiens
ctaactaagcccagg

SEQ ID NO: 1096044 - DNA, 15 bp, Homo sapiens
tctaactaagcccag

SEQ ID NO: 1096045 - DNA, 15 bp, Homo sapiens
ctctaactaagccca

SEQ ID NO: 1096046 - DNA, 15 bp, Homo sapiens
cctctaactaagccc

SEQ ID NO: 1096047 - DNA, 15 bp, Homo sapiens
ccctctaactaagcc

SEQ ID NO: 1096048 - DNA, 15 bp, Homo sapiens
cccctctaactaagc

SEQ ID NO: 1096049 - DNA, 15 bp, Homo sapiens
ccccctctaactaag

SEQ ID NO: 1096050 - DNA, 15 bp, Homo sapiens
gccccctctaactaa

SEQ ID NO: 1096051 - DNA, 15 bp, Homo sapiens
tgccccctctaacta

SEQ ID NO: 1096052 - DNA, 15 bp, Homo sapiens
ctgccccctctaact

SEQ ID NO: 1096053 - DNA, 15 bp, Homo sapiens
actgccccctctaac

SEQ ID NO: 1096054 - DNA, 15 bp, Homo sapiens
tactgccccctctaa

SEQ ID NO: 1096055 - DNA, 15 bp, Homo sapiens
gtactgccccctcta

SEQ ID NO: 1096056 - DNA, 15 bp, Homo sapiens
agtactgccccctct

SEQ ID NO: 1096057 - DNA, 15 bp, Homo sapiens
tagtactgccccctc

SEQ ID NO: 1096058 - DNA, 15 bp, Homo sapiens
ttagtactgccccct

SEQ ID NO: 1096059 - DNA, 15 bp, Homo sapiens
gttagtactgccccc

SEQ ID NO: 1096060 - DNA, 15 bp, Homo sapiens
ggttagtactgcccc

SEQ ID NO: 1096061 - DNA, 15 bp, Homo sapiens
tggttagtactgccc

SEQ ID NO: 1096062 - DNA, 15 bp, Homo sapiens
ctggttagtactgcc

SEQ ID NO: 1096063 - DNA, 15 bp, Homo sapiens
actggttagtactgc

SEQ ID NO: 1096064 - DNA, 15 bp, Homo sapiens
gactggttagtactg

SEQ ID NO: 1096065 - DNA, 15 bp, Homo sapiens
ggactggttagtact

SEQ ID NO: 1096066 - DNA, 15 bp, Homo sapiens
gggactggttagtac

SEQ ID NO: 1096067 - DNA, 15 bp, Homo sapiens
agggactggttagta

SEQ ID NO: 1096068 - DNA, 15 bp, Homo sapiens
cagggactggttagt

SEQ ID NO: 1096069 - DNA, 15 bp, Homo sapiens
ccagggactggttag

SEQ ID NO: 1096070 - DNA, 15 bp, Homo sapiens
gccagggactggtta

SEQ ID NO: 1096071 - DNA, 15 bp, Homo sapiens
cgccagggactggtt

SEQ ID NO: 1096072 - DNA, 15 bp, Homo sapiens
ccgccagggactggt

SEQ ID NO: 1096073 - DNA, 15 bp, Homo sapiens
tccgccagggactgg

SEQ ID NO: 1096074 - DNA, 15 bp, Homo sapiens
ttccgccagggactg

SEQ ID NO: 1096075 - DNA, 15 bp, Homo sapiens
tttccgccagggact

SEQ ID NO: 1096076 - DNA, 15 bp, Homo sapiens
gtttccgccagggac

SEQ ID NO: 1096077 - DNA, 15 bp, Homo sapiens
cgtttccgccaggga

SEQ ID NO: 1096078 - DNA, 15 bp, Homo sapiens
gcgtttccgccaggg

SEQ ID NO: 1096079 - DNA, 15 bp, Homo sapiens
agcgtttccgccagg

SEQ ID NO: 1096080 - DNA, 15 bp, Homo sapiens
aagcgtttccgccag

SEQ ID NO: 1096081 - DNA, 15 bp, Homo sapiens
aaagcgtttccgcca

SEQ ID NO: 1096082 - DNA, 15 bp, Homo sapiens
caaagcgtttccgcc

SEQ ID NO: 1096083 - DNA, 15 bp, Homo sapiens
ccaaagcgtttccgc

SEQ ID NO: 1096084 - DNA, 15 bp, Homo sapiens
gccaaagcgtttccg

SEQ ID NO: 1096085 - DNA, 15 bp, Homo sapiens
agccaaagcgtttcc

SEQ ID NO: 1096086 - DNA, 15 bp, Homo sapiens
cagccaaagcgtttc

SEQ ID NO: 1096087 - DNA, 15 bp, Homo sapiens
ccagccaaagcgttt

SEQ ID NO: 1096088 - DNA, 15 bp, Homo sapiens
cccagccaaagcgtt

SEQ ID NO: 1096089 - DNA, 15 bp, Homo sapiens
acccagccaaagcgt

SEQ ID NO: 1096090 - DNA, 15 bp, Homo sapiens
cacccagccaaagcg

SEQ ID NO: 1096091 - DNA, 15 bp, Homo sapiens
tcacccagccaaagc

SEQ ID NO: 1096092 - DNA, 15 bp, Homo sapiens
ctcacccagccaaag

SEQ ID NO: 1096093 - DNA, 15 bp, Homo sapiens
cctcacccagccaaa

SEQ ID NO: 1096094 - DNA, 15 bp, Homo sapiens
cacctcacccagcca

SEQ ID NO: 1096095 - DNA, 15 bp, Homo sapiens
tcacctcacccagcc

SEQ ID NO: 1096096 - DNA, 15 bp, Homo sapiens
ctcacctcacccagc

SEQ ID NO: 1096097 - DNA, 15 bp, Homo sapiens
gctcacctcacccag

SEQ ID NO: 1096098 - DNA, 15 bp, Homo sapiens
cgctcacctcaccca

SEQ ID NO: 1096099 - DNA, 15 bp, Homo sapiens
ccgctcacctcaccc

SEQ ID NO: 1096100 - DNA, 15 bp, Homo sapiens
cccgctcacctcacc

SEQ ID NO: 1096101 - DNA, 15 bp, Homo sapiens
tcccgctcacctcac

SEQ ID NO: 1096102 - DNA, 15 bp, Homo sapiens
atcccgctcacctca

SEQ ID NO: 1096103 - DNA, 15 bp, Homo sapiens
gatcccgctcacctc

SEQ ID NO: 1096104 - DNA, 15 bp, Homo sapiens
cgatcccgctcacct

SEQ ID NO: 1096105 - DNA, 15 bp, Homo sapiens
gcgatcccgctcacc

SEQ ID NO: 1096106 - DNA, 15 bp, Homo sapiens
ggcgatcccgctcac

SEQ ID NO: 1096107 - DNA, 15 bp, Homo sapiens
gggcgatcccgctca

SEQ ID NO: 1096108 - DNA, 15 bp, Homo sapiens
ggggcgatcccgctc

SEQ ID NO: 1096109 - DNA, 15 bp, Homo sapiens
gggggcgatcccgct

SEQ ID NO: 1096110 - DNA, 15 bp, Homo sapiens
tgggggcgatcccgc

SEQ ID NO: 1096111 - DNA, 15 bp, Homo sapiens
atgggggcgatcccg

SEQ ID NO: 1096112 - DNA, 15 bp, Homo sapiens
aatgggggcgatccc

SEQ ID NO: 1096113 - DNA, 15 bp, Homo sapiens
aaatgggggcgatcc

SEQ ID NO: 1096114 - DNA, 15 bp, Homo sapiens
gaaatgggggcgatc

SEQ ID NO: 1096115 - DNA, 15 bp, Homo sapiens
agaaatgggggcgat

SEQ ID NO: 1096116 - DNA, 15 bp, Homo sapiens
gagaaatgggggcga

SEQ ID NO: 1096117 - DNA, 15 bp, Homo sapiens
ggagaaatgggggcg

SEQ ID NO: 1096118 - DNA, 15 bp, Homo sapiens
tggagaaatgggggc

SEQ ID NO: 1096119 - DNA, 15 bp, Homo sapiens
ctggagaaatggggg

SEQ ID NO: 1096120 - DNA, 15 bp, Homo sapiens
tctggagaaatgggg

SEQ ID NO: 1096121 - DNA, 15 bp, Homo sapiens
ctctggagaaatggg

SEQ ID NO: 1096122 - DNA, 15 bp, Homo sapiens
tctctggagaaatgg

SEQ ID NO: 1096123 - DNA, 15 bp, Homo sapiens
ctctctggagaaatg

SEQ ID NO: 1096124 - DNA, 15 bp, Homo sapiens
cctctctggagaaat

SEQ ID NO: 1096125 - DNA, 15 bp, Homo sapiens
ccctctctggagaaa

SEQ ID NO: 1096126 - DNA, 15 bp, Homo sapiens
cccctctctggagaa

SEQ ID NO: 1096127 - DNA, 15 bp, Homo sapiens
acccctctctggaga

SEQ ID NO: 1096128 - DNA, 15 bp, Homo sapiens
gacccctctctggag

SEQ ID NO: 1096129 - DNA, 15 bp, Homo sapiens
ggacccctctctgga

SEQ ID NO: 1096130 - DNA, 15 bp, Homo sapiens
gggacccctctctgg

SEQ ID NO: 1096131 - DNA, 15 bp, Homo sapiens
cgggacccctctctg

SEQ ID NO: 1096132 - DNA, 15 bp, Homo sapiens
ccgggacccctctct

SEQ ID NO: 1096133 - DNA, 15 bp, Homo sapiens
gccgggacccctctc

SEQ ID NO: 1096134 - DNA, 15 bp, Homo sapiens
agccgggacccctct

SEQ ID NO: 1096135 - DNA, 15 bp, Homo sapiens
gagccgggacccctc

SEQ ID NO: 1096136 - DNA, 15 bp, Homo sapiens
tgagccgggacccct

SEQ ID NO: 1096137 - DNA, 15 bp, Homo sapiens
ctgagccgggacccc

SEQ ID NO: 1096138 - DNA, 15 bp, Homo sapiens
gctgagccgggaccc

SEQ ID NO: 1096139 - DNA, 15 bp, Homo sapiens
cgctgagccgggacc

SEQ ID NO: 1096140 - DNA, 15 bp, Homo sapiens
tcgctgagccgggac

SEQ ID NO: 1096141 - DNA, 15 bp, Homo sapiens
ctcgctgagccggga

SEQ ID NO: 1096142 - DNA, 15 bp, Homo sapiens
cctcgctgagccggg

SEQ ID NO: 1096143 - DNA, 15 bp, Homo sapiens
ccctcgctgagccgg

SEQ ID NO: 1096144 - DNA, 15 bp, Homo sapiens
tccctcgctgagccg

SEQ ID NO: 1096145 - DNA, 15 bp, Homo sapiens
ttccctcgctgagcc

SEQ ID NO: 1096146 - DNA, 15 bp, Homo sapiens
tttccctcgctgagc

SEQ ID NO: 1096147 - DNA, 15 bp, Homo sapiens
ctttccctcgctgag

SEQ ID NO: 1096148 - DNA, 15 bp, Homo sapiens
tctttccctcgctga

SEQ ID NO: 1096149 - DNA, 15 bp, Homo sapiens
ctctttccctcgctg

SEQ ID NO: 1096150 - DNA, 15 bp, Homo sapiens
cctctttccctcgct

SEQ ID NO: 1096151 - DNA, 15 bp, Homo sapiens
gcctctttccctcgc

SEQ ID NO: 1096152 - DNA, 15 bp, Homo sapiens
ggcctctttccctcg

SEQ ID NO: 1096153 - DNA, 15 bp, Homo sapiens
cggcctctttccctc

SEQ ID NO: 1096154 - DNA, 15 bp, Homo sapiens
gcggcctctttccct

SEQ ID NO: 1096155 - DNA, 15 bp, Homo sapiens
ggcggcctctttccc

SEQ ID NO: 1096156 - DNA, 15 bp, Homo sapiens
cggcggcctctttcc

SEQ ID NO: 1096157 - DNA, 15 bp, Homo sapiens
gcggcggcctctttc

SEQ ID NO: 1096158 - DNA, 15 bp, Homo sapiens
agcggcggcctcttt

SEQ ID NO: 1096159 - DNA, 15 bp, Homo sapiens
cagcggcggcctctt

SEQ ID NO: 1096160 - DNA, 15 bp, Homo sapiens
ccagcggcggcctct

SEQ ID NO: 1096161 - DNA, 15 bp, Homo sapiens
cccagcggcggcctc

SEQ ID NO: 1096162 - DNA, 15 bp, Homo sapiens
ccccagcggcggcct

SEQ ID NO: 1096163 - DNA, 15 bp, Homo sapiens
cccccagcggcggcc

SEQ ID NO: 1096164 - DNA, 15 bp, Homo sapiens
ccccccagcggcggc

SEQ ID NO: 1096165 - DNA, 15 bp, Homo sapiens
tccccccagcggcgg

SEQ ID NO: 1096166 - DNA, 15 bp, Homo sapiens
gtccccccagcggcg

SEQ ID NO: 1096167 - DNA, 15 bp, Homo sapiens
cgtccccccagcggc

SEQ ID NO: 1096168 - DNA, 15 bp, Homo sapiens
ccgtccccccagcgg

SEQ ID NO: 1096169 - DNA, 15 bp, Homo sapiens
gccgtccccccagcg

SEQ ID NO: 1096170 - DNA, 15 bp, Homo sapiens
agccgtccccccagc

SEQ ID NO: 1096171 - DNA, 15 bp, Homo sapiens
cagccgtccccccag

SEQ ID NO: 1096172 - DNA, 15 bp, Homo sapiens
ccagccgtcccccca

SEQ ID NO: 1096173 - DNA, 15 bp, Homo sapiens
gccagccgtcccccc

SEQ ID NO: 1096174 - DNA, 15 bp, Homo sapiens
ggccagccgtccccc

SEQ ID NO: 1096175 - DNA, 15 bp, Homo sapiens
cggccagccgtcccc

SEQ ID NO: 1096176 - DNA, 15 bp, Homo sapiens
ccggccagccgtccc

SEQ ID NO: 1096177 - DNA, 15 bp, Homo sapiens
cccggccagccgtcc

SEQ ID NO: 1096178 - DNA, 15 bp, Homo sapiens
ccccggccagccgtc

SEQ ID NO: 1096179 - DNA, 15 bp, Homo sapiens
gccccggccagccgt

SEQ ID NO: 1096180 - DNA, 15 bp, Homo sapiens
ggccccggccagccg

SEQ ID NO: 1096181 - DNA, 15 bp, Homo sapiens
gggccccggccagcc

SEQ ID NO: 1096182 - DNA, 15 bp, Homo sapiens
ggggccccggccagc

SEQ ID NO: 1096183 - DNA, 15 bp, Homo sapiens
aggggccccggccag

SEQ ID NO: 1096184 - DNA, 15 bp, Homo sapiens
gaggggccccggcca

SEQ ID NO: 1096185 - DNA, 15 bp, Homo sapiens
ggaggggccccggcc

SEQ ID NO: 1096186 - DNA, 15 bp, Homo sapiens
gggaggggccccggc

SEQ ID NO: 1096187 - DNA, 15 bp, Homo sapiens
agggaggggccccgg

SEQ ID NO: 1096188 - DNA, 15 bp, Homo sapiens
cagggaggggccccg

SEQ ID NO: 1096189 - DNA, 15 bp, Homo sapiens
ccagggaggggcccc

SEQ ID NO: 1096190 - DNA, 15 bp, Homo sapiens
tccagggaggggccc

SEQ ID NO: 1096191 - DNA, 15 bp, Homo sapiens
ctccagggaggggcc

SEQ ID NO: 1096192 - DNA, 15 bp, Homo sapiens
tctccagggaggggc

SEQ ID NO: 1096193 - DNA, 15 bp, Homo sapiens
ttctccagggagggg

SEQ ID NO: 1096194 - DNA, 15 bp, Homo sapiens
gttctccagggaggg

SEQ ID NO: 1096195 - DNA, 15 bp, Homo sapiens
cgttctccagggagg

SEQ ID NO: 1096196 - DNA, 15 bp, Homo sapiens
tcgttctccagggag

SEQ ID NO: 1096197 - DNA, 15 bp, Homo sapiens
ctcgttctccaggga

SEQ ID NO: 1096198 - DNA, 15 bp, Homo sapiens
tctcgttctccaggg

SEQ ID NO: 1096199 - DNA, 15 bp, Homo sapiens
ctctcgttctccagg

SEQ ID NO: 1096200 - DNA, 15 bp, Homo sapiens
cctctcgttctccag

SEQ ID NO: 1096201 - DNA, 15 bp, Homo sapiens
gcctctcgttctcca

SEQ ID NO: 1096202 - DNA, 15 bp, Homo sapiens
ggcctctcgttctcc

SEQ ID NO: 1096203 - DNA, 15 bp, Homo sapiens
cggcctctcgttctc

SEQ ID NO: 1096204 - DNA, 15 bp, Homo sapiens
gcggcctctcgttct

SEQ ID NO: 1096205 - DNA, 15 bp, Homo sapiens
ggcggcctctcgttc

SEQ ID NO: 1096206 - DNA, 15 bp, Homo sapiens
cggcggcctctcgtt

SEQ ID NO: 1096207 - DNA, 15 bp, Homo sapiens
gcggcggcctctcgt

SEQ ID NO: 1096208 - DNA, 15 bp, Homo sapiens
agcggcggcctctcg

SEQ ID NO: 1096209 - DNA, 15 bp, Homo sapiens
cagcggcggcctctc

SEQ ID NO: 1096210 - DNA, 15 bp, Homo sapiens
tccagcggcggcctc

SEQ ID NO: 1096211 - DNA, 15 bp, Homo sapiens
ctccagcggcggcct

SEQ ID NO: 1096212 - DNA, 15 bp, Homo sapiens
cctccagcggcggcc

SEQ ID NO: 1096213 - DNA, 15 bp, Homo sapiens
ccctccagcggcggc

SEQ ID NO: 1096214 - DNA, 15 bp, Homo sapiens
cccctccagcggcgg

SEQ ID NO: 1096215 - DNA, 15 bp, Homo sapiens
ccccctccagcggcg

SEQ ID NO: 1096216 - DNA, 15 bp, Homo sapiens
tccccctccagcggc

SEQ ID NO: 1096217 - DNA, 15 bp, Homo sapiens
atccccctccagcgg

SEQ ID NO: 1096218 - DNA, 15 bp, Homo sapiens
catccccctccagcg

SEQ ID NO: 1096219 - DNA, 15 bp, Homo sapiens
ccatccccctccagc

SEQ ID NO: 1096220 - DNA, 15 bp, Homo sapiens
tccatccccctccag

SEQ ID NO: 1096221 - DNA, 15 bp, Homo sapiens
gtccatccccctcca

SEQ ID NO: 1096222 - DNA, 15 bp, Homo sapiens
agtccatccccctcc

SEQ ID NO: 1096223 - DNA, 15 bp, Homo sapiens
cagtccatccccctc

SEQ ID NO: 1096224 - DNA, 15 bp, Homo sapiens
acagtccatccccct

SEQ ID NO: 1096225 - DNA, 15 bp, Homo sapiens
gacagtccatccccc

SEQ ID NO: 1096226 - DNA, 15 bp, Homo sapiens
cgacagtccatcccc

SEQ ID NO: 1096227 - DNA, 15 bp, Homo sapiens
ccgacagtccatccc

SEQ ID NO: 1096228 - DNA, 15 bp, Homo sapiens
tccgacagtccatcc

SEQ ID NO: 1096229 - DNA, 15 bp, Homo sapiens
ctccgacagtccatc

SEQ ID NO: 1096230 - DNA, 15 bp, Homo sapiens
gctccgacagtccat

SEQ ID NO: 1096231 - DNA, 15 bp, Homo sapiens
cgctccgacagtcca

SEQ ID NO: 1096232 - DNA, 15 bp, Homo sapiens
tcgctccgacagtcc

SEQ ID NO: 1096233 - DNA, 15 bp, Homo sapiens
gtcgctccgacagtc

SEQ ID NO: 1096234 - DNA, 15 bp, Homo sapiens
tgtcgctccgacagt

SEQ ID NO: 1096235 - DNA, 15 bp, Homo sapiens
gtgtcgctccgacag

SEQ ID NO: 1096236 - DNA, 15 bp, Homo sapiens
agtgtcgctccgaca

SEQ ID NO: 1096237 - DNA, 15 bp, Homo sapiens
gagtgtcgctccgac

SEQ ID NO: 1096238 - DNA, 15 bp, Homo sapiens
tgagtgtcgctccga

SEQ ID NO: 1096239 - DNA, 15 bp, Homo sapiens
ctgagtgtcgctccg

SEQ ID NO: 1096240 - DNA, 15 bp, Homo sapiens
gctgagtgtcgctcc

SEQ ID NO: 1096241 - DNA, 15 bp, Homo sapiens
cgctgagtgtcgctc

SEQ ID NO: 1096242 - DNA, 15 bp, Homo sapiens
tcgctgagtgtcgct

SEQ ID NO: 1096243 - DNA, 15 bp, Homo sapiens
gtcgctgagtgtcgc

SEQ ID NO: 1096244 - DNA, 15 bp, Homo sapiens
ggtcgctgagtgtcg

SEQ ID NO: 1096245 - DNA, 15 bp, Homo sapiens
cggtcgctgagtgtc

SEQ ID NO: 1096246 - DNA, 15 bp, Homo sapiens
gcggtcgctgagtgt

SEQ ID NO: 1096247 - DNA, 15 bp, Homo sapiens
ggcggtcgctgagtg

SEQ ID NO: 1096248 - DNA, 15 bp, Homo sapiens
gggcggtcgctgagt

SEQ ID NO: 1096249 - DNA, 15 bp, Homo sapiens
agggcggtcgctgag

SEQ ID NO: 1096250 - DNA, 15 bp, Homo sapiens
tagggcggtcgctga

SEQ ID NO: 1096251 - DNA, 15 bp, Homo sapiens
gtagggcggtcgctg

SEQ ID NO: 1096252 - DNA, 15 bp, Homo sapiens
ggtagggcggtcgct

SEQ ID NO: 1096253 - DNA, 15 bp, Homo sapiens
aggtagggcggtcgc

SEQ ID NO: 1096254 - DNA, 15 bp, Homo sapiens
gaggtagggcggtcg

SEQ ID NO: 1096255 - DNA, 15 bp, Homo sapiens
ggaggtagggcggtc

SEQ ID NO: 1096256 - DNA, 15 bp, Homo sapiens
aggaggtagggcggt

SEQ ID NO: 1096257 - DNA, 15 bp, Homo sapiens
gaggaggtagggcgg

SEQ ID NO: 1096258 - DNA, 15 bp, Homo sapiens
ggaggaggtagggcg

SEQ ID NO: 1096259 - DNA, 15 bp, Homo sapiens
gggaggaggtagggc

SEQ ID NO: 1096260 - DNA, 15 bp, Homo sapiens
cgggaggaggtaggg

SEQ ID NO: 1096261 - DNA, 15 bp, Homo sapiens
gcgggaggaggtagg

SEQ ID NO: 1096262 - DNA, 15 bp, Homo sapiens
ggcgggaggaggtag

SEQ ID NO: 1096263 - DNA, 15 bp, Homo sapiens
gggcgggaggaggta

SEQ ID NO: 1096264 - DNA, 15 bp, Homo sapiens
ggggcgggaggaggt

SEQ ID NO: 1096265 - DNA, 15 bp, Homo sapiens
cggggcgggaggagg

SEQ ID NO: 1096266 - DNA, 15 bp, Homo sapiens
gcggggcgggaggag

SEQ ID NO: 1096267 - DNA, 15 bp, Homo sapiens
tgcggggcgggagga

SEQ ID NO: 1096268 - DNA, 15 bp, Homo sapiens
ctgcggggcgggagg

SEQ ID NO: 1096269 - DNA, 15 bp, Homo sapiens
gctgcggggcgggag

SEQ ID NO: 1096270 - DNA, 15 bp, Homo sapiens
cgctgcggggcggga

SEQ ID NO: 1096271 - DNA, 15 bp, Homo sapiens
tcgctgcggggcggg

SEQ ID NO: 1096272 - DNA, 15 bp, Homo sapiens
gtcgctgcggggcgg

SEQ ID NO: 1096273 - DNA, 15 bp, Homo sapiens
tgtcgctgcggggcg

SEQ ID NO: 1096274 - DNA, 15 bp, Homo sapiens
gtgtcgctgcggggc

SEQ ID NO: 1096275 - DNA, 15 bp, Homo sapiens
cgtgtcgctgcgggg

SEQ ID NO: 1096276 - DNA, 15 bp, Homo sapiens
ccgtgtcgctgcggg

SEQ ID NO: 1096277 - DNA, 15 bp, Homo sapiens
cccgtgtcgctgcgg

SEQ ID NO: 1096278 - DNA, 15 bp, Homo sapiens
gcccgtgtcgctgcg

SEQ ID NO: 1096279 - DNA, 15 bp, Homo sapiens
cgcccgtgtcgctgc

SEQ ID NO: 1096280 - DNA, 15 bp, Homo sapiens
tcgcccgtgtcgctg

SEQ ID NO: 1096281 - DNA, 15 bp, Homo sapiens
gtcgcccgtgtcgct

SEQ ID NO: 1096282 - DNA, 15 bp, Homo sapiens
ggtcgcccgtgtcgc

SEQ ID NO: 1096283 - DNA, 15 bp, Homo sapiens
cggtcgcccgtgtcg

SEQ ID NO: 1096284 - DNA, 15 bp, Homo sapiens
gcggtcgcccgtgtc

SEQ ID NO: 1096285 - DNA, 15 bp, Homo sapiens
tgcggtcgcccgtgt

SEQ ID NO: 1096286 - DNA, 15 bp, Homo sapiens
ttgcggtcgcccgtg

SEQ ID NO: 1096287 - DNA, 15 bp, Homo sapiens
cttgcggtcgcccgt

SEQ ID NO: 1096288 - DNA, 15 bp, Homo sapiens
gcttgcggtcgcccg

SEQ ID NO: 1096289 - DNA, 15 bp, Homo sapiens
tgcttgcggtcgccc

SEQ ID NO: 1096290 - DNA, 15 bp, Homo sapiens
ctgcttgcggtcgcc

SEQ ID NO: 1096291 - DNA, 15 bp, Homo sapiens
tctgcttgcggtcgc

SEQ ID NO: 1096292 - DNA, 15 bp, Homo sapiens
atctgcttgcggtcg

SEQ ID NO: 1096293 - DNA, 15 bp, Homo sapiens
gatctgcttgcggtc

SEQ ID NO: 1096294 - DNA, 15 bp, Homo sapiens
agatctgcttgcggt

SEQ ID NO: 1096295 - DNA, 15 bp, Homo sapiens
tagatctgcttgcgg

SEQ ID NO: 1096296 - DNA, 15 bp, Homo sapiens
gtagatctgcttgcg

SEQ ID NO: 1096297 - DNA, 15 bp, Homo sapiens
tgtagatctgcttgc

SEQ ID NO: 1096298 - DNA, 15 bp, Homo sapiens
ttgtagatctgcttg

SEQ ID NO: 1096299 - DNA, 15 bp, Homo sapiens
gttgtagatctgctt

SEQ ID NO: 1096300 - DNA, 15 bp, Homo sapiens
tgttgtagatctgct

SEQ ID NO: 1096301 - DNA, 15 bp, Homo sapiens
atgttgtagatctgc

SEQ ID NO: 1096302 - DNA, 15 bp, Homo sapiens
gatgttgtagatctg

SEQ ID NO: 1096303 - DNA, 15 bp, Homo sapiens
ggatgttgtagatct

SEQ ID NO: 1096304 - DNA, 15 bp, Homo sapiens
aggatgttgtagatc

SEQ ID NO: 1096305 - DNA, 15 bp, Homo sapiens
caggatgttgtagat

SEQ ID NO: 1096306 - DNA, 15 bp, Homo sapiens
tcaggatgttgtaga

SEQ ID NO: 1096307 - DNA, 15 bp, Homo sapiens
ctcaggatgttgtag

SEQ ID NO: 1096308 - DNA, 15 bp, Homo sapiens
gctcaggatgttgta

SEQ ID NO: 1096309 - DNA, 15 bp, Homo sapiens
tgctcaggatgttgt

SEQ ID NO: 1096310 - DNA, 15 bp, Homo sapiens
gtgctcaggatgttg

SEQ ID NO: 1096311 - DNA, 15 bp, Homo sapiens
cgtgctcaggatgtt

SEQ ID NO: 1096312 - DNA, 15 bp, Homo sapiens
gcgtgctcaggatgt

SEQ ID NO: 1096313 - DNA, 15 bp, Homo sapiens
agcgtgctcaggatg

SEQ ID NO: 1096314 - DNA, 15 bp, Homo sapiens
cagcgtgctcaggat

SEQ ID NO: 1096315 - DNA, 15 bp, Homo sapiens
ccagcgtgctcagga

SEQ ID NO: 1096316 - DNA, 15 bp, Homo sapiens
cccagcgtgctcagg

SEQ ID NO: 1096317 - DNA, 15 bp, Homo sapiens
ccccagcgtgctcag

SEQ ID NO: 1096318 - DNA, 15 bp, Homo sapiens
gccccagcgtgctca

SEQ ID NO: 1096319 - DNA, 15 bp, Homo sapiens
agccccagcgtgctc

SEQ ID NO: 1096320 - DNA, 15 bp, Homo sapiens
cagccccagcgtgct

SEQ ID NO: 1096321 - DNA, 15 bp, Homo sapiens
gcagccccagcgtgc

SEQ ID NO: 1096322 - DNA, 15 bp, Homo sapiens
cgcagccccagcgtg

SEQ ID NO: 1096323 - DNA, 15 bp, Homo sapiens
tcgcagccccagcgt

SEQ ID NO: 1096324 - DNA, 15 bp, Homo sapiens
gtcgcagccccagcg

SEQ ID NO: 1096325 - DNA, 15 bp, Homo sapiens
ggtcgcagccccagc

SEQ ID NO: 1096326 - DNA, 15 bp, Homo sapiens
gggtcgcagccccag

SEQ ID NO: 1096327 - DNA, 15 bp, Homo sapiens
agggtcgcagcccca

SEQ ID NO: 1096328 - DNA, 15 bp, Homo sapiens
gagggtcgcagcccc

SEQ ID NO: 1096329 - DNA, 15 bp, Homo sapiens
cgagggtcgcagccc

SEQ ID NO: 1096330 - DNA, 15 bp, Homo sapiens
tcgagggtcgcagcc

SEQ ID NO: 1096331 - DNA, 15 bp, Homo sapiens
gtcgagggtcgcagc

SEQ ID NO: 1096332 - DNA, 15 bp, Homo sapiens
ggtcgagggtcgcag

SEQ ID NO: 1096333 - DNA, 15 bp, Homo sapiens
tggtcgagggtcgca

SEQ ID NO: 1096334 - DNA, 15 bp, Homo sapiens
gtggtcgagggtcgc

SEQ ID NO: 1096335 - DNA, 15 bp, Homo sapiens
ggtggtcgagggtcg

SEQ ID NO: 1096336 - DNA, 15 bp, Homo sapiens
cggtggtcgagggtc

SEQ ID NO: 1096337 - DNA, 15 bp, Homo sapiens
tcggtggtcgagggt

SEQ ID NO: 1096338 - DNA, 15 bp, Homo sapiens
gtcggtggtcgaggg

SEQ ID NO: 1096339 - DNA, 15 bp, Homo sapiens
agtcggtggtcgagg

SEQ ID NO: 1096340 - DNA, 15 bp, Homo sapiens
cagtcggtggtcgag

SEQ ID NO: 1096341 - DNA, 15 bp, Homo sapiens
gcagtcggtggtcga

SEQ ID NO: 1096342 - DNA, 15 bp, Homo sapiens
cgcagtcggtggtcg

SEQ ID NO: 1096343 - DNA, 15 bp, Homo sapiens
tcgcagtcggtggtc

SEQ ID NO: 1096344 - DNA, 15 bp, Homo sapiens
gtcgcagtcggtggt

SEQ ID NO: 1096345 - DNA, 15 bp, Homo sapiens
atgtcgcagtcggtg

SEQ ID NO: 1096346 - DNA, 15 bp, Homo sapiens
gatgtcgcagtcggt

SEQ ID NO: 1096347 - DNA, 15 bp, Homo sapiens
cgatgtcgcagtcgg

SEQ ID NO: 1096348 - DNA, 15 bp, Homo sapiens
acgatgtcgcagtcg

SEQ ID NO: 1096349 - DNA, 15 bp, Homo sapiens
cacgatgtcgcagtc

SEQ ID NO: 1096350 - DNA, 15 bp, Homo sapiens
gcacgatgtcgcagt

SEQ ID NO: 1096351 - DNA, 15 bp, Homo sapiens
cgcacgatgtcgcag

SEQ ID NO: 1096352 - DNA, 15 bp, Homo sapiens
gcgcacgatgtcgca

SEQ ID NO: 1096353 - DNA, 15 bp, Homo sapiens
ggcgcacgatgtcgc

SEQ ID NO: 1096354 - DNA, 15 bp, Homo sapiens
cggcgcacgatgtcg

SEQ ID NO: 1096355 - DNA, 15 bp, Homo sapiens
gcggcgcacgatgtc

SEQ ID NO: 1096356 - DNA, 15 bp, Homo sapiens
cgcggcgcacgatgt

SEQ ID NO: 1096357 - DNA, 15 bp, Homo sapiens
gcgcggcgcacgatg

SEQ ID NO: 1096358 - DNA, 15 bp, Homo sapiens
ggcgcggcgcacgat

SEQ ID NO: 1096359 - DNA, 15 bp, Homo sapiens
aggcgcggcgcacga

SEQ ID NO: 1096360 - DNA, 15 bp, Homo sapiens
caggcgcggcgcacg

SEQ ID NO: 1096361 - DNA, 15 bp, Homo sapiens
gcaggcgcggcgcac

SEQ ID NO: 1096362 - DNA, 15 bp, Homo sapiens
cgcaggcgcggcgca

SEQ ID NO: 1096363 - DNA, 15 bp, Homo sapiens
tcgcaggcgcggcgc

SEQ ID NO: 1096364 - DNA, 15 bp, Homo sapiens
ctcgcaggcgcggcg

SEQ ID NO: 1096365 - DNA, 15 bp, Homo sapiens
tctcgcaggcgcggc

SEQ ID NO: 1096366 - DNA, 15 bp, Homo sapiens
ctctcgcaggcgcgg

SEQ ID NO: 1096367 - DNA, 15 bp, Homo sapiens
gctctcgcaggcgcg

SEQ ID NO: 1096368 - DNA, 15 bp, Homo sapiens
cgctctcgcaggcgc

SEQ ID NO: 1096369 - DNA, 15 bp, Homo sapiens
acgctctcgcaggcg

SEQ ID NO: 1096370 - DNA, 15 bp, Homo sapiens
cacgctctcgcaggc

SEQ ID NO: 1096371 - DNA, 15 bp, Homo sapiens
acacgctctcgcagg

SEQ ID NO: 1096372 - DNA, 15 bp, Homo sapiens
gacacgctctcgcag

SEQ ID NO: 1096373 - DNA, 15 bp, Homo sapiens
agacacgctctcgca

SEQ ID NO: 1096374 - DNA, 15 bp, Homo sapiens
tagacacgctctcgc

SEQ ID NO: 1096375 - DNA, 15 bp, Homo sapiens
gtagacacgctctcg

SEQ ID NO: 1096376 - DNA, 15 bp, Homo sapiens
cgtagacacgctctc

SEQ ID NO: 1096377 - DNA, 15 bp, Homo sapiens
gcgtagacacgctct

SEQ ID NO: 1096378 - DNA, 15 bp, Homo sapiens
cgcgtagacacgctc

SEQ ID NO: 1096379 - DNA, 15 bp, Homo sapiens
gcgcgtagacacgct

SEQ ID NO: 1096380 - DNA, 15 bp, Homo sapiens
cgcgcgtagacacgc

SEQ ID NO: 1096381 - DNA, 15 bp, Homo sapiens
gcgcgcgtagacacg

SEQ ID NO: 1096382 - DNA, 15 bp, Homo sapiens
agcgcgcgtagacac

SEQ ID NO: 1096383 - DNA, 15 bp, Homo sapiens
cagcgcgcgtagaca

SEQ ID NO: 1096384 - DNA, 15 bp, Homo sapiens
gcagcgcgcgtagac

SEQ ID NO: 1096385 - DNA, 15 bp, Homo sapiens
cgcagcgcgcgtaga

SEQ ID NO: 1096386 - DNA, 15 bp, Homo sapiens
gcgcagcgcgcgtag

SEQ ID NO: 1096387 - DNA, 15 bp, Homo sapiens
tgcgcagcgcgcgta

SEQ ID NO: 1096388 - DNA, 15 bp, Homo sapiens
gtgcgcagcgcgcgt

SEQ ID NO: 1096389 - DNA, 15 bp, Homo sapiens
tgtgcgcagcgcgcg

SEQ ID NO: 1096390 - DNA, 15 bp, Homo sapiens
atgtgcgcagcgcgc

SEQ ID NO: 1096391 - DNA, 15 bp, Homo sapiens
catgtgcgcagcgcg

SEQ ID NO: 1096392 - DNA, 15 bp, Homo sapiens
acatgtgcgcagcgc

SEQ ID NO: 1096393 - DNA, 15 bp, Homo sapiens
cacatgtgcgcagcg

SEQ ID NO: 1096394 - DNA, 15 bp, Homo sapiens
gcacatgtgcgcagc

SEQ ID NO: 1096395 - DNA, 15 bp, Homo sapiens
agcacatgtgcgcag

SEQ ID NO: 1096396 - DNA, 15 bp, Homo sapiens
gagcacatgtgcgca

SEQ ID NO: 1096397 - DNA, 15 bp, Homo sapiens
cgagcacatgtgcgc

SEQ ID NO: 1096398 - DNA, 15 bp, Homo sapiens
ccgagcacatgtgcg

SEQ ID NO: 1096399 - DNA, 15 bp, Homo sapiens
gccgagcacatgtgc

SEQ ID NO: 1096400 - DNA, 15 bp, Homo sapiens
cgccgagcacatgtg

SEQ ID NO: 1096401 - DNA, 15 bp, Homo sapiens
ccgccgagcacatgt

SEQ ID NO: 1096402 - DNA, 15 bp, Homo sapiens
cccgccgagcacatg

SEQ ID NO: 1096403 - DNA, 15 bp, Homo sapiens
ccccgccgagcacat

SEQ ID NO: 1096404 - DNA, 15 bp, Homo sapiens
gccccgccgagcaca

SEQ ID NO: 1096405 - DNA, 15 bp, Homo sapiens
agccccgccgagcac

SEQ ID NO: 1096406 - DNA, 15 bp, Homo sapiens
cagccccgccgagca

SEQ ID NO: 1096407 - DNA, 15 bp, Homo sapiens
ccagccccgccgagc

SEQ ID NO: 1096408 - DNA, 15 bp, Homo sapiens
gccagccccgccgag

SEQ ID NO: 1096409 - DNA, 15 bp, Homo sapiens
cgccagccccgccga

SEQ ID NO: 1096410 - DNA, 15 bp, Homo sapiens
ccgccagccccgccg

SEQ ID NO: 1096411 - DNA, 15 bp, Homo sapiens
cccgccagccccgcc

SEQ ID NO: 1096412 - DNA, 15 bp, Homo sapiens
gcccgccagccccgc

SEQ ID NO: 1096413 - DNA, 15 bp, Homo sapiens
cgcccgccagccccg

SEQ ID NO: 1096414 - DNA, 15 bp, Homo sapiens
acgcccgccagcccc

SEQ ID NO: 1096415 - DNA, 15 bp, Homo sapiens
gacgcccgccagccc

SEQ ID NO: 1096416 - DNA, 15 bp, Homo sapiens
tgacgcccgccagcc

SEQ ID NO: 1096417 - DNA, 15 bp, Homo sapiens
atgacgcccgccagc

SEQ ID NO: 1096418 - DNA, 15 bp, Homo sapiens
gatgacgcccgccag

SEQ ID NO: 1096419 - DNA, 15 bp, Homo sapiens
tgatgacgcccgcca

SEQ ID NO: 1096420 - DNA, 15 bp, Homo sapiens
ttgatgacgcccgcc

SEQ ID NO: 1096421 - DNA, 15 bp, Homo sapiens
gttgatgacgcccgc

SEQ ID NO: 1096422 - DNA, 15 bp, Homo sapiens
ggttgatgacgcccg

SEQ ID NO: 1096423 - DNA, 15 bp, Homo sapiens
cggttgatgacgccc

SEQ ID NO: 1096424 - DNA, 15 bp, Homo sapiens
gcggttgatgacgcc

SEQ ID NO: 1096425 - DNA, 15 bp, Homo sapiens
tgcggttgatgacgc

SEQ ID NO: 1096426 - DNA, 15 bp, Homo sapiens
atgcggttgatgacg

SEQ ID NO: 1096427 - DNA, 15 bp, Homo sapiens
catgcggttgatgac

SEQ ID NO: 1096428 - DNA, 15 bp, Homo sapiens
gcatgcggttgatga

SEQ ID NO: 1096429 - DNA, 15 bp, Homo sapiens
cgcatgcggttgatg

SEQ ID NO: 1096430 - DNA, 15 bp, Homo sapiens
gcgcatgcggttgat

SEQ ID NO: 1096431 - DNA, 15 bp, Homo sapiens
cgcgcatgcggttga

SEQ ID NO: 1096432 - DNA, 15 bp, Homo sapiens
tcgcgcatgcggttg

SEQ ID NO: 1096433 - DNA, 15 bp, Homo sapiens
ctcgcgcatgcggtt

SEQ ID NO: 1096434 - DNA, 15 bp, Homo sapiens
tctcgcgcatgcggt

SEQ ID NO: 1096435 - DNA, 15 bp, Homo sapiens
ctctcgcgcatgcgg

SEQ ID NO: 1096436 - DNA, 15 bp, Homo sapiens
gctctcgcgcatgcg

SEQ ID NO: 1096437 - DNA, 15 bp, Homo sapiens
ggctctcgcgcatgc

SEQ ID NO: 1096438 - DNA, 15 bp, Homo sapiens
cggctctcgcgcatg

SEQ ID NO: 1096439 - DNA, 15 bp, Homo sapiens
gcggctctcgcgcat

SEQ ID NO: 1096440 - DNA, 15 bp, Homo sapiens
tgcggctctcgcgca

SEQ ID NO: 1096441 - DNA, 15 bp, Homo sapiens
ctgcggctctcgcgc

SEQ ID NO: 1096442 - DNA, 15 bp, Homo sapiens
gctgcggctctcgcg

SEQ ID NO: 1096443 - DNA, 15 bp, Homo sapiens
cgctgcggctctcgc

SEQ ID NO: 1096444 - DNA, 15 bp, Homo sapiens
tcgctgcggctctcg

SEQ ID NO: 1096445 - DNA, 15 bp, Homo sapiens
ctcgctgcggctctc

SEQ ID NO: 1096446 - DNA, 15 bp, Homo sapiens
cctcgctgcggctct

SEQ ID NO: 1096447 - DNA, 15 bp, Homo sapiens
tcctcgctgcggctc

SEQ ID NO: 1096448 - DNA, 15 bp, Homo sapiens
gtcctcgctgcggct

SEQ ID NO: 1096449 - DNA, 15 bp, Homo sapiens
cgtcctcgctgcggc

SEQ ID NO: 1096450 - DNA, 15 bp, Homo sapiens
acgtcctcgctgcgg

SEQ ID NO: 1096451 - DNA, 15 bp, Homo sapiens
tacgtcctcgctgcg

SEQ ID NO: 1096452 - DNA, 15 bp, Homo sapiens
ttacgtcctcgctgc

SEQ ID NO: 1096453 - DNA, 15 bp, Homo sapiens
attacgtcctcgctg

SEQ ID NO: 1096454 - DNA, 15 bp, Homo sapiens
cattacgtcctcgct

SEQ ID NO: 1096455 - DNA, 15 bp, Homo sapiens
gcattacgtcctcgc

SEQ ID NO: 1096456 - DNA, 15 bp, Homo sapiens
cgcattacgtcctcg

SEQ ID NO: 1096457 - DNA, 15 bp, Homo sapiens
gcgcattacgtcctc

SEQ ID NO: 1096458 - DNA, 15 bp, Homo sapiens
tgcgcattacgtcct

SEQ ID NO: 1096459 - DNA, 15 bp, Homo sapiens
atgcgcattacgtcc

SEQ ID NO: 1096460 - DNA, 15 bp, Homo sapiens
gatgcgcattacgtc

SEQ ID NO: 1096461 - DNA, 15 bp, Homo sapiens
tgatgcgcattacgt

SEQ ID NO: 1096462 - DNA, 15 bp, Homo sapiens
gtgatgcgcattacg

SEQ ID NO: 1096463 - DNA, 15 bp, Homo sapiens
agtgatgcgcattac

SEQ ID NO: 1096464 - DNA, 15 bp, Homo sapiens
cagtgatgcgcatta

SEQ ID NO: 1096465 - DNA, 15 bp, Homo sapiens
acagtgatgcgcatt

SEQ ID NO: 1096466 - DNA, 15 bp, Homo sapiens
cacagtgatgcgcat

SEQ ID NO: 1096467 - DNA, 15 bp, Homo sapiens
ccacagtgatgcgca

SEQ ID NO: 1096468 - DNA, 15 bp, Homo sapiens
cccacagtgatgcgc

SEQ ID NO: 1096469 - DNA, 15 bp, Homo sapiens
gcccacagtgatgcg

SEQ ID NO: 1096470 - DNA, 15 bp, Homo sapiens
cgcccacagtgatgc

SEQ ID NO: 1096471 - DNA, 15 bp, Homo sapiens
acgcccacagtgatg

SEQ ID NO: 1096472 - DNA, 15 bp, Homo sapiens
cacgcccacagtgat

SEQ ID NO: 1096473 - DNA, 15 bp, Homo sapiens
ccacgcccacagtga

SEQ ID NO: 1096474 - DNA, 15 bp, Homo sapiens
tccacgcccacagtg

SEQ ID NO: 1096475 - DNA, 15 bp, Homo sapiens
atccacgcccacagt

SEQ ID NO: 1096476 - DNA, 15 bp, Homo sapiens
catccacgcccacag

SEQ ID NO: 1096477 - DNA, 15 bp, Homo sapiens
ccatccacgcccaca

SEQ ID NO: 1096478 - DNA, 15 bp, Homo sapiens
gccatccacgcccac

SEQ ID NO: 1096479 - DNA, 15 bp, Homo sapiens
agccatccacgccca

SEQ ID NO: 1096480 - DNA, 15 bp, Homo sapiens
gagccatccacgccc

SEQ ID NO: 1096481 - DNA, 15 bp, Homo sapiens
ggagccatccacgcc

SEQ ID NO: 1096482 - DNA, 15 bp, Homo sapiens
cggagccatccacgc

SEQ ID NO: 1096483 - DNA, 15 bp, Homo sapiens
acggagccatccacg

SEQ ID NO: 1096484 - DNA, 15 bp, Homo sapiens
cacggagccatccac

SEQ ID NO: 1096485 - DNA, 15 bp, Homo sapiens
acacggagccatcca

SEQ ID NO: 1096486 - DNA, 15 bp, Homo sapiens
tacacggagccatcc

SEQ ID NO: 1096487 - DNA, 15 bp, Homo sapiens
gtacacggagccatc

SEQ ID NO: 1096488 - DNA, 15 bp, Homo sapiens
tgtacacggagccat

SEQ ID NO: 1096489 - DNA, 15 bp, Homo sapiens
ttgtacacggagcca

SEQ ID NO: 1096490 - DNA, 15 bp, Homo sapiens
cttgtacacggagcc

SEQ ID NO: 1096491 - DNA, 15 bp, Homo sapiens
gcttgtacacggagc

SEQ ID NO: 1096492 - DNA, 15 bp, Homo sapiens
agcttgtacacggag

SEQ ID NO: 1096493 - DNA, 15 bp, Homo sapiens
cagcttgtacacgga

SEQ ID NO: 1096494 - DNA, 15 bp, Homo sapiens
gcagcttgtacacgg

SEQ ID NO: 1096495 - DNA, 15 bp, Homo sapiens
tgcagcttgtacacg

SEQ ID NO: 1096496 - DNA, 15 bp, Homo sapiens
gtgcagcttgtacac

SEQ ID NO: 1096497 - DNA, 15 bp, Homo sapiens
ggtgcagcttgtaca

SEQ ID NO: 1096498 - DNA, 15 bp, Homo sapiens
gggtgcagcttgtac

SEQ ID NO: 1096499 - DNA, 15 bp, Homo sapiens
ggggtgcagcttgta

SEQ ID NO: 1096500 - DNA, 15 bp, Homo sapiens
tggggtgcagcttgt

SEQ ID NO: 1096501 - DNA, 15 bp, Homo sapiens
ctggggtgcagcttg

SEQ ID NO: 1096502 - DNA, 15 bp, Homo sapiens
cctggggtgcagctt

SEQ ID NO: 1096503 - DNA, 15 bp, Homo sapiens
acctggggtgcagct

SEQ ID NO: 1096504 - DNA, 15 bp, Homo sapiens
cacctggggtgcagc

SEQ ID NO: 1096505 - DNA, 15 bp, Homo sapiens
tcacctggggtgcag

SEQ ID NO: 1096506 - DNA, 15 bp, Homo sapiens
ctcacctggggtgca

SEQ ID NO: 1096507 - DNA, 15 bp, Homo sapiens
gctcacctggggtgc

SEQ ID NO: 1096508 - DNA, 15 bp, Homo sapiens
ggctcacctggggtg

SEQ ID NO: 1096509 - DNA, 15 bp, Homo sapiens
gggctcacctggggt

SEQ ID NO: 1096510 - DNA, 15 bp, Homo sapiens
cgggctcacctgggg

SEQ ID NO: 1096511 - DNA, 15 bp, Homo sapiens
gcgggctcacctggg

SEQ ID NO: 1096512 - DNA, 15 bp, Homo sapiens
cggggcgggctcacc

SEQ ID NO: 1096513 - DNA, 15 bp, Homo sapiens
gcggggcgggctcac

SEQ ID NO: 1096514 - DNA, 15 bp, Homo sapiens
agcggggcgggctca

SEQ ID NO: 1096515 - DNA, 15 bp, Homo sapiens
gagcggggcgggctc

SEQ ID NO: 1096516 - DNA, 15 bp, Homo sapiens
agagcggggcgggct

SEQ ID NO: 1096517 - DNA, 15 bp, Homo sapiens
gagagcggggcgggc

SEQ ID NO: 1096518 - DNA, 15 bp, Homo sapiens
agagagcggggcggg

SEQ ID NO: 1096519 - DNA, 15 bp, Homo sapiens
gagagagcggggcgg

SEQ ID NO: 1096520 - DNA, 15 bp, Homo sapiens
ggagagagcggggcg

SEQ ID NO: 1096521 - DNA, 15 bp, Homo sapiens
gggagagagcggggc

SEQ ID NO: 1096522 - DNA, 15 bp, Homo sapiens
agggagagagcgggg

SEQ ID NO: 1096523 - DNA, 15 bp, Homo sapiens
cagggagagagcggg

SEQ ID NO: 1096524 - DNA, 15 bp, Homo sapiens
ccagggagagagcgg

SEQ ID NO: 1096525 - DNA, 15 bp, Homo sapiens
accagggagagagcg

SEQ ID NO: 1096526 - DNA, 15 bp, Homo sapiens
taccagggagagagc

SEQ ID NO: 1096527 - DNA, 15 bp, Homo sapiens
ttaccagggagagag

SEQ ID NO: 1096528 - DNA, 15 bp, Homo sapiens
tttaccagggagaga

SEQ ID NO: 1096529 - DNA, 15 bp, Homo sapiens
ctttaccagggagag

SEQ ID NO: 1096530 - DNA, 15 bp, Homo sapiens
actttaccagggaga

SEQ ID NO: 1096531 - DNA, 15 bp, Homo sapiens
cactttaccagggag

SEQ ID NO: 1096532 - DNA, 15 bp, Homo sapiens
ccactttaccaggga

SEQ ID NO: 1096533 - DNA, 15 bp, Homo sapiens
cccactttaccaggg

SEQ ID NO: 1096534 - DNA, 15 bp, Homo sapiens
ccccactttaccagg

SEQ ID NO: 1096535 - DNA, 15 bp, Homo sapiens
gccccactttaccag

SEQ ID NO: 1096536 - DNA, 15 bp, Homo sapiens
ggccccactttacca

SEQ ID NO: 1096537 - DNA, 15 bp, Homo sapiens
gggccccactttacc

SEQ ID NO: 1096538 - DNA, 15 bp, Homo sapiens
tgggccccactttac

SEQ ID NO: 1096539 - DNA, 15 bp, Homo sapiens
ttgggccccacttta

SEQ ID NO: 1096540 - DNA, 15 bp, Homo sapiens
tttgggccccacttt

SEQ ID NO: 1096541 - DNA, 15 bp, Homo sapiens
ttttgggccccactt

SEQ ID NO: 1096542 - DNA, 15 bp, Homo sapiens
tttttgggccccact

SEQ ID NO: 1096543 - DNA, 15 bp, Homo sapiens
ctttttgggccccac

SEQ ID NO: 1096544 - DNA, 15 bp, Homo sapiens
gctttttgggcccca

SEQ ID NO: 1096545 - DNA, 15 bp, Homo sapiens
cgctttttgggcccc

SEQ ID NO: 1096546 - DNA, 15 bp, Homo sapiens
gcgctttttgggccc

SEQ ID NO: 1096547 - DNA, 15 bp, Homo sapiens
cgcgctttttgggcc

SEQ ID NO: 1096548 - DNA, 15 bp, Homo sapiens
gcgcgctttttgggc

SEQ ID NO: 1096549 - DNA, 15 bp, Homo sapiens
cgcgcgctttttggg

SEQ ID NO: 1096550 - DNA, 15 bp, Homo sapiens
gcgcgcgctttttgg

SEQ ID NO: 1096551 - DNA, 15 bp, Homo sapiens
agcgcgcgctttttg

SEQ ID NO: 1096552 - DNA, 15 bp, Homo sapiens
gagcgcgcgcttttt

SEQ ID NO: 1096553 - DNA, 15 bp, Homo sapiens
ggagcgcgcgctttt

SEQ ID NO: 1096554 - DNA, 15 bp, Homo sapiens
tggagcgcgcgcttt

SEQ ID NO: 1096555 - DNA, 15 bp, Homo sapiens
ttggagcgcgcgctt

SEQ ID NO: 1096556 - DNA, 15 bp, Homo sapiens
cttggagcgcgcgct

SEQ ID NO: 1096557 - DNA, 15 bp, Homo sapiens
ccttggagcgcgcgc

SEQ ID NO: 1096558 - DNA, 15 bp, Homo sapiens
accttggagcgcgcg

SEQ ID NO: 1096559 - DNA, 15 bp, Homo sapiens
aaccttggagcgcgc

SEQ ID NO: 1096560 - DNA, 15 bp, Homo sapiens
gaaccttggagcgcg

SEQ ID NO: 1096561 - DNA, 15 bp, Homo sapiens
ggaaccttggagcgc

SEQ ID NO: 1096562 - DNA, 15 bp, Homo sapiens
aggaaccttggagcg

SEQ ID NO: 1096563 - DNA, 15 bp, Homo sapiens
aaggaaccttggagc

SEQ ID NO: 1096564 - DNA, 15 bp, Homo sapiens
caaggaaccttggag

SEQ ID NO: 1096565 - DNA, 15 bp, Homo sapiens
gcaaggaaccttgga

SEQ ID NO: 1096566 - DNA, 15 bp, Homo sapiens
cgcaaggaaccttgg

SEQ ID NO: 1096567 - DNA, 15 bp, Homo sapiens
ccgcaaggaaccttg

SEQ ID NO: 1096568 - DNA, 15 bp, Homo sapiens
accgcaaggaacctt

SEQ ID NO: 1096569 - DNA, 15 bp, Homo sapiens
aaccgcaaggaacct

SEQ ID NO: 1096570 - DNA, 15 bp, Homo sapiens
gaaccgcaaggaacc

SEQ ID NO: 1096571 - DNA, 15 bp, Homo sapiens
ggaaccgcaaggaac

SEQ ID NO: 1096572 - DNA, 15 bp, Homo sapiens
gggaaccgcaaggaa

SEQ ID NO: 1096573 - DNA, 15 bp, Homo sapiens
tgggaaccgcaagga

SEQ ID NO: 1096574 - DNA, 15 bp, Homo sapiens
ttgggaaccgcaagg

SEQ ID NO: 1096575 - DNA, 15 bp, Homo sapiens
cttgggaaccgcaag

SEQ ID NO: 1096576 - DNA, 15 bp, Homo sapiens
gcttgggaaccgcaa

SEQ ID NO: 1096577 - DNA, 15 bp, Homo sapiens
agcttgggaaccgca

SEQ ID NO: 1096578 - DNA, 15 bp, Homo sapiens
gagcttgggaaccgc

SEQ ID NO: 1096579 - DNA, 15 bp, Homo sapiens
ggagcttgggaaccg

SEQ ID NO: 1096580 - DNA, 15 bp, Homo sapiens
tggagcttgggaacc

SEQ ID NO: 1096581 - DNA, 15 bp, Homo sapiens
ttggagcttgggaac

SEQ ID NO: 1096582 - DNA, 15 bp, Homo sapiens
cttggagcttgggaa

SEQ ID NO: 1096583 - DNA, 15 bp, Homo sapiens
tcttggagcttggga

SEQ ID NO: 1096584 - DNA, 15 bp, Homo sapiens
atcttggagcttggg

SEQ ID NO: 1096585 - DNA, 15 bp, Homo sapiens
aatcttggagcttgg

SEQ ID NO: 1096586 - DNA, 15 bp, Homo sapiens
aaatcttggagcttg

SEQ ID NO: 1096587 - DNA, 15 bp, Homo sapiens
gaaatcttggagctt

SEQ ID NO: 1096588 - DNA, 15 bp, Homo sapiens
cgaaatcttggagct

SEQ ID NO: 1096589 - DNA, 15 bp, Homo sapiens
acgaaatcttggagc

SEQ ID NO: 1096590 - DNA, 15 bp, Homo sapiens
tacgaaatcttggag

SEQ ID NO: 1096591 - DNA, 15 bp, Homo sapiens
ctacgaaatcttgga

SEQ ID NO: 1096592 - DNA, 15 bp, Homo sapiens
actacgaaatcttgg

SEQ ID NO: 1096593 - DNA, 15 bp, Homo sapiens
gactacgaaatcttg

SEQ ID NO: 1096594 - DNA, 15 bp, Homo sapiens
ggactacgaaatctt

SEQ ID NO: 1096595 - DNA, 15 bp, Homo sapiens
aggactacgaaatct

SEQ ID NO: 1096596 - DNA, 15 bp, Homo sapiens
gaggactacgaaatc

SEQ ID NO: 1096597 - DNA, 15 bp, Homo sapiens
agaggactacgaaat

SEQ ID NO: 1096598 - DNA, 15 bp, Homo sapiens
aagaggactacgaaa

SEQ ID NO: 1096599 - DNA, 15 bp, Homo sapiens
gaagaggactacgaa

SEQ ID NO: 1096600 - DNA, 15 bp, Homo sapiens
agaagaggactacga

SEQ ID NO: 1096601 - DNA, 15 bp, Homo sapiens
gagaagaggactacg

SEQ ID NO: 1096602 - DNA, 15 bp, Homo sapiens
cgagaagaggactac

SEQ ID NO: 1096603 - DNA, 15 bp, Homo sapiens
acgagaagaggacta

SEQ ID NO: 1096604 - DNA, 15 bp, Homo sapiens
gacgagaagaggact

SEQ ID NO: 1096605 - DNA, 15 bp, Homo sapiens
ggacgagaagaggac

SEQ ID NO: 1096606 - DNA, 15 bp, Homo sapiens
gggacgagaagagga

SEQ ID NO: 1096607 - DNA, 15 bp, Homo sapiens
ggggacgagaagagg

SEQ ID NO: 1096608 - DNA, 15 bp, Homo sapiens
gggggacgagaagag

SEQ ID NO: 1096609 - DNA, 15 bp, Homo sapiens
agggggacgagaaga

SEQ ID NO: 1096610 - DNA, 15 bp, Homo sapiens
aagggggacgagaag

SEQ ID NO: 1096611 - DNA, 15 bp, Homo sapiens
caagggggacgagaa

SEQ ID NO: 1096612 - DNA, 15 bp, Homo sapiens
ccaagggggacgaga

SEQ ID NO: 1096613 - DNA, 15 bp, Homo sapiens
gccaagggggacgag

SEQ ID NO: 1096614 - DNA, 15 bp, Homo sapiens
ggccaagggggacga

SEQ ID NO: 1096615 - DNA, 15 bp, Homo sapiens
aggccaagggggacg

SEQ ID NO: 1096616 - DNA, 15 bp, Homo sapiens
taggccaagggggac

SEQ ID NO: 1096617 - DNA, 15 bp, Homo sapiens
ctaggccaaggggga

SEQ ID NO: 1096618 - DNA, 15 bp, Homo sapiens
tctaggccaaggggg

SEQ ID NO: 1096619 - DNA, 15 bp, Homo sapiens
atctaggccaagggg

SEQ ID NO: 1096620 - DNA, 15 bp, Homo sapiens
aatctaggccaaggg

SEQ ID NO: 1096621 - DNA, 15 bp, Homo sapiens
aaatctaggccaagg

SEQ ID NO: 1096622 - DNA, 15 bp, Homo sapiens
caaatctaggccaag

SEQ ID NO: 1096623 - DNA, 15 bp, Homo sapiens
ccaaatctaggccaa

SEQ ID NO: 1096624 - DNA, 15 bp, Homo sapiens
cccaaatctaggcca

SEQ ID NO: 1096625 - DNA, 15 bp, Homo sapiens
ccccaaatctaggcc

SEQ ID NO: 1096626 - DNA, 15 bp, Homo sapiens
cccccaaatctaggc

SEQ ID NO: 1096627 - DNA, 15 bp, Homo sapiens
tcccccaaatctagg

SEQ ID NO: 1096628 - DNA, 15 bp, Homo sapiens
ttcccccaaatctag

SEQ ID NO: 1096629 - DNA, 15 bp, Homo sapiens
cttcccccaaatcta

SEQ ID NO: 1096630 - DNA, 15 bp, Homo sapiens
ccttcccccaaatct

SEQ ID NO: 1096631 - DNA, 15 bp, Homo sapiens
cccttcccccaaatc

SEQ ID NO: 1096632 - DNA, 15 bp, Homo sapiens
acccttcccccaaat

SEQ ID NO: 1096633 - DNA, 15 bp, Homo sapiens
gacccttcccccaaa

SEQ ID NO: 1096634 - DNA, 15 bp, Homo sapiens
cgacccttcccccaa

SEQ ID NO: 1096635 - DNA, 15 bp, Homo sapiens
tcgacccttccccca

SEQ ID NO: 1096636 - DNA, 15 bp, Homo sapiens
gtcgacccttccccc

SEQ ID NO: 1096637 - DNA, 15 bp, Homo sapiens
agtcgacccttcccc

SEQ ID NO: 1096638 - DNA, 15 bp, Homo sapiens
cagtcgacccttccc

SEQ ID NO: 1096639 - DNA, 15 bp, Homo sapiens
gcagtcgacccttcc

SEQ ID NO: 1096640 - DNA, 15 bp, Homo sapiens
cgcagtcgacccttc

SEQ ID NO: 1096641 - DNA, 15 bp, Homo sapiens
acgcagtcgaccctt

SEQ ID NO: 1096642 - DNA, 15 bp, Homo sapiens
cacgcagtcgaccct

SEQ ID NO: 1096643 - DNA, 15 bp, Homo sapiens
gcacgcagtcgaccc

SEQ ID NO: 1096644 - DNA, 15 bp, Homo sapiens
tgcacgcagtcgacc

SEQ ID NO: 1096645 - DNA, 15 bp, Homo sapiens
ctgcacgcagtcgac

SEQ ID NO: 1096646 - DNA, 15 bp, Homo sapiens
cctgcacgcagtcga

SEQ ID NO: 1096647 - DNA, 15 bp, Homo sapiens
ccctgcacgcagtcg

SEQ ID NO: 1096648 - DNA, 15 bp, Homo sapiens
gccctgcacgcagtc

SEQ ID NO: 1096649 - DNA, 15 bp, Homo sapiens
cgccctgcacgcagt

SEQ ID NO: 1096650 - DNA, 15 bp, Homo sapiens
gcgccctgcacgcag

SEQ ID NO: 1096651 - DNA, 15 bp, Homo sapiens
ggcgccctgcacgca

SEQ ID NO: 1096652 - DNA, 15 bp, Homo sapiens
gggcgccctgcacgc

SEQ ID NO: 1096653 - DNA, 15 bp, Homo sapiens
cgggcgccctgcacg

SEQ ID NO: 1096654 - DNA, 15 bp, Homo sapiens
ccgggcgccctgcac

SEQ ID NO: 1096655 - DNA, 15 bp, Homo sapiens
accgggcgccctgca

SEQ ID NO: 1096656 - DNA, 15 bp, Homo sapiens
taccgggcgccctgc

SEQ ID NO: 1096657 - DNA, 15 bp, Homo sapiens
ttaccgggcgccctg

SEQ ID NO: 1096658 - DNA, 15 bp, Homo sapiens
attaccgggcgccct

SEQ ID NO: 1096659 - DNA, 15 bp, Homo sapiens
cattaccgggcgccc

SEQ ID NO: 1096660 - DNA, 15 bp, Homo sapiens
tcattaccgggcgcc

SEQ ID NO: 1096661 - DNA, 15 bp, Homo sapiens
ttcattaccgggcgc

SEQ ID NO: 1096662 - DNA, 15 bp, Homo sapiens
attcattaccgggcg

SEQ ID NO: 1096663 - DNA, 15 bp, Homo sapiens
cattcattaccgggc

SEQ ID NO: 1096664 - DNA, 15 bp, Homo sapiens
acattcattaccggg

SEQ ID NO: 1096665 - DNA, 15 bp, Homo sapiens
cacattcattaccgg

SEQ ID NO: 1096666 - DNA, 15 bp, Homo sapiens
ccacattcattaccg

SEQ ID NO: 1096667 - DNA, 15 bp, Homo sapiens
tccacattcattacc

SEQ ID NO: 1096668 - DNA, 15 bp, Homo sapiens
ctccacattcattac

SEQ ID NO: 1096669 - DNA, 15 bp, Homo sapiens
cctccacattcatta

SEQ ID NO: 1096670 - DNA, 15 bp, Homo sapiens
tcctccacattcatt

SEQ ID NO: 1096671 - DNA, 15 bp, Homo sapiens
atcctccacattcat

SEQ ID NO: 1096672 - DNA, 15 bp, Homo sapiens
catcctccacattca

SEQ ID NO: 1096673 - DNA, 15 bp, Homo sapiens
tcatcctccacattc

SEQ ID NO: 1096674 - DNA, 15 bp, Homo sapiens
ctcatcctccacatt

SEQ ID NO: 1096675 - DNA, 15 bp, Homo sapiens
cctcatcctccacat

SEQ ID NO: 1096676 - DNA, 15 bp, Homo sapiens
acctcatcctccaca

SEQ ID NO: 1096677 - DNA, 15 bp, Homo sapiens
cacctcatcctccac

SEQ ID NO: 1096678 - DNA, 15 bp, Homo sapiens
ccacctcatcctcca

SEQ ID NO: 1096679 - DNA, 15 bp, Homo sapiens
cccacctcatcctcc

SEQ ID NO: 1096680 - DNA, 15 bp, Homo sapiens
tcccacctcatcctc

SEQ ID NO: 1096681 - DNA, 15 bp, Homo sapiens
ctcccacctcatcct

SEQ ID NO: 1096682 - DNA, 15 bp, Homo sapiens
cctcccacctcatcc

SEQ ID NO: 1096683 - DNA, 15 bp, Homo sapiens
tcctcccacctcatc

SEQ ID NO: 1096684 - DNA, 15 bp, Homo sapiens
ctcctcccacctcat

SEQ ID NO: 1096685 - DNA, 15 bp, Homo sapiens
cctcctcccacctca

SEQ ID NO: 1096686 - DNA, 15 bp, Homo sapiens
ccctcctcccacctc

SEQ ID NO: 1096687 - DNA, 15 bp, Homo sapiens
tccctcctcccacct

SEQ ID NO: 1096688 - DNA, 15 bp, Homo sapiens
gtccctcctcccacc

SEQ ID NO: 1096689 - DNA, 15 bp, Homo sapiens
cgtccctcctcccac

SEQ ID NO: 1096690 - DNA, 15 bp, Homo sapiens
ccgtccctcctccca

SEQ ID NO: 1096691 - DNA, 15 bp, Homo sapiens
gccgtccctcctccc

SEQ ID NO: 1096692 - DNA, 15 bp, Homo sapiens
tgccgtccctcctcc

SEQ ID NO: 1096693 - DNA, 15 bp, Homo sapiens
ctgccgtccctcctc

SEQ ID NO: 1096694 - DNA, 15 bp, Homo sapiens
gctgccgtccctcct

SEQ ID NO: 1096695 - DNA, 15 bp, Homo sapiens
ggctgccgtccctcc

SEQ ID NO: 1096696 - DNA, 15 bp, Homo sapiens
gggctgccgtccctc

SEQ ID NO: 1096697 - DNA, 15 bp, Homo sapiens
agggctgccgtccct

SEQ ID NO: 1096698 - DNA, 15 bp, Homo sapiens
cagggctgccgtccc

SEQ ID NO: 1096699 - DNA, 15 bp, Homo sapiens
gcagggctgccgtcc

SEQ ID NO: 1096700 - DNA, 15 bp, Homo sapiens
agcagggctgccgtc

SEQ ID NO: 1096701 - DNA, 15 bp, Homo sapiens
aagcagggctgccgt

SEQ ID NO: 1096702 - DNA, 15 bp, Homo sapiens
gaagcagggctgccg

SEQ ID NO: 1096703 - DNA, 15 bp, Homo sapiens
agaagcagggctgcc

SEQ ID NO: 1096704 - DNA, 15 bp, Homo sapiens
gagaagcagggctgc

SEQ ID NO: 1096705 - DNA, 15 bp, Homo sapiens
agagaagcagggctg

SEQ ID NO: 1096706 - DNA, 15 bp, Homo sapiens
aagagaagcagggct

SEQ ID NO: 1096707 - DNA, 15 bp, Homo sapiens
gaagagaagcagggc

SEQ ID NO: 1096708 - DNA, 15 bp, Homo sapiens
agaagagaagcaggg

SEQ ID NO: 1096709 - DNA, 15 bp, Homo sapiens
cagaagagaagcagg

SEQ ID NO: 1096710 - DNA, 15 bp, Homo sapiens
gcagaagagaagcag

SEQ ID NO: 1096711 - DNA, 15 bp, Homo sapiens
ggcagaagagaagca

SEQ ID NO: 1096712 - DNA, 15 bp, Homo sapiens
gggcagaagagaagc

SEQ ID NO: 1096713 - DNA, 15 bp, Homo sapiens
tgggcagaagagaag

SEQ ID NO: 1096714 - DNA, 15 bp, Homo sapiens
ctgggcagaagagaa

SEQ ID NO: 1096715 - DNA, 15 bp, Homo sapiens
gctgggcagaagaga

SEQ ID NO: 1096716 - DNA, 15 bp, Homo sapiens
agctgggcagaagag

SEQ ID NO: 1096717 - DNA, 15 bp, Homo sapiens
aagctgggcagaaga

SEQ ID NO: 1096718 - DNA, 15 bp, Homo sapiens
gaagctgggcagaag

SEQ ID NO: 1096719 - DNA, 15 bp, Homo sapiens
tgaagctgggcagaa

SEQ ID NO: 1096720 - DNA, 15 bp, Homo sapiens
ttgaagctgggcaga

SEQ ID NO: 1096721 - DNA, 15 bp, Homo sapiens
cttgaagctgggcag

SEQ ID NO: 1096722 - DNA, 15 bp, Homo sapiens
ccttgaagctgggca

SEQ ID NO: 1096723 - DNA, 15 bp, Homo sapiens
tccttgaagctgggc

SEQ ID NO: 1096724 - DNA, 15 bp, Homo sapiens
ctccttgaagctggg

SEQ ID NO: 1096725 - DNA, 15 bp, Homo sapiens
gctccttgaagctgg

SEQ ID NO: 1096726 - DNA, 15 bp, Homo sapiens
cgctccttgaagctg

SEQ ID NO: 1096727 - DNA, 15 bp, Homo sapiens
ccgctccttgaagct

SEQ ID NO: 1096728 - DNA, 15 bp, Homo sapiens
accgctccttgaagc

SEQ ID NO: 1096729 - DNA, 15 bp, Homo sapiens
aaccgctccttgaag

SEQ ID NO: 1096730 - DNA, 15 bp, Homo sapiens
gaaccgctccttgaa

SEQ ID NO: 1096731 - DNA, 15 bp, Homo sapiens
ggaaccgctccttga

SEQ ID NO: 1096732 - DNA, 15 bp, Homo sapiens
tggaaccgctccttg

SEQ ID NO: 1096733 - DNA, 15 bp, Homo sapiens
atggaaccgctcctt

SEQ ID NO: 1096734 - DNA, 15 bp, Homo sapiens
catggaaccgctcct

SEQ ID NO: 1096735 - DNA, 15 bp, Homo sapiens
gcatggaaccgctcc

SEQ ID NO: 1096736 - DNA, 15 bp, Homo sapiens
ggcatggaaccgctc

SEQ ID NO: 1096737 - DNA, 15 bp, Homo sapiens
tggcatggaaccgct

SEQ ID NO: 1096738 - DNA, 15 bp, Homo sapiens
ctggcatggaaccgc

SEQ ID NO: 1096739 - DNA, 15 bp, Homo sapiens
gctggcatggaaccg

SEQ ID NO: 1096740 - DNA, 15 bp, Homo sapiens
cgctggcatggaacc

SEQ ID NO: 1096741 - DNA, 15 bp, Homo sapiens
acgctggcatggaac

SEQ ID NO: 1096742 - DNA, 15 bp, Homo sapiens
cacgctggcatggaa

SEQ ID NO: 1096743 - DNA, 15 bp, Homo sapiens
gcacgctggcatgga

SEQ ID NO: 1096744 - DNA, 15 bp, Homo sapiens
cgcacgctggcatgg

SEQ ID NO: 1096745 - DNA, 15 bp, Homo sapiens
gcgcacgctggcatg

SEQ ID NO: 1096746 - DNA, 15 bp, Homo sapiens
tgcgcacgctggcat

SEQ ID NO: 1096747 - DNA, 15 bp, Homo sapiens
ctgcgcacgctggca

SEQ ID NO: 1096748 - DNA, 15 bp, Homo sapiens
cctgcgcacgctggc

SEQ ID NO: 1096749 - DNA, 15 bp, Homo sapiens
gcctgcgcacgctgg

SEQ ID NO: 1096750 - DNA, 15 bp, Homo sapiens
agcctgcgcacgctg

SEQ ID NO: 1096751 - DNA, 15 bp, Homo sapiens
cagcctgcgcacgct

SEQ ID NO: 1096752 - DNA, 15 bp, Homo sapiens
tcagcctgcgcacgc

SEQ ID NO: 1096753 - DNA, 15 bp, Homo sapiens
gtcagcctgcgcacg

SEQ ID NO: 1096754 - DNA, 15 bp, Homo sapiens
cgtcagcctgcgcac

SEQ ID NO: 1096755 - DNA, 15 bp, Homo sapiens
gcgtcagcctgcgca

SEQ ID NO: 1096756 - DNA, 15 bp, Homo sapiens
ggcgtcagcctgcgc

SEQ ID NO: 1096757 - DNA, 15 bp, Homo sapiens
gggcgtcagcctgcg

SEQ ID NO: 1096758 - DNA, 15 bp, Homo sapiens
tgggcgtcagcctgc

SEQ ID NO: 1096759 - DNA, 15 bp, Homo sapiens
ctgggcgtcagcctg

SEQ ID NO: 1096760 - DNA, 15 bp, Homo sapiens
gctgggcgtcagcct

SEQ ID NO: 1096761 - DNA, 15 bp, Homo sapiens
agctgggcgtcagcc

SEQ ID NO: 1096762 - DNA, 15 bp, Homo sapiens
cagctgggcgtcagc

SEQ ID NO: 1096763 - DNA, 15 bp, Homo sapiens
gcagctgggcgtcag

SEQ ID NO: 1096764 - DNA, 15 bp, Homo sapiens
cgcagctgggcgtca

SEQ ID NO: 1096765 - DNA, 15 bp, Homo sapiens
tcgcagctgggcgtc

SEQ ID NO: 1096766 - DNA, 15 bp, Homo sapiens
ctcgcagctgggcgt

SEQ ID NO: 1096767 - DNA, 15 bp, Homo sapiens
tctcgcagctgggcg

SEQ ID NO: 1096768 - DNA, 15 bp, Homo sapiens
atctcgcagctgggc

SEQ ID NO: 1096769 - DNA, 15 bp, Homo sapiens
gatctcgcagctggg

SEQ ID NO: 1096770 - DNA, 15 bp, Homo sapiens
tgatctcgcagctgg

SEQ ID NO: 1096771 - DNA, 15 bp, Homo sapiens
gtgatctcgcagctg

SEQ ID NO: 1096772 - DNA, 15 bp, Homo sapiens
ggtgatctcgcagct

SEQ ID NO: 1096773 - DNA, 15 bp, Homo sapiens
aggtgatctcgcagc

SEQ ID NO: 1096774 - DNA, 15 bp, Homo sapiens
aaggtgatctcgcag

SEQ ID NO: 1096775 - DNA, 15 bp, Homo sapiens
gaaggtgatctcgca

SEQ ID NO: 1096776 - DNA, 15 bp, Homo sapiens
tgaaggtgatctcgc

SEQ ID NO: 1096777 - DNA, 15 bp, Homo sapiens
atgaaggtgatctcg

SEQ ID NO: 1096778 - DNA, 15 bp, Homo sapiens
gatgaaggtgatctc

SEQ ID NO: 1096779 - DNA, 15 bp, Homo sapiens
cgatgaaggtgatct

SEQ ID NO: 1096780 - DNA, 15 bp, Homo sapiens
tcgatgaaggtgatc

SEQ ID NO: 1096781 - DNA, 15 bp, Homo sapiens
ctcgatgaaggtgat

SEQ ID NO: 1096782 - DNA, 15 bp, Homo sapiens
actcgatgaaggtga

SEQ ID NO: 1096783 - DNA, 15 bp, Homo sapiens
gactcgatgaaggtg

SEQ ID NO: 1096784 - DNA, 15 bp, Homo sapiens
cgactcgatgaaggt

SEQ ID NO: 1096785 - DNA, 15 bp, Homo sapiens
ccgactcgatgaagg

SEQ ID NO: 1096786 - DNA, 15 bp, Homo sapiens
tccgactcgatgaag

SEQ ID NO: 1096787 - DNA, 15 bp, Homo sapiens
ctccgactcgatgaa

SEQ ID NO: 1096788 - DNA, 15 bp, Homo sapiens
cctccgactcgatga

SEQ ID NO: 1096789 - DNA, 15 bp, Homo sapiens
tcctccgactcgatg

SEQ ID NO: 1096790 - DNA, 15 bp, Homo sapiens
ctcctccgactcgat

SEQ ID NO: 1096791 - DNA, 15 bp, Homo sapiens
cctcctccgactcga

SEQ ID NO: 1096792 - DNA, 15 bp, Homo sapiens
ccctcctccgactcg

SEQ ID NO: 1096793 - DNA, 15 bp, Homo sapiens
gccctcctccgactc

SEQ ID NO: 1096794 - DNA, 15 bp, Homo sapiens
tgccctcctccgact

SEQ ID NO: 1096795 - DNA, 15 bp, Homo sapiens
ctgccctcctccgac

SEQ ID NO: 1096796 - DNA, 15 bp, Homo sapiens
actgccctcctccga

SEQ ID NO: 1096797 - DNA, 15 bp, Homo sapiens
cactgccctcctccg

SEQ ID NO: 1096798 - DNA, 15 bp, Homo sapiens
ccactgccctcctcc

SEQ ID NO: 1096799 - DNA, 15 bp, Homo sapiens
gccactgccctcctc

SEQ ID NO: 1096800 - DNA, 15 bp, Homo sapiens
ggccactgccctcct

SEQ ID NO: 1096801 - DNA, 15 bp, Homo sapiens
cggccactgccctcc

SEQ ID NO: 1096802 - DNA, 15 bp, Homo sapiens
ccggccactgccctc

SEQ ID NO: 1096803 - DNA, 15 bp, Homo sapiens
cccggccactgccct

SEQ ID NO: 1096804 - DNA, 15 bp, Homo sapiens
ccccggccactgccc

SEQ ID NO: 1096805 - DNA, 15 bp, Homo sapiens
gccccggccactgcc

SEQ ID NO: 1096806 - DNA, 15 bp, Homo sapiens
cgccccggccactgc

SEQ ID NO: 1096807 - DNA, 15 bp, Homo sapiens
gcgccccggccactg

SEQ ID NO: 1096808 - DNA, 15 bp, Homo sapiens
cgcgccccggccact

SEQ ID NO: 1096809 - DNA, 15 bp, Homo sapiens
ccgcgccccggccac

SEQ ID NO: 1096810 - DNA, 15 bp, Homo sapiens
gccgcgccccggcca

SEQ ID NO: 1096811 - DNA, 15 bp, Homo sapiens
ggccgcgccccggcc

SEQ ID NO: 1096812 - DNA, 15 bp, Homo sapiens
gggccgcgccccggc

SEQ ID NO: 1096813 - DNA, 15 bp, Homo sapiens
agggccgcgccccgg

SEQ ID NO: 1096814 - DNA, 15 bp, Homo sapiens
cagggccgcgccccg

SEQ ID NO: 1096815 - DNA, 15 bp, Homo sapiens
ccagggccgcgcccc

SEQ ID NO: 1096816 - DNA, 15 bp, Homo sapiens
accagggccgcgccc

SEQ ID NO: 1096817 - DNA, 15 bp, Homo sapiens
gaccagggccgcgcc

SEQ ID NO: 1096818 - DNA, 15 bp, Homo sapiens
agaccagggccgcgc

SEQ ID NO: 1096819 - DNA, 15 bp, Homo sapiens
gagaccagggccgcg

SEQ ID NO: 1096820 - DNA, 15 bp, Homo sapiens
cgagaccagggccgc

SEQ ID NO: 1096821 - DNA, 15 bp, Homo sapiens
ccgagaccagggccg

SEQ ID NO: 1096822 - DNA, 15 bp, Homo sapiens
gccgagaccagggcc

SEQ ID NO: 1096823 - DNA, 15 bp, Homo sapiens
cgccgagaccagggc

SEQ ID NO: 1096824 - DNA, 15 bp, Homo sapiens
ccgccgagaccaggg

SEQ ID NO: 1096825 - DNA, 15 bp, Homo sapiens
accgccgagaccagg

SEQ ID NO: 1096826 - DNA, 15 bp, Homo sapiens
caccgccgagaccag

SEQ ID NO: 1096827 - DNA, 15 bp, Homo sapiens
ccaccgccgagacca

SEQ ID NO: 1096828 - DNA, 15 bp, Homo sapiens
gccaccgccgagacc

SEQ ID NO: 1096829 - DNA, 15 bp, Homo sapiens
ggccaccgccgagac

SEQ ID NO: 1096830 - DNA, 15 bp, Homo sapiens
aggccaccgccgaga

SEQ ID NO: 1096831 - DNA, 15 bp, Homo sapiens
caggccaccgccgag

SEQ ID NO: 1096832 - DNA, 15 bp, Homo sapiens
acaggccaccgccga

SEQ ID NO: 1096833 - DNA, 15 bp, Homo sapiens
tacaggccaccgccg

SEQ ID NO: 1096834 - DNA, 15 bp, Homo sapiens
ttacaggccaccgcc

SEQ ID NO: 1096835 - DNA, 15 bp, Homo sapiens
cttacaggccaccgc

SEQ ID NO: 1096836 - DNA, 15 bp, Homo sapiens
tcttacaggccaccg

SEQ ID NO: 1096837 - DNA, 15 bp, Homo sapiens
ttcttacaggccacc

SEQ ID NO: 1096838 - DNA, 15 bp, Homo sapiens
cttcttacaggccac

SEQ ID NO: 1096839 - DNA, 15 bp, Homo sapiens
ccttcttacaggcca

SEQ ID NO: 1096840 - DNA, 15 bp, Homo sapiens
gccttcttacaggcc

SEQ ID NO: 1096841 - DNA, 15 bp, Homo sapiens
ggccttcttacaggc

SEQ ID NO: 1096842 - DNA, 15 bp, Homo sapiens
aggccttcttacagg

SEQ ID NO: 1096843 - DNA, 15 bp, Homo sapiens
caggccttcttacag

SEQ ID NO: 1096844 - DNA, 15 bp, Homo sapiens
acaggccttcttaca

SEQ ID NO: 1096845 - DNA, 15 bp, Homo sapiens
tacaggccttcttac

SEQ ID NO: 1096846 - DNA, 15 bp, Homo sapiens
atacaggccttctta

SEQ ID NO: 1096847 - DNA, 15 bp, Homo sapiens
catacaggccttctt

SEQ ID NO: 1096848 - DNA, 15 bp, Homo sapiens
gcatacaggccttct

SEQ ID NO: 1096849 - DNA, 15 bp, Homo sapiens
agcatacaggccttc

SEQ ID NO: 1096850 - DNA, 15 bp, Homo sapiens
cagcatacaggcctt

SEQ ID NO: 1096851 - DNA, 15 bp, Homo sapiens
ccagcatacaggcct

SEQ ID NO: 1096852 - DNA, 15 bp, Homo sapiens
cccagcatacaggcc

SEQ ID NO: 1096853 - DNA, 15 bp, Homo sapiens
gcccagcatacaggc

SEQ ID NO: 1096854 - DNA, 15 bp, Homo sapiens
ggcccagcatacagg

SEQ ID NO: 1096855 - DNA, 15 bp, Homo sapiens
tggcccagcatacag

SEQ ID NO: 1096856 - DNA, 15 bp, Homo sapiens
ctggcccagcataca

SEQ ID NO: 1096857 - DNA, 15 bp, Homo sapiens
actggcccagcatac

SEQ ID NO: 1096858 - DNA, 15 bp, Homo sapiens
cactggcccagcata

SEQ ID NO: 1096859 - DNA, 15 bp, Homo sapiens
tcactggcccagcat

SEQ ID NO: 1096860 - DNA, 15 bp, Homo sapiens
ctcactggcccagca

SEQ ID NO: 1096861 - DNA, 15 bp, Homo sapiens
tctcactggcccagc

SEQ ID NO: 1096862 - DNA, 15 bp, Homo sapiens
ctctcactggcccag

SEQ ID NO: 1096863 - DNA, 15 bp, Homo sapiens
gctctcactggccca

SEQ ID NO: 1096864 - DNA, 15 bp, Homo sapiens
tgctctcactggccc

SEQ ID NO: 1096865 - DNA, 15 bp, Homo sapiens
ctgctctcactggcc

SEQ ID NO: 1096866 - DNA, 15 bp, Homo sapiens
actgctctcactggc

SEQ ID NO: 1096867 - DNA, 15 bp, Homo sapiens
cactgctctcactgg

SEQ ID NO: 1096868 - DNA, 15 bp, Homo sapiens
ccactgctctcactg

SEQ ID NO: 1096869 - DNA, 15 bp, Homo sapiens
gccactgctctcact

SEQ ID NO: 1096870 - DNA, 15 bp, Homo sapiens
ggccactgctctcac

SEQ ID NO: 1096871 - DNA, 15 bp, Homo sapiens
cggccactgctctca

SEQ ID NO: 1096872 - DNA, 15 bp, Homo sapiens
gcggccactgctctc

SEQ ID NO: 1096873 - DNA, 15 bp, Homo sapiens
tgcggccactgctct

SEQ ID NO: 1096874 - DNA, 15 bp, Homo sapiens
ttgcggccactgctc

SEQ ID NO: 1096875 - DNA, 15 bp, Homo sapiens
cttgcggccactgct

SEQ ID NO: 1096876 - DNA, 15 bp, Homo sapiens
gcttgcggccactgc

SEQ ID NO: 1096877 - DNA, 15 bp, Homo sapiens
cgcttgcggccactg

SEQ ID NO: 1096878 - DNA, 15 bp, Homo sapiens
gcgcttgcggccact

SEQ ID NO: 1096879 - DNA, 15 bp, Homo sapiens
tgcgcttgcggccac

SEQ ID NO: 1096880 - DNA, 15 bp, Homo sapiens
ctgcgcttgcggcca

SEQ ID NO: 1096881 - DNA, 15 bp, Homo sapiens
cctgcgcttgcggcc

SEQ ID NO: 1096882 - DNA, 15 bp, Homo sapiens
ccctgcgcttgcggc

SEQ ID NO: 1096883 - DNA, 15 bp, Homo sapiens
tccctgcgcttgcgg

SEQ ID NO: 1096884 - DNA, 15 bp, Homo sapiens
ctccctgcgcttgcg

SEQ ID NO: 1096885 - DNA, 15 bp, Homo sapiens
cctccctgcgcttgc

SEQ ID NO: 1096886 - DNA, 15 bp, Homo sapiens
tcctccctgcgcttg

SEQ ID NO: 1096887 - DNA, 15 bp, Homo sapiens
atcctccctgcgctt

SEQ ID NO: 1096888 - DNA, 15 bp, Homo sapiens
catcctccctgcgct

SEQ ID NO: 1096889 - DNA, 15 bp, Homo sapiens
gcatcctccctgcgc

SEQ ID NO: 1096890 - DNA, 15 bp, Homo sapiens
ggcatcctccctgcg

SEQ ID NO: 1096891 - DNA, 15 bp, Homo sapiens
tggcatcctccctgc

SEQ ID NO: 1096892 - DNA, 15 bp, Homo sapiens
gtggcatcctccctg

SEQ ID NO: 1096893 - DNA, 15 bp, Homo sapiens
tgtggcatcctccct

SEQ ID NO: 1096894 - DNA, 15 bp, Homo sapiens
ctgtggcatcctccc

SEQ ID NO: 1096895 - DNA, 15 bp, Homo sapiens
gctgtggcatcctcc

SEQ ID NO: 1096896 - DNA, 15 bp, Homo sapiens
ggctgtggcatcctc

SEQ ID NO: 1096897 - DNA, 15 bp, Homo sapiens
gggctgtggcatcct

SEQ ID NO: 1096898 - DNA, 15 bp, Homo sapiens
ggggctgtggcatcc

SEQ ID NO: 1096899 - DNA, 15 bp, Homo sapiens
tggggctgtggcatc

SEQ ID NO: 1096900 - DNA, 15 bp, Homo sapiens
gtggggctgtggcat

SEQ ID NO: 1096901 - DNA, 15 bp, Homo sapiens
tgtggggctgtggca

SEQ ID NO: 1096902 - DNA, 15 bp, Homo sapiens
ctgtggggctgtggc

SEQ ID NO: 1096903 - DNA, 15 bp, Homo sapiens
gctgtggggctgtgg

SEQ ID NO: 1096904 - DNA, 15 bp, Homo sapiens
tgctgtggggctgtg

SEQ ID NO: 1096905 - DNA, 15 bp, Homo sapiens
gtgctgtggggctgt

SEQ ID NO: 1096906 - DNA, 15 bp, Homo sapiens
ggtgctgtggggctg

SEQ ID NO: 1096907 - DNA, 15 bp, Homo sapiens
gggtgctgtggggct

SEQ ID NO: 1096908 - DNA, 15 bp, Homo sapiens
tgggtgctgtggggc

SEQ ID NO: 1096909 - DNA, 15 bp, Homo sapiens
ctgggtgctgtgggg

SEQ ID NO: 1096910 - DNA, 15 bp, Homo sapiens
cctgggtgctgtggg

SEQ ID NO: 1096911 - DNA, 15 bp, Homo sapiens
gcctgggtgctgtgg

SEQ ID NO: 1096912 - DNA, 15 bp, Homo sapiens
agcctgggtgctgtg

SEQ ID NO: 1096913 - DNA, 15 bp, Homo sapiens
gagcctgggtgctgt

SEQ ID NO: 1096914 - DNA, 15 bp, Homo sapiens
ggagcctgggtgctg

SEQ ID NO: 1096915 - DNA, 15 bp, Homo sapiens
tggagcctgggtgct

SEQ ID NO: 1096916 - DNA, 15 bp, Homo sapiens
atggagcctgggtgc

SEQ ID NO: 1096917 - DNA, 15 bp, Homo sapiens
catggagcctgggtg

SEQ ID NO: 1096918 - DNA, 15 bp, Homo sapiens
ccatggagcctgggt

SEQ ID NO: 1096919 - DNA, 15 bp, Homo sapiens
cccatggagcctggg

SEQ ID NO: 1096920 - DNA, 15 bp, Homo sapiens
ccccatggagcctgg

SEQ ID NO: 1096921 - DNA, 15 bp, Homo sapiens
tccccatggagcctg

SEQ ID NO: 1096922 - DNA, 15 bp, Homo sapiens
ttccccatggagcct

SEQ ID NO: 1096923 - DNA, 15 bp, Homo sapiens
cttccccatggagcc

SEQ ID NO: 1096924 - DNA, 15 bp, Homo sapiens
acttccccatggagc

SEQ ID NO: 1096925 - DNA, 15 bp, Homo sapiens
cacttccccatggag

SEQ ID NO: 1096926 - DNA, 15 bp, Homo sapiens
gcacttccccatgga

SEQ ID NO: 1096927 - DNA, 15 bp, Homo sapiens
agcacttccccatgg

SEQ ID NO: 1096928 - DNA, 15 bp, Homo sapiens
gagcacttccccatg

SEQ ID NO: 1096929 - DNA, 15 bp, Homo sapiens
ggagcacttccccat

SEQ ID NO: 1096930 - DNA, 15 bp, Homo sapiens
gggagcacttcccca

SEQ ID NO: 1096931 - DNA, 15 bp, Homo sapiens
ggggagcacttcccc

SEQ ID NO: 1096932 - DNA, 15 bp, Homo sapiens
tggggagcacttccc

SEQ ID NO: 1096933 - DNA, 15 bp, Homo sapiens
gtggggagcacttcc

SEQ ID NO: 1096934 - DNA, 15 bp, Homo sapiens
tgtggggagcacttc

SEQ ID NO: 1096935 - DNA, 15 bp, Homo sapiens
gtgtggggagcactt

SEQ ID NO: 1096936 - DNA, 15 bp, Homo sapiens
cgtgtggggagcact

SEQ ID NO: 1096937 - DNA, 15 bp, Homo sapiens
acgtgtggggagcac

SEQ ID NO: 1096938 - DNA, 15 bp, Homo sapiens
cacgtgtggggagca

SEQ ID NO: 1096939 - DNA, 15 bp, Homo sapiens
gcacgtgtggggagc

SEQ ID NO: 1096940 - DNA, 15 bp, Homo sapiens
agcacgtgtggggag

SEQ ID NO: 1096941 - DNA, 15 bp, Homo sapiens
gagcacgtgtgggga

SEQ ID NO: 1096942 - DNA, 15 bp, Homo sapiens
cgagcacgtgtgggg

SEQ ID NO: 1096943 - DNA, 15 bp, Homo sapiens
gcgagcacgtgtggg

SEQ ID NO: 1096944 - DNA, 15 bp, Homo sapiens
tgcgagcacgtgtgg

SEQ ID NO: 1096945 - DNA, 15 bp, Homo sapiens
ctgcgagcacgtgtg

SEQ ID NO: 1096946 - DNA, 15 bp, Homo sapiens
gctgcgagcacgtgt

SEQ ID NO: 1096947 - DNA, 15 bp, Homo sapiens
ggctgcgagcacgtg

SEQ ID NO: 1096948 - DNA, 15 bp, Homo sapiens
aggctgcgagcacgt

SEQ ID NO: 1096949 - DNA, 15 bp, Homo sapiens
caggctgcgagcacg

SEQ ID NO: 1096950 - DNA, 15 bp, Homo sapiens
ccaggctgcgagcac

SEQ ID NO: 1096951 - DNA, 15 bp, Homo sapiens
gccaggctgcgagca

SEQ ID NO: 1096952 - DNA, 15 bp, Homo sapiens
cgccaggctgcgagc

SEQ ID NO: 1096953 - DNA, 15 bp, Homo sapiens
ccgccaggctgcgag

SEQ ID NO: 1096954 - DNA, 15 bp, Homo sapiens
cccgccaggctgcga

SEQ ID NO: 1096955 - DNA, 15 bp, Homo sapiens
ccccgccaggctgcg

SEQ ID NO: 1096956 - DNA, 15 bp, Homo sapiens
gccccgccaggctgc

SEQ ID NO: 1096957 - DNA, 15 bp, Homo sapiens
tgccccgccaggctg

SEQ ID NO: 1096958 - DNA, 15 bp, Homo sapiens
ctgccccgccaggct

SEQ ID NO: 1096959 - DNA, 15 bp, Homo sapiens
cctgccccgccaggc

SEQ ID NO: 1096960 - DNA, 15 bp, Homo sapiens
tcctgccccgccagg

SEQ ID NO: 1096961 - DNA, 15 bp, Homo sapiens
ctcctgccccgccag

SEQ ID NO: 1096962 - DNA, 15 bp, Homo sapiens
cctcctgccccgcca

SEQ ID NO: 1096963 - DNA, 15 bp, Homo sapiens
gcctcctgccccgcc

SEQ ID NO: 1096964 - DNA, 15 bp, Homo sapiens
ggcctcctgccccgc

SEQ ID NO: 1096965 - DNA, 15 bp, Homo sapiens
aggcctcctgccccg

SEQ ID NO: 1096966 - DNA, 15 bp, Homo sapiens
caggcctcctgcccc

SEQ ID NO: 1096967 - DNA, 15 bp, Homo sapiens
ccaggcctcctgccc

SEQ ID NO: 1096968 - DNA, 15 bp, Homo sapiens
gccaggcctcctgcc

SEQ ID NO: 1096969 - DNA, 15 bp, Homo sapiens
ggccaggcctcctgc

SEQ ID NO: 1096970 - DNA, 15 bp, Homo sapiens
aggccaggcctcctg

SEQ ID NO: 1096971 - DNA, 15 bp, Homo sapiens
aaggccaggcctcct

SEQ ID NO: 1096972 - DNA, 15 bp, Homo sapiens
caaggccaggcctcc

SEQ ID NO: 1096973 - DNA, 15 bp, Homo sapiens
acaaggccaggcctc

SEQ ID NO: 1096974 - DNA, 15 bp, Homo sapiens
gacaaggccaggcct

SEQ ID NO: 1096975 - DNA, 15 bp, Homo sapiens
tgacaaggccaggcc

SEQ ID NO: 1096976 - DNA, 15 bp, Homo sapiens
ctgacaaggccaggc

SEQ ID NO: 1096977 - DNA, 15 bp, Homo sapiens
cctgacaaggccagg

SEQ ID NO: 1096978 - DNA, 15 bp, Homo sapiens
tcctgacaaggccag

SEQ ID NO: 1096979 - DNA, 15 bp, Homo sapiens
gtcctgacaaggcca

SEQ ID NO: 1096980 - DNA, 15 bp, Homo sapiens
ggtcctgacaaggcc

SEQ ID NO: 1096981 - DNA, 15 bp, Homo sapiens
gggtcctgacaaggc

SEQ ID NO: 1096982 - DNA, 15 bp, Homo sapiens
tgggtcctgacaagg

SEQ ID NO: 1096983 - DNA, 15 bp, Homo sapiens
ctgggtcctgacaag

SEQ ID NO: 1096984 - DNA, 15 bp, Homo sapiens
cctgggtcctgacaa

SEQ ID NO: 1096985 - DNA, 15 bp, Homo sapiens
gcctgggtcctgaca

SEQ ID NO: 1096986 - DNA, 15 bp, Homo sapiens
ggcctgggtcctgac

SEQ ID NO: 1096987 - DNA, 15 bp, Homo sapiens
cggcctgggtcctga

SEQ ID NO: 1096988 - DNA, 15 bp, Homo sapiens
gcggcctgggtcctg

SEQ ID NO: 1096989 - DNA, 15 bp, Homo sapiens
ggcggcctgggtcct

SEQ ID NO: 1096990 - DNA, 15 bp, Homo sapiens
aggcggcctgggtcc

SEQ ID NO: 1096991 - DNA, 15 bp, Homo sapiens
caggcggcctgggtc

SEQ ID NO: 1096992 - DNA, 15 bp, Homo sapiens
gcaggcggcctgggt

SEQ ID NO: 1096993 - DNA, 15 bp, Homo sapiens
ggcaggcggcctggg

SEQ ID NO: 1096994 - DNA, 15 bp, Homo sapiens
tggcaggcggcctgg

SEQ ID NO: 1096995 - DNA, 15 bp, Homo sapiens
atggcaggcggcctg

SEQ ID NO: 1096996 - DNA, 15 bp, Homo sapiens
tatggcaggcggcct

SEQ ID NO: 1096997 - DNA, 15 bp, Homo sapiens
gtatggcaggcggcc

SEQ ID NO: 1096998 - DNA, 15 bp, Homo sapiens
ggtatggcaggcggc

SEQ ID NO: 1096999 - DNA, 15 bp, Homo sapiens
cggtatggcaggcgg

SEQ ID NO: 1097000 - DNA, 15 bp, Homo sapiens
gcggtatggcaggcg

SEQ ID NO: 1097001 - DNA, 15 bp, Homo sapiens
agcggtatggcaggc

SEQ ID NO: 1097002 - DNA, 15 bp, Homo sapiens
cagcggtatggcagg

SEQ ID NO: 1097003 - DNA, 15 bp, Homo sapiens
ccagcggtatggcag

SEQ ID NO: 1097004 - DNA, 15 bp, Homo sapiens
cccagcggtatggca

SEQ ID NO: 1097005 - DNA, 15 bp, Homo sapiens
ccccagcggtatggc

SEQ ID NO: 1097006 - DNA, 15 bp, Homo sapiens
tccccagcggtatgg

SEQ ID NO: 1097007 - DNA, 15 bp, Homo sapiens
ttccccagcggtatg

SEQ ID NO: 1097008 - DNA, 15 bp, Homo sapiens
gttccccagcggtat

SEQ ID NO: 1097009 - DNA, 15 bp, Homo sapiens
tgttccccagcggta

SEQ ID NO: 1097010 - DNA, 15 bp, Homo sapiens
ctgttccccagcggt

SEQ ID NO: 1097011 - DNA, 15 bp, Homo sapiens
tctgttccccagcgg

SEQ ID NO: 1097012 - DNA, 15 bp, Homo sapiens
ctctgttccccagcg

SEQ ID NO: 1097013 - DNA, 15 bp, Homo sapiens
gctctgttccccagc

SEQ ID NO: 1097014 - DNA, 15 bp, Homo sapiens
cgctctgttccccag

SEQ ID NO: 1097015 - DNA, 15 bp, Homo sapiens
ccgctctgttcccca

SEQ ID NO: 1097016 - DNA, 15 bp, Homo sapiens
cccgctctgttcccc

SEQ ID NO: 1097017 - DNA, 15 bp, Homo sapiens
gcccgctctgttccc

SEQ ID NO: 1097018 - DNA, 15 bp, Homo sapiens
ggcccgctctgttcc

SEQ ID NO: 1097019 - DNA, 15 bp, Homo sapiens
aggcccgctctgttc

SEQ ID NO: 1097020 - DNA, 15 bp, Homo sapiens
gaggcccgctctgtt

SEQ ID NO: 1097021 - DNA, 15 bp, Homo sapiens
agaggcccgctctgt

SEQ ID NO: 1097022 - DNA, 15 bp, Homo sapiens
aagaggcccgctctg

SEQ ID NO: 1097023 - DNA, 15 bp, Homo sapiens
gaagaggcccgctct

SEQ ID NO: 1097024 - DNA, 15 bp, Homo sapiens
ggaagaggcccgctc

SEQ ID NO: 1097025 - DNA, 15 bp, Homo sapiens
gggaagaggcccgct

SEQ ID NO: 1097026 - DNA, 15 bp, Homo sapiens
agggaagaggcccgc

SEQ ID NO: 1097027 - DNA, 15 bp, Homo sapiens
gagggaagaggcccg

SEQ ID NO: 1097028 - DNA, 15 bp, Homo sapiens
tgagggaagaggccc

SEQ ID NO: 1097029 - DNA, 15 bp, Homo sapiens
ctgagggaagaggcc

SEQ ID NO: 1097030 - DNA, 15 bp, Homo sapiens
actgagggaagaggc

SEQ ID NO: 1097031 - DNA, 15 bp, Homo sapiens
aactgagggaagagg

SEQ ID NO: 1097032 - DNA, 15 bp, Homo sapiens
aaactgagggaagag

SEQ ID NO: 1097033 - DNA, 15 bp, Homo sapiens
aaaactgagggaaga

SEQ ID NO: 1097034 - DNA, 15 bp, Homo sapiens
aaaaactgagggaag

SEQ ID NO: 1097035 - DNA, 15 bp, Homo sapiens
gaaaaactgagggaa

SEQ ID NO: 1097036 - DNA, 15 bp, Homo sapiens
cgaaaaactgaggga

SEQ ID NO: 1097037 - DNA, 15 bp, Homo sapiens
ccgaaaaactgaggg

SEQ ID NO: 1097038 - DNA, 15 bp, Homo sapiens
accgaaaaactgagg

SEQ ID NO: 1097039 - DNA, 15 bp, Homo sapiens
caccgaaaaactgag

SEQ ID NO: 1097040 - DNA, 15 bp, Homo sapiens
ccaccgaaaaactga

SEQ ID NO: 1097041 - DNA, 15 bp, Homo sapiens
cccaccgaaaaactg

SEQ ID NO: 1097042 - DNA, 15 bp, Homo sapiens
tcccaccgaaaaact

SEQ ID NO: 1097043 - DNA, 15 bp, Homo sapiens
gtcccaccgaaaaac

SEQ ID NO: 1097044 - DNA, 15 bp, Homo sapiens
tgtcccaccgaaaaa

SEQ ID NO: 1097045 - DNA, 15 bp, Homo sapiens
ctgtcccaccgaaaa

SEQ ID NO: 1097046 - DNA, 15 bp, Homo sapiens
gctgtcccaccgaaa

SEQ ID NO: 1097047 - DNA, 15 bp, Homo sapiens
ggctgtcccaccgaa

SEQ ID NO: 1097048 - DNA, 15 bp, Homo sapiens
gggctgtcccaccga

SEQ ID NO: 1097049 - DNA, 15 bp, Homo sapiens
ggggctgtcccaccg

SEQ ID NO: 1097050 - DNA, 15 bp, Homo sapiens
tggggctgtcccacc

SEQ ID NO: 1097051 - DNA, 15 bp, Homo sapiens
ctggggctgtcccac

SEQ ID NO: 1097052 - DNA, 15 bp, Homo sapiens
cctggggctgtccca

SEQ ID NO: 1097053 - DNA, 15 bp, Homo sapiens
ccctggggctgtccc

SEQ ID NO: 1097054 - DNA, 15 bp, Homo sapiens
gccctggggctgtcc

SEQ ID NO: 1097055 - DNA, 15 bp, Homo sapiens
ggccctggggctgtc

SEQ ID NO: 1097056 - DNA, 15 bp, Homo sapiens
gggccctggggctgt

SEQ ID NO: 1097057 - DNA, 15 bp, Homo sapiens
agggccctggggctg

SEQ ID NO: 1097058 - DNA, 15 bp, Homo sapiens
tagggccctggggct

SEQ ID NO: 1097059 - DNA, 15 bp, Homo sapiens
ttagggccctggggc

SEQ ID NO: 1097060 - DNA, 15 bp, Homo sapiens
gttagggccctgggg

SEQ ID NO: 1097061 - DNA, 15 bp, Homo sapiens
cgttagggccctggg

SEQ ID NO: 1097062 - DNA, 15 bp, Homo sapiens
ccgttagggccctgg

SEQ ID NO: 1097063 - DNA, 15 bp, Homo sapiens
cccgttagggccctg

SEQ ID NO: 1097064 - DNA, 15 bp, Homo sapiens
ccccgttagggccct

SEQ ID NO: 1097065 - DNA, 15 bp, Homo sapiens
cccccgttagggccc

SEQ ID NO: 1097066 - DNA, 15 bp, Homo sapiens
acccccgttagggcc

SEQ ID NO: 1097067 - DNA, 15 bp, Homo sapiens
cacccccgttagggc

SEQ ID NO: 1097068 - DNA, 15 bp, Homo sapiens
gcacccccgttaggg

SEQ ID NO: 1097069 - DNA, 15 bp, Homo sapiens
cgcacccccgttagg

SEQ ID NO: 1097070 - DNA, 15 bp, Homo sapiens
ccgcacccccgttag

SEQ ID NO: 1097071 - DNA, 15 bp, Homo sapiens
gccgcacccccgtta

SEQ ID NO: 1097072 - DNA, 15 bp, Homo sapiens
tgccgcacccccgtt

SEQ ID NO: 1097073 - DNA, 15 bp, Homo sapiens
ctgccgcacccccgt

SEQ ID NO: 1097074 - DNA, 15 bp, Homo sapiens
cctgccgcacccccg

SEQ ID NO: 1097075 - DNA, 15 bp, Homo sapiens
tcctgccgcaccccc

SEQ ID NO: 1097076 - DNA, 15 bp, Homo sapiens
ctcctgccgcacccc

SEQ ID NO: 1097077 - DNA, 15 bp, Homo sapiens
gctcctgccgcaccc

SEQ ID NO: 1097078 - DNA, 15 bp, Homo sapiens
tgctcctgccgcacc

SEQ ID NO: 1097079 - DNA, 15 bp, Homo sapiens
ctgctcctgccgcac

SEQ ID NO: 1097080 - DNA, 15 bp, Homo sapiens
cctgctcctgccgca

SEQ ID NO: 1097081 - DNA, 15 bp, Homo sapiens
tcctgctcctgccgc

SEQ ID NO: 1097082 - DNA, 15 bp, Homo sapiens
ttcctgctcctgccg

SEQ ID NO: 1097083 - DNA, 15 bp, Homo sapiens
gttcctgctcctgcc

SEQ ID NO: 1097084 - DNA, 15 bp, Homo sapiens
tgttcctgctcctgc

SEQ ID NO: 1097085 - DNA, 15 bp, Homo sapiens
ctgttcctgctcctg

SEQ ID NO: 1097086 - DNA, 15 bp, Homo sapiens
tctgttcctgctcct

SEQ ID NO: 1097087 - DNA, 15 bp, Homo sapiens
ctctgttcctgctcc

SEQ ID NO: 1097088 - DNA, 15 bp, Homo sapiens
tctctgttcctgctc

SEQ ID NO: 1097089 - DNA, 15 bp, Homo sapiens
gtctctgttcctgct

SEQ ID NO: 1097090 - DNA, 15 bp, Homo sapiens
agtctctgttcctgc

SEQ ID NO: 1097091 - DNA, 15 bp, Homo sapiens
gagtctctgttcctg

SEQ ID NO: 1097092 - DNA, 15 bp, Homo sapiens
agagtctctgttcct

SEQ ID NO: 1097093 - DNA, 15 bp, Homo sapiens
cagagtctctgttcc

SEQ ID NO: 1097094 - DNA, 15 bp, Homo sapiens
ccagagtctctgttc

SEQ ID NO: 1097095 - DNA, 15 bp, Homo sapiens
tccagagtctctgtt

SEQ ID NO: 1097096 - DNA, 15 bp, Homo sapiens
ttccagagtctctgt

SEQ ID NO: 1097097 - DNA, 15 bp, Homo sapiens
cttccagagtctctg

SEQ ID NO: 1097098 - DNA, 15 bp, Homo sapiens
gcttccagagtctct

SEQ ID NO: 1097099 - DNA, 15 bp, Homo sapiens
ggcttccagagtctc

SEQ ID NO: 1097100 - DNA, 15 bp, Homo sapiens
gggcttccagagtct

SEQ ID NO: 1097101 - DNA, 15 bp, Homo sapiens
ggggcttccagagtc

SEQ ID NO: 1097102 - DNA, 15 bp, Homo sapiens
gggggcttccagagt

SEQ ID NO: 1097103 - DNA, 15 bp, Homo sapiens
ggggggcttccagag

SEQ ID NO: 1097104 - DNA, 15 bp, Homo sapiens
tggggggcttccaga

SEQ ID NO: 1097105 - DNA, 15 bp, Homo sapiens
gtggggggcttccag

SEQ ID NO: 1097106 - DNA, 15 bp, Homo sapiens
ggtggggggcttcca

SEQ ID NO: 1097107 - DNA, 15 bp, Homo sapiens
aggtggggggcttcc

SEQ ID NO: 1097108 - DNA, 15 bp, Homo sapiens
aaggtggggggcttc

SEQ ID NO: 1097109 - DNA, 15 bp, Homo sapiens
aaaggtggggggctt

SEQ ID NO: 1097110 - DNA, 15 bp, Homo sapiens
gaaaggtggggggct

SEQ ID NO: 1097111 - DNA, 15 bp, Homo sapiens
agaaaggtggggggc

SEQ ID NO: 1097112 - DNA, 15 bp, Homo sapiens
gagaaaggtgggggg

SEQ ID NO: 1097113 - DNA, 15 bp, Homo sapiens
cgagaaaggtggggg

SEQ ID NO: 1097114 - DNA, 15 bp, Homo sapiens
gcgagaaaggtgggg

SEQ ID NO: 1097115 - DNA, 15 bp, Homo sapiens
agcgagaaaggtggg

SEQ ID NO: 1097116 - DNA, 15 bp, Homo sapiens
cagcgagaaaggtgg

SEQ ID NO: 1097117 - DNA, 15 bp, Homo sapiens
ccagcgagaaaggtg

SEQ ID NO: 1097118 - DNA, 15 bp, Homo sapiens
tccagcgagaaaggt

SEQ ID NO: 1097119 - DNA, 15 bp, Homo sapiens
ttccagcgagaaagg

SEQ ID NO: 1097120 - DNA, 15 bp, Homo sapiens
attccagcgagaaag

SEQ ID NO: 1097121 - DNA, 15 bp, Homo sapiens
gattccagcgagaaa

SEQ ID NO: 1097122 - DNA, 15 bp, Homo sapiens
tgattccagcgagaa

SEQ ID NO: 1097123 - DNA, 15 bp, Homo sapiens
ttgattccagcgaga

SEQ ID NO: 1097124 - DNA, 15 bp, Homo sapiens
attgattccagcgag

SEQ ID NO: 1097125 - DNA, 15 bp, Homo sapiens
aattgattccagcga

SEQ ID NO: 1097126 - DNA, 15 bp, Homo sapiens
aaattgattccagcg

SEQ ID NO: 1097127 - DNA, 15 bp, Homo sapiens
gaaattgattccagc

SEQ ID NO: 1097128 - DNA, 15 bp, Homo sapiens
ggaaattgattccag

SEQ ID NO: 1097129 - DNA, 15 bp, Homo sapiens
gggaaattgattcca

SEQ ID NO: 1097130 - DNA, 15 bp, Homo sapiens
tgggaaattgattcc

SEQ ID NO: 1097131 - DNA, 15 bp, Homo sapiens
ctgggaaattgattc

SEQ ID NO: 1097132 - DNA, 15 bp, Homo sapiens
tctgggaaattgatt

SEQ ID NO: 1097133 - DNA, 15 bp, Homo sapiens
ttctgggaaattgat

SEQ ID NO: 1097134 - DNA, 15 bp, Homo sapiens
cttctgggaaattga

SEQ ID NO: 1097135 - DNA, 15 bp, Homo sapiens
ccttctgggaaattg

SEQ ID NO: 1097136 - DNA, 15 bp, Homo sapiens
cccttctgggaaatt

SEQ ID NO: 1097137 - DNA, 15 bp, Homo sapiens
ctcccttctgggaaa

SEQ ID NO: 1097138 - DNA, 15 bp, Homo sapiens
actcccttctgggaa

SEQ ID NO: 1097139 - DNA, 15 bp, Homo sapiens
aactcccttctggga

SEQ ID NO: 1097140 - DNA, 15 bp, Homo sapiens
caactcccttctggg

SEQ ID NO: 1097141 - DNA, 15 bp, Homo sapiens
gcaactcccttctgg

SEQ ID NO: 1097142 - DNA, 15 bp, Homo sapiens
agcaactcccttctg

SEQ ID NO: 1097143 - DNA, 15 bp, Homo sapiens
gagcaactcccttct

SEQ ID NO: 1097144 - DNA, 15 bp, Homo sapiens
tgagcaactcccttc

SEQ ID NO: 1097145 - DNA, 15 bp, Homo sapiens
gtgagcaactccctt

SEQ ID NO: 1097146 - DNA, 15 bp, Homo sapiens
agtgagcaactccct

SEQ ID NO: 1097147 - DNA, 15 bp, Homo sapiens
gagtgagcaactccc

SEQ ID NO: 1097148 - DNA, 15 bp, Homo sapiens
tgagtgagcaactcc

SEQ ID NO: 1097149 - DNA, 15 bp, Homo sapiens
ctgagtgagcaactc

SEQ ID NO: 1097150 - DNA, 15 bp, Homo sapiens
cctgagtgagcaact

SEQ ID NO: 1097151 - DNA, 15 bp, Homo sapiens
tcctgagtgagcaac

SEQ ID NO: 1097152 - DNA, 15 bp, Homo sapiens
gtcctgagtgagcaa

SEQ ID NO: 1097153 - DNA, 15 bp, Homo sapiens
agtcctgagtgagca

SEQ ID NO: 1097154 - DNA, 15 bp, Homo sapiens
aagtcctgagtgagc

SEQ ID NO: 1097155 - DNA, 15 bp, Homo sapiens
aaagtcctgagtgag

SEQ ID NO: 1097156 - DNA, 15 bp, Homo sapiens
caaagtcctgagtga

SEQ ID NO: 1097157 - DNA, 15 bp, Homo sapiens
tcaaagtcctgagtg

SEQ ID NO: 1097158 - DNA, 15 bp, Homo sapiens
atcaaagtcctgagt

SEQ ID NO: 1097159 - DNA, 15 bp, Homo sapiens
catcaaagtcctgag

SEQ ID NO: 1097160 - DNA, 15 bp, Homo sapiens
gcatcaaagtcctga

SEQ ID NO: 1097161 - DNA, 15 bp, Homo sapiens
tgcatcaaagtcctg

SEQ ID NO: 1097162 - DNA, 15 bp, Homo sapiens
atgcatcaaagtcct

SEQ ID NO: 1097163 - DNA, 15 bp, Homo sapiens
aatgcatcaaagtcc

SEQ ID NO: 1097164 - DNA, 15 bp, Homo sapiens
aaatgcatcaaagtc

SEQ ID NO: 1097165 - DNA, 15 bp, Homo sapiens
gaaatgcatcaaagt

SEQ ID NO: 1097166 - DNA, 15 bp, Homo sapiens
ggaaatgcatcaaag

SEQ ID NO: 1097167 - DNA, 15 bp, Homo sapiens
tggaaatgcatcaaa

SEQ ID NO: 1097168 - DNA, 15 bp, Homo sapiens
gtggaaatgcatcaa

SEQ ID NO: 1097169 - DNA, 15 bp, Homo sapiens
tgtggaaatgcatca

SEQ ID NO: 1097170 - DNA, 15 bp, Homo sapiens
gtgtggaaatgcatc

SEQ ID NO: 1097171 - DNA, 15 bp, Homo sapiens
agtgtggaaatgcat

SEQ ID NO: 1097172 - DNA, 15 bp, Homo sapiens
cagtgtggaaatgca

SEQ ID NO: 1097173 - DNA, 15 bp, Homo sapiens
acagtgtggaaatgc

SEQ ID NO: 1097174 - DNA, 15 bp, Homo sapiens
gacagtgtggaaatg

SEQ ID NO: 1097175 - DNA, 15 bp, Homo sapiens
tgacagtgtggaaat

SEQ ID NO: 1097176 - DNA, 15 bp, Homo sapiens
ctgacagtgtggaaa

SEQ ID NO: 1097177 - DNA, 15 bp, Homo sapiens
tctgacagtgtggaa

SEQ ID NO: 1097178 - DNA, 15 bp, Homo sapiens
ctctgacagtgtgga

SEQ ID NO: 1097179 - DNA, 15 bp, Homo sapiens
gctctgacagtgtgg

SEQ ID NO: 1097180 - DNA, 15 bp, Homo sapiens
agctctgacagtgtg

SEQ ID NO: 1097181 - DNA, 15 bp, Homo sapiens
cagctctgacagtgt

SEQ ID NO: 1097182 - DNA, 15 bp, Homo sapiens
acagctctgacagtg

SEQ ID NO: 1097183 - DNA, 15 bp, Homo sapiens
aacagctctgacagt

SEQ ID NO: 1097184 - DNA, 15 bp, Homo sapiens
caacagctctgacag

SEQ ID NO: 1097185 - DNA, 15 bp, Homo sapiens
ccaacagctctgaca

SEQ ID NO: 1097186 - DNA, 15 bp, Homo sapiens
gccaacagctctgac

SEQ ID NO: 1097187 - DNA, 15 bp, Homo sapiens
ggccaacagctctga

SEQ ID NO: 1097188 - DNA, 15 bp, Homo sapiens
aggccaacagctctg

SEQ ID NO: 1097189 - DNA, 15 bp, Homo sapiens
gaggccaacagctct

SEQ ID NO: 1097190 - DNA, 15 bp, Homo sapiens
cgaggccaacagctc

SEQ ID NO: 1097191 - DNA, 15 bp, Homo sapiens
gcgaggccaacagct

SEQ ID NO: 1097192 - DNA, 15 bp, Homo sapiens
ggcgaggccaacagc

SEQ ID NO: 1097193 - DNA, 15 bp, Homo sapiens
aggcgaggccaacag

SEQ ID NO: 1097194 - DNA, 15 bp, Homo sapiens
caggcgaggccaaca

SEQ ID NO: 1097195 - DNA, 15 bp, Homo sapiens
ccaggcgaggccaac

SEQ ID NO: 1097196 - DNA, 15 bp, Homo sapiens
cccaggcgaggccaa

SEQ ID NO: 1097197 - DNA, 15 bp, Homo sapiens
gcccaggcgaggcca

SEQ ID NO: 1097198 - DNA, 15 bp, Homo sapiens
ggcccaggcgaggcc

SEQ ID NO: 1097199 - DNA, 15 bp, Homo sapiens
gggcccaggcgaggc

SEQ ID NO: 1097200 - DNA, 15 bp, Homo sapiens
tgggcccaggcgagg

SEQ ID NO: 1097201 - DNA, 15 bp, Homo sapiens
ctgggcccaggcgag

SEQ ID NO: 1097202 - DNA, 15 bp, Homo sapiens
cctgggcccaggcga

SEQ ID NO: 1097203 - DNA, 15 bp, Homo sapiens
gcctgggcccaggcg

SEQ ID NO: 1097204 - DNA, 15 bp, Homo sapiens
agcctgggcccaggc

SEQ ID NO: 1097205 - DNA, 15 bp, Homo sapiens
gagcctgggcccagg

SEQ ID NO: 1097206 - DNA, 15 bp, Homo sapiens
agagcctgggcccag

SEQ ID NO: 1097207 - DNA, 15 bp, Homo sapiens
cagagcctgggccca

SEQ ID NO: 1097208 - DNA, 15 bp, Homo sapiens
ccagagcctgggccc

SEQ ID NO: 1097209 - DNA, 15 bp, Homo sapiens
cccagagcctgggcc

SEQ ID NO: 1097210 - DNA, 15 bp, Homo sapiens
tcccagagcctgggc

SEQ ID NO: 1097211 - DNA, 15 bp, Homo sapiens
ttcccagagcctggg

SEQ ID NO: 1097212 - DNA, 15 bp, Homo sapiens
cttcccagagcctgg

SEQ ID NO: 1097213 - DNA, 15 bp, Homo sapiens
ccttcccagagcctg

SEQ ID NO: 1097214 - DNA, 15 bp, Homo sapiens
cccttcccagagcct

SEQ ID NO: 1097215 - DNA, 15 bp, Homo sapiens
ccccttcccagagcc

SEQ ID NO: 1097216 - DNA, 15 bp, Homo sapiens
accccttcccagagc

SEQ ID NO: 1097217 - DNA, 15 bp, Homo sapiens
caccccttcccagag

SEQ ID NO: 1097218 - DNA, 15 bp, Homo sapiens
gcaccccttcccaga

SEQ ID NO: 1097219 - DNA, 15 bp, Homo sapiens
ggcaccccttcccag

SEQ ID NO: 1097220 - DNA, 15 bp, Homo sapiens
gagggcaccccttcc

SEQ ID NO: 1097221 - DNA, 15 bp, Homo sapiens
agagggcaccccttc

SEQ ID NO: 1097222 - DNA, 15 bp, Homo sapiens
cagagggcacccctt

SEQ ID NO: 1097223 - DNA, 15 bp, Homo sapiens
ccagagggcacccct

SEQ ID NO: 1097224 - DNA, 15 bp, Homo sapiens
tccagagggcacccc

SEQ ID NO: 1097225 - DNA, 15 bp, Homo sapiens
atccagagggcaccc

SEQ ID NO: 1097226 - DNA, 15 bp, Homo sapiens
gatccagagggcacc

SEQ ID NO: 1097227 - DNA, 15 bp, Homo sapiens
ggatccagagggcac

SEQ ID NO: 1097228 - DNA, 15 bp, Homo sapiens
aggatccagagggca

SEQ ID NO: 1097229 - DNA, 15 bp, Homo sapiens
caggatccagagggc

SEQ ID NO: 1097230 - DNA, 15 bp, Homo sapiens
gcaggatccagaggg

SEQ ID NO: 1097231 - DNA, 15 bp, Homo sapiens
agcaggatccagagg

SEQ ID NO: 1097232 - DNA, 15 bp, Homo sapiens
cagcaggatccagag

SEQ ID NO: 1097233 - DNA, 15 bp, Homo sapiens
acagcaggatccaga

SEQ ID NO: 1097234 - DNA, 15 bp, Homo sapiens
cacagcaggatccag

SEQ ID NO: 1097235 - DNA, 15 bp, Homo sapiens
ccacagcaggatcca

SEQ ID NO: 1097236 - DNA, 15 bp, Homo sapiens
gccacagcaggatcc

SEQ ID NO: 1097237 - DNA, 15 bp, Homo sapiens
ggccacagcaggatc

SEQ ID NO: 1097238 - DNA, 15 bp, Homo sapiens
aggccacagcaggat

SEQ ID NO: 1097239 - DNA, 15 bp, Homo sapiens
gaggccacagcagga

SEQ ID NO: 1097240 - DNA, 15 bp, Homo sapiens
tgaggccacagcagg

SEQ ID NO: 1097241 - DNA, 15 bp, Homo sapiens
gtgaggccacagcag

SEQ ID NO: 1097242 - DNA, 15 bp, Homo sapiens
agtgaggccacagca

SEQ ID NO: 1097243 - DNA, 15 bp, Homo sapiens
aagtgaggccacagc

SEQ ID NO: 1097244 - DNA, 15 bp, Homo sapiens
gaagtgaggccacag

SEQ ID NO: 1097245 - DNA, 15 bp, Homo sapiens
ggaagtgaggccaca

SEQ ID NO: 1097246 - DNA, 15 bp, Homo sapiens
gggaagtgaggccac

SEQ ID NO: 1097247 - DNA, 15 bp, Homo sapiens
agggaagtgaggcca

SEQ ID NO: 1097248 - DNA, 15 bp, Homo sapiens
cagggaagtgaggcc

SEQ ID NO: 1097249 - DNA, 15 bp, Homo sapiens
ccagggaagtgaggc

SEQ ID NO: 1097250 - DNA, 15 bp, Homo sapiens
cccagggaagtgagg

SEQ ID NO: 1097251 - DNA, 15 bp, Homo sapiens
tcccagggaagtgag

SEQ ID NO: 1097252 - DNA, 15 bp, Homo sapiens
ttcccagggaagtga

SEQ ID NO: 1097253 - DNA, 15 bp, Homo sapiens
gttcccagggaagtg

SEQ ID NO: 1097254 - DNA, 15 bp, Homo sapiens
agttcccagggaagt

SEQ ID NO: 1097255 - DNA, 15 bp, Homo sapiens
gagttcccagggaag

SEQ ID NO: 1097256 - DNA, 15 bp, Homo sapiens
tgagttcccagggaa

SEQ ID NO: 1097257 - DNA, 15 bp, Homo sapiens
atgagttcccaggga

SEQ ID NO: 1097258 - DNA, 15 bp, Homo sapiens
gatgagttcccaggg

SEQ ID NO: 1097259 - DNA, 15 bp, Homo sapiens
ggatgagttcccagg

SEQ ID NO: 1097260 - DNA, 15 bp, Homo sapiens
aggatgagttcccag

SEQ ID NO: 1097261 - DNA, 15 bp, Homo sapiens
caggatgagttccca

SEQ ID NO: 1097262 - DNA, 15 bp, Homo sapiens
acaggatgagttccc

SEQ ID NO: 1097263 - DNA, 15 bp, Homo sapiens
cacaggatgagttcc

SEQ ID NO: 1097264 - DNA, 15 bp, Homo sapiens
acacaggatgagttc

SEQ ID NO: 1097265 - DNA, 15 bp, Homo sapiens
cacacaggatgagtt

SEQ ID NO: 1097266 - DNA, 15 bp, Homo sapiens
ccacacaggatgagt

SEQ ID NO: 1097267 - DNA, 15 bp, Homo sapiens
cccacacaggatgag

SEQ ID NO: 1097268 - DNA, 15 bp, Homo sapiens
ccccacacaggatga

SEQ ID NO: 1097269 - DNA, 15 bp, Homo sapiens
tccccacacaggatg

SEQ ID NO: 1097270 - DNA, 15 bp, Homo sapiens
ctccccacacaggat

SEQ ID NO: 1097271 - DNA, 15 bp, Homo sapiens
cctccccacacagga

SEQ ID NO: 1097272 - DNA, 15 bp, Homo sapiens
gcctccccacacagg

SEQ ID NO: 1097273 - DNA, 15 bp, Homo sapiens
tgcctccccacacag

SEQ ID NO: 1097274 - DNA, 15 bp, Homo sapiens
ctgcctccccacaca

SEQ ID NO: 1097275 - DNA, 15 bp, Homo sapiens
gctgcctccccacac

SEQ ID NO: 1097276 - DNA, 15 bp, Homo sapiens
agctgcctccccaca

SEQ ID NO: 1097277 - DNA, 15 bp, Homo sapiens
gagctgcctccccac

SEQ ID NO: 1097278 - DNA, 15 bp, Homo sapiens
ggagctgcctcccca

SEQ ID NO: 1097279 - DNA, 15 bp, Homo sapiens
tggagctgcctcccc

SEQ ID NO: 1097280 - DNA, 15 bp, Homo sapiens
ttggagctgcctccc

SEQ ID NO: 1097281 - DNA, 15 bp, Homo sapiens
gttggagctgcctcc

SEQ ID NO: 1097282 - DNA, 15 bp, Homo sapiens
tgttggagctgcctc

SEQ ID NO: 1097283 - DNA, 15 bp, Homo sapiens
ctgttggagctgcct

SEQ ID NO: 1097284 - DNA, 15 bp, Homo sapiens
gctgttggagctgcc

SEQ ID NO: 1097285 - DNA, 15 bp, Homo sapiens
agctgttggagctgc

SEQ ID NO: 1097286 - DNA, 15 bp, Homo sapiens
aagctgttggagctg

SEQ ID NO: 1097287 - DNA, 15 bp, Homo sapiens
caagctgttggagct

SEQ ID NO: 1097288 - DNA, 15 bp, Homo sapiens
tcaagctgttggagc

SEQ ID NO: 1097289 - DNA, 15 bp, Homo sapiens
gtcaagctgttggag

SEQ ID NO: 1097290 - DNA, 15 bp, Homo sapiens
ggtcaagctgttgga

SEQ ID NO: 1097291 - DNA, 15 bp, Homo sapiens
tggtcaagctgttgg

SEQ ID NO: 1097292 - DNA, 15 bp, Homo sapiens
ctggtcaagctgttg

SEQ ID NO: 1097293 - DNA, 15 bp, Homo sapiens
tctggtcaagctgtt

SEQ ID NO: 1097294 - DNA, 15 bp, Homo sapiens
gtctggtcaagctgt

SEQ ID NO: 1097295 - DNA, 15 bp, Homo sapiens
ggtctggtcaagctg

SEQ ID NO: 1097296 - DNA, 15 bp, Homo sapiens
aggtctggtcaagct

SEQ ID NO: 1097297 - DNA, 15 bp, Homo sapiens
taggtctggtcaagc

SEQ ID NO: 1097298 - DNA, 15 bp, Homo sapiens
ctaggtctggtcaag

SEQ ID NO: 1097299 - DNA, 15 bp, Homo sapiens
tctaggtctggtcaa

SEQ ID NO: 1097300 - DNA, 15 bp, Homo sapiens
gtctaggtctggtca

SEQ ID NO: 1097301 - DNA, 15 bp, Homo sapiens
ggtctaggtctggtc

SEQ ID NO: 1097302 - DNA, 15 bp, Homo sapiens
aggtctaggtctggt

SEQ ID NO: 1097303 - DNA, 15 bp, Homo sapiens
caggtctaggtctgg

SEQ ID NO: 1097304 - DNA, 15 bp, Homo sapiens
ccaggtctaggtctg

SEQ ID NO: 1097305 - DNA, 15 bp, Homo sapiens
cccaggtctaggtct

SEQ ID NO: 1097306 - DNA, 15 bp, Homo sapiens
gcccaggtctaggtc

SEQ ID NO: 1097307 - DNA, 15 bp, Homo sapiens
ggcccaggtctaggt

SEQ ID NO: 1097308 - DNA, 15 bp, Homo sapiens
tggcccaggtctagg

SEQ ID NO: 1097309 - DNA, 15 bp, Homo sapiens
ttggcccaggtctag

SEQ ID NO: 1097310 - DNA, 15 bp, Homo sapiens
tttggcccaggtcta

SEQ ID NO: 1097311 - DNA, 15 bp, Homo sapiens
ttttggcccaggtct

SEQ ID NO: 1097312 - DNA, 15 bp, Homo sapiens
cttttggcccaggtc

SEQ ID NO: 1097313 - DNA, 15 bp, Homo sapiens
ccttttggcccaggt

SEQ ID NO: 1097314 - DNA, 15 bp, Homo sapiens
cccttttggcccagg

SEQ ID NO: 1097315 - DNA, 15 bp, Homo sapiens
gcccttttggcccag

SEQ ID NO: 1097316 - DNA, 15 bp, Homo sapiens
tgcccttttggccca

SEQ ID NO: 1097317 - DNA, 15 bp, Homo sapiens
ctgcccttttggccc

SEQ ID NO: 1097318 - DNA, 15 bp, Homo sapiens
gctgcccttttggcc

SEQ ID NO: 1097319 - DNA, 15 bp, Homo sapiens
ggctgcccttttggc

SEQ ID NO: 1097320 - DNA, 15 bp, Homo sapiens
tggctgcccttttgg

SEQ ID NO: 1097321 - DNA, 15 bp, Homo sapiens
ctggctgcccttttg

SEQ ID NO: 1097322 - DNA, 15 bp, Homo sapiens
cctggctgccctttt

SEQ ID NO: 1097323 - DNA, 15 bp, Homo sapiens
ccctggctgcccttt

SEQ ID NO: 1097324 - DNA, 15 bp, Homo sapiens
cccctggctgccctt

SEQ ID NO: 1097325 - DNA, 15 bp, Homo sapiens
gcccctggctgccct

SEQ ID NO: 1097326 - DNA, 15 bp, Homo sapiens
agcccctggctgccc

SEQ ID NO: 1097327 - DNA, 15 bp, Homo sapiens
cagcccctggctgcc

SEQ ID NO: 1097328 - DNA, 15 bp, Homo sapiens
gcagcccctggctgc

SEQ ID NO: 1097329 - DNA, 15 bp, Homo sapiens
agcagcccctggctg

SEQ ID NO: 1097330 - DNA, 15 bp, Homo sapiens
gagcagcccctggct

SEQ ID NO: 1097331 - DNA, 15 bp, Homo sapiens
tgagcagcccctggc

SEQ ID NO: 1097332 - DNA, 15 bp, Homo sapiens
atgagcagcccctgg

SEQ ID NO: 1097333 - DNA, 15 bp, Homo sapiens
gatgagcagcccctg

SEQ ID NO: 1097334 - DNA, 15 bp, Homo sapiens
tgatgagcagcccct

SEQ ID NO: 1097335 - DNA, 15 bp, Homo sapiens
gtgatgagcagcccc

SEQ ID NO: 1097336 - DNA, 15 bp, Homo sapiens
ggtgatgagcagccc

SEQ ID NO: 1097337 - DNA, 15 bp, Homo sapiens
gggtgatgagcagcc

SEQ ID NO: 1097338 - DNA, 15 bp, Homo sapiens
tgggtgatgagcagc

SEQ ID NO: 1097339 - DNA, 15 bp, Homo sapiens
ctgggtgatgagcag

SEQ ID NO: 1097340 - DNA, 15 bp, Homo sapiens
actgggtgatgagca

SEQ ID NO: 1097341 - DNA, 15 bp, Homo sapiens
gactgggtgatgagc

SEQ ID NO: 1097342 - DNA, 15 bp, Homo sapiens
ggactgggtgatgag

SEQ ID NO: 1097343 - DNA, 15 bp, Homo sapiens
aggactgggtgatga

SEQ ID NO: 1097344 - DNA, 15 bp, Homo sapiens
caggactgggtgatg

SEQ ID NO: 1097345 - DNA, 15 bp, Homo sapiens
ccaggactgggtgat

SEQ ID NO: 1097346 - DNA, 15 bp, Homo sapiens
gccaggactgggtga

SEQ ID NO: 1097347 - DNA, 15 bp, Homo sapiens
ggccaggactgggtg

SEQ ID NO: 1097348 - DNA, 15 bp, Homo sapiens
tggccaggactgggt

SEQ ID NO: 1097349 - DNA, 15 bp, Homo sapiens
atggccaggactggg

SEQ ID NO: 1097350 - DNA, 15 bp, Homo sapiens
aatggccaggactgg

SEQ ID NO: 1097351 - DNA, 15 bp, Homo sapiens
aaatggccaggactg

SEQ ID NO: 1097352 - DNA, 15 bp, Homo sapiens
aaaatggccaggact

SEQ ID NO: 1097353 - DNA, 15 bp, Homo sapiens
gaaaatggccaggac

SEQ ID NO: 1097354 - DNA, 15 bp, Homo sapiens
agaaaatggccagga

SEQ ID NO: 1097355 - DNA, 15 bp, Homo sapiens
aagaaaatggccagg

SEQ ID NO: 1097356 - DNA, 15 bp, Homo sapiens
caagaaaatggccag

SEQ ID NO: 1097357 - DNA, 15 bp, Homo sapiens
gcaagaaaatggcca

SEQ ID NO: 1097358 - DNA, 15 bp, Homo sapiens
ggcaagaaaatggcc

SEQ ID NO: 1097359 - DNA, 15 bp, Homo sapiens
aggcaagaaaatggc

SEQ ID NO: 1097360 - DNA, 15 bp, Homo sapiens
caggcaagaaaatgg

SEQ ID NO: 1097361 - DNA, 15 bp, Homo sapiens
tcaggcaagaaaatg

SEQ ID NO: 1097362 - DNA, 15 bp, Homo sapiens
ctcaggcaagaaaat

SEQ ID NO: 1097363 - DNA, 15 bp, Homo sapiens
cctcaggcaagaaaa

SEQ ID NO: 1097364 - DNA, 15 bp, Homo sapiens
gcctcaggcaagaaa

SEQ ID NO: 1097365 - DNA, 15 bp, Homo sapiens
agcctcaggcaagaa

SEQ ID NO: 1097366 - DNA, 15 bp, Homo sapiens
gagcctcaggcaaga

SEQ ID NO: 1097367 - DNA, 15 bp, Homo sapiens
tgagcctcaggcaag

SEQ ID NO: 1097368 - DNA, 15 bp, Homo sapiens
ttgagcctcaggcaa

SEQ ID NO: 1097369 - DNA, 15 bp, Homo sapiens
cttgagcctcaggca

SEQ ID NO: 1097370 - DNA, 15 bp, Homo sapiens
tcttgagcctcaggc

SEQ ID NO: 1097371 - DNA, 15 bp, Homo sapiens
ctcttgagcctcagg

SEQ ID NO: 1097372 - DNA, 15 bp, Homo sapiens
cctcttgagcctcag

SEQ ID NO: 1097373 - DNA, 15 bp, Homo sapiens
gcctcttgagcctca

SEQ ID NO: 1097374 - DNA, 15 bp, Homo sapiens
ggcctcttgagcctc

SEQ ID NO: 1097375 - DNA, 15 bp, Homo sapiens
gggcctcttgagcct

SEQ ID NO: 1097376 - DNA, 15 bp, Homo sapiens
tgggcctcttgagcc

SEQ ID NO: 1097377 - DNA, 15 bp, Homo sapiens
ctgggcctcttgagc

SEQ ID NO: 1097378 - DNA, 15 bp, Homo sapiens
cctgggcctcttgag

SEQ ID NO: 1097379 - DNA, 15 bp, Homo sapiens
ccctgggcctcttga

SEQ ID NO: 1097380 - DNA, 15 bp, Homo sapiens
tccctgggcctcttg

SEQ ID NO: 1097381 - DNA, 15 bp, Homo sapiens
ctccctgggcctctt

SEQ ID NO: 1097382 - DNA, 15 bp, Homo sapiens
gctccctgggcctct

SEQ ID NO: 1097383 - DNA, 15 bp, Homo sapiens
tgctccctgggcctc

SEQ ID NO: 1097384 - DNA, 15 bp, Homo sapiens
ttgctccctgggcct

SEQ ID NO: 1097385 - DNA, 15 bp, Homo sapiens
attgctccctgggcc

SEQ ID NO: 1097386 - DNA, 15 bp, Homo sapiens
cattgctccctgggc

SEQ ID NO: 1097387 - DNA, 15 bp, Homo sapiens
ccattgctccctggg

SEQ ID NO: 1097388 - DNA, 15 bp, Homo sapiens
cccattgctccctgg

SEQ ID NO: 1097389 - DNA, 15 bp, Homo sapiens
tcccattgctccctg

SEQ ID NO: 1097390 - DNA, 15 bp, Homo sapiens
ctcccattgctccct

SEQ ID NO: 1097391 - DNA, 15 bp, Homo sapiens
cctcccattgctccc

SEQ ID NO: 1097392 - DNA, 15 bp, Homo sapiens
ccctcccattgctcc

SEQ ID NO: 1097393 - DNA, 15 bp, Homo sapiens
cccctcccattgctc

SEQ ID NO: 1097394 - DNA, 15 bp, Homo sapiens
ccccctcccattgct

SEQ ID NO: 1097395 - DNA, 15 bp, Homo sapiens
gccccctcccattgc

SEQ ID NO: 1097396 - DNA, 15 bp, Homo sapiens
agccccctcccattg

SEQ ID NO: 1097397 - DNA, 15 bp, Homo sapiens
gagccccctcccatt

SEQ ID NO: 1097398 - DNA, 15 bp, Homo sapiens
ggagccccctcccat

SEQ ID NO: 1097399 - DNA, 15 bp, Homo sapiens
tggagccccctccca

SEQ ID NO: 1097400 - DNA, 15 bp, Homo sapiens
atggagccccctccc

SEQ ID NO: 1097401 - DNA, 15 bp, Homo sapiens
catggagccccctcc

SEQ ID NO: 1097402 - DNA, 15 bp, Homo sapiens
ccatggagccccctc

SEQ ID NO: 1097403 - DNA, 15 bp, Homo sapiens
tccatggagccccct

SEQ ID NO: 1097404 - DNA, 15 bp, Homo sapiens
ctccatggagccccc

SEQ ID NO: 1097405 - DNA, 15 bp, Homo sapiens
cctccatggagcccc

SEQ ID NO: 1097406 - DNA, 15 bp, Homo sapiens
tcctccatggagccc

SEQ ID NO: 1097407 - DNA, 15 bp, Homo sapiens
ctcctccatggagcc

SEQ ID NO: 1097408 - DNA, 15 bp, Homo sapiens
cctcctccatggagc

SEQ ID NO: 1097409 - DNA, 15 bp, Homo sapiens
acctcctccatggag

SEQ ID NO: 1097410 - DNA, 15 bp, Homo sapiens
cacctcctccatgga

SEQ ID NO: 1097411 - DNA, 15 bp, Homo sapiens
acacctcctccatgg

SEQ ID NO: 1097412 - DNA, 15 bp, Homo sapiens
gacacctcctccatg

SEQ ID NO: 1097413 - DNA, 15 bp, Homo sapiens
ggacacctcctccat

SEQ ID NO: 1097414 - DNA, 15 bp, Homo sapiens
gggacacctcctcca

SEQ ID NO: 1097415 - DNA, 15 bp, Homo sapiens
tgggacacctcctcc

SEQ ID NO: 1097416 - DNA, 15 bp, Homo sapiens
ttgggacacctcctc

SEQ ID NO: 1097417 - DNA, 15 bp, Homo sapiens
cttgggacacctcct

SEQ ID NO: 1097418 - DNA, 15 bp, Homo sapiens
gcttgggacacctcc

SEQ ID NO: 1097419 - DNA, 15 bp, Homo sapiens
agcttgggacacctc

SEQ ID NO: 1097420 - DNA, 15 bp, Homo sapiens
aagcttgggacacct

SEQ ID NO: 1097421 - DNA, 15 bp, Homo sapiens
aaagcttgggacacc

SEQ ID NO: 1097422 - DNA, 15 bp, Homo sapiens
caaagcttgggacac

SEQ ID NO: 1097423 - DNA, 15 bp, Homo sapiens
tcaaagcttgggaca

SEQ ID NO: 1097424 - DNA, 15 bp, Homo sapiens
ttcaaagcttgggac

SEQ ID NO: 1097425 - DNA, 15 bp, Homo sapiens
attcaaagcttggga

SEQ ID NO: 1097426 - DNA, 15 bp, Homo sapiens
tattcaaagcttggg

SEQ ID NO: 1097427 - DNA, 15 bp, Homo sapiens
gtattcaaagcttgg

SEQ ID NO: 1097428 - DNA, 15 bp, Homo sapiens
ggtattcaaagcttg

SEQ ID NO: 1097429 - DNA, 15 bp, Homo sapiens
gggtattcaaagctt

SEQ ID NO: 1097430 - DNA, 15 bp, Homo sapiens
ggggtattcaaagct

SEQ ID NO: 1097431 - DNA, 15 bp, Homo sapiens
gggggtattcaaagc

SEQ ID NO: 1097432 - DNA, 15 bp, Homo sapiens
tgggggtattcaaag

SEQ ID NO: 1097433 - DNA, 15 bp, Homo sapiens
ctgggggtattcaaa

SEQ ID NO: 1097434 - DNA, 15 bp, Homo sapiens
tctgggggtattcaa

SEQ ID NO: 1097435 - DNA, 15 bp, Homo sapiens
ctctgggggtattca

SEQ ID NO: 1097436 - DNA, 15 bp, Homo sapiens
tctctgggggtattc

SEQ ID NO: 1097437 - DNA, 15 bp, Homo sapiens
gtctctgggggtatt

SEQ ID NO: 1097438 - DNA, 15 bp, Homo sapiens
ggtctctgggggtat

SEQ ID NO: 1097439 - DNA, 15 bp, Homo sapiens
aggtctctgggggta

SEQ ID NO: 1097440 - DNA, 15 bp, Homo sapiens
aaggtctctgggggt

SEQ ID NO: 1097441 - DNA, 15 bp, Homo sapiens
aaaggtctctggggg

SEQ ID NO: 1097442 - DNA, 15 bp, Homo sapiens
aaaaggtctctgggg

SEQ ID NO: 1097443 - DNA, 15 bp, Homo sapiens
gaaaaggtctctggg

SEQ ID NO: 1097444 - DNA, 15 bp, Homo sapiens
agaaaaggtctctgg

SEQ ID NO: 1097445 - DNA, 15 bp, Homo sapiens
gagaaaaggtctctg

SEQ ID NO: 1097446 - DNA, 15 bp, Homo sapiens
agagaaaaggtctct

SEQ ID NO: 1097447 - DNA, 15 bp, Homo sapiens
gagagaaaaggtctc

SEQ ID NO: 1097448 - DNA, 15 bp, Homo sapiens
ggagagaaaaggtct

SEQ ID NO: 1097449 - DNA, 15 bp, Homo sapiens
gggagagaaaaggtc

SEQ ID NO: 1097450 - DNA, 15 bp, Homo sapiens
tgggagagaaaaggt

SEQ ID NO: 1097451 - DNA, 15 bp, Homo sapiens
atgggagagaaaagg

SEQ ID NO: 1097452 - DNA, 15 bp, Homo sapiens
tatgggagagaaaag

SEQ ID NO: 1097453 - DNA, 15 bp, Homo sapiens
gtatgggagagaaaa

SEQ ID NO: 1097454 - DNA, 15 bp, Homo sapiens
ggtatgggagagaaa

SEQ ID NO: 1097455 - DNA, 15 bp, Homo sapiens
tggtatgggagagaa

SEQ ID NO: 1097456 - DNA, 15 bp, Homo sapiens
atggtatgggagaga

SEQ ID NO: 1097457 - DNA, 15 bp, Homo sapiens
gatggtatgggagag

SEQ ID NO: 1097458 - DNA, 15 bp, Homo sapiens
tgatggtatgggaga

SEQ ID NO: 1097459 - DNA, 15 bp, Homo sapiens
gtgatggtatgggag

SEQ ID NO: 1097460 - DNA, 15 bp, Homo sapiens
agtgatggtatggga

SEQ ID NO: 1097461 - DNA, 15 bp, Homo sapiens
cagtgatggtatggg

SEQ ID NO: 1097462 - DNA, 15 bp, Homo sapiens
tcagtgatggtatgg

SEQ ID NO: 1097463 - DNA, 15 bp, Homo sapiens
ctcagtgatggtatg

SEQ ID NO: 1097464 - DNA, 15 bp, Homo sapiens
actcagtgatggtat

SEQ ID NO: 1097465 - DNA, 15 bp, Homo sapiens
cactcagtgatggta

SEQ ID NO: 1097466 - DNA, 15 bp, Homo sapiens
ccactcagtgatggt

SEQ ID NO: 1097467 - DNA, 15 bp, Homo sapiens
gccactcagtgatgg

SEQ ID NO: 1097468 - DNA, 15 bp, Homo sapiens
agccactcagtgatg

SEQ ID NO: 1097469 - DNA, 15 bp, Homo sapiens
aagccactcagtgat

SEQ ID NO: 1097470 - DNA, 15 bp, Homo sapiens
caagccactcagtga

SEQ ID NO: 1097471 - DNA, 15 bp, Homo sapiens
acaagccactcagtg

SEQ ID NO: 1097472 - DNA, 15 bp, Homo sapiens
cacaagccactcagt

SEQ ID NO: 1097473 - DNA, 15 bp, Homo sapiens
tcacaagccactcag

SEQ ID NO: 1097474 - DNA, 15 bp, Homo sapiens
atcacaagccactca

SEQ ID NO: 1097475 - DNA, 15 bp, Homo sapiens
aatcacaagccactc

SEQ ID NO: 1097476 - DNA, 15 bp, Homo sapiens
gaatcacaagccact

SEQ ID NO: 1097477 - DNA, 15 bp, Homo sapiens
agaatcacaagccac

SEQ ID NO: 1097478 - DNA, 15 bp, Homo sapiens
cagaatcacaagcca

SEQ ID NO: 1097479 - DNA, 15 bp, Homo sapiens
ccagaatcacaagcc

SEQ ID NO: 1097480 - DNA, 15 bp, Homo sapiens
cccagaatcacaagc

SEQ ID NO: 1097481 - DNA, 15 bp, Homo sapiens
tcccagaatcacaag

SEQ ID NO: 1097482 - DNA, 15 bp, Homo sapiens
atcccagaatcacaa

SEQ ID NO: 1097483 - DNA, 15 bp, Homo sapiens
catcccagaatcaca

SEQ ID NO: 1097484 - DNA, 15 bp, Homo sapiens
ccatcccagaatcac

SEQ ID NO: 1097485 - DNA, 15 bp, Homo sapiens
tccatcccagaatca

SEQ ID NO: 1097486 - DNA, 15 bp, Homo sapiens
gtccatcccagaatc

SEQ ID NO: 1097487 - DNA, 15 bp, Homo sapiens
ggtccatcccagaat

SEQ ID NO: 1097488 - DNA, 15 bp, Homo sapiens
gggtccatcccagaa

SEQ ID NO: 1097489 - DNA, 15 bp, Homo sapiens
agggtccatcccaga

SEQ ID NO: 1097490 - DNA, 15 bp, Homo sapiens
gagggtccatcccag

SEQ ID NO: 1097491 - DNA, 15 bp, Homo sapiens
cgagggtccatccca

SEQ ID NO: 1097492 - DNA, 15 bp, Homo sapiens
gcgagggtccatccc

SEQ ID NO: 1097493 - DNA, 15 bp, Homo sapiens
tgcgagggtccatcc

SEQ ID NO: 1097494 - DNA, 15 bp, Homo sapiens
ctgcgagggtccatc

SEQ ID NO: 1097495 - DNA, 15 bp, Homo sapiens
gctgcgagggtccat

SEQ ID NO: 1097496 - DNA, 15 bp, Homo sapiens
tgctgcgagggtcca

SEQ ID NO: 1097497 - DNA, 15 bp, Homo sapiens
ctgctgcgagggtcc

SEQ ID NO: 1097498 - DNA, 15 bp, Homo sapiens
cctgctgcgagggtc

SEQ ID NO: 1097499 - DNA, 15 bp, Homo sapiens
acctgctgcgagggt

SEQ ID NO: 1097500 - DNA, 15 bp, Homo sapiens
cacctgctgcgaggg

SEQ ID NO: 1097501 - DNA, 15 bp, Homo sapiens
gcacctgctgcgagg

SEQ ID NO: 1097502 - DNA, 15 bp, Homo sapiens
tgcacctgctgcgag

SEQ ID NO: 1097503 - DNA, 15 bp, Homo sapiens
ttgcacctgctgcga

SEQ ID NO: 1097504 - DNA, 15 bp, Homo sapiens
cttgcacctgctgcg

SEQ ID NO: 1097505 - DNA, 15 bp, Homo sapiens
tcttgcacctgctgc

SEQ ID NO: 1097506 - DNA, 15 bp, Homo sapiens
ctcttgcacctgctg

SEQ ID NO: 1097507 - DNA, 15 bp, Homo sapiens
tctcttgcacctgct

SEQ ID NO: 1097508 - DNA, 15 bp, Homo sapiens
gtctcttgcacctgc

SEQ ID NO: 1097509 - DNA, 15 bp, Homo sapiens
tgtctcttgcacctg

SEQ ID NO: 1097510 - DNA, 15 bp, Homo sapiens
ctgtctcttgcacct

SEQ ID NO: 1097511 - DNA, 15 bp, Homo sapiens
tctgtctcttgcacc

SEQ ID NO: 1097512 - DNA, 15 bp, Homo sapiens
ctctgtctcttgcac

SEQ ID NO: 1097513 - DNA, 15 bp, Homo sapiens
gctctgtctcttgca

SEQ ID NO: 1097514 - DNA, 15 bp, Homo sapiens
ggctctgtctcttgc

SEQ ID NO: 1097515 - DNA, 15 bp, Homo sapiens
gggctctgtctcttg

SEQ ID NO: 1097516 - DNA, 15 bp, Homo sapiens
ggggctctgtctctt

SEQ ID NO: 1097517 - DNA, 15 bp, Homo sapiens
gggggctctgtctct

SEQ ID NO: 1097518 - DNA, 15 bp, Homo sapiens
tgggggctctgtctc

SEQ ID NO: 1097519 - DNA, 15 bp, Homo sapiens
ttgggggctctgtct

SEQ ID NO: 1097520 - DNA, 15 bp, Homo sapiens
cttgggggctctgtc

SEQ ID NO: 1097521 - DNA, 15 bp, Homo sapiens
gcttgggggctctgt

SEQ ID NO: 1097522 - DNA, 15 bp, Homo sapiens
ggcttgggggctctg

SEQ ID NO: 1097523 - DNA, 15 bp, Homo sapiens
aggcttgggggctct

SEQ ID NO: 1097524 - DNA, 15 bp, Homo sapiens
gaggcttgggggctc

SEQ ID NO: 1097525 - DNA, 15 bp, Homo sapiens
agaggcttgggggct

SEQ ID NO: 1097526 - DNA, 15 bp, Homo sapiens
cagaggcttgggggc

SEQ ID NO: 1097527 - DNA, 15 bp, Homo sapiens
gcagaggcttggggg

SEQ ID NO: 1097528 - DNA, 15 bp, Homo sapiens
ggcagaggcttgggg

SEQ ID NO: 1097529 - DNA, 15 bp, Homo sapiens
gggcagaggcttggg

SEQ ID NO: 1097530 - DNA, 15 bp, Homo sapiens
ggggcagaggcttgg

SEQ ID NO: 1097531 - DNA, 15 bp, Homo sapiens
tggggcagaggcttg

SEQ ID NO: 1097532 - DNA, 15 bp, Homo sapiens
ttggggcagaggctt

SEQ ID NO: 1097533 - DNA, 15 bp, Homo sapiens
cttggggcagaggct

SEQ ID NO: 1097534 - DNA, 15 bp, Homo sapiens
ccttggggcagaggc

SEQ ID NO: 1097535 - DNA, 15 bp, Homo sapiens
cccttggggcagagg

SEQ ID NO: 1097536 - DNA, 15 bp, Homo sapiens
ccccttggggcagag

SEQ ID NO: 1097537 - DNA, 15 bp, Homo sapiens
gccccttggggcaga

SEQ ID NO: 1097538 - DNA, 15 bp, Homo sapiens
ggccccttggggcag

SEQ ID NO: 1097539 - DNA, 15 bp, Homo sapiens
gggccccttggggca

SEQ ID NO: 1097540 - DNA, 15 bp, Homo sapiens
tgggccccttggggc

SEQ ID NO: 1097541 - DNA, 15 bp, Homo sapiens
gtgggccccttgggg

SEQ ID NO: 1097542 - DNA, 15 bp, Homo sapiens
tgtgggccccttggg

SEQ ID NO: 1097543 - DNA, 15 bp, Homo sapiens
ttgtgggccccttgg

SEQ ID NO: 1097544 - DNA, 15 bp, Homo sapiens
tttgtgggccccttg

SEQ ID NO: 1097545 - DNA, 15 bp, Homo sapiens
ctttgtgggcccctt

SEQ ID NO: 1097546 - DNA, 15 bp, Homo sapiens
cctttgtgggcccct

SEQ ID NO: 1097547 - DNA, 15 bp, Homo sapiens
ccctttgtgggcccc

SEQ ID NO: 1097548 - DNA, 15 bp, Homo sapiens
cccctttgtgggccc

SEQ ID NO: 1097549 - DNA, 15 bp, Homo sapiens
tcccctttgtgggcc

SEQ ID NO: 1097550 - DNA, 15 bp, Homo sapiens
ctcccctttgtgggc

SEQ ID NO: 1097551 - DNA, 15 bp, Homo sapiens
tctcccctttgtggg

SEQ ID NO: 1097552 - DNA, 15 bp, Homo sapiens
ttctcccctttgtgg

SEQ ID NO: 1097553 - DNA, 15 bp, Homo sapiens
cttctcccctttgtg

SEQ ID NO: 1097554 - DNA, 15 bp, Homo sapiens
ccttctcccctttgt

SEQ ID NO: 1097555 - DNA, 15 bp, Homo sapiens
cccttctcccctttg

SEQ ID NO: 1097556 - DNA, 15 bp, Homo sapiens
gcccttctccccttt

SEQ ID NO: 1097557 - DNA, 15 bp, Homo sapiens
ggcccttctcccctt

SEQ ID NO: 1097558 - DNA, 15 bp, Homo sapiens
tggcccttctcccct

SEQ ID NO: 1097559 - DNA, 15 bp, Homo sapiens
ctggcccttctcccc

SEQ ID NO: 1097560 - DNA, 15 bp, Homo sapiens
gctggcccttctccc

SEQ ID NO: 1097561 - DNA, 15 bp, Homo sapiens
ggctggcccttctcc

SEQ ID NO: 1097562 - DNA, 15 bp, Homo sapiens
gggctggcccttctc

SEQ ID NO: 1097563 - DNA, 15 bp, Homo sapiens
agggctggcccttct

SEQ ID NO: 1097564 - DNA, 15 bp, Homo sapiens
tagggctggcccttc

SEQ ID NO: 1097565 - DNA, 15 bp, Homo sapiens
gtagggctggccctt

SEQ ID NO: 1097566 - DNA, 15 bp, Homo sapiens
tgtagggctggccct

SEQ ID NO: 1097567 - DNA, 15 bp, Homo sapiens
atgtagggctggccc

SEQ ID NO: 1097568 - DNA, 15 bp, Homo sapiens
gatgtagggctggcc

SEQ ID NO: 1097569 - DNA, 15 bp, Homo sapiens
agatgtagggctggc

SEQ ID NO: 1097570 - DNA, 15 bp, Homo sapiens
aagatgtagggctgg

SEQ ID NO: 1097571 - DNA, 15 bp, Homo sapiens
gaagatgtagggctg

SEQ ID NO: 1097572 - DNA, 15 bp, Homo sapiens
tgaagatgtagggct

SEQ ID NO: 1097573 - DNA, 15 bp, Homo sapiens
ctgaagatgtagggc

SEQ ID NO: 1097574 - DNA, 15 bp, Homo sapiens
gctgaagatgtaggg

SEQ ID NO: 1097575 - DNA, 15 bp, Homo sapiens
agctgaagatgtagg

SEQ ID NO: 1097576 - DNA, 15 bp, Homo sapiens
gagctgaagatgtag

SEQ ID NO: 1097577 - DNA, 15 bp, Homo sapiens
ggagctgaagatgta

SEQ ID NO: 1097578 - DNA, 15 bp, Homo sapiens
gggagctgaagatgt

SEQ ID NO: 1097579 - DNA, 15 bp, Homo sapiens
tgggagctgaagatg

SEQ ID NO: 1097580 - DNA, 15 bp, Homo sapiens
atgggagctgaagat

SEQ ID NO: 1097581 - DNA, 15 bp, Homo sapiens
tatgggagctgaaga

SEQ ID NO: 1097582 - DNA, 15 bp, Homo sapiens
ctatgggagctgaag

SEQ ID NO: 1097583 - DNA, 15 bp, Homo sapiens
gctatgggagctgaa

SEQ ID NO: 1097584 - DNA, 15 bp, Homo sapiens
cgctatgggagctga

SEQ ID NO: 1097585 - DNA, 15 bp, Homo sapiens
gcgctatgggagctg

SEQ ID NO: 1097586 - DNA, 15 bp, Homo sapiens
agcgctatgggagct

SEQ ID NO: 1097587 - DNA, 15 bp, Homo sapiens
cagcgctatgggagc

SEQ ID NO: 1097588 - DNA, 15 bp, Homo sapiens
ccagcgctatgggag

SEQ ID NO: 1097589 - DNA, 15 bp, Homo sapiens
gccagcgctatggga

SEQ ID NO: 1097590 - DNA, 15 bp, Homo sapiens
agccagcgctatggg

SEQ ID NO: 1097591 - DNA, 15 bp, Homo sapiens
gagccagcgctatgg

SEQ ID NO: 1097592 - DNA, 15 bp, Homo sapiens
tgagccagcgctatg

SEQ ID NO: 1097593 - DNA, 15 bp, Homo sapiens
ctgagccagcgctat

SEQ ID NO: 1097594 - DNA, 15 bp, Homo sapiens
cctgagccagcgcta

SEQ ID NO: 1097595 - DNA, 15 bp, Homo sapiens
tcctgagccagcgct

SEQ ID NO: 1097596 - DNA, 15 bp, Homo sapiens
ttcctgagccagcgc

SEQ ID NO: 1097597 - DNA, 15 bp, Homo sapiens
cttcctgagccagcg

SEQ ID NO: 1097598 - DNA, 15 bp, Homo sapiens
tcttcctgagccagc

SEQ ID NO: 1097599 - DNA, 15 bp, Homo sapiens
ttcttcctgagccag

SEQ ID NO: 1097600 - DNA, 15 bp, Homo sapiens
tttcttcctgagcca

SEQ ID NO: 1097601 - DNA, 15 bp, Homo sapiens
gtttcttcctgagcc

SEQ ID NO: 1097602 - DNA, 15 bp, Homo sapiens
ggtttcttcctgagc

SEQ ID NO: 1097603 - DNA, 15 bp, Homo sapiens
gggtttcttcctgag

SEQ ID NO: 1097604 - DNA, 15 bp, Homo sapiens
ggggtttcttcctga

SEQ ID NO: 1097605 - DNA, 15 bp, Homo sapiens
tggggtttcttcctg

SEQ ID NO: 1097606 - DNA, 15 bp, Homo sapiens
ttggggtttcttcct

SEQ ID NO: 1097607 - DNA, 15 bp, Homo sapiens
cttggggtttcttcc

SEQ ID NO: 1097608 - DNA, 15 bp, Homo sapiens
gcttggggtttcttc

SEQ ID NO: 1097609 - DNA, 15 bp, Homo sapiens
tgcttggggtttctt

SEQ ID NO: 1097610 - DNA, 15 bp, Homo sapiens
ctgcttggggtttct

SEQ ID NO: 1097611 - DNA, 15 bp, Homo sapiens
gctgcttggggtttc

SEQ ID NO: 1097612 - DNA, 15 bp, Homo sapiens
tgctgcttggggttt

SEQ ID NO: 1097613 - DNA, 15 bp, Homo sapiens
atgctgcttggggtt

SEQ ID NO: 1097614 - DNA, 15 bp, Homo sapiens
aatgctgcttggggt

SEQ ID NO: 1097615 - DNA, 15 bp, Homo sapiens
gaatgctgcttgggg

SEQ ID NO: 1097616 - DNA, 15 bp, Homo sapiens
tgaatgctgcttggg

SEQ ID NO: 1097617 - DNA, 15 bp, Homo sapiens
ctgaatgctgcttgg

SEQ ID NO: 1097618 - DNA, 15 bp, Homo sapiens
gctgaatgctgcttg

SEQ ID NO: 1097619 - DNA, 15 bp, Homo sapiens
tgctgaatgctgctt

SEQ ID NO: 1097620 - DNA, 15 bp, Homo sapiens
gtgctgaatgctgct

SEQ ID NO: 1097621 - DNA, 15 bp, Homo sapiens
tgtgctgaatgctgc

SEQ ID NO: 1097622 - DNA, 15 bp, Homo sapiens
gtgtgctgaatgctg

SEQ ID NO: 1097623 - DNA, 15 bp, Homo sapiens
ggtgtgctgaatgct

SEQ ID NO: 1097624 - DNA, 15 bp, Homo sapiens
gggtgtgctgaatgc

SEQ ID NO: 1097625 - DNA, 15 bp, Homo sapiens
ggggtgtgctgaatg

SEQ ID NO: 1097626 - DNA, 15 bp, Homo sapiens
tggggtgtgctgaat

SEQ ID NO: 1097627 - DNA, 15 bp, Homo sapiens
ttggggtgtgctgaa

SEQ ID NO: 1097628 - DNA, 15 bp, Homo sapiens
cttggggtgtgctga

SEQ ID NO: 1097629 - DNA, 15 bp, Homo sapiens
ccttggggtgtgctg

SEQ ID NO: 1097630 - DNA, 15 bp, Homo sapiens
cccttggggtgtgct

SEQ ID NO: 1097631 - DNA, 15 bp, Homo sapiens
tcccttggggtgtgc

SEQ ID NO: 1097632 - DNA, 15 bp, Homo sapiens
gtcccttggggtgtg

SEQ ID NO: 1097633 - DNA, 15 bp, Homo sapiens
tgtcccttggggtgt

SEQ ID NO: 1097634 - DNA, 15 bp, Homo sapiens
ttgtcccttggggtg

SEQ ID NO: 1097635 - DNA, 15 bp, Homo sapiens
gttgtcccttggggt

SEQ ID NO: 1097636 - DNA, 15 bp, Homo sapiens
ggttgtcccttgggg

SEQ ID NO: 1097637 - DNA, 15 bp, Homo sapiens
gggttgtcccttggg

SEQ ID NO: 1097638 - DNA, 15 bp, Homo sapiens
ggggttgtcccttgg

SEQ ID NO: 1097639 - DNA, 15 bp, Homo sapiens
tggggttgtcccttg

SEQ ID NO: 1097640 - DNA, 15 bp, Homo sapiens
atggggttgtccctt

SEQ ID NO: 1097641 - DNA, 15 bp, Homo sapiens
gatggggttgtccct

SEQ ID NO: 1097642 - DNA, 15 bp, Homo sapiens
tgatggggttgtccc

SEQ ID NO: 1097643 - DNA, 15 bp, Homo sapiens
atgatggggttgtcc

SEQ ID NO: 1097644 - DNA, 15 bp, Homo sapiens
tatgatggggttgtc

SEQ ID NO: 1097645 - DNA, 15 bp, Homo sapiens
atatgatggggttgt

SEQ ID NO: 1097646 - DNA, 15 bp, Homo sapiens
catatgatggggttg

SEQ ID NO: 1097647 - DNA, 15 bp, Homo sapiens
tcatatgatggggtt

SEQ ID NO: 1097648 - DNA, 15 bp, Homo sapiens
gtcatatgatggggt

SEQ ID NO: 1097649 - DNA, 15 bp, Homo sapiens
tgtcatatgatgggg

SEQ ID NO: 1097650 - DNA, 15 bp, Homo sapiens
atgtcatatgatggg

SEQ ID NO: 1097651 - DNA, 15 bp, Homo sapiens
catgtcatatgatgg

SEQ ID NO: 1097652 - DNA, 15 bp, Homo sapiens
gcatgtcatatgatg

SEQ ID NO: 1097653 - DNA, 15 bp, Homo sapiens
ggcatgtcatatgat

SEQ ID NO: 1097654 - DNA, 15 bp, Homo sapiens
tggcatgtcatatga

SEQ ID NO: 1097655 - DNA, 15 bp, Homo sapiens
gtggcatgtcatatg

SEQ ID NO: 1097656 - DNA, 15 bp, Homo sapiens
ggtggcatgtcatat

SEQ ID NO: 1097657 - DNA, 15 bp, Homo sapiens
gggtggcatgtcata

SEQ ID NO: 1097658 - DNA, 15 bp, Homo sapiens
agggtggcatgtcat

SEQ ID NO: 1097659 - DNA, 15 bp, Homo sapiens
gagggtggcatgtca

SEQ ID NO: 1097660 - DNA, 15 bp, Homo sapiens
agagggtggcatgtc

SEQ ID NO: 1097661 - DNA, 15 bp, Homo sapiens
gagagggtggcatgt

SEQ ID NO: 1097662 - DNA, 15 bp, Homo sapiens
ggagagggtggcatg

SEQ ID NO: 1097663 - DNA, 15 bp, Homo sapiens
tggagagggtggcat

SEQ ID NO: 1097664 - DNA, 15 bp, Homo sapiens
atggagagggtggca

SEQ ID NO: 1097665 - DNA, 15 bp, Homo sapiens
catggagagggtggc

SEQ ID NO: 1097666 - DNA, 15 bp, Homo sapiens
gcatggagagggtgg

SEQ ID NO: 1097667 - DNA, 15 bp, Homo sapiens
ggcatggagagggtg

SEQ ID NO: 1097668 - DNA, 15 bp, Homo sapiens
gggcatggagagggt

SEQ ID NO: 1097669 - DNA, 15 bp, Homo sapiens
tgggcatggagaggg

SEQ ID NO: 1097670 - DNA, 15 bp, Homo sapiens
ttgggcatggagagg

SEQ ID NO: 1097671 - DNA, 15 bp, Homo sapiens
gttgggcatggagag

SEQ ID NO: 1097672 - DNA, 15 bp, Homo sapiens
ggttgggcatggaga

SEQ ID NO: 1097673 - DNA, 15 bp, Homo sapiens
aggttgggcatggag

SEQ ID NO: 1097674 - DNA, 15 bp, Homo sapiens
taggttgggcatgga

SEQ ID NO: 1097675 - DNA, 15 bp, Homo sapiens
ttaggttgggcatgg

SEQ ID NO: 1097676 - DNA, 15 bp, Homo sapiens
cttaggttgggcatg

SEQ ID NO: 1097677 - DNA, 15 bp, Homo sapiens
tcttaggttgggcat

SEQ ID NO: 1097678 - DNA, 15 bp, Homo sapiens
atcttaggttgggca

SEQ ID NO: 1097679 - DNA, 15 bp, Homo sapiens
aatcttaggttgggc

SEQ ID NO: 1097680 - DNA, 15 bp, Homo sapiens
caatcttaggttggg

SEQ ID NO: 1097681 - DNA, 15 bp, Homo sapiens
acaatcttaggttgg

SEQ ID NO: 1097682 - DNA, 15 bp, Homo sapiens
cacaatcttaggttg

SEQ ID NO: 1097683 - DNA, 15 bp, Homo sapiens
acacaatcttaggtt

SEQ ID NO: 1097684 - DNA, 15 bp, Homo sapiens
cacacaatcttaggt

SEQ ID NO: 1097685 - DNA, 15 bp, Homo sapiens
ccacacaatcttagg

SEQ ID NO: 1097686 - DNA, 15 bp, Homo sapiens
cccacacaatcttag

SEQ ID NO: 1097687 - DNA, 15 bp, Homo sapiens
acccacacaatctta

SEQ ID NO: 1097688 - DNA, 15 bp, Homo sapiens
aacccacacaatctt

SEQ ID NO: 1097689 - DNA, 15 bp, Homo sapiens
aaacccacacaatct

SEQ ID NO: 1097690 - DNA, 15 bp, Homo sapiens
aaaacccacacaatc

SEQ ID NO: 1097691 - DNA, 15 bp, Homo sapiens
aaaaacccacacaat

SEQ ID NO: 1097692 - DNA, 15 bp, Homo sapiens
aaaaaacccacacaa

SEQ ID NO: 1097693 - DNA, 15 bp, Homo sapiens
taaaaaacccacaca

SEQ ID NO: 1097694 - DNA, 15 bp, Homo sapiens
ttaaaaaacccacac

SEQ ID NO: 1097695 - DNA, 15 bp, Homo sapiens
attaaaaaacccaca

SEQ ID NO: 1097696 - DNA, 15 bp, Homo sapiens
aattaaaaaacccac

SEQ ID NO: 1097697 - DNA, 15 bp, Homo sapiens
taattaaaaaaccca

SEQ ID NO: 1097698 - DNA, 15 bp, Homo sapiens
ttaattaaaaaaccc

SEQ ID NO: 1097699 - DNA, 15 bp, Homo sapiens
tttaattaaaaaacc

SEQ ID NO: 1097700 - DNA, 15 bp, Homo sapiens
ttttaattaaaaaac

SEQ ID NO: 1097701 - DNA, 15 bp, Homo sapiens
aacatttttaattaa

SEQ ID NO: 1097702 - DNA, 15 bp, Homo sapiens
taacatttttaatta

SEQ ID NO: 1097703 - DNA, 15 bp, Homo sapiens
ttaacatttttaatt

SEQ ID NO: 1097704 - DNA, 15 bp, Homo sapiens
tttaacatttttaat

SEQ ID NO: 1097705 - DNA, 15 bp, Homo sapiens
ttttaacatttttaa

SEQ ID NO: 1097706 - DNA, 15 bp, Homo sapiens
cttttaacattttta

SEQ ID NO: 1097707 - DNA, 15 bp, Homo sapiens
acttttaacattttt

SEQ ID NO: 1097708 - DNA, 15 bp, Homo sapiens
aacttttaacatttt

SEQ ID NO: 1097709 - DNA, 15 bp, Homo sapiens
aaacttttaacattt

SEQ ID NO: 1097710 - DNA, 15 bp, Homo sapiens
aaaacttttaacatt

SEQ ID NO: 1097711 - DNA, 15 bp, Homo sapiens
taaaacttttaacat

SEQ ID NO: 1097712 - DNA, 15 bp, Homo sapiens
ttaaaacttttaaca

SEQ ID NO: 1097713 - DNA, 15 bp, Homo sapiens
tttaaaacttttaac

SEQ ID NO: 1097714 - DNA, 15 bp, Homo sapiens
gtttaaaacttttaa

SEQ ID NO: 1097715 - DNA, 15 bp, Homo sapiens
tgtttaaaactttta

SEQ ID NO: 1097716 - DNA, 15 bp, Homo sapiens
atgtttaaaactttt

SEQ ID NO: 1097717 - DNA, 15 bp, Homo sapiens
catgtttaaaacttt

SEQ ID NO: 1097718 - DNA, 15 bp, Homo sapiens
gcacaggctggagtg

SEQ ID NO: 1097719 - DNA, 15 bp, Homo sapiens
cgcacaggctggagt

SEQ ID NO: 1097720 - DNA, 15 bp, Homo sapiens
tcgcacaggctggag

SEQ ID NO: 1097721 - DNA, 15 bp, Homo sapiens
ctcgcacaggctgga

SEQ ID NO: 1097722 - DNA, 15 bp, Homo sapiens
tctcgcacaggctgg

SEQ ID NO: 1097723 - DNA, 15 bp, Homo sapiens
ctctcgcacaggctg

SEQ ID NO: 1097724 - DNA, 15 bp, Homo sapiens
actctcgcacaggct

SEQ ID NO: 1097725 - DNA, 15 bp, Homo sapiens
cactctcgcacaggc

SEQ ID NO: 1097726 - DNA, 15 bp, Homo sapiens
tcactctcgcacagg

SEQ ID NO: 1097727 - DNA, 15 bp, Homo sapiens
ctcactctcgcacag

SEQ ID NO: 1097728 - DNA, 15 bp, Homo sapiens
tctcactctcgcaca

SEQ ID NO: 1097729 - DNA, 15 bp, Homo sapiens
gtctcactctcgcac

SEQ ID NO: 1097730 - DNA, 15 bp, Homo sapiens
agtctcactctcgca

SEQ ID NO: 1097731 - DNA, 15 bp, Homo sapiens
gagtctcactctcgc

SEQ ID NO: 1097732 - DNA, 15 bp, Homo sapiens
agagtctcactctcg

SEQ ID NO: 1097733 - DNA, 15 bp, Homo sapiens
cagagtctcactctc

SEQ ID NO: 1097734 - DNA, 15 bp, Homo sapiens
tcccttttttttttt

SEQ ID NO: 1097735 - DNA, 15 bp, Homo sapiens
ttccctttttttttt

SEQ ID NO: 1097736 - DNA, 15 bp, Homo sapiens
attcccttttttttt

SEQ ID NO: 1097737 - DNA, 15 bp, Homo sapiens
aattccctttttttt

SEQ ID NO: 1097738 - DNA, 15 bp, Homo sapiens
aaattcccttttttt

SEQ ID NO: 1097739 - DNA, 15 bp, Homo sapiens
taaattccctttttt

SEQ ID NO: 1097740 - DNA, 15 bp, Homo sapiens
ttaaattcccttttt

SEQ ID NO: 1097741 - DNA, 15 bp, Homo sapiens
cttaaattccctttt

SEQ ID NO: 1097742 - DNA, 15 bp, Homo sapiens
tcttaaattcccttt

SEQ ID NO: 1097743 - DNA, 15 bp, Homo sapiens
ttcttaaattccctt

SEQ ID NO: 1097744 - DNA, 15 bp, Homo sapiens
tttcttaaattccct

SEQ ID NO: 1097745 - DNA, 15 bp, Homo sapiens
atttcttaaattccc

SEQ ID NO: 1097746 - DNA, 15 bp, Homo sapiens
aatttcttaaattcc

SEQ ID NO: 1097747 - DNA, 15 bp, Homo sapiens
aaatttcttaaattc

SEQ ID NO: 1097748 - DNA, 15 bp, Homo sapiens
taaatttcttaaatt

SEQ ID NO: 1097749 - DNA, 15 bp, Homo sapiens
ttaaatttcttaaat

SEQ ID NO: 1097750 - DNA, 15 bp, Homo sapiens
tttaaatttcttaaa

SEQ ID NO: 1097751 - DNA, 15 bp, Homo sapiens
ttttaaatttcttaa

SEQ ID NO: 1097752 - DNA, 15 bp, Homo sapiens
cttttaaatttctta

SEQ ID NO: 1097753 - DNA, 15 bp, Homo sapiens
tcttttaaatttctt

SEQ ID NO: 1097754 - DNA, 15 bp, Homo sapiens
ttcttttaaatttct

SEQ ID NO: 1097755 - DNA, 15 bp, Homo sapiens
tttcttttaaatttc

SEQ ID NO: 1097756 - DNA, 15 bp, Homo sapiens
ttttcttttaaattt

SEQ ID NO: 1097757 - DNA, 15 bp, Homo sapiens
gttttcttttaaatt

SEQ ID NO: 1097758 - DNA, 15 bp, Homo sapiens
agttttcttttaaat

SEQ ID NO: 1097759 - DNA, 15 bp, Homo sapiens
gagttttcttttaaa

SEQ ID NO: 1097760 - DNA, 15 bp, Homo sapiens
agagttttcttttaa

SEQ ID NO: 1097761 - DNA, 15 bp, Homo sapiens
aagagttttctttta

SEQ ID NO: 1097762 - DNA, 15 bp, Homo sapiens
caagagttttctttt

SEQ ID NO: 1097763 - DNA, 15 bp, Homo sapiens
acaagagttttcttt

SEQ ID NO: 1097764 - DNA, 15 bp, Homo sapiens
aacaagagttttctt

SEQ ID NO: 1097765 - DNA, 15 bp, Homo sapiens
taacaagagttttct

SEQ ID NO: 1097766 - DNA, 15 bp, Homo sapiens
ataacaagagttttc

SEQ ID NO: 1097767 - DNA, 15 bp, Homo sapiens
tataacaagagtttt

SEQ ID NO: 1097768 - DNA, 15 bp, Homo sapiens
atataacaagagttt

SEQ ID NO: 1097769 - DNA, 15 bp, Homo sapiens
tatataacaagagtt

SEQ ID NO: 1097770 - DNA, 15 bp, Homo sapiens
ttatataacaagagt

SEQ ID NO: 1097771 - DNA, 15 bp, Homo sapiens
tttatataacaagag

SEQ ID NO: 1097772 - DNA, 15 bp, Homo sapiens
ttttatataacaaga

SEQ ID NO: 1097773 - DNA, 15 bp, Homo sapiens
tttttatataacaag

SEQ ID NO: 1097774 - DNA, 15 bp, Homo sapiens
ctttttatataacaa

SEQ ID NO: 1097775 - DNA, 15 bp, Homo sapiens
cctttttatataaca

SEQ ID NO: 1097776 - DNA, 15 bp, Homo sapiens
ccctttttatataac

SEQ ID NO: 1097777 - DNA, 15 bp, Homo sapiens
accctttttatataa

SEQ ID NO: 1097778 - DNA, 15 bp, Homo sapiens
taccctttttatata

SEQ ID NO: 1097779 - DNA, 15 bp, Homo sapiens
ataccctttttatat

SEQ ID NO: 1097780 - DNA, 15 bp, Homo sapiens
aataccctttttata

SEQ ID NO: 1097781 - DNA, 15 bp, Homo sapiens
caataccctttttat

SEQ ID NO: 1097782 - DNA, 15 bp, Homo sapiens
ccaatacccttttta

SEQ ID NO: 1097783 - DNA, 15 bp, Homo sapiens
cccaatacccttttt

SEQ ID NO: 1097784 - DNA, 15 bp, Homo sapiens
acccaataccctttt

SEQ ID NO: 1097785 - DNA, 15 bp, Homo sapiens
gacccaatacccttt

SEQ ID NO: 1097786 - DNA, 15 bp, Homo sapiens
agacccaataccctt

SEQ ID NO: 1097787 - DNA, 15 bp, Homo sapiens
cagacccaataccct

SEQ ID NO: 1097788 - DNA, 15 bp, Homo sapiens
tcagacccaataccc

SEQ ID NO: 1097789 - DNA, 15 bp, Homo sapiens
gtcagacccaatacc

SEQ ID NO: 1097790 - DNA, 15 bp, Homo sapiens
tgtcagacccaatac

SEQ ID NO: 1097791 - DNA, 15 bp, Homo sapiens
ctgtcagacccaata

SEQ ID NO: 1097792 - DNA, 15 bp, Homo sapiens
tctgtcagacccaat

SEQ ID NO: 1097793 - DNA, 15 bp, Homo sapiens
atctgtcagacccaa

SEQ ID NO: 1097794 - DNA, 15 bp, Homo sapiens
tatctgtcagaccca

SEQ ID NO: 1097795 - DNA, 15 bp, Homo sapiens
ttatctgtcagaccc

SEQ ID NO: 1097796 - DNA, 15 bp, Homo sapiens
cttatctgtcagacc

SEQ ID NO: 1097797 - DNA, 15 bp, Homo sapiens
tcttatctgtcagac

SEQ ID NO: 1097798 - DNA, 15 bp, Homo sapiens
ctcttatctgtcaga

SEQ ID NO: 1097799 - DNA, 15 bp, Homo sapiens
gctcttatctgtcag

SEQ ID NO: 1097800 - DNA, 15 bp, Homo sapiens
agctcttatctgtca

SEQ ID NO: 1097801 - DNA, 15 bp, Homo sapiens
gagctcttatctgtc

SEQ ID NO: 1097802 - DNA, 15 bp, Homo sapiens
ggagctcttatctgt

SEQ ID NO: 1097803 - DNA, 15 bp, Homo sapiens
aggagctcttatctg

SEQ ID NO: 1097804 - DNA, 15 bp, Homo sapiens
caggagctcttatct

SEQ ID NO: 1097805 - DNA, 15 bp, Homo sapiens
gcaggagctcttatc

SEQ ID NO: 1097806 - DNA, 15 bp, Homo sapiens
tgcaggagctcttat

SEQ ID NO: 1097807 - DNA, 15 bp, Homo sapiens
gtgcaggagctctta

SEQ ID NO: 1097808 - DNA, 15 bp, Homo sapiens
agtgcaggagctctt

SEQ ID NO: 1097809 - DNA, 15 bp, Homo sapiens
gagtgcaggagctct

SEQ ID NO: 1097810 - DNA, 15 bp, Homo sapiens
agagtgcaggagctc

SEQ ID NO: 1097811 - DNA, 15 bp, Homo sapiens
tagagtgcaggagct

SEQ ID NO: 1097812 - DNA, 15 bp, Homo sapiens
gtagagtgcaggagc

SEQ ID NO: 1097813 - DNA, 15 bp, Homo sapiens
ggtagagtgcaggag

SEQ ID NO: 1097814 - DNA, 15 bp, Homo sapiens
tggtagagtgcagga

SEQ ID NO: 1097815 - DNA, 15 bp, Homo sapiens
ctggtagagtgcagg

SEQ ID NO: 1097816 - DNA, 15 bp, Homo sapiens
gctggtagagtgcag

SEQ ID NO: 1097817 - DNA, 15 bp, Homo sapiens
ggctggtagagtgca

SEQ ID NO: 1097818 - DNA, 15 bp, Homo sapiens
tggctggtagagtgc

SEQ ID NO: 1097819 - DNA, 15 bp, Homo sapiens
ctggctggtagagtg

SEQ ID NO: 1097820 - DNA, 15 bp, Homo sapiens
gctggctggtagagt

SEQ ID NO: 1097821 - DNA, 15 bp, Homo sapiens
agctggctggtagag

SEQ ID NO: 1097822 - DNA, 15 bp, Homo sapiens
tagctggctggtaga

SEQ ID NO: 1097823 - DNA, 15 bp, Homo sapiens
gtagctggctggtag

SEQ ID NO: 1097824 - DNA, 15 bp, Homo sapiens
agtagctggctggta

SEQ ID NO: 1097825 - DNA, 15 bp, Homo sapiens
cagtagctggctggt

SEQ ID NO: 1097826 - DNA, 15 bp, Homo sapiens
tcagtagctggctgg

SEQ ID NO: 1097827 - DNA, 15 bp, Homo sapiens
gtcagtagctggctg

SEQ ID NO: 1097828 - DNA, 15 bp, Homo sapiens
tgtcagtagctggct

SEQ ID NO: 1097829 - DNA, 15 bp, Homo sapiens
ctgtcagtagctggc

SEQ ID NO: 1097830 - DNA, 15 bp, Homo sapiens
tctgtcagtagctgg

SEQ ID NO: 1097831 - DNA, 15 bp, Homo sapiens
gtctgtcagtagctg

SEQ ID NO: 1097832 - DNA, 15 bp, Homo sapiens
tgtctgtcagtagct

SEQ ID NO: 1097833 - DNA, 15 bp, Homo sapiens
atgtctgtcagtagc

SEQ ID NO: 1097834 - DNA, 15 bp, Homo sapiens
tatgtctgtcagtag

SEQ ID NO: 1097835 - DNA, 15 bp, Homo sapiens
ctatgtctgtcagta

SEQ ID NO: 1097836 - DNA, 15 bp, Homo sapiens
cctatgtctgtcagt

SEQ ID NO: 1097837 - DNA, 15 bp, Homo sapiens
acctatgtctgtcag

SEQ ID NO: 1097838 - DNA, 15 bp, Homo sapiens
gacctatgtctgtca

SEQ ID NO: 1097839 - DNA, 15 bp, Homo sapiens
agacctatgtctgtc

SEQ ID NO: 1097840 - DNA, 15 bp, Homo sapiens
cagacctatgtctgt

SEQ ID NO: 1097841 - DNA, 15 bp, Homo sapiens
ccagacctatgtctg

SEQ ID NO: 1097842 - DNA, 15 bp, Homo sapiens
gccagacctatgtct

SEQ ID NO: 1097843 - DNA, 15 bp, Homo sapiens
agccagacctatgtc

SEQ ID NO: 1097844 - DNA, 15 bp, Homo sapiens
gagccagacctatgt

SEQ ID NO: 1097845 - DNA, 15 bp, Homo sapiens
ggagccagacctatg

SEQ ID NO: 1097846 - DNA, 15 bp, Homo sapiens
tggagccagacctat

SEQ ID NO: 1097847 - DNA, 15 bp, Homo sapiens
ctggagccagaccta

SEQ ID NO: 1097848 - DNA, 15 bp, Homo sapiens
actggagccagacct

SEQ ID NO: 1097849 - DNA, 15 bp, Homo sapiens
cactggagccagacc

SEQ ID NO: 1097850 - DNA, 15 bp, Homo sapiens
ccactggagccagac

SEQ ID NO: 1097851 - DNA, 15 bp, Homo sapiens
tccactggagccaga

SEQ ID NO: 1097852 - DNA, 15 bp, Homo sapiens
ctccactggagccag

SEQ ID NO: 1097853 - DNA, 15 bp, Homo sapiens
cctccactggagcca

SEQ ID NO: 1097854 - DNA, 15 bp, Homo sapiens
ccctccactggagcc

SEQ ID NO: 1097855 - DNA, 15 bp, Homo sapiens
cccctccactggagc

SEQ ID NO: 1097856 - DNA, 15 bp, Homo sapiens
gcccctccactggag

SEQ ID NO: 1097857 - DNA, 15 bp, Homo sapiens
tgcccctccactgga

SEQ ID NO: 1097858 - DNA, 15 bp, Homo sapiens
ctgcccctccactgg

SEQ ID NO: 1097859 - DNA, 15 bp, Homo sapiens
gctgcccctccactg

SEQ ID NO: 1097860 - DNA, 15 bp, Homo sapiens
tgctgcccctccact

SEQ ID NO: 1097861 - DNA, 15 bp, Homo sapiens
ctgctgcccctccac

SEQ ID NO: 1097862 - DNA, 15 bp, Homo sapiens
gctgctgcccctcca

SEQ ID NO: 1097863 - DNA, 15 bp, Homo sapiens
ggctgctgcccctcc

SEQ ID NO: 1097864 - DNA, 15 bp, Homo sapiens
tggctgctgcccctc

SEQ ID NO: 1097865 - DNA, 15 bp, Homo sapiens
ctggctgctgcccct

SEQ ID NO: 1097866 - DNA, 15 bp, Homo sapiens
actggctgctgcccc

SEQ ID NO: 1097867 - DNA, 15 bp, Homo sapiens
cactggctgctgccc

SEQ ID NO: 1097868 - DNA, 15 bp, Homo sapiens
tcactggctgctgcc

SEQ ID NO: 1097869 - DNA, 15 bp, Homo sapiens
ctcactggctgctgc

SEQ ID NO: 1097870 - DNA, 15 bp, Homo sapiens
gctcactggctgctg

SEQ ID NO: 1097871 - DNA, 15 bp, Homo sapiens
ggctcactggctgct

SEQ ID NO: 1097872 - DNA, 15 bp, Homo sapiens
gggctcactggctgc

SEQ ID NO: 1097873 - DNA, 15 bp, Homo sapiens
tgggctcactggctg

SEQ ID NO: 1097874 - DNA, 15 bp, Homo sapiens
ctgggctcactggct

SEQ ID NO: 1097875 - DNA, 15 bp, Homo sapiens
gctgggctcactggc

SEQ ID NO: 1097876 - DNA, 15 bp, Homo sapiens
ggctgggctcactgg

SEQ ID NO: 1097877 - DNA, 15 bp, Homo sapiens
aggctgggctcactg

SEQ ID NO: 1097878 - DNA, 15 bp, Homo sapiens
caggctgggctcact

SEQ ID NO: 1097879 - DNA, 15 bp, Homo sapiens
ccaggctgggctcac

SEQ ID NO: 1097880 - DNA, 15 bp, Homo sapiens
cccaggctgggctca

SEQ ID NO: 1097881 - DNA, 15 bp, Homo sapiens
ccccaggctgggctc

SEQ ID NO: 1097882 - DNA, 15 bp, Homo sapiens
accccaggctgggct

SEQ ID NO: 1097883 - DNA, 15 bp, Homo sapiens
caccccaggctgggc

SEQ ID NO: 1097884 - DNA, 15 bp, Homo sapiens
ccaccccaggctggg

SEQ ID NO: 1097885 - DNA, 15 bp, Homo sapiens
gccaccccaggctgg

SEQ ID NO: 1097886 - DNA, 15 bp, Homo sapiens
ggccaccccaggctg

SEQ ID NO: 1097887 - DNA, 15 bp, Homo sapiens
gggccaccccaggct

SEQ ID NO: 1097888 - DNA, 15 bp, Homo sapiens
tgggccaccccaggc

SEQ ID NO: 1097889 - DNA, 15 bp, Homo sapiens
gtgggccaccccagg

SEQ ID NO: 1097890 - DNA, 15 bp, Homo sapiens
agtgggccaccccag

SEQ ID NO: 1097891 - DNA, 15 bp, Homo sapiens
gagtgggccacccca

SEQ ID NO: 1097892 - DNA, 15 bp, Homo sapiens
ggagtgggccacccc

SEQ ID NO: 1097893 - DNA, 15 bp, Homo sapiens
aggagtgggccaccc

SEQ ID NO: 1097894 - DNA, 15 bp, Homo sapiens
caggagtgggccacc

SEQ ID NO: 1097895 - DNA, 15 bp, Homo sapiens
gcaggagtgggccac

SEQ ID NO: 1097896 - DNA, 15 bp, Homo sapiens
agcaggagtgggcca

SEQ ID NO: 1097897 - DNA, 15 bp, Homo sapiens
cagcaggagtgggcc

SEQ ID NO: 1097898 - DNA, 15 bp, Homo sapiens
gcagcaggagtgggc

SEQ ID NO: 1097899 - DNA, 15 bp, Homo sapiens
ggcagcaggagtggg

SEQ ID NO: 1097900 - DNA, 15 bp, Homo sapiens
aggcagcaggagtgg

SEQ ID NO: 1097901 - DNA, 15 bp, Homo sapiens
gaggcagcaggagtg

SEQ ID NO: 1097902 - DNA, 15 bp, Homo sapiens
ggaggcagcaggagt

SEQ ID NO: 1097903 - DNA, 15 bp, Homo sapiens
tggaggcagcaggag

SEQ ID NO: 1097904 - DNA, 15 bp, Homo sapiens
ctggaggcagcagga

SEQ ID NO: 1097905 - DNA, 15 bp, Homo sapiens
cctggaggcagcagg

SEQ ID NO: 1097906 - DNA, 15 bp, Homo sapiens
tcctggaggcagcag

SEQ ID NO: 1097907 - DNA, 15 bp, Homo sapiens
atcctggaggcagca

SEQ ID NO: 1097908 - DNA, 15 bp, Homo sapiens
catcctggaggcagc

SEQ ID NO: 1097909 - DNA, 15 bp, Homo sapiens
acatcctggaggcag

SEQ ID NO: 1097910 - DNA, 15 bp, Homo sapiens
gacatcctggaggca

SEQ ID NO: 1097911 - DNA, 15 bp, Homo sapiens
ggacatcctggaggc

SEQ ID NO: 1097912 - DNA, 15 bp, Homo sapiens
gggacatcctggagg

SEQ ID NO: 1097913 - DNA, 15 bp, Homo sapiens
ggggacatcctggag

SEQ ID NO: 1097914 - DNA, 15 bp, Homo sapiens
aggggacatcctgga

SEQ ID NO: 1097915 - DNA, 15 bp, Homo sapiens
caggggacatcctgg

SEQ ID NO: 1097916 - DNA, 15 bp, Homo sapiens
acaggggacatcctg

SEQ ID NO: 1097917 - DNA, 15 bp, Homo sapiens
aacaggggacatcct

SEQ ID NO: 1097918 - DNA, 15 bp, Homo sapiens
aaacaggggacatcc

SEQ ID NO: 1097919 - DNA, 15 bp, Homo sapiens
gaaacaggggacatc

SEQ ID NO: 1097920 - DNA, 15 bp, Homo sapiens
ggaaacaggggacat

SEQ ID NO: 1097921 - DNA, 15 bp, Homo sapiens
gggaaacaggggaca

SEQ ID NO: 1097922 - DNA, 15 bp, Homo sapiens
ggggaaacaggggac

SEQ ID NO: 1097923 - DNA, 15 bp, Homo sapiens
tggggaaacagggga

SEQ ID NO: 1097924 - DNA, 15 bp, Homo sapiens
ctggggaaacagggg

SEQ ID NO: 1097925 - DNA, 15 bp, Homo sapiens
gctggggaaacaggg

SEQ ID NO: 1097926 - DNA, 15 bp, Homo sapiens
ggctggggaaacagg

SEQ ID NO: 1097927 - DNA, 15 bp, Homo sapiens
gggctggggaaacag

SEQ ID NO: 1097928 - DNA, 15 bp, Homo sapiens
aggggctggggaaac

SEQ ID NO: 1097929 - DNA, 15 bp, Homo sapiens
gaggggctggggaaa

SEQ ID NO: 1097930 - DNA, 15 bp, Homo sapiens
agaggggctggggaa

SEQ ID NO: 1097931 - DNA, 15 bp, Homo sapiens
cagaggggctgggga

SEQ ID NO: 1097932 - DNA, 15 bp, Homo sapiens
gcagaggggctgggg

SEQ ID NO: 1097933 - DNA, 15 bp, Homo sapiens
agcagaggggctggg

SEQ ID NO: 1097934 - DNA, 15 bp, Homo sapiens
cagcagaggggctgg

SEQ ID NO: 1097935 - DNA, 15 bp, Homo sapiens
acagcagaggggctg

SEQ ID NO: 1097936 - DNA, 15 bp, Homo sapiens
cacagcagaggggct

SEQ ID NO: 1097937 - DNA, 15 bp, Homo sapiens
gcacagcagaggggc

SEQ ID NO: 1097938 - DNA, 15 bp, Homo sapiens
ggcacagcagagggg

SEQ ID NO: 1097939 - DNA, 15 bp, Homo sapiens
gggcacagcagaggg

SEQ ID NO: 1097940 - DNA, 15 bp, Homo sapiens
agggcacagcagagg

SEQ ID NO: 1097941 - DNA, 15 bp, Homo sapiens
gagggcacagcagag

SEQ ID NO: 1097942 - DNA, 15 bp, Homo sapiens
cgagggcacagcaga

SEQ ID NO: 1097943 - DNA, 15 bp, Homo sapiens
ccgagggcacagcag

SEQ ID NO: 1097944 - DNA, 15 bp, Homo sapiens
gccgagggcacagca

SEQ ID NO: 1097945 - DNA, 15 bp, Homo sapiens
ggccgagggcacagc

SEQ ID NO: 1097946 - DNA, 15 bp, Homo sapiens
gggccgagggcacag

SEQ ID NO: 1097947 - DNA, 15 bp, Homo sapiens
ggggccgagggcaca

SEQ ID NO: 1097948 - DNA, 15 bp, Homo sapiens
tggggccgagggcac

SEQ ID NO: 1097949 - DNA, 15 bp, Homo sapiens
ctggggccgagggca

SEQ ID NO: 1097950 - DNA, 15 bp, Homo sapiens
tctggggccgagggc

SEQ ID NO: 1097951 - DNA, 15 bp, Homo sapiens
ttctggggccgaggg

SEQ ID NO: 1097952 - DNA, 15 bp, Homo sapiens
cttctggggccgagg

SEQ ID NO: 1097953 - DNA, 15 bp, Homo sapiens
gcttctggggccgag

SEQ ID NO: 1097954 - DNA, 15 bp, Homo sapiens
agcttctggggccga

SEQ ID NO: 1097955 - DNA, 15 bp, Homo sapiens
cagcttctggggccg

SEQ ID NO: 1097956 - DNA, 15 bp, Homo sapiens
ccagcttctggggcc

SEQ ID NO: 1097957 - DNA, 15 bp, Homo sapiens
gccagcttctggggc

SEQ ID NO: 1097958 - DNA, 15 bp, Homo sapiens
cgccagcttctgggg

SEQ ID NO: 1097959 - DNA, 15 bp, Homo sapiens
tcgccagcttctggg

SEQ ID NO: 1097960 - DNA, 15 bp, Homo sapiens
ctcgccagcttctgg

SEQ ID NO: 1097961 - DNA, 15 bp, Homo sapiens
tctcgccagcttctg

SEQ ID NO: 1097962 - DNA, 15 bp, Homo sapiens
gtctcgccagcttct

SEQ ID NO: 1097963 - DNA, 15 bp, Homo sapiens
agtctcgccagcttc

SEQ ID NO: 1097964 - DNA, 15 bp, Homo sapiens
cagtctcgccagctt

SEQ ID NO: 1097965 - DNA, 15 bp, Homo sapiens
gcagtctcgccagct

SEQ ID NO: 1097966 - DNA, 15 bp, Homo sapiens
agcagtctcgccagc

SEQ ID NO: 1097967 - DNA, 15 bp, Homo sapiens
aagcagtctcgccag

SEQ ID NO: 1097968 - DNA, 15 bp, Homo sapiens
gaagcagtctcgcca

SEQ ID NO: 1097969 - DNA, 15 bp, Homo sapiens
agaagcagtctcgcc

SEQ ID NO: 1097970 - DNA, 15 bp, Homo sapiens
gagaagcagtctcgc

SEQ ID NO: 1097971 - DNA, 15 bp, Homo sapiens
agagaagcagtctcg

SEQ ID NO: 1097972 - DNA, 15 bp, Homo sapiens
cagagaagcagtctc

SEQ ID NO: 1097973 - DNA, 15 bp, Homo sapiens
ccagagaagcagtct

SEQ ID NO: 1097974 - DNA, 15 bp, Homo sapiens
tccagagaagcagtc

SEQ ID NO: 1097975 - DNA, 15 bp, Homo sapiens
ttccagagaagcagt

SEQ ID NO: 1097976 - DNA, 15 bp, Homo sapiens
gttccagagaagcag

SEQ ID NO: 1097977 - DNA, 15 bp, Homo sapiens
tgttccagagaagca

SEQ ID NO: 1097978 - DNA, 15 bp, Homo sapiens
ctgttccagagaagc

SEQ ID NO: 1097979 - DNA, 15 bp, Homo sapiens
gctgttccagagaag

SEQ ID NO: 1097980 - DNA, 15 bp, Homo sapiens
tgctgttccagagaa

SEQ ID NO: 1097981 - DNA, 15 bp, Homo sapiens
atgctgttccagaga

SEQ ID NO: 1097982 - DNA, 15 bp, Homo sapiens
gatgctgttccagag

SEQ ID NO: 1097983 - DNA, 15 bp, Homo sapiens
tgatgctgttccaga

SEQ ID NO: 1097984 - DNA, 15 bp, Homo sapiens
gtgatgctgttccag

SEQ ID NO: 1097985 - DNA, 15 bp, Homo sapiens
cgtgatgctgttcca

SEQ ID NO: 1097986 - DNA, 15 bp, Homo sapiens
gcgtgatgctgttcc

SEQ ID NO: 1097987 - DNA, 15 bp, Homo sapiens
tgcgtgatgctgttc

SEQ ID NO: 1097988 - DNA, 15 bp, Homo sapiens
ctgcgtgatgctgtt

SEQ ID NO: 1097989 - DNA, 15 bp, Homo sapiens
cctgcgtgatgctgt

SEQ ID NO: 1097990 - DNA, 15 bp, Homo sapiens
gcctgcgtgatgctg

SEQ ID NO: 1097991 - DNA, 15 bp, Homo sapiens
ggcctgcgtgatgct

SEQ ID NO: 1097992 - DNA, 15 bp, Homo sapiens
aggcctgcgtgatgc

SEQ ID NO: 1097993 - DNA, 15 bp, Homo sapiens
caggcctgcgtgatg

SEQ ID NO: 1097994 - DNA, 15 bp, Homo sapiens
gcaggcctgcgtgat

SEQ ID NO: 1097995 - DNA, 15 bp, Homo sapiens
ggcaggcctgcgtga

SEQ ID NO: 1097996 - DNA, 15 bp, Homo sapiens
gggcaggcctgcgtg

SEQ ID NO: 1097997 - DNA, 15 bp, Homo sapiens
tgggcaggcctgcgt

SEQ ID NO: 1097998 - DNA, 15 bp, Homo sapiens
atgggcaggcctgcg

SEQ ID NO: 1097999 - DNA, 15 bp, Homo sapiens
gatgggcaggcctgc

SEQ ID NO: 1098000 - DNA, 15 bp, Homo sapiens
cgatgggcaggcctg

SEQ ID NO: 1098001 - DNA, 15 bp, Homo sapiens
ccgatgggcaggcct

SEQ ID NO: 1098002 - DNA, 15 bp, Homo sapiens
gccgatgggcaggcc

SEQ ID NO: 1098003 - DNA, 15 bp, Homo sapiens
ggccgatgggcaggc

SEQ ID NO: 1098004 - DNA, 15 bp, Homo sapiens
gggccgatgggcagg

SEQ ID NO: 1098005 - DNA, 15 bp, Homo sapiens
tgggccgatgggcag

SEQ ID NO: 1098006 - DNA, 15 bp, Homo sapiens
gtgggccgatgggca

SEQ ID NO: 1098007 - DNA, 15 bp, Homo sapiens
agtgggccgatgggc

SEQ ID NO: 1098008 - DNA, 15 bp, Homo sapiens
cagtgggccgatggg

SEQ ID NO: 1098009 - DNA, 15 bp, Homo sapiens
acagtgggccgatgg

SEQ ID NO: 1098010 - DNA, 15 bp, Homo sapiens
cacagtgggccgatg

SEQ ID NO: 1098011 - DNA, 15 bp, Homo sapiens
gcacagtgggccgat

SEQ ID NO: 1098012 - DNA, 15 bp, Homo sapiens
tgcacagtgggccga

SEQ ID NO: 1098013 - DNA, 15 bp, Homo sapiens
gtgcacagtgggccg

SEQ ID NO: 1098014 - DNA, 15 bp, Homo sapiens
ggtgcacagtgggcc

SEQ ID NO: 1098015 - DNA, 15 bp, Homo sapiens
tggtgcacagtgggc

SEQ ID NO: 1098016 - DNA, 15 bp, Homo sapiens
ctggtgcacagtggg

SEQ ID NO: 1098017 - DNA, 15 bp, Homo sapiens
cctggtgcacagtgg

SEQ ID NO: 1098018 - DNA, 15 bp, Homo sapiens
gcctggtgcacagtg

SEQ ID NO: 1098019 - DNA, 15 bp, Homo sapiens
ggcctggtgcacagt

SEQ ID NO: 1098020 - DNA, 15 bp, Homo sapiens
aggcctggtgcacag

SEQ ID NO: 1098021 - DNA, 15 bp, Homo sapiens
aaggcctggtgcaca

SEQ ID NO: 1098022 - DNA, 15 bp, Homo sapiens
gaaggcctggtgcac

SEQ ID NO: 1098023 - DNA, 15 bp, Homo sapiens
agaaggcctggtgca

SEQ ID NO: 1098024 - DNA, 15 bp, Homo sapiens
cagaaggcctggtgc

SEQ ID NO: 1098025 - DNA, 15 bp, Homo sapiens
ccagaaggcctggtg

SEQ ID NO: 1098026 - DNA, 15 bp, Homo sapiens
cccagaaggcctggt

SEQ ID NO: 1098027 - DNA, 15 bp, Homo sapiens
ccccagaaggcctgg

SEQ ID NO: 1098028 - DNA, 15 bp, Homo sapiens
tccccagaaggcctg

SEQ ID NO: 1098029 - DNA, 15 bp, Homo sapiens
atccccagaaggcct

SEQ ID NO: 1098030 - DNA, 15 bp, Homo sapiens
tatccccagaaggcc

SEQ ID NO: 1098031 - DNA, 15 bp, Homo sapiens
gtatccccagaaggc

SEQ ID NO: 1098032 - DNA, 15 bp, Homo sapiens
tgtatccccagaagg

SEQ ID NO: 1098033 - DNA, 15 bp, Homo sapiens
ctgtatccccagaag

SEQ ID NO: 1098034 - DNA, 15 bp, Homo sapiens
tctgtatccccagaa

SEQ ID NO: 1098035 - DNA, 15 bp, Homo sapiens
atctgtatccccaga

SEQ ID NO: 1098036 - DNA, 15 bp, Homo sapiens
catctgtatccccag

SEQ ID NO: 1098037 - DNA, 15 bp, Homo sapiens
acatctgtatcccca

SEQ ID NO: 1098038 - DNA, 15 bp, Homo sapiens
gacatctgtatcccc

SEQ ID NO: 1098039 - DNA, 15 bp, Homo sapiens
tgacatctgtatccc

SEQ ID NO: 1098040 - DNA, 15 bp, Homo sapiens
ttgacatctgtatcc

SEQ ID NO: 1098041 - DNA, 15 bp, Homo sapiens
gttgacatctgtatc

SEQ ID NO: 1098042 - DNA, 15 bp, Homo sapiens
ggttgacatctgtat

SEQ ID NO: 1098043 - DNA, 15 bp, Homo sapiens
tggttgacatctgta

SEQ ID NO: 1098044 - DNA, 15 bp, Homo sapiens
ctggttgacatctgt

SEQ ID NO: 1098045 - DNA, 15 bp, Homo sapiens
cctggttgacatctg

SEQ ID NO: 1098046 - DNA, 15 bp, Homo sapiens
acctggttgacatct

SEQ ID NO: 1098047 - DNA, 15 bp, Homo sapiens
cacctggttgacatc

SEQ ID NO: 1098048 - DNA, 15 bp, Homo sapiens
ccacctggttgacat

SEQ ID NO: 1098049 - DNA, 15 bp, Homo sapiens
cccacctggttgaca

SEQ ID NO: 1098050 - DNA, 15 bp, Homo sapiens
ccccacctggttgac

SEQ ID NO: 1098051 - DNA, 15 bp, Homo sapiens
accccacctggttga

SEQ ID NO: 1098052 - DNA, 15 bp, Homo sapiens
caccccacctggttg

SEQ ID NO: 1098053 - DNA, 15 bp, Homo sapiens
gcaccccacctggtt

SEQ ID NO: 1098054 - DNA, 15 bp, Homo sapiens
agcaccccacctggt

SEQ ID NO: 1098055 - DNA, 15 bp, Homo sapiens
gagcaccccacctgg

SEQ ID NO: 1098056 - DNA, 15 bp, Homo sapiens
tgagcaccccacctg

SEQ ID NO: 1098057 - DNA, 15 bp, Homo sapiens
ctgagcaccccacct

SEQ ID NO: 1098058 - DNA, 15 bp, Homo sapiens
cctgagcaccccacc

SEQ ID NO: 1098059 - DNA, 15 bp, Homo sapiens
tcctgagcaccccac

SEQ ID NO: 1098060 - DNA, 15 bp, Homo sapiens
ctcctgagcacccca

SEQ ID NO: 1098061 - DNA, 15 bp, Homo sapiens
cctcctgagcacccc

SEQ ID NO: 1098062 - DNA, 15 bp, Homo sapiens
ccctcctgagcaccc

SEQ ID NO: 1098063 - DNA, 15 bp, Homo sapiens
cccctcctgagcacc

SEQ ID NO: 1098064 - DNA, 15 bp, Homo sapiens
gcccctcctgagcac

SEQ ID NO: 1098065 - DNA, 15 bp, Homo sapiens
tgcccctcctgagca

SEQ ID NO: 1098066 - DNA, 15 bp, Homo sapiens
gtgcccctcctgagc

SEQ ID NO: 1098067 - DNA, 15 bp, Homo sapiens
tgtgcccctcctgag

SEQ ID NO: 1098068 - DNA, 15 bp, Homo sapiens
ctgtgcccctcctga

SEQ ID NO: 1098069 - DNA, 15 bp, Homo sapiens
tctgtgcccctcctg

SEQ ID NO: 1098070 - DNA, 15 bp, Homo sapiens
ttctgtgcccctcct

SEQ ID NO: 1098071 - DNA, 15 bp, Homo sapiens
cttctgtgcccctcc

SEQ ID NO: 1098072 - DNA, 15 bp, Homo sapiens
gcttctgtgcccctc

SEQ ID NO: 1098073 - DNA, 15 bp, Homo sapiens
ggcttctgtgcccct

SEQ ID NO: 1098074 - DNA, 15 bp, Homo sapiens
tggcttctgtgcccc

SEQ ID NO: 1098075 - DNA, 15 bp, Homo sapiens
ctggcttctgtgccc

SEQ ID NO: 1098076 - DNA, 15 bp, Homo sapiens
cctggcttctgtgcc

SEQ ID NO: 1098077 - DNA, 15 bp, Homo sapiens
tcctggcttctgtgc

SEQ ID NO: 1098078 - DNA, 15 bp, Homo sapiens
ttcctggcttctgtg

SEQ ID NO: 1098079 - DNA, 15 bp, Homo sapiens
attcctggcttctgt

SEQ ID NO: 1098080 - DNA, 15 bp, Homo sapiens
cattcctggcttctg

SEQ ID NO: 1098081 - DNA, 15 bp, Homo sapiens
tcattcctggcttct

SEQ ID NO: 1098082 - DNA, 15 bp, Homo sapiens
gtcattcctggcttc

SEQ ID NO: 1098083 - DNA, 15 bp, Homo sapiens
tgtcattcctggctt

SEQ ID NO: 1098084 - DNA, 15 bp, Homo sapiens
ttgtcattcctggct

SEQ ID NO: 1098085 - DNA, 15 bp, Homo sapiens
tttgtcattcctggc

SEQ ID NO: 1098086 - DNA, 15 bp, Homo sapiens
gtttgtcattcctgg

SEQ ID NO: 1098087 - DNA, 15 bp, Homo sapiens
tgtttgtcattcctg

SEQ ID NO: 1098088 - DNA, 15 bp, Homo sapiens
gtgtttgtcattcct

SEQ ID NO: 1098089 - DNA, 15 bp, Homo sapiens
tgtgtttgtcattcc

SEQ ID NO: 1098090 - DNA, 15 bp, Homo sapiens
atgtgtttgtcattc

SEQ ID NO: 1098091 - DNA, 15 bp, Homo sapiens
gatgtgtttgtcatt

SEQ ID NO: 1098092 - DNA, 15 bp, Homo sapiens
tgatgtgtttgtcat

SEQ ID NO: 1098093 - DNA, 15 bp, Homo sapiens
ctgatgtgtttgtca

SEQ ID NO: 1098094 - DNA, 15 bp, Homo sapiens
gctgatgtgtttgtc

SEQ ID NO: 1098095 - DNA, 15 bp, Homo sapiens
ggctgatgtgtttgt

SEQ ID NO: 1098096 - DNA, 15 bp, Homo sapiens
tggctgatgtgtttg

SEQ ID NO: 1098097 - DNA, 15 bp, Homo sapiens
gtggctgatgtgttt

SEQ ID NO: 1098098 - DNA, 15 bp, Homo sapiens
ggtggctgatgtgtt

SEQ ID NO: 1098099 - DNA, 15 bp, Homo sapiens
tggtggctgatgtgt

SEQ ID NO: 1098100 - DNA, 15 bp, Homo sapiens
ctggtggctgatgtg

SEQ ID NO: 1098101 - DNA, 15 bp, Homo sapiens
cctggtggctgatgt

SEQ ID NO: 1098102 - DNA, 15 bp, Homo sapiens
gcctggtggctgatg

SEQ ID NO: 1098103 - DNA, 15 bp, Homo sapiens
tgcctggtggctgat

SEQ ID NO: 1098104 - DNA, 15 bp, Homo sapiens
ttgcctggtggctga

SEQ ID NO: 1098105 - DNA, 15 bp, Homo sapiens
tttgcctggtggctg

SEQ ID NO: 1098106 - DNA, 15 bp, Homo sapiens
atttgcctggtggct

SEQ ID NO: 1098107 - DNA, 15 bp, Homo sapiens
catttgcctggtggc

SEQ ID NO: 1098108 - DNA, 15 bp, Homo sapiens
ccatttgcctggtgg

SEQ ID NO: 1098109 - DNA, 15 bp, Homo sapiens
cccatttgcctggtg

SEQ ID NO: 1098110 - DNA, 15 bp, Homo sapiens
tcccatttgcctggt

SEQ ID NO: 1098111 - DNA, 15 bp, Homo sapiens
ttcccatttgcctgg

SEQ ID NO: 1098112 - DNA, 15 bp, Homo sapiens
tttcccatttgcctg

SEQ ID NO: 1098113 - DNA, 15 bp, Homo sapiens
atttcccatttgcct

SEQ ID NO: 1098114 - DNA, 15 bp, Homo sapiens
catttcccatttgcc

SEQ ID NO: 1098115 - DNA, 15 bp, Homo sapiens
acatttcccatttgc

SEQ ID NO: 1098116 - DNA, 15 bp, Homo sapiens
cacatttcccatttg

SEQ ID NO: 1098117 - DNA, 15 bp, Homo sapiens
gcacatttcccattt

SEQ ID NO: 1098118 - DNA, 15 bp, Homo sapiens
ggcacatttcccatt

SEQ ID NO: 1098119 - DNA, 15 bp, Homo sapiens
gggcacatttcccat

SEQ ID NO: 1098120 - DNA, 15 bp, Homo sapiens
ggggcacatttccca

SEQ ID NO: 1098121 - DNA, 15 bp, Homo sapiens
tggggcacatttccc

SEQ ID NO: 1098122 - DNA, 15 bp, Homo sapiens
ctggggcacatttcc

SEQ ID NO: 1098123 - DNA, 15 bp, Homo sapiens
tctggggcacatttc

SEQ ID NO: 1098124 - DNA, 15 bp, Homo sapiens
ttctggggcacattt

SEQ ID NO: 1098125 - DNA, 15 bp, Homo sapiens
cttctggggcacatt

SEQ ID NO: 1098126 - DNA, 15 bp, Homo sapiens
gcttctggggcacat

SEQ ID NO: 1098127 - DNA, 15 bp, Homo sapiens
agcttctggggcaca

SEQ ID NO: 1098128 - DNA, 15 bp, Homo sapiens
gagcttctggggcac

SEQ ID NO: 1098129 - DNA, 15 bp, Homo sapiens
ggagcttctggggca

SEQ ID NO: 1098130 - DNA, 15 bp, Homo sapiens
gggagcttctggggc

SEQ ID NO: 1098131 - DNA, 15 bp, Homo sapiens
agggagcttctgggg

SEQ ID NO: 1098132 - DNA, 15 bp, Homo sapiens
cagggagcttctggg

SEQ ID NO: 1098133 - DNA, 15 bp, Homo sapiens
gcagggagcttctgg

SEQ ID NO: 1098134 - DNA, 15 bp, Homo sapiens
agcagggagcttctg

SEQ ID NO: 1098135 - DNA, 15 bp, Homo sapiens
cagcagggagcttct

SEQ ID NO: 1098136 - DNA, 15 bp, Homo sapiens
tcagcagggagcttc

SEQ ID NO: 1098137 - DNA, 15 bp, Homo sapiens
ctcagcagggagctt

SEQ ID NO: 1098138 - DNA, 15 bp, Homo sapiens
cctcagcagggagct

SEQ ID NO: 1098139 - DNA, 15 bp, Homo sapiens
tcctcagcagggagc

SEQ ID NO: 1098140 - DNA, 15 bp, Homo sapiens
atcctcagcagggag

SEQ ID NO: 1098141 - DNA, 15 bp, Homo sapiens
catcctcagcaggga

SEQ ID NO: 1098142 - DNA, 15 bp, Homo sapiens
acatcctcagcaggg

SEQ ID NO: 1098143 - DNA, 15 bp, Homo sapiens
aacatcctcagcagg

SEQ ID NO: 1098144 - DNA, 15 bp, Homo sapiens
taacatcctcagcag

SEQ ID NO: 1098145 - DNA, 15 bp, Homo sapiens
ctaacatcctcagca

SEQ ID NO: 1098146 - DNA, 15 bp, Homo sapiens
cctaacatcctcagc

SEQ ID NO: 1098147 - DNA, 15 bp, Homo sapiens
ccctaacatcctcag

SEQ ID NO: 1098148 - DNA, 15 bp, Homo sapiens
tccctaacatcctca

SEQ ID NO: 1098149 - DNA, 15 bp, Homo sapiens
ctccctaacatcctc

SEQ ID NO: 1098150 - DNA, 15 bp, Homo sapiens
tctccctaacatcct

SEQ ID NO: 1098151 - DNA, 15 bp, Homo sapiens
ctctccctaacatcc

SEQ ID NO: 1098152 - DNA, 15 bp, Homo sapiens
gctctccctaacatc

SEQ ID NO: 1098153 - DNA, 15 bp, Homo sapiens
tgctctccctaacat

SEQ ID NO: 1098154 - DNA, 15 bp, Homo sapiens
atgctctccctaaca

SEQ ID NO: 1098155 - DNA, 15 bp, Homo sapiens
aatgctctccctaac

SEQ ID NO: 1098156 - DNA, 15 bp, Homo sapiens
gaatgctctccctaa

SEQ ID NO: 1098157 - DNA, 15 bp, Homo sapiens
agaatgctctcccta

SEQ ID NO: 1098158 - DNA, 15 bp, Homo sapiens
cagaatgctctccct

SEQ ID NO: 1098159 - DNA, 15 bp, Homo sapiens
tcagaatgctctccc

SEQ ID NO: 1098160 - DNA, 15 bp, Homo sapiens
ttcagaatgctctcc

SEQ ID NO: 1098161 - DNA, 15 bp, Homo sapiens
cttcagaatgctctc

SEQ ID NO: 1098162 - DNA, 15 bp, Homo sapiens
acttcagaatgctct

SEQ ID NO: 1098163 - DNA, 15 bp, Homo sapiens
tacttcagaatgctc

SEQ ID NO: 1098164 - DNA, 15 bp, Homo sapiens
ctacttcagaatgct

SEQ ID NO: 1098165 - DNA, 15 bp, Homo sapiens
actacttcagaatgc

SEQ ID NO: 1098166 - DNA, 15 bp, Homo sapiens
cactacttcagaatg

SEQ ID NO: 1098167 - DNA, 15 bp, Homo sapiens
acactacttcagaat

SEQ ID NO: 1098168 - DNA, 15 bp, Homo sapiens
cacactacttcagaa

SEQ ID NO: 1098169 - DNA, 15 bp, Homo sapiens
ccacactacttcaga

SEQ ID NO: 1098170 - DNA, 15 bp, Homo sapiens
accacactacttcag

SEQ ID NO: 1098171 - DNA, 15 bp, Homo sapiens
aaccacactacttca

SEQ ID NO: 1098172 - DNA, 15 bp, Homo sapiens
caaccacactacttc

SEQ ID NO: 1098173 - DNA, 15 bp, Homo sapiens
tcaaccacactactt

SEQ ID NO: 1098174 - DNA, 15 bp, Homo sapiens
ctcaaccacactact

SEQ ID NO: 1098175 - DNA, 15 bp, Homo sapiens
tctcaaccacactac

SEQ ID NO: 1098176 - DNA, 15 bp, Homo sapiens
atctcaaccacacta

SEQ ID NO: 1098177 - DNA, 15 bp, Homo sapiens
catctcaaccacact

SEQ ID NO: 1098178 - DNA, 15 bp, Homo sapiens
tcatctcaaccacac

SEQ ID NO: 1098179 - DNA, 15 bp, Homo sapiens
ctcatctcaaccaca

SEQ ID NO: 1098180 - DNA, 15 bp, Homo sapiens
cctcatctcaaccac

SEQ ID NO: 1098181 - DNA, 15 bp, Homo sapiens
gcctcatctcaacca

SEQ ID NO: 1098182 - DNA, 15 bp, Homo sapiens
agcctcatctcaacc

SEQ ID NO: 1098183 - DNA, 15 bp, Homo sapiens
aagcctcatctcaac

SEQ ID NO: 1098184 - DNA, 15 bp, Homo sapiens
caagcctcatctcaa

SEQ ID NO: 1098185 - DNA, 15 bp, Homo sapiens
tcaagcctcatctca

SEQ ID NO: 1098186 - DNA, 15 bp, Homo sapiens
ctcaagcctcatctc

SEQ ID NO: 1098187 - DNA, 15 bp, Homo sapiens
cctcaagcctcatct

SEQ ID NO: 1098188 - DNA, 15 bp, Homo sapiens
tcctcaagcctcatc

SEQ ID NO: 1098189 - DNA, 15 bp, Homo sapiens
ttcctcaagcctcat

SEQ ID NO: 1098190 - DNA, 15 bp, Homo sapiens
cttcctcaagcctca

SEQ ID NO: 1098191 - DNA, 15 bp, Homo sapiens
ccttcctcaagcctc

SEQ ID NO: 1098192 - DNA, 15 bp, Homo sapiens
gccttcctcaagcct

SEQ ID NO: 1098193 - DNA, 15 bp, Homo sapiens
tgccttcctcaagcc

SEQ ID NO: 1098194 - DNA, 15 bp, Homo sapiens
ttgccttcctcaagc

SEQ ID NO: 1098195 - DNA, 15 bp, Homo sapiens
cttgccttcctcaag

SEQ ID NO: 1098196 - DNA, 15 bp, Homo sapiens
ccttgccttcctcaa

SEQ ID NO: 1098197 - DNA, 15 bp, Homo sapiens
gccttgccttcctca

SEQ ID NO: 1098198 - DNA, 15 bp, Homo sapiens
agccttgccttcctc

SEQ ID NO: 1098199 - DNA, 15 bp, Homo sapiens
gagccttgccttcct

SEQ ID NO: 1098200 - DNA, 15 bp, Homo sapiens
ggagccttgccttcc

SEQ ID NO: 1098201 - DNA, 15 bp, Homo sapiens
tggagccttgccttc

SEQ ID NO: 1098202 - DNA, 15 bp, Homo sapiens
ttggagccttgcctt

SEQ ID NO: 1098203 - DNA, 15 bp, Homo sapiens
tttggagccttgcct

SEQ ID NO: 1098204 - DNA, 15 bp, Homo sapiens
gtttggagccttgcc

SEQ ID NO: 1098205 - DNA, 15 bp, Homo sapiens
tgtttggagccttgc

SEQ ID NO: 1098206 - DNA, 15 bp, Homo sapiens
ctgtttggagccttg

SEQ ID NO: 1098207 - DNA, 15 bp, Homo sapiens
gctgtttggagcctt

SEQ ID NO: 1098208 - DNA, 15 bp, Homo sapiens
tgctgtttggagcct

SEQ ID NO: 1098209 - DNA, 15 bp, Homo sapiens
ctgctgtttggagcc

SEQ ID NO: 1098210 - DNA, 15 bp, Homo sapiens
cctgctgtttggagc

SEQ ID NO: 1098211 - DNA, 15 bp, Homo sapiens
ccctgctgtttggag

SEQ ID NO: 1098212 - DNA, 15 bp, Homo sapiens
gccctgctgtttgga

SEQ ID NO: 1098213 - DNA, 15 bp, Homo sapiens
tgccctgctgtttgg

SEQ ID NO: 1098214 - DNA, 15 bp, Homo sapiens
ctgccctgctgtttg

SEQ ID NO: 1098215 - DNA, 15 bp, Homo sapiens
tctgccctgctgttt

SEQ ID NO: 1098216 - DNA, 15 bp, Homo sapiens
gtctgccctgctgtt

SEQ ID NO: 1098217 - DNA, 15 bp, Homo sapiens
agtctgccctgctgt

SEQ ID NO: 1098218 - DNA, 15 bp, Homo sapiens
cagtctgccctgctg

SEQ ID NO: 1098219 - DNA, 15 bp, Homo sapiens
ccagtctgccctgct

SEQ ID NO: 1098220 - DNA, 15 bp, Homo sapiens
cccagtctgccctgc

SEQ ID NO: 1098221 - DNA, 15 bp, Homo sapiens
tcccagtctgccctg

SEQ ID NO: 1098222 - DNA, 15 bp, Homo sapiens
ctcccagtctgccct

SEQ ID NO: 1098223 - DNA, 15 bp, Homo sapiens
gctcccagtctgccc

SEQ ID NO: 1098224 - DNA, 15 bp, Homo sapiens
tgctcccagtctgcc

SEQ ID NO: 1098225 - DNA, 15 bp, Homo sapiens
ttgctcccagtctgc

SEQ ID NO: 1098226 - DNA, 15 bp, Homo sapiens
cttgctcccagtctg

SEQ ID NO: 1098227 - DNA, 15 bp, Homo sapiens
ccttgctcccagtct

SEQ ID NO: 1098228 - DNA, 15 bp, Homo sapiens
accttgctcccagtc

SEQ ID NO: 1098229 - DNA, 15 bp, Homo sapiens
taccttgctcccagt

SEQ ID NO: 1098230 - DNA, 15 bp, Homo sapiens
ctaccttgctcccag

SEQ ID NO: 1098231 - DNA, 15 bp, Homo sapiens
tctaccttgctccca

SEQ ID NO: 1098232 - DNA, 15 bp, Homo sapiens
gtctaccttgctccc

SEQ ID NO: 1098233 - DNA, 15 bp, Homo sapiens
agtctaccttgctcc

SEQ ID NO: 1098234 - DNA, 15 bp, Homo sapiens
cagtctaccttgctc

SEQ ID NO: 1098235 - DNA, 15 bp, Homo sapiens
gcagtctaccttgct

SEQ ID NO: 1098236 - DNA, 15 bp, Homo sapiens
tgcagtctaccttgc

SEQ ID NO: 1098237 - DNA, 15 bp, Homo sapiens
atgcagtctaccttg

SEQ ID NO: 1098238 - DNA, 15 bp, Homo sapiens
catgcagtctacctt

SEQ ID NO: 1098239 - DNA, 15 bp, Homo sapiens
ccatgcagtctacct

SEQ ID NO: 1098240 - DNA, 15 bp, Homo sapiens
cccatgcagtctacc

SEQ ID NO: 1098241 - DNA, 15 bp, Homo sapiens
tcccatgcagtctac

SEQ ID NO: 1098242 - DNA, 15 bp, Homo sapiens
ctcccatgcagtcta

SEQ ID NO: 1098243 - DNA, 15 bp, Homo sapiens
cctcccatgcagtct

SEQ ID NO: 1098244 - DNA, 15 bp, Homo sapiens
ccctcccatgcagtc

SEQ ID NO: 1098245 - DNA, 15 bp, Homo sapiens
gccctcccatgcagt

SEQ ID NO: 1098246 - DNA, 15 bp, Homo sapiens
tgccctcccatgcag

SEQ ID NO: 1098247 - DNA, 15 bp, Homo sapiens
ctgccctcccatgca

SEQ ID NO: 1098248 - DNA, 15 bp, Homo sapiens
gctgccctcccatgc

SEQ ID NO: 1098249 - DNA, 15 bp, Homo sapiens
agctgccctcccatg

SEQ ID NO: 1098250 - DNA, 15 bp, Homo sapiens
cagctgccctcccat

SEQ ID NO: 1098251 - DNA, 15 bp, Homo sapiens
tcagctgccctccca

SEQ ID NO: 1098252 - DNA, 15 bp, Homo sapiens
atcagctgccctccc

SEQ ID NO: 1098253 - DNA, 15 bp, Homo sapiens
catcagctgccctcc

SEQ ID NO: 1098254 - DNA, 15 bp, Homo sapiens
ccatcagctgccctc

SEQ ID NO: 1098255 - DNA, 15 bp, Homo sapiens
tccatcagctgccct

SEQ ID NO: 1098256 - DNA, 15 bp, Homo sapiens
ctccatcagctgccc

SEQ ID NO: 1098257 - DNA, 15 bp, Homo sapiens
gctccatcagctgcc

SEQ ID NO: 1098258 - DNA, 15 bp, Homo sapiens
agctccatcagctgc

SEQ ID NO: 1098259 - DNA, 15 bp, Homo sapiens
ggagctccatcagct

SEQ ID NO: 1098260 - DNA, 15 bp, Homo sapiens
aggagctccatcagc

SEQ ID NO: 1098261 - DNA, 15 bp, Homo sapiens
aaggagctccatcag

SEQ ID NO: 1098262 - DNA, 15 bp, Homo sapiens
taaggagctccatca

SEQ ID NO: 1098263 - DNA, 15 bp, Homo sapiens
ttaaggagctccatc

SEQ ID NO: 1098264 - DNA, 15 bp, Homo sapiens
gttaaggagctccat

SEQ ID NO: 1098265 - DNA, 15 bp, Homo sapiens
ggttaaggagctcca

SEQ ID NO: 1098266 - DNA, 15 bp, Homo sapiens
gggttaaggagctcc

SEQ ID NO: 1098267 - DNA, 15 bp, Homo sapiens
agggttaaggagctc

SEQ ID NO: 1098268 - DNA, 15 bp, Homo sapiens
gagggttaaggagct

SEQ ID NO: 1098269 - DNA, 15 bp, Homo sapiens
agagggttaaggagc

SEQ ID NO: 1098270 - DNA, 15 bp, Homo sapiens
cagagggttaaggag

SEQ ID NO: 1098271 - DNA, 15 bp, Homo sapiens
ccagagggttaagga

SEQ ID NO: 1098272 - DNA, 15 bp, Homo sapiens
tccagagggttaagg

SEQ ID NO: 1098273 - DNA, 15 bp, Homo sapiens
ttccagagggttaag

SEQ ID NO: 1098274 - DNA, 15 bp, Homo sapiens
attccagagggttaa

SEQ ID NO: 1098275 - DNA, 15 bp, Homo sapiens
aattccagagggtta

SEQ ID NO: 1098276 - DNA, 15 bp, Homo sapiens
caattccagagggtt

SEQ ID NO: 1098277 - DNA, 15 bp, Homo sapiens
gcaattccagagggt

SEQ ID NO: 1098278 - DNA, 15 bp, Homo sapiens
ggcaattccagaggg

SEQ ID NO: 1098279 - DNA, 15 bp, Homo sapiens
gggcaattccagagg

SEQ ID NO: 1098280 - DNA, 15 bp, Homo sapiens
ggggcaattccagag

SEQ ID NO: 1098281 - DNA, 15 bp, Homo sapiens
tggggcaattccaga

SEQ ID NO: 1098282 - DNA, 15 bp, Homo sapiens
ttggggcaattccag

SEQ ID NO: 1098283 - DNA, 15 bp, Homo sapiens
tttggggcaattcca

SEQ ID NO: 1098284 - DNA, 15 bp, Homo sapiens
ctttggggcaattcc

SEQ ID NO: 1098285 - DNA, 15 bp, Homo sapiens
gctttggggcaattc

SEQ ID NO: 1098286 - DNA, 15 bp, Homo sapiens
ggctttggggcaatt

SEQ ID NO: 1098287 - DNA, 15 bp, Homo sapiens
tggctttggggcaat

SEQ ID NO: 1098288 - DNA, 15 bp, Homo sapiens
ttggctttggggcaa

SEQ ID NO: 1098289 - DNA, 15 bp, Homo sapiens
cttggctttggggca

SEQ ID NO: 1098290 - DNA, 15 bp, Homo sapiens
gcttggctttggggc

SEQ ID NO: 1098291 - DNA, 15 bp, Homo sapiens
tgcttggctttgggg

SEQ ID NO: 1098292 - DNA, 15 bp, Homo sapiens
ttgcttggctttggg

SEQ ID NO: 1098293 - DNA, 15 bp, Homo sapiens
tttgcttggctttgg

SEQ ID NO: 1098294 - DNA, 15 bp, Homo sapiens
ctttgcttggctttg

SEQ ID NO: 1098295 - DNA, 15 bp, Homo sapiens
actttgcttggcttt

SEQ ID NO: 1098296 - DNA, 15 bp, Homo sapiens
cactttgcttggctt

SEQ ID NO: 1098297 - DNA, 15 bp, Homo sapiens
acactttgcttggct

SEQ ID NO: 1098298 - DNA, 15 bp, Homo sapiens
aacactttgcttggc

SEQ ID NO: 1098299 - DNA, 15 bp, Homo sapiens
gaacactttgcttgg

SEQ ID NO: 1098300 - DNA, 15 bp, Homo sapiens
agaacactttgcttg

SEQ ID NO: 1098301 - DNA, 15 bp, Homo sapiens
aagaacactttgctt

SEQ ID NO: 1098302 - DNA, 15 bp, Homo sapiens
gaagaacactttgct

SEQ ID NO: 1098303 - DNA, 15 bp, Homo sapiens
agaagaacactttgc

SEQ ID NO: 1098304 - DNA, 15 bp, Homo sapiens
aagaagaacactttg

SEQ ID NO: 1098305 - DNA, 15 bp, Homo sapiens
caagaagaacacttt

SEQ ID NO: 1098306 - DNA, 15 bp, Homo sapiens
ccaagaagaacactt

SEQ ID NO: 1098307 - DNA, 15 bp, Homo sapiens
cccaagaagaacact

SEQ ID NO: 1098308 - DNA, 15 bp, Homo sapiens
ccccaagaagaacac

SEQ ID NO: 1098309 - DNA, 15 bp, Homo sapiens
accccaagaagaaca

SEQ ID NO: 1098310 - DNA, 15 bp, Homo sapiens
gaccccaagaagaac

SEQ ID NO: 1098311 - DNA, 15 bp, Homo sapiens
tgaccccaagaagaa

SEQ ID NO: 1098312 - DNA, 15 bp, Homo sapiens
gtgaccccaagaaga

SEQ ID NO: 1098313 - DNA, 15 bp, Homo sapiens
tgtgaccccaagaag

SEQ ID NO: 1098314 - DNA, 15 bp, Homo sapiens
ctgtgaccccaagaa

SEQ ID NO: 1098315 - DNA, 15 bp, Homo sapiens
gctgtgaccccaaga

SEQ ID NO: 1098316 - DNA, 15 bp, Homo sapiens
agctgtgaccccaag

SEQ ID NO: 1098317 - DNA, 15 bp, Homo sapiens
tagctgtgaccccaa

SEQ ID NO: 1098318 - DNA, 15 bp, Homo sapiens
ctagctgtgacccca

SEQ ID NO: 1098319 - DNA, 15 bp, Homo sapiens
gctagctgtgacccc

SEQ ID NO: 1098320 - DNA, 15 bp, Homo sapiens
agctagctgtgaccc

SEQ ID NO: 1098321 - DNA, 15 bp, Homo sapiens
gagctagctgtgacc

SEQ ID NO: 1098322 - DNA, 15 bp, Homo sapiens
tgagctagctgtgac

SEQ ID NO: 1098323 - DNA, 15 bp, Homo sapiens
ctgagctagctgtga

SEQ ID NO: 1098324 - DNA, 15 bp, Homo sapiens
cctgagctagctgtg

SEQ ID NO: 1098325 - DNA, 15 bp, Homo sapiens
ccctgagctagctgt

SEQ ID NO: 1098326 - DNA, 15 bp, Homo sapiens
tccctgagctagctg

SEQ ID NO: 1098327 - DNA, 15 bp, Homo sapiens
atccctgagctagct

SEQ ID NO: 1098328 - DNA, 15 bp, Homo sapiens
catccctgagctagc

SEQ ID NO: 1098329 - DNA, 15 bp, Homo sapiens
gcatccctgagctag

SEQ ID NO: 1098330 - DNA, 15 bp, Homo sapiens
ggcatccctgagcta

SEQ ID NO: 1098331 - DNA, 15 bp, Homo sapiens
aggcatccctgagct

SEQ ID NO: 1098332 - DNA, 15 bp, Homo sapiens
aaggcatccctgagc

SEQ ID NO: 1098333 - DNA, 15 bp, Homo sapiens
gaaggcatccctgag

SEQ ID NO: 1098334 - DNA, 15 bp, Homo sapiens
cagaaggcatccctg

SEQ ID NO: 1098335 - DNA, 15 bp, Homo sapiens
gcagaaggcatccct

SEQ ID NO: 1098336 - DNA, 15 bp, Homo sapiens
ggcagaaggcatccc

SEQ ID NO: 1098337 - DNA, 15 bp, Homo sapiens
gggcagaaggcatcc

SEQ ID NO: 1098338 - DNA, 15 bp, Homo sapiens
ggggcagaaggcatc

SEQ ID NO: 1098339 - DNA, 15 bp, Homo sapiens
aggggcagaaggcat

SEQ ID NO: 1098340 - DNA, 15 bp, Homo sapiens
aaggggcagaaggca

SEQ ID NO: 1098341 - DNA, 15 bp, Homo sapiens
caaggggcagaaggc

SEQ ID NO: 1098342 - DNA, 15 bp, Homo sapiens
ccaaggggcagaagg

SEQ ID NO: 1098343 - DNA, 15 bp, Homo sapiens
accaaggggcagaag

SEQ ID NO: 1098344 - DNA, 15 bp, Homo sapiens
gaccaaggggcagaa

SEQ ID NO: 1098345 - DNA, 15 bp, Homo sapiens
tgaccaaggggcaga

SEQ ID NO: 1098346 - DNA, 15 bp, Homo sapiens
ctgaccaaggggcag

SEQ ID NO: 1098347 - DNA, 15 bp, Homo sapiens
tctgaccaaggggca

SEQ ID NO: 1098348 - DNA, 15 bp, Homo sapiens
ctctgaccaaggggc

SEQ ID NO: 1098349 - DNA, 15 bp, Homo sapiens
cctctgaccaagggg

SEQ ID NO: 1098350 - DNA, 15 bp, Homo sapiens
ccctctgaccaaggg

SEQ ID NO: 1098351 - DNA, 15 bp, Homo sapiens
cccctctgaccaagg

SEQ ID NO: 1098352 - DNA, 15 bp, Homo sapiens
gcccctctgaccaag

SEQ ID NO: 1098353 - DNA, 15 bp, Homo sapiens
tgcccctctgaccaa

SEQ ID NO: 1098354 - DNA, 15 bp, Homo sapiens
ttgcccctctgacca

SEQ ID NO: 1098355 - DNA, 15 bp, Homo sapiens
tttgcccctctgacc

SEQ ID NO: 1098356 - DNA, 15 bp, Homo sapiens
ttttgcccctctgac

SEQ ID NO: 1098357 - DNA, 15 bp, Homo sapiens
cttttgcccctctga

SEQ ID NO: 1098358 - DNA, 15 bp, Homo sapiens
ccttttgcccctctg

SEQ ID NO: 1098359 - DNA, 15 bp, Homo sapiens
accttttgcccctct

SEQ ID NO: 1098360 - DNA, 15 bp, Homo sapiens
gctctgaccttttgc

SEQ ID NO: 1098361 - DNA, 15 bp, Homo sapiens
ggctctgaccttttg

SEQ ID NO: 1098362 - DNA, 15 bp, Homo sapiens
aggctctgacctttt

SEQ ID NO: 1098363 - DNA, 15 bp, Homo sapiens
taggctctgaccttt

SEQ ID NO: 1098364 - DNA, 15 bp, Homo sapiens
ctaggctctgacctt

SEQ ID NO: 1098365 - DNA, 15 bp, Homo sapiens
cctaggctctgacct

SEQ ID NO: 1098366 - DNA, 15 bp, Homo sapiens
ccctaggctctgacc

SEQ ID NO: 1098367 - DNA, 15 bp, Homo sapiens
accctaggctctgac

SEQ ID NO: 1098368 - DNA, 15 bp, Homo sapiens
gaccctaggctctga

SEQ ID NO: 1098369 - DNA, 15 bp, Homo sapiens
tgaccctaggctctg

SEQ ID NO: 1098370 - DNA, 15 bp, Homo sapiens
gtgaccctaggctct

SEQ ID NO: 1098371 - DNA, 15 bp, Homo sapiens
ggtgaccctaggctc

SEQ ID NO: 1098372 - DNA, 15 bp, Homo sapiens
tggtgaccctaggct

SEQ ID NO: 1098373 - DNA, 15 bp, Homo sapiens
ttggtgaccctaggc

SEQ ID NO: 1098374 - DNA, 15 bp, Homo sapiens
tttggtgaccctagg

SEQ ID NO: 1098375 - DNA, 15 bp, Homo sapiens
ttttggtgaccctag

SEQ ID NO: 1098376 - DNA, 15 bp, Homo sapiens
gttttggtgacccta

SEQ ID NO: 1098377 - DNA, 15 bp, Homo sapiens
ggttttggtgaccct

SEQ ID NO: 1098378 - DNA, 15 bp, Homo sapiens
aggttttggtgaccc

SEQ ID NO: 1098379 - DNA, 15 bp, Homo sapiens
gaggttttggtgacc

SEQ ID NO: 1098380 - DNA, 15 bp, Homo sapiens
agaggttttggtgac

SEQ ID NO: 1098381 - DNA, 15 bp, Homo sapiens
cagaggttttggtga

SEQ ID NO: 1098382 - DNA, 15 bp, Homo sapiens
ccagaggttttggtg

SEQ ID NO: 1098383 - DNA, 15 bp, Homo sapiens
cccagaggttttggt

SEQ ID NO: 1098384 - DNA, 15 bp, Homo sapiens
tcccagaggttttgg

SEQ ID NO: 1098385 - DNA, 15 bp, Homo sapiens
ttcccagaggttttg

SEQ ID NO: 1098386 - DNA, 15 bp, Homo sapiens
cttcccagaggtttt

SEQ ID NO: 1098387 - DNA, 15 bp, Homo sapiens
gcttcccagaggttt

SEQ ID NO: 1098388 - DNA, 15 bp, Homo sapiens
ggcttcccagaggtt

SEQ ID NO: 1098389 - DNA, 15 bp, Homo sapiens
gggcttcccagaggt

SEQ ID NO: 1098390 - DNA, 15 bp, Homo sapiens
ggggcttcccagagg

SEQ ID NO: 1098391 - DNA, 15 bp, Homo sapiens
cggggcttcccagag

SEQ ID NO: 1098392 - DNA, 15 bp, Homo sapiens
ccggggcttcccaga

SEQ ID NO: 1098393 - DNA, 15 bp, Homo sapiens
cccggggcttcccag

SEQ ID NO: 1098394 - DNA, 15 bp, Homo sapiens
ccccggggcttccca

SEQ ID NO: 1098395 - DNA, 15 bp, Homo sapiens
cccccggggcttccc

SEQ ID NO: 1098396 - DNA, 15 bp, Homo sapiens
acccccggggcttcc

SEQ ID NO: 1098397 - DNA, 15 bp, Homo sapiens
gacccccggggcttc

SEQ ID NO: 1098398 - DNA, 15 bp, Homo sapiens
agacccccggggctt

SEQ ID NO: 1098399 - DNA, 15 bp, Homo sapiens
gagacccccggggct

SEQ ID NO: 1098400 - DNA, 15 bp, Homo sapiens
tgagacccccggggc

SEQ ID NO: 1098401 - DNA, 15 bp, Homo sapiens
ctgagacccccgggg

SEQ ID NO: 1098402 - DNA, 15 bp, Homo sapiens
cctgagacccccggg

SEQ ID NO: 1098403 - DNA, 15 bp, Homo sapiens
gcctgagacccccgg

SEQ ID NO: 1098404 - DNA, 15 bp, Homo sapiens
ggcctgagacccccg

SEQ ID NO: 1098405 - DNA, 15 bp, Homo sapiens
tggcctgagaccccc

SEQ ID NO: 1098406 - DNA, 15 bp, Homo sapiens
gtggcctgagacccc

SEQ ID NO: 1098407 - DNA, 15 bp, Homo sapiens
tgtggcctgagaccc

SEQ ID NO: 1098408 - DNA, 15 bp, Homo sapiens
ctgtggcctgagacc

SEQ ID NO: 1098409 - DNA, 15 bp, Homo sapiens
tctgtggcctgagac

SEQ ID NO: 1098410 - DNA, 15 bp, Homo sapiens
gtctgtggcctgaga

SEQ ID NO: 1098411 - DNA, 15 bp, Homo sapiens
ggtctgtggcctgag

SEQ ID NO: 1098412 - DNA, 15 bp, Homo sapiens
tggtctgtggcctga

SEQ ID NO: 1098413 - DNA, 15 bp, Homo sapiens
atggtctgtggcctg

SEQ ID NO: 1098414 - DNA, 15 bp, Homo sapiens
gatggtctgtggcct

SEQ ID NO: 1098415 - DNA, 15 bp, Homo sapiens
ggatggtctgtggcc

SEQ ID NO: 1098416 - DNA, 15 bp, Homo sapiens
aggatggtctgtggc

SEQ ID NO: 1098417 - DNA, 15 bp, Homo sapiens
gaggatggtctgtgg

SEQ ID NO: 1098418 - DNA, 15 bp, Homo sapiens
tgaggatggtctgtg

SEQ ID NO: 1098419 - DNA, 15 bp, Homo sapiens
ctgaggatggtctgt

SEQ ID NO: 1098420 - DNA, 15 bp, Homo sapiens
tctgaggatggtctg

SEQ ID NO: 1098421 - DNA, 15 bp, Homo sapiens
ttctgaggatggtct

SEQ ID NO: 1098422 - DNA, 15 bp, Homo sapiens
gttctgaggatggtc

SEQ ID NO: 1098423 - DNA, 15 bp, Homo sapiens
agttctgaggatggt

SEQ ID NO: 1098424 - DNA, 15 bp, Homo sapiens
tagttctgaggatgg

SEQ ID NO: 1098425 - DNA, 15 bp, Homo sapiens
gtagttctgaggatg

SEQ ID NO: 1098426 - DNA, 15 bp, Homo sapiens
tgtagttctgaggat

SEQ ID NO: 1098427 - DNA, 15 bp, Homo sapiens
gtgtagttctgagga

SEQ ID NO: 1098428 - DNA, 15 bp, Homo sapiens
tgtgtagttctgagg

SEQ ID NO: 1098429 - DNA, 15 bp, Homo sapiens
gtgtgtagttctgag

SEQ ID NO: 1098430 - DNA, 15 bp, Homo sapiens
agtgtgtagttctga

SEQ ID NO: 1098431 - DNA, 15 bp, Homo sapiens
cagtgtgtagttctg

SEQ ID NO: 1098432 - DNA, 15 bp, Homo sapiens
gcagtgtgtagttct

SEQ ID NO: 1098433 - DNA, 15 bp, Homo sapiens
ggcagtgtgtagttc

SEQ ID NO: 1098434 - DNA, 15 bp, Homo sapiens
gggcagtgtgtagtt

SEQ ID NO: 1098435 - DNA, 15 bp, Homo sapiens
agggcagtgtgtagt

SEQ ID NO: 1098436 - DNA, 15 bp, Homo sapiens
gagggcagtgtgtag

SEQ ID NO: 1098437 - DNA, 15 bp, Homo sapiens
ggagggcagtgtgta

SEQ ID NO: 1098438 - DNA, 15 bp, Homo sapiens
gggagggcagtgtgt

SEQ ID NO: 1098439 - DNA, 15 bp, Homo sapiens
tgggagggcagtgtg

SEQ ID NO: 1098440 - DNA, 15 bp, Homo sapiens
atgggagggcagtgt

SEQ ID NO: 1098441 - DNA, 15 bp, Homo sapiens
catgggagggcagtg

SEQ ID NO: 1098442 - DNA, 15 bp, Homo sapiens
gcatgggagggcagt

SEQ ID NO: 1098443 - DNA, 15 bp, Homo sapiens
ggcatgggagggcag

SEQ ID NO: 1098444 - DNA, 15 bp, Homo sapiens
aggcatgggagggca

SEQ ID NO: 1098445 - DNA, 15 bp, Homo sapiens
caggcatgggagggc

SEQ ID NO: 1098446 - DNA, 15 bp, Homo sapiens
ccaggcatgggaggg

SEQ ID NO: 1098447 - DNA, 15 bp, Homo sapiens
gccaggcatgggagg

SEQ ID NO: 1098448 - DNA, 15 bp, Homo sapiens
cgccaggcatgggag

SEQ ID NO: 1098449 - DNA, 15 bp, Homo sapiens
ccgccaggcatggga

SEQ ID NO: 1098450 - DNA, 15 bp, Homo sapiens
cccgccaggcatggg

SEQ ID NO: 1098451 - DNA, 15 bp, Homo sapiens
ccccgccaggcatgg

SEQ ID NO: 1098452 - DNA, 15 bp, Homo sapiens
cccccgccaggcatg

SEQ ID NO: 1098453 - DNA, 15 bp, Homo sapiens
gcccccgccaggcat

SEQ ID NO: 1098454 - DNA, 15 bp, Homo sapiens
ggcccccgccaggca

SEQ ID NO: 1098455 - DNA, 15 bp, Homo sapiens
gggcccccgccaggc

SEQ ID NO: 1098456 - DNA, 15 bp, Homo sapiens
agggcccccgccagg

SEQ ID NO: 1098457 - DNA, 15 bp, Homo sapiens
cagggcccccgccag

SEQ ID NO: 1098458 - DNA, 15 bp, Homo sapiens
ccagggcccccgcca

SEQ ID NO: 1098459 - DNA, 15 bp, Homo sapiens
tccagggcccccgcc

SEQ ID NO: 1098460 - DNA, 15 bp, Homo sapiens
gtccagggcccccgc

SEQ ID NO: 1098461 - DNA, 15 bp, Homo sapiens
agtccagggcccccg

SEQ ID NO: 1098462 - DNA, 15 bp, Homo sapiens
cagtccagggccccc

SEQ ID NO: 1098463 - DNA, 15 bp, Homo sapiens
ccagtccagggcccc

SEQ ID NO: 1098464 - DNA, 15 bp, Homo sapiens
gccagtccagggccc

SEQ ID NO: 1098465 - DNA, 15 bp, Homo sapiens
ggccagtccagggcc

SEQ ID NO: 1098466 - DNA, 15 bp, Homo sapiens
gggccagtccagggc

SEQ ID NO: 1098467 - DNA, 15 bp, Homo sapiens
agggccagtccaggg

SEQ ID NO: 1098468 - DNA, 15 bp, Homo sapiens
gagggccagtccagg

SEQ ID NO: 1098469 - DNA, 15 bp, Homo sapiens
tgagggccagtccag

SEQ ID NO: 1098470 - DNA, 15 bp, Homo sapiens
gtgagggccagtcca

SEQ ID NO: 1098471 - DNA, 15 bp, Homo sapiens
ggtgagggccagtcc

SEQ ID NO: 1098472 - DNA, 15 bp, Homo sapiens
tggtgagggccagtc

SEQ ID NO: 1098473 - DNA, 15 bp, Homo sapiens
ctggtgagggccagt

SEQ ID NO: 1098474 - DNA, 15 bp, Homo sapiens
gctggtgagggccag

SEQ ID NO: 1098475 - DNA, 15 bp, Homo sapiens
agctggtgagggcca

SEQ ID NO: 1098476 - DNA, 15 bp, Homo sapiens
cagctggtgagggcc

SEQ ID NO: 1098477 - DNA, 15 bp, Homo sapiens
acagctggtgagggc

SEQ ID NO: 1098478 - DNA, 15 bp, Homo sapiens
gacagctggtgaggg

SEQ ID NO: 1098479 - DNA, 15 bp, Homo sapiens
agacagctggtgagg

SEQ ID NO: 1098480 - DNA, 15 bp, Homo sapiens
aagacagctggtgag

SEQ ID NO: 1098481 - DNA, 15 bp, Homo sapiens
gaagacagctggtga

SEQ ID NO: 1098482 - DNA, 15 bp, Homo sapiens
agaagacagctggtg

SEQ ID NO: 1098483 - DNA, 15 bp, Homo sapiens
aagaagacagctggt

SEQ ID NO: 1098484 - DNA, 15 bp, Homo sapiens
caagaagacagctgg

SEQ ID NO: 1098485 - DNA, 15 bp, Homo sapiens
gcaagaagacagctg

SEQ ID NO: 1098486 - DNA, 15 bp, Homo sapiens
tgcaagaagacagct

SEQ ID NO: 1098487 - DNA, 15 bp, Homo sapiens
gtgcaagaagacagc

SEQ ID NO: 1098488 - DNA, 15 bp, Homo sapiens
agtgcaagaagacag

SEQ ID NO: 1098489 - DNA, 15 bp, Homo sapiens
cagtgcaagaagaca

SEQ ID NO: 1098490 - DNA, 15 bp, Homo sapiens
ccagtgcaagaagac

SEQ ID NO: 1098491 - DNA, 15 bp, Homo sapiens
gccagtgcaagaaga

SEQ ID NO: 1098492 - DNA, 15 bp, Homo sapiens
ggccagtgcaagaag

SEQ ID NO: 1098493 - DNA, 15 bp, Homo sapiens
tggccagtgcaagaa

SEQ ID NO: 1098494 - DNA, 15 bp, Homo sapiens
ctggccagtgcaaga

SEQ ID NO: 1098495 - DNA, 15 bp, Homo sapiens
cctggccagtgcaag

SEQ ID NO: 1098496 - DNA, 15 bp, Homo sapiens
ccctggccagtgcaa

SEQ ID NO: 1098497 - DNA, 15 bp, Homo sapiens
accctggccagtgca

SEQ ID NO: 1098498 - DNA, 15 bp, Homo sapiens
aaccctggccagtgc

SEQ ID NO: 1098499 - DNA, 15 bp, Homo sapiens
gaaccctggccagtg

SEQ ID NO: 1098500 - DNA, 15 bp, Homo sapiens
agaaccctggccagt

SEQ ID NO: 1098501 - DNA, 15 bp, Homo sapiens
cagaaccctggccag

SEQ ID NO: 1098502 - DNA, 15 bp, Homo sapiens
ccagaaccctggcca

SEQ ID NO: 1098503 - DNA, 15 bp, Homo sapiens
gccagaaccctggcc

SEQ ID NO: 1098504 - DNA, 15 bp, Homo sapiens
agccagaaccctggc

SEQ ID NO: 1098505 - DNA, 15 bp, Homo sapiens
cagccagaaccctgg

SEQ ID NO: 1098506 - DNA, 15 bp, Homo sapiens
ccagccagaaccctg

SEQ ID NO: 1098507 - DNA, 15 bp, Homo sapiens
tccagccagaaccct

SEQ ID NO: 1098508 - DNA, 15 bp, Homo sapiens
gtccagccagaaccc

SEQ ID NO: 1098509 - DNA, 15 bp, Homo sapiens
agtccagccagaacc

SEQ ID NO: 1098510 - DNA, 15 bp, Homo sapiens
cagtccagccagaac

SEQ ID NO: 1098511 - DNA, 15 bp, Homo sapiens
ccagtccagccagaa

SEQ ID NO: 1098512 - DNA, 15 bp, Homo sapiens
gccagtccagccaga

SEQ ID NO: 1098513 - DNA, 15 bp, Homo sapiens
tgccagtccagccag

SEQ ID NO: 1098514 - DNA, 15 bp, Homo sapiens
ttgccagtccagcca

SEQ ID NO: 1098515 - DNA, 15 bp, Homo sapiens
cttgccagtccagcc

SEQ ID NO: 1098516 - DNA, 15 bp, Homo sapiens
ccttgccagtccagc

SEQ ID NO: 1098517 - DNA, 15 bp, Homo sapiens
tccttgccagtccag

SEQ ID NO: 1098518 - DNA, 15 bp, Homo sapiens
ctccttgccagtcca

SEQ ID NO: 1098519 - DNA, 15 bp, Homo sapiens
cctccttgccagtcc

SEQ ID NO: 1098520 - DNA, 15 bp, Homo sapiens
ccctccttgccagtc

SEQ ID NO: 1098521 - DNA, 15 bp, Homo sapiens
cccctccttgccagt

SEQ ID NO: 1098522 - DNA, 15 bp, Homo sapiens
acccctccttgccag

SEQ ID NO: 1098523 - DNA, 15 bp, Homo sapiens
cacccctccttgcca

SEQ ID NO: 1098524 - DNA, 15 bp, Homo sapiens
ccacccctccttgcc

SEQ ID NO: 1098525 - DNA, 15 bp, Homo sapiens
accacccctccttgc

SEQ ID NO: 1098526 - DNA, 15 bp, Homo sapiens
gaccacccctccttg

SEQ ID NO: 1098527 - DNA, 15 bp, Homo sapiens
tgaccacccctcctt

SEQ ID NO: 1098528 - DNA, 15 bp, Homo sapiens
ctgaccacccctcct

SEQ ID NO: 1098529 - DNA, 15 bp, Homo sapiens
tctgaccacccctcc

SEQ ID NO: 1098530 - DNA, 15 bp, Homo sapiens
atctgaccacccctc

SEQ ID NO: 1098531 - DNA, 15 bp, Homo sapiens
tatctgaccacccct

SEQ ID NO: 1098532 - DNA, 15 bp, Homo sapiens
gtatctgaccacccc

SEQ ID NO: 1098533 - DNA, 15 bp, Homo sapiens
tgtatctgaccaccc

SEQ ID NO: 1098534 - DNA, 15 bp, Homo sapiens
ctgtatctgaccacc

SEQ ID NO: 1098535 - DNA, 15 bp, Homo sapiens
cctgtatctgaccac

SEQ ID NO: 1098536 - DNA, 15 bp, Homo sapiens
tcctgtatctgacca

SEQ ID NO: 1098537 - DNA, 15 bp, Homo sapiens
ctcctgtatctgacc

SEQ ID NO: 1098538 - DNA, 15 bp, Homo sapiens
actcctgtatctgac

SEQ ID NO: 1098539 - DNA, 15 bp, Homo sapiens
tactcctgtatctga

SEQ ID NO: 1098540 - DNA, 15 bp, Homo sapiens
ttactcctgtatctg

SEQ ID NO: 1098541 - DNA, 15 bp, Homo sapiens
gttactcctgtatct

SEQ ID NO: 1098542 - DNA, 15 bp, Homo sapiens
agttactcctgtatc

SEQ ID NO: 1098543 - DNA, 15 bp, Homo sapiens
cagttactcctgtat

SEQ ID NO: 1098544 - DNA, 15 bp, Homo sapiens
ccagttactcctgta

SEQ ID NO: 1098545 - DNA, 15 bp, Homo sapiens
tccagttactcctgt

SEQ ID NO: 1098546 - DNA, 15 bp, Homo sapiens
atccagttactcctg

SEQ ID NO: 1098547 - DNA, 15 bp, Homo sapiens
gatccagttactcct

SEQ ID NO: 1098548 - DNA, 15 bp, Homo sapiens
ggatccagttactcc

SEQ ID NO: 1098549 - DNA, 15 bp, Homo sapiens
gggatccagttactc

SEQ ID NO: 1098550 - DNA, 15 bp, Homo sapiens
agggatccagttact

SEQ ID NO: 1098551 - DNA, 15 bp, Homo sapiens
aagggatccagttac

SEQ ID NO: 1098552 - DNA, 15 bp, Homo sapiens
gaagggatccagtta

SEQ ID NO: 1098553 - DNA, 15 bp, Homo sapiens
tgaagggatccagtt

SEQ ID NO: 1098554 - DNA, 15 bp, Homo sapiens
atgaagggatccagt

SEQ ID NO: 1098555 - DNA, 15 bp, Homo sapiens
gatgaagggatccag

SEQ ID NO: 1098556 - DNA, 15 bp, Homo sapiens
tgatgaagggatcca

SEQ ID NO: 1098557 - DNA, 15 bp, Homo sapiens
ctgatgaagggatcc

SEQ ID NO: 1098558 - DNA, 15 bp, Homo sapiens
cctgatgaagggatc

SEQ ID NO: 1098559 - DNA, 15 bp, Homo sapiens
tcctgatgaagggat

SEQ ID NO: 1098560 - DNA, 15 bp, Homo sapiens
gtcctgatgaaggga

SEQ ID NO: 1098561 - DNA, 15 bp, Homo sapiens
ggtcctgatgaaggg

SEQ ID NO: 1098562 - DNA, 15 bp, Homo sapiens
aggtcctgatgaagg

SEQ ID NO: 1098563 - DNA, 15 bp, Homo sapiens
taggtcctgatgaag

SEQ ID NO: 1098564 - DNA, 15 bp, Homo sapiens
ctaggtcctgatgaa

SEQ ID NO: 1098565 - DNA, 15 bp, Homo sapiens
cctaggtcctgatga

SEQ ID NO: 1098566 - DNA, 15 bp, Homo sapiens
ccctaggtcctgatg

SEQ ID NO: 1098567 - DNA, 15 bp, Homo sapiens
accctaggtcctgat

SEQ ID NO: 1098568 - DNA, 15 bp, Homo sapiens
caccctaggtcctga

SEQ ID NO: 1098569 - DNA, 15 bp, Homo sapiens
ccaccctaggtcctg

SEQ ID NO: 1098570 - DNA, 15 bp, Homo sapiens
accaccctaggtcct

SEQ ID NO: 1098571 - DNA, 15 bp, Homo sapiens
caccaccctaggtcc

SEQ ID NO: 1098572 - DNA, 15 bp, Homo sapiens
tcaccaccctaggtc

SEQ ID NO: 1098573 - DNA, 15 bp, Homo sapiens
ctcaccaccctaggt

SEQ ID NO: 1098574 - DNA, 15 bp, Homo sapiens
tctcaccaccctagg

SEQ ID NO: 1098575 - DNA, 15 bp, Homo sapiens
ctctcaccaccctag

SEQ ID NO: 1098576 - DNA, 15 bp, Homo sapiens
gctctcaccacccta

SEQ ID NO: 1098577 - DNA, 15 bp, Homo sapiens
agctctcaccaccct

SEQ ID NO: 1098578 - DNA, 15 bp, Homo sapiens
aagctctcaccaccc

SEQ ID NO: 1098579 - DNA, 15 bp, Homo sapiens
aaagctctcaccacc

SEQ ID NO: 1098580 - DNA, 15 bp, Homo sapiens
caaagctctcaccac

SEQ ID NO: 1098581 - DNA, 15 bp, Homo sapiens
tcaaagctctcacca

SEQ ID NO: 1098582 - DNA, 15 bp, Homo sapiens
ctcaaagctctcacc

SEQ ID NO: 1098583 - DNA, 15 bp, Homo sapiens
gctcaaagctctcac

SEQ ID NO: 1098584 - DNA, 15 bp, Homo sapiens
ggctcaaagctctca

SEQ ID NO: 1098585 - DNA, 15 bp, Homo sapiens
aggctcaaagctctc

SEQ ID NO: 1098586 - DNA, 15 bp, Homo sapiens
caggctcaaagctct

SEQ ID NO: 1098587 - DNA, 15 bp, Homo sapiens
gcaggctcaaagctc

SEQ ID NO: 1098588 - DNA, 15 bp, Homo sapiens
agcaggctcaaagct

SEQ ID NO: 1098589 - DNA, 15 bp, Homo sapiens
gagcaggctcaaagc

SEQ ID NO: 1098590 - DNA, 15 bp, Homo sapiens
agagcaggctcaaag

SEQ ID NO: 1098591 - DNA, 15 bp, Homo sapiens
cagagcaggctcaaa

SEQ ID NO: 1098592 - DNA, 15 bp, Homo sapiens
gcagagcaggctcaa

SEQ ID NO: 1098593 - DNA, 15 bp, Homo sapiens
agcagagcaggctca

SEQ ID NO: 1098594 - DNA, 15 bp, Homo sapiens
gagcagagcaggctc

SEQ ID NO: 1098595 - DNA, 15 bp, Homo sapiens
ggagcagagcaggct

SEQ ID NO: 1098596 - DNA, 15 bp, Homo sapiens
tggagcagagcaggc

SEQ ID NO: 1098597 - DNA, 15 bp, Homo sapiens
ctggagcagagcagg

SEQ ID NO: 1098598 - DNA, 15 bp, Homo sapiens
cctggagcagagcag

SEQ ID NO: 1098599 - DNA, 15 bp, Homo sapiens
gcctggagcagagca

SEQ ID NO: 1098600 - DNA, 15 bp, Homo sapiens
tgcctggagcagagc

SEQ ID NO: 1098601 - DNA, 15 bp, Homo sapiens
ctgcctggagcagag

SEQ ID NO: 1098602 - DNA, 15 bp, Homo sapiens
tctgcctggagcaga

SEQ ID NO: 1098603 - DNA, 15 bp, Homo sapiens
gtctgcctggagcag

SEQ ID NO: 1098604 - DNA, 15 bp, Homo sapiens
tgtctgcctggagca

SEQ ID NO: 1098605 - DNA, 15 bp, Homo sapiens
atgtctgcctggagc

SEQ ID NO: 1098606 - DNA, 15 bp, Homo sapiens
aatgtctgcctggag

SEQ ID NO: 1098607 - DNA, 15 bp, Homo sapiens
caatgtctgcctgga

SEQ ID NO: 1098608 - DNA, 15 bp, Homo sapiens
acaatgtctgcctgg

SEQ ID NO: 1098609 - DNA, 15 bp, Homo sapiens
cacaatgtctgcctg

SEQ ID NO: 1098610 - DNA, 15 bp, Homo sapiens
acacaatgtctgcct

SEQ ID NO: 1098611 - DNA, 15 bp, Homo sapiens
gacacaatgtctgcc

SEQ ID NO: 1098612 - DNA, 15 bp, Homo sapiens
agacacaatgtctgc

SEQ ID NO: 1098613 - DNA, 15 bp, Homo sapiens
cagacacaatgtctg

SEQ ID NO: 1098614 - DNA, 15 bp, Homo sapiens
ccagacacaatgtct

SEQ ID NO: 1098615 - DNA, 15 bp, Homo sapiens
gccagacacaatgtc

SEQ ID NO: 1098616 - DNA, 15 bp, Homo sapiens
ggccagacacaatgt

SEQ ID NO: 1098617 - DNA, 15 bp, Homo sapiens
gggccagacacaatg

SEQ ID NO: 1098618 - DNA, 15 bp, Homo sapiens
agggccagacacaat

SEQ ID NO: 1098619 - DNA, 15 bp, Homo sapiens
cagggccagacacaa

SEQ ID NO: 1098620 - DNA, 15 bp, Homo sapiens
gcagggccagacaca

SEQ ID NO: 1098621 - DNA, 15 bp, Homo sapiens
ggcagggccagacac

SEQ ID NO: 1098622 - DNA, 15 bp, Homo sapiens
tggcagggccagaca

SEQ ID NO: 1098623 - DNA, 15 bp, Homo sapiens
ctggcagggccagac

SEQ ID NO: 1098624 - DNA, 15 bp, Homo sapiens
cctggcagggccaga

SEQ ID NO: 1098625 - DNA, 15 bp, Homo sapiens
tcctggcagggccag

SEQ ID NO: 1098626 - DNA, 15 bp, Homo sapiens
atcctggcagggcca

SEQ ID NO: 1098627 - DNA, 15 bp, Homo sapiens
catcctggcagggcc

SEQ ID NO: 1098628 - DNA, 15 bp, Homo sapiens
ccatcctggcagggc

SEQ ID NO: 1098629 - DNA, 15 bp, Homo sapiens
tccatcctggcaggg

SEQ ID NO: 1098630 - DNA, 15 bp, Homo sapiens
atccatcctggcagg

SEQ ID NO: 1098631 - DNA, 15 bp, Homo sapiens
tatccatcctggcag

SEQ ID NO: 1098632 - DNA, 15 bp, Homo sapiens
ctatccatcctggca

SEQ ID NO: 1098633 - DNA, 15 bp, Homo sapiens
tctatccatcctggc

SEQ ID NO: 1098634 - DNA, 15 bp, Homo sapiens
gtctatccatcctgg

SEQ ID NO: 1098635 - DNA, 15 bp, Homo sapiens
tgtctatccatcctg

SEQ ID NO: 1098636 - DNA, 15 bp, Homo sapiens
ctgtctatccatcct

SEQ ID NO: 1098637 - DNA, 15 bp, Homo sapiens
gctgtctatccatcc

SEQ ID NO: 1098638 - DNA, 15 bp, Homo sapiens
tgctgtctatccatc

SEQ ID NO: 1098639 - DNA, 15 bp, Homo sapiens
ctgctgtctatccat

SEQ ID NO: 1098640 - DNA, 15 bp, Homo sapiens
cctgctgtctatcca

SEQ ID NO: 1098641 - DNA, 15 bp, Homo sapiens
tcctgctgtctatcc

SEQ ID NO: 1098642 - DNA, 15 bp, Homo sapiens
atcctgctgtctatc

SEQ ID NO: 1098643 - DNA, 15 bp, Homo sapiens
catcctgctgtctat

SEQ ID NO: 1098644 - DNA, 15 bp, Homo sapiens
acatcctgctgtcta

SEQ ID NO: 1098645 - DNA, 15 bp, Homo sapiens
aacatcctgctgtct

SEQ ID NO: 1098646 - DNA, 15 bp, Homo sapiens
taacatcctgctgtc

SEQ ID NO: 1098647 - DNA, 15 bp, Homo sapiens
gtaacatcctgctgt

SEQ ID NO: 1098648 - DNA, 15 bp, Homo sapiens
tgtaacatcctgctg

SEQ ID NO: 1098649 - DNA, 15 bp, Homo sapiens
gtgtaacatcctgct

SEQ ID NO: 1098650 - DNA, 15 bp, Homo sapiens
cgtgtaacatcctgc

SEQ ID NO: 1098651 - DNA, 15 bp, Homo sapiens
acgtgtaacatcctg

SEQ ID NO: 1098652 - DNA, 15 bp, Homo sapiens
aacgtgtaacatcct

SEQ ID NO: 1098653 - DNA, 15 bp, Homo sapiens
caacgtgtaacatcc

SEQ ID NO: 1098654 - DNA, 15 bp, Homo sapiens
tcaacgtgtaacatc

SEQ ID NO: 1098655 - DNA, 15 bp, Homo sapiens
ctcaacgtgtaacat

SEQ ID NO: 1098656 - DNA, 15 bp, Homo sapiens
cctcaacgtgtaaca

SEQ ID NO: 1098657 - DNA, 15 bp, Homo sapiens
tcctcaacgtgtaac

SEQ ID NO: 1098658 - DNA, 15 bp, Homo sapiens
gtcctcaacgtgtaa

SEQ ID NO: 1098659 - DNA, 15 bp, Homo sapiens
tgtcctcaacgtgta

SEQ ID NO: 1098660 - DNA, 15 bp, Homo sapiens
atgtcctcaacgtgt

SEQ ID NO: 1098661 - DNA, 15 bp, Homo sapiens
catgtcctcaacgtg

SEQ ID NO: 1098662 - DNA, 15 bp, Homo sapiens
tcatgtcctcaacgt

SEQ ID NO: 1098663 - DNA, 15 bp, Homo sapiens
ttcatgtcctcaacg

SEQ ID NO: 1098664 - DNA, 15 bp, Homo sapiens
cttcatgtcctcaac

SEQ ID NO: 1098665 - DNA, 15 bp, Homo sapiens
ccttcatgtcctcaa

SEQ ID NO: 1098666 - DNA, 15 bp, Homo sapiens
accttcatgtcctca

SEQ ID NO: 1098667 - DNA, 15 bp, Homo sapiens
gaccttcatgtcctc

SEQ ID NO: 1098668 - DNA, 15 bp, Homo sapiens
tgaccttcatgtcct

SEQ ID NO: 1098669 - DNA, 15 bp, Homo sapiens
atgaccttcatgtcc

SEQ ID NO: 1098670 - DNA, 15 bp, Homo sapiens
gatgaccttcatgtc

SEQ ID NO: 1098671 - DNA, 15 bp, Homo sapiens
tgatgaccttcatgt

SEQ ID NO: 1098672 - DNA, 15 bp, Homo sapiens
ctgatgaccttcatg

SEQ ID NO: 1098673 - DNA, 15 bp, Homo sapiens
cctgatgaccttcat

SEQ ID NO: 1098674 - DNA, 15 bp, Homo sapiens
tcctgatgaccttca

SEQ ID NO: 1098675 - DNA, 15 bp, Homo sapiens
ttcctgatgaccttc

SEQ ID NO: 1098676 - DNA, 15 bp, Homo sapiens
attcctgatgacctt

SEQ ID NO: 1098677 - DNA, 15 bp, Homo sapiens
cattcctgatgacct

SEQ ID NO: 1098678 - DNA, 15 bp, Homo sapiens
acattcctgatgacc

SEQ ID NO: 1098679 - DNA, 15 bp, Homo sapiens
cacattcctgatgac

SEQ ID NO: 1098680 - DNA, 15 bp, Homo sapiens
ccacattcctgatga

SEQ ID NO: 1098681 - DNA, 15 bp, Homo sapiens
gccacattcctgatg

SEQ ID NO: 1098682 - DNA, 15 bp, Homo sapiens
agccacattcctgat

SEQ ID NO: 1098683 - DNA, 15 bp, Homo sapiens
cagccacattcctga

SEQ ID NO: 1098684 - DNA, 15 bp, Homo sapiens
ccagccacattcctg

SEQ ID NO: 1098685 - DNA, 15 bp, Homo sapiens
tccagccacattcct

SEQ ID NO: 1098686 - DNA, 15 bp, Homo sapiens
ttccagccacattcc

SEQ ID NO: 1098687 - DNA, 15 bp, Homo sapiens
attccagccacattc

SEQ ID NO: 1098688 - DNA, 15 bp, Homo sapiens
gattccagccacatt

SEQ ID NO: 1098689 - DNA, 15 bp, Homo sapiens
agattccagccacat

SEQ ID NO: 1098690 - DNA, 15 bp, Homo sapiens
cagattccagccaca

SEQ ID NO: 1098691 - DNA, 15 bp, Homo sapiens
acagattccagccac

SEQ ID NO: 1098692 - DNA, 15 bp, Homo sapiens
aacagattccagcca

SEQ ID NO: 1098693 - DNA, 15 bp, Homo sapiens
taacagattccagcc

SEQ ID NO: 1098694 - DNA, 15 bp, Homo sapiens
ctaacagattccagc

SEQ ID NO: 1098695 - DNA, 15 bp, Homo sapiens
cctaacagattccag

SEQ ID NO: 1098696 - DNA, 15 bp, Homo sapiens
gcctaacagattcca

SEQ ID NO: 1098697 - DNA, 15 bp, Homo sapiens
ggcctaacagattcc

SEQ ID NO: 1098698 - DNA, 15 bp, Homo sapiens
aggcctaacagattc

SEQ ID NO: 1098699 - DNA, 15 bp, Homo sapiens
gaggcctaacagatt

SEQ ID NO: 1098700 - DNA, 15 bp, Homo sapiens
ggaggcctaacagat

SEQ ID NO: 1098701 - DNA, 15 bp, Homo sapiens
gggaggcctaacaga

SEQ ID NO: 1098702 - DNA, 15 bp, Homo sapiens
ggggaggcctaacag

SEQ ID NO: 1098703 - DNA, 15 bp, Homo sapiens
gggggaggcctaaca

SEQ ID NO: 1098704 - DNA, 15 bp, Homo sapiens
tgggggaggcctaac

SEQ ID NO: 1098705 - DNA, 15 bp, Homo sapiens
ctgggggaggcctaa

SEQ ID NO: 1098706 - DNA, 15 bp, Homo sapiens
gctgggggaggccta

SEQ ID NO: 1098707 - DNA, 15 bp, Homo sapiens
ggctgggggaggcct

SEQ ID NO: 1098708 - DNA, 15 bp, Homo sapiens
gggctgggggaggcc

SEQ ID NO: 1098709 - DNA, 15 bp, Homo sapiens
tgggctgggggaggc

SEQ ID NO: 1098710 - DNA, 15 bp, Homo sapiens
ctgggctgggggagg

SEQ ID NO: 1098711 - DNA, 15 bp, Homo sapiens
cctgggctgggggag

SEQ ID NO: 1098712 - DNA, 15 bp, Homo sapiens
gcctgggctggggga

SEQ ID NO: 1098713 - DNA, 15 bp, Homo sapiens
cgcctgggctggggg

SEQ ID NO: 1098714 - DNA, 15 bp, Homo sapiens
ccgcctgggctgggg

SEQ ID NO: 1098715 - DNA, 15 bp, Homo sapiens
cccgcctgggctggg

SEQ ID NO: 1098716 - DNA, 15 bp, Homo sapiens
ccccgcctgggctgg

SEQ ID NO: 1098717 - DNA, 15 bp, Homo sapiens
cccccgcctgggctg

SEQ ID NO: 1098718 - DNA, 15 bp, Homo sapiens
gcccccgcctgggct

SEQ ID NO: 1098719 - DNA, 15 bp, Homo sapiens
agcccccgcctgggc

SEQ ID NO: 1098720 - DNA, 15 bp, Homo sapiens
cagcccccgcctggg

SEQ ID NO: 1098721 - DNA, 15 bp, Homo sapiens
gcagcccccgcctgg

SEQ ID NO: 1098722 - DNA, 15 bp, Homo sapiens
ggcagcccccgcctg

SEQ ID NO: 1098723 - DNA, 15 bp, Homo sapiens
tggcagcccccgcct

SEQ ID NO: 1098724 - DNA, 15 bp, Homo sapiens
ttggcagcccccgcc

SEQ ID NO: 1098725 - DNA, 15 bp, Homo sapiens
cttggcagcccccgc

SEQ ID NO: 1098726 - DNA, 15 bp, Homo sapiens
acttggcagcccccg

SEQ ID NO: 1098727 - DNA, 15 bp, Homo sapiens
aacttggcagccccc

SEQ ID NO: 1098728 - DNA, 15 bp, Homo sapiens
aaacttggcagcccc

SEQ ID NO: 1098729 - DNA, 15 bp, Homo sapiens
caaacttggcagccc

SEQ ID NO: 1098730 - DNA, 15 bp, Homo sapiens
ccaaacttggcagcc

SEQ ID NO: 1098731 - DNA, 15 bp, Homo sapiens
cccaaacttggcagc

SEQ ID NO: 1098732 - DNA, 15 bp, Homo sapiens
gcccaaacttggcag

SEQ ID NO: 1098733 - DNA, 15 bp, Homo sapiens
ggcccaaacttggca

SEQ ID NO: 1098734 - DNA, 15 bp, Homo sapiens
aggcccaaacttggc

SEQ ID NO: 1098735 - DNA, 15 bp, Homo sapiens
taggcccaaacttgg

SEQ ID NO: 1098736 - DNA, 15 bp, Homo sapiens
ataggcccaaacttg

SEQ ID NO: 1098737 - DNA, 15 bp, Homo sapiens
gataggcccaaactt

SEQ ID NO: 1098738 - DNA, 15 bp, Homo sapiens
ggataggcccaaact

SEQ ID NO: 1098739 - DNA, 15 bp, Homo sapiens
aggataggcccaaac

SEQ ID NO: 1098740 - DNA, 15 bp, Homo sapiens
gaggataggcccaaa

SEQ ID NO: 1098741 - DNA, 15 bp, Homo sapiens
agaggataggcccaa

SEQ ID NO: 1098742 - DNA, 15 bp, Homo sapiens
cagaggataggccca

SEQ ID NO: 1098743 - DNA, 15 bp, Homo sapiens
acagaggataggccc

SEQ ID NO: 1098744 - DNA, 15 bp, Homo sapiens
aacagaggataggcc

SEQ ID NO: 1098745 - DNA, 15 bp, Homo sapiens
gaacagaggataggc

SEQ ID NO: 1098746 - DNA, 15 bp, Homo sapiens
ggaacagaggatagg

SEQ ID NO: 1098747 - DNA, 15 bp, Homo sapiens
aggaacagaggatag

SEQ ID NO: 1098748 - DNA, 15 bp, Homo sapiens
gaggaacagaggata

SEQ ID NO: 1098749 - DNA, 15 bp, Homo sapiens
agaggaacagaggat

SEQ ID NO: 1098750 - DNA, 15 bp, Homo sapiens
gagaggaacagagga

SEQ ID NO: 1098751 - DNA, 15 bp, Homo sapiens
ggagaggaacagagg

SEQ ID NO: 1098752 - DNA, 15 bp, Homo sapiens
aggagaggaacagag

SEQ ID NO: 1098753 - DNA, 15 bp, Homo sapiens
aaggagaggaacaga

SEQ ID NO: 1098754 - DNA, 15 bp, Homo sapiens
taaggagaggaacag

SEQ ID NO: 1098755 - DNA, 15 bp, Homo sapiens
ataaggagaggaaca

SEQ ID NO: 1098756 - DNA, 15 bp, Homo sapiens
aataaggagaggaac

SEQ ID NO: 1098757 - DNA, 15 bp, Homo sapiens
aaataaggagaggaa

SEQ ID NO: 1098758 - DNA, 15 bp, Homo sapiens
caaataaggagagga

SEQ ID NO: 1098759 - DNA, 15 bp, Homo sapiens
ccaaataaggagagg

SEQ ID NO: 1098760 - DNA, 15 bp, Homo sapiens
tccaaataaggagag

SEQ ID NO: 1098761 - DNA, 15 bp, Homo sapiens
gtccaaataaggaga

SEQ ID NO: 1098762 - DNA, 15 bp, Homo sapiens
ggtccaaataaggag

SEQ ID NO: 1098763 - DNA, 15 bp, Homo sapiens
aggtccaaataagga

SEQ ID NO: 1098764 - DNA, 15 bp, Homo sapiens
aaggtccaaataagg

SEQ ID NO: 1098765 - DNA, 15 bp, Homo sapiens
gaaggtccaaataag

SEQ ID NO: 1098766 - DNA, 15 bp, Homo sapiens
tgaaggtccaaataa

SEQ ID NO: 1098767 - DNA, 15 bp, Homo sapiens
ctgaaggtccaaata

SEQ ID NO: 1098768 - DNA, 15 bp, Homo sapiens
acctgaaggtccaaa

SEQ ID NO: 1098769 - DNA, 15 bp, Homo sapiens
cacctgaaggtccaa

SEQ ID NO: 1098770 - DNA, 15 bp, Homo sapiens
tcacctgaaggtcca

SEQ ID NO: 1098771 - DNA, 15 bp, Homo sapiens
atcacctgaaggtcc

SEQ ID NO: 1098772 - DNA, 15 bp, Homo sapiens
tatcacctgaaggtc

SEQ ID NO: 1098773 - DNA, 15 bp, Homo sapiens
ttatcacctgaaggt

SEQ ID NO: 1098774 - DNA, 15 bp, Homo sapiens
cttatcacctgaagg

SEQ ID NO: 1098775 - DNA, 15 bp, Homo sapiens
ccttatcacctgaag

SEQ ID NO: 1098776 - DNA, 15 bp, Homo sapiens
gccttatcacctgaa

SEQ ID NO: 1098777 - DNA, 15 bp, Homo sapiens
agccttatcacctga

SEQ ID NO: 1098778 - DNA, 15 bp, Homo sapiens
cagccttatcacctg

SEQ ID NO: 1098779 - DNA, 15 bp, Homo sapiens
tcagccttatcacct

SEQ ID NO: 1098780 - DNA, 15 bp, Homo sapiens
ctcagccttatcacc

SEQ ID NO: 1098781 - DNA, 15 bp, Homo sapiens
tctcagccttatcac

SEQ ID NO: 1098782 - DNA, 15 bp, Homo sapiens
gtctcagccttatca

SEQ ID NO: 1098783 - DNA, 15 bp, Homo sapiens
tgtctcagccttatc

SEQ ID NO: 1098784 - DNA, 15 bp, Homo sapiens
atgtctcagccttat

SEQ ID NO: 1098785 - DNA, 15 bp, Homo sapiens
tatgtctcagcctta

SEQ ID NO: 1098786 - DNA, 15 bp, Homo sapiens
ttatgtctcagcctt

SEQ ID NO: 1098787 - DNA, 15 bp, Homo sapiens
tttatgtctcagcct

SEQ ID NO: 1098788 - DNA, 15 bp, Homo sapiens
ctttatgtctcagcc

SEQ ID NO: 1098789 - DNA, 15 bp, Homo sapiens
cctttatgtctcagc

SEQ ID NO: 1098790 - DNA, 15 bp, Homo sapiens
tcctttatgtctcag

SEQ ID NO: 1098791 - DNA, 15 bp, Homo sapiens
ctcctttatgtctca

SEQ ID NO: 1098792 - DNA, 15 bp, Homo sapiens
cctcctttatgtctc

SEQ ID NO: 1098793 - DNA, 15 bp, Homo sapiens
gcctcctttatgtct

SEQ ID NO: 1098794 - DNA, 15 bp, Homo sapiens
agcctcctttatgtc

SEQ ID NO: 1098795 - DNA, 15 bp, Homo sapiens
cagcctcctttatgt

SEQ ID NO: 1098796 - DNA, 15 bp, Homo sapiens
ccagcctcctttatg

SEQ ID NO: 1098797 - DNA, 15 bp, Homo sapiens
cccagcctcctttat

SEQ ID NO: 1098798 - DNA, 15 bp, Homo sapiens
gcccagcctccttta

SEQ ID NO: 1098799 - DNA, 15 bp, Homo sapiens
ggcccagcctccttt

SEQ ID NO: 1098800 - DNA, 15 bp, Homo sapiens
gggcccagcctcctt

SEQ ID NO: 1098801 - DNA, 15 bp, Homo sapiens
agggcccagcctcct

SEQ ID NO: 1098802 - DNA, 15 bp, Homo sapiens
cagggcccagcctcc

SEQ ID NO: 1098803 - DNA, 15 bp, Homo sapiens
gcagggcccagcctc

SEQ ID NO: 1098804 - DNA, 15 bp, Homo sapiens
ggcagggcccagcct

SEQ ID NO: 1098805 - DNA, 15 bp, Homo sapiens
tggcagggcccagcc

SEQ ID NO: 1098806 - DNA, 15 bp, Homo sapiens
gtggcagggcccagc

SEQ ID NO: 1098807 - DNA, 15 bp, Homo sapiens
ggtggcagggcccag

SEQ ID NO: 1098808 - DNA, 15 bp, Homo sapiens
tggtggcagggccca

SEQ ID NO: 1098809 - DNA, 15 bp, Homo sapiens
gtggtggcagggccc

SEQ ID NO: 1098810 - DNA, 15 bp, Homo sapiens
cgtggtggcagggcc

SEQ ID NO: 1098811 - DNA, 15 bp, Homo sapiens
tcgtggtggcagggc

SEQ ID NO: 1098812 - DNA, 15 bp, Homo sapiens
gtcgtggtggcaggg

SEQ ID NO: 1098813 - DNA, 15 bp, Homo sapiens
tgtcgtggtggcagg

SEQ ID NO: 1098814 - DNA, 15 bp, Homo sapiens
ctgtcgtggtggcag

SEQ ID NO: 1098815 - DNA, 15 bp, Homo sapiens
gctgtcgtggtggca

SEQ ID NO: 1098816 - DNA, 15 bp, Homo sapiens
tgctgtcgtggtggc

SEQ ID NO: 1098817 - DNA, 15 bp, Homo sapiens
ctgctgtcgtggtgg

SEQ ID NO: 1098818 - DNA, 15 bp, Homo sapiens
gctgctgtcgtggtg

SEQ ID NO: 1098819 - DNA, 15 bp, Homo sapiens
ggctgctgtcgtggt

SEQ ID NO: 1098820 - DNA, 15 bp, Homo sapiens
tggctgctgtcgtgg

SEQ ID NO: 1098821 - DNA, 15 bp, Homo sapiens
gtggctgctgtcgtg

SEQ ID NO: 1098822 - DNA, 15 bp, Homo sapiens
tgtggctgctgtcgt

SEQ ID NO: 1098823 - DNA, 15 bp, Homo sapiens
gtgtggctgctgtcg

SEQ ID NO: 1098824 - DNA, 15 bp, Homo sapiens
ggtgtggctgctgtc

SEQ ID NO: 1098825 - DNA, 15 bp, Homo sapiens
aggtgtggctgctgt

SEQ ID NO: 1098826 - DNA, 15 bp, Homo sapiens
gaggtgtggctgctg

SEQ ID NO: 1098827 - DNA, 15 bp, Homo sapiens
agaggtgtggctgct

SEQ ID NO: 1098828 - DNA, 15 bp, Homo sapiens
cagaggtgtggctgc

SEQ ID NO: 1098829 - DNA, 15 bp, Homo sapiens
gcagaggtgtggctg

SEQ ID NO: 1098830 - DNA, 15 bp, Homo sapiens
tgcagaggtgtggct

SEQ ID NO: 1098831 - DNA, 15 bp, Homo sapiens
ctgcagaggtgtggc

SEQ ID NO: 1098832 - DNA, 15 bp, Homo sapiens
tctgcagaggtgtgg

SEQ ID NO: 1098833 - DNA, 15 bp, Homo sapiens
ctctgcagaggtgtg

SEQ ID NO: 1098834 - DNA, 15 bp, Homo sapiens
tctctgcagaggtgt

SEQ ID NO: 1098835 - DNA, 15 bp, Homo sapiens
ctctctgcagaggtg

SEQ ID NO: 1098836 - DNA, 15 bp, Homo sapiens
tctctctgcagaggt

SEQ ID NO: 1098837 - DNA, 15 bp, Homo sapiens
ttctctctgcagagg

SEQ ID NO: 1098838 - DNA, 15 bp, Homo sapiens
attctctctgcagag

SEQ ID NO: 1098839 - DNA, 15 bp, Homo sapiens
cattctctctgcaga

SEQ ID NO: 1098840 - DNA, 15 bp, Homo sapiens
ccattctctctgcag

SEQ ID NO: 1098841 - DNA, 15 bp, Homo sapiens
accattctctctgca

SEQ ID NO: 1098842 - DNA, 15 bp, Homo sapiens
caccattctctctgc

SEQ ID NO: 1098843 - DNA, 15 bp, Homo sapiens
tcaccattctctctg

SEQ ID NO: 1098844 - DNA, 15 bp, Homo sapiens
ctcaccattctctct

SEQ ID NO: 1098845 - DNA, 15 bp, Homo sapiens
actcaccattctctc

SEQ ID NO: 1098846 - DNA, 15 bp, Homo sapiens
cactcaccattctct

SEQ ID NO: 1098847 - DNA, 15 bp, Homo sapiens
gcactcaccattctc

SEQ ID NO: 1098848 - DNA, 15 bp, Homo sapiens
ggcactcaccattct

SEQ ID NO: 1098849 - DNA, 15 bp, Homo sapiens
aggcactcaccattc

SEQ ID NO: 1098850 - DNA, 15 bp, Homo sapiens
caggcactcaccatt

SEQ ID NO: 1098851 - DNA, 15 bp, Homo sapiens
gcaggcactcaccat

SEQ ID NO: 1098852 - DNA, 15 bp, Homo sapiens
agcaggcactcacca

SEQ ID NO: 1098853 - DNA, 15 bp, Homo sapiens
cagcaggcactcacc

SEQ ID NO: 1098854 - DNA, 15 bp, Homo sapiens
ccagcaggcactcac

SEQ ID NO: 1098855 - DNA, 15 bp, Homo sapiens
cccagcaggcactca

SEQ ID NO: 1098856 - DNA, 15 bp, Homo sapiens
ccccagcaggcactc

SEQ ID NO: 1098857 - DNA, 15 bp, Homo sapiens
tccccagcaggcact

SEQ ID NO: 1098858 - DNA, 15 bp, Homo sapiens
ttccccagcaggcac

SEQ ID NO: 1098859 - DNA, 15 bp, Homo sapiens
cttccccagcaggca

SEQ ID NO: 1098860 - DNA, 15 bp, Homo sapiens
tcttccccagcaggc

SEQ ID NO: 1098861 - DNA, 15 bp, Homo sapiens
ttcttccccagcagg

SEQ ID NO: 1098862 - DNA, 15 bp, Homo sapiens
tttcttccccagcag

SEQ ID NO: 1098863 - DNA, 15 bp, Homo sapiens
ctttcttccccagca

SEQ ID NO: 1098864 - DNA, 15 bp, Homo sapiens
cctttcttccccagc

SEQ ID NO: 1098865 - DNA, 15 bp, Homo sapiens
gcctttcttccccag

SEQ ID NO: 1098866 - DNA, 15 bp, Homo sapiens
agcctttcttcccca

SEQ ID NO: 1098867 - DNA, 15 bp, Homo sapiens
tagcctttcttcccc

SEQ ID NO: 1098868 - DNA, 15 bp, Homo sapiens
ctagcctttcttccc

SEQ ID NO: 1098869 - DNA, 15 bp, Homo sapiens
gctagcctttcttcc

SEQ ID NO: 1098870 - DNA, 15 bp, Homo sapiens
cgctagcctttcttc

SEQ ID NO: 1098871 - DNA, 15 bp, Homo sapiens
ccgctagcctttctt

SEQ ID NO: 1098872 - DNA, 15 bp, Homo sapiens
accgctagcctttct

SEQ ID NO: 1098873 - DNA, 15 bp, Homo sapiens
gaccgctagcctttc

SEQ ID NO: 1098874 - DNA, 15 bp, Homo sapiens
agaccgctagccttt

SEQ ID NO: 1098875 - DNA, 15 bp, Homo sapiens
gagaccgctagcctt

SEQ ID NO: 1098876 - DNA, 15 bp, Homo sapiens
ggagaccgctagcct

SEQ ID NO: 1098877 - DNA, 15 bp, Homo sapiens
gggagaccgctagcc

SEQ ID NO: 1098878 - DNA, 15 bp, Homo sapiens
tgggagaccgctagc

SEQ ID NO: 1098879 - DNA, 15 bp, Homo sapiens
ctgggagaccgctag

SEQ ID NO: 1098880 - DNA, 15 bp, Homo sapiens
cctgggagaccgcta

SEQ ID NO: 1098881 - DNA, 15 bp, Homo sapiens
acctgggagaccgct

SEQ ID NO: 1098882 - DNA, 15 bp, Homo sapiens
cacctgggagaccgc

SEQ ID NO: 1098883 - DNA, 15 bp, Homo sapiens
gcacctgggagaccg

SEQ ID NO: 1098884 - DNA, 15 bp, Homo sapiens
agcacctgggagacc

SEQ ID NO: 1098885 - DNA, 15 bp, Homo sapiens
cagcacctgggagac

SEQ ID NO: 1098886 - DNA, 15 bp, Homo sapiens
ccagcacctgggaga

SEQ ID NO: 1098887 - DNA, 15 bp, Homo sapiens
gccagcacctgggag

SEQ ID NO: 1098888 - DNA, 15 bp, Homo sapiens
ggccagcacctggga

SEQ ID NO: 1098889 - DNA, 15 bp, Homo sapiens
aggccagcacctggg

SEQ ID NO: 1098890 - DNA, 15 bp, Homo sapiens
aaggccagcacctgg

SEQ ID NO: 1098891 - DNA, 15 bp, Homo sapiens
aaaggccagcacctg

SEQ ID NO: 1098892 - DNA, 15 bp, Homo sapiens
caaaggccagcacct

SEQ ID NO: 1098893 - DNA, 15 bp, Homo sapiens
ccaaaggccagcacc

SEQ ID NO: 1098894 - DNA, 15 bp, Homo sapiens
cccaaaggccagcac

SEQ ID NO: 1098895 - DNA, 15 bp, Homo sapiens
gcccaaaggccagca

SEQ ID NO: 1098896 - DNA, 15 bp, Homo sapiens
agcccaaaggccagc

SEQ ID NO: 1098897 - DNA, 15 bp, Homo sapiens
cagcccaaaggccag

SEQ ID NO: 1098898 - DNA, 15 bp, Homo sapiens
ccagcccaaaggcca

SEQ ID NO: 1098899 - DNA, 15 bp, Homo sapiens
cccagcccaaaggcc

SEQ ID NO: 1098900 - DNA, 15 bp, Homo sapiens
ccccagcccaaaggc

SEQ ID NO: 1098901 - DNA, 15 bp, Homo sapiens
cccccagcccaaagg

SEQ ID NO: 1098902 - DNA, 15 bp, Homo sapiens
tcccccagcccaaag

SEQ ID NO: 1098903 - DNA, 15 bp, Homo sapiens
ctcccccagcccaaa

SEQ ID NO: 1098904 - DNA, 15 bp, Homo sapiens
gctcccccagcccaa

SEQ ID NO: 1098905 - DNA, 15 bp, Homo sapiens
tgctcccccagccca

SEQ ID NO: 1098906 - DNA, 15 bp, Homo sapiens
ctgctcccccagccc

SEQ ID NO: 1098907 - DNA, 15 bp, Homo sapiens
tctgctcccccagcc

SEQ ID NO: 1098908 - DNA, 15 bp, Homo sapiens
ctctgctcccccagc

SEQ ID NO: 1098909 - DNA, 15 bp, Homo sapiens
actctgctcccccag

SEQ ID NO: 1098910 - DNA, 15 bp, Homo sapiens
aactctgctccccca

SEQ ID NO: 1098911 - DNA, 15 bp, Homo sapiens
aaactctgctccccc

SEQ ID NO: 1098912 - DNA, 15 bp, Homo sapiens
aaaactctgctcccc

SEQ ID NO: 1098913 - DNA, 15 bp, Homo sapiens
gaaaactctgctccc

SEQ ID NO: 1098914 - DNA, 15 bp, Homo sapiens
agaaaactctgctcc

SEQ ID NO: 1098915 - DNA, 15 bp, Homo sapiens
cagaaaactctgctc

SEQ ID NO: 1098916 - DNA, 15 bp, Homo sapiens
acagaaaactctgct

SEQ ID NO: 1098917 - DNA, 15 bp, Homo sapiens
cacagaaaactctgc

SEQ ID NO: 1098918 - DNA, 15 bp, Homo sapiens
gcacagaaaactctg

SEQ ID NO: 1098919 - DNA, 15 bp, Homo sapiens
agcacagaaaactct

SEQ ID NO: 1098920 - DNA, 15 bp, Homo sapiens
aagcacagaaaactc

SEQ ID NO: 1098921 - DNA, 15 bp, Homo sapiens
caagcacagaaaact

SEQ ID NO: 1098922 - DNA, 15 bp, Homo sapiens
acaagcacagaaaac

SEQ ID NO: 1098923 - DNA, 15 bp, Homo sapiens
cacaagcacagaaaa

SEQ ID NO: 1098924 - DNA, 15 bp, Homo sapiens
acacaagcacagaaa

SEQ ID NO: 1098925 - DNA, 15 bp, Homo sapiens
aacacaagcacagaa

SEQ ID NO: 1098926 - DNA, 15 bp, Homo sapiens
caacacaagcacaga

SEQ ID NO: 1098927 - DNA, 15 bp, Homo sapiens
ccaacacaagcacag

SEQ ID NO: 1098928 - DNA, 15 bp, Homo sapiens
cccaacacaagcaca

SEQ ID NO: 1098929 - DNA, 15 bp, Homo sapiens
acccaacacaagcac

SEQ ID NO: 1098930 - DNA, 15 bp, Homo sapiens
aacccaacacaagca

SEQ ID NO: 1098931 - DNA, 15 bp, Homo sapiens
caacccaacacaagc

SEQ ID NO: 1098932 - DNA, 15 bp, Homo sapiens
tcaacccaacacaag

SEQ ID NO: 1098933 - DNA, 15 bp, Homo sapiens
ctcaacccaacacaa

SEQ ID NO: 1098934 - DNA, 15 bp, Homo sapiens
cctcaacccaacaca

SEQ ID NO: 1098935 - DNA, 15 bp, Homo sapiens
ccctcaacccaacac

SEQ ID NO: 1098936 - DNA, 15 bp, Homo sapiens
accctcaacccaaca

SEQ ID NO: 1098937 - DNA, 15 bp, Homo sapiens
caccctcaacccaac

SEQ ID NO: 1098938 - DNA, 15 bp, Homo sapiens
ccaccctcaacccaa

SEQ ID NO: 1098939 - DNA, 15 bp, Homo sapiens
accaccctcaaccca

SEQ ID NO: 1098940 - DNA, 15 bp, Homo sapiens
gaccaccctcaaccc

SEQ ID NO: 1098941 - DNA, 15 bp, Homo sapiens
ggaccaccctcaacc

SEQ ID NO: 1098942 - DNA, 15 bp, Homo sapiens
gggaccaccctcaac

SEQ ID NO: 1098943 - DNA, 15 bp, Homo sapiens
ggggaccaccctcaa

SEQ ID NO: 1098944 - DNA, 15 bp, Homo sapiens
tggggaccaccctca

SEQ ID NO: 1098945 - DNA, 15 bp, Homo sapiens
ctggggaccaccctc

SEQ ID NO: 1098946 - DNA, 15 bp, Homo sapiens
cctggggaccaccct

SEQ ID NO: 1098947 - DNA, 15 bp, Homo sapiens
ccctggggaccaccc

SEQ ID NO: 1098948 - DNA, 15 bp, Homo sapiens
tccctggggaccacc

SEQ ID NO: 1098949 - DNA, 15 bp, Homo sapiens
ctccctggggaccac

SEQ ID NO: 1098950 - DNA, 15 bp, Homo sapiens
tctccctggggacca

SEQ ID NO: 1098951 - DNA, 15 bp, Homo sapiens
ctctccctggggacc

SEQ ID NO: 1098952 - DNA, 15 bp, Homo sapiens
cctctccctggggac

SEQ ID NO: 1098953 - DNA, 15 bp, Homo sapiens
tcctctccctgggga

SEQ ID NO: 1098954 - DNA, 15 bp, Homo sapiens
ttcctctccctgggg

SEQ ID NO: 1098955 - DNA, 15 bp, Homo sapiens
cttcctctccctggg

SEQ ID NO: 1098956 - DNA, 15 bp, Homo sapiens
tcttcctctccctgg

SEQ ID NO: 1098957 - DNA, 15 bp, Homo sapiens
ctcttcctctccctg

SEQ ID NO: 1098958 - DNA, 15 bp, Homo sapiens
cctcttcctctccct

SEQ ID NO: 1098959 - DNA, 15 bp, Homo sapiens
tcctcttcctctccc

SEQ ID NO: 1098960 - DNA, 15 bp, Homo sapiens
atcctcttcctctcc

SEQ ID NO: 1098961 - DNA, 15 bp, Homo sapiens
gatcctcttcctctc

SEQ ID NO: 1098962 - DNA, 15 bp, Homo sapiens
ggatcctcttcctct

SEQ ID NO: 1098963 - DNA, 15 bp, Homo sapiens
aggatcctcttcctc

SEQ ID NO: 1098964 - DNA, 15 bp, Homo sapiens
caggatcctcttcct

SEQ ID NO: 1098965 - DNA, 15 bp, Homo sapiens
ccaggatcctcttcc

SEQ ID NO: 1098966 - DNA, 15 bp, Homo sapiens
gccaggatcctcttc

SEQ ID NO: 1098967 - DNA, 15 bp, Homo sapiens
ggccaggatcctctt

SEQ ID NO: 1098968 - DNA, 15 bp, Homo sapiens
gggccaggatcctct

SEQ ID NO: 1098969 - DNA, 15 bp, Homo sapiens
agggccaggatcctc

SEQ ID NO: 1098970 - DNA, 15 bp, Homo sapiens
cagggccaggatcct

SEQ ID NO: 1098971 - DNA, 15 bp, Homo sapiens
ccagggccaggatcc

SEQ ID NO: 1098972 - DNA, 15 bp, Homo sapiens
gccagggccaggatc

SEQ ID NO: 1098973 - DNA, 15 bp, Homo sapiens
agccagggccaggat

SEQ ID NO: 1098974 - DNA, 15 bp, Homo sapiens
gagccagggccagga

SEQ ID NO: 1098975 - DNA, 15 bp, Homo sapiens
agagccagggccagg

SEQ ID NO: 1098976 - DNA, 15 bp, Homo sapiens
gagagccagggccag

SEQ ID NO: 1098977 - DNA, 15 bp, Homo sapiens
ggagagccagggcca

SEQ ID NO: 1098978 - DNA, 15 bp, Homo sapiens
aggagagccagggcc

SEQ ID NO: 1098979 - DNA, 15 bp, Homo sapiens
caggagagccagggc

SEQ ID NO: 1098980 - DNA, 15 bp, Homo sapiens
ccaggagagccaggg

SEQ ID NO: 1098981 - DNA, 15 bp, Homo sapiens
cccaggagagccagg

SEQ ID NO: 1098982 - DNA, 15 bp, Homo sapiens
tcccaggagagccag

SEQ ID NO: 1098983 - DNA, 15 bp, Homo sapiens
ttcccaggagagcca

SEQ ID NO: 1098984 - DNA, 15 bp, Homo sapiens
attcccaggagagcc

SEQ ID NO: 1098985 - DNA, 15 bp, Homo sapiens
cattcccaggagagc

SEQ ID NO: 1098986 - DNA, 15 bp, Homo sapiens
gcattcccaggagag

SEQ ID NO: 1098987 - DNA, 15 bp, Homo sapiens
agcattcccaggaga

SEQ ID NO: 1098988 - DNA, 15 bp, Homo sapiens
gagcattcccaggag

SEQ ID NO: 1098989 - DNA, 15 bp, Homo sapiens
agagcattcccagga

SEQ ID NO: 1098990 - DNA, 15 bp, Homo sapiens
cagagcattcccagg

SEQ ID NO: 1098991 - DNA, 15 bp, Homo sapiens
ccagagcattcccag

SEQ ID NO: 1098992 - DNA, 15 bp, Homo sapiens
cccagagcattccca

SEQ ID NO: 1098993 - DNA, 15 bp, Homo sapiens
tcccagagcattccc

SEQ ID NO: 1098994 - DNA, 15 bp, Homo sapiens
gtcccagagcattcc

SEQ ID NO: 1098995 - DNA, 15 bp, Homo sapiens
agtcccagagcattc

SEQ ID NO: 1098996 - DNA, 15 bp, Homo sapiens
cagtcccagagcatt

SEQ ID NO: 1098997 - DNA, 15 bp, Homo sapiens
acagtcccagagcat

SEQ ID NO: 1098998 - DNA, 15 bp, Homo sapiens
cacagtcccagagca

SEQ ID NO: 1098999 - DNA, 15 bp, Homo sapiens
gcacagtcccagagc

SEQ ID NO: 1099000 - DNA, 15 bp, Homo sapiens
tgcacagtcccagag

SEQ ID NO: 1099001 - DNA, 15 bp, Homo sapiens
atgcacagtcccaga

SEQ ID NO: 1099002 - DNA, 15 bp, Homo sapiens
catgcacagtcccag

SEQ ID NO: 1099003 - DNA, 15 bp, Homo sapiens
tcatgcacagtccca

SEQ ID NO: 1099004 - DNA, 15 bp, Homo sapiens
atcatgcacagtccc

SEQ ID NO: 1099005 - DNA, 15 bp, Homo sapiens
catcatgcacagtcc

SEQ ID NO: 1099006 - DNA, 15 bp, Homo sapiens
ccatcatgcacagtc

SEQ ID NO: 1099007 - DNA, 15 bp, Homo sapiens
cccatcatgcacagt

SEQ ID NO: 1099008 - DNA, 15 bp, Homo sapiens
acccatcatgcacag

SEQ ID NO: 1099009 - DNA, 15 bp, Homo sapiens
cacccatcatgcaca

SEQ ID NO: 1099010 - DNA, 15 bp, Homo sapiens
ccacccatcatgcac

SEQ ID NO: 1099011 - DNA, 15 bp, Homo sapiens
cccacccatcatgca

SEQ ID NO: 1099012 - DNA, 15 bp, Homo sapiens
ccccacccatcatgc

SEQ ID NO: 1099013 - DNA, 15 bp, Homo sapiens
accccacccatcatg

SEQ ID NO: 1099014 - DNA, 15 bp, Homo sapiens
caccccacccatcat

SEQ ID NO: 1099015 - DNA, 15 bp, Homo sapiens
ccaccccacccatca

SEQ ID NO: 1099016 - DNA, 15 bp, Homo sapiens
cccaccccacccatc

SEQ ID NO: 1099017 - DNA, 15 bp, Homo sapiens
ccccaccccacccat

SEQ ID NO: 1099018 - DNA, 15 bp, Homo sapiens
tccccaccccaccca

SEQ ID NO: 1099019 - DNA, 15 bp, Homo sapiens
ctccccaccccaccc

SEQ ID NO: 1099020 - DNA, 15 bp, Homo sapiens
tctccccaccccacc

SEQ ID NO: 1099021 - DNA, 15 bp, Homo sapiens
gtctccccaccccac

SEQ ID NO: 1099022 - DNA, 15 bp, Homo sapiens
agtctccccacccca

SEQ ID NO: 1099023 - DNA, 15 bp, Homo sapiens
gagtctccccacccc

SEQ ID NO: 1099024 - DNA, 15 bp, Homo sapiens
agagtctccccaccc

SEQ ID NO: 1099025 - DNA, 15 bp, Homo sapiens
cagagtctccccacc

SEQ ID NO: 1099026 - DNA, 15 bp, Homo sapiens
tcagagtctccccac

SEQ ID NO: 1099027 - DNA, 15 bp, Homo sapiens
ctcagagtctcccca

SEQ ID NO: 1099028 - DNA, 15 bp, Homo sapiens
cctcagagtctcccc

SEQ ID NO: 1099029 - DNA, 15 bp, Homo sapiens
tcctcagagtctccc

SEQ ID NO: 1099030 - DNA, 15 bp, Homo sapiens
ctcctcagagtctcc

SEQ ID NO: 1099031 - DNA, 15 bp, Homo sapiens
actcctcagagtctc

SEQ ID NO: 1099032 - DNA, 15 bp, Homo sapiens
aactcctcagagtct

SEQ ID NO: 1099033 - DNA, 15 bp, Homo sapiens
caactcctcagagtc

SEQ ID NO: 1099034 - DNA, 15 bp, Homo sapiens
ccaactcctcagagt

SEQ ID NO: 1099035 - DNA, 15 bp, Homo sapiens
cccaactcctcagag

SEQ ID NO: 1099036 - DNA, 15 bp, Homo sapiens
ccccaactcctcaga

SEQ ID NO: 1099037 - DNA, 15 bp, Homo sapiens
tccccaactcctcag

SEQ ID NO: 1099038 - DNA, 15 bp, Homo sapiens
ctccccaactcctca

SEQ ID NO: 1099039 - DNA, 15 bp, Homo sapiens
tctccccaactcctc

SEQ ID NO: 1099040 - DNA, 15 bp, Homo sapiens
ctctccccaactcct

SEQ ID NO: 1099041 - DNA, 15 bp, Homo sapiens
cctctccccaactcc

SEQ ID NO: 1099042 - DNA, 15 bp, Homo sapiens
tcctctccccaactc

SEQ ID NO: 1099043 - DNA, 15 bp, Homo sapiens
gtcctctccccaact

SEQ ID NO: 1099044 - DNA, 15 bp, Homo sapiens
ggtcctctccccaac

SEQ ID NO: 1099045 - DNA, 15 bp, Homo sapiens
gggtcctctccccaa

SEQ ID NO: 1099046 - DNA, 15 bp, Homo sapiens
ggggtcctctcccca

SEQ ID NO: 1099047 - DNA, 15 bp, Homo sapiens
aggggtcctctcccc

SEQ ID NO: 1099048 - DNA, 15 bp, Homo sapiens
gaggggtcctctccc

SEQ ID NO: 1099049 - DNA, 15 bp, Homo sapiens
ggaggggtcctctcc

SEQ ID NO: 1099050 - DNA, 15 bp, Homo sapiens
gggaggggtcctctc

SEQ ID NO: 1099051 - DNA, 15 bp, Homo sapiens
agggaggggtcctct

SEQ ID NO: 1099052 - DNA, 15 bp, Homo sapiens
tagggaggggtcctc

SEQ ID NO: 1099053 - DNA, 15 bp, Homo sapiens
gtagggaggggtcct

SEQ ID NO: 1099054 - DNA, 15 bp, Homo sapiens
agtagggaggggtcc

SEQ ID NO: 1099055 - DNA, 15 bp, Homo sapiens
gagtagggaggggtc

SEQ ID NO: 1099056 - DNA, 15 bp, Homo sapiens
tgagtagggaggggt

SEQ ID NO: 1099057 - DNA, 15 bp, Homo sapiens
gtgagtagggagggg

SEQ ID NO: 1099058 - DNA, 15 bp, Homo sapiens
tgtgagtagggaggg

SEQ ID NO: 1099059 - DNA, 15 bp, Homo sapiens
ctgtgagtagggagg

SEQ ID NO: 1099060 - DNA, 15 bp, Homo sapiens
actgtgagtagggag

SEQ ID NO: 1099061 - DNA, 15 bp, Homo sapiens
cactgtgagtaggga

SEQ ID NO: 1099062 - DNA, 15 bp, Homo sapiens
acactgtgagtaggg

SEQ ID NO: 1099063 - DNA, 15 bp, Homo sapiens
aacactgtgagtagg

SEQ ID NO: 1099064 - DNA, 15 bp, Homo sapiens
caacactgtgagtag

SEQ ID NO: 1099065 - DNA, 15 bp, Homo sapiens
gcaacactgtgagta

SEQ ID NO: 1099066 - DNA, 15 bp, Homo sapiens
tgcaacactgtgagt

SEQ ID NO: 1099067 - DNA, 15 bp, Homo sapiens
ctgcaacactgtgag

SEQ ID NO: 1099068 - DNA, 15 bp, Homo sapiens
cctgcaacactgtga

SEQ ID NO: 1099069 - DNA, 15 bp, Homo sapiens
gcctgcaacactgtg

SEQ ID NO: 1099070 - DNA, 15 bp, Homo sapiens
ggcctgcaacactgt

SEQ ID NO: 1099071 - DNA, 15 bp, Homo sapiens
tggcctgcaacactg

SEQ ID NO: 1099072 - DNA, 15 bp, Homo sapiens
ctggcctgcaacact

SEQ ID NO: 1099073 - DNA, 15 bp, Homo sapiens
gctggcctgcaacac

SEQ ID NO: 1099074 - DNA, 15 bp, Homo sapiens
tgctggcctgcaaca

SEQ ID NO: 1099075 - DNA, 15 bp, Homo sapiens
ctgctggcctgcaac

SEQ ID NO: 1099076 - DNA, 15 bp, Homo sapiens
cctgctggcctgcaa

SEQ ID NO: 1099077 - DNA, 15 bp, Homo sapiens
tcctgctggcctgca

SEQ ID NO: 1099078 - DNA, 15 bp, Homo sapiens
ttcctgctggcctgc

SEQ ID NO: 1099079 - DNA, 15 bp, Homo sapiens
cttcctgctggcctg

SEQ ID NO: 1099080 - DNA, 15 bp, Homo sapiens
ccttcctgctggcct

SEQ ID NO: 1099081 - DNA, 15 bp, Homo sapiens
gccttcctgctggcc

SEQ ID NO: 1099082 - DNA, 15 bp, Homo sapiens
cgccttcctgctggc

SEQ ID NO: 1099083 - DNA, 15 bp, Homo sapiens
ccgccttcctgctgg

SEQ ID NO: 1099084 - DNA, 15 bp, Homo sapiens
cccgccttcctgctg

SEQ ID NO: 1099085 - DNA, 15 bp, Homo sapiens
ccccgccttcctgct

SEQ ID NO: 1099086 - DNA, 15 bp, Homo sapiens
tccccgccttcctgc

SEQ ID NO: 1099087 - DNA, 15 bp, Homo sapiens
gtccccgccttcctg

SEQ ID NO: 1099088 - DNA, 15 bp, Homo sapiens
ggtccccgccttcct

SEQ ID NO: 1099089 - DNA, 15 bp, Homo sapiens
gggtccccgccttcc

SEQ ID NO: 1099090 - DNA, 15 bp, Homo sapiens
cgggtccccgccttc

SEQ ID NO: 1099091 - DNA, 15 bp, Homo sapiens
ccgggtccccgcctt

SEQ ID NO: 1099092 - DNA, 15 bp, Homo sapiens
cccgggtccccgcct

SEQ ID NO: 1099093 - DNA, 15 bp, Homo sapiens
ccccgggtccccgcc

SEQ ID NO: 1099094 - DNA, 15 bp, Homo sapiens
gccccgggtccccgc

SEQ ID NO: 1099095 - DNA, 15 bp, Homo sapiens
tgccccgggtccccg

SEQ ID NO: 1099096 - DNA, 15 bp, Homo sapiens
ttgccccgggtcccc

SEQ ID NO: 1099097 - DNA, 15 bp, Homo sapiens
cttgccccgggtccc

SEQ ID NO: 1099098 - DNA, 15 bp, Homo sapiens
ccttgccccgggtcc

SEQ ID NO: 1099099 - DNA, 15 bp, Homo sapiens
accttgccccgggtc

SEQ ID NO: 1099100 - DNA, 15 bp, Homo sapiens
caccttgccccgggt

SEQ ID NO: 1099101 - DNA, 15 bp, Homo sapiens
ccaccttgccccggg

SEQ ID NO: 1099102 - DNA, 15 bp, Homo sapiens
gccaccttgccccgg

SEQ ID NO: 1099103 - DNA, 15 bp, Homo sapiens
tgccaccttgccccg

SEQ ID NO: 1099104 - DNA, 15 bp, Homo sapiens
ctgccaccttgcccc

SEQ ID NO: 1099105 - DNA, 15 bp, Homo sapiens
gctgccaccttgccc

SEQ ID NO: 1099106 - DNA, 15 bp, Homo sapiens
ggctgccaccttgcc

SEQ ID NO: 1099107 - DNA, 15 bp, Homo sapiens
tggctgccaccttgc

SEQ ID NO: 1099108 - DNA, 15 bp, Homo sapiens
gtggctgccaccttg

SEQ ID NO: 1099109 - DNA, 15 bp, Homo sapiens
ggtggctgccacctt

SEQ ID NO: 1099110 - DNA, 15 bp, Homo sapiens
tggtggctgccacct

SEQ ID NO: 1099111 - DNA, 15 bp, Homo sapiens
ttggtggctgccacc

SEQ ID NO: 1099112 - DNA, 15 bp, Homo sapiens
cttggtggctgccac

SEQ ID NO: 1099113 - DNA, 15 bp, Homo sapiens
gcttggtggctgcca

SEQ ID NO: 1099114 - DNA, 15 bp, Homo sapiens
tgcttggtggctgcc

SEQ ID NO: 1099115 - DNA, 15 bp, Homo sapiens
ctgcttggtggctgc

SEQ ID NO: 1099116 - DNA, 15 bp, Homo sapiens
cctgcttggtggctg

SEQ ID NO: 1099117 - DNA, 15 bp, Homo sapiens
gcctgcttggtggct

SEQ ID NO: 1099118 - DNA, 15 bp, Homo sapiens
ggcctgcttggtggc

SEQ ID NO: 1099119 - DNA, 15 bp, Homo sapiens
gggcctgcttggtgg

SEQ ID NO: 1099120 - DNA, 15 bp, Homo sapiens
tgggcctgcttggtg

SEQ ID NO: 1099121 - DNA, 15 bp, Homo sapiens
ttgggcctgcttggt

SEQ ID NO: 1099122 - DNA, 15 bp, Homo sapiens
gttgggcctgcttgg

SEQ ID NO: 1099123 - DNA, 15 bp, Homo sapiens
cgttgggcctgcttg

SEQ ID NO: 1099124 - DNA, 15 bp, Homo sapiens
acgttgggcctgctt

SEQ ID NO: 1099125 - DNA, 15 bp, Homo sapiens
cacgttgggcctgct

SEQ ID NO: 1099126 - DNA, 15 bp, Homo sapiens
ccacgttgggcctgc

SEQ ID NO: 1099127 - DNA, 15 bp, Homo sapiens
accacgttgggcctg

SEQ ID NO: 1099128 - DNA, 15 bp, Homo sapiens
aaccacgttgggcct

SEQ ID NO: 1099129 - DNA, 15 bp, Homo sapiens
gaaccacgttgggcc

SEQ ID NO: 1099130 - DNA, 15 bp, Homo sapiens
agaaccacgttgggc

SEQ ID NO: 1099131 - DNA, 15 bp, Homo sapiens
aagaaccacgttggg

SEQ ID NO: 1099132 - DNA, 15 bp, Homo sapiens
gaagaaccacgttgg

SEQ ID NO: 1099133 - DNA, 15 bp, Homo sapiens
ggaagaaccacgttg

SEQ ID NO: 1099134 - DNA, 15 bp, Homo sapiens
tggaagaaccacgtt

SEQ ID NO: 1099135 - DNA, 15 bp, Homo sapiens
ttggaagaaccacgt

SEQ ID NO: 1099136 - DNA, 15 bp, Homo sapiens
gttggaagaaccacg

SEQ ID NO: 1099137 - DNA, 15 bp, Homo sapiens
cgttggaagaaccac

SEQ ID NO: 1099138 - DNA, 15 bp, Homo sapiens
acgttggaagaacca

SEQ ID NO: 1099139 - DNA, 15 bp, Homo sapiens
gacgttggaagaacc

SEQ ID NO: 1099140 - DNA, 15 bp, Homo sapiens
agacgttggaagaac

SEQ ID NO: 1099141 - DNA, 15 bp, Homo sapiens
aagacgttggaagaa

SEQ ID NO: 1099142 - DNA, 15 bp, Homo sapiens
aaagacgttggaaga

SEQ ID NO: 1099143 - DNA, 15 bp, Homo sapiens
aaaagacgttggaag

SEQ ID NO: 1099144 - DNA, 15 bp, Homo sapiens
gaaaagacgttggaa

SEQ ID NO: 1099145 - DNA, 15 bp, Homo sapiens
ggaaaagacgttgga

SEQ ID NO: 1099146 - DNA, 15 bp, Homo sapiens
tggaaaagacgttgg

SEQ ID NO: 1099147 - DNA, 15 bp, Homo sapiens
atggaaaagacgttg

SEQ ID NO: 1099148 - DNA, 15 bp, Homo sapiens
catggaaaagacgtt

SEQ ID NO: 1099149 - DNA, 15 bp, Homo sapiens
acatggaaaagacgt

SEQ ID NO: 1099150 - DNA, 15 bp, Homo sapiens
aacatggaaaagacg

SEQ ID NO: 1099151 - DNA, 15 bp, Homo sapiens
aaacatggaaaagac

SEQ ID NO: 1099152 - DNA, 15 bp, Homo sapiens
caaacatggaaaaga

SEQ ID NO: 1099153 - DNA, 15 bp, Homo sapiens
tcaaacatggaaaag

SEQ ID NO: 1099154 - DNA, 15 bp, Homo sapiens
ttcaaacatggaaaa

SEQ ID NO: 1099155 - DNA, 15 bp, Homo sapiens
gttcaaacatggaaa

SEQ ID NO: 1099156 - DNA, 15 bp, Homo sapiens
tgttcaaacatggaa

SEQ ID NO: 1099157 - DNA, 15 bp, Homo sapiens
ttgttcaaacatgga

SEQ ID NO: 1099158 - DNA, 15 bp, Homo sapiens
cttgttcaaacatgg

SEQ ID NO: 1099159 - DNA, 15 bp, Homo sapiens
gcttgttcaaacatg

SEQ ID NO: 1099160 - DNA, 15 bp, Homo sapiens
ggcttgttcaaacat

SEQ ID NO: 1099161 - DNA, 15 bp, Homo sapiens
gggcttgttcaaaca

SEQ ID NO: 1099162 - DNA, 15 bp, Homo sapiens
tgggcttgttcaaac

SEQ ID NO: 1099163 - DNA, 15 bp, Homo sapiens
ctgggcttgttcaaa

SEQ ID NO: 1099164 - DNA, 15 bp, Homo sapiens
tctgggcttgttcaa

SEQ ID NO: 1099165 - DNA, 15 bp, Homo sapiens
atctgggcttgttca

SEQ ID NO: 1099166 - DNA, 15 bp, Homo sapiens
tatctgggcttgttc

SEQ ID NO: 1099167 - DNA, 15 bp, Homo sapiens
gtatctgggcttgtt

SEQ ID NO: 1099168 - DNA, 15 bp, Homo sapiens
tgtatctgggcttgt

SEQ ID NO: 1099169 - DNA, 15 bp, Homo sapiens
ctgtatctgggcttg

SEQ ID NO: 1099170 - DNA, 15 bp, Homo sapiens
cctgtatctgggctt

SEQ ID NO: 1099171 - DNA, 15 bp, Homo sapiens
tcctgtatctgggct

SEQ ID NO: 1099172 - DNA, 15 bp, Homo sapiens
ctcctgtatctgggc

SEQ ID NO: 1099173 - DNA, 15 bp, Homo sapiens
actcctgtatctggg

SEQ ID NO: 1099174 - DNA, 15 bp, Homo sapiens
aactcctgtatctgg

SEQ ID NO: 1099175 - DNA, 15 bp, Homo sapiens
gaactcctgtatctg

SEQ ID NO: 1099176 - DNA, 15 bp, Homo sapiens
tgaactcctgtatct

SEQ ID NO: 1099177 - DNA, 15 bp, Homo sapiens
ttgaactcctgtatc

SEQ ID NO: 1099178 - DNA, 15 bp, Homo sapiens
tttgaactcctgtat

SEQ ID NO: 1099179 - DNA, 15 bp, Homo sapiens
ctttgaactcctgta

SEQ ID NO: 1099180 - DNA, 15 bp, Homo sapiens
tctttgaactcctgt

SEQ ID NO: 1099181 - DNA, 15 bp, Homo sapiens
ttctttgaactcctg

SEQ ID NO: 1099182 - DNA, 15 bp, Homo sapiens
cttctttgaactcct

SEQ ID NO: 1099183 - DNA, 15 bp, Homo sapiens
acttctttgaactcc

SEQ ID NO: 1099184 - DNA, 15 bp, Homo sapiens
cacttctttgaactc

SEQ ID NO: 1099185 - DNA, 15 bp, Homo sapiens
tcacttctttgaact

SEQ ID NO: 1099186 - DNA, 15 bp, Homo sapiens
ctcacttctttgaac

SEQ ID NO: 1099187 - DNA, 15 bp, Homo sapiens
actcacttctttgaa

SEQ ID NO: 1099188 - DNA, 15 bp, Homo sapiens
cactcacttctttga

SEQ ID NO: 1099189 - DNA, 15 bp, Homo sapiens
gcactcacttctttg

SEQ ID NO: 1099190 - DNA, 15 bp, Homo sapiens
ggcactcacttcttt

SEQ ID NO: 1099191 - DNA, 15 bp, Homo sapiens
gggcactcacttctt

SEQ ID NO: 1099192 - DNA, 15 bp, Homo sapiens
tgggcactcacttct

SEQ ID NO: 1099193 - DNA, 15 bp, Homo sapiens
gtgggcactcacttc

SEQ ID NO: 1099194 - DNA, 15 bp, Homo sapiens
agtgggcactcactt

SEQ ID NO: 1099195 - DNA, 15 bp, Homo sapiens
gagtgggcactcact

SEQ ID NO: 1099196 - DNA, 15 bp, Homo sapiens
ggagtgggcactcac

SEQ ID NO: 1099197 - DNA, 15 bp, Homo sapiens
gggagtgggcactca

SEQ ID NO: 1099198 - DNA, 15 bp, Homo sapiens
tgggagtgggcactc

SEQ ID NO: 1099199 - DNA, 15 bp, Homo sapiens
ctgggagtgggcact

SEQ ID NO: 1099200 - DNA, 15 bp, Homo sapiens
actgggagtgggcac

SEQ ID NO: 1099201 - DNA, 15 bp, Homo sapiens
tactgggagtgggca

SEQ ID NO: 1099202 - DNA, 15 bp, Homo sapiens
ctactgggagtgggc

SEQ ID NO: 1099203 - DNA, 15 bp, Homo sapiens
gctactgggagtggg

SEQ ID NO: 1099204 - DNA, 15 bp, Homo sapiens
ggctactgggagtgg

SEQ ID NO: 1099205 - DNA, 15 bp, Homo sapiens
aggctactgggagtg

SEQ ID NO: 1099206 - DNA, 15 bp, Homo sapiens
gaggctactgggagt

SEQ ID NO: 1099207 - DNA, 15 bp, Homo sapiens
tgaggctactgggag

SEQ ID NO: 1099208 - DNA, 15 bp, Homo sapiens
ctgaggctactggga

SEQ ID NO: 1099209 - DNA, 15 bp, Homo sapiens
tctgaggctactggg

SEQ ID NO: 1099210 - DNA, 15 bp, Homo sapiens
atctgaggctactgg

SEQ ID NO: 1099211 - DNA, 15 bp, Homo sapiens
gatctgaggctactg

SEQ ID NO: 1099212 - DNA, 15 bp, Homo sapiens
ggatctgaggctact

SEQ ID NO: 1099213 - DNA, 15 bp, Homo sapiens
gggatctgaggctac

SEQ ID NO: 1099214 - DNA, 15 bp, Homo sapiens
tgggatctgaggcta

SEQ ID NO: 1099215 - DNA, 15 bp, Homo sapiens
atgggatctgaggct

SEQ ID NO: 1099216 - DNA, 15 bp, Homo sapiens
gatgggatctgaggc

SEQ ID NO: 1099217 - DNA, 15 bp, Homo sapiens
ggatgggatctgagg

SEQ ID NO: 1099218 - DNA, 15 bp, Homo sapiens
aggatgggatctgag

SEQ ID NO: 1099219 - DNA, 15 bp, Homo sapiens
caggatgggatctga

SEQ ID NO: 1099220 - DNA, 15 bp, Homo sapiens
ccaggatgggatctg

SEQ ID NO: 1099221 - DNA, 15 bp, Homo sapiens
gccaggatgggatct

SEQ ID NO: 1099222 - DNA, 15 bp, Homo sapiens
ggccaggatgggatc

SEQ ID NO: 1099223 - DNA, 15 bp, Homo sapiens
gggccaggatgggat

SEQ ID NO: 1099224 - DNA, 15 bp, Homo sapiens
ggggccaggatggga

SEQ ID NO: 1099225 - DNA, 15 bp, Homo sapiens
gggggccaggatggg

SEQ ID NO: 1099226 - DNA, 15 bp, Homo sapiens
ggggggccaggatgg

SEQ ID NO: 1099227 - DNA, 15 bp, Homo sapiens
gggggggccaggatg

SEQ ID NO: 1099228 - DNA, 15 bp, Homo sapiens
tgggggggccaggat

SEQ ID NO: 1099229 - DNA, 15 bp, Homo sapiens
gtgggggggccagga

SEQ ID NO: 1099230 - DNA, 15 bp, Homo sapiens
ggtgggggggccagg

SEQ ID NO: 1099231 - DNA, 15 bp, Homo sapiens
gggtgggggggccag

SEQ ID NO: 1099232 - DNA, 15 bp, Homo sapiens
ggggtgggggggcca

SEQ ID NO: 1099233 - DNA, 15 bp, Homo sapiens
tggggtgggggggcc

SEQ ID NO: 1099234 - DNA, 15 bp, Homo sapiens
gtggggtgggggggc

SEQ ID NO: 1099235 - DNA, 15 bp, Homo sapiens
ggtggggtggggggg

SEQ ID NO: 1099236 - DNA, 15 bp, Homo sapiens
gggtggggtgggggg

SEQ ID NO: 1099237 - DNA, 15 bp, Homo sapiens
tgtggggtggggtgg

SEQ ID NO: 1099238 - DNA, 15 bp, Homo sapiens
atgtggggtggggtg

SEQ ID NO: 1099239 - DNA, 15 bp, Homo sapiens
tatgtggggtggggt

SEQ ID NO: 1099240 - DNA, 15 bp, Homo sapiens
gtatgtggggtgggg

SEQ ID NO: 1099241 - DNA, 15 bp, Homo sapiens
tgtatgtggggtggg

SEQ ID NO: 1099242 - DNA, 15 bp, Homo sapiens
atgtatgtggggtgg

SEQ ID NO: 1099243 - DNA, 15 bp, Homo sapiens
tatgtatgtggggtg

SEQ ID NO: 1099244 - DNA, 15 bp, Homo sapiens
gtatgtatgtggggt

SEQ ID NO: 1099245 - DNA, 15 bp, Homo sapiens
ggtatgtatgtgggg

SEQ ID NO: 1099246 - DNA, 15 bp, Homo sapiens
gggtatgtatgtggg

SEQ ID NO: 1099247 - DNA, 15 bp, Homo sapiens
ggggtatgtatgtgg

SEQ ID NO: 1099248 - DNA, 15 bp, Homo sapiens
gggggtatgtatgtg

SEQ ID NO: 1099249 - DNA, 15 bp, Homo sapiens
ggggggtatgtatgt

SEQ ID NO: 1099250 - DNA, 15 bp, Homo sapiens
aggggggtatgtatg

SEQ ID NO: 1099251 - DNA, 15 bp, Homo sapiens
aaggggggtatgtat

SEQ ID NO: 1099252 - DNA, 15 bp, Homo sapiens
gaaggggggtatgta

SEQ ID NO: 1099253 - DNA, 15 bp, Homo sapiens
agaaggggggtatgt

SEQ ID NO: 1099254 - DNA, 15 bp, Homo sapiens
tagaaggggggtatg

SEQ ID NO: 1099255 - DNA, 15 bp, Homo sapiens
gtagaaggggggtat

SEQ ID NO: 1099256 - DNA, 15 bp, Homo sapiens
ggtagaaggggggta

SEQ ID NO: 1099257 - DNA, 15 bp, Homo sapiens
gggtagaaggggggt

SEQ ID NO: 1099258 - DNA, 15 bp, Homo sapiens
agggtagaagggggg

SEQ ID NO: 1099259 - DNA, 15 bp, Homo sapiens
cagggtagaaggggg

SEQ ID NO: 1099260 - DNA, 15 bp, Homo sapiens
tcagggtagaagggg

SEQ ID NO: 1099261 - DNA, 15 bp, Homo sapiens
gtcagggtagaaggg

SEQ ID NO: 1099262 - DNA, 15 bp, Homo sapiens
ggtcagggtagaagg

SEQ ID NO: 1099263 - DNA, 15 bp, Homo sapiens
aggtcagggtagaag

SEQ ID NO: 1099264 - DNA, 15 bp, Homo sapiens
aaggtcagggtagaa

SEQ ID NO: 1099265 - DNA, 15 bp, Homo sapiens
caaggtcagggtaga

SEQ ID NO: 1099266 - DNA, 15 bp, Homo sapiens
gcaaggtcagggtag

SEQ ID NO: 1099267 - DNA, 15 bp, Homo sapiens
ggcaaggtcagggta

SEQ ID NO: 1099268 - DNA, 15 bp, Homo sapiens
aggcaaggtcagggt

SEQ ID NO: 1099269 - DNA, 15 bp, Homo sapiens
gaggcaaggtcaggg

SEQ ID NO: 1099270 - DNA, 15 bp, Homo sapiens
agaggcaaggtcagg

SEQ ID NO: 1099271 - DNA, 15 bp, Homo sapiens
gagaggcaaggtcag

SEQ ID NO: 1099272 - DNA, 15 bp, Homo sapiens
tgagaggcaaggtca

SEQ ID NO: 1099273 - DNA, 15 bp, Homo sapiens
gtgagaggcaaggtc

SEQ ID NO: 1099274 - DNA, 15 bp, Homo sapiens
tgtgagaggcaaggt

SEQ ID NO: 1099275 - DNA, 15 bp, Homo sapiens
gtgtgagaggcaagg

SEQ ID NO: 1099276 - DNA, 15 bp, Homo sapiens
ggtgtgagaggcaag

SEQ ID NO: 1099277 - DNA, 15 bp, Homo sapiens
tggtgtgagaggcaa

SEQ ID NO: 1099278 - DNA, 15 bp, Homo sapiens
gtggtgtgagaggca

SEQ ID NO: 1099279 - DNA, 15 bp, Homo sapiens
ggtggtgtgagaggc

SEQ ID NO: 1099280 - DNA, 15 bp, Homo sapiens
gggtggtgtgagagg

SEQ ID NO: 1099281 - DNA, 15 bp, Homo sapiens
tgggtggtgtgagag

SEQ ID NO: 1099282 - DNA, 15 bp, Homo sapiens
ctgggtggtgtgaga

SEQ ID NO: 1099283 - DNA, 15 bp, Homo sapiens
cctgggtggtgtgag

SEQ ID NO: 1099284 - DNA, 15 bp, Homo sapiens
acctgggtggtgtga

SEQ ID NO: 1099285 - DNA, 15 bp, Homo sapiens
gacctgggtggtgtg

SEQ ID NO: 1099286 - DNA, 15 bp, Homo sapiens
agacctgggtggtgt

SEQ ID NO: 1099287 - DNA, 15 bp, Homo sapiens
gagacctgggtggtg

SEQ ID NO: 1099288 - DNA, 15 bp, Homo sapiens
agagacctgggtggt

SEQ ID NO: 1099289 - DNA, 15 bp, Homo sapiens
gagagacctgggtgg

SEQ ID NO: 1099290 - DNA, 15 bp, Homo sapiens
ggagagacctgggtg

SEQ ID NO: 1099291 - DNA, 15 bp, Homo sapiens
gggagagacctgggt

SEQ ID NO: 1099292 - DNA, 15 bp, Homo sapiens
ggggagagacctggg

SEQ ID NO: 1099293 - DNA, 15 bp, Homo sapiens
gggggagagacctgg

SEQ ID NO: 1099294 - DNA, 15 bp, Homo sapiens
tgggggagagacctg

SEQ ID NO: 1099295 - DNA, 15 bp, Homo sapiens
gtgggggagagacct

SEQ ID NO: 1099296 - DNA, 15 bp, Homo sapiens
ggtgggggagagacc

SEQ ID NO: 1099297 - DNA, 15 bp, Homo sapiens
aggtgggggagagac

SEQ ID NO: 1099298 - DNA, 15 bp, Homo sapiens
gaggtgggggagaga

SEQ ID NO: 1099299 - DNA, 15 bp, Homo sapiens
ggaggtgggggagag

SEQ ID NO: 1099300 - DNA, 15 bp, Homo sapiens
gggaggtgggggaga

SEQ ID NO: 1099301 - DNA, 15 bp, Homo sapiens
tgggaggtgggggag

SEQ ID NO: 1099302 - DNA, 15 bp, Homo sapiens
gtgggaggtggggga

SEQ ID NO: 1099303 - DNA, 15 bp, Homo sapiens
ggtgggaggtggggg

SEQ ID NO: 1099304 - DNA, 15 bp, Homo sapiens
aggtgggaggtgggg

SEQ ID NO: 1099305 - DNA, 15 bp, Homo sapiens
aaggtgggaggtggg

SEQ ID NO: 1099306 - DNA, 15 bp, Homo sapiens
gaaggtgggaggtgg

SEQ ID NO: 1099307 - DNA, 15 bp, Homo sapiens
ggaaggtgggaggtg

SEQ ID NO: 1099308 - DNA, 15 bp, Homo sapiens
gggaaggtgggaggt

SEQ ID NO: 1099309 - DNA, 15 bp, Homo sapiens
agggaaggtgggagg

SEQ ID NO: 1099310 - DNA, 15 bp, Homo sapiens
tagggaaggtgggag

SEQ ID NO: 1099311 - DNA, 15 bp, Homo sapiens
ctagggaaggtggga

SEQ ID NO: 1099312 - DNA, 15 bp, Homo sapiens
tctagggaaggtggg

SEQ ID NO: 1099313 - DNA, 15 bp, Homo sapiens
ctctagggaaggtgg

SEQ ID NO: 1099314 - DNA, 15 bp, Homo sapiens
gctctagggaaggtg

SEQ ID NO: 1099315 - DNA, 15 bp, Homo sapiens
agctctagggaaggt

SEQ ID NO: 1099316 - DNA, 15 bp, Homo sapiens
cagctctagggaagg

SEQ ID NO: 1099317 - DNA, 15 bp, Homo sapiens
ccagctctagggaag

SEQ ID NO: 1099318 - DNA, 15 bp, Homo sapiens
cccagctctagggaa

SEQ ID NO: 1099319 - DNA, 15 bp, Homo sapiens
ccccagctctaggga

SEQ ID NO: 1099320 - DNA, 15 bp, Homo sapiens
cccccagctctaggg

SEQ ID NO: 1099321 - DNA, 15 bp, Homo sapiens
gcccccagctctagg

SEQ ID NO: 1099322 - DNA, 15 bp, Homo sapiens
agcccccagctctag

SEQ ID NO: 1099323 - DNA, 15 bp, Homo sapiens
cagcccccagctcta

SEQ ID NO: 1099324 - DNA, 15 bp, Homo sapiens
gcagcccccagctct

SEQ ID NO: 1099325 - DNA, 15 bp, Homo sapiens
agcagcccccagctc

SEQ ID NO: 1099326 - DNA, 15 bp, Homo sapiens
gagcagcccccagct

SEQ ID NO: 1099327 - DNA, 15 bp, Homo sapiens
gtcatggccaggaag

SEQ ID NO: 1099328 - DNA, 15 bp, Homo sapiens
ggtcatggccaggaa

SEQ ID NO: 1099329 - DNA, 15 bp, Homo sapiens
gggtcatggccagga

SEQ ID NO: 1099330 - DNA, 15 bp, Homo sapiens
tgggtcatggccagg

SEQ ID NO: 1099331 - DNA, 15 bp, Homo sapiens
atgggtcatggccag

SEQ ID NO: 1099332 - DNA, 15 bp, Homo sapiens
aatgggtcatggcca

SEQ ID NO: 1099333 - DNA, 15 bp, Homo sapiens
gaatgggtcatggcc

SEQ ID NO: 1099334 - DNA, 15 bp, Homo sapiens
ggaatgggtcatggc

SEQ ID NO: 1099335 - DNA, 15 bp, Homo sapiens
tggaatgggtcatgg

SEQ ID NO: 1099336 - DNA, 15 bp, Homo sapiens
ttggaatgggtcatg

SEQ ID NO: 1099337 - DNA, 15 bp, Homo sapiens
cttggaatgggtcat

SEQ ID NO: 1099338 - DNA, 15 bp, Homo sapiens
gcttggaatgggtca

SEQ ID NO: 1099339 - DNA, 15 bp, Homo sapiens
tgcttggaatgggtc

SEQ ID NO: 1099340 - DNA, 15 bp, Homo sapiens
gtgcttggaatgggt

SEQ ID NO: 1099341 - DNA, 15 bp, Homo sapiens
tgtgcttggaatggg

SEQ ID NO: 1099342 - DNA, 15 bp, Homo sapiens
atgtgcttggaatgg

SEQ ID NO: 1099343 - DNA, 15 bp, Homo sapiens
gatgtgcttggaatg

SEQ ID NO: 1099344 - DNA, 15 bp, Homo sapiens
ggatgtgcttggaat

SEQ ID NO: 1099345 - DNA, 15 bp, Homo sapiens
aggatgtgcttggaa

SEQ ID NO: 1099346 - DNA, 15 bp, Homo sapiens
gaggatgtgcttgga

SEQ ID NO: 1099347 - DNA, 15 bp, Homo sapiens
agaggatgtgcttgg

SEQ ID NO: 1099348 - DNA, 15 bp, Homo sapiens
cagaggatgtgcttg

SEQ ID NO: 1099349 - DNA, 15 bp, Homo sapiens
gcagaggatgtgctt

SEQ ID NO: 1099350 - DNA, 15 bp, Homo sapiens
ggcagaggatgtgct

SEQ ID NO: 1099351 - DNA, 15 bp, Homo sapiens
gggcagaggatgtgc

SEQ ID NO: 1099352 - DNA, 15 bp, Homo sapiens
ggggcagaggatgtg

SEQ ID NO: 1099353 - DNA, 15 bp, Homo sapiens
tggggcagaggatgt

SEQ ID NO: 1099354 - DNA, 15 bp, Homo sapiens
ctggggcagaggatg

SEQ ID NO: 1099355 - DNA, 15 bp, Homo sapiens
tctggggcagaggat

SEQ ID NO: 1099356 - DNA, 15 bp, Homo sapiens
ttctggggcagagga

SEQ ID NO: 1099357 - DNA, 15 bp, Homo sapiens
attctggggcagagg

SEQ ID NO: 1099358 - DNA, 15 bp, Homo sapiens
gattctggggcagag

SEQ ID NO: 1099359 - DNA, 15 bp, Homo sapiens
ggattctggggcaga

SEQ ID NO: 1099360 - DNA, 15 bp, Homo sapiens
gggattctggggcag

SEQ ID NO: 1099361 - DNA, 15 bp, Homo sapiens
tgggattctggggca

SEQ ID NO: 1099362 - DNA, 15 bp, Homo sapiens
atgggattctggggc

SEQ ID NO: 1099363 - DNA, 15 bp, Homo sapiens
catgggattctgggg

SEQ ID NO: 1099364 - DNA, 15 bp, Homo sapiens
acatgggattctggg

SEQ ID NO: 1099365 - DNA, 15 bp, Homo sapiens
cacatgggattctgg

SEQ ID NO: 1099366 - DNA, 15 bp, Homo sapiens
gcacatgggattctg

SEQ ID NO: 1099367 - DNA, 15 bp, Homo sapiens
tgcacatgggattct

SEQ ID NO: 1099368 - DNA, 15 bp, Homo sapiens
gtgcacatgggattc

SEQ ID NO: 1099369 - DNA, 15 bp, Homo sapiens
agtgcacatgggatt

SEQ ID NO: 1099370 - DNA, 15 bp, Homo sapiens
cagtgcacatgggat

SEQ ID NO: 1099371 - DNA, 15 bp, Homo sapiens
ccagtgcacatggga

SEQ ID NO: 1099372 - DNA, 15 bp, Homo sapiens
accagtgcacatggg

SEQ ID NO: 1099373 - DNA, 15 bp, Homo sapiens
gaccagtgcacatgg

SEQ ID NO: 1099374 - DNA, 15 bp, Homo sapiens
tgaccagtgcacatg

SEQ ID NO: 1099375 - DNA, 15 bp, Homo sapiens
gtgaccagtgcacat

SEQ ID NO: 1099376 - DNA, 15 bp, Homo sapiens
ggtgaccagtgcaca

SEQ ID NO: 1099377 - DNA, 15 bp, Homo sapiens
gggtgaccagtgcac

SEQ ID NO: 1099378 - DNA, 15 bp, Homo sapiens
ggggtgaccagtgca

SEQ ID NO: 1099379 - DNA, 15 bp, Homo sapiens
tggggtgaccagtgc

SEQ ID NO: 1099380 - DNA, 15 bp, Homo sapiens
ctggggtgaccagtg

SEQ ID NO: 1099381 - DNA, 15 bp, Homo sapiens
actggggtgaccagt

SEQ ID NO: 1099382 - DNA, 15 bp, Homo sapiens
cactggggtgaccag

SEQ ID NO: 1099383 - DNA, 15 bp, Homo sapiens
gcactggggtgacca

SEQ ID NO: 1099384 - DNA, 15 bp, Homo sapiens
agcactggggtgacc

SEQ ID NO: 1099385 - DNA, 15 bp, Homo sapiens
cagcactggggtgac

SEQ ID NO: 1099386 - DNA, 15 bp, Homo sapiens
tcagcactggggtga

SEQ ID NO: 1099387 - DNA, 15 bp, Homo sapiens
gtcagcactggggtg

SEQ ID NO: 1099388 - DNA, 15 bp, Homo sapiens
agtcagcactggggt

SEQ ID NO: 1099389 - DNA, 15 bp, Homo sapiens
aagtcagcactgggg

SEQ ID NO: 1099390 - DNA, 15 bp, Homo sapiens
caagtcagcactggg

SEQ ID NO: 1099391 - DNA, 15 bp, Homo sapiens
ccaagtcagcactgg

SEQ ID NO: 1099392 - DNA, 15 bp, Homo sapiens
tccaagtcagcactg

SEQ ID NO: 1099393 - DNA, 15 bp, Homo sapiens
ctccaagtcagcact

SEQ ID NO: 1099394 - DNA, 15 bp, Homo sapiens
gctccaagtcagcac

SEQ ID NO: 1099395 - DNA, 15 bp, Homo sapiens
ggctccaagtcagca

SEQ ID NO: 1099396 - DNA, 15 bp, Homo sapiens
tggctccaagtcagc

SEQ ID NO: 1099397 - DNA, 15 bp, Homo sapiens
ctggctccaagtcag

SEQ ID NO: 1099398 - DNA, 15 bp, Homo sapiens
cctggctccaagtca

SEQ ID NO: 1099399 - DNA, 15 bp, Homo sapiens
tcctggctccaagtc

SEQ ID NO: 1099400 - DNA, 15 bp, Homo sapiens
ttcctggctccaagt

SEQ ID NO: 1099401 - DNA, 15 bp, Homo sapiens
tttcctggctccaag

SEQ ID NO: 1099402 - DNA, 15 bp, Homo sapiens
atttcctggctccaa

SEQ ID NO: 1099403 - DNA, 15 bp, Homo sapiens
catttcctggctcca

SEQ ID NO: 1099404 - DNA, 15 bp, Homo sapiens
acatttcctggctcc

SEQ ID NO: 1099405 - DNA, 15 bp, Homo sapiens
cacatttcctggctc

SEQ ID NO: 1099406 - DNA, 15 bp, Homo sapiens
gcacatttcctggct

SEQ ID NO: 1099407 - DNA, 15 bp, Homo sapiens
ggcacatttcctggc

SEQ ID NO: 1099408 - DNA, 15 bp, Homo sapiens
aggcacatttcctgg

SEQ ID NO: 1099409 - DNA, 15 bp, Homo sapiens
aaggcacatttcctg

SEQ ID NO: 1099410 - DNA, 15 bp, Homo sapiens
gaaggcacatttcct

SEQ ID NO: 1099411 - DNA, 15 bp, Homo sapiens
tgaaggcacatttcc

SEQ ID NO: 1099412 - DNA, 15 bp, Homo sapiens
ctgaaggcacatttc

SEQ ID NO: 1099413 - DNA, 15 bp, Homo sapiens
gctgaaggcacattt

SEQ ID NO: 1099414 - DNA, 15 bp, Homo sapiens
ggctgaaggcacatt

SEQ ID NO: 1099415 - DNA, 15 bp, Homo sapiens
gggctgaaggcacat

SEQ ID NO: 1099416 - DNA, 15 bp, Homo sapiens
ggggctgaaggcaca

SEQ ID NO: 1099417 - DNA, 15 bp, Homo sapiens
gggggctgaaggcac

SEQ ID NO: 1099418 - DNA, 15 bp, Homo sapiens
tgggggctgaaggca

SEQ ID NO: 1099419 - DNA, 15 bp, Homo sapiens
gtgggggctgaaggc

SEQ ID NO: 1099420 - DNA, 15 bp, Homo sapiens
ggtgggggctgaagg

SEQ ID NO: 1099421 - DNA, 15 bp, Homo sapiens
gggtgggggctgaag

SEQ ID NO: 1099422 - DNA, 15 bp, Homo sapiens
ggggtgggggctgaa

SEQ ID NO: 1099423 - DNA, 15 bp, Homo sapiens
gggggtgggggctga

SEQ ID NO: 1099424 - DNA, 15 bp, Homo sapiens
tgggggtgggggctg

SEQ ID NO: 1099425 - DNA, 15 bp, Homo sapiens
ttgggggtgggggct

SEQ ID NO: 1099426 - DNA, 15 bp, Homo sapiens
tttgggggtgggggc

SEQ ID NO: 1099427 - DNA, 15 bp, Homo sapiens
atttgggggtggggg

SEQ ID NO: 1099428 - DNA, 15 bp, Homo sapiens
gaatttgggggtggg

SEQ ID NO: 1099429 - DNA, 15 bp, Homo sapiens
ggaatttgggggtgg

SEQ ID NO: 1099430 - DNA, 15 bp, Homo sapiens
tggaatttgggggtg

SEQ ID NO: 1099431 - DNA, 15 bp, Homo sapiens
ctggaatttgggggt

SEQ ID NO: 1099432 - DNA, 15 bp, Homo sapiens
actggaatttggggg

SEQ ID NO: 1099433 - DNA, 15 bp, Homo sapiens
gactggaatttgggg

SEQ ID NO: 1099434 - DNA, 15 bp, Homo sapiens
agactggaatttggg

SEQ ID NO: 1099435 - DNA, 15 bp, Homo sapiens
gagactggaatttgg

SEQ ID NO: 1099436 - DNA, 15 bp, Homo sapiens
ggagactggaatttg

SEQ ID NO: 1099437 - DNA, 15 bp, Homo sapiens
gggagactggaattt

SEQ ID NO: 1099438 - DNA, 15 bp, Homo sapiens
tgggagactggaatt

SEQ ID NO: 1099439 - DNA, 15 bp, Homo sapiens
ctgggagactggaat

SEQ ID NO: 1099440 - DNA, 15 bp, Homo sapiens
gctgggagactggaa

SEQ ID NO: 1099441 - DNA, 15 bp, Homo sapiens
ggctgggagactgga

SEQ ID NO: 1099442 - DNA, 15 bp, Homo sapiens
tggctgggagactgg

SEQ ID NO: 1099443 - DNA, 15 bp, Homo sapiens
ttggctgggagactg

SEQ ID NO: 1099444 - DNA, 15 bp, Homo sapiens
cttggctgggagact

SEQ ID NO: 1099445 - DNA, 15 bp, Homo sapiens
gcttggctgggagac

SEQ ID NO: 1099446 - DNA, 15 bp, Homo sapiens
agcttggctgggaga

SEQ ID NO: 1099447 - DNA, 15 bp, Homo sapiens
cagcttggctgggag

SEQ ID NO: 1099448 - DNA, 15 bp, Homo sapiens
gcagcttggctggga

SEQ ID NO: 1099449 - DNA, 15 bp, Homo sapiens
ggcagcttggctggg

SEQ ID NO: 1099450 - DNA, 15 bp, Homo sapiens
gggcagcttggctgg

SEQ ID NO: 1099451 - DNA, 15 bp, Homo sapiens
cgggcagcttggctg

SEQ ID NO: 1099452 - DNA, 15 bp, Homo sapiens
gcgggcagcttggct

SEQ ID NO: 1099453 - DNA, 15 bp, Homo sapiens
ggcgggcagcttggc

SEQ ID NO: 1099454 - DNA, 15 bp, Homo sapiens
aggcgggcagcttgg

SEQ ID NO: 1099455 - DNA, 15 bp, Homo sapiens
gaggcgggcagcttg

SEQ ID NO: 1099456 - DNA, 15 bp, Homo sapiens
tgaggcgggcagctt

SEQ ID NO: 1099457 - DNA, 15 bp, Homo sapiens
ctgaggcgggcagct

SEQ ID NO: 1099458 - DNA, 15 bp, Homo sapiens
cctgaggcgggcagc

SEQ ID NO: 1099459 - DNA, 15 bp, Homo sapiens
tcctgaggcgggcag

SEQ ID NO: 1099460 - DNA, 15 bp, Homo sapiens
ctcctgaggcgggca

SEQ ID NO: 1099461 - DNA, 15 bp, Homo sapiens
cctcctgaggcgggc

SEQ ID NO: 1099462 - DNA, 15 bp, Homo sapiens
tcctcctgaggcggg

SEQ ID NO: 1099463 - DNA, 15 bp, Homo sapiens
atcctcctgaggcgg

SEQ ID NO: 1099464 - DNA, 15 bp, Homo sapiens
catcctcctgaggcg

SEQ ID NO: 1099465 - DNA, 15 bp, Homo sapiens
tcatcctcctgaggc

SEQ ID NO: 1099466 - DNA, 15 bp, Homo sapiens
gtcatcctcctgagg

SEQ ID NO: 1099467 - DNA, 15 bp, Homo sapiens
ggtcatcctcctgag

SEQ ID NO: 1099468 - DNA, 15 bp, Homo sapiens
tggtcatcctcctga

SEQ ID NO: 1099469 - DNA, 15 bp, Homo sapiens
atggtcatcctcctg

SEQ ID NO: 1099470 - DNA, 15 bp, Homo sapiens
aatggtcatcctcct

SEQ ID NO: 1099471 - DNA, 15 bp, Homo sapiens
gaatggtcatcctcc

SEQ ID NO: 1099472 - DNA, 15 bp, Homo sapiens
ggaatggtcatcctc

SEQ ID NO: 1099473 - DNA, 15 bp, Homo sapiens
gggaatggtcatcct

SEQ ID NO: 1099474 - DNA, 15 bp, Homo sapiens
tgggaatggtcatcc

SEQ ID NO: 1099475 - DNA, 15 bp, Homo sapiens
ctgggaatggtcatc

SEQ ID NO: 1099476 - DNA, 15 bp, Homo sapiens
gctgggaatggtcat

SEQ ID NO: 1099477 - DNA, 15 bp, Homo sapiens
ggctgggaatggtca

SEQ ID NO: 1099478 - DNA, 15 bp, Homo sapiens
gggctgggaatggtc

SEQ ID NO: 1099479 - DNA, 15 bp, Homo sapiens
ggggctgggaatggt

SEQ ID NO: 1099480 - DNA, 15 bp, Homo sapiens
tggggctgggaatgg

SEQ ID NO: 1099481 - DNA, 15 bp, Homo sapiens
gtggggctgggaatg

SEQ ID NO: 1099482 - DNA, 15 bp, Homo sapiens
agtggggctgggaat

SEQ ID NO: 1099483 - DNA, 15 bp, Homo sapiens
cagtggggctgggaa

SEQ ID NO: 1099484 - DNA, 15 bp, Homo sapiens
tcagtggggctggga

SEQ ID NO: 1099485 - DNA, 15 bp, Homo sapiens
atcagtggggctggg

SEQ ID NO: 1099486 - DNA, 15 bp, Homo sapiens
gatcagtggggctgg

SEQ ID NO: 1099487 - DNA, 15 bp, Homo sapiens
ggatcagtggggctg

SEQ ID NO: 1099488 - DNA, 15 bp, Homo sapiens
gggatcagtggggct

SEQ ID NO: 1099489 - DNA, 15 bp, Homo sapiens
ggggatcagtggggc

SEQ ID NO: 1099490 - DNA, 15 bp, Homo sapiens
cggggatcagtgggg

SEQ ID NO: 1099491 - DNA, 15 bp, Homo sapiens
tcggggatcagtggg

SEQ ID NO: 1099492 - DNA, 15 bp, Homo sapiens
ctcggggatcagtgg

SEQ ID NO: 1099493 - DNA, 15 bp, Homo sapiens
tctcggggatcagtg

SEQ ID NO: 1099494 - DNA, 15 bp, Homo sapiens
ttctcggggatcagt

SEQ ID NO: 1099495 - DNA, 15 bp, Homo sapiens
tttctcggggatcag

SEQ ID NO: 1099496 - DNA, 15 bp, Homo sapiens
gtttctcggggatca

SEQ ID NO: 1099497 - DNA, 15 bp, Homo sapiens
tgtttctcggggatc

SEQ ID NO: 1099498 - DNA, 15 bp, Homo sapiens
atgtttctcggggat

SEQ ID NO: 1099499 - DNA, 15 bp, Homo sapiens
aatgtttctcgggga

SEQ ID NO: 1099500 - DNA, 15 bp, Homo sapiens
aaatgtttctcgggg

SEQ ID NO: 1099501 - DNA, 15 bp, Homo sapiens
aaaatgtttctcggg

SEQ ID NO: 1099502 - DNA, 15 bp, Homo sapiens
taaaatgtttctcgg

SEQ ID NO: 1099503 - DNA, 15 bp, Homo sapiens
ataaaatgtttctcg

SEQ ID NO: 1099504 - DNA, 15 bp, Homo sapiens
cataaaatgtttctc

SEQ ID NO: 1099505 - DNA, 15 bp, Homo sapiens
acataaaatgtttct

SEQ ID NO: 1099506 - DNA, 15 bp, Homo sapiens
aacataaaatgtttc

SEQ ID NO: 1099507 - DNA, 15 bp, Homo sapiens
taacataaaatgttt

SEQ ID NO: 1099508 - DNA, 15 bp, Homo sapiens
ctaacataaaatgtt

SEQ ID NO: 1099509 - DNA, 15 bp, Homo sapiens
cctaacataaaatgt

SEQ ID NO: 1099510 - DNA, 15 bp, Homo sapiens
ccctaacataaaatg

SEQ ID NO: 1099511 - DNA, 15 bp, Homo sapiens
tccctaacataaaat

SEQ ID NO: 1099512 - DNA, 15 bp, Homo sapiens
ttccctaacataaaa

SEQ ID NO: 1099513 - DNA, 15 bp, Homo sapiens
attccctaacataaa

SEQ ID NO: 1099514 - DNA, 15 bp, Homo sapiens
tattccctaacataa

SEQ ID NO: 1099515 - DNA, 15 bp, Homo sapiens
gtattccctaacata

SEQ ID NO: 1099516 - DNA, 15 bp, Homo sapiens
ggtattccctaacat

SEQ ID NO: 1099517 - DNA, 15 bp, Homo sapiens
gggtattccctaaca

SEQ ID NO: 1099518 - DNA, 15 bp, Homo sapiens
ggggtattccctaac

SEQ ID NO: 1099519 - DNA, 15 bp, Homo sapiens
gggggtattccctaa

SEQ ID NO: 1099520 - DNA, 15 bp, Homo sapiens
tgggggtattcccta

SEQ ID NO: 1099521 - DNA, 15 bp, Homo sapiens
gtgggggtattccct

SEQ ID NO: 1099522 - DNA, 15 bp, Homo sapiens
ggtgggggtattccc

SEQ ID NO: 1099523 - DNA, 15 bp, Homo sapiens
aggtgggggtattcc

SEQ ID NO: 1099524 - DNA, 15 bp, Homo sapiens
gaggtgggggtattc

SEQ ID NO: 1099525 - DNA, 15 bp, Homo sapiens
agaggtgggggtatt

SEQ ID NO: 1099526 - DNA, 15 bp, Homo sapiens
aagaggtgggggtat

SEQ ID NO: 1099527 - DNA, 15 bp, Homo sapiens
gaagaggtgggggta

SEQ ID NO: 1099528 - DNA, 15 bp, Homo sapiens
agaagaggtgggggt

SEQ ID NO: 1099529 - DNA, 15 bp, Homo sapiens
cagaagaggtggggg

SEQ ID NO: 1099530 - DNA, 15 bp, Homo sapiens
ccagaagaggtgggg

SEQ ID NO: 1099531 - DNA, 15 bp, Homo sapiens
cccagaagaggtggg

SEQ ID NO: 1099532 - DNA, 15 bp, Homo sapiens
tcccagaagaggtgg

SEQ ID NO: 1099533 - DNA, 15 bp, Homo sapiens
atcccagaagaggtg

SEQ ID NO: 1099534 - DNA, 15 bp, Homo sapiens
catcccagaagaggt

SEQ ID NO: 1099535 - DNA, 15 bp, Homo sapiens
acatcccagaagagg

SEQ ID NO: 1099536 - DNA, 15 bp, Homo sapiens
cacatcccagaagag

SEQ ID NO: 1099537 - DNA, 15 bp, Homo sapiens
ccacatcccagaaga

SEQ ID NO: 1099538 - DNA, 15 bp, Homo sapiens
cccacatcccagaag

SEQ ID NO: 1099539 - DNA, 15 bp, Homo sapiens
tcccacatcccagaa

SEQ ID NO: 1099540 - DNA, 15 bp, Homo sapiens
ctcccacatcccaga

SEQ ID NO: 1099541 - DNA, 15 bp, Homo sapiens
cctcccacatcccag

SEQ ID NO: 1099542 - DNA, 15 bp, Homo sapiens
gcctcccacatccca

SEQ ID NO: 1099543 - DNA, 15 bp, Homo sapiens
agcctcccacatccc

SEQ ID NO: 1099544 - DNA, 15 bp, Homo sapiens
gagcctcccacatcc

SEQ ID NO: 1099545 - DNA, 15 bp, Homo sapiens
ggagcctcccacatc

SEQ ID NO: 1099546 - DNA, 15 bp, Homo sapiens
aggagcctcccacat

SEQ ID NO: 1099547 - DNA, 15 bp, Homo sapiens
gaggagcctcccaca

SEQ ID NO: 1099548 - DNA, 15 bp, Homo sapiens
tgaggagcctcccac

SEQ ID NO: 1099549 - DNA, 15 bp, Homo sapiens
atgaggagcctccca

SEQ ID NO: 1099550 - DNA, 15 bp, Homo sapiens
catgaggagcctccc

SEQ ID NO: 1099551 - DNA, 15 bp, Homo sapiens
gcatgaggagcctcc

SEQ ID NO: 1099552 - DNA, 15 bp, Homo sapiens
tgcatgaggagcctc

SEQ ID NO: 1099553 - DNA, 15 bp, Homo sapiens
ctgcatgaggagcct

SEQ ID NO: 1099554 - DNA, 15 bp, Homo sapiens
gctgcatgaggagcc

SEQ ID NO: 1099555 - DNA, 15 bp, Homo sapiens
ggctgcatgaggagc

SEQ ID NO: 1099556 - DNA, 15 bp, Homo sapiens
gggctgcatgaggag

SEQ ID NO: 1099557 - DNA, 15 bp, Homo sapiens
tgggctgcatgagga

SEQ ID NO: 1099558 - DNA, 15 bp, Homo sapiens
ctgggctgcatgagg

SEQ ID NO: 1099559 - DNA, 15 bp, Homo sapiens
actgggctgcatgag

SEQ ID NO: 1099560 - DNA, 15 bp, Homo sapiens
aactgggctgcatga

SEQ ID NO: 1099561 - DNA, 15 bp, Homo sapiens
gaactgggctgcatg

SEQ ID NO: 1099562 - DNA, 15 bp, Homo sapiens
ggaactgggctgcat

SEQ ID NO: 1099563 - DNA, 15 bp, Homo sapiens
aggaactgggctgca

SEQ ID NO: 1099564 - DNA, 15 bp, Homo sapiens
gaggaactgggctgc

SEQ ID NO: 1099565 - DNA, 15 bp, Homo sapiens
ggaggaactgggctg

SEQ ID NO: 1099566 - DNA, 15 bp, Homo sapiens
aggaggaactgggct

SEQ ID NO: 1099567 - DNA, 15 bp, Homo sapiens
caggaggaactgggc

SEQ ID NO: 1099568 - DNA, 15 bp, Homo sapiens
gcaggaggaactggg

SEQ ID NO: 1099569 - DNA, 15 bp, Homo sapiens
cgcaggaggaactgg

SEQ ID NO: 1099570 - DNA, 15 bp, Homo sapiens
ccgcaggaggaactg

SEQ ID NO: 1099571 - DNA, 15 bp, Homo sapiens
cccgcaggaggaact

SEQ ID NO: 1099572 - DNA, 15 bp, Homo sapiens
ccccgcaggaggaac

SEQ ID NO: 1099573 - DNA, 15 bp, Homo sapiens
cccccgcaggaggaa

SEQ ID NO: 1099574 - DNA, 15 bp, Homo sapiens
tcccccgcaggagga

SEQ ID NO: 1099575 - DNA, 15 bp, Homo sapiens
gtcccccgcaggagg

SEQ ID NO: 1099576 - DNA, 15 bp, Homo sapiens
ggtcccccgcaggag

SEQ ID NO: 1099577 - DNA, 15 bp, Homo sapiens
aggtcccccgcagga

SEQ ID NO: 1099578 - DNA, 15 bp, Homo sapiens
caggtcccccgcagg

SEQ ID NO: 1099579 - DNA, 15 bp, Homo sapiens
ccaggtcccccgcag

SEQ ID NO: 1099580 - DNA, 15 bp, Homo sapiens
cccaggtcccccgca

SEQ ID NO: 1099581 - DNA, 15 bp, Homo sapiens
tcccaggtcccccgc

SEQ ID NO: 1099582 - DNA, 15 bp, Homo sapiens
atcccaggtcccccg

SEQ ID NO: 1099583 - DNA, 15 bp, Homo sapiens
catcccaggtccccc

SEQ ID NO: 1099584 - DNA, 15 bp, Homo sapiens
gcatcccaggtcccc

SEQ ID NO: 1099585 - DNA, 15 bp, Homo sapiens
agcatcccaggtccc

SEQ ID NO: 1099586 - DNA, 15 bp, Homo sapiens
cagcatcccaggtcc

SEQ ID NO: 1099587 - DNA, 15 bp, Homo sapiens
ccagcatcccaggtc

SEQ ID NO: 1099588 - DNA, 15 bp, Homo sapiens
tccagcatcccaggt

SEQ ID NO: 1099589 - DNA, 15 bp, Homo sapiens
ctccagcatcccagg

SEQ ID NO: 1099590 - DNA, 15 bp, Homo sapiens
tctccagcatcccag

SEQ ID NO: 1099591 - DNA, 15 bp, Homo sapiens
gtctccagcatccca

SEQ ID NO: 1099592 - DNA, 15 bp, Homo sapiens
tgtctccagcatccc

SEQ ID NO: 1099593 - DNA, 15 bp, Homo sapiens
atgtctccagcatcc

SEQ ID NO: 1099594 - DNA, 15 bp, Homo sapiens
catgtctccagcatc

SEQ ID NO: 1099595 - DNA, 15 bp, Homo sapiens
ccatgtctccagcat

SEQ ID NO: 1099596 - DNA, 15 bp, Homo sapiens
tccatgtctccagca

SEQ ID NO: 1099597 - DNA, 15 bp, Homo sapiens
atccatgtctccagc

SEQ ID NO: 1099598 - DNA, 15 bp, Homo sapiens
catccatgtctccag

SEQ ID NO: 1099599 - DNA, 15 bp, Homo sapiens
gcatccatgtctcca

SEQ ID NO: 1099600 - DNA, 15 bp, Homo sapiens
agcatccatgtctcc

SEQ ID NO: 1099601 - DNA, 15 bp, Homo sapiens
gagcatccatgtctc

SEQ ID NO: 1099602 - DNA, 15 bp, Homo sapiens
tgagcatccatgtct

SEQ ID NO: 1099603 - DNA, 15 bp, Homo sapiens
gtgagcatccatgtc

SEQ ID NO: 1099604 - DNA, 15 bp, Homo sapiens
ggtgagcatccatgt

SEQ ID NO: 1099605 - DNA, 15 bp, Homo sapiens
aggtgagcatccatg

SEQ ID NO: 1099606 - DNA, 15 bp, Homo sapiens
caggtgagcatccat

SEQ ID NO: 1099607 - DNA, 15 bp, Homo sapiens
ccaggtgagcatcca

SEQ ID NO: 1099608 - DNA, 15 bp, Homo sapiens
gccaggtgagcatcc

SEQ ID NO: 1099609 - DNA, 15 bp, Homo sapiens
agccaggtgagcatc

SEQ ID NO: 1099610 - DNA, 15 bp, Homo sapiens
cagccaggtgagcat

SEQ ID NO: 1099611 - DNA, 15 bp, Homo sapiens
gcagccaggtgagca

SEQ ID NO: 1099612 - DNA, 15 bp, Homo sapiens
ggcagccaggtgagc

SEQ ID NO: 1099613 - DNA, 15 bp, Homo sapiens
aggcagccaggtgag

SEQ ID NO: 1099614 - DNA, 15 bp, Homo sapiens
gaggcagccaggtga

SEQ ID NO: 1099615 - DNA, 15 bp, Homo sapiens
cgaggcagccaggtg

SEQ ID NO: 1099616 - DNA, 15 bp, Homo sapiens
ccgaggcagccaggt

SEQ ID NO: 1099617 - DNA, 15 bp, Homo sapiens
gccgaggcagccagg

SEQ ID NO: 1099618 - DNA, 15 bp, Homo sapiens
ggccgaggcagccag

SEQ ID NO: 1099619 - DNA, 15 bp, Homo sapiens
aggccgaggcagcca

SEQ ID NO: 1099620 - DNA, 15 bp, Homo sapiens
aaggccgaggcagcc

SEQ ID NO: 1099621 - DNA, 15 bp, Homo sapiens
gaaggccgaggcagc

SEQ ID NO: 1099622 - DNA, 15 bp, Homo sapiens
ggaaggccgaggcag

SEQ ID NO: 1099623 - DNA, 15 bp, Homo sapiens
tggaaggccgaggca

SEQ ID NO: 1099624 - DNA, 15 bp, Homo sapiens
ctggaaggccgaggc

SEQ ID NO: 1099625 - DNA, 15 bp, Homo sapiens
cctggaaggccgagg

SEQ ID NO: 1099626 - DNA, 15 bp, Homo sapiens
ccctggaaggccgag

SEQ ID NO: 1099627 - DNA, 15 bp, Homo sapiens
tccctggaaggccga

SEQ ID NO: 1099628 - DNA, 15 bp, Homo sapiens
gtccctggaaggccg

SEQ ID NO: 1099629 - DNA, 15 bp, Homo sapiens
tgtccctggaaggcc

SEQ ID NO: 1099630 - DNA, 15 bp, Homo sapiens
ctgtccctggaaggc

SEQ ID NO: 1099631 - DNA, 15 bp, Homo sapiens
tctgtccctggaagg

SEQ ID NO: 1099632 - DNA, 15 bp, Homo sapiens
gtctgtccctggaag

SEQ ID NO: 1099633 - DNA, 15 bp, Homo sapiens
ggtctgtccctggaa

SEQ ID NO: 1099634 - DNA, 15 bp, Homo sapiens
gggtctgtccctgga

SEQ ID NO: 1099635 - DNA, 15 bp, Homo sapiens
ggggtctgtccctgg

SEQ ID NO: 1099636 - DNA, 15 bp, Homo sapiens
cggggtctgtccctg

SEQ ID NO: 1099637 - DNA, 15 bp, Homo sapiens
tcggggtctgtccct

SEQ ID NO: 1099638 - DNA, 15 bp, Homo sapiens
ctcggggtctgtccc

SEQ ID NO: 1099639 - DNA, 15 bp, Homo sapiens
cctcggggtctgtcc

SEQ ID NO: 1099640 - DNA, 15 bp, Homo sapiens
tcctcggggtctgtc

SEQ ID NO: 1099641 - DNA, 15 bp, Homo sapiens
ttcctcggggtctgt

SEQ ID NO: 1099642 - DNA, 15 bp, Homo sapiens
cttcctcggggtctg

SEQ ID NO: 1099643 - DNA, 15 bp, Homo sapiens
gcttcctcggggtct

SEQ ID NO: 1099644 - DNA, 15 bp, Homo sapiens
ggcttcctcggggtc

SEQ ID NO: 1099645 - DNA, 15 bp, Homo sapiens
tggcttcctcggggt

SEQ ID NO: 1099646 - DNA, 15 bp, Homo sapiens
atggcttcctcgggg

SEQ ID NO: 1099647 - DNA, 15 bp, Homo sapiens
gatggcttcctcggg

SEQ ID NO: 1099648 - DNA, 15 bp, Homo sapiens
ggatggcttcctcgg

SEQ ID NO: 1099649 - DNA, 15 bp, Homo sapiens
aggatggcttcctcg

SEQ ID NO: 1099650 - DNA, 15 bp, Homo sapiens
caggatggcttcctc

SEQ ID NO: 1099651 - DNA, 15 bp, Homo sapiens
tcaggatggcttcct

SEQ ID NO: 1099652 - DNA, 15 bp, Homo sapiens
ctcaggatggcttcc

SEQ ID NO: 1099653 - DNA, 15 bp, Homo sapiens
actcaggatggcttc

SEQ ID NO: 1099654 - DNA, 15 bp, Homo sapiens
cactcaggatggctt

SEQ ID NO: 1099655 - DNA, 15 bp, Homo sapiens
gcactcaggatggct

SEQ ID NO: 1099656 - DNA, 15 bp, Homo sapiens
ggcactcaggatggc

SEQ ID NO: 1099657 - DNA, 15 bp, Homo sapiens
aggcactcaggatgg

SEQ ID NO: 1099658 - DNA, 15 bp, Homo sapiens
aaggcactcaggatg

SEQ ID NO: 1099659 - DNA, 15 bp, Homo sapiens
gaaggcactcaggat

SEQ ID NO: 1099660 - DNA, 15 bp, Homo sapiens
ggaaggcactcagga

SEQ ID NO: 1099661 - DNA, 15 bp, Homo sapiens
cggaaggcactcagg

SEQ ID NO: 1099662 - DNA, 15 bp, Homo sapiens
gcggaaggcactcag

SEQ ID NO: 1099663 - DNA, 15 bp, Homo sapiens
tgcggaaggcactca

SEQ ID NO: 1099664 - DNA, 15 bp, Homo sapiens
atgcggaaggcactc

SEQ ID NO: 1099665 - DNA, 15 bp, Homo sapiens
catgcggaaggcact

SEQ ID NO: 1099666 - DNA, 15 bp, Homo sapiens
acatgcggaaggcac

SEQ ID NO: 1099667 - DNA, 15 bp, Homo sapiens
aacatgcggaaggca

SEQ ID NO: 1099668 - DNA, 15 bp, Homo sapiens
aaacatgcggaaggc

SEQ ID NO: 1099669 - DNA, 15 bp, Homo sapiens
caaacatgcggaagg

SEQ ID NO: 1099670 - DNA, 15 bp, Homo sapiens
tcaaacatgcggaag

SEQ ID NO: 1099671 - DNA, 15 bp, Homo sapiens
gtcaaacatgcggaa

SEQ ID NO: 1099672 - DNA, 15 bp, Homo sapiens
ggtcaaacatgcgga

SEQ ID NO: 1099673 - DNA, 15 bp, Homo sapiens
gggtcaaacatgcgg

SEQ ID NO: 1099674 - DNA, 15 bp, Homo sapiens
ggggtcaaacatgcg

SEQ ID NO: 1099675 - DNA, 15 bp, Homo sapiens
tggggtcaaacatgc

SEQ ID NO: 1099676 - DNA, 15 bp, Homo sapiens
ctggggtcaaacatg

SEQ ID NO: 1099677 - DNA, 15 bp, Homo sapiens
gctggggtcaaacat

SEQ ID NO: 1099678 - DNA, 15 bp, Homo sapiens
cgctggggtcaaaca

SEQ ID NO: 1099679 - DNA, 15 bp, Homo sapiens
ccgctggggtcaaac

SEQ ID NO: 1099680 - DNA, 15 bp, Homo sapiens
gccgctggggtcaaa

SEQ ID NO: 1099681 - DNA, 15 bp, Homo sapiens
tgccgctggggtcaa

SEQ ID NO: 1099682 - DNA, 15 bp, Homo sapiens
ttgccgctggggtca

SEQ ID NO: 1099683 - DNA, 15 bp, Homo sapiens
tttgccgctggggtc

SEQ ID NO: 1099684 - DNA, 15 bp, Homo sapiens
ctttgccgctggggt

SEQ ID NO: 1099685 - DNA, 15 bp, Homo sapiens
cctttgccgctgggg

SEQ ID NO: 1099686 - DNA, 15 bp, Homo sapiens
ccctttgccgctggg

SEQ ID NO: 1099687 - DNA, 15 bp, Homo sapiens
cccctttgccgctgg

SEQ ID NO: 1099688 - DNA, 15 bp, Homo sapiens
acccctttgccgctg

SEQ ID NO: 1099689 - DNA, 15 bp, Homo sapiens
cacccctttgccgct

SEQ ID NO: 1099690 - DNA, 15 bp, Homo sapiens
ccacccctttgccgc

SEQ ID NO: 1099691 - DNA, 15 bp, Homo sapiens
accacccctttgccg

SEQ ID NO: 1099692 - DNA, 15 bp, Homo sapiens
caccacccctttgcc

SEQ ID NO: 1099693 - DNA, 15 bp, Homo sapiens
tcaccacccctttgc

SEQ ID NO: 1099694 - DNA, 15 bp, Homo sapiens
ttcaccacccctttg

SEQ ID NO: 1099695 - DNA, 15 bp, Homo sapiens
gttcaccaccccttt

SEQ ID NO: 1099696 - DNA, 15 bp, Homo sapiens
tgttcaccacccctt

SEQ ID NO: 1099697 - DNA, 15 bp, Homo sapiens
ttgttcaccacccct

SEQ ID NO: 1099698 - DNA, 15 bp, Homo sapiens
cttgttcaccacccc

SEQ ID NO: 1099699 - DNA, 15 bp, Homo sapiens
ccttgttcaccaccc

SEQ ID NO: 1099700 - DNA, 15 bp, Homo sapiens
tccttgttcaccacc

SEQ ID NO: 1099701 - DNA, 15 bp, Homo sapiens
atccttgttcaccac

SEQ ID NO: 1099702 - DNA, 15 bp, Homo sapiens
catccttgttcacca

SEQ ID NO: 1099703 - DNA, 15 bp, Homo sapiens
tcatccttgttcacc

SEQ ID NO: 1099704 - DNA, 15 bp, Homo sapiens
ctcatccttgttcac

SEQ ID NO: 1099705 - DNA, 15 bp, Homo sapiens
actcatccttgttca

SEQ ID NO: 1099706 - DNA, 15 bp, Homo sapiens
tactcatccttgttc

SEQ ID NO: 1099707 - DNA, 15 bp, Homo sapiens
ttactcatccttgtt

SEQ ID NO: 1099708 - DNA, 15 bp, Homo sapiens
cttactcatccttgt

SEQ ID NO: 1099709 - DNA, 15 bp, Homo sapiens
acttactcatccttg

SEQ ID NO: 1099710 - DNA, 15 bp, Homo sapiens
tacttactcatcctt

SEQ ID NO: 1099711 - DNA, 15 bp, Homo sapiens
atacttactcatcct

SEQ ID NO: 1099712 - DNA, 15 bp, Homo sapiens
catacttactcatcc

SEQ ID NO: 1099713 - DNA, 15 bp, Homo sapiens
ccatacttactcatc

SEQ ID NO: 1099714 - DNA, 15 bp, Homo sapiens
cccatacttactcat

SEQ ID NO: 1099715 - DNA, 15 bp, Homo sapiens
gcccatacttactca

SEQ ID NO: 1099716 - DNA, 15 bp, Homo sapiens
ggcccatacttactc

SEQ ID NO: 1099717 - DNA, 15 bp, Homo sapiens
gggcccatacttact

SEQ ID NO: 1099718 - DNA, 15 bp, Homo sapiens
tgggcccatacttac

SEQ ID NO: 1099719 - DNA, 15 bp, Homo sapiens
ctgggcccatactta

SEQ ID NO: 1099720 - DNA, 15 bp, Homo sapiens
gctgggcccatactt

SEQ ID NO: 1099721 - DNA, 15 bp, Homo sapiens
ggctgggcccatact

SEQ ID NO: 1099722 - DNA, 15 bp, Homo sapiens
tggctgggcccatac

SEQ ID NO: 1099723 - DNA, 15 bp, Homo sapiens
ctggctgggcccata

SEQ ID NO: 1099724 - DNA, 15 bp, Homo sapiens
tctggctgggcccat

SEQ ID NO: 1099725 - DNA, 15 bp, Homo sapiens
atctggctgggccca

SEQ ID NO: 1099726 - DNA, 15 bp, Homo sapiens
catctggctgggccc

SEQ ID NO: 1099727 - DNA, 15 bp, Homo sapiens
tcatctggctgggcc

SEQ ID NO: 1099728 - DNA, 15 bp, Homo sapiens
ctcatctggctgggc

SEQ ID NO: 1099729 - DNA, 15 bp, Homo sapiens
cctcatctggctggg

SEQ ID NO: 1099730 - DNA, 15 bp, Homo sapiens
tcctcatctggctgg

SEQ ID NO: 1099731 - DNA, 15 bp, Homo sapiens
ctcctcatctggctg

SEQ ID NO: 1099732 - DNA, 15 bp, Homo sapiens
gctcctcatctggct

SEQ ID NO: 1099733 - DNA, 15 bp, Homo sapiens
tgctcctcatctggc

SEQ ID NO: 1099734 - DNA, 15 bp, Homo sapiens
gtgctcctcatctgg

SEQ ID NO: 1099735 - DNA, 15 bp, Homo sapiens
ggtgctcctcatctg

SEQ ID NO: 1099736 - DNA, 15 bp, Homo sapiens
cggtgctcctcatct

SEQ ID NO: 1099737 - DNA, 15 bp, Homo sapiens
acggtgctcctcatc

SEQ ID NO: 1099738 - DNA, 15 bp, Homo sapiens
cacggtgctcctcat

SEQ ID NO: 1099739 - DNA, 15 bp, Homo sapiens
ccacggtgctcctca

SEQ ID NO: 1099740 - DNA, 15 bp, Homo sapiens
accacggtgctcctc

SEQ ID NO: 1099741 - DNA, 15 bp, Homo sapiens
caccacggtgctcct

SEQ ID NO: 1099742 - DNA, 15 bp, Homo sapiens
ccaccacggtgctcc

SEQ ID NO: 1099743 - DNA, 15 bp, Homo sapiens
tccaccacggtgctc

SEQ ID NO: 1099744 - DNA, 15 bp, Homo sapiens
ttccaccacggtgct

SEQ ID NO: 1099745 - DNA, 15 bp, Homo sapiens
cttccaccacggtgc

SEQ ID NO: 1099746 - DNA, 15 bp, Homo sapiens
gcttccaccacggtg

SEQ ID NO: 1099747 - DNA, 15 bp, Homo sapiens
tgcttccaccacggt

SEQ ID NO: 1099748 - DNA, 15 bp, Homo sapiens
ctgcttccaccacgg

SEQ ID NO: 1099749 - DNA, 15 bp, Homo sapiens
tctgcttccaccacg

SEQ ID NO: 1099750 - DNA, 15 bp, Homo sapiens
ctctgcttccaccac

SEQ ID NO: 1099751 - DNA, 15 bp, Homo sapiens
tctctgcttccacca

SEQ ID NO: 1099752 - DNA, 15 bp, Homo sapiens
ctctctgcttccacc

SEQ ID NO: 1099753 - DNA, 15 bp, Homo sapiens
gctctctgcttccac

SEQ ID NO: 1099754 - DNA, 15 bp, Homo sapiens
cgctctctgcttcca

SEQ ID NO: 1099755 - DNA, 15 bp, Homo sapiens
ccgctctctgcttcc

SEQ ID NO: 1099756 - DNA, 15 bp, Homo sapiens
cccgctctctgcttc

SEQ ID NO: 1099757 - DNA, 15 bp, Homo sapiens
ccccgctctctgctt

SEQ ID NO: 1099758 - DNA, 15 bp, Homo sapiens
accccgctctctgct

SEQ ID NO: 1099759 - DNA, 15 bp, Homo sapiens
caccccgctctctgc

SEQ ID NO: 1099760 - DNA, 15 bp, Homo sapiens
tcaccccgctctctg

SEQ ID NO: 1099761 - DNA, 15 bp, Homo sapiens
ctcaccccgctctct

SEQ ID NO: 1099762 - DNA, 15 bp, Homo sapiens
cctcaccccgctctc

SEQ ID NO: 1099763 - DNA, 15 bp, Homo sapiens
gcctcaccccgctct

SEQ ID NO: 1099764 - DNA, 15 bp, Homo sapiens
ggcctcaccccgctc

SEQ ID NO: 1099765 - DNA, 15 bp, Homo sapiens
gggcctcaccccgct

SEQ ID NO: 1099766 - DNA, 15 bp, Homo sapiens
ggggcctcaccccgc

SEQ ID NO: 1099767 - DNA, 15 bp, Homo sapiens
aggggcctcaccccg

SEQ ID NO: 1099768 - DNA, 15 bp, Homo sapiens
taggggcctcacccc

SEQ ID NO: 1099769 - DNA, 15 bp, Homo sapiens
ctaggggcctcaccc

SEQ ID NO: 1099770 - DNA, 15 bp, Homo sapiens
actaggggcctcacc

SEQ ID NO: 1099771 - DNA, 15 bp, Homo sapiens
cactaggggcctcac

SEQ ID NO: 1099772 - DNA, 15 bp, Homo sapiens
tcactaggggcctca

SEQ ID NO: 1099773 - DNA, 15 bp, Homo sapiens
ctcactaggggcctc

SEQ ID NO: 1099774 - DNA, 15 bp, Homo sapiens
cctcactaggggcct

SEQ ID NO: 1099775 - DNA, 15 bp, Homo sapiens
ccctcactaggggcc

SEQ ID NO: 1099776 - DNA, 15 bp, Homo sapiens
cccctcactaggggc

SEQ ID NO: 1099777 - DNA, 15 bp, Homo sapiens
ccccctcactagggg

SEQ ID NO: 1099778 - DNA, 15 bp, Homo sapiens
cccccctcactaggg

SEQ ID NO: 1099779 - DNA, 15 bp, Homo sapiens
gcccccctcactagg

SEQ ID NO: 1099780 - DNA, 15 bp, Homo sapiens
agcccccctcactag

SEQ ID NO: 1099781 - DNA, 15 bp, Homo sapiens
cagcccccctcacta

SEQ ID NO: 1099782 - DNA, 15 bp, Homo sapiens
gcagcccccctcact

SEQ ID NO: 1099783 - DNA, 15 bp, Homo sapiens
ggcagcccccctcac

SEQ ID NO: 1099784 - DNA, 15 bp, Homo sapiens
aggcagcccccctca

SEQ ID NO: 1099785 - DNA, 15 bp, Homo sapiens
caggcagcccccctc

SEQ ID NO: 1099786 - DNA, 15 bp, Homo sapiens
acaggcagcccccct

SEQ ID NO: 1099787 - DNA, 15 bp, Homo sapiens
cacaggcagcccccc

SEQ ID NO: 1099788 - DNA, 15 bp, Homo sapiens
gcacaggcagccccc

SEQ ID NO: 1099789 - DNA, 15 bp, Homo sapiens
agcacaggcagcccc

SEQ ID NO: 1099790 - DNA, 15 bp, Homo sapiens
aagcacaggcagccc

SEQ ID NO: 1099791 - DNA, 15 bp, Homo sapiens
gaagcacaggcagcc

SEQ ID NO: 1099792 - DNA, 15 bp, Homo sapiens
cgaagcacaggcagc

SEQ ID NO: 1099793 - DNA, 15 bp, Homo sapiens
ccgaagcacaggcag

SEQ ID NO: 1099794 - DNA, 15 bp, Homo sapiens
cccgaagcacaggca

SEQ ID NO: 1099795 - DNA, 15 bp, Homo sapiens
ccccgaagcacaggc

SEQ ID NO: 1099796 - DNA, 15 bp, Homo sapiens
gccccgaagcacagg

SEQ ID NO: 1099797 - DNA, 15 bp, Homo sapiens
ggccccgaagcacag

SEQ ID NO: 1099798 - DNA, 15 bp, Homo sapiens
aggccccgaagcaca

SEQ ID NO: 1099799 - DNA, 15 bp, Homo sapiens
aaggccccgaagcac

SEQ ID NO: 1099800 - DNA, 15 bp, Homo sapiens
taaggccccgaagca

SEQ ID NO: 1099801 - DNA, 15 bp, Homo sapiens
gtaaggccccgaagc

SEQ ID NO: 1099802 - DNA, 15 bp, Homo sapiens
tgtaaggccccgaag

SEQ ID NO: 1099803 - DNA, 15 bp, Homo sapiens
gtgtaaggccccgaa

SEQ ID NO: 1099804 - DNA, 15 bp, Homo sapiens
agtgtaaggccccga

SEQ ID NO: 1099805 - DNA, 15 bp, Homo sapiens
cagtgtaaggccccg

SEQ ID NO: 1099806 - DNA, 15 bp, Homo sapiens
gcagtgtaaggcccc

SEQ ID NO: 1099807 - DNA, 15 bp, Homo sapiens
agcagtgtaaggccc

SEQ ID NO: 1099808 - DNA, 15 bp, Homo sapiens
gagcagtgtaaggcc

SEQ ID NO: 1099809 - DNA, 15 bp, Homo sapiens
agagcagtgtaaggc

SEQ ID NO: 1099810 - DNA, 15 bp, Homo sapiens
aagagcagtgtaagg

SEQ ID NO: 1099811 - DNA, 15 bp, Homo sapiens
aaagagcagtgtaag

SEQ ID NO: 1099812 - DNA, 15 bp, Homo sapiens
caaagagcagtgtaa

SEQ ID NO: 1099813 - DNA, 15 bp, Homo sapiens
ccaaagagcagtgta

SEQ ID NO: 1099814 - DNA, 15 bp, Homo sapiens
cccaaagagcagtgt

SEQ ID NO: 1099815 - DNA, 15 bp, Homo sapiens
ccccaaagagcagtg

SEQ ID NO: 1099816 - DNA, 15 bp, Homo sapiens
accccaaagagcagt

SEQ ID NO: 1099817 - DNA, 15 bp, Homo sapiens
caccccaaagagcag

SEQ ID NO: 1099818 - DNA, 15 bp, Homo sapiens
gcaccccaaagagca

SEQ ID NO: 1099819 - DNA, 15 bp, Homo sapiens
tgcaccccaaagagc

SEQ ID NO: 1099820 - DNA, 15 bp, Homo sapiens
ctgcaccccaaagag

SEQ ID NO: 1099821 - DNA, 15 bp, Homo sapiens
gctgcaccccaaaga

SEQ ID NO: 1099822 - DNA, 15 bp, Homo sapiens
ggctgcaccccaaag

SEQ ID NO: 1099823 - DNA, 15 bp, Homo sapiens
tggctgcaccccaaa

SEQ ID NO: 1099824 - DNA, 15 bp, Homo sapiens
ttggctgcaccccaa

SEQ ID NO: 1099825 - DNA, 15 bp, Homo sapiens
gttggctgcacccca

SEQ ID NO: 1099826 - DNA, 15 bp, Homo sapiens
ggttggctgcacccc

SEQ ID NO: 1099827 - DNA, 15 bp, Homo sapiens
gggttggctgcaccc

SEQ ID NO: 1099828 - DNA, 15 bp, Homo sapiens
agggttggctgcacc

SEQ ID NO: 1099829 - DNA, 15 bp, Homo sapiens
aagggttggctgcac

SEQ ID NO: 1099830 - DNA, 15 bp, Homo sapiens
gaagggttggctgca

SEQ ID NO: 1099831 - DNA, 15 bp, Homo sapiens
ggaagggttggctgc

SEQ ID NO: 1099832 - DNA, 15 bp, Homo sapiens
gggaagggttggctg

SEQ ID NO: 1099833 - DNA, 15 bp, Homo sapiens
agggaagggttggct

SEQ ID NO: 1099834 - DNA, 15 bp, Homo sapiens
cagggaagggttggc

SEQ ID NO: 1099835 - DNA, 15 bp, Homo sapiens
gcagggaagggttgg

SEQ ID NO: 1099836 - DNA, 15 bp, Homo sapiens
cgcagggaagggttg

SEQ ID NO: 1099837 - DNA, 15 bp, Homo sapiens
gcgcagggaagggtt

SEQ ID NO: 1099838 - DNA, 15 bp, Homo sapiens
ggcgcagggaagggt

SEQ ID NO: 1099839 - DNA, 15 bp, Homo sapiens
tggcgcagggaaggg

SEQ ID NO: 1099840 - DNA, 15 bp, Homo sapiens
atggcgcagggaagg

SEQ ID NO: 1099841 - DNA, 15 bp, Homo sapiens
catggcgcagggaag

SEQ ID NO: 1099842 - DNA, 15 bp, Homo sapiens
ccatggcgcagggaa

SEQ ID NO: 1099843 - DNA, 15 bp, Homo sapiens
cccatggcgcaggga

SEQ ID NO: 1099844 - DNA, 15 bp, Homo sapiens
tcccatggcgcaggg

SEQ ID NO: 1099845 - DNA, 15 bp, Homo sapiens
ctcccatggcgcagg

SEQ ID NO: 1099846 - DNA, 15 bp, Homo sapiens
gctcccatggcgcag

SEQ ID NO: 1099847 - DNA, 15 bp, Homo sapiens
ggctcccatggcgca

SEQ ID NO: 1099848 - DNA, 15 bp, Homo sapiens
aggctcccatggcgc

SEQ ID NO: 1099849 - DNA, 15 bp, Homo sapiens
gaggctcccatggcg

SEQ ID NO: 1099850 - DNA, 15 bp, Homo sapiens
ggaggctcccatggc

SEQ ID NO: 1099851 - DNA, 15 bp, Homo sapiens
cggaggctcccatgg

SEQ ID NO: 1099852 - DNA, 15 bp, Homo sapiens
acggaggctcccatg

SEQ ID NO: 1099853 - DNA, 15 bp, Homo sapiens
tacggaggctcccat

SEQ ID NO: 1099854 - DNA, 15 bp, Homo sapiens
gtacggaggctccca

SEQ ID NO: 1099855 - DNA, 15 bp, Homo sapiens
ggtacggaggctccc

SEQ ID NO: 1099856 - DNA, 15 bp, Homo sapiens
gggtacggaggctcc

SEQ ID NO: 1099857 - DNA, 15 bp, Homo sapiens
tgggtacggaggctc

SEQ ID NO: 1099858 - DNA, 15 bp, Homo sapiens
gtgggtacggaggct

SEQ ID NO: 1099859 - DNA, 15 bp, Homo sapiens
ggtgggtacggaggc

SEQ ID NO: 1099860 - DNA, 15 bp, Homo sapiens
aggtgggtacggagg

SEQ ID NO: 1099861 - DNA, 15 bp, Homo sapiens
aaggtgggtacggag

SEQ ID NO: 1099862 - DNA, 15 bp, Homo sapiens
gaaggtgggtacgga

SEQ ID NO: 1099863 - DNA, 15 bp, Homo sapiens
ggaaggtgggtacgg

SEQ ID NO: 1099864 - DNA, 15 bp, Homo sapiens
gggaaggtgggtacg

SEQ ID NO: 1099865 - DNA, 15 bp, Homo sapiens
agggaaggtgggtac

SEQ ID NO: 1099866 - DNA, 15 bp, Homo sapiens
cagggaaggtgggta

SEQ ID NO: 1099867 - DNA, 15 bp, Homo sapiens
acagggaaggtgggt

SEQ ID NO: 1099868 - DNA, 15 bp, Homo sapiens
cacagggaaggtggg

SEQ ID NO: 1099869 - DNA, 15 bp, Homo sapiens
gcacagggaaggtgg

SEQ ID NO: 1099870 - DNA, 15 bp, Homo sapiens
tgcacagggaaggtg

SEQ ID NO: 1099871 - DNA, 15 bp, Homo sapiens
ctgcacagggaaggt

SEQ ID NO: 1099872 - DNA, 15 bp, Homo sapiens
actgcacagggaagg

SEQ ID NO: 1099873 - DNA, 15 bp, Homo sapiens
gactgcacagggaag

SEQ ID NO: 1099874 - DNA, 15 bp, Homo sapiens
tgactgcacagggaa

SEQ ID NO: 1099875 - DNA, 15 bp, Homo sapiens
gtgactgcacaggga

SEQ ID NO: 1099876 - DNA, 15 bp, Homo sapiens
agtgactgcacaggg

SEQ ID NO: 1099877 - DNA, 15 bp, Homo sapiens
gagtgactgcacagg

SEQ ID NO: 1099878 - DNA, 15 bp, Homo sapiens
ggagtgactgcacag

SEQ ID NO: 1099879 - DNA, 15 bp, Homo sapiens
gggagtgactgcaca

SEQ ID NO: 1099880 - DNA, 15 bp, Homo sapiens
ggggagtgactgcac

SEQ ID NO: 1099881 - DNA, 15 bp, Homo sapiens
gggggagtgactgca

SEQ ID NO: 1099882 - DNA, 15 bp, Homo sapiens
cgggggagtgactgc

SEQ ID NO: 1099883 - DNA, 15 bp, Homo sapiens
gcgggggagtgactg

SEQ ID NO: 1099884 - DNA, 15 bp, Homo sapiens
tgcgggggagtgact

SEQ ID NO: 1099885 - DNA, 15 bp, Homo sapiens
ctgcgggggagtgac

SEQ ID NO: 1099886 - DNA, 15 bp, Homo sapiens
actgcgggggagtga

SEQ ID NO: 1099887 - DNA, 15 bp, Homo sapiens
gactgcgggggagtg

SEQ ID NO: 1099888 - DNA, 15 bp, Homo sapiens
agactgcgggggagt

SEQ ID NO: 1099889 - DNA, 15 bp, Homo sapiens
gagactgcgggggag

SEQ ID NO: 1099890 - DNA, 15 bp, Homo sapiens
ggagactgcggggga

SEQ ID NO: 1099891 - DNA, 15 bp, Homo sapiens
aggagactgcggggg

SEQ ID NO: 1099892 - DNA, 15 bp, Homo sapiens
caggagactgcgggg

SEQ ID NO: 1099893 - DNA, 15 bp, Homo sapiens
gcaggagactgcggg

SEQ ID NO: 1099894 - DNA, 15 bp, Homo sapiens
agcaggagactgcgg

SEQ ID NO: 1099895 - DNA, 15 bp, Homo sapiens
gagcaggagactgcg

SEQ ID NO: 1099896 - DNA, 15 bp, Homo sapiens
tgagcaggagactgc

SEQ ID NO: 1099897 - DNA, 15 bp, Homo sapiens
ctgagcaggagactg

SEQ ID NO: 1099898 - DNA, 15 bp, Homo sapiens
tctgagcaggagact

SEQ ID NO: 1099899 - DNA, 15 bp, Homo sapiens
gtctgagcaggagac

SEQ ID NO: 1099900 - DNA, 15 bp, Homo sapiens
ggtctgagcaggaga

SEQ ID NO: 1099901 - DNA, 15 bp, Homo sapiens
gggtctgagcaggag

SEQ ID NO: 1099902 - DNA, 15 bp, Homo sapiens
agggtctgagcagga

SEQ ID NO: 1099903 - DNA, 15 bp, Homo sapiens
gagggtctgagcagg

SEQ ID NO: 1099904 - DNA, 15 bp, Homo sapiens
ggagggtctgagcag

SEQ ID NO: 1099905 - DNA, 15 bp, Homo sapiens
aggagggtctgagca

SEQ ID NO: 1099906 - DNA, 15 bp, Homo sapiens
gaggagggtctgagc

SEQ ID NO: 1099907 - DNA, 15 bp, Homo sapiens
tgaggagggtctgag

SEQ ID NO: 1099908 - DNA, 15 bp, Homo sapiens
gtgaggagggtctga

SEQ ID NO: 1099909 - DNA, 15 bp, Homo sapiens
ggtgaggagggtctg

SEQ ID NO: 1099910 - DNA, 15 bp, Homo sapiens
gggtgaggagggtct

SEQ ID NO: 1099911 - DNA, 15 bp, Homo sapiens
ggggtgaggagggtc

SEQ ID NO: 1099912 - DNA, 15 bp, Homo sapiens
gggggtgaggagggt

SEQ ID NO: 1099913 - DNA, 15 bp, Homo sapiens
ggggggtgaggaggg

SEQ ID NO: 1099914 - DNA, 15 bp, Homo sapiens
tggggggtgaggagg

SEQ ID NO: 1099915 - DNA, 15 bp, Homo sapiens
ctggggggtgaggag

SEQ ID NO: 1099916 - DNA, 15 bp, Homo sapiens
cctggggggtgagga

SEQ ID NO: 1099917 - DNA, 15 bp, Homo sapiens
acctggggggtgagg

SEQ ID NO: 1099918 - DNA, 15 bp, Homo sapiens
aacctggggggtgag

SEQ ID NO: 1099919 - DNA, 15 bp, Homo sapiens
gaacctggggggtga

SEQ ID NO: 1099920 - DNA, 15 bp, Homo sapiens
tgaacctggggggtg

SEQ ID NO: 1099921 - DNA, 15 bp, Homo sapiens
ttgaacctggggggt

SEQ ID NO: 1099922 - DNA, 15 bp, Homo sapiens
cttgaacctgggggg

SEQ ID NO: 1099923 - DNA, 15 bp, Homo sapiens
gcttgaacctggggg

SEQ ID NO: 1099924 - DNA, 15 bp, Homo sapiens
tgcttgaacctgggg

SEQ ID NO: 1099925 - DNA, 15 bp, Homo sapiens
ctgcttgaacctggg

SEQ ID NO: 1099926 - DNA, 15 bp, Homo sapiens
gctgcttgaacctgg

SEQ ID NO: 1099927 - DNA, 15 bp, Homo sapiens
agctgcttgaacctg

SEQ ID NO: 1099928 - DNA, 15 bp, Homo sapiens
aagctgcttgaacct

SEQ ID NO: 1099929 - DNA, 15 bp, Homo sapiens
gaagctgcttgaacc

SEQ ID NO: 1099930 - DNA, 15 bp, Homo sapiens
agaagctgcttgaac

SEQ ID NO: 1099931 - DNA, 15 bp, Homo sapiens
gagaagctgcttgaa

SEQ ID NO: 1099932 - DNA, 15 bp, Homo sapiens
ggagaagctgcttga

SEQ ID NO: 1099933 - DNA, 15 bp, Homo sapiens
aggagaagctgcttg

SEQ ID NO: 1099934 - DNA, 15 bp, Homo sapiens
caggagaagctgctt

SEQ ID NO: 1099935 - DNA, 15 bp, Homo sapiens
tcaggagaagctgct

SEQ ID NO: 1099936 - DNA, 15 bp, Homo sapiens
gtcaggagaagctgc

SEQ ID NO: 1099937 - DNA, 15 bp, Homo sapiens
ggtcaggagaagctg

SEQ ID NO: 1099938 - DNA, 15 bp, Homo sapiens
gggtcaggagaagct

SEQ ID NO: 1099939 - DNA, 15 bp, Homo sapiens
tgggtcaggagaagc

SEQ ID NO: 1099940 - DNA, 15 bp, Homo sapiens
ctgggtcaggagaag

SEQ ID NO: 1099941 - DNA, 15 bp, Homo sapiens
cctgggtcaggagaa

SEQ ID NO: 1099942 - DNA, 15 bp, Homo sapiens
gcctgggtcaggaga

SEQ ID NO: 1099943 - DNA, 15 bp, Homo sapiens
tgcctgggtcaggag

SEQ ID NO: 1099944 - DNA, 15 bp, Homo sapiens
ctgcctgggtcagga

SEQ ID NO: 1099945 - DNA, 15 bp, Homo sapiens
tctgcctgggtcagg

SEQ ID NO: 1099946 - DNA, 15 bp, Homo sapiens
gtctgcctgggtcag

SEQ ID NO: 1099947 - DNA, 15 bp, Homo sapiens
tgtctgcctgggtca

SEQ ID NO: 1099948 - DNA, 15 bp, Homo sapiens
ttgtctgcctgggtc

SEQ ID NO: 1099949 - DNA, 15 bp, Homo sapiens
cttgtctgcctgggt

SEQ ID NO: 1099950 - DNA, 15 bp, Homo sapiens
acttgtctgcctggg

SEQ ID NO: 1099951 - DNA, 15 bp, Homo sapiens
aacttgtctgcctgg

SEQ ID NO: 1099952 - DNA, 15 bp, Homo sapiens
gaacttgtctgcctg

SEQ ID NO: 1099953 - DNA, 15 bp, Homo sapiens
agaacttgtctgcct

SEQ ID NO: 1099954 - DNA, 15 bp, Homo sapiens
gagaacttgtctgcc

SEQ ID NO: 1099955 - DNA, 15 bp, Homo sapiens
agagaacttgtctgc

SEQ ID NO: 1099956 - DNA, 15 bp, Homo sapiens
gagagaacttgtctg

SEQ ID NO: 1099957 - DNA, 15 bp, Homo sapiens
ggagagaacttgtct

SEQ ID NO: 1099958 - DNA, 15 bp, Homo sapiens
tggagagaacttgtc

SEQ ID NO: 1099959 - DNA, 15 bp, Homo sapiens
ctggagagaacttgt

SEQ ID NO: 1099960 - DNA, 15 bp, Homo sapiens
gctggagagaacttg

SEQ ID NO: 1099961 - DNA, 15 bp, Homo sapiens
agctggagagaactt

SEQ ID NO: 1099962 - DNA, 15 bp, Homo sapiens
cagctggagagaact

SEQ ID NO: 1099963 - DNA, 15 bp, Homo sapiens
tcagctggagagaac

SEQ ID NO: 1099964 - DNA, 15 bp, Homo sapiens
ctcagctggagagaa

SEQ ID NO: 1099965 - DNA, 15 bp, Homo sapiens
cctcagctggagaga

SEQ ID NO: 1099966 - DNA, 15 bp, Homo sapiens
acctcagctggagag

SEQ ID NO: 1099967 - DNA, 15 bp, Homo sapiens
cacctcagctggaga

SEQ ID NO: 1099968 - DNA, 15 bp, Homo sapiens
tcacctcagctggag

SEQ ID NO: 1099969 - DNA, 15 bp, Homo sapiens
ctcacctcagctgga

SEQ ID NO: 1099970 - DNA, 15 bp, Homo sapiens
cctcacctcagctgg

SEQ ID NO: 1099971 - DNA, 15 bp, Homo sapiens
gcctcacctcagctg

SEQ ID NO: 1099972 - DNA, 15 bp, Homo sapiens
agcctcacctcagct

SEQ ID NO: 1099973 - DNA, 15 bp, Homo sapiens
cagcctcacctcagc

SEQ ID NO: 1099974 - DNA, 15 bp, Homo sapiens
gcagcctcacctcag

SEQ ID NO: 1099975 - DNA, 15 bp, Homo sapiens
ggcagcctcacctca

SEQ ID NO: 1099976 - DNA, 15 bp, Homo sapiens
gggcagcctcacctc

SEQ ID NO: 1099977 - DNA, 15 bp, Homo sapiens
tgggcagcctcacct

SEQ ID NO: 1099978 - DNA, 15 bp, Homo sapiens
ctgggcagcctcacc

SEQ ID NO: 1099979 - DNA, 15 bp, Homo sapiens
gctgggcagcctcac

SEQ ID NO: 1099980 - DNA, 15 bp, Homo sapiens
ggctgggcagcctca

SEQ ID NO: 1099981 - DNA, 15 bp, Homo sapiens
gggctgggcagcctc

SEQ ID NO: 1099982 - DNA, 15 bp, Homo sapiens
ggggctgggcagcct

SEQ ID NO: 1099983 - DNA, 15 bp, Homo sapiens
aggggctgggcagcc

SEQ ID NO: 1099984 - DNA, 15 bp, Homo sapiens
aaggggctgggcagc

SEQ ID NO: 1099985 - DNA, 15 bp, Homo sapiens
gaaggggctgggcag

SEQ ID NO: 1099986 - DNA, 15 bp, Homo sapiens
tgaaggggctgggca

SEQ ID NO: 1099987 - DNA, 15 bp, Homo sapiens
ttgaaggggctgggc

SEQ ID NO: 1099988 - DNA, 15 bp, Homo sapiens
attgaaggggctggg

SEQ ID NO: 1099989 - DNA, 15 bp, Homo sapiens
tattgaaggggctgg

SEQ ID NO: 1099990 - DNA, 15 bp, Homo sapiens
gtattgaaggggctg

SEQ ID NO: 1099991 - DNA, 15 bp, Homo sapiens
agtattgaaggggct

SEQ ID NO: 1099992 - DNA, 15 bp, Homo sapiens
gagtattgaaggggc

SEQ ID NO: 1099993 - DNA, 15 bp, Homo sapiens
tgagtattgaagggg

SEQ ID NO: 1099994 - DNA, 15 bp, Homo sapiens
atgagtattgaaggg

SEQ ID NO: 1099995 - DNA, 15 bp, Homo sapiens
gatgagtattgaagg

SEQ ID NO: 1099996 - DNA, 15 bp, Homo sapiens
ggatgagtattgaag

SEQ ID NO: 1099997 - DNA, 15 bp, Homo sapiens
gggatgagtattgaa

SEQ ID NO: 1099998 - DNA, 15 bp, Homo sapiens
ggggatgagtattga

SEQ ID NO: 1099999 - DNA, 15 bp, Homo sapiens
tggggatgagtattg

SEQ ID NO: 1100000 - DNA, 15 bp, Homo sapiens
ctggggatgagtatt

SEQ ID NO: 1100001 - DNA, 15 bp, Homo sapiens
gctggggatgagtat

SEQ ID NO: 1100002 - DNA, 15 bp, Homo sapiens
tgctggggatgagta

SEQ ID NO: 1100003 - DNA, 15 bp, Homo sapiens
gtgctggggatgagt

SEQ ID NO: 1100004 - DNA, 15 bp, Homo sapiens
ggtgctggggatgag

SEQ ID NO: 1100005 - DNA, 15 bp, Homo sapiens
aggtgctggggatga

SEQ ID NO: 1100006 - DNA, 15 bp, Homo sapiens
aaggtgctggggatg

SEQ ID NO: 1100007 - DNA, 15 bp, Homo sapiens
gaaggtgctggggat

SEQ ID NO: 1100008 - DNA, 15 bp, Homo sapiens
agaaggtgctgggga

SEQ ID NO: 1100009 - DNA, 15 bp, Homo sapiens
gagaaggtgctgggg

SEQ ID NO: 1100010 - DNA, 15 bp, Homo sapiens
agagaaggtgctggg

SEQ ID NO: 1100011 - DNA, 15 bp, Homo sapiens
cagagaaggtgctgg

SEQ ID NO: 1100012 - DNA, 15 bp, Homo sapiens
ccagagaaggtgctg

SEQ ID NO: 1100013 - DNA, 15 bp, Homo sapiens
cccagagaaggtgct

SEQ ID NO: 1100014 - DNA, 15 bp, Homo sapiens
gcccagagaaggtgc

SEQ ID NO: 1100015 - DNA, 15 bp, Homo sapiens
ggcccagagaaggtg

SEQ ID NO: 1100016 - DNA, 15 bp, Homo sapiens
aggcccagagaaggt

SEQ ID NO: 1100017 - DNA, 15 bp, Homo sapiens
aaggcccagagaagg

SEQ ID NO: 1100018 - DNA, 15 bp, Homo sapiens
gaaggcccagagaag

SEQ ID NO: 1100019 - DNA, 15 bp, Homo sapiens
tgaaggcccagagaa

SEQ ID NO: 1100020 - DNA, 15 bp, Homo sapiens
gtgaaggcccagaga

SEQ ID NO: 1100021 - DNA, 15 bp, Homo sapiens
ggtgaaggcccagag

SEQ ID NO: 1100022 - DNA, 15 bp, Homo sapiens
gggtgaaggcccaga

SEQ ID NO: 1100023 - DNA, 15 bp, Homo sapiens
tgggtgaaggcccag

SEQ ID NO: 1100024 - DNA, 15 bp, Homo sapiens
atgggtgaaggccca

SEQ ID NO: 1100025 - DNA, 15 bp, Homo sapiens
catgggtgaaggccc

SEQ ID NO: 1100026 - DNA, 15 bp, Homo sapiens
tcatgggtgaaggcc

SEQ ID NO: 1100027 - DNA, 15 bp, Homo sapiens
gtcatgggtgaaggc

SEQ ID NO: 1100028 - DNA, 15 bp, Homo sapiens
ggtcatgggtgaagg

SEQ ID NO: 1100029 - DNA, 15 bp, Homo sapiens
gggtcatgggtgaag

SEQ ID NO: 1100030 - DNA, 15 bp, Homo sapiens
tgggtcatgggtgaa

SEQ ID NO: 1100031 - DNA, 15 bp, Homo sapiens
ctgggtcatgggtga

SEQ ID NO: 1100032 - DNA, 15 bp, Homo sapiens
tctgggtcatgggtg

SEQ ID NO: 1100033 - DNA, 15 bp, Homo sapiens
ctctgggtcatgggt

SEQ ID NO: 1100034 - DNA, 15 bp, Homo sapiens
gctctgggtcatggg

SEQ ID NO: 1100035 - DNA, 15 bp, Homo sapiens
ggctctgggtcatgg

SEQ ID NO: 1100036 - DNA, 15 bp, Homo sapiens
gggctctgggtcatg

SEQ ID NO: 1100037 - DNA, 15 bp, Homo sapiens
tgggctctgggtcat

SEQ ID NO: 1100038 - DNA, 15 bp, Homo sapiens
ctgggctctgggtca

SEQ ID NO: 1100039 - DNA, 15 bp, Homo sapiens
actgggctctgggtc

SEQ ID NO: 1100040 - DNA, 15 bp, Homo sapiens
tactgggctctgggt

SEQ ID NO: 1100041 - DNA, 15 bp, Homo sapiens
gtactgggctctggg

SEQ ID NO: 1100042 - DNA, 15 bp, Homo sapiens
ggtactgggctctgg

SEQ ID NO: 1100043 - DNA, 15 bp, Homo sapiens
tggtactgggctctg

SEQ ID NO: 1100044 - DNA, 15 bp, Homo sapiens
ctggtactgggctct

SEQ ID NO: 1100045 - DNA, 15 bp, Homo sapiens
actggtactgggctc

SEQ ID NO: 1100046 - DNA, 15 bp, Homo sapiens
cactggtactgggct

SEQ ID NO: 1100047 - DNA, 15 bp, Homo sapiens
tcactggtactgggc

SEQ ID NO: 1100048 - DNA, 15 bp, Homo sapiens
ctcactggtactggg

SEQ ID NO: 1100049 - DNA, 15 bp, Homo sapiens
cctcactggtactgg

SEQ ID NO: 1100050 - DNA, 15 bp, Homo sapiens
gcctcactggtactg

SEQ ID NO: 1100051 - DNA, 15 bp, Homo sapiens
tgcctcactggtact

SEQ ID NO: 1100052 - DNA, 15 bp, Homo sapiens
ctgcctcactggtac

SEQ ID NO: 1100053 - DNA, 15 bp, Homo sapiens
actgcctcactggta

SEQ ID NO: 1100054 - DNA, 15 bp, Homo sapiens
aactgcctcactggt

SEQ ID NO: 1100055 - DNA, 15 bp, Homo sapiens
caactgcctcactgg

SEQ ID NO: 1100056 - DNA, 15 bp, Homo sapiens
gcaactgcctcactg

SEQ ID NO: 1100057 - DNA, 15 bp, Homo sapiens
agcaactgcctcact

SEQ ID NO: 1100058 - DNA, 15 bp, Homo sapiens
cagcaactgcctcac

SEQ ID NO: 1100059 - DNA, 15 bp, Homo sapiens
ccagcaactgcctca

SEQ ID NO: 1100060 - DNA, 15 bp, Homo sapiens
tccagcaactgcctc

SEQ ID NO: 1100061 - DNA, 15 bp, Homo sapiens
ttccagcaactgcct

SEQ ID NO: 1100062 - DNA, 15 bp, Homo sapiens
cttccagcaactgcc

SEQ ID NO: 1100063 - DNA, 15 bp, Homo sapiens
ccttccagcaactgc

SEQ ID NO: 1100064 - DNA, 15 bp, Homo sapiens
cccttccagcaactg

SEQ ID NO: 1100065 - DNA, 15 bp, Homo sapiens
acccttccagcaact

SEQ ID NO: 1100066 - DNA, 15 bp, Homo sapiens
cacccttccagcaac

SEQ ID NO: 1100067 - DNA, 15 bp, Homo sapiens
tcacccttccagcaa

SEQ ID NO: 1100068 - DNA, 15 bp, Homo sapiens
ctcacccttccagca

SEQ ID NO: 1100069 - DNA, 15 bp, Homo sapiens
gctcacccttccagc

SEQ ID NO: 1100070 - DNA, 15 bp, Homo sapiens
ggctcacccttccag

SEQ ID NO: 1100071 - DNA, 15 bp, Homo sapiens
cggctcacccttcca

SEQ ID NO: 1100072 - DNA, 15 bp, Homo sapiens
tcggctcacccttcc

SEQ ID NO: 1100073 - DNA, 15 bp, Homo sapiens
ctcggctcacccttc

SEQ ID NO: 1100074 - DNA, 15 bp, Homo sapiens
cctcggctcaccctt

SEQ ID NO: 1100075 - DNA, 15 bp, Homo sapiens
ccctcggctcaccct

SEQ ID NO: 1100076 - DNA, 15 bp, Homo sapiens
gccctcggctcaccc

SEQ ID NO: 1100077 - DNA, 15 bp, Homo sapiens
ggccctcggctcacc

SEQ ID NO: 1100078 - DNA, 15 bp, Homo sapiens
gggccctcggctcac

SEQ ID NO: 1100079 - DNA, 15 bp, Homo sapiens
agggccctcggctca

SEQ ID NO: 1100080 - DNA, 15 bp, Homo sapiens
aagggccctcggctc

SEQ ID NO: 1100081 - DNA, 15 bp, Homo sapiens
gaagggccctcggct

SEQ ID NO: 1100082 - DNA, 15 bp, Homo sapiens
agaagggccctcggc

SEQ ID NO: 1100083 - DNA, 15 bp, Homo sapiens
cagaagggccctcgg

SEQ ID NO: 1100084 - DNA, 15 bp, Homo sapiens
ccagaagggccctcg

SEQ ID NO: 1100085 - DNA, 15 bp, Homo sapiens
tccagaagggccctc

SEQ ID NO: 1100086 - DNA, 15 bp, Homo sapiens
ctccagaagggccct

SEQ ID NO: 1100087 - DNA, 15 bp, Homo sapiens
cctccagaagggccc

SEQ ID NO: 1100088 - DNA, 15 bp, Homo sapiens
tcctccagaagggcc

SEQ ID NO: 1100089 - DNA, 15 bp, Homo sapiens
ctcctccagaagggc

SEQ ID NO: 1100090 - DNA, 15 bp, Homo sapiens
cctcctccagaaggg

SEQ ID NO: 1100091 - DNA, 15 bp, Homo sapiens
acctcctccagaagg

SEQ ID NO: 1100092 - DNA, 15 bp, Homo sapiens
cacctcctccagaag

SEQ ID NO: 1100093 - DNA, 15 bp, Homo sapiens
gcacctcctccagaa

SEQ ID NO: 1100094 - DNA, 15 bp, Homo sapiens
ggcacctcctccaga

SEQ ID NO: 1100095 - DNA, 15 bp, Homo sapiens
tggcacctcctccag

SEQ ID NO: 1100096 - DNA, 15 bp, Homo sapiens
atggcacctcctcca

SEQ ID NO: 1100097 - DNA, 15 bp, Homo sapiens
gatggcacctcctcc

SEQ ID NO: 1100098 - DNA, 15 bp, Homo sapiens
agatggcacctcctc

SEQ ID NO: 1100099 - DNA, 15 bp, Homo sapiens
gagatggcacctcct

SEQ ID NO: 1100100 - DNA, 15 bp, Homo sapiens
agagatggcacctcc

SEQ ID NO: 1100101 - DNA, 15 bp, Homo sapiens
cagagatggcacctc

SEQ ID NO: 1100102 - DNA, 15 bp, Homo sapiens
acagagatggcacct

SEQ ID NO: 1100103 - DNA, 15 bp, Homo sapiens
aacagagatggcacc

SEQ ID NO: 1100104 - DNA, 15 bp, Homo sapiens
caacagagatggcac

SEQ ID NO: 1100105 - DNA, 15 bp, Homo sapiens
tcaacagagatggca

SEQ ID NO: 1100106 - DNA, 15 bp, Homo sapiens
ctcaacagagatggc

SEQ ID NO: 1100107 - DNA, 15 bp, Homo sapiens
tctcaacagagatgg

SEQ ID NO: 1100108 - DNA, 15 bp, Homo sapiens
gtctcaacagagatg

SEQ ID NO: 1100109 - DNA, 15 bp, Homo sapiens
ggtctcaacagagat

SEQ ID NO: 1100110 - DNA, 15 bp, Homo sapiens
aggtctcaacagaga

SEQ ID NO: 1100111 - DNA, 15 bp, Homo sapiens
taggtctcaacagag

SEQ ID NO: 1100112 - DNA, 15 bp, Homo sapiens
ctaggtctcaacaga

SEQ ID NO: 1100113 - DNA, 15 bp, Homo sapiens
tctaggtctcaacag

SEQ ID NO: 1100114 - DNA, 15 bp, Homo sapiens
ctctaggtctcaaca

SEQ ID NO: 1100115 - DNA, 15 bp, Homo sapiens
cctctaggtctcaac

SEQ ID NO: 1100116 - DNA, 15 bp, Homo sapiens
ccctctaggtctcaa

SEQ ID NO: 1100117 - DNA, 15 bp, Homo sapiens
accctctaggtctca

SEQ ID NO: 1100118 - DNA, 15 bp, Homo sapiens
taccctctaggtctc

SEQ ID NO: 1100119 - DNA, 15 bp, Homo sapiens
ttaccctctaggtct

SEQ ID NO: 1100120 - DNA, 15 bp, Homo sapiens
tttaccctctaggtc

SEQ ID NO: 1100121 - DNA, 15 bp, Homo sapiens
ctttaccctctaggt

SEQ ID NO: 1100122 - DNA, 15 bp, Homo sapiens
tctttaccctctagg

SEQ ID NO: 1100123 - DNA, 15 bp, Homo sapiens
atctttaccctctag

SEQ ID NO: 1100124 - DNA, 15 bp, Homo sapiens
catctttaccctcta

SEQ ID NO: 1100125 - DNA, 15 bp, Homo sapiens
acatctttaccctct

SEQ ID NO: 1100126 - DNA, 15 bp, Homo sapiens
cacatctttaccctc

SEQ ID NO: 1100127 - DNA, 15 bp, Homo sapiens
ccacatctttaccct

SEQ ID NO: 1100128 - DNA, 15 bp, Homo sapiens
tccacatctttaccc

SEQ ID NO: 1100129 - DNA, 15 bp, Homo sapiens
ctccacatctttacc

SEQ ID NO: 1100130 - DNA, 15 bp, Homo sapiens
actccacatctttac

SEQ ID NO: 1100131 - DNA, 15 bp, Homo sapiens
gactccacatcttta

SEQ ID NO: 1100132 - DNA, 15 bp, Homo sapiens
tgactccacatcttt

SEQ ID NO: 1100133 - DNA, 15 bp, Homo sapiens
ctgactccacatctt

SEQ ID NO: 1100134 - DNA, 15 bp, Homo sapiens
tctgactccacatct

SEQ ID NO: 1100135 - DNA, 15 bp, Homo sapiens
ttctgactccacatc

SEQ ID NO: 1100136 - DNA, 15 bp, Homo sapiens
tttctgactccacat

SEQ ID NO: 1100137 - DNA, 15 bp, Homo sapiens
ttttctgactccaca

SEQ ID NO: 1100138 - DNA, 15 bp, Homo sapiens
cttttctgactccac

SEQ ID NO: 1100139 - DNA, 15 bp, Homo sapiens
tcttttctgactcca

SEQ ID NO: 1100140 - DNA, 15 bp, Homo sapiens
ctcttttctgactcc

SEQ ID NO: 1100141 - DNA, 15 bp, Homo sapiens
cctcttttctgactc

SEQ ID NO: 1100142 - DNA, 15 bp, Homo sapiens
ccctcttttctgact

SEQ ID NO: 1100143 - DNA, 15 bp, Homo sapiens
gccctcttttctgac

SEQ ID NO: 1100144 - DNA, 15 bp, Homo sapiens
tgccctcttttctga

SEQ ID NO: 1100145 - DNA, 15 bp, Homo sapiens
ctgccctcttttctg

SEQ ID NO: 1100146 - DNA, 15 bp, Homo sapiens
cctgccctcttttct

SEQ ID NO: 1100147 - DNA, 15 bp, Homo sapiens
ccctgccctcttttc

SEQ ID NO: 1100148 - DNA, 15 bp, Homo sapiens
accctgccctctttt

SEQ ID NO: 1100149 - DNA, 15 bp, Homo sapiens
caccctgccctcttt

SEQ ID NO: 1100150 - DNA, 15 bp, Homo sapiens
gcaccctgccctctt

SEQ ID NO: 1100151 - DNA, 15 bp, Homo sapiens
cgcaccctgccctct

SEQ ID NO: 1100152 - DNA, 15 bp, Homo sapiens
gcgcaccctgccctc

SEQ ID NO: 1100153 - DNA, 15 bp, Homo sapiens
ggcgcaccctgccct

SEQ ID NO: 1100154 - DNA, 15 bp, Homo sapiens
tggcgcaccctgccc

SEQ ID NO: 1100155 - DNA, 15 bp, Homo sapiens
ctggcgcaccctgcc

SEQ ID NO: 1100156 - DNA, 15 bp, Homo sapiens
cctggcgcaccctgc

SEQ ID NO: 1100157 - DNA, 15 bp, Homo sapiens
gcctggcgcaccctg

SEQ ID NO: 1100158 - DNA, 15 bp, Homo sapiens
tgcctggcgcaccct

SEQ ID NO: 1100159 - DNA, 15 bp, Homo sapiens
ctgcctggcgcaccc

SEQ ID NO: 1100160 - DNA, 15 bp, Homo sapiens
cctgcctggcgcacc

SEQ ID NO: 1100161 - DNA, 15 bp, Homo sapiens
ccctgcctggcgcac

SEQ ID NO: 1100162 - DNA, 15 bp, Homo sapiens
tccctgcctggcgca

SEQ ID NO: 1100163 - DNA, 15 bp, Homo sapiens
ctccctgcctggcgc

SEQ ID NO: 1100164 - DNA, 15 bp, Homo sapiens
tctccctgcctggcg

SEQ ID NO: 1100165 - DNA, 15 bp, Homo sapiens
gtctccctgcctggc

SEQ ID NO: 1100166 - DNA, 15 bp, Homo sapiens
agtctccctgcctgg

SEQ ID NO: 1100167 - DNA, 15 bp, Homo sapiens
cagtctccctgcctg

SEQ ID NO: 1100168 - DNA, 15 bp, Homo sapiens
acagtctccctgcct

SEQ ID NO: 1100169 - DNA, 15 bp, Homo sapiens
cacagtctccctgcc

SEQ ID NO: 1100170 - DNA, 15 bp, Homo sapiens
gcacagtctccctgc

SEQ ID NO: 1100171 - DNA, 15 bp, Homo sapiens
tgcacagtctccctg

SEQ ID NO: 1100172 - DNA, 15 bp, Homo sapiens
gtgcacagtctccct

SEQ ID NO: 1100173 - DNA, 15 bp, Homo sapiens
tgtgcacagtctccc

SEQ ID NO: 1100174 - DNA, 15 bp, Homo sapiens
ctgtgcacagtctcc

SEQ ID NO: 1100175 - DNA, 15 bp, Homo sapiens
tctgtgcacagtctc

SEQ ID NO: 1100176 - DNA, 15 bp, Homo sapiens
gtctgtgcacagtct

SEQ ID NO: 1100177 - DNA, 15 bp, Homo sapiens
ggtctgtgcacagtc

SEQ ID NO: 1100178 - DNA, 15 bp, Homo sapiens
aggtctgtgcacagt

SEQ ID NO: 1100179 - DNA, 15 bp, Homo sapiens
caggtctgtgcacag

SEQ ID NO: 1100180 - DNA, 15 bp, Homo sapiens
ccaggtctgtgcaca

SEQ ID NO: 1100181 - DNA, 15 bp, Homo sapiens
cccaggtctgtgcac

SEQ ID NO: 1100182 - DNA, 15 bp, Homo sapiens
ccccaggtctgtgca

SEQ ID NO: 1100183 - DNA, 15 bp, Homo sapiens
cccccaggtctgtgc

SEQ ID NO: 1100184 - DNA, 15 bp, Homo sapiens
ccccccaggtctgtg

SEQ ID NO: 1100185 - DNA, 15 bp, Homo sapiens
tccccccaggtctgt

SEQ ID NO: 1100186 - DNA, 15 bp, Homo sapiens
ttccccccaggtctg

SEQ ID NO: 1100187 - DNA, 15 bp, Homo sapiens
cttccccccaggtct

SEQ ID NO: 1100188 - DNA, 15 bp, Homo sapiens
acttccccccaggtc

SEQ ID NO: 1100189 - DNA, 15 bp, Homo sapiens
cacttccccccaggt

SEQ ID NO: 1100190 - DNA, 15 bp, Homo sapiens
ccacttccccccagg

SEQ ID NO: 1100191 - DNA, 15 bp, Homo sapiens
tccacttccccccag

SEQ ID NO: 1100192 - DNA, 15 bp, Homo sapiens
atccacttcccccca

SEQ ID NO: 1100193 - DNA, 15 bp, Homo sapiens
tatccacttcccccc

SEQ ID NO: 1100194 - DNA, 15 bp, Homo sapiens
ctatccacttccccc

SEQ ID NO: 1100195 - DNA, 15 bp, Homo sapiens
cctatccacttcccc

SEQ ID NO: 1100196 - DNA, 15 bp, Homo sapiens
ccctatccacttccc

SEQ ID NO: 1100197 - DNA, 15 bp, Homo sapiens
tccctatccacttcc

SEQ ID NO: 1100198 - DNA, 15 bp, Homo sapiens
ctccctatccacttc

SEQ ID NO: 1100199 - DNA, 15 bp, Homo sapiens
tctccctatccactt

SEQ ID NO: 1100200 - DNA, 15 bp, Homo sapiens
ctctccctatccact

SEQ ID NO: 1100201 - DNA, 15 bp, Homo sapiens
cctctccctatccac

SEQ ID NO: 1100202 - DNA, 15 bp, Homo sapiens
acctctccctatcca

SEQ ID NO: 1100203 - DNA, 15 bp, Homo sapiens
aacctctccctatcc

SEQ ID NO: 1100204 - DNA, 15 bp, Homo sapiens
aaacctctccctatc

SEQ ID NO: 1100205 - DNA, 15 bp, Homo sapiens
gaaacctctccctat

SEQ ID NO: 1100206 - DNA, 15 bp, Homo sapiens
cgaaacctctcccta

SEQ ID NO: 1100207 - DNA, 15 bp, Homo sapiens
acgaaacctctccct

SEQ ID NO: 1100208 - DNA, 15 bp, Homo sapiens
tacgaaacctctccc

SEQ ID NO: 1100209 - DNA, 15 bp, Homo sapiens
gtacgaaacctctcc

SEQ ID NO: 1100210 - DNA, 15 bp, Homo sapiens
tgtacgaaacctctc

SEQ ID NO: 1100211 - DNA, 15 bp, Homo sapiens
gtgtacgaaacctct

SEQ ID NO: 1100212 - DNA, 15 bp, Homo sapiens
agtgtacgaaacctc

SEQ ID NO: 1100213 - DNA, 15 bp, Homo sapiens
gagtgtacgaaacct

SEQ ID NO: 1100214 - DNA, 15 bp, Homo sapiens
cgagtgtacgaaacc

SEQ ID NO: 1100215 - DNA, 15 bp, Homo sapiens
ccgagtgtacgaaac

SEQ ID NO: 1100216 - DNA, 15 bp, Homo sapiens
cccgagtgtacgaaa

SEQ ID NO: 1100217 - DNA, 15 bp, Homo sapiens
ccccgagtgtacgaa

SEQ ID NO: 1100218 - DNA, 15 bp, Homo sapiens
accccgagtgtacga

SEQ ID NO: 1100219 - DNA, 15 bp, Homo sapiens
caccccgagtgtacg

SEQ ID NO: 1100220 - DNA, 15 bp, Homo sapiens
ccaccccgagtgtac

SEQ ID NO: 1100221 - DNA, 15 bp, Homo sapiens
cccaccccgagtgta

SEQ ID NO: 1100222 - DNA, 15 bp, Homo sapiens
gcccaccccgagtgt

SEQ ID NO: 1100223 - DNA, 15 bp, Homo sapiens
ggcccaccccgagtg

SEQ ID NO: 1100224 - DNA, 15 bp, Homo sapiens
aggcccaccccgagt

SEQ ID NO: 1100225 - DNA, 15 bp, Homo sapiens
caggcccaccccgag

SEQ ID NO: 1100226 - DNA, 15 bp, Homo sapiens
acaggcccaccccga

SEQ ID NO: 1100227 - DNA, 15 bp, Homo sapiens
cacaggcccaccccg

SEQ ID NO: 1100228 - DNA, 15 bp, Homo sapiens
gcacaggcccacccc

SEQ ID NO: 1100229 - DNA, 15 bp, Homo sapiens
ggcacaggcccaccc

SEQ ID NO: 1100230 - DNA, 15 bp, Homo sapiens
aggcacaggcccacc

SEQ ID NO: 1100231 - DNA, 15 bp, Homo sapiens
caggcacaggcccac

SEQ ID NO: 1100232 - DNA, 15 bp, Homo sapiens
acaggcacaggccca

SEQ ID NO: 1100233 - DNA, 15 bp, Homo sapiens
cacaggcacaggccc

SEQ ID NO: 1100234 - DNA, 15 bp, Homo sapiens
ccacaggcacaggcc

SEQ ID NO: 1100235 - DNA, 15 bp, Homo sapiens
gccacaggcacaggc

SEQ ID NO: 1100236 - DNA, 15 bp, Homo sapiens
agccacaggcacagg

SEQ ID NO: 1100237 - DNA, 15 bp, Homo sapiens
cagccacaggcacag

SEQ ID NO: 1100238 - DNA, 15 bp, Homo sapiens
ccagccacaggcaca

SEQ ID NO: 1100239 - DNA, 15 bp, Homo sapiens
tccagccacaggcac

SEQ ID NO: 1100240 - DNA, 15 bp, Homo sapiens
ctccagccacaggca

SEQ ID NO: 1100241 - DNA, 15 bp, Homo sapiens
cctccagccacaggc

SEQ ID NO: 1100242 - DNA, 15 bp, Homo sapiens
ccctccagccacagg

SEQ ID NO: 1100243 - DNA, 15 bp, Homo sapiens
cccctccagccacag

SEQ ID NO: 1100244 - DNA, 15 bp, Homo sapiens
gcccctccagccaca

SEQ ID NO: 1100245 - DNA, 15 bp, Homo sapiens
cgcccctccagccac

SEQ ID NO: 1100246 - DNA, 15 bp, Homo sapiens
acgcccctccagcca

SEQ ID NO: 1100247 - DNA, 15 bp, Homo sapiens
gacgcccctccagcc

SEQ ID NO: 1100248 - DNA, 15 bp, Homo sapiens
ggacgcccctccagc

SEQ ID NO: 1100249 - DNA, 15 bp, Homo sapiens
aggacgcccctccag

SEQ ID NO: 1100250 - DNA, 15 bp, Homo sapiens
aaggacgcccctcca

SEQ ID NO: 1100251 - DNA, 15 bp, Homo sapiens
aaaggacgcccctcc

SEQ ID NO: 1100252 - DNA, 15 bp, Homo sapiens
caaaggacgcccctc

SEQ ID NO: 1100253 - DNA, 15 bp, Homo sapiens
gcaaaggacgcccct

SEQ ID NO: 1100254 - DNA, 15 bp, Homo sapiens
ggcaaaggacgcccc

SEQ ID NO: 1100255 - DNA, 15 bp, Homo sapiens
aggcaaaggacgccc

SEQ ID NO: 1100256 - DNA, 15 bp, Homo sapiens
gaggcaaaggacgcc

SEQ ID NO: 1100257 - DNA, 15 bp, Homo sapiens
agaggcaaaggacgc

SEQ ID NO: 1100258 - DNA, 15 bp, Homo sapiens
aagaggcaaaggacg

SEQ ID NO: 1100259 - DNA, 15 bp, Homo sapiens
caagaggcaaaggac

SEQ ID NO: 1100260 - DNA, 15 bp, Homo sapiens
ccaagaggcaaagga

SEQ ID NO: 1100261 - DNA, 15 bp, Homo sapiens
gccaagaggcaaagg

SEQ ID NO: 1100262 - DNA, 15 bp, Homo sapiens
ggccaagaggcaaag

SEQ ID NO: 1100263 - DNA, 15 bp, Homo sapiens
gggccaagaggcaaa

SEQ ID NO: 1100264 - DNA, 15 bp, Homo sapiens
tgggccaagaggcaa

SEQ ID NO: 1100265 - DNA, 15 bp, Homo sapiens
tctttaggtctgggg

SEQ ID NO: 1100266 - DNA, 15 bp, Homo sapiens
ttctttaggtctggg

SEQ ID NO: 1100267 - DNA, 15 bp, Homo sapiens
gttctttaggtctgg

SEQ ID NO: 1100268 - DNA, 15 bp, Homo sapiens
agttctttaggtctg

SEQ ID NO: 1100269 - DNA, 15 bp, Homo sapiens
cagttctttaggtct

SEQ ID NO: 1100270 - DNA, 15 bp, Homo sapiens
tcagttctttaggtc

SEQ ID NO: 1100271 - DNA, 15 bp, Homo sapiens
ctcagttctttaggt

SEQ ID NO: 1100272 - DNA, 15 bp, Homo sapiens
tctcagttctttagg

SEQ ID NO: 1100273 - DNA, 15 bp, Homo sapiens
atctcagttctttag

SEQ ID NO: 1100274 - DNA, 15 bp, Homo sapiens
gatctcagttcttta

SEQ ID NO: 1100275 - DNA, 15 bp, Homo sapiens
agatctcagttcttt

SEQ ID NO: 1100276 - DNA, 15 bp, Homo sapiens
cagatctcagttctt

SEQ ID NO: 1100277 - DNA, 15 bp, Homo sapiens
acagatctcagttct

SEQ ID NO: 1100278 - DNA, 15 bp, Homo sapiens
cacagatctcagttc

SEQ ID NO: 1100279 - DNA, 15 bp, Homo sapiens
ccacagatctcagtt

SEQ ID NO: 1100280 - DNA, 15 bp, Homo sapiens
cccacagatctcagt

SEQ ID NO: 1100281 - DNA, 15 bp, Homo sapiens
ccccacagatctcag

SEQ ID NO: 1100282 - DNA, 15 bp, Homo sapiens
tccccacagatctca

SEQ ID NO: 1100283 - DNA, 15 bp, Homo sapiens
ctccccacagatctc

SEQ ID NO: 1100284 - DNA, 15 bp, Homo sapiens
actccccacagatct

SEQ ID NO: 1100285 - DNA, 15 bp, Homo sapiens
cactccccacagatc

SEQ ID NO: 1100286 - DNA, 15 bp, Homo sapiens
ccactccccacagat

SEQ ID NO: 1100287 - DNA, 15 bp, Homo sapiens
tccactccccacaga

SEQ ID NO: 1100288 - DNA, 15 bp, Homo sapiens
gtccactccccacag

SEQ ID NO: 1100289 - DNA, 15 bp, Homo sapiens
ggtccactccccaca

SEQ ID NO: 1100290 - DNA, 15 bp, Homo sapiens
aggtccactccccac

SEQ ID NO: 1100291 - DNA, 15 bp, Homo sapiens
caggtccactcccca

SEQ ID NO: 1100292 - DNA, 15 bp, Homo sapiens
tcaggtccactcccc

SEQ ID NO: 1100293 - DNA, 15 bp, Homo sapiens
ttcaggtccactccc

SEQ ID NO: 1100294 - DNA, 15 bp, Homo sapiens
gttcaggtccactcc

SEQ ID NO: 1100295 - DNA, 15 bp, Homo sapiens
cgttcaggtccactc

SEQ ID NO: 1100296 - DNA, 15 bp, Homo sapiens
tcgttcaggtccact

SEQ ID NO: 1100297 - DNA, 15 bp, Homo sapiens
ttcgttcaggtccac

SEQ ID NO: 1100298 - DNA, 15 bp, Homo sapiens
gttcgttcaggtcca

SEQ ID NO: 1100299 - DNA, 15 bp, Homo sapiens
ggttcgttcaggtcc

SEQ ID NO: 1100300 - DNA, 15 bp, Homo sapiens
aggttcgttcaggtc

SEQ ID NO: 1100301 - DNA, 15 bp, Homo sapiens
aaggttcgttcaggt

SEQ ID NO: 1100302 - DNA, 15 bp, Homo sapiens
caaggttcgttcagg

SEQ ID NO: 1100303 - DNA, 15 bp, Homo sapiens
tcaaggttcgttcag

SEQ ID NO: 1100304 - DNA, 15 bp, Homo sapiens
ttcaaggttcgttca

SEQ ID NO: 1100305 - DNA, 15 bp, Homo sapiens
cttcaaggttcgttc

SEQ ID NO: 1100306 - DNA, 15 bp, Homo sapiens
acttcaaggttcgtt

SEQ ID NO: 1100307 - DNA, 15 bp, Homo sapiens
aacttcaaggttcgt

SEQ ID NO: 1100308 - DNA, 15 bp, Homo sapiens
aaacttcaaggttcg

SEQ ID NO: 1100309 - DNA, 15 bp, Homo sapiens
caaacttcaaggttc

SEQ ID NO: 1100310 - DNA, 15 bp, Homo sapiens
acaaacttcaaggtt

SEQ ID NO: 1100311 - DNA, 15 bp, Homo sapiens
gacaaacttcaaggt

SEQ ID NO: 1100312 - DNA, 15 bp, Homo sapiens
ggacaaacttcaagg

SEQ ID NO: 1100313 - DNA, 15 bp, Homo sapiens
gggacaaacttcaag

SEQ ID NO: 1100314 - DNA, 15 bp, Homo sapiens
tgggacaaacttcaa

SEQ ID NO: 1100315 - DNA, 15 bp, Homo sapiens
ctgggacaaacttca

SEQ ID NO: 1100316 - DNA, 15 bp, Homo sapiens
tctgggacaaacttc

SEQ ID NO: 1100317 - DNA, 15 bp, Homo sapiens
ttctgggacaaactt

SEQ ID NO: 1100318 - DNA, 15 bp, Homo sapiens
gttctgggacaaact

SEQ ID NO: 1100319 - DNA, 15 bp, Homo sapiens
ggttctgggacaaac

SEQ ID NO: 1100320 - DNA, 15 bp, Homo sapiens
tggttctgggacaaa

SEQ ID NO: 1100321 - DNA, 15 bp, Homo sapiens
atggttctgggacaa

SEQ ID NO: 1100322 - DNA, 15 bp, Homo sapiens
aatggttctgggaca

SEQ ID NO: 1100323 - DNA, 15 bp, Homo sapiens
caatggttctgggac

SEQ ID NO: 1100324 - DNA, 15 bp, Homo sapiens
gcaatggttctggga

SEQ ID NO: 1100325 - DNA, 15 bp, Homo sapiens
ggcaatggttctggg

SEQ ID NO: 1100326 - DNA, 15 bp, Homo sapiens
aggcaatggttctgg

SEQ ID NO: 1100327 - DNA, 15 bp, Homo sapiens
caccaaggcaatggt

SEQ ID NO: 1100328 - DNA, 15 bp, Homo sapiens
tcaccaaggcaatgg

SEQ ID NO: 1100329 - DNA, 15 bp, Homo sapiens
ctcaccaaggcaatg

SEQ ID NO: 1100330 - DNA, 15 bp, Homo sapiens
cctcaccaaggcaat

SEQ ID NO: 1100331 - DNA, 15 bp, Homo sapiens
ccctcaccaaggcaa

SEQ ID NO: 1100332 - DNA, 15 bp, Homo sapiens
gccctcaccaaggca

SEQ ID NO: 1100333 - DNA, 15 bp, Homo sapiens
tgccctcaccaaggc

SEQ ID NO: 1100334 - DNA, 15 bp, Homo sapiens
ctgccctcaccaagg

SEQ ID NO: 1100335 - DNA, 15 bp, Homo sapiens
tctgccctcaccaag

SEQ ID NO: 1100336 - DNA, 15 bp, Homo sapiens
gtctgccctcaccaa

SEQ ID NO: 1100337 - DNA, 15 bp, Homo sapiens
agtctgccctcacca

SEQ ID NO: 1100338 - DNA, 15 bp, Homo sapiens
gagtctgccctcacc

SEQ ID NO: 1100339 - DNA, 15 bp, Homo sapiens
ggagtctgccctcac

SEQ ID NO: 1100340 - DNA, 15 bp, Homo sapiens
tggagtctgccctca

SEQ ID NO: 1100341 - DNA, 15 bp, Homo sapiens
gtggagtctgccctc

SEQ ID NO: 1100342 - DNA, 15 bp, Homo sapiens
ggtggagtctgccct

SEQ ID NO: 1100343 - DNA, 15 bp, Homo sapiens
aggtggagtctgccc

SEQ ID NO: 1100344 - DNA, 15 bp, Homo sapiens
gaggtggagtctgcc

SEQ ID NO: 1100345 - DNA, 15 bp, Homo sapiens
cgaggtggagtctgc

SEQ ID NO: 1100346 - DNA, 15 bp, Homo sapiens
ccgaggtggagtctg

SEQ ID NO: 1100347 - DNA, 15 bp, Homo sapiens
gccgaggtggagtct

SEQ ID NO: 1100348 - DNA, 15 bp, Homo sapiens
cgccgaggtggagtc

SEQ ID NO: 1100349 - DNA, 15 bp, Homo sapiens
ccgccgaggtggagt

SEQ ID NO: 1100350 - DNA, 15 bp, Homo sapiens
tccgccgaggtggag

SEQ ID NO: 1100351 - DNA, 15 bp, Homo sapiens
ttccgccgaggtgga

SEQ ID NO: 1100352 - DNA, 15 bp, Homo sapiens
tttccgccgaggtgg

SEQ ID NO: 1100353 - DNA, 15 bp, Homo sapiens
gtttccgccgaggtg

SEQ ID NO: 1100354 - DNA, 15 bp, Homo sapiens
ggtttccgccgaggt

SEQ ID NO: 1100355 - DNA, 15 bp, Homo sapiens
gggtttccgccgagg

SEQ ID NO: 1100356 - DNA, 15 bp, Homo sapiens
ggggtttccgccgag

SEQ ID NO: 1100357 - DNA, 15 bp, Homo sapiens
tggggtttccgccga

SEQ ID NO: 1100358 - DNA, 15 bp, Homo sapiens
ctggggtttccgccg

SEQ ID NO: 1100359 - DNA, 15 bp, Homo sapiens
tctggggtttccgcc

SEQ ID NO: 1100360 - DNA, 15 bp, Homo sapiens
atctggggtttccgc

SEQ ID NO: 1100361 - DNA, 15 bp, Homo sapiens
catctggggtttccg

SEQ ID NO: 1100362 - DNA, 15 bp, Homo sapiens
acatctggggtttcc

SEQ ID NO: 1100363 - DNA, 15 bp, Homo sapiens
cacatctggggtttc

SEQ ID NO: 1100364 - DNA, 15 bp, Homo sapiens
ccacatctggggttt

SEQ ID NO: 1100365 - DNA, 15 bp, Homo sapiens
tccacatctggggtt

SEQ ID NO: 1100366 - DNA, 15 bp, Homo sapiens
gtccacatctggggt

SEQ ID NO: 1100367 - DNA, 15 bp, Homo sapiens
tgtccacatctgggg

SEQ ID NO: 1100368 - DNA, 15 bp, Homo sapiens
ctgtccacatctggg

SEQ ID NO: 1100369 - DNA, 15 bp, Homo sapiens
tctgtccacatctgg

SEQ ID NO: 1100370 - DNA, 15 bp, Homo sapiens
gtctgtccacatctg

SEQ ID NO: 1100371 - DNA, 15 bp, Homo sapiens
tgtctgtccacatct

SEQ ID NO: 1100372 - DNA, 15 bp, Homo sapiens
atgtctgtccacatc

SEQ ID NO: 1100373 - DNA, 15 bp, Homo sapiens
tatgtctgtccacat

SEQ ID NO: 1100374 - DNA, 15 bp, Homo sapiens
gtatgtctgtccaca

SEQ ID NO: 1100375 - DNA, 15 bp, Homo sapiens
ggtatgtctgtccac

SEQ ID NO: 1100376 - DNA, 15 bp, Homo sapiens
aggtatgtctgtcca

SEQ ID NO: 1100377 - DNA, 15 bp, Homo sapiens
gaggtatgtctgtcc

SEQ ID NO: 1100378 - DNA, 15 bp, Homo sapiens
agaggtatgtctgtc

SEQ ID NO: 1100379 - DNA, 15 bp, Homo sapiens
gagaggtatgtctgt

SEQ ID NO: 1100380 - DNA, 15 bp, Homo sapiens
tgagaggtatgtctg

SEQ ID NO: 1100381 - DNA, 15 bp, Homo sapiens
ctgagaggtatgtct

SEQ ID NO: 1100382 - DNA, 15 bp, Homo sapiens
gctgagaggtatgtc

SEQ ID NO: 1100383 - DNA, 15 bp, Homo sapiens
agctgagaggtatgt

SEQ ID NO: 1100384 - DNA, 15 bp, Homo sapiens
tagctgagaggtatg

SEQ ID NO: 1100385 - DNA, 15 bp, Homo sapiens
ttagctgagaggtat

SEQ ID NO: 1100386 - DNA, 15 bp, Homo sapiens
cttagctgagaggta

SEQ ID NO: 1100387 - DNA, 15 bp, Homo sapiens
tcttagctgagaggt

SEQ ID NO: 1100388 - DNA, 15 bp, Homo sapiens
atcttagctgagagg

SEQ ID NO: 1100389 - DNA, 15 bp, Homo sapiens
catcttagctgagag

SEQ ID NO: 1100390 - DNA, 15 bp, Homo sapiens
gcatcttagctgaga

SEQ ID NO: 1100391 - DNA, 15 bp, Homo sapiens
ggcatcttagctgag

SEQ ID NO: 1100392 - DNA, 15 bp, Homo sapiens
tggcatcttagctga

SEQ ID NO: 1100393 - DNA, 15 bp, Homo sapiens
ctggcatcttagctg

SEQ ID NO: 1100394 - DNA, 15 bp, Homo sapiens
gctggcatcttagct

SEQ ID NO: 1100395 - DNA, 15 bp, Homo sapiens
tgctggcatcttagc

SEQ ID NO: 1100396 - DNA, 15 bp, Homo sapiens
gtgctggcatcttag

SEQ ID NO: 1100397 - DNA, 15 bp, Homo sapiens
tgtgctggcatctta

SEQ ID NO: 1100398 - DNA, 15 bp, Homo sapiens
atgtgctggcatctt

SEQ ID NO: 1100399 - DNA, 15 bp, Homo sapiens
aatgtgctggcatct

SEQ ID NO: 1100400 - DNA, 15 bp, Homo sapiens
aaatgtgctggcatc

SEQ ID NO: 1100401 - DNA, 15 bp, Homo sapiens
aaaatgtgctggcat

SEQ ID NO: 1100402 - DNA, 15 bp, Homo sapiens
aaaaatgtgctggca

SEQ ID NO: 1100403 - DNA, 15 bp, Homo sapiens
gaaaaatgtgctggc

SEQ ID NO: 1100404 - DNA, 15 bp, Homo sapiens
tgaaaaatgtgctgg

SEQ ID NO: 1100405 - DNA, 15 bp, Homo sapiens
ctgaaaaatgtgctg

SEQ ID NO: 1100406 - DNA, 15 bp, Homo sapiens
gctgaaaaatgtgct

SEQ ID NO: 1100407 - DNA, 15 bp, Homo sapiens
ggctgaaaaatgtgc

SEQ ID NO: 1100408 - DNA, 15 bp, Homo sapiens
gggctgaaaaatgtg

SEQ ID NO: 1100409 - DNA, 15 bp, Homo sapiens
ggggctgaaaaatgt

SEQ ID NO: 1100410 - DNA, 15 bp, Homo sapiens
gggggctgaaaaatg

SEQ ID NO: 1100411 - DNA, 15 bp, Homo sapiens
tgggggctgaaaaat

SEQ ID NO: 1100412 - DNA, 15 bp, Homo sapiens
ctgggggctgaaaaa

SEQ ID NO: 1100413 - DNA, 15 bp, Homo sapiens
tctgggggctgaaaa

SEQ ID NO: 1100414 - DNA, 15 bp, Homo sapiens
atctgggggctgaaa

SEQ ID NO: 1100415 - DNA, 15 bp, Homo sapiens
aatctgggggctgaa

SEQ ID NO: 1100416 - DNA, 15 bp, Homo sapiens
taatctgggggctga

SEQ ID NO: 1100417 - DNA, 15 bp, Homo sapiens
ataatctgggggctg

SEQ ID NO: 1100418 - DNA, 15 bp, Homo sapiens
aataatctgggggct

SEQ ID NO: 1100419 - DNA, 15 bp, Homo sapiens
aaataatctgggggc

SEQ ID NO: 1100420 - DNA, 15 bp, Homo sapiens
aaaataatctggggg

SEQ ID NO: 1100421 - DNA, 15 bp, Homo sapiens
gaaaataatctgggg

SEQ ID NO: 1100422 - DNA, 15 bp, Homo sapiens
ggaaaataatctggg

SEQ ID NO: 1100423 - DNA, 15 bp, Homo sapiens
tggaaaataatctgg

SEQ ID NO: 1100424 - DNA, 15 bp, Homo sapiens
ctggaaaataatctg

SEQ ID NO: 1100425 - DNA, 15 bp, Homo sapiens
tctggaaaataatct

SEQ ID NO: 1100426 - DNA, 15 bp, Homo sapiens
gtctggaaaataatc

SEQ ID NO: 1100427 - DNA, 15 bp, Homo sapiens
cgtctggaaaataat

SEQ ID NO: 1100428 - DNA, 15 bp, Homo sapiens
gcgtctggaaaataa

SEQ ID NO: 1100429 - DNA, 15 bp, Homo sapiens
tgcgtctggaaaata

SEQ ID NO: 1100430 - DNA, 15 bp, Homo sapiens
atgcgtctggaaaat

SEQ ID NO: 1100431 - DNA, 15 bp, Homo sapiens
gatgcgtctggaaaa

SEQ ID NO: 1100432 - DNA, 15 bp, Homo sapiens
ggatgcgtctggaaa

SEQ ID NO: 1100433 - DNA, 15 bp, Homo sapiens
aggatgcgtctggaa

SEQ ID NO: 1100434 - DNA, 15 bp, Homo sapiens
gaggatgcgtctgga

SEQ ID NO: 1100435 - DNA, 15 bp, Homo sapiens
agaggatgcgtctgg

SEQ ID NO: 1100436 - DNA, 15 bp, Homo sapiens
gagaggatgcgtctg

SEQ ID NO: 1100437 - DNA, 15 bp, Homo sapiens
ggagaggatgcgtct

SEQ ID NO: 1100438 - DNA, 15 bp, Homo sapiens
gggagaggatgcgtc

SEQ ID NO: 1100439 - DNA, 15 bp, Homo sapiens
agggagaggatgcgt

SEQ ID NO: 1100440 - DNA, 15 bp, Homo sapiens
cagggagaggatgcg

SEQ ID NO: 1100441 - DNA, 15 bp, Homo sapiens
gcagggagaggatgc

SEQ ID NO: 1100442 - DNA, 15 bp, Homo sapiens
ggcagggagaggatg

SEQ ID NO: 1100443 - DNA, 15 bp, Homo sapiens
gggcagggagaggat

SEQ ID NO: 1100444 - DNA, 15 bp, Homo sapiens
ggggcagggagagga

SEQ ID NO: 1100445 - DNA, 15 bp, Homo sapiens
aggggcagggagagg

SEQ ID NO: 1100446 - DNA, 15 bp, Homo sapiens
caggggcagggagag

SEQ ID NO: 1100447 - DNA, 15 bp, Homo sapiens
acaggggcagggaga

SEQ ID NO: 1100448 - DNA, 15 bp, Homo sapiens
aacaggggcagggag

SEQ ID NO: 1100449 - DNA, 15 bp, Homo sapiens
gaacaggggcaggga

SEQ ID NO: 1100450 - DNA, 15 bp, Homo sapiens
ggaacaggggcaggg

SEQ ID NO: 1100451 - DNA, 15 bp, Homo sapiens
gggaacaggggcagg

SEQ ID NO: 1100452 - DNA, 15 bp, Homo sapiens
ggggaacaggggcag

SEQ ID NO: 1100453 - DNA, 15 bp, Homo sapiens
tggggaacaggggca

SEQ ID NO: 1100454 - DNA, 15 bp, Homo sapiens
ctggggaacaggggc

SEQ ID NO: 1100455 - DNA, 15 bp, Homo sapiens
gctggggaacagggg

SEQ ID NO: 1100456 - DNA, 15 bp, Homo sapiens
ggctggggaacaggg

SEQ ID NO: 1100457 - DNA, 15 bp, Homo sapiens
gggctggggaacagg

SEQ ID NO: 1100458 - DNA, 15 bp, Homo sapiens
tgggctggggaacag

SEQ ID NO: 1100459 - DNA, 15 bp, Homo sapiens
ctgggctggggaaca

SEQ ID NO: 1100460 - DNA, 15 bp, Homo sapiens
gctgggctggggaac

SEQ ID NO: 1100461 - DNA, 15 bp, Homo sapiens
agctgggctggggaa

SEQ ID NO: 1100462 - DNA, 15 bp, Homo sapiens
cagctgggctgggga

SEQ ID NO: 1100463 - DNA, 15 bp, Homo sapiens
gcagctgggctgggg

SEQ ID NO: 1100464 - DNA, 15 bp, Homo sapiens
agcagctgggctggg

SEQ ID NO: 1100465 - DNA, 15 bp, Homo sapiens
cagcagctgggctgg

SEQ ID NO: 1100466 - DNA, 15 bp, Homo sapiens
acagcagctgggctg

SEQ ID NO: 1100467 - DNA, 15 bp, Homo sapiens
gacagcagctgggct

SEQ ID NO: 1100468 - DNA, 15 bp, Homo sapiens
ggacagcagctgggc

SEQ ID NO: 1100469 - DNA, 15 bp, Homo sapiens
aggacagcagctggg

SEQ ID NO: 1100470 - DNA, 15 bp, Homo sapiens
caggacagcagctgg

SEQ ID NO: 1100471 - DNA, 15 bp, Homo sapiens
tcaggacagcagctg

SEQ ID NO: 1100472 - DNA, 15 bp, Homo sapiens
ctcaggacagcagct

SEQ ID NO: 1100473 - DNA, 15 bp, Homo sapiens
gctcaggacagcagc

SEQ ID NO: 1100474 - DNA, 15 bp, Homo sapiens
ggctcaggacagcag

SEQ ID NO: 1100475 - DNA, 15 bp, Homo sapiens
gggctcaggacagca

SEQ ID NO: 1100476 - DNA, 15 bp, Homo sapiens
ggggctcaggacagc

SEQ ID NO: 1100477 - DNA, 15 bp, Homo sapiens
tggggctcaggacag

SEQ ID NO: 1100478 - DNA, 15 bp, Homo sapiens
ctggggctcaggaca

SEQ ID NO: 1100479 - DNA, 15 bp, Homo sapiens
cctggggctcaggac

SEQ ID NO: 1100480 - DNA, 15 bp, Homo sapiens
tcctggggctcagga

SEQ ID NO: 1100481 - DNA, 15 bp, Homo sapiens
ctcctggggctcagg

SEQ ID NO: 1100482 - DNA, 15 bp, Homo sapiens
tctcctggggctcag

SEQ ID NO: 1100483 - DNA, 15 bp, Homo sapiens
gtctcctggggctca

SEQ ID NO: 1100484 - DNA, 15 bp, Homo sapiens
tgtctcctggggctc

SEQ ID NO: 1100485 - DNA, 15 bp, Homo sapiens
ttgtctcctggggct

SEQ ID NO: 1100486 - DNA, 15 bp, Homo sapiens
gttgtctcctggggc

SEQ ID NO: 1100487 - DNA, 15 bp, Homo sapiens
ggttgtctcctgggg

SEQ ID NO: 1100488 - DNA, 15 bp, Homo sapiens
aggttgtctcctggg

SEQ ID NO: 1100489 - DNA, 15 bp, Homo sapiens
gaggttgtctcctgg

SEQ ID NO: 1100490 - DNA, 15 bp, Homo sapiens
ggaggttgtctcctg

SEQ ID NO: 1100491 - DNA, 15 bp, Homo sapiens
gggaggttgtctcct

SEQ ID NO: 1100492 - DNA, 15 bp, Homo sapiens
ggggaggttgtctcc

SEQ ID NO: 1100493 - DNA, 15 bp, Homo sapiens
gggggaggttgtctc

SEQ ID NO: 1100494 - DNA, 15 bp, Homo sapiens
agggggaggttgtct

SEQ ID NO: 1100495 - DNA, 15 bp, Homo sapiens
aagggggaggttgtc

SEQ ID NO: 1100496 - DNA, 15 bp, Homo sapiens
gaagggggaggttgt

SEQ ID NO: 1100497 - DNA, 15 bp, Homo sapiens
ggaagggggaggttg

SEQ ID NO: 1100498 - DNA, 15 bp, Homo sapiens
tggaagggggaggtt

SEQ ID NO: 1100499 - DNA, 15 bp, Homo sapiens
ttggaagggggaggt

SEQ ID NO: 1100500 - DNA, 15 bp, Homo sapiens
cttggaagggggagg

SEQ ID NO: 1100501 - DNA, 15 bp, Homo sapiens
tcttggaagggggag

SEQ ID NO: 1100502 - DNA, 15 bp, Homo sapiens
gtcttggaaggggga

SEQ ID NO: 1100503 - DNA, 15 bp, Homo sapiens
tgtcttggaaggggg

SEQ ID NO: 1100504 - DNA, 15 bp, Homo sapiens
gtgtcttggaagggg

SEQ ID NO: 1100505 - DNA, 15 bp, Homo sapiens
ggtgtcttggaaggg

SEQ ID NO: 1100506 - DNA, 15 bp, Homo sapiens
aggtgtcttggaagg

SEQ ID NO: 1100507 - DNA, 15 bp, Homo sapiens
aaggtgtcttggaag

SEQ ID NO: 1100508 - DNA, 15 bp, Homo sapiens
gaaggtgtcttggaa

SEQ ID NO: 1100509 - DNA, 15 bp, Homo sapiens
ggaaggtgtcttgga

SEQ ID NO: 1100510 - DNA, 15 bp, Homo sapiens
aggaaggtgtcttgg

SEQ ID NO: 1100511 - DNA, 15 bp, Homo sapiens
gaggaaggtgtcttg

SEQ ID NO: 1100512 - DNA, 15 bp, Homo sapiens
tgaggaaggtgtctt

SEQ ID NO: 1100513 - DNA, 15 bp, Homo sapiens
gtgaggaaggtgtct

SEQ ID NO: 1100514 - DNA, 15 bp, Homo sapiens
tgtgaggaaggtgtc

SEQ ID NO: 1100515 - DNA, 15 bp, Homo sapiens
ctgtgaggaaggtgt

SEQ ID NO: 1100516 - DNA, 15 bp, Homo sapiens
gctgtgaggaaggtg

SEQ ID NO: 1100517 - DNA, 15 bp, Homo sapiens
cgctgtgaggaaggt

SEQ ID NO: 1100518 - DNA, 15 bp, Homo sapiens
gcgctgtgaggaagg

SEQ ID NO: 1100519 - DNA, 15 bp, Homo sapiens
ggcgctgtgaggaag

SEQ ID NO: 1100520 - DNA, 15 bp, Homo sapiens
gggcgctgtgaggaa

SEQ ID NO: 1100521 - DNA, 15 bp, Homo sapiens
ggggcgctgtgagga

SEQ ID NO: 1100522 - DNA, 15 bp, Homo sapiens
gggggcgctgtgagg

SEQ ID NO: 1100523 - DNA, 15 bp, Homo sapiens
tgggggcgctgtgag

SEQ ID NO: 1100524 - DNA, 15 bp, Homo sapiens
ctgggggcgctgtga

SEQ ID NO: 1100525 - DNA, 15 bp, Homo sapiens
gctgggggcgctgtg

SEQ ID NO: 1100526 - DNA, 15 bp, Homo sapiens
ggctgggggcgctgt

SEQ ID NO: 1100527 - DNA, 15 bp, Homo sapiens
tggctgggggcgctg

SEQ ID NO: 1100528 - DNA, 15 bp, Homo sapiens
ctggctgggggcgct

SEQ ID NO: 1100529 - DNA, 15 bp, Homo sapiens
cctggctgggggcgc

SEQ ID NO: 1100530 - DNA, 15 bp, Homo sapiens
gcctggctgggggcg

SEQ ID NO: 1100531 - DNA, 15 bp, Homo sapiens
ggcctggctgggggc

SEQ ID NO: 1100532 - DNA, 15 bp, Homo sapiens
aggcctggctggggg

SEQ ID NO: 1100533 - DNA, 15 bp, Homo sapiens
aaggcctggctgggg

SEQ ID NO: 1100534 - DNA, 15 bp, Homo sapiens
caaggcctggctggg

SEQ ID NO: 1100535 - DNA, 15 bp, Homo sapiens
ccaaggcctggctgg

SEQ ID NO: 1100536 - DNA, 15 bp, Homo sapiens
accaaggcctggctg

SEQ ID NO: 1100537 - DNA, 15 bp, Homo sapiens
aaccaaggcctggct

SEQ ID NO: 1100538 - DNA, 15 bp, Homo sapiens
aaaccaaggcctggc

SEQ ID NO: 1100539 - DNA, 15 bp, Homo sapiens
aaaaccaaggcctgg

SEQ ID NO: 1100540 - DNA, 15 bp, Homo sapiens
gaaaaccaaggcctg

SEQ ID NO: 1100541 - DNA, 15 bp, Homo sapiens
ggaaaaccaaggcct

SEQ ID NO: 1100542 - DNA, 15 bp, Homo sapiens
aggaaaaccaaggcc

SEQ ID NO: 1100543 - DNA, 15 bp, Homo sapiens
caggaaaaccaaggc

SEQ ID NO: 1100544 - DNA, 15 bp, Homo sapiens
ccaggaaaaccaagg

SEQ ID NO: 1100545 - DNA, 15 bp, Homo sapiens
accaggaaaaccaag

SEQ ID NO: 1100546 - DNA, 15 bp, Homo sapiens
caccaggaaaaccaa

SEQ ID NO: 1100547 - DNA, 15 bp, Homo sapiens
gcaccaggaaaacca

SEQ ID NO: 1100548 - DNA, 15 bp, Homo sapiens
cgcaccaggaaaacc

SEQ ID NO: 1100549 - DNA, 15 bp, Homo sapiens
ccgcaccaggaaaac

SEQ ID NO: 1100550 - DNA, 15 bp, Homo sapiens
gccgcaccaggaaaa

SEQ ID NO: 1100551 - DNA, 15 bp, Homo sapiens
agccgcaccaggaaa

SEQ ID NO: 1100552 - DNA, 15 bp, Homo sapiens
cagccgcaccaggaa

SEQ ID NO: 1100553 - DNA, 15 bp, Homo sapiens
ccagccgcaccagga

SEQ ID NO: 1100554 - DNA, 15 bp, Homo sapiens
cccagccgcaccagg

SEQ ID NO: 1100555 - DNA, 15 bp, Homo sapiens
tcccagccgcaccag

SEQ ID NO: 1100556 - DNA, 15 bp, Homo sapiens
atcccagccgcacca

SEQ ID NO: 1100557 - DNA, 15 bp, Homo sapiens
gatcccagccgcacc

SEQ ID NO: 1100558 - DNA, 15 bp, Homo sapiens
agatcccagccgcac

SEQ ID NO: 1100559 - DNA, 15 bp, Homo sapiens
aagatcccagccgca

SEQ ID NO: 1100560 - DNA, 15 bp, Homo sapiens
aaagatcccagccgc

SEQ ID NO: 1100561 - DNA, 15 bp, Homo sapiens
gaaagatcccagccg

SEQ ID NO: 1100562 - DNA, 15 bp, Homo sapiens
tgaaagatcccagcc

SEQ ID NO: 1100563 - DNA, 15 bp, Homo sapiens
ctgaaagatcccagc

SEQ ID NO: 1100564 - DNA, 15 bp, Homo sapiens
cctgaaagatcccag

SEQ ID NO: 1100565 - DNA, 15 bp, Homo sapiens
ccctgaaagatccca

SEQ ID NO: 1100566 - DNA, 15 bp, Homo sapiens
cccctgaaagatccc

SEQ ID NO: 1100567 - DNA, 15 bp, Homo sapiens
gcccctgaaagatcc

SEQ ID NO: 1100568 - DNA, 15 bp, Homo sapiens
ggcccctgaaagatc

SEQ ID NO: 1100569 - DNA, 15 bp, Homo sapiens
tggcccctgaaagat

SEQ ID NO: 1100570 - DNA, 15 bp, Homo sapiens
ctggcccctgaaaga

SEQ ID NO: 1100571 - DNA, 15 bp, Homo sapiens
cctggcccctgaaag

SEQ ID NO: 1100572 - DNA, 15 bp, Homo sapiens
ccctggcccctgaaa

SEQ ID NO: 1100573 - DNA, 15 bp, Homo sapiens
gccctggcccctgaa

SEQ ID NO: 1100574 - DNA, 15 bp, Homo sapiens
agccctggcccctga

SEQ ID NO: 1100575 - DNA, 15 bp, Homo sapiens
cagccctggcccctg

SEQ ID NO: 1100576 - DNA, 15 bp, Homo sapiens
gcagccctggcccct

SEQ ID NO: 1100577 - DNA, 15 bp, Homo sapiens
tgcagccctggcccc

SEQ ID NO: 1100578 - DNA, 15 bp, Homo sapiens
ctgcagccctggccc

SEQ ID NO: 1100579 - DNA, 15 bp, Homo sapiens
tctgcagccctggcc

SEQ ID NO: 1100580 - DNA, 15 bp, Homo sapiens
gtctgcagccctggc

SEQ ID NO: 1100581 - DNA, 15 bp, Homo sapiens
ggtctgcagccctgg

SEQ ID NO: 1100582 - DNA, 15 bp, Homo sapiens
gggtctgcagccctg

SEQ ID NO: 1100583 - DNA, 15 bp, Homo sapiens
tgggtctgcagccct

SEQ ID NO: 1100584 - DNA, 15 bp, Homo sapiens
ttgggtctgcagccc

SEQ ID NO: 1100585 - DNA, 15 bp, Homo sapiens
cttgggtctgcagcc

SEQ ID NO: 1100586 - DNA, 15 bp, Homo sapiens
tcttgggtctgcagc

SEQ ID NO: 1100587 - DNA, 15 bp, Homo sapiens
atcttgggtctgcag

SEQ ID NO: 1100588 - DNA, 15 bp, Homo sapiens
catcttgggtctgca

SEQ ID NO: 1100589 - DNA, 15 bp, Homo sapiens
acatcttgggtctgc

SEQ ID NO: 1100590 - DNA, 15 bp, Homo sapiens
cacatcttgggtctg

SEQ ID NO: 1100591 - DNA, 15 bp, Homo sapiens
ccacatcttgggtct

SEQ ID NO: 1100592 - DNA, 15 bp, Homo sapiens
accacatcttgggtc

SEQ ID NO: 1100593 - DNA, 15 bp, Homo sapiens
aaccacatcttgggt

SEQ ID NO: 1100594 - DNA, 15 bp, Homo sapiens
gaaccacatcttggg

SEQ ID NO: 1100595 - DNA, 15 bp, Homo sapiens
agaaccacatcttgg

SEQ ID NO: 1100596 - DNA, 15 bp, Homo sapiens
aagaaccacatcttg

SEQ ID NO: 1100597 - DNA, 15 bp, Homo sapiens
caagaaccacatctt

SEQ ID NO: 1100598 - DNA, 15 bp, Homo sapiens
gcaagaaccacatct

SEQ ID NO: 1100599 - DNA, 15 bp, Homo sapiens
ggcaagaaccacatc

SEQ ID NO: 1100600 - DNA, 15 bp, Homo sapiens
gggcaagaaccacat

SEQ ID NO: 1100601 - DNA, 15 bp, Homo sapiens
tgggcaagaaccaca

SEQ ID NO: 1100602 - DNA, 15 bp, Homo sapiens
atgggcaagaaccac

SEQ ID NO: 1100603 - DNA, 15 bp, Homo sapiens
gatgggcaagaacca

SEQ ID NO: 1100604 - DNA, 15 bp, Homo sapiens
cgatgggcaagaacc

SEQ ID NO: 1100605 - DNA, 15 bp, Homo sapiens
acgatgggcaagaac

SEQ ID NO: 1100606 - DNA, 15 bp, Homo sapiens
aacgatgggcaagaa

SEQ ID NO: 1100607 - DNA, 15 bp, Homo sapiens
gaacgatgggcaaga

SEQ ID NO: 1100608 - DNA, 15 bp, Homo sapiens
ggaacgatgggcaag

SEQ ID NO: 1100609 - DNA, 15 bp, Homo sapiens
gggaacgatgggcaa

SEQ ID NO: 1100610 - DNA, 15 bp, Homo sapiens
agggaacgatgggca

SEQ ID NO: 1100611 - DNA, 15 bp, Homo sapiens
gagggaacgatgggc

SEQ ID NO: 1100612 - DNA, 15 bp, Homo sapiens
ggagggaacgatggg

SEQ ID NO: 1100613 - DNA, 15 bp, Homo sapiens
aggagggaacgatgg

SEQ ID NO: 1100614 - DNA, 15 bp, Homo sapiens
gaggagggaacgatg

SEQ ID NO: 1100615 - DNA, 15 bp, Homo sapiens
agaggagggaacgat

SEQ ID NO: 1100616 - DNA, 15 bp, Homo sapiens
aagaggagggaacga

SEQ ID NO: 1100617 - DNA, 15 bp, Homo sapiens
taagaggagggaacg

SEQ ID NO: 1100618 - DNA, 15 bp, Homo sapiens
gtaagaggagggaac

SEQ ID NO: 1100619 - DNA, 15 bp, Homo sapiens
cgtaagaggagggaa

SEQ ID NO: 1100620 - DNA, 15 bp, Homo sapiens
ccgtaagaggaggga

SEQ ID NO: 1100621 - DNA, 15 bp, Homo sapiens
tccgtaagaggaggg

SEQ ID NO: 1100622 - DNA, 15 bp, Homo sapiens
gtccgtaagaggagg

SEQ ID NO: 1100623 - DNA, 15 bp, Homo sapiens
agtccgtaagaggag

SEQ ID NO: 1100624 - DNA, 15 bp, Homo sapiens
cagtccgtaagagga

SEQ ID NO: 1100625 - DNA, 15 bp, Homo sapiens
ccagtccgtaagagg

SEQ ID NO: 1100626 - DNA, 15 bp, Homo sapiens
cccagtccgtaagag

SEQ ID NO: 1100627 - DNA, 15 bp, Homo sapiens
acccagtccgtaaga

SEQ ID NO: 1100628 - DNA, 15 bp, Homo sapiens
aacccagtccgtaag

SEQ ID NO: 1100629 - DNA, 15 bp, Homo sapiens
caacccagtccgtaa

SEQ ID NO: 1100630 - DNA, 15 bp, Homo sapiens
ccaacccagtccgta

SEQ ID NO: 1100631 - DNA, 15 bp, Homo sapiens
cccaacccagtccgt

SEQ ID NO: 1100632 - DNA, 15 bp, Homo sapiens
tcccaacccagtccg

SEQ ID NO: 1100633 - DNA, 15 bp, Homo sapiens
atcccaacccagtcc

SEQ ID NO: 1100634 - DNA, 15 bp, Homo sapiens
tatcccaacccagtc

SEQ ID NO: 1100635 - DNA, 15 bp, Homo sapiens
ctatcccaacccagt

SEQ ID NO: 1100636 - DNA, 15 bp, Homo sapiens
cctatcccaacccag

SEQ ID NO: 1100637 - DNA, 15 bp, Homo sapiens
ccctatcccaaccca

SEQ ID NO: 1100638 - DNA, 15 bp, Homo sapiens
cccctatcccaaccc

SEQ ID NO: 1100639 - DNA, 15 bp, Homo sapiens
acccctatcccaacc

SEQ ID NO: 1100640 - DNA, 15 bp, Homo sapiens
cacccctatcccaac

SEQ ID NO: 1100641 - DNA, 15 bp, Homo sapiens
ccacccctatcccaa

SEQ ID NO: 1100642 - DNA, 15 bp, Homo sapiens
tccacccctatccca

SEQ ID NO: 1100643 - DNA, 15 bp, Homo sapiens
ctccacccctatccc

SEQ ID NO: 1100644 - DNA, 15 bp, Homo sapiens
cctccacccctatcc

SEQ ID NO: 1100645 - DNA, 15 bp, Homo sapiens
gcctccacccctatc

SEQ ID NO: 1100646 - DNA, 15 bp, Homo sapiens
agcctccacccctat

SEQ ID NO: 1100647 - DNA, 15 bp, Homo sapiens
gagcctccaccccta

SEQ ID NO: 1100648 - DNA, 15 bp, Homo sapiens
agagcctccacccct

SEQ ID NO: 1100649 - DNA, 15 bp, Homo sapiens
cagagcctccacccc

SEQ ID NO: 1100650 - DNA, 15 bp, Homo sapiens
gcagagcctccaccc

SEQ ID NO: 1100651 - DNA, 15 bp, Homo sapiens
agcagagcctccacc

SEQ ID NO: 1100652 - DNA, 15 bp, Homo sapiens
aagcagagcctccac

SEQ ID NO: 1100653 - DNA, 15 bp, Homo sapiens
gaagcagagcctcca

SEQ ID NO: 1100654 - DNA, 15 bp, Homo sapiens
ggaagcagagcctcc

SEQ ID NO: 1100655 - DNA, 15 bp, Homo sapiens
aggaagcagagcctc

SEQ ID NO: 1100656 - DNA, 15 bp, Homo sapiens
caggaagcagagcct

SEQ ID NO: 1100657 - DNA, 15 bp, Homo sapiens
ccaggaagcagagcc

SEQ ID NO: 1100658 - DNA, 15 bp, Homo sapiens
accaggaagcagagc

SEQ ID NO: 1100659 - DNA, 15 bp, Homo sapiens
aaccaggaagcagag

SEQ ID NO: 1100660 - DNA, 15 bp, Homo sapiens
gaaccaggaagcaga

SEQ ID NO: 1100661 - DNA, 15 bp, Homo sapiens
ggaaccaggaagcag

SEQ ID NO: 1100662 - DNA, 15 bp, Homo sapiens
tggaaccaggaagca

SEQ ID NO: 1100663 - DNA, 15 bp, Homo sapiens
atggaaccaggaagc

SEQ ID NO: 1100664 - DNA, 15 bp, Homo sapiens
gatggaaccaggaag

SEQ ID NO: 1100665 - DNA, 15 bp, Homo sapiens
ggatggaaccaggaa

SEQ ID NO: 1100666 - DNA, 15 bp, Homo sapiens
aggatggaaccagga

SEQ ID NO: 1100667 - DNA, 15 bp, Homo sapiens
gaggatggaaccagg

SEQ ID NO: 1100668 - DNA, 15 bp, Homo sapiens
ggaggatggaaccag

SEQ ID NO: 1100669 - DNA, 15 bp, Homo sapiens
aggaggatggaacca

SEQ ID NO: 1100670 - DNA, 15 bp, Homo sapiens
gaggaggatggaacc

SEQ ID NO: 1100671 - DNA, 15 bp, Homo sapiens
ggaggaggatggaac

SEQ ID NO: 1100672 - DNA, 15 bp, Homo sapiens
tggaggaggatggaa

SEQ ID NO: 1100673 - DNA, 15 bp, Homo sapiens
ctggaggaggatgga

SEQ ID NO: 1100674 - DNA, 15 bp, Homo sapiens
cctggaggaggatgg

SEQ ID NO: 1100675 - DNA, 15 bp, Homo sapiens
gcctggaggaggatg

SEQ ID NO: 1100676 - DNA, 15 bp, Homo sapiens
ggcctggaggaggat

SEQ ID NO: 1100677 - DNA, 15 bp, Homo sapiens
tggcctggaggagga

SEQ ID NO: 1100678 - DNA, 15 bp, Homo sapiens
ctggcctggaggagg

SEQ ID NO: 1100679 - DNA, 15 bp, Homo sapiens
cctggcctggaggag

SEQ ID NO: 1100680 - DNA, 15 bp, Homo sapiens
acctggcctggagga

SEQ ID NO: 1100681 - DNA, 15 bp, Homo sapiens
aacctggcctggagg

SEQ ID NO: 1100682 - DNA, 15 bp, Homo sapiens
aaacctggcctggag

SEQ ID NO: 1100683 - DNA, 15 bp, Homo sapiens
taaacctggcctgga

SEQ ID NO: 1100684 - DNA, 15 bp, Homo sapiens
gtaaacctggcctgg

SEQ ID NO: 1100685 - DNA, 15 bp, Homo sapiens
tgtaaacctggcctg

SEQ ID NO: 1100686 - DNA, 15 bp, Homo sapiens
ctgtaaacctggcct

SEQ ID NO: 1100687 - DNA, 15 bp, Homo sapiens
cctgtaaacctggcc

SEQ ID NO: 1100688 - DNA, 15 bp, Homo sapiens
acctgtaaacctggc

SEQ ID NO: 1100689 - DNA, 15 bp, Homo sapiens
gacctgtaaacctgg

SEQ ID NO: 1100690 - DNA, 15 bp, Homo sapiens
agacctgtaaacctg

SEQ ID NO: 1100691 - DNA, 15 bp, Homo sapiens
cagacctgtaaacct

SEQ ID NO: 1100692 - DNA, 15 bp, Homo sapiens
ccagacctgtaaacc

SEQ ID NO: 1100693 - DNA, 15 bp, Homo sapiens
accagacctgtaaac

SEQ ID NO: 1100694 - DNA, 15 bp, Homo sapiens
aaccagacctgtaaa

SEQ ID NO: 1100695 - DNA, 15 bp, Homo sapiens
aaaccagacctgtaa

SEQ ID NO: 1100696 - DNA, 15 bp, Homo sapiens
caaaccagacctgta

SEQ ID NO: 1100697 - DNA, 15 bp, Homo sapiens
tcaaaccagacctgt

SEQ ID NO: 1100698 - DNA, 15 bp, Homo sapiens
ttcaaaccagacctg

SEQ ID NO: 1100699 - DNA, 15 bp, Homo sapiens
attcaaaccagacct

SEQ ID NO: 1100700 - DNA, 15 bp, Homo sapiens
cattcaaaccagacc

SEQ ID NO: 1100701 - DNA, 15 bp, Homo sapiens
tcattcaaaccagac

SEQ ID NO: 1100702 - DNA, 15 bp, Homo sapiens
ttcattcaaaccaga

SEQ ID NO: 1100703 - DNA, 15 bp, Homo sapiens
cttcattcaaaccag

SEQ ID NO: 1100704 - DNA, 15 bp, Homo sapiens
ccttcattcaaacca

SEQ ID NO: 1100705 - DNA, 15 bp, Homo sapiens
cccttcattcaaacc

SEQ ID NO: 1100706 - DNA, 15 bp, Homo sapiens
tcccttcattcaaac

SEQ ID NO: 1100707 - DNA, 15 bp, Homo sapiens
ttcccttcattcaaa

SEQ ID NO: 1100708 - DNA, 15 bp, Homo sapiens
cttcccttcattcaa

SEQ ID NO: 1100709 - DNA, 15 bp, Homo sapiens
tcttcccttcattca

SEQ ID NO: 1100710 - DNA, 15 bp, Homo sapiens
ttcttcccttcattc

SEQ ID NO: 1100711 - DNA, 15 bp, Homo sapiens
tttcttcccttcatt

SEQ ID NO: 1100712 - DNA, 15 bp, Homo sapiens
ctttcttcccttcat

SEQ ID NO: 1100713 - DNA, 15 bp, Homo sapiens
gctttcttcccttca

SEQ ID NO: 1100714 - DNA, 15 bp, Homo sapiens
tgctttcttcccttc

SEQ ID NO: 1100715 - DNA, 15 bp, Homo sapiens
ttgctttcttccctt

SEQ ID NO: 1100716 - DNA, 15 bp, Homo sapiens
tttgctttcttccct

SEQ ID NO: 1100717 - DNA, 15 bp, Homo sapiens
ctttgctttcttccc

SEQ ID NO: 1100718 - DNA, 15 bp, Homo sapiens
cctttgctttcttcc

SEQ ID NO: 1100719 - DNA, 15 bp, Homo sapiens
ccctttgctttcttc

SEQ ID NO: 1100720 - DNA, 15 bp, Homo sapiens
tccctttgctttctt

SEQ ID NO: 1100721 - DNA, 15 bp, Homo sapiens
ttccctttgctttct

SEQ ID NO: 1100722 - DNA, 15 bp, Homo sapiens
cttccctttgctttc

SEQ ID NO: 1100723 - DNA, 15 bp, Homo sapiens
tcttccctttgcttt

SEQ ID NO: 1100724 - DNA, 15 bp, Homo sapiens
ctcttccctttgctt

SEQ ID NO: 1100725 - DNA, 15 bp, Homo sapiens
cctcttccctttgct

SEQ ID NO: 1100726 - DNA, 15 bp, Homo sapiens
tcctcttccctttgc

SEQ ID NO: 1100727 - DNA, 15 bp, Homo sapiens
ttcctcttccctttg

SEQ ID NO: 1100728 - DNA, 15 bp, Homo sapiens
tttcctcttcccttt

SEQ ID NO: 1100729 - DNA, 15 bp, Homo sapiens
ctttcctcttccctt

SEQ ID NO: 1100730 - DNA, 15 bp, Homo sapiens
actttcctcttccct

SEQ ID NO: 1100731 - DNA, 15 bp, Homo sapiens
aactttcctcttccc

SEQ ID NO: 1100732 - DNA, 15 bp, Homo sapiens
aaactttcctcttcc

SEQ ID NO: 1100733 - DNA, 15 bp, Homo sapiens
gaaactttcctcttc

SEQ ID NO: 1100734 - DNA, 15 bp, Homo sapiens
agaaactttcctctt

SEQ ID NO: 1100735 - DNA, 15 bp, Homo sapiens
cagaaactttcctct

SEQ ID NO: 1100736 - DNA, 15 bp, Homo sapiens
acagaaactttcctc

SEQ ID NO: 1100737 - DNA, 15 bp, Homo sapiens
cacagaaactttcct

SEQ ID NO: 1100738 - DNA, 15 bp, Homo sapiens
tcacagaaactttcc

SEQ ID NO: 1100739 - DNA, 15 bp, Homo sapiens
ctcacagaaactttc

SEQ ID NO: 1100740 - DNA, 15 bp, Homo sapiens
gctcacagaaacttt

SEQ ID NO: 1100741 - DNA, 15 bp, Homo sapiens
agctcacagaaactt

SEQ ID NO: 1100742 - DNA, 15 bp, Homo sapiens
cagctcacagaaact

SEQ ID NO: 1100743 - DNA, 15 bp, Homo sapiens
acagctcacagaaac

SEQ ID NO: 1100744 - DNA, 15 bp, Homo sapiens
gacagctcacagaaa

SEQ ID NO: 1100745 - DNA, 15 bp, Homo sapiens
agacagctcacagaa

SEQ ID NO: 1100746 - DNA, 15 bp, Homo sapiens
aagacagctcacaga

SEQ ID NO: 1100747 - DNA, 15 bp, Homo sapiens
gaagacagctcacag

SEQ ID NO: 1100748 - DNA, 15 bp, Homo sapiens
ggaagacagctcaca

SEQ ID NO: 1100749 - DNA, 15 bp, Homo sapiens
gggaagacagctcac

SEQ ID NO: 1100750 - DNA, 15 bp, Homo sapiens
tgggaagacagctca

SEQ ID NO: 1100751 - DNA, 15 bp, Homo sapiens
ctgggaagacagctc

SEQ ID NO: 1100752 - DNA, 15 bp, Homo sapiens
tctgggaagacagct

SEQ ID NO: 1100753 - DNA, 15 bp, Homo sapiens
ctctgggaagacagc

SEQ ID NO: 1100754 - DNA, 15 bp, Homo sapiens
cctctgggaagacag

SEQ ID NO: 1100755 - DNA, 15 bp, Homo sapiens
gcctctgggaagaca

SEQ ID NO: 1100756 - DNA, 15 bp, Homo sapiens
ggcctctgggaagac

SEQ ID NO: 1100757 - DNA, 15 bp, Homo sapiens
aggcctctgggaaga

SEQ ID NO: 1100758 - DNA, 15 bp, Homo sapiens
aaggcctctgggaag

SEQ ID NO: 1100759 - DNA, 15 bp, Homo sapiens
taaggcctctgggaa

SEQ ID NO: 1100760 - DNA, 15 bp, Homo sapiens
ataaggcctctggga

SEQ ID NO: 1100761 - DNA, 15 bp, Homo sapiens
aataaggcctctggg

SEQ ID NO: 1100762 - DNA, 15 bp, Homo sapiens
gaataaggcctctgg

SEQ ID NO: 1100763 - DNA, 15 bp, Homo sapiens
ggaataaggcctctg

SEQ ID NO: 1100764 - DNA, 15 bp, Homo sapiens
gggaataaggcctct

SEQ ID NO: 1100765 - DNA, 15 bp, Homo sapiens
tgggaataaggcctc

SEQ ID NO: 1100766 - DNA, 15 bp, Homo sapiens
ctgggaataaggcct

SEQ ID NO: 1100767 - DNA, 15 bp, Homo sapiens
tctgggaataaggcc

SEQ ID NO: 1100768 - DNA, 15 bp, Homo sapiens
ttctgggaataaggc

SEQ ID NO: 1100769 - DNA, 15 bp, Homo sapiens
cttctgggaataagg

SEQ ID NO: 1100770 - DNA, 15 bp, Homo sapiens
acttctgggaataag

SEQ ID NO: 1100771 - DNA, 15 bp, Homo sapiens
cacttctgggaataa

SEQ ID NO: 1100772 - DNA, 15 bp, Homo sapiens
acacttctgggaata

SEQ ID NO: 1100773 - DNA, 15 bp, Homo sapiens
gacacttctgggaat

SEQ ID NO: 1100774 - DNA, 15 bp, Homo sapiens
tgacacttctgggaa

SEQ ID NO: 1100775 - DNA, 15 bp, Homo sapiens
ctgacacttctggga

SEQ ID NO: 1100776 - DNA, 15 bp, Homo sapiens
cctgacacttctggg

SEQ ID NO: 1100777 - DNA, 15 bp, Homo sapiens
gcctgacacttctgg

SEQ ID NO: 1100778 - DNA, 15 bp, Homo sapiens
agcctgacacttctg

SEQ ID NO: 1100779 - DNA, 15 bp, Homo sapiens
gagcctgacacttct

SEQ ID NO: 1100780 - DNA, 15 bp, Homo sapiens
ggagcctgacacttc

SEQ ID NO: 1100781 - DNA, 15 bp, Homo sapiens
aggagcctgacactt

SEQ ID NO: 1100782 - DNA, 15 bp, Homo sapiens
caggagcctgacact

SEQ ID NO: 1100783 - DNA, 15 bp, Homo sapiens
tcaggagcctgacac

SEQ ID NO: 1100784 - DNA, 15 bp, Homo sapiens
ttcaggagcctgaca

SEQ ID NO: 1100785 - DNA, 15 bp, Homo sapiens
gttcaggagcctgac

SEQ ID NO: 1100786 - DNA, 15 bp, Homo sapiens
ggttcaggagcctga

SEQ ID NO: 1100787 - DNA, 15 bp, Homo sapiens
gggttcaggagcctg

SEQ ID NO: 1100788 - DNA, 15 bp, Homo sapiens
tgggttcaggagcct

SEQ ID NO: 1100789 - DNA, 15 bp, Homo sapiens
gtgggttcaggagcc

SEQ ID NO: 1100790 - DNA, 15 bp, Homo sapiens
tgtgggttcaggagc

SEQ ID NO: 1100791 - DNA, 15 bp, Homo sapiens
gtgtgggttcaggag

SEQ ID NO: 1100792 - DNA, 15 bp, Homo sapiens
agtgtgggttcagga

SEQ ID NO: 1100793 - DNA, 15 bp, Homo sapiens
aagtgtgggttcagg

SEQ ID NO: 1100794 - DNA, 15 bp, Homo sapiens
aaagtgtgggttcag

SEQ ID NO: 1100795 - DNA, 15 bp, Homo sapiens
gaaagtgtgggttca

SEQ ID NO: 1100796 - DNA, 15 bp, Homo sapiens
ggaaagtgtgggttc

SEQ ID NO: 1100797 - DNA, 15 bp, Homo sapiens
aggaaagtgtgggtt

SEQ ID NO: 1100798 - DNA, 15 bp, Homo sapiens
gaggaaagtgtgggt

SEQ ID NO: 1100799 - DNA, 15 bp, Homo sapiens
agaggaaagtgtggg

SEQ ID NO: 1100800 - DNA, 15 bp, Homo sapiens
cagaggaaagtgtgg

SEQ ID NO: 1100801 - DNA, 15 bp, Homo sapiens
tcagaggaaagtgtg

SEQ ID NO: 1100802 - DNA, 15 bp, Homo sapiens
atcagaggaaagtgt

SEQ ID NO: 1100803 - DNA, 15 bp, Homo sapiens
gatcagaggaaagtg

SEQ ID NO: 1100804 - DNA, 15 bp, Homo sapiens
ggatcagaggaaagt

SEQ ID NO: 1100805 - DNA, 15 bp, Homo sapiens
cggatcagaggaaag

SEQ ID NO: 1100806 - DNA, 15 bp, Homo sapiens
tcggatcagaggaaa

SEQ ID NO: 1100807 - DNA, 15 bp, Homo sapiens
atcggatcagaggaa

SEQ ID NO: 1100808 - DNA, 15 bp, Homo sapiens
aatcggatcagagga

SEQ ID NO: 1100809 - DNA, 15 bp, Homo sapiens
aaatcggatcagagg

SEQ ID NO: 1100810 - DNA, 15 bp, Homo sapiens
aaaatcggatcagag

SEQ ID NO: 1100811 - DNA, 15 bp, Homo sapiens
taaaatcggatcaga

SEQ ID NO: 1100812 - DNA, 15 bp, Homo sapiens
gtaaaatcggatcag

SEQ ID NO: 1100813 - DNA, 15 bp, Homo sapiens
agtaaaatcggatca

SEQ ID NO: 1100814 - DNA, 15 bp, Homo sapiens
gagtaaaatcggatc

SEQ ID NO: 1100815 - DNA, 15 bp, Homo sapiens
ggagtaaaatcggat

SEQ ID NO: 1100816 - DNA, 15 bp, Homo sapiens
aggagtaaaatcgga

SEQ ID NO: 1100817 - DNA, 15 bp, Homo sapiens
aaggagtaaaatcgg

SEQ ID NO: 1100818 - DNA, 15 bp, Homo sapiens
taaggagtaaaatcg

SEQ ID NO: 1100819 - DNA, 15 bp, Homo sapiens
ctaaggagtaaaatc

SEQ ID NO: 1100820 - DNA, 15 bp, Homo sapiens
gctaaggagtaaaat

SEQ ID NO: 1100821 - DNA, 15 bp, Homo sapiens
ggctaaggagtaaaa

SEQ ID NO: 1100822 - DNA, 15 bp, Homo sapiens
gggctaaggagtaaa

SEQ ID NO: 1100823 - DNA, 15 bp, Homo sapiens
ggggctaaggagtaa

SEQ ID NO: 1100824 - DNA, 15 bp, Homo sapiens
tggggctaaggagta

SEQ ID NO: 1100825 - DNA, 15 bp, Homo sapiens
ctggggctaaggagt

SEQ ID NO: 1100826 - DNA, 15 bp, Homo sapiens
cctggggctaaggag

SEQ ID NO: 1100827 - DNA, 15 bp, Homo sapiens
gcctggggctaagga

SEQ ID NO: 1100828 - DNA, 15 bp, Homo sapiens
ggcctggggctaagg

SEQ ID NO: 1100829 - DNA, 15 bp, Homo sapiens
aggcctggggctaag

SEQ ID NO: 1100830 - DNA, 15 bp, Homo sapiens
taggcctggggctaa

SEQ ID NO: 1100831 - DNA, 15 bp, Homo sapiens
ttaggcctggggcta

SEQ ID NO: 1100832 - DNA, 15 bp, Homo sapiens
cttaggcctggggct

SEQ ID NO: 1100833 - DNA, 15 bp, Homo sapiens
ccttaggcctggggc

SEQ ID NO: 1100834 - DNA, 15 bp, Homo sapiens
gccttaggcctgggg

SEQ ID NO: 1100835 - DNA, 15 bp, Homo sapiens
tgccttaggcctggg

SEQ ID NO: 1100836 - DNA, 15 bp, Homo sapiens
ttgccttaggcctgg

SEQ ID NO: 1100837 - DNA, 15 bp, Homo sapiens
tttgccttaggcctg

SEQ ID NO: 1100838 - DNA, 15 bp, Homo sapiens
ttttgccttaggcct

SEQ ID NO: 1100839 - DNA, 15 bp, Homo sapiens
cttttgccttaggcc

SEQ ID NO: 1100840 - DNA, 15 bp, Homo sapiens
gcttttgccttaggc

SEQ ID NO: 1100841 - DNA, 15 bp, Homo sapiens
agcttttgccttagg

SEQ ID NO: 1100842 - DNA, 15 bp, Homo sapiens
cagcttttgccttag

SEQ ID NO: 1100843 - DNA, 15 bp, Homo sapiens
ccagcttttgcctta

SEQ ID NO: 1100844 - DNA, 15 bp, Homo sapiens
cccagcttttgcctt

SEQ ID NO: 1100845 - DNA, 15 bp, Homo sapiens
gcccagcttttgcct

SEQ ID NO: 1100846 - DNA, 15 bp, Homo sapiens
tgcccagcttttgcc

SEQ ID NO: 1100847 - DNA, 15 bp, Homo sapiens
atgcccagcttttgc

SEQ ID NO: 1100848 - DNA, 15 bp, Homo sapiens
gatgcccagcttttg

SEQ ID NO: 1100849 - DNA, 15 bp, Homo sapiens
ggatgcccagctttt

SEQ ID NO: 1100850 - DNA, 15 bp, Homo sapiens
aggatgcccagcttt

SEQ ID NO: 1100851 - DNA, 15 bp, Homo sapiens
caggatgcccagctt

SEQ ID NO: 1100852 - DNA, 15 bp, Homo sapiens
ccaggatgcccagct

SEQ ID NO: 1100853 - DNA, 15 bp, Homo sapiens
cccaggatgcccagc

SEQ ID NO: 1100854 - DNA, 15 bp, Homo sapiens
ccccaggatgcccag

SEQ ID NO: 1100855 - DNA, 15 bp, Homo sapiens
cccccaggatgccca

SEQ ID NO: 1100856 - DNA, 15 bp, Homo sapiens
gcccccaggatgccc

SEQ ID NO: 1100857 - DNA, 15 bp, Homo sapiens
tgcccccaggatgcc

SEQ ID NO: 1100858 - DNA, 15 bp, Homo sapiens
atgcccccaggatgc

SEQ ID NO: 1100859 - DNA, 15 bp, Homo sapiens
tatgcccccaggatg

SEQ ID NO: 1100860 - DNA, 15 bp, Homo sapiens
ttatgcccccaggat

SEQ ID NO: 1100861 - DNA, 15 bp, Homo sapiens
gttatgcccccagga

SEQ ID NO: 1100862 - DNA, 15 bp, Homo sapiens
tgttatgcccccagg

SEQ ID NO: 1100863 - DNA, 15 bp, Homo sapiens
ctgttatgcccccag

SEQ ID NO: 1100864 - DNA, 15 bp, Homo sapiens
cctgttatgccccca

SEQ ID NO: 1100865 - DNA, 15 bp, Homo sapiens
tcctgttatgccccc

SEQ ID NO: 1100866 - DNA, 15 bp, Homo sapiens
atcctgttatgcccc

SEQ ID NO: 1100867 - DNA, 15 bp, Homo sapiens
aatcctgttatgccc

SEQ ID NO: 1100868 - DNA, 15 bp, Homo sapiens
caatcctgttatgcc

SEQ ID NO: 1100869 - DNA, 15 bp, Homo sapiens
ccaatcctgttatgc

SEQ ID NO: 1100870 - DNA, 15 bp, Homo sapiens
cccaatcctgttatg

SEQ ID NO: 1100871 - DNA, 15 bp, Homo sapiens
ccccaatcctgttat

SEQ ID NO: 1100872 - DNA, 15 bp, Homo sapiens
accccaatcctgtta

SEQ ID NO: 1100873 - DNA, 15 bp, Homo sapiens
caccccaatcctgtt

SEQ ID NO: 1100874 - DNA, 15 bp, Homo sapiens
ccaccccaatcctgt

SEQ ID NO: 1100875 - DNA, 15 bp, Homo sapiens
accaccccaatcctg

SEQ ID NO: 1100876 - DNA, 15 bp, Homo sapiens
taccaccccaatcct

SEQ ID NO: 1100877 - DNA, 15 bp, Homo sapiens
ctaccaccccaatcc

SEQ ID NO: 1100878 - DNA, 15 bp, Homo sapiens
tctaccaccccaatc

SEQ ID NO: 1100879 - DNA, 15 bp, Homo sapiens
ctctaccaccccaat

SEQ ID NO: 1100880 - DNA, 15 bp, Homo sapiens
tctctaccaccccaa

SEQ ID NO: 1100881 - DNA, 15 bp, Homo sapiens
ttctctaccacccca

SEQ ID NO: 1100882 - DNA, 15 bp, Homo sapiens
cttctctaccacccc

SEQ ID NO: 1100883 - DNA, 15 bp, Homo sapiens
ccttctctaccaccc

SEQ ID NO: 1100884 - DNA, 15 bp, Homo sapiens
tccttctctaccacc

SEQ ID NO: 1100885 - DNA, 15 bp, Homo sapiens
atccttctctaccac

SEQ ID NO: 1100886 - DNA, 15 bp, Homo sapiens
tatccttctctacca

SEQ ID NO: 1100887 - DNA, 15 bp, Homo sapiens
ctatccttctctacc

SEQ ID NO: 1100888 - DNA, 15 bp, Homo sapiens
cctatccttctctac

SEQ ID NO: 1100889 - DNA, 15 bp, Homo sapiens
tcctatccttctcta

SEQ ID NO: 1100890 - DNA, 15 bp, Homo sapiens
ctcctatccttctct

SEQ ID NO: 1100891 - DNA, 15 bp, Homo sapiens
cctcctatccttctc

SEQ ID NO: 1100892 - DNA, 15 bp, Homo sapiens
ccctcctatccttct

SEQ ID NO: 1100893 - DNA, 15 bp, Homo sapiens
cccctcctatccttc

SEQ ID NO: 1100894 - DNA, 15 bp, Homo sapiens
tcccctcctatcctt

SEQ ID NO: 1100895 - DNA, 15 bp, Homo sapiens
gtcccctcctatcct

SEQ ID NO: 1100896 - DNA, 15 bp, Homo sapiens
tgtcccctcctatcc

SEQ ID NO: 1100897 - DNA, 15 bp, Homo sapiens
ctgtcccctcctatc

SEQ ID NO: 1100898 - DNA, 15 bp, Homo sapiens
cctgtcccctcctat

SEQ ID NO: 1100899 - DNA, 15 bp, Homo sapiens
acctgtcccctccta

SEQ ID NO: 1100900 - DNA, 15 bp, Homo sapiens
gacctgtcccctcct

SEQ ID NO: 1100901 - DNA, 15 bp, Homo sapiens
ggacctgtcccctcc

SEQ ID NO: 1100902 - DNA, 15 bp, Homo sapiens
aggacctgtcccctc

SEQ ID NO: 1100903 - DNA, 15 bp, Homo sapiens
taggacctgtcccct

SEQ ID NO: 1100904 - DNA, 15 bp, Homo sapiens
ctaggacctgtcccc

SEQ ID NO: 1100905 - DNA, 15 bp, Homo sapiens
gctaggacctgtccc

SEQ ID NO: 1100906 - DNA, 15 bp, Homo sapiens
tgctaggacctgtcc

SEQ ID NO: 1100907 - DNA, 15 bp, Homo sapiens
ctgctaggacctgtc

SEQ ID NO: 1100908 - DNA, 15 bp, Homo sapiens
cctgctaggacctgt

SEQ ID NO: 1100909 - DNA, 15 bp, Homo sapiens
ccctgctaggacctg

SEQ ID NO: 1100910 - DNA, 15 bp, Homo sapiens
tccctgctaggacct

SEQ ID NO: 1100911 - DNA, 15 bp, Homo sapiens
ctccctgctaggacc

SEQ ID NO: 1100912 - DNA, 15 bp, Homo sapiens
cctccctgctaggac

SEQ ID NO: 1100913 - DNA, 15 bp, Homo sapiens
ccctccctgctagga

SEQ ID NO: 1100914 - DNA, 15 bp, Homo sapiens
cccctccctgctagg

SEQ ID NO: 1100915 - DNA, 15 bp, Homo sapiens
tcccctccctgctag

SEQ ID NO: 1100916 - DNA, 15 bp, Homo sapiens
ctcccctccctgcta

SEQ ID NO: 1100917 - DNA, 15 bp, Homo sapiens
gctcccctccctgct

SEQ ID NO: 1100918 - DNA, 15 bp, Homo sapiens
agctcccctccctgc

SEQ ID NO: 1100919 - DNA, 15 bp, Homo sapiens
aagctcccctccctg

SEQ ID NO: 1100920 - DNA, 15 bp, Homo sapiens
aaagctcccctccct

SEQ ID NO: 1100921 - DNA, 15 bp, Homo sapiens
caaagctcccctccc

SEQ ID NO: 1100922 - DNA, 15 bp, Homo sapiens
tcaaagctcccctcc

SEQ ID NO: 1100923 - DNA, 15 bp, Homo sapiens
ctcaaagctcccctc

SEQ ID NO: 1100924 - DNA, 15 bp, Homo sapiens
cctcaaagctcccct

SEQ ID NO: 1100925 - DNA, 15 bp, Homo sapiens
ccctcaaagctcccc

SEQ ID NO: 1100926 - DNA, 15 bp, Homo sapiens
cccctcaaagctccc

SEQ ID NO: 1100927 - DNA, 15 bp, Homo sapiens
ccccctcaaagctcc

SEQ ID NO: 1100928 - DNA, 15 bp, Homo sapiens
accccctcaaagctc

SEQ ID NO: 1100929 - DNA, 15 bp, Homo sapiens
caccccctcaaagct

SEQ ID NO: 1100930 - DNA, 15 bp, Homo sapiens
gcaccccctcaaagc

SEQ ID NO: 1100931 - DNA, 15 bp, Homo sapiens
agcaccccctcaaag

SEQ ID NO: 1100932 - DNA, 15 bp, Homo sapiens
gagcaccccctcaaa

SEQ ID NO: 1100933 - DNA, 15 bp, Homo sapiens
agagcaccccctcaa

SEQ ID NO: 1100934 - DNA, 15 bp, Homo sapiens
aagagcaccccctca

SEQ ID NO: 1100935 - DNA, 15 bp, Homo sapiens
caagagcaccccctc

SEQ ID NO: 1100936 - DNA, 15 bp, Homo sapiens
acaagagcaccccct

SEQ ID NO: 1100937 - DNA, 15 bp, Homo sapiens
gacaagagcaccccc

SEQ ID NO: 1100938 - DNA, 15 bp, Homo sapiens
tgacaagagcacccc

SEQ ID NO: 1100939 - DNA, 15 bp, Homo sapiens
atgacaagagcaccc

SEQ ID NO: 1100940 - DNA, 15 bp, Homo sapiens
catgacaagagcacc

SEQ ID NO: 1100941 - DNA, 15 bp, Homo sapiens
ccatgacaagagcac

SEQ ID NO: 1100942 - DNA, 15 bp, Homo sapiens
cccatgacaagagca

SEQ ID NO: 1100943 - DNA, 15 bp, Homo sapiens
tcccatgacaagagc

SEQ ID NO: 1100944 - DNA, 15 bp, Homo sapiens
ttcccatgacaagag

SEQ ID NO: 1100945 - DNA, 15 bp, Homo sapiens
tttcccatgacaaga

SEQ ID NO: 1100946 - DNA, 15 bp, Homo sapiens
gtttcccatgacaag

SEQ ID NO: 1100947 - DNA, 15 bp, Homo sapiens
agtttcccatgacaa

SEQ ID NO: 1100948 - DNA, 15 bp, Homo sapiens
cagtttcccatgaca

SEQ ID NO: 1100949 - DNA, 15 bp, Homo sapiens
tcagtttcccatgac

SEQ ID NO: 1100950 - DNA, 15 bp, Homo sapiens
ctcagtttcccatga

SEQ ID NO: 1100951 - DNA, 15 bp, Homo sapiens
gctcagtttcccatg

SEQ ID NO: 1100952 - DNA, 15 bp, Homo sapiens
agctcagtttcccat

SEQ ID NO: 1100953 - DNA, 15 bp, Homo sapiens
cagctcagtttccca

SEQ ID NO: 1100954 - DNA, 15 bp, Homo sapiens
gcagctcagtttccc

SEQ ID NO: 1100955 - DNA, 15 bp, Homo sapiens
ggcagctcagtttcc

SEQ ID NO: 1100956 - DNA, 15 bp, Homo sapiens
tggcagctcagtttc

SEQ ID NO: 1100957 - DNA, 15 bp, Homo sapiens
gtggcagctcagttt

SEQ ID NO: 1100958 - DNA, 15 bp, Homo sapiens
tgtggcagctcagtt

SEQ ID NO: 1100959 - DNA, 15 bp, Homo sapiens
ctgtggcagctcagt

SEQ ID NO: 1100960 - DNA, 15 bp, Homo sapiens
tctgtggcagctcag

SEQ ID NO: 1100961 - DNA, 15 bp, Homo sapiens
ctctgtggcagctca

SEQ ID NO: 1100962 - DNA, 15 bp, Homo sapiens
tctctgtggcagctc

SEQ ID NO: 1100963 - DNA, 15 bp, Homo sapiens
atctctgtggcagct

SEQ ID NO: 1100964 - DNA, 15 bp, Homo sapiens
gatctctgtggcagc

SEQ ID NO: 1100965 - DNA, 15 bp, Homo sapiens
agatctctgtggcag

SEQ ID NO: 1100966 - DNA, 15 bp, Homo sapiens
cagatctctgtggca

SEQ ID NO: 1100967 - DNA, 15 bp, Homo sapiens
tcagatctctgtggc

SEQ ID NO: 1100968 - DNA, 15 bp, Homo sapiens
ctcagatctctgtgg

SEQ ID NO: 1100969 - DNA, 15 bp, Homo sapiens
actcagatctctgtg

SEQ ID NO: 1100970 - DNA, 15 bp, Homo sapiens
gactcagatctctgt

SEQ ID NO: 1100971 - DNA, 15 bp, Homo sapiens
tgactcagatctctg

SEQ ID NO: 1100972 - DNA, 15 bp, Homo sapiens
gtgactcagatctct

SEQ ID NO: 1100973 - DNA, 15 bp, Homo sapiens
tgtgactcagatctc

SEQ ID NO: 1100974 - DNA, 15 bp, Homo sapiens
ctgtgactcagatct

SEQ ID NO: 1100975 - DNA, 15 bp, Homo sapiens
cctgtgactcagatc

SEQ ID NO: 1100976 - DNA, 15 bp, Homo sapiens
tcctgtgactcagat

SEQ ID NO: 1100977 - DNA, 15 bp, Homo sapiens
ctcctgtgactcaga

SEQ ID NO: 1100978 - DNA, 15 bp, Homo sapiens
cctcctgtgactcag

SEQ ID NO: 1100979 - DNA, 15 bp, Homo sapiens
acctcctgtgactca

SEQ ID NO: 1100980 - DNA, 15 bp, Homo sapiens
cacctcctgtgactc

SEQ ID NO: 1100981 - DNA, 15 bp, Homo sapiens
acacctcctgtgact

SEQ ID NO: 1100982 - DNA, 15 bp, Homo sapiens
aacacctcctgtgac

SEQ ID NO: 1100983 - DNA, 15 bp, Homo sapiens
taacacctcctgtga

SEQ ID NO: 1100984 - DNA, 15 bp, Homo sapiens
ttaacacctcctgtg

SEQ ID NO: 1100985 - DNA, 15 bp, Homo sapiens
cttaacacctcctgt

SEQ ID NO: 1100986 - DNA, 15 bp, Homo sapiens
ccttaacacctcctg

SEQ ID NO: 1100987 - DNA, 15 bp, Homo sapiens
tccttaacacctcct

SEQ ID NO: 1100988 - DNA, 15 bp, Homo sapiens
atccttaacacctcc

SEQ ID NO: 1100989 - DNA, 15 bp, Homo sapiens
tatccttaacacctc

SEQ ID NO: 1100990 - DNA, 15 bp, Homo sapiens
ctatccttaacacct

SEQ ID NO: 1100991 - DNA, 15 bp, Homo sapiens
tctatccttaacacc

SEQ ID NO: 1100992 - DNA, 15 bp, Homo sapiens
atctatccttaacac

SEQ ID NO: 1100993 - DNA, 15 bp, Homo sapiens
aatctatccttaaca

SEQ ID NO: 1100994 - DNA, 15 bp, Homo sapiens
caatctatccttaac

SEQ ID NO: 1100995 - DNA, 15 bp, Homo sapiens
gcaatctatccttaa

SEQ ID NO: 1100996 - DNA, 15 bp, Homo sapiens
tgcaatctatcctta

SEQ ID NO: 1100997 - DNA, 15 bp, Homo sapiens
ttgcaatctatcctt

SEQ ID NO: 1100998 - DNA, 15 bp, Homo sapiens
gttgcaatctatcct

SEQ ID NO: 1100999 - DNA, 15 bp, Homo sapiens
tgttgcaatctatcc

SEQ ID NO: 1101000 - DNA, 15 bp, Homo sapiens
ttgttgcaatctatc

SEQ ID NO: 1101001 - DNA, 15 bp, Homo sapiens
attgttgcaatctat

SEQ ID NO: 1101002 - DNA, 15 bp, Homo sapiens
aattgttgcaatcta

SEQ ID NO: 1101003 - DNA, 15 bp, Homo sapiens
taattgttgcaatct

SEQ ID NO: 1101004 - DNA, 15 bp, Homo sapiens
ataattgttgcaatc

SEQ ID NO: 1101005 - DNA, 15 bp, Homo sapiens
cataattgttgcaat

SEQ ID NO: 1101006 - DNA, 15 bp, Homo sapiens
tcataattgttgcaa

SEQ ID NO: 1101007 - DNA, 15 bp, Homo sapiens
gtcataattgttgca

SEQ ID NO: 1101008 - DNA, 15 bp, Homo sapiens
tgtcataattgttgc

SEQ ID NO: 1101009 - DNA, 15 bp, Homo sapiens
gtgtcataattgttg

SEQ ID NO: 1101010 - DNA, 15 bp, Homo sapiens
tgtgtcataattgtt

SEQ ID NO: 1101011 - DNA, 15 bp, Homo sapiens
ttgtgtcataattgt

SEQ ID NO: 1101012 - DNA, 15 bp, Homo sapiens
gttgtgtcataattg

SEQ ID NO: 1101013 - DNA, 15 bp, Homo sapiens
tgttgtgtcataatt

SEQ ID NO: 1101014 - DNA, 15 bp, Homo sapiens
atgttgtgtcataat

SEQ ID NO: 1101015 - DNA, 15 bp, Homo sapiens
gatgttgtgtcataa

SEQ ID NO: 1101016 - DNA, 15 bp, Homo sapiens
tgatgttgtgtcata

SEQ ID NO: 1101017 - DNA, 15 bp, Homo sapiens
atgatgttgtgtcat

SEQ ID NO: 1101018 - DNA, 15 bp, Homo sapiens
catgatgttgtgtca

SEQ ID NO: 1101019 - DNA, 15 bp, Homo sapiens
gcatgatgttgtgtc

SEQ ID NO: 1101020 - DNA, 15 bp, Homo sapiens
cgcatgatgttgtgt

SEQ ID NO: 1101021 - DNA, 15 bp, Homo sapiens
acgcatgatgttgtg

SEQ ID NO: 1101022 - DNA, 15 bp, Homo sapiens
cacgcatgatgttgt

SEQ ID NO: 1101023 - DNA, 15 bp, Homo sapiens
gcacgcatgatgttg

SEQ ID NO: 1101024 - DNA, 15 bp, Homo sapiens
agcacgcatgatgtt

SEQ ID NO: 1101025 - DNA, 15 bp, Homo sapiens
aagcacgcatgatgt

SEQ ID NO: 1101026 - DNA, 15 bp, Homo sapiens
taagcacgcatgatg

SEQ ID NO: 1101027 - DNA, 15 bp, Homo sapiens
ataagcacgcatgat

SEQ ID NO: 1101028 - DNA, 15 bp, Homo sapiens
tataagcacgcatga

SEQ ID NO: 1101029 - DNA, 15 bp, Homo sapiens
ttataagcacgcatg

SEQ ID NO: 1101030 - DNA, 15 bp, Homo sapiens
cttataagcacgcat

SEQ ID NO: 1101031 - DNA, 15 bp, Homo sapiens
tcttataagcacgca

SEQ ID NO: 1101032 - DNA, 15 bp, Homo sapiens
gtcttataagcacgc

SEQ ID NO: 1101033 - DNA, 15 bp, Homo sapiens
agtcttataagcacg

SEQ ID NO: 1101034 - DNA, 15 bp, Homo sapiens
tagtcttataagcac

SEQ ID NO: 1101035 - DNA, 15 bp, Homo sapiens
ttagtcttataagca

SEQ ID NO: 1101036 - DNA, 15 bp, Homo sapiens
tttagtcttataagc

SEQ ID NO: 1101037 - DNA, 15 bp, Homo sapiens
ttttagtcttataag

SEQ ID NO: 1101038 - DNA, 15 bp, Homo sapiens
tttttagtcttataa

SEQ ID NO: 1101039 - DNA, 15 bp, Homo sapiens
ttttttagtcttata

SEQ ID NO: 1101040 - DNA, 15 bp, Homo sapiens
attttttagtcttat

SEQ ID NO: 1101041 - DNA, 15 bp, Homo sapiens
tattttttagtctta

SEQ ID NO: 1101042 - DNA, 15 bp, Homo sapiens
ctattttttagtctt

SEQ ID NO: 1101043 - DNA, 15 bp, Homo sapiens
actattttttagtct

SEQ ID NO: 1101044 - DNA, 15 bp, Homo sapiens
cactattttttagtc

SEQ ID NO: 1101045 - DNA, 15 bp, Homo sapiens
acactattttttagt

SEQ ID NO: 1101046 - DNA, 15 bp, Homo sapiens
tacactattttttag

SEQ ID NO: 1101047 - DNA, 15 bp, Homo sapiens
atacactatttttta

SEQ ID NO: 1101048 - DNA, 15 bp, Homo sapiens
aatacactatttttt

SEQ ID NO: 1101049 - DNA, 15 bp, Homo sapiens
aaatacactattttt

SEQ ID NO: 1101050 - DNA, 15 bp, Homo sapiens
aaaatacactatttt

SEQ ID NO: 1101051 - DNA, 15 bp, Homo sapiens
caaaatacactattt

SEQ ID NO: 1101052 - DNA, 15 bp, Homo sapiens
gcaaaatacactatt

SEQ ID NO: 1101053 - DNA, 15 bp, Homo sapiens
tgcaaaatacactat

SEQ ID NO: 1101054 - DNA, 15 bp, Homo sapiens
atgcaaaatacacta

SEQ ID NO: 1101055 - DNA, 15 bp, Homo sapiens
aatgcaaaatacact

SEQ ID NO: 1101056 - DNA, 15 bp, Homo sapiens
aaatgcaaaatacac

SEQ ID NO: 1101057 - DNA, 15 bp, Homo sapiens
aaaatgcaaaataca

SEQ ID NO: 1101058 - DNA, 15 bp, Homo sapiens
caaaatgcaaaatac

SEQ ID NO: 1101059 - DNA, 15 bp, Homo sapiens
acaaaatgcaaaata

SEQ ID NO: 1101060 - DNA, 15 bp, Homo sapiens
aacaaaatgcaaaat

SEQ ID NO: 1101061 - DNA, 15 bp, Homo sapiens
aaacaaaatgcaaaa

SEQ ID NO: 1101062 - DNA, 15 bp, Homo sapiens
aaaacaaaatgcaaa

SEQ ID NO: 1101063 - DNA, 15 bp, Homo sapiens
gaaaacaaaatgcaa

SEQ ID NO: 1101064 - DNA, 15 bp, Homo sapiens
agaaaacaaaatgca

SEQ ID NO: 1101065 - DNA, 15 bp, Homo sapiens
cagaaaacaaaatgc

SEQ ID NO: 1101066 - DNA, 15 bp, Homo sapiens
acagaaaacaaaatg

SEQ ID NO: 1101067 - DNA, 15 bp, Homo sapiens
gacagaaaacaaaat

SEQ ID NO: 1101068 - DNA, 15 bp, Homo sapiens
agacagaaaacaaaa

SEQ ID NO: 1101069 - DNA, 15 bp, Homo sapiens
tagacagaaaacaaa

SEQ ID NO: 1101070 - DNA, 15 bp, Homo sapiens
atagacagaaaacaa

SEQ ID NO: 1101071 - DNA, 15 bp, Homo sapiens
catagacagaaaaca

SEQ ID NO: 1101072 - DNA, 15 bp, Homo sapiens
tcatagacagaaaac

SEQ ID NO: 1101073 - DNA, 15 bp, Homo sapiens
ttcatagacagaaaa

SEQ ID NO: 1101074 - DNA, 15 bp, Homo sapiens
cttcatagacagaaa

SEQ ID NO: 1101075 - DNA, 15 bp, Homo sapiens
acttcatagacagaa

SEQ ID NO: 1101076 - DNA, 15 bp, Homo sapiens
gacttcatagacaga

SEQ ID NO: 1101077 - DNA, 15 bp, Homo sapiens
tgacttcatagacag

SEQ ID NO: 1101078 - DNA, 15 bp, Homo sapiens
ttgacttcatagaca

SEQ ID NO: 1101079 - DNA, 15 bp, Homo sapiens
tttgacttcatagac

SEQ ID NO: 1101080 - DNA, 15 bp, Homo sapiens
ttttgacttcataga

SEQ ID NO: 1101081 - DNA, 15 bp, Homo sapiens
cttttgacttcatag

SEQ ID NO: 1101082 - DNA, 15 bp, Homo sapiens
ccttttgacttcata

SEQ ID NO: 1101083 - DNA, 15 bp, Homo sapiens
cccttttgacttcat

SEQ ID NO: 1101084 - DNA, 15 bp, Homo sapiens
acccttttgacttca

SEQ ID NO: 1101085 - DNA, 15 bp, Homo sapiens
aacccttttgacttc

SEQ ID NO: 1101086 - DNA, 15 bp, Homo sapiens
taacccttttgactt

SEQ ID NO: 1101087 - DNA, 15 bp, Homo sapiens
ctaacccttttgact

SEQ ID NO: 1101088 - DNA, 15 bp, Homo sapiens
tctaacccttttgac

SEQ ID NO: 1101089 - DNA, 15 bp, Homo sapiens
ctctaacccttttga

SEQ ID NO: 1101090 - DNA, 15 bp, Homo sapiens
actctaacccttttg

SEQ ID NO: 1101091 - DNA, 15 bp, Homo sapiens
aactctaaccctttt

SEQ ID NO: 1101092 - DNA, 15 bp, Homo sapiens
taactctaacccttt

SEQ ID NO: 1101093 - DNA, 15 bp, Homo sapiens
gtaactctaaccctt

SEQ ID NO: 1101094 - DNA, 15 bp, Homo sapiens
agtaactctaaccct

SEQ ID NO: 1101095 - DNA, 15 bp, Homo sapiens
gagtaactctaaccc

SEQ ID NO: 1101096 - DNA, 15 bp, Homo sapiens
ggagtaactctaacc

SEQ ID NO: 1101097 - DNA, 15 bp, Homo sapiens
gggagtaactctaac

SEQ ID NO: 1101098 - DNA, 15 bp, Homo sapiens
ggggagtaactctaa

SEQ ID NO: 1101099 - DNA, 15 bp, Homo sapiens
aggggagtaactcta

SEQ ID NO: 1101100 - DNA, 15 bp, Homo sapiens
gaggggagtaactct

SEQ ID NO: 1101101 - DNA, 15 bp, Homo sapiens
tgaggggagtaactc

SEQ ID NO: 1101102 - DNA, 15 bp, Homo sapiens
atgaggggagtaact

SEQ ID NO: 1101103 - DNA, 15 bp, Homo sapiens
catgaggggagtaac

SEQ ID NO: 1101104 - DNA, 15 bp, Homo sapiens
acatgaggggagtaa

SEQ ID NO: 1101105 - DNA, 15 bp, Homo sapiens
aacatgaggggagta

SEQ ID NO: 1101106 - DNA, 15 bp, Homo sapiens
caacatgaggggagt

SEQ ID NO: 1101107 - DNA, 15 bp, Homo sapiens
gcaacatgaggggag

SEQ ID NO: 1101108 - DNA, 15 bp, Homo sapiens
agcaacatgagggga

SEQ ID NO: 1101109 - DNA, 15 bp, Homo sapiens
cagcaacatgagggg

SEQ ID NO: 1101110 - DNA, 15 bp, Homo sapiens
tcagcaacatgaggg

SEQ ID NO: 1101111 - DNA, 15 bp, Homo sapiens
atcagcaacatgagg

SEQ ID NO: 1101112 - DNA, 15 bp, Homo sapiens
catcagcaacatgag

SEQ ID NO: 1101113 - DNA, 15 bp, Homo sapiens
ccatcagcaacatga

SEQ ID NO: 1101114 - DNA, 15 bp, Homo sapiens
cccatcagcaacatg

SEQ ID NO: 1101115 - DNA, 15 bp, Homo sapiens
ccccatcagcaacat

SEQ ID NO: 1101116 - DNA, 15 bp, Homo sapiens
cccccatcagcaaca

SEQ ID NO: 1101117 - DNA, 15 bp, Homo sapiens
tcccccatcagcaac

SEQ ID NO: 1101118 - DNA, 15 bp, Homo sapiens
ttcccccatcagcaa

SEQ ID NO: 1101119 - DNA, 15 bp, Homo sapiens
attcccccatcagca

SEQ ID NO: 1101120 - DNA, 15 bp, Homo sapiens
cattcccccatcagc

SEQ ID NO: 1101121 - DNA, 15 bp, Homo sapiens
tcattcccccatcag

SEQ ID NO: 1101122 - DNA, 15 bp, Homo sapiens
ttcattcccccatca

SEQ ID NO: 1101123 - DNA, 15 bp, Homo sapiens
tttcattcccccatc

SEQ ID NO: 1101124 - DNA, 15 bp, Homo sapiens
ctttcattcccccat

SEQ ID NO: 1101125 - DNA, 15 bp, Homo sapiens
gctttcattccccca

SEQ ID NO: 1101126 - DNA, 15 bp, Homo sapiens
agctttcattccccc

SEQ ID NO: 1101127 - DNA, 15 bp, Homo sapiens
gagctttcattcccc

SEQ ID NO: 1101128 - DNA, 15 bp, Homo sapiens
tgagctttcattccc

SEQ ID NO: 1101129 - DNA, 15 bp, Homo sapiens
ctgagctttcattcc

SEQ ID NO: 1101130 - DNA, 15 bp, Homo sapiens
tctgagctttcattc

SEQ ID NO: 1101131 - DNA, 15 bp, Homo sapiens
ttctgagctttcatt

SEQ ID NO: 1101132 - DNA, 15 bp, Homo sapiens
tttctgagctttcat

SEQ ID NO: 1101133 - DNA, 15 bp, Homo sapiens
ttttctgagctttca

SEQ ID NO: 1101134 - DNA, 15 bp, Homo sapiens
tttttctgagctttc

SEQ ID NO: 1101135 - DNA, 15 bp, Homo sapiens
ctttttctgagcttt

SEQ ID NO: 1101136 - DNA, 15 bp, Homo sapiens
tctttttctgagctt

SEQ ID NO: 1101137 - DNA, 15 bp, Homo sapiens
ctctttttctgagct

SEQ ID NO: 1101138 - DNA, 15 bp, Homo sapiens
cctctttttctgagc

SEQ ID NO: 1101139 - DNA, 15 bp, Homo sapiens
ccctctttttctgag

SEQ ID NO: 1101140 - DNA, 15 bp, Homo sapiens
accctctttttctga

SEQ ID NO: 1101141 - DNA, 15 bp, Homo sapiens
gaccctctttttctg

SEQ ID NO: 1101142 - DNA, 15 bp, Homo sapiens
ggaccctctttttct

SEQ ID NO: 1101143 - DNA, 15 bp, Homo sapiens
gggaccctctttttc

SEQ ID NO: 1101144 - DNA, 15 bp, Homo sapiens
ggggaccctcttttt

SEQ ID NO: 1101145 - DNA, 15 bp, Homo sapiens
aggggaccctctttt

SEQ ID NO: 1101146 - DNA, 15 bp, Homo sapiens
caggggaccctcttt

SEQ ID NO: 1101147 - DNA, 15 bp, Homo sapiens
acaggggaccctctt

SEQ ID NO: 1101148 - DNA, 15 bp, Homo sapiens
tacaggggaccctct

SEQ ID NO: 1101149 - DNA, 15 bp, Homo sapiens
atacaggggaccctc

SEQ ID NO: 1101150 - DNA, 15 bp, Homo sapiens
tatacaggggaccct

SEQ ID NO: 1101151 - DNA, 15 bp, Homo sapiens
ttatacaggggaccc

SEQ ID NO: 1101152 - DNA, 15 bp, Homo sapiens
tttatacaggggacc

SEQ ID NO: 1101153 - DNA, 15 bp, Homo sapiens
ctttatacaggggac

SEQ ID NO: 1101154 - DNA, 15 bp, Homo sapiens
actttatacagggga

SEQ ID NO: 1101155 - DNA, 15 bp, Homo sapiens
tactttatacagggg

SEQ ID NO: 1101156 - DNA, 15 bp, Homo sapiens
ctactttatacaggg

SEQ ID NO: 1101157 - DNA, 15 bp, Homo sapiens
gctactttatacagg

SEQ ID NO: 1101158 - DNA, 15 bp, Homo sapiens
ggctactttatacag

SEQ ID NO: 1101159 - DNA, 15 bp, Homo sapiens
gggctactttataca

SEQ ID NO: 1101160 - DNA, 15 bp, Homo sapiens
tgggctactttatac

SEQ ID NO: 1101161 - DNA, 15 bp, Homo sapiens
ctgggctactttata

SEQ ID NO: 1101162 - DNA, 15 bp, Homo sapiens
gctgggctactttat

SEQ ID NO: 1101163 - DNA, 15 bp, Homo sapiens
tgctgggctacttta

SEQ ID NO: 1101164 - DNA, 15 bp, Homo sapiens
ctgctgggctacttt

SEQ ID NO: 1101165 - DNA, 15 bp, Homo sapiens
actgctgggctactt

SEQ ID NO: 1101166 - DNA, 15 bp, Homo sapiens
aactgctgggctact

SEQ ID NO: 1101167 - DNA, 15 bp, Homo sapiens
gaactgctgggctac

SEQ ID NO: 1101168 - DNA, 15 bp, Homo sapiens
tgaactgctgggcta

SEQ ID NO: 1101169 - DNA, 15 bp, Homo sapiens
ctgaactgctgggct

SEQ ID NO: 1101170 - DNA, 15 bp, Homo sapiens
cctgaactgctgggc

SEQ ID NO: 1101171 - DNA, 15 bp, Homo sapiens
tcctgaactgctggg

SEQ ID NO: 1101172 - DNA, 15 bp, Homo sapiens
ctcctgaactgctgg

SEQ ID NO: 1101173 - DNA, 15 bp, Homo sapiens
gctcctgaactgctg

SEQ ID NO: 1101174 - DNA, 15 bp, Homo sapiens
tgctcctgaactgct

SEQ ID NO: 1101175 - DNA, 15 bp, Homo sapiens
ctgctcctgaactgc

SEQ ID NO: 1101176 - DNA, 15 bp, Homo sapiens
cctgctcctgaactg

SEQ ID NO: 1101177 - DNA, 15 bp, Homo sapiens
ccctgctcctgaact

SEQ ID NO: 1101178 - DNA, 15 bp, Homo sapiens
tccctgctcctgaac

SEQ ID NO: 1101179 - DNA, 15 bp, Homo sapiens
ttccctgctcctgaa

SEQ ID NO: 1101180 - DNA, 15 bp, Homo sapiens
cttccctgctcctga

SEQ ID NO: 1101181 - DNA, 15 bp, Homo sapiens
tcttccctgctcctg

SEQ ID NO: 1101182 - DNA, 15 bp, Homo sapiens
ctcttccctgctcct

SEQ ID NO: 1101183 - DNA, 15 bp, Homo sapiens
tctcttccctgctcc

SEQ ID NO: 1101184 - DNA, 15 bp, Homo sapiens
ttctcttccctgctc

SEQ ID NO: 1101185 - DNA, 15 bp, Homo sapiens
tttctcttccctgct

SEQ ID NO: 1101186 - DNA, 15 bp, Homo sapiens
ctttctcttccctgc

SEQ ID NO: 1101187 - DNA, 15 bp, Homo sapiens
cctttctcttccctg

SEQ ID NO: 1101188 - DNA, 15 bp, Homo sapiens
ccctttctcttccct

SEQ ID NO: 1101189 - DNA, 15 bp, Homo sapiens
cccctttctcttccc

SEQ ID NO: 1101190 - DNA, 15 bp, Homo sapiens
acccctttctcttcc

SEQ ID NO: 1101191 - DNA, 15 bp, Homo sapiens
cacccctttctcttc

SEQ ID NO: 1101192 - DNA, 15 bp, Homo sapiens
ttcacccctttctct

SEQ ID NO: 1101193 - DNA, 15 bp, Homo sapiens
cttcacccctttctc

SEQ ID NO: 1101194 - DNA, 15 bp, Homo sapiens
ccttcacccctttct

SEQ ID NO: 1101195 - DNA, 15 bp, Homo sapiens
cccttcacccctttc

SEQ ID NO: 1101196 - DNA, 15 bp, Homo sapiens
gcccttcaccccttt

SEQ ID NO: 1101197 - DNA, 15 bp, Homo sapiens
agcccttcacccctt

SEQ ID NO: 1101198 - DNA, 15 bp, Homo sapiens
cagcccttcacccct

SEQ ID NO: 1101199 - DNA, 15 bp, Homo sapiens
ccagcccttcacccc

SEQ ID NO: 1101200 - DNA, 15 bp, Homo sapiens
cccagcccttcaccc

SEQ ID NO: 1101201 - DNA, 15 bp, Homo sapiens
gcccagcccttcacc

SEQ ID NO: 1101202 - DNA, 15 bp, Homo sapiens
agcccagcccttcac

SEQ ID NO: 1101203 - DNA, 15 bp, Homo sapiens
gagcccagcccttca

SEQ ID NO: 1101204 - DNA, 15 bp, Homo sapiens
agagcccagcccttc

SEQ ID NO: 1101205 - DNA, 15 bp, Homo sapiens
aagagcccagccctt

SEQ ID NO: 1101206 - DNA, 15 bp, Homo sapiens
caagagcccagccct

SEQ ID NO: 1101207 - DNA, 15 bp, Homo sapiens
tcaagagcccagccc

SEQ ID NO: 1101208 - DNA, 15 bp, Homo sapiens
gtcaagagcccagcc

SEQ ID NO: 1101209 - DNA, 15 bp, Homo sapiens
ggtcaagagcccagc

SEQ ID NO: 1101210 - DNA, 15 bp, Homo sapiens
aggtcaagagcccag

SEQ ID NO: 1101211 - DNA, 15 bp, Homo sapiens
taggtcaagagccca

SEQ ID NO: 1101212 - DNA, 15 bp, Homo sapiens
ttaggtcaagagccc

SEQ ID NO: 1101213 - DNA, 15 bp, Homo sapiens
gttaggtcaagagcc

SEQ ID NO: 1101214 - DNA, 15 bp, Homo sapiens
tgttaggtcaagagc

SEQ ID NO: 1101215 - DNA, 15 bp, Homo sapiens
gtgttaggtcaagag

SEQ ID NO: 1101216 - DNA, 15 bp, Homo sapiens
ggtgttaggtcaaga

SEQ ID NO: 1101217 - DNA, 15 bp, Homo sapiens
aggtgttaggtcaag

SEQ ID NO: 1101218 - DNA, 15 bp, Homo sapiens
gaggtgttaggtcaa

SEQ ID NO: 1101219 - DNA, 15 bp, Homo sapiens
ggaggtgttaggtca

SEQ ID NO: 1101220 - DNA, 15 bp, Homo sapiens
aggaggtgttaggtc

SEQ ID NO: 1101221 - DNA, 15 bp, Homo sapiens
taggaggtgttaggt

SEQ ID NO: 1101222 - DNA, 15 bp, Homo sapiens
gtaggaggtgttagg

SEQ ID NO: 1101223 - DNA, 15 bp, Homo sapiens
agtaggaggtgttag

SEQ ID NO: 1101224 - DNA, 15 bp, Homo sapiens
gagtaggaggtgtta

SEQ ID NO: 1101225 - DNA, 15 bp, Homo sapiens
tgagtaggaggtgtt

SEQ ID NO: 1101226 - DNA, 15 bp, Homo sapiens
ctgagtaggaggtgt

SEQ ID NO: 1101227 - DNA, 15 bp, Homo sapiens
tctgagtaggaggtg

SEQ ID NO: 1101228 - DNA, 15 bp, Homo sapiens
gtctgagtaggaggt

SEQ ID NO: 1101229 - DNA, 15 bp, Homo sapiens
cgtctgagtaggagg

SEQ ID NO: 1101230 - DNA, 15 bp, Homo sapiens
ccgtctgagtaggag

SEQ ID NO: 1101231 - DNA, 15 bp, Homo sapiens
cccgtctgagtagga

SEQ ID NO: 1101232 - DNA, 15 bp, Homo sapiens
tcccgtctgagtagg

SEQ ID NO: 1101233 - DNA, 15 bp, Homo sapiens
gtcccgtctgagtag

SEQ ID NO: 1101234 - DNA, 15 bp, Homo sapiens
agtcccgtctgagta

SEQ ID NO: 1101235 - DNA, 15 bp, Homo sapiens
cagtcccgtctgagt

SEQ ID NO: 1101236 - DNA, 15 bp, Homo sapiens
tcagtcccgtctgag

SEQ ID NO: 1101237 - DNA, 15 bp, Homo sapiens
ttcagtcccgtctga

SEQ ID NO: 1101238 - DNA, 15 bp, Homo sapiens
cttcagtcccgtctg

SEQ ID NO: 1101239 - DNA, 15 bp, Homo sapiens
ccttcagtcccgtct

SEQ ID NO: 1101240 - DNA, 15 bp, Homo sapiens
cccttcagtcccgtc

SEQ ID NO: 1101241 - DNA, 15 bp, Homo sapiens
tcccttcagtcccgt

SEQ ID NO: 1101242 - DNA, 15 bp, Homo sapiens
ctcccttcagtcccg

SEQ ID NO: 1101243 - DNA, 15 bp, Homo sapiens
tctcccttcagtccc

SEQ ID NO: 1101244 - DNA, 15 bp, Homo sapiens
gtctcccttcagtcc

SEQ ID NO: 1101245 - DNA, 15 bp, Homo sapiens
ggtctcccttcagtc

SEQ ID NO: 1101246 - DNA, 15 bp, Homo sapiens
aggtctcccttcagt

SEQ ID NO: 1101247 - DNA, 15 bp, Homo sapiens
gaggtctcccttcag

SEQ ID NO: 1101248 - DNA, 15 bp, Homo sapiens
agaggtctcccttca

SEQ ID NO: 1101249 - DNA, 15 bp, Homo sapiens
cagaggtctcccttc

SEQ ID NO: 1101250 - DNA, 15 bp, Homo sapiens
tcagaggtctccctt

SEQ ID NO: 1101251 - DNA, 15 bp, Homo sapiens
ctcagaggtctccct

SEQ ID NO: 1101252 - DNA, 15 bp, Homo sapiens
tctcagaggtctccc

SEQ ID NO: 1101253 - DNA, 15 bp, Homo sapiens
ctctcagaggtctcc

SEQ ID NO: 1101254 - DNA, 15 bp, Homo sapiens
actctcagaggtctc

SEQ ID NO: 1101255 - DNA, 15 bp, Homo sapiens
cactctcagaggtct

SEQ ID NO: 1101256 - DNA, 15 bp, Homo sapiens
tcactctcagaggtc

SEQ ID NO: 1101257 - DNA, 15 bp, Homo sapiens
ctcactctcagaggt

SEQ ID NO: 1101258 - DNA, 15 bp, Homo sapiens
gctcactctcagagg

SEQ ID NO: 1101259 - DNA, 15 bp, Homo sapiens
agctcactctcagag

SEQ ID NO: 1101260 - DNA, 15 bp, Homo sapiens
cagctcactctcaga

SEQ ID NO: 1101261 - DNA, 15 bp, Homo sapiens
gcagctcactctcag

SEQ ID NO: 1101262 - DNA, 15 bp, Homo sapiens
agcagctcactctca

SEQ ID NO: 1101263 - DNA, 15 bp, Homo sapiens
gagcagctcactctc

SEQ ID NO: 1101264 - DNA, 15 bp, Homo sapiens
tgagcagctcactct

SEQ ID NO: 1101265 - DNA, 15 bp, Homo sapiens
gtgagcagctcactc

SEQ ID NO: 1101266 - DNA, 15 bp, Homo sapiens
agtgagcagctcact

SEQ ID NO: 1101267 - DNA, 15 bp, Homo sapiens
cagtgagcagctcac

SEQ ID NO: 1101268 - DNA, 15 bp, Homo sapiens
acagtgagcagctca

SEQ ID NO: 1101269 - DNA, 15 bp, Homo sapiens
gacagtgagcagctc

SEQ ID NO: 1101270 - DNA, 15 bp, Homo sapiens
tgacagtgagcagct

SEQ ID NO: 1101271 - DNA, 15 bp, Homo sapiens
ctgacagtgagcagc

SEQ ID NO: 1101272 - DNA, 15 bp, Homo sapiens
cctgacagtgagcag

SEQ ID NO: 1101273 - DNA, 15 bp, Homo sapiens
acctgacagtgagca

SEQ ID NO: 1101274 - DNA, 15 bp, Homo sapiens
gacctgacagtgagc

SEQ ID NO: 1101275 - DNA, 15 bp, Homo sapiens
agacctgacagtgag

SEQ ID NO: 1101276 - DNA, 15 bp, Homo sapiens
gagacctgacagtga

SEQ ID NO: 1101277 - DNA, 15 bp, Homo sapiens
cgagacctgacagtg

SEQ ID NO: 1101278 - DNA, 15 bp, Homo sapiens
acgagacctgacagt

SEQ ID NO: 1101279 - DNA, 15 bp, Homo sapiens
cacgagacctgacag

SEQ ID NO: 1101280 - DNA, 15 bp, Homo sapiens
tcacgagacctgaca

SEQ ID NO: 1101281 - DNA, 15 bp, Homo sapiens
ctcacgagacctgac

SEQ ID NO: 1101282 - DNA, 15 bp, Homo sapiens
cctcacgagacctga

SEQ ID NO: 1101283 - DNA, 15 bp, Homo sapiens
gcctcacgagacctg

SEQ ID NO: 1101284 - DNA, 15 bp, Homo sapiens
agcctcacgagacct

SEQ ID NO: 1101285 - DNA, 15 bp, Homo sapiens
cagcctcacgagacc

SEQ ID NO: 1101286 - DNA, 15 bp, Homo sapiens
ccagcctcacgagac

SEQ ID NO: 1101287 - DNA, 15 bp, Homo sapiens
tccagcctcacgaga

SEQ ID NO: 1101288 - DNA, 15 bp, Homo sapiens
ttccagcctcacgag

SEQ ID NO: 1101289 - DNA, 15 bp, Homo sapiens
tttccagcctcacga

SEQ ID NO: 1101290 - DNA, 15 bp, Homo sapiens
gtttccagcctcacg

SEQ ID NO: 1101291 - DNA, 15 bp, Homo sapiens
tgtttccagcctcac

SEQ ID NO: 1101292 - DNA, 15 bp, Homo sapiens
ctgtttccagcctca

SEQ ID NO: 1101293 - DNA, 15 bp, Homo sapiens
gctgtttccagcctc

SEQ ID NO: 1101294 - DNA, 15 bp, Homo sapiens
tgctgtttccagcct

SEQ ID NO: 1101295 - DNA, 15 bp, Homo sapiens
atgctgtttccagcc

SEQ ID NO: 1101296 - DNA, 15 bp, Homo sapiens
gatgctgtttccagc

SEQ ID NO: 1101297 - DNA, 15 bp, Homo sapiens
ggatgctgtttccag

SEQ ID NO: 1101298 - DNA, 15 bp, Homo sapiens
gggatgctgtttcca

SEQ ID NO: 1101299 - DNA, 15 bp, Homo sapiens
agggatgctgtttcc

SEQ ID NO: 1101300 - DNA, 15 bp, Homo sapiens
cagggatgctgtttc

SEQ ID NO: 1101301 - DNA, 15 bp, Homo sapiens
gcagggatgctgttt

SEQ ID NO: 1101302 - DNA, 15 bp, Homo sapiens
tgcagggatgctgtt

SEQ ID NO: 1101303 - DNA, 15 bp, Homo sapiens
ctgcagggatgctgt

SEQ ID NO: 1101304 - DNA, 15 bp, Homo sapiens
cctgcagggatgctg

SEQ ID NO: 1101305 - DNA, 15 bp, Homo sapiens
acctgcagggatgct

SEQ ID NO: 1101306 - DNA, 15 bp, Homo sapiens
tacctgcagggatgc

SEQ ID NO: 1101307 - DNA, 15 bp, Homo sapiens
ctacctgcagggatg

SEQ ID NO: 1101308 - DNA, 15 bp, Homo sapiens
cctacctgcagggat

SEQ ID NO: 1101309 - DNA, 15 bp, Homo sapiens
ccctacctgcaggga

SEQ ID NO: 1101310 - DNA, 15 bp, Homo sapiens
cccctacctgcaggg

SEQ ID NO: 1101311 - DNA, 15 bp, Homo sapiens
ccccctacctgcagg

SEQ ID NO: 1101312 - DNA, 15 bp, Homo sapiens
tccccctacctgcag

SEQ ID NO: 1101313 - DNA, 15 bp, Homo sapiens
atccccctacctgca

SEQ ID NO: 1101314 - DNA, 15 bp, Homo sapiens
catccccctacctgc

SEQ ID NO: 1101315 - DNA, 15 bp, Homo sapiens
ccatccccctacctg

SEQ ID NO: 1101316 - DNA, 15 bp, Homo sapiens
gccatccccctacct

SEQ ID NO: 1101317 - DNA, 15 bp, Homo sapiens
agccatccccctacc

SEQ ID NO: 1101318 - DNA, 15 bp, Homo sapiens
cagccatccccctac

SEQ ID NO: 1101319 - DNA, 15 bp, Homo sapiens
tcagccatcccccta

SEQ ID NO: 1101320 - DNA, 15 bp, Homo sapiens
ctcagccatccccct

SEQ ID NO: 1101321 - DNA, 15 bp, Homo sapiens
actcagccatccccc

SEQ ID NO: 1101322 - DNA, 15 bp, Homo sapiens
aactcagccatcccc

SEQ ID NO: 1101323 - DNA, 15 bp, Homo sapiens
caactcagccatccc

SEQ ID NO: 1101324 - DNA, 15 bp, Homo sapiens
tcaactcagccatcc

SEQ ID NO: 1101325 - DNA, 15 bp, Homo sapiens
gtcaactcagccatc

SEQ ID NO: 1101326 - DNA, 15 bp, Homo sapiens
agtcaactcagccat

SEQ ID NO: 1101327 - DNA, 15 bp, Homo sapiens
aagtcaactcagcca

SEQ ID NO: 1101328 - DNA, 15 bp, Homo sapiens
gaagtcaactcagcc

SEQ ID NO: 1101329 - DNA, 15 bp, Homo sapiens
agaagtcaactcagc

SEQ ID NO: 1101330 - DNA, 15 bp, Homo sapiens
cagaagtcaactcag

SEQ ID NO: 1101331 - DNA, 15 bp, Homo sapiens
tcagaagtcaactca

SEQ ID NO: 1101332 - DNA, 15 bp, Homo sapiens
ttcagaagtcaactc

SEQ ID NO: 1101333 - DNA, 15 bp, Homo sapiens
cttcagaagtcaact

SEQ ID NO: 1101334 - DNA, 15 bp, Homo sapiens
tcttcagaagtcaac

SEQ ID NO: 1101335 - DNA, 15 bp, Homo sapiens
ttcttcagaagtcaa

SEQ ID NO: 1101336 - DNA, 15 bp, Homo sapiens
cttcttcagaagtca

SEQ ID NO: 1101337 - DNA, 15 bp, Homo sapiens
ccttcttcagaagtc

SEQ ID NO: 1101338 - DNA, 15 bp, Homo sapiens
accttcttcagaagt

SEQ ID NO: 1101339 - DNA, 15 bp, Homo sapiens
caccttcttcagaag

SEQ ID NO: 1101340 - DNA, 15 bp, Homo sapiens
gcaccttcttcagaa

SEQ ID NO: 1101341 - DNA, 15 bp, Homo sapiens
ggcaccttcttcaga

SEQ ID NO: 1101342 - DNA, 15 bp, Homo sapiens
gggcaccttcttcag

SEQ ID NO: 1101343 - DNA, 15 bp, Homo sapiens
agggcaccttcttca

SEQ ID NO: 1101344 - DNA, 15 bp, Homo sapiens
tagggcaccttcttc

SEQ ID NO: 1101345 - DNA, 15 bp, Homo sapiens
ctagggcaccttctt

SEQ ID NO: 1101346 - DNA, 15 bp, Homo sapiens
cctagggcaccttct

SEQ ID NO: 1101347 - DNA, 15 bp, Homo sapiens
gcctagggcaccttc

SEQ ID NO: 1101348 - DNA, 15 bp, Homo sapiens
agcctagggcacctt

SEQ ID NO: 1101349 - DNA, 15 bp, Homo sapiens
tagcctagggcacct

SEQ ID NO: 1101350 - DNA, 15 bp, Homo sapiens
gtagcctagggcacc

SEQ ID NO: 1101351 - DNA, 15 bp, Homo sapiens
agtagcctagggcac

SEQ ID NO: 1101352 - DNA, 15 bp, Homo sapiens
gagtagcctagggca

SEQ ID NO: 1101353 - DNA, 15 bp, Homo sapiens
agagtagcctagggc

SEQ ID NO: 1101354 - DNA, 15 bp, Homo sapiens
aagagtagcctaggg

SEQ ID NO: 1101355 - DNA, 15 bp, Homo sapiens
aaagagtagcctagg

SEQ ID NO: 1101356 - DNA, 15 bp, Homo sapiens
gaaagagtagcctag

SEQ ID NO: 1101357 - DNA, 15 bp, Homo sapiens
tgaaagagtagccta

SEQ ID NO: 1101358 - DNA, 15 bp, Homo sapiens
atgaaagagtagcct

SEQ ID NO: 1101359 - DNA, 15 bp, Homo sapiens
aatgaaagagtagcc

SEQ ID NO: 1101360 - DNA, 15 bp, Homo sapiens
caatgaaagagtagc

SEQ ID NO: 1101361 - DNA, 15 bp, Homo sapiens
gcaatgaaagagtag

SEQ ID NO: 1101362 - DNA, 15 bp, Homo sapiens
agcaatgaaagagta

SEQ ID NO: 1101363 - DNA, 15 bp, Homo sapiens
cagcaatgaaagagt

SEQ ID NO: 1101364 - DNA, 15 bp, Homo sapiens
gcagcaatgaaagag

SEQ ID NO: 1101365 - DNA, 15 bp, Homo sapiens
agcagcaatgaaaga

SEQ ID NO: 1101366 - DNA, 15 bp, Homo sapiens
cagcagcaatgaaag

SEQ ID NO: 1101367 - DNA, 15 bp, Homo sapiens
ccagcagcaatgaaa

SEQ ID NO: 1101368 - DNA, 15 bp, Homo sapiens
cccagcagcaatgaa

SEQ ID NO: 1101369 - DNA, 15 bp, Homo sapiens
tcccagcagcaatga

SEQ ID NO: 1101370 - DNA, 15 bp, Homo sapiens
ttcccagcagcaatg

SEQ ID NO: 1101371 - DNA, 15 bp, Homo sapiens
cttcccagcagcaat

SEQ ID NO: 1101372 - DNA, 15 bp, Homo sapiens
ccttcccagcagcaa

SEQ ID NO: 1101373 - DNA, 15 bp, Homo sapiens
gccttcccagcagca

SEQ ID NO: 1101374 - DNA, 15 bp, Homo sapiens
agccttcccagcagc

SEQ ID NO: 1101375 - DNA, 15 bp, Homo sapiens
gagccttcccagcag

SEQ ID NO: 1101376 - DNA, 15 bp, Homo sapiens
tgagccttcccagca

SEQ ID NO: 1101377 - DNA, 15 bp, Homo sapiens
atgagccttcccagc

SEQ ID NO: 1101378 - DNA, 15 bp, Homo sapiens
aatgagccttcccag

SEQ ID NO: 1101379 - DNA, 15 bp, Homo sapiens
gaatgagccttccca

SEQ ID NO: 1101380 - DNA, 15 bp, Homo sapiens
ggaatgagccttccc

SEQ ID NO: 1101381 - DNA, 15 bp, Homo sapiens
gggaatgagccttcc

SEQ ID NO: 1101382 - DNA, 15 bp, Homo sapiens
ggggaatgagccttc

SEQ ID NO: 1101383 - DNA, 15 bp, Homo sapiens
aggggaatgagcctt

SEQ ID NO: 1101384 - DNA, 15 bp, Homo sapiens
taggggaatgagcct

SEQ ID NO: 1101385 - DNA, 15 bp, Homo sapiens
gtaggggaatgagcc

SEQ ID NO: 1101386 - DNA, 15 bp, Homo sapiens
gaaggaaggggcatc

SEQ ID NO: 1101387 - DNA, 15 bp, Homo sapiens
agaaggaaggggcat

SEQ ID NO: 1101388 - DNA, 15 bp, Homo sapiens
aagaaggaaggggca

SEQ ID NO: 1101389 - DNA, 15 bp, Homo sapiens
caagaaggaaggggc

SEQ ID NO: 1101390 - DNA, 15 bp, Homo sapiens
acaagaaggaagggg

SEQ ID NO: 1101391 - DNA, 15 bp, Homo sapiens
tacaagaaggaaggg

SEQ ID NO: 1101392 - DNA, 15 bp, Homo sapiens
ttacaagaaggaagg

SEQ ID NO: 1101393 - DNA, 15 bp, Homo sapiens
gttacaagaaggaag

SEQ ID NO: 1101394 - DNA, 15 bp, Homo sapiens
ggttacaagaaggaa

SEQ ID NO: 1101395 - DNA, 15 bp, Homo sapiens
aggttacaagaagga

SEQ ID NO: 1101396 - DNA, 15 bp, Homo sapiens
gaggttacaagaagg

SEQ ID NO: 1101397 - DNA, 15 bp, Homo sapiens
ggaggttacaagaag

SEQ ID NO: 1101398 - DNA, 15 bp, Homo sapiens
tggaggttacaagaa

SEQ ID NO: 1101399 - DNA, 15 bp, Homo sapiens
ttggaggttacaaga

SEQ ID NO: 1101400 - DNA, 15 bp, Homo sapiens
gttggaggttacaag

SEQ ID NO: 1101401 - DNA, 15 bp, Homo sapiens
ggttggaggttacaa

SEQ ID NO: 1101402 - DNA, 15 bp, Homo sapiens
gggttggaggttaca

SEQ ID NO: 1101403 - DNA, 15 bp, Homo sapiens
tgggttggaggttac

SEQ ID NO: 1101404 - DNA, 15 bp, Homo sapiens
ctgggttggaggtta

SEQ ID NO: 1101405 - DNA, 15 bp, Homo sapiens
cctgggttggaggtt

SEQ ID NO: 1101406 - DNA, 15 bp, Homo sapiens
acctgggttggaggt

SEQ ID NO: 1101407 - DNA, 15 bp, Homo sapiens
cacctgggttggagg

SEQ ID NO: 1101408 - DNA, 15 bp, Homo sapiens
acacctgggttggag

SEQ ID NO: 1101409 - DNA, 15 bp, Homo sapiens
gacacctgggttgga

SEQ ID NO: 1101410 - DNA, 15 bp, Homo sapiens
cgacacctgggttgg

SEQ ID NO: 1101411 - DNA, 15 bp, Homo sapiens
acgacacctgggttg

SEQ ID NO: 1101412 - DNA, 15 bp, Homo sapiens
gacgacacctgggtt

SEQ ID NO: 1101413 - DNA, 15 bp, Homo sapiens
agacgacacctgggt

SEQ ID NO: 1101414 - DNA, 15 bp, Homo sapiens
gagacgacacctggg

SEQ ID NO: 1101415 - DNA, 15 bp, Homo sapiens
ggagacgacacctgg

SEQ ID NO: 1101416 - DNA, 15 bp, Homo sapiens
tggagacgacacctg

SEQ ID NO: 1101417 - DNA, 15 bp, Homo sapiens
gtggagacgacacct

SEQ ID NO: 1101418 - DNA, 15 bp, Homo sapiens
cgtggagacgacacc

SEQ ID NO: 1101419 - DNA, 15 bp, Homo sapiens
acgtggagacgacac

SEQ ID NO: 1101420 - DNA, 15 bp, Homo sapiens
cacgtggagacgaca

SEQ ID NO: 1101421 - DNA, 15 bp, Homo sapiens
gcacgtggagacgac

SEQ ID NO: 1101422 - DNA, 15 bp, Homo sapiens
ggcacgtggagacga

SEQ ID NO: 1101423 - DNA, 15 bp, Homo sapiens
aggcacgtggagacg

SEQ ID NO: 1101424 - DNA, 15 bp, Homo sapiens
aaggcacgtggagac

SEQ ID NO: 1101425 - DNA, 15 bp, Homo sapiens
gaaggcacgtggaga

SEQ ID NO: 1101426 - DNA, 15 bp, Homo sapiens
tgaaggcacgtggag

SEQ ID NO: 1101427 - DNA, 15 bp, Homo sapiens
atgaaggcacgtgga

SEQ ID NO: 1101428 - DNA, 15 bp, Homo sapiens
gatgaaggcacgtgg

SEQ ID NO: 1101429 - DNA, 15 bp, Homo sapiens
ggatgaaggcacgtg

SEQ ID NO: 1101430 - DNA, 15 bp, Homo sapiens
tggatgaaggcacgt

SEQ ID NO: 1101431 - DNA, 15 bp, Homo sapiens
gtggatgaaggcacg

SEQ ID NO: 1101432 - DNA, 15 bp, Homo sapiens
ggtggatgaaggcac

SEQ ID NO: 1101433 - DNA, 15 bp, Homo sapiens
aggtggatgaaggca

SEQ ID NO: 1101434 - DNA, 15 bp, Homo sapiens
gaggtggatgaaggc

SEQ ID NO: 1101435 - DNA, 15 bp, Homo sapiens
tgaggtggatgaagg

SEQ ID NO: 1101436 - DNA, 15 bp, Homo sapiens
ctgaggtggatgaag

SEQ ID NO: 1101437 - DNA, 15 bp, Homo sapiens
tctgaggtggatgaa

SEQ ID NO: 1101438 - DNA, 15 bp, Homo sapiens
ctctgaggtggatga

SEQ ID NO: 1101439 - DNA, 15 bp, Homo sapiens
tctctgaggtggatg

SEQ ID NO: 1101440 - DNA, 15 bp, Homo sapiens
ctctctgaggtggat

SEQ ID NO: 1101441 - DNA, 15 bp, Homo sapiens
tctctctgaggtgga

SEQ ID NO: 1101442 - DNA, 15 bp, Homo sapiens
atctctctgaggtgg

SEQ ID NO: 1101443 - DNA, 15 bp, Homo sapiens
gatctctctgaggtg

SEQ ID NO: 1101444 - DNA, 15 bp, Homo sapiens
ggatctctctgaggt

SEQ ID NO: 1101445 - DNA, 15 bp, Homo sapiens
gggatctctctgagg

SEQ ID NO: 1101446 - DNA, 15 bp, Homo sapiens
tgggatctctctgag

SEQ ID NO: 1101447 - DNA, 15 bp, Homo sapiens
atgggatctctctga

SEQ ID NO: 1101448 - DNA, 15 bp, Homo sapiens
catgggatctctctg

SEQ ID NO: 1101449 - DNA, 15 bp, Homo sapiens
tcatgggatctctct

SEQ ID NO: 1101450 - DNA, 15 bp, Homo sapiens
ttcatgggatctctc

SEQ ID NO: 1101451 - DNA, 15 bp, Homo sapiens
cttcatgggatctct

SEQ ID NO: 1101452 - DNA, 15 bp, Homo sapiens
gcttcatgggatctc

SEQ ID NO: 1101453 - DNA, 15 bp, Homo sapiens
aggcttcatgggatc

SEQ ID NO: 1101454 - DNA, 15 bp, Homo sapiens
caggcttcatgggat

SEQ ID NO: 1101455 - DNA, 15 bp, Homo sapiens
acaggcttcatggga

SEQ ID NO: 1101456 - DNA, 15 bp, Homo sapiens
gacaggcttcatggg

SEQ ID NO: 1101457 - DNA, 15 bp, Homo sapiens
tgacaggcttcatgg

SEQ ID NO: 1101458 - DNA, 15 bp, Homo sapiens
ttgacaggcttcatg

SEQ ID NO: 1101459 - DNA, 15 bp, Homo sapiens
cttgacaggcttcat

SEQ ID NO: 1101460 - DNA, 15 bp, Homo sapiens
acttgacaggcttca

SEQ ID NO: 1101461 - DNA, 15 bp, Homo sapiens
gacttgacaggcttc

SEQ ID NO: 1101462 - DNA, 15 bp, Homo sapiens
agacttgacaggctt

SEQ ID NO: 1101463 - DNA, 15 bp, Homo sapiens
aagacttgacaggct

SEQ ID NO: 1101464 - DNA, 15 bp, Homo sapiens
caagacttgacaggc

SEQ ID NO: 1101465 - DNA, 15 bp, Homo sapiens
tcaagacttgacagg

SEQ ID NO: 1101466 - DNA, 15 bp, Homo sapiens
atcaagacttgacag

SEQ ID NO: 1101467 - DNA, 15 bp, Homo sapiens
aatcaagacttgaca

SEQ ID NO: 1101468 - DNA, 15 bp, Homo sapiens
gaatcaagacttgac

SEQ ID NO: 1101469 - DNA, 15 bp, Homo sapiens
agaatcaagacttga

SEQ ID NO: 1101470 - DNA, 15 bp, Homo sapiens
tagaatcaagacttg

SEQ ID NO: 1101471 - DNA, 15 bp, Homo sapiens
ctagaatcaagactt

SEQ ID NO: 1101472 - DNA, 15 bp, Homo sapiens
tctagaatcaagact

SEQ ID NO: 1101473 - DNA, 15 bp, Homo sapiens
ttctagaatcaagac

SEQ ID NO: 1101474 - DNA, 15 bp, Homo sapiens
tttctagaatcaaga

SEQ ID NO: 1101475 - DNA, 15 bp, Homo sapiens
gtttctagaatcaag

SEQ ID NO: 1101476 - DNA, 15 bp, Homo sapiens
agtttctagaatcaa

SEQ ID NO: 1101477 - DNA, 15 bp, Homo sapiens
cagtttctagaatca

SEQ ID NO: 1101478 - DNA, 15 bp, Homo sapiens
gcagtttctagaatc

SEQ ID NO: 1101479 - DNA, 15 bp, Homo sapiens
ggcagtttctagaat

SEQ ID NO: 1101480 - DNA, 15 bp, Homo sapiens
tggcagtttctagaa

SEQ ID NO: 1101481 - DNA, 15 bp, Homo sapiens
atggcagtttctaga

SEQ ID NO: 1101482 - DNA, 15 bp, Homo sapiens
gatggcagtttctag

SEQ ID NO: 1101483 - DNA, 15 bp, Homo sapiens
ggatggcagtttcta

SEQ ID NO: 1101484 - DNA, 15 bp, Homo sapiens
aggatggcagtttct

SEQ ID NO: 1101485 - DNA, 15 bp, Homo sapiens
caggatggcagtttc

SEQ ID NO: 1101486 - DNA, 15 bp, Homo sapiens
gcaggatggcagttt

SEQ ID NO: 1101487 - DNA, 15 bp, Homo sapiens
ggcaggatggcagtt

SEQ ID NO: 1101488 - DNA, 15 bp, Homo sapiens
gggcaggatggcagt

SEQ ID NO: 1101489 - DNA, 15 bp, Homo sapiens
agggcaggatggcag

SEQ ID NO: 1101490 - DNA, 15 bp, Homo sapiens
aagggcaggatggca

SEQ ID NO: 1101491 - DNA, 15 bp, Homo sapiens
gaagggcaggatggc

SEQ ID NO: 1101492 - DNA, 15 bp, Homo sapiens
ggaagggcaggatgg

SEQ ID NO: 1101493 - DNA, 15 bp, Homo sapiens
gggaagggcaggatg

SEQ ID NO: 1101494 - DNA, 15 bp, Homo sapiens
tgggaagggcaggat

SEQ ID NO: 1101495 - DNA, 15 bp, Homo sapiens
atgggaagggcagga

SEQ ID NO: 1101496 - DNA, 15 bp, Homo sapiens
catgggaagggcagg

SEQ ID NO: 1101497 - DNA, 15 bp, Homo sapiens
ccatgggaagggcag

SEQ ID NO: 1101498 - DNA, 15 bp, Homo sapiens
gccatgggaagggca

SEQ ID NO: 1101499 - DNA, 15 bp, Homo sapiens
ggccatgggaagggc

SEQ ID NO: 1101500 - DNA, 15 bp, Homo sapiens
gggccatgggaaggg

SEQ ID NO: 1101501 - DNA, 15 bp, Homo sapiens
agggccatgggaagg

SEQ ID NO: 1101502 - DNA, 15 bp, Homo sapiens
aagggccatgggaag

SEQ ID NO: 1101503 - DNA, 15 bp, Homo sapiens
aaagggccatgggaa

SEQ ID NO: 1101504 - DNA, 15 bp, Homo sapiens
taaagggccatggga

SEQ ID NO: 1101505 - DNA, 15 bp, Homo sapiens
ctaaagggccatggg

SEQ ID NO: 1101506 - DNA, 15 bp, Homo sapiens
tctaaagggccatgg

SEQ ID NO: 1101507 - DNA, 15 bp, Homo sapiens
gtctaaagggccatg

SEQ ID NO: 1101508 - DNA, 15 bp, Homo sapiens
ggtctaaagggccat

SEQ ID NO: 1101509 - DNA, 15 bp, Homo sapiens
gggtctaaagggcca

SEQ ID NO: 1101510 - DNA, 15 bp, Homo sapiens
ggggtctaaagggcc

SEQ ID NO: 1101511 - DNA, 15 bp, Homo sapiens
gggggtctaaagggc

SEQ ID NO: 1101512 - DNA, 15 bp, Homo sapiens
agggggtctaaaggg

SEQ ID NO: 1101513 - DNA, 15 bp, Homo sapiens
gagggggtctaaagg

SEQ ID NO: 1101514 - DNA, 15 bp, Homo sapiens
agagggggtctaaag

SEQ ID NO: 1101515 - DNA, 15 bp, Homo sapiens
cagagggggtctaaa

SEQ ID NO: 1101516 - DNA, 15 bp, Homo sapiens
tcagagggggtctaa

SEQ ID NO: 1101517 - DNA, 15 bp, Homo sapiens
gtcagagggggtcta

SEQ ID NO: 1101518 - DNA, 15 bp, Homo sapiens
ggtcagagggggtct

SEQ ID NO: 1101519 - DNA, 15 bp, Homo sapiens
cggtcagagggggtc

SEQ ID NO: 1101520 - DNA, 15 bp, Homo sapiens
gcggtcagagggggt

SEQ ID NO: 1101521 - DNA, 15 bp, Homo sapiens
agcggtcagaggggg

SEQ ID NO: 1101522 - DNA, 15 bp, Homo sapiens
cagcggtcagagggg

SEQ ID NO: 1101523 - DNA, 15 bp, Homo sapiens
gcagcggtcagaggg

SEQ ID NO: 1101524 - DNA, 15 bp, Homo sapiens
agcagcggtcagagg

SEQ ID NO: 1101525 - DNA, 15 bp, Homo sapiens
aagcagcggtcagag

SEQ ID NO: 1101526 - DNA, 15 bp, Homo sapiens
aaagcagcggtcaga

SEQ ID NO: 1101527 - DNA, 15 bp, Homo sapiens
caaagcagcggtcag

SEQ ID NO: 1101528 - DNA, 15 bp, Homo sapiens
gcaaagcagcggtca

SEQ ID NO: 1101529 - DNA, 15 bp, Homo sapiens
agcaaagcagcggtc

SEQ ID NO: 1101530 - DNA, 15 bp, Homo sapiens
gagcaaagcagcggt

SEQ ID NO: 1101531 - DNA, 15 bp, Homo sapiens
agagcaaagcagcgg

SEQ ID NO: 1101532 - DNA, 15 bp, Homo sapiens
gagagcaaagcagcg

SEQ ID NO: 1101533 - DNA, 15 bp, Homo sapiens
ggagagcaaagcagc

SEQ ID NO: 1101534 - DNA, 15 bp, Homo sapiens
aggagagcaaagcag

SEQ ID NO: 1101535 - DNA, 15 bp, Homo sapiens
caggagagcaaagca

SEQ ID NO: 1101536 - DNA, 15 bp, Homo sapiens
ccaggagagcaaagc

SEQ ID NO: 1101537 - DNA, 15 bp, Homo sapiens
accaggagagcaaag

SEQ ID NO: 1101538 - DNA, 15 bp, Homo sapiens
gaccaggagagcaaa

SEQ ID NO: 1101539 - DNA, 15 bp, Homo sapiens
tgaccaggagagcaa

SEQ ID NO: 1101540 - DNA, 15 bp, Homo sapiens
ctgaccaggagagca

SEQ ID NO: 1101541 - DNA, 15 bp, Homo sapiens
gctgaccaggagagc

SEQ ID NO: 1101542 - DNA, 15 bp, Homo sapiens
agctgaccaggagag

SEQ ID NO: 1101543 - DNA, 15 bp, Homo sapiens
gagctgaccaggaga

SEQ ID NO: 1101544 - DNA, 15 bp, Homo sapiens
agagctgaccaggag

SEQ ID NO: 1101545 - DNA, 15 bp, Homo sapiens
cagagctgaccagga

SEQ ID NO: 1101546 - DNA, 15 bp, Homo sapiens
agcagagctgaccag

SEQ ID NO: 1101547 - DNA, 15 bp, Homo sapiens
cagcagagctgacca

SEQ ID NO: 1101548 - DNA, 15 bp, Homo sapiens
gcagcagagctgacc

SEQ ID NO: 1101549 - DNA, 15 bp, Homo sapiens
ggcagcagagctgac

SEQ ID NO: 1101550 - DNA, 15 bp, Homo sapiens
aggcagcagagctga

SEQ ID NO: 1101551 - DNA, 15 bp, Homo sapiens
aaggcagcagagctg

SEQ ID NO: 1101552 - DNA, 15 bp, Homo sapiens
caaggcagcagagct

SEQ ID NO: 1101553 - DNA, 15 bp, Homo sapiens
acaaggcagcagagc

SEQ ID NO: 1101554 - DNA, 15 bp, Homo sapiens
cacaaggcagcagag

SEQ ID NO: 1101555 - DNA, 15 bp, Homo sapiens
tcacaaggcagcaga

SEQ ID NO: 1101556 - DNA, 15 bp, Homo sapiens
ctcacaaggcagcag

SEQ ID NO: 1101557 - DNA, 15 bp, Homo sapiens
cctcacaaggcagca

SEQ ID NO: 1101558 - DNA, 15 bp, Homo sapiens
ccctcacaaggcagc

SEQ ID NO: 1101559 - DNA, 15 bp, Homo sapiens
tccctcacaaggcag

SEQ ID NO: 1101560 - DNA, 15 bp, Homo sapiens
gtccctcacaaggca

SEQ ID NO: 1101561 - DNA, 15 bp, Homo sapiens
tgtccctcacaaggc

SEQ ID NO: 1101562 - DNA, 15 bp, Homo sapiens
ctgtccctcacaagg

SEQ ID NO: 1101563 - DNA, 15 bp, Homo sapiens
cctgtccctcacaag

SEQ ID NO: 1101564 - DNA, 15 bp, Homo sapiens
ccctgtccctcacaa

SEQ ID NO: 1101565 - DNA, 15 bp, Homo sapiens
tccctgtccctcaca

SEQ ID NO: 1101566 - DNA, 15 bp, Homo sapiens
gtccctgtccctcac

SEQ ID NO: 1101567 - DNA, 15 bp, Homo sapiens
tgtccctgtccctca

SEQ ID NO: 1101568 - DNA, 15 bp, Homo sapiens
atgtccctgtccctc

SEQ ID NO: 1101569 - DNA, 15 bp, Homo sapiens
gatgtccctgtccct

SEQ ID NO: 1101570 - DNA, 15 bp, Homo sapiens
agatgtccctgtccc

SEQ ID NO: 1101571 - DNA, 15 bp, Homo sapiens
cagatgtccctgtcc

SEQ ID NO: 1101572 - DNA, 15 bp, Homo sapiens
ccagatgtccctgtc

SEQ ID NO: 1101573 - DNA, 15 bp, Homo sapiens
tccagatgtccctgt

SEQ ID NO: 1101574 - DNA, 15 bp, Homo sapiens
atccagatgtccctg

SEQ ID NO: 1101575 - DNA, 15 bp, Homo sapiens
aatccagatgtccct

SEQ ID NO: 1101576 - DNA, 15 bp, Homo sapiens
caatccagatgtccc

SEQ ID NO: 1101577 - DNA, 15 bp, Homo sapiens
gcaatccagatgtcc

SEQ ID NO: 1101578 - DNA, 15 bp, Homo sapiens
tgcaatccagatgtc

SEQ ID NO: 1101579 - DNA, 15 bp, Homo sapiens
atgcaatccagatgt

SEQ ID NO: 1101580 - DNA, 15 bp, Homo sapiens
gatgcaatccagatg

SEQ ID NO: 1101581 - DNA, 15 bp, Homo sapiens
ggatgcaatccagat

SEQ ID NO: 1101582 - DNA, 15 bp, Homo sapiens
aggatgcaatccaga

SEQ ID NO: 1101583 - DNA, 15 bp, Homo sapiens
aaggatgcaatccag

SEQ ID NO: 1101584 - DNA, 15 bp, Homo sapiens
gaaggatgcaatcca

SEQ ID NO: 1101585 - DNA, 15 bp, Homo sapiens
ggaaggatgcaatcc

SEQ ID NO: 1101586 - DNA, 15 bp, Homo sapiens
gggaaggatgcaatc

SEQ ID NO: 1101587 - DNA, 15 bp, Homo sapiens
cgggaaggatgcaat

SEQ ID NO: 1101588 - DNA, 15 bp, Homo sapiens
gcgggaaggatgcaa

SEQ ID NO: 1101589 - DNA, 15 bp, Homo sapiens
agcgggaaggatgca

SEQ ID NO: 1101590 - DNA, 15 bp, Homo sapiens
tagcgggaaggatgc

SEQ ID NO: 1101591 - DNA, 15 bp, Homo sapiens
gtagcgggaaggatg

SEQ ID NO: 1101592 - DNA, 15 bp, Homo sapiens
ggtagcgggaaggat

SEQ ID NO: 1101593 - DNA, 15 bp, Homo sapiens
gggtagcgggaagga

SEQ ID NO: 1101594 - DNA, 15 bp, Homo sapiens
tgggtagcgggaagg

SEQ ID NO: 1101595 - DNA, 15 bp, Homo sapiens
ctgggtagcgggaag

SEQ ID NO: 1101596 - DNA, 15 bp, Homo sapiens
tctgggtagcgggaa

SEQ ID NO: 1101597 - DNA, 15 bp, Homo sapiens
ttctgggtagcggga

SEQ ID NO: 1101598 - DNA, 15 bp, Homo sapiens
gttctgggtagcggg

SEQ ID NO: 1101599 - DNA, 15 bp, Homo sapiens
ggttctgggtagcgg

SEQ ID NO: 1101600 - DNA, 15 bp, Homo sapiens
gggttctgggtagcg

SEQ ID NO: 1101601 - DNA, 15 bp, Homo sapiens
tgggttctgggtagc

SEQ ID NO: 1101602 - DNA, 15 bp, Homo sapiens
gtgggttctgggtag

SEQ ID NO: 1101603 - DNA, 15 bp, Homo sapiens
tgtgggttctgggta

SEQ ID NO: 1101604 - DNA, 15 bp, Homo sapiens
ctgtgggttctgggt

SEQ ID NO: 1101605 - DNA, 15 bp, Homo sapiens
gctgtgggttctggg

SEQ ID NO: 1101606 - DNA, 15 bp, Homo sapiens
ggctgtgggttctgg

SEQ ID NO: 1101607 - DNA, 15 bp, Homo sapiens
gggctgtgggttctg

SEQ ID NO: 1101608 - DNA, 15 bp, Homo sapiens
ggggctgtgggttct

SEQ ID NO: 1101609 - DNA, 15 bp, Homo sapiens
tggggctgtgggttc

SEQ ID NO: 1101610 - DNA, 15 bp, Homo sapiens
gtggggctgtgggtt

SEQ ID NO: 1101611 - DNA, 15 bp, Homo sapiens
ggtggggctgtgggt

SEQ ID NO: 1101612 - DNA, 15 bp, Homo sapiens
aggtggggctgtggg

SEQ ID NO: 1101613 - DNA, 15 bp, Homo sapiens
aaggtggggctgtgg

SEQ ID NO: 1101614 - DNA, 15 bp, Homo sapiens
caaggtggggctgtg

SEQ ID NO: 1101615 - DNA, 15 bp, Homo sapiens
acaaggtggggctgt

SEQ ID NO: 1101616 - DNA, 15 bp, Homo sapiens
gacaaggtggggctg

SEQ ID NO: 1101617 - DNA, 15 bp, Homo sapiens
tgacaaggtggggct

SEQ ID NO: 1101618 - DNA, 15 bp, Homo sapiens
ctgacaaggtggggc

SEQ ID NO: 1101619 - DNA, 15 bp, Homo sapiens
cctgacaaggtgggg

SEQ ID NO: 1101620 - DNA, 15 bp, Homo sapiens
gcctgacaaggtggg

SEQ ID NO: 1101621 - DNA, 15 bp, Homo sapiens
agcctgacaaggtgg

SEQ ID NO: 1101622 - DNA, 15 bp, Homo sapiens
aagcctgacaaggtg

SEQ ID NO: 1101623 - DNA, 15 bp, Homo sapiens
caagcctgacaaggt

SEQ ID NO: 1101624 - DNA, 15 bp, Homo sapiens
gcaagcctgacaagg

SEQ ID NO: 1101625 - DNA, 15 bp, Homo sapiens
tgcaagcctgacaag

SEQ ID NO: 1101626 - DNA, 15 bp, Homo sapiens
ctgcaagcctgacaa

SEQ ID NO: 1101627 - DNA, 15 bp, Homo sapiens
gctgcaagcctgaca

SEQ ID NO: 1101628 - DNA, 15 bp, Homo sapiens
tgctgcaagcctgac

SEQ ID NO: 1101629 - DNA, 15 bp, Homo sapiens
ctgctgcaagcctga

SEQ ID NO: 1101630 - DNA, 15 bp, Homo sapiens
cctgctgcaagcctg

SEQ ID NO: 1101631 - DNA, 15 bp, Homo sapiens
ccctgctgcaagcct

SEQ ID NO: 1101632 - DNA, 15 bp, Homo sapiens
tccctgctgcaagcc

SEQ ID NO: 1101633 - DNA, 15 bp, Homo sapiens
gtccctgctgcaagc

SEQ ID NO: 1101634 - DNA, 15 bp, Homo sapiens
agtccctgctgcaag

SEQ ID NO: 1101635 - DNA, 15 bp, Homo sapiens
aagtccctgctgcaa

SEQ ID NO: 1101636 - DNA, 15 bp, Homo sapiens
taagtccctgctgca

SEQ ID NO: 1101637 - DNA, 15 bp, Homo sapiens
ataagtccctgctgc

SEQ ID NO: 1101638 - DNA, 15 bp, Homo sapiens
cataagtccctgctg

SEQ ID NO: 1101639 - DNA, 15 bp, Homo sapiens
acataagtccctgct

SEQ ID NO: 1101640 - DNA, 15 bp, Homo sapiens
aacataagtccctgc

SEQ ID NO: 1101641 - DNA, 15 bp, Homo sapiens
caacataagtccctg

SEQ ID NO: 1101642 - DNA, 15 bp, Homo sapiens
acaacataagtccct

SEQ ID NO: 1101643 - DNA, 15 bp, Homo sapiens
cacaacataagtccc

SEQ ID NO: 1101644 - DNA, 15 bp, Homo sapiens
ccacaacataagtcc

SEQ ID NO: 1101645 - DNA, 15 bp, Homo sapiens
cccacaacataagtc

SEQ ID NO: 1101646 - DNA, 15 bp, Homo sapiens
tcccacaacataagt

SEQ ID NO: 1101647 - DNA, 15 bp, Homo sapiens
ctcccacaacataag

SEQ ID NO: 1101648 - DNA, 15 bp, Homo sapiens
cctcccacaacataa

SEQ ID NO: 1101649 - DNA, 15 bp, Homo sapiens
tcctcccacaacata

SEQ ID NO: 1101650 - DNA, 15 bp, Homo sapiens
atcctcccacaacat

SEQ ID NO: 1101651 - DNA, 15 bp, Homo sapiens
catcctcccacaaca

SEQ ID NO: 1101652 - DNA, 15 bp, Homo sapiens
tcatcctcccacaac

SEQ ID NO: 1101653 - DNA, 15 bp, Homo sapiens
ttcatcctcccacaa

SEQ ID NO: 1101654 - DNA, 15 bp, Homo sapiens
tttcatcctcccaca

SEQ ID NO: 1101655 - DNA, 15 bp, Homo sapiens
atttcatcctcccac

SEQ ID NO: 1101656 - DNA, 15 bp, Homo sapiens
catttcatcctccca

SEQ ID NO: 1101657 - DNA, 15 bp, Homo sapiens
ccatttcatcctccc

SEQ ID NO: 1101658 - DNA, 15 bp, Homo sapiens
tccatttcatcctcc

SEQ ID NO: 1101659 - DNA, 15 bp, Homo sapiens
ctccatttcatcctc

SEQ ID NO: 1101660 - DNA, 15 bp, Homo sapiens
cctccatttcatcct

SEQ ID NO: 1101661 - DNA, 15 bp, Homo sapiens
tcctccatttcatcc

SEQ ID NO: 1101662 - DNA, 15 bp, Homo sapiens
ctcctccatttcatc

SEQ ID NO: 1101663 - DNA, 15 bp, Homo sapiens
actcctccatttcat

SEQ ID NO: 1101664 - DNA, 15 bp, Homo sapiens
cactcctccatttca

SEQ ID NO: 1101665 - DNA, 15 bp, Homo sapiens
ccactcctccatttc

SEQ ID NO: 1101666 - DNA, 15 bp, Homo sapiens
cccactcctccattt

SEQ ID NO: 1101667 - DNA, 15 bp, Homo sapiens
ccccactcctccatt

SEQ ID NO: 1101668 - DNA, 15 bp, Homo sapiens
cccccactcctccat

SEQ ID NO: 1101669 - DNA, 15 bp, Homo sapiens
tcccccactcctcca

SEQ ID NO: 1101670 - DNA, 15 bp, Homo sapiens
gtcccccactcctcc

SEQ ID NO: 1101671 - DNA, 15 bp, Homo sapiens
tgtcccccactcctc

SEQ ID NO: 1101672 - DNA, 15 bp, Homo sapiens
gtgtcccccactcct

SEQ ID NO: 1101673 - DNA, 15 bp, Homo sapiens
agtgtcccccactcc

SEQ ID NO: 1101674 - DNA, 15 bp, Homo sapiens
cagtgtcccccactc

SEQ ID NO: 1101675 - DNA, 15 bp, Homo sapiens
ccagtgtcccccact

SEQ ID NO: 1101676 - DNA, 15 bp, Homo sapiens
accagtgtcccccac

SEQ ID NO: 1101677 - DNA, 15 bp, Homo sapiens
caccagtgtccccca

SEQ ID NO: 1101678 - DNA, 15 bp, Homo sapiens
ccaccagtgtccccc

SEQ ID NO: 1101679 - DNA, 15 bp, Homo sapiens
cccaccagtgtcccc

SEQ ID NO: 1101680 - DNA, 15 bp, Homo sapiens
gcccaccagtgtccc

SEQ ID NO: 1101681 - DNA, 15 bp, Homo sapiens
tgcccaccagtgtcc

SEQ ID NO: 1101682 - DNA, 15 bp, Homo sapiens
ctgcccaccagtgtc

SEQ ID NO: 1101683 - DNA, 15 bp, Homo sapiens
cctgcccaccagtgt

SEQ ID NO: 1101684 - DNA, 15 bp, Homo sapiens
ccctgcccaccagtg

SEQ ID NO: 1101685 - DNA, 15 bp, Homo sapiens
gccctgcccaccagt

SEQ ID NO: 1101686 - DNA, 15 bp, Homo sapiens
ggccctgcccaccag

SEQ ID NO: 1101687 - DNA, 15 bp, Homo sapiens
aggccctgcccacca

SEQ ID NO: 1101688 - DNA, 15 bp, Homo sapiens
aaggccctgcccacc

SEQ ID NO: 1101689 - DNA, 15 bp, Homo sapiens
caaggccctgcccac

SEQ ID NO: 1101690 - DNA, 15 bp, Homo sapiens
gcaaggccctgccca

SEQ ID NO: 1101691 - DNA, 15 bp, Homo sapiens
ggcaaggccctgccc

SEQ ID NO: 1101692 - DNA, 15 bp, Homo sapiens
gggcaaggccctgcc

SEQ ID NO: 1101693 - DNA, 15 bp, Homo sapiens
ggggcaaggccctgc

SEQ ID NO: 1101694 - DNA, 15 bp, Homo sapiens
aggggcaaggccctg

SEQ ID NO: 1101695 - DNA, 15 bp, Homo sapiens
gaggggcaaggccct

SEQ ID NO: 1101696 - DNA, 15 bp, Homo sapiens
ggaggggcaaggccc

SEQ ID NO: 1101697 - DNA, 15 bp, Homo sapiens
aggaggggcaaggcc

SEQ ID NO: 1101698 - DNA, 15 bp, Homo sapiens
gaggaggggcaaggc

SEQ ID NO: 1101699 - DNA, 15 bp, Homo sapiens
tgaggaggggcaagg

SEQ ID NO: 1101700 - DNA, 15 bp, Homo sapiens
gtgaggaggggcaag

SEQ ID NO: 1101701 - DNA, 15 bp, Homo sapiens
tgtgaggaggggcaa

SEQ ID NO: 1101702 - DNA, 15 bp, Homo sapiens
ctgtgaggaggggca

SEQ ID NO: 1101703 - DNA, 15 bp, Homo sapiens
cctgtgaggaggggc

SEQ ID NO: 1101704 - DNA, 15 bp, Homo sapiens
ccctgtgaggagggg

SEQ ID NO: 1101705 - DNA, 15 bp, Homo sapiens
gccctgtgaggaggg

SEQ ID NO: 1101706 - DNA, 15 bp, Homo sapiens
tgccctgtgaggagg

SEQ ID NO: 1101707 - DNA, 15 bp, Homo sapiens
atgccctgtgaggag

SEQ ID NO: 1101708 - DNA, 15 bp, Homo sapiens
catgccctgtgagga

SEQ ID NO: 1101709 - DNA, 15 bp, Homo sapiens
ccatgccctgtgagg

SEQ ID NO: 1101710 - DNA, 15 bp, Homo sapiens
cccatgccctgtgag

SEQ ID NO: 1101711 - DNA, 15 bp, Homo sapiens
ccccatgccctgtga

SEQ ID NO: 1101712 - DNA, 15 bp, Homo sapiens
accccatgccctgtg

SEQ ID NO: 1101713 - DNA, 15 bp, Homo sapiens
gaccccatgccctgt

SEQ ID NO: 1101714 - DNA, 15 bp, Homo sapiens
ggaccccatgccctg

SEQ ID NO: 1101715 - DNA, 15 bp, Homo sapiens
tggaccccatgccct

SEQ ID NO: 1101716 - DNA, 15 bp, Homo sapiens
ttggaccccatgccc

SEQ ID NO: 1101717 - DNA, 15 bp, Homo sapiens
tttggaccccatgcc

SEQ ID NO: 1101718 - DNA, 15 bp, Homo sapiens
ctttggaccccatgc

SEQ ID NO: 1101719 - DNA, 15 bp, Homo sapiens
gctttggaccccatg

SEQ ID NO: 1101720 - DNA, 15 bp, Homo sapiens
agctttggaccccat

SEQ ID NO: 1101721 - DNA, 15 bp, Homo sapiens
aagctttggacccca

SEQ ID NO: 1101722 - DNA, 15 bp, Homo sapiens
gaagctttggacccc

SEQ ID NO: 1101723 - DNA, 15 bp, Homo sapiens
ggaagctttggaccc

SEQ ID NO: 1101724 - DNA, 15 bp, Homo sapiens
aggaagctttggacc

SEQ ID NO: 1101725 - DNA, 15 bp, Homo sapiens
gaggaagctttggac

SEQ ID NO: 1101726 - DNA, 15 bp, Homo sapiens
ggaggaagctttgga

SEQ ID NO: 1101727 - DNA, 15 bp, Homo sapiens
gggaggaagctttgg

SEQ ID NO: 1101728 - DNA, 15 bp, Homo sapiens
agggaggaagctttg

SEQ ID NO: 1101729 - DNA, 15 bp, Homo sapiens
cagggaggaagcttt

SEQ ID NO: 1101730 - DNA, 15 bp, Homo sapiens
gcagggaggaagctt

SEQ ID NO: 1101731 - DNA, 15 bp, Homo sapiens
agcagggaggaagct

SEQ ID NO: 1101732 - DNA, 15 bp, Homo sapiens
aagcagggaggaagc

SEQ ID NO: 1101733 - DNA, 15 bp, Homo sapiens
gaagcagggaggaag

SEQ ID NO: 1101734 - DNA, 15 bp, Homo sapiens
tgaagcagggaggaa

SEQ ID NO: 1101735 - DNA, 15 bp, Homo sapiens
gtgaagcagggagga

SEQ ID NO: 1101736 - DNA, 15 bp, Homo sapiens
agtgaagcagggagg

SEQ ID NO: 1101737 - DNA, 15 bp, Homo sapiens
aagtgaagcagggag

SEQ ID NO: 1101738 - DNA, 15 bp, Homo sapiens
aaagtgaagcaggga

SEQ ID NO: 1101739 - DNA, 15 bp, Homo sapiens
caaagtgaagcaggg

SEQ ID NO: 1101740 - DNA, 15 bp, Homo sapiens
gcaaagtgaagcagg

SEQ ID NO: 1101741 - DNA, 15 bp, Homo sapiens
ggcaaagtgaagcag

SEQ ID NO: 1101742 - DNA, 15 bp, Homo sapiens
tggcaaagtgaagca

SEQ ID NO: 1101743 - DNA, 15 bp, Homo sapiens
atggcaaagtgaagc

SEQ ID NO: 1101744 - DNA, 15 bp, Homo sapiens
aatggcaaagtgaag

SEQ ID NO: 1101745 - DNA, 15 bp, Homo sapiens
caatggcaaagtgaa

SEQ ID NO: 1101746 - DNA, 15 bp, Homo sapiens
ccaatggcaaagtga

SEQ ID NO: 1101747 - DNA, 15 bp, Homo sapiens
gccaatggcaaagtg

SEQ ID NO: 1101748 - DNA, 15 bp, Homo sapiens
agccaatggcaaagt

SEQ ID NO: 1101749 - DNA, 15 bp, Homo sapiens
cagccaatggcaaag

SEQ ID NO: 1101750 - DNA, 15 bp, Homo sapiens
acagccaatggcaaa

SEQ ID NO: 1101751 - DNA, 15 bp, Homo sapiens
cacagccaatggcaa

SEQ ID NO: 1101752 - DNA, 15 bp, Homo sapiens
ccacagccaatggca

SEQ ID NO: 1101753 - DNA, 15 bp, Homo sapiens
accacagccaatggc

SEQ ID NO: 1101754 - DNA, 15 bp, Homo sapiens
aaccacagccaatgg

SEQ ID NO: 1101755 - DNA, 15 bp, Homo sapiens
taaccacagccaatg

SEQ ID NO: 1101756 - DNA, 15 bp, Homo sapiens
gtaaccacagccaat

SEQ ID NO: 1101757 - DNA, 15 bp, Homo sapiens
agtaaccacagccaa

SEQ ID NO: 1101758 - DNA, 15 bp, Homo sapiens
cagtaaccacagcca

SEQ ID NO: 1101759 - DNA, 15 bp, Homo sapiens
gcagtaaccacagcc

SEQ ID NO: 1101760 - DNA, 15 bp, Homo sapiens
agcagtaaccacagc

SEQ ID NO: 1101761 - DNA, 15 bp, Homo sapiens
cagcagtaaccacag

SEQ ID NO: 1101762 - DNA, 15 bp, Homo sapiens
ccagcagtaaccaca

SEQ ID NO: 1101763 - DNA, 15 bp, Homo sapiens
tccagcagtaaccac

SEQ ID NO: 1101764 - DNA, 15 bp, Homo sapiens
ttccagcagtaacca

SEQ ID NO: 1101765 - DNA, 15 bp, Homo sapiens
cttccagcagtaacc

SEQ ID NO: 1101766 - DNA, 15 bp, Homo sapiens
tcttccagcagtaac

SEQ ID NO: 1101767 - DNA, 15 bp, Homo sapiens
atcttccagcagtaa

SEQ ID NO: 1101768 - DNA, 15 bp, Homo sapiens
gatcttccagcagta

SEQ ID NO: 1101769 - DNA, 15 bp, Homo sapiens
agatcttccagcagt

SEQ ID NO: 1101770 - DNA, 15 bp, Homo sapiens
gagatcttccagcag

SEQ ID NO: 1101771 - DNA, 15 bp, Homo sapiens
tgagatcttccagca

SEQ ID NO: 1101772 - DNA, 15 bp, Homo sapiens
gtgagatcttccagc

SEQ ID NO: 1101773 - DNA, 15 bp, Homo sapiens
tgtgagatcttccag

SEQ ID NO: 1101774 - DNA, 15 bp, Homo sapiens
ttgtgagatcttcca

SEQ ID NO: 1101775 - DNA, 15 bp, Homo sapiens
tttgtgagatcttcc

SEQ ID NO: 1101776 - DNA, 15 bp, Homo sapiens
atttgtgagatcttc

SEQ ID NO: 1101777 - DNA, 15 bp, Homo sapiens
aatttgtgagatctt

SEQ ID NO: 1101778 - DNA, 15 bp, Homo sapiens
taatttgtgagatct

SEQ ID NO: 1101779 - DNA, 15 bp, Homo sapiens
ttaatttgtgagatc

SEQ ID NO: 1101780 - DNA, 15 bp, Homo sapiens
cttaatttgtgagat

SEQ ID NO: 1101781 - DNA, 15 bp, Homo sapiens
gcttaatttgtgaga

SEQ ID NO: 1101782 - DNA, 15 bp, Homo sapiens
tgcttaatttgtgag

SEQ ID NO: 1101783 - DNA, 15 bp, Homo sapiens
ctgcttaatttgtga

SEQ ID NO: 1101784 - DNA, 15 bp, Homo sapiens
tctgcttaatttgtg

SEQ ID NO: 1101785 - DNA, 15 bp, Homo sapiens
ttctgcttaatttgt

SEQ ID NO: 1101786 - DNA, 15 bp, Homo sapiens
attctgcttaatttg

SEQ ID NO: 1101787 - DNA, 15 bp, Homo sapiens
cattctgcttaattt

SEQ ID NO: 1101788 - DNA, 15 bp, Homo sapiens
tcattctgcttaatt

SEQ ID NO: 1101789 - DNA, 15 bp, Homo sapiens
atcattctgcttaat

SEQ ID NO: 1101790 - DNA, 15 bp, Homo sapiens
aatcattctgcttaa

SEQ ID NO: 1101791 - DNA, 15 bp, Homo sapiens
caatcattctgctta

SEQ ID NO: 1101792 - DNA, 15 bp, Homo sapiens
ccaatcattctgctt

SEQ ID NO: 1101793 - DNA, 15 bp, Homo sapiens
accaatcattctgct

SEQ ID NO: 1101794 - DNA, 15 bp, Homo sapiens
gaccaatcattctgc

SEQ ID NO: 1101795 - DNA, 15 bp, Homo sapiens
tgaccaatcattctg

SEQ ID NO: 1101796 - DNA, 15 bp, Homo sapiens
atgaccaatcattct

SEQ ID NO: 1101797 - DNA, 15 bp, Homo sapiens
aatgaccaatcattc

SEQ ID NO: 1101798 - DNA, 15 bp, Homo sapiens
caatgaccaatcatt

SEQ ID NO: 1101799 - DNA, 15 bp, Homo sapiens
ccaatgaccaatcat

SEQ ID NO: 1101800 - DNA, 15 bp, Homo sapiens
tccaatgaccaatca

SEQ ID NO: 1101801 - DNA, 15 bp, Homo sapiens
gtccaatgaccaatc

SEQ ID NO: 1101802 - DNA, 15 bp, Homo sapiens
tgtccaatgaccaat

SEQ ID NO: 1101803 - DNA, 15 bp, Homo sapiens
atgtccaatgaccaa

SEQ ID NO: 1101804 - DNA, 15 bp, Homo sapiens
catgtccaatgacca

SEQ ID NO: 1101805 - DNA, 15 bp, Homo sapiens
tcatgtccaatgacc

SEQ ID NO: 1101806 - DNA, 15 bp, Homo sapiens
ttcatgtccaatgac

SEQ ID NO: 1101807 - DNA, 15 bp, Homo sapiens
gttcatgtccaatga

SEQ ID NO: 1101808 - DNA, 15 bp, Homo sapiens
tgttcatgtccaatg

SEQ ID NO: 1101809 - DNA, 15 bp, Homo sapiens
atgttcatgtccaat

SEQ ID NO: 1101810 - DNA, 15 bp, Homo sapiens
tatgttcatgtccaa

SEQ ID NO: 1101811 - DNA, 15 bp, Homo sapiens
atatgttcatgtcca

SEQ ID NO: 1101812 - DNA, 15 bp, Homo sapiens
tatatgttcatgtcc

SEQ ID NO: 1101813 - DNA, 15 bp, Homo sapiens
atatatgttcatgtc

SEQ ID NO: 1101814 - DNA, 15 bp, Homo sapiens
aatatatgttcatgt

SEQ ID NO: 1101815 - DNA, 15 bp, Homo sapiens
gaatatatgttcatg

SEQ ID NO: 1101816 - DNA, 15 bp, Homo sapiens
tgaatatatgttcat

SEQ ID NO: 1101817 - DNA, 15 bp, Homo sapiens
atgaatatatgttca

SEQ ID NO: 1101818 - DNA, 15 bp, Homo sapiens
aatgaatatatgttc

SEQ ID NO: 1101819 - DNA, 15 bp, Homo sapiens
aaatgaatatatgtt

SEQ ID NO: 1101820 - DNA, 15 bp, Homo sapiens
gaaatgaatatatgt

SEQ ID NO: 1101821 - DNA, 15 bp, Homo sapiens
ggaaatgaatatatg

SEQ ID NO: 1101822 - DNA, 15 bp, Homo sapiens
aggaaatgaatatat

SEQ ID NO: 1101823 - DNA, 15 bp, Homo sapiens
gaggaaatgaatata

SEQ ID NO: 1101824 - DNA, 15 bp, Homo sapiens
agaggaaatgaatat

SEQ ID NO: 1101825 - DNA, 15 bp, Homo sapiens
aagaggaaatgaata

SEQ ID NO: 1101826 - DNA, 15 bp, Homo sapiens
aaagaggaaatgaat

SEQ ID NO: 1101827 - DNA, 15 bp, Homo sapiens
gaaagaggaaatgaa

SEQ ID NO: 1101828 - DNA, 15 bp, Homo sapiens
agaaagaggaaatga

SEQ ID NO: 1101829 - DNA, 15 bp, Homo sapiens
cagaaagaggaaatg

SEQ ID NO: 1101830 - DNA, 15 bp, Homo sapiens
ccagaaagaggaaat

SEQ ID NO: 1101831 - DNA, 15 bp, Homo sapiens
cccagaaagaggaaa

SEQ ID NO: 1101832 - DNA, 15 bp, Homo sapiens
tcccagaaagaggaa

SEQ ID NO: 1101833 - DNA, 15 bp, Homo sapiens
ttcccagaaagagga

SEQ ID NO: 1101834 - DNA, 15 bp, Homo sapiens
attcccagaaagagg

SEQ ID NO: 1101835 - DNA, 15 bp, Homo sapiens
tattcccagaaagag

SEQ ID NO: 1101836 - DNA, 15 bp, Homo sapiens
atattcccagaaaga

SEQ ID NO: 1101837 - DNA, 15 bp, Homo sapiens
catattcccagaaag

SEQ ID NO: 1101838 - DNA, 15 bp, Homo sapiens
acatattcccagaaa

SEQ ID NO: 1101839 - DNA, 15 bp, Homo sapiens
aacatattcccagaa

SEQ ID NO: 1101840 - DNA, 15 bp, Homo sapiens
caacatattcccaga

SEQ ID NO: 1101841 - DNA, 15 bp, Homo sapiens
tcaacatattcccag

SEQ ID NO: 1101842 - DNA, 15 bp, Homo sapiens
atcaacatattccca

SEQ ID NO: 1101843 - DNA, 15 bp, Homo sapiens
gatcaacatattccc

SEQ ID NO: 1101844 - DNA, 15 bp, Homo sapiens
ggatcaacatattcc

SEQ ID NO: 1101845 - DNA, 15 bp, Homo sapiens
aggatcaacatattc

SEQ ID NO: 1101846 - DNA, 15 bp, Homo sapiens
taggatcaacatatt

SEQ ID NO: 1101847 - DNA, 15 bp, Homo sapiens
ctaggatcaacatat

SEQ ID NO: 1101848 - DNA, 15 bp, Homo sapiens
tctaggatcaacata

SEQ ID NO: 1101849 - DNA, 15 bp, Homo sapiens
ttctaggatcaacat

SEQ ID NO: 1101850 - DNA, 15 bp, Homo sapiens
cttctaggatcaaca

SEQ ID NO: 1101851 - DNA, 15 bp, Homo sapiens
acttctaggatcaac

SEQ ID NO: 1101852 - DNA, 15 bp, Homo sapiens
cacttctaggatcaa

SEQ ID NO: 1101853 - DNA, 15 bp, Homo sapiens
tcacttctaggatca

SEQ ID NO: 1101854 - DNA, 15 bp, Homo sapiens
ctcacttctaggatc

SEQ ID NO: 1101855 - DNA, 15 bp, Homo sapiens
cctcacttctaggat

SEQ ID NO: 1101856 - DNA, 15 bp, Homo sapiens
tcctcacttctagga

SEQ ID NO: 1101857 - DNA, 15 bp, Homo sapiens
ttcctcacttctagg

SEQ ID NO: 1101858 - DNA, 15 bp, Homo sapiens
cttcctcacttctag

SEQ ID NO: 1101859 - DNA, 15 bp, Homo sapiens
ccttcctcacttcta

SEQ ID NO: 1101860 - DNA, 15 bp, Homo sapiens
cccttcctcacttct

SEQ ID NO: 1101861 - DNA, 15 bp, Homo sapiens
ccccttcctcacttc

SEQ ID NO: 1101862 - DNA, 15 bp, Homo sapiens
accccttcctcactt

SEQ ID NO: 1101863 - DNA, 15 bp, Homo sapiens
caccccttcctcact

SEQ ID NO: 1101864 - DNA, 15 bp, Homo sapiens
ccaccccttcctcac

SEQ ID NO: 1101865 - DNA, 15 bp, Homo sapiens
cccaccccttcctca

SEQ ID NO: 1101866 - DNA, 15 bp, Homo sapiens
ccccaccccttcctc

SEQ ID NO: 1101867 - DNA, 15 bp, Homo sapiens
gccccaccccttcct

SEQ ID NO: 1101868 - DNA, 15 bp, Homo sapiens
ggccccaccccttcc

SEQ ID NO: 1101869 - DNA, 15 bp, Homo sapiens
gggccccaccccttc

SEQ ID NO: 1101870 - DNA, 15 bp, Homo sapiens
ggggccccacccctt

SEQ ID NO: 1101871 - DNA, 15 bp, Homo sapiens
tggggccccacccct

SEQ ID NO: 1101872 - DNA, 15 bp, Homo sapiens
ctggggccccacccc

SEQ ID NO: 1101873 - DNA, 15 bp, Homo sapiens
actggggccccaccc

SEQ ID NO: 1101874 - DNA, 15 bp, Homo sapiens
gactggggccccacc

SEQ ID NO: 1101875 - DNA, 15 bp, Homo sapiens
ggactggggccccac

SEQ ID NO: 1101876 - DNA, 15 bp, Homo sapiens
gggactggggcccca

SEQ ID NO: 1101877 - DNA, 15 bp, Homo sapiens
ggggactggggcccc

SEQ ID NO: 1101878 - DNA, 15 bp, Homo sapiens
tggggactggggccc

SEQ ID NO: 1101879 - DNA, 15 bp, Homo sapiens
ctggggactggggcc

SEQ ID NO: 1101880 - DNA, 15 bp, Homo sapiens
cctggggactggggc

SEQ ID NO: 1101881 - DNA, 15 bp, Homo sapiens
tcctggggactgggg

SEQ ID NO: 1101882 - DNA, 15 bp, Homo sapiens
ttcctggggactggg

SEQ ID NO: 1101883 - DNA, 15 bp, Homo sapiens
ggcttcctggggact

SEQ ID NO: 1101884 - DNA, 15 bp, Homo sapiens
aggcttcctggggac

SEQ ID NO: 1101885 - DNA, 15 bp, Homo sapiens
caggcttcctgggga

SEQ ID NO: 1101886 - DNA, 15 bp, Homo sapiens
ccaggcttcctgggg

SEQ ID NO: 1101887 - DNA, 15 bp, Homo sapiens
accaggcttcctggg

SEQ ID NO: 1101888 - DNA, 15 bp, Homo sapiens
gaccaggcttcctgg

SEQ ID NO: 1101889 - DNA, 15 bp, Homo sapiens
tgaccaggcttcctg

SEQ ID NO: 1101890 - DNA, 15 bp, Homo sapiens
gtgaccaggcttcct

SEQ ID NO: 1101891 - DNA, 15 bp, Homo sapiens
agtgaccaggcttcc

SEQ ID NO: 1101892 - DNA, 15 bp, Homo sapiens
gagtgaccaggcttc

SEQ ID NO: 1101893 - DNA, 15 bp, Homo sapiens
ggagtgaccaggctt

SEQ ID NO: 1101894 - DNA, 15 bp, Homo sapiens
gggagtgaccaggct

SEQ ID NO: 1101895 - DNA, 15 bp, Homo sapiens
agggagtgaccaggc

SEQ ID NO: 1101896 - DNA, 15 bp, Homo sapiens
gagggagtgaccagg

SEQ ID NO: 1101897 - DNA, 15 bp, Homo sapiens
ggagggagtgaccag

SEQ ID NO: 1101898 - DNA, 15 bp, Homo sapiens
gggagggagtgacca

SEQ ID NO: 1101899 - DNA, 15 bp, Homo sapiens
tgggagggagtgacc

SEQ ID NO: 1101900 - DNA, 15 bp, Homo sapiens
gtgggagggagtgac

SEQ ID NO: 1101901 - DNA, 15 bp, Homo sapiens
agtgggagggagtga

SEQ ID NO: 1101902 - DNA, 15 bp, Homo sapiens
gagtgggagggagtg

SEQ ID NO: 1101903 - DNA, 15 bp, Homo sapiens
agagtgggagggagt

SEQ ID NO: 1101904 - DNA, 15 bp, Homo sapiens
cagagtgggagggag

SEQ ID NO: 1101905 - DNA, 15 bp, Homo sapiens
gcagagtgggaggga

SEQ ID NO: 1101906 - DNA, 15 bp, Homo sapiens
ggcagagtgggaggg

SEQ ID NO: 1101907 - DNA, 15 bp, Homo sapiens
gggcagagtgggagg

SEQ ID NO: 1101908 - DNA, 15 bp, Homo sapiens
agggcagagtgggag

SEQ ID NO: 1101909 - DNA, 15 bp, Homo sapiens
aagggcagagtggga

SEQ ID NO: 1101910 - DNA, 15 bp, Homo sapiens
aaagggcagagtggg

SEQ ID NO: 1101911 - DNA, 15 bp, Homo sapiens
gaaagggcagagtgg

SEQ ID NO: 1101912 - DNA, 15 bp, Homo sapiens
ggaaagggcagagtg

SEQ ID NO: 1101913 - DNA, 15 bp, Homo sapiens
tggaaagggcagagt

SEQ ID NO: 1101914 - DNA, 15 bp, Homo sapiens
gtggaaagggcagag

SEQ ID NO: 1101915 - DNA, 15 bp, Homo sapiens
agtggaaagggcaga

SEQ ID NO: 1101916 - DNA, 15 bp, Homo sapiens
tagtggaaagggcag

SEQ ID NO: 1101917 - DNA, 15 bp, Homo sapiens
ttagtggaaagggca

SEQ ID NO: 1101918 - DNA, 15 bp, Homo sapiens
tttagtggaaagggc

SEQ ID NO: 1101919 - DNA, 15 bp, Homo sapiens
gtttagtggaaaggg

SEQ ID NO: 1101920 - DNA, 15 bp, Homo sapiens
tgtttagtggaaagg

SEQ ID NO: 1101921 - DNA, 15 bp, Homo sapiens
ctgtttagtggaaag

SEQ ID NO: 1101922 - DNA, 15 bp, Homo sapiens
actgtttagtggaaa

SEQ ID NO: 1101923 - DNA, 15 bp, Homo sapiens
tactgtttagtggaa

SEQ ID NO: 1101924 - DNA, 15 bp, Homo sapiens
ctactgtttagtgga

SEQ ID NO: 1101925 - DNA, 15 bp, Homo sapiens
tctactgtttagtgg

SEQ ID NO: 1101926 - DNA, 15 bp, Homo sapiens
ttctactgtttagtg

SEQ ID NO: 1101927 - DNA, 15 bp, Homo sapiens
tttctactgtttagt

SEQ ID NO: 1101928 - DNA, 15 bp, Homo sapiens
atttctactgtttag

SEQ ID NO: 1101929 - DNA, 15 bp, Homo sapiens
gatttctactgttta

SEQ ID NO: 1101930 - DNA, 15 bp, Homo sapiens
tgatttctactgttt

SEQ ID NO: 1101931 - DNA, 15 bp, Homo sapiens
atgatttctactgtt

SEQ ID NO: 1101932 - DNA, 15 bp, Homo sapiens
catgatttctactgt

SEQ ID NO: 1101933 - DNA, 15 bp, Homo sapiens
ccatgatttctactg

SEQ ID NO: 1101934 - DNA, 15 bp, Homo sapiens
cccatgatttctact

SEQ ID NO: 1101935 - DNA, 15 bp, Homo sapiens
ccccatgatttctac

SEQ ID NO: 1101936 - DNA, 15 bp, Homo sapiens
tccccatgatttcta

SEQ ID NO: 1101937 - DNA, 15 bp, Homo sapiens
atccccatgatttct

SEQ ID NO: 1101938 - DNA, 15 bp, Homo sapiens
aatccccatgatttc

SEQ ID NO: 1101939 - DNA, 15 bp, Homo sapiens
caatccccatgattt

SEQ ID NO: 1101940 - DNA, 15 bp, Homo sapiens
gcaatccccatgatt

SEQ ID NO: 1101941 - DNA, 15 bp, Homo sapiens
agcaatccccatgat

SEQ ID NO: 1101942 - DNA, 15 bp, Homo sapiens
cagcaatccccatga

SEQ ID NO: 1101943 - DNA, 15 bp, Homo sapiens
gcagcaatccccatg

SEQ ID NO: 1101944 - DNA, 15 bp, Homo sapiens
ggcagcaatccccat

SEQ ID NO: 1101945 - DNA, 15 bp, Homo sapiens
tggcagcaatcccca

SEQ ID NO: 1101946 - DNA, 15 bp, Homo sapiens
atggcagcaatcccc

SEQ ID NO: 1101947 - DNA, 15 bp, Homo sapiens
aatggcagcaatccc

SEQ ID NO: 1101948 - DNA, 15 bp, Homo sapiens
caatggcagcaatcc

SEQ ID NO: 1101949 - DNA, 15 bp, Homo sapiens
tcaatggcagcaatc

SEQ ID NO: 1101950 - DNA, 15 bp, Homo sapiens
gtcaatggcagcaat

SEQ ID NO: 1101951 - DNA, 15 bp, Homo sapiens
agtcaatggcagcaa

SEQ ID NO: 1101952 - DNA, 15 bp, Homo sapiens
cagtcaatggcagca

SEQ ID NO: 1101953 - DNA, 15 bp, Homo sapiens
tcagtcaatggcagc

SEQ ID NO: 1101954 - DNA, 15 bp, Homo sapiens
ctcagtcaatggcag

SEQ ID NO: 1101955 - DNA, 15 bp, Homo sapiens
gctcagtcaatggca

SEQ ID NO: 1101956 - DNA, 15 bp, Homo sapiens
ggctcagtcaatggc

SEQ ID NO: 1101957 - DNA, 15 bp, Homo sapiens
aggctcagtcaatgg

SEQ ID NO: 1101958 - DNA, 15 bp, Homo sapiens
aaggctcagtcaatg

SEQ ID NO: 1101959 - DNA, 15 bp, Homo sapiens
gaaggctcagtcaat

SEQ ID NO: 1101960 - DNA, 15 bp, Homo sapiens
agaaggctcagtcaa

SEQ ID NO: 1101961 - DNA, 15 bp, Homo sapiens
gagaaggctcagtca

SEQ ID NO: 1101962 - DNA, 15 bp, Homo sapiens
ggagaaggctcagtc

SEQ ID NO: 1101963 - DNA, 15 bp, Homo sapiens
tggagaaggctcagt

SEQ ID NO: 1101964 - DNA, 15 bp, Homo sapiens
atggagaaggctcag

SEQ ID NO: 1101965 - DNA, 15 bp, Homo sapiens
catggagaaggctca

SEQ ID NO: 1101966 - DNA, 15 bp, Homo sapiens
acatggagaaggctc

SEQ ID NO: 1101967 - DNA, 15 bp, Homo sapiens
cacatggagaaggct

SEQ ID NO: 1101968 - DNA, 15 bp, Homo sapiens
gcacatggagaaggc

SEQ ID NO: 1101969 - DNA, 15 bp, Homo sapiens
ggcacatggagaagg

SEQ ID NO: 1101970 - DNA, 15 bp, Homo sapiens
gggcacatggagaag

SEQ ID NO: 1101971 - DNA, 15 bp, Homo sapiens
tgggcacatggagaa

SEQ ID NO: 1101972 - DNA, 15 bp, Homo sapiens
gtgggcacatggaga

SEQ ID NO: 1101973 - DNA, 15 bp, Homo sapiens
ggtgggcacatggag

SEQ ID NO: 1101974 - DNA, 15 bp, Homo sapiens
tggtgggcacatgga

SEQ ID NO: 1101975 - DNA, 15 bp, Homo sapiens
atggtgggcacatgg

SEQ ID NO: 1101976 - DNA, 15 bp, Homo sapiens
gatggtgggcacatg

SEQ ID NO: 1101977 - DNA, 15 bp, Homo sapiens
ggatggtgggcacat

SEQ ID NO: 1101978 - DNA, 15 bp, Homo sapiens
aggatggtgggcaca

SEQ ID NO: 1101979 - DNA, 15 bp, Homo sapiens
taggatggtgggcac

SEQ ID NO: 1101980 - DNA, 15 bp, Homo sapiens
ttaggatggtgggca

SEQ ID NO: 1101981 - DNA, 15 bp, Homo sapiens
cttaggatggtgggc

SEQ ID NO: 1101982 - DNA, 15 bp, Homo sapiens
gcttaggatggtggg

SEQ ID NO: 1101983 - DNA, 15 bp, Homo sapiens
tgcttaggatggtgg

SEQ ID NO: 1101984 - DNA, 15 bp, Homo sapiens
atgcttaggatggtg

SEQ ID NO: 1101985 - DNA, 15 bp, Homo sapiens
aatgcttaggatggt

SEQ ID NO: 1101986 - DNA, 15 bp, Homo sapiens
taatgcttaggatgg

SEQ ID NO: 1101987 - DNA, 15 bp, Homo sapiens
ttaatgcttaggatg

SEQ ID NO: 1101988 - DNA, 15 bp, Homo sapiens
gttaatgcttaggat

SEQ ID NO: 1101989 - DNA, 15 bp, Homo sapiens
agttaatgcttagga

SEQ ID NO: 1101990 - DNA, 15 bp, Homo sapiens
gagttaatgcttagg

SEQ ID NO: 1101991 - DNA, 15 bp, Homo sapiens
tgagttaatgcttag

SEQ ID NO: 1101992 - DNA, 15 bp, Homo sapiens
ctgagttaatgctta

SEQ ID NO: 1101993 - DNA, 15 bp, Homo sapiens
actgagttaatgctt

SEQ ID NO: 1101994 - DNA, 15 bp, Homo sapiens
gactgagttaatgct

SEQ ID NO: 1101995 - DNA, 15 bp, Homo sapiens
ggactgagttaatgc

SEQ ID NO: 1101996 - DNA, 15 bp, Homo sapiens
gggactgagttaatg

SEQ ID NO: 1101997 - DNA, 15 bp, Homo sapiens
ggggactgagttaat

SEQ ID NO: 1101998 - DNA, 15 bp, Homo sapiens
tggggactgagttaa

SEQ ID NO: 1101999 - DNA, 15 bp, Homo sapiens
gtggggactgagtta

SEQ ID NO: 1102000 - DNA, 15 bp, Homo sapiens
tgtggggactgagtt

SEQ ID NO: 1102001 - DNA, 15 bp, Homo sapiens
ctgtggggactgagt

SEQ ID NO: 1102002 - DNA, 15 bp, Homo sapiens
gctgtggggactgag

SEQ ID NO: 1102003 - DNA, 15 bp, Homo sapiens
ggctgtggggactga

SEQ ID NO: 1102004 - DNA, 15 bp, Homo sapiens
tggctgtggggactg

SEQ ID NO: 1102005 - DNA, 15 bp, Homo sapiens
atggctgtggggact

SEQ ID NO: 1102006 - DNA, 15 bp, Homo sapiens
gatggctgtggggac

SEQ ID NO: 1102007 - DNA, 15 bp, Homo sapiens
ggatggctgtgggga

SEQ ID NO: 1102008 - DNA, 15 bp, Homo sapiens
gggatggctgtgggg

SEQ ID NO: 1102009 - DNA, 15 bp, Homo sapiens
tgggatggctgtggg

SEQ ID NO: 1102010 - DNA, 15 bp, Homo sapiens
atgggatggctgtgg

SEQ ID NO: 1102011 - DNA, 15 bp, Homo sapiens
catgggatggctgtg

SEQ ID NO: 1102012 - DNA, 15 bp, Homo sapiens
ccatgggatggctgt

SEQ ID NO: 1102013 - DNA, 15 bp, Homo sapiens
cccatgggatggctg

SEQ ID NO: 1102014 - DNA, 15 bp, Homo sapiens
ccccatgggatggct

SEQ ID NO: 1102015 - DNA, 15 bp, Homo sapiens
cccccatgggatggc

SEQ ID NO: 1102016 - DNA, 15 bp, Homo sapiens
tcccccatgggatgg

SEQ ID NO: 1102017 - DNA, 15 bp, Homo sapiens
ctcccccatgggatg

SEQ ID NO: 1102018 - DNA, 15 bp, Homo sapiens
cctcccccatgggat

SEQ ID NO: 1102019 - DNA, 15 bp, Homo sapiens
ccctcccccatggga

SEQ ID NO: 1102020 - DNA, 15 bp, Homo sapiens
cccctcccccatggg

SEQ ID NO: 1102021 - DNA, 15 bp, Homo sapiens
gcccctcccccatgg

SEQ ID NO: 1102022 - DNA, 15 bp, Homo sapiens
agcccctcccccatg

SEQ ID NO: 1102023 - DNA, 15 bp, Homo sapiens
cagcccctcccccat

SEQ ID NO: 1102024 - DNA, 15 bp, Homo sapiens
gcagcccctccccca

SEQ ID NO: 1102025 - DNA, 15 bp, Homo sapiens
agcagcccctccccc

SEQ ID NO: 1102026 - DNA, 15 bp, Homo sapiens
cagcagcccctcccc

SEQ ID NO: 1102027 - DNA, 15 bp, Homo sapiens
acagcagcccctccc

SEQ ID NO: 1102028 - DNA, 15 bp, Homo sapiens
aacagcagcccctcc

SEQ ID NO: 1102029 - DNA, 15 bp, Homo sapiens
gaacagcagcccctc

SEQ ID NO: 1102030 - DNA, 15 bp, Homo sapiens
ggaacagcagcccct

SEQ ID NO: 1102031 - DNA, 15 bp, Homo sapiens
gggaacagcagcccc

SEQ ID NO: 1102032 - DNA, 15 bp, Homo sapiens
agggaacagcagccc

SEQ ID NO: 1102033 - DNA, 15 bp, Homo sapiens
aagggaacagcagcc

SEQ ID NO: 1102034 - DNA, 15 bp, Homo sapiens
aaagggaacagcagc

SEQ ID NO: 1102035 - DNA, 15 bp, Homo sapiens
aaaagggaacagcag

SEQ ID NO: 1102036 - DNA, 15 bp, Homo sapiens
caaaagggaacagca

SEQ ID NO: 1102037 - DNA, 15 bp, Homo sapiens
gcaaaagggaacagc

SEQ ID NO: 1102038 - DNA, 15 bp, Homo sapiens
tgcaaaagggaacag

SEQ ID NO: 1102039 - DNA, 15 bp, Homo sapiens
gtgcaaaagggaaca

SEQ ID NO: 1102040 - DNA, 15 bp, Homo sapiens
tgtgcaaaagggaac

SEQ ID NO: 1102041 - DNA, 15 bp, Homo sapiens
ttgtgcaaaagggaa

SEQ ID NO: 1102042 - DNA, 15 bp, Homo sapiens
cttgtgcaaaaggga

SEQ ID NO: 1102043 - DNA, 15 bp, Homo sapiens
acttgtgcaaaaggg

SEQ ID NO: 1102044 - DNA, 15 bp, Homo sapiens
cacttgtgcaaaagg

SEQ ID NO: 1102045 - DNA, 15 bp, Homo sapiens
acacttgtgcaaaag

SEQ ID NO: 1102046 - DNA, 15 bp, Homo sapiens
tacacttgtgcaaaa

SEQ ID NO: 1102047 - DNA, 15 bp, Homo sapiens
ttacacttgtgcaaa

SEQ ID NO: 1102048 - DNA, 15 bp, Homo sapiens
cttacacttgtgcaa

SEQ ID NO: 1102049 - DNA, 15 bp, Homo sapiens
gcttacacttgtgca

SEQ ID NO: 1102050 - DNA, 15 bp, Homo sapiens
agcttacacttgtgc

SEQ ID NO: 1102051 - DNA, 15 bp, Homo sapiens
cagcttacacttgtg

SEQ ID NO: 1102052 - DNA, 15 bp, Homo sapiens
tcagcttacacttgt

SEQ ID NO: 1102053 - DNA, 15 bp, Homo sapiens
ctcagcttacacttg

SEQ ID NO: 1102054 - DNA, 15 bp, Homo sapiens
gctcagcttacactt

SEQ ID NO: 1102055 - DNA, 15 bp, Homo sapiens
ggctcagcttacact

SEQ ID NO: 1102056 - DNA, 15 bp, Homo sapiens
aggctcagcttacac

SEQ ID NO: 1102057 - DNA, 15 bp, Homo sapiens
taggctcagcttaca

SEQ ID NO: 1102058 - DNA, 15 bp, Homo sapiens
ttaggctcagcttac

SEQ ID NO: 1102059 - DNA, 15 bp, Homo sapiens
tttaggctcagctta

SEQ ID NO: 1102060 - DNA, 15 bp, Homo sapiens
ttttaggctcagctt

SEQ ID NO: 1102061 - DNA, 15 bp, Homo sapiens
gttttaggctcagct

SEQ ID NO: 1102062 - DNA, 15 bp, Homo sapiens
tgttttaggctcagc

SEQ ID NO: 1102063 - DNA, 15 bp, Homo sapiens
atgttttaggctcag

SEQ ID NO: 1102064 - DNA, 15 bp, Homo sapiens
tatgttttaggctca

SEQ ID NO: 1102065 - DNA, 15 bp, Homo sapiens
gtatgttttaggctc

SEQ ID NO: 1102066 - DNA, 15 bp, Homo sapiens
tgtatgttttaggct

SEQ ID NO: 1102067 - DNA, 15 bp, Homo sapiens
ttgtatgttttaggc

SEQ ID NO: 1102068 - DNA, 15 bp, Homo sapiens
gttgtatgttttagg

SEQ ID NO: 1102069 - DNA, 15 bp, Homo sapiens
agttgtatgttttag

SEQ ID NO: 1102070 - DNA, 15 bp, Homo sapiens
gagttgtatgtttta

SEQ ID NO: 1102071 - DNA, 15 bp, Homo sapiens
agagttgtatgtttt

SEQ ID NO: 1102072 - DNA, 15 bp, Homo sapiens
aagagttgtatgttt

SEQ ID NO: 1102073 - DNA, 15 bp, Homo sapiens
caagagttgtatgtt

SEQ ID NO: 1102074 - DNA, 15 bp, Homo sapiens
gcaagagttgtatgt

SEQ ID NO: 1102075 - DNA, 15 bp, Homo sapiens
tgcaagagttgtatg

SEQ ID NO: 1102076 - DNA, 15 bp, Homo sapiens
gtgcaagagttgtat

SEQ ID NO: 1102077 - DNA, 15 bp, Homo sapiens
agtgcaagagttgta

SEQ ID NO: 1102078 - DNA, 15 bp, Homo sapiens
gagtgcaagagttgt

SEQ ID NO: 1102079 - DNA, 15 bp, Homo sapiens
cgagtgcaagagttg

SEQ ID NO: 1102080 - DNA, 15 bp, Homo sapiens
ccgagtgcaagagtt

SEQ ID NO: 1102081 - DNA, 15 bp, Homo sapiens
accgagtgcaagagt

SEQ ID NO: 1102082 - DNA, 15 bp, Homo sapiens
aaccgagtgcaagag

SEQ ID NO: 1102083 - DNA, 15 bp, Homo sapiens
caaccgagtgcaaga

SEQ ID NO: 1102084 - DNA, 15 bp, Homo sapiens
gcaaccgagtgcaag

SEQ ID NO: 1102085 - DNA, 15 bp, Homo sapiens
tgcaaccgagtgcaa

SEQ ID NO: 1102086 - DNA, 15 bp, Homo sapiens
ttgcaaccgagtgca

SEQ ID NO: 1102087 - DNA, 15 bp, Homo sapiens
tttgcaaccgagtgc

SEQ ID NO: 1102088 - DNA, 15 bp, Homo sapiens
gtttgcaaccgagtg

SEQ ID NO: 1102089 - DNA, 15 bp, Homo sapiens
ggtttgcaaccgagt

SEQ ID NO: 1102090 - DNA, 15 bp, Homo sapiens
aggtttgcaaccgag

SEQ ID NO: 1102091 - DNA, 15 bp, Homo sapiens
taggtttgcaaccga

SEQ ID NO: 1102092 - DNA, 15 bp, Homo sapiens
ttaggtttgcaaccg

SEQ ID NO: 1102093 - DNA, 15 bp, Homo sapiens
attaggtttgcaacc

SEQ ID NO: 1102094 - DNA, 15 bp, Homo sapiens
tattaggtttgcaac

SEQ ID NO: 1102095 - DNA, 15 bp, Homo sapiens
atattaggtttgcaa

SEQ ID NO: 1102096 - DNA, 15 bp, Homo sapiens
gatattaggtttgca

SEQ ID NO: 1102097 - DNA, 15 bp, Homo sapiens
agatattaggtttgc

SEQ ID NO: 1102098 - DNA, 15 bp, Homo sapiens
cagatattaggtttg

SEQ ID NO: 1102099 - DNA, 15 bp, Homo sapiens
ccagatattaggttt

SEQ ID NO: 1102100 - DNA, 15 bp, Homo sapiens
cccagatattaggtt

SEQ ID NO: 1102101 - DNA, 15 bp, Homo sapiens
acccagatattaggt

SEQ ID NO: 1102102 - DNA, 15 bp, Homo sapiens
cacccagatattagg

SEQ ID NO: 1102103 - DNA, 15 bp, Homo sapiens
tcacccagatattag

SEQ ID NO: 1102104 - DNA, 15 bp, Homo sapiens
gtcacccagatatta

SEQ ID NO: 1102105 - DNA, 15 bp, Homo sapiens
ggtcacccagatatt

SEQ ID NO: 1102106 - DNA, 15 bp, Homo sapiens
gggtcacccagatat

SEQ ID NO: 1102107 - DNA, 15 bp, Homo sapiens
tgggtcacccagata

SEQ ID NO: 1102108 - DNA, 15 bp, Homo sapiens
ctgggtcacccagat

SEQ ID NO: 1102109 - DNA, 15 bp, Homo sapiens
cctgggtcacccaga

SEQ ID NO: 1102110 - DNA, 15 bp, Homo sapiens
acctgggtcacccag

SEQ ID NO: 1102111 - DNA, 15 bp, Homo sapiens
gacctgggtcaccca

SEQ ID NO: 1102112 - DNA, 15 bp, Homo sapiens
ggacctgggtcaccc

SEQ ID NO: 1102113 - DNA, 15 bp, Homo sapiens
tggacctgggtcacc

SEQ ID NO: 1102114 - DNA, 15 bp, Homo sapiens
ctggacctgggtcac

SEQ ID NO: 1102115 - DNA, 15 bp, Homo sapiens
cctggacctgggtca

SEQ ID NO: 1102116 - DNA, 15 bp, Homo sapiens
gcctggacctgggtc

SEQ ID NO: 1102117 - DNA, 15 bp, Homo sapiens
ggcctggacctgggt

SEQ ID NO: 1102118 - DNA, 15 bp, Homo sapiens
gggcctggacctggg

SEQ ID NO: 1102119 - DNA, 15 bp, Homo sapiens
tgggcctggacctgg

SEQ ID NO: 1102120 - DNA, 15 bp, Homo sapiens
ctgggcctggacctg

SEQ ID NO: 1102121 - DNA, 15 bp, Homo sapiens
tctgggcctggacct

SEQ ID NO: 1102122 - DNA, 15 bp, Homo sapiens
atctgggcctggacc

SEQ ID NO: 1102123 - DNA, 15 bp, Homo sapiens
gatctgggcctggac

SEQ ID NO: 1102124 - DNA, 15 bp, Homo sapiens
agatctgggcctgga

SEQ ID NO: 1102125 - DNA, 15 bp, Homo sapiens
cagatctgggcctgg

SEQ ID NO: 1102126 - DNA, 15 bp, Homo sapiens
tcagatctgggcctg

SEQ ID NO: 1102127 - DNA, 15 bp, Homo sapiens
ctcagatctgggcct

SEQ ID NO: 1102128 - DNA, 15 bp, Homo sapiens
gctcagatctgggcc

SEQ ID NO: 1102129 - DNA, 15 bp, Homo sapiens
ggctcagatctgggc

SEQ ID NO: 1102130 - DNA, 15 bp, Homo sapiens
gggctcagatctggg

SEQ ID NO: 1102131 - DNA, 15 bp, Homo sapiens
tgggctcagatctgg

SEQ ID NO: 1102132 - DNA, 15 bp, Homo sapiens
cttgggctcagatct

SEQ ID NO: 1102133 - DNA, 15 bp, Homo sapiens
ccttgggctcagatc

SEQ ID NO: 1102134 - DNA, 15 bp, Homo sapiens
gccttgggctcagat

SEQ ID NO: 1102135 - DNA, 15 bp, Homo sapiens
ggccttgggctcaga

SEQ ID NO: 1102136 - DNA, 15 bp, Homo sapiens
tggccttgggctcag

SEQ ID NO: 1102137 - DNA, 15 bp, Homo sapiens
ctggccttgggctca

SEQ ID NO: 1102138 - DNA, 15 bp, Homo sapiens
cctggccttgggctc

SEQ ID NO: 1102139 - DNA, 15 bp, Homo sapiens
ccctggccttgggct

SEQ ID NO: 1102140 - DNA, 15 bp, Homo sapiens
accctggccttgggc

SEQ ID NO: 1102141 - DNA, 15 bp, Homo sapiens
aaccctggccttggg

SEQ ID NO: 1102142 - DNA, 15 bp, Homo sapiens
caaccctggccttgg

SEQ ID NO: 1102143 - DNA, 15 bp, Homo sapiens
acaaccctggccttg

SEQ ID NO: 1102144 - DNA, 15 bp, Homo sapiens
aacaaccctggcctt

SEQ ID NO: 1102145 - DNA, 15 bp, Homo sapiens
gaacaaccctggcct

SEQ ID NO: 1102146 - DNA, 15 bp, Homo sapiens
tgaacaaccctggcc

SEQ ID NO: 1102147 - DNA, 15 bp, Homo sapiens
ctgaacaaccctggc

SEQ ID NO: 1102148 - DNA, 15 bp, Homo sapiens
gctgaacaaccctgg

SEQ ID NO: 1102149 - DNA, 15 bp, Homo sapiens
ggctgaacaaccctg

SEQ ID NO: 1102150 - DNA, 15 bp, Homo sapiens
aggctgaacaaccct

SEQ ID NO: 1102151 - DNA, 15 bp, Homo sapiens
gaggctgaacaaccc

SEQ ID NO: 1102152 - DNA, 15 bp, Homo sapiens
ggaggctgaacaacc

SEQ ID NO: 1102153 - DNA, 15 bp, Homo sapiens
tggaggctgaacaac

SEQ ID NO: 1102154 - DNA, 15 bp, Homo sapiens
gtggaggctgaacaa

SEQ ID NO: 1102155 - DNA, 15 bp, Homo sapiens
agtggaggctgaaca

SEQ ID NO: 1102156 - DNA, 15 bp, Homo sapiens
tagtggaggctgaac

SEQ ID NO: 1102157 - DNA, 15 bp, Homo sapiens
atagtggaggctgaa

SEQ ID NO: 1102158 - DNA, 15 bp, Homo sapiens
catagtggaggctga

SEQ ID NO: 1102159 - DNA, 15 bp, Homo sapiens
acatagtggaggctg

SEQ ID NO: 1102160 - DNA, 15 bp, Homo sapiens
aacatagtggaggct

SEQ ID NO: 1102161 - DNA, 15 bp, Homo sapiens
taacatagtggaggc

SEQ ID NO: 1102162 - DNA, 15 bp, Homo sapiens
gtaacatagtggagg

SEQ ID NO: 1102163 - DNA, 15 bp, Homo sapiens
ggtaacatagtggag

SEQ ID NO: 1102164 - DNA, 15 bp, Homo sapiens
aggtaacatagtgga

SEQ ID NO: 1102165 - DNA, 15 bp, Homo sapiens
caggtaacatagtgg

SEQ ID NO: 1102166 - DNA, 15 bp, Homo sapiens
ccaggtaacatagtg

SEQ ID NO: 1102167 - DNA, 15 bp, Homo sapiens
cccaggtaacatagt

SEQ ID NO: 1102168 - DNA, 15 bp, Homo sapiens
gcccaggtaacatag

SEQ ID NO: 1102169 - DNA, 15 bp, Homo sapiens
tgcccaggtaacata

SEQ ID NO: 1102170 - DNA, 15 bp, Homo sapiens
gtgcccaggtaacat

SEQ ID NO: 1102171 - DNA, 15 bp, Homo sapiens
ggtgcccaggtaaca

SEQ ID NO: 1102172 - DNA, 15 bp, Homo sapiens
gggtgcccaggtaac

SEQ ID NO: 1102173 - DNA, 15 bp, Homo sapiens
tgggtgcccaggtaa

SEQ ID NO: 1102174 - DNA, 15 bp, Homo sapiens
ctgggtgcccaggta

SEQ ID NO: 1102175 - DNA, 15 bp, Homo sapiens
cctgggtgcccaggt

SEQ ID NO: 1102176 - DNA, 15 bp, Homo sapiens
gcctgggtgcccagg

SEQ ID NO: 1102177 - DNA, 15 bp, Homo sapiens
ggcctgggtgcccag

SEQ ID NO: 1102178 - DNA, 15 bp, Homo sapiens
gggcctgggtgccca

SEQ ID NO: 1102179 - DNA, 15 bp, Homo sapiens
agggcctgggtgccc

SEQ ID NO: 1102180 - DNA, 15 bp, Homo sapiens
tagggcctgggtgcc

SEQ ID NO: 1102181 - DNA, 15 bp, Homo sapiens
atagggcctgggtgc

SEQ ID NO: 1102182 - DNA, 15 bp, Homo sapiens
catagggcctgggtg

SEQ ID NO: 1102183 - DNA, 15 bp, Homo sapiens
ccatagggcctgggt

SEQ ID NO: 1102184 - DNA, 15 bp, Homo sapiens
gccatagggcctggg

SEQ ID NO: 1102185 - DNA, 15 bp, Homo sapiens
tgccatagggcctgg

SEQ ID NO: 1102186 - DNA, 15 bp, Homo sapiens
gtgccatagggcctg

SEQ ID NO: 1102187 - DNA, 15 bp, Homo sapiens
agtgccatagggcct

SEQ ID NO: 1102188 - DNA, 15 bp, Homo sapiens
cagtgccatagggcc

SEQ ID NO: 1102189 - DNA, 15 bp, Homo sapiens
ccagtgccatagggc

SEQ ID NO: 1102190 - DNA, 15 bp, Homo sapiens
cccagtgccataggg

SEQ ID NO: 1102191 - DNA, 15 bp, Homo sapiens
acccagtgccatagg

SEQ ID NO: 1102192 - DNA, 15 bp, Homo sapiens
cacccagtgccatag

SEQ ID NO: 1102193 - DNA, 15 bp, Homo sapiens
ccacccagtgccata

SEQ ID NO: 1102194 - DNA, 15 bp, Homo sapiens
gccacccagtgccat

SEQ ID NO: 1102195 - DNA, 15 bp, Homo sapiens
ggccacccagtgcca

SEQ ID NO: 1102196 - DNA, 15 bp, Homo sapiens
gggccacccagtgcc

SEQ ID NO: 1102197 - DNA, 15 bp, Homo sapiens
agggccacccagtgc

SEQ ID NO: 1102198 - DNA, 15 bp, Homo sapiens
tagggccacccagtg

SEQ ID NO: 1102199 - DNA, 15 bp, Homo sapiens
ctagggccacccagt

SEQ ID NO: 1102200 - DNA, 15 bp, Homo sapiens
gctagggccacccag

SEQ ID NO: 1102201 - DNA, 15 bp, Homo sapiens
ggctagggccaccca

SEQ ID NO: 1102202 - DNA, 15 bp, Homo sapiens
aggctagggccaccc

SEQ ID NO: 1102203 - DNA, 15 bp, Homo sapiens
gaggctagggccacc

SEQ ID NO: 1102204 - DNA, 15 bp, Homo sapiens
tgaggctagggccac

SEQ ID NO: 1102205 - DNA, 15 bp, Homo sapiens
atgaggctagggcca

SEQ ID NO: 1102206 - DNA, 15 bp, Homo sapiens
aatgaggctagggcc

SEQ ID NO: 1102207 - DNA, 15 bp, Homo sapiens
aaatgaggctagggc

SEQ ID NO: 1102208 - DNA, 15 bp, Homo sapiens
taaatgaggctaggg

SEQ ID NO: 1102209 - DNA, 15 bp, Homo sapiens
gtaaatgaggctagg

SEQ ID NO: 1102210 - DNA, 15 bp, Homo sapiens
agtaaatgaggctag

SEQ ID NO: 1102211 - DNA, 15 bp, Homo sapiens
gagtaaatgaggcta

SEQ ID NO: 1102212 - DNA, 15 bp, Homo sapiens
tgagtaaatgaggct

SEQ ID NO: 1102213 - DNA, 15 bp, Homo sapiens
ctgagtaaatgaggc

SEQ ID NO: 1102214 - DNA, 15 bp, Homo sapiens
actgagtaaatgagg

SEQ ID NO: 1102215 - DNA, 15 bp, Homo sapiens
gactgagtaaatgag

SEQ ID NO: 1102216 - DNA, 15 bp, Homo sapiens
agactgagtaaatga

SEQ ID NO: 1102217 - DNA, 15 bp, Homo sapiens
aagactgagtaaatg

SEQ ID NO: 1102218 - DNA, 15 bp, Homo sapiens
aaagactgagtaaat

SEQ ID NO: 1102219 - DNA, 15 bp, Homo sapiens
gaaagactgagtaaa

SEQ ID NO: 1102220 - DNA, 15 bp, Homo sapiens
ggaaagactgagtaa

SEQ ID NO: 1102221 - DNA, 15 bp, Homo sapiens
gggaaagactgagta

SEQ ID NO: 1102222 - DNA, 15 bp, Homo sapiens
ggggaaagactgagt

SEQ ID NO: 1102223 - DNA, 15 bp, Homo sapiens
tggggaaagactgag

SEQ ID NO: 1102224 - DNA, 15 bp, Homo sapiens
ctggggaaagactga

SEQ ID NO: 1102225 - DNA, 15 bp, Homo sapiens
tctggggaaagactg

SEQ ID NO: 1102226 - DNA, 15 bp, Homo sapiens
gtctggggaaagact

SEQ ID NO: 1102227 - DNA, 15 bp, Homo sapiens
ggtctggggaaagac

SEQ ID NO: 1102228 - DNA, 15 bp, Homo sapiens
tggtctggggaaaga

SEQ ID NO: 1102229 - DNA, 15 bp, Homo sapiens
ctggtctggggaaag

SEQ ID NO: 1102230 - DNA, 15 bp, Homo sapiens
tctggtctggggaaa

SEQ ID NO: 1102231 - DNA, 15 bp, Homo sapiens
ttctggtctggggaa

SEQ ID NO: 1102232 - DNA, 15 bp, Homo sapiens
gttctggtctgggga

SEQ ID NO: 1102233 - DNA, 15 bp, Homo sapiens
ggttctggtctgggg

SEQ ID NO: 1102234 - DNA, 15 bp, Homo sapiens
aggttctggtctggg

SEQ ID NO: 1102235 - DNA, 15 bp, Homo sapiens
gaggttctggtctgg

SEQ ID NO: 1102236 - DNA, 15 bp, Homo sapiens
ggaggttctggtctg

SEQ ID NO: 1102237 - DNA, 15 bp, Homo sapiens
gggaggttctggtct

SEQ ID NO: 1102238 - DNA, 15 bp, Homo sapiens
tgggaggttctggtc

SEQ ID NO: 1102239 - DNA, 15 bp, Homo sapiens
atgggaggttctggt

SEQ ID NO: 1102240 - DNA, 15 bp, Homo sapiens
gatgggaggttctgg

SEQ ID NO: 1102241 - DNA, 15 bp, Homo sapiens
agatgggaggttctg

SEQ ID NO: 1102242 - DNA, 15 bp, Homo sapiens
cagatgggaggttct

SEQ ID NO: 1102243 - DNA, 15 bp, Homo sapiens
acagatgggaggttc

SEQ ID NO: 1102244 - DNA, 15 bp, Homo sapiens
gacagatgggaggtt

SEQ ID NO: 1102245 - DNA, 15 bp, Homo sapiens
ggacagatgggaggt

SEQ ID NO: 1102246 - DNA, 15 bp, Homo sapiens
gggacagatgggagg

SEQ ID NO: 1102247 - DNA, 15 bp, Homo sapiens
tgggacagatgggag

SEQ ID NO: 1102248 - DNA, 15 bp, Homo sapiens
ctgggacagatggga

SEQ ID NO: 1102249 - DNA, 15 bp, Homo sapiens
cctgggacagatggg

SEQ ID NO: 1102250 - DNA, 15 bp, Homo sapiens
ccctgggacagatgg

SEQ ID NO: 1102251 - DNA, 15 bp, Homo sapiens
gccctgggacagatg

SEQ ID NO: 1102252 - DNA, 15 bp, Homo sapiens
ggccctgggacagat

SEQ ID NO: 1102253 - DNA, 15 bp, Homo sapiens
gggccctgggacaga

SEQ ID NO: 1102254 - DNA, 15 bp, Homo sapiens
tgggccctgggacag

SEQ ID NO: 1102255 - DNA, 15 bp, Homo sapiens
gtgggccctgggaca

SEQ ID NO: 1102256 - DNA, 15 bp, Homo sapiens
ggtgggccctgggac

SEQ ID NO: 1102257 - DNA, 15 bp, Homo sapiens
tggtgggccctggga

SEQ ID NO: 1102258 - DNA, 15 bp, Homo sapiens
gtggtgggccctggg

SEQ ID NO: 1102259 - DNA, 15 bp, Homo sapiens
ggtggtgggccctgg

SEQ ID NO: 1102260 - DNA, 15 bp, Homo sapiens
tggtggtgggccctg

SEQ ID NO: 1102261 - DNA, 15 bp, Homo sapiens
gtggtggtgggccct

SEQ ID NO: 1102262 - DNA, 15 bp, Homo sapiens
agtggtggtgggccc

SEQ ID NO: 1102263 - DNA, 15 bp, Homo sapiens
gagtggtggtgggcc

SEQ ID NO: 1102264 - DNA, 15 bp, Homo sapiens
agagtggtggtgggc

SEQ ID NO: 1102265 - DNA, 15 bp, Homo sapiens
gagagtggtggtggg

SEQ ID NO: 1102266 - DNA, 15 bp, Homo sapiens
agagagtggtggtgg

SEQ ID NO: 1102267 - DNA, 15 bp, Homo sapiens
gagagagtggtggtg

SEQ ID NO: 1102268 - DNA, 15 bp, Homo sapiens
ggagagagtggtggt

SEQ ID NO: 1102269 - DNA, 15 bp, Homo sapiens
gggagagagtggtgg

SEQ ID NO: 1102270 - DNA, 15 bp, Homo sapiens
agggagagagtggtg

SEQ ID NO: 1102271 - DNA, 15 bp, Homo sapiens
cagggagagagtggt

SEQ ID NO: 1102272 - DNA, 15 bp, Homo sapiens
gcagggagagagtgg

SEQ ID NO: 1102273 - DNA, 15 bp, Homo sapiens
ggcagggagagagtg

SEQ ID NO: 1102274 - DNA, 15 bp, Homo sapiens
gggcagggagagagt

SEQ ID NO: 1102275 - DNA, 15 bp, Homo sapiens
ggggcagggagagag

SEQ ID NO: 1102276 - DNA, 15 bp, Homo sapiens
tggggcagggagaga

SEQ ID NO: 1102277 - DNA, 15 bp, Homo sapiens
ttggggcagggagag

SEQ ID NO: 1102278 - DNA, 15 bp, Homo sapiens
tttggggcagggaga

SEQ ID NO: 1102279 - DNA, 15 bp, Homo sapiens
ttttggggcagggag

SEQ ID NO: 1102280 - DNA, 15 bp, Homo sapiens
tttttggggcaggga

SEQ ID NO: 1102281 - DNA, 15 bp, Homo sapiens
ttttttggggcaggg

SEQ ID NO: 1102282 - DNA, 15 bp, Homo sapiens
attttttggggcagg

SEQ ID NO: 1102283 - DNA, 15 bp, Homo sapiens
gattttttggggcag

SEQ ID NO: 1102284 - DNA, 15 bp, Homo sapiens
ggattttttggggca

SEQ ID NO: 1102285 - DNA, 15 bp, Homo sapiens
aggattttttggggc

SEQ ID NO: 1102286 - DNA, 15 bp, Homo sapiens
gaggattttttgggg

SEQ ID NO: 1102287 - DNA, 15 bp, Homo sapiens
ggaggattttttggg

SEQ ID NO: 1102288 - DNA, 15 bp, Homo sapiens
aggaggattttttgg

SEQ ID NO: 1102289 - DNA, 15 bp, Homo sapiens
caggaggattttttg

SEQ ID NO: 1102290 - DNA, 15 bp, Homo sapiens
tcaggaggatttttt

SEQ ID NO: 1102291 - DNA, 15 bp, Homo sapiens
atcaggaggattttt

SEQ ID NO: 1102292 - DNA, 15 bp, Homo sapiens
tatcaggaggatttt

SEQ ID NO: 1102293 - DNA, 15 bp, Homo sapiens
ttatcaggaggattt

SEQ ID NO: 1102294 - DNA, 15 bp, Homo sapiens
gttatcaggaggatt

SEQ ID NO: 1102295 - DNA, 15 bp, Homo sapiens
tgttatcaggaggat

SEQ ID NO: 1102296 - DNA, 15 bp, Homo sapiens
ctgttatcaggagga

SEQ ID NO: 1102297 - DNA, 15 bp, Homo sapiens
actgttatcaggagg

SEQ ID NO: 1102298 - DNA, 15 bp, Homo sapiens
gactgttatcaggag

SEQ ID NO: 1102299 - DNA, 15 bp, Homo sapiens
ggactgttatcagga

SEQ ID NO: 1102300 - DNA, 15 bp, Homo sapiens
tggactgttatcagg

SEQ ID NO: 1102301 - DNA, 15 bp, Homo sapiens
gtggactgttatcag

SEQ ID NO: 1102302 - DNA, 15 bp, Homo sapiens
tgtggactgttatca

SEQ ID NO: 1102303 - DNA, 15 bp, Homo sapiens
ctgtggactgttatc

SEQ ID NO: 1102304 - DNA, 15 bp, Homo sapiens
gctgtggactgttat

SEQ ID NO: 1102305 - DNA, 15 bp, Homo sapiens
agctgtggactgtta

SEQ ID NO: 1102306 - DNA, 15 bp, Homo sapiens
gagctgtggactgtt

SEQ ID NO: 1102307 - DNA, 15 bp, Homo sapiens
agagctgtggactgt

SEQ ID NO: 1102308 - DNA, 15 bp, Homo sapiens
gagagctgtggactg

SEQ ID NO: 1102309 - DNA, 15 bp, Homo sapiens
ggagagctgtggact

SEQ ID NO: 1102310 - DNA, 15 bp, Homo sapiens
aggagagctgtggac

SEQ ID NO: 1102311 - DNA, 15 bp, Homo sapiens
gaggagagctgtgga

SEQ ID NO: 1102312 - DNA, 15 bp, Homo sapiens
agaggagagctgtgg

SEQ ID NO: 1102313 - DNA, 15 bp, Homo sapiens
cagaggagagctgtg

SEQ ID NO: 1102314 - DNA, 15 bp, Homo sapiens
gcagaggagagctgt

SEQ ID NO: 1102315 - DNA, 15 bp, Homo sapiens
agcagaggagagctg

SEQ ID NO: 1102316 - DNA, 15 bp, Homo sapiens
gagcagaggagagct

SEQ ID NO: 1102317 - DNA, 15 bp, Homo sapiens
agagcagaggagagc

SEQ ID NO: 1102318 - DNA, 15 bp, Homo sapiens
cggagagcagaggag

SEQ ID NO: 1102319 - DNA, 15 bp, Homo sapiens
ccggagagcagagga

SEQ ID NO: 1102320 - DNA, 15 bp, Homo sapiens
tccggagagcagagg

SEQ ID NO: 1102321 - DNA, 15 bp, Homo sapiens
ctccggagagcagag

SEQ ID NO: 1102322 - DNA, 15 bp, Homo sapiens
gctccggagagcaga

SEQ ID NO: 1102323 - DNA, 15 bp, Homo sapiens
tgctccggagagcag

SEQ ID NO: 1102324 - DNA, 15 bp, Homo sapiens
gtgctccggagagca

SEQ ID NO: 1102325 - DNA, 15 bp, Homo sapiens
agtgctccggagagc

SEQ ID NO: 1102326 - DNA, 15 bp, Homo sapiens
cagtgctccggagag

SEQ ID NO: 1102327 - DNA, 15 bp, Homo sapiens
tcagtgctccggaga

SEQ ID NO: 1102328 - DNA, 15 bp, Homo sapiens
atcagtgctccggag

SEQ ID NO: 1102329 - DNA, 15 bp, Homo sapiens
catcagtgctccgga

SEQ ID NO: 1102330 - DNA, 15 bp, Homo sapiens
acatcagtgctccgg

SEQ ID NO: 1102331 - DNA, 15 bp, Homo sapiens
gacatcagtgctccg

SEQ ID NO: 1102332 - DNA, 15 bp, Homo sapiens
ggacatcagtgctcc

SEQ ID NO: 1102333 - DNA, 15 bp, Homo sapiens
gggacatcagtgctc

SEQ ID NO: 1102334 - DNA, 15 bp, Homo sapiens
ggggacatcagtgct

SEQ ID NO: 1102335 - DNA, 15 bp, Homo sapiens
tggggacatcagtgc

SEQ ID NO: 1102336 - DNA, 15 bp, Homo sapiens
gtggggacatcagtg

SEQ ID NO: 1102337 - DNA, 15 bp, Homo sapiens
ggtggggacatcagt

SEQ ID NO: 1102338 - DNA, 15 bp, Homo sapiens
aggtggggacatcag

SEQ ID NO: 1102339 - DNA, 15 bp, Homo sapiens
aaggtggggacatca

SEQ ID NO: 1102340 - DNA, 15 bp, Homo sapiens
aaaggtggggacatc

SEQ ID NO: 1102341 - DNA, 15 bp, Homo sapiens
caaaggtggggacat

SEQ ID NO: 1102342 - DNA, 15 bp, Homo sapiens
acaaaggtggggaca

SEQ ID NO: 1102343 - DNA, 15 bp, Homo sapiens
tacaaaggtggggac

SEQ ID NO: 1102344 - DNA, 15 bp, Homo sapiens
gtacaaaggtgggga

SEQ ID NO: 1102345 - DNA, 15 bp, Homo sapiens
ggtacaaaggtgggg

SEQ ID NO: 1102346 - DNA, 15 bp, Homo sapiens
aggtacaaaggtggg

SEQ ID NO: 1102347 - DNA, 15 bp, Homo sapiens
aaggtacaaaggtgg

SEQ ID NO: 1102348 - DNA, 15 bp, Homo sapiens
aaaggtacaaaggtg

SEQ ID NO: 1102349 - DNA, 15 bp, Homo sapiens
aaaaggtacaaaggt

SEQ ID NO: 1102350 - DNA, 15 bp, Homo sapiens
gaaaaggtacaaagg

SEQ ID NO: 1102351 - DNA, 15 bp, Homo sapiens
ggaaaaggtacaaag

SEQ ID NO: 1102352 - DNA, 15 bp, Homo sapiens
gggaaaaggtacaaa

SEQ ID NO: 1102353 - DNA, 15 bp, Homo sapiens
agggaaaaggtacaa

SEQ ID NO: 1102354 - DNA, 15 bp, Homo sapiens
cagggaaaaggtaca

SEQ ID NO: 1102355 - DNA, 15 bp, Homo sapiens
gcagggaaaaggtac

SEQ ID NO: 1102356 - DNA, 15 bp, Homo sapiens
agcagggaaaaggta

SEQ ID NO: 1102357 - DNA, 15 bp, Homo sapiens
cagcagggaaaaggt

SEQ ID NO: 1102358 - DNA, 15 bp, Homo sapiens
acagcagggaaaagg

SEQ ID NO: 1102359 - DNA, 15 bp, Homo sapiens
cacagcagggaaaag

SEQ ID NO: 1102360 - DNA, 15 bp, Homo sapiens
gcacagcagggaaaa

SEQ ID NO: 1102361 - DNA, 15 bp, Homo sapiens
ggcacagcagggaaa

SEQ ID NO: 1102362 - DNA, 15 bp, Homo sapiens
gggcacagcagggaa

SEQ ID NO: 1102363 - DNA, 15 bp, Homo sapiens
agggcacagcaggga

SEQ ID NO: 1102364 - DNA, 15 bp, Homo sapiens
gagggcacagcaggg

SEQ ID NO: 1102365 - DNA, 15 bp, Homo sapiens
ggagggcacagcagg

SEQ ID NO: 1102366 - DNA, 15 bp, Homo sapiens
aggagggcacagcag

SEQ ID NO: 1102367 - DNA, 15 bp, Homo sapiens
caggagggcacagca

SEQ ID NO: 1102368 - DNA, 15 bp, Homo sapiens
aattaacagctacca

SEQ ID NO: 1102369 - DNA, 15 bp, Homo sapiens
aaattaacagctacc

SEQ ID NO: 1102370 - DNA, 15 bp, Homo sapiens
aaaattaacagctac

SEQ ID NO: 1102371 - DNA, 15 bp, Homo sapiens
aaaaattaacagcta

SEQ ID NO: 1102372 - DNA, 15 bp, Homo sapiens
gaaaaattaacagct

SEQ ID NO: 1102373 - DNA, 15 bp, Homo sapiens
ggaaaaattaacagc

SEQ ID NO: 1102374 - DNA, 15 bp, Homo sapiens
gggaaaaattaacag

SEQ ID NO: 1102375 - DNA, 15 bp, Homo sapiens
tgggaaaaattaaca

SEQ ID NO: 1102376 - DNA, 15 bp, Homo sapiens
gtgggaaaaattaac

SEQ ID NO: 1102377 - DNA, 15 bp, Homo sapiens
ggtgggaaaaattaa

SEQ ID NO: 1102378 - DNA, 15 bp, Homo sapiens
aggtgggaaaaatta

SEQ ID NO: 1102379 - DNA, 15 bp, Homo sapiens
gaggtgggaaaaatt

SEQ ID NO: 1102380 - DNA, 15 bp, Homo sapiens
ggaggtgggaaaaat

SEQ ID NO: 1102381 - DNA, 15 bp, Homo sapiens
gggaggtgggaaaaa

SEQ ID NO: 1102382 - DNA, 15 bp, Homo sapiens
agggaggtgggaaaa

SEQ ID NO: 1102383 - DNA, 15 bp, Homo sapiens
tagggaggtgggaaa

SEQ ID NO: 1102384 - DNA, 15 bp, Homo sapiens
gtagggaggtgggaa

SEQ ID NO: 1102385 - DNA, 15 bp, Homo sapiens
tgtagggaggtggga

SEQ ID NO: 1102386 - DNA, 15 bp, Homo sapiens
atgtagggaggtggg

SEQ ID NO: 1102387 - DNA, 15 bp, Homo sapiens
tatgtagggaggtgg

SEQ ID NO: 1102388 - DNA, 15 bp, Homo sapiens
gtatgtagggaggtg

SEQ ID NO: 1102389 - DNA, 15 bp, Homo sapiens
ggtatgtagggaggt

SEQ ID NO: 1102390 - DNA, 15 bp, Homo sapiens
aggtatgtagggagg

SEQ ID NO: 1102391 - DNA, 15 bp, Homo sapiens
gaggtatgtagggag

SEQ ID NO: 1102392 - DNA, 15 bp, Homo sapiens
ggaggtatgtaggga

SEQ ID NO: 1102393 - DNA, 15 bp, Homo sapiens
gggaggtatgtaggg

SEQ ID NO: 1102394 - DNA, 15 bp, Homo sapiens
agggaggtatgtagg

SEQ ID NO: 1102395 - DNA, 15 bp, Homo sapiens
cagggaggtatgtag

SEQ ID NO: 1102396 - DNA, 15 bp, Homo sapiens
tcagggaggtatgta

SEQ ID NO: 1102397 - DNA, 15 bp, Homo sapiens
gtcagggaggtatgt

SEQ ID NO: 1102398 - DNA, 15 bp, Homo sapiens
agtcagggaggtatg

SEQ ID NO: 1102399 - DNA, 15 bp, Homo sapiens
aagtcagggaggtat

SEQ ID NO: 1102400 - DNA, 15 bp, Homo sapiens
gaagtcagggaggta

SEQ ID NO: 1102401 - DNA, 15 bp, Homo sapiens
ggaagtcagggaggt

SEQ ID NO: 1102402 - DNA, 15 bp, Homo sapiens
aggaagtcagggagg

SEQ ID NO: 1102403 - DNA, 15 bp, Homo sapiens
caggaagtcagggag

SEQ ID NO: 1102404 - DNA, 15 bp, Homo sapiens
gcaggaagtcaggga

SEQ ID NO: 1102405 - DNA, 15 bp, Homo sapiens
tgcaggaagtcaggg

SEQ ID NO: 1102406 - DNA, 15 bp, Homo sapiens
ttgcaggaagtcagg

SEQ ID NO: 1102407 - DNA, 15 bp, Homo sapiens
attgcaggaagtcag

SEQ ID NO: 1102408 - DNA, 15 bp, Homo sapiens
tattgcaggaagtca

SEQ ID NO: 1102409 - DNA, 15 bp, Homo sapiens
gtattgcaggaagtc

SEQ ID NO: 1102410 - DNA, 15 bp, Homo sapiens
tgtattgcaggaagt

SEQ ID NO: 1102411 - DNA, 15 bp, Homo sapiens
gtgtattgcaggaag

SEQ ID NO: 1102412 - DNA, 15 bp, Homo sapiens
tgtgtattgcaggaa

SEQ ID NO: 1102413 - DNA, 15 bp, Homo sapiens
gtgtgtattgcagga

SEQ ID NO: 1102414 - DNA, 15 bp, Homo sapiens
tgtgtgtattgcagg

SEQ ID NO: 1102415 - DNA, 15 bp, Homo sapiens
gtgtgtgtattgcag

SEQ ID NO: 1102416 - DNA, 15 bp, Homo sapiens
agtgtgtgtattgca

SEQ ID NO: 1102417 - DNA, 15 bp, Homo sapiens
aagtgtgtgtattgc

SEQ ID NO: 1102418 - DNA, 15 bp, Homo sapiens
aaagtgtgtgtattg

SEQ ID NO: 1102419 - DNA, 15 bp, Homo sapiens
gaaagtgtgtgtatt

SEQ ID NO: 1102420 - DNA, 15 bp, Homo sapiens
agaaagtgtgtgtat

SEQ ID NO: 1102421 - DNA, 15 bp, Homo sapiens
gagaaagtgtgtgta

SEQ ID NO: 1102422 - DNA, 15 bp, Homo sapiens
agagaaagtgtgtgt

SEQ ID NO: 1102423 - DNA, 15 bp, Homo sapiens
cagagaaagtgtgtg

SEQ ID NO: 1102424 - DNA, 15 bp, Homo sapiens
gcagagaaagtgtgt

SEQ ID NO: 1102425 - DNA, 15 bp, Homo sapiens
ggcagagaaagtgtg

SEQ ID NO: 1102426 - DNA, 15 bp, Homo sapiens
aggcagagaaagtgt

SEQ ID NO: 1102427 - DNA, 15 bp, Homo sapiens
gaggcagagaaagtg

SEQ ID NO: 1102428 - DNA, 15 bp, Homo sapiens
ggaggcagagaaagt

SEQ ID NO: 1102429 - DNA, 15 bp, Homo sapiens
gggaggcagagaaag

SEQ ID NO: 1102430 - DNA, 15 bp, Homo sapiens
tgggaggcagagaaa

SEQ ID NO: 1102431 - DNA, 15 bp, Homo sapiens
atgggaggcagagaa

SEQ ID NO: 1102432 - DNA, 15 bp, Homo sapiens
tatgggaggcagaga

SEQ ID NO: 1102433 - DNA, 15 bp, Homo sapiens
ctatgggaggcagag

SEQ ID NO: 1102434 - DNA, 15 bp, Homo sapiens
tctatgggaggcaga

SEQ ID NO: 1102435 - DNA, 15 bp, Homo sapiens
atctatgggaggcag

SEQ ID NO: 1102436 - DNA, 15 bp, Homo sapiens
aatctatgggaggca

SEQ ID NO: 1102437 - DNA, 15 bp, Homo sapiens
aaatctatgggaggc

SEQ ID NO: 1102438 - DNA, 15 bp, Homo sapiens
caaatctatgggagg

SEQ ID NO: 1102439 - DNA, 15 bp, Homo sapiens
tcaaatctatgggag

SEQ ID NO: 1102440 - DNA, 15 bp, Homo sapiens
ctcaaatctatggga

SEQ ID NO: 1102441 - DNA, 15 bp, Homo sapiens
tctcaaatctatggg

SEQ ID NO: 1102442 - DNA, 15 bp, Homo sapiens
gtctcaaatctatgg

SEQ ID NO: 1102443 - DNA, 15 bp, Homo sapiens
agtctcaaatctatg

SEQ ID NO: 1102444 - DNA, 15 bp, Homo sapiens
cagtctcaaatctat

SEQ ID NO: 1102445 - DNA, 15 bp, Homo sapiens
ccagtctcaaatcta

SEQ ID NO: 1102446 - DNA, 15 bp, Homo sapiens
gccagtctcaaatct

SEQ ID NO: 1102447 - DNA, 15 bp, Homo sapiens
tgccagtctcaaatc

SEQ ID NO: 1102448 - DNA, 15 bp, Homo sapiens
ctgccagtctcaaat

SEQ ID NO: 1102449 - DNA, 15 bp, Homo sapiens
gctgccagtctcaaa

SEQ ID NO: 1102450 - DNA, 15 bp, Homo sapiens
agctgccagtctcaa

SEQ ID NO: 1102451 - DNA, 15 bp, Homo sapiens
aagctgccagtctca

SEQ ID NO: 1102452 - DNA, 15 bp, Homo sapiens
caagctgccagtctc

SEQ ID NO: 1102453 - DNA, 15 bp, Homo sapiens
ccaagctgccagtct

SEQ ID NO: 1102454 - DNA, 15 bp, Homo sapiens
gccaagctgccagtc

SEQ ID NO: 1102455 - DNA, 15 bp, Homo sapiens
ggccaagctgccagt

SEQ ID NO: 1102456 - DNA, 15 bp, Homo sapiens
tggccaagctgccag

SEQ ID NO: 1102457 - DNA, 15 bp, Homo sapiens
ctggccaagctgcca

SEQ ID NO: 1102458 - DNA, 15 bp, Homo sapiens
gctggccaagctgcc

SEQ ID NO: 1102459 - DNA, 15 bp, Homo sapiens
cgctggccaagctgc

SEQ ID NO: 1102460 - DNA, 15 bp, Homo sapiens
acgctggccaagctg

SEQ ID NO: 1102461 - DNA, 15 bp, Homo sapiens
gacgctggccaagct

SEQ ID NO: 1102462 - DNA, 15 bp, Homo sapiens
agacgctggccaagc

SEQ ID NO: 1102463 - DNA, 15 bp, Homo sapiens
cagacgctggccaag

SEQ ID NO: 1102464 - DNA, 15 bp, Homo sapiens
gcagacgctggccaa

SEQ ID NO: 1102465 - DNA, 15 bp, Homo sapiens
agcagacgctggcca

SEQ ID NO: 1102466 - DNA, 15 bp, Homo sapiens
cagcagacgctggcc

SEQ ID NO: 1102467 - DNA, 15 bp, Homo sapiens
ccagcagacgctggc

SEQ ID NO: 1102468 - DNA, 15 bp, Homo sapiens
cccagcagacgctgg

SEQ ID NO: 1102469 - DNA, 15 bp, Homo sapiens
gcccagcagacgctg

SEQ ID NO: 1102470 - DNA, 15 bp, Homo sapiens
ggcccagcagacgct

SEQ ID NO: 1102471 - DNA, 15 bp, Homo sapiens
aggcccagcagacgc

SEQ ID NO: 1102472 - DNA, 15 bp, Homo sapiens
gaggcccagcagacg

SEQ ID NO: 1102473 - DNA, 15 bp, Homo sapiens
agaggcccagcagac

SEQ ID NO: 1102474 - DNA, 15 bp, Homo sapiens
tagaggcccagcaga

SEQ ID NO: 1102475 - DNA, 15 bp, Homo sapiens
ctagaggcccagcag

SEQ ID NO: 1102476 - DNA, 15 bp, Homo sapiens
tctagaggcccagca

SEQ ID NO: 1102477 - DNA, 15 bp, Homo sapiens
gtctagaggcccagc

SEQ ID NO: 1102478 - DNA, 15 bp, Homo sapiens
ggtctagaggcccag

SEQ ID NO: 1102479 - DNA, 15 bp, Homo sapiens
gggtctagaggccca

SEQ ID NO: 1102480 - DNA, 15 bp, Homo sapiens
ggggtctagaggccc

SEQ ID NO: 1102481 - DNA, 15 bp, Homo sapiens
tggggtctagaggcc

SEQ ID NO: 1102482 - DNA, 15 bp, Homo sapiens
ctggggtctagaggc

SEQ ID NO: 1102483 - DNA, 15 bp, Homo sapiens
cctggggtctagagg

SEQ ID NO: 1102484 - DNA, 15 bp, Homo sapiens
ccctggggtctagag

SEQ ID NO: 1102485 - DNA, 15 bp, Homo sapiens
tccctggggtctaga

SEQ ID NO: 1102486 - DNA, 15 bp, Homo sapiens
ctccctggggtctag

SEQ ID NO: 1102487 - DNA, 15 bp, Homo sapiens
gctccctggggtcta

SEQ ID NO: 1102488 - DNA, 15 bp, Homo sapiens
ggctccctggggtct

SEQ ID NO: 1102489 - DNA, 15 bp, Homo sapiens
tggctccctggggtc

SEQ ID NO: 1102490 - DNA, 15 bp, Homo sapiens
ctggctccctggggt

SEQ ID NO: 1102491 - DNA, 15 bp, Homo sapiens
cctggctccctgggg

SEQ ID NO: 1102492 - DNA, 15 bp, Homo sapiens
gcctggctccctggg

SEQ ID NO: 1102493 - DNA, 15 bp, Homo sapiens
cgcctggctccctgg

SEQ ID NO: 1102494 - DNA, 15 bp, Homo sapiens
acgcctggctccctg

SEQ ID NO: 1102495 - DNA, 15 bp, Homo sapiens
tacgcctggctccct

SEQ ID NO: 1102496 - DNA, 15 bp, Homo sapiens
ctacgcctggctccc

SEQ ID NO: 1102497 - DNA, 15 bp, Homo sapiens
cctacgcctggctcc

SEQ ID NO: 1102498 - DNA, 15 bp, Homo sapiens
tcctacgcctggctc

SEQ ID NO: 1102499 - DNA, 15 bp, Homo sapiens
gtcctacgcctggct

SEQ ID NO: 1102500 - DNA, 15 bp, Homo sapiens
tgtcctacgcctggc

SEQ ID NO: 1102501 - DNA, 15 bp, Homo sapiens
ctgtcctacgcctgg

SEQ ID NO: 1102502 - DNA, 15 bp, Homo sapiens
cctgtcctacgcctg

SEQ ID NO: 1102503 - DNA, 15 bp, Homo sapiens
ccctgtcctacgcct

SEQ ID NO: 1102504 - DNA, 15 bp, Homo sapiens
gccctgtcctacgcc

SEQ ID NO: 1102505 - DNA, 15 bp, Homo sapiens
ggccctgtcctacgc

SEQ ID NO: 1102506 - DNA, 15 bp, Homo sapiens
gggccctgtcctacg

SEQ ID NO: 1102507 - DNA, 15 bp, Homo sapiens
tgggccctgtcctac

SEQ ID NO: 1102508 - DNA, 15 bp, Homo sapiens
atgggccctgtccta

SEQ ID NO: 1102509 - DNA, 15 bp, Homo sapiens
gatgggccctgtcct

SEQ ID NO: 1102510 - DNA, 15 bp, Homo sapiens
tgatgggccctgtcc

SEQ ID NO: 1102511 - DNA, 15 bp, Homo sapiens
gtgatgggccctgtc

SEQ ID NO: 1102512 - DNA, 15 bp, Homo sapiens
agtgatgggccctgt

SEQ ID NO: 1102513 - DNA, 15 bp, Homo sapiens
gagtgatgggccctg

SEQ ID NO: 1102514 - DNA, 15 bp, Homo sapiens
tgagtgatgggccct

SEQ ID NO: 1102515 - DNA, 15 bp, Homo sapiens
ctgagtgatgggccc

SEQ ID NO: 1102516 - DNA, 15 bp, Homo sapiens
gctgagtgatgggcc

SEQ ID NO: 1102517 - DNA, 15 bp, Homo sapiens
tgctgagtgatgggc

SEQ ID NO: 1102518 - DNA, 15 bp, Homo sapiens
gtgctgagtgatggg

SEQ ID NO: 1102519 - DNA, 15 bp, Homo sapiens
agtgctgagtgatgg

SEQ ID NO: 1102520 - DNA, 15 bp, Homo sapiens
tagtgctgagtgatg

SEQ ID NO: 1102521 - DNA, 15 bp, Homo sapiens
ttagtgctgagtgat

SEQ ID NO: 1102522 - DNA, 15 bp, Homo sapiens
cttagtgctgagtga

SEQ ID NO: 1102523 - DNA, 15 bp, Homo sapiens
gcttagtgctgagtg

SEQ ID NO: 1102524 - DNA, 15 bp, Homo sapiens
ggcttagtgctgagt

SEQ ID NO: 1102525 - DNA, 15 bp, Homo sapiens
tggcttagtgctgag

SEQ ID NO: 1102526 - DNA, 15 bp, Homo sapiens
gtggcttagtgctga

SEQ ID NO: 1102527 - DNA, 15 bp, Homo sapiens
ggtggcttagtgctg

SEQ ID NO: 1102528 - DNA, 15 bp, Homo sapiens
gggtggcttagtgct

SEQ ID NO: 1102529 - DNA, 15 bp, Homo sapiens
ggggtggcttagtgc

SEQ ID NO: 1102530 - DNA, 15 bp, Homo sapiens
gggggtggcttagtg

SEQ ID NO: 1102531 - DNA, 15 bp, Homo sapiens
tgggggtggcttagt

SEQ ID NO: 1102532 - DNA, 15 bp, Homo sapiens
ctgggggtggcttag

SEQ ID NO: 1102533 - DNA, 15 bp, Homo sapiens
gctgggggtggctta

SEQ ID NO: 1102534 - DNA, 15 bp, Homo sapiens
agctgggggtggctt

SEQ ID NO: 1102535 - DNA, 15 bp, Homo sapiens
gagctgggggtggct

SEQ ID NO: 1102536 - DNA, 15 bp, Homo sapiens
agagctgggggtggc

SEQ ID NO: 1102537 - DNA, 15 bp, Homo sapiens
cagagctgggggtgg

SEQ ID NO: 1102538 - DNA, 15 bp, Homo sapiens
gcagagctgggggtg

SEQ ID NO: 1102539 - DNA, 15 bp, Homo sapiens
ggcagagctgggggt

SEQ ID NO: 1102540 - DNA, 15 bp, Homo sapiens
aggcagagctggggg

SEQ ID NO: 1102541 - DNA, 15 bp, Homo sapiens
caggcagagctgggg

SEQ ID NO: 1102542 - DNA, 15 bp, Homo sapiens
gcaggcagagctggg

SEQ ID NO: 1102543 - DNA, 15 bp, Homo sapiens
ggcaggcagagctgg

SEQ ID NO: 1102544 - DNA, 15 bp, Homo sapiens
cggcaggcagagctg

SEQ ID NO: 1102545 - DNA, 15 bp, Homo sapiens
gcggcaggcagagct

SEQ ID NO: 1102546 - DNA, 15 bp, Homo sapiens
agcggcaggcagagc

SEQ ID NO: 1102547 - DNA, 15 bp, Homo sapiens
aagcggcaggcagag

SEQ ID NO: 1102548 - DNA, 15 bp, Homo sapiens
caagcggcaggcaga

SEQ ID NO: 1102549 - DNA, 15 bp, Homo sapiens
gcaagcggcaggcag

SEQ ID NO: 1102550 - DNA, 15 bp, Homo sapiens
tgcaagcggcaggca

SEQ ID NO: 1102551 - DNA, 15 bp, Homo sapiens
ctgcaagcggcaggc

SEQ ID NO: 1102552 - DNA, 15 bp, Homo sapiens
gctgcaagcggcagg

SEQ ID NO: 1102553 - DNA, 15 bp, Homo sapiens
agctgcaagcggcag

SEQ ID NO: 1102554 - DNA, 15 bp, Homo sapiens
gagctgcaagcggca

SEQ ID NO: 1102555 - DNA, 15 bp, Homo sapiens
ggagctgcaagcggc

SEQ ID NO: 1102556 - DNA, 15 bp, Homo sapiens
tggagctgcaagcgg

SEQ ID NO: 1102557 - DNA, 15 bp, Homo sapiens
atggagctgcaagcg

SEQ ID NO: 1102558 - DNA, 15 bp, Homo sapiens
gatggagctgcaagc

SEQ ID NO: 1102559 - DNA, 15 bp, Homo sapiens
ggatggagctgcaag

SEQ ID NO: 1102560 - DNA, 15 bp, Homo sapiens
tggatggagctgcaa

SEQ ID NO: 1102561 - DNA, 15 bp, Homo sapiens
atggatggagctgca

SEQ ID NO: 1102562 - DNA, 15 bp, Homo sapiens
gatggatggagctgc

SEQ ID NO: 1102563 - DNA, 15 bp, Homo sapiens
tgatggatggagctg

SEQ ID NO: 1102564 - DNA, 15 bp, Homo sapiens
gtgatggatggagct

SEQ ID NO: 1102565 - DNA, 15 bp, Homo sapiens
ggtgatggatggagc

SEQ ID NO: 1102566 - DNA, 15 bp, Homo sapiens
aggtgatggatggag

SEQ ID NO: 1102567 - DNA, 15 bp, Homo sapiens
aaggtgatggatgga

SEQ ID NO: 1102568 - DNA, 15 bp, Homo sapiens
aaaggtgatggatgg

SEQ ID NO: 1102569 - DNA, 15 bp, Homo sapiens
taaaggtgatggatg

SEQ ID NO: 1102570 - DNA, 15 bp, Homo sapiens
ttaaaggtgatggat

SEQ ID NO: 1102571 - DNA, 15 bp, Homo sapiens
attaaaggtgatgga

SEQ ID NO: 1102572 - DNA, 15 bp, Homo sapiens
aattaaaggtgatgg

SEQ ID NO: 1102573 - DNA, 15 bp, Homo sapiens
aaattaaaggtgatg

SEQ ID NO: 1102574 - DNA, 15 bp, Homo sapiens
aaaattaaaggtgat

SEQ ID NO: 1102575 - DNA, 15 bp, Homo sapiens
taaaattaaaggtga

SEQ ID NO: 1102576 - DNA, 15 bp, Homo sapiens
ataaaattaaaggtg

SEQ ID NO: 1102577 - DNA, 15 bp, Homo sapiens
aataaaattaaaggt

SEQ ID NO: 1102578 - DNA, 15 bp, Homo sapiens
aaataaaattaaagg

SEQ ID NO: 1102579 - DNA, 15 bp, Homo sapiens
caaataaaattaaag

SEQ ID NO: 1102580 - DNA, 15 bp, Homo sapiens
tcaaataaaattaaa

SEQ ID NO: 1102581 - DNA, 15 bp, Homo sapiens
ctcaaataaaattaa

SEQ ID NO: 1102582 - DNA, 15 bp, Homo sapiens
gctcaaataaaatta

SEQ ID NO: 1102583 - DNA, 15 bp, Homo sapiens
tgctcaaataaaatt

SEQ ID NO: 1102584 - DNA, 15 bp, Homo sapiens
ctgctcaaataaaat

SEQ ID NO: 1102585 - DNA, 15 bp, Homo sapiens
cctgctcaaataaaa

SEQ ID NO: 1102586 - DNA, 15 bp, Homo sapiens
tcctgctcaaataaa

SEQ ID NO: 1102587 - DNA, 15 bp, Homo sapiens
ttcctgctcaaataa

SEQ ID NO: 1102588 - DNA, 15 bp, Homo sapiens
tttcctgctcaaata

SEQ ID NO: 1102589 - DNA, 15 bp, Homo sapiens
atttcctgctcaaat

SEQ ID NO: 1102590 - DNA, 15 bp, Homo sapiens
tatttcctgctcaaa

SEQ ID NO: 1102591 - DNA, 15 bp, Homo sapiens
ctatttcctgctcaa

SEQ ID NO: 1102592 - DNA, 15 bp, Homo sapiens
cctatttcctgctca

SEQ ID NO: 1102593 - DNA, 15 bp, Homo sapiens
acctatttcctgctc

SEQ ID NO: 1102594 - DNA, 15 bp, Homo sapiens
gacctatttcctgct

SEQ ID NO: 1102595 - DNA, 15 bp, Homo sapiens
ggacctatttcctgc

SEQ ID NO: 1102596 - DNA, 15 bp, Homo sapiens
aggacctatttcctg

SEQ ID NO: 1102597 - DNA, 15 bp, Homo sapiens
caggacctatttcct

SEQ ID NO: 1102598 - DNA, 15 bp, Homo sapiens
ccaggacctatttcc

SEQ ID NO: 1102599 - DNA, 15 bp, Homo sapiens
accaggacctatttc

SEQ ID NO: 1102600 - DNA, 15 bp, Homo sapiens
caccaggacctattt

SEQ ID NO: 1102601 - DNA, 15 bp, Homo sapiens
ccaccaggacctatt

SEQ ID NO: 1102602 - DNA, 15 bp, Homo sapiens
accaccaggacctat

SEQ ID NO: 1102603 - DNA, 15 bp, Homo sapiens
caccaccaggaccta

SEQ ID NO: 1102604 - DNA, 15 bp, Homo sapiens
gcaccaccaggacct

SEQ ID NO: 1102605 - DNA, 15 bp, Homo sapiens
ggcaccaccaggacc

SEQ ID NO: 1102606 - DNA, 15 bp, Homo sapiens
gggcaccaccaggac

SEQ ID NO: 1102607 - DNA, 15 bp, Homo sapiens
cgggcaccaccagga

SEQ ID NO: 1102608 - DNA, 15 bp, Homo sapiens
acgggcaccaccagg

SEQ ID NO: 1102609 - DNA, 15 bp, Homo sapiens
aacgggcaccaccag

SEQ ID NO: 1102610 - DNA, 15 bp, Homo sapiens
aaacgggcaccacca

SEQ ID NO: 1102611 - DNA, 15 bp, Homo sapiens
taaacgggcaccacc

SEQ ID NO: 1102612 - DNA, 15 bp, Homo sapiens
ataaacgggcaccac

SEQ ID NO: 1102613 - DNA, 15 bp, Homo sapiens
cataaacgggcacca

SEQ ID NO: 1102614 - DNA, 15 bp, Homo sapiens
tcataaacgggcacc

SEQ ID NO: 1102615 - DNA, 15 bp, Homo sapiens
ctcataaacgggcac

SEQ ID NO: 1102616 - DNA, 15 bp, Homo sapiens
gctcataaacgggca

SEQ ID NO: 1102617 - DNA, 15 bp, Homo sapiens
tgctcataaacgggc

SEQ ID NO: 1102618 - DNA, 15 bp, Homo sapiens
ttgctcataaacggg

SEQ ID NO: 1102619 - DNA, 15 bp, Homo sapiens
tttgctcataaacgg

SEQ ID NO: 1102620 - DNA, 15 bp, Homo sapiens
gtttgctcataaacg

SEQ ID NO: 1102621 - DNA, 15 bp, Homo sapiens
tgtttgctcataaac

SEQ ID NO: 1102622 - DNA, 15 bp, Homo sapiens
atgtttgctcataaa

SEQ ID NO: 1102623 - DNA, 15 bp, Homo sapiens
catgtttgctcataa

SEQ ID NO: 1102624 - DNA, 15 bp, Homo sapiens
ccatgtttgctcata

SEQ ID NO: 1102625 - DNA, 15 bp, Homo sapiens
accatgtttgctcat

SEQ ID NO: 1102626 - DNA, 15 bp, Homo sapiens
aaccatgtttgctca

SEQ ID NO: 1102627 - DNA, 15 bp, Homo sapiens
aaaccatgtttgctc

SEQ ID NO: 1102628 - DNA, 15 bp, Homo sapiens
aaaaccatgtttgct

SEQ ID NO: 1102629 - DNA, 15 bp, Homo sapiens
taaaaccatgtttgc

SEQ ID NO: 1102630 - DNA, 15 bp, Homo sapiens
ataaaaccatgtttg

SEQ ID NO: 1102631 - DNA, 15 bp, Homo sapiens
aataaaaccatgttt

SEQ ID NO: 1102632 - DNA, 15 bp, Homo sapiens
caataaaaccatgtt

SEQ ID NO: 1102633 - DNA, 15 bp, Homo sapiens
gcaataaaaccatgt

SEQ ID NO: 1102634 - DNA, 15 bp, Homo sapiens
agcaataaaaccatg

SEQ ID NO: 1102635 - DNA, 15 bp, Homo sapiens
aagcaataaaaccat

SEQ ID NO: 1102636 - DNA, 15 bp, Homo sapiens
aaagcaataaaacca

SEQ ID NO: 1102637 - DNA, 15 bp, Homo sapiens
gaaagcaataaaacc

SEQ ID NO: 1102638 - DNA, 15 bp, Homo sapiens
agaaagcaataaaac

SEQ ID NO: 1102639 - DNA, 15 bp, Homo sapiens
gagaaagcaataaaa

SEQ ID NO: 1102640 - DNA, 15 bp, Homo sapiens
ggagaaagcaataaa

SEQ ID NO: 1102641 - DNA, 15 bp, Homo sapiens
tggagaaagcaataa

SEQ ID NO: 1102642 - DNA, 15 bp, Homo sapiens
atggagaaagcaata

SEQ ID NO: 1102643 - DNA, 15 bp, Homo sapiens
catggagaaagcaat

SEQ ID NO: 1102644 - DNA, 15 bp, Homo sapiens
tcatggagaaagcaa

SEQ ID NO: 1102645 - DNA, 15 bp, Homo sapiens
ttcatggagaaagca

SEQ ID NO: 1102646 - DNA, 15 bp, Homo sapiens
cttcatggagaaagc

SEQ ID NO: 1102647 - DNA, 15 bp, Homo sapiens
tcttcatggagaaag

SEQ ID NO: 1102648 - DNA, 15 bp, Homo sapiens
atcttcatggagaaa

SEQ ID NO: 1102649 - DNA, 15 bp, Homo sapiens
tatcttcatggagaa

SEQ ID NO: 1102650 - DNA, 15 bp, Homo sapiens
ttatcttcatggaga

SEQ ID NO: 1102651 - DNA, 15 bp, Homo sapiens
gttatcttcatggag

SEQ ID NO: 1102652 - DNA, 15 bp, Homo sapiens
cgttatcttcatgga

SEQ ID NO: 1102653 - DNA, 15 bp, Homo sapiens
ccgttatcttcatgg

SEQ ID NO: 1102654 - DNA, 15 bp, Homo sapiens
gccgttatcttcatg

SEQ ID NO: 1102655 - DNA, 15 bp, Homo sapiens
ggccgttatcttcat

SEQ ID NO: 1102656 - DNA, 15 bp, Homo sapiens
tggccgttatcttca

SEQ ID NO: 1102657 - DNA, 15 bp, Homo sapiens
gtggccgttatcttc

SEQ ID NO: 1102658 - DNA, 15 bp, Homo sapiens
agtggccgttatctt

SEQ ID NO: 1102659 - DNA, 15 bp, Homo sapiens
cagtggccgttatct

SEQ ID NO: 1102660 - DNA, 15 bp, Homo sapiens
gcagtggccgttatc

SEQ ID NO: 1102661 - DNA, 15 bp, Homo sapiens
tgcagtggccgttat

SEQ ID NO: 1102662 - DNA, 15 bp, Homo sapiens
gtgcagtggccgtta

SEQ ID NO: 1102663 - DNA, 15 bp, Homo sapiens
tgtgcagtggccgtt

SEQ ID NO: 1102664 - DNA, 15 bp, Homo sapiens
ctgtgcagtggccgt

SEQ ID NO: 1102665 - DNA, 15 bp, Homo sapiens
cctgtgcagtggccg

SEQ ID NO: 1102666 - DNA, 15 bp, Homo sapiens
gcctgtgcagtggcc

SEQ ID NO: 1102667 - DNA, 15 bp, Homo sapiens
ggcctgtgcagtggc

SEQ ID NO: 1102668 - DNA, 15 bp, Homo sapiens
gggcctgtgcagtgg

SEQ ID NO: 1102669 - DNA, 15 bp, Homo sapiens
ggggcctgtgcagtg

SEQ ID NO: 1102670 - DNA, 15 bp, Homo sapiens
gggggcctgtgcagt

SEQ ID NO: 1102671 - DNA, 15 bp, Homo sapiens
agggggcctgtgcag

SEQ ID NO: 1102672 - DNA, 15 bp, Homo sapiens
cagggggcctgtgca

SEQ ID NO: 1102673 - DNA, 15 bp, Homo sapiens
gcagggggcctgtgc

SEQ ID NO: 1102674 - DNA, 15 bp, Homo sapiens
ggcagggggcctgtg

SEQ ID NO: 1102675 - DNA, 15 bp, Homo sapiens
tggcagggggcctgt

SEQ ID NO: 1102676 - DNA, 15 bp, Homo sapiens
ctggcagggggcctg

SEQ ID NO: 1102677 - DNA, 15 bp, Homo sapiens
gctggcagggggcct

SEQ ID NO: 1102678 - DNA, 15 bp, Homo sapiens
ggctggcagggggcc

SEQ ID NO: 1102679 - DNA, 15 bp, Homo sapiens
aggctggcagggggc

SEQ ID NO: 1102680 - DNA, 15 bp, Homo sapiens
aaggctggcaggggg

SEQ ID NO: 1102681 - DNA, 15 bp, Homo sapiens
aaaggctggcagggg

SEQ ID NO: 1102682 - DNA, 15 bp, Homo sapiens
gaaaggctggcaggg

SEQ ID NO: 1102683 - DNA, 15 bp, Homo sapiens
ggaaaggctggcagg

SEQ ID NO: 1102684 - DNA, 15 bp, Homo sapiens
gggaaaggctggcag

SEQ ID NO: 1102685 - DNA, 15 bp, Homo sapiens
ggggaaaggctggca

SEQ ID NO: 1102686 - DNA, 15 bp, Homo sapiens
tggggaaaggctggc

SEQ ID NO: 1102687 - DNA, 15 bp, Homo sapiens
ttggggaaaggctgg

SEQ ID NO: 1102688 - DNA, 15 bp, Homo sapiens
gttggggaaaggctg

SEQ ID NO: 1102689 - DNA, 15 bp, Homo sapiens
ggttggggaaaggct

SEQ ID NO: 1102690 - DNA, 15 bp, Homo sapiens
gggttggggaaaggc

SEQ ID NO: 1102691 - DNA, 15 bp, Homo sapiens
ggggttggggaaagg

SEQ ID NO: 1102692 - DNA, 15 bp, Homo sapiens
cggggttggggaaag

SEQ ID NO: 1102693 - DNA, 15 bp, Homo sapiens
acggggttggggaaa

SEQ ID NO: 1102694 - DNA, 15 bp, Homo sapiens
gacggggttggggaa

SEQ ID NO: 1102695 - DNA, 15 bp, Homo sapiens
ggacggggttgggga

SEQ ID NO: 1102696 - DNA, 15 bp, Homo sapiens
gggacggggttgggg

SEQ ID NO: 1102697 - DNA, 15 bp, Homo sapiens
ggggacggggttggg

SEQ ID NO: 1102698 - DNA, 15 bp, Homo sapiens
gggggacggggttgg

SEQ ID NO: 1102699 - DNA, 15 bp, Homo sapiens
agggggacggggttg

SEQ ID NO: 1102700 - DNA, 15 bp, Homo sapiens
cagggggacggggtt

SEQ ID NO: 1102701 - DNA, 15 bp, Homo sapiens
gcagggggacggggt

SEQ ID NO: 1102702 - DNA, 15 bp, Homo sapiens
ggcagggggacgggg

SEQ ID NO: 1102703 - DNA, 15 bp, Homo sapiens
tggcagggggacggg

SEQ ID NO: 1102704 - DNA, 15 bp, Homo sapiens
gtggcagggggacgg

SEQ ID NO: 1102705 - DNA, 15 bp, Homo sapiens
agtggcagggggacg

SEQ ID NO: 1102706 - DNA, 15 bp, Homo sapiens
gagtggcagggggac

SEQ ID NO: 1102707 - DNA, 15 bp, Homo sapiens
tgagtggcaggggga

SEQ ID NO: 1102708 - DNA, 15 bp, Homo sapiens
gtgagtggcaggggg

SEQ ID NO: 1102709 - DNA, 15 bp, Homo sapiens
ggtgagtggcagggg

SEQ ID NO: 1102710 - DNA, 15 bp, Homo sapiens
tggtgagtggcaggg

SEQ ID NO: 1102711 - DNA, 15 bp, Homo sapiens
ctggtgagtggcagg

SEQ ID NO: 1102712 - DNA, 15 bp, Homo sapiens
cctggtgagtggcag

SEQ ID NO: 1102713 - DNA, 15 bp, Homo sapiens
gcctggtgagtggca

SEQ ID NO: 1102714 - DNA, 15 bp, Homo sapiens
agcctggtgagtggc

SEQ ID NO: 1102715 - DNA, 15 bp, Homo sapiens
tagcctggtgagtgg

SEQ ID NO: 1102716 - DNA, 15 bp, Homo sapiens
ttagcctggtgagtg

SEQ ID NO: 1102717 - DNA, 15 bp, Homo sapiens
attagcctggtgagt

SEQ ID NO: 1102718 - DNA, 15 bp, Homo sapiens
aattagcctggtgag

SEQ ID NO: 1102719 - DNA, 15 bp, Homo sapiens
aaattagcctggtga

SEQ ID NO: 1102720 - DNA, 15 bp, Homo sapiens
taaattagcctggtg

SEQ ID NO: 1102721 - DNA, 15 bp, Homo sapiens
gtaaattagcctggt

SEQ ID NO: 1102722 - DNA, 15 bp, Homo sapiens
agtaaattagcctgg

SEQ ID NO: 1102723 - DNA, 15 bp, Homo sapiens
gagtaaattagcctg

SEQ ID NO: 1102724 - DNA, 15 bp, Homo sapiens
ggagtaaattagcct

SEQ ID NO: 1102725 - DNA, 15 bp, Homo sapiens
gggagtaaattagcc

SEQ ID NO: 1102726 - DNA, 15 bp, Homo sapiens
agggagtaaattagc

SEQ ID NO: 1102727 - DNA, 15 bp, Homo sapiens
aagggagtaaattag

SEQ ID NO: 1102728 - DNA, 15 bp, Homo sapiens
aaagggagtaaatta

SEQ ID NO: 1102729 - DNA, 15 bp, Homo sapiens
aaaagggagtaaatt

SEQ ID NO: 1102730 - DNA, 15 bp, Homo sapiens
aaaaagggagtaaat

SEQ ID NO: 1102731 - DNA, 15 bp, Homo sapiens
aaaaaagggagtaaa

SEQ ID NO: 1102732 - DNA, 15 bp, Homo sapiens
caaaaaagggagtaa

SEQ ID NO: 1102733 - DNA, 15 bp, Homo sapiens
tcaaaaaagggagta

SEQ ID NO: 1102734 - DNA, 15 bp, Homo sapiens
gtcaaaaaagggagt

SEQ ID NO: 1102735 - DNA, 15 bp, Homo sapiens
tgtcaaaaaagggag

SEQ ID NO: 1102736 - DNA, 15 bp, Homo sapiens
gtgtcaaaaaaggga

SEQ ID NO: 1102737 - DNA, 15 bp, Homo sapiens
agtgtcaaaaaaggg

SEQ ID NO: 1102738 - DNA, 15 bp, Homo sapiens
aagtgtcaaaaaagg

SEQ ID NO: 1102739 - DNA, 15 bp, Homo sapiens
caagtgtcaaaaaag

SEQ ID NO: 1102740 - DNA, 15 bp, Homo sapiens
ccaagtgtcaaaaaa

SEQ ID NO: 1102741 - DNA, 15 bp, Homo sapiens
tccaagtgtcaaaaa

SEQ ID NO: 1102742 - DNA, 15 bp, Homo sapiens
ttccaagtgtcaaaa

SEQ ID NO: 1102743 - DNA, 15 bp, Homo sapiens
attccaagtgtcaaa

SEQ ID NO: 1102744 - DNA, 15 bp, Homo sapiens
gattccaagtgtcaa

SEQ ID NO: 1102745 - DNA, 15 bp, Homo sapiens
tgattccaagtgtca

SEQ ID NO: 1102746 - DNA, 15 bp, Homo sapiens
gtgattccaagtgtc

SEQ ID NO: 1102747 - DNA, 15 bp, Homo sapiens
ggtgattccaagtgt

SEQ ID NO: 1102748 - DNA, 15 bp, Homo sapiens
cggtgattccaagtg

SEQ ID NO: 1102749 - DNA, 15 bp, Homo sapiens
tcggtgattccaagt

SEQ ID NO: 1102750 - DNA, 15 bp, Homo sapiens
gtcggtgattccaag

SEQ ID NO: 1102751 - DNA, 15 bp, Homo sapiens
agtcggtgattccaa

SEQ ID NO: 1102752 - DNA, 15 bp, Homo sapiens
gagtcggtgattcca

SEQ ID NO: 1102753 - DNA, 15 bp, Homo sapiens
agagtcggtgattcc

SEQ ID NO: 1102754 - DNA, 15 bp, Homo sapiens
cagagtcggtgattc

SEQ ID NO: 1102755 - DNA, 15 bp, Homo sapiens
gcagagtcggtgatt

SEQ ID NO: 1102756 - DNA, 15 bp, Homo sapiens
agcagagtcggtgat

SEQ ID NO: 1102757 - DNA, 15 bp, Homo sapiens
cagcagagtcggtga

SEQ ID NO: 1102758 - DNA, 15 bp, Homo sapiens
gcagcagagtcggtg

SEQ ID NO: 1102759 - DNA, 15 bp, Homo sapiens
ggcagcagagtcggt

SEQ ID NO: 1102760 - DNA, 15 bp, Homo sapiens
tcaactagaaagtag

SEQ ID NO: 1102761 - DNA, 15 bp, Homo sapiens
atcaactagaaagta

SEQ ID NO: 1102762 - DNA, 15 bp, Homo sapiens
catcaactagaaagt

SEQ ID NO: 1102763 - DNA, 15 bp, Homo sapiens
tcatcaactagaaag

SEQ ID NO: 1102764 - DNA, 15 bp, Homo sapiens
gatcatcaactagaa

SEQ ID NO: 1102765 - DNA, 15 bp, Homo sapiens
agatcatcaactaga

SEQ ID NO: 1102766 - DNA, 15 bp, Homo sapiens
aagatcatcaactag

SEQ ID NO: 1102767 - DNA, 15 bp, Homo sapiens
taagatcatcaacta

SEQ ID NO: 1102768 - DNA, 15 bp, Homo sapiens
ctaagatcatcaact

SEQ ID NO: 1102769 - DNA, 15 bp, Homo sapiens
cctaagatcatcaac

SEQ ID NO: 1102770 - DNA, 15 bp, Homo sapiens
gcctaagatcatcaa

SEQ ID NO: 1102771 - DNA, 15 bp, Homo sapiens
tgcctaagatcatca

SEQ ID NO: 1102772 - DNA, 15 bp, Homo sapiens
ttgcctaagatcatc

SEQ ID NO: 1102773 - DNA, 15 bp, Homo sapiens
cttgcctaagatcat

SEQ ID NO: 1102774 - DNA, 15 bp, Homo sapiens
acttgcctaagatca

SEQ ID NO: 1102775 - DNA, 15 bp, Homo sapiens
aacttgcctaagatc

SEQ ID NO: 1102776 - DNA, 15 bp, Homo sapiens
caacttgcctaagat

SEQ ID NO: 1102777 - DNA, 15 bp, Homo sapiens
acaacttgcctaaga

SEQ ID NO: 1102778 - DNA, 15 bp, Homo sapiens
aacaacttgcctaag

SEQ ID NO: 1102779 - DNA, 15 bp, Homo sapiens
aaacaacttgcctaa

SEQ ID NO: 1102780 - DNA, 15 bp, Homo sapiens
caaacaacttgccta

SEQ ID NO: 1102781 - DNA, 15 bp, Homo sapiens
ccaaacaacttgcct

SEQ ID NO: 1102782 - DNA, 15 bp, Homo sapiens
gccaaacaacttgcc

SEQ ID NO: 1102783 - DNA, 15 bp, Homo sapiens
agccaaacaacttgc

SEQ ID NO: 1102784 - DNA, 15 bp, Homo sapiens
aagccaaacaacttg

SEQ ID NO: 1102785 - DNA, 15 bp, Homo sapiens
gaagccaaacaactt

SEQ ID NO: 1102786 - DNA, 15 bp, Homo sapiens
agaagccaaacaact

SEQ ID NO: 1102787 - DNA, 15 bp, Homo sapiens
gagaagccaaacaac

SEQ ID NO: 1102788 - DNA, 15 bp, Homo sapiens
tgagaagccaaacaa

SEQ ID NO: 1102789 - DNA, 15 bp, Homo sapiens
ctgagaagccaaaca

SEQ ID NO: 1102790 - DNA, 15 bp, Homo sapiens
tctgagaagccaaac

SEQ ID NO: 1102791 - DNA, 15 bp, Homo sapiens
ctctgagaagccaaa

SEQ ID NO: 1102792 - DNA, 15 bp, Homo sapiens
cctctgagaagccaa

SEQ ID NO: 1102793 - DNA, 15 bp, Homo sapiens
gcctctgagaagcca

SEQ ID NO: 1102794 - DNA, 15 bp, Homo sapiens
agcctctgagaagcc

SEQ ID NO: 1102795 - DNA, 15 bp, Homo sapiens
gagcctctgagaagc

SEQ ID NO: 1102796 - DNA, 15 bp, Homo sapiens
tgagcctctgagaag

SEQ ID NO: 1102797 - DNA, 15 bp, Homo sapiens
ctgagcctctgagaa

SEQ ID NO: 1102798 - DNA, 15 bp, Homo sapiens
actgagcctctgaga

SEQ ID NO: 1102799 - DNA, 15 bp, Homo sapiens
aactgagcctctgag

SEQ ID NO: 1102800 - DNA, 15 bp, Homo sapiens
aaactgagcctctga

SEQ ID NO: 1102801 - DNA, 15 bp, Homo sapiens
gaaactgagcctctg

SEQ ID NO: 1102802 - DNA, 15 bp, Homo sapiens
agaaactgagcctct

SEQ ID NO: 1102803 - DNA, 15 bp, Homo sapiens
aagaaactgagcctc

SEQ ID NO: 1102804 - DNA, 15 bp, Homo sapiens
gaagaaactgagcct

SEQ ID NO: 1102805 - DNA, 15 bp, Homo sapiens
tgaagaaactgagcc

SEQ ID NO: 1102806 - DNA, 15 bp, Homo sapiens
atgaagaaactgagc

SEQ ID NO: 1102807 - DNA, 15 bp, Homo sapiens
tatgaagaaactgag

SEQ ID NO: 1102808 - DNA, 15 bp, Homo sapiens
atatgaagaaactga

SEQ ID NO: 1102809 - DNA, 15 bp, Homo sapiens
catatgaagaaactg

SEQ ID NO: 1102810 - DNA, 15 bp, Homo sapiens
acatatgaagaaact

SEQ ID NO: 1102811 - DNA, 15 bp, Homo sapiens
tacatatgaagaaac

SEQ ID NO: 1102812 - DNA, 15 bp, Homo sapiens
gtacatatgaagaaa

SEQ ID NO: 1102813 - DNA, 15 bp, Homo sapiens
tgtacatatgaagaa

SEQ ID NO: 1102814 - DNA, 15 bp, Homo sapiens
ttgtacatatgaaga

SEQ ID NO: 1102815 - DNA, 15 bp, Homo sapiens
attgtacatatgaag

SEQ ID NO: 1102816 - DNA, 15 bp, Homo sapiens
cattgtacatatgaa

SEQ ID NO: 1102817 - DNA, 15 bp, Homo sapiens
ccattgtacatatga

SEQ ID NO: 1102818 - DNA, 15 bp, Homo sapiens
cccattgtacatatg

SEQ ID NO: 1102819 - DNA, 15 bp, Homo sapiens
tcccattgtacatat

SEQ ID NO: 1102820 - DNA, 15 bp, Homo sapiens
gtcccattgtacata

SEQ ID NO: 1102821 - DNA, 15 bp, Homo sapiens
agtcccattgtacat

SEQ ID NO: 1102822 - DNA, 15 bp, Homo sapiens
tagtcccattgtaca

SEQ ID NO: 1102823 - DNA, 15 bp, Homo sapiens
ttagtcccattgtac

SEQ ID NO: 1102824 - DNA, 15 bp, Homo sapiens
gttagtcccattgta

SEQ ID NO: 1102825 - DNA, 15 bp, Homo sapiens
agttagtcccattgt

SEQ ID NO: 1102826 - DNA, 15 bp, Homo sapiens
cagttagtcccattg

SEQ ID NO: 1102827 - DNA, 15 bp, Homo sapiens
acagttagtcccatt

SEQ ID NO: 1102828 - DNA, 15 bp, Homo sapiens
aacagttagtcccat

SEQ ID NO: 1102829 - DNA, 15 bp, Homo sapiens
gaacagttagtccca

SEQ ID NO: 1102830 - DNA, 15 bp, Homo sapiens
ggaacagttagtccc

SEQ ID NO: 1102831 - DNA, 15 bp, Homo sapiens
aggaacagttagtcc

SEQ ID NO: 1102832 - DNA, 15 bp, Homo sapiens
taggaacagttagtc

SEQ ID NO: 1102833 - DNA, 15 bp, Homo sapiens
gtaggaacagttagt

SEQ ID NO: 1102834 - DNA, 15 bp, Homo sapiens
ggtaggaacagttag

SEQ ID NO: 1102835 - DNA, 15 bp, Homo sapiens
aggtaggaacagtta

SEQ ID NO: 1102836 - DNA, 15 bp, Homo sapiens
aaggtaggaacagtt

SEQ ID NO: 1102837 - DNA, 15 bp, Homo sapiens
caaggtaggaacagt

SEQ ID NO: 1102838 - DNA, 15 bp, Homo sapiens
tcaaggtaggaacag

SEQ ID NO: 1102839 - DNA, 15 bp, Homo sapiens
ttcaaggtaggaaca

SEQ ID NO: 1102840 - DNA, 15 bp, Homo sapiens
tttcaaggtaggaac

SEQ ID NO: 1102841 - DNA, 15 bp, Homo sapiens
ctttcaaggtaggaa

SEQ ID NO: 1102842 - DNA, 15 bp, Homo sapiens
cctttcaaggtagga

SEQ ID NO: 1102843 - DNA, 15 bp, Homo sapiens
acctttcaaggtagg

SEQ ID NO: 1102844 - DNA, 15 bp, Homo sapiens
cacctttcaaggtag

SEQ ID NO: 1102845 - DNA, 15 bp, Homo sapiens
ccacctttcaaggta

SEQ ID NO: 1102846 - DNA, 15 bp, Homo sapiens
accacctttcaaggt

SEQ ID NO: 1102847 - DNA, 15 bp, Homo sapiens
aaccacctttcaagg

SEQ ID NO: 1102848 - DNA, 15 bp, Homo sapiens
gaaccacctttcaag

SEQ ID NO: 1102849 - DNA, 15 bp, Homo sapiens
agaaccacctttcaa

SEQ ID NO: 1102850 - DNA, 15 bp, Homo sapiens
tagaaccacctttca

SEQ ID NO: 1102851 - DNA, 15 bp, Homo sapiens
ttagaaccacctttc

SEQ ID NO: 1102852 - DNA, 15 bp, Homo sapiens
attagaaccaccttt

SEQ ID NO: 1102853 - DNA, 15 bp, Homo sapiens
cattagaaccacctt

SEQ ID NO: 1102854 - DNA, 15 bp, Homo sapiens
acattagaaccacct

SEQ ID NO: 1102855 - DNA, 15 bp, Homo sapiens
gacattagaaccacc

SEQ ID NO: 1102856 - DNA, 15 bp, Homo sapiens
ggacattagaaccac

SEQ ID NO: 1102857 - DNA, 15 bp, Homo sapiens
tggacattagaacca

SEQ ID NO: 1102858 - DNA, 15 bp, Homo sapiens
ttggacattagaacc

SEQ ID NO: 1102859 - DNA, 15 bp, Homo sapiens
tttggacattagaac

SEQ ID NO: 1102860 - DNA, 15 bp, Homo sapiens
ctttggacattagaa

SEQ ID NO: 1102861 - DNA, 15 bp, Homo sapiens
cctttggacattaga

SEQ ID NO: 1102862 - DNA, 15 bp, Homo sapiens
acctttggacattag

SEQ ID NO: 1102863 - DNA, 15 bp, Homo sapiens
cacctttggacatta

SEQ ID NO: 1102864 - DNA, 15 bp, Homo sapiens
acacctttggacatt

SEQ ID NO: 1102865 - DNA, 15 bp, Homo sapiens
gacacctttggacat

SEQ ID NO: 1102866 - DNA, 15 bp, Homo sapiens
tgacacctttggaca

SEQ ID NO: 1102867 - DNA, 15 bp, Homo sapiens
ctgacacctttggac

SEQ ID NO: 1102868 - DNA, 15 bp, Homo sapiens
cctgacacctttgga

SEQ ID NO: 1102869 - DNA, 15 bp, Homo sapiens
acctgacacctttgg

SEQ ID NO: 1102870 - DNA, 15 bp, Homo sapiens
cacctgacacctttg

SEQ ID NO: 1102871 - DNA, 15 bp, Homo sapiens
acacctgacaccttt

SEQ ID NO: 1102872 - DNA, 15 bp, Homo sapiens
tacacctgacacctt

SEQ ID NO: 1102873 - DNA, 15 bp, Homo sapiens
gtacacctgacacct

SEQ ID NO: 1102874 - DNA, 15 bp, Homo sapiens
tgtacacctgacacc

SEQ ID NO: 1102875 - DNA, 15 bp, Homo sapiens
ctgtacacctgacac

SEQ ID NO: 1102876 - DNA, 15 bp, Homo sapiens
actgtacacctgaca

SEQ ID NO: 1102877 - DNA, 15 bp, Homo sapiens
tactgtacacctgac

SEQ ID NO: 1102878 - DNA, 15 bp, Homo sapiens
ctactgtacacctga

SEQ ID NO: 1102879 - DNA, 15 bp, Homo sapiens
cctactgtacacctg

SEQ ID NO: 1102880 - DNA, 15 bp, Homo sapiens
acctactgtacacct

SEQ ID NO: 1102881 - DNA, 15 bp, Homo sapiens
cacctactgtacacc

SEQ ID NO: 1102882 - DNA, 15 bp, Homo sapiens
acacctactgtacac

SEQ ID NO: 1102883 - DNA, 15 bp, Homo sapiens
aacacctactgtaca

SEQ ID NO: 1102884 - DNA, 15 bp, Homo sapiens
gaacacctactgtac

SEQ ID NO: 1102885 - DNA, 15 bp, Homo sapiens
tgaacacctactgta

SEQ ID NO: 1102886 - DNA, 15 bp, Homo sapiens
tttgaacacctactg

SEQ ID NO: 1102887 - DNA, 15 bp, Homo sapiens
ttttgaacacctact

SEQ ID NO: 1102888 - DNA, 15 bp, Homo sapiens
tttttgaacacctac

SEQ ID NO: 1102889 - DNA, 15 bp, Homo sapiens
gtttttgaacaccta

SEQ ID NO: 1102890 - DNA, 15 bp, Homo sapiens
agtttttgaacacct

SEQ ID NO: 1102891 - DNA, 15 bp, Homo sapiens
cagtttttgaacacc

SEQ ID NO: 1102892 - DNA, 15 bp, Homo sapiens
tcagtttttgaacac

SEQ ID NO: 1102893 - DNA, 15 bp, Homo sapiens
atcagtttttgaaca

SEQ ID NO: 1102894 - DNA, 15 bp, Homo sapiens
aatcagtttttgaac

SEQ ID NO: 1102895 - DNA, 15 bp, Homo sapiens
gaatcagtttttgaa

SEQ ID NO: 1102896 - DNA, 15 bp, Homo sapiens
agaatcagtttttga

SEQ ID NO: 1102897 - DNA, 15 bp, Homo sapiens
cagaatcagtttttg

SEQ ID NO: 1102898 - DNA, 15 bp, Homo sapiens
acagaatcagttttt

SEQ ID NO: 1102899 - DNA, 15 bp, Homo sapiens
cacagaatcagtttt

SEQ ID NO: 1102900 - DNA, 15 bp, Homo sapiens
tcacagaatcagttt

SEQ ID NO: 1102901 - DNA, 15 bp, Homo sapiens
ttcacagaatcagtt

SEQ ID NO: 1102902 - DNA, 15 bp, Homo sapiens
cttcacagaatcagt

SEQ ID NO: 1102903 - DNA, 15 bp, Homo sapiens
ccttcacagaatcag

SEQ ID NO: 1102904 - DNA, 15 bp, Homo sapiens
gccttcacagaatca

SEQ ID NO: 1102905 - DNA, 15 bp, Homo sapiens
tgccttcacagaatc

SEQ ID NO: 1102906 - DNA, 15 bp, Homo sapiens
gtgccttcacagaat

SEQ ID NO: 1102907 - DNA, 15 bp, Homo sapiens
tgtgccttcacagaa

SEQ ID NO: 1102908 - DNA, 15 bp, Homo sapiens
ctgtgccttcacaga

SEQ ID NO: 1102909 - DNA, 15 bp, Homo sapiens
gctgtgccttcacag

SEQ ID NO: 1102910 - DNA, 15 bp, Homo sapiens
ggctgtgccttcaca

SEQ ID NO: 1102911 - DNA, 15 bp, Homo sapiens
aggctgtgccttcac

SEQ ID NO: 1102912 - DNA, 15 bp, Homo sapiens
taggctgtgccttca

SEQ ID NO: 1102913 - DNA, 15 bp, Homo sapiens
ataggctgtgccttc

SEQ ID NO: 1102914 - DNA, 15 bp, Homo sapiens
cataggctgtgcctt

SEQ ID NO: 1102915 - DNA, 15 bp, Homo sapiens
ccataggctgtgcct

SEQ ID NO: 1102916 - DNA, 15 bp, Homo sapiens
tccataggctgtgcc

SEQ ID NO: 1102917 - DNA, 15 bp, Homo sapiens
ttccataggctgtgc

SEQ ID NO: 1102918 - DNA, 15 bp, Homo sapiens
tttccataggctgtg

SEQ ID NO: 1102919 - DNA, 15 bp, Homo sapiens
ctttccataggctgt

SEQ ID NO: 1102920 - DNA, 15 bp, Homo sapiens
tctttccataggctg

SEQ ID NO: 1102921 - DNA, 15 bp, Homo sapiens
ctctttccataggct

SEQ ID NO: 1102922 - DNA, 15 bp, Homo sapiens
gctctttccataggc

SEQ ID NO: 1102923 - DNA, 15 bp, Homo sapiens
tgctctttccatagg

SEQ ID NO: 1102924 - DNA, 15 bp, Homo sapiens
ttgctctttccatag

SEQ ID NO: 1102925 - DNA, 15 bp, Homo sapiens
cttgctctttccata

SEQ ID NO: 1102926 - DNA, 15 bp, Homo sapiens
acttgctctttccat

SEQ ID NO: 1102927 - DNA, 15 bp, Homo sapiens
tacttgctctttcca

SEQ ID NO: 1102928 - DNA, 15 bp, Homo sapiens
ttacttgctctttcc

SEQ ID NO: 1102929 - DNA, 15 bp, Homo sapiens
cttacttgctctttc

SEQ ID NO: 1102930 - DNA, 15 bp, Homo sapiens
ccttacttgctcttt

SEQ ID NO: 1102931 - DNA, 15 bp, Homo sapiens
tccttacttgctctt

SEQ ID NO: 1102932 - DNA, 15 bp, Homo sapiens
ctccttacttgctct

SEQ ID NO: 1102933 - DNA, 15 bp, Homo sapiens
gctccttacttgctc

SEQ ID NO: 1102934 - DNA, 15 bp, Homo sapiens
tgctccttacttgct

SEQ ID NO: 1102935 - DNA, 15 bp, Homo sapiens
atgctccttacttgc

SEQ ID NO: 1102936 - DNA, 15 bp, Homo sapiens
catgctccttacttg

SEQ ID NO: 1102937 - DNA, 15 bp, Homo sapiens
acatgctccttactt

SEQ ID NO: 1102938 - DNA, 15 bp, Homo sapiens
aacatgctccttact

SEQ ID NO: 1102939 - DNA, 15 bp, Homo sapiens
caacatgctccttac

SEQ ID NO: 1102940 - DNA, 15 bp, Homo sapiens
acaacatgctcctta

SEQ ID NO: 1102941 - DNA, 15 bp, Homo sapiens
cacaacatgctcctt

SEQ ID NO: 1102942 - DNA, 15 bp, Homo sapiens
tcacaacatgctcct

SEQ ID NO: 1102943 - DNA, 15 bp, Homo sapiens
ttcacaacatgctcc

SEQ ID NO: 1102944 - DNA, 15 bp, Homo sapiens
cttcacaacatgctc

SEQ ID NO: 1102945 - DNA, 15 bp, Homo sapiens
ccttcacaacatgct

SEQ ID NO: 1102946 - DNA, 15 bp, Homo sapiens
tccttcacaacatgc

SEQ ID NO: 1102947 - DNA, 15 bp, Homo sapiens
ttccttcacaacatg

SEQ ID NO: 1102948 - DNA, 15 bp, Homo sapiens
attccttcacaacat

SEQ ID NO: 1102949 - DNA, 15 bp, Homo sapiens
gattccttcacaaca

SEQ ID NO: 1102950 - DNA, 15 bp, Homo sapiens
agattccttcacaac

SEQ ID NO: 1102951 - DNA, 15 bp, Homo sapiens
cagattccttcacaa

SEQ ID NO: 1102952 - DNA, 15 bp, Homo sapiens
gcagattccttcaca

SEQ ID NO: 1102953 - DNA, 15 bp, Homo sapiens
tgcagattccttcac

SEQ ID NO: 1102954 - DNA, 15 bp, Homo sapiens
ttgcagattccttca

SEQ ID NO: 1102955 - DNA, 15 bp, Homo sapiens
gttgcagattccttc

SEQ ID NO: 1102956 - DNA, 15 bp, Homo sapiens
tgttgcagattcctt

SEQ ID NO: 1102957 - DNA, 15 bp, Homo sapiens
ttgttgcagattcct

SEQ ID NO: 1102958 - DNA, 15 bp, Homo sapiens
cttgttgcagattcc

SEQ ID NO: 1102959 - DNA, 15 bp, Homo sapiens
ccttgttgcagattc

SEQ ID NO: 1102960 - DNA, 15 bp, Homo sapiens
gccttgttgcagatt

SEQ ID NO: 1102961 - DNA, 15 bp, Homo sapiens
tgccttgttgcagat

SEQ ID NO: 1102962 - DNA, 15 bp, Homo sapiens
ctgccttgttgcaga

SEQ ID NO: 1102963 - DNA, 15 bp, Homo sapiens
actgccttgttgcag

SEQ ID NO: 1102964 - DNA, 15 bp, Homo sapiens
cactgccttgttgca

SEQ ID NO: 1102965 - DNA, 15 bp, Homo sapiens
gcactgccttgttgc

SEQ ID NO: 1102966 - DNA, 15 bp, Homo sapiens
ggcactgccttgttg

SEQ ID NO: 1102967 - DNA, 15 bp, Homo sapiens
aggcactgccttgtt

SEQ ID NO: 1102968 - DNA, 15 bp, Homo sapiens
taggcactgccttgt

SEQ ID NO: 1102969 - DNA, 15 bp, Homo sapiens
gtaggcactgccttg

SEQ ID NO: 1102970 - DNA, 15 bp, Homo sapiens
agtaggcactgcctt

SEQ ID NO: 1102971 - DNA, 15 bp, Homo sapiens
cagtaggcactgcct

SEQ ID NO: 1102972 - DNA, 15 bp, Homo sapiens
acagtaggcactgcc

SEQ ID NO: 1102973 - DNA, 15 bp, Homo sapiens
tacagtaggcactgc

SEQ ID NO: 1102974 - DNA, 15 bp, Homo sapiens
atacagtaggcactg

SEQ ID NO: 1102975 - DNA, 15 bp, Homo sapiens
catacagtaggcact

SEQ ID NO: 1102976 - DNA, 15 bp, Homo sapiens
gcatacagtaggcac

SEQ ID NO: 1102977 - DNA, 15 bp, Homo sapiens
ggcatacagtaggca

SEQ ID NO: 1102978 - DNA, 15 bp, Homo sapiens
tggcatacagtaggc

SEQ ID NO: 1102979 - DNA, 15 bp, Homo sapiens
ctggcatacagtagg

SEQ ID NO: 1102980 - DNA, 15 bp, Homo sapiens
cctggcatacagtag

SEQ ID NO: 1102981 - DNA, 15 bp, Homo sapiens
gcctggcatacagta

SEQ ID NO: 1102982 - DNA, 15 bp, Homo sapiens
ggcctggcatacagt

SEQ ID NO: 1102983 - DNA, 15 bp, Homo sapiens
gggcctggcatacag

SEQ ID NO: 1102984 - DNA, 15 bp, Homo sapiens
agggcctggcataca

SEQ ID NO: 1102985 - DNA, 15 bp, Homo sapiens
cagggcctggcatac

SEQ ID NO: 1102986 - DNA, 15 bp, Homo sapiens
acagggcctggcata

SEQ ID NO: 1102987 - DNA, 15 bp, Homo sapiens
cacagggcctggcat

SEQ ID NO: 1102988 - DNA, 15 bp, Homo sapiens
ggcacagggcctggc

SEQ ID NO: 1102989 - DNA, 15 bp, Homo sapiens
tggcacagggcctgg

SEQ ID NO: 1102990 - DNA, 15 bp, Homo sapiens
gctggcacagggcct

SEQ ID NO: 1102991 - DNA, 15 bp, Homo sapiens
agctggcacagggcc

SEQ ID NO: 1102992 - DNA, 15 bp, Homo sapiens
cagctggcacagggc

SEQ ID NO: 1102993 - DNA, 15 bp, Homo sapiens
acagctggcacaggg

SEQ ID NO: 1102994 - DNA, 15 bp, Homo sapiens
cacagctggcacagg

SEQ ID NO: 1102995 - DNA, 15 bp, Homo sapiens
ccacagctggcacag

SEQ ID NO: 1102996 - DNA, 15 bp, Homo sapiens
cccacagctggcaca

SEQ ID NO: 1102997 - DNA, 15 bp, Homo sapiens
tcccacagctggcac

SEQ ID NO: 1102998 - DNA, 15 bp, Homo sapiens
ttcccacagctggca

SEQ ID NO: 1102999 - DNA, 15 bp, Homo sapiens
cttcccacagctggc

SEQ ID NO: 1103000 - DNA, 15 bp, Homo sapiens
acttcccacagctgg

SEQ ID NO: 1103001 - DNA, 15 bp, Homo sapiens
cacttcccacagctg

SEQ ID NO: 1103002 - DNA, 15 bp, Homo sapiens
gcacttcccacagct

SEQ ID NO: 1103003 - DNA, 15 bp, Homo sapiens
tgcacttcccacagc

SEQ ID NO: 1103004 - DNA, 15 bp, Homo sapiens
atgcacttcccacag

SEQ ID NO: 1103005 - DNA, 15 bp, Homo sapiens
gatgcacttcccaca

SEQ ID NO: 1103006 - DNA, 15 bp, Homo sapiens
agatgcacttcccac

SEQ ID NO: 1103007 - DNA, 15 bp, Homo sapiens
aagatgcacttccca

SEQ ID NO: 1103008 - DNA, 15 bp, Homo sapiens
taagatgcacttccc

SEQ ID NO: 1103009 - DNA, 15 bp, Homo sapiens
gtaagatgcacttcc

SEQ ID NO: 1103010 - DNA, 15 bp, Homo sapiens
agtaagatgcacttc

SEQ ID NO: 1103011 - DNA, 15 bp, Homo sapiens
tagtaagatgcactt

SEQ ID NO: 1103012 - DNA, 15 bp, Homo sapiens
ctagtaagatgcact

SEQ ID NO: 1103013 - DNA, 15 bp, Homo sapiens
gctagtaagatgcac

SEQ ID NO: 1103014 - DNA, 15 bp, Homo sapiens
tgctagtaagatgca

SEQ ID NO: 1103015 - DNA, 15 bp, Homo sapiens
atgctagtaagatgc

SEQ ID NO: 1103016 - DNA, 15 bp, Homo sapiens
gatgctagtaagatg

SEQ ID NO: 1103017 - DNA, 15 bp, Homo sapiens
tgatgctagtaagat

SEQ ID NO: 1103018 - DNA, 15 bp, Homo sapiens
gtgatgctagtaaga

SEQ ID NO: 1103019 - DNA, 15 bp, Homo sapiens
tgtgatgctagtaag

SEQ ID NO: 1103020 - DNA, 15 bp, Homo sapiens
gtgtgatgctagtaa

SEQ ID NO: 1103021 - DNA, 15 bp, Homo sapiens
cgtgtgatgctagta

SEQ ID NO: 1103022 - DNA, 15 bp, Homo sapiens
ccgtgtgatgctagt

SEQ ID NO: 1103023 - DNA, 15 bp, Homo sapiens
accgtgtgatgctag

SEQ ID NO: 1103024 - DNA, 15 bp, Homo sapiens
aaccgtgtgatgcta

SEQ ID NO: 1103025 - DNA, 15 bp, Homo sapiens
caaccgtgtgatgct

SEQ ID NO: 1103026 - DNA, 15 bp, Homo sapiens
gcaaccgtgtgatgc

SEQ ID NO: 1103027 - DNA, 15 bp, Homo sapiens
tgcaaccgtgtgatg

SEQ ID NO: 1103028 - DNA, 15 bp, Homo sapiens
agctagcctctcccc

SEQ ID NO: 1103029 - DNA, 15 bp, Homo sapiens
cagctagcctctccc

SEQ ID NO: 1103030 - DNA, 15 bp, Homo sapiens
ccagctagcctctcc

SEQ ID NO: 1103031 - DNA, 15 bp, Homo sapiens
cccagctagcctctc

SEQ ID NO: 1103032 - DNA, 15 bp, Homo sapiens
ccccagctagcctct

SEQ ID NO: 1103033 - DNA, 15 bp, Homo sapiens
gccccagctagcctc

SEQ ID NO: 1103034 - DNA, 15 bp, Homo sapiens
ggccccagctagcct

SEQ ID NO: 1103035 - DNA, 15 bp, Homo sapiens
aggccccagctagcc

SEQ ID NO: 1103036 - DNA, 15 bp, Homo sapiens
caggccccagctagc

SEQ ID NO: 1103037 - DNA, 15 bp, Homo sapiens
acaggccccagctag

SEQ ID NO: 1103038 - DNA, 15 bp, Homo sapiens
tacaggccccagcta

SEQ ID NO: 1103039 - DNA, 15 bp, Homo sapiens
ctacaggccccagct

SEQ ID NO: 1103040 - DNA, 15 bp, Homo sapiens
gctacaggccccagc

SEQ ID NO: 1103041 - DNA, 15 bp, Homo sapiens
ggctacaggccccag

SEQ ID NO: 1103042 - DNA, 15 bp, Homo sapiens
tggctacaggcccca

SEQ ID NO: 1103043 - DNA, 15 bp, Homo sapiens
ctggctacaggcccc

SEQ ID NO: 1103044 - DNA, 15 bp, Homo sapiens
cctggctacaggccc

SEQ ID NO: 1103045 - DNA, 15 bp, Homo sapiens
gcctggctacaggcc

SEQ ID NO: 1103046 - DNA, 15 bp, Homo sapiens
ggcctggctacaggc

SEQ ID NO: 1103047 - DNA, 15 bp, Homo sapiens
aggcctggctacagg

SEQ ID NO: 1103048 - DNA, 15 bp, Homo sapiens
taggcctggctacag

SEQ ID NO: 1103049 - DNA, 15 bp, Homo sapiens
ctaggcctggctaca

SEQ ID NO: 1103050 - DNA, 15 bp, Homo sapiens
actaggcctggctac

SEQ ID NO: 1103051 - DNA, 15 bp, Homo sapiens
gactaggcctggcta

SEQ ID NO: 1103052 - DNA, 15 bp, Homo sapiens
cgactaggcctggct

SEQ ID NO: 1103053 - DNA, 15 bp, Homo sapiens
gcgactaggcctggc

SEQ ID NO: 1103054 - DNA, 15 bp, Homo sapiens
tgcgactaggcctgg

SEQ ID NO: 1103055 - DNA, 15 bp, Homo sapiens
ctgcgactaggcctg

SEQ ID NO: 1103056 - DNA, 15 bp, Homo sapiens
tctgcgactaggcct

SEQ ID NO: 1103057 - DNA, 15 bp, Homo sapiens
ctctgcgactaggcc

SEQ ID NO: 1103058 - DNA, 15 bp, Homo sapiens
cctctgcgactaggc

SEQ ID NO: 1103059 - DNA, 15 bp, Homo sapiens
acctctgcgactagg

SEQ ID NO: 1103060 - DNA, 15 bp, Homo sapiens
cacctctgcgactag

SEQ ID NO: 1103061 - DNA, 15 bp, Homo sapiens
gcacctctgcgacta

SEQ ID NO: 1103062 - DNA, 15 bp, Homo sapiens
tgcacctctgcgact

SEQ ID NO: 1103063 - DNA, 15 bp, Homo sapiens
ttgcacctctgcgac

SEQ ID NO: 1103064 - DNA, 15 bp, Homo sapiens
gttgcacctctgcga

SEQ ID NO: 1103065 - DNA, 15 bp, Homo sapiens
ggttgcacctctgcg

SEQ ID NO: 1103066 - DNA, 15 bp, Homo sapiens
gggttgcacctctgc

SEQ ID NO: 1103067 - DNA, 15 bp, Homo sapiens
agggttgcacctctg

SEQ ID NO: 1103068 - DNA, 15 bp, Homo sapiens
cagggttgcacctct

SEQ ID NO: 1103069 - DNA, 15 bp, Homo sapiens
ccagggttgcacctc

SEQ ID NO: 1103070 - DNA, 15 bp, Homo sapiens
accagggttgcacct

SEQ ID NO: 1103071 - DNA, 15 bp, Homo sapiens
caccagggttgcacc

SEQ ID NO: 1103072 - DNA, 15 bp, Homo sapiens
acaccagggttgcac

SEQ ID NO: 1103073 - DNA, 15 bp, Homo sapiens
aacaccagggttgca

SEQ ID NO: 1103074 - DNA, 15 bp, Homo sapiens
gaacaccagggttgc

SEQ ID NO: 1103075 - DNA, 15 bp, Homo sapiens
ggaacaccagggttg

SEQ ID NO: 1103076 - DNA, 15 bp, Homo sapiens
aggaacaccagggtt

SEQ ID NO: 1103077 - DNA, 15 bp, Homo sapiens
aaggaacaccagggt

SEQ ID NO: 1103078 - DNA, 15 bp, Homo sapiens
gaaggaacaccaggg

SEQ ID NO: 1103079 - DNA, 15 bp, Homo sapiens
tgaaggaacaccagg

SEQ ID NO: 1103080 - DNA, 15 bp, Homo sapiens
ctgaaggaacaccag

SEQ ID NO: 1103081 - DNA, 15 bp, Homo sapiens
tctgaaggaacacca

SEQ ID NO: 1103082 - DNA, 15 bp, Homo sapiens
ttctgaaggaacacc

SEQ ID NO: 1103083 - DNA, 15 bp, Homo sapiens
tttctgaaggaacac

SEQ ID NO: 1103084 - DNA, 15 bp, Homo sapiens
ctttctgaaggaaca

SEQ ID NO: 1103085 - DNA, 15 bp, Homo sapiens
cctttctgaaggaac

SEQ ID NO: 1103086 - DNA, 15 bp, Homo sapiens
tcctttctgaaggaa

SEQ ID NO: 1103087 - DNA, 15 bp, Homo sapiens
ttcctttctgaagga

SEQ ID NO: 1103088 - DNA, 15 bp, Homo sapiens
tttcctttctgaagg

SEQ ID NO: 1103089 - DNA, 15 bp, Homo sapiens
atttcctttctgaag

SEQ ID NO: 1103090 - DNA, 15 bp, Homo sapiens
catttcctttctgaa

SEQ ID NO: 1103091 - DNA, 15 bp, Homo sapiens
tcatttcctttctga

SEQ ID NO: 1103092 - DNA, 15 bp, Homo sapiens
ctcatttcctttctg

SEQ ID NO: 1103093 - DNA, 15 bp, Homo sapiens
tctcatttcctttct

SEQ ID NO: 1103094 - DNA, 15 bp, Homo sapiens
ctctcatttcctttc

SEQ ID NO: 1103095 - DNA, 15 bp, Homo sapiens
cctctcatttccttt

SEQ ID NO: 1103096 - DNA, 15 bp, Homo sapiens
ccctctcatttcctt

SEQ ID NO: 1103097 - DNA, 15 bp, Homo sapiens
tccctctcatttcct

SEQ ID NO: 1103098 - DNA, 15 bp, Homo sapiens
ttccctctcatttcc

SEQ ID NO: 1103099 - DNA, 15 bp, Homo sapiens
cttccctctcatttc

SEQ ID NO: 1103100 - DNA, 15 bp, Homo sapiens
gcttccctctcattt

SEQ ID NO: 1103101 - DNA, 15 bp, Homo sapiens
ggcttccctctcatt

SEQ ID NO: 1103102 - DNA, 15 bp, Homo sapiens
tggcttccctctcat

SEQ ID NO: 1103103 - DNA, 15 bp, Homo sapiens
gtggcttccctctca

SEQ ID NO: 1103104 - DNA, 15 bp, Homo sapiens
agtggcttccctctc

SEQ ID NO: 1103105 - DNA, 15 bp, Homo sapiens
cagtggcttccctct

SEQ ID NO: 1103106 - DNA, 15 bp, Homo sapiens
gcagtggcttccctc

SEQ ID NO: 1103107 - DNA, 15 bp, Homo sapiens
ggcagtggcttccct

SEQ ID NO: 1103108 - DNA, 15 bp, Homo sapiens
gggcagtggcttccc

SEQ ID NO: 1103109 - DNA, 15 bp, Homo sapiens
ggggcagtggcttcc

SEQ ID NO: 1103110 - DNA, 15 bp, Homo sapiens
tggggcagtggcttc

SEQ ID NO: 1103111 - DNA, 15 bp, Homo sapiens
atggggcagtggctt

SEQ ID NO: 1103112 - DNA, 15 bp, Homo sapiens
aatggggcagtggct

SEQ ID NO: 1103113 - DNA, 15 bp, Homo sapiens
gaatggggcagtggc

SEQ ID NO: 1103114 - DNA, 15 bp, Homo sapiens
ggaatggggcagtgg

SEQ ID NO: 1103115 - DNA, 15 bp, Homo sapiens
aggaatggggcagtg

SEQ ID NO: 1103116 - DNA, 15 bp, Homo sapiens
caggaatggggcagt

SEQ ID NO: 1103117 - DNA, 15 bp, Homo sapiens
ccaggaatggggcag

SEQ ID NO: 1103118 - DNA, 15 bp, Homo sapiens
tccaggaatggggca

SEQ ID NO: 1103119 - DNA, 15 bp, Homo sapiens
atccaggaatggggc

SEQ ID NO: 1103120 - DNA, 15 bp, Homo sapiens
gatccaggaatgggg

SEQ ID NO: 1103121 - DNA, 15 bp, Homo sapiens
agatccaggaatggg

SEQ ID NO: 1103122 - DNA, 15 bp, Homo sapiens
cagatccaggaatgg

SEQ ID NO: 1103123 - DNA, 15 bp, Homo sapiens
gcagatccaggaatg

SEQ ID NO: 1103124 - DNA, 15 bp, Homo sapiens
ggcagatccaggaat

SEQ ID NO: 1103125 - DNA, 15 bp, Homo sapiens
aggcagatccaggaa

SEQ ID NO: 1103126 - DNA, 15 bp, Homo sapiens
caggcagatccagga

SEQ ID NO: 1103127 - DNA, 15 bp, Homo sapiens
ccaggcagatccagg

SEQ ID NO: 1103128 - DNA, 15 bp, Homo sapiens
cccaggcagatccag

SEQ ID NO: 1103129 - DNA, 15 bp, Homo sapiens
gcccaggcagatcca

SEQ ID NO: 1103130 - DNA, 15 bp, Homo sapiens
ggcccaggcagatcc

SEQ ID NO: 1103131 - DNA, 15 bp, Homo sapiens
cggcccaggcagatc

SEQ ID NO: 1103132 - DNA, 15 bp, Homo sapiens
gcggcccaggcagat

SEQ ID NO: 1103133 - DNA, 15 bp, Homo sapiens
agcggcccaggcaga

SEQ ID NO: 1103134 - DNA, 15 bp, Homo sapiens
cagcggcccaggcag

SEQ ID NO: 1103135 - DNA, 15 bp, Homo sapiens
ccagcggcccaggca

SEQ ID NO: 1103136 - DNA, 15 bp, Homo sapiens
tccagcggcccaggc

SEQ ID NO: 1103137 - DNA, 15 bp, Homo sapiens
atccagcggcccagg

SEQ ID NO: 1103138 - DNA, 15 bp, Homo sapiens
aatccagcggcccag

SEQ ID NO: 1103139 - DNA, 15 bp, Homo sapiens
aaatccagcggccca

SEQ ID NO: 1103140 - DNA, 15 bp, Homo sapiens
caaatccagcggccc

SEQ ID NO: 1103141 - DNA, 15 bp, Homo sapiens
ccaaatccagcggcc

SEQ ID NO: 1103142 - DNA, 15 bp, Homo sapiens
cccaaatccagcggc

SEQ ID NO: 1103143 - DNA, 15 bp, Homo sapiens
ccccaaatccagcgg

SEQ ID NO: 1103144 - DNA, 15 bp, Homo sapiens
tccccaaatccagcg

SEQ ID NO: 1103145 - DNA, 15 bp, Homo sapiens
ctccccaaatccagc

SEQ ID NO: 1103146 - DNA, 15 bp, Homo sapiens
cctccccaaatccag

SEQ ID NO: 1103147 - DNA, 15 bp, Homo sapiens
ccctccccaaatcca

SEQ ID NO: 1103148 - DNA, 15 bp, Homo sapiens
cccctccccaaatcc

SEQ ID NO: 1103149 - DNA, 15 bp, Homo sapiens
ccccctccccaaatc

SEQ ID NO: 1103150 - DNA, 15 bp, Homo sapiens
accccctccccaaat

SEQ ID NO: 1103151 - DNA, 15 bp, Homo sapiens
aaccccctccccaaa

SEQ ID NO: 1103152 - DNA, 15 bp, Homo sapiens
caaccccctccccaa

SEQ ID NO: 1103153 - DNA, 15 bp, Homo sapiens
acaaccccctcccca

SEQ ID NO: 1103154 - DNA, 15 bp, Homo sapiens
aacaaccccctcccc

SEQ ID NO: 1103155 - DNA, 15 bp, Homo sapiens
caacaaccccctccc

SEQ ID NO: 1103156 - DNA, 15 bp, Homo sapiens
tcaacaaccccctcc

SEQ ID NO: 1103157 - DNA, 15 bp, Homo sapiens
ctcaacaaccccctc

SEQ ID NO: 1103158 - DNA, 15 bp, Homo sapiens
cctcaacaaccccct

SEQ ID NO: 1103159 - DNA, 15 bp, Homo sapiens
tcctcaacaaccccc

SEQ ID NO: 1103160 - DNA, 15 bp, Homo sapiens
atcctcaacaacccc

SEQ ID NO: 1103161 - DNA, 15 bp, Homo sapiens
catcctcaacaaccc

SEQ ID NO: 1103162 - DNA, 15 bp, Homo sapiens
ccatcctcaacaacc

SEQ ID NO: 1103163 - DNA, 15 bp, Homo sapiens
tccatcctcaacaac

SEQ ID NO: 1103164 - DNA, 15 bp, Homo sapiens
ctccatcctcaacaa

SEQ ID NO: 1103165 - DNA, 15 bp, Homo sapiens
actccatcctcaaca

SEQ ID NO: 1103166 - DNA, 15 bp, Homo sapiens
gactccatcctcaac

SEQ ID NO: 1103167 - DNA, 15 bp, Homo sapiens
ggactccatcctcaa

SEQ ID NO: 1103168 - DNA, 15 bp, Homo sapiens
gggactccatcctca

SEQ ID NO: 1103169 - DNA, 15 bp, Homo sapiens
tgggactccatcctc

SEQ ID NO: 1103170 - DNA, 15 bp, Homo sapiens
ttgggactccatcct

SEQ ID NO: 1103171 - DNA, 15 bp, Homo sapiens
tttgggactccatcc

SEQ ID NO: 1103172 - DNA, 15 bp, Homo sapiens
ctttgggactccatc

SEQ ID NO: 1103173 - DNA, 15 bp, Homo sapiens
actttgggactccat

SEQ ID NO: 1103174 - DNA, 15 bp, Homo sapiens
cactttgggactcca

SEQ ID NO: 1103175 - DNA, 15 bp, Homo sapiens
gcactttgggactcc

SEQ ID NO: 1103176 - DNA, 15 bp, Homo sapiens
agcactttgggactc

SEQ ID NO: 1103177 - DNA, 15 bp, Homo sapiens
aagcactttgggact

SEQ ID NO: 1103178 - DNA, 15 bp, Homo sapiens
gaagcactttgggac

SEQ ID NO: 1103179 - DNA, 15 bp, Homo sapiens
ggaagcactttggga

SEQ ID NO: 1103180 - DNA, 15 bp, Homo sapiens
cggaagcactttggg

SEQ ID NO: 1103181 - DNA, 15 bp, Homo sapiens
tcggaagcactttgg

SEQ ID NO: 1103182 - DNA, 15 bp, Homo sapiens
gtcggaagcactttg

SEQ ID NO: 1103183 - DNA, 15 bp, Homo sapiens
ggtcggaagcacttt

SEQ ID NO: 1103184 - DNA, 15 bp, Homo sapiens
tggtcggaagcactt

SEQ ID NO: 1103185 - DNA, 15 bp, Homo sapiens
ctggtcggaagcact

SEQ ID NO: 1103186 - DNA, 15 bp, Homo sapiens
cctggtcggaagcac

SEQ ID NO: 1103187 - DNA, 15 bp, Homo sapiens
ccctggtcggaagca

SEQ ID NO: 1103188 - DNA, 15 bp, Homo sapiens
gccctggtcggaagc

SEQ ID NO: 1103189 - DNA, 15 bp, Homo sapiens
ggccctggtcggaag

SEQ ID NO: 1103190 - DNA, 15 bp, Homo sapiens
tggccctggtcggaa

SEQ ID NO: 1103191 - DNA, 15 bp, Homo sapiens
ctggccctggtcgga

SEQ ID NO: 1103192 - DNA, 15 bp, Homo sapiens
actggccctggtcgg

SEQ ID NO: 1103193 - DNA, 15 bp, Homo sapiens
gactggccctggtcg

SEQ ID NO: 1103194 - DNA, 15 bp, Homo sapiens
agactggccctggtc

SEQ ID NO: 1103195 - DNA, 15 bp, Homo sapiens
cagactggccctggt

SEQ ID NO: 1103196 - DNA, 15 bp, Homo sapiens
gcagactggccctgg

SEQ ID NO: 1103197 - DNA, 15 bp, Homo sapiens
tgcagactggccctg

SEQ ID NO: 1103198 - DNA, 15 bp, Homo sapiens
ctgcagactggccct

SEQ ID NO: 1103199 - DNA, 15 bp, Homo sapiens
cctgcagactggccc

SEQ ID NO: 1103200 - DNA, 15 bp, Homo sapiens
ccctgcagactggcc

SEQ ID NO: 1103201 - DNA, 15 bp, Homo sapiens
gccctgcagactggc

SEQ ID NO: 1103202 - DNA, 15 bp, Homo sapiens
tgccctgcagactgg

SEQ ID NO: 1103203 - DNA, 15 bp, Homo sapiens
gtgccctgcagactg

SEQ ID NO: 1103204 - DNA, 15 bp, Homo sapiens
ggtgccctgcagact

SEQ ID NO: 1103205 - DNA, 15 bp, Homo sapiens
aggtgccctgcagac

SEQ ID NO: 1103206 - DNA, 15 bp, Homo sapiens
gaggtgccctgcaga

SEQ ID NO: 1103207 - DNA, 15 bp, Homo sapiens
ggaggtgccctgcag

SEQ ID NO: 1103208 - DNA, 15 bp, Homo sapiens
gggaggtgccctgca

SEQ ID NO: 1103209 - DNA, 15 bp, Homo sapiens
agggaggtgccctgc

SEQ ID NO: 1103210 - DNA, 15 bp, Homo sapiens
gagggaggtgccctg

SEQ ID NO: 1103211 - DNA, 15 bp, Homo sapiens
ggagggaggtgccct

SEQ ID NO: 1103212 - DNA, 15 bp, Homo sapiens
aggagggaggtgccc

SEQ ID NO: 1103213 - DNA, 15 bp, Homo sapiens
caggagggaggtgcc

SEQ ID NO: 1103214 - DNA, 15 bp, Homo sapiens
agcaggagggaggtg

SEQ ID NO: 1103215 - DNA, 15 bp, Homo sapiens
aagcaggagggaggt

SEQ ID NO: 1103216 - DNA, 15 bp, Homo sapiens
gaagcaggagggagg

SEQ ID NO: 1103217 - DNA, 15 bp, Homo sapiens
ggaagcaggagggag

SEQ ID NO: 1103218 - DNA, 15 bp, Homo sapiens
aggaagcaggaggga

SEQ ID NO: 1103219 - DNA, 15 bp, Homo sapiens
gaggaagcaggaggg

SEQ ID NO: 1103220 - DNA, 15 bp, Homo sapiens
ggaggaagcaggagg

SEQ ID NO: 1103221 - DNA, 15 bp, Homo sapiens
gggaggaagcaggag

SEQ ID NO: 1103222 - DNA, 15 bp, Homo sapiens
agggaggaagcagga

SEQ ID NO: 1103223 - DNA, 15 bp, Homo sapiens
gagggaggaagcagg

SEQ ID NO: 1103224 - DNA, 15 bp, Homo sapiens
agagggaggaagcag

SEQ ID NO: 1103225 - DNA, 15 bp, Homo sapiens
aagagggaggaagca

SEQ ID NO: 1103226 - DNA, 15 bp, Homo sapiens
caagagggaggaagc

SEQ ID NO: 1103227 - DNA, 15 bp, Homo sapiens
tcaagagggaggaag

SEQ ID NO: 1103228 - DNA, 15 bp, Homo sapiens
atcaagagggaggaa

SEQ ID NO: 1103229 - DNA, 15 bp, Homo sapiens
catcaagagggagga

SEQ ID NO: 1103230 - DNA, 15 bp, Homo sapiens
acatcaagagggagg

SEQ ID NO: 1103231 - DNA, 15 bp, Homo sapiens
cacatcaagagggag

SEQ ID NO: 1103232 - DNA, 15 bp, Homo sapiens
tcacatcaagaggga

SEQ ID NO: 1103233 - DNA, 15 bp, Homo sapiens
gtcacatcaagaggg

SEQ ID NO: 1103234 - DNA, 15 bp, Homo sapiens
agtcacatcaagagg

SEQ ID NO: 1103235 - DNA, 15 bp, Homo sapiens
gagtcacatcaagag

SEQ ID NO: 1103236 - DNA, 15 bp, Homo sapiens
agagtcacatcaaga

SEQ ID NO: 1103237 - DNA, 15 bp, Homo sapiens
aagagtcacatcaag

SEQ ID NO: 1103238 - DNA, 15 bp, Homo sapiens
caagagtcacatcaa

SEQ ID NO: 1103239 - DNA, 15 bp, Homo sapiens
acaagagtcacatca

SEQ ID NO: 1103240 - DNA, 15 bp, Homo sapiens
aacaagagtcacatc

SEQ ID NO: 1103241 - DNA, 15 bp, Homo sapiens
aaacaagagtcacat

SEQ ID NO: 1103242 - DNA, 15 bp, Homo sapiens
gaaacaagagtcaca

SEQ ID NO: 1103243 - DNA, 15 bp, Homo sapiens
ggaaacaagagtcac

SEQ ID NO: 1103244 - DNA, 15 bp, Homo sapiens
tggaaacaagagtca

SEQ ID NO: 1103245 - DNA, 15 bp, Homo sapiens
ctggaaacaagagtc

SEQ ID NO: 1103246 - DNA, 15 bp, Homo sapiens
cctggaaacaagagt

SEQ ID NO: 1103247 - DNA, 15 bp, Homo sapiens
ccctggaaacaagag

SEQ ID NO: 1103248 - DNA, 15 bp, Homo sapiens
cccctggaaacaaga

SEQ ID NO: 1103249 - DNA, 15 bp, Homo sapiens
gcccctggaaacaag

SEQ ID NO: 1103250 - DNA, 15 bp, Homo sapiens
agcccctggaaacaa

SEQ ID NO: 1103251 - DNA, 15 bp, Homo sapiens
cagcccctggaaaca

SEQ ID NO: 1103252 - DNA, 15 bp, Homo sapiens
tcagcccctggaaac

SEQ ID NO: 1103253 - DNA, 15 bp, Homo sapiens
atcagcccctggaaa

SEQ ID NO: 1103254 - DNA, 15 bp, Homo sapiens
catcagcccctggaa

SEQ ID NO: 1103255 - DNA, 15 bp, Homo sapiens
ccatcagcccctgga

SEQ ID NO: 1103256 - DNA, 15 bp, Homo sapiens
accatcagcccctgg

SEQ ID NO: 1103257 - DNA, 15 bp, Homo sapiens
caccatcagcccctg

SEQ ID NO: 1103258 - DNA, 15 bp, Homo sapiens
ccaccatcagcccct

SEQ ID NO: 1103259 - DNA, 15 bp, Homo sapiens
gccaccatcagcccc

SEQ ID NO: 1103260 - DNA, 15 bp, Homo sapiens
ggccaccatcagccc

SEQ ID NO: 1103261 - DNA, 15 bp, Homo sapiens
tggccaccatcagcc

SEQ ID NO: 1103262 - DNA, 15 bp, Homo sapiens
atggccaccatcagc

SEQ ID NO: 1103263 - DNA, 15 bp, Homo sapiens
tatggccaccatcag

SEQ ID NO: 1103264 - DNA, 15 bp, Homo sapiens
atatggccaccatca

SEQ ID NO: 1103265 - DNA, 15 bp, Homo sapiens
aatatggccaccatc

SEQ ID NO: 1103266 - DNA, 15 bp, Homo sapiens
taatatggccaccat

SEQ ID NO: 1103267 - DNA, 15 bp, Homo sapiens
ataatatggccacca

SEQ ID NO: 1103268 - DNA, 15 bp, Homo sapiens
tataatatggccacc

SEQ ID NO: 1103269 - DNA, 15 bp, Homo sapiens
gtataatatggccac

SEQ ID NO: 1103270 - DNA, 15 bp, Homo sapiens
agtataatatggcca

SEQ ID NO: 1103271 - DNA, 15 bp, Homo sapiens
cagtataatatggcc

SEQ ID NO: 1103272 - DNA, 15 bp, Homo sapiens
gcagtataatatggc

SEQ ID NO: 1103273 - DNA, 15 bp, Homo sapiens
agcagtataatatgg

SEQ ID NO: 1103274 - DNA, 15 bp, Homo sapiens
aagcagtataatatg

SEQ ID NO: 1103275 - DNA, 15 bp, Homo sapiens
aaagcagtataatat

SEQ ID NO: 1103276 - DNA, 15 bp, Homo sapiens
caaagcagtataata

SEQ ID NO: 1103277 - DNA, 15 bp, Homo sapiens
acaaagcagtataat

SEQ ID NO: 1103278 - DNA, 15 bp, Homo sapiens
gacaaagcagtataa

SEQ ID NO: 1103279 - DNA, 15 bp, Homo sapiens
tgacaaagcagtata

SEQ ID NO: 1103280 - DNA, 15 bp, Homo sapiens
ttgacaaagcagtat

SEQ ID NO: 1103281 - DNA, 15 bp, Homo sapiens
gttgacaaagcagta

SEQ ID NO: 1103282 - DNA, 15 bp, Homo sapiens
tgttgacaaagcagt

SEQ ID NO: 1103283 - DNA, 15 bp, Homo sapiens
ttgttgacaaagcag

SEQ ID NO: 1103284 - DNA, 15 bp, Homo sapiens
attgttgacaaagca

SEQ ID NO: 1103285 - DNA, 15 bp, Homo sapiens
cattgttgacaaagc

SEQ ID NO: 1103286 - DNA, 15 bp, Homo sapiens
tcattgttgacaaag

SEQ ID NO: 1103287 - DNA, 15 bp, Homo sapiens
ctcattgttgacaaa

SEQ ID NO: 1103288 - DNA, 15 bp, Homo sapiens
cctcattgttgacaa

SEQ ID NO: 1103289 - DNA, 15 bp, Homo sapiens
acctcattgttgaca

SEQ ID NO: 1103290 - DNA, 15 bp, Homo sapiens
tacctcattgttgac

SEQ ID NO: 1103291 - DNA, 15 bp, Homo sapiens
ttacctcattgttga

SEQ ID NO: 1103292 - DNA, 15 bp, Homo sapiens
cttacctcattgttg

SEQ ID NO: 1103293 - DNA, 15 bp, Homo sapiens
gcttacctcattgtt

SEQ ID NO: 1103294 - DNA, 15 bp, Homo sapiens
agcttacctcattgt

SEQ ID NO: 1103295 - DNA, 15 bp, Homo sapiens
gagcttacctcattg

SEQ ID NO: 1103296 - DNA, 15 bp, Homo sapiens
agagcttacctcatt

SEQ ID NO: 1103297 - DNA, 15 bp, Homo sapiens
cagagcttacctcat

SEQ ID NO: 1103298 - DNA, 15 bp, Homo sapiens
tcagagcttacctca

SEQ ID NO: 1103299 - DNA, 15 bp, Homo sapiens
ctcagagcttacctc

SEQ ID NO: 1103300 - DNA, 15 bp, Homo sapiens
cctcagagcttacct

SEQ ID NO: 1103301 - DNA, 15 bp, Homo sapiens
tcctcagagcttacc

SEQ ID NO: 1103302 - DNA, 15 bp, Homo sapiens
ctcctcagagcttac

SEQ ID NO: 1103303 - DNA, 15 bp, Homo sapiens
cctcctcagagctta

SEQ ID NO: 1103304 - DNA, 15 bp, Homo sapiens
ccctcctcagagctt

SEQ ID NO: 1103305 - DNA, 15 bp, Homo sapiens
tccctcctcagagct

SEQ ID NO: 1103306 - DNA, 15 bp, Homo sapiens
gtccctcctcagagc

SEQ ID NO: 1103307 - DNA, 15 bp, Homo sapiens
cgtccctcctcagag

SEQ ID NO: 1103308 - DNA, 15 bp, Homo sapiens
ccgtccctcctcaga

SEQ ID NO: 1103309 - DNA, 15 bp, Homo sapiens
accgtccctcctcag

SEQ ID NO: 1103310 - DNA, 15 bp, Homo sapiens
caccgtccctcctca

SEQ ID NO: 1103311 - DNA, 15 bp, Homo sapiens
ccaccgtccctcctc

SEQ ID NO: 1103312 - DNA, 15 bp, Homo sapiens
cccaccgtccctcct

SEQ ID NO: 1103313 - DNA, 15 bp, Homo sapiens
ccccaccgtccctcc

SEQ ID NO: 1103314 - DNA, 15 bp, Homo sapiens
tccccaccgtccctc

SEQ ID NO: 1103315 - DNA, 15 bp, Homo sapiens
gtccccaccgtccct

SEQ ID NO: 1103316 - DNA, 15 bp, Homo sapiens
ggtccccaccgtccc

SEQ ID NO: 1103317 - DNA, 15 bp, Homo sapiens
gggtccccaccgtcc

SEQ ID NO: 1103318 - DNA, 15 bp, Homo sapiens
agggtccccaccgtc

SEQ ID NO: 1103319 - DNA, 15 bp, Homo sapiens
cagggtccccaccgt

SEQ ID NO: 1103320 - DNA, 15 bp, Homo sapiens
ccagggtccccaccg

SEQ ID NO: 1103321 - DNA, 15 bp, Homo sapiens
accagggtccccacc

SEQ ID NO: 1103322 - DNA, 15 bp, Homo sapiens
caccagggtccccac

SEQ ID NO: 1103323 - DNA, 15 bp, Homo sapiens
ccaccagggtcccca

SEQ ID NO: 1103324 - DNA, 15 bp, Homo sapiens
cccaccagggtcccc

SEQ ID NO: 1103325 - DNA, 15 bp, Homo sapiens
acccaccagggtccc

SEQ ID NO: 1103326 - DNA, 15 bp, Homo sapiens
cacccaccagggtcc

SEQ ID NO: 1103327 - DNA, 15 bp, Homo sapiens
ccacccaccagggtc

SEQ ID NO: 1103328 - DNA, 15 bp, Homo sapiens
cccacccaccagggt

SEQ ID NO: 1103329 - DNA, 15 bp, Homo sapiens
acccacccaccaggg

SEQ ID NO: 1103330 - DNA, 15 bp, Homo sapiens
tacccacccaccagg

SEQ ID NO: 1103331 - DNA, 15 bp, Homo sapiens
gtacccacccaccag

SEQ ID NO: 1103332 - DNA, 15 bp, Homo sapiens
ggtacccacccacca

SEQ ID NO: 1103333 - DNA, 15 bp, Homo sapiens
tggtacccacccacc

SEQ ID NO: 1103334 - DNA, 15 bp, Homo sapiens
atggtacccacccac

SEQ ID NO: 1103335 - DNA, 15 bp, Homo sapiens
gatggtacccaccca

SEQ ID NO: 1103336 - DNA, 15 bp, Homo sapiens
tgatggtacccaccc

SEQ ID NO: 1103337 - DNA, 15 bp, Homo sapiens
ctgatggtacccacc

SEQ ID NO: 1103338 - DNA, 15 bp, Homo sapiens
gctgatggtacccac

SEQ ID NO: 1103339 - DNA, 15 bp, Homo sapiens
ggctgatggtaccca

SEQ ID NO: 1103340 - DNA, 15 bp, Homo sapiens
gggctgatggtaccc

SEQ ID NO: 1103341 - DNA, 15 bp, Homo sapiens
cgggctgatggtacc

SEQ ID NO: 1103342 - DNA, 15 bp, Homo sapiens
acgggctgatggtac

SEQ ID NO: 1103343 - DNA, 15 bp, Homo sapiens
gacgggctgatggta

SEQ ID NO: 1103344 - DNA, 15 bp, Homo sapiens
agacgggctgatggt

SEQ ID NO: 1103345 - DNA, 15 bp, Homo sapiens
cagacgggctgatgg

SEQ ID NO: 1103346 - DNA, 15 bp, Homo sapiens
ccagacgggctgatg

SEQ ID NO: 1103347 - DNA, 15 bp, Homo sapiens
tccagacgggctgat

SEQ ID NO: 1103348 - DNA, 15 bp, Homo sapiens
ctccagacgggctga

SEQ ID NO: 1103349 - DNA, 15 bp, Homo sapiens
actccagacgggctg

SEQ ID NO: 1103350 - DNA, 15 bp, Homo sapiens
tactccagacgggct

SEQ ID NO: 1103351 - DNA, 15 bp, Homo sapiens
ctactccagacgggc

SEQ ID NO: 1103352 - DNA, 15 bp, Homo sapiens
actactccagacggg

SEQ ID NO: 1103353 - DNA, 15 bp, Homo sapiens
tactactccagacgg

SEQ ID NO: 1103354 - DNA, 15 bp, Homo sapiens
gtactactccagacg

SEQ ID NO: 1103355 - DNA, 15 bp, Homo sapiens
tgtactactccagac

SEQ ID NO: 1103356 - DNA, 15 bp, Homo sapiens
ttgtactactccaga

SEQ ID NO: 1103357 - DNA, 15 bp, Homo sapiens
attgtactactccag

SEQ ID NO: 1103358 - DNA, 15 bp, Homo sapiens
cattgtactactcca

SEQ ID NO: 1103359 - DNA, 15 bp, Homo sapiens
ccattgtactactcc

SEQ ID NO: 1103360 - DNA, 15 bp, Homo sapiens
cccattgtactactc

SEQ ID NO: 1103361 - DNA, 15 bp, Homo sapiens
ccccattgtactact

SEQ ID NO: 1103362 - DNA, 15 bp, Homo sapiens
tccccattgtactac

SEQ ID NO: 1103363 - DNA, 15 bp, Homo sapiens
gtccccattgtacta

SEQ ID NO: 1103364 - DNA, 15 bp, Homo sapiens
agtccccattgtact

SEQ ID NO: 1103365 - DNA, 15 bp, Homo sapiens
gagtccccattgtac

SEQ ID NO: 1103366 - DNA, 15 bp, Homo sapiens
ggagtccccattgta

SEQ ID NO: 1103367 - DNA, 15 bp, Homo sapiens
gggagtccccattgt

SEQ ID NO: 1103368 - DNA, 15 bp, Homo sapiens
tgggagtccccattg

SEQ ID NO: 1103369 - DNA, 15 bp, Homo sapiens
atgggagtccccatt

SEQ ID NO: 1103370 - DNA, 15 bp, Homo sapiens
gatgggagtccccat

SEQ ID NO: 1103371 - DNA, 15 bp, Homo sapiens
tgatgggagtcccca

SEQ ID NO: 1103372 - DNA, 15 bp, Homo sapiens
ttgatgggagtcccc

SEQ ID NO: 1103373 - DNA, 15 bp, Homo sapiens
attgatgggagtccc

SEQ ID NO: 1103374 - DNA, 15 bp, Homo sapiens
gattgatgggagtcc

SEQ ID NO: 1103375 - DNA, 15 bp, Homo sapiens
agattgatgggagtc

SEQ ID NO: 1103376 - DNA, 15 bp, Homo sapiens
aagattgatgggagt

SEQ ID NO: 1103377 - DNA, 15 bp, Homo sapiens
caagattgatgggag

SEQ ID NO: 1103378 - DNA, 15 bp, Homo sapiens
gcaagattgatggga

SEQ ID NO: 1103379 - DNA, 15 bp, Homo sapiens
ggcaagattgatggg

SEQ ID NO: 1103380 - DNA, 15 bp, Homo sapiens
tggcaagattgatgg

SEQ ID NO: 1103381 - DNA, 15 bp, Homo sapiens
ctggcaagattgatg

SEQ ID NO: 1103382 - DNA, 15 bp, Homo sapiens
gctggcaagattgat

SEQ ID NO: 1103383 - DNA, 15 bp, Homo sapiens
agctggcaagattga

SEQ ID NO: 1103384 - DNA, 15 bp, Homo sapiens
cagctggcaagattg

SEQ ID NO: 1103385 - DNA, 15 bp, Homo sapiens
tcagctggcaagatt

SEQ ID NO: 1103386 - DNA, 15 bp, Homo sapiens
ttcagctggcaagat

SEQ ID NO: 1103387 - DNA, 15 bp, Homo sapiens
tttcagctggcaaga

SEQ ID NO: 1103388 - DNA, 15 bp, Homo sapiens
gtttcagctggcaag

SEQ ID NO: 1103389 - DNA, 15 bp, Homo sapiens
ggtttcagctggcaa

SEQ ID NO: 1103390 - DNA, 15 bp, Homo sapiens
gggtttcagctggca

SEQ ID NO: 1103391 - DNA, 15 bp, Homo sapiens
ggggtttcagctggc

SEQ ID NO: 1103392 - DNA, 15 bp, Homo sapiens
gggggtttcagctgg

SEQ ID NO: 1103393 - DNA, 15 bp, Homo sapiens
agggggtttcagctg

SEQ ID NO: 1103394 - DNA, 15 bp, Homo sapiens
tagggggtttcagct

SEQ ID NO: 1103395 - DNA, 15 bp, Homo sapiens
gtagggggtttcagc

SEQ ID NO: 1103396 - DNA, 15 bp, Homo sapiens
agtagggggtttcag

SEQ ID NO: 1103397 - DNA, 15 bp, Homo sapiens
gagtagggggtttca

SEQ ID NO: 1103398 - DNA, 15 bp, Homo sapiens
tgagtagggggtttc

SEQ ID NO: 1103399 - DNA, 15 bp, Homo sapiens
gtgagtagggggttt

SEQ ID NO: 1103400 - DNA, 15 bp, Homo sapiens
ggtgagtagggggtt

SEQ ID NO: 1103401 - DNA, 15 bp, Homo sapiens
aggtgagtagggggt

SEQ ID NO: 1103402 - DNA, 15 bp, Homo sapiens
gaggtgagtaggggg

SEQ ID NO: 1103403 - DNA, 15 bp, Homo sapiens
tgaggtgagtagggg

SEQ ID NO: 1103404 - DNA, 15 bp, Homo sapiens
gtgaggtgagtaggg

SEQ ID NO: 1103405 - DNA, 15 bp, Homo sapiens
agtgaggtgagtagg

SEQ ID NO: 1103406 - DNA, 15 bp, Homo sapiens
cagtgaggtgagtag

SEQ ID NO: 1103407 - DNA, 15 bp, Homo sapiens
tcagtgaggtgagta

SEQ ID NO: 1103408 - DNA, 15 bp, Homo sapiens
ctcagtgaggtgagt

SEQ ID NO: 1103409 - DNA, 15 bp, Homo sapiens
cctcagtgaggtgag

SEQ ID NO: 1103410 - DNA, 15 bp, Homo sapiens
gcctcagtgaggtga

SEQ ID NO: 1103411 - DNA, 15 bp, Homo sapiens
tgcctcagtgaggtg

SEQ ID NO: 1103412 - DNA, 15 bp, Homo sapiens
gtgcctcagtgaggt

SEQ ID NO: 1103413 - DNA, 15 bp, Homo sapiens
agtgcctcagtgagg

SEQ ID NO: 1103414 - DNA, 15 bp, Homo sapiens
tagtgcctcagtgag

SEQ ID NO: 1103415 - DNA, 15 bp, Homo sapiens
ctagtgcctcagtga

SEQ ID NO: 1103416 - DNA, 15 bp, Homo sapiens
cctagtgcctcagtg

SEQ ID NO: 1103417 - DNA, 15 bp, Homo sapiens
ccctagtgcctcagt

SEQ ID NO: 1103418 - DNA, 15 bp, Homo sapiens
accctagtgcctcag

SEQ ID NO: 1103419 - DNA, 15 bp, Homo sapiens
aaccctagtgcctca

SEQ ID NO: 1103420 - DNA, 15 bp, Homo sapiens
caaccctagtgcctc

SEQ ID NO: 1103421 - DNA, 15 bp, Homo sapiens
tcaaccctagtgcct

SEQ ID NO: 1103422 - DNA, 15 bp, Homo sapiens
ctcaaccctagtgcc

SEQ ID NO: 1103423 - DNA, 15 bp, Homo sapiens
tctcaaccctagtgc

SEQ ID NO: 1103424 - DNA, 15 bp, Homo sapiens
ttctcaaccctagtg

SEQ ID NO: 1103425 - DNA, 15 bp, Homo sapiens
cttctcaaccctagt

SEQ ID NO: 1103426 - DNA, 15 bp, Homo sapiens
gcttctcaaccctag

SEQ ID NO: 1103427 - DNA, 15 bp, Homo sapiens
ggcttctcaacccta

SEQ ID NO: 1103428 - DNA, 15 bp, Homo sapiens
tggcttctcaaccct

SEQ ID NO: 1103429 - DNA, 15 bp, Homo sapiens
atggcttctcaaccc

SEQ ID NO: 1103430 - DNA, 15 bp, Homo sapiens
gatggcttctcaacc

SEQ ID NO: 1103431 - DNA, 15 bp, Homo sapiens
agatggcttctcaac

SEQ ID NO: 1103432 - DNA, 15 bp, Homo sapiens
aagatggcttctcaa

SEQ ID NO: 1103433 - DNA, 15 bp, Homo sapiens
caagatggcttctca

SEQ ID NO: 1103434 - DNA, 15 bp, Homo sapiens
acaagatggcttctc

SEQ ID NO: 1103435 - DNA, 15 bp, Homo sapiens
gacaagatggcttct

SEQ ID NO: 1103436 - DNA, 15 bp, Homo sapiens
ggacaagatggcttc

SEQ ID NO: 1103437 - DNA, 15 bp, Homo sapiens
tggacaagatggctt

SEQ ID NO: 1103438 - DNA, 15 bp, Homo sapiens
gtggacaagatggct

SEQ ID NO: 1103439 - DNA, 15 bp, Homo sapiens
tgtggacaagatggc

SEQ ID NO: 1103440 - DNA, 15 bp, Homo sapiens
ctgtggacaagatgg

SEQ ID NO: 1103441 - DNA, 15 bp, Homo sapiens
tctgtggacaagatg

SEQ ID NO: 1103442 - DNA, 15 bp, Homo sapiens
atctgtggacaagat

SEQ ID NO: 1103443 - DNA, 15 bp, Homo sapiens
aatctgtggacaaga

SEQ ID NO: 1103444 - DNA, 15 bp, Homo sapiens
aaatctgtggacaag

SEQ ID NO: 1103445 - DNA, 15 bp, Homo sapiens
caaatctgtggacaa

SEQ ID NO: 1103446 - DNA, 15 bp, Homo sapiens
ccaaatctgtggaca

SEQ ID NO: 1103447 - DNA, 15 bp, Homo sapiens
accaaatctgtggac

SEQ ID NO: 1103448 - DNA, 15 bp, Homo sapiens
aaccaaatctgtgga

SEQ ID NO: 1103449 - DNA, 15 bp, Homo sapiens
aaaccaaatctgtgg

SEQ ID NO: 1103450 - DNA, 15 bp, Homo sapiens
aaaaccaaatctgtg

SEQ ID NO: 1103451 - DNA, 15 bp, Homo sapiens
gaaaaccaaatctgt

SEQ ID NO: 1103452 - DNA, 15 bp, Homo sapiens
agaaaaccaaatctg

SEQ ID NO: 1103453 - DNA, 15 bp, Homo sapiens
cagaaaaccaaatct

SEQ ID NO: 1103454 - DNA, 15 bp, Homo sapiens
acagaaaaccaaatc

SEQ ID NO: 1103455 - DNA, 15 bp, Homo sapiens
cacagaaaaccaaat

SEQ ID NO: 1103456 - DNA, 15 bp, Homo sapiens
gcacagaaaaccaaa

SEQ ID NO: 1103457 - DNA, 15 bp, Homo sapiens
tgcacagaaaaccaa

SEQ ID NO: 1103458 - DNA, 15 bp, Homo sapiens
atgcacagaaaacca

SEQ ID NO: 1103459 - DNA, 15 bp, Homo sapiens
catgcacagaaaacc

SEQ ID NO: 1103460 - DNA, 15 bp, Homo sapiens
ccatgcacagaaaac

SEQ ID NO: 1103461 - DNA, 15 bp, Homo sapiens
accatgcacagaaaa

SEQ ID NO: 1103462 - DNA, 15 bp, Homo sapiens
gaccatgcacagaaa

SEQ ID NO: 1103463 - DNA, 15 bp, Homo sapiens
agaccatgcacagaa

SEQ ID NO: 1103464 - DNA, 15 bp, Homo sapiens
gagaccatgcacaga

SEQ ID NO: 1103465 - DNA, 15 bp, Homo sapiens
agagaccatgcacag

SEQ ID NO: 1103466 - DNA, 15 bp, Homo sapiens
gagagaccatgcaca

SEQ ID NO: 1103467 - DNA, 15 bp, Homo sapiens
agagagaccatgcac

SEQ ID NO: 1103468 - DNA, 15 bp, Homo sapiens
gagagagaccatgca

SEQ ID NO: 1103469 - DNA, 15 bp, Homo sapiens
tgagagagaccatgc

SEQ ID NO: 1103470 - DNA, 15 bp, Homo sapiens
gtgagagagaccatg

SEQ ID NO: 1103471 - DNA, 15 bp, Homo sapiens
tgtgagagagaccat

SEQ ID NO: 1103472 - DNA, 15 bp, Homo sapiens
gtgtgagagagacca

SEQ ID NO: 1103473 - DNA, 15 bp, Homo sapiens
tgtgtgagagagacc

SEQ ID NO: 1103474 - DNA, 15 bp, Homo sapiens
atgtgtgagagagac

SEQ ID NO: 1103475 - DNA, 15 bp, Homo sapiens
catgtgtgagagaga

SEQ ID NO: 1103476 - DNA, 15 bp, Homo sapiens
tcatgtgtgagagag

SEQ ID NO: 1103477 - DNA, 15 bp, Homo sapiens
ttcatgtgtgagaga

SEQ ID NO: 1103478 - DNA, 15 bp, Homo sapiens
gttcatgtgtgagag

SEQ ID NO: 1103479 - DNA, 15 bp, Homo sapiens
tgttcatgtgtgaga

SEQ ID NO: 1103480 - DNA, 15 bp, Homo sapiens
gtgttcatgtgtgag

SEQ ID NO: 1103481 - DNA, 15 bp, Homo sapiens
tgtgttcatgtgtga

SEQ ID NO: 1103482 - DNA, 15 bp, Homo sapiens
gtgtgttcatgtgtg

SEQ ID NO: 1103483 - DNA, 15 bp, Homo sapiens
tgtgtgttcatgtgt

SEQ ID NO: 1103484 - DNA, 15 bp, Homo sapiens
gtgtgtgttcatgtg

SEQ ID NO: 1103485 - DNA, 15 bp, Homo sapiens
tgtgtgtgttcatgt

SEQ ID NO: 1103486 - DNA, 15 bp, Homo sapiens
gtgtgtgtgttcatg

SEQ ID NO: 1103487 - DNA, 15 bp, Homo sapiens
tgtgtgtgtgttcat

SEQ ID NO: 1103488 - DNA, 15 bp, Homo sapiens
gtgtgtgtgtgttca

SEQ ID NO: 1103489 - DNA, 15 bp, Homo sapiens
tgtgtgtgtgtgttc

SEQ ID NO: 1103490 - DNA, 15 bp, Homo sapiens
ttgtgtgtgtgtgtt

SEQ ID NO: 1103491 - DNA, 15 bp, Homo sapiens
acttgtgtgtgtgtg

SEQ ID NO: 1103492 - DNA, 15 bp, Homo sapiens
tacttgtgtgtgtgt

SEQ ID NO: 1103493 - DNA, 15 bp, Homo sapiens
gtacttgtgtgtgtg

SEQ ID NO: 1103494 - DNA, 15 bp, Homo sapiens
tgtacttgtgtgtgt

SEQ ID NO: 1103495 - DNA, 15 bp, Homo sapiens
atgtacttgtgtgtg

SEQ ID NO: 1103496 - DNA, 15 bp, Homo sapiens
catgtacttgtgtgt

SEQ ID NO: 1103497 - DNA, 15 bp, Homo sapiens
acatgtacttgtgtg

SEQ ID NO: 1103498 - DNA, 15 bp, Homo sapiens
tacatgtacttgtgt

SEQ ID NO: 1103499 - DNA, 15 bp, Homo sapiens
gtacatgtacttgtg

SEQ ID NO: 1103500 - DNA, 15 bp, Homo sapiens
tgtacatgtacttgt

SEQ ID NO: 1103501 - DNA, 15 bp, Homo sapiens
ctgtacatgtacttg

SEQ ID NO: 1103502 - DNA, 15 bp, Homo sapiens
cctgtacatgtactt

SEQ ID NO: 1103503 - DNA, 15 bp, Homo sapiens
acctgtacatgtact

SEQ ID NO: 1103504 - DNA, 15 bp, Homo sapiens
tacctgtacatgtac

SEQ ID NO: 1103505 - DNA, 15 bp, Homo sapiens
atacctgtacatgta

SEQ ID NO: 1103506 - DNA, 15 bp, Homo sapiens
tatacctgtacatgt

SEQ ID NO: 1103507 - DNA, 15 bp, Homo sapiens
gtatacctgtacatg

SEQ ID NO: 1103508 - DNA, 15 bp, Homo sapiens
ggtatacctgtacat

SEQ ID NO: 1103509 - DNA, 15 bp, Homo sapiens
gggtatacctgtaca

SEQ ID NO: 1103510 - DNA, 15 bp, Homo sapiens
agggtatacctgtac

SEQ ID NO: 1103511 - DNA, 15 bp, Homo sapiens
tagggtatacctgta

SEQ ID NO: 1103512 - DNA, 15 bp, Homo sapiens
ttagggtatacctgt

SEQ ID NO: 1103513 - DNA, 15 bp, Homo sapiens
attagggtatacctg

SEQ ID NO: 1103514 - DNA, 15 bp, Homo sapiens
cattagggtatacct

SEQ ID NO: 1103515 - DNA, 15 bp, Homo sapiens
ccattagggtatacc

SEQ ID NO: 1103516 - DNA, 15 bp, Homo sapiens
gccattagggtatac

SEQ ID NO: 1103517 - DNA, 15 bp, Homo sapiens
tgccattagggtata

SEQ ID NO: 1103518 - DNA, 15 bp, Homo sapiens
atgccattagggtat

SEQ ID NO: 1103519 - DNA, 15 bp, Homo sapiens
catgccattagggta

SEQ ID NO: 1103520 - DNA, 15 bp, Homo sapiens
acatgccattagggt

SEQ ID NO: 1103521 - DNA, 15 bp, Homo sapiens
cacatgccattaggg

SEQ ID NO: 1103522 - DNA, 15 bp, Homo sapiens
tcacatgccattagg

SEQ ID NO: 1103523 - DNA, 15 bp, Homo sapiens
gtcacatgccattag

SEQ ID NO: 1103524 - DNA, 15 bp, Homo sapiens
ggtcacatgccatta

SEQ ID NO: 1103525 - DNA, 15 bp, Homo sapiens
gggtcacatgccatt

SEQ ID NO: 1103526 - DNA, 15 bp, Homo sapiens
agggtcacatgccat

SEQ ID NO: 1103527 - DNA, 15 bp, Homo sapiens
tagggtcacatgcca

SEQ ID NO: 1103528 - DNA, 15 bp, Homo sapiens
ttagggtcacatgcc

SEQ ID NO: 1103529 - DNA, 15 bp, Homo sapiens
cttagggtcacatgc

SEQ ID NO: 1103530 - DNA, 15 bp, Homo sapiens
ccttagggtcacatg

SEQ ID NO: 1103531 - DNA, 15 bp, Homo sapiens
tccttagggtcacat

SEQ ID NO: 1103532 - DNA, 15 bp, Homo sapiens
ttccttagggtcaca

SEQ ID NO: 1103533 - DNA, 15 bp, Homo sapiens
cttccttagggtcac

SEQ ID NO: 1103534 - DNA, 15 bp, Homo sapiens
tcttccttagggtca

SEQ ID NO: 1103535 - DNA, 15 bp, Homo sapiens
gtcttccttagggtc

SEQ ID NO: 1103536 - DNA, 15 bp, Homo sapiens
ggtcttccttagggt

SEQ ID NO: 1103537 - DNA, 15 bp, Homo sapiens
gggtcttccttaggg

SEQ ID NO: 1103538 - DNA, 15 bp, Homo sapiens
tgggtcttccttagg

SEQ ID NO: 1103539 - DNA, 15 bp, Homo sapiens
ctgggtcttccttag

SEQ ID NO: 1103540 - DNA, 15 bp, Homo sapiens
tctgggtcttcctta

SEQ ID NO: 1103541 - DNA, 15 bp, Homo sapiens
gtctgggtcttcctt

SEQ ID NO: 1103542 - DNA, 15 bp, Homo sapiens
agtctgggtcttcct

SEQ ID NO: 1103543 - DNA, 15 bp, Homo sapiens
gagtctgggtcttcc

SEQ ID NO: 1103544 - DNA, 15 bp, Homo sapiens
tgagtctgggtcttc

SEQ ID NO: 1103545 - DNA, 15 bp, Homo sapiens
atgagtctgggtctt

SEQ ID NO: 1103546 - DNA, 15 bp, Homo sapiens
catgagtctgggtct

SEQ ID NO: 1103547 - DNA, 15 bp, Homo sapiens
acatgagtctgggtc

SEQ ID NO: 1103548 - DNA, 15 bp, Homo sapiens
aacatgagtctgggt

SEQ ID NO: 1103549 - DNA, 15 bp, Homo sapiens
taacatgagtctggg

SEQ ID NO: 1103550 - DNA, 15 bp, Homo sapiens
ttaacatgagtctgg

SEQ ID NO: 1103551 - DNA, 15 bp, Homo sapiens
cttaacatgagtctg

SEQ ID NO: 1103552 - DNA, 15 bp, Homo sapiens
ccttaacatgagtct

SEQ ID NO: 1103553 - DNA, 15 bp, Homo sapiens
cccttaacatgagtc

SEQ ID NO: 1103554 - DNA, 15 bp, Homo sapiens
ccccttaacatgagt

SEQ ID NO: 1103555 - DNA, 15 bp, Homo sapiens
tccccttaacatgag

SEQ ID NO: 1103556 - DNA, 15 bp, Homo sapiens
atccccttaacatga

SEQ ID NO: 1103557 - DNA, 15 bp, Homo sapiens
gatccccttaacatg

SEQ ID NO: 1103558 - DNA, 15 bp, Homo sapiens
ggatccccttaacat

SEQ ID NO: 1103559 - DNA, 15 bp, Homo sapiens
aggatccccttaaca

SEQ ID NO: 1103560 - DNA, 15 bp, Homo sapiens
caggatccccttaac

SEQ ID NO: 1103561 - DNA, 15 bp, Homo sapiens
tcaggatccccttaa

SEQ ID NO: 1103562 - DNA, 15 bp, Homo sapiens
ttcaggatcccctta

SEQ ID NO: 1103563 - DNA, 15 bp, Homo sapiens
attcaggatcccctt

SEQ ID NO: 1103564 - DNA, 15 bp, Homo sapiens
cattcaggatcccct

SEQ ID NO: 1103565 - DNA, 15 bp, Homo sapiens
tcattcaggatcccc

SEQ ID NO: 1103566 - DNA, 15 bp, Homo sapiens
gtcattcaggatccc

SEQ ID NO: 1103567 - DNA, 15 bp, Homo sapiens
ggtcattcaggatcc

SEQ ID NO: 1103568 - DNA, 15 bp, Homo sapiens
gggtcattcaggatc

SEQ ID NO: 1103569 - DNA, 15 bp, Homo sapiens
agggtcattcaggat

SEQ ID NO: 1103570 - DNA, 15 bp, Homo sapiens
gagggtcattcagga

SEQ ID NO: 1103571 - DNA, 15 bp, Homo sapiens
agagggtcattcagg

SEQ ID NO: 1103572 - DNA, 15 bp, Homo sapiens
aagagggtcattcag

SEQ ID NO: 1103573 - DNA, 15 bp, Homo sapiens
aaagagggtcattca

SEQ ID NO: 1103574 - DNA, 15 bp, Homo sapiens
caaagagggtcattc

SEQ ID NO: 1103575 - DNA, 15 bp, Homo sapiens
gcaaagagggtcatt

SEQ ID NO: 1103576 - DNA, 15 bp, Homo sapiens
agcaaagagggtcat

SEQ ID NO: 1103577 - DNA, 15 bp, Homo sapiens
aagcaaagagggtca

SEQ ID NO: 1103578 - DNA, 15 bp, Homo sapiens
caagcaaagagggtc

SEQ ID NO: 1103579 - DNA, 15 bp, Homo sapiens
ccaagcaaagagggt

SEQ ID NO: 1103580 - DNA, 15 bp, Homo sapiens
accaagcaaagaggg

SEQ ID NO: 1103581 - DNA, 15 bp, Homo sapiens
caccaagcaaagagg

SEQ ID NO: 1103582 - DNA, 15 bp, Homo sapiens
ccaccaagcaaagag

SEQ ID NO: 1103583 - DNA, 15 bp, Homo sapiens
accaccaagcaaaga

SEQ ID NO: 1103584 - DNA, 15 bp, Homo sapiens
taccaccaagcaaag

SEQ ID NO: 1103585 - DNA, 15 bp, Homo sapiens
ctaccaccaagcaaa

SEQ ID NO: 1103586 - DNA, 15 bp, Homo sapiens
actaccaccaagcaa

SEQ ID NO: 1103587 - DNA, 15 bp, Homo sapiens
cactaccaccaagca

SEQ ID NO: 1103588 - DNA, 15 bp, Homo sapiens
tcactaccaccaagc

SEQ ID NO: 1103589 - DNA, 15 bp, Homo sapiens
gtcactaccaccaag

SEQ ID NO: 1103590 - DNA, 15 bp, Homo sapiens
agtcactaccaccaa

SEQ ID NO: 1103591 - DNA, 15 bp, Homo sapiens
cagtcactaccacca

SEQ ID NO: 1103592 - DNA, 15 bp, Homo sapiens
acagtcactaccacc

SEQ ID NO: 1103593 - DNA, 15 bp, Homo sapiens
gacagtcactaccac

SEQ ID NO: 1103594 - DNA, 15 bp, Homo sapiens
tgacagtcactacca

SEQ ID NO: 1103595 - DNA, 15 bp, Homo sapiens
gtgacagtcactacc

SEQ ID NO: 1103596 - DNA, 15 bp, Homo sapiens
agtgacagtcactac

SEQ ID NO: 1103597 - DNA, 15 bp, Homo sapiens
aagtgacagtcacta

SEQ ID NO: 1103598 - DNA, 15 bp, Homo sapiens
taagtgacagtcact

SEQ ID NO: 1103599 - DNA, 15 bp, Homo sapiens
gtaagtgacagtcac

SEQ ID NO: 1103600 - DNA, 15 bp, Homo sapiens
tgtaagtgacagtca

SEQ ID NO: 1103601 - DNA, 15 bp, Homo sapiens
ttgtaagtgacagtc

SEQ ID NO: 1103602 - DNA, 15 bp, Homo sapiens
tttgtaagtgacagt

SEQ ID NO: 1103603 - DNA, 15 bp, Homo sapiens
ctttgtaagtgacag

SEQ ID NO: 1103604 - DNA, 15 bp, Homo sapiens
actttgtaagtgaca

SEQ ID NO: 1103605 - DNA, 15 bp, Homo sapiens
cactttgtaagtgac

SEQ ID NO: 1103606 - DNA, 15 bp, Homo sapiens
tcactttgtaagtga

SEQ ID NO: 1103607 - DNA, 15 bp, Homo sapiens
atcactttgtaagtg

SEQ ID NO: 1103608 - DNA, 15 bp, Homo sapiens
aatcactttgtaagt

SEQ ID NO: 1103609 - DNA, 15 bp, Homo sapiens
gaatcactttgtaag

SEQ ID NO: 1103610 - DNA, 15 bp, Homo sapiens
tgaatcactttgtaa

SEQ ID NO: 1103611 - DNA, 15 bp, Homo sapiens
ttgaatcactttgta

SEQ ID NO: 1103612 - DNA, 15 bp, Homo sapiens
gttgaatcactttgt

SEQ ID NO: 1103613 - DNA, 15 bp, Homo sapiens
tgttgaatcactttg

SEQ ID NO: 1103614 - DNA, 15 bp, Homo sapiens
gtgttgaatcacttt

SEQ ID NO: 1103615 - DNA, 15 bp, Homo sapiens
tgtgttgaatcactt

SEQ ID NO: 1103616 - DNA, 15 bp, Homo sapiens
gtgtgttgaatcact

SEQ ID NO: 1103617 - DNA, 15 bp, Homo sapiens
tgtgtgttgaatcac

SEQ ID NO: 1103618 - DNA, 15 bp, Homo sapiens
gtgtgtgttgaatca

SEQ ID NO: 1103619 - DNA, 15 bp, Homo sapiens
tgtgtgtgttgaatc

SEQ ID NO: 1103620 - DNA, 15 bp, Homo sapiens
atgtgtgtgttgaat

SEQ ID NO: 1103621 - DNA, 15 bp, Homo sapiens
tatgtgtgtgttgaa

SEQ ID NO: 1103622 - DNA, 15 bp, Homo sapiens
gtatgtgtgtgttga

SEQ ID NO: 1103623 - DNA, 15 bp, Homo sapiens
ggtatgtgtgtgttg

SEQ ID NO: 1103624 - DNA, 15 bp, Homo sapiens
gggtatgtgtgtgtt

SEQ ID NO: 1103625 - DNA, 15 bp, Homo sapiens
tgggtatgtgtgtgt

SEQ ID NO: 1103626 - DNA, 15 bp, Homo sapiens
ttgggtatgtgtgtg

SEQ ID NO: 1103627 - DNA, 15 bp, Homo sapiens
cttgggtatgtgtgt

SEQ ID NO: 1103628 - DNA, 15 bp, Homo sapiens
gcttgggtatgtgtg

SEQ ID NO: 1103629 - DNA, 15 bp, Homo sapiens
ggcttgggtatgtgt

SEQ ID NO: 1103630 - DNA, 15 bp, Homo sapiens
tggcttgggtatgtg

SEQ ID NO: 1103631 - DNA, 15 bp, Homo sapiens
gtggcttgggtatgt

SEQ ID NO: 1103632 - DNA, 15 bp, Homo sapiens
tgtggcttgggtatg

SEQ ID NO: 1103633 - DNA, 15 bp, Homo sapiens
atgtggcttgggtat

SEQ ID NO: 1103634 - DNA, 15 bp, Homo sapiens
catgtggcttgggta

SEQ ID NO: 1103635 - DNA, 15 bp, Homo sapiens
gcatgtggcttgggt

SEQ ID NO: 1103636 - DNA, 15 bp, Homo sapiens
agcatgtggcttggg

SEQ ID NO: 1103637 - DNA, 15 bp, Homo sapiens
aagcatgtggcttgg

SEQ ID NO: 1103638 - DNA, 15 bp, Homo sapiens
caagcatgtggcttg

SEQ ID NO: 1103639 - DNA, 15 bp, Homo sapiens
ccaagcatgtggctt

SEQ ID NO: 1103640 - DNA, 15 bp, Homo sapiens
cccaagcatgtggct

SEQ ID NO: 1103641 - DNA, 15 bp, Homo sapiens
ccccaagcatgtggc

SEQ ID NO: 1103642 - DNA, 15 bp, Homo sapiens
gccccaagcatgtgg

SEQ ID NO: 1103643 - DNA, 15 bp, Homo sapiens
agccccaagcatgtg

SEQ ID NO: 1103644 - DNA, 15 bp, Homo sapiens
aagccccaagcatgt

SEQ ID NO: 1103645 - DNA, 15 bp, Homo sapiens
aaagccccaagcatg

SEQ ID NO: 1103646 - DNA, 15 bp, Homo sapiens
taaagccccaagcat

SEQ ID NO: 1103647 - DNA, 15 bp, Homo sapiens
ttaaagccccaagca

SEQ ID NO: 1103648 - DNA, 15 bp, Homo sapiens
attaaagccccaagc

SEQ ID NO: 1103649 - DNA, 15 bp, Homo sapiens
tattaaagccccaag

SEQ ID NO: 1103650 - DNA, 15 bp, Homo sapiens
ttattaaagccccaa

SEQ ID NO: 1103651 - DNA, 15 bp, Homo sapiens
attattaaagcccca

SEQ ID NO: 1103652 - DNA, 15 bp, Homo sapiens
gattattaaagcccc

SEQ ID NO: 1103653 - DNA, 15 bp, Homo sapiens
tgattattaaagccc

SEQ ID NO: 1103654 - DNA, 15 bp, Homo sapiens
gtgattattaaagcc

SEQ ID NO: 1103655 - DNA, 15 bp, Homo sapiens
agtgattattaaagc

SEQ ID NO: 1103656 - DNA, 15 bp, Homo sapiens
tagtgattattaaag

SEQ ID NO: 1103657 - DNA, 15 bp, Homo sapiens
atagtgattattaaa

SEQ ID NO: 1103658 - DNA, 15 bp, Homo sapiens
gatagtgattattaa

SEQ ID NO: 1103659 - DNA, 15 bp, Homo sapiens
agatagtgattatta

SEQ ID NO: 1103660 - DNA, 15 bp, Homo sapiens
gagatagtgattatt

SEQ ID NO: 1103661 - DNA, 15 bp, Homo sapiens
tgagatagtgattat

SEQ ID NO: 1103662 - DNA, 15 bp, Homo sapiens
atgagatagtgatta

SEQ ID NO: 1103663 - DNA, 15 bp, Homo sapiens
aatgagatagtgatt

SEQ ID NO: 1103664 - DNA, 15 bp, Homo sapiens
aaatgagatagtgat

SEQ ID NO: 1103665 - DNA, 15 bp, Homo sapiens
taaatgagatagtga

SEQ ID NO: 1103666 - DNA, 15 bp, Homo sapiens
ttaaatgagatagtg

SEQ ID NO: 1103667 - DNA, 15 bp, Homo sapiens
attaaatgagatagt

SEQ ID NO: 1103668 - DNA, 15 bp, Homo sapiens
aattaaatgagatag

SEQ ID NO: 1103669 - DNA, 15 bp, Homo sapiens
taattaaatgagata

SEQ ID NO: 1103670 - DNA, 15 bp, Homo sapiens
ataattaaatgagat

SEQ ID NO: 1103671 - DNA, 15 bp, Homo sapiens
cataattaaatgaga

SEQ ID NO: 1103672 - DNA, 15 bp, Homo sapiens
tcataattaaatgag

SEQ ID NO: 1103673 - DNA, 15 bp, Homo sapiens
gtcataattaaatga

SEQ ID NO: 1103674 - DNA, 15 bp, Homo sapiens
ggtcataattaaatg

SEQ ID NO: 1103675 - DNA, 15 bp, Homo sapiens
gggtcataattaaat

SEQ ID NO: 1103676 - DNA, 15 bp, Homo sapiens
ggggtcataattaaa

SEQ ID NO: 1103677 - DNA, 15 bp, Homo sapiens
gggggtcataattaa

SEQ ID NO: 1103678 - DNA, 15 bp, Homo sapiens
tgggggtcataatta

SEQ ID NO: 1103679 - DNA, 15 bp, Homo sapiens
gtgggggtcataatt

SEQ ID NO: 1103680 - DNA, 15 bp, Homo sapiens
tgtgggggtcataat

SEQ ID NO: 1103681 - DNA, 15 bp, Homo sapiens
atgtgggggtcataa

SEQ ID NO: 1103682 - DNA, 15 bp, Homo sapiens
gatgtgggggtcata

SEQ ID NO: 1103683 - DNA, 15 bp, Homo sapiens
ggatgtgggggtcat

SEQ ID NO: 1103684 - DNA, 15 bp, Homo sapiens
gggatgtgggggtca

SEQ ID NO: 1103685 - DNA, 15 bp, Homo sapiens
agggatgtgggggtc

SEQ ID NO: 1103686 - DNA, 15 bp, Homo sapiens
gagggatgtgggggt

SEQ ID NO: 1103687 - DNA, 15 bp, Homo sapiens
tgagggatgtggggg

SEQ ID NO: 1103688 - DNA, 15 bp, Homo sapiens
ttgagggatgtgggg

SEQ ID NO: 1103689 - DNA, 15 bp, Homo sapiens
tttgagggatgtggg

SEQ ID NO: 1103690 - DNA, 15 bp, Homo sapiens
ttttgagggatgtgg

SEQ ID NO: 1103691 - DNA, 15 bp, Homo sapiens
tttttgagggatgtg

SEQ ID NO: 1103692 - DNA, 15 bp, Homo sapiens
ttttttgagggatgt

SEQ ID NO: 1103693 - DNA, 15 bp, Homo sapiens
tttttttgagggatg

SEQ ID NO: 1103694 - DNA, 15 bp, Homo sapiens
ttttttttgagggat

SEQ ID NO: 1103695 - DNA, 15 bp, Homo sapiens
tttttttttgaggga

SEQ ID NO: 1103696 - DNA, 15 bp, Homo sapiens
gtttttttttgaggg

SEQ ID NO: 1103697 - DNA, 15 bp, Homo sapiens
ggtttttttttgagg

SEQ ID NO: 1103698 - DNA, 15 bp, Homo sapiens
agggtttttttttga

SEQ ID NO: 1103699 - DNA, 15 bp, Homo sapiens
cagggtttttttttg

SEQ ID NO: 1103700 - DNA, 15 bp, Homo sapiens
gcagggttttttttt

SEQ ID NO: 1103701 - DNA, 15 bp, Homo sapiens
agcagggtttttttt

SEQ ID NO: 1103702 - DNA, 15 bp, Homo sapiens
tagcagggttttttt

SEQ ID NO: 1103703 - DNA, 15 bp, Homo sapiens
ttagcagggtttttt

SEQ ID NO: 1103704 - DNA, 15 bp, Homo sapiens
tttagcagggttttt

SEQ ID NO: 1103705 - DNA, 15 bp, Homo sapiens
ttttagcagggtttt

SEQ ID NO: 1103706 - DNA, 15 bp, Homo sapiens
attttagcagggttt

SEQ ID NO: 1103707 - DNA, 15 bp, Homo sapiens
aattttagcagggtt

SEQ ID NO: 1103708 - DNA, 15 bp, Homo sapiens
gaattttagcagggt

SEQ ID NO: 1103709 - DNA, 15 bp, Homo sapiens
agaattttagcaggg

SEQ ID NO: 1103710 - DNA, 15 bp, Homo sapiens
aagaattttagcagg

SEQ ID NO: 1103711 - DNA, 15 bp, Homo sapiens
taagaattttagcag

SEQ ID NO: 1103712 - DNA, 15 bp, Homo sapiens
ataagaattttagca

SEQ ID NO: 1103713 - DNA, 15 bp, Homo sapiens
aataagaattttagc

SEQ ID NO: 1103714 - DNA, 15 bp, Homo sapiens
aaataagaattttag

SEQ ID NO: 1103715 - DNA, 15 bp, Homo sapiens
gaaataagaatttta

SEQ ID NO: 1103716 - DNA, 15 bp, Homo sapiens
tgaaataagaatttt

SEQ ID NO: 1103717 - DNA, 15 bp, Homo sapiens
atgaaataagaattt

SEQ ID NO: 1103718 - DNA, 15 bp, Homo sapiens
tatgaaataagaatt

SEQ ID NO: 1103719 - DNA, 15 bp, Homo sapiens
atatgaaataagaat

SEQ ID NO: 1103720 - DNA, 15 bp, Homo sapiens
aatatgaaataagaa

SEQ ID NO: 1103721 - DNA, 15 bp, Homo sapiens
gaatatgaaataaga

SEQ ID NO: 1103722 - DNA, 15 bp, Homo sapiens
ggaatatgaaataag

SEQ ID NO: 1103723 - DNA, 15 bp, Homo sapiens
gggaatatgaaataa

SEQ ID NO: 1103724 - DNA, 15 bp, Homo sapiens
tgggaatatgaaata

SEQ ID NO: 1103725 - DNA, 15 bp, Homo sapiens
atgggaatatgaaat

SEQ ID NO: 1103726 - DNA, 15 bp, Homo sapiens
aatgggaatatgaaa

SEQ ID NO: 1103727 - DNA, 15 bp, Homo sapiens
aaatgggaatatgaa

SEQ ID NO: 1103728 - DNA, 15 bp, Homo sapiens
aaaatgggaatatga

SEQ ID NO: 1103729 - DNA, 15 bp, Homo sapiens
aaaaatgggaatatg

SEQ ID NO: 1103730 - DNA, 15 bp, Homo sapiens
aaaaaatgggaatat

SEQ ID NO: 1103731 - DNA, 15 bp, Homo sapiens
taaaaaatgggaata

SEQ ID NO: 1103732 - DNA, 15 bp, Homo sapiens
ataaaaaatgggaat

SEQ ID NO: 1103733 - DNA, 15 bp, Homo sapiens
tataaaaaatgggaa

SEQ ID NO: 1103734 - DNA, 15 bp, Homo sapiens
atataaaaaatggga

SEQ ID NO: 1103735 - DNA, 15 bp, Homo sapiens
tatataaaaaatggg

SEQ ID NO: 1103736 - DNA, 15 bp, Homo sapiens
atatataaaaaatgg

SEQ ID NO: 1103737 - DNA, 15 bp, Homo sapiens
tatatataaaaaatg

SEQ ID NO: 1103738 - DNA, 15 bp, Homo sapiens
gtatatataaaaaat

SEQ ID NO: 1103739 - DNA, 15 bp, Homo sapiens
tgtatatataaaaaa

SEQ ID NO: 1103740 - DNA, 15 bp, Homo sapiens
atgtatatataaaaa

SEQ ID NO: 1103741 - DNA, 15 bp, Homo sapiens
catgtatatataaaa

SEQ ID NO: 1103742 - DNA, 15 bp, Homo sapiens
tcatgtatatataaa

SEQ ID NO: 1103743 - DNA, 15 bp, Homo sapiens
ttcatgtatatataa

SEQ ID NO: 1103744 - DNA, 15 bp, Homo sapiens
tttcatgtatatata

SEQ ID NO: 1103745 - DNA, 15 bp, Homo sapiens
ttttcatgtatatat

SEQ ID NO: 1103746 - DNA, 15 bp, Homo sapiens
gttttcatgtatata

SEQ ID NO: 1103747 - DNA, 15 bp, Homo sapiens
tgttttcatgtatat

SEQ ID NO: 1103748 - DNA, 15 bp, Homo sapiens
gtgttttcatgtata

SEQ ID NO: 1103749 - DNA, 15 bp, Homo sapiens
agtgttttcatgtat

SEQ ID NO: 1103750 - DNA, 15 bp, Homo sapiens
cagtgttttcatgta

SEQ ID NO: 1103751 - DNA, 15 bp, Homo sapiens
tcagtgttttcatgt

SEQ ID NO: 1103752 - DNA, 15 bp, Homo sapiens
ttcagtgttttcatg

SEQ ID NO: 1103753 - DNA, 15 bp, Homo sapiens
cttcagtgttttcat

SEQ ID NO: 1103754 - DNA, 15 bp, Homo sapiens
tcttcagtgttttca

SEQ ID NO: 1103755 - DNA, 15 bp, Homo sapiens
atcttcagtgttttc

SEQ ID NO: 1103756 - DNA, 15 bp, Homo sapiens
gatcttcagtgtttt

SEQ ID NO: 1103757 - DNA, 15 bp, Homo sapiens
tgatcttcagtgttt

SEQ ID NO: 1103758 - DNA, 15 bp, Homo sapiens
ctgatcttcagtgtt

SEQ ID NO: 1103759 - DNA, 15 bp, Homo sapiens
tctgatcttcagtgt

SEQ ID NO: 1103760 - DNA, 15 bp, Homo sapiens
ttctgatcttcagtg

SEQ ID NO: 1103761 - DNA, 15 bp, Homo sapiens
tttctgatcttcagt

SEQ ID NO: 1103762 - DNA, 15 bp, Homo sapiens
ctttctgatcttcag

SEQ ID NO: 1103763 - DNA, 15 bp, Homo sapiens
tctttctgatcttca

SEQ ID NO: 1103764 - DNA, 15 bp, Homo sapiens
ctctttctgatcttc

SEQ ID NO: 1103765 - DNA, 15 bp, Homo sapiens
actctttctgatctt

SEQ ID NO: 1103766 - DNA, 15 bp, Homo sapiens
gactctttctgatct

SEQ ID NO: 1103767 - DNA, 15 bp, Homo sapiens
tgactctttctgatc

SEQ ID NO: 1103768 - DNA, 15 bp, Homo sapiens
ctgactctttctgat

SEQ ID NO: 1103769 - DNA, 15 bp, Homo sapiens
cctgactctttctga

SEQ ID NO: 1103770 - DNA, 15 bp, Homo sapiens
tcctgactctttctg

SEQ ID NO: 1103771 - DNA, 15 bp, Homo sapiens
ttcctgactctttct

SEQ ID NO: 1103772 - DNA, 15 bp, Homo sapiens
gttcctgactctttc

SEQ ID NO: 1103773 - DNA, 15 bp, Homo sapiens
ggttcctgactcttt

SEQ ID NO: 1103774 - DNA, 15 bp, Homo sapiens
aggttcctgactctt

SEQ ID NO: 1103775 - DNA, 15 bp, Homo sapiens
caggttcctgactct

SEQ ID NO: 1103776 - DNA, 15 bp, Homo sapiens
gcaggttcctgactc

SEQ ID NO: 1103777 - DNA, 15 bp, Homo sapiens
ggcaggttcctgact

SEQ ID NO: 1103778 - DNA, 15 bp, Homo sapiens
gggcaggttcctgac

SEQ ID NO: 1103779 - DNA, 15 bp, Homo sapiens
agggcaggttcctga

SEQ ID NO: 1103780 - DNA, 15 bp, Homo sapiens
tagggcaggttcctg

SEQ ID NO: 1103781 - DNA, 15 bp, Homo sapiens
ctagggcaggttcct

SEQ ID NO: 1103782 - DNA, 15 bp, Homo sapiens
cctagggcaggttcc

SEQ ID NO: 1103783 - DNA, 15 bp, Homo sapiens
acctagggcaggttc

SEQ ID NO: 1103784 - DNA, 15 bp, Homo sapiens
aacctagggcaggtt

SEQ ID NO: 1103785 - DNA, 15 bp, Homo sapiens
aaacctagggcaggt

SEQ ID NO: 1103786 - DNA, 15 bp, Homo sapiens
caaacctagggcagg

SEQ ID NO: 1103787 - DNA, 15 bp, Homo sapiens
ccaaacctagggcag

SEQ ID NO: 1103788 - DNA, 15 bp, Homo sapiens
tccaaacctagggca

SEQ ID NO: 1103789 - DNA, 15 bp, Homo sapiens
ttccaaacctagggc

SEQ ID NO: 1103790 - DNA, 15 bp, Homo sapiens
tttccaaacctaggg

SEQ ID NO: 1103791 - DNA, 15 bp, Homo sapiens
atttccaaacctagg

SEQ ID NO: 1103792 - DNA, 15 bp, Homo sapiens
tatttccaaacctag

SEQ ID NO: 1103793 - DNA, 15 bp, Homo sapiens
ctatttccaaaccta

SEQ ID NO: 1103794 - DNA, 15 bp, Homo sapiens
actatttccaaacct

SEQ ID NO: 1103795 - DNA, 15 bp, Homo sapiens
cactatttccaaacc

SEQ ID NO: 1103796 - DNA, 15 bp, Homo sapiens
ccactatttccaaac

SEQ ID NO: 1103797 - DNA, 15 bp, Homo sapiens
gccactatttccaaa

SEQ ID NO: 1103798 - DNA, 15 bp, Homo sapiens
tgccactatttccaa

SEQ ID NO: 1103799 - DNA, 15 bp, Homo sapiens
gtgccactatttcca

SEQ ID NO: 1103800 - DNA, 15 bp, Homo sapiens
tgtgccactatttcc

SEQ ID NO: 1103801 - DNA, 15 bp, Homo sapiens
gtgtgccactatttc

SEQ ID NO: 1103802 - DNA, 15 bp, Homo sapiens
tgtgtgccactattt

SEQ ID NO: 1103803 - DNA, 15 bp, Homo sapiens
atgtgtgccactatt

SEQ ID NO: 1103804 - DNA, 15 bp, Homo sapiens
gatgtgtgccactat

SEQ ID NO: 1103805 - DNA, 15 bp, Homo sapiens
cgatgtgtgccacta

SEQ ID NO: 1103806 - DNA, 15 bp, Homo sapiens
gcgatgtgtgccact

SEQ ID NO: 1103807 - DNA, 15 bp, Homo sapiens
agcgatgtgtgccac

SEQ ID NO: 1103808 - DNA, 15 bp, Homo sapiens
aagcgatgtgtgcca

SEQ ID NO: 1103809 - DNA, 15 bp, Homo sapiens
gaagcgatgtgtgcc

SEQ ID NO: 1103810 - DNA, 15 bp, Homo sapiens
agaagcgatgtgtgc

SEQ ID NO: 1103811 - DNA, 15 bp, Homo sapiens
aagaagcgatgtgtg

SEQ ID NO: 1103812 - DNA, 15 bp, Homo sapiens
taagaagcgatgtgt

SEQ ID NO: 1103813 - DNA, 15 bp, Homo sapiens
ctaagaagcgatgtg

SEQ ID NO: 1103814 - DNA, 15 bp, Homo sapiens
gctaagaagcgatgt

SEQ ID NO: 1103815 - DNA, 15 bp, Homo sapiens
ggctaagaagcgatg

SEQ ID NO: 1103816 - DNA, 15 bp, Homo sapiens
aggctaagaagcgat

SEQ ID NO: 1103817 - DNA, 15 bp, Homo sapiens
aaggctaagaagcga

SEQ ID NO: 1103818 - DNA, 15 bp, Homo sapiens
aaaggctaagaagcg

SEQ ID NO: 1103819 - DNA, 15 bp, Homo sapiens
aaaaggctaagaagc

SEQ ID NO: 1103820 - DNA, 15 bp, Homo sapiens
caaaaggctaagaag

SEQ ID NO: 1103821 - DNA, 15 bp, Homo sapiens
ccaaaaggctaagaa

SEQ ID NO: 1103822 - DNA, 15 bp, Homo sapiens
gccaaaaggctaaga

SEQ ID NO: 1103823 - DNA, 15 bp, Homo sapiens
agccaaaaggctaag

SEQ ID NO: 1103824 - DNA, 15 bp, Homo sapiens
tagccaaaaggctaa

SEQ ID NO: 1103825 - DNA, 15 bp, Homo sapiens
ttagccaaaaggcta

SEQ ID NO: 1103826 - DNA, 15 bp, Homo sapiens
cttagccaaaaggct

SEQ ID NO: 1103827 - DNA, 15 bp, Homo sapiens
ccttagccaaaaggc

SEQ ID NO: 1103828 - DNA, 15 bp, Homo sapiens
accttagccaaaagg

SEQ ID NO: 1103829 - DNA, 15 bp, Homo sapiens
caccttagccaaaag

SEQ ID NO: 1103830 - DNA, 15 bp, Homo sapiens
tcaccttagccaaaa

SEQ ID NO: 1103831 - DNA, 15 bp, Homo sapiens
ttcaccttagccaaa

SEQ ID NO: 1103832 - DNA, 15 bp, Homo sapiens
cttcaccttagccaa

SEQ ID NO: 1103833 - DNA, 15 bp, Homo sapiens
acttcaccttagcca

SEQ ID NO: 1103834 - DNA, 15 bp, Homo sapiens
cacttcaccttagcc

SEQ ID NO: 1103835 - DNA, 15 bp, Homo sapiens
acacttcaccttagc

SEQ ID NO: 1103836 - DNA, 15 bp, Homo sapiens
cacacttcaccttag

SEQ ID NO: 1103837 - DNA, 15 bp, Homo sapiens
ccacacttcacctta

SEQ ID NO: 1103838 - DNA, 15 bp, Homo sapiens
tccacacttcacctt

SEQ ID NO: 1103839 - DNA, 15 bp, Homo sapiens
ttccacacttcacct

SEQ ID NO: 1103840 - DNA, 15 bp, Homo sapiens
tttccacacttcacc

SEQ ID NO: 1103841 - DNA, 15 bp, Homo sapiens
atttccacacttcac

SEQ ID NO: 1103842 - DNA, 15 bp, Homo sapiens
tatttccacacttca

SEQ ID NO: 1103843 - DNA, 15 bp, Homo sapiens
ctatttccacacttc

SEQ ID NO: 1103844 - DNA, 15 bp, Homo sapiens
actatttccacactt

SEQ ID NO: 1103845 - DNA, 15 bp, Homo sapiens
cactatttccacact

SEQ ID NO: 1103846 - DNA, 15 bp, Homo sapiens
ccactatttccacac

SEQ ID NO: 1103847 - DNA, 15 bp, Homo sapiens
gccactatttccaca

SEQ ID NO: 1103848 - DNA, 15 bp, Homo sapiens
tgccactatttccac

SEQ ID NO: 1103849 - DNA, 15 bp, Homo sapiens
atgccactatttcca

SEQ ID NO: 1103850 - DNA, 15 bp, Homo sapiens
catgccactatttcc

SEQ ID NO: 1103851 - DNA, 15 bp, Homo sapiens
ccatgccactatttc

SEQ ID NO: 1103852 - DNA, 15 bp, Homo sapiens
gccatgccactattt

SEQ ID NO: 1103853 - DNA, 15 bp, Homo sapiens
tgccatgccactatt

SEQ ID NO: 1103854 - DNA, 15 bp, Homo sapiens
ctgccatgccactat

SEQ ID NO: 1103855 - DNA, 15 bp, Homo sapiens
tctgccatgccacta

SEQ ID NO: 1103856 - DNA, 15 bp, Homo sapiens
ctctgccatgccact

SEQ ID NO: 1103857 - DNA, 15 bp, Homo sapiens
gctctgccatgccac

SEQ ID NO: 1103858 - DNA, 15 bp, Homo sapiens
ggctctgccatgcca

SEQ ID NO: 1103859 - DNA, 15 bp, Homo sapiens
tggctctgccatgcc

SEQ ID NO: 1103860 - DNA, 15 bp, Homo sapiens
ctggctctgccatgc

SEQ ID NO: 1103861 - DNA, 15 bp, Homo sapiens
cctggctctgccatg

SEQ ID NO: 1103862 - DNA, 15 bp, Homo sapiens
gaatcctggctctgc

SEQ ID NO: 1103863 - DNA, 15 bp, Homo sapiens
tgaatcctggctctg

SEQ ID NO: 1103864 - DNA, 15 bp, Homo sapiens
ttgaatcctggctct

SEQ ID NO: 1103865 - DNA, 15 bp, Homo sapiens
tttgaatcctggctc

SEQ ID NO: 1103866 - DNA, 15 bp, Homo sapiens
atttgaatcctggct

SEQ ID NO: 1103867 - DNA, 15 bp, Homo sapiens
aatttgaatcctggc

SEQ ID NO: 1103868 - DNA, 15 bp, Homo sapiens
taatttgaatcctgg

SEQ ID NO: 1103869 - DNA, 15 bp, Homo sapiens
ttaatttgaatcctg

SEQ ID NO: 1103870 - DNA, 15 bp, Homo sapiens
attaatttgaatcct

SEQ ID NO: 1103871 - DNA, 15 bp, Homo sapiens
aattaatttgaatcc

SEQ ID NO: 1103872 - DNA, 15 bp, Homo sapiens
gaattaatttgaatc

SEQ ID NO: 1103873 - DNA, 15 bp, Homo sapiens
agaattaatttgaat

SEQ ID NO: 1103874 - DNA, 15 bp, Homo sapiens
cagaattaatttgaa

SEQ ID NO: 1103875 - DNA, 15 bp, Homo sapiens
gcagaattaatttga

SEQ ID NO: 1103876 - DNA, 15 bp, Homo sapiens
tgcagaattaatttg

SEQ ID NO: 1103877 - DNA, 15 bp, Homo sapiens
atgcagaattaattt

SEQ ID NO: 1103878 - DNA, 15 bp, Homo sapiens
aatgcagaattaatt

SEQ ID NO: 1103879 - DNA, 15 bp, Homo sapiens
taatgcagaattaat

SEQ ID NO: 1103880 - DNA, 15 bp, Homo sapiens
ttaatgcagaattaa

SEQ ID NO: 1103881 - DNA, 15 bp, Homo sapiens
tttaatgcagaatta

SEQ ID NO: 1103882 - DNA, 15 bp, Homo sapiens
ctttaatgcagaatt

SEQ ID NO: 1103883 - DNA, 15 bp, Homo sapiens
gctttaatgcagaat

SEQ ID NO: 1103884 - DNA, 15 bp, Homo sapiens
tgctttaatgcagaa

SEQ ID NO: 1103885 - DNA, 15 bp, Homo sapiens
ctgctttaatgcaga

SEQ ID NO: 1103886 - DNA, 15 bp, Homo sapiens
tctgctttaatgcag

SEQ ID NO: 1103887 - DNA, 15 bp, Homo sapiens
ttctgctttaatgca

SEQ ID NO: 1103888 - DNA, 15 bp, Homo sapiens
tttctgctttaatgc

SEQ ID NO: 1103889 - DNA, 15 bp, Homo sapiens
ctttctgctttaatg

SEQ ID NO: 1103890 - DNA, 15 bp, Homo sapiens
actttctgctttaat

SEQ ID NO: 1103891 - DNA, 15 bp, Homo sapiens
tactttctgctttaa

SEQ ID NO: 1103892 - DNA, 15 bp, Homo sapiens
gtactttctgcttta

SEQ ID NO: 1103893 - DNA, 15 bp, Homo sapiens
ggtactttctgcttt

SEQ ID NO: 1103894 - DNA, 15 bp, Homo sapiens
gggtactttctgctt

SEQ ID NO: 1103895 - DNA, 15 bp, Homo sapiens
ggggtactttctgct

SEQ ID NO: 1103896 - DNA, 15 bp, Homo sapiens
tggggtactttctgc

SEQ ID NO: 1103897 - DNA, 15 bp, Homo sapiens
atggggtactttctg

SEQ ID NO: 1103898 - DNA, 15 bp, Homo sapiens
aatggggtactttct

SEQ ID NO: 1103899 - DNA, 15 bp, Homo sapiens
gaatggggtactttc

SEQ ID NO: 1103900 - DNA, 15 bp, Homo sapiens
agaatggggtacttt

SEQ ID NO: 1103901 - DNA, 15 bp, Homo sapiens
aagaatggggtactt

SEQ ID NO: 1103902 - DNA, 15 bp, Homo sapiens
gaagaatggggtact

SEQ ID NO: 1103903 - DNA, 15 bp, Homo sapiens
tgaagaatggggtac

SEQ ID NO: 1103904 - DNA, 15 bp, Homo sapiens
atgaagaatggggta

SEQ ID NO: 1103905 - DNA, 15 bp, Homo sapiens
tatgaagaatggggt

SEQ ID NO: 1103906 - DNA, 15 bp, Homo sapiens
gtatgaagaatgggg

SEQ ID NO: 1103907 - DNA, 15 bp, Homo sapiens
tgtatgaagaatggg

SEQ ID NO: 1103908 - DNA, 15 bp, Homo sapiens
gtgtatgaagaatgg

SEQ ID NO: 1103909 - DNA, 15 bp, Homo sapiens
tgtgtatgaagaatg

SEQ ID NO: 1103910 - DNA, 15 bp, Homo sapiens
gtgtgtatgaagaat

SEQ ID NO: 1103911 - DNA, 15 bp, Homo sapiens
tgtgtgtatgaagaa

SEQ ID NO: 1103912 - DNA, 15 bp, Homo sapiens
ctgtgtgtatgaaga

SEQ ID NO: 1103913 - DNA, 15 bp, Homo sapiens
cctgtgtgtatgaag

SEQ ID NO: 1103914 - DNA, 15 bp, Homo sapiens
gcctgtgtgtatgaa

SEQ ID NO: 1103915 - DNA, 15 bp, Homo sapiens
tgcctgtgtgtatga

SEQ ID NO: 1103916 - DNA, 15 bp, Homo sapiens
ttgcctgtgtgtatg

SEQ ID NO: 1103917 - DNA, 15 bp, Homo sapiens
cttgcctgtgtgtat

SEQ ID NO: 1103918 - DNA, 15 bp, Homo sapiens
tcttgcctgtgtgta

SEQ ID NO: 1103919 - DNA, 15 bp, Homo sapiens
ctcttgcctgtgtgt

SEQ ID NO: 1103920 - DNA, 15 bp, Homo sapiens
gctcttgcctgtgtg

SEQ ID NO: 1103921 - DNA, 15 bp, Homo sapiens
ggctcttgcctgtgt

SEQ ID NO: 1103922 - DNA, 15 bp, Homo sapiens
gggctcttgcctgtg

SEQ ID NO: 1103923 - DNA, 15 bp, Homo sapiens
agggctcttgcctgt

SEQ ID NO: 1103924 - DNA, 15 bp, Homo sapiens
cagggctcttgcctg

SEQ ID NO: 1103925 - DNA, 15 bp, Homo sapiens
ccagggctcttgcct

SEQ ID NO: 1103926 - DNA, 15 bp, Homo sapiens
gccagggctcttgcc

SEQ ID NO: 1103927 - DNA, 15 bp, Homo sapiens
agccagggctcttgc

SEQ ID NO: 1103928 - DNA, 15 bp, Homo sapiens
gagccagggctcttg

SEQ ID NO: 1103929 - DNA, 15 bp, Homo sapiens
tgagccagggctctt

SEQ ID NO: 1103930 - DNA, 15 bp, Homo sapiens
gtgagccagggctct

SEQ ID NO: 1103931 - DNA, 15 bp, Homo sapiens
agtgagccagggctc

SEQ ID NO: 1103932 - DNA, 15 bp, Homo sapiens
cagtgagccagggct

SEQ ID NO: 1103933 - DNA, 15 bp, Homo sapiens
acagtgagccagggc

SEQ ID NO: 1103934 - DNA, 15 bp, Homo sapiens
cacagtgagccaggg

SEQ ID NO: 1103935 - DNA, 15 bp, Homo sapiens
ccacagtgagccagg

SEQ ID NO: 1103936 - DNA, 15 bp, Homo sapiens
cccacagtgagccag

SEQ ID NO: 1103937 - DNA, 15 bp, Homo sapiens
ccccacagtgagcca

SEQ ID NO: 1103938 - DNA, 15 bp, Homo sapiens
tccccacagtgagcc

SEQ ID NO: 1103939 - DNA, 15 bp, Homo sapiens
ttccccacagtgagc

SEQ ID NO: 1103940 - DNA, 15 bp, Homo sapiens
cttccccacagtgag

SEQ ID NO: 1103941 - DNA, 15 bp, Homo sapiens
ccttccccacagtga

SEQ ID NO: 1103942 - DNA, 15 bp, Homo sapiens
cccttccccacagtg

SEQ ID NO: 1103943 - DNA, 15 bp, Homo sapiens
ccccttccccacagt

SEQ ID NO: 1103944 - DNA, 15 bp, Homo sapiens
cccccttccccacag

SEQ ID NO: 1103945 - DNA, 15 bp, Homo sapiens
acccccttccccaca

SEQ ID NO: 1103946 - DNA, 15 bp, Homo sapiens
cacccccttccccac

SEQ ID NO: 1103947 - DNA, 15 bp, Homo sapiens
ccacccccttcccca

SEQ ID NO: 1103948 - DNA, 15 bp, Homo sapiens
gccacccccttcccc

SEQ ID NO: 1103949 - DNA, 15 bp, Homo sapiens
agccacccccttccc

SEQ ID NO: 1103950 - DNA, 15 bp, Homo sapiens
aagccacccccttcc

SEQ ID NO: 1103951 - DNA, 15 bp, Homo sapiens
aaagccacccccttc

SEQ ID NO: 1103952 - DNA, 15 bp, Homo sapiens
gaaagccaccccctt

SEQ ID NO: 1103953 - DNA, 15 bp, Homo sapiens
agaaagccaccccct

SEQ ID NO: 1103954 - DNA, 15 bp, Homo sapiens
cagaaagccaccccc

SEQ ID NO: 1103955 - DNA, 15 bp, Homo sapiens
ccagaaagccacccc

SEQ ID NO: 1103956 - DNA, 15 bp, Homo sapiens
accagaaagccaccc

SEQ ID NO: 1103957 - DNA, 15 bp, Homo sapiens
caccagaaagccacc

SEQ ID NO: 1103958 - DNA, 15 bp, Homo sapiens
gcaccagaaagccac

SEQ ID NO: 1103959 - DNA, 15 bp, Homo sapiens
agcaccagaaagcca

SEQ ID NO: 1103960 - DNA, 15 bp, Homo sapiens
tagcaccagaaagcc

SEQ ID NO: 1103961 - DNA, 15 bp, Homo sapiens
ctagcaccagaaagc

SEQ ID NO: 1103962 - DNA, 15 bp, Homo sapiens
cctagcaccagaaag

SEQ ID NO: 1103963 - DNA, 15 bp, Homo sapiens
tcctagcaccagaaa

SEQ ID NO: 1103964 - DNA, 15 bp, Homo sapiens
atcctagcaccagaa

SEQ ID NO: 1103965 - DNA, 15 bp, Homo sapiens
catcctagcaccaga

SEQ ID NO: 1103966 - DNA, 15 bp, Homo sapiens
ccatcctagcaccag

SEQ ID NO: 1103967 - DNA, 15 bp, Homo sapiens
cccatcctagcacca

SEQ ID NO: 1103968 - DNA, 15 bp, Homo sapiens
tcccatcctagcacc

SEQ ID NO: 1103969 - DNA, 15 bp, Homo sapiens
ctcccatcctagcac

SEQ ID NO: 1103970 - DNA, 15 bp, Homo sapiens
tctcccatcctagca

SEQ ID NO: 1103971 - DNA, 15 bp, Homo sapiens
ttctcccatcctagc

SEQ ID NO: 1103972 - DNA, 15 bp, Homo sapiens
cttctcccatcctag

SEQ ID NO: 1103973 - DNA, 15 bp, Homo sapiens
ccttctcccatccta

SEQ ID NO: 1103974 - DNA, 15 bp, Homo sapiens
cccttctcccatcct

SEQ ID NO: 1103975 - DNA, 15 bp, Homo sapiens
ccccttctcccatcc

SEQ ID NO: 1103976 - DNA, 15 bp, Homo sapiens
cccccttctcccatc

SEQ ID NO: 1103977 - DNA, 15 bp, Homo sapiens
acccccttctcccat

SEQ ID NO: 1103978 - DNA, 15 bp, Homo sapiens
aacccccttctccca

SEQ ID NO: 1103979 - DNA, 15 bp, Homo sapiens
gaacccccttctccc

SEQ ID NO: 1103980 - DNA, 15 bp, Homo sapiens
agaacccccttctcc

SEQ ID NO: 1103981 - DNA, 15 bp, Homo sapiens
gagaacccccttctc

SEQ ID NO: 1103982 - DNA, 15 bp, Homo sapiens
cgagaacccccttct

SEQ ID NO: 1103983 - DNA, 15 bp, Homo sapiens
gcgagaacccccttc

SEQ ID NO: 1103984 - DNA, 15 bp, Homo sapiens
agcgagaaccccctt

SEQ ID NO: 1103985 - DNA, 15 bp, Homo sapiens
cagcgagaaccccct

SEQ ID NO: 1103986 - DNA, 15 bp, Homo sapiens
ccagcgagaaccccc

SEQ ID NO: 1103987 - DNA, 15 bp, Homo sapiens
gccagcgagaacccc

SEQ ID NO: 1103988 - DNA, 15 bp, Homo sapiens
ggccagcgagaaccc

SEQ ID NO: 1103989 - DNA, 15 bp, Homo sapiens
gggccagcgagaacc

SEQ ID NO: 1103990 - DNA, 15 bp, Homo sapiens
ggggccagcgagaac

SEQ ID NO: 1103991 - DNA, 15 bp, Homo sapiens
tggggccagcgagaa

SEQ ID NO: 1103992 - DNA, 15 bp, Homo sapiens
gtggggccagcgaga

SEQ ID NO: 1103993 - DNA, 15 bp, Homo sapiens
tgtggggccagcgag

SEQ ID NO: 1103994 - DNA, 15 bp, Homo sapiens
gtgtggggccagcga

SEQ ID NO: 1103995 - DNA, 15 bp, Homo sapiens
tgtgtggggccagcg

SEQ ID NO: 1103996 - DNA, 15 bp, Homo sapiens
gtgtgtggggccagc

SEQ ID NO: 1103997 - DNA, 15 bp, Homo sapiens
agtgtgtggggccag

SEQ ID NO: 1103998 - DNA, 15 bp, Homo sapiens
gagtgtgtggggcca

SEQ ID NO: 1103999 - DNA, 15 bp, Homo sapiens
agagtgtgtggggcc

SEQ ID NO: 1104000 - DNA, 15 bp, Homo sapiens
gagagtgtgtggggc

SEQ ID NO: 1104001 - DNA, 15 bp, Homo sapiens
ggagagtgtgtgggg

SEQ ID NO: 1104002 - DNA, 15 bp, Homo sapiens
aggagagtgtgtggg

SEQ ID NO: 1104003 - DNA, 15 bp, Homo sapiens
caggagagtgtgtgg

SEQ ID NO: 1104004 - DNA, 15 bp, Homo sapiens
tcaggagagtgtgtg

SEQ ID NO: 1104005 - DNA, 15 bp, Homo sapiens
ttcaggagagtgtgt

SEQ ID NO: 1104006 - DNA, 15 bp, Homo sapiens
tttcaggagagtgtg

SEQ ID NO: 1104007 - DNA, 15 bp, Homo sapiens
ttttcaggagagtgt

SEQ ID NO: 1104008 - DNA, 15 bp, Homo sapiens
attttcaggagagtg

SEQ ID NO: 1104009 - DNA, 15 bp, Homo sapiens
cattttcaggagagt

SEQ ID NO: 1104010 - DNA, 15 bp, Homo sapiens
acattttcaggagag

SEQ ID NO: 1104011 - DNA, 15 bp, Homo sapiens
gacattttcaggaga

SEQ ID NO: 1104012 - DNA, 15 bp, Homo sapiens
agacattttcaggag

SEQ ID NO: 1104013 - DNA, 15 bp, Homo sapiens
cagacattttcagga

SEQ ID NO: 1104014 - DNA, 15 bp, Homo sapiens
gcagacattttcagg

SEQ ID NO: 1104015 - DNA, 15 bp, Homo sapiens
tgcagacattttcag

SEQ ID NO: 1104016 - DNA, 15 bp, Homo sapiens
ctgcagacattttca

SEQ ID NO: 1104017 - DNA, 15 bp, Homo sapiens
cctgcagacattttc

SEQ ID NO: 1104018 - DNA, 15 bp, Homo sapiens
tcctgcagacatttt

SEQ ID NO: 1104019 - DNA, 15 bp, Homo sapiens
gtcctgcagacattt

SEQ ID NO: 1104020 - DNA, 15 bp, Homo sapiens
tgtcctgcagacatt

SEQ ID NO: 1104021 - DNA, 15 bp, Homo sapiens
ctgtcctgcagacat

SEQ ID NO: 1104022 - DNA, 15 bp, Homo sapiens
gctgtcctgcagaca

SEQ ID NO: 1104023 - DNA, 15 bp, Homo sapiens
tgctgtcctgcagac

SEQ ID NO: 1104024 - DNA, 15 bp, Homo sapiens
ctgctgtcctgcaga

SEQ ID NO: 1104025 - DNA, 15 bp, Homo sapiens
cctgctgtcctgcag

SEQ ID NO: 1104026 - DNA, 15 bp, Homo sapiens
gcctgctgtcctgca

SEQ ID NO: 1104027 - DNA, 15 bp, Homo sapiens
ggcctgctgtcctgc

SEQ ID NO: 1104028 - DNA, 15 bp, Homo sapiens
aggcctgctgtcctg

SEQ ID NO: 1104029 - DNA, 15 bp, Homo sapiens
gaggcctgctgtcct

SEQ ID NO: 1104030 - DNA, 15 bp, Homo sapiens
ggaggcctgctgtcc

SEQ ID NO: 1104031 - DNA, 15 bp, Homo sapiens
gggaggcctgctgtc

SEQ ID NO: 1104032 - DNA, 15 bp, Homo sapiens
agggaggcctgctgt

SEQ ID NO: 1104033 - DNA, 15 bp, Homo sapiens
gagggaggcctgctg

SEQ ID NO: 1104034 - DNA, 15 bp, Homo sapiens
ggagggaggcctgct

SEQ ID NO: 1104035 - DNA, 15 bp, Homo sapiens
gggagggaggcctgc

SEQ ID NO: 1104036 - DNA, 15 bp, Homo sapiens
tgggagggaggcctg

SEQ ID NO: 1104037 - DNA, 15 bp, Homo sapiens
atgggagggaggcct

SEQ ID NO: 1104038 - DNA, 15 bp, Homo sapiens
gatgggagggaggcc

SEQ ID NO: 1104039 - DNA, 15 bp, Homo sapiens
ggatgggagggaggc

SEQ ID NO: 1104040 - DNA, 15 bp, Homo sapiens
gggatgggagggagg

SEQ ID NO: 1104041 - DNA, 15 bp, Homo sapiens
agggatgggagggag

SEQ ID NO: 1104042 - DNA, 15 bp, Homo sapiens
cagggatgggaggga

SEQ ID NO: 1104043 - DNA, 15 bp, Homo sapiens
tcagggatgggaggg

SEQ ID NO: 1104044 - DNA, 15 bp, Homo sapiens
ctcagggatgggagg

SEQ ID NO: 1104045 - DNA, 15 bp, Homo sapiens
tctcagggatgggag

SEQ ID NO: 1104046 - DNA, 15 bp, Homo sapiens
atctcagggatggga

SEQ ID NO: 1104047 - DNA, 15 bp, Homo sapiens
catctcagggatggg

SEQ ID NO: 1104048 - DNA, 15 bp, Homo sapiens
ccatctcagggatgg

SEQ ID NO: 1104049 - DNA, 15 bp, Homo sapiens
accatctcagggatg

SEQ ID NO: 1104050 - DNA, 15 bp, Homo sapiens
gaccatctcagggat

SEQ ID NO: 1104051 - DNA, 15 bp, Homo sapiens
tgaccatctcaggga

SEQ ID NO: 1104052 - DNA, 15 bp, Homo sapiens
ctgaccatctcaggg

SEQ ID NO: 1104053 - DNA, 15 bp, Homo sapiens
gctgaccatctcagg

SEQ ID NO: 1104054 - DNA, 15 bp, Homo sapiens
agctgaccatctcag

SEQ ID NO: 1104055 - DNA, 15 bp, Homo sapiens
gagctgaccatctca

SEQ ID NO: 1104056 - DNA, 15 bp, Homo sapiens
ggagctgaccatctc

SEQ ID NO: 1104057 - DNA, 15 bp, Homo sapiens
aggagctgaccatct

SEQ ID NO: 1104058 - DNA, 15 bp, Homo sapiens
caggagctgaccatc

SEQ ID NO: 1104059 - DNA, 15 bp, Homo sapiens
ccaggagctgaccat

SEQ ID NO: 1104060 - DNA, 15 bp, Homo sapiens
cccaggagctgacca

SEQ ID NO: 1104061 - DNA, 15 bp, Homo sapiens
tcccaggagctgacc

SEQ ID NO: 1104062 - DNA, 15 bp, Homo sapiens
ctcccaggagctgac

SEQ ID NO: 1104063 - DNA, 15 bp, Homo sapiens
cctcccaggagctga

SEQ ID NO: 1104064 - DNA, 15 bp, Homo sapiens
tcctcccaggagctg

SEQ ID NO: 1104065 - DNA, 15 bp, Homo sapiens
ctcctcccaggagct

SEQ ID NO: 1104066 - DNA, 15 bp, Homo sapiens
cctcctcccaggagc

SEQ ID NO: 1104067 - DNA, 15 bp, Homo sapiens
ccctcctcccaggag

SEQ ID NO: 1104068 - DNA, 15 bp, Homo sapiens
gccctcctcccagga

SEQ ID NO: 1104069 - DNA, 15 bp, Homo sapiens
tgccctcctcccagg

SEQ ID NO: 1104070 - DNA, 15 bp, Homo sapiens
atgccctcctcccag

SEQ ID NO: 1104071 - DNA, 15 bp, Homo sapiens
catgccctcctccca

SEQ ID NO: 1104072 - DNA, 15 bp, Homo sapiens
ccatgccctcctccc

SEQ ID NO: 1104073 - DNA, 15 bp, Homo sapiens
gccatgccctcctcc

SEQ ID NO: 1104074 - DNA, 15 bp, Homo sapiens
agccatgccctcctc

SEQ ID NO: 1104075 - DNA, 15 bp, Homo sapiens
cagccatgccctcct

SEQ ID NO: 1104076 - DNA, 15 bp, Homo sapiens
acagccatgccctcc

SEQ ID NO: 1104077 - DNA, 15 bp, Homo sapiens
cacagccatgccctc

SEQ ID NO: 1104078 - DNA, 15 bp, Homo sapiens
acacagccatgccct

SEQ ID NO: 1104079 - DNA, 15 bp, Homo sapiens
aacacagccatgccc

SEQ ID NO: 1104080 - DNA, 15 bp, Homo sapiens
gaacacagccatgcc

SEQ ID NO: 1104081 - DNA, 15 bp, Homo sapiens
tgaacacagccatgc

SEQ ID NO: 1104082 - DNA, 15 bp, Homo sapiens
atgaacacagccatg

SEQ ID NO: 1104083 - DNA, 15 bp, Homo sapiens
catgaacacagccat

SEQ ID NO: 1104084 - DNA, 15 bp, Homo sapiens
ccatgaacacagcca

SEQ ID NO: 1104085 - DNA, 15 bp, Homo sapiens
cccatgaacacagcc

SEQ ID NO: 1104086 - DNA, 15 bp, Homo sapiens
gcccatgaacacagc

SEQ ID NO: 1104087 - DNA, 15 bp, Homo sapiens
tgcccatgaacacag

SEQ ID NO: 1104088 - DNA, 15 bp, Homo sapiens
gtgcccatgaacaca

SEQ ID NO: 1104089 - DNA, 15 bp, Homo sapiens
ggtgcccatgaacac

SEQ ID NO: 1104090 - DNA, 15 bp, Homo sapiens
aggtgcccatgaaca

SEQ ID NO: 1104091 - DNA, 15 bp, Homo sapiens
caggtgcccatgaac

SEQ ID NO: 1104092 - DNA, 15 bp, Homo sapiens
ccaggtgcccatgaa

SEQ ID NO: 1104093 - DNA, 15 bp, Homo sapiens
tccaggtgcccatga

SEQ ID NO: 1104094 - DNA, 15 bp, Homo sapiens
ttccaggtgcccatg

SEQ ID NO: 1104095 - DNA, 15 bp, Homo sapiens
tttccaggtgcccat

SEQ ID NO: 1104096 - DNA, 15 bp, Homo sapiens
ttttccaggtgccca

SEQ ID NO: 1104097 - DNA, 15 bp, Homo sapiens
cttttccaggtgccc

SEQ ID NO: 1104098 - DNA, 15 bp, Homo sapiens
ccttttccaggtgcc

SEQ ID NO: 1104099 - DNA, 15 bp, Homo sapiens
gccttttccaggtgc

SEQ ID NO: 1104100 - DNA, 15 bp, Homo sapiens
ggccttttccaggtg

SEQ ID NO: 1104101 - DNA, 15 bp, Homo sapiens
gggccttttccaggt

SEQ ID NO: 1104102 - DNA, 15 bp, Homo sapiens
ggggccttttccagg

SEQ ID NO: 1104103 - DNA, 15 bp, Homo sapiens
aggggccttttccag

SEQ ID NO: 1104104 - DNA, 15 bp, Homo sapiens
aaggggccttttcca

SEQ ID NO: 1104105 - DNA, 15 bp, Homo sapiens
gaaggggccttttcc

SEQ ID NO: 1104106 - DNA, 15 bp, Homo sapiens
ggaaggggccttttc

SEQ ID NO: 1104107 - DNA, 15 bp, Homo sapiens
tggaaggggcctttt

SEQ ID NO: 1104108 - DNA, 15 bp, Homo sapiens
gtggaaggggccttt

SEQ ID NO: 1104109 - DNA, 15 bp, Homo sapiens
ggtggaaggggcctt

SEQ ID NO: 1104110 - DNA, 15 bp, Homo sapiens
tggtggaaggggcct

SEQ ID NO: 1104111 - DNA, 15 bp, Homo sapiens
ttggtggaaggggcc

SEQ ID NO: 1104112 - DNA, 15 bp, Homo sapiens
cttggtggaaggggc

SEQ ID NO: 1104113 - DNA, 15 bp, Homo sapiens
ccttggtggaagggg

SEQ ID NO: 1104114 - DNA, 15 bp, Homo sapiens
accttggtggaaggg

SEQ ID NO: 1104115 - DNA, 15 bp, Homo sapiens
taccttggtggaagg

SEQ ID NO: 1104116 - DNA, 15 bp, Homo sapiens
gtaccttggtggaag

SEQ ID NO: 1104117 - DNA, 15 bp, Homo sapiens
agtaccttggtggaa

SEQ ID NO: 1104118 - DNA, 15 bp, Homo sapiens
gagtaccttggtgga

SEQ ID NO: 1104119 - DNA, 15 bp, Homo sapiens
tgagtaccttggtgg

SEQ ID NO: 1104120 - DNA, 15 bp, Homo sapiens
ctgagtaccttggtg

SEQ ID NO: 1104121 - DNA, 15 bp, Homo sapiens
gctgagtaccttggt

SEQ ID NO: 1104122 - DNA, 15 bp, Homo sapiens
agctgagtaccttgg

SEQ ID NO: 1104123 - DNA, 15 bp, Homo sapiens
aagctgagtaccttg

SEQ ID NO: 1104124 - DNA, 15 bp, Homo sapiens
aaagctgagtacctt

SEQ ID NO: 1104125 - DNA, 15 bp, Homo sapiens
caaagctgagtacct

SEQ ID NO: 1104126 - DNA, 15 bp, Homo sapiens
ccaaagctgagtacc

SEQ ID NO: 1104127 - DNA, 15 bp, Homo sapiens
tccaaagctgagtac

SEQ ID NO: 1104128 - DNA, 15 bp, Homo sapiens
ttccaaagctgagta

SEQ ID NO: 1104129 - DNA, 15 bp, Homo sapiens
attccaaagctgagt

SEQ ID NO: 1104130 - DNA, 15 bp, Homo sapiens
gattccaaagctgag

SEQ ID NO: 1104131 - DNA, 15 bp, Homo sapiens
ggattccaaagctga

SEQ ID NO: 1104132 - DNA, 15 bp, Homo sapiens
gggattccaaagctg

SEQ ID NO: 1104133 - DNA, 15 bp, Homo sapiens
tgggattccaaagct

SEQ ID NO: 1104134 - DNA, 15 bp, Homo sapiens
ctgggattccaaagc

SEQ ID NO: 1104135 - DNA, 15 bp, Homo sapiens
tctgggattccaaag

SEQ ID NO: 1104136 - DNA, 15 bp, Homo sapiens
ctctgggattccaaa

SEQ ID NO: 1104137 - DNA, 15 bp, Homo sapiens
gctctgggattccaa

SEQ ID NO: 1104138 - DNA, 15 bp, Homo sapiens
agctctgggattcca

SEQ ID NO: 1104139 - DNA, 15 bp, Homo sapiens
gagctctgggattcc

SEQ ID NO: 1104140 - DNA, 15 bp, Homo sapiens
tgagctctgggattc

SEQ ID NO: 1104141 - DNA, 15 bp, Homo sapiens
ctgagctctgggatt

SEQ ID NO: 1104142 - DNA, 15 bp, Homo sapiens
cctgagctctgggat

SEQ ID NO: 1104143 - DNA, 15 bp, Homo sapiens
ccctgagctctggga

SEQ ID NO: 1104144 - DNA, 15 bp, Homo sapiens
tccctgagctctggg

SEQ ID NO: 1104145 - DNA, 15 bp, Homo sapiens
atccctgagctctgg

SEQ ID NO: 1104146 - DNA, 15 bp, Homo sapiens
catccctgagctctg

SEQ ID NO: 1104147 - DNA, 15 bp, Homo sapiens
acatccctgagctct

SEQ ID NO: 1104148 - DNA, 15 bp, Homo sapiens
aacatccctgagctc

SEQ ID NO: 1104149 - DNA, 15 bp, Homo sapiens
caacatccctgagct

SEQ ID NO: 1104150 - DNA, 15 bp, Homo sapiens
ccaacatccctgagc

SEQ ID NO: 1104151 - DNA, 15 bp, Homo sapiens
tccaacatccctgag

SEQ ID NO: 1104152 - DNA, 15 bp, Homo sapiens
ctccaacatccctga

SEQ ID NO: 1104153 - DNA, 15 bp, Homo sapiens
actccaacatccctg

SEQ ID NO: 1104154 - DNA, 15 bp, Homo sapiens
gactccaacatccct

SEQ ID NO: 1104155 - DNA, 15 bp, Homo sapiens
tgactccaacatccc

SEQ ID NO: 1104156 - DNA, 15 bp, Homo sapiens
ctgactccaacatcc

SEQ ID NO: 1104157 - DNA, 15 bp, Homo sapiens
gctgactccaacatc

SEQ ID NO: 1104158 - DNA, 15 bp, Homo sapiens
tgctgactccaacat

SEQ ID NO: 1104159 - DNA, 15 bp, Homo sapiens
gtgctgactccaaca

SEQ ID NO: 1104160 - DNA, 15 bp, Homo sapiens
tgtgctgactccaac

SEQ ID NO: 1104161 - DNA, 15 bp, Homo sapiens
atgtgctgactccaa

SEQ ID NO: 1104162 - DNA, 15 bp, Homo sapiens
aatgtgctgactcca

SEQ ID NO: 1104163 - DNA, 15 bp, Homo sapiens
taatgtgctgactcc

SEQ ID NO: 1104164 - DNA, 15 bp, Homo sapiens
ttaatgtgctgactc

SEQ ID NO: 1104165 - DNA, 15 bp, Homo sapiens
attaatgtgctgact

SEQ ID NO: 1104166 - DNA, 15 bp, Homo sapiens
tattaatgtgctgac

SEQ ID NO: 1104167 - DNA, 15 bp, Homo sapiens
ctattaatgtgctga

SEQ ID NO: 1104168 - DNA, 15 bp, Homo sapiens
cctattaatgtgctg

SEQ ID NO: 1104169 - DNA, 15 bp, Homo sapiens
gcctattaatgtgct

SEQ ID NO: 1104170 - DNA, 15 bp, Homo sapiens
agcctattaatgtgc

SEQ ID NO: 1104171 - DNA, 15 bp, Homo sapiens
aagcctattaatgtg

SEQ ID NO: 1104172 - DNA, 15 bp, Homo sapiens
caagcctattaatgt

SEQ ID NO: 1104173 - DNA, 15 bp, Homo sapiens
acaagcctattaatg

SEQ ID NO: 1104174 - DNA, 15 bp, Homo sapiens
gacaagcctattaat

SEQ ID NO: 1104175 - DNA, 15 bp, Homo sapiens
agacaagcctattaa

SEQ ID NO: 1104176 - DNA, 15 bp, Homo sapiens
aagacaagcctatta

SEQ ID NO: 1104177 - DNA, 15 bp, Homo sapiens
aaagacaagcctatt

SEQ ID NO: 1104178 - DNA, 15 bp, Homo sapiens
aaaagacaagcctat

SEQ ID NO: 1104179 - DNA, 15 bp, Homo sapiens
aaaaagacaagccta

SEQ ID NO: 1104180 - DNA, 15 bp, Homo sapiens
gaaaaagacaagcct

SEQ ID NO: 1104181 - DNA, 15 bp, Homo sapiens
agaaaaagacaagcc

SEQ ID NO: 1104182 - DNA, 15 bp, Homo sapiens
tagaaaaagacaagc

SEQ ID NO: 1104183 - DNA, 15 bp, Homo sapiens
atagaaaaagacaag

SEQ ID NO: 1104184 - DNA, 15 bp, Homo sapiens
catagaaaaagacaa

SEQ ID NO: 1104185 - DNA, 15 bp, Homo sapiens
ccatagaaaaagaca

SEQ ID NO: 1104186 - DNA, 15 bp, Homo sapiens
cccatagaaaaagac

SEQ ID NO: 1104187 - DNA, 15 bp, Homo sapiens
acccatagaaaaaga

SEQ ID NO: 1104188 - DNA, 15 bp, Homo sapiens
cacccatagaaaaag

SEQ ID NO: 1104189 - DNA, 15 bp, Homo sapiens
cacacccatagaaaa

SEQ ID NO: 1104190 - DNA, 15 bp, Homo sapiens
ccacacccatagaaa

SEQ ID NO: 1104191 - DNA, 15 bp, Homo sapiens
cccacacccatagaa

SEQ ID NO: 1104192 - DNA, 15 bp, Homo sapiens
ccccacacccataga

SEQ ID NO: 1104193 - DNA, 15 bp, Homo sapiens
cccccacacccatag

SEQ ID NO: 1104194 - DNA, 15 bp, Homo sapiens
tcccccacacccata

SEQ ID NO: 1104195 - DNA, 15 bp, Homo sapiens
atcccccacacccat

SEQ ID NO: 1104196 - DNA, 15 bp, Homo sapiens
catcccccacaccca

SEQ ID NO: 1104197 - DNA, 15 bp, Homo sapiens
gcatcccccacaccc

SEQ ID NO: 1104198 - DNA, 15 bp, Homo sapiens
tgcatcccccacacc

SEQ ID NO: 1104199 - DNA, 15 bp, Homo sapiens
ctgcatcccccacac

SEQ ID NO: 1104200 - DNA, 15 bp, Homo sapiens
tctgcatcccccaca

SEQ ID NO: 1104201 - DNA, 15 bp, Homo sapiens
ttctgcatcccccac

SEQ ID NO: 1104202 - DNA, 15 bp, Homo sapiens
tttctgcatccccca

SEQ ID NO: 1104203 - DNA, 15 bp, Homo sapiens
ctttctgcatccccc

SEQ ID NO: 1104204 - DNA, 15 bp, Homo sapiens
cctttctgcatcccc

SEQ ID NO: 1104205 - DNA, 15 bp, Homo sapiens
tcctttctgcatccc

SEQ ID NO: 1104206 - DNA, 15 bp, Homo sapiens
gtcctttctgcatcc

SEQ ID NO: 1104207 - DNA, 15 bp, Homo sapiens
tgtcctttctgcatc

SEQ ID NO: 1104208 - DNA, 15 bp, Homo sapiens
ctgtcctttctgcat

SEQ ID NO: 1104209 - DNA, 15 bp, Homo sapiens
actgtcctttctgca

SEQ ID NO: 1104210 - DNA, 15 bp, Homo sapiens
cactgtcctttctgc

SEQ ID NO: 1104211 - DNA, 15 bp, Homo sapiens
ccactgtcctttctg

SEQ ID NO: 1104212 - DNA, 15 bp, Homo sapiens
cccactgtcctttct

SEQ ID NO: 1104213 - DNA, 15 bp, Homo sapiens
acccactgtcctttc

SEQ ID NO: 1104214 - DNA, 15 bp, Homo sapiens
cacccactgtccttt

SEQ ID NO: 1104215 - DNA, 15 bp, Homo sapiens
ccacccactgtcctt

SEQ ID NO: 1104216 - DNA, 15 bp, Homo sapiens
cccacccactgtcct

SEQ ID NO: 1104217 - DNA, 15 bp, Homo sapiens
ccccacccactgtcc

SEQ ID NO: 1104218 - DNA, 15 bp, Homo sapiens
tccccacccactgtc

SEQ ID NO: 1104219 - DNA, 15 bp, Homo sapiens
gtccccacccactgt

SEQ ID NO: 1104220 - DNA, 15 bp, Homo sapiens
ggtccccacccactg

SEQ ID NO: 1104221 - DNA, 15 bp, Homo sapiens
aggtccccacccact

SEQ ID NO: 1104222 - DNA, 15 bp, Homo sapiens
caggtccccacccac

SEQ ID NO: 1104223 - DNA, 15 bp, Homo sapiens
ccaggtccccaccca

SEQ ID NO: 1104224 - DNA, 15 bp, Homo sapiens
cccaggtccccaccc

SEQ ID NO: 1104225 - DNA, 15 bp, Homo sapiens
acccaggtccccacc

SEQ ID NO: 1104226 - DNA, 15 bp, Homo sapiens
cacccaggtccccac

SEQ ID NO: 1104227 - DNA, 15 bp, Homo sapiens
acacccaggtcccca

SEQ ID NO: 1104228 - DNA, 15 bp, Homo sapiens
aacacccaggtcccc

SEQ ID NO: 1104229 - DNA, 15 bp, Homo sapiens
aaacacccaggtccc

SEQ ID NO: 1104230 - DNA, 15 bp, Homo sapiens
gaaacacccaggtcc

SEQ ID NO: 1104231 - DNA, 15 bp, Homo sapiens
tgaaacacccaggtc

SEQ ID NO: 1104232 - DNA, 15 bp, Homo sapiens
ttgaaacacccaggt

SEQ ID NO: 1104233 - DNA, 15 bp, Homo sapiens
cttgaaacacccagg

SEQ ID NO: 1104234 - DNA, 15 bp, Homo sapiens
ccttgaaacacccag

SEQ ID NO: 1104235 - DNA, 15 bp, Homo sapiens
tccttgaaacaccca

SEQ ID NO: 1104236 - DNA, 15 bp, Homo sapiens
ctccttgaaacaccc

SEQ ID NO: 1104237 - DNA, 15 bp, Homo sapiens
gctccttgaaacacc

SEQ ID NO: 1104238 - DNA, 15 bp, Homo sapiens
agctccttgaaacac

SEQ ID NO: 1104239 - DNA, 15 bp, Homo sapiens
tagctccttgaaaca

SEQ ID NO: 1104240 - DNA, 15 bp, Homo sapiens
atagctccttgaaac

SEQ ID NO: 1104241 - DNA, 15 bp, Homo sapiens
catagctccttgaaa

SEQ ID NO: 1104242 - DNA, 15 bp, Homo sapiens
tcatagctccttgaa

SEQ ID NO: 1104243 - DNA, 15 bp, Homo sapiens
ctcatagctccttga

SEQ ID NO: 1104244 - DNA, 15 bp, Homo sapiens
tctcatagctccttg

SEQ ID NO: 1104245 - DNA, 15 bp, Homo sapiens
atctcatagctcctt

SEQ ID NO: 1104246 - DNA, 15 bp, Homo sapiens
catctcatagctcct

SEQ ID NO: 1104247 - DNA, 15 bp, Homo sapiens
ccatctcatagctcc

SEQ ID NO: 1104248 - DNA, 15 bp, Homo sapiens
gccatctcatagctc

SEQ ID NO: 1104249 - DNA, 15 bp, Homo sapiens
agccatctcatagct

SEQ ID NO: 1104250 - DNA, 15 bp, Homo sapiens
gagccatctcatagc

SEQ ID NO: 1104251 - DNA, 15 bp, Homo sapiens
tgagccatctcatag

SEQ ID NO: 1104252 - DNA, 15 bp, Homo sapiens
ttgagccatctcata

SEQ ID NO: 1104253 - DNA, 15 bp, Homo sapiens
tttgagccatctcat

SEQ ID NO: 1104254 - DNA, 15 bp, Homo sapiens
ctttgagccatctca

SEQ ID NO: 1104255 - DNA, 15 bp, Homo sapiens
tctttgagccatctc

SEQ ID NO: 1104256 - DNA, 15 bp, Homo sapiens
ttctttgagccatct

SEQ ID NO: 1104257 - DNA, 15 bp, Homo sapiens
cttctttgagccatc

SEQ ID NO: 1104258 - DNA, 15 bp, Homo sapiens
gcttctttgagccat

SEQ ID NO: 1104259 - DNA, 15 bp, Homo sapiens
tgcttctttgagcca

SEQ ID NO: 1104260 - DNA, 15 bp, Homo sapiens
ttgcttctttgagcc

SEQ ID NO: 1104261 - DNA, 15 bp, Homo sapiens
attgcttctttgagc

SEQ ID NO: 1104262 - DNA, 15 bp, Homo sapiens
cattgcttctttgag

SEQ ID NO: 1104263 - DNA, 15 bp, Homo sapiens
acattgcttctttga

SEQ ID NO: 1104264 - DNA, 15 bp, Homo sapiens
cacattgcttctttg

SEQ ID NO: 1104265 - DNA, 15 bp, Homo sapiens
tcacattgcttcttt

SEQ ID NO: 1104266 - DNA, 15 bp, Homo sapiens
atcacattgcttctt

SEQ ID NO: 1104267 - DNA, 15 bp, Homo sapiens
catcacattgcttct

SEQ ID NO: 1104268 - DNA, 15 bp, Homo sapiens
acatcacattgcttc

SEQ ID NO: 1104269 - DNA, 15 bp, Homo sapiens
tacatcacattgctt

SEQ ID NO: 1104270 - DNA, 15 bp, Homo sapiens
ctacatcacattgct

SEQ ID NO: 1104271 - DNA, 15 bp, Homo sapiens
gctacatcacattgc

SEQ ID NO: 1104272 - DNA, 15 bp, Homo sapiens
tgctacatcacattg

SEQ ID NO: 1104273 - DNA, 15 bp, Homo sapiens
ctgctacatcacatt

SEQ ID NO: 1104274 - DNA, 15 bp, Homo sapiens
tctgctacatcacat

SEQ ID NO: 1104275 - DNA, 15 bp, Homo sapiens
ttctgctacatcaca

SEQ ID NO: 1104276 - DNA, 15 bp, Homo sapiens
tttctgctacatcac

SEQ ID NO: 1104277 - DNA, 15 bp, Homo sapiens
ttttctgctacatca

SEQ ID NO: 1104278 - DNA, 15 bp, Homo sapiens
cttttctgctacatc

SEQ ID NO: 1104279 - DNA, 15 bp, Homo sapiens
tcttttctgctacat

SEQ ID NO: 1104280 - DNA, 15 bp, Homo sapiens
atcttttctgctaca

SEQ ID NO: 1104281 - DNA, 15 bp, Homo sapiens
catcttttctgctac

SEQ ID NO: 1104282 - DNA, 15 bp, Homo sapiens
gcatcttttctgcta

SEQ ID NO: 1104283 - DNA, 15 bp, Homo sapiens
tgcatcttttctgct

SEQ ID NO: 1104284 - DNA, 15 bp, Homo sapiens
ttgcatcttttctgc

SEQ ID NO: 1104285 - DNA, 15 bp, Homo sapiens
cttgcatcttttctg

SEQ ID NO: 1104286 - DNA, 15 bp, Homo sapiens
ccttgcatcttttct

SEQ ID NO: 1104287 - DNA, 15 bp, Homo sapiens
tccttgcatcttttc

SEQ ID NO: 1104288 - DNA, 15 bp, Homo sapiens
atccttgcatctttt

SEQ ID NO: 1104289 - DNA, 15 bp, Homo sapiens
catccttgcatcttt

SEQ ID NO: 1104290 - DNA, 15 bp, Homo sapiens
gcatccttgcatctt

SEQ ID NO: 1104291 - DNA, 15 bp, Homo sapiens
tgcatccttgcatct

SEQ ID NO: 1104292 - DNA, 15 bp, Homo sapiens
ctgcatccttgcatc

SEQ ID NO: 1104293 - DNA, 15 bp, Homo sapiens
cctgcatccttgcat

SEQ ID NO: 1104294 - DNA, 15 bp, Homo sapiens
gcctgcatccttgca

SEQ ID NO: 1104295 - DNA, 15 bp, Homo sapiens
agcctgcatccttgc

SEQ ID NO: 1104296 - DNA, 15 bp, Homo sapiens
aagcctgcatccttg

SEQ ID NO: 1104297 - DNA, 15 bp, Homo sapiens
aaagcctgcatcctt

SEQ ID NO: 1104298 - DNA, 15 bp, Homo sapiens
caaagcctgcatcct

SEQ ID NO: 1104299 - DNA, 15 bp, Homo sapiens
ccaaagcctgcatcc

SEQ ID NO: 1104300 - DNA, 15 bp, Homo sapiens
gccaaagcctgcatc

SEQ ID NO: 1104301 - DNA, 15 bp, Homo sapiens
tgccaaagcctgcat

SEQ ID NO: 1104302 - DNA, 15 bp, Homo sapiens
atgccaaagcctgca

SEQ ID NO: 1104303 - DNA, 15 bp, Homo sapiens
gatgccaaagcctgc

SEQ ID NO: 1104304 - DNA, 15 bp, Homo sapiens
agatgccaaagcctg

SEQ ID NO: 1104305 - DNA, 15 bp, Homo sapiens
aagatgccaaagcct

SEQ ID NO: 1104306 - DNA, 15 bp, Homo sapiens
taagatgccaaagcc

SEQ ID NO: 1104307 - DNA, 15 bp, Homo sapiens
ataagatgccaaagc

SEQ ID NO: 1104308 - DNA, 15 bp, Homo sapiens
aataagatgccaaag

SEQ ID NO: 1104309 - DNA, 15 bp, Homo sapiens
aaataagatgccaaa

SEQ ID NO: 1104310 - DNA, 15 bp, Homo sapiens
caaataagatgccaa

SEQ ID NO: 1104311 - DNA, 15 bp, Homo sapiens
ccaaataagatgcca

SEQ ID NO: 1104312 - DNA, 15 bp, Homo sapiens
accaaataagatgcc

SEQ ID NO: 1104313 - DNA, 15 bp, Homo sapiens
gaccaaataagatgc

SEQ ID NO: 1104314 - DNA, 15 bp, Homo sapiens
agaccaaataagatg

SEQ ID NO: 1104315 - DNA, 15 bp, Homo sapiens
cagaccaaataagat

SEQ ID NO: 1104316 - DNA, 15 bp, Homo sapiens
tcagaccaaataaga

SEQ ID NO: 1104317 - DNA, 15 bp, Homo sapiens
atcagaccaaataag

SEQ ID NO: 1104318 - DNA, 15 bp, Homo sapiens
gatcagaccaaataa

SEQ ID NO: 1104319 - DNA, 15 bp, Homo sapiens
agatcagaccaaata

SEQ ID NO: 1104320 - DNA, 15 bp, Homo sapiens
cagatcagaccaaat

SEQ ID NO: 1104321 - DNA, 15 bp, Homo sapiens
ccagatcagaccaaa

SEQ ID NO: 1104322 - DNA, 15 bp, Homo sapiens
cccagatcagaccaa

SEQ ID NO: 1104323 - DNA, 15 bp, Homo sapiens
gcccagatcagacca

SEQ ID NO: 1104324 - DNA, 15 bp, Homo sapiens
ggcccagatcagacc

SEQ ID NO: 1104325 - DNA, 15 bp, Homo sapiens
gggcccagatcagac

SEQ ID NO: 1104326 - DNA, 15 bp, Homo sapiens
ggggcccagatcaga

SEQ ID NO: 1104327 - DNA, 15 bp, Homo sapiens
tggggcccagatcag

SEQ ID NO: 1104328 - DNA, 15 bp, Homo sapiens
atggggcccagatca

SEQ ID NO: 1104329 - DNA, 15 bp, Homo sapiens
gatggggcccagatc

SEQ ID NO: 1104330 - DNA, 15 bp, Homo sapiens
tgatggggcccagat

SEQ ID NO: 1104331 - DNA, 15 bp, Homo sapiens
gtgatggggcccaga

SEQ ID NO: 1104332 - DNA, 15 bp, Homo sapiens
agtgatggggcccag

SEQ ID NO: 1104333 - DNA, 15 bp, Homo sapiens
aagtgatggggccca

SEQ ID NO: 1104334 - DNA, 15 bp, Homo sapiens
taagtgatggggccc

SEQ ID NO: 1104335 - DNA, 15 bp, Homo sapiens
ttaagtgatggggcc

SEQ ID NO: 1104336 - DNA, 15 bp, Homo sapiens
attaagtgatggggc

SEQ ID NO: 1104337 - DNA, 15 bp, Homo sapiens
cattaagtgatgggg

SEQ ID NO: 1104338 - DNA, 15 bp, Homo sapiens
tcattaagtgatggg

SEQ ID NO: 1104339 - DNA, 15 bp, Homo sapiens
ctcattaagtgatgg

SEQ ID NO: 1104340 - DNA, 15 bp, Homo sapiens
gctcattaagtgatg

SEQ ID NO: 1104341 - DNA, 15 bp, Homo sapiens
agctcattaagtgat

SEQ ID NO: 1104342 - DNA, 15 bp, Homo sapiens
cagctcattaagtga

SEQ ID NO: 1104343 - DNA, 15 bp, Homo sapiens
acagctcattaagtg

SEQ ID NO: 1104344 - DNA, 15 bp, Homo sapiens
cacagctcattaagt

SEQ ID NO: 1104345 - DNA, 15 bp, Homo sapiens
acacagctcattaag

SEQ ID NO: 1104346 - DNA, 15 bp, Homo sapiens
cacacagctcattaa

SEQ ID NO: 1104347 - DNA, 15 bp, Homo sapiens
tcacacagctcatta

SEQ ID NO: 1104348 - DNA, 15 bp, Homo sapiens
gtcacacagctcatt

SEQ ID NO: 1104349 - DNA, 15 bp, Homo sapiens
agtcacacagctcat

SEQ ID NO: 1104350 - DNA, 15 bp, Homo sapiens
aagtcacacagctca

SEQ ID NO: 1104351 - DNA, 15 bp, Homo sapiens
aaagtcacacagctc

SEQ ID NO: 1104352 - DNA, 15 bp, Homo sapiens
ggcaaagtcacacag

SEQ ID NO: 1104353 - DNA, 15 bp, Homo sapiens
aggcaaagtcacaca

SEQ ID NO: 1104354 - DNA, 15 bp, Homo sapiens
taggcaaagtcacac

SEQ ID NO: 1104355 - DNA, 15 bp, Homo sapiens
ttaggcaaagtcaca

SEQ ID NO: 1104356 - DNA, 15 bp, Homo sapiens
cttaggcaaagtcac

SEQ ID NO: 1104357 - DNA, 15 bp, Homo sapiens
acttaggcaaagtca

SEQ ID NO: 1104358 - DNA, 15 bp, Homo sapiens
aacttaggcaaagtc

SEQ ID NO: 1104359 - DNA, 15 bp, Homo sapiens
taacttaggcaaagt

SEQ ID NO: 1104360 - DNA, 15 bp, Homo sapiens
gtaacttaggcaaag

SEQ ID NO: 1104361 - DNA, 15 bp, Homo sapiens
ggtaacttaggcaaa

SEQ ID NO: 1104362 - DNA, 15 bp, Homo sapiens
aggtaacttaggcaa

SEQ ID NO: 1104363 - DNA, 15 bp, Homo sapiens
caggtaacttaggca

SEQ ID NO: 1104364 - DNA, 15 bp, Homo sapiens
gcaggtaacttaggc

SEQ ID NO: 1104365 - DNA, 15 bp, Homo sapiens
ggcaggtaacttagg

SEQ ID NO: 1104366 - DNA, 15 bp, Homo sapiens
gggcaggtaacttag

SEQ ID NO: 1104367 - DNA, 15 bp, Homo sapiens
tgggcaggtaactta

SEQ ID NO: 1104368 - DNA, 15 bp, Homo sapiens
gtgggcaggtaactt

SEQ ID NO: 1104369 - DNA, 15 bp, Homo sapiens
agtgggcaggtaact

SEQ ID NO: 1104370 - DNA, 15 bp, Homo sapiens
gagtgggcaggtaac

SEQ ID NO: 1104371 - DNA, 15 bp, Homo sapiens
agagtgggcaggtaa

SEQ ID NO: 1104372 - DNA, 15 bp, Homo sapiens
cagagtgggcaggta

SEQ ID NO: 1104373 - DNA, 15 bp, Homo sapiens
tcagagtgggcaggt

SEQ ID NO: 1104374 - DNA, 15 bp, Homo sapiens
ttcagagtgggcagg

SEQ ID NO: 1104375 - DNA, 15 bp, Homo sapiens
tttcagagtgggcag

SEQ ID NO: 1104376 - DNA, 15 bp, Homo sapiens
gtttcagagtgggca

SEQ ID NO: 1104377 - DNA, 15 bp, Homo sapiens
agtttcagagtgggc

SEQ ID NO: 1104378 - DNA, 15 bp, Homo sapiens
aagtttcagagtggg

SEQ ID NO: 1104379 - DNA, 15 bp, Homo sapiens
taagtttcagagtgg

SEQ ID NO: 1104380 - DNA, 15 bp, Homo sapiens
ctaagtttcagagtg

SEQ ID NO: 1104381 - DNA, 15 bp, Homo sapiens
actaagtttcagagt

SEQ ID NO: 1104382 - DNA, 15 bp, Homo sapiens
aactaagtttcagag

SEQ ID NO: 1104383 - DNA, 15 bp, Homo sapiens
aaactaagtttcaga

SEQ ID NO: 1104384 - DNA, 15 bp, Homo sapiens
caaactaagtttcag

SEQ ID NO: 1104385 - DNA, 15 bp, Homo sapiens
gcaaactaagtttca

SEQ ID NO: 1104386 - DNA, 15 bp, Homo sapiens
agcaaactaagtttc

SEQ ID NO: 1104387 - DNA, 15 bp, Homo sapiens
gagcaaactaagttt

SEQ ID NO: 1104388 - DNA, 15 bp, Homo sapiens
tgagcaaactaagtt

SEQ ID NO: 1104389 - DNA, 15 bp, Homo sapiens
atgagcaaactaagt

SEQ ID NO: 1104390 - DNA, 15 bp, Homo sapiens
aatgagcaaactaag

SEQ ID NO: 1104391 - DNA, 15 bp, Homo sapiens
aaatgagcaaactaa

SEQ ID NO: 1104392 - DNA, 15 bp, Homo sapiens
taaatgagcaaacta

SEQ ID NO: 1104393 - DNA, 15 bp, Homo sapiens
gtaaatgagcaaact

SEQ ID NO: 1104394 - DNA, 15 bp, Homo sapiens
tgtaaatgagcaaac

SEQ ID NO: 1104395 - DNA, 15 bp, Homo sapiens
ttgtaaatgagcaaa

SEQ ID NO: 1104396 - DNA, 15 bp, Homo sapiens
tttgtaaatgagcaa

SEQ ID NO: 1104397 - DNA, 15 bp, Homo sapiens
ctttgtaaatgagca

SEQ ID NO: 1104398 - DNA, 15 bp, Homo sapiens
actttgtaaatgagc

SEQ ID NO: 1104399 - DNA, 15 bp, Homo sapiens
cactttgtaaatgag

SEQ ID NO: 1104400 - DNA, 15 bp, Homo sapiens
ccactttgtaaatga

SEQ ID NO: 1104401 - DNA, 15 bp, Homo sapiens
cccactttgtaaatg

SEQ ID NO: 1104402 - DNA, 15 bp, Homo sapiens
ccccactttgtaaat

SEQ ID NO: 1104403 - DNA, 15 bp, Homo sapiens
tccccactttgtaaa

SEQ ID NO: 1104404 - DNA, 15 bp, Homo sapiens
atccccactttgtaa

SEQ ID NO: 1104405 - DNA, 15 bp, Homo sapiens
tatccccactttgta

SEQ ID NO: 1104406 - DNA, 15 bp, Homo sapiens
ttatccccactttgt

SEQ ID NO: 1104407 - DNA, 15 bp, Homo sapiens
attatccccactttg

SEQ ID NO: 1104408 - DNA, 15 bp, Homo sapiens
gattatccccacttt

SEQ ID NO: 1104409 - DNA, 15 bp, Homo sapiens
ggattatccccactt

SEQ ID NO: 1104410 - DNA, 15 bp, Homo sapiens
aggattatccccact

SEQ ID NO: 1104411 - DNA, 15 bp, Homo sapiens
caggattatccccac

SEQ ID NO: 1104412 - DNA, 15 bp, Homo sapiens
acaggattatcccca

SEQ ID NO: 1104413 - DNA, 15 bp, Homo sapiens
cacaggattatcccc

SEQ ID NO: 1104414 - DNA, 15 bp, Homo sapiens
tcacaggattatccc

SEQ ID NO: 1104415 - DNA, 15 bp, Homo sapiens
ctcacaggattatcc

SEQ ID NO: 1104416 - DNA, 15 bp, Homo sapiens
cctcacaggattatc

SEQ ID NO: 1104417 - DNA, 15 bp, Homo sapiens
tcctcacaggattat

SEQ ID NO: 1104418 - DNA, 15 bp, Homo sapiens
atcctcacaggatta

SEQ ID NO: 1104419 - DNA, 15 bp, Homo sapiens
aatcctcacaggatt

SEQ ID NO: 1104420 - DNA, 15 bp, Homo sapiens
taatcctcacaggat

SEQ ID NO: 1104421 - DNA, 15 bp, Homo sapiens
ttaatcctcacagga

SEQ ID NO: 1104422 - DNA, 15 bp, Homo sapiens
cttaatcctcacagg

SEQ ID NO: 1104423 - DNA, 15 bp, Homo sapiens
tcttaatcctcacag

SEQ ID NO: 1104424 - DNA, 15 bp, Homo sapiens
ttcttaatcctcaca

SEQ ID NO: 1104425 - DNA, 15 bp, Homo sapiens
tttcttaatcctcac

SEQ ID NO: 1104426 - DNA, 15 bp, Homo sapiens
ctttcttaatcctca

SEQ ID NO: 1104427 - DNA, 15 bp, Homo sapiens
actttcttaatcctc

SEQ ID NO: 1104428 - DNA, 15 bp, Homo sapiens
gactttcttaatcct

SEQ ID NO: 1104429 - DNA, 15 bp, Homo sapiens
agactttcttaatcc

SEQ ID NO: 1104430 - DNA, 15 bp, Homo sapiens
cagactttcttaatc

SEQ ID NO: 1104431 - DNA, 15 bp, Homo sapiens
tcagactttcttaat

SEQ ID NO: 1104432 - DNA, 15 bp, Homo sapiens
ttcagactttcttaa

SEQ ID NO: 1104433 - DNA, 15 bp, Homo sapiens
tttcagactttctta

SEQ ID NO: 1104434 - DNA, 15 bp, Homo sapiens
ttttcagactttctt

SEQ ID NO: 1104435 - DNA, 15 bp, Homo sapiens
tttttcagactttct

SEQ ID NO: 1104436 - DNA, 15 bp, Homo sapiens
ctttttcagactttc

SEQ ID NO: 1104437 - DNA, 15 bp, Homo sapiens
cctttttcagacttt

SEQ ID NO: 1104438 - DNA, 15 bp, Homo sapiens
acctttttcagactt

SEQ ID NO: 1104439 - DNA, 15 bp, Homo sapiens
cacctttttcagact

SEQ ID NO: 1104440 - DNA, 15 bp, Homo sapiens
gcacctttttcagac

SEQ ID NO: 1104441 - DNA, 15 bp, Homo sapiens
cgcacctttttcaga

SEQ ID NO: 1104442 - DNA, 15 bp, Homo sapiens
tcgcacctttttcag

SEQ ID NO: 1104443 - DNA, 15 bp, Homo sapiens
ttcgcacctttttca

SEQ ID NO: 1104444 - DNA, 15 bp, Homo sapiens
tttcgcacctttttc

SEQ ID NO: 1104445 - DNA, 15 bp, Homo sapiens
ctttcgcaccttttt

SEQ ID NO: 1104446 - DNA, 15 bp, Homo sapiens
cctttcgcacctttt

SEQ ID NO: 1104447 - DNA, 15 bp, Homo sapiens
ccctttcgcaccttt

SEQ ID NO: 1104448 - DNA, 15 bp, Homo sapiens
cccctttcgcacctt

SEQ ID NO: 1104449 - DNA, 15 bp, Homo sapiens
tcccctttcgcacct

SEQ ID NO: 1104450 - DNA, 15 bp, Homo sapiens
ttcccctttcgcacc

SEQ ID NO: 1104451 - DNA, 15 bp, Homo sapiens
gttcccctttcgcac

SEQ ID NO: 1104452 - DNA, 15 bp, Homo sapiens
tgttcccctttcgca

SEQ ID NO: 1104453 - DNA, 15 bp, Homo sapiens
ctgttcccctttcgc

SEQ ID NO: 1104454 - DNA, 15 bp, Homo sapiens
tctgttcccctttcg

SEQ ID NO: 1104455 - DNA, 15 bp, Homo sapiens
ctctgttcccctttc

SEQ ID NO: 1104456 - DNA, 15 bp, Homo sapiens
tctctgttccccttt

SEQ ID NO: 1104457 - DNA, 15 bp, Homo sapiens
ttctctgttcccctt

SEQ ID NO: 1104458 - DNA, 15 bp, Homo sapiens
gttctctgttcccct

SEQ ID NO: 1104459 - DNA, 15 bp, Homo sapiens
tgttctctgttcccc

SEQ ID NO: 1104460 - DNA, 15 bp, Homo sapiens
ttgttctctgttccc

SEQ ID NO: 1104461 - DNA, 15 bp, Homo sapiens
cttgttctctgttcc

SEQ ID NO: 1104462 - DNA, 15 bp, Homo sapiens
acttgttctctgttc

SEQ ID NO: 1104463 - DNA, 15 bp, Homo sapiens
gacttgttctctgtt

SEQ ID NO: 1104464 - DNA, 15 bp, Homo sapiens
ggacttgttctctgt

SEQ ID NO: 1104465 - DNA, 15 bp, Homo sapiens
aggacttgttctctg

SEQ ID NO: 1104466 - DNA, 15 bp, Homo sapiens
aaggacttgttctct

SEQ ID NO: 1104467 - DNA, 15 bp, Homo sapiens
gaaggacttgttctc

SEQ ID NO: 1104468 - DNA, 15 bp, Homo sapiens
ggaaggacttgttct

SEQ ID NO: 1104469 - DNA, 15 bp, Homo sapiens
aggaaggacttgttc

SEQ ID NO: 1104470 - DNA, 15 bp, Homo sapiens
aaggaaggacttgtt

SEQ ID NO: 1104471 - DNA, 15 bp, Homo sapiens
gaaggaaggacttgt

SEQ ID NO: 1104472 - DNA, 15 bp, Homo sapiens
tgaaggaaggacttg

SEQ ID NO: 1104473 - DNA, 15 bp, Homo sapiens
ttgaaggaaggactt

SEQ ID NO: 1104474 - DNA, 15 bp, Homo sapiens
cttgaaggaaggact

SEQ ID NO: 1104475 - DNA, 15 bp, Homo sapiens
ccttgaaggaaggac

SEQ ID NO: 1104476 - DNA, 15 bp, Homo sapiens
accttgaaggaagga

SEQ ID NO: 1104477 - DNA, 15 bp, Homo sapiens
caccttgaaggaagg

SEQ ID NO: 1104478 - DNA, 15 bp, Homo sapiens
ccaccttgaaggaag

SEQ ID NO: 1104479 - DNA, 15 bp, Homo sapiens
cccaccttgaaggaa

SEQ ID NO: 1104480 - DNA, 15 bp, Homo sapiens
tcccaccttgaagga

SEQ ID NO: 1104481 - DNA, 15 bp, Homo sapiens
atcccaccttgaagg

SEQ ID NO: 1104482 - DNA, 15 bp, Homo sapiens
catcccaccttgaag

SEQ ID NO: 1104483 - DNA, 15 bp, Homo sapiens
gcatcccaccttgaa

SEQ ID NO: 1104484 - DNA, 15 bp, Homo sapiens
agcatcccaccttga

SEQ ID NO: 1104485 - DNA, 15 bp, Homo sapiens
cagcatcccaccttg

SEQ ID NO: 1104486 - DNA, 15 bp, Homo sapiens
tcagcatcccacctt

SEQ ID NO: 1104487 - DNA, 15 bp, Homo sapiens
ttcagcatcccacct

SEQ ID NO: 1104488 - DNA, 15 bp, Homo sapiens
cttcagcatcccacc

SEQ ID NO: 1104489 - DNA, 15 bp, Homo sapiens
ccttcagcatcccac

SEQ ID NO: 1104490 - DNA, 15 bp, Homo sapiens
gccttcagcatccca

SEQ ID NO: 1104491 - DNA, 15 bp, Homo sapiens
ggccttcagcatccc

SEQ ID NO: 1104492 - DNA, 15 bp, Homo sapiens
gggccttcagcatcc

SEQ ID NO: 1104493 - DNA, 15 bp, Homo sapiens
tgggccttcagcatc

SEQ ID NO: 1104494 - DNA, 15 bp, Homo sapiens
atgggccttcagcat

SEQ ID NO: 1104495 - DNA, 15 bp, Homo sapiens
gatgggccttcagca

SEQ ID NO: 1104496 - DNA, 15 bp, Homo sapiens
ggatgggccttcagc

SEQ ID NO: 1104497 - DNA, 15 bp, Homo sapiens
aggatgggccttcag

SEQ ID NO: 1104498 - DNA, 15 bp, Homo sapiens
taggatgggccttca

SEQ ID NO: 1104499 - DNA, 15 bp, Homo sapiens
ctaggatgggccttc

SEQ ID NO: 1104500 - DNA, 15 bp, Homo sapiens
gctaggatgggcctt

SEQ ID NO: 1104501 - DNA, 15 bp, Homo sapiens
agctaggatgggcct

SEQ ID NO: 1104502 - DNA, 15 bp, Homo sapiens
gagctaggatgggcc

SEQ ID NO: 1104503 - DNA, 15 bp, Homo sapiens
ggagctaggatgggc

SEQ ID NO: 1104504 - DNA, 15 bp, Homo sapiens
aggagctaggatggg

SEQ ID NO: 1104505 - DNA, 15 bp, Homo sapiens
gaggagctaggatgg

SEQ ID NO: 1104506 - DNA, 15 bp, Homo sapiens
tgaggagctaggatg

SEQ ID NO: 1104507 - DNA, 15 bp, Homo sapiens
gtgaggagctaggat

SEQ ID NO: 1104508 - DNA, 15 bp, Homo sapiens
tgtgaggagctagga

SEQ ID NO: 1104509 - DNA, 15 bp, Homo sapiens
ctgtgaggagctagg

SEQ ID NO: 1104510 - DNA, 15 bp, Homo sapiens
cctgtgaggagctag

SEQ ID NO: 1104511 - DNA, 15 bp, Homo sapiens
acctgtgaggagcta

SEQ ID NO: 1104512 - DNA, 15 bp, Homo sapiens
cacctgtgaggagct

SEQ ID NO: 1104513 - DNA, 15 bp, Homo sapiens
gcacctgtgaggagc

SEQ ID NO: 1104514 - DNA, 15 bp, Homo sapiens
agcacctgtgaggag

SEQ ID NO: 1104515 - DNA, 15 bp, Homo sapiens
cagcacctgtgagga

SEQ ID NO: 1104516 - DNA, 15 bp, Homo sapiens
gcagcacctgtgagg

SEQ ID NO: 1104517 - DNA, 15 bp, Homo sapiens
agcagcacctgtgag

SEQ ID NO: 1104518 - DNA, 15 bp, Homo sapiens
aagcagcacctgtga

SEQ ID NO: 1104519 - DNA, 15 bp, Homo sapiens
caagcagcacctgtg

SEQ ID NO: 1104520 - DNA, 15 bp, Homo sapiens
ccaagcagcacctgt

SEQ ID NO: 1104521 - DNA, 15 bp, Homo sapiens
gccaagcagcacctg

SEQ ID NO: 1104522 - DNA, 15 bp, Homo sapiens
tgccaagcagcacct

SEQ ID NO: 1104523 - DNA, 15 bp, Homo sapiens
atgccaagcagcacc

SEQ ID NO: 1104524 - DNA, 15 bp, Homo sapiens
catgccaagcagcac

SEQ ID NO: 1104525 - DNA, 15 bp, Homo sapiens
ccatgccaagcagca

SEQ ID NO: 1104526 - DNA, 15 bp, Homo sapiens
tccatgccaagcagc

SEQ ID NO: 1104527 - DNA, 15 bp, Homo sapiens
ctccatgccaagcag

SEQ ID NO: 1104528 - DNA, 15 bp, Homo sapiens
tctccatgccaagca

SEQ ID NO: 1104529 - DNA, 15 bp, Homo sapiens
ttctccatgccaagc

SEQ ID NO: 1104530 - DNA, 15 bp, Homo sapiens
tttctccatgccaag

SEQ ID NO: 1104531 - DNA, 15 bp, Homo sapiens
gtttctccatgccaa

SEQ ID NO: 1104532 - DNA, 15 bp, Homo sapiens
tgtttctccatgcca

SEQ ID NO: 1104533 - DNA, 15 bp, Homo sapiens
gtgtttctccatgcc

SEQ ID NO: 1104534 - DNA, 15 bp, Homo sapiens
tgtgtttctccatgc

SEQ ID NO: 1104535 - DNA, 15 bp, Homo sapiens
gtgtgtttctccatg

SEQ ID NO: 1104536 - DNA, 15 bp, Homo sapiens
tgtgtgtttctccat

SEQ ID NO: 1104537 - DNA, 15 bp, Homo sapiens
gtgtgtgtttctcca

SEQ ID NO: 1104538 - DNA, 15 bp, Homo sapiens
ggtgtgtgtttctcc

SEQ ID NO: 1104539 - DNA, 15 bp, Homo sapiens
tggtgtgtgtttctc

SEQ ID NO: 1104540 - DNA, 15 bp, Homo sapiens
aatggtgtgtgtttc

SEQ ID NO: 1104541 - DNA, 15 bp, Homo sapiens
taatggtgtgtgttt

SEQ ID NO: 1104542 - DNA, 15 bp, Homo sapiens
ataatggtgtgtgtt

SEQ ID NO: 1104543 - DNA, 15 bp, Homo sapiens
gataatggtgtgtgt

SEQ ID NO: 1104544 - DNA, 15 bp, Homo sapiens
agataatggtgtgtg

SEQ ID NO: 1104545 - DNA, 15 bp, Homo sapiens
gagataatggtgtgt

SEQ ID NO: 1104546 - DNA, 15 bp, Homo sapiens
ggagataatggtgtg

SEQ ID NO: 1104547 - DNA, 15 bp, Homo sapiens
tggagataatggtgt

SEQ ID NO: 1104548 - DNA, 15 bp, Homo sapiens
ctggagataatggtg

SEQ ID NO: 1104549 - DNA, 15 bp, Homo sapiens
tctggagataatggt

SEQ ID NO: 1104550 - DNA, 15 bp, Homo sapiens
atctggagataatgg

SEQ ID NO: 1104551 - DNA, 15 bp, Homo sapiens
catctggagataatg

SEQ ID NO: 1104552 - DNA, 15 bp, Homo sapiens
gcatctggagataat

SEQ ID NO: 1104553 - DNA, 15 bp, Homo sapiens
agcatctggagataa

SEQ ID NO: 1104554 - DNA, 15 bp, Homo sapiens
gagcatctggagata

SEQ ID NO: 1104555 - DNA, 15 bp, Homo sapiens
tgagcatctggagat

SEQ ID NO: 1104556 - DNA, 15 bp, Homo sapiens
ctgagcatctggaga

SEQ ID NO: 1104557 - DNA, 15 bp, Homo sapiens
actgagcatctggag

SEQ ID NO: 1104558 - DNA, 15 bp, Homo sapiens
tactgagcatctgga

SEQ ID NO: 1104559 - DNA, 15 bp, Homo sapiens
ttactgagcatctgg

SEQ ID NO: 1104560 - DNA, 15 bp, Homo sapiens
cttactgagcatctg

SEQ ID NO: 1104561 - DNA, 15 bp, Homo sapiens
gcttactgagcatct

SEQ ID NO: 1104562 - DNA, 15 bp, Homo sapiens
tgcttactgagcatc

SEQ ID NO: 1104563 - DNA, 15 bp, Homo sapiens
ttgcttactgagcat

SEQ ID NO: 1104564 - DNA, 15 bp, Homo sapiens
attgcttactgagca

SEQ ID NO: 1104565 - DNA, 15 bp, Homo sapiens
gattgcttactgagc

SEQ ID NO: 1104566 - DNA, 15 bp, Homo sapiens
tgattgcttactgag

SEQ ID NO: 1104567 - DNA, 15 bp, Homo sapiens
gtgattgcttactga

SEQ ID NO: 1104568 - DNA, 15 bp, Homo sapiens
agtgattgcttactg

SEQ ID NO: 1104569 - DNA, 15 bp, Homo sapiens
tagtgattgcttact

SEQ ID NO: 1104570 - DNA, 15 bp, Homo sapiens
atagtgattgcttac

SEQ ID NO: 1104571 - DNA, 15 bp, Homo sapiens
aatagtgattgctta

SEQ ID NO: 1104572 - DNA, 15 bp, Homo sapiens
taatagtgattgctt

SEQ ID NO: 1104573 - DNA, 15 bp, Homo sapiens
ctaatagtgattgct

SEQ ID NO: 1104574 - DNA, 15 bp, Homo sapiens
tctaatagtgattgc

SEQ ID NO: 1104575 - DNA, 15 bp, Homo sapiens
atctaatagtgattg

SEQ ID NO: 1104576 - DNA, 15 bp, Homo sapiens
gatctaatagtgatt

SEQ ID NO: 1104577 - DNA, 15 bp, Homo sapiens
tgatctaatagtgat

SEQ ID NO: 1104578 - DNA, 15 bp, Homo sapiens
ctgatctaatagtga

SEQ ID NO: 1104579 - DNA, 15 bp, Homo sapiens
actgatctaatagtg

SEQ ID NO: 1104580 - DNA, 15 bp, Homo sapiens
tactgatctaatagt

SEQ ID NO: 1104581 - DNA, 15 bp, Homo sapiens
atactgatctaatag

SEQ ID NO: 1104582 - DNA, 15 bp, Homo sapiens
aatactgatctaata

SEQ ID NO: 1104583 - DNA, 15 bp, Homo sapiens
gaatactgatctaat

SEQ ID NO: 1104584 - DNA, 15 bp, Homo sapiens
tgaatactgatctaa

SEQ ID NO: 1104585 - DNA, 15 bp, Homo sapiens
ctgaatactgatcta

SEQ ID NO: 1104586 - DNA, 15 bp, Homo sapiens
actgaatactgatct

SEQ ID NO: 1104587 - DNA, 15 bp, Homo sapiens
cactgaatactgatc

SEQ ID NO: 1104588 - DNA, 15 bp, Homo sapiens
tcactgaatactgat

SEQ ID NO: 1104589 - DNA, 15 bp, Homo sapiens
atcactgaatactga

SEQ ID NO: 1104590 - DNA, 15 bp, Homo sapiens
aatcactgaatactg

SEQ ID NO: 1104591 - DNA, 15 bp, Homo sapiens
gaatcactgaatact

SEQ ID NO: 1104592 - DNA, 15 bp, Homo sapiens
ggaatcactgaatac

SEQ ID NO: 1104593 - DNA, 15 bp, Homo sapiens
gggaatcactgaata

SEQ ID NO: 1104594 - DNA, 15 bp, Homo sapiens
tgggaatcactgaat

SEQ ID NO: 1104595 - DNA, 15 bp, Homo sapiens
ctgggaatcactgaa

SEQ ID NO: 1104596 - DNA, 15 bp, Homo sapiens
tctgggaatcactga

SEQ ID NO: 1104597 - DNA, 15 bp, Homo sapiens
ctctgggaatcactg

SEQ ID NO: 1104598 - DNA, 15 bp, Homo sapiens
tctctgggaatcact

SEQ ID NO: 1104599 - DNA, 15 bp, Homo sapiens
gtctctgggaatcac

SEQ ID NO: 1104600 - DNA, 15 bp, Homo sapiens
tgtctctgggaatca

SEQ ID NO: 1104601 - DNA, 15 bp, Homo sapiens
ctgtctctgggaatc

SEQ ID NO: 1104602 - DNA, 15 bp, Homo sapiens
cctgtctctgggaat

SEQ ID NO: 1104603 - DNA, 15 bp, Homo sapiens
ccctgtctctgggaa

SEQ ID NO: 1104604 - DNA, 15 bp, Homo sapiens
cccctgtctctggga

SEQ ID NO: 1104605 - DNA, 15 bp, Homo sapiens
gcccctgtctctggg

SEQ ID NO: 1104606 - DNA, 15 bp, Homo sapiens
ggcccctgtctctgg

SEQ ID NO: 1104607 - DNA, 15 bp, Homo sapiens
aggcccctgtctctg

SEQ ID NO: 1104608 - DNA, 15 bp, Homo sapiens
taggcccctgtctct

SEQ ID NO: 1104609 - DNA, 15 bp, Homo sapiens
ttaggcccctgtctc

SEQ ID NO: 1104610 - DNA, 15 bp, Homo sapiens
cttaggcccctgtct

SEQ ID NO: 1104611 - DNA, 15 bp, Homo sapiens
ccttaggcccctgtc

SEQ ID NO: 1104612 - DNA, 15 bp, Homo sapiens
tccttaggcccctgt

SEQ ID NO: 1104613 - DNA, 15 bp, Homo sapiens
ttccttaggcccctg

SEQ ID NO: 1104614 - DNA, 15 bp, Homo sapiens
attccttaggcccct

SEQ ID NO: 1104615 - DNA, 15 bp, Homo sapiens
aattccttaggcccc

SEQ ID NO: 1104616 - DNA, 15 bp, Homo sapiens
aaattccttaggccc

SEQ ID NO: 1104617 - DNA, 15 bp, Homo sapiens
gaaattccttaggcc

SEQ ID NO: 1104618 - DNA, 15 bp, Homo sapiens
tgaaattccttaggc

SEQ ID NO: 1104619 - DNA, 15 bp, Homo sapiens
ctgaaattccttagg

SEQ ID NO: 1104620 - DNA, 15 bp, Homo sapiens
tctgaaattccttag

SEQ ID NO: 1104621 - DNA, 15 bp, Homo sapiens
ctctgaaattcctta

SEQ ID NO: 1104622 - DNA, 15 bp, Homo sapiens
cctctgaaattcctt

SEQ ID NO: 1104623 - DNA, 15 bp, Homo sapiens
tcctctgaaattcct

SEQ ID NO: 1104624 - DNA, 15 bp, Homo sapiens
atcctctgaaattcc

SEQ ID NO: 1104625 - DNA, 15 bp, Homo sapiens
catcctctgaaattc

SEQ ID NO: 1104626 - DNA, 15 bp, Homo sapiens
gcatcctctgaaatt

SEQ ID NO: 1104627 - DNA, 15 bp, Homo sapiens
ggcatcctctgaaat

SEQ ID NO: 1104628 - DNA, 15 bp, Homo sapiens
cggcatcctctgaaa

SEQ ID NO: 1104629 - DNA, 15 bp, Homo sapiens
acggcatcctctgaa

SEQ ID NO: 1104630 - DNA, 15 bp, Homo sapiens
cacggcatcctctga

SEQ ID NO: 1104631 - DNA, 15 bp, Homo sapiens
gcacggcatcctctg

SEQ ID NO: 1104632 - DNA, 15 bp, Homo sapiens
tgcacggcatcctct

SEQ ID NO: 1104633 - DNA, 15 bp, Homo sapiens
ctgcacggcatcctc

SEQ ID NO: 1104634 - DNA, 15 bp, Homo sapiens
tctgcacggcatcct

SEQ ID NO: 1104635 - DNA, 15 bp, Homo sapiens
ctctgcacggcatcc

SEQ ID NO: 1104636 - DNA, 15 bp, Homo sapiens
tctctgcacggcatc

SEQ ID NO: 1104637 - DNA, 15 bp, Homo sapiens
ttctctgcacggcat

SEQ ID NO: 1104638 - DNA, 15 bp, Homo sapiens
tttctctgcacggca

SEQ ID NO: 1104639 - DNA, 15 bp, Homo sapiens
ttttctctgcacggc

SEQ ID NO: 1104640 - DNA, 15 bp, Homo sapiens
attttctctgcacgg

SEQ ID NO: 1104641 - DNA, 15 bp, Homo sapiens
cattttctctgcacg

SEQ ID NO: 1104642 - DNA, 15 bp, Homo sapiens
tcattttctctgcac

SEQ ID NO: 1104643 - DNA, 15 bp, Homo sapiens
ctcattttctctgca

SEQ ID NO: 1104644 - DNA, 15 bp, Homo sapiens
cctcattttctctgc

SEQ ID NO: 1104645 - DNA, 15 bp, Homo sapiens
gcctcattttctctg

SEQ ID NO: 1104646 - DNA, 15 bp, Homo sapiens
agcctcattttctct

SEQ ID NO: 1104647 - DNA, 15 bp, Homo sapiens
cagcctcattttctc

SEQ ID NO: 1104648 - DNA, 15 bp, Homo sapiens
ccagcctcattttct

SEQ ID NO: 1104649 - DNA, 15 bp, Homo sapiens
cccagcctcattttc

SEQ ID NO: 1104650 - DNA, 15 bp, Homo sapiens
acccagcctcatttt

SEQ ID NO: 1104651 - DNA, 15 bp, Homo sapiens
cacccagcctcattt

SEQ ID NO: 1104652 - DNA, 15 bp, Homo sapiens
tcacccagcctcatt

SEQ ID NO: 1104653 - DNA, 15 bp, Homo sapiens
ttcacccagcctcat

SEQ ID NO: 1104654 - DNA, 15 bp, Homo sapiens
tttcacccagcctca

SEQ ID NO: 1104655 - DNA, 15 bp, Homo sapiens
ctttcacccagcctc

SEQ ID NO: 1104656 - DNA, 15 bp, Homo sapiens
cctttcacccagcct

SEQ ID NO: 1104657 - DNA, 15 bp, Homo sapiens
ccctttcacccagcc

SEQ ID NO: 1104658 - DNA, 15 bp, Homo sapiens
tccctttcacccagc

SEQ ID NO: 1104659 - DNA, 15 bp, Homo sapiens
ttccctttcacccag

SEQ ID NO: 1104660 - DNA, 15 bp, Homo sapiens
cttccctttcaccca

SEQ ID NO: 1104661 - DNA, 15 bp, Homo sapiens
ccttccctttcaccc

SEQ ID NO: 1104662 - DNA, 15 bp, Homo sapiens
cccttccctttcacc

SEQ ID NO: 1104663 - DNA, 15 bp, Homo sapiens
tcccttccctttcac

SEQ ID NO: 1104664 - DNA, 15 bp, Homo sapiens
ctcccttccctttca

SEQ ID NO: 1104665 - DNA, 15 bp, Homo sapiens
cctcccttccctttc

SEQ ID NO: 1104666 - DNA, 15 bp, Homo sapiens
ccctcccttcccttt

SEQ ID NO: 1104667 - DNA, 15 bp, Homo sapiens
cccctcccttccctt

SEQ ID NO: 1104668 - DNA, 15 bp, Homo sapiens
tcccctcccttccct

SEQ ID NO: 1104669 - DNA, 15 bp, Homo sapiens
ttcccctcccttccc

SEQ ID NO: 1104670 - DNA, 15 bp, Homo sapiens
attcccctcccttcc

SEQ ID NO: 1104671 - DNA, 15 bp, Homo sapiens
cattcccctcccttc

SEQ ID NO: 1104672 - DNA, 15 bp, Homo sapiens
acattcccctccctt

SEQ ID NO: 1104673 - DNA, 15 bp, Homo sapiens
aacattcccctccct

SEQ ID NO: 1104674 - DNA, 15 bp, Homo sapiens
gaacattcccctccc

SEQ ID NO: 1104675 - DNA, 15 bp, Homo sapiens
ggaacattcccctcc

SEQ ID NO: 1104676 - DNA, 15 bp, Homo sapiens
gggaacattcccctc

SEQ ID NO: 1104677 - DNA, 15 bp, Homo sapiens
agggaacattcccct

SEQ ID NO: 1104678 - DNA, 15 bp, Homo sapiens
aagggaacattcccc

SEQ ID NO: 1104679 - DNA, 15 bp, Homo sapiens
caagggaacattccc

SEQ ID NO: 1104680 - DNA, 15 bp, Homo sapiens
acaagggaacattcc

SEQ ID NO: 1104681 - DNA, 15 bp, Homo sapiens
gacaagggaacattc

SEQ ID NO: 1104682 - DNA, 15 bp, Homo sapiens
ggacaagggaacatt

SEQ ID NO: 1104683 - DNA, 15 bp, Homo sapiens
gggacaagggaacat

SEQ ID NO: 1104684 - DNA, 15 bp, Homo sapiens
agggacaagggaaca

SEQ ID NO: 1104685 - DNA, 15 bp, Homo sapiens
cagggacaagggaac

SEQ ID NO: 1104686 - DNA, 15 bp, Homo sapiens
tcagggacaagggaa

SEQ ID NO: 1104687 - DNA, 15 bp, Homo sapiens
ctcagggacaaggga

SEQ ID NO: 1104688 - DNA, 15 bp, Homo sapiens
cctcagggacaaggg

SEQ ID NO: 1104689 - DNA, 15 bp, Homo sapiens
gcctcagggacaagg

SEQ ID NO: 1104690 - DNA, 15 bp, Homo sapiens
ggcctcagggacaag

SEQ ID NO: 1104691 - DNA, 15 bp, Homo sapiens
aggcctcagggacaa

SEQ ID NO: 1104692 - DNA, 15 bp, Homo sapiens
gaggcctcagggaca

SEQ ID NO: 1104693 - DNA, 15 bp, Homo sapiens
ggaggcctcagggac

SEQ ID NO: 1104694 - DNA, 15 bp, Homo sapiens
gggaggcctcaggga

SEQ ID NO: 1104695 - DNA, 15 bp, Homo sapiens
ggggaggcctcaggg

SEQ ID NO: 1104696 - DNA, 15 bp, Homo sapiens
gggggaggcctcagg

SEQ ID NO: 1104697 - DNA, 15 bp, Homo sapiens
agggggaggcctcag

SEQ ID NO: 1104698 - DNA, 15 bp, Homo sapiens
cagggggaggcctca

SEQ ID NO: 1104699 - DNA, 15 bp, Homo sapiens
gcagggggaggcctc

SEQ ID NO: 1104700 - DNA, 15 bp, Homo sapiens
agcagggggaggcct

SEQ ID NO: 1104701 - DNA, 15 bp, Homo sapiens
aagcagggggaggcc

SEQ ID NO: 1104702 - DNA, 15 bp, Homo sapiens
gaagcagggggaggc

SEQ ID NO: 1104703 - DNA, 15 bp, Homo sapiens
agaagcagggggagg

SEQ ID NO: 1104704 - DNA, 15 bp, Homo sapiens
cagaagcagggggag

SEQ ID NO: 1104705 - DNA, 15 bp, Homo sapiens
gcagaagcaggggga

SEQ ID NO: 1104706 - DNA, 15 bp, Homo sapiens
agcagaagcaggggg

SEQ ID NO: 1104707 - DNA, 15 bp, Homo sapiens
cagcagaagcagggg

SEQ ID NO: 1104708 - DNA, 15 bp, Homo sapiens
tcagcagaagcaggg

SEQ ID NO: 1104709 - DNA, 15 bp, Homo sapiens
ttcagcagaagcagg

SEQ ID NO: 1104710 - DNA, 15 bp, Homo sapiens
gttcagcagaagcag

SEQ ID NO: 1104711 - DNA, 15 bp, Homo sapiens
agttcagcagaagca

SEQ ID NO: 1104712 - DNA, 15 bp, Homo sapiens
cagttcagcagaagc

SEQ ID NO: 1104713 - DNA, 15 bp, Homo sapiens
ccagttcagcagaag

SEQ ID NO: 1104714 - DNA, 15 bp, Homo sapiens
gccagttcagcagaa

SEQ ID NO: 1104715 - DNA, 15 bp, Homo sapiens
agccagttcagcaga

SEQ ID NO: 1104716 - DNA, 15 bp, Homo sapiens
tagccagttcagcag

SEQ ID NO: 1104717 - DNA, 15 bp, Homo sapiens
gtagccagttcagca

SEQ ID NO: 1104718 - DNA, 15 bp, Homo sapiens
ggtagccagttcagc

SEQ ID NO: 1104719 - DNA, 15 bp, Homo sapiens
aggtagccagttcag

SEQ ID NO: 1104720 - DNA, 15 bp, Homo sapiens
caggtagccagttca

SEQ ID NO: 1104721 - DNA, 15 bp, Homo sapiens
acaggtagccagttc

SEQ ID NO: 1104722 - DNA, 15 bp, Homo sapiens
cacaggtagccagtt

SEQ ID NO: 1104723 - DNA, 15 bp, Homo sapiens
ccacaggtagccagt

SEQ ID NO: 1104724 - DNA, 15 bp, Homo sapiens
cccacaggtagccag

SEQ ID NO: 1104725 - DNA, 15 bp, Homo sapiens
tcccacaggtagcca

SEQ ID NO: 1104726 - DNA, 15 bp, Homo sapiens
ttcccacaggtagcc

SEQ ID NO: 1104727 - DNA, 15 bp, Homo sapiens
cttcccacaggtagc

SEQ ID NO: 1104728 - DNA, 15 bp, Homo sapiens
acttcccacaggtag

SEQ ID NO: 1104729 - DNA, 15 bp, Homo sapiens
cacttcccacaggta

SEQ ID NO: 1104730 - DNA, 15 bp, Homo sapiens
acacttcccacaggt

SEQ ID NO: 1104731 - DNA, 15 bp, Homo sapiens
cacacttcccacagg

SEQ ID NO: 1104732 - DNA, 15 bp, Homo sapiens
ccacacttcccacag

SEQ ID NO: 1104733 - DNA, 15 bp, Homo sapiens
gccacacttcccaca

SEQ ID NO: 1104734 - DNA, 15 bp, Homo sapiens
ggccacacttcccac

SEQ ID NO: 1104735 - DNA, 15 bp, Homo sapiens
gggccacacttccca

SEQ ID NO: 1104736 - DNA, 15 bp, Homo sapiens
agggccacacttccc

SEQ ID NO: 1104737 - DNA, 15 bp, Homo sapiens
gagggccacacttcc

SEQ ID NO: 1104738 - DNA, 15 bp, Homo sapiens
tgagggccacacttc

SEQ ID NO: 1104739 - DNA, 15 bp, Homo sapiens
ctgagggccacactt

SEQ ID NO: 1104740 - DNA, 15 bp, Homo sapiens
tctgagggccacact

SEQ ID NO: 1104741 - DNA, 15 bp, Homo sapiens
atctgagggccacac

SEQ ID NO: 1104742 - DNA, 15 bp, Homo sapiens
gatctgagggccaca

SEQ ID NO: 1104743 - DNA, 15 bp, Homo sapiens
agatctgagggccac

SEQ ID NO: 1104744 - DNA, 15 bp, Homo sapiens
gagatctgagggcca

SEQ ID NO: 1104745 - DNA, 15 bp, Homo sapiens
agagatctgagggcc

SEQ ID NO: 1104746 - DNA, 15 bp, Homo sapiens
tagagatctgagggc

SEQ ID NO: 1104747 - DNA, 15 bp, Homo sapiens
ttagagatctgaggg

SEQ ID NO: 1104748 - DNA, 15 bp, Homo sapiens
tttagagatctgagg

SEQ ID NO: 1104749 - DNA, 15 bp, Homo sapiens
atttagagatctgag

SEQ ID NO: 1104750 - DNA, 15 bp, Homo sapiens
catttagagatctga

SEQ ID NO: 1104751 - DNA, 15 bp, Homo sapiens
ccatttagagatctg

SEQ ID NO: 1104752 - DNA, 15 bp, Homo sapiens
cccatttagagatct

SEQ ID NO: 1104753 - DNA, 15 bp, Homo sapiens
tcccatttagagatc

SEQ ID NO: 1104754 - DNA, 15 bp, Homo sapiens
ctcccatttagagat

SEQ ID NO: 1104755 - DNA, 15 bp, Homo sapiens
cctcccatttagaga

SEQ ID NO: 1104756 - DNA, 15 bp, Homo sapiens
ccctcccatttagag

SEQ ID NO: 1104757 - DNA, 15 bp, Homo sapiens
tccctcccatttaga

SEQ ID NO: 1104758 - DNA, 15 bp, Homo sapiens
ttccctcccatttag

SEQ ID NO: 1104759 - DNA, 15 bp, Homo sapiens
tttccctcccattta

SEQ ID NO: 1104760 - DNA, 15 bp, Homo sapiens
gtttccctcccattt

SEQ ID NO: 1104761 - DNA, 15 bp, Homo sapiens
ggtttccctcccatt

SEQ ID NO: 1104762 - DNA, 15 bp, Homo sapiens
tggtttccctcccat

SEQ ID NO: 1104763 - DNA, 15 bp, Homo sapiens
ttggtttccctccca

SEQ ID NO: 1104764 - DNA, 15 bp, Homo sapiens
cttggtttccctccc

SEQ ID NO: 1104765 - DNA, 15 bp, Homo sapiens
ccttggtttccctcc

SEQ ID NO: 1104766 - DNA, 15 bp, Homo sapiens
accttggtttccctc

SEQ ID NO: 1104767 - DNA, 15 bp, Homo sapiens
gaccttggtttccct

SEQ ID NO: 1104768 - DNA, 15 bp, Homo sapiens
agaccttggtttccc

SEQ ID NO: 1104769 - DNA, 15 bp, Homo sapiens
gagaccttggtttcc

SEQ ID NO: 1104770 - DNA, 15 bp, Homo sapiens
agagaccttggtttc

SEQ ID NO: 1104771 - DNA, 15 bp, Homo sapiens
aagagaccttggttt

SEQ ID NO: 1104772 - DNA, 15 bp, Homo sapiens
taagagaccttggtt

SEQ ID NO: 1104773 - DNA, 15 bp, Homo sapiens
ttaagagaccttggt

SEQ ID NO: 1104774 - DNA, 15 bp, Homo sapiens
cttaagagaccttgg

SEQ ID NO: 1104775 - DNA, 15 bp, Homo sapiens
ccttaagagaccttg

SEQ ID NO: 1104776 - DNA, 15 bp, Homo sapiens
cccttaagagacctt

SEQ ID NO: 1104777 - DNA, 15 bp, Homo sapiens
acccttaagagacct

SEQ ID NO: 1104778 - DNA, 15 bp, Homo sapiens
aacccttaagagacc

SEQ ID NO: 1104779 - DNA, 15 bp, Homo sapiens
aaacccttaagagac

SEQ ID NO: 1104780 - DNA, 15 bp, Homo sapiens
taaacccttaagaga

SEQ ID NO: 1104781 - DNA, 15 bp, Homo sapiens
gtaaacccttaagag

SEQ ID NO: 1104782 - DNA, 15 bp, Homo sapiens
agtaaacccttaaga

SEQ ID NO: 1104783 - DNA, 15 bp, Homo sapiens
cagtaaacccttaag

SEQ ID NO: 1104784 - DNA, 15 bp, Homo sapiens
gcagtaaacccttaa

SEQ ID NO: 1104785 - DNA, 15 bp, Homo sapiens
tgcagtaaaccctta

SEQ ID NO: 1104786 - DNA, 15 bp, Homo sapiens
atgcagtaaaccctt

SEQ ID NO: 1104787 - DNA, 15 bp, Homo sapiens
tatgcagtaaaccct

SEQ ID NO: 1104788 - DNA, 15 bp, Homo sapiens
atatgcagtaaaccc

SEQ ID NO: 1104789 - DNA, 15 bp, Homo sapiens
tatatgcagtaaacc

SEQ ID NO: 1104790 - DNA, 15 bp, Homo sapiens
ttatatgcagtaaac

SEQ ID NO: 1104791 - DNA, 15 bp, Homo sapiens
cttatatgcagtaaa

SEQ ID NO: 1104792 - DNA, 15 bp, Homo sapiens
ccttatatgcagtaa

SEQ ID NO: 1104793 - DNA, 15 bp, Homo sapiens
accttatatgcagta

SEQ ID NO: 1104794 - DNA, 15 bp, Homo sapiens
caccttatatgcagt

SEQ ID NO: 1104795 - DNA, 15 bp, Homo sapiens
gcaccttatatgcag

SEQ ID NO: 1104796 - DNA, 15 bp, Homo sapiens
agcaccttatatgca

SEQ ID NO: 1104797 - DNA, 15 bp, Homo sapiens
gagcaccttatatgc

SEQ ID NO: 1104798 - DNA, 15 bp, Homo sapiens
tgagcaccttatatg

SEQ ID NO: 1104799 - DNA, 15 bp, Homo sapiens
ctgagcaccttatat

SEQ ID NO: 1104800 - DNA, 15 bp, Homo sapiens
tctgagcaccttata

SEQ ID NO: 1104801 - DNA, 15 bp, Homo sapiens
ctctgagcaccttat

SEQ ID NO: 1104802 - DNA, 15 bp, Homo sapiens
actctgagcacctta

SEQ ID NO: 1104803 - DNA, 15 bp, Homo sapiens
cactctgagcacctt

SEQ ID NO: 1104804 - DNA, 15 bp, Homo sapiens
acactctgagcacct

SEQ ID NO: 1104805 - DNA, 15 bp, Homo sapiens
gacactctgagcacc

SEQ ID NO: 1104806 - DNA, 15 bp, Homo sapiens
cgtgtccctagatga

SEQ ID NO: 1104807 - DNA, 15 bp, Homo sapiens
acgtgtccctagatg

SEQ ID NO: 1104808 - DNA, 15 bp, Homo sapiens
aacgtgtccctagat

SEQ ID NO: 1104809 - DNA, 15 bp, Homo sapiens
taacgtgtccctaga

SEQ ID NO: 1104810 - DNA, 15 bp, Homo sapiens
ctaacgtgtccctag

SEQ ID NO: 1104811 - DNA, 15 bp, Homo sapiens
cctaacgtgtcccta

SEQ ID NO: 1104812 - DNA, 15 bp, Homo sapiens
tcctaacgtgtccct

SEQ ID NO: 1104813 - DNA, 15 bp, Homo sapiens
ttcctaacgtgtccc

SEQ ID NO: 1104814 - DNA, 15 bp, Homo sapiens
attcctaacgtgtcc

SEQ ID NO: 1104815 - DNA, 15 bp, Homo sapiens
cattcctaacgtgtc

SEQ ID NO: 1104816 - DNA, 15 bp, Homo sapiens
acattcctaacgtgt

SEQ ID NO: 1104817 - DNA, 15 bp, Homo sapiens
gacattcctaacgtg

SEQ ID NO: 1104818 - DNA, 15 bp, Homo sapiens
ggacattcctaacgt

SEQ ID NO: 1104819 - DNA, 15 bp, Homo sapiens
tggacattcctaacg

SEQ ID NO: 1104820 - DNA, 15 bp, Homo sapiens
ctggacattcctaac

SEQ ID NO: 1104821 - DNA, 15 bp, Homo sapiens
tctggacattcctaa

SEQ ID NO: 1104822 - DNA, 15 bp, Homo sapiens
gtctggacattccta

SEQ ID NO: 1104823 - DNA, 15 bp, Homo sapiens
agtctggacattcct

SEQ ID NO: 1104824 - DNA, 15 bp, Homo sapiens
cagtctggacattcc

SEQ ID NO: 1104825 - DNA, 15 bp, Homo sapiens
acagtctggacattc

SEQ ID NO: 1104826 - DNA, 15 bp, Homo sapiens
cacagtctggacatt

SEQ ID NO: 1104827 - DNA, 15 bp, Homo sapiens
ccacagtctggacat

SEQ ID NO: 1104828 - DNA, 15 bp, Homo sapiens
cccacagtctggaca

SEQ ID NO: 1104829 - DNA, 15 bp, Homo sapiens
acccacagtctggac

SEQ ID NO: 1104830 - DNA, 15 bp, Homo sapiens
cacccacagtctgga

SEQ ID NO: 1104831 - DNA, 15 bp, Homo sapiens
acacccacagtctgg

SEQ ID NO: 1104832 - DNA, 15 bp, Homo sapiens
tacacccacagtctg

SEQ ID NO: 1104833 - DNA, 15 bp, Homo sapiens
ctacacccacagtct

SEQ ID NO: 1104834 - DNA, 15 bp, Homo sapiens
tctacacccacagtc

SEQ ID NO: 1104835 - DNA, 15 bp, Homo sapiens
atctacacccacagt

SEQ ID NO: 1104836 - DNA, 15 bp, Homo sapiens
aatctacacccacag

SEQ ID NO: 1104837 - DNA, 15 bp, Homo sapiens
taatctacacccaca

SEQ ID NO: 1104838 - DNA, 15 bp, Homo sapiens
gtaatctacacccac

SEQ ID NO: 1104839 - DNA, 15 bp, Homo sapiens
ggtaatctacaccca

SEQ ID NO: 1104840 - DNA, 15 bp, Homo sapiens
aggtaatctacaccc

SEQ ID NO: 1104841 - DNA, 15 bp, Homo sapiens
caggtaatctacacc

SEQ ID NO: 1104842 - DNA, 15 bp, Homo sapiens
gcaggtaatctacac

SEQ ID NO: 1104843 - DNA, 15 bp, Homo sapiens
ggcaggtaatctaca

SEQ ID NO: 1104844 - DNA, 15 bp, Homo sapiens
tggcaggtaatctac

SEQ ID NO: 1104845 - DNA, 15 bp, Homo sapiens
gtggcaggtaatcta

SEQ ID NO: 1104846 - DNA, 15 bp, Homo sapiens
agtggcaggtaatct

SEQ ID NO: 1104847 - DNA, 15 bp, Homo sapiens
aagtggcaggtaatc

SEQ ID NO: 1104848 - DNA, 15 bp, Homo sapiens
gaagtggcaggtaat

SEQ ID NO: 1104849 - DNA, 15 bp, Homo sapiens
ggaagtggcaggtaa

SEQ ID NO: 1104850 - DNA, 15 bp, Homo sapiens
tggaagtggcaggta

SEQ ID NO: 1104851 - DNA, 15 bp, Homo sapiens
ctggaagtggcaggt

SEQ ID NO: 1104852 - DNA, 15 bp, Homo sapiens
cctggaagtggcagg

SEQ ID NO: 1104853 - DNA, 15 bp, Homo sapiens
tcctggaagtggcag

SEQ ID NO: 1104854 - DNA, 15 bp, Homo sapiens
ctcctggaagtggca

SEQ ID NO: 1104855 - DNA, 15 bp, Homo sapiens
gctcctggaagtggc

SEQ ID NO: 1104856 - DNA, 15 bp, Homo sapiens
ggctcctggaagtgg

SEQ ID NO: 1104857 - DNA, 15 bp, Homo sapiens
gggctcctggaagtg

SEQ ID NO: 1104858 - DNA, 15 bp, Homo sapiens
tgggctcctggaagt

SEQ ID NO: 1104859 - DNA, 15 bp, Homo sapiens
ctgggctcctggaag

SEQ ID NO: 1104860 - DNA, 15 bp, Homo sapiens
tctgggctcctggaa

SEQ ID NO: 1104861 - DNA, 15 bp, Homo sapiens
ctctgggctcctgga

SEQ ID NO: 1104862 - DNA, 15 bp, Homo sapiens
cctctgggctcctgg

SEQ ID NO: 1104863 - DNA, 15 bp, Homo sapiens
ccctctgggctcctg

SEQ ID NO: 1104864 - DNA, 15 bp, Homo sapiens
gccctctgggctcct

SEQ ID NO: 1104865 - DNA, 15 bp, Homo sapiens
ggccctctgggctcc

SEQ ID NO: 1104866 - DNA, 15 bp, Homo sapiens
tggccctctgggctc

SEQ ID NO: 1104867 - DNA, 15 bp, Homo sapiens
ttggccctctgggct

SEQ ID NO: 1104868 - DNA, 15 bp, Homo sapiens
cttggccctctgggc

SEQ ID NO: 1104869 - DNA, 15 bp, Homo sapiens
tcttggccctctggg

SEQ ID NO: 1104870 - DNA, 15 bp, Homo sapiens
ctcttggccctctgg

SEQ ID NO: 1104871 - DNA, 15 bp, Homo sapiens
tctcttggccctctg

SEQ ID NO: 1104872 - DNA, 15 bp, Homo sapiens
ctctcttggccctct

SEQ ID NO: 1104873 - DNA, 15 bp, Homo sapiens
tctctcttggccctc

SEQ ID NO: 1104874 - DNA, 15 bp, Homo sapiens
gtctctcttggccct

SEQ ID NO: 1104875 - DNA, 15 bp, Homo sapiens
tgtctctcttggccc

SEQ ID NO: 1104876 - DNA, 15 bp, Homo sapiens
atgtctctcttggcc

SEQ ID NO: 1104877 - DNA, 15 bp, Homo sapiens
aatgtctctcttggc

SEQ ID NO: 1104878 - DNA, 15 bp, Homo sapiens
caatgtctctcttgg

SEQ ID NO: 1104879 - DNA, 15 bp, Homo sapiens
gcaatgtctctcttg

SEQ ID NO: 1104880 - DNA, 15 bp, Homo sapiens
ggcaatgtctctctt

SEQ ID NO: 1104881 - DNA, 15 bp, Homo sapiens
aggcaatgtctctct

SEQ ID NO: 1104882 - DNA, 15 bp, Homo sapiens
gaggcaatgtctctc

SEQ ID NO: 1104883 - DNA, 15 bp, Homo sapiens
ggaggcaatgtctct

SEQ ID NO: 1104884 - DNA, 15 bp, Homo sapiens
tggaggcaatgtctc

SEQ ID NO: 1104885 - DNA, 15 bp, Homo sapiens
gtggaggcaatgtct

SEQ ID NO: 1104886 - DNA, 15 bp, Homo sapiens
ggtggaggcaatgtc

SEQ ID NO: 1104887 - DNA, 15 bp, Homo sapiens
aggtggaggcaatgt

SEQ ID NO: 1104888 - DNA, 15 bp, Homo sapiens
gaggtggaggcaatg

SEQ ID NO: 1104889 - DNA, 15 bp, Homo sapiens
agaggtggaggcaat

SEQ ID NO: 1104890 - DNA, 15 bp, Homo sapiens
gagaggtggaggcaa

SEQ ID NO: 1104891 - DNA, 15 bp, Homo sapiens
ggagaggtggaggca

SEQ ID NO: 1104892 - DNA, 15 bp, Homo sapiens
aggagaggtggaggc

SEQ ID NO: 1104893 - DNA, 15 bp, Homo sapiens
aaggagaggtggagg

SEQ ID NO: 1104894 - DNA, 15 bp, Homo sapiens
caaggagaggtggag

SEQ ID NO: 1104895 - DNA, 15 bp, Homo sapiens
ccaaggagaggtgga

SEQ ID NO: 1104896 - DNA, 15 bp, Homo sapiens
tccaaggagaggtgg

SEQ ID NO: 1104897 - DNA, 15 bp, Homo sapiens
ttccaaggagaggtg

SEQ ID NO: 1104898 - DNA, 15 bp, Homo sapiens
tttccaaggagaggt

SEQ ID NO: 1104899 - DNA, 15 bp, Homo sapiens
atttccaaggagagg

SEQ ID NO: 1104900 - DNA, 15 bp, Homo sapiens
tatttccaaggagag

SEQ ID NO: 1104901 - DNA, 15 bp, Homo sapiens
gtatttccaaggaga

SEQ ID NO: 1104902 - DNA, 15 bp, Homo sapiens
agtatttccaaggag

SEQ ID NO: 1104903 - DNA, 15 bp, Homo sapiens
aagtatttccaagga

SEQ ID NO: 1104904 - DNA, 15 bp, Homo sapiens
aaagtatttccaagg

SEQ ID NO: 1104905 - DNA, 15 bp, Homo sapiens
taaagtatttccaag

SEQ ID NO: 1104906 - DNA, 15 bp, Homo sapiens
ataaagtatttccaa

SEQ ID NO: 1104907 - DNA, 15 bp, Homo sapiens
gataaagtatttcca

SEQ ID NO: 1104908 - DNA, 15 bp, Homo sapiens
agataaagtatttcc

SEQ ID NO: 1104909 - DNA, 15 bp, Homo sapiens
cagataaagtatttc

SEQ ID NO: 1104910 - DNA, 15 bp, Homo sapiens
acagataaagtattt

SEQ ID NO: 1104911 - DNA, 15 bp, Homo sapiens
cacagataaagtatt

SEQ ID NO: 1104912 - DNA, 15 bp, Homo sapiens
tcacagataaagtat

SEQ ID NO: 1104913 - DNA, 15 bp, Homo sapiens
gtcacagataaagta

SEQ ID NO: 1104914 - DNA, 15 bp, Homo sapiens
ggtcacagataaagt

SEQ ID NO: 1104915 - DNA, 15 bp, Homo sapiens
tggtcacagataaag

SEQ ID NO: 1104916 - DNA, 15 bp, Homo sapiens
gtggtcacagataaa

SEQ ID NO: 1104917 - DNA, 15 bp, Homo sapiens
tgtggtcacagataa

SEQ ID NO: 1104918 - DNA, 15 bp, Homo sapiens
gtgtggtcacagata

SEQ ID NO: 1104919 - DNA, 15 bp, Homo sapiens
cgtgtggtcacagat

SEQ ID NO: 1104920 - DNA, 15 bp, Homo sapiens
gcgtgtggtcacaga

SEQ ID NO: 1104921 - DNA, 15 bp, Homo sapiens
agcgtgtggtcacag

SEQ ID NO: 1104922 - DNA, 15 bp, Homo sapiens
cagcgtgtggtcaca

SEQ ID NO: 1104923 - DNA, 15 bp, Homo sapiens
acagcgtgtggtcac

SEQ ID NO: 1104924 - DNA, 15 bp, Homo sapiens
gacagcgtgtggtca

SEQ ID NO: 1104925 - DNA, 15 bp, Homo sapiens
agacagcgtgtggtc

SEQ ID NO: 1104926 - DNA, 15 bp, Homo sapiens
gagacagcgtgtggt

SEQ ID NO: 1104927 - DNA, 15 bp, Homo sapiens
agagacagcgtgtgg

SEQ ID NO: 1104928 - DNA, 15 bp, Homo sapiens
aagagacagcgtgtg

SEQ ID NO: 1104929 - DNA, 15 bp, Homo sapiens
caagagacagcgtgt

SEQ ID NO: 1104930 - DNA, 15 bp, Homo sapiens
tcaagagacagcgtg

SEQ ID NO: 1104931 - DNA, 15 bp, Homo sapiens
ctcaagagacagcgt

SEQ ID NO: 1104932 - DNA, 15 bp, Homo sapiens
tctcaagagacagcg

SEQ ID NO: 1104933 - DNA, 15 bp, Homo sapiens
ttctcaagagacagc

SEQ ID NO: 1104934 - DNA, 15 bp, Homo sapiens
attctcaagagacag

SEQ ID NO: 1104935 - DNA, 15 bp, Homo sapiens
aattctcaagagaca

SEQ ID NO: 1104936 - DNA, 15 bp, Homo sapiens
aaattctcaagagac

SEQ ID NO: 1104937 - DNA, 15 bp, Homo sapiens
caaattctcaagaga

SEQ ID NO: 1104938 - DNA, 15 bp, Homo sapiens
ccaaattctcaagag

SEQ ID NO: 1104939 - DNA, 15 bp, Homo sapiens
tccaaattctcaaga

SEQ ID NO: 1104940 - DNA, 15 bp, Homo sapiens
atccaaattctcaag

SEQ ID NO: 1104941 - DNA, 15 bp, Homo sapiens
tatccaaattctcaa

SEQ ID NO: 1104942 - DNA, 15 bp, Homo sapiens
gtatccaaattctca

SEQ ID NO: 1104943 - DNA, 15 bp, Homo sapiens
tgtatccaaattctc

SEQ ID NO: 1104944 - DNA, 15 bp, Homo sapiens
gtgtatccaaattct

SEQ ID NO: 1104945 - DNA, 15 bp, Homo sapiens
agtgtatccaaattc

SEQ ID NO: 1104946 - DNA, 15 bp, Homo sapiens
gagtgtatccaaatt

SEQ ID NO: 1104947 - DNA, 15 bp, Homo sapiens
agagtgtatccaaat

SEQ ID NO: 1104948 - DNA, 15 bp, Homo sapiens
gagagtgtatccaaa

SEQ ID NO: 1104949 - DNA, 15 bp, Homo sapiens
agagagtgtatccaa

SEQ ID NO: 1104950 - DNA, 15 bp, Homo sapiens
tagagagtgtatcca

SEQ ID NO: 1104951 - DNA, 15 bp, Homo sapiens
ctagagagtgtatcc

SEQ ID NO: 1104952 - DNA, 15 bp, Homo sapiens
gctagagagtgtatc

SEQ ID NO: 1104953 - DNA, 15 bp, Homo sapiens
agctagagagtgtat

SEQ ID NO: 1104954 - DNA, 15 bp, Homo sapiens
aagctagagagtgta

SEQ ID NO: 1104955 - DNA, 15 bp, Homo sapiens
aaagctagagagtgt

SEQ ID NO: 1104956 - DNA, 15 bp, Homo sapiens
taaagctagagagtg

SEQ ID NO: 1104957 - DNA, 15 bp, Homo sapiens
ctaaagctagagagt

SEQ ID NO: 1104958 - DNA, 15 bp, Homo sapiens
cctaaagctagagag

SEQ ID NO: 1104959 - DNA, 15 bp, Homo sapiens
ccctaaagctagaga

SEQ ID NO: 1104960 - DNA, 15 bp, Homo sapiens
cccctaaagctagag

SEQ ID NO: 1104961 - DNA, 15 bp, Homo sapiens
tcccctaaagctaga

SEQ ID NO: 1104962 - DNA, 15 bp, Homo sapiens
gtcccctaaagctag

SEQ ID NO: 1104963 - DNA, 15 bp, Homo sapiens
ggtcccctaaagcta

SEQ ID NO: 1104964 - DNA, 15 bp, Homo sapiens
tggtcccctaaagct

SEQ ID NO: 1104965 - DNA, 15 bp, Homo sapiens
atggtcccctaaagc

SEQ ID NO: 1104966 - DNA, 15 bp, Homo sapiens
catggtcccctaaag

SEQ ID NO: 1104967 - DNA, 15 bp, Homo sapiens
tcatggtcccctaaa

SEQ ID NO: 1104968 - DNA, 15 bp, Homo sapiens
ttcatggtcccctaa

SEQ ID NO: 1104969 - DNA, 15 bp, Homo sapiens
cttcatggtccccta

SEQ ID NO: 1104970 - DNA, 15 bp, Homo sapiens
tcttcatggtcccct

SEQ ID NO: 1104971 - DNA, 15 bp, Homo sapiens
ctcttcatggtcccc

SEQ ID NO: 1104972 - DNA, 15 bp, Homo sapiens
tctcttcatggtccc

SEQ ID NO: 1104973 - DNA, 15 bp, Homo sapiens
gtctcttcatggtcc

SEQ ID NO: 1104974 - DNA, 15 bp, Homo sapiens
agtctcttcatggtc

SEQ ID NO: 1104975 - DNA, 15 bp, Homo sapiens
gagtctcttcatggt

SEQ ID NO: 1104976 - DNA, 15 bp, Homo sapiens
agagtctcttcatgg

SEQ ID NO: 1104977 - DNA, 15 bp, Homo sapiens
gagagtctcttcatg

SEQ ID NO: 1104978 - DNA, 15 bp, Homo sapiens
agagagtctcttcat

SEQ ID NO: 1104979 - DNA, 15 bp, Homo sapiens
aagagagtctcttca

SEQ ID NO: 1104980 - DNA, 15 bp, Homo sapiens
taagagagtctcttc

SEQ ID NO: 1104981 - DNA, 15 bp, Homo sapiens
ctaagagagtctctt

SEQ ID NO: 1104982 - DNA, 15 bp, Homo sapiens
cctaagagagtctct

SEQ ID NO: 1104983 - DNA, 15 bp, Homo sapiens
ccctaagagagtctc

SEQ ID NO: 1104984 - DNA, 15 bp, Homo sapiens
tccctaagagagtct

SEQ ID NO: 1104985 - DNA, 15 bp, Homo sapiens
ttccctaagagagtc

SEQ ID NO: 1104986 - DNA, 15 bp, Homo sapiens
tttccctaagagagt

SEQ ID NO: 1104987 - DNA, 15 bp, Homo sapiens
gtttccctaagagag

SEQ ID NO: 1104988 - DNA, 15 bp, Homo sapiens
ggtttccctaagaga

SEQ ID NO: 1104989 - DNA, 15 bp, Homo sapiens
tggtttccctaagag

SEQ ID NO: 1104990 - DNA, 15 bp, Homo sapiens
ttggtttccctaaga

SEQ ID NO: 1104991 - DNA, 15 bp, Homo sapiens
attggtttccctaag

SEQ ID NO: 1104992 - DNA, 15 bp, Homo sapiens
tattggtttccctaa

SEQ ID NO: 1104993 - DNA, 15 bp, Homo sapiens
ctattggtttcccta

SEQ ID NO: 1104994 - DNA, 15 bp, Homo sapiens
actattggtttccct

SEQ ID NO: 1104995 - DNA, 15 bp, Homo sapiens
gactattggtttccc

SEQ ID NO: 1104996 - DNA, 15 bp, Homo sapiens
ggactattggtttcc

SEQ ID NO: 1104997 - DNA, 15 bp, Homo sapiens
gggactattggtttc

SEQ ID NO: 1104998 - DNA, 15 bp, Homo sapiens
ggggactattggttt

SEQ ID NO: 1104999 - DNA, 15 bp, Homo sapiens
tggggactattggtt

SEQ ID NO: 1105000 - DNA, 15 bp, Homo sapiens
atggggactattggt

SEQ ID NO: 1105001 - DNA, 15 bp, Homo sapiens
gatggggactattgg

SEQ ID NO: 1105002 - DNA, 15 bp, Homo sapiens
tgatggggactattg

SEQ ID NO: 1105003 - DNA, 15 bp, Homo sapiens
ctgatggggactatt

SEQ ID NO: 1105004 - DNA, 15 bp, Homo sapiens
gctgatggggactat

SEQ ID NO: 1105005 - DNA, 15 bp, Homo sapiens
tgctgatggggacta

SEQ ID NO: 1105006 - DNA, 15 bp, Homo sapiens
gtgctgatggggact

SEQ ID NO: 1105007 - DNA, 15 bp, Homo sapiens
ggtgctgatggggac

SEQ ID NO: 1105008 - DNA, 15 bp, Homo sapiens
tggtgctgatgggga

SEQ ID NO: 1105009 - DNA, 15 bp, Homo sapiens
atggtgctgatgggg

SEQ ID NO: 1105010 - DNA, 15 bp, Homo sapiens
catggtgctgatggg

SEQ ID NO: 1105011 - DNA, 15 bp, Homo sapiens
ccatggtgctgatgg

SEQ ID NO: 1105012 - DNA, 15 bp, Homo sapiens
tccatggtgctgatg

SEQ ID NO: 1105013 - DNA, 15 bp, Homo sapiens
ctccatggtgctgat

SEQ ID NO: 1105014 - DNA, 15 bp, Homo sapiens
cctccatggtgctga

SEQ ID NO: 1105015 - DNA, 15 bp, Homo sapiens
gcctccatggtgctg

SEQ ID NO: 1105016 - DNA, 15 bp, Homo sapiens
tgcctccatggtgct

SEQ ID NO: 1105017 - DNA, 15 bp, Homo sapiens
ctgcctccatggtgc

SEQ ID NO: 1105018 - DNA, 15 bp, Homo sapiens
cctgcctccatggtg

SEQ ID NO: 1105019 - DNA, 15 bp, Homo sapiens
gcctgcctccatggt

SEQ ID NO: 1105020 - DNA, 15 bp, Homo sapiens
agcctgcctccatgg

SEQ ID NO: 1105021 - DNA, 15 bp, Homo sapiens
gagcctgcctccatg

SEQ ID NO: 1105022 - DNA, 15 bp, Homo sapiens
ggagcctgcctccat

SEQ ID NO: 1105023 - DNA, 15 bp, Homo sapiens
gggagcctgcctcca

SEQ ID NO: 1105024 - DNA, 15 bp, Homo sapiens
ggggagcctgcctcc

SEQ ID NO: 1105025 - DNA, 15 bp, Homo sapiens
gggggagcctgcctc

SEQ ID NO: 1105026 - DNA, 15 bp, Homo sapiens
agggggagcctgcct

SEQ ID NO: 1105027 - DNA, 15 bp, Homo sapiens
cagggggagcctgcc

SEQ ID NO: 1105028 - DNA, 15 bp, Homo sapiens
gcagggggagcctgc

SEQ ID NO: 1105029 - DNA, 15 bp, Homo sapiens
ggcagggggagcctg

SEQ ID NO: 1105030 - DNA, 15 bp, Homo sapiens
aggcagggggagcct

SEQ ID NO: 1105031 - DNA, 15 bp, Homo sapiens
aaggcagggggagcc

SEQ ID NO: 1105032 - DNA, 15 bp, Homo sapiens
aaaggcagggggagc

SEQ ID NO: 1105033 - DNA, 15 bp, Homo sapiens
caaaggcagggggag

SEQ ID NO: 1105034 - DNA, 15 bp, Homo sapiens
tcaaaggcaggggga

SEQ ID NO: 1105035 - DNA, 15 bp, Homo sapiens
ttcaaaggcaggggg

SEQ ID NO: 1105036 - DNA, 15 bp, Homo sapiens
tttcaaaggcagggg

SEQ ID NO: 1105037 - DNA, 15 bp, Homo sapiens
atttcaaaggcaggg

SEQ ID NO: 1105038 - DNA, 15 bp, Homo sapiens
aatttcaaaggcagg

SEQ ID NO: 1105039 - DNA, 15 bp, Homo sapiens
gaatttcaaaggcag

SEQ ID NO: 1105040 - DNA, 15 bp, Homo sapiens
ggaatttcaaaggca

SEQ ID NO: 1105041 - DNA, 15 bp, Homo sapiens
gggaatttcaaaggc

SEQ ID NO: 1105042 - DNA, 15 bp, Homo sapiens
ggggaatttcaaagg

SEQ ID NO: 1105043 - DNA, 15 bp, Homo sapiens
gggggaatttcaaag

SEQ ID NO: 1105044 - DNA, 15 bp, Homo sapiens
tgggggaatttcaaa

SEQ ID NO: 1105045 - DNA, 15 bp, Homo sapiens
gtgggggaatttcaa

SEQ ID NO: 1105046 - DNA, 15 bp, Homo sapiens
agtgggggaatttca

SEQ ID NO: 1105047 - DNA, 15 bp, Homo sapiens
aagtgggggaatttc

SEQ ID NO: 1105048 - DNA, 15 bp, Homo sapiens
caagtgggggaattt

SEQ ID NO: 1105049 - DNA, 15 bp, Homo sapiens
ccaagtgggggaatt

SEQ ID NO: 1105050 - DNA, 15 bp, Homo sapiens
cccaagtgggggaat

SEQ ID NO: 1105051 - DNA, 15 bp, Homo sapiens
tcccaagtgggggaa

SEQ ID NO: 1105052 - DNA, 15 bp, Homo sapiens
ctcccaagtggggga

SEQ ID NO: 1105053 - DNA, 15 bp, Homo sapiens
gctcccaagtggggg

SEQ ID NO: 1105054 - DNA, 15 bp, Homo sapiens
agctcccaagtgggg

SEQ ID NO: 1105055 - DNA, 15 bp, Homo sapiens
aagctcccaagtggg

SEQ ID NO: 1105056 - DNA, 15 bp, Homo sapiens
caagctcccaagtgg

SEQ ID NO: 1105057 - DNA, 15 bp, Homo sapiens
acaagctcccaagtg

SEQ ID NO: 1105058 - DNA, 15 bp, Homo sapiens
tacaagctcccaagt

SEQ ID NO: 1105059 - DNA, 15 bp, Homo sapiens
atacaagctcccaag

SEQ ID NO: 1105060 - DNA, 15 bp, Homo sapiens
tatacaagctcccaa

SEQ ID NO: 1105061 - DNA, 15 bp, Homo sapiens
atatacaagctccca

SEQ ID NO: 1105062 - DNA, 15 bp, Homo sapiens
tatatacaagctccc

SEQ ID NO: 1105063 - DNA, 15 bp, Homo sapiens
gtatatacaagctcc

SEQ ID NO: 1105064 - DNA, 15 bp, Homo sapiens
agtatatacaagctc

SEQ ID NO: 1105065 - DNA, 15 bp, Homo sapiens
aagtatatacaagct

SEQ ID NO: 1105066 - DNA, 15 bp, Homo sapiens
gaagtatatacaagc

SEQ ID NO: 1105067 - DNA, 15 bp, Homo sapiens
tgaagtatatacaag

SEQ ID NO: 1105068 - DNA, 15 bp, Homo sapiens
gtgaagtatatacaa

SEQ ID NO: 1105069 - DNA, 15 bp, Homo sapiens
agtgaagtatataca

SEQ ID NO: 1105070 - DNA, 15 bp, Homo sapiens
gagtgaagtatatac

SEQ ID NO: 1105071 - DNA, 15 bp, Homo sapiens
tgagtgaagtatata

SEQ ID NO: 1105072 - DNA, 15 bp, Homo sapiens
gtgagtgaagtatat

SEQ ID NO: 1105073 - DNA, 15 bp, Homo sapiens
agtgagtgaagtata

SEQ ID NO: 1105074 - DNA, 15 bp, Homo sapiens
aagtgagtgaagtat

SEQ ID NO: 1105075 - DNA, 15 bp, Homo sapiens
aaagtgagtgaagta

SEQ ID NO: 1105076 - DNA, 15 bp, Homo sapiens
aaaagtgagtgaagt

SEQ ID NO: 1105077 - DNA, 15 bp, Homo sapiens
gaaaagtgagtgaag

SEQ ID NO: 1105078 - DNA, 15 bp, Homo sapiens
agaaaagtgagtgaa

SEQ ID NO: 1105079 - DNA, 15 bp, Homo sapiens
aagaaaagtgagtga

SEQ ID NO: 1105080 - DNA, 15 bp, Homo sapiens
aaagaaaagtgagtg

SEQ ID NO: 1105081 - DNA, 15 bp, Homo sapiens
taaagaaaagtgagt

SEQ ID NO: 1105082 - DNA, 15 bp, Homo sapiens
ataaagaaaagtgag

SEQ ID NO: 1105083 - DNA, 15 bp, Homo sapiens
aataaagaaaagtga

SEQ ID NO: 1105084 - DNA, 15 bp, Homo sapiens
caataaagaaaagtg

SEQ ID NO: 1105085 - DNA, 15 bp, Homo sapiens
gcaataaagaaaagt

SEQ ID NO: 1105086 - DNA, 15 bp, Homo sapiens
agcaataaagaaaag

SEQ ID NO: 1105087 - DNA, 15 bp, Homo sapiens
cagcaataaagaaaa

SEQ ID NO: 1105088 - DNA, 15 bp, Homo sapiens
acagcaataaagaaa

SEQ ID NO: 1105089 - DNA, 15 bp, Homo sapiens
cacagcaataaagaa

SEQ ID NO: 1105090 - DNA, 15 bp, Homo sapiens
tcacagcaataaaga

SEQ ID NO: 1105091 - DNA, 15 bp, Homo sapiens
ttcacagcaataaag

SEQ ID NO: 1105092 - DNA, 15 bp, Homo sapiens
attcacagcaataaa

SEQ ID NO: 1105093 - DNA, 15 bp, Homo sapiens
tattcacagcaataa

SEQ ID NO: 1105094 - DNA, 15 bp, Homo sapiens
ctattcacagcaata

SEQ ID NO: 1105095 - DNA, 15 bp, Homo sapiens
actattcacagcaat

SEQ ID NO: 1105096 - DNA, 15 bp, Homo sapiens
gactattcacagcaa

SEQ ID NO: 1105097 - DNA, 15 bp, Homo sapiens
agactattcacagca

SEQ ID NO: 1105098 - DNA, 15 bp, Homo sapiens
cagactattcacagc

SEQ ID NO: 1105099 - DNA, 15 bp, Homo sapiens
acagactattcacag

SEQ ID NO: 1105100 - DNA, 15 bp, Homo sapiens
cacagactattcaca

SEQ ID NO: 1105101 - DNA, 15 bp, Homo sapiens
acacagactattcac

SEQ ID NO: 1105102 - DNA, 15 bp, Homo sapiens
cacacagactattca

SEQ ID NO: 1105103 - DNA, 15 bp, Homo sapiens
gcacacagactattc

SEQ ID NO: 1105104 - DNA, 15 bp, Homo sapiens
tgcacacagactatt

SEQ ID NO: 1105105 - DNA, 15 bp, Homo sapiens
gtgcacacagactat

SEQ ID NO: 1105106 - DNA, 15 bp, Homo sapiens
tgtgcacacagacta

SEQ ID NO: 1105107 - DNA, 15 bp, Homo sapiens
ttgtgcacacagact

SEQ ID NO: 1105108 - DNA, 15 bp, Homo sapiens
attgtgcacacagac

SEQ ID NO: 1105109 - DNA, 15 bp, Homo sapiens
cattgtgcacacaga

SEQ ID NO: 1105110 - DNA, 15 bp, Homo sapiens
ccattgtgcacacag

SEQ ID NO: 1105111 - DNA, 15 bp, Homo sapiens
cccattgtgcacaca

SEQ ID NO: 1105112 - DNA, 15 bp, Homo sapiens
gcccattgtgcacac

SEQ ID NO: 1105113 - DNA, 15 bp, Homo sapiens
tgcccattgtgcaca

SEQ ID NO: 1105114 - DNA, 15 bp, Homo sapiens
ttgcccattgtgcac

SEQ ID NO: 1105115 - DNA, 15 bp, Homo sapiens
attgcccattgtgca

SEQ ID NO: 1105116 - DNA, 15 bp, Homo sapiens
aattgcccattgtgc

SEQ ID NO: 1105117 - DNA, 15 bp, Homo sapiens
gaattgcccattgtg

SEQ ID NO: 1105118 - DNA, 15 bp, Homo sapiens
agaattgcccattgt

SEQ ID NO: 1105119 - DNA, 15 bp, Homo sapiens
cagaattgcccattg

SEQ ID NO: 1105120 - DNA, 15 bp, Homo sapiens
tcagaattgcccatt

SEQ ID NO: 1105121 - DNA, 15 bp, Homo sapiens
gtcagaattgcccat

SEQ ID NO: 1105122 - DNA, 15 bp, Homo sapiens
agtcagaattgccca

SEQ ID NO: 1105123 - DNA, 15 bp, Homo sapiens
aagtcagaattgccc

SEQ ID NO: 1105124 - DNA, 15 bp, Homo sapiens
gaagtcagaattgcc

SEQ ID NO: 1105125 - DNA, 15 bp, Homo sapiens
agaagtcagaattgc

SEQ ID NO: 1105126 - DNA, 15 bp, Homo sapiens
gagaagtcagaattg

SEQ ID NO: 1105127 - DNA, 15 bp, Homo sapiens
ggagaagtcagaatt

SEQ ID NO: 1105128 - DNA, 15 bp, Homo sapiens
gggagaagtcagaat

SEQ ID NO: 1105129 - DNA, 15 bp, Homo sapiens
tgggagaagtcagaa

SEQ ID NO: 1105130 - DNA, 15 bp, Homo sapiens
atgggagaagtcaga

SEQ ID NO: 1105131 - DNA, 15 bp, Homo sapiens
gatgggagaagtcag

SEQ ID NO: 1105132 - DNA, 15 bp, Homo sapiens
agatgggagaagtca

SEQ ID NO: 1105133 - DNA, 15 bp, Homo sapiens
tagatgggagaagtc

SEQ ID NO: 1105134 - DNA, 15 bp, Homo sapiens
ctagatgggagaagt

SEQ ID NO: 1105135 - DNA, 15 bp, Homo sapiens
actagatgggagaag

SEQ ID NO: 1105136 - DNA, 15 bp, Homo sapiens
cactagatgggagaa

SEQ ID NO: 1105137 - DNA, 15 bp, Homo sapiens
ccactagatgggaga

SEQ ID NO: 1105138 - DNA, 15 bp, Homo sapiens
tccactagatgggag

SEQ ID NO: 1105139 - DNA, 15 bp, Homo sapiens
ttccactagatggga

SEQ ID NO: 1105140 - DNA, 15 bp, Homo sapiens
tttccactagatggg

SEQ ID NO: 1105141 - DNA, 15 bp, Homo sapiens
atttccactagatgg

SEQ ID NO: 1105142 - DNA, 15 bp, Homo sapiens
catttccactagatg

SEQ ID NO: 1105143 - DNA, 15 bp, Homo sapiens
tcatttccactagat

SEQ ID NO: 1105144 - DNA, 15 bp, Homo sapiens
ctcatttccactaga

SEQ ID NO: 1105145 - DNA, 15 bp, Homo sapiens
gctcatttccactag

SEQ ID NO: 1105146 - DNA, 15 bp, Homo sapiens
cgctcatttccacta

SEQ ID NO: 1105147 - DNA, 15 bp, Homo sapiens
tcgctcatttccact

SEQ ID NO: 1105148 - DNA, 15 bp, Homo sapiens
ttcgctcatttccac

SEQ ID NO: 1105149 - DNA, 15 bp, Homo sapiens
tttcgctcatttcca

SEQ ID NO: 1105150 - DNA, 15 bp, Homo sapiens
atttcgctcatttcc

SEQ ID NO: 1105151 - DNA, 15 bp, Homo sapiens
gatttcgctcatttc

SEQ ID NO: 1105152 - DNA, 15 bp, Homo sapiens
tgatttcgctcattt

SEQ ID NO: 1105153 - DNA, 15 bp, Homo sapiens
atgatttcgctcatt

SEQ ID NO: 1105154 - DNA, 15 bp, Homo sapiens
catgatttcgctcat

SEQ ID NO: 1105155 - DNA, 15 bp, Homo sapiens
ccatgatttcgctca

SEQ ID NO: 1105156 - DNA, 15 bp, Homo sapiens
accatgatttcgctc

SEQ ID NO: 1105157 - DNA, 15 bp, Homo sapiens
aaccatgatttcgct

SEQ ID NO: 1105158 - DNA, 15 bp, Homo sapiens
caaccatgatttcgc

SEQ ID NO: 1105159 - DNA, 15 bp, Homo sapiens
acaaccatgatttcg

SEQ ID NO: 1105160 - DNA, 15 bp, Homo sapiens
tacaaccatgatttc

SEQ ID NO: 1105161 - DNA, 15 bp, Homo sapiens
ctacaaccatgattt

SEQ ID NO: 1105162 - DNA, 15 bp, Homo sapiens
actacaaccatgatt

SEQ ID NO: 1105163 - DNA, 15 bp, Homo sapiens
cactacaaccatgat

SEQ ID NO: 1105164 - DNA, 15 bp, Homo sapiens
tcactacaaccatga

SEQ ID NO: 1105165 - DNA, 15 bp, Homo sapiens
atcactacaaccatg

SEQ ID NO: 1105166 - DNA, 15 bp, Homo sapiens
catcactacaaccat

SEQ ID NO: 1105167 - DNA, 15 bp, Homo sapiens
acatcactacaacca

SEQ ID NO: 1105168 - DNA, 15 bp, Homo sapiens
aacatcactacaacc

SEQ ID NO: 1105169 - DNA, 15 bp, Homo sapiens
caacatcactacaac

SEQ ID NO: 1105170 - DNA, 15 bp, Homo sapiens
acaacatcactacaa

SEQ ID NO: 1105171 - DNA, 15 bp, Homo sapiens
aacaacatcactaca

SEQ ID NO: 1105172 - DNA, 15 bp, Homo sapiens
aaacaacatcactac

SEQ ID NO: 1105173 - DNA, 15 bp, Homo sapiens
caaacaacatcacta

SEQ ID NO: 1105174 - DNA, 15 bp, Homo sapiens
ccaaacaacatcact

SEQ ID NO: 1105175 - DNA, 15 bp, Homo sapiens
cccaaacaacatcac

SEQ ID NO: 1105176 - DNA, 15 bp, Homo sapiens
tcccaaacaacatca

SEQ ID NO: 1105177 - DNA, 15 bp, Homo sapiens
ctcccaaacaacatc

SEQ ID NO: 1105178 - DNA, 15 bp, Homo sapiens
tctcccaaacaacat

SEQ ID NO: 1105179 - DNA, 15 bp, Homo sapiens
ctctcccaaacaaca

SEQ ID NO: 1105180 - DNA, 15 bp, Homo sapiens
actctcccaaacaac

SEQ ID NO: 1105181 - DNA, 15 bp, Homo sapiens
cactctcccaaacaa

SEQ ID NO: 1105182 - DNA, 15 bp, Homo sapiens
gcactctcccaaaca

SEQ ID NO: 1105183 - DNA, 15 bp, Homo sapiens
tgcactctcccaaac

SEQ ID NO: 1105184 - DNA, 15 bp, Homo sapiens
ctgcactctcccaaa

SEQ ID NO: 1105185 - DNA, 15 bp, Homo sapiens
actgcactctcccaa

SEQ ID NO: 1105186 - DNA, 15 bp, Homo sapiens
tactgcactctccca

SEQ ID NO: 1105187 - DNA, 15 bp, Homo sapiens
ctactgcactctccc

SEQ ID NO: 1105188 - DNA, 15 bp, Homo sapiens
actactgcactctcc

SEQ ID NO: 1105189 - DNA, 15 bp, Homo sapiens
tactactgcactctc

SEQ ID NO: 1105190 - DNA, 15 bp, Homo sapiens
ttactactgcactct

SEQ ID NO: 1105191 - DNA, 15 bp, Homo sapiens
attactactgcactc

SEQ ID NO: 1105192 - DNA, 15 bp, Homo sapiens
aattactactgcact

SEQ ID NO: 1105193 - DNA, 15 bp, Homo sapiens
caattactactgcac

SEQ ID NO: 1105194 - DNA, 15 bp, Homo sapiens
tcaattactactgca

SEQ ID NO: 1105195 - DNA, 15 bp, Homo sapiens
atcaattactactgc

SEQ ID NO: 1105196 - DNA, 15 bp, Homo sapiens
aatcaattactactg

SEQ ID NO: 1105197 - DNA, 15 bp, Homo sapiens
aaatcaattactact

SEQ ID NO: 1105198 - DNA, 15 bp, Homo sapiens
caaatcaattactac

SEQ ID NO: 1105199 - DNA, 15 bp, Homo sapiens
tcaaatcaattacta

SEQ ID NO: 1105200 - DNA, 15 bp, Homo sapiens
gtcaaatcaattact

SEQ ID NO: 1105201 - DNA, 15 bp, Homo sapiens
ggtcaaatcaattac

SEQ ID NO: 1105202 - DNA, 15 bp, Homo sapiens
gggtcaaatcaatta

SEQ ID NO: 1105203 - DNA, 15 bp, Homo sapiens
tgggtcaaatcaatt

SEQ ID NO: 1105204 - DNA, 15 bp, Homo sapiens
gtgggtcaaatcaat

SEQ ID NO: 1105205 - DNA, 15 bp, Homo sapiens
agtgggtcaaatcaa

SEQ ID NO: 1105206 - DNA, 15 bp, Homo sapiens
gagtgggtcaaatca

SEQ ID NO: 1105207 - DNA, 15 bp, Homo sapiens
tgagtgggtcaaatc

SEQ ID NO: 1105208 - DNA, 15 bp, Homo sapiens
gtgagtgggtcaaat

SEQ ID NO: 1105209 - DNA, 15 bp, Homo sapiens
tgtgagtgggtcaaa

SEQ ID NO: 1105210 - DNA, 15 bp, Homo sapiens
gtgtgagtgggtcaa

SEQ ID NO: 1105211 - DNA, 15 bp, Homo sapiens
agtgtgagtgggtca

SEQ ID NO: 1105212 - DNA, 15 bp, Homo sapiens
aagtgtgagtgggtc

SEQ ID NO: 1105213 - DNA, 15 bp, Homo sapiens
caagtgtgagtgggt

SEQ ID NO: 1105214 - DNA, 15 bp, Homo sapiens
ccaagtgtgagtggg

SEQ ID NO: 1105215 - DNA, 15 bp, Homo sapiens
tccaagtgtgagtgg

SEQ ID NO: 1105216 - DNA, 15 bp, Homo sapiens
ctccaagtgtgagtg

SEQ ID NO: 1105217 - DNA, 15 bp, Homo sapiens
gctccaagtgtgagt

SEQ ID NO: 1105218 - DNA, 15 bp, Homo sapiens
agctccaagtgtgag

SEQ ID NO: 1105219 - DNA, 15 bp, Homo sapiens
tagctccaagtgtga

SEQ ID NO: 1105220 - DNA, 15 bp, Homo sapiens
ttagctccaagtgtg

SEQ ID NO: 1105221 - DNA, 15 bp, Homo sapiens
attagctccaagtgt

SEQ ID NO: 1105222 - DNA, 15 bp, Homo sapiens
aattagctccaagtg

SEQ ID NO: 1105223 - DNA, 15 bp, Homo sapiens
taattagctccaagt

SEQ ID NO: 1105224 - DNA, 15 bp, Homo sapiens
ttaattagctccaag

SEQ ID NO: 1105225 - DNA, 15 bp, Homo sapiens
cttaattagctccaa

SEQ ID NO: 1105226 - DNA, 15 bp, Homo sapiens
ccttaattagctcca

SEQ ID NO: 1105227 - DNA, 15 bp, Homo sapiens
accttaattagctcc

SEQ ID NO: 1105228 - DNA, 15 bp, Homo sapiens
aaccttaattagctc

SEQ ID NO: 1105229 - DNA, 15 bp, Homo sapiens
aaaccttaattagct

SEQ ID NO: 1105230 - DNA, 15 bp, Homo sapiens
caaaccttaattagc

SEQ ID NO: 1105231 - DNA, 15 bp, Homo sapiens
gcaaaccttaattag

SEQ ID NO: 1105232 - DNA, 15 bp, Homo sapiens
ggcaaaccttaatta

SEQ ID NO: 1105233 - DNA, 15 bp, Homo sapiens
gggcaaaccttaatt

SEQ ID NO: 1105234 - DNA, 15 bp, Homo sapiens
agggcaaaccttaat

SEQ ID NO: 1105235 - DNA, 15 bp, Homo sapiens
cagggcaaaccttaa

SEQ ID NO: 1105236 - DNA, 15 bp, Homo sapiens
gcagggcaaacctta

SEQ ID NO: 1105237 - DNA, 15 bp, Homo sapiens
ggcagggcaaacctt

SEQ ID NO: 1105238 - DNA, 15 bp, Homo sapiens
aggcagggcaaacct

SEQ ID NO: 1105239 - DNA, 15 bp, Homo sapiens
caggcagggcaaacc

SEQ ID NO: 1105240 - DNA, 15 bp, Homo sapiens
gcaggcagggcaaac

SEQ ID NO: 1105241 - DNA, 15 bp, Homo sapiens
tgcaggcagggcaaa

SEQ ID NO: 1105242 - DNA, 15 bp, Homo sapiens
ctgcaggcagggcaa

SEQ ID NO: 1105243 - DNA, 15 bp, Homo sapiens
gctgcaggcagggca

SEQ ID NO: 1105244 - DNA, 15 bp, Homo sapiens
ggctgcaggcagggc

SEQ ID NO: 1105245 - DNA, 15 bp, Homo sapiens
gaggctgcaggcagg

SEQ ID NO: 1105246 - DNA, 15 bp, Homo sapiens
ggaggctgcaggcag

SEQ ID NO: 1105247 - DNA, 15 bp, Homo sapiens
gggaggctgcaggca

SEQ ID NO: 1105248 - DNA, 15 bp, Homo sapiens
ggggaggctgcaggc

SEQ ID NO: 1105249 - DNA, 15 bp, Homo sapiens
gggggaggctgcagg

SEQ ID NO: 1105250 - DNA, 15 bp, Homo sapiens
tgggggaggctgcag

SEQ ID NO: 1105251 - DNA, 15 bp, Homo sapiens
gtgggggaggctgca

SEQ ID NO: 1105252 - DNA, 15 bp, Homo sapiens
tgtgggggaggctgc

SEQ ID NO: 1105253 - DNA, 15 bp, Homo sapiens
ttgtgggggaggctg

SEQ ID NO: 1105254 - DNA, 15 bp, Homo sapiens
tttgtgggggaggct

SEQ ID NO: 1105255 - DNA, 15 bp, Homo sapiens
atttgtgggggaggc

SEQ ID NO: 1105256 - DNA, 15 bp, Homo sapiens
tatttgtgggggagg

SEQ ID NO: 1105257 - DNA, 15 bp, Homo sapiens
ttatttgtgggggag

SEQ ID NO: 1105258 - DNA, 15 bp, Homo sapiens
attatttgtggggga

SEQ ID NO: 1105259 - DNA, 15 bp, Homo sapiens
cattatttgtggggg

SEQ ID NO: 1105260 - DNA, 15 bp, Homo sapiens
tcattatttgtgggg

SEQ ID NO: 1105261 - DNA, 15 bp, Homo sapiens
ttcattatttgtggg

SEQ ID NO: 1105262 - DNA, 15 bp, Homo sapiens
gttcattatttgtgg

SEQ ID NO: 1105263 - DNA, 15 bp, Homo sapiens
tgttcattatttgtg

SEQ ID NO: 1105264 - DNA, 15 bp, Homo sapiens
ctgttcattatttgt

SEQ ID NO: 1105265 - DNA, 15 bp, Homo sapiens
gctgttcattatttg

SEQ ID NO: 1105266 - DNA, 15 bp, Homo sapiens
tgctgttcattattt

SEQ ID NO: 1105267 - DNA, 15 bp, Homo sapiens
ttctgctgttcatta

SEQ ID NO: 1105268 - DNA, 15 bp, Homo sapiens
tttctgctgttcatt

SEQ ID NO: 1105269 - DNA, 15 bp, Homo sapiens
ctttctgctgttcat

SEQ ID NO: 1105270 - DNA, 15 bp, Homo sapiens
tctttctgctgttca

SEQ ID NO: 1105271 - DNA, 15 bp, Homo sapiens
gtctttctgctgttc

SEQ ID NO: 1105272 - DNA, 15 bp, Homo sapiens
agtctttctgctgtt

SEQ ID NO: 1105273 - DNA, 15 bp, Homo sapiens
cagtctttctgctgt

SEQ ID NO: 1105274 - DNA, 15 bp, Homo sapiens
ccagtctttctgctg

SEQ ID NO: 1105275 - DNA, 15 bp, Homo sapiens
tccagtctttctgct

SEQ ID NO: 1105276 - DNA, 15 bp, Homo sapiens
gtccagtctttctgc

SEQ ID NO: 1105277 - DNA, 15 bp, Homo sapiens
cgtccagtctttctg

SEQ ID NO: 1105278 - DNA, 15 bp, Homo sapiens
ccgtccagtctttct

SEQ ID NO: 1105279 - DNA, 15 bp, Homo sapiens
cccgtccagtctttc

SEQ ID NO: 1105280 - DNA, 15 bp, Homo sapiens
ccccgtccagtcttt

SEQ ID NO: 1105281 - DNA, 15 bp, Homo sapiens
tccccgtccagtctt

SEQ ID NO: 1105282 - DNA, 15 bp, Homo sapiens
ttccccgtccagtct

SEQ ID NO: 1105283 - DNA, 15 bp, Homo sapiens
tttccccgtccagtc

SEQ ID NO: 1105284 - DNA, 15 bp, Homo sapiens
gtttccccgtccagt

SEQ ID NO: 1105285 - DNA, 15 bp, Homo sapiens
ggtttccccgtccag

SEQ ID NO: 1105286 - DNA, 15 bp, Homo sapiens
aggtttccccgtcca

SEQ ID NO: 1105287 - DNA, 15 bp, Homo sapiens
taggtttccccgtcc

SEQ ID NO: 1105288 - DNA, 15 bp, Homo sapiens
ataggtttccccgtc

SEQ ID NO: 1105289 - DNA, 15 bp, Homo sapiens
gataggtttccccgt

SEQ ID NO: 1105290 - DNA, 15 bp, Homo sapiens
tgataggtttccccg

SEQ ID NO: 1105291 - DNA, 15 bp, Homo sapiens
ttgataggtttcccc

SEQ ID NO: 1105292 - DNA, 15 bp, Homo sapiens
attgataggtttccc

SEQ ID NO: 1105293 - DNA, 15 bp, Homo sapiens
gattgataggtttcc

SEQ ID NO: 1105294 - DNA, 15 bp, Homo sapiens
ggattgataggtttc

SEQ ID NO: 1105295 - DNA, 15 bp, Homo sapiens
aggattgataggttt

SEQ ID NO: 1105296 - DNA, 15 bp, Homo sapiens
caggattgataggtt

SEQ ID NO: 1105297 - DNA, 15 bp, Homo sapiens
gcaggattgataggt

SEQ ID NO: 1105298 - DNA, 15 bp, Homo sapiens
ggcaggattgatagg

SEQ ID NO: 1105299 - DNA, 15 bp, Homo sapiens
gggcaggattgatag

SEQ ID NO: 1105300 - DNA, 15 bp, Homo sapiens
ggggcaggattgata

SEQ ID NO: 1105301 - DNA, 15 bp, Homo sapiens
gggggcaggattgat

SEQ ID NO: 1105302 - DNA, 15 bp, Homo sapiens
tgggggcaggattga

SEQ ID NO: 1105303 - DNA, 15 bp, Homo sapiens
ctgggggcaggattg

SEQ ID NO: 1105304 - DNA, 15 bp, Homo sapiens
gctgggggcaggatt

SEQ ID NO: 1105305 - DNA, 15 bp, Homo sapiens
ggctgggggcaggat

SEQ ID NO: 1105306 - DNA, 15 bp, Homo sapiens
tggctgggggcagga

SEQ ID NO: 1105307 - DNA, 15 bp, Homo sapiens
atggctgggggcagg

SEQ ID NO: 1105308 - DNA, 15 bp, Homo sapiens
catggctgggggcag

SEQ ID NO: 1105309 - DNA, 15 bp, Homo sapiens
ccatggctgggggca

SEQ ID NO: 1105310 - DNA, 15 bp, Homo sapiens
accatggctgggggc

SEQ ID NO: 1105311 - DNA, 15 bp, Homo sapiens
caccatggctggggg

SEQ ID NO: 1105312 - DNA, 15 bp, Homo sapiens
tcaccatggctgggg

SEQ ID NO: 1105313 - DNA, 15 bp, Homo sapiens
ctcaccatggctggg

SEQ ID NO: 1105314 - DNA, 15 bp, Homo sapiens
cctcaccatggctgg

SEQ ID NO: 1105315 - DNA, 15 bp, Homo sapiens
tcctcaccatggctg

SEQ ID NO: 1105316 - DNA, 15 bp, Homo sapiens
ttcctcaccatggct

SEQ ID NO: 1105317 - DNA, 15 bp, Homo sapiens
cttcctcaccatggc

SEQ ID NO: 1105318 - DNA, 15 bp, Homo sapiens
gcttcctcaccatgg

SEQ ID NO: 1105319 - DNA, 15 bp, Homo sapiens
ggcttcctcaccatg

SEQ ID NO: 1105320 - DNA, 15 bp, Homo sapiens
gggcttcctcaccat

SEQ ID NO: 1105321 - DNA, 15 bp, Homo sapiens
ggggcttcctcacca

SEQ ID NO: 1105322 - DNA, 15 bp, Homo sapiens
tggggcttcctcacc

SEQ ID NO: 1105323 - DNA, 15 bp, Homo sapiens
ttggggcttcctcac

SEQ ID NO: 1105324 - DNA, 15 bp, Homo sapiens
cttggggcttcctca

SEQ ID NO: 1105325 - DNA, 15 bp, Homo sapiens
gcttggggcttcctc

SEQ ID NO: 1105326 - DNA, 15 bp, Homo sapiens
ggcttggggcttcct

SEQ ID NO: 1105327 - DNA, 15 bp, Homo sapiens
tggcttggggcttcc

SEQ ID NO: 1105328 - DNA, 15 bp, Homo sapiens
atggcttggggcttc

SEQ ID NO: 1105329 - DNA, 15 bp, Homo sapiens
catggcttggggctt

SEQ ID NO: 1105330 - DNA, 15 bp, Homo sapiens
ccatggcttggggct

SEQ ID NO: 1105331 - DNA, 15 bp, Homo sapiens
accatggcttggggc

SEQ ID NO: 1105332 - DNA, 15 bp, Homo sapiens
caccatggcttgggg

SEQ ID NO: 1105333 - DNA, 15 bp, Homo sapiens
tcaccatggcttggg

SEQ ID NO: 1105334 - DNA, 15 bp, Homo sapiens
gtcaccatggcttgg

SEQ ID NO: 1105335 - DNA, 15 bp, Homo sapiens
tgtcaccatggcttg

SEQ ID NO: 1105336 - DNA, 15 bp, Homo sapiens
gtgtcaccatggctt

SEQ ID NO: 1105337 - DNA, 15 bp, Homo sapiens
tgtgtcaccatggct

SEQ ID NO: 1105338 - DNA, 15 bp, Homo sapiens
gtgtgtcaccatggc

SEQ ID NO: 1105339 - DNA, 15 bp, Homo sapiens
tgtgtgtcaccatgg

SEQ ID NO: 1105340 - DNA, 15 bp, Homo sapiens
ctgtgtgtcaccatg

SEQ ID NO: 1105341 - DNA, 15 bp, Homo sapiens
gctgtgtgtcaccat

SEQ ID NO: 1105342 - DNA, 15 bp, Homo sapiens
tgctgtgtgtcacca

SEQ ID NO: 1105343 - DNA, 15 bp, Homo sapiens
ctgctgtgtgtcacc

SEQ ID NO: 1105344 - DNA, 15 bp, Homo sapiens
gctgctgtgtgtcac

SEQ ID NO: 1105345 - DNA, 15 bp, Homo sapiens
tgctgctgtgtgtca

SEQ ID NO: 1105346 - DNA, 15 bp, Homo sapiens
gtgctgctgtgtgtc

SEQ ID NO: 1105347 - DNA, 15 bp, Homo sapiens
agtgctgctgtgtgt

SEQ ID NO: 1105348 - DNA, 15 bp, Homo sapiens
cagtgctgctgtgtg

SEQ ID NO: 1105349 - DNA, 15 bp, Homo sapiens
gcagtgctgctgtgt

SEQ ID NO: 1105350 - DNA, 15 bp, Homo sapiens
tgcagtgctgctgtg

SEQ ID NO: 1105351 - DNA, 15 bp, Homo sapiens
ctgcagtgctgctgt

SEQ ID NO: 1105352 - DNA, 15 bp, Homo sapiens
tctgcagtgctgctg

SEQ ID NO: 1105353 - DNA, 15 bp, Homo sapiens
atctgcagtgctgct

SEQ ID NO: 1105354 - DNA, 15 bp, Homo sapiens
tatctgcagtgctgc

SEQ ID NO: 1105355 - DNA, 15 bp, Homo sapiens
ctatctgcagtgctg

SEQ ID NO: 1105356 - DNA, 15 bp, Homo sapiens
gctatctgcagtgct

SEQ ID NO: 1105357 - DNA, 15 bp, Homo sapiens
ggctatctgcagtgc

SEQ ID NO: 1105358 - DNA, 15 bp, Homo sapiens
tggctatctgcagtg

SEQ ID NO: 1105359 - DNA, 15 bp, Homo sapiens
ctggctatctgcagt

SEQ ID NO: 1105360 - DNA, 15 bp, Homo sapiens
tctggctatctgcag

SEQ ID NO: 1105361 - DNA, 15 bp, Homo sapiens
gtctggctatctgca

SEQ ID NO: 1105362 - DNA, 15 bp, Homo sapiens
tgtctggctatctgc

SEQ ID NO: 1105363 - DNA, 15 bp, Homo sapiens
gtgtctggctatctg

SEQ ID NO: 1105364 - DNA, 15 bp, Homo sapiens
tgtgtctggctatct

SEQ ID NO: 1105365 - DNA, 15 bp, Homo sapiens
atgtgtctggctatc

SEQ ID NO: 1105366 - DNA, 15 bp, Homo sapiens
catgtgtctggctat

SEQ ID NO: 1105367 - DNA, 15 bp, Homo sapiens
ccatgtgtctggcta

SEQ ID NO: 1105368 - DNA, 15 bp, Homo sapiens
gccatgtgtctggct

SEQ ID NO: 1105369 - DNA, 15 bp, Homo sapiens
agccatgtgtctggc

SEQ ID NO: 1105370 - DNA, 15 bp, Homo sapiens
tagccatgtgtctgg

SEQ ID NO: 1105371 - DNA, 15 bp, Homo sapiens
atagccatgtgtctg

SEQ ID NO: 1105372 - DNA, 15 bp, Homo sapiens
gatagccatgtgtct

SEQ ID NO: 1105373 - DNA, 15 bp, Homo sapiens
ggatagccatgtgtc

SEQ ID NO: 1105374 - DNA, 15 bp, Homo sapiens
aggatagccatgtgt

SEQ ID NO: 1105375 - DNA, 15 bp, Homo sapiens
taggatagccatgtg

SEQ ID NO: 1105376 - DNA, 15 bp, Homo sapiens
ctaggatagccatgt

SEQ ID NO: 1105377 - DNA, 15 bp, Homo sapiens
tctaggatagccatg

SEQ ID NO: 1105378 - DNA, 15 bp, Homo sapiens
ctctaggatagccat

SEQ ID NO: 1105379 - DNA, 15 bp, Homo sapiens
tctctaggatagcca

SEQ ID NO: 1105380 - DNA, 15 bp, Homo sapiens
ctctctaggatagcc

SEQ ID NO: 1105381 - DNA, 15 bp, Homo sapiens
cctctctaggatagc

SEQ ID NO: 1105382 - DNA, 15 bp, Homo sapiens
gcctctctaggatag

SEQ ID NO: 1105383 - DNA, 15 bp, Homo sapiens
agcctctctaggata

SEQ ID NO: 1105384 - DNA, 15 bp, Homo sapiens
cagcctctctaggat

SEQ ID NO: 1105385 - DNA, 15 bp, Homo sapiens
ccagcctctctagga

SEQ ID NO: 1105386 - DNA, 15 bp, Homo sapiens
gccagcctctctagg

SEQ ID NO: 1105387 - DNA, 15 bp, Homo sapiens
tgccagcctctctag

SEQ ID NO: 1105388 - DNA, 15 bp, Homo sapiens
ttgccagcctctcta

SEQ ID NO: 1105389 - DNA, 15 bp, Homo sapiens
cttgccagcctctct

SEQ ID NO: 1105390 - DNA, 15 bp, Homo sapiens
ccttgccagcctctc

SEQ ID NO: 1105391 - DNA, 15 bp, Homo sapiens
tccttgccagcctct

SEQ ID NO: 1105392 - DNA, 15 bp, Homo sapiens
ctccttgccagcctc

SEQ ID NO: 1105393 - DNA, 15 bp, Homo sapiens
actccttgccagcct

SEQ ID NO: 1105394 - DNA, 15 bp, Homo sapiens
aactccttgccagcc

SEQ ID NO: 1105395 - DNA, 15 bp, Homo sapiens
gaactccttgccagc

SEQ ID NO: 1105396 - DNA, 15 bp, Homo sapiens
cgaactccttgccag

SEQ ID NO: 1105397 - DNA, 15 bp, Homo sapiens
acgaactccttgcca

SEQ ID NO: 1105398 - DNA, 15 bp, Homo sapiens
cacgaactccttgcc

SEQ ID NO: 1105399 - DNA, 15 bp, Homo sapiens
ccacgaactccttgc

SEQ ID NO: 1105400 - DNA, 15 bp, Homo sapiens
gccacgaactccttg

SEQ ID NO: 1105401 - DNA, 15 bp, Homo sapiens
agccacgaactcctt

SEQ ID NO: 1105402 - DNA, 15 bp, Homo sapiens
cagccacgaactcct

SEQ ID NO: 1105403 - DNA, 15 bp, Homo sapiens
gcagccacgaactcc

SEQ ID NO: 1105404 - DNA, 15 bp, Homo sapiens
tgcagccacgaactc

SEQ ID NO: 1105405 - DNA, 15 bp, Homo sapiens
ttgcagccacgaact

SEQ ID NO: 1105406 - DNA, 15 bp, Homo sapiens
tttgcagccacgaac

SEQ ID NO: 1105407 - DNA, 15 bp, Homo sapiens
ttttgcagccacgaa

SEQ ID NO: 1105408 - DNA, 15 bp, Homo sapiens
cttttgcagccacga

SEQ ID NO: 1105409 - DNA, 15 bp, Homo sapiens
tcttttgcagccacg

SEQ ID NO: 1105410 - DNA, 15 bp, Homo sapiens
ttcttttgcagccac

SEQ ID NO: 1105411 - DNA, 15 bp, Homo sapiens
cttcttttgcagcca

SEQ ID NO: 1105412 - DNA, 15 bp, Homo sapiens
acttcttttgcagcc

SEQ ID NO: 1105413 - DNA, 15 bp, Homo sapiens
aacttcttttgcagc

SEQ ID NO: 1105414 - DNA, 15 bp, Homo sapiens
aaacttcttttgcag

SEQ ID NO: 1105415 - DNA, 15 bp, Homo sapiens
gaaacttcttttgca

SEQ ID NO: 1105416 - DNA, 15 bp, Homo sapiens
agaaacttcttttgc

SEQ ID NO: 1105417 - DNA, 15 bp, Homo sapiens
cagaaacttcttttg

SEQ ID NO: 1105418 - DNA, 15 bp, Homo sapiens
ccagaaacttctttt

SEQ ID NO: 1105419 - DNA, 15 bp, Homo sapiens
tccagaaacttcttt

SEQ ID NO: 1105420 - DNA, 15 bp, Homo sapiens
ctccagaaacttctt

SEQ ID NO: 1105421 - DNA, 15 bp, Homo sapiens
gctccagaaacttct

SEQ ID NO: 1105422 - DNA, 15 bp, Homo sapiens
tgctccagaaacttc

SEQ ID NO: 1105423 - DNA, 15 bp, Homo sapiens
ttgctccagaaactt

SEQ ID NO: 1105424 - DNA, 15 bp, Homo sapiens
cttgctccagaaact

SEQ ID NO: 1105425 - DNA, 15 bp, Homo sapiens
tcttgctccagaaac

SEQ ID NO: 1105426 - DNA, 15 bp, Homo sapiens
ctcttgctccagaaa

SEQ ID NO: 1105427 - DNA, 15 bp, Homo sapiens
tctcttgctccagaa

SEQ ID NO: 1105428 - DNA, 15 bp, Homo sapiens
ctctcttgctccaga

SEQ ID NO: 1105429 - DNA, 15 bp, Homo sapiens
tctctcttgctccag

SEQ ID NO: 1105430 - DNA, 15 bp, Homo sapiens
ctctctcttgctcca

SEQ ID NO: 1105431 - DNA, 15 bp, Homo sapiens
gctctctcttgctcc

SEQ ID NO: 1105432 - DNA, 15 bp, Homo sapiens
agctctctcttgctc

SEQ ID NO: 1105433 - DNA, 15 bp, Homo sapiens
gagctctctcttgct

SEQ ID NO: 1105434 - DNA, 15 bp, Homo sapiens
cgagctctctcttgc

SEQ ID NO: 1105435 - DNA, 15 bp, Homo sapiens
gcgagctctctcttg

SEQ ID NO: 1105436 - DNA, 15 bp, Homo sapiens
agcgagctctctctt

SEQ ID NO: 1105437 - DNA, 15 bp, Homo sapiens
gagcgagctctctct

SEQ ID NO: 1105438 - DNA, 15 bp, Homo sapiens
agagcgagctctctc

SEQ ID NO: 1105439 - DNA, 15 bp, Homo sapiens
aagagcgagctctct

SEQ ID NO: 1105440 - DNA, 15 bp, Homo sapiens
caagagcgagctctc

SEQ ID NO: 1105441 - DNA, 15 bp, Homo sapiens
ccaagagcgagctct

SEQ ID NO: 1105442 - DNA, 15 bp, Homo sapiens
cccaagagcgagctc

SEQ ID NO: 1105443 - DNA, 15 bp, Homo sapiens
tcccaagagcgagct

SEQ ID NO: 1105444 - DNA, 15 bp, Homo sapiens
ctcccaagagcgagc

SEQ ID NO: 1105445 - DNA, 15 bp, Homo sapiens
actcccaagagcgag

SEQ ID NO: 1105446 - DNA, 15 bp, Homo sapiens
gactcccaagagcga

SEQ ID NO: 1105447 - DNA, 15 bp, Homo sapiens
tgactcccaagagcg

SEQ ID NO: 1105448 - DNA, 15 bp, Homo sapiens
ctgactcccaagagc

SEQ ID NO: 1105449 - DNA, 15 bp, Homo sapiens
cctgactcccaagag

SEQ ID NO: 1105450 - DNA, 15 bp, Homo sapiens
tcctgactcccaaga

SEQ ID NO: 1105451 - DNA, 15 bp, Homo sapiens
gtcctgactcccaag

SEQ ID NO: 1105452 - DNA, 15 bp, Homo sapiens
ggtcctgactcccaa

SEQ ID NO: 1105453 - DNA, 15 bp, Homo sapiens
aggtcctgactccca

SEQ ID NO: 1105454 - DNA, 15 bp, Homo sapiens
gaggtcctgactccc

SEQ ID NO: 1105455 - DNA, 15 bp, Homo sapiens
ggaggtcctgactcc

SEQ ID NO: 1105456 - DNA, 15 bp, Homo sapiens
cggaggtcctgactc

SEQ ID NO: 1105457 - DNA, 15 bp, Homo sapiens
ccggaggtcctgact

SEQ ID NO: 1105458 - DNA, 15 bp, Homo sapiens
cccggaggtcctgac

SEQ ID NO: 1105459 - DNA, 15 bp, Homo sapiens
ccccggaggtcctga

SEQ ID NO: 1105460 - DNA, 15 bp, Homo sapiens
tccccggaggtcctg

SEQ ID NO: 1105461 - DNA, 15 bp, Homo sapiens
ctccccggaggtcct

SEQ ID NO: 1105462 - DNA, 15 bp, Homo sapiens
tctccccggaggtcc

SEQ ID NO: 1105463 - DNA, 15 bp, Homo sapiens
ctctccccggaggtc

SEQ ID NO: 1105464 - DNA, 15 bp, Homo sapiens
gctctccccggaggt

SEQ ID NO: 1105465 - DNA, 15 bp, Homo sapiens
tgctctccccggagg

SEQ ID NO: 1105466 - DNA, 15 bp, Homo sapiens
ctgctctccccggag

SEQ ID NO: 1105467 - DNA, 15 bp, Homo sapiens
tctgctctccccgga

SEQ ID NO: 1105468 - DNA, 15 bp, Homo sapiens
ctctgctctccccgg

SEQ ID NO: 1105469 - DNA, 15 bp, Homo sapiens
cctctgctctccccg

SEQ ID NO: 1105470 - DNA, 15 bp, Homo sapiens
ccctctgctctcccc

SEQ ID NO: 1105471 - DNA, 15 bp, Homo sapiens
accctctgctctccc

SEQ ID NO: 1105472 - DNA, 15 bp, Homo sapiens
aaccctctgctctcc

SEQ ID NO: 1105473 - DNA, 15 bp, Homo sapiens
gaaccctctgctctc

SEQ ID NO: 1105474 - DNA, 15 bp, Homo sapiens
ggaaccctctgctct

SEQ ID NO: 1105475 - DNA, 15 bp, Homo sapiens
cggaaccctctgctc

SEQ ID NO: 1105476 - DNA, 15 bp, Homo sapiens
tcggaaccctctgct

SEQ ID NO: 1105477 - DNA, 15 bp, Homo sapiens
gtcggaaccctctgc

SEQ ID NO: 1105478 - DNA, 15 bp, Homo sapiens
cgtcggaaccctctg

SEQ ID NO: 1105479 - DNA, 15 bp, Homo sapiens
ccgtcggaaccctct

SEQ ID NO: 1105480 - DNA, 15 bp, Homo sapiens
tccgtcggaaccctc

SEQ ID NO: 1105481 - DNA, 15 bp, Homo sapiens
atccgtcggaaccct

SEQ ID NO: 1105482 - DNA, 15 bp, Homo sapiens
aatccgtcggaaccc

SEQ ID NO: 1105483 - DNA, 15 bp, Homo sapiens
gaatccgtcggaacc

SEQ ID NO: 1105484 - DNA, 15 bp, Homo sapiens
ggaatccgtcggaac

SEQ ID NO: 1105485 - DNA, 15 bp, Homo sapiens
aggaatccgtcggaa

SEQ ID NO: 1105486 - DNA, 15 bp, Homo sapiens
aaggaatccgtcgga

SEQ ID NO: 1105487 - DNA, 15 bp, Homo sapiens
aaaggaatccgtcgg

SEQ ID NO: 1105488 - DNA, 15 bp, Homo sapiens
taaaggaatccgtcg

SEQ ID NO: 1105489 - DNA, 15 bp, Homo sapiens
ataaaggaatccgtc

SEQ ID NO: 1105490 - DNA, 15 bp, Homo sapiens
cataaaggaatccgt

SEQ ID NO: 1105491 - DNA, 15 bp, Homo sapiens
tcataaaggaatccg

SEQ ID NO: 1105492 - DNA, 15 bp, Homo sapiens
ctcataaaggaatcc

SEQ ID NO: 1105493 - DNA, 15 bp, Homo sapiens
actcataaaggaatc

SEQ ID NO: 1105494 - DNA, 15 bp, Homo sapiens
gactcataaaggaat

SEQ ID NO: 1105495 - DNA, 15 bp, Homo sapiens
tgactcataaaggaa

SEQ ID NO: 1105496 - DNA, 15 bp, Homo sapiens
ctgactcataaagga

SEQ ID NO: 1105497 - DNA, 15 bp, Homo sapiens
actgactcataaagg

SEQ ID NO: 1105498 - DNA, 15 bp, Homo sapiens
gactgactcataaag

SEQ ID NO: 1105499 - DNA, 15 bp, Homo sapiens
agactgactcataaa

SEQ ID NO: 1105500 - DNA, 15 bp, Homo sapiens
gagactgactcataa

SEQ ID NO: 1105501 - DNA, 15 bp, Homo sapiens
agagactgactcata

SEQ ID NO: 1105502 - DNA, 15 bp, Homo sapiens
gagagactgactcat

SEQ ID NO: 1105503 - DNA, 15 bp, Homo sapiens
agagagactgactca

SEQ ID NO: 1105504 - DNA, 15 bp, Homo sapiens
gagagagactgactc

SEQ ID NO: 1105505 - DNA, 15 bp, Homo sapiens
agagagagactgact

SEQ ID NO: 1105506 - DNA, 15 bp, Homo sapiens
gagagagagactgac

SEQ ID NO: 1105507 - DNA, 15 bp, Homo sapiens
ggagagagagactga

SEQ ID NO: 1105508 - DNA, 15 bp, Homo sapiens
gggagagagagactg

SEQ ID NO: 1105509 - DNA, 15 bp, Homo sapiens
agggagagagagact

SEQ ID NO: 1105510 - DNA, 15 bp, Homo sapiens
aagggagagagagac

SEQ ID NO: 1105511 - DNA, 15 bp, Homo sapiens
aaagggagagagaga

SEQ ID NO: 1105512 - DNA, 15 bp, Homo sapiens
aaaagggagagagag

SEQ ID NO: 1105513 - DNA, 15 bp, Homo sapiens
taaaagggagagaga

SEQ ID NO: 1105514 - DNA, 15 bp, Homo sapiens
ttaaaagggagagag

SEQ ID NO: 1105515 - DNA, 15 bp, Homo sapiens
tttaaaagggagaga

SEQ ID NO: 1105516 - DNA, 15 bp, Homo sapiens
atttaaaagggagag

SEQ ID NO: 1105517 - DNA, 15 bp, Homo sapiens
catttaaaagggaga

SEQ ID NO: 1105518 - DNA, 15 bp, Homo sapiens
ccatttaaaagggag

SEQ ID NO: 1105519 - DNA, 15 bp, Homo sapiens
accatttaaaaggga

SEQ ID NO: 1105520 - DNA, 15 bp, Homo sapiens
caccatttaaaaggg

SEQ ID NO: 1105521 - DNA, 15 bp, Homo sapiens
ccaccatttaaaagg

SEQ ID NO: 1105522 - DNA, 15 bp, Homo sapiens
cccaccatttaaaag

SEQ ID NO: 1105523 - DNA, 15 bp, Homo sapiens
tcccaccatttaaaa

SEQ ID NO: 1105524 - DNA, 15 bp, Homo sapiens
ttcccaccatttaaa

SEQ ID NO: 1105525 - DNA, 15 bp, Homo sapiens
gttcccaccatttaa

SEQ ID NO: 1105526 - DNA, 15 bp, Homo sapiens
ggttcccaccattta

SEQ ID NO: 1105527 - DNA, 15 bp, Homo sapiens
gggttcccaccattt

SEQ ID NO: 1105528 - DNA, 15 bp, Homo sapiens
agggttcccaccatt

SEQ ID NO: 1105529 - DNA, 15 bp, Homo sapiens
gagggttcccaccat

SEQ ID NO: 1105530 - DNA, 15 bp, Homo sapiens
ggagggttcccacca

SEQ ID NO: 1105531 - DNA, 15 bp, Homo sapiens
gggagggttcccacc

SEQ ID NO: 1105532 - DNA, 15 bp, Homo sapiens
ggggagggttcccac

SEQ ID NO: 1105533 - DNA, 15 bp, Homo sapiens
tggggagggttccca

SEQ ID NO: 1105534 - DNA, 15 bp, Homo sapiens
ttggggagggttccc

SEQ ID NO: 1105535 - DNA, 15 bp, Homo sapiens
tttggggagggttcc

SEQ ID NO: 1105536 - DNA, 15 bp, Homo sapiens
ttttggggagggttc

SEQ ID NO: 1105537 - DNA, 15 bp, Homo sapiens
gttttggggagggtt

SEQ ID NO: 1105538 - DNA, 15 bp, Homo sapiens
ggttttggggagggt

SEQ ID NO: 1105539 - DNA, 15 bp, Homo sapiens
aggttttggggaggg

SEQ ID NO: 1105540 - DNA, 15 bp, Homo sapiens
aaggttttggggagg

SEQ ID NO: 1105541 - DNA, 15 bp, Homo sapiens
aaaggttttggggag

SEQ ID NO: 1105542 - DNA, 15 bp, Homo sapiens
gaaaggttttgggga

SEQ ID NO: 1105543 - DNA, 15 bp, Homo sapiens
ggaaaggttttgggg

SEQ ID NO: 1105544 - DNA, 15 bp, Homo sapiens
gggaaaggttttggg

SEQ ID NO: 1105545 - DNA, 15 bp, Homo sapiens
ggggaaaggttttgg

SEQ ID NO: 1105546 - DNA, 15 bp, Homo sapiens
tggggaaaggttttg

SEQ ID NO: 1105547 - DNA, 15 bp, Homo sapiens
ctggggaaaggtttt

SEQ ID NO: 1105548 - DNA, 15 bp, Homo sapiens
tctggggaaaggttt

SEQ ID NO: 1105549 - DNA, 15 bp, Homo sapiens
gtctggggaaaggtt

SEQ ID NO: 1105550 - DNA, 15 bp, Homo sapiens
tgtctggggaaaggt

SEQ ID NO: 1105551 - DNA, 15 bp, Homo sapiens
gtgtctggggaaagg

SEQ ID NO: 1105552 - DNA, 15 bp, Homo sapiens
tgtgtctggggaaag

SEQ ID NO: 1105553 - DNA, 15 bp, Homo sapiens
atgtgtctggggaaa

SEQ ID NO: 1105554 - DNA, 15 bp, Homo sapiens
aatgtgtctggggaa

SEQ ID NO: 1105555 - DNA, 15 bp, Homo sapiens
gaatgtgtctgggga

SEQ ID NO: 1105556 - DNA, 15 bp, Homo sapiens
agaatgtgtctgggg

SEQ ID NO: 1105557 - DNA, 15 bp, Homo sapiens
gagaatgtgtctggg

SEQ ID NO: 1105558 - DNA, 15 bp, Homo sapiens
ggagaatgtgtctgg

SEQ ID NO: 1105559 - DNA, 15 bp, Homo sapiens
aggagaatgtgtctg

SEQ ID NO: 1105560 - DNA, 15 bp, Homo sapiens
caggagaatgtgtct

SEQ ID NO: 1105561 - DNA, 15 bp, Homo sapiens
acaggagaatgtgtc

SEQ ID NO: 1105562 - DNA, 15 bp, Homo sapiens
cacaggagaatgtgt

SEQ ID NO: 1105563 - DNA, 15 bp, Homo sapiens
gcacaggagaatgtg

SEQ ID NO: 1105564 - DNA, 15 bp, Homo sapiens
ggcacaggagaatgt

SEQ ID NO: 1105565 - DNA, 15 bp, Homo sapiens
gggcacaggagaatg

SEQ ID NO: 1105566 - DNA, 15 bp, Homo sapiens
ggggcacaggagaat

SEQ ID NO: 1105567 - DNA, 15 bp, Homo sapiens
aggggcacaggagaa

SEQ ID NO: 1105568 - DNA, 15 bp, Homo sapiens
gaggggcacaggaga

SEQ ID NO: 1105569 - DNA, 15 bp, Homo sapiens
tgaggggcacaggag

SEQ ID NO: 1105570 - DNA, 15 bp, Homo sapiens
ctgaggggcacagga

SEQ ID NO: 1105571 - DNA, 15 bp, Homo sapiens
tctgaggggcacagg

SEQ ID NO: 1105572 - DNA, 15 bp, Homo sapiens
ctctgaggggcacag

SEQ ID NO: 1105573 - DNA, 15 bp, Homo sapiens
tctctgaggggcaca

SEQ ID NO: 1105574 - DNA, 15 bp, Homo sapiens
ctctctgaggggcac

SEQ ID NO: 1105575 - DNA, 15 bp, Homo sapiens
cctctctgaggggca

SEQ ID NO: 1105576 - DNA, 15 bp, Homo sapiens
gcctctctgaggggc

SEQ ID NO: 1105577 - DNA, 15 bp, Homo sapiens
tgcctctctgagggg

SEQ ID NO: 1105578 - DNA, 15 bp, Homo sapiens
atgcctctctgaggg

SEQ ID NO: 1105579 - DNA, 15 bp, Homo sapiens
catgcctctctgagg

SEQ ID NO: 1105580 - DNA, 15 bp, Homo sapiens
acatgcctctctgag

SEQ ID NO: 1105581 - DNA, 15 bp, Homo sapiens
cacatgcctctctga

SEQ ID NO: 1105582 - DNA, 15 bp, Homo sapiens
tcacatgcctctctg

SEQ ID NO: 1105583 - DNA, 15 bp, Homo sapiens
atcacatgcctctct

SEQ ID NO: 1105584 - DNA, 15 bp, Homo sapiens
catcacatgcctctc

SEQ ID NO: 1105585 - DNA, 15 bp, Homo sapiens
acatcacatgcctct

SEQ ID NO: 1105586 - DNA, 15 bp, Homo sapiens
cacatcacatgcctc

SEQ ID NO: 1105587 - DNA, 15 bp, Homo sapiens
gcacatcacatgcct

SEQ ID NO: 1105588 - DNA, 15 bp, Homo sapiens
tgcacatcacatgcc

SEQ ID NO: 1105589 - DNA, 15 bp, Homo sapiens
ttgcacatcacatgc

SEQ ID NO: 1105590 - DNA, 15 bp, Homo sapiens
cttgcacatcacatg

SEQ ID NO: 1105591 - DNA, 15 bp, Homo sapiens
ccttgcacatcacat

SEQ ID NO: 1105592 - DNA, 15 bp, Homo sapiens
tccttgcacatcaca

SEQ ID NO: 1105593 - DNA, 15 bp, Homo sapiens
ttccttgcacatcac

SEQ ID NO: 1105594 - DNA, 15 bp, Homo sapiens
tttccttgcacatca

SEQ ID NO: 1105595 - DNA, 15 bp, Homo sapiens
ttttccttgcacatc

SEQ ID NO: 1105596 - DNA, 15 bp, Homo sapiens
attttccttgcacat

SEQ ID NO: 1105597 - DNA, 15 bp, Homo sapiens
tattttccttgcaca

SEQ ID NO: 1105598 - DNA, 15 bp, Homo sapiens
ttattttccttgcac

SEQ ID NO: 1105599 - DNA, 15 bp, Homo sapiens
attattttccttgca

SEQ ID NO: 1105600 - DNA, 15 bp, Homo sapiens
tattattttccttgc

SEQ ID NO: 1105601 - DNA, 15 bp, Homo sapiens
ctattattttccttg

SEQ ID NO: 1105602 - DNA, 15 bp, Homo sapiens
cctattattttcctt

SEQ ID NO: 1105603 - DNA, 15 bp, Homo sapiens
tcctattattttcct

SEQ ID NO: 1105604 - DNA, 15 bp, Homo sapiens
atcctattattttcc

SEQ ID NO: 1105605 - DNA, 15 bp, Homo sapiens
tatcctattattttc

SEQ ID NO: 1105606 - DNA, 15 bp, Homo sapiens
atatcctattatttt

SEQ ID NO: 1105607 - DNA, 15 bp, Homo sapiens
tatatcctattattt

SEQ ID NO: 1105608 - DNA, 15 bp, Homo sapiens
ttatatcctattatt

SEQ ID NO: 1105609 - DNA, 15 bp, Homo sapiens
tttatatcctattat

SEQ ID NO: 1105610 - DNA, 15 bp, Homo sapiens
ttttatatcctatta

SEQ ID NO: 1105611 - DNA, 15 bp, Homo sapiens
gttttatatcctatt

SEQ ID NO: 1105612 - DNA, 15 bp, Homo sapiens
tgttttatatcctat

SEQ ID NO: 1105613 - DNA, 15 bp, Homo sapiens
gtgttttatatccta

SEQ ID NO: 1105614 - DNA, 15 bp, Homo sapiens
tgtgttttatatcct

SEQ ID NO: 1105615 - DNA, 15 bp, Homo sapiens
atgtgttttatatcc

SEQ ID NO: 1105616 - DNA, 15 bp, Homo sapiens
gatgtgttttatatc

SEQ ID NO: 1105617 - DNA, 15 bp, Homo sapiens
tgatgtgttttatat

SEQ ID NO: 1105618 - DNA, 15 bp, Homo sapiens
ttgatgtgttttata

SEQ ID NO: 1105619 - DNA, 15 bp, Homo sapiens
cttgatgtgttttat

SEQ ID NO: 1105620 - DNA, 15 bp, Homo sapiens
acttgatgtgtttta

SEQ ID NO: 1105621 - DNA, 15 bp, Homo sapiens
tacttgatgtgtttt

SEQ ID NO: 1105622 - DNA, 15 bp, Homo sapiens
ctacttgatgtgttt

SEQ ID NO: 1105623 - DNA, 15 bp, Homo sapiens
tctacttgatgtgtt

SEQ ID NO: 1105624 - DNA, 15 bp, Homo sapiens
ttctacttgatgtgt

SEQ ID NO: 1105625 - DNA, 15 bp, Homo sapiens
tttctacttgatgtg

SEQ ID NO: 1105626 - DNA, 15 bp, Homo sapiens
ttttctacttgatgt

SEQ ID NO: 1105627 - DNA, 15 bp, Homo sapiens
attttctacttgatg

SEQ ID NO: 1105628 - DNA, 15 bp, Homo sapiens
aattttctacttgat

SEQ ID NO: 1105629 - DNA, 15 bp, Homo sapiens
aaattttctacttga

SEQ ID NO: 1105630 - DNA, 15 bp, Homo sapiens
gaaattttctacttg

SEQ ID NO: 1105631 - DNA, 15 bp, Homo sapiens
agaaattttctactt

SEQ ID NO: 1105632 - DNA, 15 bp, Homo sapiens
aagaaattttctact

SEQ ID NO: 1105633 - DNA, 15 bp, Homo sapiens
taagaaattttctac

SEQ ID NO: 1105634 - DNA, 15 bp, Homo sapiens
ataagaaattttcta

SEQ ID NO: 1105635 - DNA, 15 bp, Homo sapiens
tataagaaattttct

SEQ ID NO: 1105636 - DNA, 15 bp, Homo sapiens
gtataagaaattttc

SEQ ID NO: 1105637 - DNA, 15 bp, Homo sapiens
agtataagaaatttt

SEQ ID NO: 1105638 - DNA, 15 bp, Homo sapiens
aagtataagaaattt

SEQ ID NO: 1105639 - DNA, 15 bp, Homo sapiens
gaagtataagaaatt

SEQ ID NO: 1105640 - DNA, 15 bp, Homo sapiens
tgaagtataagaaat

SEQ ID NO: 1105641 - DNA, 15 bp, Homo sapiens
ctgaagtataagaaa

SEQ ID NO: 1105642 - DNA, 15 bp, Homo sapiens
gctgaagtataagaa

SEQ ID NO: 1105643 - DNA, 15 bp, Homo sapiens
agctgaagtataaga

SEQ ID NO: 1105644 - DNA, 15 bp, Homo sapiens
aagctgaagtataag

SEQ ID NO: 1105645 - DNA, 15 bp, Homo sapiens
gaagctgaagtataa

SEQ ID NO: 1105646 - DNA, 15 bp, Homo sapiens
tgaagctgaagtata

SEQ ID NO: 1105647 - DNA, 15 bp, Homo sapiens
ctgaagctgaagtat

SEQ ID NO: 1105648 - DNA, 15 bp, Homo sapiens
actgaagctgaagta

SEQ ID NO: 1105649 - DNA, 15 bp, Homo sapiens
cactgaagctgaagt

SEQ ID NO: 1105650 - DNA, 15 bp, Homo sapiens
tcactgaagctgaag

SEQ ID NO: 1105651 - DNA, 15 bp, Homo sapiens
ttcactgaagctgaa

SEQ ID NO: 1105652 - DNA, 15 bp, Homo sapiens
cttcactgaagctga

SEQ ID NO: 1105653 - DNA, 15 bp, Homo sapiens
acttcactgaagctg

SEQ ID NO: 1105654 - DNA, 15 bp, Homo sapiens
cacttcactgaagct

SEQ ID NO: 1105655 - DNA, 15 bp, Homo sapiens
acacttcactgaagc

SEQ ID NO: 1105656 - DNA, 15 bp, Homo sapiens
aacacttcactgaag

SEQ ID NO: 1105657 - DNA, 15 bp, Homo sapiens
caacacttcactgaa

SEQ ID NO: 1105658 - DNA, 15 bp, Homo sapiens
acaacacttcactga

SEQ ID NO: 1105659 - DNA, 15 bp, Homo sapiens
gacaacacttcactg

SEQ ID NO: 1105660 - DNA, 15 bp, Homo sapiens
agacaacacttcact

SEQ ID NO: 1105661 - DNA, 15 bp, Homo sapiens
tagacaacacttcac

SEQ ID NO: 1105662 - DNA, 15 bp, Homo sapiens
atagacaacacttca

SEQ ID NO: 1105663 - DNA, 15 bp, Homo sapiens
catagacaacacttc

SEQ ID NO: 1105664 - DNA, 15 bp, Homo sapiens
acatagacaacactt

SEQ ID NO: 1105665 - DNA, 15 bp, Homo sapiens
aacatagacaacact

SEQ ID NO: 1105666 - DNA, 15 bp, Homo sapiens
taacatagacaacac

SEQ ID NO: 1105667 - DNA, 15 bp, Homo sapiens
ttaacatagacaaca

SEQ ID NO: 1105668 - DNA, 15 bp, Homo sapiens
attaacatagacaac

SEQ ID NO: 1105669 - DNA, 15 bp, Homo sapiens
tattaacatagacaa

SEQ ID NO: 1105670 - DNA, 15 bp, Homo sapiens
ctattaacatagaca

SEQ ID NO: 1105671 - DNA, 15 bp, Homo sapiens
cctattaacatagac

SEQ ID NO: 1105672 - DNA, 15 bp, Homo sapiens
gcctattaacataga

SEQ ID NO: 1105673 - DNA, 15 bp, Homo sapiens
tgcctattaacatag

SEQ ID NO: 1105674 - DNA, 15 bp, Homo sapiens
ttgcctattaacata

SEQ ID NO: 1105675 - DNA, 15 bp, Homo sapiens
cttgcctattaacat

SEQ ID NO: 1105676 - DNA, 15 bp, Homo sapiens
acttgcctattaaca

SEQ ID NO: 1105677 - DNA, 15 bp, Homo sapiens
aacttgcctattaac

SEQ ID NO: 1105678 - DNA, 15 bp, Homo sapiens
caacttgcctattaa

SEQ ID NO: 1105679 - DNA, 15 bp, Homo sapiens
tcaacttgcctatta

SEQ ID NO: 1105680 - DNA, 15 bp, Homo sapiens
ttcaacttgcctatt

SEQ ID NO: 1105681 - DNA, 15 bp, Homo sapiens
gttcaacttgcctat

SEQ ID NO: 1105682 - DNA, 15 bp, Homo sapiens
ggttcaacttgccta

SEQ ID NO: 1105683 - DNA, 15 bp, Homo sapiens
aggttcaacttgcct

SEQ ID NO: 1105684 - DNA, 15 bp, Homo sapiens
gaggttcaacttgcc

SEQ ID NO: 1105685 - DNA, 15 bp, Homo sapiens
cgaggttcaacttgc

SEQ ID NO: 1105686 - DNA, 15 bp, Homo sapiens
ccgaggttcaacttg

SEQ ID NO: 1105687 - DNA, 15 bp, Homo sapiens
cccgaggttcaactt

SEQ ID NO: 1105688 - DNA, 15 bp, Homo sapiens
gcccgaggttcaact

SEQ ID NO: 1105689 - DNA, 15 bp, Homo sapiens
agcccgaggttcaac

SEQ ID NO: 1105690 - DNA, 15 bp, Homo sapiens
tagcccgaggttcaa

SEQ ID NO: 1105691 - DNA, 15 bp, Homo sapiens
ttagcccgaggttca

SEQ ID NO: 1105692 - DNA, 15 bp, Homo sapiens
tttagcccgaggttc

SEQ ID NO: 1105693 - DNA, 15 bp, Homo sapiens
ctttagcccgaggtt

SEQ ID NO: 1105694 - DNA, 15 bp, Homo sapiens
tctttagcccgaggt

SEQ ID NO: 1105695 - DNA, 15 bp, Homo sapiens
ttctttagcccgagg

SEQ ID NO: 1105696 - DNA, 15 bp, Homo sapiens
tttctttagcccgag

SEQ ID NO: 1105697 - DNA, 15 bp, Homo sapiens
ctttctttagcccga

SEQ ID NO: 1105698 - DNA, 15 bp, Homo sapiens
cctttctttagcccg

SEQ ID NO: 1105699 - DNA, 15 bp, Homo sapiens
tcctttctttagccc

SEQ ID NO: 1105700 - DNA, 15 bp, Homo sapiens
ttcctttctttagcc

SEQ ID NO: 1105701 - DNA, 15 bp, Homo sapiens
attcctttctttagc

SEQ ID NO: 1105702 - DNA, 15 bp, Homo sapiens
aattcctttctttag

SEQ ID NO: 1105703 - DNA, 15 bp, Homo sapiens
caattcctttcttta

SEQ ID NO: 1105704 - DNA, 15 bp, Homo sapiens
acaattcctttcttt

SEQ ID NO: 1105705 - DNA, 15 bp, Homo sapiens
cacaattcctttctt

SEQ ID NO: 1105706 - DNA, 15 bp, Homo sapiens
acacaattcctttct

SEQ ID NO: 1105707 - DNA, 15 bp, Homo sapiens
cacacaattcctttc

SEQ ID NO: 1105708 - DNA, 15 bp, Homo sapiens
ccacacaattccttt

SEQ ID NO: 1105709 - DNA, 15 bp, Homo sapiens
tccacacaattcctt

SEQ ID NO: 1105710 - DNA, 15 bp, Homo sapiens
atccacacaattcct

SEQ ID NO: 1105711 - DNA, 15 bp, Homo sapiens
catccacacaattcc

SEQ ID NO: 1105712 - DNA, 15 bp, Homo sapiens
ccatccacacaattc

SEQ ID NO: 1105713 - DNA, 15 bp, Homo sapiens
gccatccacacaatt

SEQ ID NO: 1105714 - DNA, 15 bp, Homo sapiens
agccatccacacaat

SEQ ID NO: 1105715 - DNA, 15 bp, Homo sapiens
cagccatccacacaa

SEQ ID NO: 1105716 - DNA, 15 bp, Homo sapiens
gcagccatccacaca

SEQ ID NO: 1105717 - DNA, 15 bp, Homo sapiens
ggcagccatccacac

SEQ ID NO: 1105718 - DNA, 15 bp, Homo sapiens
aggcagccatccaca

SEQ ID NO: 1105719 - DNA, 15 bp, Homo sapiens
aaggcagccatccac

SEQ ID NO: 1105720 - DNA, 15 bp, Homo sapiens
caaggcagccatcca

SEQ ID NO: 1105721 - DNA, 15 bp, Homo sapiens
tcaaggcagccatcc

SEQ ID NO: 1105722 - DNA, 15 bp, Homo sapiens
gtcaaggcagccatc

SEQ ID NO: 1105723 - DNA, 15 bp, Homo sapiens
agtcaaggcagccat

SEQ ID NO: 1105724 - DNA, 15 bp, Homo sapiens
cagtcaaggcagcca

SEQ ID NO: 1105725 - DNA, 15 bp, Homo sapiens
tcagtcaaggcagcc

SEQ ID NO: 1105726 - DNA, 15 bp, Homo sapiens
ctcagtcaaggcagc

SEQ ID NO: 1105727 - DNA, 15 bp, Homo sapiens
tctcagtcaaggcag

SEQ ID NO: 1105728 - DNA, 15 bp, Homo sapiens
gtctcagtcaaggca

SEQ ID NO: 1105729 - DNA, 15 bp, Homo sapiens
tgtctcagtcaaggc

SEQ ID NO: 1105730 - DNA, 15 bp, Homo sapiens
ttgtctcagtcaagg

SEQ ID NO: 1105731 - DNA, 15 bp, Homo sapiens
attgtctcagtcaag

SEQ ID NO: 1105732 - DNA, 15 bp, Homo sapiens
tattgtctcagtcaa

SEQ ID NO: 1105733 - DNA, 15 bp, Homo sapiens
atattgtctcagtca

SEQ ID NO: 1105734 - DNA, 15 bp, Homo sapiens
catattgtctcagtc

SEQ ID NO: 1105735 - DNA, 15 bp, Homo sapiens
ccatattgtctcagt

SEQ ID NO: 1105736 - DNA, 15 bp, Homo sapiens
cccatattgtctcag

SEQ ID NO: 1105737 - DNA, 15 bp, Homo sapiens
gcccatattgtctca

SEQ ID NO: 1105738 - DNA, 15 bp, Homo sapiens
tgcccatattgtctc

SEQ ID NO: 1105739 - DNA, 15 bp, Homo sapiens
ctgcccatattgtct

SEQ ID NO: 1105740 - DNA, 15 bp, Homo sapiens
cctgcccatattgtc

SEQ ID NO: 1105741 - DNA, 15 bp, Homo sapiens
ccctgcccatattgt

SEQ ID NO: 1105742 - DNA, 15 bp, Homo sapiens
cccctgcccatattg

SEQ ID NO: 1105743 - DNA, 15 bp, Homo sapiens
ccccctgcccatatt

SEQ ID NO: 1105744 - DNA, 15 bp, Homo sapiens
cccccctgcccatat

SEQ ID NO: 1105745 - DNA, 15 bp, Homo sapiens
gcccccctgcccata

SEQ ID NO: 1105746 - DNA, 15 bp, Homo sapiens
cgcccccctgcccat

SEQ ID NO: 1105747 - DNA, 15 bp, Homo sapiens
acgcccccctgccca

SEQ ID NO: 1105748 - DNA, 15 bp, Homo sapiens
aacgcccccctgccc

SEQ ID NO: 1105749 - DNA, 15 bp, Homo sapiens
gaacgcccccctgcc

SEQ ID NO: 1105750 - DNA, 15 bp, Homo sapiens
ggaacgcccccctgc

SEQ ID NO: 1105751 - DNA, 15 bp, Homo sapiens
aggaacgcccccctg

SEQ ID NO: 1105752 - DNA, 15 bp, Homo sapiens
caggaacgcccccct

SEQ ID NO: 1105753 - DNA, 15 bp, Homo sapiens
gcaggaacgcccccc

SEQ ID NO: 1105754 - DNA, 15 bp, Homo sapiens
agcaggaacgccccc

SEQ ID NO: 1105755 - DNA, 15 bp, Homo sapiens
aagcaggaacgcccc

SEQ ID NO: 1105756 - DNA, 15 bp, Homo sapiens
gaagcaggaacgccc

SEQ ID NO: 1105757 - DNA, 15 bp, Homo sapiens
ggaagcaggaacgcc

SEQ ID NO: 1105758 - DNA, 15 bp, Homo sapiens
gggaagcaggaacgc

SEQ ID NO: 1105759 - DNA, 15 bp, Homo sapiens
ggggaagcaggaacg

SEQ ID NO: 1105760 - DNA, 15 bp, Homo sapiens
tggggaagcaggaac

SEQ ID NO: 1105761 - DNA, 15 bp, Homo sapiens
ctggggaagcaggaa

SEQ ID NO: 1105762 - DNA, 15 bp, Homo sapiens
tctggggaagcagga

SEQ ID NO: 1105763 - DNA, 15 bp, Homo sapiens
ttctggggaagcagg

SEQ ID NO: 1105764 - DNA, 15 bp, Homo sapiens
gttctggggaagcag

SEQ ID NO: 1105765 - DNA, 15 bp, Homo sapiens
tgttctggggaagca

SEQ ID NO: 1105766 - DNA, 15 bp, Homo sapiens
ttgttctggggaagc

SEQ ID NO: 1105767 - DNA, 15 bp, Homo sapiens
cttgttctggggaag

SEQ ID NO: 1105768 - DNA, 15 bp, Homo sapiens
ccttgttctggggaa

SEQ ID NO: 1105769 - DNA, 15 bp, Homo sapiens
cccttgttctgggga

SEQ ID NO: 1105770 - DNA, 15 bp, Homo sapiens
gcccttgttctgggg

SEQ ID NO: 1105771 - DNA, 15 bp, Homo sapiens
tgcccttgttctggg

SEQ ID NO: 1105772 - DNA, 15 bp, Homo sapiens
ctgcccttgttctgg

SEQ ID NO: 1105773 - DNA, 15 bp, Homo sapiens
cctgcccttgttctg

SEQ ID NO: 1105774 - DNA, 15 bp, Homo sapiens
gcctgcccttgttct

SEQ ID NO: 1105775 - DNA, 15 bp, Homo sapiens
agcctgcccttgttc

SEQ ID NO: 1105776 - DNA, 15 bp, Homo sapiens
aagcctgcccttgtt

SEQ ID NO: 1105777 - DNA, 15 bp, Homo sapiens
gaagcctgcccttgt

SEQ ID NO: 1105778 - DNA, 15 bp, Homo sapiens
ggaagcctgcccttg

SEQ ID NO: 1105779 - DNA, 15 bp, Homo sapiens
gggaagcctgccctt

SEQ ID NO: 1105780 - DNA, 15 bp, Homo sapiens
tgggaagcctgccct

SEQ ID NO: 1105781 - DNA, 15 bp, Homo sapiens
ttgggaagcctgccc

SEQ ID NO: 1105782 - DNA, 15 bp, Homo sapiens
tttgggaagcctgcc

SEQ ID NO: 1105783 - DNA, 15 bp, Homo sapiens
ctttgggaagcctgc

SEQ ID NO: 1105784 - DNA, 15 bp, Homo sapiens
cctttgggaagcctg

SEQ ID NO: 1105785 - DNA, 15 bp, Homo sapiens
gcctttgggaagcct

SEQ ID NO: 1105786 - DNA, 15 bp, Homo sapiens
tgcctttgggaagcc

SEQ ID NO: 1105787 - DNA, 15 bp, Homo sapiens
gtgcctttgggaagc

SEQ ID NO: 1105788 - DNA, 15 bp, Homo sapiens
ggtgcctttgggaag

SEQ ID NO: 1105789 - DNA, 15 bp, Homo sapiens
gggtgcctttgggaa

SEQ ID NO: 1105790 - DNA, 15 bp, Homo sapiens
ggggtgcctttggga

SEQ ID NO: 1105791 - DNA, 15 bp, Homo sapiens
aggggtgcctttggg

SEQ ID NO: 1105792 - DNA, 15 bp, Homo sapiens
aaggggtgcctttgg

SEQ ID NO: 1105793 - DNA, 15 bp, Homo sapiens
taaggggtgcctttg

SEQ ID NO: 1105794 - DNA, 15 bp, Homo sapiens
ataaggggtgccttt

SEQ ID NO: 1105795 - DNA, 15 bp, Homo sapiens
aataaggggtgcctt

SEQ ID NO: 1105796 - DNA, 15 bp, Homo sapiens
aaataaggggtgcct

SEQ ID NO: 1105797 - DNA, 15 bp, Homo sapiens
caaataaggggtgcc

SEQ ID NO: 1105798 - DNA, 15 bp, Homo sapiens
gcaaataaggggtgc

SEQ ID NO: 1105799 - DNA, 15 bp, Homo sapiens
agcaaataaggggtg

SEQ ID NO: 1105800 - DNA, 15 bp, Homo sapiens
cagcaaataaggggt

SEQ ID NO: 1105801 - DNA, 15 bp, Homo sapiens
acagcaaataagggg

SEQ ID NO: 1105802 - DNA, 15 bp, Homo sapiens
gacagcaaataaggg

SEQ ID NO: 1105803 - DNA, 15 bp, Homo sapiens
agacagcaaataagg

SEQ ID NO: 1105804 - DNA, 15 bp, Homo sapiens
gagacagcaaataag

SEQ ID NO: 1105805 - DNA, 15 bp, Homo sapiens
agagacagcaaataa

SEQ ID NO: 1105806 - DNA, 15 bp, Homo sapiens
aagagacagcaaata

SEQ ID NO: 1105807 - DNA, 15 bp, Homo sapiens
gaagagacagcaaat

SEQ ID NO: 1105808 - DNA, 15 bp, Homo sapiens
cgaagagacagcaaa

SEQ ID NO: 1105809 - DNA, 15 bp, Homo sapiens
acgaagagacagcaa

SEQ ID NO: 1105810 - DNA, 15 bp, Homo sapiens
tacgaagagacagca

SEQ ID NO: 1105811 - DNA, 15 bp, Homo sapiens
ttacgaagagacagc

SEQ ID NO: 1105812 - DNA, 15 bp, Homo sapiens
cttacgaagagacag

SEQ ID NO: 1105813 - DNA, 15 bp, Homo sapiens
gcttacgaagagaca

SEQ ID NO: 1105814 - DNA, 15 bp, Homo sapiens
cgcttacgaagagac

SEQ ID NO: 1105815 - DNA, 15 bp, Homo sapiens
acgcttacgaagaga

SEQ ID NO: 1105816 - DNA, 15 bp, Homo sapiens
cacgcttacgaagag

SEQ ID NO: 1105817 - DNA, 15 bp, Homo sapiens
ccacgcttacgaaga

SEQ ID NO: 1105818 - DNA, 15 bp, Homo sapiens
cccacgcttacgaag

SEQ ID NO: 1105819 - DNA, 15 bp, Homo sapiens
gcccacgcttacgaa

SEQ ID NO: 1105820 - DNA, 15 bp, Homo sapiens
tgcccacgcttacga

SEQ ID NO: 1105821 - DNA, 15 bp, Homo sapiens
gtgcccacgcttacg

SEQ ID NO: 1105822 - DNA, 15 bp, Homo sapiens
ggtgcccacgcttac

SEQ ID NO: 1105823 - DNA, 15 bp, Homo sapiens
tggtgcccacgctta

SEQ ID NO: 1105824 - DNA, 15 bp, Homo sapiens
ctggtgcccacgctt

SEQ ID NO: 1105825 - DNA, 15 bp, Homo sapiens
actggtgcccacgct

SEQ ID NO: 1105826 - DNA, 15 bp, Homo sapiens
cactggtgcccacgc

SEQ ID NO: 1105827 - DNA, 15 bp, Homo sapiens
ccactggtgcccacg

SEQ ID NO: 1105828 - DNA, 15 bp, Homo sapiens
cccactggtgcccac

SEQ ID NO: 1105829 - DNA, 15 bp, Homo sapiens
acccactggtgccca

SEQ ID NO: 1105830 - DNA, 15 bp, Homo sapiens
aacccactggtgccc

SEQ ID NO: 1105831 - DNA, 15 bp, Homo sapiens
caacccactggtgcc

SEQ ID NO: 1105832 - DNA, 15 bp, Homo sapiens
tcaacccactggtgc

SEQ ID NO: 1105833 - DNA, 15 bp, Homo sapiens
atcaacccactggtg

SEQ ID NO: 1105834 - DNA, 15 bp, Homo sapiens
catcaacccactggt

SEQ ID NO: 1105835 - DNA, 15 bp, Homo sapiens
acatcaacccactgg

SEQ ID NO: 1105836 - DNA, 15 bp, Homo sapiens
cacatcaacccactg

SEQ ID NO: 1105837 - DNA, 15 bp, Homo sapiens
ccacatcaacccact

SEQ ID NO: 1105838 - DNA, 15 bp, Homo sapiens
cccacatcaacccac

SEQ ID NO: 1105839 - DNA, 15 bp, Homo sapiens
tcccacatcaaccca

SEQ ID NO: 1105840 - DNA, 15 bp, Homo sapiens
ttcccacatcaaccc

SEQ ID NO: 1105841 - DNA, 15 bp, Homo sapiens
tttcccacatcaacc

SEQ ID NO: 1105842 - DNA, 15 bp, Homo sapiens
gtttcccacatcaac

SEQ ID NO: 1105843 - DNA, 15 bp, Homo sapiens
tgtttcccacatcaa

SEQ ID NO: 1105844 - DNA, 15 bp, Homo sapiens
ctgtttcccacatca

SEQ ID NO: 1105845 - DNA, 15 bp, Homo sapiens
actgtttcccacatc

SEQ ID NO: 1105846 - DNA, 15 bp, Homo sapiens
cactgtttcccacat

SEQ ID NO: 1105847 - DNA, 15 bp, Homo sapiens
gcactgtttcccaca

SEQ ID NO: 1105848 - DNA, 15 bp, Homo sapiens
agcactgtttcccac

SEQ ID NO: 1105849 - DNA, 15 bp, Homo sapiens
cagcactgtttccca

SEQ ID NO: 1105850 - DNA, 15 bp, Homo sapiens
ccagcactgtttccc

SEQ ID NO: 1105851 - DNA, 15 bp, Homo sapiens
accagcactgtttcc

SEQ ID NO: 1105852 - DNA, 15 bp, Homo sapiens
caccagcactgtttc

SEQ ID NO: 1105853 - DNA, 15 bp, Homo sapiens
gcaccagcactgttt

SEQ ID NO: 1105854 - DNA, 15 bp, Homo sapiens
tgcaccagcactgtt

SEQ ID NO: 1105855 - DNA, 15 bp, Homo sapiens
ttgcaccagcactgt

SEQ ID NO: 1105856 - DNA, 15 bp, Homo sapiens
cttgcaccagcactg

SEQ ID NO: 1105857 - DNA, 15 bp, Homo sapiens
acttgcaccagcact

SEQ ID NO: 1105858 - DNA, 15 bp, Homo sapiens
cacttgcaccagcac

SEQ ID NO: 1105859 - DNA, 15 bp, Homo sapiens
acacttgcaccagca

SEQ ID NO: 1105860 - DNA, 15 bp, Homo sapiens
aacacttgcaccagc

SEQ ID NO: 1105861 - DNA, 15 bp, Homo sapiens
aaacacttgcaccag

SEQ ID NO: 1105862 - DNA, 15 bp, Homo sapiens
taaacacttgcacca

SEQ ID NO: 1105863 - DNA, 15 bp, Homo sapiens
ttaaacacttgcacc

SEQ ID NO: 1105864 - DNA, 15 bp, Homo sapiens
cttaaacacttgcac

SEQ ID NO: 1105865 - DNA, 15 bp, Homo sapiens
acttaaacacttgca

SEQ ID NO: 1105866 - DNA, 15 bp, Homo sapiens
aacttaaacacttgc

SEQ ID NO: 1105867 - DNA, 15 bp, Homo sapiens
aaacttaaacacttg

SEQ ID NO: 1105868 - DNA, 15 bp, Homo sapiens
aaaacttaaacactt

SEQ ID NO: 1105869 - DNA, 15 bp, Homo sapiens
caaaacttaaacact

SEQ ID NO: 1105870 - DNA, 15 bp, Homo sapiens
ccaaaacttaaacac

SEQ ID NO: 1105871 - DNA, 15 bp, Homo sapiens
tccaaaacttaaaca

SEQ ID NO: 1105872 - DNA, 15 bp, Homo sapiens
atccaaaacttaaac

SEQ ID NO: 1105873 - DNA, 15 bp, Homo sapiens
tatccaaaacttaaa

SEQ ID NO: 1105874 - DNA, 15 bp, Homo sapiens
ttatccaaaacttaa

SEQ ID NO: 1105875 - DNA, 15 bp, Homo sapiens
tttatccaaaactta

SEQ ID NO: 1105876 - DNA, 15 bp, Homo sapiens
gtttatccaaaactt

SEQ ID NO: 1105877 - DNA, 15 bp, Homo sapiens
agtttatccaaaact

SEQ ID NO: 1105878 - DNA, 15 bp, Homo sapiens
cagtttatccaaaac

SEQ ID NO: 1105879 - DNA, 15 bp, Homo sapiens
tcagtttatccaaaa

SEQ ID NO: 1105880 - DNA, 15 bp, Homo sapiens
ctcagtttatccaaa

SEQ ID NO: 1105881 - DNA, 15 bp, Homo sapiens
cctcagtttatccaa

SEQ ID NO: 1105882 - DNA, 15 bp, Homo sapiens
tcctcagtttatcca

SEQ ID NO: 1105883 - DNA, 15 bp, Homo sapiens
atcctcagtttatcc

SEQ ID NO: 1105884 - DNA, 15 bp, Homo sapiens
aatcctcagtttatc

SEQ ID NO: 1105885 - DNA, 15 bp, Homo sapiens
aaatcctcagtttat

SEQ ID NO: 1105886 - DNA, 15 bp, Homo sapiens
aaaatcctcagttta

SEQ ID NO: 1105887 - DNA, 15 bp, Homo sapiens
caaaatcctcagttt

SEQ ID NO: 1105888 - DNA, 15 bp, Homo sapiens
tcaaaatcctcagtt

SEQ ID NO: 1105889 - DNA, 15 bp, Homo sapiens
ctcaaaatcctcagt

SEQ ID NO: 1105890 - DNA, 15 bp, Homo sapiens
tctcaaaatcctcag

SEQ ID NO: 1105891 - DNA, 15 bp, Homo sapiens
ttctcaaaatcctca

SEQ ID NO: 1105892 - DNA, 15 bp, Homo sapiens
attctcaaaatcctc

SEQ ID NO: 1105893 - DNA, 15 bp, Homo sapiens
gattctcaaaatcct

SEQ ID NO: 1105894 - DNA, 15 bp, Homo sapiens
tgattctcaaaatcc

SEQ ID NO: 1105895 - DNA, 15 bp, Homo sapiens
atgattctcaaaatc

SEQ ID NO: 1105896 - DNA, 15 bp, Homo sapiens
aatgattctcaaaat

SEQ ID NO: 1105897 - DNA, 15 bp, Homo sapiens
taatgattctcaaaa

SEQ ID NO: 1105898 - DNA, 15 bp, Homo sapiens
ataatgattctcaaa

SEQ ID NO: 1105899 - DNA, 15 bp, Homo sapiens
aataatgattctcaa

SEQ ID NO: 1105900 - DNA, 15 bp, Homo sapiens
taataatgattctca

SEQ ID NO: 1105901 - DNA, 15 bp, Homo sapiens
gtaataatgattctc

SEQ ID NO: 1105902 - DNA, 15 bp, Homo sapiens
tgtaataatgattct

SEQ ID NO: 1105903 - DNA, 15 bp, Homo sapiens
atgtaataatgattc

SEQ ID NO: 1105904 - DNA, 15 bp, Homo sapiens
aatgtaataatgatt

SEQ ID NO: 1105905 - DNA, 15 bp, Homo sapiens
taatgtaataatgat

SEQ ID NO: 1105906 - DNA, 15 bp, Homo sapiens
gtaatgtaataatga

SEQ ID NO: 1105907 - DNA, 15 bp, Homo sapiens
tgtaatgtaataatg

SEQ ID NO: 1105908 - DNA, 15 bp, Homo sapiens
atgtaatgtaataat

SEQ ID NO: 1105909 - DNA, 15 bp, Homo sapiens
tatgtaatgtaataa

SEQ ID NO: 1105910 - DNA, 15 bp, Homo sapiens
ctatgtaatgtaata

SEQ ID NO: 1105911 - DNA, 15 bp, Homo sapiens
gctatgtaatgtaat

SEQ ID NO: 1105912 - DNA, 15 bp, Homo sapiens
tgctatgtaatgtaa

SEQ ID NO: 1105913 - DNA, 15 bp, Homo sapiens
ttgctatgtaatgta

SEQ ID NO: 1105914 - DNA, 15 bp, Homo sapiens
gttgctatgtaatgt

SEQ ID NO: 1105915 - DNA, 15 bp, Homo sapiens
tgttgctatgtaatg

SEQ ID NO: 1105916 - DNA, 15 bp, Homo sapiens
ttgttgctatgtaat

SEQ ID NO: 1105917 - DNA, 15 bp, Homo sapiens
tttgttgctatgtaa

SEQ ID NO: 1105918 - DNA, 15 bp, Homo sapiens
ctttgttgctatgta

SEQ ID NO: 1105919 - DNA, 15 bp, Homo sapiens
tctttgttgctatgt

SEQ ID NO: 1105920 - DNA, 15 bp, Homo sapiens
ttctttgttgctatg

SEQ ID NO: 1105921 - DNA, 15 bp, Homo sapiens
tttctttgttgctat

SEQ ID NO: 1105922 - DNA, 15 bp, Homo sapiens
gtttctttgttgcta

SEQ ID NO: 1105923 - DNA, 15 bp, Homo sapiens
tgtttctttgttgct

SEQ ID NO: 1105924 - DNA, 15 bp, Homo sapiens
ctgtttctttgttgc

SEQ ID NO: 1105925 - DNA, 15 bp, Homo sapiens
tctgtttctttgttg

SEQ ID NO: 1105926 - DNA, 15 bp, Homo sapiens
atctgtttctttgtt

SEQ ID NO: 1105927 - DNA, 15 bp, Homo sapiens
aatctgtttctttgt

SEQ ID NO: 1105928 - DNA, 15 bp, Homo sapiens
caatctgtttctttg

SEQ ID NO: 1105929 - DNA, 15 bp, Homo sapiens
tcaatctgtttcttt

SEQ ID NO: 1105930 - DNA, 15 bp, Homo sapiens
atcaatctgtttctt

SEQ ID NO: 1105931 - DNA, 15 bp, Homo sapiens
tatcaatctgtttct

SEQ ID NO: 1105932 - DNA, 15 bp, Homo sapiens
atatcaatctgtttc

SEQ ID NO: 1105933 - DNA, 15 bp, Homo sapiens
tatatcaatctgttt

SEQ ID NO: 1105934 - DNA, 15 bp, Homo sapiens
ttatatcaatctgtt

SEQ ID NO: 1105935 - DNA, 15 bp, Homo sapiens
attatatcaatctgt

SEQ ID NO: 1105936 - DNA, 15 bp, Homo sapiens
gattatatcaatctg

SEQ ID NO: 1105937 - DNA, 15 bp, Homo sapiens
agattatatcaatct

SEQ ID NO: 1105938 - DNA, 15 bp, Homo sapiens
cagattatatcaatc

SEQ ID NO: 1105939 - DNA, 15 bp, Homo sapiens
acagattatatcaat

SEQ ID NO: 1105940 - DNA, 15 bp, Homo sapiens
cacagattatatcaa

SEQ ID NO: 1105941 - DNA, 15 bp, Homo sapiens
acacagattatatca

SEQ ID NO: 1105942 - DNA, 15 bp, Homo sapiens
cacacagattatatc

SEQ ID NO: 1105943 - DNA, 15 bp, Homo sapiens
tcacacagattatat

SEQ ID NO: 1105944 - DNA, 15 bp, Homo sapiens
ttcacacagattata

SEQ ID NO: 1105945 - DNA, 15 bp, Homo sapiens
tttcacacagattat

SEQ ID NO: 1105946 - DNA, 15 bp, Homo sapiens
atttcacacagatta

SEQ ID NO: 1105947 - DNA, 15 bp, Homo sapiens
tatttcacacagatt

SEQ ID NO: 1105948 - DNA, 15 bp, Homo sapiens
ttatttcacacagat

SEQ ID NO: 1105949 - DNA, 15 bp, Homo sapiens
tttatttcacacaga

SEQ ID NO: 1105950 - DNA, 15 bp, Homo sapiens
atttatttcacacag

SEQ ID NO: 1105951 - DNA, 15 bp, Homo sapiens
aatttatttcacaca

SEQ ID NO: 1105952 - DNA, 15 bp, Homo sapiens
caatttatttcacac

SEQ ID NO: 1105953 - DNA, 15 bp, Homo sapiens
gcaatttatttcaca

SEQ ID NO: 1105954 - DNA, 15 bp, Homo sapiens
agcaatttatttcac

SEQ ID NO: 1105955 - DNA, 15 bp, Homo sapiens
cagcaatttatttca

SEQ ID NO: 1105956 - DNA, 15 bp, Homo sapiens
tcagcaatttatttc

SEQ ID NO: 1105957 - DNA, 15 bp, Homo sapiens
ctcagcaatttattt

SEQ ID NO: 1105958 - DNA, 15 bp, Homo sapiens
cctcagcaatttatt

SEQ ID NO: 1105959 - DNA, 15 bp, Homo sapiens
tcctcagcaatttat

SEQ ID NO: 1105960 - DNA, 15 bp, Homo sapiens
ctcctcagcaattta

SEQ ID NO: 1105961 - DNA, 15 bp, Homo sapiens
tctcctcagcaattt

SEQ ID NO: 1105962 - DNA, 15 bp, Homo sapiens
ctctcctcagcaatt

SEQ ID NO: 1105963 - DNA, 15 bp, Homo sapiens
cctctcctcagcaat

SEQ ID NO: 1105964 - DNA, 15 bp, Homo sapiens
ccctctcctcagcaa

SEQ ID NO: 1105965 - DNA, 15 bp, Homo sapiens
tccctctcctcagca

SEQ ID NO: 1105966 - DNA, 15 bp, Homo sapiens
atccctctcctcagc

SEQ ID NO: 1105967 - DNA, 15 bp, Homo sapiens
aatccctctcctcag

SEQ ID NO: 1105968 - DNA, 15 bp, Homo sapiens
caatccctctcctca

SEQ ID NO: 1105969 - DNA, 15 bp, Homo sapiens
acaatccctctcctc

SEQ ID NO: 1105970 - DNA, 15 bp, Homo sapiens
tacaatccctctcct

SEQ ID NO: 1105971 - DNA, 15 bp, Homo sapiens
ctacaatccctctcc

SEQ ID NO: 1105972 - DNA, 15 bp, Homo sapiens
cctacaatccctctc

SEQ ID NO: 1105973 - DNA, 15 bp, Homo sapiens
ccctacaatccctct

SEQ ID NO: 1105974 - DNA, 15 bp, Homo sapiens
tccctacaatccctc

SEQ ID NO: 1105975 - DNA, 15 bp, Homo sapiens
ttccctacaatccct

SEQ ID NO: 1105976 - DNA, 15 bp, Homo sapiens
cttccctacaatccc

SEQ ID NO: 1105977 - DNA, 15 bp, Homo sapiens
tcttccctacaatcc

SEQ ID NO: 1105978 - DNA, 15 bp, Homo sapiens
ttcttccctacaatc

SEQ ID NO: 1105979 - DNA, 15 bp, Homo sapiens
cttcttccctacaat

SEQ ID NO: 1105980 - DNA, 15 bp, Homo sapiens
acttcttccctacaa

SEQ ID NO: 1105981 - DNA, 15 bp, Homo sapiens
aacttcttccctaca

SEQ ID NO: 1105982 - DNA, 15 bp, Homo sapiens
caacttcttccctac

SEQ ID NO: 1105983 - DNA, 15 bp, Homo sapiens
gcaacttcttcccta

SEQ ID NO: 1105984 - DNA, 15 bp, Homo sapiens
agcaacttcttccct

SEQ ID NO: 1105985 - DNA, 15 bp, Homo sapiens
aagcaacttcttccc

SEQ ID NO: 1105986 - DNA, 15 bp, Homo sapiens
taagcaacttcttcc

SEQ ID NO: 1105987 - DNA, 15 bp, Homo sapiens
ctaagcaacttcttc

SEQ ID NO: 1105988 - DNA, 15 bp, Homo sapiens
actaagcaacttctt

SEQ ID NO: 1105989 - DNA, 15 bp, Homo sapiens
aactaagcaacttct

SEQ ID NO: 1105990 - DNA, 15 bp, Homo sapiens
taactaagcaacttc

SEQ ID NO: 1105991 - DNA, 15 bp, Homo sapiens
ctaactaagcaactt

SEQ ID NO: 1105992 - DNA, 15 bp, Homo sapiens
cctaactaagcaact

SEQ ID NO: 1105993 - DNA, 15 bp, Homo sapiens
gcctaactaagcaac

SEQ ID NO: 1105994 - DNA, 15 bp, Homo sapiens
tgcctaactaagcaa

SEQ ID NO: 1105995 - DNA, 15 bp, Homo sapiens
gtgcctaactaagca

SEQ ID NO: 1105996 - DNA, 15 bp, Homo sapiens
ggtgcctaactaagc

SEQ ID NO: 1105997 - DNA, 15 bp, Homo sapiens
aggtgcctaactaag

SEQ ID NO: 1105998 - DNA, 15 bp, Homo sapiens
caggtgcctaactaa

SEQ ID NO: 1105999 - DNA, 15 bp, Homo sapiens
ccaggtgcctaacta

SEQ ID NO: 1106000 - DNA, 15 bp, Homo sapiens
cccaggtgcctaact

SEQ ID NO: 1106001 - DNA, 15 bp, Homo sapiens
tcccaggtgcctaac

SEQ ID NO: 1106002 - DNA, 15 bp, Homo sapiens
ttcccaggtgcctaa

SEQ ID NO: 1106003 - DNA, 15 bp, Homo sapiens
cttcccaggtgccta

SEQ ID NO: 1106004 - DNA, 15 bp, Homo sapiens
gcttcccaggtgcct

SEQ ID NO: 1106005 - DNA, 15 bp, Homo sapiens
agcttcccaggtgcc

SEQ ID NO: 1106006 - DNA, 15 bp, Homo sapiens
gagcttcccaggtgc

SEQ ID NO: 1106007 - DNA, 15 bp, Homo sapiens
tgagcttcccaggtg

SEQ ID NO: 1106008 - DNA, 15 bp, Homo sapiens
ttgagcttcccaggt

SEQ ID NO: 1106009 - DNA, 15 bp, Homo sapiens
tttgagcttcccagg

SEQ ID NO: 1106010 - DNA, 15 bp, Homo sapiens
atttgagcttcccag

SEQ ID NO: 1106011 - DNA, 15 bp, Homo sapiens
gatttgagcttccca

SEQ ID NO: 1106012 - DNA, 15 bp, Homo sapiens
tgatttgagcttccc

SEQ ID NO: 1106013 - DNA, 15 bp, Homo sapiens
atgatttgagcttcc

SEQ ID NO: 1106014 - DNA, 15 bp, Homo sapiens
aatgatttgagcttc

SEQ ID NO: 1106015 - DNA, 15 bp, Homo sapiens
aaatgatttgagctt

SEQ ID NO: 1106016 - DNA, 15 bp, Homo sapiens
taaatgatttgagct

SEQ ID NO: 1106017 - DNA, 15 bp, Homo sapiens
ctaaatgatttgagc

SEQ ID NO: 1106018 - DNA, 15 bp, Homo sapiens
actaaatgatttgag

SEQ ID NO: 1106019 - DNA, 15 bp, Homo sapiens
aactaaatgatttga

SEQ ID NO: 1106020 - DNA, 15 bp, Homo sapiens
aaactaaatgatttg

SEQ ID NO: 1106021 - DNA, 15 bp, Homo sapiens
taaactaaatgattt

SEQ ID NO: 1106022 - DNA, 15 bp, Homo sapiens
ttaaactaaatgatt

SEQ ID NO: 1106023 - DNA, 15 bp, Homo sapiens
tttaaactaaatgat

SEQ ID NO: 1106024 - DNA, 15 bp, Homo sapiens
gtttaaactaaatga

SEQ ID NO: 1106025 - DNA, 15 bp, Homo sapiens
agtttaaactaaatg

SEQ ID NO: 1106026 - DNA, 15 bp, Homo sapiens
cagtttaaactaaat

SEQ ID NO: 1106027 - DNA, 15 bp, Homo sapiens
acagtttaaactaaa

SEQ ID NO: 1106028 - DNA, 15 bp, Homo sapiens
tacagtttaaactaa

SEQ ID NO: 1106029 - DNA, 15 bp, Homo sapiens
ttacagtttaaacta

SEQ ID NO: 1106030 - DNA, 15 bp, Homo sapiens
cttacagtttaaact

SEQ ID NO: 1106031 - DNA, 15 bp, Homo sapiens
acttacagtttaaac

SEQ ID NO: 1106032 - DNA, 15 bp, Homo sapiens
tacttacagtttaaa

SEQ ID NO: 1106033 - DNA, 15 bp, Homo sapiens
ctacttacagtttaa

SEQ ID NO: 1106034 - DNA, 15 bp, Homo sapiens
tctacttacagttta

SEQ ID NO: 1106035 - DNA, 15 bp, Homo sapiens
ctctacttacagttt

SEQ ID NO: 1106036 - DNA, 15 bp, Homo sapiens
actctacttacagtt

SEQ ID NO: 1106037 - DNA, 15 bp, Homo sapiens
aactctacttacagt

SEQ ID NO: 1106038 - DNA, 15 bp, Homo sapiens
caactctacttacag

SEQ ID NO: 1106039 - DNA, 15 bp, Homo sapiens
acaactctacttaca

SEQ ID NO: 1106040 - DNA, 15 bp, Homo sapiens
gacaactctacttac

SEQ ID NO: 1106041 - DNA, 15 bp, Homo sapiens
agacaactctactta

SEQ ID NO: 1106042 - DNA, 15 bp, Homo sapiens
aagacaactctactt

SEQ ID NO: 1106043 - DNA, 15 bp, Homo sapiens
gaagacaactctact

SEQ ID NO: 1106044 - DNA, 15 bp, Homo sapiens
ggaagacaactctac

SEQ ID NO: 1106045 - DNA, 15 bp, Homo sapiens
gggaagacaactcta

SEQ ID NO: 1106046 - DNA, 15 bp, Homo sapiens
tgggaagacaactct

SEQ ID NO: 1106047 - DNA, 15 bp, Homo sapiens
ttgggaagacaactc

SEQ ID NO: 1106048 - DNA, 15 bp, Homo sapiens
gttgggaagacaact

SEQ ID NO: 1106049 - DNA, 15 bp, Homo sapiens
cgttgggaagacaac

SEQ ID NO: 1106050 - DNA, 15 bp, Homo sapiens
tcgttgggaagacaa

SEQ ID NO: 1106051 - DNA, 15 bp, Homo sapiens
ctcgttgggaagaca

SEQ ID NO: 1106052 - DNA, 15 bp, Homo sapiens
tctcgttgggaagac

SEQ ID NO: 1106053 - DNA, 15 bp, Homo sapiens
ttctcgttgggaaga

SEQ ID NO: 1106054 - DNA, 15 bp, Homo sapiens
gttctcgttgggaag

SEQ ID NO: 1106055 - DNA, 15 bp, Homo sapiens
agttctcgttgggaa

SEQ ID NO: 1106056 - DNA, 15 bp, Homo sapiens
cagttctcgttggga

SEQ ID NO: 1106057 - DNA, 15 bp, Homo sapiens
ccagttctcgttggg

SEQ ID NO: 1106058 - DNA, 15 bp, Homo sapiens
accagttctcgttgg

SEQ ID NO: 1106059 - DNA, 15 bp, Homo sapiens
caccagttctcgttg

SEQ ID NO: 1106060 - DNA, 15 bp, Homo sapiens
tcaccagttctcgtt

SEQ ID NO: 1106061 - DNA, 15 bp, Homo sapiens
atcaccagttctcgt

SEQ ID NO: 1106062 - DNA, 15 bp, Homo sapiens
aatcaccagttctcg

SEQ ID NO: 1106063 - DNA, 15 bp, Homo sapiens
gaatcaccagttctc

SEQ ID NO: 1106064 - DNA, 15 bp, Homo sapiens
ggaatcaccagttct

SEQ ID NO: 1106065 - DNA, 15 bp, Homo sapiens
aggaatcaccagttc

SEQ ID NO: 1106066 - DNA, 15 bp, Homo sapiens
caggaatcaccagtt

SEQ ID NO: 1106067 - DNA, 15 bp, Homo sapiens
tcaggaatcaccagt

SEQ ID NO: 1106068 - DNA, 15 bp, Homo sapiens
atcaggaatcaccag

SEQ ID NO: 1106069 - DNA, 15 bp, Homo sapiens
aatcaggaatcacca

SEQ ID NO: 1106070 - DNA, 15 bp, Homo sapiens
aaatcaggaatcacc

SEQ ID NO: 1106071 - DNA, 15 bp, Homo sapiens
gaaatcaggaatcac

SEQ ID NO: 1106072 - DNA, 15 bp, Homo sapiens
tgaaatcaggaatca

SEQ ID NO: 1106073 - DNA, 15 bp, Homo sapiens
ctgaaatcaggaatc

SEQ ID NO: 1106074 - DNA, 15 bp, Homo sapiens
tctgaaatcaggaat

SEQ ID NO: 1106075 - DNA, 15 bp, Homo sapiens
ttctgaaatcaggaa

SEQ ID NO: 1106076 - DNA, 15 bp, Homo sapiens
cttctgaaatcagga

SEQ ID NO: 1106077 - DNA, 15 bp, Homo sapiens
ccttctgaaatcagg

SEQ ID NO: 1106078 - DNA, 15 bp, Homo sapiens
gccttctgaaatcag

SEQ ID NO: 1106079 - DNA, 15 bp, Homo sapiens
agccttctgaaatca

SEQ ID NO: 1106080 - DNA, 15 bp, Homo sapiens
gagccttctgaaatc

SEQ ID NO: 1106081 - DNA, 15 bp, Homo sapiens
tgagccttctgaaat

SEQ ID NO: 1106082 - DNA, 15 bp, Homo sapiens
atgagccttctgaaa

SEQ ID NO: 1106083 - DNA, 15 bp, Homo sapiens
gatgagccttctgaa

SEQ ID NO: 1106084 - DNA, 15 bp, Homo sapiens
tgatgagccttctga

SEQ ID NO: 1106085 - DNA, 15 bp, Homo sapiens
ctgatgagccttctg

SEQ ID NO: 1106086 - DNA, 15 bp, Homo sapiens
tctgatgagccttct

SEQ ID NO: 1106087 - DNA, 15 bp, Homo sapiens
gtctgatgagccttc

SEQ ID NO: 1106088 - DNA, 15 bp, Homo sapiens
ggtctgatgagcctt

SEQ ID NO: 1106089 - DNA, 15 bp, Homo sapiens
gggtctgatgagcct

SEQ ID NO: 1106090 - DNA, 15 bp, Homo sapiens
ggggtctgatgagcc

SEQ ID NO: 1106091 - DNA, 15 bp, Homo sapiens
aggggtctgatgagc

SEQ ID NO: 1106092 - DNA, 15 bp, Homo sapiens
taggggtctgatgag

SEQ ID NO: 1106093 - DNA, 15 bp, Homo sapiens
gtaggggtctgatga

SEQ ID NO: 1106094 - DNA, 15 bp, Homo sapiens
tgtaggggtctgatg

SEQ ID NO: 1106095 - DNA, 15 bp, Homo sapiens
gtgtaggggtctgat

SEQ ID NO: 1106096 - DNA, 15 bp, Homo sapiens
ggtgtaggggtctga

SEQ ID NO: 1106097 - DNA, 15 bp, Homo sapiens
gggtgtaggggtctg

SEQ ID NO: 1106098 - DNA, 15 bp, Homo sapiens
tgggtgtaggggtct

SEQ ID NO: 1106099 - DNA, 15 bp, Homo sapiens
ttgggtgtaggggtc

SEQ ID NO: 1106100 - DNA, 15 bp, Homo sapiens
cttgggtgtaggggt

SEQ ID NO: 1106101 - DNA, 15 bp, Homo sapiens
acttgggtgtagggg

SEQ ID NO: 1106102 - DNA, 15 bp, Homo sapiens
gacttgggtgtaggg

SEQ ID NO: 1106103 - DNA, 15 bp, Homo sapiens
agacttgggtgtagg

SEQ ID NO: 1106104 - DNA, 15 bp, Homo sapiens
aagacttgggtgtag

SEQ ID NO: 1106105 - DNA, 15 bp, Homo sapiens
aaagacttgggtgta

SEQ ID NO: 1106106 - DNA, 15 bp, Homo sapiens
aaaagacttgggtgt

SEQ ID NO: 1106107 - DNA, 15 bp, Homo sapiens
taaaagacttgggtg

SEQ ID NO: 1106108 - DNA, 15 bp, Homo sapiens
ttaaaagacttgggt

SEQ ID NO: 1106109 - DNA, 15 bp, Homo sapiens
gttaaaagacttggg

SEQ ID NO: 1106110 - DNA, 15 bp, Homo sapiens
tgttaaaagacttgg

SEQ ID NO: 1106111 - DNA, 15 bp, Homo sapiens
gtgttaaaagacttg

SEQ ID NO: 1106112 - DNA, 15 bp, Homo sapiens
cgtgttaaaagactt

SEQ ID NO: 1106113 - DNA, 15 bp, Homo sapiens
ccgtgttaaaagact

SEQ ID NO: 1106114 - DNA, 15 bp, Homo sapiens
tccgtgttaaaagac

SEQ ID NO: 1106115 - DNA, 15 bp, Homo sapiens
ctccgtgttaaaaga

SEQ ID NO: 1106116 - DNA, 15 bp, Homo sapiens
cctccgtgttaaaag

SEQ ID NO: 1106117 - DNA, 15 bp, Homo sapiens
tcctccgtgttaaaa

SEQ ID NO: 1106118 - DNA, 15 bp, Homo sapiens
ttcctccgtgttaaa

SEQ ID NO: 1106119 - DNA, 15 bp, Homo sapiens
cttcctccgtgttaa

SEQ ID NO: 1106120 - DNA, 15 bp, Homo sapiens
acttcctccgtgtta

SEQ ID NO: 1106121 - DNA, 15 bp, Homo sapiens
aacttcctccgtgtt

SEQ ID NO: 1106122 - DNA, 15 bp, Homo sapiens
aaacttcctccgtgt

SEQ ID NO: 1106123 - DNA, 15 bp, Homo sapiens
aaaacttcctccgtg

SEQ ID NO: 1106124 - DNA, 15 bp, Homo sapiens
aaaaacttcctccgt

SEQ ID NO: 1106125 - DNA, 15 bp, Homo sapiens
gaaaaacttcctccg

SEQ ID NO: 1106126 - DNA, 15 bp, Homo sapiens
ggaaaaacttcctcc

SEQ ID NO: 1106127 - DNA, 15 bp, Homo sapiens
aggaaaaacttcctc

SEQ ID NO: 1106128 - DNA, 15 bp, Homo sapiens
aaggaaaaacttcct

SEQ ID NO: 1106129 - DNA, 15 bp, Homo sapiens
gaaggaaaaacttcc

SEQ ID NO: 1106130 - DNA, 15 bp, Homo sapiens
tgaaggaaaaacttc

SEQ ID NO: 1106131 - DNA, 15 bp, Homo sapiens
atgaaggaaaaactt

SEQ ID NO: 1106132 - DNA, 15 bp, Homo sapiens
catgaaggaaaaact

SEQ ID NO: 1106133 - DNA, 15 bp, Homo sapiens
tcatgaaggaaaaac

SEQ ID NO: 1106134 - DNA, 15 bp, Homo sapiens
ttcatgaaggaaaaa

SEQ ID NO: 1106135 - DNA, 15 bp, Homo sapiens
attcatgaaggaaaa

SEQ ID NO: 1106136 - DNA, 15 bp, Homo sapiens
tattcatgaaggaaa

SEQ ID NO: 1106137 - DNA, 15 bp, Homo sapiens
gtattcatgaaggaa

SEQ ID NO: 1106138 - DNA, 15 bp, Homo sapiens
tgtattcatgaagga

SEQ ID NO: 1106139 - DNA, 15 bp, Homo sapiens
atgtattcatgaagg

SEQ ID NO: 1106140 - DNA, 15 bp, Homo sapiens
tatgtattcatgaag

SEQ ID NO: 1106141 - DNA, 15 bp, Homo sapiens
gtatgtattcatgaa

SEQ ID NO: 1106142 - DNA, 15 bp, Homo sapiens
tgtatgtattcatga

SEQ ID NO: 1106143 - DNA, 15 bp, Homo sapiens
ttgtatgtattcatg

SEQ ID NO: 1106144 - DNA, 15 bp, Homo sapiens
cttgtatgtattcat

SEQ ID NO: 1106145 - DNA, 15 bp, Homo sapiens
tcttgtatgtattca

SEQ ID NO: 1106146 - DNA, 15 bp, Homo sapiens
atcttgtatgtattc

SEQ ID NO: 1106147 - DNA, 15 bp, Homo sapiens
tatcttgtatgtatt

SEQ ID NO: 1106148 - DNA, 15 bp, Homo sapiens
gtatcttgtatgtat

SEQ ID NO: 1106149 - DNA, 15 bp, Homo sapiens
ggtatcttgtatgta

SEQ ID NO: 1106150 - DNA, 15 bp, Homo sapiens
cggtatcttgtatgt

SEQ ID NO: 1106151 - DNA, 15 bp, Homo sapiens
tcggtatcttgtatg

SEQ ID NO: 1106152 - DNA, 15 bp, Homo sapiens
ttcggtatcttgtat

SEQ ID NO: 1106153 - DNA, 15 bp, Homo sapiens
gttcggtatcttgta

SEQ ID NO: 1106154 - DNA, 15 bp, Homo sapiens
agttcggtatcttgt

SEQ ID NO: 1106155 - DNA, 15 bp, Homo sapiens
cagttcggtatcttg

SEQ ID NO: 1106156 - DNA, 15 bp, Homo sapiens
tcagttcggtatctt

SEQ ID NO: 1106157 - DNA, 15 bp, Homo sapiens
ttcagttcggtatct

SEQ ID NO: 1106158 - DNA, 15 bp, Homo sapiens
cttcagttcggtatc

SEQ ID NO: 1106159 - DNA, 15 bp, Homo sapiens
tcttcagttcggtat

SEQ ID NO: 1106160 - DNA, 15 bp, Homo sapiens
ttcttcagttcggta

SEQ ID NO: 1106161 - DNA, 15 bp, Homo sapiens
tttcttcagttcggt

SEQ ID NO: 1106162 - DNA, 15 bp, Homo sapiens
atttcttcagttcgg

SEQ ID NO: 1106163 - DNA, 15 bp, Homo sapiens
gatttcttcagttcg

SEQ ID NO: 1106164 - DNA, 15 bp, Homo sapiens
agatttcttcagttc

SEQ ID NO: 1106165 - DNA, 15 bp, Homo sapiens
aagatttcttcagtt

SEQ ID NO: 1106166 - DNA, 15 bp, Homo sapiens
aaagatttcttcagt

SEQ ID NO: 1106167 - DNA, 15 bp, Homo sapiens
aaaagatttcttcag

SEQ ID NO: 1106168 - DNA, 15 bp, Homo sapiens
gaaaagatttcttca

SEQ ID NO: 1106169 - DNA, 15 bp, Homo sapiens
agaaaagatttcttc

SEQ ID NO: 1106170 - DNA, 15 bp, Homo sapiens
aagaaaagatttctt

SEQ ID NO: 1106171 - DNA, 15 bp, Homo sapiens
aaagaaaagatttct

SEQ ID NO: 1106172 - DNA, 15 bp, Homo sapiens
caaagaaaagatttc

SEQ ID NO: 1106173 - DNA, 15 bp, Homo sapiens
gcaaagaaaagattt

SEQ ID NO: 1106174 - DNA, 15 bp, Homo sapiens
agcaaagaaaagatt

SEQ ID NO: 1106175 - DNA, 15 bp, Homo sapiens
gagcaaagaaaagat

SEQ ID NO: 1106176 - DNA, 15 bp, Homo sapiens
ggagcaaagaaaaga

SEQ ID NO: 1106177 - DNA, 15 bp, Homo sapiens
tggagcaaagaaaag

SEQ ID NO: 1106178 - DNA, 15 bp, Homo sapiens
ttggagcaaagaaaa

SEQ ID NO: 1106179 - DNA, 15 bp, Homo sapiens
gttggagcaaagaaa

SEQ ID NO: 1106180 - DNA, 15 bp, Homo sapiens
ggttggagcaaagaa

SEQ ID NO: 1106181 - DNA, 15 bp, Homo sapiens
gggttggagcaaaga

SEQ ID NO: 1106182 - DNA, 15 bp, Homo sapiens
ggggttggagcaaag

SEQ ID NO: 1106183 - DNA, 15 bp, Homo sapiens
gggggttggagcaaa

SEQ ID NO: 1106184 - DNA, 15 bp, Homo sapiens
cgggggttggagcaa

SEQ ID NO: 1106185 - DNA, 15 bp, Homo sapiens
gcgggggttggagca

SEQ ID NO: 1106186 - DNA, 15 bp, Homo sapiens
agcgggggttggagc

SEQ ID NO: 1106187 - DNA, 15 bp, Homo sapiens
gagcgggggttggag

SEQ ID NO: 1106188 - DNA, 15 bp, Homo sapiens
ggagcgggggttgga

SEQ ID NO: 1106189 - DNA, 15 bp, Homo sapiens
gggagcgggggttgg

SEQ ID NO: 1106190 - DNA, 15 bp, Homo sapiens
ggggagcgggggttg

SEQ ID NO: 1106191 - DNA, 15 bp, Homo sapiens
gggggagcgggggtt

SEQ ID NO: 1106192 - DNA, 15 bp, Homo sapiens
cgggggagcgggggt

SEQ ID NO: 1106193 - DNA, 15 bp, Homo sapiens
ccgggggagcggggg

SEQ ID NO: 1106194 - DNA, 15 bp, Homo sapiens
gccgggggagcgggg

SEQ ID NO: 1106195 - DNA, 15 bp, Homo sapiens
ggccgggggagcggg

SEQ ID NO: 1106196 - DNA, 15 bp, Homo sapiens
gggccgggggagcgg

SEQ ID NO: 1106197 - DNA, 15 bp, Homo sapiens
ggggccgggggagcg

SEQ ID NO: 1106198 - DNA, 15 bp, Homo sapiens
gggggccgggggagc

SEQ ID NO: 1106199 - DNA, 15 bp, Homo sapiens
ggggggccgggggag

SEQ ID NO: 1106200 - DNA, 15 bp, Homo sapiens
cggggggccggggga

SEQ ID NO: 1106201 - DNA, 15 bp, Homo sapiens
tcggggggccggggg

SEQ ID NO: 1106202 - DNA, 15 bp, Homo sapiens
ttcggggggccgggg

SEQ ID NO: 1106203 - DNA, 15 bp, Homo sapiens
cttcggggggccggg

SEQ ID NO: 1106204 - DNA, 15 bp, Homo sapiens
gcttcggggggccgg

SEQ ID NO: 1106205 - DNA, 15 bp, Homo sapiens
agcttcggggggccg

SEQ ID NO: 1106206 - DNA, 15 bp, Homo sapiens
tagcttcggggggcc

SEQ ID NO: 1106207 - DNA, 15 bp, Homo sapiens
atagcttcggggggc

SEQ ID NO: 1106208 - DNA, 15 bp, Homo sapiens
aatagcttcgggggg

SEQ ID NO: 1106209 - DNA, 15 bp, Homo sapiens
taatagcttcggggg

SEQ ID NO: 1106210 - DNA, 15 bp, Homo sapiens
ttaatagcttcgggg

SEQ ID NO: 1106211 - DNA, 15 bp, Homo sapiens
attaatagcttcggg

SEQ ID NO: 1106212 - DNA, 15 bp, Homo sapiens
tattaatagcttcgg

SEQ ID NO: 1106213 - DNA, 15 bp, Homo sapiens
ctattaatagcttcg

SEQ ID NO: 1106214 - DNA, 15 bp, Homo sapiens
actattaatagcttc

SEQ ID NO: 1106215 - DNA, 15 bp, Homo sapiens
gactattaatagctt

SEQ ID NO: 1106216 - DNA, 15 bp, Homo sapiens
tgactattaatagct

SEQ ID NO: 1106217 - DNA, 15 bp, Homo sapiens
atgactattaatagc

SEQ ID NO: 1106218 - DNA, 15 bp, Homo sapiens
aatgactattaatag

SEQ ID NO: 1106219 - DNA, 15 bp, Homo sapiens
gaatgactattaata

SEQ ID NO: 1106220 - DNA, 15 bp, Homo sapiens
tgaatgactattaat

SEQ ID NO: 1106221 - DNA, 15 bp, Homo sapiens
ttgaatgactattaa

SEQ ID NO: 1106222 - DNA, 15 bp, Homo sapiens
tttgaatgactatta

SEQ ID NO: 1106223 - DNA, 15 bp, Homo sapiens
atttgaatgactatt

SEQ ID NO: 1106224 - DNA, 15 bp, Homo sapiens
catttgaatgactat

SEQ ID NO: 1106225 - DNA, 15 bp, Homo sapiens
ccatttgaatgacta

SEQ ID NO: 1106226 - DNA, 15 bp, Homo sapiens
gccatttgaatgact

SEQ ID NO: 1106227 - DNA, 15 bp, Homo sapiens
tgccatttgaatgac

SEQ ID NO: 1106228 - DNA, 15 bp, Homo sapiens
gtgccatttgaatga

SEQ ID NO: 1106229 - DNA, 15 bp, Homo sapiens
agtgccatttgaatg

SEQ ID NO: 1106230 - DNA, 15 bp, Homo sapiens
cagtgccatttgaat

SEQ ID NO: 1106231 - DNA, 15 bp, Homo sapiens
gcagtgccatttgaa

SEQ ID NO: 1106232 - DNA, 15 bp, Homo sapiens
tgcagtgccatttga

SEQ ID NO: 1106233 - DNA, 15 bp, Homo sapiens
gtgcagtgccatttg

SEQ ID NO: 1106234 - DNA, 15 bp, Homo sapiens
agtgcagtgccattt

SEQ ID NO: 1106235 - DNA, 15 bp, Homo sapiens
gagtgcagtgccatt

SEQ ID NO: 1106236 - DNA, 15 bp, Homo sapiens
agagtgcagtgccat

SEQ ID NO: 1106237 - DNA, 15 bp, Homo sapiens
aagagtgcagtgcca

SEQ ID NO: 1106238 - DNA, 15 bp, Homo sapiens
aaagagtgcagtgcc

SEQ ID NO: 1106239 - DNA, 15 bp, Homo sapiens
gaaagagtgcagtgc

SEQ ID NO: 1106240 - DNA, 15 bp, Homo sapiens
ggaaagagtgcagtg

SEQ ID NO: 1106241 - DNA, 15 bp, Homo sapiens
tggaaagagtgcagt

SEQ ID NO: 1106242 - DNA, 15 bp, Homo sapiens
ttggaaagagtgcag

SEQ ID NO: 1106243 - DNA, 15 bp, Homo sapiens
cttggaaagagtgca

SEQ ID NO: 1106244 - DNA, 15 bp, Homo sapiens
gcttggaaagagtgc

SEQ ID NO: 1106245 - DNA, 15 bp, Homo sapiens
agcttggaaagagtg

SEQ ID NO: 1106246 - DNA, 15 bp, Homo sapiens
aagcttggaaagagt

SEQ ID NO: 1106247 - DNA, 15 bp, Homo sapiens
aaagcttggaaagag

SEQ ID NO: 1106248 - DNA, 15 bp, Homo sapiens
gaaagcttggaaaga

SEQ ID NO: 1106249 - DNA, 15 bp, Homo sapiens
ggaaagcttggaaag

SEQ ID NO: 1106250 - DNA, 15 bp, Homo sapiens
aggaaagcttggaaa

SEQ ID NO: 1106251 - DNA, 15 bp, Homo sapiens
taggaaagcttggaa

SEQ ID NO: 1106252 - DNA, 15 bp, Homo sapiens
ttaggaaagcttgga

SEQ ID NO: 1106253 - DNA, 15 bp, Homo sapiens
cttaggaaagcttgg

SEQ ID NO: 1106254 - DNA, 15 bp, Homo sapiens
gcttaggaaagcttg

SEQ ID NO: 1106255 - DNA, 15 bp, Homo sapiens
agcttaggaaagctt

SEQ ID NO: 1106256 - DNA, 15 bp, Homo sapiens
tagcttaggaaagct

SEQ ID NO: 1106257 - DNA, 15 bp, Homo sapiens
ttagcttaggaaagc

SEQ ID NO: 1106258 - DNA, 15 bp, Homo sapiens
tttagcttaggaaag

SEQ ID NO: 1106259 - DNA, 15 bp, Homo sapiens
atttagcttaggaaa

SEQ ID NO: 1106260 - DNA, 15 bp, Homo sapiens
tatttagcttaggaa

SEQ ID NO: 1106261 - DNA, 15 bp, Homo sapiens
atatttagcttagga

SEQ ID NO: 1106262 - DNA, 15 bp, Homo sapiens
catatttagcttagg

SEQ ID NO: 1106263 - DNA, 15 bp, Homo sapiens
ccatatttagcttag

SEQ ID NO: 1106264 - DNA, 15 bp, Homo sapiens
gccatatttagctta

SEQ ID NO: 1106265 - DNA, 15 bp, Homo sapiens
agccatatttagctt

SEQ ID NO: 1106266 - DNA, 15 bp, Homo sapiens
gagccatatttagct

SEQ ID NO: 1106267 - DNA, 15 bp, Homo sapiens
ggagccatatttagc

SEQ ID NO: 1106268 - DNA, 15 bp, Homo sapiens
tggagccatatttag

SEQ ID NO: 1106269 - DNA, 15 bp, Homo sapiens
ttggagccatattta

SEQ ID NO: 1106270 - DNA, 15 bp, Homo sapiens
gttggagccatattt

SEQ ID NO: 1106271 - DNA, 15 bp, Homo sapiens
tgttggagccatatt

SEQ ID NO: 1106272 - DNA, 15 bp, Homo sapiens
ctgttggagccatat

SEQ ID NO: 1106273 - DNA, 15 bp, Homo sapiens
cctgttggagccata

SEQ ID NO: 1106274 - DNA, 15 bp, Homo sapiens
acctgttggagccat

SEQ ID NO: 1106275 - DNA, 15 bp, Homo sapiens
gacctgttggagcca

SEQ ID NO: 1106276 - DNA, 15 bp, Homo sapiens
agacctgttggagcc

SEQ ID NO: 1106277 - DNA, 15 bp, Homo sapiens
cagacctgttggagc

SEQ ID NO: 1106278 - DNA, 15 bp, Homo sapiens
ccagacctgttggag

SEQ ID NO: 1106279 - DNA, 15 bp, Homo sapiens
cccagacctgttgga

SEQ ID NO: 1106280 - DNA, 15 bp, Homo sapiens
tcccagacctgttgg

SEQ ID NO: 1106281 - DNA, 15 bp, Homo sapiens
ttcccagacctgttg

SEQ ID NO: 1106282 - DNA, 15 bp, Homo sapiens
gttcccagacctgtt

SEQ ID NO: 1106283 - DNA, 15 bp, Homo sapiens
agttcccagacctgt

SEQ ID NO: 1106284 - DNA, 15 bp, Homo sapiens
tagttcccagacctg

SEQ ID NO: 1106285 - DNA, 15 bp, Homo sapiens
atagttcccagacct

SEQ ID NO: 1106286 - DNA, 15 bp, Homo sapiens
aatagttcccagacc

SEQ ID NO: 1106287 - DNA, 15 bp, Homo sapiens
caatagttcccagac

SEQ ID NO: 1106288 - DNA, 15 bp, Homo sapiens
tcaatagttcccaga

SEQ ID NO: 1106289 - DNA, 15 bp, Homo sapiens
ttcaatagttcccag

SEQ ID NO: 1106290 - DNA, 15 bp, Homo sapiens
attcaatagttccca

SEQ ID NO: 1106291 - DNA, 15 bp, Homo sapiens
cattcaatagttccc

SEQ ID NO: 1106292 - DNA, 15 bp, Homo sapiens
gcattcaatagttcc

SEQ ID NO: 1106293 - DNA, 15 bp, Homo sapiens
tgcattcaatagttc

SEQ ID NO: 1106294 - DNA, 15 bp, Homo sapiens
ttgcattcaatagtt

SEQ ID NO: 1106295 - DNA, 15 bp, Homo sapiens
attgcattcaatagt

SEQ ID NO: 1106296 - DNA, 15 bp, Homo sapiens
cattgcattcaatag

SEQ ID NO: 1106297 - DNA, 15 bp, Homo sapiens
acattgcattcaata

SEQ ID NO: 1106298 - DNA, 15 bp, Homo sapiens
tacattgcattcaat

SEQ ID NO: 1106299 - DNA, 15 bp, Homo sapiens
gtacattgcattcaa

SEQ ID NO: 1106300 - DNA, 15 bp, Homo sapiens
agtacattgcattca

SEQ ID NO: 1106301 - DNA, 15 bp, Homo sapiens
gagtacattgcattc

SEQ ID NO: 1106302 - DNA, 15 bp, Homo sapiens
agagtacattgcatt

SEQ ID NO: 1106303 - DNA, 15 bp, Homo sapiens
cagagtacattgcat

SEQ ID NO: 1106304 - DNA, 15 bp, Homo sapiens
tcagagtacattgca

SEQ ID NO: 1106305 - DNA, 15 bp, Homo sapiens
ttcagagtacattgc

SEQ ID NO: 1106306 - DNA, 15 bp, Homo sapiens
tttcagagtacattg

SEQ ID NO: 1106307 - DNA, 15 bp, Homo sapiens
atttcagagtacatt

SEQ ID NO: 1106308 - DNA, 15 bp, Homo sapiens
aatttcagagtacat

SEQ ID NO: 1106309 - DNA, 15 bp, Homo sapiens
gaatttcagagtaca

SEQ ID NO: 1106310 - DNA, 15 bp, Homo sapiens
ggaatttcagagtac

SEQ ID NO: 1106311 - DNA, 15 bp, Homo sapiens
tggaatttcagagta

SEQ ID NO: 1106312 - DNA, 15 bp, Homo sapiens
ctggaatttcagagt

SEQ ID NO: 1106313 - DNA, 15 bp, Homo sapiens
gctggaatttcagag

SEQ ID NO: 1106314 - DNA, 15 bp, Homo sapiens
tgctggaatttcaga

SEQ ID NO: 1106315 - DNA, 15 bp, Homo sapiens
ctgctggaatttcag

SEQ ID NO: 1106316 - DNA, 15 bp, Homo sapiens
gctgctggaatttca

SEQ ID NO: 1106317 - DNA, 15 bp, Homo sapiens
agctgctggaatttc

SEQ ID NO: 1106318 - DNA, 15 bp, Homo sapiens
cagctgctggaattt

SEQ ID NO: 1106319 - DNA, 15 bp, Homo sapiens
acagctgctggaatt

SEQ ID NO: 1106320 - DNA, 15 bp, Homo sapiens
aacagctgctggaat

SEQ ID NO: 1106321 - DNA, 15 bp, Homo sapiens
aaacagctgctggaa

SEQ ID NO: 1106322 - DNA, 15 bp, Homo sapiens
taaacagctgctgga

SEQ ID NO: 1106323 - DNA, 15 bp, Homo sapiens
gtaaacagctgctgg

SEQ ID NO: 1106324 - DNA, 15 bp, Homo sapiens
tgtaaacagctgctg

SEQ ID NO: 1106325 - DNA, 15 bp, Homo sapiens
atgtaaacagctgct

SEQ ID NO: 1106326 - DNA, 15 bp, Homo sapiens
catgtaaacagctgc

SEQ ID NO: 1106327 - DNA, 15 bp, Homo sapiens
gcatgtaaacagctg

SEQ ID NO: 1106328 - DNA, 15 bp, Homo sapiens
ggcatgtaaacagct

SEQ ID NO: 1106329 - DNA, 15 bp, Homo sapiens
aggcatgtaaacagc

SEQ ID NO: 1106330 - DNA, 15 bp, Homo sapiens
caggcatgtaaacag

SEQ ID NO: 1106331 - DNA, 15 bp, Homo sapiens
tcaggcatgtaaaca

SEQ ID NO: 1106332 - DNA, 15 bp, Homo sapiens
atcaggcatgtaaac

SEQ ID NO: 1106333 - DNA, 15 bp, Homo sapiens
catcaggcatgtaaa

SEQ ID NO: 1106334 - DNA, 15 bp, Homo sapiens
gcatcaggcatgtaa

SEQ ID NO: 1106335 - DNA, 15 bp, Homo sapiens
ggcatcaggcatgta

SEQ ID NO: 1106336 - DNA, 15 bp, Homo sapiens
aggcatcaggcatgt

SEQ ID NO: 1106337 - DNA, 15 bp, Homo sapiens
taggcatcaggcatg

SEQ ID NO: 1106338 - DNA, 15 bp, Homo sapiens
ttaggcatcaggcat

SEQ ID NO: 1106339 - DNA, 15 bp, Homo sapiens
attaggcatcaggca

SEQ ID NO: 1106340 - DNA, 15 bp, Homo sapiens
cattaggcatcaggc

SEQ ID NO: 1106341 - DNA, 15 bp, Homo sapiens
gcattaggcatcagg

SEQ ID NO: 1106342 - DNA, 15 bp, Homo sapiens
ggcattaggcatcag

SEQ ID NO: 1106343 - DNA, 15 bp, Homo sapiens
tggcattaggcatca

SEQ ID NO: 1106344 - DNA, 15 bp, Homo sapiens
atggcattaggcatc

SEQ ID NO: 1106345 - DNA, 15 bp, Homo sapiens
tatggcattaggcat

SEQ ID NO: 1106346 - DNA, 15 bp, Homo sapiens
gtatggcattaggca

SEQ ID NO: 1106347 - DNA, 15 bp, Homo sapiens
cgtatggcattaggc

SEQ ID NO: 1106348 - DNA, 15 bp, Homo sapiens
gcgtatggcattagg

SEQ ID NO: 1106349 - DNA, 15 bp, Homo sapiens
ggcgtatggcattag

SEQ ID NO: 1106350 - DNA, 15 bp, Homo sapiens
aggcgtatggcatta

SEQ ID NO: 1106351 - DNA, 15 bp, Homo sapiens
caggcgtatggcatt

SEQ ID NO: 1106352 - DNA, 15 bp, Homo sapiens
ccaggcgtatggcat

SEQ ID NO: 1106353 - DNA, 15 bp, Homo sapiens
tccaggcgtatggca

SEQ ID NO: 1106354 - DNA, 15 bp, Homo sapiens
ttccaggcgtatggc

SEQ ID NO: 1106355 - DNA, 15 bp, Homo sapiens
gttccaggcgtatgg

SEQ ID NO: 1106356 - DNA, 15 bp, Homo sapiens
agttccaggcgtatg

SEQ ID NO: 1106357 - DNA, 15 bp, Homo sapiens
aagttccaggcgtat

SEQ ID NO: 1106358 - DNA, 15 bp, Homo sapiens
caagttccaggcgta

SEQ ID NO: 1106359 - DNA, 15 bp, Homo sapiens
gcaagttccaggcgt

SEQ ID NO: 1106360 - DNA, 15 bp, Homo sapiens
agcaagttccaggcg

SEQ ID NO: 1106361 - DNA, 15 bp, Homo sapiens
cagcaagttccaggc

SEQ ID NO: 1106362 - DNA, 15 bp, Homo sapiens
tcagcaagttccagg

SEQ ID NO: 1106363 - DNA, 15 bp, Homo sapiens
ctcagcaagttccag

SEQ ID NO: 1106364 - DNA, 15 bp, Homo sapiens
tctcagcaagttcca

SEQ ID NO: 1106365 - DNA, 15 bp, Homo sapiens
ttctcagcaagttcc

SEQ ID NO: 1106366 - DNA, 15 bp, Homo sapiens
gttctcagcaagttc

SEQ ID NO: 1106367 - DNA, 15 bp, Homo sapiens
agttctcagcaagtt

SEQ ID NO: 1106368 - DNA, 15 bp, Homo sapiens
gagttctcagcaagt

SEQ ID NO: 1106369 - DNA, 15 bp, Homo sapiens
agagttctcagcaag

SEQ ID NO: 1106370 - DNA, 15 bp, Homo sapiens
gagagttctcagcaa

SEQ ID NO: 1106371 - DNA, 15 bp, Homo sapiens
cgagagttctcagca

SEQ ID NO: 1106372 - DNA, 15 bp, Homo sapiens
ccgagagttctcagc

SEQ ID NO: 1106373 - DNA, 15 bp, Homo sapiens
gccgagagttctcag

SEQ ID NO: 1106374 - DNA, 15 bp, Homo sapiens
agccgagagttctca

SEQ ID NO: 1106375 - DNA, 15 bp, Homo sapiens
cagccgagagttctc

SEQ ID NO: 1106376 - DNA, 15 bp, Homo sapiens
gcagccgagagttct

SEQ ID NO: 1106377 - DNA, 15 bp, Homo sapiens
ggcagccgagagttc

SEQ ID NO: 1106378 - DNA, 15 bp, Homo sapiens
aggcagccgagagtt

SEQ ID NO: 1106379 - DNA, 15 bp, Homo sapiens
gaggcagccgagagt

SEQ ID NO: 1106380 - DNA, 15 bp, Homo sapiens
agaggcagccgagag

SEQ ID NO: 1106381 - DNA, 15 bp, Homo sapiens
cagaggcagccgaga

SEQ ID NO: 1106382 - DNA, 15 bp, Homo sapiens
acagaggcagccgag

SEQ ID NO: 1106383 - DNA, 15 bp, Homo sapiens
gacagaggcagccga

SEQ ID NO: 1106384 - DNA, 15 bp, Homo sapiens
ggacagaggcagccg

SEQ ID NO: 1106385 - DNA, 15 bp, Homo sapiens
aggacagaggcagcc

SEQ ID NO: 1106386 - DNA, 15 bp, Homo sapiens
caggacagaggcagc

SEQ ID NO: 1106387 - DNA, 15 bp, Homo sapiens
ccaggacagaggcag

SEQ ID NO: 1106388 - DNA, 15 bp, Homo sapiens
cccaggacagaggca

SEQ ID NO: 1106389 - DNA, 15 bp, Homo sapiens
ccccaggacagaggc

SEQ ID NO: 1106390 - DNA, 15 bp, Homo sapiens
accccaggacagagg

SEQ ID NO: 1106391 - DNA, 15 bp, Homo sapiens
taccccaggacagag

SEQ ID NO: 1106392 - DNA, 15 bp, Homo sapiens
gtaccccaggacaga

SEQ ID NO: 1106393 - DNA, 15 bp, Homo sapiens
agtaccccaggacag

SEQ ID NO: 1106394 - DNA, 15 bp, Homo sapiens
tagtaccccaggaca

SEQ ID NO: 1106395 - DNA, 15 bp, Homo sapiens
atagtaccccaggac

SEQ ID NO: 1106396 - DNA, 15 bp, Homo sapiens
aatagtaccccagga

SEQ ID NO: 1106397 - DNA, 15 bp, Homo sapiens
caatagtaccccagg

SEQ ID NO: 1106398 - DNA, 15 bp, Homo sapiens
ttttaaagatgaaga

SEQ ID NO: 1106399 - DNA, 15 bp, Homo sapiens
attttaaagatgaag

SEQ ID NO: 1106400 - DNA, 15 bp, Homo sapiens
cattttaaagatgaa

SEQ ID NO: 1106401 - DNA, 15 bp, Homo sapiens
ttttccattttaaag

SEQ ID NO: 1106402 - DNA, 15 bp, Homo sapiens
gttttccattttaaa

SEQ ID NO: 1106403 - DNA, 15 bp, Homo sapiens
agttttccattttaa

SEQ ID NO: 1106404 - DNA, 15 bp, Homo sapiens
cagttttccatttta

SEQ ID NO: 1106405 - DNA, 15 bp, Homo sapiens
ccagttttccatttt

SEQ ID NO: 1106406 - DNA, 15 bp, Homo sapiens
cccagttttccattt

SEQ ID NO: 1106407 - DNA, 15 bp, Homo sapiens
acccagttttccatt

SEQ ID NO: 1106408 - DNA, 15 bp, Homo sapiens
cacccagttttccat

SEQ ID NO: 1106409 - DNA, 15 bp, Homo sapiens
acacccagttttcca

SEQ ID NO: 1106410 - DNA, 15 bp, Homo sapiens
cacacccagttttcc

SEQ ID NO: 1106411 - DNA, 15 bp, Homo sapiens
ccacacccagttttc

SEQ ID NO: 1106412 - DNA, 15 bp, Homo sapiens
accacacccagtttt

SEQ ID NO: 1106413 - DNA, 15 bp, Homo sapiens
caccacacccagttt

SEQ ID NO: 1106414 - DNA, 15 bp, Homo sapiens
ccaccacacccagtt

SEQ ID NO: 1106415 - DNA, 15 bp, Homo sapiens
gccaccacacccagt

SEQ ID NO: 1106416 - DNA, 15 bp, Homo sapiens
ataggcgtgagccac

SEQ ID NO: 1106417 - DNA, 15 bp, Homo sapiens
tataggcgtgagcca

SEQ ID NO: 1106418 - DNA, 15 bp, Homo sapiens
gggctcccaaagtgc

SEQ ID NO: 1106419 - DNA, 15 bp, Homo sapiens
gttgggctcccaaag

SEQ ID NO: 1106420 - DNA, 15 bp, Homo sapiens
cgttgggctcccaaa

SEQ ID NO: 1106421 - DNA, 15 bp, Homo sapiens
acgttgggctcccaa

SEQ ID NO: 1106422 - DNA, 15 bp, Homo sapiens
cacgttgggctccca

SEQ ID NO: 1106423 - DNA, 15 bp, Homo sapiens
ccacgttgggctccc

SEQ ID NO: 1106424 - DNA, 15 bp, Homo sapiens
cccacgttgggctcc

SEQ ID NO: 1106425 - DNA, 15 bp, Homo sapiens
gcccacgttgggctc

SEQ ID NO: 1106426 - DNA, 15 bp, Homo sapiens
tgcccacgttgggct

SEQ ID NO: 1106427 - DNA, 15 bp, Homo sapiens
ctgcccacgttgggc

SEQ ID NO: 1106428 - DNA, 15 bp, Homo sapiens
tctgcccacgttggg

SEQ ID NO: 1106429 - DNA, 15 bp, Homo sapiens
atctgcccacgttgg

SEQ ID NO: 1106430 - DNA, 15 bp, Homo sapiens
gatctgcccacgttg

SEQ ID NO: 1106431 - DNA, 15 bp, Homo sapiens
ctctgtcacctaagc

SEQ ID NO: 1106432 - DNA, 15 bp, Homo sapiens
actctgtcacctaag

SEQ ID NO: 1106433 - DNA, 15 bp, Homo sapiens
tactctgtcacctaa

SEQ ID NO: 1106434 - DNA, 15 bp, Homo sapiens
ttactctgtcaccta

SEQ ID NO: 1106435 - DNA, 15 bp, Homo sapiens
cttactctgtcacct

SEQ ID NO: 1106436 - DNA, 15 bp, Homo sapiens
cacagggtcttactc

SEQ ID NO: 1106437 - DNA, 15 bp, Homo sapiens
acacagggtcttact

SEQ ID NO: 1106438 - DNA, 15 bp, Homo sapiens
gacacagggtcttac

SEQ ID NO: 1106439 - DNA, 15 bp, Homo sapiens
agacacagggtctta

SEQ ID NO: 1106440 - DNA, 15 bp, Homo sapiens
tagacacagggtctt

SEQ ID NO: 1106441 - DNA, 15 bp, Homo sapiens
ttagacacagggtct

SEQ ID NO: 1106442 - DNA, 15 bp, Homo sapiens
tttagacacagggtc

SEQ ID NO: 1106443 - DNA, 15 bp, Homo sapiens
ttttagacacagggt

SEQ ID NO: 1106444 - DNA, 15 bp, Homo sapiens
tttttagacacaggg

SEQ ID NO: 1106445 - DNA, 15 bp, Homo sapiens
ctttttagacacagg

SEQ ID NO: 1106446 - DNA, 15 bp, Homo sapiens
gctttttagacacag

SEQ ID NO: 1106447 - DNA, 15 bp, Homo sapiens
tgctttttagacaca

SEQ ID NO: 1106448 - DNA, 15 bp, Homo sapiens
ttgctttttagacac

SEQ ID NO: 1106449 - DNA, 15 bp, Homo sapiens
tttgctttttagaca

SEQ ID NO: 1106450 - DNA, 15 bp, Homo sapiens
gtttgctttttagac

SEQ ID NO: 1106451 - DNA, 15 bp, Homo sapiens
tgtttgctttttaga

SEQ ID NO: 1106452 - DNA, 15 bp, Homo sapiens
ttgtttgctttttag

SEQ ID NO: 1106453 - DNA, 15 bp, Homo sapiens
tttgtttgcttttta

SEQ ID NO: 1106454 - DNA, 15 bp, Homo sapiens
tttgttttttgtttg

SEQ ID NO: 1106455 - DNA, 15 bp, Homo sapiens
tgtttgttttttgtt

SEQ ID NO: 1106456 - DNA, 15 bp, Homo sapiens
ctgtttgttttttgt

SEQ ID NO: 1106457 - DNA, 15 bp, Homo sapiens
actgtttgttttttg

SEQ ID NO: 1106458 - DNA, 15 bp, Homo sapiens
aactgtttgtttttt

SEQ ID NO: 1106459 - DNA, 15 bp, Homo sapiens
taactgtttgttttt

SEQ ID NO: 1106460 - DNA, 15 bp, Homo sapiens
ataactgtttgtttt

SEQ ID NO: 1106461 - DNA, 15 bp, Homo sapiens
aataactgtttgttt

SEQ ID NO: 1106462 - DNA, 15 bp, Homo sapiens
caataactgtttgtt

SEQ ID NO: 1106463 - DNA, 15 bp, Homo sapiens
tcaataactgtttgt

SEQ ID NO: 1106464 - DNA, 15 bp, Homo sapiens
ctcaataactgtttg

SEQ ID NO: 1106465 - DNA, 15 bp, Homo sapiens
actcaataactgttt

SEQ ID NO: 1106466 - DNA, 15 bp, Homo sapiens
cactcaataactgtt

SEQ ID NO: 1106467 - DNA, 15 bp, Homo sapiens
tcactcaataactgt

SEQ ID NO: 1106468 - DNA, 15 bp, Homo sapiens
ttcactcaataactg

SEQ ID NO: 1106469 - DNA, 15 bp, Homo sapiens
tttcactcaataact

SEQ ID NO: 1106470 - DNA, 15 bp, Homo sapiens
ttttcactcaataac

SEQ ID NO: 1106471 - DNA, 15 bp, Homo sapiens
tttttcactcaataa

SEQ ID NO: 1106472 - DNA, 15 bp, Homo sapiens
gtttttcactcaata

SEQ ID NO: 1106473 - DNA, 15 bp, Homo sapiens
tgtttttcactcaat

SEQ ID NO: 1106474 - DNA, 15 bp, Homo sapiens
ttgtttttcactcaa

SEQ ID NO: 1106475 - DNA, 15 bp, Homo sapiens
tttgtttttcactca

SEQ ID NO: 1106476 - DNA, 15 bp, Homo sapiens
ttttgtttttcactc

SEQ ID NO: 1106477 - DNA, 15 bp, Homo sapiens
gttttgtttttcact

SEQ ID NO: 1106478 - DNA, 15 bp, Homo sapiens
tgttttgtttttcac

SEQ ID NO: 1106479 - DNA, 15 bp, Homo sapiens
ctgttttgtttttca

SEQ ID NO: 1106480 - DNA, 15 bp, Homo sapiens
tctgttttgtttttc

SEQ ID NO: 1106481 - DNA, 15 bp, Homo sapiens
ctctgttttgttttt

SEQ ID NO: 1106482 - DNA, 15 bp, Homo sapiens
tctctgttttgtttt

SEQ ID NO: 1106483 - DNA, 15 bp, Homo sapiens
ttctctgttttgttt

SEQ ID NO: 1106484 - DNA, 15 bp, Homo sapiens
cttctctgttttgtt

SEQ ID NO: 1106485 - DNA, 15 bp, Homo sapiens
acttctctgttttgt

SEQ ID NO: 1106486 - DNA, 15 bp, Homo sapiens
cacttctctgttttg

SEQ ID NO: 1106487 - DNA, 15 bp, Homo sapiens
ccacttctctgtttt

SEQ ID NO: 1106488 - DNA, 15 bp, Homo sapiens
gccacttctctgttt

SEQ ID NO: 1106489 - DNA, 15 bp, Homo sapiens
agccacttctctgtt

SEQ ID NO: 1106490 - DNA, 15 bp, Homo sapiens
aagccacttctctgt

SEQ ID NO: 1106491 - DNA, 15 bp, Homo sapiens
taagccacttctctg

SEQ ID NO: 1106492 - DNA, 15 bp, Homo sapiens
ataagccacttctct

SEQ ID NO: 1106493 - DNA, 15 bp, Homo sapiens
gataagccacttctc

SEQ ID NO: 1106494 - DNA, 15 bp, Homo sapiens
ggataagccacttct

SEQ ID NO: 1106495 - DNA, 15 bp, Homo sapiens
tggataagccacttc

SEQ ID NO: 1106496 - DNA, 15 bp, Homo sapiens
gtggataagccactt

SEQ ID NO: 1106497 - DNA, 15 bp, Homo sapiens
agtggataagccact

SEQ ID NO: 1106498 - DNA, 15 bp, Homo sapiens
cagtggataagccac

SEQ ID NO: 1106499 - DNA, 15 bp, Homo sapiens
acagtggataagcca

SEQ ID NO: 1106500 - DNA, 15 bp, Homo sapiens
gacagtggataagcc

SEQ ID NO: 1106501 - DNA, 15 bp, Homo sapiens
tgacagtggataagc

SEQ ID NO: 1106502 - DNA, 15 bp, Homo sapiens
gtgacagtggataag

SEQ ID NO: 1106503 - DNA, 15 bp, Homo sapiens
agtgacagtggataa

SEQ ID NO: 1106504 - DNA, 15 bp, Homo sapiens
cagtgacagtggata

SEQ ID NO: 1106505 - DNA, 15 bp, Homo sapiens
ccagtgacagtggat

SEQ ID NO: 1106506 - DNA, 15 bp, Homo sapiens
cccagtgacagtgga

SEQ ID NO: 1106507 - DNA, 15 bp, Homo sapiens
gcccagtgacagtgg

SEQ ID NO: 1106508 - DNA, 15 bp, Homo sapiens
tgcccagtgacagtg

SEQ ID NO: 1106509 - DNA, 15 bp, Homo sapiens
ttgcccagtgacagt

SEQ ID NO: 1106510 - DNA, 15 bp, Homo sapiens
cttgcccagtgacag

SEQ ID NO: 1106511 - DNA, 15 bp, Homo sapiens
acttgcccagtgaca

SEQ ID NO: 1106512 - DNA, 15 bp, Homo sapiens
aacttgcccagtgac

SEQ ID NO: 1106513 - DNA, 15 bp, Homo sapiens
gaacttgcccagtga

SEQ ID NO: 1106514 - DNA, 15 bp, Homo sapiens
tgaacttgcccagtg

SEQ ID NO: 1106515 - DNA, 15 bp, Homo sapiens
gtgaacttgcccagt

SEQ ID NO: 1106516 - DNA, 15 bp, Homo sapiens
cgtgaacttgcccag

SEQ ID NO: 1106517 - DNA, 15 bp, Homo sapiens
ccgtgaacttgccca

SEQ ID NO: 1106518 - DNA, 15 bp, Homo sapiens
gccgtgaacttgccc

SEQ ID NO: 1106519 - DNA, 15 bp, Homo sapiens
agccgtgaacttgcc

SEQ ID NO: 1106520 - DNA, 15 bp, Homo sapiens
aagccgtgaacttgc

SEQ ID NO: 1106521 - DNA, 15 bp, Homo sapiens
taagccgtgaacttg

SEQ ID NO: 1106522 - DNA, 15 bp, Homo sapiens
ataagccgtgaactt

SEQ ID NO: 1106523 - DNA, 15 bp, Homo sapiens
cataagccgtgaact

SEQ ID NO: 1106524 - DNA, 15 bp, Homo sapiens
gcataagccgtgaac

SEQ ID NO: 1106525 - DNA, 15 bp, Homo sapiens
agcataagccgtgaa

SEQ ID NO: 1106526 - DNA, 15 bp, Homo sapiens
cagcataagccgtga

SEQ ID NO: 1106527 - DNA, 15 bp, Homo sapiens
ccagcataagccgtg

SEQ ID NO: 1106528 - DNA, 15 bp, Homo sapiens
cccagcataagccgt

SEQ ID NO: 1106529 - DNA, 15 bp, Homo sapiens
tcccagcataagccg

SEQ ID NO: 1106530 - DNA, 15 bp, Homo sapiens
atcccagcataagcc

SEQ ID NO: 1106531 - DNA, 15 bp, Homo sapiens
catcccagcataagc

SEQ ID NO: 1106532 - DNA, 15 bp, Homo sapiens
ccatcccagcataag

SEQ ID NO: 1106533 - DNA, 15 bp, Homo sapiens
cccatcccagcataa

SEQ ID NO: 1106534 - DNA, 15 bp, Homo sapiens
tcccatcccagcata

SEQ ID NO: 1106535 - DNA, 15 bp, Homo sapiens
ttcccatcccagcat

SEQ ID NO: 1106536 - DNA, 15 bp, Homo sapiens
gttcccatcccagca

SEQ ID NO: 1106537 - DNA, 15 bp, Homo sapiens
tgttcccatcccagc

SEQ ID NO: 1106538 - DNA, 15 bp, Homo sapiens
atgttcccatcccag

SEQ ID NO: 1106539 - DNA, 15 bp, Homo sapiens
catgttcccatccca

SEQ ID NO: 1106540 - DNA, 15 bp, Homo sapiens
ccatgttcccatccc

SEQ ID NO: 1106541 - DNA, 15 bp, Homo sapiens
cccatgttcccatcc

SEQ ID NO: 1106542 - DNA, 15 bp, Homo sapiens
acccatgttcccatc

SEQ ID NO: 1106543 - DNA, 15 bp, Homo sapiens
gacccatgttcccat

SEQ ID NO: 1106544 - DNA, 15 bp, Homo sapiens
agacccatgttccca

SEQ ID NO: 1106545 - DNA, 15 bp, Homo sapiens
gagacccatgttccc

SEQ ID NO: 1106546 - DNA, 15 bp, Homo sapiens
ggagacccatgttcc

SEQ ID NO: 1106547 - DNA, 15 bp, Homo sapiens
aggagacccatgttc

SEQ ID NO: 1106548 - DNA, 15 bp, Homo sapiens
caggagacccatgtt

SEQ ID NO: 1106549 - DNA, 15 bp, Homo sapiens
tcaggagacccatgt

SEQ ID NO: 1106550 - DNA, 15 bp, Homo sapiens
gtcaggagacccatg

SEQ ID NO: 1106551 - DNA, 15 bp, Homo sapiens
agtcaggagacccat

SEQ ID NO: 1106552 - DNA, 15 bp, Homo sapiens
cagtcaggagaccca

SEQ ID NO: 1106553 - DNA, 15 bp, Homo sapiens
acagtcaggagaccc

SEQ ID NO: 1106554 - DNA, 15 bp, Homo sapiens
cacagtcaggagacc

SEQ ID NO: 1106555 - DNA, 15 bp, Homo sapiens
ccacagtcaggagac

SEQ ID NO: 1106556 - DNA, 15 bp, Homo sapiens
accacagtcaggaga

SEQ ID NO: 1106557 - DNA, 15 bp, Homo sapiens
gaccacagtcaggag

SEQ ID NO: 1106558 - DNA, 15 bp, Homo sapiens
tgaccacagtcagga

SEQ ID NO: 1106559 - DNA, 15 bp, Homo sapiens
ctgaccacagtcagg

SEQ ID NO: 1106560 - DNA, 15 bp, Homo sapiens
actgaccacagtcag

SEQ ID NO: 1106561 - DNA, 15 bp, Homo sapiens
tactgaccacagtca

SEQ ID NO: 1106562 - DNA, 15 bp, Homo sapiens
gtactgaccacagtc

SEQ ID NO: 1106563 - DNA, 15 bp, Homo sapiens
agtactgaccacagt

SEQ ID NO: 1106564 - DNA, 15 bp, Homo sapiens
aagtactgaccacag

SEQ ID NO: 1106565 - DNA, 15 bp, Homo sapiens
gaagtactgaccaca

SEQ ID NO: 1106566 - DNA, 15 bp, Homo sapiens
agaagtactgaccac

SEQ ID NO: 1106567 - DNA, 15 bp, Homo sapiens
cagaagtactgacca

SEQ ID NO: 1106568 - DNA, 15 bp, Homo sapiens
acagaagtactgacc

SEQ ID NO: 1106569 - DNA, 15 bp, Homo sapiens
aacagaagtactgac

SEQ ID NO: 1106570 - DNA, 15 bp, Homo sapiens
gaacagaagtactga

SEQ ID NO: 1106571 - DNA, 15 bp, Homo sapiens
ggaacagaagtactg

SEQ ID NO: 1106572 - DNA, 15 bp, Homo sapiens
gggaacagaagtact

SEQ ID NO: 1106573 - DNA, 15 bp, Homo sapiens
tgggaacagaagtac

SEQ ID NO: 1106574 - DNA, 15 bp, Homo sapiens
ttgggaacagaagta

SEQ ID NO: 1106575 - DNA, 15 bp, Homo sapiens
tttgggaacagaagt

SEQ ID NO: 1106576 - DNA, 15 bp, Homo sapiens
atttgggaacagaag

SEQ ID NO: 1106577 - DNA, 15 bp, Homo sapiens
tatttgggaacagaa

SEQ ID NO: 1106578 - DNA, 15 bp, Homo sapiens
gtatttgggaacaga

SEQ ID NO: 1106579 - DNA, 15 bp, Homo sapiens
ggtatttgggaacag

SEQ ID NO: 1106580 - DNA, 15 bp, Homo sapiens
gggtatttgggaaca

SEQ ID NO: 1106581 - DNA, 15 bp, Homo sapiens
agggtatttgggaac

SEQ ID NO: 1106582 - DNA, 15 bp, Homo sapiens
cagggtatttgggaa

SEQ ID NO: 1106583 - DNA, 15 bp, Homo sapiens
gcagggtatttggga

SEQ ID NO: 1106584 - DNA, 15 bp, Homo sapiens
ggcagggtatttggg

SEQ ID NO: 1106585 - DNA, 15 bp, Homo sapiens
tggcagggtatttgg

SEQ ID NO: 1106586 - DNA, 15 bp, Homo sapiens
gtggcagggtatttg

SEQ ID NO: 1106587 - DNA, 15 bp, Homo sapiens
tgtggcagggtattt

SEQ ID NO: 1106588 - DNA, 15 bp, Homo sapiens
ctgtggcagggtatt

SEQ ID NO: 1106589 - DNA, 15 bp, Homo sapiens
gctgtggcagggtat

SEQ ID NO: 1106590 - DNA, 15 bp, Homo sapiens
ggctgtggcagggta

SEQ ID NO: 1106591 - DNA, 15 bp, Homo sapiens
aggctgtggcagggt

SEQ ID NO: 1106592 - DNA, 15 bp, Homo sapiens
gaggctgtggcaggg

SEQ ID NO: 1106593 - DNA, 15 bp, Homo sapiens
agaggctgtggcagg

SEQ ID NO: 1106594 - DNA, 15 bp, Homo sapiens
tagaggctgtggcag

SEQ ID NO: 1106595 - DNA, 15 bp, Homo sapiens
ctagaggctgtggca

SEQ ID NO: 1106596 - DNA, 15 bp, Homo sapiens
gctagaggctgtggc

SEQ ID NO: 1106597 - DNA, 15 bp, Homo sapiens
ggctagaggctgtgg

SEQ ID NO: 1106598 - DNA, 15 bp, Homo sapiens
aggctagaggctgtg

SEQ ID NO: 1106599 - DNA, 15 bp, Homo sapiens
caggctagaggctgt

SEQ ID NO: 1106600 - DNA, 15 bp, Homo sapiens
ccaggctagaggctg

SEQ ID NO: 1106601 - DNA, 15 bp, Homo sapiens
cccaggctagaggct

SEQ ID NO: 1106602 - DNA, 15 bp, Homo sapiens
gcccaggctagaggc

SEQ ID NO: 1106603 - DNA, 15 bp, Homo sapiens
tgcccaggctagagg

SEQ ID NO: 1106604 - DNA, 15 bp, Homo sapiens
gtgcccaggctagag

SEQ ID NO: 1106605 - DNA, 15 bp, Homo sapiens
agtgcccaggctaga

SEQ ID NO: 1106606 - DNA, 15 bp, Homo sapiens
cagtgcccaggctag

SEQ ID NO: 1106607 - DNA, 15 bp, Homo sapiens
ccagtgcccaggcta

SEQ ID NO: 1106608 - DNA, 15 bp, Homo sapiens
cccagtgcccaggct

SEQ ID NO: 1106609 - DNA, 15 bp, Homo sapiens
gcccagtgcccaggc

SEQ ID NO: 1106610 - DNA, 15 bp, Homo sapiens
agcccagtgcccagg

SEQ ID NO: 1106611 - DNA, 15 bp, Homo sapiens
cagcccagtgcccag

SEQ ID NO: 1106612 - DNA, 15 bp, Homo sapiens
acagcccagtgccca

SEQ ID NO: 1106613 - DNA, 15 bp, Homo sapiens
aacagcccagtgccc

SEQ ID NO: 1106614 - DNA, 15 bp, Homo sapiens
gaacagcccagtgcc

SEQ ID NO: 1106615 - DNA, 15 bp, Homo sapiens
ggaacagcccagtgc

SEQ ID NO: 1106616 - DNA, 15 bp, Homo sapiens
aggaacagcccagtg

SEQ ID NO: 1106617 - DNA, 15 bp, Homo sapiens
caggaacagcccagt

SEQ ID NO: 1106618 - DNA, 15 bp, Homo sapiens
gcaggaacagcccag

SEQ ID NO: 1106619 - DNA, 15 bp, Homo sapiens
agcaggaacagccca

SEQ ID NO: 1106620 - DNA, 15 bp, Homo sapiens
aagcaggaacagccc

SEQ ID NO: 1106621 - DNA, 15 bp, Homo sapiens
gaagcaggaacagcc

SEQ ID NO: 1106622 - DNA, 15 bp, Homo sapiens
agaagcaggaacagc

SEQ ID NO: 1106623 - DNA, 15 bp, Homo sapiens
gagaagcaggaacag

SEQ ID NO: 1106624 - DNA, 15 bp, Homo sapiens
ggagaagcaggaaca

SEQ ID NO: 1106625 - DNA, 15 bp, Homo sapiens
aggagaagcaggaac

SEQ ID NO: 1106626 - DNA, 15 bp, Homo sapiens
gaggagaagcaggaa

SEQ ID NO: 1106627 - DNA, 15 bp, Homo sapiens
ggaggagaagcagga

SEQ ID NO: 1106628 - DNA, 15 bp, Homo sapiens
gggaggagaagcagg

SEQ ID NO: 1106629 - DNA, 15 bp, Homo sapiens
agggaggagaagcag

SEQ ID NO: 1106630 - DNA, 15 bp, Homo sapiens
gagggaggagaagca

SEQ ID NO: 1106631 - DNA, 15 bp, Homo sapiens
tgagggaggagaagc

SEQ ID NO: 1106632 - DNA, 15 bp, Homo sapiens
atgagggaggagaag

SEQ ID NO: 1106633 - DNA, 15 bp, Homo sapiens
aatgagggaggagaa

SEQ ID NO: 1106634 - DNA, 15 bp, Homo sapiens
taatgagggaggaga

SEQ ID NO: 1106635 - DNA, 15 bp, Homo sapiens
gtaatgagggaggag

SEQ ID NO: 1106636 - DNA, 15 bp, Homo sapiens
ggtaatgagggagga

SEQ ID NO: 1106637 - DNA, 15 bp, Homo sapiens
gggtaatgagggagg

SEQ ID NO: 1106638 - DNA, 15 bp, Homo sapiens
ggggtaatgagggag

SEQ ID NO: 1106639 - DNA, 15 bp, Homo sapiens
gggggtaatgaggga

SEQ ID NO: 1106640 - DNA, 15 bp, Homo sapiens
ggggggtaatgaggg

SEQ ID NO: 1106641 - DNA, 15 bp, Homo sapiens
gggggggtaatgagg

SEQ ID NO: 1106642 - DNA, 15 bp, Homo sapiens
tgggggggtaatgag

SEQ ID NO: 1106643 - DNA, 15 bp, Homo sapiens
atgggggggtaatga

SEQ ID NO: 1106644 - DNA, 15 bp, Homo sapiens
tatgggggggtaatg

SEQ ID NO: 1106645 - DNA, 15 bp, Homo sapiens
ctatgggggggtaat

SEQ ID NO: 1106646 - DNA, 15 bp, Homo sapiens
gctatgggggggtaa

SEQ ID NO: 1106647 - DNA, 15 bp, Homo sapiens
ggctatgggggggta

SEQ ID NO: 1106648 - DNA, 15 bp, Homo sapiens
gggctatgggggggt

SEQ ID NO: 1106649 - DNA, 15 bp, Homo sapiens
tgggctatggggggg

SEQ ID NO: 1106650 - DNA, 15 bp, Homo sapiens
ctgggctatgggggg

SEQ ID NO: 1106651 - DNA, 15 bp, Homo sapiens
actgggctatggggg

SEQ ID NO: 1106652 - DNA, 15 bp, Homo sapiens
tactgggctatgggg

SEQ ID NO: 1106653 - DNA, 15 bp, Homo sapiens
ttactgggctatggg

SEQ ID NO: 1106654 - DNA, 15 bp, Homo sapiens
gttactgggctatgg

SEQ ID NO: 1106655 - DNA, 15 bp, Homo sapiens
ggttactgggctatg

SEQ ID NO: 1106656 - DNA, 15 bp, Homo sapiens
gggttactgggctat

SEQ ID NO: 1106657 - DNA, 15 bp, Homo sapiens
ggggttactgggcta

SEQ ID NO: 1106658 - DNA, 15 bp, Homo sapiens
gggggttactgggct

SEQ ID NO: 1106659 - DNA, 15 bp, Homo sapiens
ggggggttactgggc

SEQ ID NO: 1106660 - DNA, 15 bp, Homo sapiens
tggggggttactggg

SEQ ID NO: 1106661 - DNA, 15 bp, Homo sapiens
gtggggggttactgg

SEQ ID NO: 1106662 - DNA, 15 bp, Homo sapiens
ggtggggggttactg

SEQ ID NO: 1106663 - DNA, 15 bp, Homo sapiens
gggtggggggttact

SEQ ID NO: 1106664 - DNA, 15 bp, Homo sapiens
ggggtggggggttac

SEQ ID NO: 1106665 - DNA, 15 bp, Homo sapiens
aggggtggggggtta

SEQ ID NO: 1106666 - DNA, 15 bp, Homo sapiens
taggggtggggggtt

SEQ ID NO: 1106667 - DNA, 15 bp, Homo sapiens
ctaggggtggggggt

SEQ ID NO: 1106668 - DNA, 15 bp, Homo sapiens
gctaggggtgggggg

SEQ ID NO: 1106669 - DNA, 15 bp, Homo sapiens
agctaggggtggggg

SEQ ID NO: 1106670 - DNA, 15 bp, Homo sapiens
gagctaggggtgggg

SEQ ID NO: 1106671 - DNA, 15 bp, Homo sapiens
agagctaggggtggg

SEQ ID NO: 1106672 - DNA, 15 bp, Homo sapiens
cagagctaggggtgg

SEQ ID NO: 1106673 - DNA, 15 bp, Homo sapiens
ccagagctaggggtg

SEQ ID NO: 1106674 - DNA, 15 bp, Homo sapiens
accagagctaggggt

SEQ ID NO: 1106675 - DNA, 15 bp, Homo sapiens
aaccagagctagggg

SEQ ID NO: 1106676 - DNA, 15 bp, Homo sapiens
aaaccagagctaggg

SEQ ID NO: 1106677 - DNA, 15 bp, Homo sapiens
gaaaccagagctagg

SEQ ID NO: 1106678 - DNA, 15 bp, Homo sapiens
ggaaaccagagctag

SEQ ID NO: 1106679 - DNA, 15 bp, Homo sapiens
gggaaaccagagcta

SEQ ID NO: 1106680 - DNA, 15 bp, Homo sapiens
agggaaaccagagct

SEQ ID NO: 1106681 - DNA, 15 bp, Homo sapiens
aagggaaaccagagc

SEQ ID NO: 1106682 - DNA, 15 bp, Homo sapiens
aaagggaaaccagag

SEQ ID NO: 1106683 - DNA, 15 bp, Homo sapiens
gaaagggaaaccaga

SEQ ID NO: 1106684 - DNA, 15 bp, Homo sapiens
agaaagggaaaccag

SEQ ID NO: 1106685 - DNA, 15 bp, Homo sapiens
cagaaagggaaacca

SEQ ID NO: 1106686 - DNA, 15 bp, Homo sapiens
gcagaaagggaaacc

SEQ ID NO: 1106687 - DNA, 15 bp, Homo sapiens
ggcagaaagggaaac

SEQ ID NO: 1106688 - DNA, 15 bp, Homo sapiens
aggcagaaagggaaa

SEQ ID NO: 1106689 - DNA, 15 bp, Homo sapiens
taggcagaaagggaa

SEQ ID NO: 1106690 - DNA, 15 bp, Homo sapiens
ttaggcagaaaggga

SEQ ID NO: 1106691 - DNA, 15 bp, Homo sapiens
tttaggcagaaaggg

SEQ ID NO: 1106692 - DNA, 15 bp, Homo sapiens
ctttaggcagaaagg

SEQ ID NO: 1106693 - DNA, 15 bp, Homo sapiens
cctttaggcagaaag

SEQ ID NO: 1106694 - DNA, 15 bp, Homo sapiens
ccctttaggcagaaa

SEQ ID NO: 1106695 - DNA, 15 bp, Homo sapiens
tccctttaggcagaa

SEQ ID NO: 1106696 - DNA, 15 bp, Homo sapiens
ctccctttaggcaga

SEQ ID NO: 1106697 - DNA, 15 bp, Homo sapiens
tctccctttaggcag

SEQ ID NO: 1106698 - DNA, 15 bp, Homo sapiens
gtctccctttaggca

SEQ ID NO: 1106699 - DNA, 15 bp, Homo sapiens
cgtctccctttaggc

SEQ ID NO: 1106700 - DNA, 15 bp, Homo sapiens
gcgtctccctttagg

SEQ ID NO: 1106701 - DNA, 15 bp, Homo sapiens
agcgtctccctttag

SEQ ID NO: 1106702 - DNA, 15 bp, Homo sapiens
gagcgtctcccttta

SEQ ID NO: 1106703 - DNA, 15 bp, Homo sapiens
agagcgtctcccttt

SEQ ID NO: 1106704 - DNA, 15 bp, Homo sapiens
cagagcgtctccctt

SEQ ID NO: 1106705 - DNA, 15 bp, Homo sapiens
acagagcgtctccct

SEQ ID NO: 1106706 - DNA, 15 bp, Homo sapiens
gacagagcgtctccc

SEQ ID NO: 1106707 - DNA, 15 bp, Homo sapiens
ggacagagcgtctcc

SEQ ID NO: 1106708 - DNA, 15 bp, Homo sapiens
aggacagagcgtctc

SEQ ID NO: 1106709 - DNA, 15 bp, Homo sapiens
caggacagagcgtct

SEQ ID NO: 1106710 - DNA, 15 bp, Homo sapiens
tcaggacagagcgtc

SEQ ID NO: 1106711 - DNA, 15 bp, Homo sapiens
atcaggacagagcgt

SEQ ID NO: 1106712 - DNA, 15 bp, Homo sapiens
tatcaggacagagcg

SEQ ID NO: 1106713 - DNA, 15 bp, Homo sapiens
atatcaggacagagc

SEQ ID NO: 1106714 - DNA, 15 bp, Homo sapiens
catatcaggacagag

SEQ ID NO: 1106715 - DNA, 15 bp, Homo sapiens
ccatatcaggacaga

SEQ ID NO: 1106716 - DNA, 15 bp, Homo sapiens
tccatatcaggacag

SEQ ID NO: 1106717 - DNA, 15 bp, Homo sapiens
ctccatatcaggaca

SEQ ID NO: 1106718 - DNA, 15 bp, Homo sapiens
gctccatatcaggac

SEQ ID NO: 1106719 - DNA, 15 bp, Homo sapiens
tgctccatatcagga

SEQ ID NO: 1106720 - DNA, 15 bp, Homo sapiens
atgctccatatcagg

SEQ ID NO: 1106721 - DNA, 15 bp, Homo sapiens
aatgctccatatcag

SEQ ID NO: 1106722 - DNA, 15 bp, Homo sapiens
gaatgctccatatca

SEQ ID NO: 1106723 - DNA, 15 bp, Homo sapiens
ggaatgctccatatc

SEQ ID NO: 1106724 - DNA, 15 bp, Homo sapiens
gggaatgctccatat

SEQ ID NO: 1106725 - DNA, 15 bp, Homo sapiens
ggggaatgctccata

SEQ ID NO: 1106726 - DNA, 15 bp, Homo sapiens
gggggaatgctccat

SEQ ID NO: 1106727 - DNA, 15 bp, Homo sapiens
ggggggaatgctcca

SEQ ID NO: 1106728 - DNA, 15 bp, Homo sapiens
tggggggaatgctcc

SEQ ID NO: 1106729 - DNA, 15 bp, Homo sapiens
ctggggggaatgctc

SEQ ID NO: 1106730 - DNA, 15 bp, Homo sapiens
cctggggggaatgct

SEQ ID NO: 1106731 - DNA, 15 bp, Homo sapiens
tcctggggggaatgc

SEQ ID NO: 1106732 - DNA, 15 bp, Homo sapiens
gtcctggggggaatg

SEQ ID NO: 1106733 - DNA, 15 bp, Homo sapiens
ggtcctggggggaat

SEQ ID NO: 1106734 - DNA, 15 bp, Homo sapiens
gggtcctggggggaa

SEQ ID NO: 1106735 - DNA, 15 bp, Homo sapiens
ggggtcctgggggga

SEQ ID NO: 1106736 - DNA, 15 bp, Homo sapiens
gggggtcctgggggg

SEQ ID NO: 1106737 - DNA, 15 bp, Homo sapiens
tgggggtcctggggg

SEQ ID NO: 1106738 - DNA, 15 bp, Homo sapiens
ctgggggtcctgggg

SEQ ID NO: 1106739 - DNA, 15 bp, Homo sapiens
gctgggggtcctggg

SEQ ID NO: 1106740 - DNA, 15 bp, Homo sapiens
ggctgggggtcctgg

SEQ ID NO: 1106741 - DNA, 15 bp, Homo sapiens
gggctgggggtcctg

SEQ ID NO: 1106742 - DNA, 15 bp, Homo sapiens
agggctgggggtcct

SEQ ID NO: 1106743 - DNA, 15 bp, Homo sapiens
tagggctgggggtcc

SEQ ID NO: 1106744 - DNA, 15 bp, Homo sapiens
gtagggctgggggtc

SEQ ID NO: 1106745 - DNA, 15 bp, Homo sapiens
ggtagggctgggggt

SEQ ID NO: 1106746 - DNA, 15 bp, Homo sapiens
tggtagggctggggg

SEQ ID NO: 1106747 - DNA, 15 bp, Homo sapiens
gtggtagggctgggg

SEQ ID NO: 1106748 - DNA, 15 bp, Homo sapiens
agtggtagggctggg

SEQ ID NO: 1106749 - DNA, 15 bp, Homo sapiens
gagtggtagggctgg

SEQ ID NO: 1106750 - DNA, 15 bp, Homo sapiens
tgagtggtagggctg

SEQ ID NO: 1106751 - DNA, 15 bp, Homo sapiens
atgagtggtagggct

SEQ ID NO: 1106752 - DNA, 15 bp, Homo sapiens
catgagtggtagggc

SEQ ID NO: 1106753 - DNA, 15 bp, Homo sapiens
tcatgagtggtaggg

SEQ ID NO: 1106754 - DNA, 15 bp, Homo sapiens
ctcatgagtggtagg

SEQ ID NO: 1106755 - DNA, 15 bp, Homo sapiens
actcatgagtggtag

SEQ ID NO: 1106756 - DNA, 15 bp, Homo sapiens
aactcatgagtggta

SEQ ID NO: 1106757 - DNA, 15 bp, Homo sapiens
caactcatgagtggt

SEQ ID NO: 1106758 - DNA, 15 bp, Homo sapiens
ccaactcatgagtgg

SEQ ID NO: 1106759 - DNA, 15 bp, Homo sapiens
tccaactcatgagtg

SEQ ID NO: 1106760 - DNA, 15 bp, Homo sapiens
ttccaactcatgagt

SEQ ID NO: 1106761 - DNA, 15 bp, Homo sapiens
attccaactcatgag

SEQ ID NO: 1106762 - DNA, 15 bp, Homo sapiens
tattccaactcatga

SEQ ID NO: 1106763 - DNA, 15 bp, Homo sapiens
ctattccaactcatg

SEQ ID NO: 1106764 - DNA, 15 bp, Homo sapiens
actattccaactcat

SEQ ID NO: 1106765 - DNA, 15 bp, Homo sapiens
aactattccaactca

SEQ ID NO: 1106766 - DNA, 15 bp, Homo sapiens
gaactattccaactc

SEQ ID NO: 1106767 - DNA, 15 bp, Homo sapiens
ggaactattccaact

SEQ ID NO: 1106768 - DNA, 15 bp, Homo sapiens
cggaactattccaac

SEQ ID NO: 1106769 - DNA, 15 bp, Homo sapiens
tcggaactattccaa

SEQ ID NO: 1106770 - DNA, 15 bp, Homo sapiens
ttcggaactattcca

SEQ ID NO: 1106771 - DNA, 15 bp, Homo sapiens
tttcggaactattcc

SEQ ID NO: 1106772 - DNA, 15 bp, Homo sapiens
ctttcggaactattc

SEQ ID NO: 1106773 - DNA, 15 bp, Homo sapiens
cctttcggaactatt

SEQ ID NO: 1106774 - DNA, 15 bp, Homo sapiens
tcctttcggaactat

SEQ ID NO: 1106775 - DNA, 15 bp, Homo sapiens
gtcctttcggaacta

SEQ ID NO: 1106776 - DNA, 15 bp, Homo sapiens
tgtcctttcggaact

SEQ ID NO: 1106777 - DNA, 15 bp, Homo sapiens
atgtcctttcggaac

SEQ ID NO: 1106778 - DNA, 15 bp, Homo sapiens
tatgtcctttcggaa

SEQ ID NO: 1106779 - DNA, 15 bp, Homo sapiens
ctatgtcctttcgga

SEQ ID NO: 1106780 - DNA, 15 bp, Homo sapiens
gctatgtcctttcgg

SEQ ID NO: 1106781 - DNA, 15 bp, Homo sapiens
ggctatgtcctttcg

SEQ ID NO: 1106782 - DNA, 15 bp, Homo sapiens
aggctatgtcctttc

SEQ ID NO: 1106783 - DNA, 15 bp, Homo sapiens
caggctatgtccttt

SEQ ID NO: 1106784 - DNA, 15 bp, Homo sapiens
acaggctatgtcctt

SEQ ID NO: 1106785 - DNA, 15 bp, Homo sapiens
gacaggctatgtcct

SEQ ID NO: 1106786 - DNA, 15 bp, Homo sapiens
agacaggctatgtcc

SEQ ID NO: 1106787 - DNA, 15 bp, Homo sapiens
cagacaggctatgtc

SEQ ID NO: 1106788 - DNA, 15 bp, Homo sapiens
gcagacaggctatgt

SEQ ID NO: 1106789 - DNA, 15 bp, Homo sapiens
agcagacaggctatg

SEQ ID NO: 1106790 - DNA, 15 bp, Homo sapiens
gagcagacaggctat

SEQ ID NO: 1106791 - DNA, 15 bp, Homo sapiens
ggagcagacaggcta

SEQ ID NO: 1106792 - DNA, 15 bp, Homo sapiens
aggagcagacaggct

SEQ ID NO: 1106793 - DNA, 15 bp, Homo sapiens
caggagcagacaggc

SEQ ID NO: 1106794 - DNA, 15 bp, Homo sapiens
gcaggagcagacagg

SEQ ID NO: 1106795 - DNA, 15 bp, Homo sapiens
agcaggagcagacag

SEQ ID NO: 1106796 - DNA, 15 bp, Homo sapiens
tagcaggagcagaca

SEQ ID NO: 1106797 - DNA, 15 bp, Homo sapiens
atagcaggagcagac

SEQ ID NO: 1106798 - DNA, 15 bp, Homo sapiens
gatagcaggagcaga

SEQ ID NO: 1106799 - DNA, 15 bp, Homo sapiens
agatagcaggagcag

SEQ ID NO: 1106800 - DNA, 15 bp, Homo sapiens
gagatagcaggagca

SEQ ID NO: 1106801 - DNA, 15 bp, Homo sapiens
agagatagcaggagc

SEQ ID NO: 1106802 - DNA, 15 bp, Homo sapiens
cagagatagcaggag

SEQ ID NO: 1106803 - DNA, 15 bp, Homo sapiens
gcagagatagcagga

SEQ ID NO: 1106804 - DNA, 15 bp, Homo sapiens
ggcagagatagcagg

SEQ ID NO: 1106805 - DNA, 15 bp, Homo sapiens
aggcagagatagcag

SEQ ID NO: 1106806 - DNA, 15 bp, Homo sapiens
caggcagagatagca

SEQ ID NO: 1106807 - DNA, 15 bp, Homo sapiens
gcaggcagagatagc

SEQ ID NO: 1106808 - DNA, 15 bp, Homo sapiens
ggcaggcagagatag

SEQ ID NO: 1106809 - DNA, 15 bp, Homo sapiens
cggcaggcagagata

SEQ ID NO: 1106810 - DNA, 15 bp, Homo sapiens
acggcaggcagagat

SEQ ID NO: 1106811 - DNA, 15 bp, Homo sapiens
cacggcaggcagaga

SEQ ID NO: 1106812 - DNA, 15 bp, Homo sapiens
acacggcaggcagag

SEQ ID NO: 1106813 - DNA, 15 bp, Homo sapiens
cacacggcaggcaga

SEQ ID NO: 1106814 - DNA, 15 bp, Homo sapiens
ccacacggcaggcag

SEQ ID NO: 1106815 - DNA, 15 bp, Homo sapiens
cccacacggcaggca

SEQ ID NO: 1106816 - DNA, 15 bp, Homo sapiens
ccccacacggcaggc

SEQ ID NO: 1106817 - DNA, 15 bp, Homo sapiens
tccccacacggcagg

SEQ ID NO: 1106818 - DNA, 15 bp, Homo sapiens
ctccccacacggcag

SEQ ID NO: 1106819 - DNA, 15 bp, Homo sapiens
gctccccacacggca

SEQ ID NO: 1106820 - DNA, 15 bp, Homo sapiens
agctccccacacggc

SEQ ID NO: 1106821 - DNA, 15 bp, Homo sapiens
cagctccccacacgg

SEQ ID NO: 1106822 - DNA, 15 bp, Homo sapiens
ccagctccccacacg

SEQ ID NO: 1106823 - DNA, 15 bp, Homo sapiens
accagctccccacac

SEQ ID NO: 1106824 - DNA, 15 bp, Homo sapiens
gaccagctccccaca

SEQ ID NO: 1106825 - DNA, 15 bp, Homo sapiens
ggaccagctccccac

SEQ ID NO: 1106826 - DNA, 15 bp, Homo sapiens
tggaccagctcccca

SEQ ID NO: 1106827 - DNA, 15 bp, Homo sapiens
ctggaccagctcccc

SEQ ID NO: 1106828 - DNA, 15 bp, Homo sapiens
tctggaccagctccc

SEQ ID NO: 1106829 - DNA, 15 bp, Homo sapiens
ttctggaccagctcc

SEQ ID NO: 1106830 - DNA, 15 bp, Homo sapiens
attctggaccagctc

SEQ ID NO: 1106831 - DNA, 15 bp, Homo sapiens
cattctggaccagct

SEQ ID NO: 1106832 - DNA, 15 bp, Homo sapiens
tcattctggaccagc

SEQ ID NO: 1106833 - DNA, 15 bp, Homo sapiens
atcattctggaccag

SEQ ID NO: 1106834 - DNA, 15 bp, Homo sapiens
catcattctggacca

SEQ ID NO: 1106835 - DNA, 15 bp, Homo sapiens
ccatcattctggacc

SEQ ID NO: 1106836 - DNA, 15 bp, Homo sapiens
tccatcattctggac

SEQ ID NO: 1106837 - DNA, 15 bp, Homo sapiens
ctccatcattctgga

SEQ ID NO: 1106838 - DNA, 15 bp, Homo sapiens
gctccatcattctgg

SEQ ID NO: 1106839 - DNA, 15 bp, Homo sapiens
ggctccatcattctg

SEQ ID NO: 1106840 - DNA, 15 bp, Homo sapiens
gggctccatcattct

SEQ ID NO: 1106841 - DNA, 15 bp, Homo sapiens
ggggctccatcattc

SEQ ID NO: 1106842 - DNA, 15 bp, Homo sapiens
aggggctccatcatt

SEQ ID NO: 1106843 - DNA, 15 bp, Homo sapiens
caggggctccatcat

SEQ ID NO: 1106844 - DNA, 15 bp, Homo sapiens
ccaggggctccatca

SEQ ID NO: 1106845 - DNA, 15 bp, Homo sapiens
cccaggggctccatc

SEQ ID NO: 1106846 - DNA, 15 bp, Homo sapiens
ccccaggggctccat

SEQ ID NO: 1106847 - DNA, 15 bp, Homo sapiens
tccccaggggctcca

SEQ ID NO: 1106848 - DNA, 15 bp, Homo sapiens
ctccccaggggctcc

SEQ ID NO: 1106849 - DNA, 15 bp, Homo sapiens
gctccccaggggctc

SEQ ID NO: 1106850 - DNA, 15 bp, Homo sapiens
tgctccccaggggct

SEQ ID NO: 1106851 - DNA, 15 bp, Homo sapiens
ttgctccccaggggc

SEQ ID NO: 1106852 - DNA, 15 bp, Homo sapiens
cttgctccccagggg

SEQ ID NO: 1106853 - DNA, 15 bp, Homo sapiens
ccttgctccccaggg

SEQ ID NO: 1106854 - DNA, 15 bp, Homo sapiens
cccttgctccccagg

SEQ ID NO: 1106855 - DNA, 15 bp, Homo sapiens
ccccttgctccccag

SEQ ID NO: 1106856 - DNA, 15 bp, Homo sapiens
accccttgctcccca

SEQ ID NO: 1106857 - DNA, 15 bp, Homo sapiens
gaccccttgctcccc

SEQ ID NO: 1106858 - DNA, 15 bp, Homo sapiens
cgaccccttgctccc

SEQ ID NO: 1106859 - DNA, 15 bp, Homo sapiens
acgaccccttgctcc

SEQ ID NO: 1106860 - DNA, 15 bp, Homo sapiens
cacgaccccttgctc

SEQ ID NO: 1106861 - DNA, 15 bp, Homo sapiens
acacgaccccttgct

SEQ ID NO: 1106862 - DNA, 15 bp, Homo sapiens
gacacgaccccttgc

SEQ ID NO: 1106863 - DNA, 15 bp, Homo sapiens
ggacacgaccccttg

SEQ ID NO: 1106864 - DNA, 15 bp, Homo sapiens
tggacacgacccctt

SEQ ID NO: 1106865 - DNA, 15 bp, Homo sapiens
ctggacacgacccct

SEQ ID NO: 1106866 - DNA, 15 bp, Homo sapiens
gctggacacgacccc

SEQ ID NO: 1106867 - DNA, 15 bp, Homo sapiens
agctggacacgaccc

SEQ ID NO: 1106868 - DNA, 15 bp, Homo sapiens
aagctggacacgacc

SEQ ID NO: 1106869 - DNA, 15 bp, Homo sapiens
caagctggacacgac

SEQ ID NO: 1106870 - DNA, 15 bp, Homo sapiens
ccaagctggacacga

SEQ ID NO: 1106871 - DNA, 15 bp, Homo sapiens
cccaagctggacacg

SEQ ID NO: 1106872 - DNA, 15 bp, Homo sapiens
tcccaagctggacac

SEQ ID NO: 1106873 - DNA, 15 bp, Homo sapiens
ctcccaagctggaca

SEQ ID NO: 1106874 - DNA, 15 bp, Homo sapiens
cctcccaagctggac

SEQ ID NO: 1106875 - DNA, 15 bp, Homo sapiens
agccctcccaagctg

SEQ ID NO: 1106876 - DNA, 15 bp, Homo sapiens
aagccctcccaagct

SEQ ID NO: 1106877 - DNA, 15 bp, Homo sapiens
gaagccctcccaagc

SEQ ID NO: 1106878 - DNA, 15 bp, Homo sapiens
agaagccctcccaag

SEQ ID NO: 1106879 - DNA, 15 bp, Homo sapiens
cagaagccctcccaa

SEQ ID NO: 1106880 - DNA, 15 bp, Homo sapiens
ccagaagccctccca

SEQ ID NO: 1106881 - DNA, 15 bp, Homo sapiens
tccagaagccctccc

SEQ ID NO: 1106882 - DNA, 15 bp, Homo sapiens
ctccagaagccctcc

SEQ ID NO: 1106883 - DNA, 15 bp, Homo sapiens
tctccagaagccctc

SEQ ID NO: 1106884 - DNA, 15 bp, Homo sapiens
gtctccagaagccct

SEQ ID NO: 1106885 - DNA, 15 bp, Homo sapiens
ggtctccagaagccc

SEQ ID NO: 1106886 - DNA, 15 bp, Homo sapiens
aggtctccagaagcc

SEQ ID NO: 1106887 - DNA, 15 bp, Homo sapiens
caggtctccagaagc

SEQ ID NO: 1106888 - DNA, 15 bp, Homo sapiens
ccaggtctccagaag

SEQ ID NO: 1106889 - DNA, 15 bp, Homo sapiens
gccaggtctccagaa

SEQ ID NO: 1106890 - DNA, 15 bp, Homo sapiens
ggccaggtctccaga

SEQ ID NO: 1106891 - DNA, 15 bp, Homo sapiens
gggccaggtctccag

SEQ ID NO: 1106892 - DNA, 15 bp, Homo sapiens
cgggccaggtctcca

SEQ ID NO: 1106893 - DNA, 15 bp, Homo sapiens
tcgggccaggtctcc

SEQ ID NO: 1106894 - DNA, 15 bp, Homo sapiens
ctcgggccaggtctc

SEQ ID NO: 1106895 - DNA, 15 bp, Homo sapiens
actcgggccaggtct

SEQ ID NO: 1106896 - DNA, 15 bp, Homo sapiens
gactcgggccaggtc

SEQ ID NO: 1106897 - DNA, 15 bp, Homo sapiens
ggactcgggccaggt

SEQ ID NO: 1106898 - DNA, 15 bp, Homo sapiens
gggactcgggccagg

SEQ ID NO: 1106899 - DNA, 15 bp, Homo sapiens
tgggactcgggccag

SEQ ID NO: 1106900 - DNA, 15 bp, Homo sapiens
ctgggactcgggcca

SEQ ID NO: 1106901 - DNA, 15 bp, Homo sapiens
tctgggactcgggcc

SEQ ID NO: 1106902 - DNA, 15 bp, Homo sapiens
atctgggactcgggc

SEQ ID NO: 1106903 - DNA, 15 bp, Homo sapiens
gatctgggactcggg

SEQ ID NO: 1106904 - DNA, 15 bp, Homo sapiens
ggatctgggactcgg

SEQ ID NO: 1106905 - DNA, 15 bp, Homo sapiens
aggatctgggactcg

SEQ ID NO: 1106906 - DNA, 15 bp, Homo sapiens
aaggatctgggactc

SEQ ID NO: 1106907 - DNA, 15 bp, Homo sapiens
gaaggatctgggact

SEQ ID NO: 1106908 - DNA, 15 bp, Homo sapiens
agaaggatctgggac

SEQ ID NO: 1106909 - DNA, 15 bp, Homo sapiens
aagaaggatctggga

SEQ ID NO: 1106910 - DNA, 15 bp, Homo sapiens
caagaaggatctggg

SEQ ID NO: 1106911 - DNA, 15 bp, Homo sapiens
tcaagaaggatctgg

SEQ ID NO: 1106912 - DNA, 15 bp, Homo sapiens
ttcaagaaggatctg

SEQ ID NO: 1106913 - DNA, 15 bp, Homo sapiens
gttcaagaaggatct

SEQ ID NO: 1106914 - DNA, 15 bp, Homo sapiens
agttcaagaaggatc

SEQ ID NO: 1106915 - DNA, 15 bp, Homo sapiens
tagttcaagaaggat

SEQ ID NO: 1106916 - DNA, 15 bp, Homo sapiens
ctagttcaagaagga

SEQ ID NO: 1106917 - DNA, 15 bp, Homo sapiens
tctagttcaagaagg

SEQ ID NO: 1106918 - DNA, 15 bp, Homo sapiens
ttctagttcaagaag

SEQ ID NO: 1106919 - DNA, 15 bp, Homo sapiens
tttctagttcaagaa

SEQ ID NO: 1106920 - DNA, 15 bp, Homo sapiens
ttttctagttcaaga

SEQ ID NO: 1106921 - DNA, 15 bp, Homo sapiens
tttttctagttcaag

SEQ ID NO: 1106922 - DNA, 15 bp, Homo sapiens
atttttctagttcaa

SEQ ID NO: 1106923 - DNA, 15 bp, Homo sapiens
catttttctagttca

SEQ ID NO: 1106924 - DNA, 15 bp, Homo sapiens
gcatttttctagttc

SEQ ID NO: 1106925 - DNA, 15 bp, Homo sapiens
ggcatttttctagtt

SEQ ID NO: 1106926 - DNA, 15 bp, Homo sapiens
aggcatttttctagt

SEQ ID NO: 1106927 - DNA, 15 bp, Homo sapiens
caggcatttttctag

SEQ ID NO: 1106928 - DNA, 15 bp, Homo sapiens
gcaggcatttttcta

SEQ ID NO: 1106929 - DNA, 15 bp, Homo sapiens
agcaggcatttttct

SEQ ID NO: 1106930 - DNA, 15 bp, Homo sapiens
cagcaggcatttttc

SEQ ID NO: 1106931 - DNA, 15 bp, Homo sapiens
acagcaggcattttt

SEQ ID NO: 1106932 - DNA, 15 bp, Homo sapiens
aacagcaggcatttt

SEQ ID NO: 1106933 - DNA, 15 bp, Homo sapiens
aaacagcaggcattt

SEQ ID NO: 1106934 - DNA, 15 bp, Homo sapiens
aaaacagcaggcatt

SEQ ID NO: 1106935 - DNA, 15 bp, Homo sapiens
aaaaacagcaggcat

SEQ ID NO: 1106936 - DNA, 15 bp, Homo sapiens
taaaaacagcaggca

SEQ ID NO: 1106937 - DNA, 15 bp, Homo sapiens
ctaaaaacagcaggc

SEQ ID NO: 1106938 - DNA, 15 bp, Homo sapiens
actaaaaacagcagg

SEQ ID NO: 1106939 - DNA, 15 bp, Homo sapiens
cactaaaaacagcag

SEQ ID NO: 1106940 - DNA, 15 bp, Homo sapiens
gcactaaaaacagca

SEQ ID NO: 1106941 - DNA, 15 bp, Homo sapiens
tgcactaaaaacagc

SEQ ID NO: 1106942 - DNA, 15 bp, Homo sapiens
atgcactaaaaacag

SEQ ID NO: 1106943 - DNA, 15 bp, Homo sapiens
aatgcactaaaaaca

SEQ ID NO: 1106944 - DNA, 15 bp, Homo sapiens
gaatgcactaaaaac

SEQ ID NO: 1106945 - DNA, 15 bp, Homo sapiens
agaatgcactaaaaa

SEQ ID NO: 1106946 - DNA, 15 bp, Homo sapiens
gagaatgcactaaaa

SEQ ID NO: 1106947 - DNA, 15 bp, Homo sapiens
tgagaatgcactaaa

SEQ ID NO: 1106948 - DNA, 15 bp, Homo sapiens
ctgagaatgcactaa

SEQ ID NO: 1106949 - DNA, 15 bp, Homo sapiens
actgagaatgcacta

SEQ ID NO: 1106950 - DNA, 15 bp, Homo sapiens
aactgagaatgcact

SEQ ID NO: 1106951 - DNA, 15 bp, Homo sapiens
caactgagaatgcac

SEQ ID NO: 1106952 - DNA, 15 bp, Homo sapiens
tcaactgagaatgca

SEQ ID NO: 1106953 - DNA, 15 bp, Homo sapiens
gtcaactgagaatgc

SEQ ID NO: 1106954 - DNA, 15 bp, Homo sapiens
tgtcaactgagaatg

SEQ ID NO: 1106955 - DNA, 15 bp, Homo sapiens
ttgtcaactgagaat

SEQ ID NO: 1106956 - DNA, 15 bp, Homo sapiens
tttgtcaactgagaa

SEQ ID NO: 1106957 - DNA, 15 bp, Homo sapiens
ctttgtcaactgaga

SEQ ID NO: 1106958 - DNA, 15 bp, Homo sapiens
gctttgtcaactgag

SEQ ID NO: 1106959 - DNA, 15 bp, Homo sapiens
tgctttgtcaactga

SEQ ID NO: 1106960 - DNA, 15 bp, Homo sapiens
atgctttgtcaactg

SEQ ID NO: 1106961 - DNA, 15 bp, Homo sapiens
aatgctttgtcaact

SEQ ID NO: 1106962 - DNA, 15 bp, Homo sapiens
aaatgctttgtcaac

SEQ ID NO: 1106963 - DNA, 15 bp, Homo sapiens
aaaatgctttgtcaa

SEQ ID NO: 1106964 - DNA, 15 bp, Homo sapiens
gaaaatgctttgtca

SEQ ID NO: 1106965 - DNA, 15 bp, Homo sapiens
agaaaatgctttgtc

SEQ ID NO: 1106966 - DNA, 15 bp, Homo sapiens
aagaaaatgctttgt

SEQ ID NO: 1106967 - DNA, 15 bp, Homo sapiens
taagaaaatgctttg

SEQ ID NO: 1106968 - DNA, 15 bp, Homo sapiens
gtaagaaaatgcttt

SEQ ID NO: 1106969 - DNA, 15 bp, Homo sapiens
ggtaagaaaatgctt

SEQ ID NO: 1106970 - DNA, 15 bp, Homo sapiens
aggtaagaaaatgct

SEQ ID NO: 1106971 - DNA, 15 bp, Homo sapiens
gaggtaagaaaatgc

SEQ ID NO: 1106972 - DNA, 15 bp, Homo sapiens
agaggtaagaaaatg

SEQ ID NO: 1106973 - DNA, 15 bp, Homo sapiens
tagaggtaagaaaat

SEQ ID NO: 1106974 - DNA, 15 bp, Homo sapiens
ttagaggtaagaaaa

SEQ ID NO: 1106975 - DNA, 15 bp, Homo sapiens
attagaggtaagaaa

SEQ ID NO: 1106976 - DNA, 15 bp, Homo sapiens
gattagaggtaagaa

SEQ ID NO: 1106977 - DNA, 15 bp, Homo sapiens
ggattagaggtaaga

SEQ ID NO: 1106978 - DNA, 15 bp, Homo sapiens
gggattagaggtaag

SEQ ID NO: 1106979 - DNA, 15 bp, Homo sapiens
tgggattagaggtaa

SEQ ID NO: 1106980 - DNA, 15 bp, Homo sapiens
atgggattagaggta

SEQ ID NO: 1106981 - DNA, 15 bp, Homo sapiens
aatgggattagaggt

SEQ ID NO: 1106982 - DNA, 15 bp, Homo sapiens
caatgggattagagg

SEQ ID NO: 1106983 - DNA, 15 bp, Homo sapiens
ccaatgggattagag

SEQ ID NO: 1106984 - DNA, 15 bp, Homo sapiens
tccaatgggattaga

SEQ ID NO: 1106985 - DNA, 15 bp, Homo sapiens
atccaatgggattag

SEQ ID NO: 1106986 - DNA, 15 bp, Homo sapiens
gatccaatgggatta

SEQ ID NO: 1106987 - DNA, 15 bp, Homo sapiens
agatccaatgggatt

SEQ ID NO: 1106988 - DNA, 15 bp, Homo sapiens
aagatccaatgggat

SEQ ID NO: 1106989 - DNA, 15 bp, Homo sapiens
aaagatccaatggga

SEQ ID NO: 1106990 - DNA, 15 bp, Homo sapiens
taaagatccaatggg

SEQ ID NO: 1106991 - DNA, 15 bp, Homo sapiens
ataaagatccaatgg

SEQ ID NO: 1106992 - DNA, 15 bp, Homo sapiens
tataaagatccaatg

SEQ ID NO: 1106993 - DNA, 15 bp, Homo sapiens
ttataaagatccaat

SEQ ID NO: 1106994 - DNA, 15 bp, Homo sapiens
attataaagatccaa

SEQ ID NO: 1106995 - DNA, 15 bp, Homo sapiens
cattataaagatcca

SEQ ID NO: 1106996 - DNA, 15 bp, Homo sapiens
tcattataaagatcc

SEQ ID NO: 1106997 - DNA, 15 bp, Homo sapiens
ttcattataaagatc

SEQ ID NO: 1106998 - DNA, 15 bp, Homo sapiens
cttcattataaagat

SEQ ID NO: 1106999 - DNA, 15 bp, Homo sapiens
tcttcattataaaga

SEQ ID NO: 1107000 - DNA, 15 bp, Homo sapiens
ttcttcattataaag

SEQ ID NO: 1107001 - DNA, 15 bp, Homo sapiens
cttcttcattataaa

SEQ ID NO: 1107002 - DNA, 15 bp, Homo sapiens
ccttcttcattataa

SEQ ID NO: 1107003 - DNA, 15 bp, Homo sapiens
tccttcttcattata

SEQ ID NO: 1107004 - DNA, 15 bp, Homo sapiens
ttccttcttcattat

SEQ ID NO: 1107005 - DNA, 15 bp, Homo sapiens
attccttcttcatta

SEQ ID NO: 1107006 - DNA, 15 bp, Homo sapiens
aattccttcttcatt

SEQ ID NO: 1107007 - DNA, 15 bp, Homo sapiens
gaattccttcttcat

SEQ ID NO: 1107008 - DNA, 15 bp, Homo sapiens
ggaattccttcttca

SEQ ID NO: 1107009 - DNA, 15 bp, Homo sapiens
gggaattccttcttc

SEQ ID NO: 1107010 - DNA, 15 bp, Homo sapiens
agggaattccttctt

SEQ ID NO: 1107011 - DNA, 15 bp, Homo sapiens
cagggaattccttct

SEQ ID NO: 1107012 - DNA, 15 bp, Homo sapiens
acagggaattccttc

SEQ ID NO: 1107013 - DNA, 15 bp, Homo sapiens
gacagggaattcctt

SEQ ID NO: 1107014 - DNA, 15 bp, Homo sapiens
tgacagggaattcct

SEQ ID NO: 1107015 - DNA, 15 bp, Homo sapiens
ttgacagggaattcc

SEQ ID NO: 1107016 - DNA, 15 bp, Homo sapiens
attgacagggaattc

SEQ ID NO: 1107017 - DNA, 15 bp, Homo sapiens
gattgacagggaatt

SEQ ID NO: 1107018 - DNA, 15 bp, Homo sapiens
agattgacagggaat

SEQ ID NO: 1107019 - DNA, 15 bp, Homo sapiens
cagattgacagggaa

SEQ ID NO: 1107020 - DNA, 15 bp, Homo sapiens
gcagattgacaggga

SEQ ID NO: 1107021 - DNA, 15 bp, Homo sapiens
tgcagattgacaggg

SEQ ID NO: 1107022 - DNA, 15 bp, Homo sapiens
atgcagattgacagg

SEQ ID NO: 1107023 - DNA, 15 bp, Homo sapiens
aatgcagattgacag

SEQ ID NO: 1107024 - DNA, 15 bp, Homo sapiens
caatgcagattgaca

SEQ ID NO: 1107025 - DNA, 15 bp, Homo sapiens
acaatgcagattgac

SEQ ID NO: 1107026 - DNA, 15 bp, Homo sapiens
tacaatgcagattga

SEQ ID NO: 1107027 - DNA, 15 bp, Homo sapiens
atacaatgcagattg

SEQ ID NO: 1107028 - DNA, 15 bp, Homo sapiens
aatacaatgcagatt

SEQ ID NO: 1107029 - DNA, 15 bp, Homo sapiens
aaatacaatgcagat

SEQ ID NO: 1107030 - DNA, 15 bp, Homo sapiens
aaaatacaatgcaga

SEQ ID NO: 1107031 - DNA, 15 bp, Homo sapiens
taaaatacaatgcag

SEQ ID NO: 1107032 - DNA, 15 bp, Homo sapiens
ataaaatacaatgca

SEQ ID NO: 1107033 - DNA, 15 bp, Homo sapiens
aataaaatacaatgc

SEQ ID NO: 1107034 - DNA, 15 bp, Homo sapiens
aaataaaatacaatg

SEQ ID NO: 1107035 - DNA, 15 bp, Homo sapiens
taaataaaatacaat

SEQ ID NO: 1107036 - DNA, 15 bp, Homo sapiens
ttaaataaaatacaa

SEQ ID NO: 1107037 - DNA, 15 bp, Homo sapiens
attaaataaaataca

SEQ ID NO: 1107038 - DNA, 15 bp, Homo sapiens
aattaaataaaatac

SEQ ID NO: 1107039 - DNA, 15 bp, Homo sapiens
taattaaataaaata

SEQ ID NO: 1107040 - DNA, 15 bp, Homo sapiens
ttaattaaataaaat

SEQ ID NO: 1107041 - DNA, 15 bp, Homo sapiens
attaattaaataaaa

SEQ ID NO: 1107042 - DNA, 15 bp, Homo sapiens
aaattaattaaataa

SEQ ID NO: 1107043 - DNA, 15 bp, Homo sapiens
taaattaattaaata

SEQ ID NO: 1107044 - DNA, 15 bp, Homo sapiens
ataaattaattaaat

SEQ ID NO: 1107045 - DNA, 15 bp, Homo sapiens
aataaattaattaaa

SEQ ID NO: 1107046 - DNA, 15 bp, Homo sapiens
aaataaattaattaa

SEQ ID NO: 1107047 - DNA, 15 bp, Homo sapiens
taaataaattaatta

SEQ ID NO: 1107048 - DNA, 15 bp, Homo sapiens
ataaataaattaatt

SEQ ID NO: 1107049 - DNA, 15 bp, Homo sapiens
aataaataaattaat

SEQ ID NO: 1107050 - DNA, 15 bp, Homo sapiens
caataaataaattaa

SEQ ID NO: 1107051 - DNA, 15 bp, Homo sapiens
ccaataaataaatta

SEQ ID NO: 1107052 - DNA, 15 bp, Homo sapiens
accaataaataaatt

SEQ ID NO: 1107053 - DNA, 15 bp, Homo sapiens
aaccaataaataaat

SEQ ID NO: 1107054 - DNA, 15 bp, Homo sapiens
aaaccaataaataaa

SEQ ID NO: 1107055 - DNA, 15 bp, Homo sapiens
aaaaccaataaataa

SEQ ID NO: 1107056 - DNA, 15 bp, Homo sapiens
caaaaccaataaata

SEQ ID NO: 1107057 - DNA, 15 bp, Homo sapiens
tcaaaaccaataaat

SEQ ID NO: 1107058 - DNA, 15 bp, Homo sapiens
ctcaaaaccaataaa

SEQ ID NO: 1107059 - DNA, 15 bp, Homo sapiens
tctcaaaaccaataa

SEQ ID NO: 1107060 - DNA, 15 bp, Homo sapiens
gtctcaaaaccaata

SEQ ID NO: 1107061 - DNA, 15 bp, Homo sapiens
tgtctcaaaaccaat

SEQ ID NO: 1107062 - DNA, 15 bp, Homo sapiens
ctgtctcaaaaccaa

SEQ ID NO: 1107063 - DNA, 15 bp, Homo sapiens
tctgtctcaaaacca

SEQ ID NO: 1107064 - DNA, 15 bp, Homo sapiens
ctctgtctcaaaacc

SEQ ID NO: 1107065 - DNA, 15 bp, Homo sapiens
actctgtctcaaaac

SEQ ID NO: 1107066 - DNA, 15 bp, Homo sapiens
tgccaccgcactcca

SEQ ID NO: 1107067 - DNA, 15 bp, Homo sapiens
atgccaccgcactcc

SEQ ID NO: 1107068 - DNA, 15 bp, Homo sapiens
catgccaccgcactc

SEQ ID NO: 1107069 - DNA, 15 bp, Homo sapiens
tcatgccaccgcact

SEQ ID NO: 1107070 - DNA, 15 bp, Homo sapiens
atcatgccaccgcac

SEQ ID NO: 1107071 - DNA, 15 bp, Homo sapiens
gatcatgccaccgca

SEQ ID NO: 1107072 - DNA, 15 bp, Homo sapiens
agatcatgccaccgc

SEQ ID NO: 1107073 - DNA, 15 bp, Homo sapiens
gagatcatgccaccg

SEQ ID NO: 1107074 - DNA, 15 bp, Homo sapiens
cgagatcatgccacc

SEQ ID NO: 1107075 - DNA, 15 bp, Homo sapiens
gcgagatcatgccac

SEQ ID NO: 1107076 - DNA, 15 bp, Homo sapiens
ggcgagatcatgcca

SEQ ID NO: 1107077 - DNA, 15 bp, Homo sapiens
aggcgagatcatgcc

SEQ ID NO: 1107078 - DNA, 15 bp, Homo sapiens
gaggcgagatcatgc

SEQ ID NO: 1107079 - DNA, 15 bp, Homo sapiens
tgaggcgagatcatg

SEQ ID NO: 1107080 - DNA, 15 bp, Homo sapiens
gtgaggcgagatcat

SEQ ID NO: 1107081 - DNA, 15 bp, Homo sapiens
agtgaggcgagatca

SEQ ID NO: 1107082 - DNA, 15 bp, Homo sapiens
cagtgaggcgagatc

SEQ ID NO: 1107083 - DNA, 15 bp, Homo sapiens
gttgcagtgaggcga

SEQ ID NO: 1107084 - DNA, 15 bp, Homo sapiens
ggttgcagtgaggcg

SEQ ID NO: 1107085 - DNA, 15 bp, Homo sapiens
aggttgcagtgaggc

SEQ ID NO: 1107086 - DNA, 15 bp, Homo sapiens
gaggttgcagtgagg

SEQ ID NO: 1107087 - DNA, 15 bp, Homo sapiens
accaggaggcggagg

SEQ ID NO: 1107088 - DNA, 15 bp, Homo sapiens
aaccaggaggcggag

SEQ ID NO: 1107089 - DNA, 15 bp, Homo sapiens
gaaccaggaggcgga

SEQ ID NO: 1107090 - DNA, 15 bp, Homo sapiens
tgaaccaggaggcgg

SEQ ID NO: 1107091 - DNA, 15 bp, Homo sapiens
ttgaaccaggaggcg

SEQ ID NO: 1107092 - DNA, 15 bp, Homo sapiens
cttgaaccaggaggc

SEQ ID NO: 1107093 - DNA, 15 bp, Homo sapiens
tgcttgaaccaggag

SEQ ID NO: 1107094 - DNA, 15 bp, Homo sapiens
ttgcttgaaccagga

SEQ ID NO: 1107095 - DNA, 15 bp, Homo sapiens
attgcttgaaccagg

SEQ ID NO: 1107096 - DNA, 15 bp, Homo sapiens
aattgcttgaaccag

SEQ ID NO: 1107097 - DNA, 15 bp, Homo sapiens
gaattgcttgaacca

SEQ ID NO: 1107098 - DNA, 15 bp, Homo sapiens
tagaattgcttgaac

SEQ ID NO: 1107099 - DNA, 15 bp, Homo sapiens
ctagaattgcttgaa

SEQ ID NO: 1107100 - DNA, 15 bp, Homo sapiens
actagaattgcttga

SEQ ID NO: 1107101 - DNA, 15 bp, Homo sapiens
cactagaattgcttg

SEQ ID NO: 1107102 - DNA, 15 bp, Homo sapiens
gcactagaattgctt

SEQ ID NO: 1107103 - DNA, 15 bp, Homo sapiens
ggcactagaattgct

SEQ ID NO: 1107104 - DNA, 15 bp, Homo sapiens
aggcactagaattgc

SEQ ID NO: 1107105 - DNA, 15 bp, Homo sapiens
gaggcactagaattg

SEQ ID NO: 1107106 - DNA, 15 bp, Homo sapiens
tgaggcactagaatt

SEQ ID NO: 1107107 - DNA, 15 bp, Homo sapiens
ctgaggcactagaat

SEQ ID NO: 1107108 - DNA, 15 bp, Homo sapiens
gctgaggcactagaa

SEQ ID NO: 1107109 - DNA, 15 bp, Homo sapiens
ggctgaggcactaga

SEQ ID NO: 1107110 - DNA, 15 bp, Homo sapiens
aggctgaggcactag

SEQ ID NO: 1107111 - DNA, 15 bp, Homo sapiens
gaggctgaggcacta

SEQ ID NO: 1107112 - DNA, 15 bp, Homo sapiens
agaggctgaggcact

SEQ ID NO: 1107113 - DNA, 15 bp, Homo sapiens
gagaggctgaggcac

SEQ ID NO: 1107114 - DNA, 15 bp, Homo sapiens
cttgagaggctgagg

SEQ ID NO: 1107115 - DNA, 15 bp, Homo sapiens
acttgagaggctgag

SEQ ID NO: 1107116 - DNA, 15 bp, Homo sapiens
tacttgagaggctga

SEQ ID NO: 1107117 - DNA, 15 bp, Homo sapiens
ctacttgagaggctg

SEQ ID NO: 1107118 - DNA, 15 bp, Homo sapiens
gctacttgagaggct

SEQ ID NO: 1107119 - DNA, 15 bp, Homo sapiens
agctacttgagaggc

SEQ ID NO: 1107120 - DNA, 15 bp, Homo sapiens
atcccagctacttga

SEQ ID NO: 1107121 - DNA, 15 bp, Homo sapiens
ccctataatcccagc

SEQ ID NO: 1107122 - DNA, 15 bp, Homo sapiens
cccctataatcccag

SEQ ID NO: 1107123 - DNA, 15 bp, Homo sapiens
acccctataatccca

SEQ ID NO: 1107124 - DNA, 15 bp, Homo sapiens
cacccctataatccc

SEQ ID NO: 1107125 - DNA, 15 bp, Homo sapiens
acacccctataatcc

SEQ ID NO: 1107126 - DNA, 15 bp, Homo sapiens
cacacccctataatc

SEQ ID NO: 1107127 - DNA, 15 bp, Homo sapiens
gcacacccctataat

SEQ ID NO: 1107128 - DNA, 15 bp, Homo sapiens
ggcacacccctataa

SEQ ID NO: 1107129 - DNA, 15 bp, Homo sapiens
tggcacacccctata

SEQ ID NO: 1107130 - DNA, 15 bp, Homo sapiens
gtggcacacccctat

SEQ ID NO: 1107131 - DNA, 15 bp, Homo sapiens
ggtggcacaccccta

SEQ ID NO: 1107132 - DNA, 15 bp, Homo sapiens
tggtggcacacccct

SEQ ID NO: 1107133 - DNA, 15 bp, Homo sapiens
gtggtggcacacccc

SEQ ID NO: 1107134 - DNA, 15 bp, Homo sapiens
tgtggtggcacaccc

SEQ ID NO: 1107135 - DNA, 15 bp, Homo sapiens
gtgtggtggcacacc

SEQ ID NO: 1107136 - DNA, 15 bp, Homo sapiens
taaaaaaattagcca

SEQ ID NO: 1107137 - DNA, 15 bp, Homo sapiens
ttaaaaaaattagcc

SEQ ID NO: 1107138 - DNA, 15 bp, Homo sapiens
tttaaaaaaattagc

SEQ ID NO: 1107139 - DNA, 15 bp, Homo sapiens
ttttaaaaaaattag

SEQ ID NO: 1107140 - DNA, 15 bp, Homo sapiens
attttttaaaaaaat

SEQ ID NO: 1107141 - DNA, 15 bp, Homo sapiens
aattttttaaaaaaa

SEQ ID NO: 1107142 - DNA, 15 bp, Homo sapiens
aaattttttaaaaaa

SEQ ID NO: 1107143 - DNA, 15 bp, Homo sapiens
taaattttttaaaaa

SEQ ID NO: 1107144 - DNA, 15 bp, Homo sapiens
gtaaattttttaaaa

SEQ ID NO: 1107145 - DNA, 15 bp, Homo sapiens
agtaaattttttaaa

SEQ ID NO: 1107146 - DNA, 15 bp, Homo sapiens
aagtaaattttttaa

SEQ ID NO: 1107147 - DNA, 15 bp, Homo sapiens
taagtaaatttttta

SEQ ID NO: 1107148 - DNA, 15 bp, Homo sapiens
ataagtaaatttttt

SEQ ID NO: 1107149 - DNA, 15 bp, Homo sapiens
aataagtaaattttt

SEQ ID NO: 1107150 - DNA, 15 bp, Homo sapiens
aaataagtaaatttt

SEQ ID NO: 1107151 - DNA, 15 bp, Homo sapiens
taaataagtaaattt

SEQ ID NO: 1107152 - DNA, 15 bp, Homo sapiens
ataaataagtaaatt

SEQ ID NO: 1107153 - DNA, 15 bp, Homo sapiens
caaaataaataagta

SEQ ID NO: 1107154 - DNA, 15 bp, Homo sapiens
tcaaaataaataagt

SEQ ID NO: 1107155 - DNA, 15 bp, Homo sapiens
ctcaaaataaataag

SEQ ID NO: 1107156 - DNA, 15 bp, Homo sapiens
cgtctcaaaataaat

SEQ ID NO: 1107157 - DNA, 15 bp, Homo sapiens
ccgtctcaaaataaa

SEQ ID NO: 1107158 - DNA, 15 bp, Homo sapiens
tccgtctcaaaataa

SEQ ID NO: 1107159 - DNA, 15 bp, Homo sapiens
ttccgtctcaaaata

SEQ ID NO: 1107160 - DNA, 15 bp, Homo sapiens
attccgtctcaaaat

SEQ ID NO: 1107161 - DNA, 15 bp, Homo sapiens
gattccgtctcaaaa

SEQ ID NO: 1107162 - DNA, 15 bp, Homo sapiens
agattccgtctcaaa

SEQ ID NO: 1107163 - DNA, 15 bp, Homo sapiens
aagattccgtctcaa

SEQ ID NO: 1107164 - DNA, 15 bp, Homo sapiens
caagattccgtctca

SEQ ID NO: 1107165 - DNA, 15 bp, Homo sapiens
gcaagattccgtctc

SEQ ID NO: 1107166 - DNA, 15 bp, Homo sapiens
agcaagattccgtct

SEQ ID NO: 1107167 - DNA, 15 bp, Homo sapiens
gagcaagattccgtc

SEQ ID NO: 1107168 - DNA, 15 bp, Homo sapiens
agagcaagattccgt

SEQ ID NO: 1107169 - DNA, 15 bp, Homo sapiens
cagagcaagattccg

SEQ ID NO: 1107170 - DNA, 15 bp, Homo sapiens
acagagcaagattcc

SEQ ID NO: 1107171 - DNA, 15 bp, Homo sapiens
gacagagcaagattc

SEQ ID NO: 1107172 - DNA, 15 bp, Homo sapiens
cgacagagcaagatt

SEQ ID NO: 1107173 - DNA, 15 bp, Homo sapiens
gcgacagagcaagat

SEQ ID NO: 1107174 - DNA, 15 bp, Homo sapiens
tctgggcgacagagc

SEQ ID NO: 1107175 - DNA, 15 bp, Homo sapiens
tagtctgggcgacag

SEQ ID NO: 1107176 - DNA, 15 bp, Homo sapiens
ctagtctgggcgaca

SEQ ID NO: 1107177 - DNA, 15 bp, Homo sapiens
tctagtctgggcgac

SEQ ID NO: 1107178 - DNA, 15 bp, Homo sapiens
ctctagtctgggcga

SEQ ID NO: 1107179 - DNA, 15 bp, Homo sapiens
actctagtctgggcg

SEQ ID NO: 1107180 - DNA, 15 bp, Homo sapiens
cactctagtctgggc

SEQ ID NO: 1107181 - DNA, 15 bp, Homo sapiens
gcactctagtctggg

SEQ ID NO: 1107182 - DNA, 15 bp, Homo sapiens
tgcactctagtctgg

SEQ ID NO: 1107183 - DNA, 15 bp, Homo sapiens
ctgcactctagtctg

SEQ ID NO: 1107184 - DNA, 15 bp, Homo sapiens
actgcactctagtct

SEQ ID NO: 1107185 - DNA, 15 bp, Homo sapiens
cactgcactctagtc

SEQ ID NO: 1107186 - DNA, 15 bp, Homo sapiens
ccactgcactctagt

SEQ ID NO: 1107187 - DNA, 15 bp, Homo sapiens
acgccactgcactct

SEQ ID NO: 1107188 - DNA, 15 bp, Homo sapiens
tacagtgagctgaga

SEQ ID NO: 1107189 - DNA, 15 bp, Homo sapiens
ttacagtgagctgag

SEQ ID NO: 1107190 - DNA, 15 bp, Homo sapiens
gttacagtgagctga

SEQ ID NO: 1107191 - DNA, 15 bp, Homo sapiens
ggttacagtgagctg

SEQ ID NO: 1107192 - DNA, 15 bp, Homo sapiens
aggttacagtgagct

SEQ ID NO: 1107193 - DNA, 15 bp, Homo sapiens
gaggttacagtgagc

SEQ ID NO: 1107194 - DNA, 15 bp, Homo sapiens
ggaggttacagtgag

SEQ ID NO: 1107195 - DNA, 15 bp, Homo sapiens
tggaggttacagtga

SEQ ID NO: 1107196 - DNA, 15 bp, Homo sapiens
atggaggttacagtg

SEQ ID NO: 1107197 - DNA, 15 bp, Homo sapiens
gatggaggttacagt

SEQ ID NO: 1107198 - DNA, 15 bp, Homo sapiens
agatggaggttacag

SEQ ID NO: 1107199 - DNA, 15 bp, Homo sapiens
gagatggaggttaca

SEQ ID NO: 1107200 - DNA, 15 bp, Homo sapiens
ggagatggaggttac

SEQ ID NO: 1107201 - DNA, 15 bp, Homo sapiens
aggagatggaggtta

SEQ ID NO: 1107202 - DNA, 15 bp, Homo sapiens
caggagatggaggtt

SEQ ID NO: 1107203 - DNA, 15 bp, Homo sapiens
ccaggagatggaggt

SEQ ID NO: 1107204 - DNA, 15 bp, Homo sapiens
cccaggagatggagg

SEQ ID NO: 1107205 - DNA, 15 bp, Homo sapiens
acccaggagatggag

SEQ ID NO: 1107206 - DNA, 15 bp, Homo sapiens
aacccaggagatgga

SEQ ID NO: 1107207 - DNA, 15 bp, Homo sapiens
gaacccaggagatgg

SEQ ID NO: 1107208 - DNA, 15 bp, Homo sapiens
tgaacccaggagatg

SEQ ID NO: 1107209 - DNA, 15 bp, Homo sapiens
ttgaacccaggagat

SEQ ID NO: 1107210 - DNA, 15 bp, Homo sapiens
gttgaacccaggaga

SEQ ID NO: 1107211 - DNA, 15 bp, Homo sapiens
agttgaacccaggag

SEQ ID NO: 1107212 - DNA, 15 bp, Homo sapiens
cagttgaacccagga

SEQ ID NO: 1107213 - DNA, 15 bp, Homo sapiens
tcagttgaacccagg

SEQ ID NO: 1107214 - DNA, 15 bp, Homo sapiens
atcagttgaacccag

SEQ ID NO: 1107215 - DNA, 15 bp, Homo sapiens
aatcagttgaaccca

SEQ ID NO: 1107216 - DNA, 15 bp, Homo sapiens
gaatcagttgaaccc

SEQ ID NO: 1107217 - DNA, 15 bp, Homo sapiens
agaatcagttgaacc

SEQ ID NO: 1107218 - DNA, 15 bp, Homo sapiens
gagaatcagttgaac

SEQ ID NO: 1107219 - DNA, 15 bp, Homo sapiens
agagaatcagttgaa

SEQ ID NO: 1107220 - DNA, 15 bp, Homo sapiens
gagagaatcagttga

SEQ ID NO: 1107221 - DNA, 15 bp, Homo sapiens
tgagagaatcagttg

SEQ ID NO: 1107222 - DNA, 15 bp, Homo sapiens
gtgagagaatcagtt

SEQ ID NO: 1107223 - DNA, 15 bp, Homo sapiens
ggtgagagaatcagt

SEQ ID NO: 1107224 - DNA, 15 bp, Homo sapiens
aggtgagagaatcag

SEQ ID NO: 1107225 - DNA, 15 bp, Homo sapiens
gaggtgagagaatca

SEQ ID NO: 1107226 - DNA, 15 bp, Homo sapiens
tgaggtgagagaatc

SEQ ID NO: 1107227 - DNA, 15 bp, Homo sapiens
ctgaggtgagagaat

SEQ ID NO: 1107228 - DNA, 15 bp, Homo sapiens
gctgaggtgagagaa

SEQ ID NO: 1107229 - DNA, 15 bp, Homo sapiens
agctgaggtgagaga

SEQ ID NO: 1107230 - DNA, 15 bp, Homo sapiens
aagctgaggtgagag

SEQ ID NO: 1107231 - DNA, 15 bp, Homo sapiens
gaagctgaggtgaga

SEQ ID NO: 1107232 - DNA, 15 bp, Homo sapiens
ggaagctgaggtgag

SEQ ID NO: 1107233 - DNA, 15 bp, Homo sapiens
gggaagctgaggtga

SEQ ID NO: 1107234 - DNA, 15 bp, Homo sapiens
cgggaagctgaggtg

SEQ ID NO: 1107235 - DNA, 15 bp, Homo sapiens
atggtggcgggcgcc

SEQ ID NO: 1107236 - DNA, 15 bp, Homo sapiens
catggtggcgggcgc

SEQ ID NO: 1107237 - DNA, 15 bp, Homo sapiens
gcatggtggcgggcg

SEQ ID NO: 1107238 - DNA, 15 bp, Homo sapiens
ggcatggtggcgggc

SEQ ID NO: 1107239 - DNA, 15 bp, Homo sapiens
gggcatggtggcggg

SEQ ID NO: 1107240 - DNA, 15 bp, Homo sapiens
cgggcatggtggcgg

SEQ ID NO: 1107241 - DNA, 15 bp, Homo sapiens
ccgggcatggtggcg

SEQ ID NO: 1107242 - DNA, 15 bp, Homo sapiens
atggtgaaacctcat

SEQ ID NO: 1107243 - DNA, 15 bp, Homo sapiens
catggtgaaacctca

SEQ ID NO: 1107244 - DNA, 15 bp, Homo sapiens
acatggtgaaacctc

SEQ ID NO: 1107245 - DNA, 15 bp, Homo sapiens
aacatggtgaaacct

SEQ ID NO: 1107246 - DNA, 15 bp, Homo sapiens
gcagcctggctaaca

SEQ ID NO: 1107247 - DNA, 15 bp, Homo sapiens
agcagcctggctaac

SEQ ID NO: 1107248 - DNA, 15 bp, Homo sapiens
tagcagcctggctaa

SEQ ID NO: 1107249 - DNA, 15 bp, Homo sapiens
atagcagcctggcta

SEQ ID NO: 1107250 - DNA, 15 bp, Homo sapiens
gatagcagcctggct

SEQ ID NO: 1107251 - DNA, 15 bp, Homo sapiens
cgatagcagcctggc

SEQ ID NO: 1107252 - DNA, 15 bp, Homo sapiens
tcgatagcagcctgg

SEQ ID NO: 1107253 - DNA, 15 bp, Homo sapiens
ttcgatagcagcctg

SEQ ID NO: 1107254 - DNA, 15 bp, Homo sapiens
gttcgatagcagcct

SEQ ID NO: 1107255 - DNA, 15 bp, Homo sapiens
agttcgatagcagcc

SEQ ID NO: 1107256 - DNA, 15 bp, Homo sapiens
gagttcgatagcagc

SEQ ID NO: 1107257 - DNA, 15 bp, Homo sapiens
ggagttcgatagcag

SEQ ID NO: 1107258 - DNA, 15 bp, Homo sapiens
aggagttcgatagca

SEQ ID NO: 1107259 - DNA, 15 bp, Homo sapiens
caggagttcgatagc

SEQ ID NO: 1107260 - DNA, 15 bp, Homo sapiens
tcaggagttcgatag

SEQ ID NO: 1107261 - DNA, 15 bp, Homo sapiens
gtcaggagttcgata

SEQ ID NO: 1107262 - DNA, 15 bp, Homo sapiens
ggtcaggagttcgat

SEQ ID NO: 1107263 - DNA, 15 bp, Homo sapiens
tttgaggtcaggagt

SEQ ID NO: 1107264 - DNA, 15 bp, Homo sapiens
atttgaggtcaggag

SEQ ID NO: 1107265 - DNA, 15 bp, Homo sapiens
catttgaggtcagga

SEQ ID NO: 1107266 - DNA, 15 bp, Homo sapiens
tcatttgaggtcagg

SEQ ID NO: 1107267 - DNA, 15 bp, Homo sapiens
atcatttgaggtcag

SEQ ID NO: 1107268 - DNA, 15 bp, Homo sapiens
gatcatttgaggtca

SEQ ID NO: 1107269 - DNA, 15 bp, Homo sapiens
agatcatttgaggtc

SEQ ID NO: 1107270 - DNA, 15 bp, Homo sapiens
cagatcatttgaggt

SEQ ID NO: 1107271 - DNA, 15 bp, Homo sapiens
ccagatcatttgagg

SEQ ID NO: 1107272 - DNA, 15 bp, Homo sapiens
gccagatcatttgag

SEQ ID NO: 1107273 - DNA, 15 bp, Homo sapiens
agccagatcatttga

SEQ ID NO: 1107274 - DNA, 15 bp, Homo sapiens
cagccagatcatttg

SEQ ID NO: 1107275 - DNA, 15 bp, Homo sapiens
gcagccagatcattt

SEQ ID NO: 1107276 - DNA, 15 bp, Homo sapiens
ggcagccagatcatt

SEQ ID NO: 1107277 - DNA, 15 bp, Homo sapiens
aggcagccagatcat

SEQ ID NO: 1107278 - DNA, 15 bp, Homo sapiens
gaggcagccagatca

SEQ ID NO: 1107279 - DNA, 15 bp, Homo sapiens
tgaggcagccagatc

SEQ ID NO: 1107280 - DNA, 15 bp, Homo sapiens
ctgaggcagccagat

SEQ ID NO: 1107281 - DNA, 15 bp, Homo sapiens
gctgaggcagccaga

SEQ ID NO: 1107282 - DNA, 15 bp, Homo sapiens
ggctgaggcagccag

SEQ ID NO: 1107283 - DNA, 15 bp, Homo sapiens
gggctgaggcagcca

SEQ ID NO: 1107284 - DNA, 15 bp, Homo sapiens
ggggctgaggcagcc

SEQ ID NO: 1107285 - DNA, 15 bp, Homo sapiens
gggggctgaggcagc

SEQ ID NO: 1107286 - DNA, 15 bp, Homo sapiens
ggggggctgaggcag

SEQ ID NO: 1107287 - DNA, 15 bp, Homo sapiens
aggggggctgaggca

SEQ ID NO: 1107288 - DNA, 15 bp, Homo sapiens
caggggggctgaggc

SEQ ID NO: 1107289 - DNA, 15 bp, Homo sapiens
gcaggggggctgagg

SEQ ID NO: 1107290 - DNA, 15 bp, Homo sapiens
tgcaggggggctgag

SEQ ID NO: 1107291 - DNA, 15 bp, Homo sapiens
atgcaggggggctga

SEQ ID NO: 1107292 - DNA, 15 bp, Homo sapiens
aatgcaggggggctg

SEQ ID NO: 1107293 - DNA, 15 bp, Homo sapiens
caatgcaggggggct

SEQ ID NO: 1107294 - DNA, 15 bp, Homo sapiens
gcaatgcaggggggc

SEQ ID NO: 1107295 - DNA, 15 bp, Homo sapiens
tgcaatgcagggggg

SEQ ID NO: 1107296 - DNA, 15 bp, Homo sapiens
atgcaatgcaggggg

SEQ ID NO: 1107297 - DNA, 15 bp, Homo sapiens
aatgcaatgcagggg

SEQ ID NO: 1107298 - DNA, 15 bp, Homo sapiens
aaatgcaatgcaggg

SEQ ID NO: 1107299 - DNA, 15 bp, Homo sapiens
aaaatgcaatgcagg

SEQ ID NO: 1107300 - DNA, 15 bp, Homo sapiens
taaaatgcaatgcag

SEQ ID NO: 1107301 - DNA, 15 bp, Homo sapiens
ttaaaatgcaatgca

SEQ ID NO: 1107302 - DNA, 15 bp, Homo sapiens
tttaaaatgcaatgc

SEQ ID NO: 1107303 - DNA, 15 bp, Homo sapiens
atttaaaatgcaatg

SEQ ID NO: 1107304 - DNA, 15 bp, Homo sapiens
gatttaaaatgcaat

SEQ ID NO: 1107305 - DNA, 15 bp, Homo sapiens
agatttaaaatgcaa

SEQ ID NO: 1107306 - DNA, 15 bp, Homo sapiens
cagatttaaaatgca

SEQ ID NO: 1107307 - DNA, 15 bp, Homo sapiens
tcagatttaaaatgc

SEQ ID NO: 1107308 - DNA, 15 bp, Homo sapiens
ctcagatttaaaatg

SEQ ID NO: 1107309 - DNA, 15 bp, Homo sapiens
tctcagatttaaaat

SEQ ID NO: 1107310 - DNA, 15 bp, Homo sapiens
ctctcagatttaaaa

SEQ ID NO: 1107311 - DNA, 15 bp, Homo sapiens
tctctcagatttaaa

SEQ ID NO: 1107312 - DNA, 15 bp, Homo sapiens
gtctctcagatttaa

SEQ ID NO: 1107313 - DNA, 15 bp, Homo sapiens
tgtctctcagattta

SEQ ID NO: 1107314 - DNA, 15 bp, Homo sapiens
ctgtctctcagattt

SEQ ID NO: 1107315 - DNA, 15 bp, Homo sapiens
tctgtctctcagatt

SEQ ID NO: 1107316 - DNA, 15 bp, Homo sapiens
ctctgtctctcagat

SEQ ID NO: 1107317 - DNA, 15 bp, Homo sapiens
cctctgtctctcaga

SEQ ID NO: 1107318 - DNA, 15 bp, Homo sapiens
gcctctgtctctcag

SEQ ID NO: 1107319 - DNA, 15 bp, Homo sapiens
agcctctgtctctca

SEQ ID NO: 1107320 - DNA, 15 bp, Homo sapiens
cagcctctgtctctc

SEQ ID NO: 1107321 - DNA, 15 bp, Homo sapiens
tcagcctctgtctct

SEQ ID NO: 1107322 - DNA, 15 bp, Homo sapiens
ctcagcctctgtctc

SEQ ID NO: 1107323 - DNA, 15 bp, Homo sapiens
tctcagcctctgtct

SEQ ID NO: 1107324 - DNA, 15 bp, Homo sapiens
ctctcagcctctgtc

SEQ ID NO: 1107325 - DNA, 15 bp, Homo sapiens
actctcagcctctgt

SEQ ID NO: 1107326 - DNA, 15 bp, Homo sapiens
cactctcagcctctg

SEQ ID NO: 1107327 - DNA, 15 bp, Homo sapiens
ccactctcagcctct

SEQ ID NO: 1107328 - DNA, 15 bp, Homo sapiens
gccactctcagcctc

SEQ ID NO: 1107329 - DNA, 15 bp, Homo sapiens
ggccactctcagcct

SEQ ID NO: 1107330 - DNA, 15 bp, Homo sapiens
aggccactctcagcc

SEQ ID NO: 1107331 - DNA, 15 bp, Homo sapiens
caggccactctcagc

SEQ ID NO: 1107332 - DNA, 15 bp, Homo sapiens
acaggccactctcag

SEQ ID NO: 1107333 - DNA, 15 bp, Homo sapiens
cacaggccactctca

SEQ ID NO: 1107334 - DNA, 15 bp, Homo sapiens
acacaggccactctc

SEQ ID NO: 1107335 - DNA, 15 bp, Homo sapiens
gacacaggccactct

SEQ ID NO: 1107336 - DNA, 15 bp, Homo sapiens
agacacaggccactc

SEQ ID NO: 1107337 - DNA, 15 bp, Homo sapiens
tagacacaggccact

SEQ ID NO: 1107338 - DNA, 15 bp, Homo sapiens
ctagacacaggccac

SEQ ID NO: 1107339 - DNA, 15 bp, Homo sapiens
gctagacacaggcca

SEQ ID NO: 1107340 - DNA, 15 bp, Homo sapiens
tgctagacacaggcc

SEQ ID NO: 1107341 - DNA, 15 bp, Homo sapiens
gtgctagacacaggc

SEQ ID NO: 1107342 - DNA, 15 bp, Homo sapiens
ggtgctagacacagg

SEQ ID NO: 1107343 - DNA, 15 bp, Homo sapiens
tggtgctagacacag

SEQ ID NO: 1107344 - DNA, 15 bp, Homo sapiens
ctggtgctagacaca

SEQ ID NO: 1107345 - DNA, 15 bp, Homo sapiens
cctggtgctagacac

SEQ ID NO: 1107346 - DNA, 15 bp, Homo sapiens
tcctggtgctagaca

SEQ ID NO: 1107347 - DNA, 15 bp, Homo sapiens
gtcctggtgctagac

SEQ ID NO: 1107348 - DNA, 15 bp, Homo sapiens
tgtcctggtgctaga

SEQ ID NO: 1107349 - DNA, 15 bp, Homo sapiens
ctgtcctggtgctag

SEQ ID NO: 1107350 - DNA, 15 bp, Homo sapiens
cctgtcctggtgcta

SEQ ID NO: 1107351 - DNA, 15 bp, Homo sapiens
gcctgtcctggtgct

SEQ ID NO: 1107352 - DNA, 15 bp, Homo sapiens
agcctgtcctggtgc

SEQ ID NO: 1107353 - DNA, 15 bp, Homo sapiens
tagcctgtcctggtg

SEQ ID NO: 1107354 - DNA, 15 bp, Homo sapiens
gtagcctgtcctggt

SEQ ID NO: 1107355 - DNA, 15 bp, Homo sapiens
tgtagcctgtcctgg

SEQ ID NO: 1107356 - DNA, 15 bp, Homo sapiens
gtgtagcctgtcctg

SEQ ID NO: 1107357 - DNA, 15 bp, Homo sapiens
tgtgtagcctgtcct

SEQ ID NO: 1107358 - DNA, 15 bp, Homo sapiens
ctgtgtagcctgtcc

SEQ ID NO: 1107359 - DNA, 15 bp, Homo sapiens
actgtgtagcctgtc

SEQ ID NO: 1107360 - DNA, 15 bp, Homo sapiens
aactgtgtagcctgt

SEQ ID NO: 1107361 - DNA, 15 bp, Homo sapiens
aaactgtgtagcctg

SEQ ID NO: 1107362 - DNA, 15 bp, Homo sapiens
caaactgtgtagcct

SEQ ID NO: 1107363 - DNA, 15 bp, Homo sapiens
ccaaactgtgtagcc

SEQ ID NO: 1107364 - DNA, 15 bp, Homo sapiens
tccaaactgtgtagc

SEQ ID NO: 1107365 - DNA, 15 bp, Homo sapiens
ctccaaactgtgtag

SEQ ID NO: 1107366 - DNA, 15 bp, Homo sapiens
cctccaaactgtgta

SEQ ID NO: 1107367 - DNA, 15 bp, Homo sapiens
acctccaaactgtgt

SEQ ID NO: 1107368 - DNA, 15 bp, Homo sapiens
gacctccaaactgtg

SEQ ID NO: 1107369 - DNA, 15 bp, Homo sapiens
ggacctccaaactgt

SEQ ID NO: 1107370 - DNA, 15 bp, Homo sapiens
tggacctccaaactg

SEQ ID NO: 1107371 - DNA, 15 bp, Homo sapiens
ctggacctccaaact

SEQ ID NO: 1107372 - DNA, 15 bp, Homo sapiens
actggacctccaaac

SEQ ID NO: 1107373 - DNA, 15 bp, Homo sapiens
cactggacctccaaa

SEQ ID NO: 1107374 - DNA, 15 bp, Homo sapiens
gcactggacctccaa

SEQ ID NO: 1107375 - DNA, 15 bp, Homo sapiens
tgcactggacctcca

SEQ ID NO: 1107376 - DNA, 15 bp, Homo sapiens
ttgcactggacctcc

SEQ ID NO: 1107377 - DNA, 15 bp, Homo sapiens
tttgcactggacctc

SEQ ID NO: 1107378 - DNA, 15 bp, Homo sapiens
atttgcactggacct

SEQ ID NO: 1107379 - DNA, 15 bp, Homo sapiens
catttgcactggacc

SEQ ID NO: 1107380 - DNA, 15 bp, Homo sapiens
tcatttgcactggac

SEQ ID NO: 1107381 - DNA, 15 bp, Homo sapiens
ttcatttgcactgga

SEQ ID NO: 1107382 - DNA, 15 bp, Homo sapiens
tttcatttgcactgg

SEQ ID NO: 1107383 - DNA, 15 bp, Homo sapiens
ttttcatttgcactg

SEQ ID NO: 1107384 - DNA, 15 bp, Homo sapiens
attttcatttgcact

SEQ ID NO: 1107385 - DNA, 15 bp, Homo sapiens
cattttcatttgcac

SEQ ID NO: 1107386 - DNA, 15 bp, Homo sapiens
acattttcatttgca

SEQ ID NO: 1107387 - DNA, 15 bp, Homo sapiens
ccacattttcatttg

SEQ ID NO: 1107388 - DNA, 15 bp, Homo sapiens
cccacattttcattt

SEQ ID NO: 1107389 - DNA, 15 bp, Homo sapiens
acccacattttcatt

SEQ ID NO: 1107390 - DNA, 15 bp, Homo sapiens
gacccacattttcat

SEQ ID NO: 1107391 - DNA, 15 bp, Homo sapiens
agacccacattttca

SEQ ID NO: 1107392 - DNA, 15 bp, Homo sapiens
gagacccacattttc

SEQ ID NO: 1107393 - DNA, 15 bp, Homo sapiens
ggagacccacatttt

SEQ ID NO: 1107394 - DNA, 15 bp, Homo sapiens
aggagacccacattt

SEQ ID NO: 1107395 - DNA, 15 bp, Homo sapiens
aaggagacccacatt

SEQ ID NO: 1107396 - DNA, 15 bp, Homo sapiens
caaggagacccacat

SEQ ID NO: 1107397 - DNA, 15 bp, Homo sapiens
acaaggagacccaca

SEQ ID NO: 1107398 - DNA, 15 bp, Homo sapiens
aacaaggagacccac

SEQ ID NO: 1107399 - DNA, 15 bp, Homo sapiens
gaacaaggagaccca

SEQ ID NO: 1107400 - DNA, 15 bp, Homo sapiens
tgaacaaggagaccc

SEQ ID NO: 1107401 - DNA, 15 bp, Homo sapiens
ttgaacaaggagacc

SEQ ID NO: 1107402 - DNA, 15 bp, Homo sapiens
tttgaacaaggagac

SEQ ID NO: 1107403 - DNA, 15 bp, Homo sapiens
ttttgaacaaggaga

SEQ ID NO: 1107404 - DNA, 15 bp, Homo sapiens
cttttgaacaaggag

SEQ ID NO: 1107405 - DNA, 15 bp, Homo sapiens
acttttgaacaagga

SEQ ID NO: 1107406 - DNA, 15 bp, Homo sapiens
tacttttgaacaagg

SEQ ID NO: 1107407 - DNA, 15 bp, Homo sapiens
atacttttgaacaag

SEQ ID NO: 1107408 - DNA, 15 bp, Homo sapiens
aatacttttgaacaa

SEQ ID NO: 1107409 - DNA, 15 bp, Homo sapiens
taatacttttgaaca

SEQ ID NO: 1107410 - DNA, 15 bp, Homo sapiens
ctaatacttttgaac

SEQ ID NO: 1107411 - DNA, 15 bp, Homo sapiens
cctaatacttttgaa

SEQ ID NO: 1107412 - DNA, 15 bp, Homo sapiens
tcctaatacttttga

SEQ ID NO: 1107413 - DNA, 15 bp, Homo sapiens
gtcctaatacttttg

SEQ ID NO: 1107414 - DNA, 15 bp, Homo sapiens
agtcctaatactttt

SEQ ID NO: 1107415 - DNA, 15 bp, Homo sapiens
gagtcctaatacttt

SEQ ID NO: 1107416 - DNA, 15 bp, Homo sapiens
agagtcctaatactt

SEQ ID NO: 1107417 - DNA, 15 bp, Homo sapiens
cagagtcctaatact

SEQ ID NO: 1107418 - DNA, 15 bp, Homo sapiens
ccagagtcctaatac

SEQ ID NO: 1107419 - DNA, 15 bp, Homo sapiens
gccagagtcctaata

SEQ ID NO: 1107420 - DNA, 15 bp, Homo sapiens
ggccagagtcctaat

SEQ ID NO: 1107421 - DNA, 15 bp, Homo sapiens
tggccagagtcctaa

SEQ ID NO: 1107422 - DNA, 15 bp, Homo sapiens
ctggccagagtccta

SEQ ID NO: 1107423 - DNA, 15 bp, Homo sapiens
cctggccagagtcct

SEQ ID NO: 1107424 - DNA, 15 bp, Homo sapiens
acctggccagagtcc

SEQ ID NO: 1107425 - DNA, 15 bp, Homo sapiens
cacctggccagagtc

SEQ ID NO: 1107426 - DNA, 15 bp, Homo sapiens
gcacctggccagagt

SEQ ID NO: 1107427 - DNA, 15 bp, Homo sapiens
cgcacctggccagag

SEQ ID NO: 1107428 - DNA, 15 bp, Homo sapiens
tcgcacctggccaga

SEQ ID NO: 1107429 - DNA, 15 bp, Homo sapiens
atcgcacctggccag

SEQ ID NO: 1107430 - DNA, 15 bp, Homo sapiens
catcgcacctggcca

SEQ ID NO: 1107431 - DNA, 15 bp, Homo sapiens
ccatcgcacctggcc

SEQ ID NO: 1107432 - DNA, 15 bp, Homo sapiens
gccatcgcacctggc

SEQ ID NO: 1107433 - DNA, 15 bp, Homo sapiens
agattacaggcgtga

SEQ ID NO: 1107434 - DNA, 15 bp, Homo sapiens
gagattacaggcgtg

SEQ ID NO: 1107435 - DNA, 15 bp, Homo sapiens
tgagattacaggcgt

SEQ ID NO: 1107436 - DNA, 15 bp, Homo sapiens
tccgcctcagcctcc

SEQ ID NO: 1107437 - DNA, 15 bp, Homo sapiens
atccgcctcagcctc

SEQ ID NO: 1107438 - DNA, 15 bp, Homo sapiens
catccgcctcagcct

SEQ ID NO: 1107439 - DNA, 15 bp, Homo sapiens
ccatccgcctcagcc

SEQ ID NO: 1107440 - DNA, 15 bp, Homo sapiens
tccatccgcctcagc

SEQ ID NO: 1107441 - DNA, 15 bp, Homo sapiens
atccatccgcctcag

SEQ ID NO: 1107442 - DNA, 15 bp, Homo sapiens
gatccatccgcctca

SEQ ID NO: 1107443 - DNA, 15 bp, Homo sapiens
tgatccatccgcctc

SEQ ID NO: 1107444 - DNA, 15 bp, Homo sapiens
gtgatccatccgcct

SEQ ID NO: 1107445 - DNA, 15 bp, Homo sapiens
ggtgatccatccgcc

SEQ ID NO: 1107446 - DNA, 15 bp, Homo sapiens
aggtgatccatccgc

SEQ ID NO: 1107447 - DNA, 15 bp, Homo sapiens
caggtgatccatccg

SEQ ID NO: 1107448 - DNA, 15 bp, Homo sapiens
tcaggtgatccatcc

SEQ ID NO: 1107449 - DNA, 15 bp, Homo sapiens
tctcaggtgatccat

SEQ ID NO: 1107450 - DNA, 15 bp, Homo sapiens
ccacattggccaggc

SEQ ID NO: 1107451 - DNA, 15 bp, Homo sapiens
accacattggccagg

SEQ ID NO: 1107452 - DNA, 15 bp, Homo sapiens
caccacattggccag

SEQ ID NO: 1107453 - DNA, 15 bp, Homo sapiens
tcaccacattggcca

SEQ ID NO: 1107454 - DNA, 15 bp, Homo sapiens
ttcaccacattggcc

SEQ ID NO: 1107455 - DNA, 15 bp, Homo sapiens
tttcaccacattggc

SEQ ID NO: 1107456 - DNA, 15 bp, Homo sapiens
ctttcaccacattgg

SEQ ID NO: 1107457 - DNA, 15 bp, Homo sapiens
gctttcaccacattg

SEQ ID NO: 1107458 - DNA, 15 bp, Homo sapiens
ggctttcaccacatt

SEQ ID NO: 1107459 - DNA, 15 bp, Homo sapiens
gggctttcaccacat

SEQ ID NO: 1107460 - DNA, 15 bp, Homo sapiens
cgggctttcaccaca

SEQ ID NO: 1107461 - DNA, 15 bp, Homo sapiens
acgggctttcaccac

SEQ ID NO: 1107462 - DNA, 15 bp, Homo sapiens
gcttctcctgcctca

SEQ ID NO: 1107463 - DNA, 15 bp, Homo sapiens
tgcttctcctgcctc

SEQ ID NO: 1107464 - DNA, 15 bp, Homo sapiens
gtgcttctcctgcct

SEQ ID NO: 1107465 - DNA, 15 bp, Homo sapiens
agtgcttctcctgcc

SEQ ID NO: 1107466 - DNA, 15 bp, Homo sapiens
aagtgcttctcctgc

SEQ ID NO: 1107467 - DNA, 15 bp, Homo sapiens
caagtgcttctcctg

SEQ ID NO: 1107468 - DNA, 15 bp, Homo sapiens
tcaagtgcttctcct

SEQ ID NO: 1107469 - DNA, 15 bp, Homo sapiens
ttcaagtgcttctcc

SEQ ID NO: 1107470 - DNA, 15 bp, Homo sapiens
gttcaagtgcttctc

SEQ ID NO: 1107471 - DNA, 15 bp, Homo sapiens
ggttcaagtgcttct

SEQ ID NO: 1107472 - DNA, 15 bp, Homo sapiens
gggttcaagtgcttc

SEQ ID NO: 1107473 - DNA, 15 bp, Homo sapiens
tgggttcaagtgctt

SEQ ID NO: 1107474 - DNA, 15 bp, Homo sapiens
ctgggttcaagtgct

SEQ ID NO: 1107475 - DNA, 15 bp, Homo sapiens
cctgggttcaagtgc

SEQ ID NO: 1107476 - DNA, 15 bp, Homo sapiens
ttcactgcaacctcc

SEQ ID NO: 1107477 - DNA, 15 bp, Homo sapiens
atgtcacccaggctg

SEQ ID NO: 1107478 - DNA, 15 bp, Homo sapiens
tatgtcacccaggct

SEQ ID NO: 1107479 - DNA, 15 bp, Homo sapiens
atatgtcacccaggc

SEQ ID NO: 1107480 - DNA, 15 bp, Homo sapiens
tatatgtcacccagg

SEQ ID NO: 1107481 - DNA, 15 bp, Homo sapiens
ttatatgtcacccag

SEQ ID NO: 1107482 - DNA, 15 bp, Homo sapiens
cttatatgtcaccca

SEQ ID NO: 1107483 - DNA, 15 bp, Homo sapiens
ccttatatgtcaccc

SEQ ID NO: 1107484 - DNA, 15 bp, Homo sapiens
accttatatgtcacc

SEQ ID NO: 1107485 - DNA, 15 bp, Homo sapiens
gaccttatatgtcac

SEQ ID NO: 1107486 - DNA, 15 bp, Homo sapiens
ggaccttatatgtca

SEQ ID NO: 1107487 - DNA, 15 bp, Homo sapiens
tggaccttatatgtc

SEQ ID NO: 1107488 - DNA, 15 bp, Homo sapiens
ctggaccttatatgt

SEQ ID NO: 1107489 - DNA, 15 bp, Homo sapiens
gctggaccttatatg

SEQ ID NO: 1107490 - DNA, 15 bp, Homo sapiens
ggctggaccttatat

SEQ ID NO: 1107491 - DNA, 15 bp, Homo sapiens
gggctggaccttata

SEQ ID NO: 1107492 - DNA, 15 bp, Homo sapiens
agggctggaccttat

SEQ ID NO: 1107493 - DNA, 15 bp, Homo sapiens
tagggctggacctta

SEQ ID NO: 1107494 - DNA, 15 bp, Homo sapiens
gtagggctggacctt

SEQ ID NO: 1107495 - DNA, 15 bp, Homo sapiens
cgtagggctggacct

SEQ ID NO: 1107496 - DNA, 15 bp, Homo sapiens
ccgtagggctggacc

SEQ ID NO: 1107497 - DNA, 15 bp, Homo sapiens
cccgtagggctggac

SEQ ID NO: 1107498 - DNA, 15 bp, Homo sapiens
ccccgtagggctgga

SEQ ID NO: 1107499 - DNA, 15 bp, Homo sapiens
gccccgtagggctgg

SEQ ID NO: 1107500 - DNA, 15 bp, Homo sapiens
agccccgtagggctg

SEQ ID NO: 1107501 - DNA, 15 bp, Homo sapiens
aagccccgtagggct

SEQ ID NO: 1107502 - DNA, 15 bp, Homo sapiens
taagccccgtagggc

SEQ ID NO: 1107503 - DNA, 15 bp, Homo sapiens
ctaagccccgtaggg

SEQ ID NO: 1107504 - DNA, 15 bp, Homo sapiens
gctaagccccgtagg

SEQ ID NO: 1107505 - DNA, 15 bp, Homo sapiens
tgctaagccccgtag

SEQ ID NO: 1107506 - DNA, 15 bp, Homo sapiens
ctgctaagccccgta

SEQ ID NO: 1107507 - DNA, 15 bp, Homo sapiens
cctgctaagccccgt

SEQ ID NO: 1107508 - DNA, 15 bp, Homo sapiens
acctgctaagccccg

SEQ ID NO: 1107509 - DNA, 15 bp, Homo sapiens
cacctgctaagcccc

SEQ ID NO: 1107510 - DNA, 15 bp, Homo sapiens
acacctgctaagccc

SEQ ID NO: 1107511 - DNA, 15 bp, Homo sapiens
aacacctgctaagcc

SEQ ID NO: 1107512 - DNA, 15 bp, Homo sapiens
gaacacctgctaagc

SEQ ID NO: 1107513 - DNA, 15 bp, Homo sapiens
agaacacctgctaag

SEQ ID NO: 1107514 - DNA, 15 bp, Homo sapiens
gagaacacctgctaa

SEQ ID NO: 1107515 - DNA, 15 bp, Homo sapiens
ggagaacacctgcta

SEQ ID NO: 1107516 - DNA, 15 bp, Homo sapiens
gggagaacacctgct

SEQ ID NO: 1107517 - DNA, 15 bp, Homo sapiens
ggggagaacacctgc

SEQ ID NO: 1107518 - DNA, 15 bp, Homo sapiens
cggggagaacacctg

SEQ ID NO: 1107519 - DNA, 15 bp, Homo sapiens
acggggagaacacct

SEQ ID NO: 1107520 - DNA, 15 bp, Homo sapiens
cacggggagaacacc

SEQ ID NO: 1107521 - DNA, 15 bp, Homo sapiens
acacggggagaacac

SEQ ID NO: 1107522 - DNA, 15 bp, Homo sapiens
cacacggggagaaca

SEQ ID NO: 1107523 - DNA, 15 bp, Homo sapiens
gcacacggggagaac

SEQ ID NO: 1107524 - DNA, 15 bp, Homo sapiens
cgcacacggggagaa

SEQ ID NO: 1107525 - DNA, 15 bp, Homo sapiens
ccgcacacggggaga

SEQ ID NO: 1107526 - DNA, 15 bp, Homo sapiens
tccgcacacggggag

SEQ ID NO: 1107527 - DNA, 15 bp, Homo sapiens
ctccgcacacgggga

SEQ ID NO: 1107528 - DNA, 15 bp, Homo sapiens
tctccgcacacgggg

SEQ ID NO: 1107529 - DNA, 15 bp, Homo sapiens
atctccgcacacggg

SEQ ID NO: 1107530 - DNA, 15 bp, Homo sapiens
catctccgcacacgg

SEQ ID NO: 1107531 - DNA, 15 bp, Homo sapiens
tcatctccgcacacg

SEQ ID NO: 1107532 - DNA, 15 bp, Homo sapiens
ctcatctccgcacac

SEQ ID NO: 1107533 - DNA, 15 bp, Homo sapiens
tctcatctccgcaca

SEQ ID NO: 1107534 - DNA, 15 bp, Homo sapiens
ctctcatctccgcac

SEQ ID NO: 1107535 - DNA, 15 bp, Homo sapiens
tctctcatctccgca

SEQ ID NO: 1107536 - DNA, 15 bp, Homo sapiens
atctctcatctccgc

SEQ ID NO: 1107537 - DNA, 15 bp, Homo sapiens
gatctctcatctccg

SEQ ID NO: 1107538 - DNA, 15 bp, Homo sapiens
tgatctctcatctcc

SEQ ID NO: 1107539 - DNA, 15 bp, Homo sapiens
atgatctctcatctc

SEQ ID NO: 1107540 - DNA, 15 bp, Homo sapiens
tatgatctctcatct

SEQ ID NO: 1107541 - DNA, 15 bp, Homo sapiens
ttatgatctctcatc

SEQ ID NO: 1107542 - DNA, 15 bp, Homo sapiens
cttatgatctctcat

SEQ ID NO: 1107543 - DNA, 15 bp, Homo sapiens
tcttatgatctctca

SEQ ID NO: 1107544 - DNA, 15 bp, Homo sapiens
ttcttatgatctctc

SEQ ID NO: 1107545 - DNA, 15 bp, Homo sapiens
tttcttatgatctct

SEQ ID NO: 1107546 - DNA, 15 bp, Homo sapiens
atttcttatgatctc

SEQ ID NO: 1107547 - DNA, 15 bp, Homo sapiens
tatttcttatgatct

SEQ ID NO: 1107548 - DNA, 15 bp, Homo sapiens
ttatttcttatgatc

SEQ ID NO: 1107549 - DNA, 15 bp, Homo sapiens
tttatttcttatgat

SEQ ID NO: 1107550 - DNA, 15 bp, Homo sapiens
ctttatttcttatga

SEQ ID NO: 1107551 - DNA, 15 bp, Homo sapiens
tctttatttcttatg

SEQ ID NO: 1107552 - DNA, 15 bp, Homo sapiens
gtctttatttcttat

SEQ ID NO: 1107553 - DNA, 15 bp, Homo sapiens
tgtctttatttctta

SEQ ID NO: 1107554 - DNA, 15 bp, Homo sapiens
gtgtctttatttctt

SEQ ID NO: 1107555 - DNA, 15 bp, Homo sapiens
tgtgtctttatttct

SEQ ID NO: 1107556 - DNA, 15 bp, Homo sapiens
ttgtgtctttatttc

SEQ ID NO: 1107557 - DNA, 15 bp, Homo sapiens
cttgtgtctttattt

SEQ ID NO: 1107558 - DNA, 15 bp, Homo sapiens
tcttgtgtctttatt

SEQ ID NO: 1107559 - DNA, 15 bp, Homo sapiens
gtcttgtgtctttat

SEQ ID NO: 1107560 - DNA, 15 bp, Homo sapiens
tgtcttgtgtcttta

SEQ ID NO: 1107561 - DNA, 15 bp, Homo sapiens
ttgtcttgtgtcttt

SEQ ID NO: 1107562 - DNA, 15 bp, Homo sapiens
tttgtcttgtgtctt

SEQ ID NO: 1107563 - DNA, 15 bp, Homo sapiens
ctttgtcttgtgtct

SEQ ID NO: 1107564 - DNA, 15 bp, Homo sapiens
tctttgtcttgtgtc

SEQ ID NO: 1107565 - DNA, 15 bp, Homo sapiens
ctctttgtcttgtgt

SEQ ID NO: 1107566 - DNA, 15 bp, Homo sapiens
tctctttgtcttgtg

SEQ ID NO: 1107567 - DNA, 15 bp, Homo sapiens
atctctttgtcttgt

SEQ ID NO: 1107568 - DNA, 15 bp, Homo sapiens
tatctctttgtcttg

SEQ ID NO: 1107569 - DNA, 15 bp, Homo sapiens
ttatctctttgtctt

SEQ ID NO: 1107570 - DNA, 15 bp, Homo sapiens
tttatctctttgtct

SEQ ID NO: 1107571 - DNA, 15 bp, Homo sapiens
ctttatctctttgtc

SEQ ID NO: 1107572 - DNA, 15 bp, Homo sapiens
tctttatctctttgt

SEQ ID NO: 1107573 - DNA, 15 bp, Homo sapiens
ctctttatctctttg

SEQ ID NO: 1107574 - DNA, 15 bp, Homo sapiens
tctctttatctcttt

SEQ ID NO: 1107575 - DNA, 15 bp, Homo sapiens
ttctctttatctctt

SEQ ID NO: 1107576 - DNA, 15 bp, Homo sapiens
tttctctttatctct

SEQ ID NO: 1107577 - DNA, 15 bp, Homo sapiens
ttttctctttatctc

SEQ ID NO: 1107578 - DNA, 15 bp, Homo sapiens
gttttctctttatct

SEQ ID NO: 1107579 - DNA, 15 bp, Homo sapiens
tgttttctctttatc

SEQ ID NO: 1107580 - DNA, 15 bp, Homo sapiens
ctgttttctctttat

SEQ ID NO: 1107581 - DNA, 15 bp, Homo sapiens
gctgttttctcttta

SEQ ID NO: 1107582 - DNA, 15 bp, Homo sapiens
agctgttttctcttt

SEQ ID NO: 1107583 - DNA, 15 bp, Homo sapiens
cagctgttttctctt

SEQ ID NO: 1107584 - DNA, 15 bp, Homo sapiens
ccagctgttttctct

SEQ ID NO: 1107585 - DNA, 15 bp, Homo sapiens
tccagctgttttctc

SEQ ID NO: 1107586 - DNA, 15 bp, Homo sapiens
gtccagctgttttct

SEQ ID NO: 1107587 - DNA, 15 bp, Homo sapiens
ggtccagctgttttc

SEQ ID NO: 1107588 - DNA, 15 bp, Homo sapiens
gggtccagctgtttt

SEQ ID NO: 1107589 - DNA, 15 bp, Homo sapiens
agggtccagctgttt

SEQ ID NO: 1107590 - DNA, 15 bp, Homo sapiens
cagggtccagctgtt

SEQ ID NO: 1107591 - DNA, 15 bp, Homo sapiens
ccagggtccagctgt

SEQ ID NO: 1107592 - DNA, 15 bp, Homo sapiens
cccagggtccagctg

SEQ ID NO: 1107593 - DNA, 15 bp, Homo sapiens
ccccagggtccagct

SEQ ID NO: 1107594 - DNA, 15 bp, Homo sapiens
tccccagggtccagc

SEQ ID NO: 1107595 - DNA, 15 bp, Homo sapiens
gtccccagggtccag

SEQ ID NO: 1107596 - DNA, 15 bp, Homo sapiens
ggtccccagggtcca

SEQ ID NO: 1107597 - DNA, 15 bp, Homo sapiens
tggtccccagggtcc

SEQ ID NO: 1107598 - DNA, 15 bp, Homo sapiens
gtggtccccagggtc

SEQ ID NO: 1107599 - DNA, 15 bp, Homo sapiens
agtggtccccagggt

SEQ ID NO: 1107600 - DNA, 15 bp, Homo sapiens
tagtggtccccaggg

SEQ ID NO: 1107601 - DNA, 15 bp, Homo sapiens
gtagtggtccccagg

SEQ ID NO: 1107602 - DNA, 15 bp, Homo sapiens
ggtagtggtccccag

SEQ ID NO: 1107603 - DNA, 15 bp, Homo sapiens
tggtagtggtcccca

SEQ ID NO: 1107604 - DNA, 15 bp, Homo sapiens
gtggtagtggtcccc

SEQ ID NO: 1107605 - DNA, 15 bp, Homo sapiens
ggtggtagtggtccc

SEQ ID NO: 1107606 - DNA, 15 bp, Homo sapiens
tggtggtagtggtcc

SEQ ID NO: 1107607 - DNA, 15 bp, Homo sapiens
ttggtggtagtggtc

SEQ ID NO: 1107608 - DNA, 15 bp, Homo sapiens
cttggtggtagtggt

SEQ ID NO: 1107609 - DNA, 15 bp, Homo sapiens
tcttggtggtagtgg

SEQ ID NO: 1107610 - DNA, 15 bp, Homo sapiens
gtcttggtggtagtg

SEQ ID NO: 1107611 - DNA, 15 bp, Homo sapiens
cgtcttggtggtagt

SEQ ID NO: 1107612 - DNA, 15 bp, Homo sapiens
gcgtcttggtggtag

SEQ ID NO: 1107613 - DNA, 15 bp, Homo sapiens
cgcgtcttggtggta

SEQ ID NO: 1107614 - DNA, 15 bp, Homo sapiens
ccgcgtcttggtggt

SEQ ID NO: 1107615 - DNA, 15 bp, Homo sapiens
tccgcgtcttggtgg

SEQ ID NO: 1107616 - DNA, 15 bp, Homo sapiens
ctccgcgtcttggtg

SEQ ID NO: 1107617 - DNA, 15 bp, Homo sapiens
tctccgcgtcttggt

SEQ ID NO: 1107618 - DNA, 15 bp, Homo sapiens
gtctccgcgtcttgg

SEQ ID NO: 1107619 - DNA, 15 bp, Homo sapiens
ggtctccgcgtcttg

SEQ ID NO: 1107620 - DNA, 15 bp, Homo sapiens
cggtctccgcgtctt

SEQ ID NO: 1107621 - DNA, 15 bp, Homo sapiens
ccggtctccgcgtct

SEQ ID NO: 1107622 - DNA, 15 bp, Homo sapiens
accggtctccgcgtc

SEQ ID NO: 1107623 - DNA, 15 bp, Homo sapiens
taccggtctccgcgt

SEQ ID NO: 1107624 - DNA, 15 bp, Homo sapiens
ctaccggtctccgcg

SEQ ID NO: 1107625 - DNA, 15 bp, Homo sapiens
actaccggtctccgc

SEQ ID NO: 1107626 - DNA, 15 bp, Homo sapiens
cactaccggtctccg

SEQ ID NO: 1107627 - DNA, 15 bp, Homo sapiens
ccactaccggtctcc

SEQ ID NO: 1107628 - DNA, 15 bp, Homo sapiens
gccactaccggtctc

SEQ ID NO: 1107629 - DNA, 15 bp, Homo sapiens
ggccactaccggtct

SEQ ID NO: 1107630 - DNA, 15 bp, Homo sapiens
gggccactaccggtc

SEQ ID NO: 1107631 - DNA, 15 bp, Homo sapiens
ggggccactaccggt

SEQ ID NO: 1107632 - DNA, 15 bp, Homo sapiens
cggggccactaccgg

SEQ ID NO: 1107633 - DNA, 15 bp, Homo sapiens
tcggggccactaccg

SEQ ID NO: 1107634 - DNA, 15 bp, Homo sapiens
ttcggggccactacc

SEQ ID NO: 1107635 - DNA, 15 bp, Homo sapiens
attcggggccactac

SEQ ID NO: 1107636 - DNA, 15 bp, Homo sapiens
cattcggggccacta

SEQ ID NO: 1107637 - DNA, 15 bp, Homo sapiens
ccattcggggccact

SEQ ID NO: 1107638 - DNA, 15 bp, Homo sapiens
gccattcggggccac

SEQ ID NO: 1107639 - DNA, 15 bp, Homo sapiens
agccattcggggcca

SEQ ID NO: 1107640 - DNA, 15 bp, Homo sapiens
cagccattcggggcc

SEQ ID NO: 1107641 - DNA, 15 bp, Homo sapiens
ccagccattcggggc

SEQ ID NO: 1107642 - DNA, 15 bp, Homo sapiens
cccagccattcgggg

SEQ ID NO: 1107643 - DNA, 15 bp, Homo sapiens
ccccagccattcggg

SEQ ID NO: 1107644 - DNA, 15 bp, Homo sapiens
cccccagccattcgg

SEQ ID NO: 1107645 - DNA, 15 bp, Homo sapiens
gcccccagccattcg

SEQ ID NO: 1107646 - DNA, 15 bp, Homo sapiens
tgcccccagccattc

SEQ ID NO: 1107647 - DNA, 15 bp, Homo sapiens
gtgcccccagccatt

SEQ ID NO: 1107648 - DNA, 15 bp, Homo sapiens
agtgcccccagccat

SEQ ID NO: 1107649 - DNA, 15 bp, Homo sapiens
cagtgcccccagcca

SEQ ID NO: 1107650 - DNA, 15 bp, Homo sapiens
tcagtgcccccagcc

SEQ ID NO: 1107651 - DNA, 15 bp, Homo sapiens
gtcagtgcccccagc

SEQ ID NO: 1107652 - DNA, 15 bp, Homo sapiens
tgtcagtgcccccag

SEQ ID NO: 1107653 - DNA, 15 bp, Homo sapiens
atgtcagtgccccca

SEQ ID NO: 1107654 - DNA, 15 bp, Homo sapiens
gatgtcagtgccccc

SEQ ID NO: 1107655 - DNA, 15 bp, Homo sapiens
agatgtcagtgcccc

SEQ ID NO: 1107656 - DNA, 15 bp, Homo sapiens
tagatgtcagtgccc

SEQ ID NO: 1107657 - DNA, 15 bp, Homo sapiens
atagatgtcagtgcc

SEQ ID NO: 1107658 - DNA, 15 bp, Homo sapiens
aatagatgtcagtgc

SEQ ID NO: 1107659 - DNA, 15 bp, Homo sapiens
caatagatgtcagtg

SEQ ID NO: 1107660 - DNA, 15 bp, Homo sapiens
gcaatagatgtcagt

SEQ ID NO: 1107661 - DNA, 15 bp, Homo sapiens
tgcaatagatgtcag

SEQ ID NO: 1107662 - DNA, 15 bp, Homo sapiens
atgcaatagatgtca

SEQ ID NO: 1107663 - DNA, 15 bp, Homo sapiens
tatgcaatagatgtc

SEQ ID NO: 1107664 - DNA, 15 bp, Homo sapiens
gtatgcaatagatgt

SEQ ID NO: 1107665 - DNA, 15 bp, Homo sapiens
tgtatgcaatagatg

SEQ ID NO: 1107666 - DNA, 15 bp, Homo sapiens
ttgtatgcaatagat

SEQ ID NO: 1107667 - DNA, 15 bp, Homo sapiens
cttgtatgcaataga

SEQ ID NO: 1107668 - DNA, 15 bp, Homo sapiens
tcttgtatgcaatag

SEQ ID NO: 1107669 - DNA, 15 bp, Homo sapiens
gtcttgtatgcaata

SEQ ID NO: 1107670 - DNA, 15 bp, Homo sapiens
tgtcttgtatgcaat

SEQ ID NO: 1107671 - DNA, 15 bp, Homo sapiens
ttgtcttgtatgcaa

SEQ ID NO: 1107672 - DNA, 15 bp, Homo sapiens
cttgtcttgtatgca

SEQ ID NO: 1107673 - DNA, 15 bp, Homo sapiens
ccttgtcttgtatgc

SEQ ID NO: 1107674 - DNA, 15 bp, Homo sapiens
cccttgtcttgtatg

SEQ ID NO: 1107675 - DNA, 15 bp, Homo sapiens
ccccttgtcttgtat

SEQ ID NO: 1107676 - DNA, 15 bp, Homo sapiens
cccccttgtcttgta

SEQ ID NO: 1107677 - DNA, 15 bp, Homo sapiens
ccccccttgtcttgt

SEQ ID NO: 1107678 - DNA, 15 bp, Homo sapiens
gccccccttgtcttg

SEQ ID NO: 1107679 - DNA, 15 bp, Homo sapiens
tgccccccttgtctt

SEQ ID NO: 1107680 - DNA, 15 bp, Homo sapiens
ctgccccccttgtct

SEQ ID NO: 1107681 - DNA, 15 bp, Homo sapiens
cctgccccccttgtc

SEQ ID NO: 1107682 - DNA, 15 bp, Homo sapiens
ccctgccccccttgt

SEQ ID NO: 1107683 - DNA, 15 bp, Homo sapiens
accctgccccccttg

SEQ ID NO: 1107684 - DNA, 15 bp, Homo sapiens
taccctgcccccctt

SEQ ID NO: 1107685 - DNA, 15 bp, Homo sapiens
ttaccctgcccccct

SEQ ID NO: 1107686 - DNA, 15 bp, Homo sapiens
cttaccctgcccccc

SEQ ID NO: 1107687 - DNA, 15 bp, Homo sapiens
ccttaccctgccccc

SEQ ID NO: 1107688 - DNA, 15 bp, Homo sapiens
tccttaccctgcccc

SEQ ID NO: 1107689 - DNA, 15 bp, Homo sapiens
ctccttaccctgccc

SEQ ID NO: 1107690 - DNA, 15 bp, Homo sapiens
cctccttaccctgcc

SEQ ID NO: 1107691 - DNA, 15 bp, Homo sapiens
ccctccttaccctgc

SEQ ID NO: 1107692 - DNA, 15 bp, Homo sapiens
accctccttaccctg

SEQ ID NO: 1107693 - DNA, 15 bp, Homo sapiens
caccctccttaccct

SEQ ID NO: 1107694 - DNA, 15 bp, Homo sapiens
tcaccctccttaccc

SEQ ID NO: 1107695 - DNA, 15 bp, Homo sapiens
ctcaccctccttacc

SEQ ID NO: 1107696 - DNA, 15 bp, Homo sapiens
actcaccctccttac

SEQ ID NO: 1107697 - DNA, 15 bp, Homo sapiens
gactcaccctcctta

SEQ ID NO: 1107698 - DNA, 15 bp, Homo sapiens
cgactcaccctcctt

SEQ ID NO: 1107699 - DNA, 15 bp, Homo sapiens
acgactcaccctcct

SEQ ID NO: 1107700 - DNA, 15 bp, Homo sapiens
gacgactcaccctcc

SEQ ID NO: 1107701 - DNA, 15 bp, Homo sapiens
ggacgactcaccctc

SEQ ID NO: 1107702 - DNA, 15 bp, Homo sapiens
tggacgactcaccct

SEQ ID NO: 1107703 - DNA, 15 bp, Homo sapiens
ttggacgactcaccc

SEQ ID NO: 1107704 - DNA, 15 bp, Homo sapiens
cttggacgactcacc

SEQ ID NO: 1107705 - DNA, 15 bp, Homo sapiens
gcttggacgactcac

SEQ ID NO: 1107706 - DNA, 15 bp, Homo sapiens
cgcttggacgactca

SEQ ID NO: 1107707 - DNA, 15 bp, Homo sapiens
tcgcttggacgactc

SEQ ID NO: 1107708 - DNA, 15 bp, Homo sapiens
atcgcttggacgact

SEQ ID NO: 1107709 - DNA, 15 bp, Homo sapiens
aatcgcttggacgac

SEQ ID NO: 1107710 - DNA, 15 bp, Homo sapiens
caatcgcttggacga

SEQ ID NO: 1107711 - DNA, 15 bp, Homo sapiens
tcaatcgcttggacg

SEQ ID NO: 1107712 - DNA, 15 bp, Homo sapiens
atcaatcgcttggac

SEQ ID NO: 1107713 - DNA, 15 bp, Homo sapiens
tatcaatcgcttgga

SEQ ID NO: 1107714 - DNA, 15 bp, Homo sapiens
ttatcaatcgcttgg

SEQ ID NO: 1107715 - DNA, 15 bp, Homo sapiens
cttatcaatcgcttg

SEQ ID NO: 1107716 - DNA, 15 bp, Homo sapiens
ccttatcaatcgctt

SEQ ID NO: 1107717 - DNA, 15 bp, Homo sapiens
accttatcaatcgct

SEQ ID NO: 1107718 - DNA, 15 bp, Homo sapiens
gaccttatcaatcgc

SEQ ID NO: 1107719 - DNA, 15 bp, Homo sapiens
tgaccttatcaatcg

SEQ ID NO: 1107720 - DNA, 15 bp, Homo sapiens
ttgaccttatcaatc

SEQ ID NO: 1107721 - DNA, 15 bp, Homo sapiens
cttgaccttatcaat

SEQ ID NO: 1107722 - DNA, 15 bp, Homo sapiens
gcttgaccttatcaa

SEQ ID NO: 1107723 - DNA, 15 bp, Homo sapiens
tgcttgaccttatca

SEQ ID NO: 1107724 - DNA, 15 bp, Homo sapiens
ttgcttgaccttatc

SEQ ID NO: 1107725 - DNA, 15 bp, Homo sapiens
cttgcttgaccttat

SEQ ID NO: 1107726 - DNA, 15 bp, Homo sapiens
acttgcttgacctta

SEQ ID NO: 1107727 - DNA, 15 bp, Homo sapiens
gacttgcttgacctt

SEQ ID NO: 1107728 - DNA, 15 bp, Homo sapiens
tgacttgcttgacct

SEQ ID NO: 1107729 - DNA, 15 bp, Homo sapiens
ttgacttgcttgacc

SEQ ID NO: 1107730 - DNA, 15 bp, Homo sapiens
cttgacttgcttgac

SEQ ID NO: 1107731 - DNA, 15 bp, Homo sapiens
acttgacttgcttga

SEQ ID NO: 1107732 - DNA, 15 bp, Homo sapiens
cacttgacttgcttg

SEQ ID NO: 1107733 - DNA, 15 bp, Homo sapiens
tcacttgacttgctt

SEQ ID NO: 1107734 - DNA, 15 bp, Homo sapiens
atcacttgacttgct

SEQ ID NO: 1107735 - DNA, 15 bp, Homo sapiens
gatcacttgacttgc

SEQ ID NO: 1107736 - DNA, 15 bp, Homo sapiens
tgatcacttgacttg

SEQ ID NO: 1107737 - DNA, 15 bp, Homo sapiens
atgatcacttgactt

SEQ ID NO: 1107738 - DNA, 15 bp, Homo sapiens
catgatcacttgact

SEQ ID NO: 1107739 - DNA, 15 bp, Homo sapiens
ccatgatcacttgac

SEQ ID NO: 1107740 - DNA, 15 bp, Homo sapiens
cccatgatcacttga

SEQ ID NO: 1107741 - DNA, 15 bp, Homo sapiens
tcccatgatcacttg

SEQ ID NO: 1107742 - DNA, 15 bp, Homo sapiens
atcccatgatcactt

SEQ ID NO: 1107743 - DNA, 15 bp, Homo sapiens
tatcccatgatcact

SEQ ID NO: 1107744 - DNA, 15 bp, Homo sapiens
ctatcccatgatcac

SEQ ID NO: 1107745 - DNA, 15 bp, Homo sapiens
cctatcccatgatca

SEQ ID NO: 1107746 - DNA, 15 bp, Homo sapiens
ccctatcccatgatc

SEQ ID NO: 1107747 - DNA, 15 bp, Homo sapiens
cccctatcccatgat

SEQ ID NO: 1107748 - DNA, 15 bp, Homo sapiens
ccccctatcccatga

SEQ ID NO: 1107749 - DNA, 15 bp, Homo sapiens
gccccctatcccatg

SEQ ID NO: 1107750 - DNA, 15 bp, Homo sapiens
ggccccctatcccat

SEQ ID NO: 1107751 - DNA, 15 bp, Homo sapiens
gggccccctatccca

SEQ ID NO: 1107752 - DNA, 15 bp, Homo sapiens
agggccccctatccc

SEQ ID NO: 1107753 - DNA, 15 bp, Homo sapiens
aagggccccctatcc

SEQ ID NO: 1107754 - DNA, 15 bp, Homo sapiens
gaagggccccctatc

SEQ ID NO: 1107755 - DNA, 15 bp, Homo sapiens
ggaagggccccctat

SEQ ID NO: 1107756 - DNA, 15 bp, Homo sapiens
gggaagggcccccta

SEQ ID NO: 1107757 - DNA, 15 bp, Homo sapiens
agggaagggccccct

SEQ ID NO: 1107758 - DNA, 15 bp, Homo sapiens
aagggaagggccccc

SEQ ID NO: 1107759 - DNA, 15 bp, Homo sapiens
aaagggaagggcccc

SEQ ID NO: 1107760 - DNA, 15 bp, Homo sapiens
aaaagggaagggccc

SEQ ID NO: 1107761 - DNA, 15 bp, Homo sapiens
taaaagggaagggcc

SEQ ID NO: 1107762 - DNA, 15 bp, Homo sapiens
ctaaaagggaagggc

SEQ ID NO: 1107763 - DNA, 15 bp, Homo sapiens
cctaaaagggaaggg

SEQ ID NO: 1107764 - DNA, 15 bp, Homo sapiens
acctaaaagggaagg

SEQ ID NO: 1107765 - DNA, 15 bp, Homo sapiens
tacctaaaagggaag

SEQ ID NO: 1107766 - DNA, 15 bp, Homo sapiens
ctacctaaaagggaa

SEQ ID NO: 1107767 - DNA, 15 bp, Homo sapiens
gctacctaaaaggga

SEQ ID NO: 1107768 - DNA, 15 bp, Homo sapiens
ggctacctaaaaggg

SEQ ID NO: 1107769 - DNA, 15 bp, Homo sapiens
tggctacctaaaagg

SEQ ID NO: 1107770 - DNA, 15 bp, Homo sapiens
ttggctacctaaaag

SEQ ID NO: 1107771 - DNA, 15 bp, Homo sapiens
tttggctacctaaaa

SEQ ID NO: 1107772 - DNA, 15 bp, Homo sapiens
ctttggctacctaaa

SEQ ID NO: 1107773 - DNA, 15 bp, Homo sapiens
gctttggctacctaa

SEQ ID NO: 1107774 - DNA, 15 bp, Homo sapiens
tgctttggctaccta

SEQ ID NO: 1107775 - DNA, 15 bp, Homo sapiens
ctgctttggctacct

SEQ ID NO: 1107776 - DNA, 15 bp, Homo sapiens
tctgctttggctacc

SEQ ID NO: 1107777 - DNA, 15 bp, Homo sapiens
ctctgctttggctac

SEQ ID NO: 1107778 - DNA, 15 bp, Homo sapiens
tctctgctttggcta

SEQ ID NO: 1107779 - DNA, 15 bp, Homo sapiens
ctctctgctttggct

SEQ ID NO: 1107780 - DNA, 15 bp, Homo sapiens
cctctctgctttggc

SEQ ID NO: 1107781 - DNA, 15 bp, Homo sapiens
ccctctctgctttgg

SEQ ID NO: 1107782 - DNA, 15 bp, Homo sapiens
tccctctctgctttg

SEQ ID NO: 1107783 - DNA, 15 bp, Homo sapiens
ttccctctctgcttt

SEQ ID NO: 1107784 - DNA, 15 bp, Homo sapiens
cttccctctctgctt

SEQ ID NO: 1107785 - DNA, 15 bp, Homo sapiens
ccttccctctctgct

SEQ ID NO: 1107786 - DNA, 15 bp, Homo sapiens
gccttccctctctgc

SEQ ID NO: 1107787 - DNA, 15 bp, Homo sapiens
tgccttccctctctg

SEQ ID NO: 1107788 - DNA, 15 bp, Homo sapiens
ctgccttccctctct

SEQ ID NO: 1107789 - DNA, 15 bp, Homo sapiens
tgctgccttccctct

SEQ ID NO: 1107790 - DNA, 15 bp, Homo sapiens
atgctgccttccctc

SEQ ID NO: 1107791 - DNA, 15 bp, Homo sapiens
tatgctgccttccct

SEQ ID NO: 1107792 - DNA, 15 bp, Homo sapiens
atatgctgccttccc

SEQ ID NO: 1107793 - DNA, 15 bp, Homo sapiens
catatgctgccttcc

SEQ ID NO: 1107794 - DNA, 15 bp, Homo sapiens
acatatgctgccttc

SEQ ID NO: 1107795 - DNA, 15 bp, Homo sapiens
gacatatgctgcctt

SEQ ID NO: 1107796 - DNA, 15 bp, Homo sapiens
tgacatatgctgcct

SEQ ID NO: 1107797 - DNA, 15 bp, Homo sapiens
ctgacatatgctgcc

SEQ ID NO: 1107798 - DNA, 15 bp, Homo sapiens
gctgacatatgctgc

SEQ ID NO: 1107799 - DNA, 15 bp, Homo sapiens
cgctgacatatgctg

SEQ ID NO: 1107800 - DNA, 15 bp, Homo sapiens
acgctgacatatgct

SEQ ID NO: 1107801 - DNA, 15 bp, Homo sapiens
aacgctgacatatgc

SEQ ID NO: 1107802 - DNA, 15 bp, Homo sapiens
aaacgctgacatatg

SEQ ID NO: 1107803 - DNA, 15 bp, Homo sapiens
aaaacgctgacatat

SEQ ID NO: 1107804 - DNA, 15 bp, Homo sapiens
gaaaacgctgacata

SEQ ID NO: 1107805 - DNA, 15 bp, Homo sapiens
agaaaacgctgacat

SEQ ID NO: 1107806 - DNA, 15 bp, Homo sapiens
aagaaaacgctgaca

SEQ ID NO: 1107807 - DNA, 15 bp, Homo sapiens
gaagaaaacgctgac

SEQ ID NO: 1107808 - DNA, 15 bp, Homo sapiens
agaagaaaacgctga

SEQ ID NO: 1107809 - DNA, 15 bp, Homo sapiens
tagaagaaaacgctg

SEQ ID NO: 1107810 - DNA, 15 bp, Homo sapiens
atagaagaaaacgct

SEQ ID NO: 1107811 - DNA, 15 bp, Homo sapiens
catagaagaaaacgc

SEQ ID NO: 1107812 - DNA, 15 bp, Homo sapiens
gcatagaagaaaacg

SEQ ID NO: 1107813 - DNA, 15 bp, Homo sapiens
tgcatagaagaaaac

SEQ ID NO: 1107814 - DNA, 15 bp, Homo sapiens
atgcatagaagaaaa

SEQ ID NO: 1107815 - DNA, 15 bp, Homo sapiens
catgcatagaagaaa

SEQ ID NO: 1107816 - DNA, 15 bp, Homo sapiens
acatgcatagaagaa

SEQ ID NO: 1107817 - DNA, 15 bp, Homo sapiens
tacatgcatagaaga

SEQ ID NO: 1107818 - DNA, 15 bp, Homo sapiens
atacatgcatagaag

SEQ ID NO: 1107819 - DNA, 15 bp, Homo sapiens
gatacatgcatagaa

SEQ ID NO: 1107820 - DNA, 15 bp, Homo sapiens
tgatacatgcataga

SEQ ID NO: 1107821 - DNA, 15 bp, Homo sapiens
ttgatacatgcatag

SEQ ID NO: 1107822 - DNA, 15 bp, Homo sapiens
tttgatacatgcata

SEQ ID NO: 1107823 - DNA, 15 bp, Homo sapiens
ttttgatacatgcat

SEQ ID NO: 1107824 - DNA, 15 bp, Homo sapiens
tttttgatacatgca

SEQ ID NO: 1107825 - DNA, 15 bp, Homo sapiens
ctttttgatacatgc

SEQ ID NO: 1107826 - DNA, 15 bp, Homo sapiens
tctttttgatacatg

SEQ ID NO: 1107827 - DNA, 15 bp, Homo sapiens
atctttttgatacat

SEQ ID NO: 1107828 - DNA, 15 bp, Homo sapiens
gatctttttgataca

SEQ ID NO: 1107829 - DNA, 15 bp, Homo sapiens
tgatctttttgatac

SEQ ID NO: 1107830 - DNA, 15 bp, Homo sapiens
ttgatctttttgata

SEQ ID NO: 1107831 - DNA, 15 bp, Homo sapiens
tttgatctttttgat

SEQ ID NO: 1107832 - DNA, 15 bp, Homo sapiens
ctttgatctttttga

SEQ ID NO: 1107833 - DNA, 15 bp, Homo sapiens
tctttgatctttttg

SEQ ID NO: 1107834 - DNA, 15 bp, Homo sapiens
gtctttgatcttttt

SEQ ID NO: 1107835 - DNA, 15 bp, Homo sapiens
agtctttgatctttt

SEQ ID NO: 1107836 - DNA, 15 bp, Homo sapiens
aagtctttgatcttt

SEQ ID NO: 1107837 - DNA, 15 bp, Homo sapiens
aaagtctttgatctt

SEQ ID NO: 1107838 - DNA, 15 bp, Homo sapiens
taaagtctttgatct

SEQ ID NO: 1107839 - DNA, 15 bp, Homo sapiens
ttaaagtctttgatc

SEQ ID NO: 1107840 - DNA, 15 bp, Homo sapiens
cttaaagtctttgat

SEQ ID NO: 1107841 - DNA, 15 bp, Homo sapiens
ccttaaagtctttga

SEQ ID NO: 1107842 - DNA, 15 bp, Homo sapiens
gccttaaagtctttg

SEQ ID NO: 1107843 - DNA, 15 bp, Homo sapiens
agccttaaagtcttt

SEQ ID NO: 1107844 - DNA, 15 bp, Homo sapiens
aagccttaaagtctt

SEQ ID NO: 1107845 - DNA, 15 bp, Homo sapiens
aaagccttaaagtct

SEQ ID NO: 1107846 - DNA, 15 bp, Homo sapiens
gaaagccttaaagtc

SEQ ID NO: 1107847 - DNA, 15 bp, Homo sapiens
tgaaagccttaaagt

SEQ ID NO: 1107848 - DNA, 15 bp, Homo sapiens
gtgaaagccttaaag

SEQ ID NO: 1107849 - DNA, 15 bp, Homo sapiens
agtgaaagccttaaa

SEQ ID NO: 1107850 - DNA, 15 bp, Homo sapiens
tagtgaaagccttaa

SEQ ID NO: 1107851 - DNA, 15 bp, Homo sapiens
atagtgaaagcctta

SEQ ID NO: 1107852 - DNA, 15 bp, Homo sapiens
aatagtgaaagcctt

SEQ ID NO: 1107853 - DNA, 15 bp, Homo sapiens
aaatagtgaaagcct

SEQ ID NO: 1107854 - DNA, 15 bp, Homo sapiens
gaaatagtgaaagcc

SEQ ID NO: 1107855 - DNA, 15 bp, Homo sapiens
agaaatagtgaaagc

SEQ ID NO: 1107856 - DNA, 15 bp, Homo sapiens
aagaaatagtgaaag

SEQ ID NO: 1107857 - DNA, 15 bp, Homo sapiens
gaagaaatagtgaaa

SEQ ID NO: 1107858 - DNA, 15 bp, Homo sapiens
agaagaaatagtgaa

SEQ ID NO: 1107859 - DNA, 15 bp, Homo sapiens
tagaagaaatagtga

SEQ ID NO: 1107860 - DNA, 15 bp, Homo sapiens
gtagaagaaatagtg

SEQ ID NO: 1107861 - DNA, 15 bp, Homo sapiens
ggtagaagaaatagt

SEQ ID NO: 1107862 - DNA, 15 bp, Homo sapiens
tggtagaagaaatag

SEQ ID NO: 1107863 - DNA, 15 bp, Homo sapiens
gtggtagaagaaata

SEQ ID NO: 1107864 - DNA, 15 bp, Homo sapiens
agtggtagaagaaat

SEQ ID NO: 1107865 - DNA, 15 bp, Homo sapiens
tagtggtagaagaaa

SEQ ID NO: 1107866 - DNA, 15 bp, Homo sapiens
atagtggtagaagaa

SEQ ID NO: 1107867 - DNA, 15 bp, Homo sapiens
gatagtggtagaaga

SEQ ID NO: 1107868 - DNA, 15 bp, Homo sapiens
agatagtggtagaag

SEQ ID NO: 1107869 - DNA, 15 bp, Homo sapiens
tagatagtggtagaa

SEQ ID NO: 1107870 - DNA, 15 bp, Homo sapiens
gtagatagtggtaga

SEQ ID NO: 1107871 - DNA, 15 bp, Homo sapiens
agtagatagtggtag

SEQ ID NO: 1107872 - DNA, 15 bp, Homo sapiens
tagtagatagtggta

SEQ ID NO: 1107873 - DNA, 15 bp, Homo sapiens
gtagtagatagtggt

SEQ ID NO: 1107874 - DNA, 15 bp, Homo sapiens
cgtagtagatagtgg

SEQ ID NO: 1107875 - DNA, 15 bp, Homo sapiens
tcgtagtagatagtg

SEQ ID NO: 1107876 - DNA, 15 bp, Homo sapiens
ttcgtagtagatagt

SEQ ID NO: 1107877 - DNA, 15 bp, Homo sapiens
gttcgtagtagatag

SEQ ID NO: 1107878 - DNA, 15 bp, Homo sapiens
agttcgtagtagata

SEQ ID NO: 1107879 - DNA, 15 bp, Homo sapiens
aagttcgtagtagat

SEQ ID NO: 1107880 - DNA, 15 bp, Homo sapiens
gaagttcgtagtaga

SEQ ID NO: 1107881 - DNA, 15 bp, Homo sapiens
tgaagttcgtagtag

SEQ ID NO: 1107882 - DNA, 15 bp, Homo sapiens
ttgaagttcgtagta

SEQ ID NO: 1107883 - DNA, 15 bp, Homo sapiens
tttgaagttcgtagt

SEQ ID NO: 1107884 - DNA, 15 bp, Homo sapiens
ctttgaagttcgtag

SEQ ID NO: 1107885 - DNA, 15 bp, Homo sapiens
tctttgaagttcgta

SEQ ID NO: 1107886 - DNA, 15 bp, Homo sapiens
ctctttgaagttcgt

SEQ ID NO: 1107887 - DNA, 15 bp, Homo sapiens
cctctttgaagttcg

SEQ ID NO: 1107888 - DNA, 15 bp, Homo sapiens
tcctctttgaagttc

SEQ ID NO: 1107889 - DNA, 15 bp, Homo sapiens
ttcctctttgaagtt

SEQ ID NO: 1107890 - DNA, 15 bp, Homo sapiens
attcctctttgaagt

SEQ ID NO: 1107891 - DNA, 15 bp, Homo sapiens
gattcctctttgaag

SEQ ID NO: 1107892 - DNA, 15 bp, Homo sapiens
ggattcctctttgaa

SEQ ID NO: 1107893 - DNA, 15 bp, Homo sapiens
tggattcctctttga

SEQ ID NO: 1107894 - DNA, 15 bp, Homo sapiens
ctggattcctctttg

SEQ ID NO: 1107895 - DNA, 15 bp, Homo sapiens
cctggattcctcttt

SEQ ID NO: 1107896 - DNA, 15 bp, Homo sapiens
tcctggattcctctt

SEQ ID NO: 1107897 - DNA, 15 bp, Homo sapiens
ctcctggattcctct

SEQ ID NO: 1107898 - DNA, 15 bp, Homo sapiens
actcctggattcctc

SEQ ID NO: 1107899 - DNA, 15 bp, Homo sapiens
tactcctggattcct

SEQ ID NO: 1107900 - DNA, 15 bp, Homo sapiens
atactcctggattcc

SEQ ID NO: 1107901 - DNA, 15 bp, Homo sapiens
catactcctggattc

SEQ ID NO: 1107902 - DNA, 15 bp, Homo sapiens
ccatactcctggatt

SEQ ID NO: 1107903 - DNA, 15 bp, Homo sapiens
cccatactcctggat

SEQ ID NO: 1107904 - DNA, 15 bp, Homo sapiens
tcccatactcctgga

SEQ ID NO: 1107905 - DNA, 15 bp, Homo sapiens
ctcccatactcctgg

SEQ ID NO: 1107906 - DNA, 15 bp, Homo sapiens
cctcccatactcctg

SEQ ID NO: 1107907 - DNA, 15 bp, Homo sapiens
tcctcccatactcct

SEQ ID NO: 1107908 - DNA, 15 bp, Homo sapiens
ttcctcccatactcc

SEQ ID NO: 1107909 - DNA, 15 bp, Homo sapiens
gttcctcccatactc

SEQ ID NO: 1107910 - DNA, 15 bp, Homo sapiens
tgttcctcccatact

SEQ ID NO: 1107911 - DNA, 15 bp, Homo sapiens
atgttcctcccatac

SEQ ID NO: 1107912 - DNA, 15 bp, Homo sapiens
catgttcctcccata

SEQ ID NO: 1107913 - DNA, 15 bp, Homo sapiens
tcatgttcctcccat

SEQ ID NO: 1107914 - DNA, 15 bp, Homo sapiens
ttcatgttcctccca

SEQ ID NO: 1107915 - DNA, 15 bp, Homo sapiens
tttcatgttcctccc

SEQ ID NO: 1107916 - DNA, 15 bp, Homo sapiens
ctttcatgttcctcc

SEQ ID NO: 1107917 - DNA, 15 bp, Homo sapiens
actttcatgttcctc

SEQ ID NO: 1107918 - DNA, 15 bp, Homo sapiens
cactttcatgttcct

SEQ ID NO: 1107919 - DNA, 15 bp, Homo sapiens
ccactttcatgttcc

SEQ ID NO: 1107920 - DNA, 15 bp, Homo sapiens
tccactttcatgttc

SEQ ID NO: 1107921 - DNA, 15 bp, Homo sapiens
gtccactttcatgtt

SEQ ID NO: 1107922 - DNA, 15 bp, Homo sapiens
tgtccactttcatgt

SEQ ID NO: 1107923 - DNA, 15 bp, Homo sapiens
ttgtccactttcatg

SEQ ID NO: 1107924 - DNA, 15 bp, Homo sapiens
cttgtccactttcat

SEQ ID NO: 1107925 - DNA, 15 bp, Homo sapiens
ccttgtccactttca

SEQ ID NO: 1107926 - DNA, 15 bp, Homo sapiens
tccttgtccactttc

SEQ ID NO: 1107927 - DNA, 15 bp, Homo sapiens
ctccttgtccacttt

SEQ ID NO: 1107928 - DNA, 15 bp, Homo sapiens
gctccttgtccactt

SEQ ID NO: 1107929 - DNA, 15 bp, Homo sapiens
cgctccttgtccact

SEQ ID NO: 1107930 - DNA, 15 bp, Homo sapiens
acgctccttgtccac

SEQ ID NO: 1107931 - DNA, 15 bp, Homo sapiens
cacgctccttgtcca

SEQ ID NO: 1107932 - DNA, 15 bp, Homo sapiens
tcacgctccttgtcc

SEQ ID NO: 1107933 - DNA, 15 bp, Homo sapiens
gtcacgctccttgtc

SEQ ID NO: 1107934 - DNA, 15 bp, Homo sapiens
ggtcacgctccttgt

SEQ ID NO: 1107935 - DNA, 15 bp, Homo sapiens
tggtcacgctccttg

SEQ ID NO: 1107936 - DNA, 15 bp, Homo sapiens
gtggtcacgctcctt

SEQ ID NO: 1107937 - DNA, 15 bp, Homo sapiens
agtggtcacgctcct

SEQ ID NO: 1107938 - DNA, 15 bp, Homo sapiens
cagtggtcacgctcc

SEQ ID NO: 1107939 - DNA, 15 bp, Homo sapiens
tcagtggtcacgctc

SEQ ID NO: 1107940 - DNA, 15 bp, Homo sapiens
ttcagtggtcacgct

SEQ ID NO: 1107941 - DNA, 15 bp, Homo sapiens
cttcagtggtcacgc

SEQ ID NO: 1107942 - DNA, 15 bp, Homo sapiens
gcttcagtggtcacg

SEQ ID NO: 1107943 - DNA, 15 bp, Homo sapiens
tgcttcagtggtcac

SEQ ID NO: 1107944 - DNA, 15 bp, Homo sapiens
gtgcttcagtggtca

SEQ ID NO: 1107945 - DNA, 15 bp, Homo sapiens
tgtgcttcagtggtc

SEQ ID NO: 1107946 - DNA, 15 bp, Homo sapiens
ctgtgcttcagtggt

SEQ ID NO: 1107947 - DNA, 15 bp, Homo sapiens
gctgtgcttcagtgg

SEQ ID NO: 1107948 - DNA, 15 bp, Homo sapiens
tgctgtgcttcagtg

SEQ ID NO: 1107949 - DNA, 15 bp, Homo sapiens
gtgctgtgcttcagt

SEQ ID NO: 1107950 - DNA, 15 bp, Homo sapiens
ggtgctgtgcttcag

SEQ ID NO: 1107951 - DNA, 15 bp, Homo sapiens
tggtgctgtgcttca

SEQ ID NO: 1107952 - DNA, 15 bp, Homo sapiens
gtggtgctgtgcttc

SEQ ID NO: 1107953 - DNA, 15 bp, Homo sapiens
tgtggtgctgtgctt

SEQ ID NO: 1107954 - DNA, 15 bp, Homo sapiens
ctgtggtgctgtgct

SEQ ID NO: 1107955 - DNA, 15 bp, Homo sapiens
tctgtggtgctgtgc

SEQ ID NO: 1107956 - DNA, 15 bp, Homo sapiens
ttctgtggtgctgtg

SEQ ID NO: 1107957 - DNA, 15 bp, Homo sapiens
tttctgtggtgctgt

SEQ ID NO: 1107958 - DNA, 15 bp, Homo sapiens
ctttctgtggtgctg

SEQ ID NO: 1107959 - DNA, 15 bp, Homo sapiens
cctttctgtggtgct

SEQ ID NO: 1107960 - DNA, 15 bp, Homo sapiens
ccctttctgtggtgc

SEQ ID NO: 1107961 - DNA, 15 bp, Homo sapiens
cccctttctgtggtg

SEQ ID NO: 1107962 - DNA, 15 bp, Homo sapiens
acccctttctgtggt

SEQ ID NO: 1107963 - DNA, 15 bp, Homo sapiens
aacccctttctgtgg

SEQ ID NO: 1107964 - DNA, 15 bp, Homo sapiens
aaacccctttctgtg

SEQ ID NO: 1107965 - DNA, 15 bp, Homo sapiens
taaacccctttctgt

SEQ ID NO: 1107966 - DNA, 15 bp, Homo sapiens
ctaaacccctttctg

SEQ ID NO: 1107967 - DNA, 15 bp, Homo sapiens
cctaaacccctttct

SEQ ID NO: 1107968 - DNA, 15 bp, Homo sapiens
gcctaaacccctttc

SEQ ID NO: 1107969 - DNA, 15 bp, Homo sapiens
ggcctaaaccccttt

SEQ ID NO: 1107970 - DNA, 15 bp, Homo sapiens
aggcctaaacccctt

SEQ ID NO: 1107971 - DNA, 15 bp, Homo sapiens
aaggcctaaacccct

SEQ ID NO: 1107972 - DNA, 15 bp, Homo sapiens
caaggcctaaacccc

SEQ ID NO: 1107973 - DNA, 15 bp, Homo sapiens
ccaaggcctaaaccc

SEQ ID NO: 1107974 - DNA, 15 bp, Homo sapiens
cccaaggcctaaacc

SEQ ID NO: 1107975 - DNA, 15 bp, Homo sapiens
tcccaaggcctaaac

SEQ ID NO: 1107976 - DNA, 15 bp, Homo sapiens
atcccaaggcctaaa

SEQ ID NO: 1107977 - DNA, 15 bp, Homo sapiens
catcccaaggcctaa

SEQ ID NO: 1107978 - DNA, 15 bp, Homo sapiens
tcatcccaaggccta

SEQ ID NO: 1107979 - DNA, 15 bp, Homo sapiens
gtcatcccaaggcct

SEQ ID NO: 1107980 - DNA, 15 bp, Homo sapiens
agtcatcccaaggcc

SEQ ID NO: 1107981 - DNA, 15 bp, Homo sapiens
cagtcatcccaaggc

SEQ ID NO: 1107982 - DNA, 15 bp, Homo sapiens
gcagtcatcccaagg

SEQ ID NO: 1107983 - DNA, 15 bp, Homo sapiens
cgcagtcatcccaag

SEQ ID NO: 1107984 - DNA, 15 bp, Homo sapiens
ccgcagtcatcccaa

SEQ ID NO: 1107985 - DNA, 15 bp, Homo sapiens
cccgcagtcatccca

SEQ ID NO: 1107986 - DNA, 15 bp, Homo sapiens
gcccgcagtcatccc

SEQ ID NO: 1107987 - DNA, 15 bp, Homo sapiens
tgcccgcagtcatcc

SEQ ID NO: 1107988 - DNA, 15 bp, Homo sapiens
ctgcccgcagtcatc

SEQ ID NO: 1107989 - DNA, 15 bp, Homo sapiens
cctgcccgcagtcat

SEQ ID NO: 1107990 - DNA, 15 bp, Homo sapiens
gcctgcccgcagtca

SEQ ID NO: 1107991 - DNA, 15 bp, Homo sapiens
ggcctgcccgcagtc

SEQ ID NO: 1107992 - DNA, 15 bp, Homo sapiens
aggcctgcccgcagt

SEQ ID NO: 1107993 - DNA, 15 bp, Homo sapiens
caggcctgcccgcag

SEQ ID NO: 1107994 - DNA, 15 bp, Homo sapiens
ccaggcctgcccgca

SEQ ID NO: 1107995 - DNA, 15 bp, Homo sapiens
tccaggcctgcccgc

SEQ ID NO: 1107996 - DNA, 15 bp, Homo sapiens
atccaggcctgcccg

SEQ ID NO: 1107997 - DNA, 15 bp, Homo sapiens
tatccaggcctgccc

SEQ ID NO: 1107998 - DNA, 15 bp, Homo sapiens
ttatccaggcctgcc

SEQ ID NO: 1107999 - DNA, 15 bp, Homo sapiens
attatccaggcctgc

SEQ ID NO: 1108000 - DNA, 15 bp, Homo sapiens
tattatccaggcctg

SEQ ID NO: 1108001 - DNA, 15 bp, Homo sapiens
atattatccaggcct

SEQ ID NO: 1108002 - DNA, 15 bp, Homo sapiens
gatattatccaggcc

SEQ ID NO: 1108003 - DNA, 15 bp, Homo sapiens
ggatattatccaggc

SEQ ID NO: 1108004 - DNA, 15 bp, Homo sapiens
tggatattatccagg

SEQ ID NO: 1108005 - DNA, 15 bp, Homo sapiens
ctggatattatccag

SEQ ID NO: 1108006 - DNA, 15 bp, Homo sapiens
gctggatattatcca

SEQ ID NO: 1108007 - DNA, 15 bp, Homo sapiens
ggctggatattatcc

SEQ ID NO: 1108008 - DNA, 15 bp, Homo sapiens
aggctggatattatc

SEQ ID NO: 1108009 - DNA, 15 bp, Homo sapiens
gaggctggatattat

SEQ ID NO: 1108010 - DNA, 15 bp, Homo sapiens
ggaggctggatatta

SEQ ID NO: 1108011 - DNA, 15 bp, Homo sapiens
gggaggctggatatt

SEQ ID NO: 1108012 - DNA, 15 bp, Homo sapiens
tgggaggctggatat

SEQ ID NO: 1108013 - DNA, 15 bp, Homo sapiens
gtgggaggctggata

SEQ ID NO: 1108014 - DNA, 15 bp, Homo sapiens
tgtgggaggctggat

SEQ ID NO: 1108015 - DNA, 15 bp, Homo sapiens
ttgtgggaggctgga

SEQ ID NO: 1108016 - DNA, 15 bp, Homo sapiens
cttgtgggaggctgg

SEQ ID NO: 1108017 - DNA, 15 bp, Homo sapiens
tcttgtgggaggctg

SEQ ID NO: 1108018 - DNA, 15 bp, Homo sapiens
ttcttgtgggaggct

SEQ ID NO: 1108019 - DNA, 15 bp, Homo sapiens
cttcttgtgggaggc

SEQ ID NO: 1108020 - DNA, 15 bp, Homo sapiens
gcttcttgtgggagg

SEQ ID NO: 1108021 - DNA, 15 bp, Homo sapiens
agcttcttgtgggag

SEQ ID NO: 1108022 - DNA, 15 bp, Homo sapiens
cagcttcttgtggga

SEQ ID NO: 1108023 - DNA, 15 bp, Homo sapiens
ccagcttcttgtggg

SEQ ID NO: 1108024 - DNA, 15 bp, Homo sapiens
gccagcttcttgtgg

SEQ ID NO: 1108025 - DNA, 15 bp, Homo sapiens
cgccagcttcttgtg

SEQ ID NO: 1108026 - DNA, 15 bp, Homo sapiens
ccgccagcttcttgt

SEQ ID NO: 1108027 - DNA, 15 bp, Homo sapiens
tccgccagcttcttg

SEQ ID NO: 1108028 - DNA, 15 bp, Homo sapiens
ctccgccagcttctt

SEQ ID NO: 1108029 - DNA, 15 bp, Homo sapiens
gctccgccagcttct

SEQ ID NO: 1108030 - DNA, 15 bp, Homo sapiens
tgctccgccagcttc

SEQ ID NO: 1108031 - DNA, 15 bp, Homo sapiens
ctgctccgccagctt

SEQ ID NO: 1108032 - DNA, 15 bp, Homo sapiens
tctgctccgccagct

SEQ ID NO: 1108033 - DNA, 15 bp, Homo sapiens
ctctgctccgccagc

SEQ ID NO: 1108034 - DNA, 15 bp, Homo sapiens
actctgctccgccag

SEQ ID NO: 1108035 - DNA, 15 bp, Homo sapiens
cactctgctccgcca

SEQ ID NO: 1108036 - DNA, 15 bp, Homo sapiens
acactctgctccgcc

SEQ ID NO: 1108037 - DNA, 15 bp, Homo sapiens
aacactctgctccgc

SEQ ID NO: 1108038 - DNA, 15 bp, Homo sapiens
aaacactctgctccg

SEQ ID NO: 1108039 - DNA, 15 bp, Homo sapiens
gaaacactctgctcc

SEQ ID NO: 1108040 - DNA, 15 bp, Homo sapiens
ggaaacactctgctc

SEQ ID NO: 1108041 - DNA, 15 bp, Homo sapiens
aggaaacactctgct

SEQ ID NO: 1108042 - DNA, 15 bp, Homo sapiens
caggaaacactctgc

SEQ ID NO: 1108043 - DNA, 15 bp, Homo sapiens
tcaggaaacactctg

SEQ ID NO: 1108044 - DNA, 15 bp, Homo sapiens
gtcaggaaacactct

SEQ ID NO: 1108045 - DNA, 15 bp, Homo sapiens
agtcaggaaacactc

SEQ ID NO: 1108046 - DNA, 15 bp, Homo sapiens
gagtcaggaaacact

SEQ ID NO: 1108047 - DNA, 15 bp, Homo sapiens
ggagtcaggaaacac

SEQ ID NO: 1108048 - DNA, 15 bp, Homo sapiens
aggagtcaggaaaca

SEQ ID NO: 1108049 - DNA, 15 bp, Homo sapiens
gaggagtcaggaaac

SEQ ID NO: 1108050 - DNA, 15 bp, Homo sapiens
cgaggagtcaggaaa

SEQ ID NO: 1108051 - DNA, 15 bp, Homo sapiens
tcgaggagtcaggaa

SEQ ID NO: 1108052 - DNA, 15 bp, Homo sapiens
ttcgaggagtcagga

SEQ ID NO: 1108053 - DNA, 15 bp, Homo sapiens
cttcgaggagtcagg

SEQ ID NO: 1108054 - DNA, 15 bp, Homo sapiens
ccttcgaggagtcag

SEQ ID NO: 1108055 - DNA, 15 bp, Homo sapiens
tccttcgaggagtca

SEQ ID NO: 1108056 - DNA, 15 bp, Homo sapiens
ttccttcgaggagtc

SEQ ID NO: 1108057 - DNA, 15 bp, Homo sapiens
tttccttcgaggagt

SEQ ID NO: 1108058 - DNA, 15 bp, Homo sapiens
ctttccttcgaggag

SEQ ID NO: 1108059 - DNA, 15 bp, Homo sapiens
cctttccttcgagga

SEQ ID NO: 1108060 - DNA, 15 bp, Homo sapiens
tcctttccttcgagg

SEQ ID NO: 1108061 - DNA, 15 bp, Homo sapiens
ctcctttccttcgag

SEQ ID NO: 1108062 - DNA, 15 bp, Homo sapiens
tctcctttccttcga

SEQ ID NO: 1108063 - DNA, 15 bp, Homo sapiens
gtctcctttccttcg

SEQ ID NO: 1108064 - DNA, 15 bp, Homo sapiens
agtctcctttccttc

SEQ ID NO: 1108065 - DNA, 15 bp, Homo sapiens
gagtctcctttcctt

SEQ ID NO: 1108066 - DNA, 15 bp, Homo sapiens
ggagtctcctttcct

SEQ ID NO: 1108067 - DNA, 15 bp, Homo sapiens
gggagtctcctttcc

SEQ ID NO: 1108068 - DNA, 15 bp, Homo sapiens
agggagtctcctttc

SEQ ID NO: 1108069 - DNA, 15 bp, Homo sapiens
aagggagtctccttt

SEQ ID NO: 1108070 - DNA, 15 bp, Homo sapiens
aaagggagtctcctt

SEQ ID NO: 1108071 - DNA, 15 bp, Homo sapiens
gaaagggagtctcct

SEQ ID NO: 1108072 - DNA, 15 bp, Homo sapiens
agaaagggagtctcc

SEQ ID NO: 1108073 - DNA, 15 bp, Homo sapiens
aagaaagggagtctc

SEQ ID NO: 1108074 - DNA, 15 bp, Homo sapiens
caagaaagggagtct

SEQ ID NO: 1108075 - DNA, 15 bp, Homo sapiens
ccaagaaagggagtc

SEQ ID NO: 1108076 - DNA, 15 bp, Homo sapiens
accaagaaagggagt

SEQ ID NO: 1108077 - DNA, 15 bp, Homo sapiens
gaccaagaaagggag

SEQ ID NO: 1108078 - DNA, 15 bp, Homo sapiens
agaccaagaaaggga

SEQ ID NO: 1108079 - DNA, 15 bp, Homo sapiens
cagaccaagaaaggg

SEQ ID NO: 1108080 - DNA, 15 bp, Homo sapiens
gcagaccaagaaagg

SEQ ID NO: 1108081 - DNA, 15 bp, Homo sapiens
agcagaccaagaaag

SEQ ID NO: 1108082 - DNA, 15 bp, Homo sapiens
tagcagaccaagaaa

SEQ ID NO: 1108083 - DNA, 15 bp, Homo sapiens
ttagcagaccaagaa

SEQ ID NO: 1108084 - DNA, 15 bp, Homo sapiens
cttagcagaccaaga

SEQ ID NO: 1108085 - DNA, 15 bp, Homo sapiens
acttagcagaccaag

SEQ ID NO: 1108086 - DNA, 15 bp, Homo sapiens
tacttagcagaccaa

SEQ ID NO: 1108087 - DNA, 15 bp, Homo sapiens
ctacttagcagacca

SEQ ID NO: 1108088 - DNA, 15 bp, Homo sapiens
gctacttagcagacc

SEQ ID NO: 1108089 - DNA, 15 bp, Homo sapiens
cgctacttagcagac

SEQ ID NO: 1108090 - DNA, 15 bp, Homo sapiens
ccgctacttagcaga

SEQ ID NO: 1108091 - DNA, 15 bp, Homo sapiens
cccgctacttagcag

SEQ ID NO: 1108092 - DNA, 15 bp, Homo sapiens
acccgctacttagca

SEQ ID NO: 1108093 - DNA, 15 bp, Homo sapiens
cacccgctacttagc

SEQ ID NO: 1108094 - DNA, 15 bp, Homo sapiens
gcacccgctacttag

SEQ ID NO: 1108095 - DNA, 15 bp, Homo sapiens
ggcacccgctactta

SEQ ID NO: 1108096 - DNA, 15 bp, Homo sapiens
aggcacccgctactt

SEQ ID NO: 1108097 - DNA, 15 bp, Homo sapiens
aaggcacccgctact

SEQ ID NO: 1108098 - DNA, 15 bp, Homo sapiens
gaaggcacccgctac

SEQ ID NO: 1108099 - DNA, 15 bp, Homo sapiens
ggaaggcacccgcta

SEQ ID NO: 1108100 - DNA, 15 bp, Homo sapiens
gggaaggcacccgct

SEQ ID NO: 1108101 - DNA, 15 bp, Homo sapiens
tgggaaggcacccgc

SEQ ID NO: 1108102 - DNA, 15 bp, Homo sapiens
ctgggaaggcacccg

SEQ ID NO: 1108103 - DNA, 15 bp, Homo sapiens
cctgggaaggcaccc

SEQ ID NO: 1108104 - DNA, 15 bp, Homo sapiens
gcctgggaaggcacc

SEQ ID NO: 1108105 - DNA, 15 bp, Homo sapiens
tgcctgggaaggcac

SEQ ID NO: 1108106 - DNA, 15 bp, Homo sapiens
gtgcctgggaaggca

SEQ ID NO: 1108107 - DNA, 15 bp, Homo sapiens
agtgcctgggaaggc

SEQ ID NO: 1108108 - DNA, 15 bp, Homo sapiens
cagtgcctgggaagg

SEQ ID NO: 1108109 - DNA, 15 bp, Homo sapiens
ccagtgcctgggaag

SEQ ID NO: 1108110 - DNA, 15 bp, Homo sapiens
gccagtgcctgggaa

SEQ ID NO: 1108111 - DNA, 15 bp, Homo sapiens
cgccagtgcctggga

SEQ ID NO: 1108112 - DNA, 15 bp, Homo sapiens
acgccagtgcctggg

SEQ ID NO: 1108113 - DNA, 15 bp, Homo sapiens
aacgccagtgcctgg

SEQ ID NO: 1108114 - DNA, 15 bp, Homo sapiens
taacgccagtgcctg

SEQ ID NO: 1108115 - DNA, 15 bp, Homo sapiens
gtaacgccagtgcct

SEQ ID NO: 1108116 - DNA, 15 bp, Homo sapiens
ggtaacgccagtgcc

SEQ ID NO: 1108117 - DNA, 15 bp, Homo sapiens
cggtaacgccagtgc

SEQ ID NO: 1108118 - DNA, 15 bp, Homo sapiens
gcggtaacgccagtg

SEQ ID NO: 1108119 - DNA, 15 bp, Homo sapiens
agcggtaacgccagt

SEQ ID NO: 1108120 - DNA, 15 bp, Homo sapiens
aagcggtaacgccag

SEQ ID NO: 1108121 - DNA, 15 bp, Homo sapiens
caagcggtaacgcca

SEQ ID NO: 1108122 - DNA, 15 bp, Homo sapiens
tcaagcggtaacgcc

SEQ ID NO: 1108123 - DNA, 15 bp, Homo sapiens
gtcaagcggtaacgc

SEQ ID NO: 1108124 - DNA, 15 bp, Homo sapiens
ggtcaagcggtaacg

SEQ ID NO: 1108125 - DNA, 15 bp, Homo sapiens
tggtcaagcggtaac

SEQ ID NO: 1108126 - DNA, 15 bp, Homo sapiens
ttggtcaagcggtaa

SEQ ID NO: 1108127 - DNA, 15 bp, Homo sapiens
cttggtcaagcggta

SEQ ID NO: 1108128 - DNA, 15 bp, Homo sapiens
ccttggtcaagcggt

SEQ ID NO: 1108129 - DNA, 15 bp, Homo sapiens
tccttggtcaagcgg

SEQ ID NO: 1108130 - DNA, 15 bp, Homo sapiens
ctccttggtcaagcg

SEQ ID NO: 1108131 - DNA, 15 bp, Homo sapiens
gctccttggtcaagc

SEQ ID NO: 1108132 - DNA, 15 bp, Homo sapiens
ggctccttggtcaag

SEQ ID NO: 1108133 - DNA, 15 bp, Homo sapiens
gggctccttggtcaa

SEQ ID NO: 1108134 - DNA, 15 bp, Homo sapiens
agggctccttggtca

SEQ ID NO: 1108135 - DNA, 15 bp, Homo sapiens
gagggctccttggtc

SEQ ID NO: 1108136 - DNA, 15 bp, Homo sapiens
tgagggctccttggt

SEQ ID NO: 1108137 - DNA, 15 bp, Homo sapiens
ttgagggctccttgg

SEQ ID NO: 1108138 - DNA, 15 bp, Homo sapiens
cttgagggctccttg

SEQ ID NO: 1108139 - DNA, 15 bp, Homo sapiens
gcttgagggctcctt

SEQ ID NO: 1108140 - DNA, 15 bp, Homo sapiens
cgcttgagggctcct

SEQ ID NO: 1108141 - DNA, 15 bp, Homo sapiens
ccgcttgagggctcc

SEQ ID NO: 1108142 - DNA, 15 bp, Homo sapiens
gccgcttgagggctc

SEQ ID NO: 1108143 - DNA, 15 bp, Homo sapiens
ggccgcttgagggct

SEQ ID NO: 1108144 - DNA, 15 bp, Homo sapiens
gggccgcttgagggc

SEQ ID NO: 1108145 - DNA, 15 bp, Homo sapiens
agggccgcttgaggg

SEQ ID NO: 1108146 - DNA, 15 bp, Homo sapiens
aagggccgcttgagg

SEQ ID NO: 1108147 - DNA, 15 bp, Homo sapiens
taagggccgcttgag

SEQ ID NO: 1108148 - DNA, 15 bp, Homo sapiens
ataagggccgcttga

SEQ ID NO: 1108149 - DNA, 15 bp, Homo sapiens
cataagggccgcttg

SEQ ID NO: 1108150 - DNA, 15 bp, Homo sapiens
tcataagggccgctt

SEQ ID NO: 1108151 - DNA, 15 bp, Homo sapiens
ctcataagggccgct

SEQ ID NO: 1108152 - DNA, 15 bp, Homo sapiens
cctcataagggccgc

SEQ ID NO: 1108153 - DNA, 15 bp, Homo sapiens
ccctcataagggccg

SEQ ID NO: 1108154 - DNA, 15 bp, Homo sapiens
gccctcataagggcc

SEQ ID NO: 1108155 - DNA, 15 bp, Homo sapiens
cgccctcataagggc

SEQ ID NO: 1108156 - DNA, 15 bp, Homo sapiens
acgccctcataaggg

SEQ ID NO: 1108157 - DNA, 15 bp, Homo sapiens
cacgccctcataagg

SEQ ID NO: 1108158 - DNA, 15 bp, Homo sapiens
tcacgccctcataag

SEQ ID NO: 1108159 - DNA, 15 bp, Homo sapiens
gtcacgccctcataa

SEQ ID NO: 1108160 - DNA, 15 bp, Homo sapiens
tgtcacgccctcata

SEQ ID NO: 1108161 - DNA, 15 bp, Homo sapiens
ctgtcacgccctcat

SEQ ID NO: 1108162 - DNA, 15 bp, Homo sapiens
tctgtcacgccctca

SEQ ID NO: 1108163 - DNA, 15 bp, Homo sapiens
ctctgtcacgccctc

SEQ ID NO: 1108164 - DNA, 15 bp, Homo sapiens
cctctgtcacgccct

SEQ ID NO: 1108165 - DNA, 15 bp, Homo sapiens
ccctctgtcacgccc

SEQ ID NO: 1108166 - DNA, 15 bp, Homo sapiens
gccctctgtcacgcc

SEQ ID NO: 1108167 - DNA, 15 bp, Homo sapiens
agccctctgtcacgc

SEQ ID NO: 1108168 - DNA, 15 bp, Homo sapiens
gagccctctgtcacg

SEQ ID NO: 1108169 - DNA, 15 bp, Homo sapiens
tgagccctctgtcac

SEQ ID NO: 1108170 - DNA, 15 bp, Homo sapiens
gtgagccctctgtca

SEQ ID NO: 1108171 - DNA, 15 bp, Homo sapiens
ggtgagccctctgtc

SEQ ID NO: 1108172 - DNA, 15 bp, Homo sapiens
aggtgagccctctgt

SEQ ID NO: 1108173 - DNA, 15 bp, Homo sapiens
gaggtgagccctctg

SEQ ID NO: 1108174 - DNA, 15 bp, Homo sapiens
agaggtgagccctct

SEQ ID NO: 1108175 - DNA, 15 bp, Homo sapiens
aagaggtgagccctc

SEQ ID NO: 1108176 - DNA, 15 bp, Homo sapiens
caagaggtgagccct

SEQ ID NO: 1108177 - DNA, 15 bp, Homo sapiens
gcaagaggtgagccc

SEQ ID NO: 1108178 - DNA, 15 bp, Homo sapiens
ggcaagaggtgagcc

SEQ ID NO: 1108179 - DNA, 15 bp, Homo sapiens
aggcaagaggtgagc

SEQ ID NO: 1108180 - DNA, 15 bp, Homo sapiens
aaggcaagaggtgag

SEQ ID NO: 1108181 - DNA, 15 bp, Homo sapiens
gaaggcaagaggtga

SEQ ID NO: 1108182 - DNA, 15 bp, Homo sapiens
agaaggcaagaggtg

SEQ ID NO: 1108183 - DNA, 15 bp, Homo sapiens
aagaaggcaagaggt

SEQ ID NO: 1108184 - DNA, 15 bp, Homo sapiens
caagaaggcaagagg

SEQ ID NO: 1108185 - DNA, 15 bp, Homo sapiens
ccaagaaggcaagag

SEQ ID NO: 1108186 - DNA, 15 bp, Homo sapiens
accaagaaggcaaga

SEQ ID NO: 1108187 - DNA, 15 bp, Homo sapiens
gaccaagaaggcaag

SEQ ID NO: 1108188 - DNA, 15 bp, Homo sapiens
tgaccaagaaggcaa

SEQ ID NO: 1108189 - DNA, 15 bp, Homo sapiens
gtgaccaagaaggca

SEQ ID NO: 1108190 - DNA, 15 bp, Homo sapiens
agtgaccaagaaggc

SEQ ID NO: 1108191 - DNA, 15 bp, Homo sapiens
aagtgaccaagaagg

SEQ ID NO: 1108192 - DNA, 15 bp, Homo sapiens
gaagtgaccaagaag

SEQ ID NO: 1108193 - DNA, 15 bp, Homo sapiens
agaagtgaccaagaa

SEQ ID NO: 1108194 - DNA, 15 bp, Homo sapiens
gagaagtgaccaaga

SEQ ID NO: 1108195 - DNA, 15 bp, Homo sapiens
tgagaagtgaccaag

SEQ ID NO: 1108196 - DNA, 15 bp, Homo sapiens
atgagaagtgaccaa

SEQ ID NO: 1108197 - DNA, 15 bp, Homo sapiens
tatgagaagtgacca

SEQ ID NO: 1108198 - DNA, 15 bp, Homo sapiens
ttatgagaagtgacc

SEQ ID NO: 1108199 - DNA, 15 bp, Homo sapiens
attatgagaagtgac

SEQ ID NO: 1108200 - DNA, 15 bp, Homo sapiens
cattatgagaagtga

SEQ ID NO: 1108201 - DNA, 15 bp, Homo sapiens
acattatgagaagtg

SEQ ID NO: 1108202 - DNA, 15 bp, Homo sapiens
gacattatgagaagt

SEQ ID NO: 1108203 - DNA, 15 bp, Homo sapiens
ggacattatgagaag

SEQ ID NO: 1108204 - DNA, 15 bp, Homo sapiens
gggacattatgagaa

SEQ ID NO: 1108205 - DNA, 15 bp, Homo sapiens
agggacattatgaga

SEQ ID NO: 1108206 - DNA, 15 bp, Homo sapiens
aagggacattatgag

SEQ ID NO: 1108207 - DNA, 15 bp, Homo sapiens
gaagggacattatga

SEQ ID NO: 1108208 - DNA, 15 bp, Homo sapiens
tgaagggacattatg

SEQ ID NO: 1108209 - DNA, 15 bp, Homo sapiens
ctgaagggacattat

SEQ ID NO: 1108210 - DNA, 15 bp, Homo sapiens
gctgaagggacatta

SEQ ID NO: 1108211 - DNA, 15 bp, Homo sapiens
tgctgaagggacatt

SEQ ID NO: 1108212 - DNA, 15 bp, Homo sapiens
gtgctgaagggacat

SEQ ID NO: 1108213 - DNA, 15 bp, Homo sapiens
ggtgctgaagggaca

SEQ ID NO: 1108214 - DNA, 15 bp, Homo sapiens
aggtgctgaagggac

SEQ ID NO: 1108215 - DNA, 15 bp, Homo sapiens
caggtgctgaaggga

SEQ ID NO: 1108216 - DNA, 15 bp, Homo sapiens
tcaggtgctgaaggg

SEQ ID NO: 1108217 - DNA, 15 bp, Homo sapiens
gtcaggtgctgaagg

SEQ ID NO: 1108218 - DNA, 15 bp, Homo sapiens
ggtcaggtgctgaag

SEQ ID NO: 1108219 - DNA, 15 bp, Homo sapiens
gggtcaggtgctgaa

SEQ ID NO: 1108220 - DNA, 15 bp, Homo sapiens
agggtcaggtgctga

SEQ ID NO: 1108221 - DNA, 15 bp, Homo sapiens
tagggtcaggtgctg

SEQ ID NO: 1108222 - DNA, 15 bp, Homo sapiens
atagggtcaggtgct

SEQ ID NO: 1108223 - DNA, 15 bp, Homo sapiens
tatagggtcaggtgc

SEQ ID NO: 1108224 - DNA, 15 bp, Homo sapiens
gtatagggtcaggtg

SEQ ID NO: 1108225 - DNA, 15 bp, Homo sapiens
ggtatagggtcaggt

SEQ ID NO: 1108226 - DNA, 15 bp, Homo sapiens
gggtatagggtcagg

SEQ ID NO: 1108227 - DNA, 15 bp, Homo sapiens
agggtatagggtcag

SEQ ID NO: 1108228 - DNA, 15 bp, Homo sapiens
gagggtatagggtca

SEQ ID NO: 1108229 - DNA, 15 bp, Homo sapiens
ggagggtatagggtc

SEQ ID NO: 1108230 - DNA, 15 bp, Homo sapiens
cggagggtatagggt

SEQ ID NO: 1108231 - DNA, 15 bp, Homo sapiens
ccggagggtataggg

SEQ ID NO: 1108232 - DNA, 15 bp, Homo sapiens
accggagggtatagg

SEQ ID NO: 1108233 - DNA, 15 bp, Homo sapiens
aaccggagggtatag

SEQ ID NO: 1108234 - DNA, 15 bp, Homo sapiens
taaccggagggtata

SEQ ID NO: 1108235 - DNA, 15 bp, Homo sapiens
ataaccggagggtat

SEQ ID NO: 1108236 - DNA, 15 bp, Homo sapiens
aataaccggagggta

SEQ ID NO: 1108237 - DNA, 15 bp, Homo sapiens
gaataaccggagggt

SEQ ID NO: 1108238 - DNA, 15 bp, Homo sapiens
ggaataaccggaggg

SEQ ID NO: 1108239 - DNA, 15 bp, Homo sapiens
aggaataaccggagg

SEQ ID NO: 1108240 - DNA, 15 bp, Homo sapiens
aaggaataaccggag

SEQ ID NO: 1108241 - DNA, 15 bp, Homo sapiens
caaggaataaccgga

SEQ ID NO: 1108242 - DNA, 15 bp, Homo sapiens
ccaaggaataaccgg

SEQ ID NO: 1108243 - DNA, 15 bp, Homo sapiens
accaaggaataaccg

SEQ ID NO: 1108244 - DNA, 15 bp, Homo sapiens
aaccaaggaataacc

SEQ ID NO: 1108245 - DNA, 15 bp, Homo sapiens
taaccaaggaataac

SEQ ID NO: 1108246 - DNA, 15 bp, Homo sapiens
ataaccaaggaataa

SEQ ID NO: 1108247 - DNA, 15 bp, Homo sapiens
tataaccaaggaata

SEQ ID NO: 1108248 - DNA, 15 bp, Homo sapiens
atataaccaaggaat

SEQ ID NO: 1108249 - DNA, 15 bp, Homo sapiens
aatataaccaaggaa

SEQ ID NO: 1108250 - DNA, 15 bp, Homo sapiens
taatataaccaagga

SEQ ID NO: 1108251 - DNA, 15 bp, Homo sapiens
ctaatataaccaagg

SEQ ID NO: 1108252 - DNA, 15 bp, Homo sapiens
actaatataaccaag

SEQ ID NO: 1108253 - DNA, 15 bp, Homo sapiens
tactaatataaccaa

SEQ ID NO: 1108254 - DNA, 15 bp, Homo sapiens
ttactaatataacca

SEQ ID NO: 1108255 - DNA, 15 bp, Homo sapiens
attactaatataacc

SEQ ID NO: 1108256 - DNA, 15 bp, Homo sapiens
tattactaatataac

SEQ ID NO: 1108257 - DNA, 15 bp, Homo sapiens
gtattactaatataa

SEQ ID NO: 1108258 - DNA, 15 bp, Homo sapiens
tgtattactaatata

SEQ ID NO: 1108259 - DNA, 15 bp, Homo sapiens
ttgtattactaatat

SEQ ID NO: 1108260 - DNA, 15 bp, Homo sapiens
gttgtattactaata

SEQ ID NO: 1108261 - DNA, 15 bp, Homo sapiens
tgttgtattactaat

SEQ ID NO: 1108262 - DNA, 15 bp, Homo sapiens
ttgttgtattactaa

SEQ ID NO: 1108263 - DNA, 15 bp, Homo sapiens
tttgttgtattacta

SEQ ID NO: 1108264 - DNA, 15 bp, Homo sapiens
ctttgttgtattact

SEQ ID NO: 1108265 - DNA, 15 bp, Homo sapiens
tctttgttgtattac

SEQ ID NO: 1108266 - DNA, 15 bp, Homo sapiens
ctctttgttgtatta

SEQ ID NO: 1108267 - DNA, 15 bp, Homo sapiens
actctttgttgtatt

SEQ ID NO: 1108268 - DNA, 15 bp, Homo sapiens
gactctttgttgtat

SEQ ID NO: 1108269 - DNA, 15 bp, Homo sapiens
tgactctttgttgta

SEQ ID NO: 1108270 - DNA, 15 bp, Homo sapiens
atgactctttgttgt

SEQ ID NO: 1108271 - DNA, 15 bp, Homo sapiens
tatgactctttgttg

SEQ ID NO: 1108272 - DNA, 15 bp, Homo sapiens
atatgactctttgtt

SEQ ID NO: 1108273 - DNA, 15 bp, Homo sapiens
aatatgactctttgt

SEQ ID NO: 1108274 - DNA, 15 bp, Homo sapiens
taatatgactctttg

SEQ ID NO: 1108275 - DNA, 15 bp, Homo sapiens
ttaatatgactcttt

SEQ ID NO: 1108276 - DNA, 15 bp, Homo sapiens
tttaatatgactctt

SEQ ID NO: 1108277 - DNA, 15 bp, Homo sapiens
ctttaatatgactct

SEQ ID NO: 1108278 - DNA, 15 bp, Homo sapiens
cctttaatatgactc

SEQ ID NO: 1108279 - DNA, 15 bp, Homo sapiens
gcctttaatatgact

SEQ ID NO: 1108280 - DNA, 15 bp, Homo sapiens
agcctttaatatgac

SEQ ID NO: 1108281 - DNA, 15 bp, Homo sapiens
tagcctttaatatga

SEQ ID NO: 1108282 - DNA, 15 bp, Homo sapiens
ttagcctttaatatg

SEQ ID NO: 1108283 - DNA, 15 bp, Homo sapiens
attagcctttaatat

SEQ ID NO: 1108284 - DNA, 15 bp, Homo sapiens
tattagcctttaata

SEQ ID NO: 1108285 - DNA, 15 bp, Homo sapiens
ttattagcctttaat

SEQ ID NO: 1108286 - DNA, 15 bp, Homo sapiens
attattagcctttaa

SEQ ID NO: 1108287 - DNA, 15 bp, Homo sapiens
aattattagccttta

SEQ ID NO: 1108288 - DNA, 15 bp, Homo sapiens
taattattagccttt

SEQ ID NO: 1108289 - DNA, 15 bp, Homo sapiens
ttaattattagcctt

SEQ ID NO: 1108290 - DNA, 15 bp, Homo sapiens
attaattattagcct

SEQ ID NO: 1108291 - DNA, 15 bp, Homo sapiens
tattaattattagcc

SEQ ID NO: 1108292 - DNA, 15 bp, Homo sapiens
ttattaattattagc

SEQ ID NO: 1108293 - DNA, 15 bp, Homo sapiens
attattaattattag

SEQ ID NO: 1108294 - DNA, 15 bp, Homo sapiens
cattattaattatta

SEQ ID NO: 1108295 - DNA, 15 bp, Homo sapiens
acattattaattatt

SEQ ID NO: 1108296 - DNA, 15 bp, Homo sapiens
gacattattaattat

SEQ ID NO: 1108297 - DNA, 15 bp, Homo sapiens
agacattattaatta

SEQ ID NO: 1108298 - DNA, 15 bp, Homo sapiens
tagacattattaatt

SEQ ID NO: 1108299 - DNA, 15 bp, Homo sapiens
atagacattattaat

SEQ ID NO: 1108300 - DNA, 15 bp, Homo sapiens
tatagacattattaa

SEQ ID NO: 1108301 - DNA, 15 bp, Homo sapiens
gtatagacattatta

SEQ ID NO: 1108302 - DNA, 15 bp, Homo sapiens
agtatagacattatt

SEQ ID NO: 1108303 - DNA, 15 bp, Homo sapiens
tagtatagacattat

SEQ ID NO: 1108304 - DNA, 15 bp, Homo sapiens
ttagtatagacatta

SEQ ID NO: 1108305 - DNA, 15 bp, Homo sapiens
attagtatagacatt

SEQ ID NO: 1108306 - DNA, 15 bp, Homo sapiens
cattagtatagacat

SEQ ID NO: 1108307 - DNA, 15 bp, Homo sapiens
tcattagtatagaca

SEQ ID NO: 1108308 - DNA, 15 bp, Homo sapiens
atcattagtatagac

SEQ ID NO: 1108309 - DNA, 15 bp, Homo sapiens
aatcattagtataga

SEQ ID NO: 1108310 - DNA, 15 bp, Homo sapiens
caatcattagtatag

SEQ ID NO: 1108311 - DNA, 15 bp, Homo sapiens
tcaatcattagtata

SEQ ID NO: 1108312 - DNA, 15 bp, Homo sapiens
atcaatcattagtat

SEQ ID NO: 1108313 - DNA, 15 bp, Homo sapiens
tatcaatcattagta

SEQ ID NO: 1108314 - DNA, 15 bp, Homo sapiens
ttatcaatcattagt

SEQ ID NO: 1108315 - DNA, 15 bp, Homo sapiens
attatcaatcattag

SEQ ID NO: 1108316 - DNA, 15 bp, Homo sapiens
cattatcaatcatta

SEQ ID NO: 1108317 - DNA, 15 bp, Homo sapiens
gcattatcaatcatt

SEQ ID NO: 1108318 - DNA, 15 bp, Homo sapiens
ggcattatcaatcat

SEQ ID NO: 1108319 - DNA, 15 bp, Homo sapiens
gggcattatcaatca

SEQ ID NO: 1108320 - DNA, 15 bp, Homo sapiens
tgggcattatcaatc

SEQ ID NO: 1108321 - DNA, 15 bp, Homo sapiens
atgggcattatcaat

SEQ ID NO: 1108322 - DNA, 15 bp, Homo sapiens
catgggcattatcaa

SEQ ID NO: 1108323 - DNA, 15 bp, Homo sapiens
tcatgggcattatca

SEQ ID NO: 1108324 - DNA, 15 bp, Homo sapiens
gtcatgggcattatc

SEQ ID NO: 1108325 - DNA, 15 bp, Homo sapiens
ggtcatgggcattat

SEQ ID NO: 1108326 - DNA, 15 bp, Homo sapiens
tggtcatgggcatta

SEQ ID NO: 1108327 - DNA, 15 bp, Homo sapiens
atggtcatgggcatt

SEQ ID NO: 1108328 - DNA, 15 bp, Homo sapiens
gatggtcatgggcat

SEQ ID NO: 1108329 - DNA, 15 bp, Homo sapiens
agatggtcatgggca

SEQ ID NO: 1108330 - DNA, 15 bp, Homo sapiens
gagatggtcatgggc

SEQ ID NO: 1108331 - DNA, 15 bp, Homo sapiens
agagatggtcatggg

SEQ ID NO: 1108332 - DNA, 15 bp, Homo sapiens
tagagatggtcatgg

SEQ ID NO: 1108333 - DNA, 15 bp, Homo sapiens
atagagatggtcatg

SEQ ID NO: 1108334 - DNA, 15 bp, Homo sapiens
tatagagatggtcat

SEQ ID NO: 1108335 - DNA, 15 bp, Homo sapiens
atatagagatggtca

SEQ ID NO: 1108336 - DNA, 15 bp, Homo sapiens
gatatagagatggtc

SEQ ID NO: 1108337 - DNA, 15 bp, Homo sapiens
agatatagagatggt

SEQ ID NO: 1108338 - DNA, 15 bp, Homo sapiens
tagatatagagatgg

SEQ ID NO: 1108339 - DNA, 15 bp, Homo sapiens
ttagatatagagatg

SEQ ID NO: 1108340 - DNA, 15 bp, Homo sapiens
attagatatagagat

SEQ ID NO: 1108341 - DNA, 15 bp, Homo sapiens
aattagatatagaga

SEQ ID NO: 1108342 - DNA, 15 bp, Homo sapiens
aaattagatatagag

SEQ ID NO: 1108343 - DNA, 15 bp, Homo sapiens
caaattagatataga

SEQ ID NO: 1108344 - DNA, 15 bp, Homo sapiens
acaaattagatatag

SEQ ID NO: 1108345 - DNA, 15 bp, Homo sapiens
tacaaattagatata

SEQ ID NO: 1108346 - DNA, 15 bp, Homo sapiens
atacaaattagatat

SEQ ID NO: 1108347 - DNA, 15 bp, Homo sapiens
aatacaaattagata

SEQ ID NO: 1108348 - DNA, 15 bp, Homo sapiens
taatacaaattagat

SEQ ID NO: 1108349 - DNA, 15 bp, Homo sapiens
ataatacaaattaga

SEQ ID NO: 1108350 - DNA, 15 bp, Homo sapiens
tataatacaaattag

SEQ ID NO: 1108351 - DNA, 15 bp, Homo sapiens
ttataatacaaatta

SEQ ID NO: 1108352 - DNA, 15 bp, Homo sapiens
gttataatacaaatt

SEQ ID NO: 1108353 - DNA, 15 bp, Homo sapiens
agttataatacaaat

SEQ ID NO: 1108354 - DNA, 15 bp, Homo sapiens
tagttataatacaaa

SEQ ID NO: 1108355 - DNA, 15 bp, Homo sapiens
atagttataatacaa

SEQ ID NO: 1108356 - DNA, 15 bp, Homo sapiens
aatagttataataca

SEQ ID NO: 1108357 - DNA, 15 bp, Homo sapiens
gaatagttataatac

SEQ ID NO: 1108358 - DNA, 15 bp, Homo sapiens
agaatagttataata

SEQ ID NO: 1108359 - DNA, 15 bp, Homo sapiens
gagaatagttataat

SEQ ID NO: 1108360 - DNA, 15 bp, Homo sapiens
tgagaatagttataa

SEQ ID NO: 1108361 - DNA, 15 bp, Homo sapiens
atgagaatagttata

SEQ ID NO: 1108362 - DNA, 15 bp, Homo sapiens
aatgagaatagttat

SEQ ID NO: 1108363 - DNA, 15 bp, Homo sapiens
gaatgagaatagtta

SEQ ID NO: 1108364 - DNA, 15 bp, Homo sapiens
agaatgagaatagtt

SEQ ID NO: 1108365 - DNA, 15 bp, Homo sapiens
tagaatgagaatagt

SEQ ID NO: 1108366 - DNA, 15 bp, Homo sapiens
ttagaatgagaatag

SEQ ID NO: 1108367 - DNA, 15 bp, Homo sapiens
gttagaatgagaata

SEQ ID NO: 1108368 - DNA, 15 bp, Homo sapiens
agttagaatgagaat

SEQ ID NO: 1108369 - DNA, 15 bp, Homo sapiens
tagttagaatgagaa

SEQ ID NO: 1108370 - DNA, 15 bp, Homo sapiens
atagttagaatgaga

SEQ ID NO: 1108371 - DNA, 15 bp, Homo sapiens
aatagttagaatgag

SEQ ID NO: 1108372 - DNA, 15 bp, Homo sapiens
aaatagttagaatga

SEQ ID NO: 1108373 - DNA, 15 bp, Homo sapiens
aaaatagttagaatg

SEQ ID NO: 1108374 - DNA, 15 bp, Homo sapiens
gaaaatagttagaat

SEQ ID NO: 1108375 - DNA, 15 bp, Homo sapiens
agaaaatagttagaa

SEQ ID NO: 1108376 - DNA, 15 bp, Homo sapiens
aagaaaatagttaga

SEQ ID NO: 1108377 - DNA, 15 bp, Homo sapiens
aaagaaaatagttag

SEQ ID NO: 1108378 - DNA, 15 bp, Homo sapiens
taaagaaaatagtta

SEQ ID NO: 1108379 - DNA, 15 bp, Homo sapiens
taataaagaaaatag

SEQ ID NO: 1108380 - DNA, 15 bp, Homo sapiens
ataataaagaaaata

SEQ ID NO: 1108381 - DNA, 15 bp, Homo sapiens
tataataaagaaaat

SEQ ID NO: 1108382 - DNA, 15 bp, Homo sapiens
gtataataaagaaaa

SEQ ID NO: 1108383 - DNA, 15 bp, Homo sapiens
agtataataaagaaa

SEQ ID NO: 1108384 - DNA, 15 bp, Homo sapiens
cagtataataaagaa

SEQ ID NO: 1108385 - DNA, 15 bp, Homo sapiens
tcagtataataaaga

SEQ ID NO: 1108386 - DNA, 15 bp, Homo sapiens
ttcagtataataaag

SEQ ID NO: 1108387 - DNA, 15 bp, Homo sapiens
tttcagtataataaa

SEQ ID NO: 1108388 - DNA, 15 bp, Homo sapiens
gtttcagtataataa

SEQ ID NO: 1108389 - DNA, 15 bp, Homo sapiens
tgtttcagtataata

SEQ ID NO: 1108390 - DNA, 15 bp, Homo sapiens
ctgtttcagtataat

SEQ ID NO: 1108391 - DNA, 15 bp, Homo sapiens
actgtttcagtataa

SEQ ID NO: 1108392 - DNA, 15 bp, Homo sapiens
gactgtttcagtata

SEQ ID NO: 1108393 - DNA, 15 bp, Homo sapiens
agactgtttcagtat

SEQ ID NO: 1108394 - DNA, 15 bp, Homo sapiens
cagactgtttcagta

SEQ ID NO: 1108395 - DNA, 15 bp, Homo sapiens
acagactgtttcagt

SEQ ID NO: 1108396 - DNA, 15 bp, Homo sapiens
cacagactgtttcag

SEQ ID NO: 1108397 - DNA, 15 bp, Homo sapiens
gcacagactgtttca

SEQ ID NO: 1108398 - DNA, 15 bp, Homo sapiens
ggcacagactgtttc

SEQ ID NO: 1108399 - DNA, 15 bp, Homo sapiens
aggcacagactgttt

SEQ ID NO: 1108400 - DNA, 15 bp, Homo sapiens
aaggcacagactgtt

SEQ ID NO: 1108401 - DNA, 15 bp, Homo sapiens
gaaggcacagactgt

SEQ ID NO: 1108402 - DNA, 15 bp, Homo sapiens
tgaaggcacagactg

SEQ ID NO: 1108403 - DNA, 15 bp, Homo sapiens
ttgaaggcacagact

SEQ ID NO: 1108404 - DNA, 15 bp, Homo sapiens
attgaaggcacagac

SEQ ID NO: 1108405 - DNA, 15 bp, Homo sapiens
gattgaaggcacaga

SEQ ID NO: 1108406 - DNA, 15 bp, Homo sapiens
agattgaaggcacag

SEQ ID NO: 1108407 - DNA, 15 bp, Homo sapiens
gagattgaaggcaca

SEQ ID NO: 1108408 - DNA, 15 bp, Homo sapiens
agagattgaaggcac

SEQ ID NO: 1108409 - DNA, 15 bp, Homo sapiens
aagagattgaaggca

SEQ ID NO: 1108410 - DNA, 15 bp, Homo sapiens
caagagattgaaggc

SEQ ID NO: 1108411 - DNA, 15 bp, Homo sapiens
gcaagagattgaagg

SEQ ID NO: 1108412 - DNA, 15 bp, Homo sapiens
ggcaagagattgaag

SEQ ID NO: 1108413 - DNA, 15 bp, Homo sapiens
aggcaagagattgaa

SEQ ID NO: 1108414 - DNA, 15 bp, Homo sapiens
gaggcaagagattga

SEQ ID NO: 1108415 - DNA, 15 bp, Homo sapiens
cgaggcaagagattg

SEQ ID NO: 1108416 - DNA, 15 bp, Homo sapiens
ccgaggcaagagatt

SEQ ID NO: 1108417 - DNA, 15 bp, Homo sapiens
gccgaggcaagagat

SEQ ID NO: 1108418 - DNA, 15 bp, Homo sapiens
tgccgaggcaagaga

SEQ ID NO: 1108419 - DNA, 15 bp, Homo sapiens
gtgccgaggcaagag

SEQ ID NO: 1108420 - DNA, 15 bp, Homo sapiens
ggtgccgaggcaaga

SEQ ID NO: 1108421 - DNA, 15 bp, Homo sapiens
aggtgccgaggcaag

SEQ ID NO: 1108422 - DNA, 15 bp, Homo sapiens
caggtgccgaggcaa

SEQ ID NO: 1108423 - DNA, 15 bp, Homo sapiens
ccaggtgccgaggca

SEQ ID NO: 1108424 - DNA, 15 bp, Homo sapiens
cccaggtgccgaggc

SEQ ID NO: 1108425 - DNA, 15 bp, Homo sapiens
acccaggtgccgagg

SEQ ID NO: 1108426 - DNA, 15 bp, Homo sapiens
tacccaggtgccgag

SEQ ID NO: 1108427 - DNA, 15 bp, Homo sapiens
ttacccaggtgccga

SEQ ID NO: 1108428 - DNA, 15 bp, Homo sapiens
attacccaggtgccg

SEQ ID NO: 1108429 - DNA, 15 bp, Homo sapiens
gattacccaggtgcc

SEQ ID NO: 1108430 - DNA, 15 bp, Homo sapiens
ggattacccaggtgc

SEQ ID NO: 1108431 - DNA, 15 bp, Homo sapiens
aggattacccaggtg

SEQ ID NO: 1108432 - DNA, 15 bp, Homo sapiens
gaggattacccaggt

SEQ ID NO: 1108433 - DNA, 15 bp, Homo sapiens
ggaggattacccagg

SEQ ID NO: 1108434 - DNA, 15 bp, Homo sapiens
cggaggattacccag

SEQ ID NO: 1108435 - DNA, 15 bp, Homo sapiens
gcggaggattaccca

SEQ ID NO: 1108436 - DNA, 15 bp, Homo sapiens
ggcggaggattaccc

SEQ ID NO: 1108437 - DNA, 15 bp, Homo sapiens
gggcggaggattacc

SEQ ID NO: 1108438 - DNA, 15 bp, Homo sapiens
tgggcggaggattac

SEQ ID NO: 1108439 - DNA, 15 bp, Homo sapiens
gtgggcggaggatta

SEQ ID NO: 1108440 - DNA, 15 bp, Homo sapiens
tgtgggcggaggatt

SEQ ID NO: 1108441 - DNA, 15 bp, Homo sapiens
ctgtgggcggaggat

SEQ ID NO: 1108442 - DNA, 15 bp, Homo sapiens
actgtgggcggagga

SEQ ID NO: 1108443 - DNA, 15 bp, Homo sapiens
cactgtgggcggagg

SEQ ID NO: 1108444 - DNA, 15 bp, Homo sapiens
tcactgtgggcggag

SEQ ID NO: 1108445 - DNA, 15 bp, Homo sapiens
gtcactgtgggcgga

SEQ ID NO: 1108446 - DNA, 15 bp, Homo sapiens
tgtcactgtgggcgg

SEQ ID NO: 1108447 - DNA, 15 bp, Homo sapiens
ttgtcactgtgggcg

SEQ ID NO: 1108448 - DNA, 15 bp, Homo sapiens
cttgtcactgtgggc

SEQ ID NO: 1108449 - DNA, 15 bp, Homo sapiens
tcttgtcactgtggg

SEQ ID NO: 1108450 - DNA, 15 bp, Homo sapiens
ctcttgtcactgtgg

SEQ ID NO: 1108451 - DNA, 15 bp, Homo sapiens
actcttgtcactgtg

SEQ ID NO: 1108452 - DNA, 15 bp, Homo sapiens
cactcttgtcactgt

SEQ ID NO: 1108453 - DNA, 15 bp, Homo sapiens
tcactcttgtcactg

SEQ ID NO: 1108454 - DNA, 15 bp, Homo sapiens
ttcactcttgtcact

SEQ ID NO: 1108455 - DNA, 15 bp, Homo sapiens
tttcactcttgtcac

SEQ ID NO: 1108456 - DNA, 15 bp, Homo sapiens
gtttcactcttgtca

SEQ ID NO: 1108457 - DNA, 15 bp, Homo sapiens
taagacagagtttca

SEQ ID NO: 1108458 - DNA, 15 bp, Homo sapiens
ttaagacagagtttc

SEQ ID NO: 1108459 - DNA, 15 bp, Homo sapiens
tttaagacagagttt

SEQ ID NO: 1108460 - DNA, 15 bp, Homo sapiens
ttttaagacagagtt

SEQ ID NO: 1108461 - DNA, 15 bp, Homo sapiens
tttttaagacagagt

SEQ ID NO: 1108462 - DNA, 15 bp, Homo sapiens
ttttttaagacagag

SEQ ID NO: 1108463 - DNA, 15 bp, Homo sapiens
tttttttaagacaga

SEQ ID NO: 1108464 - DNA, 15 bp, Homo sapiens
taattttttttttta

SEQ ID NO: 1108465 - DNA, 15 bp, Homo sapiens
cttaatttttttttt

SEQ ID NO: 1108466 - DNA, 15 bp, Homo sapiens
tcttaattttttttt

SEQ ID NO: 1108467 - DNA, 15 bp, Homo sapiens
ttcttaatttttttt

SEQ ID NO: 1108468 - DNA, 15 bp, Homo sapiens
attcttaattttttt

SEQ ID NO: 1108469 - DNA, 15 bp, Homo sapiens
aattcttaatttttt

SEQ ID NO: 1108470 - DNA, 15 bp, Homo sapiens
aaattcttaattttt

SEQ ID NO: 1108471 - DNA, 15 bp, Homo sapiens
gaaattcttaatttt

SEQ ID NO: 1108472 - DNA, 15 bp, Homo sapiens
tgaaattcttaattt

SEQ ID NO: 1108473 - DNA, 15 bp, Homo sapiens
ttgaaattcttaatt

SEQ ID NO: 1108474 - DNA, 15 bp, Homo sapiens
cttgaaattcttaat

SEQ ID NO: 1108475 - DNA, 15 bp, Homo sapiens
tcttgaaattcttaa

SEQ ID NO: 1108476 - DNA, 15 bp, Homo sapiens
atcttgaaattctta

SEQ ID NO: 1108477 - DNA, 15 bp, Homo sapiens
tatcttgaaattctt

SEQ ID NO: 1108478 - DNA, 15 bp, Homo sapiens
ctatcttgaaattct

SEQ ID NO: 1108479 - DNA, 15 bp, Homo sapiens
cctatcttgaaattc

SEQ ID NO: 1108480 - DNA, 15 bp, Homo sapiens
tcctatcttgaaatt

SEQ ID NO: 1108481 - DNA, 15 bp, Homo sapiens
gtcctatcttgaaat

SEQ ID NO: 1108482 - DNA, 15 bp, Homo sapiens
tgtcctatcttgaaa

SEQ ID NO: 1108483 - DNA, 15 bp, Homo sapiens
ctgtcctatcttgaa

SEQ ID NO: 1108484 - DNA, 15 bp, Homo sapiens
gctgtcctatcttga

SEQ ID NO: 1108485 - DNA, 15 bp, Homo sapiens
tgctgtcctatcttg

SEQ ID NO: 1108486 - DNA, 15 bp, Homo sapiens
ctgctgtcctatctt

SEQ ID NO: 1108487 - DNA, 15 bp, Homo sapiens
tctgctgtcctatct

SEQ ID NO: 1108488 - DNA, 15 bp, Homo sapiens
ctctgctgtcctatc

SEQ ID NO: 1108489 - DNA, 15 bp, Homo sapiens
gctctgctgtcctat

SEQ ID NO: 1108490 - DNA, 15 bp, Homo sapiens
agctctgctgtccta

SEQ ID NO: 1108491 - DNA, 15 bp, Homo sapiens
aagctctgctgtcct

SEQ ID NO: 1108492 - DNA, 15 bp, Homo sapiens
aaagctctgctgtcc

SEQ ID NO: 1108493 - DNA, 15 bp, Homo sapiens
taaagctctgctgtc

SEQ ID NO: 1108494 - DNA, 15 bp, Homo sapiens
ttaaagctctgctgt

SEQ ID NO: 1108495 - DNA, 15 bp, Homo sapiens
tttaaagctctgctg

SEQ ID NO: 1108496 - DNA, 15 bp, Homo sapiens
atttaaagctctgct

SEQ ID NO: 1108497 - DNA, 15 bp, Homo sapiens
aatttaaagctctgc

SEQ ID NO: 1108498 - DNA, 15 bp, Homo sapiens
aaatttaaagctctg

SEQ ID NO: 1108499 - DNA, 15 bp, Homo sapiens
aaaatttaaagctct

SEQ ID NO: 1108500 - DNA, 15 bp, Homo sapiens
aaaaatttaaagctc

SEQ ID NO: 1108501 - DNA, 15 bp, Homo sapiens
aaaaaatttaaagct

SEQ ID NO: 1108502 - DNA, 15 bp, Homo sapiens
aaaaaaatttaaagc

SEQ ID NO: 1108503 - DNA, 15 bp, Homo sapiens
aaaaaaaatttaaag

SEQ ID NO: 1108504 - DNA, 15 bp, Homo sapiens
gaaaaaaaaaaaatt

SEQ ID NO: 1108505 - DNA, 15 bp, Homo sapiens
ggaaaaaaaaaaaat

SEQ ID NO: 1108506 - DNA, 15 bp, Homo sapiens
ctaggaaaaaaaaaa

SEQ ID NO: 1108507 - DNA, 15 bp, Homo sapiens
tctaggaaaaaaaaa

SEQ ID NO: 1108508 - DNA, 15 bp, Homo sapiens
ctctaggaaaaaaaa

SEQ ID NO: 1108509 - DNA, 15 bp, Homo sapiens
cctctaggaaaaaaa

SEQ ID NO: 1108510 - DNA, 15 bp, Homo sapiens
gcctctaggaaaaaa

SEQ ID NO: 1108511 - DNA, 15 bp, Homo sapiens
tgcctctaggaaaaa

SEQ ID NO: 1108512 - DNA, 15 bp, Homo sapiens
ctgcctctaggaaaa

SEQ ID NO: 1108513 - DNA, 15 bp, Homo sapiens
tctgcctctaggaaa

SEQ ID NO: 1108514 - DNA, 15 bp, Homo sapiens
ctctgcctctaggaa

SEQ ID NO: 1108515 - DNA, 15 bp, Homo sapiens
actctgcctctagga

SEQ ID NO: 1108516 - DNA, 15 bp, Homo sapiens
gactctgcctctagg

SEQ ID NO: 1108517 - DNA, 15 bp, Homo sapiens
agactctgcctctag

SEQ ID NO: 1108518 - DNA, 15 bp, Homo sapiens
aagactctgcctcta

SEQ ID NO: 1108519 - DNA, 15 bp, Homo sapiens
caagactctgcctct

SEQ ID NO: 1108520 - DNA, 15 bp, Homo sapiens
gcaagactctgcctc

SEQ ID NO: 1108521 - DNA, 15 bp, Homo sapiens
agcaagactctgcct

SEQ ID NO: 1108522 - DNA, 15 bp, Homo sapiens
gagcaagactctgcc

SEQ ID NO: 1108523 - DNA, 15 bp, Homo sapiens
agagcaagactctgc

SEQ ID NO: 1108524 - DNA, 15 bp, Homo sapiens
gagagcaagactctg

SEQ ID NO: 1108525 - DNA, 15 bp, Homo sapiens
agagagcaagactct

SEQ ID NO: 1108526 - DNA, 15 bp, Homo sapiens
aagagagcaagactc

SEQ ID NO: 1108527 - DNA, 15 bp, Homo sapiens
caagagagcaagact

SEQ ID NO: 1108528 - DNA, 15 bp, Homo sapiens
gcaagagagcaagac

SEQ ID NO: 1108529 - DNA, 15 bp, Homo sapiens
ggcaagagagcaaga

SEQ ID NO: 1108530 - DNA, 15 bp, Homo sapiens
gggcaagagagcaag

SEQ ID NO: 1108531 - DNA, 15 bp, Homo sapiens
tgggcaagagagcaa

SEQ ID NO: 1108532 - DNA, 15 bp, Homo sapiens
ctgggcaagagagca

SEQ ID NO: 1108533 - DNA, 15 bp, Homo sapiens
cctgggcaagagagc

SEQ ID NO: 1108534 - DNA, 15 bp, Homo sapiens
cccagcctgggcaag

SEQ ID NO: 1108535 - DNA, 15 bp, Homo sapiens
atgcaccccagcctg

SEQ ID NO: 1108536 - DNA, 15 bp, Homo sapiens
aatgcaccccagcct

SEQ ID NO: 1108537 - DNA, 15 bp, Homo sapiens
caatgcaccccagcc

SEQ ID NO: 1108538 - DNA, 15 bp, Homo sapiens
acaatgcaccccagc

SEQ ID NO: 1108539 - DNA, 15 bp, Homo sapiens
aacaatgcaccccag

SEQ ID NO: 1108540 - DNA, 15 bp, Homo sapiens
caacaatgcacccca

SEQ ID NO: 1108541 - DNA, 15 bp, Homo sapiens
gcaacaatgcacccc

SEQ ID NO: 1108542 - DNA, 15 bp, Homo sapiens
tgcaacaatgcaccc

SEQ ID NO: 1108543 - DNA, 15 bp, Homo sapiens
ttgcaacaatgcacc

SEQ ID NO: 1108544 - DNA, 15 bp, Homo sapiens
attgcaacaatgcac

SEQ ID NO: 1108545 - DNA, 15 bp, Homo sapiens
gattgcaacaatgca

SEQ ID NO: 1108546 - DNA, 15 bp, Homo sapiens
tgattgcaacaatgc

SEQ ID NO: 1108547 - DNA, 15 bp, Homo sapiens
gtgattgcaacaatg

SEQ ID NO: 1108548 - DNA, 15 bp, Homo sapiens
tgtgattgcaacaat

SEQ ID NO: 1108549 - DNA, 15 bp, Homo sapiens
atgtgattgcaacaa

SEQ ID NO: 1108550 - DNA, 15 bp, Homo sapiens
tatgtgattgcaaca

SEQ ID NO: 1108551 - DNA, 15 bp, Homo sapiens
atatgtgattgcaac

SEQ ID NO: 1108552 - DNA, 15 bp, Homo sapiens
gatatgtgattgcaa

SEQ ID NO: 1108553 - DNA, 15 bp, Homo sapiens
tgatatgtgattgca

SEQ ID NO: 1108554 - DNA, 15 bp, Homo sapiens
gtgatatgtgattgc

SEQ ID NO: 1108555 - DNA, 15 bp, Homo sapiens
agtgatatgtgattg

SEQ ID NO: 1108556 - DNA, 15 bp, Homo sapiens
cagtgatatgtgatt

SEQ ID NO: 1108557 - DNA, 15 bp, Homo sapiens
gcagtgatatgtgat

SEQ ID NO: 1108558 - DNA, 15 bp, Homo sapiens
tgcagtgatatgtga

SEQ ID NO: 1108559 - DNA, 15 bp, Homo sapiens
ctgcagtgatatgtg

SEQ ID NO: 1108560 - DNA, 15 bp, Homo sapiens
gctgcagtgatatgt

SEQ ID NO: 1108561 - DNA, 15 bp, Homo sapiens
ggctgcagtgatatg

SEQ ID NO: 1108562 - DNA, 15 bp, Homo sapiens
aggctgcagtgatat

SEQ ID NO: 1108563 - DNA, 15 bp, Homo sapiens
aaggctgcagtgata

SEQ ID NO: 1108564 - DNA, 15 bp, Homo sapiens
caaggctgcagtgat

SEQ ID NO: 1108565 - DNA, 15 bp, Homo sapiens
ctcaaggctgcagtg

SEQ ID NO: 1108566 - DNA, 15 bp, Homo sapiens
gctcaaggctgcagt

SEQ ID NO: 1108567 - DNA, 15 bp, Homo sapiens
agctcaaggctgcag

SEQ ID NO: 1108568 - DNA, 15 bp, Homo sapiens
gagctcaaggctgca

SEQ ID NO: 1108569 - DNA, 15 bp, Homo sapiens
ggagctcaaggctgc

SEQ ID NO: 1108570 - DNA, 15 bp, Homo sapiens
gggagctcaaggctg

SEQ ID NO: 1108571 - DNA, 15 bp, Homo sapiens
cgggagctcaaggct

SEQ ID NO: 1108572 - DNA, 15 bp, Homo sapiens
ccgggagctcaaggc

SEQ ID NO: 1108573 - DNA, 15 bp, Homo sapiens
cccgggagctcaagg

SEQ ID NO: 1108574 - DNA, 15 bp, Homo sapiens
gcccgggagctcaag

SEQ ID NO: 1108575 - DNA, 15 bp, Homo sapiens
agcccgggagctcaa

SEQ ID NO: 1108576 - DNA, 15 bp, Homo sapiens
gagcccgggagctca

SEQ ID NO: 1108577 - DNA, 15 bp, Homo sapiens
tgagcccgggagctc

SEQ ID NO: 1108578 - DNA, 15 bp, Homo sapiens
ttgagcccgggagct

SEQ ID NO: 1108579 - DNA, 15 bp, Homo sapiens
cttgagcccgggagc

SEQ ID NO: 1108580 - DNA, 15 bp, Homo sapiens
ccacttgagcccggg

SEQ ID NO: 1108581 - DNA, 15 bp, Homo sapiens
accacttgagcccgg

SEQ ID NO: 1108582 - DNA, 15 bp, Homo sapiens
gaccacttgagcccg

SEQ ID NO: 1108583 - DNA, 15 bp, Homo sapiens
tgaccacttgagccc

SEQ ID NO: 1108584 - DNA, 15 bp, Homo sapiens
atgaccacttgagcc

SEQ ID NO: 1108585 - DNA, 15 bp, Homo sapiens
gatgaccacttgagc

SEQ ID NO: 1108586 - DNA, 15 bp, Homo sapiens
ggatgaccacttgag

SEQ ID NO: 1108587 - DNA, 15 bp, Homo sapiens
aggatgaccacttga

SEQ ID NO: 1108588 - DNA, 15 bp, Homo sapiens
gcaggatgaccactt

SEQ ID NO: 1108589 - DNA, 15 bp, Homo sapiens
agcaggatgaccact

SEQ ID NO: 1108590 - DNA, 15 bp, Homo sapiens
aagcaggatgaccac

SEQ ID NO: 1108591 - DNA, 15 bp, Homo sapiens
aaagcaggatgacca

SEQ ID NO: 1108592 - DNA, 15 bp, Homo sapiens
caaagcaggatgacc

SEQ ID NO: 1108593 - DNA, 15 bp, Homo sapiens
ccaaagcaggatgac

SEQ ID NO: 1108594 - DNA, 15 bp, Homo sapiens
gccaaagcaggatga

SEQ ID NO: 1108595 - DNA, 15 bp, Homo sapiens
ggccaaagcaggatg

SEQ ID NO: 1108596 - DNA, 15 bp, Homo sapiens
aggccaaagcaggat

SEQ ID NO: 1108597 - DNA, 15 bp, Homo sapiens
gactttgggaggcca

SEQ ID NO: 1108598 - DNA, 15 bp, Homo sapiens
atcccaggactttgg

SEQ ID NO: 1108599 - DNA, 15 bp, Homo sapiens
aatcccaggactttg

SEQ ID NO: 1108600 - DNA, 15 bp, Homo sapiens
taatcccaggacttt

SEQ ID NO: 1108601 - DNA, 15 bp, Homo sapiens
aggccgggtgcagtg

SEQ ID NO: 1108602 - DNA, 15 bp, Homo sapiens
caggccgggtgcagt

SEQ ID NO: 1108603 - DNA, 15 bp, Homo sapiens
acaggccgggtgcag

SEQ ID NO: 1108604 - DNA, 15 bp, Homo sapiens
tacaggccgggtgca

SEQ ID NO: 1108605 - DNA, 15 bp, Homo sapiens
ctacaggccgggtgc

SEQ ID NO: 1108606 - DNA, 15 bp, Homo sapiens
tctacaggccgggtg

SEQ ID NO: 1108607 - DNA, 15 bp, Homo sapiens
ctctacaggccgggt

SEQ ID NO: 1108608 - DNA, 15 bp, Homo sapiens
gctctacaggccggg

SEQ ID NO: 1108609 - DNA, 15 bp, Homo sapiens
agctctacaggccgg

SEQ ID NO: 1108610 - DNA, 15 bp, Homo sapiens
aagctctacaggccg

SEQ ID NO: 1108611 - DNA, 15 bp, Homo sapiens
aaagctctacaggcc

SEQ ID NO: 1108612 - DNA, 15 bp, Homo sapiens
taaagctctacaggc

SEQ ID NO: 1108613 - DNA, 15 bp, Homo sapiens
ttaaagctctacagg

SEQ ID NO: 1108614 - DNA, 15 bp, Homo sapiens
tttaaagctctacag

SEQ ID NO: 1108615 - DNA, 15 bp, Homo sapiens
gtttaaagctctaca

SEQ ID NO: 1108616 - DNA, 15 bp, Homo sapiens
tgtttaaagctctac

SEQ ID NO: 1108617 - DNA, 15 bp, Homo sapiens
ttgtttaaagctcta

SEQ ID NO: 1108618 - DNA, 15 bp, Homo sapiens
tttgtttaaagctct

SEQ ID NO: 1108619 - DNA, 15 bp, Homo sapiens
ctttgtttaaagctc

SEQ ID NO: 1108620 - DNA, 15 bp, Homo sapiens
gctttgtttaaagct

SEQ ID NO: 1108621 - DNA, 15 bp, Homo sapiens
tgctttgtttaaagc

SEQ ID NO: 1108622 - DNA, 15 bp, Homo sapiens
gtgctttgtttaaag

SEQ ID NO: 1108623 - DNA, 15 bp, Homo sapiens
tgtgctttgtttaaa

SEQ ID NO: 1108624 - DNA, 15 bp, Homo sapiens
ctgtgctttgtttaa

SEQ ID NO: 1108625 - DNA, 15 bp, Homo sapiens
cctgtgctttgttta

SEQ ID NO: 1108626 - DNA, 15 bp, Homo sapiens
gcctgtgctttgttt

SEQ ID NO: 1108627 - DNA, 15 bp, Homo sapiens
agcctgtgctttgtt

SEQ ID NO: 1108628 - DNA, 15 bp, Homo sapiens
cagcctgtgctttgt

SEQ ID NO: 1108629 - DNA, 15 bp, Homo sapiens
gcagcctgtgctttg

SEQ ID NO: 1108630 - DNA, 15 bp, Homo sapiens
agcagcctgtgcttt

SEQ ID NO: 1108631 - DNA, 15 bp, Homo sapiens
aagcagcctgtgctt

SEQ ID NO: 1108632 - DNA, 15 bp, Homo sapiens
gaagcagcctgtgct

SEQ ID NO: 1108633 - DNA, 15 bp, Homo sapiens
agaagcagcctgtgc

SEQ ID NO: 1108634 - DNA, 15 bp, Homo sapiens
cagaagcagcctgtg

SEQ ID NO: 1108635 - DNA, 15 bp, Homo sapiens
tcagaagcagcctgt

SEQ ID NO: 1108636 - DNA, 15 bp, Homo sapiens
ctcagaagcagcctg

SEQ ID NO: 1108637 - DNA, 15 bp, Homo sapiens
gctcagaagcagcct

SEQ ID NO: 1108638 - DNA, 15 bp, Homo sapiens
tgctcagaagcagcc

SEQ ID NO: 1108639 - DNA, 15 bp, Homo sapiens
gtgctcagaagcagc

SEQ ID NO: 1108640 - DNA, 15 bp, Homo sapiens
tgtgctcagaagcag

SEQ ID NO: 1108641 - DNA, 15 bp, Homo sapiens
ctgtgctcagaagca

SEQ ID NO: 1108642 - DNA, 15 bp, Homo sapiens
cctgtgctcagaagc

SEQ ID NO: 1108643 - DNA, 15 bp, Homo sapiens
ccctgtgctcagaag

SEQ ID NO: 1108644 - DNA, 15 bp, Homo sapiens
gccctgtgctcagaa

SEQ ID NO: 1108645 - DNA, 15 bp, Homo sapiens
ggccctgtgctcaga

SEQ ID NO: 1108646 - DNA, 15 bp, Homo sapiens
gggccctgtgctcag

SEQ ID NO: 1108647 - DNA, 15 bp, Homo sapiens
agggccctgtgctca

SEQ ID NO: 1108648 - DNA, 15 bp, Homo sapiens
gagggccctgtgctc

SEQ ID NO: 1108649 - DNA, 15 bp, Homo sapiens
cgagggccctgtgct

SEQ ID NO: 1108650 - DNA, 15 bp, Homo sapiens
acgagggccctgtgc

SEQ ID NO: 1108651 - DNA, 15 bp, Homo sapiens
gacgagggccctgtg

SEQ ID NO: 1108652 - DNA, 15 bp, Homo sapiens
tgacgagggccctgt

SEQ ID NO: 1108653 - DNA, 15 bp, Homo sapiens
gtgacgagggccctg

SEQ ID NO: 1108654 - DNA, 15 bp, Homo sapiens
tgtgacgagggccct

SEQ ID NO: 1108655 - DNA, 15 bp, Homo sapiens
atgtgacgagggccc

SEQ ID NO: 1108656 - DNA, 15 bp, Homo sapiens
catgtgacgagggcc

SEQ ID NO: 1108657 - DNA, 15 bp, Homo sapiens
ccatgtgacgagggc

SEQ ID NO: 1108658 - DNA, 15 bp, Homo sapiens
gccatgtgacgaggg

SEQ ID NO: 1108659 - DNA, 15 bp, Homo sapiens
agccatgtgacgagg

SEQ ID NO: 1108660 - DNA, 15 bp, Homo sapiens
tagccatgtgacgag

SEQ ID NO: 1108661 - DNA, 15 bp, Homo sapiens
atagccatgtgacga

SEQ ID NO: 1108662 - DNA, 15 bp, Homo sapiens
catagccatgtgacg

SEQ ID NO: 1108663 - DNA, 15 bp, Homo sapiens
tcatagccatgtgac

SEQ ID NO: 1108664 - DNA, 15 bp, Homo sapiens
ttcatagccatgtga

SEQ ID NO: 1108665 - DNA, 15 bp, Homo sapiens
cttcatagccatgtg

SEQ ID NO: 1108666 - DNA, 15 bp, Homo sapiens
gcttcatagccatgt

SEQ ID NO: 1108667 - DNA, 15 bp, Homo sapiens
ggcttcatagccatg

SEQ ID NO: 1108668 - DNA, 15 bp, Homo sapiens
tggcttcatagccat

SEQ ID NO: 1108669 - DNA, 15 bp, Homo sapiens
ctggcttcatagcca

SEQ ID NO: 1108670 - DNA, 15 bp, Homo sapiens
gctggcttcatagcc

SEQ ID NO: 1108671 - DNA, 15 bp, Homo sapiens
ggctggcttcatagc

SEQ ID NO: 1108672 - DNA, 15 bp, Homo sapiens
gggctggcttcatag

SEQ ID NO: 1108673 - DNA, 15 bp, Homo sapiens
agggctggcttcata

SEQ ID NO: 1108674 - DNA, 15 bp, Homo sapiens
cagggctggcttcat

SEQ ID NO: 1108675 - DNA, 15 bp, Homo sapiens
gcagggctggcttca

SEQ ID NO: 1108676 - DNA, 15 bp, Homo sapiens
ggcagggctggcttc

SEQ ID NO: 1108677 - DNA, 15 bp, Homo sapiens
aggcagggctggctt

SEQ ID NO: 1108678 - DNA, 15 bp, Homo sapiens
caggcagggctggct

SEQ ID NO: 1108679 - DNA, 15 bp, Homo sapiens
ccaggcagggctggc

SEQ ID NO: 1108680 - DNA, 15 bp, Homo sapiens
tccaggcagggctgg

SEQ ID NO: 1108681 - DNA, 15 bp, Homo sapiens
gtccaggcagggctg

SEQ ID NO: 1108682 - DNA, 15 bp, Homo sapiens
ggtccaggcagggct

SEQ ID NO: 1108683 - DNA, 15 bp, Homo sapiens
gggtccaggcagggc

SEQ ID NO: 1108684 - DNA, 15 bp, Homo sapiens
tgggtccaggcaggg

SEQ ID NO: 1108685 - DNA, 15 bp, Homo sapiens
ctgggtccaggcagg

SEQ ID NO: 1108686 - DNA, 15 bp, Homo sapiens
tctgggtccaggcag

SEQ ID NO: 1108687 - DNA, 15 bp, Homo sapiens
ttctgggtccaggca

SEQ ID NO: 1108688 - DNA, 15 bp, Homo sapiens
gttctgggtccaggc

SEQ ID NO: 1108689 - DNA, 15 bp, Homo sapiens
ggttctgggtccagg

SEQ ID NO: 1108690 - DNA, 15 bp, Homo sapiens
gggttctgggtccag

SEQ ID NO: 1108691 - DNA, 15 bp, Homo sapiens
agggttctgggtcca

SEQ ID NO: 1108692 - DNA, 15 bp, Homo sapiens
cagggttctgggtcc

SEQ ID NO: 1108693 - DNA, 15 bp, Homo sapiens
ccagggttctgggtc

SEQ ID NO: 1108694 - DNA, 15 bp, Homo sapiens
accagggttctgggt

SEQ ID NO: 1108695 - DNA, 15 bp, Homo sapiens
caccagggttctggg

SEQ ID NO: 1108696 - DNA, 15 bp, Homo sapiens
acaccagggttctgg

SEQ ID NO: 1108697 - DNA, 15 bp, Homo sapiens
cacaccagggttctg

SEQ ID NO: 1108698 - DNA, 15 bp, Homo sapiens
ccacaccagggttct

SEQ ID NO: 1108699 - DNA, 15 bp, Homo sapiens
cccacaccagggttc

SEQ ID NO: 1108700 - DNA, 15 bp, Homo sapiens
gcccacaccagggtt

SEQ ID NO: 1108701 - DNA, 15 bp, Homo sapiens
tgcccacaccagggt

SEQ ID NO: 1108702 - DNA, 15 bp, Homo sapiens
gtgcccacaccaggg

SEQ ID NO: 1108703 - DNA, 15 bp, Homo sapiens
agtgcccacaccagg

SEQ ID NO: 1108704 - DNA, 15 bp, Homo sapiens
aagtgcccacaccag

SEQ ID NO: 1108705 - DNA, 15 bp, Homo sapiens
aaagtgcccacacca

SEQ ID NO: 1108706 - DNA, 15 bp, Homo sapiens
taaagtgcccacacc

SEQ ID NO: 1108707 - DNA, 15 bp, Homo sapiens
ataaagtgcccacac

SEQ ID NO: 1108708 - DNA, 15 bp, Homo sapiens
tataaagtgcccaca

SEQ ID NO: 1108709 - DNA, 15 bp, Homo sapiens
ctataaagtgcccac

SEQ ID NO: 1108710 - DNA, 15 bp, Homo sapiens
gctataaagtgccca

SEQ ID NO: 1108711 - DNA, 15 bp, Homo sapiens
agctataaagtgccc

SEQ ID NO: 1108712 - DNA, 15 bp, Homo sapiens
aagctataaagtgcc

SEQ ID NO: 1108713 - DNA, 15 bp, Homo sapiens
taagctataaagtgc

SEQ ID NO: 1108714 - DNA, 15 bp, Homo sapiens
ataagctataaagtg

SEQ ID NO: 1108715 - DNA, 15 bp, Homo sapiens
tataagctataaagt

SEQ ID NO: 1108716 - DNA, 15 bp, Homo sapiens
ttataagctataaag

SEQ ID NO: 1108717 - DNA, 15 bp, Homo sapiens
cttataagctataaa

SEQ ID NO: 1108718 - DNA, 15 bp, Homo sapiens
gcttataagctataa

SEQ ID NO: 1108719 - DNA, 15 bp, Homo sapiens
ggcttataagctata

SEQ ID NO: 1108720 - DNA, 15 bp, Homo sapiens
gggcttataagctat

SEQ ID NO: 1108721 - DNA, 15 bp, Homo sapiens
agggcttataagcta

SEQ ID NO: 1108722 - DNA, 15 bp, Homo sapiens
gagggcttataagct

SEQ ID NO: 1108723 - DNA, 15 bp, Homo sapiens
ggagggcttataagc

SEQ ID NO: 1108724 - DNA, 15 bp, Homo sapiens
tggagggcttataag

SEQ ID NO: 1108725 - DNA, 15 bp, Homo sapiens
ctggagggcttataa

SEQ ID NO: 1108726 - DNA, 15 bp, Homo sapiens
actggagggcttata

SEQ ID NO: 1108727 - DNA, 15 bp, Homo sapiens
gactggagggcttat

SEQ ID NO: 1108728 - DNA, 15 bp, Homo sapiens
tgactggagggctta

SEQ ID NO: 1108729 - DNA, 15 bp, Homo sapiens
ttgactggagggctt

SEQ ID NO: 1108730 - DNA, 15 bp, Homo sapiens
cttgactggagggct

SEQ ID NO: 1108731 - DNA, 15 bp, Homo sapiens
tcttgactggagggc

SEQ ID NO: 1108732 - DNA, 15 bp, Homo sapiens
ctcttgactggaggg

SEQ ID NO: 1108733 - DNA, 15 bp, Homo sapiens
cctcttgactggagg

SEQ ID NO: 1108734 - DNA, 15 bp, Homo sapiens
gcctcttgactggag

SEQ ID NO: 1108735 - DNA, 15 bp, Homo sapiens
ggcctcttgactgga

SEQ ID NO: 1108736 - DNA, 15 bp, Homo sapiens
aggcctcttgactgg

SEQ ID NO: 1108737 - DNA, 15 bp, Homo sapiens
gaggcctcttgactg

SEQ ID NO: 1108738 - DNA, 15 bp, Homo sapiens
tgaggcctcttgact

SEQ ID NO: 1108739 - DNA, 15 bp, Homo sapiens
ctgaggcctcttgac

SEQ ID NO: 1108740 - DNA, 15 bp, Homo sapiens
gctgaggcctcttga

SEQ ID NO: 1108741 - DNA, 15 bp, Homo sapiens
ggctgaggcctcttg

SEQ ID NO: 1108742 - DNA, 15 bp, Homo sapiens
aggctgaggcctctt

SEQ ID NO: 1108743 - DNA, 15 bp, Homo sapiens
caggctgaggcctct

SEQ ID NO: 1108744 - DNA, 15 bp, Homo sapiens
tcaggctgaggcctc

SEQ ID NO: 1108745 - DNA, 15 bp, Homo sapiens
ctcaggctgaggcct

SEQ ID NO: 1108746 - DNA, 15 bp, Homo sapiens
gctcaggctgaggcc

SEQ ID NO: 1108747 - DNA, 15 bp, Homo sapiens
ggctcaggctgaggc

SEQ ID NO: 1108748 - DNA, 15 bp, Homo sapiens
aggctcaggctgagg

SEQ ID NO: 1108749 - DNA, 15 bp, Homo sapiens
gaggctcaggctgag

SEQ ID NO: 1108750 - DNA, 15 bp, Homo sapiens
ggaggctcaggctga

SEQ ID NO: 1108751 - DNA, 15 bp, Homo sapiens
gggaggctcaggctg

SEQ ID NO: 1108752 - DNA, 15 bp, Homo sapiens
agggaggctcaggct

SEQ ID NO: 1108753 - DNA, 15 bp, Homo sapiens
cagggaggctcaggc

SEQ ID NO: 1108754 - DNA, 15 bp, Homo sapiens
tcagggaggctcagg

SEQ ID NO: 1108755 - DNA, 15 bp, Homo sapiens
ctcagggaggctcag

SEQ ID NO: 1108756 - DNA, 15 bp, Homo sapiens
gctcagggaggctca

SEQ ID NO: 1108757 - DNA, 15 bp, Homo sapiens
ggctcagggaggctc

SEQ ID NO: 1108758 - DNA, 15 bp, Homo sapiens
aggctcagggaggct

SEQ ID NO: 1108759 - DNA, 15 bp, Homo sapiens
gaggctcagggaggc

SEQ ID NO: 1108760 - DNA, 15 bp, Homo sapiens
tgaggctcagggagg

SEQ ID NO: 1108761 - DNA, 15 bp, Homo sapiens
ctgaggctcagggag

SEQ ID NO: 1108762 - DNA, 15 bp, Homo sapiens
actgaggctcaggga

SEQ ID NO: 1108763 - DNA, 15 bp, Homo sapiens
aactgaggctcaggg

SEQ ID NO: 1108764 - DNA, 15 bp, Homo sapiens
aaactgaggctcagg

SEQ ID NO: 1108765 - DNA, 15 bp, Homo sapiens
agaggaaactgaggc

SEQ ID NO: 1108766 - DNA, 15 bp, Homo sapiens
gagaggaaactgagg

SEQ ID NO: 1108767 - DNA, 15 bp, Homo sapiens
ggagaggaaactgag

SEQ ID NO: 1108768 - DNA, 15 bp, Homo sapiens
aggagaggaaactga

SEQ ID NO: 1108769 - DNA, 15 bp, Homo sapiens
caggagaggaaactg

SEQ ID NO: 1108770 - DNA, 15 bp, Homo sapiens
acaggagaggaaact

SEQ ID NO: 1108771 - DNA, 15 bp, Homo sapiens
tacaggagaggaaac

SEQ ID NO: 1108772 - DNA, 15 bp, Homo sapiens
ttacaggagaggaaa

SEQ ID NO: 1108773 - DNA, 15 bp, Homo sapiens
attacaggagaggaa

SEQ ID NO: 1108774 - DNA, 15 bp, Homo sapiens
gattacaggagagga

SEQ ID NO: 1108775 - DNA, 15 bp, Homo sapiens
agattacaggagagg

SEQ ID NO: 1108776 - DNA, 15 bp, Homo sapiens
cagattacaggagag

SEQ ID NO: 1108777 - DNA, 15 bp, Homo sapiens
acagattacaggaga

SEQ ID NO: 1108778 - DNA, 15 bp, Homo sapiens
cacagattacaggag

SEQ ID NO: 1108779 - DNA, 15 bp, Homo sapiens
tcacagattacagga

SEQ ID NO: 1108780 - DNA, 15 bp, Homo sapiens
ttcacagattacagg

SEQ ID NO: 1108781 - DNA, 15 bp, Homo sapiens
tttcacagattacag

SEQ ID NO: 1108782 - DNA, 15 bp, Homo sapiens
ctttcacagattaca

SEQ ID NO: 1108783 - DNA, 15 bp, Homo sapiens
gctttcacagattac

SEQ ID NO: 1108784 - DNA, 15 bp, Homo sapiens
tgctttcacagatta

SEQ ID NO: 1108785 - DNA, 15 bp, Homo sapiens
gtgctttcacagatt

SEQ ID NO: 1108786 - DNA, 15 bp, Homo sapiens
agtgctttcacagat

SEQ ID NO: 1108787 - DNA, 15 bp, Homo sapiens
cagtgctttcacaga

SEQ ID NO: 1108788 - DNA, 15 bp, Homo sapiens
tcagtgctttcacag

SEQ ID NO: 1108789 - DNA, 15 bp, Homo sapiens
ctcagtgctttcaca

SEQ ID NO: 1108790 - DNA, 15 bp, Homo sapiens
gctcagtgctttcac

SEQ ID NO: 1108791 - DNA, 15 bp, Homo sapiens
tgctcagtgctttca

SEQ ID NO: 1108792 - DNA, 15 bp, Homo sapiens
gtgctcagtgctttc

SEQ ID NO: 1108793 - DNA, 15 bp, Homo sapiens
agtgctcagtgcttt

SEQ ID NO: 1108794 - DNA, 15 bp, Homo sapiens
tagtgctcagtgctt

SEQ ID NO: 1108795 - DNA, 15 bp, Homo sapiens
ttagtgctcagtgct

SEQ ID NO: 1108796 - DNA, 15 bp, Homo sapiens
attagtgctcagtgc

SEQ ID NO: 1108797 - DNA, 15 bp, Homo sapiens
gattagtgctcagtg

SEQ ID NO: 1108798 - DNA, 15 bp, Homo sapiens
agattagtgctcagt

SEQ ID NO: 1108799 - DNA, 15 bp, Homo sapiens
gagattagtgctcag

SEQ ID NO: 1108800 - DNA, 15 bp, Homo sapiens
ggagattagtgctca

SEQ ID NO: 1108801 - DNA, 15 bp, Homo sapiens
gggagattagtgctc

SEQ ID NO: 1108802 - DNA, 15 bp, Homo sapiens
agggagattagtgct

SEQ ID NO: 1108803 - DNA, 15 bp, Homo sapiens
aagggagattagtgc

SEQ ID NO: 1108804 - DNA, 15 bp, Homo sapiens
gaagggagattagtg

SEQ ID NO: 1108805 - DNA, 15 bp, Homo sapiens
ggaagggagattagt

SEQ ID NO: 1108806 - DNA, 15 bp, Homo sapiens
cggaagggagattag

SEQ ID NO: 1108807 - DNA, 15 bp, Homo sapiens
ccggaagggagatta

SEQ ID NO: 1108808 - DNA, 15 bp, Homo sapiens
cccggaagggagatt

SEQ ID NO: 1108809 - DNA, 15 bp, Homo sapiens
gcccggaagggagat

SEQ ID NO: 1108810 - DNA, 15 bp, Homo sapiens
agcccggaagggaga

SEQ ID NO: 1108811 - DNA, 15 bp, Homo sapiens
tagcccggaagggag

SEQ ID NO: 1108812 - DNA, 15 bp, Homo sapiens
ctagcccggaaggga

SEQ ID NO: 1108813 - DNA, 15 bp, Homo sapiens
gctagcccggaaggg

SEQ ID NO: 1108814 - DNA, 15 bp, Homo sapiens
agctagcccggaagg

SEQ ID NO: 1108815 - DNA, 15 bp, Homo sapiens
aagctagcccggaag

SEQ ID NO: 1108816 - DNA, 15 bp, Homo sapiens
aaagctagcccggaa

SEQ ID NO: 1108817 - DNA, 15 bp, Homo sapiens
gaaagctagcccgga

SEQ ID NO: 1108818 - DNA, 15 bp, Homo sapiens
agaaagctagcccgg

SEQ ID NO: 1108819 - DNA, 15 bp, Homo sapiens
cagaaagctagcccg

SEQ ID NO: 1108820 - DNA, 15 bp, Homo sapiens
gcagaaagctagccc

SEQ ID NO: 1108821 - DNA, 15 bp, Homo sapiens
tgcagaaagctagcc

SEQ ID NO: 1108822 - DNA, 15 bp, Homo sapiens
ttgcagaaagctagc

SEQ ID NO: 1108823 - DNA, 15 bp, Homo sapiens
attgcagaaagctag

SEQ ID NO: 1108824 - DNA, 15 bp, Homo sapiens
tattgcagaaagcta

SEQ ID NO: 1108825 - DNA, 15 bp, Homo sapiens
ctattgcagaaagct

SEQ ID NO: 1108826 - DNA, 15 bp, Homo sapiens
gctattgcagaaagc

SEQ ID NO: 1108827 - DNA, 15 bp, Homo sapiens
agctattgcagaaag

SEQ ID NO: 1108828 - DNA, 15 bp, Homo sapiens
aagctattgcagaaa

SEQ ID NO: 1108829 - DNA, 15 bp, Homo sapiens
taagctattgcagaa

SEQ ID NO: 1108830 - DNA, 15 bp, Homo sapiens
ttaagctattgcaga

SEQ ID NO: 1108831 - DNA, 15 bp, Homo sapiens
tttaagctattgcag

SEQ ID NO: 1108832 - DNA, 15 bp, Homo sapiens
ctttaagctattgca

SEQ ID NO: 1108833 - DNA, 15 bp, Homo sapiens
gctttaagctattgc

SEQ ID NO: 1108834 - DNA, 15 bp, Homo sapiens
agctttaagctattg

SEQ ID NO: 1108835 - DNA, 15 bp, Homo sapiens
gagctttaagctatt

SEQ ID NO: 1108836 - DNA, 15 bp, Homo sapiens
ggagctttaagctat

SEQ ID NO: 1108837 - DNA, 15 bp, Homo sapiens
gggagctttaagcta

SEQ ID NO: 1108838 - DNA, 15 bp, Homo sapiens
tgggagctttaagct

SEQ ID NO: 1108839 - DNA, 15 bp, Homo sapiens
atgggagctttaagc

SEQ ID NO: 1108840 - DNA, 15 bp, Homo sapiens
gatgggagctttaag

SEQ ID NO: 1108841 - DNA, 15 bp, Homo sapiens
ggatgggagctttaa

SEQ ID NO: 1108842 - DNA, 15 bp, Homo sapiens
gggatgggagcttta

SEQ ID NO: 1108843 - DNA, 15 bp, Homo sapiens
tgggatgggagcttt

SEQ ID NO: 1108844 - DNA, 15 bp, Homo sapiens
ttgggatgggagctt

SEQ ID NO: 1108845 - DNA, 15 bp, Homo sapiens
cttgggatgggagct

SEQ ID NO: 1108846 - DNA, 15 bp, Homo sapiens
tcttgggatgggagc

SEQ ID NO: 1108847 - DNA, 15 bp, Homo sapiens
atcttgggatgggag

SEQ ID NO: 1108848 - DNA, 15 bp, Homo sapiens
gatcttgggatggga

SEQ ID NO: 1108849 - DNA, 15 bp, Homo sapiens
agatcttgggatggg

SEQ ID NO: 1108850 - DNA, 15 bp, Homo sapiens
gagatcttgggatgg

SEQ ID NO: 1108851 - DNA, 15 bp, Homo sapiens
agagatcttgggatg

SEQ ID NO: 1108852 - DNA, 15 bp, Homo sapiens
gagagatcttgggat

SEQ ID NO: 1108853 - DNA, 15 bp, Homo sapiens
ggagagatcttggga

SEQ ID NO: 1108854 - DNA, 15 bp, Homo sapiens
tggagagatcttggg

SEQ ID NO: 1108855 - DNA, 15 bp, Homo sapiens
ttggagagatcttgg

SEQ ID NO: 1108856 - DNA, 15 bp, Homo sapiens
cttggagagatcttg

SEQ ID NO: 1108857 - DNA, 15 bp, Homo sapiens
tcttggagagatctt

SEQ ID NO: 1108858 - DNA, 15 bp, Homo sapiens
ttcttggagagatct

SEQ ID NO: 1108859 - DNA, 15 bp, Homo sapiens
attcttggagagatc

SEQ ID NO: 1108860 - DNA, 15 bp, Homo sapiens
gattcttggagagat

SEQ ID NO: 1108861 - DNA, 15 bp, Homo sapiens
ggattcttggagaga

SEQ ID NO: 1108862 - DNA, 15 bp, Homo sapiens
aggattcttggagag

SEQ ID NO: 1108863 - DNA, 15 bp, Homo sapiens
gaggattcttggaga

SEQ ID NO: 1108864 - DNA, 15 bp, Homo sapiens
agaggattcttggag

SEQ ID NO: 1108865 - DNA, 15 bp, Homo sapiens
aagaggattcttgga

SEQ ID NO: 1108866 - DNA, 15 bp, Homo sapiens
taagaggattcttgg

SEQ ID NO: 1108867 - DNA, 15 bp, Homo sapiens
gtaagaggattcttg

SEQ ID NO: 1108868 - DNA, 15 bp, Homo sapiens
ggtaagaggattctt

SEQ ID NO: 1108869 - DNA, 15 bp, Homo sapiens
tggtaagaggattct

SEQ ID NO: 1108870 - DNA, 15 bp, Homo sapiens
ttggtaagaggattc

SEQ ID NO: 1108871 - DNA, 15 bp, Homo sapiens
cttggtaagaggatt

SEQ ID NO: 1108872 - DNA, 15 bp, Homo sapiens
acttggtaagaggat

SEQ ID NO: 1108873 - DNA, 15 bp, Homo sapiens
gacttggtaagagga

SEQ ID NO: 1108874 - DNA, 15 bp, Homo sapiens
ggacttggtaagagg

SEQ ID NO: 1108875 - DNA, 15 bp, Homo sapiens
gggacttggtaagag

SEQ ID NO: 1108876 - DNA, 15 bp, Homo sapiens
agggacttggtaaga

SEQ ID NO: 1108877 - DNA, 15 bp, Homo sapiens
cagggacttggtaag

SEQ ID NO: 1108878 - DNA, 15 bp, Homo sapiens
gcagggacttggtaa

SEQ ID NO: 1108879 - DNA, 15 bp, Homo sapiens
agcagggacttggta

SEQ ID NO: 1108880 - DNA, 15 bp, Homo sapiens
gagcagggacttggt

SEQ ID NO: 1108881 - DNA, 15 bp, Homo sapiens
ggagcagggacttgg

SEQ ID NO: 1108882 - DNA, 15 bp, Homo sapiens
gggagcagggacttg

SEQ ID NO: 1108883 - DNA, 15 bp, Homo sapiens
tgggagcagggactt

SEQ ID NO: 1108884 - DNA, 15 bp, Homo sapiens
ctgggagcagggact

SEQ ID NO: 1108885 - DNA, 15 bp, Homo sapiens
gctgggagcagggac

SEQ ID NO: 1108886 - DNA, 15 bp, Homo sapiens
ggctgggagcaggga

SEQ ID NO: 1108887 - DNA, 15 bp, Homo sapiens
aggctgggagcaggg

SEQ ID NO: 1108888 - DNA, 15 bp, Homo sapiens
caggctgggagcagg

SEQ ID NO: 1108889 - DNA, 15 bp, Homo sapiens
ccaggctgggagcag

SEQ ID NO: 1108890 - DNA, 15 bp, Homo sapiens
gccaggctgggagca

SEQ ID NO: 1108891 - DNA, 15 bp, Homo sapiens
agccaggctgggagc

SEQ ID NO: 1108892 - DNA, 15 bp, Homo sapiens
gagccaggctgggag

SEQ ID NO: 1108893 - DNA, 15 bp, Homo sapiens
ggagccaggctggga

SEQ ID NO: 1108894 - DNA, 15 bp, Homo sapiens
gggagccaggctggg

SEQ ID NO: 1108895 - DNA, 15 bp, Homo sapiens
agggagccaggctgg

SEQ ID NO: 1108896 - DNA, 15 bp, Homo sapiens
cagggagccaggctg

SEQ ID NO: 1108897 - DNA, 15 bp, Homo sapiens
ccagggagccaggct

SEQ ID NO: 1108898 - DNA, 15 bp, Homo sapiens
accagggagccaggc

SEQ ID NO: 1108899 - DNA, 15 bp, Homo sapiens
gaccagggagccagg

SEQ ID NO: 1108900 - DNA, 15 bp, Homo sapiens
ggaccagggagccag

SEQ ID NO: 1108901 - DNA, 15 bp, Homo sapiens
gggaccagggagcca

SEQ ID NO: 1108902 - DNA, 15 bp, Homo sapiens
ggggaccagggagcc

SEQ ID NO: 1108903 - DNA, 15 bp, Homo sapiens
tggggaccagggagc

SEQ ID NO: 1108904 - DNA, 15 bp, Homo sapiens
atggggaccagggag

SEQ ID NO: 1108905 - DNA, 15 bp, Homo sapiens
gatggggaccaggga

SEQ ID NO: 1108906 - DNA, 15 bp, Homo sapiens
ggatggggaccaggg

SEQ ID NO: 1108907 - DNA, 15 bp, Homo sapiens
gggatggggaccagg

SEQ ID NO: 1108908 - DNA, 15 bp, Homo sapiens
agggatggggaccag

SEQ ID NO: 1108909 - DNA, 15 bp, Homo sapiens
gagggatggggacca

SEQ ID NO: 1108910 - DNA, 15 bp, Homo sapiens
agagggatggggacc

SEQ ID NO: 1108911 - DNA, 15 bp, Homo sapiens
gagagggatggggac

SEQ ID NO: 1108912 - DNA, 15 bp, Homo sapiens
ggagagggatgggga

SEQ ID NO: 1108913 - DNA, 15 bp, Homo sapiens
gggagagggatgggg

SEQ ID NO: 1108914 - DNA, 15 bp, Homo sapiens
ggggagagggatggg

SEQ ID NO: 1108915 - DNA, 15 bp, Homo sapiens
aggggagagggatgg

SEQ ID NO: 1108916 - DNA, 15 bp, Homo sapiens
gaggggagagggatg

SEQ ID NO: 1108917 - DNA, 15 bp, Homo sapiens
agaggggagagggat

SEQ ID NO: 1108918 - DNA, 15 bp, Homo sapiens
gagaggggagaggga

SEQ ID NO: 1108919 - DNA, 15 bp, Homo sapiens
tgagaggggagaggg

SEQ ID NO: 1108920 - DNA, 15 bp, Homo sapiens
gtgagaggggagagg

SEQ ID NO: 1108921 - DNA, 15 bp, Homo sapiens
tgtgagaggggagag

SEQ ID NO: 1108922 - DNA, 15 bp, Homo sapiens
gtgtgagaggggaga

SEQ ID NO: 1108923 - DNA, 15 bp, Homo sapiens
ggtgtgagaggggag

SEQ ID NO: 1108924 - DNA, 15 bp, Homo sapiens
gggtgtgagagggga

SEQ ID NO: 1108925 - DNA, 15 bp, Homo sapiens
agggtgtgagagggg

SEQ ID NO: 1108926 - DNA, 15 bp, Homo sapiens
aagggtgtgagaggg

SEQ ID NO: 1108927 - DNA, 15 bp, Homo sapiens
aaagggtgtgagagg

SEQ ID NO: 1108928 - DNA, 15 bp, Homo sapiens
gaaagggtgtgagag

SEQ ID NO: 1108929 - DNA, 15 bp, Homo sapiens
tgaaagggtgtgaga

SEQ ID NO: 1108930 - DNA, 15 bp, Homo sapiens
ttgaaagggtgtgag

SEQ ID NO: 1108931 - DNA, 15 bp, Homo sapiens
tttgaaagggtgtga

SEQ ID NO: 1108932 - DNA, 15 bp, Homo sapiens
ctttgaaagggtgtg

SEQ ID NO: 1108933 - DNA, 15 bp, Homo sapiens
gctttgaaagggtgt

SEQ ID NO: 1108934 - DNA, 15 bp, Homo sapiens
ggctttgaaagggtg

SEQ ID NO: 1108935 - DNA, 15 bp, Homo sapiens
gggctttgaaagggt

SEQ ID NO: 1108936 - DNA, 15 bp, Homo sapiens
tgggctttgaaaggg

SEQ ID NO: 1108937 - DNA, 15 bp, Homo sapiens
ctgggctttgaaagg

SEQ ID NO: 1108938 - DNA, 15 bp, Homo sapiens
tctgggctttgaaag

SEQ ID NO: 1108939 - DNA, 15 bp, Homo sapiens
ttctgggctttgaaa

SEQ ID NO: 1108940 - DNA, 15 bp, Homo sapiens
tttctgggctttgaa

SEQ ID NO: 1108941 - DNA, 15 bp, Homo sapiens
ctttctgggctttga

SEQ ID NO: 1108942 - DNA, 15 bp, Homo sapiens
cctttctgggctttg

SEQ ID NO: 1108943 - DNA, 15 bp, Homo sapiens
tcctttctgggcttt

SEQ ID NO: 1108944 - DNA, 15 bp, Homo sapiens
gtcctttctgggctt

SEQ ID NO: 1108945 - DNA, 15 bp, Homo sapiens
tgtcctttctgggct

SEQ ID NO: 1108946 - DNA, 15 bp, Homo sapiens
ctgtcctttctgggc

SEQ ID NO: 1108947 - DNA, 15 bp, Homo sapiens
cctgtcctttctggg

SEQ ID NO: 1108948 - DNA, 15 bp, Homo sapiens
acctgtcctttctgg

SEQ ID NO: 1108949 - DNA, 15 bp, Homo sapiens
cacctgtcctttctg

SEQ ID NO: 1108950 - DNA, 15 bp, Homo sapiens
tcacctgtcctttct

SEQ ID NO: 1108951 - DNA, 15 bp, Homo sapiens
gtcacctgtcctttc

SEQ ID NO: 1108952 - DNA, 15 bp, Homo sapiens
ggtcacctgtccttt

SEQ ID NO: 1108953 - DNA, 15 bp, Homo sapiens
cggtcacctgtcctt

SEQ ID NO: 1108954 - DNA, 15 bp, Homo sapiens
tcggtcacctgtcct

SEQ ID NO: 1108955 - DNA, 15 bp, Homo sapiens
ctcggtcacctgtcc

SEQ ID NO: 1108956 - DNA, 15 bp, Homo sapiens
actcggtcacctgtc

SEQ ID NO: 1108957 - DNA, 15 bp, Homo sapiens
cactcggtcacctgt

SEQ ID NO: 1108958 - DNA, 15 bp, Homo sapiens
tcactcggtcacctg

SEQ ID NO: 1108959 - DNA, 15 bp, Homo sapiens
gtcactcggtcacct

SEQ ID NO: 1108960 - DNA, 15 bp, Homo sapiens
agtcactcggtcacc

SEQ ID NO: 1108961 - DNA, 15 bp, Homo sapiens
cagtcactcggtcac

SEQ ID NO: 1108962 - DNA, 15 bp, Homo sapiens
acagtcactcggtca

SEQ ID NO: 1108963 - DNA, 15 bp, Homo sapiens
gacagtcactcggtc

SEQ ID NO: 1108964 - DNA, 15 bp, Homo sapiens
agacagtcactcggt

SEQ ID NO: 1108965 - DNA, 15 bp, Homo sapiens
gagacagtcactcgg

SEQ ID NO: 1108966 - DNA, 15 bp, Homo sapiens
agagacagtcactcg

SEQ ID NO: 1108967 - DNA, 15 bp, Homo sapiens
cagagacagtcactc

SEQ ID NO: 1108968 - DNA, 15 bp, Homo sapiens
ccagagacagtcact

SEQ ID NO: 1108969 - DNA, 15 bp, Homo sapiens
cccagagacagtcac

SEQ ID NO: 1108970 - DNA, 15 bp, Homo sapiens
gcccagagacagtca

SEQ ID NO: 1108971 - DNA, 15 bp, Homo sapiens
agcccagagacagtc

SEQ ID NO: 1108972 - DNA, 15 bp, Homo sapiens
gagcccagagacagt

SEQ ID NO: 1108973 - DNA, 15 bp, Homo sapiens
tgagcccagagacag

SEQ ID NO: 1108974 - DNA, 15 bp, Homo sapiens
atgagcccagagaca

SEQ ID NO: 1108975 - DNA, 15 bp, Homo sapiens
tatgagcccagagac

SEQ ID NO: 1108976 - DNA, 15 bp, Homo sapiens
gtatgagcccagaga

SEQ ID NO: 1108977 - DNA, 15 bp, Homo sapiens
tgtatgagcccagag

SEQ ID NO: 1108978 - DNA, 15 bp, Homo sapiens
ctgtatgagcccaga

SEQ ID NO: 1108979 - DNA, 15 bp, Homo sapiens
actgtatgagcccag

SEQ ID NO: 1108980 - DNA, 15 bp, Homo sapiens
cactgtatgagccca

SEQ ID NO: 1108981 - DNA, 15 bp, Homo sapiens
ccactgtatgagccc

SEQ ID NO: 1108982 - DNA, 15 bp, Homo sapiens
cccactgtatgagcc

SEQ ID NO: 1108983 - DNA, 15 bp, Homo sapiens
ccccactgtatgagc

SEQ ID NO: 1108984 - DNA, 15 bp, Homo sapiens
accccactgtatgag

SEQ ID NO: 1108985 - DNA, 15 bp, Homo sapiens
caccccactgtatga

SEQ ID NO: 1108986 - DNA, 15 bp, Homo sapiens
ccaccccactgtatg

SEQ ID NO: 1108987 - DNA, 15 bp, Homo sapiens
accaccccactgtat

SEQ ID NO: 1108988 - DNA, 15 bp, Homo sapiens
gaccaccccactgta

SEQ ID NO: 1108989 - DNA, 15 bp, Homo sapiens
agaccaccccactgt

SEQ ID NO: 1108990 - DNA, 15 bp, Homo sapiens
gagaccaccccactg

SEQ ID NO: 1108991 - DNA, 15 bp, Homo sapiens
ggagaccaccccact

SEQ ID NO: 1108992 - DNA, 15 bp, Homo sapiens
aggagaccaccccac

SEQ ID NO: 1108993 - DNA, 15 bp, Homo sapiens
caggagaccacccca

SEQ ID NO: 1108994 - DNA, 15 bp, Homo sapiens
acaggagaccacccc

SEQ ID NO: 1108995 - DNA, 15 bp, Homo sapiens
cacaggagaccaccc

SEQ ID NO: 1108996 - DNA, 15 bp, Homo sapiens
tcacaggagaccacc

SEQ ID NO: 1108997 - DNA, 15 bp, Homo sapiens
gtcacaggagaccac

SEQ ID NO: 1108998 - DNA, 15 bp, Homo sapiens
gcctgtcacaggaga

SEQ ID NO: 1108999 - DNA, 15 bp, Homo sapiens
agcctgtcacaggag

SEQ ID NO: 1109000 - DNA, 15 bp, Homo sapiens
tagcctgtcacagga

SEQ ID NO: 1109001 - DNA, 15 bp, Homo sapiens
ctagcctgtcacagg

SEQ ID NO: 1109002 - DNA, 15 bp, Homo sapiens
cctagcctgtcacag

SEQ ID NO: 1109003 - DNA, 15 bp, Homo sapiens
ccctagcctgtcaca

SEQ ID NO: 1109004 - DNA, 15 bp, Homo sapiens
gccctagcctgtcac

SEQ ID NO: 1109005 - DNA, 15 bp, Homo sapiens
agccctagcctgtca

SEQ ID NO: 1109006 - DNA, 15 bp, Homo sapiens
aagccctagcctgtc

SEQ ID NO: 1109007 - DNA, 15 bp, Homo sapiens
gaagccctagcctgt

SEQ ID NO: 1109008 - DNA, 15 bp, Homo sapiens
tgaagccctagcctg

SEQ ID NO: 1109009 - DNA, 15 bp, Homo sapiens
ctgaagccctagcct

SEQ ID NO: 1109010 - DNA, 15 bp, Homo sapiens
cctgaagccctagcc

SEQ ID NO: 1109011 - DNA, 15 bp, Homo sapiens
ccctgaagccctagc

SEQ ID NO: 1109012 - DNA, 15 bp, Homo sapiens
accctgaagccctag

SEQ ID NO: 1109013 - DNA, 15 bp, Homo sapiens
taccctgaagcccta

SEQ ID NO: 1109014 - DNA, 15 bp, Homo sapiens
ataccctgaagccct

SEQ ID NO: 1109015 - DNA, 15 bp, Homo sapiens
cataccctgaagccc

SEQ ID NO: 1109016 - DNA, 15 bp, Homo sapiens
ccataccctgaagcc

SEQ ID NO: 1109017 - DNA, 15 bp, Homo sapiens
gccataccctgaagc

SEQ ID NO: 1109018 - DNA, 15 bp, Homo sapiens
agccataccctgaag

SEQ ID NO: 1109019 - DNA, 15 bp, Homo sapiens
aagccataccctgaa

SEQ ID NO: 1109020 - DNA, 15 bp, Homo sapiens
taagccataccctga

SEQ ID NO: 1109021 - DNA, 15 bp, Homo sapiens
ctaagccataccctg

SEQ ID NO: 1109022 - DNA, 15 bp, Homo sapiens
gctaagccataccct

SEQ ID NO: 1109023 - DNA, 15 bp, Homo sapiens
ggctaagccataccc

SEQ ID NO: 1109024 - DNA, 15 bp, Homo sapiens
aggctaagccatacc

SEQ ID NO: 1109025 - DNA, 15 bp, Homo sapiens
taggctaagccatac

SEQ ID NO: 1109026 - DNA, 15 bp, Homo sapiens
ataggctaagccata

SEQ ID NO: 1109027 - DNA, 15 bp, Homo sapiens
gataggctaagccat

SEQ ID NO: 1109028 - DNA, 15 bp, Homo sapiens
ggataggctaagcca

SEQ ID NO: 1109029 - DNA, 15 bp, Homo sapiens
gggataggctaagcc

SEQ ID NO: 1109030 - DNA, 15 bp, Homo sapiens
agggataggctaagc

SEQ ID NO: 1109031 - DNA, 15 bp, Homo sapiens
gagggataggctaag

SEQ ID NO: 1109032 - DNA, 15 bp, Homo sapiens
tgagggataggctaa

SEQ ID NO: 1109033 - DNA, 15 bp, Homo sapiens
gtgagggataggcta

SEQ ID NO: 1109034 - DNA, 15 bp, Homo sapiens
tgtgagggataggct

SEQ ID NO: 1109035 - DNA, 15 bp, Homo sapiens
gtgtgagggataggc

SEQ ID NO: 1109036 - DNA, 15 bp, Homo sapiens
agtgtgagggatagg

SEQ ID NO: 1109037 - DNA, 15 bp, Homo sapiens
aagtgtgagggatag

SEQ ID NO: 1109038 - DNA, 15 bp, Homo sapiens
gaagtgtgagggata

SEQ ID NO: 1109039 - DNA, 15 bp, Homo sapiens
ggaagtgtgagggat

SEQ ID NO: 1109040 - DNA, 15 bp, Homo sapiens
aggaagtgtgaggga

SEQ ID NO: 1109041 - DNA, 15 bp, Homo sapiens
aaggaagtgtgaggg

SEQ ID NO: 1109042 - DNA, 15 bp, Homo sapiens
caaggaagtgtgagg

SEQ ID NO: 1109043 - DNA, 15 bp, Homo sapiens
ccaaggaagtgtgag

SEQ ID NO: 1109044 - DNA, 15 bp, Homo sapiens
cccaaggaagtgtga

SEQ ID NO: 1109045 - DNA, 15 bp, Homo sapiens
ccccaaggaagtgtg

SEQ ID NO: 1109046 - DNA, 15 bp, Homo sapiens
gccccaaggaagtgt

SEQ ID NO: 1109047 - DNA, 15 bp, Homo sapiens
ggccccaaggaagtg

SEQ ID NO: 1109048 - DNA, 15 bp, Homo sapiens
aggccccaaggaagt

SEQ ID NO: 1109049 - DNA, 15 bp, Homo sapiens
gaggccccaaggaag

SEQ ID NO: 1109050 - DNA, 15 bp, Homo sapiens
agaggccccaaggaa

SEQ ID NO: 1109051 - DNA, 15 bp, Homo sapiens
aagaggccccaagga

SEQ ID NO: 1109052 - DNA, 15 bp, Homo sapiens
caagaggccccaagg

SEQ ID NO: 1109053 - DNA, 15 bp, Homo sapiens
ccaagaggccccaag

SEQ ID NO: 1109054 - DNA, 15 bp, Homo sapiens
cccaagaggccccaa

SEQ ID NO: 1109055 - DNA, 15 bp, Homo sapiens
ccccaagaggcccca

SEQ ID NO: 1109056 - DNA, 15 bp, Homo sapiens
gccccaagaggcccc

SEQ ID NO: 1109057 - DNA, 15 bp, Homo sapiens
tgccccaagaggccc

SEQ ID NO: 1109058 - DNA, 15 bp, Homo sapiens
ctgccccaagaggcc

SEQ ID NO: 1109059 - DNA, 15 bp, Homo sapiens
tctgccccaagaggc

SEQ ID NO: 1109060 - DNA, 15 bp, Homo sapiens
gtctgccccaagagg

SEQ ID NO: 1109061 - DNA, 15 bp, Homo sapiens
tgtctgccccaagag

SEQ ID NO: 1109062 - DNA, 15 bp, Homo sapiens
ctgtctgccccaaga

SEQ ID NO: 1109063 - DNA, 15 bp, Homo sapiens
gctgtctgccccaag

SEQ ID NO: 1109064 - DNA, 15 bp, Homo sapiens
ggctgtctgccccaa

SEQ ID NO: 1109065 - DNA, 15 bp, Homo sapiens
gggctgtctgcccca

SEQ ID NO: 1109066 - DNA, 15 bp, Homo sapiens
tgggctgtctgcccc

SEQ ID NO: 1109067 - DNA, 15 bp, Homo sapiens
ctgggctgtctgccc

SEQ ID NO: 1109068 - DNA, 15 bp, Homo sapiens
cctgggctgtctgcc

SEQ ID NO: 1109069 - DNA, 15 bp, Homo sapiens
gcctgggctgtctgc

SEQ ID NO: 1109070 - DNA, 15 bp, Homo sapiens
cgcctgggctgtctg

SEQ ID NO: 1109071 - DNA, 15 bp, Homo sapiens
ccgcctgggctgtct

SEQ ID NO: 1109072 - DNA, 15 bp, Homo sapiens
cccgcctgggctgtc

SEQ ID NO: 1109073 - DNA, 15 bp, Homo sapiens
ccccgcctgggctgt

SEQ ID NO: 1109074 - DNA, 15 bp, Homo sapiens
gccccgcctgggctg

SEQ ID NO: 1109075 - DNA, 15 bp, Homo sapiens
ggccccgcctgggct

SEQ ID NO: 1109076 - DNA, 15 bp, Homo sapiens
gggccccgcctgggc

SEQ ID NO: 1109077 - DNA, 15 bp, Homo sapiens
tgggccccgcctggg

SEQ ID NO: 1109078 - DNA, 15 bp, Homo sapiens
ctgggccccgcctgg

SEQ ID NO: 1109079 - DNA, 15 bp, Homo sapiens
gctgggccccgcctg

SEQ ID NO: 1109080 - DNA, 15 bp, Homo sapiens
tgctgggccccgcct

SEQ ID NO: 1109081 - DNA, 15 bp, Homo sapiens
ctgctgggccccgcc

SEQ ID NO: 1109082 - DNA, 15 bp, Homo sapiens
cctgctgggccccgc

SEQ ID NO: 1109083 - DNA, 15 bp, Homo sapiens
gcctgctgggccccg

SEQ ID NO: 1109084 - DNA, 15 bp, Homo sapiens
tgcctgctgggcccc

SEQ ID NO: 1109085 - DNA, 15 bp, Homo sapiens
gtgcctgctgggccc

SEQ ID NO: 1109086 - DNA, 15 bp, Homo sapiens
tgtgcctgctgggcc

SEQ ID NO: 1109087 - DNA, 15 bp, Homo sapiens
gtgtgcctgctgggc

SEQ ID NO: 1109088 - DNA, 15 bp, Homo sapiens
agtgtgcctgctggg

SEQ ID NO: 1109089 - DNA, 15 bp, Homo sapiens
tagtgtgcctgctgg

SEQ ID NO: 1109090 - DNA, 15 bp, Homo sapiens
ctagtgtgcctgctg

SEQ ID NO: 1109091 - DNA, 15 bp, Homo sapiens
actagtgtgcctgct

SEQ ID NO: 1109092 - DNA, 15 bp, Homo sapiens
gactagtgtgcctgc

SEQ ID NO: 1109093 - DNA, 15 bp, Homo sapiens
tgactagtgtgcctg

SEQ ID NO: 1109094 - DNA, 15 bp, Homo sapiens
ctgactagtgtgcct

SEQ ID NO: 1109095 - DNA, 15 bp, Homo sapiens
cctgactagtgtgcc

SEQ ID NO: 1109096 - DNA, 15 bp, Homo sapiens
acctgactagtgtgc

SEQ ID NO: 1109097 - DNA, 15 bp, Homo sapiens
cacctgactagtgtg

SEQ ID NO: 1109098 - DNA, 15 bp, Homo sapiens
gcacctgactagtgt

SEQ ID NO: 1109099 - DNA, 15 bp, Homo sapiens
ggcacctgactagtg

SEQ ID NO: 1109100 - DNA, 15 bp, Homo sapiens
aggcacctgactagt

SEQ ID NO: 1109101 - DNA, 15 bp, Homo sapiens
caggcacctgactag

SEQ ID NO: 1109102 - DNA, 15 bp, Homo sapiens
tcaggcacctgacta

SEQ ID NO: 1109103 - DNA, 15 bp, Homo sapiens
atcaggcacctgact

SEQ ID NO: 1109104 - DNA, 15 bp, Homo sapiens
catcaggcacctgac

SEQ ID NO: 1109105 - DNA, 15 bp, Homo sapiens
tcatcaggcacctga

SEQ ID NO: 1109106 - DNA, 15 bp, Homo sapiens
atcatcaggcacctg

SEQ ID NO: 1109107 - DNA, 15 bp, Homo sapiens
catcatcaggcacct

SEQ ID NO: 1109108 - DNA, 15 bp, Homo sapiens
tcatcatcaggcacc

SEQ ID NO: 1109109 - DNA, 15 bp, Homo sapiens
ctcatcatcaggcac

SEQ ID NO: 1109110 - DNA, 15 bp, Homo sapiens
cctcatcatcaggca

SEQ ID NO: 1109111 - DNA, 15 bp, Homo sapiens
ccctcatcatcaggc

SEQ ID NO: 1109112 - DNA, 15 bp, Homo sapiens
gccctcatcatcagg

SEQ ID NO: 1109113 - DNA, 15 bp, Homo sapiens
tgccctcatcatcag

SEQ ID NO: 1109114 - DNA, 15 bp, Homo sapiens
ctgccctcatcatca

SEQ ID NO: 1109115 - DNA, 15 bp, Homo sapiens
cctgccctcatcatc

SEQ ID NO: 1109116 - DNA, 15 bp, Homo sapiens
gcctgccctcatcat

SEQ ID NO: 1109117 - DNA, 15 bp, Homo sapiens
cgcctgccctcatca

SEQ ID NO: 1109118 - DNA, 15 bp, Homo sapiens
gcgcctgccctcatc

SEQ ID NO: 1109119 - DNA, 15 bp, Homo sapiens
ggcgcctgccctcat

SEQ ID NO: 1109120 - DNA, 15 bp, Homo sapiens
aggcgcctgccctca

SEQ ID NO: 1109121 - DNA, 15 bp, Homo sapiens
caggcgcctgccctc

SEQ ID NO: 1109122 - DNA, 15 bp, Homo sapiens
ccaggcgcctgccct

SEQ ID NO: 1109123 - DNA, 15 bp, Homo sapiens
tccaggcgcctgccc

SEQ ID NO: 1109124 - DNA, 15 bp, Homo sapiens
ttccaggcgcctgcc

SEQ ID NO: 1109125 - DNA, 15 bp, Homo sapiens
gttccaggcgcctgc

SEQ ID NO: 1109126 - DNA, 15 bp, Homo sapiens
agttccaggcgcctg

SEQ ID NO: 1109127 - DNA, 15 bp, Homo sapiens
cagttccaggcgcct

SEQ ID NO: 1109128 - DNA, 15 bp, Homo sapiens
ccagttccaggcgcc

SEQ ID NO: 1109129 - DNA, 15 bp, Homo sapiens
cccagttccaggcgc

SEQ ID NO: 1109130 - DNA, 15 bp, Homo sapiens
acccagttccaggcg

SEQ ID NO: 1109131 - DNA, 15 bp, Homo sapiens
gacccagttccaggc

SEQ ID NO: 1109132 - DNA, 15 bp, Homo sapiens
tgacccagttccagg

SEQ ID NO: 1109133 - DNA, 15 bp, Homo sapiens
ttgacccagttccag

SEQ ID NO: 1109134 - DNA, 15 bp, Homo sapiens
gttgacccagttcca

SEQ ID NO: 1109135 - DNA, 15 bp, Homo sapiens
tgttgacccagttcc

SEQ ID NO: 1109136 - DNA, 15 bp, Homo sapiens
ttgttgacccagttc

SEQ ID NO: 1109137 - DNA, 15 bp, Homo sapiens
attgttgacccagtt

SEQ ID NO: 1109138 - DNA, 15 bp, Homo sapiens
gattgttgacccagt

SEQ ID NO: 1109139 - DNA, 15 bp, Homo sapiens
cgattgttgacccag

SEQ ID NO: 1109140 - DNA, 15 bp, Homo sapiens
gcgattgttgaccca

SEQ ID NO: 1109141 - DNA, 15 bp, Homo sapiens
agcgattgttgaccc

SEQ ID NO: 1109142 - DNA, 15 bp, Homo sapiens
gagcgattgttgacc

SEQ ID NO: 1109143 - DNA, 15 bp, Homo sapiens
tgagcgattgttgac

SEQ ID NO: 1109144 - DNA, 15 bp, Homo sapiens
gtgagcgattgttga

SEQ ID NO: 1109145 - DNA, 15 bp, Homo sapiens
tgtgagcgattgttg

SEQ ID NO: 1109146 - DNA, 15 bp, Homo sapiens
gtgtgagcgattgtt

SEQ ID NO: 1109147 - DNA, 15 bp, Homo sapiens
cgtgtgagcgattgt

SEQ ID NO: 1109148 - DNA, 15 bp, Homo sapiens
ccgtgtgagcgattg

SEQ ID NO: 1109149 - DNA, 15 bp, Homo sapiens
tccgtgtgagcgatt

SEQ ID NO: 1109150 - DNA, 15 bp, Homo sapiens
ctccgtgtgagcgat

SEQ ID NO: 1109151 - DNA, 15 bp, Homo sapiens
cctccgtgtgagcga

SEQ ID NO: 1109152 - DNA, 15 bp, Homo sapiens
acctccgtgtgagcg

SEQ ID NO: 1109153 - DNA, 15 bp, Homo sapiens
cacctccgtgtgagc

SEQ ID NO: 1109154 - DNA, 15 bp, Homo sapiens
tcacctccgtgtgag

SEQ ID NO: 1109155 - DNA, 15 bp, Homo sapiens
gtcacctccgtgtga

SEQ ID NO: 1109156 - DNA, 15 bp, Homo sapiens
agtcacctccgtgtg

SEQ ID NO: 1109157 - DNA, 15 bp, Homo sapiens
gagtcacctccgtgt

SEQ ID NO: 1109158 - DNA, 15 bp, Homo sapiens
tgagtcacctccgtg

SEQ ID NO: 1109159 - DNA, 15 bp, Homo sapiens
ttgagtcacctccgt

SEQ ID NO: 1109160 - DNA, 15 bp, Homo sapiens
cttgagtcacctccg

SEQ ID NO: 1109161 - DNA, 15 bp, Homo sapiens
gcttgagtcacctcc

SEQ ID NO: 1109162 - DNA, 15 bp, Homo sapiens
tgcttgagtcacctc

SEQ ID NO: 1109163 - DNA, 15 bp, Homo sapiens
ctgcttgagtcacct

SEQ ID NO: 1109164 - DNA, 15 bp, Homo sapiens
gctgcttgagtcacc

SEQ ID NO: 1109165 - DNA, 15 bp, Homo sapiens
tgctgcttgagtcac

SEQ ID NO: 1109166 - DNA, 15 bp, Homo sapiens
ttgctgcttgagtca

SEQ ID NO: 1109167 - DNA, 15 bp, Homo sapiens
cttgctgcttgagtc

SEQ ID NO: 1109168 - DNA, 15 bp, Homo sapiens
ccttgctgcttgagt

SEQ ID NO: 1109169 - DNA, 15 bp, Homo sapiens
cccttgctgcttgag

SEQ ID NO: 1109170 - DNA, 15 bp, Homo sapiens
ccccttgctgcttga

SEQ ID NO: 1109171 - DNA, 15 bp, Homo sapiens
tccccttgctgcttg

SEQ ID NO: 1109172 - DNA, 15 bp, Homo sapiens
ttccccttgctgctt

SEQ ID NO: 1109173 - DNA, 15 bp, Homo sapiens
tttccccttgctgct

SEQ ID NO: 1109174 - DNA, 15 bp, Homo sapiens
ttttccccttgctgc

SEQ ID NO: 1109175 - DNA, 15 bp, Homo sapiens
tttttccccttgctg

SEQ ID NO: 1109176 - DNA, 15 bp, Homo sapiens
ctttttccccttgct

SEQ ID NO: 1109177 - DNA, 15 bp, Homo sapiens
tctttttccccttgc

SEQ ID NO: 1109178 - DNA, 15 bp, Homo sapiens
ctctttttccccttg

SEQ ID NO: 1109179 - DNA, 15 bp, Homo sapiens
cctctttttcccctt

SEQ ID NO: 1109180 - DNA, 15 bp, Homo sapiens
acctctttttcccct

SEQ ID NO: 1109181 - DNA, 15 bp, Homo sapiens
cacctctttttcccc

SEQ ID NO: 1109182 - DNA, 15 bp, Homo sapiens
ccacctctttttccc

SEQ ID NO: 1109183 - DNA, 15 bp, Homo sapiens
cccacctctttttcc

SEQ ID NO: 1109184 - DNA, 15 bp, Homo sapiens
ccccacctctttttc

SEQ ID NO: 1109185 - DNA, 15 bp, Homo sapiens
cccccacctcttttt

SEQ ID NO: 1109186 - DNA, 15 bp, Homo sapiens
acccccacctctttt

SEQ ID NO: 1109187 - DNA, 15 bp, Homo sapiens
cacccccacctcttt

SEQ ID NO: 1109188 - DNA, 15 bp, Homo sapiens
ccacccccacctctt

SEQ ID NO: 1109189 - DNA, 15 bp, Homo sapiens
cccacccccacctct

SEQ ID NO: 1109190 - DNA, 15 bp, Homo sapiens
tccccacccccacct

SEQ ID NO: 1109191 - DNA, 15 bp, Homo sapiens
ctccccacccccacc

SEQ ID NO: 1109192 - DNA, 15 bp, Homo sapiens
cctccccacccccac

SEQ ID NO: 1109193 - DNA, 15 bp, Homo sapiens
acctccccaccccca

SEQ ID NO: 1109194 - DNA, 15 bp, Homo sapiens
cacctccccaccccc

SEQ ID NO: 1109195 - DNA, 15 bp, Homo sapiens
ccacctccccacccc

SEQ ID NO: 1109196 - DNA, 15 bp, Homo sapiens
gccacctccccaccc

SEQ ID NO: 1109197 - DNA, 15 bp, Homo sapiens
agccacctccccacc

SEQ ID NO: 1109198 - DNA, 15 bp, Homo sapiens
cagccacctccccac

SEQ ID NO: 1109199 - DNA, 15 bp, Homo sapiens
acagccacctcccca

SEQ ID NO: 1109200 - DNA, 15 bp, Homo sapiens
aacagccacctcccc

SEQ ID NO: 1109201 - DNA, 15 bp, Homo sapiens
aaacagccacctccc

SEQ ID NO: 1109202 - DNA, 15 bp, Homo sapiens
gaaacagccacctcc

SEQ ID NO: 1109203 - DNA, 15 bp, Homo sapiens
agaaacagccacctc

SEQ ID NO: 1109204 - DNA, 15 bp, Homo sapiens
cagaaacagccacct

SEQ ID NO: 1109205 - DNA, 15 bp, Homo sapiens
acagaaacagccacc

SEQ ID NO: 1109206 - DNA, 15 bp, Homo sapiens
cacagaaacagccac

SEQ ID NO: 1109207 - DNA, 15 bp, Homo sapiens
gcacagaaacagcca

SEQ ID NO: 1109208 - DNA, 15 bp, Homo sapiens
ggcacagaaacagcc

SEQ ID NO: 1109209 - DNA, 15 bp, Homo sapiens
gggcacagaaacagc

SEQ ID NO: 1109210 - DNA, 15 bp, Homo sapiens
agggcacagaaacag

SEQ ID NO: 1109211 - DNA, 15 bp, Homo sapiens
gagggcacagaaaca

SEQ ID NO: 1109212 - DNA, 15 bp, Homo sapiens
tgagggcacagaaac

SEQ ID NO: 1109213 - DNA, 15 bp, Homo sapiens
gtgagggcacagaaa

SEQ ID NO: 1109214 - DNA, 15 bp, Homo sapiens
agtgagggcacagaa

SEQ ID NO: 1109215 - DNA, 15 bp, Homo sapiens
aagtgagggcacaga

SEQ ID NO: 1109216 - DNA, 15 bp, Homo sapiens
caagtgagggcacag

SEQ ID NO: 1109217 - DNA, 15 bp, Homo sapiens
tcaagtgagggcaca

SEQ ID NO: 1109218 - DNA, 15 bp, Homo sapiens
ctcaagtgagggcac

SEQ ID NO: 1109219 - DNA, 15 bp, Homo sapiens
gctcaagtgagggca

SEQ ID NO: 1109220 - DNA, 15 bp, Homo sapiens
ggctcaagtgagggc

SEQ ID NO: 1109221 - DNA, 15 bp, Homo sapiens
aggctcaagtgaggg

SEQ ID NO: 1109222 - DNA, 15 bp, Homo sapiens
gaggctcaagtgagg

SEQ ID NO: 1109223 - DNA, 15 bp, Homo sapiens
tgaggctcaagtgag

SEQ ID NO: 1109224 - DNA, 15 bp, Homo sapiens
ctgaggctcaagtga

SEQ ID NO: 1109225 - DNA, 15 bp, Homo sapiens
gctgaggctcaagtg

SEQ ID NO: 1109226 - DNA, 15 bp, Homo sapiens
agctgaggctcaagt

SEQ ID NO: 1109227 - DNA, 15 bp, Homo sapiens
aagctgaggctcaag

SEQ ID NO: 1109228 - DNA, 15 bp, Homo sapiens
aaagctgaggctcaa

SEQ ID NO: 1109229 - DNA, 15 bp, Homo sapiens
aaaagctgaggctca

SEQ ID NO: 1109230 - DNA, 15 bp, Homo sapiens
taaaagctgaggctc

SEQ ID NO: 1109231 - DNA, 15 bp, Homo sapiens
ctaaaagctgaggct

SEQ ID NO: 1109232 - DNA, 15 bp, Homo sapiens
cctaaaagctgaggc

SEQ ID NO: 1109233 - DNA, 15 bp, Homo sapiens
ccctaaaagctgagg

SEQ ID NO: 1109234 - DNA, 15 bp, Homo sapiens
accctaaaagctgag

SEQ ID NO: 1109235 - DNA, 15 bp, Homo sapiens
aaccctaaaagctga

SEQ ID NO: 1109236 - DNA, 15 bp, Homo sapiens
caaccctaaaagctg

SEQ ID NO: 1109237 - DNA, 15 bp, Homo sapiens
gcaaccctaaaagct

SEQ ID NO: 1109238 - DNA, 15 bp, Homo sapiens
ggcaaccctaaaagc

SEQ ID NO: 1109239 - DNA, 15 bp, Homo sapiens
tggcaaccctaaaag

SEQ ID NO: 1109240 - DNA, 15 bp, Homo sapiens
ctggcaaccctaaaa

SEQ ID NO: 1109241 - DNA, 15 bp, Homo sapiens
tctggcaaccctaaa

SEQ ID NO: 1109242 - DNA, 15 bp, Homo sapiens
aatctggcaacccta

SEQ ID NO: 1109243 - DNA, 15 bp, Homo sapiens
aaatctggcaaccct

SEQ ID NO: 1109244 - DNA, 15 bp, Homo sapiens
taaatctggcaaccc

SEQ ID NO: 1109245 - DNA, 15 bp, Homo sapiens
ataaatctggcaacc

SEQ ID NO: 1109246 - DNA, 15 bp, Homo sapiens
aataaatctggcaac

SEQ ID NO: 1109247 - DNA, 15 bp, Homo sapiens
aaataaatctggcaa

SEQ ID NO: 1109248 - DNA, 15 bp, Homo sapiens
aaaataaatctggca

SEQ ID NO: 1109249 - DNA, 15 bp, Homo sapiens
aaaaataaatctggc

SEQ ID NO: 1109250 - DNA, 15 bp, Homo sapiens
taaaaataaatctgg

SEQ ID NO: 1109251 - DNA, 15 bp, Homo sapiens
ataaaaataaatctg

SEQ ID NO: 1109252 - DNA, 15 bp, Homo sapiens
taaaaataaaaataa

SEQ ID NO: 1109253 - DNA, 15 bp, Homo sapiens
ataaaaataaaaata

SEQ ID NO: 1109254 - DNA, 15 bp, Homo sapiens
aataaaaataaaaat

SEQ ID NO: 1109255 - DNA, 15 bp, Homo sapiens
ctctcaaaaataaaa

SEQ ID NO: 1109256 - DNA, 15 bp, Homo sapiens
actctcaaaaataaa

SEQ ID NO: 1109257 - DNA, 15 bp, Homo sapiens
gactctcaaaaataa

SEQ ID NO: 1109258 - DNA, 15 bp, Homo sapiens
agactctcaaaaata

SEQ ID NO: 1109259 - DNA, 15 bp, Homo sapiens
gagactctcaaaaat

SEQ ID NO: 1109260 - DNA, 15 bp, Homo sapiens
tgagactctcaaaaa

SEQ ID NO: 1109261 - DNA, 15 bp, Homo sapiens
gtgagactctcaaaa

SEQ ID NO: 1109262 - DNA, 15 bp, Homo sapiens
agtgagactctcaaa

SEQ ID NO: 1109263 - DNA, 15 bp, Homo sapiens
gagtgagactctcaa

SEQ ID NO: 1109264 - DNA, 15 bp, Homo sapiens
agagtgagactctca

SEQ ID NO: 1109265 - DNA, 15 bp, Homo sapiens
cagagtgagactctc

SEQ ID NO: 1109266 - DNA, 15 bp, Homo sapiens
cgagaattgcttgaa

SEQ ID NO: 1109267 - DNA, 15 bp, Homo sapiens
gcacatctgtaatcc

SEQ ID NO: 1109268 - DNA, 15 bp, Homo sapiens
tgcacatctgtaatc

SEQ ID NO: 1109269 - DNA, 15 bp, Homo sapiens
gtgcacatctgtaat

SEQ ID NO: 1109270 - DNA, 15 bp, Homo sapiens
ggtgcacatctgtaa

SEQ ID NO: 1109271 - DNA, 15 bp, Homo sapiens
tggtgcacatctgta

SEQ ID NO: 1109272 - DNA, 15 bp, Homo sapiens
gtggtgcacatctgt

SEQ ID NO: 1109273 - DNA, 15 bp, Homo sapiens
ggtggtgcacatctg

SEQ ID NO: 1109274 - DNA, 15 bp, Homo sapiens
tggtggtgcacatct

SEQ ID NO: 1109275 - DNA, 15 bp, Homo sapiens
gtggtggtgcacatc

SEQ ID NO: 1109276 - DNA, 15 bp, Homo sapiens
ggtggtggtgcacat

SEQ ID NO: 1109277 - DNA, 15 bp, Homo sapiens
gggtggtggtgcaca

SEQ ID NO: 1109278 - DNA, 15 bp, Homo sapiens
ggggtggtggtgcac

SEQ ID NO: 1109279 - DNA, 15 bp, Homo sapiens
aggggtggtggtgca

SEQ ID NO: 1109280 - DNA, 15 bp, Homo sapiens
caggggtggtggtgc

SEQ ID NO: 1109281 - DNA, 15 bp, Homo sapiens
ccaggggtggtggtg

SEQ ID NO: 1109282 - DNA, 15 bp, Homo sapiens
gccaggggtggtggt

SEQ ID NO: 1109283 - DNA, 15 bp, Homo sapiens
agccaggggtggtgg

SEQ ID NO: 1109284 - DNA, 15 bp, Homo sapiens
tagccaggggtggtg

SEQ ID NO: 1109285 - DNA, 15 bp, Homo sapiens
ttagccaggggtggt

SEQ ID NO: 1109286 - DNA, 15 bp, Homo sapiens
attagccaggggtgg

SEQ ID NO: 1109287 - DNA, 15 bp, Homo sapiens
aattagccaggggtg

SEQ ID NO: 1109288 - DNA, 15 bp, Homo sapiens
aaattagccaggggt

SEQ ID NO: 1109289 - DNA, 15 bp, Homo sapiens
aaaattagccagggg

SEQ ID NO: 1109290 - DNA, 15 bp, Homo sapiens
aaaaattagccaggg

SEQ ID NO: 1109291 - DNA, 15 bp, Homo sapiens
actggccaacatggt

SEQ ID NO: 1109292 - DNA, 15 bp, Homo sapiens
aaccagactggccaa

SEQ ID NO: 1109293 - DNA, 15 bp, Homo sapiens
aaaccagactggcca

SEQ ID NO: 1109294 - DNA, 15 bp, Homo sapiens
aaaaccagactggcc

SEQ ID NO: 1109295 - DNA, 15 bp, Homo sapiens
caaaaccagactggc

SEQ ID NO: 1109296 - DNA, 15 bp, Homo sapiens
tcaaaaccagactgg

SEQ ID NO: 1109297 - DNA, 15 bp, Homo sapiens
ttcaaaaccagactg

SEQ ID NO: 1109298 - DNA, 15 bp, Homo sapiens
gttcaaaaccagact

SEQ ID NO: 1109299 - DNA, 15 bp, Homo sapiens
agttcaaaaccagac

SEQ ID NO: 1109300 - DNA, 15 bp, Homo sapiens
gagttcaaaaccaga

SEQ ID NO: 1109301 - DNA, 15 bp, Homo sapiens
taggagttcaaaacc

SEQ ID NO: 1109302 - DNA, 15 bp, Homo sapiens
ttaggagttcaaaac

SEQ ID NO: 1109303 - DNA, 15 bp, Homo sapiens
gttaggagttcaaaa

SEQ ID NO: 1109304 - DNA, 15 bp, Homo sapiens
ggttaggagttcaaa

SEQ ID NO: 1109305 - DNA, 15 bp, Homo sapiens
aggttaggagttcaa

SEQ ID NO: 1109306 - DNA, 15 bp, Homo sapiens
gaggttaggagttca

SEQ ID NO: 1109307 - DNA, 15 bp, Homo sapiens
aatggtggctcacgc

SEQ ID NO: 1109308 - DNA, 15 bp, Homo sapiens
gaatggtggctcacg

SEQ ID NO: 1109309 - DNA, 15 bp, Homo sapiens
ggaatggtggctcac

SEQ ID NO: 1109310 - DNA, 15 bp, Homo sapiens
aggaatggtggctca

SEQ ID NO: 1109311 - DNA, 15 bp, Homo sapiens
caggaatggtggctc

SEQ ID NO: 1109312 - DNA, 15 bp, Homo sapiens
ccaggaatggtggct

SEQ ID NO: 1109313 - DNA, 15 bp, Homo sapiens
tgccaggaatggtgg

SEQ ID NO: 1109314 - DNA, 15 bp, Homo sapiens
ctgccaggaatggtg

SEQ ID NO: 1109315 - DNA, 15 bp, Homo sapiens
gctgccaggaatggt

SEQ ID NO: 1109316 - DNA, 15 bp, Homo sapiens
ggctgccaggaatgg

SEQ ID NO: 1109317 - DNA, 15 bp, Homo sapiens
aggctgccaggaatg

SEQ ID NO: 1109318 - DNA, 15 bp, Homo sapiens
caggctgccaggaat

SEQ ID NO: 1109319 - DNA, 15 bp, Homo sapiens
tcaggctgccaggaa

SEQ ID NO: 1109320 - DNA, 15 bp, Homo sapiens
ttcaggctgccagga

SEQ ID NO: 1109321 - DNA, 15 bp, Homo sapiens
tttcaggctgccagg

SEQ ID NO: 1109322 - DNA, 15 bp, Homo sapiens
ttttcaggctgccag

SEQ ID NO: 1109323 - DNA, 15 bp, Homo sapiens
attttcaggctgcca

SEQ ID NO: 1109324 - DNA, 15 bp, Homo sapiens
aattttcaggctgcc

SEQ ID NO: 1109325 - DNA, 15 bp, Homo sapiens
aaattttcaggctgc

SEQ ID NO: 1109326 - DNA, 15 bp, Homo sapiens
aaaattttcaggctg

SEQ ID NO: 1109327 - DNA, 15 bp, Homo sapiens
aaaaattttcaggct

SEQ ID NO: 1109328 - DNA, 15 bp, Homo sapiens
aaaaaattttcaggc

SEQ ID NO: 1109329 - DNA, 15 bp, Homo sapiens
taaaaaattttcagg

SEQ ID NO: 1109330 - DNA, 15 bp, Homo sapiens
ttaaaaaattttcag

SEQ ID NO: 1109331 - DNA, 15 bp, Homo sapiens
attaaaaaattttca

SEQ ID NO: 1109332 - DNA, 15 bp, Homo sapiens
aattaaaaaattttc

SEQ ID NO: 1109333 - DNA, 15 bp, Homo sapiens
aaattaaaaaatttt

SEQ ID NO: 1109334 - DNA, 15 bp, Homo sapiens
aaaattaaaaaattt

SEQ ID NO: 1109335 - DNA, 15 bp, Homo sapiens
aaaaaaaattaaaaa

SEQ ID NO: 1109336 - DNA, 15 bp, Homo sapiens
aaaaaaaaattaaaa

SEQ ID NO: 1109337 - DNA, 15 bp, Homo sapiens
attaaaaaaaaatta

SEQ ID NO: 1109338 - DNA, 15 bp, Homo sapiens
aaaaattaaaaaaaa

SEQ ID NO: 1109339 - DNA, 15 bp, Homo sapiens
cactaaaaaaaaaaa

SEQ ID NO: 1109340 - DNA, 15 bp, Homo sapiens
tcactaaaaaaaaaa

SEQ ID NO: 1109341 - DNA, 15 bp, Homo sapiens
atcactaaaaaaaaa

SEQ ID NO: 1109342 - DNA, 15 bp, Homo sapiens
catcactaaaaaaaa

SEQ ID NO: 1109343 - DNA, 15 bp, Homo sapiens
ccatcactaaaaaaa

SEQ ID NO: 1109344 - DNA, 15 bp, Homo sapiens
cccatcactaaaaaa

SEQ ID NO: 1109345 - DNA, 15 bp, Homo sapiens
ccccatcactaaaaa

SEQ ID NO: 1109346 - DNA, 15 bp, Homo sapiens
accccatcactaaaa

SEQ ID NO: 1109347 - DNA, 15 bp, Homo sapiens
gaccccatcactaaa

SEQ ID NO: 1109348 - DNA, 15 bp, Homo sapiens
agaccccatcactaa

SEQ ID NO: 1109349 - DNA, 15 bp, Homo sapiens
ggagaccccatcact

SEQ ID NO: 1109350 - DNA, 15 bp, Homo sapiens
tggagaccccatcac

SEQ ID NO: 1109351 - DNA, 15 bp, Homo sapiens
atggagaccccatca

SEQ ID NO: 1109352 - DNA, 15 bp, Homo sapiens
tatggagaccccatc

SEQ ID NO: 1109353 - DNA, 15 bp, Homo sapiens
atatggagaccccat

SEQ ID NO: 1109354 - DNA, 15 bp, Homo sapiens
catatggagacccca

SEQ ID NO: 1109355 - DNA, 15 bp, Homo sapiens
acatatggagacccc

SEQ ID NO: 1109356 - DNA, 15 bp, Homo sapiens
aacatatggagaccc

SEQ ID NO: 1109357 - DNA, 15 bp, Homo sapiens
caacatatggagacc

SEQ ID NO: 1109358 - DNA, 15 bp, Homo sapiens
gcaacatatggagac

SEQ ID NO: 1109359 - DNA, 15 bp, Homo sapiens
ggcaacatatggaga

SEQ ID NO: 1109360 - DNA, 15 bp, Homo sapiens
gggcaacatatggag

SEQ ID NO: 1109361 - DNA, 15 bp, Homo sapiens
tgggcaacatatgga

SEQ ID NO: 1109362 - DNA, 15 bp, Homo sapiens
ctgggcaacatatgg

SEQ ID NO: 1109363 - DNA, 15 bp, Homo sapiens
cctgggcaacatatg

SEQ ID NO: 1109364 - DNA, 15 bp, Homo sapiens
gcctgggcaacatat

SEQ ID NO: 1109365 - DNA, 15 bp, Homo sapiens
cctaggagtttgaga

SEQ ID NO: 1109366 - DNA, 15 bp, Homo sapiens
gcctaggagtttgag

SEQ ID NO: 1109367 - DNA, 15 bp, Homo sapiens
agcctaggagtttga

SEQ ID NO: 1109368 - DNA, 15 bp, Homo sapiens
gagcctaggagtttg

SEQ ID NO: 1109369 - DNA, 15 bp, Homo sapiens
tgagcctaggagttt

SEQ ID NO: 1109370 - DNA, 15 bp, Homo sapiens
ttgagcctaggagtt

SEQ ID NO: 1109371 - DNA, 15 bp, Homo sapiens
cttgagcctaggagt

SEQ ID NO: 1109372 - DNA, 15 bp, Homo sapiens
aaggatcacttgagc

SEQ ID NO: 1109373 - DNA, 15 bp, Homo sapiens
aaaggatcacttgag

SEQ ID NO: 1109374 - DNA, 15 bp, Homo sapiens
gaaaggatcacttga

SEQ ID NO: 1109375 - DNA, 15 bp, Homo sapiens
tgaaaggatcacttg

SEQ ID NO: 1109376 - DNA, 15 bp, Homo sapiens
gtgaaaggatcactt

SEQ ID NO: 1109377 - DNA, 15 bp, Homo sapiens
ggtgaaaggatcact

SEQ ID NO: 1109378 - DNA, 15 bp, Homo sapiens
aggtgaaaggatcac

SEQ ID NO: 1109379 - DNA, 15 bp, Homo sapiens
aaggtgaaaggatca

SEQ ID NO: 1109380 - DNA, 15 bp, Homo sapiens
caaggtgaaaggatc

SEQ ID NO: 1109381 - DNA, 15 bp, Homo sapiens
ccaaggtgaaaggat

SEQ ID NO: 1109382 - DNA, 15 bp, Homo sapiens
gccaaggtgaaagga

SEQ ID NO: 1109383 - DNA, 15 bp, Homo sapiens
ggccaaggtgaaagg

SEQ ID NO: 1109384 - DNA, 15 bp, Homo sapiens
aggccaaggtgaaag

SEQ ID NO: 1109385 - DNA, 15 bp, Homo sapiens
aaggccaaggtgaaa

SEQ ID NO: 1109386 - DNA, 15 bp, Homo sapiens
caaggccaaggtgaa

SEQ ID NO: 1109387 - DNA, 15 bp, Homo sapiens
ccaaggccaaggtga

SEQ ID NO: 1109388 - DNA, 15 bp, Homo sapiens
gccaaggccaaggtg

SEQ ID NO: 1109389 - DNA, 15 bp, Homo sapiens
ggccaaggccaaggt

SEQ ID NO: 1109390 - DNA, 15 bp, Homo sapiens
aggccaaggccaagg

SEQ ID NO: 1109391 - DNA, 15 bp, Homo sapiens
gaggccaaggccaag

SEQ ID NO: 1109392 - DNA, 15 bp, Homo sapiens
ggaggccaaggccaa

SEQ ID NO: 1109393 - DNA, 15 bp, Homo sapiens
aggaggccaaggcca

SEQ ID NO: 1109394 - DNA, 15 bp, Homo sapiens
taggaggccaaggcc

SEQ ID NO: 1109395 - DNA, 15 bp, Homo sapiens
cagcactttaggagg

SEQ ID NO: 1109396 - DNA, 15 bp, Homo sapiens
ccagcactttaggag

SEQ ID NO: 1109397 - DNA, 15 bp, Homo sapiens
aggcacagtgggtca

SEQ ID NO: 1109398 - DNA, 15 bp, Homo sapiens
caggcacagtgggtc

SEQ ID NO: 1109399 - DNA, 15 bp, Homo sapiens
gcaggcacagtgggt

SEQ ID NO: 1109400 - DNA, 15 bp, Homo sapiens
ggcaggcacagtggg

SEQ ID NO: 1109401 - DNA, 15 bp, Homo sapiens
aggcaggcacagtgg

SEQ ID NO: 1109402 - DNA, 15 bp, Homo sapiens
caggcaggcacagtg

SEQ ID NO: 1109403 - DNA, 15 bp, Homo sapiens
gcaggcaggcacagt

SEQ ID NO: 1109404 - DNA, 15 bp, Homo sapiens
agcaggcaggcacag

SEQ ID NO: 1109405 - DNA, 15 bp, Homo sapiens
cagcaggcaggcaca

SEQ ID NO: 1109406 - DNA, 15 bp, Homo sapiens
ccagcaggcaggcac

SEQ ID NO: 1109407 - DNA, 15 bp, Homo sapiens
accagcaggcaggca

SEQ ID NO: 1109408 - DNA, 15 bp, Homo sapiens
taccagcaggcaggc

SEQ ID NO: 1109409 - DNA, 15 bp, Homo sapiens
ataccagcaggcagg

SEQ ID NO: 1109410 - DNA, 15 bp, Homo sapiens
cataccagcaggcag

SEQ ID NO: 1109411 - DNA, 15 bp, Homo sapiens
acataccagcaggca

SEQ ID NO: 1109412 - DNA, 15 bp, Homo sapiens
tacataccagcaggc

SEQ ID NO: 1109413 - DNA, 15 bp, Homo sapiens
ttacataccagcagg

SEQ ID NO: 1109414 - DNA, 15 bp, Homo sapiens
gttacataccagcag

SEQ ID NO: 1109415 - DNA, 15 bp, Homo sapiens
agttacataccagca

SEQ ID NO: 1109416 - DNA, 15 bp, Homo sapiens
aagttacataccagc

SEQ ID NO: 1109417 - DNA, 15 bp, Homo sapiens
caagttacataccag

SEQ ID NO: 1109418 - DNA, 15 bp, Homo sapiens
acaagttacatacca

SEQ ID NO: 1109419 - DNA, 15 bp, Homo sapiens
aacaagttacatacc

SEQ ID NO: 1109420 - DNA, 15 bp, Homo sapiens
caacaagttacatac

SEQ ID NO: 1109421 - DNA, 15 bp, Homo sapiens
acaacaagttacata

SEQ ID NO: 1109422 - DNA, 15 bp, Homo sapiens
aacaacaagttacat

SEQ ID NO: 1109423 - DNA, 15 bp, Homo sapiens
aaacaacaagttaca

SEQ ID NO: 1109424 - DNA, 15 bp, Homo sapiens
aaaacaacaagttac

SEQ ID NO: 1109425 - DNA, 15 bp, Homo sapiens
aaaaacaacaagtta

SEQ ID NO: 1109426 - DNA, 15 bp, Homo sapiens
aaaaaacaacaagtt

SEQ ID NO: 1109427 - DNA, 15 bp, Homo sapiens
aaaaaaacaacaagt

SEQ ID NO: 1109428 - DNA, 15 bp, Homo sapiens
aaaaaaaacaacaag

SEQ ID NO: 1109429 - DNA, 15 bp, Homo sapiens
tgtctaaaaaaaaaa

SEQ ID NO: 1109430 - DNA, 15 bp, Homo sapiens
ttgtctaaaaaaaaa

SEQ ID NO: 1109431 - DNA, 15 bp, Homo sapiens
tttgtctaaaaaaaa

SEQ ID NO: 1109432 - DNA, 15 bp, Homo sapiens
ctttgtctaaaaaaa

SEQ ID NO: 1109433 - DNA, 15 bp, Homo sapiens
actttgtctaaaaaa

SEQ ID NO: 1109434 - DNA, 15 bp, Homo sapiens
gactttgtctaaaaa

SEQ ID NO: 1109435 - DNA, 15 bp, Homo sapiens
agactttgtctaaaa

SEQ ID NO: 1109436 - DNA, 15 bp, Homo sapiens
gagactttgtctaaa

SEQ ID NO: 1109437 - DNA, 15 bp, Homo sapiens
tgagactttgtctaa

SEQ ID NO: 1109438 - DNA, 15 bp, Homo sapiens
gtgagactttgtcta

SEQ ID NO: 1109439 - DNA, 15 bp, Homo sapiens
agtgagactttgtct

SEQ ID NO: 1109440 - DNA, 15 bp, Homo sapiens
aagtgagactttgtc

SEQ ID NO: 1109441 - DNA, 15 bp, Homo sapiens
caagtgagactttgt

SEQ ID NO: 1109442 - DNA, 15 bp, Homo sapiens
gcaagtgagactttg

SEQ ID NO: 1109443 - DNA, 15 bp, Homo sapiens
ggcaagtgagacttt

SEQ ID NO: 1109444 - DNA, 15 bp, Homo sapiens
gggcaagtgagactt

SEQ ID NO: 1109445 - DNA, 15 bp, Homo sapiens
agggcaagtgagact

SEQ ID NO: 1109446 - DNA, 15 bp, Homo sapiens
cagggcaagtgagac

SEQ ID NO: 1109447 - DNA, 15 bp, Homo sapiens
ccagggcaagtgaga

SEQ ID NO: 1109448 - DNA, 15 bp, Homo sapiens
gccagggcaagtgag

SEQ ID NO: 1109449 - DNA, 15 bp, Homo sapiens
agccagggcaagtga

SEQ ID NO: 1109450 - DNA, 15 bp, Homo sapiens
gagccagggcaagtg

SEQ ID NO: 1109451 - DNA, 15 bp, Homo sapiens
tgagccagggcaagt

SEQ ID NO: 1109452 - DNA, 15 bp, Homo sapiens
ttgagccagggcaag

SEQ ID NO: 1109453 - DNA, 15 bp, Homo sapiens
cttgagccagggcaa

SEQ ID NO: 1109454 - DNA, 15 bp, Homo sapiens
acttgagccagggca

SEQ ID NO: 1109455 - DNA, 15 bp, Homo sapiens
cacttgagccagggc

SEQ ID NO: 1109456 - DNA, 15 bp, Homo sapiens
gcacttgagccaggg

SEQ ID NO: 1109457 - DNA, 15 bp, Homo sapiens
tgcacttgagccagg

SEQ ID NO: 1109458 - DNA, 15 bp, Homo sapiens
ctgcacttgagccag

SEQ ID NO: 1109459 - DNA, 15 bp, Homo sapiens
actgcacttgagcca

SEQ ID NO: 1109460 - DNA, 15 bp, Homo sapiens
cactgcacttgagcc

SEQ ID NO: 1109461 - DNA, 15 bp, Homo sapiens
ccactgcacttgagc

SEQ ID NO: 1109462 - DNA, 15 bp, Homo sapiens
accactgcacttgag

SEQ ID NO: 1109463 - DNA, 15 bp, Homo sapiens
caccactgcacttga

SEQ ID NO: 1109464 - DNA, 15 bp, Homo sapiens
gcaccactgcacttg

SEQ ID NO: 1109465 - DNA, 15 bp, Homo sapiens
ggcaccactgcactt

SEQ ID NO: 1109466 - DNA, 15 bp, Homo sapiens
cagtgagccaagatg

SEQ ID NO: 1109467 - DNA, 15 bp, Homo sapiens
cggagactgcagtga

SEQ ID NO: 1109468 - DNA, 15 bp, Homo sapiens
gcggagactgcagtg

SEQ ID NO: 1109469 - DNA, 15 bp, Homo sapiens
ggcggagactgcagt

SEQ ID NO: 1109470 - DNA, 15 bp, Homo sapiens
aggcggagactgcag

SEQ ID NO: 1109471 - DNA, 15 bp, Homo sapiens
gaggcggagactgca

SEQ ID NO: 1109472 - DNA, 15 bp, Homo sapiens
ggaggcggagactgc

SEQ ID NO: 1109473 - DNA, 15 bp, Homo sapiens
gggaggcggagactg

SEQ ID NO: 1109474 - DNA, 15 bp, Homo sapiens
tgggaggcggagact

SEQ ID NO: 1109475 - DNA, 15 bp, Homo sapiens
ctgggaggcggagac

SEQ ID NO: 1109476 - DNA, 15 bp, Homo sapiens
gaggagaatcacttg

SEQ ID NO: 1109477 - DNA, 15 bp, Homo sapiens
ggaggagaatcactt

SEQ ID NO: 1109478 - DNA, 15 bp, Homo sapiens
gggaggagaatcact

SEQ ID NO: 1109479 - DNA, 15 bp, Homo sapiens
agggaggagaatcac

SEQ ID NO: 1109480 - DNA, 15 bp, Homo sapiens
gagggaggagaatca

SEQ ID NO: 1109481 - DNA, 15 bp, Homo sapiens
tgagggaggagaatc

SEQ ID NO: 1109482 - DNA, 15 bp, Homo sapiens
ctgagggaggagaat

SEQ ID NO: 1109483 - DNA, 15 bp, Homo sapiens
gctgagggaggagaa

SEQ ID NO: 1109484 - DNA, 15 bp, Homo sapiens
ggctgagggaggaga

SEQ ID NO: 1109485 - DNA, 15 bp, Homo sapiens
aggaggctgagggag

SEQ ID NO: 1109486 - DNA, 15 bp, Homo sapiens
caggaggctgaggga

SEQ ID NO: 1109487 - DNA, 15 bp, Homo sapiens
tcaggaggctgaggg

SEQ ID NO: 1109488 - DNA, 15 bp, Homo sapiens
gcatggtgaaaccct

SEQ ID NO: 1109489 - DNA, 15 bp, Homo sapiens
taggagttcaagacc

SEQ ID NO: 1109490 - DNA, 15 bp, Homo sapiens
ttaggagttcaagac

SEQ ID NO: 1109491 - DNA, 15 bp, Homo sapiens
gttaggagttcaaga

SEQ ID NO: 1109492 - DNA, 15 bp, Homo sapiens
ggttaggagttcaag

SEQ ID NO: 1109493 - DNA, 15 bp, Homo sapiens
aaggttaggagttca

SEQ ID NO: 1109494 - DNA, 15 bp, Homo sapiens
caaggttaggagttc

SEQ ID NO: 1109495 - DNA, 15 bp, Homo sapiens
tcaaggttaggagtt

SEQ ID NO: 1109496 - DNA, 15 bp, Homo sapiens
ctcaaggttaggagt

SEQ ID NO: 1109497 - DNA, 15 bp, Homo sapiens
actcaaggttaggag

SEQ ID NO: 1109498 - DNA, 15 bp, Homo sapiens
cactcaaggttagga

SEQ ID NO: 1109499 - DNA, 15 bp, Homo sapiens
tcactcaaggttagg

SEQ ID NO: 1109500 - DNA, 15 bp, Homo sapiens
atcactcaaggttag

SEQ ID NO: 1109501 - DNA, 15 bp, Homo sapiens
gatcactcaaggtta

SEQ ID NO: 1109502 - DNA, 15 bp, Homo sapiens
agatcactcaaggtt

SEQ ID NO: 1109503 - DNA, 15 bp, Homo sapiens
tagatcactcaaggt

SEQ ID NO: 1109504 - DNA, 15 bp, Homo sapiens
gtagatcactcaagg

SEQ ID NO: 1109505 - DNA, 15 bp, Homo sapiens
ggtagatcactcaag

SEQ ID NO: 1109506 - DNA, 15 bp, Homo sapiens
gggtagatcactcaa

SEQ ID NO: 1109507 - DNA, 15 bp, Homo sapiens
tgggtagatcactca

SEQ ID NO: 1109508 - DNA, 15 bp, Homo sapiens
gtgggtagatcactc

SEQ ID NO: 1109509 - DNA, 15 bp, Homo sapiens
gaggtgggtagatca

SEQ ID NO: 1109510 - DNA, 15 bp, Homo sapiens
agaggtgggtagatc

SEQ ID NO: 1109511 - DNA, 15 bp, Homo sapiens
cagaggtgggtagat

SEQ ID NO: 1109512 - DNA, 15 bp, Homo sapiens
gcagaggtgggtaga

SEQ ID NO: 1109513 - DNA, 15 bp, Homo sapiens
ggcagaggtgggtag

SEQ ID NO: 1109514 - DNA, 15 bp, Homo sapiens
aggcagaggtgggta

SEQ ID NO: 1109515 - DNA, 15 bp, Homo sapiens
tgggaggcagaggtg

SEQ ID NO: 1109516 - DNA, 15 bp, Homo sapiens
ggcctgtaatccagc

SEQ ID NO: 1109517 - DNA, 15 bp, Homo sapiens
tggcctgtaatccag

SEQ ID NO: 1109518 - DNA, 15 bp, Homo sapiens
ttggcctgtaatcca

SEQ ID NO: 1109519 - DNA, 15 bp, Homo sapiens
attggcctgtaatcc

SEQ ID NO: 1109520 - DNA, 15 bp, Homo sapiens
tattggcctgtaatc

SEQ ID NO: 1109521 - DNA, 15 bp, Homo sapiens
ctattggcctgtaat

SEQ ID NO: 1109522 - DNA, 15 bp, Homo sapiens
cctattggcctgtaa

SEQ ID NO: 1109523 - DNA, 15 bp, Homo sapiens
gcctattggcctgta

SEQ ID NO: 1109524 - DNA, 15 bp, Homo sapiens
ggcctattggcctgt

SEQ ID NO: 1109525 - DNA, 15 bp, Homo sapiens
aggcctattggcctg

SEQ ID NO: 1109526 - DNA, 15 bp, Homo sapiens
caggcctattggcct

SEQ ID NO: 1109527 - DNA, 15 bp, Homo sapiens
ccaggcctattggcc

SEQ ID NO: 1109528 - DNA, 15 bp, Homo sapiens
gccaggcctattggc

SEQ ID NO: 1109529 - DNA, 15 bp, Homo sapiens
ggccaggcctattgg

SEQ ID NO: 1109530 - DNA, 15 bp, Homo sapiens
gggccaggcctattg

SEQ ID NO: 1109531 - DNA, 15 bp, Homo sapiens
ggggccaggcctatt

SEQ ID NO: 1109532 - DNA, 15 bp, Homo sapiens
gggggccaggcctat

SEQ ID NO: 1109533 - DNA, 15 bp, Homo sapiens
agggggccaggccta

SEQ ID NO: 1109534 - DNA, 15 bp, Homo sapiens
cagggggccaggcct

SEQ ID NO: 1109535 - DNA, 15 bp, Homo sapiens
acagggggccaggcc

SEQ ID NO: 1109536 - DNA, 15 bp, Homo sapiens
tacagggggccaggc

SEQ ID NO: 1109537 - DNA, 15 bp, Homo sapiens
ttacagggggccagg

SEQ ID NO: 1109538 - DNA, 15 bp, Homo sapiens
gttacagggggccag

SEQ ID NO: 1109539 - DNA, 15 bp, Homo sapiens
agttacagggggcca

SEQ ID NO: 1109540 - DNA, 15 bp, Homo sapiens
aagttacagggggcc

SEQ ID NO: 1109541 - DNA, 15 bp, Homo sapiens
aaagttacagggggc

SEQ ID NO: 1109542 - DNA, 15 bp, Homo sapiens
aaaagttacaggggg

SEQ ID NO: 1109543 - DNA, 15 bp, Homo sapiens
aaaaagttacagggg

SEQ ID NO: 1109544 - DNA, 15 bp, Homo sapiens
aaaaaagttacaggg

SEQ ID NO: 1109545 - DNA, 15 bp, Homo sapiens
aaaaaaagttacagg

SEQ ID NO: 1109546 - DNA, 15 bp, Homo sapiens
aaaaaaaagttacag

SEQ ID NO: 1109547 - DNA, 15 bp, Homo sapiens
aaaaaaaaagttaca

SEQ ID NO: 1109548 - DNA, 15 bp, Homo sapiens
aaaaaaaaaagttac

SEQ ID NO: 1109549 - DNA, 15 bp, Homo sapiens
aaaaaaaaaaagtta

SEQ ID NO: 1109550 - DNA, 15 bp, Homo sapiens
caaaaattaaaaaaa

SEQ ID NO: 1109551 - DNA, 15 bp, Homo sapiens
tcaaaaattaaaaaa

SEQ ID NO: 1109552 - DNA, 15 bp, Homo sapiens
ctcaaaaattaaaaa

SEQ ID NO: 1109553 - DNA, 15 bp, Homo sapiens
tctcaaaaattaaaa

SEQ ID NO: 1109554 - DNA, 15 bp, Homo sapiens
gtctcaaaaattaaa

SEQ ID NO: 1109555 - DNA, 15 bp, Homo sapiens
tgtctcaaaaattaa

SEQ ID NO: 1109556 - DNA, 15 bp, Homo sapiens
ctgtctcaaaaatta

SEQ ID NO: 1109557 - DNA, 15 bp, Homo sapiens
tctgtctcaaaaatt

SEQ ID NO: 1109558 - DNA, 15 bp, Homo sapiens
gagatggcaccactg

SEQ ID NO: 1109559 - DNA, 15 bp, Homo sapiens
cgagatggcaccact

SEQ ID NO: 1109560 - DNA, 15 bp, Homo sapiens
ccgagatggcaccac

SEQ ID NO: 1109561 - DNA, 15 bp, Homo sapiens
agggaggcggagctt

SEQ ID NO: 1109562 - DNA, 15 bp, Homo sapiens
cagggaggcggagct

SEQ ID NO: 1109563 - DNA, 15 bp, Homo sapiens
ccagggaggcggagc

SEQ ID NO: 1109564 - DNA, 15 bp, Homo sapiens
gtgaaccagggaggc

SEQ ID NO: 1109565 - DNA, 15 bp, Homo sapiens
cgtgaaccagggagg

SEQ ID NO: 1109566 - DNA, 15 bp, Homo sapiens
gcgtgaaccagggag

SEQ ID NO: 1109567 - DNA, 15 bp, Homo sapiens
ggcgtgaaccaggga

SEQ ID NO: 1109568 - DNA, 15 bp, Homo sapiens
tggcgtgaaccaggg

SEQ ID NO: 1109569 - DNA, 15 bp, Homo sapiens
atggcgtgaaccagg

SEQ ID NO: 1109570 - DNA, 15 bp, Homo sapiens
aatggcgtgaaccag

SEQ ID NO: 1109571 - DNA, 15 bp, Homo sapiens
gaatggcgtgaacca

SEQ ID NO: 1109572 - DNA, 15 bp, Homo sapiens
taggcgcctgtagtc

SEQ ID NO: 1109573 - DNA, 15 bp, Homo sapiens
gtaggcgcctgtagt

SEQ ID NO: 1109574 - DNA, 15 bp, Homo sapiens
ggtaggcgcctgtag

SEQ ID NO: 1109575 - DNA, 15 bp, Homo sapiens
tggtaggcgcctgta

SEQ ID NO: 1109576 - DNA, 15 bp, Homo sapiens
gtggtaggcgcctgt

SEQ ID NO: 1109577 - DNA, 15 bp, Homo sapiens
ggtggtaggcgcctg

SEQ ID NO: 1109578 - DNA, 15 bp, Homo sapiens
tggtggtaggcgcct

SEQ ID NO: 1109579 - DNA, 15 bp, Homo sapiens
gtggtggtaggcgcc

SEQ ID NO: 1109580 - DNA, 15 bp, Homo sapiens
cgtggtggtaggcgc

SEQ ID NO: 1109581 - DNA, 15 bp, Homo sapiens
gcgtggtggtaggcg

SEQ ID NO: 1109582 - DNA, 15 bp, Homo sapiens
ggcgtggtggtaggc

SEQ ID NO: 1109583 - DNA, 15 bp, Homo sapiens
aggcgtggtggtagg

SEQ ID NO: 1109584 - DNA, 15 bp, Homo sapiens
caggcgtggtggtag

SEQ ID NO: 1109585 - DNA, 15 bp, Homo sapiens
ccaaaaaattagcca

SEQ ID NO: 1109586 - DNA, 15 bp, Homo sapiens
tccaaaaaattagcc

SEQ ID NO: 1109587 - DNA, 15 bp, Homo sapiens
atccaaaaaattagc

SEQ ID NO: 1109588 - DNA, 15 bp, Homo sapiens
aatccaaaaaattag

SEQ ID NO: 1109589 - DNA, 15 bp, Homo sapiens
aaatccaaaaaatta

SEQ ID NO: 1109590 - DNA, 15 bp, Homo sapiens
aaaatccaaaaaatt

SEQ ID NO: 1109591 - DNA, 15 bp, Homo sapiens
aaaaatccaaaaaat

SEQ ID NO: 1109592 - DNA, 15 bp, Homo sapiens
taaaaatccaaaaaa

SEQ ID NO: 1109593 - DNA, 15 bp, Homo sapiens
actccatctctacta

SEQ ID NO: 1109594 - DNA, 15 bp, Homo sapiens
aactccatctctact

SEQ ID NO: 1109595 - DNA, 15 bp, Homo sapiens
gaaactccatctcta

SEQ ID NO: 1109596 - DNA, 15 bp, Homo sapiens
tgaaactccatctct

SEQ ID NO: 1109597 - DNA, 15 bp, Homo sapiens
ggtgaaactccatct

SEQ ID NO: 1109598 - DNA, 15 bp, Homo sapiens
cggtgaaactccatc

SEQ ID NO: 1109599 - DNA, 15 bp, Homo sapiens
acggtgaaactccat

SEQ ID NO: 1109600 - DNA, 15 bp, Homo sapiens
cacggtgaaactcca

SEQ ID NO: 1109601 - DNA, 15 bp, Homo sapiens
acacggtgaaactcc

SEQ ID NO: 1109602 - DNA, 15 bp, Homo sapiens
aacacggtgaaactc

SEQ ID NO: 1109603 - DNA, 15 bp, Homo sapiens
taacacggtgaaact

SEQ ID NO: 1109604 - DNA, 15 bp, Homo sapiens
aatggagaccatcct

SEQ ID NO: 1109605 - DNA, 15 bp, Homo sapiens
aaatggagaccatcc

SEQ ID NO: 1109606 - DNA, 15 bp, Homo sapiens
gaaatggagaccatc

SEQ ID NO: 1109607 - DNA, 15 bp, Homo sapiens
ggaaatggagaccat

SEQ ID NO: 1109608 - DNA, 15 bp, Homo sapiens
aggaaatggagacca

SEQ ID NO: 1109609 - DNA, 15 bp, Homo sapiens
caggaaatggagacc

SEQ ID NO: 1109610 - DNA, 15 bp, Homo sapiens
tcaggaaatggagac

SEQ ID NO: 1109611 - DNA, 15 bp, Homo sapiens
gtcaggaaatggaga

SEQ ID NO: 1109612 - DNA, 15 bp, Homo sapiens
ggtcaggaaatggag

SEQ ID NO: 1109613 - DNA, 15 bp, Homo sapiens
aggtcaggaaatgga

SEQ ID NO: 1109614 - DNA, 15 bp, Homo sapiens
aaggtcaggaaatgg

SEQ ID NO: 1109615 - DNA, 15 bp, Homo sapiens
caaggtcaggaaatg

SEQ ID NO: 1109616 - DNA, 15 bp, Homo sapiens
acaaggtcaggaaat

SEQ ID NO: 1109617 - DNA, 15 bp, Homo sapiens
cacaaggtcaggaaa

SEQ ID NO: 1109618 - DNA, 15 bp, Homo sapiens
tcacaaggtcaggaa

SEQ ID NO: 1109619 - DNA, 15 bp, Homo sapiens
aggggccgggcgtgg

SEQ ID NO: 1109620 - DNA, 15 bp, Homo sapiens
caggggccgggcgtg

SEQ ID NO: 1109621 - DNA, 15 bp, Homo sapiens
acaggggccgggcgt

SEQ ID NO: 1109622 - DNA, 15 bp, Homo sapiens
tacaggggccgggcg

SEQ ID NO: 1109623 - DNA, 15 bp, Homo sapiens
ttacaggggccgggc

SEQ ID NO: 1109624 - DNA, 15 bp, Homo sapiens
gttacaggggccggg

SEQ ID NO: 1109625 - DNA, 15 bp, Homo sapiens
agttacaggggccgg

SEQ ID NO: 1109626 - DNA, 15 bp, Homo sapiens
aagttacaggggccg

SEQ ID NO: 1109627 - DNA, 15 bp, Homo sapiens
gaagttacaggggcc

SEQ ID NO: 1109628 - DNA, 15 bp, Homo sapiens
agaagttacaggggc

SEQ ID NO: 1109629 - DNA, 15 bp, Homo sapiens
aagaagttacagggg

SEQ ID NO: 1109630 - DNA, 15 bp, Homo sapiens
taagaagttacaggg

SEQ ID NO: 1109631 - DNA, 15 bp, Homo sapiens
ttaagaagttacagg

SEQ ID NO: 1109632 - DNA, 15 bp, Homo sapiens
cttaagaagttacag

SEQ ID NO: 1109633 - DNA, 15 bp, Homo sapiens
gcttaagaagttaca

SEQ ID NO: 1109634 - DNA, 15 bp, Homo sapiens
cgcttaagaagttac

SEQ ID NO: 1109635 - DNA, 15 bp, Homo sapiens
tcgcttaagaagtta

SEQ ID NO: 1109636 - DNA, 15 bp, Homo sapiens
ttcgcttaagaagtt

SEQ ID NO: 1109637 - DNA, 15 bp, Homo sapiens
cttcgcttaagaagt

SEQ ID NO: 1109638 - DNA, 15 bp, Homo sapiens
ccttcgcttaagaag

SEQ ID NO: 1109639 - DNA, 15 bp, Homo sapiens
tccttcgcttaagaa

SEQ ID NO: 1109640 - DNA, 15 bp, Homo sapiens
ttccttcgcttaaga

SEQ ID NO: 1109641 - DNA, 15 bp, Homo sapiens
tttccttcgcttaag

SEQ ID NO: 1109642 - DNA, 15 bp, Homo sapiens
ttttccttcgcttaa

SEQ ID NO: 1109643 - DNA, 15 bp, Homo sapiens
attttccttcgctta

SEQ ID NO: 1109644 - DNA, 15 bp, Homo sapiens
tattttccttcgctt

SEQ ID NO: 1109645 - DNA, 15 bp, Homo sapiens
ttattttccttcgct

SEQ ID NO: 1109646 - DNA, 15 bp, Homo sapiens
tttattttccttcgc

SEQ ID NO: 1109647 - DNA, 15 bp, Homo sapiens
ttttattttccttcg

SEQ ID NO: 1109648 - DNA, 15 bp, Homo sapiens
tttttattttccttc

SEQ ID NO: 1109649 - DNA, 15 bp, Homo sapiens
ttttttattttcctt

SEQ ID NO: 1109650 - DNA, 15 bp, Homo sapiens
tttttttattttcct

SEQ ID NO: 1109651 - DNA, 15 bp, Homo sapiens
ttttttttattttcc

SEQ ID NO: 1109652 - DNA, 15 bp, Homo sapiens
ttttttttttttatt

SEQ ID NO: 1109653 - DNA, 15 bp, Homo sapiens
tttttttttttttat

SEQ ID NO: 1109654 - DNA, 15 bp, Homo sapiens
tctgctttttttttt

SEQ ID NO: 1109655 - DNA, 15 bp, Homo sapiens
ttctgcttttttttt

SEQ ID NO: 1109656 - DNA, 15 bp, Homo sapiens
cttctgctttttttt

SEQ ID NO: 1109657 - DNA, 15 bp, Homo sapiens
gcttctgcttttttt

SEQ ID NO: 1109658 - DNA, 15 bp, Homo sapiens
ggcttctgctttttt

SEQ ID NO: 1109659 - DNA, 15 bp, Homo sapiens
tggcttctgcttttt

SEQ ID NO: 1109660 - DNA, 15 bp, Homo sapiens
gtggcttctgctttt

SEQ ID NO: 1109661 - DNA, 15 bp, Homo sapiens
tgtggcttctgcttt

SEQ ID NO: 1109662 - DNA, 15 bp, Homo sapiens
ttgtggcttctgctt

SEQ ID NO: 1109663 - DNA, 15 bp, Homo sapiens
tttgtggcttctgct

SEQ ID NO: 1109664 - DNA, 15 bp, Homo sapiens
ctttgtggcttctgc

SEQ ID NO: 1109665 - DNA, 15 bp, Homo sapiens
cctttgtggcttctg

SEQ ID NO: 1109666 - DNA, 15 bp, Homo sapiens
tcctttgtggcttct

SEQ ID NO: 1109667 - DNA, 15 bp, Homo sapiens
ttcctttgtggcttc

SEQ ID NO: 1109668 - DNA, 15 bp, Homo sapiens
tttcctttgtggctt

SEQ ID NO: 1109669 - DNA, 15 bp, Homo sapiens
ttttcctttgtggct

SEQ ID NO: 1109670 - DNA, 15 bp, Homo sapiens
cttttcctttgtggc

SEQ ID NO: 1109671 - DNA, 15 bp, Homo sapiens
tcttttcctttgtgg

SEQ ID NO: 1109672 - DNA, 15 bp, Homo sapiens
atcttttcctttgtg

SEQ ID NO: 1109673 - DNA, 15 bp, Homo sapiens
aatcttttcctttgt

SEQ ID NO: 1109674 - DNA, 15 bp, Homo sapiens
caatcttttcctttg

SEQ ID NO: 1109675 - DNA, 15 bp, Homo sapiens
tcaatcttttccttt

SEQ ID NO: 1109676 - DNA, 15 bp, Homo sapiens
gtcaatcttttcctt

SEQ ID NO: 1109677 - DNA, 15 bp, Homo sapiens
ggtcaatcttttcct

SEQ ID NO: 1109678 - DNA, 15 bp, Homo sapiens
tggtcaatcttttcc

SEQ ID NO: 1109679 - DNA, 15 bp, Homo sapiens
ttggtcaatcttttc

SEQ ID NO: 1109680 - DNA, 15 bp, Homo sapiens
attggtcaatctttt

SEQ ID NO: 1109681 - DNA, 15 bp, Homo sapiens
tattggtcaatcttt

SEQ ID NO: 1109682 - DNA, 15 bp, Homo sapiens
atattggtcaatctt

SEQ ID NO: 1109683 - DNA, 15 bp, Homo sapiens
tatattggtcaatct

SEQ ID NO: 1109684 - DNA, 15 bp, Homo sapiens
atatattggtcaatc

SEQ ID NO: 1109685 - DNA, 15 bp, Homo sapiens
aatatattggtcaat

SEQ ID NO: 1109686 - DNA, 15 bp, Homo sapiens
aaatatattggtcaa

SEQ ID NO: 1109687 - DNA, 15 bp, Homo sapiens
gaaatatattggtca

SEQ ID NO: 1109688 - DNA, 15 bp, Homo sapiens
tgaaatatattggtc

SEQ ID NO: 1109689 - DNA, 15 bp, Homo sapiens
ctgaaatatattggt

SEQ ID NO: 1109690 - DNA, 15 bp, Homo sapiens
tctgaaatatattgg

SEQ ID NO: 1109691 - DNA, 15 bp, Homo sapiens
atctgaaatatattg

SEQ ID NO: 1109692 - DNA, 15 bp, Homo sapiens
catctgaaatatatt

SEQ ID NO: 1109693 - DNA, 15 bp, Homo sapiens
tcatctgaaatatat

SEQ ID NO: 1109694 - DNA, 15 bp, Homo sapiens
gtcatctgaaatata

SEQ ID NO: 1109695 - DNA, 15 bp, Homo sapiens
tgtcatctgaaatat

SEQ ID NO: 1109696 - DNA, 15 bp, Homo sapiens
atgtcatctgaaata

SEQ ID NO: 1109697 - DNA, 15 bp, Homo sapiens
tatgtcatctgaaat

SEQ ID NO: 1109698 - DNA, 15 bp, Homo sapiens
ttatgtcatctgaaa

SEQ ID NO: 1109699 - DNA, 15 bp, Homo sapiens
gttatgtcatctgaa

SEQ ID NO: 1109700 - DNA, 15 bp, Homo sapiens
tgttatgtcatctga

SEQ ID NO: 1109701 - DNA, 15 bp, Homo sapiens
ttgttatgtcatctg

SEQ ID NO: 1109702 - DNA, 15 bp, Homo sapiens
gttgttatgtcatct

SEQ ID NO: 1109703 - DNA, 15 bp, Homo sapiens
tgttgttatgtcatc

SEQ ID NO: 1109704 - DNA, 15 bp, Homo sapiens
ttgttgttatgtcat

SEQ ID NO: 1109705 - DNA, 15 bp, Homo sapiens
gttgttgttatgtca

SEQ ID NO: 1109706 - DNA, 15 bp, Homo sapiens
tgttgttgttatgtc

SEQ ID NO: 1109707 - DNA, 15 bp, Homo sapiens
gtgttgttgttatgt

SEQ ID NO: 1109708 - DNA, 15 bp, Homo sapiens
tgtgttgttgttatg

SEQ ID NO: 1109709 - DNA, 15 bp, Homo sapiens
ttgtgttgttgttat

SEQ ID NO: 1109710 - DNA, 15 bp, Homo sapiens
tttgtgttgttgtta

SEQ ID NO: 1109711 - DNA, 15 bp, Homo sapiens
ttttgtgttgttgtt

SEQ ID NO: 1109712 - DNA, 15 bp, Homo sapiens
cttttgtgttgttgt

SEQ ID NO: 1109713 - DNA, 15 bp, Homo sapiens
tcttttgtgttgttg

SEQ ID NO: 1109714 - DNA, 15 bp, Homo sapiens
gtcttttgtgttgtt

SEQ ID NO: 1109715 - DNA, 15 bp, Homo sapiens
tgtcttttgtgttgt

SEQ ID NO: 1109716 - DNA, 15 bp, Homo sapiens
ttgtcttttgtgttg

SEQ ID NO: 1109717 - DNA, 15 bp, Homo sapiens
tttgtcttttgtgtt

SEQ ID NO: 1109718 - DNA, 15 bp, Homo sapiens
atttgtcttttgtgt

SEQ ID NO: 1109719 - DNA, 15 bp, Homo sapiens
catttgtcttttgtg

SEQ ID NO: 1109720 - DNA, 15 bp, Homo sapiens
tcatttgtcttttgt

SEQ ID NO: 1109721 - DNA, 15 bp, Homo sapiens
gtcatttgtcttttg

SEQ ID NO: 1109722 - DNA, 15 bp, Homo sapiens
tgtcatttgtctttt

SEQ ID NO: 1109723 - DNA, 15 bp, Homo sapiens
ctgtcatttgtcttt

SEQ ID NO: 1109724 - DNA, 15 bp, Homo sapiens
tctgtcatttgtctt

SEQ ID NO: 1109725 - DNA, 15 bp, Homo sapiens
atctgtcatttgtct

SEQ ID NO: 1109726 - DNA, 15 bp, Homo sapiens
aatctgtcatttgtc

SEQ ID NO: 1109727 - DNA, 15 bp, Homo sapiens
caatctgtcatttgt

SEQ ID NO: 1109728 - DNA, 15 bp, Homo sapiens
ccaatctgtcatttg

SEQ ID NO: 1109729 - DNA, 15 bp, Homo sapiens
cccaatctgtcattt

SEQ ID NO: 1109730 - DNA, 15 bp, Homo sapiens
tcccaatctgtcatt

SEQ ID NO: 1109731 - DNA, 15 bp, Homo sapiens
ctcccaatctgtcat

SEQ ID NO: 1109732 - DNA, 15 bp, Homo sapiens
cctcccaatctgtca

SEQ ID NO: 1109733 - DNA, 15 bp, Homo sapiens
tcctcccaatctgtc

SEQ ID NO: 1109734 - DNA, 15 bp, Homo sapiens
ttcctcccaatctgt

SEQ ID NO: 1109735 - DNA, 15 bp, Homo sapiens
cttcctcccaatctg

SEQ ID NO: 1109736 - DNA, 15 bp, Homo sapiens
gcttcctcccaatct

SEQ ID NO: 1109737 - DNA, 15 bp, Homo sapiens
tgcttcctcccaatc

SEQ ID NO: 1109738 - DNA, 15 bp, Homo sapiens
atgcttcctcccaat

SEQ ID NO: 1109739 - DNA, 15 bp, Homo sapiens
gatgcttcctcccaa

SEQ ID NO: 1109740 - DNA, 15 bp, Homo sapiens
agatgcttcctccca

SEQ ID NO: 1109741 - DNA, 15 bp, Homo sapiens
cagatgcttcctccc

SEQ ID NO: 1109742 - DNA, 15 bp, Homo sapiens
tcagatgcttcctcc

SEQ ID NO: 1109743 - DNA, 15 bp, Homo sapiens
ttcagatgcttcctc

SEQ ID NO: 1109744 - DNA, 15 bp, Homo sapiens
tttcagatgcttcct

SEQ ID NO: 1109745 - DNA, 15 bp, Homo sapiens
gtttcagatgcttcc

SEQ ID NO: 1109746 - DNA, 15 bp, Homo sapiens
tgtttcagatgcttc

SEQ ID NO: 1109747 - DNA, 15 bp, Homo sapiens
atgtttcagatgctt

SEQ ID NO: 1109748 - DNA, 15 bp, Homo sapiens
tatgtttcagatgct

SEQ ID NO: 1109749 - DNA, 15 bp, Homo sapiens
gtatgtttcagatgc

SEQ ID NO: 1109750 - DNA, 15 bp, Homo sapiens
tgtatgtttcagatg

SEQ ID NO: 1109751 - DNA, 15 bp, Homo sapiens
ttgtatgtttcagat

SEQ ID NO: 1109752 - DNA, 15 bp, Homo sapiens
tttgtatgtttcaga

SEQ ID NO: 1109753 - DNA, 15 bp, Homo sapiens
ttttgtatgtttcag

SEQ ID NO: 1109754 - DNA, 15 bp, Homo sapiens
attttgtatgtttca

SEQ ID NO: 1109755 - DNA, 15 bp, Homo sapiens
tattttgtatgtttc

SEQ ID NO: 1109756 - DNA, 15 bp, Homo sapiens
gtattttgtatgttt

SEQ ID NO: 1109757 - DNA, 15 bp, Homo sapiens
ggtattttgtatgtt

SEQ ID NO: 1109758 - DNA, 15 bp, Homo sapiens
gggtattttgtatgt

SEQ ID NO: 1109759 - DNA, 15 bp, Homo sapiens
tgggtattttgtatg

SEQ ID NO: 1109760 - DNA, 15 bp, Homo sapiens
ctgggtattttgtat

SEQ ID NO: 1109761 - DNA, 15 bp, Homo sapiens
tctgggtattttgta

SEQ ID NO: 1109762 - DNA, 15 bp, Homo sapiens
ttctgggtattttgt

SEQ ID NO: 1109763 - DNA, 15 bp, Homo sapiens
attctgggtattttg

SEQ ID NO: 1109764 - DNA, 15 bp, Homo sapiens
tattctgggtatttt

SEQ ID NO: 1109765 - DNA, 15 bp, Homo sapiens
atattctgggtattt

SEQ ID NO: 1109766 - DNA, 15 bp, Homo sapiens
tatattctgggtatt

SEQ ID NO: 1109767 - DNA, 15 bp, Homo sapiens
atatattctgggtat

SEQ ID NO: 1109768 - DNA, 15 bp, Homo sapiens
tatatattctgggta

SEQ ID NO: 1109769 - DNA, 15 bp, Homo sapiens
ttatatattctgggt

SEQ ID NO: 1109770 - DNA, 15 bp, Homo sapiens
tttatatattctggg

SEQ ID NO: 1109771 - DNA, 15 bp, Homo sapiens
gtttatatattctgg

SEQ ID NO: 1109772 - DNA, 15 bp, Homo sapiens
tgtttatatattctg

SEQ ID NO: 1109773 - DNA, 15 bp, Homo sapiens
ctgtttatatattct

SEQ ID NO: 1109774 - DNA, 15 bp, Homo sapiens
gctgtttatatattc

SEQ ID NO: 1109775 - DNA, 15 bp, Homo sapiens
agctgtttatatatt

SEQ ID NO: 1109776 - DNA, 15 bp, Homo sapiens
gagctgtttatatat

SEQ ID NO: 1109777 - DNA, 15 bp, Homo sapiens
ggagctgtttatata

SEQ ID NO: 1109778 - DNA, 15 bp, Homo sapiens
aggagctgtttatat

SEQ ID NO: 1109779 - DNA, 15 bp, Homo sapiens
taggagctgtttata

SEQ ID NO: 1109780 - DNA, 15 bp, Homo sapiens
gtaggagctgtttat

SEQ ID NO: 1109781 - DNA, 15 bp, Homo sapiens
tgtaggagctgttta

SEQ ID NO: 1109782 - DNA, 15 bp, Homo sapiens
ctgtaggagctgttt

SEQ ID NO: 1109783 - DNA, 15 bp, Homo sapiens
actgtaggagctgtt

SEQ ID NO: 1109784 - DNA, 15 bp, Homo sapiens
aactgtaggagctgt

SEQ ID NO: 1109785 - DNA, 15 bp, Homo sapiens
gaactgtaggagctg

SEQ ID NO: 1109786 - DNA, 15 bp, Homo sapiens
tgaactgtaggagct

SEQ ID NO: 1109787 - DNA, 15 bp, Homo sapiens
ttgaactgtaggagc

SEQ ID NO: 1109788 - DNA, 15 bp, Homo sapiens
gttgaactgtaggag

SEQ ID NO: 1109789 - DNA, 15 bp, Homo sapiens
tgttgaactgtagga

SEQ ID NO: 1109790 - DNA, 15 bp, Homo sapiens
ttgttgaactgtagg

SEQ ID NO: 1109791 - DNA, 15 bp, Homo sapiens
cttgttgaactgtag

SEQ ID NO: 1109792 - DNA, 15 bp, Homo sapiens
tcttgttgaactgta

SEQ ID NO: 1109793 - DNA, 15 bp, Homo sapiens
ttcttgttgaactgt

SEQ ID NO: 1109794 - DNA, 15 bp, Homo sapiens
tttcttgttgaactg

SEQ ID NO: 1109795 - DNA, 15 bp, Homo sapiens
ctttcttgttgaact

SEQ ID NO: 1109796 - DNA, 15 bp, Homo sapiens
tctttcttgttgaac

SEQ ID NO: 1109797 - DNA, 15 bp, Homo sapiens
ttctttcttgttgaa

SEQ ID NO: 1109798 - DNA, 15 bp, Homo sapiens
tttctttcttgttga

SEQ ID NO: 1109799 - DNA, 15 bp, Homo sapiens
ttttctttcttgttg

SEQ ID NO: 1109800 - DNA, 15 bp, Homo sapiens
attttctttcttgtt

SEQ ID NO: 1109801 - DNA, 15 bp, Homo sapiens
tattttctttcttgt

SEQ ID NO: 1109802 - DNA, 15 bp, Homo sapiens
gtattttctttcttg

SEQ ID NO: 1109803 - DNA, 15 bp, Homo sapiens
agtattttctttctt

SEQ ID NO: 1109804 - DNA, 15 bp, Homo sapiens
cagtattttctttct

SEQ ID NO: 1109805 - DNA, 15 bp, Homo sapiens
gcagtattttctttc

SEQ ID NO: 1109806 - DNA, 15 bp, Homo sapiens
tgcagtattttcttt

SEQ ID NO: 1109807 - DNA, 15 bp, Homo sapiens
ttgcagtattttctt

SEQ ID NO: 1109808 - DNA, 15 bp, Homo sapiens
tttgcagtattttct

SEQ ID NO: 1109809 - DNA, 15 bp, Homo sapiens
ttttgcagtattttc

SEQ ID NO: 1109810 - DNA, 15 bp, Homo sapiens
tttttgcagtatttt

SEQ ID NO: 1109811 - DNA, 15 bp, Homo sapiens
gtttttgcagtattt

SEQ ID NO: 1109812 - DNA, 15 bp, Homo sapiens
tgtttttgcagtatt

SEQ ID NO: 1109813 - DNA, 15 bp, Homo sapiens
ttgtttttgcagtat

SEQ ID NO: 1109814 - DNA, 15 bp, Homo sapiens
attgtttttgcagta

SEQ ID NO: 1109815 - DNA, 15 bp, Homo sapiens
gattgtttttgcagt

SEQ ID NO: 1109816 - DNA, 15 bp, Homo sapiens
tgattgtttttgcag

SEQ ID NO: 1109817 - DNA, 15 bp, Homo sapiens
ctgattgtttttgca

SEQ ID NO: 1109818 - DNA, 15 bp, Homo sapiens
gctgattgtttttgc

SEQ ID NO: 1109819 - DNA, 15 bp, Homo sapiens
tgctgattgtttttg

SEQ ID NO: 1109820 - DNA, 15 bp, Homo sapiens
ttgctgattgttttt

SEQ ID NO: 1109821 - DNA, 15 bp, Homo sapiens
tttgctgattgtttt

SEQ ID NO: 1109822 - DNA, 15 bp, Homo sapiens
atttgctgattgttt

SEQ ID NO: 1109823 - DNA, 15 bp, Homo sapiens
tatttgctgattgtt

SEQ ID NO: 1109824 - DNA, 15 bp, Homo sapiens
ttatttgctgattgt

SEQ ID NO: 1109825 - DNA, 15 bp, Homo sapiens
attatttgctgattg

SEQ ID NO: 1109826 - DNA, 15 bp, Homo sapiens
tattatttgctgatt

SEQ ID NO: 1109827 - DNA, 15 bp, Homo sapiens
gtattatttgctgat

SEQ ID NO: 1109828 - DNA, 15 bp, Homo sapiens
agtattatttgctga

SEQ ID NO: 1109829 - DNA, 15 bp, Homo sapiens
cagtattatttgctg

SEQ ID NO: 1109830 - DNA, 15 bp, Homo sapiens
acagtattatttgct

SEQ ID NO: 1109831 - DNA, 15 bp, Homo sapiens
cacagtattatttgc

SEQ ID NO: 1109832 - DNA, 15 bp, Homo sapiens
tcacagtattatttg

SEQ ID NO: 1109833 - DNA, 15 bp, Homo sapiens
accatcacagtatta

SEQ ID NO: 1109834 - DNA, 15 bp, Homo sapiens
taccatcacagtatt

SEQ ID NO: 1109835 - DNA, 15 bp, Homo sapiens
ctaccatcacagtat

SEQ ID NO: 1109836 - DNA, 15 bp, Homo sapiens
tctaccatcacagta

SEQ ID NO: 1109837 - DNA, 15 bp, Homo sapiens
ttctaccatcacagt

SEQ ID NO: 1109838 - DNA, 15 bp, Homo sapiens
gttctaccatcacag

SEQ ID NO: 1109839 - DNA, 15 bp, Homo sapiens
tgttctaccatcaca

SEQ ID NO: 1109840 - DNA, 15 bp, Homo sapiens
ttgttctaccatcac

SEQ ID NO: 1109841 - DNA, 15 bp, Homo sapiens
attgttctaccatca

SEQ ID NO: 1109842 - DNA, 15 bp, Homo sapiens
cattgttctaccatc

SEQ ID NO: 1109843 - DNA, 15 bp, Homo sapiens
acattgttctaccat

SEQ ID NO: 1109844 - DNA, 15 bp, Homo sapiens
tacattgttctacca

SEQ ID NO: 1109845 - DNA, 15 bp, Homo sapiens
atacattgttctacc

SEQ ID NO: 1109846 - DNA, 15 bp, Homo sapiens
gatacattgttctac

SEQ ID NO: 1109847 - DNA, 15 bp, Homo sapiens
agatacattgttcta

SEQ ID NO: 1109848 - DNA, 15 bp, Homo sapiens
tagatacattgttct

SEQ ID NO: 1109849 - DNA, 15 bp, Homo sapiens
gtagatacattgttc

SEQ ID NO: 1109850 - DNA, 15 bp, Homo sapiens
agtagatacattgtt

SEQ ID NO: 1109851 - DNA, 15 bp, Homo sapiens
aagtagatacattgt

SEQ ID NO: 1109852 - DNA, 15 bp, Homo sapiens
caagtagatacattg

SEQ ID NO: 1109853 - DNA, 15 bp, Homo sapiens
ccaagtagatacatt

SEQ ID NO: 1109854 - DNA, 15 bp, Homo sapiens
tccaagtagatacat

SEQ ID NO: 1109855 - DNA, 15 bp, Homo sapiens
atccaagtagataca

SEQ ID NO: 1109856 - DNA, 15 bp, Homo sapiens
catccaagtagatac

SEQ ID NO: 1109857 - DNA, 15 bp, Homo sapiens
accatccaagtagat

SEQ ID NO: 1109858 - DNA, 15 bp, Homo sapiens
caccatccaagtaga

SEQ ID NO: 1109859 - DNA, 15 bp, Homo sapiens
gcaccatccaagtag

SEQ ID NO: 1109860 - DNA, 15 bp, Homo sapiens
agcaccatccaagta

SEQ ID NO: 1109861 - DNA, 15 bp, Homo sapiens
gagcaccatccaagt

SEQ ID NO: 1109862 - DNA, 15 bp, Homo sapiens
ggagcaccatccaag

SEQ ID NO: 1109863 - DNA, 15 bp, Homo sapiens
aggagcaccatccaa

SEQ ID NO: 1109864 - DNA, 15 bp, Homo sapiens
caggagcaccatcca

SEQ ID NO: 1109865 - DNA, 15 bp, Homo sapiens
ccaggagcaccatcc

SEQ ID NO: 1109866 - DNA, 15 bp, Homo sapiens
tccaggagcaccatc

SEQ ID NO: 1109867 - DNA, 15 bp, Homo sapiens
atccaggagcaccat

SEQ ID NO: 1109868 - DNA, 15 bp, Homo sapiens
aatccaggagcacca

SEQ ID NO: 1109869 - DNA, 15 bp, Homo sapiens
taatccaggagcacc

SEQ ID NO: 1109870 - DNA, 15 bp, Homo sapiens
ctaatccaggagcac

SEQ ID NO: 1109871 - DNA, 15 bp, Homo sapiens
tctaatccaggagca

SEQ ID NO: 1109872 - DNA, 15 bp, Homo sapiens
atctaatccaggagc

SEQ ID NO: 1109873 - DNA, 15 bp, Homo sapiens
aatctaatccaggag

SEQ ID NO: 1109874 - DNA, 15 bp, Homo sapiens
taatctaatccagga

SEQ ID NO: 1109875 - DNA, 15 bp, Homo sapiens
ttaatctaatccagg

SEQ ID NO: 1109876 - DNA, 15 bp, Homo sapiens
gttaatctaatccag

SEQ ID NO: 1109877 - DNA, 15 bp, Homo sapiens
tgttaatctaatcca

SEQ ID NO: 1109878 - DNA, 15 bp, Homo sapiens
atgttaatctaatcc

SEQ ID NO: 1109879 - DNA, 15 bp, Homo sapiens
aatgttaatctaatc

SEQ ID NO: 1109880 - DNA, 15 bp, Homo sapiens
aaatgttaatctaat

SEQ ID NO: 1109881 - DNA, 15 bp, Homo sapiens
taaatgttaatctaa

SEQ ID NO: 1109882 - DNA, 15 bp, Homo sapiens
ttaaatgttaatcta

SEQ ID NO: 1109883 - DNA, 15 bp, Homo sapiens
tttaaatgttaatct

SEQ ID NO: 1109884 - DNA, 15 bp, Homo sapiens
atttaaatgttaatc

SEQ ID NO: 1109885 - DNA, 15 bp, Homo sapiens
gatttaaatgttaat

SEQ ID NO: 1109886 - DNA, 15 bp, Homo sapiens
tgatttaaatgttaa

SEQ ID NO: 1109887 - DNA, 15 bp, Homo sapiens
ctgatttaaatgtta

SEQ ID NO: 1109888 - DNA, 15 bp, Homo sapiens
actgatttaaatgtt

SEQ ID NO: 1109889 - DNA, 15 bp, Homo sapiens
cactgatttaaatgt

SEQ ID NO: 1109890 - DNA, 15 bp, Homo sapiens
tcactgatttaaatg

SEQ ID NO: 1109891 - DNA, 15 bp, Homo sapiens
ttcactgatttaaat

SEQ ID NO: 1109892 - DNA, 15 bp, Homo sapiens
gttcactgatttaaa

SEQ ID NO: 1109893 - DNA, 15 bp, Homo sapiens
agttcactgatttaa

SEQ ID NO: 1109894 - DNA, 15 bp, Homo sapiens
aagttcactgattta

SEQ ID NO: 1109895 - DNA, 15 bp, Homo sapiens
aaagttcactgattt

SEQ ID NO: 1109896 - DNA, 15 bp, Homo sapiens
caaagttcactgatt

SEQ ID NO: 1109897 - DNA, 15 bp, Homo sapiens
ccaaagttcactgat

SEQ ID NO: 1109898 - DNA, 15 bp, Homo sapiens
accaaagttcactga

SEQ ID NO: 1109899 - DNA, 15 bp, Homo sapiens
aaccaaagttcactg

SEQ ID NO: 1109900 - DNA, 15 bp, Homo sapiens
taaccaaagttcact

SEQ ID NO: 1109901 - DNA, 15 bp, Homo sapiens
ttaaccaaagttcac

SEQ ID NO: 1109902 - DNA, 15 bp, Homo sapiens
tttaaccaaagttca

SEQ ID NO: 1109903 - DNA, 15 bp, Homo sapiens
ctttaaccaaagttc

SEQ ID NO: 1109904 - DNA, 15 bp, Homo sapiens
gctttaaccaaagtt

SEQ ID NO: 1109905 - DNA, 15 bp, Homo sapiens
tgctttaaccaaagt

SEQ ID NO: 1109906 - DNA, 15 bp, Homo sapiens
ttgctttaaccaaag

SEQ ID NO: 1109907 - DNA, 15 bp, Homo sapiens
tttgctttaaccaaa

SEQ ID NO: 1109908 - DNA, 15 bp, Homo sapiens
atttgctttaaccaa

SEQ ID NO: 1109909 - DNA, 15 bp, Homo sapiens
aatttgctttaacca

SEQ ID NO: 1109910 - DNA, 15 bp, Homo sapiens
caatttgctttaacc

SEQ ID NO: 1109911 - DNA, 15 bp, Homo sapiens
gcaatttgctttaac

SEQ ID NO: 1109912 - DNA, 15 bp, Homo sapiens
agcaatttgctttaa

SEQ ID NO: 1109913 - DNA, 15 bp, Homo sapiens
gagcaatttgcttta

SEQ ID NO: 1109914 - DNA, 15 bp, Homo sapiens
agagcaatttgcttt

SEQ ID NO: 1109915 - DNA, 15 bp, Homo sapiens
gagagcaatttgctt

SEQ ID NO: 1109916 - DNA, 15 bp, Homo sapiens
ggagagcaatttgct

SEQ ID NO: 1109917 - DNA, 15 bp, Homo sapiens
tggagagcaatttgc

SEQ ID NO: 1109918 - DNA, 15 bp, Homo sapiens
atggagagcaatttg

SEQ ID NO: 1109919 - DNA, 15 bp, Homo sapiens
aatggagagcaattt

SEQ ID NO: 1109920 - DNA, 15 bp, Homo sapiens
caatggagagcaatt

SEQ ID NO: 1109921 - DNA, 15 bp, Homo sapiens
acaatggagagcaat

SEQ ID NO: 1109922 - DNA, 15 bp, Homo sapiens
tacaatggagagcaa

SEQ ID NO: 1109923 - DNA, 15 bp, Homo sapiens
ctacaatggagagca

SEQ ID NO: 1109924 - DNA, 15 bp, Homo sapiens
cctacaatggagagc

SEQ ID NO: 1109925 - DNA, 15 bp, Homo sapiens
ccctacaatggagag

SEQ ID NO: 1109926 - DNA, 15 bp, Homo sapiens
tccctacaatggaga

SEQ ID NO: 1109927 - DNA, 15 bp, Homo sapiens
ctccctacaatggag

SEQ ID NO: 1109928 - DNA, 15 bp, Homo sapiens
tctccctacaatgga

SEQ ID NO: 1109929 - DNA, 15 bp, Homo sapiens
gtctccctacaatgg

SEQ ID NO: 1109930 - DNA, 15 bp, Homo sapiens
ggtctccctacaatg

SEQ ID NO: 1109931 - DNA, 15 bp, Homo sapiens
gggtctccctacaat

SEQ ID NO: 1109932 - DNA, 15 bp, Homo sapiens
ggggtctccctacaa

SEQ ID NO: 1109933 - DNA, 15 bp, Homo sapiens
gggggtctccctaca

SEQ ID NO: 1109934 - DNA, 15 bp, Homo sapiens
agggggtctccctac

SEQ ID NO: 1109935 - DNA, 15 bp, Homo sapiens
cagggggtctcccta

SEQ ID NO: 1109936 - DNA, 15 bp, Homo sapiens
tcagggggtctccct

SEQ ID NO: 1109937 - DNA, 15 bp, Homo sapiens
ttcagggggtctccc

SEQ ID NO: 1109938 - DNA, 15 bp, Homo sapiens
tttcagggggtctcc

SEQ ID NO: 1109939 - DNA, 15 bp, Homo sapiens
gtttcagggggtctc

SEQ ID NO: 1109940 - DNA, 15 bp, Homo sapiens
agtttcagggggtct

SEQ ID NO: 1109941 - DNA, 15 bp, Homo sapiens
tagtttcagggggtc

SEQ ID NO: 1109942 - DNA, 15 bp, Homo sapiens
atagtttcagggggt

SEQ ID NO: 1109943 - DNA, 15 bp, Homo sapiens
aatagtttcaggggg

SEQ ID NO: 1109944 - DNA, 15 bp, Homo sapiens
caatagtttcagggg

SEQ ID NO: 1109945 - DNA, 15 bp, Homo sapiens
gcaatagtttcaggg

SEQ ID NO: 1109946 - DNA, 15 bp, Homo sapiens
agcaatagtttcagg

SEQ ID NO: 1109947 - DNA, 15 bp, Homo sapiens
tagcaatagtttcag

SEQ ID NO: 1109948 - DNA, 15 bp, Homo sapiens
gtagcaatagtttca

SEQ ID NO: 1109949 - DNA, 15 bp, Homo sapiens
cgtagcaatagtttc

SEQ ID NO: 1109950 - DNA, 15 bp, Homo sapiens
ccgtagcaatagttt

SEQ ID NO: 1109951 - DNA, 15 bp, Homo sapiens
tccgtagcaatagtt

SEQ ID NO: 1109952 - DNA, 15 bp, Homo sapiens
ttccgtagcaatagt

SEQ ID NO: 1109953 - DNA, 15 bp, Homo sapiens
attccgtagcaatag

SEQ ID NO: 1109954 - DNA, 15 bp, Homo sapiens
tattccgtagcaata

SEQ ID NO: 1109955 - DNA, 15 bp, Homo sapiens
ttattccgtagcaat

SEQ ID NO: 1109956 - DNA, 15 bp, Homo sapiens
tttattccgtagcaa

SEQ ID NO: 1109957 - DNA, 15 bp, Homo sapiens
ttttattccgtagca

SEQ ID NO: 1109958 - DNA, 15 bp, Homo sapiens
cttttattccgtagc

SEQ ID NO: 1109959 - DNA, 15 bp, Homo sapiens
tcttttattccgtag

SEQ ID NO: 1109960 - DNA, 15 bp, Homo sapiens
atcttttattccgta

SEQ ID NO: 1109961 - DNA, 15 bp, Homo sapiens
catcttttattccgt

SEQ ID NO: 1109962 - DNA, 15 bp, Homo sapiens
tcatcttttattccg

SEQ ID NO: 1109963 - DNA, 15 bp, Homo sapiens
ttcatcttttattcc

SEQ ID NO: 1109964 - DNA, 15 bp, Homo sapiens
tttcatcttttattc

SEQ ID NO: 1109965 - DNA, 15 bp, Homo sapiens
atttcatcttttatt

SEQ ID NO: 1109966 - DNA, 15 bp, Homo sapiens
catttcatcttttat

SEQ ID NO: 1109967 - DNA, 15 bp, Homo sapiens
gcatttcatctttta

SEQ ID NO: 1109968 - DNA, 15 bp, Homo sapiens
agcatttcatctttt

SEQ ID NO: 1109969 - DNA, 15 bp, Homo sapiens
gagcatttcatcttt

SEQ ID NO: 1109970 - DNA, 15 bp, Homo sapiens
ggagcatttcatctt

SEQ ID NO: 1109971 - DNA, 15 bp, Homo sapiens
aggagcatttcatct

SEQ ID NO: 1109972 - DNA, 15 bp, Homo sapiens
caggagcatttcatc

SEQ ID NO: 1109973 - DNA, 15 bp, Homo sapiens
tcaggagcatttcat

SEQ ID NO: 1109974 - DNA, 15 bp, Homo sapiens
atcaggagcatttca

SEQ ID NO: 1109975 - DNA, 15 bp, Homo sapiens
aatcaggagcatttc

SEQ ID NO: 1109976 - DNA, 15 bp, Homo sapiens
taatcaggagcattt

SEQ ID NO: 1109977 - DNA, 15 bp, Homo sapiens
ataatcaggagcatt

SEQ ID NO: 1109978 - DNA, 15 bp, Homo sapiens
aataatcaggagcat

SEQ ID NO: 1109979 - DNA, 15 bp, Homo sapiens
caataatcaggagca

SEQ ID NO: 1109980 - DNA, 15 bp, Homo sapiens
acaataatcaggagc

SEQ ID NO: 1109981 - DNA, 15 bp, Homo sapiens
tacaataatcaggag

SEQ ID NO: 1109982 - DNA, 15 bp, Homo sapiens
ttacaataatcagga

SEQ ID NO: 1109983 - DNA, 15 bp, Homo sapiens
tttacaataatcagg

SEQ ID NO: 1109984 - DNA, 15 bp, Homo sapiens
atttacaataatcag

SEQ ID NO: 1109985 - DNA, 15 bp, Homo sapiens
tatttacaataatca

SEQ ID NO: 1109986 - DNA, 15 bp, Homo sapiens
gtatttacaataatc

SEQ ID NO: 1109987 - DNA, 15 bp, Homo sapiens
cgtatttacaataat

SEQ ID NO: 1109988 - DNA, 15 bp, Homo sapiens
tcgtatttacaataa

SEQ ID NO: 1109989 - DNA, 15 bp, Homo sapiens
ttcgtatttacaata

SEQ ID NO: 1109990 - DNA, 15 bp, Homo sapiens
tttcgtatttacaat

SEQ ID NO: 1109991 - DNA, 15 bp, Homo sapiens
atttcgtatttacaa

SEQ ID NO: 1109992 - DNA, 15 bp, Homo sapiens
aatttcgtatttaca

SEQ ID NO: 1109993 - DNA, 15 bp, Homo sapiens
caatttcgtatttac

SEQ ID NO: 1109994 - DNA, 15 bp, Homo sapiens
gcaatttcgtattta

SEQ ID NO: 1109995 - DNA, 15 bp, Homo sapiens
tgcaatttcgtattt

SEQ ID NO: 1109996 - DNA, 15 bp, Homo sapiens
atgcaatttcgtatt

SEQ ID NO: 1109997 - DNA, 15 bp, Homo sapiens
catgcaatttcgtat

SEQ ID NO: 1109998 - DNA, 15 bp, Homo sapiens
gcatgcaatttcgta

SEQ ID NO: 1109999 - DNA, 15 bp, Homo sapiens
tgcatgcaatttcgt

SEQ ID NO: 1110000 - DNA, 15 bp, Homo sapiens
ctgcatgcaatttcg

SEQ ID NO: 1110001 - DNA, 15 bp, Homo sapiens
cctgcatgcaatttc

SEQ ID NO: 1110002 - DNA, 15 bp, Homo sapiens
tcctgcatgcaattt

SEQ ID NO: 1110003 - DNA, 15 bp, Homo sapiens
atcctgcatgcaatt

SEQ ID NO: 1110004 - DNA, 15 bp, Homo sapiens
aatcctgcatgcaat

SEQ ID NO: 1110005 - DNA, 15 bp, Homo sapiens
caatcctgcatgcaa

SEQ ID NO: 1110006 - DNA, 15 bp, Homo sapiens
acaatcctgcatgca

SEQ ID NO: 1110007 - DNA, 15 bp, Homo sapiens
cacaatcctgcatgc

SEQ ID NO: 1110008 - DNA, 15 bp, Homo sapiens
acacaatcctgcatg

SEQ ID NO: 1110009 - DNA, 15 bp, Homo sapiens
tacacaatcctgcat

SEQ ID NO: 1110010 - DNA, 15 bp, Homo sapiens
ttacacaatcctgca

SEQ ID NO: 1110011 - DNA, 15 bp, Homo sapiens
tttacacaatcctgc

SEQ ID NO: 1110012 - DNA, 15 bp, Homo sapiens
ctttacacaatcctg

SEQ ID NO: 1110013 - DNA, 15 bp, Homo sapiens
tctttacacaatcct

SEQ ID NO: 1110014 - DNA, 15 bp, Homo sapiens
gtctttacacaatcc

SEQ ID NO: 1110015 - DNA, 15 bp, Homo sapiens
tgtctttacacaatc

SEQ ID NO: 1110016 - DNA, 15 bp, Homo sapiens
ttgtctttacacaat

SEQ ID NO: 1110017 - DNA, 15 bp, Homo sapiens
attgtctttacacaa

SEQ ID NO: 1110018 - DNA, 15 bp, Homo sapiens
cattgtctttacaca

SEQ ID NO: 1110019 - DNA, 15 bp, Homo sapiens
gcattgtctttacac

SEQ ID NO: 1110020 - DNA, 15 bp, Homo sapiens
ggcattgtctttaca

SEQ ID NO: 1110021 - DNA, 15 bp, Homo sapiens
tggcattgtctttac

SEQ ID NO: 1110022 - DNA, 15 bp, Homo sapiens
ctggcattgtcttta

SEQ ID NO: 1110023 - DNA, 15 bp, Homo sapiens
cctggcattgtcttt

SEQ ID NO: 1110024 - DNA, 15 bp, Homo sapiens
acctggcattgtctt

SEQ ID NO: 1110025 - DNA, 15 bp, Homo sapiens
aacctggcattgtct

SEQ ID NO: 1110026 - DNA, 15 bp, Homo sapiens
caacctggcattgtc

SEQ ID NO: 1110027 - DNA, 15 bp, Homo sapiens
ccaacctggcattgt

SEQ ID NO: 1110028 - DNA, 15 bp, Homo sapiens
tccaacctggcattg

SEQ ID NO: 1110029 - DNA, 15 bp, Homo sapiens
gtccaacctggcatt

SEQ ID NO: 1110030 - DNA, 15 bp, Homo sapiens
agtccaacctggcat

SEQ ID NO: 1110031 - DNA, 15 bp, Homo sapiens
cagtccaacctggca

SEQ ID NO: 1110032 - DNA, 15 bp, Homo sapiens
gcagtccaacctggc

SEQ ID NO: 1110033 - DNA, 15 bp, Homo sapiens
ggcagtccaacctgg

SEQ ID NO: 1110034 - DNA, 15 bp, Homo sapiens
tggcagtccaacctg

SEQ ID NO: 1110035 - DNA, 15 bp, Homo sapiens
ctggcagtccaacct

SEQ ID NO: 1110036 - DNA, 15 bp, Homo sapiens
actggcagtccaacc

SEQ ID NO: 1110037 - DNA, 15 bp, Homo sapiens
tactggcagtccaac

SEQ ID NO: 1110038 - DNA, 15 bp, Homo sapiens
atactggcagtccaa

SEQ ID NO: 1110039 - DNA, 15 bp, Homo sapiens
tatactggcagtcca

SEQ ID NO: 1110040 - DNA, 15 bp, Homo sapiens
ttatactggcagtcc

SEQ ID NO: 1110041 - DNA, 15 bp, Homo sapiens
cttatactggcagtc

SEQ ID NO: 1110042 - DNA, 15 bp, Homo sapiens
gcttatactggcagt

SEQ ID NO: 1110043 - DNA, 15 bp, Homo sapiens
ggcttatactggcag

SEQ ID NO: 1110044 - DNA, 15 bp, Homo sapiens
tggcttatactggca

SEQ ID NO: 1110045 - DNA, 15 bp, Homo sapiens
ttggcttatactggc

SEQ ID NO: 1110046 - DNA, 15 bp, Homo sapiens
gttggcttatactgg

SEQ ID NO: 1110047 - DNA, 15 bp, Homo sapiens
tgttggcttatactg

SEQ ID NO: 1110048 - DNA, 15 bp, Homo sapiens
ctgttggcttatact

SEQ ID NO: 1110049 - DNA, 15 bp, Homo sapiens
gctgttggcttatac

SEQ ID NO: 1110050 - DNA, 15 bp, Homo sapiens
agctgttggcttata

SEQ ID NO: 1110051 - DNA, 15 bp, Homo sapiens
gagctgttggcttat

SEQ ID NO: 1110052 - DNA, 15 bp, Homo sapiens
cgagctgttggctta

SEQ ID NO: 1110053 - DNA, 15 bp, Homo sapiens
acgagctgttggctt

SEQ ID NO: 1110054 - DNA, 15 bp, Homo sapiens
cacgagctgttggct

SEQ ID NO: 1110055 - DNA, 15 bp, Homo sapiens
tcacgagctgttggc

SEQ ID NO: 1110056 - DNA, 15 bp, Homo sapiens
atcacgagctgttgg

SEQ ID NO: 1110057 - DNA, 15 bp, Homo sapiens
catcacgagctgttg

SEQ ID NO: 1110058 - DNA, 15 bp, Homo sapiens
acatcacgagctgtt

SEQ ID NO: 1110059 - DNA, 15 bp, Homo sapiens
cacatcacgagctgt

SEQ ID NO: 1110060 - DNA, 15 bp, Homo sapiens
gcacatcacgagctg

SEQ ID NO: 1110061 - DNA, 15 bp, Homo sapiens
agcacatcacgagct

SEQ ID NO: 1110062 - DNA, 15 bp, Homo sapiens
aagcacatcacgagc

SEQ ID NO: 1110063 - DNA, 15 bp, Homo sapiens
gaagcacatcacgag

SEQ ID NO: 1110064 - DNA, 15 bp, Homo sapiens
ggaagcacatcacga

SEQ ID NO: 1110065 - DNA, 15 bp, Homo sapiens
gggaagcacatcacg

SEQ ID NO: 1110066 - DNA, 15 bp, Homo sapiens
ggggaagcacatcac

SEQ ID NO: 1110067 - DNA, 15 bp, Homo sapiens
gggggaagcacatca

SEQ ID NO: 1110068 - DNA, 15 bp, Homo sapiens
agggggaagcacatc

SEQ ID NO: 1110069 - DNA, 15 bp, Homo sapiens
cagggggaagcacat

SEQ ID NO: 1110070 - DNA, 15 bp, Homo sapiens
tcagggggaagcaca

SEQ ID NO: 1110071 - DNA, 15 bp, Homo sapiens
ttcagggggaagcac

SEQ ID NO: 1110072 - DNA, 15 bp, Homo sapiens
cttcagggggaagca

SEQ ID NO: 1110073 - DNA, 15 bp, Homo sapiens
tcttcagggggaagc

SEQ ID NO: 1110074 - DNA, 15 bp, Homo sapiens
ctcttcagggggaag

SEQ ID NO: 1110075 - DNA, 15 bp, Homo sapiens
tctcttcagggggaa

SEQ ID NO: 1110076 - DNA, 15 bp, Homo sapiens
ctctcttcaggggga

SEQ ID NO: 1110077 - DNA, 15 bp, Homo sapiens
gctctcttcaggggg

SEQ ID NO: 1110078 - DNA, 15 bp, Homo sapiens
ggctctcttcagggg

SEQ ID NO: 1110079 - DNA, 15 bp, Homo sapiens
aggctctcttcaggg

SEQ ID NO: 1110080 - DNA, 15 bp, Homo sapiens
taggctctcttcagg

SEQ ID NO: 1110081 - DNA, 15 bp, Homo sapiens
ataggctctcttcag

SEQ ID NO: 1110082 - DNA, 15 bp, Homo sapiens
cataggctctcttca

SEQ ID NO: 1110083 - DNA, 15 bp, Homo sapiens
tcataggctctcttc

SEQ ID NO: 1110084 - DNA, 15 bp, Homo sapiens
ttcataggctctctt

SEQ ID NO: 1110085 - DNA, 15 bp, Homo sapiens
gttcataggctctct

SEQ ID NO: 1110086 - DNA, 15 bp, Homo sapiens
tgttcataggctctc

SEQ ID NO: 1110087 - DNA, 15 bp, Homo sapiens
ctgttcataggctct

SEQ ID NO: 1110088 - DNA, 15 bp, Homo sapiens
tctgttcataggctc

SEQ ID NO: 1110089 - DNA, 15 bp, Homo sapiens
gtctgttcataggct

SEQ ID NO: 1110090 - DNA, 15 bp, Homo sapiens
cgtctgttcataggc

SEQ ID NO: 1110091 - DNA, 15 bp, Homo sapiens
acgtctgttcatagg

SEQ ID NO: 1110092 - DNA, 15 bp, Homo sapiens
cacgtctgttcatag

SEQ ID NO: 1110093 - DNA, 15 bp, Homo sapiens
gcacgtctgttcata

SEQ ID NO: 1110094 - DNA, 15 bp, Homo sapiens
tgcacgtctgttcat

SEQ ID NO: 1110095 - DNA, 15 bp, Homo sapiens
ctgcacgtctgttca

SEQ ID NO: 1110096 - DNA, 15 bp, Homo sapiens
actgcacgtctgttc

SEQ ID NO: 1110097 - DNA, 15 bp, Homo sapiens
gactgcacgtctgtt

SEQ ID NO: 1110098 - DNA, 15 bp, Homo sapiens
tgactgcacgtctgt

SEQ ID NO: 1110099 - DNA, 15 bp, Homo sapiens
ctgactgcacgtctg

SEQ ID NO: 1110100 - DNA, 15 bp, Homo sapiens
cctgactgcacgtct

SEQ ID NO: 1110101 - DNA, 15 bp, Homo sapiens
ccctgactgcacgtc

SEQ ID NO: 1110102 - DNA, 15 bp, Homo sapiens
tccctgactgcacgt

SEQ ID NO: 1110103 - DNA, 15 bp, Homo sapiens
ctccctgactgcacg

SEQ ID NO: 1110104 - DNA, 15 bp, Homo sapiens
cctccctgactgcac

SEQ ID NO: 1110105 - DNA, 15 bp, Homo sapiens
acctccctgactgca

SEQ ID NO: 1110106 - DNA, 15 bp, Homo sapiens
aacctccctgactgc

SEQ ID NO: 1110107 - DNA, 15 bp, Homo sapiens
aaacctccctgactg

SEQ ID NO: 1110108 - DNA, 15 bp, Homo sapiens
gaaacctccctgact

SEQ ID NO: 1110109 - DNA, 15 bp, Homo sapiens
tgaaacctccctgac

SEQ ID NO: 1110110 - DNA, 15 bp, Homo sapiens
gtgaaacctccctga

SEQ ID NO: 1110111 - DNA, 15 bp, Homo sapiens
tgtgaaacctccctg

SEQ ID NO: 1110112 - DNA, 15 bp, Homo sapiens
atgtgaaacctccct

SEQ ID NO: 1110113 - DNA, 15 bp, Homo sapiens
gatgtgaaacctccc

SEQ ID NO: 1110114 - DNA, 15 bp, Homo sapiens
tgatgtgaaacctcc

SEQ ID NO: 1110115 - DNA, 15 bp, Homo sapiens
gtgatgtgaaacctc

SEQ ID NO: 1110116 - DNA, 15 bp, Homo sapiens
ggtgatgtgaaacct

SEQ ID NO: 1110117 - DNA, 15 bp, Homo sapiens
tggtgatgtgaaacc

SEQ ID NO: 1110118 - DNA, 15 bp, Homo sapiens
ttggtgatgtgaaac

SEQ ID NO: 1110119 - DNA, 15 bp, Homo sapiens
attggtgatgtgaaa

SEQ ID NO: 1110120 - DNA, 15 bp, Homo sapiens
tattggtgatgtgaa

SEQ ID NO: 1110121 - DNA, 15 bp, Homo sapiens
atattggtgatgtga

SEQ ID NO: 1110122 - DNA, 15 bp, Homo sapiens
aatattggtgatgtg

SEQ ID NO: 1110123 - DNA, 15 bp, Homo sapiens
gaatattggtgatgt

SEQ ID NO: 1110124 - DNA, 15 bp, Homo sapiens
ggaatattggtgatg

SEQ ID NO: 1110125 - DNA, 15 bp, Homo sapiens
aggaatattggtgat

SEQ ID NO: 1110126 - DNA, 15 bp, Homo sapiens
taggaatattggtga

SEQ ID NO: 1110127 - DNA, 15 bp, Homo sapiens
ataggaatattggtg

SEQ ID NO: 1110128 - DNA, 15 bp, Homo sapiens
gataggaatattggt

SEQ ID NO: 1110129 - DNA, 15 bp, Homo sapiens
ggataggaatattgg

SEQ ID NO: 1110130 - DNA, 15 bp, Homo sapiens
gggataggaatattg

SEQ ID NO: 1110131 - DNA, 15 bp, Homo sapiens
tgggataggaatatt

SEQ ID NO: 1110132 - DNA, 15 bp, Homo sapiens
ctgggataggaatat

SEQ ID NO: 1110133 - DNA, 15 bp, Homo sapiens
tctgggataggaata

SEQ ID NO: 1110134 - DNA, 15 bp, Homo sapiens
ttctgggataggaat

SEQ ID NO: 1110135 - DNA, 15 bp, Homo sapiens
tttctgggataggaa

SEQ ID NO: 1110136 - DNA, 15 bp, Homo sapiens
ttttctgggatagga

SEQ ID NO: 1110137 - DNA, 15 bp, Homo sapiens
cttttctgggatagg

SEQ ID NO: 1110138 - DNA, 15 bp, Homo sapiens
gcttttctgggatag

SEQ ID NO: 1110139 - DNA, 15 bp, Homo sapiens
tgcttttctgggata

SEQ ID NO: 1110140 - DNA, 15 bp, Homo sapiens
ctgcttttctgggat

SEQ ID NO: 1110141 - DNA, 15 bp, Homo sapiens
tctgcttttctggga

SEQ ID NO: 1110142 - DNA, 15 bp, Homo sapiens
atctgcttttctggg

SEQ ID NO: 1110143 - DNA, 15 bp, Homo sapiens
catctgcttttctgg

SEQ ID NO: 1110144 - DNA, 15 bp, Homo sapiens
acatctgcttttctg

SEQ ID NO: 1110145 - DNA, 15 bp, Homo sapiens
aacatctgcttttct

SEQ ID NO: 1110146 - DNA, 15 bp, Homo sapiens
gaacatctgcttttc

SEQ ID NO: 1110147 - DNA, 15 bp, Homo sapiens
tgaacatctgctttt

SEQ ID NO: 1110148 - DNA, 15 bp, Homo sapiens
atgaacatctgcttt

SEQ ID NO: 1110149 - DNA, 15 bp, Homo sapiens
tatgaacatctgctt

SEQ ID NO: 1110150 - DNA, 15 bp, Homo sapiens
ctatgaacatctgct

SEQ ID NO: 1110151 - DNA, 15 bp, Homo sapiens
gctatgaacatctgc

SEQ ID NO: 1110152 - DNA, 15 bp, Homo sapiens
ggctatgaacatctg

SEQ ID NO: 1110153 - DNA, 15 bp, Homo sapiens
gggctatgaacatct

SEQ ID NO: 1110154 - DNA, 15 bp, Homo sapiens
agggctatgaacatc

SEQ ID NO: 1110155 - DNA, 15 bp, Homo sapiens
cagggctatgaacat

SEQ ID NO: 1110156 - DNA, 15 bp, Homo sapiens
ccagggctatgaaca

SEQ ID NO: 1110157 - DNA, 15 bp, Homo sapiens
cccagggctatgaac

SEQ ID NO: 1110158 - DNA, 15 bp, Homo sapiens
tcccagggctatgaa

SEQ ID NO: 1110159 - DNA, 15 bp, Homo sapiens
ttcccagggctatga

SEQ ID NO: 1110160 - DNA, 15 bp, Homo sapiens
attcccagggctatg

SEQ ID NO: 1110161 - DNA, 15 bp, Homo sapiens
cattcccagggctat

SEQ ID NO: 1110162 - DNA, 15 bp, Homo sapiens
ccattcccagggcta

SEQ ID NO: 1110163 - DNA, 15 bp, Homo sapiens
tccattcccagggct

SEQ ID NO: 1110164 - DNA, 15 bp, Homo sapiens
ttccattcccagggc

SEQ ID NO: 1110165 - DNA, 15 bp, Homo sapiens
attccattcccaggg

SEQ ID NO: 1110166 - DNA, 15 bp, Homo sapiens
cattccattcccagg

SEQ ID NO: 1110167 - DNA, 15 bp, Homo sapiens
acattccattcccag

SEQ ID NO: 1110168 - DNA, 15 bp, Homo sapiens
cacattccattccca

SEQ ID NO: 1110169 - DNA, 15 bp, Homo sapiens
tcacattccattccc

SEQ ID NO: 1110170 - DNA, 15 bp, Homo sapiens
gtcacattccattcc

SEQ ID NO: 1110171 - DNA, 15 bp, Homo sapiens
ggtcacattccattc

SEQ ID NO: 1110172 - DNA, 15 bp, Homo sapiens
gggtcacattccatt

SEQ ID NO: 1110173 - DNA, 15 bp, Homo sapiens
agggtcacattccat

SEQ ID NO: 1110174 - DNA, 15 bp, Homo sapiens
aagggtcacattcca

SEQ ID NO: 1110175 - DNA, 15 bp, Homo sapiens
caagggtcacattcc

SEQ ID NO: 1110176 - DNA, 15 bp, Homo sapiens
acaagggtcacattc

SEQ ID NO: 1110177 - DNA, 15 bp, Homo sapiens
cacaagggtcacatt

SEQ ID NO: 1110178 - DNA, 15 bp, Homo sapiens
ccacaagggtcacat

SEQ ID NO: 1110179 - DNA, 15 bp, Homo sapiens
tccacaagggtcaca

SEQ ID NO: 1110180 - DNA, 15 bp, Homo sapiens
ctccacaagggtcac

SEQ ID NO: 1110181 - DNA, 15 bp, Homo sapiens
cctccacaagggtca

SEQ ID NO: 1110182 - DNA, 15 bp, Homo sapiens
ccctccacaagggtc

SEQ ID NO: 1110183 - DNA, 15 bp, Homo sapiens
gccctccacaagggt

SEQ ID NO: 1110184 - DNA, 15 bp, Homo sapiens
ggccctccacaaggg

SEQ ID NO: 1110185 - DNA, 15 bp, Homo sapiens
aggccctccacaagg

SEQ ID NO: 1110186 - DNA, 15 bp, Homo sapiens
taggccctccacaag

SEQ ID NO: 1110187 - DNA, 15 bp, Homo sapiens
ataggccctccacaa

SEQ ID NO: 1110188 - DNA, 15 bp, Homo sapiens
tataggccctccaca

SEQ ID NO: 1110189 - DNA, 15 bp, Homo sapiens
ttataggccctccac

SEQ ID NO: 1110190 - DNA, 15 bp, Homo sapiens
tttataggccctcca

SEQ ID NO: 1110191 - DNA, 15 bp, Homo sapiens
atttataggccctcc

SEQ ID NO: 1110192 - DNA, 15 bp, Homo sapiens
catttataggccctc

SEQ ID NO: 1110193 - DNA, 15 bp, Homo sapiens
ccatttataggccct

SEQ ID NO: 1110194 - DNA, 15 bp, Homo sapiens
tccatttataggccc

SEQ ID NO: 1110195 - DNA, 15 bp, Homo sapiens
gtccatttataggcc

SEQ ID NO: 1110196 - DNA, 15 bp, Homo sapiens
cgtccatttataggc

SEQ ID NO: 1110197 - DNA, 15 bp, Homo sapiens
gcgtccatttatagg

SEQ ID NO: 1110198 - DNA, 15 bp, Homo sapiens
tgcgtccatttatag

SEQ ID NO: 1110199 - DNA, 15 bp, Homo sapiens
atgcgtccatttata

SEQ ID NO: 1110200 - DNA, 15 bp, Homo sapiens
catgcgtccatttat

SEQ ID NO: 1110201 - DNA, 15 bp, Homo sapiens
tcatgcgtccattta

SEQ ID NO: 1110202 - DNA, 15 bp, Homo sapiens
ctcatgcgtccattt

SEQ ID NO: 1110203 - DNA, 15 bp, Homo sapiens
gctcatgcgtccatt

SEQ ID NO: 1110204 - DNA, 15 bp, Homo sapiens
cgctcatgcgtccat

SEQ ID NO: 1110205 - DNA, 15 bp, Homo sapiens
ccgctcatgcgtcca

SEQ ID NO: 1110206 - DNA, 15 bp, Homo sapiens
gccgctcatgcgtcc

SEQ ID NO: 1110207 - DNA, 15 bp, Homo sapiens
tgccgctcatgcgtc

SEQ ID NO: 1110208 - DNA, 15 bp, Homo sapiens
gtgccgctcatgcgt

SEQ ID NO: 1110209 - DNA, 15 bp, Homo sapiens
ggtgccgctcatgcg

SEQ ID NO: 1110210 - DNA, 15 bp, Homo sapiens
aggtgccgctcatgc

SEQ ID NO: 1110211 - DNA, 15 bp, Homo sapiens
caggtgccgctcatg

SEQ ID NO: 1110212 - DNA, 15 bp, Homo sapiens
acaggtgccgctcat

SEQ ID NO: 1110213 - DNA, 15 bp, Homo sapiens
aacaggtgccgctca

SEQ ID NO: 1110214 - DNA, 15 bp, Homo sapiens
gaacaggtgccgctc

SEQ ID NO: 1110215 - DNA, 15 bp, Homo sapiens
tgaacaggtgccgct

SEQ ID NO: 1110216 - DNA, 15 bp, Homo sapiens
atgaacaggtgccgc

SEQ ID NO: 1110217 - DNA, 15 bp, Homo sapiens
tatgaacaggtgccg

SEQ ID NO: 1110218 - DNA, 15 bp, Homo sapiens
atatgaacaggtgcc

SEQ ID NO: 1110219 - DNA, 15 bp, Homo sapiens
catatgaacaggtgc

SEQ ID NO: 1110220 - DNA, 15 bp, Homo sapiens
ccatatgaacaggtg

SEQ ID NO: 1110221 - DNA, 15 bp, Homo sapiens
tccatatgaacaggt

SEQ ID NO: 1110222 - DNA, 15 bp, Homo sapiens
atccatatgaacagg

SEQ ID NO: 1110223 - DNA, 15 bp, Homo sapiens
tatccatatgaacag

SEQ ID NO: 1110224 - DNA, 15 bp, Homo sapiens
ttatccatatgaaca

SEQ ID NO: 1110225 - DNA, 15 bp, Homo sapiens
cttatccatatgaac

SEQ ID NO: 1110226 - DNA, 15 bp, Homo sapiens
tcttatccatatgaa

SEQ ID NO: 1110227 - DNA, 15 bp, Homo sapiens
atcttatccatatga

SEQ ID NO: 1110228 - DNA, 15 bp, Homo sapiens
tatcttatccatatg

SEQ ID NO: 1110229 - DNA, 15 bp, Homo sapiens
ctatcttatccatat

SEQ ID NO: 1110230 - DNA, 15 bp, Homo sapiens
cctatcttatccata

SEQ ID NO: 1110231 - DNA, 15 bp, Homo sapiens
ccctatcttatccat

SEQ ID NO: 1110232 - DNA, 15 bp, Homo sapiens
gccctatcttatcca

SEQ ID NO: 1110233 - DNA, 15 bp, Homo sapiens
agccctatcttatcc

SEQ ID NO: 1110234 - DNA, 15 bp, Homo sapiens
tagccctatcttatc

SEQ ID NO: 1110235 - DNA, 15 bp, Homo sapiens
atagccctatcttat

SEQ ID NO: 1110236 - DNA, 15 bp, Homo sapiens
tatagccctatctta

SEQ ID NO: 1110237 - DNA, 15 bp, Homo sapiens
ttatagccctatctt

SEQ ID NO: 1110238 - DNA, 15 bp, Homo sapiens
tttatagccctatct

SEQ ID NO: 1110239 - DNA, 15 bp, Homo sapiens
atttatagccctatc

SEQ ID NO: 1110240 - DNA, 15 bp, Homo sapiens
catttatagccctat

SEQ ID NO: 1110241 - DNA, 15 bp, Homo sapiens
gcatttatagcccta

SEQ ID NO: 1110242 - DNA, 15 bp, Homo sapiens
ggcatttatagccct

SEQ ID NO: 1110243 - DNA, 15 bp, Homo sapiens
gggcatttatagccc

SEQ ID NO: 1110244 - DNA, 15 bp, Homo sapiens
agggcatttatagcc

SEQ ID NO: 1110245 - DNA, 15 bp, Homo sapiens
gagggcatttatagc

SEQ ID NO: 1110246 - DNA, 15 bp, Homo sapiens
tgagggcatttatag

SEQ ID NO: 1110247 - DNA, 15 bp, Homo sapiens
atgagggcatttata

SEQ ID NO: 1110248 - DNA, 15 bp, Homo sapiens
gatgagggcatttat

SEQ ID NO: 1110249 - DNA, 15 bp, Homo sapiens
agatgagggcattta

SEQ ID NO: 1110250 - DNA, 15 bp, Homo sapiens
aagatgagggcattt

SEQ ID NO: 1110251 - DNA, 15 bp, Homo sapiens
caagatgagggcatt

SEQ ID NO: 1110252 - DNA, 15 bp, Homo sapiens
gcaagatgagggcat

SEQ ID NO: 1110253 - DNA, 15 bp, Homo sapiens
ggcaagatgagggca

SEQ ID NO: 1110254 - DNA, 15 bp, Homo sapiens
tggcaagatgagggc

SEQ ID NO: 1110255 - DNA, 15 bp, Homo sapiens
atggcaagatgaggg

SEQ ID NO: 1110256 - DNA, 15 bp, Homo sapiens
catggcaagatgagg

SEQ ID NO: 1110257 - DNA, 15 bp, Homo sapiens
ccatggcaagatgag

SEQ ID NO: 1110258 - DNA, 15 bp, Homo sapiens
gccatggcaagatga

SEQ ID NO: 1110259 - DNA, 15 bp, Homo sapiens
agccatggcaagatg

SEQ ID NO: 1110260 - DNA, 15 bp, Homo sapiens
gagccatggcaagat

SEQ ID NO: 1110261 - DNA, 15 bp, Homo sapiens
agagccatggcaaga

SEQ ID NO: 1110262 - DNA, 15 bp, Homo sapiens
aagagccatggcaag

SEQ ID NO: 1110263 - DNA, 15 bp, Homo sapiens
gaagagccatggcaa

SEQ ID NO: 1110264 - DNA, 15 bp, Homo sapiens
agaagagccatggca

SEQ ID NO: 1110265 - DNA, 15 bp, Homo sapiens
tagaagagccatggc

SEQ ID NO: 1110266 - DNA, 15 bp, Homo sapiens
ctagaagagccatgg

SEQ ID NO: 1110267 - DNA, 15 bp, Homo sapiens
cctagaagagccatg

SEQ ID NO: 1110268 - DNA, 15 bp, Homo sapiens
gcctagaagagccat

SEQ ID NO: 1110269 - DNA, 15 bp, Homo sapiens
ggcctagaagagcca

SEQ ID NO: 1110270 - DNA, 15 bp, Homo sapiens
aggcctagaagagcc

SEQ ID NO: 1110271 - DNA, 15 bp, Homo sapiens
gaggcctagaagagc

SEQ ID NO: 1110272 - DNA, 15 bp, Homo sapiens
agaggcctagaagag

SEQ ID NO: 1110273 - DNA, 15 bp, Homo sapiens
aagaggcctagaaga

SEQ ID NO: 1110274 - DNA, 15 bp, Homo sapiens
aaagaggcctagaag

SEQ ID NO: 1110275 - DNA, 15 bp, Homo sapiens
taaagaggcctagaa

SEQ ID NO: 1110276 - DNA, 15 bp, Homo sapiens
ttaaagaggcctaga

SEQ ID NO: 1110277 - DNA, 15 bp, Homo sapiens
cttaaagaggcctag

SEQ ID NO: 1110278 - DNA, 15 bp, Homo sapiens
ccttaaagaggccta

SEQ ID NO: 1110279 - DNA, 15 bp, Homo sapiens
accttaaagaggcct

SEQ ID NO: 1110280 - DNA, 15 bp, Homo sapiens
aaccttaaagaggcc

SEQ ID NO: 1110281 - DNA, 15 bp, Homo sapiens
taaccttaaagaggc

SEQ ID NO: 1110282 - DNA, 15 bp, Homo sapiens
ttaaccttaaagagg

SEQ ID NO: 1110283 - DNA, 15 bp, Homo sapiens
cttaaccttaaagag

SEQ ID NO: 1110284 - DNA, 15 bp, Homo sapiens
ccttaaccttaaaga

SEQ ID NO: 1110285 - DNA, 15 bp, Homo sapiens
gccttaaccttaaag

SEQ ID NO: 1110286 - DNA, 15 bp, Homo sapiens
tgccttaaccttaaa

SEQ ID NO: 1110287 - DNA, 15 bp, Homo sapiens
atgccttaaccttaa

SEQ ID NO: 1110288 - DNA, 15 bp, Homo sapiens
tatgccttaacctta

SEQ ID NO: 1110289 - DNA, 15 bp, Homo sapiens
gtatgccttaacctt

SEQ ID NO: 1110290 - DNA, 15 bp, Homo sapiens
agtatgccttaacct

SEQ ID NO: 1110291 - DNA, 15 bp, Homo sapiens
gagtatgccttaacc

SEQ ID NO: 1110292 - DNA, 15 bp, Homo sapiens
ggagtatgccttaac

SEQ ID NO: 1110293 - DNA, 15 bp, Homo sapiens
gggagtatgccttaa

SEQ ID NO: 1110294 - DNA, 15 bp, Homo sapiens
agggagtatgcctta

SEQ ID NO: 1110295 - DNA, 15 bp, Homo sapiens
aagggagtatgcctt

SEQ ID NO: 1110296 - DNA, 15 bp, Homo sapiens
gaagggagtatgcct

SEQ ID NO: 1110297 - DNA, 15 bp, Homo sapiens
agaagggagtatgcc

SEQ ID NO: 1110298 - DNA, 15 bp, Homo sapiens
cagaagggagtatgc

SEQ ID NO: 1110299 - DNA, 15 bp, Homo sapiens
tcagaagggagtatg

SEQ ID NO: 1110300 - DNA, 15 bp, Homo sapiens
atcagaagggagtat

SEQ ID NO: 1110301 - DNA, 15 bp, Homo sapiens
tatcagaagggagta

SEQ ID NO: 1110302 - DNA, 15 bp, Homo sapiens
ttatcagaagggagt

SEQ ID NO: 1110303 - DNA, 15 bp, Homo sapiens
attatcagaagggag

SEQ ID NO: 1110304 - DNA, 15 bp, Homo sapiens
aattatcagaaggga

SEQ ID NO: 1110305 - DNA, 15 bp, Homo sapiens
aaattatcagaaggg

SEQ ID NO: 1110306 - DNA, 15 bp, Homo sapiens
gaaattatcagaagg

SEQ ID NO: 1110307 - DNA, 15 bp, Homo sapiens
agaaattatcagaag

SEQ ID NO: 1110308 - DNA, 15 bp, Homo sapiens
cagaaattatcagaa

SEQ ID NO: 1110309 - DNA, 15 bp, Homo sapiens
ccagaaattatcaga

SEQ ID NO: 1110310 - DNA, 15 bp, Homo sapiens
accagaaattatcag

SEQ ID NO: 1110311 - DNA, 15 bp, Homo sapiens
gaccagaaattatca

SEQ ID NO: 1110312 - DNA, 15 bp, Homo sapiens
agaccagaaattatc

SEQ ID NO: 1110313 - DNA, 15 bp, Homo sapiens
tagaccagaaattat

SEQ ID NO: 1110314 - DNA, 15 bp, Homo sapiens
ttagaccagaaatta

SEQ ID NO: 1110315 - DNA, 15 bp, Homo sapiens
gttagaccagaaatt

SEQ ID NO: 1110316 - DNA, 15 bp, Homo sapiens
agttagaccagaaat

SEQ ID NO: 1110317 - DNA, 15 bp, Homo sapiens
cagttagaccagaaa

SEQ ID NO: 1110318 - DNA, 15 bp, Homo sapiens
ccagttagaccagaa

SEQ ID NO: 1110319 - DNA, 15 bp, Homo sapiens
accagttagaccaga

SEQ ID NO: 1110320 - DNA, 15 bp, Homo sapiens
aaccagttagaccag

SEQ ID NO: 1110321 - DNA, 15 bp, Homo sapiens
taaccagttagacca

SEQ ID NO: 1110322 - DNA, 15 bp, Homo sapiens
ataaccagttagacc

SEQ ID NO: 1110323 - DNA, 15 bp, Homo sapiens
gataaccagttagac

SEQ ID NO: 1110324 - DNA, 15 bp, Homo sapiens
agataaccagttaga

SEQ ID NO: 1110325 - DNA, 15 bp, Homo sapiens
tagataaccagttag

SEQ ID NO: 1110326 - DNA, 15 bp, Homo sapiens
ctagataaccagtta

SEQ ID NO: 1110327 - DNA, 15 bp, Homo sapiens
gctagataaccagtt

SEQ ID NO: 1110328 - DNA, 15 bp, Homo sapiens
agctagataaccagt

SEQ ID NO: 1110329 - DNA, 15 bp, Homo sapiens
aagctagataaccag

SEQ ID NO: 1110330 - DNA, 15 bp, Homo sapiens
gaagctagataacca

SEQ ID NO: 1110331 - DNA, 15 bp, Homo sapiens
tgaagctagataacc

SEQ ID NO: 1110332 - DNA, 15 bp, Homo sapiens
gtgaagctagataac

SEQ ID NO: 1110333 - DNA, 15 bp, Homo sapiens
cgtgaagctagataa

SEQ ID NO: 1110334 - DNA, 15 bp, Homo sapiens
acgtgaagctagata

SEQ ID NO: 1110335 - DNA, 15 bp, Homo sapiens
gacgtgaagctagat

SEQ ID NO: 1110336 - DNA, 15 bp, Homo sapiens
ggacgtgaagctaga

SEQ ID NO: 1110337 - DNA, 15 bp, Homo sapiens
aggacgtgaagctag

SEQ ID NO: 1110338 - DNA, 15 bp, Homo sapiens
caggacgtgaagcta

SEQ ID NO: 1110339 - DNA, 15 bp, Homo sapiens
acaggacgtgaagct

SEQ ID NO: 1110340 - DNA, 15 bp, Homo sapiens
aacaggacgtgaagc

SEQ ID NO: 1110341 - DNA, 15 bp, Homo sapiens
aaacaggacgtgaag

SEQ ID NO: 1110342 - DNA, 15 bp, Homo sapiens
gaaacaggacgtgaa

SEQ ID NO: 1110343 - DNA, 15 bp, Homo sapiens
agaaacaggacgtga

SEQ ID NO: 1110344 - DNA, 15 bp, Homo sapiens
tagaaacaggacgtg

SEQ ID NO: 1110345 - DNA, 15 bp, Homo sapiens
atagaaacaggacgt

SEQ ID NO: 1110346 - DNA, 15 bp, Homo sapiens
catagaaacaggacg

SEQ ID NO: 1110347 - DNA, 15 bp, Homo sapiens
ccatagaaacaggac

SEQ ID NO: 1110348 - DNA, 15 bp, Homo sapiens
tccatagaaacagga

SEQ ID NO: 1110349 - DNA, 15 bp, Homo sapiens
atccatagaaacagg

SEQ ID NO: 1110350 - DNA, 15 bp, Homo sapiens
aatccatagaaacag

SEQ ID NO: 1110351 - DNA, 15 bp, Homo sapiens
caatccatagaaaca

SEQ ID NO: 1110352 - DNA, 15 bp, Homo sapiens
acaatccatagaaac

SEQ ID NO: 1110353 - DNA, 15 bp, Homo sapiens
aacaatccatagaaa

SEQ ID NO: 1110354 - DNA, 15 bp, Homo sapiens
aaacaatccatagaa

SEQ ID NO: 1110355 - DNA, 15 bp, Homo sapiens
caaacaatccataga

SEQ ID NO: 1110356 - DNA, 15 bp, Homo sapiens
acaaacaatccatag

SEQ ID NO: 1110357 - DNA, 15 bp, Homo sapiens
tacaaacaatccata

SEQ ID NO: 1110358 - DNA, 15 bp, Homo sapiens
ttacaaacaatccat

SEQ ID NO: 1110359 - DNA, 15 bp, Homo sapiens
gttacaaacaatcca

SEQ ID NO: 1110360 - DNA, 15 bp, Homo sapiens
ggttacaaacaatcc

SEQ ID NO: 1110361 - DNA, 15 bp, Homo sapiens
tggttacaaacaatc

SEQ ID NO: 1110362 - DNA, 15 bp, Homo sapiens
ctggttacaaacaat

SEQ ID NO: 1110363 - DNA, 15 bp, Homo sapiens
gctggttacaaacaa

SEQ ID NO: 1110364 - DNA, 15 bp, Homo sapiens
agctggttacaaaca

SEQ ID NO: 1110365 - DNA, 15 bp, Homo sapiens
aagctggttacaaac

SEQ ID NO: 1110366 - DNA, 15 bp, Homo sapiens
aaagctggttacaaa

SEQ ID NO: 1110367 - DNA, 15 bp, Homo sapiens
aaaagctggttacaa

SEQ ID NO: 1110368 - DNA, 15 bp, Homo sapiens
caaaagctggttaca

SEQ ID NO: 1110369 - DNA, 15 bp, Homo sapiens
gcaaaagctggttac

SEQ ID NO: 1110370 - DNA, 15 bp, Homo sapiens
agcaaaagctggtta

SEQ ID NO: 1110371 - DNA, 15 bp, Homo sapiens
cagcaaaagctggtt

SEQ ID NO: 1110372 - DNA, 15 bp, Homo sapiens
gcagcaaaagctggt

SEQ ID NO: 1110373 - DNA, 15 bp, Homo sapiens
tgcagcaaaagctgg

SEQ ID NO: 1110374 - DNA, 15 bp, Homo sapiens
ttgcagcaaaagctg

SEQ ID NO: 1110375 - DNA, 15 bp, Homo sapiens
gttgcagcaaaagct

SEQ ID NO: 1110376 - DNA, 15 bp, Homo sapiens
agttgcagcaaaagc

SEQ ID NO: 1110377 - DNA, 15 bp, Homo sapiens
gagttgcagcaaaag

SEQ ID NO: 1110378 - DNA, 15 bp, Homo sapiens
agagttgcagcaaaa

SEQ ID NO: 1110379 - DNA, 15 bp, Homo sapiens
aagagttgcagcaaa

SEQ ID NO: 1110380 - DNA, 15 bp, Homo sapiens
taagagttgcagcaa

SEQ ID NO: 1110381 - DNA, 15 bp, Homo sapiens
gtaagagttgcagca

SEQ ID NO: 1110382 - DNA, 15 bp, Homo sapiens
agtaagagttgcagc

SEQ ID NO: 1110383 - DNA, 15 bp, Homo sapiens
cagtaagagttgcag

SEQ ID NO: 1110384 - DNA, 15 bp, Homo sapiens
gcagtaagagttgca

SEQ ID NO: 1110385 - DNA, 15 bp, Homo sapiens
agcagtaagagttgc

SEQ ID NO: 1110386 - DNA, 15 bp, Homo sapiens
cagcagtaagagttg

SEQ ID NO: 1110387 - DNA, 15 bp, Homo sapiens
tcagcagtaagagtt

SEQ ID NO: 1110388 - DNA, 15 bp, Homo sapiens
atcagcagtaagagt

SEQ ID NO: 1110389 - DNA, 15 bp, Homo sapiens
aatcagcagtaagag

SEQ ID NO: 1110390 - DNA, 15 bp, Homo sapiens
taatcagcagtaaga

SEQ ID NO: 1110391 - DNA, 15 bp, Homo sapiens
ttaatcagcagtaag

SEQ ID NO: 1110392 - DNA, 15 bp, Homo sapiens
attaatcagcagtaa

SEQ ID NO: 1110393 - DNA, 15 bp, Homo sapiens
tattaatcagcagta

SEQ ID NO: 1110394 - DNA, 15 bp, Homo sapiens
atattaatcagcagt

SEQ ID NO: 1110395 - DNA, 15 bp, Homo sapiens
gatattaatcagcag

SEQ ID NO: 1110396 - DNA, 15 bp, Homo sapiens
agatattaatcagca

SEQ ID NO: 1110397 - DNA, 15 bp, Homo sapiens
aagatattaatcagc

SEQ ID NO: 1110398 - DNA, 15 bp, Homo sapiens
caagatattaatcag

SEQ ID NO: 1110399 - DNA, 15 bp, Homo sapiens
gcaagatattaatca

SEQ ID NO: 1110400 - DNA, 15 bp, Homo sapiens
agcaagatattaatc

SEQ ID NO: 1110401 - DNA, 15 bp, Homo sapiens
tagcaagatattaat

SEQ ID NO: 1110402 - DNA, 15 bp, Homo sapiens
ttagcaagatattaa

SEQ ID NO: 1110403 - DNA, 15 bp, Homo sapiens
attagcaagatatta

SEQ ID NO: 1110404 - DNA, 15 bp, Homo sapiens
gattagcaagatatt

SEQ ID NO: 1110405 - DNA, 15 bp, Homo sapiens
tgattagcaagatat

SEQ ID NO: 1110406 - DNA, 15 bp, Homo sapiens
atgattagcaagata

SEQ ID NO: 1110407 - DNA, 15 bp, Homo sapiens
tatgattagcaagat

SEQ ID NO: 1110408 - DNA, 15 bp, Homo sapiens
ctatgattagcaaga

SEQ ID NO: 1110409 - DNA, 15 bp, Homo sapiens
cctatgattagcaag

SEQ ID NO: 1110410 - DNA, 15 bp, Homo sapiens
acctatgattagcaa

SEQ ID NO: 1110411 - DNA, 15 bp, Homo sapiens
aacctatgattagca

SEQ ID NO: 1110412 - DNA, 15 bp, Homo sapiens
taacctatgattagc

SEQ ID NO: 1110413 - DNA, 15 bp, Homo sapiens
ataacctatgattag

SEQ ID NO: 1110414 - DNA, 15 bp, Homo sapiens
cataacctatgatta

SEQ ID NO: 1110415 - DNA, 15 bp, Homo sapiens
ccataacctatgatt

SEQ ID NO: 1110416 - DNA, 15 bp, Homo sapiens
tccataacctatgat

SEQ ID NO: 1110417 - DNA, 15 bp, Homo sapiens
ttccataacctatga

SEQ ID NO: 1110418 - DNA, 15 bp, Homo sapiens
tttccataacctatg

SEQ ID NO: 1110419 - DNA, 15 bp, Homo sapiens
ctttccataacctat

SEQ ID NO: 1110420 - DNA, 15 bp, Homo sapiens
tctttccataaccta

SEQ ID NO: 1110421 - DNA, 15 bp, Homo sapiens
gtctttccataacct

SEQ ID NO: 1110422 - DNA, 15 bp, Homo sapiens
agtctttccataacc

SEQ ID NO: 1110423 - DNA, 15 bp, Homo sapiens
cagtctttccataac

SEQ ID NO: 1110424 - DNA, 15 bp, Homo sapiens
acagtctttccataa

SEQ ID NO: 1110425 - DNA, 15 bp, Homo sapiens
cacagtctttccata

SEQ ID NO: 1110426 - DNA, 15 bp, Homo sapiens
acacagtctttccat

SEQ ID NO: 1110427 - DNA, 15 bp, Homo sapiens
aacacagtctttcca

SEQ ID NO: 1110428 - DNA, 15 bp, Homo sapiens
aaacacagtctttcc

SEQ ID NO: 1110429 - DNA, 15 bp, Homo sapiens
gaaacacagtctttc

SEQ ID NO: 1110430 - DNA, 15 bp, Homo sapiens
agaaacacagtcttt

SEQ ID NO: 1110431 - DNA, 15 bp, Homo sapiens
cagaaacacagtctt

SEQ ID NO: 1110432 - DNA, 15 bp, Homo sapiens
acagaaacacagtct

SEQ ID NO: 1110433 - DNA, 15 bp, Homo sapiens
aacagaaacacagtc

SEQ ID NO: 1110434 - DNA, 15 bp, Homo sapiens
aaacagaaacacagt

SEQ ID NO: 1110435 - DNA, 15 bp, Homo sapiens
aaaacagaaacacag

SEQ ID NO: 1110436 - DNA, 15 bp, Homo sapiens
taaaacagaaacaca

SEQ ID NO: 1110437 - DNA, 15 bp, Homo sapiens
ttaaaacagaaacac

SEQ ID NO: 1110438 - DNA, 15 bp, Homo sapiens
cttaaaacagaaaca

SEQ ID NO: 1110439 - DNA, 15 bp, Homo sapiens
ccttaaaacagaaac

SEQ ID NO: 1110440 - DNA, 15 bp, Homo sapiens
gccttaaaacagaaa

SEQ ID NO: 1110441 - DNA, 15 bp, Homo sapiens
agccttaaaacagaa

SEQ ID NO: 1110442 - DNA, 15 bp, Homo sapiens
gagccttaaaacaga

SEQ ID NO: 1110443 - DNA, 15 bp, Homo sapiens
agagccttaaaacag

SEQ ID NO: 1110444 - DNA, 15 bp, Homo sapiens
cagagccttaaaaca

SEQ ID NO: 1110445 - DNA, 15 bp, Homo sapiens
acagagccttaaaac

SEQ ID NO: 1110446 - DNA, 15 bp, Homo sapiens
aacagagccttaaaa

SEQ ID NO: 1110447 - DNA, 15 bp, Homo sapiens
taacagagccttaaa

SEQ ID NO: 1110448 - DNA, 15 bp, Homo sapiens
ctaacagagccttaa

SEQ ID NO: 1110449 - DNA, 15 bp, Homo sapiens
tctaacagagcctta

SEQ ID NO: 1110450 - DNA, 15 bp, Homo sapiens
ttctaacagagcctt

SEQ ID NO: 1110451 - DNA, 15 bp, Homo sapiens
tttctaacagagcct

SEQ ID NO: 1110452 - DNA, 15 bp, Homo sapiens
atttctaacagagcc

SEQ ID NO: 1110453 - DNA, 15 bp, Homo sapiens
aatttctaacagagc

SEQ ID NO: 1110454 - DNA, 15 bp, Homo sapiens
taatttctaacagag

SEQ ID NO: 1110455 - DNA, 15 bp, Homo sapiens
gtaatttctaacaga

SEQ ID NO: 1110456 - DNA, 15 bp, Homo sapiens
agtaatttctaacag

SEQ ID NO: 1110457 - DNA, 15 bp, Homo sapiens
cagtaatttctaaca

SEQ ID NO: 1110458 - DNA, 15 bp, Homo sapiens
tcagtaatttctaac

SEQ ID NO: 1110459 - DNA, 15 bp, Homo sapiens
atcagtaatttctaa

SEQ ID NO: 1110460 - DNA, 15 bp, Homo sapiens
catcagtaatttcta

SEQ ID NO: 1110461 - DNA, 15 bp, Homo sapiens
gcatcagtaatttct

SEQ ID NO: 1110462 - DNA, 15 bp, Homo sapiens
tgcatcagtaatttc

SEQ ID NO: 1110463 - DNA, 15 bp, Homo sapiens
gtgcatcagtaattt

SEQ ID NO: 1110464 - DNA, 15 bp, Homo sapiens
tgtgcatcagtaatt

SEQ ID NO: 1110465 - DNA, 15 bp, Homo sapiens
gtgtgcatcagtaat

SEQ ID NO: 1110466 - DNA, 15 bp, Homo sapiens
tgtgtgcatcagtaa

SEQ ID NO: 1110467 - DNA, 15 bp, Homo sapiens
gtgtgtgcatcagta

SEQ ID NO: 1110468 - DNA, 15 bp, Homo sapiens
agtgtgtgcatcagt

SEQ ID NO: 1110469 - DNA, 15 bp, Homo sapiens
tagtgtgtgcatcag

SEQ ID NO: 1110470 - DNA, 15 bp, Homo sapiens
atagtgtgtgcatca

SEQ ID NO: 1110471 - DNA, 15 bp, Homo sapiens
tatagtgtgtgcatc

SEQ ID NO: 1110472 - DNA, 15 bp, Homo sapiens
atatagtgtgtgcat

SEQ ID NO: 1110473 - DNA, 15 bp, Homo sapiens
aatatagtgtgtgca

SEQ ID NO: 1110474 - DNA, 15 bp, Homo sapiens
caatatagtgtgtgc

SEQ ID NO: 1110475 - DNA, 15 bp, Homo sapiens
acaatatagtgtgtg

SEQ ID NO: 1110476 - DNA, 15 bp, Homo sapiens
tacaatatagtgtgt

SEQ ID NO: 1110477 - DNA, 15 bp, Homo sapiens
ttacaatatagtgtg

SEQ ID NO: 1110478 - DNA, 15 bp, Homo sapiens
tttacaatatagtgt

SEQ ID NO: 1110479 - DNA, 15 bp, Homo sapiens
atttacaatatagtg

SEQ ID NO: 1110480 - DNA, 15 bp, Homo sapiens
aatttacaatatagt

SEQ ID NO: 1110481 - DNA, 15 bp, Homo sapiens
gaatttacaatatag

SEQ ID NO: 1110482 - DNA, 15 bp, Homo sapiens
agaatttacaatata

SEQ ID NO: 1110483 - DNA, 15 bp, Homo sapiens
aagaatttacaatat

SEQ ID NO: 1110484 - DNA, 15 bp, Homo sapiens
taagaatttacaata

SEQ ID NO: 1110485 - DNA, 15 bp, Homo sapiens
ataagaatttacaat

SEQ ID NO: 1110486 - DNA, 15 bp, Homo sapiens
gataagaatttacaa

SEQ ID NO: 1110487 - DNA, 15 bp, Homo sapiens
agataagaatttaca

SEQ ID NO: 1110488 - DNA, 15 bp, Homo sapiens
gagataagaatttac

SEQ ID NO: 1110489 - DNA, 15 bp, Homo sapiens
agagataagaattta

SEQ ID NO: 1110490 - DNA, 15 bp, Homo sapiens
cagagataagaattt

SEQ ID NO: 1110491 - DNA, 15 bp, Homo sapiens
acagagataagaatt

SEQ ID NO: 1110492 - DNA, 15 bp, Homo sapiens
tacagagataagaat

SEQ ID NO: 1110493 - DNA, 15 bp, Homo sapiens
atacagagataagaa

SEQ ID NO: 1110494 - DNA, 15 bp, Homo sapiens
tatacagagataaga

SEQ ID NO: 1110495 - DNA, 15 bp, Homo sapiens
gtatacagagataag

SEQ ID NO: 1110496 - DNA, 15 bp, Homo sapiens
agtatacagagataa

SEQ ID NO: 1110497 - DNA, 15 bp, Homo sapiens
cagtatacagagata

SEQ ID NO: 1110498 - DNA, 15 bp, Homo sapiens
acagtatacagagat

SEQ ID NO: 1110499 - DNA, 15 bp, Homo sapiens
tacagtatacagaga

SEQ ID NO: 1110500 - DNA, 15 bp, Homo sapiens
gtacagtatacagag

SEQ ID NO: 1110501 - DNA, 15 bp, Homo sapiens
agtacagtatacaga

SEQ ID NO: 1110502 - DNA, 15 bp, Homo sapiens
aagtacagtatacag

SEQ ID NO: 1110503 - DNA, 15 bp, Homo sapiens
gaagtacagtataca

SEQ ID NO: 1110504 - DNA, 15 bp, Homo sapiens
agaagtacagtatac

SEQ ID NO: 1110505 - DNA, 15 bp, Homo sapiens
cagaagtacagtata

SEQ ID NO: 1110506 - DNA, 15 bp, Homo sapiens
gcagaagtacagtat

SEQ ID NO: 1110507 - DNA, 15 bp, Homo sapiens
tgcagaagtacagta

SEQ ID NO: 1110508 - DNA, 15 bp, Homo sapiens
atgcagaagtacagt

SEQ ID NO: 1110509 - DNA, 15 bp, Homo sapiens
tatgcagaagtacag

SEQ ID NO: 1110510 - DNA, 15 bp, Homo sapiens
gtatgcagaagtaca

SEQ ID NO: 1110511 - DNA, 15 bp, Homo sapiens
tgtatgcagaagtac

SEQ ID NO: 1110512 - DNA, 15 bp, Homo sapiens
ctgtatgcagaagta

SEQ ID NO: 1110513 - DNA, 15 bp, Homo sapiens
tctgtatgcagaagt

SEQ ID NO: 1110514 - DNA, 15 bp, Homo sapiens
atctgtatgcagaag

SEQ ID NO: 1110515 - DNA, 15 bp, Homo sapiens
catctgtatgcagaa

SEQ ID NO: 1110516 - DNA, 15 bp, Homo sapiens
acatctgtatgcaga

SEQ ID NO: 1110517 - DNA, 15 bp, Homo sapiens
aacatctgtatgcag

SEQ ID NO: 1110518 - DNA, 15 bp, Homo sapiens
taacatctgtatgca

SEQ ID NO: 1110519 - DNA, 15 bp, Homo sapiens
ataacatctgtatgc

SEQ ID NO: 1110520 - DNA, 15 bp, Homo sapiens
cataacatctgtatg

SEQ ID NO: 1110521 - DNA, 15 bp, Homo sapiens
acataacatctgtat

SEQ ID NO: 1110522 - DNA, 15 bp, Homo sapiens
aacataacatctgta

SEQ ID NO: 1110523 - DNA, 15 bp, Homo sapiens
taacataacatctgt

SEQ ID NO: 1110524 - DNA, 15 bp, Homo sapiens
ttaacataacatctg

SEQ ID NO: 1110525 - DNA, 15 bp, Homo sapiens
tttaacataacatct

SEQ ID NO: 1110526 - DNA, 15 bp, Homo sapiens
ctttaacataacatc

SEQ ID NO: 1110527 - DNA, 15 bp, Homo sapiens
tctttaacataacat

SEQ ID NO: 1110528 - DNA, 15 bp, Homo sapiens
ttctttaacataaca

SEQ ID NO: 1110529 - DNA, 15 bp, Homo sapiens
attctttaacataac

SEQ ID NO: 1110530 - DNA, 15 bp, Homo sapiens
aattctttaacataa

SEQ ID NO: 1110531 - DNA, 15 bp, Homo sapiens
taattctttaacata

SEQ ID NO: 1110532 - DNA, 15 bp, Homo sapiens
gtaattctttaacat

SEQ ID NO: 1110533 - DNA, 15 bp, Homo sapiens
agtaattctttaaca

SEQ ID NO: 1110534 - DNA, 15 bp, Homo sapiens
aagtaattctttaac

SEQ ID NO: 1110535 - DNA, 15 bp, Homo sapiens
gaagtaattctttaa

SEQ ID NO: 1110536 - DNA, 15 bp, Homo sapiens
tgaagtaattcttta

SEQ ID NO: 1110537 - DNA, 15 bp, Homo sapiens
atgaagtaattcttt

SEQ ID NO: 1110538 - DNA, 15 bp, Homo sapiens
gatgaagtaattctt

SEQ ID NO: 1110539 - DNA, 15 bp, Homo sapiens
ggatgaagtaattct

SEQ ID NO: 1110540 - DNA, 15 bp, Homo sapiens
gggatgaagtaattc

SEQ ID NO: 1110541 - DNA, 15 bp, Homo sapiens
ggggatgaagtaatt

SEQ ID NO: 1110542 - DNA, 15 bp, Homo sapiens
tggggatgaagtaat

SEQ ID NO: 1110543 - DNA, 15 bp, Homo sapiens
atggggatgaagtaa

SEQ ID NO: 1110544 - DNA, 15 bp, Homo sapiens
catggggatgaagta

SEQ ID NO: 1110545 - DNA, 15 bp, Homo sapiens
acatggggatgaagt

SEQ ID NO: 1110546 - DNA, 15 bp, Homo sapiens
cacatggggatgaag

SEQ ID NO: 1110547 - DNA, 15 bp, Homo sapiens
tcacatggggatgaa

SEQ ID NO: 1110548 - DNA, 15 bp, Homo sapiens
gtcacatggggatga

SEQ ID NO: 1110549 - DNA, 15 bp, Homo sapiens
ggtcacatggggatg

SEQ ID NO: 1110550 - DNA, 15 bp, Homo sapiens
tggtcacatggggat

SEQ ID NO: 1110551 - DNA, 15 bp, Homo sapiens
atggtcacatgggga

SEQ ID NO: 1110552 - DNA, 15 bp, Homo sapiens
gatggtcacatgggg

SEQ ID NO: 1110553 - DNA, 15 bp, Homo sapiens
agatggtcacatggg

SEQ ID NO: 1110554 - DNA, 15 bp, Homo sapiens
gagatggtcacatgg

SEQ ID NO: 1110555 - DNA, 15 bp, Homo sapiens
tgagatggtcacatg

SEQ ID NO: 1110556 - DNA, 15 bp, Homo sapiens
gtgagatggtcacat

SEQ ID NO: 1110557 - DNA, 15 bp, Homo sapiens
ggtgagatggtcaca

SEQ ID NO: 1110558 - DNA, 15 bp, Homo sapiens
aggtgagatggtcac

SEQ ID NO: 1110559 - DNA, 15 bp, Homo sapiens
gaggtgagatggtca

SEQ ID NO: 1110560 - DNA, 15 bp, Homo sapiens
tgaggtgagatggtc

SEQ ID NO: 1110561 - DNA, 15 bp, Homo sapiens
atgaggtgagatggt

SEQ ID NO: 1110562 - DNA, 15 bp, Homo sapiens
tatgaggtgagatgg

SEQ ID NO: 1110563 - DNA, 15 bp, Homo sapiens
ttatgaggtgagatg

SEQ ID NO: 1110564 - DNA, 15 bp, Homo sapiens
attatgaggtgagat

SEQ ID NO: 1110565 - DNA, 15 bp, Homo sapiens
gattatgaggtgaga

SEQ ID NO: 1110566 - DNA, 15 bp, Homo sapiens
tgattatgaggtgag

SEQ ID NO: 1110567 - DNA, 15 bp, Homo sapiens
ttgattatgaggtga

SEQ ID NO: 1110568 - DNA, 15 bp, Homo sapiens
tttgattatgaggtg

SEQ ID NO: 1110569 - DNA, 15 bp, Homo sapiens
gtttgattatgaggt

SEQ ID NO: 1110570 - DNA, 15 bp, Homo sapiens
cgtttgattatgagg

SEQ ID NO: 1110571 - DNA, 15 bp, Homo sapiens
tcgtttgattatgag

SEQ ID NO: 1110572 - DNA, 15 bp, Homo sapiens
gtcgtttgattatga

SEQ ID NO: 1110573 - DNA, 15 bp, Homo sapiens
ggtcgtttgattatg

SEQ ID NO: 1110574 - DNA, 15 bp, Homo sapiens
gggtcgtttgattat

SEQ ID NO: 1110575 - DNA, 15 bp, Homo sapiens
agggtcgtttgatta

SEQ ID NO: 1110576 - DNA, 15 bp, Homo sapiens
tagggtcgtttgatt

SEQ ID NO: 1110577 - DNA, 15 bp, Homo sapiens
ttagggtcgtttgat

SEQ ID NO: 1110578 - DNA, 15 bp, Homo sapiens
tttagggtcgtttga

SEQ ID NO: 1110579 - DNA, 15 bp, Homo sapiens
atttagggtcgtttg

SEQ ID NO: 1110580 - DNA, 15 bp, Homo sapiens
gatttagggtcgttt

SEQ ID NO: 1110581 - DNA, 15 bp, Homo sapiens
ggatttagggtcgtt

SEQ ID NO: 1110582 - DNA, 15 bp, Homo sapiens
gggatttagggtcgt

SEQ ID NO: 1110583 - DNA, 15 bp, Homo sapiens
agggatttagggtcg

SEQ ID NO: 1110584 - DNA, 15 bp, Homo sapiens
gagggatttagggtc

SEQ ID NO: 1110585 - DNA, 15 bp, Homo sapiens
tgagggatttagggt

SEQ ID NO: 1110586 - DNA, 15 bp, Homo sapiens
gtgagggatttaggg

SEQ ID NO: 1110587 - DNA, 15 bp, Homo sapiens
agtgagggatttagg

SEQ ID NO: 1110588 - DNA, 15 bp, Homo sapiens
tagtgagggatttag

SEQ ID NO: 1110589 - DNA, 15 bp, Homo sapiens
ttagtgagggattta

SEQ ID NO: 1110590 - DNA, 15 bp, Homo sapiens
gttagtgagggattt

SEQ ID NO: 1110591 - DNA, 15 bp, Homo sapiens
ggttagtgagggatt

SEQ ID NO: 1110592 - DNA, 15 bp, Homo sapiens
aggttagtgagggat

SEQ ID NO: 1110593 - DNA, 15 bp, Homo sapiens
taggttagtgaggga

SEQ ID NO: 1110594 - DNA, 15 bp, Homo sapiens
gtaggttagtgaggg

SEQ ID NO: 1110595 - DNA, 15 bp, Homo sapiens
ggtaggttagtgagg

SEQ ID NO: 1110596 - DNA, 15 bp, Homo sapiens
gggtaggttagtgag

SEQ ID NO: 1110597 - DNA, 15 bp, Homo sapiens
agggtaggttagtga

SEQ ID NO: 1110598 - DNA, 15 bp, Homo sapiens
gagggtaggttagtg

SEQ ID NO: 1110599 - DNA, 15 bp, Homo sapiens
cgagggtaggttagt

SEQ ID NO: 1110600 - DNA, 15 bp, Homo sapiens
gcgagggtaggttag

SEQ ID NO: 1110601 - DNA, 15 bp, Homo sapiens
ggcgagggtaggtta

SEQ ID NO: 1110602 - DNA, 15 bp, Homo sapiens
gggcgagggtaggtt

SEQ ID NO: 1110603 - DNA, 15 bp, Homo sapiens
agggcgagggtaggt

SEQ ID NO: 1110604 - DNA, 15 bp, Homo sapiens
gagggcgagggtagg

SEQ ID NO: 1110605 - DNA, 15 bp, Homo sapiens
tgagggcgagggtag

SEQ ID NO: 1110606 - DNA, 15 bp, Homo sapiens
gtgagggcgagggta

SEQ ID NO: 1110607 - DNA, 15 bp, Homo sapiens
agtgagggcgagggt

SEQ ID NO: 1110608 - DNA, 15 bp, Homo sapiens
tagtgagggcgaggg

SEQ ID NO: 1110609 - DNA, 15 bp, Homo sapiens
ttagtgagggcgagg

SEQ ID NO: 1110610 - DNA, 15 bp, Homo sapiens
tttagtgagggcgag

SEQ ID NO: 1110611 - DNA, 15 bp, Homo sapiens
gtttagtgagggcga

SEQ ID NO: 1110612 - DNA, 15 bp, Homo sapiens
agtttagtgagggcg

SEQ ID NO: 1110613 - DNA, 15 bp, Homo sapiens
aagtttagtgagggc

SEQ ID NO: 1110614 - DNA, 15 bp, Homo sapiens
taagtttagtgaggg

SEQ ID NO: 1110615 - DNA, 15 bp, Homo sapiens
ttaagtttagtgagg

SEQ ID NO: 1110616 - DNA, 15 bp, Homo sapiens
attaagtttagtgag

SEQ ID NO: 1110617 - DNA, 15 bp, Homo sapiens
tattaagtttagtga

SEQ ID NO: 1110618 - DNA, 15 bp, Homo sapiens
ttattaagtttagtg

SEQ ID NO: 1110619 - DNA, 15 bp, Homo sapiens
attattaagtttagt

SEQ ID NO: 1110620 - DNA, 15 bp, Homo sapiens
tattattaagtttag

SEQ ID NO: 1110621 - DNA, 15 bp, Homo sapiens
ttattattaagttta

SEQ ID NO: 1110622 - DNA, 15 bp, Homo sapiens
tttattattaagttt

SEQ ID NO: 1110623 - DNA, 15 bp, Homo sapiens
atttattattaagtt

SEQ ID NO: 1110624 - DNA, 15 bp, Homo sapiens
catttattattaagt

SEQ ID NO: 1110625 - DNA, 15 bp, Homo sapiens
gcatttattattaag

SEQ ID NO: 1110626 - DNA, 15 bp, Homo sapiens
agcatttattattaa

SEQ ID NO: 1110627 - DNA, 15 bp, Homo sapiens
cagcatttattatta

SEQ ID NO: 1110628 - DNA, 15 bp, Homo sapiens
ccagcatttattatt

SEQ ID NO: 1110629 - DNA, 15 bp, Homo sapiens
accagcatttattat

SEQ ID NO: 1110630 - DNA, 15 bp, Homo sapiens
taccagcatttatta

SEQ ID NO: 1110631 - DNA, 15 bp, Homo sapiens
ataccagcatttatt

SEQ ID NO: 1110632 - DNA, 15 bp, Homo sapiens
tataccagcatttat

SEQ ID NO: 1110633 - DNA, 15 bp, Homo sapiens
atataccagcattta

SEQ ID NO: 1110634 - DNA, 15 bp, Homo sapiens
gatataccagcattt

SEQ ID NO: 1110635 - DNA, 15 bp, Homo sapiens
ggatataccagcatt

SEQ ID NO: 1110636 - DNA, 15 bp, Homo sapiens
tggatataccagcat

SEQ ID NO: 1110637 - DNA, 15 bp, Homo sapiens
ctggatataccagca

SEQ ID NO: 1110638 - DNA, 15 bp, Homo sapiens
actggatataccagc

SEQ ID NO: 1110639 - DNA, 15 bp, Homo sapiens
cactggatataccag

SEQ ID NO: 1110640 - DNA, 15 bp, Homo sapiens
gcactggatatacca

SEQ ID NO: 1110641 - DNA, 15 bp, Homo sapiens
tgcactggatatacc

SEQ ID NO: 1110642 - DNA, 15 bp, Homo sapiens
atgcactggatatac

SEQ ID NO: 1110643 - DNA, 15 bp, Homo sapiens
aatgcactggatata

SEQ ID NO: 1110644 - DNA, 15 bp, Homo sapiens
caatgcactggatat

SEQ ID NO: 1110645 - DNA, 15 bp, Homo sapiens
ccaatgcactggata

SEQ ID NO: 1110646 - DNA, 15 bp, Homo sapiens
gccaatgcactggat

SEQ ID NO: 1110647 - DNA, 15 bp, Homo sapiens
tgccaatgcactgga

SEQ ID NO: 1110648 - DNA, 15 bp, Homo sapiens
ctgccaatgcactgg

SEQ ID NO: 1110649 - DNA, 15 bp, Homo sapiens
gctgccaatgcactg

SEQ ID NO: 1110650 - DNA, 15 bp, Homo sapiens
tgctgccaatgcact

SEQ ID NO: 1110651 - DNA, 15 bp, Homo sapiens
atgctgccaatgcac

SEQ ID NO: 1110652 - DNA, 15 bp, Homo sapiens
gatgctgccaatgca

SEQ ID NO: 1110653 - DNA, 15 bp, Homo sapiens
cgatgctgccaatgc

SEQ ID NO: 1110654 - DNA, 15 bp, Homo sapiens
gcgatgctgccaatg

SEQ ID NO: 1110655 - DNA, 15 bp, Homo sapiens
tgcgatgctgccaat

SEQ ID NO: 1110656 - DNA, 15 bp, Homo sapiens
ctgcgatgctgccaa

SEQ ID NO: 1110657 - DNA, 15 bp, Homo sapiens
cctgcgatgctgcca

SEQ ID NO: 1110658 - DNA, 15 bp, Homo sapiens
tcctgcgatgctgcc

SEQ ID NO: 1110659 - DNA, 15 bp, Homo sapiens
gtcctgcgatgctgc

SEQ ID NO: 1110660 - DNA, 15 bp, Homo sapiens
ggtcctgcgatgctg

SEQ ID NO: 1110661 - DNA, 15 bp, Homo sapiens
tggtcctgcgatgct

SEQ ID NO: 1110662 - DNA, 15 bp, Homo sapiens
ctggtcctgcgatgc

SEQ ID NO: 1110663 - DNA, 15 bp, Homo sapiens
tctggtcctgcgatg

SEQ ID NO: 1110664 - DNA, 15 bp, Homo sapiens
ttctggtcctgcgat

SEQ ID NO: 1110665 - DNA, 15 bp, Homo sapiens
cttctggtcctgcga

SEQ ID NO: 1110666 - DNA, 15 bp, Homo sapiens
ccttctggtcctgcg

SEQ ID NO: 1110667 - DNA, 15 bp, Homo sapiens
gccttctggtcctgc

SEQ ID NO: 1110668 - DNA, 15 bp, Homo sapiens
cgccttctggtcctg

SEQ ID NO: 1110669 - DNA, 15 bp, Homo sapiens
ccgccttctggtcct

SEQ ID NO: 1110670 - DNA, 15 bp, Homo sapiens
accgccttctggtcc

SEQ ID NO: 1110671 - DNA, 15 bp, Homo sapiens
caccgccttctggtc

SEQ ID NO: 1110672 - DNA, 15 bp, Homo sapiens
tcaccgccttctggt

SEQ ID NO: 1110673 - DNA, 15 bp, Homo sapiens
gtcaccgccttctgg

SEQ ID NO: 1110674 - DNA, 15 bp, Homo sapiens
ggtcaccgccttctg

SEQ ID NO: 1110675 - DNA, 15 bp, Homo sapiens
gggtcaccgccttct

SEQ ID NO: 1110676 - DNA, 15 bp, Homo sapiens
ggggtcaccgccttc

SEQ ID NO: 1110677 - DNA, 15 bp, Homo sapiens
gggggtcaccgcctt

SEQ ID NO: 1110678 - DNA, 15 bp, Homo sapiens
agggggtcaccgcct

SEQ ID NO: 1110679 - DNA, 15 bp, Homo sapiens
aagggggtcaccgcc

SEQ ID NO: 1110680 - DNA, 15 bp, Homo sapiens
caagggggtcaccgc

SEQ ID NO: 1110681 - DNA, 15 bp, Homo sapiens
ccaagggggtcaccg

SEQ ID NO: 1110682 - DNA, 15 bp, Homo sapiens
tccaagggggtcacc

SEQ ID NO: 1110683 - DNA, 15 bp, Homo sapiens
gtccaagggggtcac

SEQ ID NO: 1110684 - DNA, 15 bp, Homo sapiens
ggtccaagggggtca

SEQ ID NO: 1110685 - DNA, 15 bp, Homo sapiens
gggtccaagggggtc

SEQ ID NO: 1110686 - DNA, 15 bp, Homo sapiens
tgggtccaagggggt

SEQ ID NO: 1110687 - DNA, 15 bp, Homo sapiens
ctgggtccaaggggg

SEQ ID NO: 1110688 - DNA, 15 bp, Homo sapiens
gctgggtccaagggg

SEQ ID NO: 1110689 - DNA, 15 bp, Homo sapiens
agctgggtccaaggg

SEQ ID NO: 1110690 - DNA, 15 bp, Homo sapiens
aagctgggtccaagg

SEQ ID NO: 1110691 - DNA, 15 bp, Homo sapiens
aaagctgggtccaag

SEQ ID NO: 1110692 - DNA, 15 bp, Homo sapiens
gaaagctgggtccaa

SEQ ID NO: 1110693 - DNA, 15 bp, Homo sapiens
tgaaagctgggtcca

SEQ ID NO: 1110694 - DNA, 15 bp, Homo sapiens
gtgaaagctgggtcc

SEQ ID NO: 1110695 - DNA, 15 bp, Homo sapiens
agtgaaagctgggtc

SEQ ID NO: 1110696 - DNA, 15 bp, Homo sapiens
tagtgaaagctgggt

SEQ ID NO: 1110697 - DNA, 15 bp, Homo sapiens
atagtgaaagctggg

SEQ ID NO: 1110698 - DNA, 15 bp, Homo sapiens
gatagtgaaagctgg

SEQ ID NO: 1110699 - DNA, 15 bp, Homo sapiens
agatagtgaaagctg

SEQ ID NO: 1110700 - DNA, 15 bp, Homo sapiens
aagatagtgaaagct

SEQ ID NO: 1110701 - DNA, 15 bp, Homo sapiens
caagatagtgaaagc

SEQ ID NO: 1110702 - DNA, 15 bp, Homo sapiens
acaagatagtgaaag

SEQ ID NO: 1110703 - DNA, 15 bp, Homo sapiens
cacaagatagtgaaa

SEQ ID NO: 1110704 - DNA, 15 bp, Homo sapiens
acacaagatagtgaa

SEQ ID NO: 1110705 - DNA, 15 bp, Homo sapiens
cacacaagatagtga

SEQ ID NO: 1110706 - DNA, 15 bp, Homo sapiens
acacacaagatagtg

SEQ ID NO: 1110707 - DNA, 15 bp, Homo sapiens
cacacacaagatagt

SEQ ID NO: 1110708 - DNA, 15 bp, Homo sapiens
acacacacaagatag

SEQ ID NO: 1110709 - DNA, 15 bp, Homo sapiens
gacacacacaagata

SEQ ID NO: 1110710 - DNA, 15 bp, Homo sapiens
agacacacacaagat

SEQ ID NO: 1110711 - DNA, 15 bp, Homo sapiens
tagacacacacaaga

SEQ ID NO: 1110712 - DNA, 15 bp, Homo sapiens
atagacacacacaag

SEQ ID NO: 1110713 - DNA, 15 bp, Homo sapiens
aatagacacacacaa

SEQ ID NO: 1110714 - DNA, 15 bp, Homo sapiens
taatagacacacaca

SEQ ID NO: 1110715 - DNA, 15 bp, Homo sapiens
ataatagacacacac

SEQ ID NO: 1110716 - DNA, 15 bp, Homo sapiens
aataatagacacaca

SEQ ID NO: 1110717 - DNA, 15 bp, Homo sapiens
aaataatagacacac

SEQ ID NO: 1110718 - DNA, 15 bp, Homo sapiens
gaaataatagacaca

SEQ ID NO: 1110719 - DNA, 15 bp, Homo sapiens
ggaaataatagacac

SEQ ID NO: 1110720 - DNA, 15 bp, Homo sapiens
gggaaataatagaca

SEQ ID NO: 1110721 - DNA, 15 bp, Homo sapiens
cgggaaataatagac

SEQ ID NO: 1110722 - DNA, 15 bp, Homo sapiens
tcgggaaataataga

SEQ ID NO: 1110723 - DNA, 15 bp, Homo sapiens
gtcgggaaataatag

SEQ ID NO: 1110724 - DNA, 15 bp, Homo sapiens
ggtcgggaaataata

SEQ ID NO: 1110725 - DNA, 15 bp, Homo sapiens
aggtcgggaaataat

SEQ ID NO: 1110726 - DNA, 15 bp, Homo sapiens
caggtcgggaaataa

SEQ ID NO: 1110727 - DNA, 15 bp, Homo sapiens
gcaggtcgggaaata

SEQ ID NO: 1110728 - DNA, 15 bp, Homo sapiens
ggcaggtcgggaaat

SEQ ID NO: 1110729 - DNA, 15 bp, Homo sapiens
cggcaggtcgggaaa

SEQ ID NO: 1110730 - DNA, 15 bp, Homo sapiens
tcggcaggtcgggaa

SEQ ID NO: 1110731 - DNA, 15 bp, Homo sapiens
atcggcaggtcggga

SEQ ID NO: 1110732 - DNA, 15 bp, Homo sapiens
gatcggcaggtcggg

SEQ ID NO: 1110733 - DNA, 15 bp, Homo sapiens
ggatcggcaggtcgg

SEQ ID NO: 1110734 - DNA, 15 bp, Homo sapiens
tggatcggcaggtcg

SEQ ID NO: 1110735 - DNA, 15 bp, Homo sapiens
gtggatcggcaggtc

SEQ ID NO: 1110736 - DNA, 15 bp, Homo sapiens
ggtggatcggcaggt

SEQ ID NO: 1110737 - DNA, 15 bp, Homo sapiens
aggtggatcggcagg

SEQ ID NO: 1110738 - DNA, 15 bp, Homo sapiens
caggtggatcggcag

SEQ ID NO: 1110739 - DNA, 15 bp, Homo sapiens
ccaggtggatcggca

SEQ ID NO: 1110740 - DNA, 15 bp, Homo sapiens
cccaggtggatcggc

SEQ ID NO: 1110741 - DNA, 15 bp, Homo sapiens
ccccaggtggatcgg

SEQ ID NO: 1110742 - DNA, 15 bp, Homo sapiens
tccccaggtggatcg

SEQ ID NO: 1110743 - DNA, 15 bp, Homo sapiens
gtccccaggtggatc

SEQ ID NO: 1110744 - DNA, 15 bp, Homo sapiens
tgtccccaggtggat

SEQ ID NO: 1110745 - DNA, 15 bp, Homo sapiens
ttgtccccaggtgga

SEQ ID NO: 1110746 - DNA, 15 bp, Homo sapiens
tttgtccccaggtgg

SEQ ID NO: 1110747 - DNA, 15 bp, Homo sapiens
ctttgtccccaggtg

SEQ ID NO: 1110748 - DNA, 15 bp, Homo sapiens
tctttgtccccaggt

SEQ ID NO: 1110749 - DNA, 15 bp, Homo sapiens
ctctttgtccccagg

SEQ ID NO: 1110750 - DNA, 15 bp, Homo sapiens
tctctttgtccccag

SEQ ID NO: 1110751 - DNA, 15 bp, Homo sapiens
ctctctttgtcccca

SEQ ID NO: 1110752 - DNA, 15 bp, Homo sapiens
tctctctttgtcccc

SEQ ID NO: 1110753 - DNA, 15 bp, Homo sapiens
ctctctctttgtccc

SEQ ID NO: 1110754 - DNA, 15 bp, Homo sapiens
gctctctctttgtcc

SEQ ID NO: 1110755 - DNA, 15 bp, Homo sapiens
ggctctctctttgtc

SEQ ID NO: 1110756 - DNA, 15 bp, Homo sapiens
gggctctctctttgt

SEQ ID NO: 1110757 - DNA, 15 bp, Homo sapiens
ggggctctctctttg

SEQ ID NO: 1110758 - DNA, 15 bp, Homo sapiens
tggggctctctcttt

SEQ ID NO: 1110759 - DNA, 15 bp, Homo sapiens
atggggctctctctt

SEQ ID NO: 1110760 - DNA, 15 bp, Homo sapiens
aatggggctctctct

SEQ ID NO: 1110761 - DNA, 15 bp, Homo sapiens
caatggggctctctc

SEQ ID NO: 1110762 - DNA, 15 bp, Homo sapiens
gcaatggggctctct

SEQ ID NO: 1110763 - DNA, 15 bp, Homo sapiens
ggcaatggggctctc

SEQ ID NO: 1110764 - DNA, 15 bp, Homo sapiens
aggcaatggggctct

SEQ ID NO: 1110765 - DNA, 15 bp, Homo sapiens
aaggcaatggggctc

SEQ ID NO: 1110766 - DNA, 15 bp, Homo sapiens
caaggcaatggggct

SEQ ID NO: 1110767 - DNA, 15 bp, Homo sapiens
acaaggcaatggggc

SEQ ID NO: 1110768 - DNA, 15 bp, Homo sapiens
cacaaggcaatgggg

SEQ ID NO: 1110769 - DNA, 15 bp, Homo sapiens
ccacaaggcaatggg

SEQ ID NO: 1110770 - DNA, 15 bp, Homo sapiens
cccacaaggcaatgg

SEQ ID NO: 1110771 - DNA, 15 bp, Homo sapiens
gcccacaaggcaatg

SEQ ID NO: 1110772 - DNA, 15 bp, Homo sapiens
agcccacaaggcaat

SEQ ID NO: 1110773 - DNA, 15 bp, Homo sapiens
cagcccacaaggcaa

SEQ ID NO: 1110774 - DNA, 15 bp, Homo sapiens
gcagcccacaaggca

SEQ ID NO: 1110775 - DNA, 15 bp, Homo sapiens
agcagcccacaaggc

SEQ ID NO: 1110776 - DNA, 15 bp, Homo sapiens
cagcagcccacaagg

SEQ ID NO: 1110777 - DNA, 15 bp, Homo sapiens
ccagcagcccacaag

SEQ ID NO: 1110778 - DNA, 15 bp, Homo sapiens
gccagcagcccacaa

SEQ ID NO: 1110779 - DNA, 15 bp, Homo sapiens
ggccagcagcccaca

SEQ ID NO: 1110780 - DNA, 15 bp, Homo sapiens
tggccagcagcccac

SEQ ID NO: 1110781 - DNA, 15 bp, Homo sapiens
ctggccagcagccca

SEQ ID NO: 1110782 - DNA, 15 bp, Homo sapiens
tctggccagcagccc

SEQ ID NO: 1110783 - DNA, 15 bp, Homo sapiens
atctggccagcagcc

SEQ ID NO: 1110784 - DNA, 15 bp, Homo sapiens
gatctggccagcagc

SEQ ID NO: 1110785 - DNA, 15 bp, Homo sapiens
ggatctggccagcag

SEQ ID NO: 1110786 - DNA, 15 bp, Homo sapiens
gggatctggccagca

SEQ ID NO: 1110787 - DNA, 15 bp, Homo sapiens
cgggatctggccagc

SEQ ID NO: 1110788 - DNA, 15 bp, Homo sapiens
gcgggatctggccag

SEQ ID NO: 1110789 - DNA, 15 bp, Homo sapiens
cgcgggatctggcca

SEQ ID NO: 1110790 - DNA, 15 bp, Homo sapiens
tcgcgggatctggcc

SEQ ID NO: 1110791 - DNA, 15 bp, Homo sapiens
atcgcgggatctggc

SEQ ID NO: 1110792 - DNA, 15 bp, Homo sapiens
tatcgcgggatctgg

SEQ ID NO: 1110793 - DNA, 15 bp, Homo sapiens
gtatcgcgggatctg

SEQ ID NO: 1110794 - DNA, 15 bp, Homo sapiens
agtatcgcgggatct

SEQ ID NO: 1110795 - DNA, 15 bp, Homo sapiens
gagtatcgcgggatc

SEQ ID NO: 1110796 - DNA, 15 bp, Homo sapiens
ggagtatcgcgggat

SEQ ID NO: 1110797 - DNA, 15 bp, Homo sapiens
tggagtatcgcggga

SEQ ID NO: 1110798 - DNA, 15 bp, Homo sapiens
atggagtatcgcggg

SEQ ID NO: 1110799 - DNA, 15 bp, Homo sapiens
tatggagtatcgcgg

SEQ ID NO: 1110800 - DNA, 15 bp, Homo sapiens
ttatggagtatcgcg

SEQ ID NO: 1110801 - DNA, 15 bp, Homo sapiens
attatggagtatcgc

SEQ ID NO: 1110802 - DNA, 15 bp, Homo sapiens
cattatggagtatcg

SEQ ID NO: 1110803 - DNA, 15 bp, Homo sapiens
acattatggagtatc

SEQ ID NO: 1110804 - DNA, 15 bp, Homo sapiens
cacattatggagtat

SEQ ID NO: 1110805 - DNA, 15 bp, Homo sapiens
ccacattatggagta

SEQ ID NO: 1110806 - DNA, 15 bp, Homo sapiens
tccacattatggagt

SEQ ID NO: 1110807 - DNA, 15 bp, Homo sapiens
atccacattatggag

SEQ ID NO: 1110808 - DNA, 15 bp, Homo sapiens
catccacattatgga

SEQ ID NO: 1110809 - DNA, 15 bp, Homo sapiens
ccatccacattatgg

SEQ ID NO: 1110810 - DNA, 15 bp, Homo sapiens
tccatccacattatg

SEQ ID NO: 1110811 - DNA, 15 bp, Homo sapiens
gtccatccacattat

SEQ ID NO: 1110812 - DNA, 15 bp, Homo sapiens
ggtccatccacatta

SEQ ID NO: 1110813 - DNA, 15 bp, Homo sapiens
aggtccatccacatt

SEQ ID NO: 1110814 - DNA, 15 bp, Homo sapiens
caggtccatccacat

SEQ ID NO: 1110815 - DNA, 15 bp, Homo sapiens
tcaggtccatccaca

SEQ ID NO: 1110816 - DNA, 15 bp, Homo sapiens
ttcaggtccatccac

SEQ ID NO: 1110817 - DNA, 15 bp, Homo sapiens
attcaggtccatcca

SEQ ID NO: 1110818 - DNA, 15 bp, Homo sapiens
tattcaggtccatcc

SEQ ID NO: 1110819 - DNA, 15 bp, Homo sapiens
ttattcaggtccatc

SEQ ID NO: 1110820 - DNA, 15 bp, Homo sapiens
tttattcaggtccat

SEQ ID NO: 1110821 - DNA, 15 bp, Homo sapiens
ttttattcaggtcca

SEQ ID NO: 1110822 - DNA, 15 bp, Homo sapiens
gttttattcaggtcc

SEQ ID NO: 1110823 - DNA, 15 bp, Homo sapiens
tgttttattcaggtc

SEQ ID NO: 1110824 - DNA, 15 bp, Homo sapiens
ctgttttattcaggt

SEQ ID NO: 1110825 - DNA, 15 bp, Homo sapiens
tctgttttattcagg

SEQ ID NO: 1110826 - DNA, 15 bp, Homo sapiens
ttctgttttattcag

SEQ ID NO: 1110827 - DNA, 15 bp, Homo sapiens
tttctgttttattca

SEQ ID NO: 1110828 - DNA, 15 bp, Homo sapiens
ctttctgttttattc

SEQ ID NO: 1110829 - DNA, 15 bp, Homo sapiens
tctttctgttttatt

SEQ ID NO: 1110830 - DNA, 15 bp, Homo sapiens
gtctttctgttttat

SEQ ID NO: 1110831 - DNA, 15 bp, Homo sapiens
cgtctttctgtttta

SEQ ID NO: 1110832 - DNA, 15 bp, Homo sapiens
ccgtctttctgtttt

SEQ ID NO: 1110833 - DNA, 15 bp, Homo sapiens
cccgtctttctgttt

SEQ ID NO: 1110834 - DNA, 15 bp, Homo sapiens
gcccgtctttctgtt

SEQ ID NO: 1110835 - DNA, 15 bp, Homo sapiens
ggcccgtctttctgt

SEQ ID NO: 1110836 - DNA, 15 bp, Homo sapiens
aggcccgtctttctg

SEQ ID NO: 1110837 - DNA, 15 bp, Homo sapiens
gaggcccgtctttct

SEQ ID NO: 1110838 - DNA, 15 bp, Homo sapiens
cgaggcccgtctttc

SEQ ID NO: 1110839 - DNA, 15 bp, Homo sapiens
gcgaggcccgtcttt

SEQ ID NO: 1110840 - DNA, 15 bp, Homo sapiens
ggcgaggcccgtctt

SEQ ID NO: 1110841 - DNA, 15 bp, Homo sapiens
cggcgaggcccgtct

SEQ ID NO: 1110842 - DNA, 15 bp, Homo sapiens
tcggcgaggcccgtc

SEQ ID NO: 1110843 - DNA, 15 bp, Homo sapiens
ttcggcgaggcccgt

SEQ ID NO: 1110844 - DNA, 15 bp, Homo sapiens
gttcggcgaggcccg

SEQ ID NO: 1110845 - DNA, 15 bp, Homo sapiens
agttcggcgaggccc

SEQ ID NO: 1110846 - DNA, 15 bp, Homo sapiens
tagttcggcgaggcc

SEQ ID NO: 1110847 - DNA, 15 bp, Homo sapiens
ctagttcggcgaggc

SEQ ID NO: 1110848 - DNA, 15 bp, Homo sapiens
tctagttcggcgagg

SEQ ID NO: 1110849 - DNA, 15 bp, Homo sapiens
ctctagttcggcgag

SEQ ID NO: 1110850 - DNA, 15 bp, Homo sapiens
cctctagttcggcga

SEQ ID NO: 1110851 - DNA, 15 bp, Homo sapiens
ccctctagttcggcg

SEQ ID NO: 1110852 - DNA, 15 bp, Homo sapiens
tccctctagttcggc

SEQ ID NO: 1110853 - DNA, 15 bp, Homo sapiens
ttccctctagttcgg

SEQ ID NO: 1110854 - DNA, 15 bp, Homo sapiens
attccctctagttcg

SEQ ID NO: 1110855 - DNA, 15 bp, Homo sapiens
aattccctctagttc

SEQ ID NO: 1110856 - DNA, 15 bp, Homo sapiens
gaattccctctagtt

SEQ ID NO: 1110857 - DNA, 15 bp, Homo sapiens
agaattccctctagt

SEQ ID NO: 1110858 - DNA, 15 bp, Homo sapiens
gagaattccctctag

SEQ ID NO: 1110859 - DNA, 15 bp, Homo sapiens
ggagaattccctcta

SEQ ID NO: 1110860 - DNA, 15 bp, Homo sapiens
aggagaattccctct

SEQ ID NO: 1110861 - DNA, 15 bp, Homo sapiens
caggagaattccctc

SEQ ID NO: 1110862 - DNA, 15 bp, Homo sapiens
gcaggagaattccct

SEQ ID NO: 1110863 - DNA, 15 bp, Homo sapiens
tgcaggagaattccc

SEQ ID NO: 1110864 - DNA, 15 bp, Homo sapiens
ctgcaggagaattcc

SEQ ID NO: 1110865 - DNA, 15 bp, Homo sapiens
cctgcaggagaattc

SEQ ID NO: 1110866 - DNA, 15 bp, Homo sapiens
gcctgcaggagaatt

SEQ ID NO: 1110867 - DNA, 15 bp, Homo sapiens
agcctgcaggagaat

SEQ ID NO: 1110868 - DNA, 15 bp, Homo sapiens
tagcctgcaggagaa

SEQ ID NO: 1110869 - DNA, 15 bp, Homo sapiens
gtagcctgcaggaga

SEQ ID NO: 1110870 - DNA, 15 bp, Homo sapiens
ggtagcctgcaggag

SEQ ID NO: 1110871 - DNA, 15 bp, Homo sapiens
gggtagcctgcagga

SEQ ID NO: 1110872 - DNA, 15 bp, Homo sapiens
agggtagcctgcagg

SEQ ID NO: 1110873 - DNA, 15 bp, Homo sapiens
gagggtagcctgcag

SEQ ID NO: 1110874 - DNA, 15 bp, Homo sapiens
tgagggtagcctgca

SEQ ID NO: 1110875 - DNA, 15 bp, Homo sapiens
ctgagggtagcctgc

SEQ ID NO: 1110876 - DNA, 15 bp, Homo sapiens
tctgagggtagcctg

SEQ ID NO: 1110877 - DNA, 15 bp, Homo sapiens
gtctgagggtagcct

SEQ ID NO: 1110878 - DNA, 15 bp, Homo sapiens
agtctgagggtagcc

SEQ ID NO: 1110879 - DNA, 15 bp, Homo sapiens
aagtctgagggtagc

SEQ ID NO: 1110880 - DNA, 15 bp, Homo sapiens
taagtctgagggtag

SEQ ID NO: 1110881 - DNA, 15 bp, Homo sapiens
ttaagtctgagggta

SEQ ID NO: 1110882 - DNA, 15 bp, Homo sapiens
gttaagtctgagggt

SEQ ID NO: 1110883 - DNA, 15 bp, Homo sapiens
ggttaagtctgaggg

SEQ ID NO: 1110884 - DNA, 15 bp, Homo sapiens
tggttaagtctgagg

SEQ ID NO: 1110885 - DNA, 15 bp, Homo sapiens
atggttaagtctgag

SEQ ID NO: 1110886 - DNA, 15 bp, Homo sapiens
gatggttaagtctga

SEQ ID NO: 1110887 - DNA, 15 bp, Homo sapiens
tgatggttaagtctg

SEQ ID NO: 1110888 - DNA, 15 bp, Homo sapiens
ctgatggttaagtct

SEQ ID NO: 1110889 - DNA, 15 bp, Homo sapiens
gctgatggttaagtc

SEQ ID NO: 1110890 - DNA, 15 bp, Homo sapiens
agctgatggttaagt

SEQ ID NO: 1110891 - DNA, 15 bp, Homo sapiens
gagctgatggttaag

SEQ ID NO: 1110892 - DNA, 15 bp, Homo sapiens
agagctgatggttaa

SEQ ID NO: 1110893 - DNA, 15 bp, Homo sapiens
gagagctgatggtta

SEQ ID NO: 1110894 - DNA, 15 bp, Homo sapiens
ggagagctgatggtt

SEQ ID NO: 1110895 - DNA, 15 bp, Homo sapiens
aggagagctgatggt

SEQ ID NO: 1110896 - DNA, 15 bp, Homo sapiens
caggagagctgatgg

SEQ ID NO: 1110897 - DNA, 15 bp, Homo sapiens
ccaggagagctgatg

SEQ ID NO: 1110898 - DNA, 15 bp, Homo sapiens
cccaggagagctgat

SEQ ID NO: 1110899 - DNA, 15 bp, Homo sapiens
acccaggagagctga

SEQ ID NO: 1110900 - DNA, 15 bp, Homo sapiens
gacccaggagagctg

SEQ ID NO: 1110901 - DNA, 15 bp, Homo sapiens
cgacccaggagagct

SEQ ID NO: 1110902 - DNA, 15 bp, Homo sapiens
gcgacccaggagagc

SEQ ID NO: 1110903 - DNA, 15 bp, Homo sapiens
ggcgacccaggagag

SEQ ID NO: 1110904 - DNA, 15 bp, Homo sapiens
tggcgacccaggaga

SEQ ID NO: 1110905 - DNA, 15 bp, Homo sapiens
ctggcgacccaggag

SEQ ID NO: 1110906 - DNA, 15 bp, Homo sapiens
gctggcgacccagga

SEQ ID NO: 1110907 - DNA, 15 bp, Homo sapiens
ggctggcgacccagg

SEQ ID NO: 1110908 - DNA, 15 bp, Homo sapiens
gggctggcgacccag

SEQ ID NO: 1110909 - DNA, 15 bp, Homo sapiens
tgggctggcgaccca

SEQ ID NO: 1110910 - DNA, 15 bp, Homo sapiens
gtgggctggcgaccc

SEQ ID NO: 1110911 - DNA, 15 bp, Homo sapiens
ggtgggctggcgacc

SEQ ID NO: 1110912 - DNA, 15 bp, Homo sapiens
tggtgggctggcgac

SEQ ID NO: 1110913 - DNA, 15 bp, Homo sapiens
ctggtgggctggcga

SEQ ID NO: 1110914 - DNA, 15 bp, Homo sapiens
gctggtgggctggcg

SEQ ID NO: 1110915 - DNA, 15 bp, Homo sapiens
agctggtgggctggc

SEQ ID NO: 1110916 - DNA, 15 bp, Homo sapiens
gagctggtgggctgg

SEQ ID NO: 1110917 - DNA, 15 bp, Homo sapiens
tgagctggtgggctg

SEQ ID NO: 1110918 - DNA, 15 bp, Homo sapiens
gtgagctggtgggct

SEQ ID NO: 1110919 - DNA, 15 bp, Homo sapiens
tgtgagctggtgggc

SEQ ID NO: 1110920 - DNA, 15 bp, Homo sapiens
gtgtgagctggtggg

SEQ ID NO: 1110921 - DNA, 15 bp, Homo sapiens
agtgtgagctggtgg

SEQ ID NO: 1110922 - DNA, 15 bp, Homo sapiens
tagtgtgagctggtg

SEQ ID NO: 1110923 - DNA, 15 bp, Homo sapiens
ttagtgtgagctggt

SEQ ID NO: 1110924 - DNA, 15 bp, Homo sapiens
tttagtgtgagctgg

SEQ ID NO: 1110925 - DNA, 15 bp, Homo sapiens
ctttagtgtgagctg

SEQ ID NO: 1110926 - DNA, 15 bp, Homo sapiens
cctttagtgtgagct

SEQ ID NO: 1110927 - DNA, 15 bp, Homo sapiens
gcctttagtgtgagc

SEQ ID NO: 1110928 - DNA, 15 bp, Homo sapiens
agcctttagtgtgag

SEQ ID NO: 1110929 - DNA, 15 bp, Homo sapiens
aagcctttagtgtga

SEQ ID NO: 1110930 - DNA, 15 bp, Homo sapiens
taagcctttagtgtg

SEQ ID NO: 1110931 - DNA, 15 bp, Homo sapiens
ctaagcctttagtgt

SEQ ID NO: 1110932 - DNA, 15 bp, Homo sapiens
cctaagcctttagtg

SEQ ID NO: 1110933 - DNA, 15 bp, Homo sapiens
tcctaagcctttagt

SEQ ID NO: 1110934 - DNA, 15 bp, Homo sapiens
atcctaagcctttag

SEQ ID NO: 1110935 - DNA, 15 bp, Homo sapiens
catcctaagccttta

SEQ ID NO: 1110936 - DNA, 15 bp, Homo sapiens
ccatcctaagccttt

SEQ ID NO: 1110937 - DNA, 15 bp, Homo sapiens
accatcctaagcctt

SEQ ID NO: 1110938 - DNA, 15 bp, Homo sapiens
aaccatcctaagcct

SEQ ID NO: 1110939 - DNA, 15 bp, Homo sapiens
taaccatcctaagcc

SEQ ID NO: 1110940 - DNA, 15 bp, Homo sapiens
ataaccatcctaagc

SEQ ID NO: 1110941 - DNA, 15 bp, Homo sapiens
cataaccatcctaag

SEQ ID NO: 1110942 - DNA, 15 bp, Homo sapiens
tcataaccatcctaa

SEQ ID NO: 1110943 - DNA, 15 bp, Homo sapiens
atcataaccatccta

SEQ ID NO: 1110944 - DNA, 15 bp, Homo sapiens
tatcataaccatcct

SEQ ID NO: 1110945 - DNA, 15 bp, Homo sapiens
ttatcataaccatcc

SEQ ID NO: 1110946 - DNA, 15 bp, Homo sapiens
cttatcataaccatc

SEQ ID NO: 1110947 - DNA, 15 bp, Homo sapiens
tcttatcataaccat

SEQ ID NO: 1110948 - DNA, 15 bp, Homo sapiens
ttcttatcataacca

SEQ ID NO: 1110949 - DNA, 15 bp, Homo sapiens
tttcttatcataacc

SEQ ID NO: 1110950 - DNA, 15 bp, Homo sapiens
ctttcttatcataac

SEQ ID NO: 1110951 - DNA, 15 bp, Homo sapiens
tctttcttatcataa

SEQ ID NO: 1110952 - DNA, 15 bp, Homo sapiens
gtctttcttatcata

SEQ ID NO: 1110953 - DNA, 15 bp, Homo sapiens
tgtctttcttatcat

SEQ ID NO: 1110954 - DNA, 15 bp, Homo sapiens
ctgtctttcttatca

SEQ ID NO: 1110955 - DNA, 15 bp, Homo sapiens
tctgtctttcttatc

SEQ ID NO: 1110956 - DNA, 15 bp, Homo sapiens
atctgtctttcttat

SEQ ID NO: 1110957 - DNA, 15 bp, Homo sapiens
catctgtctttctta

SEQ ID NO: 1110958 - DNA, 15 bp, Homo sapiens
tcatctgtctttctt

SEQ ID NO: 1110959 - DNA, 15 bp, Homo sapiens
atcatctgtctttct

SEQ ID NO: 1110960 - DNA, 15 bp, Homo sapiens
tatcatctgtctttc

SEQ ID NO: 1110961 - DNA, 15 bp, Homo sapiens
ttatcatctgtcttt

SEQ ID NO: 1110962 - DNA, 15 bp, Homo sapiens
gttatcatctgtctt

SEQ ID NO: 1110963 - DNA, 15 bp, Homo sapiens
tgttatcatctgtct

SEQ ID NO: 1110964 - DNA, 15 bp, Homo sapiens
ctgttatcatctgtc

SEQ ID NO: 1110965 - DNA, 15 bp, Homo sapiens
tctgttatcatctgt

SEQ ID NO: 1110966 - DNA, 15 bp, Homo sapiens
ttctgttatcatctg

SEQ ID NO: 1110967 - DNA, 15 bp, Homo sapiens
cttctgttatcatct

SEQ ID NO: 1110968 - DNA, 15 bp, Homo sapiens
acttctgttatcatc

SEQ ID NO: 1110969 - DNA, 15 bp, Homo sapiens
aacttctgttatcat

SEQ ID NO: 1110970 - DNA, 15 bp, Homo sapiens
taacttctgttatca

SEQ ID NO: 1110971 - DNA, 15 bp, Homo sapiens
ttaacttctgttatc

SEQ ID NO: 1110972 - DNA, 15 bp, Homo sapiens
gttaacttctgttat

SEQ ID NO: 1110973 - DNA, 15 bp, Homo sapiens
ggttaacttctgtta

SEQ ID NO: 1110974 - DNA, 15 bp, Homo sapiens
tggttaacttctgtt

SEQ ID NO: 1110975 - DNA, 15 bp, Homo sapiens
atggttaacttctgt

SEQ ID NO: 1110976 - DNA, 15 bp, Homo sapiens
catggttaacttctg

SEQ ID NO: 1110977 - DNA, 15 bp, Homo sapiens
ccatggttaacttct

SEQ ID NO: 1110978 - DNA, 15 bp, Homo sapiens
tccatggttaacttc

SEQ ID NO: 1110979 - DNA, 15 bp, Homo sapiens
atccatggttaactt

SEQ ID NO: 1110980 - DNA, 15 bp, Homo sapiens
catccatggttaact

SEQ ID NO: 1110981 - DNA, 15 bp, Homo sapiens
tcatccatggttaac

SEQ ID NO: 1110982 - DNA, 15 bp, Homo sapiens
ctcatccatggttaa

SEQ ID NO: 1110983 - DNA, 15 bp, Homo sapiens
cctcatccatggtta

SEQ ID NO: 1110984 - DNA, 15 bp, Homo sapiens
gcctcatccatggtt

SEQ ID NO: 1110985 - DNA, 15 bp, Homo sapiens
agcctcatccatggt

SEQ ID NO: 1110986 - DNA, 15 bp, Homo sapiens
tagcctcatccatgg

SEQ ID NO: 1110987 - DNA, 15 bp, Homo sapiens
ttagcctcatccatg

SEQ ID NO: 1110988 - DNA, 15 bp, Homo sapiens
tttagcctcatccat

SEQ ID NO: 1110989 - DNA, 15 bp, Homo sapiens
ctttagcctcatcca

SEQ ID NO: 1110990 - DNA, 15 bp, Homo sapiens
tctttagcctcatcc

SEQ ID NO: 1110991 - DNA, 15 bp, Homo sapiens
ctctttagcctcatc

SEQ ID NO: 1110992 - DNA, 15 bp, Homo sapiens
tctctttagcctcat

SEQ ID NO: 1110993 - DNA, 15 bp, Homo sapiens
ttctctttagcctca

SEQ ID NO: 1110994 - DNA, 15 bp, Homo sapiens
tttctctttagcctc

SEQ ID NO: 1110995 - DNA, 15 bp, Homo sapiens
atttctctttagcct

SEQ ID NO: 1110996 - DNA, 15 bp, Homo sapiens
aatttctctttagcc

SEQ ID NO: 1110997 - DNA, 15 bp, Homo sapiens
caatttctctttagc

SEQ ID NO: 1110998 - DNA, 15 bp, Homo sapiens
tcaatttctctttag

SEQ ID NO: 1110999 - DNA, 15 bp, Homo sapiens
tttcaatttctcttt

SEQ ID NO: 1111000 - DNA, 15 bp, Homo sapiens
gtttcaatttctctt

SEQ ID NO: 1111001 - DNA, 15 bp, Homo sapiens
ggtttcaatttctct

SEQ ID NO: 1111002 - DNA, 15 bp, Homo sapiens
gggtttcaatttctc

SEQ ID NO: 1111003 - DNA, 15 bp, Homo sapiens
agggtttcaatttct

SEQ ID NO: 1111004 - DNA, 15 bp, Homo sapiens
gagggtttcaatttc

SEQ ID NO: 1111005 - DNA, 15 bp, Homo sapiens
tgagggtttcaattt

SEQ ID NO: 1111006 - DNA, 15 bp, Homo sapiens
atgagggtttcaatt

SEQ ID NO: 1111007 - DNA, 15 bp, Homo sapiens
tatgagggtttcaat

SEQ ID NO: 1111008 - DNA, 15 bp, Homo sapiens
gtatgagggtttcaa

SEQ ID NO: 1111009 - DNA, 15 bp, Homo sapiens
tgtatgagggtttca

SEQ ID NO: 1111010 - DNA, 15 bp, Homo sapiens
atgtatgagggtttc

SEQ ID NO: 1111011 - DNA, 15 bp, Homo sapiens
gatgtatgagggttt

SEQ ID NO: 1111012 - DNA, 15 bp, Homo sapiens
cgatgtatgagggtt

SEQ ID NO: 1111013 - DNA, 15 bp, Homo sapiens
gcgatgtatgagggt

SEQ ID NO: 1111014 - DNA, 15 bp, Homo sapiens
agcgatgtatgaggg

SEQ ID NO: 1111015 - DNA, 15 bp, Homo sapiens
cagcgatgtatgagg

SEQ ID NO: 1111016 - DNA, 15 bp, Homo sapiens
ccagcgatgtatgag

SEQ ID NO: 1111017 - DNA, 15 bp, Homo sapiens
accagcgatgtatga

SEQ ID NO: 1111018 - DNA, 15 bp, Homo sapiens
caccagcgatgtatg

SEQ ID NO: 1111019 - DNA, 15 bp, Homo sapiens
ccaccagcgatgtat

SEQ ID NO: 1111020 - DNA, 15 bp, Homo sapiens
cccaccagcgatgta

SEQ ID NO: 1111021 - DNA, 15 bp, Homo sapiens
tcccaccagcgatgt

SEQ ID NO: 1111022 - DNA, 15 bp, Homo sapiens
ttcccaccagcgatg

SEQ ID NO: 1111023 - DNA, 15 bp, Homo sapiens
attcccaccagcgat

SEQ ID NO: 1111024 - DNA, 15 bp, Homo sapiens
cattcccaccagcga

SEQ ID NO: 1111025 - DNA, 15 bp, Homo sapiens
acattcccaccagcg

SEQ ID NO: 1111026 - DNA, 15 bp, Homo sapiens
tacattcccaccagc

SEQ ID NO: 1111027 - DNA, 15 bp, Homo sapiens
ttacattcccaccag

SEQ ID NO: 1111028 - DNA, 15 bp, Homo sapiens
tattttacattccca

SEQ ID NO: 1111029 - DNA, 15 bp, Homo sapiens
ctattttacattccc

SEQ ID NO: 1111030 - DNA, 15 bp, Homo sapiens
actattttacattcc

SEQ ID NO: 1111031 - DNA, 15 bp, Homo sapiens
cactattttacattc

SEQ ID NO: 1111032 - DNA, 15 bp, Homo sapiens
gcactattttacatt

SEQ ID NO: 1111033 - DNA, 15 bp, Homo sapiens
tgcactattttacat

SEQ ID NO: 1111034 - DNA, 15 bp, Homo sapiens
ctgcactattttaca

SEQ ID NO: 1111035 - DNA, 15 bp, Homo sapiens
gctgcactattttac

SEQ ID NO: 1111036 - DNA, 15 bp, Homo sapiens
agctgcactatttta

SEQ ID NO: 1111037 - DNA, 15 bp, Homo sapiens
cagctgcactatttt

SEQ ID NO: 1111038 - DNA, 15 bp, Homo sapiens
gcagctgcactattt

SEQ ID NO: 1111039 - DNA, 15 bp, Homo sapiens
agcagctgcactatt

SEQ ID NO: 1111040 - DNA, 15 bp, Homo sapiens
aagcagctgcactat

SEQ ID NO: 1111041 - DNA, 15 bp, Homo sapiens
aaagcagctgcacta

SEQ ID NO: 1111042 - DNA, 15 bp, Homo sapiens
caaagcagctgcact

SEQ ID NO: 1111043 - DNA, 15 bp, Homo sapiens
ccaaagcagctgcac

SEQ ID NO: 1111044 - DNA, 15 bp, Homo sapiens
tccaaagcagctgca

SEQ ID NO: 1111045 - DNA, 15 bp, Homo sapiens
ttccaaagcagctgc

SEQ ID NO: 1111046 - DNA, 15 bp, Homo sapiens
tttccaaagcagctg

SEQ ID NO: 1111047 - DNA, 15 bp, Homo sapiens
ttttccaaagcagct

SEQ ID NO: 1111048 - DNA, 15 bp, Homo sapiens
gttttccaaagcagc

SEQ ID NO: 1111049 - DNA, 15 bp, Homo sapiens
tgttttccaaagcag

SEQ ID NO: 1111050 - DNA, 15 bp, Homo sapiens
ctgttttccaaagca

SEQ ID NO: 1111051 - DNA, 15 bp, Homo sapiens
cctgttttccaaagc

SEQ ID NO: 1111052 - DNA, 15 bp, Homo sapiens
gcctgttttccaaag

SEQ ID NO: 1111053 - DNA, 15 bp, Homo sapiens
agcctgttttccaaa

SEQ ID NO: 1111054 - DNA, 15 bp, Homo sapiens
cagcctgttttccaa

SEQ ID NO: 1111055 - DNA, 15 bp, Homo sapiens
ccagcctgttttcca

SEQ ID NO: 1111056 - DNA, 15 bp, Homo sapiens
accagcctgttttcc

SEQ ID NO: 1111057 - DNA, 15 bp, Homo sapiens
taccagcctgttttc

SEQ ID NO: 1111058 - DNA, 15 bp, Homo sapiens
ctaccagcctgtttt

SEQ ID NO: 1111059 - DNA, 15 bp, Homo sapiens
actaccagcctgttt

SEQ ID NO: 1111060 - DNA, 15 bp, Homo sapiens
aactaccagcctgtt

SEQ ID NO: 1111061 - DNA, 15 bp, Homo sapiens
taactaccagcctgt

SEQ ID NO: 1111062 - DNA, 15 bp, Homo sapiens
gtaactaccagcctg

SEQ ID NO: 1111063 - DNA, 15 bp, Homo sapiens
tgtaactaccagcct

SEQ ID NO: 1111064 - DNA, 15 bp, Homo sapiens
gtgtaactaccagcc

SEQ ID NO: 1111065 - DNA, 15 bp, Homo sapiens
tgtgtaactaccagc

SEQ ID NO: 1111066 - DNA, 15 bp, Homo sapiens
ttgtgtaactaccag

SEQ ID NO: 1111067 - DNA, 15 bp, Homo sapiens
tttgtgtaactacca

SEQ ID NO: 1111068 - DNA, 15 bp, Homo sapiens
ttttgtgtaactacc

SEQ ID NO: 1111069 - DNA, 15 bp, Homo sapiens
cttttgtgtaactac

SEQ ID NO: 1111070 - DNA, 15 bp, Homo sapiens
ccttttgtgtaacta

SEQ ID NO: 1111071 - DNA, 15 bp, Homo sapiens
gccttttgtgtaact

SEQ ID NO: 1111072 - DNA, 15 bp, Homo sapiens
agccttttgtgtaac

SEQ ID NO: 1111073 - DNA, 15 bp, Homo sapiens
tagccttttgtgtaa

SEQ ID NO: 1111074 - DNA, 15 bp, Homo sapiens
ttagccttttgtgta

SEQ ID NO: 1111075 - DNA, 15 bp, Homo sapiens
tttagccttttgtgt

SEQ ID NO: 1111076 - DNA, 15 bp, Homo sapiens
gtttagccttttgtg

SEQ ID NO: 1111077 - DNA, 15 bp, Homo sapiens
tgtttagccttttgt

SEQ ID NO: 1111078 - DNA, 15 bp, Homo sapiens
ctgtttagccttttg

SEQ ID NO: 1111079 - DNA, 15 bp, Homo sapiens
tctgtttagcctttt

SEQ ID NO: 1111080 - DNA, 15 bp, Homo sapiens
ttctgtttagccttt

SEQ ID NO: 1111081 - DNA, 15 bp, Homo sapiens
attctgtttagcctt

SEQ ID NO: 1111082 - DNA, 15 bp, Homo sapiens
aattctgtttagcct

SEQ ID NO: 1111083 - DNA, 15 bp, Homo sapiens
taattctgtttagcc

SEQ ID NO: 1111084 - DNA, 15 bp, Homo sapiens
ataattctgtttagc

SEQ ID NO: 1111085 - DNA, 15 bp, Homo sapiens
aataattctgtttag

SEQ ID NO: 1111086 - DNA, 15 bp, Homo sapiens
taataattctgttta

SEQ ID NO: 1111087 - DNA, 15 bp, Homo sapiens
ataataattctgttt

SEQ ID NO: 1111088 - DNA, 15 bp, Homo sapiens
cataataattctgtt

SEQ ID NO: 1111089 - DNA, 15 bp, Homo sapiens
acataataattctgt

SEQ ID NO: 1111090 - DNA, 15 bp, Homo sapiens
tacataataattctg

SEQ ID NO: 1111091 - DNA, 15 bp, Homo sapiens
ttacataataattct

SEQ ID NO: 1111092 - DNA, 15 bp, Homo sapiens
attacataataattc

SEQ ID NO: 1111093 - DNA, 15 bp, Homo sapiens
gattacataataatt

SEQ ID NO: 1111094 - DNA, 15 bp, Homo sapiens
ggattacataataat

SEQ ID NO: 1111095 - DNA, 15 bp, Homo sapiens
tggattacataataa

SEQ ID NO: 1111096 - DNA, 15 bp, Homo sapiens
gtggattacataata

SEQ ID NO: 1111097 - DNA, 15 bp, Homo sapiens
agtggattacataat

SEQ ID NO: 1111098 - DNA, 15 bp, Homo sapiens
tagtggattacataa

SEQ ID NO: 1111099 - DNA, 15 bp, Homo sapiens
ttagtggattacata

SEQ ID NO: 1111100 - DNA, 15 bp, Homo sapiens
attagtggattacat

SEQ ID NO: 1111101 - DNA, 15 bp, Homo sapiens
aattagtggattaca

SEQ ID NO: 1111102 - DNA, 15 bp, Homo sapiens
gaattagtggattac

SEQ ID NO: 1111103 - DNA, 15 bp, Homo sapiens
agaattagtggatta

SEQ ID NO: 1111104 - DNA, 15 bp, Homo sapiens
tagaattagtggatt

SEQ ID NO: 1111105 - DNA, 15 bp, Homo sapiens
gtagaattagtggat

SEQ ID NO: 1111106 - DNA, 15 bp, Homo sapiens
agtagaattagtgga

SEQ ID NO: 1111107 - DNA, 15 bp, Homo sapiens
gagtagaattagtgg

SEQ ID NO: 1111108 - DNA, 15 bp, Homo sapiens
ggagtagaattagtg

SEQ ID NO: 1111109 - DNA, 15 bp, Homo sapiens
aggagtagaattagt

SEQ ID NO: 1111110 - DNA, 15 bp, Homo sapiens
taggagtagaattag

SEQ ID NO: 1111111 - DNA, 15 bp, Homo sapiens
ctaggagtagaatta

SEQ ID NO: 1111112 - DNA, 15 bp, Homo sapiens
cctaggagtagaatt

SEQ ID NO: 1111113 - DNA, 15 bp, Homo sapiens
acctaggagtagaat

SEQ ID NO: 1111114 - DNA, 15 bp, Homo sapiens
tacctaggagtagaa

SEQ ID NO: 1111115 - DNA, 15 bp, Homo sapiens
atacctaggagtaga

SEQ ID NO: 1111116 - DNA, 15 bp, Homo sapiens
tatacctaggagtag

SEQ ID NO: 1111117 - DNA, 15 bp, Homo sapiens
atatacctaggagta

SEQ ID NO: 1111118 - DNA, 15 bp, Homo sapiens
tatatacctaggagt

SEQ ID NO: 1111119 - DNA, 15 bp, Homo sapiens
gtatatacctaggag

SEQ ID NO: 1111120 - DNA, 15 bp, Homo sapiens
ggtatatacctagga

SEQ ID NO: 1111121 - DNA, 15 bp, Homo sapiens
gggtatatacctagg

SEQ ID NO: 1111122 - DNA, 15 bp, Homo sapiens
tgggtatatacctag

SEQ ID NO: 1111123 - DNA, 15 bp, Homo sapiens
ttgggtatataccta

SEQ ID NO: 1111124 - DNA, 15 bp, Homo sapiens
cttgggtatatacct

SEQ ID NO: 1111125 - DNA, 15 bp, Homo sapiens
tcttgggtatatacc

SEQ ID NO: 1111126 - DNA, 15 bp, Homo sapiens
ctcttgggtatatac

SEQ ID NO: 1111127 - DNA, 15 bp, Homo sapiens
tctcttgggtatata

SEQ ID NO: 1111128 - DNA, 15 bp, Homo sapiens
ttctcttgggtatat

SEQ ID NO: 1111129 - DNA, 15 bp, Homo sapiens
tttctcttgggtata

SEQ ID NO: 1111130 - DNA, 15 bp, Homo sapiens
atttctcttgggtat

SEQ ID NO: 1111131 - DNA, 15 bp, Homo sapiens
catttctcttgggta

SEQ ID NO: 1111132 - DNA, 15 bp, Homo sapiens
tcatttctcttgggt

SEQ ID NO: 1111133 - DNA, 15 bp, Homo sapiens
ttcatttctcttggg

SEQ ID NO: 1111134 - DNA, 15 bp, Homo sapiens
tttcatttctcttgg

SEQ ID NO: 1111135 - DNA, 15 bp, Homo sapiens
ttttcatttctcttg

SEQ ID NO: 1111136 - DNA, 15 bp, Homo sapiens
gttttcatttctctt

SEQ ID NO: 1111137 - DNA, 15 bp, Homo sapiens
tgttttcatttctct

SEQ ID NO: 1111138 - DNA, 15 bp, Homo sapiens
atgttttcatttctc

SEQ ID NO: 1111139 - DNA, 15 bp, Homo sapiens
gacatgttttcattt

SEQ ID NO: 1111140 - DNA, 15 bp, Homo sapiens
ggacatgttttcatt

SEQ ID NO: 1111141 - DNA, 15 bp, Homo sapiens
tggacatgttttcat

SEQ ID NO: 1111142 - DNA, 15 bp, Homo sapiens
gtggacatgttttca

SEQ ID NO: 1111143 - DNA, 15 bp, Homo sapiens
tgtggacatgttttc

SEQ ID NO: 1111144 - DNA, 15 bp, Homo sapiens
gtgtggacatgtttt

SEQ ID NO: 1111145 - DNA, 15 bp, Homo sapiens
tgtgtggacatgttt

SEQ ID NO: 1111146 - DNA, 15 bp, Homo sapiens
ttgtgtggacatgtt

SEQ ID NO: 1111147 - DNA, 15 bp, Homo sapiens
tttgtgtggacatgt

SEQ ID NO: 1111148 - DNA, 15 bp, Homo sapiens
ttttgtgtggacatg

SEQ ID NO: 1111149 - DNA, 15 bp, Homo sapiens
tttttgtgtggacat

SEQ ID NO: 1111150 - DNA, 15 bp, Homo sapiens
gtttttgtgtggaca

SEQ ID NO: 1111151 - DNA, 15 bp, Homo sapiens
agtttttgtgtggac

SEQ ID NO: 1111152 - DNA, 15 bp, Homo sapiens
aagtttttgtgtgga

SEQ ID NO: 1111153 - DNA, 15 bp, Homo sapiens
caagtttttgtgtgg

SEQ ID NO: 1111154 - DNA, 15 bp, Homo sapiens
acaagtttttgtgtg

SEQ ID NO: 1111155 - DNA, 15 bp, Homo sapiens
tacaagtttttgtgt

SEQ ID NO: 1111156 - DNA, 15 bp, Homo sapiens
atacaagtttttgtg

SEQ ID NO: 1111157 - DNA, 15 bp, Homo sapiens
catacaagtttttgt

SEQ ID NO: 1111158 - DNA, 15 bp, Homo sapiens
ccatacaagtttttg

SEQ ID NO: 1111159 - DNA, 15 bp, Homo sapiens
cccatacaagttttt

SEQ ID NO: 1111160 - DNA, 15 bp, Homo sapiens
gcccatacaagtttt

SEQ ID NO: 1111161 - DNA, 15 bp, Homo sapiens
ggcccatacaagttt

SEQ ID NO: 1111162 - DNA, 15 bp, Homo sapiens
cggcccatacaagtt

SEQ ID NO: 1111163 - DNA, 15 bp, Homo sapiens
ccggcccatacaagt

SEQ ID NO: 1111164 - DNA, 15 bp, Homo sapiens
cccggcccatacaag

SEQ ID NO: 1111165 - DNA, 15 bp, Homo sapiens
gcccggcccatacaa

SEQ ID NO: 1111166 - DNA, 15 bp, Homo sapiens
cgcccggcccataca

SEQ ID NO: 1111167 - DNA, 15 bp, Homo sapiens
acgcccggcccatac

SEQ ID NO: 1111168 - DNA, 15 bp, Homo sapiens
cacgcccggcccata

SEQ ID NO: 1111169 - DNA, 15 bp, Homo sapiens
ccacgcccggcccat

SEQ ID NO: 1111170 - DNA, 15 bp, Homo sapiens
accacgcccggccca

SEQ ID NO: 1111171 - DNA, 15 bp, Homo sapiens
caccacgcccggccc

SEQ ID NO: 1111172 - DNA, 15 bp, Homo sapiens
ccaccacgcccggcc

SEQ ID NO: 1111173 - DNA, 15 bp, Homo sapiens
agccaccacgcccgg

SEQ ID NO: 1111174 - DNA, 15 bp, Homo sapiens
gagccaccacgcccg

SEQ ID NO: 1111175 - DNA, 15 bp, Homo sapiens
agtgagccaccacgc

SEQ ID NO: 1111176 - DNA, 15 bp, Homo sapiens
gagtgagccaccacg

SEQ ID NO: 1111177 - DNA, 15 bp, Homo sapiens
ggagtgagccaccac

SEQ ID NO: 1111178 - DNA, 15 bp, Homo sapiens
aggagtgagccacca

SEQ ID NO: 1111179 - DNA, 15 bp, Homo sapiens
caggagtgagccacc

SEQ ID NO: 1111180 - DNA, 15 bp, Homo sapiens
acaggagtgagccac

SEQ ID NO: 1111181 - DNA, 15 bp, Homo sapiens
tacaggagtgagcca

SEQ ID NO: 1111182 - DNA, 15 bp, Homo sapiens
ttacaggagtgagcc

SEQ ID NO: 1111183 - DNA, 15 bp, Homo sapiens
attacaggagtgagc

SEQ ID NO: 1111184 - DNA, 15 bp, Homo sapiens
ggattacaggagtga

SEQ ID NO: 1111185 - DNA, 15 bp, Homo sapiens
gggattacaggagtg

SEQ ID NO: 1111186 - DNA, 15 bp, Homo sapiens
tgggattacaggagt

SEQ ID NO: 1111187 - DNA, 15 bp, Homo sapiens
ggctgggattacagg

SEQ ID NO: 1111188 - DNA, 15 bp, Homo sapiens
gggctgggattacag

SEQ ID NO: 1111189 - DNA, 15 bp, Homo sapiens
tcccaaagggctggg

SEQ ID NO: 1111190 - DNA, 15 bp, Homo sapiens
ctcccaaagggctgg

SEQ ID NO: 1111191 - DNA, 15 bp, Homo sapiens
cctcccacttcagcc

SEQ ID NO: 1111192 - DNA, 15 bp, Homo sapiens
tcctcccacttcagc

SEQ ID NO: 1111193 - DNA, 15 bp, Homo sapiens
atcctcccacttcag

SEQ ID NO: 1111194 - DNA, 15 bp, Homo sapiens
gatcctcccacttca

SEQ ID NO: 1111195 - DNA, 15 bp, Homo sapiens
ggatcctcccacttc

SEQ ID NO: 1111196 - DNA, 15 bp, Homo sapiens
gggatcctcccactt

SEQ ID NO: 1111197 - DNA, 15 bp, Homo sapiens
agggatcctcccact

SEQ ID NO: 1111198 - DNA, 15 bp, Homo sapiens
cagggatcctcccac

SEQ ID NO: 1111199 - DNA, 15 bp, Homo sapiens
ccagggatcctccca

SEQ ID NO: 1111200 - DNA, 15 bp, Homo sapiens
tccagggatcctccc

SEQ ID NO: 1111201 - DNA, 15 bp, Homo sapiens
ctccagggatcctcc

SEQ ID NO: 1111202 - DNA, 15 bp, Homo sapiens
actccagggatcctc

SEQ ID NO: 1111203 - DNA, 15 bp, Homo sapiens
aactccagggatcct

SEQ ID NO: 1111204 - DNA, 15 bp, Homo sapiens
gaactccagggatcc

SEQ ID NO: 1111205 - DNA, 15 bp, Homo sapiens
tgaactccagggatc

SEQ ID NO: 1111206 - DNA, 15 bp, Homo sapiens
ctgaactccagggat

SEQ ID NO: 1111207 - DNA, 15 bp, Homo sapiens
cctgaactccaggga

SEQ ID NO: 1111208 - DNA, 15 bp, Homo sapiens
tcctgaactccaggg

SEQ ID NO: 1111209 - DNA, 15 bp, Homo sapiens
ctcctgaactccagg

SEQ ID NO: 1111210 - DNA, 15 bp, Homo sapiens
actcctgaactccag

SEQ ID NO: 1111211 - DNA, 15 bp, Homo sapiens
aactcctgaactcca

SEQ ID NO: 1111212 - DNA, 15 bp, Homo sapiens
aaactcctgaactcc

SEQ ID NO: 1111213 - DNA, 15 bp, Homo sapiens
caaactcctgaactc

SEQ ID NO: 1111214 - DNA, 15 bp, Homo sapiens
tcaaactcctgaact

SEQ ID NO: 1111215 - DNA, 15 bp, Homo sapiens
ctcaaactcctgaac

SEQ ID NO: 1111216 - DNA, 15 bp, Homo sapiens
tctcaaactcctgaa

SEQ ID NO: 1111217 - DNA, 15 bp, Homo sapiens
agctagtctcaaact

SEQ ID NO: 1111218 - DNA, 15 bp, Homo sapiens
cagctagtctcaaac

SEQ ID NO: 1111219 - DNA, 15 bp, Homo sapiens
tcagctagtctcaaa

SEQ ID NO: 1111220 - DNA, 15 bp, Homo sapiens
gtcagctagtctcaa

SEQ ID NO: 1111221 - DNA, 15 bp, Homo sapiens
ggtcagctagtctca

SEQ ID NO: 1111222 - DNA, 15 bp, Homo sapiens
tggtcagctagtctc

SEQ ID NO: 1111223 - DNA, 15 bp, Homo sapiens
ttggtcagctagtct

SEQ ID NO: 1111224 - DNA, 15 bp, Homo sapiens
gttggtcagctagtc

SEQ ID NO: 1111225 - DNA, 15 bp, Homo sapiens
tgttggtcagctagt

SEQ ID NO: 1111226 - DNA, 15 bp, Homo sapiens
atgttggtcagctag

SEQ ID NO: 1111227 - DNA, 15 bp, Homo sapiens
catgttggtcagcta

SEQ ID NO: 1111228 - DNA, 15 bp, Homo sapiens
ccatgttggtcagct

SEQ ID NO: 1111229 - DNA, 15 bp, Homo sapiens
gccatgttggtcagc

SEQ ID NO: 1111230 - DNA, 15 bp, Homo sapiens
cttgccatgttggtc

SEQ ID NO: 1111231 - DNA, 15 bp, Homo sapiens
tcttgccatgttggt

SEQ ID NO: 1111232 - DNA, 15 bp, Homo sapiens
gtcttgccatgttgg

SEQ ID NO: 1111233 - DNA, 15 bp, Homo sapiens
gggtcttgccatgtt

SEQ ID NO: 1111234 - DNA, 15 bp, Homo sapiens
agggtcttgccatgt

SEQ ID NO: 1111235 - DNA, 15 bp, Homo sapiens
cagggtcttgccatg

SEQ ID NO: 1111236 - DNA, 15 bp, Homo sapiens
acagggtcttgccat

SEQ ID NO: 1111237 - DNA, 15 bp, Homo sapiens
gacagggtcttgcca

SEQ ID NO: 1111238 - DNA, 15 bp, Homo sapiens
agacagggtcttgcc

SEQ ID NO: 1111239 - DNA, 15 bp, Homo sapiens
ggtttttgtagagac

SEQ ID NO: 1111240 - DNA, 15 bp, Homo sapiens
gtggtttttgtagag

SEQ ID NO: 1111241 - DNA, 15 bp, Homo sapiens
tgtggtttttgtaga

SEQ ID NO: 1111242 - DNA, 15 bp, Homo sapiens
gtgtggtttttgtag

SEQ ID NO: 1111243 - DNA, 15 bp, Homo sapiens
tgtgtggtttttgta

SEQ ID NO: 1111244 - DNA, 15 bp, Homo sapiens
ttgtgtggtttttgt

SEQ ID NO: 1111245 - DNA, 15 bp, Homo sapiens
tttgtgtggtttttg

SEQ ID NO: 1111246 - DNA, 15 bp, Homo sapiens
ttttgtgtggttttt

SEQ ID NO: 1111247 - DNA, 15 bp, Homo sapiens
tttttgtgtggtttt

SEQ ID NO: 1111248 - DNA, 15 bp, Homo sapiens
atttttgtgtggttt

SEQ ID NO: 1111249 - DNA, 15 bp, Homo sapiens
aatttttgtgtggtt

SEQ ID NO: 1111250 - DNA, 15 bp, Homo sapiens
taatttttgtgtggt

SEQ ID NO: 1111251 - DNA, 15 bp, Homo sapiens
ctaatttttgtgtgg

SEQ ID NO: 1111252 - DNA, 15 bp, Homo sapiens
gctaatttttgtgtg

SEQ ID NO: 1111253 - DNA, 15 bp, Homo sapiens
tccagctaatttttg

SEQ ID NO: 1111254 - DNA, 15 bp, Homo sapiens
tgtccagctaatttt

SEQ ID NO: 1111255 - DNA, 15 bp, Homo sapiens
atgtccagctaattt

SEQ ID NO: 1111256 - DNA, 15 bp, Homo sapiens
caccatgtccagcta

SEQ ID NO: 1111257 - DNA, 15 bp, Homo sapiens
tcaccatgtccagct

SEQ ID NO: 1111258 - DNA, 15 bp, Homo sapiens
atcaccatgtccagc

SEQ ID NO: 1111259 - DNA, 15 bp, Homo sapiens
tatcaccatgtccag

SEQ ID NO: 1111260 - DNA, 15 bp, Homo sapiens
ttatcaccatgtcca

SEQ ID NO: 1111261 - DNA, 15 bp, Homo sapiens
cttatcaccatgtcc

SEQ ID NO: 1111262 - DNA, 15 bp, Homo sapiens
gcttatcaccatgtc

SEQ ID NO: 1111263 - DNA, 15 bp, Homo sapiens
tgcttatcaccatgt

SEQ ID NO: 1111264 - DNA, 15 bp, Homo sapiens
gtgcttatcaccatg

SEQ ID NO: 1111265 - DNA, 15 bp, Homo sapiens
ggtgcttatcaccat

SEQ ID NO: 1111266 - DNA, 15 bp, Homo sapiens
aggtgcttatcacca

SEQ ID NO: 1111267 - DNA, 15 bp, Homo sapiens
caggtgcttatcacc

SEQ ID NO: 1111268 - DNA, 15 bp, Homo sapiens
acaggtgcttatcac

SEQ ID NO: 1111269 - DNA, 15 bp, Homo sapiens
tacaggtgcttatca

SEQ ID NO: 1111270 - DNA, 15 bp, Homo sapiens
ctacaggtgcttatc

SEQ ID NO: 1111271 - DNA, 15 bp, Homo sapiens
actacaggtgcttat

SEQ ID NO: 1111272 - DNA, 15 bp, Homo sapiens
gactacaggtgctta

SEQ ID NO: 1111273 - DNA, 15 bp, Homo sapiens
ggactacaggtgctt

SEQ ID NO: 1111274 - DNA, 15 bp, Homo sapiens
gggactacaggtgct

SEQ ID NO: 1111275 - DNA, 15 bp, Homo sapiens
cgcctcccaagtagc

SEQ ID NO: 1111276 - DNA, 15 bp, Homo sapiens
ccgcctcccaagtag

SEQ ID NO: 1111277 - DNA, 15 bp, Homo sapiens
tccgcctcccaagta

SEQ ID NO: 1111278 - DNA, 15 bp, Homo sapiens
ctccgcctcccaagt

SEQ ID NO: 1111279 - DNA, 15 bp, Homo sapiens
cctccgcctcccaag

SEQ ID NO: 1111280 - DNA, 15 bp, Homo sapiens
tcccacctccgcctc

SEQ ID NO: 1111281 - DNA, 15 bp, Homo sapiens
ctcccacctccgcct

SEQ ID NO: 1111282 - DNA, 15 bp, Homo sapiens
cctcccacctccgcc

SEQ ID NO: 1111283 - DNA, 15 bp, Homo sapiens
tcctcccacctccgc

SEQ ID NO: 1111284 - DNA, 15 bp, Homo sapiens
atcctcccacctccg

SEQ ID NO: 1111285 - DNA, 15 bp, Homo sapiens
aatcctcccacctcc

SEQ ID NO: 1111286 - DNA, 15 bp, Homo sapiens
taatcctcccacctc

SEQ ID NO: 1111287 - DNA, 15 bp, Homo sapiens
gtaatcctcccacct

SEQ ID NO: 1111288 - DNA, 15 bp, Homo sapiens
agtaatcctcccacc

SEQ ID NO: 1111289 - DNA, 15 bp, Homo sapiens
aagtaatcctcccac

SEQ ID NO: 1111290 - DNA, 15 bp, Homo sapiens
caagtaatcctccca

SEQ ID NO: 1111291 - DNA, 15 bp, Homo sapiens
gctcaagtaatcctc

SEQ ID NO: 1111292 - DNA, 15 bp, Homo sapiens
ggctcaagtaatcct

SEQ ID NO: 1111293 - DNA, 15 bp, Homo sapiens
gggctcaagtaatcc

SEQ ID NO: 1111294 - DNA, 15 bp, Homo sapiens
tgggctcaagtaatc

SEQ ID NO: 1111295 - DNA, 15 bp, Homo sapiens
ctgggctcaagtaat

SEQ ID NO: 1111296 - DNA, 15 bp, Homo sapiens
catctctgctcactg

SEQ ID NO: 1111297 - DNA, 15 bp, Homo sapiens
tcatctctgctcact

SEQ ID NO: 1111298 - DNA, 15 bp, Homo sapiens
gtcatctctgctcac

SEQ ID NO: 1111299 - DNA, 15 bp, Homo sapiens
tgtcatctctgctca

SEQ ID NO: 1111300 - DNA, 15 bp, Homo sapiens
gtgtcatctctgctc

SEQ ID NO: 1111301 - DNA, 15 bp, Homo sapiens
ggtgtcatctctgct

SEQ ID NO: 1111302 - DNA, 15 bp, Homo sapiens
tggtgtcatctctgc

SEQ ID NO: 1111303 - DNA, 15 bp, Homo sapiens
gtggtgtcatctctg

SEQ ID NO: 1111304 - DNA, 15 bp, Homo sapiens
agtggtgtcatctct

SEQ ID NO: 1111305 - DNA, 15 bp, Homo sapiens
cagtggtgtcatctc

SEQ ID NO: 1111306 - DNA, 15 bp, Homo sapiens
gcagtggtgtcatct

SEQ ID NO: 1111307 - DNA, 15 bp, Homo sapiens
tgcagtggtgtcatc

SEQ ID NO: 1111308 - DNA, 15 bp, Homo sapiens
gtgcagtggtgtcat

SEQ ID NO: 1111309 - DNA, 15 bp, Homo sapiens
agtgcagtggtgtca

SEQ ID NO: 1111310 - DNA, 15 bp, Homo sapiens
gagtgcagtggtgtc

SEQ ID NO: 1111311 - DNA, 15 bp, Homo sapiens
tacccaggttggagt

SEQ ID NO: 1111312 - DNA, 15 bp, Homo sapiens
ttacccaggttggag

SEQ ID NO: 1111313 - DNA, 15 bp, Homo sapiens
gttacccaggttgga

SEQ ID NO: 1111314 - DNA, 15 bp, Homo sapiens
tgttacccaggttgg

SEQ ID NO: 1111315 - DNA, 15 bp, Homo sapiens
ctgttacccaggttg

SEQ ID NO: 1111316 - DNA, 15 bp, Homo sapiens
tctgttacccaggtt

SEQ ID NO: 1111317 - DNA, 15 bp, Homo sapiens
ctctgttacccaggt

SEQ ID NO: 1111318 - DNA, 15 bp, Homo sapiens
attgctctgttaccc

SEQ ID NO: 1111319 - DNA, 15 bp, Homo sapiens
tattgctctgttacc

SEQ ID NO: 1111320 - DNA, 15 bp, Homo sapiens
gtattgctctgttac

SEQ ID NO: 1111321 - DNA, 15 bp, Homo sapiens
ggtattgctctgtta

SEQ ID NO: 1111322 - DNA, 15 bp, Homo sapiens
gggtattgctctgtt

SEQ ID NO: 1111323 - DNA, 15 bp, Homo sapiens
agggtattgctctgt

SEQ ID NO: 1111324 - DNA, 15 bp, Homo sapiens
cagggtattgctctg

SEQ ID NO: 1111325 - DNA, 15 bp, Homo sapiens
acagggtattgctct

SEQ ID NO: 1111326 - DNA, 15 bp, Homo sapiens
gacagggtattgctc

SEQ ID NO: 1111327 - DNA, 15 bp, Homo sapiens
agacagggtattgct

SEQ ID NO: 1111328 - DNA, 15 bp, Homo sapiens
gagacagggtattgc

SEQ ID NO: 1111329 - DNA, 15 bp, Homo sapiens
tgagacagggtattg

SEQ ID NO: 1111330 - DNA, 15 bp, Homo sapiens
ttgagacagggtatt

SEQ ID NO: 1111331 - DNA, 15 bp, Homo sapiens
tttgagacagggtat

SEQ ID NO: 1111332 - DNA, 15 bp, Homo sapiens
ttttgagacagggta

SEQ ID NO: 1111333 - DNA, 15 bp, Homo sapiens
agcattttttttttt

SEQ ID NO: 1111334 - DNA, 15 bp, Homo sapiens
cagcatttttttttt

SEQ ID NO: 1111335 - DNA, 15 bp, Homo sapiens
ccagcattttttttt

SEQ ID NO: 1111336 - DNA, 15 bp, Homo sapiens
cccagcatttttttt

SEQ ID NO: 1111337 - DNA, 15 bp, Homo sapiens
ccccagcattttttt

SEQ ID NO: 1111338 - DNA, 15 bp, Homo sapiens
cccccagcatttttt

SEQ ID NO: 1111339 - DNA, 15 bp, Homo sapiens
ccccccagcattttt

SEQ ID NO: 1111340 - DNA, 15 bp, Homo sapiens
tccccccagcatttt

SEQ ID NO: 1111341 - DNA, 15 bp, Homo sapiens
atccccccagcattt

SEQ ID NO: 1111342 - DNA, 15 bp, Homo sapiens
catccccccagcatt

SEQ ID NO: 1111343 - DNA, 15 bp, Homo sapiens
tcatccccccagcat

SEQ ID NO: 1111344 - DNA, 15 bp, Homo sapiens
atcatccccccagca

SEQ ID NO: 1111345 - DNA, 15 bp, Homo sapiens
catcatccccccagc

SEQ ID NO: 1111346 - DNA, 15 bp, Homo sapiens
tcatcatccccccag

SEQ ID NO: 1111347 - DNA, 15 bp, Homo sapiens
ttcatcatcccccca

SEQ ID NO: 1111348 - DNA, 15 bp, Homo sapiens
cttcatcatcccccc

SEQ ID NO: 1111349 - DNA, 15 bp, Homo sapiens
tcttcatcatccccc

SEQ ID NO: 1111350 - DNA, 15 bp, Homo sapiens
atcttcatcatcccc

SEQ ID NO: 1111351 - DNA, 15 bp, Homo sapiens
tatcttcatcatccc

SEQ ID NO: 1111352 - DNA, 15 bp, Homo sapiens
ctatcttcatcatcc

SEQ ID NO: 1111353 - DNA, 15 bp, Homo sapiens
cctatcttcatcatc

SEQ ID NO: 1111354 - DNA, 15 bp, Homo sapiens
gcctatcttcatcat

SEQ ID NO: 1111355 - DNA, 15 bp, Homo sapiens
tgcctatcttcatca

SEQ ID NO: 1111356 - DNA, 15 bp, Homo sapiens
gtgcctatcttcatc

SEQ ID NO: 1111357 - DNA, 15 bp, Homo sapiens
tgtgcctatcttcat

SEQ ID NO: 1111358 - DNA, 15 bp, Homo sapiens
ctgtgcctatcttca

SEQ ID NO: 1111359 - DNA, 15 bp, Homo sapiens
actgtgcctatcttc

SEQ ID NO: 1111360 - DNA, 15 bp, Homo sapiens
cactgtgcctatctt

SEQ ID NO: 1111361 - DNA, 15 bp, Homo sapiens
ccactgtgcctatct

SEQ ID NO: 1111362 - DNA, 15 bp, Homo sapiens
gccactgtgcctatc

SEQ ID NO: 1111363 - DNA, 15 bp, Homo sapiens
agccactgtgcctat

SEQ ID NO: 1111364 - DNA, 15 bp, Homo sapiens
gagccactgtgccta

SEQ ID NO: 1111365 - DNA, 15 bp, Homo sapiens
ttgagccactgtgcc

SEQ ID NO: 1111366 - DNA, 15 bp, Homo sapiens
cttgagccactgtgc

SEQ ID NO: 1111367 - DNA, 15 bp, Homo sapiens
gcttgagccactgtg

SEQ ID NO: 1111368 - DNA, 15 bp, Homo sapiens
ggcttgagccactgt

SEQ ID NO: 1111369 - DNA, 15 bp, Homo sapiens
agattacaggcttga

SEQ ID NO: 1111370 - DNA, 15 bp, Homo sapiens
cagattacaggcttg

SEQ ID NO: 1111371 - DNA, 15 bp, Homo sapiens
acagattacaggctt

SEQ ID NO: 1111372 - DNA, 15 bp, Homo sapiens
tacagattacaggct

SEQ ID NO: 1111373 - DNA, 15 bp, Homo sapiens
ttacagattacaggc

SEQ ID NO: 1111374 - DNA, 15 bp, Homo sapiens
attacagattacagg

SEQ ID NO: 1111375 - DNA, 15 bp, Homo sapiens
gattacagattacag

SEQ ID NO: 1111376 - DNA, 15 bp, Homo sapiens
agattacagattaca

SEQ ID NO: 1111377 - DNA, 15 bp, Homo sapiens
gagattacagattac

SEQ ID NO: 1111378 - DNA, 15 bp, Homo sapiens
tgagattacagatta

SEQ ID NO: 1111379 - DNA, 15 bp, Homo sapiens
ctgagattacagatt

SEQ ID NO: 1111380 - DNA, 15 bp, Homo sapiens
gctgagattacagat

SEQ ID NO: 1111381 - DNA, 15 bp, Homo sapiens
tgctgagattacaga

SEQ ID NO: 1111382 - DNA, 15 bp, Homo sapiens
atgctgagattacag

SEQ ID NO: 1111383 - DNA, 15 bp, Homo sapiens
aatgctgagattaca

SEQ ID NO: 1111384 - DNA, 15 bp, Homo sapiens
aaatgctgagattac

SEQ ID NO: 1111385 - DNA, 15 bp, Homo sapiens
aaaatgctgagatta

SEQ ID NO: 1111386 - DNA, 15 bp, Homo sapiens
caaaatgctgagatt

SEQ ID NO: 1111387 - DNA, 15 bp, Homo sapiens
ccaaaatgctgagat

SEQ ID NO: 1111388 - DNA, 15 bp, Homo sapiens
cccaaaatgctgaga

SEQ ID NO: 1111389 - DNA, 15 bp, Homo sapiens
tcccaaaatgctgag

SEQ ID NO: 1111390 - DNA, 15 bp, Homo sapiens
ctcccaaaatgctga

SEQ ID NO: 1111391 - DNA, 15 bp, Homo sapiens
gctgcctcagcctcc

SEQ ID NO: 1111392 - DNA, 15 bp, Homo sapiens
tgctgcctcagcctc

SEQ ID NO: 1111393 - DNA, 15 bp, Homo sapiens
ctgctgcctcagcct

SEQ ID NO: 1111394 - DNA, 15 bp, Homo sapiens
cctgctgcctcagcc

SEQ ID NO: 1111395 - DNA, 15 bp, Homo sapiens
tcctgctgcctcagc

SEQ ID NO: 1111396 - DNA, 15 bp, Homo sapiens
atcctgctgcctcag

SEQ ID NO: 1111397 - DNA, 15 bp, Homo sapiens
gatcctgctgcctca

SEQ ID NO: 1111398 - DNA, 15 bp, Homo sapiens
tgatcctgctgcctc

SEQ ID NO: 1111399 - DNA, 15 bp, Homo sapiens
gtgatcctgctgcct

SEQ ID NO: 1111400 - DNA, 15 bp, Homo sapiens
agtgatcctgctgcc

SEQ ID NO: 1111401 - DNA, 15 bp, Homo sapiens
aagtgatcctgctgc

SEQ ID NO: 1111402 - DNA, 15 bp, Homo sapiens
caagtgatcctgctg

SEQ ID NO: 1111403 - DNA, 15 bp, Homo sapiens
tcaagtgatcctgct

SEQ ID NO: 1111404 - DNA, 15 bp, Homo sapiens
ctcaagtgatcctgc

SEQ ID NO: 1111405 - DNA, 15 bp, Homo sapiens
cctcaagtgatcctg

SEQ ID NO: 1111406 - DNA, 15 bp, Homo sapiens
gctcctggcctcaag

SEQ ID NO: 1111407 - DNA, 15 bp, Homo sapiens
agctcctggcctcaa

SEQ ID NO: 1111408 - DNA, 15 bp, Homo sapiens
aagctcctggcctca

SEQ ID NO: 1111409 - DNA, 15 bp, Homo sapiens
caagctcctggcctc

SEQ ID NO: 1111410 - DNA, 15 bp, Homo sapiens
tcaagctcctggcct

SEQ ID NO: 1111411 - DNA, 15 bp, Homo sapiens
ctcaagctcctggcc

SEQ ID NO: 1111412 - DNA, 15 bp, Homo sapiens
tctcaagctcctggc

SEQ ID NO: 1111413 - DNA, 15 bp, Homo sapiens
gtctcaagctcctgg

SEQ ID NO: 1111414 - DNA, 15 bp, Homo sapiens
ggtctcaagctcctg

SEQ ID NO: 1111415 - DNA, 15 bp, Homo sapiens
tggtctcaagctcct

SEQ ID NO: 1111416 - DNA, 15 bp, Homo sapiens
ctggtctcaagctcc

SEQ ID NO: 1111417 - DNA, 15 bp, Homo sapiens
tctggtctcaagctc

SEQ ID NO: 1111418 - DNA, 15 bp, Homo sapiens
gtctggtctcaagct

SEQ ID NO: 1111419 - DNA, 15 bp, Homo sapiens
agtctggtctcaagc

SEQ ID NO: 1111420 - DNA, 15 bp, Homo sapiens
tagtctggtctcaag

SEQ ID NO: 1111421 - DNA, 15 bp, Homo sapiens
ctagtctggtctcaa

SEQ ID NO: 1111422 - DNA, 15 bp, Homo sapiens
cctagtctggtctca

SEQ ID NO: 1111423 - DNA, 15 bp, Homo sapiens
gcctagtctggtctc

SEQ ID NO: 1111424 - DNA, 15 bp, Homo sapiens
tgcctagtctggtct

SEQ ID NO: 1111425 - DNA, 15 bp, Homo sapiens
ttgcctagtctggtc

SEQ ID NO: 1111426 - DNA, 15 bp, Homo sapiens
gttgcctagtctggt

SEQ ID NO: 1111427 - DNA, 15 bp, Homo sapiens
atgttgcctagtctg

SEQ ID NO: 1111428 - DNA, 15 bp, Homo sapiens
tatgttgcctagtct

SEQ ID NO: 1111429 - DNA, 15 bp, Homo sapiens
atatgttgcctagtc

SEQ ID NO: 1111430 - DNA, 15 bp, Homo sapiens
aatatgttgcctagt

SEQ ID NO: 1111431 - DNA, 15 bp, Homo sapiens
taatatgttgcctag

SEQ ID NO: 1111432 - DNA, 15 bp, Homo sapiens
ttaatatgttgccta

SEQ ID NO: 1111433 - DNA, 15 bp, Homo sapiens
cttaatatgttgcct

SEQ ID NO: 1111434 - DNA, 15 bp, Homo sapiens
tcttaatatgttgcc

SEQ ID NO: 1111435 - DNA, 15 bp, Homo sapiens
gtcttaatatgttgc

SEQ ID NO: 1111436 - DNA, 15 bp, Homo sapiens
tgtcttaatatgttg

SEQ ID NO: 1111437 - DNA, 15 bp, Homo sapiens
ttgtcttaatatgtt

SEQ ID NO: 1111438 - DNA, 15 bp, Homo sapiens
tttgtcttaatatgt

SEQ ID NO: 1111439 - DNA, 15 bp, Homo sapiens
ttttgtcttaatatg

SEQ ID NO: 1111440 - DNA, 15 bp, Homo sapiens
tttttgtcttaatat

SEQ ID NO: 1111441 - DNA, 15 bp, Homo sapiens
ttttttgtcttaata

SEQ ID NO: 1111442 - DNA, 15 bp, Homo sapiens
tttttttgtcttaat

SEQ ID NO: 1111443 - DNA, 15 bp, Homo sapiens
atttttttgtcttaa

SEQ ID NO: 1111444 - DNA, 15 bp, Homo sapiens
tatttttttgtctta

SEQ ID NO: 1111445 - DNA, 15 bp, Homo sapiens
gtatttttttgtctt

SEQ ID NO: 1111446 - DNA, 15 bp, Homo sapiens
tgtatttttttgtct

SEQ ID NO: 1111447 - DNA, 15 bp, Homo sapiens
ttgtatttttttgtc

SEQ ID NO: 1111448 - DNA, 15 bp, Homo sapiens
tttgtatttttttgt

SEQ ID NO: 1111449 - DNA, 15 bp, Homo sapiens
ttttgtatttttttg

SEQ ID NO: 1111450 - DNA, 15 bp, Homo sapiens
attttgtattttttt

SEQ ID NO: 1111451 - DNA, 15 bp, Homo sapiens
tattttgtatttttt

SEQ ID NO: 1111452 - DNA, 15 bp, Homo sapiens
atattttgtattttt

SEQ ID NO: 1111453 - DNA, 15 bp, Homo sapiens
tatattttgtatttt

SEQ ID NO: 1111454 - DNA, 15 bp, Homo sapiens
ctatattttgtattt

SEQ ID NO: 1111455 - DNA, 15 bp, Homo sapiens
gctatattttgtatt

SEQ ID NO: 1111456 - DNA, 15 bp, Homo sapiens
agctatattttgtat

SEQ ID NO: 1111457 - DNA, 15 bp, Homo sapiens
cagctatattttgta

SEQ ID NO: 1111458 - DNA, 15 bp, Homo sapiens
ccagctatattttgt

SEQ ID NO: 1111459 - DNA, 15 bp, Homo sapiens
cccagctatattttg

SEQ ID NO: 1111460 - DNA, 15 bp, Homo sapiens
tcccagctatatttt

SEQ ID NO: 1111461 - DNA, 15 bp, Homo sapiens
ctcccagctatattt

SEQ ID NO: 1111462 - DNA, 15 bp, Homo sapiens
actcccagctatatt

SEQ ID NO: 1111463 - DNA, 15 bp, Homo sapiens
cactcccagctatat

SEQ ID NO: 1111464 - DNA, 15 bp, Homo sapiens
ccactcccagctata

SEQ ID NO: 1111465 - DNA, 15 bp, Homo sapiens
accactcccagctat

SEQ ID NO: 1111466 - DNA, 15 bp, Homo sapiens
caccactcccagcta

SEQ ID NO: 1111467 - DNA, 15 bp, Homo sapiens
ccaccactcccagct

SEQ ID NO: 1111468 - DNA, 15 bp, Homo sapiens
gccaccactcccagc

SEQ ID NO: 1111469 - DNA, 15 bp, Homo sapiens
tgccaccactcccag

SEQ ID NO: 1111470 - DNA, 15 bp, Homo sapiens
atgccaccactccca

SEQ ID NO: 1111471 - DNA, 15 bp, Homo sapiens
catgccaccactccc

SEQ ID NO: 1111472 - DNA, 15 bp, Homo sapiens
acatgccaccactcc

SEQ ID NO: 1111473 - DNA, 15 bp, Homo sapiens
cacatgccaccactc

SEQ ID NO: 1111474 - DNA, 15 bp, Homo sapiens
acacatgccaccact

SEQ ID NO: 1111475 - DNA, 15 bp, Homo sapiens
gacacatgccaccac

SEQ ID NO: 1111476 - DNA, 15 bp, Homo sapiens
agacacatgccacca

SEQ ID NO: 1111477 - DNA, 15 bp, Homo sapiens
cagacacatgccacc

SEQ ID NO: 1111478 - DNA, 15 bp, Homo sapiens
acagacacatgccac

SEQ ID NO: 1111479 - DNA, 15 bp, Homo sapiens
tacagacacatgcca

SEQ ID NO: 1111480 - DNA, 15 bp, Homo sapiens
atacagacacatgcc

SEQ ID NO: 1111481 - DNA, 15 bp, Homo sapiens
aatacagacacatgc

SEQ ID NO: 1111482 - DNA, 15 bp, Homo sapiens
gaatacagacacatg

SEQ ID NO: 1111483 - DNA, 15 bp, Homo sapiens
ggaatacagacacat

SEQ ID NO: 1111484 - DNA, 15 bp, Homo sapiens
gggaatacagacaca

SEQ ID NO: 1111485 - DNA, 15 bp, Homo sapiens
tgggaatacagacac

SEQ ID NO: 1111486 - DNA, 15 bp, Homo sapiens
ctgggaatacagaca

SEQ ID NO: 1111487 - DNA, 15 bp, Homo sapiens
gctgggaatacagac

SEQ ID NO: 1111488 - DNA, 15 bp, Homo sapiens
agctgggaatacaga

SEQ ID NO: 1111489 - DNA, 15 bp, Homo sapiens
tagctgggaatacag

SEQ ID NO: 1111490 - DNA, 15 bp, Homo sapiens
gaccctcccacctca

SEQ ID NO: 1111491 - DNA, 15 bp, Homo sapiens
agaccctcccacctc

SEQ ID NO: 1111492 - DNA, 15 bp, Homo sapiens
cagaccctcccacct

SEQ ID NO: 1111493 - DNA, 15 bp, Homo sapiens
tcagaccctcccacc

SEQ ID NO: 1111494 - DNA, 15 bp, Homo sapiens
ctcagaccctcccac

SEQ ID NO: 1111495 - DNA, 15 bp, Homo sapiens
cctcagaccctccca

SEQ ID NO: 1111496 - DNA, 15 bp, Homo sapiens
gcctcagaccctccc

SEQ ID NO: 1111497 - DNA, 15 bp, Homo sapiens
agcctcagaccctcc

SEQ ID NO: 1111498 - DNA, 15 bp, Homo sapiens
cagcctcagaccctc

SEQ ID NO: 1111499 - DNA, 15 bp, Homo sapiens
gcagcctcagaccct

SEQ ID NO: 1111500 - DNA, 15 bp, Homo sapiens
tgcagcctcagaccc

SEQ ID NO: 1111501 - DNA, 15 bp, Homo sapiens
ctgcagcctcagacc

SEQ ID NO: 1111502 - DNA, 15 bp, Homo sapiens
tactgcagcctcaga

SEQ ID NO: 1111503 - DNA, 15 bp, Homo sapiens
gtactgcagcctcag

SEQ ID NO: 1111504 - DNA, 15 bp, Homo sapiens
tgtactgcagcctca

SEQ ID NO: 1111505 - DNA, 15 bp, Homo sapiens
ttgtactgcagcctc

SEQ ID NO: 1111506 - DNA, 15 bp, Homo sapiens
cttgtactgcagcct

SEQ ID NO: 1111507 - DNA, 15 bp, Homo sapiens
ccttgtactgcagcc

SEQ ID NO: 1111508 - DNA, 15 bp, Homo sapiens
accttgtactgcagc

SEQ ID NO: 1111509 - DNA, 15 bp, Homo sapiens
caccttgtactgcag

SEQ ID NO: 1111510 - DNA, 15 bp, Homo sapiens
ccaccttgtactgca

SEQ ID NO: 1111511 - DNA, 15 bp, Homo sapiens
gccaccttgtactgc

SEQ ID NO: 1111512 - DNA, 15 bp, Homo sapiens
tgccaccttgtactg

SEQ ID NO: 1111513 - DNA, 15 bp, Homo sapiens
gtgccaccttgtact

SEQ ID NO: 1111514 - DNA, 15 bp, Homo sapiens
ggtgccaccttgtac

SEQ ID NO: 1111515 - DNA, 15 bp, Homo sapiens
tggtgccaccttgta

SEQ ID NO: 1111516 - DNA, 15 bp, Homo sapiens
gtggtgccaccttgt

SEQ ID NO: 1111517 - DNA, 15 bp, Homo sapiens
agtggtgccaccttg

SEQ ID NO: 1111518 - DNA, 15 bp, Homo sapiens
cagtggtgccacctt

SEQ ID NO: 1111519 - DNA, 15 bp, Homo sapiens
acagtggtgccacct

SEQ ID NO: 1111520 - DNA, 15 bp, Homo sapiens
tacagtggtgccacc

SEQ ID NO: 1111521 - DNA, 15 bp, Homo sapiens
ttacagtggtgccac

SEQ ID NO: 1111522 - DNA, 15 bp, Homo sapiens
attacagtggtgcca

SEQ ID NO: 1111523 - DNA, 15 bp, Homo sapiens
gattacagtggtgcc

SEQ ID NO: 1111524 - DNA, 15 bp, Homo sapiens
ggattacagtggtgc

SEQ ID NO: 1111525 - DNA, 15 bp, Homo sapiens
tggattacagtggtg

SEQ ID NO: 1111526 - DNA, 15 bp, Homo sapiens
ctggattacagtggt

SEQ ID NO: 1111527 - DNA, 15 bp, Homo sapiens
gctggattacagtgg

SEQ ID NO: 1111528 - DNA, 15 bp, Homo sapiens
agctggattacagtg

SEQ ID NO: 1111529 - DNA, 15 bp, Homo sapiens
aagctggattacagt

SEQ ID NO: 1111530 - DNA, 15 bp, Homo sapiens
caagctggattacag

SEQ ID NO: 1111531 - DNA, 15 bp, Homo sapiens
ccaagctggattaca

SEQ ID NO: 1111532 - DNA, 15 bp, Homo sapiens
cccaagctggattac

SEQ ID NO: 1111533 - DNA, 15 bp, Homo sapiens
gcccaagctggatta

SEQ ID NO: 1111534 - DNA, 15 bp, Homo sapiens
cgcccaagctggatt

SEQ ID NO: 1111535 - DNA, 15 bp, Homo sapiens
ccgcccaagctggat

SEQ ID NO: 1111536 - DNA, 15 bp, Homo sapiens
gccgcccaagctgga

SEQ ID NO: 1111537 - DNA, 15 bp, Homo sapiens
tgccgcccaagctgg

SEQ ID NO: 1111538 - DNA, 15 bp, Homo sapiens
ctgccgcccaagctg

SEQ ID NO: 1111539 - DNA, 15 bp, Homo sapiens
tctgccgcccaagct

SEQ ID NO: 1111540 - DNA, 15 bp, Homo sapiens
ctctgccgcccaagc

SEQ ID NO: 1111541 - DNA, 15 bp, Homo sapiens
cctctgccgcccaag

SEQ ID NO: 1111542 - DNA, 15 bp, Homo sapiens
tcctctgccgcccaa

SEQ ID NO: 1111543 - DNA, 15 bp, Homo sapiens
ttcctctgccgccca

SEQ ID NO: 1111544 - DNA, 15 bp, Homo sapiens
cttcctctgccgccc

SEQ ID NO: 1111545 - DNA, 15 bp, Homo sapiens
ccttcctctgccgcc

SEQ ID NO: 1111546 - DNA, 15 bp, Homo sapiens
gccttcctctgccgc

SEQ ID NO: 1111547 - DNA, 15 bp, Homo sapiens
agccttcctctgccg

SEQ ID NO: 1111548 - DNA, 15 bp, Homo sapiens
gagccttcctctgcc

SEQ ID NO: 1111549 - DNA, 15 bp, Homo sapiens
agagccttcctctgc

SEQ ID NO: 1111550 - DNA, 15 bp, Homo sapiens
cagagccttcctctg

SEQ ID NO: 1111551 - DNA, 15 bp, Homo sapiens
acagagccttcctct

SEQ ID NO: 1111552 - DNA, 15 bp, Homo sapiens
gacagagccttcctc

SEQ ID NO: 1111553 - DNA, 15 bp, Homo sapiens
agacagagccttcct

SEQ ID NO: 1111554 - DNA, 15 bp, Homo sapiens
gagacagagccttcc

SEQ ID NO: 1111555 - DNA, 15 bp, Homo sapiens
tgagacagagccttc

SEQ ID NO: 1111556 - DNA, 15 bp, Homo sapiens
ttgagacagagcctt

SEQ ID NO: 1111557 - DNA, 15 bp, Homo sapiens
tttgagacagagcct

SEQ ID NO: 1111558 - DNA, 15 bp, Homo sapiens
ttttgagacagagcc

SEQ ID NO: 1111559 - DNA, 15 bp, Homo sapiens
tttttgagacagagc

SEQ ID NO: 1111560 - DNA, 15 bp, Homo sapiens
ctttgtttttgagac

SEQ ID NO: 1111561 - DNA, 15 bp, Homo sapiens
tctttgtttttgaga

SEQ ID NO: 1111562 - DNA, 15 bp, Homo sapiens
ttctttgtttttgag

SEQ ID NO: 1111563 - DNA, 15 bp, Homo sapiens
tttctttgtttttga

SEQ ID NO: 1111564 - DNA, 15 bp, Homo sapiens
gtttctttgtttttg

SEQ ID NO: 1111565 - DNA, 15 bp, Homo sapiens
tgtttctttgttttt

SEQ ID NO: 1111566 - DNA, 15 bp, Homo sapiens
ttgtttctttgtttt

SEQ ID NO: 1111567 - DNA, 15 bp, Homo sapiens
tttgtttctttgttt

SEQ ID NO: 1111568 - DNA, 15 bp, Homo sapiens
gtttgtttctttgtt

SEQ ID NO: 1111569 - DNA, 15 bp, Homo sapiens
tgtttgtttctttgt

SEQ ID NO: 1111570 - DNA, 15 bp, Homo sapiens
ttgtttgtttctttg

SEQ ID NO: 1111571 - DNA, 15 bp, Homo sapiens
tttgtttgtttcttt

SEQ ID NO: 1111572 - DNA, 15 bp, Homo sapiens
ttttgtttgtttctt

SEQ ID NO: 1111573 - DNA, 15 bp, Homo sapiens
tttttgtttgtttct

SEQ ID NO: 1111574 - DNA, 15 bp, Homo sapiens
atttttgtttgtttc

SEQ ID NO: 1111575 - DNA, 15 bp, Homo sapiens
catttttgtttgttt

SEQ ID NO: 1111576 - DNA, 15 bp, Homo sapiens
cccatttttgtttgt

SEQ ID NO: 1111577 - DNA, 15 bp, Homo sapiens
gcccatttttgtttg

SEQ ID NO: 1111578 - DNA, 15 bp, Homo sapiens
ggcccatttttgttt

SEQ ID NO: 1111579 - DNA, 15 bp, Homo sapiens
tggcccatttttgtt

SEQ ID NO: 1111580 - DNA, 15 bp, Homo sapiens
gtggcccatttttgt

SEQ ID NO: 1111581 - DNA, 15 bp, Homo sapiens
cgtggcccatttttg

SEQ ID NO: 1111582 - DNA, 15 bp, Homo sapiens
gcgtggcccattttt

SEQ ID NO: 1111583 - DNA, 15 bp, Homo sapiens
cgcgtggcccatttt

SEQ ID NO: 1111584 - DNA, 15 bp, Homo sapiens
acgcgtggcccattt

SEQ ID NO: 1111585 - DNA, 15 bp, Homo sapiens
cacgcgtggcccatt

SEQ ID NO: 1111586 - DNA, 15 bp, Homo sapiens
ccacgcgtggcccat

SEQ ID NO: 1111587 - DNA, 15 bp, Homo sapiens
accacgcgtggccca

SEQ ID NO: 1111588 - DNA, 15 bp, Homo sapiens
caccacgcgtggccc

SEQ ID NO: 1111589 - DNA, 15 bp, Homo sapiens
ccaccacgcgtggcc

SEQ ID NO: 1111590 - DNA, 15 bp, Homo sapiens
gccaccacgcgtggc

SEQ ID NO: 1111591 - DNA, 15 bp, Homo sapiens
agccaccacgcgtgg

SEQ ID NO: 1111592 - DNA, 15 bp, Homo sapiens
gagccaccacgcgtg

SEQ ID NO: 1111593 - DNA, 15 bp, Homo sapiens
tgagccaccacgcgt

SEQ ID NO: 1111594 - DNA, 15 bp, Homo sapiens
gtgagccaccacgcg

SEQ ID NO: 1111595 - DNA, 15 bp, Homo sapiens
gactgctgggattac

SEQ ID NO: 1111596 - DNA, 15 bp, Homo sapiens
agactgctgggatta

SEQ ID NO: 1111597 - DNA, 15 bp, Homo sapiens
cagactgctgggatt

SEQ ID NO: 1111598 - DNA, 15 bp, Homo sapiens
ccagactgctgggat

SEQ ID NO: 1111599 - DNA, 15 bp, Homo sapiens
cccagactgctggga

SEQ ID NO: 1111600 - DNA, 15 bp, Homo sapiens
tcccagactgctggg

SEQ ID NO: 1111601 - DNA, 15 bp, Homo sapiens
ctcccagactgctgg

SEQ ID NO: 1111602 - DNA, 15 bp, Homo sapiens
tctcccagactgctg

SEQ ID NO: 1111603 - DNA, 15 bp, Homo sapiens
atctcccagactgct

SEQ ID NO: 1111604 - DNA, 15 bp, Homo sapiens
aatctcccagactgc

SEQ ID NO: 1111605 - DNA, 15 bp, Homo sapiens
caatctcccagactg

SEQ ID NO: 1111606 - DNA, 15 bp, Homo sapiens
tcaatctcccagact

SEQ ID NO: 1111607 - DNA, 15 bp, Homo sapiens
ctcaatctcccagac

SEQ ID NO: 1111608 - DNA, 15 bp, Homo sapiens
cctcaatctcccaga

SEQ ID NO: 1111609 - DNA, 15 bp, Homo sapiens
acctcaatctcccag

SEQ ID NO: 1111610 - DNA, 15 bp, Homo sapiens
cacctcaatctccca

SEQ ID NO: 1111611 - DNA, 15 bp, Homo sapiens
ccacctcaatctccc

SEQ ID NO: 1111612 - DNA, 15 bp, Homo sapiens
cccacctcaatctcc

SEQ ID NO: 1111613 - DNA, 15 bp, Homo sapiens
acccacctcaatctc

SEQ ID NO: 1111614 - DNA, 15 bp, Homo sapiens
cacccacctcaatct

SEQ ID NO: 1111615 - DNA, 15 bp, Homo sapiens
ccacccacctcaatc

SEQ ID NO: 1111616 - DNA, 15 bp, Homo sapiens
tccacccacctcaat

SEQ ID NO: 1111617 - DNA, 15 bp, Homo sapiens
atccacccacctcaa

SEQ ID NO: 1111618 - DNA, 15 bp, Homo sapiens
gccatgttgaccagg

SEQ ID NO: 1111619 - DNA, 15 bp, Homo sapiens
cgccatgttgaccag

SEQ ID NO: 1111620 - DNA, 15 bp, Homo sapiens
ccgccatgttgacca

SEQ ID NO: 1111621 - DNA, 15 bp, Homo sapiens
tccgccatgttgacc

SEQ ID NO: 1111622 - DNA, 15 bp, Homo sapiens
ttccgccatgttgac

SEQ ID NO: 1111623 - DNA, 15 bp, Homo sapiens
gttccgccatgttga

SEQ ID NO: 1111624 - DNA, 15 bp, Homo sapiens
ggttccgccatgttg

SEQ ID NO: 1111625 - DNA, 15 bp, Homo sapiens
gggttccgccatgtt

SEQ ID NO: 1111626 - DNA, 15 bp, Homo sapiens
agggttccgccatgt

SEQ ID NO: 1111627 - DNA, 15 bp, Homo sapiens
cagggttccgccatg

SEQ ID NO: 1111628 - DNA, 15 bp, Homo sapiens
acagggttccgccat

SEQ ID NO: 1111629 - DNA, 15 bp, Homo sapiens
gacagggttccgcca

SEQ ID NO: 1111630 - DNA, 15 bp, Homo sapiens
agacagggttccgcc

SEQ ID NO: 1111631 - DNA, 15 bp, Homo sapiens
gagacagggttccgc

SEQ ID NO: 1111632 - DNA, 15 bp, Homo sapiens
agagacagggttccg

SEQ ID NO: 1111633 - DNA, 15 bp, Homo sapiens
tagagacagggttcc

SEQ ID NO: 1111634 - DNA, 15 bp, Homo sapiens
gtagagacagggttc

SEQ ID NO: 1111635 - DNA, 15 bp, Homo sapiens
gatgcccagctaatt

SEQ ID NO: 1111636 - DNA, 15 bp, Homo sapiens
tgatgcccagctaat

SEQ ID NO: 1111637 - DNA, 15 bp, Homo sapiens
atgatgcccagctaa

SEQ ID NO: 1111638 - DNA, 15 bp, Homo sapiens
catgatgcccagcta

SEQ ID NO: 1111639 - DNA, 15 bp, Homo sapiens
ccatgatgcccagct

SEQ ID NO: 1111640 - DNA, 15 bp, Homo sapiens
gccatgatgcccagc

SEQ ID NO: 1111641 - DNA, 15 bp, Homo sapiens
tgccatgatgcccag

SEQ ID NO: 1111642 - DNA, 15 bp, Homo sapiens
gtgccatgatgccca

SEQ ID NO: 1111643 - DNA, 15 bp, Homo sapiens
tgtgccatgatgccc

SEQ ID NO: 1111644 - DNA, 15 bp, Homo sapiens
atgtgccatgatgcc

SEQ ID NO: 1111645 - DNA, 15 bp, Homo sapiens
catgtgccatgatgc

SEQ ID NO: 1111646 - DNA, 15 bp, Homo sapiens
gcatgtgccatgatg

SEQ ID NO: 1111647 - DNA, 15 bp, Homo sapiens
agcatgtgccatgat

SEQ ID NO: 1111648 - DNA, 15 bp, Homo sapiens
aagcatgtgccatga

SEQ ID NO: 1111649 - DNA, 15 bp, Homo sapiens
caagcatgtgccatg

SEQ ID NO: 1111650 - DNA, 15 bp, Homo sapiens
acaagcatgtgccat

SEQ ID NO: 1111651 - DNA, 15 bp, Homo sapiens
gatagctgggattac

SEQ ID NO: 1111652 - DNA, 15 bp, Homo sapiens
ggatagctgggatta

SEQ ID NO: 1111653 - DNA, 15 bp, Homo sapiens
cggatagctgggatt

SEQ ID NO: 1111654 - DNA, 15 bp, Homo sapiens
ccggatagctgggat

SEQ ID NO: 1111655 - DNA, 15 bp, Homo sapiens
cccggatagctggga

SEQ ID NO: 1111656 - DNA, 15 bp, Homo sapiens
tcccggatagctggg

SEQ ID NO: 1111657 - DNA, 15 bp, Homo sapiens
ctcccggatagctgg

SEQ ID NO: 1111658 - DNA, 15 bp, Homo sapiens
cctcccggatagctg

SEQ ID NO: 1111659 - DNA, 15 bp, Homo sapiens
gcctcccggatagct

SEQ ID NO: 1111660 - DNA, 15 bp, Homo sapiens
agcctcccggatagc

SEQ ID NO: 1111661 - DNA, 15 bp, Homo sapiens
cagcctcccggatag

SEQ ID NO: 1111662 - DNA, 15 bp, Homo sapiens
tcagcctcccggata

SEQ ID NO: 1111663 - DNA, 15 bp, Homo sapiens
ctcagcctcccggat

SEQ ID NO: 1111664 - DNA, 15 bp, Homo sapiens
tctcagcctcccgga

SEQ ID NO: 1111665 - DNA, 15 bp, Homo sapiens
gtctcagcctcccgg

SEQ ID NO: 1111666 - DNA, 15 bp, Homo sapiens
tcaagctggagtgca

SEQ ID NO: 1111667 - DNA, 15 bp, Homo sapiens
ctcaagctggagtgc

SEQ ID NO: 1111668 - DNA, 15 bp, Homo sapiens
actcaagctggagtg

SEQ ID NO: 1111669 - DNA, 15 bp, Homo sapiens
cactcaagctggagt

SEQ ID NO: 1111670 - DNA, 15 bp, Homo sapiens
acactcaagctggag

SEQ ID NO: 1111671 - DNA, 15 bp, Homo sapiens
aacactcaagctgga

SEQ ID NO: 1111672 - DNA, 15 bp, Homo sapiens
caacactcaagctgg

SEQ ID NO: 1111673 - DNA, 15 bp, Homo sapiens
ccaacactcaagctg

SEQ ID NO: 1111674 - DNA, 15 bp, Homo sapiens
tccaacactcaagct

SEQ ID NO: 1111675 - DNA, 15 bp, Homo sapiens
ctccaacactcaagc

SEQ ID NO: 1111676 - DNA, 15 bp, Homo sapiens
actccaacactcaag

SEQ ID NO: 1111677 - DNA, 15 bp, Homo sapiens
cactccaacactcaa

SEQ ID NO: 1111678 - DNA, 15 bp, Homo sapiens
tcactccaacactca

SEQ ID NO: 1111679 - DNA, 15 bp, Homo sapiens
ctcactccaacactc

SEQ ID NO: 1111680 - DNA, 15 bp, Homo sapiens
tctcactccaacact

SEQ ID NO: 1111681 - DNA, 15 bp, Homo sapiens
gtctcactccaacac

SEQ ID NO: 1111682 - DNA, 15 bp, Homo sapiens
agtctcactccaaca

SEQ ID NO: 1111683 - DNA, 15 bp, Homo sapiens
gagtctcactccaac

SEQ ID NO: 1111684 - DNA, 15 bp, Homo sapiens
agagtctcactccaa

SEQ ID NO: 1111685 - DNA, 15 bp, Homo sapiens
gtttgagacagagtc

SEQ ID NO: 1111686 - DNA, 15 bp, Homo sapiens
tgtttgagacagagt

SEQ ID NO: 1111687 - DNA, 15 bp, Homo sapiens
ttgtttgagacagag

SEQ ID NO: 1111688 - DNA, 15 bp, Homo sapiens
tttgtttgagacaga

SEQ ID NO: 1111689 - DNA, 15 bp, Homo sapiens
atttgtttgagacag

SEQ ID NO: 1111690 - DNA, 15 bp, Homo sapiens
catttgtttgagaca

SEQ ID NO: 1111691 - DNA, 15 bp, Homo sapiens
tcatttgtttgagac

SEQ ID NO: 1111692 - DNA, 15 bp, Homo sapiens
ttcatttgtttgaga

SEQ ID NO: 1111693 - DNA, 15 bp, Homo sapiens
tttcatttgtttgag

SEQ ID NO: 1111694 - DNA, 15 bp, Homo sapiens
ttttcatttgtttga

SEQ ID NO: 1111695 - DNA, 15 bp, Homo sapiens
cttttcatttgtttg

SEQ ID NO: 1111696 - DNA, 15 bp, Homo sapiens
tcttttcatttgttt

SEQ ID NO: 1111697 - DNA, 15 bp, Homo sapiens
ttcttttcatttgtt

SEQ ID NO: 1111698 - DNA, 15 bp, Homo sapiens
tttcttttcatttgt

SEQ ID NO: 1111699 - DNA, 15 bp, Homo sapiens
gtttcttttcatttg

SEQ ID NO: 1111700 - DNA, 15 bp, Homo sapiens
tgtttcttttcattt

SEQ ID NO: 1111701 - DNA, 15 bp, Homo sapiens
ttgtttcttttcatt

SEQ ID NO: 1111702 - DNA, 15 bp, Homo sapiens
tttgtttcttttcat

SEQ ID NO: 1111703 - DNA, 15 bp, Homo sapiens
gtttgtttcttttca

SEQ ID NO: 1111704 - DNA, 15 bp, Homo sapiens
tgtttgtttcttttc

SEQ ID NO: 1111705 - DNA, 15 bp, Homo sapiens
ttgtttgtttctttt

SEQ ID NO: 1111706 - DNA, 15 bp, Homo sapiens
ttttttgtttgtttc

SEQ ID NO: 1111707 - DNA, 15 bp, Homo sapiens
tcttttttgtttgtt

SEQ ID NO: 1111708 - DNA, 15 bp, Homo sapiens
ttcttttttgtttgt

SEQ ID NO: 1111709 - DNA, 15 bp, Homo sapiens
ctcatttcttttttg

SEQ ID NO: 1111710 - DNA, 15 bp, Homo sapiens
atctcatttcttttt

SEQ ID NO: 1111711 - DNA, 15 bp, Homo sapiens
tatctcatttctttt

SEQ ID NO: 1111712 - DNA, 15 bp, Homo sapiens
gtatctcatttcttt

SEQ ID NO: 1111713 - DNA, 15 bp, Homo sapiens
agtatctcatttctt

SEQ ID NO: 1111714 - DNA, 15 bp, Homo sapiens
cagtatctcatttct

SEQ ID NO: 1111715 - DNA, 15 bp, Homo sapiens
tcagtatctcatttc

SEQ ID NO: 1111716 - DNA, 15 bp, Homo sapiens
atcagtatctcattt

SEQ ID NO: 1111717 - DNA, 15 bp, Homo sapiens
tatcagtatctcatt

SEQ ID NO: 1111718 - DNA, 15 bp, Homo sapiens
gtatcagtatctcat

SEQ ID NO: 1111719 - DNA, 15 bp, Homo sapiens
ggtatcagtatctca

SEQ ID NO: 1111720 - DNA, 15 bp, Homo sapiens
aggtatcagtatctc

SEQ ID NO: 1111721 - DNA, 15 bp, Homo sapiens
caggtatcagtatct

SEQ ID NO: 1111722 - DNA, 15 bp, Homo sapiens
gcaggtatcagtatc

SEQ ID NO: 1111723 - DNA, 15 bp, Homo sapiens
agcaggtatcagtat

SEQ ID NO: 1111724 - DNA, 15 bp, Homo sapiens
tagcaggtatcagta

SEQ ID NO: 1111725 - DNA, 15 bp, Homo sapiens
atagcaggtatcagt

SEQ ID NO: 1111726 - DNA, 15 bp, Homo sapiens
catagcaggtatcag

SEQ ID NO: 1111727 - DNA, 15 bp, Homo sapiens
acatagcaggtatca

SEQ ID NO: 1111728 - DNA, 15 bp, Homo sapiens
cacatagcaggtatc

SEQ ID NO: 1111729 - DNA, 15 bp, Homo sapiens
tcacatagcaggtat

SEQ ID NO: 1111730 - DNA, 15 bp, Homo sapiens
atcacatagcaggta

SEQ ID NO: 1111731 - DNA, 15 bp, Homo sapiens
tatcacatagcaggt

SEQ ID NO: 1111732 - DNA, 15 bp, Homo sapiens
ttatcacatagcagg

SEQ ID NO: 1111733 - DNA, 15 bp, Homo sapiens
cttatcacatagcag

SEQ ID NO: 1111734 - DNA, 15 bp, Homo sapiens
gcttatcacatagca

SEQ ID NO: 1111735 - DNA, 15 bp, Homo sapiens
agcttatcacatagc

SEQ ID NO: 1111736 - DNA, 15 bp, Homo sapiens
aagcttatcacatag

SEQ ID NO: 1111737 - DNA, 15 bp, Homo sapiens
aaagcttatcacata

SEQ ID NO: 1111738 - DNA, 15 bp, Homo sapiens
caaagcttatcacat

SEQ ID NO: 1111739 - DNA, 15 bp, Homo sapiens
tcaaagcttatcaca

SEQ ID NO: 1111740 - DNA, 15 bp, Homo sapiens
ttcaaagcttatcac

SEQ ID NO: 1111741 - DNA, 15 bp, Homo sapiens
tttcaaagcttatca

SEQ ID NO: 1111742 - DNA, 15 bp, Homo sapiens
ttttcaaagcttatc

SEQ ID NO: 1111743 - DNA, 15 bp, Homo sapiens
gttttcaaagcttat

SEQ ID NO: 1111744 - DNA, 15 bp, Homo sapiens
tgttttcaaagctta

SEQ ID NO: 1111745 - DNA, 15 bp, Homo sapiens
atgttttcaaagctt

SEQ ID NO: 1111746 - DNA, 15 bp, Homo sapiens
aatgttttcaaagct

SEQ ID NO: 1111747 - DNA, 15 bp, Homo sapiens
taatgttttcaaagc

SEQ ID NO: 1111748 - DNA, 15 bp, Homo sapiens
ataatgttttcaaag

SEQ ID NO: 1111749 - DNA, 15 bp, Homo sapiens
cataatgttttcaaa

SEQ ID NO: 1111750 - DNA, 15 bp, Homo sapiens
gcataatgttttcaa

SEQ ID NO: 1111751 - DNA, 15 bp, Homo sapiens
agcataatgttttca

SEQ ID NO: 1111752 - DNA, 15 bp, Homo sapiens
tagcataatgttttc

SEQ ID NO: 1111753 - DNA, 15 bp, Homo sapiens
ttagcataatgtttt

SEQ ID NO: 1111754 - DNA, 15 bp, Homo sapiens
cttagcataatgttt

SEQ ID NO: 1111755 - DNA, 15 bp, Homo sapiens
acttagcataatgtt

SEQ ID NO: 1111756 - DNA, 15 bp, Homo sapiens
cacttagcataatgt

SEQ ID NO: 1111757 - DNA, 15 bp, Homo sapiens
tcacttagcataatg

SEQ ID NO: 1111758 - DNA, 15 bp, Homo sapiens
ttcacttagcataat

SEQ ID NO: 1111759 - DNA, 15 bp, Homo sapiens
tttcacttagcataa

SEQ ID NO: 1111760 - DNA, 15 bp, Homo sapiens
ctttcacttagcata

SEQ ID NO: 1111761 - DNA, 15 bp, Homo sapiens
tctttcacttagcat

SEQ ID NO: 1111762 - DNA, 15 bp, Homo sapiens
ttctttcacttagca

SEQ ID NO: 1111763 - DNA, 15 bp, Homo sapiens
cttctttcacttagc

SEQ ID NO: 1111764 - DNA, 15 bp, Homo sapiens
gcttctttcacttag

SEQ ID NO: 1111765 - DNA, 15 bp, Homo sapiens
ggcttctttcactta

SEQ ID NO: 1111766 - DNA, 15 bp, Homo sapiens
tggcttctttcactt

SEQ ID NO: 1111767 - DNA, 15 bp, Homo sapiens
ctggcttctttcact

SEQ ID NO: 1111768 - DNA, 15 bp, Homo sapiens
actggcttctttcac

SEQ ID NO: 1111769 - DNA, 15 bp, Homo sapiens
aactggcttctttca

SEQ ID NO: 1111770 - DNA, 15 bp, Homo sapiens
caactggcttctttc

SEQ ID NO: 1111771 - DNA, 15 bp, Homo sapiens
gcaactggcttcttt

SEQ ID NO: 1111772 - DNA, 15 bp, Homo sapiens
tgcaactggcttctt

SEQ ID NO: 1111773 - DNA, 15 bp, Homo sapiens
ctgcaactggcttct

SEQ ID NO: 1111774 - DNA, 15 bp, Homo sapiens
tctgcaactggcttc

SEQ ID NO: 1111775 - DNA, 15 bp, Homo sapiens
atctgcaactggctt

SEQ ID NO: 1111776 - DNA, 15 bp, Homo sapiens
gatctgcaactggct

SEQ ID NO: 1111777 - DNA, 15 bp, Homo sapiens
tgatctgcaactggc

SEQ ID NO: 1111778 - DNA, 15 bp, Homo sapiens
gtgatctgcaactgg

SEQ ID NO: 1111779 - DNA, 15 bp, Homo sapiens
tgtgatctgcaactg

SEQ ID NO: 1111780 - DNA, 15 bp, Homo sapiens
atgtgatctgcaact

SEQ ID NO: 1111781 - DNA, 15 bp, Homo sapiens
tatgtgatctgcaac

SEQ ID NO: 1111782 - DNA, 15 bp, Homo sapiens
atatgtgatctgcaa

SEQ ID NO: 1111783 - DNA, 15 bp, Homo sapiens
aatatgtgatctgca

SEQ ID NO: 1111784 - DNA, 15 bp, Homo sapiens
taatatgtgatctgc

SEQ ID NO: 1111785 - DNA, 15 bp, Homo sapiens
ataatatgtgatctg

SEQ ID NO: 1111786 - DNA, 15 bp, Homo sapiens
tataatatgtgatct

SEQ ID NO: 1111787 - DNA, 15 bp, Homo sapiens
ttataatatgtgatc

SEQ ID NO: 1111788 - DNA, 15 bp, Homo sapiens
tttataatatgtgat

SEQ ID NO: 1111789 - DNA, 15 bp, Homo sapiens
ttttataatatgtga

SEQ ID NO: 1111790 - DNA, 15 bp, Homo sapiens
attttataatatgtg

SEQ ID NO: 1111791 - DNA, 15 bp, Homo sapiens
aattttataatatgt

SEQ ID NO: 1111792 - DNA, 15 bp, Homo sapiens
aaattttataatatg

SEQ ID NO: 1111793 - DNA, 15 bp, Homo sapiens
gaaattttataatat

SEQ ID NO: 1111794 - DNA, 15 bp, Homo sapiens
tgaaattttataata

SEQ ID NO: 1111795 - DNA, 15 bp, Homo sapiens
atgaaattttataat

SEQ ID NO: 1111796 - DNA, 15 bp, Homo sapiens
aatgaaattttataa

SEQ ID NO: 1111797 - DNA, 15 bp, Homo sapiens
aaatgaaattttata

SEQ ID NO: 1111798 - DNA, 15 bp, Homo sapiens
taaatgaaattttat

SEQ ID NO: 1111799 - DNA, 15 bp, Homo sapiens
ataaatgaaatttta

SEQ ID NO: 1111800 - DNA, 15 bp, Homo sapiens
tataaatgaaatttt

SEQ ID NO: 1111801 - DNA, 15 bp, Homo sapiens
atataaatgaaattt

SEQ ID NO: 1111802 - DNA, 15 bp, Homo sapiens
catataaatgaaatt

SEQ ID NO: 1111803 - DNA, 15 bp, Homo sapiens
ccatataaatgaaat

SEQ ID NO: 1111804 - DNA, 15 bp, Homo sapiens
tccatataaatgaaa

SEQ ID NO: 1111805 - DNA, 15 bp, Homo sapiens
ttccatataaatgaa

SEQ ID NO: 1111806 - DNA, 15 bp, Homo sapiens
attccatataaatga

SEQ ID NO: 1111807 - DNA, 15 bp, Homo sapiens
tattccatataaatg

SEQ ID NO: 1111808 - DNA, 15 bp, Homo sapiens
atattccatataaat

SEQ ID NO: 1111809 - DNA, 15 bp, Homo sapiens
gatattccatataaa

SEQ ID NO: 1111810 - DNA, 15 bp, Homo sapiens
ggatattccatataa

SEQ ID NO: 1111811 - DNA, 15 bp, Homo sapiens
tggatattccatata

SEQ ID NO: 1111812 - DNA, 15 bp, Homo sapiens
ttggatattccatat

SEQ ID NO: 1111813 - DNA, 15 bp, Homo sapiens
tttggatattccata

SEQ ID NO: 1111814 - DNA, 15 bp, Homo sapiens
atttggatattccat

SEQ ID NO: 1111815 - DNA, 15 bp, Homo sapiens
gatttggatattcca

SEQ ID NO: 1111816 - DNA, 15 bp, Homo sapiens
agatttggatattcc

SEQ ID NO: 1111817 - DNA, 15 bp, Homo sapiens
tagatttggatattc

SEQ ID NO: 1111818 - DNA, 15 bp, Homo sapiens
atagatttggatatt

SEQ ID NO: 1111819 - DNA, 15 bp, Homo sapiens
tatagatttggatat

SEQ ID NO: 1111820 - DNA, 15 bp, Homo sapiens
ctatagatttggata

SEQ ID NO: 1111821 - DNA, 15 bp, Homo sapiens
tctatagatttggat

SEQ ID NO: 1111822 - DNA, 15 bp, Homo sapiens
ctctatagatttgga

SEQ ID NO: 1111823 - DNA, 15 bp, Homo sapiens
cctctatagatttgg

SEQ ID NO: 1111824 - DNA, 15 bp, Homo sapiens
acctctatagatttg

SEQ ID NO: 1111825 - DNA, 15 bp, Homo sapiens
tacctctatagattt

SEQ ID NO: 1111826 - DNA, 15 bp, Homo sapiens
ctacctctatagatt

SEQ ID NO: 1111827 - DNA, 15 bp, Homo sapiens
tctacctctatagat

SEQ ID NO: 1111828 - DNA, 15 bp, Homo sapiens
ttctacctctataga

SEQ ID NO: 1111829 - DNA, 15 bp, Homo sapiens
tttctacctctatag

SEQ ID NO: 1111830 - DNA, 15 bp, Homo sapiens
ctttctacctctata

SEQ ID NO: 1111831 - DNA, 15 bp, Homo sapiens
actttctacctctat

SEQ ID NO: 1111832 - DNA, 15 bp, Homo sapiens
tactttctacctcta

SEQ ID NO: 1111833 - DNA, 15 bp, Homo sapiens
ctactttctacctct

SEQ ID NO: 1111834 - DNA, 15 bp, Homo sapiens
tctactttctacctc

SEQ ID NO: 1111835 - DNA, 15 bp, Homo sapiens
atctactttctacct

SEQ ID NO: 1111836 - DNA, 15 bp, Homo sapiens
gatctactttctacc

SEQ ID NO: 1111837 - DNA, 15 bp, Homo sapiens
tgatctactttctac

SEQ ID NO: 1111838 - DNA, 15 bp, Homo sapiens
ctgatctactttcta

SEQ ID NO: 1111839 - DNA, 15 bp, Homo sapiens
actgatctactttct

SEQ ID NO: 1111840 - DNA, 15 bp, Homo sapiens
cactgatctactttc

SEQ ID NO: 1111841 - DNA, 15 bp, Homo sapiens
ccactgatctacttt

SEQ ID NO: 1111842 - DNA, 15 bp, Homo sapiens
accactgatctactt

SEQ ID NO: 1111843 - DNA, 15 bp, Homo sapiens
aaccactgatctact

SEQ ID NO: 1111844 - DNA, 15 bp, Homo sapiens
caaccactgatctac

SEQ ID NO: 1111845 - DNA, 15 bp, Homo sapiens
gcaaccactgatcta

SEQ ID NO: 1111846 - DNA, 15 bp, Homo sapiens
ggcaaccactgatct

SEQ ID NO: 1111847 - DNA, 15 bp, Homo sapiens
aggcaaccactgatc

SEQ ID NO: 1111848 - DNA, 15 bp, Homo sapiens
taggcaaccactgat

SEQ ID NO: 1111849 - DNA, 15 bp, Homo sapiens
ctaggcaaccactga

SEQ ID NO: 1111850 - DNA, 15 bp, Homo sapiens
cctaggcaaccactg

SEQ ID NO: 1111851 - DNA, 15 bp, Homo sapiens
ccctaggcaaccact

SEQ ID NO: 1111852 - DNA, 15 bp, Homo sapiens
accctaggcaaccac

SEQ ID NO: 1111853 - DNA, 15 bp, Homo sapiens
aaccctaggcaacca

SEQ ID NO: 1111854 - DNA, 15 bp, Homo sapiens
taaccctaggcaacc

SEQ ID NO: 1111855 - DNA, 15 bp, Homo sapiens
ctaaccctaggcaac

SEQ ID NO: 1111856 - DNA, 15 bp, Homo sapiens
cctaaccctaggcaa

SEQ ID NO: 1111857 - DNA, 15 bp, Homo sapiens
ccctaaccctaggca

SEQ ID NO: 1111858 - DNA, 15 bp, Homo sapiens
tccctaaccctaggc

SEQ ID NO: 1111859 - DNA, 15 bp, Homo sapiens
ctccctaaccctagg

SEQ ID NO: 1111860 - DNA, 15 bp, Homo sapiens
cctccctaaccctag

SEQ ID NO: 1111861 - DNA, 15 bp, Homo sapiens
ccctccctaacccta

SEQ ID NO: 1111862 - DNA, 15 bp, Homo sapiens
accctccctaaccct

SEQ ID NO: 1111863 - DNA, 15 bp, Homo sapiens
caccctccctaaccc

SEQ ID NO: 1111864 - DNA, 15 bp, Homo sapiens
tcaccctccctaacc

SEQ ID NO: 1111865 - DNA, 15 bp, Homo sapiens
gtcaccctccctaac

SEQ ID NO: 1111866 - DNA, 15 bp, Homo sapiens
agtcaccctccctaa

SEQ ID NO: 1111867 - DNA, 15 bp, Homo sapiens
cagtcaccctcccta

SEQ ID NO: 1111868 - DNA, 15 bp, Homo sapiens
gcagtcaccctccct

SEQ ID NO: 1111869 - DNA, 15 bp, Homo sapiens
agcagtcaccctccc

SEQ ID NO: 1111870 - DNA, 15 bp, Homo sapiens
tagcagtcaccctcc

SEQ ID NO: 1111871 - DNA, 15 bp, Homo sapiens
ttagcagtcaccctc

SEQ ID NO: 1111872 - DNA, 15 bp, Homo sapiens
tttagcagtcaccct

SEQ ID NO: 1111873 - DNA, 15 bp, Homo sapiens
ctttagcagtcaccc

SEQ ID NO: 1111874 - DNA, 15 bp, Homo sapiens
cctttagcagtcacc

SEQ ID NO: 1111875 - DNA, 15 bp, Homo sapiens
tcctttagcagtcac

SEQ ID NO: 1111876 - DNA, 15 bp, Homo sapiens
gtcctttagcagtca

SEQ ID NO: 1111877 - DNA, 15 bp, Homo sapiens
tgtcctttagcagtc

SEQ ID NO: 1111878 - DNA, 15 bp, Homo sapiens
atgtcctttagcagt

SEQ ID NO: 1111879 - DNA, 15 bp, Homo sapiens
tatgtcctttagcag

SEQ ID NO: 1111880 - DNA, 15 bp, Homo sapiens
ttatgtcctttagca

SEQ ID NO: 1111881 - DNA, 15 bp, Homo sapiens
cttatgtcctttagc

SEQ ID NO: 1111882 - DNA, 15 bp, Homo sapiens
ccttatgtcctttag

SEQ ID NO: 1111883 - DNA, 15 bp, Homo sapiens
gccttatgtccttta

SEQ ID NO: 1111884 - DNA, 15 bp, Homo sapiens
agccttatgtccttt

SEQ ID NO: 1111885 - DNA, 15 bp, Homo sapiens
cagccttatgtcctt

SEQ ID NO: 1111886 - DNA, 15 bp, Homo sapiens
gcagccttatgtcct

SEQ ID NO: 1111887 - DNA, 15 bp, Homo sapiens
ggcagccttatgtcc

SEQ ID NO: 1111888 - DNA, 15 bp, Homo sapiens
aggcagccttatgtc

SEQ ID NO: 1111889 - DNA, 15 bp, Homo sapiens
aaggcagccttatgt

SEQ ID NO: 1111890 - DNA, 15 bp, Homo sapiens
gaaggcagccttatg

SEQ ID NO: 1111891 - DNA, 15 bp, Homo sapiens
agaaggcagccttat

SEQ ID NO: 1111892 - DNA, 15 bp, Homo sapiens
cagaaggcagcctta

SEQ ID NO: 1111893 - DNA, 15 bp, Homo sapiens
acagaaggcagcctt

SEQ ID NO: 1111894 - DNA, 15 bp, Homo sapiens
cacagaaggcagcct

SEQ ID NO: 1111895 - DNA, 15 bp, Homo sapiens
ccacagaaggcagcc

SEQ ID NO: 1111896 - DNA, 15 bp, Homo sapiens
accacagaaggcagc

SEQ ID NO: 1111897 - DNA, 15 bp, Homo sapiens
caccacagaaggcag

SEQ ID NO: 1111898 - DNA, 15 bp, Homo sapiens
tcaccacagaaggca

SEQ ID NO: 1111899 - DNA, 15 bp, Homo sapiens
atcaccacagaaggc

SEQ ID NO: 1111900 - DNA, 15 bp, Homo sapiens
tatcaccacagaagg

SEQ ID NO: 1111901 - DNA, 15 bp, Homo sapiens
ttatcaccacagaag

SEQ ID NO: 1111902 - DNA, 15 bp, Homo sapiens
tttatcaccacagaa

SEQ ID NO: 1111903 - DNA, 15 bp, Homo sapiens
ttttatcaccacaga

SEQ ID NO: 1111904 - DNA, 15 bp, Homo sapiens
tttttatcaccacag

SEQ ID NO: 1111905 - DNA, 15 bp, Homo sapiens
atttttatcaccaca

SEQ ID NO: 1111906 - DNA, 15 bp, Homo sapiens
catttttatcaccac

SEQ ID NO: 1111907 - DNA, 15 bp, Homo sapiens
ccatttttatcacca

SEQ ID NO: 1111908 - DNA, 15 bp, Homo sapiens
accatttttatcacc

SEQ ID NO: 1111909 - DNA, 15 bp, Homo sapiens
gaccatttttatcac

SEQ ID NO: 1111910 - DNA, 15 bp, Homo sapiens
agaccatttttatca

SEQ ID NO: 1111911 - DNA, 15 bp, Homo sapiens
aagaccatttttatc

SEQ ID NO: 1111912 - DNA, 15 bp, Homo sapiens
taagaccatttttat

SEQ ID NO: 1111913 - DNA, 15 bp, Homo sapiens
ttaagaccattttta

SEQ ID NO: 1111914 - DNA, 15 bp, Homo sapiens
tttaagaccattttt

SEQ ID NO: 1111915 - DNA, 15 bp, Homo sapiens
gtttaagaccatttt

SEQ ID NO: 1111916 - DNA, 15 bp, Homo sapiens
agtttaagaccattt

SEQ ID NO: 1111917 - DNA, 15 bp, Homo sapiens
cagtttaagaccatt

SEQ ID NO: 1111918 - DNA, 15 bp, Homo sapiens
tcagtttaagaccat

SEQ ID NO: 1111919 - DNA, 15 bp, Homo sapiens
atcagtttaagacca

SEQ ID NO: 1111920 - DNA, 15 bp, Homo sapiens
aatcagtttaagacc

SEQ ID NO: 1111921 - DNA, 15 bp, Homo sapiens
caatcagtttaagac

SEQ ID NO: 1111922 - DNA, 15 bp, Homo sapiens
acaatcagtttaaga

SEQ ID NO: 1111923 - DNA, 15 bp, Homo sapiens
tacaatcagtttaag

SEQ ID NO: 1111924 - DNA, 15 bp, Homo sapiens
ttacaatcagtttaa

SEQ ID NO: 1111925 - DNA, 15 bp, Homo sapiens
attacaatcagttta

SEQ ID NO: 1111926 - DNA, 15 bp, Homo sapiens
cattacaatcagttt

SEQ ID NO: 1111927 - DNA, 15 bp, Homo sapiens
tcattacaatcagtt

SEQ ID NO: 1111928 - DNA, 15 bp, Homo sapiens
atcattacaatcagt

SEQ ID NO: 1111929 - DNA, 15 bp, Homo sapiens
catcattacaatcag

SEQ ID NO: 1111930 - DNA, 15 bp, Homo sapiens
gcatcattacaatca

SEQ ID NO: 1111931 - DNA, 15 bp, Homo sapiens
agcatcattacaatc

SEQ ID NO: 1111932 - DNA, 15 bp, Homo sapiens
cagcatcattacaat

SEQ ID NO: 1111933 - DNA, 15 bp, Homo sapiens
gcagcatcattacaa

SEQ ID NO: 1111934 - DNA, 15 bp, Homo sapiens
tgcagcatcattaca

SEQ ID NO: 1111935 - DNA, 15 bp, Homo sapiens
atgcagcatcattac

SEQ ID NO: 1111936 - DNA, 15 bp, Homo sapiens
tatgcagcatcatta

SEQ ID NO: 1111937 - DNA, 15 bp, Homo sapiens
ttatgcagcatcatt

SEQ ID NO: 1111938 - DNA, 15 bp, Homo sapiens
gttatgcagcatcat

SEQ ID NO: 1111939 - DNA, 15 bp, Homo sapiens
agttatgcagcatca

SEQ ID NO: 1111940 - DNA, 15 bp, Homo sapiens
gagttatgcagcatc

SEQ ID NO: 1111941 - DNA, 15 bp, Homo sapiens
agagttatgcagcat

SEQ ID NO: 1111942 - DNA, 15 bp, Homo sapiens
gagagttatgcagca

SEQ ID NO: 1111943 - DNA, 15 bp, Homo sapiens
agagagttatgcagc

SEQ ID NO: 1111944 - DNA, 15 bp, Homo sapiens
aagagagttatgcag

SEQ ID NO: 1111945 - DNA, 15 bp, Homo sapiens
taagagagttatgca

SEQ ID NO: 1111946 - DNA, 15 bp, Homo sapiens
ttaagagagttatgc

SEQ ID NO: 1111947 - DNA, 15 bp, Homo sapiens
cttaagagagttatg

SEQ ID NO: 1111948 - DNA, 15 bp, Homo sapiens
tcttaagagagttat

SEQ ID NO: 1111949 - DNA, 15 bp, Homo sapiens
gtcttaagagagtta

SEQ ID NO: 1111950 - DNA, 15 bp, Homo sapiens
tgtcttaagagagtt

SEQ ID NO: 1111951 - DNA, 15 bp, Homo sapiens
gtgtcttaagagagt

SEQ ID NO: 1111952 - DNA, 15 bp, Homo sapiens
agtgtcttaagagag

SEQ ID NO: 1111953 - DNA, 15 bp, Homo sapiens
tagtgtcttaagaga

SEQ ID NO: 1111954 - DNA, 15 bp, Homo sapiens
ttagtgtcttaagag

SEQ ID NO: 1111955 - DNA, 15 bp, Homo sapiens
tttagtgtcttaaga

SEQ ID NO: 1111956 - DNA, 15 bp, Homo sapiens
ttttagtgtcttaag

SEQ ID NO: 1111957 - DNA, 15 bp, Homo sapiens
tttttagtgtcttaa

SEQ ID NO: 1111958 - DNA, 15 bp, Homo sapiens
gtttttagtgtctta

SEQ ID NO: 1111959 - DNA, 15 bp, Homo sapiens
ggtttttagtgtctt

SEQ ID NO: 1111960 - DNA, 15 bp, Homo sapiens
tggtttttagtgtct

SEQ ID NO: 1111961 - DNA, 15 bp, Homo sapiens
atggtttttagtgtc

SEQ ID NO: 1111962 - DNA, 15 bp, Homo sapiens
aatggtttttagtgt

SEQ ID NO: 1111963 - DNA, 15 bp, Homo sapiens
caatggtttttagtg

SEQ ID NO: 1111964 - DNA, 15 bp, Homo sapiens
tcaatggtttttagt

SEQ ID NO: 1111965 - DNA, 15 bp, Homo sapiens
ctcaatggtttttag

SEQ ID NO: 1111966 - DNA, 15 bp, Homo sapiens
actcaatggttttta

SEQ ID NO: 1111967 - DNA, 15 bp, Homo sapiens
aactcaatggttttt

SEQ ID NO: 1111968 - DNA, 15 bp, Homo sapiens
caactcaatggtttt

SEQ ID NO: 1111969 - DNA, 15 bp, Homo sapiens
acaactcaatggttt

SEQ ID NO: 1111970 - DNA, 15 bp, Homo sapiens
tacaactcaatggtt

SEQ ID NO: 1111971 - DNA, 15 bp, Homo sapiens
gtacaactcaatggt

SEQ ID NO: 1111972 - DNA, 15 bp, Homo sapiens
tgtacaactcaatgg

SEQ ID NO: 1111973 - DNA, 15 bp, Homo sapiens
gtgtacaactcaatg

SEQ ID NO: 1111974 - DNA, 15 bp, Homo sapiens
agtgtacaactcaat

SEQ ID NO: 1111975 - DNA, 15 bp, Homo sapiens
aagtgtacaactcaa

SEQ ID NO: 1111976 - DNA, 15 bp, Homo sapiens
aaagtgtacaactca

SEQ ID NO: 1111977 - DNA, 15 bp, Homo sapiens
taaagtgtacaactc

SEQ ID NO: 1111978 - DNA, 15 bp, Homo sapiens
ttaaagtgtacaact

SEQ ID NO: 1111979 - DNA, 15 bp, Homo sapiens
attaaagtgtacaac

SEQ ID NO: 1111980 - DNA, 15 bp, Homo sapiens
aattaaagtgtacaa

SEQ ID NO: 1111981 - DNA, 15 bp, Homo sapiens
aaattaaagtgtaca

SEQ ID NO: 1111982 - DNA, 15 bp, Homo sapiens
aaaattaaagtgtac

SEQ ID NO: 1111983 - DNA, 15 bp, Homo sapiens
aaaaattaaagtgta

SEQ ID NO: 1111984 - DNA, 15 bp, Homo sapiens
aaaaaattaaagtgt

SEQ ID NO: 1111985 - DNA, 15 bp, Homo sapiens
aaaaaaattaaagtg

SEQ ID NO: 1111986 - DNA, 15 bp, Homo sapiens
caaaaaaattaaagt

SEQ ID NO: 1111987 - DNA, 15 bp, Homo sapiens
acaaaaaaattaaag

SEQ ID NO: 1111988 - DNA, 15 bp, Homo sapiens
cacaaaaaaattaaa

SEQ ID NO: 1111989 - DNA, 15 bp, Homo sapiens
acacaaaaaaattaa

SEQ ID NO: 1111990 - DNA, 15 bp, Homo sapiens
aacacaaaaaaatta

SEQ ID NO: 1111991 - DNA, 15 bp, Homo sapiens
caacacaaaaaaatt

SEQ ID NO: 1111992 - DNA, 15 bp, Homo sapiens
ccaacacaaaaaaat

SEQ ID NO: 1111993 - DNA, 15 bp, Homo sapiens
gccaacacaaaaaaa

SEQ ID NO: 1111994 - DNA, 15 bp, Homo sapiens
cgccaacacaaaaaa

SEQ ID NO: 1111995 - DNA, 15 bp, Homo sapiens
ccgccaacacaaaaa

SEQ ID NO: 1111996 - DNA, 15 bp, Homo sapiens
cccgccaacacaaaa

SEQ ID NO: 1111997 - DNA, 15 bp, Homo sapiens
ccccgccaacacaaa

SEQ ID NO: 1111998 - DNA, 15 bp, Homo sapiens
cccccgccaacacaa

SEQ ID NO: 1111999 - DNA, 15 bp, Homo sapiens
acccccgccaacaca

SEQ ID NO: 1112000 - DNA, 15 bp, Homo sapiens
cacccccgccaacac

SEQ ID NO: 1112001 - DNA, 15 bp, Homo sapiens
ccacccccgccaaca

SEQ ID NO: 1112002 - DNA, 15 bp, Homo sapiens
tccacccccgccaac

SEQ ID NO: 1112003 - DNA, 15 bp, Homo sapiens
atccacccccgccaa

SEQ ID NO: 1112004 - DNA, 15 bp, Homo sapiens
catccacccccgcca

SEQ ID NO: 1112005 - DNA, 15 bp, Homo sapiens
ccatccacccccgcc

SEQ ID NO: 1112006 - DNA, 15 bp, Homo sapiens
tccatccacccccgc

SEQ ID NO: 1112007 - DNA, 15 bp, Homo sapiens
ctccatccacccccg

SEQ ID NO: 1112008 - DNA, 15 bp, Homo sapiens
actccatccaccccc

SEQ ID NO: 1112009 - DNA, 15 bp, Homo sapiens
gactccatccacccc

SEQ ID NO: 1112010 - DNA, 15 bp, Homo sapiens
agactccatccaccc

SEQ ID NO: 1112011 - DNA, 15 bp, Homo sapiens
gagactccatccacc

SEQ ID NO: 1112012 - DNA, 15 bp, Homo sapiens
cgagactccatccac

SEQ ID NO: 1112013 - DNA, 15 bp, Homo sapiens
gcgagactccatcca

SEQ ID NO: 1112014 - DNA, 15 bp, Homo sapiens
agcgagactccatcc

SEQ ID NO: 1112015 - DNA, 15 bp, Homo sapiens
acaacagagcgagac

SEQ ID NO: 1112016 - DNA, 15 bp, Homo sapiens
gacaacagagcgaga

SEQ ID NO: 1112017 - DNA, 15 bp, Homo sapiens
ggacaacagagcgag

SEQ ID NO: 1112018 - DNA, 15 bp, Homo sapiens
tggacaacagagcga

SEQ ID NO: 1112019 - DNA, 15 bp, Homo sapiens
ctggacaacagagcg

SEQ ID NO: 1112020 - DNA, 15 bp, Homo sapiens
cctggacaacagagc

SEQ ID NO: 1112021 - DNA, 15 bp, Homo sapiens
ttccagcctggacaa

SEQ ID NO: 1112022 - DNA, 15 bp, Homo sapiens
attccagcctggaca

SEQ ID NO: 1112023 - DNA, 15 bp, Homo sapiens
cattccagcctggac

SEQ ID NO: 1112024 - DNA, 15 bp, Homo sapiens
gcattccagcctgga

SEQ ID NO: 1112025 - DNA, 15 bp, Homo sapiens
accgagatcgtgcca

SEQ ID NO: 1112026 - DNA, 15 bp, Homo sapiens
aaccgagatcgtgcc

SEQ ID NO: 1112027 - DNA, 15 bp, Homo sapiens
aaaccgagatcgtgc

SEQ ID NO: 1112028 - DNA, 15 bp, Homo sapiens
taaaccgagatcgtg

SEQ ID NO: 1112029 - DNA, 15 bp, Homo sapiens
gtaaaccgagatcgt

SEQ ID NO: 1112030 - DNA, 15 bp, Homo sapiens
agtaaaccgagatcg

SEQ ID NO: 1112031 - DNA, 15 bp, Homo sapiens
cagtaaaccgagatc

SEQ ID NO: 1112032 - DNA, 15 bp, Homo sapiens
gcagtaaaccgagat

SEQ ID NO: 1112033 - DNA, 15 bp, Homo sapiens
tgcagtaaaccgaga

SEQ ID NO: 1112034 - DNA, 15 bp, Homo sapiens
ttgcagtaaaccgag

SEQ ID NO: 1112035 - DNA, 15 bp, Homo sapiens
gttgcagtaaaccga

SEQ ID NO: 1112036 - DNA, 15 bp, Homo sapiens
ggttgcagtaaaccg

SEQ ID NO: 1112037 - DNA, 15 bp, Homo sapiens
aggttgcagtaaacc

SEQ ID NO: 1112038 - DNA, 15 bp, Homo sapiens
gaggttgcagtaaac

SEQ ID NO: 1112039 - DNA, 15 bp, Homo sapiens
agaggttgcagtaaa

SEQ ID NO: 1112040 - DNA, 15 bp, Homo sapiens
cagaggttgcagtaa

SEQ ID NO: 1112041 - DNA, 15 bp, Homo sapiens
gcagaggttgcagta

SEQ ID NO: 1112042 - DNA, 15 bp, Homo sapiens
tgcagaggttgcagt

SEQ ID NO: 1112043 - DNA, 15 bp, Homo sapiens
atgcagaggttgcag

SEQ ID NO: 1112044 - DNA, 15 bp, Homo sapiens
gatgcagaggttgca

SEQ ID NO: 1112045 - DNA, 15 bp, Homo sapiens
ggatgcagaggttgc

SEQ ID NO: 1112046 - DNA, 15 bp, Homo sapiens
gggatgcagaggttg

SEQ ID NO: 1112047 - DNA, 15 bp, Homo sapiens
cgggatgcagaggtt

SEQ ID NO: 1112048 - DNA, 15 bp, Homo sapiens
ccgggatgcagaggt

SEQ ID NO: 1112049 - DNA, 15 bp, Homo sapiens
cccgggatgcagagg

SEQ ID NO: 1112050 - DNA, 15 bp, Homo sapiens
acccgggatgcagag

SEQ ID NO: 1112051 - DNA, 15 bp, Homo sapiens
aacccgggatgcaga

SEQ ID NO: 1112052 - DNA, 15 bp, Homo sapiens
gaacccgggatgcag

SEQ ID NO: 1112053 - DNA, 15 bp, Homo sapiens
tgaacccgggatgca

SEQ ID NO: 1112054 - DNA, 15 bp, Homo sapiens
ttgaacccgggatgc

SEQ ID NO: 1112055 - DNA, 15 bp, Homo sapiens
cttgaacccgggatg

SEQ ID NO: 1112056 - DNA, 15 bp, Homo sapiens
gcttgaacccgggat

SEQ ID NO: 1112057 - DNA, 15 bp, Homo sapiens
caggaggccgaggca

SEQ ID NO: 1112058 - DNA, 15 bp, Homo sapiens
tcaggaggccgaggc

SEQ ID NO: 1112059 - DNA, 15 bp, Homo sapiens
ctcaggaggccgagg

SEQ ID NO: 1112060 - DNA, 15 bp, Homo sapiens
actcaggaggccgag

SEQ ID NO: 1112061 - DNA, 15 bp, Homo sapiens
tactcaggaggccga

SEQ ID NO: 1112062 - DNA, 15 bp, Homo sapiens
ctactcaggaggccg

SEQ ID NO: 1112063 - DNA, 15 bp, Homo sapiens
cctactcaggaggcc

SEQ ID NO: 1112064 - DNA, 15 bp, Homo sapiens
ccctactcaggaggc

SEQ ID NO: 1112065 - DNA, 15 bp, Homo sapiens
tccctactcaggagg

SEQ ID NO: 1112066 - DNA, 15 bp, Homo sapiens
ttccctactcaggag

SEQ ID NO: 1112067 - DNA, 15 bp, Homo sapiens
attccctactcagga

SEQ ID NO: 1112068 - DNA, 15 bp, Homo sapiens
aattccctactcagg

SEQ ID NO: 1112069 - DNA, 15 bp, Homo sapiens
taattccctactcag

SEQ ID NO: 1112070 - DNA, 15 bp, Homo sapiens
gtaattccctactca

SEQ ID NO: 1112071 - DNA, 15 bp, Homo sapiens
tgtaattccctactc

SEQ ID NO: 1112072 - DNA, 15 bp, Homo sapiens
ctgtaattccctact

SEQ ID NO: 1112073 - DNA, 15 bp, Homo sapiens
tctgtaattccctac

SEQ ID NO: 1112074 - DNA, 15 bp, Homo sapiens
gtctgtaattcccta

SEQ ID NO: 1112075 - DNA, 15 bp, Homo sapiens
ggtctgtaattccct

SEQ ID NO: 1112076 - DNA, 15 bp, Homo sapiens
aggtctgtaattccc

SEQ ID NO: 1112077 - DNA, 15 bp, Homo sapiens
gaggtctgtaattcc

SEQ ID NO: 1112078 - DNA, 15 bp, Homo sapiens
cgaggtctgtaattc

SEQ ID NO: 1112079 - DNA, 15 bp, Homo sapiens
acgaggtctgtaatt

SEQ ID NO: 1112080 - DNA, 15 bp, Homo sapiens
aacgaggtctgtaat

SEQ ID NO: 1112081 - DNA, 15 bp, Homo sapiens
taacgaggtctgtaa

SEQ ID NO: 1112082 - DNA, 15 bp, Homo sapiens
ataacgaggtctgta

SEQ ID NO: 1112083 - DNA, 15 bp, Homo sapiens
gataacgaggtctgt

SEQ ID NO: 1112084 - DNA, 15 bp, Homo sapiens
cgataacgaggtctg

SEQ ID NO: 1112085 - DNA, 15 bp, Homo sapiens
acgataacgaggtct

SEQ ID NO: 1112086 - DNA, 15 bp, Homo sapiens
cacgataacgaggtc

SEQ ID NO: 1112087 - DNA, 15 bp, Homo sapiens
ccacgataacgaggt

SEQ ID NO: 1112088 - DNA, 15 bp, Homo sapiens
gccacgataacgagg

SEQ ID NO: 1112089 - DNA, 15 bp, Homo sapiens
tgccacgataacgag

SEQ ID NO: 1112090 - DNA, 15 bp, Homo sapiens
gtgccacgataacga

SEQ ID NO: 1112091 - DNA, 15 bp, Homo sapiens
ggtgccacgataacg

SEQ ID NO: 1112092 - DNA, 15 bp, Homo sapiens
aggtgccacgataac

SEQ ID NO: 1112093 - DNA, 15 bp, Homo sapiens
aaggtgccacgataa

SEQ ID NO: 1112094 - DNA, 15 bp, Homo sapiens
taaggtgccacgata

SEQ ID NO: 1112095 - DNA, 15 bp, Homo sapiens
gtaaggtgccacgat

SEQ ID NO: 1112096 - DNA, 15 bp, Homo sapiens
ggtaaggtgccacga

SEQ ID NO: 1112097 - DNA, 15 bp, Homo sapiens
gggtaaggtgccacg

SEQ ID NO: 1112098 - DNA, 15 bp, Homo sapiens
agggtaaggtgccac

SEQ ID NO: 1112099 - DNA, 15 bp, Homo sapiens
aagggtaaggtgcca

SEQ ID NO: 1112100 - DNA, 15 bp, Homo sapiens
gaagggtaaggtgcc

SEQ ID NO: 1112101 - DNA, 15 bp, Homo sapiens
agaagggtaaggtgc

SEQ ID NO: 1112102 - DNA, 15 bp, Homo sapiens
cagaagggtaaggtg

SEQ ID NO: 1112103 - DNA, 15 bp, Homo sapiens
tcagaagggtaaggt

SEQ ID NO: 1112104 - DNA, 15 bp, Homo sapiens
atcagaagggtaagg

SEQ ID NO: 1112105 - DNA, 15 bp, Homo sapiens
catcagaagggtaag

SEQ ID NO: 1112106 - DNA, 15 bp, Homo sapiens
acatcagaagggtaa

SEQ ID NO: 1112107 - DNA, 15 bp, Homo sapiens
aacatcagaagggta

SEQ ID NO: 1112108 - DNA, 15 bp, Homo sapiens
taacatcagaagggt

SEQ ID NO: 1112109 - DNA, 15 bp, Homo sapiens
ttaacatcagaaggg

SEQ ID NO: 1112110 - DNA, 15 bp, Homo sapiens
tttaacatcagaagg

SEQ ID NO: 1112111 - DNA, 15 bp, Homo sapiens
ttttaacatcagaag

SEQ ID NO: 1112112 - DNA, 15 bp, Homo sapiens
tttttaacatcagaa

SEQ ID NO: 1112113 - DNA, 15 bp, Homo sapiens
ttttttaacatcaga

SEQ ID NO: 1112114 - DNA, 15 bp, Homo sapiens
tttttttaacatcag

SEQ ID NO: 1112115 - DNA, 15 bp, Homo sapiens
ttttttttaacatca

SEQ ID NO: 1112116 - DNA, 15 bp, Homo sapiens
tttttttttaacatc

SEQ ID NO: 1112117 - DNA, 15 bp, Homo sapiens
ttttttttttaacat

SEQ ID NO: 1112118 - DNA, 15 bp, Homo sapiens
gctcttttttttttt

SEQ ID NO: 1112119 - DNA, 15 bp, Homo sapiens
cgctctttttttttt

SEQ ID NO: 1112120 - DNA, 15 bp, Homo sapiens
tcgctcttttttttt

SEQ ID NO: 1112121 - DNA, 15 bp, Homo sapiens
ctcgctctttttttt

SEQ ID NO: 1112122 - DNA, 15 bp, Homo sapiens
tctcgctcttttttt

SEQ ID NO: 1112123 - DNA, 15 bp, Homo sapiens
ctctcgctctttttt

SEQ ID NO: 1112124 - DNA, 15 bp, Homo sapiens
tctctcgctcttttt

SEQ ID NO: 1112125 - DNA, 15 bp, Homo sapiens
ctctctcgctctttt

SEQ ID NO: 1112126 - DNA, 15 bp, Homo sapiens
tctctctcgctcttt

SEQ ID NO: 1112127 - DNA, 15 bp, Homo sapiens
ctctctctcgctctt

SEQ ID NO: 1112128 - DNA, 15 bp, Homo sapiens
tctctctctcgctct

SEQ ID NO: 1112129 - DNA, 15 bp, Homo sapiens
ctctctctctcgctc

SEQ ID NO: 1112130 - DNA, 15 bp, Homo sapiens
tctctctctctcgct

SEQ ID NO: 1112131 - DNA, 15 bp, Homo sapiens
gtttctctctctctc

SEQ ID NO: 1112132 - DNA, 15 bp, Homo sapiens
tgtttctctctctct

SEQ ID NO: 1112133 - DNA, 15 bp, Homo sapiens
atgtttctctctctc

SEQ ID NO: 1112134 - DNA, 15 bp, Homo sapiens
aatgtttctctctct

SEQ ID NO: 1112135 - DNA, 15 bp, Homo sapiens
aaatgtttctctctc

SEQ ID NO: 1112136 - DNA, 15 bp, Homo sapiens
caaatgtttctctct

SEQ ID NO: 1112137 - DNA, 15 bp, Homo sapiens
acaaatgtttctctc

SEQ ID NO: 1112138 - DNA, 15 bp, Homo sapiens
cacaaatgtttctct

SEQ ID NO: 1112139 - DNA, 15 bp, Homo sapiens
tcacaaatgtttctc

SEQ ID NO: 1112140 - DNA, 15 bp, Homo sapiens
ttcacaaatgtttct

SEQ ID NO: 1112141 - DNA, 15 bp, Homo sapiens
cttcacaaatgtttc

SEQ ID NO: 1112142 - DNA, 15 bp, Homo sapiens
acttcacaaatgttt

SEQ ID NO: 1112143 - DNA, 15 bp, Homo sapiens
tacttcacaaatgtt

SEQ ID NO: 1112144 - DNA, 15 bp, Homo sapiens
ctacttcacaaatgt

SEQ ID NO: 1112145 - DNA, 15 bp, Homo sapiens
cctacttcacaaatg

SEQ ID NO: 1112146 - DNA, 15 bp, Homo sapiens
acctacttcacaaat

SEQ ID NO: 1112147 - DNA, 15 bp, Homo sapiens
aacctacttcacaaa

SEQ ID NO: 1112148 - DNA, 15 bp, Homo sapiens
caacctacttcacaa

SEQ ID NO: 1112149 - DNA, 15 bp, Homo sapiens
acaacctacttcaca

SEQ ID NO: 1112150 - DNA, 15 bp, Homo sapiens
aacaacctacttcac

SEQ ID NO: 1112151 - DNA, 15 bp, Homo sapiens
caacaacctacttca

SEQ ID NO: 1112152 - DNA, 15 bp, Homo sapiens
tcaacaacctacttc

SEQ ID NO: 1112153 - DNA, 15 bp, Homo sapiens
ctcaacaacctactt

SEQ ID NO: 1112154 - DNA, 15 bp, Homo sapiens
actcaacaacctact

SEQ ID NO: 1112155 - DNA, 15 bp, Homo sapiens
gactcaacaacctac

SEQ ID NO: 1112156 - DNA, 15 bp, Homo sapiens
agactcaacaaccta

SEQ ID NO: 1112157 - DNA, 15 bp, Homo sapiens
gagactcaacaacct

SEQ ID NO: 1112158 - DNA, 15 bp, Homo sapiens
tgagactcaacaacc

SEQ ID NO: 1112159 - DNA, 15 bp, Homo sapiens
ctgagactcaacaac

SEQ ID NO: 1112160 - DNA, 15 bp, Homo sapiens
gctgagactcaacaa

SEQ ID NO: 1112161 - DNA, 15 bp, Homo sapiens
tgctgagactcaaca

SEQ ID NO: 1112162 - DNA, 15 bp, Homo sapiens
gtgctgagactcaac

SEQ ID NO: 1112163 - DNA, 15 bp, Homo sapiens
agtgctgagactcaa

SEQ ID NO: 1112164 - DNA, 15 bp, Homo sapiens
tagtgctgagactca

SEQ ID NO: 1112165 - DNA, 15 bp, Homo sapiens
atagtgctgagactc

SEQ ID NO: 1112166 - DNA, 15 bp, Homo sapiens
aatagtgctgagact

SEQ ID NO: 1112167 - DNA, 15 bp, Homo sapiens
caatagtgctgagac

SEQ ID NO: 1112168 - DNA, 15 bp, Homo sapiens
tcaatagtgctgaga

SEQ ID NO: 1112169 - DNA, 15 bp, Homo sapiens
gtcaatagtgctgag

SEQ ID NO: 1112170 - DNA, 15 bp, Homo sapiens
ggtcaatagtgctga

SEQ ID NO: 1112171 - DNA, 15 bp, Homo sapiens
aggtcaatagtgctg

SEQ ID NO: 1112172 - DNA, 15 bp, Homo sapiens
aaggtcaatagtgct

SEQ ID NO: 1112173 - DNA, 15 bp, Homo sapiens
aaaggtcaatagtgc

SEQ ID NO: 1112174 - DNA, 15 bp, Homo sapiens
aaaaggtcaatagtg

SEQ ID NO: 1112175 - DNA, 15 bp, Homo sapiens
caaaaggtcaatagt

SEQ ID NO: 1112176 - DNA, 15 bp, Homo sapiens
ccaaaaggtcaatag

SEQ ID NO: 1112177 - DNA, 15 bp, Homo sapiens
cccaaaaggtcaata

SEQ ID NO: 1112178 - DNA, 15 bp, Homo sapiens
gcccaaaaggtcaat

SEQ ID NO: 1112179 - DNA, 15 bp, Homo sapiens
tgcccaaaaggtcaa

SEQ ID NO: 1112180 - DNA, 15 bp, Homo sapiens
ctgcccaaaaggtca

SEQ ID NO: 1112181 - DNA, 15 bp, Homo sapiens
cctgcccaaaaggtc

SEQ ID NO: 1112182 - DNA, 15 bp, Homo sapiens
tcctgcccaaaaggt

SEQ ID NO: 1112183 - DNA, 15 bp, Homo sapiens
atcctgcccaaaagg

SEQ ID NO: 1112184 - DNA, 15 bp, Homo sapiens
tatcctgcccaaaag

SEQ ID NO: 1112185 - DNA, 15 bp, Homo sapiens
gtatcctgcccaaaa

SEQ ID NO: 1112186 - DNA, 15 bp, Homo sapiens
agtatcctgcccaaa

SEQ ID NO: 1112187 - DNA, 15 bp, Homo sapiens
aagtatcctgcccaa

SEQ ID NO: 1112188 - DNA, 15 bp, Homo sapiens
gaagtatcctgccca

SEQ ID NO: 1112189 - DNA, 15 bp, Homo sapiens
agaagtatcctgccc

SEQ ID NO: 1112190 - DNA, 15 bp, Homo sapiens
aagaagtatcctgcc

SEQ ID NO: 1112191 - DNA, 15 bp, Homo sapiens
aaagaagtatcctgc

SEQ ID NO: 1112192 - DNA, 15 bp, Homo sapiens
caaagaagtatcctg

SEQ ID NO: 1112193 - DNA, 15 bp, Homo sapiens
acaaagaagtatcct

SEQ ID NO: 1112194 - DNA, 15 bp, Homo sapiens
aacaaagaagtatcc

SEQ ID NO: 1112195 - DNA, 15 bp, Homo sapiens
caacaaagaagtatc

SEQ ID NO: 1112196 - DNA, 15 bp, Homo sapiens
acaacaaagaagtat

SEQ ID NO: 1112197 - DNA, 15 bp, Homo sapiens
cacaacaaagaagta

SEQ ID NO: 1112198 - DNA, 15 bp, Homo sapiens
ccacaacaaagaagt

SEQ ID NO: 1112199 - DNA, 15 bp, Homo sapiens
cccacaacaaagaag

SEQ ID NO: 1112200 - DNA, 15 bp, Homo sapiens
ccccacaacaaagaa

SEQ ID NO: 1112201 - DNA, 15 bp, Homo sapiens
cccccacaacaaaga

SEQ ID NO: 1112202 - DNA, 15 bp, Homo sapiens
tcccccacaacaaag

SEQ ID NO: 1112203 - DNA, 15 bp, Homo sapiens
atcccccacaacaaa

SEQ ID NO: 1112204 - DNA, 15 bp, Homo sapiens
aatcccccacaacaa

SEQ ID NO: 1112205 - DNA, 15 bp, Homo sapiens
caatcccccacaaca

SEQ ID NO: 1112206 - DNA, 15 bp, Homo sapiens
acaatcccccacaac

SEQ ID NO: 1112207 - DNA, 15 bp, Homo sapiens
aacaatcccccacaa

SEQ ID NO: 1112208 - DNA, 15 bp, Homo sapiens
gaacaatcccccaca

SEQ ID NO: 1112209 - DNA, 15 bp, Homo sapiens
agaacaatcccccac

SEQ ID NO: 1112210 - DNA, 15 bp, Homo sapiens
cagaacaatccccca

SEQ ID NO: 1112211 - DNA, 15 bp, Homo sapiens
acagaacaatccccc

SEQ ID NO: 1112212 - DNA, 15 bp, Homo sapiens
cacagaacaatcccc

SEQ ID NO: 1112213 - DNA, 15 bp, Homo sapiens
acacagaacaatccc

SEQ ID NO: 1112214 - DNA, 15 bp, Homo sapiens
cacacagaacaatcc

SEQ ID NO: 1112215 - DNA, 15 bp, Homo sapiens
acacacagaacaatc

SEQ ID NO: 1112216 - DNA, 15 bp, Homo sapiens
gacacacagaacaat

SEQ ID NO: 1112217 - DNA, 15 bp, Homo sapiens
cgacacacagaacaa

SEQ ID NO: 1112218 - DNA, 15 bp, Homo sapiens
acgacacacagaaca

SEQ ID NO: 1112219 - DNA, 15 bp, Homo sapiens
cacgacacacagaac

SEQ ID NO: 1112220 - DNA, 15 bp, Homo sapiens
acacgacacacagaa

SEQ ID NO: 1112221 - DNA, 15 bp, Homo sapiens
cacacgacacacaga

SEQ ID NO: 1112222 - DNA, 15 bp, Homo sapiens
tcacacgacacacag

SEQ ID NO: 1112223 - DNA, 15 bp, Homo sapiens
atcacacgacacaca

SEQ ID NO: 1112224 - DNA, 15 bp, Homo sapiens
catcacacgacacac

SEQ ID NO: 1112225 - DNA, 15 bp, Homo sapiens
acatcacacgacaca

SEQ ID NO: 1112226 - DNA, 15 bp, Homo sapiens
aacatcacacgacac

SEQ ID NO: 1112227 - DNA, 15 bp, Homo sapiens
taaacatcacacgac

SEQ ID NO: 1112228 - DNA, 15 bp, Homo sapiens
ctaaacatcacacga

SEQ ID NO: 1112229 - DNA, 15 bp, Homo sapiens
actaaacatcacacg

SEQ ID NO: 1112230 - DNA, 15 bp, Homo sapiens
cactaaacatcacac

SEQ ID NO: 1112231 - DNA, 15 bp, Homo sapiens
ccactaaacatcaca

SEQ ID NO: 1112232 - DNA, 15 bp, Homo sapiens
cccactaaacatcac

SEQ ID NO: 1112233 - DNA, 15 bp, Homo sapiens
tcccactaaacatca

SEQ ID NO: 1112234 - DNA, 15 bp, Homo sapiens
atcccactaaacatc

SEQ ID NO: 1112235 - DNA, 15 bp, Homo sapiens
aatcccactaaacat

SEQ ID NO: 1112236 - DNA, 15 bp, Homo sapiens
caatcccactaaaca

SEQ ID NO: 1112237 - DNA, 15 bp, Homo sapiens
gcaatcccactaaac

SEQ ID NO: 1112238 - DNA, 15 bp, Homo sapiens
agcaatcccactaaa

SEQ ID NO: 1112239 - DNA, 15 bp, Homo sapiens
cagcaatcccactaa

SEQ ID NO: 1112240 - DNA, 15 bp, Homo sapiens
ccagcaatcccacta

SEQ ID NO: 1112241 - DNA, 15 bp, Homo sapiens
gccagcaatcccact

SEQ ID NO: 1112242 - DNA, 15 bp, Homo sapiens
ggccagcaatcccac

SEQ ID NO: 1112243 - DNA, 15 bp, Homo sapiens
gggccagcaatccca

SEQ ID NO: 1112244 - DNA, 15 bp, Homo sapiens
agggccagcaatccc

SEQ ID NO: 1112245 - DNA, 15 bp, Homo sapiens
aagggccagcaatcc

SEQ ID NO: 1112246 - DNA, 15 bp, Homo sapiens
taagggccagcaatc

SEQ ID NO: 1112247 - DNA, 15 bp, Homo sapiens
gtaagggccagcaat

SEQ ID NO: 1112248 - DNA, 15 bp, Homo sapiens
ggtaagggccagcaa

SEQ ID NO: 1112249 - DNA, 15 bp, Homo sapiens
aggtaagggccagca

SEQ ID NO: 1112250 - DNA, 15 bp, Homo sapiens
taggtaagggccagc

SEQ ID NO: 1112251 - DNA, 15 bp, Homo sapiens
gtaggtaagggccag

SEQ ID NO: 1112252 - DNA, 15 bp, Homo sapiens
ggtaggtaagggcca

SEQ ID NO: 1112253 - DNA, 15 bp, Homo sapiens
tggtaggtaagggcc

SEQ ID NO: 1112254 - DNA, 15 bp, Homo sapiens
ctggtaggtaagggc

SEQ ID NO: 1112255 - DNA, 15 bp, Homo sapiens
tctggtaggtaaggg

SEQ ID NO: 1112256 - DNA, 15 bp, Homo sapiens
catctggtaggtaag

SEQ ID NO: 1112257 - DNA, 15 bp, Homo sapiens
gcatctggtaggtaa

SEQ ID NO: 1112258 - DNA, 15 bp, Homo sapiens
ggcatctggtaggta

SEQ ID NO: 1112259 - DNA, 15 bp, Homo sapiens
tggcatctggtaggt

SEQ ID NO: 1112260 - DNA, 15 bp, Homo sapiens
ctggcatctggtagg

SEQ ID NO: 1112261 - DNA, 15 bp, Homo sapiens
actggcatctggtag

SEQ ID NO: 1112262 - DNA, 15 bp, Homo sapiens
cactggcatctggta

SEQ ID NO: 1112263 - DNA, 15 bp, Homo sapiens
acactggcatctggt

SEQ ID NO: 1112264 - DNA, 15 bp, Homo sapiens
gacactggcatctgg

SEQ ID NO: 1112265 - DNA, 15 bp, Homo sapiens
ggacactggcatctg

SEQ ID NO: 1112266 - DNA, 15 bp, Homo sapiens
gggacactggcatct

SEQ ID NO: 1112267 - DNA, 15 bp, Homo sapiens
agggacactggcatc

SEQ ID NO: 1112268 - DNA, 15 bp, Homo sapiens
gagggacactggcat

SEQ ID NO: 1112269 - DNA, 15 bp, Homo sapiens
ggagggacactggca

SEQ ID NO: 1112270 - DNA, 15 bp, Homo sapiens
tggagggacactggc

SEQ ID NO: 1112271 - DNA, 15 bp, Homo sapiens
gtggagggacactgg

SEQ ID NO: 1112272 - DNA, 15 bp, Homo sapiens
ggtggagggacactg

SEQ ID NO: 1112273 - DNA, 15 bp, Homo sapiens
gggtggagggacact

SEQ ID NO: 1112274 - DNA, 15 bp, Homo sapiens
agggtggagggacac

SEQ ID NO: 1112275 - DNA, 15 bp, Homo sapiens
cagggtggagggaca

SEQ ID NO: 1112276 - DNA, 15 bp, Homo sapiens
tcagggtggagggac

SEQ ID NO: 1112277 - DNA, 15 bp, Homo sapiens
ctcagggtggaggga

SEQ ID NO: 1112278 - DNA, 15 bp, Homo sapiens
actcagggtggaggg

SEQ ID NO: 1112279 - DNA, 15 bp, Homo sapiens
aactcagggtggagg

SEQ ID NO: 1112280 - DNA, 15 bp, Homo sapiens
caactcagggtggag

SEQ ID NO: 1112281 - DNA, 15 bp, Homo sapiens
acaactcagggtgga

SEQ ID NO: 1112282 - DNA, 15 bp, Homo sapiens
cacaactcagggtgg

SEQ ID NO: 1112283 - DNA, 15 bp, Homo sapiens
tcacaactcagggtg

SEQ ID NO: 1112284 - DNA, 15 bp, Homo sapiens
gtcacaactcagggt

SEQ ID NO: 1112285 - DNA, 15 bp, Homo sapiens
tgtcacaactcaggg

SEQ ID NO: 1112286 - DNA, 15 bp, Homo sapiens
ttgtcacaactcagg

SEQ ID NO: 1112287 - DNA, 15 bp, Homo sapiens
gttgtcacaactcag

SEQ ID NO: 1112288 - DNA, 15 bp, Homo sapiens
ggttgtcacaactca

SEQ ID NO: 1112289 - DNA, 15 bp, Homo sapiens
gggttgtcacaactc

SEQ ID NO: 1112290 - DNA, 15 bp, Homo sapiens
tgggttgtcacaact

SEQ ID NO: 1112291 - DNA, 15 bp, Homo sapiens
ctgggttgtcacaac

SEQ ID NO: 1112292 - DNA, 15 bp, Homo sapiens
tctgggttgtcacaa

SEQ ID NO: 1112293 - DNA, 15 bp, Homo sapiens
atctgggttgtcaca

SEQ ID NO: 1112294 - DNA, 15 bp, Homo sapiens
aatctgggttgtcac

SEQ ID NO: 1112295 - DNA, 15 bp, Homo sapiens
caatctgggttgtca

SEQ ID NO: 1112296 - DNA, 15 bp, Homo sapiens
acaatctgggttgtc

SEQ ID NO: 1112297 - DNA, 15 bp, Homo sapiens
gacaatctgggttgt

SEQ ID NO: 1112298 - DNA, 15 bp, Homo sapiens
agacaatctgggttg

SEQ ID NO: 1112299 - DNA, 15 bp, Homo sapiens
gagacaatctgggtt

SEQ ID NO: 1112300 - DNA, 15 bp, Homo sapiens
ggagacaatctgggt

SEQ ID NO: 1112301 - DNA, 15 bp, Homo sapiens
tggagacaatctggg

SEQ ID NO: 1112302 - DNA, 15 bp, Homo sapiens
ctggagacaatctgg

SEQ ID NO: 1112303 - DNA, 15 bp, Homo sapiens
tctggagacaatctg

SEQ ID NO: 1112304 - DNA, 15 bp, Homo sapiens
gtctggagacaatct

SEQ ID NO: 1112305 - DNA, 15 bp, Homo sapiens
tgtctggagacaatc

SEQ ID NO: 1112306 - DNA, 15 bp, Homo sapiens
gtgtctggagacaat

SEQ ID NO: 1112307 - DNA, 15 bp, Homo sapiens
agtgtctggagacaa

SEQ ID NO: 1112308 - DNA, 15 bp, Homo sapiens
gagtgtctggagaca

SEQ ID NO: 1112309 - DNA, 15 bp, Homo sapiens
ggagtgtctggagac

SEQ ID NO: 1112310 - DNA, 15 bp, Homo sapiens
aggagtgtctggaga

SEQ ID NO: 1112311 - DNA, 15 bp, Homo sapiens
taggagtgtctggag

SEQ ID NO: 1112312 - DNA, 15 bp, Homo sapiens
ttaggagtgtctgga

SEQ ID NO: 1112313 - DNA, 15 bp, Homo sapiens
tttaggagtgtctgg

SEQ ID NO: 1112314 - DNA, 15 bp, Homo sapiens
atttaggagtgtctg

SEQ ID NO: 1112315 - DNA, 15 bp, Homo sapiens
catttaggagtgtct

SEQ ID NO: 1112316 - DNA, 15 bp, Homo sapiens
acatttaggagtgtc

SEQ ID NO: 1112317 - DNA, 15 bp, Homo sapiens
gacatttaggagtgt

SEQ ID NO: 1112318 - DNA, 15 bp, Homo sapiens
ggacatttaggagtg

SEQ ID NO: 1112319 - DNA, 15 bp, Homo sapiens
gggacatttaggagt

SEQ ID NO: 1112320 - DNA, 15 bp, Homo sapiens
agggacatttaggag

SEQ ID NO: 1112321 - DNA, 15 bp, Homo sapiens
cagggacatttagga

SEQ ID NO: 1112322 - DNA, 15 bp, Homo sapiens
ccagggacatttagg

SEQ ID NO: 1112323 - DNA, 15 bp, Homo sapiens
gccagggacatttag

SEQ ID NO: 1112324 - DNA, 15 bp, Homo sapiens
ggccagggacattta

SEQ ID NO: 1112325 - DNA, 15 bp, Homo sapiens
cggccagggacattt

SEQ ID NO: 1112326 - DNA, 15 bp, Homo sapiens
ccggccagggacatt

SEQ ID NO: 1112327 - DNA, 15 bp, Homo sapiens
gccggccagggacat

SEQ ID NO: 1112328 - DNA, 15 bp, Homo sapiens
tgccggccagggaca

SEQ ID NO: 1112329 - DNA, 15 bp, Homo sapiens
ttgccggccagggac

SEQ ID NO: 1112330 - DNA, 15 bp, Homo sapiens
tttgccggccaggga

SEQ ID NO: 1112331 - DNA, 15 bp, Homo sapiens
ttttgccggccaggg

SEQ ID NO: 1112332 - DNA, 15 bp, Homo sapiens
attttgccggccagg

SEQ ID NO: 1112333 - DNA, 15 bp, Homo sapiens
aattttgccggccag

SEQ ID NO: 1112334 - DNA, 15 bp, Homo sapiens
caattttgccggcca

SEQ ID NO: 1112335 - DNA, 15 bp, Homo sapiens
gcaattttgccggcc

SEQ ID NO: 1112336 - DNA, 15 bp, Homo sapiens
ggcaattttgccggc

SEQ ID NO: 1112337 - DNA, 15 bp, Homo sapiens
cggcaattttgccgg

SEQ ID NO: 1112338 - DNA, 15 bp, Homo sapiens
gcggcaattttgccg

SEQ ID NO: 1112339 - DNA, 15 bp, Homo sapiens
agcggcaattttgcc

SEQ ID NO: 1112340 - DNA, 15 bp, Homo sapiens
cagcggcaattttgc

SEQ ID NO: 1112341 - DNA, 15 bp, Homo sapiens
gcagcggcaattttg

SEQ ID NO: 1112342 - DNA, 15 bp, Homo sapiens
agcagcggcaatttt

SEQ ID NO: 1112343 - DNA, 15 bp, Homo sapiens
gagcagcggcaattt

SEQ ID NO: 1112344 - DNA, 15 bp, Homo sapiens
tgagcagcggcaatt

SEQ ID NO: 1112345 - DNA, 15 bp, Homo sapiens
ttgagcagcggcaat

SEQ ID NO: 1112346 - DNA, 15 bp, Homo sapiens
cttgagcagcggcaa

SEQ ID NO: 1112347 - DNA, 15 bp, Homo sapiens
tcttgagcagcggca

SEQ ID NO: 1112348 - DNA, 15 bp, Homo sapiens
ttcttgagcagcggc

SEQ ID NO: 1112349 - DNA, 15 bp, Homo sapiens
attcttgagcagcgg

SEQ ID NO: 1112350 - DNA, 15 bp, Homo sapiens
gattcttgagcagcg

SEQ ID NO: 1112351 - DNA, 15 bp, Homo sapiens
tgattcttgagcagc

SEQ ID NO: 1112352 - DNA, 15 bp, Homo sapiens
gtgattcttgagcag

SEQ ID NO: 1112353 - DNA, 15 bp, Homo sapiens
cgtgattcttgagca

SEQ ID NO: 1112354 - DNA, 15 bp, Homo sapiens
ccgtgattcttgagc

SEQ ID NO: 1112355 - DNA, 15 bp, Homo sapiens
gccgtgattcttgag

SEQ ID NO: 1112356 - DNA, 15 bp, Homo sapiens
agccgtgattcttga

SEQ ID NO: 1112357 - DNA, 15 bp, Homo sapiens
aagccgtgattcttg

SEQ ID NO: 1112358 - DNA, 15 bp, Homo sapiens
aaagccgtgattctt

SEQ ID NO: 1112359 - DNA, 15 bp, Homo sapiens
caaagccgtgattct

SEQ ID NO: 1112360 - DNA, 15 bp, Homo sapiens
tcaaagccgtgattc

SEQ ID NO: 1112361 - DNA, 15 bp, Homo sapiens
gtcaaagccgtgatt

SEQ ID NO: 1112362 - DNA, 15 bp, Homo sapiens
cgtcaaagccgtgat

SEQ ID NO: 1112363 - DNA, 15 bp, Homo sapiens
tcgtcaaagccgtga

SEQ ID NO: 1112364 - DNA, 15 bp, Homo sapiens
atcgtcaaagccgtg

SEQ ID NO: 1112365 - DNA, 15 bp, Homo sapiens
aatcgtcaaagccgt

SEQ ID NO: 1112366 - DNA, 15 bp, Homo sapiens
taatcgtcaaagccg

SEQ ID NO: 1112367 - DNA, 15 bp, Homo sapiens
ctaatcgtcaaagcc

SEQ ID NO: 1112368 - DNA, 15 bp, Homo sapiens
tctaatcgtcaaagc

SEQ ID NO: 1112369 - DNA, 15 bp, Homo sapiens
gtctaatcgtcaaag

SEQ ID NO: 1112370 - DNA, 15 bp, Homo sapiens
agtctaatcgtcaaa

SEQ ID NO: 1112371 - DNA, 15 bp, Homo sapiens
aagtctaatcgtcaa

SEQ ID NO: 1112372 - DNA, 15 bp, Homo sapiens
aaagtctaatcgtca

SEQ ID NO: 1112373 - DNA, 15 bp, Homo sapiens
caaagtctaatcgtc

SEQ ID NO: 1112374 - DNA, 15 bp, Homo sapiens
acaaagtctaatcgt

SEQ ID NO: 1112375 - DNA, 15 bp, Homo sapiens
cacaaagtctaatcg

SEQ ID NO: 1112376 - DNA, 15 bp, Homo sapiens
tcacaaagtctaatc

SEQ ID NO: 1112377 - DNA, 15 bp, Homo sapiens
atcacaaagtctaat

SEQ ID NO: 1112378 - DNA, 15 bp, Homo sapiens
tatcacaaagtctaa

SEQ ID NO: 1112379 - DNA, 15 bp, Homo sapiens
atatcacaaagtcta

SEQ ID NO: 1112380 - DNA, 15 bp, Homo sapiens
aatatcacaaagtct

SEQ ID NO: 1112381 - DNA, 15 bp, Homo sapiens
aaatatcacaaagtc

SEQ ID NO: 1112382 - DNA, 15 bp, Homo sapiens
caaatatcacaaagt

SEQ ID NO: 1112383 - DNA, 15 bp, Homo sapiens
acaaatatcacaaag

SEQ ID NO: 1112384 - DNA, 15 bp, Homo sapiens
aacaaatatcacaaa

SEQ ID NO: 1112385 - DNA, 15 bp, Homo sapiens
aaacaaatatcacaa

SEQ ID NO: 1112386 - DNA, 15 bp, Homo sapiens
gaaacaaatatcaca

SEQ ID NO: 1112387 - DNA, 15 bp, Homo sapiens
tgaaacaaatatcac

SEQ ID NO: 1112388 - DNA, 15 bp, Homo sapiens
ctgaaacaaatatca

SEQ ID NO: 1112389 - DNA, 15 bp, Homo sapiens
actgaaacaaatatc

SEQ ID NO: 1112390 - DNA, 15 bp, Homo sapiens
gactgaaacaaatat

SEQ ID NO: 1112391 - DNA, 15 bp, Homo sapiens
agactgaaacaaata

SEQ ID NO: 1112392 - DNA, 15 bp, Homo sapiens
cagactgaaacaaat

SEQ ID NO: 1112393 - DNA, 15 bp, Homo sapiens
acagactgaaacaaa

SEQ ID NO: 1112394 - DNA, 15 bp, Homo sapiens
aacagactgaaacaa

SEQ ID NO: 1112395 - DNA, 15 bp, Homo sapiens
aaacagactgaaaca

SEQ ID NO: 1112396 - DNA, 15 bp, Homo sapiens
taaacagactgaaac

SEQ ID NO: 1112397 - DNA, 15 bp, Homo sapiens
ctaaacagactgaaa

SEQ ID NO: 1112398 - DNA, 15 bp, Homo sapiens
cctaaacagactgaa

SEQ ID NO: 1112399 - DNA, 15 bp, Homo sapiens
acctaaacagactga

SEQ ID NO: 1112400 - DNA, 15 bp, Homo sapiens
aacctaaacagactg

SEQ ID NO: 1112401 - DNA, 15 bp, Homo sapiens
aaacctaaacagact

SEQ ID NO: 1112402 - DNA, 15 bp, Homo sapiens
aaaacctaaacagac

SEQ ID NO: 1112403 - DNA, 15 bp, Homo sapiens
aaaaacctaaacaga

SEQ ID NO: 1112404 - DNA, 15 bp, Homo sapiens
aaaaaacctaaacag

SEQ ID NO: 1112405 - DNA, 15 bp, Homo sapiens
aaaaaaacctaaaca

SEQ ID NO: 1112406 - DNA, 15 bp, Homo sapiens
aaaaaaaacctaaac

SEQ ID NO: 1112407 - DNA, 15 bp, Homo sapiens
gaaaaaaaacctaaa

SEQ ID NO: 1112408 - DNA, 15 bp, Homo sapiens
agaaaaaaaacctaa

SEQ ID NO: 1112409 - DNA, 15 bp, Homo sapiens
aagaaaaaaaaccta

SEQ ID NO: 1112410 - DNA, 15 bp, Homo sapiens
gaagaaaaaaaacct

SEQ ID NO: 1112411 - DNA, 15 bp, Homo sapiens
agaagaaaaaaaacc

SEQ ID NO: 1112412 - DNA, 15 bp, Homo sapiens
tagaagaaaaaaaac

SEQ ID NO: 1112413 - DNA, 15 bp, Homo sapiens
gtagaagaaaaaaaa

SEQ ID NO: 1112414 - DNA, 15 bp, Homo sapiens
ggtagaagaaaaaaa

SEQ ID NO: 1112415 - DNA, 15 bp, Homo sapiens
aggtagaagaaaaaa

SEQ ID NO: 1112416 - DNA, 15 bp, Homo sapiens
caggtagaagaaaaa

SEQ ID NO: 1112417 - DNA, 15 bp, Homo sapiens
acaggtagaagaaaa

SEQ ID NO: 1112418 - DNA, 15 bp, Homo sapiens
tacaggtagaagaaa

SEQ ID NO: 1112419 - DNA, 15 bp, Homo sapiens
atacaggtagaagaa

SEQ ID NO: 1112420 - DNA, 15 bp, Homo sapiens
aatacaggtagaaga

SEQ ID NO: 1112421 - DNA, 15 bp, Homo sapiens
aaatacaggtagaag

SEQ ID NO: 1112422 - DNA, 15 bp, Homo sapiens
aaaatacaggtagaa

SEQ ID NO: 1112423 - DNA, 15 bp, Homo sapiens
aaaaatacaggtaga

SEQ ID NO: 1112424 - DNA, 15 bp, Homo sapiens
aaaaaatacaggtag

SEQ ID NO: 1112425 - DNA, 15 bp, Homo sapiens
aaaaaaatacaggta

SEQ ID NO: 1112426 - DNA, 15 bp, Homo sapiens
gaaaaaaatacaggt

SEQ ID NO: 1112427 - DNA, 15 bp, Homo sapiens
agaaaaaaatacagg

SEQ ID NO: 1112428 - DNA, 15 bp, Homo sapiens
cagaaaaaaatacag

SEQ ID NO: 1112429 - DNA, 15 bp, Homo sapiens
ccagaaaaaaataca

SEQ ID NO: 1112430 - DNA, 15 bp, Homo sapiens
accagaaaaaaatac

SEQ ID NO: 1112431 - DNA, 15 bp, Homo sapiens
aaccagaaaaaaata

SEQ ID NO: 1112432 - DNA, 15 bp, Homo sapiens
gaaccagaaaaaaat

SEQ ID NO: 1112433 - DNA, 15 bp, Homo sapiens
agaaccagaaaaaaa

SEQ ID NO: 1112434 - DNA, 15 bp, Homo sapiens
cagaaccagaaaaaa

SEQ ID NO: 1112435 - DNA, 15 bp, Homo sapiens
ccagaaccagaaaaa

SEQ ID NO: 1112436 - DNA, 15 bp, Homo sapiens
cccagaaccagaaaa

SEQ ID NO: 1112437 - DNA, 15 bp, Homo sapiens
acccagaaccagaaa

SEQ ID NO: 1112438 - DNA, 15 bp, Homo sapiens
cacccagaaccagaa

SEQ ID NO: 1112439 - DNA, 15 bp, Homo sapiens
ccacccagaaccaga

SEQ ID NO: 1112440 - DNA, 15 bp, Homo sapiens
accacccagaaccag

SEQ ID NO: 1112441 - DNA, 15 bp, Homo sapiens
aaccacccagaacca

SEQ ID NO: 1112442 - DNA, 15 bp, Homo sapiens
caaccacccagaacc

SEQ ID NO: 1112443 - DNA, 15 bp, Homo sapiens
acaaccacccagaac

SEQ ID NO: 1112444 - DNA, 15 bp, Homo sapiens
tacaaccacccagaa

SEQ ID NO: 1112445 - DNA, 15 bp, Homo sapiens
ttacaaccacccaga

SEQ ID NO: 1112446 - DNA, 15 bp, Homo sapiens
attacaaccacccag

SEQ ID NO: 1112447 - DNA, 15 bp, Homo sapiens
aattacaaccaccca

SEQ ID NO: 1112448 - DNA, 15 bp, Homo sapiens
taattacaaccaccc

SEQ ID NO: 1112449 - DNA, 15 bp, Homo sapiens
ctaattacaaccacc

SEQ ID NO: 1112450 - DNA, 15 bp, Homo sapiens
actaattacaaccac

SEQ ID NO: 1112451 - DNA, 15 bp, Homo sapiens
tactaattacaacca

SEQ ID NO: 1112452 - DNA, 15 bp, Homo sapiens
ctactaattacaacc

SEQ ID NO: 1112453 - DNA, 15 bp, Homo sapiens
cctactaattacaac

SEQ ID NO: 1112454 - DNA, 15 bp, Homo sapiens
acctactaattacaa

SEQ ID NO: 1112455 - DNA, 15 bp, Homo sapiens
aacctactaattaca

SEQ ID NO: 1112456 - DNA, 15 bp, Homo sapiens
taacctactaattac

SEQ ID NO: 1112457 - DNA, 15 bp, Homo sapiens
ataacctactaatta

SEQ ID NO: 1112458 - DNA, 15 bp, Homo sapiens
aataacctactaatt

SEQ ID NO: 1112459 - DNA, 15 bp, Homo sapiens
caataacctactaat

SEQ ID NO: 1112460 - DNA, 15 bp, Homo sapiens
tcaataacctactaa

SEQ ID NO: 1112461 - DNA, 15 bp, Homo sapiens
atcaataacctacta

SEQ ID NO: 1112462 - DNA, 15 bp, Homo sapiens
gatcaataacctact

SEQ ID NO: 1112463 - DNA, 15 bp, Homo sapiens
cgatcaataacctac

SEQ ID NO: 1112464 - DNA, 15 bp, Homo sapiens
tcgatcaataaccta

SEQ ID NO: 1112465 - DNA, 15 bp, Homo sapiens
atcgatcaataacct

SEQ ID NO: 1112466 - DNA, 15 bp, Homo sapiens
aatcgatcaataacc

SEQ ID NO: 1112467 - DNA, 15 bp, Homo sapiens
gaatcgatcaataac

SEQ ID NO: 1112468 - DNA, 15 bp, Homo sapiens
tgaatcgatcaataa

SEQ ID NO: 1112469 - DNA, 15 bp, Homo sapiens
gtgaatcgatcaata

SEQ ID NO: 1112470 - DNA, 15 bp, Homo sapiens
ggtgaatcgatcaat

SEQ ID NO: 1112471 - DNA, 15 bp, Homo sapiens
aggtgaatcgatcaa

SEQ ID NO: 1112472 - DNA, 15 bp, Homo sapiens
taggtgaatcgatca

SEQ ID NO: 1112473 - DNA, 15 bp, Homo sapiens
ttaggtgaatcgatc

SEQ ID NO: 1112474 - DNA, 15 bp, Homo sapiens
gttaggtgaatcgat

SEQ ID NO: 1112475 - DNA, 15 bp, Homo sapiens
tgttaggtgaatcga

SEQ ID NO: 1112476 - DNA, 15 bp, Homo sapiens
atgttaggtgaatcg

SEQ ID NO: 1112477 - DNA, 15 bp, Homo sapiens
aatgttaggtgaatc

SEQ ID NO: 1112478 - DNA, 15 bp, Homo sapiens
aaatgttaggtgaat

SEQ ID NO: 1112479 - DNA, 15 bp, Homo sapiens
gaaatgttaggtgaa

SEQ ID NO: 1112480 - DNA, 15 bp, Homo sapiens
tgaaatgttaggtga

SEQ ID NO: 1112481 - DNA, 15 bp, Homo sapiens
atgaaatgttaggtg

SEQ ID NO: 1112482 - DNA, 15 bp, Homo sapiens
catgaaatgttaggt

SEQ ID NO: 1112483 - DNA, 15 bp, Homo sapiens
tcatgaaatgttagg

SEQ ID NO: 1112484 - DNA, 15 bp, Homo sapiens
ttcatgaaatgttag

SEQ ID NO: 1112485 - DNA, 15 bp, Homo sapiens
tttcatgaaatgtta

SEQ ID NO: 1112486 - DNA, 15 bp, Homo sapiens
ctttcatgaaatgtt

SEQ ID NO: 1112487 - DNA, 15 bp, Homo sapiens
actttcatgaaatgt

SEQ ID NO: 1112488 - DNA, 15 bp, Homo sapiens
aactttcatgaaatg

SEQ ID NO: 1112489 - DNA, 15 bp, Homo sapiens
aaactttcatgaaat

SEQ ID NO: 1112490 - DNA, 15 bp, Homo sapiens
gaaactttcatgaaa

SEQ ID NO: 1112491 - DNA, 15 bp, Homo sapiens
tgaaactttcatgaa

SEQ ID NO: 1112492 - DNA, 15 bp, Homo sapiens
atgaaactttcatga

SEQ ID NO: 1112493 - DNA, 15 bp, Homo sapiens
catgaaactttcatg

SEQ ID NO: 1112494 - DNA, 15 bp, Homo sapiens
acatgaaactttcat

SEQ ID NO: 1112495 - DNA, 15 bp, Homo sapiens
cacatgaaactttca

SEQ ID NO: 1112496 - DNA, 15 bp, Homo sapiens
acacatgaaactttc

SEQ ID NO: 1112497 - DNA, 15 bp, Homo sapiens
cacacatgaaacttt

SEQ ID NO: 1112498 - DNA, 15 bp, Homo sapiens
acacacatgaaactt

SEQ ID NO: 1112499 - DNA, 15 bp, Homo sapiens
cacacacatgaaact

SEQ ID NO: 1112500 - DNA, 15 bp, Homo sapiens
acacacacatgaaac

SEQ ID NO: 1112501 - DNA, 15 bp, Homo sapiens
cacacacacatgaaa

SEQ ID NO: 1112502 - DNA, 15 bp, Homo sapiens
acacacacacatgaa

SEQ ID NO: 1112503 - DNA, 15 bp, Homo sapiens
gaaacacacacacac

SEQ ID NO: 1112504 - DNA, 15 bp, Homo sapiens
tgaaacacacacaca

SEQ ID NO: 1112505 - DNA, 15 bp, Homo sapiens
ttgaaacacacacac

SEQ ID NO: 1112506 - DNA, 15 bp, Homo sapiens
attgaaacacacaca

SEQ ID NO: 1112507 - DNA, 15 bp, Homo sapiens
tattgaaacacacac

SEQ ID NO: 1112508 - DNA, 15 bp, Homo sapiens
ctattgaaacacaca

SEQ ID NO: 1112509 - DNA, 15 bp, Homo sapiens
tctattgaaacacac

SEQ ID NO: 1112510 - DNA, 15 bp, Homo sapiens
ttctattgaaacaca

SEQ ID NO: 1112511 - DNA, 15 bp, Homo sapiens
cttctattgaaacac

SEQ ID NO: 1112512 - DNA, 15 bp, Homo sapiens
gcttctattgaaaca

SEQ ID NO: 1112513 - DNA, 15 bp, Homo sapiens
tgcttctattgaaac

SEQ ID NO: 1112514 - DNA, 15 bp, Homo sapiens
atgcttctattgaaa

SEQ ID NO: 1112515 - DNA, 15 bp, Homo sapiens
tatgcttctattgaa

SEQ ID NO: 1112516 - DNA, 15 bp, Homo sapiens
ttatgcttctattga

SEQ ID NO: 1112517 - DNA, 15 bp, Homo sapiens
tttatgcttctattg

SEQ ID NO: 1112518 - DNA, 15 bp, Homo sapiens
gtttatgcttctatt

SEQ ID NO: 1112519 - DNA, 15 bp, Homo sapiens
agtttatgcttctat

SEQ ID NO: 1112520 - DNA, 15 bp, Homo sapiens
tagtttatgcttcta

SEQ ID NO: 1112521 - DNA, 15 bp, Homo sapiens
atagtttatgcttct

SEQ ID NO: 1112522 - DNA, 15 bp, Homo sapiens
tatagtttatgcttc

SEQ ID NO: 1112523 - DNA, 15 bp, Homo sapiens
gtatagtttatgctt

SEQ ID NO: 1112524 - DNA, 15 bp, Homo sapiens
agtatagtttatgct

SEQ ID NO: 1112525 - DNA, 15 bp, Homo sapiens
gagtatagtttatgc

SEQ ID NO: 1112526 - DNA, 15 bp, Homo sapiens
ggagtatagtttatg

SEQ ID NO: 1112527 - DNA, 15 bp, Homo sapiens
gggagtatagtttat

SEQ ID NO: 1112528 - DNA, 15 bp, Homo sapiens
agggagtatagttta

SEQ ID NO: 1112529 - DNA, 15 bp, Homo sapiens
tagggagtatagttt

SEQ ID NO: 1112530 - DNA, 15 bp, Homo sapiens
ctagggagtatagtt

SEQ ID NO: 1112531 - DNA, 15 bp, Homo sapiens
actagggagtatagt

SEQ ID NO: 1112532 - DNA, 15 bp, Homo sapiens
gactagggagtatag

SEQ ID NO: 1112533 - DNA, 15 bp, Homo sapiens
agactagggagtata

SEQ ID NO: 1112534 - DNA, 15 bp, Homo sapiens
gagactagggagtat

SEQ ID NO: 1112535 - DNA, 15 bp, Homo sapiens
tgagactagggagta

SEQ ID NO: 1112536 - DNA, 15 bp, Homo sapiens
ttgagactagggagt

SEQ ID NO: 1112537 - DNA, 15 bp, Homo sapiens
cttgagactagggag

SEQ ID NO: 1112538 - DNA, 15 bp, Homo sapiens
tcttgagactaggga

SEQ ID NO: 1112539 - DNA, 15 bp, Homo sapiens
atcttgagactaggg

SEQ ID NO: 1112540 - DNA, 15 bp, Homo sapiens
tatcttgagactagg

SEQ ID NO: 1112541 - DNA, 15 bp, Homo sapiens
gtatcttgagactag

SEQ ID NO: 1112542 - DNA, 15 bp, Homo sapiens
tgtatcttgagacta

SEQ ID NO: 1112543 - DNA, 15 bp, Homo sapiens
gtgtatcttgagact

SEQ ID NO: 1112544 - DNA, 15 bp, Homo sapiens
tgtgtatcttgagac

SEQ ID NO: 1112545 - DNA, 15 bp, Homo sapiens
ctgtgtatcttgaga

SEQ ID NO: 1112546 - DNA, 15 bp, Homo sapiens
cctgtgtatcttgag

SEQ ID NO: 1112547 - DNA, 15 bp, Homo sapiens
tcctgtgtatcttga

SEQ ID NO: 1112548 - DNA, 15 bp, Homo sapiens
ttcctgtgtatcttg

SEQ ID NO: 1112549 - DNA, 15 bp, Homo sapiens
cttcctgtgtatctt

SEQ ID NO: 1112550 - DNA, 15 bp, Homo sapiens
ccttcctgtgtatct

SEQ ID NO: 1112551 - DNA, 15 bp, Homo sapiens
tccttcctgtgtatc

SEQ ID NO: 1112552 - DNA, 15 bp, Homo sapiens
ttccttcctgtgtat

SEQ ID NO: 1112553 - DNA, 15 bp, Homo sapiens
tttccttcctgtgta

SEQ ID NO: 1112554 - DNA, 15 bp, Homo sapiens
ttttccttcctgtgt

SEQ ID NO: 1112555 - DNA, 15 bp, Homo sapiens
attttccttcctgtg

SEQ ID NO: 1112556 - DNA, 15 bp, Homo sapiens
tattttccttcctgt

SEQ ID NO: 1112557 - DNA, 15 bp, Homo sapiens
ttattttccttcctg

SEQ ID NO: 1112558 - DNA, 15 bp, Homo sapiens
cttattttccttcct

SEQ ID NO: 1112559 - DNA, 15 bp, Homo sapiens
gcttattttccttcc

SEQ ID NO: 1112560 - DNA, 15 bp, Homo sapiens
tgcttattttccttc

SEQ ID NO: 1112561 - DNA, 15 bp, Homo sapiens
gtgcttattttcctt

SEQ ID NO: 1112562 - DNA, 15 bp, Homo sapiens
tgtgcttattttcct

SEQ ID NO: 1112563 - DNA, 15 bp, Homo sapiens
ttgtgcttattttcc

SEQ ID NO: 1112564 - DNA, 15 bp, Homo sapiens
tttgtgcttattttc

SEQ ID NO: 1112565 - DNA, 15 bp, Homo sapiens
atttgtgcttatttt

SEQ ID NO: 1112566 - DNA, 15 bp, Homo sapiens
catttgtgcttattt

SEQ ID NO: 1112567 - DNA, 15 bp, Homo sapiens
acatttgtgcttatt

SEQ ID NO: 1112568 - DNA, 15 bp, Homo sapiens
cacatttgtgcttat

SEQ ID NO: 1112569 - DNA, 15 bp, Homo sapiens
acacatttgtgctta

SEQ ID NO: 1112570 - DNA, 15 bp, Homo sapiens
gacacatttgtgctt

SEQ ID NO: 1112571 - DNA, 15 bp, Homo sapiens
tgacacatttgtgct

SEQ ID NO: 1112572 - DNA, 15 bp, Homo sapiens
gtgacacatttgtgc

SEQ ID NO: 1112573 - DNA, 15 bp, Homo sapiens
ggtgacacatttgtg

SEQ ID NO: 1112574 - DNA, 15 bp, Homo sapiens
tggtgacacatttgt

SEQ ID NO: 1112575 - DNA, 15 bp, Homo sapiens
ctggtgacacatttg

SEQ ID NO: 1112576 - DNA, 15 bp, Homo sapiens
cctggtgacacattt

SEQ ID NO: 1112577 - DNA, 15 bp, Homo sapiens
ccctggtgacacatt

SEQ ID NO: 1112578 - DNA, 15 bp, Homo sapiens
gccctggtgacacat

SEQ ID NO: 1112579 - DNA, 15 bp, Homo sapiens
tgccctggtgacaca

SEQ ID NO: 1112580 - DNA, 15 bp, Homo sapiens
gtgccctggtgacac

SEQ ID NO: 1112581 - DNA, 15 bp, Homo sapiens
tgtgccctggtgaca

SEQ ID NO: 1112582 - DNA, 15 bp, Homo sapiens
ctgtgccctggtgac

SEQ ID NO: 1112583 - DNA, 15 bp, Homo sapiens
tctgtgccctggtga

SEQ ID NO: 1112584 - DNA, 15 bp, Homo sapiens
gtctgtgccctggtg

SEQ ID NO: 1112585 - DNA, 15 bp, Homo sapiens
agtctgtgccctggt

SEQ ID NO: 1112586 - DNA, 15 bp, Homo sapiens
tagtctgtgccctgg

SEQ ID NO: 1112587 - DNA, 15 bp, Homo sapiens
ctagtctgtgccctg

SEQ ID NO: 1112588 - DNA, 15 bp, Homo sapiens
actagtctgtgccct

SEQ ID NO: 1112589 - DNA, 15 bp, Homo sapiens
tactagtctgtgccc

SEQ ID NO: 1112590 - DNA, 15 bp, Homo sapiens
gtactagtctgtgcc

SEQ ID NO: 1112591 - DNA, 15 bp, Homo sapiens
agtactagtctgtgc

SEQ ID NO: 1112592 - DNA, 15 bp, Homo sapiens
tagtactagtctgtg

SEQ ID NO: 1112593 - DNA, 15 bp, Homo sapiens
ctagtactagtctgt

SEQ ID NO: 1112594 - DNA, 15 bp, Homo sapiens
cctagtactagtctg

SEQ ID NO: 1112595 - DNA, 15 bp, Homo sapiens
acctagtactagtct

SEQ ID NO: 1112596 - DNA, 15 bp, Homo sapiens
gacctagtactagtc

SEQ ID NO: 1112597 - DNA, 15 bp, Homo sapiens
ggacctagtactagt

SEQ ID NO: 1112598 - DNA, 15 bp, Homo sapiens
aggacctagtactag

SEQ ID NO: 1112599 - DNA, 15 bp, Homo sapiens
gaggacctagtacta

SEQ ID NO: 1112600 - DNA, 15 bp, Homo sapiens
tgaggacctagtact

SEQ ID NO: 1112601 - DNA, 15 bp, Homo sapiens
ctgaggacctagtac

SEQ ID NO: 1112602 - DNA, 15 bp, Homo sapiens
gctgaggacctagta

SEQ ID NO: 1112603 - DNA, 15 bp, Homo sapiens
tgctgaggacctagt

SEQ ID NO: 1112604 - DNA, 15 bp, Homo sapiens
ctgctgaggacctag

SEQ ID NO: 1112605 - DNA, 15 bp, Homo sapiens
cctgctgaggaccta

SEQ ID NO: 1112606 - DNA, 15 bp, Homo sapiens
gcctgctgaggacct

SEQ ID NO: 1112607 - DNA, 15 bp, Homo sapiens
ggcctgctgaggacc

SEQ ID NO: 1112608 - DNA, 15 bp, Homo sapiens
tggcctgctgaggac

SEQ ID NO: 1112609 - DNA, 15 bp, Homo sapiens
ctggcctgctgagga

SEQ ID NO: 1112610 - DNA, 15 bp, Homo sapiens
cctggcctgctgagg

SEQ ID NO: 1112611 - DNA, 15 bp, Homo sapiens
acctggcctgctgag

SEQ ID NO: 1112612 - DNA, 15 bp, Homo sapiens
cacctggcctgctga

SEQ ID NO: 1112613 - DNA, 15 bp, Homo sapiens
acacctggcctgctg

SEQ ID NO: 1112614 - DNA, 15 bp, Homo sapiens
gacacctggcctgct

SEQ ID NO: 1112615 - DNA, 15 bp, Homo sapiens
agacacctggcctgc

SEQ ID NO: 1112616 - DNA, 15 bp, Homo sapiens
aagacacctggcctg

SEQ ID NO: 1112617 - DNA, 15 bp, Homo sapiens
taagacacctggcct

SEQ ID NO: 1112618 - DNA, 15 bp, Homo sapiens
ataagacacctggcc

SEQ ID NO: 1112619 - DNA, 15 bp, Homo sapiens
gataagacacctggc

SEQ ID NO: 1112620 - DNA, 15 bp, Homo sapiens
ggataagacacctgg

SEQ ID NO: 1112621 - DNA, 15 bp, Homo sapiens
cggataagacacctg

SEQ ID NO: 1112622 - DNA, 15 bp, Homo sapiens
gcggataagacacct

SEQ ID NO: 1112623 - DNA, 15 bp, Homo sapiens
agcggataagacacc

SEQ ID NO: 1112624 - DNA, 15 bp, Homo sapiens
cagcggataagacac

SEQ ID NO: 1112625 - DNA, 15 bp, Homo sapiens
acagcggataagaca

SEQ ID NO: 1112626 - DNA, 15 bp, Homo sapiens
gacagcggataagac

SEQ ID NO: 1112627 - DNA, 15 bp, Homo sapiens
agacagcggataaga

SEQ ID NO: 1112628 - DNA, 15 bp, Homo sapiens
cagacagcggataag

SEQ ID NO: 1112629 - DNA, 15 bp, Homo sapiens
ccagacagcggataa

SEQ ID NO: 1112630 - DNA, 15 bp, Homo sapiens
cccagacagcggata

SEQ ID NO: 1112631 - DNA, 15 bp, Homo sapiens
acccagacagcggat

SEQ ID NO: 1112632 - DNA, 15 bp, Homo sapiens
gacccagacagcgga

SEQ ID NO: 1112633 - DNA, 15 bp, Homo sapiens
agacccagacagcgg

SEQ ID NO: 1112634 - DNA, 15 bp, Homo sapiens
cagacccagacagcg

SEQ ID NO: 1112635 - DNA, 15 bp, Homo sapiens
gcagacccagacagc

SEQ ID NO: 1112636 - DNA, 15 bp, Homo sapiens
agcagacccagacag

SEQ ID NO: 1112637 - DNA, 15 bp, Homo sapiens
gagcagacccagaca

SEQ ID NO: 1112638 - DNA, 15 bp, Homo sapiens
tagagcagacccaga

SEQ ID NO: 1112639 - DNA, 15 bp, Homo sapiens
ctagagcagacccag

SEQ ID NO: 1112640 - DNA, 15 bp, Homo sapiens
gctagagcagaccca

SEQ ID NO: 1112641 - DNA, 15 bp, Homo sapiens
agctagagcagaccc

SEQ ID NO: 1112642 - DNA, 15 bp, Homo sapiens
gagctagagcagacc

SEQ ID NO: 1112643 - DNA, 15 bp, Homo sapiens
ggagctagagcagac

SEQ ID NO: 1112644 - DNA, 15 bp, Homo sapiens
tggagctagagcaga

SEQ ID NO: 1112645 - DNA, 15 bp, Homo sapiens
ctggagctagagcag

SEQ ID NO: 1112646 - DNA, 15 bp, Homo sapiens
cctggagctagagca

SEQ ID NO: 1112647 - DNA, 15 bp, Homo sapiens
gcctggagctagagc

SEQ ID NO: 1112648 - DNA, 15 bp, Homo sapiens
agcctggagctagag

SEQ ID NO: 1112649 - DNA, 15 bp, Homo sapiens
aagcctggagctaga

SEQ ID NO: 1112650 - DNA, 15 bp, Homo sapiens
taagcctggagctag

SEQ ID NO: 1112651 - DNA, 15 bp, Homo sapiens
ctaagcctggagcta

SEQ ID NO: 1112652 - DNA, 15 bp, Homo sapiens
tctaagcctggagct

SEQ ID NO: 1112653 - DNA, 15 bp, Homo sapiens
ttctaagcctggagc

SEQ ID NO: 1112654 - DNA, 15 bp, Homo sapiens
gttctaagcctggag

SEQ ID NO: 1112655 - DNA, 15 bp, Homo sapiens
ggttctaagcctgga

SEQ ID NO: 1112656 - DNA, 15 bp, Homo sapiens
gggttctaagcctgg

SEQ ID NO: 1112657 - DNA, 15 bp, Homo sapiens
ggggttctaagcctg

SEQ ID NO: 1112658 - DNA, 15 bp, Homo sapiens
aggggttctaagcct

SEQ ID NO: 1112659 - DNA, 15 bp, Homo sapiens
caggggttctaagcc

SEQ ID NO: 1112660 - DNA, 15 bp, Homo sapiens
gcaggggttctaagc

SEQ ID NO: 1112661 - DNA, 15 bp, Homo sapiens
ggcaggggttctaag

SEQ ID NO: 1112662 - DNA, 15 bp, Homo sapiens
tggcaggggttctaa

SEQ ID NO: 1112663 - DNA, 15 bp, Homo sapiens
gtggcaggggttcta

SEQ ID NO: 1112664 - DNA, 15 bp, Homo sapiens
tgtggcaggggttct

SEQ ID NO: 1112665 - DNA, 15 bp, Homo sapiens
gtgtggcaggggttc

SEQ ID NO: 1112666 - DNA, 15 bp, Homo sapiens
cgtgtggcaggggtt

SEQ ID NO: 1112667 - DNA, 15 bp, Homo sapiens
tcgtgtggcaggggt

SEQ ID NO: 1112668 - DNA, 15 bp, Homo sapiens
gtcgtgtggcagggg

SEQ ID NO: 1112669 - DNA, 15 bp, Homo sapiens
agtcgtgtggcaggg

SEQ ID NO: 1112670 - DNA, 15 bp, Homo sapiens
gagtcgtgtggcagg

SEQ ID NO: 1112671 - DNA, 15 bp, Homo sapiens
ggagtcgtgtggcag

SEQ ID NO: 1112672 - DNA, 15 bp, Homo sapiens
tggagtcgtgtggca

SEQ ID NO: 1112673 - DNA, 15 bp, Homo sapiens
gtggagtcgtgtggc

SEQ ID NO: 1112674 - DNA, 15 bp, Homo sapiens
tgtggagtcgtgtgg

SEQ ID NO: 1112675 - DNA, 15 bp, Homo sapiens
ctgtggagtcgtgtg

SEQ ID NO: 1112676 - DNA, 15 bp, Homo sapiens
gctgtggagtcgtgt

SEQ ID NO: 1112677 - DNA, 15 bp, Homo sapiens
agctgtggagtcgtg

SEQ ID NO: 1112678 - DNA, 15 bp, Homo sapiens
gagctgtggagtcgt

SEQ ID NO: 1112679 - DNA, 15 bp, Homo sapiens
cgagctgtggagtcg

SEQ ID NO: 1112680 - DNA, 15 bp, Homo sapiens
ccgagctgtggagtc

SEQ ID NO: 1112681 - DNA, 15 bp, Homo sapiens
accgagctgtggagt

SEQ ID NO: 1112682 - DNA, 15 bp, Homo sapiens
aaccgagctgtggag

SEQ ID NO: 1112683 - DNA, 15 bp, Homo sapiens
caaccgagctgtgga

SEQ ID NO: 1112684 - DNA, 15 bp, Homo sapiens
ccaaccgagctgtgg

SEQ ID NO: 1112685 - DNA, 15 bp, Homo sapiens
gccaaccgagctgtg

SEQ ID NO: 1112686 - DNA, 15 bp, Homo sapiens
tgccaaccgagctgt

SEQ ID NO: 1112687 - DNA, 15 bp, Homo sapiens
gtgccaaccgagctg

SEQ ID NO: 1112688 - DNA, 15 bp, Homo sapiens
ggtgccaaccgagct

SEQ ID NO: 1112689 - DNA, 15 bp, Homo sapiens
gggtgccaaccgagc

SEQ ID NO: 1112690 - DNA, 15 bp, Homo sapiens
agggtgccaaccgag

SEQ ID NO: 1112691 - DNA, 15 bp, Homo sapiens
aagggtgccaaccga

SEQ ID NO: 1112692 - DNA, 15 bp, Homo sapiens
aaagggtgccaaccg

SEQ ID NO: 1112693 - DNA, 15 bp, Homo sapiens
gaaagggtgccaacc

SEQ ID NO: 1112694 - DNA, 15 bp, Homo sapiens
ggaaagggtgccaac

SEQ ID NO: 1112695 - DNA, 15 bp, Homo sapiens
gggaaagggtgccaa

SEQ ID NO: 1112696 - DNA, 15 bp, Homo sapiens
agggaaagggtgcca

SEQ ID NO: 1112697 - DNA, 15 bp, Homo sapiens
gagggaaagggtgcc

SEQ ID NO: 1112698 - DNA, 15 bp, Homo sapiens
ggagggaaagggtgc

SEQ ID NO: 1112699 - DNA, 15 bp, Homo sapiens
aggagggaaagggtg

SEQ ID NO: 1112700 - DNA, 15 bp, Homo sapiens
gaggagggaaagggt

SEQ ID NO: 1112701 - DNA, 15 bp, Homo sapiens
ggaggagggaaaggg

SEQ ID NO: 1112702 - DNA, 15 bp, Homo sapiens
cggaggagggaaagg

SEQ ID NO: 1112703 - DNA, 15 bp, Homo sapiens
tcggaggagggaaag

SEQ ID NO: 1112704 - DNA, 15 bp, Homo sapiens
gtcggaggagggaaa

SEQ ID NO: 1112705 - DNA, 15 bp, Homo sapiens
agtcggaggagggaa

SEQ ID NO: 1112706 - DNA, 15 bp, Homo sapiens
aagtcggaggaggga

SEQ ID NO: 1112707 - DNA, 15 bp, Homo sapiens
gaagtcggaggaggg

SEQ ID NO: 1112708 - DNA, 15 bp, Homo sapiens
agaagtcggaggagg

SEQ ID NO: 1112709 - DNA, 15 bp, Homo sapiens
cagaagtcggaggag

SEQ ID NO: 1112710 - DNA, 15 bp, Homo sapiens
gcagaagtcggagga

SEQ ID NO: 1112711 - DNA, 15 bp, Homo sapiens
agcagaagtcggagg

SEQ ID NO: 1112712 - DNA, 15 bp, Homo sapiens
cagcagaagtcggag

SEQ ID NO: 1112713 - DNA, 15 bp, Homo sapiens
gcagcagaagtcgga

SEQ ID NO: 1112714 - DNA, 15 bp, Homo sapiens
ggcagcagaagtcgg

SEQ ID NO: 1112715 - DNA, 15 bp, Homo sapiens
aggcagcagaagtcg

SEQ ID NO: 1112716 - DNA, 15 bp, Homo sapiens
gaggcagcagaagtc

SEQ ID NO: 1112717 - DNA, 15 bp, Homo sapiens
cgaggcagcagaagt

SEQ ID NO: 1112718 - DNA, 15 bp, Homo sapiens
tcgaggcagcagaag

SEQ ID NO: 1112719 - DNA, 15 bp, Homo sapiens
ctcgaggcagcagaa

SEQ ID NO: 1112720 - DNA, 15 bp, Homo sapiens
gctcgaggcagcaga

SEQ ID NO: 1112721 - DNA, 15 bp, Homo sapiens
agctcgaggcagcag

SEQ ID NO: 1112722 - DNA, 15 bp, Homo sapiens
aagctcgaggcagca

SEQ ID NO: 1112723 - DNA, 15 bp, Homo sapiens
caagctcgaggcagc

SEQ ID NO: 1112724 - DNA, 15 bp, Homo sapiens
ccaagctcgaggcag

SEQ ID NO: 1112725 - DNA, 15 bp, Homo sapiens
accaagctcgaggca

SEQ ID NO: 1112726 - DNA, 15 bp, Homo sapiens
aaccaagctcgaggc

SEQ ID NO: 1112727 - DNA, 15 bp, Homo sapiens
taaccaagctcgagg

SEQ ID NO: 1112728 - DNA, 15 bp, Homo sapiens
ctaaccaagctcgag

SEQ ID NO: 1112729 - DNA, 15 bp, Homo sapiens
gctaaccaagctcga

SEQ ID NO: 1112730 - DNA, 15 bp, Homo sapiens
ggctaaccaagctcg

SEQ ID NO: 1112731 - DNA, 15 bp, Homo sapiens
tggctaaccaagctc

SEQ ID NO: 1112732 - DNA, 15 bp, Homo sapiens
atggctaaccaagct

SEQ ID NO: 1112733 - DNA, 15 bp, Homo sapiens
gatggctaaccaagc

SEQ ID NO: 1112734 - DNA, 15 bp, Homo sapiens
ggatggctaaccaag

SEQ ID NO: 1112735 - DNA, 15 bp, Homo sapiens
gggatggctaaccaa

SEQ ID NO: 1112736 - DNA, 15 bp, Homo sapiens
ggggatggctaacca

SEQ ID NO: 1112737 - DNA, 15 bp, Homo sapiens
gggggatggctaacc

SEQ ID NO: 1112738 - DNA, 15 bp, Homo sapiens
agggggatggctaac

SEQ ID NO: 1112739 - DNA, 15 bp, Homo sapiens
cagggggatggctaa

SEQ ID NO: 1112740 - DNA, 15 bp, Homo sapiens
gcagggggatggcta

SEQ ID NO: 1112741 - DNA, 15 bp, Homo sapiens
ggcagggggatggct

SEQ ID NO: 1112742 - DNA, 15 bp, Homo sapiens
gggcagggggatggc

SEQ ID NO: 1112743 - DNA, 15 bp, Homo sapiens
ggggcagggggatgg

SEQ ID NO: 1112744 - DNA, 15 bp, Homo sapiens
aggggcagggggatg

SEQ ID NO: 1112745 - DNA, 15 bp, Homo sapiens
caggggcagggggat

SEQ ID NO: 1112746 - DNA, 15 bp, Homo sapiens
gcaggggcaggggga

SEQ ID NO: 1112747 - DNA, 15 bp, Homo sapiens
ggcaggggcaggggg

SEQ ID NO: 1112748 - DNA, 15 bp, Homo sapiens
aggcaggggcagggg

SEQ ID NO: 1112749 - DNA, 15 bp, Homo sapiens
gaggcaggggcaggg

SEQ ID NO: 1112750 - DNA, 15 bp, Homo sapiens
tgaggcaggggcagg

SEQ ID NO: 1112751 - DNA, 15 bp, Homo sapiens
atgaggcaggggcag

SEQ ID NO: 1112752 - DNA, 15 bp, Homo sapiens
gatgaggcaggggca

SEQ ID NO: 1112753 - DNA, 15 bp, Homo sapiens
ggatgaggcaggggc

SEQ ID NO: 1112754 - DNA, 15 bp, Homo sapiens
aggatgaggcagggg

SEQ ID NO: 1112755 - DNA, 15 bp, Homo sapiens
gaggatgaggcaggg

SEQ ID NO: 1112756 - DNA, 15 bp, Homo sapiens
tgaggatgaggcagg

SEQ ID NO: 1112757 - DNA, 15 bp, Homo sapiens
ctgaggatgaggcag

SEQ ID NO: 1112758 - DNA, 15 bp, Homo sapiens
gctgaggatgaggca

SEQ ID NO: 1112759 - DNA, 15 bp, Homo sapiens
agctgaggatgaggc

SEQ ID NO: 1112760 - DNA, 15 bp, Homo sapiens
gagctgaggatgagg

SEQ ID NO: 1112761 - DNA, 15 bp, Homo sapiens
ggagctgaggatgag

SEQ ID NO: 1112762 - DNA, 15 bp, Homo sapiens
tggagctgaggatga

SEQ ID NO: 1112763 - DNA, 15 bp, Homo sapiens
ctggagctgaggatg

SEQ ID NO: 1112764 - DNA, 15 bp, Homo sapiens
actggagctgaggat

SEQ ID NO: 1112765 - DNA, 15 bp, Homo sapiens
aactggagctgagga

SEQ ID NO: 1112766 - DNA, 15 bp, Homo sapiens
gaactggagctgagg

SEQ ID NO: 1112767 - DNA, 15 bp, Homo sapiens
ggaactggagctgag

SEQ ID NO: 1112768 - DNA, 15 bp, Homo sapiens
aggaactggagctga

SEQ ID NO: 1112769 - DNA, 15 bp, Homo sapiens
aaggaactggagctg

SEQ ID NO: 1112770 - DNA, 15 bp, Homo sapiens
caaggaactggagct

SEQ ID NO: 1112771 - DNA, 15 bp, Homo sapiens
gcaaggaactggagc

SEQ ID NO: 1112772 - DNA, 15 bp, Homo sapiens
agcaaggaactggag

SEQ ID NO: 1112773 - DNA, 15 bp, Homo sapiens
gagcaaggaactgga

SEQ ID NO: 1112774 - DNA, 15 bp, Homo sapiens
tgagcaaggaactgg

SEQ ID NO: 1112775 - DNA, 15 bp, Homo sapiens
ctgagcaaggaactg

SEQ ID NO: 1112776 - DNA, 15 bp, Homo sapiens
cctgagcaaggaact

SEQ ID NO: 1112777 - DNA, 15 bp, Homo sapiens
gcctgagcaaggaac

SEQ ID NO: 1112778 - DNA, 15 bp, Homo sapiens
agcctgagcaaggaa

SEQ ID NO: 1112779 - DNA, 15 bp, Homo sapiens
cagcctgagcaagga

SEQ ID NO: 1112780 - DNA, 15 bp, Homo sapiens
gcagcctgagcaagg

SEQ ID NO: 1112781 - DNA, 15 bp, Homo sapiens
tgcagcctgagcaag

SEQ ID NO: 1112782 - DNA, 15 bp, Homo sapiens
ctgcagcctgagcaa

SEQ ID NO: 1112783 - DNA, 15 bp, Homo sapiens
gctgcagcctgagca

SEQ ID NO: 1112784 - DNA, 15 bp, Homo sapiens
tgctgcagcctgagc

SEQ ID NO: 1112785 - DNA, 15 bp, Homo sapiens
ctgctgcagcctgag

SEQ ID NO: 1112786 - DNA, 15 bp, Homo sapiens
actgctgcagcctga

SEQ ID NO: 1112787 - DNA, 15 bp, Homo sapiens
gactgctgcagcctg

SEQ ID NO: 1112788 - DNA, 15 bp, Homo sapiens
agactgctgcagcct

SEQ ID NO: 1112789 - DNA, 15 bp, Homo sapiens
gagactgctgcagcc

SEQ ID NO: 1112790 - DNA, 15 bp, Homo sapiens
ggagactgctgcagc

SEQ ID NO: 1112791 - DNA, 15 bp, Homo sapiens
tggagactgctgcag

SEQ ID NO: 1112792 - DNA, 15 bp, Homo sapiens
atggagactgctgca

SEQ ID NO: 1112793 - DNA, 15 bp, Homo sapiens
gatggagactgctgc

SEQ ID NO: 1112794 - DNA, 15 bp, Homo sapiens
ggatggagactgctg

SEQ ID NO: 1112795 - DNA, 15 bp, Homo sapiens
gggatggagactgct

SEQ ID NO: 1112796 - DNA, 15 bp, Homo sapiens
ggggatggagactgc

SEQ ID NO: 1112797 - DNA, 15 bp, Homo sapiens
aggggatggagactg

SEQ ID NO: 1112798 - DNA, 15 bp, Homo sapiens
caggggatggagact

SEQ ID NO: 1112799 - DNA, 15 bp, Homo sapiens
acaggggatggagac

SEQ ID NO: 1112800 - DNA, 15 bp, Homo sapiens
cacaggggatggaga

SEQ ID NO: 1112801 - DNA, 15 bp, Homo sapiens
gcacaggggatggag

SEQ ID NO: 1112802 - DNA, 15 bp, Homo sapiens
tgcacaggggatgga

SEQ ID NO: 1112803 - DNA, 15 bp, Homo sapiens
ctgcacaggggatgg

SEQ ID NO: 1112804 - DNA, 15 bp, Homo sapiens
tctgcacaggggatg

SEQ ID NO: 1112805 - DNA, 15 bp, Homo sapiens
gtctgcacaggggat

SEQ ID NO: 1112806 - DNA, 15 bp, Homo sapiens
tgtctgcacagggga

SEQ ID NO: 1112807 - DNA, 15 bp, Homo sapiens
gtgtctgcacagggg

SEQ ID NO: 1112808 - DNA, 15 bp, Homo sapiens
agtgtctgcacaggg

SEQ ID NO: 1112809 - DNA, 15 bp, Homo sapiens
cagtgtctgcacagg

SEQ ID NO: 1112810 - DNA, 15 bp, Homo sapiens
gcagtgtctgcacag

SEQ ID NO: 1112811 - DNA, 15 bp, Homo sapiens
ggcagtgtctgcaca

SEQ ID NO: 1112812 - DNA, 15 bp, Homo sapiens
cggcagtgtctgcac

SEQ ID NO: 1112813 - DNA, 15 bp, Homo sapiens
acggcagtgtctgca

SEQ ID NO: 1112814 - DNA, 15 bp, Homo sapiens
aacggcagtgtctgc

SEQ ID NO: 1112815 - DNA, 15 bp, Homo sapiens
gaacggcagtgtctg

SEQ ID NO: 1112816 - DNA, 15 bp, Homo sapiens
ggaacggcagtgtct

SEQ ID NO: 1112817 - DNA, 15 bp, Homo sapiens
aggaacggcagtgtc

SEQ ID NO: 1112818 - DNA, 15 bp, Homo sapiens
gaggaacggcagtgt

SEQ ID NO: 1112819 - DNA, 15 bp, Homo sapiens
ggaggaacggcagtg

SEQ ID NO: 1112820 - DNA, 15 bp, Homo sapiens
tggaggaacggcagt

SEQ ID NO: 1112821 - DNA, 15 bp, Homo sapiens
gtggaggaacggcag

SEQ ID NO: 1112822 - DNA, 15 bp, Homo sapiens
cgtggaggaacggca

SEQ ID NO: 1112823 - DNA, 15 bp, Homo sapiens
ccgtggaggaacggc

SEQ ID NO: 1112824 - DNA, 15 bp, Homo sapiens
gccgtggaggaacgg

SEQ ID NO: 1112825 - DNA, 15 bp, Homo sapiens
ggccgtggaggaacg

SEQ ID NO: 1112826 - DNA, 15 bp, Homo sapiens
gggccgtggaggaac

SEQ ID NO: 1112827 - DNA, 15 bp, Homo sapiens
tgggccgtggaggaa

SEQ ID NO: 1112828 - DNA, 15 bp, Homo sapiens
ctgggccgtggagga

SEQ ID NO: 1112829 - DNA, 15 bp, Homo sapiens
actgggccgtggagg

SEQ ID NO: 1112830 - DNA, 15 bp, Homo sapiens
tactgggccgtggag

SEQ ID NO: 1112831 - DNA, 15 bp, Homo sapiens
atactgggccgtgga

SEQ ID NO: 1112832 - DNA, 15 bp, Homo sapiens
tgatactgggccgtg

SEQ ID NO: 1112833 - DNA, 15 bp, Homo sapiens
ctgatactgggccgt

SEQ ID NO: 1112834 - DNA, 15 bp, Homo sapiens
cctgatactgggccg

SEQ ID NO: 1112835 - DNA, 15 bp, Homo sapiens
gcctgatactgggcc

SEQ ID NO: 1112836 - DNA, 15 bp, Homo sapiens
agcctgatactgggc

SEQ ID NO: 1112837 - DNA, 15 bp, Homo sapiens
aagcctgatactggg

SEQ ID NO: 1112838 - DNA, 15 bp, Homo sapiens
aaagcctgatactgg

SEQ ID NO: 1112839 - DNA, 15 bp, Homo sapiens
gaaagcctgatactg

SEQ ID NO: 1112840 - DNA, 15 bp, Homo sapiens
ggaaagcctgatact

SEQ ID NO: 1112841 - DNA, 15 bp, Homo sapiens
gggaaagcctgatac

SEQ ID NO: 1112842 - DNA, 15 bp, Homo sapiens
agggaaagcctgata

SEQ ID NO: 1112843 - DNA, 15 bp, Homo sapiens
cagggaaagcctgat

SEQ ID NO: 1112844 - DNA, 15 bp, Homo sapiens
ccagggaaagcctga

SEQ ID NO: 1112845 - DNA, 15 bp, Homo sapiens
cccagggaaagcctg

SEQ ID NO: 1112846 - DNA, 15 bp, Homo sapiens
gcccagggaaagcct

SEQ ID NO: 1112847 - DNA, 15 bp, Homo sapiens
ggcccagggaaagcc

SEQ ID NO: 1112848 - DNA, 15 bp, Homo sapiens
aggcccagggaaagc

SEQ ID NO: 1112849 - DNA, 15 bp, Homo sapiens
gaggcccagggaaag

SEQ ID NO: 1112850 - DNA, 15 bp, Homo sapiens
agaggcccagggaaa

SEQ ID NO: 1112851 - DNA, 15 bp, Homo sapiens
gagaggcccagggaa

SEQ ID NO: 1112852 - DNA, 15 bp, Homo sapiens
ggagaggcccaggga

SEQ ID NO: 1112853 - DNA, 15 bp, Homo sapiens
aggagaggcccaggg

SEQ ID NO: 1112854 - DNA, 15 bp, Homo sapiens
gaggagaggcccagg

SEQ ID NO: 1112855 - DNA, 15 bp, Homo sapiens
agaggagaggcccag

SEQ ID NO: 1112856 - DNA, 15 bp, Homo sapiens
gagaggagaggccca

SEQ ID NO: 1112857 - DNA, 15 bp, Homo sapiens
agagaggagaggccc

SEQ ID NO: 1112858 - DNA, 15 bp, Homo sapiens
gagagaggagaggcc

SEQ ID NO: 1112859 - DNA, 15 bp, Homo sapiens
ggagagaggagaggc

SEQ ID NO: 1112860 - DNA, 15 bp, Homo sapiens
aggagagaggagagg

SEQ ID NO: 1112861 - DNA, 15 bp, Homo sapiens
caggagagaggagag

SEQ ID NO: 1112862 - DNA, 15 bp, Homo sapiens
ccaggagagaggaga

SEQ ID NO: 1112863 - DNA, 15 bp, Homo sapiens
gccaggagagaggag

SEQ ID NO: 1112864 - DNA, 15 bp, Homo sapiens
ggccaggagagagga

SEQ ID NO: 1112865 - DNA, 15 bp, Homo sapiens
gggccaggagagagg

SEQ ID NO: 1112866 - DNA, 15 bp, Homo sapiens
tgggccaggagagag

SEQ ID NO: 1112867 - DNA, 15 bp, Homo sapiens
atgggccaggagaga

SEQ ID NO: 1112868 - DNA, 15 bp, Homo sapiens
gatgggccaggagag

SEQ ID NO: 1112869 - DNA, 15 bp, Homo sapiens
agatgggccaggaga

SEQ ID NO: 1112870 - DNA, 15 bp, Homo sapiens
gagatgggccaggag

SEQ ID NO: 1112871 - DNA, 15 bp, Homo sapiens
ggagatgggccagga

SEQ ID NO: 1112872 - DNA, 15 bp, Homo sapiens
gggagatgggccagg

SEQ ID NO: 1112873 - DNA, 15 bp, Homo sapiens
tgggagatgggccag

SEQ ID NO: 1112874 - DNA, 15 bp, Homo sapiens
atgggagatgggcca

SEQ ID NO: 1112875 - DNA, 15 bp, Homo sapiens
gatgggagatgggcc

SEQ ID NO: 1112876 - DNA, 15 bp, Homo sapiens
tgatgggagatgggc

SEQ ID NO: 1112877 - DNA, 15 bp, Homo sapiens
atgatgggagatggg

SEQ ID NO: 1112878 - DNA, 15 bp, Homo sapiens
gatgatgggagatgg

SEQ ID NO: 1112879 - DNA, 15 bp, Homo sapiens
ggatgatgggagatg

SEQ ID NO: 1112880 - DNA, 15 bp, Homo sapiens
tggatgatgggagat

SEQ ID NO: 1112881 - DNA, 15 bp, Homo sapiens
atggatgatgggaga

SEQ ID NO: 1112882 - DNA, 15 bp, Homo sapiens
gatggatgatgggag

SEQ ID NO: 1112883 - DNA, 15 bp, Homo sapiens
agatggatgatggga

SEQ ID NO: 1112884 - DNA, 15 bp, Homo sapiens
gagatggatgatggg

SEQ ID NO: 1112885 - DNA, 15 bp, Homo sapiens
agagatggatgatgg

SEQ ID NO: 1112886 - DNA, 15 bp, Homo sapiens
cagagatggatgatg

SEQ ID NO: 1112887 - DNA, 15 bp, Homo sapiens
gcagagatggatgat

SEQ ID NO: 1112888 - DNA, 15 bp, Homo sapiens
ggcagagatggatga

SEQ ID NO: 1112889 - DNA, 15 bp, Homo sapiens
aggcagagatggatg

SEQ ID NO: 1112890 - DNA, 15 bp, Homo sapiens
caggcagagatggat

SEQ ID NO: 1112891 - DNA, 15 bp, Homo sapiens
ccaggcagagatgga

SEQ ID NO: 1112892 - DNA, 15 bp, Homo sapiens
gccaggcagagatgg

SEQ ID NO: 1112893 - DNA, 15 bp, Homo sapiens
ggccaggcagagatg

SEQ ID NO: 1112894 - DNA, 15 bp, Homo sapiens
gggccaggcagagat

SEQ ID NO: 1112895 - DNA, 15 bp, Homo sapiens
tgggccaggcagaga

SEQ ID NO: 1112896 - DNA, 15 bp, Homo sapiens
ctgggccaggcagag

SEQ ID NO: 1112897 - DNA, 15 bp, Homo sapiens
cctgggccaggcaga

SEQ ID NO: 1112898 - DNA, 15 bp, Homo sapiens
gcctgggccaggcag

SEQ ID NO: 1112899 - DNA, 15 bp, Homo sapiens
ggcctgggccaggca

SEQ ID NO: 1112900 - DNA, 15 bp, Homo sapiens
gggcctgggccaggc

SEQ ID NO: 1112901 - DNA, 15 bp, Homo sapiens
agggcctgggccagg

SEQ ID NO: 1112902 - DNA, 15 bp, Homo sapiens
aagggcctgggccag

SEQ ID NO: 1112903 - DNA, 15 bp, Homo sapiens
aaagggcctgggcca

SEQ ID NO: 1112904 - DNA, 15 bp, Homo sapiens
caaagggcctgggcc

SEQ ID NO: 1112905 - DNA, 15 bp, Homo sapiens
ccaaagggcctgggc

SEQ ID NO: 1112906 - DNA, 15 bp, Homo sapiens
gccaaagggcctggg

SEQ ID NO: 1112907 - DNA, 15 bp, Homo sapiens
tgccaaagggcctgg

SEQ ID NO: 1112908 - DNA, 15 bp, Homo sapiens
gtgccaaagggcctg

SEQ ID NO: 1112909 - DNA, 15 bp, Homo sapiens
ggtgccaaagggcct

SEQ ID NO: 1112910 - DNA, 15 bp, Homo sapiens
tggtgccaaagggcc

SEQ ID NO: 1112911 - DNA, 15 bp, Homo sapiens
ttggtgccaaagggc

SEQ ID NO: 1112912 - DNA, 15 bp, Homo sapiens
cttggtgccaaaggg

SEQ ID NO: 1112913 - DNA, 15 bp, Homo sapiens
gcttggtgccaaagg

SEQ ID NO: 1112914 - DNA, 15 bp, Homo sapiens
tgcttggtgccaaag

SEQ ID NO: 1112915 - DNA, 15 bp, Homo sapiens
ctgcttggtgccaaa

SEQ ID NO: 1112916 - DNA, 15 bp, Homo sapiens
cctgcttggtgccaa

SEQ ID NO: 1112917 - DNA, 15 bp, Homo sapiens
gcctgcttggtgcca

SEQ ID NO: 1112918 - DNA, 15 bp, Homo sapiens
agcctgcttggtgcc

SEQ ID NO: 1112919 - DNA, 15 bp, Homo sapiens
cagcctgcttggtgc

SEQ ID NO: 1112920 - DNA, 15 bp, Homo sapiens
tcagcctgcttggtg

SEQ ID NO: 1112921 - DNA, 15 bp, Homo sapiens
gtcagcctgcttggt

SEQ ID NO: 1112922 - DNA, 15 bp, Homo sapiens
agtcagcctgcttgg

SEQ ID NO: 1112923 - DNA, 15 bp, Homo sapiens
gagtcagcctgcttg

SEQ ID NO: 1112924 - DNA, 15 bp, Homo sapiens
agagtcagcctgctt

SEQ ID NO: 1112925 - DNA, 15 bp, Homo sapiens
aagagtcagcctgct

SEQ ID NO: 1112926 - DNA, 15 bp, Homo sapiens
caagagtcagcctgc

SEQ ID NO: 1112927 - DNA, 15 bp, Homo sapiens
acaagagtcagcctg

SEQ ID NO: 1112928 - DNA, 15 bp, Homo sapiens
gacaagagtcagcct

SEQ ID NO: 1112929 - DNA, 15 bp, Homo sapiens
tgacaagagtcagcc

SEQ ID NO: 1112930 - DNA, 15 bp, Homo sapiens
gtgacaagagtcagc

SEQ ID NO: 1112931 - DNA, 15 bp, Homo sapiens
agtgacaagagtcag

SEQ ID NO: 1112932 - DNA, 15 bp, Homo sapiens
cagtgacaagagtca

SEQ ID NO: 1112933 - DNA, 15 bp, Homo sapiens
ccagtgacaagagtc

SEQ ID NO: 1112934 - DNA, 15 bp, Homo sapiens
gccagtgacaagagt

SEQ ID NO: 1112935 - DNA, 15 bp, Homo sapiens
agccagtgacaagag

SEQ ID NO: 1112936 - DNA, 15 bp, Homo sapiens
tagccagtgacaaga

SEQ ID NO: 1112937 - DNA, 15 bp, Homo sapiens
ttagccagtgacaag

SEQ ID NO: 1112938 - DNA, 15 bp, Homo sapiens
attagccagtgacaa

SEQ ID NO: 1112939 - DNA, 15 bp, Homo sapiens
gattagccagtgaca

SEQ ID NO: 1112940 - DNA, 15 bp, Homo sapiens
agattagccagtgac

SEQ ID NO: 1112941 - DNA, 15 bp, Homo sapiens
cagattagccagtga

SEQ ID NO: 1112942 - DNA, 15 bp, Homo sapiens
acagattagccagtg

SEQ ID NO: 1112943 - DNA, 15 bp, Homo sapiens
aacagattagccagt

SEQ ID NO: 1112944 - DNA, 15 bp, Homo sapiens
gaacagattagccag

SEQ ID NO: 1112945 - DNA, 15 bp, Homo sapiens
agaacagattagcca

SEQ ID NO: 1112946 - DNA, 15 bp, Homo sapiens
cagaacagattagcc

SEQ ID NO: 1112947 - DNA, 15 bp, Homo sapiens
acagaacagattagc

SEQ ID NO: 1112948 - DNA, 15 bp, Homo sapiens
cacagaacagattag

SEQ ID NO: 1112949 - DNA, 15 bp, Homo sapiens
ccacagaacagatta

SEQ ID NO: 1112950 - DNA, 15 bp, Homo sapiens
accacagaacagatt

SEQ ID NO: 1112951 - DNA, 15 bp, Homo sapiens
taccacagaacagat

SEQ ID NO: 1112952 - DNA, 15 bp, Homo sapiens
gtaccacagaacaga

SEQ ID NO: 1112953 - DNA, 15 bp, Homo sapiens
tgtaccacagaacag

SEQ ID NO: 1112954 - DNA, 15 bp, Homo sapiens
atgtaccacagaaca

SEQ ID NO: 1112955 - DNA, 15 bp, Homo sapiens
aatgtaccacagaac

SEQ ID NO: 1112956 - DNA, 15 bp, Homo sapiens
aaatgtaccacagaa

SEQ ID NO: 1112957 - DNA, 15 bp, Homo sapiens
aaaatgtaccacaga

SEQ ID NO: 1112958 - DNA, 15 bp, Homo sapiens
gaaaatgtaccacag

SEQ ID NO: 1112959 - DNA, 15 bp, Homo sapiens
agaaaatgtaccaca

SEQ ID NO: 1112960 - DNA, 15 bp, Homo sapiens
gagaaaatgtaccac

SEQ ID NO: 1112961 - DNA, 15 bp, Homo sapiens
agagaaaatgtacca

SEQ ID NO: 1112962 - DNA, 15 bp, Homo sapiens
gagagaaaatgtacc

SEQ ID NO: 1112963 - DNA, 15 bp, Homo sapiens
ggagagaaaatgtac

SEQ ID NO: 1112964 - DNA, 15 bp, Homo sapiens
aggagagaaaatgta

SEQ ID NO: 1112965 - DNA, 15 bp, Homo sapiens
gaggagagaaaatgt

SEQ ID NO: 1112966 - DNA, 15 bp, Homo sapiens
tgaggagagaaaatg

SEQ ID NO: 1112967 - DNA, 15 bp, Homo sapiens
gtgaggagagaaaat

SEQ ID NO: 1112968 - DNA, 15 bp, Homo sapiens
ggtgaggagagaaaa

SEQ ID NO: 1112969 - DNA, 15 bp, Homo sapiens
gggtgaggagagaaa

SEQ ID NO: 1112970 - DNA, 15 bp, Homo sapiens
agggtgaggagagaa

SEQ ID NO: 1112971 - DNA, 15 bp, Homo sapiens
gagggtgaggagaga

SEQ ID NO: 1112972 - DNA, 15 bp, Homo sapiens
ggagggtgaggagag

SEQ ID NO: 1112973 - DNA, 15 bp, Homo sapiens
gggagggtgaggaga

SEQ ID NO: 1112974 - DNA, 15 bp, Homo sapiens
tgggagggtgaggag

SEQ ID NO: 1112975 - DNA, 15 bp, Homo sapiens
atgggagggtgagga

SEQ ID NO: 1112976 - DNA, 15 bp, Homo sapiens
tatgggagggtgagg

SEQ ID NO: 1112977 - DNA, 15 bp, Homo sapiens
atatgggagggtgag

SEQ ID NO: 1112978 - DNA, 15 bp, Homo sapiens
gatatgggagggtga

SEQ ID NO: 1112979 - DNA, 15 bp, Homo sapiens
tgatatgggagggtg

SEQ ID NO: 1112980 - DNA, 15 bp, Homo sapiens
ttgatatgggagggt

SEQ ID NO: 1112981 - DNA, 15 bp, Homo sapiens
attgatatgggaggg

SEQ ID NO: 1112982 - DNA, 15 bp, Homo sapiens
aattgatatgggagg

SEQ ID NO: 1112983 - DNA, 15 bp, Homo sapiens
gaattgatatgggag

SEQ ID NO: 1112984 - DNA, 15 bp, Homo sapiens
ggaattgatatggga

SEQ ID NO: 1112985 - DNA, 15 bp, Homo sapiens
aggaattgatatggg

SEQ ID NO: 1112986 - DNA, 15 bp, Homo sapiens
gaggaattgatatgg

SEQ ID NO: 1112987 - DNA, 15 bp, Homo sapiens
cgaggaattgatatg

SEQ ID NO: 1112988 - DNA, 15 bp, Homo sapiens
tcgaggaattgatat

SEQ ID NO: 1112989 - DNA, 15 bp, Homo sapiens
ttcgaggaattgata

SEQ ID NO: 1112990 - DNA, 15 bp, Homo sapiens
cttcgaggaattgat

SEQ ID NO: 1112991 - DNA, 15 bp, Homo sapiens
ccttcgaggaattga

SEQ ID NO: 1112992 - DNA, 15 bp, Homo sapiens
gccttcgaggaattg

SEQ ID NO: 1112993 - DNA, 15 bp, Homo sapiens
tgccttcgaggaatt

SEQ ID NO: 1112994 - DNA, 15 bp, Homo sapiens
ctgccttcgaggaat

SEQ ID NO: 1112995 - DNA, 15 bp, Homo sapiens
cctgccttcgaggaa

SEQ ID NO: 1112996 - DNA, 15 bp, Homo sapiens
ccctgccttcgagga

SEQ ID NO: 1112997 - DNA, 15 bp, Homo sapiens
gccctgccttcgagg

SEQ ID NO: 1112998 - DNA, 15 bp, Homo sapiens
ggccctgccttcgag

SEQ ID NO: 1112999 - DNA, 15 bp, Homo sapiens
cggccctgccttcga

SEQ ID NO: 1113000 - DNA, 15 bp, Homo sapiens
tcggccctgccttcg

SEQ ID NO: 1113001 - DNA, 15 bp, Homo sapiens
atcggccctgccttc

SEQ ID NO: 1113002 - DNA, 15 bp, Homo sapiens
gatcggccctgcctt

SEQ ID NO: 1113003 - DNA, 15 bp, Homo sapiens
agatcggccctgcct

SEQ ID NO: 1113004 - DNA, 15 bp, Homo sapiens
cagatcggccctgcc

SEQ ID NO: 1113005 - DNA, 15 bp, Homo sapiens
ccagatcggccctgc

SEQ ID NO: 1113006 - DNA, 15 bp, Homo sapiens
tccagatcggccctg

SEQ ID NO: 1113007 - DNA, 15 bp, Homo sapiens
ctccagatcggccct

SEQ ID NO: 1113008 - DNA, 15 bp, Homo sapiens
tctccagatcggccc

SEQ ID NO: 1113009 - DNA, 15 bp, Homo sapiens
gtctccagatcggcc

SEQ ID NO: 1113010 - DNA, 15 bp, Homo sapiens
agtctccagatcggc

SEQ ID NO: 1113011 - DNA, 15 bp, Homo sapiens
tagtctccagatcgg

SEQ ID NO: 1113012 - DNA, 15 bp, Homo sapiens
ctagtctccagatcg

SEQ ID NO: 1113013 - DNA, 15 bp, Homo sapiens
cctagtctccagatc

SEQ ID NO: 1113014 - DNA, 15 bp, Homo sapiens
tcctagtctccagat

SEQ ID NO: 1113015 - DNA, 15 bp, Homo sapiens
ttcctagtctccaga

SEQ ID NO: 1113016 - DNA, 15 bp, Homo sapiens
cttcctagtctccag

SEQ ID NO: 1113017 - DNA, 15 bp, Homo sapiens
gcttcctagtctcca

SEQ ID NO: 1113018 - DNA, 15 bp, Homo sapiens
ggcttcctagtctcc

SEQ ID NO: 1113019 - DNA, 15 bp, Homo sapiens
tggcttcctagtctc

SEQ ID NO: 1113020 - DNA, 15 bp, Homo sapiens
gtggcttcctagtct

SEQ ID NO: 1113021 - DNA, 15 bp, Homo sapiens
agtggcttcctagtc

SEQ ID NO: 1113022 - DNA, 15 bp, Homo sapiens
aagtggcttcctagt

SEQ ID NO: 1113023 - DNA, 15 bp, Homo sapiens
gaagtggcttcctag

SEQ ID NO: 1113024 - DNA, 15 bp, Homo sapiens
agaagtggcttccta

SEQ ID NO: 1113025 - DNA, 15 bp, Homo sapiens
gagaagtggcttcct

SEQ ID NO: 1113026 - DNA, 15 bp, Homo sapiens
agagaagtggcttcc

SEQ ID NO: 1113027 - DNA, 15 bp, Homo sapiens
aagagaagtggcttc

SEQ ID NO: 1113028 - DNA, 15 bp, Homo sapiens
aaagagaagtggctt

SEQ ID NO: 1113029 - DNA, 15 bp, Homo sapiens
gaaagagaagtggct

SEQ ID NO: 1113030 - DNA, 15 bp, Homo sapiens
cgaaagagaagtggc

SEQ ID NO: 1113031 - DNA, 15 bp, Homo sapiens
tcgaaagagaagtgg

SEQ ID NO: 1113032 - DNA, 15 bp, Homo sapiens
gtcgaaagagaagtg

SEQ ID NO: 1113033 - DNA, 15 bp, Homo sapiens
tgtcgaaagagaagt

SEQ ID NO: 1113034 - DNA, 15 bp, Homo sapiens
ctgtcgaaagagaag

SEQ ID NO: 1113035 - DNA, 15 bp, Homo sapiens
gctgtcgaaagagaa

SEQ ID NO: 1113036 - DNA, 15 bp, Homo sapiens
ggctgtcgaaagaga

SEQ ID NO: 1113037 - DNA, 15 bp, Homo sapiens
gggctgtcgaaagag

SEQ ID NO: 1113038 - DNA, 15 bp, Homo sapiens
ggggctgtcgaaaga

SEQ ID NO: 1113039 - DNA, 15 bp, Homo sapiens
gggggctgtcgaaag

SEQ ID NO: 1113040 - DNA, 15 bp, Homo sapiens
tgggggctgtcgaaa

SEQ ID NO: 1113041 - DNA, 15 bp, Homo sapiens
gtgggggctgtcgaa

SEQ ID NO: 1113042 - DNA, 15 bp, Homo sapiens
ggtgggggctgtcga

SEQ ID NO: 1113043 - DNA, 15 bp, Homo sapiens
tggtgggggctgtcg

SEQ ID NO: 1113044 - DNA, 15 bp, Homo sapiens
gtggtgggggctgtc

SEQ ID NO: 1113045 - DNA, 15 bp, Homo sapiens
tgtggtgggggctgt

SEQ ID NO: 1113046 - DNA, 15 bp, Homo sapiens
ctgtggtgggggctg

SEQ ID NO: 1113047 - DNA, 15 bp, Homo sapiens
gctgtggtgggggct

SEQ ID NO: 1113048 - DNA, 15 bp, Homo sapiens
ggctgtggtgggggc

SEQ ID NO: 1113049 - DNA, 15 bp, Homo sapiens
gggctgtggtggggg

SEQ ID NO: 1113050 - DNA, 15 bp, Homo sapiens
tgggctgtggtgggg

SEQ ID NO: 1113051 - DNA, 15 bp, Homo sapiens
ctgggctgtggtggg

SEQ ID NO: 1113052 - DNA, 15 bp, Homo sapiens
gctgggctgtggtgg

SEQ ID NO: 1113053 - DNA, 15 bp, Homo sapiens
ggctgggctgtggtg

SEQ ID NO: 1113054 - DNA, 15 bp, Homo sapiens
gggctgggctgtggt

SEQ ID NO: 1113055 - DNA, 15 bp, Homo sapiens
cgggctgggctgtgg

SEQ ID NO: 1113056 - DNA, 15 bp, Homo sapiens
acgggctgggctgtg

SEQ ID NO: 1113057 - DNA, 15 bp, Homo sapiens
cacgggctgggctgt

SEQ ID NO: 1113058 - DNA, 15 bp, Homo sapiens
gcacgggctgggctg

SEQ ID NO: 1113059 - DNA, 15 bp, Homo sapiens
ggcacgggctgggct

SEQ ID NO: 1113060 - DNA, 15 bp, Homo sapiens
tggcacgggctgggc

SEQ ID NO: 1113061 - DNA, 15 bp, Homo sapiens
ctggcacgggctggg

SEQ ID NO: 1113062 - DNA, 15 bp, Homo sapiens
cctggcacgggctgg

SEQ ID NO: 1113063 - DNA, 15 bp, Homo sapiens
gcctggcacgggctg

SEQ ID NO: 1113064 - DNA, 15 bp, Homo sapiens
tgcctggcacgggct

SEQ ID NO: 1113065 - DNA, 15 bp, Homo sapiens
gtgcctggcacgggc

SEQ ID NO: 1113066 - DNA, 15 bp, Homo sapiens
ggtgcctggcacggg

SEQ ID NO: 1113067 - DNA, 15 bp, Homo sapiens
gggtgcctggcacgg

SEQ ID NO: 1113068 - DNA, 15 bp, Homo sapiens
tgggtgcctggcacg

SEQ ID NO: 1113069 - DNA, 15 bp, Homo sapiens
ctgggtgcctggcac

SEQ ID NO: 1113070 - DNA, 15 bp, Homo sapiens
gctgggtgcctggca

SEQ ID NO: 1113071 - DNA, 15 bp, Homo sapiens
tgctgggtgcctggc

SEQ ID NO: 1113072 - DNA, 15 bp, Homo sapiens
ctgctgggtgcctgg

SEQ ID NO: 1113073 - DNA, 15 bp, Homo sapiens
gctgctgggtgcctg

SEQ ID NO: 1113074 - DNA, 15 bp, Homo sapiens
agctgctgggtgcct

SEQ ID NO: 1113075 - DNA, 15 bp, Homo sapiens
gagctgctgggtgcc

SEQ ID NO: 1113076 - DNA, 15 bp, Homo sapiens
ggagctgctgggtgc

SEQ ID NO: 1113077 - DNA, 15 bp, Homo sapiens
aggagctgctgggtg

SEQ ID NO: 1113078 - DNA, 15 bp, Homo sapiens
caggagctgctgggt

SEQ ID NO: 1113079 - DNA, 15 bp, Homo sapiens
tcaggagctgctggg

SEQ ID NO: 1113080 - DNA, 15 bp, Homo sapiens
ttcaggagctgctgg

SEQ ID NO: 1113081 - DNA, 15 bp, Homo sapiens
cttcaggagctgctg

SEQ ID NO: 1113082 - DNA, 15 bp, Homo sapiens
gcttcaggagctgct

SEQ ID NO: 1113083 - DNA, 15 bp, Homo sapiens
ggcttcaggagctgc

SEQ ID NO: 1113084 - DNA, 15 bp, Homo sapiens
gggcttcaggagctg

SEQ ID NO: 1113085 - DNA, 15 bp, Homo sapiens
tgggcttcaggagct

SEQ ID NO: 1113086 - DNA, 15 bp, Homo sapiens
gtgggcttcaggagc

SEQ ID NO: 1113087 - DNA, 15 bp, Homo sapiens
agtgggcttcaggag

SEQ ID NO: 1113088 - DNA, 15 bp, Homo sapiens
cagtgggcttcagga

SEQ ID NO: 1113089 - DNA, 15 bp, Homo sapiens
gccagtgggcttcag

SEQ ID NO: 1113090 - DNA, 15 bp, Homo sapiens
tgccagtgggcttca

SEQ ID NO: 1113091 - DNA, 15 bp, Homo sapiens
atgccagtgggcttc

SEQ ID NO: 1113092 - DNA, 15 bp, Homo sapiens
aatgccagtgggctt

SEQ ID NO: 1113093 - DNA, 15 bp, Homo sapiens
caatgccagtgggct

SEQ ID NO: 1113094 - DNA, 15 bp, Homo sapiens
tcaatgccagtgggc

SEQ ID NO: 1113095 - DNA, 15 bp, Homo sapiens
ttcaatgccagtggg

SEQ ID NO: 1113096 - DNA, 15 bp, Homo sapiens
gttcaatgccagtgg

SEQ ID NO: 1113097 - DNA, 15 bp, Homo sapiens
tgttcaatgccagtg

SEQ ID NO: 1113098 - DNA, 15 bp, Homo sapiens
atgttcaatgccagt

SEQ ID NO: 1113099 - DNA, 15 bp, Homo sapiens
catgttcaatgccag

SEQ ID NO: 1113100 - DNA, 15 bp, Homo sapiens
ccatgttcaatgcca

SEQ ID NO: 1113101 - DNA, 15 bp, Homo sapiens
gccatgttcaatgcc

SEQ ID NO: 1113102 - DNA, 15 bp, Homo sapiens
tgccatgttcaatgc

SEQ ID NO: 1113103 - DNA, 15 bp, Homo sapiens
atgccatgttcaatg

SEQ ID NO: 1113104 - DNA, 15 bp, Homo sapiens
aatgccatgttcaat

SEQ ID NO: 1113105 - DNA, 15 bp, Homo sapiens
gaatgccatgttcaa

SEQ ID NO: 1113106 - DNA, 15 bp, Homo sapiens
tgaatgccatgttca

SEQ ID NO: 1113107 - DNA, 15 bp, Homo sapiens
ttgaatgccatgttc

SEQ ID NO: 1113108 - DNA, 15 bp, Homo sapiens
attgaatgccatgtt

SEQ ID NO: 1113109 - DNA, 15 bp, Homo sapiens
gattgaatgccatgt

SEQ ID NO: 1113110 - DNA, 15 bp, Homo sapiens
ggattgaatgccatg

SEQ ID NO: 1113111 - DNA, 15 bp, Homo sapiens
gggattgaatgccat

SEQ ID NO: 1113112 - DNA, 15 bp, Homo sapiens
agggattgaatgcca

SEQ ID NO: 1113113 - DNA, 15 bp, Homo sapiens
cagggattgaatgcc

SEQ ID NO: 1113114 - DNA, 15 bp, Homo sapiens
gcagggattgaatgc

SEQ ID NO: 1113115 - DNA, 15 bp, Homo sapiens
ggcagggattgaatg

SEQ ID NO: 1113116 - DNA, 15 bp, Homo sapiens
tggcagggattgaat

SEQ ID NO: 1113117 - DNA, 15 bp, Homo sapiens
ttggcagggattgaa

SEQ ID NO: 1113118 - DNA, 15 bp, Homo sapiens
cttggcagggattga

SEQ ID NO: 1113119 - DNA, 15 bp, Homo sapiens
gcttggcagggattg

SEQ ID NO: 1113120 - DNA, 15 bp, Homo sapiens
ggcttggcagggatt

SEQ ID NO: 1113121 - DNA, 15 bp, Homo sapiens
aggcttggcagggat

SEQ ID NO: 1113122 - DNA, 15 bp, Homo sapiens
caggcttggcaggga

SEQ ID NO: 1113123 - DNA, 15 bp, Homo sapiens
gcaggcttggcaggg

SEQ ID NO: 1113124 - DNA, 15 bp, Homo sapiens
ggcaggcttggcagg

SEQ ID NO: 1113125 - DNA, 15 bp, Homo sapiens
gggcaggcttggcag

SEQ ID NO: 1113126 - DNA, 15 bp, Homo sapiens
agggcaggcttggca

SEQ ID NO: 1113127 - DNA, 15 bp, Homo sapiens
aagggcaggcttggc

SEQ ID NO: 1113128 - DNA, 15 bp, Homo sapiens
gaagggcaggcttgg

SEQ ID NO: 1113129 - DNA, 15 bp, Homo sapiens
ggaagggcaggcttg

SEQ ID NO: 1113130 - DNA, 15 bp, Homo sapiens
gggaagggcaggctt

SEQ ID NO: 1113131 - DNA, 15 bp, Homo sapiens
tgggaagggcaggct

SEQ ID NO: 1113132 - DNA, 15 bp, Homo sapiens
atgggaagggcaggc

SEQ ID NO: 1113133 - DNA, 15 bp, Homo sapiens
gatgggaagggcagg

SEQ ID NO: 1113134 - DNA, 15 bp, Homo sapiens
agatgggaagggcag

SEQ ID NO: 1113135 - DNA, 15 bp, Homo sapiens
cagatgggaagggca

SEQ ID NO: 1113136 - DNA, 15 bp, Homo sapiens
ccagatgggaagggc

SEQ ID NO: 1113137 - DNA, 15 bp, Homo sapiens
accagatgggaaggg

SEQ ID NO: 1113138 - DNA, 15 bp, Homo sapiens
aaccagatgggaagg

SEQ ID NO: 1113139 - DNA, 15 bp, Homo sapiens
aaaccagatgggaag

SEQ ID NO: 1113140 - DNA, 15 bp, Homo sapiens
gaaaccagatgggaa

SEQ ID NO: 1113141 - DNA, 15 bp, Homo sapiens
ggaaaccagatggga

SEQ ID NO: 1113142 - DNA, 15 bp, Homo sapiens
gggaaaccagatggg

SEQ ID NO: 1113143 - DNA, 15 bp, Homo sapiens
tgggaaaccagatgg

SEQ ID NO: 1113144 - DNA, 15 bp, Homo sapiens
ctgggaaaccagatg

SEQ ID NO: 1113145 - DNA, 15 bp, Homo sapiens
cctgggaaaccagat

SEQ ID NO: 1113146 - DNA, 15 bp, Homo sapiens
ccctgggaaaccaga

SEQ ID NO: 1113147 - DNA, 15 bp, Homo sapiens
gccctgggaaaccag

SEQ ID NO: 1113148 - DNA, 15 bp, Homo sapiens
agccctgggaaacca

SEQ ID NO: 1113149 - DNA, 15 bp, Homo sapiens
gagccctgggaaacc

SEQ ID NO: 1113150 - DNA, 15 bp, Homo sapiens
agagccctgggaaac

SEQ ID NO: 1113151 - DNA, 15 bp, Homo sapiens
aagagccctgggaaa

SEQ ID NO: 1113152 - DNA, 15 bp, Homo sapiens
gaagagccctgggaa

SEQ ID NO: 1113153 - DNA, 15 bp, Homo sapiens
ggaagagccctggga

SEQ ID NO: 1113154 - DNA, 15 bp, Homo sapiens
gggaagagccctggg

SEQ ID NO: 1113155 - DNA, 15 bp, Homo sapiens
tgggaagagccctgg

SEQ ID NO: 1113156 - DNA, 15 bp, Homo sapiens
ttgggaagagccctg

SEQ ID NO: 1113157 - DNA, 15 bp, Homo sapiens
gttgggaagagccct

SEQ ID NO: 1113158 - DNA, 15 bp, Homo sapiens
tgttgggaagagccc

SEQ ID NO: 1113159 - DNA, 15 bp, Homo sapiens
gtgttgggaagagcc

SEQ ID NO: 1113160 - DNA, 15 bp, Homo sapiens
ggtgttgggaagagc

SEQ ID NO: 1113161 - DNA, 15 bp, Homo sapiens
aggtgttgggaagag

SEQ ID NO: 1113162 - DNA, 15 bp, Homo sapiens
gaggtgttgggaaga

SEQ ID NO: 1113163 - DNA, 15 bp, Homo sapiens
ggaggtgttgggaag

SEQ ID NO: 1113164 - DNA, 15 bp, Homo sapiens
aggaggtgttgggaa

SEQ ID NO: 1113165 - DNA, 15 bp, Homo sapiens
gaggaggtgttggga

SEQ ID NO: 1113166 - DNA, 15 bp, Homo sapiens
ggaggaggtgttggg

SEQ ID NO: 1113167 - DNA, 15 bp, Homo sapiens
aggaggaggtgttgg

SEQ ID NO: 1113168 - DNA, 15 bp, Homo sapiens
gaggaggaggtgttg

SEQ ID NO: 1113169 - DNA, 15 bp, Homo sapiens
ggaggaggaggtgtt

SEQ ID NO: 1113170 - DNA, 15 bp, Homo sapiens
tggaggaggaggtgt

SEQ ID NO: 1113171 - DNA, 15 bp, Homo sapiens
gtggaggaggaggtg

SEQ ID NO: 1113172 - DNA, 15 bp, Homo sapiens
ggtggaggaggaggt

SEQ ID NO: 1113173 - DNA, 15 bp, Homo sapiens
aggtggaggaggagg

SEQ ID NO: 1113174 - DNA, 15 bp, Homo sapiens
caggtggaggaggag

SEQ ID NO: 1113175 - DNA, 15 bp, Homo sapiens
gcaggtggaggagga

SEQ ID NO: 1113176 - DNA, 15 bp, Homo sapiens
ggcaggtggaggagg

SEQ ID NO: 1113177 - DNA, 15 bp, Homo sapiens
tggcaggtggaggag

SEQ ID NO: 1113178 - DNA, 15 bp, Homo sapiens
ctggcaggtggagga

SEQ ID NO: 1113179 - DNA, 15 bp, Homo sapiens
actggcaggtggagg

SEQ ID NO: 1113180 - DNA, 15 bp, Homo sapiens
aactggcaggtggag

SEQ ID NO: 1113181 - DNA, 15 bp, Homo sapiens
taactggcaggtgga

SEQ ID NO: 1113182 - DNA, 15 bp, Homo sapiens
ttaactggcaggtgg

SEQ ID NO: 1113183 - DNA, 15 bp, Homo sapiens
tttaactggcaggtg

SEQ ID NO: 1113184 - DNA, 15 bp, Homo sapiens
ttttaactggcaggt

SEQ ID NO: 1113185 - DNA, 15 bp, Homo sapiens
attttaactggcagg

SEQ ID NO: 1113186 - DNA, 15 bp, Homo sapiens
gattttaactggcag

SEQ ID NO: 1113187 - DNA, 15 bp, Homo sapiens
agattttaactggca

SEQ ID NO: 1113188 - DNA, 15 bp, Homo sapiens
gaagattttaactgg

SEQ ID NO: 1113189 - DNA, 15 bp, Homo sapiens
ggaagattttaactg

SEQ ID NO: 1113190 - DNA, 15 bp, Homo sapiens
gggaagattttaact

SEQ ID NO: 1113191 - DNA, 15 bp, Homo sapiens
tgggaagattttaac

SEQ ID NO: 1113192 - DNA, 15 bp, Homo sapiens
ctgggaagattttaa

SEQ ID NO: 1113193 - DNA, 15 bp, Homo sapiens
tctgggaagatttta

SEQ ID NO: 1113194 - DNA, 15 bp, Homo sapiens
gtctgggaagatttt

SEQ ID NO: 1113195 - DNA, 15 bp, Homo sapiens
agtctgggaagattt

SEQ ID NO: 1113196 - DNA, 15 bp, Homo sapiens
gagtctgggaagatt

SEQ ID NO: 1113197 - DNA, 15 bp, Homo sapiens
tgagtctgggaagat

SEQ ID NO: 1113198 - DNA, 15 bp, Homo sapiens
ctgagtctgggaaga

SEQ ID NO: 1113199 - DNA, 15 bp, Homo sapiens
gctgagtctgggaag

SEQ ID NO: 1113200 - DNA, 15 bp, Homo sapiens
agctgagtctgggaa

SEQ ID NO: 1113201 - DNA, 15 bp, Homo sapiens
gagctgagtctggga

SEQ ID NO: 1113202 - DNA, 15 bp, Homo sapiens
tgagctgagtctggg

SEQ ID NO: 1113203 - DNA, 15 bp, Homo sapiens
ttgagctgagtctgg

SEQ ID NO: 1113204 - DNA, 15 bp, Homo sapiens
cttgagctgagtctg

SEQ ID NO: 1113205 - DNA, 15 bp, Homo sapiens
ccttgagctgagtct

SEQ ID NO: 1113206 - DNA, 15 bp, Homo sapiens
tccttgagctgagtc

SEQ ID NO: 1113207 - DNA, 15 bp, Homo sapiens
ctccttgagctgagt

SEQ ID NO: 1113208 - DNA, 15 bp, Homo sapiens
tctccttgagctgag

SEQ ID NO: 1113209 - DNA, 15 bp, Homo sapiens
atctccttgagctga

SEQ ID NO: 1113210 - DNA, 15 bp, Homo sapiens
catctccttgagctg

SEQ ID NO: 1113211 - DNA, 15 bp, Homo sapiens
gcatctccttgagct

SEQ ID NO: 1113212 - DNA, 15 bp, Homo sapiens
agcatctccttgagc

SEQ ID NO: 1113213 - DNA, 15 bp, Homo sapiens
gagcatctccttgag

SEQ ID NO: 1113214 - DNA, 15 bp, Homo sapiens
ggagcatctccttga

SEQ ID NO: 1113215 - DNA, 15 bp, Homo sapiens
aggagcatctccttg

SEQ ID NO: 1113216 - DNA, 15 bp, Homo sapiens
taggagcatctcctt

SEQ ID NO: 1113217 - DNA, 15 bp, Homo sapiens
ttaggagcatctcct

SEQ ID NO: 1113218 - DNA, 15 bp, Homo sapiens
cttaggagcatctcc

SEQ ID NO: 1113219 - DNA, 15 bp, Homo sapiens
ccttaggagcatctc

SEQ ID NO: 1113220 - DNA, 15 bp, Homo sapiens
accttaggagcatct

SEQ ID NO: 1113221 - DNA, 15 bp, Homo sapiens
caccttaggagcatc

SEQ ID NO: 1113222 - DNA, 15 bp, Homo sapiens
ccaccttaggagcat

SEQ ID NO: 1113223 - DNA, 15 bp, Homo sapiens
tccaccttaggagca

SEQ ID NO: 1113224 - DNA, 15 bp, Homo sapiens
ttccaccttaggagc

SEQ ID NO: 1113225 - DNA, 15 bp, Homo sapiens
attccaccttaggag

SEQ ID NO: 1113226 - DNA, 15 bp, Homo sapiens
cattccaccttagga

SEQ ID NO: 1113227 - DNA, 15 bp, Homo sapiens
tcattccaccttagg

SEQ ID NO: 1113228 - DNA, 15 bp, Homo sapiens
ttcattccaccttag

SEQ ID NO: 1113229 - DNA, 15 bp, Homo sapiens
tttcattccacctta

SEQ ID NO: 1113230 - DNA, 15 bp, Homo sapiens
atttcattccacctt

SEQ ID NO: 1113231 - DNA, 15 bp, Homo sapiens
gatttcattccacct

SEQ ID NO: 1113232 - DNA, 15 bp, Homo sapiens
agatttcattccacc

SEQ ID NO: 1113233 - DNA, 15 bp, Homo sapiens
gagatttcattccac

SEQ ID NO: 1113234 - DNA, 15 bp, Homo sapiens
agagatttcattcca

SEQ ID NO: 1113235 - DNA, 15 bp, Homo sapiens
aagagatttcattcc

SEQ ID NO: 1113236 - DNA, 15 bp, Homo sapiens
gaagagatttcattc

SEQ ID NO: 1113237 - DNA, 15 bp, Homo sapiens
agaagagatttcatt

SEQ ID NO: 1113238 - DNA, 15 bp, Homo sapiens
aagaagagatttcat

SEQ ID NO: 1113239 - DNA, 15 bp, Homo sapiens
gaagaagagatttca

SEQ ID NO: 1113240 - DNA, 15 bp, Homo sapiens
ggaagaagagatttc

SEQ ID NO: 1113241 - DNA, 15 bp, Homo sapiens
gggaagaagagattt

SEQ ID NO: 1113242 - DNA, 15 bp, Homo sapiens
ggggaagaagagatt

SEQ ID NO: 1113243 - DNA, 15 bp, Homo sapiens
tggggaagaagagat

SEQ ID NO: 1113244 - DNA, 15 bp, Homo sapiens
gtggggaagaagaga

SEQ ID NO: 1113245 - DNA, 15 bp, Homo sapiens
ggtggggaagaagag

SEQ ID NO: 1113246 - DNA, 15 bp, Homo sapiens
aggtggggaagaaga

SEQ ID NO: 1113247 - DNA, 15 bp, Homo sapiens
caggtggggaagaag

SEQ ID NO: 1113248 - DNA, 15 bp, Homo sapiens
ccaggtggggaagaa

SEQ ID NO: 1113249 - DNA, 15 bp, Homo sapiens
tccaggtggggaaga

SEQ ID NO: 1113250 - DNA, 15 bp, Homo sapiens
ctccaggtggggaag

SEQ ID NO: 1113251 - DNA, 15 bp, Homo sapiens
tctccaggtggggaa

SEQ ID NO: 1113252 - DNA, 15 bp, Homo sapiens
gtctccaggtgggga

SEQ ID NO: 1113253 - DNA, 15 bp, Homo sapiens
tgtctccaggtgggg

SEQ ID NO: 1113254 - DNA, 15 bp, Homo sapiens
ttgtctccaggtggg

SEQ ID NO: 1113255 - DNA, 15 bp, Homo sapiens
attgtctccaggtgg

SEQ ID NO: 1113256 - DNA, 15 bp, Homo sapiens
gattgtctccaggtg

SEQ ID NO: 1113257 - DNA, 15 bp, Homo sapiens
agattgtctccaggt

SEQ ID NO: 1113258 - DNA, 15 bp, Homo sapiens
tagattgtctccagg

SEQ ID NO: 1113259 - DNA, 15 bp, Homo sapiens
gtagattgtctccag

SEQ ID NO: 1113260 - DNA, 15 bp, Homo sapiens
agtagattgtctcca

SEQ ID NO: 1113261 - DNA, 15 bp, Homo sapiens
aagtagattgtctcc

SEQ ID NO: 1113262 - DNA, 15 bp, Homo sapiens
gaagtagattgtctc

SEQ ID NO: 1113263 - DNA, 15 bp, Homo sapiens
ggaagtagattgtct

SEQ ID NO: 1113264 - DNA, 15 bp, Homo sapiens
aggaagtagattgtc

SEQ ID NO: 1113265 - DNA, 15 bp, Homo sapiens
gaggaagtagattgt

SEQ ID NO: 1113266 - DNA, 15 bp, Homo sapiens
agaggaagtagattg

SEQ ID NO: 1113267 - DNA, 15 bp, Homo sapiens
gagaggaagtagatt

SEQ ID NO: 1113268 - DNA, 15 bp, Homo sapiens
ggagaggaagtagat

SEQ ID NO: 1113269 - DNA, 15 bp, Homo sapiens
gggagaggaagtaga

SEQ ID NO: 1113270 - DNA, 15 bp, Homo sapiens
agggagaggaagtag

SEQ ID NO: 1113271 - DNA, 15 bp, Homo sapiens
tagggagaggaagta

SEQ ID NO: 1113272 - DNA, 15 bp, Homo sapiens
gtagggagaggaagt

SEQ ID NO: 1113273 - DNA, 15 bp, Homo sapiens
tgtagggagaggaag

SEQ ID NO: 1113274 - DNA, 15 bp, Homo sapiens
gtgtagggagaggaa

SEQ ID NO: 1113275 - DNA, 15 bp, Homo sapiens
ggtgtagggagagga

SEQ ID NO: 1113276 - DNA, 15 bp, Homo sapiens
aggtgtagggagagg

SEQ ID NO: 1113277 - DNA, 15 bp, Homo sapiens
caggtgtagggagag

SEQ ID NO: 1113278 - DNA, 15 bp, Homo sapiens
ccaggtgtagggaga

SEQ ID NO: 1113279 - DNA, 15 bp, Homo sapiens
gccaggtgtagggag

SEQ ID NO: 1113280 - DNA, 15 bp, Homo sapiens
tgccaggtgtaggga

SEQ ID NO: 1113281 - DNA, 15 bp, Homo sapiens
ttgccaggtgtaggg

SEQ ID NO: 1113282 - DNA, 15 bp, Homo sapiens
gttgccaggtgtagg

SEQ ID NO: 1113283 - DNA, 15 bp, Homo sapiens
agttgccaggtgtag

SEQ ID NO: 1113284 - DNA, 15 bp, Homo sapiens
cagttgccaggtgta

SEQ ID NO: 1113285 - DNA, 15 bp, Homo sapiens
ccagttgccaggtgt

SEQ ID NO: 1113286 - DNA, 15 bp, Homo sapiens
gccagttgccaggtg

SEQ ID NO: 1113287 - DNA, 15 bp, Homo sapiens
cgccagttgccaggt

SEQ ID NO: 1113288 - DNA, 15 bp, Homo sapiens
gcgccagttgccagg

SEQ ID NO: 1113289 - DNA, 15 bp, Homo sapiens
tgcgccagttgccag

SEQ ID NO: 1113290 - DNA, 15 bp, Homo sapiens
gtgcgccagttgcca

SEQ ID NO: 1113291 - DNA, 15 bp, Homo sapiens
tgtgcgccagttgcc

SEQ ID NO: 1113292 - DNA, 15 bp, Homo sapiens
ttgtgcgccagttgc

SEQ ID NO: 1113293 - DNA, 15 bp, Homo sapiens
gttgtgcgccagttg

SEQ ID NO: 1113294 - DNA, 15 bp, Homo sapiens
ggttgtgcgccagtt

SEQ ID NO: 1113295 - DNA, 15 bp, Homo sapiens
aggttgtgcgccagt

SEQ ID NO: 1113296 - DNA, 15 bp, Homo sapiens
aaggttgtgcgccag

SEQ ID NO: 1113297 - DNA, 15 bp, Homo sapiens
caaggttgtgcgcca

SEQ ID NO: 1113298 - DNA, 15 bp, Homo sapiens
acaaggttgtgcgcc

SEQ ID NO: 1113299 - DNA, 15 bp, Homo sapiens
tacaaggttgtgcgc

SEQ ID NO: 1113300 - DNA, 15 bp, Homo sapiens
atacaaggttgtgcg

SEQ ID NO: 1113301 - DNA, 15 bp, Homo sapiens
gatacaaggttgtgc

SEQ ID NO: 1113302 - DNA, 15 bp, Homo sapiens
agatacaaggttgtg

SEQ ID NO: 1113303 - DNA, 15 bp, Homo sapiens
aagatacaaggttgt

SEQ ID NO: 1113304 - DNA, 15 bp, Homo sapiens
taagatacaaggttg

SEQ ID NO: 1113305 - DNA, 15 bp, Homo sapiens
ttaagatacaaggtt

SEQ ID NO: 1113306 - DNA, 15 bp, Homo sapiens
tttaagatacaaggt

SEQ ID NO: 1113307 - DNA, 15 bp, Homo sapiens
atttaagatacaagg

SEQ ID NO: 1113308 - DNA, 15 bp, Homo sapiens
aatttaagatacaag

SEQ ID NO: 1113309 - DNA, 15 bp, Homo sapiens
taatttaagatacaa

SEQ ID NO: 1113310 - DNA, 15 bp, Homo sapiens
ctaatttaagataca

SEQ ID NO: 1113311 - DNA, 15 bp, Homo sapiens
tctaatttaagatac

SEQ ID NO: 1113312 - DNA, 15 bp, Homo sapiens
atctaatttaagata

SEQ ID NO: 1113313 - DNA, 15 bp, Homo sapiens
aatctaatttaagat

SEQ ID NO: 1113314 - DNA, 15 bp, Homo sapiens
gaatctaatttaaga

SEQ ID NO: 1113315 - DNA, 15 bp, Homo sapiens
tgaatctaatttaag

SEQ ID NO: 1113316 - DNA, 15 bp, Homo sapiens
ctgaatctaatttaa

SEQ ID NO: 1113317 - DNA, 15 bp, Homo sapiens
gctgaatctaattta

SEQ ID NO: 1113318 - DNA, 15 bp, Homo sapiens
ggctgaatctaattt

SEQ ID NO: 1113319 - DNA, 15 bp, Homo sapiens
aggctgaatctaatt

SEQ ID NO: 1113320 - DNA, 15 bp, Homo sapiens
caggctgaatctaat

SEQ ID NO: 1113321 - DNA, 15 bp, Homo sapiens
tcaggctgaatctaa

SEQ ID NO: 1113322 - DNA, 15 bp, Homo sapiens
ctcaggctgaatcta

SEQ ID NO: 1113323 - DNA, 15 bp, Homo sapiens
tctcaggctgaatct

SEQ ID NO: 1113324 - DNA, 15 bp, Homo sapiens
gtctcaggctgaatc

SEQ ID NO: 1113325 - DNA, 15 bp, Homo sapiens
agtctcaggctgaat

SEQ ID NO: 1113326 - DNA, 15 bp, Homo sapiens
cagtctcaggctgaa

SEQ ID NO: 1113327 - DNA, 15 bp, Homo sapiens
acagtctcaggctga

SEQ ID NO: 1113328 - DNA, 15 bp, Homo sapiens
gacagtctcaggctg

SEQ ID NO: 1113329 - DNA, 15 bp, Homo sapiens
agacagtctcaggct

SEQ ID NO: 1113330 - DNA, 15 bp, Homo sapiens
gagacagtctcaggc

SEQ ID NO: 1113331 - DNA, 15 bp, Homo sapiens
ggagacagtctcagg

SEQ ID NO: 1113332 - DNA, 15 bp, Homo sapiens
gggagacagtctcag

SEQ ID NO: 1113333 - DNA, 15 bp, Homo sapiens
tgggagacagtctca

SEQ ID NO: 1113334 - DNA, 15 bp, Homo sapiens
gtgggagacagtctc

SEQ ID NO: 1113335 - DNA, 15 bp, Homo sapiens
ggtgggagacagtct

SEQ ID NO: 1113336 - DNA, 15 bp, Homo sapiens
tggtgggagacagtc

SEQ ID NO: 1113337 - DNA, 15 bp, Homo sapiens
ttggtgggagacagt

SEQ ID NO: 1113338 - DNA, 15 bp, Homo sapiens
attggtgggagacag

SEQ ID NO: 1113339 - DNA, 15 bp, Homo sapiens
gattggtgggagaca

SEQ ID NO: 1113340 - DNA, 15 bp, Homo sapiens
ggattggtgggagac

SEQ ID NO: 1113341 - DNA, 15 bp, Homo sapiens
gggattggtgggaga

SEQ ID NO: 1113342 - DNA, 15 bp, Homo sapiens
agggattggtgggag

SEQ ID NO: 1113343 - DNA, 15 bp, Homo sapiens
cagggattggtggga

SEQ ID NO: 1113344 - DNA, 15 bp, Homo sapiens
gcagggattggtggg

SEQ ID NO: 1113345 - DNA, 15 bp, Homo sapiens
agcagggattggtgg

SEQ ID NO: 1113346 - DNA, 15 bp, Homo sapiens
gagcagggattggtg

SEQ ID NO: 1113347 - DNA, 15 bp, Homo sapiens
ggagcagggattggt

SEQ ID NO: 1113348 - DNA, 15 bp, Homo sapiens
gggagcagggattgg

SEQ ID NO: 1113349 - DNA, 15 bp, Homo sapiens
agggagcagggattg

SEQ ID NO: 1113350 - DNA, 15 bp, Homo sapiens
cagggagcagggatt

SEQ ID NO: 1113351 - DNA, 15 bp, Homo sapiens
acagggagcagggat

SEQ ID NO: 1113352 - DNA, 15 bp, Homo sapiens
gacagggagcaggga

SEQ ID NO: 1113353 - DNA, 15 bp, Homo sapiens
ggacagggagcaggg

SEQ ID NO: 1113354 - DNA, 15 bp, Homo sapiens
aggacagggagcagg

SEQ ID NO: 1113355 - DNA, 15 bp, Homo sapiens
caggacagggagcag

SEQ ID NO: 1113356 - DNA, 15 bp, Homo sapiens
gcaggacagggagca

SEQ ID NO: 1113357 - DNA, 15 bp, Homo sapiens
agcaggacagggagc

SEQ ID NO: 1113358 - DNA, 15 bp, Homo sapiens
cagcaggacagggag

SEQ ID NO: 1113359 - DNA, 15 bp, Homo sapiens
tcagcaggacaggga

SEQ ID NO: 1113360 - DNA, 15 bp, Homo sapiens
ctcagcaggacaggg

SEQ ID NO: 1113361 - DNA, 15 bp, Homo sapiens
gctcagcaggacagg

SEQ ID NO: 1113362 - DNA, 15 bp, Homo sapiens
tgctcagcaggacag

SEQ ID NO: 1113363 - DNA, 15 bp, Homo sapiens
gtgctcagcaggaca

SEQ ID NO: 1113364 - DNA, 15 bp, Homo sapiens
ggtgctcagcaggac

SEQ ID NO: 1113365 - DNA, 15 bp, Homo sapiens
aggtgctcagcagga

SEQ ID NO: 1113366 - DNA, 15 bp, Homo sapiens
aaggtgctcagcagg

SEQ ID NO: 1113367 - DNA, 15 bp, Homo sapiens
caaggtgctcagcag

SEQ ID NO: 1113368 - DNA, 15 bp, Homo sapiens
tcaaggtgctcagca

SEQ ID NO: 1113369 - DNA, 15 bp, Homo sapiens
ctcaaggtgctcagc

SEQ ID NO: 1113370 - DNA, 15 bp, Homo sapiens
cctcaaggtgctcag

SEQ ID NO: 1113371 - DNA, 15 bp, Homo sapiens
tcctcaaggtgctca

SEQ ID NO: 1113372 - DNA, 15 bp, Homo sapiens
ttcctcaaggtgctc

SEQ ID NO: 1113373 - DNA, 15 bp, Homo sapiens
tttcctcaaggtgct

SEQ ID NO: 1113374 - DNA, 15 bp, Homo sapiens
ctttcctcaaggtgc

SEQ ID NO: 1113375 - DNA, 15 bp, Homo sapiens
cctttcctcaaggtg

SEQ ID NO: 1113376 - DNA, 15 bp, Homo sapiens
ccctttcctcaaggt

SEQ ID NO: 1113377 - DNA, 15 bp, Homo sapiens
gccctttcctcaagg

SEQ ID NO: 1113378 - DNA, 15 bp, Homo sapiens
agccctttcctcaag

SEQ ID NO: 1113379 - DNA, 15 bp, Homo sapiens
aagccctttcctcaa

SEQ ID NO: 1113380 - DNA, 15 bp, Homo sapiens
aaagccctttcctca

SEQ ID NO: 1113381 - DNA, 15 bp, Homo sapiens
caaagccctttcctc

SEQ ID NO: 1113382 - DNA, 15 bp, Homo sapiens
ccaaagccctttcct

SEQ ID NO: 1113383 - DNA, 15 bp, Homo sapiens
cccaaagccctttcc

SEQ ID NO: 1113384 - DNA, 15 bp, Homo sapiens
ccccaaagccctttc

SEQ ID NO: 1113385 - DNA, 15 bp, Homo sapiens
gccccaaagcccttt

SEQ ID NO: 1113386 - DNA, 15 bp, Homo sapiens
agccccaaagccctt

SEQ ID NO: 1113387 - DNA, 15 bp, Homo sapiens
cagccccaaagccct

SEQ ID NO: 1113388 - DNA, 15 bp, Homo sapiens
acagccccaaagccc

SEQ ID NO: 1113389 - DNA, 15 bp, Homo sapiens
aacagccccaaagcc

SEQ ID NO: 1113390 - DNA, 15 bp, Homo sapiens
aaacagccccaaagc

SEQ ID NO: 1113391 - DNA, 15 bp, Homo sapiens
taaacagccccaaag

SEQ ID NO: 1113392 - DNA, 15 bp, Homo sapiens
ataaacagccccaaa

SEQ ID NO: 1113393 - DNA, 15 bp, Homo sapiens
gataaacagccccaa

SEQ ID NO: 1113394 - DNA, 15 bp, Homo sapiens
agataaacagcccca

SEQ ID NO: 1113395 - DNA, 15 bp, Homo sapiens
aagataaacagcccc

SEQ ID NO: 1113396 - DNA, 15 bp, Homo sapiens
aaagataaacagccc

SEQ ID NO: 1113397 - DNA, 15 bp, Homo sapiens
caaagataaacagcc

SEQ ID NO: 1113398 - DNA, 15 bp, Homo sapiens
acaaagataaacagc

SEQ ID NO: 1113399 - DNA, 15 bp, Homo sapiens
gacaaagataaacag

SEQ ID NO: 1113400 - DNA, 15 bp, Homo sapiens
ggacaaagataaaca

SEQ ID NO: 1113401 - DNA, 15 bp, Homo sapiens
aggacaaagataaac

SEQ ID NO: 1113402 - DNA, 15 bp, Homo sapiens
caggacaaagataaa

SEQ ID NO: 1113403 - DNA, 15 bp, Homo sapiens
ccaggacaaagataa

SEQ ID NO: 1113404 - DNA, 15 bp, Homo sapiens
tccaggacaaagata

SEQ ID NO: 1113405 - DNA, 15 bp, Homo sapiens
ttccaggacaaagat

SEQ ID NO: 1113406 - DNA, 15 bp, Homo sapiens
tttccaggacaaaga

SEQ ID NO: 1113407 - DNA, 15 bp, Homo sapiens
gtttccaggacaaag

SEQ ID NO: 1113408 - DNA, 15 bp, Homo sapiens
ggtttccaggacaaa

SEQ ID NO: 1113409 - DNA, 15 bp, Homo sapiens
tggtttccaggacaa

SEQ ID NO: 1113410 - DNA, 15 bp, Homo sapiens
atggtttccaggaca

SEQ ID NO: 1113411 - DNA, 15 bp, Homo sapiens
gatggtttccaggac

SEQ ID NO: 1113412 - DNA, 15 bp, Homo sapiens
ggatggtttccagga

SEQ ID NO: 1113413 - DNA, 15 bp, Homo sapiens
aggatggtttccagg

SEQ ID NO: 1113414 - DNA, 15 bp, Homo sapiens
aaggatggtttccag

SEQ ID NO: 1113415 - DNA, 15 bp, Homo sapiens
gaaggatggtttcca

SEQ ID NO: 1113416 - DNA, 15 bp, Homo sapiens
tgaaggatggtttcc

SEQ ID NO: 1113417 - DNA, 15 bp, Homo sapiens
ttgaaggatggtttc

SEQ ID NO: 1113418 - DNA, 15 bp, Homo sapiens
gttgaaggatggttt

SEQ ID NO: 1113419 - DNA, 15 bp, Homo sapiens
agttgaaggatggtt

SEQ ID NO: 1113420 - DNA, 15 bp, Homo sapiens
gagttgaaggatggt

SEQ ID NO: 1113421 - DNA, 15 bp, Homo sapiens
tgagttgaaggatgg

SEQ ID NO: 1113422 - DNA, 15 bp, Homo sapiens
gtgagttgaaggatg

SEQ ID NO: 1113423 - DNA, 15 bp, Homo sapiens
agtgagttgaaggat

SEQ ID NO: 1113424 - DNA, 15 bp, Homo sapiens
gagtgagttgaagga

SEQ ID NO: 1113425 - DNA, 15 bp, Homo sapiens
agagtgagttgaagg

SEQ ID NO: 1113426 - DNA, 15 bp, Homo sapiens
cagagtgagttgaag

SEQ ID NO: 1113427 - DNA, 15 bp, Homo sapiens
ccagagtgagttgaa

SEQ ID NO: 1113428 - DNA, 15 bp, Homo sapiens
cccagagtgagttga

SEQ ID NO: 1113429 - DNA, 15 bp, Homo sapiens
ccccagagtgagttg

SEQ ID NO: 1113430 - DNA, 15 bp, Homo sapiens
gccccagagtgagtt

SEQ ID NO: 1113431 - DNA, 15 bp, Homo sapiens
ggccccagagtgagt

SEQ ID NO: 1113432 - DNA, 15 bp, Homo sapiens
aggccccagagtgag

SEQ ID NO: 1113433 - DNA, 15 bp, Homo sapiens
caggccccagagtga

SEQ ID NO: 1113434 - DNA, 15 bp, Homo sapiens
gcaggccccagagtg

SEQ ID NO: 1113435 - DNA, 15 bp, Homo sapiens
ggcaggccccagagt

SEQ ID NO: 1113436 - DNA, 15 bp, Homo sapiens
aggcaggccccagag

SEQ ID NO: 1113437 - DNA, 15 bp, Homo sapiens
taggcaggccccaga

SEQ ID NO: 1113438 - DNA, 15 bp, Homo sapiens
ctaggcaggccccag

SEQ ID NO: 1113439 - DNA, 15 bp, Homo sapiens
gctaggcaggcccca

SEQ ID NO: 1113440 - DNA, 15 bp, Homo sapiens
tgctaggcaggcccc

SEQ ID NO: 1113441 - DNA, 15 bp, Homo sapiens
atgctaggcaggccc

SEQ ID NO: 1113442 - DNA, 15 bp, Homo sapiens
catgctaggcaggcc

SEQ ID NO: 1113443 - DNA, 15 bp, Homo sapiens
acatgctaggcaggc

SEQ ID NO: 1113444 - DNA, 15 bp, Homo sapiens
gacatgctaggcagg

SEQ ID NO: 1113445 - DNA, 15 bp, Homo sapiens
tgacatgctaggcag

SEQ ID NO: 1113446 - DNA, 15 bp, Homo sapiens
ttgacatgctaggca

SEQ ID NO: 1113447 - DNA, 15 bp, Homo sapiens
gttgacatgctaggc

SEQ ID NO: 1113448 - DNA, 15 bp, Homo sapiens
ggttgacatgctagg

SEQ ID NO: 1113449 - DNA, 15 bp, Homo sapiens
cggttgacatgctag

SEQ ID NO: 1113450 - DNA, 15 bp, Homo sapiens
tcggttgacatgcta

SEQ ID NO: 1113451 - DNA, 15 bp, Homo sapiens
ctcggttgacatgct

SEQ ID NO: 1113452 - DNA, 15 bp, Homo sapiens
actcggttgacatgc

SEQ ID NO: 1113453 - DNA, 15 bp, Homo sapiens
aactcggttgacatg

SEQ ID NO: 1113454 - DNA, 15 bp, Homo sapiens
aaactcggttgacat

SEQ ID NO: 1113455 - DNA, 15 bp, Homo sapiens
caaactcggttgaca

SEQ ID NO: 1113456 - DNA, 15 bp, Homo sapiens
ccaaactcggttgac

SEQ ID NO: 1113457 - DNA, 15 bp, Homo sapiens
tccaaactcggttga

SEQ ID NO: 1113458 - DNA, 15 bp, Homo sapiens
ctccaaactcggttg

SEQ ID NO: 1113459 - DNA, 15 bp, Homo sapiens
tctccaaactcggtt

SEQ ID NO: 1113460 - DNA, 15 bp, Homo sapiens
ttctccaaactcggt

SEQ ID NO: 1113461 - DNA, 15 bp, Homo sapiens
attctccaaactcgg

SEQ ID NO: 1113462 - DNA, 15 bp, Homo sapiens
tattctccaaactcg

SEQ ID NO: 1113463 - DNA, 15 bp, Homo sapiens
ctattctccaaactc

SEQ ID NO: 1113464 - DNA, 15 bp, Homo sapiens
cctattctccaaact

SEQ ID NO: 1113465 - DNA, 15 bp, Homo sapiens
ccctattctccaaac

SEQ ID NO: 1113466 - DNA, 15 bp, Homo sapiens
gccctattctccaaa

SEQ ID NO: 1113467 - DNA, 15 bp, Homo sapiens
tgccctattctccaa

SEQ ID NO: 1113468 - DNA, 15 bp, Homo sapiens
ctgccctattctcca

SEQ ID NO: 1113469 - DNA, 15 bp, Homo sapiens
tctgccctattctcc

SEQ ID NO: 1113470 - DNA, 15 bp, Homo sapiens
ttctgccctattctc

SEQ ID NO: 1113471 - DNA, 15 bp, Homo sapiens
attctgccctattct

SEQ ID NO: 1113472 - DNA, 15 bp, Homo sapiens
tattctgccctattc

SEQ ID NO: 1113473 - DNA, 15 bp, Homo sapiens
ctattctgccctatt

SEQ ID NO: 1113474 - DNA, 15 bp, Homo sapiens
cctattctgccctat

SEQ ID NO: 1113475 - DNA, 15 bp, Homo sapiens
ccctattctgcccta

SEQ ID NO: 1113476 - DNA, 15 bp, Homo sapiens
gccctattctgccct

SEQ ID NO: 1113477 - DNA, 15 bp, Homo sapiens
tgccctattctgccc

SEQ ID NO: 1113478 - DNA, 15 bp, Homo sapiens
ctgccctattctgcc

SEQ ID NO: 1113479 - DNA, 15 bp, Homo sapiens
cctgccctattctgc

SEQ ID NO: 1113480 - DNA, 15 bp, Homo sapiens
tcctgccctattctg

SEQ ID NO: 1113481 - DNA, 15 bp, Homo sapiens
gtcctgccctattct

SEQ ID NO: 1113482 - DNA, 15 bp, Homo sapiens
tgtcctgccctattc

SEQ ID NO: 1113483 - DNA, 15 bp, Homo sapiens
ctgtcctgccctatt

SEQ ID NO: 1113484 - DNA, 15 bp, Homo sapiens
cctgtcctgccctat

SEQ ID NO: 1113485 - DNA, 15 bp, Homo sapiens
tcctgtcctgcccta

SEQ ID NO: 1113486 - DNA, 15 bp, Homo sapiens
gtcctgtcctgccct

SEQ ID NO: 1113487 - DNA, 15 bp, Homo sapiens
tgtcctgtcctgccc

SEQ ID NO: 1113488 - DNA, 15 bp, Homo sapiens
ctgtcctgtcctgcc

SEQ ID NO: 1113489 - DNA, 15 bp, Homo sapiens
cctgtcctgtcctgc

SEQ ID NO: 1113490 - DNA, 15 bp, Homo sapiens
tcctgtcctgtcctg

SEQ ID NO: 1113491 - DNA, 15 bp, Homo sapiens
gtcctgtcctgtcct

SEQ ID NO: 1113492 - DNA, 15 bp, Homo sapiens
tgtcctgtcctgtcc

SEQ ID NO: 1113493 - DNA, 15 bp, Homo sapiens
ttgtcctgtcctgtc

SEQ ID NO: 1113494 - DNA, 15 bp, Homo sapiens
cttgtcctgtcctgt

SEQ ID NO: 1113495 - DNA, 15 bp, Homo sapiens
tcttgtcctgtcctg

SEQ ID NO: 1113496 - DNA, 15 bp, Homo sapiens
gtcttgtcctgtcct

SEQ ID NO: 1113497 - DNA, 15 bp, Homo sapiens
tgtcttgtcctgtcc

SEQ ID NO: 1113498 - DNA, 15 bp, Homo sapiens
ctgtcttgtcctgtc

SEQ ID NO: 1113499 - DNA, 15 bp, Homo sapiens
cctgtcttgtcctgt

SEQ ID NO: 1113500 - DNA, 15 bp, Homo sapiens
ccctgtcttgtcctg

SEQ ID NO: 1113501 - DNA, 15 bp, Homo sapiens
gccctgtcttgtcct

SEQ ID NO: 1113502 - DNA, 15 bp, Homo sapiens
tgccctgtcttgtcc

SEQ ID NO: 1113503 - DNA, 15 bp, Homo sapiens
ctgccctgtcttgtc

SEQ ID NO: 1113504 - DNA, 15 bp, Homo sapiens
cctgccctgtcttgt

SEQ ID NO: 1113505 - DNA, 15 bp, Homo sapiens
tcctgccctgtcttg

SEQ ID NO: 1113506 - DNA, 15 bp, Homo sapiens
atcctgccctgtctt

SEQ ID NO: 1113507 - DNA, 15 bp, Homo sapiens
tatcctgccctgtct

SEQ ID NO: 1113508 - DNA, 15 bp, Homo sapiens
ctatcctgccctgtc

SEQ ID NO: 1113509 - DNA, 15 bp, Homo sapiens
cctatcctgccctgt

SEQ ID NO: 1113510 - DNA, 15 bp, Homo sapiens
tcctatcctgccctg

SEQ ID NO: 1113511 - DNA, 15 bp, Homo sapiens
atcctatcctgccct

SEQ ID NO: 1113512 - DNA, 15 bp, Homo sapiens
tatcctatcctgccc

SEQ ID NO: 1113513 - DNA, 15 bp, Homo sapiens
ctatcctatcctgcc

SEQ ID NO: 1113514 - DNA, 15 bp, Homo sapiens
cctatcctatcctgc

SEQ ID NO: 1113515 - DNA, 15 bp, Homo sapiens
tcctatcctatcctg

SEQ ID NO: 1113516 - DNA, 15 bp, Homo sapiens
ctcctatcctatcct

SEQ ID NO: 1113517 - DNA, 15 bp, Homo sapiens
gctcctatcctatcc

SEQ ID NO: 1113518 - DNA, 15 bp, Homo sapiens
cgctcctatcctatc

SEQ ID NO: 1113519 - DNA, 15 bp, Homo sapiens
tcgctcctatcctat

SEQ ID NO: 1113520 - DNA, 15 bp, Homo sapiens
ctcgctcctatccta

SEQ ID NO: 1113521 - DNA, 15 bp, Homo sapiens
gctcgctcctatcct

SEQ ID NO: 1113522 - DNA, 15 bp, Homo sapiens
ggctcgctcctatcc

SEQ ID NO: 1113523 - DNA, 15 bp, Homo sapiens
tggctcgctcctatc

SEQ ID NO: 1113524 - DNA, 15 bp, Homo sapiens
ctggctcgctcctat

SEQ ID NO: 1113525 - DNA, 15 bp, Homo sapiens
gctggctcgctccta

SEQ ID NO: 1113526 - DNA, 15 bp, Homo sapiens
agctggctcgctcct

SEQ ID NO: 1113527 - DNA, 15 bp, Homo sapiens
gagctggctcgctcc

SEQ ID NO: 1113528 - DNA, 15 bp, Homo sapiens
tgagctggctcgctc

SEQ ID NO: 1113529 - DNA, 15 bp, Homo sapiens
ctgagctggctcgct

SEQ ID NO: 1113530 - DNA, 15 bp, Homo sapiens
actgagctggctcgc

SEQ ID NO: 1113531 - DNA, 15 bp, Homo sapiens
tactgagctggctcg

SEQ ID NO: 1113532 - DNA, 15 bp, Homo sapiens
ctactgagctggctc

SEQ ID NO: 1113533 - DNA, 15 bp, Homo sapiens
gctactgagctggct

SEQ ID NO: 1113534 - DNA, 15 bp, Homo sapiens
agctactgagctggc

SEQ ID NO: 1113535 - DNA, 15 bp, Homo sapiens
gagctactgagctgg

SEQ ID NO: 1113536 - DNA, 15 bp, Homo sapiens
tgagctactgagctg

SEQ ID NO: 1113537 - DNA, 15 bp, Homo sapiens
gtgagctactgagct

SEQ ID NO: 1113538 - DNA, 15 bp, Homo sapiens
tgtgagctactgagc

SEQ ID NO: 1113539 - DNA, 15 bp, Homo sapiens
atgtgagctactgag

SEQ ID NO: 1113540 - DNA, 15 bp, Homo sapiens
aatgtgagctactga

SEQ ID NO: 1113541 - DNA, 15 bp, Homo sapiens
aaatgtgagctactg

SEQ ID NO: 1113542 - DNA, 15 bp, Homo sapiens
caaatgtgagctact

SEQ ID NO: 1113543 - DNA, 15 bp, Homo sapiens
acaaatgtgagctac

SEQ ID NO: 1113544 - DNA, 15 bp, Homo sapiens
tacaaatgtgagcta

SEQ ID NO: 1113545 - DNA, 15 bp, Homo sapiens
ttacaaatgtgagct

SEQ ID NO: 1113546 - DNA, 15 bp, Homo sapiens
attacaaatgtgagc

SEQ ID NO: 1113547 - DNA, 15 bp, Homo sapiens
gattacaaatgtgag

SEQ ID NO: 1113548 - DNA, 15 bp, Homo sapiens
ggattacaaatgtga

SEQ ID NO: 1113549 - DNA, 15 bp, Homo sapiens
gggattacaaatgtg

SEQ ID NO: 1113550 - DNA, 15 bp, Homo sapiens
tgggattacaaatgt

SEQ ID NO: 1113551 - DNA, 15 bp, Homo sapiens
ctgggattacaaatg

SEQ ID NO: 1113552 - DNA, 15 bp, Homo sapiens
gctgggattacaaat

SEQ ID NO: 1113553 - DNA, 15 bp, Homo sapiens
cgctgggattacaaa

SEQ ID NO: 1113554 - DNA, 15 bp, Homo sapiens
gcgctgggattacaa

SEQ ID NO: 1113555 - DNA, 15 bp, Homo sapiens
ggcgctgggattaca

SEQ ID NO: 1113556 - DNA, 15 bp, Homo sapiens
aggcgctgggattac

SEQ ID NO: 1113557 - DNA, 15 bp, Homo sapiens
aaggcgctgggatta

SEQ ID NO: 1113558 - DNA, 15 bp, Homo sapiens
caaggcgctgggatt

SEQ ID NO: 1113559 - DNA, 15 bp, Homo sapiens
ccaaggcgctgggat

SEQ ID NO: 1113560 - DNA, 15 bp, Homo sapiens
cccaaggcgctggga

SEQ ID NO: 1113561 - DNA, 15 bp, Homo sapiens
ccccaaggcgctggg

SEQ ID NO: 1113562 - DNA, 15 bp, Homo sapiens
cccccaaggcgctgg

SEQ ID NO: 1113563 - DNA, 15 bp, Homo sapiens
ccccccaaggcgctg

SEQ ID NO: 1113564 - DNA, 15 bp, Homo sapiens
gccccccaaggcgct

SEQ ID NO: 1113565 - DNA, 15 bp, Homo sapiens
agccccccaaggcgc

SEQ ID NO: 1113566 - DNA, 15 bp, Homo sapiens
cagccccccaaggcg

SEQ ID NO: 1113567 - DNA, 15 bp, Homo sapiens
gcagccccccaaggc

SEQ ID NO: 1113568 - DNA, 15 bp, Homo sapiens
cgcagccccccaagg

SEQ ID NO: 1113569 - DNA, 15 bp, Homo sapiens
ccgcagccccccaag

SEQ ID NO: 1113570 - DNA, 15 bp, Homo sapiens
accgcagccccccaa

SEQ ID NO: 1113571 - DNA, 15 bp, Homo sapiens
taccgcagcccccca

SEQ ID NO: 1113572 - DNA, 15 bp, Homo sapiens
ctaccgcagcccccc

SEQ ID NO: 1113573 - DNA, 15 bp, Homo sapiens
cctaccgcagccccc

SEQ ID NO: 1113574 - DNA, 15 bp, Homo sapiens
tcctaccgcagcccc

SEQ ID NO: 1113575 - DNA, 15 bp, Homo sapiens
ctcctaccgcagccc

SEQ ID NO: 1113576 - DNA, 15 bp, Homo sapiens
tctcctaccgcagcc

SEQ ID NO: 1113577 - DNA, 15 bp, Homo sapiens
ttctcctaccgcagc

SEQ ID NO: 1113578 - DNA, 15 bp, Homo sapiens
attctcctaccgcag

SEQ ID NO: 1113579 - DNA, 15 bp, Homo sapiens
gattctcctaccgca

SEQ ID NO: 1113580 - DNA, 15 bp, Homo sapiens
cgattctcctaccgc

SEQ ID NO: 1113581 - DNA, 15 bp, Homo sapiens
gcgattctcctaccg

SEQ ID NO: 1113582 - DNA, 15 bp, Homo sapiens
aaagcgattctccta

SEQ ID NO: 1113583 - DNA, 15 bp, Homo sapiens
caaagcgattctcct

SEQ ID NO: 1113584 - DNA, 15 bp, Homo sapiens
ccaaagcgattctcc

SEQ ID NO: 1113585 - DNA, 15 bp, Homo sapiens
cccaaagcgattctc

SEQ ID NO: 1113586 - DNA, 15 bp, Homo sapiens
tcccaaagcgattct

SEQ ID NO: 1113587 - DNA, 15 bp, Homo sapiens
ctcccaaagcgattc

SEQ ID NO: 1113588 - DNA, 15 bp, Homo sapiens
gctcccaaagcgatt

SEQ ID NO: 1113589 - DNA, 15 bp, Homo sapiens
tgctcccaaagcgat

SEQ ID NO: 1113590 - DNA, 15 bp, Homo sapiens
ctgctcccaaagcga

SEQ ID NO: 1113591 - DNA, 15 bp, Homo sapiens
cctgctcccaaagcg

SEQ ID NO: 1113592 - DNA, 15 bp, Homo sapiens
tcctgctcccaaagc

SEQ ID NO: 1113593 - DNA, 15 bp, Homo sapiens
ctcctgctcccaaag

SEQ ID NO: 1113594 - DNA, 15 bp, Homo sapiens
actcctgctcccaaa

SEQ ID NO: 1113595 - DNA, 15 bp, Homo sapiens
aactcctgctcccaa

SEQ ID NO: 1113596 - DNA, 15 bp, Homo sapiens
caactcctgctccca

SEQ ID NO: 1113597 - DNA, 15 bp, Homo sapiens
gcaactcctgctccc

SEQ ID NO: 1113598 - DNA, 15 bp, Homo sapiens
tgcaactcctgctcc

SEQ ID NO: 1113599 - DNA, 15 bp, Homo sapiens
ctgcaactcctgctc

SEQ ID NO: 1113600 - DNA, 15 bp, Homo sapiens
cctgcaactcctgct

SEQ ID NO: 1113601 - DNA, 15 bp, Homo sapiens
gcctgcaactcctgc

SEQ ID NO: 1113602 - DNA, 15 bp, Homo sapiens
ggcctgcaactcctg

SEQ ID NO: 1113603 - DNA, 15 bp, Homo sapiens
cggcctgcaactcct

SEQ ID NO: 1113604 - DNA, 15 bp, Homo sapiens
gcggcctgcaactcc

SEQ ID NO: 1113605 - DNA, 15 bp, Homo sapiens
tgcggcctgcaactc

SEQ ID NO: 1113606 - DNA, 15 bp, Homo sapiens
ctgcggcctgcaact

SEQ ID NO: 1113607 - DNA, 15 bp, Homo sapiens
actgcggcctgcaac

SEQ ID NO: 1113608 - DNA, 15 bp, Homo sapiens
cactgcggcctgcaa

SEQ ID NO: 1113609 - DNA, 15 bp, Homo sapiens
tcactgcggcctgca

SEQ ID NO: 1113610 - DNA, 15 bp, Homo sapiens
ctcactgcggcctgc

SEQ ID NO: 1113611 - DNA, 15 bp, Homo sapiens
gctcactgcggcctg

SEQ ID NO: 1113612 - DNA, 15 bp, Homo sapiens
agctcactgcggcct

SEQ ID NO: 1113613 - DNA, 15 bp, Homo sapiens
tagctcactgcggcc

SEQ ID NO: 1113614 - DNA, 15 bp, Homo sapiens
atagctcactgcggc

SEQ ID NO: 1113615 - DNA, 15 bp, Homo sapiens
catagctcactgcgg

SEQ ID NO: 1113616 - DNA, 15 bp, Homo sapiens
tcatagctcactgcg

SEQ ID NO: 1113617 - DNA, 15 bp, Homo sapiens
ctgatcatagctcac

SEQ ID NO: 1113618 - DNA, 15 bp, Homo sapiens
gctgatcatagctca

SEQ ID NO: 1113619 - DNA, 15 bp, Homo sapiens
agctgatcatagctc

SEQ ID NO: 1113620 - DNA, 15 bp, Homo sapiens
aagctgatcatagct

SEQ ID NO: 1113621 - DNA, 15 bp, Homo sapiens
caagctgatcatagc

SEQ ID NO: 1113622 - DNA, 15 bp, Homo sapiens
ccaagctgatcatag

SEQ ID NO: 1113623 - DNA, 15 bp, Homo sapiens
cccaagctgatcata

SEQ ID NO: 1113624 - DNA, 15 bp, Homo sapiens
gcccaagctgatcat

SEQ ID NO: 1113625 - DNA, 15 bp, Homo sapiens
cgcccaagctgatca

SEQ ID NO: 1113626 - DNA, 15 bp, Homo sapiens
tcgcccaagctgatc

SEQ ID NO: 1113627 - DNA, 15 bp, Homo sapiens
gtcgcccaagctgat

SEQ ID NO: 1113628 - DNA, 15 bp, Homo sapiens
agtcgcccaagctga

SEQ ID NO: 1113629 - DNA, 15 bp, Homo sapiens
cagtcgcccaagctg

SEQ ID NO: 1113630 - DNA, 15 bp, Homo sapiens
tcagtcgcccaagct

SEQ ID NO: 1113631 - DNA, 15 bp, Homo sapiens
ctcagtcgcccaagc

SEQ ID NO: 1113632 - DNA, 15 bp, Homo sapiens
gctcagtcgcccaag

SEQ ID NO: 1113633 - DNA, 15 bp, Homo sapiens
cgctcagtcgcccaa

SEQ ID NO: 1113634 - DNA, 15 bp, Homo sapiens
tcgctcagtcgccca

SEQ ID NO: 1113635 - DNA, 15 bp, Homo sapiens
ctcgctcagtcgccc

SEQ ID NO: 1113636 - DNA, 15 bp, Homo sapiens
tctcgctcagtcgcc

SEQ ID NO: 1113637 - DNA, 15 bp, Homo sapiens
gtctcgctcagtcgc

SEQ ID NO: 1113638 - DNA, 15 bp, Homo sapiens
ggtctcgctcagtcg

SEQ ID NO: 1113639 - DNA, 15 bp, Homo sapiens
gggtctcgctcagtc

SEQ ID NO: 1113640 - DNA, 15 bp, Homo sapiens
agggtctcgctcagt

SEQ ID NO: 1113641 - DNA, 15 bp, Homo sapiens
cagggtctcgctcag

SEQ ID NO: 1113642 - DNA, 15 bp, Homo sapiens
acagggtctcgctca

SEQ ID NO: 1113643 - DNA, 15 bp, Homo sapiens
gacagggtctcgctc

SEQ ID NO: 1113644 - DNA, 15 bp, Homo sapiens
agacagggtctcgct

SEQ ID NO: 1113645 - DNA, 15 bp, Homo sapiens
agagacagggtctcg

SEQ ID NO: 1113646 - DNA, 15 bp, Homo sapiens
gtttgttttagagac

SEQ ID NO: 1113647 - DNA, 15 bp, Homo sapiens
tgtttgttttagaga

SEQ ID NO: 1113648 - DNA, 15 bp, Homo sapiens
gtgtttgttttagag

SEQ ID NO: 1113649 - DNA, 15 bp, Homo sapiens
tgtgtttgttttaga

SEQ ID NO: 1113650 - DNA, 15 bp, Homo sapiens
gtgtgtttgttttag

SEQ ID NO: 1113651 - DNA, 15 bp, Homo sapiens
tgtgtgtttgtttta

SEQ ID NO: 1113652 - DNA, 15 bp, Homo sapiens
ttgtgtgtttgtttt

SEQ ID NO: 1113653 - DNA, 15 bp, Homo sapiens
cttgtgtgtttgttt

SEQ ID NO: 1113654 - DNA, 15 bp, Homo sapiens
acttgtgtgtttgtt

SEQ ID NO: 1113655 - DNA, 15 bp, Homo sapiens
gacttgtgtgtttgt

SEQ ID NO: 1113656 - DNA, 15 bp, Homo sapiens
ggacttgtgtgtttg

SEQ ID NO: 1113657 - DNA, 15 bp, Homo sapiens
cggacttgtgtgttt

SEQ ID NO: 1113658 - DNA, 15 bp, Homo sapiens
ccggacttgtgtgtt

SEQ ID NO: 1113659 - DNA, 15 bp, Homo sapiens
cccggacttgtgtgt

SEQ ID NO: 1113660 - DNA, 15 bp, Homo sapiens
gcccggacttgtgtg

SEQ ID NO: 1113661 - DNA, 15 bp, Homo sapiens
cgcccggacttgtgt

SEQ ID NO: 1113662 - DNA, 15 bp, Homo sapiens
gcgcccggacttgtg

SEQ ID NO: 1113663 - DNA, 15 bp, Homo sapiens
cgcgcccggacttgt

SEQ ID NO: 1113664 - DNA, 15 bp, Homo sapiens
ccgcgcccggacttg

SEQ ID NO: 1113665 - DNA, 15 bp, Homo sapiens
accgcgcccggactt

SEQ ID NO: 1113666 - DNA, 15 bp, Homo sapiens
caccgcgcccggact

SEQ ID NO: 1113667 - DNA, 15 bp, Homo sapiens
ccaccgcgcccggac

SEQ ID NO: 1113668 - DNA, 15 bp, Homo sapiens
gccaccgcgcccgga

SEQ ID NO: 1113669 - DNA, 15 bp, Homo sapiens
aagattacaggcatg

SEQ ID NO: 1113670 - DNA, 15 bp, Homo sapiens
taagattacaggcat

SEQ ID NO: 1113671 - DNA, 15 bp, Homo sapiens
ctaagattacaggca

SEQ ID NO: 1113672 - DNA, 15 bp, Homo sapiens
gctaagattacaggc

SEQ ID NO: 1113673 - DNA, 15 bp, Homo sapiens
tgatccgcccacctc

SEQ ID NO: 1113674 - DNA, 15 bp, Homo sapiens
cgtgatccgcccacc

SEQ ID NO: 1113675 - DNA, 15 bp, Homo sapiens
ttcttgacctcgtga

SEQ ID NO: 1113676 - DNA, 15 bp, Homo sapiens
tttcttgacctcgtg

SEQ ID NO: 1113677 - DNA, 15 bp, Homo sapiens
atttcttgacctcgt

SEQ ID NO: 1113678 - DNA, 15 bp, Homo sapiens
gatttcttgacctcg

SEQ ID NO: 1113679 - DNA, 15 bp, Homo sapiens
cgatttcttgacctc

SEQ ID NO: 1113680 - DNA, 15 bp, Homo sapiens
tcgatttcttgacct

SEQ ID NO: 1113681 - DNA, 15 bp, Homo sapiens
ctcgatttcttgacc

SEQ ID NO: 1113682 - DNA, 15 bp, Homo sapiens
tctcgatttcttgac

SEQ ID NO: 1113683 - DNA, 15 bp, Homo sapiens
gtctcgatttcttga

SEQ ID NO: 1113684 - DNA, 15 bp, Homo sapiens
ggtctcgatttcttg

SEQ ID NO: 1113685 - DNA, 15 bp, Homo sapiens
tggtctcgatttctt

SEQ ID NO: 1113686 - DNA, 15 bp, Homo sapiens
atggtctcgatttct

SEQ ID NO: 1113687 - DNA, 15 bp, Homo sapiens
gatggtctcgatttc

SEQ ID NO: 1113688 - DNA, 15 bp, Homo sapiens
tgttggccaggatgg

SEQ ID NO: 1113689 - DNA, 15 bp, Homo sapiens
atgttggccaggatg

SEQ ID NO: 1113690 - DNA, 15 bp, Homo sapiens
catgttggccaggat

SEQ ID NO: 1113691 - DNA, 15 bp, Homo sapiens
cgcgcaccaccacgc

SEQ ID NO: 1113692 - DNA, 15 bp, Homo sapiens
gcgcgcaccaccacg

SEQ ID NO: 1113693 - DNA, 15 bp, Homo sapiens
ggcgcgcaccaccac

SEQ ID NO: 1113694 - DNA, 15 bp, Homo sapiens
aggcgcgcaccacca

SEQ ID NO: 1113695 - DNA, 15 bp, Homo sapiens
caggcgcgcaccacc

SEQ ID NO: 1113696 - DNA, 15 bp, Homo sapiens
acaggcgcgcaccac

SEQ ID NO: 1113697 - DNA, 15 bp, Homo sapiens
tacaggcgcgcacca

SEQ ID NO: 1113698 - DNA, 15 bp, Homo sapiens
ctacaggcgcgcacc

SEQ ID NO: 1113699 - DNA, 15 bp, Homo sapiens
actacaggcgcgcac

SEQ ID NO: 1113700 - DNA, 15 bp, Homo sapiens
gactacaggcgcgca

SEQ ID NO: 1113701 - DNA, 15 bp, Homo sapiens
ggactacaggcgcgc

SEQ ID NO: 1113702 - DNA, 15 bp, Homo sapiens
gttctgagacggagt

SEQ ID NO: 1113703 - DNA, 15 bp, Homo sapiens
tgttctgagacggag

SEQ ID NO: 1113704 - DNA, 15 bp, Homo sapiens
ttgttctgagacgga

SEQ ID NO: 1113705 - DNA, 15 bp, Homo sapiens
tttgttctgagacgg

SEQ ID NO: 1113706 - DNA, 15 bp, Homo sapiens
gtttgttctgagacg

SEQ ID NO: 1113707 - DNA, 15 bp, Homo sapiens
tgtttgttctgagac

SEQ ID NO: 1113708 - DNA, 15 bp, Homo sapiens
ttgtttgttctgaga

SEQ ID NO: 1113709 - DNA, 15 bp, Homo sapiens
tttgtttgttctgag

SEQ ID NO: 1113710 - DNA, 15 bp, Homo sapiens
gtttgtttgttctga

SEQ ID NO: 1113711 - DNA, 15 bp, Homo sapiens
tgtttgtttgttctg

SEQ ID NO: 1113712 - DNA, 15 bp, Homo sapiens
ttgtttgtttgttct

SEQ ID NO: 1113713 - DNA, 15 bp, Homo sapiens
ccttttgtttgtttg

SEQ ID NO: 1113714 - DNA, 15 bp, Homo sapiens
tccttttgtttgttt

SEQ ID NO: 1113715 - DNA, 15 bp, Homo sapiens
atccttttgtttgtt

SEQ ID NO: 1113716 - DNA, 15 bp, Homo sapiens
tatccttttgtttgt

SEQ ID NO: 1113717 - DNA, 15 bp, Homo sapiens
ctatccttttgtttg

SEQ ID NO: 1113718 - DNA, 15 bp, Homo sapiens
tctatccttttgttt

SEQ ID NO: 1113719 - DNA, 15 bp, Homo sapiens
ttctatccttttgtt

SEQ ID NO: 1113720 - DNA, 15 bp, Homo sapiens
tttctatccttttgt

SEQ ID NO: 1113721 - DNA, 15 bp, Homo sapiens
ctttctatccttttg

SEQ ID NO: 1113722 - DNA, 15 bp, Homo sapiens
cctttctatcctttt

SEQ ID NO: 1113723 - DNA, 15 bp, Homo sapiens
gcctttctatccttt

SEQ ID NO: 1113724 - DNA, 15 bp, Homo sapiens
cgcctttctatcctt

SEQ ID NO: 1113725 - DNA, 15 bp, Homo sapiens
tcgcctttctatcct

SEQ ID NO: 1113726 - DNA, 15 bp, Homo sapiens
ctcgcctttctatcc

SEQ ID NO: 1113727 - DNA, 15 bp, Homo sapiens
gctcgcctttctatc

SEQ ID NO: 1113728 - DNA, 15 bp, Homo sapiens
tgctcgcctttctat

SEQ ID NO: 1113729 - DNA, 15 bp, Homo sapiens
gtgctcgcctttcta

SEQ ID NO: 1113730 - DNA, 15 bp, Homo sapiens
tgtgctcgcctttct

SEQ ID NO: 1113731 - DNA, 15 bp, Homo sapiens
ttgtgctcgcctttc

SEQ ID NO: 1113732 - DNA, 15 bp, Homo sapiens
tttgtgctcgccttt

SEQ ID NO: 1113733 - DNA, 15 bp, Homo sapiens
atttgtgctcgcctt

SEQ ID NO: 1113734 - DNA, 15 bp, Homo sapiens
tatttgtgctcgcct

SEQ ID NO: 1113735 - DNA, 15 bp, Homo sapiens
atatttgtgctcgcc

SEQ ID NO: 1113736 - DNA, 15 bp, Homo sapiens
aatatttgtgctcgc

SEQ ID NO: 1113737 - DNA, 15 bp, Homo sapiens
gaatatttgtgctcg

SEQ ID NO: 1113738 - DNA, 15 bp, Homo sapiens
ggaatatttgtgctc

SEQ ID NO: 1113739 - DNA, 15 bp, Homo sapiens
gggaatatttgtgct

SEQ ID NO: 1113740 - DNA, 15 bp, Homo sapiens
tgggaatatttgtgc

SEQ ID NO: 1113741 - DNA, 15 bp, Homo sapiens
ttgggaatatttgtg

SEQ ID NO: 1113742 - DNA, 15 bp, Homo sapiens
attgggaatatttgt

SEQ ID NO: 1113743 - DNA, 15 bp, Homo sapiens
aattgggaatatttg

SEQ ID NO: 1113744 - DNA, 15 bp, Homo sapiens
gaattgggaatattt

SEQ ID NO: 1113745 - DNA, 15 bp, Homo sapiens
tgaattgggaatatt

SEQ ID NO: 1113746 - DNA, 15 bp, Homo sapiens
atgaattgggaatat

SEQ ID NO: 1113747 - DNA, 15 bp, Homo sapiens
tatgaattgggaata

SEQ ID NO: 1113748 - DNA, 15 bp, Homo sapiens
ttatgaattgggaat

SEQ ID NO: 1113749 - DNA, 15 bp, Homo sapiens
gttatgaattgggaa

SEQ ID NO: 1113750 - DNA, 15 bp, Homo sapiens
tgttatgaattggga

SEQ ID NO: 1113751 - DNA, 15 bp, Homo sapiens
gtgttatgaattggg

SEQ ID NO: 1113752 - DNA, 15 bp, Homo sapiens
agtgttatgaattgg

SEQ ID NO: 1113753 - DNA, 15 bp, Homo sapiens
gagtgttatgaattg

SEQ ID NO: 1113754 - DNA, 15 bp, Homo sapiens
ggagtgttatgaatt

SEQ ID NO: 1113755 - DNA, 15 bp, Homo sapiens
gggagtgttatgaat

SEQ ID NO: 1113756 - DNA, 15 bp, Homo sapiens
agggagtgttatgaa

SEQ ID NO: 1113757 - DNA, 15 bp, Homo sapiens
gagggagtgttatga

SEQ ID NO: 1113758 - DNA, 15 bp, Homo sapiens
cgagggagtgttatg

SEQ ID NO: 1113759 - DNA, 15 bp, Homo sapiens
gcgagggagtgttat

SEQ ID NO: 1113760 - DNA, 15 bp, Homo sapiens
tgcgagggagtgtta

SEQ ID NO: 1113761 - DNA, 15 bp, Homo sapiens
gtgcgagggagtgtt

SEQ ID NO: 1113762 - DNA, 15 bp, Homo sapiens
agtgcgagggagtgt

SEQ ID NO: 1113763 - DNA, 15 bp, Homo sapiens
cagtgcgagggagtg

SEQ ID NO: 1113764 - DNA, 15 bp, Homo sapiens
acagtgcgagggagt

SEQ ID NO: 1113765 - DNA, 15 bp, Homo sapiens
gacagtgcgagggag

SEQ ID NO: 1113766 - DNA, 15 bp, Homo sapiens
tgacagtgcgaggga

SEQ ID NO: 1113767 - DNA, 15 bp, Homo sapiens
ttgacagtgcgaggg

SEQ ID NO: 1113768 - DNA, 15 bp, Homo sapiens
attgacagtgcgagg

SEQ ID NO: 1113769 - DNA, 15 bp, Homo sapiens
cattgacagtgcgag

SEQ ID NO: 1113770 - DNA, 15 bp, Homo sapiens
gcattgacagtgcga

SEQ ID NO: 1113771 - DNA, 15 bp, Homo sapiens
ggcattgacagtgcg

SEQ ID NO: 1113772 - DNA, 15 bp, Homo sapiens
gggcattgacagtgc

SEQ ID NO: 1113773 - DNA, 15 bp, Homo sapiens
ggggcattgacagtg

SEQ ID NO: 1113774 - DNA, 15 bp, Homo sapiens
tggggcattgacagt

SEQ ID NO: 1113775 - DNA, 15 bp, Homo sapiens
ctggggcattgacag

SEQ ID NO: 1113776 - DNA, 15 bp, Homo sapiens
tctggggcattgaca

SEQ ID NO: 1113777 - DNA, 15 bp, Homo sapiens
gtctggggcattgac

SEQ ID NO: 1113778 - DNA, 15 bp, Homo sapiens
tgtctggggcattga

SEQ ID NO: 1113779 - DNA, 15 bp, Homo sapiens
gtgtctggggcattg

SEQ ID NO: 1113780 - DNA, 15 bp, Homo sapiens
cgtgtctggggcatt

SEQ ID NO: 1113781 - DNA, 15 bp, Homo sapiens
gcgtgtctggggcat

SEQ ID NO: 1113782 - DNA, 15 bp, Homo sapiens
cgcgtgtctggggca

SEQ ID NO: 1113783 - DNA, 15 bp, Homo sapiens
gcgcgtgtctggggc

SEQ ID NO: 1113784 - DNA, 15 bp, Homo sapiens
agcgcgtgtctgggg

SEQ ID NO: 1113785 - DNA, 15 bp, Homo sapiens
tagcgcgtgtctggg

SEQ ID NO: 1113786 - DNA, 15 bp, Homo sapiens
atagcgcgtgtctgg

SEQ ID NO: 1113787 - DNA, 15 bp, Homo sapiens
gatagcgcgtgtctg

SEQ ID NO: 1113788 - DNA, 15 bp, Homo sapiens
tgatagcgcgtgtct

SEQ ID NO: 1113789 - DNA, 15 bp, Homo sapiens
atgatagcgcgtgtc

SEQ ID NO: 1113790 - DNA, 15 bp, Homo sapiens
gatgatagcgcgtgt

SEQ ID NO: 1113791 - DNA, 15 bp, Homo sapiens
agatgatagcgcgtg

SEQ ID NO: 1113792 - DNA, 15 bp, Homo sapiens
gagatgatagcgcgt

SEQ ID NO: 1113793 - DNA, 15 bp, Homo sapiens
agagatgatagcgcg

SEQ ID NO: 1113794 - DNA, 15 bp, Homo sapiens
tagagatgatagcgc

SEQ ID NO: 1113795 - DNA, 15 bp, Homo sapiens
ctagagatgatagcg

SEQ ID NO: 1113796 - DNA, 15 bp, Homo sapiens
gctagagatgatagc

SEQ ID NO: 1113797 - DNA, 15 bp, Homo sapiens
tgctagagatgatag

SEQ ID NO: 1113798 - DNA, 15 bp, Homo sapiens
ttgctagagatgata

SEQ ID NO: 1113799 - DNA, 15 bp, Homo sapiens
tttgctagagatgat

SEQ ID NO: 1113800 - DNA, 15 bp, Homo sapiens
gtttgctagagatga

SEQ ID NO: 1113801 - DNA, 15 bp, Homo sapiens
agtttgctagagatg

SEQ ID NO: 1113802 - DNA, 15 bp, Homo sapiens
gagtttgctagagat

SEQ ID NO: 1113803 - DNA, 15 bp, Homo sapiens
ggagtttgctagaga

SEQ ID NO: 1113804 - DNA, 15 bp, Homo sapiens
gggagtttgctagag

SEQ ID NO: 1113805 - DNA, 15 bp, Homo sapiens
ggggagtttgctaga

SEQ ID NO: 1113806 - DNA, 15 bp, Homo sapiens
gggggagtttgctag

SEQ ID NO: 1113807 - DNA, 15 bp, Homo sapiens
tgggggagtttgcta

SEQ ID NO: 1113808 - DNA, 15 bp, Homo sapiens
ctgggggagtttgct

SEQ ID NO: 1113809 - DNA, 15 bp, Homo sapiens
cctgggggagtttgc

SEQ ID NO: 1113810 - DNA, 15 bp, Homo sapiens
gcctgggggagtttg

SEQ ID NO: 1113811 - DNA, 15 bp, Homo sapiens
cgcctgggggagttt

SEQ ID NO: 1113812 - DNA, 15 bp, Homo sapiens
gcgcctgggggagtt

SEQ ID NO: 1113813 - DNA, 15 bp, Homo sapiens
ggcgcctgggggagt

SEQ ID NO: 1113814 - DNA, 15 bp, Homo sapiens
aggcgcctgggggag

SEQ ID NO: 1113815 - DNA, 15 bp, Homo sapiens
caggcgcctggggga

SEQ ID NO: 1113816 - DNA, 15 bp, Homo sapiens
gcaggcgcctggggg

SEQ ID NO: 1113817 - DNA, 15 bp, Homo sapiens
tgcaggcgcctgggg

SEQ ID NO: 1113818 - DNA, 15 bp, Homo sapiens
ctgcaggcgcctggg

SEQ ID NO: 1113819 - DNA, 15 bp, Homo sapiens
cctgcaggcgcctgg

SEQ ID NO: 1113820 - DNA, 15 bp, Homo sapiens
tcctgcaggcgcctg

SEQ ID NO: 1113821 - DNA, 15 bp, Homo sapiens
atcctgcaggcgcct

SEQ ID NO: 1113822 - DNA, 15 bp, Homo sapiens
catcctgcaggcgcc

SEQ ID NO: 1113823 - DNA, 15 bp, Homo sapiens
ccatcctgcaggcgc

SEQ ID NO: 1113824 - DNA, 15 bp, Homo sapiens
cccatcctgcaggcg

SEQ ID NO: 1113825 - DNA, 15 bp, Homo sapiens
acccatcctgcaggc

SEQ ID NO: 1113826 - DNA, 15 bp, Homo sapiens
aacccatcctgcagg

SEQ ID NO: 1113827 - DNA, 15 bp, Homo sapiens
taacccatcctgcag

SEQ ID NO: 1113828 - DNA, 15 bp, Homo sapiens
ttaacccatcctgca

SEQ ID NO: 1113829 - DNA, 15 bp, Homo sapiens
cttaacccatcctgc

SEQ ID NO: 1113830 - DNA, 15 bp, Homo sapiens
ccttaacccatcctg

SEQ ID NO: 1113831 - DNA, 15 bp, Homo sapiens
ttccttaacccatcc

SEQ ID NO: 1113832 - DNA, 15 bp, Homo sapiens
cttccttaacccatc

SEQ ID NO: 1113833 - DNA, 15 bp, Homo sapiens
ccttccttaacccat

SEQ ID NO: 1113834 - DNA, 15 bp, Homo sapiens
gccttccttaaccca

SEQ ID NO: 1113835 - DNA, 15 bp, Homo sapiens
cgccttccttaaccc

SEQ ID NO: 1113836 - DNA, 15 bp, Homo sapiens
tcgccttccttaacc

SEQ ID NO: 1113837 - DNA, 15 bp, Homo sapiens
gtcgccttccttaac

SEQ ID NO: 1113838 - DNA, 15 bp, Homo sapiens
cgtcgccttccttaa

SEQ ID NO: 1113839 - DNA, 15 bp, Homo sapiens
tcgtcgccttcctta

SEQ ID NO: 1113840 - DNA, 15 bp, Homo sapiens
ctcgtcgccttcctt

SEQ ID NO: 1113841 - DNA, 15 bp, Homo sapiens
gctcgtcgccttcct

SEQ ID NO: 1113842 - DNA, 15 bp, Homo sapiens
tgctcgtcgccttcc

SEQ ID NO: 1113843 - DNA, 15 bp, Homo sapiens
gtgctcgtcgccttc

SEQ ID NO: 1113844 - DNA, 15 bp, Homo sapiens
ggtgctcgtcgcctt

SEQ ID NO: 1113845 - DNA, 15 bp, Homo sapiens
tggtgctcgtcgcct

SEQ ID NO: 1113846 - DNA, 15 bp, Homo sapiens
ctggtgctcgtcgcc

SEQ ID NO: 1113847 - DNA, 15 bp, Homo sapiens
gctggtgctcgtcgc

SEQ ID NO: 1113848 - DNA, 15 bp, Homo sapiens
agctggtgctcgtcg

SEQ ID NO: 1113849 - DNA, 15 bp, Homo sapiens
cagctggtgctcgtc

SEQ ID NO: 1113850 - DNA, 15 bp, Homo sapiens
gcagctggtgctcgt

SEQ ID NO: 1113851 - DNA, 15 bp, Homo sapiens
ggcagctggtgctcg

SEQ ID NO: 1113852 - DNA, 15 bp, Homo sapiens
gggcagctggtgctc

SEQ ID NO: 1113853 - DNA, 15 bp, Homo sapiens
agggcagctggtgct

SEQ ID NO: 1113854 - DNA, 15 bp, Homo sapiens
cagggcagctggtgc

SEQ ID NO: 1113855 - DNA, 15 bp, Homo sapiens
gcagggcagctggtg

SEQ ID NO: 1113856 - DNA, 15 bp, Homo sapiens
agcagggcagctggt

SEQ ID NO: 1113857 - DNA, 15 bp, Homo sapiens
cagcagggcagctgg

SEQ ID NO: 1113858 - DNA, 15 bp, Homo sapiens
tcagcagggcagctg

SEQ ID NO: 1113859 - DNA, 15 bp, Homo sapiens
ctcagcagggcagct

SEQ ID NO: 1113860 - DNA, 15 bp, Homo sapiens
cctcagcagggcagc

SEQ ID NO: 1113861 - DNA, 15 bp, Homo sapiens
gcctcagcagggcag

SEQ ID NO: 1113862 - DNA, 15 bp, Homo sapiens
agcctcagcagggca

SEQ ID NO: 1113863 - DNA, 15 bp, Homo sapiens
cagcctcagcagggc

SEQ ID NO: 1113864 - DNA, 15 bp, Homo sapiens
acagcctcagcaggg

SEQ ID NO: 1113865 - DNA, 15 bp, Homo sapiens
gacagcctcagcagg

SEQ ID NO: 1113866 - DNA, 15 bp, Homo sapiens
ggacagcctcagcag

SEQ ID NO: 1113867 - DNA, 15 bp, Homo sapiens
gggacagcctcagca

SEQ ID NO: 1113868 - DNA, 15 bp, Homo sapiens
cgggacagcctcagc

SEQ ID NO: 1113869 - DNA, 15 bp, Homo sapiens
tcgggacagcctcag

SEQ ID NO: 1113870 - DNA, 15 bp, Homo sapiens
gtcgggacagcctca

SEQ ID NO: 1113871 - DNA, 15 bp, Homo sapiens
cgtcgggacagcctc

SEQ ID NO: 1113872 - DNA, 15 bp, Homo sapiens
acgtcgggacagcct

SEQ ID NO: 1113873 - DNA, 15 bp, Homo sapiens
gacgtcgggacagcc

SEQ ID NO: 1113874 - DNA, 15 bp, Homo sapiens
tgacgtcgggacagc

SEQ ID NO: 1113875 - DNA, 15 bp, Homo sapiens
gtgacgtcgggacag

SEQ ID NO: 1113876 - DNA, 15 bp, Homo sapiens
tgtgacgtcgggaca

SEQ ID NO: 1113877 - DNA, 15 bp, Homo sapiens
atgtgacgtcgggac

SEQ ID NO: 1113878 - DNA, 15 bp, Homo sapiens
catgtgacgtcggga

SEQ ID NO: 1113879 - DNA, 15 bp, Homo sapiens
tcatgtgacgtcggg

SEQ ID NO: 1113880 - DNA, 15 bp, Homo sapiens
atcatgtgacgtcgg

SEQ ID NO: 1113881 - DNA, 15 bp, Homo sapiens
aatcatgtgacgtcg

SEQ ID NO: 1113882 - DNA, 15 bp, Homo sapiens
gaatcatgtgacgtc

SEQ ID NO: 1113883 - DNA, 15 bp, Homo sapiens
agaatcatgtgacgt

SEQ ID NO: 1113884 - DNA, 15 bp, Homo sapiens
gagaatcatgtgacg

SEQ ID NO: 1113885 - DNA, 15 bp, Homo sapiens
ggagaatcatgtgac

SEQ ID NO: 1113886 - DNA, 15 bp, Homo sapiens
tggagaatcatgtga

SEQ ID NO: 1113887 - DNA, 15 bp, Homo sapiens
ttggagaatcatgtg

SEQ ID NO: 1113888 - DNA, 15 bp, Homo sapiens
attggagaatcatgt

SEQ ID NO: 1113889 - DNA, 15 bp, Homo sapiens
gattggagaatcatg

SEQ ID NO: 1113890 - DNA, 15 bp, Homo sapiens
tgattggagaatcat

SEQ ID NO: 1113891 - DNA, 15 bp, Homo sapiens
gtgattggagaatca

SEQ ID NO: 1113892 - DNA, 15 bp, Homo sapiens
tgtgattggagaatc

SEQ ID NO: 1113893 - DNA, 15 bp, Homo sapiens
atgtgattggagaat

SEQ ID NO: 1113894 - DNA, 15 bp, Homo sapiens
catgtgattggagaa

SEQ ID NO: 1113895 - DNA, 15 bp, Homo sapiens
tcatgtgattggaga

SEQ ID NO: 1113896 - DNA, 15 bp, Homo sapiens
atcatgtgattggag

SEQ ID NO: 1113897 - DNA, 15 bp, Homo sapiens
gatcatgtgattgga

SEQ ID NO: 1113898 - DNA, 15 bp, Homo sapiens
ggatcatgtgattgg

SEQ ID NO: 1113899 - DNA, 15 bp, Homo sapiens
gggatcatgtgattg

SEQ ID NO: 1113900 - DNA, 15 bp, Homo sapiens
agggatcatgtgatt

SEQ ID NO: 1113901 - DNA, 15 bp, Homo sapiens
tagggatcatgtgat

SEQ ID NO: 1113902 - DNA, 15 bp, Homo sapiens
ctagggatcatgtga

SEQ ID NO: 1113903 - DNA, 15 bp, Homo sapiens
tctagggatcatgtg

SEQ ID NO: 1113904 - DNA, 15 bp, Homo sapiens
ttctagggatcatgt

SEQ ID NO: 1113905 - DNA, 15 bp, Homo sapiens
tttctagggatcatg

SEQ ID NO: 1113906 - DNA, 15 bp, Homo sapiens
atttctagggatcat

SEQ ID NO: 1113907 - DNA, 15 bp, Homo sapiens
catttctagggatca

SEQ ID NO: 1113908 - DNA, 15 bp, Homo sapiens
ccatttctagggatc

SEQ ID NO: 1113909 - DNA, 15 bp, Homo sapiens
cccatttctagggat

SEQ ID NO: 1113910 - DNA, 15 bp, Homo sapiens
ccccatttctaggga

SEQ ID NO: 1113911 - DNA, 15 bp, Homo sapiens
accccatttctaggg

SEQ ID NO: 1113912 - DNA, 15 bp, Homo sapiens
caccccatttctagg

SEQ ID NO: 1113913 - DNA, 15 bp, Homo sapiens
acaccccatttctag

SEQ ID NO: 1113914 - DNA, 15 bp, Homo sapiens
cacaccccatttcta

SEQ ID NO: 1113915 - DNA, 15 bp, Homo sapiens
ccacaccccatttct

SEQ ID NO: 1113916 - DNA, 15 bp, Homo sapiens
cccacaccccatttc

SEQ ID NO: 1113917 - DNA, 15 bp, Homo sapiens
ccccacaccccattt

SEQ ID NO: 1113918 - DNA, 15 bp, Homo sapiens
gccccacaccccatt

SEQ ID NO: 1113919 - DNA, 15 bp, Homo sapiens
cgccccacaccccat

SEQ ID NO: 1113920 - DNA, 15 bp, Homo sapiens
tcgccccacacccca

SEQ ID NO: 1113921 - DNA, 15 bp, Homo sapiens
ctcgccccacacccc

SEQ ID NO: 1113922 - DNA, 15 bp, Homo sapiens
tctcgccccacaccc

SEQ ID NO: 1113923 - DNA, 15 bp, Homo sapiens
ctctcgccccacacc

SEQ ID NO: 1113924 - DNA, 15 bp, Homo sapiens
cctctcgccccacac

SEQ ID NO: 1113925 - DNA, 15 bp, Homo sapiens
tcctctcgccccaca

SEQ ID NO: 1113926 - DNA, 15 bp, Homo sapiens
ttcctctcgccccac

SEQ ID NO: 1113927 - DNA, 15 bp, Homo sapiens
cttcctctcgcccca

SEQ ID NO: 1113928 - DNA, 15 bp, Homo sapiens
gcttcctctcgcccc

SEQ ID NO: 1113929 - DNA, 15 bp, Homo sapiens
tgcttcctctcgccc

SEQ ID NO: 1113930 - DNA, 15 bp, Homo sapiens
ctgcttcctctcgcc

SEQ ID NO: 1113931 - DNA, 15 bp, Homo sapiens
cctgcttcctctcgc

SEQ ID NO: 1113932 - DNA, 15 bp, Homo sapiens
ccctgcttcctctcg

SEQ ID NO: 1113933 - DNA, 15 bp, Homo sapiens
tccctgcttcctctc

SEQ ID NO: 1113934 - DNA, 15 bp, Homo sapiens
ctccctgcttcctct

SEQ ID NO: 1113935 - DNA, 15 bp, Homo sapiens
cctccctgcttcctc

SEQ ID NO: 1113936 - DNA, 15 bp, Homo sapiens
tcctccctgcttcct

SEQ ID NO: 1113937 - DNA, 15 bp, Homo sapiens
ctcctccctgcttcc

SEQ ID NO: 1113938 - DNA, 15 bp, Homo sapiens
tctcctccctgcttc

SEQ ID NO: 1113939 - DNA, 15 bp, Homo sapiens
ctctcctccctgctt

SEQ ID NO: 1113940 - DNA, 15 bp, Homo sapiens
actctcctccctgct

SEQ ID NO: 1113941 - DNA, 15 bp, Homo sapiens
cactctcctccctgc

SEQ ID NO: 1113942 - DNA, 15 bp, Homo sapiens
tcactctcctccctg

SEQ ID NO: 1113943 - DNA, 15 bp, Homo sapiens
atcactctcctccct

SEQ ID NO: 1113944 - DNA, 15 bp, Homo sapiens
aatcactctcctccc

SEQ ID NO: 1113945 - DNA, 15 bp, Homo sapiens
aaatcactctcctcc

SEQ ID NO: 1113946 - DNA, 15 bp, Homo sapiens
caaatcactctcctc

SEQ ID NO: 1113947 - DNA, 15 bp, Homo sapiens
tcaaatcactctcct

SEQ ID NO: 1113948 - DNA, 15 bp, Homo sapiens
ctcaaatcactctcc

SEQ ID NO: 1113949 - DNA, 15 bp, Homo sapiens
actcaaatcactctc

SEQ ID NO: 1113950 - DNA, 15 bp, Homo sapiens
tactcaaatcactct

SEQ ID NO: 1113951 - DNA, 15 bp, Homo sapiens
ctactcaaatcactc

SEQ ID NO: 1113952 - DNA, 15 bp, Homo sapiens
tctactcaaatcact

SEQ ID NO: 1113953 - DNA, 15 bp, Homo sapiens
ttctactcaaatcac

SEQ ID NO: 1113954 - DNA, 15 bp, Homo sapiens
tttctactcaaatca

SEQ ID NO: 1113955 - DNA, 15 bp, Homo sapiens
ttttctactcaaatc

SEQ ID NO: 1113956 - DNA, 15 bp, Homo sapiens
cttttctactcaaat

SEQ ID NO: 1113957 - DNA, 15 bp, Homo sapiens
tcttttctactcaaa

SEQ ID NO: 1113958 - DNA, 15 bp, Homo sapiens
ttcttttctactcaa

SEQ ID NO: 1113959 - DNA, 15 bp, Homo sapiens
tttcttttctactca

SEQ ID NO: 1113960 - DNA, 15 bp, Homo sapiens
gtttcttttctactc

SEQ ID NO: 1113961 - DNA, 15 bp, Homo sapiens
tgtttcttttctact

SEQ ID NO: 1113962 - DNA, 15 bp, Homo sapiens
gtgtttcttttctac

SEQ ID NO: 1113963 - DNA, 15 bp, Homo sapiens
tgtgtttcttttcta

SEQ ID NO: 1113964 - DNA, 15 bp, Homo sapiens
ctgtgtttcttttct

SEQ ID NO: 1113965 - DNA, 15 bp, Homo sapiens
gctgtgtttcttttc

SEQ ID NO: 1113966 - DNA, 15 bp, Homo sapiens
tgctgtgtttctttt

SEQ ID NO: 1113967 - DNA, 15 bp, Homo sapiens
atgctgtgtttcttt

SEQ ID NO: 1113968 - DNA, 15 bp, Homo sapiens
aatgctgtgtttctt

SEQ ID NO: 1113969 - DNA, 15 bp, Homo sapiens
gaatgctgtgtttct

SEQ ID NO: 1113970 - DNA, 15 bp, Homo sapiens
ggaatgctgtgtttc

SEQ ID NO: 1113971 - DNA, 15 bp, Homo sapiens
tggaatgctgtgttt

SEQ ID NO: 1113972 - DNA, 15 bp, Homo sapiens
ctggaatgctgtgtt

SEQ ID NO: 1113973 - DNA, 15 bp, Homo sapiens
cctggaatgctgtgt

SEQ ID NO: 1113974 - DNA, 15 bp, Homo sapiens
gcctggaatgctgtg

SEQ ID NO: 1113975 - DNA, 15 bp, Homo sapiens
agcctggaatgctgt

SEQ ID NO: 1113976 - DNA, 15 bp, Homo sapiens
cagcctggaatgctg

SEQ ID NO: 1113977 - DNA, 15 bp, Homo sapiens
ccagcctggaatgct

SEQ ID NO: 1113978 - DNA, 15 bp, Homo sapiens
gccagcctggaatgc

SEQ ID NO: 1113979 - DNA, 15 bp, Homo sapiens
ggccagcctggaatg

SEQ ID NO: 1113980 - DNA, 15 bp, Homo sapiens
gggccagcctggaat

SEQ ID NO: 1113981 - DNA, 15 bp, Homo sapiens
ggggccagcctggaa

SEQ ID NO: 1113982 - DNA, 15 bp, Homo sapiens
tggggccagcctgga

SEQ ID NO: 1113983 - DNA, 15 bp, Homo sapiens
gtggggccagcctgg

SEQ ID NO: 1113984 - DNA, 15 bp, Homo sapiens
ggtggggccagcctg

SEQ ID NO: 1113985 - DNA, 15 bp, Homo sapiens
aggtggggccagcct

SEQ ID NO: 1113986 - DNA, 15 bp, Homo sapiens
gaggtggggccagcc

SEQ ID NO: 1113987 - DNA, 15 bp, Homo sapiens
agaggtggggccagc

SEQ ID NO: 1113988 - DNA, 15 bp, Homo sapiens
tagaggtggggccag

SEQ ID NO: 1113989 - DNA, 15 bp, Homo sapiens
atagaggtggggcca

SEQ ID NO: 1113990 - DNA, 15 bp, Homo sapiens
tatagaggtggggcc

SEQ ID NO: 1113991 - DNA, 15 bp, Homo sapiens
atatagaggtggggc

SEQ ID NO: 1113992 - DNA, 15 bp, Homo sapiens
aatatagaggtgggg

SEQ ID NO: 1113993 - DNA, 15 bp, Homo sapiens
caatatagaggtggg

SEQ ID NO: 1113994 - DNA, 15 bp, Homo sapiens
tcaatatagaggtgg

SEQ ID NO: 1113995 - DNA, 15 bp, Homo sapiens
atcaatatagaggtg

SEQ ID NO: 1113996 - DNA, 15 bp, Homo sapiens
tatcaatatagaggt

SEQ ID NO: 1113997 - DNA, 15 bp, Homo sapiens
ttatcaatatagagg

SEQ ID NO: 1113998 - DNA, 15 bp, Homo sapiens
cttatcaatatagag

SEQ ID NO: 1113999 - DNA, 15 bp, Homo sapiens
acttatcaatataga

SEQ ID NO: 1114000 - DNA, 15 bp, Homo sapiens
tacttatcaatatag

SEQ ID NO: 1114001 - DNA, 15 bp, Homo sapiens
ctacttatcaatata

SEQ ID NO: 1114002 - DNA, 15 bp, Homo sapiens
gctacttatcaatat

SEQ ID NO: 1114003 - DNA, 15 bp, Homo sapiens
ggctacttatcaata

SEQ ID NO: 1114004 - DNA, 15 bp, Homo sapiens
tggctacttatcaat

SEQ ID NO: 1114005 - DNA, 15 bp, Homo sapiens
ttggctacttatcaa

SEQ ID NO: 1114006 - DNA, 15 bp, Homo sapiens
attggctacttatca

SEQ ID NO: 1114007 - DNA, 15 bp, Homo sapiens
cattggctacttatc

SEQ ID NO: 1114008 - DNA, 15 bp, Homo sapiens
ccattggctacttat

SEQ ID NO: 1114009 - DNA, 15 bp, Homo sapiens
cccattggctactta

SEQ ID NO: 1114010 - DNA, 15 bp, Homo sapiens
tcccattggctactt

SEQ ID NO: 1114011 - DNA, 15 bp, Homo sapiens
ctcccattggctact

SEQ ID NO: 1114012 - DNA, 15 bp, Homo sapiens
gctcccattggctac

SEQ ID NO: 1114013 - DNA, 15 bp, Homo sapiens
cgctcccattggcta

SEQ ID NO: 1114014 - DNA, 15 bp, Homo sapiens
ccgctcccattggct

SEQ ID NO: 1114015 - DNA, 15 bp, Homo sapiens
cccgctcccattggc

SEQ ID NO: 1114016 - DNA, 15 bp, Homo sapiens
acccgctcccattgg

SEQ ID NO: 1114017 - DNA, 15 bp, Homo sapiens
tacccgctcccattg

SEQ ID NO: 1114018 - DNA, 15 bp, Homo sapiens
ctacccgctcccatt

SEQ ID NO: 1114019 - DNA, 15 bp, Homo sapiens
gctacccgctcccat

SEQ ID NO: 1114020 - DNA, 15 bp, Homo sapiens
ggctacccgctccca

SEQ ID NO: 1114021 - DNA, 15 bp, Homo sapiens
gggctacccgctccc

SEQ ID NO: 1114022 - DNA, 15 bp, Homo sapiens
agggctacccgctcc

SEQ ID NO: 1114023 - DNA, 15 bp, Homo sapiens
cagggctacccgctc

SEQ ID NO: 1114024 - DNA, 15 bp, Homo sapiens
tcagggctacccgct

SEQ ID NO: 1114025 - DNA, 15 bp, Homo sapiens
atcagggctacccgc

SEQ ID NO: 1114026 - DNA, 15 bp, Homo sapiens
gatcagggctacccg

SEQ ID NO: 1114027 - DNA, 15 bp, Homo sapiens
ggatcagggctaccc

SEQ ID NO: 1114028 - DNA, 15 bp, Homo sapiens
gggatcagggctacc

SEQ ID NO: 1114029 - DNA, 15 bp, Homo sapiens
agggatcagggctac

SEQ ID NO: 1114030 - DNA, 15 bp, Homo sapiens
cagggatcagggcta

SEQ ID NO: 1114031 - DNA, 15 bp, Homo sapiens
ccagggatcagggct

SEQ ID NO: 1114032 - DNA, 15 bp, Homo sapiens
gccagggatcagggc

SEQ ID NO: 1114033 - DNA, 15 bp, Homo sapiens
ggccagggatcaggg

SEQ ID NO: 1114034 - DNA, 15 bp, Homo sapiens
tggccagggatcagg

SEQ ID NO: 1114035 - DNA, 15 bp, Homo sapiens
ttggccagggatcag

SEQ ID NO: 1114036 - DNA, 15 bp, Homo sapiens
attggccagggatca

SEQ ID NO: 1114037 - DNA, 15 bp, Homo sapiens
cattggccagggatc

SEQ ID NO: 1114038 - DNA, 15 bp, Homo sapiens
ccattggccagggat

SEQ ID NO: 1114039 - DNA, 15 bp, Homo sapiens
tccattggccaggga

SEQ ID NO: 1114040 - DNA, 15 bp, Homo sapiens
ttccattggccaggg

SEQ ID NO: 1114041 - DNA, 15 bp, Homo sapiens
tttccattggccagg

SEQ ID NO: 1114042 - DNA, 15 bp, Homo sapiens
gtttccattggccag

SEQ ID NO: 1114043 - DNA, 15 bp, Homo sapiens
agtttccattggcca

SEQ ID NO: 1114044 - DNA, 15 bp, Homo sapiens
cagtttccattggcc

SEQ ID NO: 1114045 - DNA, 15 bp, Homo sapiens
tcagtttccattggc

SEQ ID NO: 1114046 - DNA, 15 bp, Homo sapiens
ctcagtttccattgg

SEQ ID NO: 1114047 - DNA, 15 bp, Homo sapiens
cctcagtttccattg

SEQ ID NO: 1114048 - DNA, 15 bp, Homo sapiens
acctcagtttccatt

SEQ ID NO: 1114049 - DNA, 15 bp, Homo sapiens
tacctcagtttccat

SEQ ID NO: 1114050 - DNA, 15 bp, Homo sapiens
ctacctcagtttcca

SEQ ID NO: 1114051 - DNA, 15 bp, Homo sapiens
cctacctcagtttcc

SEQ ID NO: 1114052 - DNA, 15 bp, Homo sapiens
gcctacctcagtttc

SEQ ID NO: 1114053 - DNA, 15 bp, Homo sapiens
cgcctacctcagttt

SEQ ID NO: 1114054 - DNA, 15 bp, Homo sapiens
ccgcctacctcagtt

SEQ ID NO: 1114055 - DNA, 15 bp, Homo sapiens
cccgcctacctcagt

SEQ ID NO: 1114056 - DNA, 15 bp, Homo sapiens
acccgcctacctcag

SEQ ID NO: 1114057 - DNA, 15 bp, Homo sapiens
gacccgcctacctca

SEQ ID NO: 1114058 - DNA, 15 bp, Homo sapiens
tgacccgcctacctc

SEQ ID NO: 1114059 - DNA, 15 bp, Homo sapiens
atgacccgcctacct

SEQ ID NO: 1114060 - DNA, 15 bp, Homo sapiens
gatgacccgcctacc

SEQ ID NO: 1114061 - DNA, 15 bp, Homo sapiens
cgatgacccgcctac

SEQ ID NO: 1114062 - DNA, 15 bp, Homo sapiens
gcgatgacccgccta

SEQ ID NO: 1114063 - DNA, 15 bp, Homo sapiens
cgcgatgacccgcct

SEQ ID NO: 1114064 - DNA, 15 bp, Homo sapiens
gcgcgatgacccgcc

SEQ ID NO: 1114065 - DNA, 15 bp, Homo sapiens
agcgcgatgacccgc

SEQ ID NO: 1114066 - DNA, 15 bp, Homo sapiens
cagcgcgatgacccg

SEQ ID NO: 1114067 - DNA, 15 bp, Homo sapiens
ccagcgcgatgaccc

SEQ ID NO: 1114068 - DNA, 15 bp, Homo sapiens
cccagcgcgatgacc

SEQ ID NO: 1114069 - DNA, 15 bp, Homo sapiens
ccccagcgcgatgac

SEQ ID NO: 1114070 - DNA, 15 bp, Homo sapiens
accccagcgcgatga

SEQ ID NO: 1114071 - DNA, 15 bp, Homo sapiens
gaccccagcgcgatg

SEQ ID NO: 1114072 - DNA, 15 bp, Homo sapiens
agaccccagcgcgat

SEQ ID NO: 1114073 - DNA, 15 bp, Homo sapiens
cagaccccagcgcga

SEQ ID NO: 1114074 - DNA, 15 bp, Homo sapiens
acagaccccagcgcg

SEQ ID NO: 1114075 - DNA, 15 bp, Homo sapiens
tacagaccccagcgc

SEQ ID NO: 1114076 - DNA, 15 bp, Homo sapiens
ctacagaccccagcg

SEQ ID NO: 1114077 - DNA, 15 bp, Homo sapiens
actacagaccccagc

SEQ ID NO: 1114078 - DNA, 15 bp, Homo sapiens
gactacagaccccag

SEQ ID NO: 1114079 - DNA, 15 bp, Homo sapiens
agactacagacccca

SEQ ID NO: 1114080 - DNA, 15 bp, Homo sapiens
cagactacagacccc

SEQ ID NO: 1114081 - DNA, 15 bp, Homo sapiens
tcagactacagaccc

SEQ ID NO: 1114082 - DNA, 15 bp, Homo sapiens
ctcagactacagacc

SEQ ID NO: 1114083 - DNA, 15 bp, Homo sapiens
gctcagactacagac

SEQ ID NO: 1114084 - DNA, 15 bp, Homo sapiens
cgctcagactacaga

SEQ ID NO: 1114085 - DNA, 15 bp, Homo sapiens
gcgctcagactacag

SEQ ID NO: 1114086 - DNA, 15 bp, Homo sapiens
agcgctcagactaca

SEQ ID NO: 1114087 - DNA, 15 bp, Homo sapiens
tagcgctcagactac

SEQ ID NO: 1114088 - DNA, 15 bp, Homo sapiens
gtagcgctcagacta

SEQ ID NO: 1114089 - DNA, 15 bp, Homo sapiens
ggtagcgctcagact

SEQ ID NO: 1114090 - DNA, 15 bp, Homo sapiens
gggtagcgctcagac

SEQ ID NO: 1114091 - DNA, 15 bp, Homo sapiens
cgggtagcgctcaga

SEQ ID NO: 1114092 - DNA, 15 bp, Homo sapiens
ccgggtagcgctcag

SEQ ID NO: 1114093 - DNA, 15 bp, Homo sapiens
accgggtagcgctca

SEQ ID NO: 1114094 - DNA, 15 bp, Homo sapiens
aaccgggtagcgctc

SEQ ID NO: 1114095 - DNA, 15 bp, Homo sapiens
caaccgggtagcgct

SEQ ID NO: 1114096 - DNA, 15 bp, Homo sapiens
gcaaccgggtagcgc

SEQ ID NO: 1114097 - DNA, 15 bp, Homo sapiens
agcaaccgggtagcg

SEQ ID NO: 1114098 - DNA, 15 bp, Homo sapiens
cagcaaccgggtagc

SEQ ID NO: 1114099 - DNA, 15 bp, Homo sapiens
gcagcaaccgggtag

SEQ ID NO: 1114100 - DNA, 15 bp, Homo sapiens
agcagcaaccgggta

SEQ ID NO: 1114101 - DNA, 15 bp, Homo sapiens
cagcagcaaccgggt

SEQ ID NO: 1114102 - DNA, 15 bp, Homo sapiens
gcagcagcaaccggg

SEQ ID NO: 1114103 - DNA, 15 bp, Homo sapiens
ggcagcagcaaccgg

SEQ ID NO: 1114104 - DNA, 15 bp, Homo sapiens
gggcagcagcaaccg

SEQ ID NO: 1114105 - DNA, 15 bp, Homo sapiens
tgggcagcagcaacc

SEQ ID NO: 1114106 - DNA, 15 bp, Homo sapiens
ttgggcagcagcaac

SEQ ID NO: 1114107 - DNA, 15 bp, Homo sapiens
cttgggcagcagcaa

SEQ ID NO: 1114108 - DNA, 15 bp, Homo sapiens
ccttgggcagcagca

SEQ ID NO: 1114109 - DNA, 15 bp, Homo sapiens
tccttgggcagcagc

SEQ ID NO: 1114110 - DNA, 15 bp, Homo sapiens
gtccttgggcagcag

SEQ ID NO: 1114111 - DNA, 15 bp, Homo sapiens
ggtccttgggcagca

SEQ ID NO: 1114112 - DNA, 15 bp, Homo sapiens
cggtccttgggcagc

SEQ ID NO: 1114113 - DNA, 15 bp, Homo sapiens
gcggtccttgggcag

SEQ ID NO: 1114114 - DNA, 15 bp, Homo sapiens
cgcggtccttgggca

SEQ ID NO: 1114115 - DNA, 15 bp, Homo sapiens
ccgcggtccttgggc

SEQ ID NO: 1114116 - DNA, 15 bp, Homo sapiens
tccgcggtccttggg

SEQ ID NO: 1114117 - DNA, 15 bp, Homo sapiens
ctccgcggtccttgg

SEQ ID NO: 1114118 - DNA, 15 bp, Homo sapiens
actccgcggtccttg

SEQ ID NO: 1114119 - DNA, 15 bp, Homo sapiens
gactccgcggtcctt

SEQ ID NO: 1114120 - DNA, 15 bp, Homo sapiens
cgactccgcggtcct

SEQ ID NO: 1114121 - DNA, 15 bp, Homo sapiens
ccgactccgcggtcc

SEQ ID NO: 1114122 - DNA, 15 bp, Homo sapiens
tccgactccgcggtc

SEQ ID NO: 1114123 - DNA, 15 bp, Homo sapiens
gtccgactccgcggt

SEQ ID NO: 1114124 - DNA, 15 bp, Homo sapiens
cgtccgactccgcgg

SEQ ID NO: 1114125 - DNA, 15 bp, Homo sapiens
gcgtccgactccgcg

SEQ ID NO: 1114126 - DNA, 15 bp, Homo sapiens
tgcgtccgactccgc

SEQ ID NO: 1114127 - DNA, 15 bp, Homo sapiens
ctgcgtccgactccg

SEQ ID NO: 1114128 - DNA, 15 bp, Homo sapiens
cctgcgtccgactcc

SEQ ID NO: 1114129 - DNA, 15 bp, Homo sapiens
acctgcgtccgactc

SEQ ID NO: 1114130 - DNA, 15 bp, Homo sapiens
tacctgcgtccgact

SEQ ID NO: 1114131 - DNA, 15 bp, Homo sapiens
ctacctgcgtccgac

SEQ ID NO: 1114132 - DNA, 15 bp, Homo sapiens
cctacctgcgtccga

SEQ ID NO: 1114133 - DNA, 15 bp, Homo sapiens
tcctacctgcgtccg

SEQ ID NO: 1114134 - DNA, 15 bp, Homo sapiens
ctcctacctgcgtcc

SEQ ID NO: 1114135 - DNA, 15 bp, Homo sapiens
tctcctacctgcgtc

SEQ ID NO: 1114136 - DNA, 15 bp, Homo sapiens
ctctcctacctgcgt

SEQ ID NO: 1114137 - DNA, 15 bp, Homo sapiens
gctctcctacctgcg

SEQ ID NO: 1114138 - DNA, 15 bp, Homo sapiens
cgctctcctacctgc

SEQ ID NO: 1114139 - DNA, 15 bp, Homo sapiens
ccgctctcctacctg

SEQ ID NO: 1114140 - DNA, 15 bp, Homo sapiens
gccgctctcctacct

SEQ ID NO: 1114141 - DNA, 15 bp, Homo sapiens
ggccgctctcctacc

SEQ ID NO: 1114142 - DNA, 15 bp, Homo sapiens
cggccgctctcctac

SEQ ID NO: 1114143 - DNA, 15 bp, Homo sapiens
gcggccgctctccta

SEQ ID NO: 1114144 - DNA, 15 bp, Homo sapiens
cgcggccgctctcct

SEQ ID NO: 1114145 - DNA, 15 bp, Homo sapiens
gcgcggccgctctcc

SEQ ID NO: 1114146 - DNA, 15 bp, Homo sapiens
tgcgcggccgctctc

SEQ ID NO: 1114147 - DNA, 15 bp, Homo sapiens
ctgcgcggccgctct

SEQ ID NO: 1114148 - DNA, 15 bp, Homo sapiens
tctgcgcggccgctc

SEQ ID NO: 1114149 - DNA, 15 bp, Homo sapiens
gtctgcgcggccgct

SEQ ID NO: 1114150 - DNA, 15 bp, Homo sapiens
ggtctgcgcggccgc

SEQ ID NO: 1114151 - DNA, 15 bp, Homo sapiens
aggtctgcgcggccg

SEQ ID NO: 1114152 - DNA, 15 bp, Homo sapiens
gaggtctgcgcggcc

SEQ ID NO: 1114153 - DNA, 15 bp, Homo sapiens
agaggtctgcgcggc

SEQ ID NO: 1114154 - DNA, 15 bp, Homo sapiens
gagaggtctgcgcgg

SEQ ID NO: 1114155 - DNA, 15 bp, Homo sapiens
cgagaggtctgcgcg

SEQ ID NO: 1114156 - DNA, 15 bp, Homo sapiens
gcgagaggtctgcgc

SEQ ID NO: 1114157 - DNA, 15 bp, Homo sapiens
ggcgagaggtctgcg

SEQ ID NO: 1114158 - DNA, 15 bp, Homo sapiens
aggcgagaggtctgc

SEQ ID NO: 1114159 - DNA, 15 bp, Homo sapiens
caggcgagaggtctg

SEQ ID NO: 1114160 - DNA, 15 bp, Homo sapiens
gcaggcgagaggtct

SEQ ID NO: 1114161 - DNA, 15 bp, Homo sapiens
agcaggcgagaggtc

SEQ ID NO: 1114162 - DNA, 15 bp, Homo sapiens
gagcaggcgagaggt

SEQ ID NO: 1114163 - DNA, 15 bp, Homo sapiens
ggagcaggcgagagg

SEQ ID NO: 1114164 - DNA, 15 bp, Homo sapiens
aggagcaggcgagag

SEQ ID NO: 1114165 - DNA, 15 bp, Homo sapiens
caggagcaggcgaga

SEQ ID NO: 1114166 - DNA, 15 bp, Homo sapiens
gcaggagcaggcgag

SEQ ID NO: 1114167 - DNA, 15 bp, Homo sapiens
ggcaggagcaggcga

SEQ ID NO: 1114168 - DNA, 15 bp, Homo sapiens
gggcaggagcaggcg

SEQ ID NO: 1114169 - DNA, 15 bp, Homo sapiens
tgggcaggagcaggc

SEQ ID NO: 1114170 - DNA, 15 bp, Homo sapiens
ctgggcaggagcagg

SEQ ID NO: 1114171 - DNA, 15 bp, Homo sapiens
cctgggcaggagcag

SEQ ID NO: 1114172 - DNA, 15 bp, Homo sapiens
ccctgggcaggagca

SEQ ID NO: 1114173 - DNA, 15 bp, Homo sapiens
cccctgggcaggagc

SEQ ID NO: 1114174 - DNA, 15 bp, Homo sapiens
gcccctgggcaggag

SEQ ID NO: 1114175 - DNA, 15 bp, Homo sapiens
ggcccctgggcagga

SEQ ID NO: 1114176 - DNA, 15 bp, Homo sapiens
gggcccctgggcagg

SEQ ID NO: 1114177 - DNA, 15 bp, Homo sapiens
cgggcccctgggcag

SEQ ID NO: 1114178 - DNA, 15 bp, Homo sapiens
gcgggcccctgggca

SEQ ID NO: 1114179 - DNA, 15 bp, Homo sapiens
ggcgggcccctgggc

SEQ ID NO: 1114180 - DNA, 15 bp, Homo sapiens
tggcgggcccctggg

SEQ ID NO: 1114181 - DNA, 15 bp, Homo sapiens
ctggcgggcccctgg

SEQ ID NO: 1114182 - DNA, 15 bp, Homo sapiens
cctggcgggcccctg

SEQ ID NO: 1114183 - DNA, 15 bp, Homo sapiens
ccctggcgggcccct

SEQ ID NO: 1114184 - DNA, 15 bp, Homo sapiens
gccctggcgggcccc

SEQ ID NO: 1114185 - DNA, 15 bp, Homo sapiens
ggccctggcgggccc

SEQ ID NO: 1114186 - DNA, 15 bp, Homo sapiens
tggccctggcgggcc

SEQ ID NO: 1114187 - DNA, 15 bp, Homo sapiens
atggccctggcgggc

SEQ ID NO: 1114188 - DNA, 15 bp, Homo sapiens
catggccctggcggg

SEQ ID NO: 1114189 - DNA, 15 bp, Homo sapiens
acatggccctggcgg

SEQ ID NO: 1114190 - DNA, 15 bp, Homo sapiens
cacatggccctggcg

SEQ ID NO: 1114191 - DNA, 15 bp, Homo sapiens
tcacatggccctggc

SEQ ID NO: 1114192 - DNA, 15 bp, Homo sapiens
ctcacatggccctgg

SEQ ID NO: 1114193 - DNA, 15 bp, Homo sapiens
gctcacatggccctg

SEQ ID NO: 1114194 - DNA, 15 bp, Homo sapiens
agctcacatggccct

SEQ ID NO: 1114195 - DNA, 15 bp, Homo sapiens
aagctcacatggccc

SEQ ID NO: 1114196 - DNA, 15 bp, Homo sapiens
caagctcacatggcc

SEQ ID NO: 1114197 - DNA, 15 bp, Homo sapiens
tcaagctcacatggc

SEQ ID NO: 1114198 - DNA, 15 bp, Homo sapiens
ctcaagctcacatgg

SEQ ID NO: 1114199 - DNA, 15 bp, Homo sapiens
cctcaagctcacatg

SEQ ID NO: 1114200 - DNA, 15 bp, Homo sapiens
acctcaagctcacat

SEQ ID NO: 1114201 - DNA, 15 bp, Homo sapiens
gaacctcaagctcac

SEQ ID NO: 1114202 - DNA, 15 bp, Homo sapiens
ggaacctcaagctca

SEQ ID NO: 1114203 - DNA, 15 bp, Homo sapiens
gggaacctcaagctc

SEQ ID NO: 1114204 - DNA, 15 bp, Homo sapiens
ggggaacctcaagct

SEQ ID NO: 1114205 - DNA, 15 bp, Homo sapiens
aggggaacctcaagc

SEQ ID NO: 1114206 - DNA, 15 bp, Homo sapiens
caggggaacctcaag

SEQ ID NO: 1114207 - DNA, 15 bp, Homo sapiens
ccaggggaacctcaa

SEQ ID NO: 1114208 - DNA, 15 bp, Homo sapiens
tccaggggaacctca

SEQ ID NO: 1114209 - DNA, 15 bp, Homo sapiens
ctccaggggaacctc

SEQ ID NO: 1114210 - DNA, 15 bp, Homo sapiens
actccaggggaacct

SEQ ID NO: 1114211 - DNA, 15 bp, Homo sapiens
gactccaggggaacc

SEQ ID NO: 1114212 - DNA, 15 bp, Homo sapiens
agactccaggggaac

SEQ ID NO: 1114213 - DNA, 15 bp, Homo sapiens
gagactccaggggaa

SEQ ID NO: 1114214 - DNA, 15 bp, Homo sapiens
tgagactccagggga

SEQ ID NO: 1114215 - DNA, 15 bp, Homo sapiens
ctgagactccagggg

SEQ ID NO: 1114216 - DNA, 15 bp, Homo sapiens
gctgagactccaggg

SEQ ID NO: 1114217 - DNA, 15 bp, Homo sapiens
ggctgagactccagg

SEQ ID NO: 1114218 - DNA, 15 bp, Homo sapiens
cggctgagactccag

SEQ ID NO: 1114219 - DNA, 15 bp, Homo sapiens
ccggctgagactcca

SEQ ID NO: 1114220 - DNA, 15 bp, Homo sapiens
tccggctgagactcc

SEQ ID NO: 1114221 - DNA, 15 bp, Homo sapiens
ctccggctgagactc

SEQ ID NO: 1114222 - DNA, 15 bp, Homo sapiens
tctccggctgagact

SEQ ID NO: 1114223 - DNA, 15 bp, Homo sapiens
gtctccggctgagac

SEQ ID NO: 1114224 - DNA, 15 bp, Homo sapiens
tgtctccggctgaga

SEQ ID NO: 1114225 - DNA, 15 bp, Homo sapiens
ttgtctccggctgag

SEQ ID NO: 1114226 - DNA, 15 bp, Homo sapiens
gttgtctccggctga

SEQ ID NO: 1114227 - DNA, 15 bp, Homo sapiens
tgttgtctccggctg

SEQ ID NO: 1114228 - DNA, 15 bp, Homo sapiens
ctgttgtctccggct

SEQ ID NO: 1114229 - DNA, 15 bp, Homo sapiens
tctgttgtctccggc

SEQ ID NO: 1114230 - DNA, 15 bp, Homo sapiens
ttctgttgtctccgg

SEQ ID NO: 1114231 - DNA, 15 bp, Homo sapiens
cttctgttgtctccg

SEQ ID NO: 1114232 - DNA, 15 bp, Homo sapiens
tcttctgttgtctcc

SEQ ID NO: 1114233 - DNA, 15 bp, Homo sapiens
ttcttctgttgtctc

SEQ ID NO: 1114234 - DNA, 15 bp, Homo sapiens
gttcttctgttgtct

SEQ ID NO: 1114235 - DNA, 15 bp, Homo sapiens
ggttcttctgttgtc

SEQ ID NO: 1114236 - DNA, 15 bp, Homo sapiens
cggttcttctgttgt

SEQ ID NO: 1114237 - DNA, 15 bp, Homo sapiens
gcggttcttctgttg

SEQ ID NO: 1114238 - DNA, 15 bp, Homo sapiens
agcggttcttctgtt

SEQ ID NO: 1114239 - DNA, 15 bp, Homo sapiens
aagcggttcttctgt

SEQ ID NO: 1114240 - DNA, 15 bp, Homo sapiens
taagcggttcttctg

SEQ ID NO: 1114241 - DNA, 15 bp, Homo sapiens
gtaagcggttcttct

SEQ ID NO: 1114242 - DNA, 15 bp, Homo sapiens
agtaagcggttcttc

SEQ ID NO: 1114243 - DNA, 15 bp, Homo sapiens
cagtaagcggttctt

SEQ ID NO: 1114244 - DNA, 15 bp, Homo sapiens
tcagtaagcggttct

SEQ ID NO: 1114245 - DNA, 15 bp, Homo sapiens
ttcagtaagcggttc

SEQ ID NO: 1114246 - DNA, 15 bp, Homo sapiens
tttcagtaagcggtt

SEQ ID NO: 1114247 - DNA, 15 bp, Homo sapiens
gtttcagtaagcggt

SEQ ID NO: 1114248 - DNA, 15 bp, Homo sapiens
agtttcagtaagcgg

SEQ ID NO: 1114249 - DNA, 15 bp, Homo sapiens
gagtttcagtaagcg

SEQ ID NO: 1114250 - DNA, 15 bp, Homo sapiens
ggagtttcagtaagc

SEQ ID NO: 1114251 - DNA, 15 bp, Homo sapiens
aggagtttcagtaag

SEQ ID NO: 1114252 - DNA, 15 bp, Homo sapiens
caaggagtttcagta

SEQ ID NO: 1114253 - DNA, 15 bp, Homo sapiens
ccaaggagtttcagt

SEQ ID NO: 1114254 - DNA, 15 bp, Homo sapiens
cccaaggagtttcag

SEQ ID NO: 1114255 - DNA, 15 bp, Homo sapiens
ccccaaggagtttca

SEQ ID NO: 1114256 - DNA, 15 bp, Homo sapiens
cccccaaggagtttc

SEQ ID NO: 1114257 - DNA, 15 bp, Homo sapiens
acccccaaggagttt

SEQ ID NO: 1114258 - DNA, 15 bp, Homo sapiens
aacccccaaggagtt

SEQ ID NO: 1114259 - DNA, 15 bp, Homo sapiens
gaacccccaaggagt

SEQ ID NO: 1114260 - DNA, 15 bp, Homo sapiens
agaacccccaaggag

SEQ ID NO: 1114261 - DNA, 15 bp, Homo sapiens
cagaacccccaagga

SEQ ID NO: 1114262 - DNA, 15 bp, Homo sapiens
tcagaacccccaagg

SEQ ID NO: 1114263 - DNA, 15 bp, Homo sapiens
atcagaacccccaag

SEQ ID NO: 1114264 - DNA, 15 bp, Homo sapiens
tatcagaacccccaa

SEQ ID NO: 1114265 - DNA, 15 bp, Homo sapiens
gtatcagaaccccca

SEQ ID NO: 1114266 - DNA, 15 bp, Homo sapiens
tgtatcagaaccccc

SEQ ID NO: 1114267 - DNA, 15 bp, Homo sapiens
gtgtatcagaacccc

SEQ ID NO: 1114268 - DNA, 15 bp, Homo sapiens
agtgtatcagaaccc

SEQ ID NO: 1114269 - DNA, 15 bp, Homo sapiens
tagtgtatcagaacc

SEQ ID NO: 1114270 - DNA, 15 bp, Homo sapiens
ctagtgtatcagaac

SEQ ID NO: 1114271 - DNA, 15 bp, Homo sapiens
cctagtgtatcagaa

SEQ ID NO: 1114272 - DNA, 15 bp, Homo sapiens
ccctagtgtatcaga

SEQ ID NO: 1114273 - DNA, 15 bp, Homo sapiens
cccctagtgtatcag

SEQ ID NO: 1114274 - DNA, 15 bp, Homo sapiens
ccccctagtgtatca

SEQ ID NO: 1114275 - DNA, 15 bp, Homo sapiens
tccccctagtgtatc

SEQ ID NO: 1114276 - DNA, 15 bp, Homo sapiens
ctccccctagtgtat

SEQ ID NO: 1114277 - DNA, 15 bp, Homo sapiens
actccccctagtgta

SEQ ID NO: 1114278 - DNA, 15 bp, Homo sapiens
aactccccctagtgt

SEQ ID NO: 1114279 - DNA, 15 bp, Homo sapiens
aaactccccctagtg

SEQ ID NO: 1114280 - DNA, 15 bp, Homo sapiens
aaaactccccctagt

SEQ ID NO: 1114281 - DNA, 15 bp, Homo sapiens
taaaactccccctag

SEQ ID NO: 1114282 - DNA, 15 bp, Homo sapiens
ataaaactcccccta

SEQ ID NO: 1114283 - DNA, 15 bp, Homo sapiens
cataaaactccccct

SEQ ID NO: 1114284 - DNA, 15 bp, Homo sapiens
ccataaaactccccc

SEQ ID NO: 1114285 - DNA, 15 bp, Homo sapiens
cccataaaactcccc

SEQ ID NO: 1114286 - DNA, 15 bp, Homo sapiens
tcccataaaactccc

SEQ ID NO: 1114287 - DNA, 15 bp, Homo sapiens
ttcccataaaactcc

SEQ ID NO: 1114288 - DNA, 15 bp, Homo sapiens
tttcccataaaactc

SEQ ID NO: 1114289 - DNA, 15 bp, Homo sapiens
ctttcccataaaact

SEQ ID NO: 1114290 - DNA, 15 bp, Homo sapiens
tctttcccataaaac

SEQ ID NO: 1114291 - DNA, 15 bp, Homo sapiens
ctctttcccataaaa

SEQ ID NO: 1114292 - DNA, 15 bp, Homo sapiens
cctctttcccataaa

SEQ ID NO: 1114293 - DNA, 15 bp, Homo sapiens
tcctctttcccataa

SEQ ID NO: 1114294 - DNA, 15 bp, Homo sapiens
ttcctctttcccata

SEQ ID NO: 1114295 - DNA, 15 bp, Homo sapiens
cttcctctttcccat

SEQ ID NO: 1114296 - DNA, 15 bp, Homo sapiens
gcttcctctttccca

SEQ ID NO: 1114297 - DNA, 15 bp, Homo sapiens
tgcttcctctttccc

SEQ ID NO: 1114298 - DNA, 15 bp, Homo sapiens
ctgcttcctctttcc

SEQ ID NO: 1114299 - DNA, 15 bp, Homo sapiens
actgcttcctctttc

SEQ ID NO: 1114300 - DNA, 15 bp, Homo sapiens
tactgcttcctcttt

SEQ ID NO: 1114301 - DNA, 15 bp, Homo sapiens
ttactgcttcctctt

SEQ ID NO: 1114302 - DNA, 15 bp, Homo sapiens
attactgcttcctct

SEQ ID NO: 1114303 - DNA, 15 bp, Homo sapiens
aattactgcttcctc

SEQ ID NO: 1114304 - DNA, 15 bp, Homo sapiens
caattactgcttcct

SEQ ID NO: 1114305 - DNA, 15 bp, Homo sapiens
gcaattactgcttcc

SEQ ID NO: 1114306 - DNA, 15 bp, Homo sapiens
tgcaattactgcttc

SEQ ID NO: 1114307 - DNA, 15 bp, Homo sapiens
ctgcaattactgctt

SEQ ID NO: 1114308 - DNA, 15 bp, Homo sapiens
actgcaattactgct

SEQ ID NO: 1114309 - DNA, 15 bp, Homo sapiens
cactgcaattactgc

SEQ ID NO: 1114310 - DNA, 15 bp, Homo sapiens
tcactgcaattactg

SEQ ID NO: 1114311 - DNA, 15 bp, Homo sapiens
gtcactgcaattact

SEQ ID NO: 1114312 - DNA, 15 bp, Homo sapiens
cgtcactgcaattac

SEQ ID NO: 1114313 - DNA, 15 bp, Homo sapiens
gcgtcactgcaatta

SEQ ID NO: 1114314 - DNA, 15 bp, Homo sapiens
ggcgtcactgcaatt

SEQ ID NO: 1114315 - DNA, 15 bp, Homo sapiens
gggcgtcactgcaat

SEQ ID NO: 1114316 - DNA, 15 bp, Homo sapiens
ggggcgtcactgcaa

SEQ ID NO: 1114317 - DNA, 15 bp, Homo sapiens
cggggcgtcactgca

SEQ ID NO: 1114318 - DNA, 15 bp, Homo sapiens
acggggcgtcactgc

SEQ ID NO: 1114319 - DNA, 15 bp, Homo sapiens
aacggggcgtcactg

SEQ ID NO: 1114320 - DNA, 15 bp, Homo sapiens
taacggggcgtcact

SEQ ID NO: 1114321 - DNA, 15 bp, Homo sapiens
ctaacggggcgtcac

SEQ ID NO: 1114322 - DNA, 15 bp, Homo sapiens
tctaacggggcgtca

SEQ ID NO: 1114323 - DNA, 15 bp, Homo sapiens
cctggcccaggactg

SEQ ID NO: 1114324 - DNA, 15 bp, Homo sapiens
tcctggcccaggact

SEQ ID NO: 1114325 - DNA, 15 bp, Homo sapiens
gtcctggcccaggac

SEQ ID NO: 1114326 - DNA, 15 bp, Homo sapiens
ggtcctggcccagga

SEQ ID NO: 1114327 - DNA, 15 bp, Homo sapiens
aggtcctggcccagg

SEQ ID NO: 1114328 - DNA, 15 bp, Homo sapiens
aaggtcctggcccag

SEQ ID NO: 1114329 - DNA, 15 bp, Homo sapiens
caaggtcctggccca

SEQ ID NO: 1114330 - DNA, 15 bp, Homo sapiens
ccaaggtcctggccc

SEQ ID NO: 1114331 - DNA, 15 bp, Homo sapiens
gccaaggtcctggcc

SEQ ID NO: 1114332 - DNA, 15 bp, Homo sapiens
ggccaaggtcctggc

SEQ ID NO: 1114333 - DNA, 15 bp, Homo sapiens
aggccaaggtcctgg

SEQ ID NO: 1114334 - DNA, 15 bp, Homo sapiens
caggccaaggtcctg

SEQ ID NO: 1114335 - DNA, 15 bp, Homo sapiens
ccaggccaaggtcct

SEQ ID NO: 1114336 - DNA, 15 bp, Homo sapiens
cccaggccaaggtcc

SEQ ID NO: 1114337 - DNA, 15 bp, Homo sapiens
ccccaggccaaggtc

SEQ ID NO: 1114338 - DNA, 15 bp, Homo sapiens
gccccaggccaaggt

SEQ ID NO: 1114339 - DNA, 15 bp, Homo sapiens
agccccaggccaagg

SEQ ID NO: 1114340 - DNA, 15 bp, Homo sapiens
tagccccaggccaag

SEQ ID NO: 1114341 - DNA, 15 bp, Homo sapiens
ctagccccaggccaa

SEQ ID NO: 1114342 - DNA, 15 bp, Homo sapiens
cctagccccaggcca

SEQ ID NO: 1114343 - DNA, 15 bp, Homo sapiens
ccctagccccaggcc

SEQ ID NO: 1114344 - DNA, 15 bp, Homo sapiens
accctagccccaggc

SEQ ID NO: 1114345 - DNA, 15 bp, Homo sapiens
taccctagccccagg

SEQ ID NO: 1114346 - DNA, 15 bp, Homo sapiens
gtaccctagccccag

SEQ ID NO: 1114347 - DNA, 15 bp, Homo sapiens
agtaccctagcccca

SEQ ID NO: 1114348 - DNA, 15 bp, Homo sapiens
cagtaccctagcccc

SEQ ID NO: 1114349 - DNA, 15 bp, Homo sapiens
tcagtaccctagccc

SEQ ID NO: 1114350 - DNA, 15 bp, Homo sapiens
ctcagtaccctagcc

SEQ ID NO: 1114351 - DNA, 15 bp, Homo sapiens
actcagtaccctagc

SEQ ID NO: 1114352 - DNA, 15 bp, Homo sapiens
cactcagtaccctag

SEQ ID NO: 1114353 - DNA, 15 bp, Homo sapiens
tcactcagtacccta

SEQ ID NO: 1114354 - DNA, 15 bp, Homo sapiens
gtcactcagtaccct

SEQ ID NO: 1114355 - DNA, 15 bp, Homo sapiens
ggtcactcagtaccc

SEQ ID NO: 1114356 - DNA, 15 bp, Homo sapiens
gggtcactcagtacc

SEQ ID NO: 1114357 - DNA, 15 bp, Homo sapiens
agggtcactcagtac

SEQ ID NO: 1114358 - DNA, 15 bp, Homo sapiens
tagggtcactcagta

SEQ ID NO: 1114359 - DNA, 15 bp, Homo sapiens
ctagggtcactcagt

SEQ ID NO: 1114360 - DNA, 15 bp, Homo sapiens
tctagggtcactcag

SEQ ID NO: 1114361 - DNA, 15 bp, Homo sapiens
ttctagggtcactca

SEQ ID NO: 1114362 - DNA, 15 bp, Homo sapiens
attctagggtcactc

SEQ ID NO: 1114363 - DNA, 15 bp, Homo sapiens
gattctagggtcact

SEQ ID NO: 1114364 - DNA, 15 bp, Homo sapiens
tgattctagggtcac

SEQ ID NO: 1114365 - DNA, 15 bp, Homo sapiens
ttgattctagggtca

SEQ ID NO: 1114366 - DNA, 15 bp, Homo sapiens
cttgattctagggtc

SEQ ID NO: 1114367 - DNA, 15 bp, Homo sapiens
ccttgattctagggt

SEQ ID NO: 1114368 - DNA, 15 bp, Homo sapiens
cccttgattctaggg

SEQ ID NO: 1114369 - DNA, 15 bp, Homo sapiens
acccttgattctagg

SEQ ID NO: 1114370 - DNA, 15 bp, Homo sapiens
cacccttgattctag

SEQ ID NO: 1114371 - DNA, 15 bp, Homo sapiens
ccacccttgattcta

SEQ ID NO: 1114372 - DNA, 15 bp, Homo sapiens
gccacccttgattct

SEQ ID NO: 1114373 - DNA, 15 bp, Homo sapiens
cgccacccttgattc

SEQ ID NO: 1114374 - DNA, 15 bp, Homo sapiens
acgccacccttgatt

SEQ ID NO: 1114375 - DNA, 15 bp, Homo sapiens
cacgccacccttgat

SEQ ID NO: 1114376 - DNA, 15 bp, Homo sapiens
ccacgccacccttga

SEQ ID NO: 1114377 - DNA, 15 bp, Homo sapiens
cccacgccacccttg

SEQ ID NO: 1114378 - DNA, 15 bp, Homo sapiens
gcccacgccaccctt

SEQ ID NO: 1114379 - DNA, 15 bp, Homo sapiens
agcccacgccaccct

SEQ ID NO: 1114380 - DNA, 15 bp, Homo sapiens
aagcccacgccaccc

SEQ ID NO: 1114381 - DNA, 15 bp, Homo sapiens
taagcccacgccacc

SEQ ID NO: 1114382 - DNA, 15 bp, Homo sapiens
ttaagcccacgccac

SEQ ID NO: 1114383 - DNA, 15 bp, Homo sapiens
cttaagcccacgcca

SEQ ID NO: 1114384 - DNA, 15 bp, Homo sapiens
gcttaagcccacgcc

SEQ ID NO: 1114385 - DNA, 15 bp, Homo sapiens
tgcttaagcccacgc

SEQ ID NO: 1114386 - DNA, 15 bp, Homo sapiens
ctgcttaagcccacg

SEQ ID NO: 1114387 - DNA, 15 bp, Homo sapiens
actgcttaagcccac

SEQ ID NO: 1114388 - DNA, 15 bp, Homo sapiens
aactgcttaagccca

SEQ ID NO: 1114389 - DNA, 15 bp, Homo sapiens
caactgcttaagccc

SEQ ID NO: 1114390 - DNA, 15 bp, Homo sapiens
gcaactgcttaagcc

SEQ ID NO: 1114391 - DNA, 15 bp, Homo sapiens
ggcaactgcttaagc

SEQ ID NO: 1114392 - DNA, 15 bp, Homo sapiens
tggcaactgcttaag

SEQ ID NO: 1114393 - DNA, 15 bp, Homo sapiens
ctggcaactgcttaa

SEQ ID NO: 1114394 - DNA, 15 bp, Homo sapiens
tctggcaactgctta

SEQ ID NO: 1114395 - DNA, 15 bp, Homo sapiens
gtctggcaactgctt

SEQ ID NO: 1114396 - DNA, 15 bp, Homo sapiens
cgtctggcaactgct

SEQ ID NO: 1114397 - DNA, 15 bp, Homo sapiens
acgtctggcaactgc

SEQ ID NO: 1114398 - DNA, 15 bp, Homo sapiens
aacgtctggcaactg

SEQ ID NO: 1114399 - DNA, 15 bp, Homo sapiens
gaacgtctggcaact

SEQ ID NO: 1114400 - DNA, 15 bp, Homo sapiens
ggaacgtctggcaac

SEQ ID NO: 1114401 - DNA, 15 bp, Homo sapiens
aggaacgtctggcaa

SEQ ID NO: 1114402 - DNA, 15 bp, Homo sapiens
aaggaacgtctggca

SEQ ID NO: 1114403 - DNA, 15 bp, Homo sapiens
caaggaacgtctggc

SEQ ID NO: 1114404 - DNA, 15 bp, Homo sapiens
ccaaggaacgtctgg

SEQ ID NO: 1114405 - DNA, 15 bp, Homo sapiens
accaaggaacgtctg

SEQ ID NO: 1114406 - DNA, 15 bp, Homo sapiens
taccaaggaacgtct

SEQ ID NO: 1114407 - DNA, 15 bp, Homo sapiens
gtaccaaggaacgtc

SEQ ID NO: 1114408 - DNA, 15 bp, Homo sapiens
agtaccaaggaacgt

SEQ ID NO: 1114409 - DNA, 15 bp, Homo sapiens
aagtaccaaggaacg

SEQ ID NO: 1114410 - DNA, 15 bp, Homo sapiens
aaagtaccaaggaac

SEQ ID NO: 1114411 - DNA, 15 bp, Homo sapiens
caaagtaccaaggaa

SEQ ID NO: 1114412 - DNA, 15 bp, Homo sapiens
gcaaagtaccaagga

SEQ ID NO: 1114413 - DNA, 15 bp, Homo sapiens
tgcaaagtaccaagg

SEQ ID NO: 1114414 - DNA, 15 bp, Homo sapiens
ctgcaaagtaccaag

SEQ ID NO: 1114415 - DNA, 15 bp, Homo sapiens
cctgcaaagtaccaa

SEQ ID NO: 1114416 - DNA, 15 bp, Homo sapiens
gcctgcaaagtacca

SEQ ID NO: 1114417 - DNA, 15 bp, Homo sapiens
tgcctgcaaagtacc

SEQ ID NO: 1114418 - DNA, 15 bp, Homo sapiens
ctgcctgcaaagtac

SEQ ID NO: 1114419 - DNA, 15 bp, Homo sapiens
tctgcctgcaaagta

SEQ ID NO: 1114420 - DNA, 15 bp, Homo sapiens
gtctgcctgcaaagt

SEQ ID NO: 1114421 - DNA, 15 bp, Homo sapiens
ggtctgcctgcaaag

SEQ ID NO: 1114422 - DNA, 15 bp, Homo sapiens
tggtctgcctgcaaa

SEQ ID NO: 1114423 - DNA, 15 bp, Homo sapiens
atggtctgcctgcaa

SEQ ID NO: 1114424 - DNA, 15 bp, Homo sapiens
catggtctgcctgca

SEQ ID NO: 1114425 - DNA, 15 bp, Homo sapiens
acatggtctgcctgc

SEQ ID NO: 1114426 - DNA, 15 bp, Homo sapiens
cacatggtctgcctg

SEQ ID NO: 1114427 - DNA, 15 bp, Homo sapiens
ccacatggtctgcct

SEQ ID NO: 1114428 - DNA, 15 bp, Homo sapiens
tccacatggtctgcc

SEQ ID NO: 1114429 - DNA, 15 bp, Homo sapiens
gtccacatggtctgc

SEQ ID NO: 1114430 - DNA, 15 bp, Homo sapiens
ggtccacatggtctg

SEQ ID NO: 1114431 - DNA, 15 bp, Homo sapiens
gggtccacatggtct

SEQ ID NO: 1114432 - DNA, 15 bp, Homo sapiens
agggtccacatggtc

SEQ ID NO: 1114433 - DNA, 15 bp, Homo sapiens
cagggtccacatggt

SEQ ID NO: 1114434 - DNA, 15 bp, Homo sapiens
ccagggtccacatgg

SEQ ID NO: 1114435 - DNA, 15 bp, Homo sapiens
accagggtccacatg

SEQ ID NO: 1114436 - DNA, 15 bp, Homo sapiens
caccagggtccacat

SEQ ID NO: 1114437 - DNA, 15 bp, Homo sapiens
tcaccagggtccaca

SEQ ID NO: 1114438 - DNA, 15 bp, Homo sapiens
ctcaccagggtccac

SEQ ID NO: 1114439 - DNA, 15 bp, Homo sapiens
gctcaccagggtcca

SEQ ID NO: 1114440 - DNA, 15 bp, Homo sapiens
agctcaccagggtcc

SEQ ID NO: 1114441 - DNA, 15 bp, Homo sapiens
cagctcaccagggtc

SEQ ID NO: 1114442 - DNA, 15 bp, Homo sapiens
ccagctcaccagggt

SEQ ID NO: 1114443 - DNA, 15 bp, Homo sapiens
cccagctcaccaggg

SEQ ID NO: 1114444 - DNA, 15 bp, Homo sapiens
acccagctcaccagg

SEQ ID NO: 1114445 - DNA, 15 bp, Homo sapiens
cacccagctcaccag

SEQ ID NO: 1114446 - DNA, 15 bp, Homo sapiens
gccacccagctcacc

SEQ ID NO: 1114447 - DNA, 15 bp, Homo sapiens
ggccacccagctcac

SEQ ID NO: 1114448 - DNA, 15 bp, Homo sapiens
aggccacccagctca

SEQ ID NO: 1114449 - DNA, 15 bp, Homo sapiens
aaggccacccagctc

SEQ ID NO: 1114450 - DNA, 15 bp, Homo sapiens
taaggccacccagct

SEQ ID NO: 1114451 - DNA, 15 bp, Homo sapiens
ttaaggccacccagc

SEQ ID NO: 1114452 - DNA, 15 bp, Homo sapiens
gttaaggccacccag

SEQ ID NO: 1114453 - DNA, 15 bp, Homo sapiens
tgttaaggccaccca

SEQ ID NO: 1114454 - DNA, 15 bp, Homo sapiens
ctgttaaggccaccc

SEQ ID NO: 1114455 - DNA, 15 bp, Homo sapiens
gctgttaaggccacc

SEQ ID NO: 1114456 - DNA, 15 bp, Homo sapiens
tgctgttaaggccac

SEQ ID NO: 1114457 - DNA, 15 bp, Homo sapiens
ctgctgttaaggcca

SEQ ID NO: 1114458 - DNA, 15 bp, Homo sapiens
cctgctgttaaggcc

SEQ ID NO: 1114459 - DNA, 15 bp, Homo sapiens
ccctgctgttaaggc

SEQ ID NO: 1114460 - DNA, 15 bp, Homo sapiens
gccctgctgttaagg

SEQ ID NO: 1114461 - DNA, 15 bp, Homo sapiens
agccctgctgttaag

SEQ ID NO: 1114462 - DNA, 15 bp, Homo sapiens
cagccctgctgttaa

SEQ ID NO: 1114463 - DNA, 15 bp, Homo sapiens
ccagccctgctgtta

SEQ ID NO: 1114464 - DNA, 15 bp, Homo sapiens
accagccctgctgtt

SEQ ID NO: 1114465 - DNA, 15 bp, Homo sapiens
caccagccctgctgt

SEQ ID NO: 1114466 - DNA, 15 bp, Homo sapiens
ccaccagccctgctg

SEQ ID NO: 1114467 - DNA, 15 bp, Homo sapiens
gccaccagccctgct

SEQ ID NO: 1114468 - DNA, 15 bp, Homo sapiens
agccaccagccctgc

SEQ ID NO: 1114469 - DNA, 15 bp, Homo sapiens
tccagccaccagccc

SEQ ID NO: 1114470 - DNA, 15 bp, Homo sapiens
ttccagccaccagcc

SEQ ID NO: 1114471 - DNA, 15 bp, Homo sapiens
gttccagccaccagc

SEQ ID NO: 1114472 - DNA, 15 bp, Homo sapiens
cgttccagccaccag

SEQ ID NO: 1114473 - DNA, 15 bp, Homo sapiens
gcgttccagccacca

SEQ ID NO: 1114474 - DNA, 15 bp, Homo sapiens
cgcgttccagccacc

SEQ ID NO: 1114475 - DNA, 15 bp, Homo sapiens
ccgcgttccagccac

SEQ ID NO: 1114476 - DNA, 15 bp, Homo sapiens
accgcgttccagcca

SEQ ID NO: 1114477 - DNA, 15 bp, Homo sapiens
caccgcgttccagcc

SEQ ID NO: 1114478 - DNA, 15 bp, Homo sapiens
gcaccgcgttccagc

SEQ ID NO: 1114479 - DNA, 15 bp, Homo sapiens
ggcaccgcgttccag

SEQ ID NO: 1114480 - DNA, 15 bp, Homo sapiens
gggcaccgcgttcca

SEQ ID NO: 1114481 - DNA, 15 bp, Homo sapiens
tgggcaccgcgttcc

SEQ ID NO: 1114482 - DNA, 15 bp, Homo sapiens
ctgggcaccgcgttc

SEQ ID NO: 1114483 - DNA, 15 bp, Homo sapiens
tctgggcaccgcgtt

SEQ ID NO: 1114484 - DNA, 15 bp, Homo sapiens
atctgggcaccgcgt

SEQ ID NO: 1114485 - DNA, 15 bp, Homo sapiens
catctgggcaccgcg

SEQ ID NO: 1114486 - DNA, 15 bp, Homo sapiens
ccatctgggcaccgc

SEQ ID NO: 1114487 - DNA, 15 bp, Homo sapiens
accatctgggcaccg

SEQ ID NO: 1114488 - DNA, 15 bp, Homo sapiens
gaccatctgggcacc

SEQ ID NO: 1114489 - DNA, 15 bp, Homo sapiens
tgaccatctgggcac

SEQ ID NO: 1114490 - DNA, 15 bp, Homo sapiens
ctgaccatctgggca

SEQ ID NO: 1114491 - DNA, 15 bp, Homo sapiens
actgaccatctgggc

SEQ ID NO: 1114492 - DNA, 15 bp, Homo sapiens
aactgaccatctggg

SEQ ID NO: 1114493 - DNA, 15 bp, Homo sapiens
gaactgaccatctgg

SEQ ID NO: 1114494 - DNA, 15 bp, Homo sapiens
agaactgaccatctg

SEQ ID NO: 1114495 - DNA, 15 bp, Homo sapiens
cagaactgaccatct

SEQ ID NO: 1114496 - DNA, 15 bp, Homo sapiens
gcagaactgaccatc

SEQ ID NO: 1114497 - DNA, 15 bp, Homo sapiens
ggcagaactgaccat

SEQ ID NO: 1114498 - DNA, 15 bp, Homo sapiens
gggcagaactgacca

SEQ ID NO: 1114499 - DNA, 15 bp, Homo sapiens
agggcagaactgacc

SEQ ID NO: 1114500 - DNA, 15 bp, Homo sapiens
cagggcagaactgac

SEQ ID NO: 1114501 - DNA, 15 bp, Homo sapiens
acagggcagaactga

SEQ ID NO: 1114502 - DNA, 15 bp, Homo sapiens
cacagggcagaactg

SEQ ID NO: 1114503 - DNA, 15 bp, Homo sapiens
ccacagggcagaact

SEQ ID NO: 1114504 - DNA, 15 bp, Homo sapiens
gccacagggcagaac

SEQ ID NO: 1114505 - DNA, 15 bp, Homo sapiens
ggccacagggcagaa

SEQ ID NO: 1114506 - DNA, 15 bp, Homo sapiens
aggccacagggcaga

SEQ ID NO: 1114507 - DNA, 15 bp, Homo sapiens
caggccacagggcag

SEQ ID NO: 1114508 - DNA, 15 bp, Homo sapiens
gcaggccacagggca

SEQ ID NO: 1114509 - DNA, 15 bp, Homo sapiens
agcaggccacagggc

SEQ ID NO: 1114510 - DNA, 15 bp, Homo sapiens
cagcaggccacaggg

SEQ ID NO: 1114511 - DNA, 15 bp, Homo sapiens
gcagcaggccacagg

SEQ ID NO: 1114512 - DNA, 15 bp, Homo sapiens
ggcagcaggccacag

SEQ ID NO: 1114513 - DNA, 15 bp, Homo sapiens
aggcagcaggccaca

SEQ ID NO: 1114514 - DNA, 15 bp, Homo sapiens
caggcagcaggccac

SEQ ID NO: 1114515 - DNA, 15 bp, Homo sapiens
ccaggcagcaggcca

SEQ ID NO: 1114516 - DNA, 15 bp, Homo sapiens
tccaggcagcaggcc

SEQ ID NO: 1114517 - DNA, 15 bp, Homo sapiens
gtccaggcagcaggc

SEQ ID NO: 1114518 - DNA, 15 bp, Homo sapiens
ggtccaggcagcagg

SEQ ID NO: 1114519 - DNA, 15 bp, Homo sapiens
gggtccaggcagcag

SEQ ID NO: 1114520 - DNA, 15 bp, Homo sapiens
ggggtccaggcagca

SEQ ID NO: 1114521 - DNA, 15 bp, Homo sapiens
cggggtccaggcagc

SEQ ID NO: 1114522 - DNA, 15 bp, Homo sapiens
ccggggtccaggcag

SEQ ID NO: 1114523 - DNA, 15 bp, Homo sapiens
tccggggtccaggca

SEQ ID NO: 1114524 - DNA, 15 bp, Homo sapiens
ctccggggtccaggc

SEQ ID NO: 1114525 - DNA, 15 bp, Homo sapiens
cctccggggtccagg

SEQ ID NO: 1114526 - DNA, 15 bp, Homo sapiens
tcctccggggtccag

SEQ ID NO: 1114527 - DNA, 15 bp, Homo sapiens
ctcctccggggtcca

SEQ ID NO: 1114528 - DNA, 15 bp, Homo sapiens
gctcctccggggtcc

SEQ ID NO: 1114529 - DNA, 15 bp, Homo sapiens
ggctcctccggggtc

SEQ ID NO: 1114530 - DNA, 15 bp, Homo sapiens
tggctcctccggggt

SEQ ID NO: 1114531 - DNA, 15 bp, Homo sapiens
ctggctcctccgggg

SEQ ID NO: 1114532 - DNA, 15 bp, Homo sapiens
gctggctcctccggg

SEQ ID NO: 1114533 - DNA, 15 bp, Homo sapiens
agctggctcctccgg

SEQ ID NO: 1114534 - DNA, 15 bp, Homo sapiens
tagctggctcctccg

SEQ ID NO: 1114535 - DNA, 15 bp, Homo sapiens
gtagctggctcctcc

SEQ ID NO: 1114536 - DNA, 15 bp, Homo sapiens
tgtagctggctcctc

SEQ ID NO: 1114537 - DNA, 15 bp, Homo sapiens
ctgtagctggctcct

SEQ ID NO: 1114538 - DNA, 15 bp, Homo sapiens
gctgtagctggctcc

SEQ ID NO: 1114539 - DNA, 15 bp, Homo sapiens
agctgtagctggctc

SEQ ID NO: 1114540 - DNA, 15 bp, Homo sapiens
cagctgtagctggct

SEQ ID NO: 1114541 - DNA, 15 bp, Homo sapiens
gcagctgtagctggc

SEQ ID NO: 1114542 - DNA, 15 bp, Homo sapiens
agcagctgtagctgg

SEQ ID NO: 1114543 - DNA, 15 bp, Homo sapiens
cagcagctgtagctg

SEQ ID NO: 1114544 - DNA, 15 bp, Homo sapiens
gcagcagctgtagct

SEQ ID NO: 1114545 - DNA, 15 bp, Homo sapiens
ggcagcagctgtagc

SEQ ID NO: 1114546 - DNA, 15 bp, Homo sapiens
cggcagcagctgtag

SEQ ID NO: 1114547 - DNA, 15 bp, Homo sapiens
acggcagcagctgta

SEQ ID NO: 1114548 - DNA, 15 bp, Homo sapiens
gacggcagcagctgt

SEQ ID NO: 1114549 - DNA, 15 bp, Homo sapiens
ggacggcagcagctg

SEQ ID NO: 1114550 - DNA, 15 bp, Homo sapiens
gggacggcagcagct

SEQ ID NO: 1114551 - DNA, 15 bp, Homo sapiens
ggggacggcagcagc

SEQ ID NO: 1114552 - DNA, 15 bp, Homo sapiens
aggggacggcagcag

SEQ ID NO: 1114553 - DNA, 15 bp, Homo sapiens
aaggggacggcagca

SEQ ID NO: 1114554 - DNA, 15 bp, Homo sapiens
gaaggggacggcagc

SEQ ID NO: 1114555 - DNA, 15 bp, Homo sapiens
agaaggggacggcag

SEQ ID NO: 1114556 - DNA, 15 bp, Homo sapiens
cagaaggggacggca

SEQ ID NO: 1114557 - DNA, 15 bp, Homo sapiens
ccagaaggggacggc

SEQ ID NO: 1114558 - DNA, 15 bp, Homo sapiens
accagaaggggacgg

SEQ ID NO: 1114559 - DNA, 15 bp, Homo sapiens
caccagaaggggacg

SEQ ID NO: 1114560 - DNA, 15 bp, Homo sapiens
tcaccagaaggggac

SEQ ID NO: 1114561 - DNA, 15 bp, Homo sapiens
ctcaccagaagggga

SEQ ID NO: 1114562 - DNA, 15 bp, Homo sapiens
actcaccagaagggg

SEQ ID NO: 1114563 - DNA, 15 bp, Homo sapiens
cactcaccagaaggg

SEQ ID NO: 1114564 - DNA, 15 bp, Homo sapiens
gcactcaccagaagg

SEQ ID NO: 1114565 - DNA, 15 bp, Homo sapiens
ggcactcaccagaag

SEQ ID NO: 1114566 - DNA, 15 bp, Homo sapiens
gggcactcaccagaa

SEQ ID NO: 1114567 - DNA, 15 bp, Homo sapiens
ggggcactcaccaga

SEQ ID NO: 1114568 - DNA, 15 bp, Homo sapiens
aggggcactcaccag

SEQ ID NO: 1114569 - DNA, 15 bp, Homo sapiens
gaggggcactcacca

SEQ ID NO: 1114570 - DNA, 15 bp, Homo sapiens
tgaggggcactcacc

SEQ ID NO: 1114571 - DNA, 15 bp, Homo sapiens
ctgaggggcactcac

SEQ ID NO: 1114572 - DNA, 15 bp, Homo sapiens
gctgaggggcactca

SEQ ID NO: 1114573 - DNA, 15 bp, Homo sapiens
ggctgaggggcactc

SEQ ID NO: 1114574 - DNA, 15 bp, Homo sapiens
aggctgaggggcact

SEQ ID NO: 1114575 - DNA, 15 bp, Homo sapiens
taggctgaggggcac

SEQ ID NO: 1114576 - DNA, 15 bp, Homo sapiens
ctaggctgaggggca

SEQ ID NO: 1114577 - DNA, 15 bp, Homo sapiens
cctaggctgaggggc

SEQ ID NO: 1114578 - DNA, 15 bp, Homo sapiens
gcctaggctgagggg

SEQ ID NO: 1114579 - DNA, 15 bp, Homo sapiens
tgcctaggctgaggg

SEQ ID NO: 1114580 - DNA, 15 bp, Homo sapiens
ttgcctaggctgagg

SEQ ID NO: 1114581 - DNA, 15 bp, Homo sapiens
cttgcctaggctgag

SEQ ID NO: 1114582 - DNA, 15 bp, Homo sapiens
tcttgcctaggctga

SEQ ID NO: 1114583 - DNA, 15 bp, Homo sapiens
ctcttgcctaggctg

SEQ ID NO: 1114584 - DNA, 15 bp, Homo sapiens
gctcttgcctaggct

SEQ ID NO: 1114585 - DNA, 15 bp, Homo sapiens
agctcttgcctaggc

SEQ ID NO: 1114586 - DNA, 15 bp, Homo sapiens
cagctcttgcctagg

SEQ ID NO: 1114587 - DNA, 15 bp, Homo sapiens
ccagctcttgcctag

SEQ ID NO: 1114588 - DNA, 15 bp, Homo sapiens
gccagctcttgccta

SEQ ID NO: 1114589 - DNA, 15 bp, Homo sapiens
tgccagctcttgcct

SEQ ID NO: 1114590 - DNA, 15 bp, Homo sapiens
ctgccagctcttgcc

SEQ ID NO: 1114591 - DNA, 15 bp, Homo sapiens
gctgccagctcttgc

SEQ ID NO: 1114592 - DNA, 15 bp, Homo sapiens
ggctgccagctcttg

SEQ ID NO: 1114593 - DNA, 15 bp, Homo sapiens
aggctgccagctctt

SEQ ID NO: 1114594 - DNA, 15 bp, Homo sapiens
caggctgccagctct

SEQ ID NO: 1114595 - DNA, 15 bp, Homo sapiens
ccaggctgccagctc

SEQ ID NO: 1114596 - DNA, 15 bp, Homo sapiens
cccaggctgccagct

SEQ ID NO: 1114597 - DNA, 15 bp, Homo sapiens
acccaggctgccagc

SEQ ID NO: 1114598 - DNA, 15 bp, Homo sapiens
aacccaggctgccag

SEQ ID NO: 1114599 - DNA, 15 bp, Homo sapiens
aaacccaggctgcca

SEQ ID NO: 1114600 - DNA, 15 bp, Homo sapiens
aaaacccaggctgcc

SEQ ID NO: 1114601 - DNA, 15 bp, Homo sapiens
gaaaacccaggctgc

SEQ ID NO: 1114602 - DNA, 15 bp, Homo sapiens
ggaaaacccaggctg

SEQ ID NO: 1114603 - DNA, 15 bp, Homo sapiens
gggaaaacccaggct

SEQ ID NO: 1114604 - DNA, 15 bp, Homo sapiens
tgggaaaacccaggc

SEQ ID NO: 1114605 - DNA, 15 bp, Homo sapiens
ttgggaaaacccagg

SEQ ID NO: 1114606 - DNA, 15 bp, Homo sapiens
tttgggaaaacccag

SEQ ID NO: 1114607 - DNA, 15 bp, Homo sapiens
ctttgggaaaaccca

SEQ ID NO: 1114608 - DNA, 15 bp, Homo sapiens
cctttgggaaaaccc

SEQ ID NO: 1114609 - DNA, 15 bp, Homo sapiens
ccctttgggaaaacc

SEQ ID NO: 1114610 - DNA, 15 bp, Homo sapiens
accctttgggaaaac

SEQ ID NO: 1114611 - DNA, 15 bp, Homo sapiens
gaccctttgggaaaa

SEQ ID NO: 1114612 - DNA, 15 bp, Homo sapiens
tgaccctttgggaaa

SEQ ID NO: 1114613 - DNA, 15 bp, Homo sapiens
atgaccctttgggaa

SEQ ID NO: 1114614 - DNA, 15 bp, Homo sapiens
gatgaccctttggga

SEQ ID NO: 1114615 - DNA, 15 bp, Homo sapiens
agatgaccctttggg

SEQ ID NO: 1114616 - DNA, 15 bp, Homo sapiens
aagatgaccctttgg

SEQ ID NO: 1114617 - DNA, 15 bp, Homo sapiens
caagatgaccctttg

SEQ ID NO: 1114618 - DNA, 15 bp, Homo sapiens
ccaagatgacccttt

SEQ ID NO: 1114619 - DNA, 15 bp, Homo sapiens
tccaagatgaccctt

SEQ ID NO: 1114620 - DNA, 15 bp, Homo sapiens
atccaagatgaccct

SEQ ID NO: 1114621 - DNA, 15 bp, Homo sapiens
aatccaagatgaccc

SEQ ID NO: 1114622 - DNA, 15 bp, Homo sapiens
caatccaagatgacc

SEQ ID NO: 1114623 - DNA, 15 bp, Homo sapiens
ccaatccaagatgac

SEQ ID NO: 1114624 - DNA, 15 bp, Homo sapiens
gccaatccaagatga

SEQ ID NO: 1114625 - DNA, 15 bp, Homo sapiens
ggccaatccaagatg

SEQ ID NO: 1114626 - DNA, 15 bp, Homo sapiens
tggccaatccaagat

SEQ ID NO: 1114627 - DNA, 15 bp, Homo sapiens
ctggccaatccaaga

SEQ ID NO: 1114628 - DNA, 15 bp, Homo sapiens
tctggccaatccaag

SEQ ID NO: 1114629 - DNA, 15 bp, Homo sapiens
ctctggccaatccaa

SEQ ID NO: 1114630 - DNA, 15 bp, Homo sapiens
cctctggccaatcca

SEQ ID NO: 1114631 - DNA, 15 bp, Homo sapiens
tcctctggccaatcc

SEQ ID NO: 1114632 - DNA, 15 bp, Homo sapiens
ctcctctggccaatc

SEQ ID NO: 1114633 - DNA, 15 bp, Homo sapiens
cctcctctggccaat

SEQ ID NO: 1114634 - DNA, 15 bp, Homo sapiens
tcctcctctggccaa

SEQ ID NO: 1114635 - DNA, 15 bp, Homo sapiens
gtcctcctctggcca

SEQ ID NO: 1114636 - DNA, 15 bp, Homo sapiens
cgtcctcctctggcc

SEQ ID NO: 1114637 - DNA, 15 bp, Homo sapiens
gcgtcctcctctggc

SEQ ID NO: 1114638 - DNA, 15 bp, Homo sapiens
ggcgtcctcctctgg

SEQ ID NO: 1114639 - DNA, 15 bp, Homo sapiens
tggcgtcctcctctg

SEQ ID NO: 1114640 - DNA, 15 bp, Homo sapiens
ctggcgtcctcctct

SEQ ID NO: 1114641 - DNA, 15 bp, Homo sapiens
cctggcgtcctcctc

SEQ ID NO: 1114642 - DNA, 15 bp, Homo sapiens
gcctggcgtcctcct

SEQ ID NO: 1114643 - DNA, 15 bp, Homo sapiens
tgcctggcgtcctcc

SEQ ID NO: 1114644 - DNA, 15 bp, Homo sapiens
gtgcctggcgtcctc

SEQ ID NO: 1114645 - DNA, 15 bp, Homo sapiens
tgtgcctggcgtcct

SEQ ID NO: 1114646 - DNA, 15 bp, Homo sapiens
ttgtgcctggcgtcc

SEQ ID NO: 1114647 - DNA, 15 bp, Homo sapiens
cttgtgcctggcgtc

SEQ ID NO: 1114648 - DNA, 15 bp, Homo sapiens
acttgtgcctggcgt

SEQ ID NO: 1114649 - DNA, 15 bp, Homo sapiens
gacttgtgcctggcg

SEQ ID NO: 1114650 - DNA, 15 bp, Homo sapiens
agacttgtgcctggc

SEQ ID NO: 1114651 - DNA, 15 bp, Homo sapiens
cagacttgtgcctgg

SEQ ID NO: 1114652 - DNA, 15 bp, Homo sapiens
acagacttgtgcctg

SEQ ID NO: 1114653 - DNA, 15 bp, Homo sapiens
cacagacttgtgcct

SEQ ID NO: 1114654 - DNA, 15 bp, Homo sapiens
ccacagacttgtgcc

SEQ ID NO: 1114655 - DNA, 15 bp, Homo sapiens
accacagacttgtgc

SEQ ID NO: 1114656 - DNA, 15 bp, Homo sapiens
aaccacagacttgtg

SEQ ID NO: 1114657 - DNA, 15 bp, Homo sapiens
aaaccacagacttgt

SEQ ID NO: 1114658 - DNA, 15 bp, Homo sapiens
taaaccacagacttg

SEQ ID NO: 1114659 - DNA, 15 bp, Homo sapiens
ataaaccacagactt

SEQ ID NO: 1114660 - DNA, 15 bp, Homo sapiens
gataaaccacagact

SEQ ID NO: 1114661 - DNA, 15 bp, Homo sapiens
tgataaaccacagac

SEQ ID NO: 1114662 - DNA, 15 bp, Homo sapiens
atgataaaccacaga

SEQ ID NO: 1114663 - DNA, 15 bp, Homo sapiens
aatgataaaccacag

SEQ ID NO: 1114664 - DNA, 15 bp, Homo sapiens
aaatgataaaccaca

SEQ ID NO: 1114665 - DNA, 15 bp, Homo sapiens
aaaatgataaaccac

SEQ ID NO: 1114666 - DNA, 15 bp, Homo sapiens
gaaaatgataaacca

SEQ ID NO: 1114667 - DNA, 15 bp, Homo sapiens
ggaaaatgataaacc

SEQ ID NO: 1114668 - DNA, 15 bp, Homo sapiens
gggaaaatgataaac

SEQ ID NO: 1114669 - DNA, 15 bp, Homo sapiens
agggaaaatgataaa

SEQ ID NO: 1114670 - DNA, 15 bp, Homo sapiens
cagggaaaatgataa

SEQ ID NO: 1114671 - DNA, 15 bp, Homo sapiens
acagggaaaatgata

SEQ ID NO: 1114672 - DNA, 15 bp, Homo sapiens
gacagggaaaatgat

SEQ ID NO: 1114673 - DNA, 15 bp, Homo sapiens
agacagggaaaatga

SEQ ID NO: 1114674 - DNA, 15 bp, Homo sapiens
aagacagggaaaatg

SEQ ID NO: 1114675 - DNA, 15 bp, Homo sapiens
aaagacagggaaaat

SEQ ID NO: 1114676 - DNA, 15 bp, Homo sapiens
gaaagacagggaaaa

SEQ ID NO: 1114677 - DNA, 15 bp, Homo sapiens
agaaagacagggaaa

SEQ ID NO: 1114678 - DNA, 15 bp, Homo sapiens
tagaaagacagggaa

SEQ ID NO: 1114679 - DNA, 15 bp, Homo sapiens
ctagaaagacaggga

SEQ ID NO: 1114680 - DNA, 15 bp, Homo sapiens
cctagaaagacaggg

SEQ ID NO: 1114681 - DNA, 15 bp, Homo sapiens
tcctagaaagacagg

SEQ ID NO: 1114682 - DNA, 15 bp, Homo sapiens
gtcctagaaagacag

SEQ ID NO: 1114683 - DNA, 15 bp, Homo sapiens
tgtcctagaaagaca

SEQ ID NO: 1114684 - DNA, 15 bp, Homo sapiens
ttgtcctagaaagac

SEQ ID NO: 1114685 - DNA, 15 bp, Homo sapiens
tttgtcctagaaaga

SEQ ID NO: 1114686 - DNA, 15 bp, Homo sapiens
atttgtcctagaaag

SEQ ID NO: 1114687 - DNA, 15 bp, Homo sapiens
catttgtcctagaaa

SEQ ID NO: 1114688 - DNA, 15 bp, Homo sapiens
ccatttgtcctagaa

SEQ ID NO: 1114689 - DNA, 15 bp, Homo sapiens
gccatttgtcctaga

SEQ ID NO: 1114690 - DNA, 15 bp, Homo sapiens
ggccatttgtcctag

SEQ ID NO: 1114691 - DNA, 15 bp, Homo sapiens
gggccatttgtccta

SEQ ID NO: 1114692 - DNA, 15 bp, Homo sapiens
tgggccatttgtcct

SEQ ID NO: 1114693 - DNA, 15 bp, Homo sapiens
gtgggccatttgtcc

SEQ ID NO: 1114694 - DNA, 15 bp, Homo sapiens
tgtgggccatttgtc

SEQ ID NO: 1114695 - DNA, 15 bp, Homo sapiens
ttgtgggccatttgt

SEQ ID NO: 1114696 - DNA, 15 bp, Homo sapiens
gttgtgggccatttg

SEQ ID NO: 1114697 - DNA, 15 bp, Homo sapiens
tgttgtgggccattt

SEQ ID NO: 1114698 - DNA, 15 bp, Homo sapiens
gtgttgtgggccatt

SEQ ID NO: 1114699 - DNA, 15 bp, Homo sapiens
agtgttgtgggccat

SEQ ID NO: 1114700 - DNA, 15 bp, Homo sapiens
cagtgttgtgggcca

SEQ ID NO: 1114701 - DNA, 15 bp, Homo sapiens
tcagtgttgtgggcc

SEQ ID NO: 1114702 - DNA, 15 bp, Homo sapiens
ctcagtgttgtgggc

SEQ ID NO: 1114703 - DNA, 15 bp, Homo sapiens
gctcagtgttgtggg

SEQ ID NO: 1114704 - DNA, 15 bp, Homo sapiens
tgctcagtgttgtgg

SEQ ID NO: 1114705 - DNA, 15 bp, Homo sapiens
ctgctcagtgttgtg

SEQ ID NO: 1114706 - DNA, 15 bp, Homo sapiens
cctgctcagtgttgt

SEQ ID NO: 1114707 - DNA, 15 bp, Homo sapiens
gcctgctcagtgttg

SEQ ID NO: 1114708 - DNA, 15 bp, Homo sapiens
tgcctgctcagtgtt

SEQ ID NO: 1114709 - DNA, 15 bp, Homo sapiens
atgcctgctcagtgt

SEQ ID NO: 1114710 - DNA, 15 bp, Homo sapiens
gatgcctgctcagtg

SEQ ID NO: 1114711 - DNA, 15 bp, Homo sapiens
agatgcctgctcagt

SEQ ID NO: 1114712 - DNA, 15 bp, Homo sapiens
cagatgcctgctcag

SEQ ID NO: 1114713 - DNA, 15 bp, Homo sapiens
ccagatgcctgctca

SEQ ID NO: 1114714 - DNA, 15 bp, Homo sapiens
cccagatgcctgctc

SEQ ID NO: 1114715 - DNA, 15 bp, Homo sapiens
acccagatgcctgct

SEQ ID NO: 1114716 - DNA, 15 bp, Homo sapiens
cacccagatgcctgc

SEQ ID NO: 1114717 - DNA, 15 bp, Homo sapiens
ccacccagatgcctg

SEQ ID NO: 1114718 - DNA, 15 bp, Homo sapiens
gccacccagatgcct

SEQ ID NO: 1114719 - DNA, 15 bp, Homo sapiens
ggccacccagatgcc

SEQ ID NO: 1114720 - DNA, 15 bp, Homo sapiens
gggccacccagatgc

SEQ ID NO: 1114721 - DNA, 15 bp, Homo sapiens
ggggccacccagatg

SEQ ID NO: 1114722 - DNA, 15 bp, Homo sapiens
aggggccacccagat

SEQ ID NO: 1114723 - DNA, 15 bp, Homo sapiens
caggggccacccaga

SEQ ID NO: 1114724 - DNA, 15 bp, Homo sapiens
gcaggggccacccag

SEQ ID NO: 1114725 - DNA, 15 bp, Homo sapiens
ggcaggggccaccca

SEQ ID NO: 1114726 - DNA, 15 bp, Homo sapiens
tggcaggggccaccc

SEQ ID NO: 1114727 - DNA, 15 bp, Homo sapiens
ctggcaggggccacc

SEQ ID NO: 1114728 - DNA, 15 bp, Homo sapiens
cctggcaggggccac

SEQ ID NO: 1114729 - DNA, 15 bp, Homo sapiens
acctggcaggggcca

SEQ ID NO: 1114730 - DNA, 15 bp, Homo sapiens
aacctggcaggggcc

SEQ ID NO: 1114731 - DNA, 15 bp, Homo sapiens
caacctggcaggggc

SEQ ID NO: 1114732 - DNA, 15 bp, Homo sapiens
atcaacctggcaggg

SEQ ID NO: 1114733 - DNA, 15 bp, Homo sapiens
catcaacctggcagg

SEQ ID NO: 1114734 - DNA, 15 bp, Homo sapiens
gcatcaacctggcag

SEQ ID NO: 1114735 - DNA, 15 bp, Homo sapiens
ggcatcaacctggca

SEQ ID NO: 1114736 - DNA, 15 bp, Homo sapiens
gggcatcaacctggc

SEQ ID NO: 1114737 - DNA, 15 bp, Homo sapiens
tgggcatcaacctgg

SEQ ID NO: 1114738 - DNA, 15 bp, Homo sapiens
gtgggcatcaacctg

SEQ ID NO: 1114739 - DNA, 15 bp, Homo sapiens
agtgggcatcaacct

SEQ ID NO: 1114740 - DNA, 15 bp, Homo sapiens
cagtgggcatcaacc

SEQ ID NO: 1114741 - DNA, 15 bp, Homo sapiens
gcagtgggcatcaac

SEQ ID NO: 1114742 - DNA, 15 bp, Homo sapiens
agcagtgggcatcaa

SEQ ID NO: 1114743 - DNA, 15 bp, Homo sapiens
gagcagtgggcatca

SEQ ID NO: 1114744 - DNA, 15 bp, Homo sapiens
agagcagtgggcatc

SEQ ID NO: 1114745 - DNA, 15 bp, Homo sapiens
cagagcagtgggcat

SEQ ID NO: 1114746 - DNA, 15 bp, Homo sapiens
gcagagcagtgggca

SEQ ID NO: 1114747 - DNA, 15 bp, Homo sapiens
ggcagagcagtgggc

SEQ ID NO: 1114748 - DNA, 15 bp, Homo sapiens
cggcagagcagtggg

SEQ ID NO: 1114749 - DNA, 15 bp, Homo sapiens
ccggcagagcagtgg

SEQ ID NO: 1114750 - DNA, 15 bp, Homo sapiens
gccggcagagcagtg

SEQ ID NO: 1114751 - DNA, 15 bp, Homo sapiens
ggccggcagagcagt

SEQ ID NO: 1114752 - DNA, 15 bp, Homo sapiens
tggccggcagagcag

SEQ ID NO: 1114753 - DNA, 15 bp, Homo sapiens
gtggccggcagagca

SEQ ID NO: 1114754 - DNA, 15 bp, Homo sapiens
agtggccggcagagc

SEQ ID NO: 1114755 - DNA, 15 bp, Homo sapiens
gagtggccggcagag

SEQ ID NO: 1114756 - DNA, 15 bp, Homo sapiens
ggagtggccggcaga

SEQ ID NO: 1114757 - DNA, 15 bp, Homo sapiens
aggagtggccggcag

SEQ ID NO: 1114758 - DNA, 15 bp, Homo sapiens
caggagtggccggca

SEQ ID NO: 1114759 - DNA, 15 bp, Homo sapiens
gcaggagtggccggc

SEQ ID NO: 1114760 - DNA, 15 bp, Homo sapiens
tgcaggagtggccgg

SEQ ID NO: 1114761 - DNA, 15 bp, Homo sapiens
atgcaggagtggccg

SEQ ID NO: 1114762 - DNA, 15 bp, Homo sapiens
gatgcaggagtggcc

SEQ ID NO: 1114763 - DNA, 15 bp, Homo sapiens
agatgcaggagtggc

SEQ ID NO: 1114764 - DNA, 15 bp, Homo sapiens
aagatgcaggagtgg

SEQ ID NO: 1114765 - DNA, 15 bp, Homo sapiens
aaagatgcaggagtg

SEQ ID NO: 1114766 - DNA, 15 bp, Homo sapiens
taaagatgcaggagt

SEQ ID NO: 1114767 - DNA, 15 bp, Homo sapiens
gtaaagatgcaggag

SEQ ID NO: 1114768 - DNA, 15 bp, Homo sapiens
ggtaaagatgcagga

SEQ ID NO: 1114769 - DNA, 15 bp, Homo sapiens
cggtaaagatgcagg

SEQ ID NO: 1114770 - DNA, 15 bp, Homo sapiens
acggtaaagatgcag

SEQ ID NO: 1114771 - DNA, 15 bp, Homo sapiens
gacggtaaagatgca

SEQ ID NO: 1114772 - DNA, 15 bp, Homo sapiens
agacggtaaagatgc

SEQ ID NO: 1114773 - DNA, 15 bp, Homo sapiens
gagacggtaaagatg

SEQ ID NO: 1114774 - DNA, 15 bp, Homo sapiens
tgagacggtaaagat

SEQ ID NO: 1114775 - DNA, 15 bp, Homo sapiens
ctgagacggtaaaga

SEQ ID NO: 1114776 - DNA, 15 bp, Homo sapiens
cctgagacggtaaag

SEQ ID NO: 1114777 - DNA, 15 bp, Homo sapiens
ccctgagacggtaaa

SEQ ID NO: 1114778 - DNA, 15 bp, Homo sapiens
tccctgagacggtaa

SEQ ID NO: 1114779 - DNA, 15 bp, Homo sapiens
gtccctgagacggta

SEQ ID NO: 1114780 - DNA, 15 bp, Homo sapiens
agtccctgagacggt

SEQ ID NO: 1114781 - DNA, 15 bp, Homo sapiens
aagtccctgagacgg

SEQ ID NO: 1114782 - DNA, 15 bp, Homo sapiens
gaagtccctgagacg

SEQ ID NO: 1114783 - DNA, 15 bp, Homo sapiens
ggaagtccctgagac

SEQ ID NO: 1114784 - DNA, 15 bp, Homo sapiens
tggaagtccctgaga

SEQ ID NO: 1114785 - DNA, 15 bp, Homo sapiens
ctggaagtccctgag

SEQ ID NO: 1114786 - DNA, 15 bp, Homo sapiens
actggaagtccctga

SEQ ID NO: 1114787 - DNA, 15 bp, Homo sapiens
aactggaagtccctg

SEQ ID NO: 1114788 - DNA, 15 bp, Homo sapiens
caactggaagtccct

SEQ ID NO: 1114789 - DNA, 15 bp, Homo sapiens
gcaactggaagtccc

SEQ ID NO: 1114790 - DNA, 15 bp, Homo sapiens
agcaactggaagtcc

SEQ ID NO: 1114791 - DNA, 15 bp, Homo sapiens
cagcaactggaagtc

SEQ ID NO: 1114792 - DNA, 15 bp, Homo sapiens
gcagcaactggaagt

SEQ ID NO: 1114793 - DNA, 15 bp, Homo sapiens
ggcagcaactggaag

SEQ ID NO: 1114794 - DNA, 15 bp, Homo sapiens
gggcagcaactggaa

SEQ ID NO: 1114795 - DNA, 15 bp, Homo sapiens
ggggcagcaactgga

SEQ ID NO: 1114796 - DNA, 15 bp, Homo sapiens
aggggcagcaactgg

SEQ ID NO: 1114797 - DNA, 15 bp, Homo sapiens
aaggggcagcaactg

SEQ ID NO: 1114798 - DNA, 15 bp, Homo sapiens
gaaggggcagcaact

SEQ ID NO: 1114799 - DNA, 15 bp, Homo sapiens
ggaaggggcagcaac

SEQ ID NO: 1114800 - DNA, 15 bp, Homo sapiens
gggaaggggcagcaa

SEQ ID NO: 1114801 - DNA, 15 bp, Homo sapiens
tgggaaggggcagca

SEQ ID NO: 1114802 - DNA, 15 bp, Homo sapiens
ctgggaaggggcagc

SEQ ID NO: 1114803 - DNA, 15 bp, Homo sapiens
tctgggaaggggcag

SEQ ID NO: 1114804 - DNA, 15 bp, Homo sapiens
ctctgggaaggggca

SEQ ID NO: 1114805 - DNA, 15 bp, Homo sapiens
cctctgggaaggggc

SEQ ID NO: 1114806 - DNA, 15 bp, Homo sapiens
acctctgggaagggg

SEQ ID NO: 1114807 - DNA, 15 bp, Homo sapiens
cacctctgggaaggg

SEQ ID NO: 1114808 - DNA, 15 bp, Homo sapiens
tcacctctgggaagg

SEQ ID NO: 1114809 - DNA, 15 bp, Homo sapiens
ctcacctctgggaag

SEQ ID NO: 1114810 - DNA, 15 bp, Homo sapiens
gctcacctctgggaa

SEQ ID NO: 1114811 - DNA, 15 bp, Homo sapiens
cgctcacctctggga

SEQ ID NO: 1114812 - DNA, 15 bp, Homo sapiens
acgctcacctctggg

SEQ ID NO: 1114813 - DNA, 15 bp, Homo sapiens
cacgctcacctctgg

SEQ ID NO: 1114814 - DNA, 15 bp, Homo sapiens
gcacgctcacctctg

SEQ ID NO: 1114815 - DNA, 15 bp, Homo sapiens
ggcacgctcacctct

SEQ ID NO: 1114816 - DNA, 15 bp, Homo sapiens
tggcacgctcacctc

SEQ ID NO: 1114817 - DNA, 15 bp, Homo sapiens
atggcacgctcacct

SEQ ID NO: 1114818 - DNA, 15 bp, Homo sapiens
gatggcacgctcacc

SEQ ID NO: 1114819 - DNA, 15 bp, Homo sapiens
tgatggcacgctcac

SEQ ID NO: 1114820 - DNA, 15 bp, Homo sapiens
ctgatggcacgctca

SEQ ID NO: 1114821 - DNA, 15 bp, Homo sapiens
gctgatggcacgctc

SEQ ID NO: 1114822 - DNA, 15 bp, Homo sapiens
ggctgatggcacgct

SEQ ID NO: 1114823 - DNA, 15 bp, Homo sapiens
gggctgatggcacgc

SEQ ID NO: 1114824 - DNA, 15 bp, Homo sapiens
tgggctgatggcacg

SEQ ID NO: 1114825 - DNA, 15 bp, Homo sapiens
ctgggctgatggcac

SEQ ID NO: 1114826 - DNA, 15 bp, Homo sapiens
actgggctgatggca

SEQ ID NO: 1114827 - DNA, 15 bp, Homo sapiens
cactgggctgatggc

SEQ ID NO: 1114828 - DNA, 15 bp, Homo sapiens
ccactgggctgatgg

SEQ ID NO: 1114829 - DNA, 15 bp, Homo sapiens
tccactgggctgatg

SEQ ID NO: 1114830 - DNA, 15 bp, Homo sapiens
ctccactgggctgat

SEQ ID NO: 1114831 - DNA, 15 bp, Homo sapiens
cctccactgggctga

SEQ ID NO: 1114832 - DNA, 15 bp, Homo sapiens
ccctccactgggctg

SEQ ID NO: 1114833 - DNA, 15 bp, Homo sapiens
cccctccactgggct

SEQ ID NO: 1114834 - DNA, 15 bp, Homo sapiens
gcccctccactgggc

SEQ ID NO: 1114835 - DNA, 15 bp, Homo sapiens
agcccctccactggg

SEQ ID NO: 1114836 - DNA, 15 bp, Homo sapiens
aagcccctccactgg

SEQ ID NO: 1114837 - DNA, 15 bp, Homo sapiens
taagcccctccactg

SEQ ID NO: 1114838 - DNA, 15 bp, Homo sapiens
ctaagcccctccact

SEQ ID NO: 1114839 - DNA, 15 bp, Homo sapiens
cctaagcccctccac

SEQ ID NO: 1114840 - DNA, 15 bp, Homo sapiens
acctaagcccctcca

SEQ ID NO: 1114841 - DNA, 15 bp, Homo sapiens
gacctaagcccctcc

SEQ ID NO: 1114842 - DNA, 15 bp, Homo sapiens
agacctaagcccctc

SEQ ID NO: 1114843 - DNA, 15 bp, Homo sapiens
cagacctaagcccct

SEQ ID NO: 1114844 - DNA, 15 bp, Homo sapiens
gcagacctaagcccc

SEQ ID NO: 1114845 - DNA, 15 bp, Homo sapiens
tgcagacctaagccc

SEQ ID NO: 1114846 - DNA, 15 bp, Homo sapiens
atgcagacctaagcc

SEQ ID NO: 1114847 - DNA, 15 bp, Homo sapiens
aatgcagacctaagc

SEQ ID NO: 1114848 - DNA, 15 bp, Homo sapiens
aaatgcagacctaag

SEQ ID NO: 1114849 - DNA, 15 bp, Homo sapiens
taaatgcagacctaa

SEQ ID NO: 1114850 - DNA, 15 bp, Homo sapiens
ataaatgcagaccta

SEQ ID NO: 1114851 - DNA, 15 bp, Homo sapiens
cataaatgcagacct

SEQ ID NO: 1114852 - DNA, 15 bp, Homo sapiens
gcataaatgcagacc

SEQ ID NO: 1114853 - DNA, 15 bp, Homo sapiens
agcataaatgcagac

SEQ ID NO: 1114854 - DNA, 15 bp, Homo sapiens
aagcataaatgcaga

SEQ ID NO: 1114855 - DNA, 15 bp, Homo sapiens
aaagcataaatgcag

SEQ ID NO: 1114856 - DNA, 15 bp, Homo sapiens
aaaagcataaatgca

SEQ ID NO: 1114857 - DNA, 15 bp, Homo sapiens
gaaaagcataaatgc

SEQ ID NO: 1114858 - DNA, 15 bp, Homo sapiens
ggaaaagcataaatg

SEQ ID NO: 1114859 - DNA, 15 bp, Homo sapiens
aggaaaagcataaat

SEQ ID NO: 1114860 - DNA, 15 bp, Homo sapiens
caggaaaagcataaa

SEQ ID NO: 1114861 - DNA, 15 bp, Homo sapiens
gcaggaaaagcataa

SEQ ID NO: 1114862 - DNA, 15 bp, Homo sapiens
tgcaggaaaagcata

SEQ ID NO: 1114863 - DNA, 15 bp, Homo sapiens
gtgcaggaaaagcat

SEQ ID NO: 1114864 - DNA, 15 bp, Homo sapiens
agtgcaggaaaagca

SEQ ID NO: 1114865 - DNA, 15 bp, Homo sapiens
gagtgcaggaaaagc

SEQ ID NO: 1114866 - DNA, 15 bp, Homo sapiens
agagtgcaggaaaag

SEQ ID NO: 1114867 - DNA, 15 bp, Homo sapiens
tagagtgcaggaaaa

SEQ ID NO: 1114868 - DNA, 15 bp, Homo sapiens
gtagagtgcaggaaa

SEQ ID NO: 1114869 - DNA, 15 bp, Homo sapiens
ggtagagtgcaggaa

SEQ ID NO: 1114870 - DNA, 15 bp, Homo sapiens
tggtagagtgcagga

SEQ ID NO: 1114871 - DNA, 15 bp, Homo sapiens
gtggtagagtgcagg

SEQ ID NO: 1114872 - DNA, 15 bp, Homo sapiens
ggtggtagagtgcag

SEQ ID NO: 1114873 - DNA, 15 bp, Homo sapiens
aggtggtagagtgca

SEQ ID NO: 1114874 - DNA, 15 bp, Homo sapiens
caggtggtagagtgc

SEQ ID NO: 1114875 - DNA, 15 bp, Homo sapiens
gcaggtggtagagtg

SEQ ID NO: 1114876 - DNA, 15 bp, Homo sapiens
tgcaggtggtagagt

SEQ ID NO: 1114877 - DNA, 15 bp, Homo sapiens
ctgcaggtggtagag

SEQ ID NO: 1114878 - DNA, 15 bp, Homo sapiens
tctgcaggtggtaga

SEQ ID NO: 1114879 - DNA, 15 bp, Homo sapiens
atctgcaggtggtag

SEQ ID NO: 1114880 - DNA, 15 bp, Homo sapiens
tatctgcaggtggta

SEQ ID NO: 1114881 - DNA, 15 bp, Homo sapiens
ttatctgcaggtggt

SEQ ID NO: 1114882 - DNA, 15 bp, Homo sapiens
tttatctgcaggtgg

SEQ ID NO: 1114883 - DNA, 15 bp, Homo sapiens
ttttatctgcaggtg

SEQ ID NO: 1114884 - DNA, 15 bp, Homo sapiens
cttttatctgcaggt

SEQ ID NO: 1114885 - DNA, 15 bp, Homo sapiens
ccttttatctgcagg

SEQ ID NO: 1114886 - DNA, 15 bp, Homo sapiens
cccttttatctgcag

SEQ ID NO: 1114887 - DNA, 15 bp, Homo sapiens
gcccttttatctgca

SEQ ID NO: 1114888 - DNA, 15 bp, Homo sapiens
ggcccttttatctgc

SEQ ID NO: 1114889 - DNA, 15 bp, Homo sapiens
gggcccttttatctg

SEQ ID NO: 1114890 - DNA, 15 bp, Homo sapiens
agggcccttttatct

SEQ ID NO: 1114891 - DNA, 15 bp, Homo sapiens
cagggcccttttatc

SEQ ID NO: 1114892 - DNA, 15 bp, Homo sapiens
gcagggcccttttat

SEQ ID NO: 1114893 - DNA, 15 bp, Homo sapiens
ggcagggccctttta

SEQ ID NO: 1114894 - DNA, 15 bp, Homo sapiens
tggcagggccctttt

SEQ ID NO: 1114895 - DNA, 15 bp, Homo sapiens
ttggcagggcccttt

SEQ ID NO: 1114896 - DNA, 15 bp, Homo sapiens
attggcagggccctt

SEQ ID NO: 1114897 - DNA, 15 bp, Homo sapiens
cattggcagggccct

SEQ ID NO: 1114898 - DNA, 15 bp, Homo sapiens
gcattggcagggccc

SEQ ID NO: 1114899 - DNA, 15 bp, Homo sapiens
tgcattggcagggcc

SEQ ID NO: 1114900 - DNA, 15 bp, Homo sapiens
ctgcattggcagggc

SEQ ID NO: 1114901 - DNA, 15 bp, Homo sapiens
cctgcattggcaggg

SEQ ID NO: 1114902 - DNA, 15 bp, Homo sapiens
acctgcattggcagg

SEQ ID NO: 1114903 - DNA, 15 bp, Homo sapiens
aacctgcattggcag

SEQ ID NO: 1114904 - DNA, 15 bp, Homo sapiens
aaacctgcattggca

SEQ ID NO: 1114905 - DNA, 15 bp, Homo sapiens
gaaacctgcattggc

SEQ ID NO: 1114906 - DNA, 15 bp, Homo sapiens
agaaacctgcattgg

SEQ ID NO: 1114907 - DNA, 15 bp, Homo sapiens
gagaaacctgcattg

SEQ ID NO: 1114908 - DNA, 15 bp, Homo sapiens
agagaaacctgcatt

SEQ ID NO: 1114909 - DNA, 15 bp, Homo sapiens
cagagaaacctgcat

SEQ ID NO: 1114910 - DNA, 15 bp, Homo sapiens
acagagaaacctgca

SEQ ID NO: 1114911 - DNA, 15 bp, Homo sapiens
cacagagaaacctgc

SEQ ID NO: 1114912 - DNA, 15 bp, Homo sapiens
acacagagaaacctg

SEQ ID NO: 1114913 - DNA, 15 bp, Homo sapiens
aacacagagaaacct

SEQ ID NO: 1114914 - DNA, 15 bp, Homo sapiens
gaacacagagaaacc

SEQ ID NO: 1114915 - DNA, 15 bp, Homo sapiens
ggaacacagagaaac

SEQ ID NO: 1114916 - DNA, 15 bp, Homo sapiens
tggaacacagagaaa

SEQ ID NO: 1114917 - DNA, 15 bp, Homo sapiens
gtggaacacagagaa

SEQ ID NO: 1114918 - DNA, 15 bp, Homo sapiens
tgtggaacacagaga

SEQ ID NO: 1114919 - DNA, 15 bp, Homo sapiens
ctgtggaacacagag

SEQ ID NO: 1114920 - DNA, 15 bp, Homo sapiens
cctgtggaacacaga

SEQ ID NO: 1114921 - DNA, 15 bp, Homo sapiens
gcctgtggaacacag

SEQ ID NO: 1114922 - DNA, 15 bp, Homo sapiens
ggcctgtggaacaca

SEQ ID NO: 1114923 - DNA, 15 bp, Homo sapiens
cggcctgtggaacac

SEQ ID NO: 1114924 - DNA, 15 bp, Homo sapiens
acggcctgtggaaca

SEQ ID NO: 1114925 - DNA, 15 bp, Homo sapiens
cacggcctgtggaac

SEQ ID NO: 1114926 - DNA, 15 bp, Homo sapiens
ccacggcctgtggaa

SEQ ID NO: 1114927 - DNA, 15 bp, Homo sapiens
gccacggcctgtgga

SEQ ID NO: 1114928 - DNA, 15 bp, Homo sapiens
tgccacggcctgtgg

SEQ ID NO: 1114929 - DNA, 15 bp, Homo sapiens
atgccacggcctgtg

SEQ ID NO: 1114930 - DNA, 15 bp, Homo sapiens
catgccacggcctgt

SEQ ID NO: 1114931 - DNA, 15 bp, Homo sapiens
gcatgccacggcctg

SEQ ID NO: 1114932 - DNA, 15 bp, Homo sapiens
cgcatgccacggcct

SEQ ID NO: 1114933 - DNA, 15 bp, Homo sapiens
ccgcatgccacggcc

SEQ ID NO: 1114934 - DNA, 15 bp, Homo sapiens
cccgcatgccacggc

SEQ ID NO: 1114935 - DNA, 15 bp, Homo sapiens
ccccgcatgccacgg

SEQ ID NO: 1114936 - DNA, 15 bp, Homo sapiens
tccccgcatgccacg

SEQ ID NO: 1114937 - DNA, 15 bp, Homo sapiens
atccccgcatgccac

SEQ ID NO: 1114938 - DNA, 15 bp, Homo sapiens
catccccgcatgcca

SEQ ID NO: 1114939 - DNA, 15 bp, Homo sapiens
ccatccccgcatgcc

SEQ ID NO: 1114940 - DNA, 15 bp, Homo sapiens
gccatccccgcatgc

SEQ ID NO: 1114941 - DNA, 15 bp, Homo sapiens
ggccatccccgcatg

SEQ ID NO: 1114942 - DNA, 15 bp, Homo sapiens
tggccatccccgcat

SEQ ID NO: 1114943 - DNA, 15 bp, Homo sapiens
atggccatccccgca

SEQ ID NO: 1114944 - DNA, 15 bp, Homo sapiens
gatggccatccccgc

SEQ ID NO: 1114945 - DNA, 15 bp, Homo sapiens
tgatggccatccccg

SEQ ID NO: 1114946 - DNA, 15 bp, Homo sapiens
gtgatggccatcccc

SEQ ID NO: 1114947 - DNA, 15 bp, Homo sapiens
agtgatggccatccc

SEQ ID NO: 1114948 - DNA, 15 bp, Homo sapiens
cagtgatggccatcc

SEQ ID NO: 1114949 - DNA, 15 bp, Homo sapiens
gcagtgatggccatc

SEQ ID NO: 1114950 - DNA, 15 bp, Homo sapiens
agcagtgatggccat

SEQ ID NO: 1114951 - DNA, 15 bp, Homo sapiens
cagcagtgatggcca

SEQ ID NO: 1114952 - DNA, 15 bp, Homo sapiens
gcagcagtgatggcc

SEQ ID NO: 1114953 - DNA, 15 bp, Homo sapiens
ggcagcagtgatggc

SEQ ID NO: 1114954 - DNA, 15 bp, Homo sapiens
gggcagcagtgatgg

SEQ ID NO: 1114955 - DNA, 15 bp, Homo sapiens
tgggcagcagtgatg

SEQ ID NO: 1114956 - DNA, 15 bp, Homo sapiens
gtgggcagcagtgat

SEQ ID NO: 1114957 - DNA, 15 bp, Homo sapiens
cgtgggcagcagtga

SEQ ID NO: 1114958 - DNA, 15 bp, Homo sapiens
ccgtgggcagcagtg

SEQ ID NO: 1114959 - DNA, 15 bp, Homo sapiens
cccgtgggcagcagt

SEQ ID NO: 1114960 - DNA, 15 bp, Homo sapiens
ccccgtgggcagcag

SEQ ID NO: 1114961 - DNA, 15 bp, Homo sapiens
gccccgtgggcagca

SEQ ID NO: 1114962 - DNA, 15 bp, Homo sapiens
agccccgtgggcagc

SEQ ID NO: 1114963 - DNA, 15 bp, Homo sapiens
aagccccgtgggcag

SEQ ID NO: 1114964 - DNA, 15 bp, Homo sapiens
gaagccccgtgggca

SEQ ID NO: 1114965 - DNA, 15 bp, Homo sapiens
ggaagccccgtgggc

SEQ ID NO: 1114966 - DNA, 15 bp, Homo sapiens
tggaagccccgtggg

SEQ ID NO: 1114967 - DNA, 15 bp, Homo sapiens
gtggaagccccgtgg

SEQ ID NO: 1114968 - DNA, 15 bp, Homo sapiens
agtggaagccccgtg

SEQ ID NO: 1114969 - DNA, 15 bp, Homo sapiens
cagtggaagccccgt

SEQ ID NO: 1114970 - DNA, 15 bp, Homo sapiens
gcagtggaagccccg

SEQ ID NO: 1114971 - DNA, 15 bp, Homo sapiens
tgcagtggaagcccc

SEQ ID NO: 1114972 - DNA, 15 bp, Homo sapiens
ctgcagtggaagccc

SEQ ID NO: 1114973 - DNA, 15 bp, Homo sapiens
actgcagtggaagcc

SEQ ID NO: 1114974 - DNA, 15 bp, Homo sapiens
cactgcagtggaagc

SEQ ID NO: 1114975 - DNA, 15 bp, Homo sapiens
gcactgcagtggaag

SEQ ID NO: 1114976 - DNA, 15 bp, Homo sapiens
tgcactgcagtggaa

SEQ ID NO: 1114977 - DNA, 15 bp, Homo sapiens
ctgcactgcagtgga

SEQ ID NO: 1114978 - DNA, 15 bp, Homo sapiens
tctgcactgcagtgg

SEQ ID NO: 1114979 - DNA, 15 bp, Homo sapiens
gtctgcactgcagtg

SEQ ID NO: 1114980 - DNA, 15 bp, Homo sapiens
cgtctgcactgcagt

SEQ ID NO: 1114981 - DNA, 15 bp, Homo sapiens
ccgtctgcactgcag

SEQ ID NO: 1114982 - DNA, 15 bp, Homo sapiens
cccgtctgcactgca

SEQ ID NO: 1114983 - DNA, 15 bp, Homo sapiens
gcccgtctgcactgc

SEQ ID NO: 1114984 - DNA, 15 bp, Homo sapiens
cgcccgtctgcactg

SEQ ID NO: 1114985 - DNA, 15 bp, Homo sapiens
tcgcccgtctgcact

SEQ ID NO: 1114986 - DNA, 15 bp, Homo sapiens
atcgcccgtctgcac

SEQ ID NO: 1114987 - DNA, 15 bp, Homo sapiens
gatcgcccgtctgca

SEQ ID NO: 1114988 - DNA, 15 bp, Homo sapiens
ggatcgcccgtctgc

SEQ ID NO: 1114989 - DNA, 15 bp, Homo sapiens
aggatcgcccgtctg

SEQ ID NO: 1114990 - DNA, 15 bp, Homo sapiens
caggatcgcccgtct

SEQ ID NO: 1114991 - DNA, 15 bp, Homo sapiens
gcaggatcgcccgtc

SEQ ID NO: 1114992 - DNA, 15 bp, Homo sapiens
agcaggatcgcccgt

SEQ ID NO: 1114993 - DNA, 15 bp, Homo sapiens
aagcaggatcgcccg

SEQ ID NO: 1114994 - DNA, 15 bp, Homo sapiens
gaagcaggatcgccc

SEQ ID NO: 1114995 - DNA, 15 bp, Homo sapiens
ggaagcaggatcgcc

SEQ ID NO: 1114996 - DNA, 15 bp, Homo sapiens
tggaagcaggatcgc

SEQ ID NO: 1114997 - DNA, 15 bp, Homo sapiens
ttggaagcaggatcg

SEQ ID NO: 1114998 - DNA, 15 bp, Homo sapiens
tttggaagcaggatc

SEQ ID NO: 1114999 - DNA, 15 bp, Homo sapiens
ctttggaagcaggat

SEQ ID NO: 1115000 - DNA, 15 bp, Homo sapiens
tctttggaagcagga

SEQ ID NO: 1115001 - DNA, 15 bp, Homo sapiens
atctttggaagcagg

SEQ ID NO: 1115002 - DNA, 15 bp, Homo sapiens
gatctttggaagcag

SEQ ID NO: 1115003 - DNA, 15 bp, Homo sapiens
tgatctttggaagca

SEQ ID NO: 1115004 - DNA, 15 bp, Homo sapiens
ctgatctttggaagc

SEQ ID NO: 1115005 - DNA, 15 bp, Homo sapiens
cctgatctttggaag

SEQ ID NO: 1115006 - DNA, 15 bp, Homo sapiens
acctgatctttggaa

SEQ ID NO: 1115007 - DNA, 15 bp, Homo sapiens
cacctgatctttgga

SEQ ID NO: 1115008 - DNA, 15 bp, Homo sapiens
gcacctgatctttgg

SEQ ID NO: 1115009 - DNA, 15 bp, Homo sapiens
tgcacctgatctttg

SEQ ID NO: 1115010 - DNA, 15 bp, Homo sapiens
ctgcacctgatcttt

SEQ ID NO: 1115011 - DNA, 15 bp, Homo sapiens
gctgcacctgatctt

SEQ ID NO: 1115012 - DNA, 15 bp, Homo sapiens
agctgcacctgatct

SEQ ID NO: 1115013 - DNA, 15 bp, Homo sapiens
cagctgcacctgatc

SEQ ID NO: 1115014 - DNA, 15 bp, Homo sapiens
ccagctgcacctgat

SEQ ID NO: 1115015 - DNA, 15 bp, Homo sapiens
cccagctgcacctga

SEQ ID NO: 1115016 - DNA, 15 bp, Homo sapiens
ccccagctgcacctg

SEQ ID NO: 1115017 - DNA, 15 bp, Homo sapiens
accccagctgcacct

SEQ ID NO: 1115018 - DNA, 15 bp, Homo sapiens
caccccagctgcacc

SEQ ID NO: 1115019 - DNA, 15 bp, Homo sapiens
acaccccagctgcac

SEQ ID NO: 1115020 - DNA, 15 bp, Homo sapiens
cacaccccagctgca

SEQ ID NO: 1115021 - DNA, 15 bp, Homo sapiens
ccacaccccagctgc

SEQ ID NO: 1115022 - DNA, 15 bp, Homo sapiens
cccacaccccagctg

SEQ ID NO: 1115023 - DNA, 15 bp, Homo sapiens
acccacaccccagct

SEQ ID NO: 1115024 - DNA, 15 bp, Homo sapiens
cacccacaccccagc

SEQ ID NO: 1115025 - DNA, 15 bp, Homo sapiens
gcacccacaccccag

SEQ ID NO: 1115026 - DNA, 15 bp, Homo sapiens
tgcacccacacccca

SEQ ID NO: 1115027 - DNA, 15 bp, Homo sapiens
ctgcacccacacccc

SEQ ID NO: 1115028 - DNA, 15 bp, Homo sapiens
cctgcacccacaccc

SEQ ID NO: 1115029 - DNA, 15 bp, Homo sapiens
ccctgcacccacacc

SEQ ID NO: 1115030 - DNA, 15 bp, Homo sapiens
gccctgcacccacac

SEQ ID NO: 1115031 - DNA, 15 bp, Homo sapiens
tgccctgcacccaca

SEQ ID NO: 1115032 - DNA, 15 bp, Homo sapiens
ctgccctgcacccac

SEQ ID NO: 1115033 - DNA, 15 bp, Homo sapiens
cctgccctgcaccca

SEQ ID NO: 1115034 - DNA, 15 bp, Homo sapiens
gcctgccctgcaccc

SEQ ID NO: 1115035 - DNA, 15 bp, Homo sapiens
tgcctgccctgcacc

SEQ ID NO: 1115036 - DNA, 15 bp, Homo sapiens
ctgcctgccctgcac

SEQ ID NO: 1115037 - DNA, 15 bp, Homo sapiens
tctgcctgccctgca

SEQ ID NO: 1115038 - DNA, 15 bp, Homo sapiens
gtctgcctgccctgc

SEQ ID NO: 1115039 - DNA, 15 bp, Homo sapiens
cgtctgcctgccctg

SEQ ID NO: 1115040 - DNA, 15 bp, Homo sapiens
ccgtctgcctgccct

SEQ ID NO: 1115041 - DNA, 15 bp, Homo sapiens
cccgtctgcctgccc

SEQ ID NO: 1115042 - DNA, 15 bp, Homo sapiens
gcccgtctgcctgcc

SEQ ID NO: 1115043 - DNA, 15 bp, Homo sapiens
tgcccgtctgcctgc

SEQ ID NO: 1115044 - DNA, 15 bp, Homo sapiens
ctgcccgtctgcctg

SEQ ID NO: 1115045 - DNA, 15 bp, Homo sapiens
gctgcccgtctgcct

SEQ ID NO: 1115046 - DNA, 15 bp, Homo sapiens
tgctgcccgtctgcc

SEQ ID NO: 1115047 - DNA, 15 bp, Homo sapiens
atgctgcccgtctgc

SEQ ID NO: 1115048 - DNA, 15 bp, Homo sapiens
catgctgcccgtctg

SEQ ID NO: 1115049 - DNA, 15 bp, Homo sapiens
acatgctgcccgtct

SEQ ID NO: 1115050 - DNA, 15 bp, Homo sapiens
cacatgctgcccgtc

SEQ ID NO: 1115051 - DNA, 15 bp, Homo sapiens
ccacatgctgcccgt

SEQ ID NO: 1115052 - DNA, 15 bp, Homo sapiens
tccacatgctgcccg

SEQ ID NO: 1115053 - DNA, 15 bp, Homo sapiens
ctccacatgctgccc

SEQ ID NO: 1115054 - DNA, 15 bp, Homo sapiens
actccacatgctgcc

SEQ ID NO: 1115055 - DNA, 15 bp, Homo sapiens
gactccacatgctgc

SEQ ID NO: 1115056 - DNA, 15 bp, Homo sapiens
agactccacatgctg

SEQ ID NO: 1115057 - DNA, 15 bp, Homo sapiens
cagactccacatgct

SEQ ID NO: 1115058 - DNA, 15 bp, Homo sapiens
ccagactccacatgc

SEQ ID NO: 1115059 - DNA, 15 bp, Homo sapiens
tccagactccacatg

SEQ ID NO: 1115060 - DNA, 15 bp, Homo sapiens
ttccagactccacat

SEQ ID NO: 1115061 - DNA, 15 bp, Homo sapiens
gttccagactccaca

SEQ ID NO: 1115062 - DNA, 15 bp, Homo sapiens
ggttccagactccac

SEQ ID NO: 1115063 - DNA, 15 bp, Homo sapiens
gggttccagactcca

SEQ ID NO: 1115064 - DNA, 15 bp, Homo sapiens
tgggttccagactcc

SEQ ID NO: 1115065 - DNA, 15 bp, Homo sapiens
ctgggttccagactc

SEQ ID NO: 1115066 - DNA, 15 bp, Homo sapiens
cctgggttccagact

SEQ ID NO: 1115067 - DNA, 15 bp, Homo sapiens
tcctgggttccagac

SEQ ID NO: 1115068 - DNA, 15 bp, Homo sapiens
ctcctgggttccaga

SEQ ID NO: 1115069 - DNA, 15 bp, Homo sapiens
gctcctgggttccag

SEQ ID NO: 1115070 - DNA, 15 bp, Homo sapiens
ggctcctgggttcca

SEQ ID NO: 1115071 - DNA, 15 bp, Homo sapiens
gggctcctgggttcc

SEQ ID NO: 1115072 - DNA, 15 bp, Homo sapiens
tgggctcctgggttc

SEQ ID NO: 1115073 - DNA, 15 bp, Homo sapiens
ctgggctcctgggtt

SEQ ID NO: 1115074 - DNA, 15 bp, Homo sapiens
gctgggctcctgggt

SEQ ID NO: 1115075 - DNA, 15 bp, Homo sapiens
agctgggctcctggg

SEQ ID NO: 1115076 - DNA, 15 bp, Homo sapiens
cagctgggctcctgg

SEQ ID NO: 1115077 - DNA, 15 bp, Homo sapiens
ccagctgggctcctg

SEQ ID NO: 1115078 - DNA, 15 bp, Homo sapiens
gccagctgggctcct

SEQ ID NO: 1115079 - DNA, 15 bp, Homo sapiens
cgccagctgggctcc

SEQ ID NO: 1115080 - DNA, 15 bp, Homo sapiens
ccgccagctgggctc

SEQ ID NO: 1115081 - DNA, 15 bp, Homo sapiens
cccgccagctgggct

SEQ ID NO: 1115082 - DNA, 15 bp, Homo sapiens
ccccgccagctgggc

SEQ ID NO: 1115083 - DNA, 15 bp, Homo sapiens
cccccgccagctggg

SEQ ID NO: 1115084 - DNA, 15 bp, Homo sapiens
gcccccgccagctgg

SEQ ID NO: 1115085 - DNA, 15 bp, Homo sapiens
tgcccccgccagctg

SEQ ID NO: 1115086 - DNA, 15 bp, Homo sapiens
ctgcccccgccagct

SEQ ID NO: 1115087 - DNA, 15 bp, Homo sapiens
gctgcccccgccagc

SEQ ID NO: 1115088 - DNA, 15 bp, Homo sapiens
ggctgcccccgccag

SEQ ID NO: 1115089 - DNA, 15 bp, Homo sapiens
gggctgcccccgcca

SEQ ID NO: 1115090 - DNA, 15 bp, Homo sapiens
agggctgcccccgcc

SEQ ID NO: 1115091 - DNA, 15 bp, Homo sapiens
cagggctgcccccgc

SEQ ID NO: 1115092 - DNA, 15 bp, Homo sapiens
tcagggctgcccccg

SEQ ID NO: 1115093 - DNA, 15 bp, Homo sapiens
atcagggctgccccc

SEQ ID NO: 1115094 - DNA, 15 bp, Homo sapiens
aatcagggctgcccc

SEQ ID NO: 1115095 - DNA, 15 bp, Homo sapiens
gaatcagggctgccc

SEQ ID NO: 1115096 - DNA, 15 bp, Homo sapiens
ggaatcagggctgcc

SEQ ID NO: 1115097 - DNA, 15 bp, Homo sapiens
aggaatcagggctgc

SEQ ID NO: 1115098 - DNA, 15 bp, Homo sapiens
caggaatcagggctg

SEQ ID NO: 1115099 - DNA, 15 bp, Homo sapiens
gcaggaatcagggct

SEQ ID NO: 1115100 - DNA, 15 bp, Homo sapiens
ggcaggaatcagggc

SEQ ID NO: 1115101 - DNA, 15 bp, Homo sapiens
gggcaggaatcaggg

SEQ ID NO: 1115102 - DNA, 15 bp, Homo sapiens
agggcaggaatcagg

SEQ ID NO: 1115103 - DNA, 15 bp, Homo sapiens
aagggcaggaatcag

SEQ ID NO: 1115104 - DNA, 15 bp, Homo sapiens
caagggcaggaatca

SEQ ID NO: 1115105 - DNA, 15 bp, Homo sapiens
acaagggcaggaatc

SEQ ID NO: 1115106 - DNA, 15 bp, Homo sapiens
cacaagggcaggaat

SEQ ID NO: 1115107 - DNA, 15 bp, Homo sapiens
gcacaagggcaggaa

SEQ ID NO: 1115108 - DNA, 15 bp, Homo sapiens
ggcacaagggcagga

SEQ ID NO: 1115109 - DNA, 15 bp, Homo sapiens
gggcacaagggcagg

SEQ ID NO: 1115110 - DNA, 15 bp, Homo sapiens
agggcacaagggcag

SEQ ID NO: 1115111 - DNA, 15 bp, Homo sapiens
gagggcacaagggca

SEQ ID NO: 1115112 - DNA, 15 bp, Homo sapiens
tgagggcacaagggc

SEQ ID NO: 1115113 - DNA, 15 bp, Homo sapiens
atgagggcacaaggg

SEQ ID NO: 1115114 - DNA, 15 bp, Homo sapiens
aatgagggcacaagg

SEQ ID NO: 1115115 - DNA, 15 bp, Homo sapiens
gaatgagggcacaag

SEQ ID NO: 1115116 - DNA, 15 bp, Homo sapiens
tgaatgagggcacaa

SEQ ID NO: 1115117 - DNA, 15 bp, Homo sapiens
atgaatgagggcaca

SEQ ID NO: 1115118 - DNA, 15 bp, Homo sapiens
catgaatgagggcac

SEQ ID NO: 1115119 - DNA, 15 bp, Homo sapiens
acatgaatgagggca

SEQ ID NO: 1115120 - DNA, 15 bp, Homo sapiens
cacatgaatgagggc

SEQ ID NO: 1115121 - DNA, 15 bp, Homo sapiens
ccacatgaatgaggg

SEQ ID NO: 1115122 - DNA, 15 bp, Homo sapiens
gccacatgaatgagg

SEQ ID NO: 1115123 - DNA, 15 bp, Homo sapiens
tgccacatgaatgag

SEQ ID NO: 1115124 - DNA, 15 bp, Homo sapiens
atgccacatgaatga

SEQ ID NO: 1115125 - DNA, 15 bp, Homo sapiens
gatgccacatgaatg

SEQ ID NO: 1115126 - DNA, 15 bp, Homo sapiens
agatgccacatgaat

SEQ ID NO: 1115127 - DNA, 15 bp, Homo sapiens
cagatgccacatgaa

SEQ ID NO: 1115128 - DNA, 15 bp, Homo sapiens
acagatgccacatga

SEQ ID NO: 1115129 - DNA, 15 bp, Homo sapiens
tacagatgccacatg

SEQ ID NO: 1115130 - DNA, 15 bp, Homo sapiens
gtacagatgccacat

SEQ ID NO: 1115131 - DNA, 15 bp, Homo sapiens
agtacagatgccaca

SEQ ID NO: 1115132 - DNA, 15 bp, Homo sapiens
tagtacagatgccac

SEQ ID NO: 1115133 - DNA, 15 bp, Homo sapiens
ttagtacagatgcca

SEQ ID NO: 1115134 - DNA, 15 bp, Homo sapiens
cttagtacagatgcc

SEQ ID NO: 1115135 - DNA, 15 bp, Homo sapiens
gcttagtacagatgc

SEQ ID NO: 1115136 - DNA, 15 bp, Homo sapiens
tgcttagtacagatg

SEQ ID NO: 1115137 - DNA, 15 bp, Homo sapiens
ttgcttagtacagat

SEQ ID NO: 1115138 - DNA, 15 bp, Homo sapiens
gttgcttagtacaga

SEQ ID NO: 1115139 - DNA, 15 bp, Homo sapiens
tgttgcttagtacag

SEQ ID NO: 1115140 - DNA, 15 bp, Homo sapiens
ctgttgcttagtaca

SEQ ID NO: 1115141 - DNA, 15 bp, Homo sapiens
gctgttgcttagtac

SEQ ID NO: 1115142 - DNA, 15 bp, Homo sapiens
ggctgttgcttagta

SEQ ID NO: 1115143 - DNA, 15 bp, Homo sapiens
gggctgttgcttagt

SEQ ID NO: 1115144 - DNA, 15 bp, Homo sapiens
agggctgttgcttag

SEQ ID NO: 1115145 - DNA, 15 bp, Homo sapiens
cagggctgttgctta

SEQ ID NO: 1115146 - DNA, 15 bp, Homo sapiens
gcagggctgttgctt

SEQ ID NO: 1115147 - DNA, 15 bp, Homo sapiens
agcagggctgttgct

SEQ ID NO: 1115148 - DNA, 15 bp, Homo sapiens
cagcagggctgttgc

SEQ ID NO: 1115149 - DNA, 15 bp, Homo sapiens
acagcagggctgttg

SEQ ID NO: 1115150 - DNA, 15 bp, Homo sapiens
cacagcagggctgtt

SEQ ID NO: 1115151 - DNA, 15 bp, Homo sapiens
ccacagcagggctgt

SEQ ID NO: 1115152 - DNA, 15 bp, Homo sapiens
tccacagcagggctg

SEQ ID NO: 1115153 - DNA, 15 bp, Homo sapiens
gtccacagcagggct

SEQ ID NO: 1115154 - DNA, 15 bp, Homo sapiens
tgtccacagcagggc

SEQ ID NO: 1115155 - DNA, 15 bp, Homo sapiens
ctgtccacagcaggg

SEQ ID NO: 1115156 - DNA, 15 bp, Homo sapiens
tctgtccacagcagg

SEQ ID NO: 1115157 - DNA, 15 bp, Homo sapiens
ctctgtccacagcag

SEQ ID NO: 1115158 - DNA, 15 bp, Homo sapiens
cctctgtccacagca

SEQ ID NO: 1115159 - DNA, 15 bp, Homo sapiens
ccctctgtccacagc

SEQ ID NO: 1115160 - DNA, 15 bp, Homo sapiens
cccctctgtccacag

SEQ ID NO: 1115161 - DNA, 15 bp, Homo sapiens
gcccctctgtccaca

SEQ ID NO: 1115162 - DNA, 15 bp, Homo sapiens
tgcccctctgtccac

SEQ ID NO: 1115163 - DNA, 15 bp, Homo sapiens
ctgcccctctgtcca

SEQ ID NO: 1115164 - DNA, 15 bp, Homo sapiens
gctgcccctctgtcc

SEQ ID NO: 1115165 - DNA, 15 bp, Homo sapiens
tgctgcccctctgtc

SEQ ID NO: 1115166 - DNA, 15 bp, Homo sapiens
gtgctgcccctctgt

SEQ ID NO: 1115167 - DNA, 15 bp, Homo sapiens
agtgctgcccctctg

SEQ ID NO: 1115168 - DNA, 15 bp, Homo sapiens
cagtgctgcccctct

SEQ ID NO: 1115169 - DNA, 15 bp, Homo sapiens
ccagtgctgcccctc

SEQ ID NO: 1115170 - DNA, 15 bp, Homo sapiens
cccagtgctgcccct

SEQ ID NO: 1115171 - DNA, 15 bp, Homo sapiens
ccccagtgctgcccc

SEQ ID NO: 1115172 - DNA, 15 bp, Homo sapiens
tccccagtgctgccc

SEQ ID NO: 1115173 - DNA, 15 bp, Homo sapiens
atccccagtgctgcc

SEQ ID NO: 1115174 - DNA, 15 bp, Homo sapiens
tatccccagtgctgc

SEQ ID NO: 1115175 - DNA, 15 bp, Homo sapiens
ctatccccagtgctg

SEQ ID NO: 1115176 - DNA, 15 bp, Homo sapiens
cctatccccagtgct

SEQ ID NO: 1115177 - DNA, 15 bp, Homo sapiens
tcctatccccagtgc

SEQ ID NO: 1115178 - DNA, 15 bp, Homo sapiens
ctcctatccccagtg

SEQ ID NO: 1115179 - DNA, 15 bp, Homo sapiens
cctcctatccccagt

SEQ ID NO: 1115180 - DNA, 15 bp, Homo sapiens
ccctcctatccccag

SEQ ID NO: 1115181 - DNA, 15 bp, Homo sapiens
accctcctatcccca

SEQ ID NO: 1115182 - DNA, 15 bp, Homo sapiens
caccctcctatcccc

SEQ ID NO: 1115183 - DNA, 15 bp, Homo sapiens
gcaccctcctatccc

SEQ ID NO: 1115184 - DNA, 15 bp, Homo sapiens
cgcaccctcctatcc

SEQ ID NO: 1115185 - DNA, 15 bp, Homo sapiens
ccgcaccctcctatc

SEQ ID NO: 1115186 - DNA, 15 bp, Homo sapiens
cccgcaccctcctat

SEQ ID NO: 1115187 - DNA, 15 bp, Homo sapiens
tcccgcaccctccta

SEQ ID NO: 1115188 - DNA, 15 bp, Homo sapiens
ctcccgcaccctcct

SEQ ID NO: 1115189 - DNA, 15 bp, Homo sapiens
tctcccgcaccctcc

SEQ ID NO: 1115190 - DNA, 15 bp, Homo sapiens
ttctcccgcaccctc

SEQ ID NO: 1115191 - DNA, 15 bp, Homo sapiens
tttctcccgcaccct

SEQ ID NO: 1115192 - DNA, 15 bp, Homo sapiens
ctttctcccgcaccc

SEQ ID NO: 1115193 - DNA, 15 bp, Homo sapiens
actttctcccgcacc

SEQ ID NO: 1115194 - DNA, 15 bp, Homo sapiens
cactttctcccgcac

SEQ ID NO: 1115195 - DNA, 15 bp, Homo sapiens
gcactttctcccgca

SEQ ID NO: 1115196 - DNA, 15 bp, Homo sapiens
tgcactttctcccgc

SEQ ID NO: 1115197 - DNA, 15 bp, Homo sapiens
ttgcactttctcccg

SEQ ID NO: 1115198 - DNA, 15 bp, Homo sapiens
cttgcactttctccc

SEQ ID NO: 1115199 - DNA, 15 bp, Homo sapiens
tcttgcactttctcc

SEQ ID NO: 1115200 - DNA, 15 bp, Homo sapiens
gtcttgcactttctc

SEQ ID NO: 1115201 - DNA, 15 bp, Homo sapiens
agtcttgcactttct

SEQ ID NO: 1115202 - DNA, 15 bp, Homo sapiens
gagtcttgcactttc

SEQ ID NO: 1115203 - DNA, 15 bp, Homo sapiens
ggagtcttgcacttt

SEQ ID NO: 1115204 - DNA, 15 bp, Homo sapiens
tggagtcttgcactt

SEQ ID NO: 1115205 - DNA, 15 bp, Homo sapiens
ctggagtcttgcact

SEQ ID NO: 1115206 - DNA, 15 bp, Homo sapiens
cctggagtcttgcac

SEQ ID NO: 1115207 - DNA, 15 bp, Homo sapiens
acctggagtcttgca

SEQ ID NO: 1115208 - DNA, 15 bp, Homo sapiens
gacctggagtcttgc

SEQ ID NO: 1115209 - DNA, 15 bp, Homo sapiens
ggacctggagtcttg

SEQ ID NO: 1115210 - DNA, 15 bp, Homo sapiens
tggacctggagtctt

SEQ ID NO: 1115211 - DNA, 15 bp, Homo sapiens
ctggacctggagtct

SEQ ID NO: 1115212 - DNA, 15 bp, Homo sapiens
cctggacctggagtc

SEQ ID NO: 1115213 - DNA, 15 bp, Homo sapiens
gcctggacctggagt

SEQ ID NO: 1115214 - DNA, 15 bp, Homo sapiens
cgcctggacctggag

SEQ ID NO: 1115215 - DNA, 15 bp, Homo sapiens
acgcctggacctgga

SEQ ID NO: 1115216 - DNA, 15 bp, Homo sapiens
aacgcctggacctgg

SEQ ID NO: 1115217 - DNA, 15 bp, Homo sapiens
caacgcctggacctg

SEQ ID NO: 1115218 - DNA, 15 bp, Homo sapiens
acaacgcctggacct

SEQ ID NO: 1115219 - DNA, 15 bp, Homo sapiens
cacaacgcctggacc

SEQ ID NO: 1115220 - DNA, 15 bp, Homo sapiens
ccacaacgcctggac

SEQ ID NO: 1115221 - DNA, 15 bp, Homo sapiens
cccacaacgcctgga

SEQ ID NO: 1115222 - DNA, 15 bp, Homo sapiens
ccccacaacgcctgg

SEQ ID NO: 1115223 - DNA, 15 bp, Homo sapiens
cccccacaacgcctg

SEQ ID NO: 1115224 - DNA, 15 bp, Homo sapiens
acccccacaacgcct

SEQ ID NO: 1115225 - DNA, 15 bp, Homo sapiens
cacccccacaacgcc

SEQ ID NO: 1115226 - DNA, 15 bp, Homo sapiens
ccacccccacaacgc

SEQ ID NO: 1115227 - DNA, 15 bp, Homo sapiens
cccacccccacaacg

SEQ ID NO: 1115228 - DNA, 15 bp, Homo sapiens
ccccacccccacaac

SEQ ID NO: 1115229 - DNA, 15 bp, Homo sapiens
tccccacccccacaa

SEQ ID NO: 1115230 - DNA, 15 bp, Homo sapiens
ctccccacccccaca

SEQ ID NO: 1115231 - DNA, 15 bp, Homo sapiens
tctccccacccccac

SEQ ID NO: 1115232 - DNA, 15 bp, Homo sapiens
ctctccccaccccca

SEQ ID NO: 1115233 - DNA, 15 bp, Homo sapiens
cctctccccaccccc

SEQ ID NO: 1115234 - DNA, 15 bp, Homo sapiens
acctctccccacccc

SEQ ID NO: 1115235 - DNA, 15 bp, Homo sapiens
gacctctccccaccc

SEQ ID NO: 1115236 - DNA, 15 bp, Homo sapiens
cgacctctccccacc

SEQ ID NO: 1115237 - DNA, 15 bp, Homo sapiens
tcgacctctccccac

SEQ ID NO: 1115238 - DNA, 15 bp, Homo sapiens
ctcgacctctcccca

SEQ ID NO: 1115239 - DNA, 15 bp, Homo sapiens
gctcgacctctcccc

SEQ ID NO: 1115240 - DNA, 15 bp, Homo sapiens
agctcgacctctccc

SEQ ID NO: 1115241 - DNA, 15 bp, Homo sapiens
cagctcgacctctcc

SEQ ID NO: 1115242 - DNA, 15 bp, Homo sapiens
ccagctcgacctctc

SEQ ID NO: 1115243 - DNA, 15 bp, Homo sapiens
cccagctcgacctct

SEQ ID NO: 1115244 - DNA, 15 bp, Homo sapiens
gcccagctcgacctc

SEQ ID NO: 1115245 - DNA, 15 bp, Homo sapiens
ggcccagctcgacct

SEQ ID NO: 1115246 - DNA, 15 bp, Homo sapiens
cggcccagctcgacc

SEQ ID NO: 1115247 - DNA, 15 bp, Homo sapiens
ccggcccagctcgac

SEQ ID NO: 1115248 - DNA, 15 bp, Homo sapiens
accggcccagctcga

SEQ ID NO: 1115249 - DNA, 15 bp, Homo sapiens
gaccggcccagctcg

SEQ ID NO: 1115250 - DNA, 15 bp, Homo sapiens
agaccggcccagctc

SEQ ID NO: 1115251 - DNA, 15 bp, Homo sapiens
tagaccggcccagct

SEQ ID NO: 1115252 - DNA, 15 bp, Homo sapiens
ttagaccggcccagc

SEQ ID NO: 1115253 - DNA, 15 bp, Homo sapiens
attagaccggcccag

SEQ ID NO: 1115254 - DNA, 15 bp, Homo sapiens
tattagaccggccca

SEQ ID NO: 1115255 - DNA, 15 bp, Homo sapiens
gtattagaccggccc

SEQ ID NO: 1115256 - DNA, 15 bp, Homo sapiens
ggtattagaccggcc

SEQ ID NO: 1115257 - DNA, 15 bp, Homo sapiens
tggtattagaccggc

SEQ ID NO: 1115258 - DNA, 15 bp, Homo sapiens
ttggtattagaccgg

SEQ ID NO: 1115259 - DNA, 15 bp, Homo sapiens
gttggtattagaccg

SEQ ID NO: 1115260 - DNA, 15 bp, Homo sapiens
ggttggtattagacc

SEQ ID NO: 1115261 - DNA, 15 bp, Homo sapiens
gggttggtattagac

SEQ ID NO: 1115262 - DNA, 15 bp, Homo sapiens
tgggttggtattaga

SEQ ID NO: 1115263 - DNA, 15 bp, Homo sapiens
atgggttggtattag

SEQ ID NO: 1115264 - DNA, 15 bp, Homo sapiens
catgggttggtatta

SEQ ID NO: 1115265 - DNA, 15 bp, Homo sapiens
ccatgggttggtatt

SEQ ID NO: 1115266 - DNA, 15 bp, Homo sapiens
accatgggttggtat

SEQ ID NO: 1115267 - DNA, 15 bp, Homo sapiens
gaccatgggttggta

SEQ ID NO: 1115268 - DNA, 15 bp, Homo sapiens
tgaccatgggttggt

SEQ ID NO: 1115269 - DNA, 15 bp, Homo sapiens
ctgaccatgggttgg

SEQ ID NO: 1115270 - DNA, 15 bp, Homo sapiens
actgaccatgggttg

SEQ ID NO: 1115271 - DNA, 15 bp, Homo sapiens
cactgaccatgggtt

SEQ ID NO: 1115272 - DNA, 15 bp, Homo sapiens
ccactgaccatgggt

SEQ ID NO: 1115273 - DNA, 15 bp, Homo sapiens
cccactgaccatggg

SEQ ID NO: 1115274 - DNA, 15 bp, Homo sapiens
acccactgaccatgg

SEQ ID NO: 1115275 - DNA, 15 bp, Homo sapiens
cacccactgaccatg

SEQ ID NO: 1115276 - DNA, 15 bp, Homo sapiens
gcacccactgaccat

SEQ ID NO: 1115277 - DNA, 15 bp, Homo sapiens
ggcacccactgacca

SEQ ID NO: 1115278 - DNA, 15 bp, Homo sapiens
gggcacccactgacc

SEQ ID NO: 1115279 - DNA, 15 bp, Homo sapiens
ggggcacccactgac

SEQ ID NO: 1115280 - DNA, 15 bp, Homo sapiens
aggggcacccactga

SEQ ID NO: 1115281 - DNA, 15 bp, Homo sapiens
aaggggcacccactg

SEQ ID NO: 1115282 - DNA, 15 bp, Homo sapiens
gaaggggcacccact

SEQ ID NO: 1115283 - DNA, 15 bp, Homo sapiens
ggaaggggcacccac

SEQ ID NO: 1115284 - DNA, 15 bp, Homo sapiens
gggaaggggcaccca

SEQ ID NO: 1115285 - DNA, 15 bp, Homo sapiens
ggggaaggggcaccc

SEQ ID NO: 1115286 - DNA, 15 bp, Homo sapiens
tggggaaggggcacc

SEQ ID NO: 1115287 - DNA, 15 bp, Homo sapiens
atggggaaggggcac

SEQ ID NO: 1115288 - DNA, 15 bp, Homo sapiens
catggggaaggggca

SEQ ID NO: 1115289 - DNA, 15 bp, Homo sapiens
gcatggggaaggggc

SEQ ID NO: 1115290 - DNA, 15 bp, Homo sapiens
ggcatggggaagggg

SEQ ID NO: 1115291 - DNA, 15 bp, Homo sapiens
tggcatggggaaggg

SEQ ID NO: 1115292 - DNA, 15 bp, Homo sapiens
atggcatggggaagg

SEQ ID NO: 1115293 - DNA, 15 bp, Homo sapiens
gatggcatggggaag

SEQ ID NO: 1115294 - DNA, 15 bp, Homo sapiens
agatggcatggggaa

SEQ ID NO: 1115295 - DNA, 15 bp, Homo sapiens
aagatggcatgggga

SEQ ID NO: 1115296 - DNA, 15 bp, Homo sapiens
caagatggcatgggg

SEQ ID NO: 1115297 - DNA, 15 bp, Homo sapiens
gcaagatggcatggg

SEQ ID NO: 1115298 - DNA, 15 bp, Homo sapiens
agcaagatggcatgg

SEQ ID NO: 1115299 - DNA, 15 bp, Homo sapiens
cagcaagatggcatg

SEQ ID NO: 1115300 - DNA, 15 bp, Homo sapiens
tcagcaagatggcat

SEQ ID NO: 1115301 - DNA, 15 bp, Homo sapiens
ctcagcaagatggca

SEQ ID NO: 1115302 - DNA, 15 bp, Homo sapiens
cctcagcaagatggc

SEQ ID NO: 1115303 - DNA, 15 bp, Homo sapiens
ccctcagcaagatgg

SEQ ID NO: 1115304 - DNA, 15 bp, Homo sapiens
tccctcagcaagatg

SEQ ID NO: 1115305 - DNA, 15 bp, Homo sapiens
ctccctcagcaagat

SEQ ID NO: 1115306 - DNA, 15 bp, Homo sapiens
cctccctcagcaaga

SEQ ID NO: 1115307 - DNA, 15 bp, Homo sapiens
ccctccctcagcaag

SEQ ID NO: 1115308 - DNA, 15 bp, Homo sapiens
tccctccctcagcaa

SEQ ID NO: 1115309 - DNA, 15 bp, Homo sapiens
gtccctccctcagca

SEQ ID NO: 1115310 - DNA, 15 bp, Homo sapiens
agtccctccctcagc

SEQ ID NO: 1115311 - DNA, 15 bp, Homo sapiens
cagtccctccctcag

SEQ ID NO: 1115312 - DNA, 15 bp, Homo sapiens
ccagtccctccctca

SEQ ID NO: 1115313 - DNA, 15 bp, Homo sapiens
tccagtccctccctc

SEQ ID NO: 1115314 - DNA, 15 bp, Homo sapiens
atccagtccctccct

SEQ ID NO: 1115315 - DNA, 15 bp, Homo sapiens
aatccagtccctccc

SEQ ID NO: 1115316 - DNA, 15 bp, Homo sapiens
caatccagtccctcc

SEQ ID NO: 1115317 - DNA, 15 bp, Homo sapiens
acaatccagtccctc

SEQ ID NO: 1115318 - DNA, 15 bp, Homo sapiens
cacaatccagtccct

SEQ ID NO: 1115319 - DNA, 15 bp, Homo sapiens
tcacaatccagtccc

SEQ ID NO: 1115320 - DNA, 15 bp, Homo sapiens
ctcacaatccagtcc

SEQ ID NO: 1115321 - DNA, 15 bp, Homo sapiens
cctcacaatccagtc

SEQ ID NO: 1115322 - DNA, 15 bp, Homo sapiens
tcctcacaatccagt

SEQ ID NO: 1115323 - DNA, 15 bp, Homo sapiens
ctcctcacaatccag

SEQ ID NO: 1115324 - DNA, 15 bp, Homo sapiens
cctcctcacaatcca

SEQ ID NO: 1115325 - DNA, 15 bp, Homo sapiens
ccctcctcacaatcc

SEQ ID NO: 1115326 - DNA, 15 bp, Homo sapiens
accctcctcacaatc

SEQ ID NO: 1115327 - DNA, 15 bp, Homo sapiens
caccctcctcacaat

SEQ ID NO: 1115328 - DNA, 15 bp, Homo sapiens
tcaccctcctcacaa

SEQ ID NO: 1115329 - DNA, 15 bp, Homo sapiens
ctcaccctcctcaca

SEQ ID NO: 1115330 - DNA, 15 bp, Homo sapiens
actcaccctcctcac

SEQ ID NO: 1115331 - DNA, 15 bp, Homo sapiens
aactcaccctcctca

SEQ ID NO: 1115332 - DNA, 15 bp, Homo sapiens
taactcaccctcctc

SEQ ID NO: 1115333 - DNA, 15 bp, Homo sapiens
ctaactcaccctcct

SEQ ID NO: 1115334 - DNA, 15 bp, Homo sapiens
cctaactcaccctcc

SEQ ID NO: 1115335 - DNA, 15 bp, Homo sapiens
gcctaactcaccctc

SEQ ID NO: 1115336 - DNA, 15 bp, Homo sapiens
ggcctaactcaccct

SEQ ID NO: 1115337 - DNA, 15 bp, Homo sapiens
aggcctaactcaccc

SEQ ID NO: 1115338 - DNA, 15 bp, Homo sapiens
caggcctaactcacc

SEQ ID NO: 1115339 - DNA, 15 bp, Homo sapiens
gcaggcctaactcac

SEQ ID NO: 1115340 - DNA, 15 bp, Homo sapiens
ggcaggcctaactca

SEQ ID NO: 1115341 - DNA, 15 bp, Homo sapiens
aggcaggcctaactc

SEQ ID NO: 1115342 - DNA, 15 bp, Homo sapiens
taggcaggcctaact

SEQ ID NO: 1115343 - DNA, 15 bp, Homo sapiens
ctaggcaggcctaac

SEQ ID NO: 1115344 - DNA, 15 bp, Homo sapiens
cctaggcaggcctaa

SEQ ID NO: 1115345 - DNA, 15 bp, Homo sapiens
tcctaggcaggccta

SEQ ID NO: 1115346 - DNA, 15 bp, Homo sapiens
ctcctaggcaggcct

SEQ ID NO: 1115347 - DNA, 15 bp, Homo sapiens
tctcctaggcaggcc

SEQ ID NO: 1115348 - DNA, 15 bp, Homo sapiens
atctcctaggcaggc

SEQ ID NO: 1115349 - DNA, 15 bp, Homo sapiens
gatctcctaggcagg

SEQ ID NO: 1115350 - DNA, 15 bp, Homo sapiens
tgatctcctaggcag

SEQ ID NO: 1115351 - DNA, 15 bp, Homo sapiens
gtgatctcctaggca

SEQ ID NO: 1115352 - DNA, 15 bp, Homo sapiens
agtgatctcctaggc

SEQ ID NO: 1115353 - DNA, 15 bp, Homo sapiens
cagtgatctcctagg

SEQ ID NO: 1115354 - DNA, 15 bp, Homo sapiens
tcagtgatctcctag

SEQ ID NO: 1115355 - DNA, 15 bp, Homo sapiens
ctcagtgatctccta

SEQ ID NO: 1115356 - DNA, 15 bp, Homo sapiens
gctcagtgatctcct

SEQ ID NO: 1115357 - DNA, 15 bp, Homo sapiens
ggctcagtgatctcc

SEQ ID NO: 1115358 - DNA, 15 bp, Homo sapiens
aggctcagtgatctc

SEQ ID NO: 1115359 - DNA, 15 bp, Homo sapiens
aaggctcagtgatct

SEQ ID NO: 1115360 - DNA, 15 bp, Homo sapiens
taaggctcagtgatc

SEQ ID NO: 1115361 - DNA, 15 bp, Homo sapiens
ctaaggctcagtgat

SEQ ID NO: 1115362 - DNA, 15 bp, Homo sapiens
actaaggctcagtga

SEQ ID NO: 1115363 - DNA, 15 bp, Homo sapiens
cactaaggctcagtg

SEQ ID NO: 1115364 - DNA, 15 bp, Homo sapiens
acactaaggctcagt

SEQ ID NO: 1115365 - DNA, 15 bp, Homo sapiens
gacactaaggctcag

SEQ ID NO: 1115366 - DNA, 15 bp, Homo sapiens
tgacactaaggctca

SEQ ID NO: 1115367 - DNA, 15 bp, Homo sapiens
gtgacactaaggctc

SEQ ID NO: 1115368 - DNA, 15 bp, Homo sapiens
ggtgacactaaggct

SEQ ID NO: 1115369 - DNA, 15 bp, Homo sapiens
gggtgacactaaggc

SEQ ID NO: 1115370 - DNA, 15 bp, Homo sapiens
agggtgacactaagg

SEQ ID NO: 1115371 - DNA, 15 bp, Homo sapiens
gagggtgacactaag

SEQ ID NO: 1115372 - DNA, 15 bp, Homo sapiens
tgagggtgacactaa

SEQ ID NO: 1115373 - DNA, 15 bp, Homo sapiens
ttgagggtgacacta

SEQ ID NO: 1115374 - DNA, 15 bp, Homo sapiens
tttgagggtgacact

SEQ ID NO: 1115375 - DNA, 15 bp, Homo sapiens
gtttgagggtgacac

SEQ ID NO: 1115376 - DNA, 15 bp, Homo sapiens
ggtttgagggtgaca

SEQ ID NO: 1115377 - DNA, 15 bp, Homo sapiens
gggtttgagggtgac

SEQ ID NO: 1115378 - DNA, 15 bp, Homo sapiens
ggggtttgagggtga

SEQ ID NO: 1115379 - DNA, 15 bp, Homo sapiens
tggggtttgagggtg

SEQ ID NO: 1115380 - DNA, 15 bp, Homo sapiens
ctggggtttgagggt

SEQ ID NO: 1115381 - DNA, 15 bp, Homo sapiens
actggggtttgaggg

SEQ ID NO: 1115382 - DNA, 15 bp, Homo sapiens
tactggggtttgagg

SEQ ID NO: 1115383 - DNA, 15 bp, Homo sapiens
ctactggggtttgag

SEQ ID NO: 1115384 - DNA, 15 bp, Homo sapiens
gctactggggtttga

SEQ ID NO: 1115385 - DNA, 15 bp, Homo sapiens
agctactggggtttg

SEQ ID NO: 1115386 - DNA, 15 bp, Homo sapiens
cagctactggggttt

SEQ ID NO: 1115387 - DNA, 15 bp, Homo sapiens
ccagctactggggtt

SEQ ID NO: 1115388 - DNA, 15 bp, Homo sapiens
cccagctactggggt

SEQ ID NO: 1115389 - DNA, 15 bp, Homo sapiens
gcccagctactgggg

SEQ ID NO: 1115390 - DNA, 15 bp, Homo sapiens
agcccagctactggg

SEQ ID NO: 1115391 - DNA, 15 bp, Homo sapiens
aagcccagctactgg

SEQ ID NO: 1115392 - DNA, 15 bp, Homo sapiens
caagcccagctactg

SEQ ID NO: 1115393 - DNA, 15 bp, Homo sapiens
gcaagcccagctact

SEQ ID NO: 1115394 - DNA, 15 bp, Homo sapiens
tgcaagcccagctac

SEQ ID NO: 1115395 - DNA, 15 bp, Homo sapiens
ctgcaagcccagcta

SEQ ID NO: 1115396 - DNA, 15 bp, Homo sapiens
cctgcaagcccagct

SEQ ID NO: 1115397 - DNA, 15 bp, Homo sapiens
gcctgcaagcccagc

SEQ ID NO: 1115398 - DNA, 15 bp, Homo sapiens
ggcctgcaagcccag

SEQ ID NO: 1115399 - DNA, 15 bp, Homo sapiens
gggcctgcaagccca

SEQ ID NO: 1115400 - DNA, 15 bp, Homo sapiens
agggcctgcaagccc

SEQ ID NO: 1115401 - DNA, 15 bp, Homo sapiens
cagggcctgcaagcc

SEQ ID NO: 1115402 - DNA, 15 bp, Homo sapiens
ccagggcctgcaagc

SEQ ID NO: 1115403 - DNA, 15 bp, Homo sapiens
accagggcctgcaag

SEQ ID NO: 1115404 - DNA, 15 bp, Homo sapiens
caccagggcctgcaa

SEQ ID NO: 1115405 - DNA, 15 bp, Homo sapiens
ggcaccagggcctgc

SEQ ID NO: 1115406 - DNA, 15 bp, Homo sapiens
tggcaccagggcctg

SEQ ID NO: 1115407 - DNA, 15 bp, Homo sapiens
gtggcaccagggcct

SEQ ID NO: 1115408 - DNA, 15 bp, Homo sapiens
ggtggcaccagggcc

SEQ ID NO: 1115409 - DNA, 15 bp, Homo sapiens
tggtggcaccagggc

SEQ ID NO: 1115410 - DNA, 15 bp, Homo sapiens
ctggtggcaccaggg

SEQ ID NO: 1115411 - DNA, 15 bp, Homo sapiens
gctggtggcaccagg

SEQ ID NO: 1115412 - DNA, 15 bp, Homo sapiens
agctggtggcaccag

SEQ ID NO: 1115413 - DNA, 15 bp, Homo sapiens
gagctggtggcacca

SEQ ID NO: 1115414 - DNA, 15 bp, Homo sapiens
ggagctggtggcacc

SEQ ID NO: 1115415 - DNA, 15 bp, Homo sapiens
aggagctggtggcac

SEQ ID NO: 1115416 - DNA, 15 bp, Homo sapiens
aaggagctggtggca

SEQ ID NO: 1115417 - DNA, 15 bp, Homo sapiens
caaggagctggtggc

SEQ ID NO: 1115418 - DNA, 15 bp, Homo sapiens
acaaggagctggtgg

SEQ ID NO: 1115419 - DNA, 15 bp, Homo sapiens
cacaaggagctggtg

SEQ ID NO: 1115420 - DNA, 15 bp, Homo sapiens
acacaaggagctggt

SEQ ID NO: 1115421 - DNA, 15 bp, Homo sapiens
cacacaaggagctgg

SEQ ID NO: 1115422 - DNA, 15 bp, Homo sapiens
tcacacaaggagctg

SEQ ID NO: 1115423 - DNA, 15 bp, Homo sapiens
atcacacaaggagct

SEQ ID NO: 1115424 - DNA, 15 bp, Homo sapiens
catcacacaaggagc

SEQ ID NO: 1115425 - DNA, 15 bp, Homo sapiens
ccatcacacaaggag

SEQ ID NO: 1115426 - DNA, 15 bp, Homo sapiens
cccatcacacaagga

SEQ ID NO: 1115427 - DNA, 15 bp, Homo sapiens
ccccatcacacaagg

SEQ ID NO: 1115428 - DNA, 15 bp, Homo sapiens
cccccatcacacaag

SEQ ID NO: 1115429 - DNA, 15 bp, Homo sapiens
tcccccatcacacaa

SEQ ID NO: 1115430 - DNA, 15 bp, Homo sapiens
ctcccccatcacaca

SEQ ID NO: 1115431 - DNA, 15 bp, Homo sapiens
actcccccatcacac

SEQ ID NO: 1115432 - DNA, 15 bp, Homo sapiens
gactcccccatcaca

SEQ ID NO: 1115433 - DNA, 15 bp, Homo sapiens
tgactcccccatcac

SEQ ID NO: 1115434 - DNA, 15 bp, Homo sapiens
gtgactcccccatca

SEQ ID NO: 1115435 - DNA, 15 bp, Homo sapiens
ggtgactcccccatc

SEQ ID NO: 1115436 - DNA, 15 bp, Homo sapiens
aggtgactcccccat

SEQ ID NO: 1115437 - DNA, 15 bp, Homo sapiens
aaggtgactccccca

SEQ ID NO: 1115438 - DNA, 15 bp, Homo sapiens
gaaggtgactccccc

SEQ ID NO: 1115439 - DNA, 15 bp, Homo sapiens
ggaaggtgactcccc

SEQ ID NO: 1115440 - DNA, 15 bp, Homo sapiens
gggaaggtgactccc

SEQ ID NO: 1115441 - DNA, 15 bp, Homo sapiens
agggaaggtgactcc

SEQ ID NO: 1115442 - DNA, 15 bp, Homo sapiens
cagggaaggtgactc

SEQ ID NO: 1115443 - DNA, 15 bp, Homo sapiens
tcagggaaggtgact

SEQ ID NO: 1115444 - DNA, 15 bp, Homo sapiens
ctcagggaaggtgac

SEQ ID NO: 1115445 - DNA, 15 bp, Homo sapiens
actcagggaaggtga

SEQ ID NO: 1115446 - DNA, 15 bp, Homo sapiens
cactcagggaaggtg

SEQ ID NO: 1115447 - DNA, 15 bp, Homo sapiens
ccactcagggaaggt

SEQ ID NO: 1115448 - DNA, 15 bp, Homo sapiens
cccactcagggaagg

SEQ ID NO: 1115449 - DNA, 15 bp, Homo sapiens
gcccactcagggaag

SEQ ID NO: 1115450 - DNA, 15 bp, Homo sapiens
agcccactcagggaa

SEQ ID NO: 1115451 - DNA, 15 bp, Homo sapiens
cagcccactcaggga

SEQ ID NO: 1115452 - DNA, 15 bp, Homo sapiens
ccagcccactcaggg

SEQ ID NO: 1115453 - DNA, 15 bp, Homo sapiens
accagcccactcagg

SEQ ID NO: 1115454 - DNA, 15 bp, Homo sapiens
taccagcccactcag

SEQ ID NO: 1115455 - DNA, 15 bp, Homo sapiens
ctaccagcccactca

SEQ ID NO: 1115456 - DNA, 15 bp, Homo sapiens
actaccagcccactc

SEQ ID NO: 1115457 - DNA, 15 bp, Homo sapiens
tactaccagcccact

SEQ ID NO: 1115458 - DNA, 15 bp, Homo sapiens
atactaccagcccac

SEQ ID NO: 1115459 - DNA, 15 bp, Homo sapiens
gatactaccagccca

SEQ ID NO: 1115460 - DNA, 15 bp, Homo sapiens
ggatactaccagccc

SEQ ID NO: 1115461 - DNA, 15 bp, Homo sapiens
aggatactaccagcc

SEQ ID NO: 1115462 - DNA, 15 bp, Homo sapiens
caggatactaccagc

SEQ ID NO: 1115463 - DNA, 15 bp, Homo sapiens
ccaggatactaccag

SEQ ID NO: 1115464 - DNA, 15 bp, Homo sapiens
cccaggatactacca

SEQ ID NO: 1115465 - DNA, 15 bp, Homo sapiens
acccaggatactacc

SEQ ID NO: 1115466 - DNA, 15 bp, Homo sapiens
gacccaggatactac

SEQ ID NO: 1115467 - DNA, 15 bp, Homo sapiens
tgacccaggatacta

SEQ ID NO: 1115468 - DNA, 15 bp, Homo sapiens
atgacccaggatact

SEQ ID NO: 1115469 - DNA, 15 bp, Homo sapiens
gatgacccaggatac

SEQ ID NO: 1115470 - DNA, 15 bp, Homo sapiens
agatgacccaggata

SEQ ID NO: 1115471 - DNA, 15 bp, Homo sapiens
aagatgacccaggat

SEQ ID NO: 1115472 - DNA, 15 bp, Homo sapiens
caagatgacccagga

SEQ ID NO: 1115473 - DNA, 15 bp, Homo sapiens
acaagatgacccagg

SEQ ID NO: 1115474 - DNA, 15 bp, Homo sapiens
gacaagatgacccag

SEQ ID NO: 1115475 - DNA, 15 bp, Homo sapiens
ggacaagatgaccca

SEQ ID NO: 1115476 - DNA, 15 bp, Homo sapiens
tggacaagatgaccc

SEQ ID NO: 1115477 - DNA, 15 bp, Homo sapiens
gtggacaagatgacc

SEQ ID NO: 1115478 - DNA, 15 bp, Homo sapiens
tgtggacaagatgac

SEQ ID NO: 1115479 - DNA, 15 bp, Homo sapiens
ctgtggacaagatga

SEQ ID NO: 1115480 - DNA, 15 bp, Homo sapiens
cctgtggacaagatg

SEQ ID NO: 1115481 - DNA, 15 bp, Homo sapiens
acctgtggacaagat

SEQ ID NO: 1115482 - DNA, 15 bp, Homo sapiens
tacctgtggacaaga

SEQ ID NO: 1115483 - DNA, 15 bp, Homo sapiens
ttacctgtggacaag

SEQ ID NO: 1115484 - DNA, 15 bp, Homo sapiens
gttacctgtggacaa

SEQ ID NO: 1115485 - DNA, 15 bp, Homo sapiens
tgttacctgtggaca

SEQ ID NO: 1115486 - DNA, 15 bp, Homo sapiens
ttgttacctgtggac

SEQ ID NO: 1115487 - DNA, 15 bp, Homo sapiens
gttgttacctgtgga

SEQ ID NO: 1115488 - DNA, 15 bp, Homo sapiens
agttgttacctgtgg

SEQ ID NO: 1115489 - DNA, 15 bp, Homo sapiens
gagttgttacctgtg

SEQ ID NO: 1115490 - DNA, 15 bp, Homo sapiens
ggagttgttacctgt

SEQ ID NO: 1115491 - DNA, 15 bp, Homo sapiens
cggagttgttacctg

SEQ ID NO: 1115492 - DNA, 15 bp, Homo sapiens
acggagttgttacct

SEQ ID NO: 1115493 - DNA, 15 bp, Homo sapiens
cacggagttgttacc

SEQ ID NO: 1115494 - DNA, 15 bp, Homo sapiens
ccacggagttgttac

SEQ ID NO: 1115495 - DNA, 15 bp, Homo sapiens
cccacggagttgtta

SEQ ID NO: 1115496 - DNA, 15 bp, Homo sapiens
acccacggagttgtt

SEQ ID NO: 1115497 - DNA, 15 bp, Homo sapiens
cacccacggagttgt

SEQ ID NO: 1115498 - DNA, 15 bp, Homo sapiens
gcacccacggagttg

SEQ ID NO: 1115499 - DNA, 15 bp, Homo sapiens
ggcacccacggagtt

SEQ ID NO: 1115500 - DNA, 15 bp, Homo sapiens
tggcacccacggagt

SEQ ID NO: 1115501 - DNA, 15 bp, Homo sapiens
atggcacccacggag

SEQ ID NO: 1115502 - DNA, 15 bp, Homo sapiens
gatggcacccacgga

SEQ ID NO: 1115503 - DNA, 15 bp, Homo sapiens
ggatggcacccacgg

SEQ ID NO: 1115504 - DNA, 15 bp, Homo sapiens
tggatggcacccacg

SEQ ID NO: 1115505 - DNA, 15 bp, Homo sapiens
ctggatggcacccac

SEQ ID NO: 1115506 - DNA, 15 bp, Homo sapiens
actggatggcaccca

SEQ ID NO: 1115507 - DNA, 15 bp, Homo sapiens
cactggatggcaccc

SEQ ID NO: 1115508 - DNA, 15 bp, Homo sapiens
gcactggatggcacc

SEQ ID NO: 1115509 - DNA, 15 bp, Homo sapiens
ggcactggatggcac

SEQ ID NO: 1115510 - DNA, 15 bp, Homo sapiens
gggcactggatggca

SEQ ID NO: 1115511 - DNA, 15 bp, Homo sapiens
agggcactggatggc

SEQ ID NO: 1115512 - DNA, 15 bp, Homo sapiens
cagggcactggatgg

SEQ ID NO: 1115513 - DNA, 15 bp, Homo sapiens
tcagggcactggatg

SEQ ID NO: 1115514 - DNA, 15 bp, Homo sapiens
atcagggcactggat

SEQ ID NO: 1115515 - DNA, 15 bp, Homo sapiens
tatcagggcactgga

SEQ ID NO: 1115516 - DNA, 15 bp, Homo sapiens
ctatcagggcactgg

SEQ ID NO: 1115517 - DNA, 15 bp, Homo sapiens
actatcagggcactg

SEQ ID NO: 1115518 - DNA, 15 bp, Homo sapiens
gactatcagggcact

SEQ ID NO: 1115519 - DNA, 15 bp, Homo sapiens
tgactatcagggcac

SEQ ID NO: 1115520 - DNA, 15 bp, Homo sapiens
ctgactatcagggca

SEQ ID NO: 1115521 - DNA, 15 bp, Homo sapiens
actgactatcagggc

SEQ ID NO: 1115522 - DNA, 15 bp, Homo sapiens
aactgactatcaggg

SEQ ID NO: 1115523 - DNA, 15 bp, Homo sapiens
gaactgactatcagg

SEQ ID NO: 1115524 - DNA, 15 bp, Homo sapiens
cgaactgactatcag

SEQ ID NO: 1115525 - DNA, 15 bp, Homo sapiens
tcgaactgactatca

SEQ ID NO: 1115526 - DNA, 15 bp, Homo sapiens
ttcgaactgactatc

SEQ ID NO: 1115527 - DNA, 15 bp, Homo sapiens
cattcgaactgacta

SEQ ID NO: 1115528 - DNA, 15 bp, Homo sapiens
gcattcgaactgact

SEQ ID NO: 1115529 - DNA, 15 bp, Homo sapiens
ggcattcgaactgac

SEQ ID NO: 1115530 - DNA, 15 bp, Homo sapiens
gggcattcgaactga

SEQ ID NO: 1115531 - DNA, 15 bp, Homo sapiens
cgggcattcgaactg

SEQ ID NO: 1115532 - DNA, 15 bp, Homo sapiens
ccgggcattcgaact

SEQ ID NO: 1115533 - DNA, 15 bp, Homo sapiens
tccgggcattcgaac

SEQ ID NO: 1115534 - DNA, 15 bp, Homo sapiens
gtccgggcattcgaa

SEQ ID NO: 1115535 - DNA, 15 bp, Homo sapiens
agtccgggcattcga

SEQ ID NO: 1115536 - DNA, 15 bp, Homo sapiens
aagtccgggcattcg

SEQ ID NO: 1115537 - DNA, 15 bp, Homo sapiens
gaagtccgggcattc

SEQ ID NO: 1115538 - DNA, 15 bp, Homo sapiens
agaagtccgggcatt

SEQ ID NO: 1115539 - DNA, 15 bp, Homo sapiens
gagaagtccgggcat

SEQ ID NO: 1115540 - DNA, 15 bp, Homo sapiens
ggagaagtccgggca

SEQ ID NO: 1115541 - DNA, 15 bp, Homo sapiens
tggagaagtccgggc

SEQ ID NO: 1115542 - DNA, 15 bp, Homo sapiens
gtggagaagtccggg

SEQ ID NO: 1115543 - DNA, 15 bp, Homo sapiens
cgtggagaagtccgg

SEQ ID NO: 1115544 - DNA, 15 bp, Homo sapiens
acgtggagaagtccg

SEQ ID NO: 1115545 - DNA, 15 bp, Homo sapiens
cacgtggagaagtcc

SEQ ID NO: 1115546 - DNA, 15 bp, Homo sapiens
gcacgtggagaagtc

SEQ ID NO: 1115547 - DNA, 15 bp, Homo sapiens
agcacgtggagaagt

SEQ ID NO: 1115548 - DNA, 15 bp, Homo sapiens
cagcacgtggagaag

SEQ ID NO: 1115549 - DNA, 15 bp, Homo sapiens
acagcacgtggagaa

SEQ ID NO: 1115550 - DNA, 15 bp, Homo sapiens
cacagcacgtggaga

SEQ ID NO: 1115551 - DNA, 15 bp, Homo sapiens
acacagcacgtggag

SEQ ID NO: 1115552 - DNA, 15 bp, Homo sapiens
aacacagcacgtgga

SEQ ID NO: 1115553 - DNA, 15 bp, Homo sapiens
taacacagcacgtgg

SEQ ID NO: 1115554 - DNA, 15 bp, Homo sapiens
cataacacagcacgt

SEQ ID NO: 1115555 - DNA, 15 bp, Homo sapiens
ccataacacagcacg

SEQ ID NO: 1115556 - DNA, 15 bp, Homo sapiens
accataacacagcac

SEQ ID NO: 1115557 - DNA, 15 bp, Homo sapiens
gaccataacacagca

SEQ ID NO: 1115558 - DNA, 15 bp, Homo sapiens
cgaccataacacagc

SEQ ID NO: 1115559 - DNA, 15 bp, Homo sapiens
tcgaccataacacag

SEQ ID NO: 1115560 - DNA, 15 bp, Homo sapiens
atcgaccataacaca

SEQ ID NO: 1115561 - DNA, 15 bp, Homo sapiens
catcgaccataacac

SEQ ID NO: 1115562 - DNA, 15 bp, Homo sapiens
ccatcgaccataaca

SEQ ID NO: 1115563 - DNA, 15 bp, Homo sapiens
gccatcgaccataac

SEQ ID NO: 1115564 - DNA, 15 bp, Homo sapiens
agccatcgaccataa

SEQ ID NO: 1115565 - DNA, 15 bp, Homo sapiens
gagccatcgaccata

SEQ ID NO: 1115566 - DNA, 15 bp, Homo sapiens
ggagccatcgaccat

SEQ ID NO: 1115567 - DNA, 15 bp, Homo sapiens
aggagccatcgacca

SEQ ID NO: 1115568 - DNA, 15 bp, Homo sapiens
caggagccatcgacc

SEQ ID NO: 1115569 - DNA, 15 bp, Homo sapiens
ccaggagccatcgac

SEQ ID NO: 1115570 - DNA, 15 bp, Homo sapiens
cccaggagccatcga

SEQ ID NO: 1115571 - DNA, 15 bp, Homo sapiens
ccccaggagccatcg

SEQ ID NO: 1115572 - DNA, 15 bp, Homo sapiens
cccccaggagccatc

SEQ ID NO: 1115573 - DNA, 15 bp, Homo sapiens
acccccaggagccat

SEQ ID NO: 1115574 - DNA, 15 bp, Homo sapiens
cacccccaggagcca

SEQ ID NO: 1115575 - DNA, 15 bp, Homo sapiens
gcacccccaggagcc

SEQ ID NO: 1115576 - DNA, 15 bp, Homo sapiens
agcacccccaggagc

SEQ ID NO: 1115577 - DNA, 15 bp, Homo sapiens
cagcacccccaggag

SEQ ID NO: 1115578 - DNA, 15 bp, Homo sapiens
gcagcacccccagga

SEQ ID NO: 1115579 - DNA, 15 bp, Homo sapiens
ggcagcacccccagg

SEQ ID NO: 1115580 - DNA, 15 bp, Homo sapiens
gggcagcacccccag

SEQ ID NO: 1115581 - DNA, 15 bp, Homo sapiens
ggggcagcaccccca

SEQ ID NO: 1115582 - DNA, 15 bp, Homo sapiens
tggggcagcaccccc

SEQ ID NO: 1115583 - DNA, 15 bp, Homo sapiens
atggggcagcacccc

SEQ ID NO: 1115584 - DNA, 15 bp, Homo sapiens
catggggcagcaccc

SEQ ID NO: 1115585 - DNA, 15 bp, Homo sapiens
gcatggggcagcacc

SEQ ID NO: 1115586 - DNA, 15 bp, Homo sapiens
ggcatggggcagcac

SEQ ID NO: 1115587 - DNA, 15 bp, Homo sapiens
gggcatggggcagca

SEQ ID NO: 1115588 - DNA, 15 bp, Homo sapiens
ggggcatggggcagc

SEQ ID NO: 1115589 - DNA, 15 bp, Homo sapiens
tggggcatggggcag

SEQ ID NO: 1115590 - DNA, 15 bp, Homo sapiens
ctggggcatggggca

SEQ ID NO: 1115591 - DNA, 15 bp, Homo sapiens
cctggggcatggggc

SEQ ID NO: 1115592 - DNA, 15 bp, Homo sapiens
acctggggcatgggg

SEQ ID NO: 1115593 - DNA, 15 bp, Homo sapiens
tacctggggcatggg

SEQ ID NO: 1115594 - DNA, 15 bp, Homo sapiens
gtacctggggcatgg

SEQ ID NO: 1115595 - DNA, 15 bp, Homo sapiens
tgtacctggggcatg

SEQ ID NO: 1115596 - DNA, 15 bp, Homo sapiens
ttgtacctggggcat

SEQ ID NO: 1115597 - DNA, 15 bp, Homo sapiens
tttgtacctggggca

SEQ ID NO: 1115598 - DNA, 15 bp, Homo sapiens
atttgtacctggggc

SEQ ID NO: 1115599 - DNA, 15 bp, Homo sapiens
gatttgtacctgggg

SEQ ID NO: 1115600 - DNA, 15 bp, Homo sapiens
agatttgtacctggg

SEQ ID NO: 1115601 - DNA, 15 bp, Homo sapiens
cagatttgtacctgg

SEQ ID NO: 1115602 - DNA, 15 bp, Homo sapiens
ccagatttgtacctg

SEQ ID NO: 1115603 - DNA, 15 bp, Homo sapiens
cccagatttgtacct

SEQ ID NO: 1115604 - DNA, 15 bp, Homo sapiens
ccccagatttgtacc

SEQ ID NO: 1115605 - DNA, 15 bp, Homo sapiens
cccccagatttgtac

SEQ ID NO: 1115606 - DNA, 15 bp, Homo sapiens
tcccccagatttgta

SEQ ID NO: 1115607 - DNA, 15 bp, Homo sapiens
ctcccccagatttgt

SEQ ID NO: 1115608 - DNA, 15 bp, Homo sapiens
tctcccccagatttg

SEQ ID NO: 1115609 - DNA, 15 bp, Homo sapiens
atctcccccagattt

SEQ ID NO: 1115610 - DNA, 15 bp, Homo sapiens
catctcccccagatt

SEQ ID NO: 1115611 - DNA, 15 bp, Homo sapiens
ccatctcccccagat

SEQ ID NO: 1115612 - DNA, 15 bp, Homo sapiens
cccatctcccccaga

SEQ ID NO: 1115613 - DNA, 15 bp, Homo sapiens
ccccatctcccccag

SEQ ID NO: 1115614 - DNA, 15 bp, Homo sapiens
cccccatctccccca

SEQ ID NO: 1115615 - DNA, 15 bp, Homo sapiens
acccccatctccccc

SEQ ID NO: 1115616 - DNA, 15 bp, Homo sapiens
tacccccatctcccc

SEQ ID NO: 1115617 - DNA, 15 bp, Homo sapiens
atacccccatctccc

SEQ ID NO: 1115618 - DNA, 15 bp, Homo sapiens
catacccccatctcc

SEQ ID NO: 1115619 - DNA, 15 bp, Homo sapiens
acatacccccatctc

SEQ ID NO: 1115620 - DNA, 15 bp, Homo sapiens
cacatacccccatct

SEQ ID NO: 1115621 - DNA, 15 bp, Homo sapiens
ccacatacccccatc

SEQ ID NO: 1115622 - DNA, 15 bp, Homo sapiens
tccacatacccccat

SEQ ID NO: 1115623 - DNA, 15 bp, Homo sapiens
ctccacataccccca

SEQ ID NO: 1115624 - DNA, 15 bp, Homo sapiens
cctccacataccccc

SEQ ID NO: 1115625 - DNA, 15 bp, Homo sapiens
ccctccacatacccc

SEQ ID NO: 1115626 - DNA, 15 bp, Homo sapiens
tccctccacataccc

SEQ ID NO: 1115627 - DNA, 15 bp, Homo sapiens
ttccctccacatacc

SEQ ID NO: 1115628 - DNA, 15 bp, Homo sapiens
cttccctccacatac

SEQ ID NO: 1115629 - DNA, 15 bp, Homo sapiens
acttccctccacata

SEQ ID NO: 1115630 - DNA, 15 bp, Homo sapiens
cacttccctccacat

SEQ ID NO: 1115631 - DNA, 15 bp, Homo sapiens
cccacttccctccac

SEQ ID NO: 1115632 - DNA, 15 bp, Homo sapiens
ccccacttccctcca

SEQ ID NO: 1115633 - DNA, 15 bp, Homo sapiens
gcccccacttccctc

SEQ ID NO: 1115634 - DNA, 15 bp, Homo sapiens
tgcccccacttccct

SEQ ID NO: 1115635 - DNA, 15 bp, Homo sapiens
ctgcccccacttccc

SEQ ID NO: 1115636 - DNA, 15 bp, Homo sapiens
tctgcccccacttcc

SEQ ID NO: 1115637 - DNA, 15 bp, Homo sapiens
ctctgcccccacttc

SEQ ID NO: 1115638 - DNA, 15 bp, Homo sapiens
actctgcccccactt

SEQ ID NO: 1115639 - DNA, 15 bp, Homo sapiens
aactctgcccccact

SEQ ID NO: 1115640 - DNA, 15 bp, Homo sapiens
caactctgcccccac

SEQ ID NO: 1115641 - DNA, 15 bp, Homo sapiens
ccaactctgccccca

SEQ ID NO: 1115642 - DNA, 15 bp, Homo sapiens
cccaactctgccccc

SEQ ID NO: 1115643 - DNA, 15 bp, Homo sapiens
ccccaactctgcccc

SEQ ID NO: 1115644 - DNA, 15 bp, Homo sapiens
cccccaactctgccc

SEQ ID NO: 1115645 - DNA, 15 bp, Homo sapiens
gcccccaactctgcc

SEQ ID NO: 1115646 - DNA, 15 bp, Homo sapiens
ggcccccaactctgc

SEQ ID NO: 1115647 - DNA, 15 bp, Homo sapiens
tggcccccaactctg

SEQ ID NO: 1115648 - DNA, 15 bp, Homo sapiens
ctggcccccaactct

SEQ ID NO: 1115649 - DNA, 15 bp, Homo sapiens
cctggcccccaactc

SEQ ID NO: 1115650 - DNA, 15 bp, Homo sapiens
ccctggcccccaact

SEQ ID NO: 1115651 - DNA, 15 bp, Homo sapiens
cccctggcccccaac

SEQ ID NO: 1115652 - DNA, 15 bp, Homo sapiens
gcccctggcccccaa

SEQ ID NO: 1115653 - DNA, 15 bp, Homo sapiens
tgcccctggccccca

SEQ ID NO: 1115654 - DNA, 15 bp, Homo sapiens
ctgcccctggccccc

SEQ ID NO: 1115655 - DNA, 15 bp, Homo sapiens
cctgcccctggcccc

SEQ ID NO: 1115656 - DNA, 15 bp, Homo sapiens
ccctgcccctggccc

SEQ ID NO: 1115657 - DNA, 15 bp, Homo sapiens
cccctgcccctggcc

SEQ ID NO: 1115658 - DNA, 15 bp, Homo sapiens
ccccctgcccctggc

SEQ ID NO: 1115659 - DNA, 15 bp, Homo sapiens
accccctgcccctgg

SEQ ID NO: 1115660 - DNA, 15 bp, Homo sapiens
caccccctgcccctg

SEQ ID NO: 1115661 - DNA, 15 bp, Homo sapiens
tcaccccctgcccct

SEQ ID NO: 1115662 - DNA, 15 bp, Homo sapiens
ttcaccccctgcccc

SEQ ID NO: 1115663 - DNA, 15 bp, Homo sapiens
cttcaccccctgccc

SEQ ID NO: 1115664 - DNA, 15 bp, Homo sapiens
tcttcaccccctgcc

SEQ ID NO: 1115665 - DNA, 15 bp, Homo sapiens
gtcttcaccccctgc

SEQ ID NO: 1115666 - DNA, 15 bp, Homo sapiens
cgtcttcaccccctg

SEQ ID NO: 1115667 - DNA, 15 bp, Homo sapiens
ccgtcttcaccccct

SEQ ID NO: 1115668 - DNA, 15 bp, Homo sapiens
tccgtcttcaccccc

SEQ ID NO: 1115669 - DNA, 15 bp, Homo sapiens
ctccgtcttcacccc

SEQ ID NO: 1115670 - DNA, 15 bp, Homo sapiens
actccgtcttcaccc

SEQ ID NO: 1115671 - DNA, 15 bp, Homo sapiens
gactccgtcttcacc

SEQ ID NO: 1115672 - DNA, 15 bp, Homo sapiens
tgactccgtcttcac

SEQ ID NO: 1115673 - DNA, 15 bp, Homo sapiens
ctgactccgtcttca

SEQ ID NO: 1115674 - DNA, 15 bp, Homo sapiens
cctgactccgtcttc

SEQ ID NO: 1115675 - DNA, 15 bp, Homo sapiens
tcctgactccgtctt

SEQ ID NO: 1115676 - DNA, 15 bp, Homo sapiens
gtcctgactccgtct

SEQ ID NO: 1115677 - DNA, 15 bp, Homo sapiens
ggtcctgactccgtc

SEQ ID NO: 1115678 - DNA, 15 bp, Homo sapiens
tggtcctgactccgt

SEQ ID NO: 1115679 - DNA, 15 bp, Homo sapiens
atggtcctgactccg

SEQ ID NO: 1115680 - DNA, 15 bp, Homo sapiens
aatggtcctgactcc

SEQ ID NO: 1115681 - DNA, 15 bp, Homo sapiens
aaatggtcctgactc

SEQ ID NO: 1115682 - DNA, 15 bp, Homo sapiens
aaaatggtcctgact

SEQ ID NO: 1115683 - DNA, 15 bp, Homo sapiens
aaaaatggtcctgac

SEQ ID NO: 1115684 - DNA, 15 bp, Homo sapiens
aaaaaatggtcctga

SEQ ID NO: 1115685 - DNA, 15 bp, Homo sapiens
gaaaaaatggtcctg

SEQ ID NO: 1115686 - DNA, 15 bp, Homo sapiens
agaaaaaatggtcct

SEQ ID NO: 1115687 - DNA, 15 bp, Homo sapiens
gagaaaaaatggtcc

SEQ ID NO: 1115688 - DNA, 15 bp, Homo sapiens
tgagaaaaaatggtc

SEQ ID NO: 1115689 - DNA, 15 bp, Homo sapiens
ctgagaaaaaatggt

SEQ ID NO: 1115690 - DNA, 15 bp, Homo sapiens
cctgagaaaaaatgg

SEQ ID NO: 1115691 - DNA, 15 bp, Homo sapiens
gcctgagaaaaaatg

SEQ ID NO: 1115692 - DNA, 15 bp, Homo sapiens
agcctgagaaaaaat

SEQ ID NO: 1115693 - DNA, 15 bp, Homo sapiens
aagcctgagaaaaaa

SEQ ID NO: 1115694 - DNA, 15 bp, Homo sapiens
gaagcctgagaaaaa

SEQ ID NO: 1115695 - DNA, 15 bp, Homo sapiens
ggaagcctgagaaaa

SEQ ID NO: 1115696 - DNA, 15 bp, Homo sapiens
aggaagcctgagaaa

SEQ ID NO: 1115697 - DNA, 15 bp, Homo sapiens
caggaagcctgagaa

SEQ ID NO: 1115698 - DNA, 15 bp, Homo sapiens
gcaggaagcctgaga

SEQ ID NO: 1115699 - DNA, 15 bp, Homo sapiens
agcaggaagcctgag

SEQ ID NO: 1115700 - DNA, 15 bp, Homo sapiens
cagcaggaagcctga

SEQ ID NO: 1115701 - DNA, 15 bp, Homo sapiens
acagcaggaagcctg

SEQ ID NO: 1115702 - DNA, 15 bp, Homo sapiens
cacagcaggaagcct

SEQ ID NO: 1115703 - DNA, 15 bp, Homo sapiens
tcacagcaggaagcc

SEQ ID NO: 1115704 - DNA, 15 bp, Homo sapiens
ttcacagcaggaagc

SEQ ID NO: 1115705 - DNA, 15 bp, Homo sapiens
cttcacagcaggaag

SEQ ID NO: 1115706 - DNA, 15 bp, Homo sapiens
tcttcacagcaggaa

SEQ ID NO: 1115707 - DNA, 15 bp, Homo sapiens
gtcttcacagcagga

SEQ ID NO: 1115708 - DNA, 15 bp, Homo sapiens
tgtcttcacagcagg

SEQ ID NO: 1115709 - DNA, 15 bp, Homo sapiens
ctgtcttcacagcag

SEQ ID NO: 1115710 - DNA, 15 bp, Homo sapiens
cctgtcttcacagca

SEQ ID NO: 1115711 - DNA, 15 bp, Homo sapiens
ccctgtcttcacagc

SEQ ID NO: 1115712 - DNA, 15 bp, Homo sapiens
accctgtcttcacag

SEQ ID NO: 1115713 - DNA, 15 bp, Homo sapiens
caccctgtcttcaca

SEQ ID NO: 1115714 - DNA, 15 bp, Homo sapiens
gcaccctgtcttcac

SEQ ID NO: 1115715 - DNA, 15 bp, Homo sapiens
tgcaccctgtcttca

SEQ ID NO: 1115716 - DNA, 15 bp, Homo sapiens
gtgcaccctgtcttc

SEQ ID NO: 1115717 - DNA, 15 bp, Homo sapiens
agtgcaccctgtctt

SEQ ID NO: 1115718 - DNA, 15 bp, Homo sapiens
cagtgcaccctgtct

SEQ ID NO: 1115719 - DNA, 15 bp, Homo sapiens
gcagtgcaccctgtc

SEQ ID NO: 1115720 - DNA, 15 bp, Homo sapiens
agcagtgcaccctgt

SEQ ID NO: 1115721 - DNA, 15 bp, Homo sapiens
cagcagtgcaccctg

SEQ ID NO: 1115722 - DNA, 15 bp, Homo sapiens
acagcagtgcaccct

SEQ ID NO: 1115723 - DNA, 15 bp, Homo sapiens
gacagcagtgcaccc

SEQ ID NO: 1115724 - DNA, 15 bp, Homo sapiens
ggacagcagtgcacc

SEQ ID NO: 1115725 - DNA, 15 bp, Homo sapiens
cggacagcagtgcac

SEQ ID NO: 1115726 - DNA, 15 bp, Homo sapiens
gcggacagcagtgca

SEQ ID NO: 1115727 - DNA, 15 bp, Homo sapiens
tgcggacagcagtgc

SEQ ID NO: 1115728 - DNA, 15 bp, Homo sapiens
gtgcggacagcagtg

SEQ ID NO: 1115729 - DNA, 15 bp, Homo sapiens
cgtgcggacagcagt

SEQ ID NO: 1115730 - DNA, 15 bp, Homo sapiens
ccgtgcggacagcag

SEQ ID NO: 1115731 - DNA, 15 bp, Homo sapiens
accgtgcggacagca

SEQ ID NO: 1115732 - DNA, 15 bp, Homo sapiens
caccgtgcggacagc

SEQ ID NO: 1115733 - DNA, 15 bp, Homo sapiens
gcaccgtgcggacag

SEQ ID NO: 1115734 - DNA, 15 bp, Homo sapiens
ggcaccgtgcggaca

SEQ ID NO: 1115735 - DNA, 15 bp, Homo sapiens
aggcaccgtgcggac

SEQ ID NO: 1115736 - DNA, 15 bp, Homo sapiens
aaggcaccgtgcgga

SEQ ID NO: 1115737 - DNA, 15 bp, Homo sapiens
gaaggcaccgtgcgg

SEQ ID NO: 1115738 - DNA, 15 bp, Homo sapiens
agaaggcaccgtgcg

SEQ ID NO: 1115739 - DNA, 15 bp, Homo sapiens
cagaaggcaccgtgc

SEQ ID NO: 1115740 - DNA, 15 bp, Homo sapiens
gcagaaggcaccgtg

SEQ ID NO: 1115741 - DNA, 15 bp, Homo sapiens
cgcagaaggcaccgt

SEQ ID NO: 1115742 - DNA, 15 bp, Homo sapiens
tcgcagaaggcaccg

SEQ ID NO: 1115743 - DNA, 15 bp, Homo sapiens
gtcgcagaaggcacc

SEQ ID NO: 1115744 - DNA, 15 bp, Homo sapiens
ggtcgcagaaggcac

SEQ ID NO: 1115745 - DNA, 15 bp, Homo sapiens
aggtcgcagaaggca

SEQ ID NO: 1115746 - DNA, 15 bp, Homo sapiens
caggtcgcagaaggc

SEQ ID NO: 1115747 - DNA, 15 bp, Homo sapiens
ccaggtcgcagaagg

SEQ ID NO: 1115748 - DNA, 15 bp, Homo sapiens
accaggtcgcagaag

SEQ ID NO: 1115749 - DNA, 15 bp, Homo sapiens
aaccaggtcgcagaa

SEQ ID NO: 1115750 - DNA, 15 bp, Homo sapiens
gaaccaggtcgcaga

SEQ ID NO: 1115751 - DNA, 15 bp, Homo sapiens
tgaaccaggtcgcag

SEQ ID NO: 1115752 - DNA, 15 bp, Homo sapiens
gtgaaccaggtcgca

SEQ ID NO: 1115753 - DNA, 15 bp, Homo sapiens
tgtgaaccaggtcgc

SEQ ID NO: 1115754 - DNA, 15 bp, Homo sapiens
gtgtgaaccaggtcg

SEQ ID NO: 1115755 - DNA, 15 bp, Homo sapiens
ggtgtgaaccaggtc

SEQ ID NO: 1115756 - DNA, 15 bp, Homo sapiens
gggtgtgaaccaggt

SEQ ID NO: 1115757 - DNA, 15 bp, Homo sapiens
cgggtgtgaaccagg

SEQ ID NO: 1115758 - DNA, 15 bp, Homo sapiens
gcgggtgtgaaccag

SEQ ID NO: 1115759 - DNA, 15 bp, Homo sapiens
agcgggtgtgaacca

SEQ ID NO: 1115760 - DNA, 15 bp, Homo sapiens
cagcgggtgtgaacc

SEQ ID NO: 1115761 - DNA, 15 bp, Homo sapiens
gcagcgggtgtgaac

SEQ ID NO: 1115762 - DNA, 15 bp, Homo sapiens
tgcagcgggtgtgaa

SEQ ID NO: 1115763 - DNA, 15 bp, Homo sapiens
atgcagcgggtgtga

SEQ ID NO: 1115764 - DNA, 15 bp, Homo sapiens
gatgcagcgggtgtg

SEQ ID NO: 1115765 - DNA, 15 bp, Homo sapiens
tgatgcagcgggtgt

SEQ ID NO: 1115766 - DNA, 15 bp, Homo sapiens
gtgatgcagcgggtg

SEQ ID NO: 1115767 - DNA, 15 bp, Homo sapiens
tgtgatgcagcgggt

SEQ ID NO: 1115768 - DNA, 15 bp, Homo sapiens
gtgtgatgcagcggg

SEQ ID NO: 1115769 - DNA, 15 bp, Homo sapiens
ggtgtgatgcagcgg

SEQ ID NO: 1115770 - DNA, 15 bp, Homo sapiens
gggtgtgatgcagcg

SEQ ID NO: 1115771 - DNA, 15 bp, Homo sapiens
tgggtgtgatgcagc

SEQ ID NO: 1115772 - DNA, 15 bp, Homo sapiens
gtgggtgtgatgcag

SEQ ID NO: 1115773 - DNA, 15 bp, Homo sapiens
cgtgggtgtgatgca

SEQ ID NO: 1115774 - DNA, 15 bp, Homo sapiens
ccgtgggtgtgatgc

SEQ ID NO: 1115775 - DNA, 15 bp, Homo sapiens
cccgtgggtgtgatg

SEQ ID NO: 1115776 - DNA, 15 bp, Homo sapiens
gcccgtgggtgtgat

SEQ ID NO: 1115777 - DNA, 15 bp, Homo sapiens
tgcccgtgggtgtga

SEQ ID NO: 1115778 - DNA, 15 bp, Homo sapiens
gtgcccgtgggtgtg

SEQ ID NO: 1115779 - DNA, 15 bp, Homo sapiens
ggtgcccgtgggtgt

SEQ ID NO: 1115780 - DNA, 15 bp, Homo sapiens
gggtgcccgtgggtg

SEQ ID NO: 1115781 - DNA, 15 bp, Homo sapiens
tgggtgcccgtgggt

SEQ ID NO: 1115782 - DNA, 15 bp, Homo sapiens
gtgggtgcccgtggg

SEQ ID NO: 1115783 - DNA, 15 bp, Homo sapiens
ggtgggtgcccgtgg

SEQ ID NO: 1115784 - DNA, 15 bp, Homo sapiens
gggtgggtgcccgtg

SEQ ID NO: 1115785 - DNA, 15 bp, Homo sapiens
ggggtgggtgcccgt

SEQ ID NO: 1115786 - DNA, 15 bp, Homo sapiens
gggggtgggtgcccg

SEQ ID NO: 1115787 - DNA, 15 bp, Homo sapiens
agggggtgggtgccc

SEQ ID NO: 1115788 - DNA, 15 bp, Homo sapiens
cagggggtgggtgcc

SEQ ID NO: 1115789 - DNA, 15 bp, Homo sapiens
ccagggggtgggtgc

SEQ ID NO: 1115790 - DNA, 15 bp, Homo sapiens
gccagggggtgggtg

SEQ ID NO: 1115791 - DNA, 15 bp, Homo sapiens
tgccagggggtgggt

SEQ ID NO: 1115792 - DNA, 15 bp, Homo sapiens
ttgccagggggtggg

SEQ ID NO: 1115793 - DNA, 15 bp, Homo sapiens
tttgccagggggtgg

SEQ ID NO: 1115794 - DNA, 15 bp, Homo sapiens
ctttgccagggggtg

SEQ ID NO: 1115795 - DNA, 15 bp, Homo sapiens
tctttgccagggggt

SEQ ID NO: 1115796 - DNA, 15 bp, Homo sapiens
ttctttgccaggggg

SEQ ID NO: 1115797 - DNA, 15 bp, Homo sapiens
cttctttgccagggg

SEQ ID NO: 1115798 - DNA, 15 bp, Homo sapiens
gcttctttgccaggg

SEQ ID NO: 1115799 - DNA, 15 bp, Homo sapiens
agcttctttgccagg

SEQ ID NO: 1115800 - DNA, 15 bp, Homo sapiens
gagcttctttgccag

SEQ ID NO: 1115801 - DNA, 15 bp, Homo sapiens
ggagcttctttgcca

SEQ ID NO: 1115802 - DNA, 15 bp, Homo sapiens
gggagcttctttgcc

SEQ ID NO: 1115803 - DNA, 15 bp, Homo sapiens
agggagcttctttgc

SEQ ID NO: 1115804 - DNA, 15 bp, Homo sapiens
cagggagcttctttg

SEQ ID NO: 1115805 - DNA, 15 bp, Homo sapiens
gcagggagcttcttt

SEQ ID NO: 1115806 - DNA, 15 bp, Homo sapiens
ggcagggagcttctt

SEQ ID NO: 1115807 - DNA, 15 bp, Homo sapiens
gggcagggagcttct

SEQ ID NO: 1115808 - DNA, 15 bp, Homo sapiens
tgggcagggagcttc

SEQ ID NO: 1115809 - DNA, 15 bp, Homo sapiens
ctgggcagggagctt

SEQ ID NO: 1115810 - DNA, 15 bp, Homo sapiens
tctgggcagggagct

SEQ ID NO: 1115811 - DNA, 15 bp, Homo sapiens
ctctgggcagggagc

SEQ ID NO: 1115812 - DNA, 15 bp, Homo sapiens
cctctgggcagggag

SEQ ID NO: 1115813 - DNA, 15 bp, Homo sapiens
tcctctgggcaggga

SEQ ID NO: 1115814 - DNA, 15 bp, Homo sapiens
gtcctctgggcaggg

SEQ ID NO: 1115815 - DNA, 15 bp, Homo sapiens
agtcctctgggcagg

SEQ ID NO: 1115816 - DNA, 15 bp, Homo sapiens
tagtcctctgggcag

SEQ ID NO: 1115817 - DNA, 15 bp, Homo sapiens
ttagtcctctgggca

SEQ ID NO: 1115818 - DNA, 15 bp, Homo sapiens
gttagtcctctgggc

SEQ ID NO: 1115819 - DNA, 15 bp, Homo sapiens
tgttagtcctctggg

SEQ ID NO: 1115820 - DNA, 15 bp, Homo sapiens
ctgttagtcctctgg

SEQ ID NO: 1115821 - DNA, 15 bp, Homo sapiens
cctgttagtcctctg

SEQ ID NO: 1115822 - DNA, 15 bp, Homo sapiens
ccctgttagtcctct

SEQ ID NO: 1115823 - DNA, 15 bp, Homo sapiens
gccctgttagtcctc

SEQ ID NO: 1115824 - DNA, 15 bp, Homo sapiens
tgccctgttagtcct

SEQ ID NO: 1115825 - DNA, 15 bp, Homo sapiens
ctgccctgttagtcc

SEQ ID NO: 1115826 - DNA, 15 bp, Homo sapiens
cctgccctgttagtc

SEQ ID NO: 1115827 - DNA, 15 bp, Homo sapiens
acctgccctgttagt

SEQ ID NO: 1115828 - DNA, 15 bp, Homo sapiens
cacctgccctgttag

SEQ ID NO: 1115829 - DNA, 15 bp, Homo sapiens
tcacctgccctgtta

SEQ ID NO: 1115830 - DNA, 15 bp, Homo sapiens
ctcacctgccctgtt

SEQ ID NO: 1115831 - DNA, 15 bp, Homo sapiens
cctcacctgccctgt

SEQ ID NO: 1115832 - DNA, 15 bp, Homo sapiens
tcctcacctgccctg

SEQ ID NO: 1115833 - DNA, 15 bp, Homo sapiens
ctcctcacctgccct

SEQ ID NO: 1115834 - DNA, 15 bp, Homo sapiens
cctcctcacctgccc

SEQ ID NO: 1115835 - DNA, 15 bp, Homo sapiens
acctcctcacctgcc

SEQ ID NO: 1115836 - DNA, 15 bp, Homo sapiens
cacctcctcacctgc

SEQ ID NO: 1115837 - DNA, 15 bp, Homo sapiens
ccacctcctcacctg

SEQ ID NO: 1115838 - DNA, 15 bp, Homo sapiens
cccacctcctcacct

SEQ ID NO: 1115839 - DNA, 15 bp, Homo sapiens
tcccacctcctcacc

SEQ ID NO: 1115840 - DNA, 15 bp, Homo sapiens
ctcccacctcctcac

SEQ ID NO: 1115841 - DNA, 15 bp, Homo sapiens
tctcccacctcctca

SEQ ID NO: 1115842 - DNA, 15 bp, Homo sapiens
ctctcccacctcctc

SEQ ID NO: 1115843 - DNA, 15 bp, Homo sapiens
gctctcccacctcct

SEQ ID NO: 1115844 - DNA, 15 bp, Homo sapiens
tgctctcccacctcc

SEQ ID NO: 1115845 - DNA, 15 bp, Homo sapiens
atgctctcccacctc

SEQ ID NO: 1115846 - DNA, 15 bp, Homo sapiens
gatgctctcccacct

SEQ ID NO: 1115847 - DNA, 15 bp, Homo sapiens
tgatgctctcccacc

SEQ ID NO: 1115848 - DNA, 15 bp, Homo sapiens
ctgatgctctcccac

SEQ ID NO: 1115849 - DNA, 15 bp, Homo sapiens
cctgatgctctccca

SEQ ID NO: 1115850 - DNA, 15 bp, Homo sapiens
gcctgatgctctccc

SEQ ID NO: 1115851 - DNA, 15 bp, Homo sapiens
ggcctgatgctctcc

SEQ ID NO: 1115852 - DNA, 15 bp, Homo sapiens
tggcctgatgctctc

SEQ ID NO: 1115853 - DNA, 15 bp, Homo sapiens
ctggcctgatgctct

SEQ ID NO: 1115854 - DNA, 15 bp, Homo sapiens
cctggcctgatgctc

SEQ ID NO: 1115855 - DNA, 15 bp, Homo sapiens
ccctggcctgatgct

SEQ ID NO: 1115856 - DNA, 15 bp, Homo sapiens
cccctggcctgatgc

SEQ ID NO: 1115857 - DNA, 15 bp, Homo sapiens
gcccctggcctgatg

SEQ ID NO: 1115858 - DNA, 15 bp, Homo sapiens
agcccctggcctgat

SEQ ID NO: 1115859 - DNA, 15 bp, Homo sapiens
cagcccctggcctga

SEQ ID NO: 1115860 - DNA, 15 bp, Homo sapiens
ccagcccctggcctg

SEQ ID NO: 1115861 - DNA, 15 bp, Homo sapiens
cccagcccctggcct

SEQ ID NO: 1115862 - DNA, 15 bp, Homo sapiens
ccccagcccctggcc

SEQ ID NO: 1115863 - DNA, 15 bp, Homo sapiens
gccccagcccctggc

SEQ ID NO: 1115864 - DNA, 15 bp, Homo sapiens
cgccccagcccctgg

SEQ ID NO: 1115865 - DNA, 15 bp, Homo sapiens
ccgccccagcccctg

SEQ ID NO: 1115866 - DNA, 15 bp, Homo sapiens
cccgccccagcccct

SEQ ID NO: 1115867 - DNA, 15 bp, Homo sapiens
ccccgccccagcccc

SEQ ID NO: 1115868 - DNA, 15 bp, Homo sapiens
gccccgccccagccc

SEQ ID NO: 1115869 - DNA, 15 bp, Homo sapiens
ggccccgccccagcc

SEQ ID NO: 1115870 - DNA, 15 bp, Homo sapiens
aggccccgccccagc

SEQ ID NO: 1115871 - DNA, 15 bp, Homo sapiens
gaggccccgccccag

SEQ ID NO: 1115872 - DNA, 15 bp, Homo sapiens
tgaggccccgcccca

SEQ ID NO: 1115873 - DNA, 15 bp, Homo sapiens
atgaggccccgcccc

SEQ ID NO: 1115874 - DNA, 15 bp, Homo sapiens
aatgaggccccgccc

SEQ ID NO: 1115875 - DNA, 15 bp, Homo sapiens
caatgaggccccgcc

SEQ ID NO: 1115876 - DNA, 15 bp, Homo sapiens
tcaatgaggccccgc

SEQ ID NO: 1115877 - DNA, 15 bp, Homo sapiens
gtcaatgaggccccg

SEQ ID NO: 1115878 - DNA, 15 bp, Homo sapiens
agtcaatgaggcccc

SEQ ID NO: 1115879 - DNA, 15 bp, Homo sapiens
gagtcaatgaggccc

SEQ ID NO: 1115880 - DNA, 15 bp, Homo sapiens
ggagtcaatgaggcc

SEQ ID NO: 1115881 - DNA, 15 bp, Homo sapiens
tggagtcaatgaggc

SEQ ID NO: 1115882 - DNA, 15 bp, Homo sapiens
ttggagtcaatgagg

SEQ ID NO: 1115883 - DNA, 15 bp, Homo sapiens
cttggagtcaatgag

SEQ ID NO: 1115884 - DNA, 15 bp, Homo sapiens
acttggagtcaatga

SEQ ID NO: 1115885 - DNA, 15 bp, Homo sapiens
cacttggagtcaatg

SEQ ID NO: 1115886 - DNA, 15 bp, Homo sapiens
acacttggagtcaat

SEQ ID NO: 1115887 - DNA, 15 bp, Homo sapiens
tacacttggagtcaa

SEQ ID NO: 1115888 - DNA, 15 bp, Homo sapiens
ctacacttggagtca

SEQ ID NO: 1115889 - DNA, 15 bp, Homo sapiens
cctacacttggagtc

SEQ ID NO: 1115890 - DNA, 15 bp, Homo sapiens
tcctacacttggagt

SEQ ID NO: 1115891 - DNA, 15 bp, Homo sapiens
ttcctacacttggag

SEQ ID NO: 1115892 - DNA, 15 bp, Homo sapiens
tttcctacacttgga

SEQ ID NO: 1115893 - DNA, 15 bp, Homo sapiens
ttttcctacacttgg

SEQ ID NO: 1115894 - DNA, 15 bp, Homo sapiens
tttttcctacacttg

SEQ ID NO: 1115895 - DNA, 15 bp, Homo sapiens
ctttttcctacactt

SEQ ID NO: 1115896 - DNA, 15 bp, Homo sapiens
actttttcctacact

SEQ ID NO: 1115897 - DNA, 15 bp, Homo sapiens
aactttttcctacac

SEQ ID NO: 1115898 - DNA, 15 bp, Homo sapiens
aaactttttcctaca

SEQ ID NO: 1115899 - DNA, 15 bp, Homo sapiens
gaaactttttcctac

SEQ ID NO: 1115900 - DNA, 15 bp, Homo sapiens
ggaaactttttccta

SEQ ID NO: 1115901 - DNA, 15 bp, Homo sapiens
aggaaactttttcct

SEQ ID NO: 1115902 - DNA, 15 bp, Homo sapiens
gaggaaactttttcc

SEQ ID NO: 1115903 - DNA, 15 bp, Homo sapiens
ggaggaaactttttc

SEQ ID NO: 1115904 - DNA, 15 bp, Homo sapiens
tggaggaaacttttt

SEQ ID NO: 1115905 - DNA, 15 bp, Homo sapiens
atggaggaaactttt

SEQ ID NO: 1115906 - DNA, 15 bp, Homo sapiens
gatggaggaaacttt

SEQ ID NO: 1115907 - DNA, 15 bp, Homo sapiens
ggatggaggaaactt

SEQ ID NO: 1115908 - DNA, 15 bp, Homo sapiens
aggatggaggaaact

SEQ ID NO: 1115909 - DNA, 15 bp, Homo sapiens
caggatggaggaaac

SEQ ID NO: 1115910 - DNA, 15 bp, Homo sapiens
ccaggatggaggaaa

SEQ ID NO: 1115911 - DNA, 15 bp, Homo sapiens
gccaggatggaggaa

SEQ ID NO: 1115912 - DNA, 15 bp, Homo sapiens
agccaggatggagga

SEQ ID NO: 1115913 - DNA, 15 bp, Homo sapiens
cagccaggatggagg

SEQ ID NO: 1115914 - DNA, 15 bp, Homo sapiens
gcagccaggatggag

SEQ ID NO: 1115915 - DNA, 15 bp, Homo sapiens
ggcagccaggatgga

SEQ ID NO: 1115916 - DNA, 15 bp, Homo sapiens
gggcagccaggatgg

SEQ ID NO: 1115917 - DNA, 15 bp, Homo sapiens
ggggcagccaggatg

SEQ ID NO: 1115918 - DNA, 15 bp, Homo sapiens
aggggcagccaggat

SEQ ID NO: 1115919 - DNA, 15 bp, Homo sapiens
gaggggcagccagga

SEQ ID NO: 1115920 - DNA, 15 bp, Homo sapiens
tgaggggcagccagg

SEQ ID NO: 1115921 - DNA, 15 bp, Homo sapiens
gtgaggggcagccag

SEQ ID NO: 1115922 - DNA, 15 bp, Homo sapiens
cgtgaggggcagcca

SEQ ID NO: 1115923 - DNA, 15 bp, Homo sapiens
acgtgaggggcagcc

SEQ ID NO: 1115924 - DNA, 15 bp, Homo sapiens
aacgtgaggggcagc

SEQ ID NO: 1115925 - DNA, 15 bp, Homo sapiens
aaacgtgaggggcag

SEQ ID NO: 1115926 - DNA, 15 bp, Homo sapiens
caaacgtgaggggca

SEQ ID NO: 1115927 - DNA, 15 bp, Homo sapiens
gcaaacgtgaggggc

SEQ ID NO: 1115928 - DNA, 15 bp, Homo sapiens
agcaaacgtgagggg

SEQ ID NO: 1115929 - DNA, 15 bp, Homo sapiens
gagcaaacgtgaggg

SEQ ID NO: 1115930 - DNA, 15 bp, Homo sapiens
ggagcaaacgtgagg

SEQ ID NO: 1115931 - DNA, 15 bp, Homo sapiens
aggagcaaacgtgag

SEQ ID NO: 1115932 - DNA, 15 bp, Homo sapiens
gaggagcaaacgtga

SEQ ID NO: 1115933 - DNA, 15 bp, Homo sapiens
agaggagcaaacgtg

SEQ ID NO: 1115934 - DNA, 15 bp, Homo sapiens
aagaggagcaaacgt

SEQ ID NO: 1115935 - DNA, 15 bp, Homo sapiens
gaagaggagcaaacg

SEQ ID NO: 1115936 - DNA, 15 bp, Homo sapiens
ggaagaggagcaaac

SEQ ID NO: 1115937 - DNA, 15 bp, Homo sapiens
tggaagaggagcaaa

SEQ ID NO: 1115938 - DNA, 15 bp, Homo sapiens
ctggaagaggagcaa

SEQ ID NO: 1115939 - DNA, 15 bp, Homo sapiens
actggaagaggagca

SEQ ID NO: 1115940 - DNA, 15 bp, Homo sapiens
cactggaagaggagc

SEQ ID NO: 1115941 - DNA, 15 bp, Homo sapiens
ccactggaagaggag

SEQ ID NO: 1115942 - DNA, 15 bp, Homo sapiens
gccactggaagagga

SEQ ID NO: 1115943 - DNA, 15 bp, Homo sapiens
ggccactggaagagg

SEQ ID NO: 1115944 - DNA, 15 bp, Homo sapiens
aggccactggaagag

SEQ ID NO: 1115945 - DNA, 15 bp, Homo sapiens
aaggccactggaaga

SEQ ID NO: 1115946 - DNA, 15 bp, Homo sapiens
caaggccactggaag

SEQ ID NO: 1115947 - DNA, 15 bp, Homo sapiens
acaaggccactggaa

SEQ ID NO: 1115948 - DNA, 15 bp, Homo sapiens
gacaaggccactgga

SEQ ID NO: 1115949 - DNA, 15 bp, Homo sapiens
ggacaaggccactgg

SEQ ID NO: 1115950 - DNA, 15 bp, Homo sapiens
tggacaaggccactg

SEQ ID NO: 1115951 - DNA, 15 bp, Homo sapiens
ctggacaaggccact

SEQ ID NO: 1115952 - DNA, 15 bp, Homo sapiens
gctggacaaggccac

SEQ ID NO: 1115953 - DNA, 15 bp, Homo sapiens
agctggacaaggcca

SEQ ID NO: 1115954 - DNA, 15 bp, Homo sapiens
gagctggacaaggcc

SEQ ID NO: 1115955 - DNA, 15 bp, Homo sapiens
cgagctggacaaggc

SEQ ID NO: 1115956 - DNA, 15 bp, Homo sapiens
ccgagctggacaagg

SEQ ID NO: 1115957 - DNA, 15 bp, Homo sapiens
accgagctggacaag

SEQ ID NO: 1115958 - DNA, 15 bp, Homo sapiens
gaccgagctggacaa

SEQ ID NO: 1115959 - DNA, 15 bp, Homo sapiens
tgaccgagctggaca

SEQ ID NO: 1115960 - DNA, 15 bp, Homo sapiens
atgaccgagctggac

SEQ ID NO: 1115961 - DNA, 15 bp, Homo sapiens
catgaccgagctgga

SEQ ID NO: 1115962 - DNA, 15 bp, Homo sapiens
acatgaccgagctgg

SEQ ID NO: 1115963 - DNA, 15 bp, Homo sapiens
cacatgaccgagctg

SEQ ID NO: 1115964 - DNA, 15 bp, Homo sapiens
acacatgaccgagct

SEQ ID NO: 1115965 - DNA, 15 bp, Homo sapiens
gacacatgaccgagc

SEQ ID NO: 1115966 - DNA, 15 bp, Homo sapiens
ggacacatgaccgag

SEQ ID NO: 1115967 - DNA, 15 bp, Homo sapiens
cggacacatgaccga

SEQ ID NO: 1115968 - DNA, 15 bp, Homo sapiens
ccggacacatgaccg

SEQ ID NO: 1115969 - DNA, 15 bp, Homo sapiens
tccggacacatgacc

SEQ ID NO: 1115970 - DNA, 15 bp, Homo sapiens
gtccggacacatgac

SEQ ID NO: 1115971 - DNA, 15 bp, Homo sapiens
cgtccggacacatga

SEQ ID NO: 1115972 - DNA, 15 bp, Homo sapiens
gcgtccggacacatg

SEQ ID NO: 1115973 - DNA, 15 bp, Homo sapiens
tgcgtccggacacat

SEQ ID NO: 1115974 - DNA, 15 bp, Homo sapiens
gtgcgtccggacaca

SEQ ID NO: 1115975 - DNA, 15 bp, Homo sapiens
cgtgcgtccggacac

SEQ ID NO: 1115976 - DNA, 15 bp, Homo sapiens
ccgtgcgtccggaca

SEQ ID NO: 1115977 - DNA, 15 bp, Homo sapiens
accgtgcgtccggac

SEQ ID NO: 1115978 - DNA, 15 bp, Homo sapiens
gaccgtgcgtccgga

SEQ ID NO: 1115979 - DNA, 15 bp, Homo sapiens
ggaccgtgcgtccgg

SEQ ID NO: 1115980 - DNA, 15 bp, Homo sapiens
gggaccgtgcgtccg

SEQ ID NO: 1115981 - DNA, 15 bp, Homo sapiens
cgggaccgtgcgtcc

SEQ ID NO: 1115982 - DNA, 15 bp, Homo sapiens
ccgggaccgtgcgtc

SEQ ID NO: 1115983 - DNA, 15 bp, Homo sapiens
accgggaccgtgcgt

SEQ ID NO: 1115984 - DNA, 15 bp, Homo sapiens
caccgggaccgtgcg

SEQ ID NO: 1115985 - DNA, 15 bp, Homo sapiens
gcaccgggaccgtgc

SEQ ID NO: 1115986 - DNA, 15 bp, Homo sapiens
ggcaccgggaccgtg

SEQ ID NO: 1115987 - DNA, 15 bp, Homo sapiens
gggcaccgggaccgt

SEQ ID NO: 1115988 - DNA, 15 bp, Homo sapiens
agggcaccgggaccg

SEQ ID NO: 1115989 - DNA, 15 bp, Homo sapiens
cagggcaccgggacc

SEQ ID NO: 1115990 - DNA, 15 bp, Homo sapiens
tcagggcaccgggac

SEQ ID NO: 1115991 - DNA, 15 bp, Homo sapiens
atcagggcaccggga

SEQ ID NO: 1115992 - DNA, 15 bp, Homo sapiens
catcagggcaccggg

SEQ ID NO: 1115993 - DNA, 15 bp, Homo sapiens
ccatcagggcaccgg

SEQ ID NO: 1115994 - DNA, 15 bp, Homo sapiens
accatcagggcaccg

SEQ ID NO: 1115995 - DNA, 15 bp, Homo sapiens
aaccatcagggcacc

SEQ ID NO: 1115996 - DNA, 15 bp, Homo sapiens
gaaccatcagggcac

SEQ ID NO: 1115997 - DNA, 15 bp, Homo sapiens
agaaccatcagggca

SEQ ID NO: 1115998 - DNA, 15 bp, Homo sapiens
tagaaccatcagggc

SEQ ID NO: 1115999 - DNA, 15 bp, Homo sapiens
gtagaaccatcaggg

SEQ ID NO: 1116000 - DNA, 15 bp, Homo sapiens
ggtagaaccatcagg

SEQ ID NO: 1116001 - DNA, 15 bp, Homo sapiens
aggtagaaccatcag

SEQ ID NO: 1116002 - DNA, 15 bp, Homo sapiens
caggtagaaccatca

SEQ ID NO: 1116003 - DNA, 15 bp, Homo sapiens
gcaggtagaaccatc

SEQ ID NO: 1116004 - DNA, 15 bp, Homo sapiens
agcaggtagaaccat

SEQ ID NO: 1116005 - DNA, 15 bp, Homo sapiens
cagcaggtagaacca

SEQ ID NO: 1116006 - DNA, 15 bp, Homo sapiens
acagcaggtagaacc

SEQ ID NO: 1116007 - DNA, 15 bp, Homo sapiens
cacagcaggtagaac

SEQ ID NO: 1116008 - DNA, 15 bp, Homo sapiens
tcacagcaggtagaa

SEQ ID NO: 1116009 - DNA, 15 bp, Homo sapiens
ctcacagcaggtaga

SEQ ID NO: 1116010 - DNA, 15 bp, Homo sapiens
gctcacagcaggtag

SEQ ID NO: 1116011 - DNA, 15 bp, Homo sapiens
agctcacagcaggta

SEQ ID NO: 1116012 - DNA, 15 bp, Homo sapiens
cagctcacagcaggt

SEQ ID NO: 1116013 - DNA, 15 bp, Homo sapiens
gcagctcacagcagg

SEQ ID NO: 1116014 - DNA, 15 bp, Homo sapiens
ggcagctcacagcag

SEQ ID NO: 1116015 - DNA, 15 bp, Homo sapiens
gggcagctcacagca

SEQ ID NO: 1116016 - DNA, 15 bp, Homo sapiens
tgggcagctcacagc

SEQ ID NO: 1116017 - DNA, 15 bp, Homo sapiens
ctgggcagctcacag

SEQ ID NO: 1116018 - DNA, 15 bp, Homo sapiens
actgggcagctcaca

SEQ ID NO: 1116019 - DNA, 15 bp, Homo sapiens
cactgggcagctcac

SEQ ID NO: 1116020 - DNA, 15 bp, Homo sapiens
ccactgggcagctca

SEQ ID NO: 1116021 - DNA, 15 bp, Homo sapiens
cccactgggcagctc

SEQ ID NO: 1116022 - DNA, 15 bp, Homo sapiens
tcccactgggcagct

SEQ ID NO: 1116023 - DNA, 15 bp, Homo sapiens
ttcccactgggcagc

SEQ ID NO: 1116024 - DNA, 15 bp, Homo sapiens
cttcccactgggcag

SEQ ID NO: 1116025 - DNA, 15 bp, Homo sapiens
acttcccactgggca

SEQ ID NO: 1116026 - DNA, 15 bp, Homo sapiens
tacttcccactgggc

SEQ ID NO: 1116027 - DNA, 15 bp, Homo sapiens
atacttcccactggg

SEQ ID NO: 1116028 - DNA, 15 bp, Homo sapiens
catacttcccactgg

SEQ ID NO: 1116029 - DNA, 15 bp, Homo sapiens
ccatacttcccactg

SEQ ID NO: 1116030 - DNA, 15 bp, Homo sapiens
gccatacttcccact

SEQ ID NO: 1116031 - DNA, 15 bp, Homo sapiens
agccatacttcccac

SEQ ID NO: 1116032 - DNA, 15 bp, Homo sapiens
cagccatacttccca

SEQ ID NO: 1116033 - DNA, 15 bp, Homo sapiens
gcagccatacttccc

SEQ ID NO: 1116034 - DNA, 15 bp, Homo sapiens
agcagccatacttcc

SEQ ID NO: 1116035 - DNA, 15 bp, Homo sapiens
cagcagccatacttc

SEQ ID NO: 1116036 - DNA, 15 bp, Homo sapiens
gcagcagccatactt

SEQ ID NO: 1116037 - DNA, 15 bp, Homo sapiens
ggcagcagccatact

SEQ ID NO: 1116038 - DNA, 15 bp, Homo sapiens
gggcagcagccatac

SEQ ID NO: 1116039 - DNA, 15 bp, Homo sapiens
tgggcagcagccata

SEQ ID NO: 1116040 - DNA, 15 bp, Homo sapiens
ttgggcagcagccat

SEQ ID NO: 1116041 - DNA, 15 bp, Homo sapiens
attgggcagcagcca

SEQ ID NO: 1116042 - DNA, 15 bp, Homo sapiens
cattgggcagcagcc

SEQ ID NO: 1116043 - DNA, 15 bp, Homo sapiens
gcattgggcagcagc

SEQ ID NO: 1116044 - DNA, 15 bp, Homo sapiens
ggcattgggcagcag

SEQ ID NO: 1116045 - DNA, 15 bp, Homo sapiens
gggcattgggcagca

SEQ ID NO: 1116046 - DNA, 15 bp, Homo sapiens
tgggcattgggcagc

SEQ ID NO: 1116047 - DNA, 15 bp, Homo sapiens
ttgggcattgggcag

SEQ ID NO: 1116048 - DNA, 15 bp, Homo sapiens
gttgggcattgggca

SEQ ID NO: 1116049 - DNA, 15 bp, Homo sapiens
cgttgggcattgggc

SEQ ID NO: 1116050 - DNA, 15 bp, Homo sapiens
acgttgggcattggg

SEQ ID NO: 1116051 - DNA, 15 bp, Homo sapiens
cacgttgggcattgg

SEQ ID NO: 1116052 - DNA, 15 bp, Homo sapiens
tcacgttgggcattg

SEQ ID NO: 1116053 - DNA, 15 bp, Homo sapiens
ctcacgttgggcatt

SEQ ID NO: 1116054 - DNA, 15 bp, Homo sapiens
actcacgttgggcat

SEQ ID NO: 1116055 - DNA, 15 bp, Homo sapiens
cactcacgttgggca

SEQ ID NO: 1116056 - DNA, 15 bp, Homo sapiens
tcactcacgttgggc

SEQ ID NO: 1116057 - DNA, 15 bp, Homo sapiens
ctcactcacgttggg

SEQ ID NO: 1116058 - DNA, 15 bp, Homo sapiens
cctcactcacgttgg

SEQ ID NO: 1116059 - DNA, 15 bp, Homo sapiens
ccctcactcacgttg

SEQ ID NO: 1116060 - DNA, 15 bp, Homo sapiens
cccctcactcacgtt

SEQ ID NO: 1116061 - DNA, 15 bp, Homo sapiens
gcccctcactcacgt

SEQ ID NO: 1116062 - DNA, 15 bp, Homo sapiens
agcccctcactcacg

SEQ ID NO: 1116063 - DNA, 15 bp, Homo sapiens
cagcccctcactcac

SEQ ID NO: 1116064 - DNA, 15 bp, Homo sapiens
ccagcccctcactca

SEQ ID NO: 1116065 - DNA, 15 bp, Homo sapiens
tccagcccctcactc

SEQ ID NO: 1116066 - DNA, 15 bp, Homo sapiens
ctccagcccctcact

SEQ ID NO: 1116067 - DNA, 15 bp, Homo sapiens
gctccagcccctcac

SEQ ID NO: 1116068 - DNA, 15 bp, Homo sapiens
ggctccagcccctca

SEQ ID NO: 1116069 - DNA, 15 bp, Homo sapiens
tggctccagcccctc

SEQ ID NO: 1116070 - DNA, 15 bp, Homo sapiens
ctggctccagcccct

SEQ ID NO: 1116071 - DNA, 15 bp, Homo sapiens
cccacccctgtatct

SEQ ID NO: 1116072 - DNA, 15 bp, Homo sapiens
ccccacccctgtatc

SEQ ID NO: 1116073 - DNA, 15 bp, Homo sapiens
gccccacccctgtat

SEQ ID NO: 1116074 - DNA, 15 bp, Homo sapiens
ggccccacccctgta

SEQ ID NO: 1116075 - DNA, 15 bp, Homo sapiens
gggccccacccctgt

SEQ ID NO: 1116076 - DNA, 15 bp, Homo sapiens
ggggccccacccctg

SEQ ID NO: 1116077 - DNA, 15 bp, Homo sapiens
gggggccccacccct

SEQ ID NO: 1116078 - DNA, 15 bp, Homo sapiens
agggggccccacccc

SEQ ID NO: 1116079 - DNA, 15 bp, Homo sapiens
aagggggccccaccc

SEQ ID NO: 1116080 - DNA, 15 bp, Homo sapiens
aaagggggccccacc

SEQ ID NO: 1116081 - DNA, 15 bp, Homo sapiens
gaaagggggccccac

SEQ ID NO: 1116082 - DNA, 15 bp, Homo sapiens
ggaaagggggcccca

SEQ ID NO: 1116083 - DNA, 15 bp, Homo sapiens
aggaaagggggcccc

SEQ ID NO: 1116084 - DNA, 15 bp, Homo sapiens
gaggaaagggggccc

SEQ ID NO: 1116085 - DNA, 15 bp, Homo sapiens
ggaggaaagggggcc

SEQ ID NO: 1116086 - DNA, 15 bp, Homo sapiens
gggaggaaagggggc

SEQ ID NO: 1116087 - DNA, 15 bp, Homo sapiens
agggaggaaaggggg

SEQ ID NO: 1116088 - DNA, 15 bp, Homo sapiens
aagggaggaaagggg

SEQ ID NO: 1116089 - DNA, 15 bp, Homo sapiens
aaagggaggaaaggg

SEQ ID NO: 1116090 - DNA, 15 bp, Homo sapiens
aaaagggaggaaagg

SEQ ID NO: 1116091 - DNA, 15 bp, Homo sapiens
taaaagggaggaaag

SEQ ID NO: 1116092 - DNA, 15 bp, Homo sapiens
ctaaaagggaggaaa

SEQ ID NO: 1116093 - DNA, 15 bp, Homo sapiens
cctaaaagggaggaa

SEQ ID NO: 1116094 - DNA, 15 bp, Homo sapiens
gcctaaaagggagga

SEQ ID NO: 1116095 - DNA, 15 bp, Homo sapiens
ggcctaaaagggagg

SEQ ID NO: 1116096 - DNA, 15 bp, Homo sapiens
aggcctaaaagggag

SEQ ID NO: 1116097 - DNA, 15 bp, Homo sapiens
caggcctaaaaggga

SEQ ID NO: 1116098 - DNA, 15 bp, Homo sapiens
ccaggcctaaaaggg

SEQ ID NO: 1116099 - DNA, 15 bp, Homo sapiens
gccaggcctaaaagg

SEQ ID NO: 1116100 - DNA, 15 bp, Homo sapiens
ggccaggcctaaaag

SEQ ID NO: 1116101 - DNA, 15 bp, Homo sapiens
aggccaggcctaaaa

SEQ ID NO: 1116102 - DNA, 15 bp, Homo sapiens
aaggccaggcctaaa

SEQ ID NO: 1116103 - DNA, 15 bp, Homo sapiens
taaggccaggcctaa

SEQ ID NO: 1116104 - DNA, 15 bp, Homo sapiens
ctaaggccaggccta

SEQ ID NO: 1116105 - DNA, 15 bp, Homo sapiens
cctaaggccaggcct

SEQ ID NO: 1116106 - DNA, 15 bp, Homo sapiens
tcctaaggccaggcc

SEQ ID NO: 1116107 - DNA, 15 bp, Homo sapiens
atcctaaggccaggc

SEQ ID NO: 1116108 - DNA, 15 bp, Homo sapiens
gatcctaaggccagg

SEQ ID NO: 1116109 - DNA, 15 bp, Homo sapiens
tgatcctaaggccag

SEQ ID NO: 1116110 - DNA, 15 bp, Homo sapiens
gtgatcctaaggcca

SEQ ID NO: 1116111 - DNA, 15 bp, Homo sapiens
agtgatcctaaggcc

SEQ ID NO: 1116112 - DNA, 15 bp, Homo sapiens
cagtgatcctaaggc

SEQ ID NO: 1116113 - DNA, 15 bp, Homo sapiens
gcagtgatcctaagg

SEQ ID NO: 1116114 - DNA, 15 bp, Homo sapiens
tgcagtgatcctaag

SEQ ID NO: 1116115 - DNA, 15 bp, Homo sapiens
ttgcagtgatcctaa

SEQ ID NO: 1116116 - DNA, 15 bp, Homo sapiens
cttgcagtgatccta

SEQ ID NO: 1116117 - DNA, 15 bp, Homo sapiens
ccttgcagtgatcct

SEQ ID NO: 1116118 - DNA, 15 bp, Homo sapiens
accttgcagtgatcc

SEQ ID NO: 1116119 - DNA, 15 bp, Homo sapiens
caccttgcagtgatc

SEQ ID NO: 1116120 - DNA, 15 bp, Homo sapiens
ccaccttgcagtgat

SEQ ID NO: 1116121 - DNA, 15 bp, Homo sapiens
accaccttgcagtga

SEQ ID NO: 1116122 - DNA, 15 bp, Homo sapiens
caccaccttgcagtg

SEQ ID NO: 1116123 - DNA, 15 bp, Homo sapiens
acaccaccttgcagt

SEQ ID NO: 1116124 - DNA, 15 bp, Homo sapiens
tacaccaccttgcag

SEQ ID NO: 1116125 - DNA, 15 bp, Homo sapiens
ttacaccaccttgca

SEQ ID NO: 1116126 - DNA, 15 bp, Homo sapiens
cttacaccaccttgc

SEQ ID NO: 1116127 - DNA, 15 bp, Homo sapiens
gcttacaccaccttg

SEQ ID NO: 1116128 - DNA, 15 bp, Homo sapiens
cgcttacaccacctt

SEQ ID NO: 1116129 - DNA, 15 bp, Homo sapiens
ccgcttacaccacct

SEQ ID NO: 1116130 - DNA, 15 bp, Homo sapiens
accgcttacaccacc

SEQ ID NO: 1116131 - DNA, 15 bp, Homo sapiens
taccgcttacaccac

SEQ ID NO: 1116132 - DNA, 15 bp, Homo sapiens
gtaccgcttacacca

SEQ ID NO: 1116133 - DNA, 15 bp, Homo sapiens
ggtaccgcttacacc

SEQ ID NO: 1116134 - DNA, 15 bp, Homo sapiens
gggtaccgcttacac

SEQ ID NO: 1116135 - DNA, 15 bp, Homo sapiens
agggtaccgcttaca

SEQ ID NO: 1116136 - DNA, 15 bp, Homo sapiens
gagggtaccgcttac

SEQ ID NO: 1116137 - DNA, 15 bp, Homo sapiens
ggagggtaccgctta

SEQ ID NO: 1116138 - DNA, 15 bp, Homo sapiens
tggagggtaccgctt

SEQ ID NO: 1116139 - DNA, 15 bp, Homo sapiens
atggagggtaccgct

SEQ ID NO: 1116140 - DNA, 15 bp, Homo sapiens
gatggagggtaccgc

SEQ ID NO: 1116141 - DNA, 15 bp, Homo sapiens
agatggagggtaccg

SEQ ID NO: 1116142 - DNA, 15 bp, Homo sapiens
aagatggagggtacc

SEQ ID NO: 1116143 - DNA, 15 bp, Homo sapiens
gaagatggagggtac

SEQ ID NO: 1116144 - DNA, 15 bp, Homo sapiens
tgaagatggagggta

SEQ ID NO: 1116145 - DNA, 15 bp, Homo sapiens
ttgaagatggagggt

SEQ ID NO: 1116146 - DNA, 15 bp, Homo sapiens
gttgaagatggaggg

SEQ ID NO: 1116147 - DNA, 15 bp, Homo sapiens
tgttgaagatggagg

SEQ ID NO: 1116148 - DNA, 15 bp, Homo sapiens
gtgttgaagatggag

SEQ ID NO: 1116149 - DNA, 15 bp, Homo sapiens
ggtgttgaagatgga

SEQ ID NO: 1116150 - DNA, 15 bp, Homo sapiens
aggtgttgaagatgg

SEQ ID NO: 1116151 - DNA, 15 bp, Homo sapiens
caggtgttgaagatg

SEQ ID NO: 1116152 - DNA, 15 bp, Homo sapiens
ccaggtgttgaagat

SEQ ID NO: 1116153 - DNA, 15 bp, Homo sapiens
accaggtgttgaaga

SEQ ID NO: 1116154 - DNA, 15 bp, Homo sapiens
aaccaggtgttgaag

SEQ ID NO: 1116155 - DNA, 15 bp, Homo sapiens
gaaccaggtgttgaa

SEQ ID NO: 1116156 - DNA, 15 bp, Homo sapiens
ggaaccaggtgttga

SEQ ID NO: 1116157 - DNA, 15 bp, Homo sapiens
tggaaccaggtgttg

SEQ ID NO: 1116158 - DNA, 15 bp, Homo sapiens
ctggaaccaggtgtt

SEQ ID NO: 1116159 - DNA, 15 bp, Homo sapiens
gctggaaccaggtgt

SEQ ID NO: 1116160 - DNA, 15 bp, Homo sapiens
agctggaaccaggtg

SEQ ID NO: 1116161 - DNA, 15 bp, Homo sapiens
cagctggaaccaggt

SEQ ID NO: 1116162 - DNA, 15 bp, Homo sapiens
acagctggaaccagg

SEQ ID NO: 1116163 - DNA, 15 bp, Homo sapiens
cacagctggaaccag

SEQ ID NO: 1116164 - DNA, 15 bp, Homo sapiens
ccacagctggaacca

SEQ ID NO: 1116165 - DNA, 15 bp, Homo sapiens
tccacagctggaacc

SEQ ID NO: 1116166 - DNA, 15 bp, Homo sapiens
ctccacagctggaac

SEQ ID NO: 1116167 - DNA, 15 bp, Homo sapiens
gctccacagctggaa

SEQ ID NO: 1116168 - DNA, 15 bp, Homo sapiens
ggctccacagctgga

SEQ ID NO: 1116169 - DNA, 15 bp, Homo sapiens
cggctccacagctgg

SEQ ID NO: 1116170 - DNA, 15 bp, Homo sapiens
ccggctccacagctg

SEQ ID NO: 1116171 - DNA, 15 bp, Homo sapiens
gccggctccacagct

SEQ ID NO: 1116172 - DNA, 15 bp, Homo sapiens
tgccggctccacagc

SEQ ID NO: 1116173 - DNA, 15 bp, Homo sapiens
ttgccggctccacag

SEQ ID NO: 1116174 - DNA, 15 bp, Homo sapiens
tttgccggctccaca

SEQ ID NO: 1116175 - DNA, 15 bp, Homo sapiens
ctttgccggctccac

SEQ ID NO: 1116176 - DNA, 15 bp, Homo sapiens
cctttgccggctcca

SEQ ID NO: 1116177 - DNA, 15 bp, Homo sapiens
ccctttgccggctcc

SEQ ID NO: 1116178 - DNA, 15 bp, Homo sapiens
accctttgccggctc

SEQ ID NO: 1116179 - DNA, 15 bp, Homo sapiens
aaccctttgccggct

SEQ ID NO: 1116180 - DNA, 15 bp, Homo sapiens
caaccctttgccggc

SEQ ID NO: 1116181 - DNA, 15 bp, Homo sapiens
tcaaccctttgccgg

SEQ ID NO: 1116182 - DNA, 15 bp, Homo sapiens
atcaaccctttgccg

SEQ ID NO: 1116183 - DNA, 15 bp, Homo sapiens
tatcaaccctttgcc

SEQ ID NO: 1116184 - DNA, 15 bp, Homo sapiens
gtatcaaccctttgc

SEQ ID NO: 1116185 - DNA, 15 bp, Homo sapiens
ggtatcaaccctttg

SEQ ID NO: 1116186 - DNA, 15 bp, Homo sapiens
gggtatcaacccttt

SEQ ID NO: 1116187 - DNA, 15 bp, Homo sapiens
ggggtatcaaccctt

SEQ ID NO: 1116188 - DNA, 15 bp, Homo sapiens
aggggtatcaaccct

SEQ ID NO: 1116189 - DNA, 15 bp, Homo sapiens
caggggtatcaaccc

SEQ ID NO: 1116190 - DNA, 15 bp, Homo sapiens
tcaggggtatcaacc

SEQ ID NO: 1116191 - DNA, 15 bp, Homo sapiens
ctcaggggtatcaac

SEQ ID NO: 1116192 - DNA, 15 bp, Homo sapiens
cctcaggggtatcaa

SEQ ID NO: 1116193 - DNA, 15 bp, Homo sapiens
ccctcaggggtatca

SEQ ID NO: 1116194 - DNA, 15 bp, Homo sapiens
accctcaggggtatc

SEQ ID NO: 1116195 - DNA, 15 bp, Homo sapiens
gaccctcaggggtat

SEQ ID NO: 1116196 - DNA, 15 bp, Homo sapiens
ggaccctcaggggta

SEQ ID NO: 1116197 - DNA, 15 bp, Homo sapiens
gggaccctcaggggt

SEQ ID NO: 1116198 - DNA, 15 bp, Homo sapiens
ggggaccctcagggg

SEQ ID NO: 1116199 - DNA, 15 bp, Homo sapiens
tggggaccctcaggg

SEQ ID NO: 1116200 - DNA, 15 bp, Homo sapiens
ctggggaccctcagg

SEQ ID NO: 1116201 - DNA, 15 bp, Homo sapiens
actggggaccctcag

SEQ ID NO: 1116202 - DNA, 15 bp, Homo sapiens
cactggggaccctca

SEQ ID NO: 1116203 - DNA, 15 bp, Homo sapiens
gcactggggaccctc

SEQ ID NO: 1116204 - DNA, 15 bp, Homo sapiens
ggcactggggaccct

SEQ ID NO: 1116205 - DNA, 15 bp, Homo sapiens
tggcactggggaccc

SEQ ID NO: 1116206 - DNA, 15 bp, Homo sapiens
gtggcactggggacc

SEQ ID NO: 1116207 - DNA, 15 bp, Homo sapiens
agtggcactggggac

SEQ ID NO: 1116208 - DNA, 15 bp, Homo sapiens
aagtggcactgggga

SEQ ID NO: 1116209 - DNA, 15 bp, Homo sapiens
gaagtggcactgggg

SEQ ID NO: 1116210 - DNA, 15 bp, Homo sapiens
agaagtggcactggg

SEQ ID NO: 1116211 - DNA, 15 bp, Homo sapiens
cagaagtggcactgg

SEQ ID NO: 1116212 - DNA, 15 bp, Homo sapiens
tcagaagtggcactg

SEQ ID NO: 1116213 - DNA, 15 bp, Homo sapiens
gtcagaagtggcact

SEQ ID NO: 1116214 - DNA, 15 bp, Homo sapiens
ggtcagaagtggcac

SEQ ID NO: 1116215 - DNA, 15 bp, Homo sapiens
aggtcagaagtggca

SEQ ID NO: 1116216 - DNA, 15 bp, Homo sapiens
caggtcagaagtggc

SEQ ID NO: 1116217 - DNA, 15 bp, Homo sapiens
acaggtcagaagtgg

SEQ ID NO: 1116218 - DNA, 15 bp, Homo sapiens
gacaggtcagaagtg

SEQ ID NO: 1116219 - DNA, 15 bp, Homo sapiens
ggacaggtcagaagt

SEQ ID NO: 1116220 - DNA, 15 bp, Homo sapiens
aggacaggtcagaag

SEQ ID NO: 1116221 - DNA, 15 bp, Homo sapiens
gaggacaggtcagaa

SEQ ID NO: 1116222 - DNA, 15 bp, Homo sapiens
agaggacaggtcaga

SEQ ID NO: 1116223 - DNA, 15 bp, Homo sapiens
gagaggacaggtcag

SEQ ID NO: 1116224 - DNA, 15 bp, Homo sapiens
agagaggacaggtca

SEQ ID NO: 1116225 - DNA, 15 bp, Homo sapiens
cagagaggacaggtc

SEQ ID NO: 1116226 - DNA, 15 bp, Homo sapiens
gcagagaggacaggt

SEQ ID NO: 1116227 - DNA, 15 bp, Homo sapiens
agcagagaggacagg

SEQ ID NO: 1116228 - DNA, 15 bp, Homo sapiens
aagcagagaggacag

SEQ ID NO: 1116229 - DNA, 15 bp, Homo sapiens
gaagcagagaggaca

SEQ ID NO: 1116230 - DNA, 15 bp, Homo sapiens
ggaagcagagaggac

SEQ ID NO: 1116231 - DNA, 15 bp, Homo sapiens
gggaagcagagagga

SEQ ID NO: 1116232 - DNA, 15 bp, Homo sapiens
agggaagcagagagg

SEQ ID NO: 1116233 - DNA, 15 bp, Homo sapiens
gagggaagcagagag

SEQ ID NO: 1116234 - DNA, 15 bp, Homo sapiens
tgagggaagcagaga

SEQ ID NO: 1116235 - DNA, 15 bp, Homo sapiens
gtgagggaagcagag

SEQ ID NO: 1116236 - DNA, 15 bp, Homo sapiens
tgtgagggaagcaga

SEQ ID NO: 1116237 - DNA, 15 bp, Homo sapiens
ctgtgagggaagcag

SEQ ID NO: 1116238 - DNA, 15 bp, Homo sapiens
actgtgagggaagca

SEQ ID NO: 1116239 - DNA, 15 bp, Homo sapiens
cactgtgagggaagc

SEQ ID NO: 1116240 - DNA, 15 bp, Homo sapiens
ccactgtgagggaag

SEQ ID NO: 1116241 - DNA, 15 bp, Homo sapiens
cccactgtgagggaa

SEQ ID NO: 1116242 - DNA, 15 bp, Homo sapiens
ccccactgtgaggga

SEQ ID NO: 1116243 - DNA, 15 bp, Homo sapiens
cccccactgtgaggg

SEQ ID NO: 1116244 - DNA, 15 bp, Homo sapiens
tcccccactgtgagg

SEQ ID NO: 1116245 - DNA, 15 bp, Homo sapiens
atcccccactgtgag

SEQ ID NO: 1116246 - DNA, 15 bp, Homo sapiens
catcccccactgtga

SEQ ID NO: 1116247 - DNA, 15 bp, Homo sapiens
acatcccccactgtg

SEQ ID NO: 1116248 - DNA, 15 bp, Homo sapiens
cacatcccccactgt

SEQ ID NO: 1116249 - DNA, 15 bp, Homo sapiens
tcacatcccccactg

SEQ ID NO: 1116250 - DNA, 15 bp, Homo sapiens
ttcacatcccccact

SEQ ID NO: 1116251 - DNA, 15 bp, Homo sapiens
tttcacatcccccac

SEQ ID NO: 1116252 - DNA, 15 bp, Homo sapiens
atttcacatccccca

SEQ ID NO: 1116253 - DNA, 15 bp, Homo sapiens
catttcacatccccc

SEQ ID NO: 1116254 - DNA, 15 bp, Homo sapiens
acatttcacatcccc

SEQ ID NO: 1116255 - DNA, 15 bp, Homo sapiens
cacatttcacatccc

SEQ ID NO: 1116256 - DNA, 15 bp, Homo sapiens
tcacatttcacatcc

SEQ ID NO: 1116257 - DNA, 15 bp, Homo sapiens
gtcacatttcacatc

SEQ ID NO: 1116258 - DNA, 15 bp, Homo sapiens
tgtcacatttcacat

SEQ ID NO: 1116259 - DNA, 15 bp, Homo sapiens
atgtcacatttcaca

SEQ ID NO: 1116260 - DNA, 15 bp, Homo sapiens
catgtcacatttcac

SEQ ID NO: 1116261 - DNA, 15 bp, Homo sapiens
ccatgtcacatttca

SEQ ID NO: 1116262 - DNA, 15 bp, Homo sapiens
tccatgtcacatttc

SEQ ID NO: 1116263 - DNA, 15 bp, Homo sapiens
ctccatgtcacattt

SEQ ID NO: 1116264 - DNA, 15 bp, Homo sapiens
cctccatgtcacatt

SEQ ID NO: 1116265 - DNA, 15 bp, Homo sapiens
acctccatgtcacat

SEQ ID NO: 1116266 - DNA, 15 bp, Homo sapiens
cacctccatgtcaca

SEQ ID NO: 1116267 - DNA, 15 bp, Homo sapiens
tcacctccatgtcac

SEQ ID NO: 1116268 - DNA, 15 bp, Homo sapiens
ctcacctccatgtca

SEQ ID NO: 1116269 - DNA, 15 bp, Homo sapiens
gctcacctccatgtc

SEQ ID NO: 1116270 - DNA, 15 bp, Homo sapiens
agctcacctccatgt

SEQ ID NO: 1116271 - DNA, 15 bp, Homo sapiens
cagctcacctccatg

SEQ ID NO: 1116272 - DNA, 15 bp, Homo sapiens
gcagctcacctccat

SEQ ID NO: 1116273 - DNA, 15 bp, Homo sapiens
ggcagctcacctcca

SEQ ID NO: 1116274 - DNA, 15 bp, Homo sapiens
gggcagctcacctcc

SEQ ID NO: 1116275 - DNA, 15 bp, Homo sapiens
tgggcagctcacctc

SEQ ID NO: 1116276 - DNA, 15 bp, Homo sapiens
ctgggcagctcacct

SEQ ID NO: 1116277 - DNA, 15 bp, Homo sapiens
tctgggcagctcacc

SEQ ID NO: 1116278 - DNA, 15 bp, Homo sapiens
atctgggcagctcac

SEQ ID NO: 1116279 - DNA, 15 bp, Homo sapiens
catctgggcagctca

SEQ ID NO: 1116280 - DNA, 15 bp, Homo sapiens
ccatctgggcagctc

SEQ ID NO: 1116281 - DNA, 15 bp, Homo sapiens
gccatctgggcagct

SEQ ID NO: 1116282 - DNA, 15 bp, Homo sapiens
agccatctgggcagc

SEQ ID NO: 1116283 - DNA, 15 bp, Homo sapiens
tagccatctgggcag

SEQ ID NO: 1116284 - DNA, 15 bp, Homo sapiens
atagccatctgggca

SEQ ID NO: 1116285 - DNA, 15 bp, Homo sapiens
tatagccatctgggc

SEQ ID NO: 1116286 - DNA, 15 bp, Homo sapiens
gtatagccatctggg

SEQ ID NO: 1116287 - DNA, 15 bp, Homo sapiens
ggtatagccatctgg

SEQ ID NO: 1116288 - DNA, 15 bp, Homo sapiens
aggtatagccatctg

SEQ ID NO: 1116289 - DNA, 15 bp, Homo sapiens
caggtatagccatct

SEQ ID NO: 1116290 - DNA, 15 bp, Homo sapiens
gcaggtatagccatc

SEQ ID NO: 1116291 - DNA, 15 bp, Homo sapiens
agcaggtatagccat

SEQ ID NO: 1116292 - DNA, 15 bp, Homo sapiens
cagcaggtatagcca

SEQ ID NO: 1116293 - DNA, 15 bp, Homo sapiens
gcagcaggtatagcc

SEQ ID NO: 1116294 - DNA, 15 bp, Homo sapiens
ggcagcaggtatagc

SEQ ID NO: 1116295 - DNA, 15 bp, Homo sapiens
cggcagcaggtatag

SEQ ID NO: 1116296 - DNA, 15 bp, Homo sapiens
acggcagcaggtata

SEQ ID NO: 1116297 - DNA, 15 bp, Homo sapiens
gacggcagcaggtat

SEQ ID NO: 1116298 - DNA, 15 bp, Homo sapiens
agacggcagcaggta

SEQ ID NO: 1116299 - DNA, 15 bp, Homo sapiens
tagacggcagcaggt

SEQ ID NO: 1116300 - DNA, 15 bp, Homo sapiens
gtagacggcagcagg

SEQ ID NO: 1116301 - DNA, 15 bp, Homo sapiens
tgtagacggcagcag

SEQ ID NO: 1116302 - DNA, 15 bp, Homo sapiens
ctgtagacggcagca

SEQ ID NO: 1116303 - DNA, 15 bp, Homo sapiens
actgtagacggcagc

SEQ ID NO: 1116304 - DNA, 15 bp, Homo sapiens
gactgtagacggcag

SEQ ID NO: 1116305 - DNA, 15 bp, Homo sapiens
cgactgtagacggca

SEQ ID NO: 1116306 - DNA, 15 bp, Homo sapiens
ccgactgtagacggc

SEQ ID NO: 1116307 - DNA, 15 bp, Homo sapiens
cccgactgtagacgg

SEQ ID NO: 1116308 - DNA, 15 bp, Homo sapiens
ccccgactgtagacg

SEQ ID NO: 1116309 - DNA, 15 bp, Homo sapiens
cccccgactgtagac

SEQ ID NO: 1116310 - DNA, 15 bp, Homo sapiens
gcccccgactgtaga

SEQ ID NO: 1116311 - DNA, 15 bp, Homo sapiens
ggcccccgactgtag

SEQ ID NO: 1116312 - DNA, 15 bp, Homo sapiens
aggcccccgactgta

SEQ ID NO: 1116313 - DNA, 15 bp, Homo sapiens
caggcccccgactgt

SEQ ID NO: 1116314 - DNA, 15 bp, Homo sapiens
ccaggcccccgactg

SEQ ID NO: 1116315 - DNA, 15 bp, Homo sapiens
cccaggcccccgact

SEQ ID NO: 1116316 - DNA, 15 bp, Homo sapiens
ccccaggcccccgac

SEQ ID NO: 1116317 - DNA, 15 bp, Homo sapiens
gccccaggcccccga

SEQ ID NO: 1116318 - DNA, 15 bp, Homo sapiens
agccccaggcccccg

SEQ ID NO: 1116319 - DNA, 15 bp, Homo sapiens
cagccccaggccccc

SEQ ID NO: 1116320 - DNA, 15 bp, Homo sapiens
gcagccccaggcccc

SEQ ID NO: 1116321 - DNA, 15 bp, Homo sapiens
agcagccccaggccc

SEQ ID NO: 1116322 - DNA, 15 bp, Homo sapiens
cagcagccccaggcc

SEQ ID NO: 1116323 - DNA, 15 bp, Homo sapiens
gcagcagccccaggc

SEQ ID NO: 1116324 - DNA, 15 bp, Homo sapiens
ggcagcagccccagg

SEQ ID NO: 1116325 - DNA, 15 bp, Homo sapiens
gggcagcagccccag

SEQ ID NO: 1116326 - DNA, 15 bp, Homo sapiens
agggcagcagcccca

SEQ ID NO: 1116327 - DNA, 15 bp, Homo sapiens
aagggcagcagcccc

SEQ ID NO: 1116328 - DNA, 15 bp, Homo sapiens
aaagggcagcagccc

SEQ ID NO: 1116329 - DNA, 15 bp, Homo sapiens
aaaagggcagcagcc

SEQ ID NO: 1116330 - DNA, 15 bp, Homo sapiens
taaaagggcagcagc

SEQ ID NO: 1116331 - DNA, 15 bp, Homo sapiens
gtaaaagggcagcag

SEQ ID NO: 1116332 - DNA, 15 bp, Homo sapiens
ggtaaaagggcagca

SEQ ID NO: 1116333 - DNA, 15 bp, Homo sapiens
gggtaaaagggcagc

SEQ ID NO: 1116334 - DNA, 15 bp, Homo sapiens
tgggtaaaagggcag

SEQ ID NO: 1116335 - DNA, 15 bp, Homo sapiens
ctgggtaaaagggca

SEQ ID NO: 1116336 - DNA, 15 bp, Homo sapiens
cctgggtaaaagggc

SEQ ID NO: 1116337 - DNA, 15 bp, Homo sapiens
acctgggtaaaaggg

SEQ ID NO: 1116338 - DNA, 15 bp, Homo sapiens
tacctgggtaaaagg

SEQ ID NO: 1116339 - DNA, 15 bp, Homo sapiens
ggtaggggaggggag

SEQ ID NO: 1116340 - DNA, 15 bp, Homo sapiens
gggtaggggagggga

SEQ ID NO: 1116341 - DNA, 15 bp, Homo sapiens
gtggggtaggggagg

SEQ ID NO: 1116342 - DNA, 15 bp, Homo sapiens
tgtggggtaggggag

SEQ ID NO: 1116343 - DNA, 15 bp, Homo sapiens
ctgtggggtagggga

SEQ ID NO: 1116344 - DNA, 15 bp, Homo sapiens
tctgtggggtagggg

SEQ ID NO: 1116345 - DNA, 15 bp, Homo sapiens
ttctgtggggtaggg

SEQ ID NO: 1116346 - DNA, 15 bp, Homo sapiens
tttctgtggggtagg

SEQ ID NO: 1116347 - DNA, 15 bp, Homo sapiens
ctttctgtggggtag

SEQ ID NO: 1116348 - DNA, 15 bp, Homo sapiens
tctttctgtggggta

SEQ ID NO: 1116349 - DNA, 15 bp, Homo sapiens
gtctttctgtggggt

SEQ ID NO: 1116350 - DNA, 15 bp, Homo sapiens
tgtctttctgtgggg

SEQ ID NO: 1116351 - DNA, 15 bp, Homo sapiens
atgtctttctgtggg

SEQ ID NO: 1116352 - DNA, 15 bp, Homo sapiens
tatgtctttctgtgg

SEQ ID NO: 1116353 - DNA, 15 bp, Homo sapiens
gtatgtctttctgtg

SEQ ID NO: 1116354 - DNA, 15 bp, Homo sapiens
tgtatgtctttctgt

SEQ ID NO: 1116355 - DNA, 15 bp, Homo sapiens
gtgtatgtctttctg

SEQ ID NO: 1116356 - DNA, 15 bp, Homo sapiens
tgtgtatgtctttct

SEQ ID NO: 1116357 - DNA, 15 bp, Homo sapiens
ctgtgtatgtctttc

SEQ ID NO: 1116358 - DNA, 15 bp, Homo sapiens
gctgtgtatgtcttt

SEQ ID NO: 1116359 - DNA, 15 bp, Homo sapiens
ggctgtgtatgtctt

SEQ ID NO: 1116360 - DNA, 15 bp, Homo sapiens
aggctgtgtatgtct

SEQ ID NO: 1116361 - DNA, 15 bp, Homo sapiens
aaggctgtgtatgtc

SEQ ID NO: 1116362 - DNA, 15 bp, Homo sapiens
taaggctgtgtatgt

SEQ ID NO: 1116363 - DNA, 15 bp, Homo sapiens
ttaaggctgtgtatg

SEQ ID NO: 1116364 - DNA, 15 bp, Homo sapiens
gttaaggctgtgtat

SEQ ID NO: 1116365 - DNA, 15 bp, Homo sapiens
ggttaaggctgtgta

SEQ ID NO: 1116366 - DNA, 15 bp, Homo sapiens
aggttaaggctgtgt

SEQ ID NO: 1116367 - DNA, 15 bp, Homo sapiens
gaggttaaggctgtg

SEQ ID NO: 1116368 - DNA, 15 bp, Homo sapiens
tgaggttaaggctgt

SEQ ID NO: 1116369 - DNA, 15 bp, Homo sapiens
gtgaggttaaggctg

SEQ ID NO: 1116370 - DNA, 15 bp, Homo sapiens
ggtgaggttaaggct

SEQ ID NO: 1116371 - DNA, 15 bp, Homo sapiens
tggtgaggttaaggc

SEQ ID NO: 1116372 - DNA, 15 bp, Homo sapiens
ctggtgaggttaagg

SEQ ID NO: 1116373 - DNA, 15 bp, Homo sapiens
actggtgaggttaag

SEQ ID NO: 1116374 - DNA, 15 bp, Homo sapiens
aactggtgaggttaa

SEQ ID NO: 1116375 - DNA, 15 bp, Homo sapiens
aaactggtgaggtta

SEQ ID NO: 1116376 - DNA, 15 bp, Homo sapiens
aaaactggtgaggtt

SEQ ID NO: 1116377 - DNA, 15 bp, Homo sapiens
taaaactggtgaggt

SEQ ID NO: 1116378 - DNA, 15 bp, Homo sapiens
ataaaactggtgagg

SEQ ID NO: 1116379 - DNA, 15 bp, Homo sapiens
tataaaactggtgag

SEQ ID NO: 1116380 - DNA, 15 bp, Homo sapiens
atataaaactggtga

SEQ ID NO: 1116381 - DNA, 15 bp, Homo sapiens
aatataaaactggtg

SEQ ID NO: 1116382 - DNA, 15 bp, Homo sapiens
aaatataaaactggt

SEQ ID NO: 1116383 - DNA, 15 bp, Homo sapiens
caaatataaaactgg

SEQ ID NO: 1116384 - DNA, 15 bp, Homo sapiens
gcaaatataaaactg

SEQ ID NO: 1116385 - DNA, 15 bp, Homo sapiens
agcaaatataaaact

SEQ ID NO: 1116386 - DNA, 15 bp, Homo sapiens
cagcaaatataaaac

SEQ ID NO: 1116387 - DNA, 15 bp, Homo sapiens
gcagcaaatataaaa

SEQ ID NO: 1116388 - DNA, 15 bp, Homo sapiens
agcagcaaatataaa

SEQ ID NO: 1116389 - DNA, 15 bp, Homo sapiens
cagcagcaaatataa

SEQ ID NO: 1116390 - DNA, 15 bp, Homo sapiens
gcagcagcaaatata

SEQ ID NO: 1116391 - DNA, 15 bp, Homo sapiens
ggcagcagcaaatat

SEQ ID NO: 1116392 - DNA, 15 bp, Homo sapiens
gggcagcagcaaata

SEQ ID NO: 1116393 - DNA, 15 bp, Homo sapiens
tgggcagcagcaaat

SEQ ID NO: 1116394 - DNA, 15 bp, Homo sapiens
gtgggcagcagcaaa

SEQ ID NO: 1116395 - DNA, 15 bp, Homo sapiens
tgtgggcagcagcaa

SEQ ID NO: 1116396 - DNA, 15 bp, Homo sapiens
atgtgggcagcagca

SEQ ID NO: 1116397 - DNA, 15 bp, Homo sapiens
gatgtgggcagcagc

SEQ ID NO: 1116398 - DNA, 15 bp, Homo sapiens
cgatgtgggcagcag

SEQ ID NO: 1116399 - DNA, 15 bp, Homo sapiens
ccgatgtgggcagca

SEQ ID NO: 1116400 - DNA, 15 bp, Homo sapiens
gccgatgtgggcagc

SEQ ID NO: 1116401 - DNA, 15 bp, Homo sapiens
agccgatgtgggcag

SEQ ID NO: 1116402 - DNA, 15 bp, Homo sapiens
cagccgatgtgggca

SEQ ID NO: 1116403 - DNA, 15 bp, Homo sapiens
acagccgatgtgggc

SEQ ID NO: 1116404 - DNA, 15 bp, Homo sapiens
tacagccgatgtggg

SEQ ID NO: 1116405 - DNA, 15 bp, Homo sapiens
atacagccgatgtgg

SEQ ID NO: 1116406 - DNA, 15 bp, Homo sapiens
gatacagccgatgtg

SEQ ID NO: 1116407 - DNA, 15 bp, Homo sapiens
tgatacagccgatgt

SEQ ID NO: 1116408 - DNA, 15 bp, Homo sapiens
gtgatacagccgatg

SEQ ID NO: 1116409 - DNA, 15 bp, Homo sapiens
tgtgatacagccgat

SEQ ID NO: 1116410 - DNA, 15 bp, Homo sapiens
atgtgatacagccga

SEQ ID NO: 1116411 - DNA, 15 bp, Homo sapiens
aatgtgatacagccg

SEQ ID NO: 1116412 - DNA, 15 bp, Homo sapiens
taatgtgatacagcc

SEQ ID NO: 1116413 - DNA, 15 bp, Homo sapiens
gtaatgtgatacagc

SEQ ID NO: 1116414 - DNA, 15 bp, Homo sapiens
ggtaatgtgatacag

SEQ ID NO: 1116415 - DNA, 15 bp, Homo sapiens
gggtaatgtgataca

SEQ ID NO: 1116416 - DNA, 15 bp, Homo sapiens
ggggtaatgtgatac

SEQ ID NO: 1116417 - DNA, 15 bp, Homo sapiens
gggggtaatgtgata

SEQ ID NO: 1116418 - DNA, 15 bp, Homo sapiens
agggggtaatgtgat

SEQ ID NO: 1116419 - DNA, 15 bp, Homo sapiens
tagggggtaatgtga

SEQ ID NO: 1116420 - DNA, 15 bp, Homo sapiens
ctagggggtaatgtg

SEQ ID NO: 1116421 - DNA, 15 bp, Homo sapiens
actagggggtaatgt

SEQ ID NO: 1116422 - DNA, 15 bp, Homo sapiens
gactagggggtaatg

SEQ ID NO: 1116423 - DNA, 15 bp, Homo sapiens
ggactagggggtaat

SEQ ID NO: 1116424 - DNA, 15 bp, Homo sapiens
gggactagggggtaa

SEQ ID NO: 1116425 - DNA, 15 bp, Homo sapiens
ggggactagggggta

SEQ ID NO: 1116426 - DNA, 15 bp, Homo sapiens
tggggactagggggt

SEQ ID NO: 1116427 - DNA, 15 bp, Homo sapiens
ctggggactaggggg

SEQ ID NO: 1116428 - DNA, 15 bp, Homo sapiens
tctggggactagggg

SEQ ID NO: 1116429 - DNA, 15 bp, Homo sapiens
ctctggggactaggg

SEQ ID NO: 1116430 - DNA, 15 bp, Homo sapiens
gctctggggactagg

SEQ ID NO: 1116431 - DNA, 15 bp, Homo sapiens
agctctggggactag

SEQ ID NO: 1116432 - DNA, 15 bp, Homo sapiens
cagctctggggacta

SEQ ID NO: 1116433 - DNA, 15 bp, Homo sapiens
acagctctggggact

SEQ ID NO: 1116434 - DNA, 15 bp, Homo sapiens
gacagctctggggac

SEQ ID NO: 1116435 - DNA, 15 bp, Homo sapiens
ggacagctctgggga

SEQ ID NO: 1116436 - DNA, 15 bp, Homo sapiens
gggacagctctgggg

SEQ ID NO: 1116437 - DNA, 15 bp, Homo sapiens
tgggacagctctggg

SEQ ID NO: 1116438 - DNA, 15 bp, Homo sapiens
ctgggacagctctgg

SEQ ID NO: 1116439 - DNA, 15 bp, Homo sapiens
gctgggacagctctg

SEQ ID NO: 1116440 - DNA, 15 bp, Homo sapiens
ggctgggacagctct

SEQ ID NO: 1116441 - DNA, 15 bp, Homo sapiens
tggctgggacagctc

SEQ ID NO: 1116442 - DNA, 15 bp, Homo sapiens
gtggctgggacagct

SEQ ID NO: 1116443 - DNA, 15 bp, Homo sapiens
ggtggctgggacagc

SEQ ID NO: 1116444 - DNA, 15 bp, Homo sapiens
tggtggctgggacag

SEQ ID NO: 1116445 - DNA, 15 bp, Homo sapiens
ctggtggctgggaca

SEQ ID NO: 1116446 - DNA, 15 bp, Homo sapiens
gctggtggctgggac

SEQ ID NO: 1116447 - DNA, 15 bp, Homo sapiens
ggctggtggctggga

SEQ ID NO: 1116448 - DNA, 15 bp, Homo sapiens
gggctggtggctggg

SEQ ID NO: 1116449 - DNA, 15 bp, Homo sapiens
acagggctggtggct

SEQ ID NO: 1116450 - DNA, 15 bp, Homo sapiens
cacagggctggtggc

SEQ ID NO: 1116451 - DNA, 15 bp, Homo sapiens
tcacagggctggtgg

SEQ ID NO: 1116452 - DNA, 15 bp, Homo sapiens
gtcacagggctggtg

SEQ ID NO: 1116453 - DNA, 15 bp, Homo sapiens
tgtcacagggctggt

SEQ ID NO: 1116454 - DNA, 15 bp, Homo sapiens
atgtcacagggctgg

SEQ ID NO: 1116455 - DNA, 15 bp, Homo sapiens
gatgtcacagggctg

SEQ ID NO: 1116456 - DNA, 15 bp, Homo sapiens
cgatgtcacagggct

SEQ ID NO: 1116457 - DNA, 15 bp, Homo sapiens
acgatgtcacagggc

SEQ ID NO: 1116458 - DNA, 15 bp, Homo sapiens
tacgatgtcacaggg

SEQ ID NO: 1116459 - DNA, 15 bp, Homo sapiens
ctacgatgtcacagg

SEQ ID NO: 1116460 - DNA, 15 bp, Homo sapiens
gctacgatgtcacag

SEQ ID NO: 1116461 - DNA, 15 bp, Homo sapiens
ggctacgatgtcaca

SEQ ID NO: 1116462 - DNA, 15 bp, Homo sapiens
gggctacgatgtcac

SEQ ID NO: 1116463 - DNA, 15 bp, Homo sapiens
tgggctacgatgtca

SEQ ID NO: 1116464 - DNA, 15 bp, Homo sapiens
ctgggctacgatgtc

SEQ ID NO: 1116465 - DNA, 15 bp, Homo sapiens
tctgggctacgatgt

SEQ ID NO: 1116466 - DNA, 15 bp, Homo sapiens
ctctgggctacgatg

SEQ ID NO: 1116467 - DNA, 15 bp, Homo sapiens
tctctgggctacgat

SEQ ID NO: 1116468 - DNA, 15 bp, Homo sapiens
atctctgggctacga

SEQ ID NO: 1116469 - DNA, 15 bp, Homo sapiens
catctctgggctacg

SEQ ID NO: 1116470 - DNA, 15 bp, Homo sapiens
ccatctctgggctac

SEQ ID NO: 1116471 - DNA, 15 bp, Homo sapiens
cccatctctgggcta

SEQ ID NO: 1116472 - DNA, 15 bp, Homo sapiens
gcccatctctgggct

SEQ ID NO: 1116473 - DNA, 15 bp, Homo sapiens
agcccatctctgggc

SEQ ID NO: 1116474 - DNA, 15 bp, Homo sapiens
tagcccatctctggg

SEQ ID NO: 1116475 - DNA, 15 bp, Homo sapiens
ctagcccatctctgg

SEQ ID NO: 1116476 - DNA, 15 bp, Homo sapiens
actagcccatctctg

SEQ ID NO: 1116477 - DNA, 15 bp, Homo sapiens
gactagcccatctct

SEQ ID NO: 1116478 - DNA, 15 bp, Homo sapiens
tgactagcccatctc

SEQ ID NO: 1116479 - DNA, 15 bp, Homo sapiens
ctgactagcccatct

SEQ ID NO: 1116480 - DNA, 15 bp, Homo sapiens
gctgactagcccatc

SEQ ID NO: 1116481 - DNA, 15 bp, Homo sapiens
tgctgactagcccat

SEQ ID NO: 1116482 - DNA, 15 bp, Homo sapiens
ttgctgactagccca

SEQ ID NO: 1116483 - DNA, 15 bp, Homo sapiens
cttgctgactagccc

SEQ ID NO: 1116484 - DNA, 15 bp, Homo sapiens
gcttgctgactagcc

SEQ ID NO: 1116485 - DNA, 15 bp, Homo sapiens
tgcttgctgactagc

SEQ ID NO: 1116486 - DNA, 15 bp, Homo sapiens
ctgcttgctgactag

SEQ ID NO: 1116487 - DNA, 15 bp, Homo sapiens
gctgcttgctgacta

SEQ ID NO: 1116488 - DNA, 15 bp, Homo sapiens
tgctgcttgctgact

SEQ ID NO: 1116489 - DNA, 15 bp, Homo sapiens
gtgctgcttgctgac

SEQ ID NO: 1116490 - DNA, 15 bp, Homo sapiens
ggtgctgcttgctga

SEQ ID NO: 1116491 - DNA, 15 bp, Homo sapiens
gggtgctgcttgctg

SEQ ID NO: 1116492 - DNA, 15 bp, Homo sapiens
ggggtgctgcttgct

SEQ ID NO: 1116493 - DNA, 15 bp, Homo sapiens
gggggtgctgcttgc

SEQ ID NO: 1116494 - DNA, 15 bp, Homo sapiens
agggggtgctgcttg

SEQ ID NO: 1116495 - DNA, 15 bp, Homo sapiens
gagggggtgctgctt

SEQ ID NO: 1116496 - DNA, 15 bp, Homo sapiens
ggagggggtgctgct

SEQ ID NO: 1116497 - DNA, 15 bp, Homo sapiens
gggagggggtgctgc

SEQ ID NO: 1116498 - DNA, 15 bp, Homo sapiens
ggggagggggtgctg

SEQ ID NO: 1116499 - DNA, 15 bp, Homo sapiens
aggggagggggtgct

SEQ ID NO: 1116500 - DNA, 15 bp, Homo sapiens
gaggggagggggtgc

SEQ ID NO: 1116501 - DNA, 15 bp, Homo sapiens
ggaggggagggggtg

SEQ ID NO: 1116502 - DNA, 15 bp, Homo sapiens
gggaggggagggggt

SEQ ID NO: 1116503 - DNA, 15 bp, Homo sapiens
tgggaggggaggggg

SEQ ID NO: 1116504 - DNA, 15 bp, Homo sapiens
ctgggaggggagggg

SEQ ID NO: 1116505 - DNA, 15 bp, Homo sapiens
cctgggaggggaggg

SEQ ID NO: 1116506 - DNA, 15 bp, Homo sapiens
ccctgggaggggagg

SEQ ID NO: 1116507 - DNA, 15 bp, Homo sapiens
cccctgggaggggag

SEQ ID NO: 1116508 - DNA, 15 bp, Homo sapiens
acccctgggagggga

SEQ ID NO: 1116509 - DNA, 15 bp, Homo sapiens
gacccctgggagggg

SEQ ID NO: 1116510 - DNA, 15 bp, Homo sapiens
ggacccctgggaggg

SEQ ID NO: 1116511 - DNA, 15 bp, Homo sapiens
tggacccctgggagg

SEQ ID NO: 1116512 - DNA, 15 bp, Homo sapiens
gtggacccctgggag

SEQ ID NO: 1116513 - DNA, 15 bp, Homo sapiens
tgtggacccctggga

SEQ ID NO: 1116514 - DNA, 15 bp, Homo sapiens
ttgtggacccctggg

SEQ ID NO: 1116515 - DNA, 15 bp, Homo sapiens
tttgtggacccctgg

SEQ ID NO: 1116516 - DNA, 15 bp, Homo sapiens
ctttgtggacccctg

SEQ ID NO: 1116517 - DNA, 15 bp, Homo sapiens
tctttgtggacccct

SEQ ID NO: 1116518 - DNA, 15 bp, Homo sapiens
ttctttgtggacccc

SEQ ID NO: 1116519 - DNA, 15 bp, Homo sapiens
gttctttgtggaccc

SEQ ID NO: 1116520 - DNA, 15 bp, Homo sapiens
cgttctttgtggacc

SEQ ID NO: 1116521 - DNA, 15 bp, Homo sapiens
gcgttctttgtggac

SEQ ID NO: 1116522 - DNA, 15 bp, Homo sapiens
ggcgttctttgtgga

SEQ ID NO: 1116523 - DNA, 15 bp, Homo sapiens
gggcgttctttgtgg

SEQ ID NO: 1116524 - DNA, 15 bp, Homo sapiens
ggggcgttctttgtg

SEQ ID NO: 1116525 - DNA, 15 bp, Homo sapiens
gggggcgttctttgt

SEQ ID NO: 1116526 - DNA, 15 bp, Homo sapiens
agggggcgttctttg

SEQ ID NO: 1116527 - DNA, 15 bp, Homo sapiens
gagggggcgttcttt

SEQ ID NO: 1116528 - DNA, 15 bp, Homo sapiens
ggagggggcgttctt

SEQ ID NO: 1116529 - DNA, 15 bp, Homo sapiens
gggagggggcgttct

SEQ ID NO: 1116530 - DNA, 15 bp, Homo sapiens
agggagggggcgttc

SEQ ID NO: 1116531 - DNA, 15 bp, Homo sapiens
aagggagggggcgtt

SEQ ID NO: 1116532 - DNA, 15 bp, Homo sapiens
gaagggagggggcgt

SEQ ID NO: 1116533 - DNA, 15 bp, Homo sapiens
ggaagggagggggcg

SEQ ID NO: 1116534 - DNA, 15 bp, Homo sapiens
gggaagggagggggc

SEQ ID NO: 1116535 - DNA, 15 bp, Homo sapiens
tgggaagggaggggg

SEQ ID NO: 1116536 - DNA, 15 bp, Homo sapiens
ctgggaagggagggg

SEQ ID NO: 1116537 - DNA, 15 bp, Homo sapiens
gctgggaagggaggg

SEQ ID NO: 1116538 - DNA, 15 bp, Homo sapiens
ggctgggaagggagg

SEQ ID NO: 1116539 - DNA, 15 bp, Homo sapiens
gggctgggaagggag

SEQ ID NO: 1116540 - DNA, 15 bp, Homo sapiens
agggctgggaaggga

SEQ ID NO: 1116541 - DNA, 15 bp, Homo sapiens
gagggctgggaaggg

SEQ ID NO: 1116542 - DNA, 15 bp, Homo sapiens
tgagggctgggaagg

SEQ ID NO: 1116543 - DNA, 15 bp, Homo sapiens
gtgagggctgggaag

SEQ ID NO: 1116544 - DNA, 15 bp, Homo sapiens
tgtgagggctgggaa

SEQ ID NO: 1116545 - DNA, 15 bp, Homo sapiens
gtgtgagggctggga

SEQ ID NO: 1116546 - DNA, 15 bp, Homo sapiens
agtgtgagggctggg

SEQ ID NO: 1116547 - DNA, 15 bp, Homo sapiens
tagtgtgagggctgg

SEQ ID NO: 1116548 - DNA, 15 bp, Homo sapiens
ctagtgtgagggctg

SEQ ID NO: 1116549 - DNA, 15 bp, Homo sapiens
gctagtgtgagggct

SEQ ID NO: 1116550 - DNA, 15 bp, Homo sapiens
tgctagtgtgagggc

SEQ ID NO: 1116551 - DNA, 15 bp, Homo sapiens
ctgctagtgtgaggg

SEQ ID NO: 1116552 - DNA, 15 bp, Homo sapiens
gctgctagtgtgagg

SEQ ID NO: 1116553 - DNA, 15 bp, Homo sapiens
agctgctagtgtgag

SEQ ID NO: 1116554 - DNA, 15 bp, Homo sapiens
cagctgctagtgtga

SEQ ID NO: 1116555 - DNA, 15 bp, Homo sapiens
tcagctgctagtgtg

SEQ ID NO: 1116556 - DNA, 15 bp, Homo sapiens
ctcagctgctagtgt

SEQ ID NO: 1116557 - DNA, 15 bp, Homo sapiens
cctcagctgctagtg

SEQ ID NO: 1116558 - DNA, 15 bp, Homo sapiens
gcctcagctgctagt

SEQ ID NO: 1116559 - DNA, 15 bp, Homo sapiens
agcctcagctgctag

SEQ ID NO: 1116560 - DNA, 15 bp, Homo sapiens
cagcctcagctgcta

SEQ ID NO: 1116561 - DNA, 15 bp, Homo sapiens
ccagcctcagctgct

SEQ ID NO: 1116562 - DNA, 15 bp, Homo sapiens
cccagcctcagctgc

SEQ ID NO: 1116563 - DNA, 15 bp, Homo sapiens
acccagcctcagctg

SEQ ID NO: 1116564 - DNA, 15 bp, Homo sapiens
gacccagcctcagct

SEQ ID NO: 1116565 - DNA, 15 bp, Homo sapiens
tgacccagcctcagc

SEQ ID NO: 1116566 - DNA, 15 bp, Homo sapiens
gtgacccagcctcag

SEQ ID NO: 1116567 - DNA, 15 bp, Homo sapiens
ggtgacccagcctca

SEQ ID NO: 1116568 - DNA, 15 bp, Homo sapiens
gggtgacccagcctc

SEQ ID NO: 1116569 - DNA, 15 bp, Homo sapiens
ggggtgacccagcct

SEQ ID NO: 1116570 - DNA, 15 bp, Homo sapiens
aggggtgacccagcc

SEQ ID NO: 1116571 - DNA, 15 bp, Homo sapiens
gaggggtgacccagc

SEQ ID NO: 1116572 - DNA, 15 bp, Homo sapiens
ggaggggtgacccag

SEQ ID NO: 1116573 - DNA, 15 bp, Homo sapiens
aggaggggtgaccca

SEQ ID NO: 1116574 - DNA, 15 bp, Homo sapiens
caggaggggtgaccc

SEQ ID NO: 1116575 - DNA, 15 bp, Homo sapiens
gcaggaggggtgacc

SEQ ID NO: 1116576 - DNA, 15 bp, Homo sapiens
agcaggaggggtgac

SEQ ID NO: 1116577 - DNA, 15 bp, Homo sapiens
aagcaggaggggtga

SEQ ID NO: 1116578 - DNA, 15 bp, Homo sapiens
aaagcaggaggggtg

SEQ ID NO: 1116579 - DNA, 15 bp, Homo sapiens
gaaagcaggaggggt

SEQ ID NO: 1116580 - DNA, 15 bp, Homo sapiens
ggaaagcaggagggg

SEQ ID NO: 1116581 - DNA, 15 bp, Homo sapiens
gggaaagcaggaggg

SEQ ID NO: 1116582 - DNA, 15 bp, Homo sapiens
tgggaaagcaggagg

SEQ ID NO: 1116583 - DNA, 15 bp, Homo sapiens
gtgggaaagcaggag

SEQ ID NO: 1116584 - DNA, 15 bp, Homo sapiens
tgtgggaaagcagga

SEQ ID NO: 1116585 - DNA, 15 bp, Homo sapiens
ttgtgggaaagcagg

SEQ ID NO: 1116586 - DNA, 15 bp, Homo sapiens
attgtgggaaagcag

SEQ ID NO: 1116587 - DNA, 15 bp, Homo sapiens
tattgtgggaaagca

SEQ ID NO: 1116588 - DNA, 15 bp, Homo sapiens
ctattgtgggaaagc

SEQ ID NO: 1116589 - DNA, 15 bp, Homo sapiens
tctattgtgggaaag

SEQ ID NO: 1116590 - DNA, 15 bp, Homo sapiens
ctctattgtgggaaa

SEQ ID NO: 1116591 - DNA, 15 bp, Homo sapiens
gctctattgtgggaa

SEQ ID NO: 1116592 - DNA, 15 bp, Homo sapiens
agctctattgtggga

SEQ ID NO: 1116593 - DNA, 15 bp, Homo sapiens
aagctctattgtggg

SEQ ID NO: 1116594 - DNA, 15 bp, Homo sapiens
aaagctctattgtgg

SEQ ID NO: 1116595 - DNA, 15 bp, Homo sapiens
gaaagctctattgtg

SEQ ID NO: 1116596 - DNA, 15 bp, Homo sapiens
agaaagctctattgt

SEQ ID NO: 1116597 - DNA, 15 bp, Homo sapiens
tagaaagctctattg

SEQ ID NO: 1116598 - DNA, 15 bp, Homo sapiens
atagaaagctctatt

SEQ ID NO: 1116599 - DNA, 15 bp, Homo sapiens
catagaaagctctat

SEQ ID NO: 1116600 - DNA, 15 bp, Homo sapiens
acatagaaagctcta

SEQ ID NO: 1116601 - DNA, 15 bp, Homo sapiens
tacatagaaagctct

SEQ ID NO: 1116602 - DNA, 15 bp, Homo sapiens
gtacatagaaagctc

SEQ ID NO: 1116603 - DNA, 15 bp, Homo sapiens
tgtacatagaaagct

SEQ ID NO: 1116604 - DNA, 15 bp, Homo sapiens
ctgtacatagaaagc

SEQ ID NO: 1116605 - DNA, 15 bp, Homo sapiens
gctgtacatagaaag

SEQ ID NO: 1116606 - DNA, 15 bp, Homo sapiens
ggctgtacatagaaa

SEQ ID NO: 1116607 - DNA, 15 bp, Homo sapiens
tggctgtacatagaa

SEQ ID NO: 1116608 - DNA, 15 bp, Homo sapiens
gtggctgtacataga

SEQ ID NO: 1116609 - DNA, 15 bp, Homo sapiens
cgtggctgtacatag

SEQ ID NO: 1116610 - DNA, 15 bp, Homo sapiens
acgtggctgtacata

SEQ ID NO: 1116611 - DNA, 15 bp, Homo sapiens
gacgtggctgtacat

SEQ ID NO: 1116612 - DNA, 15 bp, Homo sapiens
agacgtggctgtaca

SEQ ID NO: 1116613 - DNA, 15 bp, Homo sapiens
tagacgtggctgtac

SEQ ID NO: 1116614 - DNA, 15 bp, Homo sapiens
gtagacgtggctgta

SEQ ID NO: 1116615 - DNA, 15 bp, Homo sapiens
tgtagacgtggctgt

SEQ ID NO: 1116616 - DNA, 15 bp, Homo sapiens
gtgtagacgtggctg

SEQ ID NO: 1116617 - DNA, 15 bp, Homo sapiens
tgtgtagacgtggct

SEQ ID NO: 1116618 - DNA, 15 bp, Homo sapiens
ctgtgtagacgtggc

SEQ ID NO: 1116619 - DNA, 15 bp, Homo sapiens
cctgtgtagacgtgg

SEQ ID NO: 1116620 - DNA, 15 bp, Homo sapiens
gcctgtgtagacgtg

SEQ ID NO: 1116621 - DNA, 15 bp, Homo sapiens
tgcctgtgtagacgt

SEQ ID NO: 1116622 - DNA, 15 bp, Homo sapiens
gtgcctgtgtagacg

SEQ ID NO: 1116623 - DNA, 15 bp, Homo sapiens
agtgcctgtgtagac

SEQ ID NO: 1116624 - DNA, 15 bp, Homo sapiens
cagtgcctgtgtaga

SEQ ID NO: 1116625 - DNA, 15 bp, Homo sapiens
gcagtgcctgtgtag

SEQ ID NO: 1116626 - DNA, 15 bp, Homo sapiens
agcagtgcctgtgta

SEQ ID NO: 1116627 - DNA, 15 bp, Homo sapiens
aagcagtgcctgtgt

SEQ ID NO: 1116628 - DNA, 15 bp, Homo sapiens
gaagcagtgcctgtg

SEQ ID NO: 1116629 - DNA, 15 bp, Homo sapiens
ggaagcagtgcctgt

SEQ ID NO: 1116630 - DNA, 15 bp, Homo sapiens
gggaagcagtgcctg

SEQ ID NO: 1116631 - DNA, 15 bp, Homo sapiens
ggggaagcagtgcct

SEQ ID NO: 1116632 - DNA, 15 bp, Homo sapiens
gggggaagcagtgcc

SEQ ID NO: 1116633 - DNA, 15 bp, Homo sapiens
ggggggaagcagtgc

SEQ ID NO: 1116634 - DNA, 15 bp, Homo sapiens
tggggggaagcagtg

SEQ ID NO: 1116635 - DNA, 15 bp, Homo sapiens
ctggggggaagcagt

SEQ ID NO: 1116636 - DNA, 15 bp, Homo sapiens
gctggggggaagcag

SEQ ID NO: 1116637 - DNA, 15 bp, Homo sapiens
ggctggggggaagca

SEQ ID NO: 1116638 - DNA, 15 bp, Homo sapiens
gggctggggggaagc

SEQ ID NO: 1116639 - DNA, 15 bp, Homo sapiens
agggctggggggaag

SEQ ID NO: 1116640 - DNA, 15 bp, Homo sapiens
gagggctggggggaa

SEQ ID NO: 1116641 - DNA, 15 bp, Homo sapiens
ggagggctgggggga

SEQ ID NO: 1116642 - DNA, 15 bp, Homo sapiens
aggagggctgggggg

SEQ ID NO: 1116643 - DNA, 15 bp, Homo sapiens
gaggagggctggggg

SEQ ID NO: 1116644 - DNA, 15 bp, Homo sapiens
ggaggagggctgggg

SEQ ID NO: 1116645 - DNA, 15 bp, Homo sapiens
gggaggagggctggg

SEQ ID NO: 1116646 - DNA, 15 bp, Homo sapiens
ggggaggagggctgg

SEQ ID NO: 1116647 - DNA, 15 bp, Homo sapiens
cggggaggagggctg

SEQ ID NO: 1116648 - DNA, 15 bp, Homo sapiens
ccggggaggagggct

SEQ ID NO: 1116649 - DNA, 15 bp, Homo sapiens
gccggggaggagggc

SEQ ID NO: 1116650 - DNA, 15 bp, Homo sapiens
tgccggggaggaggg

SEQ ID NO: 1116651 - DNA, 15 bp, Homo sapiens
gtgccggggaggagg

SEQ ID NO: 1116652 - DNA, 15 bp, Homo sapiens
ggtgccggggaggag

SEQ ID NO: 1116653 - DNA, 15 bp, Homo sapiens
aggtgccggggagga

SEQ ID NO: 1116654 - DNA, 15 bp, Homo sapiens
gaggtgccggggagg

SEQ ID NO: 1116655 - DNA, 15 bp, Homo sapiens
ggaggtgccggggag

SEQ ID NO: 1116656 - DNA, 15 bp, Homo sapiens
gggaggtgccgggga

SEQ ID NO: 1116657 - DNA, 15 bp, Homo sapiens
ggggaggtgccgggg

SEQ ID NO: 1116658 - DNA, 15 bp, Homo sapiens
cggggaggtgccggg

SEQ ID NO: 1116659 - DNA, 15 bp, Homo sapiens
acggggaggtgccgg

SEQ ID NO: 1116660 - DNA, 15 bp, Homo sapiens
cacggggaggtgccg

SEQ ID NO: 1116661 - DNA, 15 bp, Homo sapiens
ccacggggaggtgcc

SEQ ID NO: 1116662 - DNA, 15 bp, Homo sapiens
cccacggggaggtgc

SEQ ID NO: 1116663 - DNA, 15 bp, Homo sapiens
ccccacggggaggtg

SEQ ID NO: 1116664 - DNA, 15 bp, Homo sapiens
cccccacggggaggt

SEQ ID NO: 1116665 - DNA, 15 bp, Homo sapiens
acccccacggggagg

SEQ ID NO: 1116666 - DNA, 15 bp, Homo sapiens
gacccccacggggag

SEQ ID NO: 1116667 - DNA, 15 bp, Homo sapiens
agacccccacgggga

SEQ ID NO: 1116668 - DNA, 15 bp, Homo sapiens
cagacccccacgggg

SEQ ID NO: 1116669 - DNA, 15 bp, Homo sapiens
ccagacccccacggg

SEQ ID NO: 1116670 - DNA, 15 bp, Homo sapiens
tccagacccccacgg

SEQ ID NO: 1116671 - DNA, 15 bp, Homo sapiens
gtccagacccccacg

SEQ ID NO: 1116672 - DNA, 15 bp, Homo sapiens
ggtccagacccccac

SEQ ID NO: 1116673 - DNA, 15 bp, Homo sapiens
gggtccagaccccca

SEQ ID NO: 1116674 - DNA, 15 bp, Homo sapiens
ggggtccagaccccc

SEQ ID NO: 1116675 - DNA, 15 bp, Homo sapiens
gggggtccagacccc

SEQ ID NO: 1116676 - DNA, 15 bp, Homo sapiens
ggggggtccagaccc

SEQ ID NO: 1116677 - DNA, 15 bp, Homo sapiens
gggggggtccagacc

SEQ ID NO: 1116678 - DNA, 15 bp, Homo sapiens
agggggggtccagac

SEQ ID NO: 1116679 - DNA, 15 bp, Homo sapiens
gagggggggtccaga

SEQ ID NO: 1116680 - DNA, 15 bp, Homo sapiens
ggagggggggtccag

SEQ ID NO: 1116681 - DNA, 15 bp, Homo sapiens
aggagggggggtcca

SEQ ID NO: 1116682 - DNA, 15 bp, Homo sapiens
gaggagggggggtcc

SEQ ID NO: 1116683 - DNA, 15 bp, Homo sapiens
ggaggagggggggtc

SEQ ID NO: 1116684 - DNA, 15 bp, Homo sapiens
gggaggagggggggt

SEQ ID NO: 1116685 - DNA, 15 bp, Homo sapiens
ggggaggaggggggg

SEQ ID NO: 1116686 - DNA, 15 bp, Homo sapiens
cggggaggagggggg

SEQ ID NO: 1116687 - DNA, 15 bp, Homo sapiens
ccggggaggaggggg

SEQ ID NO: 1116688 - DNA, 15 bp, Homo sapiens
gccggggaggagggg

SEQ ID NO: 1116689 - DNA, 15 bp, Homo sapiens
agccggggaggaggg

SEQ ID NO: 1116690 - DNA, 15 bp, Homo sapiens
aagccggggaggagg

SEQ ID NO: 1116691 - DNA, 15 bp, Homo sapiens
caagccggggaggag

SEQ ID NO: 1116692 - DNA, 15 bp, Homo sapiens
ccaagccggggagga

SEQ ID NO: 1116693 - DNA, 15 bp, Homo sapiens
tccaagccggggagg

SEQ ID NO: 1116694 - DNA, 15 bp, Homo sapiens
ctccaagccggggag

SEQ ID NO: 1116695 - DNA, 15 bp, Homo sapiens
cctccaagccgggga

SEQ ID NO: 1116696 - DNA, 15 bp, Homo sapiens
gcctccaagccgggg

SEQ ID NO: 1116697 - DNA, 15 bp, Homo sapiens
tgcctccaagccggg

SEQ ID NO: 1116698 - DNA, 15 bp, Homo sapiens
ctgcctccaagccgg

SEQ ID NO: 1116699 - DNA, 15 bp, Homo sapiens
tctgcctccaagccg

SEQ ID NO: 1116700 - DNA, 15 bp, Homo sapiens
gtctgcctccaagcc

SEQ ID NO: 1116701 - DNA, 15 bp, Homo sapiens
tgtctgcctccaagc

SEQ ID NO: 1116702 - DNA, 15 bp, Homo sapiens
gtgtctgcctccaag

SEQ ID NO: 1116703 - DNA, 15 bp, Homo sapiens
tgtgtctgcctccaa

SEQ ID NO: 1116704 - DNA, 15 bp, Homo sapiens
ctgtgtctgcctcca

SEQ ID NO: 1116705 - DNA, 15 bp, Homo sapiens
cctgtgtctgcctcc

SEQ ID NO: 1116706 - DNA, 15 bp, Homo sapiens
ccctgtgtctgcctc

SEQ ID NO: 1116707 - DNA, 15 bp, Homo sapiens
accctgtgtctgcct

SEQ ID NO: 1116708 - DNA, 15 bp, Homo sapiens
gaccctgtgtctgcc

SEQ ID NO: 1116709 - DNA, 15 bp, Homo sapiens
ggaccctgtgtctgc

SEQ ID NO: 1116710 - DNA, 15 bp, Homo sapiens
gggaccctgtgtctg

SEQ ID NO: 1116711 - DNA, 15 bp, Homo sapiens
agggaccctgtgtct

SEQ ID NO: 1116712 - DNA, 15 bp, Homo sapiens
aagggaccctgtgtc

SEQ ID NO: 1116713 - DNA, 15 bp, Homo sapiens
caagggaccctgtgt

SEQ ID NO: 1116714 - DNA, 15 bp, Homo sapiens
gcaagggaccctgtg

SEQ ID NO: 1116715 - DNA, 15 bp, Homo sapiens
tgcaagggaccctgt

SEQ ID NO: 1116716 - DNA, 15 bp, Homo sapiens
ttgcaagggaccctg

SEQ ID NO: 1116717 - DNA, 15 bp, Homo sapiens
cttgcaagggaccct

SEQ ID NO: 1116718 - DNA, 15 bp, Homo sapiens
tcttgcaagggaccc

SEQ ID NO: 1116719 - DNA, 15 bp, Homo sapiens
gtcttgcaagggacc

SEQ ID NO: 1116720 - DNA, 15 bp, Homo sapiens
tgtcttgcaagggac

SEQ ID NO: 1116721 - DNA, 15 bp, Homo sapiens
gtgtcttgcaaggga

SEQ ID NO: 1116722 - DNA, 15 bp, Homo sapiens
cgtgtcttgcaaggg

SEQ ID NO: 1116723 - DNA, 15 bp, Homo sapiens
tcgtgtcttgcaagg

SEQ ID NO: 1116724 - DNA, 15 bp, Homo sapiens
gtcgtgtcttgcaag

SEQ ID NO: 1116725 - DNA, 15 bp, Homo sapiens
ggtcgtgtcttgcaa

SEQ ID NO: 1116726 - DNA, 15 bp, Homo sapiens
gggtcgtgtcttgca

SEQ ID NO: 1116727 - DNA, 15 bp, Homo sapiens
tgggtcgtgtcttgc

SEQ ID NO: 1116728 - DNA, 15 bp, Homo sapiens
ctgggtcgtgtcttg

SEQ ID NO: 1116729 - DNA, 15 bp, Homo sapiens
gctgggtcgtgtctt

SEQ ID NO: 1116730 - DNA, 15 bp, Homo sapiens
tgctgggtcgtgtct

SEQ ID NO: 1116731 - DNA, 15 bp, Homo sapiens
gtgctgggtcgtgtc

SEQ ID NO: 1116732 - DNA, 15 bp, Homo sapiens
ggtgctgggtcgtgt

SEQ ID NO: 1116733 - DNA, 15 bp, Homo sapiens
tggtgctgggtcgtg

SEQ ID NO: 1116734 - DNA, 15 bp, Homo sapiens
ttggtgctgggtcgt

SEQ ID NO: 1116735 - DNA, 15 bp, Homo sapiens
gttggtgctgggtcg

SEQ ID NO: 1116736 - DNA, 15 bp, Homo sapiens
ggttggtgctgggtc

SEQ ID NO: 1116737 - DNA, 15 bp, Homo sapiens
tggttggtgctgggt

SEQ ID NO: 1116738 - DNA, 15 bp, Homo sapiens
gtggttggtgctggg

SEQ ID NO: 1116739 - DNA, 15 bp, Homo sapiens
cgtggttggtgctgg

SEQ ID NO: 1116740 - DNA, 15 bp, Homo sapiens
ccgtggttggtgctg

SEQ ID NO: 1116741 - DNA, 15 bp, Homo sapiens
tccgtggttggtgct

SEQ ID NO: 1116742 - DNA, 15 bp, Homo sapiens
ttccgtggttggtgc

SEQ ID NO: 1116743 - DNA, 15 bp, Homo sapiens
gttccgtggttggtg

SEQ ID NO: 1116744 - DNA, 15 bp, Homo sapiens
tgttccgtggttggt

SEQ ID NO: 1116745 - DNA, 15 bp, Homo sapiens
ctgttccgtggttgg

SEQ ID NO: 1116746 - DNA, 15 bp, Homo sapiens
gctgttccgtggttg

SEQ ID NO: 1116747 - DNA, 15 bp, Homo sapiens
agctgttccgtggtt

SEQ ID NO: 1116748 - DNA, 15 bp, Homo sapiens
gagctgttccgtggt

SEQ ID NO: 1116749 - DNA, 15 bp, Homo sapiens
ggagctgttccgtgg

SEQ ID NO: 1116750 - DNA, 15 bp, Homo sapiens
tggagctgttccgtg

SEQ ID NO: 1116751 - DNA, 15 bp, Homo sapiens
ttggagctgttccgt

SEQ ID NO: 1116752 - DNA, 15 bp, Homo sapiens
cttggagctgttccg

SEQ ID NO: 1116753 - DNA, 15 bp, Homo sapiens
ccttggagctgttcc

SEQ ID NO: 1116754 - DNA, 15 bp, Homo sapiens
gccttggagctgttc

SEQ ID NO: 1116755 - DNA, 15 bp, Homo sapiens
ggccttggagctgtt

SEQ ID NO: 1116756 - DNA, 15 bp, Homo sapiens
gggccttggagctgt

SEQ ID NO: 1116757 - DNA, 15 bp, Homo sapiens
ggggccttggagctg

SEQ ID NO: 1116758 - DNA, 15 bp, Homo sapiens
aggggccttggagct

SEQ ID NO: 1116759 - DNA, 15 bp, Homo sapiens
caggggccttggagc

SEQ ID NO: 1116760 - DNA, 15 bp, Homo sapiens
ccaggggccttggag

SEQ ID NO: 1116761 - DNA, 15 bp, Homo sapiens
cccaggggccttgga

SEQ ID NO: 1116762 - DNA, 15 bp, Homo sapiens
gcccaggggccttgg

SEQ ID NO: 1116763 - DNA, 15 bp, Homo sapiens
ggcccaggggccttg

SEQ ID NO: 1116764 - DNA, 15 bp, Homo sapiens
gggcccaggggcctt

SEQ ID NO: 1116765 - DNA, 15 bp, Homo sapiens
ggggcccaggggcct

SEQ ID NO: 1116766 - DNA, 15 bp, Homo sapiens
aggggcccaggggcc

SEQ ID NO: 1116767 - DNA, 15 bp, Homo sapiens
gaggggcccaggggc

SEQ ID NO: 1116768 - DNA, 15 bp, Homo sapiens
agaggggcccagggg

SEQ ID NO: 1116769 - DNA, 15 bp, Homo sapiens
ggagaggggcccagg

SEQ ID NO: 1116770 - DNA, 15 bp, Homo sapiens
cggagaggggcccag

SEQ ID NO: 1116771 - DNA, 15 bp, Homo sapiens
ccggagaggggccca

SEQ ID NO: 1116772 - DNA, 15 bp, Homo sapiens
gccggagaggggccc

SEQ ID NO: 1116773 - DNA, 15 bp, Homo sapiens
ggccggagaggggcc

SEQ ID NO: 1116774 - DNA, 15 bp, Homo sapiens
aggccggagaggggc

SEQ ID NO: 1116775 - DNA, 15 bp, Homo sapiens
caggccggagagggg

SEQ ID NO: 1116776 - DNA, 15 bp, Homo sapiens
ccaggccggagaggg

SEQ ID NO: 1116777 - DNA, 15 bp, Homo sapiens
cccaggccggagagg

SEQ ID NO: 1116778 - DNA, 15 bp, Homo sapiens
ccccaggccggagag

SEQ ID NO: 1116779 - DNA, 15 bp, Homo sapiens
gccccaggccggaga

SEQ ID NO: 1116780 - DNA, 15 bp, Homo sapiens
agccccaggccggag

SEQ ID NO: 1116781 - DNA, 15 bp, Homo sapiens
cagccccaggccgga

SEQ ID NO: 1116782 - DNA, 15 bp, Homo sapiens
ccagccccaggccgg

SEQ ID NO: 1116783 - DNA, 15 bp, Homo sapiens
cccagccccaggccg

SEQ ID NO: 1116784 - DNA, 15 bp, Homo sapiens
tcccagccccaggcc

SEQ ID NO: 1116785 - DNA, 15 bp, Homo sapiens
ctcccagccccaggc

SEQ ID NO: 1116786 - DNA, 15 bp, Homo sapiens
gctcccagccccagg

SEQ ID NO: 1116787 - DNA, 15 bp, Homo sapiens
tagctcccagcccca

SEQ ID NO: 1116788 - DNA, 15 bp, Homo sapiens
gtagctcccagcccc

SEQ ID NO: 1116789 - DNA, 15 bp, Homo sapiens
cgtagctcccagccc

SEQ ID NO: 1116790 - DNA, 15 bp, Homo sapiens
gcgtagctcccagcc

SEQ ID NO: 1116791 - DNA, 15 bp, Homo sapiens
cgcgtagctcccagc

SEQ ID NO: 1116792 - DNA, 15 bp, Homo sapiens
gcgcgtagctcccag

SEQ ID NO: 1116793 - DNA, 15 bp, Homo sapiens
cgcgcgtagctccca

SEQ ID NO: 1116794 - DNA, 15 bp, Homo sapiens
tcgcgcgtagctccc

SEQ ID NO: 1116795 - DNA, 15 bp, Homo sapiens
ctcgcgcgtagctcc

SEQ ID NO: 1116796 - DNA, 15 bp, Homo sapiens
cctcgcgcgtagctc

SEQ ID NO: 1116797 - DNA, 15 bp, Homo sapiens
ccctcgcgcgtagct

SEQ ID NO: 1116798 - DNA, 15 bp, Homo sapiens
gccctcgcgcgtagc

SEQ ID NO: 1116799 - DNA, 15 bp, Homo sapiens
ggccctcgcgcgtag

SEQ ID NO: 1116800 - DNA, 15 bp, Homo sapiens
gggccctcgcgcgta

SEQ ID NO: 1116801 - DNA, 15 bp, Homo sapiens
ggggccctcgcgcgt

SEQ ID NO: 1116802 - DNA, 15 bp, Homo sapiens
gggggccctcgcgcg

SEQ ID NO: 1116803 - DNA, 15 bp, Homo sapiens
cgggggccctcgcgc

SEQ ID NO: 1116804 - DNA, 15 bp, Homo sapiens
gcgggggccctcgcg

SEQ ID NO: 1116805 - DNA, 15 bp, Homo sapiens
cgcgggggccctcgc

SEQ ID NO: 1116806 - DNA, 15 bp, Homo sapiens
ccgcgggggccctcg

SEQ ID NO: 1116807 - DNA, 15 bp, Homo sapiens
cccgcgggggccctc

SEQ ID NO: 1116808 - DNA, 15 bp, Homo sapiens
gcccgcgggggccct

SEQ ID NO: 1116809 - DNA, 15 bp, Homo sapiens
ggcccgcgggggccc

SEQ ID NO: 1116810 - DNA, 15 bp, Homo sapiens
gggcccgcgggggcc

SEQ ID NO: 1116811 - DNA, 15 bp, Homo sapiens
ggggcccgcgggggc

SEQ ID NO: 1116812 - DNA, 15 bp, Homo sapiens
gggggcccgcggggg

SEQ ID NO: 1116813 - DNA, 15 bp, Homo sapiens
cgggggcccgcgggg

SEQ ID NO: 1116814 - DNA, 15 bp, Homo sapiens
ccgggggcccgcggg

SEQ ID NO: 1116815 - DNA, 15 bp, Homo sapiens
cccgggggcccgcgg

SEQ ID NO: 1116816 - DNA, 15 bp, Homo sapiens
ccccgggggcccgcg

SEQ ID NO: 1116817 - DNA, 15 bp, Homo sapiens
gccccgggggcccgc

SEQ ID NO: 1116818 - DNA, 15 bp, Homo sapiens
cgccccgggggcccg

SEQ ID NO: 1116819 - DNA, 15 bp, Homo sapiens
gcgccccgggggccc

SEQ ID NO: 1116820 - DNA, 15 bp, Homo sapiens
cgcgccccgggggcc

SEQ ID NO: 1116821 - DNA, 15 bp, Homo sapiens
gcgcgccccgggggc

SEQ ID NO: 1116822 - DNA, 15 bp, Homo sapiens
tgcgcgccccggggg

SEQ ID NO: 1116823 - DNA, 15 bp, Homo sapiens
gtgcgcgccccgggg

SEQ ID NO: 1116824 - DNA, 15 bp, Homo sapiens
ggtgcgcgccccggg

SEQ ID NO: 1116825 - DNA, 15 bp, Homo sapiens
gggtgcgcgccccgg

SEQ ID NO: 1116826 - DNA, 15 bp, Homo sapiens
agggtgcgcgccccg

SEQ ID NO: 1116827 - DNA, 15 bp, Homo sapiens
cagggtgcgcgcccc

SEQ ID NO: 1116828 - DNA, 15 bp, Homo sapiens
ccagggtgcgcgccc

SEQ ID NO: 1116829 - DNA, 15 bp, Homo sapiens
ggcaaatcgtgcctc

SEQ ID NO: 1116830 - DNA, 15 bp, Homo sapiens
aggcaaatcgtgcct

SEQ ID NO: 1116831 - DNA, 15 bp, Homo sapiens
taggcaaatcgtgcc

SEQ ID NO: 1116832 - DNA, 15 bp, Homo sapiens
ataggcaaatcgtgc

SEQ ID NO: 1116833 - DNA, 15 bp, Homo sapiens
aataggcaaatcgtg

SEQ ID NO: 1116834 - DNA, 15 bp, Homo sapiens
aaataggcaaatcgt

SEQ ID NO: 1116835 - DNA, 15 bp, Homo sapiens
gaaataggcaaatcg

SEQ ID NO: 1116836 - DNA, 15 bp, Homo sapiens
ggaaataggcaaatc

SEQ ID NO: 1116837 - DNA, 15 bp, Homo sapiens
gggaaataggcaaat

SEQ ID NO: 1116838 - DNA, 15 bp, Homo sapiens
tgggaaataggcaaa

SEQ ID NO: 1116839 - DNA, 15 bp, Homo sapiens
ctgggaaataggcaa

SEQ ID NO: 1116840 - DNA, 15 bp, Homo sapiens
gctgggaaataggca

SEQ ID NO: 1116841 - DNA, 15 bp, Homo sapiens
cgctgggaaataggc

SEQ ID NO: 1116842 - DNA, 15 bp, Homo sapiens
acgctgggaaatagg

SEQ ID NO: 1116843 - DNA, 15 bp, Homo sapiens
gacgctgggaaatag

SEQ ID NO: 1116844 - DNA, 15 bp, Homo sapiens
ggacgctgggaaata

SEQ ID NO: 1116845 - DNA, 15 bp, Homo sapiens
tggacgctgggaaat

SEQ ID NO: 1116846 - DNA, 15 bp, Homo sapiens
ctggacgctgggaaa

SEQ ID NO: 1116847 - DNA, 15 bp, Homo sapiens
actggacgctgggaa

SEQ ID NO: 1116848 - DNA, 15 bp, Homo sapiens
cactggacgctggga

SEQ ID NO: 1116849 - DNA, 15 bp, Homo sapiens
acactggacgctggg

SEQ ID NO: 1116850 - DNA, 15 bp, Homo sapiens
cacactggacgctgg

SEQ ID NO: 1116851 - DNA, 15 bp, Homo sapiens
ccacactggacgctg

SEQ ID NO: 1116852 - DNA, 15 bp, Homo sapiens
cccacactggacgct

SEQ ID NO: 1116853 - DNA, 15 bp, Homo sapiens
tcccacactggacgc

SEQ ID NO: 1116854 - DNA, 15 bp, Homo sapiens
ctcccacactggacg

SEQ ID NO: 1116855 - DNA, 15 bp, Homo sapiens
tctcccacactggac

SEQ ID NO: 1116856 - DNA, 15 bp, Homo sapiens
atctcccacactgga

SEQ ID NO: 1116857 - DNA, 15 bp, Homo sapiens
tatctcccacactgg

SEQ ID NO: 1116858 - DNA, 15 bp, Homo sapiens
gtatctcccacactg

SEQ ID NO: 1116859 - DNA, 15 bp, Homo sapiens
agtatctcccacact

SEQ ID NO: 1116860 - DNA, 15 bp, Homo sapiens
tagtatctcccacac

SEQ ID NO: 1116861 - DNA, 15 bp, Homo sapiens
gtagtatctcccaca

SEQ ID NO: 1116862 - DNA, 15 bp, Homo sapiens
cgtagtatctcccac

SEQ ID NO: 1116863 - DNA, 15 bp, Homo sapiens
ccgtagtatctccca

SEQ ID NO: 1116864 - DNA, 15 bp, Homo sapiens
gccgtagtatctccc

SEQ ID NO: 1116865 - DNA, 15 bp, Homo sapiens
agccgtagtatctcc

SEQ ID NO: 1116866 - DNA, 15 bp, Homo sapiens
cagccgtagtatctc

SEQ ID NO: 1116867 - DNA, 15 bp, Homo sapiens
acagccgtagtatct

SEQ ID NO: 1116868 - DNA, 15 bp, Homo sapiens
cacagccgtagtatc

SEQ ID NO: 1116869 - DNA, 15 bp, Homo sapiens
acacagccgtagtat

SEQ ID NO: 1116870 - DNA, 15 bp, Homo sapiens
gacacagccgtagta

SEQ ID NO: 1116871 - DNA, 15 bp, Homo sapiens
ggacacagccgtagt

SEQ ID NO: 1116872 - DNA, 15 bp, Homo sapiens
cggacacagccgtag

SEQ ID NO: 1116873 - DNA, 15 bp, Homo sapiens
acggacacagccgta

SEQ ID NO: 1116874 - DNA, 15 bp, Homo sapiens
tacggacacagccgt

SEQ ID NO: 1116875 - DNA, 15 bp, Homo sapiens
gtacggacacagccg

SEQ ID NO: 1116876 - DNA, 15 bp, Homo sapiens
tgtacggacacagcc

SEQ ID NO: 1116877 - DNA, 15 bp, Homo sapiens
ctgtacggacacagc

SEQ ID NO: 1116878 - DNA, 15 bp, Homo sapiens
tctgtacggacacag

SEQ ID NO: 1116879 - DNA, 15 bp, Homo sapiens
gtctgtacggacaca

SEQ ID NO: 1116880 - DNA, 15 bp, Homo sapiens
ggtctgtacggacac

SEQ ID NO: 1116881 - DNA, 15 bp, Homo sapiens
tggtctgtacggaca

SEQ ID NO: 1116882 - DNA, 15 bp, Homo sapiens
gtggtctgtacggac

SEQ ID NO: 1116883 - DNA, 15 bp, Homo sapiens
tgtggtctgtacgga

SEQ ID NO: 1116884 - DNA, 15 bp, Homo sapiens
ctgtggtctgtacgg

SEQ ID NO: 1116885 - DNA, 15 bp, Homo sapiens
tctgtggtctgtacg

SEQ ID NO: 1116886 - DNA, 15 bp, Homo sapiens
gtctgtggtctgtac

SEQ ID NO: 1116887 - DNA, 15 bp, Homo sapiens
ggtctgtggtctgta

SEQ ID NO: 1116888 - DNA, 15 bp, Homo sapiens
tggtctgtggtctgt

SEQ ID NO: 1116889 - DNA, 15 bp, Homo sapiens
ctggtctgtggtctg

SEQ ID NO: 1116890 - DNA, 15 bp, Homo sapiens
tctggtctgtggtct

SEQ ID NO: 1116891 - DNA, 15 bp, Homo sapiens
ctctggtctgtggtc

SEQ ID NO: 1116892 - DNA, 15 bp, Homo sapiens
gctctggtctgtggt

SEQ ID NO: 1116893 - DNA, 15 bp, Homo sapiens
agctctggtctgtgg

SEQ ID NO: 1116894 - DNA, 15 bp, Homo sapiens
aagctctggtctgtg

SEQ ID NO: 1116895 - DNA, 15 bp, Homo sapiens
caagctctggtctgt

SEQ ID NO: 1116896 - DNA, 15 bp, Homo sapiens
gcaagctctggtctg

SEQ ID NO: 1116897 - DNA, 15 bp, Homo sapiens
tgcaagctctggtct

SEQ ID NO: 1116898 - DNA, 15 bp, Homo sapiens
ctgcaagctctggtc

SEQ ID NO: 1116899 - DNA, 15 bp, Homo sapiens
cctgcaagctctggt

SEQ ID NO: 1116900 - DNA, 15 bp, Homo sapiens
gcctgcaagctctgg

SEQ ID NO: 1116901 - DNA, 15 bp, Homo sapiens
agcctgcaagctctg

SEQ ID NO: 1116902 - DNA, 15 bp, Homo sapiens
cagcctgcaagctct

SEQ ID NO: 1116903 - DNA, 15 bp, Homo sapiens
ccagcctgcaagctc

SEQ ID NO: 1116904 - DNA, 15 bp, Homo sapiens
tccagcctgcaagct

SEQ ID NO: 1116905 - DNA, 15 bp, Homo sapiens
ctccagcctgcaagc

SEQ ID NO: 1116906 - DNA, 15 bp, Homo sapiens
cctccagcctgcaag

SEQ ID NO: 1116907 - DNA, 15 bp, Homo sapiens
acctccagcctgcaa

SEQ ID NO: 1116908 - DNA, 15 bp, Homo sapiens
cacctccagcctgca

SEQ ID NO: 1116909 - DNA, 15 bp, Homo sapiens
tcacctccagcctgc

SEQ ID NO: 1116910 - DNA, 15 bp, Homo sapiens
ctcacctccagcctg

SEQ ID NO: 1116911 - DNA, 15 bp, Homo sapiens
cctcacctccagcct

SEQ ID NO: 1116912 - DNA, 15 bp, Homo sapiens
tcctcacctccagcc

SEQ ID NO: 1116913 - DNA, 15 bp, Homo sapiens
ctcctcacctccagc

SEQ ID NO: 1116914 - DNA, 15 bp, Homo sapiens
actcctcacctccag

SEQ ID NO: 1116915 - DNA, 15 bp, Homo sapiens
tactcctcacctcca

SEQ ID NO: 1116916 - DNA, 15 bp, Homo sapiens
ctactcctcacctcc

SEQ ID NO: 1116917 - DNA, 15 bp, Homo sapiens
tctactcctcacctc

SEQ ID NO: 1116918 - DNA, 15 bp, Homo sapiens
ttctactcctcacct

SEQ ID NO: 1116919 - DNA, 15 bp, Homo sapiens
cttctactcctcacc

SEQ ID NO: 1116920 - DNA, 15 bp, Homo sapiens
acttctactcctcac

SEQ ID NO: 1116921 - DNA, 15 bp, Homo sapiens
gacttctactcctca

SEQ ID NO: 1116922 - DNA, 15 bp, Homo sapiens
tgacttctactcctc

SEQ ID NO: 1116923 - DNA, 15 bp, Homo sapiens
ctgacttctactcct

SEQ ID NO: 1116924 - DNA, 15 bp, Homo sapiens
tctgacttctactcc

SEQ ID NO: 1116925 - DNA, 15 bp, Homo sapiens
atctgacttctactc

SEQ ID NO: 1116926 - DNA, 15 bp, Homo sapiens
aatctgacttctact

SEQ ID NO: 1116927 - DNA, 15 bp, Homo sapiens
caatctgacttctac

SEQ ID NO: 1116928 - DNA, 15 bp, Homo sapiens
gcgggggtgagagtg

SEQ ID NO: 1116929 - DNA, 15 bp, Homo sapiens
ggcgggggtgagagt

SEQ ID NO: 1116930 - DNA, 15 bp, Homo sapiens
aggcgggggtgagag

SEQ ID NO: 1116931 - DNA, 15 bp, Homo sapiens
gaggcgggggtgaga

SEQ ID NO: 1116932 - DNA, 15 bp, Homo sapiens
agaggcgggggtgag

SEQ ID NO: 1116933 - DNA, 15 bp, Homo sapiens
gagaggcgggggtga

SEQ ID NO: 1116934 - DNA, 15 bp, Homo sapiens
ggagaggcgggggtg

SEQ ID NO: 1116935 - DNA, 15 bp, Homo sapiens
gggagaggcgggggt

SEQ ID NO: 1116936 - DNA, 15 bp, Homo sapiens
agggagaggcggggg

SEQ ID NO: 1116937 - DNA, 15 bp, Homo sapiens
aagggagaggcgggg

SEQ ID NO: 1116938 - DNA, 15 bp, Homo sapiens
taagggagaggcggg

SEQ ID NO: 1116939 - DNA, 15 bp, Homo sapiens
ctaagggagaggcgg

SEQ ID NO: 1116940 - DNA, 15 bp, Homo sapiens
actaagggagaggcg

SEQ ID NO: 1116941 - DNA, 15 bp, Homo sapiens
aactaagggagaggc

SEQ ID NO: 1116942 - DNA, 15 bp, Homo sapiens
taactaagggagagg

SEQ ID NO: 1116943 - DNA, 15 bp, Homo sapiens
ttaactaagggagag

SEQ ID NO: 1116944 - DNA, 15 bp, Homo sapiens
attaactaagggaga

SEQ ID NO: 1116945 - DNA, 15 bp, Homo sapiens
gattaactaagggag

SEQ ID NO: 1116946 - DNA, 15 bp, Homo sapiens
agattaactaaggga

SEQ ID NO: 1116947 - DNA, 15 bp, Homo sapiens
cagattaactaaggg

SEQ ID NO: 1116948 - DNA, 15 bp, Homo sapiens
tcagattaactaagg

SEQ ID NO: 1116949 - DNA, 15 bp, Homo sapiens
gtcagattaactaag

SEQ ID NO: 1116950 - DNA, 15 bp, Homo sapiens
agtcagattaactaa

SEQ ID NO: 1116951 - DNA, 15 bp, Homo sapiens
gagtcagattaacta

SEQ ID NO: 1116952 - DNA, 15 bp, Homo sapiens
ggagtcagattaact

SEQ ID NO: 1116953 - DNA, 15 bp, Homo sapiens
tggagtcagattaac

SEQ ID NO: 1116954 - DNA, 15 bp, Homo sapiens
ctggagtcagattaa

SEQ ID NO: 1116955 - DNA, 15 bp, Homo sapiens
cctggagtcagatta

SEQ ID NO: 1116956 - DNA, 15 bp, Homo sapiens
gcctggagtcagatt

SEQ ID NO: 1116957 - DNA, 15 bp, Homo sapiens
tgcctggagtcagat

SEQ ID NO: 1116958 - DNA, 15 bp, Homo sapiens
ctgcctggagtcaga

SEQ ID NO: 1116959 - DNA, 15 bp, Homo sapiens
gctgcctggagtcag

SEQ ID NO: 1116960 - DNA, 15 bp, Homo sapiens
ggctgcctggagtca

SEQ ID NO: 1116961 - DNA, 15 bp, Homo sapiens
aggctgcctggagtc

SEQ ID NO: 1116962 - DNA, 15 bp, Homo sapiens
aaggctgcctggagt

SEQ ID NO: 1116963 - DNA, 15 bp, Homo sapiens
caaggctgcctggag

SEQ ID NO: 1116964 - DNA, 15 bp, Homo sapiens
tcaaggctgcctgga

SEQ ID NO: 1116965 - DNA, 15 bp, Homo sapiens
ttcaaggctgcctgg

SEQ ID NO: 1116966 - DNA, 15 bp, Homo sapiens
tttcaaggctgcctg

SEQ ID NO: 1116967 - DNA, 15 bp, Homo sapiens
gtttcaaggctgcct

SEQ ID NO: 1116968 - DNA, 15 bp, Homo sapiens
agtttcaaggctgcc

SEQ ID NO: 1116969 - DNA, 15 bp, Homo sapiens
aagtttcaaggctgc

SEQ ID NO: 1116970 - DNA, 15 bp, Homo sapiens
aaagtttcaaggctg

SEQ ID NO: 1116971 - DNA, 15 bp, Homo sapiens
gaaagtttcaaggct

SEQ ID NO: 1116972 - DNA, 15 bp, Homo sapiens
agaaagtttcaaggc

SEQ ID NO: 1116973 - DNA, 15 bp, Homo sapiens
gagaaagtttcaagg

SEQ ID NO: 1116974 - DNA, 15 bp, Homo sapiens
tgagaaagtttcaag

SEQ ID NO: 1116975 - DNA, 15 bp, Homo sapiens
gtgagaaagtttcaa

SEQ ID NO: 1116976 - DNA, 15 bp, Homo sapiens
ggtgagaaagtttca

SEQ ID NO: 1116977 - DNA, 15 bp, Homo sapiens
gggtgagaaagtttc

SEQ ID NO: 1116978 - DNA, 15 bp, Homo sapiens
agggtgagaaagttt

SEQ ID NO: 1116979 - DNA, 15 bp, Homo sapiens
cagggtgagaaagtt

SEQ ID NO: 1116980 - DNA, 15 bp, Homo sapiens
acagggtgagaaagt

SEQ ID NO: 1116981 - DNA, 15 bp, Homo sapiens
cacagggtgagaaag

SEQ ID NO: 1116982 - DNA, 15 bp, Homo sapiens
tcacagggtgagaaa

SEQ ID NO: 1116983 - DNA, 15 bp, Homo sapiens
ttcacagggtgagaa

SEQ ID NO: 1116984 - DNA, 15 bp, Homo sapiens
cttcacagggtgaga

SEQ ID NO: 1116985 - DNA, 15 bp, Homo sapiens
gcttcacagggtgag

SEQ ID NO: 1116986 - DNA, 15 bp, Homo sapiens
tgcttcacagggtga

SEQ ID NO: 1116987 - DNA, 15 bp, Homo sapiens
ctgcttcacagggtg

SEQ ID NO: 1116988 - DNA, 15 bp, Homo sapiens
actgcttcacagggt

SEQ ID NO: 1116989 - DNA, 15 bp, Homo sapiens
gactgcttcacaggg

SEQ ID NO: 1116990 - DNA, 15 bp, Homo sapiens
agactgcttcacagg

SEQ ID NO: 1116991 - DNA, 15 bp, Homo sapiens
aagactgcttcacag

SEQ ID NO: 1116992 - DNA, 15 bp, Homo sapiens
gaagactgcttcaca

SEQ ID NO: 1116993 - DNA, 15 bp, Homo sapiens
tgaagactgcttcac

SEQ ID NO: 1116994 - DNA, 15 bp, Homo sapiens
atgaagactgcttca

SEQ ID NO: 1116995 - DNA, 15 bp, Homo sapiens
gatgaagactgcttc

SEQ ID NO: 1116996 - DNA, 15 bp, Homo sapiens
tgatgaagactgctt

SEQ ID NO: 1116997 - DNA, 15 bp, Homo sapiens
gtgatgaagactgct

SEQ ID NO: 1116998 - DNA, 15 bp, Homo sapiens
ggtgatgaagactgc

SEQ ID NO: 1116999 - DNA, 15 bp, Homo sapiens
aggtgatgaagactg

SEQ ID NO: 1117000 - DNA, 15 bp, Homo sapiens
caggtgatgaagact

SEQ ID NO: 1117001 - DNA, 15 bp, Homo sapiens
gcaggtgatgaagac

SEQ ID NO: 1117002 - DNA, 15 bp, Homo sapiens
ggcaggtgatgaaga

SEQ ID NO: 1117003 - DNA, 15 bp, Homo sapiens
gggcaggtgatgaag

SEQ ID NO: 1117004 - DNA, 15 bp, Homo sapiens
tgggcaggtgatgaa

SEQ ID NO: 1117005 - DNA, 15 bp, Homo sapiens
gtgggcaggtgatga

SEQ ID NO: 1117006 - DNA, 15 bp, Homo sapiens
agtgggcaggtgatg

SEQ ID NO: 1117007 - DNA, 15 bp, Homo sapiens
aagtgggcaggtgat

SEQ ID NO: 1117008 - DNA, 15 bp, Homo sapiens
gaagtgggcaggtga

SEQ ID NO: 1117009 - DNA, 15 bp, Homo sapiens
agaagtgggcaggtg

SEQ ID NO: 1117010 - DNA, 15 bp, Homo sapiens
gagaagtgggcaggt

SEQ ID NO: 1117011 - DNA, 15 bp, Homo sapiens
ggagaagtgggcagg

SEQ ID NO: 1117012 - DNA, 15 bp, Homo sapiens
tggagaagtgggcag

SEQ ID NO: 1117013 - DNA, 15 bp, Homo sapiens
ctggagaagtgggca

SEQ ID NO: 1117014 - DNA, 15 bp, Homo sapiens
gctggagaagtgggc

SEQ ID NO: 1117015 - DNA, 15 bp, Homo sapiens
agctggagaagtggg

SEQ ID NO: 1117016 - DNA, 15 bp, Homo sapiens
gagctggagaagtgg

SEQ ID NO: 1117017 - DNA, 15 bp, Homo sapiens
ggagctggagaagtg

SEQ ID NO: 1117018 - DNA, 15 bp, Homo sapiens
cggagctggagaagt

SEQ ID NO: 1117019 - DNA, 15 bp, Homo sapiens
acggagctggagaag

SEQ ID NO: 1117020 - DNA, 15 bp, Homo sapiens
gacggagctggagaa

SEQ ID NO: 1117021 - DNA, 15 bp, Homo sapiens
ggacggagctggaga

SEQ ID NO: 1117022 - DNA, 15 bp, Homo sapiens
aggacggagctggag

SEQ ID NO: 1117023 - DNA, 15 bp, Homo sapiens
caggacggagctgga

SEQ ID NO: 1117024 - DNA, 15 bp, Homo sapiens
acaggacggagctgg

SEQ ID NO: 1117025 - DNA, 15 bp, Homo sapiens
gacaggacggagctg

SEQ ID NO: 1117026 - DNA, 15 bp, Homo sapiens
agacaggacggagct

SEQ ID NO: 1117027 - DNA, 15 bp, Homo sapiens
gagacaggacggagc

SEQ ID NO: 1117028 - DNA, 15 bp, Homo sapiens
ggagacaggacggag

SEQ ID NO: 1117029 - DNA, 15 bp, Homo sapiens
cggagacaggacgga

SEQ ID NO: 1117030 - DNA, 15 bp, Homo sapiens
gcggagacaggacgg

SEQ ID NO: 1117031 - DNA, 15 bp, Homo sapiens
agcggagacaggacg

SEQ ID NO: 1117032 - DNA, 15 bp, Homo sapiens
aagcggagacaggac

SEQ ID NO: 1117033 - DNA, 15 bp, Homo sapiens
aaagcggagacagga

SEQ ID NO: 1117034 - DNA, 15 bp, Homo sapiens
gaaagcggagacagg

SEQ ID NO: 1117035 - DNA, 15 bp, Homo sapiens
ggaaagcggagacag

SEQ ID NO: 1117036 - DNA, 15 bp, Homo sapiens
aggaaagcggagaca

SEQ ID NO: 1117037 - DNA, 15 bp, Homo sapiens
caggaaagcggagac

SEQ ID NO: 1117038 - DNA, 15 bp, Homo sapiens
tcaggaaagcggaga

SEQ ID NO: 1117039 - DNA, 15 bp, Homo sapiens
gtcaggaaagcggag

SEQ ID NO: 1117040 - DNA, 15 bp, Homo sapiens
agtcaggaaagcgga

SEQ ID NO: 1117041 - DNA, 15 bp, Homo sapiens
aagtcaggaaagcgg

SEQ ID NO: 1117042 - DNA, 15 bp, Homo sapiens
caagtcaggaaagcg

SEQ ID NO: 1117043 - DNA, 15 bp, Homo sapiens
gcaagtcaggaaagc

SEQ ID NO: 1117044 - DNA, 15 bp, Homo sapiens
tgcaagtcaggaaag

SEQ ID NO: 1117045 - DNA, 15 bp, Homo sapiens
ctgcaagtcaggaaa

SEQ ID NO: 1117046 - DNA, 15 bp, Homo sapiens
tctgcaagtcaggaa

SEQ ID NO: 1117047 - DNA, 15 bp, Homo sapiens
ctctgcaagtcagga

SEQ ID NO: 1117048 - DNA, 15 bp, Homo sapiens
gctctgcaagtcagg

SEQ ID NO: 1117049 - DNA, 15 bp, Homo sapiens
tgctctgcaagtcag

SEQ ID NO: 1117050 - DNA, 15 bp, Homo sapiens
atgctctgcaagtca

SEQ ID NO: 1117051 - DNA, 15 bp, Homo sapiens
gatgctctgcaagtc

SEQ ID NO: 1117052 - DNA, 15 bp, Homo sapiens
agatgctctgcaagt

SEQ ID NO: 1117053 - DNA, 15 bp, Homo sapiens
cagatgctctgcaag

SEQ ID NO: 1117054 - DNA, 15 bp, Homo sapiens
gcagatgctctgcaa

SEQ ID NO: 1117055 - DNA, 15 bp, Homo sapiens
ggcagatgctctgca

SEQ ID NO: 1117056 - DNA, 15 bp, Homo sapiens
gggcagatgctctgc

SEQ ID NO: 1117057 - DNA, 15 bp, Homo sapiens
ggggcagatgctctg

SEQ ID NO: 1117058 - DNA, 15 bp, Homo sapiens
tggggcagatgctct

SEQ ID NO: 1117059 - DNA, 15 bp, Homo sapiens
ttggggcagatgctc

SEQ ID NO: 1117060 - DNA, 15 bp, Homo sapiens
attggggcagatgct

SEQ ID NO: 1117061 - DNA, 15 bp, Homo sapiens
gattggggcagatgc

SEQ ID NO: 1117062 - DNA, 15 bp, Homo sapiens
agattggggcagatg

SEQ ID NO: 1117063 - DNA, 15 bp, Homo sapiens
cagattggggcagat

SEQ ID NO: 1117064 - DNA, 15 bp, Homo sapiens
gcagattggggcaga

SEQ ID NO: 1117065 - DNA, 15 bp, Homo sapiens
agcagattggggcag

SEQ ID NO: 1117066 - DNA, 15 bp, Homo sapiens
gagcagattggggca

SEQ ID NO: 1117067 - DNA, 15 bp, Homo sapiens
tgagcagattggggc

SEQ ID NO: 1117068 - DNA, 15 bp, Homo sapiens
atgagcagattgggg

SEQ ID NO: 1117069 - DNA, 15 bp, Homo sapiens
gatgagcagattggg

SEQ ID NO: 1117070 - DNA, 15 bp, Homo sapiens
ggatgagcagattgg

SEQ ID NO: 1117071 - DNA, 15 bp, Homo sapiens
aggatgagcagattg

SEQ ID NO: 1117072 - DNA, 15 bp, Homo sapiens
gaggatgagcagatt

SEQ ID NO: 1117073 - DNA, 15 bp, Homo sapiens
ggaggatgagcagat

SEQ ID NO: 1117074 - DNA, 15 bp, Homo sapiens
gggaggatgagcaga

SEQ ID NO: 1117075 - DNA, 15 bp, Homo sapiens
tgggaggatgagcag

SEQ ID NO: 1117076 - DNA, 15 bp, Homo sapiens
ctgggaggatgagca

SEQ ID NO: 1117077 - DNA, 15 bp, Homo sapiens
actgggaggatgagc

SEQ ID NO: 1117078 - DNA, 15 bp, Homo sapiens
tactgggaggatgag

SEQ ID NO: 1117079 - DNA, 15 bp, Homo sapiens
gtactgggaggatga

SEQ ID NO: 1117080 - DNA, 15 bp, Homo sapiens
ggtactgggaggatg

SEQ ID NO: 1117081 - DNA, 15 bp, Homo sapiens
gggtactgggaggat

SEQ ID NO: 1117082 - DNA, 15 bp, Homo sapiens
agggtactgggagga

SEQ ID NO: 1117083 - DNA, 15 bp, Homo sapiens
gagggtactgggagg

SEQ ID NO: 1117084 - DNA, 15 bp, Homo sapiens
tgagggtactgggag

SEQ ID NO: 1117085 - DNA, 15 bp, Homo sapiens
ctgagggtactggga

SEQ ID NO: 1117086 - DNA, 15 bp, Homo sapiens
gctgagggtactggg

SEQ ID NO: 1117087 - DNA, 15 bp, Homo sapiens
ggctgagggtactgg

SEQ ID NO: 1117088 - DNA, 15 bp, Homo sapiens
tggctgagggtactg

SEQ ID NO: 1117089 - DNA, 15 bp, Homo sapiens
atggctgagggtact

SEQ ID NO: 1117090 - DNA, 15 bp, Homo sapiens
gatggctgagggtac

SEQ ID NO: 1117091 - DNA, 15 bp, Homo sapiens
agatggctgagggta

SEQ ID NO: 1117092 - DNA, 15 bp, Homo sapiens
cagatggctgagggt

SEQ ID NO: 1117093 - DNA, 15 bp, Homo sapiens
ccagatggctgaggg

SEQ ID NO: 1117094 - DNA, 15 bp, Homo sapiens
gccagatggctgagg

SEQ ID NO: 1117095 - DNA, 15 bp, Homo sapiens
agccagatggctgag

SEQ ID NO: 1117096 - DNA, 15 bp, Homo sapiens
gagccagatggctga

SEQ ID NO: 1117097 - DNA, 15 bp, Homo sapiens
tgagccagatggctg

SEQ ID NO: 1117098 - DNA, 15 bp, Homo sapiens
atgagccagatggct

SEQ ID NO: 1117099 - DNA, 15 bp, Homo sapiens
catgagccagatggc

SEQ ID NO: 1117100 - DNA, 15 bp, Homo sapiens
ccatgagccagatgg

SEQ ID NO: 1117101 - DNA, 15 bp, Homo sapiens
gccatgagccagatg

SEQ ID NO: 1117102 - DNA, 15 bp, Homo sapiens
agccatgagccagat

SEQ ID NO: 1117103 - DNA, 15 bp, Homo sapiens
gagccatgagccaga

SEQ ID NO: 1117104 - DNA, 15 bp, Homo sapiens
agagccatgagccag

SEQ ID NO: 1117105 - DNA, 15 bp, Homo sapiens
tagagccatgagcca

SEQ ID NO: 1117106 - DNA, 15 bp, Homo sapiens
gtagagccatgagcc

SEQ ID NO: 1117107 - DNA, 15 bp, Homo sapiens
ggtagagccatgagc

SEQ ID NO: 1117108 - DNA, 15 bp, Homo sapiens
tggtagagccatgag

SEQ ID NO: 1117109 - DNA, 15 bp, Homo sapiens
ttggtagagccatga

SEQ ID NO: 1117110 - DNA, 15 bp, Homo sapiens
tttggtagagccatg

SEQ ID NO: 1117111 - DNA, 15 bp, Homo sapiens
ttttggtagagccat

SEQ ID NO: 1117112 - DNA, 15 bp, Homo sapiens
gttttggtagagcca

SEQ ID NO: 1117113 - DNA, 15 bp, Homo sapiens
tgttttggtagagcc

SEQ ID NO: 1117114 - DNA, 15 bp, Homo sapiens
ctgttttggtagagc

SEQ ID NO: 1117115 - DNA, 15 bp, Homo sapiens
gctgttttggtagag

SEQ ID NO: 1117116 - DNA, 15 bp, Homo sapiens
agctgttttggtaga

SEQ ID NO: 1117117 - DNA, 15 bp, Homo sapiens
gagctgttttggtag

SEQ ID NO: 1117118 - DNA, 15 bp, Homo sapiens
ggagctgttttggta

SEQ ID NO: 1117119 - DNA, 15 bp, Homo sapiens
tggagctgttttggt

SEQ ID NO: 1117120 - DNA, 15 bp, Homo sapiens
gtggagctgttttgg

SEQ ID NO: 1117121 - DNA, 15 bp, Homo sapiens
agtggagctgttttg

SEQ ID NO: 1117122 - DNA, 15 bp, Homo sapiens
aagtggagctgtttt

SEQ ID NO: 1117123 - DNA, 15 bp, Homo sapiens
gaagtggagctgttt

SEQ ID NO: 1117124 - DNA, 15 bp, Homo sapiens
ggaagtggagctgtt

SEQ ID NO: 1117125 - DNA, 15 bp, Homo sapiens
cggaagtggagctgt

SEQ ID NO: 1117126 - DNA, 15 bp, Homo sapiens
ccggaagtggagctg

SEQ ID NO: 1117127 - DNA, 15 bp, Homo sapiens
accggaagtggagct

SEQ ID NO: 1117128 - DNA, 15 bp, Homo sapiens
gaccggaagtggagc

SEQ ID NO: 1117129 - DNA, 15 bp, Homo sapiens
tgaccggaagtggag

SEQ ID NO: 1117130 - DNA, 15 bp, Homo sapiens
gtgaccggaagtgga

SEQ ID NO: 1117131 - DNA, 15 bp, Homo sapiens
ggtgaccggaagtgg

SEQ ID NO: 1117132 - DNA, 15 bp, Homo sapiens
gggtgaccggaagtg

SEQ ID NO: 1117133 - DNA, 15 bp, Homo sapiens
cgggtgaccggaagt

SEQ ID NO: 1117134 - DNA, 15 bp, Homo sapiens
acgggtgaccggaag

SEQ ID NO: 1117135 - DNA, 15 bp, Homo sapiens
cacgggtgaccggaa

SEQ ID NO: 1117136 - DNA, 15 bp, Homo sapiens
ccacgggtgaccgga

SEQ ID NO: 1117137 - DNA, 15 bp, Homo sapiens
accacgggtgaccgg

SEQ ID NO: 1117138 - DNA, 15 bp, Homo sapiens
caccacgggtgaccg

SEQ ID NO: 1117139 - DNA, 15 bp, Homo sapiens
tcaccacgggtgacc

SEQ ID NO: 1117140 - DNA, 15 bp, Homo sapiens
gtcaccacgggtgac

SEQ ID NO: 1117141 - DNA, 15 bp, Homo sapiens
ggtcaccacgggtga

SEQ ID NO: 1117142 - DNA, 15 bp, Homo sapiens
gggtcaccacgggtg

SEQ ID NO: 1117143 - DNA, 15 bp, Homo sapiens
ggggtcaccacgggt

SEQ ID NO: 1117144 - DNA, 15 bp, Homo sapiens
tggggtcaccacggg

SEQ ID NO: 1117145 - DNA, 15 bp, Homo sapiens
atggggtcaccacgg

SEQ ID NO: 1117146 - DNA, 15 bp, Homo sapiens
aatggggtcaccacg

SEQ ID NO: 1117147 - DNA, 15 bp, Homo sapiens
caatggggtcaccac

SEQ ID NO: 1117148 - DNA, 15 bp, Homo sapiens
gcaatggggtcacca

SEQ ID NO: 1117149 - DNA, 15 bp, Homo sapiens
ggcaatggggtcacc

SEQ ID NO: 1117150 - DNA, 15 bp, Homo sapiens
tggcaatggggtcac

SEQ ID NO: 1117151 - DNA, 15 bp, Homo sapiens
gtggcaatggggtca

SEQ ID NO: 1117152 - DNA, 15 bp, Homo sapiens
tgtggcaatggggtc

SEQ ID NO: 1117153 - DNA, 15 bp, Homo sapiens
atgtggcaatggggt

SEQ ID NO: 1117154 - DNA, 15 bp, Homo sapiens
gatgtggcaatgggg

SEQ ID NO: 1117155 - DNA, 15 bp, Homo sapiens
gcagcagtgggagtc

SEQ ID NO: 1117156 - DNA, 15 bp, Homo sapiens
agcagcagtgggagt

SEQ ID NO: 1117157 - DNA, 15 bp, Homo sapiens
cagcagcagtgggag

SEQ ID NO: 1117158 - DNA, 15 bp, Homo sapiens
tcagcagcagtggga

SEQ ID NO: 1117159 - DNA, 15 bp, Homo sapiens
atcagcagcagtggg

SEQ ID NO: 1117160 - DNA, 15 bp, Homo sapiens
aatcagcagcagtgg

SEQ ID NO: 1117161 - DNA, 15 bp, Homo sapiens
aaatcagcagcagtg

SEQ ID NO: 1117162 - DNA, 15 bp, Homo sapiens
gaaatcagcagcagt

SEQ ID NO: 1117163 - DNA, 15 bp, Homo sapiens
tgaaatcagcagcag

SEQ ID NO: 1117164 - DNA, 15 bp, Homo sapiens
ctgaaatcagcagca

SEQ ID NO: 1117165 - DNA, 15 bp, Homo sapiens
cctgaaatcagcagc

SEQ ID NO: 1117166 - DNA, 15 bp, Homo sapiens
tcctgaaatcagcag

SEQ ID NO: 1117167 - DNA, 15 bp, Homo sapiens
atcctgaaatcagca

SEQ ID NO: 1117168 - DNA, 15 bp, Homo sapiens
tatcctgaaatcagc

SEQ ID NO: 1117169 - DNA, 15 bp, Homo sapiens
gtatcctgaaatcag

SEQ ID NO: 1117170 - DNA, 15 bp, Homo sapiens
ggtatcctgaaatca

SEQ ID NO: 1117171 - DNA, 15 bp, Homo sapiens
tggtatcctgaaatc

SEQ ID NO: 1117172 - DNA, 15 bp, Homo sapiens
ctggtatcctgaaat

SEQ ID NO: 1117173 - DNA, 15 bp, Homo sapiens
gctggtatcctgaaa

SEQ ID NO: 1117174 - DNA, 15 bp, Homo sapiens
tgctggtatcctgaa

SEQ ID NO: 1117175 - DNA, 15 bp, Homo sapiens
atgctggtatcctga

SEQ ID NO: 1117176 - DNA, 15 bp, Homo sapiens
catgctggtatcctg

SEQ ID NO: 1117177 - DNA, 15 bp, Homo sapiens
tcatgctggtatcct

SEQ ID NO: 1117178 - DNA, 15 bp, Homo sapiens
atcatgctggtatcc

SEQ ID NO: 1117179 - DNA, 15 bp, Homo sapiens
catcatgctggtatc

SEQ ID NO: 1117180 - DNA, 15 bp, Homo sapiens
gcatcatgctggtat

SEQ ID NO: 1117181 - DNA, 15 bp, Homo sapiens
ggcatcatgctggta

SEQ ID NO: 1117182 - DNA, 15 bp, Homo sapiens
tggcatcatgctggt

SEQ ID NO: 1117183 - DNA, 15 bp, Homo sapiens
gtggcatcatgctgg

SEQ ID NO: 1117184 - DNA, 15 bp, Homo sapiens
agtggcatcatgctg

SEQ ID NO: 1117185 - DNA, 15 bp, Homo sapiens
cagtggcatcatgct

SEQ ID NO: 1117186 - DNA, 15 bp, Homo sapiens
tcagtggcatcatgc

SEQ ID NO: 1117187 - DNA, 15 bp, Homo sapiens
ttcagtggcatcatg

SEQ ID NO: 1117188 - DNA, 15 bp, Homo sapiens
attcagtggcatcat

SEQ ID NO: 1117189 - DNA, 15 bp, Homo sapiens
cattcagtggcatca

SEQ ID NO: 1117190 - DNA, 15 bp, Homo sapiens
gcattcagtggcatc

SEQ ID NO: 1117191 - DNA, 15 bp, Homo sapiens
tgcattcagtggcat

SEQ ID NO: 1117192 - DNA, 15 bp, Homo sapiens
ctgcattcagtggca

SEQ ID NO: 1117193 - DNA, 15 bp, Homo sapiens
tctgcattcagtggc

SEQ ID NO: 1117194 - DNA, 15 bp, Homo sapiens
ctctgcattcagtgg

SEQ ID NO: 1117195 - DNA, 15 bp, Homo sapiens
actctgcattcagtg

SEQ ID NO: 1117196 - DNA, 15 bp, Homo sapiens
aactctgcattcagt

SEQ ID NO: 1117197 - DNA, 15 bp, Homo sapiens
aaactctgcattcag

SEQ ID NO: 1117198 - DNA, 15 bp, Homo sapiens
gaaactctgcattca

SEQ ID NO: 1117199 - DNA, 15 bp, Homo sapiens
cgaaactctgcattc

SEQ ID NO: 1117200 - DNA, 15 bp, Homo sapiens
tcgaaactctgcatt

SEQ ID NO: 1117201 - DNA, 15 bp, Homo sapiens
ctcgaaactctgcat

SEQ ID NO: 1117202 - DNA, 15 bp, Homo sapiens
tctcgaaactctgca

SEQ ID NO: 1117203 - DNA, 15 bp, Homo sapiens
atctcgaaactctgc

SEQ ID NO: 1117204 - DNA, 15 bp, Homo sapiens
catctcgaaactctg

SEQ ID NO: 1117205 - DNA, 15 bp, Homo sapiens
acatctcgaaactct

SEQ ID NO: 1117206 - DNA, 15 bp, Homo sapiens
cacatctcgaaactc

SEQ ID NO: 1117207 - DNA, 15 bp, Homo sapiens
gcacatctcgaaact

SEQ ID NO: 1117208 - DNA, 15 bp, Homo sapiens
tgcacatctcgaaac

SEQ ID NO: 1117209 - DNA, 15 bp, Homo sapiens
atgcacatctcgaaa

SEQ ID NO: 1117210 - DNA, 15 bp, Homo sapiens
catgcacatctcgaa

SEQ ID NO: 1117211 - DNA, 15 bp, Homo sapiens
ccatgcacatctcga

SEQ ID NO: 1117212 - DNA, 15 bp, Homo sapiens
accatgcacatctcg

SEQ ID NO: 1117213 - DNA, 15 bp, Homo sapiens
gaccatgcacatctc

SEQ ID NO: 1117214 - DNA, 15 bp, Homo sapiens
agaccatgcacatct

SEQ ID NO: 1117215 - DNA, 15 bp, Homo sapiens
cagaccatgcacatc

SEQ ID NO: 1117216 - DNA, 15 bp, Homo sapiens
gcagaccatgcacat

SEQ ID NO: 1117217 - DNA, 15 bp, Homo sapiens
agcagaccatgcaca

SEQ ID NO: 1117218 - DNA, 15 bp, Homo sapiens
tagcagaccatgcac

SEQ ID NO: 1117219 - DNA, 15 bp, Homo sapiens
atagcagaccatgca

SEQ ID NO: 1117220 - DNA, 15 bp, Homo sapiens
catagcagaccatgc

SEQ ID NO: 1117221 - DNA, 15 bp, Homo sapiens
acatagcagaccatg

SEQ ID NO: 1117222 - DNA, 15 bp, Homo sapiens
aacatagcagaccat

SEQ ID NO: 1117223 - DNA, 15 bp, Homo sapiens
caacatagcagacca

SEQ ID NO: 1117224 - DNA, 15 bp, Homo sapiens
tcaacatagcagacc

SEQ ID NO: 1117225 - DNA, 15 bp, Homo sapiens
ctcaacatagcagac

SEQ ID NO: 1117226 - DNA, 15 bp, Homo sapiens
gctcaacatagcaga

SEQ ID NO: 1117227 - DNA, 15 bp, Homo sapiens
ggctcaacatagcag

SEQ ID NO: 1117228 - DNA, 15 bp, Homo sapiens
tggctcaacatagca

SEQ ID NO: 1117229 - DNA, 15 bp, Homo sapiens
ctggctcaacatagc

SEQ ID NO: 1117230 - DNA, 15 bp, Homo sapiens
cctggctcaacatag

SEQ ID NO: 1117231 - DNA, 15 bp, Homo sapiens
acctggctcaacata

SEQ ID NO: 1117232 - DNA, 15 bp, Homo sapiens
gacctggctcaacat

SEQ ID NO: 1117233 - DNA, 15 bp, Homo sapiens
agacctggctcaaca

SEQ ID NO: 1117234 - DNA, 15 bp, Homo sapiens
tagacctggctcaac

SEQ ID NO: 1117235 - DNA, 15 bp, Homo sapiens
ctagacctggctcaa

SEQ ID NO: 1117236 - DNA, 15 bp, Homo sapiens
gctagacctggctca

SEQ ID NO: 1117237 - DNA, 15 bp, Homo sapiens
tgctagacctggctc

SEQ ID NO: 1117238 - DNA, 15 bp, Homo sapiens
atgctagacctggct

SEQ ID NO: 1117239 - DNA, 15 bp, Homo sapiens
tatgctagacctggc

SEQ ID NO: 1117240 - DNA, 15 bp, Homo sapiens
gtatgctagacctgg

SEQ ID NO: 1117241 - DNA, 15 bp, Homo sapiens
ggtatgctagacctg

SEQ ID NO: 1117242 - DNA, 15 bp, Homo sapiens
cggtatgctagacct

SEQ ID NO: 1117243 - DNA, 15 bp, Homo sapiens
gcggtatgctagacc

SEQ ID NO: 1117244 - DNA, 15 bp, Homo sapiens
agcggtatgctagac

SEQ ID NO: 1117245 - DNA, 15 bp, Homo sapiens
cagcggtatgctaga

SEQ ID NO: 1117246 - DNA, 15 bp, Homo sapiens
acagcggtatgctag

SEQ ID NO: 1117247 - DNA, 15 bp, Homo sapiens
cacagcggtatgcta

SEQ ID NO: 1117248 - DNA, 15 bp, Homo sapiens
gcacagcggtatgct

SEQ ID NO: 1117249 - DNA, 15 bp, Homo sapiens
ggcacagcggtatgc

SEQ ID NO: 1117250 - DNA, 15 bp, Homo sapiens
gggcacagcggtatg

SEQ ID NO: 1117251 - DNA, 15 bp, Homo sapiens
agggcacagcggtat

SEQ ID NO: 1117252 - DNA, 15 bp, Homo sapiens
cagggcacagcggta

SEQ ID NO: 1117253 - DNA, 15 bp, Homo sapiens
gcagggcacagcggt

SEQ ID NO: 1117254 - DNA, 15 bp, Homo sapiens
agcagggcacagcgg

SEQ ID NO: 1117255 - DNA, 15 bp, Homo sapiens
cagcagggcacagcg

SEQ ID NO: 1117256 - DNA, 15 bp, Homo sapiens
acagcagggcacagc

SEQ ID NO: 1117257 - DNA, 15 bp, Homo sapiens
cacagcagggcacag

SEQ ID NO: 1117258 - DNA, 15 bp, Homo sapiens
acacagcagggcaca

SEQ ID NO: 1117259 - DNA, 15 bp, Homo sapiens
aacacagcagggcac

SEQ ID NO: 1117260 - DNA, 15 bp, Homo sapiens
aaacacagcagggca

SEQ ID NO: 1117261 - DNA, 15 bp, Homo sapiens
aaaacacagcagggc

SEQ ID NO: 1117262 - DNA, 15 bp, Homo sapiens
taaaacacagcaggg

SEQ ID NO: 1117263 - DNA, 15 bp, Homo sapiens
ctaaaacacagcagg

SEQ ID NO: 1117264 - DNA, 15 bp, Homo sapiens
cctaaaacacagcag

SEQ ID NO: 1117265 - DNA, 15 bp, Homo sapiens
ccctaaaacacagca

SEQ ID NO: 1117266 - DNA, 15 bp, Homo sapiens
cccctaaaacacagc

SEQ ID NO: 1117267 - DNA, 15 bp, Homo sapiens
tcccctaaaacacag

SEQ ID NO: 1117268 - DNA, 15 bp, Homo sapiens
ctcccctaaaacaca

SEQ ID NO: 1117269 - DNA, 15 bp, Homo sapiens
tctcccctaaaacac

SEQ ID NO: 1117270 - DNA, 15 bp, Homo sapiens
atctcccctaaaaca

SEQ ID NO: 1117271 - DNA, 15 bp, Homo sapiens
catctcccctaaaac

SEQ ID NO: 1117272 - DNA, 15 bp, Homo sapiens
ccatctcccctaaaa

SEQ ID NO: 1117273 - DNA, 15 bp, Homo sapiens
cccatctcccctaaa

SEQ ID NO: 1117274 - DNA, 15 bp, Homo sapiens
ccccatctcccctaa

SEQ ID NO: 1117275 - DNA, 15 bp, Homo sapiens
tccccatctccccta

SEQ ID NO: 1117276 - DNA, 15 bp, Homo sapiens
ttccccatctcccct

SEQ ID NO: 1117277 - DNA, 15 bp, Homo sapiens
tttccccatctcccc

SEQ ID NO: 1117278 - DNA, 15 bp, Homo sapiens
gtttccccatctccc

SEQ ID NO: 1117279 - DNA, 15 bp, Homo sapiens
ggtttccccatctcc

SEQ ID NO: 1117280 - DNA, 15 bp, Homo sapiens
aggtttccccatctc

SEQ ID NO: 1117281 - DNA, 15 bp, Homo sapiens
caggtttccccatct

SEQ ID NO: 1117282 - DNA, 15 bp, Homo sapiens
ccaggtttccccatc

SEQ ID NO: 1117283 - DNA, 15 bp, Homo sapiens
accaggtttccccat

SEQ ID NO: 1117284 - DNA, 15 bp, Homo sapiens
caccaggtttcccca

SEQ ID NO: 1117285 - DNA, 15 bp, Homo sapiens
ccaccaggtttcccc

SEQ ID NO: 1117286 - DNA, 15 bp, Homo sapiens
cccaccaggtttccc

SEQ ID NO: 1117287 - DNA, 15 bp, Homo sapiens
acccaccaggtttcc

SEQ ID NO: 1117288 - DNA, 15 bp, Homo sapiens
tacccaccaggtttc

SEQ ID NO: 1117289 - DNA, 15 bp, Homo sapiens
ttacccaccaggttt

SEQ ID NO: 1117290 - DNA, 15 bp, Homo sapiens
cttacccaccaggtt

SEQ ID NO: 1117291 - DNA, 15 bp, Homo sapiens
tcttacccaccaggt

SEQ ID NO: 1117292 - DNA, 15 bp, Homo sapiens
ctcttacccaccagg

SEQ ID NO: 1117293 - DNA, 15 bp, Homo sapiens
gctcttacccaccag

SEQ ID NO: 1117294 - DNA, 15 bp, Homo sapiens
tgctcttacccacca

SEQ ID NO: 1117295 - DNA, 15 bp, Homo sapiens
ttgctcttacccacc

SEQ ID NO: 1117296 - DNA, 15 bp, Homo sapiens
tttgctcttacccac

SEQ ID NO: 1117297 - DNA, 15 bp, Homo sapiens
ttttgctcttaccca

SEQ ID NO: 1117298 - DNA, 15 bp, Homo sapiens
cttttgctcttaccc

SEQ ID NO: 1117299 - DNA, 15 bp, Homo sapiens
gcttttgctcttacc

SEQ ID NO: 1117300 - DNA, 15 bp, Homo sapiens
ggcttttgctcttac

SEQ ID NO: 1117301 - DNA, 15 bp, Homo sapiens
gggcttttgctctta

SEQ ID NO: 1117302 - DNA, 15 bp, Homo sapiens
agggcttttgctctt

SEQ ID NO: 1117303 - DNA, 15 bp, Homo sapiens
cagggcttttgctct

SEQ ID NO: 1117304 - DNA, 15 bp, Homo sapiens
ccagggcttttgctc

SEQ ID NO: 1117305 - DNA, 15 bp, Homo sapiens
tccagggcttttgct

SEQ ID NO: 1117306 - DNA, 15 bp, Homo sapiens
ctccagggcttttgc

SEQ ID NO: 1117307 - DNA, 15 bp, Homo sapiens
actccagggcttttg

SEQ ID NO: 1117308 - DNA, 15 bp, Homo sapiens
gactccagggctttt

SEQ ID NO: 1117309 - DNA, 15 bp, Homo sapiens
tgactccagggcttt

SEQ ID NO: 1117310 - DNA, 15 bp, Homo sapiens
ctgactccagggctt

SEQ ID NO: 1117311 - DNA, 15 bp, Homo sapiens
cctgactccagggct

SEQ ID NO: 1117312 - DNA, 15 bp, Homo sapiens
gcctgactccagggc

SEQ ID NO: 1117313 - DNA, 15 bp, Homo sapiens
agcctgactccaggg

SEQ ID NO: 1117314 - DNA, 15 bp, Homo sapiens
cagcctgactccagg

SEQ ID NO: 1117315 - DNA, 15 bp, Homo sapiens
acagcctgactccag

SEQ ID NO: 1117316 - DNA, 15 bp, Homo sapiens
gacagcctgactcca

SEQ ID NO: 1117317 - DNA, 15 bp, Homo sapiens
ggacagcctgactcc

SEQ ID NO: 1117318 - DNA, 15 bp, Homo sapiens
tggacagcctgactc

SEQ ID NO: 1117319 - DNA, 15 bp, Homo sapiens
ctggacagcctgact

SEQ ID NO: 1117320 - DNA, 15 bp, Homo sapiens
cctggacagcctgac

SEQ ID NO: 1117321 - DNA, 15 bp, Homo sapiens
gcctggacagcctga

SEQ ID NO: 1117322 - DNA, 15 bp, Homo sapiens
agcctggacagcctg

SEQ ID NO: 1117323 - DNA, 15 bp, Homo sapiens
tagcctggacagcct

SEQ ID NO: 1117324 - DNA, 15 bp, Homo sapiens
ctagcctggacagcc

SEQ ID NO: 1117325 - DNA, 15 bp, Homo sapiens
tctagcctggacagc

SEQ ID NO: 1117326 - DNA, 15 bp, Homo sapiens
ttctagcctggacag

SEQ ID NO: 1117327 - DNA, 15 bp, Homo sapiens
attctagcctggaca

SEQ ID NO: 1117328 - DNA, 15 bp, Homo sapiens
gattctagcctggac

SEQ ID NO: 1117329 - DNA, 15 bp, Homo sapiens
agattctagcctgga

SEQ ID NO: 1117330 - DNA, 15 bp, Homo sapiens
gagattctagcctgg

SEQ ID NO: 1117331 - DNA, 15 bp, Homo sapiens
tgagattctagcctg

SEQ ID NO: 1117332 - DNA, 15 bp, Homo sapiens
ctgagattctagcct

SEQ ID NO: 1117333 - DNA, 15 bp, Homo sapiens
gctgagattctagcc

SEQ ID NO: 1117334 - DNA, 15 bp, Homo sapiens
agctgagattctagc

SEQ ID NO: 1117335 - DNA, 15 bp, Homo sapiens
gagctgagattctag

SEQ ID NO: 1117336 - DNA, 15 bp, Homo sapiens
agagctgagattcta

SEQ ID NO: 1117337 - DNA, 15 bp, Homo sapiens
cagagctgagattct

SEQ ID NO: 1117338 - DNA, 15 bp, Homo sapiens
gcagagctgagattc

SEQ ID NO: 1117339 - DNA, 15 bp, Homo sapiens
ggcagagctgagatt

SEQ ID NO: 1117340 - DNA, 15 bp, Homo sapiens
aggcagagctgagat

SEQ ID NO: 1117341 - DNA, 15 bp, Homo sapiens
gaggcagagctgaga

SEQ ID NO: 1117342 - DNA, 15 bp, Homo sapiens
agaggcagagctgag

SEQ ID NO: 1117343 - DNA, 15 bp, Homo sapiens
cagaggcagagctga

SEQ ID NO: 1117344 - DNA, 15 bp, Homo sapiens
ccagaggcagagctg

SEQ ID NO: 1117345 - DNA, 15 bp, Homo sapiens
gccagaggcagagct

SEQ ID NO: 1117346 - DNA, 15 bp, Homo sapiens
agccagaggcagagc

SEQ ID NO: 1117347 - DNA, 15 bp, Homo sapiens
cagccagaggcagag

SEQ ID NO: 1117348 - DNA, 15 bp, Homo sapiens
tcagccagaggcaga

SEQ ID NO: 1117349 - DNA, 15 bp, Homo sapiens
ctcagccagaggcag

SEQ ID NO: 1117350 - DNA, 15 bp, Homo sapiens
gctcagccagaggca

SEQ ID NO: 1117351 - DNA, 15 bp, Homo sapiens
tgctcagccagaggc

SEQ ID NO: 1117352 - DNA, 15 bp, Homo sapiens
ttgctcagccagagg

SEQ ID NO: 1117353 - DNA, 15 bp, Homo sapiens
cttgctcagccagag

SEQ ID NO: 1117354 - DNA, 15 bp, Homo sapiens
gcttgctcagccaga

SEQ ID NO: 1117355 - DNA, 15 bp, Homo sapiens
agcttgctcagccag

SEQ ID NO: 1117356 - DNA, 15 bp, Homo sapiens
aagcttgctcagcca

SEQ ID NO: 1117357 - DNA, 15 bp, Homo sapiens
caagcttgctcagcc

SEQ ID NO: 1117358 - DNA, 15 bp, Homo sapiens
ccaagcttgctcagc

SEQ ID NO: 1117359 - DNA, 15 bp, Homo sapiens
cccaagcttgctcag

SEQ ID NO: 1117360 - DNA, 15 bp, Homo sapiens
gcccaagcttgctca

SEQ ID NO: 1117361 - DNA, 15 bp, Homo sapiens
ggcccaagcttgctc

SEQ ID NO: 1117362 - DNA, 15 bp, Homo sapiens
tggcccaagcttgct

SEQ ID NO: 1117363 - DNA, 15 bp, Homo sapiens
atggcccaagcttgc

SEQ ID NO: 1117364 - DNA, 15 bp, Homo sapiens
catggcccaagcttg

SEQ ID NO: 1117365 - DNA, 15 bp, Homo sapiens
gcatggcccaagctt

SEQ ID NO: 1117366 - DNA, 15 bp, Homo sapiens
ggcatggcccaagct

SEQ ID NO: 1117367 - DNA, 15 bp, Homo sapiens
gggcatggcccaagc

SEQ ID NO: 1117368 - DNA, 15 bp, Homo sapiens
agggcatggcccaag

SEQ ID NO: 1117369 - DNA, 15 bp, Homo sapiens
cagggcatggcccaa

SEQ ID NO: 1117370 - DNA, 15 bp, Homo sapiens
tcagggcatggccca

SEQ ID NO: 1117371 - DNA, 15 bp, Homo sapiens
atcagggcatggccc

SEQ ID NO: 1117372 - DNA, 15 bp, Homo sapiens
gatcagggcatggcc

SEQ ID NO: 1117373 - DNA, 15 bp, Homo sapiens
agatcagggcatggc

SEQ ID NO: 1117374 - DNA, 15 bp, Homo sapiens
gagatcagggcatgg

SEQ ID NO: 1117375 - DNA, 15 bp, Homo sapiens
agagatcagggcatg

SEQ ID NO: 1117376 - DNA, 15 bp, Homo sapiens
cagagatcagggcat

SEQ ID NO: 1117377 - DNA, 15 bp, Homo sapiens
gcagagatcagggca

SEQ ID NO: 1117378 - DNA, 15 bp, Homo sapiens
ggcagagatcagggc

SEQ ID NO: 1117379 - DNA, 15 bp, Homo sapiens
aggcagagatcaggg

SEQ ID NO: 1117380 - DNA, 15 bp, Homo sapiens
aaggcagagatcagg

SEQ ID NO: 1117381 - DNA, 15 bp, Homo sapiens
gaaggcagagatcag

SEQ ID NO: 1117382 - DNA, 15 bp, Homo sapiens
tgaaggcagagatca

SEQ ID NO: 1117383 - DNA, 15 bp, Homo sapiens
ctgaaggcagagatc

SEQ ID NO: 1117384 - DNA, 15 bp, Homo sapiens
actgaaggcagagat

SEQ ID NO: 1117385 - DNA, 15 bp, Homo sapiens
cactgaaggcagaga

SEQ ID NO: 1117386 - DNA, 15 bp, Homo sapiens
gcactgaaggcagag

SEQ ID NO: 1117387 - DNA, 15 bp, Homo sapiens
ggcactgaaggcaga

SEQ ID NO: 1117388 - DNA, 15 bp, Homo sapiens
aggcactgaaggcag

SEQ ID NO: 1117389 - DNA, 15 bp, Homo sapiens
aaggcactgaaggca

SEQ ID NO: 1117390 - DNA, 15 bp, Homo sapiens
aaaggcactgaaggc

SEQ ID NO: 1117391 - DNA, 15 bp, Homo sapiens
aaaaggcactgaagg

SEQ ID NO: 1117392 - DNA, 15 bp, Homo sapiens
gaaaaggcactgaag

SEQ ID NO: 1117393 - DNA, 15 bp, Homo sapiens
agaaaaggcactgaa

SEQ ID NO: 1117394 - DNA, 15 bp, Homo sapiens
cagaaaaggcactga

SEQ ID NO: 1117395 - DNA, 15 bp, Homo sapiens
acagaaaaggcactg

SEQ ID NO: 1117396 - DNA, 15 bp, Homo sapiens
tttacagaaaaggca

SEQ ID NO: 1117397 - DNA, 15 bp, Homo sapiens
ctttacagaaaaggc

SEQ ID NO: 1117398 - DNA, 15 bp, Homo sapiens
actttacagaaaagg

SEQ ID NO: 1117399 - DNA, 15 bp, Homo sapiens
cactttacagaaaag

SEQ ID NO: 1117400 - DNA, 15 bp, Homo sapiens
tcactttacagaaaa

SEQ ID NO: 1117401 - DNA, 15 bp, Homo sapiens
ttcactttacagaaa

SEQ ID NO: 1117402 - DNA, 15 bp, Homo sapiens
cttcactttacagaa

SEQ ID NO: 1117403 - DNA, 15 bp, Homo sapiens
ccttcactttacaga

SEQ ID NO: 1117404 - DNA, 15 bp, Homo sapiens
tccttcactttacag

SEQ ID NO: 1117405 - DNA, 15 bp, Homo sapiens
ttccttcactttaca

SEQ ID NO: 1117406 - DNA, 15 bp, Homo sapiens
tttccttcactttac

SEQ ID NO: 1117407 - DNA, 15 bp, Homo sapiens
atttccttcacttta

SEQ ID NO: 1117408 - DNA, 15 bp, Homo sapiens
catttccttcacttt

SEQ ID NO: 1117409 - DNA, 15 bp, Homo sapiens
tcatttccttcactt

SEQ ID NO: 1117410 - DNA, 15 bp, Homo sapiens
ctcatttccttcact

SEQ ID NO: 1117411 - DNA, 15 bp, Homo sapiens
actcatttccttcac

SEQ ID NO: 1117412 - DNA, 15 bp, Homo sapiens
cactcatttccttca

SEQ ID NO: 1117413 - DNA, 15 bp, Homo sapiens
acactcatttccttc

SEQ ID NO: 1117414 - DNA, 15 bp, Homo sapiens
gacactcatttcctt

SEQ ID NO: 1117415 - DNA, 15 bp, Homo sapiens
ggacactcatttcct

SEQ ID NO: 1117416 - DNA, 15 bp, Homo sapiens
cggacactcatttcc

SEQ ID NO: 1117417 - DNA, 15 bp, Homo sapiens
tcggacactcatttc

SEQ ID NO: 1117418 - DNA, 15 bp, Homo sapiens
gtcggacactcattt

SEQ ID NO: 1117419 - DNA, 15 bp, Homo sapiens
cgtcggacactcatt

SEQ ID NO: 1117420 - DNA, 15 bp, Homo sapiens
ccgtcggacactcat

SEQ ID NO: 1117421 - DNA, 15 bp, Homo sapiens
cccgtcggacactca

SEQ ID NO: 1117422 - DNA, 15 bp, Homo sapiens
ccccgtcggacactc

SEQ ID NO: 1117423 - DNA, 15 bp, Homo sapiens
tccccgtcggacact

SEQ ID NO: 1117424 - DNA, 15 bp, Homo sapiens
ctccccgtcggacac

SEQ ID NO: 1117425 - DNA, 15 bp, Homo sapiens
cctccccgtcggaca

SEQ ID NO: 1117426 - DNA, 15 bp, Homo sapiens
tcctccccgtcggac

SEQ ID NO: 1117427 - DNA, 15 bp, Homo sapiens
ctcctccccgtcgga

SEQ ID NO: 1117428 - DNA, 15 bp, Homo sapiens
cctcctccccgtcgg

SEQ ID NO: 1117429 - DNA, 15 bp, Homo sapiens
acctcctccccgtcg

SEQ ID NO: 1117430 - DNA, 15 bp, Homo sapiens
aacctcctccccgtc

SEQ ID NO: 1117431 - DNA, 15 bp, Homo sapiens
gaacctcctccccgt

SEQ ID NO: 1117432 - DNA, 15 bp, Homo sapiens
ggaacctcctccccg

SEQ ID NO: 1117433 - DNA, 15 bp, Homo sapiens
aggaacctcctcccc

SEQ ID NO: 1117434 - DNA, 15 bp, Homo sapiens
taggaacctcctccc

SEQ ID NO: 1117435 - DNA, 15 bp, Homo sapiens
ttaggaacctcctcc

SEQ ID NO: 1117436 - DNA, 15 bp, Homo sapiens
tttaggaacctcctc

SEQ ID NO: 1117437 - DNA, 15 bp, Homo sapiens
ttttaggaacctcct

SEQ ID NO: 1117438 - DNA, 15 bp, Homo sapiens
cttttaggaacctcc

SEQ ID NO: 1117439 - DNA, 15 bp, Homo sapiens
ccttttaggaacctc

SEQ ID NO: 1117440 - DNA, 15 bp, Homo sapiens
cccttttaggaacct

SEQ ID NO: 1117441 - DNA, 15 bp, Homo sapiens
tcccttttaggaacc

SEQ ID NO: 1117442 - DNA, 15 bp, Homo sapiens
ctcccttttaggaac

SEQ ID NO: 1117443 - DNA, 15 bp, Homo sapiens
gctcccttttaggaa

SEQ ID NO: 1117444 - DNA, 15 bp, Homo sapiens
tgctcccttttagga

SEQ ID NO: 1117445 - DNA, 15 bp, Homo sapiens
ctgctcccttttagg

SEQ ID NO: 1117446 - DNA, 15 bp, Homo sapiens
cctgctcccttttag

SEQ ID NO: 1117447 - DNA, 15 bp, Homo sapiens
ccctgctccctttta

SEQ ID NO: 1117448 - DNA, 15 bp, Homo sapiens
accctgctccctttt

SEQ ID NO: 1117449 - DNA, 15 bp, Homo sapiens
gaccctgctcccttt

SEQ ID NO: 1117450 - DNA, 15 bp, Homo sapiens
agaccctgctccctt

SEQ ID NO: 1117451 - DNA, 15 bp, Homo sapiens
cagaccctgctccct

SEQ ID NO: 1117452 - DNA, 15 bp, Homo sapiens
ccagaccctgctccc

SEQ ID NO: 1117453 - DNA, 15 bp, Homo sapiens
cccagaccctgctcc

SEQ ID NO: 1117454 - DNA, 15 bp, Homo sapiens
ccccagaccctgctc

SEQ ID NO: 1117455 - DNA, 15 bp, Homo sapiens
tccccagaccctgct

SEQ ID NO: 1117456 - DNA, 15 bp, Homo sapiens
ctccccagaccctgc

SEQ ID NO: 1117457 - DNA, 15 bp, Homo sapiens
gctccccagaccctg

SEQ ID NO: 1117458 - DNA, 15 bp, Homo sapiens
ggctccccagaccct

SEQ ID NO: 1117459 - DNA, 15 bp, Homo sapiens
tgggctccccagacc

SEQ ID NO: 1117460 - DNA, 15 bp, Homo sapiens
ctgggctccccagac

SEQ ID NO: 1117461 - DNA, 15 bp, Homo sapiens
cctgggctccccaga

SEQ ID NO: 1117462 - DNA, 15 bp, Homo sapiens
gcctgggctccccag

SEQ ID NO: 1117463 - DNA, 15 bp, Homo sapiens
ggcctgggctcccca

SEQ ID NO: 1117464 - DNA, 15 bp, Homo sapiens
aggcctgggctcccc

SEQ ID NO: 1117465 - DNA, 15 bp, Homo sapiens
gaggcctgggctccc

SEQ ID NO: 1117466 - DNA, 15 bp, Homo sapiens
agaggcctgggctcc

SEQ ID NO: 1117467 - DNA, 15 bp, Homo sapiens
cagaggcctgggctc

SEQ ID NO: 1117468 - DNA, 15 bp, Homo sapiens
ccagaggcctgggct

SEQ ID NO: 1117469 - DNA, 15 bp, Homo sapiens
cccagaggcctgggc

SEQ ID NO: 1117470 - DNA, 15 bp, Homo sapiens
ccccagaggcctggg

SEQ ID NO: 1117471 - DNA, 15 bp, Homo sapiens
accccagaggcctgg

SEQ ID NO: 1117472 - DNA, 15 bp, Homo sapiens
aaccccagaggcctg

SEQ ID NO: 1117473 - DNA, 15 bp, Homo sapiens
caaccccagaggcct

SEQ ID NO: 1117474 - DNA, 15 bp, Homo sapiens
ccaaccccagaggcc

SEQ ID NO: 1117475 - DNA, 15 bp, Homo sapiens
cccaaccccagaggc

SEQ ID NO: 1117476 - DNA, 15 bp, Homo sapiens
acccaaccccagagg

SEQ ID NO: 1117477 - DNA, 15 bp, Homo sapiens
cacccaaccccagag

SEQ ID NO: 1117478 - DNA, 15 bp, Homo sapiens
tcacccaaccccaga

SEQ ID NO: 1117479 - DNA, 15 bp, Homo sapiens
gtcacccaaccccag

SEQ ID NO: 1117480 - DNA, 15 bp, Homo sapiens
agtcacccaacccca

SEQ ID NO: 1117481 - DNA, 15 bp, Homo sapiens
cagtcacccaacccc

SEQ ID NO: 1117482 - DNA, 15 bp, Homo sapiens
tcagtcacccaaccc

SEQ ID NO: 1117483 - DNA, 15 bp, Homo sapiens
ctcagtcacccaacc

SEQ ID NO: 1117484 - DNA, 15 bp, Homo sapiens
tctcagtcacccaac

SEQ ID NO: 1117485 - DNA, 15 bp, Homo sapiens
ttctcagtcacccaa

SEQ ID NO: 1117486 - DNA, 15 bp, Homo sapiens
cttctcagtcaccca

SEQ ID NO: 1117487 - DNA, 15 bp, Homo sapiens
ccttctcagtcaccc

SEQ ID NO: 1117488 - DNA, 15 bp, Homo sapiens
gccttctcagtcacc

SEQ ID NO: 1117489 - DNA, 15 bp, Homo sapiens
tgccttctcagtcac

SEQ ID NO: 1117490 - DNA, 15 bp, Homo sapiens
ctgccttctcagtca

SEQ ID NO: 1117491 - DNA, 15 bp, Homo sapiens
gctgccttctcagtc

SEQ ID NO: 1117492 - DNA, 15 bp, Homo sapiens
ggctgccttctcagt

SEQ ID NO: 1117493 - DNA, 15 bp, Homo sapiens
gggctgccttctcag

SEQ ID NO: 1117494 - DNA, 15 bp, Homo sapiens
ggggctgccttctca

SEQ ID NO: 1117495 - DNA, 15 bp, Homo sapiens
aggggctgccttctc

SEQ ID NO: 1117496 - DNA, 15 bp, Homo sapiens
caggggctgccttct

SEQ ID NO: 1117497 - DNA, 15 bp, Homo sapiens
tcaggggctgccttc

SEQ ID NO: 1117498 - DNA, 15 bp, Homo sapiens
ttcaggggctgcctt

SEQ ID NO: 1117499 - DNA, 15 bp, Homo sapiens
attcaggggctgcct

SEQ ID NO: 1117500 - DNA, 15 bp, Homo sapiens
tattcaggggctgcc

SEQ ID NO: 1117501 - DNA, 15 bp, Homo sapiens
gtattcaggggctgc

SEQ ID NO: 1117502 - DNA, 15 bp, Homo sapiens
tgtattcaggggctg

SEQ ID NO: 1117503 - DNA, 15 bp, Homo sapiens
ctgtattcaggggct

SEQ ID NO: 1117504 - DNA, 15 bp, Homo sapiens
tctgtattcaggggc

SEQ ID NO: 1117505 - DNA, 15 bp, Homo sapiens
ctctgtattcagggg

SEQ ID NO: 1117506 - DNA, 15 bp, Homo sapiens
gctctgtattcaggg

SEQ ID NO: 1117507 - DNA, 15 bp, Homo sapiens
tgctctgtattcagg

SEQ ID NO: 1117508 - DNA, 15 bp, Homo sapiens
ctgctctgtattcag

SEQ ID NO: 1117509 - DNA, 15 bp, Homo sapiens
tctgctctgtattca

SEQ ID NO: 1117510 - DNA, 15 bp, Homo sapiens
ctctgctctgtattc

SEQ ID NO: 1117511 - DNA, 15 bp, Homo sapiens
gctctgctctgtatt

SEQ ID NO: 1117512 - DNA, 15 bp, Homo sapiens
agctctgctctgtat

SEQ ID NO: 1117513 - DNA, 15 bp, Homo sapiens
cagctctgctctgta

SEQ ID NO: 1117514 - DNA, 15 bp, Homo sapiens
tcagctctgctctgt

SEQ ID NO: 1117515 - DNA, 15 bp, Homo sapiens
ttcagctctgctctg

SEQ ID NO: 1117516 - DNA, 15 bp, Homo sapiens
cttcagctctgctct

SEQ ID NO: 1117517 - DNA, 15 bp, Homo sapiens
ccttcagctctgctc

SEQ ID NO: 1117518 - DNA, 15 bp, Homo sapiens
accttcagctctgct

SEQ ID NO: 1117519 - DNA, 15 bp, Homo sapiens
caccttcagctctgc

SEQ ID NO: 1117520 - DNA, 15 bp, Homo sapiens
ccaccttcagctctg

SEQ ID NO: 1117521 - DNA, 15 bp, Homo sapiens
cccaccttcagctct

SEQ ID NO: 1117522 - DNA, 15 bp, Homo sapiens
ccccaccttcagctc

SEQ ID NO: 1117523 - DNA, 15 bp, Homo sapiens
gccccaccttcagct

SEQ ID NO: 1117524 - DNA, 15 bp, Homo sapiens
tgccccaccttcagc

SEQ ID NO: 1117525 - DNA, 15 bp, Homo sapiens
ctgccccaccttcag

SEQ ID NO: 1117526 - DNA, 15 bp, Homo sapiens
actgccccaccttca

SEQ ID NO: 1117527 - DNA, 15 bp, Homo sapiens
tactgccccaccttc

SEQ ID NO: 1117528 - DNA, 15 bp, Homo sapiens
ttactgccccacctt

SEQ ID NO: 1117529 - DNA, 15 bp, Homo sapiens
cttactgccccacct

SEQ ID NO: 1117530 - DNA, 15 bp, Homo sapiens
acttactgccccacc

SEQ ID NO: 1117531 - DNA, 15 bp, Homo sapiens
cacttactgccccac

SEQ ID NO: 1117532 - DNA, 15 bp, Homo sapiens
gcacttactgcccca

SEQ ID NO: 1117533 - DNA, 15 bp, Homo sapiens
agcacttactgcccc

SEQ ID NO: 1117534 - DNA, 15 bp, Homo sapiens
cagcacttactgccc

SEQ ID NO: 1117535 - DNA, 15 bp, Homo sapiens
gcagcacttactgcc

SEQ ID NO: 1117536 - DNA, 15 bp, Homo sapiens
agcagcacttactgc

SEQ ID NO: 1117537 - DNA, 15 bp, Homo sapiens
cagcagcacttactg

SEQ ID NO: 1117538 - DNA, 15 bp, Homo sapiens
ccagcagcacttact

SEQ ID NO: 1117539 - DNA, 15 bp, Homo sapiens
cccagcagcacttac

SEQ ID NO: 1117540 - DNA, 15 bp, Homo sapiens
tcccagcagcactta

SEQ ID NO: 1117541 - DNA, 15 bp, Homo sapiens
ctcccagcagcactt

SEQ ID NO: 1117542 - DNA, 15 bp, Homo sapiens
tctcccagcagcact

SEQ ID NO: 1117543 - DNA, 15 bp, Homo sapiens
ttctcccagcagcac

SEQ ID NO: 1117544 - DNA, 15 bp, Homo sapiens
gttctcccagcagca

SEQ ID NO: 1117545 - DNA, 15 bp, Homo sapiens
tgttctcccagcagc

SEQ ID NO: 1117546 - DNA, 15 bp, Homo sapiens
ctgttctcccagcag

SEQ ID NO: 1117547 - DNA, 15 bp, Homo sapiens
cctgttctcccagca

SEQ ID NO: 1117548 - DNA, 15 bp, Homo sapiens
gcctgttctcccagc

SEQ ID NO: 1117549 - DNA, 15 bp, Homo sapiens
tgcctgttctcccag

SEQ ID NO: 1117550 - DNA, 15 bp, Homo sapiens
ctgcctgttctccca

SEQ ID NO: 1117551 - DNA, 15 bp, Homo sapiens
gctgcctgttctccc

SEQ ID NO: 1117552 - DNA, 15 bp, Homo sapiens
tgctgcctgttctcc

SEQ ID NO: 1117553 - DNA, 15 bp, Homo sapiens
gtgctgcctgttctc

SEQ ID NO: 1117554 - DNA, 15 bp, Homo sapiens
tgtgctgcctgttct

SEQ ID NO: 1117555 - DNA, 15 bp, Homo sapiens
ctgtgctgcctgttc

SEQ ID NO: 1117556 - DNA, 15 bp, Homo sapiens
cctgtgctgcctgtt

SEQ ID NO: 1117557 - DNA, 15 bp, Homo sapiens
gcctgtgctgcctgt

SEQ ID NO: 1117558 - DNA, 15 bp, Homo sapiens
agcctgtgctgcctg

SEQ ID NO: 1117559 - DNA, 15 bp, Homo sapiens
cagcctgtgctgcct

SEQ ID NO: 1117560 - DNA, 15 bp, Homo sapiens
tcagcctgtgctgcc

SEQ ID NO: 1117561 - DNA, 15 bp, Homo sapiens
ctcagcctgtgctgc

SEQ ID NO: 1117562 - DNA, 15 bp, Homo sapiens
actcagcctgtgctg

SEQ ID NO: 1117563 - DNA, 15 bp, Homo sapiens
aactcagcctgtgct

SEQ ID NO: 1117564 - DNA, 15 bp, Homo sapiens
caactcagcctgtgc

SEQ ID NO: 1117565 - DNA, 15 bp, Homo sapiens
ccaactcagcctgtg

SEQ ID NO: 1117566 - DNA, 15 bp, Homo sapiens
accaactcagcctgt

SEQ ID NO: 1117567 - DNA, 15 bp, Homo sapiens
caccaactcagcctg

SEQ ID NO: 1117568 - DNA, 15 bp, Homo sapiens
gcaccaactcagcct

SEQ ID NO: 1117569 - DNA, 15 bp, Homo sapiens
tgcaccaactcagcc

SEQ ID NO: 1117570 - DNA, 15 bp, Homo sapiens
ctgcaccaactcagc

SEQ ID NO: 1117571 - DNA, 15 bp, Homo sapiens
tctgcaccaactcag

SEQ ID NO: 1117572 - DNA, 15 bp, Homo sapiens
ttctgcaccaactca

SEQ ID NO: 1117573 - DNA, 15 bp, Homo sapiens
cttctgcaccaactc

SEQ ID NO: 1117574 - DNA, 15 bp, Homo sapiens
acttctgcaccaact

SEQ ID NO: 1117575 - DNA, 15 bp, Homo sapiens
cacttctgcaccaac

SEQ ID NO: 1117576 - DNA, 15 bp, Homo sapiens
tcacttctgcaccaa

SEQ ID NO: 1117577 - DNA, 15 bp, Homo sapiens
ctcacttctgcacca

SEQ ID NO: 1117578 - DNA, 15 bp, Homo sapiens
actcacttctgcacc

SEQ ID NO: 1117579 - DNA, 15 bp, Homo sapiens
gactcacttctgcac

SEQ ID NO: 1117580 - DNA, 15 bp, Homo sapiens
tgactcacttctgca

SEQ ID NO: 1117581 - DNA, 15 bp, Homo sapiens
ttgactcacttctgc

SEQ ID NO: 1117582 - DNA, 15 bp, Homo sapiens
gttgactcacttctg

SEQ ID NO: 1117583 - DNA, 15 bp, Homo sapiens
tgttgactcacttct

SEQ ID NO: 1117584 - DNA, 15 bp, Homo sapiens
atgttgactcacttc

SEQ ID NO: 1117585 - DNA, 15 bp, Homo sapiens
tatgttgactcactt

SEQ ID NO: 1117586 - DNA, 15 bp, Homo sapiens
atatgttgactcact

SEQ ID NO: 1117587 - DNA, 15 bp, Homo sapiens
catatgttgactcac

SEQ ID NO: 1117588 - DNA, 15 bp, Homo sapiens
acatatgttgactca

SEQ ID NO: 1117589 - DNA, 15 bp, Homo sapiens
cacatatgttgactc

SEQ ID NO: 1117590 - DNA, 15 bp, Homo sapiens
gcacatatgttgact

SEQ ID NO: 1117591 - DNA, 15 bp, Homo sapiens
ggcacatatgttgac

SEQ ID NO: 1117592 - DNA, 15 bp, Homo sapiens
tggcacatatgttga

SEQ ID NO: 1117593 - DNA, 15 bp, Homo sapiens
atggcacatatgttg

SEQ ID NO: 1117594 - DNA, 15 bp, Homo sapiens
gatggcacatatgtt

SEQ ID NO: 1117595 - DNA, 15 bp, Homo sapiens
cgatggcacatatgt

SEQ ID NO: 1117596 - DNA, 15 bp, Homo sapiens
acgatggcacatatg

SEQ ID NO: 1117597 - DNA, 15 bp, Homo sapiens
tacgatggcacatat

SEQ ID NO: 1117598 - DNA, 15 bp, Homo sapiens
atacgatggcacata

SEQ ID NO: 1117599 - DNA, 15 bp, Homo sapiens
tatacgatggcacat

SEQ ID NO: 1117600 - DNA, 15 bp, Homo sapiens
ttatacgatggcaca

SEQ ID NO: 1117601 - DNA, 15 bp, Homo sapiens
tttatacgatggcac

SEQ ID NO: 1117602 - DNA, 15 bp, Homo sapiens
ttttatacgatggca

SEQ ID NO: 1117603 - DNA, 15 bp, Homo sapiens
attttatacgatggc

SEQ ID NO: 1117604 - DNA, 15 bp, Homo sapiens
cattttatacgatgg

SEQ ID NO: 1117605 - DNA, 15 bp, Homo sapiens
acattttatacgatg

SEQ ID NO: 1117606 - DNA, 15 bp, Homo sapiens
tacattttatacgat

SEQ ID NO: 1117607 - DNA, 15 bp, Homo sapiens
gtacattttatacga

SEQ ID NO: 1117608 - DNA, 15 bp, Homo sapiens
agtacattttatacg

SEQ ID NO: 1117609 - DNA, 15 bp, Homo sapiens
gagtacattttatac

SEQ ID NO: 1117610 - DNA, 15 bp, Homo sapiens
tgagtacattttata

SEQ ID NO: 1117611 - DNA, 15 bp, Homo sapiens
atgagtacattttat

SEQ ID NO: 1117612 - DNA, 15 bp, Homo sapiens
gatgagtacatttta

SEQ ID NO: 1117613 - DNA, 15 bp, Homo sapiens
cgatgagtacatttt

SEQ ID NO: 1117614 - DNA, 15 bp, Homo sapiens
ccgatgagtacattt

SEQ ID NO: 1117615 - DNA, 15 bp, Homo sapiens
tccgatgagtacatt

SEQ ID NO: 1117616 - DNA, 15 bp, Homo sapiens
gtccgatgagtacat

SEQ ID NO: 1117617 - DNA, 15 bp, Homo sapiens
agtccgatgagtaca

SEQ ID NO: 1117618 - DNA, 15 bp, Homo sapiens
cagtccgatgagtac

SEQ ID NO: 1117619 - DNA, 15 bp, Homo sapiens
acagtccgatgagta

SEQ ID NO: 1117620 - DNA, 15 bp, Homo sapiens
tacagtccgatgagt

SEQ ID NO: 1117621 - DNA, 15 bp, Homo sapiens
ctacagtccgatgag

SEQ ID NO: 1117622 - DNA, 15 bp, Homo sapiens
tctacagtccgatga

SEQ ID NO: 1117623 - DNA, 15 bp, Homo sapiens
atctacagtccgatg

SEQ ID NO: 1117624 - DNA, 15 bp, Homo sapiens
catctacagtccgat

SEQ ID NO: 1117625 - DNA, 15 bp, Homo sapiens
acatctacagtccga

SEQ ID NO: 1117626 - DNA, 15 bp, Homo sapiens
aacatctacagtccg

SEQ ID NO: 1117627 - DNA, 15 bp, Homo sapiens
taacatctacagtcc

SEQ ID NO: 1117628 - DNA, 15 bp, Homo sapiens
ctaacatctacagtc

SEQ ID NO: 1117629 - DNA, 15 bp, Homo sapiens
gctaacatctacagt

SEQ ID NO: 1117630 - DNA, 15 bp, Homo sapiens
agctaacatctacag

SEQ ID NO: 1117631 - DNA, 15 bp, Homo sapiens
tagctaacatctaca

SEQ ID NO: 1117632 - DNA, 15 bp, Homo sapiens
atagctaacatctac

SEQ ID NO: 1117633 - DNA, 15 bp, Homo sapiens
aatagctaacatcta

SEQ ID NO: 1117634 - DNA, 15 bp, Homo sapiens
taatagctaacatct

SEQ ID NO: 1117635 - DNA, 15 bp, Homo sapiens
gtaatagctaacatc

SEQ ID NO: 1117636 - DNA, 15 bp, Homo sapiens
agtaatagctaacat

SEQ ID NO: 1117637 - DNA, 15 bp, Homo sapiens
tagtaatagctaaca

SEQ ID NO: 1117638 - DNA, 15 bp, Homo sapiens
atagtaatagctaac

SEQ ID NO: 1117639 - DNA, 15 bp, Homo sapiens
aatagtaatagctaa

SEQ ID NO: 1117640 - DNA, 15 bp, Homo sapiens
taatagtaatagcta

SEQ ID NO: 1117641 - DNA, 15 bp, Homo sapiens
gtaatagtaatagct

SEQ ID NO: 1117642 - DNA, 15 bp, Homo sapiens
agtaatagtaatagc

SEQ ID NO: 1117643 - DNA, 15 bp, Homo sapiens
cagtaatagtaatag

SEQ ID NO: 1117644 - DNA, 15 bp, Homo sapiens
gcagtaatagtaata

SEQ ID NO: 1117645 - DNA, 15 bp, Homo sapiens
agcagtaatagtaat

SEQ ID NO: 1117646 - DNA, 15 bp, Homo sapiens
tagcagtaatagtaa

SEQ ID NO: 1117647 - DNA, 15 bp, Homo sapiens
atagcagtaatagta

SEQ ID NO: 1117648 - DNA, 15 bp, Homo sapiens
aatagcagtaatagt

SEQ ID NO: 1117649 - DNA, 15 bp, Homo sapiens
aaatagcagtaatag

SEQ ID NO: 1117650 - DNA, 15 bp, Homo sapiens
aaaatagcagtaata

SEQ ID NO: 1117651 - DNA, 15 bp, Homo sapiens
taaaatagcagtaat

SEQ ID NO: 1117652 - DNA, 15 bp, Homo sapiens
ataaaatagcagtaa

SEQ ID NO: 1117653 - DNA, 15 bp, Homo sapiens
cataaaatagcagta

SEQ ID NO: 1117654 - DNA, 15 bp, Homo sapiens
acataaaatagcagt

SEQ ID NO: 1117655 - DNA, 15 bp, Homo sapiens
aacataaaatagcag

SEQ ID NO: 1117656 - DNA, 15 bp, Homo sapiens
aaacataaaatagca

SEQ ID NO: 1117657 - DNA, 15 bp, Homo sapiens
aaaacataaaatagc

SEQ ID NO: 1117658 - DNA, 15 bp, Homo sapiens
taaaacataaaatag

SEQ ID NO: 1117659 - DNA, 15 bp, Homo sapiens
ataaaacataaaata

SEQ ID NO: 1117660 - DNA, 15 bp, Homo sapiens
tataaaacataaaat

SEQ ID NO: 1117661 - DNA, 15 bp, Homo sapiens
ctataaaacataaaa

SEQ ID NO: 1117662 - DNA, 15 bp, Homo sapiens
tctataaaacataaa

SEQ ID NO: 1117663 - DNA, 15 bp, Homo sapiens
gtctataaaacataa

SEQ ID NO: 1117664 - DNA, 15 bp, Homo sapiens
tgtctataaaacata

SEQ ID NO: 1117665 - DNA, 15 bp, Homo sapiens
ctgtctataaaacat

SEQ ID NO: 1117666 - DNA, 15 bp, Homo sapiens
cctgtctataaaaca

SEQ ID NO: 1117667 - DNA, 15 bp, Homo sapiens
ccctgtctataaaac

SEQ ID NO: 1117668 - DNA, 15 bp, Homo sapiens
accctgtctataaaa

SEQ ID NO: 1117669 - DNA, 15 bp, Homo sapiens
gaccctgtctataaa

SEQ ID NO: 1117670 - DNA, 15 bp, Homo sapiens
agaccctgtctataa

SEQ ID NO: 1117671 - DNA, 15 bp, Homo sapiens
gagaccctgtctata

SEQ ID NO: 1117672 - DNA, 15 bp, Homo sapiens
tgagaccctgtctat

SEQ ID NO: 1117673 - DNA, 15 bp, Homo sapiens
gtgagaccctgtcta

SEQ ID NO: 1117674 - DNA, 15 bp, Homo sapiens
gactgcactccagcc

SEQ ID NO: 1117675 - DNA, 15 bp, Homo sapiens
tgactgcactccagc

SEQ ID NO: 1117676 - DNA, 15 bp, Homo sapiens
gtgactgcactccag

SEQ ID NO: 1117677 - DNA, 15 bp, Homo sapiens
tgtgactgcactcca

SEQ ID NO: 1117678 - DNA, 15 bp, Homo sapiens
gtgtgactgcactcc

SEQ ID NO: 1117679 - DNA, 15 bp, Homo sapiens
tgtgtgactgcactc

SEQ ID NO: 1117680 - DNA, 15 bp, Homo sapiens
ttgtgtgactgcact

SEQ ID NO: 1117681 - DNA, 15 bp, Homo sapiens
attgtgtgactgcac

SEQ ID NO: 1117682 - DNA, 15 bp, Homo sapiens
gattgtgtgactgca

SEQ ID NO: 1117683 - DNA, 15 bp, Homo sapiens
tgattgtgtgactgc

SEQ ID NO: 1117684 - DNA, 15 bp, Homo sapiens
atgattgtgtgactg

SEQ ID NO: 1117685 - DNA, 15 bp, Homo sapiens
tatgattgtgtgact

SEQ ID NO: 1117686 - DNA, 15 bp, Homo sapiens
ctatgattgtgtgac

SEQ ID NO: 1117687 - DNA, 15 bp, Homo sapiens
gctatgattgtgtga

SEQ ID NO: 1117688 - DNA, 15 bp, Homo sapiens
agctatgattgtgtg

SEQ ID NO: 1117689 - DNA, 15 bp, Homo sapiens
ttgcagtgagctatg

SEQ ID NO: 1117690 - DNA, 15 bp, Homo sapiens
gttgcagtgagctat

SEQ ID NO: 1117691 - DNA, 15 bp, Homo sapiens
tgaggttgcagtgag

SEQ ID NO: 1117692 - DNA, 15 bp, Homo sapiens
ctgaggttgcagtga

SEQ ID NO: 1117693 - DNA, 15 bp, Homo sapiens
gctgaggttgcagtg

SEQ ID NO: 1117694 - DNA, 15 bp, Homo sapiens
ggctgaggttgcagt

SEQ ID NO: 1117695 - DNA, 15 bp, Homo sapiens
aggctgaggttgcag

SEQ ID NO: 1117696 - DNA, 15 bp, Homo sapiens
gaggctgaggttgca

SEQ ID NO: 1117697 - DNA, 15 bp, Homo sapiens
ggaggctgaggttgc

SEQ ID NO: 1117698 - DNA, 15 bp, Homo sapiens
aggaggctgaggttg

SEQ ID NO: 1117699 - DNA, 15 bp, Homo sapiens
caggaggctgaggtt

SEQ ID NO: 1117700 - DNA, 15 bp, Homo sapiens
ccaggaggctgaggt

SEQ ID NO: 1117701 - DNA, 15 bp, Homo sapiens
cccaggaggctgagg

SEQ ID NO: 1117702 - DNA, 15 bp, Homo sapiens
gcccaggaggctgag

SEQ ID NO: 1117703 - DNA, 15 bp, Homo sapiens
agcccaggaggctga

SEQ ID NO: 1117704 - DNA, 15 bp, Homo sapiens
aagcccaggaggctg

SEQ ID NO: 1117705 - DNA, 15 bp, Homo sapiens
taagcccaggaggct

SEQ ID NO: 1117706 - DNA, 15 bp, Homo sapiens
ttaagcccaggaggc

SEQ ID NO: 1117707 - DNA, 15 bp, Homo sapiens
cttaagcccaggagg

SEQ ID NO: 1117708 - DNA, 15 bp, Homo sapiens
gcttaagcccaggag

SEQ ID NO: 1117709 - DNA, 15 bp, Homo sapiens
cgcttaagcccagga

SEQ ID NO: 1117710 - DNA, 15 bp, Homo sapiens
tcgcttaagcccagg

SEQ ID NO: 1117711 - DNA, 15 bp, Homo sapiens
atcgcttaagcccag

SEQ ID NO: 1117712 - DNA, 15 bp, Homo sapiens
gatcgcttaagccca

SEQ ID NO: 1117713 - DNA, 15 bp, Homo sapiens
agatcgcttaagccc

SEQ ID NO: 1117714 - DNA, 15 bp, Homo sapiens
cagatcgcttaagcc

SEQ ID NO: 1117715 - DNA, 15 bp, Homo sapiens
gcagatcgcttaagc

SEQ ID NO: 1117716 - DNA, 15 bp, Homo sapiens
ggcagatcgcttaag

SEQ ID NO: 1117717 - DNA, 15 bp, Homo sapiens
aggcagatcgcttaa

SEQ ID NO: 1117718 - DNA, 15 bp, Homo sapiens
gaggcagatcgctta

SEQ ID NO: 1117719 - DNA, 15 bp, Homo sapiens
tgaggcagatcgctt

SEQ ID NO: 1117720 - DNA, 15 bp, Homo sapiens
ctgaggcagatcgct

SEQ ID NO: 1117721 - DNA, 15 bp, Homo sapiens
gctgaggcagatcgc

SEQ ID NO: 1117722 - DNA, 15 bp, Homo sapiens
ggctgaggcagatcg

SEQ ID NO: 1117723 - DNA, 15 bp, Homo sapiens
aggctgaggcagatc

SEQ ID NO: 1117724 - DNA, 15 bp, Homo sapiens
gaggctgaggcagat

SEQ ID NO: 1117725 - DNA, 15 bp, Homo sapiens
acacatctgtagtcc

SEQ ID NO: 1117726 - DNA, 15 bp, Homo sapiens
cacacatctgtagtc

SEQ ID NO: 1117727 - DNA, 15 bp, Homo sapiens
gcacacatctgtagt

SEQ ID NO: 1117728 - DNA, 15 bp, Homo sapiens
ggcacacatctgtag

SEQ ID NO: 1117729 - DNA, 15 bp, Homo sapiens
tggcacacatctgta

SEQ ID NO: 1117730 - DNA, 15 bp, Homo sapiens
gtggcacacatctgt

SEQ ID NO: 1117731 - DNA, 15 bp, Homo sapiens
ggtggcacacatctg

SEQ ID NO: 1117732 - DNA, 15 bp, Homo sapiens
tggtggcacacatct

SEQ ID NO: 1117733 - DNA, 15 bp, Homo sapiens
gtggtggcacacatc

SEQ ID NO: 1117734 - DNA, 15 bp, Homo sapiens
cgtggtggcacacat

SEQ ID NO: 1117735 - DNA, 15 bp, Homo sapiens
gcgtggtggcacaca

SEQ ID NO: 1117736 - DNA, 15 bp, Homo sapiens
tttagccaggcgtgg

SEQ ID NO: 1117737 - DNA, 15 bp, Homo sapiens
atttagccaggcgtg

SEQ ID NO: 1117738 - DNA, 15 bp, Homo sapiens
aatttagccaggcgt

SEQ ID NO: 1117739 - DNA, 15 bp, Homo sapiens
aaatttagccaggcg

SEQ ID NO: 1117740 - DNA, 15 bp, Homo sapiens
caaatttagccaggc

SEQ ID NO: 1117741 - DNA, 15 bp, Homo sapiens
acaaatttagccagg

SEQ ID NO: 1117742 - DNA, 15 bp, Homo sapiens
aacaaatttagccag

SEQ ID NO: 1117743 - DNA, 15 bp, Homo sapiens
aaacaaatttagcca

SEQ ID NO: 1117744 - DNA, 15 bp, Homo sapiens
taaacaaatttagcc

SEQ ID NO: 1117745 - DNA, 15 bp, Homo sapiens
ttaaacaaatttagc

SEQ ID NO: 1117746 - DNA, 15 bp, Homo sapiens
tttaaacaaatttag

SEQ ID NO: 1117747 - DNA, 15 bp, Homo sapiens
attttaaacaaattt

SEQ ID NO: 1117748 - DNA, 15 bp, Homo sapiens
aattttaaacaaatt

SEQ ID NO: 1117749 - DNA, 15 bp, Homo sapiens
aaattttaaacaaat

SEQ ID NO: 1117750 - DNA, 15 bp, Homo sapiens
aaaattttaaacaaa

SEQ ID NO: 1117751 - DNA, 15 bp, Homo sapiens
aaaaattttaaacaa

SEQ ID NO: 1117752 - DNA, 15 bp, Homo sapiens
aaaaaattttaaaca

SEQ ID NO: 1117753 - DNA, 15 bp, Homo sapiens
aaaaaaattttaaac

SEQ ID NO: 1117754 - DNA, 15 bp, Homo sapiens
aaaaaaaattttaaa

SEQ ID NO: 1117755 - DNA, 15 bp, Homo sapiens
caaaaaaaattttaa

SEQ ID NO: 1117756 - DNA, 15 bp, Homo sapiens
acaaaaaaaatttta

SEQ ID NO: 1117757 - DNA, 15 bp, Homo sapiens
tacaaaaaaaatttt

SEQ ID NO: 1117758 - DNA, 15 bp, Homo sapiens
tctctacaaaaaaaa

SEQ ID NO: 1117759 - DNA, 15 bp, Homo sapiens
aagtggggagtaaga

SEQ ID NO: 1117760 - DNA, 15 bp, Homo sapiens
taagtggggagtaag

SEQ ID NO: 1117761 - DNA, 15 bp, Homo sapiens
gtaagtggggagtaa

SEQ ID NO: 1117762 - DNA, 15 bp, Homo sapiens
ggtaagtggggagta

SEQ ID NO: 1117763 - DNA, 15 bp, Homo sapiens
gggtaagtggggagt

SEQ ID NO: 1117764 - DNA, 15 bp, Homo sapiens
agggtaagtggggag

SEQ ID NO: 1117765 - DNA, 15 bp, Homo sapiens
cagggtaagtgggga

SEQ ID NO: 1117766 - DNA, 15 bp, Homo sapiens
tcagggtaagtgggg

SEQ ID NO: 1117767 - DNA, 15 bp, Homo sapiens
ttcagggtaagtggg

SEQ ID NO: 1117768 - DNA, 15 bp, Homo sapiens
tttcagggtaagtgg

SEQ ID NO: 1117769 - DNA, 15 bp, Homo sapiens
ctttcagggtaagtg

SEQ ID NO: 1117770 - DNA, 15 bp, Homo sapiens
gctttcagggtaagt

SEQ ID NO: 1117771 - DNA, 15 bp, Homo sapiens
ggctttcagggtaag

SEQ ID NO: 1117772 - DNA, 15 bp, Homo sapiens
gggctttcagggtaa

SEQ ID NO: 1117773 - DNA, 15 bp, Homo sapiens
ggggctttcagggta

SEQ ID NO: 1117774 - DNA, 15 bp, Homo sapiens
gggggctttcagggt

SEQ ID NO: 1117775 - DNA, 15 bp, Homo sapiens
ggggggctttcaggg

SEQ ID NO: 1117776 - DNA, 15 bp, Homo sapiens
cggggggctttcagg

SEQ ID NO: 1117777 - DNA, 15 bp, Homo sapiens
gcggggggctttcag

SEQ ID NO: 1117778 - DNA, 15 bp, Homo sapiens
tgcggggggctttca

SEQ ID NO: 1117779 - DNA, 15 bp, Homo sapiens
ctgcggggggctttc

SEQ ID NO: 1117780 - DNA, 15 bp, Homo sapiens
cctgcggggggcttt

SEQ ID NO: 1117781 - DNA, 15 bp, Homo sapiens
gcctgcggggggctt

SEQ ID NO: 1117782 - DNA, 15 bp, Homo sapiens
agcctgcggggggct

SEQ ID NO: 1117783 - DNA, 15 bp, Homo sapiens
tagcctgcggggggc

SEQ ID NO: 1117784 - DNA, 15 bp, Homo sapiens
ttagcctgcgggggg

SEQ ID NO: 1117785 - DNA, 15 bp, Homo sapiens
tttagcctgcggggg

SEQ ID NO: 1117786 - DNA, 15 bp, Homo sapiens
ttttagcctgcgggg

SEQ ID NO: 1117787 - DNA, 15 bp, Homo sapiens
gttttagcctgcggg

SEQ ID NO: 1117788 - DNA, 15 bp, Homo sapiens
tgttttagcctgcgg

SEQ ID NO: 1117789 - DNA, 15 bp, Homo sapiens
gtgttttagcctgcg

SEQ ID NO: 1117790 - DNA, 15 bp, Homo sapiens
ggtgttttagcctgc

SEQ ID NO: 1117791 - DNA, 15 bp, Homo sapiens
gggtgttttagcctg

SEQ ID NO: 1117792 - DNA, 15 bp, Homo sapiens
agggtgttttagcct

SEQ ID NO: 1117793 - DNA, 15 bp, Homo sapiens
gagggtgttttagcc

SEQ ID NO: 1117794 - DNA, 15 bp, Homo sapiens
agagggtgttttagc

SEQ ID NO: 1117795 - DNA, 15 bp, Homo sapiens
gagagggtgttttag

SEQ ID NO: 1117796 - DNA, 15 bp, Homo sapiens
ggagagggtgtttta

SEQ ID NO: 1117797 - DNA, 15 bp, Homo sapiens
gggagagggtgtttt

SEQ ID NO: 1117798 - DNA, 15 bp, Homo sapiens
ggggagagggtgttt

SEQ ID NO: 1117799 - DNA, 15 bp, Homo sapiens
cggggagagggtgtt

SEQ ID NO: 1117800 - DNA, 15 bp, Homo sapiens
tcggggagagggtgt

SEQ ID NO: 1117801 - DNA, 15 bp, Homo sapiens
ctcggggagagggtg

SEQ ID NO: 1117802 - DNA, 15 bp, Homo sapiens
cctcggggagagggt

SEQ ID NO: 1117803 - DNA, 15 bp, Homo sapiens
ccctcggggagaggg

SEQ ID NO: 1117804 - DNA, 15 bp, Homo sapiens
tccctcggggagagg

SEQ ID NO: 1117805 - DNA, 15 bp, Homo sapiens
ttccctcggggagag

SEQ ID NO: 1117806 - DNA, 15 bp, Homo sapiens
gttccctcggggaga

SEQ ID NO: 1117807 - DNA, 15 bp, Homo sapiens
tgttccctcggggag

SEQ ID NO: 1117808 - DNA, 15 bp, Homo sapiens
ctgttccctcgggga

SEQ ID NO: 1117809 - DNA, 15 bp, Homo sapiens
cctgttccctcgggg

SEQ ID NO: 1117810 - DNA, 15 bp, Homo sapiens
tcctgttccctcggg

SEQ ID NO: 1117811 - DNA, 15 bp, Homo sapiens
gtcctgttccctcgg

SEQ ID NO: 1117812 - DNA, 15 bp, Homo sapiens
agtcctgttccctcg

SEQ ID NO: 1117813 - DNA, 15 bp, Homo sapiens
gagtcctgttccctc

SEQ ID NO: 1117814 - DNA, 15 bp, Homo sapiens
agagtcctgttccct

SEQ ID NO: 1117815 - DNA, 15 bp, Homo sapiens
aagagtcctgttccc

SEQ ID NO: 1117816 - DNA, 15 bp, Homo sapiens
aaagagtcctgttcc

SEQ ID NO: 1117817 - DNA, 15 bp, Homo sapiens
aaaagagtcctgttc

SEQ ID NO: 1117818 - DNA, 15 bp, Homo sapiens
caaaagagtcctgtt

SEQ ID NO: 1117819 - DNA, 15 bp, Homo sapiens
acaaaagagtcctgt

SEQ ID NO: 1117820 - DNA, 15 bp, Homo sapiens
tacaaaagagtcctg

SEQ ID NO: 1117821 - DNA, 15 bp, Homo sapiens
gtacaaaagagtcct

SEQ ID NO: 1117822 - DNA, 15 bp, Homo sapiens
ggtacaaaagagtcc

SEQ ID NO: 1117823 - DNA, 15 bp, Homo sapiens
cggtacaaaagagtc

SEQ ID NO: 1117824 - DNA, 15 bp, Homo sapiens
ccggtacaaaagagt

SEQ ID NO: 1117825 - DNA, 15 bp, Homo sapiens
cccggtacaaaagag

SEQ ID NO: 1117826 - DNA, 15 bp, Homo sapiens
ccccggtacaaaaga

SEQ ID NO: 1117827 - DNA, 15 bp, Homo sapiens
tccccggtacaaaag

SEQ ID NO: 1117828 - DNA, 15 bp, Homo sapiens
gtccccggtacaaaa

SEQ ID NO: 1117829 - DNA, 15 bp, Homo sapiens
ggtccccggtacaaa

SEQ ID NO: 1117830 - DNA, 15 bp, Homo sapiens
tggtccccggtacaa

SEQ ID NO: 1117831 - DNA, 15 bp, Homo sapiens
ctggtccccggtaca

SEQ ID NO: 1117832 - DNA, 15 bp, Homo sapiens
gctggtccccggtac

SEQ ID NO: 1117833 - DNA, 15 bp, Homo sapiens
agctggtccccggta

SEQ ID NO: 1117834 - DNA, 15 bp, Homo sapiens
aagctggtccccggt

SEQ ID NO: 1117835 - DNA, 15 bp, Homo sapiens
gaagctggtccccgg

SEQ ID NO: 1117836 - DNA, 15 bp, Homo sapiens
agaagctggtccccg

SEQ ID NO: 1117837 - DNA, 15 bp, Homo sapiens
cagaagctggtcccc

SEQ ID NO: 1117838 - DNA, 15 bp, Homo sapiens
ccagaagctggtccc

SEQ ID NO: 1117839 - DNA, 15 bp, Homo sapiens
accagaagctggtcc

SEQ ID NO: 1117840 - DNA, 15 bp, Homo sapiens
caccagaagctggtc

SEQ ID NO: 1117841 - DNA, 15 bp, Homo sapiens
tcaccagaagctggt

SEQ ID NO: 1117842 - DNA, 15 bp, Homo sapiens
ctcaccagaagctgg

SEQ ID NO: 1117843 - DNA, 15 bp, Homo sapiens
cctcaccagaagctg

SEQ ID NO: 1117844 - DNA, 15 bp, Homo sapiens
ccctcaccagaagct

SEQ ID NO: 1117845 - DNA, 15 bp, Homo sapiens
accctcaccagaagc

SEQ ID NO: 1117846 - DNA, 15 bp, Homo sapiens
caccctcaccagaag

SEQ ID NO: 1117847 - DNA, 15 bp, Homo sapiens
gcaccctcaccagaa

SEQ ID NO: 1117848 - DNA, 15 bp, Homo sapiens
cgcaccctcaccaga

SEQ ID NO: 1117849 - DNA, 15 bp, Homo sapiens
ccgcaccctcaccag

SEQ ID NO: 1117850 - DNA, 15 bp, Homo sapiens
tccgcaccctcacca

SEQ ID NO: 1117851 - DNA, 15 bp, Homo sapiens
gtccgcaccctcacc

SEQ ID NO: 1117852 - DNA, 15 bp, Homo sapiens
tgtccgcaccctcac

SEQ ID NO: 1117853 - DNA, 15 bp, Homo sapiens
gtgtccgcaccctca

SEQ ID NO: 1117854 - DNA, 15 bp, Homo sapiens
ggtgtccgcaccctc

SEQ ID NO: 1117855 - DNA, 15 bp, Homo sapiens
tggtgtccgcaccct

SEQ ID NO: 1117856 - DNA, 15 bp, Homo sapiens
ctggtgtccgcaccc

SEQ ID NO: 1117857 - DNA, 15 bp, Homo sapiens
cctggtgtccgcacc

SEQ ID NO: 1117858 - DNA, 15 bp, Homo sapiens
ccctggtgtccgcac

SEQ ID NO: 1117859 - DNA, 15 bp, Homo sapiens
cccctggtgtccgca

SEQ ID NO: 1117860 - DNA, 15 bp, Homo sapiens
gcccctggtgtccgc

SEQ ID NO: 1117861 - DNA, 15 bp, Homo sapiens
ggcccctggtgtccg

SEQ ID NO: 1117862 - DNA, 15 bp, Homo sapiens
cggcccctggtgtcc

SEQ ID NO: 1117863 - DNA, 15 bp, Homo sapiens
acggcccctggtgtc

SEQ ID NO: 1117864 - DNA, 15 bp, Homo sapiens
gacggcccctggtgt

SEQ ID NO: 1117865 - DNA, 15 bp, Homo sapiens
agacggcccctggtg

SEQ ID NO: 1117866 - DNA, 15 bp, Homo sapiens
cagacggcccctggt

SEQ ID NO: 1117867 - DNA, 15 bp, Homo sapiens
acagacggcccctgg

SEQ ID NO: 1117868 - DNA, 15 bp, Homo sapiens
cacagacggcccctg

SEQ ID NO: 1117869 - DNA, 15 bp, Homo sapiens
ccacagacggcccct

SEQ ID NO: 1117870 - DNA, 15 bp, Homo sapiens
cccacagacggcccc

SEQ ID NO: 1117871 - DNA, 15 bp, Homo sapiens
ccccacagacggccc

SEQ ID NO: 1117872 - DNA, 15 bp, Homo sapiens
accccacagacggcc

SEQ ID NO: 1117873 - DNA, 15 bp, Homo sapiens
caccccacagacggc

SEQ ID NO: 1117874 - DNA, 15 bp, Homo sapiens
ccaccccacagacgg

SEQ ID NO: 1117875 - DNA, 15 bp, Homo sapiens
cccaccccacagacg

SEQ ID NO: 1117876 - DNA, 15 bp, Homo sapiens
tcccaccccacagac

SEQ ID NO: 1117877 - DNA, 15 bp, Homo sapiens
ctcccaccccacaga

SEQ ID NO: 1117878 - DNA, 15 bp, Homo sapiens
tctcccaccccacag

SEQ ID NO: 1117879 - DNA, 15 bp, Homo sapiens
ctctcccaccccaca

SEQ ID NO: 1117880 - DNA, 15 bp, Homo sapiens
cctctcccaccccac

SEQ ID NO: 1117881 - DNA, 15 bp, Homo sapiens
ccctctcccacccca

SEQ ID NO: 1117882 - DNA, 15 bp, Homo sapiens
gccctctcccacccc

SEQ ID NO: 1117883 - DNA, 15 bp, Homo sapiens
cgccctctcccaccc

SEQ ID NO: 1117884 - DNA, 15 bp, Homo sapiens
ccgccctctcccacc

SEQ ID NO: 1117885 - DNA, 15 bp, Homo sapiens
gccgccctctcccac

SEQ ID NO: 1117886 - DNA, 15 bp, Homo sapiens
tgccgccctctccca

SEQ ID NO: 1117887 - DNA, 15 bp, Homo sapiens
ctgccgccctctccc

SEQ ID NO: 1117888 - DNA, 15 bp, Homo sapiens
cctgccgccctctcc

SEQ ID NO: 1117889 - DNA, 15 bp, Homo sapiens
tcctgccgccctctc

SEQ ID NO: 1117890 - DNA, 15 bp, Homo sapiens
ttcctgccgccctct

SEQ ID NO: 1117891 - DNA, 15 bp, Homo sapiens
attcctgccgccctc

SEQ ID NO: 1117892 - DNA, 15 bp, Homo sapiens
aattcctgccgccct

SEQ ID NO: 1117893 - DNA, 15 bp, Homo sapiens
gaattcctgccgccc

SEQ ID NO: 1117894 - DNA, 15 bp, Homo sapiens
tgaattcctgccgcc

SEQ ID NO: 1117895 - DNA, 15 bp, Homo sapiens
gtgaattcctgccgc

SEQ ID NO: 1117896 - DNA, 15 bp, Homo sapiens
cgtgaattcctgccg

SEQ ID NO: 1117897 - DNA, 15 bp, Homo sapiens
gcgtgaattcctgcc

SEQ ID NO: 1117898 - DNA, 15 bp, Homo sapiens
cgcgtgaattcctgc

SEQ ID NO: 1117899 - DNA, 15 bp, Homo sapiens
ccgcgtgaattcctg

SEQ ID NO: 1117900 - DNA, 15 bp, Homo sapiens
gccgcgtgaattcct

SEQ ID NO: 1117901 - DNA, 15 bp, Homo sapiens
tgccgcgtgaattcc

SEQ ID NO: 1117902 - DNA, 15 bp, Homo sapiens
atgccgcgtgaattc

SEQ ID NO: 1117903 - DNA, 15 bp, Homo sapiens
catgccgcgtgaatt

SEQ ID NO: 1117904 - DNA, 15 bp, Homo sapiens
acatgccgcgtgaat

SEQ ID NO: 1117905 - DNA, 15 bp, Homo sapiens
gacatgccgcgtgaa

SEQ ID NO: 1117906 - DNA, 15 bp, Homo sapiens
cgacatgccgcgtga

SEQ ID NO: 1117907 - DNA, 15 bp, Homo sapiens
ccgacatgccgcgtg

SEQ ID NO: 1117908 - DNA, 15 bp, Homo sapiens
cccgacatgccgcgt

SEQ ID NO: 1117909 - DNA, 15 bp, Homo sapiens
tcccgacatgccgcg

SEQ ID NO: 1117910 - DNA, 15 bp, Homo sapiens
ttcccgacatgccgc

SEQ ID NO: 1117911 - DNA, 15 bp, Homo sapiens
attcccgacatgccg

SEQ ID NO: 1117912 - DNA, 15 bp, Homo sapiens
cattcccgacatgcc

SEQ ID NO: 1117913 - DNA, 15 bp, Homo sapiens
gcattcccgacatgc

SEQ ID NO: 1117914 - DNA, 15 bp, Homo sapiens
agcattcccgacatg

SEQ ID NO: 1117915 - DNA, 15 bp, Homo sapiens
cagcattcccgacat

SEQ ID NO: 1117916 - DNA, 15 bp, Homo sapiens
tcagcattcccgaca

SEQ ID NO: 1117917 - DNA, 15 bp, Homo sapiens
atcagcattcccgac

SEQ ID NO: 1117918 - DNA, 15 bp, Homo sapiens
tatcagcattcccga

SEQ ID NO: 1117919 - DNA, 15 bp, Homo sapiens
gtatcagcattcccg

SEQ ID NO: 1117920 - DNA, 15 bp, Homo sapiens
agtatcagcattccc

SEQ ID NO: 1117921 - DNA, 15 bp, Homo sapiens
cagtatcagcattcc

SEQ ID NO: 1117922 - DNA, 15 bp, Homo sapiens
acagtatcagcattc

SEQ ID NO: 1117923 - DNA, 15 bp, Homo sapiens
cacagtatcagcatt

SEQ ID NO: 1117924 - DNA, 15 bp, Homo sapiens
tcacagtatcagcat

SEQ ID NO: 1117925 - DNA, 15 bp, Homo sapiens
ttcacagtatcagca

SEQ ID NO: 1117926 - DNA, 15 bp, Homo sapiens
tttcacagtatcagc

SEQ ID NO: 1117927 - DNA, 15 bp, Homo sapiens
gtttcacagtatcag

SEQ ID NO: 1117928 - DNA, 15 bp, Homo sapiens
ggtttcacagtatca

SEQ ID NO: 1117929 - DNA, 15 bp, Homo sapiens
gggtttcacagtatc

SEQ ID NO: 1117930 - DNA, 15 bp, Homo sapiens
tgggtttcacagtat

SEQ ID NO: 1117931 - DNA, 15 bp, Homo sapiens
ctgggtttcacagta

SEQ ID NO: 1117932 - DNA, 15 bp, Homo sapiens
actgggtttcacagt

SEQ ID NO: 1117933 - DNA, 15 bp, Homo sapiens
gactgggtttcacag

SEQ ID NO: 1117934 - DNA, 15 bp, Homo sapiens
tgactgggtttcaca

SEQ ID NO: 1117935 - DNA, 15 bp, Homo sapiens
atgactgggtttcac

SEQ ID NO: 1117936 - DNA, 15 bp, Homo sapiens
aatgactgggtttca

SEQ ID NO: 1117937 - DNA, 15 bp, Homo sapiens
caatgactgggtttc

SEQ ID NO: 1117938 - DNA, 15 bp, Homo sapiens
tcaatgactgggttt

SEQ ID NO: 1117939 - DNA, 15 bp, Homo sapiens
atcaatgactgggtt

SEQ ID NO: 1117940 - DNA, 15 bp, Homo sapiens
catcaatgactgggt

SEQ ID NO: 1117941 - DNA, 15 bp, Homo sapiens
ccatcaatgactggg

SEQ ID NO: 1117942 - DNA, 15 bp, Homo sapiens
gccatcaatgactgg

SEQ ID NO: 1117943 - DNA, 15 bp, Homo sapiens
agccatcaatgactg

SEQ ID NO: 1117944 - DNA, 15 bp, Homo sapiens
gagccatcaatgact

SEQ ID NO: 1117945 - DNA, 15 bp, Homo sapiens
agagccatcaatgac

SEQ ID NO: 1117946 - DNA, 15 bp, Homo sapiens
cagagccatcaatga

SEQ ID NO: 1117947 - DNA, 15 bp, Homo sapiens
ccagagccatcaatg

SEQ ID NO: 1117948 - DNA, 15 bp, Homo sapiens
cccagagccatcaat

SEQ ID NO: 1117949 - DNA, 15 bp, Homo sapiens
acccagagccatcaa

SEQ ID NO: 1117950 - DNA, 15 bp, Homo sapiens
gacccagagccatca

SEQ ID NO: 1117951 - DNA, 15 bp, Homo sapiens
ggacccagagccatc

SEQ ID NO: 1117952 - DNA, 15 bp, Homo sapiens
gggacccagagccat

SEQ ID NO: 1117953 - DNA, 15 bp, Homo sapiens
agggacccagagcca

SEQ ID NO: 1117954 - DNA, 15 bp, Homo sapiens
cagggacccagagcc

SEQ ID NO: 1117955 - DNA, 15 bp, Homo sapiens
gcagggacccagagc

SEQ ID NO: 1117956 - DNA, 15 bp, Homo sapiens
ggcagggacccagag

SEQ ID NO: 1117957 - DNA, 15 bp, Homo sapiens
gggcagggacccaga

SEQ ID NO: 1117958 - DNA, 15 bp, Homo sapiens
cgggcagggacccag

SEQ ID NO: 1117959 - DNA, 15 bp, Homo sapiens
gcgggcagggaccca

SEQ ID NO: 1117960 - DNA, 15 bp, Homo sapiens
ggcgggcagggaccc

SEQ ID NO: 1117961 - DNA, 15 bp, Homo sapiens
tggcgggcagggacc

SEQ ID NO: 1117962 - DNA, 15 bp, Homo sapiens
gtggcgggcagggac

SEQ ID NO: 1117963 - DNA, 15 bp, Homo sapiens
ggtggcgggcaggga

SEQ ID NO: 1117964 - DNA, 15 bp, Homo sapiens
gggtggcgggcaggg

SEQ ID NO: 1117965 - DNA, 15 bp, Homo sapiens
ggggtggcgggcagg

SEQ ID NO: 1117966 - DNA, 15 bp, Homo sapiens
gggggtggcgggcag

SEQ ID NO: 1117967 - DNA, 15 bp, Homo sapiens
tgggggtggcgggca

SEQ ID NO: 1117968 - DNA, 15 bp, Homo sapiens
ctgggggtggcgggc

SEQ ID NO: 1117969 - DNA, 15 bp, Homo sapiens
cctgggggtggcggg

SEQ ID NO: 1117970 - DNA, 15 bp, Homo sapiens
gcctgggggtggcgg

SEQ ID NO: 1117971 - DNA, 15 bp, Homo sapiens
ggcctgggggtggcg

SEQ ID NO: 1117972 - DNA, 15 bp, Homo sapiens
gggcctgggggtggc

SEQ ID NO: 1117973 - DNA, 15 bp, Homo sapiens
ggggcctgggggtgg

SEQ ID NO: 1117974 - DNA, 15 bp, Homo sapiens
cggggcctgggggtg

SEQ ID NO: 1117975 - DNA, 15 bp, Homo sapiens
ccggggcctgggggt

SEQ ID NO: 1117976 - DNA, 15 bp, Homo sapiens
gccggggcctggggg

SEQ ID NO: 1117977 - DNA, 15 bp, Homo sapiens
ggccggggcctgggg

SEQ ID NO: 1117978 - DNA, 15 bp, Homo sapiens
cggccggggcctggg

SEQ ID NO: 1117979 - DNA, 15 bp, Homo sapiens
acggccggggcctgg

SEQ ID NO: 1117980 - DNA, 15 bp, Homo sapiens
cacggccggggcctg

SEQ ID NO: 1117981 - DNA, 15 bp, Homo sapiens
ccacggccggggcct

SEQ ID NO: 1117982 - DNA, 15 bp, Homo sapiens
cccacggccggggcc

SEQ ID NO: 1117983 - DNA, 15 bp, Homo sapiens
tcccacggccggggc

SEQ ID NO: 1117984 - DNA, 15 bp, Homo sapiens
gtcccacggccgggg

SEQ ID NO: 1117985 - DNA, 15 bp, Homo sapiens
tgtcccacggccggg

SEQ ID NO: 1117986 - DNA, 15 bp, Homo sapiens
atgtcccacggccgg

SEQ ID NO: 1117987 - DNA, 15 bp, Homo sapiens
gatgtcccacggccg

SEQ ID NO: 1117988 - DNA, 15 bp, Homo sapiens
agatgtcccacggcc

SEQ ID NO: 1117989 - DNA, 15 bp, Homo sapiens
cagatgtcccacggc

SEQ ID NO: 1117990 - DNA, 15 bp, Homo sapiens
gcagatgtcccacgg

SEQ ID NO: 1117991 - DNA, 15 bp, Homo sapiens
agcagatgtcccacg

SEQ ID NO: 1117992 - DNA, 15 bp, Homo sapiens
gagcagatgtcccac

SEQ ID NO: 1117993 - DNA, 15 bp, Homo sapiens
ggagcagatgtccca

SEQ ID NO: 1117994 - DNA, 15 bp, Homo sapiens
gggagcagatgtccc

SEQ ID NO: 1117995 - DNA, 15 bp, Homo sapiens
agggagcagatgtcc

SEQ ID NO: 1117996 - DNA, 15 bp, Homo sapiens
gagggagcagatgtc

SEQ ID NO: 1117997 - DNA, 15 bp, Homo sapiens
tgagggagcagatgt

SEQ ID NO: 1117998 - DNA, 15 bp, Homo sapiens
gtgagggagcagatg

SEQ ID NO: 1117999 - DNA, 15 bp, Homo sapiens
agtgagggagcagat

SEQ ID NO: 1118000 - DNA, 15 bp, Homo sapiens
gagtgagggagcaga

SEQ ID NO: 1118001 - DNA, 15 bp, Homo sapiens
ggagtgagggagcag

SEQ ID NO: 1118002 - DNA, 15 bp, Homo sapiens
tggagtgagggagca

SEQ ID NO: 1118003 - DNA, 15 bp, Homo sapiens
gtggagtgagggagc

SEQ ID NO: 1118004 - DNA, 15 bp, Homo sapiens
agtggagtgagggag

SEQ ID NO: 1118005 - DNA, 15 bp, Homo sapiens
gagtggagtgaggga

SEQ ID NO: 1118006 - DNA, 15 bp, Homo sapiens
cgagtggagtgaggg

SEQ ID NO: 1118007 - DNA, 15 bp, Homo sapiens
gcgagtggagtgagg

SEQ ID NO: 1118008 - DNA, 15 bp, Homo sapiens
ggcgagtggagtgag

SEQ ID NO: 1118009 - DNA, 15 bp, Homo sapiens
tggcgagtggagtga

SEQ ID NO: 1118010 - DNA, 15 bp, Homo sapiens
gtggcgagtggagtg

SEQ ID NO: 1118011 - DNA, 15 bp, Homo sapiens
tgtggcgagtggagt

SEQ ID NO: 1118012 - DNA, 15 bp, Homo sapiens
gtgtggcgagtggag

SEQ ID NO: 1118013 - DNA, 15 bp, Homo sapiens
ggtgtggcgagtgga

SEQ ID NO: 1118014 - DNA, 15 bp, Homo sapiens
gggtgtggcgagtgg

SEQ ID NO: 1118015 - DNA, 15 bp, Homo sapiens
ggggtgtggcgagtg

SEQ ID NO: 1118016 - DNA, 15 bp, Homo sapiens
aggggtgtggcgagt

SEQ ID NO: 1118017 - DNA, 15 bp, Homo sapiens
gaggggtgtggcgag

SEQ ID NO: 1118018 - DNA, 15 bp, Homo sapiens
tgaggggtgtggcga

SEQ ID NO: 1118019 - DNA, 15 bp, Homo sapiens
ctgaggggtgtggcg

SEQ ID NO: 1118020 - DNA, 15 bp, Homo sapiens
actgaggggtgtggc

SEQ ID NO: 1118021 - DNA, 15 bp, Homo sapiens
gactgaggggtgtgg

SEQ ID NO: 1118022 - DNA, 15 bp, Homo sapiens
agactgaggggtgtg

SEQ ID NO: 1118023 - DNA, 15 bp, Homo sapiens
gagactgaggggtgt

SEQ ID NO: 1118024 - DNA, 15 bp, Homo sapiens
tgagactgaggggtg

SEQ ID NO: 1118025 - DNA, 15 bp, Homo sapiens
gtgagactgaggggt

SEQ ID NO: 1118026 - DNA, 15 bp, Homo sapiens
ggtgagactgagggg

SEQ ID NO: 1118027 - DNA, 15 bp, Homo sapiens
gggtgagactgaggg

SEQ ID NO: 1118028 - DNA, 15 bp, Homo sapiens
ggggtgagactgagg

SEQ ID NO: 1118029 - DNA, 15 bp, Homo sapiens
gggggtgagactgag

SEQ ID NO: 1118030 - DNA, 15 bp, Homo sapiens
cgggggtgagactga

SEQ ID NO: 1118031 - DNA, 15 bp, Homo sapiens
acgggggtgagactg

SEQ ID NO: 1118032 - DNA, 15 bp, Homo sapiens
tacgggggtgagact

SEQ ID NO: 1118033 - DNA, 15 bp, Homo sapiens
gtacgggggtgagac

SEQ ID NO: 1118034 - DNA, 15 bp, Homo sapiens
ggtacgggggtgaga

SEQ ID NO: 1118035 - DNA, 15 bp, Homo sapiens
gggtacgggggtgag

SEQ ID NO: 1118036 - DNA, 15 bp, Homo sapiens
ggggtacgggggtga

SEQ ID NO: 1118037 - DNA, 15 bp, Homo sapiens
cggggtacgggggtg

SEQ ID NO: 1118038 - DNA, 15 bp, Homo sapiens
tcggggtacgggggt

SEQ ID NO: 1118039 - DNA, 15 bp, Homo sapiens
atcggggtacggggg

SEQ ID NO: 1118040 - DNA, 15 bp, Homo sapiens
catcggggtacgggg

SEQ ID NO: 1118041 - DNA, 15 bp, Homo sapiens
gcatcggggtacggg

SEQ ID NO: 1118042 - DNA, 15 bp, Homo sapiens
cgcatcggggtacgg

SEQ ID NO: 1118043 - DNA, 15 bp, Homo sapiens
ccgcatcggggtacg

SEQ ID NO: 1118044 - DNA, 15 bp, Homo sapiens
accgcatcggggtac

SEQ ID NO: 1118045 - DNA, 15 bp, Homo sapiens
gaccgcatcggggta

SEQ ID NO: 1118046 - DNA, 15 bp, Homo sapiens
cgaccgcatcggggt

SEQ ID NO: 1118047 - DNA, 15 bp, Homo sapiens
acgaccgcatcgggg

SEQ ID NO: 1118048 - DNA, 15 bp, Homo sapiens
aacgaccgcatcggg

SEQ ID NO: 1118049 - DNA, 15 bp, Homo sapiens
gaacgaccgcatcgg

SEQ ID NO: 1118050 - DNA, 15 bp, Homo sapiens
ggaacgaccgcatcg

SEQ ID NO: 1118051 - DNA, 15 bp, Homo sapiens
gggaacgaccgcatc

SEQ ID NO: 1118052 - DNA, 15 bp, Homo sapiens
ggggaacgaccgcat

SEQ ID NO: 1118053 - DNA, 15 bp, Homo sapiens
gggggaacgaccgca

SEQ ID NO: 1118054 - DNA, 15 bp, Homo sapiens
agggggaacgaccgc

SEQ ID NO: 1118055 - DNA, 15 bp, Homo sapiens
aagggggaacgaccg

SEQ ID NO: 1118056 - DNA, 15 bp, Homo sapiens
gaagggggaacgacc

SEQ ID NO: 1118057 - DNA, 15 bp, Homo sapiens
ggaagggggaacgac

SEQ ID NO: 1118058 - DNA, 15 bp, Homo sapiens
gggaagggggaacga

SEQ ID NO: 1118059 - DNA, 15 bp, Homo sapiens
agggaagggggaacg

SEQ ID NO: 1118060 - DNA, 15 bp, Homo sapiens
gagggaagggggaac

SEQ ID NO: 1118061 - DNA, 15 bp, Homo sapiens
ggagggaagggggaa

SEQ ID NO: 1118062 - DNA, 15 bp, Homo sapiens
gggagggaaggggga

SEQ ID NO: 1118063 - DNA, 15 bp, Homo sapiens
ggggagggaaggggg

SEQ ID NO: 1118064 - DNA, 15 bp, Homo sapiens
tggggagggaagggg

SEQ ID NO: 1118065 - DNA, 15 bp, Homo sapiens
gtggggagggaaggg

SEQ ID NO: 1118066 - DNA, 15 bp, Homo sapiens
ctgtggggagggaag

SEQ ID NO: 1118067 - DNA, 15 bp, Homo sapiens
actgtggggagggaa

SEQ ID NO: 1118068 - DNA, 15 bp, Homo sapiens
aactgtggggaggga

SEQ ID NO: 1118069 - DNA, 15 bp, Homo sapiens
gaactgtggggaggg

SEQ ID NO: 1118070 - DNA, 15 bp, Homo sapiens
agaactgtggggagg

SEQ ID NO: 1118071 - DNA, 15 bp, Homo sapiens
gagaactgtggggag

SEQ ID NO: 1118072 - DNA, 15 bp, Homo sapiens
agagaactgtgggga

SEQ ID NO: 1118073 - DNA, 15 bp, Homo sapiens
cagagaactgtgggg

SEQ ID NO: 1118074 - DNA, 15 bp, Homo sapiens
tcagagaactgtggg

SEQ ID NO: 1118075 - DNA, 15 bp, Homo sapiens
gtcagagaactgtgg

SEQ ID NO: 1118076 - DNA, 15 bp, Homo sapiens
tgtcagagaactgtg

SEQ ID NO: 1118077 - DNA, 15 bp, Homo sapiens
gtgtcagagaactgt

SEQ ID NO: 1118078 - DNA, 15 bp, Homo sapiens
ggtgtcagagaactg

SEQ ID NO: 1118079 - DNA, 15 bp, Homo sapiens
gggtgtcagagaact

SEQ ID NO: 1118080 - DNA, 15 bp, Homo sapiens
ggggtgtcagagaac

SEQ ID NO: 1118081 - DNA, 15 bp, Homo sapiens
tggggtgtcagagaa

SEQ ID NO: 1118082 - DNA, 15 bp, Homo sapiens
ctggggtgtcagaga

SEQ ID NO: 1118083 - DNA, 15 bp, Homo sapiens
gctggggtgtcagag

SEQ ID NO: 1118084 - DNA, 15 bp, Homo sapiens
agctggggtgtcaga

SEQ ID NO: 1118085 - DNA, 15 bp, Homo sapiens
aagctggggtgtcag

SEQ ID NO: 1118086 - DNA, 15 bp, Homo sapiens
caagctggggtgtca

SEQ ID NO: 1118087 - DNA, 15 bp, Homo sapiens
ccaagctggggtgtc

SEQ ID NO: 1118088 - DNA, 15 bp, Homo sapiens
tccaagctggggtgt

SEQ ID NO: 1118089 - DNA, 15 bp, Homo sapiens
ctccaagctggggtg

SEQ ID NO: 1118090 - DNA, 15 bp, Homo sapiens
cctccaagctggggt

SEQ ID NO: 1118091 - DNA, 15 bp, Homo sapiens
ccctccaagctgggg

SEQ ID NO: 1118092 - DNA, 15 bp, Homo sapiens
tccctccaagctggg

SEQ ID NO: 1118093 - DNA, 15 bp, Homo sapiens
ctccctccaagctgg

SEQ ID NO: 1118094 - DNA, 15 bp, Homo sapiens
actccctccaagctg

SEQ ID NO: 1118095 - DNA, 15 bp, Homo sapiens
aactccctccaagct

SEQ ID NO: 1118096 - DNA, 15 bp, Homo sapiens
caactccctccaagc

SEQ ID NO: 1118097 - DNA, 15 bp, Homo sapiens
acaactccctccaag

SEQ ID NO: 1118098 - DNA, 15 bp, Homo sapiens
aacaactccctccaa

SEQ ID NO: 1118099 - DNA, 15 bp, Homo sapiens
caacaactccctcca

SEQ ID NO: 1118100 - DNA, 15 bp, Homo sapiens
gcaacaactccctcc

SEQ ID NO: 1118101 - DNA, 15 bp, Homo sapiens
ggcaacaactccctc

SEQ ID NO: 1118102 - DNA, 15 bp, Homo sapiens
tggcaacaactccct

SEQ ID NO: 1118103 - DNA, 15 bp, Homo sapiens
ctggcaacaactccc

SEQ ID NO: 1118104 - DNA, 15 bp, Homo sapiens
tctggcaacaactcc

SEQ ID NO: 1118105 - DNA, 15 bp, Homo sapiens
ctctggcaacaactc

SEQ ID NO: 1118106 - DNA, 15 bp, Homo sapiens
tctctggcaacaact

SEQ ID NO: 1118107 - DNA, 15 bp, Homo sapiens
ctctctggcaacaac

SEQ ID NO: 1118108 - DNA, 15 bp, Homo sapiens
actctctggcaacaa

SEQ ID NO: 1118109 - DNA, 15 bp, Homo sapiens
cactctctggcaaca

SEQ ID NO: 1118110 - DNA, 15 bp, Homo sapiens
ccactctctggcaac

SEQ ID NO: 1118111 - DNA, 15 bp, Homo sapiens
gccactctctggcaa

SEQ ID NO: 1118112 - DNA, 15 bp, Homo sapiens
agccactctctggca

SEQ ID NO: 1118113 - DNA, 15 bp, Homo sapiens
aagccactctctggc

SEQ ID NO: 1118114 - DNA, 15 bp, Homo sapiens
gaagccactctctgg

SEQ ID NO: 1118115 - DNA, 15 bp, Homo sapiens
cgaagccactctctg

SEQ ID NO: 1118116 - DNA, 15 bp, Homo sapiens
tcgaagccactctct

SEQ ID NO: 1118117 - DNA, 15 bp, Homo sapiens
ctcgaagccactctc

SEQ ID NO: 1118118 - DNA, 15 bp, Homo sapiens
cctcgaagccactct

SEQ ID NO: 1118119 - DNA, 15 bp, Homo sapiens
gcctcgaagccactc

SEQ ID NO: 1118120 - DNA, 15 bp, Homo sapiens
agcctcgaagccact

SEQ ID NO: 1118121 - DNA, 15 bp, Homo sapiens
cagcctcgaagccac

SEQ ID NO: 1118122 - DNA, 15 bp, Homo sapiens
acagcctcgaagcca

SEQ ID NO: 1118123 - DNA, 15 bp, Homo sapiens
cacagcctcgaagcc

SEQ ID NO: 1118124 - DNA, 15 bp, Homo sapiens
acacagcctcgaagc

SEQ ID NO: 1118125 - DNA, 15 bp, Homo sapiens
cacacagcctcgaag

SEQ ID NO: 1118126 - DNA, 15 bp, Homo sapiens
ccacacagcctcgaa

SEQ ID NO: 1118127 - DNA, 15 bp, Homo sapiens
cccacacagcctcga

SEQ ID NO: 1118128 - DNA, 15 bp, Homo sapiens
tcccacacagcctcg

SEQ ID NO: 1118129 - DNA, 15 bp, Homo sapiens
ctcccacacagcctc

SEQ ID NO: 1118130 - DNA, 15 bp, Homo sapiens
cctcccacacagcct

SEQ ID NO: 1118131 - DNA, 15 bp, Homo sapiens
ccctcccacacagcc

SEQ ID NO: 1118132 - DNA, 15 bp, Homo sapiens
accctcccacacagc

SEQ ID NO: 1118133 - DNA, 15 bp, Homo sapiens
gaccctcccacacag

SEQ ID NO: 1118134 - DNA, 15 bp, Homo sapiens
ggaccctcccacaca

SEQ ID NO: 1118135 - DNA, 15 bp, Homo sapiens
gggaccctcccacac

SEQ ID NO: 1118136 - DNA, 15 bp, Homo sapiens
tgggaccctcccaca

SEQ ID NO: 1118137 - DNA, 15 bp, Homo sapiens
ctgggaccctcccac

SEQ ID NO: 1118138 - DNA, 15 bp, Homo sapiens
cctgggaccctccca

SEQ ID NO: 1118139 - DNA, 15 bp, Homo sapiens
gcctgggaccctccc

SEQ ID NO: 1118140 - DNA, 15 bp, Homo sapiens
tgcctgggaccctcc

SEQ ID NO: 1118141 - DNA, 15 bp, Homo sapiens
gtgcctgggaccctc

SEQ ID NO: 1118142 - DNA, 15 bp, Homo sapiens
tgtgcctgggaccct

SEQ ID NO: 1118143 - DNA, 15 bp, Homo sapiens
ttgtgcctgggaccc

SEQ ID NO: 1118144 - DNA, 15 bp, Homo sapiens
attgtgcctgggacc

SEQ ID NO: 1118145 - DNA, 15 bp, Homo sapiens
cattgtgcctgggac

SEQ ID NO: 1118146 - DNA, 15 bp, Homo sapiens
ccattgtgcctggga

SEQ ID NO: 1118147 - DNA, 15 bp, Homo sapiens
cccattgtgcctggg

SEQ ID NO: 1118148 - DNA, 15 bp, Homo sapiens
tcccattgtgcctgg

SEQ ID NO: 1118149 - DNA, 15 bp, Homo sapiens
ctcccattgtgcctg

SEQ ID NO: 1118150 - DNA, 15 bp, Homo sapiens
cctcccattgtgcct

SEQ ID NO: 1118151 - DNA, 15 bp, Homo sapiens
ccctcccattgtgcc

SEQ ID NO: 1118152 - DNA, 15 bp, Homo sapiens
gccctcccattgtgc

SEQ ID NO: 1118153 - DNA, 15 bp, Homo sapiens
ggccctcccattgtg

SEQ ID NO: 1118154 - DNA, 15 bp, Homo sapiens
tggccctcccattgt

SEQ ID NO: 1118155 - DNA, 15 bp, Homo sapiens
gtggccctcccattg

SEQ ID NO: 1118156 - DNA, 15 bp, Homo sapiens
tgtggccctcccatt

SEQ ID NO: 1118157 - DNA, 15 bp, Homo sapiens
atgtggccctcccat

SEQ ID NO: 1118158 - DNA, 15 bp, Homo sapiens
catgtggccctccca

SEQ ID NO: 1118159 - DNA, 15 bp, Homo sapiens
ccatgtggccctccc

SEQ ID NO: 1118160 - DNA, 15 bp, Homo sapiens
cccatgtggccctcc

SEQ ID NO: 1118161 - DNA, 15 bp, Homo sapiens
gcccatgtggccctc

SEQ ID NO: 1118162 - DNA, 15 bp, Homo sapiens
tgcccatgtggccct

SEQ ID NO: 1118163 - DNA, 15 bp, Homo sapiens
ctgcccatgtggccc

SEQ ID NO: 1118164 - DNA, 15 bp, Homo sapiens
gctgcccatgtggcc

SEQ ID NO: 1118165 - DNA, 15 bp, Homo sapiens
ggctgcccatgtggc

SEQ ID NO: 1118166 - DNA, 15 bp, Homo sapiens
aggctgcccatgtgg

SEQ ID NO: 1118167 - DNA, 15 bp, Homo sapiens
caggctgcccatgtg

SEQ ID NO: 1118168 - DNA, 15 bp, Homo sapiens
tcaggctgcccatgt

SEQ ID NO: 1118169 - DNA, 15 bp, Homo sapiens
gtcaggctgcccatg

SEQ ID NO: 1118170 - DNA, 15 bp, Homo sapiens
tgtcaggctgcccat

SEQ ID NO: 1118171 - DNA, 15 bp, Homo sapiens
ttgtcaggctgccca

SEQ ID NO: 1118172 - DNA, 15 bp, Homo sapiens
gttgtcaggctgccc

SEQ ID NO: 1118173 - DNA, 15 bp, Homo sapiens
tgttgtcaggctgcc

SEQ ID NO: 1118174 - DNA, 15 bp, Homo sapiens
ctgttgtcaggctgc

SEQ ID NO: 1118175 - DNA, 15 bp, Homo sapiens
cctgttgtcaggctg

SEQ ID NO: 1118176 - DNA, 15 bp, Homo sapiens
acctgttgtcaggct

SEQ ID NO: 1118177 - DNA, 15 bp, Homo sapiens
gacctgttgtcaggc

SEQ ID NO: 1118178 - DNA, 15 bp, Homo sapiens
tgacctgttgtcagg

SEQ ID NO: 1118179 - DNA, 15 bp, Homo sapiens
gtgacctgttgtcag

SEQ ID NO: 1118180 - DNA, 15 bp, Homo sapiens
tgtgacctgttgtca

SEQ ID NO: 1118181 - DNA, 15 bp, Homo sapiens
ttgtgacctgttgtc

SEQ ID NO: 1118182 - DNA, 15 bp, Homo sapiens
gttgtgacctgttgt

SEQ ID NO: 1118183 - DNA, 15 bp, Homo sapiens
ggttgtgacctgttg

SEQ ID NO: 1118184 - DNA, 15 bp, Homo sapiens
gggttgtgacctgtt

SEQ ID NO: 1118185 - DNA, 15 bp, Homo sapiens
tgggttgtgacctgt

SEQ ID NO: 1118186 - DNA, 15 bp, Homo sapiens
atgggttgtgacctg

SEQ ID NO: 1118187 - DNA, 15 bp, Homo sapiens
catgggttgtgacct

SEQ ID NO: 1118188 - DNA, 15 bp, Homo sapiens
gcatgggttgtgacc

SEQ ID NO: 1118189 - DNA, 15 bp, Homo sapiens
tgcatgggttgtgac

SEQ ID NO: 1118190 - DNA, 15 bp, Homo sapiens
ctgcatgggttgtga

SEQ ID NO: 1118191 - DNA, 15 bp, Homo sapiens
cctgcatgggttgtg

SEQ ID NO: 1118192 - DNA, 15 bp, Homo sapiens
tcctgcatgggttgt

SEQ ID NO: 1118193 - DNA, 15 bp, Homo sapiens
ctcctgcatgggttg

SEQ ID NO: 1118194 - DNA, 15 bp, Homo sapiens
tctcctgcatgggtt

SEQ ID NO: 1118195 - DNA, 15 bp, Homo sapiens
atctcctgcatgggt

SEQ ID NO: 1118196 - DNA, 15 bp, Homo sapiens
tatctcctgcatggg

SEQ ID NO: 1118197 - DNA, 15 bp, Homo sapiens
gtatctcctgcatgg

SEQ ID NO: 1118198 - DNA, 15 bp, Homo sapiens
agtatctcctgcatg

SEQ ID NO: 1118199 - DNA, 15 bp, Homo sapiens
cagtatctcctgcat

SEQ ID NO: 1118200 - DNA, 15 bp, Homo sapiens
tcagtatctcctgca

SEQ ID NO: 1118201 - DNA, 15 bp, Homo sapiens
ttcagtatctcctgc

SEQ ID NO: 1118202 - DNA, 15 bp, Homo sapiens
cttcagtatctcctg

SEQ ID NO: 1118203 - DNA, 15 bp, Homo sapiens
gcttcagtatctcct

SEQ ID NO: 1118204 - DNA, 15 bp, Homo sapiens
cgcttcagtatctcc

SEQ ID NO: 1118205 - DNA, 15 bp, Homo sapiens
ccgcttcagtatctc

SEQ ID NO: 1118206 - DNA, 15 bp, Homo sapiens
cccgcttcagtatct

SEQ ID NO: 1118207 - DNA, 15 bp, Homo sapiens
ccccgcttcagtatc

SEQ ID NO: 1118208 - DNA, 15 bp, Homo sapiens
cccccgcttcagtat

SEQ ID NO: 1118209 - DNA, 15 bp, Homo sapiens
acccccgcttcagta

SEQ ID NO: 1118210 - DNA, 15 bp, Homo sapiens
cacccccgcttcagt

SEQ ID NO: 1118211 - DNA, 15 bp, Homo sapiens
ccacccccgcttcag

SEQ ID NO: 1118212 - DNA, 15 bp, Homo sapiens
cccacccccgcttca

SEQ ID NO: 1118213 - DNA, 15 bp, Homo sapiens
acccacccccgcttc

SEQ ID NO: 1118214 - DNA, 15 bp, Homo sapiens
aacccacccccgctt

SEQ ID NO: 1118215 - DNA, 15 bp, Homo sapiens
caacccacccccgct

SEQ ID NO: 1118216 - DNA, 15 bp, Homo sapiens
ccaacccacccccgc

SEQ ID NO: 1118217 - DNA, 15 bp, Homo sapiens
cccaacccacccccg

SEQ ID NO: 1118218 - DNA, 15 bp, Homo sapiens
acccaacccaccccc

SEQ ID NO: 1118219 - DNA, 15 bp, Homo sapiens
cacccaacccacccc

SEQ ID NO: 1118220 - DNA, 15 bp, Homo sapiens
gcacccaacccaccc

SEQ ID NO: 1118221 - DNA, 15 bp, Homo sapiens
ggcacccaacccacc

SEQ ID NO: 1118222 - DNA, 15 bp, Homo sapiens
aggcacccaacccac

SEQ ID NO: 1118223 - DNA, 15 bp, Homo sapiens
gaggcacccaaccca

SEQ ID NO: 1118224 - DNA, 15 bp, Homo sapiens
tgaggcacccaaccc

SEQ ID NO: 1118225 - DNA, 15 bp, Homo sapiens
ttgaggcacccaacc

SEQ ID NO: 1118226 - DNA, 15 bp, Homo sapiens
attgaggcacccaac

SEQ ID NO: 1118227 - DNA, 15 bp, Homo sapiens
gattgaggcacccaa

SEQ ID NO: 1118228 - DNA, 15 bp, Homo sapiens
ggattgaggcaccca

SEQ ID NO: 1118229 - DNA, 15 bp, Homo sapiens
gggattgaggcaccc

SEQ ID NO: 1118230 - DNA, 15 bp, Homo sapiens
cgggattgaggcacc

SEQ ID NO: 1118231 - DNA, 15 bp, Homo sapiens
gcgggattgaggcac

SEQ ID NO: 1118232 - DNA, 15 bp, Homo sapiens
ggcgggattgaggca

SEQ ID NO: 1118233 - DNA, 15 bp, Homo sapiens
gggcgggattgaggc

SEQ ID NO: 1118234 - DNA, 15 bp, Homo sapiens
ggggcgggattgagg

SEQ ID NO: 1118235 - DNA, 15 bp, Homo sapiens
gggggcgggattgag

SEQ ID NO: 1118236 - DNA, 15 bp, Homo sapiens
agggggcgggattga

SEQ ID NO: 1118237 - DNA, 15 bp, Homo sapiens
aagggggcgggattg

SEQ ID NO: 1118238 - DNA, 15 bp, Homo sapiens
caagggggcgggatt

SEQ ID NO: 1118239 - DNA, 15 bp, Homo sapiens
gcaagggggcgggat

SEQ ID NO: 1118240 - DNA, 15 bp, Homo sapiens
tgcaagggggcggga

SEQ ID NO: 1118241 - DNA, 15 bp, Homo sapiens
gtgcaagggggcggg

SEQ ID NO: 1118242 - DNA, 15 bp, Homo sapiens
ggtgcaagggggcgg

SEQ ID NO: 1118243 - DNA, 15 bp, Homo sapiens
aggtgcaagggggcg

SEQ ID NO: 1118244 - DNA, 15 bp, Homo sapiens
caggtgcaagggggc

SEQ ID NO: 1118245 - DNA, 15 bp, Homo sapiens
tcaggtgcaaggggg

SEQ ID NO: 1118246 - DNA, 15 bp, Homo sapiens
ctcaggtgcaagggg

SEQ ID NO: 1118247 - DNA, 15 bp, Homo sapiens
actcaggtgcaaggg

SEQ ID NO: 1118248 - DNA, 15 bp, Homo sapiens
cactcaggtgcaagg

SEQ ID NO: 1118249 - DNA, 15 bp, Homo sapiens
tcactcaggtgcaag

SEQ ID NO: 1118250 - DNA, 15 bp, Homo sapiens
gtcactcaggtgcaa

SEQ ID NO: 1118251 - DNA, 15 bp, Homo sapiens
agtcactcaggtgca

SEQ ID NO: 1118252 - DNA, 15 bp, Homo sapiens
gagtcactcaggtgc

SEQ ID NO: 1118253 - DNA, 15 bp, Homo sapiens
agagtcactcaggtg

SEQ ID NO: 1118254 - DNA, 15 bp, Homo sapiens
aagagtcactcaggt

SEQ ID NO: 1118255 - DNA, 15 bp, Homo sapiens
caagagtcactcagg

SEQ ID NO: 1118256 - DNA, 15 bp, Homo sapiens
acaagagtcactcag

SEQ ID NO: 1118257 - DNA, 15 bp, Homo sapiens
aacaagagtcactca

SEQ ID NO: 1118258 - DNA, 15 bp, Homo sapiens
caacaagagtcactc

SEQ ID NO: 1118259 - DNA, 15 bp, Homo sapiens
gcaacaagagtcact

SEQ ID NO: 1118260 - DNA, 15 bp, Homo sapiens
tgcaacaagagtcac

SEQ ID NO: 1118261 - DNA, 15 bp, Homo sapiens
atgcaacaagagtca

SEQ ID NO: 1118262 - DNA, 15 bp, Homo sapiens
catgcaacaagagtc

SEQ ID NO: 1118263 - DNA, 15 bp, Homo sapiens
gcatgcaacaagagt

SEQ ID NO: 1118264 - DNA, 15 bp, Homo sapiens
tgcatgcaacaagag

SEQ ID NO: 1118265 - DNA, 15 bp, Homo sapiens
ctgcatgcaacaaga

SEQ ID NO: 1118266 - DNA, 15 bp, Homo sapiens
cctgcatgcaacaag

SEQ ID NO: 1118267 - DNA, 15 bp, Homo sapiens
acctgcatgcaacaa

SEQ ID NO: 1118268 - DNA, 15 bp, Homo sapiens
aacctgcatgcaaca

SEQ ID NO: 1118269 - DNA, 15 bp, Homo sapiens
caacctgcatgcaac

SEQ ID NO: 1118270 - DNA, 15 bp, Homo sapiens
acaacctgcatgcaa

SEQ ID NO: 1118271 - DNA, 15 bp, Homo sapiens
gacaacctgcatgca

SEQ ID NO: 1118272 - DNA, 15 bp, Homo sapiens
agacaacctgcatgc

SEQ ID NO: 1118273 - DNA, 15 bp, Homo sapiens
cagacaacctgcatg

SEQ ID NO: 1118274 - DNA, 15 bp, Homo sapiens
ccagacaacctgcat

SEQ ID NO: 1118275 - DNA, 15 bp, Homo sapiens
gccagacaacctgca

SEQ ID NO: 1118276 - DNA, 15 bp, Homo sapiens
cgccagacaacctgc

SEQ ID NO: 1118277 - DNA, 15 bp, Homo sapiens
ccgccagacaacctg

SEQ ID NO: 1118278 - DNA, 15 bp, Homo sapiens
gccgccagacaacct

SEQ ID NO: 1118279 - DNA, 15 bp, Homo sapiens
agccgccagacaacc

SEQ ID NO: 1118280 - DNA, 15 bp, Homo sapiens
aagccgccagacaac

SEQ ID NO: 1118281 - DNA, 15 bp, Homo sapiens
gaagccgccagacaa

SEQ ID NO: 1118282 - DNA, 15 bp, Homo sapiens
tgaagccgccagaca

SEQ ID NO: 1118283 - DNA, 15 bp, Homo sapiens
ctgaagccgccagac

SEQ ID NO: 1118284 - DNA, 15 bp, Homo sapiens
cctgaagccgccaga

SEQ ID NO: 1118285 - DNA, 15 bp, Homo sapiens
acctgaagccgccag

SEQ ID NO: 1118286 - DNA, 15 bp, Homo sapiens
cacctgaagccgcca

SEQ ID NO: 1118287 - DNA, 15 bp, Homo sapiens
ccacctgaagccgcc

SEQ ID NO: 1118288 - DNA, 15 bp, Homo sapiens
tccacctgaagccgc

SEQ ID NO: 1118289 - DNA, 15 bp, Homo sapiens
gtccacctgaagccg

SEQ ID NO: 1118290 - DNA, 15 bp, Homo sapiens
ggtccacctgaagcc

SEQ ID NO: 1118291 - DNA, 15 bp, Homo sapiens
gggtccacctgaagc

SEQ ID NO: 1118292 - DNA, 15 bp, Homo sapiens
tgggtccacctgaag

SEQ ID NO: 1118293 - DNA, 15 bp, Homo sapiens
ctgggtccacctgaa

SEQ ID NO: 1118294 - DNA, 15 bp, Homo sapiens
tctgggtccacctga

SEQ ID NO: 1118295 - DNA, 15 bp, Homo sapiens
ttctgggtccacctg

SEQ ID NO: 1118296 - DNA, 15 bp, Homo sapiens
cttctgggtccacct

SEQ ID NO: 1118297 - DNA, 15 bp, Homo sapiens
tcttctgggtccacc

SEQ ID NO: 1118298 - DNA, 15 bp, Homo sapiens
gtcttctgggtccac

SEQ ID NO: 1118299 - DNA, 15 bp, Homo sapiens
cgtcttctgggtcca

SEQ ID NO: 1118300 - DNA, 15 bp, Homo sapiens
acgtcttctgggtcc

SEQ ID NO: 1118301 - DNA, 15 bp, Homo sapiens
gacgtcttctgggtc

SEQ ID NO: 1118302 - DNA, 15 bp, Homo sapiens
ggacgtcttctgggt

SEQ ID NO: 1118303 - DNA, 15 bp, Homo sapiens
gggacgtcttctggg

SEQ ID NO: 1118304 - DNA, 15 bp, Homo sapiens
ggggacgtcttctgg

SEQ ID NO: 1118305 - DNA, 15 bp, Homo sapiens
tggggacgtcttctg

SEQ ID NO: 1118306 - DNA, 15 bp, Homo sapiens
ttggggacgtcttct

SEQ ID NO: 1118307 - DNA, 15 bp, Homo sapiens
gttggggacgtcttc

SEQ ID NO: 1118308 - DNA, 15 bp, Homo sapiens
agttggggacgtctt

SEQ ID NO: 1118309 - DNA, 15 bp, Homo sapiens
gagttggggacgtct

SEQ ID NO: 1118310 - DNA, 15 bp, Homo sapiens
tgagttggggacgtc

SEQ ID NO: 1118311 - DNA, 15 bp, Homo sapiens
ctgagttggggacgt

SEQ ID NO: 1118312 - DNA, 15 bp, Homo sapiens
cctgagttggggacg

SEQ ID NO: 1118313 - DNA, 15 bp, Homo sapiens
ccctgagttggggac

SEQ ID NO: 1118314 - DNA, 15 bp, Homo sapiens
tccctgagttgggga

SEQ ID NO: 1118315 - DNA, 15 bp, Homo sapiens
ctccctgagttgggg

SEQ ID NO: 1118316 - DNA, 15 bp, Homo sapiens
tctccctgagttggg

SEQ ID NO: 1118317 - DNA, 15 bp, Homo sapiens
atctccctgagttgg

SEQ ID NO: 1118318 - DNA, 15 bp, Homo sapiens
aatctccctgagttg

SEQ ID NO: 1118319 - DNA, 15 bp, Homo sapiens
gaatctccctgagtt

SEQ ID NO: 1118320 - DNA, 15 bp, Homo sapiens
tgaatctccctgagt

SEQ ID NO: 1118321 - DNA, 15 bp, Homo sapiens
ctgaatctccctgag

SEQ ID NO: 1118322 - DNA, 15 bp, Homo sapiens
cctgaatctccctga

SEQ ID NO: 1118323 - DNA, 15 bp, Homo sapiens
acctgaatctccctg

SEQ ID NO: 1118324 - DNA, 15 bp, Homo sapiens
cacctgaatctccct

SEQ ID NO: 1118325 - DNA, 15 bp, Homo sapiens
tcacctgaatctccc

SEQ ID NO: 1118326 - DNA, 15 bp, Homo sapiens
ctcacctgaatctcc

SEQ ID NO: 1118327 - DNA, 15 bp, Homo sapiens
cctcacctgaatctc

SEQ ID NO: 1118328 - DNA, 15 bp, Homo sapiens
ccctcacctgaatct

SEQ ID NO: 1118329 - DNA, 15 bp, Homo sapiens
cccctcacctgaatc

SEQ ID NO: 1118330 - DNA, 15 bp, Homo sapiens
gcccctcacctgaat

SEQ ID NO: 1118331 - DNA, 15 bp, Homo sapiens
tgcccctcacctgaa

SEQ ID NO: 1118332 - DNA, 15 bp, Homo sapiens
ctgcccctcacctga

SEQ ID NO: 1118333 - DNA, 15 bp, Homo sapiens
cctgcccctcacctg

SEQ ID NO: 1118334 - DNA, 15 bp, Homo sapiens
ccctgcccctcacct

SEQ ID NO: 1118335 - DNA, 15 bp, Homo sapiens
accctgcccctcacc

SEQ ID NO: 1118336 - DNA, 15 bp, Homo sapiens
taccctgcccctcac

SEQ ID NO: 1118337 - DNA, 15 bp, Homo sapiens
gtaccctgcccctca

SEQ ID NO: 1118338 - DNA, 15 bp, Homo sapiens
ggtaccctgcccctc

SEQ ID NO: 1118339 - DNA, 15 bp, Homo sapiens
tggtaccctgcccct

SEQ ID NO: 1118340 - DNA, 15 bp, Homo sapiens
ttggtaccctgcccc

SEQ ID NO: 1118341 - DNA, 15 bp, Homo sapiens
gttggtaccctgccc

SEQ ID NO: 1118342 - DNA, 15 bp, Homo sapiens
agttggtaccctgcc

SEQ ID NO: 1118343 - DNA, 15 bp, Homo sapiens
gagttggtaccctgc

SEQ ID NO: 1118344 - DNA, 15 bp, Homo sapiens
agagttggtaccctg

SEQ ID NO: 1118345 - DNA, 15 bp, Homo sapiens
gagagttggtaccct

SEQ ID NO: 1118346 - DNA, 15 bp, Homo sapiens
agagagttggtaccc

SEQ ID NO: 1118347 - DNA, 15 bp, Homo sapiens
aagagagttggtacc

SEQ ID NO: 1118348 - DNA, 15 bp, Homo sapiens
gaagagagttggtac

SEQ ID NO: 1118349 - DNA, 15 bp, Homo sapiens
ggaagagagttggta

SEQ ID NO: 1118350 - DNA, 15 bp, Homo sapiens
gggaagagagttggt

SEQ ID NO: 1118351 - DNA, 15 bp, Homo sapiens
agggaagagagttgg

SEQ ID NO: 1118352 - DNA, 15 bp, Homo sapiens
aagggaagagagttg

SEQ ID NO: 1118353 - DNA, 15 bp, Homo sapiens
caagggaagagagtt

SEQ ID NO: 1118354 - DNA, 15 bp, Homo sapiens
gcaagggaagagagt

SEQ ID NO: 1118355 - DNA, 15 bp, Homo sapiens
agcaagggaagagag

SEQ ID NO: 1118356 - DNA, 15 bp, Homo sapiens
aagcaagggaagaga

SEQ ID NO: 1118357 - DNA, 15 bp, Homo sapiens
gaagcaagggaagag

SEQ ID NO: 1118358 - DNA, 15 bp, Homo sapiens
tgaagcaagggaaga

SEQ ID NO: 1118359 - DNA, 15 bp, Homo sapiens
ctgaagcaagggaag

SEQ ID NO: 1118360 - DNA, 15 bp, Homo sapiens
gctgaagcaagggaa

SEQ ID NO: 1118361 - DNA, 15 bp, Homo sapiens
agctgaagcaaggga

SEQ ID NO: 1118362 - DNA, 15 bp, Homo sapiens
aagctgaagcaaggg

SEQ ID NO: 1118363 - DNA, 15 bp, Homo sapiens
aaagctgaagcaagg

SEQ ID NO: 1118364 - DNA, 15 bp, Homo sapiens
caaagctgaagcaag

SEQ ID NO: 1118365 - DNA, 15 bp, Homo sapiens
gcaaagctgaagcaa

SEQ ID NO: 1118366 - DNA, 15 bp, Homo sapiens
tgcaaagctgaagca

SEQ ID NO: 1118367 - DNA, 15 bp, Homo sapiens
ttgcaaagctgaagc

SEQ ID NO: 1118368 - DNA, 15 bp, Homo sapiens
attgcaaagctgaag

SEQ ID NO: 1118369 - DNA, 15 bp, Homo sapiens
cattgcaaagctgaa

SEQ ID NO: 1118370 - DNA, 15 bp, Homo sapiens
gcattgcaaagctga

SEQ ID NO: 1118371 - DNA, 15 bp, Homo sapiens
agcattgcaaagctg

SEQ ID NO: 1118372 - DNA, 15 bp, Homo sapiens
cagcattgcaaagct

SEQ ID NO: 1118373 - DNA, 15 bp, Homo sapiens
ccagcattgcaaagc

SEQ ID NO: 1118374 - DNA, 15 bp, Homo sapiens
gccagcattgcaaag

SEQ ID NO: 1118375 - DNA, 15 bp, Homo sapiens
ggccagcattgcaaa

SEQ ID NO: 1118376 - DNA, 15 bp, Homo sapiens
gggccagcattgcaa

SEQ ID NO: 1118377 - DNA, 15 bp, Homo sapiens
agggccagcattgca

SEQ ID NO: 1118378 - DNA, 15 bp, Homo sapiens
cagggccagcattgc

SEQ ID NO: 1118379 - DNA, 15 bp, Homo sapiens
gcagggccagcattg

SEQ ID NO: 1118380 - DNA, 15 bp, Homo sapiens
ggcagggccagcatt

SEQ ID NO: 1118381 - DNA, 15 bp, Homo sapiens
aggcagggccagcat

SEQ ID NO: 1118382 - DNA, 15 bp, Homo sapiens
aaggcagggccagca

SEQ ID NO: 1118383 - DNA, 15 bp, Homo sapiens
caaggcagggccagc

SEQ ID NO: 1118384 - DNA, 15 bp, Homo sapiens
ccaaggcagggccag

SEQ ID NO: 1118385 - DNA, 15 bp, Homo sapiens
gccaaggcagggcca

SEQ ID NO: 1118386 - DNA, 15 bp, Homo sapiens
agccaaggcagggcc

SEQ ID NO: 1118387 - DNA, 15 bp, Homo sapiens
gagccaaggcagggc

SEQ ID NO: 1118388 - DNA, 15 bp, Homo sapiens
agagccaaggcaggg

SEQ ID NO: 1118389 - DNA, 15 bp, Homo sapiens
gagagccaaggcagg

SEQ ID NO: 1118390 - DNA, 15 bp, Homo sapiens
agagagccaaggcag

SEQ ID NO: 1118391 - DNA, 15 bp, Homo sapiens
cagagagccaaggca

SEQ ID NO: 1118392 - DNA, 15 bp, Homo sapiens
ccagagagccaaggc

SEQ ID NO: 1118393 - DNA, 15 bp, Homo sapiens
accagagagccaagg

SEQ ID NO: 1118394 - DNA, 15 bp, Homo sapiens
aaccagagagccaag

SEQ ID NO: 1118395 - DNA, 15 bp, Homo sapiens
gaaccagagagccaa

SEQ ID NO: 1118396 - DNA, 15 bp, Homo sapiens
agaaccagagagcca

SEQ ID NO: 1118397 - DNA, 15 bp, Homo sapiens
aagaaccagagagcc

SEQ ID NO: 1118398 - DNA, 15 bp, Homo sapiens
taagaaccagagagc

SEQ ID NO: 1118399 - DNA, 15 bp, Homo sapiens
gtaagaaccagagag

SEQ ID NO: 1118400 - DNA, 15 bp, Homo sapiens
agtaagaaccagaga

SEQ ID NO: 1118401 - DNA, 15 bp, Homo sapiens
aagtaagaaccagag

SEQ ID NO: 1118402 - DNA, 15 bp, Homo sapiens
aaagtaagaaccaga

SEQ ID NO: 1118403 - DNA, 15 bp, Homo sapiens
gaaagtaagaaccag

SEQ ID NO: 1118404 - DNA, 15 bp, Homo sapiens
agaaagtaagaacca

SEQ ID NO: 1118405 - DNA, 15 bp, Homo sapiens
cagaaagtaagaacc

SEQ ID NO: 1118406 - DNA, 15 bp, Homo sapiens
ccagaaagtaagaac

SEQ ID NO: 1118407 - DNA, 15 bp, Homo sapiens
tccagaaagtaagaa

SEQ ID NO: 1118408 - DNA, 15 bp, Homo sapiens
ctccagaaagtaaga

SEQ ID NO: 1118409 - DNA, 15 bp, Homo sapiens
tctccagaaagtaag

SEQ ID NO: 1118410 - DNA, 15 bp, Homo sapiens
atctccagaaagtaa

SEQ ID NO: 1118411 - DNA, 15 bp, Homo sapiens
gatctccagaaagta

SEQ ID NO: 1118412 - DNA, 15 bp, Homo sapiens
agatctccagaaagt

SEQ ID NO: 1118413 - DNA, 15 bp, Homo sapiens
gagatctccagaaag

SEQ ID NO: 1118414 - DNA, 15 bp, Homo sapiens
ggagatctccagaaa

SEQ ID NO: 1118415 - DNA, 15 bp, Homo sapiens
tggagatctccagaa

SEQ ID NO: 1118416 - DNA, 15 bp, Homo sapiens
ctggagatctccaga

SEQ ID NO: 1118417 - DNA, 15 bp, Homo sapiens
cctggagatctccag

SEQ ID NO: 1118418 - DNA, 15 bp, Homo sapiens
ccctggagatctcca

SEQ ID NO: 1118419 - DNA, 15 bp, Homo sapiens
cccctggagatctcc

SEQ ID NO: 1118420 - DNA, 15 bp, Homo sapiens
gcccctggagatctc

SEQ ID NO: 1118421 - DNA, 15 bp, Homo sapiens
tgcccctggagatct

SEQ ID NO: 1118422 - DNA, 15 bp, Homo sapiens
atgcccctggagatc

SEQ ID NO: 1118423 - DNA, 15 bp, Homo sapiens
gatgcccctggagat

SEQ ID NO: 1118424 - DNA, 15 bp, Homo sapiens
tgatgcccctggaga

SEQ ID NO: 1118425 - DNA, 15 bp, Homo sapiens
gtgatgcccctggag

SEQ ID NO: 1118426 - DNA, 15 bp, Homo sapiens
cgtgatgcccctgga

SEQ ID NO: 1118427 - DNA, 15 bp, Homo sapiens
ccgtgatgcccctgg

SEQ ID NO: 1118428 - DNA, 15 bp, Homo sapiens
accgtgatgcccctg

SEQ ID NO: 1118429 - DNA, 15 bp, Homo sapiens
caccgtgatgcccct

SEQ ID NO: 1118430 - DNA, 15 bp, Homo sapiens
tcaccgtgatgcccc

SEQ ID NO: 1118431 - DNA, 15 bp, Homo sapiens
gtcaccgtgatgccc

SEQ ID NO: 1118432 - DNA, 15 bp, Homo sapiens
tgtcaccgtgatgcc

SEQ ID NO: 1118433 - DNA, 15 bp, Homo sapiens
ttgtcaccgtgatgc

SEQ ID NO: 1118434 - DNA, 15 bp, Homo sapiens
tttgtcaccgtgatg

SEQ ID NO: 1118435 - DNA, 15 bp, Homo sapiens
ctttgtcaccgtgat

SEQ ID NO: 1118436 - DNA, 15 bp, Homo sapiens
tctttgtcaccgtga

SEQ ID NO: 1118437 - DNA, 15 bp, Homo sapiens
atctttgtcaccgtg

SEQ ID NO: 1118438 - DNA, 15 bp, Homo sapiens
tatctttgtcaccgt

SEQ ID NO: 1118439 - DNA, 15 bp, Homo sapiens
ttatctttgtcaccg

SEQ ID NO: 1118440 - DNA, 15 bp, Homo sapiens
attatctttgtcacc

SEQ ID NO: 1118441 - DNA, 15 bp, Homo sapiens
cattatctttgtcac

SEQ ID NO: 1118442 - DNA, 15 bp, Homo sapiens
tcattatctttgtca

SEQ ID NO: 1118443 - DNA, 15 bp, Homo sapiens
atcattatctttgtc

SEQ ID NO: 1118444 - DNA, 15 bp, Homo sapiens
gatcattatctttgt

SEQ ID NO: 1118445 - DNA, 15 bp, Homo sapiens
tgatcattatctttg

SEQ ID NO: 1118446 - DNA, 15 bp, Homo sapiens
ctgatcattatcttt

SEQ ID NO: 1118447 - DNA, 15 bp, Homo sapiens
gctgatcattatctt

SEQ ID NO: 1118448 - DNA, 15 bp, Homo sapiens
tgctgatcattatct

SEQ ID NO: 1118449 - DNA, 15 bp, Homo sapiens
gtgctgatcattatc

SEQ ID NO: 1118450 - DNA, 15 bp, Homo sapiens
tgtgctgatcattat

SEQ ID NO: 1118451 - DNA, 15 bp, Homo sapiens
atgtgctgatcatta

SEQ ID NO: 1118452 - DNA, 15 bp, Homo sapiens
gatgtgctgatcatt

SEQ ID NO: 1118453 - DNA, 15 bp, Homo sapiens
tgatgtgctgatcat

SEQ ID NO: 1118454 - DNA, 15 bp, Homo sapiens
atgatgtgctgatca

SEQ ID NO: 1118455 - DNA, 15 bp, Homo sapiens
gatgatgtgctgatc

SEQ ID NO: 1118456 - DNA, 15 bp, Homo sapiens
tgatgatgtgctgat

SEQ ID NO: 1118457 - DNA, 15 bp, Homo sapiens
gtgatgatgtgctga

SEQ ID NO: 1118458 - DNA, 15 bp, Homo sapiens
agtgatgatgtgctg

SEQ ID NO: 1118459 - DNA, 15 bp, Homo sapiens
cagtgatgatgtgct

SEQ ID NO: 1118460 - DNA, 15 bp, Homo sapiens
gcagtgatgatgtgc

SEQ ID NO: 1118461 - DNA, 15 bp, Homo sapiens
tgcagtgatgatgtg

SEQ ID NO: 1118462 - DNA, 15 bp, Homo sapiens
atgcagtgatgatgt

SEQ ID NO: 1118463 - DNA, 15 bp, Homo sapiens
tatgcagtgatgatg

SEQ ID NO: 1118464 - DNA, 15 bp, Homo sapiens
ctatgcagtgatgat

SEQ ID NO: 1118465 - DNA, 15 bp, Homo sapiens
tctatgcagtgatga

SEQ ID NO: 1118466 - DNA, 15 bp, Homo sapiens
ctctatgcagtgatg

SEQ ID NO: 1118467 - DNA, 15 bp, Homo sapiens
tctctatgcagtgat

SEQ ID NO: 1118468 - DNA, 15 bp, Homo sapiens
gtctctatgcagtga

SEQ ID NO: 1118469 - DNA, 15 bp, Homo sapiens
tgtctctatgcagtg

SEQ ID NO: 1118470 - DNA, 15 bp, Homo sapiens
ctgtctctatgcagt

SEQ ID NO: 1118471 - DNA, 15 bp, Homo sapiens
cctgtctctatgcag

SEQ ID NO: 1118472 - DNA, 15 bp, Homo sapiens
tcctgtctctatgca

SEQ ID NO: 1118473 - DNA, 15 bp, Homo sapiens
gtcctgtctctatgc

SEQ ID NO: 1118474 - DNA, 15 bp, Homo sapiens
tgtcctgtctctatg

SEQ ID NO: 1118475 - DNA, 15 bp, Homo sapiens
atgtcctgtctctat

SEQ ID NO: 1118476 - DNA, 15 bp, Homo sapiens
catgtcctgtctcta

SEQ ID NO: 1118477 - DNA, 15 bp, Homo sapiens
gcatgtcctgtctct

SEQ ID NO: 1118478 - DNA, 15 bp, Homo sapiens
tgcatgtcctgtctc

SEQ ID NO: 1118479 - DNA, 15 bp, Homo sapiens
ctgcatgtcctgtct

SEQ ID NO: 1118480 - DNA, 15 bp, Homo sapiens
gctgcatgtcctgtc

SEQ ID NO: 1118481 - DNA, 15 bp, Homo sapiens
tgctgcatgtcctgt

SEQ ID NO: 1118482 - DNA, 15 bp, Homo sapiens
ttgctgcatgtcctg

SEQ ID NO: 1118483 - DNA, 15 bp, Homo sapiens
tttgctgcatgtcct

SEQ ID NO: 1118484 - DNA, 15 bp, Homo sapiens
ctttgctgcatgtcc

SEQ ID NO: 1118485 - DNA, 15 bp, Homo sapiens
tctttgctgcatgtc

SEQ ID NO: 1118486 - DNA, 15 bp, Homo sapiens
gtctttgctgcatgt

SEQ ID NO: 1118487 - DNA, 15 bp, Homo sapiens
agtctttgctgcatg

SEQ ID NO: 1118488 - DNA, 15 bp, Homo sapiens
cagtctttgctgcat

SEQ ID NO: 1118489 - DNA, 15 bp, Homo sapiens
gcagtctttgctgca

SEQ ID NO: 1118490 - DNA, 15 bp, Homo sapiens
tgcagtctttgctgc

SEQ ID NO: 1118491 - DNA, 15 bp, Homo sapiens
ctgcagtctttgctg

SEQ ID NO: 1118492 - DNA, 15 bp, Homo sapiens
tctgcagtctttgct

SEQ ID NO: 1118493 - DNA, 15 bp, Homo sapiens
gtctgcagtctttgc

SEQ ID NO: 1118494 - DNA, 15 bp, Homo sapiens
ggtctgcagtctttg

SEQ ID NO: 1118495 - DNA, 15 bp, Homo sapiens
tggtctgcagtcttt

SEQ ID NO: 1118496 - DNA, 15 bp, Homo sapiens
ttggtctgcagtctt

SEQ ID NO: 1118497 - DNA, 15 bp, Homo sapiens
gttggtctgcagtct

SEQ ID NO: 1118498 - DNA, 15 bp, Homo sapiens
agttggtctgcagtc

SEQ ID NO: 1118499 - DNA, 15 bp, Homo sapiens
cagttggtctgcagt

SEQ ID NO: 1118500 - DNA, 15 bp, Homo sapiens
acagttggtctgcag

SEQ ID NO: 1118501 - DNA, 15 bp, Homo sapiens
cacagttggtctgca

SEQ ID NO: 1118502 - DNA, 15 bp, Homo sapiens
acacagttggtctgc

SEQ ID NO: 1118503 - DNA, 15 bp, Homo sapiens
cacacagttggtctg

SEQ ID NO: 1118504 - DNA, 15 bp, Homo sapiens
ccacacagttggtct

SEQ ID NO: 1118505 - DNA, 15 bp, Homo sapiens
gccacacagttggtc

SEQ ID NO: 1118506 - DNA, 15 bp, Homo sapiens
ggccacacagttggt

SEQ ID NO: 1118507 - DNA, 15 bp, Homo sapiens
aggccacacagttgg

SEQ ID NO: 1118508 - DNA, 15 bp, Homo sapiens
aaggccacacagttg

SEQ ID NO: 1118509 - DNA, 15 bp, Homo sapiens
caaggccacacagtt

SEQ ID NO: 1118510 - DNA, 15 bp, Homo sapiens
ccaaggccacacagt

SEQ ID NO: 1118511 - DNA, 15 bp, Homo sapiens
cccaaggccacacag

SEQ ID NO: 1118512 - DNA, 15 bp, Homo sapiens
gcccaaggccacaca

SEQ ID NO: 1118513 - DNA, 15 bp, Homo sapiens
cgcccaaggccacac

SEQ ID NO: 1118514 - DNA, 15 bp, Homo sapiens
tcgcccaaggccaca

SEQ ID NO: 1118515 - DNA, 15 bp, Homo sapiens
ctcgcccaaggccac

SEQ ID NO: 1118516 - DNA, 15 bp, Homo sapiens
actcgcccaaggcca

SEQ ID NO: 1118517 - DNA, 15 bp, Homo sapiens
gactcgcccaaggcc

SEQ ID NO: 1118518 - DNA, 15 bp, Homo sapiens
tgactcgcccaaggc

SEQ ID NO: 1118519 - DNA, 15 bp, Homo sapiens
gtgactcgcccaagg

SEQ ID NO: 1118520 - DNA, 15 bp, Homo sapiens
agtgactcgcccaag

SEQ ID NO: 1118521 - DNA, 15 bp, Homo sapiens
aagtgactcgcccaa

SEQ ID NO: 1118522 - DNA, 15 bp, Homo sapiens
taagtgactcgccca

SEQ ID NO: 1118523 - DNA, 15 bp, Homo sapiens
ttaagtgactcgccc

SEQ ID NO: 1118524 - DNA, 15 bp, Homo sapiens
gttaagtgactcgcc

SEQ ID NO: 1118525 - DNA, 15 bp, Homo sapiens
ggttaagtgactcgc

SEQ ID NO: 1118526 - DNA, 15 bp, Homo sapiens
aggttaagtgactcg

SEQ ID NO: 1118527 - DNA, 15 bp, Homo sapiens
gaggttaagtgactc

SEQ ID NO: 1118528 - DNA, 15 bp, Homo sapiens
agaggttaagtgact

SEQ ID NO: 1118529 - DNA, 15 bp, Homo sapiens
gagaggttaagtgac

SEQ ID NO: 1118530 - DNA, 15 bp, Homo sapiens
agagaggttaagtga

SEQ ID NO: 1118531 - DNA, 15 bp, Homo sapiens
ccagagaggttaagt

SEQ ID NO: 1118532 - DNA, 15 bp, Homo sapiens
tccagagaggttaag

SEQ ID NO: 1118533 - DNA, 15 bp, Homo sapiens
gtccagagaggttaa

SEQ ID NO: 1118534 - DNA, 15 bp, Homo sapiens
ggtccagagaggtta

SEQ ID NO: 1118535 - DNA, 15 bp, Homo sapiens
aggtccagagaggtt

SEQ ID NO: 1118536 - DNA, 15 bp, Homo sapiens
gaggtccagagaggt

SEQ ID NO: 1118537 - DNA, 15 bp, Homo sapiens
tgaggtccagagagg

SEQ ID NO: 1118538 - DNA, 15 bp, Homo sapiens
ctgaggtccagagag

SEQ ID NO: 1118539 - DNA, 15 bp, Homo sapiens
gctgaggtccagaga

SEQ ID NO: 1118540 - DNA, 15 bp, Homo sapiens
agctgaggtccagag

SEQ ID NO: 1118541 - DNA, 15 bp, Homo sapiens
tagctgaggtccaga

SEQ ID NO: 1118542 - DNA, 15 bp, Homo sapiens
atagctgaggtccag

SEQ ID NO: 1118543 - DNA, 15 bp, Homo sapiens
tatagctgaggtcca

SEQ ID NO: 1118544 - DNA, 15 bp, Homo sapiens
ttatagctgaggtcc

SEQ ID NO: 1118545 - DNA, 15 bp, Homo sapiens
tttatagctgaggtc

SEQ ID NO: 1118546 - DNA, 15 bp, Homo sapiens
ttttatagctgaggt

SEQ ID NO: 1118547 - DNA, 15 bp, Homo sapiens
attttatagctgagg

SEQ ID NO: 1118548 - DNA, 15 bp, Homo sapiens
cattttatagctgag

SEQ ID NO: 1118549 - DNA, 15 bp, Homo sapiens
tcattttatagctga

SEQ ID NO: 1118550 - DNA, 15 bp, Homo sapiens
ctcattttatagctg

SEQ ID NO: 1118551 - DNA, 15 bp, Homo sapiens
cctcattttatagct

SEQ ID NO: 1118552 - DNA, 15 bp, Homo sapiens
tcctcattttatagc

SEQ ID NO: 1118553 - DNA, 15 bp, Homo sapiens
atcctcattttatag

SEQ ID NO: 1118554 - DNA, 15 bp, Homo sapiens
tatcctcattttata

SEQ ID NO: 1118555 - DNA, 15 bp, Homo sapiens
ttatcctcattttat

SEQ ID NO: 1118556 - DNA, 15 bp, Homo sapiens
attatcctcatttta

SEQ ID NO: 1118557 - DNA, 15 bp, Homo sapiens
cattatcctcatttt

SEQ ID NO: 1118558 - DNA, 15 bp, Homo sapiens
gcattatcctcattt

SEQ ID NO: 1118559 - DNA, 15 bp, Homo sapiens
tgcattatcctcatt

SEQ ID NO: 1118560 - DNA, 15 bp, Homo sapiens
atgcattatcctcat

SEQ ID NO: 1118561 - DNA, 15 bp, Homo sapiens
gatgcattatcctca

SEQ ID NO: 1118562 - DNA, 15 bp, Homo sapiens
agatgcattatcctc

SEQ ID NO: 1118563 - DNA, 15 bp, Homo sapiens
aagatgcattatcct

SEQ ID NO: 1118564 - DNA, 15 bp, Homo sapiens
gaagatgcattatcc

SEQ ID NO: 1118565 - DNA, 15 bp, Homo sapiens
ggaagatgcattatc

SEQ ID NO: 1118566 - DNA, 15 bp, Homo sapiens
aggaagatgcattat

SEQ ID NO: 1118567 - DNA, 15 bp, Homo sapiens
gaggaagatgcatta

SEQ ID NO: 1118568 - DNA, 15 bp, Homo sapiens
tgaggaagatgcatt

SEQ ID NO: 1118569 - DNA, 15 bp, Homo sapiens
ttgaggaagatgcat

SEQ ID NO: 1118570 - DNA, 15 bp, Homo sapiens
tttgaggaagatgca

SEQ ID NO: 1118571 - DNA, 15 bp, Homo sapiens
ctttgaggaagatgc

SEQ ID NO: 1118572 - DNA, 15 bp, Homo sapiens
tctttgaggaagatg

SEQ ID NO: 1118573 - DNA, 15 bp, Homo sapiens
ctctttgaggaagat

SEQ ID NO: 1118574 - DNA, 15 bp, Homo sapiens
tctctttgaggaaga

SEQ ID NO: 1118575 - DNA, 15 bp, Homo sapiens
atctctttgaggaag

SEQ ID NO: 1118576 - DNA, 15 bp, Homo sapiens
gatctctttgaggaa

SEQ ID NO: 1118577 - DNA, 15 bp, Homo sapiens
ggatctctttgagga

SEQ ID NO: 1118578 - DNA, 15 bp, Homo sapiens
tggatctctttgagg

SEQ ID NO: 1118579 - DNA, 15 bp, Homo sapiens
ttggatctctttgag

SEQ ID NO: 1118580 - DNA, 15 bp, Homo sapiens
attggatctctttga

SEQ ID NO: 1118581 - DNA, 15 bp, Homo sapiens
cattggatctctttg

SEQ ID NO: 1118582 - DNA, 15 bp, Homo sapiens
tcattggatctcttt

SEQ ID NO: 1118583 - DNA, 15 bp, Homo sapiens
ctcattggatctctt

SEQ ID NO: 1118584 - DNA, 15 bp, Homo sapiens
actcattggatctct

SEQ ID NO: 1118585 - DNA, 15 bp, Homo sapiens
aactcattggatctc

SEQ ID NO: 1118586 - DNA, 15 bp, Homo sapiens
taactcattggatct

SEQ ID NO: 1118587 - DNA, 15 bp, Homo sapiens
ttaactcattggatc

SEQ ID NO: 1118588 - DNA, 15 bp, Homo sapiens
cttaactcattggat

SEQ ID NO: 1118589 - DNA, 15 bp, Homo sapiens
tcttaactcattgga

SEQ ID NO: 1118590 - DNA, 15 bp, Homo sapiens
gtcttaactcattgg

SEQ ID NO: 1118591 - DNA, 15 bp, Homo sapiens
tgtcttaactcattg

SEQ ID NO: 1118592 - DNA, 15 bp, Homo sapiens
ctgtcttaactcatt

SEQ ID NO: 1118593 - DNA, 15 bp, Homo sapiens
gctgtcttaactcat

SEQ ID NO: 1118594 - DNA, 15 bp, Homo sapiens
tgctgtcttaactca

SEQ ID NO: 1118595 - DNA, 15 bp, Homo sapiens
ctgctgtcttaactc

SEQ ID NO: 1118596 - DNA, 15 bp, Homo sapiens
tctgctgtcttaact

SEQ ID NO: 1118597 - DNA, 15 bp, Homo sapiens
ttctgctgtcttaac

SEQ ID NO: 1118598 - DNA, 15 bp, Homo sapiens
attctgctgtcttaa

SEQ ID NO: 1118599 - DNA, 15 bp, Homo sapiens
tattctgctgtctta

SEQ ID NO: 1118600 - DNA, 15 bp, Homo sapiens
ttattctgctgtctt

SEQ ID NO: 1118601 - DNA, 15 bp, Homo sapiens
cttattctgctgtct

SEQ ID NO: 1118602 - DNA, 15 bp, Homo sapiens
gcttattctgctgtc

SEQ ID NO: 1118603 - DNA, 15 bp, Homo sapiens
tgcttattctgctgt

SEQ ID NO: 1118604 - DNA, 15 bp, Homo sapiens
ctgcttattctgctg

SEQ ID NO: 1118605 - DNA, 15 bp, Homo sapiens
actgcttattctgct

SEQ ID NO: 1118606 - DNA, 15 bp, Homo sapiens
cactgcttattctgc

SEQ ID NO: 1118607 - DNA, 15 bp, Homo sapiens
tcactgcttattctg

SEQ ID NO: 1118608 - DNA, 15 bp, Homo sapiens
ctcactgcttattct

SEQ ID NO: 1118609 - DNA, 15 bp, Homo sapiens
cctcactgcttattc

SEQ ID NO: 1118610 - DNA, 15 bp, Homo sapiens
ccctcactgcttatt

SEQ ID NO: 1118611 - DNA, 15 bp, Homo sapiens
gccctcactgcttat

SEQ ID NO: 1118612 - DNA, 15 bp, Homo sapiens
agccctcactgctta

SEQ ID NO: 1118613 - DNA, 15 bp, Homo sapiens
cagccctcactgctt

SEQ ID NO: 1118614 - DNA, 15 bp, Homo sapiens
ccagccctcactgct

SEQ ID NO: 1118615 - DNA, 15 bp, Homo sapiens
gccagccctcactgc

SEQ ID NO: 1118616 - DNA, 15 bp, Homo sapiens
tgccagccctcactg

SEQ ID NO: 1118617 - DNA, 15 bp, Homo sapiens
gtgccagccctcact

SEQ ID NO: 1118618 - DNA, 15 bp, Homo sapiens
tgtgccagccctcac

SEQ ID NO: 1118619 - DNA, 15 bp, Homo sapiens
atgtgccagccctca

SEQ ID NO: 1118620 - DNA, 15 bp, Homo sapiens
catgtgccagccctc

SEQ ID NO: 1118621 - DNA, 15 bp, Homo sapiens
ccatgtgccagccct

SEQ ID NO: 1118622 - DNA, 15 bp, Homo sapiens
gccatgtgccagccc

SEQ ID NO: 1118623 - DNA, 15 bp, Homo sapiens
ggccatgtgccagcc

SEQ ID NO: 1118624 - DNA, 15 bp, Homo sapiens
tggccatgtgccagc

SEQ ID NO: 1118625 - DNA, 15 bp, Homo sapiens
ttggccatgtgccag

SEQ ID NO: 1118626 - DNA, 15 bp, Homo sapiens
attggccatgtgcca

SEQ ID NO: 1118627 - DNA, 15 bp, Homo sapiens
cattggccatgtgcc

SEQ ID NO: 1118628 - DNA, 15 bp, Homo sapiens
gcattggccatgtgc

SEQ ID NO: 1118629 - DNA, 15 bp, Homo sapiens
ggcattggccatgtg

SEQ ID NO: 1118630 - DNA, 15 bp, Homo sapiens
tggcattggccatgt

SEQ ID NO: 1118631 - DNA, 15 bp, Homo sapiens
atggcattggccatg

SEQ ID NO: 1118632 - DNA, 15 bp, Homo sapiens
tatggcattggccat

SEQ ID NO: 1118633 - DNA, 15 bp, Homo sapiens
ctatggcattggcca

SEQ ID NO: 1118634 - DNA, 15 bp, Homo sapiens
tctatggcattggcc

SEQ ID NO: 1118635 - DNA, 15 bp, Homo sapiens
ttctatggcattggc

SEQ ID NO: 1118636 - DNA, 15 bp, Homo sapiens
cttctatggcattgg

SEQ ID NO: 1118637 - DNA, 15 bp, Homo sapiens
ccttctatggcattg

SEQ ID NO: 1118638 - DNA, 15 bp, Homo sapiens
cccttctatggcatt

SEQ ID NO: 1118639 - DNA, 15 bp, Homo sapiens
acccttctatggcat

SEQ ID NO: 1118640 - DNA, 15 bp, Homo sapiens
aacccttctatggca

SEQ ID NO: 1118641 - DNA, 15 bp, Homo sapiens
aaacccttctatggc

SEQ ID NO: 1118642 - DNA, 15 bp, Homo sapiens
taaacccttctatgg

SEQ ID NO: 1118643 - DNA, 15 bp, Homo sapiens
ataaacccttctatg

SEQ ID NO: 1118644 - DNA, 15 bp, Homo sapiens
tataaacccttctat

SEQ ID NO: 1118645 - DNA, 15 bp, Homo sapiens
ttataaacccttcta

SEQ ID NO: 1118646 - DNA, 15 bp, Homo sapiens
attataaacccttct

SEQ ID NO: 1118647 - DNA, 15 bp, Homo sapiens
aattataaacccttc

SEQ ID NO: 1118648 - DNA, 15 bp, Homo sapiens
taattataaaccctt

SEQ ID NO: 1118649 - DNA, 15 bp, Homo sapiens
ataattataaaccct

SEQ ID NO: 1118650 - DNA, 15 bp, Homo sapiens
tataattataaaccc

SEQ ID NO: 1118651 - DNA, 15 bp, Homo sapiens
ttataattataaacc

SEQ ID NO: 1118652 - DNA, 15 bp, Homo sapiens
cttataattataaac

SEQ ID NO: 1118653 - DNA, 15 bp, Homo sapiens
acttataattataaa

SEQ ID NO: 1118654 - DNA, 15 bp, Homo sapiens
tacttataattataa

SEQ ID NO: 1118655 - DNA, 15 bp, Homo sapiens
ttacttataattata

SEQ ID NO: 1118656 - DNA, 15 bp, Homo sapiens
attacttataattat

SEQ ID NO: 1118657 - DNA, 15 bp, Homo sapiens
tattacttataatta

SEQ ID NO: 1118658 - DNA, 15 bp, Homo sapiens
ctattacttataatt

SEQ ID NO: 1118659 - DNA, 15 bp, Homo sapiens
gctattacttataat

SEQ ID NO: 1118660 - DNA, 15 bp, Homo sapiens
tgctattacttataa

SEQ ID NO: 1118661 - DNA, 15 bp, Homo sapiens
ctgctattacttata

SEQ ID NO: 1118662 - DNA, 15 bp, Homo sapiens
gctgctattacttat

SEQ ID NO: 1118663 - DNA, 15 bp, Homo sapiens
tgctgctattactta

SEQ ID NO: 1118664 - DNA, 15 bp, Homo sapiens
ctgctgctattactt

SEQ ID NO: 1118665 - DNA, 15 bp, Homo sapiens
cctgctgctattact

SEQ ID NO: 1118666 - DNA, 15 bp, Homo sapiens
gcctgctgctattac

SEQ ID NO: 1118667 - DNA, 15 bp, Homo sapiens
agcctgctgctatta

SEQ ID NO: 1118668 - DNA, 15 bp, Homo sapiens
cagcctgctgctatt

SEQ ID NO: 1118669 - DNA, 15 bp, Homo sapiens
ccagcctgctgctat

SEQ ID NO: 1118670 - DNA, 15 bp, Homo sapiens
cccagcctgctgcta

SEQ ID NO: 1118671 - DNA, 15 bp, Homo sapiens
acccagcctgctgct

SEQ ID NO: 1118672 - DNA, 15 bp, Homo sapiens
cacccagcctgctgc

SEQ ID NO: 1118673 - DNA, 15 bp, Homo sapiens
tcacccagcctgctg

SEQ ID NO: 1118674 - DNA, 15 bp, Homo sapiens
ctcacccagcctgct

SEQ ID NO: 1118675 - DNA, 15 bp, Homo sapiens
cctcacccagcctgc

SEQ ID NO: 1118676 - DNA, 15 bp, Homo sapiens
acctcacccagcctg

SEQ ID NO: 1118677 - DNA, 15 bp, Homo sapiens
cacctcacccagcct

SEQ ID NO: 1118678 - DNA, 15 bp, Homo sapiens
ccacctcacccagcc

SEQ ID NO: 1118679 - DNA, 15 bp, Homo sapiens
gccacctcacccagc

SEQ ID NO: 1118680 - DNA, 15 bp, Homo sapiens
agccacctcacccag

SEQ ID NO: 1118681 - DNA, 15 bp, Homo sapiens
gagccacctcaccca

SEQ ID NO: 1118682 - DNA, 15 bp, Homo sapiens
tgagccacctcaccc

SEQ ID NO: 1118683 - DNA, 15 bp, Homo sapiens
atgagccacctcacc

SEQ ID NO: 1118684 - DNA, 15 bp, Homo sapiens
catgagccacctcac

SEQ ID NO: 1118685 - DNA, 15 bp, Homo sapiens
gcatgagccacctca

SEQ ID NO: 1118686 - DNA, 15 bp, Homo sapiens
ggcatgagccacctc

SEQ ID NO: 1118687 - DNA, 15 bp, Homo sapiens
aggcatgagccacct

SEQ ID NO: 1118688 - DNA, 15 bp, Homo sapiens
gcgatcctcctgcct

SEQ ID NO: 1118689 - DNA, 15 bp, Homo sapiens
tggctcaagcgatcc

SEQ ID NO: 1118690 - DNA, 15 bp, Homo sapiens
ttggctcaagcgatc

SEQ ID NO: 1118691 - DNA, 15 bp, Homo sapiens
cttggctcaagcgat

SEQ ID NO: 1118692 - DNA, 15 bp, Homo sapiens
ccttggctcaagcga

SEQ ID NO: 1118693 - DNA, 15 bp, Homo sapiens
tccttggctcaagcg

SEQ ID NO: 1118694 - DNA, 15 bp, Homo sapiens
ctccttggctcaagc

SEQ ID NO: 1118695 - DNA, 15 bp, Homo sapiens
actccttggctcaag

SEQ ID NO: 1118696 - DNA, 15 bp, Homo sapiens
aactccttggctcaa

SEQ ID NO: 1118697 - DNA, 15 bp, Homo sapiens
tcttgaactccttgg

SEQ ID NO: 1118698 - DNA, 15 bp, Homo sapiens
cccagactggtcttg

SEQ ID NO: 1118699 - DNA, 15 bp, Homo sapiens
gcccagactggtctt

SEQ ID NO: 1118700 - DNA, 15 bp, Homo sapiens
tgcccagactggtct

SEQ ID NO: 1118701 - DNA, 15 bp, Homo sapiens
ttgcccagactggtc

SEQ ID NO: 1118702 - DNA, 15 bp, Homo sapiens
gttgcccagactggt

SEQ ID NO: 1118703 - DNA, 15 bp, Homo sapiens
gtgttgcccagactg

SEQ ID NO: 1118704 - DNA, 15 bp, Homo sapiens
tgtgttgcccagact

SEQ ID NO: 1118705 - DNA, 15 bp, Homo sapiens
ctgtgttgcccagac

SEQ ID NO: 1118706 - DNA, 15 bp, Homo sapiens
tctgtgttgcccaga

SEQ ID NO: 1118707 - DNA, 15 bp, Homo sapiens
ttctgtgttgcccag

SEQ ID NO: 1118708 - DNA, 15 bp, Homo sapiens
gttctgtgttgccca

SEQ ID NO: 1118709 - DNA, 15 bp, Homo sapiens
tgttctgtgttgccc

SEQ ID NO: 1118710 - DNA, 15 bp, Homo sapiens
atgttctgtgttgcc

SEQ ID NO: 1118711 - DNA, 15 bp, Homo sapiens
catgttctgtgttgc

SEQ ID NO: 1118712 - DNA, 15 bp, Homo sapiens
ccatgttctgtgttg

SEQ ID NO: 1118713 - DNA, 15 bp, Homo sapiens
gccatgttctgtgtt

SEQ ID NO: 1118714 - DNA, 15 bp, Homo sapiens
tgccatgttctgtgt

SEQ ID NO: 1118715 - DNA, 15 bp, Homo sapiens
ttgccatgttctgtg

SEQ ID NO: 1118716 - DNA, 15 bp, Homo sapiens
cttgccatgttctgt

SEQ ID NO: 1118717 - DNA, 15 bp, Homo sapiens
tcttgccatgttctg

SEQ ID NO: 1118718 - DNA, 15 bp, Homo sapiens
gtcttgccatgttct

SEQ ID NO: 1118719 - DNA, 15 bp, Homo sapiens
agtcttgccatgttc

SEQ ID NO: 1118720 - DNA, 15 bp, Homo sapiens
gagtcttgccatgtt

SEQ ID NO: 1118721 - DNA, 15 bp, Homo sapiens
ggagtcttgccatgt

SEQ ID NO: 1118722 - DNA, 15 bp, Homo sapiens
gggagtcttgccatg

SEQ ID NO: 1118723 - DNA, 15 bp, Homo sapiens
tgggagtcttgccat

SEQ ID NO: 1118724 - DNA, 15 bp, Homo sapiens
atgggagtcttgcca

SEQ ID NO: 1118725 - DNA, 15 bp, Homo sapiens
gatgggagtcttgcc

SEQ ID NO: 1118726 - DNA, 15 bp, Homo sapiens
agatgggagtcttgc

SEQ ID NO: 1118727 - DNA, 15 bp, Homo sapiens
gagatgggagtcttg

SEQ ID NO: 1118728 - DNA, 15 bp, Homo sapiens
agagatgggagtctt

SEQ ID NO: 1118729 - DNA, 15 bp, Homo sapiens
tagagatgggagtct

SEQ ID NO: 1118730 - DNA, 15 bp, Homo sapiens
ttagagatgggagtc

SEQ ID NO: 1118731 - DNA, 15 bp, Homo sapiens
tttagagatgggagt

SEQ ID NO: 1118732 - DNA, 15 bp, Homo sapiens
ttttagagatgggag

SEQ ID NO: 1118733 - DNA, 15 bp, Homo sapiens
tttttagagatggga

SEQ ID NO: 1118734 - DNA, 15 bp, Homo sapiens
ttttttagagatggg

SEQ ID NO: 1118735 - DNA, 15 bp, Homo sapiens
tttttttagagatgg

SEQ ID NO: 1118736 - DNA, 15 bp, Homo sapiens
ttttttttagagatg

SEQ ID NO: 1118737 - DNA, 15 bp, Homo sapiens
attttttttagagat

SEQ ID NO: 1118738 - DNA, 15 bp, Homo sapiens
tattttttttagaga

SEQ ID NO: 1118739 - DNA, 15 bp, Homo sapiens
ttattttttttagag

SEQ ID NO: 1118740 - DNA, 15 bp, Homo sapiens
attattttttttaga

SEQ ID NO: 1118741 - DNA, 15 bp, Homo sapiens
tattattttttttag

SEQ ID NO: 1118742 - DNA, 15 bp, Homo sapiens
ttattatttttttta

SEQ ID NO: 1118743 - DNA, 15 bp, Homo sapiens
gttattattattatt

SEQ ID NO: 1118744 - DNA, 15 bp, Homo sapiens
ggttattattattat

SEQ ID NO: 1118745 - DNA, 15 bp, Homo sapiens
tggttattattatta

SEQ ID NO: 1118746 - DNA, 15 bp, Homo sapiens
ttggttattattatt

SEQ ID NO: 1118747 - DNA, 15 bp, Homo sapiens
tttggttattattat

SEQ ID NO: 1118748 - DNA, 15 bp, Homo sapiens
atttggttattatta

SEQ ID NO: 1118749 - DNA, 15 bp, Homo sapiens
tatttggttattatt

SEQ ID NO: 1118750 - DNA, 15 bp, Homo sapiens
ttatttggttattat

SEQ ID NO: 1118751 - DNA, 15 bp, Homo sapiens
tttatttggttatta

SEQ ID NO: 1118752 - DNA, 15 bp, Homo sapiens
atttatttggttatt

SEQ ID NO: 1118753 - DNA, 15 bp, Homo sapiens
tatttatttggttat

SEQ ID NO: 1118754 - DNA, 15 bp, Homo sapiens
ttatttatttggtta

SEQ ID NO: 1118755 - DNA, 15 bp, Homo sapiens
tttatttatttggtt

SEQ ID NO: 1118756 - DNA, 15 bp, Homo sapiens
gtttatttatttggt

SEQ ID NO: 1118757 - DNA, 15 bp, Homo sapiens
agtttatttatttgg

SEQ ID NO: 1118758 - DNA, 15 bp, Homo sapiens
tagtttatttatttg

SEQ ID NO: 1118759 - DNA, 15 bp, Homo sapiens
ttagtttatttattt

SEQ ID NO: 1118760 - DNA, 15 bp, Homo sapiens
tttagtttatttatt

SEQ ID NO: 1118761 - DNA, 15 bp, Homo sapiens
ttttagtttatttat

SEQ ID NO: 1118762 - DNA, 15 bp, Homo sapiens
attttagtttattta

SEQ ID NO: 1118763 - DNA, 15 bp, Homo sapiens
tattttagtttattt

SEQ ID NO: 1118764 - DNA, 15 bp, Homo sapiens
ttattttagtttatt

SEQ ID NO: 1118765 - DNA, 15 bp, Homo sapiens
tttattttagtttat

SEQ ID NO: 1118766 - DNA, 15 bp, Homo sapiens
ttttattttagttta

SEQ ID NO: 1118767 - DNA, 15 bp, Homo sapiens
attttattttagttt

SEQ ID NO: 1118768 - DNA, 15 bp, Homo sapiens
aattttattttagtt

SEQ ID NO: 1118769 - DNA, 15 bp, Homo sapiens
taattttattttagt

SEQ ID NO: 1118770 - DNA, 15 bp, Homo sapiens
ctaattttattttag

SEQ ID NO: 1118771 - DNA, 15 bp, Homo sapiens
gctaattttatttta

SEQ ID NO: 1118772 - DNA, 15 bp, Homo sapiens
ggctaattttatttt

SEQ ID NO: 1118773 - DNA, 15 bp, Homo sapiens
tggctaattttattt

SEQ ID NO: 1118774 - DNA, 15 bp, Homo sapiens
ctggctaattttatt

SEQ ID NO: 1118775 - DNA, 15 bp, Homo sapiens
cctggctaattttat

SEQ ID NO: 1118776 - DNA, 15 bp, Homo sapiens
gcctggctaatttta

SEQ ID NO: 1118777 - DNA, 15 bp, Homo sapiens
acaccaccatgcctg

SEQ ID NO: 1118778 - DNA, 15 bp, Homo sapiens
cacaccaccatgcct

SEQ ID NO: 1118779 - DNA, 15 bp, Homo sapiens
tacacaccaccatgc

SEQ ID NO: 1118780 - DNA, 15 bp, Homo sapiens
gtacacaccaccatg

SEQ ID NO: 1118781 - DNA, 15 bp, Homo sapiens
ggtacacaccaccat

SEQ ID NO: 1118782 - DNA, 15 bp, Homo sapiens
aggtacacaccacca

SEQ ID NO: 1118783 - DNA, 15 bp, Homo sapiens
caggtacacaccacc

SEQ ID NO: 1118784 - DNA, 15 bp, Homo sapiens
tcaggtacacaccac

SEQ ID NO: 1118785 - DNA, 15 bp, Homo sapiens
ctcaggtacacacca

SEQ ID NO: 1118786 - DNA, 15 bp, Homo sapiens
cctcaggtacacacc

SEQ ID NO: 1118787 - DNA, 15 bp, Homo sapiens
acctcaggtacacac

SEQ ID NO: 1118788 - DNA, 15 bp, Homo sapiens
gacctcaggtacaca

SEQ ID NO: 1118789 - DNA, 15 bp, Homo sapiens
ggacctcaggtacac

SEQ ID NO: 1118790 - DNA, 15 bp, Homo sapiens
gggacctcaggtaca

SEQ ID NO: 1118791 - DNA, 15 bp, Homo sapiens
tgggacctcaggtac

SEQ ID NO: 1118792 - DNA, 15 bp, Homo sapiens
ctgggacctcaggta

SEQ ID NO: 1118793 - DNA, 15 bp, Homo sapiens
actgggacctcaggt

SEQ ID NO: 1118794 - DNA, 15 bp, Homo sapiens
aactgggacctcagg

SEQ ID NO: 1118795 - DNA, 15 bp, Homo sapiens
taactgggacctcag

SEQ ID NO: 1118796 - DNA, 15 bp, Homo sapiens
gtaactgggacctca

SEQ ID NO: 1118797 - DNA, 15 bp, Homo sapiens
agtaactgggacctc

SEQ ID NO: 1118798 - DNA, 15 bp, Homo sapiens
gagtaactgggacct

SEQ ID NO: 1118799 - DNA, 15 bp, Homo sapiens
agagtaactgggacc

SEQ ID NO: 1118800 - DNA, 15 bp, Homo sapiens
cagagtaactgggac

SEQ ID NO: 1118801 - DNA, 15 bp, Homo sapiens
tcagagtaactggga

SEQ ID NO: 1118802 - DNA, 15 bp, Homo sapiens
ttcagagtaactggg

SEQ ID NO: 1118803 - DNA, 15 bp, Homo sapiens
cttcagagtaactgg

SEQ ID NO: 1118804 - DNA, 15 bp, Homo sapiens
ccttcagagtaactg

SEQ ID NO: 1118805 - DNA, 15 bp, Homo sapiens
tccttcagagtaact

SEQ ID NO: 1118806 - DNA, 15 bp, Homo sapiens
atccttcagagtaac

SEQ ID NO: 1118807 - DNA, 15 bp, Homo sapiens
gatccttcagagtaa

SEQ ID NO: 1118808 - DNA, 15 bp, Homo sapiens
cgatccttcagagta

SEQ ID NO: 1118809 - DNA, 15 bp, Homo sapiens
gcgatccttcagagt

SEQ ID NO: 1118810 - DNA, 15 bp, Homo sapiens
agcgatccttcagag

SEQ ID NO: 1118811 - DNA, 15 bp, Homo sapiens
aagcgatccttcaga

SEQ ID NO: 1118812 - DNA, 15 bp, Homo sapiens
taagcgatccttcag

SEQ ID NO: 1118813 - DNA, 15 bp, Homo sapiens
ttaagcgatccttca

SEQ ID NO: 1118814 - DNA, 15 bp, Homo sapiens
cttaagcgatccttc

SEQ ID NO: 1118815 - DNA, 15 bp, Homo sapiens
gcttaagcgatcctt

SEQ ID NO: 1118816 - DNA, 15 bp, Homo sapiens
ggcttaagcgatcct

SEQ ID NO: 1118817 - DNA, 15 bp, Homo sapiens
aggcttaagcgatcc

SEQ ID NO: 1118818 - DNA, 15 bp, Homo sapiens
caggcttaagcgatc

SEQ ID NO: 1118819 - DNA, 15 bp, Homo sapiens
ccaggcttaagcgat

SEQ ID NO: 1118820 - DNA, 15 bp, Homo sapiens
gccaggcttaagcga

SEQ ID NO: 1118821 - DNA, 15 bp, Homo sapiens
tgccaggcttaagcg

SEQ ID NO: 1118822 - DNA, 15 bp, Homo sapiens
ctgccaggcttaagc

SEQ ID NO: 1118823 - DNA, 15 bp, Homo sapiens
tctgccaggcttaag

SEQ ID NO: 1118824 - DNA, 15 bp, Homo sapiens
atctgccaggcttaa

SEQ ID NO: 1118825 - DNA, 15 bp, Homo sapiens
aatctgccaggctta

SEQ ID NO: 1118826 - DNA, 15 bp, Homo sapiens
caatctgccaggctt

SEQ ID NO: 1118827 - DNA, 15 bp, Homo sapiens
tcaatctgccaggct

SEQ ID NO: 1118828 - DNA, 15 bp, Homo sapiens
ttcaatctgccaggc

SEQ ID NO: 1118829 - DNA, 15 bp, Homo sapiens
cttcaatctgccagg

SEQ ID NO: 1118830 - DNA, 15 bp, Homo sapiens
gcttcaatctgccag

SEQ ID NO: 1118831 - DNA, 15 bp, Homo sapiens
agcttcaatctgcca

SEQ ID NO: 1118832 - DNA, 15 bp, Homo sapiens
cagcttcaatctgcc

SEQ ID NO: 1118833 - DNA, 15 bp, Homo sapiens
gcagcttcaatctgc

SEQ ID NO: 1118834 - DNA, 15 bp, Homo sapiens
tgcagcttcaatctg

SEQ ID NO: 1118835 - DNA, 15 bp, Homo sapiens
ctgcagcttcaatct

SEQ ID NO: 1118836 - DNA, 15 bp, Homo sapiens
actgcagcttcaatc

SEQ ID NO: 1118837 - DNA, 15 bp, Homo sapiens
aactgcagcttcaat

SEQ ID NO: 1118838 - DNA, 15 bp, Homo sapiens
caactgcagcttcaa

SEQ ID NO: 1118839 - DNA, 15 bp, Homo sapiens
tcaactgcagcttca

SEQ ID NO: 1118840 - DNA, 15 bp, Homo sapiens
ctcaactgcagcttc

SEQ ID NO: 1118841 - DNA, 15 bp, Homo sapiens
actcaactgcagctt

SEQ ID NO: 1118842 - DNA, 15 bp, Homo sapiens
cactcaactgcagct

SEQ ID NO: 1118843 - DNA, 15 bp, Homo sapiens
tcactcaactgcagc

SEQ ID NO: 1118844 - DNA, 15 bp, Homo sapiens
ctcactcaactgcag

SEQ ID NO: 1118845 - DNA, 15 bp, Homo sapiens
gctcactcaactgca

SEQ ID NO: 1118846 - DNA, 15 bp, Homo sapiens
ggctcactcaactgc

SEQ ID NO: 1118847 - DNA, 15 bp, Homo sapiens
tggctcactcaactg

SEQ ID NO: 1118848 - DNA, 15 bp, Homo sapiens
gtggctcactcaact

SEQ ID NO: 1118849 - DNA, 15 bp, Homo sapiens
cgtggctcactcaac

SEQ ID NO: 1118850 - DNA, 15 bp, Homo sapiens
tcgtggctcactcaa

SEQ ID NO: 1118851 - DNA, 15 bp, Homo sapiens
atcgtggctcactca

SEQ ID NO: 1118852 - DNA, 15 bp, Homo sapiens
aatcgtggctcactc

SEQ ID NO: 1118853 - DNA, 15 bp, Homo sapiens
caatcgtggctcact

SEQ ID NO: 1118854 - DNA, 15 bp, Homo sapiens
gcaatcgtggctcac

SEQ ID NO: 1118855 - DNA, 15 bp, Homo sapiens
tgcaatcgtggctca

SEQ ID NO: 1118856 - DNA, 15 bp, Homo sapiens
gtgcaatcgtggctc

SEQ ID NO: 1118857 - DNA, 15 bp, Homo sapiens
ggtgcaatcgtggct

SEQ ID NO: 1118858 - DNA, 15 bp, Homo sapiens
tggtgcaatcgtggc

SEQ ID NO: 1118859 - DNA, 15 bp, Homo sapiens
gtggtgcaatcgtgg

SEQ ID NO: 1118860 - DNA, 15 bp, Homo sapiens
agtggtgcaatcgtg

SEQ ID NO: 1118861 - DNA, 15 bp, Homo sapiens
cagtggtgcaatcgt

SEQ ID NO: 1118862 - DNA, 15 bp, Homo sapiens
gcagtggtgcaatcg

SEQ ID NO: 1118863 - DNA, 15 bp, Homo sapiens
cctgtcacccagcct

SEQ ID NO: 1118864 - DNA, 15 bp, Homo sapiens
ccctgtcacccagcc

SEQ ID NO: 1118865 - DNA, 15 bp, Homo sapiens
gccctgtcacccagc

SEQ ID NO: 1118866 - DNA, 15 bp, Homo sapiens
agccctgtcacccag

SEQ ID NO: 1118867 - DNA, 15 bp, Homo sapiens
cagccctgtcaccca

SEQ ID NO: 1118868 - DNA, 15 bp, Homo sapiens
tcagccctgtcaccc

SEQ ID NO: 1118869 - DNA, 15 bp, Homo sapiens
ctcagccctgtcacc

SEQ ID NO: 1118870 - DNA, 15 bp, Homo sapiens
tctcagccctgtcac

SEQ ID NO: 1118871 - DNA, 15 bp, Homo sapiens
gtctcagccctgtca

SEQ ID NO: 1118872 - DNA, 15 bp, Homo sapiens
ggtctcagccctgtc

SEQ ID NO: 1118873 - DNA, 15 bp, Homo sapiens
gggtctcagccctgt

SEQ ID NO: 1118874 - DNA, 15 bp, Homo sapiens
ggggtctcagccctg

SEQ ID NO: 1118875 - DNA, 15 bp, Homo sapiens
tggggtctcagccct

SEQ ID NO: 1118876 - DNA, 15 bp, Homo sapiens
atggggtctcagccc

SEQ ID NO: 1118877 - DNA, 15 bp, Homo sapiens
gatggggtctcagcc

SEQ ID NO: 1118878 - DNA, 15 bp, Homo sapiens
agatggggtctcagc

SEQ ID NO: 1118879 - DNA, 15 bp, Homo sapiens
gagatggggtctcag

SEQ ID NO: 1118880 - DNA, 15 bp, Homo sapiens
tgagatggggtctca

SEQ ID NO: 1118881 - DNA, 15 bp, Homo sapiens
ttgagatggggtctc

SEQ ID NO: 1118882 - DNA, 15 bp, Homo sapiens
ctttttgagatgggg

SEQ ID NO: 1118883 - DNA, 15 bp, Homo sapiens
actttttgagatggg

SEQ ID NO: 1118884 - DNA, 15 bp, Homo sapiens
tactttttgagatgg

SEQ ID NO: 1118885 - DNA, 15 bp, Homo sapiens
ttactttttgagatg

SEQ ID NO: 1118886 - DNA, 15 bp, Homo sapiens
tttactttttgagat

SEQ ID NO: 1118887 - DNA, 15 bp, Homo sapiens
ttttactttttgaga

SEQ ID NO: 1118888 - DNA, 15 bp, Homo sapiens
tttttactttttgag

SEQ ID NO: 1118889 - DNA, 15 bp, Homo sapiens
ctttttactttttga

SEQ ID NO: 1118890 - DNA, 15 bp, Homo sapiens
actttttactttttg

SEQ ID NO: 1118891 - DNA, 15 bp, Homo sapiens
aactttttacttttt

SEQ ID NO: 1118892 - DNA, 15 bp, Homo sapiens
taactttttactttt

SEQ ID NO: 1118893 - DNA, 15 bp, Homo sapiens
ttaactttttacttt

SEQ ID NO: 1118894 - DNA, 15 bp, Homo sapiens
tttaactttttactt

SEQ ID NO: 1118895 - DNA, 15 bp, Homo sapiens
ttttaactttttact

SEQ ID NO: 1118896 - DNA, 15 bp, Homo sapiens
tttttaactttttac

SEQ ID NO: 1118897 - DNA, 15 bp, Homo sapiens
ttttttaacttttta

SEQ ID NO: 1118898 - DNA, 15 bp, Homo sapiens
attttttaacttttt

SEQ ID NO: 1118899 - DNA, 15 bp, Homo sapiens
tattttttaactttt

SEQ ID NO: 1118900 - DNA, 15 bp, Homo sapiens
atattttttaacttt

SEQ ID NO: 1118901 - DNA, 15 bp, Homo sapiens
gatattttttaactt

SEQ ID NO: 1118902 - DNA, 15 bp, Homo sapiens
tgatattttttaact

SEQ ID NO: 1118903 - DNA, 15 bp, Homo sapiens
ctgatattttttaac

SEQ ID NO: 1118904 - DNA, 15 bp, Homo sapiens
gctgatattttttaa

SEQ ID NO: 1118905 - DNA, 15 bp, Homo sapiens
tgctgatatttttta

SEQ ID NO: 1118906 - DNA, 15 bp, Homo sapiens
ctgctgatatttttt

SEQ ID NO: 1118907 - DNA, 15 bp, Homo sapiens
tctgctgatattttt

SEQ ID NO: 1118908 - DNA, 15 bp, Homo sapiens
gtctgctgatatttt

SEQ ID NO: 1118909 - DNA, 15 bp, Homo sapiens
ggtctgctgatattt

SEQ ID NO: 1118910 - DNA, 15 bp, Homo sapiens
tggtctgctgatatt

SEQ ID NO: 1118911 - DNA, 15 bp, Homo sapiens
ctggtctgctgatat

SEQ ID NO: 1118912 - DNA, 15 bp, Homo sapiens
cctggtctgctgata

SEQ ID NO: 1118913 - DNA, 15 bp, Homo sapiens
gcctggtctgctgat

SEQ ID NO: 1118914 - DNA, 15 bp, Homo sapiens
tgcctggtctgctga

SEQ ID NO: 1118915 - DNA, 15 bp, Homo sapiens
atgcctggtctgctg

SEQ ID NO: 1118916 - DNA, 15 bp, Homo sapiens
catgcctggtctgct

SEQ ID NO: 1118917 - DNA, 15 bp, Homo sapiens
ccatgcctggtctgc

SEQ ID NO: 1118918 - DNA, 15 bp, Homo sapiens
accatgcctggtctg

SEQ ID NO: 1118919 - DNA, 15 bp, Homo sapiens
tcaccatgcctggtc

SEQ ID NO: 1118920 - DNA, 15 bp, Homo sapiens
atcaccatgcctggt

SEQ ID NO: 1118921 - DNA, 15 bp, Homo sapiens
aatcaccatgcctgg

SEQ ID NO: 1118922 - DNA, 15 bp, Homo sapiens
aaatcaccatgcctg

SEQ ID NO: 1118923 - DNA, 15 bp, Homo sapiens
taaatcaccatgcct

SEQ ID NO: 1118924 - DNA, 15 bp, Homo sapiens
gtaaatcaccatgcc

SEQ ID NO: 1118925 - DNA, 15 bp, Homo sapiens
tgtaaatcaccatgc

SEQ ID NO: 1118926 - DNA, 15 bp, Homo sapiens
gtgtaaatcaccatg

SEQ ID NO: 1118927 - DNA, 15 bp, Homo sapiens
ggtgtaaatcaccat

SEQ ID NO: 1118928 - DNA, 15 bp, Homo sapiens
aggtgtaaatcacca

SEQ ID NO: 1118929 - DNA, 15 bp, Homo sapiens
caggtgtaaatcacc

SEQ ID NO: 1118930 - DNA, 15 bp, Homo sapiens
acaggtgtaaatcac

SEQ ID NO: 1118931 - DNA, 15 bp, Homo sapiens
tacaggtgtaaatca

SEQ ID NO: 1118932 - DNA, 15 bp, Homo sapiens
ttacaggtgtaaatc

SEQ ID NO: 1118933 - DNA, 15 bp, Homo sapiens
attacaggtgtaaat

SEQ ID NO: 1118934 - DNA, 15 bp, Homo sapiens
gattacaggtgtaaa

SEQ ID NO: 1118935 - DNA, 15 bp, Homo sapiens
aaggattacaggtgt

SEQ ID NO: 1118936 - DNA, 15 bp, Homo sapiens
aaaggattacaggtg

SEQ ID NO: 1118937 - DNA, 15 bp, Homo sapiens
caaaggattacaggt

SEQ ID NO: 1118938 - DNA, 15 bp, Homo sapiens
ccaaaggattacagg

SEQ ID NO: 1118939 - DNA, 15 bp, Homo sapiens
cccaaaggattacag

SEQ ID NO: 1118940 - DNA, 15 bp, Homo sapiens
tcccaaaggattaca

SEQ ID NO: 1118941 - DNA, 15 bp, Homo sapiens
ttcccaaaggattac

SEQ ID NO: 1118942 - DNA, 15 bp, Homo sapiens
cttcccaaaggatta

SEQ ID NO: 1118943 - DNA, 15 bp, Homo sapiens
gcttcccaaaggatt

SEQ ID NO: 1118944 - DNA, 15 bp, Homo sapiens
ggcttcccaaaggat

SEQ ID NO: 1118945 - DNA, 15 bp, Homo sapiens
tggcttcccaaagga

SEQ ID NO: 1118946 - DNA, 15 bp, Homo sapiens
ttggcttcccaaagg

SEQ ID NO: 1118947 - DNA, 15 bp, Homo sapiens
tcctgccttggcttc

SEQ ID NO: 1118948 - DNA, 15 bp, Homo sapiens
ttcctgccttggctt

SEQ ID NO: 1118949 - DNA, 15 bp, Homo sapiens
attcctgccttggct

SEQ ID NO: 1118950 - DNA, 15 bp, Homo sapiens
tattcctgccttggc

SEQ ID NO: 1118951 - DNA, 15 bp, Homo sapiens
atattcctgccttgg

SEQ ID NO: 1118952 - DNA, 15 bp, Homo sapiens
aatattcctgccttg

SEQ ID NO: 1118953 - DNA, 15 bp, Homo sapiens
caatattcctgcctt

SEQ ID NO: 1118954 - DNA, 15 bp, Homo sapiens
gcaatattcctgcct

SEQ ID NO: 1118955 - DNA, 15 bp, Homo sapiens
agcaatattcctgcc

SEQ ID NO: 1118956 - DNA, 15 bp, Homo sapiens
cagcaatattcctgc

SEQ ID NO: 1118957 - DNA, 15 bp, Homo sapiens
ccagcaatattcctg

SEQ ID NO: 1118958 - DNA, 15 bp, Homo sapiens
tccagcaatattcct

SEQ ID NO: 1118959 - DNA, 15 bp, Homo sapiens
ctccagcaatattcc

SEQ ID NO: 1118960 - DNA, 15 bp, Homo sapiens
cctccagcaatattc

SEQ ID NO: 1118961 - DNA, 15 bp, Homo sapiens
gcctccagcaatatt

SEQ ID NO: 1118962 - DNA, 15 bp, Homo sapiens
ggcctccagcaatat

SEQ ID NO: 1118963 - DNA, 15 bp, Homo sapiens
tggcctccagcaata

SEQ ID NO: 1118964 - DNA, 15 bp, Homo sapiens
ctggcctccagcaat

SEQ ID NO: 1118965 - DNA, 15 bp, Homo sapiens
cctggcctccagcaa

SEQ ID NO: 1118966 - DNA, 15 bp, Homo sapiens
tcctggcctccagca

SEQ ID NO: 1118967 - DNA, 15 bp, Homo sapiens
ctcctggcctccagc

SEQ ID NO: 1118968 - DNA, 15 bp, Homo sapiens
actcctggcctccag

SEQ ID NO: 1118969 - DNA, 15 bp, Homo sapiens
aactcctggcctcca

SEQ ID NO: 1118970 - DNA, 15 bp, Homo sapiens
caactcctggcctcc

SEQ ID NO: 1118971 - DNA, 15 bp, Homo sapiens
tcaactcctggcctc

SEQ ID NO: 1118972 - DNA, 15 bp, Homo sapiens
ttcaactcctggcct

SEQ ID NO: 1118973 - DNA, 15 bp, Homo sapiens
cttcaactcctggcc

SEQ ID NO: 1118974 - DNA, 15 bp, Homo sapiens
tcttcaactcctggc

SEQ ID NO: 1118975 - DNA, 15 bp, Homo sapiens
gtcttcaactcctgg

SEQ ID NO: 1118976 - DNA, 15 bp, Homo sapiens
gtggggtcttactat

SEQ ID NO: 1118977 - DNA, 15 bp, Homo sapiens
ggtggggtcttacta

SEQ ID NO: 1118978 - DNA, 15 bp, Homo sapiens
aggtggggtcttact

SEQ ID NO: 1118979 - DNA, 15 bp, Homo sapiens
gaggtggggtcttac

SEQ ID NO: 1118980 - DNA, 15 bp, Homo sapiens
ggaggtggggtctta

SEQ ID NO: 1118981 - DNA, 15 bp, Homo sapiens
tggaggtggggtctt

SEQ ID NO: 1118982 - DNA, 15 bp, Homo sapiens
gtggaggtggggtct

SEQ ID NO: 1118983 - DNA, 15 bp, Homo sapiens
tgtggaggtggggtc

SEQ ID NO: 1118984 - DNA, 15 bp, Homo sapiens
ttgtggaggtggggt

SEQ ID NO: 1118985 - DNA, 15 bp, Homo sapiens
gttgtggaggtgggg

SEQ ID NO: 1118986 - DNA, 15 bp, Homo sapiens
ggttgtggaggtggg

SEQ ID NO: 1118987 - DNA, 15 bp, Homo sapiens
tggttgtggaggtgg

SEQ ID NO: 1118988 - DNA, 15 bp, Homo sapiens
atggttgtggaggtg

SEQ ID NO: 1118989 - DNA, 15 bp, Homo sapiens
aatggttgtggaggt

SEQ ID NO: 1118990 - DNA, 15 bp, Homo sapiens
aaatggttgtggagg

SEQ ID NO: 1118991 - DNA, 15 bp, Homo sapiens
gaaatggttgtggag

SEQ ID NO: 1118992 - DNA, 15 bp, Homo sapiens
ggaaatggttgtgga

SEQ ID NO: 1118993 - DNA, 15 bp, Homo sapiens
tggaaatggttgtgg

SEQ ID NO: 1118994 - DNA, 15 bp, Homo sapiens
gtggaaatggttgtg

SEQ ID NO: 1118995 - DNA, 15 bp, Homo sapiens
tgtggaaatggttgt

SEQ ID NO: 1118996 - DNA, 15 bp, Homo sapiens
ttgtggaaatggttg

SEQ ID NO: 1118997 - DNA, 15 bp, Homo sapiens
tttgtggaaatggtt

SEQ ID NO: 1118998 - DNA, 15 bp, Homo sapiens
ttttgtggaaatggt

SEQ ID NO: 1118999 - DNA, 15 bp, Homo sapiens
tttttgtggaaatgg

SEQ ID NO: 1119000 - DNA, 15 bp, Homo sapiens
ttttttgtggaaatg

SEQ ID NO: 1119001 - DNA, 15 bp, Homo sapiens
cttttttgtggaaat

SEQ ID NO: 1119002 - DNA, 15 bp, Homo sapiens
tcttttttgtggaaa

SEQ ID NO: 1119003 - DNA, 15 bp, Homo sapiens
ttcttttttgtggaa

SEQ ID NO: 1119004 - DNA, 15 bp, Homo sapiens
cttcttttttgtgga

SEQ ID NO: 1119005 - DNA, 15 bp, Homo sapiens
tcttcttttttgtgg

SEQ ID NO: 1119006 - DNA, 15 bp, Homo sapiens
ttcttcttttttgtg

SEQ ID NO: 1119007 - DNA, 15 bp, Homo sapiens
tttcttcttttttgt

SEQ ID NO: 1119008 - DNA, 15 bp, Homo sapiens
ttttcttcttttttg

SEQ ID NO: 1119009 - DNA, 15 bp, Homo sapiens
tttttcttctttttt

SEQ ID NO: 1119010 - DNA, 15 bp, Homo sapiens
atttttcttcttttt

SEQ ID NO: 1119011 - DNA, 15 bp, Homo sapiens
aatttttcttctttt

SEQ ID NO: 1119012 - DNA, 15 bp, Homo sapiens
taatttttcttcttt

SEQ ID NO: 1119013 - DNA, 15 bp, Homo sapiens
ttaatttttcttctt

SEQ ID NO: 1119014 - DNA, 15 bp, Homo sapiens
gttaatttttcttct

SEQ ID NO: 1119015 - DNA, 15 bp, Homo sapiens
agttaatttttcttc

SEQ ID NO: 1119016 - DNA, 15 bp, Homo sapiens
cagttaatttttctt

SEQ ID NO: 1119017 - DNA, 15 bp, Homo sapiens
ccagttaatttttct

SEQ ID NO: 1119018 - DNA, 15 bp, Homo sapiens
cccagttaatttttc

SEQ ID NO: 1119019 - DNA, 15 bp, Homo sapiens
acccagttaattttt

SEQ ID NO: 1119020 - DNA, 15 bp, Homo sapiens
cacccagttaatttt

SEQ ID NO: 1119021 - DNA, 15 bp, Homo sapiens
acacccagttaattt

SEQ ID NO: 1119022 - DNA, 15 bp, Homo sapiens
cacacccagttaatt

SEQ ID NO: 1119023 - DNA, 15 bp, Homo sapiens
ccacacccagttaat

SEQ ID NO: 1119024 - DNA, 15 bp, Homo sapiens
cccacacccagttaa

SEQ ID NO: 1119025 - DNA, 15 bp, Homo sapiens
ccccacacccagtta

SEQ ID NO: 1119026 - DNA, 15 bp, Homo sapiens
accccacacccagtt

SEQ ID NO: 1119027 - DNA, 15 bp, Homo sapiens
caccccacacccagt

SEQ ID NO: 1119028 - DNA, 15 bp, Homo sapiens
ccaccccacacccag

SEQ ID NO: 1119029 - DNA, 15 bp, Homo sapiens
gccaccccacaccca

SEQ ID NO: 1119030 - DNA, 15 bp, Homo sapiens
cgccaccccacaccc

SEQ ID NO: 1119031 - DNA, 15 bp, Homo sapiens
gcgccaccccacacc

SEQ ID NO: 1119032 - DNA, 15 bp, Homo sapiens
tgcgccaccccacac

SEQ ID NO: 1119033 - DNA, 15 bp, Homo sapiens
atgcgccaccccaca

SEQ ID NO: 1119034 - DNA, 15 bp, Homo sapiens
tatgcgccaccccac

SEQ ID NO: 1119035 - DNA, 15 bp, Homo sapiens
gtatgcgccacccca

SEQ ID NO: 1119036 - DNA, 15 bp, Homo sapiens
ggtatgcgccacccc

SEQ ID NO: 1119037 - DNA, 15 bp, Homo sapiens
tggtatgcgccaccc

SEQ ID NO: 1119038 - DNA, 15 bp, Homo sapiens
ctggtatgcgccacc

SEQ ID NO: 1119039 - DNA, 15 bp, Homo sapiens
tctggtatgcgccac

SEQ ID NO: 1119040 - DNA, 15 bp, Homo sapiens
ttctggtatgcgcca

SEQ ID NO: 1119041 - DNA, 15 bp, Homo sapiens
cttctggtatgcgcc

SEQ ID NO: 1119042 - DNA, 15 bp, Homo sapiens
gcttctggtatgcgc

SEQ ID NO: 1119043 - DNA, 15 bp, Homo sapiens
agcttctggtatgcg

SEQ ID NO: 1119044 - DNA, 15 bp, Homo sapiens
cagcttctggtatgc

SEQ ID NO: 1119045 - DNA, 15 bp, Homo sapiens
tcagcttctggtatg

SEQ ID NO: 1119046 - DNA, 15 bp, Homo sapiens
ctcagcttctggtat

SEQ ID NO: 1119047 - DNA, 15 bp, Homo sapiens
tctcagcttctggta

SEQ ID NO: 1119048 - DNA, 15 bp, Homo sapiens
gtctcagcttctggt

SEQ ID NO: 1119049 - DNA, 15 bp, Homo sapiens
tgtctcagcttctgg

SEQ ID NO: 1119050 - DNA, 15 bp, Homo sapiens
ttgtctcagcttctg

SEQ ID NO: 1119051 - DNA, 15 bp, Homo sapiens
cttgtctcagcttct

SEQ ID NO: 1119052 - DNA, 15 bp, Homo sapiens
tcttgtctcagcttc

SEQ ID NO: 1119053 - DNA, 15 bp, Homo sapiens
ctcttgtctcagctt

SEQ ID NO: 1119054 - DNA, 15 bp, Homo sapiens
cctcttgtctcagct

SEQ ID NO: 1119055 - DNA, 15 bp, Homo sapiens
tcctcttgtctcagc

SEQ ID NO: 1119056 - DNA, 15 bp, Homo sapiens
atcctcttgtctcag

SEQ ID NO: 1119057 - DNA, 15 bp, Homo sapiens
tatcctcttgtctca

SEQ ID NO: 1119058 - DNA, 15 bp, Homo sapiens
ttatcctcttgtctc

SEQ ID NO: 1119059 - DNA, 15 bp, Homo sapiens
gttatcctcttgtct

SEQ ID NO: 1119060 - DNA, 15 bp, Homo sapiens
tgttatcctcttgtc

SEQ ID NO: 1119061 - DNA, 15 bp, Homo sapiens
gtgttatcctcttgt

SEQ ID NO: 1119062 - DNA, 15 bp, Homo sapiens
cgtgttatcctcttg

SEQ ID NO: 1119063 - DNA, 15 bp, Homo sapiens
tcgtgttatcctctt

SEQ ID NO: 1119064 - DNA, 15 bp, Homo sapiens
ctcgtgttatcctct

SEQ ID NO: 1119065 - DNA, 15 bp, Homo sapiens
gctcgtgttatcctc

SEQ ID NO: 1119066 - DNA, 15 bp, Homo sapiens
agctcgtgttatcct

SEQ ID NO: 1119067 - DNA, 15 bp, Homo sapiens
gagctcgtgttatcc

SEQ ID NO: 1119068 - DNA, 15 bp, Homo sapiens
tgagctcgtgttatc

SEQ ID NO: 1119069 - DNA, 15 bp, Homo sapiens
ctgagctcgtgttat

SEQ ID NO: 1119070 - DNA, 15 bp, Homo sapiens
cctgagctcgtgtta

SEQ ID NO: 1119071 - DNA, 15 bp, Homo sapiens
tcctgagctcgtgtt

SEQ ID NO: 1119072 - DNA, 15 bp, Homo sapiens
atcctgagctcgtgt

SEQ ID NO: 1119073 - DNA, 15 bp, Homo sapiens
aatcctgagctcgtg

SEQ ID NO: 1119074 - DNA, 15 bp, Homo sapiens
aaatcctgagctcgt

SEQ ID NO: 1119075 - DNA, 15 bp, Homo sapiens
aaaatcctgagctcg

SEQ ID NO: 1119076 - DNA, 15 bp, Homo sapiens
caaaatcctgagctc

SEQ ID NO: 1119077 - DNA, 15 bp, Homo sapiens
tcaaaatcctgagct

SEQ ID NO: 1119078 - DNA, 15 bp, Homo sapiens
ctcaaaatcctgagc

SEQ ID NO: 1119079 - DNA, 15 bp, Homo sapiens
cctcaaaatcctgag

SEQ ID NO: 1119080 - DNA, 15 bp, Homo sapiens
gcctcaaaatcctga

SEQ ID NO: 1119081 - DNA, 15 bp, Homo sapiens
agcctcaaaatcctg

SEQ ID NO: 1119082 - DNA, 15 bp, Homo sapiens
tagcctcaaaatcct

SEQ ID NO: 1119083 - DNA, 15 bp, Homo sapiens
atagcctcaaaatcc

SEQ ID NO: 1119084 - DNA, 15 bp, Homo sapiens
tatagcctcaaaatc

SEQ ID NO: 1119085 - DNA, 15 bp, Homo sapiens
ctatagcctcaaaat

SEQ ID NO: 1119086 - DNA, 15 bp, Homo sapiens
actatagcctcaaaa

SEQ ID NO: 1119087 - DNA, 15 bp, Homo sapiens
cactatagcctcaaa

SEQ ID NO: 1119088 - DNA, 15 bp, Homo sapiens
tcactatagcctcaa

SEQ ID NO: 1119089 - DNA, 15 bp, Homo sapiens
ctcactatagcctca

SEQ ID NO: 1119090 - DNA, 15 bp, Homo sapiens
gctcactatagcctc

SEQ ID NO: 1119091 - DNA, 15 bp, Homo sapiens
agctcactatagcct

SEQ ID NO: 1119092 - DNA, 15 bp, Homo sapiens
cagctcactatagcc

SEQ ID NO: 1119093 - DNA, 15 bp, Homo sapiens
acagctcactatagc

SEQ ID NO: 1119094 - DNA, 15 bp, Homo sapiens
aacagctcactatag

SEQ ID NO: 1119095 - DNA, 15 bp, Homo sapiens
taacagctcactata

SEQ ID NO: 1119096 - DNA, 15 bp, Homo sapiens
ataacagctcactat

SEQ ID NO: 1119097 - DNA, 15 bp, Homo sapiens
aataacagctcacta

SEQ ID NO: 1119098 - DNA, 15 bp, Homo sapiens
caataacagctcact

SEQ ID NO: 1119099 - DNA, 15 bp, Homo sapiens
acaataacagctcac

SEQ ID NO: 1119100 - DNA, 15 bp, Homo sapiens
cacaataacagctca

SEQ ID NO: 1119101 - DNA, 15 bp, Homo sapiens
acacaataacagctc

SEQ ID NO: 1119102 - DNA, 15 bp, Homo sapiens
gacacaataacagct

SEQ ID NO: 1119103 - DNA, 15 bp, Homo sapiens
tgacacaataacagc

SEQ ID NO: 1119104 - DNA, 15 bp, Homo sapiens
gtgacacaataacag

SEQ ID NO: 1119105 - DNA, 15 bp, Homo sapiens
agtgacacaataaca

SEQ ID NO: 1119106 - DNA, 15 bp, Homo sapiens
cagtgacacaataac

SEQ ID NO: 1119107 - DNA, 15 bp, Homo sapiens
gcagtgacacaataa

SEQ ID NO: 1119108 - DNA, 15 bp, Homo sapiens
tgcagtgacacaata

SEQ ID NO: 1119109 - DNA, 15 bp, Homo sapiens
atgcagtgacacaat

SEQ ID NO: 1119110 - DNA, 15 bp, Homo sapiens
aatgcagtgacacaa

SEQ ID NO: 1119111 - DNA, 15 bp, Homo sapiens
gaatgcagtgacaca

SEQ ID NO: 1119112 - DNA, 15 bp, Homo sapiens
ggaatgcagtgacac

SEQ ID NO: 1119113 - DNA, 15 bp, Homo sapiens
tggaatgcagtgaca

SEQ ID NO: 1119114 - DNA, 15 bp, Homo sapiens
ctggaatgcagtgac

SEQ ID NO: 1119115 - DNA, 15 bp, Homo sapiens
gctggaatgcagtga

SEQ ID NO: 1119116 - DNA, 15 bp, Homo sapiens
gggctggaatgcagt

SEQ ID NO: 1119117 - DNA, 15 bp, Homo sapiens
cgggctggaatgcag

SEQ ID NO: 1119118 - DNA, 15 bp, Homo sapiens
ccgggctggaatgca

SEQ ID NO: 1119119 - DNA, 15 bp, Homo sapiens
cccgggctggaatgc

SEQ ID NO: 1119120 - DNA, 15 bp, Homo sapiens
gcccgggctggaatg

SEQ ID NO: 1119121 - DNA, 15 bp, Homo sapiens
tgcccgggctggaat

SEQ ID NO: 1119122 - DNA, 15 bp, Homo sapiens
ttgcccgggctggaa

SEQ ID NO: 1119123 - DNA, 15 bp, Homo sapiens
attgcccgggctgga

SEQ ID NO: 1119124 - DNA, 15 bp, Homo sapiens
cattgcccgggctgg

SEQ ID NO: 1119125 - DNA, 15 bp, Homo sapiens
tcattgcccgggctg

SEQ ID NO: 1119126 - DNA, 15 bp, Homo sapiens
ttcattgcccgggct

SEQ ID NO: 1119127 - DNA, 15 bp, Homo sapiens
tttcattgcccgggc

SEQ ID NO: 1119128 - DNA, 15 bp, Homo sapiens
gtttcattgcccggg

SEQ ID NO: 1119129 - DNA, 15 bp, Homo sapiens
tgtttcattgcccgg

SEQ ID NO: 1119130 - DNA, 15 bp, Homo sapiens
ttgtttcattgcccg

SEQ ID NO: 1119131 - DNA, 15 bp, Homo sapiens
cttgtttcattgccc

SEQ ID NO: 1119132 - DNA, 15 bp, Homo sapiens
tcttgtttcattgcc

SEQ ID NO: 1119133 - DNA, 15 bp, Homo sapiens
gtcttgtttcattgc

SEQ ID NO: 1119134 - DNA, 15 bp, Homo sapiens
ggtcttgtttcattg

SEQ ID NO: 1119135 - DNA, 15 bp, Homo sapiens
gggtcttgtttcatt

SEQ ID NO: 1119136 - DNA, 15 bp, Homo sapiens
agggtcttgtttcat

SEQ ID NO: 1119137 - DNA, 15 bp, Homo sapiens
cagggtcttgtttca

SEQ ID NO: 1119138 - DNA, 15 bp, Homo sapiens
acagggtcttgtttc

SEQ ID NO: 1119139 - DNA, 15 bp, Homo sapiens
ctgagacagggtctt

SEQ ID NO: 1119140 - DNA, 15 bp, Homo sapiens
atttttctgagacag

SEQ ID NO: 1119141 - DNA, 15 bp, Homo sapiens
cttatttttctgaga

SEQ ID NO: 1119142 - DNA, 15 bp, Homo sapiens
acttatttttctgag

SEQ ID NO: 1119143 - DNA, 15 bp, Homo sapiens
tacttatttttctga

SEQ ID NO: 1119144 - DNA, 15 bp, Homo sapiens
ttacttatttttctg

SEQ ID NO: 1119145 - DNA, 15 bp, Homo sapiens
tttacttatttttct

SEQ ID NO: 1119146 - DNA, 15 bp, Homo sapiens
atttacttatttttc

SEQ ID NO: 1119147 - DNA, 15 bp, Homo sapiens
tatttacttattttt

SEQ ID NO: 1119148 - DNA, 15 bp, Homo sapiens
ttatttacttatttt

SEQ ID NO: 1119149 - DNA, 15 bp, Homo sapiens
gcatttatttactta

SEQ ID NO: 1119150 - DNA, 15 bp, Homo sapiens
tgcatttatttactt

SEQ ID NO: 1119151 - DNA, 15 bp, Homo sapiens
atgcatttatttact

SEQ ID NO: 1119152 - DNA, 15 bp, Homo sapiens
tatgcatttatttac

SEQ ID NO: 1119153 - DNA, 15 bp, Homo sapiens
ttatgcatttattta

SEQ ID NO: 1119154 - DNA, 15 bp, Homo sapiens
tttatgcatttattt

SEQ ID NO: 1119155 - DNA, 15 bp, Homo sapiens
atttatgcatttatt

SEQ ID NO: 1119156 - DNA, 15 bp, Homo sapiens
tatttatgcatttat

SEQ ID NO: 1119157 - DNA, 15 bp, Homo sapiens
ttatttatgcattta

SEQ ID NO: 1119158 - DNA, 15 bp, Homo sapiens
tttatttatgcattt

SEQ ID NO: 1119159 - DNA, 15 bp, Homo sapiens
atttatttatgcatt

SEQ ID NO: 1119160 - DNA, 15 bp, Homo sapiens
tatttatttatgcat

SEQ ID NO: 1119161 - DNA, 15 bp, Homo sapiens
ttatttatttatgca

SEQ ID NO: 1119162 - DNA, 15 bp, Homo sapiens
attatttatttatgc

SEQ ID NO: 1119163 - DNA, 15 bp, Homo sapiens
tattatttatttatg

SEQ ID NO: 1119164 - DNA, 15 bp, Homo sapiens
ctattattatttatt

SEQ ID NO: 1119165 - DNA, 15 bp, Homo sapiens
gctattattatttat

SEQ ID NO: 1119166 - DNA, 15 bp, Homo sapiens
tgctattattattta

SEQ ID NO: 1119167 - DNA, 15 bp, Homo sapiens
ctgctattattattt

SEQ ID NO: 1119168 - DNA, 15 bp, Homo sapiens
gctgctattattatt

SEQ ID NO: 1119169 - DNA, 15 bp, Homo sapiens
tgctgctattattat

SEQ ID NO: 1119170 - DNA, 15 bp, Homo sapiens
ctgctgctattatta

SEQ ID NO: 1119171 - DNA, 15 bp, Homo sapiens
gctgctgctattatt

SEQ ID NO: 1119172 - DNA, 15 bp, Homo sapiens
tgctgctgctattat

SEQ ID NO: 1119173 - DNA, 15 bp, Homo sapiens
ctgctgctgctatta

SEQ ID NO: 1119174 - DNA, 15 bp, Homo sapiens
gctgctgctgctatt

SEQ ID NO: 1119175 - DNA, 15 bp, Homo sapiens
agctgctgctgctat

SEQ ID NO: 1119176 - DNA, 15 bp, Homo sapiens
tagctgctgctgcta

SEQ ID NO: 1119177 - DNA, 15 bp, Homo sapiens
ttagctgctgctgct

SEQ ID NO: 1119178 - DNA, 15 bp, Homo sapiens
gttagctgctgctgc

SEQ ID NO: 1119179 - DNA, 15 bp, Homo sapiens
tgttagctgctgctg

SEQ ID NO: 1119180 - DNA, 15 bp, Homo sapiens
atgttagctgctgct

SEQ ID NO: 1119181 - DNA, 15 bp, Homo sapiens
tatgttagctgctgc

SEQ ID NO: 1119182 - DNA, 15 bp, Homo sapiens
atatgttagctgctg

SEQ ID NO: 1119183 - DNA, 15 bp, Homo sapiens
catatgttagctgct

SEQ ID NO: 1119184 - DNA, 15 bp, Homo sapiens
tcatatgttagctgc

SEQ ID NO: 1119185 - DNA, 15 bp, Homo sapiens
ttcatatgttagctg

SEQ ID NO: 1119186 - DNA, 15 bp, Homo sapiens
attcatatgttagct

SEQ ID NO: 1119187 - DNA, 15 bp, Homo sapiens
cattcatatgttagc

SEQ ID NO: 1119188 - DNA, 15 bp, Homo sapiens
ccattcatatgttag

SEQ ID NO: 1119189 - DNA, 15 bp, Homo sapiens
cccattcatatgtta

SEQ ID NO: 1119190 - DNA, 15 bp, Homo sapiens
gcccattcatatgtt

SEQ ID NO: 1119191 - DNA, 15 bp, Homo sapiens
ggcccattcatatgt

SEQ ID NO: 1119192 - DNA, 15 bp, Homo sapiens
gggcccattcatatg

SEQ ID NO: 1119193 - DNA, 15 bp, Homo sapiens
ggggcccattcatat

SEQ ID NO: 1119194 - DNA, 15 bp, Homo sapiens
aggggcccattcata

SEQ ID NO: 1119195 - DNA, 15 bp, Homo sapiens
aaggggcccattcat

SEQ ID NO: 1119196 - DNA, 15 bp, Homo sapiens
gaaggggcccattca

SEQ ID NO: 1119197 - DNA, 15 bp, Homo sapiens
ggaaggggcccattc

SEQ ID NO: 1119198 - DNA, 15 bp, Homo sapiens
aggaaggggcccatt

SEQ ID NO: 1119199 - DNA, 15 bp, Homo sapiens
caggaaggggcccat

SEQ ID NO: 1119200 - DNA, 15 bp, Homo sapiens
tcaggaaggggccca

SEQ ID NO: 1119201 - DNA, 15 bp, Homo sapiens
ttcaggaaggggccc

SEQ ID NO: 1119202 - DNA, 15 bp, Homo sapiens
cttcaggaaggggcc

SEQ ID NO: 1119203 - DNA, 15 bp, Homo sapiens
gcttcaggaaggggc

SEQ ID NO: 1119204 - DNA, 15 bp, Homo sapiens
ggcttcaggaagggg

SEQ ID NO: 1119205 - DNA, 15 bp, Homo sapiens
gggcttcaggaaggg

SEQ ID NO: 1119206 - DNA, 15 bp, Homo sapiens
tgggcttcaggaagg

SEQ ID NO: 1119207 - DNA, 15 bp, Homo sapiens
ctgggcttcaggaag

SEQ ID NO: 1119208 - DNA, 15 bp, Homo sapiens
tctgggcttcaggaa

SEQ ID NO: 1119209 - DNA, 15 bp, Homo sapiens
atctgggcttcagga

SEQ ID NO: 1119210 - DNA, 15 bp, Homo sapiens
catctgggcttcagg

SEQ ID NO: 1119211 - DNA, 15 bp, Homo sapiens
ccatctgggcttcag

SEQ ID NO: 1119212 - DNA, 15 bp, Homo sapiens
tccatctgggcttca

SEQ ID NO: 1119213 - DNA, 15 bp, Homo sapiens
ttccatctgggcttc

SEQ ID NO: 1119214 - DNA, 15 bp, Homo sapiens
gttccatctgggctt

SEQ ID NO: 1119215 - DNA, 15 bp, Homo sapiens
tgttccatctgggct

SEQ ID NO: 1119216 - DNA, 15 bp, Homo sapiens
gtgttccatctgggc

SEQ ID NO: 1119217 - DNA, 15 bp, Homo sapiens
ggtgttccatctggg

SEQ ID NO: 1119218 - DNA, 15 bp, Homo sapiens
gggtgttccatctgg

SEQ ID NO: 1119219 - DNA, 15 bp, Homo sapiens
ggggtgttccatctg

SEQ ID NO: 1119220 - DNA, 15 bp, Homo sapiens
gggggtgttccatct

SEQ ID NO: 1119221 - DNA, 15 bp, Homo sapiens
agggggtgttccatc

SEQ ID NO: 1119222 - DNA, 15 bp, Homo sapiens
aagggggtgttccat

SEQ ID NO: 1119223 - DNA, 15 bp, Homo sapiens
aaagggggtgttcca

SEQ ID NO: 1119224 - DNA, 15 bp, Homo sapiens
gaaagggggtgttcc

SEQ ID NO: 1119225 - DNA, 15 bp, Homo sapiens
tgaaagggggtgttc

SEQ ID NO: 1119226 - DNA, 15 bp, Homo sapiens
gtgaaagggggtgtt

SEQ ID NO: 1119227 - DNA, 15 bp, Homo sapiens
agtgaaagggggtgt

SEQ ID NO: 1119228 - DNA, 15 bp, Homo sapiens
aagtgaaagggggtg

SEQ ID NO: 1119229 - DNA, 15 bp, Homo sapiens
gaagtgaaagggggt

SEQ ID NO: 1119230 - DNA, 15 bp, Homo sapiens
ggaagtgaaaggggg

SEQ ID NO: 1119231 - DNA, 15 bp, Homo sapiens
gggaagtgaaagggg

SEQ ID NO: 1119232 - DNA, 15 bp, Homo sapiens
ggggaagtgaaaggg

SEQ ID NO: 1119233 - DNA, 15 bp, Homo sapiens
gggggaagtgaaagg

SEQ ID NO: 1119234 - DNA, 15 bp, Homo sapiens
tgggggaagtgaaag

SEQ ID NO: 1119235 - DNA, 15 bp, Homo sapiens
ctgggggaagtgaaa

SEQ ID NO: 1119236 - DNA, 15 bp, Homo sapiens
gctgggggaagtgaa

SEQ ID NO: 1119237 - DNA, 15 bp, Homo sapiens
ggctgggggaagtga

SEQ ID NO: 1119238 - DNA, 15 bp, Homo sapiens
aggctgggggaagtg

SEQ ID NO: 1119239 - DNA, 15 bp, Homo sapiens
aaggctgggggaagt

SEQ ID NO: 1119240 - DNA, 15 bp, Homo sapiens
aaaggctgggggaag

SEQ ID NO: 1119241 - DNA, 15 bp, Homo sapiens
taaaggctgggggaa

SEQ ID NO: 1119242 - DNA, 15 bp, Homo sapiens
ttaaaggctggggga

SEQ ID NO: 1119243 - DNA, 15 bp, Homo sapiens
gttaaaggctggggg

SEQ ID NO: 1119244 - DNA, 15 bp, Homo sapiens
ggttaaaggctgggg

SEQ ID NO: 1119245 - DNA, 15 bp, Homo sapiens
gggttaaaggctggg

SEQ ID NO: 1119246 - DNA, 15 bp, Homo sapiens
agggttaaaggctgg

SEQ ID NO: 1119247 - DNA, 15 bp, Homo sapiens
gagggttaaaggctg

SEQ ID NO: 1119248 - DNA, 15 bp, Homo sapiens
agagggttaaaggct

SEQ ID NO: 1119249 - DNA, 15 bp, Homo sapiens
gagagggttaaaggc

SEQ ID NO: 1119250 - DNA, 15 bp, Homo sapiens
ggagagggttaaagg

SEQ ID NO: 1119251 - DNA, 15 bp, Homo sapiens
aggagagggttaaag

SEQ ID NO: 1119252 - DNA, 15 bp, Homo sapiens
gaggagagggttaaa

SEQ ID NO: 1119253 - DNA, 15 bp, Homo sapiens
agaggagagggttaa

SEQ ID NO: 1119254 - DNA, 15 bp, Homo sapiens
gagaggagagggtta

SEQ ID NO: 1119255 - DNA, 15 bp, Homo sapiens
ggagaggagagggtt

SEQ ID NO: 1119256 - DNA, 15 bp, Homo sapiens
gggagaggagagggt

SEQ ID NO: 1119257 - DNA, 15 bp, Homo sapiens
agggagaggagaggg

SEQ ID NO: 1119258 - DNA, 15 bp, Homo sapiens
aagggagaggagagg

SEQ ID NO: 1119259 - DNA, 15 bp, Homo sapiens
aaagggagaggagag

SEQ ID NO: 1119260 - DNA, 15 bp, Homo sapiens
gaaagggagaggaga

SEQ ID NO: 1119261 - DNA, 15 bp, Homo sapiens
ggaaagggagaggag

SEQ ID NO: 1119262 - DNA, 15 bp, Homo sapiens
tggaaagggagagga

SEQ ID NO: 1119263 - DNA, 15 bp, Homo sapiens
ctggaaagggagagg

SEQ ID NO: 1119264 - DNA, 15 bp, Homo sapiens
gctggaaagggagag

SEQ ID NO: 1119265 - DNA, 15 bp, Homo sapiens
cgctggaaagggaga

SEQ ID NO: 1119266 - DNA, 15 bp, Homo sapiens
tcgctggaaagggag

SEQ ID NO: 1119267 - DNA, 15 bp, Homo sapiens
atcgctggaaaggga

SEQ ID NO: 1119268 - DNA, 15 bp, Homo sapiens
gatcgctggaaaggg

SEQ ID NO: 1119269 - DNA, 15 bp, Homo sapiens
tgatcgctggaaagg

SEQ ID NO: 1119270 - DNA, 15 bp, Homo sapiens
gtgatcgctggaaag

SEQ ID NO: 1119271 - DNA, 15 bp, Homo sapiens
agtgatcgctggaaa

SEQ ID NO: 1119272 - DNA, 15 bp, Homo sapiens
gagtgatcgctggaa

SEQ ID NO: 1119273 - DNA, 15 bp, Homo sapiens
tgagtgatcgctgga

SEQ ID NO: 1119274 - DNA, 15 bp, Homo sapiens
gtgagtgatcgctgg

SEQ ID NO: 1119275 - DNA, 15 bp, Homo sapiens
agtgagtgatcgctg

SEQ ID NO: 1119276 - DNA, 15 bp, Homo sapiens
gagtgagtgatcgct

SEQ ID NO: 1119277 - DNA, 15 bp, Homo sapiens
cgagtgagtgatcgc

SEQ ID NO: 1119278 - DNA, 15 bp, Homo sapiens
gcgagtgagtgatcg

SEQ ID NO: 1119279 - DNA, 15 bp, Homo sapiens
agcgagtgagtgatc

SEQ ID NO: 1119280 - DNA, 15 bp, Homo sapiens
cagcgagtgagtgat

SEQ ID NO: 1119281 - DNA, 15 bp, Homo sapiens
acagcgagtgagtga

SEQ ID NO: 1119282 - DNA, 15 bp, Homo sapiens
tacagcgagtgagtg

SEQ ID NO: 1119283 - DNA, 15 bp, Homo sapiens
gtacagcgagtgagt

SEQ ID NO: 1119284 - DNA, 15 bp, Homo sapiens
tgtacagcgagtgag

SEQ ID NO: 1119285 - DNA, 15 bp, Homo sapiens
ctgtacagcgagtga

SEQ ID NO: 1119286 - DNA, 15 bp, Homo sapiens
tctgtacagcgagtg

SEQ ID NO: 1119287 - DNA, 15 bp, Homo sapiens
ttctgtacagcgagt

SEQ ID NO: 1119288 - DNA, 15 bp, Homo sapiens
attctgtacagcgag

SEQ ID NO: 1119289 - DNA, 15 bp, Homo sapiens
cattctgtacagcga

SEQ ID NO: 1119290 - DNA, 15 bp, Homo sapiens
tcattctgtacagcg

SEQ ID NO: 1119291 - DNA, 15 bp, Homo sapiens
atcattctgtacagc

SEQ ID NO: 1119292 - DNA, 15 bp, Homo sapiens
tatcattctgtacag

SEQ ID NO: 1119293 - DNA, 15 bp, Homo sapiens
atatcattctgtaca

SEQ ID NO: 1119294 - DNA, 15 bp, Homo sapiens
aatatcattctgtac

SEQ ID NO: 1119295 - DNA, 15 bp, Homo sapiens
gaatatcattctgta

SEQ ID NO: 1119296 - DNA, 15 bp, Homo sapiens
ggaatatcattctgt

SEQ ID NO: 1119297 - DNA, 15 bp, Homo sapiens
aggaatatcattctg

SEQ ID NO: 1119298 - DNA, 15 bp, Homo sapiens
gaggaatatcattct

SEQ ID NO: 1119299 - DNA, 15 bp, Homo sapiens
tgaggaatatcattc

SEQ ID NO: 1119300 - DNA, 15 bp, Homo sapiens
gtgaggaatatcatt

SEQ ID NO: 1119301 - DNA, 15 bp, Homo sapiens
cgtgaggaatatcat

SEQ ID NO: 1119302 - DNA, 15 bp, Homo sapiens
ccgtgaggaatatca

SEQ ID NO: 1119303 - DNA, 15 bp, Homo sapiens
gccgtgaggaatatc

SEQ ID NO: 1119304 - DNA, 15 bp, Homo sapiens
tgccgtgaggaatat

SEQ ID NO: 1119305 - DNA, 15 bp, Homo sapiens
gtgccgtgaggaata

SEQ ID NO: 1119306 - DNA, 15 bp, Homo sapiens
agtgccgtgaggaat

SEQ ID NO: 1119307 - DNA, 15 bp, Homo sapiens
cagtgccgtgaggaa

SEQ ID NO: 1119308 - DNA, 15 bp, Homo sapiens
gcagtgccgtgagga

SEQ ID NO: 1119309 - DNA, 15 bp, Homo sapiens
ggcagtgccgtgagg

SEQ ID NO: 1119310 - DNA, 15 bp, Homo sapiens
aggcagtgccgtgag

SEQ ID NO: 1119311 - DNA, 15 bp, Homo sapiens
gaggcagtgccgtga

SEQ ID NO: 1119312 - DNA, 15 bp, Homo sapiens
agaggcagtgccgtg

SEQ ID NO: 1119313 - DNA, 15 bp, Homo sapiens
cagaggcagtgccgt

SEQ ID NO: 1119314 - DNA, 15 bp, Homo sapiens
acagaggcagtgccg

SEQ ID NO: 1119315 - DNA, 15 bp, Homo sapiens
aacagaggcagtgcc

SEQ ID NO: 1119316 - DNA, 15 bp, Homo sapiens
gaacagaggcagtgc

SEQ ID NO: 1119317 - DNA, 15 bp, Homo sapiens
agaacagaggcagtg

SEQ ID NO: 1119318 - DNA, 15 bp, Homo sapiens
cagaacagaggcagt

SEQ ID NO: 1119319 - DNA, 15 bp, Homo sapiens
ccagaacagaggcag

SEQ ID NO: 1119320 - DNA, 15 bp, Homo sapiens
tccagaacagaggca

SEQ ID NO: 1119321 - DNA, 15 bp, Homo sapiens
atccagaacagaggc

SEQ ID NO: 1119322 - DNA, 15 bp, Homo sapiens
aatccagaacagagg

SEQ ID NO: 1119323 - DNA, 15 bp, Homo sapiens
taatccagaacagag

SEQ ID NO: 1119324 - DNA, 15 bp, Homo sapiens
cataatccagaacag

SEQ ID NO: 1119325 - DNA, 15 bp, Homo sapiens
tcataatccagaaca

SEQ ID NO: 1119326 - DNA, 15 bp, Homo sapiens
atcataatccagaac

SEQ ID NO: 1119327 - DNA, 15 bp, Homo sapiens
aatcataatccagaa

SEQ ID NO: 1119328 - DNA, 15 bp, Homo sapiens
aaatcataatccaga

SEQ ID NO: 1119329 - DNA, 15 bp, Homo sapiens
gaaatcataatccag

SEQ ID NO: 1119330 - DNA, 15 bp, Homo sapiens
tgaaatcataatcca

SEQ ID NO: 1119331 - DNA, 15 bp, Homo sapiens
ctgaaatcataatcc

SEQ ID NO: 1119332 - DNA, 15 bp, Homo sapiens
cctgaaatcataatc

SEQ ID NO: 1119333 - DNA, 15 bp, Homo sapiens
acctgaaatcataat

SEQ ID NO: 1119334 - DNA, 15 bp, Homo sapiens
tacctgaaatcataa

SEQ ID NO: 1119335 - DNA, 15 bp, Homo sapiens
ttacctgaaatcata

SEQ ID NO: 1119336 - DNA, 15 bp, Homo sapiens
gttacctgaaatcat

SEQ ID NO: 1119337 - DNA, 15 bp, Homo sapiens
cgttacctgaaatca

SEQ ID NO: 1119338 - DNA, 15 bp, Homo sapiens
ccgttacctgaaatc

SEQ ID NO: 1119339 - DNA, 15 bp, Homo sapiens
gccgttacctgaaat

SEQ ID NO: 1119340 - DNA, 15 bp, Homo sapiens
agccgttacctgaaa

SEQ ID NO: 1119341 - DNA, 15 bp, Homo sapiens
cagccgttacctgaa

SEQ ID NO: 1119342 - DNA, 15 bp, Homo sapiens
tcagccgttacctga

SEQ ID NO: 1119343 - DNA, 15 bp, Homo sapiens
gtcagccgttacctg

SEQ ID NO: 1119344 - DNA, 15 bp, Homo sapiens
tgtcagccgttacct

SEQ ID NO: 1119345 - DNA, 15 bp, Homo sapiens
ctgtcagccgttacc

SEQ ID NO: 1119346 - DNA, 15 bp, Homo sapiens
cctgtcagccgttac

SEQ ID NO: 1119347 - DNA, 15 bp, Homo sapiens
acctgtcagccgtta

SEQ ID NO: 1119348 - DNA, 15 bp, Homo sapiens
cacctgtcagccgtt

SEQ ID NO: 1119349 - DNA, 15 bp, Homo sapiens
gcacctgtcagccgt

SEQ ID NO: 1119350 - DNA, 15 bp, Homo sapiens
agcacctgtcagccg

SEQ ID NO: 1119351 - DNA, 15 bp, Homo sapiens
cagcacctgtcagcc

SEQ ID NO: 1119352 - DNA, 15 bp, Homo sapiens
ccagcacctgtcagc

SEQ ID NO: 1119353 - DNA, 15 bp, Homo sapiens
cccagcacctgtcag

SEQ ID NO: 1119354 - DNA, 15 bp, Homo sapiens
ccccagcacctgtca

SEQ ID NO: 1119355 - DNA, 15 bp, Homo sapiens
tccccagcacctgtc

SEQ ID NO: 1119356 - DNA, 15 bp, Homo sapiens
gtccccagcacctgt

SEQ ID NO: 1119357 - DNA, 15 bp, Homo sapiens
ggtccccagcacctg

SEQ ID NO: 1119358 - DNA, 15 bp, Homo sapiens
aggtccccagcacct

SEQ ID NO: 1119359 - DNA, 15 bp, Homo sapiens
taggtccccagcacc

SEQ ID NO: 1119360 - DNA, 15 bp, Homo sapiens
ttaggtccccagcac

SEQ ID NO: 1119361 - DNA, 15 bp, Homo sapiens
tttaggtccccagca

SEQ ID NO: 1119362 - DNA, 15 bp, Homo sapiens
ctttaggtccccagc

SEQ ID NO: 1119363 - DNA, 15 bp, Homo sapiens
cctttaggtccccag

SEQ ID NO: 1119364 - DNA, 15 bp, Homo sapiens
gcctttaggtcccca

SEQ ID NO: 1119365 - DNA, 15 bp, Homo sapiens
agcctttaggtcccc

SEQ ID NO: 1119366 - DNA, 15 bp, Homo sapiens
aagcctttaggtccc

SEQ ID NO: 1119367 - DNA, 15 bp, Homo sapiens
aaagcctttaggtcc

SEQ ID NO: 1119368 - DNA, 15 bp, Homo sapiens
caaagcctttaggtc

SEQ ID NO: 1119369 - DNA, 15 bp, Homo sapiens
ccaaagcctttaggt

SEQ ID NO: 1119370 - DNA, 15 bp, Homo sapiens
gccaaagcctttagg

SEQ ID NO: 1119371 - DNA, 15 bp, Homo sapiens
ggccaaagcctttag

SEQ ID NO: 1119372 - DNA, 15 bp, Homo sapiens
gggccaaagccttta

SEQ ID NO: 1119373 - DNA, 15 bp, Homo sapiens
ggggccaaagccttt

SEQ ID NO: 1119374 - DNA, 15 bp, Homo sapiens
aggggccaaagcctt

SEQ ID NO: 1119375 - DNA, 15 bp, Homo sapiens
caggggccaaagcct

SEQ ID NO: 1119376 - DNA, 15 bp, Homo sapiens
tcaggggccaaagcc

SEQ ID NO: 1119377 - DNA, 15 bp, Homo sapiens
ctcaggggccaaagc

SEQ ID NO: 1119378 - DNA, 15 bp, Homo sapiens
gctcaggggccaaag

SEQ ID NO: 1119379 - DNA, 15 bp, Homo sapiens
tgctcaggggccaaa

SEQ ID NO: 1119380 - DNA, 15 bp, Homo sapiens
ctgctcaggggccaa

SEQ ID NO: 1119381 - DNA, 15 bp, Homo sapiens
cctgctcaggggcca

SEQ ID NO: 1119382 - DNA, 15 bp, Homo sapiens
acctgctcaggggcc

SEQ ID NO: 1119383 - DNA, 15 bp, Homo sapiens
aacctgctcaggggc

SEQ ID NO: 1119384 - DNA, 15 bp, Homo sapiens
caacctgctcagggg

SEQ ID NO: 1119385 - DNA, 15 bp, Homo sapiens
ccaacctgctcaggg

SEQ ID NO: 1119386 - DNA, 15 bp, Homo sapiens
tccaacctgctcagg

SEQ ID NO: 1119387 - DNA, 15 bp, Homo sapiens
ctccaacctgctcag

SEQ ID NO: 1119388 - DNA, 15 bp, Homo sapiens
cctccaacctgctca

SEQ ID NO: 1119389 - DNA, 15 bp, Homo sapiens
acctccaacctgctc

SEQ ID NO: 1119390 - DNA, 15 bp, Homo sapiens
cacctccaacctgct

SEQ ID NO: 1119391 - DNA, 15 bp, Homo sapiens
ccacctccaacctgc

SEQ ID NO: 1119392 - DNA, 15 bp, Homo sapiens
cccacctccaacctg

SEQ ID NO: 1119393 - DNA, 15 bp, Homo sapiens
acccacctccaacct

SEQ ID NO: 1119394 - DNA, 15 bp, Homo sapiens
gacccacctccaacc

SEQ ID NO: 1119395 - DNA, 15 bp, Homo sapiens
ggacccacctccaac

SEQ ID NO: 1119396 - DNA, 15 bp, Homo sapiens
gggacccacctccaa

SEQ ID NO: 1119397 - DNA, 15 bp, Homo sapiens
ggggacccacctcca

SEQ ID NO: 1119398 - DNA, 15 bp, Homo sapiens
cggggacccacctcc

SEQ ID NO: 1119399 - DNA, 15 bp, Homo sapiens
gcggggacccacctc

SEQ ID NO: 1119400 - DNA, 15 bp, Homo sapiens
tgcggggacccacct

SEQ ID NO: 1119401 - DNA, 15 bp, Homo sapiens
ctgcggggacccacc

SEQ ID NO: 1119402 - DNA, 15 bp, Homo sapiens
gctgcggggacccac

SEQ ID NO: 1119403 - DNA, 15 bp, Homo sapiens
ggctgcggggaccca

SEQ ID NO: 1119404 - DNA, 15 bp, Homo sapiens
gggctgcggggaccc

SEQ ID NO: 1119405 - DNA, 15 bp, Homo sapiens
ggggctgcggggacc

SEQ ID NO: 1119406 - DNA, 15 bp, Homo sapiens
gggggctgcggggac

SEQ ID NO: 1119407 - DNA, 15 bp, Homo sapiens
ggggggctgcgggga

SEQ ID NO: 1119408 - DNA, 15 bp, Homo sapiens
cggggggctgcgggg

SEQ ID NO: 1119409 - DNA, 15 bp, Homo sapiens
ccggggggctgcggg

SEQ ID NO: 1119410 - DNA, 15 bp, Homo sapiens
gccggggggctgcgg

SEQ ID NO: 1119411 - DNA, 15 bp, Homo sapiens
tgccggggggctgcg

SEQ ID NO: 1119412 - DNA, 15 bp, Homo sapiens
atgccggggggctgc

SEQ ID NO: 1119413 - DNA, 15 bp, Homo sapiens
catgccggggggctg

SEQ ID NO: 1119414 - DNA, 15 bp, Homo sapiens
acatgccggggggct

SEQ ID NO: 1119415 - DNA, 15 bp, Homo sapiens
cacatgccggggggc

SEQ ID NO: 1119416 - DNA, 15 bp, Homo sapiens
ccacatgccgggggg

SEQ ID NO: 1119417 - DNA, 15 bp, Homo sapiens
accacatgccggggg

SEQ ID NO: 1119418 - DNA, 15 bp, Homo sapiens
aaccacatgccgggg

SEQ ID NO: 1119419 - DNA, 15 bp, Homo sapiens
caaccacatgccggg

SEQ ID NO: 1119420 - DNA, 15 bp, Homo sapiens
ccaaccacatgccgg

SEQ ID NO: 1119421 - DNA, 15 bp, Homo sapiens
cccaaccacatgccg

SEQ ID NO: 1119422 - DNA, 15 bp, Homo sapiens
ccccaaccacatgcc

SEQ ID NO: 1119423 - DNA, 15 bp, Homo sapiens
tccccaaccacatgc

SEQ ID NO: 1119424 - DNA, 15 bp, Homo sapiens
atccccaaccacatg

SEQ ID NO: 1119425 - DNA, 15 bp, Homo sapiens
catccccaaccacat

SEQ ID NO: 1119426 - DNA, 15 bp, Homo sapiens
ccatccccaaccaca

SEQ ID NO: 1119427 - DNA, 15 bp, Homo sapiens
cccatccccaaccac

SEQ ID NO: 1119428 - DNA, 15 bp, Homo sapiens
tcccatccccaacca

SEQ ID NO: 1119429 - DNA, 15 bp, Homo sapiens
ctcccatccccaacc

SEQ ID NO: 1119430 - DNA, 15 bp, Homo sapiens
gctcccatccccaac

SEQ ID NO: 1119431 - DNA, 15 bp, Homo sapiens
ggctcccatccccaa

SEQ ID NO: 1119432 - DNA, 15 bp, Homo sapiens
cggctcccatcccca

SEQ ID NO: 1119433 - DNA, 15 bp, Homo sapiens
ccggctcccatcccc

SEQ ID NO: 1119434 - DNA, 15 bp, Homo sapiens
tccggctcccatccc

SEQ ID NO: 1119435 - DNA, 15 bp, Homo sapiens
ctccggctcccatcc

SEQ ID NO: 1119436 - DNA, 15 bp, Homo sapiens
cctccggctcccatc

SEQ ID NO: 1119437 - DNA, 15 bp, Homo sapiens
ccctccggctcccat

SEQ ID NO: 1119438 - DNA, 15 bp, Homo sapiens
cccctccggctccca

SEQ ID NO: 1119439 - DNA, 15 bp, Homo sapiens
ccccctccggctccc

SEQ ID NO: 1119440 - DNA, 15 bp, Homo sapiens
accccctccggctcc

SEQ ID NO: 1119441 - DNA, 15 bp, Homo sapiens
caccccctccggctc

SEQ ID NO: 1119442 - DNA, 15 bp, Homo sapiens
tcaccccctccggct

SEQ ID NO: 1119443 - DNA, 15 bp, Homo sapiens
atcaccccctccggc

SEQ ID NO: 1119444 - DNA, 15 bp, Homo sapiens
gatcaccccctccgg

SEQ ID NO: 1119445 - DNA, 15 bp, Homo sapiens
cgatcaccccctccg

SEQ ID NO: 1119446 - DNA, 15 bp, Homo sapiens
ccgatcaccccctcc

SEQ ID NO: 1119447 - DNA, 15 bp, Homo sapiens
cccgatcaccccctc

SEQ ID NO: 1119448 - DNA, 15 bp, Homo sapiens
acccgatcaccccct

SEQ ID NO: 1119449 - DNA, 15 bp, Homo sapiens
tacccgatcaccccc

SEQ ID NO: 1119450 - DNA, 15 bp, Homo sapiens
ctacccgatcacccc

SEQ ID NO: 1119451 - DNA, 15 bp, Homo sapiens
cctacccgatcaccc

SEQ ID NO: 1119452 - DNA, 15 bp, Homo sapiens
tcctacccgatcacc

SEQ ID NO: 1119453 - DNA, 15 bp, Homo sapiens
gtcctacccgatcac

SEQ ID NO: 1119454 - DNA, 15 bp, Homo sapiens
cgtcctacccgatca

SEQ ID NO: 1119455 - DNA, 15 bp, Homo sapiens
acgtcctacccgatc

SEQ ID NO: 1119456 - DNA, 15 bp, Homo sapiens
cacgtcctacccgat

SEQ ID NO: 1119457 - DNA, 15 bp, Homo sapiens
acacgtcctacccga

SEQ ID NO: 1119458 - DNA, 15 bp, Homo sapiens
gacacgtcctacccg

SEQ ID NO: 1119459 - DNA, 15 bp, Homo sapiens
ggacacgtcctaccc

SEQ ID NO: 1119460 - DNA, 15 bp, Homo sapiens
gggacacgtcctacc

SEQ ID NO: 1119461 - DNA, 15 bp, Homo sapiens
agggacacgtcctac

SEQ ID NO: 1119462 - DNA, 15 bp, Homo sapiens
cagggacacgtccta

SEQ ID NO: 1119463 - DNA, 15 bp, Homo sapiens
tcagggacacgtcct

SEQ ID NO: 1119464 - DNA, 15 bp, Homo sapiens
ctcagggacacgtcc

SEQ ID NO: 1119465 - DNA, 15 bp, Homo sapiens
gctcagggacacgtc

SEQ ID NO: 1119466 - DNA, 15 bp, Homo sapiens
ggctcagggacacgt

SEQ ID NO: 1119467 - DNA, 15 bp, Homo sapiens
aggctcagggacacg

SEQ ID NO: 1119468 - DNA, 15 bp, Homo sapiens
gaggctcagggacac

SEQ ID NO: 1119469 - DNA, 15 bp, Homo sapiens
tgaggctcagggaca

SEQ ID NO: 1119470 - DNA, 15 bp, Homo sapiens
ctgaggctcagggac

SEQ ID NO: 1119471 - DNA, 15 bp, Homo sapiens
gctgaggctcaggga

SEQ ID NO: 1119472 - DNA, 15 bp, Homo sapiens
agctgaggctcaggg

SEQ ID NO: 1119473 - DNA, 15 bp, Homo sapiens
gagctgaggctcagg

SEQ ID NO: 1119474 - DNA, 15 bp, Homo sapiens
agagctgaggctcag

SEQ ID NO: 1119475 - DNA, 15 bp, Homo sapiens
gagagctgaggctca

SEQ ID NO: 1119476 - DNA, 15 bp, Homo sapiens
ggagagctgaggctc

SEQ ID NO: 1119477 - DNA, 15 bp, Homo sapiens
aggagagctgaggct

SEQ ID NO: 1119478 - DNA, 15 bp, Homo sapiens
caggagagctgaggc

SEQ ID NO: 1119479 - DNA, 15 bp, Homo sapiens
gcaggagagctgagg

SEQ ID NO: 1119480 - DNA, 15 bp, Homo sapiens
agcaggagagctgag

SEQ ID NO: 1119481 - DNA, 15 bp, Homo sapiens
aagcaggagagctga

SEQ ID NO: 1119482 - DNA, 15 bp, Homo sapiens
caagcaggagagctg

SEQ ID NO: 1119483 - DNA, 15 bp, Homo sapiens
gcaagcaggagagct

SEQ ID NO: 1119484 - DNA, 15 bp, Homo sapiens
ggcaagcaggagagc

SEQ ID NO: 1119485 - DNA, 15 bp, Homo sapiens
gggcaagcaggagag

SEQ ID NO: 1119486 - DNA, 15 bp, Homo sapiens
cgggcaagcaggaga

SEQ ID NO: 1119487 - DNA, 15 bp, Homo sapiens
gcgggcaagcaggag

SEQ ID NO: 1119488 - DNA, 15 bp, Homo sapiens
tgcgggcaagcagga

SEQ ID NO: 1119489 - DNA, 15 bp, Homo sapiens
ctgcgggcaagcagg

SEQ ID NO: 1119490 - DNA, 15 bp, Homo sapiens
gctgcgggcaagcag

SEQ ID NO: 1119491 - DNA, 15 bp, Homo sapiens
ggctgcgggcaagca

SEQ ID NO: 1119492 - DNA, 15 bp, Homo sapiens
aggctgcgggcaagc

SEQ ID NO: 1119493 - DNA, 15 bp, Homo sapiens
gaggctgcgggcaag

SEQ ID NO: 1119494 - DNA, 15 bp, Homo sapiens
ggaggctgcgggcaa

SEQ ID NO: 1119495 - DNA, 15 bp, Homo sapiens
gggaggctgcgggca

SEQ ID NO: 1119496 - DNA, 15 bp, Homo sapiens
cgggaggctgcgggc

SEQ ID NO: 1119497 - DNA, 15 bp, Homo sapiens
tcgggaggctgcggg

SEQ ID NO: 1119498 - DNA, 15 bp, Homo sapiens
ctcgggaggctgcgg

SEQ ID NO: 1119499 - DNA, 15 bp, Homo sapiens
cctcgggaggctgcg

SEQ ID NO: 1119500 - DNA, 15 bp, Homo sapiens
ccctcgggaggctgc

SEQ ID NO: 1119501 - DNA, 15 bp, Homo sapiens
cccctcgggaggctg

SEQ ID NO: 1119502 - DNA, 15 bp, Homo sapiens
ccccctcgggaggct

SEQ ID NO: 1119503 - DNA, 15 bp, Homo sapiens
accccctcgggaggc

SEQ ID NO: 1119504 - DNA, 15 bp, Homo sapiens
gaccccctcgggagg

SEQ ID NO: 1119505 - DNA, 15 bp, Homo sapiens
tgaccccctcgggag

SEQ ID NO: 1119506 - DNA, 15 bp, Homo sapiens
gtgaccccctcggga

SEQ ID NO: 1119507 - DNA, 15 bp, Homo sapiens
agtgaccccctcggg

SEQ ID NO: 1119508 - DNA, 15 bp, Homo sapiens
cagtgaccccctcgg

SEQ ID NO: 1119509 - DNA, 15 bp, Homo sapiens
ccagtgaccccctcg

SEQ ID NO: 1119510 - DNA, 15 bp, Homo sapiens
cccagtgaccccctc

SEQ ID NO: 1119511 - DNA, 15 bp, Homo sapiens
ccccagtgaccccct

SEQ ID NO: 1119512 - DNA, 15 bp, Homo sapiens
accccagtgaccccc

SEQ ID NO: 1119513 - DNA, 15 bp, Homo sapiens
caccccagtgacccc

SEQ ID NO: 1119514 - DNA, 15 bp, Homo sapiens
gcaccccagtgaccc

SEQ ID NO: 1119515 - DNA, 15 bp, Homo sapiens
ggcaccccagtgacc

SEQ ID NO: 1119516 - DNA, 15 bp, Homo sapiens
aggcaccccagtgac

SEQ ID NO: 1119517 - DNA, 15 bp, Homo sapiens
caggcaccccagtga

SEQ ID NO: 1119518 - DNA, 15 bp, Homo sapiens
ccaggcaccccagtg

SEQ ID NO: 1119519 - DNA, 15 bp, Homo sapiens
tccaggcaccccagt

SEQ ID NO: 1119520 - DNA, 15 bp, Homo sapiens
atccaggcaccccag

SEQ ID NO: 1119521 - DNA, 15 bp, Homo sapiens
catccaggcacccca

SEQ ID NO: 1119522 - DNA, 15 bp, Homo sapiens
gcatccaggcacccc

SEQ ID NO: 1119523 - DNA, 15 bp, Homo sapiens
ggcatccaggcaccc

SEQ ID NO: 1119524 - DNA, 15 bp, Homo sapiens
gggcatccaggcacc

SEQ ID NO: 1119525 - DNA, 15 bp, Homo sapiens
agggcatccaggcac

SEQ ID NO: 1119526 - DNA, 15 bp, Homo sapiens
gagggcatccaggca

SEQ ID NO: 1119527 - DNA, 15 bp, Homo sapiens
cgagggcatccaggc

SEQ ID NO: 1119528 - DNA, 15 bp, Homo sapiens
acgagggcatccagg

SEQ ID NO: 1119529 - DNA, 15 bp, Homo sapiens
gacgagggcatccag

SEQ ID NO: 1119530 - DNA, 15 bp, Homo sapiens
ggacgagggcatcca

SEQ ID NO: 1119531 - DNA, 15 bp, Homo sapiens
tggacgagggcatcc

SEQ ID NO: 1119532 - DNA, 15 bp, Homo sapiens
atggacgagggcatc

SEQ ID NO: 1119533 - DNA, 15 bp, Homo sapiens
gatggacgagggcat

SEQ ID NO: 1119534 - DNA, 15 bp, Homo sapiens
agatggacgagggca

SEQ ID NO: 1119535 - DNA, 15 bp, Homo sapiens
gagatggacgagggc

SEQ ID NO: 1119536 - DNA, 15 bp, Homo sapiens
cgagatggacgaggg

SEQ ID NO: 1119537 - DNA, 15 bp, Homo sapiens
ccgagatggacgagg

SEQ ID NO: 1119538 - DNA, 15 bp, Homo sapiens
gccgagatggacgag

SEQ ID NO: 1119539 - DNA, 15 bp, Homo sapiens
ggccgagatggacga

SEQ ID NO: 1119540 - DNA, 15 bp, Homo sapiens
aggccgagatggacg

SEQ ID NO: 1119541 - DNA, 15 bp, Homo sapiens
aaggccgagatggac

SEQ ID NO: 1119542 - DNA, 15 bp, Homo sapiens
gaaggccgagatgga

SEQ ID NO: 1119543 - DNA, 15 bp, Homo sapiens
cgaaggccgagatgg

SEQ ID NO: 1119544 - DNA, 15 bp, Homo sapiens
tcgaaggccgagatg

SEQ ID NO: 1119545 - DNA, 15 bp, Homo sapiens
ttcgaaggccgagat

SEQ ID NO: 1119546 - DNA, 15 bp, Homo sapiens
cttcgaaggccgaga

SEQ ID NO: 1119547 - DNA, 15 bp, Homo sapiens
ccttcgaaggccgag

SEQ ID NO: 1119548 - DNA, 15 bp, Homo sapiens
gccttcgaaggccga

SEQ ID NO: 1119549 - DNA, 15 bp, Homo sapiens
tgccttcgaaggccg

SEQ ID NO: 1119550 - DNA, 15 bp, Homo sapiens
gtgccttcgaaggcc

SEQ ID NO: 1119551 - DNA, 15 bp, Homo sapiens
cgtgccttcgaaggc

SEQ ID NO: 1119552 - DNA, 15 bp, Homo sapiens
acgtgccttcgaagg

SEQ ID NO: 1119553 - DNA, 15 bp, Homo sapiens
cacgtgccttcgaag

SEQ ID NO: 1119554 - DNA, 15 bp, Homo sapiens
gcacgtgccttcgaa

SEQ ID NO: 1119555 - DNA, 15 bp, Homo sapiens
cgcacgtgccttcga

SEQ ID NO: 1119556 - DNA, 15 bp, Homo sapiens
acgcacgtgccttcg

SEQ ID NO: 1119557 - DNA, 15 bp, Homo sapiens
gacgcacgtgccttc

SEQ ID NO: 1119558 - DNA, 15 bp, Homo sapiens
agacgcacgtgcctt

SEQ ID NO: 1119559 - DNA, 15 bp, Homo sapiens
gagacgcacgtgcct

SEQ ID NO: 1119560 - DNA, 15 bp, Homo sapiens
ggagacgcacgtgcc

SEQ ID NO: 1119561 - DNA, 15 bp, Homo sapiens
tggagacgcacgtgc

SEQ ID NO: 1119562 - DNA, 15 bp, Homo sapiens
atggagacgcacgtg

SEQ ID NO: 1119563 - DNA, 15 bp, Homo sapiens
gatggagacgcacgt

SEQ ID NO: 1119564 - DNA, 15 bp, Homo sapiens
ggatggagacgcacg

SEQ ID NO: 1119565 - DNA, 15 bp, Homo sapiens
gggatggagacgcac

SEQ ID NO: 1119566 - DNA, 15 bp, Homo sapiens
ggggatggagacgca

SEQ ID NO: 1119567 - DNA, 15 bp, Homo sapiens
aggggatggagacgc

SEQ ID NO: 1119568 - DNA, 15 bp, Homo sapiens
caggggatggagacg

SEQ ID NO: 1119569 - DNA, 15 bp, Homo sapiens
gcaggggatggagac

SEQ ID NO: 1119570 - DNA, 15 bp, Homo sapiens
ggcaggggatggaga

SEQ ID NO: 1119571 - DNA, 15 bp, Homo sapiens
cggcaggggatggag

SEQ ID NO: 1119572 - DNA, 15 bp, Homo sapiens
gcggcaggggatgga

SEQ ID NO: 1119573 - DNA, 15 bp, Homo sapiens
agcggcaggggatgg

SEQ ID NO: 1119574 - DNA, 15 bp, Homo sapiens
aagcggcaggggatg

SEQ ID NO: 1119575 - DNA, 15 bp, Homo sapiens
aaagcggcaggggat

SEQ ID NO: 1119576 - DNA, 15 bp, Homo sapiens
caaagcggcagggga

SEQ ID NO: 1119577 - DNA, 15 bp, Homo sapiens
tcaaagcggcagggg

SEQ ID NO: 1119578 - DNA, 15 bp, Homo sapiens
gtcaaagcggcaggg

SEQ ID NO: 1119579 - DNA, 15 bp, Homo sapiens
agtcaaagcggcagg

SEQ ID NO: 1119580 - DNA, 15 bp, Homo sapiens
aagtcaaagcggcag

SEQ ID NO: 1119581 - DNA, 15 bp, Homo sapiens
gaagtcaaagcggca

SEQ ID NO: 1119582 - DNA, 15 bp, Homo sapiens
ggaagtcaaagcggc

SEQ ID NO: 1119583 - DNA, 15 bp, Homo sapiens
gggaagtcaaagcgg

SEQ ID NO: 1119584 - DNA, 15 bp, Homo sapiens
cgggaagtcaaagcg

SEQ ID NO: 1119585 - DNA, 15 bp, Homo sapiens
ccgggaagtcaaagc

SEQ ID NO: 1119586 - DNA, 15 bp, Homo sapiens
tccgggaagtcaaag

SEQ ID NO: 1119587 - DNA, 15 bp, Homo sapiens
atccgggaagtcaaa

SEQ ID NO: 1119588 - DNA, 15 bp, Homo sapiens
catccgggaagtcaa

SEQ ID NO: 1119589 - DNA, 15 bp, Homo sapiens
tcatccgggaagtca

SEQ ID NO: 1119590 - DNA, 15 bp, Homo sapiens
ctcatccgggaagtc

SEQ ID NO: 1119591 - DNA, 15 bp, Homo sapiens
gctcatccgggaagt

SEQ ID NO: 1119592 - DNA, 15 bp, Homo sapiens
agctcatccgggaag

SEQ ID NO: 1119593 - DNA, 15 bp, Homo sapiens
cagctcatccgggaa

SEQ ID NO: 1119594 - DNA, 15 bp, Homo sapiens
gcagctcatccggga

SEQ ID NO: 1119595 - DNA, 15 bp, Homo sapiens
cgcagctcatccggg

SEQ ID NO: 1119596 - DNA, 15 bp, Homo sapiens
ccgcagctcatccgg

SEQ ID NO: 1119597 - DNA, 15 bp, Homo sapiens
gccgcagctcatccg

SEQ ID NO: 1119598 - DNA, 15 bp, Homo sapiens
ggccgcagctcatcc

SEQ ID NO: 1119599 - DNA, 15 bp, Homo sapiens
gggccgcagctcatc

SEQ ID NO: 1119600 - DNA, 15 bp, Homo sapiens
cgggccgcagctcat

SEQ ID NO: 1119601 - DNA, 15 bp, Homo sapiens
gcgggccgcagctca

SEQ ID NO: 1119602 - DNA, 15 bp, Homo sapiens
agcgggccgcagctc

SEQ ID NO: 1119603 - DNA, 15 bp, Homo sapiens
cagcgggccgcagct

SEQ ID NO: 1119604 - DNA, 15 bp, Homo sapiens
acagcgggccgcagc

SEQ ID NO: 1119605 - DNA, 15 bp, Homo sapiens
cacagcgggccgcag

SEQ ID NO: 1119606 - DNA, 15 bp, Homo sapiens
ccacagcgggccgca

SEQ ID NO: 1119607 - DNA, 15 bp, Homo sapiens
accacagcgggccgc

SEQ ID NO: 1119608 - DNA, 15 bp, Homo sapiens
caccacagcgggccg

SEQ ID NO: 1119609 - DNA, 15 bp, Homo sapiens
gcaccacagcgggcc

SEQ ID NO: 1119610 - DNA, 15 bp, Homo sapiens
tgcaccacagcgggc

SEQ ID NO: 1119611 - DNA, 15 bp, Homo sapiens
atgcaccacagcggg

SEQ ID NO: 1119612 - DNA, 15 bp, Homo sapiens
catgcaccacagcgg

SEQ ID NO: 1119613 - DNA, 15 bp, Homo sapiens
ccatgcaccacagcg

SEQ ID NO: 1119614 - DNA, 15 bp, Homo sapiens
accatgcaccacagc

SEQ ID NO: 1119615 - DNA, 15 bp, Homo sapiens
caccatgcaccacag

SEQ ID NO: 1119616 - DNA, 15 bp, Homo sapiens
acaccatgcaccaca

SEQ ID NO: 1119617 - DNA, 15 bp, Homo sapiens
gacaccatgcaccac

SEQ ID NO: 1119618 - DNA, 15 bp, Homo sapiens
agacaccatgcacca

SEQ ID NO: 1119619 - DNA, 15 bp, Homo sapiens
cagacaccatgcacc

SEQ ID NO: 1119620 - DNA, 15 bp, Homo sapiens
ccagacaccatgcac

SEQ ID NO: 1119621 - DNA, 15 bp, Homo sapiens
accagacaccatgca

SEQ ID NO: 1119622 - DNA, 15 bp, Homo sapiens
taccagacaccatgc

SEQ ID NO: 1119623 - DNA, 15 bp, Homo sapiens
gtaccagacaccatg

SEQ ID NO: 1119624 - DNA, 15 bp, Homo sapiens
agtaccagacaccat

SEQ ID NO: 1119625 - DNA, 15 bp, Homo sapiens
aagtaccagacacca

SEQ ID NO: 1119626 - DNA, 15 bp, Homo sapiens
gaagtaccagacacc

SEQ ID NO: 1119627 - DNA, 15 bp, Homo sapiens
tgaagtaccagacac

SEQ ID NO: 1119628 - DNA, 15 bp, Homo sapiens
ttgaagtaccagaca

SEQ ID NO: 1119629 - DNA, 15 bp, Homo sapiens
attgaagtaccagac

SEQ ID NO: 1119630 - DNA, 15 bp, Homo sapiens
tattgaagtaccaga

SEQ ID NO: 1119631 - DNA, 15 bp, Homo sapiens
ctattgaagtaccag

SEQ ID NO: 1119632 - DNA, 15 bp, Homo sapiens
gctattgaagtacca

SEQ ID NO: 1119633 - DNA, 15 bp, Homo sapiens
ggctattgaagtacc

SEQ ID NO: 1119634 - DNA, 15 bp, Homo sapiens
gggctattgaagtac

SEQ ID NO: 1119635 - DNA, 15 bp, Homo sapiens
ggggctattgaagta

SEQ ID NO: 1119636 - DNA, 15 bp, Homo sapiens
aggggctattgaagt

SEQ ID NO: 1119637 - DNA, 15 bp, Homo sapiens
taggggctattgaag

SEQ ID NO: 1119638 - DNA, 15 bp, Homo sapiens
gtaggggctattgaa

SEQ ID NO: 1119639 - DNA, 15 bp, Homo sapiens
ggtaggggctattga

SEQ ID NO: 1119640 - DNA, 15 bp, Homo sapiens
gggtaggggctattg

SEQ ID NO: 1119641 - DNA, 15 bp, Homo sapiens
ggggtaggggctatt

SEQ ID NO: 1119642 - DNA, 15 bp, Homo sapiens
tggggtaggggctat

SEQ ID NO: 1119643 - DNA, 15 bp, Homo sapiens
ttggggtaggggcta

SEQ ID NO: 1119644 - DNA, 15 bp, Homo sapiens
cttggggtaggggct

SEQ ID NO: 1119645 - DNA, 15 bp, Homo sapiens
tcttggggtaggggc

SEQ ID NO: 1119646 - DNA, 15 bp, Homo sapiens
ttcttggggtagggg

SEQ ID NO: 1119647 - DNA, 15 bp, Homo sapiens
gttcttggggtaggg

SEQ ID NO: 1119648 - DNA, 15 bp, Homo sapiens
agttcttggggtagg

SEQ ID NO: 1119649 - DNA, 15 bp, Homo sapiens
tagttcttggggtag

SEQ ID NO: 1119650 - DNA, 15 bp, Homo sapiens
gtagttcttggggta

SEQ ID NO: 1119651 - DNA, 15 bp, Homo sapiens
ggtagttcttggggt

SEQ ID NO: 1119652 - DNA, 15 bp, Homo sapiens
gggtagttcttgggg

SEQ ID NO: 1119653 - DNA, 15 bp, Homo sapiens
ggggtagttcttggg

SEQ ID NO: 1119654 - DNA, 15 bp, Homo sapiens
gggggtagttcttgg

SEQ ID NO: 1119655 - DNA, 15 bp, Homo sapiens
ggggggtagttcttg

SEQ ID NO: 1119656 - DNA, 15 bp, Homo sapiens
cggggggtagttctt

SEQ ID NO: 1119657 - DNA, 15 bp, Homo sapiens
ccggggggtagttct

SEQ ID NO: 1119658 - DNA, 15 bp, Homo sapiens
accggggggtagttc

SEQ ID NO: 1119659 - DNA, 15 bp, Homo sapiens
caccggggggtagtt

SEQ ID NO: 1119660 - DNA, 15 bp, Homo sapiens
ccaccggggggtagt

SEQ ID NO: 1119661 - DNA, 15 bp, Homo sapiens
accaccggggggtag

SEQ ID NO: 1119662 - DNA, 15 bp, Homo sapiens
gaccaccggggggta

SEQ ID NO: 1119663 - DNA, 15 bp, Homo sapiens
agaccaccggggggt

SEQ ID NO: 1119664 - DNA, 15 bp, Homo sapiens
aagaccaccgggggg

SEQ ID NO: 1119665 - DNA, 15 bp, Homo sapiens
gaagaccaccggggg

SEQ ID NO: 1119666 - DNA, 15 bp, Homo sapiens
tgaagaccaccgggg

SEQ ID NO: 1119667 - DNA, 15 bp, Homo sapiens
ttgaagaccaccggg

SEQ ID NO: 1119668 - DNA, 15 bp, Homo sapiens
cttgaagaccaccgg

SEQ ID NO: 1119669 - DNA, 15 bp, Homo sapiens
acttgaagaccaccg

SEQ ID NO: 1119670 - DNA, 15 bp, Homo sapiens
gacttgaagaccacc

SEQ ID NO: 1119671 - DNA, 15 bp, Homo sapiens
cgacttgaagaccac

SEQ ID NO: 1119672 - DNA, 15 bp, Homo sapiens
gcgacttgaagacca

SEQ ID NO: 1119673 - DNA, 15 bp, Homo sapiens
cgcgacttgaagacc

SEQ ID NO: 1119674 - DNA, 15 bp, Homo sapiens
gcgcgacttgaagac

SEQ ID NO: 1119675 - DNA, 15 bp, Homo sapiens
tgcgcgacttgaaga

SEQ ID NO: 1119676 - DNA, 15 bp, Homo sapiens
gtgcgcgacttgaag

SEQ ID NO: 1119677 - DNA, 15 bp, Homo sapiens
ggtgcgcgacttgaa

SEQ ID NO: 1119678 - DNA, 15 bp, Homo sapiens
gggtgcgcgacttga

SEQ ID NO: 1119679 - DNA, 15 bp, Homo sapiens
tgggtgcgcgacttg

SEQ ID NO: 1119680 - DNA, 15 bp, Homo sapiens
ttgggtgcgcgactt

SEQ ID NO: 1119681 - DNA, 15 bp, Homo sapiens
cttgggtgcgcgact

SEQ ID NO: 1119682 - DNA, 15 bp, Homo sapiens
acttgggtgcgcgac

SEQ ID NO: 1119683 - DNA, 15 bp, Homo sapiens
tacttgggtgcgcga

SEQ ID NO: 1119684 - DNA, 15 bp, Homo sapiens
ctacttgggtgcgcg

SEQ ID NO: 1119685 - DNA, 15 bp, Homo sapiens
actacttgggtgcgc

SEQ ID NO: 1119686 - DNA, 15 bp, Homo sapiens
gactacttgggtgcg

SEQ ID NO: 1119687 - DNA, 15 bp, Homo sapiens
ggactacttgggtgc

SEQ ID NO: 1119688 - DNA, 15 bp, Homo sapiens
tggactacttgggtg

SEQ ID NO: 1119689 - DNA, 15 bp, Homo sapiens
gtggactacttgggt

SEQ ID NO: 1119690 - DNA, 15 bp, Homo sapiens
cgtggactacttggg

SEQ ID NO: 1119691 - DNA, 15 bp, Homo sapiens
tcgtggactacttgg

SEQ ID NO: 1119692 - DNA, 15 bp, Homo sapiens
ctcgtggactacttg

SEQ ID NO: 1119693 - DNA, 15 bp, Homo sapiens
tctcgtggactactt

SEQ ID NO: 1119694 - DNA, 15 bp, Homo sapiens
ctctcgtggactact

SEQ ID NO: 1119695 - DNA, 15 bp, Homo sapiens
gctctcgtggactac

SEQ ID NO: 1119696 - DNA, 15 bp, Homo sapiens
agctctcgtggacta

SEQ ID NO: 1119697 - DNA, 15 bp, Homo sapiens
aagctctcgtggact

SEQ ID NO: 1119698 - DNA, 15 bp, Homo sapiens
gaagctctcgtggac

SEQ ID NO: 1119699 - DNA, 15 bp, Homo sapiens
ggaagctctcgtgga

SEQ ID NO: 1119700 - DNA, 15 bp, Homo sapiens
tggaagctctcgtgg

SEQ ID NO: 1119701 - DNA, 15 bp, Homo sapiens
ctggaagctctcgtg

SEQ ID NO: 1119702 - DNA, 15 bp, Homo sapiens
cctggaagctctcgt

SEQ ID NO: 1119703 - DNA, 15 bp, Homo sapiens
ccctggaagctctcg

SEQ ID NO: 1119704 - DNA, 15 bp, Homo sapiens
gccctggaagctctc

SEQ ID NO: 1119705 - DNA, 15 bp, Homo sapiens
ggccctggaagctct

SEQ ID NO: 1119706 - DNA, 15 bp, Homo sapiens
cggccctggaagctc

SEQ ID NO: 1119707 - DNA, 15 bp, Homo sapiens
gcggccctggaagct

SEQ ID NO: 1119708 - DNA, 15 bp, Homo sapiens
tgcggccctggaagc

SEQ ID NO: 1119709 - DNA, 15 bp, Homo sapiens
ctgcggccctggaag

SEQ ID NO: 1119710 - DNA, 15 bp, Homo sapiens
gctgcggccctggaa

SEQ ID NO: 1119711 - DNA, 15 bp, Homo sapiens
ggctgcggccctgga

SEQ ID NO: 1119712 - DNA, 15 bp, Homo sapiens
cggctgcggccctgg

SEQ ID NO: 1119713 - DNA, 15 bp, Homo sapiens
gcggctgcggccctg

SEQ ID NO: 1119714 - DNA, 15 bp, Homo sapiens
ggcggctgcggccct

SEQ ID NO: 1119715 - DNA, 15 bp, Homo sapiens
aggcggctgcggccc

SEQ ID NO: 1119716 - DNA, 15 bp, Homo sapiens
gaggcggctgcggcc

SEQ ID NO: 1119717 - DNA, 15 bp, Homo sapiens
ggaggcggctgcggc

SEQ ID NO: 1119718 - DNA, 15 bp, Homo sapiens
aggaggcggctgcgg

SEQ ID NO: 1119719 - DNA, 15 bp, Homo sapiens
caggaggcggctgcg

SEQ ID NO: 1119720 - DNA, 15 bp, Homo sapiens
ccaggaggcggctgc

SEQ ID NO: 1119721 - DNA, 15 bp, Homo sapiens
cccaggaggcggctg

SEQ ID NO: 1119722 - DNA, 15 bp, Homo sapiens
ccccaggaggcggct

SEQ ID NO: 1119723 - DNA, 15 bp, Homo sapiens
cccccaggaggcggc

SEQ ID NO: 1119724 - DNA, 15 bp, Homo sapiens
tcccccaggaggcgg

SEQ ID NO: 1119725 - DNA, 15 bp, Homo sapiens
gtcccccaggaggcg

SEQ ID NO: 1119726 - DNA, 15 bp, Homo sapiens
ggtcccccaggaggc

SEQ ID NO: 1119727 - DNA, 15 bp, Homo sapiens
aggtcccccaggagg

SEQ ID NO: 1119728 - DNA, 15 bp, Homo sapiens
caggtcccccaggag

SEQ ID NO: 1119729 - DNA, 15 bp, Homo sapiens
ccaggtcccccagga

SEQ ID NO: 1119730 - DNA, 15 bp, Homo sapiens
cccaggtcccccagg

SEQ ID NO: 1119731 - DNA, 15 bp, Homo sapiens
gcccaggtcccccag

SEQ ID NO: 1119732 - DNA, 15 bp, Homo sapiens
ggcccaggtccccca

SEQ ID NO: 1119733 - DNA, 15 bp, Homo sapiens
aggcccaggtccccc

SEQ ID NO: 1119734 - DNA, 15 bp, Homo sapiens
caggcccaggtcccc

SEQ ID NO: 1119735 - DNA, 15 bp, Homo sapiens
gcaggcccaggtccc

SEQ ID NO: 1119736 - DNA, 15 bp, Homo sapiens
cgcaggcccaggtcc

SEQ ID NO: 1119737 - DNA, 15 bp, Homo sapiens
tcgcaggcccaggtc

SEQ ID NO: 1119738 - DNA, 15 bp, Homo sapiens
ttcgcaggcccaggt

SEQ ID NO: 1119739 - DNA, 15 bp, Homo sapiens
tttcgcaggcccagg

SEQ ID NO: 1119740 - DNA, 15 bp, Homo sapiens
gtttcgcaggcccag

SEQ ID NO: 1119741 - DNA, 15 bp, Homo sapiens
agtttcgcaggccca

SEQ ID NO: 1119742 - DNA, 15 bp, Homo sapiens
cagtttcgcaggccc

SEQ ID NO: 1119743 - DNA, 15 bp, Homo sapiens
gcagtttcgcaggcc

SEQ ID NO: 1119744 - DNA, 15 bp, Homo sapiens
tgcagtttcgcaggc

SEQ ID NO: 1119745 - DNA, 15 bp, Homo sapiens
gtgcagtttcgcagg

SEQ ID NO: 1119746 - DNA, 15 bp, Homo sapiens
ggtgcagtttcgcag

SEQ ID NO: 1119747 - DNA, 15 bp, Homo sapiens
gggtgcagtttcgca

SEQ ID NO: 1119748 - DNA, 15 bp, Homo sapiens
agggtgcagtttcgc

SEQ ID NO: 1119749 - DNA, 15 bp, Homo sapiens
gagggtgcagtttcg

SEQ ID NO: 1119750 - DNA, 15 bp, Homo sapiens
ggagggtgcagtttc

SEQ ID NO: 1119751 - DNA, 15 bp, Homo sapiens
aggagggtgcagttt

SEQ ID NO: 1119752 - DNA, 15 bp, Homo sapiens
caggagggtgcagtt

SEQ ID NO: 1119753 - DNA, 15 bp, Homo sapiens
gcaggagggtgcagt

SEQ ID NO: 1119754 - DNA, 15 bp, Homo sapiens
agcaggagggtgcag

SEQ ID NO: 1119755 - DNA, 15 bp, Homo sapiens
gagcaggagggtgca

SEQ ID NO: 1119756 - DNA, 15 bp, Homo sapiens
tgagcaggagggtgc

SEQ ID NO: 1119757 - DNA, 15 bp, Homo sapiens
ctgagcaggagggtg

SEQ ID NO: 1119758 - DNA, 15 bp, Homo sapiens
gctgagcaggagggt

SEQ ID NO: 1119759 - DNA, 15 bp, Homo sapiens
tgctgagcaggaggg

SEQ ID NO: 1119760 - DNA, 15 bp, Homo sapiens
ttgctgagcaggagg

SEQ ID NO: 1119761 - DNA, 15 bp, Homo sapiens
gttgctgagcaggag

SEQ ID NO: 1119762 - DNA, 15 bp, Homo sapiens
cgttgctgagcagga

SEQ ID NO: 1119763 - DNA, 15 bp, Homo sapiens
acgttgctgagcagg

SEQ ID NO: 1119764 - DNA, 15 bp, Homo sapiens
gacgttgctgagcag

SEQ ID NO: 1119765 - DNA, 15 bp, Homo sapiens
tgacgttgctgagca

SEQ ID NO: 1119766 - DNA, 15 bp, Homo sapiens
ctgacgttgctgagc

SEQ ID NO: 1119767 - DNA, 15 bp, Homo sapiens
gctgacgttgctgag

SEQ ID NO: 1119768 - DNA, 15 bp, Homo sapiens
ggctgacgttgctga

SEQ ID NO: 1119769 - DNA, 15 bp, Homo sapiens
gggctgacgttgctg

SEQ ID NO: 1119770 - DNA, 15 bp, Homo sapiens
ggggctgacgttgct

SEQ ID NO: 1119771 - DNA, 15 bp, Homo sapiens
cggggctgacgttgc

SEQ ID NO: 1119772 - DNA, 15 bp, Homo sapiens
tcggggctgacgttg

SEQ ID NO: 1119773 - DNA, 15 bp, Homo sapiens
ctcggggctgacgtt

SEQ ID NO: 1119774 - DNA, 15 bp, Homo sapiens
gctcggggctgacgt

SEQ ID NO: 1119775 - DNA, 15 bp, Homo sapiens
agctcggggctgacg

SEQ ID NO: 1119776 - DNA, 15 bp, Homo sapiens
cagctcggggctgac

SEQ ID NO: 1119777 - DNA, 15 bp, Homo sapiens
ccagctcggggctga

SEQ ID NO: 1119778 - DNA, 15 bp, Homo sapiens
cccagctcggggctg

SEQ ID NO: 1119779 - DNA, 15 bp, Homo sapiens
gcccagctcggggct

SEQ ID NO: 1119780 - DNA, 15 bp, Homo sapiens
cgcccagctcggggc

SEQ ID NO: 1119781 - DNA, 15 bp, Homo sapiens
ccgcccagctcgggg

SEQ ID NO: 1119782 - DNA, 15 bp, Homo sapiens
cccgcccagctcggg

SEQ ID NO: 1119783 - DNA, 15 bp, Homo sapiens
tcccgcccagctcgg

SEQ ID NO: 1119784 - DNA, 15 bp, Homo sapiens
ttcccgcccagctcg

SEQ ID NO: 1119785 - DNA, 15 bp, Homo sapiens
cttcccgcccagctc

SEQ ID NO: 1119786 - DNA, 15 bp, Homo sapiens
acttcccgcccagct

SEQ ID NO: 1119787 - DNA, 15 bp, Homo sapiens
tacttcccgcccagc

SEQ ID NO: 1119788 - DNA, 15 bp, Homo sapiens
gtacttcccgcccag

SEQ ID NO: 1119789 - DNA, 15 bp, Homo sapiens
agtacttcccgccca

SEQ ID NO: 1119790 - DNA, 15 bp, Homo sapiens
tagtacttcccgccc

SEQ ID NO: 1119791 - DNA, 15 bp, Homo sapiens
gtagtacttcccgcc

SEQ ID NO: 1119792 - DNA, 15 bp, Homo sapiens
agtagtacttcccgc

SEQ ID NO: 1119793 - DNA, 15 bp, Homo sapiens
aagtagtacttcccg

SEQ ID NO: 1119794 - DNA, 15 bp, Homo sapiens
gaagtagtacttccc

SEQ ID NO: 1119795 - DNA, 15 bp, Homo sapiens
ggaagtagtacttcc

SEQ ID NO: 1119796 - DNA, 15 bp, Homo sapiens
cggaagtagtacttc

SEQ ID NO: 1119797 - DNA, 15 bp, Homo sapiens
acggaagtagtactt

SEQ ID NO: 1119798 - DNA, 15 bp, Homo sapiens
cacggaagtagtact

SEQ ID NO: 1119799 - DNA, 15 bp, Homo sapiens
ccacggaagtagtac

SEQ ID NO: 1119800 - DNA, 15 bp, Homo sapiens
cccacggaagtagta

SEQ ID NO: 1119801 - DNA, 15 bp, Homo sapiens
ccccacggaagtagt

SEQ ID NO: 1119802 - DNA, 15 bp, Homo sapiens
tccccacggaagtag

SEQ ID NO: 1119803 - DNA, 15 bp, Homo sapiens
gtccccacggaagta

SEQ ID NO: 1119804 - DNA, 15 bp, Homo sapiens
ggtccccacggaagt

SEQ ID NO: 1119805 - DNA, 15 bp, Homo sapiens
aggtccccacggaag

SEQ ID NO: 1119806 - DNA, 15 bp, Homo sapiens
caggtccccacggaa

SEQ ID NO: 1119807 - DNA, 15 bp, Homo sapiens
ccaggtccccacgga

SEQ ID NO: 1119808 - DNA, 15 bp, Homo sapiens
cccaggtccccacgg

SEQ ID NO: 1119809 - DNA, 15 bp, Homo sapiens
gcccaggtccccacg

SEQ ID NO: 1119810 - DNA, 15 bp, Homo sapiens
cgcccaggtccccac

SEQ ID NO: 1119811 - DNA, 15 bp, Homo sapiens
ccgcccaggtcccca

SEQ ID NO: 1119812 - DNA, 15 bp, Homo sapiens
gccgcccaggtcccc

SEQ ID NO: 1119813 - DNA, 15 bp, Homo sapiens
agccgcccaggtccc

SEQ ID NO: 1119814 - DNA, 15 bp, Homo sapiens
tagccgcccaggtcc

SEQ ID NO: 1119815 - DNA, 15 bp, Homo sapiens
gtagccgcccaggtc

SEQ ID NO: 1119816 - DNA, 15 bp, Homo sapiens
tgtagccgcccaggt

SEQ ID NO: 1119817 - DNA, 15 bp, Homo sapiens
ttgtagccgcccagg

SEQ ID NO: 1119818 - DNA, 15 bp, Homo sapiens
gttgtagccgcccag

SEQ ID NO: 1119819 - DNA, 15 bp, Homo sapiens
ggttgtagccgccca

SEQ ID NO: 1119820 - DNA, 15 bp, Homo sapiens
tggttgtagccgccc

SEQ ID NO: 1119821 - DNA, 15 bp, Homo sapiens
ctggttgtagccgcc

SEQ ID NO: 1119822 - DNA, 15 bp, Homo sapiens
actggttgtagccgc

SEQ ID NO: 1119823 - DNA, 15 bp, Homo sapiens
tactggttgtagccg

SEQ ID NO: 1119824 - DNA, 15 bp, Homo sapiens
gtactggttgtagcc

SEQ ID NO: 1119825 - DNA, 15 bp, Homo sapiens
tgtactggttgtagc

SEQ ID NO: 1119826 - DNA, 15 bp, Homo sapiens
gtgtactggttgtag

SEQ ID NO: 1119827 - DNA, 15 bp, Homo sapiens
ggtgtactggttgta

SEQ ID NO: 1119828 - DNA, 15 bp, Homo sapiens
aggtgtactggttgt

SEQ ID NO: 1119829 - DNA, 15 bp, Homo sapiens
aaggtgtactggttg

SEQ ID NO: 1119830 - DNA, 15 bp, Homo sapiens
gaaggtgtactggtt

SEQ ID NO: 1119831 - DNA, 15 bp, Homo sapiens
agaaggtgtactggt

SEQ ID NO: 1119832 - DNA, 15 bp, Homo sapiens
gagaaggtgtactgg

SEQ ID NO: 1119833 - DNA, 15 bp, Homo sapiens
tgagaaggtgtactg

SEQ ID NO: 1119834 - DNA, 15 bp, Homo sapiens
ctgagaaggtgtact

SEQ ID NO: 1119835 - DNA, 15 bp, Homo sapiens
tctgagaaggtgtac

SEQ ID NO: 1119836 - DNA, 15 bp, Homo sapiens
ctctgagaaggtgta

SEQ ID NO: 1119837 - DNA, 15 bp, Homo sapiens
gctctgagaaggtgt

SEQ ID NO: 1119838 - DNA, 15 bp, Homo sapiens
tgctctgagaaggtg

SEQ ID NO: 1119839 - DNA, 15 bp, Homo sapiens
gtgctctgagaaggt

SEQ ID NO: 1119840 - DNA, 15 bp, Homo sapiens
tgtgctctgagaagg

SEQ ID NO: 1119841 - DNA, 15 bp, Homo sapiens
ctgtgctctgagaag

SEQ ID NO: 1119842 - DNA, 15 bp, Homo sapiens
gctgtgctctgagaa

SEQ ID NO: 1119843 - DNA, 15 bp, Homo sapiens
cgctgtgctctgaga

SEQ ID NO: 1119844 - DNA, 15 bp, Homo sapiens
acgctgtgctctgag

SEQ ID NO: 1119845 - DNA, 15 bp, Homo sapiens
gacgctgtgctctga

SEQ ID NO: 1119846 - DNA, 15 bp, Homo sapiens
ggacgctgtgctctg

SEQ ID NO: 1119847 - DNA, 15 bp, Homo sapiens
aggacgctgtgctct

SEQ ID NO: 1119848 - DNA, 15 bp, Homo sapiens
caggacgctgtgctc

SEQ ID NO: 1119849 - DNA, 15 bp, Homo sapiens
ccaggacgctgtgct

SEQ ID NO: 1119850 - DNA, 15 bp, Homo sapiens
tccaggacgctgtgc

SEQ ID NO: 1119851 - DNA, 15 bp, Homo sapiens
atccaggacgctgtg

SEQ ID NO: 1119852 - DNA, 15 bp, Homo sapiens
tatccaggacgctgt

SEQ ID NO: 1119853 - DNA, 15 bp, Homo sapiens
atatccaggacgctg

SEQ ID NO: 1119854 - DNA, 15 bp, Homo sapiens
gatatccaggacgct

SEQ ID NO: 1119855 - DNA, 15 bp, Homo sapiens
cgatatccaggacgc

SEQ ID NO: 1119856 - DNA, 15 bp, Homo sapiens
acgatatccaggacg

SEQ ID NO: 1119857 - DNA, 15 bp, Homo sapiens
gacgatatccaggac

SEQ ID NO: 1119858 - DNA, 15 bp, Homo sapiens
tgacgatatccagga

SEQ ID NO: 1119859 - DNA, 15 bp, Homo sapiens
ctgacgatatccagg

SEQ ID NO: 1119860 - DNA, 15 bp, Homo sapiens
actgacgatatccag

SEQ ID NO: 1119861 - DNA, 15 bp, Homo sapiens
cactgacgatatcca

SEQ ID NO: 1119862 - DNA, 15 bp, Homo sapiens
tcactgacgatatcc

SEQ ID NO: 1119863 - DNA, 15 bp, Homo sapiens
ctcactgacgatatc

SEQ ID NO: 1119864 - DNA, 15 bp, Homo sapiens
actcactgacgatat

SEQ ID NO: 1119865 - DNA, 15 bp, Homo sapiens
gactcactgacgata

SEQ ID NO: 1119866 - DNA, 15 bp, Homo sapiens
ggactcactgacgat

SEQ ID NO: 1119867 - DNA, 15 bp, Homo sapiens
gggactcactgacga

SEQ ID NO: 1119868 - DNA, 15 bp, Homo sapiens
ggggactcactgacg

SEQ ID NO: 1119869 - DNA, 15 bp, Homo sapiens
tggggactcactgac

SEQ ID NO: 1119870 - DNA, 15 bp, Homo sapiens
ctggggactcactga

SEQ ID NO: 1119871 - DNA, 15 bp, Homo sapiens
gctggggactcactg

SEQ ID NO: 1119872 - DNA, 15 bp, Homo sapiens
cgctggggactcact

SEQ ID NO: 1119873 - DNA, 15 bp, Homo sapiens
ccgctggggactcac

SEQ ID NO: 1119874 - DNA, 15 bp, Homo sapiens
accgctggggactca

SEQ ID NO: 1119875 - DNA, 15 bp, Homo sapiens
aaccgctggggactc

SEQ ID NO: 1119876 - DNA, 15 bp, Homo sapiens
caaccgctggggact

SEQ ID NO: 1119877 - DNA, 15 bp, Homo sapiens
acaaccgctggggac

SEQ ID NO: 1119878 - DNA, 15 bp, Homo sapiens
cacaaccgctgggga

SEQ ID NO: 1119879 - DNA, 15 bp, Homo sapiens
gcacaaccgctgggg

SEQ ID NO: 1119880 - DNA, 15 bp, Homo sapiens
tgcacaaccgctggg

SEQ ID NO: 1119881 - DNA, 15 bp, Homo sapiens
ctgcacaaccgctgg

SEQ ID NO: 1119882 - DNA, 15 bp, Homo sapiens
cctgcacaaccgctg

SEQ ID NO: 1119883 - DNA, 15 bp, Homo sapiens
gcctgcacaaccgct

SEQ ID NO: 1119884 - DNA, 15 bp, Homo sapiens
tgcctgcacaaccgc

SEQ ID NO: 1119885 - DNA, 15 bp, Homo sapiens
gtgcctgcacaaccg

SEQ ID NO: 1119886 - DNA, 15 bp, Homo sapiens
ggtgcctgcacaacc

SEQ ID NO: 1119887 - DNA, 15 bp, Homo sapiens
cggtgcctgcacaac

SEQ ID NO: 1119888 - DNA, 15 bp, Homo sapiens
ccggtgcctgcacaa

SEQ ID NO: 1119889 - DNA, 15 bp, Homo sapiens
cccggtgcctgcaca

SEQ ID NO: 1119890 - DNA, 15 bp, Homo sapiens
tcccggtgcctgcac

SEQ ID NO: 1119891 - DNA, 15 bp, Homo sapiens
ctcccggtgcctgca

SEQ ID NO: 1119892 - DNA, 15 bp, Homo sapiens
gctcccggtgcctgc

SEQ ID NO: 1119893 - DNA, 15 bp, Homo sapiens
agctcccggtgcctg

SEQ ID NO: 1119894 - DNA, 15 bp, Homo sapiens
cagctcccggtgcct

SEQ ID NO: 1119895 - DNA, 15 bp, Homo sapiens
ccagctcccggtgcc

SEQ ID NO: 1119896 - DNA, 15 bp, Homo sapiens
cccagctcccggtgc

SEQ ID NO: 1119897 - DNA, 15 bp, Homo sapiens
ccccagctcccggtg

SEQ ID NO: 1119898 - DNA, 15 bp, Homo sapiens
gccccagctcccggt

SEQ ID NO: 1119899 - DNA, 15 bp, Homo sapiens
tgccccagctcccgg

SEQ ID NO: 1119900 - DNA, 15 bp, Homo sapiens
ctgccccagctcccg

SEQ ID NO: 1119901 - DNA, 15 bp, Homo sapiens
gctgccccagctccc

SEQ ID NO: 1119902 - DNA, 15 bp, Homo sapiens
cgctgccccagctcc

SEQ ID NO: 1119903 - DNA, 15 bp, Homo sapiens
ccgctgccccagctc

SEQ ID NO: 1119904 - DNA, 15 bp, Homo sapiens
cccgctgccccagct

SEQ ID NO: 1119905 - DNA, 15 bp, Homo sapiens
ccccgctgccccagc

SEQ ID NO: 1119906 - DNA, 15 bp, Homo sapiens
gccccgctgccccag

SEQ ID NO: 1119907 - DNA, 15 bp, Homo sapiens
cgccccgctgcccca

SEQ ID NO: 1119908 - DNA, 15 bp, Homo sapiens
ccgccccgctgcccc

SEQ ID NO: 1119909 - DNA, 15 bp, Homo sapiens
cccgccccgctgccc

SEQ ID NO: 1119910 - DNA, 15 bp, Homo sapiens
tcccgccccgctgcc

SEQ ID NO: 1119911 - DNA, 15 bp, Homo sapiens
ttcccgccccgctgc

SEQ ID NO: 1119912 - DNA, 15 bp, Homo sapiens
cttcccgccccgctg

SEQ ID NO: 1119913 - DNA, 15 bp, Homo sapiens
ccttcccgccccgct

SEQ ID NO: 1119914 - DNA, 15 bp, Homo sapiens
tccttcccgccccgc

SEQ ID NO: 1119915 - DNA, 15 bp, Homo sapiens
ctccttcccgccccg

SEQ ID NO: 1119916 - DNA, 15 bp, Homo sapiens
cactccttcccgccc

SEQ ID NO: 1119917 - DNA, 15 bp, Homo sapiens
acactccttcccgcc

SEQ ID NO: 1119918 - DNA, 15 bp, Homo sapiens
cacactccttcccgc

SEQ ID NO: 1119919 - DNA, 15 bp, Homo sapiens
ccacactccttcccg

SEQ ID NO: 1119920 - DNA, 15 bp, Homo sapiens
gccacactccttccc

SEQ ID NO: 1119921 - DNA, 15 bp, Homo sapiens
ggccacactccttcc

SEQ ID NO: 1119922 - DNA, 15 bp, Homo sapiens
cggccacactccttc

SEQ ID NO: 1119923 - DNA, 15 bp, Homo sapiens
ccggccacactcctt

SEQ ID NO: 1119924 - DNA, 15 bp, Homo sapiens
tccggccacactcct

SEQ ID NO: 1119925 - DNA, 15 bp, Homo sapiens
ttccggccacactcc

SEQ ID NO: 1119926 - DNA, 15 bp, Homo sapiens
cttccggccacactc

SEQ ID NO: 1119927 - DNA, 15 bp, Homo sapiens
ccttccggccacact

SEQ ID NO: 1119928 - DNA, 15 bp, Homo sapiens
gccttccggccacac

SEQ ID NO: 1119929 - DNA, 15 bp, Homo sapiens
ggccttccggccaca

SEQ ID NO: 1119930 - DNA, 15 bp, Homo sapiens
aggccttccggccac

SEQ ID NO: 1119931 - DNA, 15 bp, Homo sapiens
gaggccttccggcca

SEQ ID NO: 1119932 - DNA, 15 bp, Homo sapiens
ggaggccttccggcc

SEQ ID NO: 1119933 - DNA, 15 bp, Homo sapiens
gggaggccttccggc

SEQ ID NO: 1119934 - DNA, 15 bp, Homo sapiens
ggggaggccttccgg

SEQ ID NO: 1119935 - DNA, 15 bp, Homo sapiens
cggggaggccttccg

SEQ ID NO: 1119936 - DNA, 15 bp, Homo sapiens
gcggggaggccttcc

SEQ ID NO: 1119937 - DNA, 15 bp, Homo sapiens
tgcggggaggccttc

SEQ ID NO: 1119938 - DNA, 15 bp, Homo sapiens
gtgcggggaggcctt

SEQ ID NO: 1119939 - DNA, 15 bp, Homo sapiens
ggtgcggggaggcct

SEQ ID NO: 1119940 - DNA, 15 bp, Homo sapiens
aggtgcggggaggcc

SEQ ID NO: 1119941 - DNA, 15 bp, Homo sapiens
aaggtgcggggaggc

SEQ ID NO: 1119942 - DNA, 15 bp, Homo sapiens
gaaggtgcggggagg

SEQ ID NO: 1119943 - DNA, 15 bp, Homo sapiens
ggaaggtgcggggag

SEQ ID NO: 1119944 - DNA, 15 bp, Homo sapiens
gggaaggtgcgggga

SEQ ID NO: 1119945 - DNA, 15 bp, Homo sapiens
ggggaaggtgcgggg

SEQ ID NO: 1119946 - DNA, 15 bp, Homo sapiens
tggggaaggtgcggg

SEQ ID NO: 1119947 - DNA, 15 bp, Homo sapiens
ctggggaaggtgcgg

SEQ ID NO: 1119948 - DNA, 15 bp, Homo sapiens
gctggggaaggtgcg

SEQ ID NO: 1119949 - DNA, 15 bp, Homo sapiens
tgctggggaaggtgc

SEQ ID NO: 1119950 - DNA, 15 bp, Homo sapiens
ctgctggggaaggtg

SEQ ID NO: 1119951 - DNA, 15 bp, Homo sapiens
cctgctggggaaggt

SEQ ID NO: 1119952 - DNA, 15 bp, Homo sapiens
gcctgctggggaagg

SEQ ID NO: 1119953 - DNA, 15 bp, Homo sapiens
ggcctgctggggaag

SEQ ID NO: 1119954 - DNA, 15 bp, Homo sapiens
aggcctgctggggaa

SEQ ID NO: 1119955 - DNA, 15 bp, Homo sapiens
caggcctgctgggga

SEQ ID NO: 1119956 - DNA, 15 bp, Homo sapiens
ccaggcctgctgggg

SEQ ID NO: 1119957 - DNA, 15 bp, Homo sapiens
tccaggcctgctggg

SEQ ID NO: 1119958 - DNA, 15 bp, Homo sapiens
atccaggcctgctgg

SEQ ID NO: 1119959 - DNA, 15 bp, Homo sapiens
catccaggcctgctg

SEQ ID NO: 1119960 - DNA, 15 bp, Homo sapiens
ccatccaggcctgct

SEQ ID NO: 1119961 - DNA, 15 bp, Homo sapiens
gccatccaggcctgc

SEQ ID NO: 1119962 - DNA, 15 bp, Homo sapiens
tgccatccaggcctg

SEQ ID NO: 1119963 - DNA, 15 bp, Homo sapiens
ctgccatccaggcct

SEQ ID NO: 1119964 - DNA, 15 bp, Homo sapiens
tctgccatccaggcc

SEQ ID NO: 1119965 - DNA, 15 bp, Homo sapiens
atctgccatccaggc

SEQ ID NO: 1119966 - DNA, 15 bp, Homo sapiens
gatctgccatccagg

SEQ ID NO: 1119967 - DNA, 15 bp, Homo sapiens
agatctgccatccag

SEQ ID NO: 1119968 - DNA, 15 bp, Homo sapiens
cagatctgccatcca

SEQ ID NO: 1119969 - DNA, 15 bp, Homo sapiens
ccagatctgccatcc

SEQ ID NO: 1119970 - DNA, 15 bp, Homo sapiens
cccagatctgccatc

SEQ ID NO: 1119971 - DNA, 15 bp, Homo sapiens
tcccagatctgccat

SEQ ID NO: 1119972 - DNA, 15 bp, Homo sapiens
ctcccagatctgcca

SEQ ID NO: 1119973 - DNA, 15 bp, Homo sapiens
cctcccagatctgcc

SEQ ID NO: 1119974 - DNA, 15 bp, Homo sapiens
acctcccagatctgc

SEQ ID NO: 1119975 - DNA, 15 bp, Homo sapiens
cacctcccagatctg

SEQ ID NO: 1119976 - DNA, 15 bp, Homo sapiens
gcacctcccagatct

SEQ ID NO: 1119977 - DNA, 15 bp, Homo sapiens
agcacctcccagatc

SEQ ID NO: 1119978 - DNA, 15 bp, Homo sapiens
cagcacctcccagat

SEQ ID NO: 1119979 - DNA, 15 bp, Homo sapiens
tcagcacctcccaga

SEQ ID NO: 1119980 - DNA, 15 bp, Homo sapiens
atcagcacctcccag

SEQ ID NO: 1119981 - DNA, 15 bp, Homo sapiens
aatcagcacctccca

SEQ ID NO: 1119982 - DNA, 15 bp, Homo sapiens
aaatcagcacctccc

SEQ ID NO: 1119983 - DNA, 15 bp, Homo sapiens
caaatcagcacctcc

SEQ ID NO: 1119984 - DNA, 15 bp, Homo sapiens
ccaaatcagcacctc

SEQ ID NO: 1119985 - DNA, 15 bp, Homo sapiens
gccaaatcagcacct

SEQ ID NO: 1119986 - DNA, 15 bp, Homo sapiens
agccaaatcagcacc

SEQ ID NO: 1119987 - DNA, 15 bp, Homo sapiens
cagccaaatcagcac

SEQ ID NO: 1119988 - DNA, 15 bp, Homo sapiens
ccagccaaatcagca

SEQ ID NO: 1119989 - DNA, 15 bp, Homo sapiens
cccagccaaatcagc

SEQ ID NO: 1119990 - DNA, 15 bp, Homo sapiens
ccccagccaaatcag

SEQ ID NO: 1119991 - DNA, 15 bp, Homo sapiens
cccccagccaaatca

SEQ ID NO: 1119992 - DNA, 15 bp, Homo sapiens
acccccagccaaatc

SEQ ID NO: 1119993 - DNA, 15 bp, Homo sapiens
cacccccagccaaat

SEQ ID NO: 1119994 - DNA, 15 bp, Homo sapiens
gcacccccagccaaa

SEQ ID NO: 1119995 - DNA, 15 bp, Homo sapiens
tgcacccccagccaa

SEQ ID NO: 1119996 - DNA, 15 bp, Homo sapiens
ttgcacccccagcca

SEQ ID NO: 1119997 - DNA, 15 bp, Homo sapiens
tttgcacccccagcc

SEQ ID NO: 1119998 - DNA, 15 bp, Homo sapiens
gtttgcacccccagc

SEQ ID NO: 1119999 - DNA, 15 bp, Homo sapiens
ggtttgcacccccag

SEQ ID NO: 1120000 - DNA, 15 bp, Homo sapiens
aggtttgcaccccca

SEQ ID NO: 1120001 - DNA, 15 bp, Homo sapiens
gaggtttgcaccccc

SEQ ID NO: 1120002 - DNA, 15 bp, Homo sapiens
tgaggtttgcacccc

SEQ ID NO: 1120003 - DNA, 15 bp, Homo sapiens
ttgaggtttgcaccc

SEQ ID NO: 1120004 - DNA, 15 bp, Homo sapiens
cttgaggtttgcacc

SEQ ID NO: 1120005 - DNA, 15 bp, Homo sapiens
ccttgaggtttgcac

SEQ ID NO: 1120006 - DNA, 15 bp, Homo sapiens
gccttgaggtttgca

SEQ ID NO: 1120007 - DNA, 15 bp, Homo sapiens
ggccttgaggtttgc

SEQ ID NO: 1120008 - DNA, 15 bp, Homo sapiens
gggccttgaggtttg

SEQ ID NO: 1120009 - DNA, 15 bp, Homo sapiens
tgggccttgaggttt

SEQ ID NO: 1120010 - DNA, 15 bp, Homo sapiens
gtgggccttgaggtt

SEQ ID NO: 1120011 - DNA, 15 bp, Homo sapiens
cgtgggccttgaggt

SEQ ID NO: 1120012 - DNA, 15 bp, Homo sapiens
gcgtgggccttgagg

SEQ ID NO: 1120013 - DNA, 15 bp, Homo sapiens
tgcgtgggccttgag

SEQ ID NO: 1120014 - DNA, 15 bp, Homo sapiens
ctgcgtgggccttga

SEQ ID NO: 1120015 - DNA, 15 bp, Homo sapiens
tctgcgtgggccttg

SEQ ID NO: 1120016 - DNA, 15 bp, Homo sapiens
gtctgcgtgggcctt

SEQ ID NO: 1120017 - DNA, 15 bp, Homo sapiens
ggtctgcgtgggcct

SEQ ID NO: 1120018 - DNA, 15 bp, Homo sapiens
tggtctgcgtgggcc

SEQ ID NO: 1120019 - DNA, 15 bp, Homo sapiens
atggtctgcgtgggc

SEQ ID NO: 1120020 - DNA, 15 bp, Homo sapiens
catggtctgcgtggg

SEQ ID NO: 1120021 - DNA, 15 bp, Homo sapiens
gcatggtctgcgtgg

SEQ ID NO: 1120022 - DNA, 15 bp, Homo sapiens
tgcatggtctgcgtg

SEQ ID NO: 1120023 - DNA, 15 bp, Homo sapiens
ctgcatggtctgcgt

SEQ ID NO: 1120024 - DNA, 15 bp, Homo sapiens
tctgcatggtctgcg

SEQ ID NO: 1120025 - DNA, 15 bp, Homo sapiens
atctgcatggtctgc

SEQ ID NO: 1120026 - DNA, 15 bp, Homo sapiens
catctgcatggtctg

SEQ ID NO: 1120027 - DNA, 15 bp, Homo sapiens
tcatctgcatggtct

SEQ ID NO: 1120028 - DNA, 15 bp, Homo sapiens
gtcatctgcatggtc

SEQ ID NO: 1120029 - DNA, 15 bp, Homo sapiens
tgtcatctgcatggt

SEQ ID NO: 1120030 - DNA, 15 bp, Homo sapiens
ctgtcatctgcatgg

SEQ ID NO: 1120031 - DNA, 15 bp, Homo sapiens
tctgtcatctgcatg

SEQ ID NO: 1120032 - DNA, 15 bp, Homo sapiens
gtctgtcatctgcat

SEQ ID NO: 1120033 - DNA, 15 bp, Homo sapiens
tgtctgtcatctgca

SEQ ID NO: 1120034 - DNA, 15 bp, Homo sapiens
atgtctgtcatctgc

SEQ ID NO: 1120035 - DNA, 15 bp, Homo sapiens
catgtctgtcatctg

SEQ ID NO: 1120036 - DNA, 15 bp, Homo sapiens
tcatgtctgtcatct

SEQ ID NO: 1120037 - DNA, 15 bp, Homo sapiens
ttcatgtctgtcatc

SEQ ID NO: 1120038 - DNA, 15 bp, Homo sapiens
gttcatgtctgtcat

SEQ ID NO: 1120039 - DNA, 15 bp, Homo sapiens
tgttcatgtctgtca

SEQ ID NO: 1120040 - DNA, 15 bp, Homo sapiens
ttgttcatgtctgtc

SEQ ID NO: 1120041 - DNA, 15 bp, Homo sapiens
tttgttcatgtctgt

SEQ ID NO: 1120042 - DNA, 15 bp, Homo sapiens
ctttgttcatgtctg

SEQ ID NO: 1120043 - DNA, 15 bp, Homo sapiens
gctttgttcatgtct

SEQ ID NO: 1120044 - DNA, 15 bp, Homo sapiens
tgctttgttcatgtc

SEQ ID NO: 1120045 - DNA, 15 bp, Homo sapiens
ctgctttgttcatgt

SEQ ID NO: 1120046 - DNA, 15 bp, Homo sapiens
cctgctttgttcatg

SEQ ID NO: 1120047 - DNA, 15 bp, Homo sapiens
ccctgctttgttcat

SEQ ID NO: 1120048 - DNA, 15 bp, Homo sapiens
gccctgctttgttca

SEQ ID NO: 1120049 - DNA, 15 bp, Homo sapiens
ggccctgctttgttc

SEQ ID NO: 1120050 - DNA, 15 bp, Homo sapiens
gggccctgctttgtt

SEQ ID NO: 1120051 - DNA, 15 bp, Homo sapiens
ggggccctgctttgt

SEQ ID NO: 1120052 - DNA, 15 bp, Homo sapiens
tggggccctgctttg

SEQ ID NO: 1120053 - DNA, 15 bp, Homo sapiens
ttggggccctgcttt

SEQ ID NO: 1120054 - DNA, 15 bp, Homo sapiens
tttggggccctgctt

SEQ ID NO: 1120055 - DNA, 15 bp, Homo sapiens
ttttggggccctgct

SEQ ID NO: 1120056 - DNA, 15 bp, Homo sapiens
attttggggccctgc

SEQ ID NO: 1120057 - DNA, 15 bp, Homo sapiens
tattttggggccctg

SEQ ID NO: 1120058 - DNA, 15 bp, Homo sapiens
ctattttggggccct

SEQ ID NO: 1120059 - DNA, 15 bp, Homo sapiens
actattttggggccc

SEQ ID NO: 1120060 - DNA, 15 bp, Homo sapiens
gactattttggggcc

SEQ ID NO: 1120061 - DNA, 15 bp, Homo sapiens
agactattttggggc

SEQ ID NO: 1120062 - DNA, 15 bp, Homo sapiens
aagactattttgggg

SEQ ID NO: 1120063 - DNA, 15 bp, Homo sapiens
caagactattttggg

SEQ ID NO: 1120064 - DNA, 15 bp, Homo sapiens
gcaagactattttgg

SEQ ID NO: 1120065 - DNA, 15 bp, Homo sapiens
agcaagactattttg

SEQ ID NO: 1120066 - DNA, 15 bp, Homo sapiens
cagcaagactatttt

SEQ ID NO: 1120067 - DNA, 15 bp, Homo sapiens
gcagcaagactattt

SEQ ID NO: 1120068 - DNA, 15 bp, Homo sapiens
ggcagcaagactatt

SEQ ID NO: 1120069 - DNA, 15 bp, Homo sapiens
gggcagcaagactat

SEQ ID NO: 1120070 - DNA, 15 bp, Homo sapiens
agggcagcaagacta

SEQ ID NO: 1120071 - DNA, 15 bp, Homo sapiens
gagggcagcaagact

SEQ ID NO: 1120072 - DNA, 15 bp, Homo sapiens
tgagggcagcaagac

SEQ ID NO: 1120073 - DNA, 15 bp, Homo sapiens
ctgagggcagcaaga

SEQ ID NO: 1120074 - DNA, 15 bp, Homo sapiens
cctgagggcagcaag

SEQ ID NO: 1120075 - DNA, 15 bp, Homo sapiens
ccctgagggcagcaa

SEQ ID NO: 1120076 - DNA, 15 bp, Homo sapiens
cccctgagggcagca

SEQ ID NO: 1120077 - DNA, 15 bp, Homo sapiens
ccccctgagggcagc

SEQ ID NO: 1120078 - DNA, 15 bp, Homo sapiens
tccccctgagggcag

SEQ ID NO: 1120079 - DNA, 15 bp, Homo sapiens
ttccccctgagggca

SEQ ID NO: 1120080 - DNA, 15 bp, Homo sapiens
tttccccctgagggc

SEQ ID NO: 1120081 - DNA, 15 bp, Homo sapiens
gtttccccctgaggg

SEQ ID NO: 1120082 - DNA, 15 bp, Homo sapiens
tgtttccccctgagg

SEQ ID NO: 1120083 - DNA, 15 bp, Homo sapiens
ctgtttccccctgag

SEQ ID NO: 1120084 - DNA, 15 bp, Homo sapiens
cctgtttccccctga

SEQ ID NO: 1120085 - DNA, 15 bp, Homo sapiens
acctgtttccccctg

SEQ ID NO: 1120086 - DNA, 15 bp, Homo sapiens
cacctgtttccccct

SEQ ID NO: 1120087 - DNA, 15 bp, Homo sapiens
gcacctgtttccccc

SEQ ID NO: 1120088 - DNA, 15 bp, Homo sapiens
agcacctgtttcccc

SEQ ID NO: 1120089 - DNA, 15 bp, Homo sapiens
cagcacctgtttccc

SEQ ID NO: 1120090 - DNA, 15 bp, Homo sapiens
gcagcacctgtttcc

SEQ ID NO: 1120091 - DNA, 15 bp, Homo sapiens
agcagcacctgtttc

SEQ ID NO: 1120092 - DNA, 15 bp, Homo sapiens
tagcagcacctgttt

SEQ ID NO: 1120093 - DNA, 15 bp, Homo sapiens
gtagcagcacctgtt

SEQ ID NO: 1120094 - DNA, 15 bp, Homo sapiens
agtagcagcacctgt

SEQ ID NO: 1120095 - DNA, 15 bp, Homo sapiens
gagtagcagcacctg

SEQ ID NO: 1120096 - DNA, 15 bp, Homo sapiens
agagtagcagcacct

SEQ ID NO: 1120097 - DNA, 15 bp, Homo sapiens
aagagtagcagcacc

SEQ ID NO: 1120098 - DNA, 15 bp, Homo sapiens
aaagagtagcagcac

SEQ ID NO: 1120099 - DNA, 15 bp, Homo sapiens
aaaagagtagcagca

SEQ ID NO: 1120100 - DNA, 15 bp, Homo sapiens
caaaagagtagcagc

SEQ ID NO: 1120101 - DNA, 15 bp, Homo sapiens
ccaaaagagtagcag

SEQ ID NO: 1120102 - DNA, 15 bp, Homo sapiens
tccaaaagagtagca

SEQ ID NO: 1120103 - DNA, 15 bp, Homo sapiens
ttccaaaagagtagc

SEQ ID NO: 1120104 - DNA, 15 bp, Homo sapiens
tttccaaaagagtag

SEQ ID NO: 1120105 - DNA, 15 bp, Homo sapiens
gtttccaaaagagta

SEQ ID NO: 1120106 - DNA, 15 bp, Homo sapiens
tgtttccaaaagagt

SEQ ID NO: 1120107 - DNA, 15 bp, Homo sapiens
gtgtttccaaaagag

SEQ ID NO: 1120108 - DNA, 15 bp, Homo sapiens
ggtgtttccaaaaga

SEQ ID NO: 1120109 - DNA, 15 bp, Homo sapiens
aggtgtttccaaaag

SEQ ID NO: 1120110 - DNA, 15 bp, Homo sapiens
caggtgtttccaaaa

SEQ ID NO: 1120111 - DNA, 15 bp, Homo sapiens
ccaggtgtttccaaa

SEQ ID NO: 1120112 - DNA, 15 bp, Homo sapiens
tccaggtgtttccaa

SEQ ID NO: 1120113 - DNA, 15 bp, Homo sapiens
ctccaggtgtttcca

SEQ ID NO: 1120114 - DNA, 15 bp, Homo sapiens
tctccaggtgtttcc

SEQ ID NO: 1120115 - DNA, 15 bp, Homo sapiens
ttctccaggtgtttc

SEQ ID NO: 1120116 - DNA, 15 bp, Homo sapiens
tttctccaggtgttt

SEQ ID NO: 1120117 - DNA, 15 bp, Homo sapiens
ctttctccaggtgtt

SEQ ID NO: 1120118 - DNA, 15 bp, Homo sapiens
cctttctccaggtgt

SEQ ID NO: 1120119 - DNA, 15 bp, Homo sapiens
gcctttctccaggtg

SEQ ID NO: 1120120 - DNA, 15 bp, Homo sapiens
tgcctttctccaggt

SEQ ID NO: 1120121 - DNA, 15 bp, Homo sapiens
ctgcctttctccagg

SEQ ID NO: 1120122 - DNA, 15 bp, Homo sapiens
actgcctttctccag

SEQ ID NO: 1120123 - DNA, 15 bp, Homo sapiens
cactgcctttctcca

SEQ ID NO: 1120124 - DNA, 15 bp, Homo sapiens
ccactgcctttctcc

SEQ ID NO: 1120125 - DNA, 15 bp, Homo sapiens
cccactgcctttctc

SEQ ID NO: 1120126 - DNA, 15 bp, Homo sapiens
ccccactgcctttct

SEQ ID NO: 1120127 - DNA, 15 bp, Homo sapiens
gccccactgcctttc

SEQ ID NO: 1120128 - DNA, 15 bp, Homo sapiens
ggccccactgccttt

SEQ ID NO: 1120129 - DNA, 15 bp, Homo sapiens
tggccccactgcctt

SEQ ID NO: 1120130 - DNA, 15 bp, Homo sapiens
ctggccccactgcct

SEQ ID NO: 1120131 - DNA, 15 bp, Homo sapiens
cctggccccactgcc

SEQ ID NO: 1120132 - DNA, 15 bp, Homo sapiens
ccctggccccactgc

SEQ ID NO: 1120133 - DNA, 15 bp, Homo sapiens
cccctggccccactg

SEQ ID NO: 1120134 - DNA, 15 bp, Homo sapiens
ccccctggccccact

SEQ ID NO: 1120135 - DNA, 15 bp, Homo sapiens
accccctggccccac

SEQ ID NO: 1120136 - DNA, 15 bp, Homo sapiens
taccccctggcccca

SEQ ID NO: 1120137 - DNA, 15 bp, Homo sapiens
ctaccccctggcccc

SEQ ID NO: 1120138 - DNA, 15 bp, Homo sapiens
cctaccccctggccc

SEQ ID NO: 1120139 - DNA, 15 bp, Homo sapiens
ccctaccccctggcc

SEQ ID NO: 1120140 - DNA, 15 bp, Homo sapiens
cccctaccccctggc

SEQ ID NO: 1120141 - DNA, 15 bp, Homo sapiens
gcccctaccccctgg

SEQ ID NO: 1120142 - DNA, 15 bp, Homo sapiens
tgcccctaccccctg

SEQ ID NO: 1120143 - DNA, 15 bp, Homo sapiens
ttgcccctaccccct

SEQ ID NO: 1120144 - DNA, 15 bp, Homo sapiens
cttgcccctaccccc

SEQ ID NO: 1120145 - DNA, 15 bp, Homo sapiens
ccttgcccctacccc

SEQ ID NO: 1120146 - DNA, 15 bp, Homo sapiens
gccttgcccctaccc

SEQ ID NO: 1120147 - DNA, 15 bp, Homo sapiens
agccttgcccctacc

SEQ ID NO: 1120148 - DNA, 15 bp, Homo sapiens
cagccttgcccctac

SEQ ID NO: 1120149 - DNA, 15 bp, Homo sapiens
gcagccttgccccta

SEQ ID NO: 1120150 - DNA, 15 bp, Homo sapiens
agcagccttgcccct

SEQ ID NO: 1120151 - DNA, 15 bp, Homo sapiens
cagcagccttgcccc

SEQ ID NO: 1120152 - DNA, 15 bp, Homo sapiens
ccagcagccttgccc

SEQ ID NO: 1120153 - DNA, 15 bp, Homo sapiens
cccagcagccttgcc

SEQ ID NO: 1120154 - DNA, 15 bp, Homo sapiens
gcccagcagccttgc

SEQ ID NO: 1120155 - DNA, 15 bp, Homo sapiens
ggcccagcagccttg

SEQ ID NO: 1120156 - DNA, 15 bp, Homo sapiens
gggcccagcagcctt

SEQ ID NO: 1120157 - DNA, 15 bp, Homo sapiens
ggggcccagcagcct

SEQ ID NO: 1120158 - DNA, 15 bp, Homo sapiens
gggggcccagcagcc

SEQ ID NO: 1120159 - DNA, 15 bp, Homo sapiens
tgggggcccagcagc

SEQ ID NO: 1120160 - DNA, 15 bp, Homo sapiens
gtgggggcccagcag

SEQ ID NO: 1120161 - DNA, 15 bp, Homo sapiens
agtgggggcccagca

SEQ ID NO: 1120162 - DNA, 15 bp, Homo sapiens
aagtgggggcccagc

SEQ ID NO: 1120163 - DNA, 15 bp, Homo sapiens
aaagtgggggcccag

SEQ ID NO: 1120164 - DNA, 15 bp, Homo sapiens
taaagtgggggccca

SEQ ID NO: 1120165 - DNA, 15 bp, Homo sapiens
ctaaagtgggggccc

SEQ ID NO: 1120166 - DNA, 15 bp, Homo sapiens
gctaaagtgggggcc

SEQ ID NO: 1120167 - DNA, 15 bp, Homo sapiens
cgctaaagtgggggc

SEQ ID NO: 1120168 - DNA, 15 bp, Homo sapiens
acgctaaagtggggg

SEQ ID NO: 1120169 - DNA, 15 bp, Homo sapiens
cacgctaaagtgggg

SEQ ID NO: 1120170 - DNA, 15 bp, Homo sapiens
ccacgctaaagtggg

SEQ ID NO: 1120171 - DNA, 15 bp, Homo sapiens
accacgctaaagtgg

SEQ ID NO: 1120172 - DNA, 15 bp, Homo sapiens
caccacgctaaagtg

SEQ ID NO: 1120173 - DNA, 15 bp, Homo sapiens
tcaccacgctaaagt

SEQ ID NO: 1120174 - DNA, 15 bp, Homo sapiens
atcaccacgctaaag

SEQ ID NO: 1120175 - DNA, 15 bp, Homo sapiens
gatcaccacgctaaa

SEQ ID NO: 1120176 - DNA, 15 bp, Homo sapiens
agatcaccacgctaa

SEQ ID NO: 1120177 - DNA, 15 bp, Homo sapiens
aagatcaccacgcta

SEQ ID NO: 1120178 - DNA, 15 bp, Homo sapiens
caagatcaccacgct

SEQ ID NO: 1120179 - DNA, 15 bp, Homo sapiens
ccaagatcaccacgc

SEQ ID NO: 1120180 - DNA, 15 bp, Homo sapiens
cccaagatcaccacg

SEQ ID NO: 1120181 - DNA, 15 bp, Homo sapiens
gcccaagatcaccac

SEQ ID NO: 1120182 - DNA, 15 bp, Homo sapiens
tgcccaagatcacca

SEQ ID NO: 1120183 - DNA, 15 bp, Homo sapiens
ttgcccaagatcacc

SEQ ID NO: 1120184 - DNA, 15 bp, Homo sapiens
cacttgcccaagatc

SEQ ID NO: 1120185 - DNA, 15 bp, Homo sapiens
tcacttgcccaagat

SEQ ID NO: 1120186 - DNA, 15 bp, Homo sapiens
gtcacttgcccaaga

SEQ ID NO: 1120187 - DNA, 15 bp, Homo sapiens
agtcacttgcccaag

SEQ ID NO: 1120188 - DNA, 15 bp, Homo sapiens
aagtcacttgcccaa

SEQ ID NO: 1120189 - DNA, 15 bp, Homo sapiens
taagtcacttgccca

SEQ ID NO: 1120190 - DNA, 15 bp, Homo sapiens
ttaagtcacttgccc

SEQ ID NO: 1120191 - DNA, 15 bp, Homo sapiens
gttaagtcacttgcc

SEQ ID NO: 1120192 - DNA, 15 bp, Homo sapiens
agttaagtcacttgc

SEQ ID NO: 1120193 - DNA, 15 bp, Homo sapiens
aagttaagtcacttg

SEQ ID NO: 1120194 - DNA, 15 bp, Homo sapiens
gaagttaagtcactt

SEQ ID NO: 1120195 - DNA, 15 bp, Homo sapiens
ggaagttaagtcact

SEQ ID NO: 1120196 - DNA, 15 bp, Homo sapiens
aggaagttaagtcac

SEQ ID NO: 1120197 - DNA, 15 bp, Homo sapiens
aaggaagttaagtca

SEQ ID NO: 1120198 - DNA, 15 bp, Homo sapiens
caaggaagttaagtc

SEQ ID NO: 1120199 - DNA, 15 bp, Homo sapiens
ccaaggaagttaagt

SEQ ID NO: 1120200 - DNA, 15 bp, Homo sapiens
cccaaggaagttaag

SEQ ID NO: 1120201 - DNA, 15 bp, Homo sapiens
gcccaaggaagttaa

SEQ ID NO: 1120202 - DNA, 15 bp, Homo sapiens
ggcccaaggaagtta

SEQ ID NO: 1120203 - DNA, 15 bp, Homo sapiens
aggcccaaggaagtt

SEQ ID NO: 1120204 - DNA, 15 bp, Homo sapiens
aaggcccaaggaagt

SEQ ID NO: 1120205 - DNA, 15 bp, Homo sapiens
caaggcccaaggaag

SEQ ID NO: 1120206 - DNA, 15 bp, Homo sapiens
ccaaggcccaaggaa

SEQ ID NO: 1120207 - DNA, 15 bp, Homo sapiens
accaaggcccaagga

SEQ ID NO: 1120208 - DNA, 15 bp, Homo sapiens
aaccaaggcccaagg

SEQ ID NO: 1120209 - DNA, 15 bp, Homo sapiens
aaaccaaggcccaag

SEQ ID NO: 1120210 - DNA, 15 bp, Homo sapiens
aaaaccaaggcccaa

SEQ ID NO: 1120211 - DNA, 15 bp, Homo sapiens
gaaaaccaaggccca

SEQ ID NO: 1120212 - DNA, 15 bp, Homo sapiens
agaaaaccaaggccc

SEQ ID NO: 1120213 - DNA, 15 bp, Homo sapiens
aagaaaaccaaggcc

SEQ ID NO: 1120214 - DNA, 15 bp, Homo sapiens
aaagaaaaccaaggc

SEQ ID NO: 1120215 - DNA, 15 bp, Homo sapiens
aaaagaaaaccaagg

SEQ ID NO: 1120216 - DNA, 15 bp, Homo sapiens
gaaaagaaaaccaag

SEQ ID NO: 1120217 - DNA, 15 bp, Homo sapiens
ggaaaagaaaaccaa

SEQ ID NO: 1120218 - DNA, 15 bp, Homo sapiens
cggaaaagaaaacca

SEQ ID NO: 1120219 - DNA, 15 bp, Homo sapiens
acggaaaagaaaacc

SEQ ID NO: 1120220 - DNA, 15 bp, Homo sapiens
tacggaaaagaaaac

SEQ ID NO: 1120221 - DNA, 15 bp, Homo sapiens
ttacggaaaagaaaa

SEQ ID NO: 1120222 - DNA, 15 bp, Homo sapiens
tttacggaaaagaaa

SEQ ID NO: 1120223 - DNA, 15 bp, Homo sapiens
ttttacggaaaagaa

SEQ ID NO: 1120224 - DNA, 15 bp, Homo sapiens
attttacggaaaaga

SEQ ID NO: 1120225 - DNA, 15 bp, Homo sapiens
cattttacggaaaag

SEQ ID NO: 1120226 - DNA, 15 bp, Homo sapiens
ccattttacggaaaa

SEQ ID NO: 1120227 - DNA, 15 bp, Homo sapiens
cccattttacggaaa

SEQ ID NO: 1120228 - DNA, 15 bp, Homo sapiens
ccccattttacggaa

SEQ ID NO: 1120229 - DNA, 15 bp, Homo sapiens
tccccattttacgga

SEQ ID NO: 1120230 - DNA, 15 bp, Homo sapiens
atccccattttacgg

SEQ ID NO: 1120231 - DNA, 15 bp, Homo sapiens
tatccccattttacg

SEQ ID NO: 1120232 - DNA, 15 bp, Homo sapiens
ttatccccattttac

SEQ ID NO: 1120233 - DNA, 15 bp, Homo sapiens
cttatccccatttta

SEQ ID NO: 1120234 - DNA, 15 bp, Homo sapiens
tcttatccccatttt

SEQ ID NO: 1120235 - DNA, 15 bp, Homo sapiens
ttcttatccccattt

SEQ ID NO: 1120236 - DNA, 15 bp, Homo sapiens
gttcttatccccatt

SEQ ID NO: 1120237 - DNA, 15 bp, Homo sapiens
tgttcttatccccat

SEQ ID NO: 1120238 - DNA, 15 bp, Homo sapiens
ctgttcttatcccca

SEQ ID NO: 1120239 - DNA, 15 bp, Homo sapiens
gctgttcttatcccc

SEQ ID NO: 1120240 - DNA, 15 bp, Homo sapiens
tgctgttcttatccc

SEQ ID NO: 1120241 - DNA, 15 bp, Homo sapiens
gtgctgttcttatcc

SEQ ID NO: 1120242 - DNA, 15 bp, Homo sapiens
agtgctgttcttatc

SEQ ID NO: 1120243 - DNA, 15 bp, Homo sapiens
aagtgctgttcttat

SEQ ID NO: 1120244 - DNA, 15 bp, Homo sapiens
taagtgctgttctta

SEQ ID NO: 1120245 - DNA, 15 bp, Homo sapiens
ttaagtgctgttctt

SEQ ID NO: 1120246 - DNA, 15 bp, Homo sapiens
cttaagtgctgttct

SEQ ID NO: 1120247 - DNA, 15 bp, Homo sapiens
ccttaagtgctgttc

SEQ ID NO: 1120248 - DNA, 15 bp, Homo sapiens
gccttaagtgctgtt

SEQ ID NO: 1120249 - DNA, 15 bp, Homo sapiens
tgccttaagtgctgt

SEQ ID NO: 1120250 - DNA, 15 bp, Homo sapiens
ttgccttaagtgctg

SEQ ID NO: 1120251 - DNA, 15 bp, Homo sapiens
attgccttaagtgct

SEQ ID NO: 1120252 - DNA, 15 bp, Homo sapiens
cattgccttaagtgc

SEQ ID NO: 1120253 - DNA, 15 bp, Homo sapiens
tcattgccttaagtg

SEQ ID NO: 1120254 - DNA, 15 bp, Homo sapiens
ctcattgccttaagt

SEQ ID NO: 1120255 - DNA, 15 bp, Homo sapiens
actcattgccttaag

SEQ ID NO: 1120256 - DNA, 15 bp, Homo sapiens
cactcattgccttaa

SEQ ID NO: 1120257 - DNA, 15 bp, Homo sapiens
tcactcattgcctta

SEQ ID NO: 1120258 - DNA, 15 bp, Homo sapiens
ttcactcattgcctt

SEQ ID NO: 1120259 - DNA, 15 bp, Homo sapiens
tttcactcattgcct

SEQ ID NO: 1120260 - DNA, 15 bp, Homo sapiens
ttttcactcattgcc

SEQ ID NO: 1120261 - DNA, 15 bp, Homo sapiens
cttttcactcattgc

SEQ ID NO: 1120262 - DNA, 15 bp, Homo sapiens
gcttttcactcattg

SEQ ID NO: 1120263 - DNA, 15 bp, Homo sapiens
ggcttttcactcatt

SEQ ID NO: 1120264 - DNA, 15 bp, Homo sapiens
tggcttttcactcat

SEQ ID NO: 1120265 - DNA, 15 bp, Homo sapiens
atggcttttcactca

SEQ ID NO: 1120266 - DNA, 15 bp, Homo sapiens
gatggcttttcactc

SEQ ID NO: 1120267 - DNA, 15 bp, Homo sapiens
tgatggcttttcact

SEQ ID NO: 1120268 - DNA, 15 bp, Homo sapiens
ctgatggcttttcac

SEQ ID NO: 1120269 - DNA, 15 bp, Homo sapiens
tctgatggcttttca

SEQ ID NO: 1120270 - DNA, 15 bp, Homo sapiens
atctgatggcttttc

SEQ ID NO: 1120271 - DNA, 15 bp, Homo sapiens
catctgatggctttt

SEQ ID NO: 1120272 - DNA, 15 bp, Homo sapiens
gcatctgatggcttt

SEQ ID NO: 1120273 - DNA, 15 bp, Homo sapiens
ggcatctgatggctt

SEQ ID NO: 1120274 - DNA, 15 bp, Homo sapiens
gggcatctgatggct

SEQ ID NO: 1120275 - DNA, 15 bp, Homo sapiens
tgggcatctgatggc

SEQ ID NO: 1120276 - DNA, 15 bp, Homo sapiens
ctgggcatctgatgg

SEQ ID NO: 1120277 - DNA, 15 bp, Homo sapiens
tctgggcatctgatg

SEQ ID NO: 1120278 - DNA, 15 bp, Homo sapiens
ctctgggcatctgat

SEQ ID NO: 1120279 - DNA, 15 bp, Homo sapiens
gctctgggcatctga

SEQ ID NO: 1120280 - DNA, 15 bp, Homo sapiens
tgctctgggcatctg

SEQ ID NO: 1120281 - DNA, 15 bp, Homo sapiens
ctgctctgggcatct

SEQ ID NO: 1120282 - DNA, 15 bp, Homo sapiens
gctgctctgggcatc

SEQ ID NO: 1120283 - DNA, 15 bp, Homo sapiens
tgctgctctgggcat

SEQ ID NO: 1120284 - DNA, 15 bp, Homo sapiens
gtgctgctctgggca

SEQ ID NO: 1120285 - DNA, 15 bp, Homo sapiens
ggtgctgctctgggc

SEQ ID NO: 1120286 - DNA, 15 bp, Homo sapiens
aggtgctgctctggg

SEQ ID NO: 1120287 - DNA, 15 bp, Homo sapiens
caggtgctgctctgg

SEQ ID NO: 1120288 - DNA, 15 bp, Homo sapiens
ccaggtgctgctctg

SEQ ID NO: 1120289 - DNA, 15 bp, Homo sapiens
gccaggtgctgctct

SEQ ID NO: 1120290 - DNA, 15 bp, Homo sapiens
tgccaggtgctgctc

SEQ ID NO: 1120291 - DNA, 15 bp, Homo sapiens
gtgccaggtgctgct

SEQ ID NO: 1120292 - DNA, 15 bp, Homo sapiens
cgtgccaggtgctgc

SEQ ID NO: 1120293 - DNA, 15 bp, Homo sapiens
acgtgccaggtgctg

SEQ ID NO: 1120294 - DNA, 15 bp, Homo sapiens
cacgtgccaggtgct

SEQ ID NO: 1120295 - DNA, 15 bp, Homo sapiens
ccacgtgccaggtgc

SEQ ID NO: 1120296 - DNA, 15 bp, Homo sapiens
gccacgtgccaggtg

SEQ ID NO: 1120297 - DNA, 15 bp, Homo sapiens
ggccacgtgccaggt

SEQ ID NO: 1120298 - DNA, 15 bp, Homo sapiens
gggccacgtgccagg

SEQ ID NO: 1120299 - DNA, 15 bp, Homo sapiens
ggggccacgtgccag

SEQ ID NO: 1120300 - DNA, 15 bp, Homo sapiens
gggggccacgtgcca

SEQ ID NO: 1120301 - DNA, 15 bp, Homo sapiens
tgggggccacgtgcc

SEQ ID NO: 1120302 - DNA, 15 bp, Homo sapiens
ctgggggccacgtgc

SEQ ID NO: 1120303 - DNA, 15 bp, Homo sapiens
gctgggggccacgtg

SEQ ID NO: 1120304 - DNA, 15 bp, Homo sapiens
agctgggggccacgt

SEQ ID NO: 1120305 - DNA, 15 bp, Homo sapiens
gagctgggggccacg

SEQ ID NO: 1120306 - DNA, 15 bp, Homo sapiens
agagctgggggccac

SEQ ID NO: 1120307 - DNA, 15 bp, Homo sapiens
cagagctgggggcca

SEQ ID NO: 1120308 - DNA, 15 bp, Homo sapiens
ccagagctgggggcc

SEQ ID NO: 1120309 - DNA, 15 bp, Homo sapiens
gccagagctgggggc

SEQ ID NO: 1120310 - DNA, 15 bp, Homo sapiens
ggccagagctggggg

SEQ ID NO: 1120311 - DNA, 15 bp, Homo sapiens
tggccagagctgggg

SEQ ID NO: 1120312 - DNA, 15 bp, Homo sapiens
ttggccagagctggg

SEQ ID NO: 1120313 - DNA, 15 bp, Homo sapiens
gttggccagagctgg

SEQ ID NO: 1120314 - DNA, 15 bp, Homo sapiens
tgttggccagagctg

SEQ ID NO: 1120315 - DNA, 15 bp, Homo sapiens
ctgttggccagagct

SEQ ID NO: 1120316 - DNA, 15 bp, Homo sapiens
tctgttggccagagc

SEQ ID NO: 1120317 - DNA, 15 bp, Homo sapiens
ttctgttggccagag

SEQ ID NO: 1120318 - DNA, 15 bp, Homo sapiens
tttctgttggccaga

SEQ ID NO: 1120319 - DNA, 15 bp, Homo sapiens
ctttctgttggccag

SEQ ID NO: 1120320 - DNA, 15 bp, Homo sapiens
gctttctgttggcca

SEQ ID NO: 1120321 - DNA, 15 bp, Homo sapiens
tgctttctgttggcc

SEQ ID NO: 1120322 - DNA, 15 bp, Homo sapiens
ctgctttctgttggc

SEQ ID NO: 1120323 - DNA, 15 bp, Homo sapiens
cctgctttctgttgg

SEQ ID NO: 1120324 - DNA, 15 bp, Homo sapiens
ccctgctttctgttg

SEQ ID NO: 1120325 - DNA, 15 bp, Homo sapiens
gccctgctttctgtt

SEQ ID NO: 1120326 - DNA, 15 bp, Homo sapiens
cgccctgctttctgt

SEQ ID NO: 1120327 - DNA, 15 bp, Homo sapiens
ccgccctgctttctg

SEQ ID NO: 1120328 - DNA, 15 bp, Homo sapiens
accgccctgctttct

SEQ ID NO: 1120329 - DNA, 15 bp, Homo sapiens
caccgccctgctttc

SEQ ID NO: 1120330 - DNA, 15 bp, Homo sapiens
ccaccgccctgcttt

SEQ ID NO: 1120331 - DNA, 15 bp, Homo sapiens
gccaccgccctgctt

SEQ ID NO: 1120332 - DNA, 15 bp, Homo sapiens
agccaccgccctgct

SEQ ID NO: 1120333 - DNA, 15 bp, Homo sapiens
cagccaccgccctgc

SEQ ID NO: 1120334 - DNA, 15 bp, Homo sapiens
acagccaccgccctg

SEQ ID NO: 1120335 - DNA, 15 bp, Homo sapiens
gacagccaccgccct

SEQ ID NO: 1120336 - DNA, 15 bp, Homo sapiens
tgacagccaccgccc

SEQ ID NO: 1120337 - DNA, 15 bp, Homo sapiens
ctgacagccaccgcc

SEQ ID NO: 1120338 - DNA, 15 bp, Homo sapiens
cctgacagccaccgc

SEQ ID NO: 1120339 - DNA, 15 bp, Homo sapiens
acctgacagccaccg

SEQ ID NO: 1120340 - DNA, 15 bp, Homo sapiens
cacctgacagccacc

SEQ ID NO: 1120341 - DNA, 15 bp, Homo sapiens
acacctgacagccac

SEQ ID NO: 1120342 - DNA, 15 bp, Homo sapiens
aacacctgacagcca

SEQ ID NO: 1120343 - DNA, 15 bp, Homo sapiens
gaacacctgacagcc

SEQ ID NO: 1120344 - DNA, 15 bp, Homo sapiens
agaacacctgacagc

SEQ ID NO: 1120345 - DNA, 15 bp, Homo sapiens
cagaacacctgacag

SEQ ID NO: 1120346 - DNA, 15 bp, Homo sapiens
tcagaacacctgaca

SEQ ID NO: 1120347 - DNA, 15 bp, Homo sapiens
ttcagaacacctgac

SEQ ID NO: 1120348 - DNA, 15 bp, Homo sapiens
attcagaacacctga

SEQ ID NO: 1120349 - DNA, 15 bp, Homo sapiens
aattcagaacacctg

SEQ ID NO: 1120350 - DNA, 15 bp, Homo sapiens
aaattcagaacacct

SEQ ID NO: 1120351 - DNA, 15 bp, Homo sapiens
aaaattcagaacacc

SEQ ID NO: 1120352 - DNA, 15 bp, Homo sapiens
gaaaattcagaacac

SEQ ID NO: 1120353 - DNA, 15 bp, Homo sapiens
tgaaaattcagaaca

SEQ ID NO: 1120354 - DNA, 15 bp, Homo sapiens
ttgaaaattcagaac

SEQ ID NO: 1120355 - DNA, 15 bp, Homo sapiens
cttgaaaattcagaa

SEQ ID NO: 1120356 - DNA, 15 bp, Homo sapiens
tcttgaaaattcaga

SEQ ID NO: 1120357 - DNA, 15 bp, Homo sapiens
atcttgaaaattcag

SEQ ID NO: 1120358 - DNA, 15 bp, Homo sapiens
tatcttgaaaattca

SEQ ID NO: 1120359 - DNA, 15 bp, Homo sapiens
ttatcttgaaaattc

SEQ ID NO: 1120360 - DNA, 15 bp, Homo sapiens
tttatcttgaaaatt

SEQ ID NO: 1120361 - DNA, 15 bp, Homo sapiens
gtttatcttgaaaat

SEQ ID NO: 1120362 - DNA, 15 bp, Homo sapiens
ggtttatcttgaaaa

SEQ ID NO: 1120363 - DNA, 15 bp, Homo sapiens
tggtttatcttgaaa

SEQ ID NO: 1120364 - DNA, 15 bp, Homo sapiens
ctggtttatcttgaa

SEQ ID NO: 1120365 - DNA, 15 bp, Homo sapiens
tctggtttatcttga

SEQ ID NO: 1120366 - DNA, 15 bp, Homo sapiens
ttctggtttatcttg

SEQ ID NO: 1120367 - DNA, 15 bp, Homo sapiens
attctggtttatctt

SEQ ID NO: 1120368 - DNA, 15 bp, Homo sapiens
aattctggtttatct

SEQ ID NO: 1120369 - DNA, 15 bp, Homo sapiens
aaattctggtttatc

SEQ ID NO: 1120370 - DNA, 15 bp, Homo sapiens
aaaattctggtttat

SEQ ID NO: 1120371 - DNA, 15 bp, Homo sapiens
caaaattctggttta

SEQ ID NO: 1120372 - DNA, 15 bp, Homo sapiens
ccaaaattctggttt

SEQ ID NO: 1120373 - DNA, 15 bp, Homo sapiens
tccaaaattctggtt

SEQ ID NO: 1120374 - DNA, 15 bp, Homo sapiens
atccaaaattctggt

SEQ ID NO: 1120375 - DNA, 15 bp, Homo sapiens
aatccaaaattctgg

SEQ ID NO: 1120376 - DNA, 15 bp, Homo sapiens
gaatccaaaattctg

SEQ ID NO: 1120377 - DNA, 15 bp, Homo sapiens
agaatccaaaattct

SEQ ID NO: 1120378 - DNA, 15 bp, Homo sapiens
aagaatccaaaattc

SEQ ID NO: 1120379 - DNA, 15 bp, Homo sapiens
aaagaatccaaaatt

SEQ ID NO: 1120380 - DNA, 15 bp, Homo sapiens
caaagaatccaaaat

SEQ ID NO: 1120381 - DNA, 15 bp, Homo sapiens
ccaaagaatccaaaa

SEQ ID NO: 1120382 - DNA, 15 bp, Homo sapiens
accaaagaatccaaa

SEQ ID NO: 1120383 - DNA, 15 bp, Homo sapiens
caccaaagaatccaa

SEQ ID NO: 1120384 - DNA, 15 bp, Homo sapiens
acaccaaagaatcca

SEQ ID NO: 1120385 - DNA, 15 bp, Homo sapiens
tacaccaaagaatcc

SEQ ID NO: 1120386 - DNA, 15 bp, Homo sapiens
ttacaccaaagaatc

SEQ ID NO: 1120387 - DNA, 15 bp, Homo sapiens
attacaccaaagaat

SEQ ID NO: 1120388 - DNA, 15 bp, Homo sapiens
gattacaccaaagaa

SEQ ID NO: 1120389 - DNA, 15 bp, Homo sapiens
agattacaccaaaga

SEQ ID NO: 1120390 - DNA, 15 bp, Homo sapiens
gagattacaccaaag

SEQ ID NO: 1120391 - DNA, 15 bp, Homo sapiens
ggagattacaccaaa

SEQ ID NO: 1120392 - DNA, 15 bp, Homo sapiens
aggagattacaccaa

SEQ ID NO: 1120393 - DNA, 15 bp, Homo sapiens
taggagattacacca

SEQ ID NO: 1120394 - DNA, 15 bp, Homo sapiens
ttaggagattacacc

SEQ ID NO: 1120395 - DNA, 15 bp, Homo sapiens
attaggagattacac

SEQ ID NO: 1120396 - DNA, 15 bp, Homo sapiens
aattaggagattaca

SEQ ID NO: 1120397 - DNA, 15 bp, Homo sapiens
gaattaggagattac

SEQ ID NO: 1120398 - DNA, 15 bp, Homo sapiens
agaattaggagatta

SEQ ID NO: 1120399 - DNA, 15 bp, Homo sapiens
aagaattaggagatt

SEQ ID NO: 1120400 - DNA, 15 bp, Homo sapiens
taagaattaggagat

SEQ ID NO: 1120401 - DNA, 15 bp, Homo sapiens
ttaagaattaggaga

SEQ ID NO: 1120402 - DNA, 15 bp, Homo sapiens
tttaagaattaggag

SEQ ID NO: 1120403 - DNA, 15 bp, Homo sapiens
atttaagaattagga

SEQ ID NO: 1120404 - DNA, 15 bp, Homo sapiens
aatttaagaattagg

SEQ ID NO: 1120405 - DNA, 15 bp, Homo sapiens
aaatttaagaattag

SEQ ID NO: 1120406 - DNA, 15 bp, Homo sapiens
aaaatttaagaatta

SEQ ID NO: 1120407 - DNA, 15 bp, Homo sapiens
caaaatttaagaatt

SEQ ID NO: 1120408 - DNA, 15 bp, Homo sapiens
ccaaaatttaagaat

SEQ ID NO: 1120409 - DNA, 15 bp, Homo sapiens
accaaaatttaagaa

SEQ ID NO: 1120410 - DNA, 15 bp, Homo sapiens
aaccaaaatttaaga

SEQ ID NO: 1120411 - DNA, 15 bp, Homo sapiens
caaccaaaatttaag

SEQ ID NO: 1120412 - DNA, 15 bp, Homo sapiens
gcaaccaaaatttaa

SEQ ID NO: 1120413 - DNA, 15 bp, Homo sapiens
agcaaccaaaattta

SEQ ID NO: 1120414 - DNA, 15 bp, Homo sapiens
cagcaaccaaaattt

SEQ ID NO: 1120415 - DNA, 15 bp, Homo sapiens
tcagcaaccaaaatt

SEQ ID NO: 1120416 - DNA, 15 bp, Homo sapiens
atcagcaaccaaaat

SEQ ID NO: 1120417 - DNA, 15 bp, Homo sapiens
aatcagcaaccaaaa

SEQ ID NO: 1120418 - DNA, 15 bp, Homo sapiens
gaatcagcaaccaaa

SEQ ID NO: 1120419 - DNA, 15 bp, Homo sapiens
tgaatcagcaaccaa

SEQ ID NO: 1120420 - DNA, 15 bp, Homo sapiens
ctgaatcagcaacca

SEQ ID NO: 1120421 - DNA, 15 bp, Homo sapiens
tctgaatcagcaacc

SEQ ID NO: 1120422 - DNA, 15 bp, Homo sapiens
atctgaatcagcaac

SEQ ID NO: 1120423 - DNA, 15 bp, Homo sapiens
aatctgaatcagcaa

SEQ ID NO: 1120424 - DNA, 15 bp, Homo sapiens
aaatctgaatcagca

SEQ ID NO: 1120425 - DNA, 15 bp, Homo sapiens
gaaatctgaatcagc

SEQ ID NO: 1120426 - DNA, 15 bp, Homo sapiens
agaaatctgaatcag

SEQ ID NO: 1120427 - DNA, 15 bp, Homo sapiens
aagaaatctgaatca

SEQ ID NO: 1120428 - DNA, 15 bp, Homo sapiens
aaagaaatctgaatc

SEQ ID NO: 1120429 - DNA, 15 bp, Homo sapiens
aaaagaaatctgaat

SEQ ID NO: 1120430 - DNA, 15 bp, Homo sapiens
aaaaagaaatctgaa

SEQ ID NO: 1120431 - DNA, 15 bp, Homo sapiens
aaaaaagaaatctga

SEQ ID NO: 1120432 - DNA, 15 bp, Homo sapiens
taaaaaaagaaatct

SEQ ID NO: 1120433 - DNA, 15 bp, Homo sapiens
ttaaaaaaagaaatc

SEQ ID NO: 1120434 - DNA, 15 bp, Homo sapiens
tttaaaaaaagaaat

SEQ ID NO: 1120435 - DNA, 15 bp, Homo sapiens
ttttaaaaaaagaaa

SEQ ID NO: 1120436 - DNA, 15 bp, Homo sapiens
gattttaaaaaaaga

SEQ ID NO: 1120437 - DNA, 15 bp, Homo sapiens
ggattttaaaaaaag

SEQ ID NO: 1120438 - DNA, 15 bp, Homo sapiens
aggattttaaaaaaa

SEQ ID NO: 1120439 - DNA, 15 bp, Homo sapiens
aaggattttaaaaaa

SEQ ID NO: 1120440 - DNA, 15 bp, Homo sapiens
aaaggattttaaaaa

SEQ ID NO: 1120441 - DNA, 15 bp, Homo sapiens
taaaggattttaaaa

SEQ ID NO: 1120442 - DNA, 15 bp, Homo sapiens
ttaaaggattttaaa

SEQ ID NO: 1120443 - DNA, 15 bp, Homo sapiens
cttaaaggattttaa

SEQ ID NO: 1120444 - DNA, 15 bp, Homo sapiens
gcttaaaggatttta

SEQ ID NO: 1120445 - DNA, 15 bp, Homo sapiens
ggcttaaaggatttt

SEQ ID NO: 1120446 - DNA, 15 bp, Homo sapiens
tggcttaaaggattt

SEQ ID NO: 1120447 - DNA, 15 bp, Homo sapiens
ttggcttaaaggatt

SEQ ID NO: 1120448 - DNA, 15 bp, Homo sapiens
tttggcttaaaggat

SEQ ID NO: 1120449 - DNA, 15 bp, Homo sapiens
atttggcttaaagga

SEQ ID NO: 1120450 - DNA, 15 bp, Homo sapiens
tatttggcttaaagg

SEQ ID NO: 1120451 - DNA, 15 bp, Homo sapiens
ctatttggcttaaag

SEQ ID NO: 1120452 - DNA, 15 bp, Homo sapiens
tctatttggcttaaa

SEQ ID NO: 1120453 - DNA, 15 bp, Homo sapiens
ttctatttggcttaa

SEQ ID NO: 1120454 - DNA, 15 bp, Homo sapiens
attctatttggctta

SEQ ID NO: 1120455 - DNA, 15 bp, Homo sapiens
tattctatttggctt

SEQ ID NO: 1120456 - DNA, 15 bp, Homo sapiens
gtattctatttggct

SEQ ID NO: 1120457 - DNA, 15 bp, Homo sapiens
tgtattctatttggc

SEQ ID NO: 1120458 - DNA, 15 bp, Homo sapiens
ctgtattctatttgg

SEQ ID NO: 1120459 - DNA, 15 bp, Homo sapiens
gctgtattctatttg

SEQ ID NO: 1120460 - DNA, 15 bp, Homo sapiens
agctgtattctattt

SEQ ID NO: 1120461 - DNA, 15 bp, Homo sapiens
tagctgtattctatt

SEQ ID NO: 1120462 - DNA, 15 bp, Homo sapiens
atagctgtattctat

SEQ ID NO: 1120463 - DNA, 15 bp, Homo sapiens
catagctgtattcta

SEQ ID NO: 1120464 - DNA, 15 bp, Homo sapiens
ccatagctgtattct

SEQ ID NO: 1120465 - DNA, 15 bp, Homo sapiens
gccatagctgtattc

SEQ ID NO: 1120466 - DNA, 15 bp, Homo sapiens
ggccatagctgtatt

SEQ ID NO: 1120467 - DNA, 15 bp, Homo sapiens
tggccatagctgtat

SEQ ID NO: 1120468 - DNA, 15 bp, Homo sapiens
ctggccatagctgta

SEQ ID NO: 1120469 - DNA, 15 bp, Homo sapiens
tctggccatagctgt

SEQ ID NO: 1120470 - DNA, 15 bp, Homo sapiens
gtctggccatagctg

SEQ ID NO: 1120471 - DNA, 15 bp, Homo sapiens
tgtctggccatagct

SEQ ID NO: 1120472 - DNA, 15 bp, Homo sapiens
atgtctggccatagc

SEQ ID NO: 1120473 - DNA, 15 bp, Homo sapiens
catgtctggccatag

SEQ ID NO: 1120474 - DNA, 15 bp, Homo sapiens
ccatgtctggccata

SEQ ID NO: 1120475 - DNA, 15 bp, Homo sapiens
gccatgtctggccat

SEQ ID NO: 1120476 - DNA, 15 bp, Homo sapiens
tgccatgtctggcca

SEQ ID NO: 1120477 - DNA, 15 bp, Homo sapiens
ttgccatgtctggcc

SEQ ID NO: 1120478 - DNA, 15 bp, Homo sapiens
attgccatgtctggc

SEQ ID NO: 1120479 - DNA, 15 bp, Homo sapiens
gattgccatgtctgg

SEQ ID NO: 1120480 - DNA, 15 bp, Homo sapiens
tgattgccatgtctg

SEQ ID NO: 1120481 - DNA, 15 bp, Homo sapiens
ctgattgccatgtct

SEQ ID NO: 1120482 - DNA, 15 bp, Homo sapiens
tctgattgccatgtc

SEQ ID NO: 1120483 - DNA, 15 bp, Homo sapiens
ttctgattgccatgt

SEQ ID NO: 1120484 - DNA, 15 bp, Homo sapiens
attctgattgccatg

SEQ ID NO: 1120485 - DNA, 15 bp, Homo sapiens
tattctgattgccat

SEQ ID NO: 1120486 - DNA, 15 bp, Homo sapiens
ctattctgattgcca

SEQ ID NO: 1120487 - DNA, 15 bp, Homo sapiens
cctattctgattgcc

SEQ ID NO: 1120488 - DNA, 15 bp, Homo sapiens
ccctattctgattgc

SEQ ID NO: 1120489 - DNA, 15 bp, Homo sapiens
gccctattctgattg

SEQ ID NO: 1120490 - DNA, 15 bp, Homo sapiens
tgccctattctgatt

SEQ ID NO: 1120491 - DNA, 15 bp, Homo sapiens
gtgccctattctgat

SEQ ID NO: 1120492 - DNA, 15 bp, Homo sapiens
tgtgccctattctga

SEQ ID NO: 1120493 - DNA, 15 bp, Homo sapiens
gtgtgccctattctg

SEQ ID NO: 1120494 - DNA, 15 bp, Homo sapiens
agtgtgccctattct

SEQ ID NO: 1120495 - DNA, 15 bp, Homo sapiens
cagtgtgccctattc

SEQ ID NO: 1120496 - DNA, 15 bp, Homo sapiens
gcagtgtgccctatt

SEQ ID NO: 1120497 - DNA, 15 bp, Homo sapiens
ggcagtgtgccctat

SEQ ID NO: 1120498 - DNA, 15 bp, Homo sapiens
aggcagtgtgcccta

SEQ ID NO: 1120499 - DNA, 15 bp, Homo sapiens
caggcagtgtgccct

SEQ ID NO: 1120500 - DNA, 15 bp, Homo sapiens
tcaggcagtgtgccc

SEQ ID NO: 1120501 - DNA, 15 bp, Homo sapiens
atcaggcagtgtgcc

SEQ ID NO: 1120502 - DNA, 15 bp, Homo sapiens
aatcaggcagtgtgc

SEQ ID NO: 1120503 - DNA, 15 bp, Homo sapiens
aaatcaggcagtgtg

SEQ ID NO: 1120504 - DNA, 15 bp, Homo sapiens
gaaatcaggcagtgt

SEQ ID NO: 1120505 - DNA, 15 bp, Homo sapiens
tgaaatcaggcagtg

SEQ ID NO: 1120506 - DNA, 15 bp, Homo sapiens
ctgaaatcaggcagt

SEQ ID NO: 1120507 - DNA, 15 bp, Homo sapiens
cctgaaatcaggcag

SEQ ID NO: 1120508 - DNA, 15 bp, Homo sapiens
ccctgaaatcaggca

SEQ ID NO: 1120509 - DNA, 15 bp, Homo sapiens
tccctgaaatcaggc

SEQ ID NO: 1120510 - DNA, 15 bp, Homo sapiens
atccctgaaatcagg

SEQ ID NO: 1120511 - DNA, 15 bp, Homo sapiens
gatccctgaaatcag

SEQ ID NO: 1120512 - DNA, 15 bp, Homo sapiens
ggatccctgaaatca

SEQ ID NO: 1120513 - DNA, 15 bp, Homo sapiens
gggatccctgaaatc

SEQ ID NO: 1120514 - DNA, 15 bp, Homo sapiens
ggggatccctgaaat

SEQ ID NO: 1120515 - DNA, 15 bp, Homo sapiens
gggggatccctgaaa

SEQ ID NO: 1120516 - DNA, 15 bp, Homo sapiens
agggggatccctgaa

SEQ ID NO: 1120517 - DNA, 15 bp, Homo sapiens
cagggggatccctga

SEQ ID NO: 1120518 - DNA, 15 bp, Homo sapiens
gcagggggatccctg

SEQ ID NO: 1120519 - DNA, 15 bp, Homo sapiens
ggcagggggatccct

SEQ ID NO: 1120520 - DNA, 15 bp, Homo sapiens
aggcagggggatccc

SEQ ID NO: 1120521 - DNA, 15 bp, Homo sapiens
gaggcagggggatcc

SEQ ID NO: 1120522 - DNA, 15 bp, Homo sapiens
tgaggcagggggatc

SEQ ID NO: 1120523 - DNA, 15 bp, Homo sapiens
atgaggcagggggat

SEQ ID NO: 1120524 - DNA, 15 bp, Homo sapiens
aatgaggcaggggga

SEQ ID NO: 1120525 - DNA, 15 bp, Homo sapiens
aaatgaggcaggggg

SEQ ID NO: 1120526 - DNA, 15 bp, Homo sapiens
gaaatgaggcagggg

SEQ ID NO: 1120527 - DNA, 15 bp, Homo sapiens
agaaatgaggcaggg

SEQ ID NO: 1120528 - DNA, 15 bp, Homo sapiens
cagaaatgaggcagg

SEQ ID NO: 1120529 - DNA, 15 bp, Homo sapiens
tcagaaatgaggcag

SEQ ID NO: 1120530 - DNA, 15 bp, Homo sapiens
ctcagaaatgaggca

SEQ ID NO: 1120531 - DNA, 15 bp, Homo sapiens
actcagaaatgaggc

SEQ ID NO: 1120532 - DNA, 15 bp, Homo sapiens
cactcagaaatgagg

SEQ ID NO: 1120533 - DNA, 15 bp, Homo sapiens
ccactcagaaatgag

SEQ ID NO: 1120534 - DNA, 15 bp, Homo sapiens
gccactcagaaatga

SEQ ID NO: 1120535 - DNA, 15 bp, Homo sapiens
cgccactcagaaatg

SEQ ID NO: 1120536 - DNA, 15 bp, Homo sapiens
gcgccactcagaaat

SEQ ID NO: 1120537 - DNA, 15 bp, Homo sapiens
agcgccactcagaaa

SEQ ID NO: 1120538 - DNA, 15 bp, Homo sapiens
cagcgccactcagaa

SEQ ID NO: 1120539 - DNA, 15 bp, Homo sapiens
gcagcgccactcaga

SEQ ID NO: 1120540 - DNA, 15 bp, Homo sapiens
agcagcgccactcag

SEQ ID NO: 1120541 - DNA, 15 bp, Homo sapiens
cagcagcgccactca

SEQ ID NO: 1120542 - DNA, 15 bp, Homo sapiens
gcagcagcgccactc

SEQ ID NO: 1120543 - DNA, 15 bp, Homo sapiens
agcagcagcgccact

SEQ ID NO: 1120544 - DNA, 15 bp, Homo sapiens
aagcagcagcgccac

SEQ ID NO: 1120545 - DNA, 15 bp, Homo sapiens
caagcagcagcgcca

SEQ ID NO: 1120546 - DNA, 15 bp, Homo sapiens
ccaagcagcagcgcc

SEQ ID NO: 1120547 - DNA, 15 bp, Homo sapiens
tccaagcagcagcgc

SEQ ID NO: 1120548 - DNA, 15 bp, Homo sapiens
ctccaagcagcagcg

SEQ ID NO: 1120549 - DNA, 15 bp, Homo sapiens
actccaagcagcagc

SEQ ID NO: 1120550 - DNA, 15 bp, Homo sapiens
gactccaagcagcag

SEQ ID NO: 1120551 - DNA, 15 bp, Homo sapiens
ggactccaagcagca

SEQ ID NO: 1120552 - DNA, 15 bp, Homo sapiens
aggactccaagcagc

SEQ ID NO: 1120553 - DNA, 15 bp, Homo sapiens
gaggactccaagcag

SEQ ID NO: 1120554 - DNA, 15 bp, Homo sapiens
tgaggactccaagca

SEQ ID NO: 1120555 - DNA, 15 bp, Homo sapiens
ctgaggactccaagc

SEQ ID NO: 1120556 - DNA, 15 bp, Homo sapiens
gctgaggactccaag

SEQ ID NO: 1120557 - DNA, 15 bp, Homo sapiens
cgctgaggactccaa

SEQ ID NO: 1120558 - DNA, 15 bp, Homo sapiens
gcgctgaggactcca

SEQ ID NO: 1120559 - DNA, 15 bp, Homo sapiens
agcgctgaggactcc

SEQ ID NO: 1120560 - DNA, 15 bp, Homo sapiens
cagcgctgaggactc

SEQ ID NO: 1120561 - DNA, 15 bp, Homo sapiens
tcagcgctgaggact

SEQ ID NO: 1120562 - DNA, 15 bp, Homo sapiens
ctcagcgctgaggac

SEQ ID NO: 1120563 - DNA, 15 bp, Homo sapiens
actcagcgctgagga

SEQ ID NO: 1120564 - DNA, 15 bp, Homo sapiens
gactcagcgctgagg

SEQ ID NO: 1120565 - DNA, 15 bp, Homo sapiens
ggactcagcgctgag

SEQ ID NO: 1120566 - DNA, 15 bp, Homo sapiens
gggactcagcgctga

SEQ ID NO: 1120567 - DNA, 15 bp, Homo sapiens
agggactcagcgctg

SEQ ID NO: 1120568 - DNA, 15 bp, Homo sapiens
tagggactcagcgct

SEQ ID NO: 1120569 - DNA, 15 bp, Homo sapiens
atagggactcagcgc

SEQ ID NO: 1120570 - DNA, 15 bp, Homo sapiens
catagggactcagcg

SEQ ID NO: 1120571 - DNA, 15 bp, Homo sapiens
tcatagggactcagc

SEQ ID NO: 1120572 - DNA, 15 bp, Homo sapiens
ctcatagggactcag

SEQ ID NO: 1120573 - DNA, 15 bp, Homo sapiens
tctcatagggactca

SEQ ID NO: 1120574 - DNA, 15 bp, Homo sapiens
ctctcatagggactc

SEQ ID NO: 1120575 - DNA, 15 bp, Homo sapiens
tctctcatagggact

SEQ ID NO: 1120576 - DNA, 15 bp, Homo sapiens
ctctctcatagggac

SEQ ID NO: 1120577 - DNA, 15 bp, Homo sapiens
gctctctcataggga

SEQ ID NO: 1120578 - DNA, 15 bp, Homo sapiens
ggctctctcataggg

SEQ ID NO: 1120579 - DNA, 15 bp, Homo sapiens
cggctctctcatagg

SEQ ID NO: 1120580 - DNA, 15 bp, Homo sapiens
ccggctctctcatag

SEQ ID NO: 1120581 - DNA, 15 bp, Homo sapiens
cccggctctctcata

SEQ ID NO: 1120582 - DNA, 15 bp, Homo sapiens
acccggctctctcat

SEQ ID NO: 1120583 - DNA, 15 bp, Homo sapiens
aacccggctctctca

SEQ ID NO: 1120584 - DNA, 15 bp, Homo sapiens
gaacccggctctctc

SEQ ID NO: 1120585 - DNA, 15 bp, Homo sapiens
tgaacccggctctct

SEQ ID NO: 1120586 - DNA, 15 bp, Homo sapiens
gtgaacccggctctc

SEQ ID NO: 1120587 - DNA, 15 bp, Homo sapiens
ggtgaacccggctct

SEQ ID NO: 1120588 - DNA, 15 bp, Homo sapiens
gggtgaacccggctc

SEQ ID NO: 1120589 - DNA, 15 bp, Homo sapiens
agggtgaacccggct

SEQ ID NO: 1120590 - DNA, 15 bp, Homo sapiens
cagggtgaacccggc

SEQ ID NO: 1120591 - DNA, 15 bp, Homo sapiens
ccagggtgaacccgg

SEQ ID NO: 1120592 - DNA, 15 bp, Homo sapiens
accagggtgaacccg

SEQ ID NO: 1120593 - DNA, 15 bp, Homo sapiens
caccagggtgaaccc

SEQ ID NO: 1120594 - DNA, 15 bp, Homo sapiens
gcaccagggtgaacc

SEQ ID NO: 1120595 - DNA, 15 bp, Homo sapiens
tgcaccagggtgaac

SEQ ID NO: 1120596 - DNA, 15 bp, Homo sapiens
ctgcaccagggtgaa

SEQ ID NO: 1120597 - DNA, 15 bp, Homo sapiens
tctgcaccagggtga

SEQ ID NO: 1120598 - DNA, 15 bp, Homo sapiens
ttctgcaccagggtg

SEQ ID NO: 1120599 - DNA, 15 bp, Homo sapiens
tttctgcaccagggt

SEQ ID NO: 1120600 - DNA, 15 bp, Homo sapiens
ctttctgcaccaggg

SEQ ID NO: 1120601 - DNA, 15 bp, Homo sapiens
tctttctgcaccagg

SEQ ID NO: 1120602 - DNA, 15 bp, Homo sapiens
ctctttctgcaccag

SEQ ID NO: 1120603 - DNA, 15 bp, Homo sapiens
tctctttctgcacca

SEQ ID NO: 1120604 - DNA, 15 bp, Homo sapiens
gtctctttctgcacc

SEQ ID NO: 1120605 - DNA, 15 bp, Homo sapiens
agtctctttctgcac

SEQ ID NO: 1120606 - DNA, 15 bp, Homo sapiens
cagtctctttctgca

SEQ ID NO: 1120607 - DNA, 15 bp, Homo sapiens
gcagtctctttctgc

SEQ ID NO: 1120608 - DNA, 15 bp, Homo sapiens
tgcagtctctttctg

SEQ ID NO: 1120609 - DNA, 15 bp, Homo sapiens
gtgcagtctctttct

SEQ ID NO: 1120610 - DNA, 15 bp, Homo sapiens
tgtgcagtctctttc

SEQ ID NO: 1120611 - DNA, 15 bp, Homo sapiens
ctgtgcagtctcttt

SEQ ID NO: 1120612 - DNA, 15 bp, Homo sapiens
cctgtgcagtctctt

SEQ ID NO: 1120613 - DNA, 15 bp, Homo sapiens
acctgtgcagtctct

SEQ ID NO: 1120614 - DNA, 15 bp, Homo sapiens
cacctgtgcagtctc

SEQ ID NO: 1120615 - DNA, 15 bp, Homo sapiens
gcacctgtgcagtct

SEQ ID NO: 1120616 - DNA, 15 bp, Homo sapiens
tgcacctgtgcagtc

SEQ ID NO: 1120617 - DNA, 15 bp, Homo sapiens
ctgcacctgtgcagt

SEQ ID NO: 1120618 - DNA, 15 bp, Homo sapiens
actgcacctgtgcag

SEQ ID NO: 1120619 - DNA, 15 bp, Homo sapiens
tactgcacctgtgca

SEQ ID NO: 1120620 - DNA, 15 bp, Homo sapiens
gtactgcacctgtgc

SEQ ID NO: 1120621 - DNA, 15 bp, Homo sapiens
tgtactgcacctgtg

SEQ ID NO: 1120622 - DNA, 15 bp, Homo sapiens
gtgtactgcacctgt

SEQ ID NO: 1120623 - DNA, 15 bp, Homo sapiens
tgtgtactgcacctg

SEQ ID NO: 1120624 - DNA, 15 bp, Homo sapiens
gtgtgtactgcacct

SEQ ID NO: 1120625 - DNA, 15 bp, Homo sapiens
tgtgtgtactgcacc

SEQ ID NO: 1120626 - DNA, 15 bp, Homo sapiens
gtgtgtgtactgcac

SEQ ID NO: 1120627 - DNA, 15 bp, Homo sapiens
tgtgtgtgtactgca

SEQ ID NO: 1120628 - DNA, 15 bp, Homo sapiens
gtgtgtgtgtactgc

SEQ ID NO: 1120629 - DNA, 15 bp, Homo sapiens
tgtgtgtgtgtactg

SEQ ID NO: 1120630 - DNA, 15 bp, Homo sapiens
gtgtgtgtgtgtact

SEQ ID NO: 1120631 - DNA, 15 bp, Homo sapiens
ggtgtgtgtgtgtac

SEQ ID NO: 1120632 - DNA, 15 bp, Homo sapiens
tggtgtgtgtgtgta

SEQ ID NO: 1120633 - DNA, 15 bp, Homo sapiens
gtggtgtgtgtgtgt

SEQ ID NO: 1120634 - DNA, 15 bp, Homo sapiens
agtggtgtgtgtgtg

SEQ ID NO: 1120635 - DNA, 15 bp, Homo sapiens
gagtggtgtgtgtgt

SEQ ID NO: 1120636 - DNA, 15 bp, Homo sapiens
agagtggtgtgtgtg

SEQ ID NO: 1120637 - DNA, 15 bp, Homo sapiens
tagagtggtgtgtgt

SEQ ID NO: 1120638 - DNA, 15 bp, Homo sapiens
gtagagtggtgtgtg

SEQ ID NO: 1120639 - DNA, 15 bp, Homo sapiens
tgtagagtggtgtgt

SEQ ID NO: 1120640 - DNA, 15 bp, Homo sapiens
ctgtagagtggtgtg

SEQ ID NO: 1120641 - DNA, 15 bp, Homo sapiens
tctgtagagtggtgt

SEQ ID NO: 1120642 - DNA, 15 bp, Homo sapiens
ttctgtagagtggtg

SEQ ID NO: 1120643 - DNA, 15 bp, Homo sapiens
tttctgtagagtggt

SEQ ID NO: 1120644 - DNA, 15 bp, Homo sapiens
atttctgtagagtgg

SEQ ID NO: 1120645 - DNA, 15 bp, Homo sapiens
gatttctgtagagtg

SEQ ID NO: 1120646 - DNA, 15 bp, Homo sapiens
tgatttctgtagagt

SEQ ID NO: 1120647 - DNA, 15 bp, Homo sapiens
gtgatttctgtagag

SEQ ID NO: 1120648 - DNA, 15 bp, Homo sapiens
tgtgatttctgtaga

SEQ ID NO: 1120649 - DNA, 15 bp, Homo sapiens
gtgtgatttctgtag

SEQ ID NO: 1120650 - DNA, 15 bp, Homo sapiens
tgtgtgatttctgta

SEQ ID NO: 1120651 - DNA, 15 bp, Homo sapiens
gtgtgtgatttctgt

SEQ ID NO: 1120652 - DNA, 15 bp, Homo sapiens
agtgtgtgatttctg

SEQ ID NO: 1120653 - DNA, 15 bp, Homo sapiens
tagtgtgtgatttct

SEQ ID NO: 1120654 - DNA, 15 bp, Homo sapiens
gtagtgtgtgatttc

SEQ ID NO: 1120655 - DNA, 15 bp, Homo sapiens
tgtagtgtgtgattt

SEQ ID NO: 1120656 - DNA, 15 bp, Homo sapiens
gtgtagtgtgtgatt

SEQ ID NO: 1120657 - DNA, 15 bp, Homo sapiens
tgtgtagtgtgtgat

SEQ ID NO: 1120658 - DNA, 15 bp, Homo sapiens
gtgtgtagtgtgtga

SEQ ID NO: 1120659 - DNA, 15 bp, Homo sapiens
agtgtgtagtgtgtg

SEQ ID NO: 1120660 - DNA, 15 bp, Homo sapiens
cagtgtgtagtgtgt

SEQ ID NO: 1120661 - DNA, 15 bp, Homo sapiens
gcagtgtgtagtgtg

SEQ ID NO: 1120662 - DNA, 15 bp, Homo sapiens
tgcagtgtgtagtgt

SEQ ID NO: 1120663 - DNA, 15 bp, Homo sapiens
gtgcagtgtgtagtg

SEQ ID NO: 1120664 - DNA, 15 bp, Homo sapiens
tgtgcagtgtgtagt

SEQ ID NO: 1120665 - DNA, 15 bp, Homo sapiens
gtgtgcagtgtgtag

SEQ ID NO: 1120666 - DNA, 15 bp, Homo sapiens
agtgtgcagtgtgta

SEQ ID NO: 1120667 - DNA, 15 bp, Homo sapiens
gagtgtgcagtgtgt

SEQ ID NO: 1120668 - DNA, 15 bp, Homo sapiens
agagtgtgcagtgtg

SEQ ID NO: 1120669 - DNA, 15 bp, Homo sapiens
tagagtgtgcagtgt

SEQ ID NO: 1120670 - DNA, 15 bp, Homo sapiens
gtagagtgtgcagtg

SEQ ID NO: 1120671 - DNA, 15 bp, Homo sapiens
ggtagagtgtgcagt

SEQ ID NO: 1120672 - DNA, 15 bp, Homo sapiens
aggtagagtgtgcag

SEQ ID NO: 1120673 - DNA, 15 bp, Homo sapiens
taggtagagtgtgca

SEQ ID NO: 1120674 - DNA, 15 bp, Homo sapiens
gtaggtagagtgtgc

SEQ ID NO: 1120675 - DNA, 15 bp, Homo sapiens
tgtaggtagagtgtg

SEQ ID NO: 1120676 - DNA, 15 bp, Homo sapiens
gtgtaggtagagtgt

SEQ ID NO: 1120677 - DNA, 15 bp, Homo sapiens
tgtgtaggtagagtg

SEQ ID NO: 1120678 - DNA, 15 bp, Homo sapiens
gtgtgtaggtagagt

SEQ ID NO: 1120679 - DNA, 15 bp, Homo sapiens
agtgtgtaggtagag

SEQ ID NO: 1120680 - DNA, 15 bp, Homo sapiens
tagtgtgtaggtaga

SEQ ID NO: 1120681 - DNA, 15 bp, Homo sapiens
gtagtgtgtaggtag

SEQ ID NO: 1120682 - DNA, 15 bp, Homo sapiens
ggtagtgtgtaggta

SEQ ID NO: 1120683 - DNA, 15 bp, Homo sapiens
gggtagtgtgtaggt

SEQ ID NO: 1120684 - DNA, 15 bp, Homo sapiens
tgggtagtgtgtagg

SEQ ID NO: 1120685 - DNA, 15 bp, Homo sapiens
gtgggtagtgtgtag

SEQ ID NO: 1120686 - DNA, 15 bp, Homo sapiens
tgtgggtagtgtgta

SEQ ID NO: 1120687 - DNA, 15 bp, Homo sapiens
gtgtgggtagtgtgt

SEQ ID NO: 1120688 - DNA, 15 bp, Homo sapiens
tgtgtgggtagtgtg

SEQ ID NO: 1120689 - DNA, 15 bp, Homo sapiens
gtgtgtgggtagtgt

SEQ ID NO: 1120690 - DNA, 15 bp, Homo sapiens
ggtgtgtgggtagtg

SEQ ID NO: 1120691 - DNA, 15 bp, Homo sapiens
tggtgtgtgggtagt

SEQ ID NO: 1120692 - DNA, 15 bp, Homo sapiens
gtggtgtgtgggtag

SEQ ID NO: 1120693 - DNA, 15 bp, Homo sapiens
tgtggtgtgtgggta

SEQ ID NO: 1120694 - DNA, 15 bp, Homo sapiens
gtgtggtgtgtgggt

SEQ ID NO: 1120695 - DNA, 15 bp, Homo sapiens
tgtgtggtgtgtggg

SEQ ID NO: 1120696 - DNA, 15 bp, Homo sapiens
gtgtgtggtgtgtgg

SEQ ID NO: 1120697 - DNA, 15 bp, Homo sapiens
agtgtgtggtgtgtg

SEQ ID NO: 1120698 - DNA, 15 bp, Homo sapiens
tagtgtgtggtgtgt

SEQ ID NO: 1120699 - DNA, 15 bp, Homo sapiens
gtagtgtgtggtgtg

SEQ ID NO: 1120700 - DNA, 15 bp, Homo sapiens
tgtagtgtgtggtgt

SEQ ID NO: 1120701 - DNA, 15 bp, Homo sapiens
gtgtagtgtgtggtg

SEQ ID NO: 1120702 - DNA, 15 bp, Homo sapiens
tgtgtagtgtgtggt

SEQ ID NO: 1120703 - DNA, 15 bp, Homo sapiens
atgtgtagtgtgtgg

SEQ ID NO: 1120704 - DNA, 15 bp, Homo sapiens
tatgtgtagtgtgtg

SEQ ID NO: 1120705 - DNA, 15 bp, Homo sapiens
gtatgtgtagtgtgt

SEQ ID NO: 1120706 - DNA, 15 bp, Homo sapiens
tgtatgtgtagtgtg

SEQ ID NO: 1120707 - DNA, 15 bp, Homo sapiens
atgtatgtgtagtgt

SEQ ID NO: 1120708 - DNA, 15 bp, Homo sapiens
gatgtatgtgtagtg

SEQ ID NO: 1120709 - DNA, 15 bp, Homo sapiens
tgatgtatgtgtagt

SEQ ID NO: 1120710 - DNA, 15 bp, Homo sapiens
gtgatgtatgtgtag

SEQ ID NO: 1120711 - DNA, 15 bp, Homo sapiens
tgtgatgtatgtgta

SEQ ID NO: 1120712 - DNA, 15 bp, Homo sapiens
gtgtgatgtatgtgt

SEQ ID NO: 1120713 - DNA, 15 bp, Homo sapiens
tgtgtgatgtatgtg

SEQ ID NO: 1120714 - DNA, 15 bp, Homo sapiens
gtgtgtgatgtatgt

SEQ ID NO: 1120715 - DNA, 15 bp, Homo sapiens
agtgtgtgatgtatg

SEQ ID NO: 1120716 - DNA, 15 bp, Homo sapiens
tagtgtgtgatgtat

SEQ ID NO: 1120717 - DNA, 15 bp, Homo sapiens
gtagtgtgtgatgta

SEQ ID NO: 1120718 - DNA, 15 bp, Homo sapiens
tgtagtgtgtgatgt

SEQ ID NO: 1120719 - DNA, 15 bp, Homo sapiens
gtgtagtgtgtgatg

SEQ ID NO: 1120720 - DNA, 15 bp, Homo sapiens
ttgtgtagtgtgtga

SEQ ID NO: 1120721 - DNA, 15 bp, Homo sapiens
tttgtgtagtgtgtg

SEQ ID NO: 1120722 - DNA, 15 bp, Homo sapiens
gtttgtgtagtgtgt

SEQ ID NO: 1120723 - DNA, 15 bp, Homo sapiens
ggtttgtgtagtgtg

SEQ ID NO: 1120724 - DNA, 15 bp, Homo sapiens
tggtttgtgtagtgt

SEQ ID NO: 1120725 - DNA, 15 bp, Homo sapiens
gtggtttgtgtagtg

SEQ ID NO: 1120726 - DNA, 15 bp, Homo sapiens
tgtggtttgtgtagt

SEQ ID NO: 1120727 - DNA, 15 bp, Homo sapiens
gtgtggtttgtgtag

SEQ ID NO: 1120728 - DNA, 15 bp, Homo sapiens
tgtgtggtttgtgta

SEQ ID NO: 1120729 - DNA, 15 bp, Homo sapiens
gtgtgtggtttgtgt

SEQ ID NO: 1120730 - DNA, 15 bp, Homo sapiens
ggtgtgtggtttgtg

SEQ ID NO: 1120731 - DNA, 15 bp, Homo sapiens
tggtgtgtggtttgt

SEQ ID NO: 1120732 - DNA, 15 bp, Homo sapiens
gtggtgtgtggtttg

SEQ ID NO: 1120733 - DNA, 15 bp, Homo sapiens
tgtggtgtgtggttt

SEQ ID NO: 1120734 - DNA, 15 bp, Homo sapiens
gtgtggtgtgtggtt

SEQ ID NO: 1120735 - DNA, 15 bp, Homo sapiens
tgtgtggtgtgtggt

SEQ ID NO: 1120736 - DNA, 15 bp, Homo sapiens
cagtgtgtggtgtgt

SEQ ID NO: 1120737 - DNA, 15 bp, Homo sapiens
gcagtgtgtggtgtg

SEQ ID NO: 1120738 - DNA, 15 bp, Homo sapiens
agcagtgtgtggtgt

SEQ ID NO: 1120739 - DNA, 15 bp, Homo sapiens
gagcagtgtgtggtg

SEQ ID NO: 1120740 - DNA, 15 bp, Homo sapiens
ggagcagtgtgtggt

SEQ ID NO: 1120741 - DNA, 15 bp, Homo sapiens
aggagcagtgtgtgg

SEQ ID NO: 1120742 - DNA, 15 bp, Homo sapiens
caggagcagtgtgtg

SEQ ID NO: 1120743 - DNA, 15 bp, Homo sapiens
gcaggagcagtgtgt

SEQ ID NO: 1120744 - DNA, 15 bp, Homo sapiens
agcaggagcagtgtg

SEQ ID NO: 1120745 - DNA, 15 bp, Homo sapiens
tagcaggagcagtgt

SEQ ID NO: 1120746 - DNA, 15 bp, Homo sapiens
gtagcaggagcagtg

SEQ ID NO: 1120747 - DNA, 15 bp, Homo sapiens
ggtagcaggagcagt

SEQ ID NO: 1120748 - DNA, 15 bp, Homo sapiens
aggtagcaggagcag

SEQ ID NO: 1120749 - DNA, 15 bp, Homo sapiens
taggtagcaggagca

SEQ ID NO: 1120750 - DNA, 15 bp, Homo sapiens
gtaggtagcaggagc

SEQ ID NO: 1120751 - DNA, 15 bp, Homo sapiens
tgtaggtagcaggag

SEQ ID NO: 1120752 - DNA, 15 bp, Homo sapiens
gtgtaggtagcagga

SEQ ID NO: 1120753 - DNA, 15 bp, Homo sapiens
tgtgtaggtagcagg

SEQ ID NO: 1120754 - DNA, 15 bp, Homo sapiens
gtgtgtaggtagcag

SEQ ID NO: 1120755 - DNA, 15 bp, Homo sapiens
agtgtgtaggtagca

SEQ ID NO: 1120756 - DNA, 15 bp, Homo sapiens
cagtgtgtaggtagc

SEQ ID NO: 1120757 - DNA, 15 bp, Homo sapiens
gcagtgtgtaggtag

SEQ ID NO: 1120758 - DNA, 15 bp, Homo sapiens
ggcagtgtgtaggta

SEQ ID NO: 1120759 - DNA, 15 bp, Homo sapiens
gggcagtgtgtaggt

SEQ ID NO: 1120760 - DNA, 15 bp, Homo sapiens
tgggcagtgtgtagg

SEQ ID NO: 1120761 - DNA, 15 bp, Homo sapiens
gtgggcagtgtgtag

SEQ ID NO: 1120762 - DNA, 15 bp, Homo sapiens
tgtgggcagtgtgta

SEQ ID NO: 1120763 - DNA, 15 bp, Homo sapiens
gtgtgggcagtgtgt

SEQ ID NO: 1120764 - DNA, 15 bp, Homo sapiens
tgtgtgggcagtgtg

SEQ ID NO: 1120765 - DNA, 15 bp, Homo sapiens
gtgtgtgggcagtgt

SEQ ID NO: 1120766 - DNA, 15 bp, Homo sapiens
ggtgtgtgggcagtg

SEQ ID NO: 1120767 - DNA, 15 bp, Homo sapiens
tggtgtgtgggcagt

SEQ ID NO: 1120768 - DNA, 15 bp, Homo sapiens
ttggtgtgtgggcag

SEQ ID NO: 1120769 - DNA, 15 bp, Homo sapiens
tttggtgtgtgggca

SEQ ID NO: 1120770 - DNA, 15 bp, Homo sapiens
gtttggtgtgtgggc

SEQ ID NO: 1120771 - DNA, 15 bp, Homo sapiens
tgtttggtgtgtggg

SEQ ID NO: 1120772 - DNA, 15 bp, Homo sapiens
atgtttggtgtgtgg

SEQ ID NO: 1120773 - DNA, 15 bp, Homo sapiens
tatgtttggtgtgtg

SEQ ID NO: 1120774 - DNA, 15 bp, Homo sapiens
gtatgtttggtgtgt

SEQ ID NO: 1120775 - DNA, 15 bp, Homo sapiens
tgtatgtttggtgtg

SEQ ID NO: 1120776 - DNA, 15 bp, Homo sapiens
gtgtatgtttggtgt

SEQ ID NO: 1120777 - DNA, 15 bp, Homo sapiens
tgtgtatgtttggtg

SEQ ID NO: 1120778 - DNA, 15 bp, Homo sapiens
atgtgtatgtttggt

SEQ ID NO: 1120779 - DNA, 15 bp, Homo sapiens
gatgtgtatgtttgg

SEQ ID NO: 1120780 - DNA, 15 bp, Homo sapiens
tgatgtgtatgtttg

SEQ ID NO: 1120781 - DNA, 15 bp, Homo sapiens
gtgatgtgtatgttt

SEQ ID NO: 1120782 - DNA, 15 bp, Homo sapiens
tgtgatgtgtatgtt

SEQ ID NO: 1120783 - DNA, 15 bp, Homo sapiens
gtgtgatgtgtatgt

SEQ ID NO: 1120784 - DNA, 15 bp, Homo sapiens
ggtgtgatgtgtatg

SEQ ID NO: 1120785 - DNA, 15 bp, Homo sapiens
tggtgtgatgtgtat

SEQ ID NO: 1120786 - DNA, 15 bp, Homo sapiens
ttggtgtgatgtgta

SEQ ID NO: 1120787 - DNA, 15 bp, Homo sapiens
tttggtgtgatgtgt

SEQ ID NO: 1120788 - DNA, 15 bp, Homo sapiens
gtttggtgtgatgtg

SEQ ID NO: 1120789 - DNA, 15 bp, Homo sapiens
tgtttggtgtgatgt

SEQ ID NO: 1120790 - DNA, 15 bp, Homo sapiens
gtgtttggtgtgatg

SEQ ID NO: 1120791 - DNA, 15 bp, Homo sapiens
tgtgtttggtgtgat

SEQ ID NO: 1120792 - DNA, 15 bp, Homo sapiens
gtgtgtttggtgtga

SEQ ID NO: 1120793 - DNA, 15 bp, Homo sapiens
ggtgtgtttggtgtg

SEQ ID NO: 1120794 - DNA, 15 bp, Homo sapiens
tggtgtgtttggtgt

SEQ ID NO: 1120795 - DNA, 15 bp, Homo sapiens
gtggtgtgtttggtg

SEQ ID NO: 1120796 - DNA, 15 bp, Homo sapiens
tgtggtgtgtttggt

SEQ ID NO: 1120797 - DNA, 15 bp, Homo sapiens
gtgtggtgtgtttgg

SEQ ID NO: 1120798 - DNA, 15 bp, Homo sapiens
tgtgtggtgtgtttg

SEQ ID NO: 1120799 - DNA, 15 bp, Homo sapiens
gtgtgtggtgtgttt

SEQ ID NO: 1120800 - DNA, 15 bp, Homo sapiens
tgtgtgtggtgtgtt

SEQ ID NO: 1120801 - DNA, 15 bp, Homo sapiens
gtgtgtgtggtgtgt

SEQ ID NO: 1120802 - DNA, 15 bp, Homo sapiens
tgtgtgtgtggtgtg

SEQ ID NO: 1120803 - DNA, 15 bp, Homo sapiens
gtgtgtgtgtggtgt

SEQ ID NO: 1120804 - DNA, 15 bp, Homo sapiens
tgtgtgtgtgtggtg

SEQ ID NO: 1120805 - DNA, 15 bp, Homo sapiens
gtgtgtgtgtgtggt

SEQ ID NO: 1120806 - DNA, 15 bp, Homo sapiens
agtgtgtgtgtgtgg

SEQ ID NO: 1120807 - DNA, 15 bp, Homo sapiens
gtagtgtgtgtgtgt

SEQ ID NO: 1120808 - DNA, 15 bp, Homo sapiens
tgtagtgtgtgtgtg

SEQ ID NO: 1120809 - DNA, 15 bp, Homo sapiens
gtgtagtgtgtgtgt

SEQ ID NO: 1120810 - DNA, 15 bp, Homo sapiens
tgtgtagtgtgtgtg

SEQ ID NO: 1120811 - DNA, 15 bp, Homo sapiens
ttgtgtagtgtgtgt

SEQ ID NO: 1120812 - DNA, 15 bp, Homo sapiens
tgcagtgtgtggtgt

SEQ ID NO: 1120813 - DNA, 15 bp, Homo sapiens
atgcagtgtgtggtg

SEQ ID NO: 1120814 - DNA, 15 bp, Homo sapiens
tatgcagtgtgtggt

SEQ ID NO: 1120815 - DNA, 15 bp, Homo sapiens
gtatgcagtgtgtgg

SEQ ID NO: 1120816 - DNA, 15 bp, Homo sapiens
tgtatgcagtgtgtg

SEQ ID NO: 1120817 - DNA, 15 bp, Homo sapiens
gtgtatgcagtgtgt

SEQ ID NO: 1120818 - DNA, 15 bp, Homo sapiens
agtgtatgcagtgtg

SEQ ID NO: 1120819 - DNA, 15 bp, Homo sapiens
tagtgtatgcagtgt

SEQ ID NO: 1120820 - DNA, 15 bp, Homo sapiens
gtagtgtatgcagtg

SEQ ID NO: 1120821 - DNA, 15 bp, Homo sapiens
tgtagtgtatgcagt

SEQ ID NO: 1120822 - DNA, 15 bp, Homo sapiens
gtgtagtgtatgcag

SEQ ID NO: 1120823 - DNA, 15 bp, Homo sapiens
tgtgtagtgtatgca

SEQ ID NO: 1120824 - DNA, 15 bp, Homo sapiens
gtgtgtagtgtatgc

SEQ ID NO: 1120825 - DNA, 15 bp, Homo sapiens
tgtgtgtagtgtatg

SEQ ID NO: 1120826 - DNA, 15 bp, Homo sapiens
gtgtgtgtagtgtat

SEQ ID NO: 1120827 - DNA, 15 bp, Homo sapiens
tgtgtgtgtagtgta

SEQ ID NO: 1120828 - DNA, 15 bp, Homo sapiens
gtgtgtgtgtagtgt

SEQ ID NO: 1120829 - DNA, 15 bp, Homo sapiens
agcagtgtgtgtgtg

SEQ ID NO: 1120830 - DNA, 15 bp, Homo sapiens
aagcagtgtgtgtgt

SEQ ID NO: 1120831 - DNA, 15 bp, Homo sapiens
caagcagtgtgtgtg

SEQ ID NO: 1120832 - DNA, 15 bp, Homo sapiens
ccaagcagtgtgtgt

SEQ ID NO: 1120833 - DNA, 15 bp, Homo sapiens
gccaagcagtgtgtg

SEQ ID NO: 1120834 - DNA, 15 bp, Homo sapiens
cgccaagcagtgtgt

SEQ ID NO: 1120835 - DNA, 15 bp, Homo sapiens
gcgccaagcagtgtg

SEQ ID NO: 1120836 - DNA, 15 bp, Homo sapiens
agcgccaagcagtgt

SEQ ID NO: 1120837 - DNA, 15 bp, Homo sapiens
cagcgccaagcagtg

SEQ ID NO: 1120838 - DNA, 15 bp, Homo sapiens
tcagcgccaagcagt

SEQ ID NO: 1120839 - DNA, 15 bp, Homo sapiens
ctcagcgccaagcag

SEQ ID NO: 1120840 - DNA, 15 bp, Homo sapiens
cctcagcgccaagca

SEQ ID NO: 1120841 - DNA, 15 bp, Homo sapiens
tcctcagcgccaagc

SEQ ID NO: 1120842 - DNA, 15 bp, Homo sapiens
gtcctcagcgccaag

SEQ ID NO: 1120843 - DNA, 15 bp, Homo sapiens
agtcctcagcgccaa

SEQ ID NO: 1120844 - DNA, 15 bp, Homo sapiens
gagtcctcagcgcca

SEQ ID NO: 1120845 - DNA, 15 bp, Homo sapiens
ggagtcctcagcgcc

SEQ ID NO: 1120846 - DNA, 15 bp, Homo sapiens
tggagtcctcagcgc

SEQ ID NO: 1120847 - DNA, 15 bp, Homo sapiens
ttggagtcctcagcg

SEQ ID NO: 1120848 - DNA, 15 bp, Homo sapiens
cttggagtcctcagc

SEQ ID NO: 1120849 - DNA, 15 bp, Homo sapiens
gcttggagtcctcag

SEQ ID NO: 1120850 - DNA, 15 bp, Homo sapiens
tgcttggagtcctca

SEQ ID NO: 1120851 - DNA, 15 bp, Homo sapiens
ctgcttggagtcctc

SEQ ID NO: 1120852 - DNA, 15 bp, Homo sapiens
gctgcttggagtcct

SEQ ID NO: 1120853 - DNA, 15 bp, Homo sapiens
tgctgcttggagtcc

SEQ ID NO: 1120854 - DNA, 15 bp, Homo sapiens
ctgctgcttggagtc

SEQ ID NO: 1120855 - DNA, 15 bp, Homo sapiens
gctgctgcttggagt

SEQ ID NO: 1120856 - DNA, 15 bp, Homo sapiens
cgctgctgcttggag

SEQ ID NO: 1120857 - DNA, 15 bp, Homo sapiens
gcgctgctgcttgga

SEQ ID NO: 1120858 - DNA, 15 bp, Homo sapiens
ggcgctgctgcttgg

SEQ ID NO: 1120859 - DNA, 15 bp, Homo sapiens
tggcgctgctgcttg

SEQ ID NO: 1120860 - DNA, 15 bp, Homo sapiens
gtggcgctgctgctt

SEQ ID NO: 1120861 - DNA, 15 bp, Homo sapiens
agtggcgctgctgct

SEQ ID NO: 1120862 - DNA, 15 bp, Homo sapiens
gagtggcgctgctgc

SEQ ID NO: 1120863 - DNA, 15 bp, Homo sapiens
tgagtggcgctgctg

SEQ ID NO: 1120864 - DNA, 15 bp, Homo sapiens
ctgagtggcgctgct

SEQ ID NO: 1120865 - DNA, 15 bp, Homo sapiens
tctgagtggcgctgc

SEQ ID NO: 1120866 - DNA, 15 bp, Homo sapiens
ttctgagtggcgctg

SEQ ID NO: 1120867 - DNA, 15 bp, Homo sapiens
tttctgagtggcgct

SEQ ID NO: 1120868 - DNA, 15 bp, Homo sapiens
atttctgagtggcgc

SEQ ID NO: 1120869 - DNA, 15 bp, Homo sapiens
catttctgagtggcg

SEQ ID NO: 1120870 - DNA, 15 bp, Homo sapiens
tcatttctgagtggc

SEQ ID NO: 1120871 - DNA, 15 bp, Homo sapiens
ctcatttctgagtgg

SEQ ID NO: 1120872 - DNA, 15 bp, Homo sapiens
cctcatttctgagtg

SEQ ID NO: 1120873 - DNA, 15 bp, Homo sapiens
gcctcatttctgagt

SEQ ID NO: 1120874 - DNA, 15 bp, Homo sapiens
tgcctcatttctgag

SEQ ID NO: 1120875 - DNA, 15 bp, Homo sapiens
ctgcctcatttctga

SEQ ID NO: 1120876 - DNA, 15 bp, Homo sapiens
cctgcctcatttctg

SEQ ID NO: 1120877 - DNA, 15 bp, Homo sapiens
ccctgcctcatttct

SEQ ID NO: 1120878 - DNA, 15 bp, Homo sapiens
cccctgcctcatttc

SEQ ID NO: 1120879 - DNA, 15 bp, Homo sapiens
ccccctgcctcattt

SEQ ID NO: 1120880 - DNA, 15 bp, Homo sapiens
tccccctgcctcatt

SEQ ID NO: 1120881 - DNA, 15 bp, Homo sapiens
atccccctgcctcat

SEQ ID NO: 1120882 - DNA, 15 bp, Homo sapiens
gatccccctgcctca

SEQ ID NO: 1120883 - DNA, 15 bp, Homo sapiens
ggatccccctgcctc

SEQ ID NO: 1120884 - DNA, 15 bp, Homo sapiens
gggatccccctgcct

SEQ ID NO: 1120885 - DNA, 15 bp, Homo sapiens
agggatccccctgcc

SEQ ID NO: 1120886 - DNA, 15 bp, Homo sapiens
cagggatccccctgc

SEQ ID NO: 1120887 - DNA, 15 bp, Homo sapiens
tcagggatccccctg

SEQ ID NO: 1120888 - DNA, 15 bp, Homo sapiens
ttcagggatccccct

SEQ ID NO: 1120889 - DNA, 15 bp, Homo sapiens
tttcagggatccccc

SEQ ID NO: 1120890 - DNA, 15 bp, Homo sapiens
atttcagggatcccc

SEQ ID NO: 1120891 - DNA, 15 bp, Homo sapiens
gatttcagggatccc

SEQ ID NO: 1120892 - DNA, 15 bp, Homo sapiens
tgatttcagggatcc

SEQ ID NO: 1120893 - DNA, 15 bp, Homo sapiens
ctgatttcagggatc

SEQ ID NO: 1120894 - DNA, 15 bp, Homo sapiens
cctgatttcagggat

SEQ ID NO: 1120895 - DNA, 15 bp, Homo sapiens
gcctgatttcaggga

SEQ ID NO: 1120896 - DNA, 15 bp, Homo sapiens
tgcctgatttcaggg

SEQ ID NO: 1120897 - DNA, 15 bp, Homo sapiens
ctgcctgatttcagg

SEQ ID NO: 1120898 - DNA, 15 bp, Homo sapiens
actgcctgatttcag

SEQ ID NO: 1120899 - DNA, 15 bp, Homo sapiens
cactgcctgatttca

SEQ ID NO: 1120900 - DNA, 15 bp, Homo sapiens
acactgcctgatttc

SEQ ID NO: 1120901 - DNA, 15 bp, Homo sapiens
cacactgcctgattt

SEQ ID NO: 1120902 - DNA, 15 bp, Homo sapiens
gcacactgcctgatt

SEQ ID NO: 1120903 - DNA, 15 bp, Homo sapiens
ggcacactgcctgat

SEQ ID NO: 1120904 - DNA, 15 bp, Homo sapiens
gggcacactgcctga

SEQ ID NO: 1120905 - DNA, 15 bp, Homo sapiens
agggcacactgcctg

SEQ ID NO: 1120906 - DNA, 15 bp, Homo sapiens
tagggcacactgcct

SEQ ID NO: 1120907 - DNA, 15 bp, Homo sapiens
atagggcacactgcc

SEQ ID NO: 1120908 - DNA, 15 bp, Homo sapiens
aatagggcacactgc

SEQ ID NO: 1120909 - DNA, 15 bp, Homo sapiens
gaatagggcacactg

SEQ ID NO: 1120910 - DNA, 15 bp, Homo sapiens
agaatagggcacact

SEQ ID NO: 1120911 - DNA, 15 bp, Homo sapiens
cagaatagggcacac

SEQ ID NO: 1120912 - DNA, 15 bp, Homo sapiens
tcagaatagggcaca

SEQ ID NO: 1120913 - DNA, 15 bp, Homo sapiens
atcagaatagggcac

SEQ ID NO: 1120914 - DNA, 15 bp, Homo sapiens
aatcagaatagggca

SEQ ID NO: 1120915 - DNA, 15 bp, Homo sapiens
caatcagaatagggc

SEQ ID NO: 1120916 - DNA, 15 bp, Homo sapiens
gcaatcagaataggg

SEQ ID NO: 1120917 - DNA, 15 bp, Homo sapiens
ggcaatcagaatagg

SEQ ID NO: 1120918 - DNA, 15 bp, Homo sapiens
tggcaatcagaatag

SEQ ID NO: 1120919 - DNA, 15 bp, Homo sapiens
atggcaatcagaata

SEQ ID NO: 1120920 - DNA, 15 bp, Homo sapiens
catggcaatcagaat

SEQ ID NO: 1120921 - DNA, 15 bp, Homo sapiens
acatggcaatcagaa

SEQ ID NO: 1120922 - DNA, 15 bp, Homo sapiens
gacatggcaatcaga

SEQ ID NO: 1120923 - DNA, 15 bp, Homo sapiens
agacatggcaatcag

SEQ ID NO: 1120924 - DNA, 15 bp, Homo sapiens
cagacatggcaatca

SEQ ID NO: 1120925 - DNA, 15 bp, Homo sapiens
ccagacatggcaatc

SEQ ID NO: 1120926 - DNA, 15 bp, Homo sapiens
gccagacatggcaat

SEQ ID NO: 1120927 - DNA, 15 bp, Homo sapiens
ggccagacatggcaa

SEQ ID NO: 1120928 - DNA, 15 bp, Homo sapiens
tggccagacatggca

SEQ ID NO: 1120929 - DNA, 15 bp, Homo sapiens
atggccagacatggc

SEQ ID NO: 1120930 - DNA, 15 bp, Homo sapiens
tatggccagacatgg

SEQ ID NO: 1120931 - DNA, 15 bp, Homo sapiens
ctatggccagacatg

SEQ ID NO: 1120932 - DNA, 15 bp, Homo sapiens
gctatggccagacat

SEQ ID NO: 1120933 - DNA, 15 bp, Homo sapiens
agctatggccagaca

SEQ ID NO: 1120934 - DNA, 15 bp, Homo sapiens
cagctatggccagac

SEQ ID NO: 1120935 - DNA, 15 bp, Homo sapiens
acagctatggccaga

SEQ ID NO: 1120936 - DNA, 15 bp, Homo sapiens
tacagctatggccag

SEQ ID NO: 1120937 - DNA, 15 bp, Homo sapiens
atacagctatggcca

SEQ ID NO: 1120938 - DNA, 15 bp, Homo sapiens
aatacagctatggcc

SEQ ID NO: 1120939 - DNA, 15 bp, Homo sapiens
gaatacagctatggc

SEQ ID NO: 1120940 - DNA, 15 bp, Homo sapiens
agaatacagctatgg

SEQ ID NO: 1120941 - DNA, 15 bp, Homo sapiens
tagaatacagctatg

SEQ ID NO: 1120942 - DNA, 15 bp, Homo sapiens
atagaatacagctat

SEQ ID NO: 1120943 - DNA, 15 bp, Homo sapiens
aatagaatacagcta

SEQ ID NO: 1120944 - DNA, 15 bp, Homo sapiens
aaatagaatacagct

SEQ ID NO: 1120945 - DNA, 15 bp, Homo sapiens
caaatagaatacagc

SEQ ID NO: 1120946 - DNA, 15 bp, Homo sapiens
ccaaatagaatacag

SEQ ID NO: 1120947 - DNA, 15 bp, Homo sapiens
gccaaatagaataca

SEQ ID NO: 1120948 - DNA, 15 bp, Homo sapiens
agccaaatagaatac

SEQ ID NO: 1120949 - DNA, 15 bp, Homo sapiens
aagccaaatagaata

SEQ ID NO: 1120950 - DNA, 15 bp, Homo sapiens
taagccaaatagaat

SEQ ID NO: 1120951 - DNA, 15 bp, Homo sapiens
ttaagccaaatagaa

SEQ ID NO: 1120952 - DNA, 15 bp, Homo sapiens
tttaagccaaataga

SEQ ID NO: 1120953 - DNA, 15 bp, Homo sapiens
ctttaagccaaatag

SEQ ID NO: 1120954 - DNA, 15 bp, Homo sapiens
cctttaagccaaata

SEQ ID NO: 1120955 - DNA, 15 bp, Homo sapiens
tcctttaagccaaat

SEQ ID NO: 1120956 - DNA, 15 bp, Homo sapiens
atcctttaagccaaa

SEQ ID NO: 1120957 - DNA, 15 bp, Homo sapiens
aatcctttaagccaa

SEQ ID NO: 1120958 - DNA, 15 bp, Homo sapiens
aaatcctttaagcca

SEQ ID NO: 1120959 - DNA, 15 bp, Homo sapiens
aaaatcctttaagcc

SEQ ID NO: 1120960 - DNA, 15 bp, Homo sapiens
taaaatcctttaagc

SEQ ID NO: 1120961 - DNA, 15 bp, Homo sapiens
ttaaaatcctttaag

SEQ ID NO: 1120962 - DNA, 15 bp, Homo sapiens
tttaaaatcctttaa

SEQ ID NO: 1120963 - DNA, 15 bp, Homo sapiens
ttttaaaatccttta

SEQ ID NO: 1120964 - DNA, 15 bp, Homo sapiens
gttttaaaatccttt

SEQ ID NO: 1120965 - DNA, 15 bp, Homo sapiens
ggttttaaaatcctt

SEQ ID NO: 1120966 - DNA, 15 bp, Homo sapiens
tggttttaaaatcct

SEQ ID NO: 1120967 - DNA, 15 bp, Homo sapiens
gtggttttaaaatcc

SEQ ID NO: 1120968 - DNA, 15 bp, Homo sapiens
tgtggttttaaaatc

SEQ ID NO: 1120969 - DNA, 15 bp, Homo sapiens
gtgtggttttaaaat

SEQ ID NO: 1120970 - DNA, 15 bp, Homo sapiens
tgtgtggttttaaaa

SEQ ID NO: 1120971 - DNA, 15 bp, Homo sapiens
gtgtgtggttttaaa

SEQ ID NO: 1120972 - DNA, 15 bp, Homo sapiens
ggtgtgtggttttaa

SEQ ID NO: 1120973 - DNA, 15 bp, Homo sapiens
tggtgtgtggtttta

SEQ ID NO: 1120974 - DNA, 15 bp, Homo sapiens
gtggtgtgtggtttt

SEQ ID NO: 1120975 - DNA, 15 bp, Homo sapiens
tgtgtgtggtgtgtg

SEQ ID NO: 1120976 - DNA, 15 bp, Homo sapiens
ggtgtgtgtgtggtg

SEQ ID NO: 1120977 - DNA, 15 bp, Homo sapiens
tggtgtgtgtgtggt

SEQ ID NO: 1120978 - DNA, 15 bp, Homo sapiens
agtcgcccagtctgg

SEQ ID NO: 1120979 - DNA, 15 bp, Homo sapiens
cagtcgcccagtctg

SEQ ID NO: 1120980 - DNA, 15 bp, Homo sapiens
tcagtcgcccagtct

SEQ ID NO: 1120981 - DNA, 15 bp, Homo sapiens
ctcagtcgcccagtc

SEQ ID NO: 1120982 - DNA, 15 bp, Homo sapiens
gctcagtcgcccagt

SEQ ID NO: 1120983 - DNA, 15 bp, Homo sapiens
tgctcagtcgcccag

SEQ ID NO: 1120984 - DNA, 15 bp, Homo sapiens
ttgctcagtcgccca

SEQ ID NO: 1120985 - DNA, 15 bp, Homo sapiens
cttgctcagtcgccc

SEQ ID NO: 1120986 - DNA, 15 bp, Homo sapiens
tcttgctcagtcgcc

SEQ ID NO: 1120987 - DNA, 15 bp, Homo sapiens
gtcttgctcagtcgc

SEQ ID NO: 1120988 - DNA, 15 bp, Homo sapiens
agtcttgctcagtcg

SEQ ID NO: 1120989 - DNA, 15 bp, Homo sapiens
gagtcttgctcagtc

SEQ ID NO: 1120990 - DNA, 15 bp, Homo sapiens
ggagtcttgctcagt

SEQ ID NO: 1120991 - DNA, 15 bp, Homo sapiens
tggagtcttgctcag

SEQ ID NO: 1120992 - DNA, 15 bp, Homo sapiens
atggagtcttgctca

SEQ ID NO: 1120993 - DNA, 15 bp, Homo sapiens
aattttttttttgag

SEQ ID NO: 1120994 - DNA, 15 bp, Homo sapiens
aaattttttttttga

SEQ ID NO: 1120995 - DNA, 15 bp, Homo sapiens
aaaattttttttttg

SEQ ID NO: 1120996 - DNA, 15 bp, Homo sapiens
taaaaaaaatttttt

SEQ ID NO: 1120997 - DNA, 15 bp, Homo sapiens
gtaaaaaaaattttt

SEQ ID NO: 1120998 - DNA, 15 bp, Homo sapiens
tgtaaaaaaaatttt

SEQ ID NO: 1120999 - DNA, 15 bp, Homo sapiens
atgtaaaaaaaattt

SEQ ID NO: 1121000 - DNA, 15 bp, Homo sapiens
gatgtaaaaaaaatt

SEQ ID NO: 1121001 - DNA, 15 bp, Homo sapiens
tgatgtaaaaaaaat

SEQ ID NO: 1121002 - DNA, 15 bp, Homo sapiens
atgatgtaaaaaaaa

SEQ ID NO: 1121003 - DNA, 15 bp, Homo sapiens
tatgatgtaaaaaaa

SEQ ID NO: 1121004 - DNA, 15 bp, Homo sapiens
ttatgatgtaaaaaa

SEQ ID NO: 1121005 - DNA, 15 bp, Homo sapiens
attatgatgtaaaaa

SEQ ID NO: 1121006 - DNA, 15 bp, Homo sapiens
aattatgatgtaaaa

SEQ ID NO: 1121007 - DNA, 15 bp, Homo sapiens
aaattatgatgtaaa

SEQ ID NO: 1121008 - DNA, 15 bp, Homo sapiens
taaattatgatgtaa

SEQ ID NO: 1121009 - DNA, 15 bp, Homo sapiens
ttaaattatgatgta

SEQ ID NO: 1121010 - DNA, 15 bp, Homo sapiens
tttaaattatgatgt

SEQ ID NO: 1121011 - DNA, 15 bp, Homo sapiens
atttaaattatgatg

SEQ ID NO: 1121012 - DNA, 15 bp, Homo sapiens
catttaaattatgat

SEQ ID NO: 1121013 - DNA, 15 bp, Homo sapiens
acatttaaattatga

SEQ ID NO: 1121014 - DNA, 15 bp, Homo sapiens
aacatttaaattatg

SEQ ID NO: 1121015 - DNA, 15 bp, Homo sapiens
taacatttaaattat

SEQ ID NO: 1121016 - DNA, 15 bp, Homo sapiens
ataacatttaaatta

SEQ ID NO: 1121017 - DNA, 15 bp, Homo sapiens
tataacatttaaatt

SEQ ID NO: 1121018 - DNA, 15 bp, Homo sapiens
ttataacatttaaat

SEQ ID NO: 1121019 - DNA, 15 bp, Homo sapiens
gttataacatttaaa

SEQ ID NO: 1121020 - DNA, 15 bp, Homo sapiens
agttataacatttaa

SEQ ID NO: 1121021 - DNA, 15 bp, Homo sapiens
tagttataacattta

SEQ ID NO: 1121022 - DNA, 15 bp, Homo sapiens
gtagttataacattt

SEQ ID NO: 1121023 - DNA, 15 bp, Homo sapiens
agtagttataacatt

SEQ ID NO: 1121024 - DNA, 15 bp, Homo sapiens
cagtagttataacat

SEQ ID NO: 1121025 - DNA, 15 bp, Homo sapiens
gcagtagttataaca

SEQ ID NO: 1121026 - DNA, 15 bp, Homo sapiens
ggcagtagttataac

SEQ ID NO: 1121027 - DNA, 15 bp, Homo sapiens
gggcagtagttataa

SEQ ID NO: 1121028 - DNA, 15 bp, Homo sapiens
tgggcagtagttata

SEQ ID NO: 1121029 - DNA, 15 bp, Homo sapiens
ctgggcagtagttat

SEQ ID NO: 1121030 - DNA, 15 bp, Homo sapiens
tctgggcagtagtta

SEQ ID NO: 1121031 - DNA, 15 bp, Homo sapiens
ctctgggcagtagtt

SEQ ID NO: 1121032 - DNA, 15 bp, Homo sapiens
gctctgggcagtagt

SEQ ID NO: 1121033 - DNA, 15 bp, Homo sapiens
agctctgggcagtag

SEQ ID NO: 1121034 - DNA, 15 bp, Homo sapiens
aagctctgggcagta

SEQ ID NO: 1121035 - DNA, 15 bp, Homo sapiens
caagctctgggcagt

SEQ ID NO: 1121036 - DNA, 15 bp, Homo sapiens
ccaagctctgggcag

SEQ ID NO: 1121037 - DNA, 15 bp, Homo sapiens
accaagctctgggca

SEQ ID NO: 1121038 - DNA, 15 bp, Homo sapiens
aaccaagctctgggc

SEQ ID NO: 1121039 - DNA, 15 bp, Homo sapiens
aaaccaagctctggg

SEQ ID NO: 1121040 - DNA, 15 bp, Homo sapiens
gaaaccaagctctgg

SEQ ID NO: 1121041 - DNA, 15 bp, Homo sapiens
agaaaccaagctctg

SEQ ID NO: 1121042 - DNA, 15 bp, Homo sapiens
tagaaaccaagctct

SEQ ID NO: 1121043 - DNA, 15 bp, Homo sapiens
ttagaaaccaagctc

SEQ ID NO: 1121044 - DNA, 15 bp, Homo sapiens
attagaaaccaagct

SEQ ID NO: 1121045 - DNA, 15 bp, Homo sapiens
tattagaaaccaagc

SEQ ID NO: 1121046 - DNA, 15 bp, Homo sapiens
ttattagaaaccaag

SEQ ID NO: 1121047 - DNA, 15 bp, Homo sapiens
attattagaaaccaa

SEQ ID NO: 1121048 - DNA, 15 bp, Homo sapiens
tattattagaaacca

SEQ ID NO: 1121049 - DNA, 15 bp, Homo sapiens
gtattattagaaacc

SEQ ID NO: 1121050 - DNA, 15 bp, Homo sapiens
ggtattattagaaac

SEQ ID NO: 1121051 - DNA, 15 bp, Homo sapiens
tggtattattagaaa

SEQ ID NO: 1121052 - DNA, 15 bp, Homo sapiens
atggtattattagaa

SEQ ID NO: 1121053 - DNA, 15 bp, Homo sapiens
aatggtattattaga

SEQ ID NO: 1121054 - DNA, 15 bp, Homo sapiens
aaatggtattattag

SEQ ID NO: 1121055 - DNA, 15 bp, Homo sapiens
aaaatggtattatta

SEQ ID NO: 1121056 - DNA, 15 bp, Homo sapiens
gaaaatggtattatt

SEQ ID NO: 1121057 - DNA, 15 bp, Homo sapiens
ggaaaatggtattat

SEQ ID NO: 1121058 - DNA, 15 bp, Homo sapiens
tggaaaatggtatta

SEQ ID NO: 1121059 - DNA, 15 bp, Homo sapiens
ttggaaaatggtatt

SEQ ID NO: 1121060 - DNA, 15 bp, Homo sapiens
attggaaaatggtat

SEQ ID NO: 1121061 - DNA, 15 bp, Homo sapiens
tattggaaaatggta

SEQ ID NO: 1121062 - DNA, 15 bp, Homo sapiens
atattggaaaatggt

SEQ ID NO: 1121063 - DNA, 15 bp, Homo sapiens
tatattggaaaatgg

SEQ ID NO: 1121064 - DNA, 15 bp, Homo sapiens
ttatattggaaaatg

SEQ ID NO: 1121065 - DNA, 15 bp, Homo sapiens
cttatattggaaaat

SEQ ID NO: 1121066 - DNA, 15 bp, Homo sapiens
tcttatattggaaaa

SEQ ID NO: 1121067 - DNA, 15 bp, Homo sapiens
ttcttatattggaaa

SEQ ID NO: 1121068 - DNA, 15 bp, Homo sapiens
tttcttatattggaa

SEQ ID NO: 1121069 - DNA, 15 bp, Homo sapiens
gtttcttatattgga

SEQ ID NO: 1121070 - DNA, 15 bp, Homo sapiens
ggtttcttatattgg

SEQ ID NO: 1121071 - DNA, 15 bp, Homo sapiens
tggtttcttatattg

SEQ ID NO: 1121072 - DNA, 15 bp, Homo sapiens
ctggtttcttatatt

SEQ ID NO: 1121073 - DNA, 15 bp, Homo sapiens
tctggtttcttatat

SEQ ID NO: 1121074 - DNA, 15 bp, Homo sapiens
ctctggtttcttata

SEQ ID NO: 1121075 - DNA, 15 bp, Homo sapiens
gctctggtttcttat

SEQ ID NO: 1121076 - DNA, 15 bp, Homo sapiens
agctctggtttctta

SEQ ID NO: 1121077 - DNA, 15 bp, Homo sapiens
gagctctggtttctt

SEQ ID NO: 1121078 - DNA, 15 bp, Homo sapiens
ggagctctggtttct

SEQ ID NO: 1121079 - DNA, 15 bp, Homo sapiens
aggagctctggtttc

SEQ ID NO: 1121080 - DNA, 15 bp, Homo sapiens
caggagctctggttt

SEQ ID NO: 1121081 - DNA, 15 bp, Homo sapiens
ccaggagctctggtt

SEQ ID NO: 1121082 - DNA, 15 bp, Homo sapiens
accaggagctctggt

SEQ ID NO: 1121083 - DNA, 15 bp, Homo sapiens
caccaggagctctgg

SEQ ID NO: 1121084 - DNA, 15 bp, Homo sapiens
gcaccaggagctctg

SEQ ID NO: 1121085 - DNA, 15 bp, Homo sapiens
tgcaccaggagctct

SEQ ID NO: 1121086 - DNA, 15 bp, Homo sapiens
ctgcaccaggagctc

SEQ ID NO: 1121087 - DNA, 15 bp, Homo sapiens
gctgcaccaggagct

SEQ ID NO: 1121088 - DNA, 15 bp, Homo sapiens
tgctgcaccaggagc

SEQ ID NO: 1121089 - DNA, 15 bp, Homo sapiens
atgctgcaccaggag

SEQ ID NO: 1121090 - DNA, 15 bp, Homo sapiens
gatgctgcaccagga

SEQ ID NO: 1121091 - DNA, 15 bp, Homo sapiens
agatgctgcaccagg

SEQ ID NO: 1121092 - DNA, 15 bp, Homo sapiens
cagatgctgcaccag

SEQ ID NO: 1121093 - DNA, 15 bp, Homo sapiens
gcagatgctgcacca

SEQ ID NO: 1121094 - DNA, 15 bp, Homo sapiens
agcagatgctgcacc

SEQ ID NO: 1121095 - DNA, 15 bp, Homo sapiens
gagcagatgctgcac

SEQ ID NO: 1121096 - DNA, 15 bp, Homo sapiens
agagcagatgctgca

SEQ ID NO: 1121097 - DNA, 15 bp, Homo sapiens
cagagcagatgctgc

SEQ ID NO: 1121098 - DNA, 15 bp, Homo sapiens
ccagagcagatgctg

SEQ ID NO: 1121099 - DNA, 15 bp, Homo sapiens
gccagagcagatgct

SEQ ID NO: 1121100 - DNA, 15 bp, Homo sapiens
ggccagagcagatgc

SEQ ID NO: 1121101 - DNA, 15 bp, Homo sapiens
gggccagagcagatg

SEQ ID NO: 1121102 - DNA, 15 bp, Homo sapiens
ggggccagagcagat

SEQ ID NO: 1121103 - DNA, 15 bp, Homo sapiens
aggggccagagcaga

SEQ ID NO: 1121104 - DNA, 15 bp, Homo sapiens
caggggccagagcag

SEQ ID NO: 1121105 - DNA, 15 bp, Homo sapiens
ccaggggccagagca

SEQ ID NO: 1121106 - DNA, 15 bp, Homo sapiens
accaggggccagagc

SEQ ID NO: 1121107 - DNA, 15 bp, Homo sapiens
gaccaggggccagag

SEQ ID NO: 1121108 - DNA, 15 bp, Homo sapiens
ggaccaggggccaga

SEQ ID NO: 1121109 - DNA, 15 bp, Homo sapiens
gggaccaggggccag

SEQ ID NO: 1121110 - DNA, 15 bp, Homo sapiens
ggggaccaggggcca

SEQ ID NO: 1121111 - DNA, 15 bp, Homo sapiens
aggggaccaggggcc

SEQ ID NO: 1121112 - DNA, 15 bp, Homo sapiens
gaggggaccaggggc

SEQ ID NO: 1121113 - DNA, 15 bp, Homo sapiens
cgaggggaccagggg

SEQ ID NO: 1121114 - DNA, 15 bp, Homo sapiens
gcgaggggaccaggg

SEQ ID NO: 1121115 - DNA, 15 bp, Homo sapiens
agcgaggggaccagg

SEQ ID NO: 1121116 - DNA, 15 bp, Homo sapiens
gagcgaggggaccag

SEQ ID NO: 1121117 - DNA, 15 bp, Homo sapiens
ggagcgaggggacca

SEQ ID NO: 1121118 - DNA, 15 bp, Homo sapiens
gggagcgaggggacc

SEQ ID NO: 1121119 - DNA, 15 bp, Homo sapiens
ggggagcgaggggac

SEQ ID NO: 1121120 - DNA, 15 bp, Homo sapiens
tggggagcgagggga

SEQ ID NO: 1121121 - DNA, 15 bp, Homo sapiens
gtggggagcgagggg

SEQ ID NO: 1121122 - DNA, 15 bp, Homo sapiens
ggtggggagcgaggg

SEQ ID NO: 1121123 - DNA, 15 bp, Homo sapiens
gggtggggagcgagg

SEQ ID NO: 1121124 - DNA, 15 bp, Homo sapiens
tgggtggggagcgag

SEQ ID NO: 1121125 - DNA, 15 bp, Homo sapiens
gtgggtggggagcga

SEQ ID NO: 1121126 - DNA, 15 bp, Homo sapiens
ggtgggtggggagcg

SEQ ID NO: 1121127 - DNA, 15 bp, Homo sapiens
gggtgggtggggagc

SEQ ID NO: 1121128 - DNA, 15 bp, Homo sapiens
tgggtgggtggggag

SEQ ID NO: 1121129 - DNA, 15 bp, Homo sapiens
ctgggtgggtgggga

SEQ ID NO: 1121130 - DNA, 15 bp, Homo sapiens
cctgggtgggtgggg

SEQ ID NO: 1121131 - DNA, 15 bp, Homo sapiens
gcctgggtgggtggg

SEQ ID NO: 1121132 - DNA, 15 bp, Homo sapiens
ggcctgggtgggtgg

SEQ ID NO: 1121133 - DNA, 15 bp, Homo sapiens
gggcctgggtgggtg

SEQ ID NO: 1121134 - DNA, 15 bp, Homo sapiens
ggggcctgggtgggt

SEQ ID NO: 1121135 - DNA, 15 bp, Homo sapiens
aggggcctgggtggg

SEQ ID NO: 1121136 - DNA, 15 bp, Homo sapiens
aaggggcctgggtgg

SEQ ID NO: 1121137 - DNA, 15 bp, Homo sapiens
gaaggggcctgggtg

SEQ ID NO: 1121138 - DNA, 15 bp, Homo sapiens
ggaaggggcctgggt

SEQ ID NO: 1121139 - DNA, 15 bp, Homo sapiens
aggaaggggcctggg

SEQ ID NO: 1121140 - DNA, 15 bp, Homo sapiens
gaggaaggggcctgg

SEQ ID NO: 1121141 - DNA, 15 bp, Homo sapiens
ggaggaaggggcctg

SEQ ID NO: 1121142 - DNA, 15 bp, Homo sapiens
cggaggaaggggcct

SEQ ID NO: 1121143 - DNA, 15 bp, Homo sapiens
ccggaggaaggggcc

SEQ ID NO: 1121144 - DNA, 15 bp, Homo sapiens
tccggaggaaggggc

SEQ ID NO: 1121145 - DNA, 15 bp, Homo sapiens
ctccggaggaagggg

SEQ ID NO: 1121146 - DNA, 15 bp, Homo sapiens
gctccggaggaaggg

SEQ ID NO: 1121147 - DNA, 15 bp, Homo sapiens
agctccggaggaagg

SEQ ID NO: 1121148 - DNA, 15 bp, Homo sapiens
gagctccggaggaag

SEQ ID NO: 1121149 - DNA, 15 bp, Homo sapiens
tgagctccggaggaa

SEQ ID NO: 1121150 - DNA, 15 bp, Homo sapiens
gtgagctccggagga

SEQ ID NO: 1121151 - DNA, 15 bp, Homo sapiens
ggtgagctccggagg

SEQ ID NO: 1121152 - DNA, 15 bp, Homo sapiens
aggtgagctccggag

SEQ ID NO: 1121153 - DNA, 15 bp, Homo sapiens
caggtgagctccgga

SEQ ID NO: 1121154 - DNA, 15 bp, Homo sapiens
ccaggtgagctccgg

SEQ ID NO: 1121155 - DNA, 15 bp, Homo sapiens
cccaggtgagctccg

SEQ ID NO: 1121156 - DNA, 15 bp, Homo sapiens
ccccaggtgagctcc

SEQ ID NO: 1121157 - DNA, 15 bp, Homo sapiens
gccccaggtgagctc

SEQ ID NO: 1121158 - DNA, 15 bp, Homo sapiens
ggccccaggtgagct

SEQ ID NO: 1121159 - DNA, 15 bp, Homo sapiens
aggccccaggtgagc

SEQ ID NO: 1121160 - DNA, 15 bp, Homo sapiens
gaggccccaggtgag

SEQ ID NO: 1121161 - DNA, 15 bp, Homo sapiens
ggaggccccaggtga

SEQ ID NO: 1121162 - DNA, 15 bp, Homo sapiens
tggaggccccaggtg

SEQ ID NO: 1121163 - DNA, 15 bp, Homo sapiens
atggaggccccaggt

SEQ ID NO: 1121164 - DNA, 15 bp, Homo sapiens
gatggaggccccagg

SEQ ID NO: 1121165 - DNA, 15 bp, Homo sapiens
ggatggaggccccag

SEQ ID NO: 1121166 - DNA, 15 bp, Homo sapiens
gggatggaggcccca

SEQ ID NO: 1121167 - DNA, 15 bp, Homo sapiens
tgggatggaggcccc

SEQ ID NO: 1121168 - DNA, 15 bp, Homo sapiens
ctgggatggaggccc

SEQ ID NO: 1121169 - DNA, 15 bp, Homo sapiens
tctgggatggaggcc

SEQ ID NO: 1121170 - DNA, 15 bp, Homo sapiens
ttctgggatggaggc

SEQ ID NO: 1121171 - DNA, 15 bp, Homo sapiens
cttctgggatggagg

SEQ ID NO: 1121172 - DNA, 15 bp, Homo sapiens
gcttctgggatggag

SEQ ID NO: 1121173 - DNA, 15 bp, Homo sapiens
agcttctgggatgga

SEQ ID NO: 1121174 - DNA, 15 bp, Homo sapiens
gagcttctgggatgg

SEQ ID NO: 1121175 - DNA, 15 bp, Homo sapiens
tgagcttctgggatg

SEQ ID NO: 1121176 - DNA, 15 bp, Homo sapiens
ctgagcttctgggat

SEQ ID NO: 1121177 - DNA, 15 bp, Homo sapiens
cctgagcttctggga

SEQ ID NO: 1121178 - DNA, 15 bp, Homo sapiens
ccctgagcttctggg

SEQ ID NO: 1121179 - DNA, 15 bp, Homo sapiens
gccctgagcttctgg

SEQ ID NO: 1121180 - DNA, 15 bp, Homo sapiens
agccctgagcttctg

SEQ ID NO: 1121181 - DNA, 15 bp, Homo sapiens
aagccctgagcttct

SEQ ID NO: 1121182 - DNA, 15 bp, Homo sapiens
taagccctgagcttc

SEQ ID NO: 1121183 - DNA, 15 bp, Homo sapiens
ataagccctgagctt

SEQ ID NO: 1121184 - DNA, 15 bp, Homo sapiens
aataagccctgagct

SEQ ID NO: 1121185 - DNA, 15 bp, Homo sapiens
aaataagccctgagc

SEQ ID NO: 1121186 - DNA, 15 bp, Homo sapiens
aaaataagccctgag

SEQ ID NO: 1121187 - DNA, 15 bp, Homo sapiens
aaaaataagccctga

SEQ ID NO: 1121188 - DNA, 15 bp, Homo sapiens
gaaaaataagccctg

SEQ ID NO: 1121189 - DNA, 15 bp, Homo sapiens
agaaaaataagccct

SEQ ID NO: 1121190 - DNA, 15 bp, Homo sapiens
cagaaaaataagccc

SEQ ID NO: 1121191 - DNA, 15 bp, Homo sapiens
tcagaaaaataagcc

SEQ ID NO: 1121192 - DNA, 15 bp, Homo sapiens
atcagaaaaataagc

SEQ ID NO: 1121193 - DNA, 15 bp, Homo sapiens
aatcagaaaaataag

SEQ ID NO: 1121194 - DNA, 15 bp, Homo sapiens
taatcagaaaaataa

SEQ ID NO: 1121195 - DNA, 15 bp, Homo sapiens
ttaatcagaaaaata

SEQ ID NO: 1121196 - DNA, 15 bp, Homo sapiens
tttaatcagaaaaat

SEQ ID NO: 1121197 - DNA, 15 bp, Homo sapiens
ctttaatcagaaaaa

SEQ ID NO: 1121198 - DNA, 15 bp, Homo sapiens
tctttaatcagaaaa

SEQ ID NO: 1121199 - DNA, 15 bp, Homo sapiens
ttctttaatcagaaa

SEQ ID NO: 1121200 - DNA, 15 bp, Homo sapiens
tttctttaatcagaa

SEQ ID NO: 1121201 - DNA, 15 bp, Homo sapiens
ttttctttaatcaga

SEQ ID NO: 1121202 - DNA, 15 bp, Homo sapiens
attttctttaatcag

SEQ ID NO: 1121203 - DNA, 15 bp, Homo sapiens
tattttctttaatca

SEQ ID NO: 1121204 - DNA, 15 bp, Homo sapiens
ttattttctttaatc

SEQ ID NO: 1121205 - DNA, 15 bp, Homo sapiens
tttattttctttaat

SEQ ID NO: 1121206 - DNA, 15 bp, Homo sapiens
ttttattttctttaa

SEQ ID NO: 1121207 - DNA, 15 bp, Homo sapiens
tttttattttcttta

SEQ ID NO: 1121208 - DNA, 15 bp, Homo sapiens
ctttttattttcttt

SEQ ID NO: 1121209 - DNA, 15 bp, Homo sapiens
actttttattttctt

SEQ ID NO: 1121210 - DNA, 15 bp, Homo sapiens
cactttttattttct

SEQ ID NO: 1121211 - DNA, 15 bp, Homo sapiens
gcactttttattttc

SEQ ID NO: 1121212 - DNA, 15 bp, Homo sapiens
ggcactttttatttt

SEQ ID NO: 1121213 - DNA, 15 bp, Homo sapiens
cggcactttttattt

SEQ ID NO: 1121214 - DNA, 15 bp, Homo sapiens
acggcactttttatt

SEQ ID NO: 1121215 - DNA, 15 bp, Homo sapiens
cacggcactttttat

SEQ ID NO: 1121216 - DNA, 15 bp, Homo sapiens
gcacggcacttttta

SEQ ID NO: 1121217 - DNA, 15 bp, Homo sapiens
ggcacggcacttttt

SEQ ID NO: 1121218 - DNA, 15 bp, Homo sapiens
tggcacggcactttt

SEQ ID NO: 1121219 - DNA, 15 bp, Homo sapiens
gtggcacggcacttt

SEQ ID NO: 1121220 - DNA, 15 bp, Homo sapiens
ggtggcacggcactt

SEQ ID NO: 1121221 - DNA, 15 bp, Homo sapiens
tggtggcacggcact

SEQ ID NO: 1121222 - DNA, 15 bp, Homo sapiens
atggtggcacggcac

SEQ ID NO: 1121223 - DNA, 15 bp, Homo sapiens
aatggtggcacggca

SEQ ID NO: 1121224 - DNA, 15 bp, Homo sapiens
aaatggtggcacggc

SEQ ID NO: 1121225 - DNA, 15 bp, Homo sapiens
aaaatggtggcacgg

SEQ ID NO: 1121226 - DNA, 15 bp, Homo sapiens
aaaaatggtggcacg

SEQ ID NO: 1121227 - DNA, 15 bp, Homo sapiens
aaaaaatggtggcac

SEQ ID NO: 1121228 - DNA, 15 bp, Homo sapiens
taaaaaatggtggca

SEQ ID NO: 1121229 - DNA, 15 bp, Homo sapiens
ataaaaaatggtggc

SEQ ID NO: 1121230 - DNA, 15 bp, Homo sapiens
tataaaaaatggtgg

SEQ ID NO: 1121231 - DNA, 15 bp, Homo sapiens
ttataaaaaatggtg

SEQ ID NO: 1121232 - DNA, 15 bp, Homo sapiens
attataaaaaatggt

SEQ ID NO: 1121233 - DNA, 15 bp, Homo sapiens
tattataaaaaatgg

SEQ ID NO: 1121234 - DNA, 15 bp, Homo sapiens
ctattataaaaaatg

SEQ ID NO: 1121235 - DNA, 15 bp, Homo sapiens
gctattataaaaaat

SEQ ID NO: 1121236 - DNA, 15 bp, Homo sapiens
tgctattataaaaaa

SEQ ID NO: 1121237 - DNA, 15 bp, Homo sapiens
atgctattataaaaa

SEQ ID NO: 1121238 - DNA, 15 bp, Homo sapiens
tgtatatatatttat

SEQ ID NO: 1121239 - DNA, 15 bp, Homo sapiens
ttgtatatatattta

SEQ ID NO: 1121240 - DNA, 15 bp, Homo sapiens
attgtatatatattt

SEQ ID NO: 1121241 - DNA, 15 bp, Homo sapiens
aattgtatatatatt

SEQ ID NO: 1121242 - DNA, 15 bp, Homo sapiens
taattgtatatatat

SEQ ID NO: 1121243 - DNA, 15 bp, Homo sapiens
ataattgtatatata

SEQ ID NO: 1121244 - DNA, 15 bp, Homo sapiens
aataattgtatatat

SEQ ID NO: 1121245 - DNA, 15 bp, Homo sapiens
aaataattgtatata

SEQ ID NO: 1121246 - DNA, 15 bp, Homo sapiens
caaataattgtatat

SEQ ID NO: 1121247 - DNA, 15 bp, Homo sapiens
acaaataattgtata

SEQ ID NO: 1121248 - DNA, 15 bp, Homo sapiens
gacaaataattgtat

SEQ ID NO: 1121249 - DNA, 15 bp, Homo sapiens
tgacaaataattgta

SEQ ID NO: 1121250 - DNA, 15 bp, Homo sapiens
ttgacaaataattgt

SEQ ID NO: 1121251 - DNA, 15 bp, Homo sapiens
tttgacaaataattg

SEQ ID NO: 1121252 - DNA, 15 bp, Homo sapiens
ttttgacaaataatt

SEQ ID NO: 1121253 - DNA, 15 bp, Homo sapiens
attttgacaaataat

SEQ ID NO: 1121254 - DNA, 15 bp, Homo sapiens
tattttgacaaataa

SEQ ID NO: 1121255 - DNA, 15 bp, Homo sapiens
ttattttgacaaata

SEQ ID NO: 1121256 - DNA, 15 bp, Homo sapiens
tttattttgacaaat

SEQ ID NO: 1121257 - DNA, 15 bp, Homo sapiens
ttttattttgacaaa

SEQ ID NO: 1121258 - DNA, 15 bp, Homo sapiens
attttattttgacaa

SEQ ID NO: 1121259 - DNA, 15 bp, Homo sapiens
aattttattttgaca

SEQ ID NO: 1121260 - DNA, 15 bp, Homo sapiens
caattttattttgac

SEQ ID NO: 1121261 - DNA, 15 bp, Homo sapiens
tcaattttattttga

SEQ ID NO: 1121262 - DNA, 15 bp, Homo sapiens
ttcaattttattttg

SEQ ID NO: 1121263 - DNA, 15 bp, Homo sapiens
tttcaattttatttt

SEQ ID NO: 1121264 - DNA, 15 bp, Homo sapiens
ttttcaattttattt

SEQ ID NO: 1121265 - DNA, 15 bp, Homo sapiens
tttttcaattttatt

SEQ ID NO: 1121266 - DNA, 15 bp, Homo sapiens
ttttttcaattttat

SEQ ID NO: 1121267 - DNA, 15 bp, Homo sapiens
tttttttcaatttta

SEQ ID NO: 1121268 - DNA, 15 bp, Homo sapiens
atttttttcaatttt

SEQ ID NO: 1121269 - DNA, 15 bp, Homo sapiens
catttttttcaattt

SEQ ID NO: 1121270 - DNA, 15 bp, Homo sapiens
tcatttttttcaatt

SEQ ID NO: 1121271 - DNA, 15 bp, Homo sapiens
ttcatttttttcaat

SEQ ID NO: 1121272 - DNA, 15 bp, Homo sapiens
attcatttttttcaa

SEQ ID NO: 1121273 - DNA, 15 bp, Homo sapiens
aattcatttttttca

SEQ ID NO: 1121274 - DNA, 15 bp, Homo sapiens
aaattcatttttttc

SEQ ID NO: 1121275 - DNA, 15 bp, Homo sapiens
aaaattcattttttt

SEQ ID NO: 1121276 - DNA, 15 bp, Homo sapiens
gaaaattcatttttt

SEQ ID NO: 1121277 - DNA, 15 bp, Homo sapiens
tgaaaattcattttt

SEQ ID NO: 1121278 - DNA, 15 bp, Homo sapiens
atgaaaattcatttt

SEQ ID NO: 1121279 - DNA, 15 bp, Homo sapiens
catgaaaattcattt

SEQ ID NO: 1121280 - DNA, 15 bp, Homo sapiens
ccatgaaaattcatt

SEQ ID NO: 1121281 - DNA, 15 bp, Homo sapiens
tccatgaaaattcat

SEQ ID NO: 1121282 - DNA, 15 bp, Homo sapiens
ttccatgaaaattca

SEQ ID NO: 1121283 - DNA, 15 bp, Homo sapiens
tttccatgaaaattc

SEQ ID NO: 1121284 - DNA, 15 bp, Homo sapiens
ttttccatgaaaatt

SEQ ID NO: 1121285 - DNA, 15 bp, Homo sapiens
attttccatgaaaat

SEQ ID NO: 1121286 - DNA, 15 bp, Homo sapiens
tattttccatgaaaa

SEQ ID NO: 1121287 - DNA, 15 bp, Homo sapiens
ttattttccatgaaa

SEQ ID NO: 1121288 - DNA, 15 bp, Homo sapiens
gttattttccatgaa

SEQ ID NO: 1121289 - DNA, 15 bp, Homo sapiens
tgttattttccatga

SEQ ID NO: 1121290 - DNA, 15 bp, Homo sapiens
ctgttattttccatg

SEQ ID NO: 1121291 - DNA, 15 bp, Homo sapiens
actgttattttccat

SEQ ID NO: 1121292 - DNA, 15 bp, Homo sapiens
cactgttattttcca

SEQ ID NO: 1121293 - DNA, 15 bp, Homo sapiens
tcactgttattttcc

SEQ ID NO: 1121294 - DNA, 15 bp, Homo sapiens
ctcactgttattttc

SEQ ID NO: 1121295 - DNA, 15 bp, Homo sapiens
gctcactgttatttt

SEQ ID NO: 1121296 - DNA, 15 bp, Homo sapiens
tgctcactgttattt

SEQ ID NO: 1121297 - DNA, 15 bp, Homo sapiens
atgctcactgttatt

SEQ ID NO: 1121298 - DNA, 15 bp, Homo sapiens
tatgctcactgttat

SEQ ID NO: 1121299 - DNA, 15 bp, Homo sapiens
ctatgctcactgtta

SEQ ID NO: 1121300 - DNA, 15 bp, Homo sapiens
tctatgctcactgtt

SEQ ID NO: 1121301 - DNA, 15 bp, Homo sapiens
atctatgctcactgt

SEQ ID NO: 1121302 - DNA, 15 bp, Homo sapiens
tatctatgctcactg

SEQ ID NO: 1121303 - DNA, 15 bp, Homo sapiens
atatctatgctcact

SEQ ID NO: 1121304 - DNA, 15 bp, Homo sapiens
tatatctatgctcac

SEQ ID NO: 1121305 - DNA, 15 bp, Homo sapiens
ttatatctatgctca

SEQ ID NO: 1121306 - DNA, 15 bp, Homo sapiens
tttatatctatgctc

SEQ ID NO: 1121307 - DNA, 15 bp, Homo sapiens
ctttatatctatgct

SEQ ID NO: 1121308 - DNA, 15 bp, Homo sapiens
tctttatatctatgc

SEQ ID NO: 1121309 - DNA, 15 bp, Homo sapiens
atctttatatctatg

SEQ ID NO: 1121310 - DNA, 15 bp, Homo sapiens
aatctttatatctat

SEQ ID NO: 1121311 - DNA, 15 bp, Homo sapiens
taatctttatatcta

SEQ ID NO: 1121312 - DNA, 15 bp, Homo sapiens
ctaatctttatatct

SEQ ID NO: 1121313 - DNA, 15 bp, Homo sapiens
cctaatctttatatc

SEQ ID NO: 1121314 - DNA, 15 bp, Homo sapiens
ccctaatctttatat

SEQ ID NO: 1121315 - DNA, 15 bp, Homo sapiens
cccctaatctttata

SEQ ID NO: 1121316 - DNA, 15 bp, Homo sapiens
tcccctaatctttat

SEQ ID NO: 1121317 - DNA, 15 bp, Homo sapiens
atcccctaatcttta

SEQ ID NO: 1121318 - DNA, 15 bp, Homo sapiens
tatcccctaatcttt

SEQ ID NO: 1121319 - DNA, 15 bp, Homo sapiens
ttatcccctaatctt

SEQ ID NO: 1121320 - DNA, 15 bp, Homo sapiens
gttatcccctaatct

SEQ ID NO: 1121321 - DNA, 15 bp, Homo sapiens
agttatcccctaatc

SEQ ID NO: 1121322 - DNA, 15 bp, Homo sapiens
aagttatcccctaat

SEQ ID NO: 1121323 - DNA, 15 bp, Homo sapiens
gaagttatcccctaa

SEQ ID NO: 1121324 - DNA, 15 bp, Homo sapiens
agaagttatccccta

SEQ ID NO: 1121325 - DNA, 15 bp, Homo sapiens
cagaagttatcccct

SEQ ID NO: 1121326 - DNA, 15 bp, Homo sapiens
ccagaagttatcccc

SEQ ID NO: 1121327 - DNA, 15 bp, Homo sapiens
gccagaagttatccc

SEQ ID NO: 1121328 - DNA, 15 bp, Homo sapiens
agccagaagttatcc

SEQ ID NO: 1121329 - DNA, 15 bp, Homo sapiens
aagccagaagttatc

SEQ ID NO: 1121330 - DNA, 15 bp, Homo sapiens
gaagccagaagttat

SEQ ID NO: 1121331 - DNA, 15 bp, Homo sapiens
tgaagccagaagtta

SEQ ID NO: 1121332 - DNA, 15 bp, Homo sapiens
ttgaagccagaagtt

SEQ ID NO: 1121333 - DNA, 15 bp, Homo sapiens
tttgaagccagaagt

SEQ ID NO: 1121334 - DNA, 15 bp, Homo sapiens
atttgaagccagaag

SEQ ID NO: 1121335 - DNA, 15 bp, Homo sapiens
tatttgaagccagaa

SEQ ID NO: 1121336 - DNA, 15 bp, Homo sapiens
atatttgaagccaga

SEQ ID NO: 1121337 - DNA, 15 bp, Homo sapiens
aatatttgaagccag

SEQ ID NO: 1121338 - DNA, 15 bp, Homo sapiens
taatatttgaagcca

SEQ ID NO: 1121339 - DNA, 15 bp, Homo sapiens
ttaatatttgaagcc

SEQ ID NO: 1121340 - DNA, 15 bp, Homo sapiens
tttaatatttgaagc

SEQ ID NO: 1121341 - DNA, 15 bp, Homo sapiens
ttttaatatttgaag

SEQ ID NO: 1121342 - DNA, 15 bp, Homo sapiens
tttttaatatttgaa

SEQ ID NO: 1121343 - DNA, 15 bp, Homo sapiens
atttttaatatttga

SEQ ID NO: 1121344 - DNA, 15 bp, Homo sapiens
tatttttaatatttg

SEQ ID NO: 1121345 - DNA, 15 bp, Homo sapiens
gtatttttaatattt

SEQ ID NO: 1121346 - DNA, 15 bp, Homo sapiens
tgtatttttaatatt

SEQ ID NO: 1121347 - DNA, 15 bp, Homo sapiens
ttgtatttttaatat

SEQ ID NO: 1121348 - DNA, 15 bp, Homo sapiens
cttgtatttttaata

SEQ ID NO: 1121349 - DNA, 15 bp, Homo sapiens
acttgtatttttaat

SEQ ID NO: 1121350 - DNA, 15 bp, Homo sapiens
cacttgtatttttaa

SEQ ID NO: 1121351 - DNA, 15 bp, Homo sapiens
gcacttgtattttta

SEQ ID NO: 1121352 - DNA, 15 bp, Homo sapiens
tgcacttgtattttt

SEQ ID NO: 1121353 - DNA, 15 bp, Homo sapiens
ttgcacttgtatttt

SEQ ID NO: 1121354 - DNA, 15 bp, Homo sapiens
tttgcacttgtattt

SEQ ID NO: 1121355 - DNA, 15 bp, Homo sapiens
ttttgcacttgtatt

SEQ ID NO: 1121356 - DNA, 15 bp, Homo sapiens
cttttgcacttgtat

SEQ ID NO: 1121357 - DNA, 15 bp, Homo sapiens
tcttttgcacttgta

SEQ ID NO: 1121358 - DNA, 15 bp, Homo sapiens
gtcttttgcacttgt

SEQ ID NO: 1121359 - DNA, 15 bp, Homo sapiens
agtcttttgcacttg

SEQ ID NO: 1121360 - DNA, 15 bp, Homo sapiens
aagtcttttgcactt

SEQ ID NO: 1121361 - DNA, 15 bp, Homo sapiens
taagtcttttgcact

SEQ ID NO: 1121362 - DNA, 15 bp, Homo sapiens
ataagtcttttgcac

SEQ ID NO: 1121363 - DNA, 15 bp, Homo sapiens
cataagtcttttgca

SEQ ID NO: 1121364 - DNA, 15 bp, Homo sapiens
ccataagtcttttgc

SEQ ID NO: 1121365 - DNA, 15 bp, Homo sapiens
cccataagtcttttg

SEQ ID NO: 1121366 - DNA, 15 bp, Homo sapiens
tcccataagtctttt

SEQ ID NO: 1121367 - DNA, 15 bp, Homo sapiens
ttcccataagtcttt

SEQ ID NO: 1121368 - DNA, 15 bp, Homo sapiens
tttcccataagtctt

SEQ ID NO: 1121369 - DNA, 15 bp, Homo sapiens
ttttcccataagtct

SEQ ID NO: 1121370 - DNA, 15 bp, Homo sapiens
attttcccataagtc

SEQ ID NO: 1121371 - DNA, 15 bp, Homo sapiens
tattttcccataagt

SEQ ID NO: 1121372 - DNA, 15 bp, Homo sapiens
ttattttcccataag

SEQ ID NO: 1121373 - DNA, 15 bp, Homo sapiens
tttattttcccataa

SEQ ID NO: 1121374 - DNA, 15 bp, Homo sapiens
ttttattttcccata

SEQ ID NO: 1121375 - DNA, 15 bp, Homo sapiens
tttttattttcccat

SEQ ID NO: 1121376 - DNA, 15 bp, Homo sapiens
ttttttattttccca

SEQ ID NO: 1121377 - DNA, 15 bp, Homo sapiens
attttttattttccc

SEQ ID NO: 1121378 - DNA, 15 bp, Homo sapiens
tattttttattttcc

SEQ ID NO: 1121379 - DNA, 15 bp, Homo sapiens
ttattttttattttc

SEQ ID NO: 1121380 - DNA, 15 bp, Homo sapiens
tttattttttatttt

SEQ ID NO: 1121381 - DNA, 15 bp, Homo sapiens
ttttattttttattt

SEQ ID NO: 1121382 - DNA, 15 bp, Homo sapiens
cttttattttttatt

SEQ ID NO: 1121383 - DNA, 15 bp, Homo sapiens
acttttattttttat

SEQ ID NO: 1121384 - DNA, 15 bp, Homo sapiens
tacttttatttttta

SEQ ID NO: 1121385 - DNA, 15 bp, Homo sapiens
ttacttttatttttt

SEQ ID NO: 1121386 - DNA, 15 bp, Homo sapiens
tttacttttattttt

SEQ ID NO: 1121387 - DNA, 15 bp, Homo sapiens
ttttacttttatttt

SEQ ID NO: 1121388 - DNA, 15 bp, Homo sapiens
tttttacttttattt

SEQ ID NO: 1121389 - DNA, 15 bp, Homo sapiens
atttttacttttatt

SEQ ID NO: 1121390 - DNA, 15 bp, Homo sapiens
tatttttacttttat

SEQ ID NO: 1121391 - DNA, 15 bp, Homo sapiens
ttatttttactttta

SEQ ID NO: 1121392 - DNA, 15 bp, Homo sapiens
tttatttttactttt

SEQ ID NO: 1121393 - DNA, 15 bp, Homo sapiens
ttttatttttacttt

SEQ ID NO: 1121394 - DNA, 15 bp, Homo sapiens
attttatttttactt

SEQ ID NO: 1121395 - DNA, 15 bp, Homo sapiens
tattttatttttact

SEQ ID NO: 1121396 - DNA, 15 bp, Homo sapiens
atattttatttttac

SEQ ID NO: 1121397 - DNA, 15 bp, Homo sapiens
aatattttattttta

SEQ ID NO: 1121398 - DNA, 15 bp, Homo sapiens
aaatattttattttt

SEQ ID NO: 1121399 - DNA, 15 bp, Homo sapiens
taaatattttatttt

SEQ ID NO: 1121400 - DNA, 15 bp, Homo sapiens
ttaaatattttattt

SEQ ID NO: 1121401 - DNA, 15 bp, Homo sapiens
tttaaatattttatt

SEQ ID NO: 1121402 - DNA, 15 bp, Homo sapiens
ttttaaatattttat

SEQ ID NO: 1121403 - DNA, 15 bp, Homo sapiens
gtattttaaatattt

SEQ ID NO: 1121404 - DNA, 15 bp, Homo sapiens
agtattttaaatatt

SEQ ID NO: 1121405 - DNA, 15 bp, Homo sapiens
aagtattttaaatat

SEQ ID NO: 1121406 - DNA, 15 bp, Homo sapiens
aaagtattttaaata

SEQ ID NO: 1121407 - DNA, 15 bp, Homo sapiens
gaaagtattttaaat

SEQ ID NO: 1121408 - DNA, 15 bp, Homo sapiens
agaaagtattttaaa

SEQ ID NO: 1121409 - DNA, 15 bp, Homo sapiens
tagaaagtattttaa

SEQ ID NO: 1121410 - DNA, 15 bp, Homo sapiens
ctagaaagtatttta

SEQ ID NO: 1121411 - DNA, 15 bp, Homo sapiens
actagaaagtatttt

SEQ ID NO: 1121412 - DNA, 15 bp, Homo sapiens
tactagaaagtattt

SEQ ID NO: 1121413 - DNA, 15 bp, Homo sapiens
ttactagaaagtatt

SEQ ID NO: 1121414 - DNA, 15 bp, Homo sapiens
tttactagaaagtat

SEQ ID NO: 1121415 - DNA, 15 bp, Homo sapiens
gtttactagaaagta

SEQ ID NO: 1121416 - DNA, 15 bp, Homo sapiens
agtttactagaaagt

SEQ ID NO: 1121417 - DNA, 15 bp, Homo sapiens
tagtttactagaaag

SEQ ID NO: 1121418 - DNA, 15 bp, Homo sapiens
gtagtttactagaaa

SEQ ID NO: 1121419 - DNA, 15 bp, Homo sapiens
ggtagtttactagaa

SEQ ID NO: 1121420 - DNA, 15 bp, Homo sapiens
aggtagtttactaga

SEQ ID NO: 1121421 - DNA, 15 bp, Homo sapiens
caggtagtttactag

SEQ ID NO: 1121422 - DNA, 15 bp, Homo sapiens
ccaggtagtttacta

SEQ ID NO: 1121423 - DNA, 15 bp, Homo sapiens
accaggtagtttact

SEQ ID NO: 1121424 - DNA, 15 bp, Homo sapiens
taccaggtagtttac

SEQ ID NO: 1121425 - DNA, 15 bp, Homo sapiens
gtaccaggtagttta

SEQ ID NO: 1121426 - DNA, 15 bp, Homo sapiens
tgtaccaggtagttt

SEQ ID NO: 1121427 - DNA, 15 bp, Homo sapiens
gtgtaccaggtagtt

SEQ ID NO: 1121428 - DNA, 15 bp, Homo sapiens
tgtgtaccaggtagt

SEQ ID NO: 1121429 - DNA, 15 bp, Homo sapiens
ctgtgtaccaggtag

SEQ ID NO: 1121430 - DNA, 15 bp, Homo sapiens
actgtgtaccaggta

SEQ ID NO: 1121431 - DNA, 15 bp, Homo sapiens
tactgtgtaccaggt

SEQ ID NO: 1121432 - DNA, 15 bp, Homo sapiens
ctactgtgtaccagg

SEQ ID NO: 1121433 - DNA, 15 bp, Homo sapiens
tctactgtgtaccag

SEQ ID NO: 1121434 - DNA, 15 bp, Homo sapiens
ctctactgtgtacca

SEQ ID NO: 1121435 - DNA, 15 bp, Homo sapiens
actctactgtgtacc

SEQ ID NO: 1121436 - DNA, 15 bp, Homo sapiens
aactctactgtgtac

SEQ ID NO: 1121437 - DNA, 15 bp, Homo sapiens
gaactctactgtgta

SEQ ID NO: 1121438 - DNA, 15 bp, Homo sapiens
agaactctactgtgt

SEQ ID NO: 1121439 - DNA, 15 bp, Homo sapiens
tagaactctactgtg

SEQ ID NO: 1121440 - DNA, 15 bp, Homo sapiens
ttagaactctactgt

SEQ ID NO: 1121441 - DNA, 15 bp, Homo sapiens
tttagaactctactg

SEQ ID NO: 1121442 - DNA, 15 bp, Homo sapiens
atttagaactctact

SEQ ID NO: 1121443 - DNA, 15 bp, Homo sapiens
catttagaactctac

SEQ ID NO: 1121444 - DNA, 15 bp, Homo sapiens
gcatttagaactcta

SEQ ID NO: 1121445 - DNA, 15 bp, Homo sapiens
tgcatttagaactct

SEQ ID NO: 1121446 - DNA, 15 bp, Homo sapiens
ctgcatttagaactc

SEQ ID NO: 1121447 - DNA, 15 bp, Homo sapiens
tctgcatttagaact

SEQ ID NO: 1121448 - DNA, 15 bp, Homo sapiens
ttctgcatttagaac

SEQ ID NO: 1121449 - DNA, 15 bp, Homo sapiens
tttctgcatttagaa

SEQ ID NO: 1121450 - DNA, 15 bp, Homo sapiens
ctttctgcatttaga

SEQ ID NO: 1121451 - DNA, 15 bp, Homo sapiens
cctttctgcatttag

SEQ ID NO: 1121452 - DNA, 15 bp, Homo sapiens
tcctttctgcattta

SEQ ID NO: 1121453 - DNA, 15 bp, Homo sapiens
atcctttctgcattt

SEQ ID NO: 1121454 - DNA, 15 bp, Homo sapiens
aatcctttctgcatt

SEQ ID NO: 1121455 - DNA, 15 bp, Homo sapiens
gaatcctttctgcat

SEQ ID NO: 1121456 - DNA, 15 bp, Homo sapiens
agaatcctttctgca

SEQ ID NO: 1121457 - DNA, 15 bp, Homo sapiens
tagaatcctttctgc

SEQ ID NO: 1121458 - DNA, 15 bp, Homo sapiens
gtagaatcctttctg

SEQ ID NO: 1121459 - DNA, 15 bp, Homo sapiens
tgtagaatcctttct

SEQ ID NO: 1121460 - DNA, 15 bp, Homo sapiens
atgtagaatcctttc

SEQ ID NO: 1121461 - DNA, 15 bp, Homo sapiens
catgtagaatccttt

SEQ ID NO: 1121462 - DNA, 15 bp, Homo sapiens
acatgtagaatcctt

SEQ ID NO: 1121463 - DNA, 15 bp, Homo sapiens
tacatgtagaatcct

SEQ ID NO: 1121464 - DNA, 15 bp, Homo sapiens
ttacatgtagaatcc

SEQ ID NO: 1121465 - DNA, 15 bp, Homo sapiens
attacatgtagaatc

SEQ ID NO: 1121466 - DNA, 15 bp, Homo sapiens
aattacatgtagaat

SEQ ID NO: 1121467 - DNA, 15 bp, Homo sapiens
caattacatgtagaa

SEQ ID NO: 1121468 - DNA, 15 bp, Homo sapiens
ccaattacatgtaga

SEQ ID NO: 1121469 - DNA, 15 bp, Homo sapiens
cccaattacatgtag

SEQ ID NO: 1121470 - DNA, 15 bp, Homo sapiens
tcccaattacatgta

SEQ ID NO: 1121471 - DNA, 15 bp, Homo sapiens
atcccaattacatgt

SEQ ID NO: 1121472 - DNA, 15 bp, Homo sapiens
aatcccaattacatg

SEQ ID NO: 1121473 - DNA, 15 bp, Homo sapiens
taatcccaattacat

SEQ ID NO: 1121474 - DNA, 15 bp, Homo sapiens
gtaatcccaattaca

SEQ ID NO: 1121475 - DNA, 15 bp, Homo sapiens
tgtaatcccaattac

SEQ ID NO: 1121476 - DNA, 15 bp, Homo sapiens
ctgtaatcccaatta

SEQ ID NO: 1121477 - DNA, 15 bp, Homo sapiens
cctgtaatcccaatt

SEQ ID NO: 1121478 - DNA, 15 bp, Homo sapiens
tcacacacctgtaat

SEQ ID NO: 1121479 - DNA, 15 bp, Homo sapiens
atcacacacctgtaa

SEQ ID NO: 1121480 - DNA, 15 bp, Homo sapiens
gatcacacacctgta

SEQ ID NO: 1121481 - DNA, 15 bp, Homo sapiens
ggatcacacacctgt

SEQ ID NO: 1121482 - DNA, 15 bp, Homo sapiens
gggatcacacacctg

SEQ ID NO: 1121483 - DNA, 15 bp, Homo sapiens
tgggatcacacacct

SEQ ID NO: 1121484 - DNA, 15 bp, Homo sapiens
ttgggatcacacacc

SEQ ID NO: 1121485 - DNA, 15 bp, Homo sapiens
tttgggatcacacac

SEQ ID NO: 1121486 - DNA, 15 bp, Homo sapiens
ctttgggatcacaca

SEQ ID NO: 1121487 - DNA, 15 bp, Homo sapiens
cctttgggatcacac

SEQ ID NO: 1121488 - DNA, 15 bp, Homo sapiens
tcctttgggatcaca

SEQ ID NO: 1121489 - DNA, 15 bp, Homo sapiens
atcctttgggatcac

SEQ ID NO: 1121490 - DNA, 15 bp, Homo sapiens
aatcctttgggatca

SEQ ID NO: 1121491 - DNA, 15 bp, Homo sapiens
gaatcctttgggatc

SEQ ID NO: 1121492 - DNA, 15 bp, Homo sapiens
agaatcctttgggat

SEQ ID NO: 1121493 - DNA, 15 bp, Homo sapiens
tagaatcctttggga

SEQ ID NO: 1121494 - DNA, 15 bp, Homo sapiens
ttagaatcctttggg

SEQ ID NO: 1121495 - DNA, 15 bp, Homo sapiens
tttagaatcctttgg

SEQ ID NO: 1121496 - DNA, 15 bp, Homo sapiens
atttagaatcctttg

SEQ ID NO: 1121497 - DNA, 15 bp, Homo sapiens
catttagaatccttt

SEQ ID NO: 1121498 - DNA, 15 bp, Homo sapiens
acatttagaatcctt

SEQ ID NO: 1121499 - DNA, 15 bp, Homo sapiens
tacatttagaatcct

SEQ ID NO: 1121500 - DNA, 15 bp, Homo sapiens
ttacatttagaatcc

SEQ ID NO: 1121501 - DNA, 15 bp, Homo sapiens
attacatttagaatc

SEQ ID NO: 1121502 - DNA, 15 bp, Homo sapiens
cattacatttagaat

SEQ ID NO: 1121503 - DNA, 15 bp, Homo sapiens
tcattacatttagaa

SEQ ID NO: 1121504 - DNA, 15 bp, Homo sapiens
atcattacatttaga

SEQ ID NO: 1121505 - DNA, 15 bp, Homo sapiens
aatcattacatttag

SEQ ID NO: 1121506 - DNA, 15 bp, Homo sapiens
taatcattacattta

SEQ ID NO: 1121507 - DNA, 15 bp, Homo sapiens
ttaatcattacattt

SEQ ID NO: 1121508 - DNA, 15 bp, Homo sapiens
cttaatcattacatt

SEQ ID NO: 1121509 - DNA, 15 bp, Homo sapiens
ccttaatcattacat

SEQ ID NO: 1121510 - DNA, 15 bp, Homo sapiens
cccttaatcattaca

SEQ ID NO: 1121511 - DNA, 15 bp, Homo sapiens
acccttaatcattac

SEQ ID NO: 1121512 - DNA, 15 bp, Homo sapiens
cacccttaatcatta

SEQ ID NO: 1121513 - DNA, 15 bp, Homo sapiens
gcacccttaatcatt

SEQ ID NO: 1121514 - DNA, 15 bp, Homo sapiens
tgcacccttaatcat

SEQ ID NO: 1121515 - DNA, 15 bp, Homo sapiens
atgcacccttaatca

SEQ ID NO: 1121516 - DNA, 15 bp, Homo sapiens
aatgcacccttaatc

SEQ ID NO: 1121517 - DNA, 15 bp, Homo sapiens
gaatgcacccttaat

SEQ ID NO: 1121518 - DNA, 15 bp, Homo sapiens
ggaatgcacccttaa

SEQ ID NO: 1121519 - DNA, 15 bp, Homo sapiens
tggaatgcaccctta

SEQ ID NO: 1121520 - DNA, 15 bp, Homo sapiens
ttggaatgcaccctt

SEQ ID NO: 1121521 - DNA, 15 bp, Homo sapiens
tttggaatgcaccct

SEQ ID NO: 1121522 - DNA, 15 bp, Homo sapiens
ttttggaatgcaccc

SEQ ID NO: 1121523 - DNA, 15 bp, Homo sapiens
tttttggaatgcacc

SEQ ID NO: 1121524 - DNA, 15 bp, Homo sapiens
ttttttggaatgcac

SEQ ID NO: 1121525 - DNA, 15 bp, Homo sapiens
tttttttggaatgca

SEQ ID NO: 1121526 - DNA, 15 bp, Homo sapiens
gtttttttggaatgc

SEQ ID NO: 1121527 - DNA, 15 bp, Homo sapiens
tgtttttttggaatg

SEQ ID NO: 1121528 - DNA, 15 bp, Homo sapiens
ttgtttttttggaat

SEQ ID NO: 1121529 - DNA, 15 bp, Homo sapiens
tttgtttttttggaa

SEQ ID NO: 1121530 - DNA, 15 bp, Homo sapiens
ttttgtttttttgga

SEQ ID NO: 1121531 - DNA, 15 bp, Homo sapiens
gttttgtttttttgg

SEQ ID NO: 1121532 - DNA, 15 bp, Homo sapiens
tgttttgtttttttg

SEQ ID NO: 1121533 - DNA, 15 bp, Homo sapiens
gttgttttgtttttt

SEQ ID NO: 1121534 - DNA, 15 bp, Homo sapiens
tgttgttttgttttt

SEQ ID NO: 1121535 - DNA, 15 bp, Homo sapiens
ttgttgttttgtttt

SEQ ID NO: 1121536 - DNA, 15 bp, Homo sapiens
tttgttgttttgttt

SEQ ID NO: 1121537 - DNA, 15 bp, Homo sapiens
ttttgttgttttgtt

SEQ ID NO: 1121538 - DNA, 15 bp, Homo sapiens
tttttgttgttttgt

SEQ ID NO: 1121539 - DNA, 15 bp, Homo sapiens
gtttttgttgttttg

SEQ ID NO: 1121540 - DNA, 15 bp, Homo sapiens
tgtttttgttgtttt

SEQ ID NO: 1121541 - DNA, 15 bp, Homo sapiens
ttgtttttgttgttt

SEQ ID NO: 1121542 - DNA, 15 bp, Homo sapiens
tttgtttttgttgtt

SEQ ID NO: 1121543 - DNA, 15 bp, Homo sapiens
ttttgtttttgttgt

SEQ ID NO: 1121544 - DNA, 15 bp, Homo sapiens
tttttgtttttgttg

SEQ ID NO: 1121545 - DNA, 15 bp, Homo sapiens
cttttttgtttttgt

SEQ ID NO: 1121546 - DNA, 15 bp, Homo sapiens
ccttttttgtttttg

SEQ ID NO: 1121547 - DNA, 15 bp, Homo sapiens
accttttttgttttt

SEQ ID NO: 1121548 - DNA, 15 bp, Homo sapiens
gaccttttttgtttt

SEQ ID NO: 1121549 - DNA, 15 bp, Homo sapiens
ggaccttttttgttt

SEQ ID NO: 1121550 - DNA, 15 bp, Homo sapiens
tggaccttttttgtt

SEQ ID NO: 1121551 - DNA, 15 bp, Homo sapiens
atggaccttttttgt

SEQ ID NO: 1121552 - DNA, 15 bp, Homo sapiens
aatggaccttttttg

SEQ ID NO: 1121553 - DNA, 15 bp, Homo sapiens
gaatggacctttttt

SEQ ID NO: 1121554 - DNA, 15 bp, Homo sapiens
ggaatggaccttttt

SEQ ID NO: 1121555 - DNA, 15 bp, Homo sapiens
tggaatggacctttt

SEQ ID NO: 1121556 - DNA, 15 bp, Homo sapiens
atggaatggaccttt

SEQ ID NO: 1121557 - DNA, 15 bp, Homo sapiens
aatggaatggacctt

SEQ ID NO: 1121558 - DNA, 15 bp, Homo sapiens
caatggaatggacct

SEQ ID NO: 1121559 - DNA, 15 bp, Homo sapiens
acaatggaatggacc

SEQ ID NO: 1121560 - DNA, 15 bp, Homo sapiens
aacaatggaatggac

SEQ ID NO: 1121561 - DNA, 15 bp, Homo sapiens
aaacaatggaatgga

SEQ ID NO: 1121562 - DNA, 15 bp, Homo sapiens
gaaacaatggaatgg

SEQ ID NO: 1121563 - DNA, 15 bp, Homo sapiens
agaaacaatggaatg

SEQ ID NO: 1121564 - DNA, 15 bp, Homo sapiens
gagaaacaatggaat

SEQ ID NO: 1121565 - DNA, 15 bp, Homo sapiens
tgagaaacaatggaa

SEQ ID NO: 1121566 - DNA, 15 bp, Homo sapiens
ttgagaaacaatgga

SEQ ID NO: 1121567 - DNA, 15 bp, Homo sapiens
attgagaaacaatgg

SEQ ID NO: 1121568 - DNA, 15 bp, Homo sapiens
aattgagaaacaatg

SEQ ID NO: 1121569 - DNA, 15 bp, Homo sapiens
aaattgagaaacaat

SEQ ID NO: 1121570 - DNA, 15 bp, Homo sapiens
gaaattgagaaacaa

SEQ ID NO: 1121571 - DNA, 15 bp, Homo sapiens
agaaattgagaaaca

SEQ ID NO: 1121572 - DNA, 15 bp, Homo sapiens
gagaaattgagaaac

SEQ ID NO: 1121573 - DNA, 15 bp, Homo sapiens
ggagaaattgagaaa

SEQ ID NO: 1121574 - DNA, 15 bp, Homo sapiens
aggagaaattgagaa

SEQ ID NO: 1121575 - DNA, 15 bp, Homo sapiens
gaggagaaattgaga

SEQ ID NO: 1121576 - DNA, 15 bp, Homo sapiens
agaggagaaattgag

SEQ ID NO: 1121577 - DNA, 15 bp, Homo sapiens
gagaggagaaattga

SEQ ID NO: 1121578 - DNA, 15 bp, Homo sapiens
tgagaggagaaattg

SEQ ID NO: 1121579 - DNA, 15 bp, Homo sapiens
ttgagaggagaaatt

SEQ ID NO: 1121580 - DNA, 15 bp, Homo sapiens
tttgagaggagaaat

SEQ ID NO: 1121581 - DNA, 15 bp, Homo sapiens
atttgagaggagaaa

SEQ ID NO: 1121582 - DNA, 15 bp, Homo sapiens
catttgagaggagaa

SEQ ID NO: 1121583 - DNA, 15 bp, Homo sapiens
gcatttgagaggaga

SEQ ID NO: 1121584 - DNA, 15 bp, Homo sapiens
tgcatttgagaggag

SEQ ID NO: 1121585 - DNA, 15 bp, Homo sapiens
atgcatttgagagga

SEQ ID NO: 1121586 - DNA, 15 bp, Homo sapiens
catgcatttgagagg

SEQ ID NO: 1121587 - DNA, 15 bp, Homo sapiens
tcatgcatttgagag

SEQ ID NO: 1121588 - DNA, 15 bp, Homo sapiens
gtcatgcatttgaga

SEQ ID NO: 1121589 - DNA, 15 bp, Homo sapiens
ggtcatgcatttgag

SEQ ID NO: 1121590 - DNA, 15 bp, Homo sapiens
tggtcatgcatttga

SEQ ID NO: 1121591 - DNA, 15 bp, Homo sapiens
gtggtcatgcatttg

SEQ ID NO: 1121592 - DNA, 15 bp, Homo sapiens
tgtggtcatgcattt

SEQ ID NO: 1121593 - DNA, 15 bp, Homo sapiens
ctgtggtcatgcatt

SEQ ID NO: 1121594 - DNA, 15 bp, Homo sapiens
gctgtggtcatgcat

SEQ ID NO: 1121595 - DNA, 15 bp, Homo sapiens
agctgtggtcatgca

SEQ ID NO: 1121596 - DNA, 15 bp, Homo sapiens
aagctgtggtcatgc

SEQ ID NO: 1121597 - DNA, 15 bp, Homo sapiens
gaagctgtggtcatg

SEQ ID NO: 1121598 - DNA, 15 bp, Homo sapiens
tgaagctgtggtcat

SEQ ID NO: 1121599 - DNA, 15 bp, Homo sapiens
ctgaagctgtggtca

SEQ ID NO: 1121600 - DNA, 15 bp, Homo sapiens
tctgaagctgtggtc

SEQ ID NO: 1121601 - DNA, 15 bp, Homo sapiens
ttctgaagctgtggt

SEQ ID NO: 1121602 - DNA, 15 bp, Homo sapiens
attctgaagctgtgg

SEQ ID NO: 1121603 - DNA, 15 bp, Homo sapiens
aattctgaagctgtg

SEQ ID NO: 1121604 - DNA, 15 bp, Homo sapiens
gaattctgaagctgt

SEQ ID NO: 1121605 - DNA, 15 bp, Homo sapiens
tgaattctgaagctg

SEQ ID NO: 1121606 - DNA, 15 bp, Homo sapiens
ttgaattctgaagct

SEQ ID NO: 1121607 - DNA, 15 bp, Homo sapiens
gttgaattctgaagc

SEQ ID NO: 1121608 - DNA, 15 bp, Homo sapiens
agttgaattctgaag

SEQ ID NO: 1121609 - DNA, 15 bp, Homo sapiens
aagttgaattctgaa

SEQ ID NO: 1121610 - DNA, 15 bp, Homo sapiens
caagttgaattctga

SEQ ID NO: 1121611 - DNA, 15 bp, Homo sapiens
gcaagttgaattctg

SEQ ID NO: 1121612 - DNA, 15 bp, Homo sapiens
agcaagttgaattct

SEQ ID NO: 1121613 - DNA, 15 bp, Homo sapiens
aagcaagttgaattc

SEQ ID NO: 1121614 - DNA, 15 bp, Homo sapiens
taagcaagttgaatt

SEQ ID NO: 1121615 - DNA, 15 bp, Homo sapiens
ataagcaagttgaat

SEQ ID NO: 1121616 - DNA, 15 bp, Homo sapiens
tataagcaagttgaa

SEQ ID NO: 1121617 - DNA, 15 bp, Homo sapiens
ttataagcaagttga

SEQ ID NO: 1121618 - DNA, 15 bp, Homo sapiens
attataagcaagttg

SEQ ID NO: 1121619 - DNA, 15 bp, Homo sapiens
aattataagcaagtt

SEQ ID NO: 1121620 - DNA, 15 bp, Homo sapiens
gaattataagcaagt

SEQ ID NO: 1121621 - DNA, 15 bp, Homo sapiens
tgaattataagcaag

SEQ ID NO: 1121622 - DNA, 15 bp, Homo sapiens
gtgaattataagcaa

SEQ ID NO: 1121623 - DNA, 15 bp, Homo sapiens
agtgaattataagca

SEQ ID NO: 1121624 - DNA, 15 bp, Homo sapiens
aagtgaattataagc

SEQ ID NO: 1121625 - DNA, 15 bp, Homo sapiens
gaagtgaattataag

SEQ ID NO: 1121626 - DNA, 15 bp, Homo sapiens
agaagtgaattataa

SEQ ID NO: 1121627 - DNA, 15 bp, Homo sapiens
aagaagtgaattata

SEQ ID NO: 1121628 - DNA, 15 bp, Homo sapiens
gaagaagtgaattat

SEQ ID NO: 1121629 - DNA, 15 bp, Homo sapiens
agaagaagtgaatta

SEQ ID NO: 1121630 - DNA, 15 bp, Homo sapiens
aagaagaagtgaatt

SEQ ID NO: 1121631 - DNA, 15 bp, Homo sapiens
gaagaagaagtgaat

SEQ ID NO: 1121632 - DNA, 15 bp, Homo sapiens
agaagaagaagtgaa

SEQ ID NO: 1121633 - DNA, 15 bp, Homo sapiens
aagaagaagaagtga

SEQ ID NO: 1121634 - DNA, 15 bp, Homo sapiens
aaagaagaagaagtg

SEQ ID NO: 1121635 - DNA, 15 bp, Homo sapiens
aaaagaagaagaagt

SEQ ID NO: 1121636 - DNA, 15 bp, Homo sapiens
ctaaaaaaaaaagaa

SEQ ID NO: 1121637 - DNA, 15 bp, Homo sapiens
tctaaaaaaaaaaga

SEQ ID NO: 1121638 - DNA, 15 bp, Homo sapiens
gtctaaaaaaaaaag

SEQ ID NO: 1121639 - DNA, 15 bp, Homo sapiens
tgtctaaaaaaaaaa

SEQ ID NO: 1121640 - DNA, 15 bp, Homo sapiens
ctgtctaaaaaaaaa

SEQ ID NO: 1121641 - DNA, 15 bp, Homo sapiens
tctgtctaaaaaaaa

SEQ ID NO: 1121642 - DNA, 15 bp, Homo sapiens
ctctgtctaaaaaaa

SEQ ID NO: 1121643 - DNA, 15 bp, Homo sapiens
gagactctgtctaaa

SEQ ID NO: 1121644 - DNA, 15 bp, Homo sapiens
tgagactctgtctaa

SEQ ID NO: 1121645 - DNA, 15 bp, Homo sapiens
gtgagactctgtcta

SEQ ID NO: 1121646 - DNA, 15 bp, Homo sapiens
cactgcaccactgca

SEQ ID NO: 1121647 - DNA, 15 bp, Homo sapiens
ccactgcaccactgc

SEQ ID NO: 1121648 - DNA, 15 bp, Homo sapiens
gccactgcaccactg

SEQ ID NO: 1121649 - DNA, 15 bp, Homo sapiens
cgccactgcaccact

SEQ ID NO: 1121650 - DNA, 15 bp, Homo sapiens
gcgccactgcaccac

SEQ ID NO: 1121651 - DNA, 15 bp, Homo sapiens
tgcgccactgcacca

SEQ ID NO: 1121652 - DNA, 15 bp, Homo sapiens
ttgcgccactgcacc

SEQ ID NO: 1121653 - DNA, 15 bp, Homo sapiens
cttgcgccactgcac

SEQ ID NO: 1121654 - DNA, 15 bp, Homo sapiens
tcttgcgccactgca

SEQ ID NO: 1121655 - DNA, 15 bp, Homo sapiens
atcttgcgccactgc

SEQ ID NO: 1121656 - DNA, 15 bp, Homo sapiens
gatcttgcgccactg

SEQ ID NO: 1121657 - DNA, 15 bp, Homo sapiens
tgatcttgcgccact

SEQ ID NO: 1121658 - DNA, 15 bp, Homo sapiens
ctgatcttgcgccac

SEQ ID NO: 1121659 - DNA, 15 bp, Homo sapiens
gctgatcttgcgcca

SEQ ID NO: 1121660 - DNA, 15 bp, Homo sapiens
agctgatcttgcgcc

SEQ ID NO: 1121661 - DNA, 15 bp, Homo sapiens
gagctgatcttgcgc

SEQ ID NO: 1121662 - DNA, 15 bp, Homo sapiens
tgagctgatcttgcg

SEQ ID NO: 1121663 - DNA, 15 bp, Homo sapiens
gtgagctgatcttgc

SEQ ID NO: 1121664 - DNA, 15 bp, Homo sapiens
agtgagctgatcttg

SEQ ID NO: 1121665 - DNA, 15 bp, Homo sapiens
cagtgagctgatctt

SEQ ID NO: 1121666 - DNA, 15 bp, Homo sapiens
gcagtgagctgatct

SEQ ID NO: 1121667 - DNA, 15 bp, Homo sapiens
acatgtctgtaatcc

SEQ ID NO: 1121668 - DNA, 15 bp, Homo sapiens
cacatgtctgtaatc

SEQ ID NO: 1121669 - DNA, 15 bp, Homo sapiens
gcacatgtctgtaat

SEQ ID NO: 1121670 - DNA, 15 bp, Homo sapiens
ggcacatgtctgtaa

SEQ ID NO: 1121671 - DNA, 15 bp, Homo sapiens
tggcacatgtctgta

SEQ ID NO: 1121672 - DNA, 15 bp, Homo sapiens
gtggcacatgtctgt

SEQ ID NO: 1121673 - DNA, 15 bp, Homo sapiens
tgtggcacatgtctg

SEQ ID NO: 1121674 - DNA, 15 bp, Homo sapiens
ttgtggcacatgtct

SEQ ID NO: 1121675 - DNA, 15 bp, Homo sapiens
attgtggcacatgtc

SEQ ID NO: 1121676 - DNA, 15 bp, Homo sapiens
cattgtggcacatgt

SEQ ID NO: 1121677 - DNA, 15 bp, Homo sapiens
acattgtggcacatg

SEQ ID NO: 1121678 - DNA, 15 bp, Homo sapiens
gacattgtggcacat

SEQ ID NO: 1121679 - DNA, 15 bp, Homo sapiens
agacattgtggcaca

SEQ ID NO: 1121680 - DNA, 15 bp, Homo sapiens
cagacattgtggcac

SEQ ID NO: 1121681 - DNA, 15 bp, Homo sapiens
ccagacattgtggca

SEQ ID NO: 1121682 - DNA, 15 bp, Homo sapiens
gccagacattgtggc

SEQ ID NO: 1121683 - DNA, 15 bp, Homo sapiens
agccagacattgtgg

SEQ ID NO: 1121684 - DNA, 15 bp, Homo sapiens
tagccagacattgtg

SEQ ID NO: 1121685 - DNA, 15 bp, Homo sapiens
ttagccagacattgt

SEQ ID NO: 1121686 - DNA, 15 bp, Homo sapiens
attagccagacattg

SEQ ID NO: 1121687 - DNA, 15 bp, Homo sapiens
aattagccagacatt

SEQ ID NO: 1121688 - DNA, 15 bp, Homo sapiens
aaattagccagacat

SEQ ID NO: 1121689 - DNA, 15 bp, Homo sapiens
aaaattagccagaca

SEQ ID NO: 1121690 - DNA, 15 bp, Homo sapiens
aaaaattagccagac

SEQ ID NO: 1121691 - DNA, 15 bp, Homo sapiens
aaaaaattagccaga

SEQ ID NO: 1121692 - DNA, 15 bp, Homo sapiens
taaaaaaaattagcc

SEQ ID NO: 1121693 - DNA, 15 bp, Homo sapiens
aaataaaaaaaatta

SEQ ID NO: 1121694 - DNA, 15 bp, Homo sapiens
aaaataaaaaaaatt

SEQ ID NO: 1121695 - DNA, 15 bp, Homo sapiens
taaaaataaaaaaaa

SEQ ID NO: 1121696 - DNA, 15 bp, Homo sapiens
gccccgtctctacta

SEQ ID NO: 1121697 - DNA, 15 bp, Homo sapiens
ggccccgtctctact

SEQ ID NO: 1121698 - DNA, 15 bp, Homo sapiens
aggccccgtctctac

SEQ ID NO: 1121699 - DNA, 15 bp, Homo sapiens
aaggccccgtctcta

SEQ ID NO: 1121700 - DNA, 15 bp, Homo sapiens
taaggccccgtctct

SEQ ID NO: 1121701 - DNA, 15 bp, Homo sapiens
ataaggccccgtctc

SEQ ID NO: 1121702 - DNA, 15 bp, Homo sapiens
gataaggccccgtct

SEQ ID NO: 1121703 - DNA, 15 bp, Homo sapiens
tgataaggccccgtc

SEQ ID NO: 1121704 - DNA, 15 bp, Homo sapiens
atgataaggccccgt

SEQ ID NO: 1121705 - DNA, 15 bp, Homo sapiens
catgataaggccccg

SEQ ID NO: 1121706 - DNA, 15 bp, Homo sapiens
acatgataaggcccc

SEQ ID NO: 1121707 - DNA, 15 bp, Homo sapiens
aacatgataaggccc

SEQ ID NO: 1121708 - DNA, 15 bp, Homo sapiens
caacatgataaggcc

SEQ ID NO: 1121709 - DNA, 15 bp, Homo sapiens
ccaacatgataaggc

SEQ ID NO: 1121710 - DNA, 15 bp, Homo sapiens
gccaacatgataagg

SEQ ID NO: 1121711 - DNA, 15 bp, Homo sapiens
ggccaacatgataag

SEQ ID NO: 1121712 - DNA, 15 bp, Homo sapiens
tggccaacatgataa

SEQ ID NO: 1121713 - DNA, 15 bp, Homo sapiens
ctggccaacatgata

SEQ ID NO: 1121714 - DNA, 15 bp, Homo sapiens
agatcatctgaggtc

SEQ ID NO: 1121715 - DNA, 15 bp, Homo sapiens
cagatcatctgaggt

SEQ ID NO: 1121716 - DNA, 15 bp, Homo sapiens
gcagatcatctgagg

SEQ ID NO: 1121717 - DNA, 15 bp, Homo sapiens
ggcagatcatctgag

SEQ ID NO: 1121718 - DNA, 15 bp, Homo sapiens
aggcagatcatctga

SEQ ID NO: 1121719 - DNA, 15 bp, Homo sapiens
caggcagatcatctg

SEQ ID NO: 1121720 - DNA, 15 bp, Homo sapiens
gcaggcagatcatct

SEQ ID NO: 1121721 - DNA, 15 bp, Homo sapiens
ggcaggcagatcatc

SEQ ID NO: 1121722 - DNA, 15 bp, Homo sapiens
aggcaggcagatcat

SEQ ID NO: 1121723 - DNA, 15 bp, Homo sapiens
aaggcaggcagatca

SEQ ID NO: 1121724 - DNA, 15 bp, Homo sapiens
ttcctgtaatcctag

SEQ ID NO: 1121725 - DNA, 15 bp, Homo sapiens
attcctgtaatccta

SEQ ID NO: 1121726 - DNA, 15 bp, Homo sapiens
cattcctgtaatcct

SEQ ID NO: 1121727 - DNA, 15 bp, Homo sapiens
tcattcctgtaatcc

SEQ ID NO: 1121728 - DNA, 15 bp, Homo sapiens
ctcattcctgtaatc

SEQ ID NO: 1121729 - DNA, 15 bp, Homo sapiens
gctcattcctgtaat

SEQ ID NO: 1121730 - DNA, 15 bp, Homo sapiens
ggctcattcctgtaa

SEQ ID NO: 1121731 - DNA, 15 bp, Homo sapiens
tggctcattcctgta

SEQ ID NO: 1121732 - DNA, 15 bp, Homo sapiens
gtggctcattcctgt

SEQ ID NO: 1121733 - DNA, 15 bp, Homo sapiens
agtggctcattcctg

SEQ ID NO: 1121734 - DNA, 15 bp, Homo sapiens
cagtggctcattcct

SEQ ID NO: 1121735 - DNA, 15 bp, Homo sapiens
acagtggctcattcc

SEQ ID NO: 1121736 - DNA, 15 bp, Homo sapiens
cacagtggctcattc

SEQ ID NO: 1121737 - DNA, 15 bp, Homo sapiens
gcacagtggctcatt

SEQ ID NO: 1121738 - DNA, 15 bp, Homo sapiens
aggccgggcacagtg

SEQ ID NO: 1121739 - DNA, 15 bp, Homo sapiens
taggccgggcacagt

SEQ ID NO: 1121740 - DNA, 15 bp, Homo sapiens
ataggccgggcacag

SEQ ID NO: 1121741 - DNA, 15 bp, Homo sapiens
tataggccgggcaca

SEQ ID NO: 1121742 - DNA, 15 bp, Homo sapiens
ttataggccgggcac

SEQ ID NO: 1121743 - DNA, 15 bp, Homo sapiens
attataggccgggca

SEQ ID NO: 1121744 - DNA, 15 bp, Homo sapiens
aattataggccgggc

SEQ ID NO: 1121745 - DNA, 15 bp, Homo sapiens
gaattataggccggg

SEQ ID NO: 1121746 - DNA, 15 bp, Homo sapiens
tgaattataggccgg

SEQ ID NO: 1121747 - DNA, 15 bp, Homo sapiens
gtgaattataggccg

SEQ ID NO: 1121748 - DNA, 15 bp, Homo sapiens
agtgaattataggcc

SEQ ID NO: 1121749 - DNA, 15 bp, Homo sapiens
aagtgaattataggc

SEQ ID NO: 1121750 - DNA, 15 bp, Homo sapiens
gaagtgaattatagg

SEQ ID NO: 1121751 - DNA, 15 bp, Homo sapiens
agaagtgaattatag

SEQ ID NO: 1121752 - DNA, 15 bp, Homo sapiens
taagaagtgaattat

SEQ ID NO: 1121753 - DNA, 15 bp, Homo sapiens
ttaagaagtgaatta

SEQ ID NO: 1121754 - DNA, 15 bp, Homo sapiens
tttaagaagtgaatt

SEQ ID NO: 1121755 - DNA, 15 bp, Homo sapiens
atttaagaagtgaat

SEQ ID NO: 1121756 - DNA, 15 bp, Homo sapiens
aatttaagaagtgaa

SEQ ID NO: 1121757 - DNA, 15 bp, Homo sapiens
caatttaagaagtga

SEQ ID NO: 1121758 - DNA, 15 bp, Homo sapiens
tcaatttaagaagtg

SEQ ID NO: 1121759 - DNA, 15 bp, Homo sapiens
ttcaatttaagaagt

SEQ ID NO: 1121760 - DNA, 15 bp, Homo sapiens
tttcaatttaagaag

SEQ ID NO: 1121761 - DNA, 15 bp, Homo sapiens
ttttcaatttaagaa

SEQ ID NO: 1121762 - DNA, 15 bp, Homo sapiens
cttttcaatttaaga

SEQ ID NO: 1121763 - DNA, 15 bp, Homo sapiens
acttttcaatttaag

SEQ ID NO: 1121764 - DNA, 15 bp, Homo sapiens
tacttttcaatttaa

SEQ ID NO: 1121765 - DNA, 15 bp, Homo sapiens
gtacttttcaattta

SEQ ID NO: 1121766 - DNA, 15 bp, Homo sapiens
tgtacttttcaattt

SEQ ID NO: 1121767 - DNA, 15 bp, Homo sapiens
gtgtacttttcaatt

SEQ ID NO: 1121768 - DNA, 15 bp, Homo sapiens
tgtgtacttttcaat

SEQ ID NO: 1121769 - DNA, 15 bp, Homo sapiens
gtgtgtacttttcaa

SEQ ID NO: 1121770 - DNA, 15 bp, Homo sapiens
tgtgtgtacttttca

SEQ ID NO: 1121771 - DNA, 15 bp, Homo sapiens
gtgtgtgtacttttc

SEQ ID NO: 1121772 - DNA, 15 bp, Homo sapiens
tgtgtgtgtactttt

SEQ ID NO: 1121773 - DNA, 15 bp, Homo sapiens
ttgtgtgtgtacttt

SEQ ID NO: 1121774 - DNA, 15 bp, Homo sapiens
cttgtgtgtgtactt

SEQ ID NO: 1121775 - DNA, 15 bp, Homo sapiens
tcttgtgtgtgtact

SEQ ID NO: 1121776 - DNA, 15 bp, Homo sapiens
ttcttgtgtgtgtac

SEQ ID NO: 1121777 - DNA, 15 bp, Homo sapiens
cttcttgtgtgtgta

SEQ ID NO: 1121778 - DNA, 15 bp, Homo sapiens
tcttcttgtgtgtgt

SEQ ID NO: 1121779 - DNA, 15 bp, Homo sapiens
ttcttcttgtgtgtg

SEQ ID NO: 1121780 - DNA, 15 bp, Homo sapiens
attcttcttgtgtgt

SEQ ID NO: 1121781 - DNA, 15 bp, Homo sapiens
gattcttcttgtgtg

SEQ ID NO: 1121782 - DNA, 15 bp, Homo sapiens
tgattcttcttgtgt

SEQ ID NO: 1121783 - DNA, 15 bp, Homo sapiens
atgattcttcttgtg

SEQ ID NO: 1121784 - DNA, 15 bp, Homo sapiens
gatgattcttcttgt

SEQ ID NO: 1121785 - DNA, 15 bp, Homo sapiens
tgatgattcttcttg

SEQ ID NO: 1121786 - DNA, 15 bp, Homo sapiens
ttgatgattcttctt

SEQ ID NO: 1121787 - DNA, 15 bp, Homo sapiens
attgatgattcttct

SEQ ID NO: 1121788 - DNA, 15 bp, Homo sapiens
cattgatgattcttc

SEQ ID NO: 1121789 - DNA, 15 bp, Homo sapiens
atccattgatgattc

SEQ ID NO: 1121790 - DNA, 15 bp, Homo sapiens
catccattgatgatt

SEQ ID NO: 1121791 - DNA, 15 bp, Homo sapiens
gcatccattgatgat

SEQ ID NO: 1121792 - DNA, 15 bp, Homo sapiens
agcatccattgatga

SEQ ID NO: 1121793 - DNA, 15 bp, Homo sapiens
tagcatccattgatg

SEQ ID NO: 1121794 - DNA, 15 bp, Homo sapiens
ttagcatccattgat

SEQ ID NO: 1121795 - DNA, 15 bp, Homo sapiens
tttagcatccattga

SEQ ID NO: 1121796 - DNA, 15 bp, Homo sapiens
ttttagcatccattg

SEQ ID NO: 1121797 - DNA, 15 bp, Homo sapiens
attttagcatccatt

SEQ ID NO: 1121798 - DNA, 15 bp, Homo sapiens
aattttagcatccat

SEQ ID NO: 1121799 - DNA, 15 bp, Homo sapiens
taattttagcatcca

SEQ ID NO: 1121800 - DNA, 15 bp, Homo sapiens
ctaattttagcatcc

SEQ ID NO: 1121801 - DNA, 15 bp, Homo sapiens
actaattttagcatc

SEQ ID NO: 1121802 - DNA, 15 bp, Homo sapiens
cactaattttagcat

SEQ ID NO: 1121803 - DNA, 15 bp, Homo sapiens
ccactaattttagca

SEQ ID NO: 1121804 - DNA, 15 bp, Homo sapiens
cccactaattttagc

SEQ ID NO: 1121805 - DNA, 15 bp, Homo sapiens
acccactaattttag

SEQ ID NO: 1121806 - DNA, 15 bp, Homo sapiens
gacccactaatttta

SEQ ID NO: 1121807 - DNA, 15 bp, Homo sapiens
tgacccactaatttt

SEQ ID NO: 1121808 - DNA, 15 bp, Homo sapiens
ttgacccactaattt

SEQ ID NO: 1121809 - DNA, 15 bp, Homo sapiens
tttgacccactaatt

SEQ ID NO: 1121810 - DNA, 15 bp, Homo sapiens
ctttgacccactaat

SEQ ID NO: 1121811 - DNA, 15 bp, Homo sapiens
actttgacccactaa

SEQ ID NO: 1121812 - DNA, 15 bp, Homo sapiens
aactttgacccacta

SEQ ID NO: 1121813 - DNA, 15 bp, Homo sapiens
aaactttgacccact

SEQ ID NO: 1121814 - DNA, 15 bp, Homo sapiens
caaactttgacccac

SEQ ID NO: 1121815 - DNA, 15 bp, Homo sapiens
tcaaactttgaccca

SEQ ID NO: 1121816 - DNA, 15 bp, Homo sapiens
atcaaactttgaccc

SEQ ID NO: 1121817 - DNA, 15 bp, Homo sapiens
catcaaactttgacc

SEQ ID NO: 1121818 - DNA, 15 bp, Homo sapiens
tcatcaaactttgac

SEQ ID NO: 1121819 - DNA, 15 bp, Homo sapiens
ctcatcaaactttga

SEQ ID NO: 1121820 - DNA, 15 bp, Homo sapiens
cctcatcaaactttg

SEQ ID NO: 1121821 - DNA, 15 bp, Homo sapiens
tcctcatcaaacttt

SEQ ID NO: 1121822 - DNA, 15 bp, Homo sapiens
ttcctcatcaaactt

SEQ ID NO: 1121823 - DNA, 15 bp, Homo sapiens
gttcctcatcaaact

SEQ ID NO: 1121824 - DNA, 15 bp, Homo sapiens
tgttcctcatcaaac

SEQ ID NO: 1121825 - DNA, 15 bp, Homo sapiens
ctgttcctcatcaaa

SEQ ID NO: 1121826 - DNA, 15 bp, Homo sapiens
tctgttcctcatcaa

SEQ ID NO: 1121827 - DNA, 15 bp, Homo sapiens
ttctgttcctcatca

SEQ ID NO: 1121828 - DNA, 15 bp, Homo sapiens
attctgttcctcatc

SEQ ID NO: 1121829 - DNA, 15 bp, Homo sapiens
tattctgttcctcat

SEQ ID NO: 1121830 - DNA, 15 bp, Homo sapiens
atattctgttcctca

SEQ ID NO: 1121831 - DNA, 15 bp, Homo sapiens
aatattctgttcctc

SEQ ID NO: 1121832 - DNA, 15 bp, Homo sapiens
aaatattctgttcct

SEQ ID NO: 1121833 - DNA, 15 bp, Homo sapiens
taaatattctgttcc

SEQ ID NO: 1121834 - DNA, 15 bp, Homo sapiens
gtaaatattctgttc

SEQ ID NO: 1121835 - DNA, 15 bp, Homo sapiens
tgtaaatattctgtt

SEQ ID NO: 1121836 - DNA, 15 bp, Homo sapiens
gtgtaaatattctgt

SEQ ID NO: 1121837 - DNA, 15 bp, Homo sapiens
tgtgtaaatattctg

SEQ ID NO: 1121838 - DNA, 15 bp, Homo sapiens
ctgtgtaaatattct

SEQ ID NO: 1121839 - DNA, 15 bp, Homo sapiens
actgtgtaaatattc

SEQ ID NO: 1121840 - DNA, 15 bp, Homo sapiens
gactgtgtaaatatt

SEQ ID NO: 1121841 - DNA, 15 bp, Homo sapiens
agactgtgtaaatat

SEQ ID NO: 1121842 - DNA, 15 bp, Homo sapiens
gagactgtgtaaata

SEQ ID NO: 1121843 - DNA, 15 bp, Homo sapiens
tgagactgtgtaaat

SEQ ID NO: 1121844 - DNA, 15 bp, Homo sapiens
ttgagactgtgtaaa

SEQ ID NO: 1121845 - DNA, 15 bp, Homo sapiens
tttgagactgtgtaa

SEQ ID NO: 1121846 - DNA, 15 bp, Homo sapiens
gtttgagactgtgta

SEQ ID NO: 1121847 - DNA, 15 bp, Homo sapiens
agtttgagactgtgt

SEQ ID NO: 1121848 - DNA, 15 bp, Homo sapiens
tagtttgagactgtg

SEQ ID NO: 1121849 - DNA, 15 bp, Homo sapiens
atagtttgagactgt

SEQ ID NO: 1121850 - DNA, 15 bp, Homo sapiens
gatagtttgagactg

SEQ ID NO: 1121851 - DNA, 15 bp, Homo sapiens
tgatagtttgagact

SEQ ID NO: 1121852 - DNA, 15 bp, Homo sapiens
atgatagtttgagac

SEQ ID NO: 1121853 - DNA, 15 bp, Homo sapiens
aatgatagtttgaga

SEQ ID NO: 1121854 - DNA, 15 bp, Homo sapiens
gaatgatagtttgag

SEQ ID NO: 1121855 - DNA, 15 bp, Homo sapiens
ggaatgatagtttga

SEQ ID NO: 1121856 - DNA, 15 bp, Homo sapiens
aggaatgatagtttg

SEQ ID NO: 1121857 - DNA, 15 bp, Homo sapiens
gaggaatgatagttt

SEQ ID NO: 1121858 - DNA, 15 bp, Homo sapiens
cgaggaatgatagtt

SEQ ID NO: 1121859 - DNA, 15 bp, Homo sapiens
acgaggaatgatagt

SEQ ID NO: 1121860 - DNA, 15 bp, Homo sapiens
tacgaggaatgatag

SEQ ID NO: 1121861 - DNA, 15 bp, Homo sapiens
atacgaggaatgata

SEQ ID NO: 1121862 - DNA, 15 bp, Homo sapiens
aatacgaggaatgat

SEQ ID NO: 1121863 - DNA, 15 bp, Homo sapiens
taatacgaggaatga

SEQ ID NO: 1121864 - DNA, 15 bp, Homo sapiens
ttaatacgaggaatg

SEQ ID NO: 1121865 - DNA, 15 bp, Homo sapiens
attaatacgaggaat

SEQ ID NO: 1121866 - DNA, 15 bp, Homo sapiens
aattaatacgaggaa

SEQ ID NO: 1121867 - DNA, 15 bp, Homo sapiens
taattaatacgagga

SEQ ID NO: 1121868 - DNA, 15 bp, Homo sapiens
gtaattaatacgagg

SEQ ID NO: 1121869 - DNA, 15 bp, Homo sapiens
tgtaattaatacgag

SEQ ID NO: 1121870 - DNA, 15 bp, Homo sapiens
ttgtaattaatacga

SEQ ID NO: 1121871 - DNA, 15 bp, Homo sapiens
tttgtaattaatacg

SEQ ID NO: 1121872 - DNA, 15 bp, Homo sapiens
ctttgtaattaatac

SEQ ID NO: 1121873 - DNA, 15 bp, Homo sapiens
cctttgtaattaata

SEQ ID NO: 1121874 - DNA, 15 bp, Homo sapiens
ccctttgtaattaat

SEQ ID NO: 1121875 - DNA, 15 bp, Homo sapiens
tccctttgtaattaa

SEQ ID NO: 1121876 - DNA, 15 bp, Homo sapiens
ttccctttgtaatta

SEQ ID NO: 1121877 - DNA, 15 bp, Homo sapiens
tttccctttgtaatt

SEQ ID NO: 1121878 - DNA, 15 bp, Homo sapiens
ttttccctttgtaat

SEQ ID NO: 1121879 - DNA, 15 bp, Homo sapiens
tttttccctttgtaa

SEQ ID NO: 1121880 - DNA, 15 bp, Homo sapiens
atttttccctttgta

SEQ ID NO: 1121881 - DNA, 15 bp, Homo sapiens
tatttttccctttgt

SEQ ID NO: 1121882 - DNA, 15 bp, Homo sapiens
ctatttttccctttg

SEQ ID NO: 1121883 - DNA, 15 bp, Homo sapiens
actatttttcccttt

SEQ ID NO: 1121884 - DNA, 15 bp, Homo sapiens
tactatttttccctt

SEQ ID NO: 1121885 - DNA, 15 bp, Homo sapiens
atactatttttccct

SEQ ID NO: 1121886 - DNA, 15 bp, Homo sapiens
catactatttttccc

SEQ ID NO: 1121887 - DNA, 15 bp, Homo sapiens
acatactatttttcc

SEQ ID NO: 1121888 - DNA, 15 bp, Homo sapiens
aacatactatttttc

SEQ ID NO: 1121889 - DNA, 15 bp, Homo sapiens
aaacatactattttt

SEQ ID NO: 1121890 - DNA, 15 bp, Homo sapiens
taaacatactatttt

SEQ ID NO: 1121891 - DNA, 15 bp, Homo sapiens
ataaacatactattt

SEQ ID NO: 1121892 - DNA, 15 bp, Homo sapiens
tataaacatactatt

SEQ ID NO: 1121893 - DNA, 15 bp, Homo sapiens
gtataaacatactat

SEQ ID NO: 1121894 - DNA, 15 bp, Homo sapiens
agtataaacatacta

SEQ ID NO: 1121895 - DNA, 15 bp, Homo sapiens
cagtataaacatact

SEQ ID NO: 1121896 - DNA, 15 bp, Homo sapiens
ccagtataaacatac

SEQ ID NO: 1121897 - DNA, 15 bp, Homo sapiens
tccagtataaacata

SEQ ID NO: 1121898 - DNA, 15 bp, Homo sapiens
ctccagtataaacat

SEQ ID NO: 1121899 - DNA, 15 bp, Homo sapiens
tctccagtataaaca

SEQ ID NO: 1121900 - DNA, 15 bp, Homo sapiens
atctccagtataaac

SEQ ID NO: 1121901 - DNA, 15 bp, Homo sapiens
gatctccagtataaa

SEQ ID NO: 1121902 - DNA, 15 bp, Homo sapiens
agatctccagtataa

SEQ ID NO: 1121903 - DNA, 15 bp, Homo sapiens
cagatctccagtata

SEQ ID NO: 1121904 - DNA, 15 bp, Homo sapiens
ccagatctccagtat

SEQ ID NO: 1121905 - DNA, 15 bp, Homo sapiens
gccagatctccagta

SEQ ID NO: 1121906 - DNA, 15 bp, Homo sapiens
tgccagatctccagt

SEQ ID NO: 1121907 - DNA, 15 bp, Homo sapiens
ctgccagatctccag

SEQ ID NO: 1121908 - DNA, 15 bp, Homo sapiens
tctgccagatctcca

SEQ ID NO: 1121909 - DNA, 15 bp, Homo sapiens
ctctgccagatctcc

SEQ ID NO: 1121910 - DNA, 15 bp, Homo sapiens
cctctgccagatctc

SEQ ID NO: 1121911 - DNA, 15 bp, Homo sapiens
gcctctgccagatct

SEQ ID NO: 1121912 - DNA, 15 bp, Homo sapiens
agcctctgccagatc

SEQ ID NO: 1121913 - DNA, 15 bp, Homo sapiens
cagcctctgccagat

SEQ ID NO: 1121914 - DNA, 15 bp, Homo sapiens
acagcctctgccaga

SEQ ID NO: 1121915 - DNA, 15 bp, Homo sapiens
gacagcctctgccag

SEQ ID NO: 1121916 - DNA, 15 bp, Homo sapiens
agacagcctctgcca

SEQ ID NO: 1121917 - DNA, 15 bp, Homo sapiens
aagacagcctctgcc

SEQ ID NO: 1121918 - DNA, 15 bp, Homo sapiens
caagacagcctctgc

SEQ ID NO: 1121919 - DNA, 15 bp, Homo sapiens
tcaagacagcctctg

SEQ ID NO: 1121920 - DNA, 15 bp, Homo sapiens
gtcaagacagcctct

SEQ ID NO: 1121921 - DNA, 15 bp, Homo sapiens
tgtcaagacagcctc

SEQ ID NO: 1121922 - DNA, 15 bp, Homo sapiens
ttgtcaagacagcct

SEQ ID NO: 1121923 - DNA, 15 bp, Homo sapiens
tttgtcaagacagcc

SEQ ID NO: 1121924 - DNA, 15 bp, Homo sapiens
ctttgtcaagacagc

SEQ ID NO: 1121925 - DNA, 15 bp, Homo sapiens
actttgtcaagacag

SEQ ID NO: 1121926 - DNA, 15 bp, Homo sapiens
tactttgtcaagaca

SEQ ID NO: 1121927 - DNA, 15 bp, Homo sapiens
ttactttgtcaagac

SEQ ID NO: 1121928 - DNA, 15 bp, Homo sapiens
attactttgtcaaga

SEQ ID NO: 1121929 - DNA, 15 bp, Homo sapiens
gattactttgtcaag

SEQ ID NO: 1121930 - DNA, 15 bp, Homo sapiens
ggattactttgtcaa

SEQ ID NO: 1121931 - DNA, 15 bp, Homo sapiens
tggattactttgtca

SEQ ID NO: 1121932 - DNA, 15 bp, Homo sapiens
ctggattactttgtc

SEQ ID NO: 1121933 - DNA, 15 bp, Homo sapiens
tctggattactttgt

SEQ ID NO: 1121934 - DNA, 15 bp, Homo sapiens
atctggattactttg

SEQ ID NO: 1121935 - DNA, 15 bp, Homo sapiens
aatctggattacttt

SEQ ID NO: 1121936 - DNA, 15 bp, Homo sapiens
taatctggattactt

SEQ ID NO: 1121937 - DNA, 15 bp, Homo sapiens
ttaatctggattact

SEQ ID NO: 1121938 - DNA, 15 bp, Homo sapiens
gttaatctggattac

SEQ ID NO: 1121939 - DNA, 15 bp, Homo sapiens
tgttaatctggatta

SEQ ID NO: 1121940 - DNA, 15 bp, Homo sapiens
atgttaatctggatt

SEQ ID NO: 1121941 - DNA, 15 bp, Homo sapiens
gatgttaatctggat

SEQ ID NO: 1121942 - DNA, 15 bp, Homo sapiens
tgatgttaatctgga

SEQ ID NO: 1121943 - DNA, 15 bp, Homo sapiens
atgatgttaatctgg

SEQ ID NO: 1121944 - DNA, 15 bp, Homo sapiens
gatgatgttaatctg

SEQ ID NO: 1121945 - DNA, 15 bp, Homo sapiens
tgatgatgttaatct

SEQ ID NO: 1121946 - DNA, 15 bp, Homo sapiens
atgatgatgttaatc

SEQ ID NO: 1121947 - DNA, 15 bp, Homo sapiens
aatgatgatgttaat

SEQ ID NO: 1121948 - DNA, 15 bp, Homo sapiens
taatgatgatgttaa

SEQ ID NO: 1121949 - DNA, 15 bp, Homo sapiens
ttaatgatgatgtta

SEQ ID NO: 1121950 - DNA, 15 bp, Homo sapiens
attaatgatgatgtt

SEQ ID NO: 1121951 - DNA, 15 bp, Homo sapiens
cattaatgatgatgt

SEQ ID NO: 1121952 - DNA, 15 bp, Homo sapiens
tcattaatgatgatg

SEQ ID NO: 1121953 - DNA, 15 bp, Homo sapiens
ttcattaatgatgat

SEQ ID NO: 1121954 - DNA, 15 bp, Homo sapiens
tttcattaatgatga

SEQ ID NO: 1121955 - DNA, 15 bp, Homo sapiens
gtttcattaatgatg

SEQ ID NO: 1121956 - DNA, 15 bp, Homo sapiens
tgtttcattaatgat

SEQ ID NO: 1121957 - DNA, 15 bp, Homo sapiens
ttgtttcattaatga

SEQ ID NO: 1121958 - DNA, 15 bp, Homo sapiens
tttgtttcattaatg

SEQ ID NO: 1121959 - DNA, 15 bp, Homo sapiens
atttgtttcattaat

SEQ ID NO: 1121960 - DNA, 15 bp, Homo sapiens
aatttgtttcattaa

SEQ ID NO: 1121961 - DNA, 15 bp, Homo sapiens
caatttgtttcatta

SEQ ID NO: 1121962 - DNA, 15 bp, Homo sapiens
tcaatttgtttcatt

SEQ ID NO: 1121963 - DNA, 15 bp, Homo sapiens
gtcaatttgtttcat

SEQ ID NO: 1121964 - DNA, 15 bp, Homo sapiens
tgtcaatttgtttca

SEQ ID NO: 1121965 - DNA, 15 bp, Homo sapiens
atgtcaatttgtttc

SEQ ID NO: 1121966 - DNA, 15 bp, Homo sapiens
gatgtcaatttgttt

SEQ ID NO: 1121967 - DNA, 15 bp, Homo sapiens
agatgtcaatttgtt

SEQ ID NO: 1121968 - DNA, 15 bp, Homo sapiens
gagatgtcaatttgt

SEQ ID NO: 1121969 - DNA, 15 bp, Homo sapiens
cgagatgtcaatttg

SEQ ID NO: 1121970 - DNA, 15 bp, Homo sapiens
ccgagatgtcaattt

SEQ ID NO: 1121971 - DNA, 15 bp, Homo sapiens
cccgagatgtcaatt

SEQ ID NO: 1121972 - DNA, 15 bp, Homo sapiens
gcccgagatgtcaat

SEQ ID NO: 1121973 - DNA, 15 bp, Homo sapiens
ggcccgagatgtcaa

SEQ ID NO: 1121974 - DNA, 15 bp, Homo sapiens
aggcccgagatgtca

SEQ ID NO: 1121975 - DNA, 15 bp, Homo sapiens
gaggcccgagatgtc

SEQ ID NO: 1121976 - DNA, 15 bp, Homo sapiens
ggaggcccgagatgt

SEQ ID NO: 1121977 - DNA, 15 bp, Homo sapiens
aggaggcccgagatg

SEQ ID NO: 1121978 - DNA, 15 bp, Homo sapiens
taggaggcccgagat

SEQ ID NO: 1121979 - DNA, 15 bp, Homo sapiens
ttaggaggcccgaga

SEQ ID NO: 1121980 - DNA, 15 bp, Homo sapiens
attaggaggcccgag

SEQ ID NO: 1121981 - DNA, 15 bp, Homo sapiens
tattaggaggcccga

SEQ ID NO: 1121982 - DNA, 15 bp, Homo sapiens
atattaggaggcccg

SEQ ID NO: 1121983 - DNA, 15 bp, Homo sapiens
catattaggaggccc

SEQ ID NO: 1121984 - DNA, 15 bp, Homo sapiens
tcatattaggaggcc

SEQ ID NO: 1121985 - DNA, 15 bp, Homo sapiens
ttcatattaggaggc

SEQ ID NO: 1121986 - DNA, 15 bp, Homo sapiens
cttcatattaggagg

SEQ ID NO: 1121987 - DNA, 15 bp, Homo sapiens
gcttcatattaggag

SEQ ID NO: 1121988 - DNA, 15 bp, Homo sapiens
tgcttcatattagga

SEQ ID NO: 1121989 - DNA, 15 bp, Homo sapiens
gtgcttcatattagg

SEQ ID NO: 1121990 - DNA, 15 bp, Homo sapiens
agtgcttcatattag

SEQ ID NO: 1121991 - DNA, 15 bp, Homo sapiens
cagtgcttcatatta

SEQ ID NO: 1121992 - DNA, 15 bp, Homo sapiens
acagtgcttcatatt

SEQ ID NO: 1121993 - DNA, 15 bp, Homo sapiens
cacagtgcttcatat

SEQ ID NO: 1121994 - DNA, 15 bp, Homo sapiens
tcacagtgcttcata

SEQ ID NO: 1121995 - DNA, 15 bp, Homo sapiens
ttcacagtgcttcat

SEQ ID NO: 1121996 - DNA, 15 bp, Homo sapiens
cttcacagtgcttca

SEQ ID NO: 1121997 - DNA, 15 bp, Homo sapiens
ccttcacagtgcttc

SEQ ID NO: 1121998 - DNA, 15 bp, Homo sapiens
tccttcacagtgctt

SEQ ID NO: 1121999 - DNA, 15 bp, Homo sapiens
gtccttcacagtgct

SEQ ID NO: 1122000 - DNA, 15 bp, Homo sapiens
tgtccttcacagtgc

SEQ ID NO: 1122001 - DNA, 15 bp, Homo sapiens
ctgtccttcacagtg

SEQ ID NO: 1122002 - DNA, 15 bp, Homo sapiens
cctgtccttcacagt

SEQ ID NO: 1122003 - DNA, 15 bp, Homo sapiens
gcctgtccttcacag

SEQ ID NO: 1122004 - DNA, 15 bp, Homo sapiens
tgcctgtccttcaca

SEQ ID NO: 1122005 - DNA, 15 bp, Homo sapiens
gtgcctgtccttcac

SEQ ID NO: 1122006 - DNA, 15 bp, Homo sapiens
tgtgcctgtccttca

SEQ ID NO: 1122007 - DNA, 15 bp, Homo sapiens
gtgtgcctgtccttc

SEQ ID NO: 1122008 - DNA, 15 bp, Homo sapiens
agtgtgcctgtcctt

SEQ ID NO: 1122009 - DNA, 15 bp, Homo sapiens
tagtgtgcctgtcct

SEQ ID NO: 1122010 - DNA, 15 bp, Homo sapiens
atagtgtgcctgtcc

SEQ ID NO: 1122011 - DNA, 15 bp, Homo sapiens
aatagtgtgcctgtc

SEQ ID NO: 1122012 - DNA, 15 bp, Homo sapiens
taatagtgtgcctgt

SEQ ID NO: 1122013 - DNA, 15 bp, Homo sapiens
gtaatagtgtgcctg

SEQ ID NO: 1122014 - DNA, 15 bp, Homo sapiens
agtaatagtgtgcct

SEQ ID NO: 1122015 - DNA, 15 bp, Homo sapiens
tagtaatagtgtgcc

SEQ ID NO: 1122016 - DNA, 15 bp, Homo sapiens
gtagtaatagtgtgc

SEQ ID NO: 1122017 - DNA, 15 bp, Homo sapiens
agtagtaatagtgtg

SEQ ID NO: 1122018 - DNA, 15 bp, Homo sapiens
cagtagtaatagtgt

SEQ ID NO: 1122019 - DNA, 15 bp, Homo sapiens
acagtagtaatagtg

SEQ ID NO: 1122020 - DNA, 15 bp, Homo sapiens
aacagtagtaatagt

SEQ ID NO: 1122021 - DNA, 15 bp, Homo sapiens
caacagtagtaatag

SEQ ID NO: 1122022 - DNA, 15 bp, Homo sapiens
acaacagtagtaata

SEQ ID NO: 1122023 - DNA, 15 bp, Homo sapiens
tacaacagtagtaat

SEQ ID NO: 1122024 - DNA, 15 bp, Homo sapiens
atacaacagtagtaa

SEQ ID NO: 1122025 - DNA, 15 bp, Homo sapiens
aatacaacagtagta

SEQ ID NO: 1122026 - DNA, 15 bp, Homo sapiens
aaatacaacagtagt

SEQ ID NO: 1122027 - DNA, 15 bp, Homo sapiens
gaaatacaacagtag

SEQ ID NO: 1122028 - DNA, 15 bp, Homo sapiens
agaaatacaacagta

SEQ ID NO: 1122029 - DNA, 15 bp, Homo sapiens
cagaaatacaacagt

SEQ ID NO: 1122030 - DNA, 15 bp, Homo sapiens
ccagaaatacaacag

SEQ ID NO: 1122031 - DNA, 15 bp, Homo sapiens
gccagaaatacaaca

SEQ ID NO: 1122032 - DNA, 15 bp, Homo sapiens
ggccagaaatacaac

SEQ ID NO: 1122033 - DNA, 15 bp, Homo sapiens
gggccagaaatacaa

SEQ ID NO: 1122034 - DNA, 15 bp, Homo sapiens
tgggccagaaataca

SEQ ID NO: 1122035 - DNA, 15 bp, Homo sapiens
ttgggccagaaatac

SEQ ID NO: 1122036 - DNA, 15 bp, Homo sapiens
tttgggccagaaata

SEQ ID NO: 1122037 - DNA, 15 bp, Homo sapiens
ttttgggccagaaat

SEQ ID NO: 1122038 - DNA, 15 bp, Homo sapiens
attttgggccagaaa

SEQ ID NO: 1122039 - DNA, 15 bp, Homo sapiens
cattttgggccagaa

SEQ ID NO: 1122040 - DNA, 15 bp, Homo sapiens
ccattttgggccaga

SEQ ID NO: 1122041 - DNA, 15 bp, Homo sapiens
tccattttgggccag

SEQ ID NO: 1122042 - DNA, 15 bp, Homo sapiens
ttccattttgggcca

SEQ ID NO: 1122043 - DNA, 15 bp, Homo sapiens
gttccattttgggcc

SEQ ID NO: 1122044 - DNA, 15 bp, Homo sapiens
tgttccattttgggc

SEQ ID NO: 1122045 - DNA, 15 bp, Homo sapiens
gtgttccattttggg

SEQ ID NO: 1122046 - DNA, 15 bp, Homo sapiens
tgtgttccattttgg

SEQ ID NO: 1122047 - DNA, 15 bp, Homo sapiens
atgtgttccattttg

SEQ ID NO: 1122048 - DNA, 15 bp, Homo sapiens
catgtgttccatttt

SEQ ID NO: 1122049 - DNA, 15 bp, Homo sapiens
ttcatgtgttccatt

SEQ ID NO: 1122050 - DNA, 15 bp, Homo sapiens
tttcatgtgttccat

SEQ ID NO: 1122051 - DNA, 15 bp, Homo sapiens
atttcatgtgttcca

SEQ ID NO: 1122052 - DNA, 15 bp, Homo sapiens
aatttcatgtgttcc

SEQ ID NO: 1122053 - DNA, 15 bp, Homo sapiens
aaatttcatgtgttc

SEQ ID NO: 1122054 - DNA, 15 bp, Homo sapiens
aaaatttcatgtgtt

SEQ ID NO: 1122055 - DNA, 15 bp, Homo sapiens
caaaatttcatgtgt

SEQ ID NO: 1122056 - DNA, 15 bp, Homo sapiens
acaaaatttcatgtg

SEQ ID NO: 1122057 - DNA, 15 bp, Homo sapiens
aacaaaatttcatgt

SEQ ID NO: 1122058 - DNA, 15 bp, Homo sapiens
caacaaaatttcatg

SEQ ID NO: 1122059 - DNA, 15 bp, Homo sapiens
acaacaaaatttcat

SEQ ID NO: 1122060 - DNA, 15 bp, Homo sapiens
aacaacaaaatttca

SEQ ID NO: 1122061 - DNA, 15 bp, Homo sapiens
aaacaacaaaatttc

SEQ ID NO: 1122062 - DNA, 15 bp, Homo sapiens
aaaacaacaaaattt

SEQ ID NO: 1122063 - DNA, 15 bp, Homo sapiens
taaaacaacaaaatt

SEQ ID NO: 1122064 - DNA, 15 bp, Homo sapiens
ataaaacaacaaaat

SEQ ID NO: 1122065 - DNA, 15 bp, Homo sapiens
aataaaacaacaaaa

SEQ ID NO: 1122066 - DNA, 15 bp, Homo sapiens
aaataaaacaacaaa

SEQ ID NO: 1122067 - DNA, 15 bp, Homo sapiens
caaataaaacaacaa

SEQ ID NO: 1122068 - DNA, 15 bp, Homo sapiens
acaaataaaacaaca

SEQ ID NO: 1122069 - DNA, 15 bp, Homo sapiens
aacaaataaaacaac

SEQ ID NO: 1122070 - DNA, 15 bp, Homo sapiens
aaacaaataaaacaa

SEQ ID NO: 1122071 - DNA, 15 bp, Homo sapiens
aaaacaaataaaaca

SEQ ID NO: 1122072 - DNA, 15 bp, Homo sapiens
caaaacaaataaaac

SEQ ID NO: 1122073 - DNA, 15 bp, Homo sapiens
acaaaacaaataaaa

SEQ ID NO: 1122074 - DNA, 15 bp, Homo sapiens
aacaaaacaaataaa

SEQ ID NO: 1122075 - DNA, 15 bp, Homo sapiens
aaacaaaacaaataa

SEQ ID NO: 1122076 - DNA, 15 bp, Homo sapiens
aaaacaaaacaaata

SEQ ID NO: 1122077 - DNA, 15 bp, Homo sapiens
caaaacaaaacaaat

SEQ ID NO: 1122078 - DNA, 15 bp, Homo sapiens
ctaaaaaacaaaaca

SEQ ID NO: 1122079 - DNA, 15 bp, Homo sapiens
tctaaaaaacaaaac

SEQ ID NO: 1122080 - DNA, 15 bp, Homo sapiens
atctaaaaaacaaaa

SEQ ID NO: 1122081 - DNA, 15 bp, Homo sapiens
catctaaaaaacaaa

SEQ ID NO: 1122082 - DNA, 15 bp, Homo sapiens
ccatctaaaaaacaa

SEQ ID NO: 1122083 - DNA, 15 bp, Homo sapiens
tccatctaaaaaaca

SEQ ID NO: 1122084 - DNA, 15 bp, Homo sapiens
ctccatctaaaaaac

SEQ ID NO: 1122085 - DNA, 15 bp, Homo sapiens
tactccatctaaaaa

SEQ ID NO: 1122086 - DNA, 15 bp, Homo sapiens
atactccatctaaaa

SEQ ID NO: 1122087 - DNA, 15 bp, Homo sapiens
gatactccatctaaa

SEQ ID NO: 1122088 - DNA, 15 bp, Homo sapiens
agatactccatctaa

SEQ ID NO: 1122089 - DNA, 15 bp, Homo sapiens
gagatactccatcta

SEQ ID NO: 1122090 - DNA, 15 bp, Homo sapiens
agagatactccatct

SEQ ID NO: 1122091 - DNA, 15 bp, Homo sapiens
gagagatactccatc

SEQ ID NO: 1122092 - DNA, 15 bp, Homo sapiens
agagagatactccat

SEQ ID NO: 1122093 - DNA, 15 bp, Homo sapiens
cagagagatactcca

SEQ ID NO: 1122094 - DNA, 15 bp, Homo sapiens
acagagagatactcc

SEQ ID NO: 1122095 - DNA, 15 bp, Homo sapiens
gacagagagatactc

SEQ ID NO: 1122096 - DNA, 15 bp, Homo sapiens
cgacagagagatact

SEQ ID NO: 1122097 - DNA, 15 bp, Homo sapiens
gcgacagagagatac

SEQ ID NO: 1122098 - DNA, 15 bp, Homo sapiens
ggcgacagagagata

SEQ ID NO: 1122099 - DNA, 15 bp, Homo sapiens
gggcgacagagagat

SEQ ID NO: 1122100 - DNA, 15 bp, Homo sapiens
tgggcgacagagaga

SEQ ID NO: 1122101 - DNA, 15 bp, Homo sapiens
ctgggcgacagagag

SEQ ID NO: 1122102 - DNA, 15 bp, Homo sapiens
cctgggcgacagaga

SEQ ID NO: 1122103 - DNA, 15 bp, Homo sapiens
gactgcactccagcc

SEQ ID NO: 1122104 - DNA, 15 bp, Homo sapiens
cgactgcactccagc

SEQ ID NO: 1122105 - DNA, 15 bp, Homo sapiens
gcgactgcactccag

SEQ ID NO: 1122106 - DNA, 15 bp, Homo sapiens
tgcgactgcactcca

SEQ ID NO: 1122107 - DNA, 15 bp, Homo sapiens
gtgcgactgcactcc

SEQ ID NO: 1122108 - DNA, 15 bp, Homo sapiens
tgtgcgactgcactc

SEQ ID NO: 1122109 - DNA, 15 bp, Homo sapiens
ttgtgcgactgcact

SEQ ID NO: 1122110 - DNA, 15 bp, Homo sapiens
attgtgcgactgcac

SEQ ID NO: 1122111 - DNA, 15 bp, Homo sapiens
gattgtgcgactgca

SEQ ID NO: 1122112 - DNA, 15 bp, Homo sapiens
agattgtgcgactgc

SEQ ID NO: 1122113 - DNA, 15 bp, Homo sapiens
aagattgtgcgactg

SEQ ID NO: 1122114 - DNA, 15 bp, Homo sapiens
caagattgtgcgact

SEQ ID NO: 1122115 - DNA, 15 bp, Homo sapiens
ccaagattgtgcgac

SEQ ID NO: 1122116 - DNA, 15 bp, Homo sapiens
gccaagattgtgcga

SEQ ID NO: 1122117 - DNA, 15 bp, Homo sapiens
agccaagattgtgcg

SEQ ID NO: 1122118 - DNA, 15 bp, Homo sapiens
acagaggctgcagtg

SEQ ID NO: 1122119 - DNA, 15 bp, Homo sapiens
gacagaggctgcagt

SEQ ID NO: 1122120 - DNA, 15 bp, Homo sapiens
agacagaggctgcag

SEQ ID NO: 1122121 - DNA, 15 bp, Homo sapiens
gagacagaggctgca

SEQ ID NO: 1122122 - DNA, 15 bp, Homo sapiens
ggagacagaggctgc

SEQ ID NO: 1122123 - DNA, 15 bp, Homo sapiens
aggagacagaggctg

SEQ ID NO: 1122124 - DNA, 15 bp, Homo sapiens
caggagacagaggct

SEQ ID NO: 1122125 - DNA, 15 bp, Homo sapiens
ccaggagacagaggc

SEQ ID NO: 1122126 - DNA, 15 bp, Homo sapiens
cccaggagacagagg

SEQ ID NO: 1122127 - DNA, 15 bp, Homo sapiens
ggtggcacatgtctg

SEQ ID NO: 1122128 - DNA, 15 bp, Homo sapiens
tggtggcacatgtct

SEQ ID NO: 1122129 - DNA, 15 bp, Homo sapiens
atggtggcacatgtc

SEQ ID NO: 1122130 - DNA, 15 bp, Homo sapiens
catggtggcacatgt

SEQ ID NO: 1122131 - DNA, 15 bp, Homo sapiens
gccccatctctactg

SEQ ID NO: 1122132 - DNA, 15 bp, Homo sapiens
aaagccccatctcta

SEQ ID NO: 1122133 - DNA, 15 bp, Homo sapiens
taaagccccatctct

SEQ ID NO: 1122134 - DNA, 15 bp, Homo sapiens
gtaaagccccatctc

SEQ ID NO: 1122135 - DNA, 15 bp, Homo sapiens
ggtaaagccccatct

SEQ ID NO: 1122136 - DNA, 15 bp, Homo sapiens
tggtaaagccccatc

SEQ ID NO: 1122137 - DNA, 15 bp, Homo sapiens
atggtaaagccccat

SEQ ID NO: 1122138 - DNA, 15 bp, Homo sapiens
catggtaaagcccca

SEQ ID NO: 1122139 - DNA, 15 bp, Homo sapiens
acatggtaaagcccc

SEQ ID NO: 1122140 - DNA, 15 bp, Homo sapiens
aacatggtaaagccc

SEQ ID NO: 1122141 - DNA, 15 bp, Homo sapiens
caacatggtaaagcc

SEQ ID NO: 1122142 - DNA, 15 bp, Homo sapiens
ccaacatggtaaagc

SEQ ID NO: 1122143 - DNA, 15 bp, Homo sapiens
gccaacatggtaaag

SEQ ID NO: 1122144 - DNA, 15 bp, Homo sapiens
aatctgaggtcagga

SEQ ID NO: 1122145 - DNA, 15 bp, Homo sapiens
taatctgaggtcagg

SEQ ID NO: 1122146 - DNA, 15 bp, Homo sapiens
ataatctgaggtcag

SEQ ID NO: 1122147 - DNA, 15 bp, Homo sapiens
gataatctgaggtca

SEQ ID NO: 1122148 - DNA, 15 bp, Homo sapiens
agataatctgaggtc

SEQ ID NO: 1122149 - DNA, 15 bp, Homo sapiens
aagataatctgaggt

SEQ ID NO: 1122150 - DNA, 15 bp, Homo sapiens
gaagataatctgagg

SEQ ID NO: 1122151 - DNA, 15 bp, Homo sapiens
ggaagataatctgag

SEQ ID NO: 1122152 - DNA, 15 bp, Homo sapiens
aggaagataatctga

SEQ ID NO: 1122153 - DNA, 15 bp, Homo sapiens
caggaagataatctg

SEQ ID NO: 1122154 - DNA, 15 bp, Homo sapiens
gcaggaagataatct

SEQ ID NO: 1122155 - DNA, 15 bp, Homo sapiens
ggcaggaagataatc

SEQ ID NO: 1122156 - DNA, 15 bp, Homo sapiens
aggcaggaagataat

SEQ ID NO: 1122157 - DNA, 15 bp, Homo sapiens
gaggcaggaagataa

SEQ ID NO: 1122158 - DNA, 15 bp, Homo sapiens
cgaggcaggaagata

SEQ ID NO: 1122159 - DNA, 15 bp, Homo sapiens
gggccgggtgcggtg

SEQ ID NO: 1122160 - DNA, 15 bp, Homo sapiens
cgggccgggtgcggt

SEQ ID NO: 1122161 - DNA, 15 bp, Homo sapiens
acgggccgggtgcgg

SEQ ID NO: 1122162 - DNA, 15 bp, Homo sapiens
aacgggccgggtgcg

SEQ ID NO: 1122163 - DNA, 15 bp, Homo sapiens
aaacgggccgggtgc

SEQ ID NO: 1122164 - DNA, 15 bp, Homo sapiens
taaacgggccgggtg

SEQ ID NO: 1122165 - DNA, 15 bp, Homo sapiens
gtaaacgggccgggt

SEQ ID NO: 1122166 - DNA, 15 bp, Homo sapiens
tgtaaacgggccggg

SEQ ID NO: 1122167 - DNA, 15 bp, Homo sapiens
gtgtaaacgggccgg

SEQ ID NO: 1122168 - DNA, 15 bp, Homo sapiens
agtgtaaacgggccg

SEQ ID NO: 1122169 - DNA, 15 bp, Homo sapiens
cagtgtaaacgggcc

SEQ ID NO: 1122170 - DNA, 15 bp, Homo sapiens
ccagtgtaaacgggc

SEQ ID NO: 1122171 - DNA, 15 bp, Homo sapiens
tccagtgtaaacggg

SEQ ID NO: 1122172 - DNA, 15 bp, Homo sapiens
atccagtgtaaacgg

SEQ ID NO: 1122173 - DNA, 15 bp, Homo sapiens
catccagtgtaaacg

SEQ ID NO: 1122174 - DNA, 15 bp, Homo sapiens
acatccagtgtaaac

SEQ ID NO: 1122175 - DNA, 15 bp, Homo sapiens
aacatccagtgtaaa

SEQ ID NO: 1122176 - DNA, 15 bp, Homo sapiens
taacatccagtgtaa

SEQ ID NO: 1122177 - DNA, 15 bp, Homo sapiens
ttaacatccagtgta

SEQ ID NO: 1122178 - DNA, 15 bp, Homo sapiens
gttaacatccagtgt

SEQ ID NO: 1122179 - DNA, 15 bp, Homo sapiens
tgttaacatccagtg

SEQ ID NO: 1122180 - DNA, 15 bp, Homo sapiens
ttgttaacatccagt

SEQ ID NO: 1122181 - DNA, 15 bp, Homo sapiens
gttgttaacatccag

SEQ ID NO: 1122182 - DNA, 15 bp, Homo sapiens
tgttgttaacatcca

SEQ ID NO: 1122183 - DNA, 15 bp, Homo sapiens
gtgttgttaacatcc

SEQ ID NO: 1122184 - DNA, 15 bp, Homo sapiens
agtgttgttaacatc

SEQ ID NO: 1122185 - DNA, 15 bp, Homo sapiens
cagtgttgttaacat

SEQ ID NO: 1122186 - DNA, 15 bp, Homo sapiens
tcagtgttgttaaca

SEQ ID NO: 1122187 - DNA, 15 bp, Homo sapiens
ttcagtgttgttaac

SEQ ID NO: 1122188 - DNA, 15 bp, Homo sapiens
cttcagtgttgttaa

SEQ ID NO: 1122189 - DNA, 15 bp, Homo sapiens
tcttcagtgttgtta

SEQ ID NO: 1122190 - DNA, 15 bp, Homo sapiens
ttcttcagtgttgtt

SEQ ID NO: 1122191 - DNA, 15 bp, Homo sapiens
cttcttcagtgttgt

SEQ ID NO: 1122192 - DNA, 15 bp, Homo sapiens
ccttcttcagtgttg

SEQ ID NO: 1122193 - DNA, 15 bp, Homo sapiens
tccttcttcagtgtt

SEQ ID NO: 1122194 - DNA, 15 bp, Homo sapiens
atccttcttcagtgt

SEQ ID NO: 1122195 - DNA, 15 bp, Homo sapiens
tatccttcttcagtg

SEQ ID NO: 1122196 - DNA, 15 bp, Homo sapiens
ttatccttcttcagt

SEQ ID NO: 1122197 - DNA, 15 bp, Homo sapiens
tttatccttcttcag

SEQ ID NO: 1122198 - DNA, 15 bp, Homo sapiens
gtttatccttcttca

SEQ ID NO: 1122199 - DNA, 15 bp, Homo sapiens
agtttatccttcttc

SEQ ID NO: 1122200 - DNA, 15 bp, Homo sapiens
cagtttatccttctt

SEQ ID NO: 1122201 - DNA, 15 bp, Homo sapiens
tcagtttatccttct

SEQ ID NO: 1122202 - DNA, 15 bp, Homo sapiens
ttcagtttatccttc

SEQ ID NO: 1122203 - DNA, 15 bp, Homo sapiens
tttcagtttatcctt

SEQ ID NO: 1122204 - DNA, 15 bp, Homo sapiens
ttttcagtttatcct

SEQ ID NO: 1122205 - DNA, 15 bp, Homo sapiens
cttttcagtttatcc

SEQ ID NO: 1122206 - DNA, 15 bp, Homo sapiens
acttttcagtttatc

SEQ ID NO: 1122207 - DNA, 15 bp, Homo sapiens
gacttttcagtttat

SEQ ID NO: 1122208 - DNA, 15 bp, Homo sapiens
agacttttcagttta

SEQ ID NO: 1122209 - DNA, 15 bp, Homo sapiens
cagacttttcagttt

SEQ ID NO: 1122210 - DNA, 15 bp, Homo sapiens
tcagacttttcagtt

SEQ ID NO: 1122211 - DNA, 15 bp, Homo sapiens
ctcagacttttcagt

SEQ ID NO: 1122212 - DNA, 15 bp, Homo sapiens
tctcagacttttcag

SEQ ID NO: 1122213 - DNA, 15 bp, Homo sapiens
ctctcagacttttca

SEQ ID NO: 1122214 - DNA, 15 bp, Homo sapiens
gctctcagacttttc

SEQ ID NO: 1122215 - DNA, 15 bp, Homo sapiens
cgctctcagactttt

SEQ ID NO: 1122216 - DNA, 15 bp, Homo sapiens
tcgctctcagacttt

SEQ ID NO: 1122217 - DNA, 15 bp, Homo sapiens
ctcgctctcagactt

SEQ ID NO: 1122218 - DNA, 15 bp, Homo sapiens
actcgctctcagact

SEQ ID NO: 1122219 - DNA, 15 bp, Homo sapiens
cactcgctctcagac

SEQ ID NO: 1122220 - DNA, 15 bp, Homo sapiens
tcactcgctctcaga

SEQ ID NO: 1122221 - DNA, 15 bp, Homo sapiens
ctcactcgctctcag

SEQ ID NO: 1122222 - DNA, 15 bp, Homo sapiens
gctcactcgctctca

SEQ ID NO: 1122223 - DNA, 15 bp, Homo sapiens
cgctcactcgctctc

SEQ ID NO: 1122224 - DNA, 15 bp, Homo sapiens
acgctcactcgctct

SEQ ID NO: 1122225 - DNA, 15 bp, Homo sapiens
cacgctcactcgctc

SEQ ID NO: 1122226 - DNA, 15 bp, Homo sapiens
gcacgctcactcgct

SEQ ID NO: 1122227 - DNA, 15 bp, Homo sapiens
cgcacgctcactcgc

SEQ ID NO: 1122228 - DNA, 15 bp, Homo sapiens
tcgcacgctcactcg

SEQ ID NO: 1122229 - DNA, 15 bp, Homo sapiens
ttcgcacgctcactc

SEQ ID NO: 1122230 - DNA, 15 bp, Homo sapiens
gttcgcacgctcact

SEQ ID NO: 1122231 - DNA, 15 bp, Homo sapiens
agttcgcacgctcac

SEQ ID NO: 1122232 - DNA, 15 bp, Homo sapiens
gagttcgcacgctca

SEQ ID NO: 1122233 - DNA, 15 bp, Homo sapiens
tgagttcgcacgctc

SEQ ID NO: 1122234 - DNA, 15 bp, Homo sapiens
atgagttcgcacgct

SEQ ID NO: 1122235 - DNA, 15 bp, Homo sapiens
catgagttcgcacgc

SEQ ID NO: 1122236 - DNA, 15 bp, Homo sapiens
tcatgagttcgcacg

SEQ ID NO: 1122237 - DNA, 15 bp, Homo sapiens
ctcatgagttcgcac

SEQ ID NO: 1122238 - DNA, 15 bp, Homo sapiens
gctcatgagttcgca

SEQ ID NO: 1122239 - DNA, 15 bp, Homo sapiens
tgctcatgagttcgc

SEQ ID NO: 1122240 - DNA, 15 bp, Homo sapiens
ctgctcatgagttcg

SEQ ID NO: 1122241 - DNA, 15 bp, Homo sapiens
cctgctcatgagttc

SEQ ID NO: 1122242 - DNA, 15 bp, Homo sapiens
tcctgctcatgagtt

SEQ ID NO: 1122243 - DNA, 15 bp, Homo sapiens
ttcctgctcatgagt

SEQ ID NO: 1122244 - DNA, 15 bp, Homo sapiens
cttcctgctcatgag

SEQ ID NO: 1122245 - DNA, 15 bp, Homo sapiens
tcttcctgctcatga

SEQ ID NO: 1122246 - DNA, 15 bp, Homo sapiens
ttcttcctgctcatg

SEQ ID NO: 1122247 - DNA, 15 bp, Homo sapiens
tttcttcctgctcat

SEQ ID NO: 1122248 - DNA, 15 bp, Homo sapiens
atttcttcctgctca

SEQ ID NO: 1122249 - DNA, 15 bp, Homo sapiens
tatttcttcctgctc

SEQ ID NO: 1122250 - DNA, 15 bp, Homo sapiens
ctatttcttcctgct

SEQ ID NO: 1122251 - DNA, 15 bp, Homo sapiens
cctatttcttcctgc

SEQ ID NO: 1122252 - DNA, 15 bp, Homo sapiens
ccctatttcttcctg

SEQ ID NO: 1122253 - DNA, 15 bp, Homo sapiens
tccctatttcttcct

SEQ ID NO: 1122254 - DNA, 15 bp, Homo sapiens
ttccctatttcttcc

SEQ ID NO: 1122255 - DNA, 15 bp, Homo sapiens
cttccctatttcttc

SEQ ID NO: 1122256 - DNA, 15 bp, Homo sapiens
acttccctatttctt

SEQ ID NO: 1122257 - DNA, 15 bp, Homo sapiens
tacttccctatttct

SEQ ID NO: 1122258 - DNA, 15 bp, Homo sapiens
gtacttccctatttc

SEQ ID NO: 1122259 - DNA, 15 bp, Homo sapiens
tgtacttccctattt

SEQ ID NO: 1122260 - DNA, 15 bp, Homo sapiens
ctgtacttccctatt

SEQ ID NO: 1122261 - DNA, 15 bp, Homo sapiens
tctgtacttccctat

SEQ ID NO: 1122262 - DNA, 15 bp, Homo sapiens
ttctgtacttcccta

SEQ ID NO: 1122263 - DNA, 15 bp, Homo sapiens
cttctgtacttccct

SEQ ID NO: 1122264 - DNA, 15 bp, Homo sapiens
ccttctgtacttccc

SEQ ID NO: 1122265 - DNA, 15 bp, Homo sapiens
tccttctgtacttcc

SEQ ID NO: 1122266 - DNA, 15 bp, Homo sapiens
ctccttctgtacttc

SEQ ID NO: 1122267 - DNA, 15 bp, Homo sapiens
cctccttctgtactt

SEQ ID NO: 1122268 - DNA, 15 bp, Homo sapiens
tcctccttctgtact

SEQ ID NO: 1122269 - DNA, 15 bp, Homo sapiens
atcctccttctgtac

SEQ ID NO: 1122270 - DNA, 15 bp, Homo sapiens
gatcctccttctgta

SEQ ID NO: 1122271 - DNA, 15 bp, Homo sapiens
tgatcctccttctgt

SEQ ID NO: 1122272 - DNA, 15 bp, Homo sapiens
ctgatcctccttctg

SEQ ID NO: 1122273 - DNA, 15 bp, Homo sapiens
cctgatcctccttct

SEQ ID NO: 1122274 - DNA, 15 bp, Homo sapiens
tcctgatcctccttc

SEQ ID NO: 1122275 - DNA, 15 bp, Homo sapiens
ttcctgatcctcctt

SEQ ID NO: 1122276 - DNA, 15 bp, Homo sapiens
cttcctgatcctcct

SEQ ID NO: 1122277 - DNA, 15 bp, Homo sapiens
ccttcctgatcctcc

SEQ ID NO: 1122278 - DNA, 15 bp, Homo sapiens
accttcctgatcctc

SEQ ID NO: 1122279 - DNA, 15 bp, Homo sapiens
caccttcctgatcct

SEQ ID NO: 1122280 - DNA, 15 bp, Homo sapiens
ccaccttcctgatcc

SEQ ID NO: 1122281 - DNA, 15 bp, Homo sapiens
gccaccttcctgatc

SEQ ID NO: 1122282 - DNA, 15 bp, Homo sapiens
tgccaccttcctgat

SEQ ID NO: 1122283 - DNA, 15 bp, Homo sapiens
atgccaccttcctga

SEQ ID NO: 1122284 - DNA, 15 bp, Homo sapiens
aatgccaccttcctg

SEQ ID NO: 1122285 - DNA, 15 bp, Homo sapiens
gaatgccaccttcct

SEQ ID NO: 1122286 - DNA, 15 bp, Homo sapiens
ggaatgccaccttcc

SEQ ID NO: 1122287 - DNA, 15 bp, Homo sapiens
tggaatgccaccttc

SEQ ID NO: 1122288 - DNA, 15 bp, Homo sapiens
ctggaatgccacctt

SEQ ID NO: 1122289 - DNA, 15 bp, Homo sapiens
tctggaatgccacct

SEQ ID NO: 1122290 - DNA, 15 bp, Homo sapiens
ttctggaatgccacc

SEQ ID NO: 1122291 - DNA, 15 bp, Homo sapiens
cttctggaatgccac

SEQ ID NO: 1122292 - DNA, 15 bp, Homo sapiens
gcttctggaatgcca

SEQ ID NO: 1122293 - DNA, 15 bp, Homo sapiens
ggcttctggaatgcc

SEQ ID NO: 1122294 - DNA, 15 bp, Homo sapiens
tggcttctggaatgc

SEQ ID NO: 1122295 - DNA, 15 bp, Homo sapiens
ttggcttctggaatg

SEQ ID NO: 1122296 - DNA, 15 bp, Homo sapiens
tttggcttctggaat

SEQ ID NO: 1122297 - DNA, 15 bp, Homo sapiens
ctttggcttctggaa

SEQ ID NO: 1122298 - DNA, 15 bp, Homo sapiens
tctttggcttctgga

SEQ ID NO: 1122299 - DNA, 15 bp, Homo sapiens
ttctttggcttctgg

SEQ ID NO: 1122300 - DNA, 15 bp, Homo sapiens
tttctttggcttctg

SEQ ID NO: 1122301 - DNA, 15 bp, Homo sapiens
gtttctttggcttct

SEQ ID NO: 1122302 - DNA, 15 bp, Homo sapiens
tgtttctttggcttc

SEQ ID NO: 1122303 - DNA, 15 bp, Homo sapiens
ctgtttctttggctt

SEQ ID NO: 1122304 - DNA, 15 bp, Homo sapiens
tctgtttctttggct

SEQ ID NO: 1122305 - DNA, 15 bp, Homo sapiens
atctgtttctttggc

SEQ ID NO: 1122306 - DNA, 15 bp, Homo sapiens
aatctgtttctttgg

SEQ ID NO: 1122307 - DNA, 15 bp, Homo sapiens
gaatctgtttctttg

SEQ ID NO: 1122308 - DNA, 15 bp, Homo sapiens
tgaatctgtttcttt

SEQ ID NO: 1122309 - DNA, 15 bp, Homo sapiens
ttgaatctgtttctt

SEQ ID NO: 1122310 - DNA, 15 bp, Homo sapiens
tttgaatctgtttct

SEQ ID NO: 1122311 - DNA, 15 bp, Homo sapiens
ttttgaatctgtttc

SEQ ID NO: 1122312 - DNA, 15 bp, Homo sapiens
attttgaatctgttt

SEQ ID NO: 1122313 - DNA, 15 bp, Homo sapiens
gattttgaatctgtt

SEQ ID NO: 1122314 - DNA, 15 bp, Homo sapiens
tgattttgaatctgt

SEQ ID NO: 1122315 - DNA, 15 bp, Homo sapiens
ttgattttgaatctg

SEQ ID NO: 1122316 - DNA, 15 bp, Homo sapiens
tttgattttgaatct

SEQ ID NO: 1122317 - DNA, 15 bp, Homo sapiens
ctttgattttgaatc

SEQ ID NO: 1122318 - DNA, 15 bp, Homo sapiens
actttgattttgaat

SEQ ID NO: 1122319 - DNA, 15 bp, Homo sapiens
cactttgattttgaa

SEQ ID NO: 1122320 - DNA, 15 bp, Homo sapiens
ccactttgattttga

SEQ ID NO: 1122321 - DNA, 15 bp, Homo sapiens
accactttgattttg

SEQ ID NO: 1122322 - DNA, 15 bp, Homo sapiens
taccactttgatttt

SEQ ID NO: 1122323 - DNA, 15 bp, Homo sapiens
ttaccactttgattt

SEQ ID NO: 1122324 - DNA, 15 bp, Homo sapiens
tttaccactttgatt

SEQ ID NO: 1122325 - DNA, 15 bp, Homo sapiens
atttaccactttgat

SEQ ID NO: 1122326 - DNA, 15 bp, Homo sapiens
aatttaccactttga

SEQ ID NO: 1122327 - DNA, 15 bp, Homo sapiens
aaatttaccactttg

SEQ ID NO: 1122328 - DNA, 15 bp, Homo sapiens
aaaatttaccacttt

SEQ ID NO: 1122329 - DNA, 15 bp, Homo sapiens
taaaatttaccactt

SEQ ID NO: 1122330 - DNA, 15 bp, Homo sapiens
ataaaatttaccact

SEQ ID NO: 1122331 - DNA, 15 bp, Homo sapiens
gataaaatttaccac

SEQ ID NO: 1122332 - DNA, 15 bp, Homo sapiens
tgataaaatttacca

SEQ ID NO: 1122333 - DNA, 15 bp, Homo sapiens
ttgataaaatttacc

SEQ ID NO: 1122334 - DNA, 15 bp, Homo sapiens
tttgataaaatttac

SEQ ID NO: 1122335 - DNA, 15 bp, Homo sapiens
atttgataaaattta

SEQ ID NO: 1122336 - DNA, 15 bp, Homo sapiens
catttgataaaattt

SEQ ID NO: 1122337 - DNA, 15 bp, Homo sapiens
gcatttgataaaatt

SEQ ID NO: 1122338 - DNA, 15 bp, Homo sapiens
tgcatttgataaaat

SEQ ID NO: 1122339 - DNA, 15 bp, Homo sapiens
ttgcatttgataaaa

SEQ ID NO: 1122340 - DNA, 15 bp, Homo sapiens
attgcatttgataaa

SEQ ID NO: 1122341 - DNA, 15 bp, Homo sapiens
tattgcatttgataa

SEQ ID NO: 1122342 - DNA, 15 bp, Homo sapiens
ctattgcatttgata

SEQ ID NO: 1122343 - DNA, 15 bp, Homo sapiens
tctattgcatttgat

SEQ ID NO: 1122344 - DNA, 15 bp, Homo sapiens
ttctattgcatttga

SEQ ID NO: 1122345 - DNA, 15 bp, Homo sapiens
tttctattgcatttg

SEQ ID NO: 1122346 - DNA, 15 bp, Homo sapiens
ctttctattgcattt

SEQ ID NO: 1122347 - DNA, 15 bp, Homo sapiens
cctttctattgcatt

SEQ ID NO: 1122348 - DNA, 15 bp, Homo sapiens
tcctttctattgcat

SEQ ID NO: 1122349 - DNA, 15 bp, Homo sapiens
gtcctttctattgca

SEQ ID NO: 1122350 - DNA, 15 bp, Homo sapiens
tgtcctttctattgc

SEQ ID NO: 1122351 - DNA, 15 bp, Homo sapiens
ctgtcctttctattg

SEQ ID NO: 1122352 - DNA, 15 bp, Homo sapiens
actgtcctttctatt

SEQ ID NO: 1122353 - DNA, 15 bp, Homo sapiens
aactgtcctttctat

SEQ ID NO: 1122354 - DNA, 15 bp, Homo sapiens
taactgtcctttcta

SEQ ID NO: 1122355 - DNA, 15 bp, Homo sapiens
ataactgtcctttct

SEQ ID NO: 1122356 - DNA, 15 bp, Homo sapiens
tataactgtcctttc

SEQ ID NO: 1122357 - DNA, 15 bp, Homo sapiens
atataactgtccttt

SEQ ID NO: 1122358 - DNA, 15 bp, Homo sapiens
tatataactgtcctt

SEQ ID NO: 1122359 - DNA, 15 bp, Homo sapiens
ttatataactgtcct

SEQ ID NO: 1122360 - DNA, 15 bp, Homo sapiens
cttatataactgtcc

SEQ ID NO: 1122361 - DNA, 15 bp, Homo sapiens
ccttatataactgtc

SEQ ID NO: 1122362 - DNA, 15 bp, Homo sapiens
gccttatataactgt

SEQ ID NO: 1122363 - DNA, 15 bp, Homo sapiens
ggccttatataactg

SEQ ID NO: 1122364 - DNA, 15 bp, Homo sapiens
tggccttatataact

SEQ ID NO: 1122365 - DNA, 15 bp, Homo sapiens
ttggccttatataac

SEQ ID NO: 1122366 - DNA, 15 bp, Homo sapiens
tttggccttatataa

SEQ ID NO: 1122367 - DNA, 15 bp, Homo sapiens
ttttggccttatata

SEQ ID NO: 1122368 - DNA, 15 bp, Homo sapiens
tttttggccttatat

SEQ ID NO: 1122369 - DNA, 15 bp, Homo sapiens
ttttttggccttata

SEQ ID NO: 1122370 - DNA, 15 bp, Homo sapiens
cttttttggccttat

SEQ ID NO: 1122371 - DNA, 15 bp, Homo sapiens
acttttttggcctta

SEQ ID NO: 1122372 - DNA, 15 bp, Homo sapiens
cacttttttggcctt

SEQ ID NO: 1122373 - DNA, 15 bp, Homo sapiens
acacttttttggcct

SEQ ID NO: 1122374 - DNA, 15 bp, Homo sapiens
gacacttttttggcc

SEQ ID NO: 1122375 - DNA, 15 bp, Homo sapiens
ggacacttttttggc

SEQ ID NO: 1122376 - DNA, 15 bp, Homo sapiens
tggacacttttttgg

SEQ ID NO: 1122377 - DNA, 15 bp, Homo sapiens
gtggacacttttttg

SEQ ID NO: 1122378 - DNA, 15 bp, Homo sapiens
agtggacactttttt

SEQ ID NO: 1122379 - DNA, 15 bp, Homo sapiens
cagtggacacttttt

SEQ ID NO: 1122380 - DNA, 15 bp, Homo sapiens
ccagtggacactttt

SEQ ID NO: 1122381 - DNA, 15 bp, Homo sapiens
tccagtggacacttt

SEQ ID NO: 1122382 - DNA, 15 bp, Homo sapiens
atccagtggacactt

SEQ ID NO: 1122383 - DNA, 15 bp, Homo sapiens
aatccagtggacact

SEQ ID NO: 1122384 - DNA, 15 bp, Homo sapiens
aaatccagtggacac

SEQ ID NO: 1122385 - DNA, 15 bp, Homo sapiens
caaatccagtggaca

SEQ ID NO: 1122386 - DNA, 15 bp, Homo sapiens
ccaaatccagtggac

SEQ ID NO: 1122387 - DNA, 15 bp, Homo sapiens
gccaaatccagtgga

SEQ ID NO: 1122388 - DNA, 15 bp, Homo sapiens
tgccaaatccagtgg

SEQ ID NO: 1122389 - DNA, 15 bp, Homo sapiens
ttgccaaatccagtg

SEQ ID NO: 1122390 - DNA, 15 bp, Homo sapiens
cttgccaaatccagt

SEQ ID NO: 1122391 - DNA, 15 bp, Homo sapiens
tcttgccaaatccag

SEQ ID NO: 1122392 - DNA, 15 bp, Homo sapiens
ttcttgccaaatcca

SEQ ID NO: 1122393 - DNA, 15 bp, Homo sapiens
tttcttgccaaatcc

SEQ ID NO: 1122394 - DNA, 15 bp, Homo sapiens
ctttcttgccaaatc

SEQ ID NO: 1122395 - DNA, 15 bp, Homo sapiens
gctttcttgccaaat

SEQ ID NO: 1122396 - DNA, 15 bp, Homo sapiens
tgctttcttgccaaa

SEQ ID NO: 1122397 - DNA, 15 bp, Homo sapiens
ctgctttcttgccaa

SEQ ID NO: 1122398 - DNA, 15 bp, Homo sapiens
actgctttcttgcca

SEQ ID NO: 1122399 - DNA, 15 bp, Homo sapiens
gactgctttcttgcc

SEQ ID NO: 1122400 - DNA, 15 bp, Homo sapiens
tgactgctttcttgc

SEQ ID NO: 1122401 - DNA, 15 bp, Homo sapiens
gtgactgctttcttg

SEQ ID NO: 1122402 - DNA, 15 bp, Homo sapiens
cgtgactgctttctt

SEQ ID NO: 1122403 - DNA, 15 bp, Homo sapiens
gcgtgactgctttct

SEQ ID NO: 1122404 - DNA, 15 bp, Homo sapiens
tgcgtgactgctttc

SEQ ID NO: 1122405 - DNA, 15 bp, Homo sapiens
ctgcgtgactgcttt

SEQ ID NO: 1122406 - DNA, 15 bp, Homo sapiens
actgcgtgactgctt

SEQ ID NO: 1122407 - DNA, 15 bp, Homo sapiens
gactgcgtgactgct

SEQ ID NO: 1122408 - DNA, 15 bp, Homo sapiens
tgactgcgtgactgc

SEQ ID NO: 1122409 - DNA, 15 bp, Homo sapiens
ttgactgcgtgactg

SEQ ID NO: 1122410 - DNA, 15 bp, Homo sapiens
attgactgcgtgact

SEQ ID NO: 1122411 - DNA, 15 bp, Homo sapiens
cattgactgcgtgac

SEQ ID NO: 1122412 - DNA, 15 bp, Homo sapiens
tcattgactgcgtga

SEQ ID NO: 1122413 - DNA, 15 bp, Homo sapiens
atcattgactgcgtg

SEQ ID NO: 1122414 - DNA, 15 bp, Homo sapiens
catcattgactgcgt

SEQ ID NO: 1122415 - DNA, 15 bp, Homo sapiens
acatcattgactgcg

SEQ ID NO: 1122416 - DNA, 15 bp, Homo sapiens
gacatcattgactgc

SEQ ID NO: 1122417 - DNA, 15 bp, Homo sapiens
agacatcattgactg

SEQ ID NO: 1122418 - DNA, 15 bp, Homo sapiens
aagacatcattgact

SEQ ID NO: 1122419 - DNA, 15 bp, Homo sapiens
aaagacatcattgac

SEQ ID NO: 1122420 - DNA, 15 bp, Homo sapiens
aaaagacatcattga

SEQ ID NO: 1122421 - DNA, 15 bp, Homo sapiens
caaaagacatcattg

SEQ ID NO: 1122422 - DNA, 15 bp, Homo sapiens
gcaaaagacatcatt

SEQ ID NO: 1122423 - DNA, 15 bp, Homo sapiens
ggcaaaagacatcat

SEQ ID NO: 1122424 - DNA, 15 bp, Homo sapiens
tggcaaaagacatca

SEQ ID NO: 1122425 - DNA, 15 bp, Homo sapiens
ttggcaaaagacatc

SEQ ID NO: 1122426 - DNA, 15 bp, Homo sapiens
gttggcaaaagacat

SEQ ID NO: 1122427 - DNA, 15 bp, Homo sapiens
tgttggcaaaagaca

SEQ ID NO: 1122428 - DNA, 15 bp, Homo sapiens
ctgttggcaaaagac

SEQ ID NO: 1122429 - DNA, 15 bp, Homo sapiens
actgttggcaaaaga

SEQ ID NO: 1122430 - DNA, 15 bp, Homo sapiens
aactgttggcaaaag

SEQ ID NO: 1122431 - DNA, 15 bp, Homo sapiens
aaactgttggcaaaa

SEQ ID NO: 1122432 - DNA, 15 bp, Homo sapiens
aaaactgttggcaaa

SEQ ID NO: 1122433 - DNA, 15 bp, Homo sapiens
caaaactgttggcaa

SEQ ID NO: 1122434 - DNA, 15 bp, Homo sapiens
acaaaactgttggca

SEQ ID NO: 1122435 - DNA, 15 bp, Homo sapiens
tacaaaactgttggc

SEQ ID NO: 1122436 - DNA, 15 bp, Homo sapiens
gtacaaaactgttgg

SEQ ID NO: 1122437 - DNA, 15 bp, Homo sapiens
tgtacaaaactgttg

SEQ ID NO: 1122438 - DNA, 15 bp, Homo sapiens
ttgtacaaaactgtt

SEQ ID NO: 1122439 - DNA, 15 bp, Homo sapiens
attgtacaaaactgt

SEQ ID NO: 1122440 - DNA, 15 bp, Homo sapiens
cattgtacaaaactg

SEQ ID NO: 1122441 - DNA, 15 bp, Homo sapiens
ccattgtacaaaact

SEQ ID NO: 1122442 - DNA, 15 bp, Homo sapiens
accattgtacaaaac

SEQ ID NO: 1122443 - DNA, 15 bp, Homo sapiens
caccattgtacaaaa

SEQ ID NO: 1122444 - DNA, 15 bp, Homo sapiens
ccaccattgtacaaa

SEQ ID NO: 1122445 - DNA, 15 bp, Homo sapiens
cccaccattgtacaa

SEQ ID NO: 1122446 - DNA, 15 bp, Homo sapiens
acccaccattgtaca

SEQ ID NO: 1122447 - DNA, 15 bp, Homo sapiens
cacccaccattgtac

SEQ ID NO: 1122448 - DNA, 15 bp, Homo sapiens
gcacccaccattgta

SEQ ID NO: 1122449 - DNA, 15 bp, Homo sapiens
tgcacccaccattgt

SEQ ID NO: 1122450 - DNA, 15 bp, Homo sapiens
ctgcacccaccattg

SEQ ID NO: 1122451 - DNA, 15 bp, Homo sapiens
tctgcacccaccatt

SEQ ID NO: 1122452 - DNA, 15 bp, Homo sapiens
ttctgcacccaccat

SEQ ID NO: 1122453 - DNA, 15 bp, Homo sapiens
cttctgcacccacca

SEQ ID NO: 1122454 - DNA, 15 bp, Homo sapiens
tcttctgcacccacc

SEQ ID NO: 1122455 - DNA, 15 bp, Homo sapiens
gtcttctgcacccac

SEQ ID NO: 1122456 - DNA, 15 bp, Homo sapiens
tgtcttctgcaccca

SEQ ID NO: 1122457 - DNA, 15 bp, Homo sapiens
ctgtcttctgcaccc

SEQ ID NO: 1122458 - DNA, 15 bp, Homo sapiens
tctgtcttctgcacc

SEQ ID NO: 1122459 - DNA, 15 bp, Homo sapiens
atctgtcttctgcac

SEQ ID NO: 1122460 - DNA, 15 bp, Homo sapiens
gatctgtcttctgca

SEQ ID NO: 1122461 - DNA, 15 bp, Homo sapiens
tgatctgtcttctgc

SEQ ID NO: 1122462 - DNA, 15 bp, Homo sapiens
gtgatctgtcttctg

SEQ ID NO: 1122463 - DNA, 15 bp, Homo sapiens
tgtgatctgtcttct

SEQ ID NO: 1122464 - DNA, 15 bp, Homo sapiens
ttgtgatctgtcttc

SEQ ID NO: 1122465 - DNA, 15 bp, Homo sapiens
tttgtgatctgtctt

SEQ ID NO: 1122466 - DNA, 15 bp, Homo sapiens
ctttgtgatctgtct

SEQ ID NO: 1122467 - DNA, 15 bp, Homo sapiens
tctttgtgatctgtc

SEQ ID NO: 1122468 - DNA, 15 bp, Homo sapiens
ctctttgtgatctgt

SEQ ID NO: 1122469 - DNA, 15 bp, Homo sapiens
actctttgtgatctg

SEQ ID NO: 1122470 - DNA, 15 bp, Homo sapiens
aactctttgtgatct

SEQ ID NO: 1122471 - DNA, 15 bp, Homo sapiens
aaactctttgtgatc

SEQ ID NO: 1122472 - DNA, 15 bp, Homo sapiens
caaactctttgtgat

SEQ ID NO: 1122473 - DNA, 15 bp, Homo sapiens
tcaaactctttgtga

SEQ ID NO: 1122474 - DNA, 15 bp, Homo sapiens
ctcaaactctttgtg

SEQ ID NO: 1122475 - DNA, 15 bp, Homo sapiens
cctcaaactctttgt

SEQ ID NO: 1122476 - DNA, 15 bp, Homo sapiens
tcctcaaactctttg

SEQ ID NO: 1122477 - DNA, 15 bp, Homo sapiens
ctcctcaaactcttt

SEQ ID NO: 1122478 - DNA, 15 bp, Homo sapiens
tctcctcaaactctt

SEQ ID NO: 1122479 - DNA, 15 bp, Homo sapiens
ttctcctcaaactct

SEQ ID NO: 1122480 - DNA, 15 bp, Homo sapiens
tttctcctcaaactc

SEQ ID NO: 1122481 - DNA, 15 bp, Homo sapiens
ttttctcctcaaact

SEQ ID NO: 1122482 - DNA, 15 bp, Homo sapiens
attttctcctcaaac

SEQ ID NO: 1122483 - DNA, 15 bp, Homo sapiens
cattttctcctcaaa

SEQ ID NO: 1122484 - DNA, 15 bp, Homo sapiens
ccattttctcctcaa

SEQ ID NO: 1122485 - DNA, 15 bp, Homo sapiens
tccattttctcctca

SEQ ID NO: 1122486 - DNA, 15 bp, Homo sapiens
ttccattttctcctc

SEQ ID NO: 1122487 - DNA, 15 bp, Homo sapiens
tttccattttctcct

SEQ ID NO: 1122488 - DNA, 15 bp, Homo sapiens
ttttccattttctcc

SEQ ID NO: 1122489 - DNA, 15 bp, Homo sapiens
attttccattttctc

SEQ ID NO: 1122490 - DNA, 15 bp, Homo sapiens
cattttccattttct

SEQ ID NO: 1122491 - DNA, 15 bp, Homo sapiens
tcattttccattttc

SEQ ID NO: 1122492 - DNA, 15 bp, Homo sapiens
ctcattttccatttt

SEQ ID NO: 1122493 - DNA, 15 bp, Homo sapiens
cctcattttccattt

SEQ ID NO: 1122494 - DNA, 15 bp, Homo sapiens
tcctcattttccatt

SEQ ID NO: 1122495 - DNA, 15 bp, Homo sapiens
ttcctcattttccat

SEQ ID NO: 1122496 - DNA, 15 bp, Homo sapiens
attcctcattttcca

SEQ ID NO: 1122497 - DNA, 15 bp, Homo sapiens
aattcctcattttcc

SEQ ID NO: 1122498 - DNA, 15 bp, Homo sapiens
caattcctcattttc

SEQ ID NO: 1122499 - DNA, 15 bp, Homo sapiens
ccaattcctcatttt

SEQ ID NO: 1122500 - DNA, 15 bp, Homo sapiens
tccaattcctcattt

SEQ ID NO: 1122501 - DNA, 15 bp, Homo sapiens
atccaattcctcatt

SEQ ID NO: 1122502 - DNA, 15 bp, Homo sapiens
tatccaattcctcat

SEQ ID NO: 1122503 - DNA, 15 bp, Homo sapiens
ctatccaattcctca

SEQ ID NO: 1122504 - DNA, 15 bp, Homo sapiens
tctatccaattcctc

SEQ ID NO: 1122505 - DNA, 15 bp, Homo sapiens
ctctatccaattcct

SEQ ID NO: 1122506 - DNA, 15 bp, Homo sapiens
gctctatccaattcc

SEQ ID NO: 1122507 - DNA, 15 bp, Homo sapiens
tgctctatccaattc

SEQ ID NO: 1122508 - DNA, 15 bp, Homo sapiens
ttgctctatccaatt

SEQ ID NO: 1122509 - DNA, 15 bp, Homo sapiens
cttgctctatccaat

SEQ ID NO: 1122510 - DNA, 15 bp, Homo sapiens
acttgctctatccaa

SEQ ID NO: 1122511 - DNA, 15 bp, Homo sapiens
tacttgctctatcca

SEQ ID NO: 1122512 - DNA, 15 bp, Homo sapiens
ttacttgctctatcc

SEQ ID NO: 1122513 - DNA, 15 bp, Homo sapiens
cttacttgctctatc

SEQ ID NO: 1122514 - DNA, 15 bp, Homo sapiens
ccttacttgctctat

SEQ ID NO: 1122515 - DNA, 15 bp, Homo sapiens
tccttacttgctcta

SEQ ID NO: 1122516 - DNA, 15 bp, Homo sapiens
gtccttacttgctct

SEQ ID NO: 1122517 - DNA, 15 bp, Homo sapiens
tgtccttacttgctc

SEQ ID NO: 1122518 - DNA, 15 bp, Homo sapiens
ttgtccttacttgct

SEQ ID NO: 1122519 - DNA, 15 bp, Homo sapiens
gttgtccttacttgc

SEQ ID NO: 1122520 - DNA, 15 bp, Homo sapiens
agttgtccttacttg

SEQ ID NO: 1122521 - DNA, 15 bp, Homo sapiens
gagttgtccttactt

SEQ ID NO: 1122522 - DNA, 15 bp, Homo sapiens
tgagttgtccttact

SEQ ID NO: 1122523 - DNA, 15 bp, Homo sapiens
ttgagttgtccttac

SEQ ID NO: 1122524 - DNA, 15 bp, Homo sapiens
tttgagttgtcctta

SEQ ID NO: 1122525 - DNA, 15 bp, Homo sapiens
ttttgagttgtcctt

SEQ ID NO: 1122526 - DNA, 15 bp, Homo sapiens
tttttgagttgtcct

SEQ ID NO: 1122527 - DNA, 15 bp, Homo sapiens
ctttttgagttgtcc

SEQ ID NO: 1122528 - DNA, 15 bp, Homo sapiens
gctttttgagttgtc

SEQ ID NO: 1122529 - DNA, 15 bp, Homo sapiens
ggctttttgagttgt

SEQ ID NO: 1122530 - DNA, 15 bp, Homo sapiens
tggctttttgagttg

SEQ ID NO: 1122531 - DNA, 15 bp, Homo sapiens
ctggctttttgagtt

SEQ ID NO: 1122532 - DNA, 15 bp, Homo sapiens
gctggctttttgagt

SEQ ID NO: 1122533 - DNA, 15 bp, Homo sapiens
agctggctttttgag

SEQ ID NO: 1122534 - DNA, 15 bp, Homo sapiens
cagctggctttttga

SEQ ID NO: 1122535 - DNA, 15 bp, Homo sapiens
acagctggctttttg

SEQ ID NO: 1122536 - DNA, 15 bp, Homo sapiens
tacagctggcttttt

SEQ ID NO: 1122537 - DNA, 15 bp, Homo sapiens
ttacagctggctttt

SEQ ID NO: 1122538 - DNA, 15 bp, Homo sapiens
gttacagctggcttt

SEQ ID NO: 1122539 - DNA, 15 bp, Homo sapiens
ggttacagctggctt

SEQ ID NO: 1122540 - DNA, 15 bp, Homo sapiens
tggttacagctggct

SEQ ID NO: 1122541 - DNA, 15 bp, Homo sapiens
ctggttacagctggc

SEQ ID NO: 1122542 - DNA, 15 bp, Homo sapiens
tctggttacagctgg

SEQ ID NO: 1122543 - DNA, 15 bp, Homo sapiens
ctctggttacagctg

SEQ ID NO: 1122544 - DNA, 15 bp, Homo sapiens
cctctggttacagct

SEQ ID NO: 1122545 - DNA, 15 bp, Homo sapiens
tcctctggttacagc

SEQ ID NO: 1122546 - DNA, 15 bp, Homo sapiens
ttcctctggttacag

SEQ ID NO: 1122547 - DNA, 15 bp, Homo sapiens
cttcctctggttaca

SEQ ID NO: 1122548 - DNA, 15 bp, Homo sapiens
tcttcctctggttac

SEQ ID NO: 1122549 - DNA, 15 bp, Homo sapiens
atcttcctctggtta

SEQ ID NO: 1122550 - DNA, 15 bp, Homo sapiens
catcttcctctggtt

SEQ ID NO: 1122551 - DNA, 15 bp, Homo sapiens
gcatcttcctctggt

SEQ ID NO: 1122552 - DNA, 15 bp, Homo sapiens
tgcatcttcctctgg

SEQ ID NO: 1122553 - DNA, 15 bp, Homo sapiens
atgcatcttcctctg

SEQ ID NO: 1122554 - DNA, 15 bp, Homo sapiens
gatgcatcttcctct

SEQ ID NO: 1122555 - DNA, 15 bp, Homo sapiens
cgatgcatcttcctc

SEQ ID NO: 1122556 - DNA, 15 bp, Homo sapiens
acgatgcatcttcct

SEQ ID NO: 1122557 - DNA, 15 bp, Homo sapiens
gacgatgcatcttcc

SEQ ID NO: 1122558 - DNA, 15 bp, Homo sapiens
tgacgatgcatcttc

SEQ ID NO: 1122559 - DNA, 15 bp, Homo sapiens
ttgacgatgcatctt

SEQ ID NO: 1122560 - DNA, 15 bp, Homo sapiens
cttgacgatgcatct

SEQ ID NO: 1122561 - DNA, 15 bp, Homo sapiens
tcttgacgatgcatc

SEQ ID NO: 1122562 - DNA, 15 bp, Homo sapiens
ctcttgacgatgcat

SEQ ID NO: 1122563 - DNA, 15 bp, Homo sapiens
tctcttgacgatgca

SEQ ID NO: 1122564 - DNA, 15 bp, Homo sapiens
ctctcttgacgatgc

SEQ ID NO: 1122565 - DNA, 15 bp, Homo sapiens
cctctcttgacgatg

SEQ ID NO: 1122566 - DNA, 15 bp, Homo sapiens
ccctctcttgacgat

SEQ ID NO: 1122567 - DNA, 15 bp, Homo sapiens
gccctctcttgacga

SEQ ID NO: 1122568 - DNA, 15 bp, Homo sapiens
agccctctcttgacg

SEQ ID NO: 1122569 - DNA, 15 bp, Homo sapiens
aagccctctcttgac

SEQ ID NO: 1122570 - DNA, 15 bp, Homo sapiens
aaagccctctcttga

SEQ ID NO: 1122571 - DNA, 15 bp, Homo sapiens
taaagccctctcttg

SEQ ID NO: 1122572 - DNA, 15 bp, Homo sapiens
ttaaagccctctctt

SEQ ID NO: 1122573 - DNA, 15 bp, Homo sapiens
tttaaagccctctct

SEQ ID NO: 1122574 - DNA, 15 bp, Homo sapiens
gtttaaagccctctc

SEQ ID NO: 1122575 - DNA, 15 bp, Homo sapiens
tgtttaaagccctct

SEQ ID NO: 1122576 - DNA, 15 bp, Homo sapiens
atgtttaaagccctc

SEQ ID NO: 1122577 - DNA, 15 bp, Homo sapiens
catgtttaaagccct

SEQ ID NO: 1122578 - DNA, 15 bp, Homo sapiens
acatgtttaaagccc

SEQ ID NO: 1122579 - DNA, 15 bp, Homo sapiens
aacatgtttaaagcc

SEQ ID NO: 1122580 - DNA, 15 bp, Homo sapiens
gaacatgtttaaagc

SEQ ID NO: 1122581 - DNA, 15 bp, Homo sapiens
tgaacatgtttaaag

SEQ ID NO: 1122582 - DNA, 15 bp, Homo sapiens
atgaacatgtttaaa

SEQ ID NO: 1122583 - DNA, 15 bp, Homo sapiens
aatgaacatgtttaa

SEQ ID NO: 1122584 - DNA, 15 bp, Homo sapiens
gaatgaacatgttta

SEQ ID NO: 1122585 - DNA, 15 bp, Homo sapiens
tgaatgaacatgttt

SEQ ID NO: 1122586 - DNA, 15 bp, Homo sapiens
atgaatgaacatgtt

SEQ ID NO: 1122587 - DNA, 15 bp, Homo sapiens
aatgaatgaacatgt

SEQ ID NO: 1122588 - DNA, 15 bp, Homo sapiens
gaatgaatgaacatg

SEQ ID NO: 1122589 - DNA, 15 bp, Homo sapiens
tgaatgaatgaacat

SEQ ID NO: 1122590 - DNA, 15 bp, Homo sapiens
ttgaatgaatgaaca

SEQ ID NO: 1122591 - DNA, 15 bp, Homo sapiens
aattgaatgaatgaa

SEQ ID NO: 1122592 - DNA, 15 bp, Homo sapiens
taattgaatgaatga

SEQ ID NO: 1122593 - DNA, 15 bp, Homo sapiens
ataattgaatgaatg

SEQ ID NO: 1122594 - DNA, 15 bp, Homo sapiens
aataattgaatgaat

SEQ ID NO: 1122595 - DNA, 15 bp, Homo sapiens
aaataattgaatgaa

SEQ ID NO: 1122596 - DNA, 15 bp, Homo sapiens
caaataattgaatga

SEQ ID NO: 1122597 - DNA, 15 bp, Homo sapiens
acaaataattgaatg

SEQ ID NO: 1122598 - DNA, 15 bp, Homo sapiens
aacaaataattgaat

SEQ ID NO: 1122599 - DNA, 15 bp, Homo sapiens
aaacaaataattgaa

SEQ ID NO: 1122600 - DNA, 15 bp, Homo sapiens
taaacaaataattga

SEQ ID NO: 1122601 - DNA, 15 bp, Homo sapiens
gtaaacaaataattg

SEQ ID NO: 1122602 - DNA, 15 bp, Homo sapiens
agtaaacaaataatt

SEQ ID NO: 1122603 - DNA, 15 bp, Homo sapiens
aagtaaacaaataat

SEQ ID NO: 1122604 - DNA, 15 bp, Homo sapiens
taagtaaacaaataa

SEQ ID NO: 1122605 - DNA, 15 bp, Homo sapiens
gtaagtaaacaaata

SEQ ID NO: 1122606 - DNA, 15 bp, Homo sapiens
ggtaagtaaacaaat

SEQ ID NO: 1122607 - DNA, 15 bp, Homo sapiens
aggtaagtaaacaaa

SEQ ID NO: 1122608 - DNA, 15 bp, Homo sapiens
aaggtaagtaaacaa

SEQ ID NO: 1122609 - DNA, 15 bp, Homo sapiens
taaggtaagtaaaca

SEQ ID NO: 1122610 - DNA, 15 bp, Homo sapiens
ataaggtaagtaaac

SEQ ID NO: 1122611 - DNA, 15 bp, Homo sapiens
aataaggtaagtaaa

SEQ ID NO: 1122612 - DNA, 15 bp, Homo sapiens
aaataaggtaagtaa

SEQ ID NO: 1122613 - DNA, 15 bp, Homo sapiens
aaaataaggtaagta

SEQ ID NO: 1122614 - DNA, 15 bp, Homo sapiens
aaaaataaggtaagt

SEQ ID NO: 1122615 - DNA, 15 bp, Homo sapiens
taaaaataaggtaag

SEQ ID NO: 1122616 - DNA, 15 bp, Homo sapiens
ctaaaaataaggtaa

SEQ ID NO: 1122617 - DNA, 15 bp, Homo sapiens
cctaaaaataaggta

SEQ ID NO: 1122618 - DNA, 15 bp, Homo sapiens
tcctaaaaataaggt

SEQ ID NO: 1122619 - DNA, 15 bp, Homo sapiens
atcctaaaaataagg

SEQ ID NO: 1122620 - DNA, 15 bp, Homo sapiens
tatcctaaaaataag

SEQ ID NO: 1122621 - DNA, 15 bp, Homo sapiens
ctatcctaaaaataa

SEQ ID NO: 1122622 - DNA, 15 bp, Homo sapiens
cctatcctaaaaata

SEQ ID NO: 1122623 - DNA, 15 bp, Homo sapiens
tcctatcctaaaaat

SEQ ID NO: 1122624 - DNA, 15 bp, Homo sapiens
ttcctatcctaaaaa

SEQ ID NO: 1122625 - DNA, 15 bp, Homo sapiens
tttcctatcctaaaa

SEQ ID NO: 1122626 - DNA, 15 bp, Homo sapiens
ttttcctatcctaaa

SEQ ID NO: 1122627 - DNA, 15 bp, Homo sapiens
tttttcctatcctaa

SEQ ID NO: 1122628 - DNA, 15 bp, Homo sapiens
gtttttcctatccta

SEQ ID NO: 1122629 - DNA, 15 bp, Homo sapiens
agtttttcctatcct

SEQ ID NO: 1122630 - DNA, 15 bp, Homo sapiens
aagtttttcctatcc

SEQ ID NO: 1122631 - DNA, 15 bp, Homo sapiens
caagtttttcctatc

SEQ ID NO: 1122632 - DNA, 15 bp, Homo sapiens
tcaagtttttcctat

SEQ ID NO: 1122633 - DNA, 15 bp, Homo sapiens
ctcaagtttttccta

SEQ ID NO: 1122634 - DNA, 15 bp, Homo sapiens
actcaagtttttcct

SEQ ID NO: 1122635 - DNA, 15 bp, Homo sapiens
cactcaagtttttcc

SEQ ID NO: 1122636 - DNA, 15 bp, Homo sapiens
acactcaagtttttc

SEQ ID NO: 1122637 - DNA, 15 bp, Homo sapiens
aacactcaagttttt

SEQ ID NO: 1122638 - DNA, 15 bp, Homo sapiens
aaacactcaagtttt

SEQ ID NO: 1122639 - DNA, 15 bp, Homo sapiens
taaacactcaagttt

SEQ ID NO: 1122640 - DNA, 15 bp, Homo sapiens
gtaaacactcaagtt

SEQ ID NO: 1122641 - DNA, 15 bp, Homo sapiens
tgtaaacactcaagt

SEQ ID NO: 1122642 - DNA, 15 bp, Homo sapiens
ttgtaaacactcaag

SEQ ID NO: 1122643 - DNA, 15 bp, Homo sapiens
tttgtaaacactcaa

SEQ ID NO: 1122644 - DNA, 15 bp, Homo sapiens
gtttgtaaacactca

SEQ ID NO: 1122645 - DNA, 15 bp, Homo sapiens
ggtttgtaaacactc

SEQ ID NO: 1122646 - DNA, 15 bp, Homo sapiens
aggtttgtaaacact

SEQ ID NO: 1122647 - DNA, 15 bp, Homo sapiens
taggtttgtaaacac

SEQ ID NO: 1122648 - DNA, 15 bp, Homo sapiens
ttaggtttgtaaaca

SEQ ID NO: 1122649 - DNA, 15 bp, Homo sapiens
cttaggtttgtaaac

SEQ ID NO: 1122650 - DNA, 15 bp, Homo sapiens
ccttaggtttgtaaa

SEQ ID NO: 1122651 - DNA, 15 bp, Homo sapiens
cccttaggtttgtaa

SEQ ID NO: 1122652 - DNA, 15 bp, Homo sapiens
ccccttaggtttgta

SEQ ID NO: 1122653 - DNA, 15 bp, Homo sapiens
tccccttaggtttgt

SEQ ID NO: 1122654 - DNA, 15 bp, Homo sapiens
ttccccttaggtttg

SEQ ID NO: 1122655 - DNA, 15 bp, Homo sapiens
tttccccttaggttt

SEQ ID NO: 1122656 - DNA, 15 bp, Homo sapiens
ttttccccttaggtt

SEQ ID NO: 1122657 - DNA, 15 bp, Homo sapiens
tttttccccttaggt

SEQ ID NO: 1122658 - DNA, 15 bp, Homo sapiens
gtttttccccttagg

SEQ ID NO: 1122659 - DNA, 15 bp, Homo sapiens
agtttttccccttag

SEQ ID NO: 1122660 - DNA, 15 bp, Homo sapiens
tagtttttcccctta

SEQ ID NO: 1122661 - DNA, 15 bp, Homo sapiens
ctagtttttcccctt

SEQ ID NO: 1122662 - DNA, 15 bp, Homo sapiens
tctagtttttcccct

SEQ ID NO: 1122663 - DNA, 15 bp, Homo sapiens
ttctagtttttcccc

SEQ ID NO: 1122664 - DNA, 15 bp, Homo sapiens
cttctagtttttccc

SEQ ID NO: 1122665 - DNA, 15 bp, Homo sapiens
ccttctagtttttcc

SEQ ID NO: 1122666 - DNA, 15 bp, Homo sapiens
tccttctagtttttc

SEQ ID NO: 1122667 - DNA, 15 bp, Homo sapiens
ttccttctagttttt

SEQ ID NO: 1122668 - DNA, 15 bp, Homo sapiens
cttccttctagtttt

SEQ ID NO: 1122669 - DNA, 15 bp, Homo sapiens
ccttccttctagttt

SEQ ID NO: 1122670 - DNA, 15 bp, Homo sapiens
tccttccttctagtt

SEQ ID NO: 1122671 - DNA, 15 bp, Homo sapiens
atccttccttctagt

SEQ ID NO: 1122672 - DNA, 15 bp, Homo sapiens
tatccttccttctag

SEQ ID NO: 1122673 - DNA, 15 bp, Homo sapiens
ttatccttccttcta

SEQ ID NO: 1122674 - DNA, 15 bp, Homo sapiens
tttatccttccttct

SEQ ID NO: 1122675 - DNA, 15 bp, Homo sapiens
gtttatccttccttc

SEQ ID NO: 1122676 - DNA, 15 bp, Homo sapiens
tgtttatccttcctt

SEQ ID NO: 1122677 - DNA, 15 bp, Homo sapiens
ttgtttatccttcct

SEQ ID NO: 1122678 - DNA, 15 bp, Homo sapiens
tttgtttatccttcc

SEQ ID NO: 1122679 - DNA, 15 bp, Homo sapiens
ttttgtttatccttc

SEQ ID NO: 1122680 - DNA, 15 bp, Homo sapiens
cttttgtttatcctt

SEQ ID NO: 1122681 - DNA, 15 bp, Homo sapiens
gcttttgtttatcct

SEQ ID NO: 1122682 - DNA, 15 bp, Homo sapiens
agcttttgtttatcc

SEQ ID NO: 1122683 - DNA, 15 bp, Homo sapiens
tagcttttgtttatc

SEQ ID NO: 1122684 - DNA, 15 bp, Homo sapiens
atagcttttgtttat

SEQ ID NO: 1122685 - DNA, 15 bp, Homo sapiens
catagcttttgttta

SEQ ID NO: 1122686 - DNA, 15 bp, Homo sapiens
ccatagcttttgttt

SEQ ID NO: 1122687 - DNA, 15 bp, Homo sapiens
cccatagcttttgtt

SEQ ID NO: 1122688 - DNA, 15 bp, Homo sapiens
tcccatagcttttgt

SEQ ID NO: 1122689 - DNA, 15 bp, Homo sapiens
ctcccatagcttttg

SEQ ID NO: 1122690 - DNA, 15 bp, Homo sapiens
tctcccatagctttt

SEQ ID NO: 1122691 - DNA, 15 bp, Homo sapiens
ttctcccatagcttt

SEQ ID NO: 1122692 - DNA, 15 bp, Homo sapiens
attctcccatagctt

SEQ ID NO: 1122693 - DNA, 15 bp, Homo sapiens
tattctcccatagct

SEQ ID NO: 1122694 - DNA, 15 bp, Homo sapiens
ttattctcccatagc

SEQ ID NO: 1122695 - DNA, 15 bp, Homo sapiens
tttattctcccatag

SEQ ID NO: 1122696 - DNA, 15 bp, Homo sapiens
ttttattctcccata

SEQ ID NO: 1122697 - DNA, 15 bp, Homo sapiens
attttattctcccat

SEQ ID NO: 1122698 - DNA, 15 bp, Homo sapiens
gattttattctccca

SEQ ID NO: 1122699 - DNA, 15 bp, Homo sapiens
tgattttattctccc

SEQ ID NO: 1122700 - DNA, 15 bp, Homo sapiens
ctgattttattctcc

SEQ ID NO: 1122701 - DNA, 15 bp, Homo sapiens
gctgattttattctc

SEQ ID NO: 1122702 - DNA, 15 bp, Homo sapiens
tgctgattttattct

SEQ ID NO: 1122703 - DNA, 15 bp, Homo sapiens
atgctgattttattc

SEQ ID NO: 1122704 - DNA, 15 bp, Homo sapiens
aatgctgattttatt

SEQ ID NO: 1122705 - DNA, 15 bp, Homo sapiens
aaatgctgattttat

SEQ ID NO: 1122706 - DNA, 15 bp, Homo sapiens
caaatgctgatttta

SEQ ID NO: 1122707 - DNA, 15 bp, Homo sapiens
tcaaatgctgatttt

SEQ ID NO: 1122708 - DNA, 15 bp, Homo sapiens
atcaaatgctgattt

SEQ ID NO: 1122709 - DNA, 15 bp, Homo sapiens
tatcaaatgctgatt

SEQ ID NO: 1122710 - DNA, 15 bp, Homo sapiens
ctatcaaatgctgat

SEQ ID NO: 1122711 - DNA, 15 bp, Homo sapiens
tctatcaaatgctga

SEQ ID NO: 1122712 - DNA, 15 bp, Homo sapiens
ctctatcaaatgctg

SEQ ID NO: 1122713 - DNA, 15 bp, Homo sapiens
cctctatcaaatgct

SEQ ID NO: 1122714 - DNA, 15 bp, Homo sapiens
gcctctatcaaatgc

SEQ ID NO: 1122715 - DNA, 15 bp, Homo sapiens
tgcctctatcaaatg

SEQ ID NO: 1122716 - DNA, 15 bp, Homo sapiens
ttgcctctatcaaat

SEQ ID NO: 1122717 - DNA, 15 bp, Homo sapiens
cttgcctctatcaaa

SEQ ID NO: 1122718 - DNA, 15 bp, Homo sapiens
acttgcctctatcaa

SEQ ID NO: 1122719 - DNA, 15 bp, Homo sapiens
tacttgcctctatca

SEQ ID NO: 1122720 - DNA, 15 bp, Homo sapiens
gtacttgcctctatc

SEQ ID NO: 1122721 - DNA, 15 bp, Homo sapiens
ggtacttgcctctat

SEQ ID NO: 1122722 - DNA, 15 bp, Homo sapiens
ttggtacttgcctct

SEQ ID NO: 1122723 - DNA, 15 bp, Homo sapiens
tttggtacttgcctc

SEQ ID NO: 1122724 - DNA, 15 bp, Homo sapiens
ctttggtacttgcct

SEQ ID NO: 1122725 - DNA, 15 bp, Homo sapiens
cctttggtacttgcc

SEQ ID NO: 1122726 - DNA, 15 bp, Homo sapiens
acctttggtacttgc

SEQ ID NO: 1122727 - DNA, 15 bp, Homo sapiens
cacctttggtacttg

SEQ ID NO: 1122728 - DNA, 15 bp, Homo sapiens
tcacctttggtactt

SEQ ID NO: 1122729 - DNA, 15 bp, Homo sapiens
atcacctttggtact

SEQ ID NO: 1122730 - DNA, 15 bp, Homo sapiens
catcacctttggtac

SEQ ID NO: 1122731 - DNA, 15 bp, Homo sapiens
ccatcacctttggta

SEQ ID NO: 1122732 - DNA, 15 bp, Homo sapiens
tccatcacctttggt

SEQ ID NO: 1122733 - DNA, 15 bp, Homo sapiens
ttccatcacctttgg

SEQ ID NO: 1122734 - DNA, 15 bp, Homo sapiens
attccatcacctttg

SEQ ID NO: 1122735 - DNA, 15 bp, Homo sapiens
cattccatcaccttt

SEQ ID NO: 1122736 - DNA, 15 bp, Homo sapiens
gcattccatcacctt

SEQ ID NO: 1122737 - DNA, 15 bp, Homo sapiens
tgcattccatcacct

SEQ ID NO: 1122738 - DNA, 15 bp, Homo sapiens
ctgcattccatcacc

SEQ ID NO: 1122739 - DNA, 15 bp, Homo sapiens
cctgcattccatcac

SEQ ID NO: 1122740 - DNA, 15 bp, Homo sapiens
ccctgcattccatca

SEQ ID NO: 1122741 - DNA, 15 bp, Homo sapiens
gccctgcattccatc

SEQ ID NO: 1122742 - DNA, 15 bp, Homo sapiens
tgccctgcattccat

SEQ ID NO: 1122743 - DNA, 15 bp, Homo sapiens
gtgccctgcattcca

SEQ ID NO: 1122744 - DNA, 15 bp, Homo sapiens
tgtgccctgcattcc

SEQ ID NO: 1122745 - DNA, 15 bp, Homo sapiens
ctgtgccctgcattc

SEQ ID NO: 1122746 - DNA, 15 bp, Homo sapiens
tctgtgccctgcatt

SEQ ID NO: 1122747 - DNA, 15 bp, Homo sapiens
atctgtgccctgcat

SEQ ID NO: 1122748 - DNA, 15 bp, Homo sapiens
catctgtgccctgca

SEQ ID NO: 1122749 - DNA, 15 bp, Homo sapiens
ccatctgtgccctgc

SEQ ID NO: 1122750 - DNA, 15 bp, Homo sapiens
tccatctgtgccctg

SEQ ID NO: 1122751 - DNA, 15 bp, Homo sapiens
atccatctgtgccct

SEQ ID NO: 1122752 - DNA, 15 bp, Homo sapiens
gatccatctgtgccc

SEQ ID NO: 1122753 - DNA, 15 bp, Homo sapiens
agatccatctgtgcc

SEQ ID NO: 1122754 - DNA, 15 bp, Homo sapiens
cagatccatctgtgc

SEQ ID NO: 1122755 - DNA, 15 bp, Homo sapiens
gcagatccatctgtg

SEQ ID NO: 1122756 - DNA, 15 bp, Homo sapiens
agcagatccatctgt

SEQ ID NO: 1122757 - DNA, 15 bp, Homo sapiens
cagcagatccatctg

SEQ ID NO: 1122758 - DNA, 15 bp, Homo sapiens
ccagcagatccatct

SEQ ID NO: 1122759 - DNA, 15 bp, Homo sapiens
gccagcagatccatc

SEQ ID NO: 1122760 - DNA, 15 bp, Homo sapiens
ggccagcagatccat

SEQ ID NO: 1122761 - DNA, 15 bp, Homo sapiens
tggccagcagatcca

SEQ ID NO: 1122762 - DNA, 15 bp, Homo sapiens
ctggccagcagatcc

SEQ ID NO: 1122763 - DNA, 15 bp, Homo sapiens
tctggccagcagatc

SEQ ID NO: 1122764 - DNA, 15 bp, Homo sapiens
ctctggccagcagat

SEQ ID NO: 1122765 - DNA, 15 bp, Homo sapiens
tctctggccagcaga

SEQ ID NO: 1122766 - DNA, 15 bp, Homo sapiens
ttctctggccagcag

SEQ ID NO: 1122767 - DNA, 15 bp, Homo sapiens
cttctctggccagca

SEQ ID NO: 1122768 - DNA, 15 bp, Homo sapiens
ccttctctggccagc

SEQ ID NO: 1122769 - DNA, 15 bp, Homo sapiens
cccttctctggccag

SEQ ID NO: 1122770 - DNA, 15 bp, Homo sapiens
tcccttctctggcca

SEQ ID NO: 1122771 - DNA, 15 bp, Homo sapiens
gtcccttctctggcc

SEQ ID NO: 1122772 - DNA, 15 bp, Homo sapiens
tgtcccttctctggc

SEQ ID NO: 1122773 - DNA, 15 bp, Homo sapiens
gtgtcccttctctgg

SEQ ID NO: 1122774 - DNA, 15 bp, Homo sapiens
ggtgtcccttctctg

SEQ ID NO: 1122775 - DNA, 15 bp, Homo sapiens
aggtgtcccttctct

SEQ ID NO: 1122776 - DNA, 15 bp, Homo sapiens
gaggtgtcccttctc

SEQ ID NO: 1122777 - DNA, 15 bp, Homo sapiens
tgaggtgtcccttct

SEQ ID NO: 1122778 - DNA, 15 bp, Homo sapiens
gtgaggtgtcccttc

SEQ ID NO: 1122779 - DNA, 15 bp, Homo sapiens
ggtgaggtgtccctt

SEQ ID NO: 1122780 - DNA, 15 bp, Homo sapiens
gggtgaggtgtccct

SEQ ID NO: 1122781 - DNA, 15 bp, Homo sapiens
ggggtgaggtgtccc

SEQ ID NO: 1122782 - DNA, 15 bp, Homo sapiens
aggggtgaggtgtcc

SEQ ID NO: 1122783 - DNA, 15 bp, Homo sapiens
taggggtgaggtgtc

SEQ ID NO: 1122784 - DNA, 15 bp, Homo sapiens
ctaggggtgaggtgt

SEQ ID NO: 1122785 - DNA, 15 bp, Homo sapiens
cctaggggtgaggtg

SEQ ID NO: 1122786 - DNA, 15 bp, Homo sapiens
gcctaggggtgaggt

SEQ ID NO: 1122787 - DNA, 15 bp, Homo sapiens
ggcctaggggtgagg

SEQ ID NO: 1122788 - DNA, 15 bp, Homo sapiens
aggcctaggggtgag

SEQ ID NO: 1122789 - DNA, 15 bp, Homo sapiens
caggcctaggggtga

SEQ ID NO: 1122790 - DNA, 15 bp, Homo sapiens
ccaggcctaggggtg

SEQ ID NO: 1122791 - DNA, 15 bp, Homo sapiens
tccaggcctaggggt

SEQ ID NO: 1122792 - DNA, 15 bp, Homo sapiens
ctccaggcctagggg

SEQ ID NO: 1122793 - DNA, 15 bp, Homo sapiens
cctccaggcctaggg

SEQ ID NO: 1122794 - DNA, 15 bp, Homo sapiens
tcctccaggcctagg

SEQ ID NO: 1122795 - DNA, 15 bp, Homo sapiens
ttcctccaggcctag

SEQ ID NO: 1122796 - DNA, 15 bp, Homo sapiens
tttcctccaggccta

SEQ ID NO: 1122797 - DNA, 15 bp, Homo sapiens
ctttcctccaggcct

SEQ ID NO: 1122798 - DNA, 15 bp, Homo sapiens
gctttcctccaggcc

SEQ ID NO: 1122799 - DNA, 15 bp, Homo sapiens
cgctttcctccaggc

SEQ ID NO: 1122800 - DNA, 15 bp, Homo sapiens
ccgctttcctccagg

SEQ ID NO: 1122801 - DNA, 15 bp, Homo sapiens
cccgctttcctccag

SEQ ID NO: 1122802 - DNA, 15 bp, Homo sapiens
ccccgctttcctcca

SEQ ID NO: 1122803 - DNA, 15 bp, Homo sapiens
tccccgctttcctcc

SEQ ID NO: 1122804 - DNA, 15 bp, Homo sapiens
ttccccgctttcctc

SEQ ID NO: 1122805 - DNA, 15 bp, Homo sapiens
cttccccgctttcct

SEQ ID NO: 1122806 - DNA, 15 bp, Homo sapiens
tcttccccgctttcc

SEQ ID NO: 1122807 - DNA, 15 bp, Homo sapiens
ttcttccccgctttc

SEQ ID NO: 1122808 - DNA, 15 bp, Homo sapiens
cttcttccccgcttt

SEQ ID NO: 1122809 - DNA, 15 bp, Homo sapiens
gcttcttccccgctt

SEQ ID NO: 1122810 - DNA, 15 bp, Homo sapiens
tgcttcttccccgct

SEQ ID NO: 1122811 - DNA, 15 bp, Homo sapiens
ctgcttcttccccgc

SEQ ID NO: 1122812 - DNA, 15 bp, Homo sapiens
actgcttcttccccg

SEQ ID NO: 1122813 - DNA, 15 bp, Homo sapiens
cactgcttcttcccc

SEQ ID NO: 1122814 - DNA, 15 bp, Homo sapiens
acactgcttcttccc

SEQ ID NO: 1122815 - DNA, 15 bp, Homo sapiens
tacactgcttcttcc

SEQ ID NO: 1122816 - DNA, 15 bp, Homo sapiens
ctacactgcttcttc

SEQ ID NO: 1122817 - DNA, 15 bp, Homo sapiens
tctacactgcttctt

SEQ ID NO: 1122818 - DNA, 15 bp, Homo sapiens
atctacactgcttct

SEQ ID NO: 1122819 - DNA, 15 bp, Homo sapiens
catctacactgcttc

SEQ ID NO: 1122820 - DNA, 15 bp, Homo sapiens
acatctacactgctt

SEQ ID NO: 1122821 - DNA, 15 bp, Homo sapiens
cacatctacactgct

SEQ ID NO: 1122822 - DNA, 15 bp, Homo sapiens
ccacatctacactgc

SEQ ID NO: 1122823 - DNA, 15 bp, Homo sapiens
tccacatctacactg

SEQ ID NO: 1122824 - DNA, 15 bp, Homo sapiens
atccacatctacact

SEQ ID NO: 1122825 - DNA, 15 bp, Homo sapiens
catccacatctacac

SEQ ID NO: 1122826 - DNA, 15 bp, Homo sapiens
ccatccacatctaca

SEQ ID NO: 1122827 - DNA, 15 bp, Homo sapiens
tccatccacatctac

SEQ ID NO: 1122828 - DNA, 15 bp, Homo sapiens
ttccatccacatcta

SEQ ID NO: 1122829 - DNA, 15 bp, Homo sapiens
tttccatccacatct

SEQ ID NO: 1122830 - DNA, 15 bp, Homo sapiens
ctttccatccacatc

SEQ ID NO: 1122831 - DNA, 15 bp, Homo sapiens
tctttccatccacat

SEQ ID NO: 1122832 - DNA, 15 bp, Homo sapiens
ttctttccatccaca

SEQ ID NO: 1122833 - DNA, 15 bp, Homo sapiens
tttctttccatccac

SEQ ID NO: 1122834 - DNA, 15 bp, Homo sapiens
atttctttccatcca

SEQ ID NO: 1122835 - DNA, 15 bp, Homo sapiens
catttctttccatcc

SEQ ID NO: 1122836 - DNA, 15 bp, Homo sapiens
ccatttctttccatc

SEQ ID NO: 1122837 - DNA, 15 bp, Homo sapiens
tccatttctttccat

SEQ ID NO: 1122838 - DNA, 15 bp, Homo sapiens
atccatttctttcca

SEQ ID NO: 1122839 - DNA, 15 bp, Homo sapiens
catccatttctttcc

SEQ ID NO: 1122840 - DNA, 15 bp, Homo sapiens
acatccatttctttc

SEQ ID NO: 1122841 - DNA, 15 bp, Homo sapiens
cacatccatttcttt

SEQ ID NO: 1122842 - DNA, 15 bp, Homo sapiens
ccacatccatttctt

SEQ ID NO: 1122843 - DNA, 15 bp, Homo sapiens
accacatccatttct

SEQ ID NO: 1122844 - DNA, 15 bp, Homo sapiens
aaccacatccatttc

SEQ ID NO: 1122845 - DNA, 15 bp, Homo sapiens
gaaccacatccattt

SEQ ID NO: 1122846 - DNA, 15 bp, Homo sapiens
tgaaccacatccatt

SEQ ID NO: 1122847 - DNA, 15 bp, Homo sapiens
gtgaaccacatccat

SEQ ID NO: 1122848 - DNA, 15 bp, Homo sapiens
tgtgaaccacatcca

SEQ ID NO: 1122849 - DNA, 15 bp, Homo sapiens
gtgtgaaccacatcc

SEQ ID NO: 1122850 - DNA, 15 bp, Homo sapiens
agtgtgaaccacatc

SEQ ID NO: 1122851 - DNA, 15 bp, Homo sapiens
aagtgtgaaccacat

SEQ ID NO: 1122852 - DNA, 15 bp, Homo sapiens
caagtgtgaaccaca

SEQ ID NO: 1122853 - DNA, 15 bp, Homo sapiens
tcaagtgtgaaccac

SEQ ID NO: 1122854 - DNA, 15 bp, Homo sapiens
ttcaagtgtgaacca

SEQ ID NO: 1122855 - DNA, 15 bp, Homo sapiens
attcaagtgtgaacc

SEQ ID NO: 1122856 - DNA, 15 bp, Homo sapiens
gattcaagtgtgaac

SEQ ID NO: 1122857 - DNA, 15 bp, Homo sapiens
ggattcaagtgtgaa

SEQ ID NO: 1122858 - DNA, 15 bp, Homo sapiens
aggattcaagtgtga

SEQ ID NO: 1122859 - DNA, 15 bp, Homo sapiens
aaggattcaagtgtg

SEQ ID NO: 1122860 - DNA, 15 bp, Homo sapiens
gaaggattcaagtgt

SEQ ID NO: 1122861 - DNA, 15 bp, Homo sapiens
tgaaggattcaagtg

SEQ ID NO: 1122862 - DNA, 15 bp, Homo sapiens
ttgaaggattcaagt

SEQ ID NO: 1122863 - DNA, 15 bp, Homo sapiens
attgaaggattcaag

SEQ ID NO: 1122864 - DNA, 15 bp, Homo sapiens
gattgaaggattcaa

SEQ ID NO: 1122865 - DNA, 15 bp, Homo sapiens
agattgaaggattca

SEQ ID NO: 1122866 - DNA, 15 bp, Homo sapiens
gagattgaaggattc

SEQ ID NO: 1122867 - DNA, 15 bp, Homo sapiens
agagattgaaggatt

SEQ ID NO: 1122868 - DNA, 15 bp, Homo sapiens
aagagattgaaggat

SEQ ID NO: 1122869 - DNA, 15 bp, Homo sapiens
gaagagattgaagga

SEQ ID NO: 1122870 - DNA, 15 bp, Homo sapiens
tgaagagattgaagg

SEQ ID NO: 1122871 - DNA, 15 bp, Homo sapiens
atgaagagattgaag

SEQ ID NO: 1122872 - DNA, 15 bp, Homo sapiens
tatgaagagattgaa

SEQ ID NO: 1122873 - DNA, 15 bp, Homo sapiens
ttatgaagagattga

SEQ ID NO: 1122874 - DNA, 15 bp, Homo sapiens
tttatgaagagattg

SEQ ID NO: 1122875 - DNA, 15 bp, Homo sapiens
gtttatgaagagatt

SEQ ID NO: 1122876 - DNA, 15 bp, Homo sapiens
agtttatgaagagat

SEQ ID NO: 1122877 - DNA, 15 bp, Homo sapiens
tagtttatgaagaga

SEQ ID NO: 1122878 - DNA, 15 bp, Homo sapiens
ttagtttatgaagag

SEQ ID NO: 1122879 - DNA, 15 bp, Homo sapiens
attagtttatgaaga

SEQ ID NO: 1122880 - DNA, 15 bp, Homo sapiens
cattagtttatgaag

SEQ ID NO: 1122881 - DNA, 15 bp, Homo sapiens
ccattagtttatgaa

SEQ ID NO: 1122882 - DNA, 15 bp, Homo sapiens
cccattagtttatga

SEQ ID NO: 1122883 - DNA, 15 bp, Homo sapiens
acccattagtttatg

SEQ ID NO: 1122884 - DNA, 15 bp, Homo sapiens
aacccattagtttat

SEQ ID NO: 1122885 - DNA, 15 bp, Homo sapiens
caacccattagttta

SEQ ID NO: 1122886 - DNA, 15 bp, Homo sapiens
tcaacccattagttt

SEQ ID NO: 1122887 - DNA, 15 bp, Homo sapiens
ctcaacccattagtt

SEQ ID NO: 1122888 - DNA, 15 bp, Homo sapiens
actcaacccattagt

SEQ ID NO: 1122889 - DNA, 15 bp, Homo sapiens
gactcaacccattag

SEQ ID NO: 1122890 - DNA, 15 bp, Homo sapiens
agactcaacccatta

SEQ ID NO: 1122891 - DNA, 15 bp, Homo sapiens
tagactcaacccatt

SEQ ID NO: 1122892 - DNA, 15 bp, Homo sapiens
atagactcaacccat

SEQ ID NO: 1122893 - DNA, 15 bp, Homo sapiens
aatagactcaaccca

SEQ ID NO: 1122894 - DNA, 15 bp, Homo sapiens
aaatagactcaaccc

SEQ ID NO: 1122895 - DNA, 15 bp, Homo sapiens
aaaatagactcaacc

SEQ ID NO: 1122896 - DNA, 15 bp, Homo sapiens
aaaaatagactcaac

SEQ ID NO: 1122897 - DNA, 15 bp, Homo sapiens
gaaaaatagactcaa

SEQ ID NO: 1122898 - DNA, 15 bp, Homo sapiens
agaaaaatagactca

SEQ ID NO: 1122899 - DNA, 15 bp, Homo sapiens
tagaaaaatagactc

SEQ ID NO: 1122900 - DNA, 15 bp, Homo sapiens
gtagaaaaatagact

SEQ ID NO: 1122901 - DNA, 15 bp, Homo sapiens
tgtagaaaaatagac

SEQ ID NO: 1122902 - DNA, 15 bp, Homo sapiens
ctgtagaaaaataga

SEQ ID NO: 1122903 - DNA, 15 bp, Homo sapiens
actgtagaaaaatag

SEQ ID NO: 1122904 - DNA, 15 bp, Homo sapiens
cactgtagaaaaata

SEQ ID NO: 1122905 - DNA, 15 bp, Homo sapiens
tcactgtagaaaaat

SEQ ID NO: 1122906 - DNA, 15 bp, Homo sapiens
ctcactgtagaaaaa

SEQ ID NO: 1122907 - DNA, 15 bp, Homo sapiens
cctcactgtagaaaa

SEQ ID NO: 1122908 - DNA, 15 bp, Homo sapiens
tcctcactgtagaaa

SEQ ID NO: 1122909 - DNA, 15 bp, Homo sapiens
atcctcactgtagaa

SEQ ID NO: 1122910 - DNA, 15 bp, Homo sapiens
catcctcactgtaga

SEQ ID NO: 1122911 - DNA, 15 bp, Homo sapiens
ccatcctcactgtag

SEQ ID NO: 1122912 - DNA, 15 bp, Homo sapiens
accatcctcactgta

SEQ ID NO: 1122913 - DNA, 15 bp, Homo sapiens
caccatcctcactgt

SEQ ID NO: 1122914 - DNA, 15 bp, Homo sapiens
ccaccatcctcactg

SEQ ID NO: 1122915 - DNA, 15 bp, Homo sapiens
tccaccatcctcact

SEQ ID NO: 1122916 - DNA, 15 bp, Homo sapiens
ctccaccatcctcac

SEQ ID NO: 1122917 - DNA, 15 bp, Homo sapiens
cctccaccatcctca

SEQ ID NO: 1122918 - DNA, 15 bp, Homo sapiens
acctccaccatcctc

SEQ ID NO: 1122919 - DNA, 15 bp, Homo sapiens
aacctccaccatcct

SEQ ID NO: 1122920 - DNA, 15 bp, Homo sapiens
caacctccaccatcc

SEQ ID NO: 1122921 - DNA, 15 bp, Homo sapiens
tcaacctccaccatc

SEQ ID NO: 1122922 - DNA, 15 bp, Homo sapiens
ttcaacctccaccat

SEQ ID NO: 1122923 - DNA, 15 bp, Homo sapiens
attcaacctccacca

SEQ ID NO: 1122924 - DNA, 15 bp, Homo sapiens
cattcaacctccacc

SEQ ID NO: 1122925 - DNA, 15 bp, Homo sapiens
ccattcaacctccac

SEQ ID NO: 1122926 - DNA, 15 bp, Homo sapiens
cccattcaacctcca

SEQ ID NO: 1122927 - DNA, 15 bp, Homo sapiens
ccccattcaacctcc

SEQ ID NO: 1122928 - DNA, 15 bp, Homo sapiens
tccccattcaacctc

SEQ ID NO: 1122929 - DNA, 15 bp, Homo sapiens
atccccattcaacct

SEQ ID NO: 1122930 - DNA, 15 bp, Homo sapiens
catccccattcaacc

SEQ ID NO: 1122931 - DNA, 15 bp, Homo sapiens
gcatccccattcaac

SEQ ID NO: 1122932 - DNA, 15 bp, Homo sapiens
tgcatccccattcaa

SEQ ID NO: 1122933 - DNA, 15 bp, Homo sapiens
atgcatccccattca

SEQ ID NO: 1122934 - DNA, 15 bp, Homo sapiens
catgcatccccattc

SEQ ID NO: 1122935 - DNA, 15 bp, Homo sapiens
acatgcatccccatt

SEQ ID NO: 1122936 - DNA, 15 bp, Homo sapiens
aacatgcatccccat

SEQ ID NO: 1122937 - DNA, 15 bp, Homo sapiens
aaacatgcatcccca

SEQ ID NO: 1122938 - DNA, 15 bp, Homo sapiens
taaacatgcatcccc

SEQ ID NO: 1122939 - DNA, 15 bp, Homo sapiens
gtaaacatgcatccc

SEQ ID NO: 1122940 - DNA, 15 bp, Homo sapiens
tgtaaacatgcatcc

SEQ ID NO: 1122941 - DNA, 15 bp, Homo sapiens
atgtaaacatgcatc

SEQ ID NO: 1122942 - DNA, 15 bp, Homo sapiens
aatgtaaacatgcat

SEQ ID NO: 1122943 - DNA, 15 bp, Homo sapiens
taatgtaaacatgca

SEQ ID NO: 1122944 - DNA, 15 bp, Homo sapiens
gtaatgtaaacatgc

SEQ ID NO: 1122945 - DNA, 15 bp, Homo sapiens
agtaatgtaaacatg

SEQ ID NO: 1122946 - DNA, 15 bp, Homo sapiens
aagtaatgtaaacat

SEQ ID NO: 1122947 - DNA, 15 bp, Homo sapiens
aaagtaatgtaaaca

SEQ ID NO: 1122948 - DNA, 15 bp, Homo sapiens
aaaagtaatgtaaac

SEQ ID NO: 1122949 - DNA, 15 bp, Homo sapiens
aaaaagtaatgtaaa

SEQ ID NO: 1122950 - DNA, 15 bp, Homo sapiens
taaaaagtaatgtaa

SEQ ID NO: 1122951 - DNA, 15 bp, Homo sapiens
ttaaaaagtaatgta

SEQ ID NO: 1122952 - DNA, 15 bp, Homo sapiens
tttaaaaagtaatgt

SEQ ID NO: 1122953 - DNA, 15 bp, Homo sapiens
ttttaaaaagtaatg

SEQ ID NO: 1122954 - DNA, 15 bp, Homo sapiens
tttttaaaaagtaat

SEQ ID NO: 1122955 - DNA, 15 bp, Homo sapiens
ctttttaaaaagtaa

SEQ ID NO: 1122956 - DNA, 15 bp, Homo sapiens
actttttaaaaagta

SEQ ID NO: 1122957 - DNA, 15 bp, Homo sapiens
gactttttaaaaagt

SEQ ID NO: 1122958 - DNA, 15 bp, Homo sapiens
agactttttaaaaag

SEQ ID NO: 1122959 - DNA, 15 bp, Homo sapiens
aagactttttaaaaa

SEQ ID NO: 1122960 - DNA, 15 bp, Homo sapiens
gaagactttttaaaa

SEQ ID NO: 1122961 - DNA, 15 bp, Homo sapiens
tgaagactttttaaa

SEQ ID NO: 1122962 - DNA, 15 bp, Homo sapiens
gtgaagactttttaa

SEQ ID NO: 1122963 - DNA, 15 bp, Homo sapiens
tgtgaagacttttta

SEQ ID NO: 1122964 - DNA, 15 bp, Homo sapiens
atgtgaagacttttt

SEQ ID NO: 1122965 - DNA, 15 bp, Homo sapiens
gatgtgaagactttt

SEQ ID NO: 1122966 - DNA, 15 bp, Homo sapiens
agatgtgaagacttt

SEQ ID NO: 1122967 - DNA, 15 bp, Homo sapiens
cagatgtgaagactt

SEQ ID NO: 1122968 - DNA, 15 bp, Homo sapiens
acagatgtgaagact

SEQ ID NO: 1122969 - DNA, 15 bp, Homo sapiens
tacagatgtgaagac

SEQ ID NO: 1122970 - DNA, 15 bp, Homo sapiens
ttacagatgtgaaga

SEQ ID NO: 1122971 - DNA, 15 bp, Homo sapiens
attacagatgtgaag

SEQ ID NO: 1122972 - DNA, 15 bp, Homo sapiens
cattacagatgtgaa

SEQ ID NO: 1122973 - DNA, 15 bp, Homo sapiens
gcattacagatgtga

SEQ ID NO: 1122974 - DNA, 15 bp, Homo sapiens
ggcattacagatgtg

SEQ ID NO: 1122975 - DNA, 15 bp, Homo sapiens
tggcattacagatgt

SEQ ID NO: 1122976 - DNA, 15 bp, Homo sapiens
ctggcattacagatg

SEQ ID NO: 1122977 - DNA, 15 bp, Homo sapiens
gctggcattacagat

SEQ ID NO: 1122978 - DNA, 15 bp, Homo sapiens
tgctggcattacaga

SEQ ID NO: 1122979 - DNA, 15 bp, Homo sapiens
cccaagctggtcttg

SEQ ID NO: 1122980 - DNA, 15 bp, Homo sapiens
gcccaagctggtctt

SEQ ID NO: 1122981 - DNA, 15 bp, Homo sapiens
atctcactgtgttgc

SEQ ID NO: 1122982 - DNA, 15 bp, Homo sapiens
aatctcactgtgttg

SEQ ID NO: 1122983 - DNA, 15 bp, Homo sapiens
gaatctcactgtgtt

SEQ ID NO: 1122984 - DNA, 15 bp, Homo sapiens
ggaatctcactgtgt

SEQ ID NO: 1122985 - DNA, 15 bp, Homo sapiens
cggaatctcactgtg

SEQ ID NO: 1122986 - DNA, 15 bp, Homo sapiens
acggaatctcactgt

SEQ ID NO: 1122987 - DNA, 15 bp, Homo sapiens
gacggaatctcactg

SEQ ID NO: 1122988 - DNA, 15 bp, Homo sapiens
agacggaatctcact

SEQ ID NO: 1122989 - DNA, 15 bp, Homo sapiens
gagacggaatctcac

SEQ ID NO: 1122990 - DNA, 15 bp, Homo sapiens
agagacggaatctca

SEQ ID NO: 1122991 - DNA, 15 bp, Homo sapiens
tagagacggaatctc

SEQ ID NO: 1122992 - DNA, 15 bp, Homo sapiens
atagagacggaatct

SEQ ID NO: 1122993 - DNA, 15 bp, Homo sapiens
tatagagacggaatc

SEQ ID NO: 1122994 - DNA, 15 bp, Homo sapiens
ttatagagacggaat

SEQ ID NO: 1122995 - DNA, 15 bp, Homo sapiens
attatagagacggaa

SEQ ID NO: 1122996 - DNA, 15 bp, Homo sapiens
aattatagagacgga

SEQ ID NO: 1122997 - DNA, 15 bp, Homo sapiens
aaattatagagacgg

SEQ ID NO: 1122998 - DNA, 15 bp, Homo sapiens
aaaattatagagacg

SEQ ID NO: 1122999 - DNA, 15 bp, Homo sapiens
aaaaattatagagac

SEQ ID NO: 1123000 - DNA, 15 bp, Homo sapiens
aaaaaattatagaga

SEQ ID NO: 1123001 - DNA, 15 bp, Homo sapiens
aaaaaaattatagag

SEQ ID NO: 1123002 - DNA, 15 bp, Homo sapiens
aaaaaaaattataga

SEQ ID NO: 1123003 - DNA, 15 bp, Homo sapiens
aaaaaaaaattatag

SEQ ID NO: 1123004 - DNA, 15 bp, Homo sapiens
aaaaaaaaaattata

SEQ ID NO: 1123005 - DNA, 15 bp, Homo sapiens
caaaaaaaaaaatta

SEQ ID NO: 1123006 - DNA, 15 bp, Homo sapiens
tcaaaaaaaaaaatt

SEQ ID NO: 1123007 - DNA, 15 bp, Homo sapiens
ctcaaaaaaaaaaat

SEQ ID NO: 1123008 - DNA, 15 bp, Homo sapiens
ttccgtctcaaaaaa

SEQ ID NO: 1123009 - DNA, 15 bp, Homo sapiens
attccgtctcaaaaa

SEQ ID NO: 1123010 - DNA, 15 bp, Homo sapiens
aattccgtctcaaaa

SEQ ID NO: 1123011 - DNA, 15 bp, Homo sapiens
aaattccgtctcaaa

SEQ ID NO: 1123012 - DNA, 15 bp, Homo sapiens
gaaattccgtctcaa

SEQ ID NO: 1123013 - DNA, 15 bp, Homo sapiens
ggaaattccgtctca

SEQ ID NO: 1123014 - DNA, 15 bp, Homo sapiens
gggaaattccgtctc

SEQ ID NO: 1123015 - DNA, 15 bp, Homo sapiens
agggaaattccgtct

SEQ ID NO: 1123016 - DNA, 15 bp, Homo sapiens
gagggaaattccgtc

SEQ ID NO: 1123017 - DNA, 15 bp, Homo sapiens
agagggaaattccgt

SEQ ID NO: 1123018 - DNA, 15 bp, Homo sapiens
aagagggaaattccg

SEQ ID NO: 1123019 - DNA, 15 bp, Homo sapiens
caagagggaaattcc

SEQ ID NO: 1123020 - DNA, 15 bp, Homo sapiens
acaagagggaaattc

SEQ ID NO: 1123021 - DNA, 15 bp, Homo sapiens
aacaagagggaaatt

SEQ ID NO: 1123022 - DNA, 15 bp, Homo sapiens
caacaagagggaaat

SEQ ID NO: 1123023 - DNA, 15 bp, Homo sapiens
gcaacaagagggaaa

SEQ ID NO: 1123024 - DNA, 15 bp, Homo sapiens
ggcaacaagagggaa

SEQ ID NO: 1123025 - DNA, 15 bp, Homo sapiens
gggcaacaagaggga

SEQ ID NO: 1123026 - DNA, 15 bp, Homo sapiens
tgggcaacaagaggg

SEQ ID NO: 1123027 - DNA, 15 bp, Homo sapiens
ctgggcaacaagagg

SEQ ID NO: 1123028 - DNA, 15 bp, Homo sapiens
gattgcaccattgca

SEQ ID NO: 1123029 - DNA, 15 bp, Homo sapiens
agattgcaccattgc

SEQ ID NO: 1123030 - DNA, 15 bp, Homo sapiens
tgcttgaacccggga

SEQ ID NO: 1123031 - DNA, 15 bp, Homo sapiens
ttgcttgaacccggg

SEQ ID NO: 1123032 - DNA, 15 bp, Homo sapiens
attgcttgaacccgg

SEQ ID NO: 1123033 - DNA, 15 bp, Homo sapiens
atggcacatgcctgt

SEQ ID NO: 1123034 - DNA, 15 bp, Homo sapiens
gatggcacatgcctg

SEQ ID NO: 1123035 - DNA, 15 bp, Homo sapiens
gtgatggcacatgcc

SEQ ID NO: 1123036 - DNA, 15 bp, Homo sapiens
cgtgatggcacatgc

SEQ ID NO: 1123037 - DNA, 15 bp, Homo sapiens
gcgtgatggcacatg

SEQ ID NO: 1123038 - DNA, 15 bp, Homo sapiens
ggcgtgatggcacat

SEQ ID NO: 1123039 - DNA, 15 bp, Homo sapiens
gggcgtgatggcaca

SEQ ID NO: 1123040 - DNA, 15 bp, Homo sapiens
cgggcgtgatggcac

SEQ ID NO: 1123041 - DNA, 15 bp, Homo sapiens
ccgggcgtgatggca

SEQ ID NO: 1123042 - DNA, 15 bp, Homo sapiens
gccgggcgtgatggc

SEQ ID NO: 1123043 - DNA, 15 bp, Homo sapiens
agccgggcgtgatgg

SEQ ID NO: 1123044 - DNA, 15 bp, Homo sapiens
tagccgggcgtgatg

SEQ ID NO: 1123045 - DNA, 15 bp, Homo sapiens
ttagccgggcgtgat

SEQ ID NO: 1123046 - DNA, 15 bp, Homo sapiens
attagccgggcgtga

SEQ ID NO: 1123047 - DNA, 15 bp, Homo sapiens
gcatggagaaaccct

SEQ ID NO: 1123048 - DNA, 15 bp, Homo sapiens
agcatggagaaaccc

SEQ ID NO: 1123049 - DNA, 15 bp, Homo sapiens
aagcatggagaaacc

SEQ ID NO: 1123050 - DNA, 15 bp, Homo sapiens
caagcatggagaaac

SEQ ID NO: 1123051 - DNA, 15 bp, Homo sapiens
ccaagcatggagaaa

SEQ ID NO: 1123052 - DNA, 15 bp, Homo sapiens
gccaagcatggagaa

SEQ ID NO: 1123053 - DNA, 15 bp, Homo sapiens
ggccaagcatggaga

SEQ ID NO: 1123054 - DNA, 15 bp, Homo sapiens
aggccaagcatggag

SEQ ID NO: 1123055 - DNA, 15 bp, Homo sapiens
gaggccaagcatgga

SEQ ID NO: 1123056 - DNA, 15 bp, Homo sapiens
ggaggccaagcatgg

SEQ ID NO: 1123057 - DNA, 15 bp, Homo sapiens
gggaggccaagcatg

SEQ ID NO: 1123058 - DNA, 15 bp, Homo sapiens
tgggaggccaagcat

SEQ ID NO: 1123059 - DNA, 15 bp, Homo sapiens
ttgggaggccaagca

SEQ ID NO: 1123060 - DNA, 15 bp, Homo sapiens
tttgggaggccaagc

SEQ ID NO: 1123061 - DNA, 15 bp, Homo sapiens
gggccaggtgcagtg

SEQ ID NO: 1123062 - DNA, 15 bp, Homo sapiens
agggccaggtgcagt

SEQ ID NO: 1123063 - DNA, 15 bp, Homo sapiens
gagggccaggtgcag

SEQ ID NO: 1123064 - DNA, 15 bp, Homo sapiens
agagggccaggtgca

SEQ ID NO: 1123065 - DNA, 15 bp, Homo sapiens
tagagggccaggtgc

SEQ ID NO: 1123066 - DNA, 15 bp, Homo sapiens
atagagggccaggtg

SEQ ID NO: 1123067 - DNA, 15 bp, Homo sapiens
tatagagggccaggt

SEQ ID NO: 1123068 - DNA, 15 bp, Homo sapiens
ttatagagggccagg

SEQ ID NO: 1123069 - DNA, 15 bp, Homo sapiens
tttatagagggccag

SEQ ID NO: 1123070 - DNA, 15 bp, Homo sapiens
ttttatagagggcca

SEQ ID NO: 1123071 - DNA, 15 bp, Homo sapiens
attttatagagggcc

SEQ ID NO: 1123072 - DNA, 15 bp, Homo sapiens
aattttatagagggc

SEQ ID NO: 1123073 - DNA, 15 bp, Homo sapiens
aaattttatagaggg

SEQ ID NO: 1123074 - DNA, 15 bp, Homo sapiens
aaaattttatagagg

SEQ ID NO: 1123075 - DNA, 15 bp, Homo sapiens
aaaaattttatagag

SEQ ID NO: 1123076 - DNA, 15 bp, Homo sapiens
aaaaaattttataga

SEQ ID NO: 1123077 - DNA, 15 bp, Homo sapiens
aaaaaaattttatag

SEQ ID NO: 1123078 - DNA, 15 bp, Homo sapiens
taaaaaaattttata

SEQ ID NO: 1123079 - DNA, 15 bp, Homo sapiens
attttttaaaaaaat

SEQ ID NO: 1123080 - DNA, 15 bp, Homo sapiens
aattttttaaaaaaa

SEQ ID NO: 1123081 - DNA, 15 bp, Homo sapiens
taattttttaaaaaa

SEQ ID NO: 1123082 - DNA, 15 bp, Homo sapiens
ctaattttttaaaaa

SEQ ID NO: 1123083 - DNA, 15 bp, Homo sapiens
cgtgtgccaccatgc

SEQ ID NO: 1123084 - DNA, 15 bp, Homo sapiens
gcgtgtgccaccatg

SEQ ID NO: 1123085 - DNA, 15 bp, Homo sapiens
ggcgtgtgccaccat

SEQ ID NO: 1123086 - DNA, 15 bp, Homo sapiens
ctataggcgtgtgcc

SEQ ID NO: 1123087 - DNA, 15 bp, Homo sapiens
actataggcgtgtgc

SEQ ID NO: 1123088 - DNA, 15 bp, Homo sapiens
aactataggcgtgtg

SEQ ID NO: 1123089 - DNA, 15 bp, Homo sapiens
aaactataggcgtgt

SEQ ID NO: 1123090 - DNA, 15 bp, Homo sapiens
gaaactataggcgtg

SEQ ID NO: 1123091 - DNA, 15 bp, Homo sapiens
tgaaactataggcgt

SEQ ID NO: 1123092 - DNA, 15 bp, Homo sapiens
ctgaaactataggcg

SEQ ID NO: 1123093 - DNA, 15 bp, Homo sapiens
gctgaaactataggc

SEQ ID NO: 1123094 - DNA, 15 bp, Homo sapiens
ggctgaaactatagg

SEQ ID NO: 1123095 - DNA, 15 bp, Homo sapiens
tggctgaaactatag

SEQ ID NO: 1123096 - DNA, 15 bp, Homo sapiens
gtggctgaaactata

SEQ ID NO: 1123097 - DNA, 15 bp, Homo sapiens
agtggctgaaactat

SEQ ID NO: 1123098 - DNA, 15 bp, Homo sapiens
gagtggctgaaacta

SEQ ID NO: 1123099 - DNA, 15 bp, Homo sapiens
tgagtggctgaaact

SEQ ID NO: 1123100 - DNA, 15 bp, Homo sapiens
ctgagtggctgaaac

SEQ ID NO: 1123101 - DNA, 15 bp, Homo sapiens
cctgagtggctgaaa

SEQ ID NO: 1123102 - DNA, 15 bp, Homo sapiens
tcctgagtggctgaa

SEQ ID NO: 1123103 - DNA, 15 bp, Homo sapiens
ctcctgagtggctga

SEQ ID NO: 1123104 - DNA, 15 bp, Homo sapiens
cctcctgagtggctg

SEQ ID NO: 1123105 - DNA, 15 bp, Homo sapiens
gcctcctgagtggct

SEQ ID NO: 1123106 - DNA, 15 bp, Homo sapiens
agcctcctgagtggc

SEQ ID NO: 1123107 - DNA, 15 bp, Homo sapiens
cagcctcctgagtgg

SEQ ID NO: 1123108 - DNA, 15 bp, Homo sapiens
tcagcctcctgagtg

SEQ ID NO: 1123109 - DNA, 15 bp, Homo sapiens
gcctcccacctcagc

SEQ ID NO: 1123110 - DNA, 15 bp, Homo sapiens
tgcctcccacctcag

SEQ ID NO: 1123111 - DNA, 15 bp, Homo sapiens
gtgcctcccacctca

SEQ ID NO: 1123112 - DNA, 15 bp, Homo sapiens
ggtgcctcccacctc

SEQ ID NO: 1123113 - DNA, 15 bp, Homo sapiens
aggtgcctcccacct

SEQ ID NO: 1123114 - DNA, 15 bp, Homo sapiens
caggtgcctcccacc

SEQ ID NO: 1123115 - DNA, 15 bp, Homo sapiens
tcaggtgcctcccac

SEQ ID NO: 1123116 - DNA, 15 bp, Homo sapiens
ctcaggtgcctccca

SEQ ID NO: 1123117 - DNA, 15 bp, Homo sapiens
gctcaggtgcctccc

SEQ ID NO: 1123118 - DNA, 15 bp, Homo sapiens
ggctcaggtgcctcc

SEQ ID NO: 1123119 - DNA, 15 bp, Homo sapiens
gggctcaggtgcctc

SEQ ID NO: 1123120 - DNA, 15 bp, Homo sapiens
tgggctcaggtgcct

SEQ ID NO: 1123121 - DNA, 15 bp, Homo sapiens
ctgggctcaggtgcc

SEQ ID NO: 1123122 - DNA, 15 bp, Homo sapiens
cctgggctcaggtgc

SEQ ID NO: 1123123 - DNA, 15 bp, Homo sapiens
tcctgggctcaggtg

SEQ ID NO: 1123124 - DNA, 15 bp, Homo sapiens
ttcctgggctcaggt

SEQ ID NO: 1123125 - DNA, 15 bp, Homo sapiens
cttcctgggctcagg

SEQ ID NO: 1123126 - DNA, 15 bp, Homo sapiens
acttcctgggctcag

SEQ ID NO: 1123127 - DNA, 15 bp, Homo sapiens
gacttcctgggctca

SEQ ID NO: 1123128 - DNA, 15 bp, Homo sapiens
cgacttcctgggctc

SEQ ID NO: 1123129 - DNA, 15 bp, Homo sapiens
tcgacttcctgggct

SEQ ID NO: 1123130 - DNA, 15 bp, Homo sapiens
ctcgacttcctgggc

SEQ ID NO: 1123131 - DNA, 15 bp, Homo sapiens
cctcgacttcctggg

SEQ ID NO: 1123132 - DNA, 15 bp, Homo sapiens
gcctcgacttcctgg

SEQ ID NO: 1123133 - DNA, 15 bp, Homo sapiens
agcctcgacttcctg

SEQ ID NO: 1123134 - DNA, 15 bp, Homo sapiens
cagcctcgacttcct

SEQ ID NO: 1123135 - DNA, 15 bp, Homo sapiens
acagtggcacaatca

SEQ ID NO: 1123136 - DNA, 15 bp, Homo sapiens
tacagtggcacaatc

SEQ ID NO: 1123137 - DNA, 15 bp, Homo sapiens
gtacagtggcacaat

SEQ ID NO: 1123138 - DNA, 15 bp, Homo sapiens
agtacagtggcacaa

SEQ ID NO: 1123139 - DNA, 15 bp, Homo sapiens
gagtacagtggcaca

SEQ ID NO: 1123140 - DNA, 15 bp, Homo sapiens
ggtcttgctctgtcg

SEQ ID NO: 1123141 - DNA, 15 bp, Homo sapiens
tggtcttgctctgtc

SEQ ID NO: 1123142 - DNA, 15 bp, Homo sapiens
atggtcttgctctgt

SEQ ID NO: 1123143 - DNA, 15 bp, Homo sapiens
catggtcttgctctg

SEQ ID NO: 1123144 - DNA, 15 bp, Homo sapiens
acatggtcttgctct

SEQ ID NO: 1123145 - DNA, 15 bp, Homo sapiens
gacatggtcttgctc

SEQ ID NO: 1123146 - DNA, 15 bp, Homo sapiens
agacatggtcttgct

SEQ ID NO: 1123147 - DNA, 15 bp, Homo sapiens
aagacatggtcttgc

SEQ ID NO: 1123148 - DNA, 15 bp, Homo sapiens
caagacatggtcttg

SEQ ID NO: 1123149 - DNA, 15 bp, Homo sapiens
tcaagacatggtctt

SEQ ID NO: 1123150 - DNA, 15 bp, Homo sapiens
ttcaagacatggtct

SEQ ID NO: 1123151 - DNA, 15 bp, Homo sapiens
tttcaagacatggtc

SEQ ID NO: 1123152 - DNA, 15 bp, Homo sapiens
ctttcaagacatggt

SEQ ID NO: 1123153 - DNA, 15 bp, Homo sapiens
tctttcaagacatgg

SEQ ID NO: 1123154 - DNA, 15 bp, Homo sapiens
ttctttcaagacatg

SEQ ID NO: 1123155 - DNA, 15 bp, Homo sapiens
tttctttcaagacat

SEQ ID NO: 1123156 - DNA, 15 bp, Homo sapiens
ttttctttcaagaca

SEQ ID NO: 1123157 - DNA, 15 bp, Homo sapiens
tttttctttcaagac

SEQ ID NO: 1123158 - DNA, 15 bp, Homo sapiens
ctttttctttcaaga

SEQ ID NO: 1123159 - DNA, 15 bp, Homo sapiens
cctttttctttcaag

SEQ ID NO: 1123160 - DNA, 15 bp, Homo sapiens
ccctttttctttcaa

SEQ ID NO: 1123161 - DNA, 15 bp, Homo sapiens
cccctttttctttca

SEQ ID NO: 1123162 - DNA, 15 bp, Homo sapiens
tcccctttttctttc

SEQ ID NO: 1123163 - DNA, 15 bp, Homo sapiens
ctcccctttttcttt

SEQ ID NO: 1123164 - DNA, 15 bp, Homo sapiens
tctcccctttttctt

SEQ ID NO: 1123165 - DNA, 15 bp, Homo sapiens
ctctcccctttttct

SEQ ID NO: 1123166 - DNA, 15 bp, Homo sapiens
tctctcccctttttc

SEQ ID NO: 1123167 - DNA, 15 bp, Homo sapiens
ctctctccccttttt

SEQ ID NO: 1123168 - DNA, 15 bp, Homo sapiens
tctctctcccctttt

SEQ ID NO: 1123169 - DNA, 15 bp, Homo sapiens
ctctctctccccttt

SEQ ID NO: 1123170 - DNA, 15 bp, Homo sapiens
tctctctctcccctt

SEQ ID NO: 1123171 - DNA, 15 bp, Homo sapiens
ctctctctctcccct

SEQ ID NO: 1123172 - DNA, 15 bp, Homo sapiens
tctctctctctcccc

SEQ ID NO: 1123173 - DNA, 15 bp, Homo sapiens
cttctctctctctct

SEQ ID NO: 1123174 - DNA, 15 bp, Homo sapiens
tcttctctctctctc

SEQ ID NO: 1123175 - DNA, 15 bp, Homo sapiens
ctcttctctctctct

SEQ ID NO: 1123176 - DNA, 15 bp, Homo sapiens
cctcttctctctctc

SEQ ID NO: 1123177 - DNA, 15 bp, Homo sapiens
ccctcttctctctct

SEQ ID NO: 1123178 - DNA, 15 bp, Homo sapiens
cccctcttctctctc

SEQ ID NO: 1123179 - DNA, 15 bp, Homo sapiens
tccccctcttctctc

SEQ ID NO: 1123180 - DNA, 15 bp, Homo sapiens
ctccccctcttctct

SEQ ID NO: 1123181 - DNA, 15 bp, Homo sapiens
cctccccctcttctc

SEQ ID NO: 1123182 - DNA, 15 bp, Homo sapiens
ccctccccctcttct

SEQ ID NO: 1123183 - DNA, 15 bp, Homo sapiens
tccctccccctcttc

SEQ ID NO: 1123184 - DNA, 15 bp, Homo sapiens
ctccctccccctctt

SEQ ID NO: 1123185 - DNA, 15 bp, Homo sapiens
cctccctccccctct

SEQ ID NO: 1123186 - DNA, 15 bp, Homo sapiens
cctccctccctcccc

SEQ ID NO: 1123187 - DNA, 15 bp, Homo sapiens
tcctccctccctccc

SEQ ID NO: 1123188 - DNA, 15 bp, Homo sapiens
ttcctccctccctcc

SEQ ID NO: 1123189 - DNA, 15 bp, Homo sapiens
cttcctccctccctc

SEQ ID NO: 1123190 - DNA, 15 bp, Homo sapiens
tcttcctccctccct

SEQ ID NO: 1123191 - DNA, 15 bp, Homo sapiens
ctcttcctccctccc

SEQ ID NO: 1123192 - DNA, 15 bp, Homo sapiens
cctcttcctccctcc

SEQ ID NO: 1123193 - DNA, 15 bp, Homo sapiens
tcctcttcctccctc

SEQ ID NO: 1123194 - DNA, 15 bp, Homo sapiens
ttcctcttcctccct

SEQ ID NO: 1123195 - DNA, 15 bp, Homo sapiens
tttcctcttcctccc

SEQ ID NO: 1123196 - DNA, 15 bp, Homo sapiens
ttttcctcttcctcc

SEQ ID NO: 1123197 - DNA, 15 bp, Homo sapiens
tttttcctcttcctc

SEQ ID NO: 1123198 - DNA, 15 bp, Homo sapiens
ctttttcctcttcct

SEQ ID NO: 1123199 - DNA, 15 bp, Homo sapiens
cctttttcctcttcc

SEQ ID NO: 1123200 - DNA, 15 bp, Homo sapiens
ccctttttcctcttc

SEQ ID NO: 1123201 - DNA, 15 bp, Homo sapiens
tccctttttcctctt

SEQ ID NO: 1123202 - DNA, 15 bp, Homo sapiens
ctccctttttcctct

SEQ ID NO: 1123203 - DNA, 15 bp, Homo sapiens
cctccctttttcctc

SEQ ID NO: 1123204 - DNA, 15 bp, Homo sapiens
ccctccctttttcct

SEQ ID NO: 1123205 - DNA, 15 bp, Homo sapiens
tccctccctttttcc

SEQ ID NO: 1123206 - DNA, 15 bp, Homo sapiens
ctccctccctttttc

SEQ ID NO: 1123207 - DNA, 15 bp, Homo sapiens
tctccctcccttttt

SEQ ID NO: 1123208 - DNA, 15 bp, Homo sapiens
ctctccctccctttt

SEQ ID NO: 1123209 - DNA, 15 bp, Homo sapiens
tctctccctcccttt

SEQ ID NO: 1123210 - DNA, 15 bp, Homo sapiens
ctctctccctccctt

SEQ ID NO: 1123211 - DNA, 15 bp, Homo sapiens
cctctctccctccct

SEQ ID NO: 1123212 - DNA, 15 bp, Homo sapiens
ccctctctccctccc

SEQ ID NO: 1123213 - DNA, 15 bp, Homo sapiens
tccctctctccctcc

SEQ ID NO: 1123214 - DNA, 15 bp, Homo sapiens
ttccctctctccctc

SEQ ID NO: 1123215 - DNA, 15 bp, Homo sapiens
ttcttccctctctcc

SEQ ID NO: 1123216 - DNA, 15 bp, Homo sapiens
tttcttccctctctc

SEQ ID NO: 1123217 - DNA, 15 bp, Homo sapiens
ctttcttccctctct

SEQ ID NO: 1123218 - DNA, 15 bp, Homo sapiens
cctttcttccctctc

SEQ ID NO: 1123219 - DNA, 15 bp, Homo sapiens
tcctttcttccctct

SEQ ID NO: 1123220 - DNA, 15 bp, Homo sapiens
ttcctttcttccctc

SEQ ID NO: 1123221 - DNA, 15 bp, Homo sapiens
tttcctttcttccct

SEQ ID NO: 1123222 - DNA, 15 bp, Homo sapiens
ctttcctttcttccc

SEQ ID NO: 1123223 - DNA, 15 bp, Homo sapiens
ctctttcctttcttc

SEQ ID NO: 1123224 - DNA, 15 bp, Homo sapiens
cctctttcctttctt

SEQ ID NO: 1123225 - DNA, 15 bp, Homo sapiens
ccctctttcctttct

SEQ ID NO: 1123226 - DNA, 15 bp, Homo sapiens
tccctctttcctttc

SEQ ID NO: 1123227 - DNA, 15 bp, Homo sapiens
ctccctctttccttt

SEQ ID NO: 1123228 - DNA, 15 bp, Homo sapiens
cctccctctttcctt

SEQ ID NO: 1123229 - DNA, 15 bp, Homo sapiens
ccctccctctttcct

SEQ ID NO: 1123230 - DNA, 15 bp, Homo sapiens
tccctccctctttcc

SEQ ID NO: 1123231 - DNA, 15 bp, Homo sapiens
ctccctccctctttc

SEQ ID NO: 1123232 - DNA, 15 bp, Homo sapiens
cctccctccctcttt

SEQ ID NO: 1123233 - DNA, 15 bp, Homo sapiens
ccctccctccctctt

SEQ ID NO: 1123234 - DNA, 15 bp, Homo sapiens
tccctccctccctct

SEQ ID NO: 1123235 - DNA, 15 bp, Homo sapiens
tttcctccctccctc

SEQ ID NO: 1123236 - DNA, 15 bp, Homo sapiens
ctttcctccctccct

SEQ ID NO: 1123237 - DNA, 15 bp, Homo sapiens
tctttcctccctccc

SEQ ID NO: 1123238 - DNA, 15 bp, Homo sapiens
ttctttcctccctcc

SEQ ID NO: 1123239 - DNA, 15 bp, Homo sapiens
cttctttcctccctc

SEQ ID NO: 1123240 - DNA, 15 bp, Homo sapiens
ccttctttcctccct

SEQ ID NO: 1123241 - DNA, 15 bp, Homo sapiens
tccttctttcctccc

SEQ ID NO: 1123242 - DNA, 15 bp, Homo sapiens
ttccttctttcctcc

SEQ ID NO: 1123243 - DNA, 15 bp, Homo sapiens
cttccttctttcctc

SEQ ID NO: 1123244 - DNA, 15 bp, Homo sapiens
gccttccttccttcc

SEQ ID NO: 1123245 - DNA, 15 bp, Homo sapiens
tgccttccttccttc

SEQ ID NO: 1123246 - DNA, 15 bp, Homo sapiens
ttgccttccttcctt

SEQ ID NO: 1123247 - DNA, 15 bp, Homo sapiens
cttgccttccttcct

SEQ ID NO: 1123248 - DNA, 15 bp, Homo sapiens
tcttgccttccttcc

SEQ ID NO: 1123249 - DNA, 15 bp, Homo sapiens
ttcttgccttccttc

SEQ ID NO: 1123250 - DNA, 15 bp, Homo sapiens
ccttcttgccttcct

SEQ ID NO: 1123251 - DNA, 15 bp, Homo sapiens
cccttcttgccttcc

SEQ ID NO: 1123252 - DNA, 15 bp, Homo sapiens
tcccttcttgccttc

SEQ ID NO: 1123253 - DNA, 15 bp, Homo sapiens
ctcccttcttgcctt

SEQ ID NO: 1123254 - DNA, 15 bp, Homo sapiens
cctcccttcttgcct

SEQ ID NO: 1123255 - DNA, 15 bp, Homo sapiens
ccctcccttcttgcc

SEQ ID NO: 1123256 - DNA, 15 bp, Homo sapiens
tccctcccttcttgc

SEQ ID NO: 1123257 - DNA, 15 bp, Homo sapiens
ctccctcccttcttg

SEQ ID NO: 1123258 - DNA, 15 bp, Homo sapiens
cctccctcccttctt

SEQ ID NO: 1123259 - DNA, 15 bp, Homo sapiens
ccctccctcccttct

SEQ ID NO: 1123260 - DNA, 15 bp, Homo sapiens
ttccctccctccctc

SEQ ID NO: 1123261 - DNA, 15 bp, Homo sapiens
cttccctccctccct

SEQ ID NO: 1123262 - DNA, 15 bp, Homo sapiens
ccttccctccctccc

SEQ ID NO: 1123263 - DNA, 15 bp, Homo sapiens
accttccctccctcc

SEQ ID NO: 1123264 - DNA, 15 bp, Homo sapiens
gaccttccctccctc

SEQ ID NO: 1123265 - DNA, 15 bp, Homo sapiens
tgaccttccctccct

SEQ ID NO: 1123266 - DNA, 15 bp, Homo sapiens
atgaccttccctccc

SEQ ID NO: 1123267 - DNA, 15 bp, Homo sapiens
catgaccttccctcc

SEQ ID NO: 1123268 - DNA, 15 bp, Homo sapiens
ccatgaccttccctc

SEQ ID NO: 1123269 - DNA, 15 bp, Homo sapiens
accatgaccttccct

SEQ ID NO: 1123270 - DNA, 15 bp, Homo sapiens
aaccatgaccttccc

SEQ ID NO: 1123271 - DNA, 15 bp, Homo sapiens
aaaccatgaccttcc

SEQ ID NO: 1123272 - DNA, 15 bp, Homo sapiens
caaaccatgaccttc

SEQ ID NO: 1123273 - DNA, 15 bp, Homo sapiens
ccaaaccatgacctt

SEQ ID NO: 1123274 - DNA, 15 bp, Homo sapiens
accaaaccatgacct

SEQ ID NO: 1123275 - DNA, 15 bp, Homo sapiens
gaccaaaccatgacc

SEQ ID NO: 1123276 - DNA, 15 bp, Homo sapiens
ggaccaaaccatgac

SEQ ID NO: 1123277 - DNA, 15 bp, Homo sapiens
tggaccaaaccatga

SEQ ID NO: 1123278 - DNA, 15 bp, Homo sapiens
ctggaccaaaccatg

SEQ ID NO: 1123279 - DNA, 15 bp, Homo sapiens
cctggaccaaaccat

SEQ ID NO: 1123280 - DNA, 15 bp, Homo sapiens
gcctggaccaaacca

SEQ ID NO: 1123281 - DNA, 15 bp, Homo sapiens
tgcctggaccaaacc

SEQ ID NO: 1123282 - DNA, 15 bp, Homo sapiens
atgcctggaccaaac

SEQ ID NO: 1123283 - DNA, 15 bp, Homo sapiens
catgcctggaccaaa

SEQ ID NO: 1123284 - DNA, 15 bp, Homo sapiens
ccatgcctggaccaa

SEQ ID NO: 1123285 - DNA, 15 bp, Homo sapiens
accatgcctggacca

SEQ ID NO: 1123286 - DNA, 15 bp, Homo sapiens
caccatgcctggacc

SEQ ID NO: 1123287 - DNA, 15 bp, Homo sapiens
tcaccatgcctggac

SEQ ID NO: 1123288 - DNA, 15 bp, Homo sapiens
atcaccatgcctgga

SEQ ID NO: 1123289 - DNA, 15 bp, Homo sapiens
aatcaccatgcctgg

SEQ ID NO: 1123290 - DNA, 15 bp, Homo sapiens
gaatcaccatgcctg

SEQ ID NO: 1123291 - DNA, 15 bp, Homo sapiens
tgaatcaccatgcct

SEQ ID NO: 1123292 - DNA, 15 bp, Homo sapiens
gtgaatcaccatgcc

SEQ ID NO: 1123293 - DNA, 15 bp, Homo sapiens
tgtgaatcaccatgc

SEQ ID NO: 1123294 - DNA, 15 bp, Homo sapiens
gtgtgaatcaccatg

SEQ ID NO: 1123295 - DNA, 15 bp, Homo sapiens
ggtgtgaatcaccat

SEQ ID NO: 1123296 - DNA, 15 bp, Homo sapiens
aggtgtgaatcacca

SEQ ID NO: 1123297 - DNA, 15 bp, Homo sapiens
caggtgtgaatcacc

SEQ ID NO: 1123298 - DNA, 15 bp, Homo sapiens
ccaggtgtgaatcac

SEQ ID NO: 1123299 - DNA, 15 bp, Homo sapiens
accaggtgtgaatca

SEQ ID NO: 1123300 - DNA, 15 bp, Homo sapiens
taccaggtgtgaatc

SEQ ID NO: 1123301 - DNA, 15 bp, Homo sapiens
ttaccaggtgtgaat

SEQ ID NO: 1123302 - DNA, 15 bp, Homo sapiens
attaccaggtgtgaa

SEQ ID NO: 1123303 - DNA, 15 bp, Homo sapiens
gattaccaggtgtga

SEQ ID NO: 1123304 - DNA, 15 bp, Homo sapiens
ggattaccaggtgtg

SEQ ID NO: 1123305 - DNA, 15 bp, Homo sapiens
gggattaccaggtgt

SEQ ID NO: 1123306 - DNA, 15 bp, Homo sapiens
tgggattaccaggtg

SEQ ID NO: 1123307 - DNA, 15 bp, Homo sapiens
ttgggattaccaggt

SEQ ID NO: 1123308 - DNA, 15 bp, Homo sapiens
gttgggattaccagg

SEQ ID NO: 1123309 - DNA, 15 bp, Homo sapiens
tgttgggattaccag

SEQ ID NO: 1123310 - DNA, 15 bp, Homo sapiens
gtgttgggattacca

SEQ ID NO: 1123311 - DNA, 15 bp, Homo sapiens
tgtgttgggattacc

SEQ ID NO: 1123312 - DNA, 15 bp, Homo sapiens
gtgtgttgggattac

SEQ ID NO: 1123313 - DNA, 15 bp, Homo sapiens
agtgtgttgggatta

SEQ ID NO: 1123314 - DNA, 15 bp, Homo sapiens
cagtgtgttgggatt

SEQ ID NO: 1123315 - DNA, 15 bp, Homo sapiens
ccagtgtgttgggat

SEQ ID NO: 1123316 - DNA, 15 bp, Homo sapiens
cccagtgtgttggga

SEQ ID NO: 1123317 - DNA, 15 bp, Homo sapiens
tcccagtgtgttggg

SEQ ID NO: 1123318 - DNA, 15 bp, Homo sapiens
ctcccagtgtgttgg

SEQ ID NO: 1123319 - DNA, 15 bp, Homo sapiens
cctcccagtgtgttg

SEQ ID NO: 1123320 - DNA, 15 bp, Homo sapiens
gcctcccagtgtgtt

SEQ ID NO: 1123321 - DNA, 15 bp, Homo sapiens
ggcctcccagtgtgt

SEQ ID NO: 1123322 - DNA, 15 bp, Homo sapiens
tggcctcccagtgtg

SEQ ID NO: 1123323 - DNA, 15 bp, Homo sapiens
ggatcctcccacctt

SEQ ID NO: 1123324 - DNA, 15 bp, Homo sapiens
tggatcctcccacct

SEQ ID NO: 1123325 - DNA, 15 bp, Homo sapiens
atggatcctcccacc

SEQ ID NO: 1123326 - DNA, 15 bp, Homo sapiens
aatggatcctcccac

SEQ ID NO: 1123327 - DNA, 15 bp, Homo sapiens
caatggatcctccca

SEQ ID NO: 1123328 - DNA, 15 bp, Homo sapiens
tcaatggatcctccc

SEQ ID NO: 1123329 - DNA, 15 bp, Homo sapiens
ctcaatggatcctcc

SEQ ID NO: 1123330 - DNA, 15 bp, Homo sapiens
cctcaatggatcctc

SEQ ID NO: 1123331 - DNA, 15 bp, Homo sapiens
gcctcaatggatcct

SEQ ID NO: 1123332 - DNA, 15 bp, Homo sapiens
ggcctcaatggatcc

SEQ ID NO: 1123333 - DNA, 15 bp, Homo sapiens
tggcctcaatggatc

SEQ ID NO: 1123334 - DNA, 15 bp, Homo sapiens
ctggcctcaatggat

SEQ ID NO: 1123335 - DNA, 15 bp, Homo sapiens
cctggcctcaatgga

SEQ ID NO: 1123336 - DNA, 15 bp, Homo sapiens
tcctggcctcaatgg

SEQ ID NO: 1123337 - DNA, 15 bp, Homo sapiens
ctcctggcctcaatg

SEQ ID NO: 1123338 - DNA, 15 bp, Homo sapiens
actcctggcctcaat

SEQ ID NO: 1123339 - DNA, 15 bp, Homo sapiens
tactcctggcctcaa

SEQ ID NO: 1123340 - DNA, 15 bp, Homo sapiens
gtactcctggcctca

SEQ ID NO: 1123341 - DNA, 15 bp, Homo sapiens
tgtactcctggcctc

SEQ ID NO: 1123342 - DNA, 15 bp, Homo sapiens
ttgtactcctggcct

SEQ ID NO: 1123343 - DNA, 15 bp, Homo sapiens
cttgtactcctggcc

SEQ ID NO: 1123344 - DNA, 15 bp, Homo sapiens
tcttgtactcctggc

SEQ ID NO: 1123345 - DNA, 15 bp, Homo sapiens
gtcttgtactcctgg

SEQ ID NO: 1123346 - DNA, 15 bp, Homo sapiens
ggtcttgtactcctg

SEQ ID NO: 1123347 - DNA, 15 bp, Homo sapiens
tggtcttgtactcct

SEQ ID NO: 1123348 - DNA, 15 bp, Homo sapiens
ctggtcttgtactcc

SEQ ID NO: 1123349 - DNA, 15 bp, Homo sapiens
gctggtcttgtactc

SEQ ID NO: 1123350 - DNA, 15 bp, Homo sapiens
ggctggtcttgtact

SEQ ID NO: 1123351 - DNA, 15 bp, Homo sapiens
aggctggtcttgtac

SEQ ID NO: 1123352 - DNA, 15 bp, Homo sapiens
caggctggtcttgta

SEQ ID NO: 1123353 - DNA, 15 bp, Homo sapiens
ccaggctggtcttgt

SEQ ID NO: 1123354 - DNA, 15 bp, Homo sapiens
cagggtcttgctatg

SEQ ID NO: 1123355 - DNA, 15 bp, Homo sapiens
acagggtcttgctat

SEQ ID NO: 1123356 - DNA, 15 bp, Homo sapiens
gacagggtcttgcta

SEQ ID NO: 1123357 - DNA, 15 bp, Homo sapiens
tttttagagacaggg

SEQ ID NO: 1123358 - DNA, 15 bp, Homo sapiens
aatttttttttttag

SEQ ID NO: 1123359 - DNA, 15 bp, Homo sapiens
taattttttttttta

SEQ ID NO: 1123360 - DNA, 15 bp, Homo sapiens
ggctaattttttttt

SEQ ID NO: 1123361 - DNA, 15 bp, Homo sapiens
tagcctggctaattt

SEQ ID NO: 1123362 - DNA, 15 bp, Homo sapiens
ttagcctggctaatt

SEQ ID NO: 1123363 - DNA, 15 bp, Homo sapiens
cttagcctggctaat

SEQ ID NO: 1123364 - DNA, 15 bp, Homo sapiens
gcttagcctggctaa

SEQ ID NO: 1123365 - DNA, 15 bp, Homo sapiens
tgcttagcctggcta

SEQ ID NO: 1123366 - DNA, 15 bp, Homo sapiens
ctgcttagcctggct

SEQ ID NO: 1123367 - DNA, 15 bp, Homo sapiens
cctgcttagcctggc

SEQ ID NO: 1123368 - DNA, 15 bp, Homo sapiens
tcctgcttagcctgg

SEQ ID NO: 1123369 - DNA, 15 bp, Homo sapiens
atcctgcttagcctg

SEQ ID NO: 1123370 - DNA, 15 bp, Homo sapiens
gatcctgcttagcct

SEQ ID NO: 1123371 - DNA, 15 bp, Homo sapiens
tgatcctgcttagcc

SEQ ID NO: 1123372 - DNA, 15 bp, Homo sapiens
gtgatcctgcttagc

SEQ ID NO: 1123373 - DNA, 15 bp, Homo sapiens
agtgatcctgcttag

SEQ ID NO: 1123374 - DNA, 15 bp, Homo sapiens
aagtgatcctgctta

SEQ ID NO: 1123375 - DNA, 15 bp, Homo sapiens
caagtgatcctgctt

SEQ ID NO: 1123376 - DNA, 15 bp, Homo sapiens
tcaagtgatcctgct

SEQ ID NO: 1123377 - DNA, 15 bp, Homo sapiens
ctcaagtgatcctgc

SEQ ID NO: 1123378 - DNA, 15 bp, Homo sapiens
gctcaagtgatcctg

SEQ ID NO: 1123379 - DNA, 15 bp, Homo sapiens
atcctgggctcaagt

SEQ ID NO: 1123380 - DNA, 15 bp, Homo sapiens
catcctgggctcaag

SEQ ID NO: 1123381 - DNA, 15 bp, Homo sapiens
acatcctgggctcaa

SEQ ID NO: 1123382 - DNA, 15 bp, Homo sapiens
gacatcctgggctca

SEQ ID NO: 1123383 - DNA, 15 bp, Homo sapiens
tgacatcctgggctc

SEQ ID NO: 1123384 - DNA, 15 bp, Homo sapiens
ttgacatcctgggct

SEQ ID NO: 1123385 - DNA, 15 bp, Homo sapiens
cttgacatcctgggc

SEQ ID NO: 1123386 - DNA, 15 bp, Homo sapiens
ccttgacatcctggg

SEQ ID NO: 1123387 - DNA, 15 bp, Homo sapiens
gccttgacatcctgg

SEQ ID NO: 1123388 - DNA, 15 bp, Homo sapiens
agccttgacatcctg

SEQ ID NO: 1123389 - DNA, 15 bp, Homo sapiens
cagccttgacatcct

SEQ ID NO: 1123390 - DNA, 15 bp, Homo sapiens
gcagccttgacatcc

SEQ ID NO: 1123391 - DNA, 15 bp, Homo sapiens
tgcagccttgacatc

SEQ ID NO: 1123392 - DNA, 15 bp, Homo sapiens
ctgcagccttgacat

SEQ ID NO: 1123393 - DNA, 15 bp, Homo sapiens
actgcagccttgaca

SEQ ID NO: 1123394 - DNA, 15 bp, Homo sapiens
ttcactgcagccttg

SEQ ID NO: 1123395 - DNA, 15 bp, Homo sapiens
cttcactgcagcctt

SEQ ID NO: 1123396 - DNA, 15 bp, Homo sapiens
acttcactgcagcct

SEQ ID NO: 1123397 - DNA, 15 bp, Homo sapiens
cacttcactgcagcc

SEQ ID NO: 1123398 - DNA, 15 bp, Homo sapiens
tcacttcactgcagc

SEQ ID NO: 1123399 - DNA, 15 bp, Homo sapiens
ctcacttcactgcag

SEQ ID NO: 1123400 - DNA, 15 bp, Homo sapiens
gctcacttcactgca

SEQ ID NO: 1123401 - DNA, 15 bp, Homo sapiens
agctcacttcactgc

SEQ ID NO: 1123402 - DNA, 15 bp, Homo sapiens
tagctcacttcactg

SEQ ID NO: 1123403 - DNA, 15 bp, Homo sapiens
atagctcacttcact

SEQ ID NO: 1123404 - DNA, 15 bp, Homo sapiens
gatagctcacttcac

SEQ ID NO: 1123405 - DNA, 15 bp, Homo sapiens
tgatagctcacttca

SEQ ID NO: 1123406 - DNA, 15 bp, Homo sapiens
atgatagctcacttc

SEQ ID NO: 1123407 - DNA, 15 bp, Homo sapiens
aatgatagctcactt

SEQ ID NO: 1123408 - DNA, 15 bp, Homo sapiens
taatgatagctcact

SEQ ID NO: 1123409 - DNA, 15 bp, Homo sapiens
ataatgatagctcac

SEQ ID NO: 1123410 - DNA, 15 bp, Homo sapiens
cataatgatagctca

SEQ ID NO: 1123411 - DNA, 15 bp, Homo sapiens
gcataatgatagctc

SEQ ID NO: 1123412 - DNA, 15 bp, Homo sapiens
ggcataatgatagct

SEQ ID NO: 1123413 - DNA, 15 bp, Homo sapiens
gggcataatgatagc

SEQ ID NO: 1123414 - DNA, 15 bp, Homo sapiens
tgggcataatgatag

SEQ ID NO: 1123415 - DNA, 15 bp, Homo sapiens
gtgggcataatgata

SEQ ID NO: 1123416 - DNA, 15 bp, Homo sapiens
agtgggcataatgat

SEQ ID NO: 1123417 - DNA, 15 bp, Homo sapiens
cagtgggcataatga

SEQ ID NO: 1123418 - DNA, 15 bp, Homo sapiens
ccagtgggcataatg

SEQ ID NO: 1123419 - DNA, 15 bp, Homo sapiens
tccagtgggcataat

SEQ ID NO: 1123420 - DNA, 15 bp, Homo sapiens
gtccagtgggcataa

SEQ ID NO: 1123421 - DNA, 15 bp, Homo sapiens
agtccagtgggcata

SEQ ID NO: 1123422 - DNA, 15 bp, Homo sapiens
gagtccagtgggcat

SEQ ID NO: 1123423 - DNA, 15 bp, Homo sapiens
ggagtccagtgggca

SEQ ID NO: 1123424 - DNA, 15 bp, Homo sapiens
tggagtccagtgggc

SEQ ID NO: 1123425 - DNA, 15 bp, Homo sapiens
ctggagtccagtggg

SEQ ID NO: 1123426 - DNA, 15 bp, Homo sapiens
gctggagtccagtgg

SEQ ID NO: 1123427 - DNA, 15 bp, Homo sapiens
ggctggagtccagtg

SEQ ID NO: 1123428 - DNA, 15 bp, Homo sapiens
aggctggagtccagt

SEQ ID NO: 1123429 - DNA, 15 bp, Homo sapiens
taggctggagtccag

SEQ ID NO: 1123430 - DNA, 15 bp, Homo sapiens
ctaggctggagtcca

SEQ ID NO: 1123431 - DNA, 15 bp, Homo sapiens
cctaggctggagtcc

SEQ ID NO: 1123432 - DNA, 15 bp, Homo sapiens
acctaggctggagtc

SEQ ID NO: 1123433 - DNA, 15 bp, Homo sapiens
tacctaggctggagt

SEQ ID NO: 1123434 - DNA, 15 bp, Homo sapiens
ttacctaggctggag

SEQ ID NO: 1123435 - DNA, 15 bp, Homo sapiens
gttacctaggctgga

SEQ ID NO: 1123436 - DNA, 15 bp, Homo sapiens
ctgttacctaggctg

SEQ ID NO: 1123437 - DNA, 15 bp, Homo sapiens
tctgttacctaggct

SEQ ID NO: 1123438 - DNA, 15 bp, Homo sapiens
ctctgttacctaggc

SEQ ID NO: 1123439 - DNA, 15 bp, Homo sapiens
gctctgttacctagg

SEQ ID NO: 1123440 - DNA, 15 bp, Homo sapiens
tgctctgttacctag

SEQ ID NO: 1123441 - DNA, 15 bp, Homo sapiens
ttgctctgttaccta

SEQ ID NO: 1123442 - DNA, 15 bp, Homo sapiens
cttgctctgttacct

SEQ ID NO: 1123443 - DNA, 15 bp, Homo sapiens
gttttgagacagggt

SEQ ID NO: 1123444 - DNA, 15 bp, Homo sapiens
tgttttgagacaggg

SEQ ID NO: 1123445 - DNA, 15 bp, Homo sapiens
atgttttgagacagg

SEQ ID NO: 1123446 - DNA, 15 bp, Homo sapiens
aatgttttgagacag

SEQ ID NO: 1123447 - DNA, 15 bp, Homo sapiens
aaatgttttgagaca

SEQ ID NO: 1123448 - DNA, 15 bp, Homo sapiens
aaaatgttttgagac

SEQ ID NO: 1123449 - DNA, 15 bp, Homo sapiens
aaaaatgttttgaga

SEQ ID NO: 1123450 - DNA, 15 bp, Homo sapiens
caaaaatgttttgag

SEQ ID NO: 1123451 - DNA, 15 bp, Homo sapiens
gcaaaaatgttttga

SEQ ID NO: 1123452 - DNA, 15 bp, Homo sapiens
ggcaaaaatgttttg

SEQ ID NO: 1123453 - DNA, 15 bp, Homo sapiens
aggcaaaaatgtttt

SEQ ID NO: 1123454 - DNA, 15 bp, Homo sapiens
aaggcaaaaatgttt

SEQ ID NO: 1123455 - DNA, 15 bp, Homo sapiens
aaaggcaaaaatgtt

SEQ ID NO: 1123456 - DNA, 15 bp, Homo sapiens
aaaaggcaaaaatgt

SEQ ID NO: 1123457 - DNA, 15 bp, Homo sapiens
aaaaaggcaaaaatg

SEQ ID NO: 1123458 - DNA, 15 bp, Homo sapiens
aaaaaaggcaaaaat

SEQ ID NO: 1123459 - DNA, 15 bp, Homo sapiens
taaaaaaggcaaaaa

SEQ ID NO: 1123460 - DNA, 15 bp, Homo sapiens
ttaaaaaaggcaaaa

SEQ ID NO: 1123461 - DNA, 15 bp, Homo sapiens
gttaaaaaaggcaaa

SEQ ID NO: 1123462 - DNA, 15 bp, Homo sapiens
ggttaaaaaaggcaa

SEQ ID NO: 1123463 - DNA, 15 bp, Homo sapiens
aggttaaaaaaggca

SEQ ID NO: 1123464 - DNA, 15 bp, Homo sapiens
aaggttaaaaaaggc

SEQ ID NO: 1123465 - DNA, 15 bp, Homo sapiens
aaaggttaaaaaagg

SEQ ID NO: 1123466 - DNA, 15 bp, Homo sapiens
aaaaggttaaaaaag

SEQ ID NO: 1123467 - DNA, 15 bp, Homo sapiens
aaaaaggttaaaaaa

SEQ ID NO: 1123468 - DNA, 15 bp, Homo sapiens
aaaaaaggttaaaaa

SEQ ID NO: 1123469 - DNA, 15 bp, Homo sapiens
aaaaaaaggttaaaa

SEQ ID NO: 1123470 - DNA, 15 bp, Homo sapiens
aaaaaaaaggttaaa

SEQ ID NO: 1123471 - DNA, 15 bp, Homo sapiens
aaaaaaaaaaggtta

SEQ ID NO: 1123472 - DNA, 15 bp, Homo sapiens
gaaaaaaaaaaggtt

SEQ ID NO: 1123473 - DNA, 15 bp, Homo sapiens
ggaaaaaaaaaaggt

SEQ ID NO: 1123474 - DNA, 15 bp, Homo sapiens
aggaaaaaaaaaagg

SEQ ID NO: 1123475 - DNA, 15 bp, Homo sapiens
aaggaaaaaaaaaag

SEQ ID NO: 1123476 - DNA, 15 bp, Homo sapiens
tgaaggaaaaaaaaa

SEQ ID NO: 1123477 - DNA, 15 bp, Homo sapiens
ctgaaggaaaaaaaa

SEQ ID NO: 1123478 - DNA, 15 bp, Homo sapiens
cctgaaggaaaaaaa

SEQ ID NO: 1123479 - DNA, 15 bp, Homo sapiens
ccctgaaggaaaaaa

SEQ ID NO: 1123480 - DNA, 15 bp, Homo sapiens
tccctgaaggaaaaa

SEQ ID NO: 1123481 - DNA, 15 bp, Homo sapiens
ctccctgaaggaaaa

SEQ ID NO: 1123482 - DNA, 15 bp, Homo sapiens
cctccctgaaggaaa

SEQ ID NO: 1123483 - DNA, 15 bp, Homo sapiens
acctccctgaaggaa

SEQ ID NO: 1123484 - DNA, 15 bp, Homo sapiens
tacctccctgaagga

SEQ ID NO: 1123485 - DNA, 15 bp, Homo sapiens
atacctccctgaagg

SEQ ID NO: 1123486 - DNA, 15 bp, Homo sapiens
catacctccctgaag

SEQ ID NO: 1123487 - DNA, 15 bp, Homo sapiens
ccatacctccctgaa

SEQ ID NO: 1123488 - DNA, 15 bp, Homo sapiens
gccatacctccctga

SEQ ID NO: 1123489 - DNA, 15 bp, Homo sapiens
ggccatacctccctg

SEQ ID NO: 1123490 - DNA, 15 bp, Homo sapiens
aggccatacctccct

SEQ ID NO: 1123491 - DNA, 15 bp, Homo sapiens
aaggccatacctccc

SEQ ID NO: 1123492 - DNA, 15 bp, Homo sapiens
taaggccatacctcc

SEQ ID NO: 1123493 - DNA, 15 bp, Homo sapiens
ctaaggccatacctc

SEQ ID NO: 1123494 - DNA, 15 bp, Homo sapiens
tctaaggccatacct

SEQ ID NO: 1123495 - DNA, 15 bp, Homo sapiens
gtctaaggccatacc

SEQ ID NO: 1123496 - DNA, 15 bp, Homo sapiens
agtctaaggccatac

SEQ ID NO: 1123497 - DNA, 15 bp, Homo sapiens
tagtctaaggccata

SEQ ID NO: 1123498 - DNA, 15 bp, Homo sapiens
atagtctaaggccat

SEQ ID NO: 1123499 - DNA, 15 bp, Homo sapiens
aatagtctaaggcca

SEQ ID NO: 1123500 - DNA, 15 bp, Homo sapiens
gaatagtctaaggcc

SEQ ID NO: 1123501 - DNA, 15 bp, Homo sapiens
tgaatagtctaaggc

SEQ ID NO: 1123502 - DNA, 15 bp, Homo sapiens
ctgaatagtctaagg

SEQ ID NO: 1123503 - DNA, 15 bp, Homo sapiens
tctgaatagtctaag

SEQ ID NO: 1123504 - DNA, 15 bp, Homo sapiens
ttctgaatagtctaa

SEQ ID NO: 1123505 - DNA, 15 bp, Homo sapiens
gttctgaatagtcta

SEQ ID NO: 1123506 - DNA, 15 bp, Homo sapiens
cgttctgaatagtct

SEQ ID NO: 1123507 - DNA, 15 bp, Homo sapiens
acgttctgaatagtc

SEQ ID NO: 1123508 - DNA, 15 bp, Homo sapiens
aacgttctgaatagt

SEQ ID NO: 1123509 - DNA, 15 bp, Homo sapiens
taacgttctgaatag

SEQ ID NO: 1123510 - DNA, 15 bp, Homo sapiens
gtaacgttctgaata

SEQ ID NO: 1123511 - DNA, 15 bp, Homo sapiens
agtaacgttctgaat

SEQ ID NO: 1123512 - DNA, 15 bp, Homo sapiens
cagtaacgttctgaa

SEQ ID NO: 1123513 - DNA, 15 bp, Homo sapiens
ccagtaacgttctga

SEQ ID NO: 1123514 - DNA, 15 bp, Homo sapiens
accagtaacgttctg

SEQ ID NO: 1123515 - DNA, 15 bp, Homo sapiens
caccagtaacgttct

SEQ ID NO: 1123516 - DNA, 15 bp, Homo sapiens
ccaccagtaacgttc

SEQ ID NO: 1123517 - DNA, 15 bp, Homo sapiens
cccaccagtaacgtt

SEQ ID NO: 1123518 - DNA, 15 bp, Homo sapiens
tcccaccagtaacgt

SEQ ID NO: 1123519 - DNA, 15 bp, Homo sapiens
ttcccaccagtaacg

SEQ ID NO: 1123520 - DNA, 15 bp, Homo sapiens
attcccaccagtaac

SEQ ID NO: 1123521 - DNA, 15 bp, Homo sapiens
tattcccaccagtaa

SEQ ID NO: 1123522 - DNA, 15 bp, Homo sapiens
ttattcccaccagta

SEQ ID NO: 1123523 - DNA, 15 bp, Homo sapiens
gttattcccaccagt

SEQ ID NO: 1123524 - DNA, 15 bp, Homo sapiens
tgttattcccaccag

SEQ ID NO: 1123525 - DNA, 15 bp, Homo sapiens
ttgttattcccacca

SEQ ID NO: 1123526 - DNA, 15 bp, Homo sapiens
tttgttattcccacc

SEQ ID NO: 1123527 - DNA, 15 bp, Homo sapiens
ctttgttattcccac

SEQ ID NO: 1123528 - DNA, 15 bp, Homo sapiens
cctttgttattccca

SEQ ID NO: 1123529 - DNA, 15 bp, Homo sapiens
ccctttgttattccc

SEQ ID NO: 1123530 - DNA, 15 bp, Homo sapiens
tccctttgttattcc

SEQ ID NO: 1123531 - DNA, 15 bp, Homo sapiens
ctccctttgttattc

SEQ ID NO: 1123532 - DNA, 15 bp, Homo sapiens
gctccctttgttatt

SEQ ID NO: 1123533 - DNA, 15 bp, Homo sapiens
agctccctttgttat

SEQ ID NO: 1123534 - DNA, 15 bp, Homo sapiens
cagctccctttgtta

SEQ ID NO: 1123535 - DNA, 15 bp, Homo sapiens
tcagctccctttgtt

SEQ ID NO: 1123536 - DNA, 15 bp, Homo sapiens
gtcagctccctttgt

SEQ ID NO: 1123537 - DNA, 15 bp, Homo sapiens
ggtcagctccctttg

SEQ ID NO: 1123538 - DNA, 15 bp, Homo sapiens
cggtcagctcccttt

SEQ ID NO: 1123539 - DNA, 15 bp, Homo sapiens
tcggtcagctccctt

SEQ ID NO: 1123540 - DNA, 15 bp, Homo sapiens
ctcggtcagctccct

SEQ ID NO: 1123541 - DNA, 15 bp, Homo sapiens
cctcggtcagctccc

SEQ ID NO: 1123542 - DNA, 15 bp, Homo sapiens
tcctcggtcagctcc

SEQ ID NO: 1123543 - DNA, 15 bp, Homo sapiens
atcctcggtcagctc

SEQ ID NO: 1123544 - DNA, 15 bp, Homo sapiens
aatcctcggtcagct

SEQ ID NO: 1123545 - DNA, 15 bp, Homo sapiens
aaatcctcggtcagc

SEQ ID NO: 1123546 - DNA, 15 bp, Homo sapiens
taaatcctcggtcag

SEQ ID NO: 1123547 - DNA, 15 bp, Homo sapiens
ataaatcctcggtca

SEQ ID NO: 1123548 - DNA, 15 bp, Homo sapiens
tataaatcctcggtc

SEQ ID NO: 1123549 - DNA, 15 bp, Homo sapiens
gtataaatcctcggt

SEQ ID NO: 1123550 - DNA, 15 bp, Homo sapiens
tgtataaatcctcgg

SEQ ID NO: 1123551 - DNA, 15 bp, Homo sapiens
ctgtataaatcctcg

SEQ ID NO: 1123552 - DNA, 15 bp, Homo sapiens
cctgtataaatcctc

SEQ ID NO: 1123553 - DNA, 15 bp, Homo sapiens
tcctgtataaatcct

SEQ ID NO: 1123554 - DNA, 15 bp, Homo sapiens
gtcctgtataaatcc

SEQ ID NO: 1123555 - DNA, 15 bp, Homo sapiens
ggtcctgtataaatc

SEQ ID NO: 1123556 - DNA, 15 bp, Homo sapiens
cggtcctgtataaat

SEQ ID NO: 1123557 - DNA, 15 bp, Homo sapiens
acggtcctgtataaa

SEQ ID NO: 1123558 - DNA, 15 bp, Homo sapiens
cacggtcctgtataa

SEQ ID NO: 1123559 - DNA, 15 bp, Homo sapiens
ccacggtcctgtata

SEQ ID NO: 1123560 - DNA, 15 bp, Homo sapiens
tccacggtcctgtat

SEQ ID NO: 1123561 - DNA, 15 bp, Homo sapiens
ctccacggtcctgta

SEQ ID NO: 1123562 - DNA, 15 bp, Homo sapiens
cctccacggtcctgt

SEQ ID NO: 1123563 - DNA, 15 bp, Homo sapiens
ccctccacggtcctg

SEQ ID NO: 1123564 - DNA, 15 bp, Homo sapiens
cccctccacggtcct

SEQ ID NO: 1123565 - DNA, 15 bp, Homo sapiens
acccctccacggtcc

SEQ ID NO: 1123566 - DNA, 15 bp, Homo sapiens
cacccctccacggtc

SEQ ID NO: 1123567 - DNA, 15 bp, Homo sapiens
acacccctccacggt

SEQ ID NO: 1123568 - DNA, 15 bp, Homo sapiens
aacacccctccacgg

SEQ ID NO: 1123569 - DNA, 15 bp, Homo sapiens
aaacacccctccacg

SEQ ID NO: 1123570 - DNA, 15 bp, Homo sapiens
taaacacccctccac

SEQ ID NO: 1123571 - DNA, 15 bp, Homo sapiens
ctaaacacccctcca

SEQ ID NO: 1123572 - DNA, 15 bp, Homo sapiens
tctaaacacccctcc

SEQ ID NO: 1123573 - DNA, 15 bp, Homo sapiens
ctctaaacacccctc

SEQ ID NO: 1123574 - DNA, 15 bp, Homo sapiens
gctctaaacacccct

SEQ ID NO: 1123575 - DNA, 15 bp, Homo sapiens
ggctctaaacacccc

SEQ ID NO: 1123576 - DNA, 15 bp, Homo sapiens
tggctctaaacaccc

SEQ ID NO: 1123577 - DNA, 15 bp, Homo sapiens
ttggctctaaacacc

SEQ ID NO: 1123578 - DNA, 15 bp, Homo sapiens
cttggctctaaacac

SEQ ID NO: 1123579 - DNA, 15 bp, Homo sapiens
acttggctctaaaca

SEQ ID NO: 1123580 - DNA, 15 bp, Homo sapiens
aacttggctctaaac

SEQ ID NO: 1123581 - DNA, 15 bp, Homo sapiens
caacttggctctaaa

SEQ ID NO: 1123582 - DNA, 15 bp, Homo sapiens
tcaacttggctctaa

SEQ ID NO: 1123583 - DNA, 15 bp, Homo sapiens
ctcaacttggctcta

SEQ ID NO: 1123584 - DNA, 15 bp, Homo sapiens
tctcaacttggctct

SEQ ID NO: 1123585 - DNA, 15 bp, Homo sapiens
atctcaacttggctc

SEQ ID NO: 1123586 - DNA, 15 bp, Homo sapiens
gatctcaacttggct

SEQ ID NO: 1123587 - DNA, 15 bp, Homo sapiens
agatctcaacttggc

SEQ ID NO: 1123588 - DNA, 15 bp, Homo sapiens
cagatctcaacttgg

SEQ ID NO: 1123589 - DNA, 15 bp, Homo sapiens
tcagatctcaacttg

SEQ ID NO: 1123590 - DNA, 15 bp, Homo sapiens
ctcagatctcaactt

SEQ ID NO: 1123591 - DNA, 15 bp, Homo sapiens
gctcagatctcaact

SEQ ID NO: 1123592 - DNA, 15 bp, Homo sapiens
ggctcagatctcaac

SEQ ID NO: 1123593 - DNA, 15 bp, Homo sapiens
gggctcagatctcaa

SEQ ID NO: 1123594 - DNA, 15 bp, Homo sapiens
tgggctcagatctca

SEQ ID NO: 1123595 - DNA, 15 bp, Homo sapiens
atgggctcagatctc

SEQ ID NO: 1123596 - DNA, 15 bp, Homo sapiens
catgggctcagatct

SEQ ID NO: 1123597 - DNA, 15 bp, Homo sapiens
tcatgggctcagatc

SEQ ID NO: 1123598 - DNA, 15 bp, Homo sapiens
ttcatgggctcagat

SEQ ID NO: 1123599 - DNA, 15 bp, Homo sapiens
attcatgggctcaga

SEQ ID NO: 1123600 - DNA, 15 bp, Homo sapiens
gattcatgggctcag

SEQ ID NO: 1123601 - DNA, 15 bp, Homo sapiens
agattcatgggctca

SEQ ID NO: 1123602 - DNA, 15 bp, Homo sapiens
cagattcatgggctc

SEQ ID NO: 1123603 - DNA, 15 bp, Homo sapiens
acagattcatgggct

SEQ ID NO: 1123604 - DNA, 15 bp, Homo sapiens
tacagattcatgggc

SEQ ID NO: 1123605 - DNA, 15 bp, Homo sapiens
gtacagattcatggg

SEQ ID NO: 1123606 - DNA, 15 bp, Homo sapiens
ggtacagattcatgg

SEQ ID NO: 1123607 - DNA, 15 bp, Homo sapiens
tggtacagattcatg

SEQ ID NO: 1123608 - DNA, 15 bp, Homo sapiens
ctggtacagattcat

SEQ ID NO: 1123609 - DNA, 15 bp, Homo sapiens
actggtacagattca

SEQ ID NO: 1123610 - DNA, 15 bp, Homo sapiens
gactggtacagattc

SEQ ID NO: 1123611 - DNA, 15 bp, Homo sapiens
agactggtacagatt

SEQ ID NO: 1123612 - DNA, 15 bp, Homo sapiens
gagactggtacagat

SEQ ID NO: 1123613 - DNA, 15 bp, Homo sapiens
ggagactggtacaga

SEQ ID NO: 1123614 - DNA, 15 bp, Homo sapiens
tggagactggtacag

SEQ ID NO: 1123615 - DNA, 15 bp, Homo sapiens
atggagactggtaca

SEQ ID NO: 1123616 - DNA, 15 bp, Homo sapiens
catggagactggtac

SEQ ID NO: 1123617 - DNA, 15 bp, Homo sapiens
ccatggagactggta

SEQ ID NO: 1123618 - DNA, 15 bp, Homo sapiens
accatggagactggt

SEQ ID NO: 1123619 - DNA, 15 bp, Homo sapiens
aaccatggagactgg

SEQ ID NO: 1123620 - DNA, 15 bp, Homo sapiens
caaccatggagactg

SEQ ID NO: 1123621 - DNA, 15 bp, Homo sapiens
acaaccatggagact

SEQ ID NO: 1123622 - DNA, 15 bp, Homo sapiens
cacaaccatggagac

SEQ ID NO: 1123623 - DNA, 15 bp, Homo sapiens
ccacaaccatggaga

SEQ ID NO: 1123624 - DNA, 15 bp, Homo sapiens
cccacaaccatggag

SEQ ID NO: 1123625 - DNA, 15 bp, Homo sapiens
ccccacaaccatgga

SEQ ID NO: 1123626 - DNA, 15 bp, Homo sapiens
accccacaaccatgg

SEQ ID NO: 1123627 - DNA, 15 bp, Homo sapiens
aaccccacaaccatg

SEQ ID NO: 1123628 - DNA, 15 bp, Homo sapiens
aaaccccacaaccat

SEQ ID NO: 1123629 - DNA, 15 bp, Homo sapiens
aaaaccccacaacca

SEQ ID NO: 1123630 - DNA, 15 bp, Homo sapiens
gaaaaccccacaacc

SEQ ID NO: 1123631 - DNA, 15 bp, Homo sapiens
agaaaaccccacaac

SEQ ID NO: 1123632 - DNA, 15 bp, Homo sapiens
gagaaaaccccacaa

SEQ ID NO: 1123633 - DNA, 15 bp, Homo sapiens
ggagaaaaccccaca

SEQ ID NO: 1123634 - DNA, 15 bp, Homo sapiens
tggagaaaaccccac

SEQ ID NO: 1123635 - DNA, 15 bp, Homo sapiens
ctggagaaaacccca

SEQ ID NO: 1123636 - DNA, 15 bp, Homo sapiens
gctggagaaaacccc

SEQ ID NO: 1123637 - DNA, 15 bp, Homo sapiens
tgctggagaaaaccc

SEQ ID NO: 1123638 - DNA, 15 bp, Homo sapiens
ctgctggagaaaacc

SEQ ID NO: 1123639 - DNA, 15 bp, Homo sapiens
actgctggagaaaac

SEQ ID NO: 1123640 - DNA, 15 bp, Homo sapiens
tactgctggagaaaa

SEQ ID NO: 1123641 - DNA, 15 bp, Homo sapiens
gtactgctggagaaa

SEQ ID NO: 1123642 - DNA, 15 bp, Homo sapiens
agtactgctggagaa

SEQ ID NO: 1123643 - DNA, 15 bp, Homo sapiens
gagtactgctggaga

SEQ ID NO: 1123644 - DNA, 15 bp, Homo sapiens
tgagtactgctggag

SEQ ID NO: 1123645 - DNA, 15 bp, Homo sapiens
ctgagtactgctgga

SEQ ID NO: 1123646 - DNA, 15 bp, Homo sapiens
gctgagtactgctgg

SEQ ID NO: 1123647 - DNA, 15 bp, Homo sapiens
tgctgagtactgctg

SEQ ID NO: 1123648 - DNA, 15 bp, Homo sapiens
ctgctgagtactgct

SEQ ID NO: 1123649 - DNA, 15 bp, Homo sapiens
gctgctgagtactgc

SEQ ID NO: 1123650 - DNA, 15 bp, Homo sapiens
ggctgctgagtactg

SEQ ID NO: 1123651 - DNA, 15 bp, Homo sapiens
aggctgctgagtact

SEQ ID NO: 1123652 - DNA, 15 bp, Homo sapiens
taggctgctgagtac

SEQ ID NO: 1123653 - DNA, 15 bp, Homo sapiens
ctaggctgctgagta

SEQ ID NO: 1123654 - DNA, 15 bp, Homo sapiens
actaggctgctgagt

SEQ ID NO: 1123655 - DNA, 15 bp, Homo sapiens
tactaggctgctgag

SEQ ID NO: 1123656 - DNA, 15 bp, Homo sapiens
atactaggctgctga

SEQ ID NO: 1123657 - DNA, 15 bp, Homo sapiens
tatactaggctgctg

SEQ ID NO: 1123658 - DNA, 15 bp, Homo sapiens
atatactaggctgct

SEQ ID NO: 1123659 - DNA, 15 bp, Homo sapiens
catatactaggctgc

SEQ ID NO: 1123660 - DNA, 15 bp, Homo sapiens
ccatatactaggctg

SEQ ID NO: 1123661 - DNA, 15 bp, Homo sapiens
tccatatactaggct

SEQ ID NO: 1123662 - DNA, 15 bp, Homo sapiens
gtccatatactaggc

SEQ ID NO: 1123663 - DNA, 15 bp, Homo sapiens
tgtccatatactagg

SEQ ID NO: 1123664 - DNA, 15 bp, Homo sapiens
ctgtccatatactag

SEQ ID NO: 1123665 - DNA, 15 bp, Homo sapiens
tctgtccatatacta

SEQ ID NO: 1123666 - DNA, 15 bp, Homo sapiens
ctctgtccatatact

SEQ ID NO: 1123667 - DNA, 15 bp, Homo sapiens
tctctgtccatatac

SEQ ID NO: 1123668 - DNA, 15 bp, Homo sapiens
ttctctgtccatata

SEQ ID NO: 1123669 - DNA, 15 bp, Homo sapiens
tttctctgtccatat

SEQ ID NO: 1123670 - DNA, 15 bp, Homo sapiens
ttttctctgtccata

SEQ ID NO: 1123671 - DNA, 15 bp, Homo sapiens
attttctctgtccat

SEQ ID NO: 1123672 - DNA, 15 bp, Homo sapiens
cattttctctgtcca

SEQ ID NO: 1123673 - DNA, 15 bp, Homo sapiens
ccattttctctgtcc

SEQ ID NO: 1123674 - DNA, 15 bp, Homo sapiens
cccattttctctgtc

SEQ ID NO: 1123675 - DNA, 15 bp, Homo sapiens
ccccattttctctgt

SEQ ID NO: 1123676 - DNA, 15 bp, Homo sapiens
accccattttctctg

SEQ ID NO: 1123677 - DNA, 15 bp, Homo sapiens
caccccattttctct

SEQ ID NO: 1123678 - DNA, 15 bp, Homo sapiens
acaccccattttctc

SEQ ID NO: 1123679 - DNA, 15 bp, Homo sapiens
cacaccccattttct

SEQ ID NO: 1123680 - DNA, 15 bp, Homo sapiens
acacaccccattttc

SEQ ID NO: 1123681 - DNA, 15 bp, Homo sapiens
aacacaccccatttt

SEQ ID NO: 1123682 - DNA, 15 bp, Homo sapiens
aaacacaccccattt

SEQ ID NO: 1123683 - DNA, 15 bp, Homo sapiens
aaaacacaccccatt

SEQ ID NO: 1123684 - DNA, 15 bp, Homo sapiens
caaaacacaccccat

SEQ ID NO: 1123685 - DNA, 15 bp, Homo sapiens
tcaaaacacacccca

SEQ ID NO: 1123686 - DNA, 15 bp, Homo sapiens
ctcaaaacacacccc

SEQ ID NO: 1123687 - DNA, 15 bp, Homo sapiens
gctcaaaacacaccc

SEQ ID NO: 1123688 - DNA, 15 bp, Homo sapiens
ggctcaaaacacacc

SEQ ID NO: 1123689 - DNA, 15 bp, Homo sapiens
tggctcaaaacacac

SEQ ID NO: 1123690 - DNA, 15 bp, Homo sapiens
ctggctcaaaacaca

SEQ ID NO: 1123691 - DNA, 15 bp, Homo sapiens
cctggctcaaaacac

SEQ ID NO: 1123692 - DNA, 15 bp, Homo sapiens
ccctggctcaaaaca

SEQ ID NO: 1123693 - DNA, 15 bp, Homo sapiens
accctggctcaaaac

SEQ ID NO: 1123694 - DNA, 15 bp, Homo sapiens
caccctggctcaaaa

SEQ ID NO: 1123695 - DNA, 15 bp, Homo sapiens
acaccctggctcaaa

SEQ ID NO: 1123696 - DNA, 15 bp, Homo sapiens
cacaccctggctcaa

SEQ ID NO: 1123697 - DNA, 15 bp, Homo sapiens
ccacaccctggctca

SEQ ID NO: 1123698 - DNA, 15 bp, Homo sapiens
gccacaccctggctc

SEQ ID NO: 1123699 - DNA, 15 bp, Homo sapiens
agccacaccctggct

SEQ ID NO: 1123700 - DNA, 15 bp, Homo sapiens
aagccacaccctggc

SEQ ID NO: 1123701 - DNA, 15 bp, Homo sapiens
taagccacaccctgg

SEQ ID NO: 1123702 - DNA, 15 bp, Homo sapiens
ctaagccacaccctg

SEQ ID NO: 1123703 - DNA, 15 bp, Homo sapiens
gctaagccacaccct

SEQ ID NO: 1123704 - DNA, 15 bp, Homo sapiens
ggctaagccacaccc

SEQ ID NO: 1123705 - DNA, 15 bp, Homo sapiens
tggctaagccacacc

SEQ ID NO: 1123706 - DNA, 15 bp, Homo sapiens
atggctaagccacac

SEQ ID NO: 1123707 - DNA, 15 bp, Homo sapiens
gatggctaagccaca

SEQ ID NO: 1123708 - DNA, 15 bp, Homo sapiens
agatggctaagccac

SEQ ID NO: 1123709 - DNA, 15 bp, Homo sapiens
aagatggctaagcca

SEQ ID NO: 1123710 - DNA, 15 bp, Homo sapiens
caagatggctaagcc

SEQ ID NO: 1123711 - DNA, 15 bp, Homo sapiens
ccaagatggctaagc

SEQ ID NO: 1123712 - DNA, 15 bp, Homo sapiens
gccaagatggctaag

SEQ ID NO: 1123713 - DNA, 15 bp, Homo sapiens
tgccaagatggctaa

SEQ ID NO: 1123714 - DNA, 15 bp, Homo sapiens
ctgccaagatggcta

SEQ ID NO: 1123715 - DNA, 15 bp, Homo sapiens
tctgccaagatggct

SEQ ID NO: 1123716 - DNA, 15 bp, Homo sapiens
ctctgccaagatggc

SEQ ID NO: 1123717 - DNA, 15 bp, Homo sapiens
gctctgccaagatgg

SEQ ID NO: 1123718 - DNA, 15 bp, Homo sapiens
agctctgccaagatg

SEQ ID NO: 1123719 - DNA, 15 bp, Homo sapiens
cagctctgccaagat

SEQ ID NO: 1123720 - DNA, 15 bp, Homo sapiens
tcagctctgccaaga

SEQ ID NO: 1123721 - DNA, 15 bp, Homo sapiens
ttcagctctgccaag

SEQ ID NO: 1123722 - DNA, 15 bp, Homo sapiens
attcagctctgccaa

SEQ ID NO: 1123723 - DNA, 15 bp, Homo sapiens
gattcagctctgcca

SEQ ID NO: 1123724 - DNA, 15 bp, Homo sapiens
tgattcagctctgcc

SEQ ID NO: 1123725 - DNA, 15 bp, Homo sapiens
atgattcagctctgc

SEQ ID NO: 1123726 - DNA, 15 bp, Homo sapiens
tatgattcagctctg

SEQ ID NO: 1123727 - DNA, 15 bp, Homo sapiens
ctatgattcagctct

SEQ ID NO: 1123728 - DNA, 15 bp, Homo sapiens
cctatgattcagctc

SEQ ID NO: 1123729 - DNA, 15 bp, Homo sapiens
ccctatgattcagct

SEQ ID NO: 1123730 - DNA, 15 bp, Homo sapiens
accctatgattcagc

SEQ ID NO: 1123731 - DNA, 15 bp, Homo sapiens
taccctatgattcag

SEQ ID NO: 1123732 - DNA, 15 bp, Homo sapiens
gtaccctatgattca

SEQ ID NO: 1123733 - DNA, 15 bp, Homo sapiens
tgtaccctatgattc

SEQ ID NO: 1123734 - DNA, 15 bp, Homo sapiens
ttgtaccctatgatt

SEQ ID NO: 1123735 - DNA, 15 bp, Homo sapiens
tttgtaccctatgat

SEQ ID NO: 1123736 - DNA, 15 bp, Homo sapiens
ctttgtaccctatga

SEQ ID NO: 1123737 - DNA, 15 bp, Homo sapiens
cctttgtaccctatg

SEQ ID NO: 1123738 - DNA, 15 bp, Homo sapiens
ccctttgtaccctat

SEQ ID NO: 1123739 - DNA, 15 bp, Homo sapiens
gccctttgtacccta

SEQ ID NO: 1123740 - DNA, 15 bp, Homo sapiens
agccctttgtaccct

SEQ ID NO: 1123741 - DNA, 15 bp, Homo sapiens
aagccctttgtaccc

SEQ ID NO: 1123742 - DNA, 15 bp, Homo sapiens
gaagccctttgtacc

SEQ ID NO: 1123743 - DNA, 15 bp, Homo sapiens
ggaagccctttgtac

SEQ ID NO: 1123744 - DNA, 15 bp, Homo sapiens
tggaagccctttgta

SEQ ID NO: 1123745 - DNA, 15 bp, Homo sapiens
ctggaagccctttgt

SEQ ID NO: 1123746 - DNA, 15 bp, Homo sapiens
cctggaagccctttg

SEQ ID NO: 1123747 - DNA, 15 bp, Homo sapiens
tcctggaagcccttt

SEQ ID NO: 1123748 - DNA, 15 bp, Homo sapiens
ctcctggaagccctt

SEQ ID NO: 1123749 - DNA, 15 bp, Homo sapiens
actcctggaagccct

SEQ ID NO: 1123750 - DNA, 15 bp, Homo sapiens
gactcctggaagccc

SEQ ID NO: 1123751 - DNA, 15 bp, Homo sapiens
tgactcctggaagcc

SEQ ID NO: 1123752 - DNA, 15 bp, Homo sapiens
ctgactcctggaagc

SEQ ID NO: 1123753 - DNA, 15 bp, Homo sapiens
cctgactcctggaag

SEQ ID NO: 1123754 - DNA, 15 bp, Homo sapiens
ccctgactcctggaa

SEQ ID NO: 1123755 - DNA, 15 bp, Homo sapiens
tccctgactcctgga

SEQ ID NO: 1123756 - DNA, 15 bp, Homo sapiens
ctccctgactcctgg

SEQ ID NO: 1123757 - DNA, 15 bp, Homo sapiens
tctccctgactcctg

SEQ ID NO: 1123758 - DNA, 15 bp, Homo sapiens
ctctccctgactcct

SEQ ID NO: 1123759 - DNA, 15 bp, Homo sapiens
actctccctgactcc

SEQ ID NO: 1123760 - DNA, 15 bp, Homo sapiens
cactctccctgactc

SEQ ID NO: 1123761 - DNA, 15 bp, Homo sapiens
tcactctccctgact

SEQ ID NO: 1123762 - DNA, 15 bp, Homo sapiens
atcactctccctgac

SEQ ID NO: 1123763 - DNA, 15 bp, Homo sapiens
aatcactctccctga

SEQ ID NO: 1123764 - DNA, 15 bp, Homo sapiens
gaatcactctccctg

SEQ ID NO: 1123765 - DNA, 15 bp, Homo sapiens
tgaatcactctccct

SEQ ID NO: 1123766 - DNA, 15 bp, Homo sapiens
ctgaatcactctccc

SEQ ID NO: 1123767 - DNA, 15 bp, Homo sapiens
cctgaatcactctcc

SEQ ID NO: 1123768 - DNA, 15 bp, Homo sapiens
acctgaatcactctc

SEQ ID NO: 1123769 - DNA, 15 bp, Homo sapiens
cacctgaatcactct

SEQ ID NO: 1123770 - DNA, 15 bp, Homo sapiens
ccacctgaatcactc

SEQ ID NO: 1123771 - DNA, 15 bp, Homo sapiens
cccacctgaatcact

SEQ ID NO: 1123772 - DNA, 15 bp, Homo sapiens
tcccacctgaatcac

SEQ ID NO: 1123773 - DNA, 15 bp, Homo sapiens
atcccacctgaatca

SEQ ID NO: 1123774 - DNA, 15 bp, Homo sapiens
gatcccacctgaatc

SEQ ID NO: 1123775 - DNA, 15 bp, Homo sapiens
ggatcccacctgaat

SEQ ID NO: 1123776 - DNA, 15 bp, Homo sapiens
tggatcccacctgaa

SEQ ID NO: 1123777 - DNA, 15 bp, Homo sapiens
ttggatcccacctga

SEQ ID NO: 1123778 - DNA, 15 bp, Homo sapiens
tttggatcccacctg

SEQ ID NO: 1123779 - DNA, 15 bp, Homo sapiens
gtttggatcccacct

SEQ ID NO: 1123780 - DNA, 15 bp, Homo sapiens
tgtttggatcccacc

SEQ ID NO: 1123781 - DNA, 15 bp, Homo sapiens
ctgtttggatcccac

SEQ ID NO: 1123782 - DNA, 15 bp, Homo sapiens
tctgtttggatccca

SEQ ID NO: 1123783 - DNA, 15 bp, Homo sapiens
ttctgtttggatccc

SEQ ID NO: 1123784 - DNA, 15 bp, Homo sapiens
gttctgtttggatcc

SEQ ID NO: 1123785 - DNA, 15 bp, Homo sapiens
agttctgtttggatc

SEQ ID NO: 1123786 - DNA, 15 bp, Homo sapiens
cagttctgtttggat

SEQ ID NO: 1123787 - DNA, 15 bp, Homo sapiens
ccagttctgtttgga

SEQ ID NO: 1123788 - DNA, 15 bp, Homo sapiens
accagttctgtttgg

SEQ ID NO: 1123789 - DNA, 15 bp, Homo sapiens
taccagttctgtttg

SEQ ID NO: 1123790 - DNA, 15 bp, Homo sapiens
ttaccagttctgttt

SEQ ID NO: 1123791 - DNA, 15 bp, Homo sapiens
cttaccagttctgtt

SEQ ID NO: 1123792 - DNA, 15 bp, Homo sapiens
acttaccagttctgt

SEQ ID NO: 1123793 - DNA, 15 bp, Homo sapiens
tacttaccagttctg

SEQ ID NO: 1123794 - DNA, 15 bp, Homo sapiens
ttacttaccagttct

SEQ ID NO: 1123795 - DNA, 15 bp, Homo sapiens
tttacttaccagttc

SEQ ID NO: 1123796 - DNA, 15 bp, Homo sapiens
ctttacttaccagtt

SEQ ID NO: 1123797 - DNA, 15 bp, Homo sapiens
cctttacttaccagt

SEQ ID NO: 1123798 - DNA, 15 bp, Homo sapiens
tcctttacttaccag

SEQ ID NO: 1123799 - DNA, 15 bp, Homo sapiens
ttcctttacttacca

SEQ ID NO: 1123800 - DNA, 15 bp, Homo sapiens
cttcctttacttacc

SEQ ID NO: 1123801 - DNA, 15 bp, Homo sapiens
acttcctttacttac

SEQ ID NO: 1123802 - DNA, 15 bp, Homo sapiens
gacttcctttactta

SEQ ID NO: 1123803 - DNA, 15 bp, Homo sapiens
tgacttcctttactt

SEQ ID NO: 1123804 - DNA, 15 bp, Homo sapiens
ctgacttcctttact

SEQ ID NO: 1123805 - DNA, 15 bp, Homo sapiens
cctgacttcctttac

SEQ ID NO: 1123806 - DNA, 15 bp, Homo sapiens
tcctgacttccttta

SEQ ID NO: 1123807 - DNA, 15 bp, Homo sapiens
ttcctgacttccttt

SEQ ID NO: 1123808 - DNA, 15 bp, Homo sapiens
gttcctgacttcctt

SEQ ID NO: 1123809 - DNA, 15 bp, Homo sapiens
tgttcctgacttcct

SEQ ID NO: 1123810 - DNA, 15 bp, Homo sapiens
ctgttcctgacttcc

SEQ ID NO: 1123811 - DNA, 15 bp, Homo sapiens
cctgttcctgacttc

SEQ ID NO: 1123812 - DNA, 15 bp, Homo sapiens
ccctgttcctgactt

SEQ ID NO: 1123813 - DNA, 15 bp, Homo sapiens
accctgttcctgact

SEQ ID NO: 1123814 - DNA, 15 bp, Homo sapiens
caccctgttcctgac

SEQ ID NO: 1123815 - DNA, 15 bp, Homo sapiens
ccaccctgttcctga

SEQ ID NO: 1123816 - DNA, 15 bp, Homo sapiens
cccaccctgttcctg

SEQ ID NO: 1123817 - DNA, 15 bp, Homo sapiens
tcccaccctgttcct

SEQ ID NO: 1123818 - DNA, 15 bp, Homo sapiens
ctcccaccctgttcc

SEQ ID NO: 1123819 - DNA, 15 bp, Homo sapiens
tctcccaccctgttc

SEQ ID NO: 1123820 - DNA, 15 bp, Homo sapiens
gtctcccaccctgtt

SEQ ID NO: 1123821 - DNA, 15 bp, Homo sapiens
ggtctcccaccctgt

SEQ ID NO: 1123822 - DNA, 15 bp, Homo sapiens
cggtctcccaccctg

SEQ ID NO: 1123823 - DNA, 15 bp, Homo sapiens
acggtctcccaccct

SEQ ID NO: 1123824 - DNA, 15 bp, Homo sapiens
tacggtctcccaccc

SEQ ID NO: 1123825 - DNA, 15 bp, Homo sapiens
ctacggtctcccacc

SEQ ID NO: 1123826 - DNA, 15 bp, Homo sapiens
tctacggtctcccac

SEQ ID NO: 1123827 - DNA, 15 bp, Homo sapiens
ttctacggtctccca

SEQ ID NO: 1123828 - DNA, 15 bp, Homo sapiens
attctacggtctccc

SEQ ID NO: 1123829 - DNA, 15 bp, Homo sapiens
aattctacggtctcc

SEQ ID NO: 1123830 - DNA, 15 bp, Homo sapiens
caattctacggtctc

SEQ ID NO: 1123831 - DNA, 15 bp, Homo sapiens
ccaattctacggtct

SEQ ID NO: 1123832 - DNA, 15 bp, Homo sapiens
tccaattctacggtc

SEQ ID NO: 1123833 - DNA, 15 bp, Homo sapiens
ctccaattctacggt

SEQ ID NO: 1123834 - DNA, 15 bp, Homo sapiens
tctccaattctacgg

SEQ ID NO: 1123835 - DNA, 15 bp, Homo sapiens
atctccaattctacg

SEQ ID NO: 1123836 - DNA, 15 bp, Homo sapiens
gatctccaattctac

SEQ ID NO: 1123837 - DNA, 15 bp, Homo sapiens
agatctccaattcta

SEQ ID NO: 1123838 - DNA, 15 bp, Homo sapiens
gagatctccaattct

SEQ ID NO: 1123839 - DNA, 15 bp, Homo sapiens
ggagatctccaattc

SEQ ID NO: 1123840 - DNA, 15 bp, Homo sapiens
tggagatctccaatt

SEQ ID NO: 1123841 - DNA, 15 bp, Homo sapiens
atggagatctccaat

SEQ ID NO: 1123842 - DNA, 15 bp, Homo sapiens
catggagatctccaa

SEQ ID NO: 1123843 - DNA, 15 bp, Homo sapiens
tcatggagatctcca

SEQ ID NO: 1123844 - DNA, 15 bp, Homo sapiens
ttcatggagatctcc

SEQ ID NO: 1123845 - DNA, 15 bp, Homo sapiens
attcatggagatctc

SEQ ID NO: 1123846 - DNA, 15 bp, Homo sapiens
gattcatggagatct

SEQ ID NO: 1123847 - DNA, 15 bp, Homo sapiens
agattcatggagatc

SEQ ID NO: 1123848 - DNA, 15 bp, Homo sapiens
cagattcatggagat

SEQ ID NO: 1123849 - DNA, 15 bp, Homo sapiens
tcagattcatggaga

SEQ ID NO: 1123850 - DNA, 15 bp, Homo sapiens
ttcagattcatggag

SEQ ID NO: 1123851 - DNA, 15 bp, Homo sapiens
cttcagattcatgga

SEQ ID NO: 1123852 - DNA, 15 bp, Homo sapiens
gcttcagattcatgg

SEQ ID NO: 1123853 - DNA, 15 bp, Homo sapiens
tgcttcagattcatg

SEQ ID NO: 1123854 - DNA, 15 bp, Homo sapiens
gtgcttcagattcat

SEQ ID NO: 1123855 - DNA, 15 bp, Homo sapiens
tgtgcttcagattca

SEQ ID NO: 1123856 - DNA, 15 bp, Homo sapiens
ttgtgcttcagattc

SEQ ID NO: 1123857 - DNA, 15 bp, Homo sapiens
attgtgcttcagatt

SEQ ID NO: 1123858 - DNA, 15 bp, Homo sapiens
aattgtgcttcagat

SEQ ID NO: 1123859 - DNA, 15 bp, Homo sapiens
taattgtgcttcaga

SEQ ID NO: 1123860 - DNA, 15 bp, Homo sapiens
ctaattgtgcttcag

SEQ ID NO: 1123861 - DNA, 15 bp, Homo sapiens
cctaattgtgcttca

SEQ ID NO: 1123862 - DNA, 15 bp, Homo sapiens
ccctaattgtgcttc

SEQ ID NO: 1123863 - DNA, 15 bp, Homo sapiens
accctaattgtgctt

SEQ ID NO: 1123864 - DNA, 15 bp, Homo sapiens
caccctaattgtgct

SEQ ID NO: 1123865 - DNA, 15 bp, Homo sapiens
ccaccctaattgtgc

SEQ ID NO: 1123866 - DNA, 15 bp, Homo sapiens
gccaccctaattgtg

SEQ ID NO: 1123867 - DNA, 15 bp, Homo sapiens
agccaccctaattgt

SEQ ID NO: 1123868 - DNA, 15 bp, Homo sapiens
tagccaccctaattg

SEQ ID NO: 1123869 - DNA, 15 bp, Homo sapiens
ctagccaccctaatt

SEQ ID NO: 1123870 - DNA, 15 bp, Homo sapiens
tctagccaccctaat

SEQ ID NO: 1123871 - DNA, 15 bp, Homo sapiens
ctctagccaccctaa

SEQ ID NO: 1123872 - DNA, 15 bp, Homo sapiens
tctctagccacccta

SEQ ID NO: 1123873 - DNA, 15 bp, Homo sapiens
ctctctagccaccct

SEQ ID NO: 1123874 - DNA, 15 bp, Homo sapiens
tctctctagccaccc

SEQ ID NO: 1123875 - DNA, 15 bp, Homo sapiens
ttctctctagccacc

SEQ ID NO: 1123876 - DNA, 15 bp, Homo sapiens
gttctctctagccac

SEQ ID NO: 1123877 - DNA, 15 bp, Homo sapiens
ggttctctctagcca

SEQ ID NO: 1123878 - DNA, 15 bp, Homo sapiens
cggttctctctagcc

SEQ ID NO: 1123879 - DNA, 15 bp, Homo sapiens
ccggttctctctagc

SEQ ID NO: 1123880 - DNA, 15 bp, Homo sapiens
tccggttctctctag

SEQ ID NO: 1123881 - DNA, 15 bp, Homo sapiens
ctccggttctctcta

SEQ ID NO: 1123882 - DNA, 15 bp, Homo sapiens
tctccggttctctct

SEQ ID NO: 1123883 - DNA, 15 bp, Homo sapiens
ctctccggttctctc

SEQ ID NO: 1123884 - DNA, 15 bp, Homo sapiens
cctctccggttctct

SEQ ID NO: 1123885 - DNA, 15 bp, Homo sapiens
tcctctccggttctc

SEQ ID NO: 1123886 - DNA, 15 bp, Homo sapiens
ttcctctccggttct

SEQ ID NO: 1123887 - DNA, 15 bp, Homo sapiens
cttcctctccggttc

SEQ ID NO: 1123888 - DNA, 15 bp, Homo sapiens
gcttcctctccggtt

SEQ ID NO: 1123889 - DNA, 15 bp, Homo sapiens
tgcttcctctccggt

SEQ ID NO: 1123890 - DNA, 15 bp, Homo sapiens
ttgcttcctctccgg

SEQ ID NO: 1123891 - DNA, 15 bp, Homo sapiens
tttgcttcctctccg

SEQ ID NO: 1123892 - DNA, 15 bp, Homo sapiens
atttgcttcctctcc

SEQ ID NO: 1123893 - DNA, 15 bp, Homo sapiens
gatttgcttcctctc

SEQ ID NO: 1123894 - DNA, 15 bp, Homo sapiens
cgatttgcttcctct

SEQ ID NO: 1123895 - DNA, 15 bp, Homo sapiens
gcgatttgcttcctc

SEQ ID NO: 1123896 - DNA, 15 bp, Homo sapiens
tgcgatttgcttcct

SEQ ID NO: 1123897 - DNA, 15 bp, Homo sapiens
ctgcgatttgcttcc

SEQ ID NO: 1123898 - DNA, 15 bp, Homo sapiens
actgcgatttgcttc

SEQ ID NO: 1123899 - DNA, 15 bp, Homo sapiens
gactgcgatttgctt

SEQ ID NO: 1123900 - DNA, 15 bp, Homo sapiens
tgactgcgatttgct

SEQ ID NO: 1123901 - DNA, 15 bp, Homo sapiens
ctgactgcgatttgc

SEQ ID NO: 1123902 - DNA, 15 bp, Homo sapiens
tctgactgcgatttg

SEQ ID NO: 1123903 - DNA, 15 bp, Homo sapiens
ctctgactgcgattt

SEQ ID NO: 1123904 - DNA, 15 bp, Homo sapiens
tctctgactgcgatt

SEQ ID NO: 1123905 - DNA, 15 bp, Homo sapiens
atctctgactgcgat

SEQ ID NO: 1123906 - DNA, 15 bp, Homo sapiens
aatctctgactgcga

SEQ ID NO: 1123907 - DNA, 15 bp, Homo sapiens
taatctctgactgcg

SEQ ID NO: 1123908 - DNA, 15 bp, Homo sapiens
ctaatctctgactgc

SEQ ID NO: 1123909 - DNA, 15 bp, Homo sapiens
cctaatctctgactg

SEQ ID NO: 1123910 - DNA, 15 bp, Homo sapiens
tcctaatctctgact

SEQ ID NO: 1123911 - DNA, 15 bp, Homo sapiens
atcctaatctctgac

SEQ ID NO: 1123912 - DNA, 15 bp, Homo sapiens
tatcctaatctctga

SEQ ID NO: 1123913 - DNA, 15 bp, Homo sapiens
gtatcctaatctctg

SEQ ID NO: 1123914 - DNA, 15 bp, Homo sapiens
agtatcctaatctct

SEQ ID NO: 1123915 - DNA, 15 bp, Homo sapiens
tagtatcctaatctc

SEQ ID NO: 1123916 - DNA, 15 bp, Homo sapiens
gtagtatcctaatct

SEQ ID NO: 1123917 - DNA, 15 bp, Homo sapiens
tgtagtatcctaatc

SEQ ID NO: 1123918 - DNA, 15 bp, Homo sapiens
ctgtagtatcctaat

SEQ ID NO: 1123919 - DNA, 15 bp, Homo sapiens
actgtagtatcctaa

SEQ ID NO: 1123920 - DNA, 15 bp, Homo sapiens
aactgtagtatccta

SEQ ID NO: 1123921 - DNA, 15 bp, Homo sapiens
aaactgtagtatcct

SEQ ID NO: 1123922 - DNA, 15 bp, Homo sapiens
taaactgtagtatcc

SEQ ID NO: 1123923 - DNA, 15 bp, Homo sapiens
ttaaactgtagtatc

SEQ ID NO: 1123924 - DNA, 15 bp, Homo sapiens
cttaaactgtagtat

SEQ ID NO: 1123925 - DNA, 15 bp, Homo sapiens
ccttaaactgtagta

SEQ ID NO: 1123926 - DNA, 15 bp, Homo sapiens
cccttaaactgtagt

SEQ ID NO: 1123927 - DNA, 15 bp, Homo sapiens
gcccttaaactgtag

SEQ ID NO: 1123928 - DNA, 15 bp, Homo sapiens
agcccttaaactgta

SEQ ID NO: 1123929 - DNA, 15 bp, Homo sapiens
cagcccttaaactgt

SEQ ID NO: 1123930 - DNA, 15 bp, Homo sapiens
gcagcccttaaactg

SEQ ID NO: 1123931 - DNA, 15 bp, Homo sapiens
ggcagcccttaaact

SEQ ID NO: 1123932 - DNA, 15 bp, Homo sapiens
tggcagcccttaaac

SEQ ID NO: 1123933 - DNA, 15 bp, Homo sapiens
atggcagcccttaaa

SEQ ID NO: 1123934 - DNA, 15 bp, Homo sapiens
catggcagcccttaa

SEQ ID NO: 1123935 - DNA, 15 bp, Homo sapiens
tcatggcagccctta

SEQ ID NO: 1123936 - DNA, 15 bp, Homo sapiens
ctcatggcagccctt

SEQ ID NO: 1123937 - DNA, 15 bp, Homo sapiens
gctcatggcagccct

SEQ ID NO: 1123938 - DNA, 15 bp, Homo sapiens
tgctcatggcagccc

SEQ ID NO: 1123939 - DNA, 15 bp, Homo sapiens
ctgctcatggcagcc

SEQ ID NO: 1123940 - DNA, 15 bp, Homo sapiens
gctgctcatggcagc

SEQ ID NO: 1123941 - DNA, 15 bp, Homo sapiens
tgctgctcatggcag

SEQ ID NO: 1123942 - DNA, 15 bp, Homo sapiens
gtgctgctcatggca

SEQ ID NO: 1123943 - DNA, 15 bp, Homo sapiens
agtgctgctcatggc

SEQ ID NO: 1123944 - DNA, 15 bp, Homo sapiens
cagtgctgctcatgg

SEQ ID NO: 1123945 - DNA, 15 bp, Homo sapiens
ccagtgctgctcatg

SEQ ID NO: 1123946 - DNA, 15 bp, Homo sapiens
tccagtgctgctcat

SEQ ID NO: 1123947 - DNA, 15 bp, Homo sapiens
ttccagtgctgctca

SEQ ID NO: 1123948 - DNA, 15 bp, Homo sapiens
tttccagtgctgctc

SEQ ID NO: 1123949 - DNA, 15 bp, Homo sapiens
ctttccagtgctgct

SEQ ID NO: 1123950 - DNA, 15 bp, Homo sapiens
gctttccagtgctgc

SEQ ID NO: 1123951 - DNA, 15 bp, Homo sapiens
cgctttccagtgctg

SEQ ID NO: 1123952 - DNA, 15 bp, Homo sapiens
acgctttccagtgct

SEQ ID NO: 1123953 - DNA, 15 bp, Homo sapiens
gacgctttccagtgc

SEQ ID NO: 1123954 - DNA, 15 bp, Homo sapiens
ggacgctttccagtg

SEQ ID NO: 1123955 - DNA, 15 bp, Homo sapiens
gggacgctttccagt

SEQ ID NO: 1123956 - DNA, 15 bp, Homo sapiens
ggggacgctttccag

SEQ ID NO: 1123957 - DNA, 15 bp, Homo sapiens
tggggacgctttcca

SEQ ID NO: 1123958 - DNA, 15 bp, Homo sapiens
atggggacgctttcc

SEQ ID NO: 1123959 - DNA, 15 bp, Homo sapiens
tatggggacgctttc

SEQ ID NO: 1123960 - DNA, 15 bp, Homo sapiens
gtatggggacgcttt

SEQ ID NO: 1123961 - DNA, 15 bp, Homo sapiens
ggtatggggacgctt

SEQ ID NO: 1123962 - DNA, 15 bp, Homo sapiens
aggtatggggacgct

SEQ ID NO: 1123963 - DNA, 15 bp, Homo sapiens
aaggtatggggacgc

SEQ ID NO: 1123964 - DNA, 15 bp, Homo sapiens
taaggtatggggacg

SEQ ID NO: 1123965 - DNA, 15 bp, Homo sapiens
ataaggtatggggac

SEQ ID NO: 1123966 - DNA, 15 bp, Homo sapiens
tataaggtatgggga

SEQ ID NO: 1123967 - DNA, 15 bp, Homo sapiens
gtataaggtatgggg

SEQ ID NO: 1123968 - DNA, 15 bp, Homo sapiens
ggtataaggtatggg

SEQ ID NO: 1123969 - DNA, 15 bp, Homo sapiens
tggtataaggtatgg

SEQ ID NO: 1123970 - DNA, 15 bp, Homo sapiens
gtggtataaggtatg

SEQ ID NO: 1123971 - DNA, 15 bp, Homo sapiens
agtggtataaggtat

SEQ ID NO: 1123972 - DNA, 15 bp, Homo sapiens
cagtggtataaggta

SEQ ID NO: 1123973 - DNA, 15 bp, Homo sapiens
acagtggtataaggt

SEQ ID NO: 1123974 - DNA, 15 bp, Homo sapiens
tacagtggtataagg

SEQ ID NO: 1123975 - DNA, 15 bp, Homo sapiens
ctacagtggtataag

SEQ ID NO: 1123976 - DNA, 15 bp, Homo sapiens
cctacagtggtataa

SEQ ID NO: 1123977 - DNA, 15 bp, Homo sapiens
tcctacagtggtata

SEQ ID NO: 1123978 - DNA, 15 bp, Homo sapiens
ctcctacagtggtat

SEQ ID NO: 1123979 - DNA, 15 bp, Homo sapiens
cctcctacagtggta

SEQ ID NO: 1123980 - DNA, 15 bp, Homo sapiens
gcctcctacagtggt

SEQ ID NO: 1123981 - DNA, 15 bp, Homo sapiens
agcctcctacagtgg

SEQ ID NO: 1123982 - DNA, 15 bp, Homo sapiens
tagcctcctacagtg

SEQ ID NO: 1123983 - DNA, 15 bp, Homo sapiens
atagcctcctacagt

SEQ ID NO: 1123984 - DNA, 15 bp, Homo sapiens
tatagcctcctacag

SEQ ID NO: 1123985 - DNA, 15 bp, Homo sapiens
gtatagcctcctaca

SEQ ID NO: 1123986 - DNA, 15 bp, Homo sapiens
tgtatagcctcctac

SEQ ID NO: 1123987 - DNA, 15 bp, Homo sapiens
atgtatagcctccta

SEQ ID NO: 1123988 - DNA, 15 bp, Homo sapiens
aatgtatagcctcct

SEQ ID NO: 1123989 - DNA, 15 bp, Homo sapiens
gaatgtatagcctcc

SEQ ID NO: 1123990 - DNA, 15 bp, Homo sapiens
agaatgtatagcctc

SEQ ID NO: 1123991 - DNA, 15 bp, Homo sapiens
tagaatgtatagcct

SEQ ID NO: 1123992 - DNA, 15 bp, Homo sapiens
ctagaatgtatagcc

SEQ ID NO: 1123993 - DNA, 15 bp, Homo sapiens
actagaatgtatagc

SEQ ID NO: 1123994 - DNA, 15 bp, Homo sapiens
aactagaatgtatag

SEQ ID NO: 1123995 - DNA, 15 bp, Homo sapiens
aaactagaatgtata

SEQ ID NO: 1123996 - DNA, 15 bp, Homo sapiens
gaaactagaatgtat

SEQ ID NO: 1123997 - DNA, 15 bp, Homo sapiens
ggaaactagaatgta

SEQ ID NO: 1123998 - DNA, 15 bp, Homo sapiens
gggaaactagaatgt

SEQ ID NO: 1123999 - DNA, 15 bp, Homo sapiens
agggaaactagaatg

SEQ ID NO: 1124000 - DNA, 15 bp, Homo sapiens
cagggaaactagaat

SEQ ID NO: 1124001 - DNA, 15 bp, Homo sapiens
tcagggaaactagaa

SEQ ID NO: 1124002 - DNA, 15 bp, Homo sapiens
ctcagggaaactaga

SEQ ID NO: 1124003 - DNA, 15 bp, Homo sapiens
tctcagggaaactag

SEQ ID NO: 1124004 - DNA, 15 bp, Homo sapiens
gtctcagggaaacta

SEQ ID NO: 1124005 - DNA, 15 bp, Homo sapiens
tgtctcagggaaact

SEQ ID NO: 1124006 - DNA, 15 bp, Homo sapiens
ctgtctcagggaaac

SEQ ID NO: 1124007 - DNA, 15 bp, Homo sapiens
actgtctcagggaaa

SEQ ID NO: 1124008 - DNA, 15 bp, Homo sapiens
gactgtctcagggaa

SEQ ID NO: 1124009 - DNA, 15 bp, Homo sapiens
ggactgtctcaggga

SEQ ID NO: 1124010 - DNA, 15 bp, Homo sapiens
gggactgtctcaggg

SEQ ID NO: 1124011 - DNA, 15 bp, Homo sapiens
tgggactgtctcagg

SEQ ID NO: 1124012 - DNA, 15 bp, Homo sapiens
ctgggactgtctcag

SEQ ID NO: 1124013 - DNA, 15 bp, Homo sapiens
actgggactgtctca

SEQ ID NO: 1124014 - DNA, 15 bp, Homo sapiens
aactgggactgtctc

SEQ ID NO: 1124015 - DNA, 15 bp, Homo sapiens
aaactgggactgtct

SEQ ID NO: 1124016 - DNA, 15 bp, Homo sapiens
taaactgggactgtc

SEQ ID NO: 1124017 - DNA, 15 bp, Homo sapiens
gtaaactgggactgt

SEQ ID NO: 1124018 - DNA, 15 bp, Homo sapiens
tgtaaactgggactg

SEQ ID NO: 1124019 - DNA, 15 bp, Homo sapiens
atgtaaactgggact

SEQ ID NO: 1124020 - DNA, 15 bp, Homo sapiens
catgtaaactgggac

SEQ ID NO: 1124021 - DNA, 15 bp, Homo sapiens
acatgtaaactggga

SEQ ID NO: 1124022 - DNA, 15 bp, Homo sapiens
aacatgtaaactggg

SEQ ID NO: 1124023 - DNA, 15 bp, Homo sapiens
taacatgtaaactgg

SEQ ID NO: 1124024 - DNA, 15 bp, Homo sapiens
ataacatgtaaactg

SEQ ID NO: 1124025 - DNA, 15 bp, Homo sapiens
aataacatgtaaact

SEQ ID NO: 1124026 - DNA, 15 bp, Homo sapiens
gaataacatgtaaac

SEQ ID NO: 1124027 - DNA, 15 bp, Homo sapiens
agaataacatgtaaa

SEQ ID NO: 1124028 - DNA, 15 bp, Homo sapiens
tagaataacatgtaa

SEQ ID NO: 1124029 - DNA, 15 bp, Homo sapiens
ttagaataacatgta

SEQ ID NO: 1124030 - DNA, 15 bp, Homo sapiens
gttagaataacatgt

SEQ ID NO: 1124031 - DNA, 15 bp, Homo sapiens
tgttagaataacatg

SEQ ID NO: 1124032 - DNA, 15 bp, Homo sapiens
atgttagaataacat

SEQ ID NO: 1124033 - DNA, 15 bp, Homo sapiens
aatgttagaataaca

SEQ ID NO: 1124034 - DNA, 15 bp, Homo sapiens
aaatgttagaataac

SEQ ID NO: 1124035 - DNA, 15 bp, Homo sapiens
aaaatgttagaataa

SEQ ID NO: 1124036 - DNA, 15 bp, Homo sapiens
caaaatgttagaata

SEQ ID NO: 1124037 - DNA, 15 bp, Homo sapiens
acaaaatgttagaat

SEQ ID NO: 1124038 - DNA, 15 bp, Homo sapiens
gacaaaatgttagaa

SEQ ID NO: 1124039 - DNA, 15 bp, Homo sapiens
agacaaaatgttaga

SEQ ID NO: 1124040 - DNA, 15 bp, Homo sapiens
tagacaaaatgttag

SEQ ID NO: 1124041 - DNA, 15 bp, Homo sapiens
ttagacaaaatgtta

SEQ ID NO: 1124042 - DNA, 15 bp, Homo sapiens
attagacaaaatgtt

SEQ ID NO: 1124043 - DNA, 15 bp, Homo sapiens
aattagacaaaatgt

SEQ ID NO: 1124044 - DNA, 15 bp, Homo sapiens
aaattagacaaaatg

SEQ ID NO: 1124045 - DNA, 15 bp, Homo sapiens
taaattagacaaaat

SEQ ID NO: 1124046 - DNA, 15 bp, Homo sapiens
ctaaattagacaaaa

SEQ ID NO: 1124047 - DNA, 15 bp, Homo sapiens
gctaaattagacaaa

SEQ ID NO: 1124048 - DNA, 15 bp, Homo sapiens
tgctaaattagacaa

SEQ ID NO: 1124049 - DNA, 15 bp, Homo sapiens
atgctaaattagaca

SEQ ID NO: 1124050 - DNA, 15 bp, Homo sapiens
aatgctaaattagac

SEQ ID NO: 1124051 - DNA, 15 bp, Homo sapiens
aaatgctaaattaga

SEQ ID NO: 1124052 - DNA, 15 bp, Homo sapiens
caaatgctaaattag

SEQ ID NO: 1124053 - DNA, 15 bp, Homo sapiens
acaaatgctaaatta

SEQ ID NO: 1124054 - DNA, 15 bp, Homo sapiens
gacaaatgctaaatt

SEQ ID NO: 1124055 - DNA, 15 bp, Homo sapiens
ggacaaatgctaaat

SEQ ID NO: 1124056 - DNA, 15 bp, Homo sapiens
gggacaaatgctaaa

SEQ ID NO: 1124057 - DNA, 15 bp, Homo sapiens
tgggacaaatgctaa

SEQ ID NO: 1124058 - DNA, 15 bp, Homo sapiens
ttgggacaaatgcta

SEQ ID NO: 1124059 - DNA, 15 bp, Homo sapiens
tttgggacaaatgct

SEQ ID NO: 1124060 - DNA, 15 bp, Homo sapiens
gtttgggacaaatgc

SEQ ID NO: 1124061 - DNA, 15 bp, Homo sapiens
agtttgggacaaatg

SEQ ID NO: 1124062 - DNA, 15 bp, Homo sapiens
aagtttgggacaaat

SEQ ID NO: 1124063 - DNA, 15 bp, Homo sapiens
gaagtttgggacaaa

SEQ ID NO: 1124064 - DNA, 15 bp, Homo sapiens
tgaagtttgggacaa

SEQ ID NO: 1124065 - DNA, 15 bp, Homo sapiens
atgaagtttgggaca

SEQ ID NO: 1124066 - DNA, 15 bp, Homo sapiens
aatgaagtttgggac

SEQ ID NO: 1124067 - DNA, 15 bp, Homo sapiens
aaatgaagtttggga

SEQ ID NO: 1124068 - DNA, 15 bp, Homo sapiens
aaaatgaagtttggg

SEQ ID NO: 1124069 - DNA, 15 bp, Homo sapiens
gaaaatgaagtttgg

SEQ ID NO: 1124070 - DNA, 15 bp, Homo sapiens
agaaaatgaagtttg

SEQ ID NO: 1124071 - DNA, 15 bp, Homo sapiens
tagaaaatgaagttt

SEQ ID NO: 1124072 - DNA, 15 bp, Homo sapiens
ttagaaaatgaagtt

SEQ ID NO: 1124073 - DNA, 15 bp, Homo sapiens
gttagaaaatgaagt

SEQ ID NO: 1124074 - DNA, 15 bp, Homo sapiens
tgttagaaaatgaag

SEQ ID NO: 1124075 - DNA, 15 bp, Homo sapiens
ttgttagaaaatgaa

SEQ ID NO: 1124076 - DNA, 15 bp, Homo sapiens
tttgttagaaaatga

SEQ ID NO: 1124077 - DNA, 15 bp, Homo sapiens
ctttgttagaaaatg

SEQ ID NO: 1124078 - DNA, 15 bp, Homo sapiens
actttgttagaaaat

SEQ ID NO: 1124079 - DNA, 15 bp, Homo sapiens
aactttgttagaaaa

SEQ ID NO: 1124080 - DNA, 15 bp, Homo sapiens
aaactttgttagaaa

SEQ ID NO: 1124081 - DNA, 15 bp, Homo sapiens
taaactttgttagaa

SEQ ID NO: 1124082 - DNA, 15 bp, Homo sapiens
ttaaactttgttaga

SEQ ID NO: 1124083 - DNA, 15 bp, Homo sapiens
cttaaactttgttag

SEQ ID NO: 1124084 - DNA, 15 bp, Homo sapiens
acttaaactttgtta

SEQ ID NO: 1124085 - DNA, 15 bp, Homo sapiens
tacttaaactttgtt

SEQ ID NO: 1124086 - DNA, 15 bp, Homo sapiens
atacttaaactttgt

SEQ ID NO: 1124087 - DNA, 15 bp, Homo sapiens
aatacttaaactttg

SEQ ID NO: 1124088 - DNA, 15 bp, Homo sapiens
taatacttaaacttt

SEQ ID NO: 1124089 - DNA, 15 bp, Homo sapiens
ttaatacttaaactt

SEQ ID NO: 1124090 - DNA, 15 bp, Homo sapiens
attaatacttaaact

SEQ ID NO: 1124091 - DNA, 15 bp, Homo sapiens
tattaatacttaaac

SEQ ID NO: 1124092 - DNA, 15 bp, Homo sapiens
ctattaatacttaaa

SEQ ID NO: 1124093 - DNA, 15 bp, Homo sapiens
actattaatacttaa

SEQ ID NO: 1124094 - DNA, 15 bp, Homo sapiens
aactattaatactta

SEQ ID NO: 1124095 - DNA, 15 bp, Homo sapiens
caactattaatactt

SEQ ID NO: 1124096 - DNA, 15 bp, Homo sapiens
gcaactattaatact

SEQ ID NO: 1124097 - DNA, 15 bp, Homo sapiens
tgcaactattaatac

SEQ ID NO: 1124098 - DNA, 15 bp, Homo sapiens
atgcaactattaata

SEQ ID NO: 1124099 - DNA, 15 bp, Homo sapiens
aatgcaactattaat

SEQ ID NO: 1124100 - DNA, 15 bp, Homo sapiens
aaatgcaactattaa

SEQ ID NO: 1124101 - DNA, 15 bp, Homo sapiens
taaatgcaactatta

SEQ ID NO: 1124102 - DNA, 15 bp, Homo sapiens
ttaaatgcaactatt

SEQ ID NO: 1124103 - DNA, 15 bp, Homo sapiens
tttaaatgcaactat

SEQ ID NO: 1124104 - DNA, 15 bp, Homo sapiens
atttaaatgcaacta

SEQ ID NO: 1124105 - DNA, 15 bp, Homo sapiens
tatttaaatgcaact

SEQ ID NO: 1124106 - DNA, 15 bp, Homo sapiens
ttatttaaatgcaac

SEQ ID NO: 1124107 - DNA, 15 bp, Homo sapiens
cttatttaaatgcaa

SEQ ID NO: 1124108 - DNA, 15 bp, Homo sapiens
gcttatttaaatgca

SEQ ID NO: 1124109 - DNA, 15 bp, Homo sapiens
ggcttatttaaatgc

SEQ ID NO: 1124110 - DNA, 15 bp, Homo sapiens
tggcttatttaaatg

SEQ ID NO: 1124111 - DNA, 15 bp, Homo sapiens
ctggcttatttaaat

SEQ ID NO: 1124112 - DNA, 15 bp, Homo sapiens
cctggcttatttaaa

SEQ ID NO: 1124113 - DNA, 15 bp, Homo sapiens
tcctggcttatttaa

SEQ ID NO: 1124114 - DNA, 15 bp, Homo sapiens
atcctggcttattta

SEQ ID NO: 1124115 - DNA, 15 bp, Homo sapiens
catcctggcttattt

SEQ ID NO: 1124116 - DNA, 15 bp, Homo sapiens
tcatcctggcttatt

SEQ ID NO: 1124117 - DNA, 15 bp, Homo sapiens
ctcatcctggcttat

SEQ ID NO: 1124118 - DNA, 15 bp, Homo sapiens
actcatcctggctta

SEQ ID NO: 1124119 - DNA, 15 bp, Homo sapiens
gactcatcctggctt

SEQ ID NO: 1124120 - DNA, 15 bp, Homo sapiens
agactcatcctggct

SEQ ID NO: 1124121 - DNA, 15 bp, Homo sapiens
cagactcatcctggc

SEQ ID NO: 1124122 - DNA, 15 bp, Homo sapiens
acagactcatcctgg

SEQ ID NO: 1124123 - DNA, 15 bp, Homo sapiens
aacagactcatcctg

SEQ ID NO: 1124124 - DNA, 15 bp, Homo sapiens
caacagactcatcct

SEQ ID NO: 1124125 - DNA, 15 bp, Homo sapiens
ccaacagactcatcc

SEQ ID NO: 1124126 - DNA, 15 bp, Homo sapiens
cccaacagactcatc

SEQ ID NO: 1124127 - DNA, 15 bp, Homo sapiens
gcccaacagactcat

SEQ ID NO: 1124128 - DNA, 15 bp, Homo sapiens
ggcccaacagactca

SEQ ID NO: 1124129 - DNA, 15 bp, Homo sapiens
tggcccaacagactc

SEQ ID NO: 1124130 - DNA, 15 bp, Homo sapiens
gtggcccaacagact

SEQ ID NO: 1124131 - DNA, 15 bp, Homo sapiens
ggtggcccaacagac

SEQ ID NO: 1124132 - DNA, 15 bp, Homo sapiens
tggtggcccaacaga

SEQ ID NO: 1124133 - DNA, 15 bp, Homo sapiens
atggtggcccaacag

SEQ ID NO: 1124134 - DNA, 15 bp, Homo sapiens
tatggtggcccaaca

SEQ ID NO: 1124135 - DNA, 15 bp, Homo sapiens
atatggtggcccaac

SEQ ID NO: 1124136 - DNA, 15 bp, Homo sapiens
aatatggtggcccaa

SEQ ID NO: 1124137 - DNA, 15 bp, Homo sapiens
aaatatggtggccca

SEQ ID NO: 1124138 - DNA, 15 bp, Homo sapiens
aaaatatggtggccc

SEQ ID NO: 1124139 - DNA, 15 bp, Homo sapiens
aaaaatatggtggcc

SEQ ID NO: 1124140 - DNA, 15 bp, Homo sapiens
taaaaatatggtggc

SEQ ID NO: 1124141 - DNA, 15 bp, Homo sapiens
ataaaaatatggtgg

SEQ ID NO: 1124142 - DNA, 15 bp, Homo sapiens
aataaaaatatggtg

SEQ ID NO: 1124143 - DNA, 15 bp, Homo sapiens
aaataaaaatatggt

SEQ ID NO: 1124144 - DNA, 15 bp, Homo sapiens
aaaataaaaatatgg

SEQ ID NO: 1124145 - DNA, 15 bp, Homo sapiens
aaaaataaaaatatg

SEQ ID NO: 1124146 - DNA, 15 bp, Homo sapiens
taaaaataaaaatat

SEQ ID NO: 1124147 - DNA, 15 bp, Homo sapiens
ctaaaaataaaaata

SEQ ID NO: 1124148 - DNA, 15 bp, Homo sapiens
tctaaaaataaaaat

SEQ ID NO: 1124149 - DNA, 15 bp, Homo sapiens
ctctaaaaataaaaa

SEQ ID NO: 1124150 - DNA, 15 bp, Homo sapiens
tctctaaaaataaaa

SEQ ID NO: 1124151 - DNA, 15 bp, Homo sapiens
gtctctaaaaataaa

SEQ ID NO: 1124152 - DNA, 15 bp, Homo sapiens
tgtctctaaaaataa

SEQ ID NO: 1124153 - DNA, 15 bp, Homo sapiens
ctgtctctaaaaata

SEQ ID NO: 1124154 - DNA, 15 bp, Homo sapiens
gctgtctctaaaaat

SEQ ID NO: 1124155 - DNA, 15 bp, Homo sapiens
cgctgtctctaaaaa

SEQ ID NO: 1124156 - DNA, 15 bp, Homo sapiens
acgctgtctctaaaa

SEQ ID NO: 1124157 - DNA, 15 bp, Homo sapiens
gacgctgtctctaaa

SEQ ID NO: 1124158 - DNA, 15 bp, Homo sapiens
agacgctgtctctaa

SEQ ID NO: 1124159 - DNA, 15 bp, Homo sapiens
gagacgctgtctcta

SEQ ID NO: 1124160 - DNA, 15 bp, Homo sapiens
cgagacgctgtctct

SEQ ID NO: 1124161 - DNA, 15 bp, Homo sapiens
gcgagacgctgtctc

SEQ ID NO: 1124162 - DNA, 15 bp, Homo sapiens
agcgagacgctgtct

SEQ ID NO: 1124163 - DNA, 15 bp, Homo sapiens
gagcgagacgctgtc

SEQ ID NO: 1124164 - DNA, 15 bp, Homo sapiens
agagcgagacgctgt

SEQ ID NO: 1124165 - DNA, 15 bp, Homo sapiens
tagagcgagacgctg

SEQ ID NO: 1124166 - DNA, 15 bp, Homo sapiens
atagagcgagacgct

SEQ ID NO: 1124167 - DNA, 15 bp, Homo sapiens
gatagagcgagacgc

SEQ ID NO: 1124168 - DNA, 15 bp, Homo sapiens
tgatagagcgagacg

SEQ ID NO: 1124169 - DNA, 15 bp, Homo sapiens
gtgatagagcgagac

SEQ ID NO: 1124170 - DNA, 15 bp, Homo sapiens
ggtgatagagcgaga

SEQ ID NO: 1124171 - DNA, 15 bp, Homo sapiens
gggtgatagagcgag

SEQ ID NO: 1124172 - DNA, 15 bp, Homo sapiens
tgggtgatagagcga

SEQ ID NO: 1124173 - DNA, 15 bp, Homo sapiens
ttgggtgatagagcg

SEQ ID NO: 1124174 - DNA, 15 bp, Homo sapiens
tagcttgggtgatag

SEQ ID NO: 1124175 - DNA, 15 bp, Homo sapiens
ctagcttgggtgata

SEQ ID NO: 1124176 - DNA, 15 bp, Homo sapiens
tctagcttgggtgat

SEQ ID NO: 1124177 - DNA, 15 bp, Homo sapiens
ctctagcttgggtga

SEQ ID NO: 1124178 - DNA, 15 bp, Homo sapiens
actctagcttgggtg

SEQ ID NO: 1124179 - DNA, 15 bp, Homo sapiens
cactctagcttgggt

SEQ ID NO: 1124180 - DNA, 15 bp, Homo sapiens
gcactctagcttggg

SEQ ID NO: 1124181 - DNA, 15 bp, Homo sapiens
tgcactctagcttgg

SEQ ID NO: 1124182 - DNA, 15 bp, Homo sapiens
ctgcactctagcttg

SEQ ID NO: 1124183 - DNA, 15 bp, Homo sapiens
actgcactctagctt

SEQ ID NO: 1124184 - DNA, 15 bp, Homo sapiens
agtgattgcaccact

SEQ ID NO: 1124185 - DNA, 15 bp, Homo sapiens
cagtgattgcaccac

SEQ ID NO: 1124186 - DNA, 15 bp, Homo sapiens
acagtgattgcacca

SEQ ID NO: 1124187 - DNA, 15 bp, Homo sapiens
tacagtgattgcacc

SEQ ID NO: 1124188 - DNA, 15 bp, Homo sapiens
ttacagtgattgcac

SEQ ID NO: 1124189 - DNA, 15 bp, Homo sapiens
gttacagtgattgca

SEQ ID NO: 1124190 - DNA, 15 bp, Homo sapiens
ggttacagtgattgc

SEQ ID NO: 1124191 - DNA, 15 bp, Homo sapiens
aggttacagtgattg

SEQ ID NO: 1124192 - DNA, 15 bp, Homo sapiens
taggttacagtgatt

SEQ ID NO: 1124193 - DNA, 15 bp, Homo sapiens
ctaggttacagtgat

SEQ ID NO: 1124194 - DNA, 15 bp, Homo sapiens
tctaggttacagtga

SEQ ID NO: 1124195 - DNA, 15 bp, Homo sapiens
ttctaggttacagtg

SEQ ID NO: 1124196 - DNA, 15 bp, Homo sapiens
attctaggttacagt

SEQ ID NO: 1124197 - DNA, 15 bp, Homo sapiens
aattctaggttacag

SEQ ID NO: 1124198 - DNA, 15 bp, Homo sapiens
gaattctaggttaca

SEQ ID NO: 1124199 - DNA, 15 bp, Homo sapiens
ggaattctaggttac

SEQ ID NO: 1124200 - DNA, 15 bp, Homo sapiens
aggaattctaggtta

SEQ ID NO: 1124201 - DNA, 15 bp, Homo sapiens
caggaattctaggtt

SEQ ID NO: 1124202 - DNA, 15 bp, Homo sapiens
ccaggaattctaggt

SEQ ID NO: 1124203 - DNA, 15 bp, Homo sapiens
cccaggaattctagg

SEQ ID NO: 1124204 - DNA, 15 bp, Homo sapiens
gcccaggaattctag

SEQ ID NO: 1124205 - DNA, 15 bp, Homo sapiens
agcccaggaattcta

SEQ ID NO: 1124206 - DNA, 15 bp, Homo sapiens
gagcccaggaattct

SEQ ID NO: 1124207 - DNA, 15 bp, Homo sapiens
cttgggaggttgagg

SEQ ID NO: 1124208 - DNA, 15 bp, Homo sapiens
gcttgggaggttgag

SEQ ID NO: 1124209 - DNA, 15 bp, Homo sapiens
tgcttgggaggttga

SEQ ID NO: 1124210 - DNA, 15 bp, Homo sapiens
ctgcttgggaggttg

SEQ ID NO: 1124211 - DNA, 15 bp, Homo sapiens
gctgcttgggaggtt

SEQ ID NO: 1124212 - DNA, 15 bp, Homo sapiens
agctgcttgggaggt

SEQ ID NO: 1124213 - DNA, 15 bp, Homo sapiens
tagctgcttgggagg

SEQ ID NO: 1124214 - DNA, 15 bp, Homo sapiens
ttagctgcttgggag

SEQ ID NO: 1124215 - DNA, 15 bp, Homo sapiens
cttagctgcttggga

SEQ ID NO: 1124216 - DNA, 15 bp, Homo sapiens
tcttagctgcttggg

SEQ ID NO: 1124217 - DNA, 15 bp, Homo sapiens
gtcttagctgcttgg

SEQ ID NO: 1124218 - DNA, 15 bp, Homo sapiens
agtcttagctgcttg

SEQ ID NO: 1124219 - DNA, 15 bp, Homo sapiens
tagtcttagctgctt

SEQ ID NO: 1124220 - DNA, 15 bp, Homo sapiens
gtagtcttagctgct

SEQ ID NO: 1124221 - DNA, 15 bp, Homo sapiens
tgtagtcttagctgc

SEQ ID NO: 1124222 - DNA, 15 bp, Homo sapiens
ctgtagtcttagctg

SEQ ID NO: 1124223 - DNA, 15 bp, Homo sapiens
cctgtagtcttagct

SEQ ID NO: 1124224 - DNA, 15 bp, Homo sapiens
gcctgtagtcttagc

SEQ ID NO: 1124225 - DNA, 15 bp, Homo sapiens
tgcctgtagtcttag

SEQ ID NO: 1124226 - DNA, 15 bp, Homo sapiens
gtgcctgtagtctta

SEQ ID NO: 1124227 - DNA, 15 bp, Homo sapiens
cgtgcctgtagtctt

SEQ ID NO: 1124228 - DNA, 15 bp, Homo sapiens
gcgtgcctgtagtct

SEQ ID NO: 1124229 - DNA, 15 bp, Homo sapiens
tgcgtgcctgtagtc

SEQ ID NO: 1124230 - DNA, 15 bp, Homo sapiens
gtgcgtgcctgtagt

SEQ ID NO: 1124231 - DNA, 15 bp, Homo sapiens
ggtgcgtgcctgtag

SEQ ID NO: 1124232 - DNA, 15 bp, Homo sapiens
tggtgcgtgcctgta

SEQ ID NO: 1124233 - DNA, 15 bp, Homo sapiens
gtggtgcgtgcctgt

SEQ ID NO: 1124234 - DNA, 15 bp, Homo sapiens
ggtggtgcgtgcctg

SEQ ID NO: 1124235 - DNA, 15 bp, Homo sapiens
tggtggtgcgtgcct

SEQ ID NO: 1124236 - DNA, 15 bp, Homo sapiens
atggtggtgcgtgcc

SEQ ID NO: 1124237 - DNA, 15 bp, Homo sapiens
catggtggtgcgtgc

SEQ ID NO: 1124238 - DNA, 15 bp, Homo sapiens
gcatggtggtgcgtg

SEQ ID NO: 1124239 - DNA, 15 bp, Homo sapiens
tgcatggtggtgcgt

SEQ ID NO: 1124240 - DNA, 15 bp, Homo sapiens
atgcatggtggtgcg

SEQ ID NO: 1124241 - DNA, 15 bp, Homo sapiens
catgcatggtggtgc

SEQ ID NO: 1124242 - DNA, 15 bp, Homo sapiens
ccatgcatggtggtg

SEQ ID NO: 1124243 - DNA, 15 bp, Homo sapiens
gccatgcatggtggt

SEQ ID NO: 1124244 - DNA, 15 bp, Homo sapiens
agccatgcatggtgg

SEQ ID NO: 1124245 - DNA, 15 bp, Homo sapiens
tagccatgcatggtg

SEQ ID NO: 1124246 - DNA, 15 bp, Homo sapiens
atagccatgcatggt

SEQ ID NO: 1124247 - DNA, 15 bp, Homo sapiens
aatagccatgcatgg

SEQ ID NO: 1124248 - DNA, 15 bp, Homo sapiens
aaatagccatgcatg

SEQ ID NO: 1124249 - DNA, 15 bp, Homo sapiens
aaaatagccatgcat

SEQ ID NO: 1124250 - DNA, 15 bp, Homo sapiens
aaaaatagccatgca

SEQ ID NO: 1124251 - DNA, 15 bp, Homo sapiens
aaaaaatagccatgc

SEQ ID NO: 1124252 - DNA, 15 bp, Homo sapiens
aaaaaaatagccatg

SEQ ID NO: 1124253 - DNA, 15 bp, Homo sapiens
aaaaaaaatagccat

SEQ ID NO: 1124254 - DNA, 15 bp, Homo sapiens
taaaaaaaatagcca

SEQ ID NO: 1124255 - DNA, 15 bp, Homo sapiens
ataaaaaaaatagcc

SEQ ID NO: 1124256 - DNA, 15 bp, Homo sapiens
aaaaaaataaaaaaa

SEQ ID NO: 1124257 - DNA, 15 bp, Homo sapiens
caaaaaaataaaaaa

SEQ ID NO: 1124258 - DNA, 15 bp, Homo sapiens
acaaaaaaataaaaa

SEQ ID NO: 1124259 - DNA, 15 bp, Homo sapiens
tacaaaaaaataaaa

SEQ ID NO: 1124260 - DNA, 15 bp, Homo sapiens
ctacaaaaaaataaa

SEQ ID NO: 1124261 - DNA, 15 bp, Homo sapiens
tctacaaaaaaataa

SEQ ID NO: 1124262 - DNA, 15 bp, Homo sapiens
gtctctacaaaaaaa

SEQ ID NO: 1124263 - DNA, 15 bp, Homo sapiens
ttgtctctacaaaaa

SEQ ID NO: 1124264 - DNA, 15 bp, Homo sapiens
cttgtctctacaaaa

SEQ ID NO: 1124265 - DNA, 15 bp, Homo sapiens
ccttgtctctacaaa

SEQ ID NO: 1124266 - DNA, 15 bp, Homo sapiens
accttgtctctacaa

SEQ ID NO: 1124267 - DNA, 15 bp, Homo sapiens
gaccttgtctctaca

SEQ ID NO: 1124268 - DNA, 15 bp, Homo sapiens
agaccttgtctctac

SEQ ID NO: 1124269 - DNA, 15 bp, Homo sapiens
gagaccttgtctcta

SEQ ID NO: 1124270 - DNA, 15 bp, Homo sapiens
cgagaccttgtctct

SEQ ID NO: 1124271 - DNA, 15 bp, Homo sapiens
gcgagaccttgtctc

SEQ ID NO: 1124272 - DNA, 15 bp, Homo sapiens
ggcgagaccttgtct

SEQ ID NO: 1124273 - DNA, 15 bp, Homo sapiens
tggcgagaccttgtc

SEQ ID NO: 1124274 - DNA, 15 bp, Homo sapiens
atggcgagaccttgt

SEQ ID NO: 1124275 - DNA, 15 bp, Homo sapiens
catggcgagaccttg

SEQ ID NO: 1124276 - DNA, 15 bp, Homo sapiens
acatggcgagacctt

SEQ ID NO: 1124277 - DNA, 15 bp, Homo sapiens
aacatggcgagacct

SEQ ID NO: 1124278 - DNA, 15 bp, Homo sapiens
gcaacatggcgagac

SEQ ID NO: 1124279 - DNA, 15 bp, Homo sapiens
ggcaacatggcgaga

SEQ ID NO: 1124280 - DNA, 15 bp, Homo sapiens
gggcaacatggcgag

SEQ ID NO: 1124281 - DNA, 15 bp, Homo sapiens
gtgggcaacatggcg

SEQ ID NO: 1124282 - DNA, 15 bp, Homo sapiens
agtgggcaacatggc

SEQ ID NO: 1124283 - DNA, 15 bp, Homo sapiens
gagtgggcaacatgg

SEQ ID NO: 1124284 - DNA, 15 bp, Homo sapiens
agagtgggcaacatg

SEQ ID NO: 1124285 - DNA, 15 bp, Homo sapiens
cagagtgggcaacat

SEQ ID NO: 1124286 - DNA, 15 bp, Homo sapiens
ccagagtgggcaaca

SEQ ID NO: 1124287 - DNA, 15 bp, Homo sapiens
accagagtgggcaac

SEQ ID NO: 1124288 - DNA, 15 bp, Homo sapiens
gaccagagtgggcaa

SEQ ID NO: 1124289 - DNA, 15 bp, Homo sapiens
agaccagagtgggca

SEQ ID NO: 1124290 - DNA, 15 bp, Homo sapiens
cagaccagagtgggc

SEQ ID NO: 1124291 - DNA, 15 bp, Homo sapiens
ccagaccagagtggg

SEQ ID NO: 1124292 - DNA, 15 bp, Homo sapiens
tccagaccagagtgg

SEQ ID NO: 1124293 - DNA, 15 bp, Homo sapiens
ttccagaccagagtg

SEQ ID NO: 1124294 - DNA, 15 bp, Homo sapiens
attccagaccagagt

SEQ ID NO: 1124295 - DNA, 15 bp, Homo sapiens
aattccagaccagag

SEQ ID NO: 1124296 - DNA, 15 bp, Homo sapiens
gaattccagaccaga

SEQ ID NO: 1124297 - DNA, 15 bp, Homo sapiens
ggaattccagaccag

SEQ ID NO: 1124298 - DNA, 15 bp, Homo sapiens
aggaattccagacca

SEQ ID NO: 1124299 - DNA, 15 bp, Homo sapiens
caggaattccagacc

SEQ ID NO: 1124300 - DNA, 15 bp, Homo sapiens
ccaggaattccagac

SEQ ID NO: 1124301 - DNA, 15 bp, Homo sapiens
gccaggaattccaga

SEQ ID NO: 1124302 - DNA, 15 bp, Homo sapiens
ggccaggaattccag

SEQ ID NO: 1124303 - DNA, 15 bp, Homo sapiens
aggccaggaattcca

SEQ ID NO: 1124304 - DNA, 15 bp, Homo sapiens
gaggccaggaattcc

SEQ ID NO: 1124305 - DNA, 15 bp, Homo sapiens
tttgaggccaggaat

SEQ ID NO: 1124306 - DNA, 15 bp, Homo sapiens
gtttgaggccaggaa

SEQ ID NO: 1124307 - DNA, 15 bp, Homo sapiens
cgtttgaggccagga

SEQ ID NO: 1124308 - DNA, 15 bp, Homo sapiens
tcgtttgaggccagg

SEQ ID NO: 1124309 - DNA, 15 bp, Homo sapiens
atcgtttgaggccag

SEQ ID NO: 1124310 - DNA, 15 bp, Homo sapiens
gatcgtttgaggcca

SEQ ID NO: 1124311 - DNA, 15 bp, Homo sapiens
ggatcgtttgaggcc

SEQ ID NO: 1124312 - DNA, 15 bp, Homo sapiens
aggatcgtttgaggc

SEQ ID NO: 1124313 - DNA, 15 bp, Homo sapiens
gaggatcgtttgagg

SEQ ID NO: 1124314 - DNA, 15 bp, Homo sapiens
agaggatcgtttgag

SEQ ID NO: 1124315 - DNA, 15 bp, Homo sapiens
gagaggatcgtttga

SEQ ID NO: 1124316 - DNA, 15 bp, Homo sapiens
tgagaggatcgtttg

SEQ ID NO: 1124317 - DNA, 15 bp, Homo sapiens
gtgagaggatcgttt

SEQ ID NO: 1124318 - DNA, 15 bp, Homo sapiens
ggtgagaggatcgtt

SEQ ID NO: 1124319 - DNA, 15 bp, Homo sapiens
tggtgagaggatcgt

SEQ ID NO: 1124320 - DNA, 15 bp, Homo sapiens
gtggtgagaggatcg

SEQ ID NO: 1124321 - DNA, 15 bp, Homo sapiens
tgtggtgagaggatc

SEQ ID NO: 1124322 - DNA, 15 bp, Homo sapiens
ctgtggtgagaggat

SEQ ID NO: 1124323 - DNA, 15 bp, Homo sapiens
gctgtggtgagagga

SEQ ID NO: 1124324 - DNA, 15 bp, Homo sapiens
ggctgtggtgagagg

SEQ ID NO: 1124325 - DNA, 15 bp, Homo sapiens
aggctgtggtgagag

SEQ ID NO: 1124326 - DNA, 15 bp, Homo sapiens
gaggctgtggtgaga

SEQ ID NO: 1124327 - DNA, 15 bp, Homo sapiens
ggaggctgtggtgag

SEQ ID NO: 1124328 - DNA, 15 bp, Homo sapiens
gggaggctgtggtga

SEQ ID NO: 1124329 - DNA, 15 bp, Homo sapiens
tgggaggctgtggtg

SEQ ID NO: 1124330 - DNA, 15 bp, Homo sapiens
ttgggaggctgtggt

SEQ ID NO: 1124331 - DNA, 15 bp, Homo sapiens
tttgggaggctgtgg

SEQ ID NO: 1124332 - DNA, 15 bp, Homo sapiens
ctttgggaggctgtg

SEQ ID NO: 1124333 - DNA, 15 bp, Homo sapiens
actttgggaggctgt

SEQ ID NO: 1124334 - DNA, 15 bp, Homo sapiens
ccctgtaatcccaac

SEQ ID NO: 1124335 - DNA, 15 bp, Homo sapiens
cccctgtaatcccaa

SEQ ID NO: 1124336 - DNA, 15 bp, Homo sapiens
aggtggctcacccct

SEQ ID NO: 1124337 - DNA, 15 bp, Homo sapiens
aaggtggctcacccc

SEQ ID NO: 1124338 - DNA, 15 bp, Homo sapiens
caaggtggctcaccc

SEQ ID NO: 1124339 - DNA, 15 bp, Homo sapiens
gcaaggtggctcacc

SEQ ID NO: 1124340 - DNA, 15 bp, Homo sapiens
gggcaaggtggctca

SEQ ID NO: 1124341 - DNA, 15 bp, Homo sapiens
tgggcaaggtggctc

SEQ ID NO: 1124342 - DNA, 15 bp, Homo sapiens
ctgggcaaggtggct

SEQ ID NO: 1124343 - DNA, 15 bp, Homo sapiens
gctgggcaaggtggc

SEQ ID NO: 1124344 - DNA, 15 bp, Homo sapiens
ggctgggcaaggtgg

SEQ ID NO: 1124345 - DNA, 15 bp, Homo sapiens
aggctgggcaaggtg

SEQ ID NO: 1124346 - DNA, 15 bp, Homo sapiens
taggctgggcaaggt

SEQ ID NO: 1124347 - DNA, 15 bp, Homo sapiens
ctaggctgggcaagg

SEQ ID NO: 1124348 - DNA, 15 bp, Homo sapiens
cctaggctgggcaag

SEQ ID NO: 1124349 - DNA, 15 bp, Homo sapiens
tcctaggctgggcaa

SEQ ID NO: 1124350 - DNA, 15 bp, Homo sapiens
gtcctaggctgggca

SEQ ID NO: 1124351 - DNA, 15 bp, Homo sapiens
ggtcctaggctgggc

SEQ ID NO: 1124352 - DNA, 15 bp, Homo sapiens
tggtcctaggctggg

SEQ ID NO: 1124353 - DNA, 15 bp, Homo sapiens
gtggtcctaggctgg

SEQ ID NO: 1124354 - DNA, 15 bp, Homo sapiens
tgtggtcctaggctg

SEQ ID NO: 1124355 - DNA, 15 bp, Homo sapiens
ttgtggtcctaggct

SEQ ID NO: 1124356 - DNA, 15 bp, Homo sapiens
gttgtggtcctaggc

SEQ ID NO: 1124357 - DNA, 15 bp, Homo sapiens
agttgtggtcctagg

SEQ ID NO: 1124358 - DNA, 15 bp, Homo sapiens
aagttgtggtcctag

SEQ ID NO: 1124359 - DNA, 15 bp, Homo sapiens
aaagttgtggtccta

SEQ ID NO: 1124360 - DNA, 15 bp, Homo sapiens
aaaagttgtggtcct

SEQ ID NO: 1124361 - DNA, 15 bp, Homo sapiens
aaaaagttgtggtcc

SEQ ID NO: 1124362 - DNA, 15 bp, Homo sapiens
taaaaagttgtggtc

SEQ ID NO: 1124363 - DNA, 15 bp, Homo sapiens
ttaaaaagttgtggt

SEQ ID NO: 1124364 - DNA, 15 bp, Homo sapiens
attaaaaagttgtgg

SEQ ID NO: 1124365 - DNA, 15 bp, Homo sapiens
aattaaaaagttgtg

SEQ ID NO: 1124366 - DNA, 15 bp, Homo sapiens
gaattaaaaagttgt

SEQ ID NO: 1124367 - DNA, 15 bp, Homo sapiens
ggaattaaaaagttg

SEQ ID NO: 1124368 - DNA, 15 bp, Homo sapiens
tggaattaaaaagtt

SEQ ID NO: 1124369 - DNA, 15 bp, Homo sapiens
ttggaattaaaaagt

SEQ ID NO: 1124370 - DNA, 15 bp, Homo sapiens
gttggaattaaaaag

SEQ ID NO: 1124371 - DNA, 15 bp, Homo sapiens
agttggaattaaaaa

SEQ ID NO: 1124372 - DNA, 15 bp, Homo sapiens
aagttggaattaaaa

SEQ ID NO: 1124373 - DNA, 15 bp, Homo sapiens
gaagttggaattaaa

SEQ ID NO: 1124374 - DNA, 15 bp, Homo sapiens
agaagttggaattaa

SEQ ID NO: 1124375 - DNA, 15 bp, Homo sapiens
cagaagttggaatta

SEQ ID NO: 1124376 - DNA, 15 bp, Homo sapiens
gcagaagttggaatt

SEQ ID NO: 1124377 - DNA, 15 bp, Homo sapiens
ggcagaagttggaat

SEQ ID NO: 1124378 - DNA, 15 bp, Homo sapiens
aggcagaagttggaa

SEQ ID NO: 1124379 - DNA, 15 bp, Homo sapiens
aaggcagaagttgga

SEQ ID NO: 1124380 - DNA, 15 bp, Homo sapiens
caaggcagaagttgg

SEQ ID NO: 1124381 - DNA, 15 bp, Homo sapiens
ccaaggcagaagttg

SEQ ID NO: 1124382 - DNA, 15 bp, Homo sapiens
accaaggcagaagtt

SEQ ID NO: 1124383 - DNA, 15 bp, Homo sapiens
gaccaaggcagaagt

SEQ ID NO: 1124384 - DNA, 15 bp, Homo sapiens
agaccaaggcagaag

SEQ ID NO: 1124385 - DNA, 15 bp, Homo sapiens
gagaccaaggcagaa

SEQ ID NO: 1124386 - DNA, 15 bp, Homo sapiens
tgagaccaaggcaga

SEQ ID NO: 1124387 - DNA, 15 bp, Homo sapiens
atgagaccaaggcag

SEQ ID NO: 1124388 - DNA, 15 bp, Homo sapiens
gatgagaccaaggca

SEQ ID NO: 1124389 - DNA, 15 bp, Homo sapiens
agatgagaccaaggc

SEQ ID NO: 1124390 - DNA, 15 bp, Homo sapiens
tagatgagaccaagg

SEQ ID NO: 1124391 - DNA, 15 bp, Homo sapiens
gtagatgagaccaag

SEQ ID NO: 1124392 - DNA, 15 bp, Homo sapiens
agtagatgagaccaa

SEQ ID NO: 1124393 - DNA, 15 bp, Homo sapiens
tagtagatgagacca

SEQ ID NO: 1124394 - DNA, 15 bp, Homo sapiens
ctagtagatgagacc

SEQ ID NO: 1124395 - DNA, 15 bp, Homo sapiens
actagtagatgagac

SEQ ID NO: 1124396 - DNA, 15 bp, Homo sapiens
aactagtagatgaga

SEQ ID NO: 1124397 - DNA, 15 bp, Homo sapiens
aaactagtagatgag

SEQ ID NO: 1124398 - DNA, 15 bp, Homo sapiens
caaactagtagatga

SEQ ID NO: 1124399 - DNA, 15 bp, Homo sapiens
acaaactagtagatg

SEQ ID NO: 1124400 - DNA, 15 bp, Homo sapiens
cacaaactagtagat

SEQ ID NO: 1124401 - DNA, 15 bp, Homo sapiens
tcacaaactagtaga

SEQ ID NO: 1124402 - DNA, 15 bp, Homo sapiens
ctcacaaactagtag

SEQ ID NO: 1124403 - DNA, 15 bp, Homo sapiens
tctcacaaactagta

SEQ ID NO: 1124404 - DNA, 15 bp, Homo sapiens
atctcacaaactagt

SEQ ID NO: 1124405 - DNA, 15 bp, Homo sapiens
catctcacaaactag

SEQ ID NO: 1124406 - DNA, 15 bp, Homo sapiens
gcatctcacaaacta

SEQ ID NO: 1124407 - DNA, 15 bp, Homo sapiens
tgcatctcacaaact

SEQ ID NO: 1124408 - DNA, 15 bp, Homo sapiens
atgcatctcacaaac

SEQ ID NO: 1124409 - DNA, 15 bp, Homo sapiens
tatgcatctcacaaa

SEQ ID NO: 1124410 - DNA, 15 bp, Homo sapiens
atatgcatctcacaa

SEQ ID NO: 1124411 - DNA, 15 bp, Homo sapiens
tatatgcatctcaca

SEQ ID NO: 1124412 - DNA, 15 bp, Homo sapiens
gtatatgcatctcac

SEQ ID NO: 1124413 - DNA, 15 bp, Homo sapiens
tgtatatgcatctca

SEQ ID NO: 1124414 - DNA, 15 bp, Homo sapiens
ctgtatatgcatctc

SEQ ID NO: 1124415 - DNA, 15 bp, Homo sapiens
tctgtatatgcatct

SEQ ID NO: 1124416 - DNA, 15 bp, Homo sapiens
ctctgtatatgcatc

SEQ ID NO: 1124417 - DNA, 15 bp, Homo sapiens
tctctgtatatgcat

SEQ ID NO: 1124418 - DNA, 15 bp, Homo sapiens
ttctctgtatatgca

SEQ ID NO: 1124419 - DNA, 15 bp, Homo sapiens
gttctctgtatatgc

SEQ ID NO: 1124420 - DNA, 15 bp, Homo sapiens
ggttctctgtatatg

SEQ ID NO: 1124421 - DNA, 15 bp, Homo sapiens
tggttctctgtatat

SEQ ID NO: 1124422 - DNA, 15 bp, Homo sapiens
ttggttctctgtata

SEQ ID NO: 1124423 - DNA, 15 bp, Homo sapiens
cttggttctctgtat

SEQ ID NO: 1124424 - DNA, 15 bp, Homo sapiens
acttggttctctgta

SEQ ID NO: 1124425 - DNA, 15 bp, Homo sapiens
aacttggttctctgt

SEQ ID NO: 1124426 - DNA, 15 bp, Homo sapiens
gaacttggttctctg

SEQ ID NO: 1124427 - DNA, 15 bp, Homo sapiens
agaacttggttctct

SEQ ID NO: 1124428 - DNA, 15 bp, Homo sapiens
gagaacttggttctc

SEQ ID NO: 1124429 - DNA, 15 bp, Homo sapiens
tgagaacttggttct

SEQ ID NO: 1124430 - DNA, 15 bp, Homo sapiens
gtgagaacttggttc

SEQ ID NO: 1124431 - DNA, 15 bp, Homo sapiens
agtgagaacttggtt

SEQ ID NO: 1124432 - DNA, 15 bp, Homo sapiens
aagtgagaacttggt

SEQ ID NO: 1124433 - DNA, 15 bp, Homo sapiens
aaagtgagaacttgg

SEQ ID NO: 1124434 - DNA, 15 bp, Homo sapiens
taaagtgagaacttg

SEQ ID NO: 1124435 - DNA, 15 bp, Homo sapiens
ttaaagtgagaactt

SEQ ID NO: 1124436 - DNA, 15 bp, Homo sapiens
gttaaagtgagaact

SEQ ID NO: 1124437 - DNA, 15 bp, Homo sapiens
tgttaaagtgagaac

SEQ ID NO: 1124438 - DNA, 15 bp, Homo sapiens
gtgttaaagtgagaa

SEQ ID NO: 1124439 - DNA, 15 bp, Homo sapiens
tgtgttaaagtgaga

SEQ ID NO: 1124440 - DNA, 15 bp, Homo sapiens
ctgtgttaaagtgag

SEQ ID NO: 1124441 - DNA, 15 bp, Homo sapiens
cctgtgttaaagtga

SEQ ID NO: 1124442 - DNA, 15 bp, Homo sapiens
ccctgtgttaaagtg

SEQ ID NO: 1124443 - DNA, 15 bp, Homo sapiens
accctgtgttaaagt

SEQ ID NO: 1124444 - DNA, 15 bp, Homo sapiens
aaccctgtgttaaag

SEQ ID NO: 1124445 - DNA, 15 bp, Homo sapiens
taaccctgtgttaaa

SEQ ID NO: 1124446 - DNA, 15 bp, Homo sapiens
ttaaccctgtgttaa

SEQ ID NO: 1124447 - DNA, 15 bp, Homo sapiens
tttaaccctgtgtta

SEQ ID NO: 1124448 - DNA, 15 bp, Homo sapiens
gtttaaccctgtgtt

SEQ ID NO: 1124449 - DNA, 15 bp, Homo sapiens
ggtttaaccctgtgt

SEQ ID NO: 1124450 - DNA, 15 bp, Homo sapiens
aggtttaaccctgtg

SEQ ID NO: 1124451 - DNA, 15 bp, Homo sapiens
taggtttaaccctgt

SEQ ID NO: 1124452 - DNA, 15 bp, Homo sapiens
ttaggtttaaccctg

SEQ ID NO: 1124453 - DNA, 15 bp, Homo sapiens
tttaggtttaaccct

SEQ ID NO: 1124454 - DNA, 15 bp, Homo sapiens
ttttaggtttaaccc

SEQ ID NO: 1124455 - DNA, 15 bp, Homo sapiens
cttttaggtttaacc

SEQ ID NO: 1124456 - DNA, 15 bp, Homo sapiens
tcttttaggtttaac

SEQ ID NO: 1124457 - DNA, 15 bp, Homo sapiens
gtcttttaggtttaa

SEQ ID NO: 1124458 - DNA, 15 bp, Homo sapiens
tgtcttttaggttta

SEQ ID NO: 1124459 - DNA, 15 bp, Homo sapiens
ttgtcttttaggttt

SEQ ID NO: 1124460 - DNA, 15 bp, Homo sapiens
gttgtcttttaggtt

SEQ ID NO: 1124461 - DNA, 15 bp, Homo sapiens
ggttgtcttttaggt

SEQ ID NO: 1124462 - DNA, 15 bp, Homo sapiens
tggttgtcttttagg

SEQ ID NO: 1124463 - DNA, 15 bp, Homo sapiens
ctggttgtcttttag

SEQ ID NO: 1124464 - DNA, 15 bp, Homo sapiens
actggttgtctttta

SEQ ID NO: 1124465 - DNA, 15 bp, Homo sapiens
cactggttgtctttt

SEQ ID NO: 1124466 - DNA, 15 bp, Homo sapiens
tcactggttgtcttt

SEQ ID NO: 1124467 - DNA, 15 bp, Homo sapiens
atcactggttgtctt

SEQ ID NO: 1124468 - DNA, 15 bp, Homo sapiens
tatcactggttgtct

SEQ ID NO: 1124469 - DNA, 15 bp, Homo sapiens
ttatcactggttgtc

SEQ ID NO: 1124470 - DNA, 15 bp, Homo sapiens
gttatcactggttgt

SEQ ID NO: 1124471 - DNA, 15 bp, Homo sapiens
ggttatcactggttg

SEQ ID NO: 1124472 - DNA, 15 bp, Homo sapiens
gggttatcactggtt

SEQ ID NO: 1124473 - DNA, 15 bp, Homo sapiens
agggttatcactggt

SEQ ID NO: 1124474 - DNA, 15 bp, Homo sapiens
aagggttatcactgg

SEQ ID NO: 1124475 - DNA, 15 bp, Homo sapiens
gaagggttatcactg

SEQ ID NO: 1124476 - DNA, 15 bp, Homo sapiens
agaagggttatcact

SEQ ID NO: 1124477 - DNA, 15 bp, Homo sapiens
gagaagggttatcac

SEQ ID NO: 1124478 - DNA, 15 bp, Homo sapiens
ggagaagggttatca

SEQ ID NO: 1124479 - DNA, 15 bp, Homo sapiens
gggagaagggttatc

SEQ ID NO: 1124480 - DNA, 15 bp, Homo sapiens
agggagaagggttat

SEQ ID NO: 1124481 - DNA, 15 bp, Homo sapiens
aagggagaagggtta

SEQ ID NO: 1124482 - DNA, 15 bp, Homo sapiens
aaagggagaagggtt

SEQ ID NO: 1124483 - DNA, 15 bp, Homo sapiens
gaaagggagaagggt

SEQ ID NO: 1124484 - DNA, 15 bp, Homo sapiens
agaaagggagaaggg

SEQ ID NO: 1124485 - DNA, 15 bp, Homo sapiens
gagaaagggagaagg

SEQ ID NO: 1124486 - DNA, 15 bp, Homo sapiens
agagaaagggagaag

SEQ ID NO: 1124487 - DNA, 15 bp, Homo sapiens
tagagaaagggagaa

SEQ ID NO: 1124488 - DNA, 15 bp, Homo sapiens
ttagagaaagggaga

SEQ ID NO: 1124489 - DNA, 15 bp, Homo sapiens
attagagaaagggag

SEQ ID NO: 1124490 - DNA, 15 bp, Homo sapiens
gattagagaaaggga

SEQ ID NO: 1124491 - DNA, 15 bp, Homo sapiens
agattagagaaaggg

SEQ ID NO: 1124492 - DNA, 15 bp, Homo sapiens
aagattagagaaagg

SEQ ID NO: 1124493 - DNA, 15 bp, Homo sapiens
aaagattagagaaag

SEQ ID NO: 1124494 - DNA, 15 bp, Homo sapiens
aaaagattagagaaa

SEQ ID NO: 1124495 - DNA, 15 bp, Homo sapiens
gaaaagattagagaa

SEQ ID NO: 1124496 - DNA, 15 bp, Homo sapiens
ggaaaagattagaga

SEQ ID NO: 1124497 - DNA, 15 bp, Homo sapiens
tggaaaagattagag

SEQ ID NO: 1124498 - DNA, 15 bp, Homo sapiens
ttggaaaagattaga

SEQ ID NO: 1124499 - DNA, 15 bp, Homo sapiens
tttggaaaagattag

SEQ ID NO: 1124500 - DNA, 15 bp, Homo sapiens
atttggaaaagatta

SEQ ID NO: 1124501 - DNA, 15 bp, Homo sapiens
tatttggaaaagatt

SEQ ID NO: 1124502 - DNA, 15 bp, Homo sapiens
gtatttggaaaagat

SEQ ID NO: 1124503 - DNA, 15 bp, Homo sapiens
tgtatttggaaaaga

SEQ ID NO: 1124504 - DNA, 15 bp, Homo sapiens
ttgtatttggaaaag

SEQ ID NO: 1124505 - DNA, 15 bp, Homo sapiens
attgtatttggaaaa

SEQ ID NO: 1124506 - DNA, 15 bp, Homo sapiens
tattgtatttggaaa

SEQ ID NO: 1124507 - DNA, 15 bp, Homo sapiens
atattgtatttggaa

SEQ ID NO: 1124508 - DNA, 15 bp, Homo sapiens
tatattgtatttgga

SEQ ID NO: 1124509 - DNA, 15 bp, Homo sapiens
ttatattgtatttgg

SEQ ID NO: 1124510 - DNA, 15 bp, Homo sapiens
gttatattgtatttg

SEQ ID NO: 1124511 - DNA, 15 bp, Homo sapiens
agttatattgtattt

SEQ ID NO: 1124512 - DNA, 15 bp, Homo sapiens
tagttatattgtatt

SEQ ID NO: 1124513 - DNA, 15 bp, Homo sapiens
ttagttatattgtat

SEQ ID NO: 1124514 - DNA, 15 bp, Homo sapiens
gttagttatattgta

SEQ ID NO: 1124515 - DNA, 15 bp, Homo sapiens
tgttagttatattgt

SEQ ID NO: 1124516 - DNA, 15 bp, Homo sapiens
gtgttagttatattg

SEQ ID NO: 1124517 - DNA, 15 bp, Homo sapiens
ggtgttagttatatt

SEQ ID NO: 1124518 - DNA, 15 bp, Homo sapiens
aggtgttagttatat

SEQ ID NO: 1124519 - DNA, 15 bp, Homo sapiens
gaggtgttagttata

SEQ ID NO: 1124520 - DNA, 15 bp, Homo sapiens
ggaggtgttagttat

SEQ ID NO: 1124521 - DNA, 15 bp, Homo sapiens
gggaggtgttagtta

SEQ ID NO: 1124522 - DNA, 15 bp, Homo sapiens
cgggaggtgttagtt

SEQ ID NO: 1124523 - DNA, 15 bp, Homo sapiens
gcgggaggtgttagt

SEQ ID NO: 1124524 - DNA, 15 bp, Homo sapiens
agcgggaggtgttag

SEQ ID NO: 1124525 - DNA, 15 bp, Homo sapiens
gagcgggaggtgtta

SEQ ID NO: 1124526 - DNA, 15 bp, Homo sapiens
tgagcgggaggtgtt

SEQ ID NO: 1124527 - DNA, 15 bp, Homo sapiens
ttgagcgggaggtgt

SEQ ID NO: 1124528 - DNA, 15 bp, Homo sapiens
cttgagcgggaggtg

SEQ ID NO: 1124529 - DNA, 15 bp, Homo sapiens
ccttgagcgggaggt

SEQ ID NO: 1124530 - DNA, 15 bp, Homo sapiens
tccttgagcgggagg

SEQ ID NO: 1124531 - DNA, 15 bp, Homo sapiens
atccttgagcgggag

SEQ ID NO: 1124532 - DNA, 15 bp, Homo sapiens
tatccttgagcggga

SEQ ID NO: 1124533 - DNA, 15 bp, Homo sapiens
ctatccttgagcggg

SEQ ID NO: 1124534 - DNA, 15 bp, Homo sapiens
gctatccttgagcgg

SEQ ID NO: 1124535 - DNA, 15 bp, Homo sapiens
tgctatccttgagcg

SEQ ID NO: 1124536 - DNA, 15 bp, Homo sapiens
atgctatccttgagc

SEQ ID NO: 1124537 - DNA, 15 bp, Homo sapiens
catgctatccttgag

SEQ ID NO: 1124538 - DNA, 15 bp, Homo sapiens
acatgctatccttga

SEQ ID NO: 1124539 - DNA, 15 bp, Homo sapiens
tacatgctatccttg

SEQ ID NO: 1124540 - DNA, 15 bp, Homo sapiens
ctacatgctatcctt

SEQ ID NO: 1124541 - DNA, 15 bp, Homo sapiens
cctacatgctatcct

SEQ ID NO: 1124542 - DNA, 15 bp, Homo sapiens
ccctacatgctatcc

SEQ ID NO: 1124543 - DNA, 15 bp, Homo sapiens
gccctacatgctatc

SEQ ID NO: 1124544 - DNA, 15 bp, Homo sapiens
cgccctacatgctat

SEQ ID NO: 1124545 - DNA, 15 bp, Homo sapiens
acgccctacatgcta

SEQ ID NO: 1124546 - DNA, 15 bp, Homo sapiens
aacgccctacatgct

SEQ ID NO: 1124547 - DNA, 15 bp, Homo sapiens
gaacgccctacatgc

SEQ ID NO: 1124548 - DNA, 15 bp, Homo sapiens
tgaacgccctacatg

SEQ ID NO: 1124549 - DNA, 15 bp, Homo sapiens
gtgaacgccctacat

SEQ ID NO: 1124550 - DNA, 15 bp, Homo sapiens
agtgaacgccctaca

SEQ ID NO: 1124551 - DNA, 15 bp, Homo sapiens
cagtgaacgccctac

SEQ ID NO: 1124552 - DNA, 15 bp, Homo sapiens
tcagtgaacgcccta

SEQ ID NO: 1124553 - DNA, 15 bp, Homo sapiens
atcagtgaacgccct

SEQ ID NO: 1124554 - DNA, 15 bp, Homo sapiens
tatcagtgaacgccc

SEQ ID NO: 1124555 - DNA, 15 bp, Homo sapiens
ttatcagtgaacgcc

SEQ ID NO: 1124556 - DNA, 15 bp, Homo sapiens
gttatcagtgaacgc

SEQ ID NO: 1124557 - DNA, 15 bp, Homo sapiens
tgttatcagtgaacg

SEQ ID NO: 1124558 - DNA, 15 bp, Homo sapiens
ttgttatcagtgaac

SEQ ID NO: 1124559 - DNA, 15 bp, Homo sapiens
tttgttatcagtgaa

SEQ ID NO: 1124560 - DNA, 15 bp, Homo sapiens
ctttgttatcagtga

SEQ ID NO: 1124561 - DNA, 15 bp, Homo sapiens
gctttgttatcagtg

SEQ ID NO: 1124562 - DNA, 15 bp, Homo sapiens
tgctttgttatcagt

SEQ ID NO: 1124563 - DNA, 15 bp, Homo sapiens
ttgctttgttatcag

SEQ ID NO: 1124564 - DNA, 15 bp, Homo sapiens
cttgctttgttatca

SEQ ID NO: 1124565 - DNA, 15 bp, Homo sapiens
acttgctttgttatc

SEQ ID NO: 1124566 - DNA, 15 bp, Homo sapiens
cacttgctttgttat

SEQ ID NO: 1124567 - DNA, 15 bp, Homo sapiens
gcacttgctttgtta

SEQ ID NO: 1124568 - DNA, 15 bp, Homo sapiens
tgcacttgctttgtt

SEQ ID NO: 1124569 - DNA, 15 bp, Homo sapiens
ttgcacttgctttgt

SEQ ID NO: 1124570 - DNA, 15 bp, Homo sapiens
attgcacttgctttg

SEQ ID NO: 1124571 - DNA, 15 bp, Homo sapiens
gattgcacttgcttt

SEQ ID NO: 1124572 - DNA, 15 bp, Homo sapiens
tgattgcacttgctt

SEQ ID NO: 1124573 - DNA, 15 bp, Homo sapiens
ctgattgcacttgct

SEQ ID NO: 1124574 - DNA, 15 bp, Homo sapiens
cctgattgcacttgc

SEQ ID NO: 1124575 - DNA, 15 bp, Homo sapiens
gcctgattgcacttg

SEQ ID NO: 1124576 - DNA, 15 bp, Homo sapiens
tgcctgattgcactt

SEQ ID NO: 1124577 - DNA, 15 bp, Homo sapiens
gtgcctgattgcact

SEQ ID NO: 1124578 - DNA, 15 bp, Homo sapiens
agtgcctgattgcac

SEQ ID NO: 1124579 - DNA, 15 bp, Homo sapiens
tagtgcctgattgca

SEQ ID NO: 1124580 - DNA, 15 bp, Homo sapiens
ctagtgcctgattgc

SEQ ID NO: 1124581 - DNA, 15 bp, Homo sapiens
cctagtgcctgattg

SEQ ID NO: 1124582 - DNA, 15 bp, Homo sapiens
ccctagtgcctgatt

SEQ ID NO: 1124583 - DNA, 15 bp, Homo sapiens
cccctagtgcctgat

SEQ ID NO: 1124584 - DNA, 15 bp, Homo sapiens
acccctagtgcctga

SEQ ID NO: 1124585 - DNA, 15 bp, Homo sapiens
aacccctagtgcctg

SEQ ID NO: 1124586 - DNA, 15 bp, Homo sapiens
taacccctagtgcct

SEQ ID NO: 1124587 - DNA, 15 bp, Homo sapiens
ctaacccctagtgcc

SEQ ID NO: 1124588 - DNA, 15 bp, Homo sapiens
cctaacccctagtgc

SEQ ID NO: 1124589 - DNA, 15 bp, Homo sapiens
ccctaacccctagtg

SEQ ID NO: 1124590 - DNA, 15 bp, Homo sapiens
tccctaacccctagt

SEQ ID NO: 1124591 - DNA, 15 bp, Homo sapiens
gtccctaacccctag

SEQ ID NO: 1124592 - DNA, 15 bp, Homo sapiens
tgtccctaaccccta

SEQ ID NO: 1124593 - DNA, 15 bp, Homo sapiens
ttgtccctaacccct

SEQ ID NO: 1124594 - DNA, 15 bp, Homo sapiens
gttgtccctaacccc

SEQ ID NO: 1124595 - DNA, 15 bp, Homo sapiens
cgttgtccctaaccc

SEQ ID NO: 1124596 - DNA, 15 bp, Homo sapiens
tcgttgtccctaacc

SEQ ID NO: 1124597 - DNA, 15 bp, Homo sapiens
ttcgttgtccctaac

SEQ ID NO: 1124598 - DNA, 15 bp, Homo sapiens
gttcgttgtccctaa

SEQ ID NO: 1124599 - DNA, 15 bp, Homo sapiens
agttcgttgtcccta

SEQ ID NO: 1124600 - DNA, 15 bp, Homo sapiens
gagttcgttgtccct

SEQ ID NO: 1124601 - DNA, 15 bp, Homo sapiens
tgagttcgttgtccc

SEQ ID NO: 1124602 - DNA, 15 bp, Homo sapiens
atgagttcgttgtcc

SEQ ID NO: 1124603 - DNA, 15 bp, Homo sapiens
aatgagttcgttgtc

SEQ ID NO: 1124604 - DNA, 15 bp, Homo sapiens
aaatgagttcgttgt

SEQ ID NO: 1124605 - DNA, 15 bp, Homo sapiens
aaaatgagttcgttg

SEQ ID NO: 1124606 - DNA, 15 bp, Homo sapiens
taaaatgagttcgtt

SEQ ID NO: 1124607 - DNA, 15 bp, Homo sapiens
ataaaatgagttcgt

SEQ ID NO: 1124608 - DNA, 15 bp, Homo sapiens
aataaaatgagttcg

SEQ ID NO: 1124609 - DNA, 15 bp, Homo sapiens
gaataaaatgagttc

SEQ ID NO: 1124610 - DNA, 15 bp, Homo sapiens
ggaataaaatgagtt

SEQ ID NO: 1124611 - DNA, 15 bp, Homo sapiens
gggaataaaatgagt

SEQ ID NO: 1124612 - DNA, 15 bp, Homo sapiens
tgggaataaaatgag

SEQ ID NO: 1124613 - DNA, 15 bp, Homo sapiens
ctgggaataaaatga

SEQ ID NO: 1124614 - DNA, 15 bp, Homo sapiens
cctgggaataaaatg

SEQ ID NO: 1124615 - DNA, 15 bp, Homo sapiens
acctgggaataaaat

SEQ ID NO: 1124616 - DNA, 15 bp, Homo sapiens
cacctgggaataaaa

SEQ ID NO: 1124617 - DNA, 15 bp, Homo sapiens
ccacctgggaataaa

SEQ ID NO: 1124618 - DNA, 15 bp, Homo sapiens
cccacctgggaataa

SEQ ID NO: 1124619 - DNA, 15 bp, Homo sapiens
tcccacctgggaata

SEQ ID NO: 1124620 - DNA, 15 bp, Homo sapiens
ttcccacctgggaat

SEQ ID NO: 1124621 - DNA, 15 bp, Homo sapiens
cttcccacctgggaa

SEQ ID NO: 1124622 - DNA, 15 bp, Homo sapiens
acttcccacctggga

SEQ ID NO: 1124623 - DNA, 15 bp, Homo sapiens
cacttcccacctggg

SEQ ID NO: 1124624 - DNA, 15 bp, Homo sapiens
tcacttcccacctgg

SEQ ID NO: 1124625 - DNA, 15 bp, Homo sapiens
ctcacttcccacctg

SEQ ID NO: 1124626 - DNA, 15 bp, Homo sapiens
tctcacttcccacct

SEQ ID NO: 1124627 - DNA, 15 bp, Homo sapiens
ctctcacttcccacc

SEQ ID NO: 1124628 - DNA, 15 bp, Homo sapiens
cctctcacttcccac

SEQ ID NO: 1124629 - DNA, 15 bp, Homo sapiens
tcctctcacttccca

SEQ ID NO: 1124630 - DNA, 15 bp, Homo sapiens
ctcctctcacttccc

SEQ ID NO: 1124631 - DNA, 15 bp, Homo sapiens
actcctctcacttcc

SEQ ID NO: 1124632 - DNA, 15 bp, Homo sapiens
tactcctctcacttc

SEQ ID NO: 1124633 - DNA, 15 bp, Homo sapiens
atactcctctcactt

SEQ ID NO: 1124634 - DNA, 15 bp, Homo sapiens
aatactcctctcact

SEQ ID NO: 1124635 - DNA, 15 bp, Homo sapiens
gaatactcctctcac

SEQ ID NO: 1124636 - DNA, 15 bp, Homo sapiens
tgaatactcctctca

SEQ ID NO: 1124637 - DNA, 15 bp, Homo sapiens
gtgaatactcctctc

SEQ ID NO: 1124638 - DNA, 15 bp, Homo sapiens
ggtgaatactcctct

SEQ ID NO: 1124639 - DNA, 15 bp, Homo sapiens
tggtgaatactcctc

SEQ ID NO: 1124640 - DNA, 15 bp, Homo sapiens
atggtgaatactcct

SEQ ID NO: 1124641 - DNA, 15 bp, Homo sapiens
aatggtgaatactcc

SEQ ID NO: 1124642 - DNA, 15 bp, Homo sapiens
caatggtgaatactc

SEQ ID NO: 1124643 - DNA, 15 bp, Homo sapiens
acaatggtgaatact

SEQ ID NO: 1124644 - DNA, 15 bp, Homo sapiens
cacaatggtgaatac

SEQ ID NO: 1124645 - DNA, 15 bp, Homo sapiens
gcacaatggtgaata

SEQ ID NO: 1124646 - DNA, 15 bp, Homo sapiens
cgcacaatggtgaat

SEQ ID NO: 1124647 - DNA, 15 bp, Homo sapiens
gcgcacaatggtgaa

SEQ ID NO: 1124648 - DNA, 15 bp, Homo sapiens
ggcgcacaatggtga

SEQ ID NO: 1124649 - DNA, 15 bp, Homo sapiens
aggcgcacaatggtg

SEQ ID NO: 1124650 - DNA, 15 bp, Homo sapiens
aaggcgcacaatggt

SEQ ID NO: 1124651 - DNA, 15 bp, Homo sapiens
caaggcgcacaatgg

SEQ ID NO: 1124652 - DNA, 15 bp, Homo sapiens
gcaaggcgcacaatg

SEQ ID NO: 1124653 - DNA, 15 bp, Homo sapiens
agcaaggcgcacaat

SEQ ID NO: 1124654 - DNA, 15 bp, Homo sapiens
cagcaaggcgcacaa

SEQ ID NO: 1124655 - DNA, 15 bp, Homo sapiens
tcagcaaggcgcaca

SEQ ID NO: 1124656 - DNA, 15 bp, Homo sapiens
ttcagcaaggcgcac

SEQ ID NO: 1124657 - DNA, 15 bp, Homo sapiens
attcagcaaggcgca

SEQ ID NO: 1124658 - DNA, 15 bp, Homo sapiens
tattcagcaaggcgc

SEQ ID NO: 1124659 - DNA, 15 bp, Homo sapiens
atattcagcaaggcg

SEQ ID NO: 1124660 - DNA, 15 bp, Homo sapiens
catattcagcaaggc

SEQ ID NO: 1124661 - DNA, 15 bp, Homo sapiens
acatattcagcaagg

SEQ ID NO: 1124662 - DNA, 15 bp, Homo sapiens
cacatattcagcaag

SEQ ID NO: 1124663 - DNA, 15 bp, Homo sapiens
ccacatattcagcaa

SEQ ID NO: 1124664 - DNA, 15 bp, Homo sapiens
accacatattcagca

SEQ ID NO: 1124665 - DNA, 15 bp, Homo sapiens
caccacatattcagc

SEQ ID NO: 1124666 - DNA, 15 bp, Homo sapiens
acaccacatattcag

SEQ ID NO: 1124667 - DNA, 15 bp, Homo sapiens
tacaccacatattca

SEQ ID NO: 1124668 - DNA, 15 bp, Homo sapiens
gtacaccacatattc

SEQ ID NO: 1124669 - DNA, 15 bp, Homo sapiens
ggtacaccacatatt

SEQ ID NO: 1124670 - DNA, 15 bp, Homo sapiens
tggtacaccacatat

SEQ ID NO: 1124671 - DNA, 15 bp, Homo sapiens
ctggtacaccacata

SEQ ID NO: 1124672 - DNA, 15 bp, Homo sapiens
gctggtacaccacat

SEQ ID NO: 1124673 - DNA, 15 bp, Homo sapiens
ggctggtacaccaca

SEQ ID NO: 1124674 - DNA, 15 bp, Homo sapiens
tggctggtacaccac

SEQ ID NO: 1124675 - DNA, 15 bp, Homo sapiens
ctggctggtacacca

SEQ ID NO: 1124676 - DNA, 15 bp, Homo sapiens
gctggctggtacacc

SEQ ID NO: 1124677 - DNA, 15 bp, Homo sapiens
agctggctggtacac

SEQ ID NO: 1124678 - DNA, 15 bp, Homo sapiens
cagctggctggtaca

SEQ ID NO: 1124679 - DNA, 15 bp, Homo sapiens
acagctggctggtac

SEQ ID NO: 1124680 - DNA, 15 bp, Homo sapiens
gacagctggctggta

SEQ ID NO: 1124681 - DNA, 15 bp, Homo sapiens
ggacagctggctggt

SEQ ID NO: 1124682 - DNA, 15 bp, Homo sapiens
gggacagctggctgg

SEQ ID NO: 1124683 - DNA, 15 bp, Homo sapiens
ggggacagctggctg

SEQ ID NO: 1124684 - DNA, 15 bp, Homo sapiens
tggggacagctggct

SEQ ID NO: 1124685 - DNA, 15 bp, Homo sapiens
atggggacagctggc

SEQ ID NO: 1124686 - DNA, 15 bp, Homo sapiens
catggggacagctgg

SEQ ID NO: 1124687 - DNA, 15 bp, Homo sapiens
gcatggggacagctg

SEQ ID NO: 1124688 - DNA, 15 bp, Homo sapiens
ggcatggggacagct

SEQ ID NO: 1124689 - DNA, 15 bp, Homo sapiens
tggcatggggacagc

SEQ ID NO: 1124690 - DNA, 15 bp, Homo sapiens
ttggcatggggacag

SEQ ID NO: 1124691 - DNA, 15 bp, Homo sapiens
tttggcatggggaca

SEQ ID NO: 1124692 - DNA, 15 bp, Homo sapiens
ctttggcatggggac

SEQ ID NO: 1124693 - DNA, 15 bp, Homo sapiens
gctttggcatgggga

SEQ ID NO: 1124694 - DNA, 15 bp, Homo sapiens
ggctttggcatgggg

SEQ ID NO: 1124695 - DNA, 15 bp, Homo sapiens
aggctttggcatggg

SEQ ID NO: 1124696 - DNA, 15 bp, Homo sapiens
caggctttggcatgg

SEQ ID NO: 1124697 - DNA, 15 bp, Homo sapiens
gcaggctttggcatg

SEQ ID NO: 1124698 - DNA, 15 bp, Homo sapiens
ttgcaggctttggca

SEQ ID NO: 1124699 - DNA, 15 bp, Homo sapiens
cttgcaggctttggc

SEQ ID NO: 1124700 - DNA, 15 bp, Homo sapiens
tcttgcaggctttgg

SEQ ID NO: 1124701 - DNA, 15 bp, Homo sapiens
atcttgcaggctttg

SEQ ID NO: 1124702 - DNA, 15 bp, Homo sapiens
tatcttgcaggcttt

SEQ ID NO: 1124703 - DNA, 15 bp, Homo sapiens
gtatcttgcaggctt

SEQ ID NO: 1124704 - DNA, 15 bp, Homo sapiens
tgtatcttgcaggct

SEQ ID NO: 1124705 - DNA, 15 bp, Homo sapiens
ctgtatcttgcaggc

SEQ ID NO: 1124706 - DNA, 15 bp, Homo sapiens
cctgtatcttgcagg

SEQ ID NO: 1124707 - DNA, 15 bp, Homo sapiens
tcctgtatcttgcag

SEQ ID NO: 1124708 - DNA, 15 bp, Homo sapiens
ttcctgtatcttgca

SEQ ID NO: 1124709 - DNA, 15 bp, Homo sapiens
cttcctgtatcttgc

SEQ ID NO: 1124710 - DNA, 15 bp, Homo sapiens
gcttcctgtatcttg

SEQ ID NO: 1124711 - DNA, 15 bp, Homo sapiens
agcttcctgtatctt

SEQ ID NO: 1124712 - DNA, 15 bp, Homo sapiens
cagcttcctgtatct

SEQ ID NO: 1124713 - DNA, 15 bp, Homo sapiens
gcagcttcctgtatc

SEQ ID NO: 1124714 - DNA, 15 bp, Homo sapiens
ggcagcttcctgtat

SEQ ID NO: 1124715 - DNA, 15 bp, Homo sapiens
tggcagcttcctgta

SEQ ID NO: 1124716 - DNA, 15 bp, Homo sapiens
ctggcagcttcctgt

SEQ ID NO: 1124717 - DNA, 15 bp, Homo sapiens
cctggcagcttcctg

SEQ ID NO: 1124718 - DNA, 15 bp, Homo sapiens
gcctggcagcttcct

SEQ ID NO: 1124719 - DNA, 15 bp, Homo sapiens
ggcctggcagcttcc

SEQ ID NO: 1124720 - DNA, 15 bp, Homo sapiens
tggcctggcagcttc

SEQ ID NO: 1124721 - DNA, 15 bp, Homo sapiens
gtggcctggcagctt

SEQ ID NO: 1124722 - DNA, 15 bp, Homo sapiens
ggtggcctggcagct

SEQ ID NO: 1124723 - DNA, 15 bp, Homo sapiens
tggtggcctggcagc

SEQ ID NO: 1124724 - DNA, 15 bp, Homo sapiens
ctggtggcctggcag

SEQ ID NO: 1124725 - DNA, 15 bp, Homo sapiens
actggtggcctggca

SEQ ID NO: 1124726 - DNA, 15 bp, Homo sapiens
aactggtggcctggc

SEQ ID NO: 1124727 - DNA, 15 bp, Homo sapiens
caactggtggcctgg

SEQ ID NO: 1124728 - DNA, 15 bp, Homo sapiens
ccaactggtggcctg

SEQ ID NO: 1124729 - DNA, 15 bp, Homo sapiens
accaactggtggcct

SEQ ID NO: 1124730 - DNA, 15 bp, Homo sapiens
taccaactggtggcc

SEQ ID NO: 1124731 - DNA, 15 bp, Homo sapiens
ttaccaactggtggc

SEQ ID NO: 1124732 - DNA, 15 bp, Homo sapiens
cttaccaactggtgg

SEQ ID NO: 1124733 - DNA, 15 bp, Homo sapiens
acttaccaactggtg

SEQ ID NO: 1124734 - DNA, 15 bp, Homo sapiens
gacttaccaactggt

SEQ ID NO: 1124735 - DNA, 15 bp, Homo sapiens
tgacttaccaactgg

SEQ ID NO: 1124736 - DNA, 15 bp, Homo sapiens
ctgacttaccaactg

SEQ ID NO: 1124737 - DNA, 15 bp, Homo sapiens
actgacttaccaact

SEQ ID NO: 1124738 - DNA, 15 bp, Homo sapiens
cactgacttaccaac

SEQ ID NO: 1124739 - DNA, 15 bp, Homo sapiens
ccactgacttaccaa

SEQ ID NO: 1124740 - DNA, 15 bp, Homo sapiens
tccactgacttacca

SEQ ID NO: 1124741 - DNA, 15 bp, Homo sapiens
atccactgacttacc

SEQ ID NO: 1124742 - DNA, 15 bp, Homo sapiens
catccactgacttac

SEQ ID NO: 1124743 - DNA, 15 bp, Homo sapiens
gcatccactgactta

SEQ ID NO: 1124744 - DNA, 15 bp, Homo sapiens
tgcatccactgactt

SEQ ID NO: 1124745 - DNA, 15 bp, Homo sapiens
ctgcatccactgact

SEQ ID NO: 1124746 - DNA, 15 bp, Homo sapiens
cctgcatccactgac

SEQ ID NO: 1124747 - DNA, 15 bp, Homo sapiens
tcctgcatccactga

SEQ ID NO: 1124748 - DNA, 15 bp, Homo sapiens
ttcctgcatccactg

SEQ ID NO: 1124749 - DNA, 15 bp, Homo sapiens
tttcctgcatccact

SEQ ID NO: 1124750 - DNA, 15 bp, Homo sapiens
atttcctgcatccac

SEQ ID NO: 1124751 - DNA, 15 bp, Homo sapiens
aatttcctgcatcca

SEQ ID NO: 1124752 - DNA, 15 bp, Homo sapiens
taatttcctgcatcc

SEQ ID NO: 1124753 - DNA, 15 bp, Homo sapiens
ataatttcctgcatc

SEQ ID NO: 1124754 - DNA, 15 bp, Homo sapiens
tataatttcctgcat

SEQ ID NO: 1124755 - DNA, 15 bp, Homo sapiens
gtataatttcctgca

SEQ ID NO: 1124756 - DNA, 15 bp, Homo sapiens
tgtataatttcctgc

SEQ ID NO: 1124757 - DNA, 15 bp, Homo sapiens
atgtataatttcctg

SEQ ID NO: 1124758 - DNA, 15 bp, Homo sapiens
aatgtataatttcct

SEQ ID NO: 1124759 - DNA, 15 bp, Homo sapiens
aaatgtataatttcc

SEQ ID NO: 1124760 - DNA, 15 bp, Homo sapiens
taaatgtataatttc

SEQ ID NO: 1124761 - DNA, 15 bp, Homo sapiens
gtaaatgtataattt

SEQ ID NO: 1124762 - DNA, 15 bp, Homo sapiens
tgtaaatgtataatt

SEQ ID NO: 1124763 - DNA, 15 bp, Homo sapiens
atgtaaatgtataat

SEQ ID NO: 1124764 - DNA, 15 bp, Homo sapiens
catgtaaatgtataa

SEQ ID NO: 1124765 - DNA, 15 bp, Homo sapiens
acatgtaaatgtata

SEQ ID NO: 1124766 - DNA, 15 bp, Homo sapiens
tacatgtaaatgtat

SEQ ID NO: 1124767 - DNA, 15 bp, Homo sapiens
atacatgtaaatgta

SEQ ID NO: 1124768 - DNA, 15 bp, Homo sapiens
catacatgtaaatgt

SEQ ID NO: 1124769 - DNA, 15 bp, Homo sapiens
acatacatgtaaatg

SEQ ID NO: 1124770 - DNA, 15 bp, Homo sapiens
tacatacatgtaaat

SEQ ID NO: 1124771 - DNA, 15 bp, Homo sapiens
ttacatacatgtaaa

SEQ ID NO: 1124772 - DNA, 15 bp, Homo sapiens
tttacatacatgtaa

SEQ ID NO: 1124773 - DNA, 15 bp, Homo sapiens
ttttacatacatgta

SEQ ID NO: 1124774 - DNA, 15 bp, Homo sapiens
attttacatacatgt

SEQ ID NO: 1124775 - DNA, 15 bp, Homo sapiens
tattttacatacatg

SEQ ID NO: 1124776 - DNA, 15 bp, Homo sapiens
atattttacatacat

SEQ ID NO: 1124777 - DNA, 15 bp, Homo sapiens
tatattttacataca

SEQ ID NO: 1124778 - DNA, 15 bp, Homo sapiens
atatattttacatac

SEQ ID NO: 1124779 - DNA, 15 bp, Homo sapiens
aatatattttacata

SEQ ID NO: 1124780 - DNA, 15 bp, Homo sapiens
gaatatattttacat

SEQ ID NO: 1124781 - DNA, 15 bp, Homo sapiens
ggaatatattttaca

SEQ ID NO: 1124782 - DNA, 15 bp, Homo sapiens
cggaatatattttac

SEQ ID NO: 1124783 - DNA, 15 bp, Homo sapiens
ccggaatatatttta

SEQ ID NO: 1124784 - DNA, 15 bp, Homo sapiens
tccggaatatatttt

SEQ ID NO: 1124785 - DNA, 15 bp, Homo sapiens
ttccggaatatattt

SEQ ID NO: 1124786 - DNA, 15 bp, Homo sapiens
tttccggaatatatt

SEQ ID NO: 1124787 - DNA, 15 bp, Homo sapiens
atttccggaatatat

SEQ ID NO: 1124788 - DNA, 15 bp, Homo sapiens
tatttccggaatata

SEQ ID NO: 1124789 - DNA, 15 bp, Homo sapiens
ttatttccggaatat

SEQ ID NO: 1124790 - DNA, 15 bp, Homo sapiens
tttatttccggaata

SEQ ID NO: 1124791 - DNA, 15 bp, Homo sapiens
ctttatttccggaat

SEQ ID NO: 1124792 - DNA, 15 bp, Homo sapiens
cctttatttccggaa

SEQ ID NO: 1124793 - DNA, 15 bp, Homo sapiens
gcctttatttccgga

SEQ ID NO: 1124794 - DNA, 15 bp, Homo sapiens
tgcctttatttccgg

SEQ ID NO: 1124795 - DNA, 15 bp, Homo sapiens
ctgcctttatttccg

SEQ ID NO: 1124796 - DNA, 15 bp, Homo sapiens
tctgcctttatttcc

SEQ ID NO: 1124797 - DNA, 15 bp, Homo sapiens
ctctgcctttatttc

SEQ ID NO: 1124798 - DNA, 15 bp, Homo sapiens
cctctgcctttattt

SEQ ID NO: 1124799 - DNA, 15 bp, Homo sapiens
tcctctgcctttatt

SEQ ID NO: 1124800 - DNA, 15 bp, Homo sapiens
ctcctctgcctttat

SEQ ID NO: 1124801 - DNA, 15 bp, Homo sapiens
actcctctgccttta

SEQ ID NO: 1124802 - DNA, 15 bp, Homo sapiens
gactcctctgccttt

SEQ ID NO: 1124803 - DNA, 15 bp, Homo sapiens
ggactcctctgcctt

SEQ ID NO: 1124804 - DNA, 15 bp, Homo sapiens
aggactcctctgcct

SEQ ID NO: 1124805 - DNA, 15 bp, Homo sapiens
caggactcctctgcc

SEQ ID NO: 1124806 - DNA, 15 bp, Homo sapiens
gcaggactcctctgc

SEQ ID NO: 1124807 - DNA, 15 bp, Homo sapiens
ggcaggactcctctg

SEQ ID NO: 1124808 - DNA, 15 bp, Homo sapiens
tggcaggactcctct

SEQ ID NO: 1124809 - DNA, 15 bp, Homo sapiens
atggcaggactcctc

SEQ ID NO: 1124810 - DNA, 15 bp, Homo sapiens
tatggcaggactcct

SEQ ID NO: 1124811 - DNA, 15 bp, Homo sapiens
ctatggcaggactcc

SEQ ID NO: 1124812 - DNA, 15 bp, Homo sapiens
tctatggcaggactc

SEQ ID NO: 1124813 - DNA, 15 bp, Homo sapiens
ttctatggcaggact

SEQ ID NO: 1124814 - DNA, 15 bp, Homo sapiens
gttctatggcaggac

SEQ ID NO: 1124815 - DNA, 15 bp, Homo sapiens
tgttctatggcagga

SEQ ID NO: 1124816 - DNA, 15 bp, Homo sapiens
atgttctatggcagg

SEQ ID NO: 1124817 - DNA, 15 bp, Homo sapiens
tatgttctatggcag

SEQ ID NO: 1124818 - DNA, 15 bp, Homo sapiens
atatgttctatggca

SEQ ID NO: 1124819 - DNA, 15 bp, Homo sapiens
tatatgttctatggc

SEQ ID NO: 1124820 - DNA, 15 bp, Homo sapiens
atatatgttctatgg

SEQ ID NO: 1124821 - DNA, 15 bp, Homo sapiens
gatatatgttctatg

SEQ ID NO: 1124822 - DNA, 15 bp, Homo sapiens
cgatatatgttctat

SEQ ID NO: 1124823 - DNA, 15 bp, Homo sapiens
tcgatatatgttcta

SEQ ID NO: 1124824 - DNA, 15 bp, Homo sapiens
ctcgatatatgttct

SEQ ID NO: 1124825 - DNA, 15 bp, Homo sapiens
actcgatatatgttc

SEQ ID NO: 1124826 - DNA, 15 bp, Homo sapiens
tactcgatatatgtt

SEQ ID NO: 1124827 - DNA, 15 bp, Homo sapiens
ctactcgatatatgt

SEQ ID NO: 1124828 - DNA, 15 bp, Homo sapiens
actactcgatatatg

SEQ ID NO: 1124829 - DNA, 15 bp, Homo sapiens
gactactcgatatat

SEQ ID NO: 1124830 - DNA, 15 bp, Homo sapiens
agactactcgatata

SEQ ID NO: 1124831 - DNA, 15 bp, Homo sapiens
cagactactcgatat

SEQ ID NO: 1124832 - DNA, 15 bp, Homo sapiens
tcagactactcgata

SEQ ID NO: 1124833 - DNA, 15 bp, Homo sapiens
ttcagactactcgat

SEQ ID NO: 1124834 - DNA, 15 bp, Homo sapiens
attcagactactcga

SEQ ID NO: 1124835 - DNA, 15 bp, Homo sapiens
tattcagactactcg

SEQ ID NO: 1124836 - DNA, 15 bp, Homo sapiens
gtattcagactactc

SEQ ID NO: 1124837 - DNA, 15 bp, Homo sapiens
agtattcagactact

SEQ ID NO: 1124838 - DNA, 15 bp, Homo sapiens
aagtattcagactac

SEQ ID NO: 1124839 - DNA, 15 bp, Homo sapiens
aaagtattcagacta

SEQ ID NO: 1124840 - DNA, 15 bp, Homo sapiens
aaaagtattcagact

SEQ ID NO: 1124841 - DNA, 15 bp, Homo sapiens
caaaagtattcagac

SEQ ID NO: 1124842 - DNA, 15 bp, Homo sapiens
ccaaaagtattcaga

SEQ ID NO: 1124843 - DNA, 15 bp, Homo sapiens
accaaaagtattcag

SEQ ID NO: 1124844 - DNA, 15 bp, Homo sapiens
taccaaaagtattca

SEQ ID NO: 1124845 - DNA, 15 bp, Homo sapiens
ataccaaaagtattc

SEQ ID NO: 1124846 - DNA, 15 bp, Homo sapiens
tataccaaaagtatt

SEQ ID NO: 1124847 - DNA, 15 bp, Homo sapiens
ttataccaaaagtat

SEQ ID NO: 1124848 - DNA, 15 bp, Homo sapiens
gttataccaaaagta

SEQ ID NO: 1124849 - DNA, 15 bp, Homo sapiens
tgttataccaaaagt

SEQ ID NO: 1124850 - DNA, 15 bp, Homo sapiens
ctgttataccaaaag

SEQ ID NO: 1124851 - DNA, 15 bp, Homo sapiens
actgttataccaaaa

SEQ ID NO: 1124852 - DNA, 15 bp, Homo sapiens
aactgttataccaaa

SEQ ID NO: 1124853 - DNA, 15 bp, Homo sapiens
taactgttataccaa

SEQ ID NO: 1124854 - DNA, 15 bp, Homo sapiens
ataactgttatacca

SEQ ID NO: 1124855 - DNA, 15 bp, Homo sapiens
aataactgttatacc

SEQ ID NO: 1124856 - DNA, 15 bp, Homo sapiens
gaataactgttatac

SEQ ID NO: 1124857 - DNA, 15 bp, Homo sapiens
tgaataactgttata

SEQ ID NO: 1124858 - DNA, 15 bp, Homo sapiens
atgaataactgttat

SEQ ID NO: 1124859 - DNA, 15 bp, Homo sapiens
aatgaataactgtta

SEQ ID NO: 1124860 - DNA, 15 bp, Homo sapiens
taatgaataactgtt

SEQ ID NO: 1124861 - DNA, 15 bp, Homo sapiens
ataatgaataactgt

SEQ ID NO: 1124862 - DNA, 15 bp, Homo sapiens
tataatgaataactg

SEQ ID NO: 1124863 - DNA, 15 bp, Homo sapiens
gtataatgaataact

SEQ ID NO: 1124864 - DNA, 15 bp, Homo sapiens
tgtataatgaataac

SEQ ID NO: 1124865 - DNA, 15 bp, Homo sapiens
ttgtataatgaataa

SEQ ID NO: 1124866 - DNA, 15 bp, Homo sapiens
attgtataatgaata

SEQ ID NO: 1124867 - DNA, 15 bp, Homo sapiens
cattgtataatgaat

SEQ ID NO: 1124868 - DNA, 15 bp, Homo sapiens
acattgtataatgaa

SEQ ID NO: 1124869 - DNA, 15 bp, Homo sapiens
cacattgtataatga

SEQ ID NO: 1124870 - DNA, 15 bp, Homo sapiens
acacattgtataatg

SEQ ID NO: 1124871 - DNA, 15 bp, Homo sapiens
tacacattgtataat

SEQ ID NO: 1124872 - DNA, 15 bp, Homo sapiens
atacacattgtataa

SEQ ID NO: 1124873 - DNA, 15 bp, Homo sapiens
gatacacattgtata

SEQ ID NO: 1124874 - DNA, 15 bp, Homo sapiens
agatacacattgtat

SEQ ID NO: 1124875 - DNA, 15 bp, Homo sapiens
tagatacacattgta

SEQ ID NO: 1124876 - DNA, 15 bp, Homo sapiens
gtagatacacattgt

SEQ ID NO: 1124877 - DNA, 15 bp, Homo sapiens
tgtagatacacattg

SEQ ID NO: 1124878 - DNA, 15 bp, Homo sapiens
ttgtagatacacatt

SEQ ID NO: 1124879 - DNA, 15 bp, Homo sapiens
gttgtagatacacat

SEQ ID NO: 1124880 - DNA, 15 bp, Homo sapiens
agttgtagatacaca

SEQ ID NO: 1124881 - DNA, 15 bp, Homo sapiens
gagttgtagatacac

SEQ ID NO: 1124882 - DNA, 15 bp, Homo sapiens
tgagttgtagataca

SEQ ID NO: 1124883 - DNA, 15 bp, Homo sapiens
atgagttgtagatac

SEQ ID NO: 1124884 - DNA, 15 bp, Homo sapiens
catgagttgtagata

SEQ ID NO: 1124885 - DNA, 15 bp, Homo sapiens
acatgagttgtagat

SEQ ID NO: 1124886 - DNA, 15 bp, Homo sapiens
aacatgagttgtaga

SEQ ID NO: 1124887 - DNA, 15 bp, Homo sapiens
aaacatgagttgtag

SEQ ID NO: 1124888 - DNA, 15 bp, Homo sapiens
aaaacatgagttgta

SEQ ID NO: 1124889 - DNA, 15 bp, Homo sapiens
aaaaacatgagttgt

SEQ ID NO: 1124890 - DNA, 15 bp, Homo sapiens
taaaaacatgagttg

SEQ ID NO: 1124891 - DNA, 15 bp, Homo sapiens
ataaaaacatgagtt

SEQ ID NO: 1124892 - DNA, 15 bp, Homo sapiens
aataaaaacatgagt

SEQ ID NO: 1124893 - DNA, 15 bp, Homo sapiens
aaataaaaacatgag

SEQ ID NO: 1124894 - DNA, 15 bp, Homo sapiens
aaaataaaaacatga

SEQ ID NO: 1124895 - DNA, 15 bp, Homo sapiens
aaaaataaaaacatg

SEQ ID NO: 1124896 - DNA, 15 bp, Homo sapiens
aaaaaataaaaacat

SEQ ID NO: 1124897 - DNA, 15 bp, Homo sapiens
aaaaaaataaaaaca

SEQ ID NO: 1124898 - DNA, 15 bp, Homo sapiens
taaaaaaataaaaac

SEQ ID NO: 1124899 - DNA, 15 bp, Homo sapiens
ataaaaaaataaaaa

SEQ ID NO: 1124900 - DNA, 15 bp, Homo sapiens
aataaaaaaataaaa

SEQ ID NO: 1124901 - DNA, 15 bp, Homo sapiens
aaataaaaaaataaa

SEQ ID NO: 1124902 - DNA, 15 bp, Homo sapiens
aaaataaaaaaataa

SEQ ID NO: 1124903 - DNA, 15 bp, Homo sapiens
aaaaataaaaaaata

SEQ ID NO: 1124904 - DNA, 15 bp, Homo sapiens
ataaaaataaaaaaa

SEQ ID NO: 1124905 - DNA, 15 bp, Homo sapiens
aataaaaataaaaaa

SEQ ID NO: 1124906 - DNA, 15 bp, Homo sapiens
aaaaaaaataaaaat

SEQ ID NO: 1124907 - DNA, 15 bp, Homo sapiens
aaaaaaaaataaaaa

SEQ ID NO: 1124908 - DNA, 15 bp, Homo sapiens
gaaaaaaaaataaaa

SEQ ID NO: 1124909 - DNA, 15 bp, Homo sapiens
agaaaaaaaaataaa

SEQ ID NO: 1124910 - DNA, 15 bp, Homo sapiens
cagaaaaaaaaataa

SEQ ID NO: 1124911 - DNA, 15 bp, Homo sapiens
tcagaaaaaaaaata

SEQ ID NO: 1124912 - DNA, 15 bp, Homo sapiens
ctcagaaaaaaaaat

SEQ ID NO: 1124913 - DNA, 15 bp, Homo sapiens
tctcagaaaaaaaaa

SEQ ID NO: 1124914 - DNA, 15 bp, Homo sapiens
atctcagaaaaaaaa

SEQ ID NO: 1124915 - DNA, 15 bp, Homo sapiens
catctcagaaaaaaa

SEQ ID NO: 1124916 - DNA, 15 bp, Homo sapiens
ccatctcagaaaaaa

SEQ ID NO: 1124917 - DNA, 15 bp, Homo sapiens
cccatctcagaaaaa

SEQ ID NO: 1124918 - DNA, 15 bp, Homo sapiens
ccccatctcagaaaa

SEQ ID NO: 1124919 - DNA, 15 bp, Homo sapiens
accccatctcagaaa

SEQ ID NO: 1124920 - DNA, 15 bp, Homo sapiens
aaccccatctcagaa

SEQ ID NO: 1124921 - DNA, 15 bp, Homo sapiens
aaaccccatctcaga

SEQ ID NO: 1124922 - DNA, 15 bp, Homo sapiens
gaaaccccatctcag

SEQ ID NO: 1124923 - DNA, 15 bp, Homo sapiens
gagtgaaaccccatc

SEQ ID NO: 1124924 - DNA, 15 bp, Homo sapiens
agagtgaaaccccat

SEQ ID NO: 1124925 - DNA, 15 bp, Homo sapiens
gagagtgaaacccca

SEQ ID NO: 1124926 - DNA, 15 bp, Homo sapiens
ggagagtgaaacccc

SEQ ID NO: 1124927 - DNA, 15 bp, Homo sapiens
tggagagtgaaaccc

SEQ ID NO: 1124928 - DNA, 15 bp, Homo sapiens
gtggagagtgaaacc

SEQ ID NO: 1124929 - DNA, 15 bp, Homo sapiens
ggtggagagtgaaac

SEQ ID NO: 1124930 - DNA, 15 bp, Homo sapiens
gggtggagagtgaaa

SEQ ID NO: 1124931 - DNA, 15 bp, Homo sapiens
tgggtggagagtgaa

SEQ ID NO: 1124932 - DNA, 15 bp, Homo sapiens
ctgggtggagagtga

SEQ ID NO: 1124933 - DNA, 15 bp, Homo sapiens
cctgggtggagagtg

SEQ ID NO: 1124934 - DNA, 15 bp, Homo sapiens
gcctgggtggagagt

SEQ ID NO: 1124935 - DNA, 15 bp, Homo sapiens
agcctgggtggagag

SEQ ID NO: 1124936 - DNA, 15 bp, Homo sapiens
cagcctgggtggaga

SEQ ID NO: 1124937 - DNA, 15 bp, Homo sapiens
ccagcctgggtggag

SEQ ID NO: 1124938 - DNA, 15 bp, Homo sapiens
tccagcctgggtgga

SEQ ID NO: 1124939 - DNA, 15 bp, Homo sapiens
ctccagcctgggtgg

SEQ ID NO: 1124940 - DNA, 15 bp, Homo sapiens
ataccattgcactcc

SEQ ID NO: 1124941 - DNA, 15 bp, Homo sapiens
gataccattgcactc

SEQ ID NO: 1124942 - DNA, 15 bp, Homo sapiens
tgataccattgcact

SEQ ID NO: 1124943 - DNA, 15 bp, Homo sapiens
atgataccattgcac

SEQ ID NO: 1124944 - DNA, 15 bp, Homo sapiens
gatgataccattgca

SEQ ID NO: 1124945 - DNA, 15 bp, Homo sapiens
agatgataccattgc

SEQ ID NO: 1124946 - DNA, 15 bp, Homo sapiens
gagatgataccattg

SEQ ID NO: 1124947 - DNA, 15 bp, Homo sapiens
cgagatgataccatt

SEQ ID NO: 1124948 - DNA, 15 bp, Homo sapiens
tcgagatgataccat

SEQ ID NO: 1124949 - DNA, 15 bp, Homo sapiens
gtcgagatgatacca

SEQ ID NO: 1124950 - DNA, 15 bp, Homo sapiens
agtcgagatgatacc

SEQ ID NO: 1124951 - DNA, 15 bp, Homo sapiens
gagtcgagatgatac

SEQ ID NO: 1124952 - DNA, 15 bp, Homo sapiens
tgagtcgagatgata

SEQ ID NO: 1124953 - DNA, 15 bp, Homo sapiens
gtgagtcgagatgat

SEQ ID NO: 1124954 - DNA, 15 bp, Homo sapiens
agtgagtcgagatga

SEQ ID NO: 1124955 - DNA, 15 bp, Homo sapiens
cagtgagtcgagatg

SEQ ID NO: 1124956 - DNA, 15 bp, Homo sapiens
gcagtgagtcgagat

SEQ ID NO: 1124957 - DNA, 15 bp, Homo sapiens
tgcagtgagtcgaga

SEQ ID NO: 1124958 - DNA, 15 bp, Homo sapiens
ttgcagtgagtcgag

SEQ ID NO: 1124959 - DNA, 15 bp, Homo sapiens
gttgcagtgagtcga

SEQ ID NO: 1124960 - DNA, 15 bp, Homo sapiens
ggttgcagtgagtcg

SEQ ID NO: 1124961 - DNA, 15 bp, Homo sapiens
aacttgaacccagga

SEQ ID NO: 1124962 - DNA, 15 bp, Homo sapiens
taacttgaacccagg

SEQ ID NO: 1124963 - DNA, 15 bp, Homo sapiens
ataacttgaacccag

SEQ ID NO: 1124964 - DNA, 15 bp, Homo sapiens
aataacttgaaccca

SEQ ID NO: 1124965 - DNA, 15 bp, Homo sapiens
gaataacttgaaccc

SEQ ID NO: 1124966 - DNA, 15 bp, Homo sapiens
agaataacttgaacc

SEQ ID NO: 1124967 - DNA, 15 bp, Homo sapiens
gagaataacttgaac

SEQ ID NO: 1124968 - DNA, 15 bp, Homo sapiens
ggagaataacttgaa

SEQ ID NO: 1124969 - DNA, 15 bp, Homo sapiens
aggagaataacttga

SEQ ID NO: 1124970 - DNA, 15 bp, Homo sapiens
caggagaataacttg

SEQ ID NO: 1124971 - DNA, 15 bp, Homo sapiens
acaggagaataactt

SEQ ID NO: 1124972 - DNA, 15 bp, Homo sapiens
gacaggagaataact

SEQ ID NO: 1124973 - DNA, 15 bp, Homo sapiens
agacaggagaataac

SEQ ID NO: 1124974 - DNA, 15 bp, Homo sapiens
gagacaggagaataa

SEQ ID NO: 1124975 - DNA, 15 bp, Homo sapiens
tgagacaggagaata

SEQ ID NO: 1124976 - DNA, 15 bp, Homo sapiens
atctcagctactcag

SEQ ID NO: 1124977 - DNA, 15 bp, Homo sapiens
aatctcagctactca

SEQ ID NO: 1124978 - DNA, 15 bp, Homo sapiens
gggcacctgtaatct

SEQ ID NO: 1124979 - DNA, 15 bp, Homo sapiens
gcgggcacctgtaat

SEQ ID NO: 1124980 - DNA, 15 bp, Homo sapiens
ggcgggcacctgtaa

SEQ ID NO: 1124981 - DNA, 15 bp, Homo sapiens
actgggcgtggtggc

SEQ ID NO: 1124982 - DNA, 15 bp, Homo sapiens
aactgggcgtggtgg

SEQ ID NO: 1124983 - DNA, 15 bp, Homo sapiens
taactgggcgtggtg

SEQ ID NO: 1124984 - DNA, 15 bp, Homo sapiens
ttaactgggcgtggt

SEQ ID NO: 1124985 - DNA, 15 bp, Homo sapiens
attaactgggcgtgg

SEQ ID NO: 1124986 - DNA, 15 bp, Homo sapiens
aattaactgggcgtg

SEQ ID NO: 1124987 - DNA, 15 bp, Homo sapiens
aaattaactgggcgt

SEQ ID NO: 1124988 - DNA, 15 bp, Homo sapiens
aaaattaactgggcg

SEQ ID NO: 1124989 - DNA, 15 bp, Homo sapiens
gaaaattaactgggc

SEQ ID NO: 1124990 - DNA, 15 bp, Homo sapiens
tgaaaattaactggg

SEQ ID NO: 1124991 - DNA, 15 bp, Homo sapiens
atgaaaattaactgg

SEQ ID NO: 1124992 - DNA, 15 bp, Homo sapiens
tatgaaaattaactg

SEQ ID NO: 1124993 - DNA, 15 bp, Homo sapiens
atatgaaaattaact

SEQ ID NO: 1124994 - DNA, 15 bp, Homo sapiens
aatatgaaaattaac

SEQ ID NO: 1124995 - DNA, 15 bp, Homo sapiens
aaatatgaaaattaa

SEQ ID NO: 1124996 - DNA, 15 bp, Homo sapiens
ctactaaaaatatga

SEQ ID NO: 1124997 - DNA, 15 bp, Homo sapiens
tctactaaaaatatg

SEQ ID NO: 1124998 - DNA, 15 bp, Homo sapiens
tgggtggatcatctg

SEQ ID NO: 1124999 - DNA, 15 bp, Homo sapiens
gtgggtggatcatct

SEQ ID NO: 1125000 - DNA, 15 bp, Homo sapiens
aggtgggtggatcat

SEQ ID NO: 1125001 - DNA, 15 bp, Homo sapiens
ggccgaggtgggtgg

SEQ ID NO: 1125002 - DNA, 15 bp, Homo sapiens
aggccgaggtgggtg

SEQ ID NO: 1125003 - DNA, 15 bp, Homo sapiens
gaggccgaggtgggt

SEQ ID NO: 1125004 - DNA, 15 bp, Homo sapiens
tcctataatcccagc

SEQ ID NO: 1125005 - DNA, 15 bp, Homo sapiens
ctcctataatcccag

SEQ ID NO: 1125006 - DNA, 15 bp, Homo sapiens
actcctataatccca

SEQ ID NO: 1125007 - DNA, 15 bp, Homo sapiens
cactcctataatccc

SEQ ID NO: 1125008 - DNA, 15 bp, Homo sapiens
tcactcctataatcc

SEQ ID NO: 1125009 - DNA, 15 bp, Homo sapiens
ctcactcctataatc

SEQ ID NO: 1125010 - DNA, 15 bp, Homo sapiens
gctcactcctataat

SEQ ID NO: 1125011 - DNA, 15 bp, Homo sapiens
ggctcactcctataa

SEQ ID NO: 1125012 - DNA, 15 bp, Homo sapiens
tggctcactcctata

SEQ ID NO: 1125013 - DNA, 15 bp, Homo sapiens
gtggctcactcctat

SEQ ID NO: 1125014 - DNA, 15 bp, Homo sapiens
ggtggctcactccta

SEQ ID NO: 1125015 - DNA, 15 bp, Homo sapiens
tggtggctcactcct

SEQ ID NO: 1125016 - DNA, 15 bp, Homo sapiens
gtggtggctcactcc

SEQ ID NO: 1125017 - DNA, 15 bp, Homo sapiens
tgtggtggctcactc

SEQ ID NO: 1125018 - DNA, 15 bp, Homo sapiens
gtgtggtggctcact

SEQ ID NO: 1125019 - DNA, 15 bp, Homo sapiens
gggccaggtgtggtg

SEQ ID NO: 1125020 - DNA, 15 bp, Homo sapiens
tgggccaggtgtggt

SEQ ID NO: 1125021 - DNA, 15 bp, Homo sapiens
ttgggccaggtgtgg

SEQ ID NO: 1125022 - DNA, 15 bp, Homo sapiens
gttgggccaggtgtg

SEQ ID NO: 1125023 - DNA, 15 bp, Homo sapiens
agttgggccaggtgt

SEQ ID NO: 1125024 - DNA, 15 bp, Homo sapiens
gagttgggccaggtg

SEQ ID NO: 1125025 - DNA, 15 bp, Homo sapiens
tgagttgggccaggt

SEQ ID NO: 1125026 - DNA, 15 bp, Homo sapiens
gtgagttgggccagg

SEQ ID NO: 1125027 - DNA, 15 bp, Homo sapiens
cgtgagttgggccag

SEQ ID NO: 1125028 - DNA, 15 bp, Homo sapiens
acgtgagttgggcca

SEQ ID NO: 1125029 - DNA, 15 bp, Homo sapiens
aacgtgagttgggcc

SEQ ID NO: 1125030 - DNA, 15 bp, Homo sapiens
aaacgtgagttgggc

SEQ ID NO: 1125031 - DNA, 15 bp, Homo sapiens
taaacgtgagttggg

SEQ ID NO: 1125032 - DNA, 15 bp, Homo sapiens
ataaacgtgagttgg

SEQ ID NO: 1125033 - DNA, 15 bp, Homo sapiens
tataaacgtgagttg

SEQ ID NO: 1125034 - DNA, 15 bp, Homo sapiens
ttataaacgtgagtt

SEQ ID NO: 1125035 - DNA, 15 bp, Homo sapiens
attataaacgtgagt

SEQ ID NO: 1125036 - DNA, 15 bp, Homo sapiens
tattataaacgtgag

SEQ ID NO: 1125037 - DNA, 15 bp, Homo sapiens
ttattataaacgtga

SEQ ID NO: 1125038 - DNA, 15 bp, Homo sapiens
attattataaacgtg

SEQ ID NO: 1125039 - DNA, 15 bp, Homo sapiens
aattattataaacgt

SEQ ID NO: 1125040 - DNA, 15 bp, Homo sapiens
aaattattataaacg

SEQ ID NO: 1125041 - DNA, 15 bp, Homo sapiens
aaaattattataaac

SEQ ID NO: 1125042 - DNA, 15 bp, Homo sapiens
aaaaattattataaa

SEQ ID NO: 1125043 - DNA, 15 bp, Homo sapiens
aaaaaattattataa

SEQ ID NO: 1125044 - DNA, 15 bp, Homo sapiens
aaaaaaattattata

SEQ ID NO: 1125045 - DNA, 15 bp, Homo sapiens
aaaaaaaattattat

SEQ ID NO: 1125046 - DNA, 15 bp, Homo sapiens
aaaaaaaaattatta

SEQ ID NO: 1125047 - DNA, 15 bp, Homo sapiens
gaaaaaaaaattatt

SEQ ID NO: 1125048 - DNA, 15 bp, Homo sapiens
agaaaaaaaaattat

SEQ ID NO: 1125049 - DNA, 15 bp, Homo sapiens
tagaaaaaaaaatta

SEQ ID NO: 1125050 - DNA, 15 bp, Homo sapiens
ctagaaaaaaaaatt

SEQ ID NO: 1125051 - DNA, 15 bp, Homo sapiens
tctagaaaaaaaaat

SEQ ID NO: 1125052 - DNA, 15 bp, Homo sapiens
ttctagaaaaaaaaa

SEQ ID NO: 1125053 - DNA, 15 bp, Homo sapiens
tttctagaaaaaaaa

SEQ ID NO: 1125054 - DNA, 15 bp, Homo sapiens
gtttctagaaaaaaa

SEQ ID NO: 1125055 - DNA, 15 bp, Homo sapiens
tgtttctagaaaaaa

SEQ ID NO: 1125056 - DNA, 15 bp, Homo sapiens
ctgtttctagaaaaa

SEQ ID NO: 1125057 - DNA, 15 bp, Homo sapiens
tctgtttctagaaaa

SEQ ID NO: 1125058 - DNA, 15 bp, Homo sapiens
ctctgtttctagaaa

SEQ ID NO: 1125059 - DNA, 15 bp, Homo sapiens
actctgtttctagaa

SEQ ID NO: 1125060 - DNA, 15 bp, Homo sapiens
tactctgtttctaga

SEQ ID NO: 1125061 - DNA, 15 bp, Homo sapiens
atactctgtttctag

SEQ ID NO: 1125062 - DNA, 15 bp, Homo sapiens
gatactctgtttcta

SEQ ID NO: 1125063 - DNA, 15 bp, Homo sapiens
tgatactctgtttct

SEQ ID NO: 1125064 - DNA, 15 bp, Homo sapiens
gtgatactctgtttc

SEQ ID NO: 1125065 - DNA, 15 bp, Homo sapiens
tgtgatactctgttt

SEQ ID NO: 1125066 - DNA, 15 bp, Homo sapiens
atgtgatactctgtt

SEQ ID NO: 1125067 - DNA, 15 bp, Homo sapiens
aatgtgatactctgt

SEQ ID NO: 1125068 - DNA, 15 bp, Homo sapiens
caatgtgatactctg

SEQ ID NO: 1125069 - DNA, 15 bp, Homo sapiens
acaatgtgatactct

SEQ ID NO: 1125070 - DNA, 15 bp, Homo sapiens
aacaatgtgatactc

SEQ ID NO: 1125071 - DNA, 15 bp, Homo sapiens
caacaatgtgatact

SEQ ID NO: 1125072 - DNA, 15 bp, Homo sapiens
gcaacaatgtgatac

SEQ ID NO: 1125073 - DNA, 15 bp, Homo sapiens
ggcaacaatgtgata

SEQ ID NO: 1125074 - DNA, 15 bp, Homo sapiens
gggcaacaatgtgat

SEQ ID NO: 1125075 - DNA, 15 bp, Homo sapiens
tgggcaacaatgtga

SEQ ID NO: 1125076 - DNA, 15 bp, Homo sapiens
ctgggcaacaatgtg

SEQ ID NO: 1125077 - DNA, 15 bp, Homo sapiens
cctgggcaacaatgt

SEQ ID NO: 1125078 - DNA, 15 bp, Homo sapiens
gcctgggcaacaatg

SEQ ID NO: 1125079 - DNA, 15 bp, Homo sapiens
agcctgggcaacaat

SEQ ID NO: 1125080 - DNA, 15 bp, Homo sapiens
agagttcaagaccag

SEQ ID NO: 1125081 - DNA, 15 bp, Homo sapiens
aagagttcaagacca

SEQ ID NO: 1125082 - DNA, 15 bp, Homo sapiens
caagagttcaagacc

SEQ ID NO: 1125083 - DNA, 15 bp, Homo sapiens
ccaagagttcaagac

SEQ ID NO: 1125084 - DNA, 15 bp, Homo sapiens
gccaagagttcaaga

SEQ ID NO: 1125085 - DNA, 15 bp, Homo sapiens
ggccaagagttcaag

SEQ ID NO: 1125086 - DNA, 15 bp, Homo sapiens
aggccaagagttcaa

SEQ ID NO: 1125087 - DNA, 15 bp, Homo sapiens
gaggccaagagttca

SEQ ID NO: 1125088 - DNA, 15 bp, Homo sapiens
tgaggccaagagttc

SEQ ID NO: 1125089 - DNA, 15 bp, Homo sapiens
cgcttgaggccaaga

SEQ ID NO: 1125090 - DNA, 15 bp, Homo sapiens
tcgcttgaggccaag

SEQ ID NO: 1125091 - DNA, 15 bp, Homo sapiens
atcgcttgaggccaa

SEQ ID NO: 1125092 - DNA, 15 bp, Homo sapiens
taggatcgcttgagg

SEQ ID NO: 1125093 - DNA, 15 bp, Homo sapiens
gtaggatcgcttgag

SEQ ID NO: 1125094 - DNA, 15 bp, Homo sapiens
agtaggatcgcttga

SEQ ID NO: 1125095 - DNA, 15 bp, Homo sapiens
cagtaggatcgcttg

SEQ ID NO: 1125096 - DNA, 15 bp, Homo sapiens
gcagtaggatcgctt

SEQ ID NO: 1125097 - DNA, 15 bp, Homo sapiens
ggcagtaggatcgct

SEQ ID NO: 1125098 - DNA, 15 bp, Homo sapiens
aggcagtaggatcgc

SEQ ID NO: 1125099 - DNA, 15 bp, Homo sapiens
aaggcagtaggatcg

SEQ ID NO: 1125100 - DNA, 15 bp, Homo sapiens
caaggcagtaggatc

SEQ ID NO: 1125101 - DNA, 15 bp, Homo sapiens
ccaaggcagtaggat

SEQ ID NO: 1125102 - DNA, 15 bp, Homo sapiens
gccaaggcagtagga

SEQ ID NO: 1125103 - DNA, 15 bp, Homo sapiens
ggccaaggcagtagg

SEQ ID NO: 1125104 - DNA, 15 bp, Homo sapiens
aggccaaggcagtag

SEQ ID NO: 1125105 - DNA, 15 bp, Homo sapiens
gaggccaaggcagta

SEQ ID NO: 1125106 - DNA, 15 bp, Homo sapiens
ggaggccaaggcagt

SEQ ID NO: 1125107 - DNA, 15 bp, Homo sapiens
gttgggaggccaagg

SEQ ID NO: 1125108 - DNA, 15 bp, Homo sapiens
tgttgggaggccaag

SEQ ID NO: 1125109 - DNA, 15 bp, Homo sapiens
gtgttgggaggccaa

SEQ ID NO: 1125110 - DNA, 15 bp, Homo sapiens
agtgttgggaggcca

SEQ ID NO: 1125111 - DNA, 15 bp, Homo sapiens
cagtgttgggaggcc

SEQ ID NO: 1125112 - DNA, 15 bp, Homo sapiens
ccagtgttgggaggc

SEQ ID NO: 1125113 - DNA, 15 bp, Homo sapiens
cccagtgttgggagg

SEQ ID NO: 1125114 - DNA, 15 bp, Homo sapiens
tcccagtgttgggag

SEQ ID NO: 1125115 - DNA, 15 bp, Homo sapiens
atcccagtgttggga

SEQ ID NO: 1125116 - DNA, 15 bp, Homo sapiens
aatcccagtgttggg

SEQ ID NO: 1125117 - DNA, 15 bp, Homo sapiens
taatcccagtgttgg

SEQ ID NO: 1125118 - DNA, 15 bp, Homo sapiens
gtaatcccagtgttg

SEQ ID NO: 1125119 - DNA, 15 bp, Homo sapiens
tgtaatcccagtgtt

SEQ ID NO: 1125120 - DNA, 15 bp, Homo sapiens
ctgtaatcccagtgt

SEQ ID NO: 1125121 - DNA, 15 bp, Homo sapiens
cctgtaatcccagtg

SEQ ID NO: 1125122 - DNA, 15 bp, Homo sapiens
acctgtaatcccagt

SEQ ID NO: 1125123 - DNA, 15 bp, Homo sapiens
ataggccaggcacag

SEQ ID NO: 1125124 - DNA, 15 bp, Homo sapiens
aataggccaggcaca

SEQ ID NO: 1125125 - DNA, 15 bp, Homo sapiens
aaataggccaggcac

SEQ ID NO: 1125126 - DNA, 15 bp, Homo sapiens
aaaataggccaggca

SEQ ID NO: 1125127 - DNA, 15 bp, Homo sapiens
taaaataggccaggc

SEQ ID NO: 1125128 - DNA, 15 bp, Homo sapiens
ataaaataggccagg

SEQ ID NO: 1125129 - DNA, 15 bp, Homo sapiens
aataaaataggccag

SEQ ID NO: 1125130 - DNA, 15 bp, Homo sapiens
caataaaataggcca

SEQ ID NO: 1125131 - DNA, 15 bp, Homo sapiens
acaataaaataggcc

SEQ ID NO: 1125132 - DNA, 15 bp, Homo sapiens
aacaataaaataggc

SEQ ID NO: 1125133 - DNA, 15 bp, Homo sapiens
aaacaataaaatagg

SEQ ID NO: 1125134 - DNA, 15 bp, Homo sapiens
caaacaataaaatag

SEQ ID NO: 1125135 - DNA, 15 bp, Homo sapiens
tcaaacaataaaata

SEQ ID NO: 1125136 - DNA, 15 bp, Homo sapiens
atcaaacaataaaat

SEQ ID NO: 1125137 - DNA, 15 bp, Homo sapiens
tatcaaacaataaaa

SEQ ID NO: 1125138 - DNA, 15 bp, Homo sapiens
ttatcaaacaataaa

SEQ ID NO: 1125139 - DNA, 15 bp, Homo sapiens
attatcaaacaataa

SEQ ID NO: 1125140 - DNA, 15 bp, Homo sapiens
cattatcaaacaata

SEQ ID NO: 1125141 - DNA, 15 bp, Homo sapiens
gcattatcaaacaat

SEQ ID NO: 1125142 - DNA, 15 bp, Homo sapiens
agcattatcaaacaa

SEQ ID NO: 1125143 - DNA, 15 bp, Homo sapiens
aagcattatcaaaca

SEQ ID NO: 1125144 - DNA, 15 bp, Homo sapiens
aaagcattatcaaac

SEQ ID NO: 1125145 - DNA, 15 bp, Homo sapiens
aaaagcattatcaaa

SEQ ID NO: 1125146 - DNA, 15 bp, Homo sapiens
aaaaagcattatcaa

SEQ ID NO: 1125147 - DNA, 15 bp, Homo sapiens
aaaaaagcattatca

SEQ ID NO: 1125148 - DNA, 15 bp, Homo sapiens
taaaaaagcattatc

SEQ ID NO: 1125149 - DNA, 15 bp, Homo sapiens
ttaaaaaagcattat

SEQ ID NO: 1125150 - DNA, 15 bp, Homo sapiens
tttaaaaaagcatta

SEQ ID NO: 1125151 - DNA, 15 bp, Homo sapiens
atttaaaaaagcatt

SEQ ID NO: 1125152 - DNA, 15 bp, Homo sapiens
aatttaaaaaagcat

SEQ ID NO: 1125153 - DNA, 15 bp, Homo sapiens
aaatttaaaaaagca

SEQ ID NO: 1125154 - DNA, 15 bp, Homo sapiens
aaaatttaaaaaagc

SEQ ID NO: 1125155 - DNA, 15 bp, Homo sapiens
caaaatttaaaaaag

SEQ ID NO: 1125156 - DNA, 15 bp, Homo sapiens
ccaaaatttaaaaaa

SEQ ID NO: 1125157 - DNA, 15 bp, Homo sapiens
tccaaaatttaaaaa

SEQ ID NO: 1125158 - DNA, 15 bp, Homo sapiens
ttccaaaatttaaaa

SEQ ID NO: 1125159 - DNA, 15 bp, Homo sapiens
tttccaaaatttaaa

SEQ ID NO: 1125160 - DNA, 15 bp, Homo sapiens
gtttccaaaatttaa

SEQ ID NO: 1125161 - DNA, 15 bp, Homo sapiens
tgtttccaaaattta

SEQ ID NO: 1125162 - DNA, 15 bp, Homo sapiens
ttgtttccaaaattt

SEQ ID NO: 1125163 - DNA, 15 bp, Homo sapiens
gttgtttccaaaatt

SEQ ID NO: 1125164 - DNA, 15 bp, Homo sapiens
agttgtttccaaaat

SEQ ID NO: 1125165 - DNA, 15 bp, Homo sapiens
aagttgtttccaaaa

SEQ ID NO: 1125166 - DNA, 15 bp, Homo sapiens
aaagttgtttccaaa

SEQ ID NO: 1125167 - DNA, 15 bp, Homo sapiens
aaaagttgtttccaa

SEQ ID NO: 1125168 - DNA, 15 bp, Homo sapiens
gaaaagttgtttcca

SEQ ID NO: 1125169 - DNA, 15 bp, Homo sapiens
ggaaaagttgtttcc

SEQ ID NO: 1125170 - DNA, 15 bp, Homo sapiens
tggaaaagttgtttc

SEQ ID NO: 1125171 - DNA, 15 bp, Homo sapiens
ctggaaaagttgttt

SEQ ID NO: 1125172 - DNA, 15 bp, Homo sapiens
gctggaaaagttgtt

SEQ ID NO: 1125173 - DNA, 15 bp, Homo sapiens
tgctggaaaagttgt

SEQ ID NO: 1125174 - DNA, 15 bp, Homo sapiens
atgctggaaaagttg

SEQ ID NO: 1125175 - DNA, 15 bp, Homo sapiens
tatgctggaaaagtt

SEQ ID NO: 1125176 - DNA, 15 bp, Homo sapiens
atatgctggaaaagt

SEQ ID NO: 1125177 - DNA, 15 bp, Homo sapiens
tatatgctggaaaag

SEQ ID NO: 1125178 - DNA, 15 bp, Homo sapiens
ttatatgctggaaaa

SEQ ID NO: 1125179 - DNA, 15 bp, Homo sapiens
cttatatgctggaaa

SEQ ID NO: 1125180 - DNA, 15 bp, Homo sapiens
acttatatgctggaa

SEQ ID NO: 1125181 - DNA, 15 bp, Homo sapiens
aacttatatgctgga

SEQ ID NO: 1125182 - DNA, 15 bp, Homo sapiens
gaacttatatgctgg

SEQ ID NO: 1125183 - DNA, 15 bp, Homo sapiens
tgaacttatatgctg

SEQ ID NO: 1125184 - DNA, 15 bp, Homo sapiens
ttgaacttatatgct

SEQ ID NO: 1125185 - DNA, 15 bp, Homo sapiens
tttgaacttatatgc

SEQ ID NO: 1125186 - DNA, 15 bp, Homo sapiens
ttttgaacttatatg

SEQ ID NO: 1125187 - DNA, 15 bp, Homo sapiens
tttttgaacttatat

SEQ ID NO: 1125188 - DNA, 15 bp, Homo sapiens
gtttttgaacttata

SEQ ID NO: 1125189 - DNA, 15 bp, Homo sapiens
agtttttgaacttat

SEQ ID NO: 1125190 - DNA, 15 bp, Homo sapiens
tagtttttgaactta

SEQ ID NO: 1125191 - DNA, 15 bp, Homo sapiens
ttagtttttgaactt

SEQ ID NO: 1125192 - DNA, 15 bp, Homo sapiens
tttagtttttgaact

SEQ ID NO: 1125193 - DNA, 15 bp, Homo sapiens
ctttagtttttgaac

SEQ ID NO: 1125194 - DNA, 15 bp, Homo sapiens
actttagtttttgaa

SEQ ID NO: 1125195 - DNA, 15 bp, Homo sapiens
cactttagtttttga

SEQ ID NO: 1125196 - DNA, 15 bp, Homo sapiens
gcactttagtttttg

SEQ ID NO: 1125197 - DNA, 15 bp, Homo sapiens
tgcactttagttttt

SEQ ID NO: 1125198 - DNA, 15 bp, Homo sapiens
atgcactttagtttt

SEQ ID NO: 1125199 - DNA, 15 bp, Homo sapiens
tatgcactttagttt

SEQ ID NO: 1125200 - DNA, 15 bp, Homo sapiens
ttatgcactttagtt

SEQ ID NO: 1125201 - DNA, 15 bp, Homo sapiens
attatgcactttagt

SEQ ID NO: 1125202 - DNA, 15 bp, Homo sapiens
aattatgcactttag

SEQ ID NO: 1125203 - DNA, 15 bp, Homo sapiens
taattatgcacttta

SEQ ID NO: 1125204 - DNA, 15 bp, Homo sapiens
ttaattatgcacttt

SEQ ID NO: 1125205 - DNA, 15 bp, Homo sapiens
attaattatgcactt

SEQ ID NO: 1125206 - DNA, 15 bp, Homo sapiens
cattaattatgcact

SEQ ID NO: 1125207 - DNA, 15 bp, Homo sapiens
tcattaattatgcac

SEQ ID NO: 1125208 - DNA, 15 bp, Homo sapiens
ttcattaattatgca

SEQ ID NO: 1125209 - DNA, 15 bp, Homo sapiens
tttcattaattatgc

SEQ ID NO: 1125210 - DNA, 15 bp, Homo sapiens
ttttcattaattatg

SEQ ID NO: 1125211 - DNA, 15 bp, Homo sapiens
tttttcattaattat

SEQ ID NO: 1125212 - DNA, 15 bp, Homo sapiens
ctttttcattaatta

SEQ ID NO: 1125213 - DNA, 15 bp, Homo sapiens
actttttcattaatt

SEQ ID NO: 1125214 - DNA, 15 bp, Homo sapiens
tactttttcattaat

SEQ ID NO: 1125215 - DNA, 15 bp, Homo sapiens
ttactttttcattaa

SEQ ID NO: 1125216 - DNA, 15 bp, Homo sapiens
tttactttttcatta

SEQ ID NO: 1125217 - DNA, 15 bp, Homo sapiens
atttactttttcatt

SEQ ID NO: 1125218 - DNA, 15 bp, Homo sapiens
tatttactttttcat

SEQ ID NO: 1125219 - DNA, 15 bp, Homo sapiens
gtatttactttttca

SEQ ID NO: 1125220 - DNA, 15 bp, Homo sapiens
agtatttactttttc

SEQ ID NO: 1125221 - DNA, 15 bp, Homo sapiens
cagtatttacttttt

SEQ ID NO: 1125222 - DNA, 15 bp, Homo sapiens
tcagtatttactttt

SEQ ID NO: 1125223 - DNA, 15 bp, Homo sapiens
ttcagtatttacttt

SEQ ID NO: 1125224 - DNA, 15 bp, Homo sapiens
attcagtatttactt

SEQ ID NO: 1125225 - DNA, 15 bp, Homo sapiens
gattcagtatttact

SEQ ID NO: 1125226 - DNA, 15 bp, Homo sapiens
agattcagtatttac

SEQ ID NO: 1125227 - DNA, 15 bp, Homo sapiens
gagattcagtattta

SEQ ID NO: 1125228 - DNA, 15 bp, Homo sapiens
agagattcagtattt

SEQ ID NO: 1125229 - DNA, 15 bp, Homo sapiens
aagagattcagtatt

SEQ ID NO: 1125230 - DNA, 15 bp, Homo sapiens
aaagagattcagtat

SEQ ID NO: 1125231 - DNA, 15 bp, Homo sapiens
gaaagagattcagta

SEQ ID NO: 1125232 - DNA, 15 bp, Homo sapiens
agaaagagattcagt

SEQ ID NO: 1125233 - DNA, 15 bp, Homo sapiens
gagaaagagattcag

SEQ ID NO: 1125234 - DNA, 15 bp, Homo sapiens
tgagaaagagattca

SEQ ID NO: 1125235 - DNA, 15 bp, Homo sapiens
ttgagaaagagattc

SEQ ID NO: 1125236 - DNA, 15 bp, Homo sapiens
cttgagaaagagatt

SEQ ID NO: 1125237 - DNA, 15 bp, Homo sapiens
tcttgagaaagagat

SEQ ID NO: 1125238 - DNA, 15 bp, Homo sapiens
ttcttgagaaagaga

SEQ ID NO: 1125239 - DNA, 15 bp, Homo sapiens
tttcttgagaaagag

SEQ ID NO: 1125240 - DNA, 15 bp, Homo sapiens
ctttcttgagaaaga

SEQ ID NO: 1125241 - DNA, 15 bp, Homo sapiens
actttcttgagaaag

SEQ ID NO: 1125242 - DNA, 15 bp, Homo sapiens
aactttcttgagaaa

SEQ ID NO: 1125243 - DNA, 15 bp, Homo sapiens
caactttcttgagaa

SEQ ID NO: 1125244 - DNA, 15 bp, Homo sapiens
tcaactttcttgaga

SEQ ID NO: 1125245 - DNA, 15 bp, Homo sapiens
atcaactttcttgag

SEQ ID NO: 1125246 - DNA, 15 bp, Homo sapiens
catcaactttcttga

SEQ ID NO: 1125247 - DNA, 15 bp, Homo sapiens
tcatcaactttcttg

SEQ ID NO: 1125248 - DNA, 15 bp, Homo sapiens
atcatcaactttctt

SEQ ID NO: 1125249 - DNA, 15 bp, Homo sapiens
tatcatcaactttct

SEQ ID NO: 1125250 - DNA, 15 bp, Homo sapiens
ttatcatcaactttc

SEQ ID NO: 1125251 - DNA, 15 bp, Homo sapiens
tttatcatcaacttt

SEQ ID NO: 1125252 - DNA, 15 bp, Homo sapiens
atttatcatcaactt

SEQ ID NO: 1125253 - DNA, 15 bp, Homo sapiens
catttatcatcaact

SEQ ID NO: 1125254 - DNA, 15 bp, Homo sapiens
acatttatcatcaac

SEQ ID NO: 1125255 - DNA, 15 bp, Homo sapiens
tacatttatcatcaa

SEQ ID NO: 1125256 - DNA, 15 bp, Homo sapiens
atacatttatcatca

SEQ ID NO: 1125257 - DNA, 15 bp, Homo sapiens
tatacatttatcatc

SEQ ID NO: 1125258 - DNA, 15 bp, Homo sapiens
ttatacatttatcat

SEQ ID NO: 1125259 - DNA, 15 bp, Homo sapiens
gttatacatttatca

SEQ ID NO: 1125260 - DNA, 15 bp, Homo sapiens
tgttatacatttatc

SEQ ID NO: 1125261 - DNA, 15 bp, Homo sapiens
atgttatacatttat

SEQ ID NO: 1125262 - DNA, 15 bp, Homo sapiens
catgttatacattta

SEQ ID NO: 1125263 - DNA, 15 bp, Homo sapiens
gcatgttatacattt

SEQ ID NO: 1125264 - DNA, 15 bp, Homo sapiens
tgcatgttatacatt

SEQ ID NO: 1125265 - DNA, 15 bp, Homo sapiens
atgcatgttatacat

SEQ ID NO: 1125266 - DNA, 15 bp, Homo sapiens
tatgcatgttataca

SEQ ID NO: 1125267 - DNA, 15 bp, Homo sapiens
ttatgcatgttatac

SEQ ID NO: 1125268 - DNA, 15 bp, Homo sapiens
tttatgcatgttata

SEQ ID NO: 1125269 - DNA, 15 bp, Homo sapiens
atttatgcatgttat

SEQ ID NO: 1125270 - DNA, 15 bp, Homo sapiens
gatttatgcatgtta

SEQ ID NO: 1125271 - DNA, 15 bp, Homo sapiens
tgatttatgcatgtt

SEQ ID NO: 1125272 - DNA, 15 bp, Homo sapiens
atgatttatgcatgt

SEQ ID NO: 1125273 - DNA, 15 bp, Homo sapiens
aatgatttatgcatg

SEQ ID NO: 1125274 - DNA, 15 bp, Homo sapiens
aaatgatttatgcat

SEQ ID NO: 1125275 - DNA, 15 bp, Homo sapiens
caaatgatttatgca

SEQ ID NO: 1125276 - DNA, 15 bp, Homo sapiens
acaaatgatttatgc

SEQ ID NO: 1125277 - DNA, 15 bp, Homo sapiens
gacaaatgatttatg

SEQ ID NO: 1125278 - DNA, 15 bp, Homo sapiens
ggacaaatgatttat

SEQ ID NO: 1125279 - DNA, 15 bp, Homo sapiens
cggacaaatgattta

SEQ ID NO: 1125280 - DNA, 15 bp, Homo sapiens
gcggacaaatgattt

SEQ ID NO: 1125281 - DNA, 15 bp, Homo sapiens
tgcggacaaatgatt

SEQ ID NO: 1125282 - DNA, 15 bp, Homo sapiens
atgcggacaaatgat

SEQ ID NO: 1125283 - DNA, 15 bp, Homo sapiens
aatgcggacaaatga

SEQ ID NO: 1125284 - DNA, 15 bp, Homo sapiens
aaatgcggacaaatg

SEQ ID NO: 1125285 - DNA, 15 bp, Homo sapiens
taaatgcggacaaat

SEQ ID NO: 1125286 - DNA, 15 bp, Homo sapiens
ataaatgcggacaaa

SEQ ID NO: 1125287 - DNA, 15 bp, Homo sapiens
gataaatgcggacaa

SEQ ID NO: 1125288 - DNA, 15 bp, Homo sapiens
tgataaatgcggaca

SEQ ID NO: 1125289 - DNA, 15 bp, Homo sapiens
ctgataaatgcggac

SEQ ID NO: 1125290 - DNA, 15 bp, Homo sapiens
gctgataaatgcgga

SEQ ID NO: 1125291 - DNA, 15 bp, Homo sapiens
ggctgataaatgcgg

SEQ ID NO: 1125292 - DNA, 15 bp, Homo sapiens
tggctgataaatgcg

SEQ ID NO: 1125293 - DNA, 15 bp, Homo sapiens
gtggctgataaatgc

SEQ ID NO: 1125294 - DNA, 15 bp, Homo sapiens
agtggctgataaatg

SEQ ID NO: 1125295 - DNA, 15 bp, Homo sapiens
gagtggctgataaat

SEQ ID NO: 1125296 - DNA, 15 bp, Homo sapiens
tgagtggctgataaa

SEQ ID NO: 1125297 - DNA, 15 bp, Homo sapiens
gtgagtggctgataa

SEQ ID NO: 1125298 - DNA, 15 bp, Homo sapiens
tgtgagtggctgata

SEQ ID NO: 1125299 - DNA, 15 bp, Homo sapiens
ctgtgagtggctgat

SEQ ID NO: 1125300 - DNA, 15 bp, Homo sapiens
cctgtgagtggctga

SEQ ID NO: 1125301 - DNA, 15 bp, Homo sapiens
ccctgtgagtggctg

SEQ ID NO: 1125302 - DNA, 15 bp, Homo sapiens
gccctgtgagtggct

SEQ ID NO: 1125303 - DNA, 15 bp, Homo sapiens
tgccctgtgagtggc

SEQ ID NO: 1125304 - DNA, 15 bp, Homo sapiens
gtgccctgtgagtgg

SEQ ID NO: 1125305 - DNA, 15 bp, Homo sapiens
tgtgccctgtgagtg

SEQ ID NO: 1125306 - DNA, 15 bp, Homo sapiens
ttgtgccctgtgagt

SEQ ID NO: 1125307 - DNA, 15 bp, Homo sapiens
attgtgccctgtgag

SEQ ID NO: 1125308 - DNA, 15 bp, Homo sapiens
cattgtgccctgtga

SEQ ID NO: 1125309 - DNA, 15 bp, Homo sapiens
tcattgtgccctgtg

SEQ ID NO: 1125310 - DNA, 15 bp, Homo sapiens
atcattgtgccctgt

SEQ ID NO: 1125311 - DNA, 15 bp, Homo sapiens
catcattgtgccctg

SEQ ID NO: 1125312 - DNA, 15 bp, Homo sapiens
acatcattgtgccct

SEQ ID NO: 1125313 - DNA, 15 bp, Homo sapiens
gacatcattgtgccc

SEQ ID NO: 1125314 - DNA, 15 bp, Homo sapiens
tgacatcattgtgcc

SEQ ID NO: 1125315 - DNA, 15 bp, Homo sapiens
gtgacatcattgtgc

SEQ ID NO: 1125316 - DNA, 15 bp, Homo sapiens
agtgacatcattgtg

SEQ ID NO: 1125317 - DNA, 15 bp, Homo sapiens
cagtgacatcattgt

SEQ ID NO: 1125318 - DNA, 15 bp, Homo sapiens
tcagtgacatcattg

SEQ ID NO: 1125319 - DNA, 15 bp, Homo sapiens
gtcagtgacatcatt

SEQ ID NO: 1125320 - DNA, 15 bp, Homo sapiens
ggtcagtgacatcat

SEQ ID NO: 1125321 - DNA, 15 bp, Homo sapiens
tggtcagtgacatca

SEQ ID NO: 1125322 - DNA, 15 bp, Homo sapiens
gtggtcagtgacatc

SEQ ID NO: 1125323 - DNA, 15 bp, Homo sapiens
tgtggtcagtgacat

SEQ ID NO: 1125324 - DNA, 15 bp, Homo sapiens
atgtggtcagtgaca

SEQ ID NO: 1125325 - DNA, 15 bp, Homo sapiens
catgtggtcagtgac

SEQ ID NO: 1125326 - DNA, 15 bp, Homo sapiens
tcatgtggtcagtga

SEQ ID NO: 1125327 - DNA, 15 bp, Homo sapiens
ttcatgtggtcagtg

SEQ ID NO: 1125328 - DNA, 15 bp, Homo sapiens
tttcatgtggtcagt

SEQ ID NO: 1125329 - DNA, 15 bp, Homo sapiens
ttttcatgtggtcag

SEQ ID NO: 1125330 - DNA, 15 bp, Homo sapiens
attttcatgtggtca

SEQ ID NO: 1125331 - DNA, 15 bp, Homo sapiens
gattttcatgtggtc

SEQ ID NO: 1125332 - DNA, 15 bp, Homo sapiens
tgattttcatgtggt

SEQ ID NO: 1125333 - DNA, 15 bp, Homo sapiens
ctgattttcatgtgg

SEQ ID NO: 1125334 - DNA, 15 bp, Homo sapiens
tctgattttcatgtg

SEQ ID NO: 1125335 - DNA, 15 bp, Homo sapiens
ttctgattttcatgt

SEQ ID NO: 1125336 - DNA, 15 bp, Homo sapiens
cttctgattttcatg

SEQ ID NO: 1125337 - DNA, 15 bp, Homo sapiens
tcttctgattttcat

SEQ ID NO: 1125338 - DNA, 15 bp, Homo sapiens
gtcttctgattttca

SEQ ID NO: 1125339 - DNA, 15 bp, Homo sapiens
tgtcttctgattttc

SEQ ID NO: 1125340 - DNA, 15 bp, Homo sapiens
atgtcttctgatttt

SEQ ID NO: 1125341 - DNA, 15 bp, Homo sapiens
tatgtcttctgattt

SEQ ID NO: 1125342 - DNA, 15 bp, Homo sapiens
ttatgtcttctgatt

SEQ ID NO: 1125343 - DNA, 15 bp, Homo sapiens
tttatgtcttctgat

SEQ ID NO: 1125344 - DNA, 15 bp, Homo sapiens
atttatgtcttctga

SEQ ID NO: 1125345 - DNA, 15 bp, Homo sapiens
gatttatgtcttctg

SEQ ID NO: 1125346 - DNA, 15 bp, Homo sapiens
agatttatgtcttct

SEQ ID NO: 1125347 - DNA, 15 bp, Homo sapiens
cagatttatgtcttc

SEQ ID NO: 1125348 - DNA, 15 bp, Homo sapiens
gcagatttatgtctt

SEQ ID NO: 1125349 - DNA, 15 bp, Homo sapiens
tgcagatttatgtct

SEQ ID NO: 1125350 - DNA, 15 bp, Homo sapiens
ctgcagatttatgtc

SEQ ID NO: 1125351 - DNA, 15 bp, Homo sapiens
tctgcagatttatgt

SEQ ID NO: 1125352 - DNA, 15 bp, Homo sapiens
ctctgcagatttatg

SEQ ID NO: 1125353 - DNA, 15 bp, Homo sapiens
tctctgcagatttat

SEQ ID NO: 1125354 - DNA, 15 bp, Homo sapiens
ttctctgcagattta

SEQ ID NO: 1125355 - DNA, 15 bp, Homo sapiens
tttctctgcagattt

SEQ ID NO: 1125356 - DNA, 15 bp, Homo sapiens
ctttctctgcagatt

SEQ ID NO: 1125357 - DNA, 15 bp, Homo sapiens
gctttctctgcagat

SEQ ID NO: 1125358 - DNA, 15 bp, Homo sapiens
tgctttctctgcaga

SEQ ID NO: 1125359 - DNA, 15 bp, Homo sapiens
atgctttctctgcag

SEQ ID NO: 1125360 - DNA, 15 bp, Homo sapiens
gatgctttctctgca

SEQ ID NO: 1125361 - DNA, 15 bp, Homo sapiens
tgatgctttctctgc

SEQ ID NO: 1125362 - DNA, 15 bp, Homo sapiens
ctgatgctttctctg

SEQ ID NO: 1125363 - DNA, 15 bp, Homo sapiens
actgatgctttctct

SEQ ID NO: 1125364 - DNA, 15 bp, Homo sapiens
tactgatgctttctc

SEQ ID NO: 1125365 - DNA, 15 bp, Homo sapiens
atactgatgctttct

SEQ ID NO: 1125366 - DNA, 15 bp, Homo sapiens
gatactgatgctttc

SEQ ID NO: 1125367 - DNA, 15 bp, Homo sapiens
agatactgatgcttt

SEQ ID NO: 1125368 - DNA, 15 bp, Homo sapiens
tagatactgatgctt

SEQ ID NO: 1125369 - DNA, 15 bp, Homo sapiens
gtagatactgatgct

SEQ ID NO: 1125370 - DNA, 15 bp, Homo sapiens
ggtagatactgatgc

SEQ ID NO: 1125371 - DNA, 15 bp, Homo sapiens
aggtagatactgatg

SEQ ID NO: 1125372 - DNA, 15 bp, Homo sapiens
gaggtagatactgat

SEQ ID NO: 1125373 - DNA, 15 bp, Homo sapiens
tgaggtagatactga

SEQ ID NO: 1125374 - DNA, 15 bp, Homo sapiens
ttgaggtagatactg

SEQ ID NO: 1125375 - DNA, 15 bp, Homo sapiens
tttgaggtagatact

SEQ ID NO: 1125376 - DNA, 15 bp, Homo sapiens
ttttgaggtagatac

SEQ ID NO: 1125377 - DNA, 15 bp, Homo sapiens
cttttgaggtagata

SEQ ID NO: 1125378 - DNA, 15 bp, Homo sapiens
acttttgaggtagat

SEQ ID NO: 1125379 - DNA, 15 bp, Homo sapiens
aacttttgaggtaga

SEQ ID NO: 1125380 - DNA, 15 bp, Homo sapiens
aaacttttgaggtag

SEQ ID NO: 1125381 - DNA, 15 bp, Homo sapiens
caaacttttgaggta

SEQ ID NO: 1125382 - DNA, 15 bp, Homo sapiens
acaaacttttgaggt

SEQ ID NO: 1125383 - DNA, 15 bp, Homo sapiens
gacaaacttttgagg

SEQ ID NO: 1125384 - DNA, 15 bp, Homo sapiens
cgacaaacttttgag

SEQ ID NO: 1125385 - DNA, 15 bp, Homo sapiens
ccgacaaacttttga

SEQ ID NO: 1125386 - DNA, 15 bp, Homo sapiens
accgacaaacttttg

SEQ ID NO: 1125387 - DNA, 15 bp, Homo sapiens
aaccgacaaactttt

SEQ ID NO: 1125388 - DNA, 15 bp, Homo sapiens
aaaccgacaaacttt

SEQ ID NO: 1125389 - DNA, 15 bp, Homo sapiens
aaaaccgacaaactt

SEQ ID NO: 1125390 - DNA, 15 bp, Homo sapiens
aaaaaccgacaaact

SEQ ID NO: 1125391 - DNA, 15 bp, Homo sapiens
aaaaaaccgacaaac

SEQ ID NO: 1125392 - DNA, 15 bp, Homo sapiens
aaaaaaaccgacaaa

SEQ ID NO: 1125393 - DNA, 15 bp, Homo sapiens
aaaaaaaaccgacaa

SEQ ID NO: 1125394 - DNA, 15 bp, Homo sapiens
caaaaaaaaccgaca

SEQ ID NO: 1125395 - DNA, 15 bp, Homo sapiens
acaaaaaaaaccgac

SEQ ID NO: 1125396 - DNA, 15 bp, Homo sapiens
aacaaaaaaaaccga

SEQ ID NO: 1125397 - DNA, 15 bp, Homo sapiens
aaacaaaaaaaaccg

SEQ ID NO: 1125398 - DNA, 15 bp, Homo sapiens
caaacaaaaaaaacc

SEQ ID NO: 1125399 - DNA, 15 bp, Homo sapiens
aaaaacaaaacaaac

SEQ ID NO: 1125400 - DNA, 15 bp, Homo sapiens
caaaaaacaaaacaa

SEQ ID NO: 1125401 - DNA, 15 bp, Homo sapiens
tcaaaaaacaaaaca

SEQ ID NO: 1125402 - DNA, 15 bp, Homo sapiens
tctcaaaaaacaaaa

SEQ ID NO: 1125403 - DNA, 15 bp, Homo sapiens
gtctcaaaaaacaaa

SEQ ID NO: 1125404 - DNA, 15 bp, Homo sapiens
tgtctcaaaaaacaa

SEQ ID NO: 1125405 - DNA, 15 bp, Homo sapiens
ctgtctcaaaaaaca

SEQ ID NO: 1125406 - DNA, 15 bp, Homo sapiens
tctgtctcaaaaaac

SEQ ID NO: 1125407 - DNA, 15 bp, Homo sapiens
tgcgagactctgtct

SEQ ID NO: 1125408 - DNA, 15 bp, Homo sapiens
gtgcgagactctgtc

SEQ ID NO: 1125409 - DNA, 15 bp, Homo sapiens
agtgcgagactctgt

SEQ ID NO: 1125410 - DNA, 15 bp, Homo sapiens
cagtgcgagactctg

SEQ ID NO: 1125411 - DNA, 15 bp, Homo sapiens
acagtgcgagactct

SEQ ID NO: 1125412 - DNA, 15 bp, Homo sapiens
gacagtgcgagactc

SEQ ID NO: 1125413 - DNA, 15 bp, Homo sapiens
cgacagtgcgagact

SEQ ID NO: 1125414 - DNA, 15 bp, Homo sapiens
gcgacagtgcgagac

SEQ ID NO: 1125415 - DNA, 15 bp, Homo sapiens
ggcgacagtgcgaga

SEQ ID NO: 1125416 - DNA, 15 bp, Homo sapiens
gggcgacagtgcgag

SEQ ID NO: 1125417 - DNA, 15 bp, Homo sapiens
tgggcgacagtgcga

SEQ ID NO: 1125418 - DNA, 15 bp, Homo sapiens
ctgggcgacagtgcg

SEQ ID NO: 1125419 - DNA, 15 bp, Homo sapiens
cctgggcgacagtgc

SEQ ID NO: 1125420 - DNA, 15 bp, Homo sapiens
gcctgggcgacagtg

SEQ ID NO: 1125421 - DNA, 15 bp, Homo sapiens
agcctgggcgacagt

SEQ ID NO: 1125422 - DNA, 15 bp, Homo sapiens
ggattgcgccactgc

SEQ ID NO: 1125423 - DNA, 15 bp, Homo sapiens
gggattgcgccactg

SEQ ID NO: 1125424 - DNA, 15 bp, Homo sapiens
cgggattgcgccact

SEQ ID NO: 1125425 - DNA, 15 bp, Homo sapiens
ccgggattgcgccac

SEQ ID NO: 1125426 - DNA, 15 bp, Homo sapiens
gccgggattgcgcca

SEQ ID NO: 1125427 - DNA, 15 bp, Homo sapiens
agccgggattgcgcc

SEQ ID NO: 1125428 - DNA, 15 bp, Homo sapiens
gagccgggattgcgc

SEQ ID NO: 1125429 - DNA, 15 bp, Homo sapiens
tgagccgggattgcg

SEQ ID NO: 1125430 - DNA, 15 bp, Homo sapiens
gtgagccgggattgc

SEQ ID NO: 1125431 - DNA, 15 bp, Homo sapiens
agtgagccgggattg

SEQ ID NO: 1125432 - DNA, 15 bp, Homo sapiens
cagtgagccgggatt

SEQ ID NO: 1125433 - DNA, 15 bp, Homo sapiens
gcagtgagccgggat

SEQ ID NO: 1125434 - DNA, 15 bp, Homo sapiens
tgcagtgagccggga

SEQ ID NO: 1125435 - DNA, 15 bp, Homo sapiens
ttgcagtgagccggg

SEQ ID NO: 1125436 - DNA, 15 bp, Homo sapiens
gttgcagtgagccgg

SEQ ID NO: 1125437 - DNA, 15 bp, Homo sapiens
gggcaggagaattgc

SEQ ID NO: 1125438 - DNA, 15 bp, Homo sapiens
ggggcaggagaattg

SEQ ID NO: 1125439 - DNA, 15 bp, Homo sapiens
tggggcaggagaatt

SEQ ID NO: 1125440 - DNA, 15 bp, Homo sapiens
ctggggcaggagaat

SEQ ID NO: 1125441 - DNA, 15 bp, Homo sapiens
gctggggcaggagaa

SEQ ID NO: 1125442 - DNA, 15 bp, Homo sapiens
agctggggcaggaga

SEQ ID NO: 1125443 - DNA, 15 bp, Homo sapiens
aagctggggcaggag

SEQ ID NO: 1125444 - DNA, 15 bp, Homo sapiens
gaagctggggcagga

SEQ ID NO: 1125445 - DNA, 15 bp, Homo sapiens
ggaagctggggcagg

SEQ ID NO: 1125446 - DNA, 15 bp, Homo sapiens
gggaagctggggcag

SEQ ID NO: 1125447 - DNA, 15 bp, Homo sapiens
tgggaagctggggca

SEQ ID NO: 1125448 - DNA, 15 bp, Homo sapiens
ttgggaagctggggc

SEQ ID NO: 1125449 - DNA, 15 bp, Homo sapiens
cttgggaagctgggg

SEQ ID NO: 1125450 - DNA, 15 bp, Homo sapiens
acttgggaagctggg

SEQ ID NO: 1125451 - DNA, 15 bp, Homo sapiens
tacttgggaagctgg

SEQ ID NO: 1125452 - DNA, 15 bp, Homo sapiens
gtacttgggaagctg

SEQ ID NO: 1125453 - DNA, 15 bp, Homo sapiens
ggtacttgggaagct

SEQ ID NO: 1125454 - DNA, 15 bp, Homo sapiens
aggtacttgggaagc

SEQ ID NO: 1125455 - DNA, 15 bp, Homo sapiens
caggtacttgggaag

SEQ ID NO: 1125456 - DNA, 15 bp, Homo sapiens
ccaggtacttgggaa

SEQ ID NO: 1125457 - DNA, 15 bp, Homo sapiens
cccaggtacttggga

SEQ ID NO: 1125458 - DNA, 15 bp, Homo sapiens
tcccaggtacttggg

SEQ ID NO: 1125459 - DNA, 15 bp, Homo sapiens
atcccaggtacttgg

SEQ ID NO: 1125460 - DNA, 15 bp, Homo sapiens
aatcccaggtacttg

SEQ ID NO: 1125461 - DNA, 15 bp, Homo sapiens
taatcccaggtactt

SEQ ID NO: 1125462 - DNA, 15 bp, Homo sapiens
taactaaaaatacaa

SEQ ID NO: 1125463 - DNA, 15 bp, Homo sapiens
ctaactaaaaataca

SEQ ID NO: 1125464 - DNA, 15 bp, Homo sapiens
tctaactaaaaatac

SEQ ID NO: 1125465 - DNA, 15 bp, Homo sapiens
ctctaactaaaaata

SEQ ID NO: 1125466 - DNA, 15 bp, Homo sapiens
actctaactaaaaat

SEQ ID NO: 1125467 - DNA, 15 bp, Homo sapiens
gactctaactaaaaa

SEQ ID NO: 1125468 - DNA, 15 bp, Homo sapiens
tgactctaactaaaa

SEQ ID NO: 1125469 - DNA, 15 bp, Homo sapiens
ctgactctaactaaa

SEQ ID NO: 1125470 - DNA, 15 bp, Homo sapiens
cctgactctaactaa

SEQ ID NO: 1125471 - DNA, 15 bp, Homo sapiens
ccctgactctaacta

SEQ ID NO: 1125472 - DNA, 15 bp, Homo sapiens
accctgactctaact

SEQ ID NO: 1125473 - DNA, 15 bp, Homo sapiens
aaccctgactctaac

SEQ ID NO: 1125474 - DNA, 15 bp, Homo sapiens
aaaccctgactctaa

SEQ ID NO: 1125475 - DNA, 15 bp, Homo sapiens
gaaaccctgactcta

SEQ ID NO: 1125476 - DNA, 15 bp, Homo sapiens
cgaaaccctgactct

SEQ ID NO: 1125477 - DNA, 15 bp, Homo sapiens
gcgaaaccctgactc

SEQ ID NO: 1125478 - DNA, 15 bp, Homo sapiens
ggcgaaaccctgact

SEQ ID NO: 1125479 - DNA, 15 bp, Homo sapiens
tggcgaaaccctgac

SEQ ID NO: 1125480 - DNA, 15 bp, Homo sapiens
atggcgaaaccctga

SEQ ID NO: 1125481 - DNA, 15 bp, Homo sapiens
gagttcgaaaccagc

SEQ ID NO: 1125482 - DNA, 15 bp, Homo sapiens
ggagttcgaaaccag

SEQ ID NO: 1125483 - DNA, 15 bp, Homo sapiens
aggagttcgaaacca

SEQ ID NO: 1125484 - DNA, 15 bp, Homo sapiens
caggagttcgaaacc

SEQ ID NO: 1125485 - DNA, 15 bp, Homo sapiens
tcaggagttcgaaac

SEQ ID NO: 1125486 - DNA, 15 bp, Homo sapiens
gtcaggagttcgaaa

SEQ ID NO: 1125487 - DNA, 15 bp, Homo sapiens
ggtcaggagttcgaa

SEQ ID NO: 1125488 - DNA, 15 bp, Homo sapiens
gaatcacgaggtcag

SEQ ID NO: 1125489 - DNA, 15 bp, Homo sapiens
tgaatcacgaggtca

SEQ ID NO: 1125490 - DNA, 15 bp, Homo sapiens
gtgaatcacgaggtc

SEQ ID NO: 1125491 - DNA, 15 bp, Homo sapiens
ggtgaatcacgaggt

SEQ ID NO: 1125492 - DNA, 15 bp, Homo sapiens
aggtgaatcacgagg

SEQ ID NO: 1125493 - DNA, 15 bp, Homo sapiens
caggtgaatcacgag

SEQ ID NO: 1125494 - DNA, 15 bp, Homo sapiens
gcaggtgaatcacga

SEQ ID NO: 1125495 - DNA, 15 bp, Homo sapiens
ggcaggtgaatcacg

SEQ ID NO: 1125496 - DNA, 15 bp, Homo sapiens
aggcaggtgaatcac

SEQ ID NO: 1125497 - DNA, 15 bp, Homo sapiens
aaggcaggtgaatca

SEQ ID NO: 1125498 - DNA, 15 bp, Homo sapiens
caaggcaggtgaatc

SEQ ID NO: 1125499 - DNA, 15 bp, Homo sapiens
ccaaggcaggtgaat

SEQ ID NO: 1125500 - DNA, 15 bp, Homo sapiens
gccaaggcaggtgaa

SEQ ID NO: 1125501 - DNA, 15 bp, Homo sapiens
ggccaaggcaggtga

SEQ ID NO: 1125502 - DNA, 15 bp, Homo sapiens
gaaatcccagcactt

SEQ ID NO: 1125503 - DNA, 15 bp, Homo sapiens
tgaaatcccagcact

SEQ ID NO: 1125504 - DNA, 15 bp, Homo sapiens
ctgaaatcccagcac

SEQ ID NO: 1125505 - DNA, 15 bp, Homo sapiens
cctgaaatcccagca

SEQ ID NO: 1125506 - DNA, 15 bp, Homo sapiens
gcctgaaatcccagc

SEQ ID NO: 1125507 - DNA, 15 bp, Homo sapiens
cgcctgaaatcccag

SEQ ID NO: 1125508 - DNA, 15 bp, Homo sapiens
acgcctgaaatccca

SEQ ID NO: 1125509 - DNA, 15 bp, Homo sapiens
cacgcctgaaatccc

SEQ ID NO: 1125510 - DNA, 15 bp, Homo sapiens
tcacgcctgaaatcc

SEQ ID NO: 1125511 - DNA, 15 bp, Homo sapiens
ctcacgcctgaaatc

SEQ ID NO: 1125512 - DNA, 15 bp, Homo sapiens
gctcacgcctgaaat

SEQ ID NO: 1125513 - DNA, 15 bp, Homo sapiens
ggctcacgcctgaaa

SEQ ID NO: 1125514 - DNA, 15 bp, Homo sapiens
tggctcacgcctgaa

SEQ ID NO: 1125515 - DNA, 15 bp, Homo sapiens
gtggctcacgcctga

SEQ ID NO: 1125516 - DNA, 15 bp, Homo sapiens
tggcgcggtggctca

SEQ ID NO: 1125517 - DNA, 15 bp, Homo sapiens
ctggcgcggtggctc

SEQ ID NO: 1125518 - DNA, 15 bp, Homo sapiens
cctggcgcggtggct

SEQ ID NO: 1125519 - DNA, 15 bp, Homo sapiens
gcctggcgcggtggc

SEQ ID NO: 1125520 - DNA, 15 bp, Homo sapiens
ggcctggcgcggtgg

SEQ ID NO: 1125521 - DNA, 15 bp, Homo sapiens
cggcctggcgcggtg

SEQ ID NO: 1125522 - DNA, 15 bp, Homo sapiens
ccggcctggcgcggt

SEQ ID NO: 1125523 - DNA, 15 bp, Homo sapiens
accggcctggcgcgg

SEQ ID NO: 1125524 - DNA, 15 bp, Homo sapiens
aaccggcctggcgcg

SEQ ID NO: 1125525 - DNA, 15 bp, Homo sapiens
aaaccggcctggcgc

SEQ ID NO: 1125526 - DNA, 15 bp, Homo sapiens
caaaccggcctggcg

SEQ ID NO: 1125527 - DNA, 15 bp, Homo sapiens
acaaaccggcctggc

SEQ ID NO: 1125528 - DNA, 15 bp, Homo sapiens
tacaaaccggcctgg

SEQ ID NO: 1125529 - DNA, 15 bp, Homo sapiens
ctacaaaccggcctg

SEQ ID NO: 1125530 - DNA, 15 bp, Homo sapiens
actacaaaccggcct

SEQ ID NO: 1125531 - DNA, 15 bp, Homo sapiens
aactacaaaccggcc

SEQ ID NO: 1125532 - DNA, 15 bp, Homo sapiens
taactacaaaccggc

SEQ ID NO: 1125533 - DNA, 15 bp, Homo sapiens
ataactacaaaccgg

SEQ ID NO: 1125534 - DNA, 15 bp, Homo sapiens
aataactacaaaccg

SEQ ID NO: 1125535 - DNA, 15 bp, Homo sapiens
aaataactacaaacc

SEQ ID NO: 1125536 - DNA, 15 bp, Homo sapiens
aaaataactacaaac

SEQ ID NO: 1125537 - DNA, 15 bp, Homo sapiens
taaaataactacaaa

SEQ ID NO: 1125538 - DNA, 15 bp, Homo sapiens
ttaaaataactacaa

SEQ ID NO: 1125539 - DNA, 15 bp, Homo sapiens
cttaaaataactaca

SEQ ID NO: 1125540 - DNA, 15 bp, Homo sapiens
tcttaaaataactac

SEQ ID NO: 1125541 - DNA, 15 bp, Homo sapiens
gtcttaaaataacta

SEQ ID NO: 1125542 - DNA, 15 bp, Homo sapiens
agtcttaaaataact

SEQ ID NO: 1125543 - DNA, 15 bp, Homo sapiens
cagtcttaaaataac

SEQ ID NO: 1125544 - DNA, 15 bp, Homo sapiens
acagtcttaaaataa

SEQ ID NO: 1125545 - DNA, 15 bp, Homo sapiens
cacagtcttaaaata

SEQ ID NO: 1125546 - DNA, 15 bp, Homo sapiens
ccacagtcttaaaat

SEQ ID NO: 1125547 - DNA, 15 bp, Homo sapiens
gccacagtcttaaaa

SEQ ID NO: 1125548 - DNA, 15 bp, Homo sapiens
ggccacagtcttaaa

SEQ ID NO: 1125549 - DNA, 15 bp, Homo sapiens
tggccacagtcttaa

SEQ ID NO: 1125550 - DNA, 15 bp, Homo sapiens
ttggccacagtctta

SEQ ID NO: 1125551 - DNA, 15 bp, Homo sapiens
tttggccacagtctt

SEQ ID NO: 1125552 - DNA, 15 bp, Homo sapiens
ctttggccacagtct

SEQ ID NO: 1125553 - DNA, 15 bp, Homo sapiens
tctttggccacagtc

SEQ ID NO: 1125554 - DNA, 15 bp, Homo sapiens
ctctttggccacagt

SEQ ID NO: 1125555 - DNA, 15 bp, Homo sapiens
cctctttggccacag

SEQ ID NO: 1125556 - DNA, 15 bp, Homo sapiens
acctctttggccaca

SEQ ID NO: 1125557 - DNA, 15 bp, Homo sapiens
tacctctttggccac

SEQ ID NO: 1125558 - DNA, 15 bp, Homo sapiens
gtacctctttggcca

SEQ ID NO: 1125559 - DNA, 15 bp, Homo sapiens
tgtacctctttggcc

SEQ ID NO: 1125560 - DNA, 15 bp, Homo sapiens
ctgtacctctttggc

SEQ ID NO: 1125561 - DNA, 15 bp, Homo sapiens
gctgtacctctttgg

SEQ ID NO: 1125562 - DNA, 15 bp, Homo sapiens
agctgtacctctttg

SEQ ID NO: 1125563 - DNA, 15 bp, Homo sapiens
cagctgtacctcttt

SEQ ID NO: 1125564 - DNA, 15 bp, Homo sapiens
gcagctgtacctctt

SEQ ID NO: 1125565 - DNA, 15 bp, Homo sapiens
tgcagctgtacctct

SEQ ID NO: 1125566 - DNA, 15 bp, Homo sapiens
ctgcagctgtacctc

SEQ ID NO: 1125567 - DNA, 15 bp, Homo sapiens
tctgcagctgtacct

SEQ ID NO: 1125568 - DNA, 15 bp, Homo sapiens
ctctgcagctgtacc

SEQ ID NO: 1125569 - DNA, 15 bp, Homo sapiens
tctctgcagctgtac

SEQ ID NO: 1125570 - DNA, 15 bp, Homo sapiens
ctctctgcagctgta

SEQ ID NO: 1125571 - DNA, 15 bp, Homo sapiens
cctctctgcagctgt

SEQ ID NO: 1125572 - DNA, 15 bp, Homo sapiens
acctctctgcagctg

SEQ ID NO: 1125573 - DNA, 15 bp, Homo sapiens
tacctctctgcagct

SEQ ID NO: 1125574 - DNA, 15 bp, Homo sapiens
atacctctctgcagc

SEQ ID NO: 1125575 - DNA, 15 bp, Homo sapiens
aatacctctctgcag

SEQ ID NO: 1125576 - DNA, 15 bp, Homo sapiens
aaatacctctctgca

SEQ ID NO: 1125577 - DNA, 15 bp, Homo sapiens
taaatacctctctgc

SEQ ID NO: 1125578 - DNA, 15 bp, Homo sapiens
gtaaatacctctctg

SEQ ID NO: 1125579 - DNA, 15 bp, Homo sapiens
tgtaaatacctctct

SEQ ID NO: 1125580 - DNA, 15 bp, Homo sapiens
atgtaaatacctctc

SEQ ID NO: 1125581 - DNA, 15 bp, Homo sapiens
tatgtaaatacctct

SEQ ID NO: 1125582 - DNA, 15 bp, Homo sapiens
gtatgtaaatacctc

SEQ ID NO: 1125583 - DNA, 15 bp, Homo sapiens
agtatgtaaatacct

SEQ ID NO: 1125584 - DNA, 15 bp, Homo sapiens
cagtatgtaaatacc

SEQ ID NO: 1125585 - DNA, 15 bp, Homo sapiens
gcagtatgtaaatac

SEQ ID NO: 1125586 - DNA, 15 bp, Homo sapiens
agcagtatgtaaata

SEQ ID NO: 1125587 - DNA, 15 bp, Homo sapiens
gagcagtatgtaaat

SEQ ID NO: 1125588 - DNA, 15 bp, Homo sapiens
agagcagtatgtaaa

SEQ ID NO: 1125589 - DNA, 15 bp, Homo sapiens
cagagcagtatgtaa

SEQ ID NO: 1125590 - DNA, 15 bp, Homo sapiens
acagagcagtatgta

SEQ ID NO: 1125591 - DNA, 15 bp, Homo sapiens
cacagagcagtatgt

SEQ ID NO: 1125592 - DNA, 15 bp, Homo sapiens
tcacagagcagtatg

SEQ ID NO: 1125593 - DNA, 15 bp, Homo sapiens
ttcacagagcagtat

SEQ ID NO: 1125594 - DNA, 15 bp, Homo sapiens
cttcacagagcagta

SEQ ID NO: 1125595 - DNA, 15 bp, Homo sapiens
ccttcacagagcagt

SEQ ID NO: 1125596 - DNA, 15 bp, Homo sapiens
tccttcacagagcag

SEQ ID NO: 1125597 - DNA, 15 bp, Homo sapiens
gtccttcacagagca

SEQ ID NO: 1125598 - DNA, 15 bp, Homo sapiens
agtccttcacagagc

SEQ ID NO: 1125599 - DNA, 15 bp, Homo sapiens
aagtccttcacagag

SEQ ID NO: 1125600 - DNA, 15 bp, Homo sapiens
aaagtccttcacaga

SEQ ID NO: 1125601 - DNA, 15 bp, Homo sapiens
aaaagtccttcacag

SEQ ID NO: 1125602 - DNA, 15 bp, Homo sapiens
caaaagtccttcaca

SEQ ID NO: 1125603 - DNA, 15 bp, Homo sapiens
acaaaagtccttcac

SEQ ID NO: 1125604 - DNA, 15 bp, Homo sapiens
aacaaaagtccttca

SEQ ID NO: 1125605 - DNA, 15 bp, Homo sapiens
aaacaaaagtccttc

SEQ ID NO: 1125606 - DNA, 15 bp, Homo sapiens
taaacaaaagtcctt

SEQ ID NO: 1125607 - DNA, 15 bp, Homo sapiens
ctaaacaaaagtcct

SEQ ID NO: 1125608 - DNA, 15 bp, Homo sapiens
tctaaacaaaagtcc

SEQ ID NO: 1125609 - DNA, 15 bp, Homo sapiens
atctaaacaaaagtc

SEQ ID NO: 1125610 - DNA, 15 bp, Homo sapiens
gatctaaacaaaagt

SEQ ID NO: 1125611 - DNA, 15 bp, Homo sapiens
tgatctaaacaaaag

SEQ ID NO: 1125612 - DNA, 15 bp, Homo sapiens
ttgatctaaacaaaa

SEQ ID NO: 1125613 - DNA, 15 bp, Homo sapiens
tttgatctaaacaaa

SEQ ID NO: 1125614 - DNA, 15 bp, Homo sapiens
atttgatctaaacaa

SEQ ID NO: 1125615 - DNA, 15 bp, Homo sapiens
catttgatctaaaca

SEQ ID NO: 1125616 - DNA, 15 bp, Homo sapiens
tcatttgatctaaac

SEQ ID NO: 1125617 - DNA, 15 bp, Homo sapiens
gtcatttgatctaaa

SEQ ID NO: 1125618 - DNA, 15 bp, Homo sapiens
agtcatttgatctaa

SEQ ID NO: 1125619 - DNA, 15 bp, Homo sapiens
aagtcatttgatcta

SEQ ID NO: 1125620 - DNA, 15 bp, Homo sapiens
taagtcatttgatct

SEQ ID NO: 1125621 - DNA, 15 bp, Homo sapiens
ataagtcatttgatc

SEQ ID NO: 1125622 - DNA, 15 bp, Homo sapiens
aataagtcatttgat

SEQ ID NO: 1125623 - DNA, 15 bp, Homo sapiens
aaataagtcatttga

SEQ ID NO: 1125624 - DNA, 15 bp, Homo sapiens
taaataagtcatttg

SEQ ID NO: 1125625 - DNA, 15 bp, Homo sapiens
ctaaataagtcattt

SEQ ID NO: 1125626 - DNA, 15 bp, Homo sapiens
tctaaataagtcatt

SEQ ID NO: 1125627 - DNA, 15 bp, Homo sapiens
atctaaataagtcat

SEQ ID NO: 1125628 - DNA, 15 bp, Homo sapiens
gatctaaataagtca

SEQ ID NO: 1125629 - DNA, 15 bp, Homo sapiens
tgatctaaataagtc

SEQ ID NO: 1125630 - DNA, 15 bp, Homo sapiens
ttgatctaaataagt

SEQ ID NO: 1125631 - DNA, 15 bp, Homo sapiens
tttgatctaaataag

SEQ ID NO: 1125632 - DNA, 15 bp, Homo sapiens
ttttgatctaaataa

SEQ ID NO: 1125633 - DNA, 15 bp, Homo sapiens
attttgatctaaata

SEQ ID NO: 1125634 - DNA, 15 bp, Homo sapiens
aattttgatctaaat

SEQ ID NO: 1125635 - DNA, 15 bp, Homo sapiens
gaattttgatctaaa

SEQ ID NO: 1125636 - DNA, 15 bp, Homo sapiens
tgaattttgatctaa

SEQ ID NO: 1125637 - DNA, 15 bp, Homo sapiens
atgaattttgatcta

SEQ ID NO: 1125638 - DNA, 15 bp, Homo sapiens
aatgaattttgatct

SEQ ID NO: 1125639 - DNA, 15 bp, Homo sapiens
caatgaattttgatc

SEQ ID NO: 1125640 - DNA, 15 bp, Homo sapiens
ccaatgaattttgat

SEQ ID NO: 1125641 - DNA, 15 bp, Homo sapiens
gccaatgaattttga

SEQ ID NO: 1125642 - DNA, 15 bp, Homo sapiens
agccaatgaattttg

SEQ ID NO: 1125643 - DNA, 15 bp, Homo sapiens
gagccaatgaatttt

SEQ ID NO: 1125644 - DNA, 15 bp, Homo sapiens
tgagccaatgaattt

SEQ ID NO: 1125645 - DNA, 15 bp, Homo sapiens
atgagccaatgaatt

SEQ ID NO: 1125646 - DNA, 15 bp, Homo sapiens
aatgagccaatgaat

SEQ ID NO: 1125647 - DNA, 15 bp, Homo sapiens
aaatgagccaatgaa

SEQ ID NO: 1125648 - DNA, 15 bp, Homo sapiens
aaaatgagccaatga

SEQ ID NO: 1125649 - DNA, 15 bp, Homo sapiens
gaaaatgagccaatg

SEQ ID NO: 1125650 - DNA, 15 bp, Homo sapiens
ggaaaatgagccaat

SEQ ID NO: 1125651 - DNA, 15 bp, Homo sapiens
tggaaaatgagccaa

SEQ ID NO: 1125652 - DNA, 15 bp, Homo sapiens
atggaaaatgagcca

SEQ ID NO: 1125653 - DNA, 15 bp, Homo sapiens
aatggaaaatgagcc

SEQ ID NO: 1125654 - DNA, 15 bp, Homo sapiens
aaatggaaaatgagc

SEQ ID NO: 1125655 - DNA, 15 bp, Homo sapiens
aaaatggaaaatgag

SEQ ID NO: 1125656 - DNA, 15 bp, Homo sapiens
taaaatggaaaatga

SEQ ID NO: 1125657 - DNA, 15 bp, Homo sapiens
ataaaatggaaaatg

SEQ ID NO: 1125658 - DNA, 15 bp, Homo sapiens
cataaaatggaaaat

SEQ ID NO: 1125659 - DNA, 15 bp, Homo sapiens
acataaaatggaaaa

SEQ ID NO: 1125660 - DNA, 15 bp, Homo sapiens
aacataaaatggaaa

SEQ ID NO: 1125661 - DNA, 15 bp, Homo sapiens
caacataaaatggaa

SEQ ID NO: 1125662 - DNA, 15 bp, Homo sapiens
gcaacataaaatgga

SEQ ID NO: 1125663 - DNA, 15 bp, Homo sapiens
ggcaacataaaatgg

SEQ ID NO: 1125664 - DNA, 15 bp, Homo sapiens
aggcaacataaaatg

SEQ ID NO: 1125665 - DNA, 15 bp, Homo sapiens
aaggcaacataaaat

SEQ ID NO: 1125666 - DNA, 15 bp, Homo sapiens
caaggcaacataaaa

SEQ ID NO: 1125667 - DNA, 15 bp, Homo sapiens
acaaggcaacataaa

SEQ ID NO: 1125668 - DNA, 15 bp, Homo sapiens
tacaaggcaacataa

SEQ ID NO: 1125669 - DNA, 15 bp, Homo sapiens
gtacaaggcaacata

SEQ ID NO: 1125670 - DNA, 15 bp, Homo sapiens
tgtacaaggcaacat

SEQ ID NO: 1125671 - DNA, 15 bp, Homo sapiens
atgtacaaggcaaca

SEQ ID NO: 1125672 - DNA, 15 bp, Homo sapiens
catgtacaaggcaac

SEQ ID NO: 1125673 - DNA, 15 bp, Homo sapiens
tcatgtacaaggcaa

SEQ ID NO: 1125674 - DNA, 15 bp, Homo sapiens
atcatgtacaaggca

SEQ ID NO: 1125675 - DNA, 15 bp, Homo sapiens
catcatgtacaaggc

SEQ ID NO: 1125676 - DNA, 15 bp, Homo sapiens
tcatcatgtacaagg

SEQ ID NO: 1125677 - DNA, 15 bp, Homo sapiens
ttcatcatgtacaag

SEQ ID NO: 1125678 - DNA, 15 bp, Homo sapiens
tttcatcatgtacaa

SEQ ID NO: 1125679 - DNA, 15 bp, Homo sapiens
ttttcatcatgtaca

SEQ ID NO: 1125680 - DNA, 15 bp, Homo sapiens
cttttcatcatgtac

SEQ ID NO: 1125681 - DNA, 15 bp, Homo sapiens
acttttcatcatgta

SEQ ID NO: 1125682 - DNA, 15 bp, Homo sapiens
cacttttcatcatgt

SEQ ID NO: 1125683 - DNA, 15 bp, Homo sapiens
tcacttttcatcatg

SEQ ID NO: 1125684 - DNA, 15 bp, Homo sapiens
ttcacttttcatcat

SEQ ID NO: 1125685 - DNA, 15 bp, Homo sapiens
cttcacttttcatca

SEQ ID NO: 1125686 - DNA, 15 bp, Homo sapiens
gcttcacttttcatc

SEQ ID NO: 1125687 - DNA, 15 bp, Homo sapiens
tgcttcacttttcat

SEQ ID NO: 1125688 - DNA, 15 bp, Homo sapiens
gtgcttcacttttca

SEQ ID NO: 1125689 - DNA, 15 bp, Homo sapiens
agtgcttcacttttc

SEQ ID NO: 1125690 - DNA, 15 bp, Homo sapiens
tagtgcttcactttt

SEQ ID NO: 1125691 - DNA, 15 bp, Homo sapiens
gtagtgcttcacttt

SEQ ID NO: 1125692 - DNA, 15 bp, Homo sapiens
agtagtgcttcactt

SEQ ID NO: 1125693 - DNA, 15 bp, Homo sapiens
aagtagtgcttcact

SEQ ID NO: 1125694 - DNA, 15 bp, Homo sapiens
caagtagtgcttcac

SEQ ID NO: 1125695 - DNA, 15 bp, Homo sapiens
acaagtagtgcttca

SEQ ID NO: 1125696 - DNA, 15 bp, Homo sapiens
tacaagtagtgcttc

SEQ ID NO: 1125697 - DNA, 15 bp, Homo sapiens
ttacaagtagtgctt

SEQ ID NO: 1125698 - DNA, 15 bp, Homo sapiens
attacaagtagtgct

SEQ ID NO: 1125699 - DNA, 15 bp, Homo sapiens
cattacaagtagtgc

SEQ ID NO: 1125700 - DNA, 15 bp, Homo sapiens
gcattacaagtagtg

SEQ ID NO: 1125701 - DNA, 15 bp, Homo sapiens
cgcattacaagtagt

SEQ ID NO: 1125702 - DNA, 15 bp, Homo sapiens
acgcattacaagtag

SEQ ID NO: 1125703 - DNA, 15 bp, Homo sapiens
tacgcattacaagta

SEQ ID NO: 1125704 - DNA, 15 bp, Homo sapiens
ctacgcattacaagt

SEQ ID NO: 1125705 - DNA, 15 bp, Homo sapiens
gctacgcattacaag

SEQ ID NO: 1125706 - DNA, 15 bp, Homo sapiens
agctacgcattacaa

SEQ ID NO: 1125707 - DNA, 15 bp, Homo sapiens
gagctacgcattaca

SEQ ID NO: 1125708 - DNA, 15 bp, Homo sapiens
agagctacgcattac

SEQ ID NO: 1125709 - DNA, 15 bp, Homo sapiens
tagagctacgcatta

SEQ ID NO: 1125710 - DNA, 15 bp, Homo sapiens
atagagctacgcatt

SEQ ID NO: 1125711 - DNA, 15 bp, Homo sapiens
aatagagctacgcat

SEQ ID NO: 1125712 - DNA, 15 bp, Homo sapiens
taatagagctacgca

SEQ ID NO: 1125713 - DNA, 15 bp, Homo sapiens
ctaatagagctacgc

SEQ ID NO: 1125714 - DNA, 15 bp, Homo sapiens
gctaatagagctacg

SEQ ID NO: 1125715 - DNA, 15 bp, Homo sapiens
tgctaatagagctac

SEQ ID NO: 1125716 - DNA, 15 bp, Homo sapiens
ctgctaatagagcta

SEQ ID NO: 1125717 - DNA, 15 bp, Homo sapiens
tctgctaatagagct

SEQ ID NO: 1125718 - DNA, 15 bp, Homo sapiens
ttctgctaatagagc

SEQ ID NO: 1125719 - DNA, 15 bp, Homo sapiens
gttctgctaatagag

SEQ ID NO: 1125720 - DNA, 15 bp, Homo sapiens
agttctgctaataga

SEQ ID NO: 1125721 - DNA, 15 bp, Homo sapiens
aagttctgctaatag

SEQ ID NO: 1125722 - DNA, 15 bp, Homo sapiens
gaagttctgctaata

SEQ ID NO: 1125723 - DNA, 15 bp, Homo sapiens
tgaagttctgctaat

SEQ ID NO: 1125724 - DNA, 15 bp, Homo sapiens
gtgaagttctgctaa

SEQ ID NO: 1125725 - DNA, 15 bp, Homo sapiens
tgtgaagttctgcta

SEQ ID NO: 1125726 - DNA, 15 bp, Homo sapiens
ctgtgaagttctgct

SEQ ID NO: 1125727 - DNA, 15 bp, Homo sapiens
actgtgaagttctgc

SEQ ID NO: 1125728 - DNA, 15 bp, Homo sapiens
aactgtgaagttctg

SEQ ID NO: 1125729 - DNA, 15 bp, Homo sapiens
taactgtgaagttct

SEQ ID NO: 1125730 - DNA, 15 bp, Homo sapiens
ttaactgtgaagttc

SEQ ID NO: 1125731 - DNA, 15 bp, Homo sapiens
tttaactgtgaagtt

SEQ ID NO: 1125732 - DNA, 15 bp, Homo sapiens
atttaactgtgaagt

SEQ ID NO: 1125733 - DNA, 15 bp, Homo sapiens
catttaactgtgaag

SEQ ID NO: 1125734 - DNA, 15 bp, Homo sapiens
tcatttaactgtgaa

SEQ ID NO: 1125735 - DNA, 15 bp, Homo sapiens
atcatttaactgtga

SEQ ID NO: 1125736 - DNA, 15 bp, Homo sapiens
catcatttaactgtg

SEQ ID NO: 1125737 - DNA, 15 bp, Homo sapiens
gcatcatttaactgt

SEQ ID NO: 1125738 - DNA, 15 bp, Homo sapiens
ggcatcatttaactg

SEQ ID NO: 1125739 - DNA, 15 bp, Homo sapiens
tggcatcatttaact

SEQ ID NO: 1125740 - DNA, 15 bp, Homo sapiens
ctggcatcatttaac

SEQ ID NO: 1125741 - DNA, 15 bp, Homo sapiens
actggcatcatttaa

SEQ ID NO: 1125742 - DNA, 15 bp, Homo sapiens
aactggcatcattta

SEQ ID NO: 1125743 - DNA, 15 bp, Homo sapiens
aaactggcatcattt

SEQ ID NO: 1125744 - DNA, 15 bp, Homo sapiens
taaactggcatcatt

SEQ ID NO: 1125745 - DNA, 15 bp, Homo sapiens
ttaaactggcatcat

SEQ ID NO: 1125746 - DNA, 15 bp, Homo sapiens
attaaactggcatca

SEQ ID NO: 1125747 - DNA, 15 bp, Homo sapiens
cattaaactggcatc

SEQ ID NO: 1125748 - DNA, 15 bp, Homo sapiens
acattaaactggcat

SEQ ID NO: 1125749 - DNA, 15 bp, Homo sapiens
aacattaaactggca

SEQ ID NO: 1125750 - DNA, 15 bp, Homo sapiens
caacattaaactggc

SEQ ID NO: 1125751 - DNA, 15 bp, Homo sapiens
tcaacattaaactgg

SEQ ID NO: 1125752 - DNA, 15 bp, Homo sapiens
atcaacattaaactg

SEQ ID NO: 1125753 - DNA, 15 bp, Homo sapiens
tatcaacattaaact

SEQ ID NO: 1125754 - DNA, 15 bp, Homo sapiens
atatcaacattaaac

SEQ ID NO: 1125755 - DNA, 15 bp, Homo sapiens
gatatcaacattaaa

SEQ ID NO: 1125756 - DNA, 15 bp, Homo sapiens
agatatcaacattaa

SEQ ID NO: 1125757 - DNA, 15 bp, Homo sapiens
aagatatcaacatta

SEQ ID NO: 1125758 - DNA, 15 bp, Homo sapiens
aaagatatcaacatt

SEQ ID NO: 1125759 - DNA, 15 bp, Homo sapiens
taaagatatcaacat

SEQ ID NO: 1125760 - DNA, 15 bp, Homo sapiens
ctaaagatatcaaca

SEQ ID NO: 1125761 - DNA, 15 bp, Homo sapiens
tctaaagatatcaac

SEQ ID NO: 1125762 - DNA, 15 bp, Homo sapiens
atctaaagatatcaa

SEQ ID NO: 1125763 - DNA, 15 bp, Homo sapiens
catctaaagatatca

SEQ ID NO: 1125764 - DNA, 15 bp, Homo sapiens
ccatctaaagatatc

SEQ ID NO: 1125765 - DNA, 15 bp, Homo sapiens
accatctaaagatat

SEQ ID NO: 1125766 - DNA, 15 bp, Homo sapiens
aaccatctaaagata

SEQ ID NO: 1125767 - DNA, 15 bp, Homo sapiens
gaaccatctaaagat

SEQ ID NO: 1125768 - DNA, 15 bp, Homo sapiens
ggaaccatctaaaga

SEQ ID NO: 1125769 - DNA, 15 bp, Homo sapiens
tggaaccatctaaag

SEQ ID NO: 1125770 - DNA, 15 bp, Homo sapiens
ttggaaccatctaaa

SEQ ID NO: 1125771 - DNA, 15 bp, Homo sapiens
attggaaccatctaa

SEQ ID NO: 1125772 - DNA, 15 bp, Homo sapiens
tattggaaccatcta

SEQ ID NO: 1125773 - DNA, 15 bp, Homo sapiens
ctattggaaccatct

SEQ ID NO: 1125774 - DNA, 15 bp, Homo sapiens
tctattggaaccatc

SEQ ID NO: 1125775 - DNA, 15 bp, Homo sapiens
ttctattggaaccat

SEQ ID NO: 1125776 - DNA, 15 bp, Homo sapiens
tttctattggaacca

SEQ ID NO: 1125777 - DNA, 15 bp, Homo sapiens
ttttctattggaacc

SEQ ID NO: 1125778 - DNA, 15 bp, Homo sapiens
attttctattggaac

SEQ ID NO: 1125779 - DNA, 15 bp, Homo sapiens
gattttctattggaa

SEQ ID NO: 1125780 - DNA, 15 bp, Homo sapiens
tgattttctattgga

SEQ ID NO: 1125781 - DNA, 15 bp, Homo sapiens
ctgattttctattgg

SEQ ID NO: 1125782 - DNA, 15 bp, Homo sapiens
actgattttctattg

SEQ ID NO: 1125783 - DNA, 15 bp, Homo sapiens
aactgattttctatt

SEQ ID NO: 1125784 - DNA, 15 bp, Homo sapiens
caactgattttctat

SEQ ID NO: 1125785 - DNA, 15 bp, Homo sapiens
acaactgattttcta

SEQ ID NO: 1125786 - DNA, 15 bp, Homo sapiens
tacaactgattttct

SEQ ID NO: 1125787 - DNA, 15 bp, Homo sapiens
atacaactgattttc

SEQ ID NO: 1125788 - DNA, 15 bp, Homo sapiens
aatacaactgatttt

SEQ ID NO: 1125789 - DNA, 15 bp, Homo sapiens
taatacaactgattt

SEQ ID NO: 1125790 - DNA, 15 bp, Homo sapiens
ctaatacaactgatt

SEQ ID NO: 1125791 - DNA, 15 bp, Homo sapiens
actaatacaactgat

SEQ ID NO: 1125792 - DNA, 15 bp, Homo sapiens
gactaatacaactga

SEQ ID NO: 1125793 - DNA, 15 bp, Homo sapiens
cgactaatacaactg

SEQ ID NO: 1125794 - DNA, 15 bp, Homo sapiens
ccgactaatacaact

SEQ ID NO: 1125795 - DNA, 15 bp, Homo sapiens
cccgactaatacaac

SEQ ID NO: 1125796 - DNA, 15 bp, Homo sapiens
ccccgactaatacaa

SEQ ID NO: 1125797 - DNA, 15 bp, Homo sapiens
accccgactaataca

SEQ ID NO: 1125798 - DNA, 15 bp, Homo sapiens
aaccccgactaatac

SEQ ID NO: 1125799 - DNA, 15 bp, Homo sapiens
gaaccccgactaata

SEQ ID NO: 1125800 - DNA, 15 bp, Homo sapiens
agaaccccgactaat

SEQ ID NO: 1125801 - DNA, 15 bp, Homo sapiens
gagaaccccgactaa

SEQ ID NO: 1125802 - DNA, 15 bp, Homo sapiens
ggagaaccccgacta

SEQ ID NO: 1125803 - DNA, 15 bp, Homo sapiens
tggagaaccccgact

SEQ ID NO: 1125804 - DNA, 15 bp, Homo sapiens
gtggagaaccccgac

SEQ ID NO: 1125805 - DNA, 15 bp, Homo sapiens
tgtggagaaccccga

SEQ ID NO: 1125806 - DNA, 15 bp, Homo sapiens
ttgtggagaaccccg

SEQ ID NO: 1125807 - DNA, 15 bp, Homo sapiens
tttgtggagaacccc

SEQ ID NO: 1125808 - DNA, 15 bp, Homo sapiens
ttttgtggagaaccc

SEQ ID NO: 1125809 - DNA, 15 bp, Homo sapiens
tttttgtggagaacc

SEQ ID NO: 1125810 - DNA, 15 bp, Homo sapiens
gtttttgtggagaac

SEQ ID NO: 1125811 - DNA, 15 bp, Homo sapiens
tgtttttgtggagaa

SEQ ID NO: 1125812 - DNA, 15 bp, Homo sapiens
ctgtttttgtggaga

SEQ ID NO: 1125813 - DNA, 15 bp, Homo sapiens
tctgtttttgtggag

SEQ ID NO: 1125814 - DNA, 15 bp, Homo sapiens
ttctgtttttgtgga

SEQ ID NO: 1125815 - DNA, 15 bp, Homo sapiens
cttctgtttttgtgg

SEQ ID NO: 1125816 - DNA, 15 bp, Homo sapiens
gcttctgtttttgtg

SEQ ID NO: 1125817 - DNA, 15 bp, Homo sapiens
tgcttctgtttttgt

SEQ ID NO: 1125818 - DNA, 15 bp, Homo sapiens
ttgcttctgtttttg

SEQ ID NO: 1125819 - DNA, 15 bp, Homo sapiens
gttgcttctgttttt

SEQ ID NO: 1125820 - DNA, 15 bp, Homo sapiens
tgttgcttctgtttt

SEQ ID NO: 1125821 - DNA, 15 bp, Homo sapiens
ctgttgcttctgttt

SEQ ID NO: 1125822 - DNA, 15 bp, Homo sapiens
cctgttgcttctgtt

SEQ ID NO: 1125823 - DNA, 15 bp, Homo sapiens
tcctgttgcttctgt

SEQ ID NO: 1125824 - DNA, 15 bp, Homo sapiens
atcctgttgcttctg

SEQ ID NO: 1125825 - DNA, 15 bp, Homo sapiens
catcctgttgcttct

SEQ ID NO: 1125826 - DNA, 15 bp, Homo sapiens
acatcctgttgcttc

SEQ ID NO: 1125827 - DNA, 15 bp, Homo sapiens
tacatcctgttgctt

SEQ ID NO: 1125828 - DNA, 15 bp, Homo sapiens
gtacatcctgttgct

SEQ ID NO: 1125829 - DNA, 15 bp, Homo sapiens
ggtacatcctgttgc

SEQ ID NO: 1125830 - DNA, 15 bp, Homo sapiens
aggtacatcctgttg

SEQ ID NO: 1125831 - DNA, 15 bp, Homo sapiens
caggtacatcctgtt

SEQ ID NO: 1125832 - DNA, 15 bp, Homo sapiens
ccaggtacatcctgt

SEQ ID NO: 1125833 - DNA, 15 bp, Homo sapiens
tccaggtacatcctg

SEQ ID NO: 1125834 - DNA, 15 bp, Homo sapiens
atccaggtacatcct

SEQ ID NO: 1125835 - DNA, 15 bp, Homo sapiens
gatccaggtacatcc

SEQ ID NO: 1125836 - DNA, 15 bp, Homo sapiens
agatccaggtacatc

SEQ ID NO: 1125837 - DNA, 15 bp, Homo sapiens
tagatccaggtacat

SEQ ID NO: 1125838 - DNA, 15 bp, Homo sapiens
atagatccaggtaca

SEQ ID NO: 1125839 - DNA, 15 bp, Homo sapiens
gatagatccaggtac

SEQ ID NO: 1125840 - DNA, 15 bp, Homo sapiens
agatagatccaggta

SEQ ID NO: 1125841 - DNA, 15 bp, Homo sapiens
gagatagatccaggt

SEQ ID NO: 1125842 - DNA, 15 bp, Homo sapiens
cgagatagatccagg

SEQ ID NO: 1125843 - DNA, 15 bp, Homo sapiens
tcgagatagatccag

SEQ ID NO: 1125844 - DNA, 15 bp, Homo sapiens
atcgagatagatcca

SEQ ID NO: 1125845 - DNA, 15 bp, Homo sapiens
gatcgagatagatcc

SEQ ID NO: 1125846 - DNA, 15 bp, Homo sapiens
agatcgagatagatc

SEQ ID NO: 1125847 - DNA, 15 bp, Homo sapiens
tagatcgagatagat

SEQ ID NO: 1125848 - DNA, 15 bp, Homo sapiens
atagatcgagataga

SEQ ID NO: 1125849 - DNA, 15 bp, Homo sapiens
gatagatcgagatag

SEQ ID NO: 1125850 - DNA, 15 bp, Homo sapiens
agatagatcgagata

SEQ ID NO: 1125851 - DNA, 15 bp, Homo sapiens
tagatagatcgagat

SEQ ID NO: 1125852 - DNA, 15 bp, Homo sapiens
atagatagatcgaga

SEQ ID NO: 1125853 - DNA, 15 bp, Homo sapiens
tatagatagatcgag

SEQ ID NO: 1125854 - DNA, 15 bp, Homo sapiens
atatagatagatcga

SEQ ID NO: 1125855 - DNA, 15 bp, Homo sapiens
catatagatagatcg

SEQ ID NO: 1125856 - DNA, 15 bp, Homo sapiens
acatatagatagatc

SEQ ID NO: 1125857 - DNA, 15 bp, Homo sapiens
gacatatagatagat

SEQ ID NO: 1125858 - DNA, 15 bp, Homo sapiens
agacatatagataga

SEQ ID NO: 1125859 - DNA, 15 bp, Homo sapiens
tagacatatagatag

SEQ ID NO: 1125860 - DNA, 15 bp, Homo sapiens
atagacatatagata

SEQ ID NO: 1125861 - DNA, 15 bp, Homo sapiens
tatagacatatagat

SEQ ID NO: 1125862 - DNA, 15 bp, Homo sapiens
atatagacatataga

SEQ ID NO: 1125863 - DNA, 15 bp, Homo sapiens
catatagacatatag

SEQ ID NO: 1125864 - DNA, 15 bp, Homo sapiens
gcatatagacatata

SEQ ID NO: 1125865 - DNA, 15 bp, Homo sapiens
cgcatatagacatat

SEQ ID NO: 1125866 - DNA, 15 bp, Homo sapiens
tcgcatatagacata

SEQ ID NO: 1125867 - DNA, 15 bp, Homo sapiens
ctcgcatatagacat

SEQ ID NO: 1125868 - DNA, 15 bp, Homo sapiens
cctcgcatatagaca

SEQ ID NO: 1125869 - DNA, 15 bp, Homo sapiens
acctcgcatatagac

SEQ ID NO: 1125870 - DNA, 15 bp, Homo sapiens
aacctcgcatataga

SEQ ID NO: 1125871 - DNA, 15 bp, Homo sapiens
caacctcgcatatag

SEQ ID NO: 1125872 - DNA, 15 bp, Homo sapiens
ccaacctcgcatata

SEQ ID NO: 1125873 - DNA, 15 bp, Homo sapiens
cccaacctcgcatat

SEQ ID NO: 1125874 - DNA, 15 bp, Homo sapiens
tcccaacctcgcata

SEQ ID NO: 1125875 - DNA, 15 bp, Homo sapiens
ctcccaacctcgcat

SEQ ID NO: 1125876 - DNA, 15 bp, Homo sapiens
tctcccaacctcgca

SEQ ID NO: 1125877 - DNA, 15 bp, Homo sapiens
ctctcccaacctcgc

SEQ ID NO: 1125878 - DNA, 15 bp, Homo sapiens
tctctcccaacctcg

SEQ ID NO: 1125879 - DNA, 15 bp, Homo sapiens
atctctcccaacctc

SEQ ID NO: 1125880 - DNA, 15 bp, Homo sapiens
aatctctcccaacct

SEQ ID NO: 1125881 - DNA, 15 bp, Homo sapiens
gaatctctcccaacc

SEQ ID NO: 1125882 - DNA, 15 bp, Homo sapiens
tgaatctctcccaac

SEQ ID NO: 1125883 - DNA, 15 bp, Homo sapiens
atgaatctctcccaa

SEQ ID NO: 1125884 - DNA, 15 bp, Homo sapiens
aatgaatctctccca

SEQ ID NO: 1125885 - DNA, 15 bp, Homo sapiens
aaatgaatctctccc

SEQ ID NO: 1125886 - DNA, 15 bp, Homo sapiens
taaatgaatctctcc

SEQ ID NO: 1125887 - DNA, 15 bp, Homo sapiens
ataaatgaatctctc

SEQ ID NO: 1125888 - DNA, 15 bp, Homo sapiens
aataaatgaatctct

SEQ ID NO: 1125889 - DNA, 15 bp, Homo sapiens
aaataaatgaatctc

SEQ ID NO: 1125890 - DNA, 15 bp, Homo sapiens
aaaataaatgaatct

SEQ ID NO: 1125891 - DNA, 15 bp, Homo sapiens
taaaataaatgaatc

SEQ ID NO: 1125892 - DNA, 15 bp, Homo sapiens
ttaaaataaatgaat

SEQ ID NO: 1125893 - DNA, 15 bp, Homo sapiens
cttaaaataaatgaa

SEQ ID NO: 1125894 - DNA, 15 bp, Homo sapiens
ccttaaaataaatga

SEQ ID NO: 1125895 - DNA, 15 bp, Homo sapiens
tccttaaaataaatg

SEQ ID NO: 1125896 - DNA, 15 bp, Homo sapiens
ttccttaaaataaat

SEQ ID NO: 1125897 - DNA, 15 bp, Homo sapiens
attccttaaaataaa

SEQ ID NO: 1125898 - DNA, 15 bp, Homo sapiens
aattccttaaaataa

SEQ ID NO: 1125899 - DNA, 15 bp, Homo sapiens
caattccttaaaata

SEQ ID NO: 1125900 - DNA, 15 bp, Homo sapiens
ccaattccttaaaat

SEQ ID NO: 1125901 - DNA, 15 bp, Homo sapiens
gccaattccttaaaa

SEQ ID NO: 1125902 - DNA, 15 bp, Homo sapiens
agccaattccttaaa

SEQ ID NO: 1125903 - DNA, 15 bp, Homo sapiens
gagccaattccttaa

SEQ ID NO: 1125904 - DNA, 15 bp, Homo sapiens
tgagccaattcctta

SEQ ID NO: 1125905 - DNA, 15 bp, Homo sapiens
gtgagccaattcctt

SEQ ID NO: 1125906 - DNA, 15 bp, Homo sapiens
cgtgagccaattcct

SEQ ID NO: 1125907 - DNA, 15 bp, Homo sapiens
gcgtgagccaattcc

SEQ ID NO: 1125908 - DNA, 15 bp, Homo sapiens
tgcgtgagccaattc

SEQ ID NO: 1125909 - DNA, 15 bp, Homo sapiens
ttgcgtgagccaatt

SEQ ID NO: 1125910 - DNA, 15 bp, Homo sapiens
attgcgtgagccaat

SEQ ID NO: 1125911 - DNA, 15 bp, Homo sapiens
aattgcgtgagccaa

SEQ ID NO: 1125912 - DNA, 15 bp, Homo sapiens
caattgcgtgagcca

SEQ ID NO: 1125913 - DNA, 15 bp, Homo sapiens
acaattgcgtgagcc

SEQ ID NO: 1125914 - DNA, 15 bp, Homo sapiens
cacaattgcgtgagc

SEQ ID NO: 1125915 - DNA, 15 bp, Homo sapiens
ccacaattgcgtgag

SEQ ID NO: 1125916 - DNA, 15 bp, Homo sapiens
tccacaattgcgtga

SEQ ID NO: 1125917 - DNA, 15 bp, Homo sapiens
ctccacaattgcgtg

SEQ ID NO: 1125918 - DNA, 15 bp, Homo sapiens
cctccacaattgcgt

SEQ ID NO: 1125919 - DNA, 15 bp, Homo sapiens
gcctccacaattgcg

SEQ ID NO: 1125920 - DNA, 15 bp, Homo sapiens
agcctccacaattgc

SEQ ID NO: 1125921 - DNA, 15 bp, Homo sapiens
aagcctccacaattg

SEQ ID NO: 1125922 - DNA, 15 bp, Homo sapiens
caagcctccacaatt

SEQ ID NO: 1125923 - DNA, 15 bp, Homo sapiens
acaagcctccacaat

SEQ ID NO: 1125924 - DNA, 15 bp, Homo sapiens
aacaagcctccacaa

SEQ ID NO: 1125925 - DNA, 15 bp, Homo sapiens
caacaagcctccaca

SEQ ID NO: 1125926 - DNA, 15 bp, Homo sapiens
tcaacaagcctccac

SEQ ID NO: 1125927 - DNA, 15 bp, Homo sapiens
ctcaacaagcctcca

SEQ ID NO: 1125928 - DNA, 15 bp, Homo sapiens
actcaacaagcctcc

SEQ ID NO: 1125929 - DNA, 15 bp, Homo sapiens
gactcaacaagcctc

SEQ ID NO: 1125930 - DNA, 15 bp, Homo sapiens
ggactcaacaagcct

SEQ ID NO: 1125931 - DNA, 15 bp, Homo sapiens
tggactcaacaagcc

SEQ ID NO: 1125932 - DNA, 15 bp, Homo sapiens
ttggactcaacaagc

SEQ ID NO: 1125933 - DNA, 15 bp, Homo sapiens
tttggactcaacaag

SEQ ID NO: 1125934 - DNA, 15 bp, Homo sapiens
ttttggactcaacaa

SEQ ID NO: 1125935 - DNA, 15 bp, Homo sapiens
attttggactcaaca

SEQ ID NO: 1125936 - DNA, 15 bp, Homo sapiens
gattttggactcaac

SEQ ID NO: 1125937 - DNA, 15 bp, Homo sapiens
agattttggactcaa

SEQ ID NO: 1125938 - DNA, 15 bp, Homo sapiens
cagattttggactca

SEQ ID NO: 1125939 - DNA, 15 bp, Homo sapiens
tcagattttggactc

SEQ ID NO: 1125940 - DNA, 15 bp, Homo sapiens
ttcagattttggact

SEQ ID NO: 1125941 - DNA, 15 bp, Homo sapiens
cttcagattttggac

SEQ ID NO: 1125942 - DNA, 15 bp, Homo sapiens
ccttcagattttgga

SEQ ID NO: 1125943 - DNA, 15 bp, Homo sapiens
accttcagattttgg

SEQ ID NO: 1125944 - DNA, 15 bp, Homo sapiens
caccttcagattttg

SEQ ID NO: 1125945 - DNA, 15 bp, Homo sapiens
acaccttcagatttt

SEQ ID NO: 1125946 - DNA, 15 bp, Homo sapiens
tacaccttcagattt

SEQ ID NO: 1125947 - DNA, 15 bp, Homo sapiens
ctacaccttcagatt

SEQ ID NO: 1125948 - DNA, 15 bp, Homo sapiens
cctacaccttcagat

SEQ ID NO: 1125949 - DNA, 15 bp, Homo sapiens
gcctacaccttcaga

SEQ ID NO: 1125950 - DNA, 15 bp, Homo sapiens
ggcctacaccttcag

SEQ ID NO: 1125951 - DNA, 15 bp, Homo sapiens
aggcctacaccttca

SEQ ID NO: 1125952 - DNA, 15 bp, Homo sapiens
caggcctacaccttc

SEQ ID NO: 1125953 - DNA, 15 bp, Homo sapiens
gcaggcctacacctt

SEQ ID NO: 1125954 - DNA, 15 bp, Homo sapiens
cgcaggcctacacct

SEQ ID NO: 1125955 - DNA, 15 bp, Homo sapiens
ccgcaggcctacacc

SEQ ID NO: 1125956 - DNA, 15 bp, Homo sapiens
accgcaggcctacac

SEQ ID NO: 1125957 - DNA, 15 bp, Homo sapiens
gaccgcaggcctaca

SEQ ID NO: 1125958 - DNA, 15 bp, Homo sapiens
agaccgcaggcctac

SEQ ID NO: 1125959 - DNA, 15 bp, Homo sapiens
cagaccgcaggccta

SEQ ID NO: 1125960 - DNA, 15 bp, Homo sapiens
tcagaccgcaggcct

SEQ ID NO: 1125961 - DNA, 15 bp, Homo sapiens
ttcagaccgcaggcc

SEQ ID NO: 1125962 - DNA, 15 bp, Homo sapiens
cttcagaccgcaggc

SEQ ID NO: 1125963 - DNA, 15 bp, Homo sapiens
tcttcagaccgcagg

SEQ ID NO: 1125964 - DNA, 15 bp, Homo sapiens
gtcttcagaccgcag

SEQ ID NO: 1125965 - DNA, 15 bp, Homo sapiens
agtcttcagaccgca

SEQ ID NO: 1125966 - DNA, 15 bp, Homo sapiens
gagtcttcagaccgc

SEQ ID NO: 1125967 - DNA, 15 bp, Homo sapiens
tgagtcttcagaccg

SEQ ID NO: 1125968 - DNA, 15 bp, Homo sapiens
ctgagtcttcagacc

SEQ ID NO: 1125969 - DNA, 15 bp, Homo sapiens
cctgagtcttcagac

SEQ ID NO: 1125970 - DNA, 15 bp, Homo sapiens
ccctgagtcttcaga

SEQ ID NO: 1125971 - DNA, 15 bp, Homo sapiens
tccctgagtcttcag

SEQ ID NO: 1125972 - DNA, 15 bp, Homo sapiens
ctccctgagtcttca

SEQ ID NO: 1125973 - DNA, 15 bp, Homo sapiens
cctccctgagtcttc

SEQ ID NO: 1125974 - DNA, 15 bp, Homo sapiens
tcctccctgagtctt

SEQ ID NO: 1125975 - DNA, 15 bp, Homo sapiens
ctcctccctgagtct

SEQ ID NO: 1125976 - DNA, 15 bp, Homo sapiens
actcctccctgagtc

SEQ ID NO: 1125977 - DNA, 15 bp, Homo sapiens
aactcctccctgagt

SEQ ID NO: 1125978 - DNA, 15 bp, Homo sapiens
caactcctccctgag

SEQ ID NO: 1125979 - DNA, 15 bp, Homo sapiens
gcaactcctccctga

SEQ ID NO: 1125980 - DNA, 15 bp, Homo sapiens
tgcaactcctccctg

SEQ ID NO: 1125981 - DNA, 15 bp, Homo sapiens
ctgcaactcctccct

SEQ ID NO: 1125982 - DNA, 15 bp, Homo sapiens
actgcaactcctccc

SEQ ID NO: 1125983 - DNA, 15 bp, Homo sapiens
aactgcaactcctcc

SEQ ID NO: 1125984 - DNA, 15 bp, Homo sapiens
gaactgcaactcctc

SEQ ID NO: 1125985 - DNA, 15 bp, Homo sapiens
ggaactgcaactcct

SEQ ID NO: 1125986 - DNA, 15 bp, Homo sapiens
tggaactgcaactcc

SEQ ID NO: 1125987 - DNA, 15 bp, Homo sapiens
ttggaactgcaactc

SEQ ID NO: 1125988 - DNA, 15 bp, Homo sapiens
attggaactgcaact

SEQ ID NO: 1125989 - DNA, 15 bp, Homo sapiens
gattggaactgcaac

SEQ ID NO: 1125990 - DNA, 15 bp, Homo sapiens
ggattggaactgcaa

SEQ ID NO: 1125991 - DNA, 15 bp, Homo sapiens
tggattggaactgca

SEQ ID NO: 1125992 - DNA, 15 bp, Homo sapiens
ttggattggaactgc

SEQ ID NO: 1125993 - DNA, 15 bp, Homo sapiens
tttggattggaactg

SEQ ID NO: 1125994 - DNA, 15 bp, Homo sapiens
ctttggattggaact

SEQ ID NO: 1125995 - DNA, 15 bp, Homo sapiens
cctttggattggaac

SEQ ID NO: 1125996 - DNA, 15 bp, Homo sapiens
gcctttggattggaa

SEQ ID NO: 1125997 - DNA, 15 bp, Homo sapiens
tgcctttggattgga

SEQ ID NO: 1125998 - DNA, 15 bp, Homo sapiens
ttgcctttggattgg

SEQ ID NO: 1125999 - DNA, 15 bp, Homo sapiens
attgcctttggattg

SEQ ID NO: 1126000 - DNA, 15 bp, Homo sapiens
cattgcctttggatt

SEQ ID NO: 1126001 - DNA, 15 bp, Homo sapiens
acattgcctttggat

SEQ ID NO: 1126002 - DNA, 15 bp, Homo sapiens
cacattgcctttgga

SEQ ID NO: 1126003 - DNA, 15 bp, Homo sapiens
gcacattgcctttgg

SEQ ID NO: 1126004 - DNA, 15 bp, Homo sapiens
agcacattgcctttg

SEQ ID NO: 1126005 - DNA, 15 bp, Homo sapiens
cagcacattgccttt

SEQ ID NO: 1126006 - DNA, 15 bp, Homo sapiens
ccagcacattgcctt

SEQ ID NO: 1126007 - DNA, 15 bp, Homo sapiens
tccagcacattgcct

SEQ ID NO: 1126008 - DNA, 15 bp, Homo sapiens
ctccagcacattgcc

SEQ ID NO: 1126009 - DNA, 15 bp, Homo sapiens
tctccagcacattgc

SEQ ID NO: 1126010 - DNA, 15 bp, Homo sapiens
ttctccagcacattg

SEQ ID NO: 1126011 - DNA, 15 bp, Homo sapiens
attctccagcacatt

SEQ ID NO: 1126012 - DNA, 15 bp, Homo sapiens
cattctccagcacat

SEQ ID NO: 1126013 - DNA, 15 bp, Homo sapiens
gcattctccagcaca

SEQ ID NO: 1126014 - DNA, 15 bp, Homo sapiens
ggcattctccagcac

SEQ ID NO: 1126015 - DNA, 15 bp, Homo sapiens
aggcattctccagca

SEQ ID NO: 1126016 - DNA, 15 bp, Homo sapiens
aaggcattctccagc

SEQ ID NO: 1126017 - DNA, 15 bp, Homo sapiens
gaaggcattctccag

SEQ ID NO: 1126018 - DNA, 15 bp, Homo sapiens
agaaggcattctcca

SEQ ID NO: 1126019 - DNA, 15 bp, Homo sapiens
aagaaggcattctcc

SEQ ID NO: 1126020 - DNA, 15 bp, Homo sapiens
caagaaggcattctc

SEQ ID NO: 1126021 - DNA, 15 bp, Homo sapiens
tcaagaaggcattct

SEQ ID NO: 1126022 - DNA, 15 bp, Homo sapiens
atcaagaaggcattc

SEQ ID NO: 1126023 - DNA, 15 bp, Homo sapiens
gatcaagaaggcatt

SEQ ID NO: 1126024 - DNA, 15 bp, Homo sapiens
tgatcaagaaggcat

SEQ ID NO: 1126025 - DNA, 15 bp, Homo sapiens
ctgatcaagaaggca

SEQ ID NO: 1126026 - DNA, 15 bp, Homo sapiens
cctgatcaagaaggc

SEQ ID NO: 1126027 - DNA, 15 bp, Homo sapiens
ccctgatcaagaagg

SEQ ID NO: 1126028 - DNA, 15 bp, Homo sapiens
cccctgatcaagaag

SEQ ID NO: 1126029 - DNA, 15 bp, Homo sapiens
tcccctgatcaagaa

SEQ ID NO: 1126030 - DNA, 15 bp, Homo sapiens
ctcccctgatcaaga

SEQ ID NO: 1126031 - DNA, 15 bp, Homo sapiens
cctcccctgatcaag

SEQ ID NO: 1126032 - DNA, 15 bp, Homo sapiens
acctcccctgatcaa

SEQ ID NO: 1126033 - DNA, 15 bp, Homo sapiens
gacctcccctgatca

SEQ ID NO: 1126034 - DNA, 15 bp, Homo sapiens
tgacctcccctgatc

SEQ ID NO: 1126035 - DNA, 15 bp, Homo sapiens
ctgacctcccctgat

SEQ ID NO: 1126036 - DNA, 15 bp, Homo sapiens
actgacctcccctga

SEQ ID NO: 1126037 - DNA, 15 bp, Homo sapiens
cactgacctcccctg

SEQ ID NO: 1126038 - DNA, 15 bp, Homo sapiens
acactgacctcccct

SEQ ID NO: 1126039 - DNA, 15 bp, Homo sapiens
aacactgacctcccc

SEQ ID NO: 1126040 - DNA, 15 bp, Homo sapiens
aaacactgacctccc

SEQ ID NO: 1126041 - DNA, 15 bp, Homo sapiens
caaacactgacctcc

SEQ ID NO: 1126042 - DNA, 15 bp, Homo sapiens
acaaacactgacctc

SEQ ID NO: 1126043 - DNA, 15 bp, Homo sapiens
aacaaacactgacct

SEQ ID NO: 1126044 - DNA, 15 bp, Homo sapiens
gaacaaacactgacc

SEQ ID NO: 1126045 - DNA, 15 bp, Homo sapiens
agaacaaacactgac

SEQ ID NO: 1126046 - DNA, 15 bp, Homo sapiens
tagaacaaacactga

SEQ ID NO: 1126047 - DNA, 15 bp, Homo sapiens
atagaacaaacactg

SEQ ID NO: 1126048 - DNA, 15 bp, Homo sapiens
aatagaacaaacact

SEQ ID NO: 1126049 - DNA, 15 bp, Homo sapiens
taatagaacaaacac

SEQ ID NO: 1126050 - DNA, 15 bp, Homo sapiens
ttaatagaacaaaca

SEQ ID NO: 1126051 - DNA, 15 bp, Homo sapiens
cttaatagaacaaac

SEQ ID NO: 1126052 - DNA, 15 bp, Homo sapiens
ccttaatagaacaaa

SEQ ID NO: 1126053 - DNA, 15 bp, Homo sapiens
gccttaatagaacaa

SEQ ID NO: 1126054 - DNA, 15 bp, Homo sapiens
ggccttaatagaaca

SEQ ID NO: 1126055 - DNA, 15 bp, Homo sapiens
aggccttaatagaac

SEQ ID NO: 1126056 - DNA, 15 bp, Homo sapiens
aaggccttaatagaa

SEQ ID NO: 1126057 - DNA, 15 bp, Homo sapiens
aaaggccttaataga

SEQ ID NO: 1126058 - DNA, 15 bp, Homo sapiens
taaaggccttaatag

SEQ ID NO: 1126059 - DNA, 15 bp, Homo sapiens
ctaaaggccttaata

SEQ ID NO: 1126060 - DNA, 15 bp, Homo sapiens
gctaaaggccttaat

SEQ ID NO: 1126061 - DNA, 15 bp, Homo sapiens
agctaaaggccttaa

SEQ ID NO: 1126062 - DNA, 15 bp, Homo sapiens
cagctaaaggcctta

SEQ ID NO: 1126063 - DNA, 15 bp, Homo sapiens
tcagctaaaggcctt

SEQ ID NO: 1126064 - DNA, 15 bp, Homo sapiens
atcagctaaaggcct

SEQ ID NO: 1126065 - DNA, 15 bp, Homo sapiens
catcagctaaaggcc

SEQ ID NO: 1126066 - DNA, 15 bp, Homo sapiens
tcatcagctaaaggc

SEQ ID NO: 1126067 - DNA, 15 bp, Homo sapiens
ctcatcagctaaagg

SEQ ID NO: 1126068 - DNA, 15 bp, Homo sapiens
cctcatcagctaaag

SEQ ID NO: 1126069 - DNA, 15 bp, Homo sapiens
gcctcatcagctaaa

SEQ ID NO: 1126070 - DNA, 15 bp, Homo sapiens
ggcctcatcagctaa

SEQ ID NO: 1126071 - DNA, 15 bp, Homo sapiens
gggcctcatcagcta

SEQ ID NO: 1126072 - DNA, 15 bp, Homo sapiens
tgggcctcatcagct

SEQ ID NO: 1126073 - DNA, 15 bp, Homo sapiens
gtgggcctcatcagc

SEQ ID NO: 1126074 - DNA, 15 bp, Homo sapiens
agtgggcctcatcag

SEQ ID NO: 1126075 - DNA, 15 bp, Homo sapiens
gagtgggcctcatca

SEQ ID NO: 1126076 - DNA, 15 bp, Homo sapiens
tgagtgggcctcatc

SEQ ID NO: 1126077 - DNA, 15 bp, Homo sapiens
gtgagtgggcctcat

SEQ ID NO: 1126078 - DNA, 15 bp, Homo sapiens
tgtgagtgggcctca

SEQ ID NO: 1126079 - DNA, 15 bp, Homo sapiens
atgtgagtgggcctc

SEQ ID NO: 1126080 - DNA, 15 bp, Homo sapiens
aatgtgagtgggcct

SEQ ID NO: 1126081 - DNA, 15 bp, Homo sapiens
taatgtgagtgggcc

SEQ ID NO: 1126082 - DNA, 15 bp, Homo sapiens
ataatgtgagtgggc

SEQ ID NO: 1126083 - DNA, 15 bp, Homo sapiens
cataatgtgagtggg

SEQ ID NO: 1126084 - DNA, 15 bp, Homo sapiens
ccataatgtgagtgg

SEQ ID NO: 1126085 - DNA, 15 bp, Homo sapiens
tccataatgtgagtg

SEQ ID NO: 1126086 - DNA, 15 bp, Homo sapiens
ctccataatgtgagt

SEQ ID NO: 1126087 - DNA, 15 bp, Homo sapiens
cctccataatgtgag

SEQ ID NO: 1126088 - DNA, 15 bp, Homo sapiens
ccctccataatgtga

SEQ ID NO: 1126089 - DNA, 15 bp, Homo sapiens
accctccataatgtg

SEQ ID NO: 1126090 - DNA, 15 bp, Homo sapiens
taccctccataatgt

SEQ ID NO: 1126091 - DNA, 15 bp, Homo sapiens
ttaccctccataatg

SEQ ID NO: 1126092 - DNA, 15 bp, Homo sapiens
attaccctccataat

SEQ ID NO: 1126093 - DNA, 15 bp, Homo sapiens
tattaccctccataa

SEQ ID NO: 1126094 - DNA, 15 bp, Homo sapiens
atattaccctccata

SEQ ID NO: 1126095 - DNA, 15 bp, Homo sapiens
catattaccctccat

SEQ ID NO: 1126096 - DNA, 15 bp, Homo sapiens
gcatattaccctcca

SEQ ID NO: 1126097 - DNA, 15 bp, Homo sapiens
agcatattaccctcc

SEQ ID NO: 1126098 - DNA, 15 bp, Homo sapiens
aagcatattaccctc

SEQ ID NO: 1126099 - DNA, 15 bp, Homo sapiens
aaagcatattaccct

SEQ ID NO: 1126100 - DNA, 15 bp, Homo sapiens
gaaagcatattaccc

SEQ ID NO: 1126101 - DNA, 15 bp, Homo sapiens
agaaagcatattacc

SEQ ID NO: 1126102 - DNA, 15 bp, Homo sapiens
gagaaagcatattac

SEQ ID NO: 1126103 - DNA, 15 bp, Homo sapiens
tgagaaagcatatta

SEQ ID NO: 1126104 - DNA, 15 bp, Homo sapiens
ttgagaaagcatatt

SEQ ID NO: 1126105 - DNA, 15 bp, Homo sapiens
tttgagaaagcatat

SEQ ID NO: 1126106 - DNA, 15 bp, Homo sapiens
ttttgagaaagcata

SEQ ID NO: 1126107 - DNA, 15 bp, Homo sapiens
gttttgagaaagcat

SEQ ID NO: 1126108 - DNA, 15 bp, Homo sapiens
ggttttgagaaagca

SEQ ID NO: 1126109 - DNA, 15 bp, Homo sapiens
gggttttgagaaagc

SEQ ID NO: 1126110 - DNA, 15 bp, Homo sapiens
tgggttttgagaaag

SEQ ID NO: 1126111 - DNA, 15 bp, Homo sapiens
gtgggttttgagaaa

SEQ ID NO: 1126112 - DNA, 15 bp, Homo sapiens
ggtgggttttgagaa

SEQ ID NO: 1126113 - DNA, 15 bp, Homo sapiens
cggtgggttttgaga

SEQ ID NO: 1126114 - DNA, 15 bp, Homo sapiens
tcggtgggttttgag

SEQ ID NO: 1126115 - DNA, 15 bp, Homo sapiens
atcggtgggttttga

SEQ ID NO: 1126116 - DNA, 15 bp, Homo sapiens
aatcggtgggttttg

SEQ ID NO: 1126117 - DNA, 15 bp, Homo sapiens
aaatcggtgggtttt

SEQ ID NO: 1126118 - DNA, 15 bp, Homo sapiens
taaatcggtgggttt

SEQ ID NO: 1126119 - DNA, 15 bp, Homo sapiens
ttaaatcggtgggtt

SEQ ID NO: 1126120 - DNA, 15 bp, Homo sapiens
tttaaatcggtgggt

SEQ ID NO: 1126121 - DNA, 15 bp, Homo sapiens
atttaaatcggtggg

SEQ ID NO: 1126122 - DNA, 15 bp, Homo sapiens
tatttaaatcggtgg

SEQ ID NO: 1126123 - DNA, 15 bp, Homo sapiens
atatttaaatcggtg

SEQ ID NO: 1126124 - DNA, 15 bp, Homo sapiens
aatatttaaatcggt

SEQ ID NO: 1126125 - DNA, 15 bp, Homo sapiens
taatatttaaatcgg

SEQ ID NO: 1126126 - DNA, 15 bp, Homo sapiens
ttaatatttaaatcg

SEQ ID NO: 1126127 - DNA, 15 bp, Homo sapiens
attaatatttaaatc

SEQ ID NO: 1126128 - DNA, 15 bp, Homo sapiens
gattaatatttaaat

SEQ ID NO: 1126129 - DNA, 15 bp, Homo sapiens
agattaatatttaaa

SEQ ID NO: 1126130 - DNA, 15 bp, Homo sapiens
gagattaatatttaa

SEQ ID NO: 1126131 - DNA, 15 bp, Homo sapiens
tgagattaatattta

SEQ ID NO: 1126132 - DNA, 15 bp, Homo sapiens
atgagattaatattt

SEQ ID NO: 1126133 - DNA, 15 bp, Homo sapiens
tatgagattaatatt

SEQ ID NO: 1126134 - DNA, 15 bp, Homo sapiens
gtatgagattaatat

SEQ ID NO: 1126135 - DNA, 15 bp, Homo sapiens
tgtatgagattaata

SEQ ID NO: 1126136 - DNA, 15 bp, Homo sapiens
ttgtatgagattaat

SEQ ID NO: 1126137 - DNA, 15 bp, Homo sapiens
tttgtatgagattaa

SEQ ID NO: 1126138 - DNA, 15 bp, Homo sapiens
ttttgtatgagatta

SEQ ID NO: 1126139 - DNA, 15 bp, Homo sapiens
tttttgtatgagatt

SEQ ID NO: 1126140 - DNA, 15 bp, Homo sapiens
ttttttgtatgagat

SEQ ID NO: 1126141 - DNA, 15 bp, Homo sapiens
gttttttgtatgaga

SEQ ID NO: 1126142 - DNA, 15 bp, Homo sapiens
tgttttttgtatgag

SEQ ID NO: 1126143 - DNA, 15 bp, Homo sapiens
gtgttttttgtatga

SEQ ID NO: 1126144 - DNA, 15 bp, Homo sapiens
ggtgttttttgtatg

SEQ ID NO: 1126145 - DNA, 15 bp, Homo sapiens
aggtgttttttgtat

SEQ ID NO: 1126146 - DNA, 15 bp, Homo sapiens
aaggtgttttttgta

SEQ ID NO: 1126147 - DNA, 15 bp, Homo sapiens
gaaggtgttttttgt

SEQ ID NO: 1126148 - DNA, 15 bp, Homo sapiens
tgaaggtgttttttg

SEQ ID NO: 1126149 - DNA, 15 bp, Homo sapiens
gtgaaggtgtttttt

SEQ ID NO: 1126150 - DNA, 15 bp, Homo sapiens
tgtgaaggtgttttt

SEQ ID NO: 1126151 - DNA, 15 bp, Homo sapiens
ctgtgaaggtgtttt

SEQ ID NO: 1126152 - DNA, 15 bp, Homo sapiens
tctgtgaaggtgttt

SEQ ID NO: 1126153 - DNA, 15 bp, Homo sapiens
ttctgtgaaggtgtt

SEQ ID NO: 1126154 - DNA, 15 bp, Homo sapiens
tttctgtgaaggtgt

SEQ ID NO: 1126155 - DNA, 15 bp, Homo sapiens
gtttctgtgaaggtg

SEQ ID NO: 1126156 - DNA, 15 bp, Homo sapiens
tgtttctgtgaaggt

SEQ ID NO: 1126157 - DNA, 15 bp, Homo sapiens
atgtttctgtgaagg

SEQ ID NO: 1126158 - DNA, 15 bp, Homo sapiens
gatgtttctgtgaag

SEQ ID NO: 1126159 - DNA, 15 bp, Homo sapiens
ggatgtttctgtgaa

SEQ ID NO: 1126160 - DNA, 15 bp, Homo sapiens
tggatgtttctgtga

SEQ ID NO: 1126161 - DNA, 15 bp, Homo sapiens
ctggatgtttctgtg

SEQ ID NO: 1126162 - DNA, 15 bp, Homo sapiens
tctggatgtttctgt

SEQ ID NO: 1126163 - DNA, 15 bp, Homo sapiens
ttctggatgtttctg

SEQ ID NO: 1126164 - DNA, 15 bp, Homo sapiens
cttctggatgtttct

SEQ ID NO: 1126165 - DNA, 15 bp, Homo sapiens
tcttctggatgtttc

SEQ ID NO: 1126166 - DNA, 15 bp, Homo sapiens
ttcttctggatgttt

SEQ ID NO: 1126167 - DNA, 15 bp, Homo sapiens
attcttctggatgtt

SEQ ID NO: 1126168 - DNA, 15 bp, Homo sapiens
cattcttctggatgt

SEQ ID NO: 1126169 - DNA, 15 bp, Homo sapiens
acattcttctggatg

SEQ ID NO: 1126170 - DNA, 15 bp, Homo sapiens
aacattcttctggat

SEQ ID NO: 1126171 - DNA, 15 bp, Homo sapiens
aaacattcttctgga

SEQ ID NO: 1126172 - DNA, 15 bp, Homo sapiens
caaacattcttctgg

SEQ ID NO: 1126173 - DNA, 15 bp, Homo sapiens
tcaaacattcttctg

SEQ ID NO: 1126174 - DNA, 15 bp, Homo sapiens
gtcaaacattcttct

SEQ ID NO: 1126175 - DNA, 15 bp, Homo sapiens
ggtcaaacattcttc

SEQ ID NO: 1126176 - DNA, 15 bp, Homo sapiens
tggtcaaacattctt

SEQ ID NO: 1126177 - DNA, 15 bp, Homo sapiens
ttggtcaaacattct

SEQ ID NO: 1126178 - DNA, 15 bp, Homo sapiens
tttggtcaaacattc

SEQ ID NO: 1126179 - DNA, 15 bp, Homo sapiens
atttggtcaaacatt

SEQ ID NO: 1126180 - DNA, 15 bp, Homo sapiens
tatttggtcaaacat

SEQ ID NO: 1126181 - DNA, 15 bp, Homo sapiens
atatttggtcaaaca

SEQ ID NO: 1126182 - DNA, 15 bp, Homo sapiens
tatatttggtcaaac

SEQ ID NO: 1126183 - DNA, 15 bp, Homo sapiens
atatatttggtcaaa

SEQ ID NO: 1126184 - DNA, 15 bp, Homo sapiens
catatatttggtcaa

SEQ ID NO: 1126185 - DNA, 15 bp, Homo sapiens
ccatatatttggtca

SEQ ID NO: 1126186 - DNA, 15 bp, Homo sapiens
cccatatatttggtc

SEQ ID NO: 1126187 - DNA, 15 bp, Homo sapiens
gcccatatatttggt

SEQ ID NO: 1126188 - DNA, 15 bp, Homo sapiens
ggcccatatatttgg

SEQ ID NO: 1126189 - DNA, 15 bp, Homo sapiens
tggcccatatatttg

SEQ ID NO: 1126190 - DNA, 15 bp, Homo sapiens
ttggcccatatattt

SEQ ID NO: 1126191 - DNA, 15 bp, Homo sapiens
cttggcccatatatt

SEQ ID NO: 1126192 - DNA, 15 bp, Homo sapiens
acttggcccatatat

SEQ ID NO: 1126193 - DNA, 15 bp, Homo sapiens
aacttggcccatata

SEQ ID NO: 1126194 - DNA, 15 bp, Homo sapiens
caacttggcccatat

SEQ ID NO: 1126195 - DNA, 15 bp, Homo sapiens
tcaacttggcccata

SEQ ID NO: 1126196 - DNA, 15 bp, Homo sapiens
gtcaacttggcccat

SEQ ID NO: 1126197 - DNA, 15 bp, Homo sapiens
tgtcaacttggccca

SEQ ID NO: 1126198 - DNA, 15 bp, Homo sapiens
gtgtcaacttggccc

SEQ ID NO: 1126199 - DNA, 15 bp, Homo sapiens
tgtgtcaacttggcc

SEQ ID NO: 1126200 - DNA, 15 bp, Homo sapiens
atgtgtcaacttggc

SEQ ID NO: 1126201 - DNA, 15 bp, Homo sapiens
tatgtgtcaacttgg

SEQ ID NO: 1126202 - DNA, 15 bp, Homo sapiens
ttatgtgtcaacttg

SEQ ID NO: 1126203 - DNA, 15 bp, Homo sapiens
tttatgtgtcaactt

SEQ ID NO: 1126204 - DNA, 15 bp, Homo sapiens
ttttatgtgtcaact

SEQ ID NO: 1126205 - DNA, 15 bp, Homo sapiens
gttttatgtgtcaac

SEQ ID NO: 1126206 - DNA, 15 bp, Homo sapiens
agttttatgtgtcaa

SEQ ID NO: 1126207 - DNA, 15 bp, Homo sapiens
tagttttatgtgtca

SEQ ID NO: 1126208 - DNA, 15 bp, Homo sapiens
ttagttttatgtgtc

SEQ ID NO: 1126209 - DNA, 15 bp, Homo sapiens
gttagttttatgtgt

SEQ ID NO: 1126210 - DNA, 15 bp, Homo sapiens
ggttagttttatgtg

SEQ ID NO: 1126211 - DNA, 15 bp, Homo sapiens
tggttagttttatgt

SEQ ID NO: 1126212 - DNA, 15 bp, Homo sapiens
atggttagttttatg

SEQ ID NO: 1126213 - DNA, 15 bp, Homo sapiens
gatggttagttttat

SEQ ID NO: 1126214 - DNA, 15 bp, Homo sapiens
tgatggttagtttta

SEQ ID NO: 1126215 - DNA, 15 bp, Homo sapiens
catgatggttagttt

SEQ ID NO: 1126216 - DNA, 15 bp, Homo sapiens
ccatgatggttagtt

SEQ ID NO: 1126217 - DNA, 15 bp, Homo sapiens
gccatgatggttagt

SEQ ID NO: 1126218 - DNA, 15 bp, Homo sapiens
ggccatgatggttag

SEQ ID NO: 1126219 - DNA, 15 bp, Homo sapiens
tggccatgatggtta

SEQ ID NO: 1126220 - DNA, 15 bp, Homo sapiens
ctggccatgatggtt

SEQ ID NO: 1126221 - DNA, 15 bp, Homo sapiens
cctggccatgatggt

SEQ ID NO: 1126222 - DNA, 15 bp, Homo sapiens
gcctggccatgatgg

SEQ ID NO: 1126223 - DNA, 15 bp, Homo sapiens
tgcctggccatgatg

SEQ ID NO: 1126224 - DNA, 15 bp, Homo sapiens
gtgcctggccatgat

SEQ ID NO: 1126225 - DNA, 15 bp, Homo sapiens
cgtgcctggccatga

SEQ ID NO: 1126226 - DNA, 15 bp, Homo sapiens
ccgtgcctggccatg

SEQ ID NO: 1126227 - DNA, 15 bp, Homo sapiens
accgtgcctggccat

SEQ ID NO: 1126228 - DNA, 15 bp, Homo sapiens
gtgagccaccgtgcc

SEQ ID NO: 1126229 - DNA, 15 bp, Homo sapiens
tctcccaaagcgctg

SEQ ID NO: 1126230 - DNA, 15 bp, Homo sapiens
gtctcccaaagcgct

SEQ ID NO: 1126231 - DNA, 15 bp, Homo sapiens
agtctcccaaagcgc

SEQ ID NO: 1126232 - DNA, 15 bp, Homo sapiens
cagtctcccaaagcg

SEQ ID NO: 1126233 - DNA, 15 bp, Homo sapiens
tcagtctcccaaagc

SEQ ID NO: 1126234 - DNA, 15 bp, Homo sapiens
ctcagtctcccaaag

SEQ ID NO: 1126235 - DNA, 15 bp, Homo sapiens
cctcagtctcccaaa

SEQ ID NO: 1126236 - DNA, 15 bp, Homo sapiens
gcctgcctcagtctc

SEQ ID NO: 1126237 - DNA, 15 bp, Homo sapiens
tgcctgcctcagtct

SEQ ID NO: 1126238 - DNA, 15 bp, Homo sapiens
ctgcctgcctcagtc

SEQ ID NO: 1126239 - DNA, 15 bp, Homo sapiens
tctgcctgcctcagt

SEQ ID NO: 1126240 - DNA, 15 bp, Homo sapiens
gatctgcctgcctca

SEQ ID NO: 1126241 - DNA, 15 bp, Homo sapiens
gaaactcctgacctc

SEQ ID NO: 1126242 - DNA, 15 bp, Homo sapiens
tgaaactcctgacct

SEQ ID NO: 1126243 - DNA, 15 bp, Homo sapiens
ctgaaactcctgacc

SEQ ID NO: 1126244 - DNA, 15 bp, Homo sapiens
tctgaaactcctgac

SEQ ID NO: 1126245 - DNA, 15 bp, Homo sapiens
cggtctgaaactcct

SEQ ID NO: 1126246 - DNA, 15 bp, Homo sapiens
ccggtctgaaactcc

SEQ ID NO: 1126247 - DNA, 15 bp, Homo sapiens
gccggtctgaaactc

SEQ ID NO: 1126248 - DNA, 15 bp, Homo sapiens
ggccggtctgaaact

SEQ ID NO: 1126249 - DNA, 15 bp, Homo sapiens
aggccggtctgaaac

SEQ ID NO: 1126250 - DNA, 15 bp, Homo sapiens
caggccggtctgaaa

SEQ ID NO: 1126251 - DNA, 15 bp, Homo sapiens
ccaggccggtctgaa

SEQ ID NO: 1126252 - DNA, 15 bp, Homo sapiens
gccaggccggtctga

SEQ ID NO: 1126253 - DNA, 15 bp, Homo sapiens
ggccaggccggtctg

SEQ ID NO: 1126254 - DNA, 15 bp, Homo sapiens
cgggctaatttttgt

SEQ ID NO: 1126255 - DNA, 15 bp, Homo sapiens
tcgggctaatttttg

SEQ ID NO: 1126256 - DNA, 15 bp, Homo sapiens
gtcgggctaattttt

SEQ ID NO: 1126257 - DNA, 15 bp, Homo sapiens
cgtcgggctaatttt

SEQ ID NO: 1126258 - DNA, 15 bp, Homo sapiens
acgtcgggctaattt

SEQ ID NO: 1126259 - DNA, 15 bp, Homo sapiens
cacgtcgggctaatt

SEQ ID NO: 1126260 - DNA, 15 bp, Homo sapiens
ccacgtcgggctaat

SEQ ID NO: 1126261 - DNA, 15 bp, Homo sapiens
accacgtcgggctaa

SEQ ID NO: 1126262 - DNA, 15 bp, Homo sapiens
caccacgtcgggcta

SEQ ID NO: 1126263 - DNA, 15 bp, Homo sapiens
ccaccacgtcgggct

SEQ ID NO: 1126264 - DNA, 15 bp, Homo sapiens
gccaccacgtcgggc

SEQ ID NO: 1126265 - DNA, 15 bp, Homo sapiens
tgccaccacgtcggg

SEQ ID NO: 1126266 - DNA, 15 bp, Homo sapiens
gtgccaccacgtcgg

SEQ ID NO: 1126267 - DNA, 15 bp, Homo sapiens
tgtgccaccacgtcg

SEQ ID NO: 1126268 - DNA, 15 bp, Homo sapiens
tgtgtgccaccacgt

SEQ ID NO: 1126269 - DNA, 15 bp, Homo sapiens
gtgtgtgccaccacg

SEQ ID NO: 1126270 - DNA, 15 bp, Homo sapiens
ggtgtgtgccaccac

SEQ ID NO: 1126271 - DNA, 15 bp, Homo sapiens
aggtgtgtgccacca

SEQ ID NO: 1126272 - DNA, 15 bp, Homo sapiens
caggtgtgtgccacc

SEQ ID NO: 1126273 - DNA, 15 bp, Homo sapiens
acaggtgtgtgccac

SEQ ID NO: 1126274 - DNA, 15 bp, Homo sapiens
tacaggtgtgtgcca

SEQ ID NO: 1126275 - DNA, 15 bp, Homo sapiens
ttacaggtgtgtgcc

SEQ ID NO: 1126276 - DNA, 15 bp, Homo sapiens
attacaggtgtgtgc

SEQ ID NO: 1126277 - DNA, 15 bp, Homo sapiens
aattacaggtgtgtg

SEQ ID NO: 1126278 - DNA, 15 bp, Homo sapiens
gaattacaggtgtgt

SEQ ID NO: 1126279 - DNA, 15 bp, Homo sapiens
ctgccttagcctcct

SEQ ID NO: 1126280 - DNA, 15 bp, Homo sapiens
aattctcctgcctta

SEQ ID NO: 1126281 - DNA, 15 bp, Homo sapiens
caattctcctgcctt

SEQ ID NO: 1126282 - DNA, 15 bp, Homo sapiens
cgatctgggctcact

SEQ ID NO: 1126283 - DNA, 15 bp, Homo sapiens
gcgatctgggctcac

SEQ ID NO: 1126284 - DNA, 15 bp, Homo sapiens
cgcgatctgggctca

SEQ ID NO: 1126285 - DNA, 15 bp, Homo sapiens
gcgcgatctgggctc

SEQ ID NO: 1126286 - DNA, 15 bp, Homo sapiens
ggcgcgatctgggct

SEQ ID NO: 1126287 - DNA, 15 bp, Homo sapiens
tggcgcgatctgggc

SEQ ID NO: 1126288 - DNA, 15 bp, Homo sapiens
atggcgcgatctggg

SEQ ID NO: 1126289 - DNA, 15 bp, Homo sapiens
aatggcgcgatctgg

SEQ ID NO: 1126290 - DNA, 15 bp, Homo sapiens
caatggcgcgatctg

SEQ ID NO: 1126291 - DNA, 15 bp, Homo sapiens
gacccaggctggagt

SEQ ID NO: 1126292 - DNA, 15 bp, Homo sapiens
tgacccaggctggag

SEQ ID NO: 1126293 - DNA, 15 bp, Homo sapiens
gtgacccaggctgga

SEQ ID NO: 1126294 - DNA, 15 bp, Homo sapiens
tgtgacccaggctgg

SEQ ID NO: 1126295 - DNA, 15 bp, Homo sapiens
ctgtgacccaggctg

SEQ ID NO: 1126296 - DNA, 15 bp, Homo sapiens
cctgtgacccaggct

SEQ ID NO: 1126297 - DNA, 15 bp, Homo sapiens
ccctgtgacccaggc

SEQ ID NO: 1126298 - DNA, 15 bp, Homo sapiens
gccctgtgacccagg

SEQ ID NO: 1126299 - DNA, 15 bp, Homo sapiens
tgccctgtgacccag

SEQ ID NO: 1126300 - DNA, 15 bp, Homo sapiens
ttgccctgtgaccca

SEQ ID NO: 1126301 - DNA, 15 bp, Homo sapiens
cttgccctgtgaccc

SEQ ID NO: 1126302 - DNA, 15 bp, Homo sapiens
tcttgccctgtgacc

SEQ ID NO: 1126303 - DNA, 15 bp, Homo sapiens
gtcttgccctgtgac

SEQ ID NO: 1126304 - DNA, 15 bp, Homo sapiens
agtcttgccctgtga

SEQ ID NO: 1126305 - DNA, 15 bp, Homo sapiens
aagtcttgccctgtg

SEQ ID NO: 1126306 - DNA, 15 bp, Homo sapiens
aaagtcttgccctgt

SEQ ID NO: 1126307 - DNA, 15 bp, Homo sapiens
caaagtcttgccctg

SEQ ID NO: 1126308 - DNA, 15 bp, Homo sapiens
acaaagtcttgccct

SEQ ID NO: 1126309 - DNA, 15 bp, Homo sapiens
gacaaagtcttgccc

SEQ ID NO: 1126310 - DNA, 15 bp, Homo sapiens
agacaaagtcttgcc

SEQ ID NO: 1126311 - DNA, 15 bp, Homo sapiens
gagacaaagtcttgc

SEQ ID NO: 1126312 - DNA, 15 bp, Homo sapiens
tgagacaaagtcttg

SEQ ID NO: 1126313 - DNA, 15 bp, Homo sapiens
tctttctttttcttt

SEQ ID NO: 1126314 - DNA, 15 bp, Homo sapiens
ttctttctttttctt

SEQ ID NO: 1126315 - DNA, 15 bp, Homo sapiens
tttctttctttttct

SEQ ID NO: 1126316 - DNA, 15 bp, Homo sapiens
atttctttctttttc

SEQ ID NO: 1126317 - DNA, 15 bp, Homo sapiens
aatttctttcttttt

SEQ ID NO: 1126318 - DNA, 15 bp, Homo sapiens
taatttctttctttt

SEQ ID NO: 1126319 - DNA, 15 bp, Homo sapiens
ttaatttctttcttt

SEQ ID NO: 1126320 - DNA, 15 bp, Homo sapiens
gttaatttctttctt

SEQ ID NO: 1126321 - DNA, 15 bp, Homo sapiens
ggttaatttctttct

SEQ ID NO: 1126322 - DNA, 15 bp, Homo sapiens
tggttaatttctttc

SEQ ID NO: 1126323 - DNA, 15 bp, Homo sapiens
atggttaatttcttt

SEQ ID NO: 1126324 - DNA, 15 bp, Homo sapiens
gatggttaatttctt

SEQ ID NO: 1126325 - DNA, 15 bp, Homo sapiens
tgatggttaatttct

SEQ ID NO: 1126326 - DNA, 15 bp, Homo sapiens
atgatggttaatttc

SEQ ID NO: 1126327 - DNA, 15 bp, Homo sapiens
catgatggttaattt

SEQ ID NO: 1126328 - DNA, 15 bp, Homo sapiens
acatgatggttaatt

SEQ ID NO: 1126329 - DNA, 15 bp, Homo sapiens
aacatgatggttaat

SEQ ID NO: 1126330 - DNA, 15 bp, Homo sapiens
taacatgatggttaa

SEQ ID NO: 1126331 - DNA, 15 bp, Homo sapiens
ctaacatgatggtta

SEQ ID NO: 1126332 - DNA, 15 bp, Homo sapiens
actaacatgatggtt

SEQ ID NO: 1126333 - DNA, 15 bp, Homo sapiens
aactaacatgatggt

SEQ ID NO: 1126334 - DNA, 15 bp, Homo sapiens
taactaacatgatgg

SEQ ID NO: 1126335 - DNA, 15 bp, Homo sapiens
ttaactaacatgatg

SEQ ID NO: 1126336 - DNA, 15 bp, Homo sapiens
attaactaacatgat

SEQ ID NO: 1126337 - DNA, 15 bp, Homo sapiens
aattaactaacatga

SEQ ID NO: 1126338 - DNA, 15 bp, Homo sapiens
gaattaactaacatg

SEQ ID NO: 1126339 - DNA, 15 bp, Homo sapiens
ggaattaactaacat

SEQ ID NO: 1126340 - DNA, 15 bp, Homo sapiens
tggaattaactaaca

SEQ ID NO: 1126341 - DNA, 15 bp, Homo sapiens
ttggaattaactaac

SEQ ID NO: 1126342 - DNA, 15 bp, Homo sapiens
attggaattaactaa

SEQ ID NO: 1126343 - DNA, 15 bp, Homo sapiens
aattggaattaacta

SEQ ID NO: 1126344 - DNA, 15 bp, Homo sapiens
taattggaattaact

SEQ ID NO: 1126345 - DNA, 15 bp, Homo sapiens
ataattggaattaac

SEQ ID NO: 1126346 - DNA, 15 bp, Homo sapiens
cataattggaattaa

SEQ ID NO: 1126347 - DNA, 15 bp, Homo sapiens
ccataattggaatta

SEQ ID NO: 1126348 - DNA, 15 bp, Homo sapiens
accataattggaatt

SEQ ID NO: 1126349 - DNA, 15 bp, Homo sapiens
aaccataattggaat

SEQ ID NO: 1126350 - DNA, 15 bp, Homo sapiens
gaaccataattggaa

SEQ ID NO: 1126351 - DNA, 15 bp, Homo sapiens
tgaaccataattgga

SEQ ID NO: 1126352 - DNA, 15 bp, Homo sapiens
ttgaaccataattgg

SEQ ID NO: 1126353 - DNA, 15 bp, Homo sapiens
attgaaccataattg

SEQ ID NO: 1126354 - DNA, 15 bp, Homo sapiens
aattgaaccataatt

SEQ ID NO: 1126355 - DNA, 15 bp, Homo sapiens
aaattgaaccataat

SEQ ID NO: 1126356 - DNA, 15 bp, Homo sapiens
aaaattgaaccataa

SEQ ID NO: 1126357 - DNA, 15 bp, Homo sapiens
taaaattgaaccata

SEQ ID NO: 1126358 - DNA, 15 bp, Homo sapiens
gtaaaattgaaccat

SEQ ID NO: 1126359 - DNA, 15 bp, Homo sapiens
tgtaaaattgaacca

SEQ ID NO: 1126360 - DNA, 15 bp, Homo sapiens
gtgtaaaattgaacc

SEQ ID NO: 1126361 - DNA, 15 bp, Homo sapiens
ggtgtaaaattgaac

SEQ ID NO: 1126362 - DNA, 15 bp, Homo sapiens
gggtgtaaaattgaa

SEQ ID NO: 1126363 - DNA, 15 bp, Homo sapiens
ggggtgtaaaattga

SEQ ID NO: 1126364 - DNA, 15 bp, Homo sapiens
tggggtgtaaaattg

SEQ ID NO: 1126365 - DNA, 15 bp, Homo sapiens
atggggtgtaaaatt

SEQ ID NO: 1126366 - DNA, 15 bp, Homo sapiens
aatggggtgtaaaat

SEQ ID NO: 1126367 - DNA, 15 bp, Homo sapiens
aaatggggtgtaaaa

SEQ ID NO: 1126368 - DNA, 15 bp, Homo sapiens
taaatggggtgtaaa

SEQ ID NO: 1126369 - DNA, 15 bp, Homo sapiens
ataaatggggtgtaa

SEQ ID NO: 1126370 - DNA, 15 bp, Homo sapiens
cataaatggggtgta

SEQ ID NO: 1126371 - DNA, 15 bp, Homo sapiens
ccataaatggggtgt

SEQ ID NO: 1126372 - DNA, 15 bp, Homo sapiens
tccataaatggggtg

SEQ ID NO: 1126373 - DNA, 15 bp, Homo sapiens
ttccataaatggggt

SEQ ID NO: 1126374 - DNA, 15 bp, Homo sapiens
attccataaatgggg

SEQ ID NO: 1126375 - DNA, 15 bp, Homo sapiens
tattccataaatggg

SEQ ID NO: 1126376 - DNA, 15 bp, Homo sapiens
ttattccataaatgg

SEQ ID NO: 1126377 - DNA, 15 bp, Homo sapiens
tttattccataaatg

SEQ ID NO: 1126378 - DNA, 15 bp, Homo sapiens
ttttattccataaat

SEQ ID NO: 1126379 - DNA, 15 bp, Homo sapiens
cttttattccataaa

SEQ ID NO: 1126380 - DNA, 15 bp, Homo sapiens
acttttattccataa

SEQ ID NO: 1126381 - DNA, 15 bp, Homo sapiens
tacttttattccata

SEQ ID NO: 1126382 - DNA, 15 bp, Homo sapiens
ttacttttattccat

SEQ ID NO: 1126383 - DNA, 15 bp, Homo sapiens
tttacttttattcca

SEQ ID NO: 1126384 - DNA, 15 bp, Homo sapiens
ctttacttttattcc

SEQ ID NO: 1126385 - DNA, 15 bp, Homo sapiens
actttacttttattc

SEQ ID NO: 1126386 - DNA, 15 bp, Homo sapiens
aactttacttttatt

SEQ ID NO: 1126387 - DNA, 15 bp, Homo sapiens
aaactttacttttat

SEQ ID NO: 1126388 - DNA, 15 bp, Homo sapiens
taaactttactttta

SEQ ID NO: 1126389 - DNA, 15 bp, Homo sapiens
ataaactttactttt

SEQ ID NO: 1126390 - DNA, 15 bp, Homo sapiens
cataaactttacttt

SEQ ID NO: 1126391 - DNA, 15 bp, Homo sapiens
ccataaactttactt

SEQ ID NO: 1126392 - DNA, 15 bp, Homo sapiens
tccataaactttact

SEQ ID NO: 1126393 - DNA, 15 bp, Homo sapiens
ctccataaactttac

SEQ ID NO: 1126394 - DNA, 15 bp, Homo sapiens
cctccataaacttta

SEQ ID NO: 1126395 - DNA, 15 bp, Homo sapiens
gcctccataaacttt

SEQ ID NO: 1126396 - DNA, 15 bp, Homo sapiens
ggcctccataaactt

SEQ ID NO: 1126397 - DNA, 15 bp, Homo sapiens
cggcctccataaact

SEQ ID NO: 1126398 - DNA, 15 bp, Homo sapiens
ccggcctccataaac

SEQ ID NO: 1126399 - DNA, 15 bp, Homo sapiens
cccggcctccataaa

SEQ ID NO: 1126400 - DNA, 15 bp, Homo sapiens
gcccggcctccataa

SEQ ID NO: 1126401 - DNA, 15 bp, Homo sapiens
tgcccggcctccata

SEQ ID NO: 1126402 - DNA, 15 bp, Homo sapiens
gtgcccggcctccat

SEQ ID NO: 1126403 - DNA, 15 bp, Homo sapiens
cgtgcccggcctcca

SEQ ID NO: 1126404 - DNA, 15 bp, Homo sapiens
ccgtgcccggcctcc

SEQ ID NO: 1126405 - DNA, 15 bp, Homo sapiens
accgtgcccggcctc

SEQ ID NO: 1126406 - DNA, 15 bp, Homo sapiens
gccaccgtgcccggc

SEQ ID NO: 1126407 - DNA, 15 bp, Homo sapiens
agccaccgtgcccgg

SEQ ID NO: 1126408 - DNA, 15 bp, Homo sapiens
gagccaccgtgcccg

SEQ ID NO: 1126409 - DNA, 15 bp, Homo sapiens
tgagccaccgtgccc

SEQ ID NO: 1126410 - DNA, 15 bp, Homo sapiens
acatgagccaccgtg

SEQ ID NO: 1126411 - DNA, 15 bp, Homo sapiens
gacatgagccaccgt

SEQ ID NO: 1126412 - DNA, 15 bp, Homo sapiens
ctgggattacagaca

SEQ ID NO: 1126413 - DNA, 15 bp, Homo sapiens
cggcctcccaaaatg

SEQ ID NO: 1126414 - DNA, 15 bp, Homo sapiens
tcggcctcccaaaat

SEQ ID NO: 1126415 - DNA, 15 bp, Homo sapiens
ctcggcctcccaaaa

SEQ ID NO: 1126416 - DNA, 15 bp, Homo sapiens
taggtgatctgcccg

SEQ ID NO: 1126417 - DNA, 15 bp, Homo sapiens
ttaggtgatctgccc

SEQ ID NO: 1126418 - DNA, 15 bp, Homo sapiens
ccttaggtgatctgc

SEQ ID NO: 1126419 - DNA, 15 bp, Homo sapiens
aatggtctcgatctc

SEQ ID NO: 1126420 - DNA, 15 bp, Homo sapiens
gaatggtctcgatct

SEQ ID NO: 1126421 - DNA, 15 bp, Homo sapiens
agaatggtctcgatc

SEQ ID NO: 1126422 - DNA, 15 bp, Homo sapiens
cagaatggtctcgat

SEQ ID NO: 1126423 - DNA, 15 bp, Homo sapiens
ccagaatggtctcga

SEQ ID NO: 1126424 - DNA, 15 bp, Homo sapiens
gccagaatggtctcg

SEQ ID NO: 1126425 - DNA, 15 bp, Homo sapiens
agccagaatggtctc

SEQ ID NO: 1126426 - DNA, 15 bp, Homo sapiens
tagccagaatggtct

SEQ ID NO: 1126427 - DNA, 15 bp, Homo sapiens
ttagccagaatggtc

SEQ ID NO: 1126428 - DNA, 15 bp, Homo sapiens
gttagccagaatggt

SEQ ID NO: 1126429 - DNA, 15 bp, Homo sapiens
tgttagccagaatgg

SEQ ID NO: 1126430 - DNA, 15 bp, Homo sapiens
gtgttagccagaatg

SEQ ID NO: 1126431 - DNA, 15 bp, Homo sapiens
cgtgttagccagaat

SEQ ID NO: 1126432 - DNA, 15 bp, Homo sapiens
ccgtgttagccagaa

SEQ ID NO: 1126433 - DNA, 15 bp, Homo sapiens
accgtgttagccaga

SEQ ID NO: 1126434 - DNA, 15 bp, Homo sapiens
attttttttgtattt

SEQ ID NO: 1126435 - DNA, 15 bp, Homo sapiens
aattttttttgtatt

SEQ ID NO: 1126436 - DNA, 15 bp, Homo sapiens
taattttttttgtat

SEQ ID NO: 1126437 - DNA, 15 bp, Homo sapiens
ctaattttttttgta

SEQ ID NO: 1126438 - DNA, 15 bp, Homo sapiens
gctaattttttttgt

SEQ ID NO: 1126439 - DNA, 15 bp, Homo sapiens
ggctaattttttttg

SEQ ID NO: 1126440 - DNA, 15 bp, Homo sapiens
ctacaggcacctgcc

SEQ ID NO: 1126441 - DNA, 15 bp, Homo sapiens
actacaggcacctgc

SEQ ID NO: 1126442 - DNA, 15 bp, Homo sapiens
gactacaggcacctg

SEQ ID NO: 1126443 - DNA, 15 bp, Homo sapiens
ggactacaggcacct

SEQ ID NO: 1126444 - DNA, 15 bp, Homo sapiens
tacctcagcctcccg

SEQ ID NO: 1126445 - DNA, 15 bp, Homo sapiens
cattctcctacctca

SEQ ID NO: 1126446 - DNA, 15 bp, Homo sapiens
ccattctcctacctc

SEQ ID NO: 1126447 - DNA, 15 bp, Homo sapiens
gccattctcctacct

SEQ ID NO: 1126448 - DNA, 15 bp, Homo sapiens
cgccattctcctacc

SEQ ID NO: 1126449 - DNA, 15 bp, Homo sapiens
acgccattctcctac

SEQ ID NO: 1126450 - DNA, 15 bp, Homo sapiens
cacgccattctccta

SEQ ID NO: 1126451 - DNA, 15 bp, Homo sapiens
gctctgcctcccggg

SEQ ID NO: 1126452 - DNA, 15 bp, Homo sapiens
agctctgcctcccgg

SEQ ID NO: 1126453 - DNA, 15 bp, Homo sapiens
aagctctgcctcccg

SEQ ID NO: 1126454 - DNA, 15 bp, Homo sapiens
caagctctgcctccc

SEQ ID NO: 1126455 - DNA, 15 bp, Homo sapiens
gtggcgcgatctcgg

SEQ ID NO: 1126456 - DNA, 15 bp, Homo sapiens
agtggcgcgatctcg

SEQ ID NO: 1126457 - DNA, 15 bp, Homo sapiens
tacggagtctcgctc

SEQ ID NO: 1126458 - DNA, 15 bp, Homo sapiens
atacggagtctcgct

SEQ ID NO: 1126459 - DNA, 15 bp, Homo sapiens
gatacggagtctcgc

SEQ ID NO: 1126460 - DNA, 15 bp, Homo sapiens
tgatacggagtctcg

SEQ ID NO: 1126461 - DNA, 15 bp, Homo sapiens
ttgatacggagtctc

SEQ ID NO: 1126462 - DNA, 15 bp, Homo sapiens
tttgatacggagtct

SEQ ID NO: 1126463 - DNA, 15 bp, Homo sapiens
ttttgatacggagtc

SEQ ID NO: 1126464 - DNA, 15 bp, Homo sapiens
tttttgatacggagt

SEQ ID NO: 1126465 - DNA, 15 bp, Homo sapiens
ttttttgatacggag

SEQ ID NO: 1126466 - DNA, 15 bp, Homo sapiens
tttttttgatacgga

SEQ ID NO: 1126467 - DNA, 15 bp, Homo sapiens
ttttttttgatacgg

SEQ ID NO: 1126468 - DNA, 15 bp, Homo sapiens
tttttttttgatacg

SEQ ID NO: 1126469 - DNA, 15 bp, Homo sapiens
ttttttttttgatac

SEQ ID NO: 1126470 - DNA, 15 bp, Homo sapiens
tttttttttttgata

SEQ ID NO: 1126471 - DNA, 15 bp, Homo sapiens
ttttttttttttgat

SEQ ID NO: 1126472 - DNA, 15 bp, Homo sapiens
ctttacttttttttt

SEQ ID NO: 1126473 - DNA, 15 bp, Homo sapiens
gctttactttttttt

SEQ ID NO: 1126474 - DNA, 15 bp, Homo sapiens
agctttacttttttt

SEQ ID NO: 1126475 - DNA, 15 bp, Homo sapiens
aagctttactttttt

SEQ ID NO: 1126476 - DNA, 15 bp, Homo sapiens
taagctttacttttt

SEQ ID NO: 1126477 - DNA, 15 bp, Homo sapiens
ataagctttactttt

SEQ ID NO: 1126478 - DNA, 15 bp, Homo sapiens
cataagctttacttt

SEQ ID NO: 1126479 - DNA, 15 bp, Homo sapiens
ccataagctttactt

SEQ ID NO: 1126480 - DNA, 15 bp, Homo sapiens
tccataagctttact

SEQ ID NO: 1126481 - DNA, 15 bp, Homo sapiens
ttccataagctttac

SEQ ID NO: 1126482 - DNA, 15 bp, Homo sapiens
tttccataagcttta

SEQ ID NO: 1126483 - DNA, 15 bp, Homo sapiens
ctttccataagcttt

SEQ ID NO: 1126484 - DNA, 15 bp, Homo sapiens
actttccataagctt

SEQ ID NO: 1126485 - DNA, 15 bp, Homo sapiens
aactttccataagct

SEQ ID NO: 1126486 - DNA, 15 bp, Homo sapiens
taactttccataagc

SEQ ID NO: 1126487 - DNA, 15 bp, Homo sapiens
ataactttccataag

SEQ ID NO: 1126488 - DNA, 15 bp, Homo sapiens
aataactttccataa

SEQ ID NO: 1126489 - DNA, 15 bp, Homo sapiens
gaataactttccata

SEQ ID NO: 1126490 - DNA, 15 bp, Homo sapiens
agaataactttccat

SEQ ID NO: 1126491 - DNA, 15 bp, Homo sapiens
cagaataactttcca

SEQ ID NO: 1126492 - DNA, 15 bp, Homo sapiens
tcagaataactttcc

SEQ ID NO: 1126493 - DNA, 15 bp, Homo sapiens
atcagaataactttc

SEQ ID NO: 1126494 - DNA, 15 bp, Homo sapiens
catcagaataacttt

SEQ ID NO: 1126495 - DNA, 15 bp, Homo sapiens
tcatcagaataactt

SEQ ID NO: 1126496 - DNA, 15 bp, Homo sapiens
ttcatcagaataact

SEQ ID NO: 1126497 - DNA, 15 bp, Homo sapiens
tttcatcagaataac

SEQ ID NO: 1126498 - DNA, 15 bp, Homo sapiens
ctttcatcagaataa

SEQ ID NO: 1126499 - DNA, 15 bp, Homo sapiens
actttcatcagaata

SEQ ID NO: 1126500 - DNA, 15 bp, Homo sapiens
cactttcatcagaat

SEQ ID NO: 1126501 - DNA, 15 bp, Homo sapiens
tcactttcatcagaa

SEQ ID NO: 1126502 - DNA, 15 bp, Homo sapiens
ttcactttcatcaga

SEQ ID NO: 1126503 - DNA, 15 bp, Homo sapiens
tttcactttcatcag

SEQ ID NO: 1126504 - DNA, 15 bp, Homo sapiens
gtttcactttcatca

SEQ ID NO: 1126505 - DNA, 15 bp, Homo sapiens
tgtttcactttcatc

SEQ ID NO: 1126506 - DNA, 15 bp, Homo sapiens
atgtttcactttcat

SEQ ID NO: 1126507 - DNA, 15 bp, Homo sapiens
gatgtttcactttca

SEQ ID NO: 1126508 - DNA, 15 bp, Homo sapiens
agatgtttcactttc

SEQ ID NO: 1126509 - DNA, 15 bp, Homo sapiens
cagatgtttcacttt

SEQ ID NO: 1126510 - DNA, 15 bp, Homo sapiens
ccagatgtttcactt

SEQ ID NO: 1126511 - DNA, 15 bp, Homo sapiens
gccagatgtttcact

SEQ ID NO: 1126512 - DNA, 15 bp, Homo sapiens
tgccagatgtttcac

SEQ ID NO: 1126513 - DNA, 15 bp, Homo sapiens
atgccagatgtttca

SEQ ID NO: 1126514 - DNA, 15 bp, Homo sapiens
aatgccagatgtttc

SEQ ID NO: 1126515 - DNA, 15 bp, Homo sapiens
taatgccagatgttt

SEQ ID NO: 1126516 - DNA, 15 bp, Homo sapiens
ataatgccagatgtt

SEQ ID NO: 1126517 - DNA, 15 bp, Homo sapiens
aataatgccagatgt

SEQ ID NO: 1126518 - DNA, 15 bp, Homo sapiens
caataatgccagatg

SEQ ID NO: 1126519 - DNA, 15 bp, Homo sapiens
tcaataatgccagat

SEQ ID NO: 1126520 - DNA, 15 bp, Homo sapiens
ctcaataatgccaga

SEQ ID NO: 1126521 - DNA, 15 bp, Homo sapiens
tctcaataatgccag

SEQ ID NO: 1126522 - DNA, 15 bp, Homo sapiens
ttctcaataatgcca

SEQ ID NO: 1126523 - DNA, 15 bp, Homo sapiens
tttctcaataatgcc

SEQ ID NO: 1126524 - DNA, 15 bp, Homo sapiens
ttttctcaataatgc

SEQ ID NO: 1126525 - DNA, 15 bp, Homo sapiens
gttttctcaataatg

SEQ ID NO: 1126526 - DNA, 15 bp, Homo sapiens
ggttttctcaataat

SEQ ID NO: 1126527 - DNA, 15 bp, Homo sapiens
tggttttctcaataa

SEQ ID NO: 1126528 - DNA, 15 bp, Homo sapiens
atggttttctcaata

SEQ ID NO: 1126529 - DNA, 15 bp, Homo sapiens
aatggttttctcaat

SEQ ID NO: 1126530 - DNA, 15 bp, Homo sapiens
taatggttttctcaa

SEQ ID NO: 1126531 - DNA, 15 bp, Homo sapiens
ataatggttttctca

SEQ ID NO: 1126532 - DNA, 15 bp, Homo sapiens
gataatggttttctc

SEQ ID NO: 1126533 - DNA, 15 bp, Homo sapiens
tgataatggttttct

SEQ ID NO: 1126534 - DNA, 15 bp, Homo sapiens
ttgataatggttttc

SEQ ID NO: 1126535 - DNA, 15 bp, Homo sapiens
gttgataatggtttt

SEQ ID NO: 1126536 - DNA, 15 bp, Homo sapiens
agttgataatggttt

SEQ ID NO: 1126537 - DNA, 15 bp, Homo sapiens
gagttgataatggtt

SEQ ID NO: 1126538 - DNA, 15 bp, Homo sapiens
tgagttgataatggt

SEQ ID NO: 1126539 - DNA, 15 bp, Homo sapiens
atgagttgataatgg

SEQ ID NO: 1126540 - DNA, 15 bp, Homo sapiens
aatgagttgataatg

SEQ ID NO: 1126541 - DNA, 15 bp, Homo sapiens
caatgagttgataat

SEQ ID NO: 1126542 - DNA, 15 bp, Homo sapiens
tcaatgagttgataa

SEQ ID NO: 1126543 - DNA, 15 bp, Homo sapiens
ttcaatgagttgata

SEQ ID NO: 1126544 - DNA, 15 bp, Homo sapiens
tttcaatgagttgat

SEQ ID NO: 1126545 - DNA, 15 bp, Homo sapiens
ttttcaatgagttga

SEQ ID NO: 1126546 - DNA, 15 bp, Homo sapiens
tttttcaatgagttg

SEQ ID NO: 1126547 - DNA, 15 bp, Homo sapiens
ctttttcaatgagtt

SEQ ID NO: 1126548 - DNA, 15 bp, Homo sapiens
actttttcaatgagt

SEQ ID NO: 1126549 - DNA, 15 bp, Homo sapiens
tactttttcaatgag

SEQ ID NO: 1126550 - DNA, 15 bp, Homo sapiens
ttactttttcaatga

SEQ ID NO: 1126551 - DNA, 15 bp, Homo sapiens
tttactttttcaatg

SEQ ID NO: 1126552 - DNA, 15 bp, Homo sapiens
gtttactttttcaat

SEQ ID NO: 1126553 - DNA, 15 bp, Homo sapiens
tgtttactttttcaa

SEQ ID NO: 1126554 - DNA, 15 bp, Homo sapiens
atgtttactttttca

SEQ ID NO: 1126555 - DNA, 15 bp, Homo sapiens
aatgtttactttttc

SEQ ID NO: 1126556 - DNA, 15 bp, Homo sapiens
aaatgtttacttttt

SEQ ID NO: 1126557 - DNA, 15 bp, Homo sapiens
taaatgtttactttt

SEQ ID NO: 1126558 - DNA, 15 bp, Homo sapiens
ctaaatgtttacttt

SEQ ID NO: 1126559 - DNA, 15 bp, Homo sapiens
actaaatgtttactt

SEQ ID NO: 1126560 - DNA, 15 bp, Homo sapiens
tactaaatgtttact

SEQ ID NO: 1126561 - DNA, 15 bp, Homo sapiens
atactaaatgtttac

SEQ ID NO: 1126562 - DNA, 15 bp, Homo sapiens
tatactaaatgttta

SEQ ID NO: 1126563 - DNA, 15 bp, Homo sapiens
ttatactaaatgttt

SEQ ID NO: 1126564 - DNA, 15 bp, Homo sapiens
tttatactaaatgtt

SEQ ID NO: 1126565 - DNA, 15 bp, Homo sapiens
atttatactaaatgt

SEQ ID NO: 1126566 - DNA, 15 bp, Homo sapiens
tatttatactaaatg

SEQ ID NO: 1126567 - DNA, 15 bp, Homo sapiens
atatttatactaaat

SEQ ID NO: 1126568 - DNA, 15 bp, Homo sapiens
aatatttatactaaa

SEQ ID NO: 1126569 - DNA, 15 bp, Homo sapiens
aaatatttatactaa

SEQ ID NO: 1126570 - DNA, 15 bp, Homo sapiens
aaaaatatttatact

SEQ ID NO: 1126571 - DNA, 15 bp, Homo sapiens
caaaaatatttatac

SEQ ID NO: 1126572 - DNA, 15 bp, Homo sapiens
acaaaaatatttata

SEQ ID NO: 1126573 - DNA, 15 bp, Homo sapiens
cacaaaaatatttat

SEQ ID NO: 1126574 - DNA, 15 bp, Homo sapiens
tcacaaaaatattta

SEQ ID NO: 1126575 - DNA, 15 bp, Homo sapiens
atcacaaaaatattt

SEQ ID NO: 1126576 - DNA, 15 bp, Homo sapiens
catcacaaaaatatt

SEQ ID NO: 1126577 - DNA, 15 bp, Homo sapiens
tcatcacaaaaatat

SEQ ID NO: 1126578 - DNA, 15 bp, Homo sapiens
atcatcacaaaaata

SEQ ID NO: 1126579 - DNA, 15 bp, Homo sapiens
aatcatcacaaaaat

SEQ ID NO: 1126580 - DNA, 15 bp, Homo sapiens
caatcatcacaaaaa

SEQ ID NO: 1126581 - DNA, 15 bp, Homo sapiens
acaatcatcacaaaa

SEQ ID NO: 1126582 - DNA, 15 bp, Homo sapiens
aacaatcatcacaaa

SEQ ID NO: 1126583 - DNA, 15 bp, Homo sapiens
aaacaatcatcacaa

SEQ ID NO: 1126584 - DNA, 15 bp, Homo sapiens
aaaacaatcatcaca

SEQ ID NO: 1126585 - DNA, 15 bp, Homo sapiens
aaaaacaatcatcac

SEQ ID NO: 1126586 - DNA, 15 bp, Homo sapiens
gaaaaacaatcatca

SEQ ID NO: 1126587 - DNA, 15 bp, Homo sapiens
tgaaaaacaatcatc

SEQ ID NO: 1126588 - DNA, 15 bp, Homo sapiens
atgaaaaacaatcat

SEQ ID NO: 1126589 - DNA, 15 bp, Homo sapiens
tatgaaaaacaatca

SEQ ID NO: 1126590 - DNA, 15 bp, Homo sapiens
ctatgaaaaacaatc

SEQ ID NO: 1126591 - DNA, 15 bp, Homo sapiens
tctatgaaaaacaat

SEQ ID NO: 1126592 - DNA, 15 bp, Homo sapiens
ttctatgaaaaacaa

SEQ ID NO: 1126593 - DNA, 15 bp, Homo sapiens
tttctatgaaaaaca

SEQ ID NO: 1126594 - DNA, 15 bp, Homo sapiens
atttctatgaaaaac

SEQ ID NO: 1126595 - DNA, 15 bp, Homo sapiens
tatttctatgaaaaa

SEQ ID NO: 1126596 - DNA, 15 bp, Homo sapiens
gtatttctatgaaaa

SEQ ID NO: 1126597 - DNA, 15 bp, Homo sapiens
tgtatttctatgaaa

SEQ ID NO: 1126598 - DNA, 15 bp, Homo sapiens
ttgtatttctatgaa

SEQ ID NO: 1126599 - DNA, 15 bp, Homo sapiens
tttgtatttctatga

SEQ ID NO: 1126600 - DNA, 15 bp, Homo sapiens
atttgtatttctatg

SEQ ID NO: 1126601 - DNA, 15 bp, Homo sapiens
aatttgtatttctat

SEQ ID NO: 1126602 - DNA, 15 bp, Homo sapiens
aaatttgtatttcta

SEQ ID NO: 1126603 - DNA, 15 bp, Homo sapiens
aaaatttgtatttct

SEQ ID NO: 1126604 - DNA, 15 bp, Homo sapiens
caaaatttgtatttc

SEQ ID NO: 1126605 - DNA, 15 bp, Homo sapiens
ccaaaatttgtattt

SEQ ID NO: 1126606 - DNA, 15 bp, Homo sapiens
gccaaaatttgtatt

SEQ ID NO: 1126607 - DNA, 15 bp, Homo sapiens
cgccaaaatttgtat

SEQ ID NO: 1126608 - DNA, 15 bp, Homo sapiens
ccgccaaaatttgta

SEQ ID NO: 1126609 - DNA, 15 bp, Homo sapiens
tccgccaaaatttgt

SEQ ID NO: 1126610 - DNA, 15 bp, Homo sapiens
ctccgccaaaatttg

SEQ ID NO: 1126611 - DNA, 15 bp, Homo sapiens
gctccgccaaaattt

SEQ ID NO: 1126612 - DNA, 15 bp, Homo sapiens
tgctccgccaaaatt

SEQ ID NO: 1126613 - DNA, 15 bp, Homo sapiens
gtgctccgccaaaat

SEQ ID NO: 1126614 - DNA, 15 bp, Homo sapiens
tgtgctccgccaaaa

SEQ ID NO: 1126615 - DNA, 15 bp, Homo sapiens
ctgtgctccgccaaa

SEQ ID NO: 1126616 - DNA, 15 bp, Homo sapiens
gctgtgctccgccaa

SEQ ID NO: 1126617 - DNA, 15 bp, Homo sapiens
tgctgtgctccgcca

SEQ ID NO: 1126618 - DNA, 15 bp, Homo sapiens
gtgctgtgctccgcc

SEQ ID NO: 1126619 - DNA, 15 bp, Homo sapiens
ggtgctgtgctccgc

SEQ ID NO: 1126620 - DNA, 15 bp, Homo sapiens
tggtgctgtgctccg

SEQ ID NO: 1126621 - DNA, 15 bp, Homo sapiens
atggtgctgtgctcc

SEQ ID NO: 1126622 - DNA, 15 bp, Homo sapiens
catggtgctgtgctc

SEQ ID NO: 1126623 - DNA, 15 bp, Homo sapiens
ccatggtgctgtgct

SEQ ID NO: 1126624 - DNA, 15 bp, Homo sapiens
accatggtgctgtgc

SEQ ID NO: 1126625 - DNA, 15 bp, Homo sapiens
aaccatggtgctgtg

SEQ ID NO: 1126626 - DNA, 15 bp, Homo sapiens
taaccatggtgctgt

SEQ ID NO: 1126627 - DNA, 15 bp, Homo sapiens
ttaaccatggtgctg

SEQ ID NO: 1126628 - DNA, 15 bp, Homo sapiens
tttaaccatggtgct

SEQ ID NO: 1126629 - DNA, 15 bp, Homo sapiens
ttttaaccatggtgc

SEQ ID NO: 1126630 - DNA, 15 bp, Homo sapiens
tttttaaccatggtg

SEQ ID NO: 1126631 - DNA, 15 bp, Homo sapiens
gtttttaaccatggt

SEQ ID NO: 1126632 - DNA, 15 bp, Homo sapiens
tgtttttaaccatgg

SEQ ID NO: 1126633 - DNA, 15 bp, Homo sapiens
ctgtttttaaccatg

SEQ ID NO: 1126634 - DNA, 15 bp, Homo sapiens
tctgtttttaaccat

SEQ ID NO: 1126635 - DNA, 15 bp, Homo sapiens
gtctgtttttaacca

SEQ ID NO: 1126636 - DNA, 15 bp, Homo sapiens
agtctgtttttaacc

SEQ ID NO: 1126637 - DNA, 15 bp, Homo sapiens
aagtctgtttttaac

SEQ ID NO: 1126638 - DNA, 15 bp, Homo sapiens
gaagtctgtttttaa

SEQ ID NO: 1126639 - DNA, 15 bp, Homo sapiens
agaagtctgttttta

SEQ ID NO: 1126640 - DNA, 15 bp, Homo sapiens
aagaagtctgttttt

SEQ ID NO: 1126641 - DNA, 15 bp, Homo sapiens
taagaagtctgtttt

SEQ ID NO: 1126642 - DNA, 15 bp, Homo sapiens
ttaagaagtctgttt

SEQ ID NO: 1126643 - DNA, 15 bp, Homo sapiens
attaagaagtctgtt

SEQ ID NO: 1126644 - DNA, 15 bp, Homo sapiens
tattaagaagtctgt

SEQ ID NO: 1126645 - DNA, 15 bp, Homo sapiens
ttattaagaagtctg

SEQ ID NO: 1126646 - DNA, 15 bp, Homo sapiens
tttattaagaagtct

SEQ ID NO: 1126647 - DNA, 15 bp, Homo sapiens
ctttattaagaagtc

SEQ ID NO: 1126648 - DNA, 15 bp, Homo sapiens
tctttattaagaagt

SEQ ID NO: 1126649 - DNA, 15 bp, Homo sapiens
ttctttattaagaag

SEQ ID NO: 1126650 - DNA, 15 bp, Homo sapiens
tttctttattaagaa

SEQ ID NO: 1126651 - DNA, 15 bp, Homo sapiens
atttctttattaaga

SEQ ID NO: 1126652 - DNA, 15 bp, Homo sapiens
aatttctttattaag

SEQ ID NO: 1126653 - DNA, 15 bp, Homo sapiens
aaatttctttattaa

SEQ ID NO: 1126654 - DNA, 15 bp, Homo sapiens
gaaatttctttatta

SEQ ID NO: 1126655 - DNA, 15 bp, Homo sapiens
agaaatttctttatt

SEQ ID NO: 1126656 - DNA, 15 bp, Homo sapiens
tagaaatttctttat

SEQ ID NO: 1126657 - DNA, 15 bp, Homo sapiens
ctagaaatttcttta

SEQ ID NO: 1126658 - DNA, 15 bp, Homo sapiens
tctagaaatttcttt

SEQ ID NO: 1126659 - DNA, 15 bp, Homo sapiens
ctctagaaatttctt

SEQ ID NO: 1126660 - DNA, 15 bp, Homo sapiens
tctctagaaatttct

SEQ ID NO: 1126661 - DNA, 15 bp, Homo sapiens
ttctctagaaatttc

SEQ ID NO: 1126662 - DNA, 15 bp, Homo sapiens
cttctctagaaattt

SEQ ID NO: 1126663 - DNA, 15 bp, Homo sapiens
tcttctctagaaatt

SEQ ID NO: 1126664 - DNA, 15 bp, Homo sapiens
ttcttctctagaaat

SEQ ID NO: 1126665 - DNA, 15 bp, Homo sapiens
tttcttctctagaaa

SEQ ID NO: 1126666 - DNA, 15 bp, Homo sapiens
atttcttctctagaa

SEQ ID NO: 1126667 - DNA, 15 bp, Homo sapiens
tatttcttctctaga

SEQ ID NO: 1126668 - DNA, 15 bp, Homo sapiens
gtatttcttctctag

SEQ ID NO: 1126669 - DNA, 15 bp, Homo sapiens
tgtatttcttctcta

SEQ ID NO: 1126670 - DNA, 15 bp, Homo sapiens
ctgtatttcttctct

SEQ ID NO: 1126671 - DNA, 15 bp, Homo sapiens
actgtatttcttctc

SEQ ID NO: 1126672 - DNA, 15 bp, Homo sapiens
aactgtatttcttct

SEQ ID NO: 1126673 - DNA, 15 bp, Homo sapiens
caactgtatttcttc

SEQ ID NO: 1126674 - DNA, 15 bp, Homo sapiens
ccaactgtatttctt

SEQ ID NO: 1126675 - DNA, 15 bp, Homo sapiens
tccaactgtatttct

SEQ ID NO: 1126676 - DNA, 15 bp, Homo sapiens
gtccaactgtatttc

SEQ ID NO: 1126677 - DNA, 15 bp, Homo sapiens
agtccaactgtattt

SEQ ID NO: 1126678 - DNA, 15 bp, Homo sapiens
aagtccaactgtatt

SEQ ID NO: 1126679 - DNA, 15 bp, Homo sapiens
caagtccaactgtat

SEQ ID NO: 1126680 - DNA, 15 bp, Homo sapiens
ccaagtccaactgta

SEQ ID NO: 1126681 - DNA, 15 bp, Homo sapiens
accaagtccaactgt

SEQ ID NO: 1126682 - DNA, 15 bp, Homo sapiens
aaccaagtccaactg

SEQ ID NO: 1126683 - DNA, 15 bp, Homo sapiens
caaccaagtccaact

SEQ ID NO: 1126684 - DNA, 15 bp, Homo sapiens
acaaccaagtccaac

SEQ ID NO: 1126685 - DNA, 15 bp, Homo sapiens
cacaaccaagtccaa

SEQ ID NO: 1126686 - DNA, 15 bp, Homo sapiens
ccacaaccaagtcca

SEQ ID NO: 1126687 - DNA, 15 bp, Homo sapiens
gccacaaccaagtcc

SEQ ID NO: 1126688 - DNA, 15 bp, Homo sapiens
cgccacaaccaagtc

SEQ ID NO: 1126689 - DNA, 15 bp, Homo sapiens
gcgccacaaccaagt

SEQ ID NO: 1126690 - DNA, 15 bp, Homo sapiens
tgcgccacaaccaag

SEQ ID NO: 1126691 - DNA, 15 bp, Homo sapiens
gtgcgccacaaccaa

SEQ ID NO: 1126692 - DNA, 15 bp, Homo sapiens
tgtgcgccacaacca

SEQ ID NO: 1126693 - DNA, 15 bp, Homo sapiens
ttgtgcgccacaacc

SEQ ID NO: 1126694 - DNA, 15 bp, Homo sapiens
tttgtgcgccacaac

SEQ ID NO: 1126695 - DNA, 15 bp, Homo sapiens
atttgtgcgccacaa

SEQ ID NO: 1126696 - DNA, 15 bp, Homo sapiens
tatttgtgcgccaca

SEQ ID NO: 1126697 - DNA, 15 bp, Homo sapiens
ttatttgtgcgccac

SEQ ID NO: 1126698 - DNA, 15 bp, Homo sapiens
attatttgtgcgcca

SEQ ID NO: 1126699 - DNA, 15 bp, Homo sapiens
aattatttgtgcgcc

SEQ ID NO: 1126700 - DNA, 15 bp, Homo sapiens
gaattatttgtgcgc

SEQ ID NO: 1126701 - DNA, 15 bp, Homo sapiens
tgaattatttgtgcg

SEQ ID NO: 1126702 - DNA, 15 bp, Homo sapiens
atgaattatttgtgc

SEQ ID NO: 1126703 - DNA, 15 bp, Homo sapiens
tatgaattatttgtg

SEQ ID NO: 1126704 - DNA, 15 bp, Homo sapiens
ttatgaattatttgt

SEQ ID NO: 1126705 - DNA, 15 bp, Homo sapiens
attatgaattatttg

SEQ ID NO: 1126706 - DNA, 15 bp, Homo sapiens
aattatgaattattt

SEQ ID NO: 1126707 - DNA, 15 bp, Homo sapiens
caattatgaattatt

SEQ ID NO: 1126708 - DNA, 15 bp, Homo sapiens
acaattatgaattat

SEQ ID NO: 1126709 - DNA, 15 bp, Homo sapiens
cacaattatgaatta

SEQ ID NO: 1126710 - DNA, 15 bp, Homo sapiens
acacaattatgaatt

SEQ ID NO: 1126711 - DNA, 15 bp, Homo sapiens
aacacaattatgaat

SEQ ID NO: 1126712 - DNA, 15 bp, Homo sapiens
gaacacaattatgaa

SEQ ID NO: 1126713 - DNA, 15 bp, Homo sapiens
tgaacacaattatga

SEQ ID NO: 1126714 - DNA, 15 bp, Homo sapiens
ttgaacacaattatg

SEQ ID NO: 1126715 - DNA, 15 bp, Homo sapiens
tttgaacacaattat

SEQ ID NO: 1126716 - DNA, 15 bp, Homo sapiens
gtttgaacacaatta

SEQ ID NO: 1126717 - DNA, 15 bp, Homo sapiens
tgtttgaacacaatt

SEQ ID NO: 1126718 - DNA, 15 bp, Homo sapiens
ttgtttgaacacaat

SEQ ID NO: 1126719 - DNA, 15 bp, Homo sapiens
cttgtttgaacacaa

SEQ ID NO: 1126720 - DNA, 15 bp, Homo sapiens
acttgtttgaacaca

SEQ ID NO: 1126721 - DNA, 15 bp, Homo sapiens
gacttgtttgaacac

SEQ ID NO: 1126722 - DNA, 15 bp, Homo sapiens
cgacttgtttgaaca

SEQ ID NO: 1126723 - DNA, 15 bp, Homo sapiens
tcgacttgtttgaac

SEQ ID NO: 1126724 - DNA, 15 bp, Homo sapiens
atcgacttgtttgaa

SEQ ID NO: 1126725 - DNA, 15 bp, Homo sapiens
aatcgacttgtttga

SEQ ID NO: 1126726 - DNA, 15 bp, Homo sapiens
taatcgacttgtttg

SEQ ID NO: 1126727 - DNA, 15 bp, Homo sapiens
gtaatcgacttgttt

SEQ ID NO: 1126728 - DNA, 15 bp, Homo sapiens
tgtaatcgacttgtt

SEQ ID NO: 1126729 - DNA, 15 bp, Homo sapiens
ttgtaatcgacttgt

SEQ ID NO: 1126730 - DNA, 15 bp, Homo sapiens
tttgtaatcgacttg

SEQ ID NO: 1126731 - DNA, 15 bp, Homo sapiens
ttttgtaatcgactt

SEQ ID NO: 1126732 - DNA, 15 bp, Homo sapiens
attttgtaatcgact

SEQ ID NO: 1126733 - DNA, 15 bp, Homo sapiens
aattttgtaatcgac

SEQ ID NO: 1126734 - DNA, 15 bp, Homo sapiens
caattttgtaatcga

SEQ ID NO: 1126735 - DNA, 15 bp, Homo sapiens
acaattttgtaatcg

SEQ ID NO: 1126736 - DNA, 15 bp, Homo sapiens
aacaattttgtaatc

SEQ ID NO: 1126737 - DNA, 15 bp, Homo sapiens
aaacaattttgtaat

SEQ ID NO: 1126738 - DNA, 15 bp, Homo sapiens
gaaacaattttgtaa

SEQ ID NO: 1126739 - DNA, 15 bp, Homo sapiens
agaaacaattttgta

SEQ ID NO: 1126740 - DNA, 15 bp, Homo sapiens
cagaaacaattttgt

SEQ ID NO: 1126741 - DNA, 15 bp, Homo sapiens
ccagaaacaattttg

SEQ ID NO: 1126742 - DNA, 15 bp, Homo sapiens
gccagaaacaatttt

SEQ ID NO: 1126743 - DNA, 15 bp, Homo sapiens
agccagaaacaattt

SEQ ID NO: 1126744 - DNA, 15 bp, Homo sapiens
cagccagaaacaatt

SEQ ID NO: 1126745 - DNA, 15 bp, Homo sapiens
ccagccagaaacaat

SEQ ID NO: 1126746 - DNA, 15 bp, Homo sapiens
cccagccagaaacaa

SEQ ID NO: 1126747 - DNA, 15 bp, Homo sapiens
acccagccagaaaca

SEQ ID NO: 1126748 - DNA, 15 bp, Homo sapiens
cacccagccagaaac

SEQ ID NO: 1126749 - DNA, 15 bp, Homo sapiens
gcacccagccagaaa

SEQ ID NO: 1126750 - DNA, 15 bp, Homo sapiens
tgcacccagccagaa

SEQ ID NO: 1126751 - DNA, 15 bp, Homo sapiens
ctgcacccagccaga

SEQ ID NO: 1126752 - DNA, 15 bp, Homo sapiens
actgcacccagccag

SEQ ID NO: 1126753 - DNA, 15 bp, Homo sapiens
cactgcacccagcca

SEQ ID NO: 1126754 - DNA, 15 bp, Homo sapiens
ccactgcacccagcc

SEQ ID NO: 1126755 - DNA, 15 bp, Homo sapiens
accactgcacccagc

SEQ ID NO: 1126756 - DNA, 15 bp, Homo sapiens
aaccactgcacccag

SEQ ID NO: 1126757 - DNA, 15 bp, Homo sapiens
gaaccactgcaccca

SEQ ID NO: 1126758 - DNA, 15 bp, Homo sapiens
tgaaccactgcaccc

SEQ ID NO: 1126759 - DNA, 15 bp, Homo sapiens
atgaaccactgcacc

SEQ ID NO: 1126760 - DNA, 15 bp, Homo sapiens
catgaaccactgcac

SEQ ID NO: 1126761 - DNA, 15 bp, Homo sapiens
gcatgaaccactgca

SEQ ID NO: 1126762 - DNA, 15 bp, Homo sapiens
ggcatgaaccactgc

SEQ ID NO: 1126763 - DNA, 15 bp, Homo sapiens
aggcatgaaccactg

SEQ ID NO: 1126764 - DNA, 15 bp, Homo sapiens
caggcatgaaccact

SEQ ID NO: 1126765 - DNA, 15 bp, Homo sapiens
gtgggattacaggca

SEQ ID NO: 1126766 - DNA, 15 bp, Homo sapiens
ggtgggattacaggc

SEQ ID NO: 1126767 - DNA, 15 bp, Homo sapiens
tggtgggattacagg

SEQ ID NO: 1126768 - DNA, 15 bp, Homo sapiens
gtggtgggattacag

SEQ ID NO: 1126769 - DNA, 15 bp, Homo sapiens
agtggtgggattaca

SEQ ID NO: 1126770 - DNA, 15 bp, Homo sapiens
aagtggtgggattac

SEQ ID NO: 1126771 - DNA, 15 bp, Homo sapiens
aaagtggtgggatta

SEQ ID NO: 1126772 - DNA, 15 bp, Homo sapiens
caaagtggtgggatt

SEQ ID NO: 1126773 - DNA, 15 bp, Homo sapiens
ccaaagtggtgggat

SEQ ID NO: 1126774 - DNA, 15 bp, Homo sapiens
cccaaagtggtggga

SEQ ID NO: 1126775 - DNA, 15 bp, Homo sapiens
tcccaaagtggtggg

SEQ ID NO: 1126776 - DNA, 15 bp, Homo sapiens
ctcccaaagtggtgg

SEQ ID NO: 1126777 - DNA, 15 bp, Homo sapiens
cctcccaaagtggtg

SEQ ID NO: 1126778 - DNA, 15 bp, Homo sapiens
gcctcccaaagtggt

SEQ ID NO: 1126779 - DNA, 15 bp, Homo sapiens
atcaggctggtctcg

SEQ ID NO: 1126780 - DNA, 15 bp, Homo sapiens
gatcaggctggtctc

SEQ ID NO: 1126781 - DNA, 15 bp, Homo sapiens
tgatcaggctggtct

SEQ ID NO: 1126782 - DNA, 15 bp, Homo sapiens
ttgatcaggctggtc

SEQ ID NO: 1126783 - DNA, 15 bp, Homo sapiens
attgatcaggctggt

SEQ ID NO: 1126784 - DNA, 15 bp, Homo sapiens
tattgatcaggctgg

SEQ ID NO: 1126785 - DNA, 15 bp, Homo sapiens
atattgatcaggctg

SEQ ID NO: 1126786 - DNA, 15 bp, Homo sapiens
catattgatcaggct

SEQ ID NO: 1126787 - DNA, 15 bp, Homo sapiens
ccatattgatcaggc

SEQ ID NO: 1126788 - DNA, 15 bp, Homo sapiens
accatattgatcagg

SEQ ID NO: 1126789 - DNA, 15 bp, Homo sapiens
caccatattgatcag

SEQ ID NO: 1126790 - DNA, 15 bp, Homo sapiens
tcaccatattgatca

SEQ ID NO: 1126791 - DNA, 15 bp, Homo sapiens
ttcaccatattgatc

SEQ ID NO: 1126792 - DNA, 15 bp, Homo sapiens
tttcaccatattgat

SEQ ID NO: 1126793 - DNA, 15 bp, Homo sapiens
gtttcaccatattga

SEQ ID NO: 1126794 - DNA, 15 bp, Homo sapiens
atagagacagggttt

SEQ ID NO: 1126795 - DNA, 15 bp, Homo sapiens
aatagagacagggtt

SEQ ID NO: 1126796 - DNA, 15 bp, Homo sapiens
taatagagacagggt

SEQ ID NO: 1126797 - DNA, 15 bp, Homo sapiens
ttaatagagacaggg

SEQ ID NO: 1126798 - DNA, 15 bp, Homo sapiens
tttaatagagacagg

SEQ ID NO: 1126799 - DNA, 15 bp, Homo sapiens
ctttaatagagacag

SEQ ID NO: 1126800 - DNA, 15 bp, Homo sapiens
tctttaatagagaca

SEQ ID NO: 1126801 - DNA, 15 bp, Homo sapiens
atctttaatagagac

SEQ ID NO: 1126802 - DNA, 15 bp, Homo sapiens
tatctttaatagaga

SEQ ID NO: 1126803 - DNA, 15 bp, Homo sapiens
gtatctttaatagag

SEQ ID NO: 1126804 - DNA, 15 bp, Homo sapiens
tgtatctttaataga

SEQ ID NO: 1126805 - DNA, 15 bp, Homo sapiens
ttgtatctttaatag

SEQ ID NO: 1126806 - DNA, 15 bp, Homo sapiens
tttgtatctttaata

SEQ ID NO: 1126807 - DNA, 15 bp, Homo sapiens
ttttgtatctttaat

SEQ ID NO: 1126808 - DNA, 15 bp, Homo sapiens
tttttgtatctttaa

SEQ ID NO: 1126809 - DNA, 15 bp, Homo sapiens
atttttgtatcttta

SEQ ID NO: 1126810 - DNA, 15 bp, Homo sapiens
aatttttgtatcttt

SEQ ID NO: 1126811 - DNA, 15 bp, Homo sapiens
taatttttgtatctt

SEQ ID NO: 1126812 - DNA, 15 bp, Homo sapiens
ctaatttttgtatct

SEQ ID NO: 1126813 - DNA, 15 bp, Homo sapiens
gctaatttttgtatc

SEQ ID NO: 1126814 - DNA, 15 bp, Homo sapiens
acccggctaattttt

SEQ ID NO: 1126815 - DNA, 15 bp, Homo sapiens
cacccggctaatttt

SEQ ID NO: 1126816 - DNA, 15 bp, Homo sapiens
acacccggctaattt

SEQ ID NO: 1126817 - DNA, 15 bp, Homo sapiens
cacacccggctaatt

SEQ ID NO: 1126818 - DNA, 15 bp, Homo sapiens
ccacacccggctaat

SEQ ID NO: 1126819 - DNA, 15 bp, Homo sapiens
accacacccggctaa

SEQ ID NO: 1126820 - DNA, 15 bp, Homo sapiens
caccacacccggcta

SEQ ID NO: 1126821 - DNA, 15 bp, Homo sapiens
cgccaccacacccgg

SEQ ID NO: 1126822 - DNA, 15 bp, Homo sapiens
acgccaccacacccg

SEQ ID NO: 1126823 - DNA, 15 bp, Homo sapiens
cacgccaccacaccc

SEQ ID NO: 1126824 - DNA, 15 bp, Homo sapiens
gcacgccaccacacc

SEQ ID NO: 1126825 - DNA, 15 bp, Homo sapiens
tgcacgccaccacac

SEQ ID NO: 1126826 - DNA, 15 bp, Homo sapiens
ttgcacgccaccaca

SEQ ID NO: 1126827 - DNA, 15 bp, Homo sapiens
gttgcacgccaccac

SEQ ID NO: 1126828 - DNA, 15 bp, Homo sapiens
agttgcacgccacca

SEQ ID NO: 1126829 - DNA, 15 bp, Homo sapiens
cagttgcacgccacc

SEQ ID NO: 1126830 - DNA, 15 bp, Homo sapiens
acagttgcacgccac

SEQ ID NO: 1126831 - DNA, 15 bp, Homo sapiens
tacagttgcacgcca

SEQ ID NO: 1126832 - DNA, 15 bp, Homo sapiens
ctacagttgcacgcc

SEQ ID NO: 1126833 - DNA, 15 bp, Homo sapiens
actacagttgcacgc

SEQ ID NO: 1126834 - DNA, 15 bp, Homo sapiens
gactacagttgcacg

SEQ ID NO: 1126835 - DNA, 15 bp, Homo sapiens
ggactacagttgcac

SEQ ID NO: 1126836 - DNA, 15 bp, Homo sapiens
gggactacagttgca

SEQ ID NO: 1126837 - DNA, 15 bp, Homo sapiens
tgggactacagttgc

SEQ ID NO: 1126838 - DNA, 15 bp, Homo sapiens
ctgggactacagttg

SEQ ID NO: 1126839 - DNA, 15 bp, Homo sapiens
gctgggactacagtt

SEQ ID NO: 1126840 - DNA, 15 bp, Homo sapiens
agctgggactacagt

SEQ ID NO: 1126841 - DNA, 15 bp, Homo sapiens
gaatagctgggacta

SEQ ID NO: 1126842 - DNA, 15 bp, Homo sapiens
cgaatagctgggact

SEQ ID NO: 1126843 - DNA, 15 bp, Homo sapiens
ccgaatagctgggac

SEQ ID NO: 1126844 - DNA, 15 bp, Homo sapiens
cccgaatagctggga

SEQ ID NO: 1126845 - DNA, 15 bp, Homo sapiens
tcccgaatagctggg

SEQ ID NO: 1126846 - DNA, 15 bp, Homo sapiens
ctcccgaatagctgg

SEQ ID NO: 1126847 - DNA, 15 bp, Homo sapiens
cctcccgaatagctg

SEQ ID NO: 1126848 - DNA, 15 bp, Homo sapiens
gcctcccgaatagct

SEQ ID NO: 1126849 - DNA, 15 bp, Homo sapiens
agcctcccgaatagc

SEQ ID NO: 1126850 - DNA, 15 bp, Homo sapiens
cagcctcccgaatag

SEQ ID NO: 1126851 - DNA, 15 bp, Homo sapiens
tcagcctcccgaata

SEQ ID NO: 1126852 - DNA, 15 bp, Homo sapiens
ctcagcctcccgaat

SEQ ID NO: 1126853 - DNA, 15 bp, Homo sapiens
tctcagcctcccgaa

SEQ ID NO: 1126854 - DNA, 15 bp, Homo sapiens
ttctcagcctcccga

SEQ ID NO: 1126855 - DNA, 15 bp, Homo sapiens
tttctcagcctcccg

SEQ ID NO: 1126856 - DNA, 15 bp, Homo sapiens
ctttctcagcctccc

SEQ ID NO: 1126857 - DNA, 15 bp, Homo sapiens
cctttctcagcctcc

SEQ ID NO: 1126858 - DNA, 15 bp, Homo sapiens
tcctttctcagcctc

SEQ ID NO: 1126859 - DNA, 15 bp, Homo sapiens
ctcctttctcagcct

SEQ ID NO: 1126860 - DNA, 15 bp, Homo sapiens
tctcctttctcagcc

SEQ ID NO: 1126861 - DNA, 15 bp, Homo sapiens
ttctcctttctcagc

SEQ ID NO: 1126862 - DNA, 15 bp, Homo sapiens
attctcctttctcag

SEQ ID NO: 1126863 - DNA, 15 bp, Homo sapiens
aattctcctttctca

SEQ ID NO: 1126864 - DNA, 15 bp, Homo sapiens
caattctcctttctc

SEQ ID NO: 1126865 - DNA, 15 bp, Homo sapiens
gcaattctcctttct

SEQ ID NO: 1126866 - DNA, 15 bp, Homo sapiens
agcaattctcctttc

SEQ ID NO: 1126867 - DNA, 15 bp, Homo sapiens
aagcaattctccttt

SEQ ID NO: 1126868 - DNA, 15 bp, Homo sapiens
caagcaattctcctt

SEQ ID NO: 1126869 - DNA, 15 bp, Homo sapiens
cctctgccttccagg

SEQ ID NO: 1126870 - DNA, 15 bp, Homo sapiens
acctctgccttccag

SEQ ID NO: 1126871 - DNA, 15 bp, Homo sapiens
aacctctgccttcca

SEQ ID NO: 1126872 - DNA, 15 bp, Homo sapiens
caacctctgccttcc

SEQ ID NO: 1126873 - DNA, 15 bp, Homo sapiens
cggtgtgatctcagc

SEQ ID NO: 1126874 - DNA, 15 bp, Homo sapiens
gcggtgtgatctcag

SEQ ID NO: 1126875 - DNA, 15 bp, Homo sapiens
agcggtgtgatctca

SEQ ID NO: 1126876 - DNA, 15 bp, Homo sapiens
cagcggtgtgatctc

SEQ ID NO: 1126877 - DNA, 15 bp, Homo sapiens
ccagcggtgtgatct

SEQ ID NO: 1126878 - DNA, 15 bp, Homo sapiens
tccagcggtgtgatc

SEQ ID NO: 1126879 - DNA, 15 bp, Homo sapiens
gtccagcggtgtgat

SEQ ID NO: 1126880 - DNA, 15 bp, Homo sapiens
agtccagcggtgtga

SEQ ID NO: 1126881 - DNA, 15 bp, Homo sapiens
gagtccagcggtgtg

SEQ ID NO: 1126882 - DNA, 15 bp, Homo sapiens
ggagtccagcggtgt

SEQ ID NO: 1126883 - DNA, 15 bp, Homo sapiens
tggagtccagcggtg

SEQ ID NO: 1126884 - DNA, 15 bp, Homo sapiens
ctggagtccagcggt

SEQ ID NO: 1126885 - DNA, 15 bp, Homo sapiens
gctggagtccagcgg

SEQ ID NO: 1126886 - DNA, 15 bp, Homo sapiens
ggctggagtccagcg

SEQ ID NO: 1126887 - DNA, 15 bp, Homo sapiens
aggctggagtccagc

SEQ ID NO: 1126888 - DNA, 15 bp, Homo sapiens
caggctggagtccag

SEQ ID NO: 1126889 - DNA, 15 bp, Homo sapiens
ccaggctggagtcca

SEQ ID NO: 1126890 - DNA, 15 bp, Homo sapiens
cccaggctggagtcc

SEQ ID NO: 1126891 - DNA, 15 bp, Homo sapiens
acccaggctggagtc

SEQ ID NO: 1126892 - DNA, 15 bp, Homo sapiens
acaattttttttttt

SEQ ID NO: 1126893 - DNA, 15 bp, Homo sapiens
aacaatttttttttt

SEQ ID NO: 1126894 - DNA, 15 bp, Homo sapiens
aaacaattttttttt

SEQ ID NO: 1126895 - DNA, 15 bp, Homo sapiens
gaaacaatttttttt

SEQ ID NO: 1126896 - DNA, 15 bp, Homo sapiens
agaaacaattttttt

SEQ ID NO: 1126897 - DNA, 15 bp, Homo sapiens
cagaaacaatttttt

SEQ ID NO: 1126898 - DNA, 15 bp, Homo sapiens
ccagaaacaattttt

SEQ ID NO: 1126899 - DNA, 15 bp, Homo sapiens
tccagaaacaatttt

SEQ ID NO: 1126900 - DNA, 15 bp, Homo sapiens
ttccagaaacaattt

SEQ ID NO: 1126901 - DNA, 15 bp, Homo sapiens
tttccagaaacaatt

SEQ ID NO: 1126902 - DNA, 15 bp, Homo sapiens
ctttccagaaacaat

SEQ ID NO: 1126903 - DNA, 15 bp, Homo sapiens
cctttccagaaacaa

SEQ ID NO: 1126904 - DNA, 15 bp, Homo sapiens
gcctttccagaaaca

SEQ ID NO: 1126905 - DNA, 15 bp, Homo sapiens
tgcctttccagaaac

SEQ ID NO: 1126906 - DNA, 15 bp, Homo sapiens
atgcctttccagaaa

SEQ ID NO: 1126907 - DNA, 15 bp, Homo sapiens
gatgcctttccagaa

SEQ ID NO: 1126908 - DNA, 15 bp, Homo sapiens
cgatgcctttccaga

SEQ ID NO: 1126909 - DNA, 15 bp, Homo sapiens
ccgatgcctttccag

SEQ ID NO: 1126910 - DNA, 15 bp, Homo sapiens
cccgatgcctttcca

SEQ ID NO: 1126911 - DNA, 15 bp, Homo sapiens
tcccgatgcctttcc

SEQ ID NO: 1126912 - DNA, 15 bp, Homo sapiens
ttcccgatgcctttc

SEQ ID NO: 1126913 - DNA, 15 bp, Homo sapiens
cttcccgatgccttt

SEQ ID NO: 1126914 - DNA, 15 bp, Homo sapiens
tcttcccgatgcctt

SEQ ID NO: 1126915 - DNA, 15 bp, Homo sapiens
ctcttcccgatgcct

SEQ ID NO: 1126916 - DNA, 15 bp, Homo sapiens
cctcttcccgatgcc

SEQ ID NO: 1126917 - DNA, 15 bp, Homo sapiens
tcctcttcccgatgc

SEQ ID NO: 1126918 - DNA, 15 bp, Homo sapiens
ttcctcttcccgatg

SEQ ID NO: 1126919 - DNA, 15 bp, Homo sapiens
attcctcttcccgat

SEQ ID NO: 1126920 - DNA, 15 bp, Homo sapiens
gattcctcttcccga

SEQ ID NO: 1126921 - DNA, 15 bp, Homo sapiens
agattcctcttcccg

SEQ ID NO: 1126922 - DNA, 15 bp, Homo sapiens
agcacctcagatata

SEQ ID NO: 1126923 - DNA, 15 bp, Homo sapiens
cagcacctcagatat

SEQ ID NO: 1126924 - DNA, 15 bp, Homo sapiens
ccagcacctcagata

SEQ ID NO: 1126925 - DNA, 15 bp, Homo sapiens
gccagcacctcagat

SEQ ID NO: 1126926 - DNA, 15 bp, Homo sapiens
agccagcacctcaga

SEQ ID NO: 1126927 - DNA, 15 bp, Homo sapiens
tagccagcacctcag

SEQ ID NO: 1126928 - DNA, 15 bp, Homo sapiens
gtagccagcacctca

SEQ ID NO: 1126929 - DNA, 15 bp, Homo sapiens
ggtagccagcacctc

SEQ ID NO: 1126930 - DNA, 15 bp, Homo sapiens
aggtagccagcacct

SEQ ID NO: 1126931 - DNA, 15 bp, Homo sapiens
gaggtagccagcacc

SEQ ID NO: 1126932 - DNA, 15 bp, Homo sapiens
agaggtagccagcac

SEQ ID NO: 1126933 - DNA, 15 bp, Homo sapiens
aagaggtagccagca

SEQ ID NO: 1126934 - DNA, 15 bp, Homo sapiens
caagaggtagccagc

SEQ ID NO: 1126935 - DNA, 15 bp, Homo sapiens
ccaagaggtagccag

SEQ ID NO: 1126936 - DNA, 15 bp, Homo sapiens
tccaagaggtagcca

SEQ ID NO: 1126937 - DNA, 15 bp, Homo sapiens
ctccaagaggtagcc

SEQ ID NO: 1126938 - DNA, 15 bp, Homo sapiens
actccaagaggtagc

SEQ ID NO: 1126939 - DNA, 15 bp, Homo sapiens
aactccaagaggtag

SEQ ID NO: 1126940 - DNA, 15 bp, Homo sapiens
taactccaagaggta

SEQ ID NO: 1126941 - DNA, 15 bp, Homo sapiens
ataactccaagaggt

SEQ ID NO: 1126942 - DNA, 15 bp, Homo sapiens
aataactccaagagg

SEQ ID NO: 1126943 - DNA, 15 bp, Homo sapiens
caataactccaagag

SEQ ID NO: 1126944 - DNA, 15 bp, Homo sapiens
tcaataactccaaga

SEQ ID NO: 1126945 - DNA, 15 bp, Homo sapiens
ctcaataactccaag

SEQ ID NO: 1126946 - DNA, 15 bp, Homo sapiens
tctcaataactccaa

SEQ ID NO: 1126947 - DNA, 15 bp, Homo sapiens
ctctcaataactcca

SEQ ID NO: 1126948 - DNA, 15 bp, Homo sapiens
cctctcaataactcc

SEQ ID NO: 1126949 - DNA, 15 bp, Homo sapiens
tcctctcaataactc

SEQ ID NO: 1126950 - DNA, 15 bp, Homo sapiens
atcctctcaataact

SEQ ID NO: 1126951 - DNA, 15 bp, Homo sapiens
aatcctctcaataac

SEQ ID NO: 1126952 - DNA, 15 bp, Homo sapiens
taatcctctcaataa

SEQ ID NO: 1126953 - DNA, 15 bp, Homo sapiens
ataatcctctcaata

SEQ ID NO: 1126954 - DNA, 15 bp, Homo sapiens
tataatcctctcaat

SEQ ID NO: 1126955 - DNA, 15 bp, Homo sapiens
ttataatcctctcaa

SEQ ID NO: 1126956 - DNA, 15 bp, Homo sapiens
cttataatcctctca

SEQ ID NO: 1126957 - DNA, 15 bp, Homo sapiens
tcttataatcctctc

SEQ ID NO: 1126958 - DNA, 15 bp, Homo sapiens
gtcttataatcctct

SEQ ID NO: 1126959 - DNA, 15 bp, Homo sapiens
tgtcttataatcctc

SEQ ID NO: 1126960 - DNA, 15 bp, Homo sapiens
ctgtcttataatcct

SEQ ID NO: 1126961 - DNA, 15 bp, Homo sapiens
actgtcttataatcc

SEQ ID NO: 1126962 - DNA, 15 bp, Homo sapiens
gactgtcttataatc

SEQ ID NO: 1126963 - DNA, 15 bp, Homo sapiens
agactgtcttataat

SEQ ID NO: 1126964 - DNA, 15 bp, Homo sapiens
tagactgtcttataa

SEQ ID NO: 1126965 - DNA, 15 bp, Homo sapiens
atagactgtcttata

SEQ ID NO: 1126966 - DNA, 15 bp, Homo sapiens
catagactgtcttat

SEQ ID NO: 1126967 - DNA, 15 bp, Homo sapiens
acatagactgtctta

SEQ ID NO: 1126968 - DNA, 15 bp, Homo sapiens
cacatagactgtctt

SEQ ID NO: 1126969 - DNA, 15 bp, Homo sapiens
tcacatagactgtct

SEQ ID NO: 1126970 - DNA, 15 bp, Homo sapiens
ttcacatagactgtc

SEQ ID NO: 1126971 - DNA, 15 bp, Homo sapiens
attcacatagactgt

SEQ ID NO: 1126972 - DNA, 15 bp, Homo sapiens
gattcacatagactg

SEQ ID NO: 1126973 - DNA, 15 bp, Homo sapiens
tgattcacatagact

SEQ ID NO: 1126974 - DNA, 15 bp, Homo sapiens
ctgattcacatagac

SEQ ID NO: 1126975 - DNA, 15 bp, Homo sapiens
gctgattcacataga

SEQ ID NO: 1126976 - DNA, 15 bp, Homo sapiens
tgctgattcacatag

SEQ ID NO: 1126977 - DNA, 15 bp, Homo sapiens
ttgctgattcacata

SEQ ID NO: 1126978 - DNA, 15 bp, Homo sapiens
gttgctgattcacat

SEQ ID NO: 1126979 - DNA, 15 bp, Homo sapiens
ggttgctgattcaca

SEQ ID NO: 1126980 - DNA, 15 bp, Homo sapiens
gggttgctgattcac

SEQ ID NO: 1126981 - DNA, 15 bp, Homo sapiens
agggttgctgattca

SEQ ID NO: 1126982 - DNA, 15 bp, Homo sapiens
aagggttgctgattc

SEQ ID NO: 1126983 - DNA, 15 bp, Homo sapiens
caagggttgctgatt

SEQ ID NO: 1126984 - DNA, 15 bp, Homo sapiens
gcaagggttgctgat

SEQ ID NO: 1126985 - DNA, 15 bp, Homo sapiens
tgcaagggttgctga

SEQ ID NO: 1126986 - DNA, 15 bp, Homo sapiens
atgcaagggttgctg

SEQ ID NO: 1126987 - DNA, 15 bp, Homo sapiens
catgcaagggttgct

SEQ ID NO: 1126988 - DNA, 15 bp, Homo sapiens
ccatgcaagggttgc

SEQ ID NO: 1126989 - DNA, 15 bp, Homo sapiens
gccatgcaagggttg

SEQ ID NO: 1126990 - DNA, 15 bp, Homo sapiens
ggccatgcaagggtt

SEQ ID NO: 1126991 - DNA, 15 bp, Homo sapiens
gggccatgcaagggt

SEQ ID NO: 1126992 - DNA, 15 bp, Homo sapiens
ggggccatgcaaggg

SEQ ID NO: 1126993 - DNA, 15 bp, Homo sapiens
aggggccatgcaagg

SEQ ID NO: 1126994 - DNA, 15 bp, Homo sapiens
caggggccatgcaag

SEQ ID NO: 1126995 - DNA, 15 bp, Homo sapiens
ccaggggccatgcaa

SEQ ID NO: 1126996 - DNA, 15 bp, Homo sapiens
gccaggggccatgca

SEQ ID NO: 1126997 - DNA, 15 bp, Homo sapiens
cgccaggggccatgc

SEQ ID NO: 1126998 - DNA, 15 bp, Homo sapiens
ccgccaggggccatg

SEQ ID NO: 1126999 - DNA, 15 bp, Homo sapiens
cccgccaggggccat

SEQ ID NO: 1127000 - DNA, 15 bp, Homo sapiens
ccccgccaggggcca

SEQ ID NO: 1127001 - DNA, 15 bp, Homo sapiens
tccccgccaggggcc

SEQ ID NO: 1127002 - DNA, 15 bp, Homo sapiens
ttccccgccaggggc

SEQ ID NO: 1127003 - DNA, 15 bp, Homo sapiens
gttccccgccagggg

SEQ ID NO: 1127004 - DNA, 15 bp, Homo sapiens
tgttccccgccaggg

SEQ ID NO: 1127005 - DNA, 15 bp, Homo sapiens
ctgttccccgccagg

SEQ ID NO: 1127006 - DNA, 15 bp, Homo sapiens
actgttccccgccag

SEQ ID NO: 1127007 - DNA, 15 bp, Homo sapiens
tactgttccccgcca

SEQ ID NO: 1127008 - DNA, 15 bp, Homo sapiens
ttactgttccccgcc

SEQ ID NO: 1127009 - DNA, 15 bp, Homo sapiens
attactgttccccgc

SEQ ID NO: 1127010 - DNA, 15 bp, Homo sapiens
tattactgttccccg

SEQ ID NO: 1127011 - DNA, 15 bp, Homo sapiens
ttattactgttcccc

SEQ ID NO: 1127012 - DNA, 15 bp, Homo sapiens
attattactgttccc

SEQ ID NO: 1127013 - DNA, 15 bp, Homo sapiens
tattattactgttcc

SEQ ID NO: 1127014 - DNA, 15 bp, Homo sapiens
ctattattactgttc

SEQ ID NO: 1127015 - DNA, 15 bp, Homo sapiens
gctattattactgtt

SEQ ID NO: 1127016 - DNA, 15 bp, Homo sapiens
ggctattattactgt

SEQ ID NO: 1127017 - DNA, 15 bp, Homo sapiens
tggctattattactg

SEQ ID NO: 1127018 - DNA, 15 bp, Homo sapiens
atggctattattact

SEQ ID NO: 1127019 - DNA, 15 bp, Homo sapiens
gatggctattattac

SEQ ID NO: 1127020 - DNA, 15 bp, Homo sapiens
tgatggctattatta

SEQ ID NO: 1127021 - DNA, 15 bp, Homo sapiens
atgatggctattatt

SEQ ID NO: 1127022 - DNA, 15 bp, Homo sapiens
gatgatggctattat

SEQ ID NO: 1127023 - DNA, 15 bp, Homo sapiens
tgatgatggctatta

SEQ ID NO: 1127024 - DNA, 15 bp, Homo sapiens
atgatgatggctatt

SEQ ID NO: 1127025 - DNA, 15 bp, Homo sapiens
catgatgatggctat

SEQ ID NO: 1127026 - DNA, 15 bp, Homo sapiens
acatgatgatggcta

SEQ ID NO: 1127027 - DNA, 15 bp, Homo sapiens
aacatgatgatggct

SEQ ID NO: 1127028 - DNA, 15 bp, Homo sapiens
aaacatgatgatggc

SEQ ID NO: 1127029 - DNA, 15 bp, Homo sapiens
taaacatgatgatgg

SEQ ID NO: 1127030 - DNA, 15 bp, Homo sapiens
gtaaacatgatgatg

SEQ ID NO: 1127031 - DNA, 15 bp, Homo sapiens
agtaaacatgatgat

SEQ ID NO: 1127032 - DNA, 15 bp, Homo sapiens
aagtaaacatgatga

SEQ ID NO: 1127033 - DNA, 15 bp, Homo sapiens
taagtaaacatgatg

SEQ ID NO: 1127034 - DNA, 15 bp, Homo sapiens
gtaagtaaacatgat

SEQ ID NO: 1127035 - DNA, 15 bp, Homo sapiens
tgtaagtaaacatga

SEQ ID NO: 1127036 - DNA, 15 bp, Homo sapiens
atgtaagtaaacatg

SEQ ID NO: 1127037 - DNA, 15 bp, Homo sapiens
tatgtaagtaaacat

SEQ ID NO: 1127038 - DNA, 15 bp, Homo sapiens
ctatgtaagtaaaca

SEQ ID NO: 1127039 - DNA, 15 bp, Homo sapiens
actatgtaagtaaac

SEQ ID NO: 1127040 - DNA, 15 bp, Homo sapiens
gactatgtaagtaaa

SEQ ID NO: 1127041 - DNA, 15 bp, Homo sapiens
ggactatgtaagtaa

SEQ ID NO: 1127042 - DNA, 15 bp, Homo sapiens
aggactatgtaagta

SEQ ID NO: 1127043 - DNA, 15 bp, Homo sapiens
taggactatgtaagt

SEQ ID NO: 1127044 - DNA, 15 bp, Homo sapiens
ttaggactatgtaag

SEQ ID NO: 1127045 - DNA, 15 bp, Homo sapiens
attaggactatgtaa

SEQ ID NO: 1127046 - DNA, 15 bp, Homo sapiens
aattaggactatgta

SEQ ID NO: 1127047 - DNA, 15 bp, Homo sapiens
taattaggactatgt

SEQ ID NO: 1127048 - DNA, 15 bp, Homo sapiens
ctaattaggactatg

SEQ ID NO: 1127049 - DNA, 15 bp, Homo sapiens
actaattaggactat

SEQ ID NO: 1127050 - DNA, 15 bp, Homo sapiens
gactaattaggacta

SEQ ID NO: 1127051 - DNA, 15 bp, Homo sapiens
agactaattaggact

SEQ ID NO: 1127052 - DNA, 15 bp, Homo sapiens
aagactaattaggac

SEQ ID NO: 1127053 - DNA, 15 bp, Homo sapiens
gaagactaattagga

SEQ ID NO: 1127054 - DNA, 15 bp, Homo sapiens
tgaagactaattagg

SEQ ID NO: 1127055 - DNA, 15 bp, Homo sapiens
ttgaagactaattag

SEQ ID NO: 1127056 - DNA, 15 bp, Homo sapiens
tttgaagactaatta

SEQ ID NO: 1127057 - DNA, 15 bp, Homo sapiens
ttttgaagactaatt

SEQ ID NO: 1127058 - DNA, 15 bp, Homo sapiens
gttttgaagactaat

SEQ ID NO: 1127059 - DNA, 15 bp, Homo sapiens
tgttttgaagactaa

SEQ ID NO: 1127060 - DNA, 15 bp, Homo sapiens
ctgttttgaagacta

SEQ ID NO: 1127061 - DNA, 15 bp, Homo sapiens
gctgttttgaagact

SEQ ID NO: 1127062 - DNA, 15 bp, Homo sapiens
ggctgttttgaagac

SEQ ID NO: 1127063 - DNA, 15 bp, Homo sapiens
gggctgttttgaaga

SEQ ID NO: 1127064 - DNA, 15 bp, Homo sapiens
agggctgttttgaag

SEQ ID NO: 1127065 - DNA, 15 bp, Homo sapiens
cagggctgttttgaa

SEQ ID NO: 1127066 - DNA, 15 bp, Homo sapiens
acagggctgttttga

SEQ ID NO: 1127067 - DNA, 15 bp, Homo sapiens
tacagggctgttttg

SEQ ID NO: 1127068 - DNA, 15 bp, Homo sapiens
ctacagggctgtttt

SEQ ID NO: 1127069 - DNA, 15 bp, Homo sapiens
gctacagggctgttt

SEQ ID NO: 1127070 - DNA, 15 bp, Homo sapiens
tgctacagggctgtt

SEQ ID NO: 1127071 - DNA, 15 bp, Homo sapiens
ttgctacagggctgt

SEQ ID NO: 1127072 - DNA, 15 bp, Homo sapiens
attgctacagggctg

SEQ ID NO: 1127073 - DNA, 15 bp, Homo sapiens
cattgctacagggct

SEQ ID NO: 1127074 - DNA, 15 bp, Homo sapiens
ccattgctacagggc

SEQ ID NO: 1127075 - DNA, 15 bp, Homo sapiens
accattgctacaggg

SEQ ID NO: 1127076 - DNA, 15 bp, Homo sapiens
taccattgctacagg

SEQ ID NO: 1127077 - DNA, 15 bp, Homo sapiens
ataccattgctacag

SEQ ID NO: 1127078 - DNA, 15 bp, Homo sapiens
cataccattgctaca

SEQ ID NO: 1127079 - DNA, 15 bp, Homo sapiens
tcataccattgctac

SEQ ID NO: 1127080 - DNA, 15 bp, Homo sapiens
atcataccattgcta

SEQ ID NO: 1127081 - DNA, 15 bp, Homo sapiens
aatcataccattgct

SEQ ID NO: 1127082 - DNA, 15 bp, Homo sapiens
taatcataccattgc

SEQ ID NO: 1127083 - DNA, 15 bp, Homo sapiens
ataatcataccattg

SEQ ID NO: 1127084 - DNA, 15 bp, Homo sapiens
aataatcataccatt

SEQ ID NO: 1127085 - DNA, 15 bp, Homo sapiens
taataatcataccat

SEQ ID NO: 1127086 - DNA, 15 bp, Homo sapiens
gtaataatcatacca

SEQ ID NO: 1127087 - DNA, 15 bp, Homo sapiens
ggtaataatcatacc

SEQ ID NO: 1127088 - DNA, 15 bp, Homo sapiens
tggtaataatcatac

SEQ ID NO: 1127089 - DNA, 15 bp, Homo sapiens
atggtaataatcata

SEQ ID NO: 1127090 - DNA, 15 bp, Homo sapiens
aatggtaataatcat

SEQ ID NO: 1127091 - DNA, 15 bp, Homo sapiens
aaatggtaataatca

SEQ ID NO: 1127092 - DNA, 15 bp, Homo sapiens
aaaatggtaataatc

SEQ ID NO: 1127093 - DNA, 15 bp, Homo sapiens
taaaatggtaataat

SEQ ID NO: 1127094 - DNA, 15 bp, Homo sapiens
gtaaaatggtaataa

SEQ ID NO: 1127095 - DNA, 15 bp, Homo sapiens
tgtaaaatggtaata

SEQ ID NO: 1127096 - DNA, 15 bp, Homo sapiens
ctgtaaaatggtaat

SEQ ID NO: 1127097 - DNA, 15 bp, Homo sapiens
tctgtaaaatggtaa

SEQ ID NO: 1127098 - DNA, 15 bp, Homo sapiens
atctgtaaaatggta

SEQ ID NO: 1127099 - DNA, 15 bp, Homo sapiens
catctgtaaaatggt

SEQ ID NO: 1127100 - DNA, 15 bp, Homo sapiens
tcctcatctgtaaaa

SEQ ID NO: 1127101 - DNA, 15 bp, Homo sapiens
ttcctcatctgtaaa

SEQ ID NO: 1127102 - DNA, 15 bp, Homo sapiens
gttcctcatctgtaa

SEQ ID NO: 1127103 - DNA, 15 bp, Homo sapiens
ggttcctcatctgta

SEQ ID NO: 1127104 - DNA, 15 bp, Homo sapiens
aggttcctcatctgt

SEQ ID NO: 1127105 - DNA, 15 bp, Homo sapiens
aaggttcctcatctg

SEQ ID NO: 1127106 - DNA, 15 bp, Homo sapiens
aaaggttcctcatct

SEQ ID NO: 1127107 - DNA, 15 bp, Homo sapiens
caaaggttcctcatc

SEQ ID NO: 1127108 - DNA, 15 bp, Homo sapiens
tcaaaggttcctcat

SEQ ID NO: 1127109 - DNA, 15 bp, Homo sapiens
ttcaaaggttcctca

SEQ ID NO: 1127110 - DNA, 15 bp, Homo sapiens
cttcaaaggttcctc

SEQ ID NO: 1127111 - DNA, 15 bp, Homo sapiens
gcttcaaaggttcct

SEQ ID NO: 1127112 - DNA, 15 bp, Homo sapiens
ggcttcaaaggttcc

SEQ ID NO: 1127113 - DNA, 15 bp, Homo sapiens
aggcttcaaaggttc

SEQ ID NO: 1127114 - DNA, 15 bp, Homo sapiens
gaggcttcaaaggtt

SEQ ID NO: 1127115 - DNA, 15 bp, Homo sapiens
tgaggcttcaaaggt

SEQ ID NO: 1127116 - DNA, 15 bp, Homo sapiens
ctgaggcttcaaagg

SEQ ID NO: 1127117 - DNA, 15 bp, Homo sapiens
tctgaggcttcaaag

SEQ ID NO: 1127118 - DNA, 15 bp, Homo sapiens
ctctgaggcttcaaa

SEQ ID NO: 1127119 - DNA, 15 bp, Homo sapiens
tctctgaggcttcaa

SEQ ID NO: 1127120 - DNA, 15 bp, Homo sapiens
ctctctgaggcttca

SEQ ID NO: 1127121 - DNA, 15 bp, Homo sapiens
cctctctgaggcttc

SEQ ID NO: 1127122 - DNA, 15 bp, Homo sapiens
gcctctctgaggctt

SEQ ID NO: 1127123 - DNA, 15 bp, Homo sapiens
agcctctctgaggct

SEQ ID NO: 1127124 - DNA, 15 bp, Homo sapiens
tagcctctctgaggc

SEQ ID NO: 1127125 - DNA, 15 bp, Homo sapiens
ttagcctctctgagg

SEQ ID NO: 1127126 - DNA, 15 bp, Homo sapiens
gttagcctctctgag

SEQ ID NO: 1127127 - DNA, 15 bp, Homo sapiens
tgttagcctctctga

SEQ ID NO: 1127128 - DNA, 15 bp, Homo sapiens
ctgttagcctctctg

SEQ ID NO: 1127129 - DNA, 15 bp, Homo sapiens
tctgttagcctctct

SEQ ID NO: 1127130 - DNA, 15 bp, Homo sapiens
gtctgttagcctctc

SEQ ID NO: 1127131 - DNA, 15 bp, Homo sapiens
tgtctgttagcctct

SEQ ID NO: 1127132 - DNA, 15 bp, Homo sapiens
atgtctgttagcctc

SEQ ID NO: 1127133 - DNA, 15 bp, Homo sapiens
tatgtctgttagcct

SEQ ID NO: 1127134 - DNA, 15 bp, Homo sapiens
gtatgtctgttagcc

SEQ ID NO: 1127135 - DNA, 15 bp, Homo sapiens
ggtatgtctgttagc

SEQ ID NO: 1127136 - DNA, 15 bp, Homo sapiens
gggtatgtctgttag

SEQ ID NO: 1127137 - DNA, 15 bp, Homo sapiens
agggtatgtctgtta

SEQ ID NO: 1127138 - DNA, 15 bp, Homo sapiens
tagggtatgtctgtt

SEQ ID NO: 1127139 - DNA, 15 bp, Homo sapiens
ctagggtatgtctgt

SEQ ID NO: 1127140 - DNA, 15 bp, Homo sapiens
cctagggtatgtctg

SEQ ID NO: 1127141 - DNA, 15 bp, Homo sapiens
acctagggtatgtct

SEQ ID NO: 1127142 - DNA, 15 bp, Homo sapiens
gacctagggtatgtc

SEQ ID NO: 1127143 - DNA, 15 bp, Homo sapiens
tgacctagggtatgt

SEQ ID NO: 1127144 - DNA, 15 bp, Homo sapiens
atgacctagggtatg

SEQ ID NO: 1127145 - DNA, 15 bp, Homo sapiens
tatgacctagggtat

SEQ ID NO: 1127146 - DNA, 15 bp, Homo sapiens
gtatgacctagggta

SEQ ID NO: 1127147 - DNA, 15 bp, Homo sapiens
tgtatgacctagggt

SEQ ID NO: 1127148 - DNA, 15 bp, Homo sapiens
ctgtatgacctaggg

SEQ ID NO: 1127149 - DNA, 15 bp, Homo sapiens
actgtatgacctagg

SEQ ID NO: 1127150 - DNA, 15 bp, Homo sapiens
aactgtatgacctag

SEQ ID NO: 1127151 - DNA, 15 bp, Homo sapiens
taactgtatgaccta

SEQ ID NO: 1127152 - DNA, 15 bp, Homo sapiens
ataactgtatgacct

SEQ ID NO: 1127153 - DNA, 15 bp, Homo sapiens
aataactgtatgacc

SEQ ID NO: 1127154 - DNA, 15 bp, Homo sapiens
taataactgtatgac

SEQ ID NO: 1127155 - DNA, 15 bp, Homo sapiens
ttaataactgtatga

SEQ ID NO: 1127156 - DNA, 15 bp, Homo sapiens
cttaataactgtatg

SEQ ID NO: 1127157 - DNA, 15 bp, Homo sapiens
tcttaataactgtat

SEQ ID NO: 1127158 - DNA, 15 bp, Homo sapiens
ctcttaataactgta

SEQ ID NO: 1127159 - DNA, 15 bp, Homo sapiens
tctcttaataactgt

SEQ ID NO: 1127160 - DNA, 15 bp, Homo sapiens
ttctcttaataactg

SEQ ID NO: 1127161 - DNA, 15 bp, Homo sapiens
cttctcttaataact

SEQ ID NO: 1127162 - DNA, 15 bp, Homo sapiens
ccttctcttaataac

SEQ ID NO: 1127163 - DNA, 15 bp, Homo sapiens
tccttctcttaataa

SEQ ID NO: 1127164 - DNA, 15 bp, Homo sapiens
ctccttctcttaata

SEQ ID NO: 1127165 - DNA, 15 bp, Homo sapiens
gctccttctcttaat

SEQ ID NO: 1127166 - DNA, 15 bp, Homo sapiens
agctccttctcttaa

SEQ ID NO: 1127167 - DNA, 15 bp, Homo sapiens
gagctccttctctta

SEQ ID NO: 1127168 - DNA, 15 bp, Homo sapiens
agagctccttctctt

SEQ ID NO: 1127169 - DNA, 15 bp, Homo sapiens
cagagctccttctct

SEQ ID NO: 1127170 - DNA, 15 bp, Homo sapiens
acagagctccttctc

SEQ ID NO: 1127171 - DNA, 15 bp, Homo sapiens
gacagagctccttct

SEQ ID NO: 1127172 - DNA, 15 bp, Homo sapiens
agacagagctccttc

SEQ ID NO: 1127173 - DNA, 15 bp, Homo sapiens
gagacagagctcctt

SEQ ID NO: 1127174 - DNA, 15 bp, Homo sapiens
cgagacagagctcct

SEQ ID NO: 1127175 - DNA, 15 bp, Homo sapiens
tcgagacagagctcc

SEQ ID NO: 1127176 - DNA, 15 bp, Homo sapiens
ttcgagacagagctc

SEQ ID NO: 1127177 - DNA, 15 bp, Homo sapiens
gttcgagacagagct

SEQ ID NO: 1127178 - DNA, 15 bp, Homo sapiens
ggttcgagacagagc

SEQ ID NO: 1127179 - DNA, 15 bp, Homo sapiens
aggttcgagacagag

SEQ ID NO: 1127180 - DNA, 15 bp, Homo sapiens
taggttcgagacaga

SEQ ID NO: 1127181 - DNA, 15 bp, Homo sapiens
ctaggttcgagacag

SEQ ID NO: 1127182 - DNA, 15 bp, Homo sapiens
gctaggttcgagaca

SEQ ID NO: 1127183 - DNA, 15 bp, Homo sapiens
agctaggttcgagac

SEQ ID NO: 1127184 - DNA, 15 bp, Homo sapiens
gagctaggttcgaga

SEQ ID NO: 1127185 - DNA, 15 bp, Homo sapiens
agagctaggttcgag

SEQ ID NO: 1127186 - DNA, 15 bp, Homo sapiens
gagagctaggttcga

SEQ ID NO: 1127187 - DNA, 15 bp, Homo sapiens
agagagctaggttcg

SEQ ID NO: 1127188 - DNA, 15 bp, Homo sapiens
gagagagctaggttc

SEQ ID NO: 1127189 - DNA, 15 bp, Homo sapiens
agagagagctaggtt

SEQ ID NO: 1127190 - DNA, 15 bp, Homo sapiens
gagagagagctaggt

SEQ ID NO: 1127191 - DNA, 15 bp, Homo sapiens
agagagagagctagg

SEQ ID NO: 1127192 - DNA, 15 bp, Homo sapiens
gagagagagagctag

SEQ ID NO: 1127193 - DNA, 15 bp, Homo sapiens
agagagagagagcta

SEQ ID NO: 1127194 - DNA, 15 bp, Homo sapiens
gagagagagagagct

SEQ ID NO: 1127195 - DNA, 15 bp, Homo sapiens
cgagagagagagagc

SEQ ID NO: 1127196 - DNA, 15 bp, Homo sapiens
tcgagagagagagag

SEQ ID NO: 1127197 - DNA, 15 bp, Homo sapiens
ctcgagagagagaga

SEQ ID NO: 1127198 - DNA, 15 bp, Homo sapiens
actcgagagagagag

SEQ ID NO: 1127199 - DNA, 15 bp, Homo sapiens
tactcgagagagaga

SEQ ID NO: 1127200 - DNA, 15 bp, Homo sapiens
ttactcgagagagag

SEQ ID NO: 1127201 - DNA, 15 bp, Homo sapiens
attactcgagagaga

SEQ ID NO: 1127202 - DNA, 15 bp, Homo sapiens
tattactcgagagag

SEQ ID NO: 1127203 - DNA, 15 bp, Homo sapiens
gtattactcgagaga

SEQ ID NO: 1127204 - DNA, 15 bp, Homo sapiens
ggtattactcgagag

SEQ ID NO: 1127205 - DNA, 15 bp, Homo sapiens
tggtattactcgaga

SEQ ID NO: 1127206 - DNA, 15 bp, Homo sapiens
ctggtattactcgag

SEQ ID NO: 1127207 - DNA, 15 bp, Homo sapiens
actggtattactcga

SEQ ID NO: 1127208 - DNA, 15 bp, Homo sapiens
aactggtattactcg

SEQ ID NO: 1127209 - DNA, 15 bp, Homo sapiens
taactggtattactc

SEQ ID NO: 1127210 - DNA, 15 bp, Homo sapiens
ttaactggtattact

SEQ ID NO: 1127211 - DNA, 15 bp, Homo sapiens
tttaactggtattac

SEQ ID NO: 1127212 - DNA, 15 bp, Homo sapiens
ttttaactggtatta

SEQ ID NO: 1127213 - DNA, 15 bp, Homo sapiens
tttttaactggtatt

SEQ ID NO: 1127214 - DNA, 15 bp, Homo sapiens
ttttttaactggtat

SEQ ID NO: 1127215 - DNA, 15 bp, Homo sapiens
attttttaactggta

SEQ ID NO: 1127216 - DNA, 15 bp, Homo sapiens
tattttttaactggt

SEQ ID NO: 1127217 - DNA, 15 bp, Homo sapiens
ctattttttaactgg

SEQ ID NO: 1127218 - DNA, 15 bp, Homo sapiens
cctattttttaactg

SEQ ID NO: 1127219 - DNA, 15 bp, Homo sapiens
gcctattttttaact

SEQ ID NO: 1127220 - DNA, 15 bp, Homo sapiens
agcctattttttaac

SEQ ID NO: 1127221 - DNA, 15 bp, Homo sapiens
tagcctattttttaa

SEQ ID NO: 1127222 - DNA, 15 bp, Homo sapiens
gtagcctatttttta

SEQ ID NO: 1127223 - DNA, 15 bp, Homo sapiens
tgtagcctatttttt

SEQ ID NO: 1127224 - DNA, 15 bp, Homo sapiens
ttgtagcctattttt

SEQ ID NO: 1127225 - DNA, 15 bp, Homo sapiens
tttgtagcctatttt

SEQ ID NO: 1127226 - DNA, 15 bp, Homo sapiens
atttgtagcctattt

SEQ ID NO: 1127227 - DNA, 15 bp, Homo sapiens
tatttgtagcctatt

SEQ ID NO: 1127228 - DNA, 15 bp, Homo sapiens
ctatttgtagcctat

SEQ ID NO: 1127229 - DNA, 15 bp, Homo sapiens
cctatttgtagccta

SEQ ID NO: 1127230 - DNA, 15 bp, Homo sapiens
acctatttgtagcct

SEQ ID NO: 1127231 - DNA, 15 bp, Homo sapiens
tacctatttgtagcc

SEQ ID NO: 1127232 - DNA, 15 bp, Homo sapiens
gtacctatttgtagc

SEQ ID NO: 1127233 - DNA, 15 bp, Homo sapiens
agtacctatttgtag

SEQ ID NO: 1127234 - DNA, 15 bp, Homo sapiens
gagtacctatttgta

SEQ ID NO: 1127235 - DNA, 15 bp, Homo sapiens
tgagtacctatttgt

SEQ ID NO: 1127236 - DNA, 15 bp, Homo sapiens
ttgagtacctatttg

SEQ ID NO: 1127237 - DNA, 15 bp, Homo sapiens
tttgagtacctattt

SEQ ID NO: 1127238 - DNA, 15 bp, Homo sapiens
ttttgagtacctatt

SEQ ID NO: 1127239 - DNA, 15 bp, Homo sapiens
tttttgagtacctat

SEQ ID NO: 1127240 - DNA, 15 bp, Homo sapiens
ttttttgagtaccta

SEQ ID NO: 1127241 - DNA, 15 bp, Homo sapiens
tttttttgagtacct

SEQ ID NO: 1127242 - DNA, 15 bp, Homo sapiens
atttttttgagtacc

SEQ ID NO: 1127243 - DNA, 15 bp, Homo sapiens
catttttttgagtac

SEQ ID NO: 1127244 - DNA, 15 bp, Homo sapiens
ccatttttttgagta

SEQ ID NO: 1127245 - DNA, 15 bp, Homo sapiens
accatttttttgagt

SEQ ID NO: 1127246 - DNA, 15 bp, Homo sapiens
taccatttttttgag

SEQ ID NO: 1127247 - DNA, 15 bp, Homo sapiens
ctaccatttttttga

SEQ ID NO: 1127248 - DNA, 15 bp, Homo sapiens
actaccatttttttg

SEQ ID NO: 1127249 - DNA, 15 bp, Homo sapiens
cactaccattttttt

SEQ ID NO: 1127250 - DNA, 15 bp, Homo sapiens
ccactaccatttttt

SEQ ID NO: 1127251 - DNA, 15 bp, Homo sapiens
gccactaccattttt

SEQ ID NO: 1127252 - DNA, 15 bp, Homo sapiens
agccactaccatttt

SEQ ID NO: 1127253 - DNA, 15 bp, Homo sapiens
cagccactaccattt

SEQ ID NO: 1127254 - DNA, 15 bp, Homo sapiens
acagccactaccatt

SEQ ID NO: 1127255 - DNA, 15 bp, Homo sapiens
aacagccactaccat

SEQ ID NO: 1127256 - DNA, 15 bp, Homo sapiens
caacagccactacca

SEQ ID NO: 1127257 - DNA, 15 bp, Homo sapiens
acaacagccactacc

SEQ ID NO: 1127258 - DNA, 15 bp, Homo sapiens
aacaacagccactac

SEQ ID NO: 1127259 - DNA, 15 bp, Homo sapiens
aaacaacagccacta

SEQ ID NO: 1127260 - DNA, 15 bp, Homo sapiens
aaaacaacagccact

SEQ ID NO: 1127261 - DNA, 15 bp, Homo sapiens
aaaaacaacagccac

SEQ ID NO: 1127262 - DNA, 15 bp, Homo sapiens
taaaaacaacagcca

SEQ ID NO: 1127263 - DNA, 15 bp, Homo sapiens
ataaaaacaacagcc

SEQ ID NO: 1127264 - DNA, 15 bp, Homo sapiens
aataaaaacaacagc

SEQ ID NO: 1127265 - DNA, 15 bp, Homo sapiens
gaataaaaacaacag

SEQ ID NO: 1127266 - DNA, 15 bp, Homo sapiens
tgaataaaaacaaca

SEQ ID NO: 1127267 - DNA, 15 bp, Homo sapiens
ctgaataaaaacaac

SEQ ID NO: 1127268 - DNA, 15 bp, Homo sapiens
actgaataaaaacaa

SEQ ID NO: 1127269 - DNA, 15 bp, Homo sapiens
aactgaataaaaaca

SEQ ID NO: 1127270 - DNA, 15 bp, Homo sapiens
caactgaataaaaac

SEQ ID NO: 1127271 - DNA, 15 bp, Homo sapiens
gcaactgaataaaaa

SEQ ID NO: 1127272 - DNA, 15 bp, Homo sapiens
agcaactgaataaaa

SEQ ID NO: 1127273 - DNA, 15 bp, Homo sapiens
cagcaactgaataaa

SEQ ID NO: 1127274 - DNA, 15 bp, Homo sapiens
tcagcaactgaataa

SEQ ID NO: 1127275 - DNA, 15 bp, Homo sapiens
ctcagcaactgaata

SEQ ID NO: 1127276 - DNA, 15 bp, Homo sapiens
cctcagcaactgaat

SEQ ID NO: 1127277 - DNA, 15 bp, Homo sapiens
tcctcagcaactgaa

SEQ ID NO: 1127278 - DNA, 15 bp, Homo sapiens
ttcctcagcaactga

SEQ ID NO: 1127279 - DNA, 15 bp, Homo sapiens
tttcctcagcaactg

SEQ ID NO: 1127280 - DNA, 15 bp, Homo sapiens
ttttcctcagcaact

SEQ ID NO: 1127281 - DNA, 15 bp, Homo sapiens
tttttcctcagcaac

SEQ ID NO: 1127282 - DNA, 15 bp, Homo sapiens
ttttttcctcagcaa

SEQ ID NO: 1127283 - DNA, 15 bp, Homo sapiens
attttttcctcagca

SEQ ID NO: 1127284 - DNA, 15 bp, Homo sapiens
cattttttcctcagc

SEQ ID NO: 1127285 - DNA, 15 bp, Homo sapiens
acattttttcctcag

SEQ ID NO: 1127286 - DNA, 15 bp, Homo sapiens
aacattttttcctca

SEQ ID NO: 1127287 - DNA, 15 bp, Homo sapiens
caacattttttcctc

SEQ ID NO: 1127288 - DNA, 15 bp, Homo sapiens
tcaacattttttcct

SEQ ID NO: 1127289 - DNA, 15 bp, Homo sapiens
atcaacattttttcc

SEQ ID NO: 1127290 - DNA, 15 bp, Homo sapiens
aatcaacattttttc

SEQ ID NO: 1127291 - DNA, 15 bp, Homo sapiens
aaatcaacatttttt

SEQ ID NO: 1127292 - DNA, 15 bp, Homo sapiens
aaaatcaacattttt

SEQ ID NO: 1127293 - DNA, 15 bp, Homo sapiens
aaaaatcaacatttt

SEQ ID NO: 1127294 - DNA, 15 bp, Homo sapiens
gaaaaatcaacattt

SEQ ID NO: 1127295 - DNA, 15 bp, Homo sapiens
tgaaaaatcaacatt

SEQ ID NO: 1127296 - DNA, 15 bp, Homo sapiens
atgaaaaatcaacat

SEQ ID NO: 1127297 - DNA, 15 bp, Homo sapiens
gatgaaaaatcaaca

SEQ ID NO: 1127298 - DNA, 15 bp, Homo sapiens
agatgaaaaatcaac

SEQ ID NO: 1127299 - DNA, 15 bp, Homo sapiens
gagatgaaaaatcaa

SEQ ID NO: 1127300 - DNA, 15 bp, Homo sapiens
agagatgaaaaatca

SEQ ID NO: 1127301 - DNA, 15 bp, Homo sapiens
tagagatgaaaaatc

SEQ ID NO: 1127302 - DNA, 15 bp, Homo sapiens
ttagagatgaaaaat

SEQ ID NO: 1127303 - DNA, 15 bp, Homo sapiens
gtttagagatgaaaa

SEQ ID NO: 1127304 - DNA, 15 bp, Homo sapiens
tgtttagagatgaaa

SEQ ID NO: 1127305 - DNA, 15 bp, Homo sapiens
atgtttagagatgaa

SEQ ID NO: 1127306 - DNA, 15 bp, Homo sapiens
gatgtttagagatga

SEQ ID NO: 1127307 - DNA, 15 bp, Homo sapiens
tgatgtttagagatg

SEQ ID NO: 1127308 - DNA, 15 bp, Homo sapiens
ttgatgtttagagat

SEQ ID NO: 1127309 - DNA, 15 bp, Homo sapiens
gttgatgtttagaga

SEQ ID NO: 1127310 - DNA, 15 bp, Homo sapiens
agttgatgtttagag

SEQ ID NO: 1127311 - DNA, 15 bp, Homo sapiens
aagttgatgtttaga

SEQ ID NO: 1127312 - DNA, 15 bp, Homo sapiens
taagttgatgtttag

SEQ ID NO: 1127313 - DNA, 15 bp, Homo sapiens
gtaagttgatgttta

SEQ ID NO: 1127314 - DNA, 15 bp, Homo sapiens
agtaagttgatgttt

SEQ ID NO: 1127315 - DNA, 15 bp, Homo sapiens
aagtaagttgatgtt

SEQ ID NO: 1127316 - DNA, 15 bp, Homo sapiens
taagtaagttgatgt

SEQ ID NO: 1127317 - DNA, 15 bp, Homo sapiens
ttaagtaagttgatg

SEQ ID NO: 1127318 - DNA, 15 bp, Homo sapiens
attaagtaagttgat

SEQ ID NO: 1127319 - DNA, 15 bp, Homo sapiens
aattaagtaagttga

SEQ ID NO: 1127320 - DNA, 15 bp, Homo sapiens
gaattaagtaagttg

SEQ ID NO: 1127321 - DNA, 15 bp, Homo sapiens
agaattaagtaagtt

SEQ ID NO: 1127322 - DNA, 15 bp, Homo sapiens
cagaattaagtaagt

SEQ ID NO: 1127323 - DNA, 15 bp, Homo sapiens
gcagaattaagtaag

SEQ ID NO: 1127324 - DNA, 15 bp, Homo sapiens
ggcagaattaagtaa

SEQ ID NO: 1127325 - DNA, 15 bp, Homo sapiens
tggcagaattaagta

SEQ ID NO: 1127326 - DNA, 15 bp, Homo sapiens
ttggcagaattaagt

SEQ ID NO: 1127327 - DNA, 15 bp, Homo sapiens
attggcagaattaag

SEQ ID NO: 1127328 - DNA, 15 bp, Homo sapiens
aattggcagaattaa

SEQ ID NO: 1127329 - DNA, 15 bp, Homo sapiens
aaattggcagaatta

SEQ ID NO: 1127330 - DNA, 15 bp, Homo sapiens
gaaattggcagaatt

SEQ ID NO: 1127331 - DNA, 15 bp, Homo sapiens
agaaattggcagaat

SEQ ID NO: 1127332 - DNA, 15 bp, Homo sapiens
aagaaattggcagaa

SEQ ID NO: 1127333 - DNA, 15 bp, Homo sapiens
aaagaaattggcaga

SEQ ID NO: 1127334 - DNA, 15 bp, Homo sapiens
aaaagaaattggcag

SEQ ID NO: 1127335 - DNA, 15 bp, Homo sapiens
aaaaagaaattggca

SEQ ID NO: 1127336 - DNA, 15 bp, Homo sapiens
aaaaaagaaattggc

SEQ ID NO: 1127337 - DNA, 15 bp, Homo sapiens
aaaaaaagaaattgg

SEQ ID NO: 1127338 - DNA, 15 bp, Homo sapiens
aaaaaaaagaaattg

SEQ ID NO: 1127339 - DNA, 15 bp, Homo sapiens
caaaaaaaagaaatt

SEQ ID NO: 1127340 - DNA, 15 bp, Homo sapiens
tcaaaaaaaagaaat

SEQ ID NO: 1127341 - DNA, 15 bp, Homo sapiens
gtctcaaaaaaaaga

SEQ ID NO: 1127342 - DNA, 15 bp, Homo sapiens
tcctaggtgacagag

SEQ ID NO: 1127343 - DNA, 15 bp, Homo sapiens
atcctaggtgacaga

SEQ ID NO: 1127344 - DNA, 15 bp, Homo sapiens
catcctaggtgacag

SEQ ID NO: 1127345 - DNA, 15 bp, Homo sapiens
ccatcctaggtgaca

SEQ ID NO: 1127346 - DNA, 15 bp, Homo sapiens
tccatcctaggtgac

SEQ ID NO: 1127347 - DNA, 15 bp, Homo sapiens
ctccatcctaggtga

SEQ ID NO: 1127348 - DNA, 15 bp, Homo sapiens
actccatcctaggtg

SEQ ID NO: 1127349 - DNA, 15 bp, Homo sapiens
cactccatcctaggt

SEQ ID NO: 1127350 - DNA, 15 bp, Homo sapiens
gcactccatcctagg

SEQ ID NO: 1127351 - DNA, 15 bp, Homo sapiens
tgcactccatcctag

SEQ ID NO: 1127352 - DNA, 15 bp, Homo sapiens
ctgcactccatccta

SEQ ID NO: 1127353 - DNA, 15 bp, Homo sapiens
agtgattgtgccact

SEQ ID NO: 1127354 - DNA, 15 bp, Homo sapiens
cagtgattgtgccac

SEQ ID NO: 1127355 - DNA, 15 bp, Homo sapiens
gcagtgattgtgcca

SEQ ID NO: 1127356 - DNA, 15 bp, Homo sapiens
agcagtgattgtgcc

SEQ ID NO: 1127357 - DNA, 15 bp, Homo sapiens
gagcagtgattgtgc

SEQ ID NO: 1127358 - DNA, 15 bp, Homo sapiens
tgagcagtgattgtg

SEQ ID NO: 1127359 - DNA, 15 bp, Homo sapiens
gtgagcagtgattgt

SEQ ID NO: 1127360 - DNA, 15 bp, Homo sapiens
agtgagcagtgattg

SEQ ID NO: 1127361 - DNA, 15 bp, Homo sapiens
cagtgagcagtgatt

SEQ ID NO: 1127362 - DNA, 15 bp, Homo sapiens
gcagtgagcagtgat

SEQ ID NO: 1127363 - DNA, 15 bp, Homo sapiens
tgcagtgagcagtga

SEQ ID NO: 1127364 - DNA, 15 bp, Homo sapiens
ctgcagtgagcagtg

SEQ ID NO: 1127365 - DNA, 15 bp, Homo sapiens
gctgcagtgagcagt

SEQ ID NO: 1127366 - DNA, 15 bp, Homo sapiens
ggctgcagtgagcag

SEQ ID NO: 1127367 - DNA, 15 bp, Homo sapiens
aggctgcagtgagca

SEQ ID NO: 1127368 - DNA, 15 bp, Homo sapiens
agtcgaggctgcagt

SEQ ID NO: 1127369 - DNA, 15 bp, Homo sapiens
aagtcgaggctgcag

SEQ ID NO: 1127370 - DNA, 15 bp, Homo sapiens
gaagtcgaggctgca

SEQ ID NO: 1127371 - DNA, 15 bp, Homo sapiens
ggaagtcgaggctgc

SEQ ID NO: 1127372 - DNA, 15 bp, Homo sapiens
gggaagtcgaggctg

SEQ ID NO: 1127373 - DNA, 15 bp, Homo sapiens
cgggaagtcgaggct

SEQ ID NO: 1127374 - DNA, 15 bp, Homo sapiens
ccgggaagtcgaggc

SEQ ID NO: 1127375 - DNA, 15 bp, Homo sapiens
cccgggaagtcgagg

SEQ ID NO: 1127376 - DNA, 15 bp, Homo sapiens
gcccgggaagtcgag

SEQ ID NO: 1127377 - DNA, 15 bp, Homo sapiens
agcccgggaagtcga

SEQ ID NO: 1127378 - DNA, 15 bp, Homo sapiens
gagcccgggaagtcg

SEQ ID NO: 1127379 - DNA, 15 bp, Homo sapiens
cgagcccgggaagtc

SEQ ID NO: 1127380 - DNA, 15 bp, Homo sapiens
ccgagcccgggaagt

SEQ ID NO: 1127381 - DNA, 15 bp, Homo sapiens
cccgagcccgggaag

SEQ ID NO: 1127382 - DNA, 15 bp, Homo sapiens
acccgagcccgggaa

SEQ ID NO: 1127383 - DNA, 15 bp, Homo sapiens
cacccgagcccggga

SEQ ID NO: 1127384 - DNA, 15 bp, Homo sapiens
tcacccgagcccggg

SEQ ID NO: 1127385 - DNA, 15 bp, Homo sapiens
atcacccgagcccgg

SEQ ID NO: 1127386 - DNA, 15 bp, Homo sapiens
aatcacccgagcccg

SEQ ID NO: 1127387 - DNA, 15 bp, Homo sapiens
gaatcacccgagccc

SEQ ID NO: 1127388 - DNA, 15 bp, Homo sapiens
agaatcacccgagcc

SEQ ID NO: 1127389 - DNA, 15 bp, Homo sapiens
gagaatcacccgagc

SEQ ID NO: 1127390 - DNA, 15 bp, Homo sapiens
ggagaatcacccgag

SEQ ID NO: 1127391 - DNA, 15 bp, Homo sapiens
gggagaatcacccga

SEQ ID NO: 1127392 - DNA, 15 bp, Homo sapiens
ggggagaatcacccg

SEQ ID NO: 1127393 - DNA, 15 bp, Homo sapiens
tggggagaatcaccc

SEQ ID NO: 1127394 - DNA, 15 bp, Homo sapiens
ctggggagaatcacc

SEQ ID NO: 1127395 - DNA, 15 bp, Homo sapiens
cctggggagaatcac

SEQ ID NO: 1127396 - DNA, 15 bp, Homo sapiens
gcctggggagaatca

SEQ ID NO: 1127397 - DNA, 15 bp, Homo sapiens
agcctggggagaatc

SEQ ID NO: 1127398 - DNA, 15 bp, Homo sapiens
gagcctggggagaat

SEQ ID NO: 1127399 - DNA, 15 bp, Homo sapiens
tgagcctggggagaa

SEQ ID NO: 1127400 - DNA, 15 bp, Homo sapiens
ctgagcctggggaga

SEQ ID NO: 1127401 - DNA, 15 bp, Homo sapiens
cctgagcctggggag

SEQ ID NO: 1127402 - DNA, 15 bp, Homo sapiens
ccctgagcctgggga

SEQ ID NO: 1127403 - DNA, 15 bp, Homo sapiens
cccctgagcctgggg

SEQ ID NO: 1127404 - DNA, 15 bp, Homo sapiens
tcccctgagcctggg

SEQ ID NO: 1127405 - DNA, 15 bp, Homo sapiens
atcccctgagcctgg

SEQ ID NO: 1127406 - DNA, 15 bp, Homo sapiens
aatcccctgagcctg

SEQ ID NO: 1127407 - DNA, 15 bp, Homo sapiens
gaatcccctgagcct

SEQ ID NO: 1127408 - DNA, 15 bp, Homo sapiens
agaatcccctgagcc

SEQ ID NO: 1127409 - DNA, 15 bp, Homo sapiens
gagaatcccctgagc

SEQ ID NO: 1127410 - DNA, 15 bp, Homo sapiens
ggagaatcccctgag

SEQ ID NO: 1127411 - DNA, 15 bp, Homo sapiens
gggagaatcccctga

SEQ ID NO: 1127412 - DNA, 15 bp, Homo sapiens
tgggagaatcccctg

SEQ ID NO: 1127413 - DNA, 15 bp, Homo sapiens
gtgggagaatcccct

SEQ ID NO: 1127414 - DNA, 15 bp, Homo sapiens
agtgggagaatcccc

SEQ ID NO: 1127415 - DNA, 15 bp, Homo sapiens
aagtgggagaatccc

SEQ ID NO: 1127416 - DNA, 15 bp, Homo sapiens
gaagtgggagaatcc

SEQ ID NO: 1127417 - DNA, 15 bp, Homo sapiens
tgcgcacctgtagtc

SEQ ID NO: 1127418 - DNA, 15 bp, Homo sapiens
gtgcgcacctgtagt

SEQ ID NO: 1127419 - DNA, 15 bp, Homo sapiens
ggtgcgcacctgtag

SEQ ID NO: 1127420 - DNA, 15 bp, Homo sapiens
tggtgcgcacctgta

SEQ ID NO: 1127421 - DNA, 15 bp, Homo sapiens
gtggtgcgcacctgt

SEQ ID NO: 1127422 - DNA, 15 bp, Homo sapiens
ggtggtgcgcacctg

SEQ ID NO: 1127423 - DNA, 15 bp, Homo sapiens
tggtggtgcgcacct

SEQ ID NO: 1127424 - DNA, 15 bp, Homo sapiens
atggtggtgcgcacc

SEQ ID NO: 1127425 - DNA, 15 bp, Homo sapiens
gatggtggtgcgcac

SEQ ID NO: 1127426 - DNA, 15 bp, Homo sapiens
ggatggtggtgcgca

SEQ ID NO: 1127427 - DNA, 15 bp, Homo sapiens
gggatggtggtgcgc

SEQ ID NO: 1127428 - DNA, 15 bp, Homo sapiens
agggatggtggtgcg

SEQ ID NO: 1127429 - DNA, 15 bp, Homo sapiens
cagggatggtggtgc

SEQ ID NO: 1127430 - DNA, 15 bp, Homo sapiens
ccagggatggtggtg

SEQ ID NO: 1127431 - DNA, 15 bp, Homo sapiens
gccagggatggtggt

SEQ ID NO: 1127432 - DNA, 15 bp, Homo sapiens
agccagggatggtgg

SEQ ID NO: 1127433 - DNA, 15 bp, Homo sapiens
tagccagggatggtg

SEQ ID NO: 1127434 - DNA, 15 bp, Homo sapiens
ttagccagggatggt

SEQ ID NO: 1127435 - DNA, 15 bp, Homo sapiens
attagccagggatgg

SEQ ID NO: 1127436 - DNA, 15 bp, Homo sapiens
tattagccagggatg

SEQ ID NO: 1127437 - DNA, 15 bp, Homo sapiens
atattagccagggat

SEQ ID NO: 1127438 - DNA, 15 bp, Homo sapiens
aatattagccaggga

SEQ ID NO: 1127439 - DNA, 15 bp, Homo sapiens
aaatattagccaggg

SEQ ID NO: 1127440 - DNA, 15 bp, Homo sapiens
gtacaaatattagcc

SEQ ID NO: 1127441 - DNA, 15 bp, Homo sapiens
agtacaaatattagc

SEQ ID NO: 1127442 - DNA, 15 bp, Homo sapiens
aagtacaaatattag

SEQ ID NO: 1127443 - DNA, 15 bp, Homo sapiens
aaagtacaaatatta

SEQ ID NO: 1127444 - DNA, 15 bp, Homo sapiens
taaagtacaaatatt

SEQ ID NO: 1127445 - DNA, 15 bp, Homo sapiens
ataaagtacaaatat

SEQ ID NO: 1127446 - DNA, 15 bp, Homo sapiens
aataaagtacaaata

SEQ ID NO: 1127447 - DNA, 15 bp, Homo sapiens
aaataaagtacaaat

SEQ ID NO: 1127448 - DNA, 15 bp, Homo sapiens
aaaataaagtacaaa

SEQ ID NO: 1127449 - DNA, 15 bp, Homo sapiens
taaaataaagtacaa

SEQ ID NO: 1127450 - DNA, 15 bp, Homo sapiens
ataaaataaagtaca

SEQ ID NO: 1127451 - DNA, 15 bp, Homo sapiens
aataaaataaagtac

SEQ ID NO: 1127452 - DNA, 15 bp, Homo sapiens
aaataaaataaagta

SEQ ID NO: 1127453 - DNA, 15 bp, Homo sapiens
taaataaaataaagt

SEQ ID NO: 1127454 - DNA, 15 bp, Homo sapiens
ataaataaaataaag

SEQ ID NO: 1127455 - DNA, 15 bp, Homo sapiens
cgggcaacaagagcg

SEQ ID NO: 1127456 - DNA, 15 bp, Homo sapiens
ccgggcaacaagagc

SEQ ID NO: 1127457 - DNA, 15 bp, Homo sapiens
cccgggcaacaagag

SEQ ID NO: 1127458 - DNA, 15 bp, Homo sapiens
gcccgggcaacaaga

SEQ ID NO: 1127459 - DNA, 15 bp, Homo sapiens
agcccgggcaacaag

SEQ ID NO: 1127460 - DNA, 15 bp, Homo sapiens
cagcccgggcaacaa

SEQ ID NO: 1127461 - DNA, 15 bp, Homo sapiens
ccagcccgggcaaca

SEQ ID NO: 1127462 - DNA, 15 bp, Homo sapiens
tccagcccgggcaac

SEQ ID NO: 1127463 - DNA, 15 bp, Homo sapiens
ctccagcccgggcaa

SEQ ID NO: 1127464 - DNA, 15 bp, Homo sapiens
actccagcccgggca

SEQ ID NO: 1127465 - DNA, 15 bp, Homo sapiens
tactccagcccgggc

SEQ ID NO: 1127466 - DNA, 15 bp, Homo sapiens
gtactccagcccggg

SEQ ID NO: 1127467 - DNA, 15 bp, Homo sapiens
tgtactccagcccgg

SEQ ID NO: 1127468 - DNA, 15 bp, Homo sapiens
ctgtactccagcccg

SEQ ID NO: 1127469 - DNA, 15 bp, Homo sapiens
actgtactccagccc

SEQ ID NO: 1127470 - DNA, 15 bp, Homo sapiens
atgccactgtactcc

SEQ ID NO: 1127471 - DNA, 15 bp, Homo sapiens
catgccactgtactc

SEQ ID NO: 1127472 - DNA, 15 bp, Homo sapiens
tcatgccactgtact

SEQ ID NO: 1127473 - DNA, 15 bp, Homo sapiens
atcatgccactgtac

SEQ ID NO: 1127474 - DNA, 15 bp, Homo sapiens
gatcatgccactgta

SEQ ID NO: 1127475 - DNA, 15 bp, Homo sapiens
agatcatgccactgt

SEQ ID NO: 1127476 - DNA, 15 bp, Homo sapiens
ctgagccgagatcat

SEQ ID NO: 1127477 - DNA, 15 bp, Homo sapiens
actgagccgagatca

SEQ ID NO: 1127478 - DNA, 15 bp, Homo sapiens
agaggttgcactgag

SEQ ID NO: 1127479 - DNA, 15 bp, Homo sapiens
cagaggttgcactga

SEQ ID NO: 1127480 - DNA, 15 bp, Homo sapiens
gcagaggttgcactg

SEQ ID NO: 1127481 - DNA, 15 bp, Homo sapiens
ggcagaggttgcact

SEQ ID NO: 1127482 - DNA, 15 bp, Homo sapiens
aggcagaggttgcac

SEQ ID NO: 1127483 - DNA, 15 bp, Homo sapiens
taggagaatcgcttg

SEQ ID NO: 1127484 - DNA, 15 bp, Homo sapiens
aggtaggagaatcgc

SEQ ID NO: 1127485 - DNA, 15 bp, Homo sapiens
gaggtaggagaatcg

SEQ ID NO: 1127486 - DNA, 15 bp, Homo sapiens
tgaggtaggagaatc

SEQ ID NO: 1127487 - DNA, 15 bp, Homo sapiens
atgaggtaggagaat

SEQ ID NO: 1127488 - DNA, 15 bp, Homo sapiens
gatgaggtaggagaa

SEQ ID NO: 1127489 - DNA, 15 bp, Homo sapiens
ggatgaggtaggaga

SEQ ID NO: 1127490 - DNA, 15 bp, Homo sapiens
gggatgaggtaggag

SEQ ID NO: 1127491 - DNA, 15 bp, Homo sapiens
ggggatgaggtagga

SEQ ID NO: 1127492 - DNA, 15 bp, Homo sapiens
gggggatgaggtagg

SEQ ID NO: 1127493 - DNA, 15 bp, Homo sapiens
agggggatgaggtag

SEQ ID NO: 1127494 - DNA, 15 bp, Homo sapiens
cagggggatgaggta

SEQ ID NO: 1127495 - DNA, 15 bp, Homo sapiens
tcagggggatgaggt

SEQ ID NO: 1127496 - DNA, 15 bp, Homo sapiens
ctcagggggatgagg

SEQ ID NO: 1127497 - DNA, 15 bp, Homo sapiens
actcagggggatgag

SEQ ID NO: 1127498 - DNA, 15 bp, Homo sapiens
tactcagggggatga

SEQ ID NO: 1127499 - DNA, 15 bp, Homo sapiens
ctactcagggggatg

SEQ ID NO: 1127500 - DNA, 15 bp, Homo sapiens
gctactcagggggat

SEQ ID NO: 1127501 - DNA, 15 bp, Homo sapiens
agctactcaggggga

SEQ ID NO: 1127502 - DNA, 15 bp, Homo sapiens
aggcgcctgtaatcc

SEQ ID NO: 1127503 - DNA, 15 bp, Homo sapiens
caggcgcctgtaatc

SEQ ID NO: 1127504 - DNA, 15 bp, Homo sapiens
gcaggcgcctgtaat

SEQ ID NO: 1127505 - DNA, 15 bp, Homo sapiens
ggcaggcgcctgtaa

SEQ ID NO: 1127506 - DNA, 15 bp, Homo sapiens
tcgtctctattaaaa

SEQ ID NO: 1127507 - DNA, 15 bp, Homo sapiens
ctcgtctctattaaa

SEQ ID NO: 1127508 - DNA, 15 bp, Homo sapiens
cctcgtctctattaa

SEQ ID NO: 1127509 - DNA, 15 bp, Homo sapiens
acctcgtctctatta

SEQ ID NO: 1127510 - DNA, 15 bp, Homo sapiens
aacctcgtctctatt

SEQ ID NO: 1127511 - DNA, 15 bp, Homo sapiens
aaacctcgtctctat

SEQ ID NO: 1127512 - DNA, 15 bp, Homo sapiens
tgaaacctcgtctct

SEQ ID NO: 1127513 - DNA, 15 bp, Homo sapiens
gtgaaacctcgtctc

SEQ ID NO: 1127514 - DNA, 15 bp, Homo sapiens
ggtgaaacctcgtct

SEQ ID NO: 1127515 - DNA, 15 bp, Homo sapiens
tggtgaaacctcgtc

SEQ ID NO: 1127516 - DNA, 15 bp, Homo sapiens
atggtgaaacctcgt

SEQ ID NO: 1127517 - DNA, 15 bp, Homo sapiens
catggtgaaacctcg

SEQ ID NO: 1127518 - DNA, 15 bp, Homo sapiens
acatggtgaaacctc

SEQ ID NO: 1127519 - DNA, 15 bp, Homo sapiens
aacatggtgaaacct

SEQ ID NO: 1127520 - DNA, 15 bp, Homo sapiens
gtagcctggccaaca

SEQ ID NO: 1127521 - DNA, 15 bp, Homo sapiens
agtagcctggccaac

SEQ ID NO: 1127522 - DNA, 15 bp, Homo sapiens
gagtagcctggccaa

SEQ ID NO: 1127523 - DNA, 15 bp, Homo sapiens
agagtagcctggcca

SEQ ID NO: 1127524 - DNA, 15 bp, Homo sapiens
gagagtagcctggcc

SEQ ID NO: 1127525 - DNA, 15 bp, Homo sapiens
cgagagtagcctggc

SEQ ID NO: 1127526 - DNA, 15 bp, Homo sapiens
tcgagagtagcctgg

SEQ ID NO: 1127527 - DNA, 15 bp, Homo sapiens
ttcgagagtagcctg

SEQ ID NO: 1127528 - DNA, 15 bp, Homo sapiens
gttcgagagtagcct

SEQ ID NO: 1127529 - DNA, 15 bp, Homo sapiens
agttcgagagtagcc

SEQ ID NO: 1127530 - DNA, 15 bp, Homo sapiens
gagttcgagagtagc

SEQ ID NO: 1127531 - DNA, 15 bp, Homo sapiens
ggagttcgagagtag

SEQ ID NO: 1127532 - DNA, 15 bp, Homo sapiens
aggagttcgagagta

SEQ ID NO: 1127533 - DNA, 15 bp, Homo sapiens
caggagttcgagagt

SEQ ID NO: 1127534 - DNA, 15 bp, Homo sapiens
tcaggagttcgagag

SEQ ID NO: 1127535 - DNA, 15 bp, Homo sapiens
atcacctgagatcag

SEQ ID NO: 1127536 - DNA, 15 bp, Homo sapiens
gatcacctgagatca

SEQ ID NO: 1127537 - DNA, 15 bp, Homo sapiens
ggatcacctgagatc

SEQ ID NO: 1127538 - DNA, 15 bp, Homo sapiens
tggatcacctgagat

SEQ ID NO: 1127539 - DNA, 15 bp, Homo sapiens
taggccgggcgcagt

SEQ ID NO: 1127540 - DNA, 15 bp, Homo sapiens
ttaggccgggcgcag

SEQ ID NO: 1127541 - DNA, 15 bp, Homo sapiens
attaggccgggcgca

SEQ ID NO: 1127542 - DNA, 15 bp, Homo sapiens
tattaggccgggcgc

SEQ ID NO: 1127543 - DNA, 15 bp, Homo sapiens
atattaggccgggcg

SEQ ID NO: 1127544 - DNA, 15 bp, Homo sapiens
aatattaggccgggc

SEQ ID NO: 1127545 - DNA, 15 bp, Homo sapiens
aaatattaggccggg

SEQ ID NO: 1127546 - DNA, 15 bp, Homo sapiens
caaatattaggccgg

SEQ ID NO: 1127547 - DNA, 15 bp, Homo sapiens
acaaatattaggccg

SEQ ID NO: 1127548 - DNA, 15 bp, Homo sapiens
tacaaatattaggcc

SEQ ID NO: 1127549 - DNA, 15 bp, Homo sapiens
atacaaatattaggc

SEQ ID NO: 1127550 - DNA, 15 bp, Homo sapiens
aatacaaatattagg

SEQ ID NO: 1127551 - DNA, 15 bp, Homo sapiens
aaaaaatacaaatat

SEQ ID NO: 1127552 - DNA, 15 bp, Homo sapiens
caaaaaatacaaata

SEQ ID NO: 1127553 - DNA, 15 bp, Homo sapiens
acaaaaaatacaaat

SEQ ID NO: 1127554 - DNA, 15 bp, Homo sapiens
accatctctacaaaa

SEQ ID NO: 1127555 - DNA, 15 bp, Homo sapiens
caccatctctacaaa

SEQ ID NO: 1127556 - DNA, 15 bp, Homo sapiens
acaccatctctacaa

SEQ ID NO: 1127557 - DNA, 15 bp, Homo sapiens
aacaccatctctaca

SEQ ID NO: 1127558 - DNA, 15 bp, Homo sapiens
aaacaccatctctac

SEQ ID NO: 1127559 - DNA, 15 bp, Homo sapiens
aaaacaccatctcta

SEQ ID NO: 1127560 - DNA, 15 bp, Homo sapiens
caaaacaccatctct

SEQ ID NO: 1127561 - DNA, 15 bp, Homo sapiens
gcaaaacaccatctc

SEQ ID NO: 1127562 - DNA, 15 bp, Homo sapiens
ggcaaaacaccatct

SEQ ID NO: 1127563 - DNA, 15 bp, Homo sapiens
tggcaaaacaccatc

SEQ ID NO: 1127564 - DNA, 15 bp, Homo sapiens
atggcaaaacaccat

SEQ ID NO: 1127565 - DNA, 15 bp, Homo sapiens
catggcaaaacacca

SEQ ID NO: 1127566 - DNA, 15 bp, Homo sapiens
acatggcaaaacacc

SEQ ID NO: 1127567 - DNA, 15 bp, Homo sapiens
aacatggcaaaacac

SEQ ID NO: 1127568 - DNA, 15 bp, Homo sapiens
caacatggcaaaaca

SEQ ID NO: 1127569 - DNA, 15 bp, Homo sapiens
acaacatggcaaaac

SEQ ID NO: 1127570 - DNA, 15 bp, Homo sapiens
gacaacatggcaaaa

SEQ ID NO: 1127571 - DNA, 15 bp, Homo sapiens
ggacaacatggcaaa

SEQ ID NO: 1127572 - DNA, 15 bp, Homo sapiens
tggacaacatggcaa

SEQ ID NO: 1127573 - DNA, 15 bp, Homo sapiens
ctggacaacatggca

SEQ ID NO: 1127574 - DNA, 15 bp, Homo sapiens
cctggacaacatggc

SEQ ID NO: 1127575 - DNA, 15 bp, Homo sapiens
gcctggacaacatgg

SEQ ID NO: 1127576 - DNA, 15 bp, Homo sapiens
agcctggacaacatg

SEQ ID NO: 1127577 - DNA, 15 bp, Homo sapiens
cagcctggacaacat

SEQ ID NO: 1127578 - DNA, 15 bp, Homo sapiens
accagcctggacaac

SEQ ID NO: 1127579 - DNA, 15 bp, Homo sapiens
gaccagcctggacaa

SEQ ID NO: 1127580 - DNA, 15 bp, Homo sapiens
agaccagcctggaca

SEQ ID NO: 1127581 - DNA, 15 bp, Homo sapiens
aagaccagcctggac

SEQ ID NO: 1127582 - DNA, 15 bp, Homo sapiens
caagaccagcctgga

SEQ ID NO: 1127583 - DNA, 15 bp, Homo sapiens
ctcaggagttcaaga

SEQ ID NO: 1127584 - DNA, 15 bp, Homo sapiens
gagctcaggagttca

SEQ ID NO: 1127585 - DNA, 15 bp, Homo sapiens
ttgagctcaggagtt

SEQ ID NO: 1127586 - DNA, 15 bp, Homo sapiens
cttgagctcaggagt

SEQ ID NO: 1127587 - DNA, 15 bp, Homo sapiens
gcttgagctcaggag

SEQ ID NO: 1127588 - DNA, 15 bp, Homo sapiens
cgcttgagctcagga

SEQ ID NO: 1127589 - DNA, 15 bp, Homo sapiens
tcgcttgagctcagg

SEQ ID NO: 1127590 - DNA, 15 bp, Homo sapiens
atcgcttgagctcag

SEQ ID NO: 1127591 - DNA, 15 bp, Homo sapiens
gatcgcttgagctca

SEQ ID NO: 1127592 - DNA, 15 bp, Homo sapiens
agatcgcttgagctc

SEQ ID NO: 1127593 - DNA, 15 bp, Homo sapiens
cagatcgcttgagct

SEQ ID NO: 1127594 - DNA, 15 bp, Homo sapiens
gggcagatcgcttga

SEQ ID NO: 1127595 - DNA, 15 bp, Homo sapiens
cgggcagatcgcttg

SEQ ID NO: 1127596 - DNA, 15 bp, Homo sapiens
gcgggcagatcgctt

SEQ ID NO: 1127597 - DNA, 15 bp, Homo sapiens
ggcgggcagatcgct

SEQ ID NO: 1127598 - DNA, 15 bp, Homo sapiens
aggcgggcagatcgc

SEQ ID NO: 1127599 - DNA, 15 bp, Homo sapiens
gaggcgggcagatcg

SEQ ID NO: 1127600 - DNA, 15 bp, Homo sapiens
agcagaggcgggcag

SEQ ID NO: 1127601 - DNA, 15 bp, Homo sapiens
aagcagaggcgggca

SEQ ID NO: 1127602 - DNA, 15 bp, Homo sapiens
gaagcagaggcgggc

SEQ ID NO: 1127603 - DNA, 15 bp, Homo sapiens
ggaagcagaggcggg

SEQ ID NO: 1127604 - DNA, 15 bp, Homo sapiens
gggaagcagaggcgg

SEQ ID NO: 1127605 - DNA, 15 bp, Homo sapiens
tgggaagcagaggcg

SEQ ID NO: 1127606 - DNA, 15 bp, Homo sapiens
ttgggaagcagaggc

SEQ ID NO: 1127607 - DNA, 15 bp, Homo sapiens
aggccaggcacggtg

SEQ ID NO: 1127608 - DNA, 15 bp, Homo sapiens
taggccaggcacggt

SEQ ID NO: 1127609 - DNA, 15 bp, Homo sapiens
ctaggccaggcacgg

SEQ ID NO: 1127610 - DNA, 15 bp, Homo sapiens
cctaggccaggcacg

SEQ ID NO: 1127611 - DNA, 15 bp, Homo sapiens
acctaggccaggcac

SEQ ID NO: 1127612 - DNA, 15 bp, Homo sapiens
tacctaggccaggca

SEQ ID NO: 1127613 - DNA, 15 bp, Homo sapiens
ctacctaggccaggc

SEQ ID NO: 1127614 - DNA, 15 bp, Homo sapiens
tctacctaggccagg

SEQ ID NO: 1127615 - DNA, 15 bp, Homo sapiens
gtctacctaggccag

SEQ ID NO: 1127616 - DNA, 15 bp, Homo sapiens
cgtctacctaggcca

SEQ ID NO: 1127617 - DNA, 15 bp, Homo sapiens
gcgtctacctaggcc

SEQ ID NO: 1127618 - DNA, 15 bp, Homo sapiens
agcgtctacctaggc

SEQ ID NO: 1127619 - DNA, 15 bp, Homo sapiens
aagcgtctacctagg

SEQ ID NO: 1127620 - DNA, 15 bp, Homo sapiens
aaagcgtctacctag

SEQ ID NO: 1127621 - DNA, 15 bp, Homo sapiens
aaaagcgtctaccta

SEQ ID NO: 1127622 - DNA, 15 bp, Homo sapiens
taaaagcgtctacct

SEQ ID NO: 1127623 - DNA, 15 bp, Homo sapiens
ctaaaagcgtctacc

SEQ ID NO: 1127624 - DNA, 15 bp, Homo sapiens
gctaaaagcgtctac

SEQ ID NO: 1127625 - DNA, 15 bp, Homo sapiens
agctaaaagcgtcta

SEQ ID NO: 1127626 - DNA, 15 bp, Homo sapiens
aagctaaaagcgtct

SEQ ID NO: 1127627 - DNA, 15 bp, Homo sapiens
aaagctaaaagcgtc

SEQ ID NO: 1127628 - DNA, 15 bp, Homo sapiens
caaagctaaaagcgt

SEQ ID NO: 1127629 - DNA, 15 bp, Homo sapiens
ccaaagctaaaagcg

SEQ ID NO: 1127630 - DNA, 15 bp, Homo sapiens
cccaaagctaaaagc

SEQ ID NO: 1127631 - DNA, 15 bp, Homo sapiens
ccccaaagctaaaag

SEQ ID NO: 1127632 - DNA, 15 bp, Homo sapiens
accccaaagctaaaa

SEQ ID NO: 1127633 - DNA, 15 bp, Homo sapiens
caccccaaagctaaa

SEQ ID NO: 1127634 - DNA, 15 bp, Homo sapiens
acaccccaaagctaa

SEQ ID NO: 1127635 - DNA, 15 bp, Homo sapiens
cacaccccaaagcta

SEQ ID NO: 1127636 - DNA, 15 bp, Homo sapiens
tcacaccccaaagct

SEQ ID NO: 1127637 - DNA, 15 bp, Homo sapiens
atcacaccccaaagc

SEQ ID NO: 1127638 - DNA, 15 bp, Homo sapiens
catcacaccccaaag

SEQ ID NO: 1127639 - DNA, 15 bp, Homo sapiens
gcatcacaccccaaa

SEQ ID NO: 1127640 - DNA, 15 bp, Homo sapiens
ggcatcacaccccaa

SEQ ID NO: 1127641 - DNA, 15 bp, Homo sapiens
aggcatcacacccca

SEQ ID NO: 1127642 - DNA, 15 bp, Homo sapiens
caggcatcacacccc

SEQ ID NO: 1127643 - DNA, 15 bp, Homo sapiens
gcaggcatcacaccc

SEQ ID NO: 1127644 - DNA, 15 bp, Homo sapiens
ggcaggcatcacacc

SEQ ID NO: 1127645 - DNA, 15 bp, Homo sapiens
gggcaggcatcacac

SEQ ID NO: 1127646 - DNA, 15 bp, Homo sapiens
ggggcaggcatcaca

SEQ ID NO: 1127647 - DNA, 15 bp, Homo sapiens
tggggcaggcatcac

SEQ ID NO: 1127648 - DNA, 15 bp, Homo sapiens
ctggggcaggcatca

SEQ ID NO: 1127649 - DNA, 15 bp, Homo sapiens
actggggcaggcatc

SEQ ID NO: 1127650 - DNA, 15 bp, Homo sapiens
tactggggcaggcat

SEQ ID NO: 1127651 - DNA, 15 bp, Homo sapiens
atactggggcaggca

SEQ ID NO: 1127652 - DNA, 15 bp, Homo sapiens
tatactggggcaggc

SEQ ID NO: 1127653 - DNA, 15 bp, Homo sapiens
atatactggggcagg

SEQ ID NO: 1127654 - DNA, 15 bp, Homo sapiens
tatatactggggcag

SEQ ID NO: 1127655 - DNA, 15 bp, Homo sapiens
ctatatactggggca

SEQ ID NO: 1127656 - DNA, 15 bp, Homo sapiens
actatatactggggc

SEQ ID NO: 1127657 - DNA, 15 bp, Homo sapiens
cactatatactgggg

SEQ ID NO: 1127658 - DNA, 15 bp, Homo sapiens
tcactatatactggg

SEQ ID NO: 1127659 - DNA, 15 bp, Homo sapiens
ttcactatatactgg

SEQ ID NO: 1127660 - DNA, 15 bp, Homo sapiens
attcactatatactg

SEQ ID NO: 1127661 - DNA, 15 bp, Homo sapiens
aattcactatatact

SEQ ID NO: 1127662 - DNA, 15 bp, Homo sapiens
aaattcactatatac

SEQ ID NO: 1127663 - DNA, 15 bp, Homo sapiens
taaattcactatata

SEQ ID NO: 1127664 - DNA, 15 bp, Homo sapiens
ttaaattcactatat

SEQ ID NO: 1127665 - DNA, 15 bp, Homo sapiens
attaaattcactata

SEQ ID NO: 1127666 - DNA, 15 bp, Homo sapiens
aattaaattcactat

SEQ ID NO: 1127667 - DNA, 15 bp, Homo sapiens
taattaaattcacta

SEQ ID NO: 1127668 - DNA, 15 bp, Homo sapiens
ataattaaattcact

SEQ ID NO: 1127669 - DNA, 15 bp, Homo sapiens
aataattaaattcac

SEQ ID NO: 1127670 - DNA, 15 bp, Homo sapiens
caataattaaattca

SEQ ID NO: 1127671 - DNA, 15 bp, Homo sapiens
gcaataattaaattc

SEQ ID NO: 1127672 - DNA, 15 bp, Homo sapiens
agcaataattaaatt

SEQ ID NO: 1127673 - DNA, 15 bp, Homo sapiens
tagcaataattaaat

SEQ ID NO: 1127674 - DNA, 15 bp, Homo sapiens
ctagcaataattaaa

SEQ ID NO: 1127675 - DNA, 15 bp, Homo sapiens
tctagcaataattaa

SEQ ID NO: 1127676 - DNA, 15 bp, Homo sapiens
ctctagcaataatta

SEQ ID NO: 1127677 - DNA, 15 bp, Homo sapiens
gctctagcaataatt

SEQ ID NO: 1127678 - DNA, 15 bp, Homo sapiens
agctctagcaataat

SEQ ID NO: 1127679 - DNA, 15 bp, Homo sapiens
cagctctagcaataa

SEQ ID NO: 1127680 - DNA, 15 bp, Homo sapiens
ccagctctagcaata

SEQ ID NO: 1127681 - DNA, 15 bp, Homo sapiens
gccagctctagcaat

SEQ ID NO: 1127682 - DNA, 15 bp, Homo sapiens
agccagctctagcaa

SEQ ID NO: 1127683 - DNA, 15 bp, Homo sapiens
cagccagctctagca

SEQ ID NO: 1127684 - DNA, 15 bp, Homo sapiens
acagccagctctagc

SEQ ID NO: 1127685 - DNA, 15 bp, Homo sapiens
aacagccagctctag

SEQ ID NO: 1127686 - DNA, 15 bp, Homo sapiens
aaacagccagctcta

SEQ ID NO: 1127687 - DNA, 15 bp, Homo sapiens
caaacagccagctct

SEQ ID NO: 1127688 - DNA, 15 bp, Homo sapiens
acaaacagccagctc

SEQ ID NO: 1127689 - DNA, 15 bp, Homo sapiens
aacaaacagccagct

SEQ ID NO: 1127690 - DNA, 15 bp, Homo sapiens
taacaaacagccagc

SEQ ID NO: 1127691 - DNA, 15 bp, Homo sapiens
ctaacaaacagccag

SEQ ID NO: 1127692 - DNA, 15 bp, Homo sapiens
actaacaaacagcca

SEQ ID NO: 1127693 - DNA, 15 bp, Homo sapiens
aactaacaaacagcc

SEQ ID NO: 1127694 - DNA, 15 bp, Homo sapiens
aaactaacaaacagc

SEQ ID NO: 1127695 - DNA, 15 bp, Homo sapiens
agaaaactaacaaac

SEQ ID NO: 1127696 - DNA, 15 bp, Homo sapiens
aagaaaactaacaaa

SEQ ID NO: 1127697 - DNA, 15 bp, Homo sapiens
aaagaaaactaacaa

SEQ ID NO: 1127698 - DNA, 15 bp, Homo sapiens
caaagaaaactaaca

SEQ ID NO: 1127699 - DNA, 15 bp, Homo sapiens
tcaaagaaaactaac

SEQ ID NO: 1127700 - DNA, 15 bp, Homo sapiens
ttcaaagaaaactaa

SEQ ID NO: 1127701 - DNA, 15 bp, Homo sapiens
gttcaaagaaaacta

SEQ ID NO: 1127702 - DNA, 15 bp, Homo sapiens
tgttcaaagaaaact

SEQ ID NO: 1127703 - DNA, 15 bp, Homo sapiens
atgttcaaagaaaac

SEQ ID NO: 1127704 - DNA, 15 bp, Homo sapiens
tatgttcaaagaaaa

SEQ ID NO: 1127705 - DNA, 15 bp, Homo sapiens
ttatgttcaaagaaa

SEQ ID NO: 1127706 - DNA, 15 bp, Homo sapiens
cttatgttcaaagaa

SEQ ID NO: 1127707 - DNA, 15 bp, Homo sapiens
tcttatgttcaaaga

SEQ ID NO: 1127708 - DNA, 15 bp, Homo sapiens
atcttatgttcaaag

SEQ ID NO: 1127709 - DNA, 15 bp, Homo sapiens
tatcttatgttcaaa

SEQ ID NO: 1127710 - DNA, 15 bp, Homo sapiens
gtatcttatgttcaa

SEQ ID NO: 1127711 - DNA, 15 bp, Homo sapiens
agtatcttatgttca

SEQ ID NO: 1127712 - DNA, 15 bp, Homo sapiens
gagtatcttatgttc

SEQ ID NO: 1127713 - DNA, 15 bp, Homo sapiens
tgagtatcttatgtt

SEQ ID NO: 1127714 - DNA, 15 bp, Homo sapiens
atgagtatcttatgt

SEQ ID NO: 1127715 - DNA, 15 bp, Homo sapiens
aatgagtatcttatg

SEQ ID NO: 1127716 - DNA, 15 bp, Homo sapiens
caatgagtatcttat

SEQ ID NO: 1127717 - DNA, 15 bp, Homo sapiens
acaatgagtatctta

SEQ ID NO: 1127718 - DNA, 15 bp, Homo sapiens
aacaatgagtatctt

SEQ ID NO: 1127719 - DNA, 15 bp, Homo sapiens
aaacaatgagtatct

SEQ ID NO: 1127720 - DNA, 15 bp, Homo sapiens
aaaacaatgagtatc

SEQ ID NO: 1127721 - DNA, 15 bp, Homo sapiens
aaaaacaatgagtat

SEQ ID NO: 1127722 - DNA, 15 bp, Homo sapiens
taaaaacaatgagta

SEQ ID NO: 1127723 - DNA, 15 bp, Homo sapiens
ctaaaaacaatgagt

SEQ ID NO: 1127724 - DNA, 15 bp, Homo sapiens
actaaaaacaatgag

SEQ ID NO: 1127725 - DNA, 15 bp, Homo sapiens
aactaaaaacaatga

SEQ ID NO: 1127726 - DNA, 15 bp, Homo sapiens
aaactaaaaacaatg

SEQ ID NO: 1127727 - DNA, 15 bp, Homo sapiens
caaactaaaaacaat

SEQ ID NO: 1127728 - DNA, 15 bp, Homo sapiens
gcaaactaaaaacaa

SEQ ID NO: 1127729 - DNA, 15 bp, Homo sapiens
tgcaaactaaaaaca

SEQ ID NO: 1127730 - DNA, 15 bp, Homo sapiens
ttgcaaactaaaaac

SEQ ID NO: 1127731 - DNA, 15 bp, Homo sapiens
tttgcaaactaaaaa

SEQ ID NO: 1127732 - DNA, 15 bp, Homo sapiens
atttgcaaactaaaa

SEQ ID NO: 1127733 - DNA, 15 bp, Homo sapiens
gatttgcaaactaaa

SEQ ID NO: 1127734 - DNA, 15 bp, Homo sapiens
ggatttgcaaactaa

SEQ ID NO: 1127735 - DNA, 15 bp, Homo sapiens
gggatttgcaaacta

SEQ ID NO: 1127736 - DNA, 15 bp, Homo sapiens
agggatttgcaaact

SEQ ID NO: 1127737 - DNA, 15 bp, Homo sapiens
gagggatttgcaaac

SEQ ID NO: 1127738 - DNA, 15 bp, Homo sapiens
agagggatttgcaaa

SEQ ID NO: 1127739 - DNA, 15 bp, Homo sapiens
aagagggatttgcaa

SEQ ID NO: 1127740 - DNA, 15 bp, Homo sapiens
gaagagggatttgca

SEQ ID NO: 1127741 - DNA, 15 bp, Homo sapiens
ggaagagggatttgc

SEQ ID NO: 1127742 - DNA, 15 bp, Homo sapiens
aggaagagggatttg

SEQ ID NO: 1127743 - DNA, 15 bp, Homo sapiens
aaggaagagggattt

SEQ ID NO: 1127744 - DNA, 15 bp, Homo sapiens
aaaggaagagggatt

SEQ ID NO: 1127745 - DNA, 15 bp, Homo sapiens
aaaaggaagagggat

SEQ ID NO: 1127746 - DNA, 15 bp, Homo sapiens
aaaaaggaagaggga

SEQ ID NO: 1127747 - DNA, 15 bp, Homo sapiens
taaaaaggaagaggg

SEQ ID NO: 1127748 - DNA, 15 bp, Homo sapiens
ttaaaaaggaagagg

SEQ ID NO: 1127749 - DNA, 15 bp, Homo sapiens
tttaaaaaggaagag

SEQ ID NO: 1127750 - DNA, 15 bp, Homo sapiens
ttttaaaaaggaaga

SEQ ID NO: 1127751 - DNA, 15 bp, Homo sapiens
tttttaaaaaggaag

SEQ ID NO: 1127752 - DNA, 15 bp, Homo sapiens
ttttttaaaaaggaa

SEQ ID NO: 1127753 - DNA, 15 bp, Homo sapiens
attttttaaaaagga

SEQ ID NO: 1127754 - DNA, 15 bp, Homo sapiens
aattttttaaaaagg

SEQ ID NO: 1127755 - DNA, 15 bp, Homo sapiens
aaattttttaaaaag

SEQ ID NO: 1127756 - DNA, 15 bp, Homo sapiens
gaaattttttaaaaa

SEQ ID NO: 1127757 - DNA, 15 bp, Homo sapiens
agaaattttttaaaa

SEQ ID NO: 1127758 - DNA, 15 bp, Homo sapiens
aagaaattttttaaa

SEQ ID NO: 1127759 - DNA, 15 bp, Homo sapiens
aaagaaattttttaa

SEQ ID NO: 1127760 - DNA, 15 bp, Homo sapiens
gaaagaaatttttta

SEQ ID NO: 1127761 - DNA, 15 bp, Homo sapiens
ggaaagaaatttttt

SEQ ID NO: 1127762 - DNA, 15 bp, Homo sapiens
gggaaagaaattttt

SEQ ID NO: 1127763 - DNA, 15 bp, Homo sapiens
agggaaagaaatttt

SEQ ID NO: 1127764 - DNA, 15 bp, Homo sapiens
aagggaaagaaattt

SEQ ID NO: 1127765 - DNA, 15 bp, Homo sapiens
taagggaaagaaatt

SEQ ID NO: 1127766 - DNA, 15 bp, Homo sapiens
ttaagggaaagaaat

SEQ ID NO: 1127767 - DNA, 15 bp, Homo sapiens
tttaagggaaagaaa

SEQ ID NO: 1127768 - DNA, 15 bp, Homo sapiens
atttaagggaaagaa

SEQ ID NO: 1127769 - DNA, 15 bp, Homo sapiens
aatttaagggaaaga

SEQ ID NO: 1127770 - DNA, 15 bp, Homo sapiens
caatttaagggaaag

SEQ ID NO: 1127771 - DNA, 15 bp, Homo sapiens
acaatttaagggaaa

SEQ ID NO: 1127772 - DNA, 15 bp, Homo sapiens
aacaatttaagggaa

SEQ ID NO: 1127773 - DNA, 15 bp, Homo sapiens
aaacaatttaaggga

SEQ ID NO: 1127774 - DNA, 15 bp, Homo sapiens
caaacaatttaaggg

SEQ ID NO: 1127775 - DNA, 15 bp, Homo sapiens
gcaaacaatttaagg

SEQ ID NO: 1127776 - DNA, 15 bp, Homo sapiens
tgcaaacaatttaag

SEQ ID NO: 1127777 - DNA, 15 bp, Homo sapiens
atgcaaacaatttaa

SEQ ID NO: 1127778 - DNA, 15 bp, Homo sapiens
catgcaaacaattta

SEQ ID NO: 1127779 - DNA, 15 bp, Homo sapiens
acatgcaaacaattt

SEQ ID NO: 1127780 - DNA, 15 bp, Homo sapiens
aacatgcaaacaatt

SEQ ID NO: 1127781 - DNA, 15 bp, Homo sapiens
taacatgcaaacaat

SEQ ID NO: 1127782 - DNA, 15 bp, Homo sapiens
ctaacatgcaaacaa

SEQ ID NO: 1127783 - DNA, 15 bp, Homo sapiens
gctaacatgcaaaca

SEQ ID NO: 1127784 - DNA, 15 bp, Homo sapiens
tgctaacatgcaaac

SEQ ID NO: 1127785 - DNA, 15 bp, Homo sapiens
ttgctaacatgcaaa

SEQ ID NO: 1127786 - DNA, 15 bp, Homo sapiens
attgctaacatgcaa

SEQ ID NO: 1127787 - DNA, 15 bp, Homo sapiens
tattgctaacatgca

SEQ ID NO: 1127788 - DNA, 15 bp, Homo sapiens
ttattgctaacatgc

SEQ ID NO: 1127789 - DNA, 15 bp, Homo sapiens
gttattgctaacatg

SEQ ID NO: 1127790 - DNA, 15 bp, Homo sapiens
tgttattgctaacat

SEQ ID NO: 1127791 - DNA, 15 bp, Homo sapiens
tttgttattgctaac

SEQ ID NO: 1127792 - DNA, 15 bp, Homo sapiens
atttgttattgctaa

SEQ ID NO: 1127793 - DNA, 15 bp, Homo sapiens
catttgttattgcta

SEQ ID NO: 1127794 - DNA, 15 bp, Homo sapiens
gcatttgttattgct

SEQ ID NO: 1127795 - DNA, 15 bp, Homo sapiens
agcatttgttattgc

SEQ ID NO: 1127796 - DNA, 15 bp, Homo sapiens
aagcatttgttattg

SEQ ID NO: 1127797 - DNA, 15 bp, Homo sapiens
taagcatttgttatt

SEQ ID NO: 1127798 - DNA, 15 bp, Homo sapiens
ttaagcatttgttat

SEQ ID NO: 1127799 - DNA, 15 bp, Homo sapiens
tttaagcatttgtta

SEQ ID NO: 1127800 - DNA, 15 bp, Homo sapiens
atttaagcatttgtt

SEQ ID NO: 1127801 - DNA, 15 bp, Homo sapiens
catttaagcatttgt

SEQ ID NO: 1127802 - DNA, 15 bp, Homo sapiens
ccatttaagcatttg

SEQ ID NO: 1127803 - DNA, 15 bp, Homo sapiens
accatttaagcattt

SEQ ID NO: 1127804 - DNA, 15 bp, Homo sapiens
caccatttaagcatt

SEQ ID NO: 1127805 - DNA, 15 bp, Homo sapiens
gcaccatttaagcat

SEQ ID NO: 1127806 - DNA, 15 bp, Homo sapiens
agcaccatttaagca

SEQ ID NO: 1127807 - DNA, 15 bp, Homo sapiens
tagcaccatttaagc

SEQ ID NO: 1127808 - DNA, 15 bp, Homo sapiens
atagcaccatttaag

SEQ ID NO: 1127809 - DNA, 15 bp, Homo sapiens
catagcaccatttaa

SEQ ID NO: 1127810 - DNA, 15 bp, Homo sapiens
acatagcaccattta

SEQ ID NO: 1127811 - DNA, 15 bp, Homo sapiens
cacatagcaccattt

SEQ ID NO: 1127812 - DNA, 15 bp, Homo sapiens
gcacatagcaccatt

SEQ ID NO: 1127813 - DNA, 15 bp, Homo sapiens
agcacatagcaccat

SEQ ID NO: 1127814 - DNA, 15 bp, Homo sapiens
tagcacatagcacca

SEQ ID NO: 1127815 - DNA, 15 bp, Homo sapiens
ctagcacatagcacc

SEQ ID NO: 1127816 - DNA, 15 bp, Homo sapiens
tctagcacatagcac

SEQ ID NO: 1127817 - DNA, 15 bp, Homo sapiens
atctagcacatagca

SEQ ID NO: 1127818 - DNA, 15 bp, Homo sapiens
tatctagcacatagc

SEQ ID NO: 1127819 - DNA, 15 bp, Homo sapiens
gtatctagcacatag

SEQ ID NO: 1127820 - DNA, 15 bp, Homo sapiens
agtatctagcacata

SEQ ID NO: 1127821 - DNA, 15 bp, Homo sapiens
gagtatctagcacat

SEQ ID NO: 1127822 - DNA, 15 bp, Homo sapiens
agagtatctagcaca

SEQ ID NO: 1127823 - DNA, 15 bp, Homo sapiens
aagagtatctagcac

SEQ ID NO: 1127824 - DNA, 15 bp, Homo sapiens
gaagagtatctagca

SEQ ID NO: 1127825 - DNA, 15 bp, Homo sapiens
agaagagtatctagc

SEQ ID NO: 1127826 - DNA, 15 bp, Homo sapiens
tagaagagtatctag

SEQ ID NO: 1127827 - DNA, 15 bp, Homo sapiens
ttagaagagtatcta

SEQ ID NO: 1127828 - DNA, 15 bp, Homo sapiens
cttagaagagtatct

SEQ ID NO: 1127829 - DNA, 15 bp, Homo sapiens
gcttagaagagtatc

SEQ ID NO: 1127830 - DNA, 15 bp, Homo sapiens
ggcttagaagagtat

SEQ ID NO: 1127831 - DNA, 15 bp, Homo sapiens
gggcttagaagagta

SEQ ID NO: 1127832 - DNA, 15 bp, Homo sapiens
agggcttagaagagt

SEQ ID NO: 1127833 - DNA, 15 bp, Homo sapiens
cagggcttagaagag

SEQ ID NO: 1127834 - DNA, 15 bp, Homo sapiens
acagggcttagaaga

SEQ ID NO: 1127835 - DNA, 15 bp, Homo sapiens
aacagggcttagaag

SEQ ID NO: 1127836 - DNA, 15 bp, Homo sapiens
taacagggcttagaa

SEQ ID NO: 1127837 - DNA, 15 bp, Homo sapiens
ataacagggcttaga

SEQ ID NO: 1127838 - DNA, 15 bp, Homo sapiens
cataacagggcttag

SEQ ID NO: 1127839 - DNA, 15 bp, Homo sapiens
acataacagggctta

SEQ ID NO: 1127840 - DNA, 15 bp, Homo sapiens
tacataacagggctt

SEQ ID NO: 1127841 - DNA, 15 bp, Homo sapiens
atacataacagggct

SEQ ID NO: 1127842 - DNA, 15 bp, Homo sapiens
tatacataacagggc

SEQ ID NO: 1127843 - DNA, 15 bp, Homo sapiens
atatacataacaggg

SEQ ID NO: 1127844 - DNA, 15 bp, Homo sapiens
aatatacataacagg

SEQ ID NO: 1127845 - DNA, 15 bp, Homo sapiens
taatatacataacag

SEQ ID NO: 1127846 - DNA, 15 bp, Homo sapiens
ttaatatacataaca

SEQ ID NO: 1127847 - DNA, 15 bp, Homo sapiens
gttaatatacataac

SEQ ID NO: 1127848 - DNA, 15 bp, Homo sapiens
agttaatatacataa

SEQ ID NO: 1127849 - DNA, 15 bp, Homo sapiens
tagttaatatacata

SEQ ID NO: 1127850 - DNA, 15 bp, Homo sapiens
ttagttaatatacat

SEQ ID NO: 1127851 - DNA, 15 bp, Homo sapiens
attagttaatataca

SEQ ID NO: 1127852 - DNA, 15 bp, Homo sapiens
aattagttaatatac

SEQ ID NO: 1127853 - DNA, 15 bp, Homo sapiens
aaattagttaatata

SEQ ID NO: 1127854 - DNA, 15 bp, Homo sapiens
aaaattagttaatat

SEQ ID NO: 1127855 - DNA, 15 bp, Homo sapiens
aaaaattagttaata

SEQ ID NO: 1127856 - DNA, 15 bp, Homo sapiens
aaaaaattagttaat

SEQ ID NO: 1127857 - DNA, 15 bp, Homo sapiens
taaaaaattagttaa

SEQ ID NO: 1127858 - DNA, 15 bp, Homo sapiens
ttaaaaaattagtta

SEQ ID NO: 1127859 - DNA, 15 bp, Homo sapiens
tttaaaaaattagtt

SEQ ID NO: 1127860 - DNA, 15 bp, Homo sapiens
atttaaaaaattagt

SEQ ID NO: 1127861 - DNA, 15 bp, Homo sapiens
aatttaaaaaattag

SEQ ID NO: 1127862 - DNA, 15 bp, Homo sapiens
taatttaaaaaatta

SEQ ID NO: 1127863 - DNA, 15 bp, Homo sapiens
gtaatttaaaaaatt

SEQ ID NO: 1127864 - DNA, 15 bp, Homo sapiens
gtgtaatttaaaaaa

SEQ ID NO: 1127865 - DNA, 15 bp, Homo sapiens
tgtgtaatttaaaaa

SEQ ID NO: 1127866 - DNA, 15 bp, Homo sapiens
ttgtgtaatttaaaa

SEQ ID NO: 1127867 - DNA, 15 bp, Homo sapiens
tttgtgtaatttaaa

SEQ ID NO: 1127868 - DNA, 15 bp, Homo sapiens
atttgtgtaatttaa

SEQ ID NO: 1127869 - DNA, 15 bp, Homo sapiens
gatttgtgtaattta

SEQ ID NO: 1127870 - DNA, 15 bp, Homo sapiens
tgatttgtgtaattt

SEQ ID NO: 1127871 - DNA, 15 bp, Homo sapiens
ctgatttgtgtaatt

SEQ ID NO: 1127872 - DNA, 15 bp, Homo sapiens
tctgatttgtgtaat

SEQ ID NO: 1127873 - DNA, 15 bp, Homo sapiens
ctctgatttgtgtaa

SEQ ID NO: 1127874 - DNA, 15 bp, Homo sapiens
tctctgatttgtgta

SEQ ID NO: 1127875 - DNA, 15 bp, Homo sapiens
ctctctgatttgtgt

SEQ ID NO: 1127876 - DNA, 15 bp, Homo sapiens
cctctctgatttgtg

SEQ ID NO: 1127877 - DNA, 15 bp, Homo sapiens
acctctctgatttgt

SEQ ID NO: 1127878 - DNA, 15 bp, Homo sapiens
aacctctctgatttg

SEQ ID NO: 1127879 - DNA, 15 bp, Homo sapiens
taacctctctgattt

SEQ ID NO: 1127880 - DNA, 15 bp, Homo sapiens
ttaacctctctgatt

SEQ ID NO: 1127881 - DNA, 15 bp, Homo sapiens
cttaacctctctgat

SEQ ID NO: 1127882 - DNA, 15 bp, Homo sapiens
acttaacctctctga

SEQ ID NO: 1127883 - DNA, 15 bp, Homo sapiens
tacttaacctctctg

SEQ ID NO: 1127884 - DNA, 15 bp, Homo sapiens
ttacttaacctctct

SEQ ID NO: 1127885 - DNA, 15 bp, Homo sapiens
gttacttaacctctc

SEQ ID NO: 1127886 - DNA, 15 bp, Homo sapiens
agttacttaacctct

SEQ ID NO: 1127887 - DNA, 15 bp, Homo sapiens
gcaagttacttaacc

SEQ ID NO: 1127888 - DNA, 15 bp, Homo sapiens
ggcaagttacttaac

SEQ ID NO: 1127889 - DNA, 15 bp, Homo sapiens
cttgggcaagttact

SEQ ID NO: 1127890 - DNA, 15 bp, Homo sapiens
tcttgggcaagttac

SEQ ID NO: 1127891 - DNA, 15 bp, Homo sapiens
atcttgggcaagtta

SEQ ID NO: 1127892 - DNA, 15 bp, Homo sapiens
aatcttgggcaagtt

SEQ ID NO: 1127893 - DNA, 15 bp, Homo sapiens
taatcttgggcaagt

SEQ ID NO: 1127894 - DNA, 15 bp, Homo sapiens
gtaatcttgggcaag

SEQ ID NO: 1127895 - DNA, 15 bp, Homo sapiens
ggtaatcttgggcaa

SEQ ID NO: 1127896 - DNA, 15 bp, Homo sapiens
gggtaatcttgggca

SEQ ID NO: 1127897 - DNA, 15 bp, Homo sapiens
tgggtaatcttgggc

SEQ ID NO: 1127898 - DNA, 15 bp, Homo sapiens
ttgggtaatcttggg

SEQ ID NO: 1127899 - DNA, 15 bp, Homo sapiens
gttgggtaatcttgg

SEQ ID NO: 1127900 - DNA, 15 bp, Homo sapiens
tgttgggtaatcttg

SEQ ID NO: 1127901 - DNA, 15 bp, Homo sapiens
ttgttgggtaatctt

SEQ ID NO: 1127902 - DNA, 15 bp, Homo sapiens
attgttgggtaatct

SEQ ID NO: 1127903 - DNA, 15 bp, Homo sapiens
tattgttgggtaatc

SEQ ID NO: 1127904 - DNA, 15 bp, Homo sapiens
gtattgttgggtaat

SEQ ID NO: 1127905 - DNA, 15 bp, Homo sapiens
agtattgttgggtaa

SEQ ID NO: 1127906 - DNA, 15 bp, Homo sapiens
tagtattgttgggta

SEQ ID NO: 1127907 - DNA, 15 bp, Homo sapiens
ctagtattgttgggt

SEQ ID NO: 1127908 - DNA, 15 bp, Homo sapiens
cctagtattgttggg

SEQ ID NO: 1127909 - DNA, 15 bp, Homo sapiens
tcctagtattgttgg

SEQ ID NO: 1127910 - DNA, 15 bp, Homo sapiens
atcctagtattgttg

SEQ ID NO: 1127911 - DNA, 15 bp, Homo sapiens
aatcctagtattgtt

SEQ ID NO: 1127912 - DNA, 15 bp, Homo sapiens
aaatcctagtattgt

SEQ ID NO: 1127913 - DNA, 15 bp, Homo sapiens
caaatcctagtattg

SEQ ID NO: 1127914 - DNA, 15 bp, Homo sapiens
tcaaatcctagtatt

SEQ ID NO: 1127915 - DNA, 15 bp, Homo sapiens
ttcaaatcctagtat

SEQ ID NO: 1127916 - DNA, 15 bp, Homo sapiens
gttcaaatcctagta

SEQ ID NO: 1127917 - DNA, 15 bp, Homo sapiens
ggttcaaatcctagt

SEQ ID NO: 1127918 - DNA, 15 bp, Homo sapiens
aggttcaaatcctag

SEQ ID NO: 1127919 - DNA, 15 bp, Homo sapiens
taggttcaaatccta

SEQ ID NO: 1127920 - DNA, 15 bp, Homo sapiens
ttaggttcaaatcct

SEQ ID NO: 1127921 - DNA, 15 bp, Homo sapiens
cttaggttcaaatcc

SEQ ID NO: 1127922 - DNA, 15 bp, Homo sapiens
acttaggttcaaatc

SEQ ID NO: 1127923 - DNA, 15 bp, Homo sapiens
aacttaggttcaaat

SEQ ID NO: 1127924 - DNA, 15 bp, Homo sapiens
aaacttaggttcaaa

SEQ ID NO: 1127925 - DNA, 15 bp, Homo sapiens
caaacttaggttcaa

SEQ ID NO: 1127926 - DNA, 15 bp, Homo sapiens
acaaacttaggttca

SEQ ID NO: 1127927 - DNA, 15 bp, Homo sapiens
gacaaacttaggttc

SEQ ID NO: 1127928 - DNA, 15 bp, Homo sapiens
agacaaacttaggtt

SEQ ID NO: 1127929 - DNA, 15 bp, Homo sapiens
gagacaaacttaggt

SEQ ID NO: 1127930 - DNA, 15 bp, Homo sapiens
tgagacaaacttagg

SEQ ID NO: 1127931 - DNA, 15 bp, Homo sapiens
gtgagacaaacttag

SEQ ID NO: 1127932 - DNA, 15 bp, Homo sapiens
ggtgagacaaactta

SEQ ID NO: 1127933 - DNA, 15 bp, Homo sapiens
gggtgagacaaactt

SEQ ID NO: 1127934 - DNA, 15 bp, Homo sapiens
ggggtgagacaaact

SEQ ID NO: 1127935 - DNA, 15 bp, Homo sapiens
tggggtgagacaaac

SEQ ID NO: 1127936 - DNA, 15 bp, Homo sapiens
ctggggtgagacaaa

SEQ ID NO: 1127937 - DNA, 15 bp, Homo sapiens
tctggggtgagacaa

SEQ ID NO: 1127938 - DNA, 15 bp, Homo sapiens
atctggggtgagaca

SEQ ID NO: 1127939 - DNA, 15 bp, Homo sapiens
aatctggggtgagac

SEQ ID NO: 1127940 - DNA, 15 bp, Homo sapiens
gaatctggggtgaga

SEQ ID NO: 1127941 - DNA, 15 bp, Homo sapiens
agaatctggggtgag

SEQ ID NO: 1127942 - DNA, 15 bp, Homo sapiens
cagaatctggggtga

SEQ ID NO: 1127943 - DNA, 15 bp, Homo sapiens
gcagaatctggggtg

SEQ ID NO: 1127944 - DNA, 15 bp, Homo sapiens
agcagaatctggggt

SEQ ID NO: 1127945 - DNA, 15 bp, Homo sapiens
gagcagaatctgggg

SEQ ID NO: 1127946 - DNA, 15 bp, Homo sapiens
agagcagaatctggg

SEQ ID NO: 1127947 - DNA, 15 bp, Homo sapiens
aagagcagaatctgg

SEQ ID NO: 1127948 - DNA, 15 bp, Homo sapiens
taagagcagaatctg

SEQ ID NO: 1127949 - DNA, 15 bp, Homo sapiens
ttaagagcagaatct

SEQ ID NO: 1127950 - DNA, 15 bp, Homo sapiens
attaagagcagaatc

SEQ ID NO: 1127951 - DNA, 15 bp, Homo sapiens
gattaagagcagaat

SEQ ID NO: 1127952 - DNA, 15 bp, Homo sapiens
agattaagagcagaa

SEQ ID NO: 1127953 - DNA, 15 bp, Homo sapiens
gagattaagagcaga

SEQ ID NO: 1127954 - DNA, 15 bp, Homo sapiens
agagattaagagcag

SEQ ID NO: 1127955 - DNA, 15 bp, Homo sapiens
tagagattaagagca

SEQ ID NO: 1127956 - DNA, 15 bp, Homo sapiens
ttagagattaagagc

SEQ ID NO: 1127957 - DNA, 15 bp, Homo sapiens
tttagagattaagag

SEQ ID NO: 1127958 - DNA, 15 bp, Homo sapiens
gtttagagattaaga

SEQ ID NO: 1127959 - DNA, 15 bp, Homo sapiens
agtttagagattaag

SEQ ID NO: 1127960 - DNA, 15 bp, Homo sapiens
aagtttagagattaa

SEQ ID NO: 1127961 - DNA, 15 bp, Homo sapiens
aaagtttagagatta

SEQ ID NO: 1127962 - DNA, 15 bp, Homo sapiens
aaaagtttagagatt

SEQ ID NO: 1127963 - DNA, 15 bp, Homo sapiens
taaaagtttagagat

SEQ ID NO: 1127964 - DNA, 15 bp, Homo sapiens
ttaaaagtttagaga

SEQ ID NO: 1127965 - DNA, 15 bp, Homo sapiens
cttaaaagtttagag

SEQ ID NO: 1127966 - DNA, 15 bp, Homo sapiens
acttaaaagtttaga

SEQ ID NO: 1127967 - DNA, 15 bp, Homo sapiens
aacttaaaagtttag

SEQ ID NO: 1127968 - DNA, 15 bp, Homo sapiens
taacttaaaagttta

SEQ ID NO: 1127969 - DNA, 15 bp, Homo sapiens
ctaacttaaaagttt

SEQ ID NO: 1127970 - DNA, 15 bp, Homo sapiens
actaacttaaaagtt

SEQ ID NO: 1127971 - DNA, 15 bp, Homo sapiens
tactaacttaaaagt

SEQ ID NO: 1127972 - DNA, 15 bp, Homo sapiens
ctactaacttaaaag

SEQ ID NO: 1127973 - DNA, 15 bp, Homo sapiens
actactaacttaaaa

SEQ ID NO: 1127974 - DNA, 15 bp, Homo sapiens
cactactaacttaaa

SEQ ID NO: 1127975 - DNA, 15 bp, Homo sapiens
tcactactaacttaa

SEQ ID NO: 1127976 - DNA, 15 bp, Homo sapiens
gtcactactaactta

SEQ ID NO: 1127977 - DNA, 15 bp, Homo sapiens
tgtcactactaactt

SEQ ID NO: 1127978 - DNA, 15 bp, Homo sapiens
ttgtcactactaact

SEQ ID NO: 1127979 - DNA, 15 bp, Homo sapiens
attgtcactactaac

SEQ ID NO: 1127980 - DNA, 15 bp, Homo sapiens
tattgtcactactaa

SEQ ID NO: 1127981 - DNA, 15 bp, Homo sapiens
ctattgtcactacta

SEQ ID NO: 1127982 - DNA, 15 bp, Homo sapiens
actattgtcactact

SEQ ID NO: 1127983 - DNA, 15 bp, Homo sapiens
tactattgtcactac

SEQ ID NO: 1127984 - DNA, 15 bp, Homo sapiens
ctactattgtcacta

SEQ ID NO: 1127985 - DNA, 15 bp, Homo sapiens
cctactattgtcact

SEQ ID NO: 1127986 - DNA, 15 bp, Homo sapiens
acctactattgtcac

SEQ ID NO: 1127987 - DNA, 15 bp, Homo sapiens
tacctactattgtca

SEQ ID NO: 1127988 - DNA, 15 bp, Homo sapiens
atacctactattgtc

SEQ ID NO: 1127989 - DNA, 15 bp, Homo sapiens
aatacctactattgt

SEQ ID NO: 1127990 - DNA, 15 bp, Homo sapiens
aaatacctactattg

SEQ ID NO: 1127991 - DNA, 15 bp, Homo sapiens
taaatacctactatt

SEQ ID NO: 1127992 - DNA, 15 bp, Homo sapiens
ataaatacctactat

SEQ ID NO: 1127993 - DNA, 15 bp, Homo sapiens
aataaatacctacta

SEQ ID NO: 1127994 - DNA, 15 bp, Homo sapiens
caataaatacctact

SEQ ID NO: 1127995 - DNA, 15 bp, Homo sapiens
tcaataaatacctac

SEQ ID NO: 1127996 - DNA, 15 bp, Homo sapiens
ttcaataaataccta

SEQ ID NO: 1127997 - DNA, 15 bp, Homo sapiens
attcaataaatacct

SEQ ID NO: 1127998 - DNA, 15 bp, Homo sapiens
tattcaataaatacc

SEQ ID NO: 1127999 - DNA, 15 bp, Homo sapiens
gtattcaataaatac

SEQ ID NO: 1128000 - DNA, 15 bp, Homo sapiens
agtattcaataaata

SEQ ID NO: 1128001 - DNA, 15 bp, Homo sapiens
aagtattcaataaat

SEQ ID NO: 1128002 - DNA, 15 bp, Homo sapiens
taagtattcaataaa

SEQ ID NO: 1128003 - DNA, 15 bp, Homo sapiens
ttaagtattcaataa

SEQ ID NO: 1128004 - DNA, 15 bp, Homo sapiens
gttaagtattcaata

SEQ ID NO: 1128005 - DNA, 15 bp, Homo sapiens
agttaagtattcaat

SEQ ID NO: 1128006 - DNA, 15 bp, Homo sapiens
tagttaagtattcaa

SEQ ID NO: 1128007 - DNA, 15 bp, Homo sapiens
atagttaagtattca

SEQ ID NO: 1128008 - DNA, 15 bp, Homo sapiens
catagttaagtattc

SEQ ID NO: 1128009 - DNA, 15 bp, Homo sapiens
acatagttaagtatt

SEQ ID NO: 1128010 - DNA, 15 bp, Homo sapiens
aacatagttaagtat

SEQ ID NO: 1128011 - DNA, 15 bp, Homo sapiens
aaacatagttaagta

SEQ ID NO: 1128012 - DNA, 15 bp, Homo sapiens
aaaacatagttaagt

SEQ ID NO: 1128013 - DNA, 15 bp, Homo sapiens
taaaacatagttaag

SEQ ID NO: 1128014 - DNA, 15 bp, Homo sapiens
ctaaaacatagttaa

SEQ ID NO: 1128015 - DNA, 15 bp, Homo sapiens
cctaaaacatagtta

SEQ ID NO: 1128016 - DNA, 15 bp, Homo sapiens
gcctaaaacatagtt

SEQ ID NO: 1128017 - DNA, 15 bp, Homo sapiens
cgcctaaaacatagt

SEQ ID NO: 1128018 - DNA, 15 bp, Homo sapiens
acgcctaaaacatag

SEQ ID NO: 1128019 - DNA, 15 bp, Homo sapiens
aacgcctaaaacata

SEQ ID NO: 1128020 - DNA, 15 bp, Homo sapiens
caacgcctaaaacat

SEQ ID NO: 1128021 - DNA, 15 bp, Homo sapiens
tcaacgcctaaaaca

SEQ ID NO: 1128022 - DNA, 15 bp, Homo sapiens
ttcaacgcctaaaac

SEQ ID NO: 1128023 - DNA, 15 bp, Homo sapiens
cttcaacgcctaaaa

SEQ ID NO: 1128024 - DNA, 15 bp, Homo sapiens
acttcaacgcctaaa

SEQ ID NO: 1128025 - DNA, 15 bp, Homo sapiens
tacttcaacgcctaa

SEQ ID NO: 1128026 - DNA, 15 bp, Homo sapiens
ttacttcaacgccta

SEQ ID NO: 1128027 - DNA, 15 bp, Homo sapiens
tttacttcaacgcct

SEQ ID NO: 1128028 - DNA, 15 bp, Homo sapiens
atttacttcaacgcc

SEQ ID NO: 1128029 - DNA, 15 bp, Homo sapiens
tatttacttcaacgc

SEQ ID NO: 1128030 - DNA, 15 bp, Homo sapiens
atatttacttcaacg

SEQ ID NO: 1128031 - DNA, 15 bp, Homo sapiens
aatatttacttcaac

SEQ ID NO: 1128032 - DNA, 15 bp, Homo sapiens
aaatatttacttcaa

SEQ ID NO: 1128033 - DNA, 15 bp, Homo sapiens
aaaatatttacttca

SEQ ID NO: 1128034 - DNA, 15 bp, Homo sapiens
caaaatatttacttc

SEQ ID NO: 1128035 - DNA, 15 bp, Homo sapiens
gcaaaatatttactt

SEQ ID NO: 1128036 - DNA, 15 bp, Homo sapiens
tgcaaaatatttact

SEQ ID NO: 1128037 - DNA, 15 bp, Homo sapiens
ctgcaaaatatttac

SEQ ID NO: 1128038 - DNA, 15 bp, Homo sapiens
cctgcaaaatattta

SEQ ID NO: 1128039 - DNA, 15 bp, Homo sapiens
gcctgcaaaatattt

SEQ ID NO: 1128040 - DNA, 15 bp, Homo sapiens
tgcctgcaaaatatt

SEQ ID NO: 1128041 - DNA, 15 bp, Homo sapiens
atgcctgcaaaatat

SEQ ID NO: 1128042 - DNA, 15 bp, Homo sapiens
aatgcctgcaaaata

SEQ ID NO: 1128043 - DNA, 15 bp, Homo sapiens
taatgcctgcaaaat

SEQ ID NO: 1128044 - DNA, 15 bp, Homo sapiens
ataatgcctgcaaaa

SEQ ID NO: 1128045 - DNA, 15 bp, Homo sapiens
gataatgcctgcaaa

SEQ ID NO: 1128046 - DNA, 15 bp, Homo sapiens
agataatgcctgcaa

SEQ ID NO: 1128047 - DNA, 15 bp, Homo sapiens
tagataatgcctgca

SEQ ID NO: 1128048 - DNA, 15 bp, Homo sapiens
ttagataatgcctgc

SEQ ID NO: 1128049 - DNA, 15 bp, Homo sapiens
attagataatgcctg

SEQ ID NO: 1128050 - DNA, 15 bp, Homo sapiens
cattagataatgcct

SEQ ID NO: 1128051 - DNA, 15 bp, Homo sapiens
acattagataatgcc

SEQ ID NO: 1128052 - DNA, 15 bp, Homo sapiens
tacattagataatgc

SEQ ID NO: 1128053 - DNA, 15 bp, Homo sapiens
ttacattagataatg

SEQ ID NO: 1128054 - DNA, 15 bp, Homo sapiens
tttacattagataat

SEQ ID NO: 1128055 - DNA, 15 bp, Homo sapiens
gtttacattagataa

SEQ ID NO: 1128056 - DNA, 15 bp, Homo sapiens
tgtttacattagata

SEQ ID NO: 1128057 - DNA, 15 bp, Homo sapiens
gtgtttacattagat

SEQ ID NO: 1128058 - DNA, 15 bp, Homo sapiens
ggtgtttacattaga

SEQ ID NO: 1128059 - DNA, 15 bp, Homo sapiens
gggtgtttacattag

SEQ ID NO: 1128060 - DNA, 15 bp, Homo sapiens
agggtgtttacatta

SEQ ID NO: 1128061 - DNA, 15 bp, Homo sapiens
tagggtgtttacatt

SEQ ID NO: 1128062 - DNA, 15 bp, Homo sapiens
ttagggtgtttacat

SEQ ID NO: 1128063 - DNA, 15 bp, Homo sapiens
tttagggtgtttaca

SEQ ID NO: 1128064 - DNA, 15 bp, Homo sapiens
ctttagggtgtttac

SEQ ID NO: 1128065 - DNA, 15 bp, Homo sapiens
actttagggtgttta

SEQ ID NO: 1128066 - DNA, 15 bp, Homo sapiens
aactttagggtgttt

SEQ ID NO: 1128067 - DNA, 15 bp, Homo sapiens
taactttagggtgtt

SEQ ID NO: 1128068 - DNA, 15 bp, Homo sapiens
gtaactttagggtgt

SEQ ID NO: 1128069 - DNA, 15 bp, Homo sapiens
tgtaactttagggtg

SEQ ID NO: 1128070 - DNA, 15 bp, Homo sapiens
atgtaactttagggt

SEQ ID NO: 1128071 - DNA, 15 bp, Homo sapiens
tatgtaactttaggg

SEQ ID NO: 1128072 - DNA, 15 bp, Homo sapiens
ttatgtaactttagg

SEQ ID NO: 1128073 - DNA, 15 bp, Homo sapiens
gttatgtaactttag

SEQ ID NO: 1128074 - DNA, 15 bp, Homo sapiens
tgttatgtaacttta

SEQ ID NO: 1128075 - DNA, 15 bp, Homo sapiens
ctgttatgtaacttt

SEQ ID NO: 1128076 - DNA, 15 bp, Homo sapiens
cctgttatgtaactt

SEQ ID NO: 1128077 - DNA, 15 bp, Homo sapiens
acctgttatgtaact

SEQ ID NO: 1128078 - DNA, 15 bp, Homo sapiens
tacctgttatgtaac

SEQ ID NO: 1128079 - DNA, 15 bp, Homo sapiens
gtacctgttatgtaa

SEQ ID NO: 1128080 - DNA, 15 bp, Homo sapiens
ggtacctgttatgta

SEQ ID NO: 1128081 - DNA, 15 bp, Homo sapiens
gggtacctgttatgt

SEQ ID NO: 1128082 - DNA, 15 bp, Homo sapiens
agggtacctgttatg

SEQ ID NO: 1128083 - DNA, 15 bp, Homo sapiens
aagggtacctgttat

SEQ ID NO: 1128084 - DNA, 15 bp, Homo sapiens
aaagggtacctgtta

SEQ ID NO: 1128085 - DNA, 15 bp, Homo sapiens
taaagggtacctgtt

SEQ ID NO: 1128086 - DNA, 15 bp, Homo sapiens
ctaaagggtacctgt

SEQ ID NO: 1128087 - DNA, 15 bp, Homo sapiens
cctaaagggtacctg

SEQ ID NO: 1128088 - DNA, 15 bp, Homo sapiens
acctaaagggtacct

SEQ ID NO: 1128089 - DNA, 15 bp, Homo sapiens
tacctaaagggtacc

SEQ ID NO: 1128090 - DNA, 15 bp, Homo sapiens
ttacctaaagggtac

SEQ ID NO: 1128091 - DNA, 15 bp, Homo sapiens
tttacctaaagggta

SEQ ID NO: 1128092 - DNA, 15 bp, Homo sapiens
atttacctaaagggt

SEQ ID NO: 1128093 - DNA, 15 bp, Homo sapiens
tatttacctaaaggg

SEQ ID NO: 1128094 - DNA, 15 bp, Homo sapiens
ttatttacctaaagg

SEQ ID NO: 1128095 - DNA, 15 bp, Homo sapiens
tttatttacctaaag

SEQ ID NO: 1128096 - DNA, 15 bp, Homo sapiens
gtttatttacctaaa

SEQ ID NO: 1128097 - DNA, 15 bp, Homo sapiens
tgtttatttacctaa

SEQ ID NO: 1128098 - DNA, 15 bp, Homo sapiens
gtgtttatttaccta

SEQ ID NO: 1128099 - DNA, 15 bp, Homo sapiens
agtgtttatttacct

SEQ ID NO: 1128100 - DNA, 15 bp, Homo sapiens
tagtgtttatttacc

SEQ ID NO: 1128101 - DNA, 15 bp, Homo sapiens
ctagtgtttatttac

SEQ ID NO: 1128102 - DNA, 15 bp, Homo sapiens
actagtgtttattta

SEQ ID NO: 1128103 - DNA, 15 bp, Homo sapiens
tactagtgtttattt

SEQ ID NO: 1128104 - DNA, 15 bp, Homo sapiens
atactagtgtttatt

SEQ ID NO: 1128105 - DNA, 15 bp, Homo sapiens
catactagtgtttat

SEQ ID NO: 1128106 - DNA, 15 bp, Homo sapiens
tcatactagtgttta

SEQ ID NO: 1128107 - DNA, 15 bp, Homo sapiens
gtcatactagtgttt

SEQ ID NO: 1128108 - DNA, 15 bp, Homo sapiens
ggtcatactagtgtt

SEQ ID NO: 1128109 - DNA, 15 bp, Homo sapiens
aggtcatactagtgt

SEQ ID NO: 1128110 - DNA, 15 bp, Homo sapiens
aaggtcatactagtg

SEQ ID NO: 1128111 - DNA, 15 bp, Homo sapiens
caaggtcatactagt

SEQ ID NO: 1128112 - DNA, 15 bp, Homo sapiens
ccaaggtcatactag

SEQ ID NO: 1128113 - DNA, 15 bp, Homo sapiens
tccaaggtcatacta

SEQ ID NO: 1128114 - DNA, 15 bp, Homo sapiens
ctccaaggtcatact

SEQ ID NO: 1128115 - DNA, 15 bp, Homo sapiens
cctccaaggtcatac

SEQ ID NO: 1128116 - DNA, 15 bp, Homo sapiens
gcctccaaggtcata

SEQ ID NO: 1128117 - DNA, 15 bp, Homo sapiens
tgcctccaaggtcat

SEQ ID NO: 1128118 - DNA, 15 bp, Homo sapiens
gtgcctccaaggtca

SEQ ID NO: 1128119 - DNA, 15 bp, Homo sapiens
tgtgcctccaaggtc

SEQ ID NO: 1128120 - DNA, 15 bp, Homo sapiens
ctgtgcctccaaggt

SEQ ID NO: 1128121 - DNA, 15 bp, Homo sapiens
tctgtgcctccaagg

SEQ ID NO: 1128122 - DNA, 15 bp, Homo sapiens
atctgtgcctccaag

SEQ ID NO: 1128123 - DNA, 15 bp, Homo sapiens
tatctgtgcctccaa

SEQ ID NO: 1128124 - DNA, 15 bp, Homo sapiens
ctatctgtgcctcca

SEQ ID NO: 1128125 - DNA, 15 bp, Homo sapiens
actatctgtgcctcc

SEQ ID NO: 1128126 - DNA, 15 bp, Homo sapiens
aactatctgtgcctc

SEQ ID NO: 1128127 - DNA, 15 bp, Homo sapiens
caactatctgtgcct

SEQ ID NO: 1128128 - DNA, 15 bp, Homo sapiens
tcaactatctgtgcc

SEQ ID NO: 1128129 - DNA, 15 bp, Homo sapiens
ttcaactatctgtgc

SEQ ID NO: 1128130 - DNA, 15 bp, Homo sapiens
cttcaactatctgtg

SEQ ID NO: 1128131 - DNA, 15 bp, Homo sapiens
acttcaactatctgt

SEQ ID NO: 1128132 - DNA, 15 bp, Homo sapiens
tacttcaactatctg

SEQ ID NO: 1128133 - DNA, 15 bp, Homo sapiens
ttacttcaactatct

SEQ ID NO: 1128134 - DNA, 15 bp, Homo sapiens
gttacttcaactatc

SEQ ID NO: 1128135 - DNA, 15 bp, Homo sapiens
agttacttcaactat

SEQ ID NO: 1128136 - DNA, 15 bp, Homo sapiens
aagttacttcaacta

SEQ ID NO: 1128137 - DNA, 15 bp, Homo sapiens
caagttacttcaact

SEQ ID NO: 1128138 - DNA, 15 bp, Homo sapiens
gcaagttacttcaac

SEQ ID NO: 1128139 - DNA, 15 bp, Homo sapiens
ggcaagttacttcaa

SEQ ID NO: 1128140 - DNA, 15 bp, Homo sapiens
gggcaagttacttca

SEQ ID NO: 1128141 - DNA, 15 bp, Homo sapiens
tgggcaagttacttc

SEQ ID NO: 1128142 - DNA, 15 bp, Homo sapiens
attgggcaagttact

SEQ ID NO: 1128143 - DNA, 15 bp, Homo sapiens
tattgggcaagttac

SEQ ID NO: 1128144 - DNA, 15 bp, Homo sapiens
atattgggcaagtta

SEQ ID NO: 1128145 - DNA, 15 bp, Homo sapiens
gatattgggcaagtt

SEQ ID NO: 1128146 - DNA, 15 bp, Homo sapiens
tgatattgggcaagt

SEQ ID NO: 1128147 - DNA, 15 bp, Homo sapiens
gtgatattgggcaag

SEQ ID NO: 1128148 - DNA, 15 bp, Homo sapiens
agtgatattgggcaa

SEQ ID NO: 1128149 - DNA, 15 bp, Homo sapiens
aagtgatattgggca

SEQ ID NO: 1128150 - DNA, 15 bp, Homo sapiens
taagtgatattgggc

SEQ ID NO: 1128151 - DNA, 15 bp, Homo sapiens
gtaagtgatattggg

SEQ ID NO: 1128152 - DNA, 15 bp, Homo sapiens
tgtaagtgatattgg

SEQ ID NO: 1128153 - DNA, 15 bp, Homo sapiens
atgtaagtgatattg

SEQ ID NO: 1128154 - DNA, 15 bp, Homo sapiens
catgtaagtgatatt

SEQ ID NO: 1128155 - DNA, 15 bp, Homo sapiens
tcatgtaagtgatat

SEQ ID NO: 1128156 - DNA, 15 bp, Homo sapiens
ttcatgtaagtgata

SEQ ID NO: 1128157 - DNA, 15 bp, Homo sapiens
tttcatgtaagtgat

SEQ ID NO: 1128158 - DNA, 15 bp, Homo sapiens
atttcatgtaagtga

SEQ ID NO: 1128159 - DNA, 15 bp, Homo sapiens
aatttcatgtaagtg

SEQ ID NO: 1128160 - DNA, 15 bp, Homo sapiens
caatttcatgtaagt

SEQ ID NO: 1128161 - DNA, 15 bp, Homo sapiens
ccaatttcatgtaag

SEQ ID NO: 1128162 - DNA, 15 bp, Homo sapiens
gccaatttcatgtaa

SEQ ID NO: 1128163 - DNA, 15 bp, Homo sapiens
ggccaatttcatgta

SEQ ID NO: 1128164 - DNA, 15 bp, Homo sapiens
gggccaatttcatgt

SEQ ID NO: 1128165 - DNA, 15 bp, Homo sapiens
agggccaatttcatg

SEQ ID NO: 1128166 - DNA, 15 bp, Homo sapiens
gagggccaatttcat

SEQ ID NO: 1128167 - DNA, 15 bp, Homo sapiens
tgagggccaatttca

SEQ ID NO: 1128168 - DNA, 15 bp, Homo sapiens
ttgagggccaatttc

SEQ ID NO: 1128169 - DNA, 15 bp, Homo sapiens
tttgagggccaattt

SEQ ID NO: 1128170 - DNA, 15 bp, Homo sapiens
atttgagggccaatt

SEQ ID NO: 1128171 - DNA, 15 bp, Homo sapiens
catttgagggccaat

SEQ ID NO: 1128172 - DNA, 15 bp, Homo sapiens
acatttgagggccaa

SEQ ID NO: 1128173 - DNA, 15 bp, Homo sapiens
cacatttgagggcca

SEQ ID NO: 1128174 - DNA, 15 bp, Homo sapiens
acacatttgagggcc

SEQ ID NO: 1128175 - DNA, 15 bp, Homo sapiens
gacacatttgagggc

SEQ ID NO: 1128176 - DNA, 15 bp, Homo sapiens
agacacatttgaggg

SEQ ID NO: 1128177 - DNA, 15 bp, Homo sapiens
cagacacatttgagg

SEQ ID NO: 1128178 - DNA, 15 bp, Homo sapiens
tcagacacatttgag

SEQ ID NO: 1128179 - DNA, 15 bp, Homo sapiens
atcagacacatttga

SEQ ID NO: 1128180 - DNA, 15 bp, Homo sapiens
tatcagacacatttg

SEQ ID NO: 1128181 - DNA, 15 bp, Homo sapiens
gtatcagacacattt

SEQ ID NO: 1128182 - DNA, 15 bp, Homo sapiens
tgtatcagacacatt

SEQ ID NO: 1128183 - DNA, 15 bp, Homo sapiens
ttgtatcagacacat

SEQ ID NO: 1128184 - DNA, 15 bp, Homo sapiens
gttgtatcagacaca

SEQ ID NO: 1128185 - DNA, 15 bp, Homo sapiens
ggttgtatcagacac

SEQ ID NO: 1128186 - DNA, 15 bp, Homo sapiens
gggttgtatcagaca

SEQ ID NO: 1128187 - DNA, 15 bp, Homo sapiens
tgggttgtatcagac

SEQ ID NO: 1128188 - DNA, 15 bp, Homo sapiens
atgggttgtatcaga

SEQ ID NO: 1128189 - DNA, 15 bp, Homo sapiens
catgggttgtatcag

SEQ ID NO: 1128190 - DNA, 15 bp, Homo sapiens
gcatgggttgtatca

SEQ ID NO: 1128191 - DNA, 15 bp, Homo sapiens
agcatgggttgtatc

SEQ ID NO: 1128192 - DNA, 15 bp, Homo sapiens
cagcatgggttgtat

SEQ ID NO: 1128193 - DNA, 15 bp, Homo sapiens
gcagcatgggttgta

SEQ ID NO: 1128194 - DNA, 15 bp, Homo sapiens
agcagcatgggttgt

SEQ ID NO: 1128195 - DNA, 15 bp, Homo sapiens
aagcagcatgggttg

SEQ ID NO: 1128196 - DNA, 15 bp, Homo sapiens
caagcagcatgggtt

SEQ ID NO: 1128197 - DNA, 15 bp, Homo sapiens
acaagcagcatgggt

SEQ ID NO: 1128198 - DNA, 15 bp, Homo sapiens
tacaagcagcatggg

SEQ ID NO: 1128199 - DNA, 15 bp, Homo sapiens
ttacaagcagcatgg

SEQ ID NO: 1128200 - DNA, 15 bp, Homo sapiens
gttacaagcagcatg

SEQ ID NO: 1128201 - DNA, 15 bp, Homo sapiens
agttacaagcagcat

SEQ ID NO: 1128202 - DNA, 15 bp, Homo sapiens
tagttacaagcagca

SEQ ID NO: 1128203 - DNA, 15 bp, Homo sapiens
atagttacaagcagc

SEQ ID NO: 1128204 - DNA, 15 bp, Homo sapiens
gatagttacaagcag

SEQ ID NO: 1128205 - DNA, 15 bp, Homo sapiens
cgatagttacaagca

SEQ ID NO: 1128206 - DNA, 15 bp, Homo sapiens
acgatagttacaagc

SEQ ID NO: 1128207 - DNA, 15 bp, Homo sapiens
aacgatagttacaag

SEQ ID NO: 1128208 - DNA, 15 bp, Homo sapiens
aaacgatagttacaa

SEQ ID NO: 1128209 - DNA, 15 bp, Homo sapiens
aaaacgatagttaca

SEQ ID NO: 1128210 - DNA, 15 bp, Homo sapiens
taaaacgatagttac

SEQ ID NO: 1128211 - DNA, 15 bp, Homo sapiens
ttaaaacgatagtta

SEQ ID NO: 1128212 - DNA, 15 bp, Homo sapiens
tttaaaacgatagtt

SEQ ID NO: 1128213 - DNA, 15 bp, Homo sapiens
gtttaaaacgatagt

SEQ ID NO: 1128214 - DNA, 15 bp, Homo sapiens
agtttaaaacgatag

SEQ ID NO: 1128215 - DNA, 15 bp, Homo sapiens
cagtttaaaacgata

SEQ ID NO: 1128216 - DNA, 15 bp, Homo sapiens
gcagtttaaaacgat

SEQ ID NO: 1128217 - DNA, 15 bp, Homo sapiens
ggcagtttaaaacga

SEQ ID NO: 1128218 - DNA, 15 bp, Homo sapiens
tggcagtttaaaacg

SEQ ID NO: 1128219 - DNA, 15 bp, Homo sapiens
ctggcagtttaaaac

SEQ ID NO: 1128220 - DNA, 15 bp, Homo sapiens
cctggcagtttaaaa

SEQ ID NO: 1128221 - DNA, 15 bp, Homo sapiens
ccctggcagtttaaa

SEQ ID NO: 1128222 - DNA, 15 bp, Homo sapiens
accctggcagtttaa

SEQ ID NO: 1128223 - DNA, 15 bp, Homo sapiens
taccctggcagttta

SEQ ID NO: 1128224 - DNA, 15 bp, Homo sapiens
ttaccctggcagttt

SEQ ID NO: 1128225 - DNA, 15 bp, Homo sapiens
tttaccctggcagtt

SEQ ID NO: 1128226 - DNA, 15 bp, Homo sapiens
gtttaccctggcagt

SEQ ID NO: 1128227 - DNA, 15 bp, Homo sapiens
agtttaccctggcag

SEQ ID NO: 1128228 - DNA, 15 bp, Homo sapiens
aagtttaccctggca

SEQ ID NO: 1128229 - DNA, 15 bp, Homo sapiens
caagtttaccctggc

SEQ ID NO: 1128230 - DNA, 15 bp, Homo sapiens
ccaagtttaccctgg

SEQ ID NO: 1128231 - DNA, 15 bp, Homo sapiens
tccaagtttaccctg

SEQ ID NO: 1128232 - DNA, 15 bp, Homo sapiens
gtccaagtttaccct

SEQ ID NO: 1128233 - DNA, 15 bp, Homo sapiens
tgtccaagtttaccc

SEQ ID NO: 1128234 - DNA, 15 bp, Homo sapiens
gtgtccaagtttacc

SEQ ID NO: 1128235 - DNA, 15 bp, Homo sapiens
tgtgtccaagtttac

SEQ ID NO: 1128236 - DNA, 15 bp, Homo sapiens
gtgtgtccaagttta

SEQ ID NO: 1128237 - DNA, 15 bp, Homo sapiens
agtgtgtccaagttt

SEQ ID NO: 1128238 - DNA, 15 bp, Homo sapiens
aagtgtgtccaagtt

SEQ ID NO: 1128239 - DNA, 15 bp, Homo sapiens
caagtgtgtccaagt

SEQ ID NO: 1128240 - DNA, 15 bp, Homo sapiens
tcaagtgtgtccaag

SEQ ID NO: 1128241 - DNA, 15 bp, Homo sapiens
ctcaagtgtgtccaa

SEQ ID NO: 1128242 - DNA, 15 bp, Homo sapiens
gctcaagtgtgtcca

SEQ ID NO: 1128243 - DNA, 15 bp, Homo sapiens
agctcaagtgtgtcc

SEQ ID NO: 1128244 - DNA, 15 bp, Homo sapiens
tagctcaagtgtgtc

SEQ ID NO: 1128245 - DNA, 15 bp, Homo sapiens
ttagctcaagtgtgt

SEQ ID NO: 1128246 - DNA, 15 bp, Homo sapiens
cttagctcaagtgtg

SEQ ID NO: 1128247 - DNA, 15 bp, Homo sapiens
tcttagctcaagtgt

SEQ ID NO: 1128248 - DNA, 15 bp, Homo sapiens
ttcttagctcaagtg

SEQ ID NO: 1128249 - DNA, 15 bp, Homo sapiens
tttcttagctcaagt

SEQ ID NO: 1128250 - DNA, 15 bp, Homo sapiens
ttttcttagctcaag

SEQ ID NO: 1128251 - DNA, 15 bp, Homo sapiens
tttttcttagctcaa

SEQ ID NO: 1128252 - DNA, 15 bp, Homo sapiens
ctttttcttagctca

SEQ ID NO: 1128253 - DNA, 15 bp, Homo sapiens
gctttttcttagctc

SEQ ID NO: 1128254 - DNA, 15 bp, Homo sapiens
agctttttcttagct

SEQ ID NO: 1128255 - DNA, 15 bp, Homo sapiens
aagctttttcttagc

SEQ ID NO: 1128256 - DNA, 15 bp, Homo sapiens
aaagctttttcttag

SEQ ID NO: 1128257 - DNA, 15 bp, Homo sapiens
aaaagctttttctta

SEQ ID NO: 1128258 - DNA, 15 bp, Homo sapiens
taaaagctttttctt

SEQ ID NO: 1128259 - DNA, 15 bp, Homo sapiens
ctaaaagctttttct

SEQ ID NO: 1128260 - DNA, 15 bp, Homo sapiens
tctaaaagctttttc

SEQ ID NO: 1128261 - DNA, 15 bp, Homo sapiens
atctaaaagcttttt

SEQ ID NO: 1128262 - DNA, 15 bp, Homo sapiens
aatctaaaagctttt

SEQ ID NO: 1128263 - DNA, 15 bp, Homo sapiens
aaatctaaaagcttt

SEQ ID NO: 1128264 - DNA, 15 bp, Homo sapiens
aaaatctaaaagctt

SEQ ID NO: 1128265 - DNA, 15 bp, Homo sapiens
aaaaatctaaaagct

SEQ ID NO: 1128266 - DNA, 15 bp, Homo sapiens
caaaaatctaaaagc

SEQ ID NO: 1128267 - DNA, 15 bp, Homo sapiens
gcaaaaatctaaaag

SEQ ID NO: 1128268 - DNA, 15 bp, Homo sapiens
tgcaaaaatctaaaa

SEQ ID NO: 1128269 - DNA, 15 bp, Homo sapiens
ttgcaaaaatctaaa

SEQ ID NO: 1128270 - DNA, 15 bp, Homo sapiens
tttgcaaaaatctaa

SEQ ID NO: 1128271 - DNA, 15 bp, Homo sapiens
atttgcaaaaatcta

SEQ ID NO: 1128272 - DNA, 15 bp, Homo sapiens
aatttgcaaaaatct

SEQ ID NO: 1128273 - DNA, 15 bp, Homo sapiens
taatttgcaaaaatc

SEQ ID NO: 1128274 - DNA, 15 bp, Homo sapiens
ttaatttgcaaaaat

SEQ ID NO: 1128275 - DNA, 15 bp, Homo sapiens
attaatttgcaaaaa

SEQ ID NO: 1128276 - DNA, 15 bp, Homo sapiens
cattaatttgcaaaa

SEQ ID NO: 1128277 - DNA, 15 bp, Homo sapiens
acattaatttgcaaa

SEQ ID NO: 1128278 - DNA, 15 bp, Homo sapiens
cacattaatttgcaa

SEQ ID NO: 1128279 - DNA, 15 bp, Homo sapiens
tcacattaatttgca

SEQ ID NO: 1128280 - DNA, 15 bp, Homo sapiens
ttcacattaatttgc

SEQ ID NO: 1128281 - DNA, 15 bp, Homo sapiens
tttcacattaatttg

SEQ ID NO: 1128282 - DNA, 15 bp, Homo sapiens
ctttcacattaattt

SEQ ID NO: 1128283 - DNA, 15 bp, Homo sapiens
tctttcacattaatt

SEQ ID NO: 1128284 - DNA, 15 bp, Homo sapiens
atctttcacattaat

SEQ ID NO: 1128285 - DNA, 15 bp, Homo sapiens
tatctttcacattaa

SEQ ID NO: 1128286 - DNA, 15 bp, Homo sapiens
atatctttcacatta

SEQ ID NO: 1128287 - DNA, 15 bp, Homo sapiens
catatctttcacatt

SEQ ID NO: 1128288 - DNA, 15 bp, Homo sapiens
gcatatctttcacat

SEQ ID NO: 1128289 - DNA, 15 bp, Homo sapiens
agcatatctttcaca

SEQ ID NO: 1128290 - DNA, 15 bp, Homo sapiens
aagcatatctttcac

SEQ ID NO: 1128291 - DNA, 15 bp, Homo sapiens
aaagcatatctttca

SEQ ID NO: 1128292 - DNA, 15 bp, Homo sapiens
taaagcatatctttc

SEQ ID NO: 1128293 - DNA, 15 bp, Homo sapiens
ataaagcatatcttt

SEQ ID NO: 1128294 - DNA, 15 bp, Homo sapiens
cataaagcatatctt

SEQ ID NO: 1128295 - DNA, 15 bp, Homo sapiens
acataaagcatatct

SEQ ID NO: 1128296 - DNA, 15 bp, Homo sapiens
cacataaagcatatc

SEQ ID NO: 1128297 - DNA, 15 bp, Homo sapiens
ccacataaagcatat

SEQ ID NO: 1128298 - DNA, 15 bp, Homo sapiens
tccacataaagcata

SEQ ID NO: 1128299 - DNA, 15 bp, Homo sapiens
atccacataaagcat

SEQ ID NO: 1128300 - DNA, 15 bp, Homo sapiens
tatccacataaagca

SEQ ID NO: 1128301 - DNA, 15 bp, Homo sapiens
atatccacataaagc

SEQ ID NO: 1128302 - DNA, 15 bp, Homo sapiens
tatatccacataaag

SEQ ID NO: 1128303 - DNA, 15 bp, Homo sapiens
ttatatccacataaa

SEQ ID NO: 1128304 - DNA, 15 bp, Homo sapiens
attatatccacataa

SEQ ID NO: 1128305 - DNA, 15 bp, Homo sapiens
tattatatccacata

SEQ ID NO: 1128306 - DNA, 15 bp, Homo sapiens
atattatatccacat

SEQ ID NO: 1128307 - DNA, 15 bp, Homo sapiens
gatattatatccaca

SEQ ID NO: 1128308 - DNA, 15 bp, Homo sapiens
agatattatatccac

SEQ ID NO: 1128309 - DNA, 15 bp, Homo sapiens
aagatattatatcca

SEQ ID NO: 1128310 - DNA, 15 bp, Homo sapiens
gaagatattatatcc

SEQ ID NO: 1128311 - DNA, 15 bp, Homo sapiens
agaagatattatatc

SEQ ID NO: 1128312 - DNA, 15 bp, Homo sapiens
tagaagatattatat

SEQ ID NO: 1128313 - DNA, 15 bp, Homo sapiens
ttagaagatattata

SEQ ID NO: 1128314 - DNA, 15 bp, Homo sapiens
tttagaagatattat

SEQ ID NO: 1128315 - DNA, 15 bp, Homo sapiens
atttagaagatatta

SEQ ID NO: 1128316 - DNA, 15 bp, Homo sapiens
aatttagaagatatt

SEQ ID NO: 1128317 - DNA, 15 bp, Homo sapiens
aaatttagaagatat

SEQ ID NO: 1128318 - DNA, 15 bp, Homo sapiens
gaaatttagaagata

SEQ ID NO: 1128319 - DNA, 15 bp, Homo sapiens
cgaaatttagaagat

SEQ ID NO: 1128320 - DNA, 15 bp, Homo sapiens
ccgaaatttagaaga

SEQ ID NO: 1128321 - DNA, 15 bp, Homo sapiens
cccgaaatttagaag

SEQ ID NO: 1128322 - DNA, 15 bp, Homo sapiens
ccccgaaatttagaa

SEQ ID NO: 1128323 - DNA, 15 bp, Homo sapiens
tccccgaaatttaga

SEQ ID NO: 1128324 - DNA, 15 bp, Homo sapiens
atccccgaaatttag

SEQ ID NO: 1128325 - DNA, 15 bp, Homo sapiens
catccccgaaattta

SEQ ID NO: 1128326 - DNA, 15 bp, Homo sapiens
ccatccccgaaattt

SEQ ID NO: 1128327 - DNA, 15 bp, Homo sapiens
accatccccgaaatt

SEQ ID NO: 1128328 - DNA, 15 bp, Homo sapiens
taccatccccgaaat

SEQ ID NO: 1128329 - DNA, 15 bp, Homo sapiens
ctaccatccccgaaa

SEQ ID NO: 1128330 - DNA, 15 bp, Homo sapiens
actaccatccccgaa

SEQ ID NO: 1128331 - DNA, 15 bp, Homo sapiens
gactaccatccccga

SEQ ID NO: 1128332 - DNA, 15 bp, Homo sapiens
ggactaccatccccg

SEQ ID NO: 1128333 - DNA, 15 bp, Homo sapiens
aggactaccatcccc

SEQ ID NO: 1128334 - DNA, 15 bp, Homo sapiens
taggactaccatccc

SEQ ID NO: 1128335 - DNA, 15 bp, Homo sapiens
ctaggactaccatcc

SEQ ID NO: 1128336 - DNA, 15 bp, Homo sapiens
tctaggactaccatc

SEQ ID NO: 1128337 - DNA, 15 bp, Homo sapiens
ttctaggactaccat

SEQ ID NO: 1128338 - DNA, 15 bp, Homo sapiens
tttctaggactacca

SEQ ID NO: 1128339 - DNA, 15 bp, Homo sapiens
atttctaggactacc

SEQ ID NO: 1128340 - DNA, 15 bp, Homo sapiens
catttctaggactac

SEQ ID NO: 1128341 - DNA, 15 bp, Homo sapiens
acatttctaggacta

SEQ ID NO: 1128342 - DNA, 15 bp, Homo sapiens
tacatttctaggact

SEQ ID NO: 1128343 - DNA, 15 bp, Homo sapiens
ttacatttctaggac

SEQ ID NO: 1128344 - DNA, 15 bp, Homo sapiens
attacatttctagga

SEQ ID NO: 1128345 - DNA, 15 bp, Homo sapiens
gattacatttctagg

SEQ ID NO: 1128346 - DNA, 15 bp, Homo sapiens
ggattacatttctag

SEQ ID NO: 1128347 - DNA, 15 bp, Homo sapiens
aggattacatttcta

SEQ ID NO: 1128348 - DNA, 15 bp, Homo sapiens
caggattacatttct

SEQ ID NO: 1128349 - DNA, 15 bp, Homo sapiens
gcaggattacatttc

SEQ ID NO: 1128350 - DNA, 15 bp, Homo sapiens
ggcaggattacattt

SEQ ID NO: 1128351 - DNA, 15 bp, Homo sapiens
gggcaggattacatt

SEQ ID NO: 1128352 - DNA, 15 bp, Homo sapiens
agggcaggattacat

SEQ ID NO: 1128353 - DNA, 15 bp, Homo sapiens
tagggcaggattaca

SEQ ID NO: 1128354 - DNA, 15 bp, Homo sapiens
ctagggcaggattac

SEQ ID NO: 1128355 - DNA, 15 bp, Homo sapiens
tcgctacaggtactt

SEQ ID NO: 1128356 - DNA, 15 bp, Homo sapiens
atcgctacaggtact

SEQ ID NO: 1128357 - DNA, 15 bp, Homo sapiens
aatcgctacaggtac

SEQ ID NO: 1128358 - DNA, 15 bp, Homo sapiens
aaatcgctacaggta

SEQ ID NO: 1128359 - DNA, 15 bp, Homo sapiens
aaaatcgctacaggt

SEQ ID NO: 1128360 - DNA, 15 bp, Homo sapiens
aaaaatcgctacagg

SEQ ID NO: 1128361 - DNA, 15 bp, Homo sapiens
taaaaatcgctacag

SEQ ID NO: 1128362 - DNA, 15 bp, Homo sapiens
ataaaaatcgctaca

SEQ ID NO: 1128363 - DNA, 15 bp, Homo sapiens
gataaaaatcgctac

SEQ ID NO: 1128364 - DNA, 15 bp, Homo sapiens
tgataaaaatcgcta

SEQ ID NO: 1128365 - DNA, 15 bp, Homo sapiens
atgataaaaatcgct

SEQ ID NO: 1128366 - DNA, 15 bp, Homo sapiens
aatgataaaaatcgc

SEQ ID NO: 1128367 - DNA, 15 bp, Homo sapiens
gaatgataaaaatcg

SEQ ID NO: 1128368 - DNA, 15 bp, Homo sapiens
tgaatgataaaaatc

SEQ ID NO: 1128369 - DNA, 15 bp, Homo sapiens
gtgaatgataaaaat

SEQ ID NO: 1128370 - DNA, 15 bp, Homo sapiens
tgtgaatgataaaaa

SEQ ID NO: 1128371 - DNA, 15 bp, Homo sapiens
ttgtgaatgataaaa

SEQ ID NO: 1128372 - DNA, 15 bp, Homo sapiens
cttgtgaatgataaa

SEQ ID NO: 1128373 - DNA, 15 bp, Homo sapiens
acttgtgaatgataa

SEQ ID NO: 1128374 - DNA, 15 bp, Homo sapiens
tacttgtgaatgata

SEQ ID NO: 1128375 - DNA, 15 bp, Homo sapiens
atacttgtgaatgat

SEQ ID NO: 1128376 - DNA, 15 bp, Homo sapiens
tatacttgtgaatga

SEQ ID NO: 1128377 - DNA, 15 bp, Homo sapiens
atatacttgtgaatg

SEQ ID NO: 1128378 - DNA, 15 bp, Homo sapiens
gatatacttgtgaat

SEQ ID NO: 1128379 - DNA, 15 bp, Homo sapiens
tgatatacttgtgaa

SEQ ID NO: 1128380 - DNA, 15 bp, Homo sapiens
gtgatatacttgtga

SEQ ID NO: 1128381 - DNA, 15 bp, Homo sapiens
tgtgatatacttgtg

SEQ ID NO: 1128382 - DNA, 15 bp, Homo sapiens
ttgtgatatacttgt

SEQ ID NO: 1128383 - DNA, 15 bp, Homo sapiens
cttgtgatatacttg

SEQ ID NO: 1128384 - DNA, 15 bp, Homo sapiens
acttgtgatatactt

SEQ ID NO: 1128385 - DNA, 15 bp, Homo sapiens
tacttgtgatatact

SEQ ID NO: 1128386 - DNA, 15 bp, Homo sapiens
ttacttgtgatatac

SEQ ID NO: 1128387 - DNA, 15 bp, Homo sapiens
cttacttgtgatata

SEQ ID NO: 1128388 - DNA, 15 bp, Homo sapiens
acttacttgtgatat

SEQ ID NO: 1128389 - DNA, 15 bp, Homo sapiens
aacttacttgtgata

SEQ ID NO: 1128390 - DNA, 15 bp, Homo sapiens
taacttacttgtgat

SEQ ID NO: 1128391 - DNA, 15 bp, Homo sapiens
ctaacttacttgtga

SEQ ID NO: 1128392 - DNA, 15 bp, Homo sapiens
tctaacttacttgtg

SEQ ID NO: 1128393 - DNA, 15 bp, Homo sapiens
ttctaacttacttgt

SEQ ID NO: 1128394 - DNA, 15 bp, Homo sapiens
attctaacttacttg

SEQ ID NO: 1128395 - DNA, 15 bp, Homo sapiens
aattctaacttactt

SEQ ID NO: 1128396 - DNA, 15 bp, Homo sapiens
aaattctaacttact

SEQ ID NO: 1128397 - DNA, 15 bp, Homo sapiens
caaattctaacttac

SEQ ID NO: 1128398 - DNA, 15 bp, Homo sapiens
tcaaattctaactta

SEQ ID NO: 1128399 - DNA, 15 bp, Homo sapiens
ctcaaattctaactt

SEQ ID NO: 1128400 - DNA, 15 bp, Homo sapiens
tctcaaattctaact

SEQ ID NO: 1128401 - DNA, 15 bp, Homo sapiens
ttctcaaattctaac

SEQ ID NO: 1128402 - DNA, 15 bp, Homo sapiens
gttctcaaattctaa

SEQ ID NO: 1128403 - DNA, 15 bp, Homo sapiens
agttctcaaattcta

SEQ ID NO: 1128404 - DNA, 15 bp, Homo sapiens
cagttctcaaattct

SEQ ID NO: 1128405 - DNA, 15 bp, Homo sapiens
acagttctcaaattc

SEQ ID NO: 1128406 - DNA, 15 bp, Homo sapiens
cacagttctcaaatt

SEQ ID NO: 1128407 - DNA, 15 bp, Homo sapiens
acacagttctcaaat

SEQ ID NO: 1128408 - DNA, 15 bp, Homo sapiens
aacacagttctcaaa

SEQ ID NO: 1128409 - DNA, 15 bp, Homo sapiens
gaacacagttctcaa

SEQ ID NO: 1128410 - DNA, 15 bp, Homo sapiens
agaacacagttctca

SEQ ID NO: 1128411 - DNA, 15 bp, Homo sapiens
tagaacacagttctc

SEQ ID NO: 1128412 - DNA, 15 bp, Homo sapiens
ctagaacacagttct

SEQ ID NO: 1128413 - DNA, 15 bp, Homo sapiens
tctagaacacagttc

SEQ ID NO: 1128414 - DNA, 15 bp, Homo sapiens
atctagaacacagtt

SEQ ID NO: 1128415 - DNA, 15 bp, Homo sapiens
gatctagaacacagt

SEQ ID NO: 1128416 - DNA, 15 bp, Homo sapiens
agatctagaacacag

SEQ ID NO: 1128417 - DNA, 15 bp, Homo sapiens
gagatctagaacaca

SEQ ID NO: 1128418 - DNA, 15 bp, Homo sapiens
agagatctagaacac

SEQ ID NO: 1128419 - DNA, 15 bp, Homo sapiens
cagagatctagaaca

SEQ ID NO: 1128420 - DNA, 15 bp, Homo sapiens
tcagagatctagaac

SEQ ID NO: 1128421 - DNA, 15 bp, Homo sapiens
ctcagagatctagaa

SEQ ID NO: 1128422 - DNA, 15 bp, Homo sapiens
cctcagagatctaga

SEQ ID NO: 1128423 - DNA, 15 bp, Homo sapiens
tcctcagagatctag

SEQ ID NO: 1128424 - DNA, 15 bp, Homo sapiens
ctcctcagagatcta

SEQ ID NO: 1128425 - DNA, 15 bp, Homo sapiens
tctcctcagagatct

SEQ ID NO: 1128426 - DNA, 15 bp, Homo sapiens
atctcctcagagatc

SEQ ID NO: 1128427 - DNA, 15 bp, Homo sapiens
catctcctcagagat

SEQ ID NO: 1128428 - DNA, 15 bp, Homo sapiens
gcatctcctcagaga

SEQ ID NO: 1128429 - DNA, 15 bp, Homo sapiens
tgcatctcctcagag

SEQ ID NO: 1128430 - DNA, 15 bp, Homo sapiens
ctgcatctcctcaga

SEQ ID NO: 1128431 - DNA, 15 bp, Homo sapiens
actgcatctcctcag

SEQ ID NO: 1128432 - DNA, 15 bp, Homo sapiens
gactgcatctcctca

SEQ ID NO: 1128433 - DNA, 15 bp, Homo sapiens
tgactgcatctcctc

SEQ ID NO: 1128434 - DNA, 15 bp, Homo sapiens
ctgactgcatctcct

SEQ ID NO: 1128435 - DNA, 15 bp, Homo sapiens
tctgactgcatctcc

SEQ ID NO: 1128436 - DNA, 15 bp, Homo sapiens
atctgactgcatctc

SEQ ID NO: 1128437 - DNA, 15 bp, Homo sapiens
aatctgactgcatct

SEQ ID NO: 1128438 - DNA, 15 bp, Homo sapiens
aaatctgactgcatc

SEQ ID NO: 1128439 - DNA, 15 bp, Homo sapiens
gaaatctgactgcat

SEQ ID NO: 1128440 - DNA, 15 bp, Homo sapiens
agaaatctgactgca

SEQ ID NO: 1128441 - DNA, 15 bp, Homo sapiens
cagaaatctgactgc

SEQ ID NO: 1128442 - DNA, 15 bp, Homo sapiens
tcagaaatctgactg

SEQ ID NO: 1128443 - DNA, 15 bp, Homo sapiens
ttcagaaatctgact

SEQ ID NO: 1128444 - DNA, 15 bp, Homo sapiens
gttcagaaatctgac

SEQ ID NO: 1128445 - DNA, 15 bp, Homo sapiens
agttcagaaatctga

SEQ ID NO: 1128446 - DNA, 15 bp, Homo sapiens
cagttcagaaatctg

SEQ ID NO: 1128447 - DNA, 15 bp, Homo sapiens
acagttcagaaatct

SEQ ID NO: 1128448 - DNA, 15 bp, Homo sapiens
gacagttcagaaatc

SEQ ID NO: 1128449 - DNA, 15 bp, Homo sapiens
agacagttcagaaat

SEQ ID NO: 1128450 - DNA, 15 bp, Homo sapiens
gagacagttcagaaa

SEQ ID NO: 1128451 - DNA, 15 bp, Homo sapiens
tgagacagttcagaa

SEQ ID NO: 1128452 - DNA, 15 bp, Homo sapiens
ctgagacagttcaga

SEQ ID NO: 1128453 - DNA, 15 bp, Homo sapiens
gctgagacagttcag

SEQ ID NO: 1128454 - DNA, 15 bp, Homo sapiens
tgctgagacagttca

SEQ ID NO: 1128455 - DNA, 15 bp, Homo sapiens
ttgctgagacagttc

SEQ ID NO: 1128456 - DNA, 15 bp, Homo sapiens
tttgctgagacagtt

SEQ ID NO: 1128457 - DNA, 15 bp, Homo sapiens
atttgctgagacagt

SEQ ID NO: 1128458 - DNA, 15 bp, Homo sapiens
catttgctgagacag

SEQ ID NO: 1128459 - DNA, 15 bp, Homo sapiens
ccatttgctgagaca

SEQ ID NO: 1128460 - DNA, 15 bp, Homo sapiens
accatttgctgagac

SEQ ID NO: 1128461 - DNA, 15 bp, Homo sapiens
taccatttgctgaga

SEQ ID NO: 1128462 - DNA, 15 bp, Homo sapiens
ttaccatttgctgag

SEQ ID NO: 1128463 - DNA, 15 bp, Homo sapiens
cttaccatttgctga

SEQ ID NO: 1128464 - DNA, 15 bp, Homo sapiens
acttaccatttgctg

SEQ ID NO: 1128465 - DNA, 15 bp, Homo sapiens
tacttaccatttgct

SEQ ID NO: 1128466 - DNA, 15 bp, Homo sapiens
ttacttaccatttgc

SEQ ID NO: 1128467 - DNA, 15 bp, Homo sapiens
gttacttaccatttg

SEQ ID NO: 1128468 - DNA, 15 bp, Homo sapiens
agttacttaccattt

SEQ ID NO: 1128469 - DNA, 15 bp, Homo sapiens
aagttacttaccatt

SEQ ID NO: 1128470 - DNA, 15 bp, Homo sapiens
taagttacttaccat

SEQ ID NO: 1128471 - DNA, 15 bp, Homo sapiens
ctaagttacttacca

SEQ ID NO: 1128472 - DNA, 15 bp, Homo sapiens
tctaagttacttacc

SEQ ID NO: 1128473 - DNA, 15 bp, Homo sapiens
ctctaagttacttac

SEQ ID NO: 1128474 - DNA, 15 bp, Homo sapiens
gctctaagttactta

SEQ ID NO: 1128475 - DNA, 15 bp, Homo sapiens
agctctaagttactt

SEQ ID NO: 1128476 - DNA, 15 bp, Homo sapiens
tagctctaagttact

SEQ ID NO: 1128477 - DNA, 15 bp, Homo sapiens
ctagctctaagttac

SEQ ID NO: 1128478 - DNA, 15 bp, Homo sapiens
actagctctaagtta

SEQ ID NO: 1128479 - DNA, 15 bp, Homo sapiens
tactagctctaagtt

SEQ ID NO: 1128480 - DNA, 15 bp, Homo sapiens
ttactagctctaagt

SEQ ID NO: 1128481 - DNA, 15 bp, Homo sapiens
attactagctctaag

SEQ ID NO: 1128482 - DNA, 15 bp, Homo sapiens
aattactagctctaa

SEQ ID NO: 1128483 - DNA, 15 bp, Homo sapiens
taattactagctcta

SEQ ID NO: 1128484 - DNA, 15 bp, Homo sapiens
ttaattactagctct

SEQ ID NO: 1128485 - DNA, 15 bp, Homo sapiens
attaattactagctc

SEQ ID NO: 1128486 - DNA, 15 bp, Homo sapiens
tattaattactagct

SEQ ID NO: 1128487 - DNA, 15 bp, Homo sapiens
ttattaattactagc

SEQ ID NO: 1128488 - DNA, 15 bp, Homo sapiens
gttattaattactag

SEQ ID NO: 1128489 - DNA, 15 bp, Homo sapiens
ggttattaattacta

SEQ ID NO: 1128490 - DNA, 15 bp, Homo sapiens
aggttattaattact

SEQ ID NO: 1128491 - DNA, 15 bp, Homo sapiens
caggttattaattac

SEQ ID NO: 1128492 - DNA, 15 bp, Homo sapiens
acaggttattaatta

SEQ ID NO: 1128493 - DNA, 15 bp, Homo sapiens
gacaggttattaatt

SEQ ID NO: 1128494 - DNA, 15 bp, Homo sapiens
ggacaggttattaat

SEQ ID NO: 1128495 - DNA, 15 bp, Homo sapiens
aggacaggttattaa

SEQ ID NO: 1128496 - DNA, 15 bp, Homo sapiens
aaggacaggttatta

SEQ ID NO: 1128497 - DNA, 15 bp, Homo sapiens
aaaggacaggttatt

SEQ ID NO: 1128498 - DNA, 15 bp, Homo sapiens
caaaggacaggttat

SEQ ID NO: 1128499 - DNA, 15 bp, Homo sapiens
tcaaaggacaggtta

SEQ ID NO: 1128500 - DNA, 15 bp, Homo sapiens
atcaaaggacaggtt

SEQ ID NO: 1128501 - DNA, 15 bp, Homo sapiens
aatcaaaggacaggt

SEQ ID NO: 1128502 - DNA, 15 bp, Homo sapiens
aaatcaaaggacagg

SEQ ID NO: 1128503 - DNA, 15 bp, Homo sapiens
gaaatcaaaggacag

SEQ ID NO: 1128504 - DNA, 15 bp, Homo sapiens
agaaatcaaaggaca

SEQ ID NO: 1128505 - DNA, 15 bp, Homo sapiens
cagaaatcaaaggac

SEQ ID NO: 1128506 - DNA, 15 bp, Homo sapiens
tcagaaatcaaagga

SEQ ID NO: 1128507 - DNA, 15 bp, Homo sapiens
atcagaaatcaaagg

SEQ ID NO: 1128508 - DNA, 15 bp, Homo sapiens
aatcagaaatcaaag

SEQ ID NO: 1128509 - DNA, 15 bp, Homo sapiens
gaatcagaaatcaaa

SEQ ID NO: 1128510 - DNA, 15 bp, Homo sapiens
tgaatcagaaatcaa

SEQ ID NO: 1128511 - DNA, 15 bp, Homo sapiens
ctgaatcagaaatca

SEQ ID NO: 1128512 - DNA, 15 bp, Homo sapiens
gctgaatcagaaatc

SEQ ID NO: 1128513 - DNA, 15 bp, Homo sapiens
ggctgaatcagaaat

SEQ ID NO: 1128514 - DNA, 15 bp, Homo sapiens
tggctgaatcagaaa

SEQ ID NO: 1128515 - DNA, 15 bp, Homo sapiens
ttggctgaatcagaa

SEQ ID NO: 1128516 - DNA, 15 bp, Homo sapiens
cttggctgaatcaga

SEQ ID NO: 1128517 - DNA, 15 bp, Homo sapiens
tcttggctgaatcag

SEQ ID NO: 1128518 - DNA, 15 bp, Homo sapiens
ttcttggctgaatca

SEQ ID NO: 1128519 - DNA, 15 bp, Homo sapiens
attcttggctgaatc

SEQ ID NO: 1128520 - DNA, 15 bp, Homo sapiens
cattcttggctgaat

SEQ ID NO: 1128521 - DNA, 15 bp, Homo sapiens
ccattcttggctgaa

SEQ ID NO: 1128522 - DNA, 15 bp, Homo sapiens
gccattcttggctga

SEQ ID NO: 1128523 - DNA, 15 bp, Homo sapiens
ggccattcttggctg

SEQ ID NO: 1128524 - DNA, 15 bp, Homo sapiens
tggccattcttggct

SEQ ID NO: 1128525 - DNA, 15 bp, Homo sapiens
atggccattcttggc

SEQ ID NO: 1128526 - DNA, 15 bp, Homo sapiens
tatggccattcttgg

SEQ ID NO: 1128527 - DNA, 15 bp, Homo sapiens
atatggccattcttg

SEQ ID NO: 1128528 - DNA, 15 bp, Homo sapiens
aatatggccattctt

SEQ ID NO: 1128529 - DNA, 15 bp, Homo sapiens
aaatatggccattct

SEQ ID NO: 1128530 - DNA, 15 bp, Homo sapiens
caaatatggccattc

SEQ ID NO: 1128531 - DNA, 15 bp, Homo sapiens
ccaaatatggccatt

SEQ ID NO: 1128532 - DNA, 15 bp, Homo sapiens
cccaaatatggccat

SEQ ID NO: 1128533 - DNA, 15 bp, Homo sapiens
tcccaaatatggcca

SEQ ID NO: 1128534 - DNA, 15 bp, Homo sapiens
tttcccaaatatggc

SEQ ID NO: 1128535 - DNA, 15 bp, Homo sapiens
ctttcccaaatatgg

SEQ ID NO: 1128536 - DNA, 15 bp, Homo sapiens
cctttcccaaatatg

SEQ ID NO: 1128537 - DNA, 15 bp, Homo sapiens
gcctttcccaaatat

SEQ ID NO: 1128538 - DNA, 15 bp, Homo sapiens
tgcctttcccaaata

SEQ ID NO: 1128539 - DNA, 15 bp, Homo sapiens
ctgcctttcccaaat

SEQ ID NO: 1128540 - DNA, 15 bp, Homo sapiens
tctgcctttcccaaa

SEQ ID NO: 1128541 - DNA, 15 bp, Homo sapiens
atctgcctttcccaa

SEQ ID NO: 1128542 - DNA, 15 bp, Homo sapiens
gatctgcctttccca

SEQ ID NO: 1128543 - DNA, 15 bp, Homo sapiens
agatctgcctttccc

SEQ ID NO: 1128544 - DNA, 15 bp, Homo sapiens
cagatctgcctttcc

SEQ ID NO: 1128545 - DNA, 15 bp, Homo sapiens
ccagatctgcctttc

SEQ ID NO: 1128546 - DNA, 15 bp, Homo sapiens
tccagatctgccttt

SEQ ID NO: 1128547 - DNA, 15 bp, Homo sapiens
ctccagatctgcctt

SEQ ID NO: 1128548 - DNA, 15 bp, Homo sapiens
tctccagatctgcct

SEQ ID NO: 1128549 - DNA, 15 bp, Homo sapiens
ctctccagatctgcc

SEQ ID NO: 1128550 - DNA, 15 bp, Homo sapiens
actctccagatctgc

SEQ ID NO: 1128551 - DNA, 15 bp, Homo sapiens
tactctccagatctg

SEQ ID NO: 1128552 - DNA, 15 bp, Homo sapiens
ttactctccagatct

SEQ ID NO: 1128553 - DNA, 15 bp, Homo sapiens
gttactctccagatc

SEQ ID NO: 1128554 - DNA, 15 bp, Homo sapiens
ggttactctccagat

SEQ ID NO: 1128555 - DNA, 15 bp, Homo sapiens
tggttactctccaga

SEQ ID NO: 1128556 - DNA, 15 bp, Homo sapiens
gtggttactctccag

SEQ ID NO: 1128557 - DNA, 15 bp, Homo sapiens
cgtggttactctcca

SEQ ID NO: 1128558 - DNA, 15 bp, Homo sapiens
acgtggttactctcc

SEQ ID NO: 1128559 - DNA, 15 bp, Homo sapiens
aacgtggttactctc

SEQ ID NO: 1128560 - DNA, 15 bp, Homo sapiens
aaacgtggttactct

SEQ ID NO: 1128561 - DNA, 15 bp, Homo sapiens
aaaacgtggttactc

SEQ ID NO: 1128562 - DNA, 15 bp, Homo sapiens
gaaaacgtggttact

SEQ ID NO: 1128563 - DNA, 15 bp, Homo sapiens
tgaaaacgtggttac

SEQ ID NO: 1128564 - DNA, 15 bp, Homo sapiens
atgaaaacgtggtta

SEQ ID NO: 1128565 - DNA, 15 bp, Homo sapiens
aatgaaaacgtggtt

SEQ ID NO: 1128566 - DNA, 15 bp, Homo sapiens
gaatgaaaacgtggt

SEQ ID NO: 1128567 - DNA, 15 bp, Homo sapiens
tgaatgaaaacgtgg

SEQ ID NO: 1128568 - DNA, 15 bp, Homo sapiens
atgaatgaaaacgtg

SEQ ID NO: 1128569 - DNA, 15 bp, Homo sapiens
aatgaatgaaaacgt

SEQ ID NO: 1128570 - DNA, 15 bp, Homo sapiens
aaatgaatgaaaacg

SEQ ID NO: 1128571 - DNA, 15 bp, Homo sapiens
taaatgaatgaaaac

SEQ ID NO: 1128572 - DNA, 15 bp, Homo sapiens
gtaaatgaatgaaaa

SEQ ID NO: 1128573 - DNA, 15 bp, Homo sapiens
ggtaaatgaatgaaa

SEQ ID NO: 1128574 - DNA, 15 bp, Homo sapiens
tggtaaatgaatgaa

SEQ ID NO: 1128575 - DNA, 15 bp, Homo sapiens
gtggtaaatgaatga

SEQ ID NO: 1128576 - DNA, 15 bp, Homo sapiens
agtggtaaatgaatg

SEQ ID NO: 1128577 - DNA, 15 bp, Homo sapiens
aagtggtaaatgaat

SEQ ID NO: 1128578 - DNA, 15 bp, Homo sapiens
gaagtggtaaatgaa

SEQ ID NO: 1128579 - DNA, 15 bp, Homo sapiens
agaagtggtaaatga

SEQ ID NO: 1128580 - DNA, 15 bp, Homo sapiens
tagaagtggtaaatg

SEQ ID NO: 1128581 - DNA, 15 bp, Homo sapiens
ctagaagtggtaaat

SEQ ID NO: 1128582 - DNA, 15 bp, Homo sapiens
cctagaagtggtaaa

SEQ ID NO: 1128583 - DNA, 15 bp, Homo sapiens
gcctagaagtggtaa

SEQ ID NO: 1128584 - DNA, 15 bp, Homo sapiens
ggcctagaagtggta

SEQ ID NO: 1128585 - DNA, 15 bp, Homo sapiens
gggcctagaagtggt

SEQ ID NO: 1128586 - DNA, 15 bp, Homo sapiens
ggggcctagaagtgg

SEQ ID NO: 1128587 - DNA, 15 bp, Homo sapiens
aggggcctagaagtg

SEQ ID NO: 1128588 - DNA, 15 bp, Homo sapiens
gaggggcctagaagt

SEQ ID NO: 1128589 - DNA, 15 bp, Homo sapiens
ggaggggcctagaag

SEQ ID NO: 1128590 - DNA, 15 bp, Homo sapiens
tggaggggcctagaa

SEQ ID NO: 1128591 - DNA, 15 bp, Homo sapiens
ctggaggggcctaga

SEQ ID NO: 1128592 - DNA, 15 bp, Homo sapiens
tctggaggggcctag

SEQ ID NO: 1128593 - DNA, 15 bp, Homo sapiens
ctctggaggggccta

SEQ ID NO: 1128594 - DNA, 15 bp, Homo sapiens
gctctggaggggcct

SEQ ID NO: 1128595 - DNA, 15 bp, Homo sapiens
agctctggaggggcc

SEQ ID NO: 1128596 - DNA, 15 bp, Homo sapiens
gagctctggaggggc

SEQ ID NO: 1128597 - DNA, 15 bp, Homo sapiens
agagctctggagggg

SEQ ID NO: 1128598 - DNA, 15 bp, Homo sapiens
gagagctctggaggg

SEQ ID NO: 1128599 - DNA, 15 bp, Homo sapiens
tgagagctctggagg

SEQ ID NO: 1128600 - DNA, 15 bp, Homo sapiens
ctgagagctctggag

SEQ ID NO: 1128601 - DNA, 15 bp, Homo sapiens
tctgagagctctgga

SEQ ID NO: 1128602 - DNA, 15 bp, Homo sapiens
atctgagagctctgg

SEQ ID NO: 1128603 - DNA, 15 bp, Homo sapiens
tatctgagagctctg

SEQ ID NO: 1128604 - DNA, 15 bp, Homo sapiens
atatctgagagctct

SEQ ID NO: 1128605 - DNA, 15 bp, Homo sapiens
aatatctgagagctc

SEQ ID NO: 1128606 - DNA, 15 bp, Homo sapiens
aaatatctgagagct

SEQ ID NO: 1128607 - DNA, 15 bp, Homo sapiens
aaaatatctgagagc

SEQ ID NO: 1128608 - DNA, 15 bp, Homo sapiens
caaaatatctgagag

SEQ ID NO: 1128609 - DNA, 15 bp, Homo sapiens
ccaaaatatctgaga

SEQ ID NO: 1128610 - DNA, 15 bp, Homo sapiens
cccaaaatatctgag

SEQ ID NO: 1128611 - DNA, 15 bp, Homo sapiens
ccccaaaatatctga

SEQ ID NO: 1128612 - DNA, 15 bp, Homo sapiens
accccaaaatatctg

SEQ ID NO: 1128613 - DNA, 15 bp, Homo sapiens
aaccccaaaatatct

SEQ ID NO: 1128614 - DNA, 15 bp, Homo sapiens
caaccccaaaatatc

SEQ ID NO: 1128615 - DNA, 15 bp, Homo sapiens
tcaaccccaaaatat

SEQ ID NO: 1128616 - DNA, 15 bp, Homo sapiens
ctcaaccccaaaata

SEQ ID NO: 1128617 - DNA, 15 bp, Homo sapiens
gctcaaccccaaaat

SEQ ID NO: 1128618 - DNA, 15 bp, Homo sapiens
ggctcaaccccaaaa

SEQ ID NO: 1128619 - DNA, 15 bp, Homo sapiens
gggctcaaccccaaa

SEQ ID NO: 1128620 - DNA, 15 bp, Homo sapiens
agggctcaaccccaa

SEQ ID NO: 1128621 - DNA, 15 bp, Homo sapiens
aagggctcaacccca

SEQ ID NO: 1128622 - DNA, 15 bp, Homo sapiens
gaagggctcaacccc

SEQ ID NO: 1128623 - DNA, 15 bp, Homo sapiens
ggaagggctcaaccc

SEQ ID NO: 1128624 - DNA, 15 bp, Homo sapiens
gggaagggctcaacc

SEQ ID NO: 1128625 - DNA, 15 bp, Homo sapiens
ggggaagggctcaac

SEQ ID NO: 1128626 - DNA, 15 bp, Homo sapiens
tggggaagggctcaa

SEQ ID NO: 1128627 - DNA, 15 bp, Homo sapiens
ttggggaagggctca

SEQ ID NO: 1128628 - DNA, 15 bp, Homo sapiens
tttggggaagggctc

SEQ ID NO: 1128629 - DNA, 15 bp, Homo sapiens
ctttggggaagggct

SEQ ID NO: 1128630 - DNA, 15 bp, Homo sapiens
gctttggggaagggc

SEQ ID NO: 1128631 - DNA, 15 bp, Homo sapiens
ggctttggggaaggg

SEQ ID NO: 1128632 - DNA, 15 bp, Homo sapiens
tggctttggggaagg

SEQ ID NO: 1128633 - DNA, 15 bp, Homo sapiens
atggctttggggaag

SEQ ID NO: 1128634 - DNA, 15 bp, Homo sapiens
tatggctttggggaa

SEQ ID NO: 1128635 - DNA, 15 bp, Homo sapiens
gtatggctttgggga

SEQ ID NO: 1128636 - DNA, 15 bp, Homo sapiens
tgtatggctttgggg

SEQ ID NO: 1128637 - DNA, 15 bp, Homo sapiens
ctgtatggctttggg

SEQ ID NO: 1128638 - DNA, 15 bp, Homo sapiens
cctgtatggctttgg

SEQ ID NO: 1128639 - DNA, 15 bp, Homo sapiens
tcctgtatggctttg

SEQ ID NO: 1128640 - DNA, 15 bp, Homo sapiens
gtcctgtatggcttt

SEQ ID NO: 1128641 - DNA, 15 bp, Homo sapiens
ggtcctgtatggctt

SEQ ID NO: 1128642 - DNA, 15 bp, Homo sapiens
aggtcctgtatggct

SEQ ID NO: 1128643 - DNA, 15 bp, Homo sapiens
aaggtcctgtatggc

SEQ ID NO: 1128644 - DNA, 15 bp, Homo sapiens
aaaggtcctgtatgg

SEQ ID NO: 1128645 - DNA, 15 bp, Homo sapiens
aaaaggtcctgtatg

SEQ ID NO: 1128646 - DNA, 15 bp, Homo sapiens
aaaaaggtcctgtat

SEQ ID NO: 1128647 - DNA, 15 bp, Homo sapiens
aaaaaaggtcctgta

SEQ ID NO: 1128648 - DNA, 15 bp, Homo sapiens
aaaaaaaggtcctgt

SEQ ID NO: 1128649 - DNA, 15 bp, Homo sapiens
aaaaaaaaggtcctg

SEQ ID NO: 1128650 - DNA, 15 bp, Homo sapiens
caaaaaaaaggtcct

SEQ ID NO: 1128651 - DNA, 15 bp, Homo sapiens
acaaaaaaaaggtcc

SEQ ID NO: 1128652 - DNA, 15 bp, Homo sapiens
cacaaaaaaaaggtc

SEQ ID NO: 1128653 - DNA, 15 bp, Homo sapiens
tcacaaaaaaaaggt

SEQ ID NO: 1128654 - DNA, 15 bp, Homo sapiens
atcacaaaaaaaagg

SEQ ID NO: 1128655 - DNA, 15 bp, Homo sapiens
gatcacaaaaaaaag

SEQ ID NO: 1128656 - DNA, 15 bp, Homo sapiens
agatcacaaaaaaaa

SEQ ID NO: 1128657 - DNA, 15 bp, Homo sapiens
cagatcacaaaaaaa

SEQ ID NO: 1128658 - DNA, 15 bp, Homo sapiens
acagatcacaaaaaa

SEQ ID NO: 1128659 - DNA, 15 bp, Homo sapiens
aacagatcacaaaaa

SEQ ID NO: 1128660 - DNA, 15 bp, Homo sapiens
gaacagatcacaaaa

SEQ ID NO: 1128661 - DNA, 15 bp, Homo sapiens
agaacagatcacaaa

SEQ ID NO: 1128662 - DNA, 15 bp, Homo sapiens
tagaacagatcacaa

SEQ ID NO: 1128663 - DNA, 15 bp, Homo sapiens
ctagaacagatcaca

SEQ ID NO: 1128664 - DNA, 15 bp, Homo sapiens
gctagaacagatcac

SEQ ID NO: 1128665 - DNA, 15 bp, Homo sapiens
ggctagaacagatca

SEQ ID NO: 1128666 - DNA, 15 bp, Homo sapiens
tggctagaacagatc

SEQ ID NO: 1128667 - DNA, 15 bp, Homo sapiens
atggctagaacagat

SEQ ID NO: 1128668 - DNA, 15 bp, Homo sapiens
aatggctagaacaga

SEQ ID NO: 1128669 - DNA, 15 bp, Homo sapiens
aaatggctagaacag

SEQ ID NO: 1128670 - DNA, 15 bp, Homo sapiens
aaaatggctagaaca

SEQ ID NO: 1128671 - DNA, 15 bp, Homo sapiens
aaaaatggctagaac

SEQ ID NO: 1128672 - DNA, 15 bp, Homo sapiens
taaaaatggctagaa

SEQ ID NO: 1128673 - DNA, 15 bp, Homo sapiens
ataaaaatggctaga

SEQ ID NO: 1128674 - DNA, 15 bp, Homo sapiens
cataaaaatggctag

SEQ ID NO: 1128675 - DNA, 15 bp, Homo sapiens
acataaaaatggcta

SEQ ID NO: 1128676 - DNA, 15 bp, Homo sapiens
aacataaaaatggct

SEQ ID NO: 1128677 - DNA, 15 bp, Homo sapiens
caacataaaaatggc

SEQ ID NO: 1128678 - DNA, 15 bp, Homo sapiens
ccaacataaaaatgg

SEQ ID NO: 1128679 - DNA, 15 bp, Homo sapiens
cccaacataaaaatg

SEQ ID NO: 1128680 - DNA, 15 bp, Homo sapiens
acccaacataaaaat

SEQ ID NO: 1128681 - DNA, 15 bp, Homo sapiens
cacccaacataaaaa

SEQ ID NO: 1128682 - DNA, 15 bp, Homo sapiens
gcacccaacataaaa

SEQ ID NO: 1128683 - DNA, 15 bp, Homo sapiens
agcacccaacataaa

SEQ ID NO: 1128684 - DNA, 15 bp, Homo sapiens
aagcacccaacataa

SEQ ID NO: 1128685 - DNA, 15 bp, Homo sapiens
caagcacccaacata

SEQ ID NO: 1128686 - DNA, 15 bp, Homo sapiens
acaagcacccaacat

SEQ ID NO: 1128687 - DNA, 15 bp, Homo sapiens
aacaagcacccaaca

SEQ ID NO: 1128688 - DNA, 15 bp, Homo sapiens
taacaagcacccaac

SEQ ID NO: 1128689 - DNA, 15 bp, Homo sapiens
ataacaagcacccaa

SEQ ID NO: 1128690 - DNA, 15 bp, Homo sapiens
cataacaagcaccca

SEQ ID NO: 1128691 - DNA, 15 bp, Homo sapiens
ccataacaagcaccc

SEQ ID NO: 1128692 - DNA, 15 bp, Homo sapiens
tccataacaagcacc

SEQ ID NO: 1128693 - DNA, 15 bp, Homo sapiens
gtccataacaagcac

SEQ ID NO: 1128694 - DNA, 15 bp, Homo sapiens
agtccataacaagca

SEQ ID NO: 1128695 - DNA, 15 bp, Homo sapiens
cagtccataacaagc

SEQ ID NO: 1128696 - DNA, 15 bp, Homo sapiens
tcagtccataacaag

SEQ ID NO: 1128697 - DNA, 15 bp, Homo sapiens
ctcagtccataacaa

SEQ ID NO: 1128698 - DNA, 15 bp, Homo sapiens
gctcagtccataaca

SEQ ID NO: 1128699 - DNA, 15 bp, Homo sapiens
tgctcagtccataac

SEQ ID NO: 1128700 - DNA, 15 bp, Homo sapiens
atgctcagtccataa

SEQ ID NO: 1128701 - DNA, 15 bp, Homo sapiens
aatgctcagtccata

SEQ ID NO: 1128702 - DNA, 15 bp, Homo sapiens
aaatgctcagtccat

SEQ ID NO: 1128703 - DNA, 15 bp, Homo sapiens
taaatgctcagtcca

SEQ ID NO: 1128704 - DNA, 15 bp, Homo sapiens
ataaatgctcagtcc

SEQ ID NO: 1128705 - DNA, 15 bp, Homo sapiens
cataaatgctcagtc

SEQ ID NO: 1128706 - DNA, 15 bp, Homo sapiens
acataaatgctcagt

SEQ ID NO: 1128707 - DNA, 15 bp, Homo sapiens
gacataaatgctcag

SEQ ID NO: 1128708 - DNA, 15 bp, Homo sapiens
ggacataaatgctca

SEQ ID NO: 1128709 - DNA, 15 bp, Homo sapiens
aggacataaatgctc

SEQ ID NO: 1128710 - DNA, 15 bp, Homo sapiens
gaggacataaatgct

SEQ ID NO: 1128711 - DNA, 15 bp, Homo sapiens
ggaggacataaatgc

SEQ ID NO: 1128712 - DNA, 15 bp, Homo sapiens
gggaggacataaatg

SEQ ID NO: 1128713 - DNA, 15 bp, Homo sapiens
tgggaggacataaat

SEQ ID NO: 1128714 - DNA, 15 bp, Homo sapiens
gtgggaggacataaa

SEQ ID NO: 1128715 - DNA, 15 bp, Homo sapiens
tgtgggaggacataa

SEQ ID NO: 1128716 - DNA, 15 bp, Homo sapiens
gtgtgggaggacata

SEQ ID NO: 1128717 - DNA, 15 bp, Homo sapiens
ggtgtgggaggacat

SEQ ID NO: 1128718 - DNA, 15 bp, Homo sapiens
gggtgtgggaggaca

SEQ ID NO: 1128719 - DNA, 15 bp, Homo sapiens
ggggtgtgggaggac

SEQ ID NO: 1128720 - DNA, 15 bp, Homo sapiens
gggggtgtgggagga

SEQ ID NO: 1128721 - DNA, 15 bp, Homo sapiens
ggggggtgtgggagg

SEQ ID NO: 1128722 - DNA, 15 bp, Homo sapiens
gggggggtgtgggag

SEQ ID NO: 1128723 - DNA, 15 bp, Homo sapiens
ggggggggtgtggga

SEQ ID NO: 1128724 - DNA, 15 bp, Homo sapiens
tggggggggtgtggg

SEQ ID NO: 1128725 - DNA, 15 bp, Homo sapiens
atggggggggtgtgg

SEQ ID NO: 1128726 - DNA, 15 bp, Homo sapiens
tatggggggggtgtg

SEQ ID NO: 1128727 - DNA, 15 bp, Homo sapiens
gtatggggggggtgt

SEQ ID NO: 1128728 - DNA, 15 bp, Homo sapiens
ggtatggggggggtg

SEQ ID NO: 1128729 - DNA, 15 bp, Homo sapiens
aggtatggggggggt

SEQ ID NO: 1128730 - DNA, 15 bp, Homo sapiens
aaggtatgggggggg

SEQ ID NO: 1128731 - DNA, 15 bp, Homo sapiens
aaaggtatggggggg

SEQ ID NO: 1128732 - DNA, 15 bp, Homo sapiens
aaaaggtatgggggg

SEQ ID NO: 1128733 - DNA, 15 bp, Homo sapiens
aaaaaggtatggggg

SEQ ID NO: 1128734 - DNA, 15 bp, Homo sapiens
aaaaaaggtatgggg

SEQ ID NO: 1128735 - DNA, 15 bp, Homo sapiens
caaaaaaggtatggg

SEQ ID NO: 1128736 - DNA, 15 bp, Homo sapiens
tcaaaaaaggtatgg

SEQ ID NO: 1128737 - DNA, 15 bp, Homo sapiens
ttcaaaaaaggtatg

SEQ ID NO: 1128738 - DNA, 15 bp, Homo sapiens
cttcaaaaaaggtat

SEQ ID NO: 1128739 - DNA, 15 bp, Homo sapiens
acttcaaaaaaggta

SEQ ID NO: 1128740 - DNA, 15 bp, Homo sapiens
gacttcaaaaaaggt

SEQ ID NO: 1128741 - DNA, 15 bp, Homo sapiens
ggacttcaaaaaagg

SEQ ID NO: 1128742 - DNA, 15 bp, Homo sapiens
aggacttcaaaaaag

SEQ ID NO: 1128743 - DNA, 15 bp, Homo sapiens
taggacttcaaaaaa

SEQ ID NO: 1128744 - DNA, 15 bp, Homo sapiens
ttaggacttcaaaaa

SEQ ID NO: 1128745 - DNA, 15 bp, Homo sapiens
gttaggacttcaaaa

SEQ ID NO: 1128746 - DNA, 15 bp, Homo sapiens
ggttaggacttcaaa

SEQ ID NO: 1128747 - DNA, 15 bp, Homo sapiens
gggttaggacttcaa

SEQ ID NO: 1128748 - DNA, 15 bp, Homo sapiens
ggggttaggacttca

SEQ ID NO: 1128749 - DNA, 15 bp, Homo sapiens
gggggttaggacttc

SEQ ID NO: 1128750 - DNA, 15 bp, Homo sapiens
tgggggttaggactt

SEQ ID NO: 1128751 - DNA, 15 bp, Homo sapiens
ctgggggttaggact

SEQ ID NO: 1128752 - DNA, 15 bp, Homo sapiens
actgggggttaggac

SEQ ID NO: 1128753 - DNA, 15 bp, Homo sapiens
cactgggggttagga

SEQ ID NO: 1128754 - DNA, 15 bp, Homo sapiens
acactgggggttagg

SEQ ID NO: 1128755 - DNA, 15 bp, Homo sapiens
cacactgggggttag

SEQ ID NO: 1128756 - DNA, 15 bp, Homo sapiens
tcacactgggggtta

SEQ ID NO: 1128757 - DNA, 15 bp, Homo sapiens
atcacactgggggtt

SEQ ID NO: 1128758 - DNA, 15 bp, Homo sapiens
catcacactgggggt

SEQ ID NO: 1128759 - DNA, 15 bp, Homo sapiens
ccatcacactggggg

SEQ ID NO: 1128760 - DNA, 15 bp, Homo sapiens
accatcacactgggg

SEQ ID NO: 1128761 - DNA, 15 bp, Homo sapiens
taccatcacactggg

SEQ ID NO: 1128762 - DNA, 15 bp, Homo sapiens
ataccatcacactgg

SEQ ID NO: 1128763 - DNA, 15 bp, Homo sapiens
aataccatcacactg

SEQ ID NO: 1128764 - DNA, 15 bp, Homo sapiens
aaataccatcacact

SEQ ID NO: 1128765 - DNA, 15 bp, Homo sapiens
caaataccatcacac

SEQ ID NO: 1128766 - DNA, 15 bp, Homo sapiens
gtctccaaataccat

SEQ ID NO: 1128767 - DNA, 15 bp, Homo sapiens
tgtctccaaatacca

SEQ ID NO: 1128768 - DNA, 15 bp, Homo sapiens
ctgtctccaaatacc

SEQ ID NO: 1128769 - DNA, 15 bp, Homo sapiens
cctgtctccaaatac

SEQ ID NO: 1128770 - DNA, 15 bp, Homo sapiens
ccctgtctccaaata

SEQ ID NO: 1128771 - DNA, 15 bp, Homo sapiens
gccctgtctccaaat

SEQ ID NO: 1128772 - DNA, 15 bp, Homo sapiens
ggccctgtctccaaa

SEQ ID NO: 1128773 - DNA, 15 bp, Homo sapiens
aggccctgtctccaa

SEQ ID NO: 1128774 - DNA, 15 bp, Homo sapiens
aaggccctgtctcca

SEQ ID NO: 1128775 - DNA, 15 bp, Homo sapiens
aaaggccctgtctcc

SEQ ID NO: 1128776 - DNA, 15 bp, Homo sapiens
caaaggccctgtctc

SEQ ID NO: 1128777 - DNA, 15 bp, Homo sapiens
ccaaaggccctgtct

SEQ ID NO: 1128778 - DNA, 15 bp, Homo sapiens
tccaaaggccctgtc

SEQ ID NO: 1128779 - DNA, 15 bp, Homo sapiens
ttccaaaggccctgt

SEQ ID NO: 1128780 - DNA, 15 bp, Homo sapiens
cttccaaaggccctg

SEQ ID NO: 1128781 - DNA, 15 bp, Homo sapiens
ccttccaaaggccct

SEQ ID NO: 1128782 - DNA, 15 bp, Homo sapiens
accttccaaaggccc

SEQ ID NO: 1128783 - DNA, 15 bp, Homo sapiens
taccttccaaaggcc

SEQ ID NO: 1128784 - DNA, 15 bp, Homo sapiens
ttaccttccaaaggc

SEQ ID NO: 1128785 - DNA, 15 bp, Homo sapiens
attaccttccaaagg

SEQ ID NO: 1128786 - DNA, 15 bp, Homo sapiens
aattaccttccaaag

SEQ ID NO: 1128787 - DNA, 15 bp, Homo sapiens
taattaccttccaaa

SEQ ID NO: 1128788 - DNA, 15 bp, Homo sapiens
gtaattaccttccaa

SEQ ID NO: 1128789 - DNA, 15 bp, Homo sapiens
tgtaattaccttcca

SEQ ID NO: 1128790 - DNA, 15 bp, Homo sapiens
ctgtaattaccttcc

SEQ ID NO: 1128791 - DNA, 15 bp, Homo sapiens
actgtaattaccttc

SEQ ID NO: 1128792 - DNA, 15 bp, Homo sapiens
aactgtaattacctt

SEQ ID NO: 1128793 - DNA, 15 bp, Homo sapiens
taactgtaattacct

SEQ ID NO: 1128794 - DNA, 15 bp, Homo sapiens
ctaactgtaattacc

SEQ ID NO: 1128795 - DNA, 15 bp, Homo sapiens
tctaactgtaattac

SEQ ID NO: 1128796 - DNA, 15 bp, Homo sapiens
ttctaactgtaatta

SEQ ID NO: 1128797 - DNA, 15 bp, Homo sapiens
cttctaactgtaatt

SEQ ID NO: 1128798 - DNA, 15 bp, Homo sapiens
tcttctaactgtaat

SEQ ID NO: 1128799 - DNA, 15 bp, Homo sapiens
ttcttctaactgtaa

SEQ ID NO: 1128800 - DNA, 15 bp, Homo sapiens
cttcttctaactgta

SEQ ID NO: 1128801 - DNA, 15 bp, Homo sapiens
gacttcttctaactg

SEQ ID NO: 1128802 - DNA, 15 bp, Homo sapiens
cgacttcttctaact

SEQ ID NO: 1128803 - DNA, 15 bp, Homo sapiens
ccgacttcttctaac

SEQ ID NO: 1128804 - DNA, 15 bp, Homo sapiens
cccgacttcttctaa

SEQ ID NO: 1128805 - DNA, 15 bp, Homo sapiens
tcccgacttcttcta

SEQ ID NO: 1128806 - DNA, 15 bp, Homo sapiens
ctcccgacttcttct

SEQ ID NO: 1128807 - DNA, 15 bp, Homo sapiens
cctcccgacttcttc

SEQ ID NO: 1128808 - DNA, 15 bp, Homo sapiens
ccctcccgacttctt

SEQ ID NO: 1128809 - DNA, 15 bp, Homo sapiens
accctcccgacttct

SEQ ID NO: 1128810 - DNA, 15 bp, Homo sapiens
aaccctcccgacttc

SEQ ID NO: 1128811 - DNA, 15 bp, Homo sapiens
caaccctcccgactt

SEQ ID NO: 1128812 - DNA, 15 bp, Homo sapiens
ccaaccctcccgact

SEQ ID NO: 1128813 - DNA, 15 bp, Homo sapiens
cccaaccctcccgac

SEQ ID NO: 1128814 - DNA, 15 bp, Homo sapiens
gcccaaccctcccga

SEQ ID NO: 1128815 - DNA, 15 bp, Homo sapiens
ggcccaaccctcccg

SEQ ID NO: 1128816 - DNA, 15 bp, Homo sapiens
gggcccaaccctccc

SEQ ID NO: 1128817 - DNA, 15 bp, Homo sapiens
tgggcccaaccctcc

SEQ ID NO: 1128818 - DNA, 15 bp, Homo sapiens
ctgggcccaaccctc

SEQ ID NO: 1128819 - DNA, 15 bp, Homo sapiens
cctgggcccaaccct

SEQ ID NO: 1128820 - DNA, 15 bp, Homo sapiens
acctgggcccaaccc

SEQ ID NO: 1128821 - DNA, 15 bp, Homo sapiens
gacctgggcccaacc

SEQ ID NO: 1128822 - DNA, 15 bp, Homo sapiens
agacctgggcccaac

SEQ ID NO: 1128823 - DNA, 15 bp, Homo sapiens
cagacctgggcccaa

SEQ ID NO: 1128824 - DNA, 15 bp, Homo sapiens
tcagacctgggccca

SEQ ID NO: 1128825 - DNA, 15 bp, Homo sapiens
atcagacctgggccc

SEQ ID NO: 1128826 - DNA, 15 bp, Homo sapiens
aatcagacctgggcc

SEQ ID NO: 1128827 - DNA, 15 bp, Homo sapiens
caatcagacctgggc

SEQ ID NO: 1128828 - DNA, 15 bp, Homo sapiens
ccaatcagacctggg

SEQ ID NO: 1128829 - DNA, 15 bp, Homo sapiens
tccaatcagacctgg

SEQ ID NO: 1128830 - DNA, 15 bp, Homo sapiens
atccaatcagacctg

SEQ ID NO: 1128831 - DNA, 15 bp, Homo sapiens
aatccaatcagacct

SEQ ID NO: 1128832 - DNA, 15 bp, Homo sapiens
taatccaatcagacc

SEQ ID NO: 1128833 - DNA, 15 bp, Homo sapiens
ctaatccaatcagac

SEQ ID NO: 1128834 - DNA, 15 bp, Homo sapiens
actaatccaatcaga

SEQ ID NO: 1128835 - DNA, 15 bp, Homo sapiens
cactaatccaatcag

SEQ ID NO: 1128836 - DNA, 15 bp, Homo sapiens
gcactaatccaatca

SEQ ID NO: 1128837 - DNA, 15 bp, Homo sapiens
ggcactaatccaatc

SEQ ID NO: 1128838 - DNA, 15 bp, Homo sapiens
gggcactaatccaat

SEQ ID NO: 1128839 - DNA, 15 bp, Homo sapiens
agggcactaatccaa

SEQ ID NO: 1128840 - DNA, 15 bp, Homo sapiens
aagggcactaatcca

SEQ ID NO: 1128841 - DNA, 15 bp, Homo sapiens
taagggcactaatcc

SEQ ID NO: 1128842 - DNA, 15 bp, Homo sapiens
ataagggcactaatc

SEQ ID NO: 1128843 - DNA, 15 bp, Homo sapiens
tataagggcactaat

SEQ ID NO: 1128844 - DNA, 15 bp, Homo sapiens
atataagggcactaa

SEQ ID NO: 1128845 - DNA, 15 bp, Homo sapiens
catataagggcacta

SEQ ID NO: 1128846 - DNA, 15 bp, Homo sapiens
tcatataagggcact

SEQ ID NO: 1128847 - DNA, 15 bp, Homo sapiens
ttcatataagggcac

SEQ ID NO: 1128848 - DNA, 15 bp, Homo sapiens
tttcatataagggca

SEQ ID NO: 1128849 - DNA, 15 bp, Homo sapiens
ttttcatataagggc

SEQ ID NO: 1128850 - DNA, 15 bp, Homo sapiens
cttttcatataaggg

SEQ ID NO: 1128851 - DNA, 15 bp, Homo sapiens
tcttttcatataagg

SEQ ID NO: 1128852 - DNA, 15 bp, Homo sapiens
gtcttttcatataag

SEQ ID NO: 1128853 - DNA, 15 bp, Homo sapiens
tgtcttttcatataa

SEQ ID NO: 1128854 - DNA, 15 bp, Homo sapiens
gtgtcttttcatata

SEQ ID NO: 1128855 - DNA, 15 bp, Homo sapiens
ggtgtcttttcatat

SEQ ID NO: 1128856 - DNA, 15 bp, Homo sapiens
tggtgtcttttcata

SEQ ID NO: 1128857 - DNA, 15 bp, Homo sapiens
ctggtgtcttttcat

SEQ ID NO: 1128858 - DNA, 15 bp, Homo sapiens
cctggtgtcttttca

SEQ ID NO: 1128859 - DNA, 15 bp, Homo sapiens
tcctggtgtcttttc

SEQ ID NO: 1128860 - DNA, 15 bp, Homo sapiens
gtcctggtgtctttt

SEQ ID NO: 1128861 - DNA, 15 bp, Homo sapiens
cgtcctggtgtcttt

SEQ ID NO: 1128862 - DNA, 15 bp, Homo sapiens
ccgtcctggtgtctt

SEQ ID NO: 1128863 - DNA, 15 bp, Homo sapiens
cccgtcctggtgtct

SEQ ID NO: 1128864 - DNA, 15 bp, Homo sapiens
gcccgtcctggtgtc

SEQ ID NO: 1128865 - DNA, 15 bp, Homo sapiens
cgcccgtcctggtgt

SEQ ID NO: 1128866 - DNA, 15 bp, Homo sapiens
gcgcccgtcctggtg

SEQ ID NO: 1128867 - DNA, 15 bp, Homo sapiens
tgcgcccgtcctggt

SEQ ID NO: 1128868 - DNA, 15 bp, Homo sapiens
ctgcgcccgtcctgg

SEQ ID NO: 1128869 - DNA, 15 bp, Homo sapiens
actgcgcccgtcctg

SEQ ID NO: 1128870 - DNA, 15 bp, Homo sapiens
cactgcgcccgtcct

SEQ ID NO: 1128871 - DNA, 15 bp, Homo sapiens
ccactgcgcccgtcc

SEQ ID NO: 1128872 - DNA, 15 bp, Homo sapiens
gccactgcgcccgtc

SEQ ID NO: 1128873 - DNA, 15 bp, Homo sapiens
agccactgcgcccgt

SEQ ID NO: 1128874 - DNA, 15 bp, Homo sapiens
tacattggccaggct

SEQ ID NO: 1128875 - DNA, 15 bp, Homo sapiens
ctacattggccaggc

SEQ ID NO: 1128876 - DNA, 15 bp, Homo sapiens
actacattggccagg

SEQ ID NO: 1128877 - DNA, 15 bp, Homo sapiens
cactacattggccag

SEQ ID NO: 1128878 - DNA, 15 bp, Homo sapiens
tcactacattggcca

SEQ ID NO: 1128879 - DNA, 15 bp, Homo sapiens
ttcactacattggcc

SEQ ID NO: 1128880 - DNA, 15 bp, Homo sapiens
tttcactacattggc

SEQ ID NO: 1128881 - DNA, 15 bp, Homo sapiens
gtttcactacattgg

SEQ ID NO: 1128882 - DNA, 15 bp, Homo sapiens
tgtttcactacattg

SEQ ID NO: 1128883 - DNA, 15 bp, Homo sapiens
gtgtttcactacatt

SEQ ID NO: 1128884 - DNA, 15 bp, Homo sapiens
ggtgtttcactacat

SEQ ID NO: 1128885 - DNA, 15 bp, Homo sapiens
tggtgtttcactaca

SEQ ID NO: 1128886 - DNA, 15 bp, Homo sapiens
atggtgtttcactac

SEQ ID NO: 1128887 - DNA, 15 bp, Homo sapiens
gatggtgtttcacta

SEQ ID NO: 1128888 - DNA, 15 bp, Homo sapiens
agagatggtgtttca

SEQ ID NO: 1128889 - DNA, 15 bp, Homo sapiens
tagagatggtgtttc

SEQ ID NO: 1128890 - DNA, 15 bp, Homo sapiens
agtagagatggtgtt

SEQ ID NO: 1128891 - DNA, 15 bp, Homo sapiens
tagtagagatggtgt

SEQ ID NO: 1128892 - DNA, 15 bp, Homo sapiens
ttagtagagatggtg

SEQ ID NO: 1128893 - DNA, 15 bp, Homo sapiens
tttagtagagatggt

SEQ ID NO: 1128894 - DNA, 15 bp, Homo sapiens
taccacacccagcta

SEQ ID NO: 1128895 - DNA, 15 bp, Homo sapiens
ctaccacacccagct

SEQ ID NO: 1128896 - DNA, 15 bp, Homo sapiens
gctaccacacccagc

SEQ ID NO: 1128897 - DNA, 15 bp, Homo sapiens
cgctaccacacccag

SEQ ID NO: 1128898 - DNA, 15 bp, Homo sapiens
ccgctaccacaccca

SEQ ID NO: 1128899 - DNA, 15 bp, Homo sapiens
cccgctaccacaccc

SEQ ID NO: 1128900 - DNA, 15 bp, Homo sapiens
gcccgctaccacacc

SEQ ID NO: 1128901 - DNA, 15 bp, Homo sapiens
agcccgctaccacac

SEQ ID NO: 1128902 - DNA, 15 bp, Homo sapiens
gagcccgctaccaca

SEQ ID NO: 1128903 - DNA, 15 bp, Homo sapiens
ggagcccgctaccac

SEQ ID NO: 1128904 - DNA, 15 bp, Homo sapiens
aggagcccgctacca

SEQ ID NO: 1128905 - DNA, 15 bp, Homo sapiens
caggagcccgctacc

SEQ ID NO: 1128906 - DNA, 15 bp, Homo sapiens
acaggagcccgctac

SEQ ID NO: 1128907 - DNA, 15 bp, Homo sapiens
gacaggagcccgcta

SEQ ID NO: 1128908 - DNA, 15 bp, Homo sapiens
tgacaggagcccgct

SEQ ID NO: 1128909 - DNA, 15 bp, Homo sapiens
atgacaggagcccgc

SEQ ID NO: 1128910 - DNA, 15 bp, Homo sapiens
gatgacaggagcccg

SEQ ID NO: 1128911 - DNA, 15 bp, Homo sapiens
tggatgacaggagcc

SEQ ID NO: 1128912 - DNA, 15 bp, Homo sapiens
ttggatgacaggagc

SEQ ID NO: 1128913 - DNA, 15 bp, Homo sapiens
cttggatgacaggag

SEQ ID NO: 1128914 - DNA, 15 bp, Homo sapiens
gcttggatgacagga

SEQ ID NO: 1128915 - DNA, 15 bp, Homo sapiens
agcttggatgacagg

SEQ ID NO: 1128916 - DNA, 15 bp, Homo sapiens
tagcttggatgacag

SEQ ID NO: 1128917 - DNA, 15 bp, Homo sapiens
gtagcttggatgaca

SEQ ID NO: 1128918 - DNA, 15 bp, Homo sapiens
agtagcttggatgac

SEQ ID NO: 1128919 - DNA, 15 bp, Homo sapiens
gagtagcttggatga

SEQ ID NO: 1128920 - DNA, 15 bp, Homo sapiens
cgagtagcttggatg

SEQ ID NO: 1128921 - DNA, 15 bp, Homo sapiens
ccgagtagcttggat

SEQ ID NO: 1128922 - DNA, 15 bp, Homo sapiens
cccgagtagcttgga

SEQ ID NO: 1128923 - DNA, 15 bp, Homo sapiens
tcccgagtagcttgg

SEQ ID NO: 1128924 - DNA, 15 bp, Homo sapiens
ctcccgagtagcttg

SEQ ID NO: 1128925 - DNA, 15 bp, Homo sapiens
cctcccgagtagctt

SEQ ID NO: 1128926 - DNA, 15 bp, Homo sapiens
ccctcccgagtagct

SEQ ID NO: 1128927 - DNA, 15 bp, Homo sapiens
accctcccgagtagc

SEQ ID NO: 1128928 - DNA, 15 bp, Homo sapiens
caccctcccgagtag

SEQ ID NO: 1128929 - DNA, 15 bp, Homo sapiens
tcaccctcccgagta

SEQ ID NO: 1128930 - DNA, 15 bp, Homo sapiens
ctcaccctcccgagt

SEQ ID NO: 1128931 - DNA, 15 bp, Homo sapiens
cctcaccctcccgag

SEQ ID NO: 1128932 - DNA, 15 bp, Homo sapiens
gcctcaccctcccga

SEQ ID NO: 1128933 - DNA, 15 bp, Homo sapiens
tgcctcaccctcccg

SEQ ID NO: 1128934 - DNA, 15 bp, Homo sapiens
atgcctcaccctccc

SEQ ID NO: 1128935 - DNA, 15 bp, Homo sapiens
catgcctcaccctcc

SEQ ID NO: 1128936 - DNA, 15 bp, Homo sapiens
tcatgcctcaccctc

SEQ ID NO: 1128937 - DNA, 15 bp, Homo sapiens
ctcatgcctcaccct

SEQ ID NO: 1128938 - DNA, 15 bp, Homo sapiens
tctcatgcctcaccc

SEQ ID NO: 1128939 - DNA, 15 bp, Homo sapiens
ttctcatgcctcacc

SEQ ID NO: 1128940 - DNA, 15 bp, Homo sapiens
attctcatgcctcac

SEQ ID NO: 1128941 - DNA, 15 bp, Homo sapiens
actcccgggttcaag

SEQ ID NO: 1128942 - DNA, 15 bp, Homo sapiens
aactcccgggttcaa

SEQ ID NO: 1128943 - DNA, 15 bp, Homo sapiens
caactcccgggttca

SEQ ID NO: 1128944 - DNA, 15 bp, Homo sapiens
ccaactcccgggttc

SEQ ID NO: 1128945 - DNA, 15 bp, Homo sapiens
tccaactcccgggtt

SEQ ID NO: 1128946 - DNA, 15 bp, Homo sapiens
ctccaactcccgggt

SEQ ID NO: 1128947 - DNA, 15 bp, Homo sapiens
cctccaactcccggg

SEQ ID NO: 1128948 - DNA, 15 bp, Homo sapiens
acctccaactcccgg

SEQ ID NO: 1128949 - DNA, 15 bp, Homo sapiens
aacctccaactcccg

SEQ ID NO: 1128950 - DNA, 15 bp, Homo sapiens
actgcaacctccaac

SEQ ID NO: 1128951 - DNA, 15 bp, Homo sapiens
cactgcaacctccaa

SEQ ID NO: 1128952 - DNA, 15 bp, Homo sapiens
acaatctgggctcac

SEQ ID NO: 1128953 - DNA, 15 bp, Homo sapiens
cacaatctgggctca

SEQ ID NO: 1128954 - DNA, 15 bp, Homo sapiens
gcacaatctgggctc

SEQ ID NO: 1128955 - DNA, 15 bp, Homo sapiens
ggcacaatctgggct

SEQ ID NO: 1128956 - DNA, 15 bp, Homo sapiens
tggcacaatctgggc

SEQ ID NO: 1128957 - DNA, 15 bp, Homo sapiens
gtggcacaatctggg

SEQ ID NO: 1128958 - DNA, 15 bp, Homo sapiens
agtggcacaatctgg

SEQ ID NO: 1128959 - DNA, 15 bp, Homo sapiens
cagtggcacaatctg

SEQ ID NO: 1128960 - DNA, 15 bp, Homo sapiens
acagtggcacaatct

SEQ ID NO: 1128961 - DNA, 15 bp, Homo sapiens
ttttttcttttttga

SEQ ID NO: 1128962 - DNA, 15 bp, Homo sapiens
gtctctttttttttt

SEQ ID NO: 1128963 - DNA, 15 bp, Homo sapiens
tgtctcttttttttt

SEQ ID NO: 1128964 - DNA, 15 bp, Homo sapiens
gtgtctctttttttt

SEQ ID NO: 1128965 - DNA, 15 bp, Homo sapiens
ggtgtctcttttttt

SEQ ID NO: 1128966 - DNA, 15 bp, Homo sapiens
tggtgtctctttttt

SEQ ID NO: 1128967 - DNA, 15 bp, Homo sapiens
ctggtgtctcttttt

SEQ ID NO: 1128968 - DNA, 15 bp, Homo sapiens
tctggtgtctctttt

SEQ ID NO: 1128969 - DNA, 15 bp, Homo sapiens
ctctggtgtctcttt

SEQ ID NO: 1128970 - DNA, 15 bp, Homo sapiens
tctctggtgtctctt

SEQ ID NO: 1128971 - DNA, 15 bp, Homo sapiens
ctctctggtgtctct

SEQ ID NO: 1128972 - DNA, 15 bp, Homo sapiens
gctctctggtgtctc

SEQ ID NO: 1128973 - DNA, 15 bp, Homo sapiens
agctctctggtgtct

SEQ ID NO: 1128974 - DNA, 15 bp, Homo sapiens
aagctctctggtgtc

SEQ ID NO: 1128975 - DNA, 15 bp, Homo sapiens
caagctctctggtgt

SEQ ID NO: 1128976 - DNA, 15 bp, Homo sapiens
acaagctctctggtg

SEQ ID NO: 1128977 - DNA, 15 bp, Homo sapiens
aacaagctctctggt

SEQ ID NO: 1128978 - DNA, 15 bp, Homo sapiens
taacaagctctctgg

SEQ ID NO: 1128979 - DNA, 15 bp, Homo sapiens
ctaacaagctctctg

SEQ ID NO: 1128980 - DNA, 15 bp, Homo sapiens
tctaacaagctctct

SEQ ID NO: 1128981 - DNA, 15 bp, Homo sapiens
ttctaacaagctctc

SEQ ID NO: 1128982 - DNA, 15 bp, Homo sapiens
cttctaacaagctct

SEQ ID NO: 1128983 - DNA, 15 bp, Homo sapiens
tcttctaacaagctc

SEQ ID NO: 1128984 - DNA, 15 bp, Homo sapiens
ctcttctaacaagct

SEQ ID NO: 1128985 - DNA, 15 bp, Homo sapiens
cctcttctaacaagc

SEQ ID NO: 1128986 - DNA, 15 bp, Homo sapiens
acctcttctaacaag

SEQ ID NO: 1128987 - DNA, 15 bp, Homo sapiens
gacctcttctaacaa

SEQ ID NO: 1128988 - DNA, 15 bp, Homo sapiens
tgacctcttctaaca

SEQ ID NO: 1128989 - DNA, 15 bp, Homo sapiens
atgacctcttctaac

SEQ ID NO: 1128990 - DNA, 15 bp, Homo sapiens
catgacctcttctaa

SEQ ID NO: 1128991 - DNA, 15 bp, Homo sapiens
acatgacctcttcta

SEQ ID NO: 1128992 - DNA, 15 bp, Homo sapiens
cacatgacctcttct

SEQ ID NO: 1128993 - DNA, 15 bp, Homo sapiens
tcacatgacctcttc

SEQ ID NO: 1128994 - DNA, 15 bp, Homo sapiens
ctcacatgacctctt

SEQ ID NO: 1128995 - DNA, 15 bp, Homo sapiens
gctcacatgacctct

SEQ ID NO: 1128996 - DNA, 15 bp, Homo sapiens
tgctcacatgacctc

SEQ ID NO: 1128997 - DNA, 15 bp, Homo sapiens
gtgctcacatgacct

SEQ ID NO: 1128998 - DNA, 15 bp, Homo sapiens
tgtgctcacatgacc

SEQ ID NO: 1128999 - DNA, 15 bp, Homo sapiens
gtgtgctcacatgac

SEQ ID NO: 1129000 - DNA, 15 bp, Homo sapiens
tgtgtgctcacatga

SEQ ID NO: 1129001 - DNA, 15 bp, Homo sapiens
ctgtgtgctcacatg

SEQ ID NO: 1129002 - DNA, 15 bp, Homo sapiens
actgtgtgctcacat

SEQ ID NO: 1129003 - DNA, 15 bp, Homo sapiens
aactgtgtgctcaca

SEQ ID NO: 1129004 - DNA, 15 bp, Homo sapiens
taactgtgtgctcac

SEQ ID NO: 1129005 - DNA, 15 bp, Homo sapiens
ctaactgtgtgctca

SEQ ID NO: 1129006 - DNA, 15 bp, Homo sapiens
tctaactgtgtgctc

SEQ ID NO: 1129007 - DNA, 15 bp, Homo sapiens
ttctaactgtgtgct

SEQ ID NO: 1129008 - DNA, 15 bp, Homo sapiens
cttctaactgtgtgc

SEQ ID NO: 1129009 - DNA, 15 bp, Homo sapiens
tcttctaactgtgtg

SEQ ID NO: 1129010 - DNA, 15 bp, Homo sapiens
gtcttctaactgtgt

SEQ ID NO: 1129011 - DNA, 15 bp, Homo sapiens
ggtcttctaactgtg

SEQ ID NO: 1129012 - DNA, 15 bp, Homo sapiens
aggtcttctaactgt

SEQ ID NO: 1129013 - DNA, 15 bp, Homo sapiens
aaggtcttctaactg

SEQ ID NO: 1129014 - DNA, 15 bp, Homo sapiens
gaaggtcttctaact

SEQ ID NO: 1129015 - DNA, 15 bp, Homo sapiens
tgaaggtcttctaac

SEQ ID NO: 1129016 - DNA, 15 bp, Homo sapiens
ttgaaggtcttctaa

SEQ ID NO: 1129017 - DNA, 15 bp, Homo sapiens
cttgaaggtcttcta

SEQ ID NO: 1129018 - DNA, 15 bp, Homo sapiens
gcttgaaggtcttct

SEQ ID NO: 1129019 - DNA, 15 bp, Homo sapiens
ggcttgaaggtcttc

SEQ ID NO: 1129020 - DNA, 15 bp, Homo sapiens
tggcttgaaggtctt

SEQ ID NO: 1129021 - DNA, 15 bp, Homo sapiens
ttggcttgaaggtct

SEQ ID NO: 1129022 - DNA, 15 bp, Homo sapiens
tttggcttgaaggtc

SEQ ID NO: 1129023 - DNA, 15 bp, Homo sapiens
ctttggcttgaaggt

SEQ ID NO: 1129024 - DNA, 15 bp, Homo sapiens
tctttggcttgaagg

SEQ ID NO: 1129025 - DNA, 15 bp, Homo sapiens
ttctttggcttgaag

SEQ ID NO: 1129026 - DNA, 15 bp, Homo sapiens
cttctttggcttgaa

SEQ ID NO: 1129027 - DNA, 15 bp, Homo sapiens
tcttctttggcttga

SEQ ID NO: 1129028 - DNA, 15 bp, Homo sapiens
ctcttctttggcttg

SEQ ID NO: 1129029 - DNA, 15 bp, Homo sapiens
cctcttctttggctt

SEQ ID NO: 1129030 - DNA, 15 bp, Homo sapiens
gcctcttctttggct

SEQ ID NO: 1129031 - DNA, 15 bp, Homo sapiens
ggcctcttctttggc

SEQ ID NO: 1129032 - DNA, 15 bp, Homo sapiens
aggcctcttctttgg

SEQ ID NO: 1129033 - DNA, 15 bp, Homo sapiens
caggcctcttctttg

SEQ ID NO: 1129034 - DNA, 15 bp, Homo sapiens
tcaggcctcttcttt

SEQ ID NO: 1129035 - DNA, 15 bp, Homo sapiens
ctcaggcctcttctt

SEQ ID NO: 1129036 - DNA, 15 bp, Homo sapiens
tctcaggcctcttct

SEQ ID NO: 1129037 - DNA, 15 bp, Homo sapiens
atctcaggcctcttc

SEQ ID NO: 1129038 - DNA, 15 bp, Homo sapiens
aatctcaggcctctt

SEQ ID NO: 1129039 - DNA, 15 bp, Homo sapiens
caatctcaggcctct

SEQ ID NO: 1129040 - DNA, 15 bp, Homo sapiens
tcaatctcaggcctc

SEQ ID NO: 1129041 - DNA, 15 bp, Homo sapiens
ttcaatctcaggcct

SEQ ID NO: 1129042 - DNA, 15 bp, Homo sapiens
tttcaatctcaggcc

SEQ ID NO: 1129043 - DNA, 15 bp, Homo sapiens
gtttcaatctcaggc

SEQ ID NO: 1129044 - DNA, 15 bp, Homo sapiens
ggtttcaatctcagg

SEQ ID NO: 1129045 - DNA, 15 bp, Homo sapiens
aggtttcaatctcag

SEQ ID NO: 1129046 - DNA, 15 bp, Homo sapiens
taggtttcaatctca

SEQ ID NO: 1129047 - DNA, 15 bp, Homo sapiens
gtaggtttcaatctc

SEQ ID NO: 1129048 - DNA, 15 bp, Homo sapiens
ggtaggtttcaatct

SEQ ID NO: 1129049 - DNA, 15 bp, Homo sapiens
aggtaggtttcaatc

SEQ ID NO: 1129050 - DNA, 15 bp, Homo sapiens
aaggtaggtttcaat

SEQ ID NO: 1129051 - DNA, 15 bp, Homo sapiens
caaggtaggtttcaa

SEQ ID NO: 1129052 - DNA, 15 bp, Homo sapiens
gcaaggtaggtttca

SEQ ID NO: 1129053 - DNA, 15 bp, Homo sapiens
tgcaaggtaggtttc

SEQ ID NO: 1129054 - DNA, 15 bp, Homo sapiens
ctgcaaggtaggttt

SEQ ID NO: 1129055 - DNA, 15 bp, Homo sapiens
cctgcaaggtaggtt

SEQ ID NO: 1129056 - DNA, 15 bp, Homo sapiens
acctgcaaggtaggt

SEQ ID NO: 1129057 - DNA, 15 bp, Homo sapiens
tacctgcaaggtagg

SEQ ID NO: 1129058 - DNA, 15 bp, Homo sapiens
gtacctgcaaggtag

SEQ ID NO: 1129059 - DNA, 15 bp, Homo sapiens
ggtacctgcaaggta

SEQ ID NO: 1129060 - DNA, 15 bp, Homo sapiens
aggtacctgcaaggt

SEQ ID NO: 1129061 - DNA, 15 bp, Homo sapiens
aaggtacctgcaagg

SEQ ID NO: 1129062 - DNA, 15 bp, Homo sapiens
taaggtacctgcaag

SEQ ID NO: 1129063 - DNA, 15 bp, Homo sapiens
ttaaggtacctgcaa

SEQ ID NO: 1129064 - DNA, 15 bp, Homo sapiens
attaaggtacctgca

SEQ ID NO: 1129065 - DNA, 15 bp, Homo sapiens
aattaaggtacctgc

SEQ ID NO: 1129066 - DNA, 15 bp, Homo sapiens
aaattaaggtacctg

SEQ ID NO: 1129067 - DNA, 15 bp, Homo sapiens
aaaattaaggtacct

SEQ ID NO: 1129068 - DNA, 15 bp, Homo sapiens
caaaattaaggtacc

SEQ ID NO: 1129069 - DNA, 15 bp, Homo sapiens
ccaaaattaaggtac

SEQ ID NO: 1129070 - DNA, 15 bp, Homo sapiens
tccaaaattaaggta

SEQ ID NO: 1129071 - DNA, 15 bp, Homo sapiens
gtccaaaattaaggt

SEQ ID NO: 1129072 - DNA, 15 bp, Homo sapiens
agtccaaaattaagg

SEQ ID NO: 1129073 - DNA, 15 bp, Homo sapiens
aagtccaaaattaag

SEQ ID NO: 1129074 - DNA, 15 bp, Homo sapiens
gaagtccaaaattaa

SEQ ID NO: 1129075 - DNA, 15 bp, Homo sapiens
ggaagtccaaaatta

SEQ ID NO: 1129076 - DNA, 15 bp, Homo sapiens
gggaagtccaaaatt

SEQ ID NO: 1129077 - DNA, 15 bp, Homo sapiens
tgggaagtccaaaat

SEQ ID NO: 1129078 - DNA, 15 bp, Homo sapiens
ctgggaagtccaaaa

SEQ ID NO: 1129079 - DNA, 15 bp, Homo sapiens
gctgggaagtccaaa

SEQ ID NO: 1129080 - DNA, 15 bp, Homo sapiens
ggctgggaagtccaa

SEQ ID NO: 1129081 - DNA, 15 bp, Homo sapiens
aggctgggaagtcca

SEQ ID NO: 1129082 - DNA, 15 bp, Homo sapiens
gaggctgggaagtcc

SEQ ID NO: 1129083 - DNA, 15 bp, Homo sapiens
ggaggctgggaagtc

SEQ ID NO: 1129084 - DNA, 15 bp, Homo sapiens
ttggaggctgggaag

SEQ ID NO: 1129085 - DNA, 15 bp, Homo sapiens
tttggaggctgggaa

SEQ ID NO: 1129086 - DNA, 15 bp, Homo sapiens
ttttggaggctggga

SEQ ID NO: 1129087 - DNA, 15 bp, Homo sapiens
gttttggaggctggg

SEQ ID NO: 1129088 - DNA, 15 bp, Homo sapiens
agttttggaggctgg

SEQ ID NO: 1129089 - DNA, 15 bp, Homo sapiens
cagttttggaggctg

SEQ ID NO: 1129090 - DNA, 15 bp, Homo sapiens
acagttttggaggct

SEQ ID NO: 1129091 - DNA, 15 bp, Homo sapiens
cacagttttggaggc

SEQ ID NO: 1129092 - DNA, 15 bp, Homo sapiens
tcacagttttggagg

SEQ ID NO: 1129093 - DNA, 15 bp, Homo sapiens
ctcacagttttggag

SEQ ID NO: 1129094 - DNA, 15 bp, Homo sapiens
tctcacagttttgga

SEQ ID NO: 1129095 - DNA, 15 bp, Homo sapiens
ttctcacagttttgg

SEQ ID NO: 1129096 - DNA, 15 bp, Homo sapiens
tttctcacagttttg

SEQ ID NO: 1129097 - DNA, 15 bp, Homo sapiens
atttctcacagtttt

SEQ ID NO: 1129098 - DNA, 15 bp, Homo sapiens
tatttctcacagttt

SEQ ID NO: 1129099 - DNA, 15 bp, Homo sapiens
ttatttctcacagtt

SEQ ID NO: 1129100 - DNA, 15 bp, Homo sapiens
cttatttctcacagt

SEQ ID NO: 1129101 - DNA, 15 bp, Homo sapiens
acttatttctcacag

SEQ ID NO: 1129102 - DNA, 15 bp, Homo sapiens
aacttatttctcaca

SEQ ID NO: 1129103 - DNA, 15 bp, Homo sapiens
aaacttatttctcac

SEQ ID NO: 1129104 - DNA, 15 bp, Homo sapiens
gaaacttatttctca

SEQ ID NO: 1129105 - DNA, 15 bp, Homo sapiens
agaaacttatttctc

SEQ ID NO: 1129106 - DNA, 15 bp, Homo sapiens
cagaaacttatttct

SEQ ID NO: 1129107 - DNA, 15 bp, Homo sapiens
acagaaacttatttc

SEQ ID NO: 1129108 - DNA, 15 bp, Homo sapiens
aacagaaacttattt

SEQ ID NO: 1129109 - DNA, 15 bp, Homo sapiens
taacagaaacttatt

SEQ ID NO: 1129110 - DNA, 15 bp, Homo sapiens
ttaacagaaacttat

SEQ ID NO: 1129111 - DNA, 15 bp, Homo sapiens
cttaacagaaactta

SEQ ID NO: 1129112 - DNA, 15 bp, Homo sapiens
acttaacagaaactt

SEQ ID NO: 1129113 - DNA, 15 bp, Homo sapiens
gacttaacagaaact

SEQ ID NO: 1129114 - DNA, 15 bp, Homo sapiens
tgacttaacagaaac

SEQ ID NO: 1129115 - DNA, 15 bp, Homo sapiens
gtgacttaacagaaa

SEQ ID NO: 1129116 - DNA, 15 bp, Homo sapiens
agtgacttaacagaa

SEQ ID NO: 1129117 - DNA, 15 bp, Homo sapiens
gagtgacttaacaga

SEQ ID NO: 1129118 - DNA, 15 bp, Homo sapiens
tgagtgacttaacag

SEQ ID NO: 1129119 - DNA, 15 bp, Homo sapiens
ctgagtgacttaaca

SEQ ID NO: 1129120 - DNA, 15 bp, Homo sapiens
actgagtgacttaac

SEQ ID NO: 1129121 - DNA, 15 bp, Homo sapiens
gactgagtgacttaa

SEQ ID NO: 1129122 - DNA, 15 bp, Homo sapiens
agactgagtgactta

SEQ ID NO: 1129123 - DNA, 15 bp, Homo sapiens
cagactgagtgactt

SEQ ID NO: 1129124 - DNA, 15 bp, Homo sapiens
acagactgagtgact

SEQ ID NO: 1129125 - DNA, 15 bp, Homo sapiens
cacagactgagtgac

SEQ ID NO: 1129126 - DNA, 15 bp, Homo sapiens
ccacagactgagtga

SEQ ID NO: 1129127 - DNA, 15 bp, Homo sapiens
accacagactgagtg

SEQ ID NO: 1129128 - DNA, 15 bp, Homo sapiens
taccacagactgagt

SEQ ID NO: 1129129 - DNA, 15 bp, Homo sapiens
ataccacagactgag

SEQ ID NO: 1129130 - DNA, 15 bp, Homo sapiens
aataccacagactga

SEQ ID NO: 1129131 - DNA, 15 bp, Homo sapiens
aaataccacagactg

SEQ ID NO: 1129132 - DNA, 15 bp, Homo sapiens
aaaataccacagact

SEQ ID NO: 1129133 - DNA, 15 bp, Homo sapiens
caaaataccacagac

SEQ ID NO: 1129134 - DNA, 15 bp, Homo sapiens
acaaaataccacaga

SEQ ID NO: 1129135 - DNA, 15 bp, Homo sapiens
aacaaaataccacag

SEQ ID NO: 1129136 - DNA, 15 bp, Homo sapiens
taacaaaataccaca

SEQ ID NO: 1129137 - DNA, 15 bp, Homo sapiens
ataacaaaataccac

SEQ ID NO: 1129138 - DNA, 15 bp, Homo sapiens
cataacaaaatacca

SEQ ID NO: 1129139 - DNA, 15 bp, Homo sapiens
ccataacaaaatacc

SEQ ID NO: 1129140 - DNA, 15 bp, Homo sapiens
gccataacaaaatac

SEQ ID NO: 1129141 - DNA, 15 bp, Homo sapiens
tgccataacaaaata

SEQ ID NO: 1129142 - DNA, 15 bp, Homo sapiens
tgctcaggctgccat

SEQ ID NO: 1129143 - DNA, 15 bp, Homo sapiens
ctgctcaggctgcca

SEQ ID NO: 1129144 - DNA, 15 bp, Homo sapiens
cctgctcaggctgcc

SEQ ID NO: 1129145 - DNA, 15 bp, Homo sapiens
acctgctcaggctgc

SEQ ID NO: 1129146 - DNA, 15 bp, Homo sapiens
tacctgctcaggctg

SEQ ID NO: 1129147 - DNA, 15 bp, Homo sapiens
ctacctgctcaggct

SEQ ID NO: 1129148 - DNA, 15 bp, Homo sapiens
actacctgctcaggc

SEQ ID NO: 1129149 - DNA, 15 bp, Homo sapiens
aactacctgctcagg

SEQ ID NO: 1129150 - DNA, 15 bp, Homo sapiens
caactacctgctcag

SEQ ID NO: 1129151 - DNA, 15 bp, Homo sapiens
acaactacctgctca

SEQ ID NO: 1129152 - DNA, 15 bp, Homo sapiens
aacaactacctgctc

SEQ ID NO: 1129153 - DNA, 15 bp, Homo sapiens
gaacaactacctgct

SEQ ID NO: 1129154 - DNA, 15 bp, Homo sapiens
agaacaactacctgc

SEQ ID NO: 1129155 - DNA, 15 bp, Homo sapiens
aagaacaactacctg

SEQ ID NO: 1129156 - DNA, 15 bp, Homo sapiens
aaagaacaactacct

SEQ ID NO: 1129157 - DNA, 15 bp, Homo sapiens
gaaagaacaactacc

SEQ ID NO: 1129158 - DNA, 15 bp, Homo sapiens
tgaaagaacaactac

SEQ ID NO: 1129159 - DNA, 15 bp, Homo sapiens
ctgaaagaacaacta

SEQ ID NO: 1129160 - DNA, 15 bp, Homo sapiens
tctgaaagaacaact

SEQ ID NO: 1129161 - DNA, 15 bp, Homo sapiens
ttctgaaagaacaac

SEQ ID NO: 1129162 - DNA, 15 bp, Homo sapiens
cttctgaaagaacaa

SEQ ID NO: 1129163 - DNA, 15 bp, Homo sapiens
ccttctgaaagaaca

SEQ ID NO: 1129164 - DNA, 15 bp, Homo sapiens
accttctgaaagaac

SEQ ID NO: 1129165 - DNA, 15 bp, Homo sapiens
caccttctgaaagaa

SEQ ID NO: 1129166 - DNA, 15 bp, Homo sapiens
acaccttctgaaaga

SEQ ID NO: 1129167 - DNA, 15 bp, Homo sapiens
aacaccttctgaaag

SEQ ID NO: 1129168 - DNA, 15 bp, Homo sapiens
caacaccttctgaaa

SEQ ID NO: 1129169 - DNA, 15 bp, Homo sapiens
tcaacaccttctgaa

SEQ ID NO: 1129170 - DNA, 15 bp, Homo sapiens
atcaacaccttctga

SEQ ID NO: 1129171 - DNA, 15 bp, Homo sapiens
tatcaacaccttctg

SEQ ID NO: 1129172 - DNA, 15 bp, Homo sapiens
ttatcaacaccttct

SEQ ID NO: 1129173 - DNA, 15 bp, Homo sapiens
attatcaacaccttc

SEQ ID NO: 1129174 - DNA, 15 bp, Homo sapiens
tattatcaacacctt

SEQ ID NO: 1129175 - DNA, 15 bp, Homo sapiens
ttattatcaacacct

SEQ ID NO: 1129176 - DNA, 15 bp, Homo sapiens
gttattatcaacacc

SEQ ID NO: 1129177 - DNA, 15 bp, Homo sapiens
ggttattatcaacac

SEQ ID NO: 1129178 - DNA, 15 bp, Homo sapiens
tggttattatcaaca

SEQ ID NO: 1129179 - DNA, 15 bp, Homo sapiens
gtggttattatcaac

SEQ ID NO: 1129180 - DNA, 15 bp, Homo sapiens
tgtggttattatcaa

SEQ ID NO: 1129181 - DNA, 15 bp, Homo sapiens
atgtggttattatca

SEQ ID NO: 1129182 - DNA, 15 bp, Homo sapiens
catgtggttattatc

SEQ ID NO: 1129183 - DNA, 15 bp, Homo sapiens
gcatgtggttattat

SEQ ID NO: 1129184 - DNA, 15 bp, Homo sapiens
tgcatgtggttatta

SEQ ID NO: 1129185 - DNA, 15 bp, Homo sapiens
ttgcatgtggttatt

SEQ ID NO: 1129186 - DNA, 15 bp, Homo sapiens
gttgcatgtggttat

SEQ ID NO: 1129187 - DNA, 15 bp, Homo sapiens
tgttgcatgtggtta

SEQ ID NO: 1129188 - DNA, 15 bp, Homo sapiens
gtgttgcatgtggtt

SEQ ID NO: 1129189 - DNA, 15 bp, Homo sapiens
ggtgttgcatgtggt

SEQ ID NO: 1129190 - DNA, 15 bp, Homo sapiens
tggtgttgcatgtgg

SEQ ID NO: 1129191 - DNA, 15 bp, Homo sapiens
ttggtgttgcatgtg

SEQ ID NO: 1129192 - DNA, 15 bp, Homo sapiens
cttggtgttgcatgt

SEQ ID NO: 1129193 - DNA, 15 bp, Homo sapiens
acttggtgttgcatg

SEQ ID NO: 1129194 - DNA, 15 bp, Homo sapiens
gacttggtgttgcat

SEQ ID NO: 1129195 - DNA, 15 bp, Homo sapiens
tgacttggtgttgca

SEQ ID NO: 1129196 - DNA, 15 bp, Homo sapiens
gtgacttggtgttgc

SEQ ID NO: 1129197 - DNA, 15 bp, Homo sapiens
tgtgacttggtgttg

SEQ ID NO: 1129198 - DNA, 15 bp, Homo sapiens
ttgtgacttggtgtt

SEQ ID NO: 1129199 - DNA, 15 bp, Homo sapiens
tttgtgacttggtgt

SEQ ID NO: 1129200 - DNA, 15 bp, Homo sapiens
atttgtgacttggtg

SEQ ID NO: 1129201 - DNA, 15 bp, Homo sapiens
tatttgtgacttggt

SEQ ID NO: 1129202 - DNA, 15 bp, Homo sapiens
ttatttgtgacttgg

SEQ ID NO: 1129203 - DNA, 15 bp, Homo sapiens
attatttgtgacttg

SEQ ID NO: 1129204 - DNA, 15 bp, Homo sapiens
tattatttgtgactt

SEQ ID NO: 1129205 - DNA, 15 bp, Homo sapiens
ttattatttgtgact

SEQ ID NO: 1129206 - DNA, 15 bp, Homo sapiens
tttattatttgtgac

SEQ ID NO: 1129207 - DNA, 15 bp, Homo sapiens
ttttattatttgtga

SEQ ID NO: 1129208 - DNA, 15 bp, Homo sapiens
gttttattatttgtg

SEQ ID NO: 1129209 - DNA, 15 bp, Homo sapiens
tgttttattatttgt

SEQ ID NO: 1129210 - DNA, 15 bp, Homo sapiens
ctgttttattatttg

SEQ ID NO: 1129211 - DNA, 15 bp, Homo sapiens
tctgttttattattt

SEQ ID NO: 1129212 - DNA, 15 bp, Homo sapiens
atctgttttattatt

SEQ ID NO: 1129213 - DNA, 15 bp, Homo sapiens
catctgttttattat

SEQ ID NO: 1129214 - DNA, 15 bp, Homo sapiens
acatctgttttatta

SEQ ID NO: 1129215 - DNA, 15 bp, Homo sapiens
tacatctgttttatt

SEQ ID NO: 1129216 - DNA, 15 bp, Homo sapiens
ttacatctgttttat

SEQ ID NO: 1129217 - DNA, 15 bp, Homo sapiens
gttacatctgtttta

SEQ ID NO: 1129218 - DNA, 15 bp, Homo sapiens
agttacatctgtttt

SEQ ID NO: 1129219 - DNA, 15 bp, Homo sapiens
aagttacatctgttt

SEQ ID NO: 1129220 - DNA, 15 bp, Homo sapiens
taagttacatctgtt

SEQ ID NO: 1129221 - DNA, 15 bp, Homo sapiens
ataagttacatctgt

SEQ ID NO: 1129222 - DNA, 15 bp, Homo sapiens
tataagttacatctg

SEQ ID NO: 1129223 - DNA, 15 bp, Homo sapiens
atataagttacatct

SEQ ID NO: 1129224 - DNA, 15 bp, Homo sapiens
aatataagttacatc

SEQ ID NO: 1129225 - DNA, 15 bp, Homo sapiens
gaatataagttacat

SEQ ID NO: 1129226 - DNA, 15 bp, Homo sapiens
tgaatataagttaca

SEQ ID NO: 1129227 - DNA, 15 bp, Homo sapiens
atgaatataagttac

SEQ ID NO: 1129228 - DNA, 15 bp, Homo sapiens
tatgaatataagtta

SEQ ID NO: 1129229 - DNA, 15 bp, Homo sapiens
gtatgaatataagtt

SEQ ID NO: 1129230 - DNA, 15 bp, Homo sapiens
tgtatgaatataagt

SEQ ID NO: 1129231 - DNA, 15 bp, Homo sapiens
ctgtatgaatataag

SEQ ID NO: 1129232 - DNA, 15 bp, Homo sapiens
tctgtatgaatataa

SEQ ID NO: 1129233 - DNA, 15 bp, Homo sapiens
ttctgtatgaatata

SEQ ID NO: 1129234 - DNA, 15 bp, Homo sapiens
tttctgtatgaatat

SEQ ID NO: 1129235 - DNA, 15 bp, Homo sapiens
ctttctgtatgaata

SEQ ID NO: 1129236 - DNA, 15 bp, Homo sapiens
actttctgtatgaat

SEQ ID NO: 1129237 - DNA, 15 bp, Homo sapiens
aactttctgtatgaa

SEQ ID NO: 1129238 - DNA, 15 bp, Homo sapiens
caactttctgtatga

SEQ ID NO: 1129239 - DNA, 15 bp, Homo sapiens
ccaactttctgtatg

SEQ ID NO: 1129240 - DNA, 15 bp, Homo sapiens
cccaactttctgtat

SEQ ID NO: 1129241 - DNA, 15 bp, Homo sapiens
gcccaactttctgta

SEQ ID NO: 1129242 - DNA, 15 bp, Homo sapiens
tgcccaactttctgt

SEQ ID NO: 1129243 - DNA, 15 bp, Homo sapiens
gtgcccaactttctg

SEQ ID NO: 1129244 - DNA, 15 bp, Homo sapiens
agtgcccaactttct

SEQ ID NO: 1129245 - DNA, 15 bp, Homo sapiens
cagtgcccaactttc

SEQ ID NO: 1129246 - DNA, 15 bp, Homo sapiens
gcagtgcccaacttt

SEQ ID NO: 1129247 - DNA, 15 bp, Homo sapiens
ggcagtgcccaactt

SEQ ID NO: 1129248 - DNA, 15 bp, Homo sapiens
tggcagtgcccaact

SEQ ID NO: 1129249 - DNA, 15 bp, Homo sapiens
atggcagtgcccaac

SEQ ID NO: 1129250 - DNA, 15 bp, Homo sapiens
aatggcagtgcccaa

SEQ ID NO: 1129251 - DNA, 15 bp, Homo sapiens
caatggcagtgccca

SEQ ID NO: 1129252 - DNA, 15 bp, Homo sapiens
gcaatggcagtgccc

SEQ ID NO: 1129253 - DNA, 15 bp, Homo sapiens
ggcaatggcagtgcc

SEQ ID NO: 1129254 - DNA, 15 bp, Homo sapiens
aggcaatggcagtgc

SEQ ID NO: 1129255 - DNA, 15 bp, Homo sapiens
aaggcaatggcagtg

SEQ ID NO: 1129256 - DNA, 15 bp, Homo sapiens
caaggcaatggcagt

SEQ ID NO: 1129257 - DNA, 15 bp, Homo sapiens
acaaggcaatggcag

SEQ ID NO: 1129258 - DNA, 15 bp, Homo sapiens
aacaaggcaatggca

SEQ ID NO: 1129259 - DNA, 15 bp, Homo sapiens
caacaaggcaatggc

SEQ ID NO: 1129260 - DNA, 15 bp, Homo sapiens
ccaacaaggcaatgg

SEQ ID NO: 1129261 - DNA, 15 bp, Homo sapiens
accaacaaggcaatg

SEQ ID NO: 1129262 - DNA, 15 bp, Homo sapiens
aaccaacaaggcaat

SEQ ID NO: 1129263 - DNA, 15 bp, Homo sapiens
aaaccaacaaggcaa

SEQ ID NO: 1129264 - DNA, 15 bp, Homo sapiens
taaaccaacaaggca

SEQ ID NO: 1129265 - DNA, 15 bp, Homo sapiens
gtaaaccaacaaggc

SEQ ID NO: 1129266 - DNA, 15 bp, Homo sapiens
tgtaaaccaacaagg

SEQ ID NO: 1129267 - DNA, 15 bp, Homo sapiens
gtgtaaaccaacaag

SEQ ID NO: 1129268 - DNA, 15 bp, Homo sapiens
cgtgtaaaccaacaa

SEQ ID NO: 1129269 - DNA, 15 bp, Homo sapiens
ccgtgtaaaccaaca

SEQ ID NO: 1129270 - DNA, 15 bp, Homo sapiens
gccgtgtaaaccaac

SEQ ID NO: 1129271 - DNA, 15 bp, Homo sapiens
agccgtgtaaaccaa

SEQ ID NO: 1129272 - DNA, 15 bp, Homo sapiens
cagccgtgtaaacca

SEQ ID NO: 1129273 - DNA, 15 bp, Homo sapiens
acagccgtgtaaacc

SEQ ID NO: 1129274 - DNA, 15 bp, Homo sapiens
cacagccgtgtaaac

SEQ ID NO: 1129275 - DNA, 15 bp, Homo sapiens
gcacagccgtgtaaa

SEQ ID NO: 1129276 - DNA, 15 bp, Homo sapiens
agcacagccgtgtaa

SEQ ID NO: 1129277 - DNA, 15 bp, Homo sapiens
tagcacagccgtgta

SEQ ID NO: 1129278 - DNA, 15 bp, Homo sapiens
ctagcacagccgtgt

SEQ ID NO: 1129279 - DNA, 15 bp, Homo sapiens
actagcacagccgtg

SEQ ID NO: 1129280 - DNA, 15 bp, Homo sapiens
aactagcacagccgt

SEQ ID NO: 1129281 - DNA, 15 bp, Homo sapiens
gaactagcacagccg

SEQ ID NO: 1129282 - DNA, 15 bp, Homo sapiens
tgaactagcacagcc

SEQ ID NO: 1129283 - DNA, 15 bp, Homo sapiens
ctgaactagcacagc

SEQ ID NO: 1129284 - DNA, 15 bp, Homo sapiens
actgaactagcacag

SEQ ID NO: 1129285 - DNA, 15 bp, Homo sapiens
tactgaactagcaca

SEQ ID NO: 1129286 - DNA, 15 bp, Homo sapiens
ctactgaactagcac

SEQ ID NO: 1129287 - DNA, 15 bp, Homo sapiens
gctactgaactagca

SEQ ID NO: 1129288 - DNA, 15 bp, Homo sapiens
tgctactgaactagc

SEQ ID NO: 1129289 - DNA, 15 bp, Homo sapiens
ctgctactgaactag

SEQ ID NO: 1129290 - DNA, 15 bp, Homo sapiens
tctgctactgaacta

SEQ ID NO: 1129291 - DNA, 15 bp, Homo sapiens
ttctgctactgaact

SEQ ID NO: 1129292 - DNA, 15 bp, Homo sapiens
tttctgctactgaac

SEQ ID NO: 1129293 - DNA, 15 bp, Homo sapiens
ctttctgctactgaa

SEQ ID NO: 1129294 - DNA, 15 bp, Homo sapiens
cctttctgctactga

SEQ ID NO: 1129295 - DNA, 15 bp, Homo sapiens
acctttctgctactg

SEQ ID NO: 1129296 - DNA, 15 bp, Homo sapiens
cacctttctgctact

SEQ ID NO: 1129297 - DNA, 15 bp, Homo sapiens
gcacctttctgctac

SEQ ID NO: 1129298 - DNA, 15 bp, Homo sapiens
agcacctttctgcta

SEQ ID NO: 1129299 - DNA, 15 bp, Homo sapiens
cagcacctttctgct

SEQ ID NO: 1129300 - DNA, 15 bp, Homo sapiens
ccagcacctttctgc

SEQ ID NO: 1129301 - DNA, 15 bp, Homo sapiens
accagcacctttctg

SEQ ID NO: 1129302 - DNA, 15 bp, Homo sapiens
gaccagcacctttct

SEQ ID NO: 1129303 - DNA, 15 bp, Homo sapiens
agaccagcacctttc

SEQ ID NO: 1129304 - DNA, 15 bp, Homo sapiens
gagaccagcaccttt

SEQ ID NO: 1129305 - DNA, 15 bp, Homo sapiens
ggagaccagcacctt

SEQ ID NO: 1129306 - DNA, 15 bp, Homo sapiens
aggagaccagcacct

SEQ ID NO: 1129307 - DNA, 15 bp, Homo sapiens
aaggagaccagcacc

SEQ ID NO: 1129308 - DNA, 15 bp, Homo sapiens
aaaggagaccagcac

SEQ ID NO: 1129309 - DNA, 15 bp, Homo sapiens
taaaggagaccagca

SEQ ID NO: 1129310 - DNA, 15 bp, Homo sapiens
gtaaaggagaccagc

SEQ ID NO: 1129311 - DNA, 15 bp, Homo sapiens
agtaaaggagaccag

SEQ ID NO: 1129312 - DNA, 15 bp, Homo sapiens
gagtaaaggagacca

SEQ ID NO: 1129313 - DNA, 15 bp, Homo sapiens
tgagtaaaggagacc

SEQ ID NO: 1129314 - DNA, 15 bp, Homo sapiens
ctgagtaaaggagac

SEQ ID NO: 1129315 - DNA, 15 bp, Homo sapiens
actgagtaaaggaga

SEQ ID NO: 1129316 - DNA, 15 bp, Homo sapiens
aactgagtaaaggag

SEQ ID NO: 1129317 - DNA, 15 bp, Homo sapiens
aaactgagtaaagga

SEQ ID NO: 1129318 - DNA, 15 bp, Homo sapiens
taaactgagtaaagg

SEQ ID NO: 1129319 - DNA, 15 bp, Homo sapiens
gtaaactgagtaaag

SEQ ID NO: 1129320 - DNA, 15 bp, Homo sapiens
tgtaaactgagtaaa

SEQ ID NO: 1129321 - DNA, 15 bp, Homo sapiens
ttgtaaactgagtaa

SEQ ID NO: 1129322 - DNA, 15 bp, Homo sapiens
attgtaaactgagta

SEQ ID NO: 1129323 - DNA, 15 bp, Homo sapiens
gattgtaaactgagt

SEQ ID NO: 1129324 - DNA, 15 bp, Homo sapiens
agattgtaaactgag

SEQ ID NO: 1129325 - DNA, 15 bp, Homo sapiens
tagattgtaaactga

SEQ ID NO: 1129326 - DNA, 15 bp, Homo sapiens
ctagattgtaaactg

SEQ ID NO: 1129327 - DNA, 15 bp, Homo sapiens
cctagattgtaaact

SEQ ID NO: 1129328 - DNA, 15 bp, Homo sapiens
gcctagattgtaaac

SEQ ID NO: 1129329 - DNA, 15 bp, Homo sapiens
tgcctagattgtaaa

SEQ ID NO: 1129330 - DNA, 15 bp, Homo sapiens
ctgcctagattgtaa

SEQ ID NO: 1129331 - DNA, 15 bp, Homo sapiens
actgcctagattgta

SEQ ID NO: 1129332 - DNA, 15 bp, Homo sapiens
tactgcctagattgt

SEQ ID NO: 1129333 - DNA, 15 bp, Homo sapiens
ctactgcctagattg

SEQ ID NO: 1129334 - DNA, 15 bp, Homo sapiens
tctactgcctagatt

SEQ ID NO: 1129335 - DNA, 15 bp, Homo sapiens
ttctactgcctagat

SEQ ID NO: 1129336 - DNA, 15 bp, Homo sapiens
attctactgcctaga

SEQ ID NO: 1129337 - DNA, 15 bp, Homo sapiens
cattctactgcctag

SEQ ID NO: 1129338 - DNA, 15 bp, Homo sapiens
acattctactgccta

SEQ ID NO: 1129339 - DNA, 15 bp, Homo sapiens
tacattctactgcct

SEQ ID NO: 1129340 - DNA, 15 bp, Homo sapiens
ttacattctactgcc

SEQ ID NO: 1129341 - DNA, 15 bp, Homo sapiens
attacattctactgc

SEQ ID NO: 1129342 - DNA, 15 bp, Homo sapiens
gattacattctactg

SEQ ID NO: 1129343 - DNA, 15 bp, Homo sapiens
tgattacattctact

SEQ ID NO: 1129344 - DNA, 15 bp, Homo sapiens
gtgattacattctac

SEQ ID NO: 1129345 - DNA, 15 bp, Homo sapiens
agtgattacattcta

SEQ ID NO: 1129346 - DNA, 15 bp, Homo sapiens
cagtgattacattct

SEQ ID NO: 1129347 - DNA, 15 bp, Homo sapiens
gcagtgattacattc

SEQ ID NO: 1129348 - DNA, 15 bp, Homo sapiens
agcagtgattacatt

SEQ ID NO: 1129349 - DNA, 15 bp, Homo sapiens
aagcagtgattacat

SEQ ID NO: 1129350 - DNA, 15 bp, Homo sapiens
aaagcagtgattaca

SEQ ID NO: 1129351 - DNA, 15 bp, Homo sapiens
taaagcagtgattac

SEQ ID NO: 1129352 - DNA, 15 bp, Homo sapiens
ttaaagcagtgatta

SEQ ID NO: 1129353 - DNA, 15 bp, Homo sapiens
tttaaagcagtgatt

SEQ ID NO: 1129354 - DNA, 15 bp, Homo sapiens
gtttaaagcagtgat

SEQ ID NO: 1129355 - DNA, 15 bp, Homo sapiens
agtttaaagcagtga

SEQ ID NO: 1129356 - DNA, 15 bp, Homo sapiens
aagtttaaagcagtg

SEQ ID NO: 1129357 - DNA, 15 bp, Homo sapiens
caagtttaaagcagt

SEQ ID NO: 1129358 - DNA, 15 bp, Homo sapiens
tcaagtttaaagcag

SEQ ID NO: 1129359 - DNA, 15 bp, Homo sapiens
atcaagtttaaagca

SEQ ID NO: 1129360 - DNA, 15 bp, Homo sapiens
tatcaagtttaaagc

SEQ ID NO: 1129361 - DNA, 15 bp, Homo sapiens
gtatcaagtttaaag

SEQ ID NO: 1129362 - DNA, 15 bp, Homo sapiens
agtatcaagtttaaa

SEQ ID NO: 1129363 - DNA, 15 bp, Homo sapiens
cagtatcaagtttaa

SEQ ID NO: 1129364 - DNA, 15 bp, Homo sapiens
gcagtatcaagttta

SEQ ID NO: 1129365 - DNA, 15 bp, Homo sapiens
agcagtatcaagttt

SEQ ID NO: 1129366 - DNA, 15 bp, Homo sapiens
aagcagtatcaagtt

SEQ ID NO: 1129367 - DNA, 15 bp, Homo sapiens
taagcagtatcaagt

SEQ ID NO: 1129368 - DNA, 15 bp, Homo sapiens
ctaagcagtatcaag

SEQ ID NO: 1129369 - DNA, 15 bp, Homo sapiens
cctaagcagtatcaa

SEQ ID NO: 1129370 - DNA, 15 bp, Homo sapiens
ccctaagcagtatca

SEQ ID NO: 1129371 - DNA, 15 bp, Homo sapiens
tccctaagcagtatc

SEQ ID NO: 1129372 - DNA, 15 bp, Homo sapiens
ctccctaagcagtat

SEQ ID NO: 1129373 - DNA, 15 bp, Homo sapiens
tctccctaagcagta

SEQ ID NO: 1129374 - DNA, 15 bp, Homo sapiens
ctctccctaagcagt

SEQ ID NO: 1129375 - DNA, 15 bp, Homo sapiens
tctctccctaagcag

SEQ ID NO: 1129376 - DNA, 15 bp, Homo sapiens
ttctctccctaagca

SEQ ID NO: 1129377 - DNA, 15 bp, Homo sapiens
attctctccctaagc

SEQ ID NO: 1129378 - DNA, 15 bp, Homo sapiens
gattctctccctaag

SEQ ID NO: 1129379 - DNA, 15 bp, Homo sapiens
tgattctctccctaa

SEQ ID NO: 1129380 - DNA, 15 bp, Homo sapiens
atgattctctcccta

SEQ ID NO: 1129381 - DNA, 15 bp, Homo sapiens
aatgattctctccct

SEQ ID NO: 1129382 - DNA, 15 bp, Homo sapiens
caatgattctctccc

SEQ ID NO: 1129383 - DNA, 15 bp, Homo sapiens
ccaatgattctctcc

SEQ ID NO: 1129384 - DNA, 15 bp, Homo sapiens
accaatgattctctc

SEQ ID NO: 1129385 - DNA, 15 bp, Homo sapiens
caccaatgattctct

SEQ ID NO: 1129386 - DNA, 15 bp, Homo sapiens
gcaccaatgattctc

SEQ ID NO: 1129387 - DNA, 15 bp, Homo sapiens
agcaccaatgattct

SEQ ID NO: 1129388 - DNA, 15 bp, Homo sapiens
cagcaccaatgattc

SEQ ID NO: 1129389 - DNA, 15 bp, Homo sapiens
ccagcaccaatgatt

SEQ ID NO: 1129390 - DNA, 15 bp, Homo sapiens
cccagcaccaatgat

SEQ ID NO: 1129391 - DNA, 15 bp, Homo sapiens
acccagcaccaatga

SEQ ID NO: 1129392 - DNA, 15 bp, Homo sapiens
tacccagcaccaatg

SEQ ID NO: 1129393 - DNA, 15 bp, Homo sapiens
ttacccagcaccaat

SEQ ID NO: 1129394 - DNA, 15 bp, Homo sapiens
gttacccagcaccaa

SEQ ID NO: 1129395 - DNA, 15 bp, Homo sapiens
agttacccagcacca

SEQ ID NO: 1129396 - DNA, 15 bp, Homo sapiens
aagttacccagcacc

SEQ ID NO: 1129397 - DNA, 15 bp, Homo sapiens
aaagttacccagcac

SEQ ID NO: 1129398 - DNA, 15 bp, Homo sapiens
caaagttacccagca

SEQ ID NO: 1129399 - DNA, 15 bp, Homo sapiens
ccaaagttacccagc

SEQ ID NO: 1129400 - DNA, 15 bp, Homo sapiens
cccaaagttacccag

SEQ ID NO: 1129401 - DNA, 15 bp, Homo sapiens
acccaaagttaccca

SEQ ID NO: 1129402 - DNA, 15 bp, Homo sapiens
aacccaaagttaccc

SEQ ID NO: 1129403 - DNA, 15 bp, Homo sapiens
gaacccaaagttacc

SEQ ID NO: 1129404 - DNA, 15 bp, Homo sapiens
agaacccaaagttac

SEQ ID NO: 1129405 - DNA, 15 bp, Homo sapiens
tagaacccaaagtta

SEQ ID NO: 1129406 - DNA, 15 bp, Homo sapiens
ctagaacccaaagtt

SEQ ID NO: 1129407 - DNA, 15 bp, Homo sapiens
cctagaacccaaagt

SEQ ID NO: 1129408 - DNA, 15 bp, Homo sapiens
acctagaacccaaag

SEQ ID NO: 1129409 - DNA, 15 bp, Homo sapiens
aacctagaacccaaa

SEQ ID NO: 1129410 - DNA, 15 bp, Homo sapiens
aaacctagaacccaa

SEQ ID NO: 1129411 - DNA, 15 bp, Homo sapiens
taaacctagaaccca

SEQ ID NO: 1129412 - DNA, 15 bp, Homo sapiens
gtaaacctagaaccc

SEQ ID NO: 1129413 - DNA, 15 bp, Homo sapiens
agtaaacctagaacc

SEQ ID NO: 1129414 - DNA, 15 bp, Homo sapiens
aagtaaacctagaac

SEQ ID NO: 1129415 - DNA, 15 bp, Homo sapiens
aaagtaaacctagaa

SEQ ID NO: 1129416 - DNA, 15 bp, Homo sapiens
aaaagtaaacctaga

SEQ ID NO: 1129417 - DNA, 15 bp, Homo sapiens
aaaaagtaaacctag

SEQ ID NO: 1129418 - DNA, 15 bp, Homo sapiens
caaaaagtaaaccta

SEQ ID NO: 1129419 - DNA, 15 bp, Homo sapiens
acaaaaagtaaacct

SEQ ID NO: 1129420 - DNA, 15 bp, Homo sapiens
cacaaaaagtaaacc

SEQ ID NO: 1129421 - DNA, 15 bp, Homo sapiens
acacaaaaagtaaac

SEQ ID NO: 1129422 - DNA, 15 bp, Homo sapiens
tacacaaaaagtaaa

SEQ ID NO: 1129423 - DNA, 15 bp, Homo sapiens
atacacaaaaagtaa

SEQ ID NO: 1129424 - DNA, 15 bp, Homo sapiens
tatacacaaaaagta

SEQ ID NO: 1129425 - DNA, 15 bp, Homo sapiens
atatacacaaaaagt

SEQ ID NO: 1129426 - DNA, 15 bp, Homo sapiens
tatatacacaaaaag

SEQ ID NO: 1129427 - DNA, 15 bp, Homo sapiens
atatatacacaaaaa

SEQ ID NO: 1129428 - DNA, 15 bp, Homo sapiens
tatatatacacaaaa

SEQ ID NO: 1129429 - DNA, 15 bp, Homo sapiens
ttatatatacacaaa

SEQ ID NO: 1129430 - DNA, 15 bp, Homo sapiens
gttatatatacacaa

SEQ ID NO: 1129431 - DNA, 15 bp, Homo sapiens
agttatatatacaca

SEQ ID NO: 1129432 - DNA, 15 bp, Homo sapiens
cagttatatatacac

SEQ ID NO: 1129433 - DNA, 15 bp, Homo sapiens
acagttatatataca

SEQ ID NO: 1129434 - DNA, 15 bp, Homo sapiens
aacagttatatatac

SEQ ID NO: 1129435 - DNA, 15 bp, Homo sapiens
aaacagttatatata

SEQ ID NO: 1129436 - DNA, 15 bp, Homo sapiens
aaaacagttatatat

SEQ ID NO: 1129437 - DNA, 15 bp, Homo sapiens
aaaaacagttatata

SEQ ID NO: 1129438 - DNA, 15 bp, Homo sapiens
caaaaacagttatat

SEQ ID NO: 1129439 - DNA, 15 bp, Homo sapiens
ccaaaaacagttata

SEQ ID NO: 1129440 - DNA, 15 bp, Homo sapiens
accaaaaacagttat

SEQ ID NO: 1129441 - DNA, 15 bp, Homo sapiens
taccaaaaacagtta

SEQ ID NO: 1129442 - DNA, 15 bp, Homo sapiens
ttaccaaaaacagtt

SEQ ID NO: 1129443 - DNA, 15 bp, Homo sapiens
tttaccaaaaacagt

SEQ ID NO: 1129444 - DNA, 15 bp, Homo sapiens
atttaccaaaaacag

SEQ ID NO: 1129445 - DNA, 15 bp, Homo sapiens
gatttaccaaaaaca

SEQ ID NO: 1129446 - DNA, 15 bp, Homo sapiens
tgatttaccaaaaac

SEQ ID NO: 1129447 - DNA, 15 bp, Homo sapiens
gtgatttaccaaaaa

SEQ ID NO: 1129448 - DNA, 15 bp, Homo sapiens
tgtgatttaccaaaa

SEQ ID NO: 1129449 - DNA, 15 bp, Homo sapiens
ttgtgatttaccaaa

SEQ ID NO: 1129450 - DNA, 15 bp, Homo sapiens
cttgtgatttaccaa

SEQ ID NO: 1129451 - DNA, 15 bp, Homo sapiens
acttgtgatttacca

SEQ ID NO: 1129452 - DNA, 15 bp, Homo sapiens
aacttgtgatttacc

SEQ ID NO: 1129453 - DNA, 15 bp, Homo sapiens
aaacttgtgatttac

SEQ ID NO: 1129454 - DNA, 15 bp, Homo sapiens
gaaacttgtgattta

SEQ ID NO: 1129455 - DNA, 15 bp, Homo sapiens
agaaacttgtgattt

SEQ ID NO: 1129456 - DNA, 15 bp, Homo sapiens
cagaaacttgtgatt

SEQ ID NO: 1129457 - DNA, 15 bp, Homo sapiens
ccagaaacttgtgat

SEQ ID NO: 1129458 - DNA, 15 bp, Homo sapiens
cccagaaacttgtga

SEQ ID NO: 1129459 - DNA, 15 bp, Homo sapiens
gcccagaaacttgtg

SEQ ID NO: 1129460 - DNA, 15 bp, Homo sapiens
agcccagaaacttgt

SEQ ID NO: 1129461 - DNA, 15 bp, Homo sapiens
aagcccagaaacttg

SEQ ID NO: 1129462 - DNA, 15 bp, Homo sapiens
caagcccagaaactt

SEQ ID NO: 1129463 - DNA, 15 bp, Homo sapiens
acaagcccagaaact

SEQ ID NO: 1129464 - DNA, 15 bp, Homo sapiens
gacaagcccagaaac

SEQ ID NO: 1129465 - DNA, 15 bp, Homo sapiens
cgacaagcccagaaa

SEQ ID NO: 1129466 - DNA, 15 bp, Homo sapiens
tcgacaagcccagaa

SEQ ID NO: 1129467 - DNA, 15 bp, Homo sapiens
ttcgacaagcccaga

SEQ ID NO: 1129468 - DNA, 15 bp, Homo sapiens
attcgacaagcccag

SEQ ID NO: 1129469 - DNA, 15 bp, Homo sapiens
aattcgacaagccca

SEQ ID NO: 1129470 - DNA, 15 bp, Homo sapiens
taattcgacaagccc

SEQ ID NO: 1129471 - DNA, 15 bp, Homo sapiens
ctaattcgacaagcc

SEQ ID NO: 1129472 - DNA, 15 bp, Homo sapiens
tctaattcgacaagc

SEQ ID NO: 1129473 - DNA, 15 bp, Homo sapiens
atctaattcgacaag

SEQ ID NO: 1129474 - DNA, 15 bp, Homo sapiens
aatctaattcgacaa

SEQ ID NO: 1129475 - DNA, 15 bp, Homo sapiens
aaatctaattcgaca

SEQ ID NO: 1129476 - DNA, 15 bp, Homo sapiens
aaaatctaattcgac

SEQ ID NO: 1129477 - DNA, 15 bp, Homo sapiens
caaaatctaattcga

SEQ ID NO: 1129478 - DNA, 15 bp, Homo sapiens
acaaaatctaattcg

SEQ ID NO: 1129479 - DNA, 15 bp, Homo sapiens
aacaaaatctaattc

SEQ ID NO: 1129480 - DNA, 15 bp, Homo sapiens
taacaaaatctaatt

SEQ ID NO: 1129481 - DNA, 15 bp, Homo sapiens
gtaacaaaatctaat

SEQ ID NO: 1129482 - DNA, 15 bp, Homo sapiens
tgtaacaaaatctaa

SEQ ID NO: 1129483 - DNA, 15 bp, Homo sapiens
ctgtaacaaaatcta

SEQ ID NO: 1129484 - DNA, 15 bp, Homo sapiens
tctgtaacaaaatct

SEQ ID NO: 1129485 - DNA, 15 bp, Homo sapiens
atctgtaacaaaatc

SEQ ID NO: 1129486 - DNA, 15 bp, Homo sapiens
aatctgtaacaaaat

SEQ ID NO: 1129487 - DNA, 15 bp, Homo sapiens
taatctgtaacaaaa

SEQ ID NO: 1129488 - DNA, 15 bp, Homo sapiens
ataatctgtaacaaa

SEQ ID NO: 1129489 - DNA, 15 bp, Homo sapiens
cataatctgtaacaa

SEQ ID NO: 1129490 - DNA, 15 bp, Homo sapiens
tcataatctgtaaca

SEQ ID NO: 1129491 - DNA, 15 bp, Homo sapiens
ctcataatctgtaac

SEQ ID NO: 1129492 - DNA, 15 bp, Homo sapiens
gctcataatctgtaa

SEQ ID NO: 1129493 - DNA, 15 bp, Homo sapiens
agctcataatctgta

SEQ ID NO: 1129494 - DNA, 15 bp, Homo sapiens
aagctcataatctgt

SEQ ID NO: 1129495 - DNA, 15 bp, Homo sapiens
aaagctcataatctg

SEQ ID NO: 1129496 - DNA, 15 bp, Homo sapiens
taaagctcataatct

SEQ ID NO: 1129497 - DNA, 15 bp, Homo sapiens
ataaagctcataatc

SEQ ID NO: 1129498 - DNA, 15 bp, Homo sapiens
aataaagctcataat

SEQ ID NO: 1129499 - DNA, 15 bp, Homo sapiens
taataaagctcataa

SEQ ID NO: 1129500 - DNA, 15 bp, Homo sapiens
ataataaagctcata

SEQ ID NO: 1129501 - DNA, 15 bp, Homo sapiens
cataataaagctcat

SEQ ID NO: 1129502 - DNA, 15 bp, Homo sapiens
gcataataaagctca

SEQ ID NO: 1129503 - DNA, 15 bp, Homo sapiens
agcataataaagctc

SEQ ID NO: 1129504 - DNA, 15 bp, Homo sapiens
tagcataataaagct

SEQ ID NO: 1129505 - DNA, 15 bp, Homo sapiens
atagcataataaagc

SEQ ID NO: 1129506 - DNA, 15 bp, Homo sapiens
tatagcataataaag

SEQ ID NO: 1129507 - DNA, 15 bp, Homo sapiens
gtatagcataataaa

SEQ ID NO: 1129508 - DNA, 15 bp, Homo sapiens
tgtatagcataataa

SEQ ID NO: 1129509 - DNA, 15 bp, Homo sapiens
ctgtatagcataata

SEQ ID NO: 1129510 - DNA, 15 bp, Homo sapiens
actgtatagcataat

SEQ ID NO: 1129511 - DNA, 15 bp, Homo sapiens
aactgtatagcataa

SEQ ID NO: 1129512 - DNA, 15 bp, Homo sapiens
taactgtatagcata

SEQ ID NO: 1129513 - DNA, 15 bp, Homo sapiens
ctaactgtatagcat

SEQ ID NO: 1129514 - DNA, 15 bp, Homo sapiens
actaactgtatagca

SEQ ID NO: 1129515 - DNA, 15 bp, Homo sapiens
aactaactgtatagc

SEQ ID NO: 1129516 - DNA, 15 bp, Homo sapiens
caactaactgtatag

SEQ ID NO: 1129517 - DNA, 15 bp, Homo sapiens
acaactaactgtata

SEQ ID NO: 1129518 - DNA, 15 bp, Homo sapiens
tacaactaactgtat

SEQ ID NO: 1129519 - DNA, 15 bp, Homo sapiens
atacaactaactgta

SEQ ID NO: 1129520 - DNA, 15 bp, Homo sapiens
catacaactaactgt

SEQ ID NO: 1129521 - DNA, 15 bp, Homo sapiens
acatacaactaactg

SEQ ID NO: 1129522 - DNA, 15 bp, Homo sapiens
tacatacaactaact

SEQ ID NO: 1129523 - DNA, 15 bp, Homo sapiens
atacatacaactaac

SEQ ID NO: 1129524 - DNA, 15 bp, Homo sapiens
tatacatacaactaa

SEQ ID NO: 1129525 - DNA, 15 bp, Homo sapiens
atatacatacaacta

SEQ ID NO: 1129526 - DNA, 15 bp, Homo sapiens
tatatacatacaact

SEQ ID NO: 1129527 - DNA, 15 bp, Homo sapiens
atatatacatacaac

SEQ ID NO: 1129528 - DNA, 15 bp, Homo sapiens
catatatacatacaa

SEQ ID NO: 1129529 - DNA, 15 bp, Homo sapiens
gcatatatacataca

SEQ ID NO: 1129530 - DNA, 15 bp, Homo sapiens
ggcatatatacatac

SEQ ID NO: 1129531 - DNA, 15 bp, Homo sapiens
aggcatatatacata

SEQ ID NO: 1129532 - DNA, 15 bp, Homo sapiens
aaggcatatatacat

SEQ ID NO: 1129533 - DNA, 15 bp, Homo sapiens
aaaggcatatataca

SEQ ID NO: 1129534 - DNA, 15 bp, Homo sapiens
gaaaggcatatatac

SEQ ID NO: 1129535 - DNA, 15 bp, Homo sapiens
ggaaaggcatatata

SEQ ID NO: 1129536 - DNA, 15 bp, Homo sapiens
gggaaaggcatatat

SEQ ID NO: 1129537 - DNA, 15 bp, Homo sapiens
tgggaaaggcatata

SEQ ID NO: 1129538 - DNA, 15 bp, Homo sapiens
gtgggaaaggcatat

SEQ ID NO: 1129539 - DNA, 15 bp, Homo sapiens
agtgggaaaggcata

SEQ ID NO: 1129540 - DNA, 15 bp, Homo sapiens
tagtgggaaaggcat

SEQ ID NO: 1129541 - DNA, 15 bp, Homo sapiens
ctagtgggaaaggca

SEQ ID NO: 1129542 - DNA, 15 bp, Homo sapiens
tctagtgggaaaggc

SEQ ID NO: 1129543 - DNA, 15 bp, Homo sapiens
atctagtgggaaagg

SEQ ID NO: 1129544 - DNA, 15 bp, Homo sapiens
aatctagtgggaaag

SEQ ID NO: 1129545 - DNA, 15 bp, Homo sapiens
aaatctagtgggaaa

SEQ ID NO: 1129546 - DNA, 15 bp, Homo sapiens
aaaatctagtgggaa

SEQ ID NO: 1129547 - DNA, 15 bp, Homo sapiens
taaaatctagtggga

SEQ ID NO: 1129548 - DNA, 15 bp, Homo sapiens
ttaaaatctagtggg

SEQ ID NO: 1129549 - DNA, 15 bp, Homo sapiens
cttaaaatctagtgg

SEQ ID NO: 1129550 - DNA, 15 bp, Homo sapiens
gcttaaaatctagtg

SEQ ID NO: 1129551 - DNA, 15 bp, Homo sapiens
agcttaaaatctagt

SEQ ID NO: 1129552 - DNA, 15 bp, Homo sapiens
aagcttaaaatctag

SEQ ID NO: 1129553 - DNA, 15 bp, Homo sapiens
aaagcttaaaatcta

SEQ ID NO: 1129554 - DNA, 15 bp, Homo sapiens
aaaagcttaaaatct

SEQ ID NO: 1129555 - DNA, 15 bp, Homo sapiens
aaaaagcttaaaatc

SEQ ID NO: 1129556 - DNA, 15 bp, Homo sapiens
aaaaaagcttaaaat

SEQ ID NO: 1129557 - DNA, 15 bp, Homo sapiens
aaaaaaagcttaaaa

SEQ ID NO: 1129558 - DNA, 15 bp, Homo sapiens
aaaaaaaagcttaaa

SEQ ID NO: 1129559 - DNA, 15 bp, Homo sapiens
aaaaaaaaagcttaa

SEQ ID NO: 1129560 - DNA, 15 bp, Homo sapiens
aaaaaaaaaagctta

SEQ ID NO: 1129561 - DNA, 15 bp, Homo sapiens
aagactccgtcacaa

SEQ ID NO: 1129562 - DNA, 15 bp, Homo sapiens
caagactccgtcaca

SEQ ID NO: 1129563 - DNA, 15 bp, Homo sapiens
gcaagactccgtcac

SEQ ID NO: 1129564 - DNA, 15 bp, Homo sapiens
agcaagactccgtca

SEQ ID NO: 1129565 - DNA, 15 bp, Homo sapiens
aagagcaagactccg

SEQ ID NO: 1129566 - DNA, 15 bp, Homo sapiens
caagagcaagactcc

SEQ ID NO: 1129567 - DNA, 15 bp, Homo sapiens
acaagagcaagactc

SEQ ID NO: 1129568 - DNA, 15 bp, Homo sapiens
gacaagagcaagact

SEQ ID NO: 1129569 - DNA, 15 bp, Homo sapiens
cgacaagagcaagac

SEQ ID NO: 1129570 - DNA, 15 bp, Homo sapiens
gcgacaagagcaaga

SEQ ID NO: 1129571 - DNA, 15 bp, Homo sapiens
ggcgacaagagcaag

SEQ ID NO: 1129572 - DNA, 15 bp, Homo sapiens
gggcgacaagagcaa

SEQ ID NO: 1129573 - DNA, 15 bp, Homo sapiens
tgggcgacaagagca

SEQ ID NO: 1129574 - DNA, 15 bp, Homo sapiens
tcagcctgggcgaca

SEQ ID NO: 1129575 - DNA, 15 bp, Homo sapiens
ttcagcctgggcgac

SEQ ID NO: 1129576 - DNA, 15 bp, Homo sapiens
cttcagcctgggcga

SEQ ID NO: 1129577 - DNA, 15 bp, Homo sapiens
acttcagcctgggcg

SEQ ID NO: 1129578 - DNA, 15 bp, Homo sapiens
ccacttcagcctggg

SEQ ID NO: 1129579 - DNA, 15 bp, Homo sapiens
tccacttcagcctgg

SEQ ID NO: 1129580 - DNA, 15 bp, Homo sapiens
ctccacttcagcctg

SEQ ID NO: 1129581 - DNA, 15 bp, Homo sapiens
actccacttcagcct

SEQ ID NO: 1129582 - DNA, 15 bp, Homo sapiens
cactccacttcagcc

SEQ ID NO: 1129583 - DNA, 15 bp, Homo sapiens
gcactccacttcagc

SEQ ID NO: 1129584 - DNA, 15 bp, Homo sapiens
tgcactccacttcag

SEQ ID NO: 1129585 - DNA, 15 bp, Homo sapiens
ctgcactccacttca

SEQ ID NO: 1129586 - DNA, 15 bp, Homo sapiens
actgcactccacttc

SEQ ID NO: 1129587 - DNA, 15 bp, Homo sapiens
cactgcactccactt

SEQ ID NO: 1129588 - DNA, 15 bp, Homo sapiens
ccactgcactccact

SEQ ID NO: 1129589 - DNA, 15 bp, Homo sapiens
gtggaggctgcagtg

SEQ ID NO: 1129590 - DNA, 15 bp, Homo sapiens
ggtggaggctgcagt

SEQ ID NO: 1129591 - DNA, 15 bp, Homo sapiens
aggtggaggctgcag

SEQ ID NO: 1129592 - DNA, 15 bp, Homo sapiens
gaggtggaggctgca

SEQ ID NO: 1129593 - DNA, 15 bp, Homo sapiens
ggaggtggaggctgc

SEQ ID NO: 1129594 - DNA, 15 bp, Homo sapiens
aggaggtggaggctg

SEQ ID NO: 1129595 - DNA, 15 bp, Homo sapiens
taggaggtggaggct

SEQ ID NO: 1129596 - DNA, 15 bp, Homo sapiens
ctaggaggtggaggc

SEQ ID NO: 1129597 - DNA, 15 bp, Homo sapiens
acctaggaggtggag

SEQ ID NO: 1129598 - DNA, 15 bp, Homo sapiens
aacctaggaggtgga

SEQ ID NO: 1129599 - DNA, 15 bp, Homo sapiens
gaacctaggaggtgg

SEQ ID NO: 1129600 - DNA, 15 bp, Homo sapiens
tgaacctaggaggtg

SEQ ID NO: 1129601 - DNA, 15 bp, Homo sapiens
ttgaacctaggaggt

SEQ ID NO: 1129602 - DNA, 15 bp, Homo sapiens
cttgggaggccgagg

SEQ ID NO: 1129603 - DNA, 15 bp, Homo sapiens
acttgggaggccgag

SEQ ID NO: 1129604 - DNA, 15 bp, Homo sapiens
tacttgggaggccga

SEQ ID NO: 1129605 - DNA, 15 bp, Homo sapiens
ttacttgggaggccg

SEQ ID NO: 1129606 - DNA, 15 bp, Homo sapiens
gttacttgggaggcc

SEQ ID NO: 1129607 - DNA, 15 bp, Homo sapiens
agttacttgggaggc

SEQ ID NO: 1129608 - DNA, 15 bp, Homo sapiens
cagttacttgggagg

SEQ ID NO: 1129609 - DNA, 15 bp, Homo sapiens
ccagttacttgggag

SEQ ID NO: 1129610 - DNA, 15 bp, Homo sapiens
cccagttacttggga

SEQ ID NO: 1129611 - DNA, 15 bp, Homo sapiens
tcccagttacttggg

SEQ ID NO: 1129612 - DNA, 15 bp, Homo sapiens
gtcccagttacttgg

SEQ ID NO: 1129613 - DNA, 15 bp, Homo sapiens
agtcccagttacttg

SEQ ID NO: 1129614 - DNA, 15 bp, Homo sapiens
tagtcccagttactt

SEQ ID NO: 1129615 - DNA, 15 bp, Homo sapiens
cgtgcctgtagtccc

SEQ ID NO: 1129616 - DNA, 15 bp, Homo sapiens
acgtgcctgtagtcc

SEQ ID NO: 1129617 - DNA, 15 bp, Homo sapiens
cacgtgcctgtagtc

SEQ ID NO: 1129618 - DNA, 15 bp, Homo sapiens
gcacgtgcctgtagt

SEQ ID NO: 1129619 - DNA, 15 bp, Homo sapiens
ggcacgtgcctgtag

SEQ ID NO: 1129620 - DNA, 15 bp, Homo sapiens
tggcacgtgcctgta

SEQ ID NO: 1129621 - DNA, 15 bp, Homo sapiens
tggtggcacgtgcct

SEQ ID NO: 1129622 - DNA, 15 bp, Homo sapiens
gtggtggcacgtgcc

SEQ ID NO: 1129623 - DNA, 15 bp, Homo sapiens
tgtggtggcacgtgc

SEQ ID NO: 1129624 - DNA, 15 bp, Homo sapiens
gtgtggtggcacgtg

SEQ ID NO: 1129625 - DNA, 15 bp, Homo sapiens
ggtgtggtggcacgt

SEQ ID NO: 1129626 - DNA, 15 bp, Homo sapiens
cgggtgtggtggcac

SEQ ID NO: 1129627 - DNA, 15 bp, Homo sapiens
gtctctacaaaaaat

SEQ ID NO: 1129628 - DNA, 15 bp, Homo sapiens
aaccctgtctctaca

SEQ ID NO: 1129629 - DNA, 15 bp, Homo sapiens
agccaacatggcgaa

SEQ ID NO: 1129630 - DNA, 15 bp, Homo sapiens
tagccaacatggcga

SEQ ID NO: 1129631 - DNA, 15 bp, Homo sapiens
ctagccaacatggcg

SEQ ID NO: 1129632 - DNA, 15 bp, Homo sapiens
cctagccaacatggc

SEQ ID NO: 1129633 - DNA, 15 bp, Homo sapiens
acctgaggccagaag

SEQ ID NO: 1129634 - DNA, 15 bp, Homo sapiens
cacctgaggccagaa

SEQ ID NO: 1129635 - DNA, 15 bp, Homo sapiens
tcacctgaggccaga

SEQ ID NO: 1129636 - DNA, 15 bp, Homo sapiens
atcacctgaggccag

SEQ ID NO: 1129637 - DNA, 15 bp, Homo sapiens
gatcacctgaggcca

SEQ ID NO: 1129638 - DNA, 15 bp, Homo sapiens
ggatcacctgaggcc

SEQ ID NO: 1129639 - DNA, 15 bp, Homo sapiens
tggatcacctgaggc

SEQ ID NO: 1129640 - DNA, 15 bp, Homo sapiens
gtaaatcccagcact

SEQ ID NO: 1129641 - DNA, 15 bp, Homo sapiens
tgtaaatcccagcac

SEQ ID NO: 1129642 - DNA, 15 bp, Homo sapiens
ctgtaaatcccagca

SEQ ID NO: 1129643 - DNA, 15 bp, Homo sapiens
tgcctgtaaatccca

SEQ ID NO: 1129644 - DNA, 15 bp, Homo sapiens
atgcctgtaaatccc

SEQ ID NO: 1129645 - DNA, 15 bp, Homo sapiens
catgcctgtaaatcc

SEQ ID NO: 1129646 - DNA, 15 bp, Homo sapiens
tcatgcctgtaaatc

SEQ ID NO: 1129647 - DNA, 15 bp, Homo sapiens
ctcatgcctgtaaat

SEQ ID NO: 1129648 - DNA, 15 bp, Homo sapiens
tatagctgggcgtgg

SEQ ID NO: 1129649 - DNA, 15 bp, Homo sapiens
ttatagctgggcgtg

SEQ ID NO: 1129650 - DNA, 15 bp, Homo sapiens
cttatagctgggcgt

SEQ ID NO: 1129651 - DNA, 15 bp, Homo sapiens
gcttatagctgggcg

SEQ ID NO: 1129652 - DNA, 15 bp, Homo sapiens
agcttatagctgggc

SEQ ID NO: 1129653 - DNA, 15 bp, Homo sapiens
gagcttatagctggg

SEQ ID NO: 1129654 - DNA, 15 bp, Homo sapiens
agagcttatagctgg

SEQ ID NO: 1129655 - DNA, 15 bp, Homo sapiens
aagagcttatagctg

SEQ ID NO: 1129656 - DNA, 15 bp, Homo sapiens
aaagagcttatagct

SEQ ID NO: 1129657 - DNA, 15 bp, Homo sapiens
taaagagcttatagc

SEQ ID NO: 1129658 - DNA, 15 bp, Homo sapiens
ttaaagagcttatag

SEQ ID NO: 1129659 - DNA, 15 bp, Homo sapiens
cttaaagagcttata

SEQ ID NO: 1129660 - DNA, 15 bp, Homo sapiens
ccttaaagagcttat

SEQ ID NO: 1129661 - DNA, 15 bp, Homo sapiens
cccttaaagagctta

SEQ ID NO: 1129662 - DNA, 15 bp, Homo sapiens
acccttaaagagctt

SEQ ID NO: 1129663 - DNA, 15 bp, Homo sapiens
aacccttaaagagct

SEQ ID NO: 1129664 - DNA, 15 bp, Homo sapiens
caacccttaaagagc

SEQ ID NO: 1129665 - DNA, 15 bp, Homo sapiens
acaacccttaaagag

SEQ ID NO: 1129666 - DNA, 15 bp, Homo sapiens
tacaacccttaaaga

SEQ ID NO: 1129667 - DNA, 15 bp, Homo sapiens
ttacaacccttaaag

SEQ ID NO: 1129668 - DNA, 15 bp, Homo sapiens
tttacaacccttaaa

SEQ ID NO: 1129669 - DNA, 15 bp, Homo sapiens
atttacaacccttaa

SEQ ID NO: 1129670 - DNA, 15 bp, Homo sapiens
aatttacaaccctta

SEQ ID NO: 1129671 - DNA, 15 bp, Homo sapiens
aaatttacaaccctt

SEQ ID NO: 1129672 - DNA, 15 bp, Homo sapiens
taaatttacaaccct

SEQ ID NO: 1129673 - DNA, 15 bp, Homo sapiens
ataaatttacaaccc

SEQ ID NO: 1129674 - DNA, 15 bp, Homo sapiens
tataaatttacaacc

SEQ ID NO: 1129675 - DNA, 15 bp, Homo sapiens
ttataaatttacaac

SEQ ID NO: 1129676 - DNA, 15 bp, Homo sapiens
attataaatttacaa

SEQ ID NO: 1129677 - DNA, 15 bp, Homo sapiens
gattataaatttaca

SEQ ID NO: 1129678 - DNA, 15 bp, Homo sapiens
tgattataaatttac

SEQ ID NO: 1129679 - DNA, 15 bp, Homo sapiens
atgattataaattta

SEQ ID NO: 1129680 - DNA, 15 bp, Homo sapiens
aatgattataaattt

SEQ ID NO: 1129681 - DNA, 15 bp, Homo sapiens
gaatgattataaatt

SEQ ID NO: 1129682 - DNA, 15 bp, Homo sapiens
agaatgattataaat

SEQ ID NO: 1129683 - DNA, 15 bp, Homo sapiens
aagaatgattataaa

SEQ ID NO: 1129684 - DNA, 15 bp, Homo sapiens
aaagaatgattataa

SEQ ID NO: 1129685 - DNA, 15 bp, Homo sapiens
aaaagaatgattata

SEQ ID NO: 1129686 - DNA, 15 bp, Homo sapiens
taaaagaatgattat

SEQ ID NO: 1129687 - DNA, 15 bp, Homo sapiens
gtaaaagaatgatta

SEQ ID NO: 1129688 - DNA, 15 bp, Homo sapiens
agtaaaagaatgatt

SEQ ID NO: 1129689 - DNA, 15 bp, Homo sapiens
gagtaaaagaatgat

SEQ ID NO: 1129690 - DNA, 15 bp, Homo sapiens
agagtaaaagaatga

SEQ ID NO: 1129691 - DNA, 15 bp, Homo sapiens
gagagtaaaagaatg

SEQ ID NO: 1129692 - DNA, 15 bp, Homo sapiens
ggagagtaaaagaat

SEQ ID NO: 1129693 - DNA, 15 bp, Homo sapiens
aggagagtaaaagaa

SEQ ID NO: 1129694 - DNA, 15 bp, Homo sapiens
caggagagtaaaaga

SEQ ID NO: 1129695 - DNA, 15 bp, Homo sapiens
gcaggagagtaaaag

SEQ ID NO: 1129696 - DNA, 15 bp, Homo sapiens
tgcaggagagtaaaa

SEQ ID NO: 1129697 - DNA, 15 bp, Homo sapiens
ttgcaggagagtaaa

SEQ ID NO: 1129698 - DNA, 15 bp, Homo sapiens
tttgcaggagagtaa

SEQ ID NO: 1129699 - DNA, 15 bp, Homo sapiens
atttgcaggagagta

SEQ ID NO: 1129700 - DNA, 15 bp, Homo sapiens
aatttgcaggagagt

SEQ ID NO: 1129701 - DNA, 15 bp, Homo sapiens
gaatttgcaggagag

SEQ ID NO: 1129702 - DNA, 15 bp, Homo sapiens
agaatttgcaggaga

SEQ ID NO: 1129703 - DNA, 15 bp, Homo sapiens
cagaatttgcaggag

SEQ ID NO: 1129704 - DNA, 15 bp, Homo sapiens
acagaatttgcagga

SEQ ID NO: 1129705 - DNA, 15 bp, Homo sapiens
aacagaatttgcagg

SEQ ID NO: 1129706 - DNA, 15 bp, Homo sapiens
caacagaatttgcag

SEQ ID NO: 1129707 - DNA, 15 bp, Homo sapiens
gcaacagaatttgca

SEQ ID NO: 1129708 - DNA, 15 bp, Homo sapiens
tgcaacagaatttgc

SEQ ID NO: 1129709 - DNA, 15 bp, Homo sapiens
gtgcaacagaatttg

SEQ ID NO: 1129710 - DNA, 15 bp, Homo sapiens
tgtgcaacagaattt

SEQ ID NO: 1129711 - DNA, 15 bp, Homo sapiens
gtgtgcaacagaatt

SEQ ID NO: 1129712 - DNA, 15 bp, Homo sapiens
agtgtgcaacagaat

SEQ ID NO: 1129713 - DNA, 15 bp, Homo sapiens
cagtgtgcaacagaa

SEQ ID NO: 1129714 - DNA, 15 bp, Homo sapiens
gcagtgtgcaacaga

SEQ ID NO: 1129715 - DNA, 15 bp, Homo sapiens
ggcagtgtgcaacag

SEQ ID NO: 1129716 - DNA, 15 bp, Homo sapiens
aggcagtgtgcaaca

SEQ ID NO: 1129717 - DNA, 15 bp, Homo sapiens
aaggcagtgtgcaac

SEQ ID NO: 1129718 - DNA, 15 bp, Homo sapiens
taaggcagtgtgcaa

SEQ ID NO: 1129719 - DNA, 15 bp, Homo sapiens
ttaaggcagtgtgca

SEQ ID NO: 1129720 - DNA, 15 bp, Homo sapiens
attaaggcagtgtgc

SEQ ID NO: 1129721 - DNA, 15 bp, Homo sapiens
gattaaggcagtgtg

SEQ ID NO: 1129722 - DNA, 15 bp, Homo sapiens
tgattaaggcagtgt

SEQ ID NO: 1129723 - DNA, 15 bp, Homo sapiens
ttgattaaggcagtg

SEQ ID NO: 1129724 - DNA, 15 bp, Homo sapiens
cttgattaaggcagt

SEQ ID NO: 1129725 - DNA, 15 bp, Homo sapiens
ccttgattaaggcag

SEQ ID NO: 1129726 - DNA, 15 bp, Homo sapiens
accttgattaaggca

SEQ ID NO: 1129727 - DNA, 15 bp, Homo sapiens
taccttgattaaggc

SEQ ID NO: 1129728 - DNA, 15 bp, Homo sapiens
ctaccttgattaagg

SEQ ID NO: 1129729 - DNA, 15 bp, Homo sapiens
tctaccttgattaag

SEQ ID NO: 1129730 - DNA, 15 bp, Homo sapiens
atctaccttgattaa

SEQ ID NO: 1129731 - DNA, 15 bp, Homo sapiens
catctaccttgatta

SEQ ID NO: 1129732 - DNA, 15 bp, Homo sapiens
gcatctaccttgatt

SEQ ID NO: 1129733 - DNA, 15 bp, Homo sapiens
agcatctaccttgat

SEQ ID NO: 1129734 - DNA, 15 bp, Homo sapiens
cagcatctaccttga

SEQ ID NO: 1129735 - DNA, 15 bp, Homo sapiens
tcagcatctaccttg

SEQ ID NO: 1129736 - DNA, 15 bp, Homo sapiens
ttcagcatctacctt

SEQ ID NO: 1129737 - DNA, 15 bp, Homo sapiens
attcagcatctacct

SEQ ID NO: 1129738 - DNA, 15 bp, Homo sapiens
cattcagcatctacc

SEQ ID NO: 1129739 - DNA, 15 bp, Homo sapiens
gcattcagcatctac

SEQ ID NO: 1129740 - DNA, 15 bp, Homo sapiens
tgcattcagcatcta

SEQ ID NO: 1129741 - DNA, 15 bp, Homo sapiens
atgcattcagcatct

SEQ ID NO: 1129742 - DNA, 15 bp, Homo sapiens
aatgcattcagcatc

SEQ ID NO: 1129743 - DNA, 15 bp, Homo sapiens
aaatgcattcagcat

SEQ ID NO: 1129744 - DNA, 15 bp, Homo sapiens
aaaatgcattcagca

SEQ ID NO: 1129745 - DNA, 15 bp, Homo sapiens
aaaaatgcattcagc

SEQ ID NO: 1129746 - DNA, 15 bp, Homo sapiens
caaaaatgcattcag

SEQ ID NO: 1129747 - DNA, 15 bp, Homo sapiens
acaaaaatgcattca

SEQ ID NO: 1129748 - DNA, 15 bp, Homo sapiens
tacaaaaatgcattc

SEQ ID NO: 1129749 - DNA, 15 bp, Homo sapiens
atacaaaaatgcatt

SEQ ID NO: 1129750 - DNA, 15 bp, Homo sapiens
tatacaaaaatgcat

SEQ ID NO: 1129751 - DNA, 15 bp, Homo sapiens
ttatacaaaaatgca

SEQ ID NO: 1129752 - DNA, 15 bp, Homo sapiens
attatacaaaaatgc

SEQ ID NO: 1129753 - DNA, 15 bp, Homo sapiens
aattatacaaaaatg

SEQ ID NO: 1129754 - DNA, 15 bp, Homo sapiens
caattatacaaaaat

SEQ ID NO: 1129755 - DNA, 15 bp, Homo sapiens
tcaattatacaaaaa

SEQ ID NO: 1129756 - DNA, 15 bp, Homo sapiens
ttcaattatacaaaa

SEQ ID NO: 1129757 - DNA, 15 bp, Homo sapiens
attcaattatacaaa

SEQ ID NO: 1129758 - DNA, 15 bp, Homo sapiens
tattcaattatacaa

SEQ ID NO: 1129759 - DNA, 15 bp, Homo sapiens
atattcaattataca

SEQ ID NO: 1129760 - DNA, 15 bp, Homo sapiens
catattcaattatac

SEQ ID NO: 1129761 - DNA, 15 bp, Homo sapiens
acatattcaattata

SEQ ID NO: 1129762 - DNA, 15 bp, Homo sapiens
aacatattcaattat

SEQ ID NO: 1129763 - DNA, 15 bp, Homo sapiens
caacatattcaatta

SEQ ID NO: 1129764 - DNA, 15 bp, Homo sapiens
gcaacatattcaatt

SEQ ID NO: 1129765 - DNA, 15 bp, Homo sapiens
tgcaacatattcaat

SEQ ID NO: 1129766 - DNA, 15 bp, Homo sapiens
ttgcaacatattcaa

SEQ ID NO: 1129767 - DNA, 15 bp, Homo sapiens
attgcaacatattca

SEQ ID NO: 1129768 - DNA, 15 bp, Homo sapiens
gattgcaacatattc

SEQ ID NO: 1129769 - DNA, 15 bp, Homo sapiens
ggattgcaacatatt

SEQ ID NO: 1129770 - DNA, 15 bp, Homo sapiens
gggattgcaacatat

SEQ ID NO: 1129771 - DNA, 15 bp, Homo sapiens
ggggattgcaacata

SEQ ID NO: 1129772 - DNA, 15 bp, Homo sapiens
tggggattgcaacat

SEQ ID NO: 1129773 - DNA, 15 bp, Homo sapiens
ttggggattgcaaca

SEQ ID NO: 1129774 - DNA, 15 bp, Homo sapiens
gttggggattgcaac

SEQ ID NO: 1129775 - DNA, 15 bp, Homo sapiens
agttggggattgcaa

SEQ ID NO: 1129776 - DNA, 15 bp, Homo sapiens
gagttggggattgca

SEQ ID NO: 1129777 - DNA, 15 bp, Homo sapiens
agagttggggattgc

SEQ ID NO: 1129778 - DNA, 15 bp, Homo sapiens
gagagttggggattg

SEQ ID NO: 1129779 - DNA, 15 bp, Homo sapiens
agagagttggggatt

SEQ ID NO: 1129780 - DNA, 15 bp, Homo sapiens
gagagagttggggat

SEQ ID NO: 1129781 - DNA, 15 bp, Homo sapiens
ggagagagttgggga

SEQ ID NO: 1129782 - DNA, 15 bp, Homo sapiens
tggagagagttgggg

SEQ ID NO: 1129783 - DNA, 15 bp, Homo sapiens
ttggagagagttggg

SEQ ID NO: 1129784 - DNA, 15 bp, Homo sapiens
gttggagagagttgg

SEQ ID NO: 1129785 - DNA, 15 bp, Homo sapiens
agttggagagagttg

SEQ ID NO: 1129786 - DNA, 15 bp, Homo sapiens
cagttggagagagtt

SEQ ID NO: 1129787 - DNA, 15 bp, Homo sapiens
acagttggagagagt

SEQ ID NO: 1129788 - DNA, 15 bp, Homo sapiens
aacagttggagagag

SEQ ID NO: 1129789 - DNA, 15 bp, Homo sapiens
gaacagttggagaga

SEQ ID NO: 1129790 - DNA, 15 bp, Homo sapiens
ggaacagttggagag

SEQ ID NO: 1129791 - DNA, 15 bp, Homo sapiens
aggaacagttggaga

SEQ ID NO: 1129792 - DNA, 15 bp, Homo sapiens
caggaacagttggag

SEQ ID NO: 1129793 - DNA, 15 bp, Homo sapiens
acaggaacagttgga

SEQ ID NO: 1129794 - DNA, 15 bp, Homo sapiens
gacaggaacagttgg

SEQ ID NO: 1129795 - DNA, 15 bp, Homo sapiens
tgacaggaacagttg

SEQ ID NO: 1129796 - DNA, 15 bp, Homo sapiens
ttgacaggaacagtt

SEQ ID NO: 1129797 - DNA, 15 bp, Homo sapiens
tttgacaggaacagt

SEQ ID NO: 1129798 - DNA, 15 bp, Homo sapiens
ctttgacaggaacag

SEQ ID NO: 1129799 - DNA, 15 bp, Homo sapiens
gctttgacaggaaca

SEQ ID NO: 1129800 - DNA, 15 bp, Homo sapiens
tgctttgacaggaac

SEQ ID NO: 1129801 - DNA, 15 bp, Homo sapiens
ctgctttgacaggaa

SEQ ID NO: 1129802 - DNA, 15 bp, Homo sapiens
gctgctttgacagga

SEQ ID NO: 1129803 - DNA, 15 bp, Homo sapiens
ggctgctttgacagg

SEQ ID NO: 1129804 - DNA, 15 bp, Homo sapiens
tggctgctttgacag

SEQ ID NO: 1129805 - DNA, 15 bp, Homo sapiens
gtggctgctttgaca

SEQ ID NO: 1129806 - DNA, 15 bp, Homo sapiens
agtggctgctttgac

SEQ ID NO: 1129807 - DNA, 15 bp, Homo sapiens
cagtggctgctttga

SEQ ID NO: 1129808 - DNA, 15 bp, Homo sapiens
ccagtggctgctttg

SEQ ID NO: 1129809 - DNA, 15 bp, Homo sapiens
tccagtggctgcttt

SEQ ID NO: 1129810 - DNA, 15 bp, Homo sapiens
atccagtggctgctt

SEQ ID NO: 1129811 - DNA, 15 bp, Homo sapiens
aatccagtggctgct

SEQ ID NO: 1129812 - DNA, 15 bp, Homo sapiens
caatccagtggctgc

SEQ ID NO: 1129813 - DNA, 15 bp, Homo sapiens
acaatccagtggctg

SEQ ID NO: 1129814 - DNA, 15 bp, Homo sapiens
aacaatccagtggct

SEQ ID NO: 1129815 - DNA, 15 bp, Homo sapiens
taacaatccagtggc

SEQ ID NO: 1129816 - DNA, 15 bp, Homo sapiens
ttaacaatccagtgg

SEQ ID NO: 1129817 - DNA, 15 bp, Homo sapiens
gttaacaatccagtg

SEQ ID NO: 1129818 - DNA, 15 bp, Homo sapiens
agttaacaatccagt

SEQ ID NO: 1129819 - DNA, 15 bp, Homo sapiens
tagttaacaatccag

SEQ ID NO: 1129820 - DNA, 15 bp, Homo sapiens
ttagttaacaatcca

SEQ ID NO: 1129821 - DNA, 15 bp, Homo sapiens
attagttaacaatcc

SEQ ID NO: 1129822 - DNA, 15 bp, Homo sapiens
gattagttaacaatc

SEQ ID NO: 1129823 - DNA, 15 bp, Homo sapiens
ggattagttaacaat

SEQ ID NO: 1129824 - DNA, 15 bp, Homo sapiens
tggattagttaacaa

SEQ ID NO: 1129825 - DNA, 15 bp, Homo sapiens
atggattagttaaca

SEQ ID NO: 1129826 - DNA, 15 bp, Homo sapiens
tatggattagttaac

SEQ ID NO: 1129827 - DNA, 15 bp, Homo sapiens
atatggattagttaa

SEQ ID NO: 1129828 - DNA, 15 bp, Homo sapiens
aatatggattagtta

SEQ ID NO: 1129829 - DNA, 15 bp, Homo sapiens
taatatggattagtt

SEQ ID NO: 1129830 - DNA, 15 bp, Homo sapiens
ctaatatggattagt

SEQ ID NO: 1129831 - DNA, 15 bp, Homo sapiens
tctaatatggattag

SEQ ID NO: 1129832 - DNA, 15 bp, Homo sapiens
atctaatatggatta

SEQ ID NO: 1129833 - DNA, 15 bp, Homo sapiens
catctaatatggatt

SEQ ID NO: 1129834 - DNA, 15 bp, Homo sapiens
ccatctaatatggat

SEQ ID NO: 1129835 - DNA, 15 bp, Homo sapiens
cccatctaatatgga

SEQ ID NO: 1129836 - DNA, 15 bp, Homo sapiens
ccccatctaatatgg

SEQ ID NO: 1129837 - DNA, 15 bp, Homo sapiens
accccatctaatatg

SEQ ID NO: 1129838 - DNA, 15 bp, Homo sapiens
aaccccatctaatat

SEQ ID NO: 1129839 - DNA, 15 bp, Homo sapiens
taaccccatctaata

SEQ ID NO: 1129840 - DNA, 15 bp, Homo sapiens
ttaaccccatctaat

SEQ ID NO: 1129841 - DNA, 15 bp, Homo sapiens
attaaccccatctaa

SEQ ID NO: 1129842 - DNA, 15 bp, Homo sapiens
aattaaccccatcta

SEQ ID NO: 1129843 - DNA, 15 bp, Homo sapiens
taattaaccccatct

SEQ ID NO: 1129844 - DNA, 15 bp, Homo sapiens
ttaattaaccccatc

SEQ ID NO: 1129845 - DNA, 15 bp, Homo sapiens
attaattaaccccat

SEQ ID NO: 1129846 - DNA, 15 bp, Homo sapiens
tattaattaacccca

SEQ ID NO: 1129847 - DNA, 15 bp, Homo sapiens
atattaattaacccc

SEQ ID NO: 1129848 - DNA, 15 bp, Homo sapiens
gatattaattaaccc

SEQ ID NO: 1129849 - DNA, 15 bp, Homo sapiens
tgatattaattaacc

SEQ ID NO: 1129850 - DNA, 15 bp, Homo sapiens
ctgatattaattaac

SEQ ID NO: 1129851 - DNA, 15 bp, Homo sapiens
tctgatattaattaa

SEQ ID NO: 1129852 - DNA, 15 bp, Homo sapiens
atctgatattaatta

SEQ ID NO: 1129853 - DNA, 15 bp, Homo sapiens
catctgatattaatt

SEQ ID NO: 1129854 - DNA, 15 bp, Homo sapiens
ccatctgatattaat

SEQ ID NO: 1129855 - DNA, 15 bp, Homo sapiens
cccatctgatattaa

SEQ ID NO: 1129856 - DNA, 15 bp, Homo sapiens
tcccatctgatatta

SEQ ID NO: 1129857 - DNA, 15 bp, Homo sapiens
gtcccatctgatatt

SEQ ID NO: 1129858 - DNA, 15 bp, Homo sapiens
tgtcccatctgatat

SEQ ID NO: 1129859 - DNA, 15 bp, Homo sapiens
ttgtcccatctgata

SEQ ID NO: 1129860 - DNA, 15 bp, Homo sapiens
cttgtcccatctgat

SEQ ID NO: 1129861 - DNA, 15 bp, Homo sapiens
acttgtcccatctga

SEQ ID NO: 1129862 - DNA, 15 bp, Homo sapiens
tacttgtcccatctg

SEQ ID NO: 1129863 - DNA, 15 bp, Homo sapiens
ttacttgtcccatct

SEQ ID NO: 1129864 - DNA, 15 bp, Homo sapiens
cttacttgtcccatc

SEQ ID NO: 1129865 - DNA, 15 bp, Homo sapiens
ccttacttgtcccat

SEQ ID NO: 1129866 - DNA, 15 bp, Homo sapiens
cccttacttgtccca

SEQ ID NO: 1129867 - DNA, 15 bp, Homo sapiens
gcccttacttgtccc

SEQ ID NO: 1129868 - DNA, 15 bp, Homo sapiens
agcccttacttgtcc

SEQ ID NO: 1129869 - DNA, 15 bp, Homo sapiens
tagcccttacttgtc

SEQ ID NO: 1129870 - DNA, 15 bp, Homo sapiens
ttagcccttacttgt

SEQ ID NO: 1129871 - DNA, 15 bp, Homo sapiens
attagcccttacttg

SEQ ID NO: 1129872 - DNA, 15 bp, Homo sapiens
tattagcccttactt

SEQ ID NO: 1129873 - DNA, 15 bp, Homo sapiens
ttattagcccttact

SEQ ID NO: 1129874 - DNA, 15 bp, Homo sapiens
cttattagcccttac

SEQ ID NO: 1129875 - DNA, 15 bp, Homo sapiens
tcttattagccctta

SEQ ID NO: 1129876 - DNA, 15 bp, Homo sapiens
atcttattagccctt

SEQ ID NO: 1129877 - DNA, 15 bp, Homo sapiens
aatcttattagccct

SEQ ID NO: 1129878 - DNA, 15 bp, Homo sapiens
taatcttattagccc

SEQ ID NO: 1129879 - DNA, 15 bp, Homo sapiens
ataatcttattagcc

SEQ ID NO: 1129880 - DNA, 15 bp, Homo sapiens
tataatcttattagc

SEQ ID NO: 1129881 - DNA, 15 bp, Homo sapiens
ctataatcttattag

SEQ ID NO: 1129882 - DNA, 15 bp, Homo sapiens
cctataatcttatta

SEQ ID NO: 1129883 - DNA, 15 bp, Homo sapiens
gcctataatcttatt

SEQ ID NO: 1129884 - DNA, 15 bp, Homo sapiens
ggcctataatcttat

SEQ ID NO: 1129885 - DNA, 15 bp, Homo sapiens
tggcctataatctta

SEQ ID NO: 1129886 - DNA, 15 bp, Homo sapiens
gtggcctataatctt

SEQ ID NO: 1129887 - DNA, 15 bp, Homo sapiens
ggtggcctataatct

SEQ ID NO: 1129888 - DNA, 15 bp, Homo sapiens
tggtggcctataatc

SEQ ID NO: 1129889 - DNA, 15 bp, Homo sapiens
ttggtggcctataat

SEQ ID NO: 1129890 - DNA, 15 bp, Homo sapiens
cttggtggcctataa

SEQ ID NO: 1129891 - DNA, 15 bp, Homo sapiens
acttggtggcctata

SEQ ID NO: 1129892 - DNA, 15 bp, Homo sapiens
tacttggtggcctat

SEQ ID NO: 1129893 - DNA, 15 bp, Homo sapiens
ctacttggtggccta

SEQ ID NO: 1129894 - DNA, 15 bp, Homo sapiens
tctacttggtggcct

SEQ ID NO: 1129895 - DNA, 15 bp, Homo sapiens
atctacttggtggcc

SEQ ID NO: 1129896 - DNA, 15 bp, Homo sapiens
aatctacttggtggc

SEQ ID NO: 1129897 - DNA, 15 bp, Homo sapiens
aaatctacttggtgg

SEQ ID NO: 1129898 - DNA, 15 bp, Homo sapiens
gaaatctacttggtg

SEQ ID NO: 1129899 - DNA, 15 bp, Homo sapiens
agaaatctacttggt

SEQ ID NO: 1129900 - DNA, 15 bp, Homo sapiens
cagaaatctacttgg

SEQ ID NO: 1129901 - DNA, 15 bp, Homo sapiens
acagaaatctacttg

SEQ ID NO: 1129902 - DNA, 15 bp, Homo sapiens
gacagaaatctactt

SEQ ID NO: 1129903 - DNA, 15 bp, Homo sapiens
agacagaaatctact

SEQ ID NO: 1129904 - DNA, 15 bp, Homo sapiens
tagacagaaatctac

SEQ ID NO: 1129905 - DNA, 15 bp, Homo sapiens
ctagacagaaatcta

SEQ ID NO: 1129906 - DNA, 15 bp, Homo sapiens
gctagacagaaatct

SEQ ID NO: 1129907 - DNA, 15 bp, Homo sapiens
agctagacagaaatc

SEQ ID NO: 1129908 - DNA, 15 bp, Homo sapiens
gagctagacagaaat

SEQ ID NO: 1129909 - DNA, 15 bp, Homo sapiens
agagctagacagaaa

SEQ ID NO: 1129910 - DNA, 15 bp, Homo sapiens
aagagctagacagaa

SEQ ID NO: 1129911 - DNA, 15 bp, Homo sapiens
taagagctagacaga

SEQ ID NO: 1129912 - DNA, 15 bp, Homo sapiens
ataagagctagacag

SEQ ID NO: 1129913 - DNA, 15 bp, Homo sapiens
tataagagctagaca

SEQ ID NO: 1129914 - DNA, 15 bp, Homo sapiens
ctataagagctagac

SEQ ID NO: 1129915 - DNA, 15 bp, Homo sapiens
tctataagagctaga

SEQ ID NO: 1129916 - DNA, 15 bp, Homo sapiens
ctctataagagctag

SEQ ID NO: 1129917 - DNA, 15 bp, Homo sapiens
tctctataagagcta

SEQ ID NO: 1129918 - DNA, 15 bp, Homo sapiens
atctctataagagct

SEQ ID NO: 1129919 - DNA, 15 bp, Homo sapiens
aatctctataagagc

SEQ ID NO: 1129920 - DNA, 15 bp, Homo sapiens
caatctctataagag

SEQ ID NO: 1129921 - DNA, 15 bp, Homo sapiens
tcaatctctataaga

SEQ ID NO: 1129922 - DNA, 15 bp, Homo sapiens
ctcaatctctataag

SEQ ID NO: 1129923 - DNA, 15 bp, Homo sapiens
actcaatctctataa

SEQ ID NO: 1129924 - DNA, 15 bp, Homo sapiens
aactcaatctctata

SEQ ID NO: 1129925 - DNA, 15 bp, Homo sapiens
aaactcaatctctat

SEQ ID NO: 1129926 - DNA, 15 bp, Homo sapiens
taaactcaatctcta

SEQ ID NO: 1129927 - DNA, 15 bp, Homo sapiens
ataaactcaatctct

SEQ ID NO: 1129928 - DNA, 15 bp, Homo sapiens
aataaactcaatctc

SEQ ID NO: 1129929 - DNA, 15 bp, Homo sapiens
caataaactcaatct

SEQ ID NO: 1129930 - DNA, 15 bp, Homo sapiens
ccaataaactcaatc

SEQ ID NO: 1129931 - DNA, 15 bp, Homo sapiens
tccaataaactcaat

SEQ ID NO: 1129932 - DNA, 15 bp, Homo sapiens
gtccaataaactcaa

SEQ ID NO: 1129933 - DNA, 15 bp, Homo sapiens
ggtccaataaactca

SEQ ID NO: 1129934 - DNA, 15 bp, Homo sapiens
aggtccaataaactc

SEQ ID NO: 1129935 - DNA, 15 bp, Homo sapiens
caggtccaataaact

SEQ ID NO: 1129936 - DNA, 15 bp, Homo sapiens
acaggtccaataaac

SEQ ID NO: 1129937 - DNA, 15 bp, Homo sapiens
aacaggtccaataaa

SEQ ID NO: 1129938 - DNA, 15 bp, Homo sapiens
aaacaggtccaataa

SEQ ID NO: 1129939 - DNA, 15 bp, Homo sapiens
caaacaggtccaata

SEQ ID NO: 1129940 - DNA, 15 bp, Homo sapiens
tcaaacaggtccaat

SEQ ID NO: 1129941 - DNA, 15 bp, Homo sapiens
atcaaacaggtccaa

SEQ ID NO: 1129942 - DNA, 15 bp, Homo sapiens
tatcaaacaggtcca

SEQ ID NO: 1129943 - DNA, 15 bp, Homo sapiens
ctatcaaacaggtcc

SEQ ID NO: 1129944 - DNA, 15 bp, Homo sapiens
cctatcaaacaggtc

SEQ ID NO: 1129945 - DNA, 15 bp, Homo sapiens
tcctatcaaacaggt

SEQ ID NO: 1129946 - DNA, 15 bp, Homo sapiens
ttcctatcaaacagg

SEQ ID NO: 1129947 - DNA, 15 bp, Homo sapiens
cttcctatcaaacag

SEQ ID NO: 1129948 - DNA, 15 bp, Homo sapiens
acttcctatcaaaca

SEQ ID NO: 1129949 - DNA, 15 bp, Homo sapiens
aacttcctatcaaac

SEQ ID NO: 1129950 - DNA, 15 bp, Homo sapiens
aaacttcctatcaaa

SEQ ID NO: 1129951 - DNA, 15 bp, Homo sapiens
aaaacttcctatcaa

SEQ ID NO: 1129952 - DNA, 15 bp, Homo sapiens
caaaacttcctatca

SEQ ID NO: 1129953 - DNA, 15 bp, Homo sapiens
ccaaaacttcctatc

SEQ ID NO: 1129954 - DNA, 15 bp, Homo sapiens
accaaaacttcctat

SEQ ID NO: 1129955 - DNA, 15 bp, Homo sapiens
caccaaaacttccta

SEQ ID NO: 1129956 - DNA, 15 bp, Homo sapiens
acaccaaaacttcct

SEQ ID NO: 1129957 - DNA, 15 bp, Homo sapiens
aacaccaaaacttcc

SEQ ID NO: 1129958 - DNA, 15 bp, Homo sapiens
aaacaccaaaacttc

SEQ ID NO: 1129959 - DNA, 15 bp, Homo sapiens
caaacaccaaaactt

SEQ ID NO: 1129960 - DNA, 15 bp, Homo sapiens
ccaaacaccaaaact

SEQ ID NO: 1129961 - DNA, 15 bp, Homo sapiens
cccaaacaccaaaac

SEQ ID NO: 1129962 - DNA, 15 bp, Homo sapiens
tcccaaacaccaaaa

SEQ ID NO: 1129963 - DNA, 15 bp, Homo sapiens
atcccaaacaccaaa

SEQ ID NO: 1129964 - DNA, 15 bp, Homo sapiens
catcccaaacaccaa

SEQ ID NO: 1129965 - DNA, 15 bp, Homo sapiens
tcatcccaaacacca

SEQ ID NO: 1129966 - DNA, 15 bp, Homo sapiens
atcatcccaaacacc

SEQ ID NO: 1129967 - DNA, 15 bp, Homo sapiens
aatcatcccaaacac

SEQ ID NO: 1129968 - DNA, 15 bp, Homo sapiens
taatcatcccaaaca

SEQ ID NO: 1129969 - DNA, 15 bp, Homo sapiens
ttaatcatcccaaac

SEQ ID NO: 1129970 - DNA, 15 bp, Homo sapiens
tttaatcatcccaaa

SEQ ID NO: 1129971 - DNA, 15 bp, Homo sapiens
ttttaatcatcccaa

SEQ ID NO: 1129972 - DNA, 15 bp, Homo sapiens
gttttaatcatccca

SEQ ID NO: 1129973 - DNA, 15 bp, Homo sapiens
agttttaatcatccc

SEQ ID NO: 1129974 - DNA, 15 bp, Homo sapiens
cagttttaatcatcc

SEQ ID NO: 1129975 - DNA, 15 bp, Homo sapiens
tcagttttaatcatc

SEQ ID NO: 1129976 - DNA, 15 bp, Homo sapiens
ttcagttttaatcat

SEQ ID NO: 1129977 - DNA, 15 bp, Homo sapiens
cttcagttttaatca

SEQ ID NO: 1129978 - DNA, 15 bp, Homo sapiens
acttcagttttaatc

SEQ ID NO: 1129979 - DNA, 15 bp, Homo sapiens
aacttcagttttaat

SEQ ID NO: 1129980 - DNA, 15 bp, Homo sapiens
gaacttcagttttaa

SEQ ID NO: 1129981 - DNA, 15 bp, Homo sapiens
ggaacttcagtttta

SEQ ID NO: 1129982 - DNA, 15 bp, Homo sapiens
aggaacttcagtttt

SEQ ID NO: 1129983 - DNA, 15 bp, Homo sapiens
taggaacttcagttt

SEQ ID NO: 1129984 - DNA, 15 bp, Homo sapiens
ataggaacttcagtt

SEQ ID NO: 1129985 - DNA, 15 bp, Homo sapiens
aataggaacttcagt

SEQ ID NO: 1129986 - DNA, 15 bp, Homo sapiens
aaataggaacttcag

SEQ ID NO: 1129987 - DNA, 15 bp, Homo sapiens
taaataggaacttca

SEQ ID NO: 1129988 - DNA, 15 bp, Homo sapiens
ataaataggaacttc

SEQ ID NO: 1129989 - DNA, 15 bp, Homo sapiens
aataaataggaactt

SEQ ID NO: 1129990 - DNA, 15 bp, Homo sapiens
caataaataggaact

SEQ ID NO: 1129991 - DNA, 15 bp, Homo sapiens
tcaataaataggaac

SEQ ID NO: 1129992 - DNA, 15 bp, Homo sapiens
ttcaataaataggaa

SEQ ID NO: 1129993 - DNA, 15 bp, Homo sapiens
attcaataaatagga

SEQ ID NO: 1129994 - DNA, 15 bp, Homo sapiens
aattcaataaatagg

SEQ ID NO: 1129995 - DNA, 15 bp, Homo sapiens
taattcaataaatag

SEQ ID NO: 1129996 - DNA, 15 bp, Homo sapiens
ataattcaataaata

SEQ ID NO: 1129997 - DNA, 15 bp, Homo sapiens
tataattcaataaat

SEQ ID NO: 1129998 - DNA, 15 bp, Homo sapiens
gtataattcaataaa

SEQ ID NO: 1129999 - DNA, 15 bp, Homo sapiens
ggtataattcaataa

SEQ ID NO: 1130000 - DNA, 15 bp, Homo sapiens
aggtataattcaata

SEQ ID NO: 1130001 - DNA, 15 bp, Homo sapiens
taggtataattcaat

SEQ ID NO: 1130002 - DNA, 15 bp, Homo sapiens
ataggtataattcaa

SEQ ID NO: 1130003 - DNA, 15 bp, Homo sapiens
aataggtataattca

SEQ ID NO: 1130004 - DNA, 15 bp, Homo sapiens
aaataggtataattc

SEQ ID NO: 1130005 - DNA, 15 bp, Homo sapiens
taaataggtataatt

SEQ ID NO: 1130006 - DNA, 15 bp, Homo sapiens
ataaataggtataat

SEQ ID NO: 1130007 - DNA, 15 bp, Homo sapiens
tataaataggtataa

SEQ ID NO: 1130008 - DNA, 15 bp, Homo sapiens
atataaataggtata

SEQ ID NO: 1130009 - DNA, 15 bp, Homo sapiens
aatataaataggtat

SEQ ID NO: 1130010 - DNA, 15 bp, Homo sapiens
taatataaataggta

SEQ ID NO: 1130011 - DNA, 15 bp, Homo sapiens
ataatataaataggt

SEQ ID NO: 1130012 - DNA, 15 bp, Homo sapiens
aataatataaatagg

SEQ ID NO: 1130013 - DNA, 15 bp, Homo sapiens
aaataatataaatag

SEQ ID NO: 1130014 - DNA, 15 bp, Homo sapiens
gaaataatataaata

SEQ ID NO: 1130015 - DNA, 15 bp, Homo sapiens
tgaaataatataaat

SEQ ID NO: 1130016 - DNA, 15 bp, Homo sapiens
atgaaataatataaa

SEQ ID NO: 1130017 - DNA, 15 bp, Homo sapiens
tatgaaataatataa

SEQ ID NO: 1130018 - DNA, 15 bp, Homo sapiens
atatgaaataatata

SEQ ID NO: 1130019 - DNA, 15 bp, Homo sapiens
gatatgaaataatat

SEQ ID NO: 1130020 - DNA, 15 bp, Homo sapiens
tgatatgaaataata

SEQ ID NO: 1130021 - DNA, 15 bp, Homo sapiens
ctgatatgaaataat

SEQ ID NO: 1130022 - DNA, 15 bp, Homo sapiens
actgatatgaaataa

SEQ ID NO: 1130023 - DNA, 15 bp, Homo sapiens
cactgatatgaaata

SEQ ID NO: 1130024 - DNA, 15 bp, Homo sapiens
ccactgatatgaaat

SEQ ID NO: 1130025 - DNA, 15 bp, Homo sapiens
accactgatatgaaa

SEQ ID NO: 1130026 - DNA, 15 bp, Homo sapiens
gaccactgatatgaa

SEQ ID NO: 1130027 - DNA, 15 bp, Homo sapiens
ggaccactgatatga

SEQ ID NO: 1130028 - DNA, 15 bp, Homo sapiens
tggaccactgatatg

SEQ ID NO: 1130029 - DNA, 15 bp, Homo sapiens
gtggaccactgatat

SEQ ID NO: 1130030 - DNA, 15 bp, Homo sapiens
tgtggaccactgata

SEQ ID NO: 1130031 - DNA, 15 bp, Homo sapiens
atgtggaccactgat

SEQ ID NO: 1130032 - DNA, 15 bp, Homo sapiens
catgtggaccactga

SEQ ID NO: 1130033 - DNA, 15 bp, Homo sapiens
gcatgtggaccactg

SEQ ID NO: 1130034 - DNA, 15 bp, Homo sapiens
tgcatgtggaccact

SEQ ID NO: 1130035 - DNA, 15 bp, Homo sapiens
ttgcatgtggaccac

SEQ ID NO: 1130036 - DNA, 15 bp, Homo sapiens
cttgcatgtggacca

SEQ ID NO: 1130037 - DNA, 15 bp, Homo sapiens
acttgcatgtggacc

SEQ ID NO: 1130038 - DNA, 15 bp, Homo sapiens
cacttgcatgtggac

SEQ ID NO: 1130039 - DNA, 15 bp, Homo sapiens
tcacttgcatgtgga

SEQ ID NO: 1130040 - DNA, 15 bp, Homo sapiens
ctcacttgcatgtgg

SEQ ID NO: 1130041 - DNA, 15 bp, Homo sapiens
cctcacttgcatgtg

SEQ ID NO: 1130042 - DNA, 15 bp, Homo sapiens
gcctcacttgcatgt

SEQ ID NO: 1130043 - DNA, 15 bp, Homo sapiens
agcctcacttgcatg

SEQ ID NO: 1130044 - DNA, 15 bp, Homo sapiens
aagcctcacttgcat

SEQ ID NO: 1130045 - DNA, 15 bp, Homo sapiens
gaagcctcacttgca

SEQ ID NO: 1130046 - DNA, 15 bp, Homo sapiens
agaagcctcacttgc

SEQ ID NO: 1130047 - DNA, 15 bp, Homo sapiens
cagaagcctcacttg

SEQ ID NO: 1130048 - DNA, 15 bp, Homo sapiens
tcagaagcctcactt

SEQ ID NO: 1130049 - DNA, 15 bp, Homo sapiens
ctcagaagcctcact

SEQ ID NO: 1130050 - DNA, 15 bp, Homo sapiens
tctcagaagcctcac

SEQ ID NO: 1130051 - DNA, 15 bp, Homo sapiens
gtctcagaagcctca

SEQ ID NO: 1130052 - DNA, 15 bp, Homo sapiens
tgtctcagaagcctc

SEQ ID NO: 1130053 - DNA, 15 bp, Homo sapiens
ctgtctcagaagcct

SEQ ID NO: 1130054 - DNA, 15 bp, Homo sapiens
tctgtctcagaagcc

SEQ ID NO: 1130055 - DNA, 15 bp, Homo sapiens
ctctgtctcagaagc

SEQ ID NO: 1130056 - DNA, 15 bp, Homo sapiens
actctgtctcagaag

SEQ ID NO: 1130057 - DNA, 15 bp, Homo sapiens
aactctgtctcagaa

SEQ ID NO: 1130058 - DNA, 15 bp, Homo sapiens
aaactctgtctcaga

SEQ ID NO: 1130059 - DNA, 15 bp, Homo sapiens
caaactctgtctcag

SEQ ID NO: 1130060 - DNA, 15 bp, Homo sapiens
tcaaactctgtctca

SEQ ID NO: 1130061 - DNA, 15 bp, Homo sapiens
ctcaaactctgtctc

SEQ ID NO: 1130062 - DNA, 15 bp, Homo sapiens
actcaaactctgtct

SEQ ID NO: 1130063 - DNA, 15 bp, Homo sapiens
aactcaaactctgtc

SEQ ID NO: 1130064 - DNA, 15 bp, Homo sapiens
gaactcaaactctgt

SEQ ID NO: 1130065 - DNA, 15 bp, Homo sapiens
agaactcaaactctg

SEQ ID NO: 1130066 - DNA, 15 bp, Homo sapiens
gagaactcaaactct

SEQ ID NO: 1130067 - DNA, 15 bp, Homo sapiens
agagaactcaaactc

SEQ ID NO: 1130068 - DNA, 15 bp, Homo sapiens
gagagaactcaaact

SEQ ID NO: 1130069 - DNA, 15 bp, Homo sapiens
agagagaactcaaac

SEQ ID NO: 1130070 - DNA, 15 bp, Homo sapiens
aagagagaactcaaa

SEQ ID NO: 1130071 - DNA, 15 bp, Homo sapiens
gaagagagaactcaa

SEQ ID NO: 1130072 - DNA, 15 bp, Homo sapiens
tgaagagagaactca

SEQ ID NO: 1130073 - DNA, 15 bp, Homo sapiens
ttgaagagagaactc

SEQ ID NO: 1130074 - DNA, 15 bp, Homo sapiens
gttgaagagagaact

SEQ ID NO: 1130075 - DNA, 15 bp, Homo sapiens
agttgaagagagaac

SEQ ID NO: 1130076 - DNA, 15 bp, Homo sapiens
tagttgaagagagaa

SEQ ID NO: 1130077 - DNA, 15 bp, Homo sapiens
gtagttgaagagaga

SEQ ID NO: 1130078 - DNA, 15 bp, Homo sapiens
ggtagttgaagagag

SEQ ID NO: 1130079 - DNA, 15 bp, Homo sapiens
tggtagttgaagaga

SEQ ID NO: 1130080 - DNA, 15 bp, Homo sapiens
atggtagttgaagag

SEQ ID NO: 1130081 - DNA, 15 bp, Homo sapiens
tatggtagttgaaga

SEQ ID NO: 1130082 - DNA, 15 bp, Homo sapiens
ttatggtagttgaag

SEQ ID NO: 1130083 - DNA, 15 bp, Homo sapiens
gttatggtagttgaa

SEQ ID NO: 1130084 - DNA, 15 bp, Homo sapiens
tgttatggtagttga

SEQ ID NO: 1130085 - DNA, 15 bp, Homo sapiens
gtgttatggtagttg

SEQ ID NO: 1130086 - DNA, 15 bp, Homo sapiens
agtgttatggtagtt

SEQ ID NO: 1130087 - DNA, 15 bp, Homo sapiens
aagtgttatggtagt

SEQ ID NO: 1130088 - DNA, 15 bp, Homo sapiens
taagtgttatggtag

SEQ ID NO: 1130089 - DNA, 15 bp, Homo sapiens
ttaagtgttatggta

SEQ ID NO: 1130090 - DNA, 15 bp, Homo sapiens
gttaagtgttatggt

SEQ ID NO: 1130091 - DNA, 15 bp, Homo sapiens
ggttaagtgttatgg

SEQ ID NO: 1130092 - DNA, 15 bp, Homo sapiens
aggttaagtgttatg

SEQ ID NO: 1130093 - DNA, 15 bp, Homo sapiens
caggttaagtgttat

SEQ ID NO: 1130094 - DNA, 15 bp, Homo sapiens
acaggttaagtgtta

SEQ ID NO: 1130095 - DNA, 15 bp, Homo sapiens
tacaggttaagtgtt

SEQ ID NO: 1130096 - DNA, 15 bp, Homo sapiens
atacaggttaagtgt

SEQ ID NO: 1130097 - DNA, 15 bp, Homo sapiens
gatacaggttaagtg

SEQ ID NO: 1130098 - DNA, 15 bp, Homo sapiens
agatacaggttaagt

SEQ ID NO: 1130099 - DNA, 15 bp, Homo sapiens
aagatacaggttaag

SEQ ID NO: 1130100 - DNA, 15 bp, Homo sapiens
aaagatacaggttaa

SEQ ID NO: 1130101 - DNA, 15 bp, Homo sapiens
aaaagatacaggtta

SEQ ID NO: 1130102 - DNA, 15 bp, Homo sapiens
aaaaagatacaggtt

SEQ ID NO: 1130103 - DNA, 15 bp, Homo sapiens
aaaaaagatacaggt

SEQ ID NO: 1130104 - DNA, 15 bp, Homo sapiens
aaaaaaagatacagg

SEQ ID NO: 1130105 - DNA, 15 bp, Homo sapiens
aaaaaaaagatacag

SEQ ID NO: 1130106 - DNA, 15 bp, Homo sapiens
aaaaaaaaagataca

SEQ ID NO: 1130107 - DNA, 15 bp, Homo sapiens
aaaaaaaaaaagata

SEQ ID NO: 1130108 - DNA, 15 bp, Homo sapiens
cgtctaaaaaaaaaa

SEQ ID NO: 1130109 - DNA, 15 bp, Homo sapiens
ccgtctaaaaaaaaa

SEQ ID NO: 1130110 - DNA, 15 bp, Homo sapiens
tccgtctaaaaaaaa

SEQ ID NO: 1130111 - DNA, 15 bp, Homo sapiens
ctccgtctaaaaaaa

SEQ ID NO: 1130112 - DNA, 15 bp, Homo sapiens
actccgtctaaaaaa

SEQ ID NO: 1130113 - DNA, 15 bp, Homo sapiens
gactccgtctaaaaa

SEQ ID NO: 1130114 - DNA, 15 bp, Homo sapiens
agactccgtctaaaa

SEQ ID NO: 1130115 - DNA, 15 bp, Homo sapiens
gagactccgtctaaa

SEQ ID NO: 1130116 - DNA, 15 bp, Homo sapiens
cgagactccgtctaa

SEQ ID NO: 1130117 - DNA, 15 bp, Homo sapiens
gcgagactccgtcta

SEQ ID NO: 1130118 - DNA, 15 bp, Homo sapiens
agtgacagagcgaga

SEQ ID NO: 1130119 - DNA, 15 bp, Homo sapiens
gagtgacagagcgag

SEQ ID NO: 1130120 - DNA, 15 bp, Homo sapiens
tgagtgacagagcga

SEQ ID NO: 1130121 - DNA, 15 bp, Homo sapiens
ctgagtgacagagcg

SEQ ID NO: 1130122 - DNA, 15 bp, Homo sapiens
acactccagcctgag

SEQ ID NO: 1130123 - DNA, 15 bp, Homo sapiens
tacactccagcctga

SEQ ID NO: 1130124 - DNA, 15 bp, Homo sapiens
accactacactccag

SEQ ID NO: 1130125 - DNA, 15 bp, Homo sapiens
taccactacactcca

SEQ ID NO: 1130126 - DNA, 15 bp, Homo sapiens
ataccactacactcc

SEQ ID NO: 1130127 - DNA, 15 bp, Homo sapiens
cataccactacactc

SEQ ID NO: 1130128 - DNA, 15 bp, Homo sapiens
tcataccactacact

SEQ ID NO: 1130129 - DNA, 15 bp, Homo sapiens
atcataccactacac

SEQ ID NO: 1130130 - DNA, 15 bp, Homo sapiens
gatcataccactaca

SEQ ID NO: 1130131 - DNA, 15 bp, Homo sapiens
agatcataccactac

SEQ ID NO: 1130132 - DNA, 15 bp, Homo sapiens
gagatcataccacta

SEQ ID NO: 1130133 - DNA, 15 bp, Homo sapiens
cgagatcataccact

SEQ ID NO: 1130134 - DNA, 15 bp, Homo sapiens
ccgagatcataccac

SEQ ID NO: 1130135 - DNA, 15 bp, Homo sapiens
gccgagatcatacca

SEQ ID NO: 1130136 - DNA, 15 bp, Homo sapiens
agccgagatcatacc

SEQ ID NO: 1130137 - DNA, 15 bp, Homo sapiens
gagccgagatcatac

SEQ ID NO: 1130138 - DNA, 15 bp, Homo sapiens
tgagccgagatcata

SEQ ID NO: 1130139 - DNA, 15 bp, Homo sapiens
acagtgagccgagat

SEQ ID NO: 1130140 - DNA, 15 bp, Homo sapiens
tacagtgagccgaga

SEQ ID NO: 1130141 - DNA, 15 bp, Homo sapiens
ttacagtgagccgag

SEQ ID NO: 1130142 - DNA, 15 bp, Homo sapiens
gttacagtgagccga

SEQ ID NO: 1130143 - DNA, 15 bp, Homo sapiens
ggttacagtgagccg

SEQ ID NO: 1130144 - DNA, 15 bp, Homo sapiens
gaggttacagtgagc

SEQ ID NO: 1130145 - DNA, 15 bp, Homo sapiens
agaggttacagtgag

SEQ ID NO: 1130146 - DNA, 15 bp, Homo sapiens
cagaggttacagtga

SEQ ID NO: 1130147 - DNA, 15 bp, Homo sapiens
gcagaggttacagtg

SEQ ID NO: 1130148 - DNA, 15 bp, Homo sapiens
ggcagaggttacagt

SEQ ID NO: 1130149 - DNA, 15 bp, Homo sapiens
aggcagaggttacag

SEQ ID NO: 1130150 - DNA, 15 bp, Homo sapiens
gaggcagaggttaca

SEQ ID NO: 1130151 - DNA, 15 bp, Homo sapiens
ggaggcagaggttac

SEQ ID NO: 1130152 - DNA, 15 bp, Homo sapiens
aggaggcagaggtta

SEQ ID NO: 1130153 - DNA, 15 bp, Homo sapiens
tgaatccaggaggca

SEQ ID NO: 1130154 - DNA, 15 bp, Homo sapiens
ttgaatccaggaggc

SEQ ID NO: 1130155 - DNA, 15 bp, Homo sapiens
cttgaatccaggagg

SEQ ID NO: 1130156 - DNA, 15 bp, Homo sapiens
gcttgaatccaggag

SEQ ID NO: 1130157 - DNA, 15 bp, Homo sapiens
tgcttgaatccagga

SEQ ID NO: 1130158 - DNA, 15 bp, Homo sapiens
ctgcttgaatccagg

SEQ ID NO: 1130159 - DNA, 15 bp, Homo sapiens
actgcttgaatccag

SEQ ID NO: 1130160 - DNA, 15 bp, Homo sapiens
aactgcttgaatcca

SEQ ID NO: 1130161 - DNA, 15 bp, Homo sapiens
gaactgcttgaatcc

SEQ ID NO: 1130162 - DNA, 15 bp, Homo sapiens
agaactgcttgaatc

SEQ ID NO: 1130163 - DNA, 15 bp, Homo sapiens
gagaactgcttgaat

SEQ ID NO: 1130164 - DNA, 15 bp, Homo sapiens
tggagaactgcttga

SEQ ID NO: 1130165 - DNA, 15 bp, Homo sapiens
atggagaactgcttg

SEQ ID NO: 1130166 - DNA, 15 bp, Homo sapiens
catggagaactgctt

SEQ ID NO: 1130167 - DNA, 15 bp, Homo sapiens
acatggagaactgct

SEQ ID NO: 1130168 - DNA, 15 bp, Homo sapiens
gacatggagaactgc

SEQ ID NO: 1130169 - DNA, 15 bp, Homo sapiens
agacatggagaactg

SEQ ID NO: 1130170 - DNA, 15 bp, Homo sapiens
gagacatggagaact

SEQ ID NO: 1130171 - DNA, 15 bp, Homo sapiens
tgagacatggagaac

SEQ ID NO: 1130172 - DNA, 15 bp, Homo sapiens
ctgagacatggagaa

SEQ ID NO: 1130173 - DNA, 15 bp, Homo sapiens
gctgagacatggaga

SEQ ID NO: 1130174 - DNA, 15 bp, Homo sapiens
ggctgagacatggag

SEQ ID NO: 1130175 - DNA, 15 bp, Homo sapiens
aggctgagacatgga

SEQ ID NO: 1130176 - DNA, 15 bp, Homo sapiens
gaggctgagacatgg

SEQ ID NO: 1130177 - DNA, 15 bp, Homo sapiens
gggaggctgagacat

SEQ ID NO: 1130178 - DNA, 15 bp, Homo sapiens
agggaggctgagaca

SEQ ID NO: 1130179 - DNA, 15 bp, Homo sapiens
tagggaggctgagac

SEQ ID NO: 1130180 - DNA, 15 bp, Homo sapiens
ctagggaggctgaga

SEQ ID NO: 1130181 - DNA, 15 bp, Homo sapiens
acaggcctgtaatcc

SEQ ID NO: 1130182 - DNA, 15 bp, Homo sapiens
cacaggcctgtaatc

SEQ ID NO: 1130183 - DNA, 15 bp, Homo sapiens
gcacaggcctgtaat

SEQ ID NO: 1130184 - DNA, 15 bp, Homo sapiens
ggcacaggcctgtaa

SEQ ID NO: 1130185 - DNA, 15 bp, Homo sapiens
tggcacaggcctgta

SEQ ID NO: 1130186 - DNA, 15 bp, Homo sapiens
gtggcacaggcctgt

SEQ ID NO: 1130187 - DNA, 15 bp, Homo sapiens
ggtggcacaggcctg

SEQ ID NO: 1130188 - DNA, 15 bp, Homo sapiens
tggtggcacaggcct

SEQ ID NO: 1130189 - DNA, 15 bp, Homo sapiens
atggtggcacaggcc

SEQ ID NO: 1130190 - DNA, 15 bp, Homo sapiens
aaccatgtaactata

SEQ ID NO: 1130191 - DNA, 15 bp, Homo sapiens
aaaccatgtaactat

SEQ ID NO: 1130192 - DNA, 15 bp, Homo sapiens
aaaaccatgtaacta

SEQ ID NO: 1130193 - DNA, 15 bp, Homo sapiens
aaaaaccatgtaact

SEQ ID NO: 1130194 - DNA, 15 bp, Homo sapiens
aaaaaaccatgtaac

SEQ ID NO: 1130195 - DNA, 15 bp, Homo sapiens
caaaaaaccatgtaa

SEQ ID NO: 1130196 - DNA, 15 bp, Homo sapiens
acaaaaaaccatgta

SEQ ID NO: 1130197 - DNA, 15 bp, Homo sapiens
aacaaaaaaccatgt

SEQ ID NO: 1130198 - DNA, 15 bp, Homo sapiens
aaacaaaaaaccatg

SEQ ID NO: 1130199 - DNA, 15 bp, Homo sapiens
aaaacaaaaaaccat

SEQ ID NO: 1130200 - DNA, 15 bp, Homo sapiens
caaaacaaaaaacca

SEQ ID NO: 1130201 - DNA, 15 bp, Homo sapiens
acaaaacaaaaaacc

SEQ ID NO: 1130202 - DNA, 15 bp, Homo sapiens
aacaaaacaaaaaac

SEQ ID NO: 1130203 - DNA, 15 bp, Homo sapiens
acaaaaaacaaaaca

SEQ ID NO: 1130204 - DNA, 15 bp, Homo sapiens
aacaaaaaacaaaac

SEQ ID NO: 1130205 - DNA, 15 bp, Homo sapiens
aaacaaaaaacaaaa

SEQ ID NO: 1130206 - DNA, 15 bp, Homo sapiens
aaaaacaaaaaacaa

SEQ ID NO: 1130207 - DNA, 15 bp, Homo sapiens
aaaaaacaaaaaaca

SEQ ID NO: 1130208 - DNA, 15 bp, Homo sapiens
taaaaaacaaaaaac

SEQ ID NO: 1130209 - DNA, 15 bp, Homo sapiens
ttaaaaaacaaaaaa

SEQ ID NO: 1130210 - DNA, 15 bp, Homo sapiens
ctttaaaaaacaaaa

SEQ ID NO: 1130211 - DNA, 15 bp, Homo sapiens
tctttaaaaaacaaa

SEQ ID NO: 1130212 - DNA, 15 bp, Homo sapiens
gtctttaaaaaacaa

SEQ ID NO: 1130213 - DNA, 15 bp, Homo sapiens
cgtctttaaaaaaca

SEQ ID NO: 1130214 - DNA, 15 bp, Homo sapiens
tcgtctttaaaaaac

SEQ ID NO: 1130215 - DNA, 15 bp, Homo sapiens
ttcgtctttaaaaaa

SEQ ID NO: 1130216 - DNA, 15 bp, Homo sapiens
tttcgtctttaaaaa

SEQ ID NO: 1130217 - DNA, 15 bp, Homo sapiens
atttcgtctttaaaa

SEQ ID NO: 1130218 - DNA, 15 bp, Homo sapiens
gatttcgtctttaaa

SEQ ID NO: 1130219 - DNA, 15 bp, Homo sapiens
agatttcgtctttaa

SEQ ID NO: 1130220 - DNA, 15 bp, Homo sapiens
gagatttcgtcttta

SEQ ID NO: 1130221 - DNA, 15 bp, Homo sapiens
cgagatttcgtcttt

SEQ ID NO: 1130222 - DNA, 15 bp, Homo sapiens
gcgagatttcgtctt

SEQ ID NO: 1130223 - DNA, 15 bp, Homo sapiens
agcgagatttcgtct

SEQ ID NO: 1130224 - DNA, 15 bp, Homo sapiens
gagcgagatttcgtc

SEQ ID NO: 1130225 - DNA, 15 bp, Homo sapiens
agagcgagatttcgt

SEQ ID NO: 1130226 - DNA, 15 bp, Homo sapiens
aagagcgagatttcg

SEQ ID NO: 1130227 - DNA, 15 bp, Homo sapiens
caagagcgagatttc

SEQ ID NO: 1130228 - DNA, 15 bp, Homo sapiens
acaagagcgagattt

SEQ ID NO: 1130229 - DNA, 15 bp, Homo sapiens
gacaagagcgagatt

SEQ ID NO: 1130230 - DNA, 15 bp, Homo sapiens
ggacaagagcgagat

SEQ ID NO: 1130231 - DNA, 15 bp, Homo sapiens
gggacaagagcgaga

SEQ ID NO: 1130232 - DNA, 15 bp, Homo sapiens
ggggacaagagcgag

SEQ ID NO: 1130233 - DNA, 15 bp, Homo sapiens
gggggacaagagcga

SEQ ID NO: 1130234 - DNA, 15 bp, Homo sapiens
tgggggacaagagcg

SEQ ID NO: 1130235 - DNA, 15 bp, Homo sapiens
ctgggggacaagagc

SEQ ID NO: 1130236 - DNA, 15 bp, Homo sapiens
cctgggggacaagag

SEQ ID NO: 1130237 - DNA, 15 bp, Homo sapiens
gcctgggggacaaga

SEQ ID NO: 1130238 - DNA, 15 bp, Homo sapiens
agcctgggggacaag

SEQ ID NO: 1130239 - DNA, 15 bp, Homo sapiens
cagcctgggggacaa

SEQ ID NO: 1130240 - DNA, 15 bp, Homo sapiens
tgagatggcaccatt

SEQ ID NO: 1130241 - DNA, 15 bp, Homo sapiens
ctgagatggcaccat

SEQ ID NO: 1130242 - DNA, 15 bp, Homo sapiens
gctgagatggcacca

SEQ ID NO: 1130243 - DNA, 15 bp, Homo sapiens
agctgagatggcacc

SEQ ID NO: 1130244 - DNA, 15 bp, Homo sapiens
gagctgagatggcac

SEQ ID NO: 1130245 - DNA, 15 bp, Homo sapiens
tgagctgagatggca

SEQ ID NO: 1130246 - DNA, 15 bp, Homo sapiens
ctgagctgagatggc

SEQ ID NO: 1130247 - DNA, 15 bp, Homo sapiens
actgagctgagatgg

SEQ ID NO: 1130248 - DNA, 15 bp, Homo sapiens
cactgagctgagatg

SEQ ID NO: 1130249 - DNA, 15 bp, Homo sapiens
tgcactgagctgaga

SEQ ID NO: 1130250 - DNA, 15 bp, Homo sapiens
ttgcactgagctgag

SEQ ID NO: 1130251 - DNA, 15 bp, Homo sapiens
gttgcactgagctga

SEQ ID NO: 1130252 - DNA, 15 bp, Homo sapiens
ggttgcactgagctg

SEQ ID NO: 1130253 - DNA, 15 bp, Homo sapiens
aggttgcactgagct

SEQ ID NO: 1130254 - DNA, 15 bp, Homo sapiens
aaggcagaggttgca

SEQ ID NO: 1130255 - DNA, 15 bp, Homo sapiens
gaaggcagaggttgc

SEQ ID NO: 1130256 - DNA, 15 bp, Homo sapiens
agaaggcagaggttg

SEQ ID NO: 1130257 - DNA, 15 bp, Homo sapiens
cagaaggcagaggtt

SEQ ID NO: 1130258 - DNA, 15 bp, Homo sapiens
ccagaaggcagaggt

SEQ ID NO: 1130259 - DNA, 15 bp, Homo sapiens
cccagaaggcagagg

SEQ ID NO: 1130260 - DNA, 15 bp, Homo sapiens
acccagaaggcagag

SEQ ID NO: 1130261 - DNA, 15 bp, Homo sapiens
tacccagaaggcaga

SEQ ID NO: 1130262 - DNA, 15 bp, Homo sapiens
gtacccagaaggcag

SEQ ID NO: 1130263 - DNA, 15 bp, Homo sapiens
tgtacccagaaggca

SEQ ID NO: 1130264 - DNA, 15 bp, Homo sapiens
ttgtacccagaaggc

SEQ ID NO: 1130265 - DNA, 15 bp, Homo sapiens
cttgtacccagaagg

SEQ ID NO: 1130266 - DNA, 15 bp, Homo sapiens
gcttgtacccagaag

SEQ ID NO: 1130267 - DNA, 15 bp, Homo sapiens
cgcttgtacccagaa

SEQ ID NO: 1130268 - DNA, 15 bp, Homo sapiens
tcgcttgtacccaga

SEQ ID NO: 1130269 - DNA, 15 bp, Homo sapiens
atcgcttgtacccag

SEQ ID NO: 1130270 - DNA, 15 bp, Homo sapiens
aatcgcttgtaccca

SEQ ID NO: 1130271 - DNA, 15 bp, Homo sapiens
gaatcgcttgtaccc

SEQ ID NO: 1130272 - DNA, 15 bp, Homo sapiens
agaatcgcttgtacc

SEQ ID NO: 1130273 - DNA, 15 bp, Homo sapiens
gagaatcgcttgtac

SEQ ID NO: 1130274 - DNA, 15 bp, Homo sapiens
ggagaatcgcttgta

SEQ ID NO: 1130275 - DNA, 15 bp, Homo sapiens
aggagaatcgcttgt

SEQ ID NO: 1130276 - DNA, 15 bp, Homo sapiens
gagcctgtaatccca

SEQ ID NO: 1130277 - DNA, 15 bp, Homo sapiens
ggagcctgtaatccc

SEQ ID NO: 1130278 - DNA, 15 bp, Homo sapiens
aggagcctgtaatcc

SEQ ID NO: 1130279 - DNA, 15 bp, Homo sapiens
caggagcctgtaatc

SEQ ID NO: 1130280 - DNA, 15 bp, Homo sapiens
gcaggagcctgtaat

SEQ ID NO: 1130281 - DNA, 15 bp, Homo sapiens
ggcaggagcctgtaa

SEQ ID NO: 1130282 - DNA, 15 bp, Homo sapiens
tggcaggagcctgta

SEQ ID NO: 1130283 - DNA, 15 bp, Homo sapiens
gtggcaggagcctgt

SEQ ID NO: 1130284 - DNA, 15 bp, Homo sapiens
ggtggcaggagcctg

SEQ ID NO: 1130285 - DNA, 15 bp, Homo sapiens
tggtggcaggagcct

SEQ ID NO: 1130286 - DNA, 15 bp, Homo sapiens
gtggtggcaggagcc

SEQ ID NO: 1130287 - DNA, 15 bp, Homo sapiens
cgtggtggcaggagc

SEQ ID NO: 1130288 - DNA, 15 bp, Homo sapiens
gcgtggtggcaggag

SEQ ID NO: 1130289 - DNA, 15 bp, Homo sapiens
ggcgtggtggcagga

SEQ ID NO: 1130290 - DNA, 15 bp, Homo sapiens
gccgtctctactaaa

SEQ ID NO: 1130291 - DNA, 15 bp, Homo sapiens
cgccgtctctactaa

SEQ ID NO: 1130292 - DNA, 15 bp, Homo sapiens
ccgccgtctctacta

SEQ ID NO: 1130293 - DNA, 15 bp, Homo sapiens
cccgccgtctctact

SEQ ID NO: 1130294 - DNA, 15 bp, Homo sapiens
ccccgccgtctctac

SEQ ID NO: 1130295 - DNA, 15 bp, Homo sapiens
cccccgccgtctcta

SEQ ID NO: 1130296 - DNA, 15 bp, Homo sapiens
ccccccgccgtctct

SEQ ID NO: 1130297 - DNA, 15 bp, Homo sapiens
tccccccgccgtctc

SEQ ID NO: 1130298 - DNA, 15 bp, Homo sapiens
ctccccccgccgtct

SEQ ID NO: 1130299 - DNA, 15 bp, Homo sapiens
cctccccccgccgtc

SEQ ID NO: 1130300 - DNA, 15 bp, Homo sapiens
acctccccccgccgt

SEQ ID NO: 1130301 - DNA, 15 bp, Homo sapiens
aacctccccccgccg

SEQ ID NO: 1130302 - DNA, 15 bp, Homo sapiens
aaacctccccccgcc

SEQ ID NO: 1130303 - DNA, 15 bp, Homo sapiens
gaaacctccccccgc

SEQ ID NO: 1130304 - DNA, 15 bp, Homo sapiens
tgaaacctccccccg

SEQ ID NO: 1130305 - DNA, 15 bp, Homo sapiens
gtgaaacctcccccc

SEQ ID NO: 1130306 - DNA, 15 bp, Homo sapiens
ggtgaaacctccccc

SEQ ID NO: 1130307 - DNA, 15 bp, Homo sapiens
tggtgaaacctcccc

SEQ ID NO: 1130308 - DNA, 15 bp, Homo sapiens
atggtgaaacctccc

SEQ ID NO: 1130309 - DNA, 15 bp, Homo sapiens
catggtgaaacctcc

SEQ ID NO: 1130310 - DNA, 15 bp, Homo sapiens
gtcaacatggtgaaa

SEQ ID NO: 1130311 - DNA, 15 bp, Homo sapiens
tgtcaacatggtgaa

SEQ ID NO: 1130312 - DNA, 15 bp, Homo sapiens
ttgtcaacatggtga

SEQ ID NO: 1130313 - DNA, 15 bp, Homo sapiens
cttgtcaacatggtg

SEQ ID NO: 1130314 - DNA, 15 bp, Homo sapiens
ccttgtcaacatggt

SEQ ID NO: 1130315 - DNA, 15 bp, Homo sapiens
gccttgtcaacatgg

SEQ ID NO: 1130316 - DNA, 15 bp, Homo sapiens
agccttgtcaacatg

SEQ ID NO: 1130317 - DNA, 15 bp, Homo sapiens
cagccttgtcaacat

SEQ ID NO: 1130318 - DNA, 15 bp, Homo sapiens
ccagccttgtcaaca

SEQ ID NO: 1130319 - DNA, 15 bp, Homo sapiens
accagccttgtcaac

SEQ ID NO: 1130320 - DNA, 15 bp, Homo sapiens
gaccagccttgtcaa

SEQ ID NO: 1130321 - DNA, 15 bp, Homo sapiens
agaccagccttgtca

SEQ ID NO: 1130322 - DNA, 15 bp, Homo sapiens
cagaccagccttgtc

SEQ ID NO: 1130323 - DNA, 15 bp, Homo sapiens
ccagaccagccttgt

SEQ ID NO: 1130324 - DNA, 15 bp, Homo sapiens
tccagaccagccttg

SEQ ID NO: 1130325 - DNA, 15 bp, Homo sapiens
ttccagaccagcctt

SEQ ID NO: 1130326 - DNA, 15 bp, Homo sapiens
acaggctgggcgcgg

SEQ ID NO: 1130327 - DNA, 15 bp, Homo sapiens
aacaggctgggcgcg

SEQ ID NO: 1130328 - DNA, 15 bp, Homo sapiens
aaacaggctgggcgc

SEQ ID NO: 1130329 - DNA, 15 bp, Homo sapiens
aaaacaggctgggcg

SEQ ID NO: 1130330 - DNA, 15 bp, Homo sapiens
aaaaacaggctgggc

SEQ ID NO: 1130331 - DNA, 15 bp, Homo sapiens
aaaaaacaggctggg

SEQ ID NO: 1130332 - DNA, 15 bp, Homo sapiens
aaaaaaacaggctgg

SEQ ID NO: 1130333 - DNA, 15 bp, Homo sapiens
caaaaaaacaggctg

SEQ ID NO: 1130334 - DNA, 15 bp, Homo sapiens
acaaaaaaacaggct

SEQ ID NO: 1130335 - DNA, 15 bp, Homo sapiens
aacaaaaaaacaggc

SEQ ID NO: 1130336 - DNA, 15 bp, Homo sapiens
aaacaaaaaaacagg

SEQ ID NO: 1130337 - DNA, 15 bp, Homo sapiens
acaaacaaaaaaaca

SEQ ID NO: 1130338 - DNA, 15 bp, Homo sapiens
acaaaacaaacaaac

SEQ ID NO: 1130339 - DNA, 15 bp, Homo sapiens
caaaaaaaacaaaac

SEQ ID NO: 1130340 - DNA, 15 bp, Homo sapiens
aaacagagcaagact

SEQ ID NO: 1130341 - DNA, 15 bp, Homo sapiens
gaaacagagcaagac

SEQ ID NO: 1130342 - DNA, 15 bp, Homo sapiens
ggaaacagagcaaga

SEQ ID NO: 1130343 - DNA, 15 bp, Homo sapiens
gggaaacagagcaag

SEQ ID NO: 1130344 - DNA, 15 bp, Homo sapiens
tgggaaacagagcaa

SEQ ID NO: 1130345 - DNA, 15 bp, Homo sapiens
ctgggaaacagagca

SEQ ID NO: 1130346 - DNA, 15 bp, Homo sapiens
cctgggaaacagagc

SEQ ID NO: 1130347 - DNA, 15 bp, Homo sapiens
gcctgggaaacagag

SEQ ID NO: 1130348 - DNA, 15 bp, Homo sapiens
agcctgggaaacaga

SEQ ID NO: 1130349 - DNA, 15 bp, Homo sapiens
cagcctgggaaacag

SEQ ID NO: 1130350 - DNA, 15 bp, Homo sapiens
ccagcctgggaaaca

SEQ ID NO: 1130351 - DNA, 15 bp, Homo sapiens
tccagcctgggaaac

SEQ ID NO: 1130352 - DNA, 15 bp, Homo sapiens
gccacttcactccag

SEQ ID NO: 1130353 - DNA, 15 bp, Homo sapiens
cgccacttcactcca

SEQ ID NO: 1130354 - DNA, 15 bp, Homo sapiens
gcgccacttcactcc

SEQ ID NO: 1130355 - DNA, 15 bp, Homo sapiens
tgcgccacttcactc

SEQ ID NO: 1130356 - DNA, 15 bp, Homo sapiens
atgcgccacttcact

SEQ ID NO: 1130357 - DNA, 15 bp, Homo sapiens
aatgcgccacttcac

SEQ ID NO: 1130358 - DNA, 15 bp, Homo sapiens
gaatgcgccacttca

SEQ ID NO: 1130359 - DNA, 15 bp, Homo sapiens
agaatgcgccacttc

SEQ ID NO: 1130360 - DNA, 15 bp, Homo sapiens
aagaatgcgccactt

SEQ ID NO: 1130361 - DNA, 15 bp, Homo sapiens
caagaatgcgccact

SEQ ID NO: 1130362 - DNA, 15 bp, Homo sapiens
ccaagaatgcgccac

SEQ ID NO: 1130363 - DNA, 15 bp, Homo sapiens
gccaagaatgcgcca

SEQ ID NO: 1130364 - DNA, 15 bp, Homo sapiens
agccaagaatgcgcc

SEQ ID NO: 1130365 - DNA, 15 bp, Homo sapiens
gagccaagaatgcgc

SEQ ID NO: 1130366 - DNA, 15 bp, Homo sapiens
tgagccaagaatgcg

SEQ ID NO: 1130367 - DNA, 15 bp, Homo sapiens
gtgagccaagaatgc

SEQ ID NO: 1130368 - DNA, 15 bp, Homo sapiens
agtgagccaagaatg

SEQ ID NO: 1130369 - DNA, 15 bp, Homo sapiens
cagtgagccaagaat

SEQ ID NO: 1130370 - DNA, 15 bp, Homo sapiens
gcagtgagccaagaa

SEQ ID NO: 1130371 - DNA, 15 bp, Homo sapiens
gaaggttgcagtgag

SEQ ID NO: 1130372 - DNA, 15 bp, Homo sapiens
tgaaggttgcagtga

SEQ ID NO: 1130373 - DNA, 15 bp, Homo sapiens
gtgaaggttgcagtg

SEQ ID NO: 1130374 - DNA, 15 bp, Homo sapiens
ggtgaaggttgcagt

SEQ ID NO: 1130375 - DNA, 15 bp, Homo sapiens
aggtgaaggttgcag

SEQ ID NO: 1130376 - DNA, 15 bp, Homo sapiens
gaggtgaaggttgca

SEQ ID NO: 1130377 - DNA, 15 bp, Homo sapiens
ggaggtgaaggttgc

SEQ ID NO: 1130378 - DNA, 15 bp, Homo sapiens
gggaggtgaaggttg

SEQ ID NO: 1130379 - DNA, 15 bp, Homo sapiens
tgggaggtgaaggtt

SEQ ID NO: 1130380 - DNA, 15 bp, Homo sapiens
ctgggaggtgaaggt

SEQ ID NO: 1130381 - DNA, 15 bp, Homo sapiens
cctgggaggtgaagg

SEQ ID NO: 1130382 - DNA, 15 bp, Homo sapiens
acctgggaggtgaag

SEQ ID NO: 1130383 - DNA, 15 bp, Homo sapiens
aacctgggaggtgaa

SEQ ID NO: 1130384 - DNA, 15 bp, Homo sapiens
gaacctgggaggtga

SEQ ID NO: 1130385 - DNA, 15 bp, Homo sapiens
acacatgcctgtagt

SEQ ID NO: 1130386 - DNA, 15 bp, Homo sapiens
gacacatgcctgtag

SEQ ID NO: 1130387 - DNA, 15 bp, Homo sapiens
gggtgtggtgacaca

SEQ ID NO: 1130388 - DNA, 15 bp, Homo sapiens
cgggtgtggtgacac

SEQ ID NO: 1130389 - DNA, 15 bp, Homo sapiens
ccgggtgtggtgaca

SEQ ID NO: 1130390 - DNA, 15 bp, Homo sapiens
gccgggtgtggtgac

SEQ ID NO: 1130391 - DNA, 15 bp, Homo sapiens
agccgggtgtggtga

SEQ ID NO: 1130392 - DNA, 15 bp, Homo sapiens
caaaaaaattagccg

SEQ ID NO: 1130393 - DNA, 15 bp, Homo sapiens
cggtgaaatcccgtc

SEQ ID NO: 1130394 - DNA, 15 bp, Homo sapiens
acggtgaaatcccgt

SEQ ID NO: 1130395 - DNA, 15 bp, Homo sapiens
cacggtgaaatcccg

SEQ ID NO: 1130396 - DNA, 15 bp, Homo sapiens
acacggtgaaatccc

SEQ ID NO: 1130397 - DNA, 15 bp, Homo sapiens
gcaacacggtgaaat

SEQ ID NO: 1130398 - DNA, 15 bp, Homo sapiens
tgcctgagctcagga

SEQ ID NO: 1130399 - DNA, 15 bp, Homo sapiens
ctgcctgagctcagg

SEQ ID NO: 1130400 - DNA, 15 bp, Homo sapiens
actgcctgagctcag

SEQ ID NO: 1130401 - DNA, 15 bp, Homo sapiens
gactgcctgagctca

SEQ ID NO: 1130402 - DNA, 15 bp, Homo sapiens
agactgcctgagctc

SEQ ID NO: 1130403 - DNA, 15 bp, Homo sapiens
cagactgcctgagct

SEQ ID NO: 1130404 - DNA, 15 bp, Homo sapiens
gcagactgcctgagc

SEQ ID NO: 1130405 - DNA, 15 bp, Homo sapiens
ggcagactgcctgag

SEQ ID NO: 1130406 - DNA, 15 bp, Homo sapiens
aggcagactgcctga

SEQ ID NO: 1130407 - DNA, 15 bp, Homo sapiens
caggcagactgcctg

SEQ ID NO: 1130408 - DNA, 15 bp, Homo sapiens
gcaggcagactgcct

SEQ ID NO: 1130409 - DNA, 15 bp, Homo sapiens
ggcaggcagactgcc

SEQ ID NO: 1130410 - DNA, 15 bp, Homo sapiens
aggcaggcagactgc

SEQ ID NO: 1130411 - DNA, 15 bp, Homo sapiens
gaggcaggcagactg

SEQ ID NO: 1130412 - DNA, 15 bp, Homo sapiens
tgaggcaggcagact

SEQ ID NO: 1130413 - DNA, 15 bp, Homo sapiens
ctgaggcaggcagac

SEQ ID NO: 1130414 - DNA, 15 bp, Homo sapiens
acacgtgtaatccca

SEQ ID NO: 1130415 - DNA, 15 bp, Homo sapiens
cacacgtgtaatccc

SEQ ID NO: 1130416 - DNA, 15 bp, Homo sapiens
tcacacgtgtaatcc

SEQ ID NO: 1130417 - DNA, 15 bp, Homo sapiens
ttcacacgtgtaatc

SEQ ID NO: 1130418 - DNA, 15 bp, Homo sapiens
gttcacacgtgtaat

SEQ ID NO: 1130419 - DNA, 15 bp, Homo sapiens
ggttcacacgtgtaa

SEQ ID NO: 1130420 - DNA, 15 bp, Homo sapiens
tggttcacacgtgta

SEQ ID NO: 1130421 - DNA, 15 bp, Homo sapiens
ttggttcacacgtgt

SEQ ID NO: 1130422 - DNA, 15 bp, Homo sapiens
gttggttcacacgtg

SEQ ID NO: 1130423 - DNA, 15 bp, Homo sapiens
ggttggttcacacgt

SEQ ID NO: 1130424 - DNA, 15 bp, Homo sapiens
gggttggttcacacg

SEQ ID NO: 1130425 - DNA, 15 bp, Homo sapiens
cgggttggttcacac

SEQ ID NO: 1130426 - DNA, 15 bp, Homo sapiens
gcgggttggttcaca

SEQ ID NO: 1130427 - DNA, 15 bp, Homo sapiens
ggcgggttggttcac

SEQ ID NO: 1130428 - DNA, 15 bp, Homo sapiens
gggcgggttggttca

SEQ ID NO: 1130429 - DNA, 15 bp, Homo sapiens
cgggcgggttggttc

SEQ ID NO: 1130430 - DNA, 15 bp, Homo sapiens
ccgggcgggttggtt

SEQ ID NO: 1130431 - DNA, 15 bp, Homo sapiens
gccgggcgggttggt

SEQ ID NO: 1130432 - DNA, 15 bp, Homo sapiens
ggccgggcgggttgg

SEQ ID NO: 1130433 - DNA, 15 bp, Homo sapiens
aggccgggcgggttg

SEQ ID NO: 1130434 - DNA, 15 bp, Homo sapiens
caggccgggcgggtt

SEQ ID NO: 1130435 - DNA, 15 bp, Homo sapiens
acaggccgggcgggt

SEQ ID NO: 1130436 - DNA, 15 bp, Homo sapiens
aacaggccgggcggg

SEQ ID NO: 1130437 - DNA, 15 bp, Homo sapiens
caacaggccgggcgg

SEQ ID NO: 1130438 - DNA, 15 bp, Homo sapiens
acaacaggccgggcg

SEQ ID NO: 1130439 - DNA, 15 bp, Homo sapiens
aacaacaggccgggc

SEQ ID NO: 1130440 - DNA, 15 bp, Homo sapiens
aaacaacaggccggg

SEQ ID NO: 1130441 - DNA, 15 bp, Homo sapiens
aaaacaacaggccgg

SEQ ID NO: 1130442 - DNA, 15 bp, Homo sapiens
gaaaacaacaggccg

SEQ ID NO: 1130443 - DNA, 15 bp, Homo sapiens
agaaaacaacaggcc

SEQ ID NO: 1130444 - DNA, 15 bp, Homo sapiens
aagaaaacaacaggc

SEQ ID NO: 1130445 - DNA, 15 bp, Homo sapiens
taagaaaacaacagg

SEQ ID NO: 1130446 - DNA, 15 bp, Homo sapiens
gtaagaaaacaacag

SEQ ID NO: 1130447 - DNA, 15 bp, Homo sapiens
tgtaagaaaacaaca

SEQ ID NO: 1130448 - DNA, 15 bp, Homo sapiens
atgtaagaaaacaac

SEQ ID NO: 1130449 - DNA, 15 bp, Homo sapiens
tatgtaagaaaacaa

SEQ ID NO: 1130450 - DNA, 15 bp, Homo sapiens
ttatgtaagaaaaca

SEQ ID NO: 1130451 - DNA, 15 bp, Homo sapiens
attatgtaagaaaac

SEQ ID NO: 1130452 - DNA, 15 bp, Homo sapiens
aattatgtaagaaaa

SEQ ID NO: 1130453 - DNA, 15 bp, Homo sapiens
gaattatgtaagaaa

SEQ ID NO: 1130454 - DNA, 15 bp, Homo sapiens
tgaattatgtaagaa

SEQ ID NO: 1130455 - DNA, 15 bp, Homo sapiens
atgaattatgtaaga

SEQ ID NO: 1130456 - DNA, 15 bp, Homo sapiens
aatgaattatgtaag

SEQ ID NO: 1130457 - DNA, 15 bp, Homo sapiens
taatgaattatgtaa

SEQ ID NO: 1130458 - DNA, 15 bp, Homo sapiens
ataatgaattatgta

SEQ ID NO: 1130459 - DNA, 15 bp, Homo sapiens
gataatgaattatgt

SEQ ID NO: 1130460 - DNA, 15 bp, Homo sapiens
tgataatgaattatg

SEQ ID NO: 1130461 - DNA, 15 bp, Homo sapiens
atgataatgaattat

SEQ ID NO: 1130462 - DNA, 15 bp, Homo sapiens
tatgataatgaatta

SEQ ID NO: 1130463 - DNA, 15 bp, Homo sapiens
gtatgataatgaatt

SEQ ID NO: 1130464 - DNA, 15 bp, Homo sapiens
ggtatgataatgaat

SEQ ID NO: 1130465 - DNA, 15 bp, Homo sapiens
aggtatgataatgaa

SEQ ID NO: 1130466 - DNA, 15 bp, Homo sapiens
taggtatgataatga

SEQ ID NO: 1130467 - DNA, 15 bp, Homo sapiens
gtaggtatgataatg

SEQ ID NO: 1130468 - DNA, 15 bp, Homo sapiens
tgtaggtatgataat

SEQ ID NO: 1130469 - DNA, 15 bp, Homo sapiens
ttgtaggtatgataa

SEQ ID NO: 1130470 - DNA, 15 bp, Homo sapiens
tttgtaggtatgata

SEQ ID NO: 1130471 - DNA, 15 bp, Homo sapiens
ctttgtaggtatgat

SEQ ID NO: 1130472 - DNA, 15 bp, Homo sapiens
actttgtaggtatga

SEQ ID NO: 1130473 - DNA, 15 bp, Homo sapiens
aactttgtaggtatg

SEQ ID NO: 1130474 - DNA, 15 bp, Homo sapiens
taactttgtaggtat

SEQ ID NO: 1130475 - DNA, 15 bp, Homo sapiens
ttaactttgtaggta

SEQ ID NO: 1130476 - DNA, 15 bp, Homo sapiens
gttaactttgtaggt

SEQ ID NO: 1130477 - DNA, 15 bp, Homo sapiens
tgttaactttgtagg

SEQ ID NO: 1130478 - DNA, 15 bp, Homo sapiens
ctgttaactttgtag

SEQ ID NO: 1130479 - DNA, 15 bp, Homo sapiens
actgttaactttgta

SEQ ID NO: 1130480 - DNA, 15 bp, Homo sapiens
aactgttaactttgt

SEQ ID NO: 1130481 - DNA, 15 bp, Homo sapiens
taactgttaactttg

SEQ ID NO: 1130482 - DNA, 15 bp, Homo sapiens
gtaactgttaacttt

SEQ ID NO: 1130483 - DNA, 15 bp, Homo sapiens
agtaactgttaactt

SEQ ID NO: 1130484 - DNA, 15 bp, Homo sapiens
tagtaactgttaact

SEQ ID NO: 1130485 - DNA, 15 bp, Homo sapiens
ttagtaactgttaac

SEQ ID NO: 1130486 - DNA, 15 bp, Homo sapiens
attagtaactgttaa

SEQ ID NO: 1130487 - DNA, 15 bp, Homo sapiens
tattagtaactgtta

SEQ ID NO: 1130488 - DNA, 15 bp, Homo sapiens
atattagtaactgtt

SEQ ID NO: 1130489 - DNA, 15 bp, Homo sapiens
gatattagtaactgt

SEQ ID NO: 1130490 - DNA, 15 bp, Homo sapiens
tgatattagtaactg

SEQ ID NO: 1130491 - DNA, 15 bp, Homo sapiens
atgatattagtaact

SEQ ID NO: 1130492 - DNA, 15 bp, Homo sapiens
gatgatattagtaac

SEQ ID NO: 1130493 - DNA, 15 bp, Homo sapiens
agatgatattagtaa

SEQ ID NO: 1130494 - DNA, 15 bp, Homo sapiens
aagatgatattagta

SEQ ID NO: 1130495 - DNA, 15 bp, Homo sapiens
taagatgatattagt

SEQ ID NO: 1130496 - DNA, 15 bp, Homo sapiens
gtaagatgatattag

SEQ ID NO: 1130497 - DNA, 15 bp, Homo sapiens
tgtaagatgatatta

SEQ ID NO: 1130498 - DNA, 15 bp, Homo sapiens
gtgtaagatgatatt

SEQ ID NO: 1130499 - DNA, 15 bp, Homo sapiens
ggtgtaagatgatat

SEQ ID NO: 1130500 - DNA, 15 bp, Homo sapiens
aggtgtaagatgata

SEQ ID NO: 1130501 - DNA, 15 bp, Homo sapiens
taggtgtaagatgat

SEQ ID NO: 1130502 - DNA, 15 bp, Homo sapiens
ttaggtgtaagatga

SEQ ID NO: 1130503 - DNA, 15 bp, Homo sapiens
tttaggtgtaagatg

SEQ ID NO: 1130504 - DNA, 15 bp, Homo sapiens
atttaggtgtaagat

SEQ ID NO: 1130505 - DNA, 15 bp, Homo sapiens
aatttaggtgtaaga

SEQ ID NO: 1130506 - DNA, 15 bp, Homo sapiens
aaatttaggtgtaag

SEQ ID NO: 1130507 - DNA, 15 bp, Homo sapiens
gaaatttaggtgtaa

SEQ ID NO: 1130508 - DNA, 15 bp, Homo sapiens
agaaatttaggtgta

SEQ ID NO: 1130509 - DNA, 15 bp, Homo sapiens
gagaaatttaggtgt

SEQ ID NO: 1130510 - DNA, 15 bp, Homo sapiens
agagaaatttaggtg

SEQ ID NO: 1130511 - DNA, 15 bp, Homo sapiens
cagagaaatttaggt

SEQ ID NO: 1130512 - DNA, 15 bp, Homo sapiens
tcagagaaatttagg

SEQ ID NO: 1130513 - DNA, 15 bp, Homo sapiens
atcagagaaatttag

SEQ ID NO: 1130514 - DNA, 15 bp, Homo sapiens
tatcagagaaattta

SEQ ID NO: 1130515 - DNA, 15 bp, Homo sapiens
ctatcagagaaattt

SEQ ID NO: 1130516 - DNA, 15 bp, Homo sapiens
tctatcagagaaatt

SEQ ID NO: 1130517 - DNA, 15 bp, Homo sapiens
gtctatcagagaaat

SEQ ID NO: 1130518 - DNA, 15 bp, Homo sapiens
agtctatcagagaaa

SEQ ID NO: 1130519 - DNA, 15 bp, Homo sapiens
tagtctatcagagaa

SEQ ID NO: 1130520 - DNA, 15 bp, Homo sapiens
ttagtctatcagaga

SEQ ID NO: 1130521 - DNA, 15 bp, Homo sapiens
cttagtctatcagag

SEQ ID NO: 1130522 - DNA, 15 bp, Homo sapiens
ccttagtctatcaga

SEQ ID NO: 1130523 - DNA, 15 bp, Homo sapiens
accttagtctatcag

SEQ ID NO: 1130524 - DNA, 15 bp, Homo sapiens
aaccttagtctatca

SEQ ID NO: 1130525 - DNA, 15 bp, Homo sapiens
taaccttagtctatc

SEQ ID NO: 1130526 - DNA, 15 bp, Homo sapiens
ataaccttagtctat

SEQ ID NO: 1130527 - DNA, 15 bp, Homo sapiens
aataaccttagtcta

SEQ ID NO: 1130528 - DNA, 15 bp, Homo sapiens
aaataaccttagtct

SEQ ID NO: 1130529 - DNA, 15 bp, Homo sapiens
aaaataaccttagtc

SEQ ID NO: 1130530 - DNA, 15 bp, Homo sapiens
aaaaataaccttagt

SEQ ID NO: 1130531 - DNA, 15 bp, Homo sapiens
aaaaaataaccttag

SEQ ID NO: 1130532 - DNA, 15 bp, Homo sapiens
taaaaaataacctta

SEQ ID NO: 1130533 - DNA, 15 bp, Homo sapiens
ttaaaaaataacctt

SEQ ID NO: 1130534 - DNA, 15 bp, Homo sapiens
gttaaaaaataacct

SEQ ID NO: 1130535 - DNA, 15 bp, Homo sapiens
tgttaaaaaataacc

SEQ ID NO: 1130536 - DNA, 15 bp, Homo sapiens
atgttaaaaaataac

SEQ ID NO: 1130537 - DNA, 15 bp, Homo sapiens
gatgttaaaaaataa

SEQ ID NO: 1130538 - DNA, 15 bp, Homo sapiens
agatgttaaaaaata

SEQ ID NO: 1130539 - DNA, 15 bp, Homo sapiens
aagatgttaaaaaat

SEQ ID NO: 1130540 - DNA, 15 bp, Homo sapiens
taagatgttaaaaaa

SEQ ID NO: 1130541 - DNA, 15 bp, Homo sapiens
ttaagatgttaaaaa

SEQ ID NO: 1130542 - DNA, 15 bp, Homo sapiens
attaagatgttaaaa

SEQ ID NO: 1130543 - DNA, 15 bp, Homo sapiens
gattaagatgttaaa

SEQ ID NO: 1130544 - DNA, 15 bp, Homo sapiens
ggattaagatgttaa

SEQ ID NO: 1130545 - DNA, 15 bp, Homo sapiens
tggattaagatgtta

SEQ ID NO: 1130546 - DNA, 15 bp, Homo sapiens
ttggattaagatgtt

SEQ ID NO: 1130547 - DNA, 15 bp, Homo sapiens
attggattaagatgt

SEQ ID NO: 1130548 - DNA, 15 bp, Homo sapiens
gattggattaagatg

SEQ ID NO: 1130549 - DNA, 15 bp, Homo sapiens
tgattggattaagat

SEQ ID NO: 1130550 - DNA, 15 bp, Homo sapiens
ttgattggattaaga

SEQ ID NO: 1130551 - DNA, 15 bp, Homo sapiens
tttgattggattaag

SEQ ID NO: 1130552 - DNA, 15 bp, Homo sapiens
atttgattggattaa

SEQ ID NO: 1130553 - DNA, 15 bp, Homo sapiens
catttgattggatta

SEQ ID NO: 1130554 - DNA, 15 bp, Homo sapiens
acatttgattggatt

SEQ ID NO: 1130555 - DNA, 15 bp, Homo sapiens
aacatttgattggat

SEQ ID NO: 1130556 - DNA, 15 bp, Homo sapiens
aaacatttgattgga

SEQ ID NO: 1130557 - DNA, 15 bp, Homo sapiens
caaacatttgattgg

SEQ ID NO: 1130558 - DNA, 15 bp, Homo sapiens
acaaacatttgattg

SEQ ID NO: 1130559 - DNA, 15 bp, Homo sapiens
tacaaacatttgatt

SEQ ID NO: 1130560 - DNA, 15 bp, Homo sapiens
atacaaacatttgat

SEQ ID NO: 1130561 - DNA, 15 bp, Homo sapiens
gatacaaacatttga

SEQ ID NO: 1130562 - DNA, 15 bp, Homo sapiens
ggatacaaacatttg

SEQ ID NO: 1130563 - DNA, 15 bp, Homo sapiens
aggatacaaacattt

SEQ ID NO: 1130564 - DNA, 15 bp, Homo sapiens
caggatacaaacatt

SEQ ID NO: 1130565 - DNA, 15 bp, Homo sapiens
acaggatacaaacat

SEQ ID NO: 1130566 - DNA, 15 bp, Homo sapiens
tacaggatacaaaca

SEQ ID NO: 1130567 - DNA, 15 bp, Homo sapiens
ttacaggatacaaac

SEQ ID NO: 1130568 - DNA, 15 bp, Homo sapiens
attacaggatacaaa

SEQ ID NO: 1130569 - DNA, 15 bp, Homo sapiens
cattacaggatacaa

SEQ ID NO: 1130570 - DNA, 15 bp, Homo sapiens
gcattacaggataca

SEQ ID NO: 1130571 - DNA, 15 bp, Homo sapiens
agcattacaggatac

SEQ ID NO: 1130572 - DNA, 15 bp, Homo sapiens
gagcattacaggata

SEQ ID NO: 1130573 - DNA, 15 bp, Homo sapiens
agagcattacaggat

SEQ ID NO: 1130574 - DNA, 15 bp, Homo sapiens
gagagcattacagga

SEQ ID NO: 1130575 - DNA, 15 bp, Homo sapiens
tgagagcattacagg

SEQ ID NO: 1130576 - DNA, 15 bp, Homo sapiens
atgagagcattacag

SEQ ID NO: 1130577 - DNA, 15 bp, Homo sapiens
aatgagagcattaca

SEQ ID NO: 1130578 - DNA, 15 bp, Homo sapiens
caatgagagcattac

SEQ ID NO: 1130579 - DNA, 15 bp, Homo sapiens
tcaatgagagcatta

SEQ ID NO: 1130580 - DNA, 15 bp, Homo sapiens
ttcaatgagagcatt

SEQ ID NO: 1130581 - DNA, 15 bp, Homo sapiens
tttcaatgagagcat

SEQ ID NO: 1130582 - DNA, 15 bp, Homo sapiens
gtttcaatgagagca

SEQ ID NO: 1130583 - DNA, 15 bp, Homo sapiens
tgtttcaatgagagc

SEQ ID NO: 1130584 - DNA, 15 bp, Homo sapiens
ctgtttcaatgagag

SEQ ID NO: 1130585 - DNA, 15 bp, Homo sapiens
gctgtttcaatgaga

SEQ ID NO: 1130586 - DNA, 15 bp, Homo sapiens
agctgtttcaatgag

SEQ ID NO: 1130587 - DNA, 15 bp, Homo sapiens
tagctgtttcaatga

SEQ ID NO: 1130588 - DNA, 15 bp, Homo sapiens
atagctgtttcaatg

SEQ ID NO: 1130589 - DNA, 15 bp, Homo sapiens
tatagctgtttcaat

SEQ ID NO: 1130590 - DNA, 15 bp, Homo sapiens
atatagctgtttcaa

SEQ ID NO: 1130591 - DNA, 15 bp, Homo sapiens
aatatagctgtttca

SEQ ID NO: 1130592 - DNA, 15 bp, Homo sapiens
aaatatagctgtttc

SEQ ID NO: 1130593 - DNA, 15 bp, Homo sapiens
gaaatatagctgttt

SEQ ID NO: 1130594 - DNA, 15 bp, Homo sapiens
agaaatatagctgtt

SEQ ID NO: 1130595 - DNA, 15 bp, Homo sapiens
aagaaatatagctgt

SEQ ID NO: 1130596 - DNA, 15 bp, Homo sapiens
aaagaaatatagctg

SEQ ID NO: 1130597 - DNA, 15 bp, Homo sapiens
aaaagaaatatagct

SEQ ID NO: 1130598 - DNA, 15 bp, Homo sapiens
aaaaagaaatatagc

SEQ ID NO: 1130599 - DNA, 15 bp, Homo sapiens
gaaaaagaaatatag

SEQ ID NO: 1130600 - DNA, 15 bp, Homo sapiens
tgaaaaagaaatata

SEQ ID NO: 1130601 - DNA, 15 bp, Homo sapiens
ctgaaaaagaaatat

SEQ ID NO: 1130602 - DNA, 15 bp, Homo sapiens
tctgaaaaagaaata

SEQ ID NO: 1130603 - DNA, 15 bp, Homo sapiens
atctgaaaaagaaat

SEQ ID NO: 1130604 - DNA, 15 bp, Homo sapiens
aatctgaaaaagaaa

SEQ ID NO: 1130605 - DNA, 15 bp, Homo sapiens
taatctgaaaaagaa

SEQ ID NO: 1130606 - DNA, 15 bp, Homo sapiens
ctaatctgaaaaaga

SEQ ID NO: 1130607 - DNA, 15 bp, Homo sapiens
actaatctgaaaaag

SEQ ID NO: 1130608 - DNA, 15 bp, Homo sapiens
cactaatctgaaaaa

SEQ ID NO: 1130609 - DNA, 15 bp, Homo sapiens
tcactaatctgaaaa

SEQ ID NO: 1130610 - DNA, 15 bp, Homo sapiens
atcactaatctgaaa

SEQ ID NO: 1130611 - DNA, 15 bp, Homo sapiens
catcactaatctgaa

SEQ ID NO: 1130612 - DNA, 15 bp, Homo sapiens
tcatcactaatctga

SEQ ID NO: 1130613 - DNA, 15 bp, Homo sapiens
atcatcactaatctg

SEQ ID NO: 1130614 - DNA, 15 bp, Homo sapiens
catcatcactaatct

SEQ ID NO: 1130615 - DNA, 15 bp, Homo sapiens
tcatcatcactaatc

SEQ ID NO: 1130616 - DNA, 15 bp, Homo sapiens
ttcatcatcactaat

SEQ ID NO: 1130617 - DNA, 15 bp, Homo sapiens
gttcatcatcactaa

SEQ ID NO: 1130618 - DNA, 15 bp, Homo sapiens
ggttcatcatcacta

SEQ ID NO: 1130619 - DNA, 15 bp, Homo sapiens
tggttcatcatcact

SEQ ID NO: 1130620 - DNA, 15 bp, Homo sapiens
ctggttcatcatcac

SEQ ID NO: 1130621 - DNA, 15 bp, Homo sapiens
cctggttcatcatca

SEQ ID NO: 1130622 - DNA, 15 bp, Homo sapiens
acctggttcatcatc

SEQ ID NO: 1130623 - DNA, 15 bp, Homo sapiens
aacctggttcatcat

SEQ ID NO: 1130624 - DNA, 15 bp, Homo sapiens
taacctggttcatca

SEQ ID NO: 1130625 - DNA, 15 bp, Homo sapiens
ataacctggttcatc

SEQ ID NO: 1130626 - DNA, 15 bp, Homo sapiens
cataacctggttcat

SEQ ID NO: 1130627 - DNA, 15 bp, Homo sapiens
tcataacctggttca

SEQ ID NO: 1130628 - DNA, 15 bp, Homo sapiens
gtcataacctggttc

SEQ ID NO: 1130629 - DNA, 15 bp, Homo sapiens
ggtcataacctggtt

SEQ ID NO: 1130630 - DNA, 15 bp, Homo sapiens
aggtcataacctggt

SEQ ID NO: 1130631 - DNA, 15 bp, Homo sapiens
aaggtcataacctgg

SEQ ID NO: 1130632 - DNA, 15 bp, Homo sapiens
caaggtcataacctg

SEQ ID NO: 1130633 - DNA, 15 bp, Homo sapiens
tcaaggtcataacct

SEQ ID NO: 1130634 - DNA, 15 bp, Homo sapiens
atcaaggtcataacc

SEQ ID NO: 1130635 - DNA, 15 bp, Homo sapiens
aatcaaggtcataac

SEQ ID NO: 1130636 - DNA, 15 bp, Homo sapiens
aaatcaaggtcataa

SEQ ID NO: 1130637 - DNA, 15 bp, Homo sapiens
taaatcaaggtcata

SEQ ID NO: 1130638 - DNA, 15 bp, Homo sapiens
ataaatcaaggtcat

SEQ ID NO: 1130639 - DNA, 15 bp, Homo sapiens
aataaatcaaggtca

SEQ ID NO: 1130640 - DNA, 15 bp, Homo sapiens
aaataaatcaaggtc

SEQ ID NO: 1130641 - DNA, 15 bp, Homo sapiens
aaaataaatcaaggt

SEQ ID NO: 1130642 - DNA, 15 bp, Homo sapiens
caaaataaatcaagg

SEQ ID NO: 1130643 - DNA, 15 bp, Homo sapiens
gcaaaataaatcaag

SEQ ID NO: 1130644 - DNA, 15 bp, Homo sapiens
tgcaaaataaatcaa

SEQ ID NO: 1130645 - DNA, 15 bp, Homo sapiens
atgcaaaataaatca

SEQ ID NO: 1130646 - DNA, 15 bp, Homo sapiens
tatgcaaaataaatc

SEQ ID NO: 1130647 - DNA, 15 bp, Homo sapiens
gtatgcaaaataaat

SEQ ID NO: 1130648 - DNA, 15 bp, Homo sapiens
ggtatgcaaaataaa

SEQ ID NO: 1130649 - DNA, 15 bp, Homo sapiens
aggtatgcaaaataa

SEQ ID NO: 1130650 - DNA, 15 bp, Homo sapiens
taggtatgcaaaata

SEQ ID NO: 1130651 - DNA, 15 bp, Homo sapiens
ttaggtatgcaaaat

SEQ ID NO: 1130652 - DNA, 15 bp, Homo sapiens
attaggtatgcaaaa

SEQ ID NO: 1130653 - DNA, 15 bp, Homo sapiens
gattaggtatgcaaa

SEQ ID NO: 1130654 - DNA, 15 bp, Homo sapiens
tgattaggtatgcaa

SEQ ID NO: 1130655 - DNA, 15 bp, Homo sapiens
atgattaggtatgca

SEQ ID NO: 1130656 - DNA, 15 bp, Homo sapiens
aatgattaggtatgc

SEQ ID NO: 1130657 - DNA, 15 bp, Homo sapiens
taatgattaggtatg

SEQ ID NO: 1130658 - DNA, 15 bp, Homo sapiens
ataatgattaggtat

SEQ ID NO: 1130659 - DNA, 15 bp, Homo sapiens
cataatgattaggta

SEQ ID NO: 1130660 - DNA, 15 bp, Homo sapiens
gcataatgattaggt

SEQ ID NO: 1130661 - DNA, 15 bp, Homo sapiens
agcataatgattagg

SEQ ID NO: 1130662 - DNA, 15 bp, Homo sapiens
cagcataatgattag

SEQ ID NO: 1130663 - DNA, 15 bp, Homo sapiens
tcagcataatgatta

SEQ ID NO: 1130664 - DNA, 15 bp, Homo sapiens
ctcagcataatgatt

SEQ ID NO: 1130665 - DNA, 15 bp, Homo sapiens
cctcagcataatgat

SEQ ID NO: 1130666 - DNA, 15 bp, Homo sapiens
tcctcagcataatga

SEQ ID NO: 1130667 - DNA, 15 bp, Homo sapiens
atcctcagcataatg

SEQ ID NO: 1130668 - DNA, 15 bp, Homo sapiens
aatcctcagcataat

SEQ ID NO: 1130669 - DNA, 15 bp, Homo sapiens
aaatcctcagcataa

SEQ ID NO: 1130670 - DNA, 15 bp, Homo sapiens
caaatcctcagcata

SEQ ID NO: 1130671 - DNA, 15 bp, Homo sapiens
ccaaatcctcagcat

SEQ ID NO: 1130672 - DNA, 15 bp, Homo sapiens
tccaaatcctcagca

SEQ ID NO: 1130673 - DNA, 15 bp, Homo sapiens
ttccaaatcctcagc

SEQ ID NO: 1130674 - DNA, 15 bp, Homo sapiens
tttccaaatcctcag

SEQ ID NO: 1130675 - DNA, 15 bp, Homo sapiens
ctttccaaatcctca

SEQ ID NO: 1130676 - DNA, 15 bp, Homo sapiens
cctttccaaatcctc

SEQ ID NO: 1130677 - DNA, 15 bp, Homo sapiens
ccctttccaaatcct

SEQ ID NO: 1130678 - DNA, 15 bp, Homo sapiens
accctttccaaatcc

SEQ ID NO: 1130679 - DNA, 15 bp, Homo sapiens
caccctttccaaatc

SEQ ID NO: 1130680 - DNA, 15 bp, Homo sapiens
acaccctttccaaat

SEQ ID NO: 1130681 - DNA, 15 bp, Homo sapiens
aacaccctttccaaa

SEQ ID NO: 1130682 - DNA, 15 bp, Homo sapiens
aaacaccctttccaa

SEQ ID NO: 1130683 - DNA, 15 bp, Homo sapiens
taaacaccctttcca

SEQ ID NO: 1130684 - DNA, 15 bp, Homo sapiens
ataaacaccctttcc

SEQ ID NO: 1130685 - DNA, 15 bp, Homo sapiens
aataaacaccctttc

SEQ ID NO: 1130686 - DNA, 15 bp, Homo sapiens
gaataaacacccttt

SEQ ID NO: 1130687 - DNA, 15 bp, Homo sapiens
ggaataaacaccctt

SEQ ID NO: 1130688 - DNA, 15 bp, Homo sapiens
aggaataaacaccct

SEQ ID NO: 1130689 - DNA, 15 bp, Homo sapiens
gaggaataaacaccc

SEQ ID NO: 1130690 - DNA, 15 bp, Homo sapiens
tgaggaataaacacc

SEQ ID NO: 1130691 - DNA, 15 bp, Homo sapiens
atgaggaataaacac

SEQ ID NO: 1130692 - DNA, 15 bp, Homo sapiens
catgaggaataaaca

SEQ ID NO: 1130693 - DNA, 15 bp, Homo sapiens
ccatgaggaataaac

SEQ ID NO: 1130694 - DNA, 15 bp, Homo sapiens
tccatgaggaataaa

SEQ ID NO: 1130695 - DNA, 15 bp, Homo sapiens
gtccatgaggaataa

SEQ ID NO: 1130696 - DNA, 15 bp, Homo sapiens
agtccatgaggaata

SEQ ID NO: 1130697 - DNA, 15 bp, Homo sapiens
tagtccatgaggaat

SEQ ID NO: 1130698 - DNA, 15 bp, Homo sapiens
ttagtccatgaggaa

SEQ ID NO: 1130699 - DNA, 15 bp, Homo sapiens
attagtccatgagga

SEQ ID NO: 1130700 - DNA, 15 bp, Homo sapiens
aattagtccatgagg

SEQ ID NO: 1130701 - DNA, 15 bp, Homo sapiens
taattagtccatgag

SEQ ID NO: 1130702 - DNA, 15 bp, Homo sapiens
ataattagtccatga

SEQ ID NO: 1130703 - DNA, 15 bp, Homo sapiens
cataattagtccatg

SEQ ID NO: 1130704 - DNA, 15 bp, Homo sapiens
ccataattagtccat

SEQ ID NO: 1130705 - DNA, 15 bp, Homo sapiens
tccataattagtcca

SEQ ID NO: 1130706 - DNA, 15 bp, Homo sapiens
gtccataattagtcc

SEQ ID NO: 1130707 - DNA, 15 bp, Homo sapiens
tgtccataattagtc

SEQ ID NO: 1130708 - DNA, 15 bp, Homo sapiens
ctgtccataattagt

SEQ ID NO: 1130709 - DNA, 15 bp, Homo sapiens
cctgtccataattag

SEQ ID NO: 1130710 - DNA, 15 bp, Homo sapiens
acctgtccataatta

SEQ ID NO: 1130711 - DNA, 15 bp, Homo sapiens
tacctgtccataatt

SEQ ID NO: 1130712 - DNA, 15 bp, Homo sapiens
ttacctgtccataat

SEQ ID NO: 1130713 - DNA, 15 bp, Homo sapiens
cttacctgtccataa

SEQ ID NO: 1130714 - DNA, 15 bp, Homo sapiens
acttacctgtccata

SEQ ID NO: 1130715 - DNA, 15 bp, Homo sapiens
tacttacctgtccat

SEQ ID NO: 1130716 - DNA, 15 bp, Homo sapiens
ttacttacctgtcca

SEQ ID NO: 1130717 - DNA, 15 bp, Homo sapiens
cttacttacctgtcc

SEQ ID NO: 1130718 - DNA, 15 bp, Homo sapiens
tcttacttacctgtc

SEQ ID NO: 1130719 - DNA, 15 bp, Homo sapiens
atcttacttacctgt

SEQ ID NO: 1130720 - DNA, 15 bp, Homo sapiens
gatcttacttacctg

SEQ ID NO: 1130721 - DNA, 15 bp, Homo sapiens
agatcttacttacct

SEQ ID NO: 1130722 - DNA, 15 bp, Homo sapiens
aagatcttacttacc

SEQ ID NO: 1130723 - DNA, 15 bp, Homo sapiens
taagatcttacttac

SEQ ID NO: 1130724 - DNA, 15 bp, Homo sapiens
ttaagatcttactta

SEQ ID NO: 1130725 - DNA, 15 bp, Homo sapiens
tttaagatcttactt

SEQ ID NO: 1130726 - DNA, 15 bp, Homo sapiens
ttttaagatcttact

SEQ ID NO: 1130727 - DNA, 15 bp, Homo sapiens
attttaagatcttac

SEQ ID NO: 1130728 - DNA, 15 bp, Homo sapiens
cattttaagatctta

SEQ ID NO: 1130729 - DNA, 15 bp, Homo sapiens
tcattttaagatctt

SEQ ID NO: 1130730 - DNA, 15 bp, Homo sapiens
ctcattttaagatct

SEQ ID NO: 1130731 - DNA, 15 bp, Homo sapiens
cctcattttaagatc

SEQ ID NO: 1130732 - DNA, 15 bp, Homo sapiens
acctcattttaagat

SEQ ID NO: 1130733 - DNA, 15 bp, Homo sapiens
aacctcattttaaga

SEQ ID NO: 1130734 - DNA, 15 bp, Homo sapiens
aaacctcattttaag

SEQ ID NO: 1130735 - DNA, 15 bp, Homo sapiens
aaaacctcattttaa

SEQ ID NO: 1130736 - DNA, 15 bp, Homo sapiens
aaaaacctcatttta

SEQ ID NO: 1130737 - DNA, 15 bp, Homo sapiens
aaaaaacctcatttt

SEQ ID NO: 1130738 - DNA, 15 bp, Homo sapiens
taaaaaacctcattt

SEQ ID NO: 1130739 - DNA, 15 bp, Homo sapiens
gtaaaaaacctcatt

SEQ ID NO: 1130740 - DNA, 15 bp, Homo sapiens
agtaaaaaacctcat

SEQ ID NO: 1130741 - DNA, 15 bp, Homo sapiens
aagtaaaaaacctca

SEQ ID NO: 1130742 - DNA, 15 bp, Homo sapiens
aaagtaaaaaacctc

SEQ ID NO: 1130743 - DNA, 15 bp, Homo sapiens
aaaagtaaaaaacct

SEQ ID NO: 1130744 - DNA, 15 bp, Homo sapiens
aaaaagtaaaaaacc

SEQ ID NO: 1130745 - DNA, 15 bp, Homo sapiens
gaaaaagtaaaaaac

SEQ ID NO: 1130746 - DNA, 15 bp, Homo sapiens
agaaaaagtaaaaaa

SEQ ID NO: 1130747 - DNA, 15 bp, Homo sapiens
aagaaaaagtaaaaa

SEQ ID NO: 1130748 - DNA, 15 bp, Homo sapiens
caagaaaaagtaaaa

SEQ ID NO: 1130749 - DNA, 15 bp, Homo sapiens
acaagaaaaagtaaa

SEQ ID NO: 1130750 - DNA, 15 bp, Homo sapiens
cacaagaaaaagtaa

SEQ ID NO: 1130751 - DNA, 15 bp, Homo sapiens
acacaagaaaaagta

SEQ ID NO: 1130752 - DNA, 15 bp, Homo sapiens
aacacaagaaaaagt

SEQ ID NO: 1130753 - DNA, 15 bp, Homo sapiens
taacacaagaaaaag

SEQ ID NO: 1130754 - DNA, 15 bp, Homo sapiens
ttaacacaagaaaaa

SEQ ID NO: 1130755 - DNA, 15 bp, Homo sapiens
attaacacaagaaaa

SEQ ID NO: 1130756 - DNA, 15 bp, Homo sapiens
aattaacacaagaaa

SEQ ID NO: 1130757 - DNA, 15 bp, Homo sapiens
aaattaacacaagaa

SEQ ID NO: 1130758 - DNA, 15 bp, Homo sapiens
gaaattaacacaaga

SEQ ID NO: 1130759 - DNA, 15 bp, Homo sapiens
tgaaattaacacaag

SEQ ID NO: 1130760 - DNA, 15 bp, Homo sapiens
ttgaaattaacacaa

SEQ ID NO: 1130761 - DNA, 15 bp, Homo sapiens
tttgaaattaacaca

SEQ ID NO: 1130762 - DNA, 15 bp, Homo sapiens
gtttgaaattaacac

SEQ ID NO: 1130763 - DNA, 15 bp, Homo sapiens
tgtttgaaattaaca

SEQ ID NO: 1130764 - DNA, 15 bp, Homo sapiens
atgtttgaaattaac

SEQ ID NO: 1130765 - DNA, 15 bp, Homo sapiens
gatgtttgaaattaa

SEQ ID NO: 1130766 - DNA, 15 bp, Homo sapiens
tgatgtttgaaatta

SEQ ID NO: 1130767 - DNA, 15 bp, Homo sapiens
ctgatgtttgaaatt

SEQ ID NO: 1130768 - DNA, 15 bp, Homo sapiens
gctgatgtttgaaat

SEQ ID NO: 1130769 - DNA, 15 bp, Homo sapiens
tgctgatgtttgaaa

SEQ ID NO: 1130770 - DNA, 15 bp, Homo sapiens
ctgctgatgtttgaa

SEQ ID NO: 1130771 - DNA, 15 bp, Homo sapiens
gctgctgatgtttga

SEQ ID NO: 1130772 - DNA, 15 bp, Homo sapiens
agctgctgatgtttg

SEQ ID NO: 1130773 - DNA, 15 bp, Homo sapiens
cagctgctgatgttt

SEQ ID NO: 1130774 - DNA, 15 bp, Homo sapiens
acagctgctgatgtt

SEQ ID NO: 1130775 - DNA, 15 bp, Homo sapiens
aacagctgctgatgt

SEQ ID NO: 1130776 - DNA, 15 bp, Homo sapiens
gaacagctgctgatg

SEQ ID NO: 1130777 - DNA, 15 bp, Homo sapiens
agaacagctgctgat

SEQ ID NO: 1130778 - DNA, 15 bp, Homo sapiens
cagaacagctgctga

SEQ ID NO: 1130779 - DNA, 15 bp, Homo sapiens
tcagaacagctgctg

SEQ ID NO: 1130780 - DNA, 15 bp, Homo sapiens
ctcagaacagctgct

SEQ ID NO: 1130781 - DNA, 15 bp, Homo sapiens
actcagaacagctgc

SEQ ID NO: 1130782 - DNA, 15 bp, Homo sapiens
tactcagaacagctg

SEQ ID NO: 1130783 - DNA, 15 bp, Homo sapiens
gtactcagaacagct

SEQ ID NO: 1130784 - DNA, 15 bp, Homo sapiens
agtactcagaacagc

SEQ ID NO: 1130785 - DNA, 15 bp, Homo sapiens
aagtactcagaacag

SEQ ID NO: 1130786 - DNA, 15 bp, Homo sapiens
caagtactcagaaca

SEQ ID NO: 1130787 - DNA, 15 bp, Homo sapiens
gcaagtactcagaac

SEQ ID NO: 1130788 - DNA, 15 bp, Homo sapiens
agcaagtactcagaa

SEQ ID NO: 1130789 - DNA, 15 bp, Homo sapiens
tagcaagtactcaga

SEQ ID NO: 1130790 - DNA, 15 bp, Homo sapiens
atagcaagtactcag

SEQ ID NO: 1130791 - DNA, 15 bp, Homo sapiens
aatagcaagtactca

SEQ ID NO: 1130792 - DNA, 15 bp, Homo sapiens
aaatagcaagtactc

SEQ ID NO: 1130793 - DNA, 15 bp, Homo sapiens
caaatagcaagtact

SEQ ID NO: 1130794 - DNA, 15 bp, Homo sapiens
tcaaatagcaagtac

SEQ ID NO: 1130795 - DNA, 15 bp, Homo sapiens
ttcaaatagcaagta

SEQ ID NO: 1130796 - DNA, 15 bp, Homo sapiens
gttcaaatagcaagt

SEQ ID NO: 1130797 - DNA, 15 bp, Homo sapiens
tgttcaaatagcaag

SEQ ID NO: 1130798 - DNA, 15 bp, Homo sapiens
atgttcaaatagcaa

SEQ ID NO: 1130799 - DNA, 15 bp, Homo sapiens
tatgttcaaatagca

SEQ ID NO: 1130800 - DNA, 15 bp, Homo sapiens
ttatgttcaaatagc

SEQ ID NO: 1130801 - DNA, 15 bp, Homo sapiens
tttatgttcaaatag

SEQ ID NO: 1130802 - DNA, 15 bp, Homo sapiens
gtttatgttcaaata

SEQ ID NO: 1130803 - DNA, 15 bp, Homo sapiens
agtttatgttcaaat

SEQ ID NO: 1130804 - DNA, 15 bp, Homo sapiens
tagtttatgttcaaa

SEQ ID NO: 1130805 - DNA, 15 bp, Homo sapiens
ctagtttatgttcaa

SEQ ID NO: 1130806 - DNA, 15 bp, Homo sapiens
cctagtttatgttca

SEQ ID NO: 1130807 - DNA, 15 bp, Homo sapiens
gcctagtttatgttc

SEQ ID NO: 1130808 - DNA, 15 bp, Homo sapiens
ggcctagtttatgtt

SEQ ID NO: 1130809 - DNA, 15 bp, Homo sapiens
tggcctagtttatgt

SEQ ID NO: 1130810 - DNA, 15 bp, Homo sapiens
ttggcctagtttatg

SEQ ID NO: 1130811 - DNA, 15 bp, Homo sapiens
gttggcctagtttat

SEQ ID NO: 1130812 - DNA, 15 bp, Homo sapiens
agttggcctagttta

SEQ ID NO: 1130813 - DNA, 15 bp, Homo sapiens
aagttggcctagttt

SEQ ID NO: 1130814 - DNA, 15 bp, Homo sapiens
taagttggcctagtt

SEQ ID NO: 1130815 - DNA, 15 bp, Homo sapiens
ataagttggcctagt

SEQ ID NO: 1130816 - DNA, 15 bp, Homo sapiens
aataagttggcctag

SEQ ID NO: 1130817 - DNA, 15 bp, Homo sapiens
taataagttggccta

SEQ ID NO: 1130818 - DNA, 15 bp, Homo sapiens
ttaataagttggcct

SEQ ID NO: 1130819 - DNA, 15 bp, Homo sapiens
tttaataagttggcc

SEQ ID NO: 1130820 - DNA, 15 bp, Homo sapiens
atttaataagttggc

SEQ ID NO: 1130821 - DNA, 15 bp, Homo sapiens
tatttaataagttgg

SEQ ID NO: 1130822 - DNA, 15 bp, Homo sapiens
ttatttaataagttg

SEQ ID NO: 1130823 - DNA, 15 bp, Homo sapiens
gttatttaataagtt

SEQ ID NO: 1130824 - DNA, 15 bp, Homo sapiens
agttatttaataagt

SEQ ID NO: 1130825 - DNA, 15 bp, Homo sapiens
cagttatttaataag

SEQ ID NO: 1130826 - DNA, 15 bp, Homo sapiens
tcagttatttaataa

SEQ ID NO: 1130827 - DNA, 15 bp, Homo sapiens
atcagttatttaata

SEQ ID NO: 1130828 - DNA, 15 bp, Homo sapiens
catcagttatttaat

SEQ ID NO: 1130829 - DNA, 15 bp, Homo sapiens
gcatcagttatttaa

SEQ ID NO: 1130830 - DNA, 15 bp, Homo sapiens
agcatcagttattta

SEQ ID NO: 1130831 - DNA, 15 bp, Homo sapiens
aagcatcagttattt

SEQ ID NO: 1130832 - DNA, 15 bp, Homo sapiens
aaagcatcagttatt

SEQ ID NO: 1130833 - DNA, 15 bp, Homo sapiens
gaaagcatcagttat

SEQ ID NO: 1130834 - DNA, 15 bp, Homo sapiens
agaaagcatcagtta

SEQ ID NO: 1130835 - DNA, 15 bp, Homo sapiens
tagaaagcatcagtt

SEQ ID NO: 1130836 - DNA, 15 bp, Homo sapiens
ttagaaagcatcagt

SEQ ID NO: 1130837 - DNA, 15 bp, Homo sapiens
tttagaaagcatcag

SEQ ID NO: 1130838 - DNA, 15 bp, Homo sapiens
ttttagaaagcatca

SEQ ID NO: 1130839 - DNA, 15 bp, Homo sapiens
attttagaaagcatc

SEQ ID NO: 1130840 - DNA, 15 bp, Homo sapiens
gattttagaaagcat

SEQ ID NO: 1130841 - DNA, 15 bp, Homo sapiens
agattttagaaagca

SEQ ID NO: 1130842 - DNA, 15 bp, Homo sapiens
aagattttagaaagc

SEQ ID NO: 1130843 - DNA, 15 bp, Homo sapiens
gaagattttagaaag

SEQ ID NO: 1130844 - DNA, 15 bp, Homo sapiens
agaagattttagaaa

SEQ ID NO: 1130845 - DNA, 15 bp, Homo sapiens
aagaagattttagaa

SEQ ID NO: 1130846 - DNA, 15 bp, Homo sapiens
aaagaagattttaga

SEQ ID NO: 1130847 - DNA, 15 bp, Homo sapiens
taaagaagattttag

SEQ ID NO: 1130848 - DNA, 15 bp, Homo sapiens
ataaagaagatttta

SEQ ID NO: 1130849 - DNA, 15 bp, Homo sapiens
aataaagaagatttt

SEQ ID NO: 1130850 - DNA, 15 bp, Homo sapiens
taataaagaagattt

SEQ ID NO: 1130851 - DNA, 15 bp, Homo sapiens
ttaataaagaagatt

SEQ ID NO: 1130852 - DNA, 15 bp, Homo sapiens
tttaataaagaagat

SEQ ID NO: 1130853 - DNA, 15 bp, Homo sapiens
ttttaataaagaaga

SEQ ID NO: 1130854 - DNA, 15 bp, Homo sapiens
tttttaataaagaag

SEQ ID NO: 1130855 - DNA, 15 bp, Homo sapiens
atttttaataaagaa

SEQ ID NO: 1130856 - DNA, 15 bp, Homo sapiens
tatttttaataaaga

SEQ ID NO: 1130857 - DNA, 15 bp, Homo sapiens
ttatttttaataaag

SEQ ID NO: 1130858 - DNA, 15 bp, Homo sapiens
tttatttttaataaa

SEQ ID NO: 1130859 - DNA, 15 bp, Homo sapiens
ttttatttttaataa

SEQ ID NO: 1130860 - DNA, 15 bp, Homo sapiens
cttttatttttaata

SEQ ID NO: 1130861 - DNA, 15 bp, Homo sapiens
tcttttatttttaat

SEQ ID NO: 1130862 - DNA, 15 bp, Homo sapiens
ctcttttatttttaa

SEQ ID NO: 1130863 - DNA, 15 bp, Homo sapiens
cctcttttattttta

SEQ ID NO: 1130864 - DNA, 15 bp, Homo sapiens
tcctcttttattttt

SEQ ID NO: 1130865 - DNA, 15 bp, Homo sapiens
ctcctcttttatttt

SEQ ID NO: 1130866 - DNA, 15 bp, Homo sapiens
cctcctcttttattt

SEQ ID NO: 1130867 - DNA, 15 bp, Homo sapiens
ccctcctcttttatt

SEQ ID NO: 1130868 - DNA, 15 bp, Homo sapiens
gccctcctcttttat

SEQ ID NO: 1130869 - DNA, 15 bp, Homo sapiens
ggccctcctctttta

SEQ ID NO: 1130870 - DNA, 15 bp, Homo sapiens
aggccctcctctttt

SEQ ID NO: 1130871 - DNA, 15 bp, Homo sapiens
aaggccctcctcttt

SEQ ID NO: 1130872 - DNA, 15 bp, Homo sapiens
taaggccctcctctt

SEQ ID NO: 1130873 - DNA, 15 bp, Homo sapiens
gtaaggccctcctct

SEQ ID NO: 1130874 - DNA, 15 bp, Homo sapiens
agtaaggccctcctc

SEQ ID NO: 1130875 - DNA, 15 bp, Homo sapiens
tagtaaggccctcct

SEQ ID NO: 1130876 - DNA, 15 bp, Homo sapiens
ttagtaaggccctcc

SEQ ID NO: 1130877 - DNA, 15 bp, Homo sapiens
attagtaaggccctc

SEQ ID NO: 1130878 - DNA, 15 bp, Homo sapiens
aattagtaaggccct

SEQ ID NO: 1130879 - DNA, 15 bp, Homo sapiens
taattagtaaggccc

SEQ ID NO: 1130880 - DNA, 15 bp, Homo sapiens
gtaattagtaaggcc

SEQ ID NO: 1130881 - DNA, 15 bp, Homo sapiens
agtaattagtaaggc

SEQ ID NO: 1130882 - DNA, 15 bp, Homo sapiens
aagtaattagtaagg

SEQ ID NO: 1130883 - DNA, 15 bp, Homo sapiens
taagtaattagtaag

SEQ ID NO: 1130884 - DNA, 15 bp, Homo sapiens
ctaagtaattagtaa

SEQ ID NO: 1130885 - DNA, 15 bp, Homo sapiens
actaagtaattagta

SEQ ID NO: 1130886 - DNA, 15 bp, Homo sapiens
tactaagtaattagt

SEQ ID NO: 1130887 - DNA, 15 bp, Homo sapiens
atactaagtaattag

SEQ ID NO: 1130888 - DNA, 15 bp, Homo sapiens
gatactaagtaatta

SEQ ID NO: 1130889 - DNA, 15 bp, Homo sapiens
tgatactaagtaatt

SEQ ID NO: 1130890 - DNA, 15 bp, Homo sapiens
ctgatactaagtaat

SEQ ID NO: 1130891 - DNA, 15 bp, Homo sapiens
actgatactaagtaa

SEQ ID NO: 1130892 - DNA, 15 bp, Homo sapiens
aactgatactaagta

SEQ ID NO: 1130893 - DNA, 15 bp, Homo sapiens
caactgatactaagt

SEQ ID NO: 1130894 - DNA, 15 bp, Homo sapiens
acaactgatactaag

SEQ ID NO: 1130895 - DNA, 15 bp, Homo sapiens
cacaactgatactaa

SEQ ID NO: 1130896 - DNA, 15 bp, Homo sapiens
ccacaactgatacta

SEQ ID NO: 1130897 - DNA, 15 bp, Homo sapiens
accacaactgatact

SEQ ID NO: 1130898 - DNA, 15 bp, Homo sapiens
taccacaactgatac

SEQ ID NO: 1130899 - DNA, 15 bp, Homo sapiens
ataccacaactgata

SEQ ID NO: 1130900 - DNA, 15 bp, Homo sapiens
tataccacaactgat

SEQ ID NO: 1130901 - DNA, 15 bp, Homo sapiens
ctataccacaactga

SEQ ID NO: 1130902 - DNA, 15 bp, Homo sapiens
actataccacaactg

SEQ ID NO: 1130903 - DNA, 15 bp, Homo sapiens
cactataccacaact

SEQ ID NO: 1130904 - DNA, 15 bp, Homo sapiens
ccactataccacaac

SEQ ID NO: 1130905 - DNA, 15 bp, Homo sapiens
cccactataccacaa

SEQ ID NO: 1130906 - DNA, 15 bp, Homo sapiens
tcccactataccaca

SEQ ID NO: 1130907 - DNA, 15 bp, Homo sapiens
gtcccactataccac

SEQ ID NO: 1130908 - DNA, 15 bp, Homo sapiens
agtcccactatacca

SEQ ID NO: 1130909 - DNA, 15 bp, Homo sapiens
gagtcccactatacc

SEQ ID NO: 1130910 - DNA, 15 bp, Homo sapiens
agagtcccactatac

SEQ ID NO: 1130911 - DNA, 15 bp, Homo sapiens
cagagtcccactata

SEQ ID NO: 1130912 - DNA, 15 bp, Homo sapiens
acagagtcccactat

SEQ ID NO: 1130913 - DNA, 15 bp, Homo sapiens
tacagagtcccacta

SEQ ID NO: 1130914 - DNA, 15 bp, Homo sapiens
ctacagagtcccact

SEQ ID NO: 1130915 - DNA, 15 bp, Homo sapiens
cctacagagtcccac

SEQ ID NO: 1130916 - DNA, 15 bp, Homo sapiens
ccctacagagtccca

SEQ ID NO: 1130917 - DNA, 15 bp, Homo sapiens
tccctacagagtccc

SEQ ID NO: 1130918 - DNA, 15 bp, Homo sapiens
gtccctacagagtcc

SEQ ID NO: 1130919 - DNA, 15 bp, Homo sapiens
ggtccctacagagtc

SEQ ID NO: 1130920 - DNA, 15 bp, Homo sapiens
tggtccctacagagt

SEQ ID NO: 1130921 - DNA, 15 bp, Homo sapiens
ctggtccctacagag

SEQ ID NO: 1130922 - DNA, 15 bp, Homo sapiens
tctggtccctacaga

SEQ ID NO: 1130923 - DNA, 15 bp, Homo sapiens
ttctggtccctacag

SEQ ID NO: 1130924 - DNA, 15 bp, Homo sapiens
gttctggtccctaca

SEQ ID NO: 1130925 - DNA, 15 bp, Homo sapiens
tgttctggtccctac

SEQ ID NO: 1130926 - DNA, 15 bp, Homo sapiens
ttgttctggtcccta

SEQ ID NO: 1130927 - DNA, 15 bp, Homo sapiens
tttgttctggtccct

SEQ ID NO: 1130928 - DNA, 15 bp, Homo sapiens
ctttgttctggtccc

SEQ ID NO: 1130929 - DNA, 15 bp, Homo sapiens
actttgttctggtcc

SEQ ID NO: 1130930 - DNA, 15 bp, Homo sapiens
tactttgttctggtc

SEQ ID NO: 1130931 - DNA, 15 bp, Homo sapiens
ttactttgttctggt

SEQ ID NO: 1130932 - DNA, 15 bp, Homo sapiens
tttactttgttctgg

SEQ ID NO: 1130933 - DNA, 15 bp, Homo sapiens
gtttactttgttctg

SEQ ID NO: 1130934 - DNA, 15 bp, Homo sapiens
tgtttactttgttct

SEQ ID NO: 1130935 - DNA, 15 bp, Homo sapiens
atgtttactttgttc

SEQ ID NO: 1130936 - DNA, 15 bp, Homo sapiens
aatgtttactttgtt

SEQ ID NO: 1130937 - DNA, 15 bp, Homo sapiens
caatgtttactttgt

SEQ ID NO: 1130938 - DNA, 15 bp, Homo sapiens
tcaatgtttactttg

SEQ ID NO: 1130939 - DNA, 15 bp, Homo sapiens
ttcaatgtttacttt

SEQ ID NO: 1130940 - DNA, 15 bp, Homo sapiens
cttcaatgtttactt

SEQ ID NO: 1130941 - DNA, 15 bp, Homo sapiens
ccttcaatgtttact

SEQ ID NO: 1130942 - DNA, 15 bp, Homo sapiens
cccttcaatgtttac

SEQ ID NO: 1130943 - DNA, 15 bp, Homo sapiens
tcccttcaatgttta

SEQ ID NO: 1130944 - DNA, 15 bp, Homo sapiens
ctcccttcaatgttt

SEQ ID NO: 1130945 - DNA, 15 bp, Homo sapiens
tctcccttcaatgtt

SEQ ID NO: 1130946 - DNA, 15 bp, Homo sapiens
atctcccttcaatgt

SEQ ID NO: 1130947 - DNA, 15 bp, Homo sapiens
catctcccttcaatg

SEQ ID NO: 1130948 - DNA, 15 bp, Homo sapiens
ccatctcccttcaat

SEQ ID NO: 1130949 - DNA, 15 bp, Homo sapiens
tccatctcccttcaa

SEQ ID NO: 1130950 - DNA, 15 bp, Homo sapiens
ttccatctcccttca

SEQ ID NO: 1130951 - DNA, 15 bp, Homo sapiens
cttccatctcccttc

SEQ ID NO: 1130952 - DNA, 15 bp, Homo sapiens
tcttccatctccctt

SEQ ID NO: 1130953 - DNA, 15 bp, Homo sapiens
ttcttccatctccct

SEQ ID NO: 1130954 - DNA, 15 bp, Homo sapiens
cttcttccatctccc

SEQ ID NO: 1130955 - DNA, 15 bp, Homo sapiens
ccttcttccatctcc

SEQ ID NO: 1130956 - DNA, 15 bp, Homo sapiens
tccttcttccatctc

SEQ ID NO: 1130957 - DNA, 15 bp, Homo sapiens
ttccttcttccatct

SEQ ID NO: 1130958 - DNA, 15 bp, Homo sapiens
gttccttcttccatc

SEQ ID NO: 1130959 - DNA, 15 bp, Homo sapiens
agttccttcttccat

SEQ ID NO: 1130960 - DNA, 15 bp, Homo sapiens
gagttccttcttcca

SEQ ID NO: 1130961 - DNA, 15 bp, Homo sapiens
agagttccttcttcc

SEQ ID NO: 1130962 - DNA, 15 bp, Homo sapiens
tagagttccttcttc

SEQ ID NO: 1130963 - DNA, 15 bp, Homo sapiens
ctagagttccttctt

SEQ ID NO: 1130964 - DNA, 15 bp, Homo sapiens
gctagagttccttct

SEQ ID NO: 1130965 - DNA, 15 bp, Homo sapiens
ggctagagttccttc

SEQ ID NO: 1130966 - DNA, 15 bp, Homo sapiens
tggctagagttcctt

SEQ ID NO: 1130967 - DNA, 15 bp, Homo sapiens
ctggctagagttcct

SEQ ID NO: 1130968 - DNA, 15 bp, Homo sapiens
tctggctagagttcc

SEQ ID NO: 1130969 - DNA, 15 bp, Homo sapiens
ctctggctagagttc

SEQ ID NO: 1130970 - DNA, 15 bp, Homo sapiens
actctggctagagtt

SEQ ID NO: 1130971 - DNA, 15 bp, Homo sapiens
gactctggctagagt

SEQ ID NO: 1130972 - DNA, 15 bp, Homo sapiens
agactctggctagag

SEQ ID NO: 1130973 - DNA, 15 bp, Homo sapiens
aagactctggctaga

SEQ ID NO: 1130974 - DNA, 15 bp, Homo sapiens
caagactctggctag

SEQ ID NO: 1130975 - DNA, 15 bp, Homo sapiens
gcaagactctggcta

SEQ ID NO: 1130976 - DNA, 15 bp, Homo sapiens
tgcaagactctggct

SEQ ID NO: 1130977 - DNA, 15 bp, Homo sapiens
atgcaagactctggc

SEQ ID NO: 1130978 - DNA, 15 bp, Homo sapiens
aatgcaagactctgg

SEQ ID NO: 1130979 - DNA, 15 bp, Homo sapiens
aaatgcaagactctg

SEQ ID NO: 1130980 - DNA, 15 bp, Homo sapiens
gaaatgcaagactct

SEQ ID NO: 1130981 - DNA, 15 bp, Homo sapiens
agaaatgcaagactc

SEQ ID NO: 1130982 - DNA, 15 bp, Homo sapiens
gagaaatgcaagact

SEQ ID NO: 1130983 - DNA, 15 bp, Homo sapiens
tgagaaatgcaagac

SEQ ID NO: 1130984 - DNA, 15 bp, Homo sapiens
ctgagaaatgcaaga

SEQ ID NO: 1130985 - DNA, 15 bp, Homo sapiens
actgagaaatgcaag

SEQ ID NO: 1130986 - DNA, 15 bp, Homo sapiens
gactgagaaatgcaa

SEQ ID NO: 1130987 - DNA, 15 bp, Homo sapiens
ggactgagaaatgca

SEQ ID NO: 1130988 - DNA, 15 bp, Homo sapiens
aggactgagaaatgc

SEQ ID NO: 1130989 - DNA, 15 bp, Homo sapiens
taggactgagaaatg

SEQ ID NO: 1130990 - DNA, 15 bp, Homo sapiens
ttaggactgagaaat

SEQ ID NO: 1130991 - DNA, 15 bp, Homo sapiens
tttaggactgagaaa

SEQ ID NO: 1130992 - DNA, 15 bp, Homo sapiens
gtttaggactgagaa

SEQ ID NO: 1130993 - DNA, 15 bp, Homo sapiens
tgtttaggactgaga

SEQ ID NO: 1130994 - DNA, 15 bp, Homo sapiens
ctgtttaggactgag

SEQ ID NO: 1130995 - DNA, 15 bp, Homo sapiens
cctgtttaggactga

SEQ ID NO: 1130996 - DNA, 15 bp, Homo sapiens
ccctgtttaggactg

SEQ ID NO: 1130997 - DNA, 15 bp, Homo sapiens
accctgtttaggact

SEQ ID NO: 1130998 - DNA, 15 bp, Homo sapiens
taccctgtttaggac

SEQ ID NO: 1130999 - DNA, 15 bp, Homo sapiens
ttaccctgtttagga

SEQ ID NO: 1131000 - DNA, 15 bp, Homo sapiens
attaccctgtttagg

SEQ ID NO: 1131001 - DNA, 15 bp, Homo sapiens
cattaccctgtttag

SEQ ID NO: 1131002 - DNA, 15 bp, Homo sapiens
ccattaccctgttta

SEQ ID NO: 1131003 - DNA, 15 bp, Homo sapiens
tccattaccctgttt

SEQ ID NO: 1131004 - DNA, 15 bp, Homo sapiens
gtccattaccctgtt

SEQ ID NO: 1131005 - DNA, 15 bp, Homo sapiens
agtccattaccctgt

SEQ ID NO: 1131006 - DNA, 15 bp, Homo sapiens
cagtccattaccctg

SEQ ID NO: 1131007 - DNA, 15 bp, Homo sapiens
ccagtccattaccct

SEQ ID NO: 1131008 - DNA, 15 bp, Homo sapiens
cccagtccattaccc

SEQ ID NO: 1131009 - DNA, 15 bp, Homo sapiens
ccccagtccattacc

SEQ ID NO: 1131010 - DNA, 15 bp, Homo sapiens
gccccagtccattac

SEQ ID NO: 1131011 - DNA, 15 bp, Homo sapiens
agccccagtccatta

SEQ ID NO: 1131012 - DNA, 15 bp, Homo sapiens
cagccccagtccatt

SEQ ID NO: 1131013 - DNA, 15 bp, Homo sapiens
tcagccccagtccat

SEQ ID NO: 1131014 - DNA, 15 bp, Homo sapiens
ttcagccccagtcca

SEQ ID NO: 1131015 - DNA, 15 bp, Homo sapiens
attcagccccagtcc

SEQ ID NO: 1131016 - DNA, 15 bp, Homo sapiens
gattcagccccagtc

SEQ ID NO: 1131017 - DNA, 15 bp, Homo sapiens
tgattcagccccagt

SEQ ID NO: 1131018 - DNA, 15 bp, Homo sapiens
gtgattcagccccag

SEQ ID NO: 1131019 - DNA, 15 bp, Homo sapiens
tgtgattcagcccca

SEQ ID NO: 1131020 - DNA, 15 bp, Homo sapiens
atgtgattcagcccc

SEQ ID NO: 1131021 - DNA, 15 bp, Homo sapiens
catgtgattcagccc

SEQ ID NO: 1131022 - DNA, 15 bp, Homo sapiens
tcatgtgattcagcc

SEQ ID NO: 1131023 - DNA, 15 bp, Homo sapiens
ttcatgtgattcagc

SEQ ID NO: 1131024 - DNA, 15 bp, Homo sapiens
cttcatgtgattcag

SEQ ID NO: 1131025 - DNA, 15 bp, Homo sapiens
ccttcatgtgattca

SEQ ID NO: 1131026 - DNA, 15 bp, Homo sapiens
gccttcatgtgattc

SEQ ID NO: 1131027 - DNA, 15 bp, Homo sapiens
tgccttcatgtgatt

SEQ ID NO: 1131028 - DNA, 15 bp, Homo sapiens
ttgccttcatgtgat

SEQ ID NO: 1131029 - DNA, 15 bp, Homo sapiens
cttgccttcatgtga

SEQ ID NO: 1131030 - DNA, 15 bp, Homo sapiens
ccttgccttcatgtg

SEQ ID NO: 1131031 - DNA, 15 bp, Homo sapiens
accttgccttcatgt

SEQ ID NO: 1131032 - DNA, 15 bp, Homo sapiens
gaccttgccttcatg

SEQ ID NO: 1131033 - DNA, 15 bp, Homo sapiens
tgaccttgccttcat

SEQ ID NO: 1131034 - DNA, 15 bp, Homo sapiens
ctgaccttgccttca

SEQ ID NO: 1131035 - DNA, 15 bp, Homo sapiens
atctgaccttgcctt

SEQ ID NO: 1131036 - DNA, 15 bp, Homo sapiens
aatctgaccttgcct

SEQ ID NO: 1131037 - DNA, 15 bp, Homo sapiens
aaatctgaccttgcc

SEQ ID NO: 1131038 - DNA, 15 bp, Homo sapiens
aaaatctgaccttgc

SEQ ID NO: 1131039 - DNA, 15 bp, Homo sapiens
aaaaatctgaccttg

SEQ ID NO: 1131040 - DNA, 15 bp, Homo sapiens
taaaaatctgacctt

SEQ ID NO: 1131041 - DNA, 15 bp, Homo sapiens
ataaaaatctgacct

SEQ ID NO: 1131042 - DNA, 15 bp, Homo sapiens
aataaaaatctgacc

SEQ ID NO: 1131043 - DNA, 15 bp, Homo sapiens
taataaaaatctgac

SEQ ID NO: 1131044 - DNA, 15 bp, Homo sapiens
ataataaaaatctga

SEQ ID NO: 1131045 - DNA, 15 bp, Homo sapiens
aataataaaaatctg

SEQ ID NO: 1131046 - DNA, 15 bp, Homo sapiens
taataataaaaatct

SEQ ID NO: 1131047 - DNA, 15 bp, Homo sapiens
ataataataaaaatc

SEQ ID NO: 1131048 - DNA, 15 bp, Homo sapiens
cataataataaaaat

SEQ ID NO: 1131049 - DNA, 15 bp, Homo sapiens
gcataataataaaaa

SEQ ID NO: 1131050 - DNA, 15 bp, Homo sapiens
tgcataataataaaa

SEQ ID NO: 1131051 - DNA, 15 bp, Homo sapiens
gtgcataataataaa

SEQ ID NO: 1131052 - DNA, 15 bp, Homo sapiens
tgtgcataataataa

SEQ ID NO: 1131053 - DNA, 15 bp, Homo sapiens
atgtgcataataata

SEQ ID NO: 1131054 - DNA, 15 bp, Homo sapiens
gatgtgcataataat

SEQ ID NO: 1131055 - DNA, 15 bp, Homo sapiens
agatgtgcataataa

SEQ ID NO: 1131056 - DNA, 15 bp, Homo sapiens
tagatgtgcataata

SEQ ID NO: 1131057 - DNA, 15 bp, Homo sapiens
ctagatgtgcataat

SEQ ID NO: 1131058 - DNA, 15 bp, Homo sapiens
gctagatgtgcataa

SEQ ID NO: 1131059 - DNA, 15 bp, Homo sapiens
agctagatgtgcata

SEQ ID NO: 1131060 - DNA, 15 bp, Homo sapiens
aagctagatgtgcat

SEQ ID NO: 1131061 - DNA, 15 bp, Homo sapiens
caagctagatgtgca

SEQ ID NO: 1131062 - DNA, 15 bp, Homo sapiens
tcaagctagatgtgc

SEQ ID NO: 1131063 - DNA, 15 bp, Homo sapiens
ttcaagctagatgtg

SEQ ID NO: 1131064 - DNA, 15 bp, Homo sapiens
tttcaagctagatgt

SEQ ID NO: 1131065 - DNA, 15 bp, Homo sapiens
ttttcaagctagatg

SEQ ID NO: 1131066 - DNA, 15 bp, Homo sapiens
attttcaagctagat

SEQ ID NO: 1131067 - DNA, 15 bp, Homo sapiens
aattttcaagctaga

SEQ ID NO: 1131068 - DNA, 15 bp, Homo sapiens
aaattttcaagctag

SEQ ID NO: 1131069 - DNA, 15 bp, Homo sapiens
aaaattttcaagcta

SEQ ID NO: 1131070 - DNA, 15 bp, Homo sapiens
gaaaattttcaagct

SEQ ID NO: 1131071 - DNA, 15 bp, Homo sapiens
agaaaattttcaagc

SEQ ID NO: 1131072 - DNA, 15 bp, Homo sapiens
cagaaaattttcaag

SEQ ID NO: 1131073 - DNA, 15 bp, Homo sapiens
acagaaaattttcaa

SEQ ID NO: 1131074 - DNA, 15 bp, Homo sapiens
aacagaaaattttca

SEQ ID NO: 1131075 - DNA, 15 bp, Homo sapiens
taacagaaaattttc

SEQ ID NO: 1131076 - DNA, 15 bp, Homo sapiens
ttaacagaaaatttt

SEQ ID NO: 1131077 - DNA, 15 bp, Homo sapiens
cttaacagaaaattt

SEQ ID NO: 1131078 - DNA, 15 bp, Homo sapiens
acttaacagaaaatt

SEQ ID NO: 1131079 - DNA, 15 bp, Homo sapiens
gacttaacagaaaat

SEQ ID NO: 1131080 - DNA, 15 bp, Homo sapiens
tgacttaacagaaaa

SEQ ID NO: 1131081 - DNA, 15 bp, Homo sapiens
ttgacttaacagaaa

SEQ ID NO: 1131082 - DNA, 15 bp, Homo sapiens
attgacttaacagaa

SEQ ID NO: 1131083 - DNA, 15 bp, Homo sapiens
aattgacttaacaga

SEQ ID NO: 1131084 - DNA, 15 bp, Homo sapiens
taattgacttaacag

SEQ ID NO: 1131085 - DNA, 15 bp, Homo sapiens
gtaattgacttaaca

SEQ ID NO: 1131086 - DNA, 15 bp, Homo sapiens
tgtaattgacttaac

SEQ ID NO: 1131087 - DNA, 15 bp, Homo sapiens
ctgtaattgacttaa

SEQ ID NO: 1131088 - DNA, 15 bp, Homo sapiens
actgtaattgactta

SEQ ID NO: 1131089 - DNA, 15 bp, Homo sapiens
cactgtaattgactt

SEQ ID NO: 1131090 - DNA, 15 bp, Homo sapiens
tcactgtaattgact

SEQ ID NO: 1131091 - DNA, 15 bp, Homo sapiens
ttcactgtaattgac

SEQ ID NO: 1131092 - DNA, 15 bp, Homo sapiens
tttcactgtaattga

SEQ ID NO: 1131093 - DNA, 15 bp, Homo sapiens
ttttcactgtaattg

SEQ ID NO: 1131094 - DNA, 15 bp, Homo sapiens
tttttcactgtaatt

SEQ ID NO: 1131095 - DNA, 15 bp, Homo sapiens
gtttttcactgtaat

SEQ ID NO: 1131096 - DNA, 15 bp, Homo sapiens
ggtttttcactgtaa

SEQ ID NO: 1131097 - DNA, 15 bp, Homo sapiens
aggtttttcactgta

SEQ ID NO: 1131098 - DNA, 15 bp, Homo sapiens
aaggtttttcactgt

SEQ ID NO: 1131099 - DNA, 15 bp, Homo sapiens
taaggtttttcactg

SEQ ID NO: 1131100 - DNA, 15 bp, Homo sapiens
gtaaggtttttcact

SEQ ID NO: 1131101 - DNA, 15 bp, Homo sapiens
ggtaaggtttttcac

SEQ ID NO: 1131102 - DNA, 15 bp, Homo sapiens
aggtaaggtttttca

SEQ ID NO: 1131103 - DNA, 15 bp, Homo sapiens
caggtaaggtttttc

SEQ ID NO: 1131104 - DNA, 15 bp, Homo sapiens
ccaggtaaggttttt

SEQ ID NO: 1131105 - DNA, 15 bp, Homo sapiens
accaggtaaggtttt

SEQ ID NO: 1131106 - DNA, 15 bp, Homo sapiens
taccaggtaaggttt

SEQ ID NO: 1131107 - DNA, 15 bp, Homo sapiens
ataccaggtaaggtt

SEQ ID NO: 1131108 - DNA, 15 bp, Homo sapiens
aataccaggtaaggt

SEQ ID NO: 1131109 - DNA, 15 bp, Homo sapiens
caataccaggtaagg

SEQ ID NO: 1131110 - DNA, 15 bp, Homo sapiens
tcaataccaggtaag

SEQ ID NO: 1131111 - DNA, 15 bp, Homo sapiens
ttcaataccaggtaa

SEQ ID NO: 1131112 - DNA, 15 bp, Homo sapiens
attcaataccaggta

SEQ ID NO: 1131113 - DNA, 15 bp, Homo sapiens
cattcaataccaggt

SEQ ID NO: 1131114 - DNA, 15 bp, Homo sapiens
gcattcaataccagg

SEQ ID NO: 1131115 - DNA, 15 bp, Homo sapiens
agcattcaataccag

SEQ ID NO: 1131116 - DNA, 15 bp, Homo sapiens
aagcattcaatacca

SEQ ID NO: 1131117 - DNA, 15 bp, Homo sapiens
caagcattcaatacc

SEQ ID NO: 1131118 - DNA, 15 bp, Homo sapiens
gcaagcattcaatac

SEQ ID NO: 1131119 - DNA, 15 bp, Homo sapiens
tgcaagcattcaata

SEQ ID NO: 1131120 - DNA, 15 bp, Homo sapiens
atgcaagcattcaat

SEQ ID NO: 1131121 - DNA, 15 bp, Homo sapiens
aatgcaagcattcaa

SEQ ID NO: 1131122 - DNA, 15 bp, Homo sapiens
caatgcaagcattca

SEQ ID NO: 1131123 - DNA, 15 bp, Homo sapiens
acaatgcaagcattc

SEQ ID NO: 1131124 - DNA, 15 bp, Homo sapiens
tacaatgcaagcatt

SEQ ID NO: 1131125 - DNA, 15 bp, Homo sapiens
atacaatgcaagcat

SEQ ID NO: 1131126 - DNA, 15 bp, Homo sapiens
catacaatgcaagca

SEQ ID NO: 1131127 - DNA, 15 bp, Homo sapiens
acatacaatgcaagc

SEQ ID NO: 1131128 - DNA, 15 bp, Homo sapiens
gacatacaatgcaag

SEQ ID NO: 1131129 - DNA, 15 bp, Homo sapiens
agacatacaatgcaa

SEQ ID NO: 1131130 - DNA, 15 bp, Homo sapiens
cagacatacaatgca

SEQ ID NO: 1131131 - DNA, 15 bp, Homo sapiens
ccagacatacaatgc

SEQ ID NO: 1131132 - DNA, 15 bp, Homo sapiens
gccagacatacaatg

SEQ ID NO: 1131133 - DNA, 15 bp, Homo sapiens
agccagacatacaat

SEQ ID NO: 1131134 - DNA, 15 bp, Homo sapiens
tagccagacatacaa

SEQ ID NO: 1131135 - DNA, 15 bp, Homo sapiens
atagccagacataca

SEQ ID NO: 1131136 - DNA, 15 bp, Homo sapiens
aatagccagacatac

SEQ ID NO: 1131137 - DNA, 15 bp, Homo sapiens
gaatagccagacata

SEQ ID NO: 1131138 - DNA, 15 bp, Homo sapiens
agaatagccagacat

SEQ ID NO: 1131139 - DNA, 15 bp, Homo sapiens
cagaatagccagaca

SEQ ID NO: 1131140 - DNA, 15 bp, Homo sapiens
acagaatagccagac

SEQ ID NO: 1131141 - DNA, 15 bp, Homo sapiens
cacagaatagccaga

SEQ ID NO: 1131142 - DNA, 15 bp, Homo sapiens
acacagaatagccag

SEQ ID NO: 1131143 - DNA, 15 bp, Homo sapiens
aacacagaatagcca

SEQ ID NO: 1131144 - DNA, 15 bp, Homo sapiens
aaacacagaatagcc

SEQ ID NO: 1131145 - DNA, 15 bp, Homo sapiens
aaaacacagaatagc

SEQ ID NO: 1131146 - DNA, 15 bp, Homo sapiens
aaaaacacagaatag

SEQ ID NO: 1131147 - DNA, 15 bp, Homo sapiens
taaaaacacagaata

SEQ ID NO: 1131148 - DNA, 15 bp, Homo sapiens
ataaaaacacagaat

SEQ ID NO: 1131149 - DNA, 15 bp, Homo sapiens
aataaaaacacagaa

SEQ ID NO: 1131150 - DNA, 15 bp, Homo sapiens
aaataaaaacacaga

SEQ ID NO: 1131151 - DNA, 15 bp, Homo sapiens
aaaataaaaacacag

SEQ ID NO: 1131152 - DNA, 15 bp, Homo sapiens
taaaataaaaacaca

SEQ ID NO: 1131153 - DNA, 15 bp, Homo sapiens
ttaaaataaaaacac

SEQ ID NO: 1131154 - DNA, 15 bp, Homo sapiens
tttaaaataaaaaca

SEQ ID NO: 1131155 - DNA, 15 bp, Homo sapiens
ttttaaaataaaaac

SEQ ID NO: 1131156 - DNA, 15 bp, Homo sapiens
ataattttaaaataa

SEQ ID NO: 1131157 - DNA, 15 bp, Homo sapiens
ttataattttaaaat

SEQ ID NO: 1131158 - DNA, 15 bp, Homo sapiens
attataattttaaaa

SEQ ID NO: 1131159 - DNA, 15 bp, Homo sapiens
tattataattttaaa

SEQ ID NO: 1131160 - DNA, 15 bp, Homo sapiens
atattataattttaa

SEQ ID NO: 1131161 - DNA, 15 bp, Homo sapiens
gatattataatttta

SEQ ID NO: 1131162 - DNA, 15 bp, Homo sapiens
tgatattataatttt

SEQ ID NO: 1131163 - DNA, 15 bp, Homo sapiens
ttgatattataattt

SEQ ID NO: 1131164 - DNA, 15 bp, Homo sapiens
tttgatattataatt

SEQ ID NO: 1131165 - DNA, 15 bp, Homo sapiens
ttttgatattataat

SEQ ID NO: 1131166 - DNA, 15 bp, Homo sapiens
attttgatattataa

SEQ ID NO: 1131167 - DNA, 15 bp, Homo sapiens
tattttgatattata

SEQ ID NO: 1131168 - DNA, 15 bp, Homo sapiens
atattttgatattat

SEQ ID NO: 1131169 - DNA, 15 bp, Homo sapiens
aatattttgatatta

SEQ ID NO: 1131170 - DNA, 15 bp, Homo sapiens
aaatattttgatatt

SEQ ID NO: 1131171 - DNA, 15 bp, Homo sapiens
caaatattttgatat

SEQ ID NO: 1131172 - DNA, 15 bp, Homo sapiens
acaaatattttgata

SEQ ID NO: 1131173 - DNA, 15 bp, Homo sapiens
cacaaatattttgat

SEQ ID NO: 1131174 - DNA, 15 bp, Homo sapiens
acacaaatattttga

SEQ ID NO: 1131175 - DNA, 15 bp, Homo sapiens
aacacaaatattttg

SEQ ID NO: 1131176 - DNA, 15 bp, Homo sapiens
taacacaaatatttt

SEQ ID NO: 1131177 - DNA, 15 bp, Homo sapiens
ataacacaaatattt

SEQ ID NO: 1131178 - DNA, 15 bp, Homo sapiens
tataacacaaatatt

SEQ ID NO: 1131179 - DNA, 15 bp, Homo sapiens
ttataacacaaatat

SEQ ID NO: 1131180 - DNA, 15 bp, Homo sapiens
tttataacacaaata

SEQ ID NO: 1131181 - DNA, 15 bp, Homo sapiens
ttttataacacaaat

SEQ ID NO: 1131182 - DNA, 15 bp, Homo sapiens
attttataacacaaa

SEQ ID NO: 1131183 - DNA, 15 bp, Homo sapiens
tattttataacacaa

SEQ ID NO: 1131184 - DNA, 15 bp, Homo sapiens
atattttataacaca

SEQ ID NO: 1131185 - DNA, 15 bp, Homo sapiens
aatattttataacac

SEQ ID NO: 1131186 - DNA, 15 bp, Homo sapiens
gaatattttataaca

SEQ ID NO: 1131187 - DNA, 15 bp, Homo sapiens
agaatattttataac

SEQ ID NO: 1131188 - DNA, 15 bp, Homo sapiens
tagaatattttataa

SEQ ID NO: 1131189 - DNA, 15 bp, Homo sapiens
ttagaatattttata

SEQ ID NO: 1131190 - DNA, 15 bp, Homo sapiens
gttagaatattttat

SEQ ID NO: 1131191 - DNA, 15 bp, Homo sapiens
agttagaatatttta

SEQ ID NO: 1131192 - DNA, 15 bp, Homo sapiens
tagttagaatatttt

SEQ ID NO: 1131193 - DNA, 15 bp, Homo sapiens
atagttagaatattt

SEQ ID NO: 1131194 - DNA, 15 bp, Homo sapiens
catagttagaatatt

SEQ ID NO: 1131195 - DNA, 15 bp, Homo sapiens
ccatagttagaatat

SEQ ID NO: 1131196 - DNA, 15 bp, Homo sapiens
tccatagttagaata

SEQ ID NO: 1131197 - DNA, 15 bp, Homo sapiens
ctccatagttagaat

SEQ ID NO: 1131198 - DNA, 15 bp, Homo sapiens
cctccatagttagaa

SEQ ID NO: 1131199 - DNA, 15 bp, Homo sapiens
gcctccatagttaga

SEQ ID NO: 1131200 - DNA, 15 bp, Homo sapiens
ggcctccatagttag

SEQ ID NO: 1131201 - DNA, 15 bp, Homo sapiens
tggcctccatagtta

SEQ ID NO: 1131202 - DNA, 15 bp, Homo sapiens
atggcctccatagtt

SEQ ID NO: 1131203 - DNA, 15 bp, Homo sapiens
tatggcctccatagt

SEQ ID NO: 1131204 - DNA, 15 bp, Homo sapiens
ttatggcctccatag

SEQ ID NO: 1131205 - DNA, 15 bp, Homo sapiens
tttatggcctccata

SEQ ID NO: 1131206 - DNA, 15 bp, Homo sapiens
gtttatggcctccat

SEQ ID NO: 1131207 - DNA, 15 bp, Homo sapiens
tgtttatggcctcca

SEQ ID NO: 1131208 - DNA, 15 bp, Homo sapiens
ttgtttatggcctcc

SEQ ID NO: 1131209 - DNA, 15 bp, Homo sapiens
cttgtttatggcctc

SEQ ID NO: 1131210 - DNA, 15 bp, Homo sapiens
tcttgtttatggcct

SEQ ID NO: 1131211 - DNA, 15 bp, Homo sapiens
ttcttgtttatggcc

SEQ ID NO: 1131212 - DNA, 15 bp, Homo sapiens
cttcttgtttatggc

SEQ ID NO: 1131213 - DNA, 15 bp, Homo sapiens
tcttcttgtttatgg

SEQ ID NO: 1131214 - DNA, 15 bp, Homo sapiens
gtcttcttgtttatg

SEQ ID NO: 1131215 - DNA, 15 bp, Homo sapiens
agtcttcttgtttat

SEQ ID NO: 1131216 - DNA, 15 bp, Homo sapiens
tagtcttcttgttta

SEQ ID NO: 1131217 - DNA, 15 bp, Homo sapiens
ttagtcttcttgttt

SEQ ID NO: 1131218 - DNA, 15 bp, Homo sapiens
tttagtcttcttgtt

SEQ ID NO: 1131219 - DNA, 15 bp, Homo sapiens
ctttagtcttcttgt

SEQ ID NO: 1131220 - DNA, 15 bp, Homo sapiens
actttagtcttcttg

SEQ ID NO: 1131221 - DNA, 15 bp, Homo sapiens
aactttagtcttctt

SEQ ID NO: 1131222 - DNA, 15 bp, Homo sapiens
gaactttagtcttct

SEQ ID NO: 1131223 - DNA, 15 bp, Homo sapiens
agaactttagtcttc

SEQ ID NO: 1131224 - DNA, 15 bp, Homo sapiens
gagaactttagtctt

SEQ ID NO: 1131225 - DNA, 15 bp, Homo sapiens
agagaactttagtct

SEQ ID NO: 1131226 - DNA, 15 bp, Homo sapiens
gagagaactttagtc

SEQ ID NO: 1131227 - DNA, 15 bp, Homo sapiens
ggagagaactttagt

SEQ ID NO: 1131228 - DNA, 15 bp, Homo sapiens
aggagagaactttag

SEQ ID NO: 1131229 - DNA, 15 bp, Homo sapiens
aaggagagaacttta

SEQ ID NO: 1131230 - DNA, 15 bp, Homo sapiens
aaaggagagaacttt

SEQ ID NO: 1131231 - DNA, 15 bp, Homo sapiens
gaaaggagagaactt

SEQ ID NO: 1131232 - DNA, 15 bp, Homo sapiens
tgaaaggagagaact

SEQ ID NO: 1131233 - DNA, 15 bp, Homo sapiens
ctgaaaggagagaac

SEQ ID NO: 1131234 - DNA, 15 bp, Homo sapiens
gctgaaaggagagaa

SEQ ID NO: 1131235 - DNA, 15 bp, Homo sapiens
ggctgaaaggagaga

SEQ ID NO: 1131236 - DNA, 15 bp, Homo sapiens
aggctgaaaggagag

SEQ ID NO: 1131237 - DNA, 15 bp, Homo sapiens
aaggctgaaaggaga

SEQ ID NO: 1131238 - DNA, 15 bp, Homo sapiens
gaaggctgaaaggag

SEQ ID NO: 1131239 - DNA, 15 bp, Homo sapiens
agaaggctgaaagga

SEQ ID NO: 1131240 - DNA, 15 bp, Homo sapiens
cagaaggctgaaagg

SEQ ID NO: 1131241 - DNA, 15 bp, Homo sapiens
acagaaggctgaaag

SEQ ID NO: 1131242 - DNA, 15 bp, Homo sapiens
tacagaaggctgaaa

SEQ ID NO: 1131243 - DNA, 15 bp, Homo sapiens
gtacagaaggctgaa

SEQ ID NO: 1131244 - DNA, 15 bp, Homo sapiens
tgtacagaaggctga

SEQ ID NO: 1131245 - DNA, 15 bp, Homo sapiens
gtgtacagaaggctg

SEQ ID NO: 1131246 - DNA, 15 bp, Homo sapiens
tgtgtacagaaggct

SEQ ID NO: 1131247 - DNA, 15 bp, Homo sapiens
atgtgtacagaaggc

SEQ ID NO: 1131248 - DNA, 15 bp, Homo sapiens
aatgtgtacagaagg

SEQ ID NO: 1131249 - DNA, 15 bp, Homo sapiens
aaatgtgtacagaag

SEQ ID NO: 1131250 - DNA, 15 bp, Homo sapiens
gaaatgtgtacagaa

SEQ ID NO: 1131251 - DNA, 15 bp, Homo sapiens
agaaatgtgtacaga

SEQ ID NO: 1131252 - DNA, 15 bp, Homo sapiens
aagaaatgtgtacag

SEQ ID NO: 1131253 - DNA, 15 bp, Homo sapiens
gaagaaatgtgtaca

SEQ ID NO: 1131254 - DNA, 15 bp, Homo sapiens
agaagaaatgtgtac

SEQ ID NO: 1131255 - DNA, 15 bp, Homo sapiens
gagaagaaatgtgta

SEQ ID NO: 1131256 - DNA, 15 bp, Homo sapiens
tgagaagaaatgtgt

SEQ ID NO: 1131257 - DNA, 15 bp, Homo sapiens
ttgagaagaaatgtg

SEQ ID NO: 1131258 - DNA, 15 bp, Homo sapiens
cttgagaagaaatgt

SEQ ID NO: 1131259 - DNA, 15 bp, Homo sapiens
gcttgagaagaaatg

SEQ ID NO: 1131260 - DNA, 15 bp, Homo sapiens
tgcttgagaagaaat

SEQ ID NO: 1131261 - DNA, 15 bp, Homo sapiens
gtgcttgagaagaaa

SEQ ID NO: 1131262 - DNA, 15 bp, Homo sapiens
agtgcttgagaagaa

SEQ ID NO: 1131263 - DNA, 15 bp, Homo sapiens
cagtgcttgagaaga

SEQ ID NO: 1131264 - DNA, 15 bp, Homo sapiens
ccagtgcttgagaag

SEQ ID NO: 1131265 - DNA, 15 bp, Homo sapiens
gccagtgcttgagaa

SEQ ID NO: 1131266 - DNA, 15 bp, Homo sapiens
agccagtgcttgaga

SEQ ID NO: 1131267 - DNA, 15 bp, Homo sapiens
tagccagtgcttgag

SEQ ID NO: 1131268 - DNA, 15 bp, Homo sapiens
atagccagtgcttga

SEQ ID NO: 1131269 - DNA, 15 bp, Homo sapiens
catagccagtgcttg

SEQ ID NO: 1131270 - DNA, 15 bp, Homo sapiens
gcatagccagtgctt

SEQ ID NO: 1131271 - DNA, 15 bp, Homo sapiens
tgcatagccagtgct

SEQ ID NO: 1131272 - DNA, 15 bp, Homo sapiens
atgcatagccagtgc

SEQ ID NO: 1131273 - DNA, 15 bp, Homo sapiens
catgcatagccagtg

SEQ ID NO: 1131274 - DNA, 15 bp, Homo sapiens
acatgcatagccagt

SEQ ID NO: 1131275 - DNA, 15 bp, Homo sapiens
tacatgcatagccag

SEQ ID NO: 1131276 - DNA, 15 bp, Homo sapiens
atacatgcatagcca

SEQ ID NO: 1131277 - DNA, 15 bp, Homo sapiens
tatacatgcatagcc

SEQ ID NO: 1131278 - DNA, 15 bp, Homo sapiens
gtatacatgcatagc

SEQ ID NO: 1131279 - DNA, 15 bp, Homo sapiens
agtatacatgcatag

SEQ ID NO: 1131280 - DNA, 15 bp, Homo sapiens
tagtatacatgcata

SEQ ID NO: 1131281 - DNA, 15 bp, Homo sapiens
atagtatacatgcat

SEQ ID NO: 1131282 - DNA, 15 bp, Homo sapiens
tatagtatacatgca

SEQ ID NO: 1131283 - DNA, 15 bp, Homo sapiens
atatagtatacatgc

SEQ ID NO: 1131284 - DNA, 15 bp, Homo sapiens
catatagtatacatg

SEQ ID NO: 1131285 - DNA, 15 bp, Homo sapiens
gcatatagtatacat

SEQ ID NO: 1131286 - DNA, 15 bp, Homo sapiens
tgcatatagtataca

SEQ ID NO: 1131287 - DNA, 15 bp, Homo sapiens
ttgcatatagtatac

SEQ ID NO: 1131288 - DNA, 15 bp, Homo sapiens
tttgcatatagtata

SEQ ID NO: 1131289 - DNA, 15 bp, Homo sapiens
ttttgcatatagtat

SEQ ID NO: 1131290 - DNA, 15 bp, Homo sapiens
cttttgcatatagta

SEQ ID NO: 1131291 - DNA, 15 bp, Homo sapiens
acttttgcatatagt

SEQ ID NO: 1131292 - DNA, 15 bp, Homo sapiens
tacttttgcatatag

SEQ ID NO: 1131293 - DNA, 15 bp, Homo sapiens
gtacttttgcatata

SEQ ID NO: 1131294 - DNA, 15 bp, Homo sapiens
tgtacttttgcatat

SEQ ID NO: 1131295 - DNA, 15 bp, Homo sapiens
atgtacttttgcata

SEQ ID NO: 1131296 - DNA, 15 bp, Homo sapiens
tatgtacttttgcat

SEQ ID NO: 1131297 - DNA, 15 bp, Homo sapiens
atatgtacttttgca

SEQ ID NO: 1131298 - DNA, 15 bp, Homo sapiens
tatatgtacttttgc

SEQ ID NO: 1131299 - DNA, 15 bp, Homo sapiens
atatatgtacttttg

SEQ ID NO: 1131300 - DNA, 15 bp, Homo sapiens
tatatatgtactttt

SEQ ID NO: 1131301 - DNA, 15 bp, Homo sapiens
gtatatatgtacttt

SEQ ID NO: 1131302 - DNA, 15 bp, Homo sapiens
tgtatatatgtactt

SEQ ID NO: 1131303 - DNA, 15 bp, Homo sapiens
atgtatatatgtact

SEQ ID NO: 1131304 - DNA, 15 bp, Homo sapiens
aatgtatatatgtac

SEQ ID NO: 1131305 - DNA, 15 bp, Homo sapiens
aaatgtatatatgta

SEQ ID NO: 1131306 - DNA, 15 bp, Homo sapiens
taaatgtatatatgt

SEQ ID NO: 1131307 - DNA, 15 bp, Homo sapiens
ataaatgtatatatg

SEQ ID NO: 1131308 - DNA, 15 bp, Homo sapiens
tataaatgtatatat

SEQ ID NO: 1131309 - DNA, 15 bp, Homo sapiens
atataaatgtatata

SEQ ID NO: 1131310 - DNA, 15 bp, Homo sapiens
aatataaatgtatat

SEQ ID NO: 1131311 - DNA, 15 bp, Homo sapiens
aaatataaatgtata

SEQ ID NO: 1131312 - DNA, 15 bp, Homo sapiens
aaaatataaatgtat

SEQ ID NO: 1131313 - DNA, 15 bp, Homo sapiens
taaaatataaatgta

SEQ ID NO: 1131314 - DNA, 15 bp, Homo sapiens
ttaaaatataaatgt

SEQ ID NO: 1131315 - DNA, 15 bp, Homo sapiens
gttaaaatataaatg

SEQ ID NO: 1131316 - DNA, 15 bp, Homo sapiens
cgttaaaatataaat

SEQ ID NO: 1131317 - DNA, 15 bp, Homo sapiens
acgttaaaatataaa

SEQ ID NO: 1131318 - DNA, 15 bp, Homo sapiens
tacgttaaaatataa

SEQ ID NO: 1131319 - DNA, 15 bp, Homo sapiens
atacgttaaaatata

SEQ ID NO: 1131320 - DNA, 15 bp, Homo sapiens
catacgttaaaatat

SEQ ID NO: 1131321 - DNA, 15 bp, Homo sapiens
tcatacgttaaaata

SEQ ID NO: 1131322 - DNA, 15 bp, Homo sapiens
ctcatacgttaaaat

SEQ ID NO: 1131323 - DNA, 15 bp, Homo sapiens
actcatacgttaaaa

SEQ ID NO: 1131324 - DNA, 15 bp, Homo sapiens
tactcatacgttaaa

SEQ ID NO: 1131325 - DNA, 15 bp, Homo sapiens
atactcatacgttaa

SEQ ID NO: 1131326 - DNA, 15 bp, Homo sapiens
tatactcatacgtta

SEQ ID NO: 1131327 - DNA, 15 bp, Homo sapiens
ctatactcatacgtt

SEQ ID NO: 1131328 - DNA, 15 bp, Homo sapiens
actatactcatacgt

SEQ ID NO: 1131329 - DNA, 15 bp, Homo sapiens
aactatactcatacg

SEQ ID NO: 1131330 - DNA, 15 bp, Homo sapiens
aaactatactcatac

SEQ ID NO: 1131331 - DNA, 15 bp, Homo sapiens
aaaactatactcata

SEQ ID NO: 1131332 - DNA, 15 bp, Homo sapiens
taaaactatactcat

SEQ ID NO: 1131333 - DNA, 15 bp, Homo sapiens
ttaaaactatactca

SEQ ID NO: 1131334 - DNA, 15 bp, Homo sapiens
tttaaaactatactc

SEQ ID NO: 1131335 - DNA, 15 bp, Homo sapiens
atttaaaactatact

SEQ ID NO: 1131336 - DNA, 15 bp, Homo sapiens
catttaaaactatac

SEQ ID NO: 1131337 - DNA, 15 bp, Homo sapiens
acatttaaaactata

SEQ ID NO: 1131338 - DNA, 15 bp, Homo sapiens
aacatttaaaactat

SEQ ID NO: 1131339 - DNA, 15 bp, Homo sapiens
taacatttaaaacta

SEQ ID NO: 1131340 - DNA, 15 bp, Homo sapiens
ataacatttaaaact

SEQ ID NO: 1131341 - DNA, 15 bp, Homo sapiens
aataacatttaaaac

SEQ ID NO: 1131342 - DNA, 15 bp, Homo sapiens
caataacatttaaaa

SEQ ID NO: 1131343 - DNA, 15 bp, Homo sapiens
ccaataacatttaaa

SEQ ID NO: 1131344 - DNA, 15 bp, Homo sapiens
tccaataacatttaa

SEQ ID NO: 1131345 - DNA, 15 bp, Homo sapiens
gtccaataacattta

SEQ ID NO: 1131346 - DNA, 15 bp, Homo sapiens
tgtccaataacattt

SEQ ID NO: 1131347 - DNA, 15 bp, Homo sapiens
gtgtccaataacatt

SEQ ID NO: 1131348 - DNA, 15 bp, Homo sapiens
agtgtccaataacat

SEQ ID NO: 1131349 - DNA, 15 bp, Homo sapiens
aagtgtccaataaca

SEQ ID NO: 1131350 - DNA, 15 bp, Homo sapiens
aaagtgtccaataac

SEQ ID NO: 1131351 - DNA, 15 bp, Homo sapiens
aaaagtgtccaataa

SEQ ID NO: 1131352 - DNA, 15 bp, Homo sapiens
taaaagtgtccaata

SEQ ID NO: 1131353 - DNA, 15 bp, Homo sapiens
ttaaaagtgtccaat

SEQ ID NO: 1131354 - DNA, 15 bp, Homo sapiens
attaaaagtgtccaa

SEQ ID NO: 1131355 - DNA, 15 bp, Homo sapiens
tattaaaagtgtcca

SEQ ID NO: 1131356 - DNA, 15 bp, Homo sapiens
atattaaaagtgtcc

SEQ ID NO: 1131357 - DNA, 15 bp, Homo sapiens
aatattaaaagtgtc

SEQ ID NO: 1131358 - DNA, 15 bp, Homo sapiens
taatattaaaagtgt

SEQ ID NO: 1131359 - DNA, 15 bp, Homo sapiens
ctaatattaaaagtg

SEQ ID NO: 1131360 - DNA, 15 bp, Homo sapiens
actaatattaaaagt

SEQ ID NO: 1131361 - DNA, 15 bp, Homo sapiens
cactaatattaaaag

SEQ ID NO: 1131362 - DNA, 15 bp, Homo sapiens
acactaatattaaaa

SEQ ID NO: 1131363 - DNA, 15 bp, Homo sapiens
cacactaatattaaa

SEQ ID NO: 1131364 - DNA, 15 bp, Homo sapiens
acacactaatattaa

SEQ ID NO: 1131365 - DNA, 15 bp, Homo sapiens
gacacactaatatta

SEQ ID NO: 1131366 - DNA, 15 bp, Homo sapiens
agacacactaatatt

SEQ ID NO: 1131367 - DNA, 15 bp, Homo sapiens
tagacacactaatat

SEQ ID NO: 1131368 - DNA, 15 bp, Homo sapiens
ctagacacactaata

SEQ ID NO: 1131369 - DNA, 15 bp, Homo sapiens
tctagacacactaat

SEQ ID NO: 1131370 - DNA, 15 bp, Homo sapiens
ctctagacacactaa

SEQ ID NO: 1131371 - DNA, 15 bp, Homo sapiens
gctctagacacacta

SEQ ID NO: 1131372 - DNA, 15 bp, Homo sapiens
agctctagacacact

SEQ ID NO: 1131373 - DNA, 15 bp, Homo sapiens
tagctctagacacac

SEQ ID NO: 1131374 - DNA, 15 bp, Homo sapiens
atagctctagacaca

SEQ ID NO: 1131375 - DNA, 15 bp, Homo sapiens
gatagctctagacac

SEQ ID NO: 1131376 - DNA, 15 bp, Homo sapiens
agatagctctagaca

SEQ ID NO: 1131377 - DNA, 15 bp, Homo sapiens
tagatagctctagac

SEQ ID NO: 1131378 - DNA, 15 bp, Homo sapiens
ttagatagctctaga

SEQ ID NO: 1131379 - DNA, 15 bp, Homo sapiens
attagatagctctag

SEQ ID NO: 1131380 - DNA, 15 bp, Homo sapiens
tattagatagctcta

SEQ ID NO: 1131381 - DNA, 15 bp, Homo sapiens
atattagatagctct

SEQ ID NO: 1131382 - DNA, 15 bp, Homo sapiens
tatattagatagctc

SEQ ID NO: 1131383 - DNA, 15 bp, Homo sapiens
atatattagatagct

SEQ ID NO: 1131384 - DNA, 15 bp, Homo sapiens
aatatattagatagc

SEQ ID NO: 1131385 - DNA, 15 bp, Homo sapiens
aaatatattagatag

SEQ ID NO: 1131386 - DNA, 15 bp, Homo sapiens
aaaatatattagata

SEQ ID NO: 1131387 - DNA, 15 bp, Homo sapiens
taaaatatattagat

SEQ ID NO: 1131388 - DNA, 15 bp, Homo sapiens
ttaaaatatattaga

SEQ ID NO: 1131389 - DNA, 15 bp, Homo sapiens
tttaaaatatattag

SEQ ID NO: 1131390 - DNA, 15 bp, Homo sapiens
ctttaaaatatatta

SEQ ID NO: 1131391 - DNA, 15 bp, Homo sapiens
cctttaaaatatatt

SEQ ID NO: 1131392 - DNA, 15 bp, Homo sapiens
acctttaaaatatat

SEQ ID NO: 1131393 - DNA, 15 bp, Homo sapiens
aacctttaaaatata

SEQ ID NO: 1131394 - DNA, 15 bp, Homo sapiens
caacctttaaaatat

SEQ ID NO: 1131395 - DNA, 15 bp, Homo sapiens
gcaacctttaaaata

SEQ ID NO: 1131396 - DNA, 15 bp, Homo sapiens
tgcaacctttaaaat

SEQ ID NO: 1131397 - DNA, 15 bp, Homo sapiens
atgcaacctttaaaa

SEQ ID NO: 1131398 - DNA, 15 bp, Homo sapiens
tatgcaacctttaaa

SEQ ID NO: 1131399 - DNA, 15 bp, Homo sapiens
ctatgcaacctttaa

SEQ ID NO: 1131400 - DNA, 15 bp, Homo sapiens
gctatgcaaccttta

SEQ ID NO: 1131401 - DNA, 15 bp, Homo sapiens
tgctatgcaaccttt

SEQ ID NO: 1131402 - DNA, 15 bp, Homo sapiens
atgctatgcaacctt

SEQ ID NO: 1131403 - DNA, 15 bp, Homo sapiens
aatgctatgcaacct

SEQ ID NO: 1131404 - DNA, 15 bp, Homo sapiens
gaatgctatgcaacc

SEQ ID NO: 1131405 - DNA, 15 bp, Homo sapiens
agaatgctatgcaac

SEQ ID NO: 1131406 - DNA, 15 bp, Homo sapiens
cagaatgctatgcaa

SEQ ID NO: 1131407 - DNA, 15 bp, Homo sapiens
acagaatgctatgca

SEQ ID NO: 1131408 - DNA, 15 bp, Homo sapiens
gacagaatgctatgc

SEQ ID NO: 1131409 - DNA, 15 bp, Homo sapiens
agacagaatgctatg

SEQ ID NO: 1131410 - DNA, 15 bp, Homo sapiens
aagacagaatgctat

SEQ ID NO: 1131411 - DNA, 15 bp, Homo sapiens
taagacagaatgcta

SEQ ID NO: 1131412 - DNA, 15 bp, Homo sapiens
ataagacagaatgct

SEQ ID NO: 1131413 - DNA, 15 bp, Homo sapiens
cataagacagaatgc

SEQ ID NO: 1131414 - DNA, 15 bp, Homo sapiens
ccataagacagaatg

SEQ ID NO: 1131415 - DNA, 15 bp, Homo sapiens
tccataagacagaat

SEQ ID NO: 1131416 - DNA, 15 bp, Homo sapiens
ctccataagacagaa

SEQ ID NO: 1131417 - DNA, 15 bp, Homo sapiens
tctccataagacaga

SEQ ID NO: 1131418 - DNA, 15 bp, Homo sapiens
atctccataagacag

SEQ ID NO: 1131419 - DNA, 15 bp, Homo sapiens
tatctccataagaca

SEQ ID NO: 1131420 - DNA, 15 bp, Homo sapiens
gtatctccataagac

SEQ ID NO: 1131421 - DNA, 15 bp, Homo sapiens
ggtatctccataaga

SEQ ID NO: 1131422 - DNA, 15 bp, Homo sapiens
tggtatctccataag

SEQ ID NO: 1131423 - DNA, 15 bp, Homo sapiens
atggtatctccataa

SEQ ID NO: 1131424 - DNA, 15 bp, Homo sapiens
tatggtatctccata

SEQ ID NO: 1131425 - DNA, 15 bp, Homo sapiens
ttatggtatctccat

SEQ ID NO: 1131426 - DNA, 15 bp, Homo sapiens
gttatggtatctcca

SEQ ID NO: 1131427 - DNA, 15 bp, Homo sapiens
agttatggtatctcc

SEQ ID NO: 1131428 - DNA, 15 bp, Homo sapiens
cagttatggtatctc

SEQ ID NO: 1131429 - DNA, 15 bp, Homo sapiens
tcagttatggtatct

SEQ ID NO: 1131430 - DNA, 15 bp, Homo sapiens
atcagttatggtatc

SEQ ID NO: 1131431 - DNA, 15 bp, Homo sapiens
aatcagttatggtat

SEQ ID NO: 1131432 - DNA, 15 bp, Homo sapiens
aaatcagttatggta

SEQ ID NO: 1131433 - DNA, 15 bp, Homo sapiens
taaatcagttatggt

SEQ ID NO: 1131434 - DNA, 15 bp, Homo sapiens
ttaaatcagttatgg

SEQ ID NO: 1131435 - DNA, 15 bp, Homo sapiens
gttaaatcagttatg

SEQ ID NO: 1131436 - DNA, 15 bp, Homo sapiens
ggttaaatcagttat

SEQ ID NO: 1131437 - DNA, 15 bp, Homo sapiens
tggttaaatcagtta

SEQ ID NO: 1131438 - DNA, 15 bp, Homo sapiens
ctggttaaatcagtt

SEQ ID NO: 1131439 - DNA, 15 bp, Homo sapiens
actggttaaatcagt

SEQ ID NO: 1131440 - DNA, 15 bp, Homo sapiens
gactggttaaatcag

SEQ ID NO: 1131441 - DNA, 15 bp, Homo sapiens
ggactggttaaatca

SEQ ID NO: 1131442 - DNA, 15 bp, Homo sapiens
tggactggttaaatc

SEQ ID NO: 1131443 - DNA, 15 bp, Homo sapiens
gtggactggttaaat

SEQ ID NO: 1131444 - DNA, 15 bp, Homo sapiens
agtggactggttaaa

SEQ ID NO: 1131445 - DNA, 15 bp, Homo sapiens
tagtggactggttaa

SEQ ID NO: 1131446 - DNA, 15 bp, Homo sapiens
atagtggactggtta

SEQ ID NO: 1131447 - DNA, 15 bp, Homo sapiens
aatagtggactggtt

SEQ ID NO: 1131448 - DNA, 15 bp, Homo sapiens
caatagtggactggt

SEQ ID NO: 1131449 - DNA, 15 bp, Homo sapiens
tcaatagtggactgg

SEQ ID NO: 1131450 - DNA, 15 bp, Homo sapiens
atcaatagtggactg

SEQ ID NO: 1131451 - DNA, 15 bp, Homo sapiens
tatcaatagtggact

SEQ ID NO: 1131452 - DNA, 15 bp, Homo sapiens
ctatcaatagtggac

SEQ ID NO: 1131453 - DNA, 15 bp, Homo sapiens
tctatcaatagtgga

SEQ ID NO: 1131454 - DNA, 15 bp, Homo sapiens
gtctatcaatagtgg

SEQ ID NO: 1131455 - DNA, 15 bp, Homo sapiens
tgtctatcaatagtg

SEQ ID NO: 1131456 - DNA, 15 bp, Homo sapiens
gtgtctatcaatagt

SEQ ID NO: 1131457 - DNA, 15 bp, Homo sapiens
agtgtctatcaatag

SEQ ID NO: 1131458 - DNA, 15 bp, Homo sapiens
tagtgtctatcaata

SEQ ID NO: 1131459 - DNA, 15 bp, Homo sapiens
atagtgtctatcaat

SEQ ID NO: 1131460 - DNA, 15 bp, Homo sapiens
aatagtgtctatcaa

SEQ ID NO: 1131461 - DNA, 15 bp, Homo sapiens
aaatagtgtctatca

SEQ ID NO: 1131462 - DNA, 15 bp, Homo sapiens
aaaatagtgtctatc

SEQ ID NO: 1131463 - DNA, 15 bp, Homo sapiens
caaaatagtgtctat

SEQ ID NO: 1131464 - DNA, 15 bp, Homo sapiens
acaaaatagtgtcta

SEQ ID NO: 1131465 - DNA, 15 bp, Homo sapiens
aacaaaatagtgtct

SEQ ID NO: 1131466 - DNA, 15 bp, Homo sapiens
gaacaaaatagtgtc

SEQ ID NO: 1131467 - DNA, 15 bp, Homo sapiens
agaacaaaatagtgt

SEQ ID NO: 1131468 - DNA, 15 bp, Homo sapiens
aagaacaaaatagtg

SEQ ID NO: 1131469 - DNA, 15 bp, Homo sapiens
taagaacaaaatagt

SEQ ID NO: 1131470 - DNA, 15 bp, Homo sapiens
gtaagaacaaaatag

SEQ ID NO: 1131471 - DNA, 15 bp, Homo sapiens
ggtaagaacaaaata

SEQ ID NO: 1131472 - DNA, 15 bp, Homo sapiens
cggtaagaacaaaat

SEQ ID NO: 1131473 - DNA, 15 bp, Homo sapiens
tcggtaagaacaaaa

SEQ ID NO: 1131474 - DNA, 15 bp, Homo sapiens
gtcggtaagaacaaa

SEQ ID NO: 1131475 - DNA, 15 bp, Homo sapiens
agtcggtaagaacaa

SEQ ID NO: 1131476 - DNA, 15 bp, Homo sapiens
cagtcggtaagaaca

SEQ ID NO: 1131477 - DNA, 15 bp, Homo sapiens
acagtcggtaagaac

SEQ ID NO: 1131478 - DNA, 15 bp, Homo sapiens
tacagtcggtaagaa

SEQ ID NO: 1131479 - DNA, 15 bp, Homo sapiens
gtacagtcggtaaga

SEQ ID NO: 1131480 - DNA, 15 bp, Homo sapiens
agtacagtcggtaag

SEQ ID NO: 1131481 - DNA, 15 bp, Homo sapiens
tagtacagtcggtaa

SEQ ID NO: 1131482 - DNA, 15 bp, Homo sapiens
ctagtacagtcggta

SEQ ID NO: 1131483 - DNA, 15 bp, Homo sapiens
tctagtacagtcggt

SEQ ID NO: 1131484 - DNA, 15 bp, Homo sapiens
ttctagtacagtcgg

SEQ ID NO: 1131485 - DNA, 15 bp, Homo sapiens
cttctagtacagtcg

SEQ ID NO: 1131486 - DNA, 15 bp, Homo sapiens
tcttctagtacagtc

SEQ ID NO: 1131487 - DNA, 15 bp, Homo sapiens
ttcttctagtacagt

SEQ ID NO: 1131488 - DNA, 15 bp, Homo sapiens
tttcttctagtacag

SEQ ID NO: 1131489 - DNA, 15 bp, Homo sapiens
gtttcttctagtaca

SEQ ID NO: 1131490 - DNA, 15 bp, Homo sapiens
tgtttcttctagtac

SEQ ID NO: 1131491 - DNA, 15 bp, Homo sapiens
atgtttcttctagta

SEQ ID NO: 1131492 - DNA, 15 bp, Homo sapiens
aatgtttcttctagt

SEQ ID NO: 1131493 - DNA, 15 bp, Homo sapiens
gaatgtttcttctag

SEQ ID NO: 1131494 - DNA, 15 bp, Homo sapiens
agaatgtttcttcta

SEQ ID NO: 1131495 - DNA, 15 bp, Homo sapiens
aagaatgtttcttct

SEQ ID NO: 1131496 - DNA, 15 bp, Homo sapiens
aaagaatgtttcttc

SEQ ID NO: 1131497 - DNA, 15 bp, Homo sapiens
aaaagaatgtttctt

SEQ ID NO: 1131498 - DNA, 15 bp, Homo sapiens
taaaagaatgtttct

SEQ ID NO: 1131499 - DNA, 15 bp, Homo sapiens
gtaaaagaatgtttc

SEQ ID NO: 1131500 - DNA, 15 bp, Homo sapiens
tgtaaaagaatgttt

SEQ ID NO: 1131501 - DNA, 15 bp, Homo sapiens
atgtaaaagaatgtt

SEQ ID NO: 1131502 - DNA, 15 bp, Homo sapiens
catgtaaaagaatgt

SEQ ID NO: 1131503 - DNA, 15 bp, Homo sapiens
acatgtaaaagaatg

SEQ ID NO: 1131504 - DNA, 15 bp, Homo sapiens
aacatgtaaaagaat

SEQ ID NO: 1131505 - DNA, 15 bp, Homo sapiens
aaacatgtaaaagaa

SEQ ID NO: 1131506 - DNA, 15 bp, Homo sapiens
caaacatgtaaaaga

SEQ ID NO: 1131507 - DNA, 15 bp, Homo sapiens
ccaaacatgtaaaag

SEQ ID NO: 1131508 - DNA, 15 bp, Homo sapiens
accaaacatgtaaaa

SEQ ID NO: 1131509 - DNA, 15 bp, Homo sapiens
taccaaacatgtaaa

SEQ ID NO: 1131510 - DNA, 15 bp, Homo sapiens
gtaccaaacatgtaa

SEQ ID NO: 1131511 - DNA, 15 bp, Homo sapiens
agtaccaaacatgta

SEQ ID NO: 1131512 - DNA, 15 bp, Homo sapiens
aagtaccaaacatgt

SEQ ID NO: 1131513 - DNA, 15 bp, Homo sapiens
caagtaccaaacatg

SEQ ID NO: 1131514 - DNA, 15 bp, Homo sapiens
acaagtaccaaacat

SEQ ID NO: 1131515 - DNA, 15 bp, Homo sapiens
aacaagtaccaaaca

SEQ ID NO: 1131516 - DNA, 15 bp, Homo sapiens
gaacaagtaccaaac

SEQ ID NO: 1131517 - DNA, 15 bp, Homo sapiens
tgaacaagtaccaaa

SEQ ID NO: 1131518 - DNA, 15 bp, Homo sapiens
ctgaacaagtaccaa

SEQ ID NO: 1131519 - DNA, 15 bp, Homo sapiens
gctgaacaagtacca

SEQ ID NO: 1131520 - DNA, 15 bp, Homo sapiens
agctgaacaagtacc

SEQ ID NO: 1131521 - DNA, 15 bp, Homo sapiens
aagctgaacaagtac

SEQ ID NO: 1131522 - DNA, 15 bp, Homo sapiens
aaagctgaacaagta

SEQ ID NO: 1131523 - DNA, 15 bp, Homo sapiens
taaagctgaacaagt

SEQ ID NO: 1131524 - DNA, 15 bp, Homo sapiens
ataaagctgaacaag

SEQ ID NO: 1131525 - DNA, 15 bp, Homo sapiens
aataaagctgaacaa

SEQ ID NO: 1131526 - DNA, 15 bp, Homo sapiens
gaataaagctgaaca

SEQ ID NO: 1131527 - DNA, 15 bp, Homo sapiens
tgaataaagctgaac

SEQ ID NO: 1131528 - DNA, 15 bp, Homo sapiens
ttgaataaagctgaa

SEQ ID NO: 1131529 - DNA, 15 bp, Homo sapiens
cttgaataaagctga

SEQ ID NO: 1131530 - DNA, 15 bp, Homo sapiens
acttgaataaagctg

SEQ ID NO: 1131531 - DNA, 15 bp, Homo sapiens
cacttgaataaagct

SEQ ID NO: 1131532 - DNA, 15 bp, Homo sapiens
ccacttgaataaagc

SEQ ID NO: 1131533 - DNA, 15 bp, Homo sapiens
tccacttgaataaag

SEQ ID NO: 1131534 - DNA, 15 bp, Homo sapiens
ttccacttgaataaa

SEQ ID NO: 1131535 - DNA, 15 bp, Homo sapiens
attccacttgaataa

SEQ ID NO: 1131536 - DNA, 15 bp, Homo sapiens
aattccacttgaata

SEQ ID NO: 1131537 - DNA, 15 bp, Homo sapiens
aaattccacttgaat

SEQ ID NO: 1131538 - DNA, 15 bp, Homo sapiens
gaaattccacttgaa

SEQ ID NO: 1131539 - DNA, 15 bp, Homo sapiens
agaaattccacttga

SEQ ID NO: 1131540 - DNA, 15 bp, Homo sapiens
cagaaattccacttg

SEQ ID NO: 1131541 - DNA, 15 bp, Homo sapiens
ccagaaattccactt

SEQ ID NO: 1131542 - DNA, 15 bp, Homo sapiens
cccagaaattccact

SEQ ID NO: 1131543 - DNA, 15 bp, Homo sapiens
acccagaaattccac

SEQ ID NO: 1131544 - DNA, 15 bp, Homo sapiens
gacccagaaattcca

SEQ ID NO: 1131545 - DNA, 15 bp, Homo sapiens
tgacccagaaattcc

SEQ ID NO: 1131546 - DNA, 15 bp, Homo sapiens
ttgacccagaaattc

SEQ ID NO: 1131547 - DNA, 15 bp, Homo sapiens
cttgacccagaaatt

SEQ ID NO: 1131548 - DNA, 15 bp, Homo sapiens
ccttgacccagaaat

SEQ ID NO: 1131549 - DNA, 15 bp, Homo sapiens
cccttgacccagaaa

SEQ ID NO: 1131550 - DNA, 15 bp, Homo sapiens
ccccttgacccagaa

SEQ ID NO: 1131551 - DNA, 15 bp, Homo sapiens
tccccttgacccaga

SEQ ID NO: 1131552 - DNA, 15 bp, Homo sapiens
ttccccttgacccag

SEQ ID NO: 1131553 - DNA, 15 bp, Homo sapiens
tttccccttgaccca

SEQ ID NO: 1131554 - DNA, 15 bp, Homo sapiens
ctttccccttgaccc

SEQ ID NO: 1131555 - DNA, 15 bp, Homo sapiens
tctttccccttgacc

SEQ ID NO: 1131556 - DNA, 15 bp, Homo sapiens
ctctttccccttgac

SEQ ID NO: 1131557 - DNA, 15 bp, Homo sapiens
actctttccccttga

SEQ ID NO: 1131558 - DNA, 15 bp, Homo sapiens
aactctttccccttg

SEQ ID NO: 1131559 - DNA, 15 bp, Homo sapiens
aaactctttcccctt

SEQ ID NO: 1131560 - DNA, 15 bp, Homo sapiens
taaactctttcccct

SEQ ID NO: 1131561 - DNA, 15 bp, Homo sapiens
ataaactctttcccc

SEQ ID NO: 1131562 - DNA, 15 bp, Homo sapiens
aataaactctttccc

SEQ ID NO: 1131563 - DNA, 15 bp, Homo sapiens
caataaactctttcc

SEQ ID NO: 1131564 - DNA, 15 bp, Homo sapiens
tcaataaactctttc

SEQ ID NO: 1131565 - DNA, 15 bp, Homo sapiens
ttcaataaactcttt

SEQ ID NO: 1131566 - DNA, 15 bp, Homo sapiens
attcaataaactctt

SEQ ID NO: 1131567 - DNA, 15 bp, Homo sapiens
tattcaataaactct

SEQ ID NO: 1131568 - DNA, 15 bp, Homo sapiens
atattcaataaactc

SEQ ID NO: 1131569 - DNA, 15 bp, Homo sapiens
aatattcaataaact

SEQ ID NO: 1131570 - DNA, 15 bp, Homo sapiens
aaaatattcaataaa

SEQ ID NO: 1131571 - DNA, 15 bp, Homo sapiens
caaaatattcaataa

SEQ ID NO: 1131572 - DNA, 15 bp, Homo sapiens
ccaaaatattcaata

SEQ ID NO: 1131573 - DNA, 15 bp, Homo sapiens
accaaaatattcaat

SEQ ID NO: 1131574 - DNA, 15 bp, Homo sapiens
taccaaaatattcaa

SEQ ID NO: 1131575 - DNA, 15 bp, Homo sapiens
ataccaaaatattca

SEQ ID NO: 1131576 - DNA, 15 bp, Homo sapiens
aataccaaaatattc

SEQ ID NO: 1131577 - DNA, 15 bp, Homo sapiens
caataccaaaatatt

SEQ ID NO: 1131578 - DNA, 15 bp, Homo sapiens
gcaataccaaaatat

SEQ ID NO: 1131579 - DNA, 15 bp, Homo sapiens
ggcaataccaaaata

SEQ ID NO: 1131580 - DNA, 15 bp, Homo sapiens
tggcaataccaaaat

SEQ ID NO: 1131581 - DNA, 15 bp, Homo sapiens
ttggcaataccaaaa

SEQ ID NO: 1131582 - DNA, 15 bp, Homo sapiens
tttggcaataccaaa

SEQ ID NO: 1131583 - DNA, 15 bp, Homo sapiens
atttggcaataccaa

SEQ ID NO: 1131584 - DNA, 15 bp, Homo sapiens
aatttggcaatacca

SEQ ID NO: 1131585 - DNA, 15 bp, Homo sapiens
aaatttggcaatacc

SEQ ID NO: 1131586 - DNA, 15 bp, Homo sapiens
aaaatttggcaatac

SEQ ID NO: 1131587 - DNA, 15 bp, Homo sapiens
ctgcatttttaatat

SEQ ID NO: 1131588 - DNA, 15 bp, Homo sapiens
tctgcatttttaata

SEQ ID NO: 1131589 - DNA, 15 bp, Homo sapiens
ttctgcatttttaat

SEQ ID NO: 1131590 - DNA, 15 bp, Homo sapiens
tttctgcatttttaa

SEQ ID NO: 1131591 - DNA, 15 bp, Homo sapiens
ttttctgcattttta

SEQ ID NO: 1131592 - DNA, 15 bp, Homo sapiens
attttctgcattttt

SEQ ID NO: 1131593 - DNA, 15 bp, Homo sapiens
tattttctgcatttt

SEQ ID NO: 1131594 - DNA, 15 bp, Homo sapiens
atattttctgcattt

SEQ ID NO: 1131595 - DNA, 15 bp, Homo sapiens
aatattttctgcatt

SEQ ID NO: 1131596 - DNA, 15 bp, Homo sapiens
caatattttctgcat

SEQ ID NO: 1131597 - DNA, 15 bp, Homo sapiens
ccaatattttctgca

SEQ ID NO: 1131598 - DNA, 15 bp, Homo sapiens
tccaatattttctgc

SEQ ID NO: 1131599 - DNA, 15 bp, Homo sapiens
ctccaatattttctg

SEQ ID NO: 1131600 - DNA, 15 bp, Homo sapiens
actccaatattttct

SEQ ID NO: 1131601 - DNA, 15 bp, Homo sapiens
tactccaatattttc

SEQ ID NO: 1131602 - DNA, 15 bp, Homo sapiens
atactccaatatttt

SEQ ID NO: 1131603 - DNA, 15 bp, Homo sapiens
aatactccaatattt

SEQ ID NO: 1131604 - DNA, 15 bp, Homo sapiens
aaatactccaatatt

SEQ ID NO: 1131605 - DNA, 15 bp, Homo sapiens
aaaatactccaatat

SEQ ID NO: 1131606 - DNA, 15 bp, Homo sapiens
taaaatactccaata

SEQ ID NO: 1131607 - DNA, 15 bp, Homo sapiens
ataaaatactccaat

SEQ ID NO: 1131608 - DNA, 15 bp, Homo sapiens
aataaaatactccaa

SEQ ID NO: 1131609 - DNA, 15 bp, Homo sapiens
aaataaaatactcca

SEQ ID NO: 1131610 - DNA, 15 bp, Homo sapiens
aaaataaaatactcc

SEQ ID NO: 1131611 - DNA, 15 bp, Homo sapiens
taaaataaaatactc

SEQ ID NO: 1131612 - DNA, 15 bp, Homo sapiens
ttaaaataaaatact

SEQ ID NO: 1131613 - DNA, 15 bp, Homo sapiens
tttaaaataaaatac

SEQ ID NO: 1131614 - DNA, 15 bp, Homo sapiens
atttaaaataaaata

SEQ ID NO: 1131615 - DNA, 15 bp, Homo sapiens
tatttaaaataaaat

SEQ ID NO: 1131616 - DNA, 15 bp, Homo sapiens
ttatttaaaataaaa

SEQ ID NO: 1131617 - DNA, 15 bp, Homo sapiens
tttatttaaaataaa

SEQ ID NO: 1131618 - DNA, 15 bp, Homo sapiens
atttatttaaaataa

SEQ ID NO: 1131619 - DNA, 15 bp, Homo sapiens
aatttatttaaaata

SEQ ID NO: 1131620 - DNA, 15 bp, Homo sapiens
caatttatttaaaat

SEQ ID NO: 1131621 - DNA, 15 bp, Homo sapiens
acaatttatttaaaa

SEQ ID NO: 1131622 - DNA, 15 bp, Homo sapiens
tacaatttatttaaa

SEQ ID NO: 1131623 - DNA, 15 bp, Homo sapiens
atacaatttatttaa

SEQ ID NO: 1131624 - DNA, 15 bp, Homo sapiens
aatacaatttattta

SEQ ID NO: 1131625 - DNA, 15 bp, Homo sapiens
gaatacaatttattt

SEQ ID NO: 1131626 - DNA, 15 bp, Homo sapiens
agaatacaatttatt

SEQ ID NO: 1131627 - DNA, 15 bp, Homo sapiens
cagaatacaatttat

SEQ ID NO: 1131628 - DNA, 15 bp, Homo sapiens
acagaatacaattta

SEQ ID NO: 1131629 - DNA, 15 bp, Homo sapiens
tacagaatacaattt

SEQ ID NO: 1131630 - DNA, 15 bp, Homo sapiens
atacagaatacaatt

SEQ ID NO: 1131631 - DNA, 15 bp, Homo sapiens
tatacagaatacaat

SEQ ID NO: 1131632 - DNA, 15 bp, Homo sapiens
atatacagaatacaa

SEQ ID NO: 1131633 - DNA, 15 bp, Homo sapiens
aatatacagaataca

SEQ ID NO: 1131634 - DNA, 15 bp, Homo sapiens
aaatatacagaatac

SEQ ID NO: 1131635 - DNA, 15 bp, Homo sapiens
taaatatacagaata

SEQ ID NO: 1131636 - DNA, 15 bp, Homo sapiens
ttaaatatacagaat

SEQ ID NO: 1131637 - DNA, 15 bp, Homo sapiens
cttaaatatacagaa

SEQ ID NO: 1131638 - DNA, 15 bp, Homo sapiens
ccttaaatatacaga

SEQ ID NO: 1131639 - DNA, 15 bp, Homo sapiens
accttaaatatacag

SEQ ID NO: 1131640 - DNA, 15 bp, Homo sapiens
taccttaaatataca

SEQ ID NO: 1131641 - DNA, 15 bp, Homo sapiens
ataccttaaatatac

SEQ ID NO: 1131642 - DNA, 15 bp, Homo sapiens
tataccttaaatata

SEQ ID NO: 1131643 - DNA, 15 bp, Homo sapiens
gtataccttaaatat

SEQ ID NO: 1131644 - DNA, 15 bp, Homo sapiens
tgtataccttaaata

SEQ ID NO: 1131645 - DNA, 15 bp, Homo sapiens
ttgtataccttaaat

SEQ ID NO: 1131646 - DNA, 15 bp, Homo sapiens
gttgtataccttaaa

SEQ ID NO: 1131647 - DNA, 15 bp, Homo sapiens
tgttgtataccttaa

SEQ ID NO: 1131648 - DNA, 15 bp, Homo sapiens
atgttgtatacctta

SEQ ID NO: 1131649 - DNA, 15 bp, Homo sapiens
catgttgtatacctt

SEQ ID NO: 1131650 - DNA, 15 bp, Homo sapiens
tcatgttgtatacct

SEQ ID NO: 1131651 - DNA, 15 bp, Homo sapiens
atcatgttgtatacc

SEQ ID NO: 1131652 - DNA, 15 bp, Homo sapiens
catcatgttgtatac

SEQ ID NO: 1131653 - DNA, 15 bp, Homo sapiens
acatcatgttgtata

SEQ ID NO: 1131654 - DNA, 15 bp, Homo sapiens
aacatcatgttgtat

SEQ ID NO: 1131655 - DNA, 15 bp, Homo sapiens
taacatcatgttgta

SEQ ID NO: 1131656 - DNA, 15 bp, Homo sapiens
ataacatcatgttgt

SEQ ID NO: 1131657 - DNA, 15 bp, Homo sapiens
cataacatcatgttg

SEQ ID NO: 1131658 - DNA, 15 bp, Homo sapiens
ccataacatcatgtt

SEQ ID NO: 1131659 - DNA, 15 bp, Homo sapiens
cccataacatcatgt

SEQ ID NO: 1131660 - DNA, 15 bp, Homo sapiens
tcccataacatcatg

SEQ ID NO: 1131661 - DNA, 15 bp, Homo sapiens
atcccataacatcat

SEQ ID NO: 1131662 - DNA, 15 bp, Homo sapiens
tatcccataacatca

SEQ ID NO: 1131663 - DNA, 15 bp, Homo sapiens
gtatcccataacatc

SEQ ID NO: 1131664 - DNA, 15 bp, Homo sapiens
tgtatcccataacat

SEQ ID NO: 1131665 - DNA, 15 bp, Homo sapiens
atgtatcccataaca

SEQ ID NO: 1131666 - DNA, 15 bp, Homo sapiens
tatgtatcccataac

SEQ ID NO: 1131667 - DNA, 15 bp, Homo sapiens
atatgtatcccataa

SEQ ID NO: 1131668 - DNA, 15 bp, Homo sapiens
tatatgtatcccata

SEQ ID NO: 1131669 - DNA, 15 bp, Homo sapiens
ctatatgtatcccat

SEQ ID NO: 1131670 - DNA, 15 bp, Homo sapiens
cctatatgtatccca

SEQ ID NO: 1131671 - DNA, 15 bp, Homo sapiens
acctatatgtatccc

SEQ ID NO: 1131672 - DNA, 15 bp, Homo sapiens
cacctatatgtatcc

SEQ ID NO: 1131673 - DNA, 15 bp, Homo sapiens
ccacctatatgtatc

SEQ ID NO: 1131674 - DNA, 15 bp, Homo sapiens
accacctatatgtat

SEQ ID NO: 1131675 - DNA, 15 bp, Homo sapiens
aaccacctatatgta

SEQ ID NO: 1131676 - DNA, 15 bp, Homo sapiens
taaccacctatatgt

SEQ ID NO: 1131677 - DNA, 15 bp, Homo sapiens
ttaaccacctatatg

SEQ ID NO: 1131678 - DNA, 15 bp, Homo sapiens
tttaaccacctatat

SEQ ID NO: 1131679 - DNA, 15 bp, Homo sapiens
ttttaaccacctata

SEQ ID NO: 1131680 - DNA, 15 bp, Homo sapiens
cttttaaccacctat

SEQ ID NO: 1131681 - DNA, 15 bp, Homo sapiens
tcttttaaccaccta

SEQ ID NO: 1131682 - DNA, 15 bp, Homo sapiens
atcttttaaccacct

SEQ ID NO: 1131683 - DNA, 15 bp, Homo sapiens
aatcttttaaccacc

SEQ ID NO: 1131684 - DNA, 15 bp, Homo sapiens
taatcttttaaccac

SEQ ID NO: 1131685 - DNA, 15 bp, Homo sapiens
gtaatcttttaacca

SEQ ID NO: 1131686 - DNA, 15 bp, Homo sapiens
agtaatcttttaacc

SEQ ID NO: 1131687 - DNA, 15 bp, Homo sapiens
cagtaatcttttaac

SEQ ID NO: 1131688 - DNA, 15 bp, Homo sapiens
gcagtaatcttttaa

SEQ ID NO: 1131689 - DNA, 15 bp, Homo sapiens
tgcagtaatctttta

SEQ ID NO: 1131690 - DNA, 15 bp, Homo sapiens
ctgcagtaatctttt

SEQ ID NO: 1131691 - DNA, 15 bp, Homo sapiens
actgcagtaatcttt

SEQ ID NO: 1131692 - DNA, 15 bp, Homo sapiens
cactgcagtaatctt

SEQ ID NO: 1131693 - DNA, 15 bp, Homo sapiens
ttcactgcagtaatc

SEQ ID NO: 1131694 - DNA, 15 bp, Homo sapiens
cttcactgcagtaat

SEQ ID NO: 1131695 - DNA, 15 bp, Homo sapiens
gcttcactgcagtaa

SEQ ID NO: 1131696 - DNA, 15 bp, Homo sapiens
tgcttcactgcagta

SEQ ID NO: 1131697 - DNA, 15 bp, Homo sapiens
ttgcttcactgcagt

SEQ ID NO: 1131698 - DNA, 15 bp, Homo sapiens
tttgcttcactgcag

SEQ ID NO: 1131699 - DNA, 15 bp, Homo sapiens
atttgcttcactgca

SEQ ID NO: 1131700 - DNA, 15 bp, Homo sapiens
aatttgcttcactgc

SEQ ID NO: 1131701 - DNA, 15 bp, Homo sapiens
taatttgcttcactg

SEQ ID NO: 1131702 - DNA, 15 bp, Homo sapiens
ttaatttgcttcact

SEQ ID NO: 1131703 - DNA, 15 bp, Homo sapiens
gttaatttgcttcac

SEQ ID NO: 1131704 - DNA, 15 bp, Homo sapiens
cgttaatttgcttca

SEQ ID NO: 1131705 - DNA, 15 bp, Homo sapiens
acgttaatttgcttc

SEQ ID NO: 1131706 - DNA, 15 bp, Homo sapiens
tacgttaatttgctt

SEQ ID NO: 1131707 - DNA, 15 bp, Homo sapiens
atacgttaatttgct

SEQ ID NO: 1131708 - DNA, 15 bp, Homo sapiens
gatacgttaatttgc

SEQ ID NO: 1131709 - DNA, 15 bp, Homo sapiens
ggatacgttaatttg

SEQ ID NO: 1131710 - DNA, 15 bp, Homo sapiens
gggatacgttaattt

SEQ ID NO: 1131711 - DNA, 15 bp, Homo sapiens
agggatacgttaatt

SEQ ID NO: 1131712 - DNA, 15 bp, Homo sapiens
gagggatacgttaat

SEQ ID NO: 1131713 - DNA, 15 bp, Homo sapiens
tgagggatacgttaa

SEQ ID NO: 1131714 - DNA, 15 bp, Homo sapiens
ttgagggatacgtta

SEQ ID NO: 1131715 - DNA, 15 bp, Homo sapiens
gttgagggatacgtt

SEQ ID NO: 1131716 - DNA, 15 bp, Homo sapiens
agttgagggatacgt

SEQ ID NO: 1131717 - DNA, 15 bp, Homo sapiens
gagttgagggatacg

SEQ ID NO: 1131718 - DNA, 15 bp, Homo sapiens
tgagttgagggatac

SEQ ID NO: 1131719 - DNA, 15 bp, Homo sapiens
gtgagttgagggata

SEQ ID NO: 1131720 - DNA, 15 bp, Homo sapiens
tgtgagttgagggat

SEQ ID NO: 1131721 - DNA, 15 bp, Homo sapiens
atgtgagttgaggga

SEQ ID NO: 1131722 - DNA, 15 bp, Homo sapiens
tatgtgagttgaggg

SEQ ID NO: 1131723 - DNA, 15 bp, Homo sapiens
ctatgtgagttgagg

SEQ ID NO: 1131724 - DNA, 15 bp, Homo sapiens
actatgtgagttgag

SEQ ID NO: 1131725 - DNA, 15 bp, Homo sapiens
aactatgtgagttga

SEQ ID NO: 1131726 - DNA, 15 bp, Homo sapiens
taactatgtgagttg

SEQ ID NO: 1131727 - DNA, 15 bp, Homo sapiens
gtaactatgtgagtt

SEQ ID NO: 1131728 - DNA, 15 bp, Homo sapiens
ggtaactatgtgagt

SEQ ID NO: 1131729 - DNA, 15 bp, Homo sapiens
gggtaactatgtgag

SEQ ID NO: 1131730 - DNA, 15 bp, Homo sapiens
tgggtaactatgtga

SEQ ID NO: 1131731 - DNA, 15 bp, Homo sapiens
atgggtaactatgtg

SEQ ID NO: 1131732 - DNA, 15 bp, Homo sapiens
aatgggtaactatgt

SEQ ID NO: 1131733 - DNA, 15 bp, Homo sapiens
aaatgggtaactatg

SEQ ID NO: 1131734 - DNA, 15 bp, Homo sapiens
aaaatgggtaactat

SEQ ID NO: 1131735 - DNA, 15 bp, Homo sapiens
aaaaatgggtaacta

SEQ ID NO: 1131736 - DNA, 15 bp, Homo sapiens
aaaaaatgggtaact

SEQ ID NO: 1131737 - DNA, 15 bp, Homo sapiens
aaaaaaatgggtaac

SEQ ID NO: 1131738 - DNA, 15 bp, Homo sapiens
aaaaaaaatgggtaa

SEQ ID NO: 1131739 - DNA, 15 bp, Homo sapiens
aaaaaaaaatgggta

SEQ ID NO: 1131740 - DNA, 15 bp, Homo sapiens
aaaaaaaaaatgggt

SEQ ID NO: 1131741 - DNA, 15 bp, Homo sapiens
caaaaaaaaaatggg

SEQ ID NO: 1131742 - DNA, 15 bp, Homo sapiens
acaaaaaaaaaatgg

SEQ ID NO: 1131743 - DNA, 15 bp, Homo sapiens
aacaaaaaaaaaatg

SEQ ID NO: 1131744 - DNA, 15 bp, Homo sapiens
ccaaaacaaaaaaaa

SEQ ID NO: 1131745 - DNA, 15 bp, Homo sapiens
accaaaacaaaaaaa

SEQ ID NO: 1131746 - DNA, 15 bp, Homo sapiens
caccaaaacaaaaaa

SEQ ID NO: 1131747 - DNA, 15 bp, Homo sapiens
ccaccaaaacaaaaa

SEQ ID NO: 1131748 - DNA, 15 bp, Homo sapiens
gccaccaaaacaaaa

SEQ ID NO: 1131749 - DNA, 15 bp, Homo sapiens
tgccaccaaaacaaa

SEQ ID NO: 1131750 - DNA, 15 bp, Homo sapiens
ttgccaccaaaacaa

SEQ ID NO: 1131751 - DNA, 15 bp, Homo sapiens
cttgccaccaaaaca

SEQ ID NO: 1131752 - DNA, 15 bp, Homo sapiens
tcttgccaccaaaac

SEQ ID NO: 1131753 - DNA, 15 bp, Homo sapiens
ctcttgccaccaaaa

SEQ ID NO: 1131754 - DNA, 15 bp, Homo sapiens
cctcttgccaccaaa

SEQ ID NO: 1131755 - DNA, 15 bp, Homo sapiens
tcctcttgccaccaa

SEQ ID NO: 1131756 - DNA, 15 bp, Homo sapiens
ctcctcttgccacca

SEQ ID NO: 1131757 - DNA, 15 bp, Homo sapiens
gctcctcttgccacc

SEQ ID NO: 1131758 - DNA, 15 bp, Homo sapiens
agctcctcttgccac

SEQ ID NO: 1131759 - DNA, 15 bp, Homo sapiens
aagctcctcttgcca

SEQ ID NO: 1131760 - DNA, 15 bp, Homo sapiens
taagctcctcttgcc

SEQ ID NO: 1131761 - DNA, 15 bp, Homo sapiens
ttaagctcctcttgc

SEQ ID NO: 1131762 - DNA, 15 bp, Homo sapiens
tttaagctcctcttg

SEQ ID NO: 1131763 - DNA, 15 bp, Homo sapiens
ttttaagctcctctt

SEQ ID NO: 1131764 - DNA, 15 bp, Homo sapiens
attttaagctcctct

SEQ ID NO: 1131765 - DNA, 15 bp, Homo sapiens
gattttaagctcctc

SEQ ID NO: 1131766 - DNA, 15 bp, Homo sapiens
agattttaagctcct

SEQ ID NO: 1131767 - DNA, 15 bp, Homo sapiens
gagattttaagctcc

SEQ ID NO: 1131768 - DNA, 15 bp, Homo sapiens
tgagattttaagctc

SEQ ID NO: 1131769 - DNA, 15 bp, Homo sapiens
atgagattttaagct

SEQ ID NO: 1131770 - DNA, 15 bp, Homo sapiens
aatgagattttaagc

SEQ ID NO: 1131771 - DNA, 15 bp, Homo sapiens
aaatgagattttaag

SEQ ID NO: 1131772 - DNA, 15 bp, Homo sapiens
taaatgagattttaa

SEQ ID NO: 1131773 - DNA, 15 bp, Homo sapiens
ctaaatgagatttta

SEQ ID NO: 1131774 - DNA, 15 bp, Homo sapiens
actaaatgagatttt

SEQ ID NO: 1131775 - DNA, 15 bp, Homo sapiens
cactaaatgagattt

SEQ ID NO: 1131776 - DNA, 15 bp, Homo sapiens
acactaaatgagatt

SEQ ID NO: 1131777 - DNA, 15 bp, Homo sapiens
cacactaaatgagat

SEQ ID NO: 1131778 - DNA, 15 bp, Homo sapiens
tcacactaaatgaga

SEQ ID NO: 1131779 - DNA, 15 bp, Homo sapiens
ttcacactaaatgag

SEQ ID NO: 1131780 - DNA, 15 bp, Homo sapiens
attcacactaaatga

SEQ ID NO: 1131781 - DNA, 15 bp, Homo sapiens
gattcacactaaatg

SEQ ID NO: 1131782 - DNA, 15 bp, Homo sapiens
ggattcacactaaat

SEQ ID NO: 1131783 - DNA, 15 bp, Homo sapiens
gggattcacactaaa

SEQ ID NO: 1131784 - DNA, 15 bp, Homo sapiens
tgggattcacactaa

SEQ ID NO: 1131785 - DNA, 15 bp, Homo sapiens
ttgggattcacacta

SEQ ID NO: 1131786 - DNA, 15 bp, Homo sapiens
tttgggattcacact

SEQ ID NO: 1131787 - DNA, 15 bp, Homo sapiens
atttgggattcacac

SEQ ID NO: 1131788 - DNA, 15 bp, Homo sapiens
tatttgggattcaca

SEQ ID NO: 1131789 - DNA, 15 bp, Homo sapiens
gtatttgggattcac

SEQ ID NO: 1131790 - DNA, 15 bp, Homo sapiens
tgtatttgggattca

SEQ ID NO: 1131791 - DNA, 15 bp, Homo sapiens
ctgtatttgggattc

SEQ ID NO: 1131792 - DNA, 15 bp, Homo sapiens
gctgtatttgggatt

SEQ ID NO: 1131793 - DNA, 15 bp, Homo sapiens
tgctgtatttgggat

SEQ ID NO: 1131794 - DNA, 15 bp, Homo sapiens
gtgctgtatttggga

SEQ ID NO: 1131795 - DNA, 15 bp, Homo sapiens
tgtgctgtatttggg

SEQ ID NO: 1131796 - DNA, 15 bp, Homo sapiens
ttgtgctgtatttgg

SEQ ID NO: 1131797 - DNA, 15 bp, Homo sapiens
attgtgctgtatttg

SEQ ID NO: 1131798 - DNA, 15 bp, Homo sapiens
aattgtgctgtattt

SEQ ID NO: 1131799 - DNA, 15 bp, Homo sapiens
aaattgtgctgtatt

SEQ ID NO: 1131800 - DNA, 15 bp, Homo sapiens
aaaattgtgctgtat

SEQ ID NO: 1131801 - DNA, 15 bp, Homo sapiens
taaaattgtgctgta

SEQ ID NO: 1131802 - DNA, 15 bp, Homo sapiens
ataaaattgtgctgt

SEQ ID NO: 1131803 - DNA, 15 bp, Homo sapiens
aataaaattgtgctg

SEQ ID NO: 1131804 - DNA, 15 bp, Homo sapiens
taataaaattgtgct

SEQ ID NO: 1131805 - DNA, 15 bp, Homo sapiens
gtaataaaattgtgc

SEQ ID NO: 1131806 - DNA, 15 bp, Homo sapiens
ggtaataaaattgtg

SEQ ID NO: 1131807 - DNA, 15 bp, Homo sapiens
aggtaataaaattgt

SEQ ID NO: 1131808 - DNA, 15 bp, Homo sapiens
taggtaataaaattg

SEQ ID NO: 1131809 - DNA, 15 bp, Homo sapiens
ataggtaataaaatt

SEQ ID NO: 1131810 - DNA, 15 bp, Homo sapiens
tataggtaataaaat

SEQ ID NO: 1131811 - DNA, 15 bp, Homo sapiens
atataggtaataaaa

SEQ ID NO: 1131812 - DNA, 15 bp, Homo sapiens
tatataggtaataaa

SEQ ID NO: 1131813 - DNA, 15 bp, Homo sapiens
gtatataggtaataa

SEQ ID NO: 1131814 - DNA, 15 bp, Homo sapiens
agtatataggtaata

SEQ ID NO: 1131815 - DNA, 15 bp, Homo sapiens
aagtatataggtaat

SEQ ID NO: 1131816 - DNA, 15 bp, Homo sapiens
gaagtatataggtaa

SEQ ID NO: 1131817 - DNA, 15 bp, Homo sapiens
tgaagtatataggta

SEQ ID NO: 1131818 - DNA, 15 bp, Homo sapiens
atgaagtatataggt

SEQ ID NO: 1131819 - DNA, 15 bp, Homo sapiens
catgaagtatatagg

SEQ ID NO: 1131820 - DNA, 15 bp, Homo sapiens
acatgaagtatatag

SEQ ID NO: 1131821 - DNA, 15 bp, Homo sapiens
aacatgaagtatata

SEQ ID NO: 1131822 - DNA, 15 bp, Homo sapiens
caacatgaagtatat

SEQ ID NO: 1131823 - DNA, 15 bp, Homo sapiens
acaacatgaagtata

SEQ ID NO: 1131824 - DNA, 15 bp, Homo sapiens
tacaacatgaagtat

SEQ ID NO: 1131825 - DNA, 15 bp, Homo sapiens
gtacaacatgaagta

SEQ ID NO: 1131826 - DNA, 15 bp, Homo sapiens
tgtacaacatgaagt

SEQ ID NO: 1131827 - DNA, 15 bp, Homo sapiens
atgtacaacatgaag

SEQ ID NO: 1131828 - DNA, 15 bp, Homo sapiens
aatgtacaacatgaa

SEQ ID NO: 1131829 - DNA, 15 bp, Homo sapiens
taatgtacaacatga

SEQ ID NO: 1131830 - DNA, 15 bp, Homo sapiens
ataatgtacaacatg

SEQ ID NO: 1131831 - DNA, 15 bp, Homo sapiens
tataatgtacaacat

SEQ ID NO: 1131832 - DNA, 15 bp, Homo sapiens
atataatgtacaaca

SEQ ID NO: 1131833 - DNA, 15 bp, Homo sapiens
aatataatgtacaac

SEQ ID NO: 1131834 - DNA, 15 bp, Homo sapiens
aaatataatgtacaa

SEQ ID NO: 1131835 - DNA, 15 bp, Homo sapiens
gaaatataatgtaca

SEQ ID NO: 1131836 - DNA, 15 bp, Homo sapiens
agaaatataatgtac

SEQ ID NO: 1131837 - DNA, 15 bp, Homo sapiens
tagaaatataatgta

SEQ ID NO: 1131838 - DNA, 15 bp, Homo sapiens
ctagaaatataatgt

SEQ ID NO: 1131839 - DNA, 15 bp, Homo sapiens
tctagaaatataatg

SEQ ID NO: 1131840 - DNA, 15 bp, Homo sapiens
gtctagaaatataat

SEQ ID NO: 1131841 - DNA, 15 bp, Homo sapiens
agtctagaaatataa

SEQ ID NO: 1131842 - DNA, 15 bp, Homo sapiens
aagtctagaaatata

SEQ ID NO: 1131843 - DNA, 15 bp, Homo sapiens
caagtctagaaatat

SEQ ID NO: 1131844 - DNA, 15 bp, Homo sapiens
acaagtctagaaata

SEQ ID NO: 1131845 - DNA, 15 bp, Homo sapiens
aacaagtctagaaat

SEQ ID NO: 1131846 - DNA, 15 bp, Homo sapiens
gaacaagtctagaaa

SEQ ID NO: 1131847 - DNA, 15 bp, Homo sapiens
tgaacaagtctagaa

SEQ ID NO: 1131848 - DNA, 15 bp, Homo sapiens
atgaacaagtctaga

SEQ ID NO: 1131849 - DNA, 15 bp, Homo sapiens
gatgaacaagtctag

SEQ ID NO: 1131850 - DNA, 15 bp, Homo sapiens
ggatgaacaagtcta

SEQ ID NO: 1131851 - DNA, 15 bp, Homo sapiens
aggatgaacaagtct

SEQ ID NO: 1131852 - DNA, 15 bp, Homo sapiens
taggatgaacaagtc

SEQ ID NO: 1131853 - DNA, 15 bp, Homo sapiens
gtaggatgaacaagt

SEQ ID NO: 1131854 - DNA, 15 bp, Homo sapiens
tgtaggatgaacaag

SEQ ID NO: 1131855 - DNA, 15 bp, Homo sapiens
atgtaggatgaacaa

SEQ ID NO: 1131856 - DNA, 15 bp, Homo sapiens
tatgtaggatgaaca

SEQ ID NO: 1131857 - DNA, 15 bp, Homo sapiens
atatgtaggatgaac

SEQ ID NO: 1131858 - DNA, 15 bp, Homo sapiens
gatatgtaggatgaa

SEQ ID NO: 1131859 - DNA, 15 bp, Homo sapiens
agatatgtaggatga

SEQ ID NO: 1131860 - DNA, 15 bp, Homo sapiens
cagatatgtaggatg

SEQ ID NO: 1131861 - DNA, 15 bp, Homo sapiens
gcagatatgtaggat

SEQ ID NO: 1131862 - DNA, 15 bp, Homo sapiens
agcagatatgtagga

SEQ ID NO: 1131863 - DNA, 15 bp, Homo sapiens
tagcagatatgtagg

SEQ ID NO: 1131864 - DNA, 15 bp, Homo sapiens
gtagcagatatgtag

SEQ ID NO: 1131865 - DNA, 15 bp, Homo sapiens
agtagcagatatgta

SEQ ID NO: 1131866 - DNA, 15 bp, Homo sapiens
aagtagcagatatgt

SEQ ID NO: 1131867 - DNA, 15 bp, Homo sapiens
aaagtagcagatatg

SEQ ID NO: 1131868 - DNA, 15 bp, Homo sapiens
caaagtagcagatat

SEQ ID NO: 1131869 - DNA, 15 bp, Homo sapiens
acaaagtagcagata

SEQ ID NO: 1131870 - DNA, 15 bp, Homo sapiens
tacaaagtagcagat

SEQ ID NO: 1131871 - DNA, 15 bp, Homo sapiens
atacaaagtagcaga

SEQ ID NO: 1131872 - DNA, 15 bp, Homo sapiens
gatacaaagtagcag

SEQ ID NO: 1131873 - DNA, 15 bp, Homo sapiens
ggatacaaagtagca

SEQ ID NO: 1131874 - DNA, 15 bp, Homo sapiens
aggatacaaagtagc

SEQ ID NO: 1131875 - DNA, 15 bp, Homo sapiens
gaggatacaaagtag

SEQ ID NO: 1131876 - DNA, 15 bp, Homo sapiens
agaggatacaaagta

SEQ ID NO: 1131877 - DNA, 15 bp, Homo sapiens
cagaggatacaaagt

SEQ ID NO: 1131878 - DNA, 15 bp, Homo sapiens
tcagaggatacaaag

SEQ ID NO: 1131879 - DNA, 15 bp, Homo sapiens
ctcagaggatacaaa

SEQ ID NO: 1131880 - DNA, 15 bp, Homo sapiens
gctcagaggatacaa

SEQ ID NO: 1131881 - DNA, 15 bp, Homo sapiens
agctcagaggataca

SEQ ID NO: 1131882 - DNA, 15 bp, Homo sapiens
tagctcagaggatac

SEQ ID NO: 1131883 - DNA, 15 bp, Homo sapiens
gtagctcagaggata

SEQ ID NO: 1131884 - DNA, 15 bp, Homo sapiens
tgtagctcagaggat

SEQ ID NO: 1131885 - DNA, 15 bp, Homo sapiens
atgtagctcagagga

SEQ ID NO: 1131886 - DNA, 15 bp, Homo sapiens
gatgtagctcagagg

SEQ ID NO: 1131887 - DNA, 15 bp, Homo sapiens
agatgtagctcagag

SEQ ID NO: 1131888 - DNA, 15 bp, Homo sapiens
gagatgtagctcaga

SEQ ID NO: 1131889 - DNA, 15 bp, Homo sapiens
ggagatgtagctcag

SEQ ID NO: 1131890 - DNA, 15 bp, Homo sapiens
gggagatgtagctca

SEQ ID NO: 1131891 - DNA, 15 bp, Homo sapiens
ggggagatgtagctc

SEQ ID NO: 1131892 - DNA, 15 bp, Homo sapiens
tggggagatgtagct

SEQ ID NO: 1131893 - DNA, 15 bp, Homo sapiens
atggggagatgtagc

SEQ ID NO: 1131894 - DNA, 15 bp, Homo sapiens
aatggggagatgtag

SEQ ID NO: 1131895 - DNA, 15 bp, Homo sapiens
aaatggggagatgta

SEQ ID NO: 1131896 - DNA, 15 bp, Homo sapiens
aaaatggggagatgt

SEQ ID NO: 1131897 - DNA, 15 bp, Homo sapiens
gaaaatggggagatg

SEQ ID NO: 1131898 - DNA, 15 bp, Homo sapiens
agaaaatggggagat

SEQ ID NO: 1131899 - DNA, 15 bp, Homo sapiens
gagaaaatggggaga

SEQ ID NO: 1131900 - DNA, 15 bp, Homo sapiens
tgagaaaatggggag

SEQ ID NO: 1131901 - DNA, 15 bp, Homo sapiens
gtgagaaaatgggga

SEQ ID NO: 1131902 - DNA, 15 bp, Homo sapiens
agtgagaaaatgggg

SEQ ID NO: 1131903 - DNA, 15 bp, Homo sapiens
aagtgagaaaatggg

SEQ ID NO: 1131904 - DNA, 15 bp, Homo sapiens
caagtgagaaaatgg

SEQ ID NO: 1131905 - DNA, 15 bp, Homo sapiens
gcaagtgagaaaatg

SEQ ID NO: 1131906 - DNA, 15 bp, Homo sapiens
ggcaagtgagaaaat

SEQ ID NO: 1131907 - DNA, 15 bp, Homo sapiens
gggcaagtgagaaaa

SEQ ID NO: 1131908 - DNA, 15 bp, Homo sapiens
ggggcaagtgagaaa

SEQ ID NO: 1131909 - DNA, 15 bp, Homo sapiens
gggggcaagtgagaa

SEQ ID NO: 1131910 - DNA, 15 bp, Homo sapiens
ggggggcaagtgaga

SEQ ID NO: 1131911 - DNA, 15 bp, Homo sapiens
tggggggcaagtgag

SEQ ID NO: 1131912 - DNA, 15 bp, Homo sapiens
ttggggggcaagtga

SEQ ID NO: 1131913 - DNA, 15 bp, Homo sapiens
cttggggggcaagtg

SEQ ID NO: 1131914 - DNA, 15 bp, Homo sapiens
acttggggggcaagt

SEQ ID NO: 1131915 - DNA, 15 bp, Homo sapiens
tacttggggggcaag

SEQ ID NO: 1131916 - DNA, 15 bp, Homo sapiens
ctacttggggggcaa

SEQ ID NO: 1131917 - DNA, 15 bp, Homo sapiens
actacttggggggca

SEQ ID NO: 1131918 - DNA, 15 bp, Homo sapiens
aactacttggggggc

SEQ ID NO: 1131919 - DNA, 15 bp, Homo sapiens
aaactacttgggggg

SEQ ID NO: 1131920 - DNA, 15 bp, Homo sapiens
gaaactacttggggg

SEQ ID NO: 1131921 - DNA, 15 bp, Homo sapiens
agaaactacttgggg

SEQ ID NO: 1131922 - DNA, 15 bp, Homo sapiens
aagaaactacttggg

SEQ ID NO: 1131923 - DNA, 15 bp, Homo sapiens
taagaaactacttgg

SEQ ID NO: 1131924 - DNA, 15 bp, Homo sapiens
ttaagaaactacttg

SEQ ID NO: 1131925 - DNA, 15 bp, Homo sapiens
tttaagaaactactt

SEQ ID NO: 1131926 - DNA, 15 bp, Homo sapiens
ctttaagaaactact

SEQ ID NO: 1131927 - DNA, 15 bp, Homo sapiens
actttaagaaactac

SEQ ID NO: 1131928 - DNA, 15 bp, Homo sapiens
cactttaagaaacta

SEQ ID NO: 1131929 - DNA, 15 bp, Homo sapiens
acactttaagaaact

SEQ ID NO: 1131930 - DNA, 15 bp, Homo sapiens
gacactttaagaaac

SEQ ID NO: 1131931 - DNA, 15 bp, Homo sapiens
agacactttaagaaa

SEQ ID NO: 1131932 - DNA, 15 bp, Homo sapiens
gagacactttaagaa

SEQ ID NO: 1131933 - DNA, 15 bp, Homo sapiens
tgagacactttaaga

SEQ ID NO: 1131934 - DNA, 15 bp, Homo sapiens
atgagacactttaag

SEQ ID NO: 1131935 - DNA, 15 bp, Homo sapiens
catgagacactttaa

SEQ ID NO: 1131936 - DNA, 15 bp, Homo sapiens
acatgagacacttta

SEQ ID NO: 1131937 - DNA, 15 bp, Homo sapiens
tacatgagacacttt

SEQ ID NO: 1131938 - DNA, 15 bp, Homo sapiens
ttacatgagacactt

SEQ ID NO: 1131939 - DNA, 15 bp, Homo sapiens
cttacatgagacact

SEQ ID NO: 1131940 - DNA, 15 bp, Homo sapiens
tcttacatgagacac

SEQ ID NO: 1131941 - DNA, 15 bp, Homo sapiens
ctcttacatgagaca

SEQ ID NO: 1131942 - DNA, 15 bp, Homo sapiens
cctcttacatgagac

SEQ ID NO: 1131943 - DNA, 15 bp, Homo sapiens
ccctcttacatgaga

SEQ ID NO: 1131944 - DNA, 15 bp, Homo sapiens
gccctcttacatgag

SEQ ID NO: 1131945 - DNA, 15 bp, Homo sapiens
tgccctcttacatga

SEQ ID NO: 1131946 - DNA, 15 bp, Homo sapiens
ctgccctcttacatg

SEQ ID NO: 1131947 - DNA, 15 bp, Homo sapiens
actgccctcttacat

SEQ ID NO: 1131948 - DNA, 15 bp, Homo sapiens
tactgccctcttaca

SEQ ID NO: 1131949 - DNA, 15 bp, Homo sapiens
ctactgccctcttac

SEQ ID NO: 1131950 - DNA, 15 bp, Homo sapiens
gctactgccctctta

SEQ ID NO: 1131951 - DNA, 15 bp, Homo sapiens
agctactgccctctt

SEQ ID NO: 1131952 - DNA, 15 bp, Homo sapiens
aagctactgccctct

SEQ ID NO: 1131953 - DNA, 15 bp, Homo sapiens
aaagctactgccctc

SEQ ID NO: 1131954 - DNA, 15 bp, Homo sapiens
gaaagctactgccct

SEQ ID NO: 1131955 - DNA, 15 bp, Homo sapiens
tgaaagctactgccc

SEQ ID NO: 1131956 - DNA, 15 bp, Homo sapiens
ctgaaagctactgcc

SEQ ID NO: 1131957 - DNA, 15 bp, Homo sapiens
gctgaaagctactgc

SEQ ID NO: 1131958 - DNA, 15 bp, Homo sapiens
agctgaaagctactg

SEQ ID NO: 1131959 - DNA, 15 bp, Homo sapiens
aagctgaaagctact

SEQ ID NO: 1131960 - DNA, 15 bp, Homo sapiens
taagctgaaagctac

SEQ ID NO: 1131961 - DNA, 15 bp, Homo sapiens
ttaagctgaaagcta

SEQ ID NO: 1131962 - DNA, 15 bp, Homo sapiens
tttaagctgaaagct

SEQ ID NO: 1131963 - DNA, 15 bp, Homo sapiens
gtttaagctgaaagc

SEQ ID NO: 1131964 - DNA, 15 bp, Homo sapiens
agtttaagctgaaag

SEQ ID NO: 1131965 - DNA, 15 bp, Homo sapiens
aagtttaagctgaaa

SEQ ID NO: 1131966 - DNA, 15 bp, Homo sapiens
aaagtttaagctgaa

SEQ ID NO: 1131967 - DNA, 15 bp, Homo sapiens
aaaagtttaagctga

SEQ ID NO: 1131968 - DNA, 15 bp, Homo sapiens
aaaaagtttaagctg

SEQ ID NO: 1131969 - DNA, 15 bp, Homo sapiens
gaaaaagtttaagct

SEQ ID NO: 1131970 - DNA, 15 bp, Homo sapiens
agaaaaagtttaagc

SEQ ID NO: 1131971 - DNA, 15 bp, Homo sapiens
gagaaaaagtttaag

SEQ ID NO: 1131972 - DNA, 15 bp, Homo sapiens
agagaaaaagtttaa

SEQ ID NO: 1131973 - DNA, 15 bp, Homo sapiens
cagagaaaaagttta

SEQ ID NO: 1131974 - DNA, 15 bp, Homo sapiens
acagagaaaaagttt

SEQ ID NO: 1131975 - DNA, 15 bp, Homo sapiens
tacagagaaaaagtt

SEQ ID NO: 1131976 - DNA, 15 bp, Homo sapiens
atacagagaaaaagt

SEQ ID NO: 1131977 - DNA, 15 bp, Homo sapiens
catacagagaaaaag

SEQ ID NO: 1131978 - DNA, 15 bp, Homo sapiens
acatacagagaaaaa

SEQ ID NO: 1131979 - DNA, 15 bp, Homo sapiens
tacatacagagaaaa

SEQ ID NO: 1131980 - DNA, 15 bp, Homo sapiens
ctacatacagagaaa

SEQ ID NO: 1131981 - DNA, 15 bp, Homo sapiens
actacatacagagaa

SEQ ID NO: 1131982 - DNA, 15 bp, Homo sapiens
gactacatacagaga

SEQ ID NO: 1131983 - DNA, 15 bp, Homo sapiens
cgactacatacagag

SEQ ID NO: 1131984 - DNA, 15 bp, Homo sapiens
tcgactacatacaga

SEQ ID NO: 1131985 - DNA, 15 bp, Homo sapiens
atcgactacatacag

SEQ ID NO: 1131986 - DNA, 15 bp, Homo sapiens
aatcgactacataca

SEQ ID NO: 1131987 - DNA, 15 bp, Homo sapiens
aaatcgactacatac

SEQ ID NO: 1131988 - DNA, 15 bp, Homo sapiens
gaaatcgactacata

SEQ ID NO: 1131989 - DNA, 15 bp, Homo sapiens
agaaatcgactacat

SEQ ID NO: 1131990 - DNA, 15 bp, Homo sapiens
aagaaatcgactaca

SEQ ID NO: 1131991 - DNA, 15 bp, Homo sapiens
aaagaaatcgactac

SEQ ID NO: 1131992 - DNA, 15 bp, Homo sapiens
caaagaaatcgacta

SEQ ID NO: 1131993 - DNA, 15 bp, Homo sapiens
tcaaagaaatcgact

SEQ ID NO: 1131994 - DNA, 15 bp, Homo sapiens
ctcaaagaaatcgac

SEQ ID NO: 1131995 - DNA, 15 bp, Homo sapiens
cctcaaagaaatcga

SEQ ID NO: 1131996 - DNA, 15 bp, Homo sapiens
acctcaaagaaatcg

SEQ ID NO: 1131997 - DNA, 15 bp, Homo sapiens
atacctcaaagaaat

SEQ ID NO: 1131998 - DNA, 15 bp, Homo sapiens
tatacctcaaagaaa

SEQ ID NO: 1131999 - DNA, 15 bp, Homo sapiens
gtatacctcaaagaa

SEQ ID NO: 1132000 - DNA, 15 bp, Homo sapiens
agtatacctcaaaga

SEQ ID NO: 1132001 - DNA, 15 bp, Homo sapiens
aagtatacctcaaag

SEQ ID NO: 1132002 - DNA, 15 bp, Homo sapiens
aaagtatacctcaaa

SEQ ID NO: 1132003 - DNA, 15 bp, Homo sapiens
aaaagtatacctcaa

SEQ ID NO: 1132004 - DNA, 15 bp, Homo sapiens
gaaaagtatacctca

SEQ ID NO: 1132005 - DNA, 15 bp, Homo sapiens
agaaaagtatacctc

SEQ ID NO: 1132006 - DNA, 15 bp, Homo sapiens
gagaaaagtatacct

SEQ ID NO: 1132007 - DNA, 15 bp, Homo sapiens
agagaaaagtatacc

SEQ ID NO: 1132008 - DNA, 15 bp, Homo sapiens
gagagaaaagtatac

SEQ ID NO: 1132009 - DNA, 15 bp, Homo sapiens
ggagagaaaagtata

SEQ ID NO: 1132010 - DNA, 15 bp, Homo sapiens
tggagagaaaagtat

SEQ ID NO: 1132011 - DNA, 15 bp, Homo sapiens
ctggagagaaaagta

SEQ ID NO: 1132012 - DNA, 15 bp, Homo sapiens
tctggagagaaaagt

SEQ ID NO: 1132013 - DNA, 15 bp, Homo sapiens
ttctggagagaaaag

SEQ ID NO: 1132014 - DNA, 15 bp, Homo sapiens
attctggagagaaaa

SEQ ID NO: 1132015 - DNA, 15 bp, Homo sapiens
tattctggagagaaa

SEQ ID NO: 1132016 - DNA, 15 bp, Homo sapiens
ctattctggagagaa

SEQ ID NO: 1132017 - DNA, 15 bp, Homo sapiens
actattctggagaga

SEQ ID NO: 1132018 - DNA, 15 bp, Homo sapiens
aactattctggagag

SEQ ID NO: 1132019 - DNA, 15 bp, Homo sapiens
taactattctggaga

SEQ ID NO: 1132020 - DNA, 15 bp, Homo sapiens
ctaactattctggag

SEQ ID NO: 1132021 - DNA, 15 bp, Homo sapiens
tctaactattctgga

SEQ ID NO: 1132022 - DNA, 15 bp, Homo sapiens
atctaactattctgg

SEQ ID NO: 1132023 - DNA, 15 bp, Homo sapiens
catctaactattctg

SEQ ID NO: 1132024 - DNA, 15 bp, Homo sapiens
acatctaactattct

SEQ ID NO: 1132025 - DNA, 15 bp, Homo sapiens
tacatctaactattc

SEQ ID NO: 1132026 - DNA, 15 bp, Homo sapiens
ctacatctaactatt

SEQ ID NO: 1132027 - DNA, 15 bp, Homo sapiens
cctacatctaactat

SEQ ID NO: 1132028 - DNA, 15 bp, Homo sapiens
acctacatctaacta

SEQ ID NO: 1132029 - DNA, 15 bp, Homo sapiens
tacctacatctaact

SEQ ID NO: 1132030 - DNA, 15 bp, Homo sapiens
atacctacatctaac

SEQ ID NO: 1132031 - DNA, 15 bp, Homo sapiens
tatacctacatctaa

SEQ ID NO: 1132032 - DNA, 15 bp, Homo sapiens
gtatacctacatcta

SEQ ID NO: 1132033 - DNA, 15 bp, Homo sapiens
ggtatacctacatct

SEQ ID NO: 1132034 - DNA, 15 bp, Homo sapiens
tggtatacctacatc

SEQ ID NO: 1132035 - DNA, 15 bp, Homo sapiens
gtggtatacctacat

SEQ ID NO: 1132036 - DNA, 15 bp, Homo sapiens
agtggtatacctaca

SEQ ID NO: 1132037 - DNA, 15 bp, Homo sapiens
aagtggtatacctac

SEQ ID NO: 1132038 - DNA, 15 bp, Homo sapiens
aaagtggtataccta

SEQ ID NO: 1132039 - DNA, 15 bp, Homo sapiens
caaagtggtatacct

SEQ ID NO: 1132040 - DNA, 15 bp, Homo sapiens
tcaaagtggtatacc

SEQ ID NO: 1132041 - DNA, 15 bp, Homo sapiens
atcaaagtggtatac

SEQ ID NO: 1132042 - DNA, 15 bp, Homo sapiens
catcaaagtggtata

SEQ ID NO: 1132043 - DNA, 15 bp, Homo sapiens
acatcaaagtggtat

SEQ ID NO: 1132044 - DNA, 15 bp, Homo sapiens
aacatcaaagtggta

SEQ ID NO: 1132045 - DNA, 15 bp, Homo sapiens
caacatcaaagtggt

SEQ ID NO: 1132046 - DNA, 15 bp, Homo sapiens
tcaacatcaaagtgg

SEQ ID NO: 1132047 - DNA, 15 bp, Homo sapiens
gtcaacatcaaagtg

SEQ ID NO: 1132048 - DNA, 15 bp, Homo sapiens
tgtcaacatcaaagt

SEQ ID NO: 1132049 - DNA, 15 bp, Homo sapiens
gtgtcaacatcaaag

SEQ ID NO: 1132050 - DNA, 15 bp, Homo sapiens
agtgtcaacatcaaa

SEQ ID NO: 1132051 - DNA, 15 bp, Homo sapiens
tagtgtcaacatcaa

SEQ ID NO: 1132052 - DNA, 15 bp, Homo sapiens
ctagtgtcaacatca

SEQ ID NO: 1132053 - DNA, 15 bp, Homo sapiens
actagtgtcaacatc

SEQ ID NO: 1132054 - DNA, 15 bp, Homo sapiens
aactagtgtcaacat

SEQ ID NO: 1132055 - DNA, 15 bp, Homo sapiens
aaactagtgtcaaca

SEQ ID NO: 1132056 - DNA, 15 bp, Homo sapiens
taaactagtgtcaac

SEQ ID NO: 1132057 - DNA, 15 bp, Homo sapiens
gtaaactagtgtcaa

SEQ ID NO: 1132058 - DNA, 15 bp, Homo sapiens
ggtaaactagtgtca

SEQ ID NO: 1132059 - DNA, 15 bp, Homo sapiens
aggtaaactagtgtc

SEQ ID NO: 1132060 - DNA, 15 bp, Homo sapiens
taggtaaactagtgt

SEQ ID NO: 1132061 - DNA, 15 bp, Homo sapiens
ctaggtaaactagtg

SEQ ID NO: 1132062 - DNA, 15 bp, Homo sapiens
tctaggtaaactagt

SEQ ID NO: 1132063 - DNA, 15 bp, Homo sapiens
ttctaggtaaactag

SEQ ID NO: 1132064 - DNA, 15 bp, Homo sapiens
gttctaggtaaacta

SEQ ID NO: 1132065 - DNA, 15 bp, Homo sapiens
agttctaggtaaact

SEQ ID NO: 1132066 - DNA, 15 bp, Homo sapiens
aagttctaggtaaac

SEQ ID NO: 1132067 - DNA, 15 bp, Homo sapiens
taagttctaggtaaa

SEQ ID NO: 1132068 - DNA, 15 bp, Homo sapiens
ataagttctaggtaa

SEQ ID NO: 1132069 - DNA, 15 bp, Homo sapiens
gataagttctaggta

SEQ ID NO: 1132070 - DNA, 15 bp, Homo sapiens
agataagttctaggt

SEQ ID NO: 1132071 - DNA, 15 bp, Homo sapiens
aagataagttctagg

SEQ ID NO: 1132072 - DNA, 15 bp, Homo sapiens
gaagataagttctag

SEQ ID NO: 1132073 - DNA, 15 bp, Homo sapiens
agaagataagttcta

SEQ ID NO: 1132074 - DNA, 15 bp, Homo sapiens
cagaagataagttct

SEQ ID NO: 1132075 - DNA, 15 bp, Homo sapiens
acagaagataagttc

SEQ ID NO: 1132076 - DNA, 15 bp, Homo sapiens
tacagaagataagtt

SEQ ID NO: 1132077 - DNA, 15 bp, Homo sapiens
ttacagaagataagt

SEQ ID NO: 1132078 - DNA, 15 bp, Homo sapiens
tttacagaagataag

SEQ ID NO: 1132079 - DNA, 15 bp, Homo sapiens
atttacagaagataa

SEQ ID NO: 1132080 - DNA, 15 bp, Homo sapiens
gatttacagaagata

SEQ ID NO: 1132081 - DNA, 15 bp, Homo sapiens
agatttacagaagat

SEQ ID NO: 1132082 - DNA, 15 bp, Homo sapiens
cagatttacagaaga

SEQ ID NO: 1132083 - DNA, 15 bp, Homo sapiens
acagatttacagaag

SEQ ID NO: 1132084 - DNA, 15 bp, Homo sapiens
gacagatttacagaa

SEQ ID NO: 1132085 - DNA, 15 bp, Homo sapiens
agacagatttacaga

SEQ ID NO: 1132086 - DNA, 15 bp, Homo sapiens
gagacagatttacag

SEQ ID NO: 1132087 - DNA, 15 bp, Homo sapiens
agagacagatttaca

SEQ ID NO: 1132088 - DNA, 15 bp, Homo sapiens
tagagacagatttac

SEQ ID NO: 1132089 - DNA, 15 bp, Homo sapiens
atagagacagattta

SEQ ID NO: 1132090 - DNA, 15 bp, Homo sapiens
aatagagacagattt

SEQ ID NO: 1132091 - DNA, 15 bp, Homo sapiens
aaatagagacagatt

SEQ ID NO: 1132092 - DNA, 15 bp, Homo sapiens
gaaatagagacagat

SEQ ID NO: 1132093 - DNA, 15 bp, Homo sapiens
ggaaatagagacaga

SEQ ID NO: 1132094 - DNA, 15 bp, Homo sapiens
tggaaatagagacag

SEQ ID NO: 1132095 - DNA, 15 bp, Homo sapiens
atggaaatagagaca

SEQ ID NO: 1132096 - DNA, 15 bp, Homo sapiens
gatggaaatagagac

SEQ ID NO: 1132097 - DNA, 15 bp, Homo sapiens
agatggaaatagaga

SEQ ID NO: 1132098 - DNA, 15 bp, Homo sapiens
gagatggaaatagag

SEQ ID NO: 1132099 - DNA, 15 bp, Homo sapiens
agagatggaaataga

SEQ ID NO: 1132100 - DNA, 15 bp, Homo sapiens
cagagatggaaatag

SEQ ID NO: 1132101 - DNA, 15 bp, Homo sapiens
acagagatggaaata

SEQ ID NO: 1132102 - DNA, 15 bp, Homo sapiens
gacagagatggaaat

SEQ ID NO: 1132103 - DNA, 15 bp, Homo sapiens
agacagagatggaaa

SEQ ID NO: 1132104 - DNA, 15 bp, Homo sapiens
gagacagagatggaa

SEQ ID NO: 1132105 - DNA, 15 bp, Homo sapiens
ggagacagagatgga

SEQ ID NO: 1132106 - DNA, 15 bp, Homo sapiens
tggagacagagatgg

SEQ ID NO: 1132107 - DNA, 15 bp, Homo sapiens
atggagacagagatg

SEQ ID NO: 1132108 - DNA, 15 bp, Homo sapiens
gatggagacagagat

SEQ ID NO: 1132109 - DNA, 15 bp, Homo sapiens
agatggagacagaga

SEQ ID NO: 1132110 - DNA, 15 bp, Homo sapiens
aagatggagacagag

SEQ ID NO: 1132111 - DNA, 15 bp, Homo sapiens
aaagatggagacaga

SEQ ID NO: 1132112 - DNA, 15 bp, Homo sapiens
caaagatggagacag

SEQ ID NO: 1132113 - DNA, 15 bp, Homo sapiens
acaaagatggagaca

SEQ ID NO: 1132114 - DNA, 15 bp, Homo sapiens
gacaaagatggagac

SEQ ID NO: 1132115 - DNA, 15 bp, Homo sapiens
agacaaagatggaga

SEQ ID NO: 1132116 - DNA, 15 bp, Homo sapiens
gagacaaagatggag

SEQ ID NO: 1132117 - DNA, 15 bp, Homo sapiens
agagacaaagatgga

SEQ ID NO: 1132118 - DNA, 15 bp, Homo sapiens
tagagacaaagatgg

SEQ ID NO: 1132119 - DNA, 15 bp, Homo sapiens
atagagacaaagatg

SEQ ID NO: 1132120 - DNA, 15 bp, Homo sapiens
gatagagacaaagat

SEQ ID NO: 1132121 - DNA, 15 bp, Homo sapiens
agatagagacaaaga

SEQ ID NO: 1132122 - DNA, 15 bp, Homo sapiens
gagatagagacaaag

SEQ ID NO: 1132123 - DNA, 15 bp, Homo sapiens
agagatagagacaaa

SEQ ID NO: 1132124 - DNA, 15 bp, Homo sapiens
tagagatagagacaa

SEQ ID NO: 1132125 - DNA, 15 bp, Homo sapiens
atagagatagagaca

SEQ ID NO: 1132126 - DNA, 15 bp, Homo sapiens
gatagagatagagac

SEQ ID NO: 1132127 - DNA, 15 bp, Homo sapiens
agatagagatagaga

SEQ ID NO: 1132128 - DNA, 15 bp, Homo sapiens
cagatagagatagag

SEQ ID NO: 1132129 - DNA, 15 bp, Homo sapiens
acagatagagataga

SEQ ID NO: 1132130 - DNA, 15 bp, Homo sapiens
gacagatagagatag

SEQ ID NO: 1132131 - DNA, 15 bp, Homo sapiens
agacagatagagata

SEQ ID NO: 1132132 - DNA, 15 bp, Homo sapiens
tagacagatagagat

SEQ ID NO: 1132133 - DNA, 15 bp, Homo sapiens
atagacagatagaga

SEQ ID NO: 1132134 - DNA, 15 bp, Homo sapiens
gatagacagatagag

SEQ ID NO: 1132135 - DNA, 15 bp, Homo sapiens
agatagacagataga

SEQ ID NO: 1132136 - DNA, 15 bp, Homo sapiens
gagatagacagatag

SEQ ID NO: 1132137 - DNA, 15 bp, Homo sapiens
agagatagacagata

SEQ ID NO: 1132138 - DNA, 15 bp, Homo sapiens
tagagatagacagat

SEQ ID NO: 1132139 - DNA, 15 bp, Homo sapiens
atagagatagacaga

SEQ ID NO: 1132140 - DNA, 15 bp, Homo sapiens
gatagagatagacag

SEQ ID NO: 1132141 - DNA, 15 bp, Homo sapiens
agatagagatagaca

SEQ ID NO: 1132142 - DNA, 15 bp, Homo sapiens
tagatagagatagac

SEQ ID NO: 1132143 - DNA, 15 bp, Homo sapiens
atagatagagataga

SEQ ID NO: 1132144 - DNA, 15 bp, Homo sapiens
gatagatagagatag

SEQ ID NO: 1132145 - DNA, 15 bp, Homo sapiens
agatagatagagata

SEQ ID NO: 1132146 - DNA, 15 bp, Homo sapiens
tagatagatagagat

SEQ ID NO: 1132147 - DNA, 15 bp, Homo sapiens
atagatagatagaga

SEQ ID NO: 1132148 - DNA, 15 bp, Homo sapiens
gatagatagatagag

SEQ ID NO: 1132149 - DNA, 15 bp, Homo sapiens
agatagatagataga

SEQ ID NO: 1132150 - DNA, 15 bp, Homo sapiens
tagatagatagatag

SEQ ID NO: 1132151 - DNA, 15 bp, Homo sapiens
atagatagatagata

SEQ ID NO: 1132152 - DNA, 15 bp, Homo sapiens
gatagatagatagat

SEQ ID NO: 1132153 - DNA, 15 bp, Homo sapiens
ttagatagatagata

SEQ ID NO: 1132154 - DNA, 15 bp, Homo sapiens
tttagatagatagat

SEQ ID NO: 1132155 - DNA, 15 bp, Homo sapiens
ctttagatagataga

SEQ ID NO: 1132156 - DNA, 15 bp, Homo sapiens
gctttagatagatag

SEQ ID NO: 1132157 - DNA, 15 bp, Homo sapiens
tgctttagatagata

SEQ ID NO: 1132158 - DNA, 15 bp, Homo sapiens
ttgctttagatagat

SEQ ID NO: 1132159 - DNA, 15 bp, Homo sapiens
tttgctttagataga

SEQ ID NO: 1132160 - DNA, 15 bp, Homo sapiens
atttgctttagatag

SEQ ID NO: 1132161 - DNA, 15 bp, Homo sapiens
aatttgctttagata

SEQ ID NO: 1132162 - DNA, 15 bp, Homo sapiens
gaatttgctttagat

SEQ ID NO: 1132163 - DNA, 15 bp, Homo sapiens
tgaatttgctttaga

SEQ ID NO: 1132164 - DNA, 15 bp, Homo sapiens
atgaatttgctttag

SEQ ID NO: 1132165 - DNA, 15 bp, Homo sapiens
catgaatttgcttta

SEQ ID NO: 1132166 - DNA, 15 bp, Homo sapiens
gcatgaatttgcttt

SEQ ID NO: 1132167 - DNA, 15 bp, Homo sapiens
ggcatgaatttgctt

SEQ ID NO: 1132168 - DNA, 15 bp, Homo sapiens
gggcatgaatttgct

SEQ ID NO: 1132169 - DNA, 15 bp, Homo sapiens
agggcatgaatttgc

SEQ ID NO: 1132170 - DNA, 15 bp, Homo sapiens
aagggcatgaatttg

SEQ ID NO: 1132171 - DNA, 15 bp, Homo sapiens
gaagggcatgaattt

SEQ ID NO: 1132172 - DNA, 15 bp, Homo sapiens
agaagggcatgaatt

SEQ ID NO: 1132173 - DNA, 15 bp, Homo sapiens
gagaagggcatgaat

SEQ ID NO: 1132174 - DNA, 15 bp, Homo sapiens
ggagaagggcatgaa

SEQ ID NO: 1132175 - DNA, 15 bp, Homo sapiens
aggagaagggcatga

SEQ ID NO: 1132176 - DNA, 15 bp, Homo sapiens
taggagaagggcatg

SEQ ID NO: 1132177 - DNA, 15 bp, Homo sapiens
ataggagaagggcat

SEQ ID NO: 1132178 - DNA, 15 bp, Homo sapiens
aataggagaagggca

SEQ ID NO: 1132179 - DNA, 15 bp, Homo sapiens
aaataggagaagggc

SEQ ID NO: 1132180 - DNA, 15 bp, Homo sapiens
taaataggagaaggg

SEQ ID NO: 1132181 - DNA, 15 bp, Homo sapiens
ataaataggagaagg

SEQ ID NO: 1132182 - DNA, 15 bp, Homo sapiens
aataaataggagaag

SEQ ID NO: 1132183 - DNA, 15 bp, Homo sapiens
caataaataggagaa

SEQ ID NO: 1132184 - DNA, 15 bp, Homo sapiens
tcaataaataggaga

SEQ ID NO: 1132185 - DNA, 15 bp, Homo sapiens
ttcaataaataggag

SEQ ID NO: 1132186 - DNA, 15 bp, Homo sapiens
gattcaataaatagg

SEQ ID NO: 1132187 - DNA, 15 bp, Homo sapiens
cgattcaataaatag

SEQ ID NO: 1132188 - DNA, 15 bp, Homo sapiens
tcgattcaataaata

SEQ ID NO: 1132189 - DNA, 15 bp, Homo sapiens
ctcgattcaataaat

SEQ ID NO: 1132190 - DNA, 15 bp, Homo sapiens
tctcgattcaataaa

SEQ ID NO: 1132191 - DNA, 15 bp, Homo sapiens
gtctcgattcaataa

SEQ ID NO: 1132192 - DNA, 15 bp, Homo sapiens
ggtctcgattcaata

SEQ ID NO: 1132193 - DNA, 15 bp, Homo sapiens
tggtctcgattcaat

SEQ ID NO: 1132194 - DNA, 15 bp, Homo sapiens
atggtctcgattcaa

SEQ ID NO: 1132195 - DNA, 15 bp, Homo sapiens
tatggtctcgattca

SEQ ID NO: 1132196 - DNA, 15 bp, Homo sapiens
ctatggtctcgattc

SEQ ID NO: 1132197 - DNA, 15 bp, Homo sapiens
tctatggtctcgatt

SEQ ID NO: 1132198 - DNA, 15 bp, Homo sapiens
gtctatggtctcgat

SEQ ID NO: 1132199 - DNA, 15 bp, Homo sapiens
tgtctatggtctcga

SEQ ID NO: 1132200 - DNA, 15 bp, Homo sapiens
ctgtctatggtctcg

SEQ ID NO: 1132201 - DNA, 15 bp, Homo sapiens
cctgtctatggtctc

SEQ ID NO: 1132202 - DNA, 15 bp, Homo sapiens
ccctgtctatggtct

SEQ ID NO: 1132203 - DNA, 15 bp, Homo sapiens
cccctgtctatggtc

SEQ ID NO: 1132204 - DNA, 15 bp, Homo sapiens
acccctgtctatggt

SEQ ID NO: 1132205 - DNA, 15 bp, Homo sapiens
cacccctgtctatgg

SEQ ID NO: 1132206 - DNA, 15 bp, Homo sapiens
tcacccctgtctatg

SEQ ID NO: 1132207 - DNA, 15 bp, Homo sapiens
ctcacccctgtctat

SEQ ID NO: 1132208 - DNA, 15 bp, Homo sapiens
tctcacccctgtcta

SEQ ID NO: 1132209 - DNA, 15 bp, Homo sapiens
ctctcacccctgtct

SEQ ID NO: 1132210 - DNA, 15 bp, Homo sapiens
tctctcacccctgtc

SEQ ID NO: 1132211 - DNA, 15 bp, Homo sapiens
ttctctcacccctgt

SEQ ID NO: 1132212 - DNA, 15 bp, Homo sapiens
tttctctcacccctg

SEQ ID NO: 1132213 - DNA, 15 bp, Homo sapiens
ctttctctcacccct

SEQ ID NO: 1132214 - DNA, 15 bp, Homo sapiens
tctttctctcacccc

SEQ ID NO: 1132215 - DNA, 15 bp, Homo sapiens
ttctttctctcaccc

SEQ ID NO: 1132216 - DNA, 15 bp, Homo sapiens
attctttctctcacc

SEQ ID NO: 1132217 - DNA, 15 bp, Homo sapiens
aattctttctctcac

SEQ ID NO: 1132218 - DNA, 15 bp, Homo sapiens
aaattctttctctca

SEQ ID NO: 1132219 - DNA, 15 bp, Homo sapiens
caaattctttctctc

SEQ ID NO: 1132220 - DNA, 15 bp, Homo sapiens
ccaaattctttctct

SEQ ID NO: 1132221 - DNA, 15 bp, Homo sapiens
gccaaattctttctc

SEQ ID NO: 1132222 - DNA, 15 bp, Homo sapiens
tgccaaattctttct

SEQ ID NO: 1132223 - DNA, 15 bp, Homo sapiens
ctgccaaattctttc

SEQ ID NO: 1132224 - DNA, 15 bp, Homo sapiens
cctgccaaattcttt

SEQ ID NO: 1132225 - DNA, 15 bp, Homo sapiens
tcctgccaaattctt

SEQ ID NO: 1132226 - DNA, 15 bp, Homo sapiens
ttcctgccaaattct

SEQ ID NO: 1132227 - DNA, 15 bp, Homo sapiens
attcctgccaaattc

SEQ ID NO: 1132228 - DNA, 15 bp, Homo sapiens
cattcctgccaaatt

SEQ ID NO: 1132229 - DNA, 15 bp, Homo sapiens
ccattcctgccaaat

SEQ ID NO: 1132230 - DNA, 15 bp, Homo sapiens
cccattcctgccaaa

SEQ ID NO: 1132231 - DNA, 15 bp, Homo sapiens
ccccattcctgccaa

SEQ ID NO: 1132232 - DNA, 15 bp, Homo sapiens
tccccattcctgcca

SEQ ID NO: 1132233 - DNA, 15 bp, Homo sapiens
atccccattcctgcc

SEQ ID NO: 1132234 - DNA, 15 bp, Homo sapiens
catccccattcctgc

SEQ ID NO: 1132235 - DNA, 15 bp, Homo sapiens
acatccccattcctg

SEQ ID NO: 1132236 - DNA, 15 bp, Homo sapiens
cacatccccattcct

SEQ ID NO: 1132237 - DNA, 15 bp, Homo sapiens
acacatccccattcc

SEQ ID NO: 1132238 - DNA, 15 bp, Homo sapiens
tacacatccccattc

SEQ ID NO: 1132239 - DNA, 15 bp, Homo sapiens
atacacatccccatt

SEQ ID NO: 1132240 - DNA, 15 bp, Homo sapiens
aatacacatccccat

SEQ ID NO: 1132241 - DNA, 15 bp, Homo sapiens
taatacacatcccca

SEQ ID NO: 1132242 - DNA, 15 bp, Homo sapiens
ataatacacatcccc

SEQ ID NO: 1132243 - DNA, 15 bp, Homo sapiens
gataatacacatccc

SEQ ID NO: 1132244 - DNA, 15 bp, Homo sapiens
agataatacacatcc

SEQ ID NO: 1132245 - DNA, 15 bp, Homo sapiens
cagataatacacatc

SEQ ID NO: 1132246 - DNA, 15 bp, Homo sapiens
acagataatacacat

SEQ ID NO: 1132247 - DNA, 15 bp, Homo sapiens
cacagataatacaca

SEQ ID NO: 1132248 - DNA, 15 bp, Homo sapiens
ccacagataatacac

SEQ ID NO: 1132249 - DNA, 15 bp, Homo sapiens
gccacagataataca

SEQ ID NO: 1132250 - DNA, 15 bp, Homo sapiens
tgccacagataatac

SEQ ID NO: 1132251 - DNA, 15 bp, Homo sapiens
atgccacagataata

SEQ ID NO: 1132252 - DNA, 15 bp, Homo sapiens
tatgccacagataat

SEQ ID NO: 1132253 - DNA, 15 bp, Homo sapiens
ttatgccacagataa

SEQ ID NO: 1132254 - DNA, 15 bp, Homo sapiens
cttatgccacagata

SEQ ID NO: 1132255 - DNA, 15 bp, Homo sapiens
ccttatgccacagat

SEQ ID NO: 1132256 - DNA, 15 bp, Homo sapiens
tccttatgccacaga

SEQ ID NO: 1132257 - DNA, 15 bp, Homo sapiens
ttccttatgccacag

SEQ ID NO: 1132258 - DNA, 15 bp, Homo sapiens
tttccttatgccaca

SEQ ID NO: 1132259 - DNA, 15 bp, Homo sapiens
gtttccttatgccac

SEQ ID NO: 1132260 - DNA, 15 bp, Homo sapiens
agtttccttatgcca

SEQ ID NO: 1132261 - DNA, 15 bp, Homo sapiens
aagtttccttatgcc

SEQ ID NO: 1132262 - DNA, 15 bp, Homo sapiens
aaagtttccttatgc

SEQ ID NO: 1132263 - DNA, 15 bp, Homo sapiens
taaagtttccttatg

SEQ ID NO: 1132264 - DNA, 15 bp, Homo sapiens
gtaaagtttccttat

SEQ ID NO: 1132265 - DNA, 15 bp, Homo sapiens
tgtaaagtttcctta

SEQ ID NO: 1132266 - DNA, 15 bp, Homo sapiens
ctgtaaagtttcctt

SEQ ID NO: 1132267 - DNA, 15 bp, Homo sapiens
tctgtaaagtttcct

SEQ ID NO: 1132268 - DNA, 15 bp, Homo sapiens
ttctgtaaagtttcc

SEQ ID NO: 1132269 - DNA, 15 bp, Homo sapiens
gttctgtaaagtttc

SEQ ID NO: 1132270 - DNA, 15 bp, Homo sapiens
agttctgtaaagttt

SEQ ID NO: 1132271 - DNA, 15 bp, Homo sapiens
tagttctgtaaagtt

SEQ ID NO: 1132272 - DNA, 15 bp, Homo sapiens
ctagttctgtaaagt

SEQ ID NO: 1132273 - DNA, 15 bp, Homo sapiens
cctagttctgtaaag

SEQ ID NO: 1132274 - DNA, 15 bp, Homo sapiens
acctagttctgtaaa

SEQ ID NO: 1132275 - DNA, 15 bp, Homo sapiens
aacctagttctgtaa

SEQ ID NO: 1132276 - DNA, 15 bp, Homo sapiens
gaacctagttctgta

SEQ ID NO: 1132277 - DNA, 15 bp, Homo sapiens
tgaacctagttctgt

SEQ ID NO: 1132278 - DNA, 15 bp, Homo sapiens
ttgaacctagttctg

SEQ ID NO: 1132279 - DNA, 15 bp, Homo sapiens
tttgaacctagttct

SEQ ID NO: 1132280 - DNA, 15 bp, Homo sapiens
ttttgaacctagttc

SEQ ID NO: 1132281 - DNA, 15 bp, Homo sapiens
cttttgaacctagtt

SEQ ID NO: 1132282 - DNA, 15 bp, Homo sapiens
acttttgaacctagt

SEQ ID NO: 1132283 - DNA, 15 bp, Homo sapiens
tacttttgaacctag

SEQ ID NO: 1132284 - DNA, 15 bp, Homo sapiens
atacttttgaaccta

SEQ ID NO: 1132285 - DNA, 15 bp, Homo sapiens
tatacttttgaacct

SEQ ID NO: 1132286 - DNA, 15 bp, Homo sapiens
gtatacttttgaacc

SEQ ID NO: 1132287 - DNA, 15 bp, Homo sapiens
agtatacttttgaac

SEQ ID NO: 1132288 - DNA, 15 bp, Homo sapiens
aagtatacttttgaa

SEQ ID NO: 1132289 - DNA, 15 bp, Homo sapiens
aaagtatacttttga

SEQ ID NO: 1132290 - DNA, 15 bp, Homo sapiens
gaaagtatacttttg

SEQ ID NO: 1132291 - DNA, 15 bp, Homo sapiens
agaaagtatactttt

SEQ ID NO: 1132292 - DNA, 15 bp, Homo sapiens
tagaaagtatacttt

SEQ ID NO: 1132293 - DNA, 15 bp, Homo sapiens
ctagaaagtatactt

SEQ ID NO: 1132294 - DNA, 15 bp, Homo sapiens
actagaaagtatact

SEQ ID NO: 1132295 - DNA, 15 bp, Homo sapiens
aactagaaagtatac

SEQ ID NO: 1132296 - DNA, 15 bp, Homo sapiens
gaactagaaagtata

SEQ ID NO: 1132297 - DNA, 15 bp, Homo sapiens
agaactagaaagtat

SEQ ID NO: 1132298 - DNA, 15 bp, Homo sapiens
aagaactagaaagta

SEQ ID NO: 1132299 - DNA, 15 bp, Homo sapiens
aaagaactagaaagt

SEQ ID NO: 1132300 - DNA, 15 bp, Homo sapiens
gaaagaactagaaag

SEQ ID NO: 1132301 - DNA, 15 bp, Homo sapiens
ggaaagaactagaaa

SEQ ID NO: 1132302 - DNA, 15 bp, Homo sapiens
gggaaagaactagaa

SEQ ID NO: 1132303 - DNA, 15 bp, Homo sapiens
tgggaaagaactaga

SEQ ID NO: 1132304 - DNA, 15 bp, Homo sapiens
atgggaaagaactag

SEQ ID NO: 1132305 - DNA, 15 bp, Homo sapiens
catgggaaagaacta

SEQ ID NO: 1132306 - DNA, 15 bp, Homo sapiens
ccatgggaaagaact

SEQ ID NO: 1132307 - DNA, 15 bp, Homo sapiens
gccatgggaaagaac

SEQ ID NO: 1132308 - DNA, 15 bp, Homo sapiens
agccatgggaaagaa

SEQ ID NO: 1132309 - DNA, 15 bp, Homo sapiens
aagccatgggaaaga

SEQ ID NO: 1132310 - DNA, 15 bp, Homo sapiens
aaagccatgggaaag

SEQ ID NO: 1132311 - DNA, 15 bp, Homo sapiens
aaaagccatgggaaa

SEQ ID NO: 1132312 - DNA, 15 bp, Homo sapiens
gaaaagccatgggaa

SEQ ID NO: 1132313 - DNA, 15 bp, Homo sapiens
tgaaaagccatggga

SEQ ID NO: 1132314 - DNA, 15 bp, Homo sapiens
gtgaaaagccatggg

SEQ ID NO: 1132315 - DNA, 15 bp, Homo sapiens
agtgaaaagccatgg

SEQ ID NO: 1132316 - DNA, 15 bp, Homo sapiens
aagtgaaaagccatg

SEQ ID NO: 1132317 - DNA, 15 bp, Homo sapiens
aaagtgaaaagccat

SEQ ID NO: 1132318 - DNA, 15 bp, Homo sapiens
caaagtgaaaagcca

SEQ ID NO: 1132319 - DNA, 15 bp, Homo sapiens
tcaaagtgaaaagcc

SEQ ID NO: 1132320 - DNA, 15 bp, Homo sapiens
atcaaagtgaaaagc

SEQ ID NO: 1132321 - DNA, 15 bp, Homo sapiens
catcaaagtgaaaag

SEQ ID NO: 1132322 - DNA, 15 bp, Homo sapiens
acatcaaagtgaaaa

SEQ ID NO: 1132323 - DNA, 15 bp, Homo sapiens
tacatcaaagtgaaa

SEQ ID NO: 1132324 - DNA, 15 bp, Homo sapiens
ctacatcaaagtgaa

SEQ ID NO: 1132325 - DNA, 15 bp, Homo sapiens
actacatcaaagtga

SEQ ID NO: 1132326 - DNA, 15 bp, Homo sapiens
gactacatcaaagtg

SEQ ID NO: 1132327 - DNA, 15 bp, Homo sapiens
ggactacatcaaagt

SEQ ID NO: 1132328 - DNA, 15 bp, Homo sapiens
aggactacatcaaag

SEQ ID NO: 1132329 - DNA, 15 bp, Homo sapiens
aaggactacatcaaa

SEQ ID NO: 1132330 - DNA, 15 bp, Homo sapiens
taaggactacatcaa

SEQ ID NO: 1132331 - DNA, 15 bp, Homo sapiens
ataaggactacatca

SEQ ID NO: 1132332 - DNA, 15 bp, Homo sapiens
gataaggactacatc

SEQ ID NO: 1132333 - DNA, 15 bp, Homo sapiens
tgataaggactacat

SEQ ID NO: 1132334 - DNA, 15 bp, Homo sapiens
ctgataaggactaca

SEQ ID NO: 1132335 - DNA, 15 bp, Homo sapiens
cctgataaggactac

SEQ ID NO: 1132336 - DNA, 15 bp, Homo sapiens
acctgataaggacta

SEQ ID NO: 1132337 - DNA, 15 bp, Homo sapiens
tacctgataaggact

SEQ ID NO: 1132338 - DNA, 15 bp, Homo sapiens
ttacctgataaggac

SEQ ID NO: 1132339 - DNA, 15 bp, Homo sapiens
gttacctgataagga

SEQ ID NO: 1132340 - DNA, 15 bp, Homo sapiens
agttacctgataagg

SEQ ID NO: 1132341 - DNA, 15 bp, Homo sapiens
cagttacctgataag

SEQ ID NO: 1132342 - DNA, 15 bp, Homo sapiens
tcagttacctgataa

SEQ ID NO: 1132343 - DNA, 15 bp, Homo sapiens
ctcagttacctgata

SEQ ID NO: 1132344 - DNA, 15 bp, Homo sapiens
cctcagttacctgat

SEQ ID NO: 1132345 - DNA, 15 bp, Homo sapiens
acctcagttacctga

SEQ ID NO: 1132346 - DNA, 15 bp, Homo sapiens
aacctcagttacctg

SEQ ID NO: 1132347 - DNA, 15 bp, Homo sapiens
aaacctcagttacct

SEQ ID NO: 1132348 - DNA, 15 bp, Homo sapiens
aaaacctcagttacc

SEQ ID NO: 1132349 - DNA, 15 bp, Homo sapiens
taaaacctcagttac

SEQ ID NO: 1132350 - DNA, 15 bp, Homo sapiens
ataaaacctcagtta

SEQ ID NO: 1132351 - DNA, 15 bp, Homo sapiens
tataaaacctcagtt

SEQ ID NO: 1132352 - DNA, 15 bp, Homo sapiens
atataaaacctcagt

SEQ ID NO: 1132353 - DNA, 15 bp, Homo sapiens
tatataaaacctcag

SEQ ID NO: 1132354 - DNA, 15 bp, Homo sapiens
ttatataaaacctca

SEQ ID NO: 1132355 - DNA, 15 bp, Homo sapiens
cttatataaaacctc

SEQ ID NO: 1132356 - DNA, 15 bp, Homo sapiens
acttatataaaacct

SEQ ID NO: 1132357 - DNA, 15 bp, Homo sapiens
gacttatataaaacc

SEQ ID NO: 1132358 - DNA, 15 bp, Homo sapiens
ggacttatataaaac

SEQ ID NO: 1132359 - DNA, 15 bp, Homo sapiens
gggacttatataaaa

SEQ ID NO: 1132360 - DNA, 15 bp, Homo sapiens
ggggacttatataaa

SEQ ID NO: 1132361 - DNA, 15 bp, Homo sapiens
aggggacttatataa

SEQ ID NO: 1132362 - DNA, 15 bp, Homo sapiens
caggggacttatata

SEQ ID NO: 1132363 - DNA, 15 bp, Homo sapiens
tcaggggacttatat

SEQ ID NO: 1132364 - DNA, 15 bp, Homo sapiens
atcaggggacttata

SEQ ID NO: 1132365 - DNA, 15 bp, Homo sapiens
aatcaggggacttat

SEQ ID NO: 1132366 - DNA, 15 bp, Homo sapiens
gaatcaggggactta

SEQ ID NO: 1132367 - DNA, 15 bp, Homo sapiens
agaatcaggggactt

SEQ ID NO: 1132368 - DNA, 15 bp, Homo sapiens
aagaatcaggggact

SEQ ID NO: 1132369 - DNA, 15 bp, Homo sapiens
taagaatcaggggac

SEQ ID NO: 1132370 - DNA, 15 bp, Homo sapiens
ctaagaatcagggga

SEQ ID NO: 1132371 - DNA, 15 bp, Homo sapiens
tctaagaatcagggg

SEQ ID NO: 1132372 - DNA, 15 bp, Homo sapiens
ttctaagaatcaggg

SEQ ID NO: 1132373 - DNA, 15 bp, Homo sapiens
gttctaagaatcagg

SEQ ID NO: 1132374 - DNA, 15 bp, Homo sapiens
tgttctaagaatcag

SEQ ID NO: 1132375 - DNA, 15 bp, Homo sapiens
atgttctaagaatca

SEQ ID NO: 1132376 - DNA, 15 bp, Homo sapiens
catgttctaagaatc

SEQ ID NO: 1132377 - DNA, 15 bp, Homo sapiens
tcatgttctaagaat

SEQ ID NO: 1132378 - DNA, 15 bp, Homo sapiens
ttcatgttctaagaa

SEQ ID NO: 1132379 - DNA, 15 bp, Homo sapiens
cttcatgttctaaga

SEQ ID NO: 1132380 - DNA, 15 bp, Homo sapiens
ccttcatgttctaag

SEQ ID NO: 1132381 - DNA, 15 bp, Homo sapiens
accttcatgttctaa

SEQ ID NO: 1132382 - DNA, 15 bp, Homo sapiens
caccttcatgttcta

SEQ ID NO: 1132383 - DNA, 15 bp, Homo sapiens
acaccttcatgttct

SEQ ID NO: 1132384 - DNA, 15 bp, Homo sapiens
tacaccttcatgttc

SEQ ID NO: 1132385 - DNA, 15 bp, Homo sapiens
ctacaccttcatgtt

SEQ ID NO: 1132386 - DNA, 15 bp, Homo sapiens
actacaccttcatgt

SEQ ID NO: 1132387 - DNA, 15 bp, Homo sapiens
tactacaccttcatg

SEQ ID NO: 1132388 - DNA, 15 bp, Homo sapiens
ctactacaccttcat

SEQ ID NO: 1132389 - DNA, 15 bp, Homo sapiens
actactacaccttca

SEQ ID NO: 1132390 - DNA, 15 bp, Homo sapiens
gactactacaccttc

SEQ ID NO: 1132391 - DNA, 15 bp, Homo sapiens
tgactactacacctt

SEQ ID NO: 1132392 - DNA, 15 bp, Homo sapiens
ttgactactacacct

SEQ ID NO: 1132393 - DNA, 15 bp, Homo sapiens
cttgactactacacc

SEQ ID NO: 1132394 - DNA, 15 bp, Homo sapiens
ccttgactactacac

SEQ ID NO: 1132395 - DNA, 15 bp, Homo sapiens
accttgactactaca

SEQ ID NO: 1132396 - DNA, 15 bp, Homo sapiens
aaccttgactactac

SEQ ID NO: 1132397 - DNA, 15 bp, Homo sapiens
caaccttgactacta

SEQ ID NO: 1132398 - DNA, 15 bp, Homo sapiens
ccaaccttgactact

SEQ ID NO: 1132399 - DNA, 15 bp, Homo sapiens
accaaccttgactac

SEQ ID NO: 1132400 - DNA, 15 bp, Homo sapiens
gaccaaccttgacta

SEQ ID NO: 1132401 - DNA, 15 bp, Homo sapiens
ggaccaaccttgact

SEQ ID NO: 1132402 - DNA, 15 bp, Homo sapiens
gggaccaaccttgac

SEQ ID NO: 1132403 - DNA, 15 bp, Homo sapiens
agggaccaaccttga

SEQ ID NO: 1132404 - DNA, 15 bp, Homo sapiens
aagggaccaaccttg

SEQ ID NO: 1132405 - DNA, 15 bp, Homo sapiens
caagggaccaacctt

SEQ ID NO: 1132406 - DNA, 15 bp, Homo sapiens
tcaagggaccaacct

SEQ ID NO: 1132407 - DNA, 15 bp, Homo sapiens
ttcaagggaccaacc

SEQ ID NO: 1132408 - DNA, 15 bp, Homo sapiens
tttcaagggaccaac

SEQ ID NO: 1132409 - DNA, 15 bp, Homo sapiens
gtttcaagggaccaa

SEQ ID NO: 1132410 - DNA, 15 bp, Homo sapiens
ggtttcaagggacca

SEQ ID NO: 1132411 - DNA, 15 bp, Homo sapiens
tggtttcaagggacc

SEQ ID NO: 1132412 - DNA, 15 bp, Homo sapiens
gtggtttcaagggac

SEQ ID NO: 1132413 - DNA, 15 bp, Homo sapiens
tgtggtttcaaggga

SEQ ID NO: 1132414 - DNA, 15 bp, Homo sapiens
ttgtggtttcaaggg

SEQ ID NO: 1132415 - DNA, 15 bp, Homo sapiens
tttgtggtttcaagg

SEQ ID NO: 1132416 - DNA, 15 bp, Homo sapiens
atttgtggtttcaag

SEQ ID NO: 1132417 - DNA, 15 bp, Homo sapiens
aatttgtggtttcaa

SEQ ID NO: 1132418 - DNA, 15 bp, Homo sapiens
aaatttgtggtttca

SEQ ID NO: 1132419 - DNA, 15 bp, Homo sapiens
aaaatttgtggtttc

SEQ ID NO: 1132420 - DNA, 15 bp, Homo sapiens
caaaatttgtggttt

SEQ ID NO: 1132421 - DNA, 15 bp, Homo sapiens
acaaaatttgtggtt

SEQ ID NO: 1132422 - DNA, 15 bp, Homo sapiens
cacaaaatttgtggt

SEQ ID NO: 1132423 - DNA, 15 bp, Homo sapiens
tcacaaaatttgtgg

SEQ ID NO: 1132424 - DNA, 15 bp, Homo sapiens
ttcacaaaatttgtg

SEQ ID NO: 1132425 - DNA, 15 bp, Homo sapiens
tttcacaaaatttgt

SEQ ID NO: 1132426 - DNA, 15 bp, Homo sapiens
ttttcacaaaatttg

SEQ ID NO: 1132427 - DNA, 15 bp, Homo sapiens
ttttttcacaaaatt

SEQ ID NO: 1132428 - DNA, 15 bp, Homo sapiens
tttttttcacaaaat

SEQ ID NO: 1132429 - DNA, 15 bp, Homo sapiens
ttttttttcacaaaa

SEQ ID NO: 1132430 - DNA, 15 bp, Homo sapiens
attttttttcacaaa

SEQ ID NO: 1132431 - DNA, 15 bp, Homo sapiens
aattttttttcacaa

SEQ ID NO: 1132432 - DNA, 15 bp, Homo sapiens
taattttttttcaca

SEQ ID NO: 1132433 - DNA, 15 bp, Homo sapiens
ttaattttttttcac

SEQ ID NO: 1132434 - DNA, 15 bp, Homo sapiens
cttaattttttttca

SEQ ID NO: 1132435 - DNA, 15 bp, Homo sapiens
tcttaattttttttc

SEQ ID NO: 1132436 - DNA, 15 bp, Homo sapiens
ttcttaatttttttt

SEQ ID NO: 1132437 - DNA, 15 bp, Homo sapiens
tttcttaattttttt

SEQ ID NO: 1132438 - DNA, 15 bp, Homo sapiens
ttttcttaatttttt

SEQ ID NO: 1132439 - DNA, 15 bp, Homo sapiens
attttcttaattttt

SEQ ID NO: 1132440 - DNA, 15 bp, Homo sapiens
aattttcttaatttt

SEQ ID NO: 1132441 - DNA, 15 bp, Homo sapiens
caattttcttaattt

SEQ ID NO: 1132442 - DNA, 15 bp, Homo sapiens
tcaattttcttaatt

SEQ ID NO: 1132443 - DNA, 15 bp, Homo sapiens
ttcaattttcttaat

SEQ ID NO: 1132444 - DNA, 15 bp, Homo sapiens
attcaattttcttaa

SEQ ID NO: 1132445 - DNA, 15 bp, Homo sapiens
tattcaattttctta

SEQ ID NO: 1132446 - DNA, 15 bp, Homo sapiens
ttattcaattttctt

SEQ ID NO: 1132447 - DNA, 15 bp, Homo sapiens
attattcaattttct

SEQ ID NO: 1132448 - DNA, 15 bp, Homo sapiens
aattattcaattttc

SEQ ID NO: 1132449 - DNA, 15 bp, Homo sapiens
aaattattcaatttt

SEQ ID NO: 1132450 - DNA, 15 bp, Homo sapiens
gaaattattcaattt

SEQ ID NO: 1132451 - DNA, 15 bp, Homo sapiens
ggaaattattcaatt

SEQ ID NO: 1132452 - DNA, 15 bp, Homo sapiens
aggaaattattcaat

SEQ ID NO: 1132453 - DNA, 15 bp, Homo sapiens
gaggaaattattcaa

SEQ ID NO: 1132454 - DNA, 15 bp, Homo sapiens
tgaggaaattattca

SEQ ID NO: 1132455 - DNA, 15 bp, Homo sapiens
ctgaggaaattattc

SEQ ID NO: 1132456 - DNA, 15 bp, Homo sapiens
gctgaggaaattatt

SEQ ID NO: 1132457 - DNA, 15 bp, Homo sapiens
tgctgaggaaattat

SEQ ID NO: 1132458 - DNA, 15 bp, Homo sapiens
ttgctgaggaaatta

SEQ ID NO: 1132459 - DNA, 15 bp, Homo sapiens
tttgctgaggaaatt

SEQ ID NO: 1132460 - DNA, 15 bp, Homo sapiens
atttgctgaggaaat

SEQ ID NO: 1132461 - DNA, 15 bp, Homo sapiens
tatttgctgaggaaa

SEQ ID NO: 1132462 - DNA, 15 bp, Homo sapiens
gtatttgctgaggaa

SEQ ID NO: 1132463 - DNA, 15 bp, Homo sapiens
tgtatttgctgagga

SEQ ID NO: 1132464 - DNA, 15 bp, Homo sapiens
atgtatttgctgagg

SEQ ID NO: 1132465 - DNA, 15 bp, Homo sapiens
tatgtatttgctgag

SEQ ID NO: 1132466 - DNA, 15 bp, Homo sapiens
atatgtatttgctga

SEQ ID NO: 1132467 - DNA, 15 bp, Homo sapiens
aatatgtatttgctg

SEQ ID NO: 1132468 - DNA, 15 bp, Homo sapiens
caatatgtatttgct

SEQ ID NO: 1132469 - DNA, 15 bp, Homo sapiens
gatcaatatgtattt

SEQ ID NO: 1132470 - DNA, 15 bp, Homo sapiens
tgatcaatatgtatt

SEQ ID NO: 1132471 - DNA, 15 bp, Homo sapiens
atgatcaatatgtat

SEQ ID NO: 1132472 - DNA, 15 bp, Homo sapiens
gatgatcaatatgta

SEQ ID NO: 1132473 - DNA, 15 bp, Homo sapiens
agatgatcaatatgt

SEQ ID NO: 1132474 - DNA, 15 bp, Homo sapiens
cagatgatcaatatg

SEQ ID NO: 1132475 - DNA, 15 bp, Homo sapiens
acagatgatcaatat

SEQ ID NO: 1132476 - DNA, 15 bp, Homo sapiens
aacagatgatcaata

SEQ ID NO: 1132477 - DNA, 15 bp, Homo sapiens
taacagatgatcaat

SEQ ID NO: 1132478 - DNA, 15 bp, Homo sapiens
ataacagatgatcaa

SEQ ID NO: 1132479 - DNA, 15 bp, Homo sapiens
tataacagatgatca

SEQ ID NO: 1132480 - DNA, 15 bp, Homo sapiens
gtataacagatgatc

SEQ ID NO: 1132481 - DNA, 15 bp, Homo sapiens
tgtataacagatgat

SEQ ID NO: 1132482 - DNA, 15 bp, Homo sapiens
ctgtataacagatga

SEQ ID NO: 1132483 - DNA, 15 bp, Homo sapiens
gctgtataacagatg

SEQ ID NO: 1132484 - DNA, 15 bp, Homo sapiens
ggctgtataacagat

SEQ ID NO: 1132485 - DNA, 15 bp, Homo sapiens
tggctgtataacaga

SEQ ID NO: 1132486 - DNA, 15 bp, Homo sapiens
atggctgtataacag

SEQ ID NO: 1132487 - DNA, 15 bp, Homo sapiens
catggctgtataaca

SEQ ID NO: 1132488 - DNA, 15 bp, Homo sapiens
tcatggctgtataac

SEQ ID NO: 1132489 - DNA, 15 bp, Homo sapiens
ctcatggctgtataa

SEQ ID NO: 1132490 - DNA, 15 bp, Homo sapiens
tctcatggctgtata

SEQ ID NO: 1132491 - DNA, 15 bp, Homo sapiens
ttctcatggctgtat

SEQ ID NO: 1132492 - DNA, 15 bp, Homo sapiens
cttctcatggctgta

SEQ ID NO: 1132493 - DNA, 15 bp, Homo sapiens
acttctcatggctgt

SEQ ID NO: 1132494 - DNA, 15 bp, Homo sapiens
cacttctcatggctg

SEQ ID NO: 1132495 - DNA, 15 bp, Homo sapiens
ccacttctcatggct

SEQ ID NO: 1132496 - DNA, 15 bp, Homo sapiens
accacttctcatggc

SEQ ID NO: 1132497 - DNA, 15 bp, Homo sapiens
aaccacttctcatgg

SEQ ID NO: 1132498 - DNA, 15 bp, Homo sapiens
gaaccacttctcatg

SEQ ID NO: 1132499 - DNA, 15 bp, Homo sapiens
agaaccacttctcat

SEQ ID NO: 1132500 - DNA, 15 bp, Homo sapiens
cagaaccacttctca

SEQ ID NO: 1132501 - DNA, 15 bp, Homo sapiens
acagaaccacttctc

SEQ ID NO: 1132502 - DNA, 15 bp, Homo sapiens
aacagaaccacttct

SEQ ID NO: 1132503 - DNA, 15 bp, Homo sapiens
caacagaaccacttc

SEQ ID NO: 1132504 - DNA, 15 bp, Homo sapiens
gcaacagaaccactt

SEQ ID NO: 1132505 - DNA, 15 bp, Homo sapiens
tgcaacagaaccact

SEQ ID NO: 1132506 - DNA, 15 bp, Homo sapiens
gtgcaacagaaccac

SEQ ID NO: 1132507 - DNA, 15 bp, Homo sapiens
tgtgcaacagaacca

SEQ ID NO: 1132508 - DNA, 15 bp, Homo sapiens
gtgtgcaacagaacc

SEQ ID NO: 1132509 - DNA, 15 bp, Homo sapiens
cgtgtgcaacagaac

SEQ ID NO: 1132510 - DNA, 15 bp, Homo sapiens
acgtgtgcaacagaa

SEQ ID NO: 1132511 - DNA, 15 bp, Homo sapiens
aacgtgtgcaacaga

SEQ ID NO: 1132512 - DNA, 15 bp, Homo sapiens
aaacgtgtgcaacag

SEQ ID NO: 1132513 - DNA, 15 bp, Homo sapiens
taaacgtgtgcaaca

SEQ ID NO: 1132514 - DNA, 15 bp, Homo sapiens
ataaacgtgtgcaac

SEQ ID NO: 1132515 - DNA, 15 bp, Homo sapiens
aataaacgtgtgcaa

SEQ ID NO: 1132516 - DNA, 15 bp, Homo sapiens
aaataaacgtgtgca

SEQ ID NO: 1132517 - DNA, 15 bp, Homo sapiens
aaaataaacgtgtgc

SEQ ID NO: 1132518 - DNA, 15 bp, Homo sapiens
taaaataaacgtgtg

SEQ ID NO: 1132519 - DNA, 15 bp, Homo sapiens
ataaaataaacgtgt

SEQ ID NO: 1132520 - DNA, 15 bp, Homo sapiens
gataaaataaacgtg

SEQ ID NO: 1132521 - DNA, 15 bp, Homo sapiens
tgataaaataaacgt

SEQ ID NO: 1132522 - DNA, 15 bp, Homo sapiens
ctgataaaataaacg

SEQ ID NO: 1132523 - DNA, 15 bp, Homo sapiens
tctgataaaataaac

SEQ ID NO: 1132524 - DNA, 15 bp, Homo sapiens
atctgataaaataaa

SEQ ID NO: 1132525 - DNA, 15 bp, Homo sapiens
gatctgataaaataa

SEQ ID NO: 1132526 - DNA, 15 bp, Homo sapiens
ggatctgataaaata

SEQ ID NO: 1132527 - DNA, 15 bp, Homo sapiens
aggatctgataaaat

SEQ ID NO: 1132528 - DNA, 15 bp, Homo sapiens
taggatctgataaaa

SEQ ID NO: 1132529 - DNA, 15 bp, Homo sapiens
ttaggatctgataaa

SEQ ID NO: 1132530 - DNA, 15 bp, Homo sapiens
attaggatctgataa

SEQ ID NO: 1132531 - DNA, 15 bp, Homo sapiens
gattaggatctgata

SEQ ID NO: 1132532 - DNA, 15 bp, Homo sapiens
ggattaggatctgat

SEQ ID NO: 1132533 - DNA, 15 bp, Homo sapiens
gggattaggatctga

SEQ ID NO: 1132534 - DNA, 15 bp, Homo sapiens
tgggattaggatctg

SEQ ID NO: 1132535 - DNA, 15 bp, Homo sapiens
ttgggattaggatct

SEQ ID NO: 1132536 - DNA, 15 bp, Homo sapiens
tttgggattaggatc

SEQ ID NO: 1132537 - DNA, 15 bp, Homo sapiens
gtttgggattaggat

SEQ ID NO: 1132538 - DNA, 15 bp, Homo sapiens
ggtttgggattagga

SEQ ID NO: 1132539 - DNA, 15 bp, Homo sapiens
tggtttgggattagg

SEQ ID NO: 1132540 - DNA, 15 bp, Homo sapiens
ctggtttgggattag

SEQ ID NO: 1132541 - DNA, 15 bp, Homo sapiens
cctggtttgggatta

SEQ ID NO: 1132542 - DNA, 15 bp, Homo sapiens
gcctggtttgggatt

SEQ ID NO: 1132543 - DNA, 15 bp, Homo sapiens
tgcctggtttgggat

SEQ ID NO: 1132544 - DNA, 15 bp, Homo sapiens
atgcctggtttggga

SEQ ID NO: 1132545 - DNA, 15 bp, Homo sapiens
tatgcctggtttggg

SEQ ID NO: 1132546 - DNA, 15 bp, Homo sapiens
ttatgcctggtttgg

SEQ ID NO: 1132547 - DNA, 15 bp, Homo sapiens
tttatgcctggtttg

SEQ ID NO: 1132548 - DNA, 15 bp, Homo sapiens
ttttatgcctggttt

SEQ ID NO: 1132549 - DNA, 15 bp, Homo sapiens
attttatgcctggtt

SEQ ID NO: 1132550 - DNA, 15 bp, Homo sapiens
cattttatgcctggt

SEQ ID NO: 1132551 - DNA, 15 bp, Homo sapiens
ccattttatgcctgg

SEQ ID NO: 1132552 - DNA, 15 bp, Homo sapiens
tccattttatgcctg

SEQ ID NO: 1132553 - DNA, 15 bp, Homo sapiens
ttccattttatgcct

SEQ ID NO: 1132554 - DNA, 15 bp, Homo sapiens
tttccattttatgcc

SEQ ID NO: 1132555 - DNA, 15 bp, Homo sapiens
gtttccattttatgc

SEQ ID NO: 1132556 - DNA, 15 bp, Homo sapiens
ggtttccattttatg

SEQ ID NO: 1132557 - DNA, 15 bp, Homo sapiens
tggtttccattttat

SEQ ID NO: 1132558 - DNA, 15 bp, Homo sapiens
atggtttccatttta

SEQ ID NO: 1132559 - DNA, 15 bp, Homo sapiens
catggtttccatttt

SEQ ID NO: 1132560 - DNA, 15 bp, Homo sapiens
tcatggtttccattt

SEQ ID NO: 1132561 - DNA, 15 bp, Homo sapiens
ttcatggtttccatt

SEQ ID NO: 1132562 - DNA, 15 bp, Homo sapiens
cttcatggtttccat

SEQ ID NO: 1132563 - DNA, 15 bp, Homo sapiens
tcttcatggtttcca

SEQ ID NO: 1132564 - DNA, 15 bp, Homo sapiens
atcttcatggtttcc

SEQ ID NO: 1132565 - DNA, 15 bp, Homo sapiens
tatcttcatggtttc

SEQ ID NO: 1132566 - DNA, 15 bp, Homo sapiens
ctatcttcatggttt

SEQ ID NO: 1132567 - DNA, 15 bp, Homo sapiens
cctatcttcatggtt

SEQ ID NO: 1132568 - DNA, 15 bp, Homo sapiens
tcctatcttcatggt

SEQ ID NO: 1132569 - DNA, 15 bp, Homo sapiens
atcctatcttcatgg

SEQ ID NO: 1132570 - DNA, 15 bp, Homo sapiens
catcctatcttcatg

SEQ ID NO: 1132571 - DNA, 15 bp, Homo sapiens
tcatcctatcttcat

SEQ ID NO: 1132572 - DNA, 15 bp, Homo sapiens
ttcatcctatcttca

SEQ ID NO: 1132573 - DNA, 15 bp, Homo sapiens
tttcatcctatcttc

SEQ ID NO: 1132574 - DNA, 15 bp, Homo sapiens
atttcatcctatctt

SEQ ID NO: 1132575 - DNA, 15 bp, Homo sapiens
tatttcatcctatct

SEQ ID NO: 1132576 - DNA, 15 bp, Homo sapiens
ttatttcatcctatc

SEQ ID NO: 1132577 - DNA, 15 bp, Homo sapiens
gttatttcatcctat

SEQ ID NO: 1132578 - DNA, 15 bp, Homo sapiens
agttatttcatccta

SEQ ID NO: 1132579 - DNA, 15 bp, Homo sapiens
aagttatttcatcct

SEQ ID NO: 1132580 - DNA, 15 bp, Homo sapiens
gaagttatttcatcc

SEQ ID NO: 1132581 - DNA, 15 bp, Homo sapiens
agaagttatttcatc

SEQ ID NO: 1132582 - DNA, 15 bp, Homo sapiens
cagaagttatttcat

SEQ ID NO: 1132583 - DNA, 15 bp, Homo sapiens
tcagaagttatttca

SEQ ID NO: 1132584 - DNA, 15 bp, Homo sapiens
ttcagaagttatttc

SEQ ID NO: 1132585 - DNA, 15 bp, Homo sapiens
attcagaagttattt

SEQ ID NO: 1132586 - DNA, 15 bp, Homo sapiens
cattcagaagttatt

SEQ ID NO: 1132587 - DNA, 15 bp, Homo sapiens
acattcagaagttat

SEQ ID NO: 1132588 - DNA, 15 bp, Homo sapiens
aacattcagaagtta

SEQ ID NO: 1132589 - DNA, 15 bp, Homo sapiens
aaacattcagaagtt

SEQ ID NO: 1132590 - DNA, 15 bp, Homo sapiens
caaacattcagaagt

SEQ ID NO: 1132591 - DNA, 15 bp, Homo sapiens
tcaaacattcagaag

SEQ ID NO: 1132592 - DNA, 15 bp, Homo sapiens
ttcaaacattcagaa

SEQ ID NO: 1132593 - DNA, 15 bp, Homo sapiens
attcaaacattcaga

SEQ ID NO: 1132594 - DNA, 15 bp, Homo sapiens
cattcaaacattcag

SEQ ID NO: 1132595 - DNA, 15 bp, Homo sapiens
acattcaaacattca

SEQ ID NO: 1132596 - DNA, 15 bp, Homo sapiens
aacattcaaacattc

SEQ ID NO: 1132597 - DNA, 15 bp, Homo sapiens
aaacattcaaacatt

SEQ ID NO: 1132598 - DNA, 15 bp, Homo sapiens
caaacattcaaacat

SEQ ID NO: 1132599 - DNA, 15 bp, Homo sapiens
tcaaacattcaaaca

SEQ ID NO: 1132600 - DNA, 15 bp, Homo sapiens
ttcaaacattcaaac

SEQ ID NO: 1132601 - DNA, 15 bp, Homo sapiens
tttcaaacattcaaa

SEQ ID NO: 1132602 - DNA, 15 bp, Homo sapiens
ttttcaaacattcaa

SEQ ID NO: 1132603 - DNA, 15 bp, Homo sapiens
attttcaaacattca

SEQ ID NO: 1132604 - DNA, 15 bp, Homo sapiens
tattttcaaacattc

SEQ ID NO: 1132605 - DNA, 15 bp, Homo sapiens
ctattttcaaacatt

SEQ ID NO: 1132606 - DNA, 15 bp, Homo sapiens
actattttcaaacat

SEQ ID NO: 1132607 - DNA, 15 bp, Homo sapiens
cactattttcaaaca

SEQ ID NO: 1132608 - DNA, 15 bp, Homo sapiens
acactattttcaaac

SEQ ID NO: 1132609 - DNA, 15 bp, Homo sapiens
tacactattttcaaa

SEQ ID NO: 1132610 - DNA, 15 bp, Homo sapiens
gtacactattttcaa

SEQ ID NO: 1132611 - DNA, 15 bp, Homo sapiens
agtacactattttca

SEQ ID NO: 1132612 - DNA, 15 bp, Homo sapiens
aagtacactattttc

SEQ ID NO: 1132613 - DNA, 15 bp, Homo sapiens
taagtacactatttt

SEQ ID NO: 1132614 - DNA, 15 bp, Homo sapiens
ttaagtacactattt

SEQ ID NO: 1132615 - DNA, 15 bp, Homo sapiens
tttaagtacactatt

SEQ ID NO: 1132616 - DNA, 15 bp, Homo sapiens
ttttaagtacactat

SEQ ID NO: 1132617 - DNA, 15 bp, Homo sapiens
tttttaagtacacta

SEQ ID NO: 1132618 - DNA, 15 bp, Homo sapiens
atttttaagtacact

SEQ ID NO: 1132619 - DNA, 15 bp, Homo sapiens
tatttttaagtacac

SEQ ID NO: 1132620 - DNA, 15 bp, Homo sapiens
gtatttttaagtaca

SEQ ID NO: 1132621 - DNA, 15 bp, Homo sapiens
ggtatttttaagtac

SEQ ID NO: 1132622 - DNA, 15 bp, Homo sapiens
tggtatttttaagta

SEQ ID NO: 1132623 - DNA, 15 bp, Homo sapiens
ctggtatttttaagt

SEQ ID NO: 1132624 - DNA, 15 bp, Homo sapiens
cctggtatttttaag

SEQ ID NO: 1132625 - DNA, 15 bp, Homo sapiens
acctggtatttttaa

SEQ ID NO: 1132626 - DNA, 15 bp, Homo sapiens
cacctggtattttta

SEQ ID NO: 1132627 - DNA, 15 bp, Homo sapiens
ccacctggtattttt

SEQ ID NO: 1132628 - DNA, 15 bp, Homo sapiens
accacctggtatttt

SEQ ID NO: 1132629 - DNA, 15 bp, Homo sapiens
aaccacctggtattt

SEQ ID NO: 1132630 - DNA, 15 bp, Homo sapiens
aaaccacctggtatt

SEQ ID NO: 1132631 - DNA, 15 bp, Homo sapiens
aaaaccacctggtat

SEQ ID NO: 1132632 - DNA, 15 bp, Homo sapiens
aaaaaccacctggta

SEQ ID NO: 1132633 - DNA, 15 bp, Homo sapiens
caaaaaccacctggt

SEQ ID NO: 1132634 - DNA, 15 bp, Homo sapiens
acaaaaaccacctgg

SEQ ID NO: 1132635 - DNA, 15 bp, Homo sapiens
aacaaaaaccacctg

SEQ ID NO: 1132636 - DNA, 15 bp, Homo sapiens
aaacaaaaaccacct

SEQ ID NO: 1132637 - DNA, 15 bp, Homo sapiens
caaacaaaaaccacc

SEQ ID NO: 1132638 - DNA, 15 bp, Homo sapiens
acaaacaaaaaccac

SEQ ID NO: 1132639 - DNA, 15 bp, Homo sapiens
aacaaacaaaaacca

SEQ ID NO: 1132640 - DNA, 15 bp, Homo sapiens
aaacaaacaaaaacc

SEQ ID NO: 1132641 - DNA, 15 bp, Homo sapiens
aaaacaaacaaaaac

SEQ ID NO: 1132642 - DNA, 15 bp, Homo sapiens
aaaaaaacaaaaaac

SEQ ID NO: 1132643 - DNA, 15 bp, Homo sapiens
tcaaaaaaagaaaaa

SEQ ID NO: 1132644 - DNA, 15 bp, Homo sapiens
ctcaaaaaaagaaaa

SEQ ID NO: 1132645 - DNA, 15 bp, Homo sapiens
tctcaaaaaaagaaa

SEQ ID NO: 1132646 - DNA, 15 bp, Homo sapiens
gtctcaaaaaaagaa

SEQ ID NO: 1132647 - DNA, 15 bp, Homo sapiens
tgtctcaaaaaaaga

SEQ ID NO: 1132648 - DNA, 15 bp, Homo sapiens
ctgtctcaaaaaaag

SEQ ID NO: 1132649 - DNA, 15 bp, Homo sapiens
caccactacactcca

SEQ ID NO: 1132650 - DNA, 15 bp, Homo sapiens
gcaccactacactcc

SEQ ID NO: 1132651 - DNA, 15 bp, Homo sapiens
tgcaccactacactc

SEQ ID NO: 1132652 - DNA, 15 bp, Homo sapiens
ttgcaccactacact

SEQ ID NO: 1132653 - DNA, 15 bp, Homo sapiens
attgcaccactacac

SEQ ID NO: 1132654 - DNA, 15 bp, Homo sapiens
gattgcaccactaca

SEQ ID NO: 1132655 - DNA, 15 bp, Homo sapiens
agattgcaccactac

SEQ ID NO: 1132656 - DNA, 15 bp, Homo sapiens
gagattgcaccacta

SEQ ID NO: 1132657 - DNA, 15 bp, Homo sapiens
atgagattgcaccac

SEQ ID NO: 1132658 - DNA, 15 bp, Homo sapiens
gatgagattgcacca

SEQ ID NO: 1132659 - DNA, 15 bp, Homo sapiens
agatgagattgcacc

SEQ ID NO: 1132660 - DNA, 15 bp, Homo sapiens
gagatgagattgcac

SEQ ID NO: 1132661 - DNA, 15 bp, Homo sapiens
tgagatgagattgca

SEQ ID NO: 1132662 - DNA, 15 bp, Homo sapiens
atgagatgagattgc

SEQ ID NO: 1132663 - DNA, 15 bp, Homo sapiens
aatgagatgagattg

SEQ ID NO: 1132664 - DNA, 15 bp, Homo sapiens
caatgagatgagatt

SEQ ID NO: 1132665 - DNA, 15 bp, Homo sapiens
gcaatgagatgagat

SEQ ID NO: 1132666 - DNA, 15 bp, Homo sapiens
tgcaatgagatgaga

SEQ ID NO: 1132667 - DNA, 15 bp, Homo sapiens
ctgcaatgagatgag

SEQ ID NO: 1132668 - DNA, 15 bp, Homo sapiens
actgcaatgagatga

SEQ ID NO: 1132669 - DNA, 15 bp, Homo sapiens
gactgcaatgagatg

SEQ ID NO: 1132670 - DNA, 15 bp, Homo sapiens
agactgcaatgagat

SEQ ID NO: 1132671 - DNA, 15 bp, Homo sapiens
aagactgcaatgaga

SEQ ID NO: 1132672 - DNA, 15 bp, Homo sapiens
caagactgcaatgag

SEQ ID NO: 1132673 - DNA, 15 bp, Homo sapiens
tcaagactgcaatga

SEQ ID NO: 1132674 - DNA, 15 bp, Homo sapiens
gtcaagactgcaatg

SEQ ID NO: 1132675 - DNA, 15 bp, Homo sapiens
ggtcaagactgcaat

SEQ ID NO: 1132676 - DNA, 15 bp, Homo sapiens
aggtcaagactgcaa

SEQ ID NO: 1132677 - DNA, 15 bp, Homo sapiens
gaggtcaagactgca

SEQ ID NO: 1132678 - DNA, 15 bp, Homo sapiens
ggaggtcaagactgc

SEQ ID NO: 1132679 - DNA, 15 bp, Homo sapiens
gggaggtcaagactg

SEQ ID NO: 1132680 - DNA, 15 bp, Homo sapiens
tgggaggtcaagact

SEQ ID NO: 1132681 - DNA, 15 bp, Homo sapiens
ctgggaggtcaagac

SEQ ID NO: 1132682 - DNA, 15 bp, Homo sapiens
cctgggaggtcaaga

SEQ ID NO: 1132683 - DNA, 15 bp, Homo sapiens
ctgagcctgggaggt

SEQ ID NO: 1132684 - DNA, 15 bp, Homo sapiens
cctgagcctgggagg

SEQ ID NO: 1132685 - DNA, 15 bp, Homo sapiens
acctgagcctgggag

SEQ ID NO: 1132686 - DNA, 15 bp, Homo sapiens
aacctgagcctggga

SEQ ID NO: 1132687 - DNA, 15 bp, Homo sapiens
taacctgagcctggg

SEQ ID NO: 1132688 - DNA, 15 bp, Homo sapiens
ataacctgagcctgg

SEQ ID NO: 1132689 - DNA, 15 bp, Homo sapiens
gataacctgagcctg

SEQ ID NO: 1132690 - DNA, 15 bp, Homo sapiens
agataacctgagcct

SEQ ID NO: 1132691 - DNA, 15 bp, Homo sapiens
gagataacctgagcc

SEQ ID NO: 1132692 - DNA, 15 bp, Homo sapiens
ggagataacctgagc

SEQ ID NO: 1132693 - DNA, 15 bp, Homo sapiens
gggagataacctgag

SEQ ID NO: 1132694 - DNA, 15 bp, Homo sapiens
tgggagataacctga

SEQ ID NO: 1132695 - DNA, 15 bp, Homo sapiens
gtgggagataacctg

SEQ ID NO: 1132696 - DNA, 15 bp, Homo sapiens
ggtgggagataacct

SEQ ID NO: 1132697 - DNA, 15 bp, Homo sapiens
aggtgggagataacc

SEQ ID NO: 1132698 - DNA, 15 bp, Homo sapiens
gaggtgggagataac

SEQ ID NO: 1132699 - DNA, 15 bp, Homo sapiens
tgaggtgggagataa

SEQ ID NO: 1132700 - DNA, 15 bp, Homo sapiens
ctgaggtgggagata

SEQ ID NO: 1132701 - DNA, 15 bp, Homo sapiens
gctgaggtgggagat

SEQ ID NO: 1132702 - DNA, 15 bp, Homo sapiens
tgtgcctgtagtccc

SEQ ID NO: 1132703 - DNA, 15 bp, Homo sapiens
atgtgcctgtagtcc

SEQ ID NO: 1132704 - DNA, 15 bp, Homo sapiens
catgtgcctgtagtc

SEQ ID NO: 1132705 - DNA, 15 bp, Homo sapiens
gcatgtgcctgtagt

SEQ ID NO: 1132706 - DNA, 15 bp, Homo sapiens
ggcatgtgcctgtag

SEQ ID NO: 1132707 - DNA, 15 bp, Homo sapiens
tggcatgtgcctgta

SEQ ID NO: 1132708 - DNA, 15 bp, Homo sapiens
gtggcatgtgcctgt

SEQ ID NO: 1132709 - DNA, 15 bp, Homo sapiens
ggtggcatgtgcctg

SEQ ID NO: 1132710 - DNA, 15 bp, Homo sapiens
gtggtggcatgtgcc

SEQ ID NO: 1132711 - DNA, 15 bp, Homo sapiens
cgtggtggcatgtgc

SEQ ID NO: 1132712 - DNA, 15 bp, Homo sapiens
gcgtggtggcatgtg

SEQ ID NO: 1132713 - DNA, 15 bp, Homo sapiens
ggcgtggtggcatgt

SEQ ID NO: 1132714 - DNA, 15 bp, Homo sapiens
aaaaaatacaaaaaa

SEQ ID NO: 1132715 - DNA, 15 bp, Homo sapiens
cgtctctacaaaaaa

SEQ ID NO: 1132716 - DNA, 15 bp, Homo sapiens
ccgtctctacaaaaa

SEQ ID NO: 1132717 - DNA, 15 bp, Homo sapiens
cccgtctctacaaaa

SEQ ID NO: 1132718 - DNA, 15 bp, Homo sapiens
aaccccgtctctaca

SEQ ID NO: 1132719 - DNA, 15 bp, Homo sapiens
gggtgaaaccccgtc

SEQ ID NO: 1132720 - DNA, 15 bp, Homo sapiens
agggtgaaaccccgt

SEQ ID NO: 1132721 - DNA, 15 bp, Homo sapiens
cagggtgaaaccccg

SEQ ID NO: 1132722 - DNA, 15 bp, Homo sapiens
acagggtgaaacccc

SEQ ID NO: 1132723 - DNA, 15 bp, Homo sapiens
gcaacagggtgaaac

SEQ ID NO: 1132724 - DNA, 15 bp, Homo sapiens
ggcaacagggtgaaa

SEQ ID NO: 1132725 - DNA, 15 bp, Homo sapiens
gggcaacagggtgaa

SEQ ID NO: 1132726 - DNA, 15 bp, Homo sapiens
tgggcaacagggtga

SEQ ID NO: 1132727 - DNA, 15 bp, Homo sapiens
ctgggcaacagggtg

SEQ ID NO: 1132728 - DNA, 15 bp, Homo sapiens
cctgggcaacagggt

SEQ ID NO: 1132729 - DNA, 15 bp, Homo sapiens
tagaccagcctgggc

SEQ ID NO: 1132730 - DNA, 15 bp, Homo sapiens
ctagaccagcctggg

SEQ ID NO: 1132731 - DNA, 15 bp, Homo sapiens
ggagttctagaccag

SEQ ID NO: 1132732 - DNA, 15 bp, Homo sapiens
aggagttctagacca

SEQ ID NO: 1132733 - DNA, 15 bp, Homo sapiens
caggagttctagacc

SEQ ID NO: 1132734 - DNA, 15 bp, Homo sapiens
ccaggagttctagac

SEQ ID NO: 1132735 - DNA, 15 bp, Homo sapiens
cccaggagttctaga

SEQ ID NO: 1132736 - DNA, 15 bp, Homo sapiens
gcccaggagttctag

SEQ ID NO: 1132737 - DNA, 15 bp, Homo sapiens
agcccaggagttcta

SEQ ID NO: 1132738 - DNA, 15 bp, Homo sapiens
aagcccaggagttct

SEQ ID NO: 1132739 - DNA, 15 bp, Homo sapiens
gcttaagcccaggag

SEQ ID NO: 1132740 - DNA, 15 bp, Homo sapiens
cgcttaagcccagga

SEQ ID NO: 1132741 - DNA, 15 bp, Homo sapiens
tcgcttaagcccagg

SEQ ID NO: 1132742 - DNA, 15 bp, Homo sapiens
atcgcttaagcccag

SEQ ID NO: 1132743 - DNA, 15 bp, Homo sapiens
gatcgcttaagccca

SEQ ID NO: 1132744 - DNA, 15 bp, Homo sapiens
ggatcgcttaagccc

SEQ ID NO: 1132745 - DNA, 15 bp, Homo sapiens
aggatcgcttaagcc

SEQ ID NO: 1132746 - DNA, 15 bp, Homo sapiens
gaggatcgcttaagc

SEQ ID NO: 1132747 - DNA, 15 bp, Homo sapiens
ggaggatcgcttaag

SEQ ID NO: 1132748 - DNA, 15 bp, Homo sapiens
gggaggatcgcttaa

SEQ ID NO: 1132749 - DNA, 15 bp, Homo sapiens
tgggaggatcgctta

SEQ ID NO: 1132750 - DNA, 15 bp, Homo sapiens
atgcctgtaatccta

SEQ ID NO: 1132751 - DNA, 15 bp, Homo sapiens
catgcctgtaatcct

SEQ ID NO: 1132752 - DNA, 15 bp, Homo sapiens
tgccaggcatggtgg

SEQ ID NO: 1132753 - DNA, 15 bp, Homo sapiens
ctgccaggcatggtg

SEQ ID NO: 1132754 - DNA, 15 bp, Homo sapiens
tctgccaggcatggt

SEQ ID NO: 1132755 - DNA, 15 bp, Homo sapiens
ttctgccaggcatgg

SEQ ID NO: 1132756 - DNA, 15 bp, Homo sapiens
tttctgccaggcatg

SEQ ID NO: 1132757 - DNA, 15 bp, Homo sapiens
ttttctgccaggcat

SEQ ID NO: 1132758 - DNA, 15 bp, Homo sapiens
attttctgccaggca

SEQ ID NO: 1132759 - DNA, 15 bp, Homo sapiens
tattttctgccaggc

SEQ ID NO: 1132760 - DNA, 15 bp, Homo sapiens
gtattttctgccagg

SEQ ID NO: 1132761 - DNA, 15 bp, Homo sapiens
ggtattttctgccag

SEQ ID NO: 1132762 - DNA, 15 bp, Homo sapiens
tggtattttctgcca

SEQ ID NO: 1132763 - DNA, 15 bp, Homo sapiens
ctggtattttctgcc

SEQ ID NO: 1132764 - DNA, 15 bp, Homo sapiens
cctggtattttctgc

SEQ ID NO: 1132765 - DNA, 15 bp, Homo sapiens
acctggtattttctg

SEQ ID NO: 1132766 - DNA, 15 bp, Homo sapiens
aacctggtattttct

SEQ ID NO: 1132767 - DNA, 15 bp, Homo sapiens
aaacctggtattttc

SEQ ID NO: 1132768 - DNA, 15 bp, Homo sapiens
aaaacctggtatttt

SEQ ID NO: 1132769 - DNA, 15 bp, Homo sapiens
aaaaacctggtattt

SEQ ID NO: 1132770 - DNA, 15 bp, Homo sapiens
taaaaacctggtatt

SEQ ID NO: 1132771 - DNA, 15 bp, Homo sapiens
ttaaaaacctggtat

SEQ ID NO: 1132772 - DNA, 15 bp, Homo sapiens
cttaaaaacctggta

SEQ ID NO: 1132773 - DNA, 15 bp, Homo sapiens
acttaaaaacctggt

SEQ ID NO: 1132774 - DNA, 15 bp, Homo sapiens
tacttaaaaacctgg

SEQ ID NO: 1132775 - DNA, 15 bp, Homo sapiens
atacttaaaaacctg

SEQ ID NO: 1132776 - DNA, 15 bp, Homo sapiens
gatacttaaaaacct

SEQ ID NO: 1132777 - DNA, 15 bp, Homo sapiens
tgatacttaaaaacc

SEQ ID NO: 1132778 - DNA, 15 bp, Homo sapiens
ctgatacttaaaaac

SEQ ID NO: 1132779 - DNA, 15 bp, Homo sapiens
gctgatacttaaaaa

SEQ ID NO: 1132780 - DNA, 15 bp, Homo sapiens
tgctgatacttaaaa

SEQ ID NO: 1132781 - DNA, 15 bp, Homo sapiens
gtgctgatacttaaa

SEQ ID NO: 1132782 - DNA, 15 bp, Homo sapiens
agtgctgatacttaa

SEQ ID NO: 1132783 - DNA, 15 bp, Homo sapiens
aagtgctgatactta

SEQ ID NO: 1132784 - DNA, 15 bp, Homo sapiens
taagtgctgatactt

SEQ ID NO: 1132785 - DNA, 15 bp, Homo sapiens
gtaagtgctgatact

SEQ ID NO: 1132786 - DNA, 15 bp, Homo sapiens
agtaagtgctgatac

SEQ ID NO: 1132787 - DNA, 15 bp, Homo sapiens
gagtaagtgctgata

SEQ ID NO: 1132788 - DNA, 15 bp, Homo sapiens
agagtaagtgctgat

SEQ ID NO: 1132789 - DNA, 15 bp, Homo sapiens
aagagtaagtgctga

SEQ ID NO: 1132790 - DNA, 15 bp, Homo sapiens
gaagagtaagtgctg

SEQ ID NO: 1132791 - DNA, 15 bp, Homo sapiens
tgaagagtaagtgct

SEQ ID NO: 1132792 - DNA, 15 bp, Homo sapiens
ttgaagagtaagtgc

SEQ ID NO: 1132793 - DNA, 15 bp, Homo sapiens
attgaagagtaagtg

SEQ ID NO: 1132794 - DNA, 15 bp, Homo sapiens
gattgaagagtaagt

SEQ ID NO: 1132795 - DNA, 15 bp, Homo sapiens
agattgaagagtaag

SEQ ID NO: 1132796 - DNA, 15 bp, Homo sapiens
aagattgaagagtaa

SEQ ID NO: 1132797 - DNA, 15 bp, Homo sapiens
aaagattgaagagta

SEQ ID NO: 1132798 - DNA, 15 bp, Homo sapiens
aaaagattgaagagt

SEQ ID NO: 1132799 - DNA, 15 bp, Homo sapiens
gaaaagattgaagag

SEQ ID NO: 1132800 - DNA, 15 bp, Homo sapiens
agaaaagattgaaga

SEQ ID NO: 1132801 - DNA, 15 bp, Homo sapiens
tagaaaagattgaag

SEQ ID NO: 1132802 - DNA, 15 bp, Homo sapiens
aatagaaaagattga

SEQ ID NO: 1132803 - DNA, 15 bp, Homo sapiens
taatagaaaagattg

SEQ ID NO: 1132804 - DNA, 15 bp, Homo sapiens
gtaatagaaaagatt

SEQ ID NO: 1132805 - DNA, 15 bp, Homo sapiens
agtaatagaaaagat

SEQ ID NO: 1132806 - DNA, 15 bp, Homo sapiens
tagtaatagaaaaga

SEQ ID NO: 1132807 - DNA, 15 bp, Homo sapiens
atagtaatagaaaag

SEQ ID NO: 1132808 - DNA, 15 bp, Homo sapiens
catagtaatagaaaa

SEQ ID NO: 1132809 - DNA, 15 bp, Homo sapiens
acatagtaatagaaa

SEQ ID NO: 1132810 - DNA, 15 bp, Homo sapiens
aacatagtaatagaa

SEQ ID NO: 1132811 - DNA, 15 bp, Homo sapiens
caacatagtaataga

SEQ ID NO: 1132812 - DNA, 15 bp, Homo sapiens
acaacatagtaatag

SEQ ID NO: 1132813 - DNA, 15 bp, Homo sapiens
cacaacatagtaata

SEQ ID NO: 1132814 - DNA, 15 bp, Homo sapiens
gcacaacatagtaat

SEQ ID NO: 1132815 - DNA, 15 bp, Homo sapiens
agcacaacatagtaa

SEQ ID NO: 1132816 - DNA, 15 bp, Homo sapiens
tagcacaacatagta

SEQ ID NO: 1132817 - DNA, 15 bp, Homo sapiens
ttagcacaacatagt

SEQ ID NO: 1132818 - DNA, 15 bp, Homo sapiens
tttagcacaacatag

SEQ ID NO: 1132819 - DNA, 15 bp, Homo sapiens
atttagcacaacata

SEQ ID NO: 1132820 - DNA, 15 bp, Homo sapiens
catttagcacaacat

SEQ ID NO: 1132821 - DNA, 15 bp, Homo sapiens
ccatttagcacaaca

SEQ ID NO: 1132822 - DNA, 15 bp, Homo sapiens
accatttagcacaac

SEQ ID NO: 1132823 - DNA, 15 bp, Homo sapiens
taccatttagcacaa

SEQ ID NO: 1132824 - DNA, 15 bp, Homo sapiens
ataccatttagcaca

SEQ ID NO: 1132825 - DNA, 15 bp, Homo sapiens
aataccatttagcac

SEQ ID NO: 1132826 - DNA, 15 bp, Homo sapiens
aaataccatttagca

SEQ ID NO: 1132827 - DNA, 15 bp, Homo sapiens
aaaataccatttagc

SEQ ID NO: 1132828 - DNA, 15 bp, Homo sapiens
aaaaataccatttag

SEQ ID NO: 1132829 - DNA, 15 bp, Homo sapiens
aaaaaataccattta

SEQ ID NO: 1132830 - DNA, 15 bp, Homo sapiens
taaaaaataccattt

SEQ ID NO: 1132831 - DNA, 15 bp, Homo sapiens
ataaaaaataccatt

SEQ ID NO: 1132832 - DNA, 15 bp, Homo sapiens
aataaaaaataccat

SEQ ID NO: 1132833 - DNA, 15 bp, Homo sapiens
aaataaaaaatacca

SEQ ID NO: 1132834 - DNA, 15 bp, Homo sapiens
taaataaaaaatacc

SEQ ID NO: 1132835 - DNA, 15 bp, Homo sapiens
ttaaataaaaaatac

SEQ ID NO: 1132836 - DNA, 15 bp, Homo sapiens
attaaataaaaaata

SEQ ID NO: 1132837 - DNA, 15 bp, Homo sapiens
aattaaataaaaaat

SEQ ID NO: 1132838 - DNA, 15 bp, Homo sapiens
taattaaataaaaaa

SEQ ID NO: 1132839 - DNA, 15 bp, Homo sapiens
ctaattaaataaaaa

SEQ ID NO: 1132840 - DNA, 15 bp, Homo sapiens
tctaattaaataaaa

SEQ ID NO: 1132841 - DNA, 15 bp, Homo sapiens
ctctaattaaataaa

SEQ ID NO: 1132842 - DNA, 15 bp, Homo sapiens
gctctaattaaataa

SEQ ID NO: 1132843 - DNA, 15 bp, Homo sapiens
tgctctaattaaata

SEQ ID NO: 1132844 - DNA, 15 bp, Homo sapiens
ttgctctaattaaat

SEQ ID NO: 1132845 - DNA, 15 bp, Homo sapiens
attgctctaattaaa

SEQ ID NO: 1132846 - DNA, 15 bp, Homo sapiens
cattgctctaattaa

SEQ ID NO: 1132847 - DNA, 15 bp, Homo sapiens
gcattgctctaatta

SEQ ID NO: 1132848 - DNA, 15 bp, Homo sapiens
agcattgctctaatt

SEQ ID NO: 1132849 - DNA, 15 bp, Homo sapiens
cagcattgctctaat

SEQ ID NO: 1132850 - DNA, 15 bp, Homo sapiens
acagcattgctctaa

SEQ ID NO: 1132851 - DNA, 15 bp, Homo sapiens
aacagcattgctcta

SEQ ID NO: 1132852 - DNA, 15 bp, Homo sapiens
gaacagcattgctct

SEQ ID NO: 1132853 - DNA, 15 bp, Homo sapiens
tgaacagcattgctc

SEQ ID NO: 1132854 - DNA, 15 bp, Homo sapiens
ttgaacagcattgct

SEQ ID NO: 1132855 - DNA, 15 bp, Homo sapiens
attgaacagcattgc

SEQ ID NO: 1132856 - DNA, 15 bp, Homo sapiens
tattgaacagcattg

SEQ ID NO: 1132857 - DNA, 15 bp, Homo sapiens
ctattgaacagcatt

SEQ ID NO: 1132858 - DNA, 15 bp, Homo sapiens
tctattgaacagcat

SEQ ID NO: 1132859 - DNA, 15 bp, Homo sapiens
ttctattgaacagca

SEQ ID NO: 1132860 - DNA, 15 bp, Homo sapiens
gttctattgaacagc

SEQ ID NO: 1132861 - DNA, 15 bp, Homo sapiens
agttctattgaacag

SEQ ID NO: 1132862 - DNA, 15 bp, Homo sapiens
aagttctattgaaca

SEQ ID NO: 1132863 - DNA, 15 bp, Homo sapiens
aaagttctattgaac

SEQ ID NO: 1132864 - DNA, 15 bp, Homo sapiens
gaaagttctattgaa

SEQ ID NO: 1132865 - DNA, 15 bp, Homo sapiens
agaaagttctattga

SEQ ID NO: 1132866 - DNA, 15 bp, Homo sapiens
aagaaagttctattg

SEQ ID NO: 1132867 - DNA, 15 bp, Homo sapiens
aaagaaagttctatt

SEQ ID NO: 1132868 - DNA, 15 bp, Homo sapiens
caaagaaagttctat

SEQ ID NO: 1132869 - DNA, 15 bp, Homo sapiens
tcaaagaaagttcta

SEQ ID NO: 1132870 - DNA, 15 bp, Homo sapiens
ctcaaagaaagttct

SEQ ID NO: 1132871 - DNA, 15 bp, Homo sapiens
cctcaaagaaagttc

SEQ ID NO: 1132872 - DNA, 15 bp, Homo sapiens
tcctcaaagaaagtt

SEQ ID NO: 1132873 - DNA, 15 bp, Homo sapiens
atcctcaaagaaagt

SEQ ID NO: 1132874 - DNA, 15 bp, Homo sapiens
catcctcaaagaaag

SEQ ID NO: 1132875 - DNA, 15 bp, Homo sapiens
ccatcctcaaagaaa

SEQ ID NO: 1132876 - DNA, 15 bp, Homo sapiens
tccatcctcaaagaa

SEQ ID NO: 1132877 - DNA, 15 bp, Homo sapiens
ttccatcctcaaaga

SEQ ID NO: 1132878 - DNA, 15 bp, Homo sapiens
tttccatcctcaaag

SEQ ID NO: 1132879 - DNA, 15 bp, Homo sapiens
atttccatcctcaaa

SEQ ID NO: 1132880 - DNA, 15 bp, Homo sapiens
gatttccatcctcaa

SEQ ID NO: 1132881 - DNA, 15 bp, Homo sapiens
agatttccatcctca

SEQ ID NO: 1132882 - DNA, 15 bp, Homo sapiens
aagatttccatcctc

SEQ ID NO: 1132883 - DNA, 15 bp, Homo sapiens
aaagatttccatcct

SEQ ID NO: 1132884 - DNA, 15 bp, Homo sapiens
aaaagatttccatcc

SEQ ID NO: 1132885 - DNA, 15 bp, Homo sapiens
taaaagatttccatc

SEQ ID NO: 1132886 - DNA, 15 bp, Homo sapiens
ataaaagatttccat

SEQ ID NO: 1132887 - DNA, 15 bp, Homo sapiens
cataaaagatttcca

SEQ ID NO: 1132888 - DNA, 15 bp, Homo sapiens
acataaaagatttcc

SEQ ID NO: 1132889 - DNA, 15 bp, Homo sapiens
aacataaaagatttc

SEQ ID NO: 1132890 - DNA, 15 bp, Homo sapiens
aaacataaaagattt

SEQ ID NO: 1132891 - DNA, 15 bp, Homo sapiens
gaaacataaaagatt

SEQ ID NO: 1132892 - DNA, 15 bp, Homo sapiens
agaaacataaaagat

SEQ ID NO: 1132893 - DNA, 15 bp, Homo sapiens
cagaaacataaaaga

SEQ ID NO: 1132894 - DNA, 15 bp, Homo sapiens
gcagaaacataaaag

SEQ ID NO: 1132895 - DNA, 15 bp, Homo sapiens
agcagaaacataaaa

SEQ ID NO: 1132896 - DNA, 15 bp, Homo sapiens
tagcagaaacataaa

SEQ ID NO: 1132897 - DNA, 15 bp, Homo sapiens
atagcagaaacataa

SEQ ID NO: 1132898 - DNA, 15 bp, Homo sapiens
catagcagaaacata

SEQ ID NO: 1132899 - DNA, 15 bp, Homo sapiens
acatagcagaaacat

SEQ ID NO: 1132900 - DNA, 15 bp, Homo sapiens
cacatagcagaaaca

SEQ ID NO: 1132901 - DNA, 15 bp, Homo sapiens
ccacatagcagaaac

SEQ ID NO: 1132902 - DNA, 15 bp, Homo sapiens
accacatagcagaaa

SEQ ID NO: 1132903 - DNA, 15 bp, Homo sapiens
taccacatagcagaa

SEQ ID NO: 1132904 - DNA, 15 bp, Homo sapiens
gtaccacatagcaga

SEQ ID NO: 1132905 - DNA, 15 bp, Homo sapiens
tgtaccacatagcag

SEQ ID NO: 1132906 - DNA, 15 bp, Homo sapiens
ctgtaccacatagca

SEQ ID NO: 1132907 - DNA, 15 bp, Homo sapiens
tctgtaccacatagc

SEQ ID NO: 1132908 - DNA, 15 bp, Homo sapiens
ctctgtaccacatag

SEQ ID NO: 1132909 - DNA, 15 bp, Homo sapiens
gctctgtaccacata

SEQ ID NO: 1132910 - DNA, 15 bp, Homo sapiens
ggctctgtaccacat

SEQ ID NO: 1132911 - DNA, 15 bp, Homo sapiens
tggctctgtaccaca

SEQ ID NO: 1132912 - DNA, 15 bp, Homo sapiens
gtggctctgtaccac

SEQ ID NO: 1132913 - DNA, 15 bp, Homo sapiens
agtggctctgtacca

SEQ ID NO: 1132914 - DNA, 15 bp, Homo sapiens
tagtggctctgtacc

SEQ ID NO: 1132915 - DNA, 15 bp, Homo sapiens
ctagtggctctgtac

SEQ ID NO: 1132916 - DNA, 15 bp, Homo sapiens
actagtggctctgta

SEQ ID NO: 1132917 - DNA, 15 bp, Homo sapiens
cactagtggctctgt

SEQ ID NO: 1132918 - DNA, 15 bp, Homo sapiens
tcactagtggctctg

SEQ ID NO: 1132919 - DNA, 15 bp, Homo sapiens
gtcactagtggctct

SEQ ID NO: 1132920 - DNA, 15 bp, Homo sapiens
tgtcactagtggctc

SEQ ID NO: 1132921 - DNA, 15 bp, Homo sapiens
atgtcactagtggct

SEQ ID NO: 1132922 - DNA, 15 bp, Homo sapiens
catgtcactagtggc

SEQ ID NO: 1132923 - DNA, 15 bp, Homo sapiens
acatgtcactagtgg

SEQ ID NO: 1132924 - DNA, 15 bp, Homo sapiens
cacatgtcactagtg

SEQ ID NO: 1132925 - DNA, 15 bp, Homo sapiens
ccacatgtcactagt

SEQ ID NO: 1132926 - DNA, 15 bp, Homo sapiens
gccacatgtcactag

SEQ ID NO: 1132927 - DNA, 15 bp, Homo sapiens
agccacatgtcacta

SEQ ID NO: 1132928 - DNA, 15 bp, Homo sapiens
aagccacatgtcact

SEQ ID NO: 1132929 - DNA, 15 bp, Homo sapiens
aaagccacatgtcac

SEQ ID NO: 1132930 - DNA, 15 bp, Homo sapiens
aaaagccacatgtca

SEQ ID NO: 1132931 - DNA, 15 bp, Homo sapiens
caaaagccacatgtc

SEQ ID NO: 1132932 - DNA, 15 bp, Homo sapiens
tcaaaagccacatgt

SEQ ID NO: 1132933 - DNA, 15 bp, Homo sapiens
ctcaaaagccacatg

SEQ ID NO: 1132934 - DNA, 15 bp, Homo sapiens
gctcaaaagccacat

SEQ ID NO: 1132935 - DNA, 15 bp, Homo sapiens
cgctcaaaagccaca

SEQ ID NO: 1132936 - DNA, 15 bp, Homo sapiens
gcgctcaaaagccac

SEQ ID NO: 1132937 - DNA, 15 bp, Homo sapiens
agcgctcaaaagcca

SEQ ID NO: 1132938 - DNA, 15 bp, Homo sapiens
aagcgctcaaaagcc

SEQ ID NO: 1132939 - DNA, 15 bp, Homo sapiens
caagcgctcaaaagc

SEQ ID NO: 1132940 - DNA, 15 bp, Homo sapiens
tcaagcgctcaaaag

SEQ ID NO: 1132941 - DNA, 15 bp, Homo sapiens
gtcaagcgctcaaaa

SEQ ID NO: 1132942 - DNA, 15 bp, Homo sapiens
tgtcaagcgctcaaa

SEQ ID NO: 1132943 - DNA, 15 bp, Homo sapiens
gtgtcaagcgctcaa

SEQ ID NO: 1132944 - DNA, 15 bp, Homo sapiens
tgtgtcaagcgctca

SEQ ID NO: 1132945 - DNA, 15 bp, Homo sapiens
atgtgtcaagcgctc

SEQ ID NO: 1132946 - DNA, 15 bp, Homo sapiens
gatgtgtcaagcgct

SEQ ID NO: 1132947 - DNA, 15 bp, Homo sapiens
agatgtgtcaagcgc

SEQ ID NO: 1132948 - DNA, 15 bp, Homo sapiens
aagatgtgtcaagcg

SEQ ID NO: 1132949 - DNA, 15 bp, Homo sapiens
caagatgtgtcaagc

SEQ ID NO: 1132950 - DNA, 15 bp, Homo sapiens
acaagatgtgtcaag

SEQ ID NO: 1132951 - DNA, 15 bp, Homo sapiens
cacaagatgtgtcaa

SEQ ID NO: 1132952 - DNA, 15 bp, Homo sapiens
gcacaagatgtgtca

SEQ ID NO: 1132953 - DNA, 15 bp, Homo sapiens
tgcacaagatgtgtc

SEQ ID NO: 1132954 - DNA, 15 bp, Homo sapiens
ttgcacaagatgtgt

SEQ ID NO: 1132955 - DNA, 15 bp, Homo sapiens
gttgcacaagatgtg

SEQ ID NO: 1132956 - DNA, 15 bp, Homo sapiens
tgttgcacaagatgt

SEQ ID NO: 1132957 - DNA, 15 bp, Homo sapiens
gtgttgcacaagatg

SEQ ID NO: 1132958 - DNA, 15 bp, Homo sapiens
tgtgttgcacaagat

SEQ ID NO: 1132959 - DNA, 15 bp, Homo sapiens
ctgtgttgcacaaga

SEQ ID NO: 1132960 - DNA, 15 bp, Homo sapiens
cctgtgttgcacaag

SEQ ID NO: 1132961 - DNA, 15 bp, Homo sapiens
tcctgtgttgcacaa

SEQ ID NO: 1132962 - DNA, 15 bp, Homo sapiens
ttcctgtgttgcaca

SEQ ID NO: 1132963 - DNA, 15 bp, Homo sapiens
gttcctgtgttgcac

SEQ ID NO: 1132964 - DNA, 15 bp, Homo sapiens
agttcctgtgttgca

SEQ ID NO: 1132965 - DNA, 15 bp, Homo sapiens
cagttcctgtgttgc

SEQ ID NO: 1132966 - DNA, 15 bp, Homo sapiens
tcagttcctgtgttg

SEQ ID NO: 1132967 - DNA, 15 bp, Homo sapiens
ttcagttcctgtgtt

SEQ ID NO: 1132968 - DNA, 15 bp, Homo sapiens
attcagttcctgtgt

SEQ ID NO: 1132969 - DNA, 15 bp, Homo sapiens
aattcagttcctgtg

SEQ ID NO: 1132970 - DNA, 15 bp, Homo sapiens
aaattcagttcctgt

SEQ ID NO: 1132971 - DNA, 15 bp, Homo sapiens
aaaattcagttcctg

SEQ ID NO: 1132972 - DNA, 15 bp, Homo sapiens
aaaaattcagttcct

SEQ ID NO: 1132973 - DNA, 15 bp, Homo sapiens
taaaaattcagttcc

SEQ ID NO: 1132974 - DNA, 15 bp, Homo sapiens
ttaaaaattcagttc

SEQ ID NO: 1132975 - DNA, 15 bp, Homo sapiens
cttaaaaattcagtt

SEQ ID NO: 1132976 - DNA, 15 bp, Homo sapiens
acttaaaaattcagt

SEQ ID NO: 1132977 - DNA, 15 bp, Homo sapiens
tacttaaaaattcag

SEQ ID NO: 1132978 - DNA, 15 bp, Homo sapiens
ttacttaaaaattca

SEQ ID NO: 1132979 - DNA, 15 bp, Homo sapiens
attacttaaaaattc

SEQ ID NO: 1132980 - DNA, 15 bp, Homo sapiens
aattacttaaaaatt

SEQ ID NO: 1132981 - DNA, 15 bp, Homo sapiens
aaattacttaaaaat

SEQ ID NO: 1132982 - DNA, 15 bp, Homo sapiens
taaattacttaaaaa

SEQ ID NO: 1132983 - DNA, 15 bp, Homo sapiens
ataaattacttaaaa

SEQ ID NO: 1132984 - DNA, 15 bp, Homo sapiens
tataaattacttaaa

SEQ ID NO: 1132985 - DNA, 15 bp, Homo sapiens
atataaattacttaa

SEQ ID NO: 1132986 - DNA, 15 bp, Homo sapiens
aatataaattactta

SEQ ID NO: 1132987 - DNA, 15 bp, Homo sapiens
caatataaattactt

SEQ ID NO: 1132988 - DNA, 15 bp, Homo sapiens
gcaatataaattact

SEQ ID NO: 1132989 - DNA, 15 bp, Homo sapiens
ggcaatataaattac

SEQ ID NO: 1132990 - DNA, 15 bp, Homo sapiens
tggcaatataaatta

SEQ ID NO: 1132991 - DNA, 15 bp, Homo sapiens
gtggcaatataaatt

SEQ ID NO: 1132992 - DNA, 15 bp, Homo sapiens
tgtggcaatataaat

SEQ ID NO: 1132993 - DNA, 15 bp, Homo sapiens
atgtggcaatataaa

SEQ ID NO: 1132994 - DNA, 15 bp, Homo sapiens
catgtggcaatataa

SEQ ID NO: 1132995 - DNA, 15 bp, Homo sapiens
acatgtggcaatata

SEQ ID NO: 1132996 - DNA, 15 bp, Homo sapiens
cacatgtggcaatat

SEQ ID NO: 1132997 - DNA, 15 bp, Homo sapiens
ccacatgtggcaata

SEQ ID NO: 1132998 - DNA, 15 bp, Homo sapiens
gccacatgtggcaat

SEQ ID NO: 1132999 - DNA, 15 bp, Homo sapiens
agccacatgtggcaa

SEQ ID NO: 1133000 - DNA, 15 bp, Homo sapiens
tagccacatgtggca

SEQ ID NO: 1133001 - DNA, 15 bp, Homo sapiens
gtagccacatgtggc

SEQ ID NO: 1133002 - DNA, 15 bp, Homo sapiens
ggtagccacatgtgg

SEQ ID NO: 1133003 - DNA, 15 bp, Homo sapiens
cggtagccacatgtg

SEQ ID NO: 1133004 - DNA, 15 bp, Homo sapiens
acggtagccacatgt

SEQ ID NO: 1133005 - DNA, 15 bp, Homo sapiens
tacggtagccacatg

SEQ ID NO: 1133006 - DNA, 15 bp, Homo sapiens
atacggtagccacat

SEQ ID NO: 1133007 - DNA, 15 bp, Homo sapiens
catacggtagccaca

SEQ ID NO: 1133008 - DNA, 15 bp, Homo sapiens
ccatacggtagccac

SEQ ID NO: 1133009 - DNA, 15 bp, Homo sapiens
cccatacggtagcca

SEQ ID NO: 1133010 - DNA, 15 bp, Homo sapiens
tcccatacggtagcc

SEQ ID NO: 1133011 - DNA, 15 bp, Homo sapiens
gtcccatacggtagc

SEQ ID NO: 1133012 - DNA, 15 bp, Homo sapiens
tgtcccatacggtag

SEQ ID NO: 1133013 - DNA, 15 bp, Homo sapiens
ctgtcccatacggta

SEQ ID NO: 1133014 - DNA, 15 bp, Homo sapiens
actgtcccatacggt

SEQ ID NO: 1133015 - DNA, 15 bp, Homo sapiens
cactgtcccatacgg

SEQ ID NO: 1133016 - DNA, 15 bp, Homo sapiens
acactgtcccatacg

SEQ ID NO: 1133017 - DNA, 15 bp, Homo sapiens
tacactgtcccatac

SEQ ID NO: 1133018 - DNA, 15 bp, Homo sapiens
ctacactgtcccata

SEQ ID NO: 1133019 - DNA, 15 bp, Homo sapiens
actacactgtcccat

SEQ ID NO: 1133020 - DNA, 15 bp, Homo sapiens
tactacactgtccca

SEQ ID NO: 1133021 - DNA, 15 bp, Homo sapiens
gtactacactgtccc

SEQ ID NO: 1133022 - DNA, 15 bp, Homo sapiens
agtactacactgtcc

SEQ ID NO: 1133023 - DNA, 15 bp, Homo sapiens
tagtactacactgtc

SEQ ID NO: 1133024 - DNA, 15 bp, Homo sapiens
ctagtactacactgt

SEQ ID NO: 1133025 - DNA, 15 bp, Homo sapiens
tctagtactacactg

SEQ ID NO: 1133026 - DNA, 15 bp, Homo sapiens
atctagtactacact

SEQ ID NO: 1133027 - DNA, 15 bp, Homo sapiens
catctagtactacac

SEQ ID NO: 1133028 - DNA, 15 bp, Homo sapiens
tcatctagtactaca

SEQ ID NO: 1133029 - DNA, 15 bp, Homo sapiens
atcatctagtactac

SEQ ID NO: 1133030 - DNA, 15 bp, Homo sapiens
gatcatctagtacta

SEQ ID NO: 1133031 - DNA, 15 bp, Homo sapiens
agatcatctagtact

SEQ ID NO: 1133032 - DNA, 15 bp, Homo sapiens
cagatcatctagtac

SEQ ID NO: 1133033 - DNA, 15 bp, Homo sapiens
acagatcatctagta

SEQ ID NO: 1133034 - DNA, 15 bp, Homo sapiens
tacagatcatctagt

SEQ ID NO: 1133035 - DNA, 15 bp, Homo sapiens
ttacagatcatctag

SEQ ID NO: 1133036 - DNA, 15 bp, Homo sapiens
cttacagatcatcta

SEQ ID NO: 1133037 - DNA, 15 bp, Homo sapiens
ccttacagatcatct

SEQ ID NO: 1133038 - DNA, 15 bp, Homo sapiens
cccttacagatcatc

SEQ ID NO: 1133039 - DNA, 15 bp, Homo sapiens
gcccttacagatcat

SEQ ID NO: 1133040 - DNA, 15 bp, Homo sapiens
agcccttacagatca

SEQ ID NO: 1133041 - DNA, 15 bp, Homo sapiens
cagcccttacagatc

SEQ ID NO: 1133042 - DNA, 15 bp, Homo sapiens
acagcccttacagat

SEQ ID NO: 1133043 - DNA, 15 bp, Homo sapiens
cacagcccttacaga

SEQ ID NO: 1133044 - DNA, 15 bp, Homo sapiens
gcacagcccttacag

SEQ ID NO: 1133045 - DNA, 15 bp, Homo sapiens
agcacagcccttaca

SEQ ID NO: 1133046 - DNA, 15 bp, Homo sapiens
aagcacagcccttac

SEQ ID NO: 1133047 - DNA, 15 bp, Homo sapiens
gaagcacagccctta

SEQ ID NO: 1133048 - DNA, 15 bp, Homo sapiens
tgaagcacagccctt

SEQ ID NO: 1133049 - DNA, 15 bp, Homo sapiens
atgaagcacagccct

SEQ ID NO: 1133050 - DNA, 15 bp, Homo sapiens
gatgaagcacagccc

SEQ ID NO: 1133051 - DNA, 15 bp, Homo sapiens
tgatgaagcacagcc

SEQ ID NO: 1133052 - DNA, 15 bp, Homo sapiens
ctgatgaagcacagc

SEQ ID NO: 1133053 - DNA, 15 bp, Homo sapiens
actgatgaagcacag

SEQ ID NO: 1133054 - DNA, 15 bp, Homo sapiens
cactgatgaagcaca

SEQ ID NO: 1133055 - DNA, 15 bp, Homo sapiens
acactgatgaagcac

SEQ ID NO: 1133056 - DNA, 15 bp, Homo sapiens
gacactgatgaagca

SEQ ID NO: 1133057 - DNA, 15 bp, Homo sapiens
cgacactgatgaagc

SEQ ID NO: 1133058 - DNA, 15 bp, Homo sapiens
acgacactgatgaag

SEQ ID NO: 1133059 - DNA, 15 bp, Homo sapiens
aacgacactgatgaa

SEQ ID NO: 1133060 - DNA, 15 bp, Homo sapiens
aaacgacactgatga

SEQ ID NO: 1133061 - DNA, 15 bp, Homo sapiens
aaaacgacactgatg

SEQ ID NO: 1133062 - DNA, 15 bp, Homo sapiens
aaaaacgacactgat

SEQ ID NO: 1133063 - DNA, 15 bp, Homo sapiens
aaaaaacgacactga

SEQ ID NO: 1133064 - DNA, 15 bp, Homo sapiens
taaaaaacgacactg

SEQ ID NO: 1133065 - DNA, 15 bp, Homo sapiens
ttaaaaaacgacact

SEQ ID NO: 1133066 - DNA, 15 bp, Homo sapiens
gttaaaaaacgacac

SEQ ID NO: 1133067 - DNA, 15 bp, Homo sapiens
agttaaaaaacgaca

SEQ ID NO: 1133068 - DNA, 15 bp, Homo sapiens
cagttaaaaaacgac

SEQ ID NO: 1133069 - DNA, 15 bp, Homo sapiens
tcagttaaaaaacga

SEQ ID NO: 1133070 - DNA, 15 bp, Homo sapiens
gtcagttaaaaaacg

SEQ ID NO: 1133071 - DNA, 15 bp, Homo sapiens
tgtcagttaaaaaac

SEQ ID NO: 1133072 - DNA, 15 bp, Homo sapiens
ttgtcagttaaaaaa

SEQ ID NO: 1133073 - DNA, 15 bp, Homo sapiens
tttgtcagttaaaaa

SEQ ID NO: 1133074 - DNA, 15 bp, Homo sapiens
ttttgtcagttaaaa

SEQ ID NO: 1133075 - DNA, 15 bp, Homo sapiens
tttttgtcagttaaa

SEQ ID NO: 1133076 - DNA, 15 bp, Homo sapiens
gtttttgtcagttaa

SEQ ID NO: 1133077 - DNA, 15 bp, Homo sapiens
ggtttttgtcagtta

SEQ ID NO: 1133078 - DNA, 15 bp, Homo sapiens
aggtttttgtcagtt

SEQ ID NO: 1133079 - DNA, 15 bp, Homo sapiens
aaggtttttgtcagt

SEQ ID NO: 1133080 - DNA, 15 bp, Homo sapiens
aaaggtttttgtcag

SEQ ID NO: 1133081 - DNA, 15 bp, Homo sapiens
taaaggtttttgtca

SEQ ID NO: 1133082 - DNA, 15 bp, Homo sapiens
ctaaaggtttttgtc

SEQ ID NO: 1133083 - DNA, 15 bp, Homo sapiens
actaaaggtttttgt

SEQ ID NO: 1133084 - DNA, 15 bp, Homo sapiens
aactaaaggtttttg

SEQ ID NO: 1133085 - DNA, 15 bp, Homo sapiens
aaactaaaggttttt

SEQ ID NO: 1133086 - DNA, 15 bp, Homo sapiens
aaaactaaaggtttt

SEQ ID NO: 1133087 - DNA, 15 bp, Homo sapiens
aaaaactaaaggttt

SEQ ID NO: 1133088 - DNA, 15 bp, Homo sapiens
aaaaaactaaaggtt

SEQ ID NO: 1133089 - DNA, 15 bp, Homo sapiens
aaaaaaactaaaggt

SEQ ID NO: 1133090 - DNA, 15 bp, Homo sapiens
aaaaaaaactaaagg

SEQ ID NO: 1133091 - DNA, 15 bp, Homo sapiens
aaaaaaaaactaaag

SEQ ID NO: 1133092 - DNA, 15 bp, Homo sapiens
aaaaaaaaaactaaa

SEQ ID NO: 1133093 - DNA, 15 bp, Homo sapiens
taaaaaaaaaactaa

SEQ ID NO: 1133094 - DNA, 15 bp, Homo sapiens
ctaaaaaaaaaacta

SEQ ID NO: 1133095 - DNA, 15 bp, Homo sapiens
actaaaaaaaaaact

SEQ ID NO: 1133096 - DNA, 15 bp, Homo sapiens
tactaaaaaaaaaac

SEQ ID NO: 1133097 - DNA, 15 bp, Homo sapiens
ttactaaaaaaaaaa

SEQ ID NO: 1133098 - DNA, 15 bp, Homo sapiens
attactaaaaaaaaa

SEQ ID NO: 1133099 - DNA, 15 bp, Homo sapiens
cattactaaaaaaaa

SEQ ID NO: 1133100 - DNA, 15 bp, Homo sapiens
acattactaaaaaaa

SEQ ID NO: 1133101 - DNA, 15 bp, Homo sapiens
cacattactaaaaaa

SEQ ID NO: 1133102 - DNA, 15 bp, Homo sapiens
acacattactaaaaa

SEQ ID NO: 1133103 - DNA, 15 bp, Homo sapiens
aacacattactaaaa

SEQ ID NO: 1133104 - DNA, 15 bp, Homo sapiens
aaacacattactaaa

SEQ ID NO: 1133105 - DNA, 15 bp, Homo sapiens
taaacacattactaa

SEQ ID NO: 1133106 - DNA, 15 bp, Homo sapiens
ataaacacattacta

SEQ ID NO: 1133107 - DNA, 15 bp, Homo sapiens
aataaacacattact

SEQ ID NO: 1133108 - DNA, 15 bp, Homo sapiens
aaataaacacattac

SEQ ID NO: 1133109 - DNA, 15 bp, Homo sapiens
taaataaacacatta

SEQ ID NO: 1133110 - DNA, 15 bp, Homo sapiens
ttaaataaacacatt

SEQ ID NO: 1133111 - DNA, 15 bp, Homo sapiens
tttaaataaacacat

SEQ ID NO: 1133112 - DNA, 15 bp, Homo sapiens
ttttaaataaacaca

SEQ ID NO: 1133113 - DNA, 15 bp, Homo sapiens
cttttaaataaacac

SEQ ID NO: 1133114 - DNA, 15 bp, Homo sapiens
tcttttaaataaaca

SEQ ID NO: 1133115 - DNA, 15 bp, Homo sapiens
ttcttttaaataaac

SEQ ID NO: 1133116 - DNA, 15 bp, Homo sapiens
attcttttaaataaa

SEQ ID NO: 1133117 - DNA, 15 bp, Homo sapiens
aattcttttaaataa

SEQ ID NO: 1133118 - DNA, 15 bp, Homo sapiens
gaattcttttaaata

SEQ ID NO: 1133119 - DNA, 15 bp, Homo sapiens
tgaattcttttaaat

SEQ ID NO: 1133120 - DNA, 15 bp, Homo sapiens
atgaattcttttaaa

SEQ ID NO: 1133121 - DNA, 15 bp, Homo sapiens
tatgaattcttttaa

SEQ ID NO: 1133122 - DNA, 15 bp, Homo sapiens
ttatgaattctttta

SEQ ID NO: 1133123 - DNA, 15 bp, Homo sapiens
tttatgaattctttt

SEQ ID NO: 1133124 - DNA, 15 bp, Homo sapiens
ttttatgaattcttt

SEQ ID NO: 1133125 - DNA, 15 bp, Homo sapiens
attttatgaattctt

SEQ ID NO: 1133126 - DNA, 15 bp, Homo sapiens
tattttatgaattct

SEQ ID NO: 1133127 - DNA, 15 bp, Homo sapiens
gtattttatgaattc

SEQ ID NO: 1133128 - DNA, 15 bp, Homo sapiens
tgtattttatgaatt

SEQ ID NO: 1133129 - DNA, 15 bp, Homo sapiens
ttgtattttatgaat

SEQ ID NO: 1133130 - DNA, 15 bp, Homo sapiens
cttgtattttatgaa

SEQ ID NO: 1133131 - DNA, 15 bp, Homo sapiens
acttgtattttatga

SEQ ID NO: 1133132 - DNA, 15 bp, Homo sapiens
tacttgtattttatg

SEQ ID NO: 1133133 - DNA, 15 bp, Homo sapiens
ttacttgtattttat

SEQ ID NO: 1133134 - DNA, 15 bp, Homo sapiens
tttacttgtatttta

SEQ ID NO: 1133135 - DNA, 15 bp, Homo sapiens
gtttacttgtatttt

SEQ ID NO: 1133136 - DNA, 15 bp, Homo sapiens
tgtttacttgtattt

SEQ ID NO: 1133137 - DNA, 15 bp, Homo sapiens
ttgtttacttgtatt

SEQ ID NO: 1133138 - DNA, 15 bp, Homo sapiens
tttgtttacttgtat

SEQ ID NO: 1133139 - DNA, 15 bp, Homo sapiens
atttgtttacttgta

SEQ ID NO: 1133140 - DNA, 15 bp, Homo sapiens
aatttgtttacttgt

SEQ ID NO: 1133141 - DNA, 15 bp, Homo sapiens
taatttgtttacttg

SEQ ID NO: 1133142 - DNA, 15 bp, Homo sapiens
ttaatttgtttactt

SEQ ID NO: 1133143 - DNA, 15 bp, Homo sapiens
gttaatttgtttact

SEQ ID NO: 1133144 - DNA, 15 bp, Homo sapiens
agttaatttgtttac

SEQ ID NO: 1133145 - DNA, 15 bp, Homo sapiens
aagttaatttgttta

SEQ ID NO: 1133146 - DNA, 15 bp, Homo sapiens
caagttaatttgttt

SEQ ID NO: 1133147 - DNA, 15 bp, Homo sapiens
acaagttaatttgtt

SEQ ID NO: 1133148 - DNA, 15 bp, Homo sapiens
aacaagttaatttgt

SEQ ID NO: 1133149 - DNA, 15 bp, Homo sapiens
taacaagttaatttg

SEQ ID NO: 1133150 - DNA, 15 bp, Homo sapiens
gtaacaagttaattt

SEQ ID NO: 1133151 - DNA, 15 bp, Homo sapiens
ggtaacaagttaatt

SEQ ID NO: 1133152 - DNA, 15 bp, Homo sapiens
aggtaacaagttaat

SEQ ID NO: 1133153 - DNA, 15 bp, Homo sapiens
caggtaacaagttaa

SEQ ID NO: 1133154 - DNA, 15 bp, Homo sapiens
tcaggtaacaagtta

SEQ ID NO: 1133155 - DNA, 15 bp, Homo sapiens
ctcaggtaacaagtt

SEQ ID NO: 1133156 - DNA, 15 bp, Homo sapiens
gctcaggtaacaagt

SEQ ID NO: 1133157 - DNA, 15 bp, Homo sapiens
tgctcaggtaacaag

SEQ ID NO: 1133158 - DNA, 15 bp, Homo sapiens
atgctcaggtaacaa

SEQ ID NO: 1133159 - DNA, 15 bp, Homo sapiens
tatgctcaggtaaca

SEQ ID NO: 1133160 - DNA, 15 bp, Homo sapiens
atatgctcaggtaac

SEQ ID NO: 1133161 - DNA, 15 bp, Homo sapiens
catatgctcaggtaa

SEQ ID NO: 1133162 - DNA, 15 bp, Homo sapiens
acatatgctcaggta

SEQ ID NO: 1133163 - DNA, 15 bp, Homo sapiens
gacatatgctcaggt

SEQ ID NO: 1133164 - DNA, 15 bp, Homo sapiens
ggacatatgctcagg

SEQ ID NO: 1133165 - DNA, 15 bp, Homo sapiens
aggacatatgctcag

SEQ ID NO: 1133166 - DNA, 15 bp, Homo sapiens
aaggacatatgctca

SEQ ID NO: 1133167 - DNA, 15 bp, Homo sapiens
aaaggacatatgctc

SEQ ID NO: 1133168 - DNA, 15 bp, Homo sapiens
gaaaggacatatgct

SEQ ID NO: 1133169 - DNA, 15 bp, Homo sapiens
tgaaaggacatatgc

SEQ ID NO: 1133170 - DNA, 15 bp, Homo sapiens
atgaaaggacatatg

SEQ ID NO: 1133171 - DNA, 15 bp, Homo sapiens
tatgaaaggacatat

SEQ ID NO: 1133172 - DNA, 15 bp, Homo sapiens
gtatgaaaggacata

SEQ ID NO: 1133173 - DNA, 15 bp, Homo sapiens
agtatgaaaggacat

SEQ ID NO: 1133174 - DNA, 15 bp, Homo sapiens
aagtatgaaaggaca

SEQ ID NO: 1133175 - DNA, 15 bp, Homo sapiens
taagtatgaaaggac

SEQ ID NO: 1133176 - DNA, 15 bp, Homo sapiens
ataagtatgaaagga

SEQ ID NO: 1133177 - DNA, 15 bp, Homo sapiens
aataagtatgaaagg

SEQ ID NO: 1133178 - DNA, 15 bp, Homo sapiens
aaataagtatgaaag

SEQ ID NO: 1133179 - DNA, 15 bp, Homo sapiens
aaaataagtatgaaa

SEQ ID NO: 1133180 - DNA, 15 bp, Homo sapiens
aaaaataagtatgaa

SEQ ID NO: 1133181 - DNA, 15 bp, Homo sapiens
aaaaaataagtatga

SEQ ID NO: 1133182 - DNA, 15 bp, Homo sapiens
gaaaaaataagtatg

SEQ ID NO: 1133183 - DNA, 15 bp, Homo sapiens
agaaaaaataagtat

SEQ ID NO: 1133184 - DNA, 15 bp, Homo sapiens
cagaaaaaataagta

SEQ ID NO: 1133185 - DNA, 15 bp, Homo sapiens
gcagaaaaaataagt

SEQ ID NO: 1133186 - DNA, 15 bp, Homo sapiens
tgcagaaaaaataag

SEQ ID NO: 1133187 - DNA, 15 bp, Homo sapiens
atgcagaaaaaataa

SEQ ID NO: 1133188 - DNA, 15 bp, Homo sapiens
tatgcagaaaaaata

SEQ ID NO: 1133189 - DNA, 15 bp, Homo sapiens
gtatgcagaaaaaat

SEQ ID NO: 1133190 - DNA, 15 bp, Homo sapiens
tgtatgcagaaaaaa

SEQ ID NO: 1133191 - DNA, 15 bp, Homo sapiens
atgtatgcagaaaaa

SEQ ID NO: 1133192 - DNA, 15 bp, Homo sapiens
tatgtatgcagaaaa

SEQ ID NO: 1133193 - DNA, 15 bp, Homo sapiens
atatgtatgcagaaa

SEQ ID NO: 1133194 - DNA, 15 bp, Homo sapiens
aatatgtatgcagaa

SEQ ID NO: 1133195 - DNA, 15 bp, Homo sapiens
aaatatgtatgcaga

SEQ ID NO: 1133196 - DNA, 15 bp, Homo sapiens
aaaatatgtatgcag

SEQ ID NO: 1133197 - DNA, 15 bp, Homo sapiens
caaaatatgtatgca

SEQ ID NO: 1133198 - DNA, 15 bp, Homo sapiens
ccaaaatatgtatgc

SEQ ID NO: 1133199 - DNA, 15 bp, Homo sapiens
tccaaaatatgtatg

SEQ ID NO: 1133200 - DNA, 15 bp, Homo sapiens
ttccaaaatatgtat

SEQ ID NO: 1133201 - DNA, 15 bp, Homo sapiens
tttccaaaatatgta

SEQ ID NO: 1133202 - DNA, 15 bp, Homo sapiens
ttttccaaaatatgt

SEQ ID NO: 1133203 - DNA, 15 bp, Homo sapiens
attttccaaaatatg

SEQ ID NO: 1133204 - DNA, 15 bp, Homo sapiens
cattttccaaaatat

SEQ ID NO: 1133205 - DNA, 15 bp, Homo sapiens
ccattttccaaaata

SEQ ID NO: 1133206 - DNA, 15 bp, Homo sapiens
tccattttccaaaat

SEQ ID NO: 1133207 - DNA, 15 bp, Homo sapiens
ttccattttccaaaa

SEQ ID NO: 1133208 - DNA, 15 bp, Homo sapiens
attccattttccaaa

SEQ ID NO: 1133209 - DNA, 15 bp, Homo sapiens
tattccattttccaa

SEQ ID NO: 1133210 - DNA, 15 bp, Homo sapiens
atattccattttcca

SEQ ID NO: 1133211 - DNA, 15 bp, Homo sapiens
gatattccattttcc

SEQ ID NO: 1133212 - DNA, 15 bp, Homo sapiens
agatattccattttc

SEQ ID NO: 1133213 - DNA, 15 bp, Homo sapiens
cagatattccatttt

SEQ ID NO: 1133214 - DNA, 15 bp, Homo sapiens
gcagatattccattt

SEQ ID NO: 1133215 - DNA, 15 bp, Homo sapiens
ggcagatattccatt

SEQ ID NO: 1133216 - DNA, 15 bp, Homo sapiens
gggcagatattccat

SEQ ID NO: 1133217 - DNA, 15 bp, Homo sapiens
agggcagatattcca

SEQ ID NO: 1133218 - DNA, 15 bp, Homo sapiens
aagggcagatattcc

SEQ ID NO: 1133219 - DNA, 15 bp, Homo sapiens
aaagggcagatattc

SEQ ID NO: 1133220 - DNA, 15 bp, Homo sapiens
aaaagggcagatatt

SEQ ID NO: 1133221 - DNA, 15 bp, Homo sapiens
aaaaagggcagatat

SEQ ID NO: 1133222 - DNA, 15 bp, Homo sapiens
aaaaaagggcagata

SEQ ID NO: 1133223 - DNA, 15 bp, Homo sapiens
aaaaaaagggcagat

SEQ ID NO: 1133224 - DNA, 15 bp, Homo sapiens
aaaaaaaagggcaga

SEQ ID NO: 1133225 - DNA, 15 bp, Homo sapiens
aaaaaaaaagggcag

SEQ ID NO: 1133226 - DNA, 15 bp, Homo sapiens
taaaaaaaaagggca

SEQ ID NO: 1133227 - DNA, 15 bp, Homo sapiens
ataaaaaaaaagggc

SEQ ID NO: 1133228 - DNA, 15 bp, Homo sapiens
gataaaaaaaaaggg

SEQ ID NO: 1133229 - DNA, 15 bp, Homo sapiens
agataaaaaaaaagg

SEQ ID NO: 1133230 - DNA, 15 bp, Homo sapiens
cagataaaaaaaaag

SEQ ID NO: 1133231 - DNA, 15 bp, Homo sapiens
tcagataaaaaaaaa

SEQ ID NO: 1133232 - DNA, 15 bp, Homo sapiens
ctcagataaaaaaaa

SEQ ID NO: 1133233 - DNA, 15 bp, Homo sapiens
tctcagataaaaaaa

SEQ ID NO: 1133234 - DNA, 15 bp, Homo sapiens
atctcagataaaaaa

SEQ ID NO: 1133235 - DNA, 15 bp, Homo sapiens
tatctcagataaaaa

SEQ ID NO: 1133236 - DNA, 15 bp, Homo sapiens
gtatctcagataaaa

SEQ ID NO: 1133237 - DNA, 15 bp, Homo sapiens
tgtatctcagataaa

SEQ ID NO: 1133238 - DNA, 15 bp, Homo sapiens
ctgtatctcagataa

SEQ ID NO: 1133239 - DNA, 15 bp, Homo sapiens
actgtatctcagata

SEQ ID NO: 1133240 - DNA, 15 bp, Homo sapiens
gactgtatctcagat

SEQ ID NO: 1133241 - DNA, 15 bp, Homo sapiens
agactgtatctcaga

SEQ ID NO: 1133242 - DNA, 15 bp, Homo sapiens
tagactgtatctcag

SEQ ID NO: 1133243 - DNA, 15 bp, Homo sapiens
gtagactgtatctca

SEQ ID NO: 1133244 - DNA, 15 bp, Homo sapiens
ggtagactgtatctc

SEQ ID NO: 1133245 - DNA, 15 bp, Homo sapiens
aggtagactgtatct

SEQ ID NO: 1133246 - DNA, 15 bp, Homo sapiens
gaggtagactgtatc

SEQ ID NO: 1133247 - DNA, 15 bp, Homo sapiens
agaggtagactgtat

SEQ ID NO: 1133248 - DNA, 15 bp, Homo sapiens
tagaggtagactgta

SEQ ID NO: 1133249 - DNA, 15 bp, Homo sapiens
ttagaggtagactgt

SEQ ID NO: 1133250 - DNA, 15 bp, Homo sapiens
tttagaggtagactg

SEQ ID NO: 1133251 - DNA, 15 bp, Homo sapiens
ttttagaggtagact

SEQ ID NO: 1133252 - DNA, 15 bp, Homo sapiens
tttttagaggtagac

SEQ ID NO: 1133253 - DNA, 15 bp, Homo sapiens
atttttagaggtaga

SEQ ID NO: 1133254 - DNA, 15 bp, Homo sapiens
tatttttagaggtag

SEQ ID NO: 1133255 - DNA, 15 bp, Homo sapiens
gtatttttagaggta

SEQ ID NO: 1133256 - DNA, 15 bp, Homo sapiens
tgtatttttagaggt

SEQ ID NO: 1133257 - DNA, 15 bp, Homo sapiens
atgtatttttagagg

SEQ ID NO: 1133258 - DNA, 15 bp, Homo sapiens
catgtatttttagag

SEQ ID NO: 1133259 - DNA, 15 bp, Homo sapiens
tcatgtatttttaga

SEQ ID NO: 1133260 - DNA, 15 bp, Homo sapiens
atcatgtatttttag

SEQ ID NO: 1133261 - DNA, 15 bp, Homo sapiens
aatcatgtattttta

SEQ ID NO: 1133262 - DNA, 15 bp, Homo sapiens
gaatcatgtattttt

SEQ ID NO: 1133263 - DNA, 15 bp, Homo sapiens
agaatcatgtatttt

SEQ ID NO: 1133264 - DNA, 15 bp, Homo sapiens
tagaatcatgtattt

SEQ ID NO: 1133265 - DNA, 15 bp, Homo sapiens
ttagaatcatgtatt

SEQ ID NO: 1133266 - DNA, 15 bp, Homo sapiens
gttagaatcatgtat

SEQ ID NO: 1133267 - DNA, 15 bp, Homo sapiens
tgttagaatcatgta

SEQ ID NO: 1133268 - DNA, 15 bp, Homo sapiens
atgttagaatcatgt

SEQ ID NO: 1133269 - DNA, 15 bp, Homo sapiens
aatgttagaatcatg

SEQ ID NO: 1133270 - DNA, 15 bp, Homo sapiens
gaatgttagaatcat

SEQ ID NO: 1133271 - DNA, 15 bp, Homo sapiens
agaatgttagaatca

SEQ ID NO: 1133272 - DNA, 15 bp, Homo sapiens
gagaatgttagaatc

SEQ ID NO: 1133273 - DNA, 15 bp, Homo sapiens
tgagaatgttagaat

SEQ ID NO: 1133274 - DNA, 15 bp, Homo sapiens
gtgagaatgttagaa

SEQ ID NO: 1133275 - DNA, 15 bp, Homo sapiens
agtgagaatgttaga

SEQ ID NO: 1133276 - DNA, 15 bp, Homo sapiens
aagtgagaatgttag

SEQ ID NO: 1133277 - DNA, 15 bp, Homo sapiens
aaagtgagaatgtta

SEQ ID NO: 1133278 - DNA, 15 bp, Homo sapiens
aaaagtgagaatgtt

SEQ ID NO: 1133279 - DNA, 15 bp, Homo sapiens
caaaagtgagaatgt

SEQ ID NO: 1133280 - DNA, 15 bp, Homo sapiens
acaaaagtgagaatg

SEQ ID NO: 1133281 - DNA, 15 bp, Homo sapiens
aacaaaagtgagaat

SEQ ID NO: 1133282 - DNA, 15 bp, Homo sapiens
caacaaaagtgagaa

SEQ ID NO: 1133283 - DNA, 15 bp, Homo sapiens
ccaacaaaagtgaga

SEQ ID NO: 1133284 - DNA, 15 bp, Homo sapiens
gccaacaaaagtgag

SEQ ID NO: 1133285 - DNA, 15 bp, Homo sapiens
tgccaacaaaagtga

SEQ ID NO: 1133286 - DNA, 15 bp, Homo sapiens
atgccaacaaaagtg

SEQ ID NO: 1133287 - DNA, 15 bp, Homo sapiens
aatgccaacaaaagt

SEQ ID NO: 1133288 - DNA, 15 bp, Homo sapiens
aaatgccaacaaaag

SEQ ID NO: 1133289 - DNA, 15 bp, Homo sapiens
caaatgccaacaaaa

SEQ ID NO: 1133290 - DNA, 15 bp, Homo sapiens
tcaaatgccaacaaa

SEQ ID NO: 1133291 - DNA, 15 bp, Homo sapiens
atcaaatgccaacaa

SEQ ID NO: 1133292 - DNA, 15 bp, Homo sapiens
gatcaaatgccaaca

SEQ ID NO: 1133293 - DNA, 15 bp, Homo sapiens
tgatcaaatgccaac

SEQ ID NO: 1133294 - DNA, 15 bp, Homo sapiens
ctgatcaaatgccaa

SEQ ID NO: 1133295 - DNA, 15 bp, Homo sapiens
cctgatcaaatgcca

SEQ ID NO: 1133296 - DNA, 15 bp, Homo sapiens
ccctgatcaaatgcc

SEQ ID NO: 1133297 - DNA, 15 bp, Homo sapiens
accctgatcaaatgc

SEQ ID NO: 1133298 - DNA, 15 bp, Homo sapiens
taccctgatcaaatg

SEQ ID NO: 1133299 - DNA, 15 bp, Homo sapiens
ataccctgatcaaat

SEQ ID NO: 1133300 - DNA, 15 bp, Homo sapiens
tataccctgatcaaa

SEQ ID NO: 1133301 - DNA, 15 bp, Homo sapiens
ctataccctgatcaa

SEQ ID NO: 1133302 - DNA, 15 bp, Homo sapiens
tctataccctgatca

SEQ ID NO: 1133303 - DNA, 15 bp, Homo sapiens
ttctataccctgatc

SEQ ID NO: 1133304 - DNA, 15 bp, Homo sapiens
tttctataccctgat

SEQ ID NO: 1133305 - DNA, 15 bp, Homo sapiens
ttttctataccctga

SEQ ID NO: 1133306 - DNA, 15 bp, Homo sapiens
tttttctataccctg

SEQ ID NO: 1133307 - DNA, 15 bp, Homo sapiens
gtttttctataccct

SEQ ID NO: 1133308 - DNA, 15 bp, Homo sapiens
tgtttttctataccc

SEQ ID NO: 1133309 - DNA, 15 bp, Homo sapiens
ctgtttttctatacc

SEQ ID NO: 1133310 - DNA, 15 bp, Homo sapiens
actgtttttctatac

SEQ ID NO: 1133311 - DNA, 15 bp, Homo sapiens
aactgtttttctata

SEQ ID NO: 1133312 - DNA, 15 bp, Homo sapiens
taactgtttttctat

SEQ ID NO: 1133313 - DNA, 15 bp, Homo sapiens
ttaactgtttttcta

SEQ ID NO: 1133314 - DNA, 15 bp, Homo sapiens
tttaactgtttttct

SEQ ID NO: 1133315 - DNA, 15 bp, Homo sapiens
ttttaactgtttttc

SEQ ID NO: 1133316 - DNA, 15 bp, Homo sapiens
cttttaactgttttt

SEQ ID NO: 1133317 - DNA, 15 bp, Homo sapiens
ccttttaactgtttt

SEQ ID NO: 1133318 - DNA, 15 bp, Homo sapiens
tccttttaactgttt

SEQ ID NO: 1133319 - DNA, 15 bp, Homo sapiens
gtccttttaactgtt

SEQ ID NO: 1133320 - DNA, 15 bp, Homo sapiens
tgtccttttaactgt

SEQ ID NO: 1133321 - DNA, 15 bp, Homo sapiens
ctgtccttttaactg

SEQ ID NO: 1133322 - DNA, 15 bp, Homo sapiens
tctgtccttttaact

SEQ ID NO: 1133323 - DNA, 15 bp, Homo sapiens
ctctgtccttttaac

SEQ ID NO: 1133324 - DNA, 15 bp, Homo sapiens
tctctgtccttttaa

SEQ ID NO: 1133325 - DNA, 15 bp, Homo sapiens
ttctctgtcctttta

SEQ ID NO: 1133326 - DNA, 15 bp, Homo sapiens
attctctgtcctttt

SEQ ID NO: 1133327 - DNA, 15 bp, Homo sapiens
cattctctgtccttt

SEQ ID NO: 1133328 - DNA, 15 bp, Homo sapiens
ccattctctgtcctt

SEQ ID NO: 1133329 - DNA, 15 bp, Homo sapiens
accattctctgtcct

SEQ ID NO: 1133330 - DNA, 15 bp, Homo sapiens
aaccattctctgtcc

SEQ ID NO: 1133331 - DNA, 15 bp, Homo sapiens
caaccattctctgtc

SEQ ID NO: 1133332 - DNA, 15 bp, Homo sapiens
tcaaccattctctgt

SEQ ID NO: 1133333 - DNA, 15 bp, Homo sapiens
ctcaaccattctctg

SEQ ID NO: 1133334 - DNA, 15 bp, Homo sapiens
tctcaaccattctct

SEQ ID NO: 1133335 - DNA, 15 bp, Homo sapiens
ctctcaaccattctc

SEQ ID NO: 1133336 - DNA, 15 bp, Homo sapiens
tctctcaaccattct

SEQ ID NO: 1133337 - DNA, 15 bp, Homo sapiens
atctctcaaccattc

SEQ ID NO: 1133338 - DNA, 15 bp, Homo sapiens
aatctctcaaccatt

SEQ ID NO: 1133339 - DNA, 15 bp, Homo sapiens
taatctctcaaccat

SEQ ID NO: 1133340 - DNA, 15 bp, Homo sapiens
ataatctctcaacca

SEQ ID NO: 1133341 - DNA, 15 bp, Homo sapiens
cataatctctcaacc

SEQ ID NO: 1133342 - DNA, 15 bp, Homo sapiens
tcataatctctcaac

SEQ ID NO: 1133343 - DNA, 15 bp, Homo sapiens
atcataatctctcaa

SEQ ID NO: 1133344 - DNA, 15 bp, Homo sapiens
tatcataatctctca

SEQ ID NO: 1133345 - DNA, 15 bp, Homo sapiens
atatcataatctctc

SEQ ID NO: 1133346 - DNA, 15 bp, Homo sapiens
catatcataatctct

SEQ ID NO: 1133347 - DNA, 15 bp, Homo sapiens
tcatatcataatctc

SEQ ID NO: 1133348 - DNA, 15 bp, Homo sapiens
ttcatatcataatct

SEQ ID NO: 1133349 - DNA, 15 bp, Homo sapiens
cttcatatcataatc

SEQ ID NO: 1133350 - DNA, 15 bp, Homo sapiens
tcttcatatcataat

SEQ ID NO: 1133351 - DNA, 15 bp, Homo sapiens
ctcttcatatcataa

SEQ ID NO: 1133352 - DNA, 15 bp, Homo sapiens
tctcttcatatcata

SEQ ID NO: 1133353 - DNA, 15 bp, Homo sapiens
ttctcttcatatcat

SEQ ID NO: 1133354 - DNA, 15 bp, Homo sapiens
tttctcttcatatca

SEQ ID NO: 1133355 - DNA, 15 bp, Homo sapiens
ttttctcttcatatc

SEQ ID NO: 1133356 - DNA, 15 bp, Homo sapiens
attttctcttcatat

SEQ ID NO: 1133357 - DNA, 15 bp, Homo sapiens
cattttctcttcata

SEQ ID NO: 1133358 - DNA, 15 bp, Homo sapiens
acattttctcttcat

SEQ ID NO: 1133359 - DNA, 15 bp, Homo sapiens
cacattttctcttca

SEQ ID NO: 1133360 - DNA, 15 bp, Homo sapiens
tcacattttctcttc

SEQ ID NO: 1133361 - DNA, 15 bp, Homo sapiens
atcacattttctctt

SEQ ID NO: 1133362 - DNA, 15 bp, Homo sapiens
aatcacattttctct

SEQ ID NO: 1133363 - DNA, 15 bp, Homo sapiens
caatcacattttctc

SEQ ID NO: 1133364 - DNA, 15 bp, Homo sapiens
tcaatcacattttct

SEQ ID NO: 1133365 - DNA, 15 bp, Homo sapiens
ctcaatcacattttc

SEQ ID NO: 1133366 - DNA, 15 bp, Homo sapiens
actcaatcacatttt

SEQ ID NO: 1133367 - DNA, 15 bp, Homo sapiens
cactcaatcacattt

SEQ ID NO: 1133368 - DNA, 15 bp, Homo sapiens
acactcaatcacatt

SEQ ID NO: 1133369 - DNA, 15 bp, Homo sapiens
cacactcaatcacat

SEQ ID NO: 1133370 - DNA, 15 bp, Homo sapiens
ccacactcaatcaca

SEQ ID NO: 1133371 - DNA, 15 bp, Homo sapiens
accacactcaatcac

SEQ ID NO: 1133372 - DNA, 15 bp, Homo sapiens
taccacactcaatca

SEQ ID NO: 1133373 - DNA, 15 bp, Homo sapiens
ctaccacactcaatc

SEQ ID NO: 1133374 - DNA, 15 bp, Homo sapiens
tctaccacactcaat

SEQ ID NO: 1133375 - DNA, 15 bp, Homo sapiens
gtctaccacactcaa

SEQ ID NO: 1133376 - DNA, 15 bp, Homo sapiens
agtctaccacactca

SEQ ID NO: 1133377 - DNA, 15 bp, Homo sapiens
aagtctaccacactc

SEQ ID NO: 1133378 - DNA, 15 bp, Homo sapiens
caagtctaccacact

SEQ ID NO: 1133379 - DNA, 15 bp, Homo sapiens
ccaagtctaccacac

SEQ ID NO: 1133380 - DNA, 15 bp, Homo sapiens
cccaagtctaccaca

SEQ ID NO: 1133381 - DNA, 15 bp, Homo sapiens
ccccaagtctaccac

SEQ ID NO: 1133382 - DNA, 15 bp, Homo sapiens
gccccaagtctacca

SEQ ID NO: 1133383 - DNA, 15 bp, Homo sapiens
ggccccaagtctacc

SEQ ID NO: 1133384 - DNA, 15 bp, Homo sapiens
aggccccaagtctac

SEQ ID NO: 1133385 - DNA, 15 bp, Homo sapiens
caggccccaagtcta

SEQ ID NO: 1133386 - DNA, 15 bp, Homo sapiens
gcaggccccaagtct

SEQ ID NO: 1133387 - DNA, 15 bp, Homo sapiens
agcaggccccaagtc

SEQ ID NO: 1133388 - DNA, 15 bp, Homo sapiens
aagcaggccccaagt

SEQ ID NO: 1133389 - DNA, 15 bp, Homo sapiens
caagcaggccccaag

SEQ ID NO: 1133390 - DNA, 15 bp, Homo sapiens
tcaagcaggccccaa

SEQ ID NO: 1133391 - DNA, 15 bp, Homo sapiens
ttcaagcaggcccca

SEQ ID NO: 1133392 - DNA, 15 bp, Homo sapiens
attcaagcaggcccc

SEQ ID NO: 1133393 - DNA, 15 bp, Homo sapiens
cattcaagcaggccc

SEQ ID NO: 1133394 - DNA, 15 bp, Homo sapiens
acattcaagcaggcc

SEQ ID NO: 1133395 - DNA, 15 bp, Homo sapiens
aacattcaagcaggc

SEQ ID NO: 1133396 - DNA, 15 bp, Homo sapiens
caacattcaagcagg

SEQ ID NO: 1133397 - DNA, 15 bp, Homo sapiens
tcaacattcaagcag

SEQ ID NO: 1133398 - DNA, 15 bp, Homo sapiens
ctcaacattcaagca

SEQ ID NO: 1133399 - DNA, 15 bp, Homo sapiens
tctcaacattcaagc

SEQ ID NO: 1133400 - DNA, 15 bp, Homo sapiens
ctctcaacattcaag

SEQ ID NO: 1133401 - DNA, 15 bp, Homo sapiens
tctctcaacattcaa

SEQ ID NO: 1133402 - DNA, 15 bp, Homo sapiens
ttctctcaacattca

SEQ ID NO: 1133403 - DNA, 15 bp, Homo sapiens
attctctcaacattc

SEQ ID NO: 1133404 - DNA, 15 bp, Homo sapiens
cattctctcaacatt

SEQ ID NO: 1133405 - DNA, 15 bp, Homo sapiens
tcattctctcaacat

SEQ ID NO: 1133406 - DNA, 15 bp, Homo sapiens
gtcattctctcaaca

SEQ ID NO: 1133407 - DNA, 15 bp, Homo sapiens
agtcattctctcaac

SEQ ID NO: 1133408 - DNA, 15 bp, Homo sapiens
cagtcattctctcaa

SEQ ID NO: 1133409 - DNA, 15 bp, Homo sapiens
acagtcattctctca

SEQ ID NO: 1133410 - DNA, 15 bp, Homo sapiens
aacagtcattctctc

SEQ ID NO: 1133411 - DNA, 15 bp, Homo sapiens
aaacagtcattctct

SEQ ID NO: 1133412 - DNA, 15 bp, Homo sapiens
aaaacagtcattctc

SEQ ID NO: 1133413 - DNA, 15 bp, Homo sapiens
gaaaacagtcattct

SEQ ID NO: 1133414 - DNA, 15 bp, Homo sapiens
ggaaaacagtcattc

SEQ ID NO: 1133415 - DNA, 15 bp, Homo sapiens
cggaaaacagtcatt

SEQ ID NO: 1133416 - DNA, 15 bp, Homo sapiens
tcggaaaacagtcat

SEQ ID NO: 1133417 - DNA, 15 bp, Homo sapiens
atcggaaaacagtca

SEQ ID NO: 1133418 - DNA, 15 bp, Homo sapiens
tatcggaaaacagtc

SEQ ID NO: 1133419 - DNA, 15 bp, Homo sapiens
ttatcggaaaacagt

SEQ ID NO: 1133420 - DNA, 15 bp, Homo sapiens
tttatcggaaaacag

SEQ ID NO: 1133421 - DNA, 15 bp, Homo sapiens
ttttatcggaaaaca

SEQ ID NO: 1133422 - DNA, 15 bp, Homo sapiens
tttttatcggaaaac

SEQ ID NO: 1133423 - DNA, 15 bp, Homo sapiens
ttttttatcggaaaa

SEQ ID NO: 1133424 - DNA, 15 bp, Homo sapiens
tttttttatcggaaa

SEQ ID NO: 1133425 - DNA, 15 bp, Homo sapiens
ttttttttatcggaa

SEQ ID NO: 1133426 - DNA, 15 bp, Homo sapiens
tttttttttatcgga

SEQ ID NO: 1133427 - DNA, 15 bp, Homo sapiens
ttttttttttatcgg

SEQ ID NO: 1133428 - DNA, 15 bp, Homo sapiens
tttttttttttatcg

SEQ ID NO: 1133429 - DNA, 15 bp, Homo sapiens
ctttttttttttatc

SEQ ID NO: 1133430 - DNA, 15 bp, Homo sapiens
actttttttttttat

SEQ ID NO: 1133431 - DNA, 15 bp, Homo sapiens
gacttttttttttta

SEQ ID NO: 1133432 - DNA, 15 bp, Homo sapiens
ggacttttttttttt

SEQ ID NO: 1133433 - DNA, 15 bp, Homo sapiens
tggactttttttttt

SEQ ID NO: 1133434 - DNA, 15 bp, Homo sapiens
atggacttttttttt

SEQ ID NO: 1133435 - DNA, 15 bp, Homo sapiens
aatggactttttttt

SEQ ID NO: 1133436 - DNA, 15 bp, Homo sapiens
gaatggacttttttt

SEQ ID NO: 1133437 - DNA, 15 bp, Homo sapiens
agaatggactttttt

SEQ ID NO: 1133438 - DNA, 15 bp, Homo sapiens
tagaatggacttttt

SEQ ID NO: 1133439 - DNA, 15 bp, Homo sapiens
ctagaatggactttt

SEQ ID NO: 1133440 - DNA, 15 bp, Homo sapiens
cctagaatggacttt

SEQ ID NO: 1133441 - DNA, 15 bp, Homo sapiens
tcctagaatggactt

SEQ ID NO: 1133442 - DNA, 15 bp, Homo sapiens
atcctagaatggact

SEQ ID NO: 1133443 - DNA, 15 bp, Homo sapiens
gatcctagaatggac

SEQ ID NO: 1133444 - DNA, 15 bp, Homo sapiens
ggatcctagaatgga

SEQ ID NO: 1133445 - DNA, 15 bp, Homo sapiens
aggatcctagaatgg

SEQ ID NO: 1133446 - DNA, 15 bp, Homo sapiens
taggatcctagaatg

SEQ ID NO: 1133447 - DNA, 15 bp, Homo sapiens
ttaggatcctagaat

SEQ ID NO: 1133448 - DNA, 15 bp, Homo sapiens
tttaggatcctagaa

SEQ ID NO: 1133449 - DNA, 15 bp, Homo sapiens
ttttaggatcctaga

SEQ ID NO: 1133450 - DNA, 15 bp, Homo sapiens
cttttaggatcctag

SEQ ID NO: 1133451 - DNA, 15 bp, Homo sapiens
tcttttaggatccta

SEQ ID NO: 1133452 - DNA, 15 bp, Homo sapiens
ttcttttaggatcct

SEQ ID NO: 1133453 - DNA, 15 bp, Homo sapiens
cttcttttaggatcc

SEQ ID NO: 1133454 - DNA, 15 bp, Homo sapiens
ccttcttttaggatc

SEQ ID NO: 1133455 - DNA, 15 bp, Homo sapiens
cccttcttttaggat

SEQ ID NO: 1133456 - DNA, 15 bp, Homo sapiens
acccttcttttagga

SEQ ID NO: 1133457 - DNA, 15 bp, Homo sapiens
gacccttcttttagg

SEQ ID NO: 1133458 - DNA, 15 bp, Homo sapiens
agacccttcttttag

SEQ ID NO: 1133459 - DNA, 15 bp, Homo sapiens
cagacccttctttta

SEQ ID NO: 1133460 - DNA, 15 bp, Homo sapiens
tcagacccttctttt

SEQ ID NO: 1133461 - DNA, 15 bp, Homo sapiens
ttcagacccttcttt

SEQ ID NO: 1133462 - DNA, 15 bp, Homo sapiens
cttcagacccttctt

SEQ ID NO: 1133463 - DNA, 15 bp, Homo sapiens
acttcagacccttct

SEQ ID NO: 1133464 - DNA, 15 bp, Homo sapiens
aacttcagacccttc

SEQ ID NO: 1133465 - DNA, 15 bp, Homo sapiens
gaacttcagaccctt

SEQ ID NO: 1133466 - DNA, 15 bp, Homo sapiens
tgaacttcagaccct

SEQ ID NO: 1133467 - DNA, 15 bp, Homo sapiens
gtgaacttcagaccc

SEQ ID NO: 1133468 - DNA, 15 bp, Homo sapiens
agtgaacttcagacc

SEQ ID NO: 1133469 - DNA, 15 bp, Homo sapiens
cagtgaacttcagac

SEQ ID NO: 1133470 - DNA, 15 bp, Homo sapiens
gcagtgaacttcaga

SEQ ID NO: 1133471 - DNA, 15 bp, Homo sapiens
tgcagtgaacttcag

SEQ ID NO: 1133472 - DNA, 15 bp, Homo sapiens
ctgcagtgaacttca

SEQ ID NO: 1133473 - DNA, 15 bp, Homo sapiens
tctgcagtgaacttc

SEQ ID NO: 1133474 - DNA, 15 bp, Homo sapiens
ttctgcagtgaactt

SEQ ID NO: 1133475 - DNA, 15 bp, Homo sapiens
tttctgcagtgaact

SEQ ID NO: 1133476 - DNA, 15 bp, Homo sapiens
ctttctgcagtgaac

SEQ ID NO: 1133477 - DNA, 15 bp, Homo sapiens
gctttctgcagtgaa

SEQ ID NO: 1133478 - DNA, 15 bp, Homo sapiens
tgctttctgcagtga

SEQ ID NO: 1133479 - DNA, 15 bp, Homo sapiens
ttgctttctgcagtg

SEQ ID NO: 1133480 - DNA, 15 bp, Homo sapiens
cttgctttctgcagt

SEQ ID NO: 1133481 - DNA, 15 bp, Homo sapiens
gcttgctttctgcag

SEQ ID NO: 1133482 - DNA, 15 bp, Homo sapiens
agcttgctttctgca

SEQ ID NO: 1133483 - DNA, 15 bp, Homo sapiens
tagcttgctttctgc

SEQ ID NO: 1133484 - DNA, 15 bp, Homo sapiens
gtagcttgctttctg

SEQ ID NO: 1133485 - DNA, 15 bp, Homo sapiens
tgtagcttgctttct

SEQ ID NO: 1133486 - DNA, 15 bp, Homo sapiens
atgtagcttgctttc

SEQ ID NO: 1133487 - DNA, 15 bp, Homo sapiens
tatgtagcttgcttt

SEQ ID NO: 1133488 - DNA, 15 bp, Homo sapiens
ctatgtagcttgctt

SEQ ID NO: 1133489 - DNA, 15 bp, Homo sapiens
actatgtagcttgct

SEQ ID NO: 1133490 - DNA, 15 bp, Homo sapiens
tactatgtagcttgc

SEQ ID NO: 1133491 - DNA, 15 bp, Homo sapiens
gtactatgtagcttg

SEQ ID NO: 1133492 - DNA, 15 bp, Homo sapiens
agtactatgtagctt

SEQ ID NO: 1133493 - DNA, 15 bp, Homo sapiens
tagtactatgtagct

SEQ ID NO: 1133494 - DNA, 15 bp, Homo sapiens
ttagtactatgtagc

SEQ ID NO: 1133495 - DNA, 15 bp, Homo sapiens
cttagtactatgtag

SEQ ID NO: 1133496 - DNA, 15 bp, Homo sapiens
gcttagtactatgta

SEQ ID NO: 1133497 - DNA, 15 bp, Homo sapiens
ggcttagtactatgt

SEQ ID NO: 1133498 - DNA, 15 bp, Homo sapiens
tggcttagtactatg

SEQ ID NO: 1133499 - DNA, 15 bp, Homo sapiens
gtggcttagtactat

SEQ ID NO: 1133500 - DNA, 15 bp, Homo sapiens
agtggcttagtacta

SEQ ID NO: 1133501 - DNA, 15 bp, Homo sapiens
tagtggcttagtact

SEQ ID NO: 1133502 - DNA, 15 bp, Homo sapiens
ttagtggcttagtac

SEQ ID NO: 1133503 - DNA, 15 bp, Homo sapiens
cttagtggcttagta

SEQ ID NO: 1133504 - DNA, 15 bp, Homo sapiens
ccttagtggcttagt

SEQ ID NO: 1133505 - DNA, 15 bp, Homo sapiens
cccttagtggcttag

SEQ ID NO: 1133506 - DNA, 15 bp, Homo sapiens
ccccttagtggctta

SEQ ID NO: 1133507 - DNA, 15 bp, Homo sapiens
tccccttagtggctt

SEQ ID NO: 1133508 - DNA, 15 bp, Homo sapiens
gtccccttagtggct
